United States Patent Application Publication US 2005/0255487 A1 - sequence listing, part 30

SEQ ID NO: 812022 - RNA, 19 nt, Homo sapiens
  misc_RNA (1)...(19): siRNA sense strand
gcaaugggcuguggaacau

SEQ ID NO: 812023 - RNA, 19 nt, Homo sapiens
  misc_RNA (1)...(19): siRNA sense strand
ccaaguacaugccggaaug

SEQ ID NO: 812024 - RNA, 19 nt, Homo sapiens
  misc_RNA (1)...(19): siRNA sense strand
ucaaguugguuuacaagaa

SEQ ID NO: 812025 - RNA, 19 nt, Homo sapiens
  misc_RNA (1)...(19): siRNA sense strand
gacaacauauugaaaugga

SEQ ID NO: 812026 - RNA, 19 nt, Homo sapiens
  misc_RNA (1)...(19): siRNA sense strand
ggaaagaggguccuuacug

SEQ ID NO: 812027 - RNA, 19 nt, Homo sapiens
  misc_RNA (1)...(19): siRNA sense strand
ccaagagaaucuaacaaau

SEQ ID NO: 812028 - RNA, 19 nt, Homo sapiens
  misc_RNA (1)...(19): siRNA sense strand
ugaauugccagcagauuua

SEQ ID NO: 812029 - RNA, 19 nt, Homo sapiens
  misc_RNA (1)...(19): siRNA sense strand
caaagccacucaaaguuca

SEQ ID NO: 812030 - RNA, 19 nt, Homo sapiens
  misc_RNA (1)...(19): siRNA sense strand
ggcauugacuggcaacauu

SEQ ID NO: 812031 - RNA, 19 nt, Homo sapiens
  misc_RNA (1)...(19): siRNA sense strand
gcauuacaguuucuuagga

SEQ ID NO: 812032 - RNA, 19 nt, Homo sapiens
  misc_RNA (1)...(19): siRNA sense strand
gcaagcaacugaccucacu

SEQ ID NO: 812033 - RNA, 19 nt, Homo sapiens
  misc_RNA (1)...(19): siRNA sense strand
gagauuauccaucaguuga

SEQ ID NO: 812034 - RNA, 19 nt, Homo sapiens
  misc_RNA (1)...(19): siRNA sense strand
ccucuuagaugucuuguuc

SEQ ID NO: 812035 - RNA, 19 nt, Homo sapiens
  misc_RNA (1)...(19): siRNA sense strand
gacauucaguggaaacuau

SEQ ID NO: 812036 - RNA, 19 nt, Homo sapiens
  misc_RNA (1)...(19): siRNA sense strand
cagaugagcugaggcagaa

SEQ ID NO: 812037 - RNA, 19 nt, Homo sapiens
  misc_RNA (1)...(19): siRNA sense strand
gcuauuacguuucgguaug

SEQ ID NO: 812038 - RNA, 19 nt, Homo sapiens
  misc_RNA (1)...(19): siRNA sense strand
gaaagaauuuugagugaug

SEQ ID NO: 812039 - RNA, 19 nt, Homo sapiens
  misc_RNA (1)...(19): siRNA sense strand
gacaauucguuacauguau

SEQ ID NO: 812040 - RNA, 19 nt, Homo sapiens
  misc_RNA (1)...(19): siRNA sense strand
ggauaugccuggucagagu

SEQ ID NO: 812041 - RNA, 19 nt, Homo sapiens
  misc_RNA (1)...(19): siRNA sense strand
gacgugagauguuugacaa

SEQ ID NO: 812042 - RNA, 19 nt, Homo sapiens
  misc_RNA (1)...(19): siRNA sense strand
ccacucaaaguucaaguua

SEQ ID NO: 812043 - RNA, 19 nt, Homo sapiens
  misc_RNA (1)...(19): siRNA sense strand
ucacaccuaugaacaaguu

SEQ ID NO: 812044 - RNA, 19 nt, Homo sapiens
  misc_RNA (1)...(19): siRNA sense strand
ggacuggugugcuucagau

SEQ ID NO: 812045 - RNA, 19 nt, Homo sapiens
  misc_RNA (1)...(19): siRNA sense strand
gcuauaagauauccaagag

SEQ ID NO: 812046 - RNA, 19 nt, Homo sapiens
  misc_RNA (1)...(19): siRNA sense strand
ccugaaguguucugcuuua

SEQ ID NO: 812047 - RNA, 19 nt, Homo sapiens
  misc_RNA (1)...(19): siRNA sense strand
gcuccuaccucuaagugaa

SEQ ID NO: 812048 - RNA, 19 nt, Homo sapiens
  misc_RNA (1)...(19): siRNA sense strand
gguaugcaguagaaauauu

SEQ ID NO: 812049 - RNA, 19 nt, Homo sapiens
  misc_RNA (1)...(19): siRNA sense strand
ugcaaaggguguuacauuu

SEQ ID NO: 812050 - RNA, 19 nt, Homo sapiens
  misc_RNA (1)...(19): siRNA sense strand
cagcagaacaauacucuaa

SEQ ID NO: 812051 - RNA, 19 nt, Homo sapiens
  misc_RNA (1)...(19): siRNA sense strand
gcguaggucuguucgauau

SEQ ID NO: 812052 - RNA, 19 nt, Homo sapiens
  misc_RNA (1)...(19): siRNA sense strand
gcaaacaaaccuucucauc

SEQ ID NO: 812053 - RNA, 19 nt, Homo sapiens
  misc_RNA (1)...(19): siRNA sense strand
ugaugaagauaaaccauug

SEQ ID NO: 812054 - RNA, 19 nt, Homo sapiens
  misc_RNA (1)...(19): siRNA sense strand
ccaaucacacuaagcauuu

SEQ ID NO: 812055 - RNA, 19 nt, Homo sapiens
  misc_RNA (1)...(19): siRNA sense strand
uaacaccucugaaauugag

SEQ ID NO: 812056 - RNA, 19 nt, Homo sapiens
  misc_RNA (1)...(19): siRNA sense strand
ucaagaagauucagaagcu

SEQ ID NO: 812057 - RNA, 19 nt, Homo sapiens
  misc_RNA (1)...(19): siRNA sense strand
gaucuuacuuaccucaugu

SEQ ID NO: 812058 - RNA, 19 nt, Homo sapiens
  misc_RNA (1)...(19): siRNA sense strand
caucacuggugccuaauga

SEQ ID NO: 812059 - RNA, 19 nt, Homo sapiens
  misc_RNA (1)...(19): siRNA sense strand
gcauggcacuacaagaaga

SEQ ID NO: 812060 - RNA, 19 nt, Homo sapiens
  misc_RNA (1)...(19): siRNA sense strand
gagagauuauccaucaguu

SEQ ID NO: 812061 - RNA, 19 nt, Homo sapiens
  misc_RNA (1)...(19): siRNA sense strand
gcuuugaacuuuaucagau

SEQ ID NO: 812062 - RNA, 19 nt, Homo sapiens
  misc_RNA (1)...(19): siRNA sense strand
gauagaacacccucuuaga

SEQ ID NO: 812063 - RNA, 19 nt, Homo sapiens
  misc_RNA (1)...(19): siRNA sense strand
gauacuguguuucccaaga

SEQ ID NO: 812064 - RNA, 19 nt, Homo sapiens
  misc_RNA (1)...(19): siRNA sense strand
caaguaggacaacauauug

SEQ ID NO: 812065 - RNA, 19 nt, Homo sapiens
  misc_RNA (1)...(19): siRNA sense strand
acuauuugcuguucgauuu

SEQ ID NO: 812066 - RNA, 19 nt, Homo sapiens
  misc_RNA (1)...(19): siRNA sense strand
gcaacagagauuacgcuua

SEQ ID NO: 812067 - RNA, 19 nt, Homo sapiens
  misc_RNA (1)...(19): siRNA sense strand
gggaugaacucuucuuuaa

SEQ ID NO: 812068 - RNA, 19 nt, Homo sapiens
  misc_RNA (1)...(19): siRNA sense strand
ccacuucccugcaaucaua

SEQ ID NO: 812069 - RNA, 19 nt, Homo sapiens
  misc_RNA (1)...(19): siRNA sense strand
uagaagagcuuuacucaau

SEQ ID NO: 812070 - RNA, 19 nt, Homo sapiens
  misc_RNA (1)...(19): siRNA sense strand
gaccugagcugagagagua

SEQ ID NO: 812071 - RNA, 19 nt, Homo sapiens
  misc_RNA (1)...(19): siRNA sense strand
caaaggagagggagagaua

SEQ ID NO: 812072 - RNA, 19 nt, Homo sapiens
  misc_RNA (1)...(19): siRNA sense strand
gaagaagcccugaaagaga

SEQ ID NO: 812073 - RNA, 19 nt, Homo sapiens
  misc_RNA (1)...(19): siRNA sense strand
caaauaaggaucugaagaa

SEQ ID NO: 812074 - RNA, 19 nt, Homo sapiens
  misc_RNA (1)...(19): siRNA sense strand
ggaacgugguggcugauuu

SEQ ID NO: 812075 - RNA, 19 nt, Homo sapiens
  misc_RNA (1)...(19): siRNA sense strand
gcacggcgaucugugauug

SEQ ID NO: 812076 - RNA, 19 nt, Homo sapiens
  misc_RNA (1)...(19): siRNA sense strand
cgacagggcugaauuucug

SEQ ID NO: 812077 - RNA, 19 nt, Homo sapiens
  misc_RNA (1)...(19): siRNA sense strand
uaagagaccugagcugaga

SEQ ID NO: 812078 - RNA, 19 nt, Homo sapiens
  misc_RNA (1)...(19): siRNA sense strand
ggaguggaaucaucaggaa

SEQ ID NO: 812079 - RNA, 19 nt, Homo sapiens
  misc_RNA (1)...(19): siRNA sense strand
gaagagaggaauugaagga

SEQ ID NO: 812080 - RNA, 19 nt, Homo sapiens
  misc_RNA (1)...(19): siRNA sense strand
gcucuagggugccagguuu

SEQ ID NO: 812081 - RNA, 19 nt, Homo sapiens
  misc_RNA (1)...(19): siRNA sense strand
gaccaaauguguucaaagg

SEQ ID NO: 812082 - RNA, 19 nt, Homo sapiens
  misc_RNA (1)...(19): siRNA sense strand
gcacaaauaaggaucugaa

SEQ ID NO: 812083 - RNA, 19 nt, Homo sapiens
  misc_RNA (1)...(19): siRNA sense strand
ucacauccauucugacaug

SEQ ID NO: 812084 - RNA, 19 nt, Homo sapiens
  misc_RNA (1)...(19): siRNA sense strand
ggacuucuccagcacaauu

SEQ ID NO: 812085 - RNA, 19 nt, Homo sapiens
  misc_RNA (1)...(19): siRNA sense strand
gaugaccucuccauugugu

SEQ ID NO: 812086 - RNA, 19 nt, Homo sapiens
  misc_RNA (1)...(19): siRNA sense strand
gagaggaauugaaggaaca

SEQ ID NO: 812087 - RNA, 19 nt, Homo sapiens
  misc_RNA (1)...(19): siRNA sense strand
gaagaaagccauuuuggaa

SEQ ID NO: 812088 - RNA, 19 nt, Homo sapiens
  misc_RNA (1)...(19): siRNA sense strand
gaagauauggugagguuag

SEQ ID NO: 812089 - RNA, 19 nt, Homo sapiens
  misc_RNA (1)...(19): siRNA sense strand
gcugagagaguacuucaaa

SEQ ID NO: 812090 - RNA, 19 nt, Homo sapiens
  misc_RNA (1)...(19): siRNA sense strand
ccaccacccucgugaguau

SEQ ID NO: 812091 - RNA, 19 nt, Homo sapiens
  misc_RNA (1)...(19): siRNA sense strand
gcaggaacucuuaaaauua

SEQ ID NO: 812092 - RNA, 19 nt, Homo sapiens
  misc_RNA (1)...(19): siRNA sense strand
gaaggaacauaugcagauc

SEQ ID NO: 812093 - RNA, 19 nt, Homo sapiens
  misc_RNA (1)...(19): siRNA sense strand
gcuauccgcuacaucauca

SEQ ID NO: 812094 - RNA, 19 nt, Homo sapiens
  misc_RNA (1)...(19): siRNA sense strand
uggaagauauggugagguu

SEQ ID NO: 812095 - RNA, 19 nt, Homo sapiens
  misc_RNA (1)...(19): siRNA sense strand
ggcaggaacucuuaaaauu

SEQ ID NO: 812096 - RNA, 19 nt, Homo sapiens
  misc_RNA (1)...(19): siRNA sense strand
uaucugggaugaacucuuc

SEQ ID NO: 812097 - RNA, 19 nt, Homo sapiens
  misc_RNA (1)...(19): siRNA sense strand
ugagcuaggugacuuggaa

SEQ ID NO: 812098 - RNA, 19 nt, Homo sapiens
  misc_RNA (1)...(19): siRNA sense strand
gcucguugauguugaggaa

SEQ ID NO: 812099 - RNA, 19 nt, Homo sapiens
  misc_RNA (1)...(19): siRNA sense strand
gaacuacugggccugcaaa

SEQ ID NO: 812100 - RNA, 19 nt, Homo sapiens
  misc_RNA (1)...(19): siRNA sense strand
gggaaugggcccugucuug

SEQ ID NO: 812101 - RNA, 19 nt, Homo sapiens
  misc_RNA (1)...(19): siRNA sense strand
gacauguucucaguucaaa

SEQ ID NO: 812102 - RNA, 19 nt, Homo sapiens
  misc_RNA (1)...(19): siRNA sense strand
ccauucacauccauucuga

SEQ ID NO: 812103 - RNA, 19 nt, Homo sapiens
  misc_RNA (1)...(19): siRNA sense strand
ggaauugaaggaacauaug

SEQ ID NO: 812104 - RNA, 19 nt, Homo sapiens
  misc_RNA (1)...(19): siRNA sense strand
ccgagaagauugagaacau

SEQ ID NO: 812105 - RNA, 19 nt, Homo sapiens
  misc_RNA (1)...(19): siRNA sense strand
gagcuggccugcuacacau

SEQ ID NO: 812106 - RNA, 19 nt, Homo sapiens
  misc_RNA (1)...(19): siRNA sense strand
gaacgugguggcugauuuc

SEQ ID NO: 812107 - RNA, 19 nt, Homo sapiens
  misc_RNA (1)...(19): siRNA sense strand
caacaguucugggauuucu

SEQ ID NO: 812108 - RNA, 19 nt, Homo sapiens
  misc_RNA (1)...(19): siRNA sense strand
cgugguggcugauuucuca

SEQ ID NO: 812109 - RNA, 19 nt, Homo sapiens
  misc_RNA (1)...(19): siRNA sense strand
gaugcagucagaagaagua

SEQ ID NO: 812110 - RNA, 19 nt, Homo sapiens
  misc_RNA (1)...(19): siRNA sense strand
gcaaacacaccauuaaagc

SEQ ID NO: 812111 - RNA, 19 nt, Homo sapiens
  misc_RNA (1)...(19): siRNA sense strand
ggugcagucugucgucuau

SEQ ID NO: 812112 - RNA, 19 nt, Homo sapiens
  misc_RNA (1)...(19): siRNA sense strand
uaaacuugcucagggagaa

SEQ ID NO: 812113 - RNA, 19 nt, Homo sapiens
  misc_RNA (1)...(19): siRNA sense strand
gaugaugcccggaccaugu

SEQ ID NO: 812114 - RNA, 19 nt, Homo sapiens
  misc_RNA (1)...(19): siRNA sense strand
gaagagcuuuacucaaucc

SEQ ID NO: 812115 - RNA, 19 nt, Homo sapiens
  misc_RNA (1)...(19): siRNA sense strand
gagaggaccaaauguguuc

SEQ ID NO: 812116 - RNA, 19 nt, Homo sapiens
  misc_RNA (1)...(19): siRNA sense strand
caccaacaguucugggauu

SEQ ID NO: 812117 - RNA, 19 nt, Homo sapiens
  misc_RNA (1)...(19): siRNA sense strand
cugaugaccucuccauugu

SEQ ID NO: 812118 - RNA, 19 nt, Homo sapiens
  misc_RNA (1)...(19): siRNA sense strand
ggaggacuguggccaagag

SEQ ID NO: 812119 - RNA, 19 nt, Homo sapiens
  misc_RNA (1)...(19): siRNA sense strand
gccuuuagcacacauguuu

SEQ ID NO: 812120 - RNA, 19 nt, Homo sapiens
  misc_RNA (1)...(19): siRNA sense strand
ccaggcaaacacaccauua

SEQ ID NO: 812121 - RNA, 19 nt, Homo sapiens
  misc_RNA (1)...(19): siRNA sense strand
ggacuguggccaagagaau

SEQ ID NO: 812122 - RNA, 19 nt, Homo sapiens
  misc_RNA (1)...(19): siRNA sense strand
auaaggaucugaagaaagc

SEQ ID NO: 812123 - RNA, 19 nt, Homo sapiens
  misc_RNA (1)...(19): siRNA sense strand
cuacugggccugcaaagga

SEQ ID NO: 812124 - RNA, 19 nt, Homo sapiens
  misc_RNA (1)...(19): siRNA sense strand
uagagcauguggagaggaa

SEQ ID NO: 812125 - RNA, 19 nt, Homo sapiens
  misc_RNA (1)...(19): siRNA sense strand
gguuaaagccauucacauc

SEQ ID NO: 812126 - RNA, 19 nt, Homo sapiens
  misc_RNA (1)...(19): siRNA sense strand
gcucagggagaauauguug

SEQ ID NO: 812127 - RNA, 19 nt, Homo sapiens
  misc_RNA (1)...(19): siRNA sense strand
cgaagaagcccugaaagag

SEQ ID NO: 812128 - RNA, 19 nt, Homo sapiens
  misc_RNA (1)...(19): siRNA sense strand
gcacgacagggaacccaaa

SEQ ID NO: 812129 - RNA, 19 nt, Homo sapiens
  misc_RNA (1)...(19): siRNA sense strand
cagaagagaggaauugaag

SEQ ID NO: 812130 - RNA, 19 nt, Homo sapiens
  misc_RNA (1)...(19): siRNA sense strand
ggaugaacucuucuuuaau

SEQ ID NO: 812131 - RNA, 19 nt, Homo sapiens
  misc_RNA (1)...(19): siRNA sense strand
ccagguuuaugaagguuau

SEQ ID NO: 812132 - RNA, 19 nt, Homo sapiens
  misc_RNA (1)...(19): siRNA sense strand
cauccauucugacauguuc

SEQ ID NO: 812133 - RNA, 19 nt, Homo sapiens
  misc_RNA (1)...(19): siRNA sense strand
gaucugaagaaagccauuu

SEQ ID NO: 812134 - RNA, 19 nt, Homo sapiens
  misc_RNA (1)...(19): siRNA sense strand
ugaaggaacauaugcagau

SEQ ID NO: 812135 - RNA, 19 nt, Homo sapiens
  misc_RNA (1)...(19): siRNA sense strand
ggagcuggccugcuacaca

SEQ ID NO: 812136 - RNA, 19 nt, Homo sapiens
  misc_RNA (1)...(19): siRNA sense strand
gauauggugagguuaggaa

SEQ ID NO: 812137 - RNA, 19 nt, Homo sapiens
  misc_RNA (1)...(19): siRNA sense strand
uugaggaacugaacuacug

SEQ ID NO: 812138 - RNA, 19 nt, Homo sapiens
  misc_RNA (1)...(19): siRNA sense strand
caggcaaacacaccauuaa

SEQ ID NO: 812139 - RNA, 19 nt, Homo sapiens
  misc_RNA (1)...(19): siRNA sense strand
ucgaagaagcccugaaaga

SEQ ID NO: 812140 - RNA, 19 nt, Homo sapiens
  misc_RNA (1)...(19): siRNA sense strand
uguaaagcaugcacugauc

SEQ ID NO: 812141 - RNA, 19 nt, Homo sapiens
  misc_RNA (1)...(19): siRNA sense strand
gagcugagagaguacuuca

SEQ ID NO: 812142 - RNA, 19 nt, Homo sapiens
  misc_RNA (1)...(19): siRNA sense strand
uaggugacuuggaacaguu

SEQ ID NO: 812143 - RNA, 19 nt, Homo sapiens
  misc_RNA (1)...(19): siRNA sense strand
ugggaugaacucuucuuua

SEQ ID NO: 812144 - RNA, 19 nt, Homo sapiens
  misc_RNA (1)...(19): siRNA sense strand
cagcacaauuguaaagcau

SEQ ID NO: 812145 - RNA, 19 nt, Homo sapiens
  misc_RNA (1)...(19): siRNA sense strand
gcagucagaagaaguagag

SEQ ID NO: 812146 - RNA, 19 nt, Homo sapiens
  misc_RNA (1)...(19): siRNA sense strand
acaaauaaggaucugaaga

SEQ ID NO: 812147 - RNA, 19 nt, Homo sapiens
  misc_RNA (1)...(19): siRNA sense strand
ugcagucugucgucuauug

SEQ ID NO: 812148 - RNA, 19 nt, Homo sapiens
  misc_RNA (1)...(19): siRNA sense strand
ccugaugaccucuccauug

SEQ ID NO: 812149 - RNA, 19 nt, Homo sapiens
  misc_RNA (1)...(19): siRNA sense strand
guaaagcaugcacugauca

SEQ ID NO: 812150 - RNA, 19 nt, Homo sapiens
  misc_RNA (1)...(19): siRNA sense strand
ccagcacaauuguaaagca

SEQ ID NO: 812151 - RNA, 19 nt, Homo sapiens
  misc_RNA (1)...(19): siRNA sense strand
agaagagcuuuacucaauc

SEQ ID NO: 812152 - RNA, 19 nt, Homo sapiens
  misc_RNA (1)...(19): siRNA sense strand
aauagaagagcuuuacuca

SEQ ID NO: 812153 - RNA, 19 nt, Homo sapiens
  misc_RNA (1)...(19): siRNA sense strand
aaugggcccugucuugguu

SEQ ID NO: 812154 - RNA, 19 nt, Homo sapiens
  misc_RNA (1)...(19): siRNA sense strand
caaaggcuacuugaaagau

SEQ ID NO: 812155 - RNA, 19 nt, Homo sapiens
  misc_RNA (1)...(19): siRNA sense strand
gagggagagauauguguga

SEQ ID NO: 812156 - RNA, 19 nt, Homo sapiens
  misc_RNA (1)...(19): siRNA sense strand
ggagagggagagauaugug

SEQ ID NO: 812157 - RNA, 19 nt, Homo sapiens
  misc_RNA (1)...(19): siRNA sense strand
ggcaaacacaccauuaaag

SEQ ID NO: 812158 - RNA, 19 nt, Homo sapiens
  misc_RNA (1)...(19): siRNA sense strand
ucucucagaugacaugaag

SEQ ID NO: 812159 - RNA, 19 nt, Homo sapiens
  misc_RNA (1)...(19): siRNA sense strand
aaagagagagggcagaagu

SEQ ID NO: 812160 - RNA, 19 nt, Homo sapiens
  misc_RNA (1)...(19): siRNA sense strand
cuacuuacccacuacuaug

SEQ ID NO: 812161 - RNA, 19 nt, Homo sapiens
  misc_RNA (1)...(19): siRNA sense strand
ugaaccggauguacgacaa

SEQ ID NO: 812162 - RNA, 19 nt, Homo sapiens
  misc_RNA (1)...(19): siRNA sense strand
gccugacccugaaguuaug

SEQ ID NO: 812163 - RNA, 19 nt, Homo sapiens
  misc_RNA (1)...(19): siRNA sense strand
ugugugcggaugauuguua

SEQ ID NO: 812164 - RNA, 19 nt, Homo sapiens
  misc_RNA (1)...(19): siRNA sense strand
ccagaagagaggaauugaa

SEQ ID NO: 812165 - RNA, 19 nt, Homo sapiens
  misc_RNA (1)...(19): siRNA sense strand
gugccugacccugaaguua

SEQ ID NO: 812166 - RNA, 19 nt, Homo sapiens
  misc_RNA (1)...(19): siRNA sense strand
aaaggcuacuugaaagauc

SEQ ID NO: 812167 - RNA, 19 nt, Homo sapiens
  misc_RNA (1)...(19): siRNA sense strand
gcacaucccugaagacgau

SEQ ID NO: 812168 - RNA, 19 nt, Homo sapiens
  misc_RNA (1)...(19): siRNA sense strand
uggaauugcuggagacuuu

SEQ ID NO: 812169 - RNA, 19 nt, Homo sapiens
  misc_RNA (1)...(19): siRNA sense strand
acagaaggcucacugauca

SEQ ID NO: 812170 - RNA, 19 nt, Homo sapiens
  misc_RNA (1)...(19): siRNA sense strand
ggaaugcagugccagcaau

SEQ ID NO: 812171 - RNA, 19 nt, Homo sapiens
  misc_RNA (1)...(19): siRNA sense strand
gaagaauauuuccaagaag

SEQ ID NO: 812172 - RNA, 19 nt, Homo sapiens
  misc_RNA (1)...(19): siRNA sense strand
ucaaggauguucucuacga

SEQ ID NO: 812173 - RNA, 19 nt, Homo sapiens
  misc_RNA (1)...(19): siRNA sense strand
gggccucucuccagauuga

SEQ ID NO: 812174 - RNA, 19 nt, Homo sapiens
  misc_RNA (1)...(19): siRNA sense strand
agacagagcuaggugugaa

SEQ ID NO: 812175 - RNA, 19 nt, Homo sapiens
  misc_RNA (1)...(19): siRNA sense strand
gcacuagcccucauguugu

SEQ ID NO: 812176 - RNA, 19 nt, Homo sapiens
  misc_RNA (1)...(19): siRNA sense strand
gaauugacccugauuacgu

SEQ ID NO: 812177 - RNA, 19 nt, Homo sapiens
  misc_RNA (1)...(19): siRNA sense strand
ggaguggccguccuuguga

SEQ ID NO: 812178 - RNA, 19 nt, Homo sapiens
  misc_RNA (1)...(19): siRNA sense strand
ggcacuagcccucauguug

SEQ ID NO: 812179 - RNA, 19 nt, Homo sapiens
  misc_RNA (1)...(19): siRNA sense strand
gcaagaggaggaacacauc

SEQ ID NO: 812180 - RNA, 19 nt, Homo sapiens
  misc_RNA (1)...(19): siRNA sense strand
gcacagaaggcucacugau

SEQ ID NO: 812181 - RNA, 19 nt, Homo sapiens
  misc_RNA (1)...(19): siRNA sense strand
cugcagagauucagugucu

SEQ ID NO: 812182 - RNA, 19 nt, Homo sapiens
  misc_RNA (1)...(19): siRNA sense strand
cguggaagcuccgaggaaa

SEQ ID NO: 812183 - RNA, 19 nt, Homo sapiens
  misc_RNA (1)...(19): siRNA sense strand
gcugaggcauacccugcua

SEQ ID NO: 812184 - RNA, 19 nt, Homo sapiens
  misc_RNA (1)...(19): siRNA sense strand
gaccugaagcugagacaga

SEQ ID NO: 812185 - RNA, 19 nt, Homo sapiens
  misc_RNA (1)...(19): siRNA sense strand
caagcguccugaccgaaug

SEQ ID NO: 812186 - RNA, 19 nt, Homo sapiens
  misc_RNA (1)...(19): siRNA sense strand
gcccaagggugccaauguc

SEQ ID NO: 812187 - RNA, 19 nt, Homo sapiens
  misc_RNA (1)...(19): siRNA sense strand
gggagcauguggugacagu

SEQ ID NO: 812188 - RNA, 19 nt, Homo sapiens
  misc_RNA (1)...(19): siRNA sense strand
aggaugcccugggagaaua

SEQ ID NO: 812189 - RNA, 19 nt, Homo sapiens
  misc_RNA (1)...(19): siRNA sense strand
ggcccaaggaagaauauuu

SEQ ID NO: 812190 - RNA, 19 nt, Homo sapiens
  misc_RNA (1)...(19): siRNA sense strand
ugccaggccucaucaagga

SEQ ID NO: 812191 - RNA, 19 nt, Homo sapiens
  misc_RNA (1)...(19): siRNA sense strand
caagaacagcacagucaau

SEQ ID NO: 812192 - RNA, 19 nt, Homo sapiens
  misc_RNA (1)...(19): siRNA sense strand
gcccucauguugucaccaa

SEQ ID NO: 812193 - RNA, 19 nt, Homo sapiens
  misc_RNA (1)...(19): siRNA sense strand
gcccaaggaagaauauuuc

SEQ ID NO: 812194 - RNA, 19 nt, Homo sapiens
  misc_RNA (1)...(19): siRNA sense strand
guacgagugccgcguguuc

SEQ ID NO: 812195 - RNA, 19 nt, Homo sapiens
  misc_RNA (1)...(19): siRNA sense strand
ggauggcuacgucuuggaa

SEQ ID NO: 812196 - RNA, 19 nt, Homo sapiens
  misc_RNA (1)...(19): siRNA sense strand
gaauauuuccaagaaguag

SEQ ID NO: 812197 - RNA, 19 nt, Homo sapiens
  misc_RNA (1)...(19): siRNA sense strand
ccaguggcccugagagaug

SEQ ID NO: 812198 - RNA, 19 nt, Homo sapiens
  misc_RNA (1)...(19): siRNA sense strand
gaaugcagugccagcaaug

SEQ ID NO: 812199 - RNA, 19 nt, Homo sapiens
  misc_RNA (1)...(19): siRNA sense strand
cccugcagcuggacaaguu

SEQ ID NO: 812200 - RNA, 19 nt, Homo sapiens
  misc_RNA (1)...(19): siRNA sense strand
gaggaugcccugggagaau

SEQ ID NO: 812201 - RNA, 19 nt, Homo sapiens
  misc_RNA (1)...(19): siRNA sense strand
cggccaacgucuccacuuc

SEQ ID NO: 812202 - RNA, 19 nt, Homo sapiens
  misc_RNA (1)...(19): siRNA sense strand
cugcuaaccucaccuacag

SEQ ID NO: 812203 - RNA, 19 nt, Homo sapiens
  misc_RNA (1)...(19): siRNA sense strand
ccagaaaccccuccuguau

SEQ ID NO: 812204 - RNA, 19 nt, Homo sapiens
  misc_RNA (1)...(19): siRNA sense strand
agggaagccugagguggua

SEQ ID NO: 812205 - RNA, 19 nt, Homo sapiens
  misc_RNA (1)...(19): siRNA sense strand
aggauguucucuacgaguu

SEQ ID NO: 812206 - RNA, 19 nt, Homo sapiens
  misc_RNA (1)...(19): siRNA sense strand
ucagcgaaaucgucuuguc

SEQ ID NO: 812207 - RNA, 19 nt, Homo sapiens
  misc_RNA (1)...(19): siRNA sense strand
ucagcgugcuagcucagaa

SEQ ID NO: 812208 - RNA, 19 nt, Homo sapiens
  misc_RNA (1)...(19): siRNA sense strand
uggcuuugauggugguuau

SEQ ID NO: 812209 - RNA, 19 nt, Homo sapiens
  misc_RNA (1)...(19): siRNA sense strand
ggacccuccuccuguuguc

SEQ ID NO: 812210 - RNA, 19 nt, Homo sapiens
  misc_RNA (1)...(19): siRNA sense strand
gaccagcacaucccugaag

SEQ ID NO: 812211 - RNA, 19 nt, Homo sapiens
  misc_RNA (1)...(19): siRNA sense strand
gcugucccaccucaucuuu

SEQ ID NO: 812212 - RNA, 19 nt, Homo sapiens
  misc_RNA (1)...(19): siRNA sense strand
gcccgguccuuugacugua

SEQ ID NO: 812213 - RNA, 19 nt, Homo sapiens
  misc_RNA (1)...(19): siRNA sense strand
aguggucccuucagcgaaa

SEQ ID NO: 812214 - RNA, 19 nt, Homo sapiens
  misc_RNA (1)...(19): siRNA sense strand
cacagaaggcucacugauc

SEQ ID NO: 812215 - RNA, 19 nt, Homo sapiens
  misc_RNA (1)...(19): siRNA sense strand
ccaagaacagcacagucaa

SEQ ID NO: 812216 - RNA, 19 nt, Homo sapiens
  misc_RNA (1)...(19): siRNA sense strand
cccaagaacagcacaguca

SEQ ID NO: 812217 - RNA, 19 nt, Homo sapiens
  misc_RNA (1)...(19): siRNA sense strand
caucuguggacgagaacua

SEQ ID NO: 812218 - RNA, 19 nt, Homo sapiens
  misc_RNA (1)...(19): siRNA sense strand
gaugaugccggcugcuaca

SEQ ID NO: 812219 - RNA, 19 nt, Homo sapiens
  misc_RNA (1)...(19): siRNA sense strand
ccacccggauccuccaucu

SEQ ID NO: 812220 - RNA, 19 nt, Homo sapiens
  misc_RNA (1)...(19): siRNA sense strand
ggugggcggagucugcuuu

SEQ ID NO: 812221 - RNA, 19 nt, Homo sapiens
  misc_RNA (1)...(19): siRNA sense strand
cucccaggauguuucauug

SEQ ID NO: 812222 - RNA, 19 nt, Homo sapiens
  misc_RNA (1)...(19): siRNA sense strand
gagacagagcuagguguga

SEQ ID NO: 812223 - RNA, 19 nt, Homo sapiens
  misc_RNA (1)...(19): siRNA sense strand
caccucaucuuuccuucgu

SEQ ID NO: 812224 - RNA, 19 nt, Homo sapiens
  misc_RNA (1)...(19): siRNA sense strand
cgugcuagcucagaacaag

SEQ ID NO: 812225 - RNA, 19 nt, Homo sapiens
  misc_RNA (1)...(19): siRNA sense strand
gauuccugcuucccaucuu

SEQ ID NO: 812226 - RNA, 19 nt, Homo sapiens
  misc_RNA (1)...(19): siRNA sense strand
aagaacagcacagucaaug

SEQ ID NO: 812227 - RNA, 19 nt, Homo sapiens
  misc_RNA (1)...(19): siRNA sense strand
cuggcugacuggacacuga

SEQ ID NO: 812228 - RNA, 19 nt, Homo sapiens
  misc_RNA (1)...(19): siRNA sense strand
ccucugcauugaagacauc

SEQ ID NO: 812229 - RNA, 19 nt, Homo sapiens
  misc_RNA (1)...(19): siRNA sense strand
ccaagcguccugaccgaau

SEQ ID NO: 812230 - RNA, 19 nt, Homo sapiens
  misc_RNA (1)...(19): siRNA sense strand
gggaaugcagugccagcaa

SEQ ID NO: 812231 - RNA, 19 nt, Homo sapiens
  misc_RNA (1)...(19): siRNA sense strand
ccucuacucuccccgaauu

SEQ ID NO: 812232 - RNA, 19 nt, Homo sapiens
  misc_RNA (1)...(19): siRNA sense strand
cauguugucaccaaugugu

SEQ ID NO: 812233 - RNA, 19 nt, Homo sapiens
  misc_RNA (1)...(19): siRNA sense strand
ggaauugcuggagacuuug

SEQ ID NO: 812234 - RNA, 19 nt, Homo sapiens
  misc_RNA (1)...(19): siRNA sense strand
gggcggagucugcuuucug

SEQ ID NO: 812235 - RNA, 19 nt, Homo sapiens
  misc_RNA (1)...(19): siRNA sense strand
ccacacccaguaccaguuc

SEQ ID NO: 812236 - RNA, 19 nt, Homo sapiens
  misc_RNA (1)...(19): siRNA sense strand
ccaguucggccucuacucu

SEQ ID NO: 812237 - RNA, 19 nt, Homo sapiens
  misc_RNA (1)...(19): siRNA sense strand
ggaccagcacaucccugaa

SEQ ID NO: 812238 - RNA, 19 nt, Homo sapiens
  misc_RNA (1)...(19): siRNA sense strand
cacuagcccucauguuguc

SEQ ID NO: 812239 - RNA, 19 nt, Homo sapiens
  misc_RNA (1)...(19): siRNA sense strand
ccaaagaccuacauuauga

SEQ ID NO: 812240 - RNA, 19 nt, Homo sapiens
  misc_RNA (1)...(19): siRNA sense strand
gcaaauucaugauguugua

SEQ ID NO: 812241 - RNA, 19 nt, Homo sapiens
  misc_RNA (1)...(19): siRNA sense strand
ggacaacaguuuacucaag

SEQ ID NO: 812242 - RNA, 19 nt, Homo sapiens
  misc_RNA (1)...(19): siRNA sense strand
ugaguaaccugauccacua

SEQ ID NO: 812243 - RNA, 19 nt, Homo sapiens
  misc_RNA (1)...(19): siRNA sense strand
gacaacaguuuacucaaga

SEQ ID NO: 812244 - RNA, 19 nt, Homo sapiens
  misc_RNA (1)...(19): siRNA sense strand
gcaaugaucguuaacaauc

SEQ ID NO: 812245 - RNA, 19 nt, Homo sapiens
  misc_RNA (1)...(19): siRNA sense strand
ugacagugcugguggaaau

SEQ ID NO: 812246 - RNA, 19 nt, Homo sapiens
  misc_RNA (1)...(19): siRNA sense strand
gcuaugucauggugaagua

SEQ ID NO: 812247 - RNA, 19 nt, Homo sapiens
  misc_RNA (1)...(19): siRNA sense strand
ccagaagucuuacagaagu

SEQ ID NO: 812248 - RNA, 19 nt, Homo sapiens
  misc_RNA (1)...(19): siRNA sense strand
ggaauccggacuaggaaua

SEQ ID NO: 812249 - RNA, 19 nt, Homo sapiens
  misc_RNA (1)...(19): siRNA sense strand
gcacugaauuuuaucauug

SEQ ID NO: 812250 - RNA, 19 nt, Homo sapiens
  misc_RNA (1)...(19): siRNA sense strand
gcucaaacuacaagcuuua

SEQ ID NO: 812251 - RNA, 19 nt, Homo sapiens
  misc_RNA (1)...(19): siRNA sense strand
gcaagugaguaaccugauc

SEQ ID NO: 812252 - RNA, 19 nt, Homo sapiens
  misc_RNA (1)...(19): siRNA sense strand
uuucacggauguaugauuu

SEQ ID NO: 812253 - RNA, 19 nt, Homo sapiens
  misc_RNA (1)...(19): siRNA sense strand
gugcacagcaagugaguaa

SEQ ID NO: 812254 - RNA, 19 nt, Homo sapiens
  misc_RNA (1)...(19): siRNA sense strand
cagaagucuuacagaagua

SEQ ID NO: 812255 - RNA, 19 nt, Homo sapiens
  misc_RNA (1)...(19): siRNA sense strand
ccacaaaguauuuccugaa

SEQ ID NO: 812256 - RNA, 19 nt, Homo sapiens
  misc_RNA (1)...(19): siRNA sense strand
gaagucagaguguuugaag

SEQ ID NO: 812257 - RNA, 19 nt, Homo sapiens
  misc_RNA (1)...(19): siRNA sense strand
ccugaagccagaagucuua

SEQ ID NO: 812258 - RNA, 19 nt, Homo sapiens
  misc_RNA (1)...(19): siRNA sense strand
ccaggcagaauuugcauuu

SEQ ID NO: 812259 - RNA, 19 nt, Homo sapiens
  misc_RNA (1)...(19): siRNA sense strand
agacuuugaugguguggaa

SEQ ID NO: 812260 - RNA, 19 nt, Homo sapiens
  misc_RNA (1)...(19): siRNA sense strand
guacagaccacaggcaaug

SEQ ID NO: 812261 - RNA, 19 nt, Homo sapiens
  misc_RNA (1)...(19): siRNA sense strand
gaauacaggcuaguuccaa

SEQ ID NO: 812262 - RNA, 19 nt, Homo sapiens
  misc_RNA (1)...(19): siRNA sense strand
ucaaguggcuagaucaaaa

SEQ ID NO: 812263 - RNA, 19 nt, Homo sapiens
  misc_RNA (1)...(19): siRNA sense strand
guacgggccacaaaguauu

SEQ ID NO: 812264 - RNA, 19 nt, Homo sapiens
  misc_RNA (1)...(19): siRNA sense strand
aaacuggacaucccucuug

SEQ ID NO: 812265 - RNA, 19 nt, Homo sapiens
  misc_RNA (1)...(19): siRNA sense strand
aauacaggcuaguuccaaa

SEQ ID NO: 812266 - RNA, 19 nt, Homo sapiens
  misc_RNA (1)...(19): siRNA sense strand
ggaauaguuacaucaagug

SEQ ID NO: 812267 - RNA, 19 nt, Homo sapiens
  misc_RNA (1)...(19): siRNA sense strand
gugcaggcaaugaucguua

SEQ ID NO: 812268 - RNA, 19 nt, Homo sapiens
  misc_RNA (1)...(19): siRNA sense strand
gcccuuggacaacaguuua

SEQ ID NO: 812269 - RNA, 19 nt, Homo sapiens
  misc_RNA (1)...(19): siRNA sense strand
cacaaaguauuuccugaag

SEQ ID NO: 812270 - RNA, 19 nt, Homo sapiens
  misc_RNA (1)...(19): siRNA sense strand
gagcaaauucaugauguug

SEQ ID NO: 812271 - RNA, 19 nt, Homo sapiens
  misc_RNA (1)...(19): siRNA sense strand
ugagcaaauucaugauguu

SEQ ID NO: 812272 - RNA, 19 nt, Homo sapiens
  misc_RNA (1)...(19): siRNA sense strand
gaagucuuacagaaguaua

SEQ ID NO: 812273 - RNA, 19 nt, Homo sapiens
  misc_RNA (1)...(19): siRNA sense strand
caggcuaguuccaaagguu

SEQ ID NO: 812274 - RNA, 19 nt, Homo sapiens
  misc_RNA (1)...(19): siRNA sense strand
ggauggcuuucacggaugu

SEQ ID NO: 812275 - RNA, 19 nt, Homo sapiens
  misc_RNA (1)...(19): siRNA sense strand
cgacacagacuuugauggu

SEQ ID NO: 812276 - RNA, 19 nt, Homo sapiens
  misc_RNA (1)...(19): siRNA sense strand
ucccaaagaccuacauuau

SEQ ID NO: 812277 - RNA, 19 nt, Homo sapiens
  misc_RNA (1)...(19): siRNA sense strand
guugauccaggcagaauuu

SEQ ID NO: 812278 - RNA, 19 nt, Homo sapiens
  misc_RNA (1)...(19): siRNA sense strand
agccagaagucuuacagaa

SEQ ID NO: 812279 - RNA, 19 nt, Homo sapiens
  misc_RNA (1)...(19): siRNA sense strand
gcccgaagagccacugaaa

SEQ ID NO: 812280 - RNA, 19 nt, Homo sapiens
  misc_RNA (1)...(19): siRNA sense strand
cugcauccuucacaaagaa

SEQ ID NO: 812281 - RNA, 19 nt, Homo sapiens
  misc_RNA (1)...(19): siRNA sense strand
aggcaaugaucguuaacaa

SEQ ID NO: 812282 - RNA, 19 nt, Homo sapiens
  misc_RNA (1)...(19): siRNA sense strand
ugucauuguuuccauugaa

SEQ ID NO: 812283 - RNA, 19 nt, Homo sapiens
  misc_RNA (1)...(19): siRNA sense strand
gcuuuaauuuauccaguuc

SEQ ID NO: 812284 - RNA, 19 nt, Homo sapiens
  misc_RNA (1)...(19): siRNA sense strand
cacaccaucuuaucagcaa

SEQ ID NO: 812285 - RNA, 19 nt, Homo sapiens
  misc_RNA (1)...(19): siRNA sense strand
ggugaccgacacagacuuu

SEQ ID NO: 812286 - RNA, 19 nt, Homo sapiens
  misc_RNA (1)...(19): siRNA sense strand
ggaagucagaguguuugaa

SEQ ID NO: 812287 - RNA, 19 nt, Homo sapiens
  misc_RNA (1)...(19): siRNA sense strand
aggaauaguuacaucaagu

SEQ ID NO: 812288 - RNA, 19 nt, Homo sapiens
  misc_RNA (1)...(19): siRNA sense strand
ucauguaugccaagcguuu

SEQ ID NO: 812289 - RNA, 19 nt, Homo sapiens
  misc_RNA (1)...(19): siRNA sense strand
ugcaggcaaugaucguuaa

SEQ ID NO: 812290 - RNA, 19 nt, Homo sapiens
  misc_RNA (1)...(19): siRNA sense strand
gugggaauccggacuagga

SEQ ID NO: 812291 - RNA, 19 nt, Homo sapiens
  misc_RNA (1)...(19): siRNA sense strand
acaaucacacuucacuuga

SEQ ID NO: 812292 - RNA, 19 nt, Homo sapiens
  misc_RNA (1)...(19): siRNA sense strand
cugagcaaauucaugaugu

SEQ ID NO: 812293 - RNA, 19 nt, Homo sapiens
  misc_RNA (1)...(19): siRNA sense strand
gacccuggaucacuuugag

SEQ ID NO: 812294 - RNA, 19 nt, Homo sapiens
  misc_RNA (1)...(19): siRNA sense strand
cccaaagaccuacauuaug

SEQ ID NO: 812295 - RNA, 19 nt, Homo sapiens
  misc_RNA (1)...(19): siRNA sense strand
ugaaguauuggguggacua

SEQ ID NO: 812296 - RNA, 19 nt, Homo sapiens
  misc_RNA (1)...(19): siRNA sense strand
uaacacaccaucuuaucag

SEQ ID NO: 812297 - RNA, 19 nt, Homo sapiens
  misc_RNA (1)...(19): siRNA sense strand
guucuucaagcuuuagauu

SEQ ID NO: 812298 - RNA, 19 nt, Homo sapiens
  misc_RNA (1)...(19): siRNA sense strand
caacaguuuacucaagaug

SEQ ID NO: 812299 - RNA, 19 nt, Homo sapiens
  misc_RNA (1)...(19): siRNA sense strand
ucacuuugaggauggcuuu

SEQ ID NO: 812300 - RNA, 19 nt, Homo sapiens
  misc_RNA (1)...(19): siRNA sense strand
aggcaacuaugacuuugug

SEQ ID NO: 812301 - RNA, 19 nt, Homo sapiens
  misc_RNA (1)...(19): siRNA sense strand
guauuaugaugagcugugu

SEQ ID NO: 812302 - RNA, 19 nt, Homo sapiens
  misc_RNA (1)...(19): siRNA sense strand
ggucuucugccaaagugaa

SEQ ID NO: 812303 - RNA, 19 nt, Homo sapiens
  misc_RNA (1)...(19): siRNA sense strand
cugcagcuccucccaaaga

SEQ ID NO: 812304 - RNA, 19 nt, Homo sapiens
  misc_RNA (1)...(19): siRNA sense strand
ucaaaggcaacuaugacuu

SEQ ID NO: 812305 - RNA, 19 nt, Homo sapiens
  misc_RNA (1)...(19): siRNA sense strand
gauccaggcagaauuugca

SEQ ID NO: 812306 - RNA, 19 nt, Homo sapiens
  misc_RNA (1)...(19): siRNA sense strand
gucauuguuuccauugaau

SEQ ID NO: 812307 - RNA, 19 nt, Homo sapiens
  misc_RNA (1)...(19): siRNA sense strand
ugaccgacacagacuuuga

SEQ ID NO: 812308 - RNA, 19 nt, Homo sapiens
  misc_RNA (1)...(19): siRNA sense strand
ccuacauuaugacguguga

SEQ ID NO: 812309 - RNA, 19 nt, Homo sapiens
  misc_RNA (1)...(19): siRNA sense strand
aacaaucacacuucacuug

SEQ ID NO: 812310 - RNA, 19 nt, Homo sapiens
  misc_RNA (1)...(19): siRNA sense strand
cuacuucaaaggcaacuau

SEQ ID NO: 812311 - RNA, 19 nt, Homo sapiens
  misc_RNA (1)...(19): siRNA sense strand
uaggaauaguuacaucaag

SEQ ID NO: 812312 - RNA, 19 nt, Homo sapiens
  misc_RNA (1)...(19): siRNA sense strand
caacuucucagugggaauc

SEQ ID NO: 812313 - RNA, 19 nt, Homo sapiens
  misc_RNA (1)...(19): siRNA sense strand
gauguaugauuuucacuag

SEQ ID NO: 812314 - RNA, 19 nt, Homo sapiens
  misc_RNA (1)...(19): siRNA sense strand
cgcguggucuucugccaaa

SEQ ID NO: 812315 - RNA, 19 nt, Homo sapiens
  misc_RNA (1)...(19): siRNA sense strand
agcaugauguccucagaga

SEQ ID NO: 812316 - RNA, 19 nt, Homo sapiens
  misc_RNA (1)...(19): siRNA sense strand
ccugcauccuucacaaaga

SEQ ID NO: 812317 - RNA, 19 nt, Homo sapiens
  misc_RNA (1)...(19): siRNA sense strand
uaacaaucacacuucacuu

SEQ ID NO: 812318 - RNA, 19 nt, Homo sapiens
  misc_RNA (1)...(19): siRNA sense strand
cguuaacaaucacacuuca

SEQ ID NO: 812319 - RNA, 19 nt, Homo sapiens
  misc_RNA (1)...(19): siRNA sense strand
gaagccagaagucuuacag

SEQ ID NO: 812320 - RNA, 19 nt, Homo sapiens
  misc_RNA (1)...(19): siRNA sense strand
uacaucaaguggcuagauc

SEQ ID NO: 812321 - RNA, 19 nt, Homo sapiens
  misc_RNA (1)...(19): siRNA sense strand
ugaaggugaccgacacaga

SEQ ID NO: 812322 - RNA, 19 nt, Homo sapiens
  misc_RNA (1)...(19): siRNA sense strand
ggcaaugaucguuaacaau

SEQ ID NO: 812323 - RNA, 19 nt, Homo sapiens
  misc_RNA (1)...(19): siRNA sense strand
gccagaagucuuacagaag

SEQ ID NO: 812324 - RNA, 19 nt, Homo sapiens
  misc_RNA (1)...(19): siRNA sense strand
uuaacacaccaucuuauca

SEQ ID NO: 812325 - RNA, 19 nt, Homo sapiens
  misc_RNA (1)...(19): siRNA sense strand
auccaguucuucaagcuuu

SEQ ID NO: 812326 - RNA, 19 nt, Homo sapiens
  misc_RNA (1)...(19): siRNA sense strand
ggcuaguuccaaagguuua

SEQ ID NO: 812327 - RNA, 19 nt, Homo sapiens
  misc_RNA (1)...(19): siRNA sense strand
caucaaguggcuagaucaa

SEQ ID NO: 812328 - RNA, 19 nt, Homo sapiens
  misc_RNA (1)...(19): siRNA sense strand
ucagugggaauccggacua

SEQ ID NO: 812329 - RNA, 19 nt, Homo sapiens
  misc_RNA (1)...(19): siRNA sense strand
ggcuuucacggauguauga

SEQ ID NO: 812330 - RNA, 19 nt, Homo sapiens
  misc_RNA (1)...(19): siRNA sense strand
gaccgacacagacuuugau

SEQ ID NO: 812331 - RNA, 19 nt, Homo sapiens
  misc_RNA (1)...(19): siRNA sense strand
uccaguucuucaagcuuua

SEQ ID NO: 812332 - RNA, 19 nt, Homo sapiens
  misc_RNA (1)...(19): siRNA sense strand
gcacagcaagugaguaacc

SEQ ID NO: 812333 - RNA, 19 nt, Homo sapiens
  misc_RNA (1)...(19): siRNA sense strand
gaagaggcugcugcuguca

SEQ ID NO: 812334 - RNA, 19 nt, Homo sapiens
  misc_RNA (1)...(19): siRNA sense strand
cuaggaauaguuacaucaa

SEQ ID NO: 812335 - RNA, 19 nt, Homo sapiens
  misc_RNA (1)...(19): siRNA sense strand
ccgaagagccacugaaacg

SEQ ID NO: 812336 - RNA, 19 nt, Homo sapiens
  misc_RNA (1)...(19): siRNA sense strand
uacagaaguauaugguuga

SEQ ID NO: 812337 - RNA, 19 nt, Homo sapiens
  misc_RNA (1)...(19): siRNA sense strand
cuagcuggcccaccaacuu

SEQ ID NO: 812338 - RNA, 19 nt, Homo sapiens
  misc_RNA (1)...(19): siRNA sense strand
caucuuaucagcaaaaugu

SEQ ID NO: 812339 - RNA, 19 nt, Homo sapiens
  misc_RNA (1)...(19): siRNA sense strand
gaagaaaucaucucaguuu

SEQ ID NO: 812340 - RNA, 19 nt, Homo sapiens
  misc_RNA (1)...(19): siRNA sense strand
gcagacagguugaaauaaa

SEQ ID NO: 812341 - RNA, 19 nt, Homo sapiens
  misc_RNA (1)...(19): siRNA sense strand
caacaguaauccucucuua

SEQ ID NO: 812342 - RNA, 19 nt, Homo sapiens
  misc_RNA (1)...(19): siRNA sense strand
ggacggugcuuaauucaaa

SEQ ID NO: 812343 - RNA, 19 nt, Homo sapiens
  misc_RNA (1)...(19): siRNA sense strand
gacaacagauugaagaauu

SEQ ID NO: 812344 - RNA, 19 nt, Homo sapiens
  misc_RNA (1)...(19): siRNA sense strand
gcagaagcaugacuuuaaa

SEQ ID NO: 812345 - RNA, 19 nt, Homo sapiens
  misc_RNA (1)...(19): siRNA sense strand
uauagaagcuagacgguua

SEQ ID NO: 812346 - RNA, 19 nt, Homo sapiens
  misc_RNA (1)...(19): siRNA sense strand
gaauuugacuguagcugua

SEQ ID NO: 812347 - RNA, 19 nt, Homo sapiens
  misc_RNA (1)...(19): siRNA sense strand
ggaaagaacauauaaagga

SEQ ID NO: 812348 - RNA, 19 nt, Homo sapiens
  misc_RNA (1)...(19): siRNA sense strand
ggaaauccauucaaaccuu

SEQ ID NO: 812349 - RNA, 19 nt, Homo sapiens
  misc_RNA (1)...(19): siRNA sense strand
ggacagaugcagaaacuaa

SEQ ID NO: 812350 - RNA, 19 nt, Homo sapiens
  misc_RNA (1)...(19): siRNA sense strand
gaaauuggaaguuguaaga

SEQ ID NO: 812351 - RNA, 19 nt, Homo sapiens
  misc_RNA (1)...(19): siRNA sense strand
ggacugauggcucgcauua

SEQ ID NO: 812352 - RNA, 19 nt, Homo sapiens
  misc_RNA (1)...(19): siRNA sense strand
gaaauggccauguuuagaa

SEQ ID NO: 812353 - RNA, 19 nt, Homo sapiens
  misc_RNA (1)...(19): siRNA sense strand
acaauugccugauucuaua

SEQ ID NO: 812354 - RNA, 19 nt, Homo sapiens
  misc_RNA (1)...(19): siRNA sense strand
caacagcugcuuagacaua

SEQ ID NO: 812355 - RNA, 19 nt, Homo sapiens
  misc_RNA (1)...(19): siRNA sense strand
ccacagaaauggccauguu

SEQ ID NO: 812356 - RNA, 19 nt, Homo sapiens
  misc_RNA (1)...(19): siRNA sense strand
ccagaggauuuaaagaaua

SEQ ID NO: 812357 - RNA, 19 nt, Homo sapiens
  misc_RNA (1)...(19): siRNA sense strand
gaacuggagucacuaccuu

SEQ ID NO: 812358 - RNA, 19 nt, Homo sapiens
  misc_RNA (1)...(19): siRNA sense strand
gacaacagcugcuuagaca

SEQ ID NO: 812359 - RNA, 19 nt, Homo sapiens
  misc_RNA (1)...(19): siRNA sense strand
gaacauuagaggagcuuua

SEQ ID NO: 812360 - RNA, 19 nt, Homo sapiens
  misc_RNA (1)...(19): siRNA sense strand
gaacuucacccuucauuag

SEQ ID NO: 812361 - RNA, 19 nt, Homo sapiens
  misc_RNA (1)...(19): siRNA sense strand
ggagcaaacugugaaagaa

SEQ ID NO: 812362 - RNA, 19 nt, Homo sapiens
  misc_RNA (1)...(19): siRNA sense strand
acaaggaaauccauucaaa

SEQ ID NO: 812363 - RNA, 19 nt, Homo sapiens
  misc_RNA (1)...(19): siRNA sense strand
aagcaugacuuuaaacuug

SEQ ID NO: 812364 - RNA, 19 nt, Homo sapiens
  misc_RNA (1)...(19): siRNA sense strand
gaacacaguagaccuaguu

SEQ ID NO: 812365 - RNA, 19 nt, Homo sapiens
  misc_RNA (1)...(19): siRNA sense strand
gaaaggagcauguguacuc

SEQ ID NO: 812366 - RNA, 19 nt, Homo sapiens
  misc_RNA (1)...(19): siRNA sense strand
agaacuaccucuucagaaa

SEQ ID NO: 812367 - RNA, 19 nt, Homo sapiens
  misc_RNA (1)...(19): siRNA sense strand
caacaggagucuuaguaau

SEQ ID NO: 812368 - RNA, 19 nt, Homo sapiens
  misc_RNA (1)...(19): siRNA sense strand
guaauccucucuuaaguuc

SEQ ID NO: 812369 - RNA, 19 nt, Homo sapiens
  misc_RNA (1)...(19): siRNA sense strand
guagaugacaaucaacuua

SEQ ID NO: 812370 - RNA, 19 nt, Homo sapiens
  misc_RNA (1)...(19): siRNA sense strand
gagcauguguacuccauug

SEQ ID NO: 812371 - RNA, 19 nt, Homo sapiens
  misc_RNA (1)...(19): siRNA sense strand
gaaugacgccuuucuugaa

SEQ ID NO: 812372 - RNA, 19 nt, Homo sapiens
  misc_RNA (1)...(19): siRNA sense strand
caaagcagcguuacaguga

SEQ ID NO: 812373 - RNA, 19 nt, Homo sapiens
  misc_RNA (1)...(19): siRNA sense strand
guaaugaacuggagucacu

SEQ ID NO: 812374 - RNA, 19 nt, Homo sapiens
  misc_RNA (1)...(19): siRNA sense strand
caggaaugcugcuuacaaa

SEQ ID NO: 812375 - RNA, 19 nt, Homo sapiens
  misc_RNA (1)...(19): siRNA sense strand
gaaaaucacuugaaaacuc

SEQ ID NO: 812376 - RNA, 19 nt, Homo sapiens
  misc_RNA (1)...(19): siRNA sense strand
ccagagaaauuggaaguug

SEQ ID NO: 812377 - RNA, 19 nt, Homo sapiens
  misc_RNA (1)...(19): siRNA sense strand
gaaacaaagcaaagaguau

SEQ ID NO: 812378 - RNA, 19 nt, Homo sapiens
  misc_RNA (1)...(19): siRNA sense strand
gaaacuaagaguccuaaau

SEQ ID NO: 812379 - RNA, 19 nt, Homo sapiens
  misc_RNA (1)...(19): siRNA sense strand
gaacacccuucauaucaag

SEQ ID NO: 812380 - RNA, 19 nt, Homo sapiens
  misc_RNA (1)...(19): siRNA sense strand
ggcagaagcaugacuuuaa

SEQ ID NO: 812381 - RNA, 19 nt, Homo sapiens
  misc_RNA (1)...(19): siRNA sense strand
caaagaguauugacuaacu

SEQ ID NO: 812382 - RNA, 19 nt, Homo sapiens
  misc_RNA (1)...(19): siRNA sense strand
ggccuuggauuuaguauca

SEQ ID NO: 812383 - RNA, 19 nt, Homo sapiens
  misc_RNA (1)...(19): siRNA sense strand
aaaggaguauggauggaua

SEQ ID NO: 812384 - RNA, 19 nt, Homo sapiens
  misc_RNA (1)...(19): siRNA sense strand
gaggagagcugugguaaaa

SEQ ID NO: 812385 - RNA, 19 nt, Homo sapiens
  misc_RNA (1)...(19): siRNA sense strand
gcaugacuguugccuuuga

SEQ ID NO: 812386 - RNA, 19 nt, Homo sapiens
  misc_RNA (1)...(19): siRNA sense strand
uggaagacuugucaaauug

SEQ ID NO: 812387 - RNA, 19 nt, Homo sapiens
  misc_RNA (1)...(19): siRNA sense strand
ucacuaccuucuacuauug

SEQ ID NO: 812388 - RNA, 19 nt, Homo sapiens
  misc_RNA (1)...(19): siRNA sense strand
acuauuggcuaccuucaua

SEQ ID NO: 812389 - RNA, 19 nt, Homo sapiens
  misc_RNA (1)...(19): siRNA sense strand
ggacacaguuuuguacaua

SEQ ID NO: 812390 - RNA, 19 nt, Homo sapiens
  misc_RNA (1)...(19): siRNA sense strand
ggaauuaguggacaaggaa

SEQ ID NO: 812391 - RNA, 19 nt, Homo sapiens
  misc_RNA (1)...(19): siRNA sense strand
caaagucaaugcacaaacu

SEQ ID NO: 812392 - RNA, 19 nt, Homo sapiens
  misc_RNA (1)...(19): siRNA sense strand
guacauauggaacaugaaa

SEQ ID NO: 812393 - RNA, 19 nt, Homo sapiens
  misc_RNA (1)...(19): siRNA sense strand
gaaaaggaauggcagguau

SEQ ID NO: 812394 - RNA, 19 nt, Homo sapiens
  misc_RNA (1)...(19): siRNA sense strand
cuaaagaugcaguacauaa

SEQ ID NO: 812395 - RNA, 19 nt, Homo sapiens
  misc_RNA (1)...(19): siRNA sense strand
gacaacagcuaaagaugca

SEQ ID NO: 812396 - RNA, 19 nt, Homo sapiens
  misc_RNA (1)...(19): siRNA sense strand
ggaacuucacccuucauua

SEQ ID NO: 812397 - RNA, 19 nt, Homo sapiens
  misc_RNA (1)...(19): siRNA sense strand
gauaacgaccuuucaaauc

SEQ ID NO: 812398 - RNA, 19 nt, Homo sapiens
  misc_RNA (1)...(19): siRNA sense strand
gagcaaacugugaaagaaa

SEQ ID NO: 812399 - RNA, 19 nt, Homo sapiens
  misc_RNA (1)...(19): siRNA sense strand
ugacgccuuucuugaauuu

SEQ ID NO: 812400 - RNA, 19 nt, Homo sapiens
  misc_RNA (1)...(19): siRNA sense strand
ugaugaagauuuccaguca

SEQ ID NO: 812401 - RNA, 19 nt, Homo sapiens
  misc_RNA (1)...(19): siRNA sense strand
gcccuuaucccuuuacaaa

SEQ ID NO: 812402 - RNA, 19 nt, Homo sapiens
  misc_RNA (1)...(19): siRNA sense strand
uagaagaauuugacuguag

SEQ ID NO: 812403 - RNA, 19 nt, Homo sapiens
  misc_RNA (1)...(19): siRNA sense strand
caugguauguccaguaugu

SEQ ID NO: 812404 - RNA, 19 nt, Homo sapiens
  misc_RNA (1)...(19): siRNA sense strand
ggacgcaggccuuugauca

SEQ ID NO: 812405 - RNA, 19 nt, Homo sapiens
  misc_RNA (1)...(19): siRNA sense strand
gacuugaccuaggcaauaa

SEQ ID NO: 812406 - RNA, 19 nt, Homo sapiens
  misc_RNA (1)...(19): siRNA sense strand
ggaaugcugcuuacaaaca

SEQ ID NO: 812407 - RNA, 19 nt, Homo sapiens
  misc_RNA (1)...(19): siRNA sense strand
gaagcuagacgguuagaca

SEQ ID NO: 812408 - RNA, 19 nt, Homo sapiens
  misc_RNA (1)...(19): siRNA sense strand
gcgagaagcuacaguacag

SEQ ID NO: 812409 - RNA, 19 nt, Homo sapiens
  misc_RNA (1)...(19): siRNA sense strand
ugaaauaccuaguccuuuu

SEQ ID NO: 812410 - RNA, 19 nt, Homo sapiens
  misc_RNA (1)...(19): siRNA sense strand
gcagacaacagcuaaagau

SEQ ID NO: 812411 - RNA, 19 nt, Homo sapiens
  misc_RNA (1)...(19): siRNA sense strand
gaagaacuacccaagcaau

SEQ ID NO: 812412 - RNA, 19 nt, Homo sapiens
  misc_RNA (1)...(19): siRNA sense strand
cuaagaguccuaaauuuga

SEQ ID NO: 812413 - RNA, 19 nt, Homo sapiens
  misc_RNA (1)...(19): siRNA sense strand
uuggaagacuugucaaauu

SEQ ID NO: 812414 - RNA, 19 nt, Homo sapiens
  misc_RNA (1)...(19): siRNA sense strand
gagcaugguauguccagua

SEQ ID NO: 812415 - RNA, 19 nt, Homo sapiens
  misc_RNA (1)...(19): siRNA sense strand
ucacacagcuccuaaaccu

SEQ ID NO: 812416 - RNA, 19 nt, Homo sapiens
  misc_RNA (1)...(19): siRNA sense strand
caguagaccuaguuauuca

SEQ ID NO: 812417 - RNA, 19 nt, Homo sapiens
  misc_RNA (1)...(19): siRNA sense strand
aaggguaucuuuguuacua

SEQ ID NO: 812418 - RNA, 19 nt, Homo sapiens
  misc_RNA (1)...(19): siRNA sense strand
ggacaaggaaauccauuca

SEQ ID NO: 812419 - RNA, 19 nt, Homo sapiens
  misc_RNA (1)...(19): siRNA sense strand
ggugacaagccaucagaua

SEQ ID NO: 812420 - RNA, 19 nt, Homo sapiens
  misc_RNA (1)...(19): siRNA sense strand
gaacuacccaagcaauugu

SEQ ID NO: 812421 - RNA, 19 nt, Homo sapiens
  misc_RNA (1)...(19): siRNA sense strand
gaaaucaucucaguuuuag

SEQ ID NO: 812422 - RNA, 19 nt, Homo sapiens
  misc_RNA (1)...(19): siRNA sense strand
gaaaaugcugggaaaguua

SEQ ID NO: 812423 - RNA, 19 nt, Homo sapiens
  misc_RNA (1)...(19): siRNA sense strand
acgcaugacuguugccuuu

SEQ ID NO: 812424 - RNA, 19 nt, Homo sapiens
  misc_RNA (1)...(19): siRNA sense strand
gagaauuuccuuccagaau

SEQ ID NO: 812425 - RNA, 19 nt, Homo sapiens
  misc_RNA (1)...(19): siRNA sense strand
auaaagugcuguaaguguu

SEQ ID NO: 812426 - RNA, 19 nt, Homo sapiens
  misc_RNA (1)...(19): siRNA sense strand
guucaacugucaagcucua

SEQ ID NO: 812427 - RNA, 19 nt, Homo sapiens
  misc_RNA (1)...(19): siRNA sense strand
aaagcuguauuacuacuga

SEQ ID NO: 812428 - RNA, 19 nt, Homo sapiens
  misc_RNA (1)...(19): siRNA sense strand
gggagcagcagccguauga

SEQ ID NO: 812429 - RNA, 19 nt, Homo sapiens
  misc_RNA (1)...(19): siRNA sense strand
aagaagaaaucaucucagu

SEQ ID NO: 812430 - RNA, 19 nt, Homo sapiens
  misc_RNA (1)...(19): siRNA sense strand
gugacaagccaucagauaa

SEQ ID NO: 812431 - RNA, 19 nt, Homo sapiens
  misc_RNA (1)...(19): siRNA sense strand
ucucuacgcuccaacaaau

SEQ ID NO: 812432 - RNA, 19 nt, Homo sapiens
  misc_RNA (1)...(19): siRNA sense strand
gaaguuaaagauguuggua

SEQ ID NO: 812433 - RNA, 19 nt, Homo sapiens
  misc_RNA (1)...(19): siRNA sense strand
ugacccagcucuaccugaa

SEQ ID NO: 812434 - RNA, 19 nt, Homo sapiens
  misc_RNA (1)...(19): siRNA sense strand
gacuguagcuguaaugaac

SEQ ID NO: 812435 - RNA, 19 nt, Homo sapiens
  misc_RNA (1)...(19): siRNA sense strand
gcaaaggaguauggaugga

SEQ ID NO: 812436 - RNA, 19 nt, Homo sapiens
  misc_RNA (1)...(19): siRNA sense strand
acagaaauggccauguuua

SEQ ID NO: 812437 - RNA, 19 nt, Homo sapiens
  misc_RNA (1)...(19): siRNA sense strand
ggaaucuucuaaagguguu

SEQ ID NO: 812438 - RNA, 19 nt, Homo sapiens
  misc_RNA (1)...(19): siRNA sense strand
ggacauuagcaguugauga

SEQ ID NO: 812439 - RNA, 19 nt, Homo sapiens
  misc_RNA (1)...(19): siRNA sense strand
gaauaacacugaccaaauu

SEQ ID NO: 812440 - RNA, 19 nt, Homo sapiens
  misc_RNA (1)...(19): siRNA sense strand
gcagagagcuuagugauga

SEQ ID NO: 812441 - RNA, 19 nt, Homo sapiens
  misc_RNA (1)...(19): siRNA sense strand
ggaaaucggugaccaagaa

SEQ ID NO: 812442 - RNA, 19 nt, Homo sapiens
  misc_RNA (1)...(19): siRNA sense strand
gacaagagcuaucuagaaa

SEQ ID NO: 812443 - RNA, 19 nt, Homo sapiens
  misc_RNA (1)...(19): siRNA sense strand
gaagugugguugugacaua

SEQ ID NO: 812444 - RNA, 19 nt, Homo sapiens
  misc_RNA (1)...(19): siRNA sense strand
gaacauaaccaucacuauu

SEQ ID NO: 812445 - RNA, 19 nt, Homo sapiens
  misc_RNA (1)...(19): siRNA sense strand
gaacacuucugcuggaauu

SEQ ID NO: 812446 - RNA, 19 nt, Homo sapiens
  misc_RNA (1)...(19): siRNA sense strand
gauggagacuacaaaguua

SEQ ID NO: 812447 - RNA, 19 nt, Homo sapiens
  misc_RNA (1)...(19): siRNA sense strand
ccaaguaaauucagaaaug

SEQ ID NO: 812448 - RNA, 19 nt, Homo sapiens
  misc_RNA (1)...(19): siRNA sense strand
guacagagccucaaucaga

SEQ ID NO: 812449 - RNA, 19 nt, Homo sapiens
  misc_RNA (1)...(19): siRNA sense strand
gaccaucacuuacaaaugu

SEQ ID NO: 812450 - RNA, 19 nt, Homo sapiens
  misc_RNA (1)...(19): siRNA sense strand
ggaaaggugucuucacaau

SEQ ID NO: 812451 - RNA, 19 nt, Homo sapiens
  misc_RNA (1)...(19): siRNA sense strand
caacaauccuguaucuuug

SEQ ID NO: 812452 - RNA, 19 nt, Homo sapiens
  misc_RNA (1)...(19): siRNA sense strand
gaauaugagugcaagaaga

SEQ ID NO: 812453 - RNA, 19 nt, Homo sapiens
  misc_RNA (1)...(19): siRNA sense strand
ugaaggaucuuucuauuag

SEQ ID NO: 812454 - RNA, 19 nt, Homo sapiens
  misc_RNA (1)...(19): siRNA sense strand
gaaaauaacuuugcagaga

SEQ ID NO: 812455 - RNA, 19 nt, Homo sapiens
  misc_RNA (1)...(19): siRNA sense strand
gcugaagaauacacuguua

SEQ ID NO: 812456 - RNA, 19 nt, Homo sapiens
  misc_RNA (1)...(19): siRNA sense strand
gaucugcucucaacaguuc

SEQ ID NO: 812457 - RNA, 19 nt, Homo sapiens
  misc_RNA (1)...(19): siRNA sense strand
ccagaaaccuaucaacaga

SEQ ID NO: 812458 - RNA, 19 nt, Homo sapiens
  misc_RNA (1)...(19): siRNA sense strand
gaacuggaauuacgagucu

SEQ ID NO: 812459 - RNA, 19 nt, Homo sapiens
  misc_RNA (1)...(19): siRNA sense strand
caacagucaucuacacuug

SEQ ID NO: 812460 - RNA, 19 nt, Homo sapiens
  misc_RNA (1)...(19): siRNA sense strand
gcagcagauucucgauuua

SEQ ID NO: 812461 - RNA, 19 nt, Homo sapiens
  misc_RNA (1)...(19): siRNA sense strand
ccaaagacgucauuguuca

SEQ ID NO: 812462 - RNA, 19 nt, Homo sapiens
  misc_RNA (1)...(19): siRNA sense strand
gcauaaaugugacaacagu

SEQ ID NO: 812463 - RNA, 19 nt, Homo sapiens
  misc_RNA (1)...(19): siRNA sense strand
caccagaaaucaucuuuga

SEQ ID NO: 812464 - RNA, 19 nt, Homo sapiens
  misc_RNA (1)...(19): siRNA sense strand
gcacugaacuggaauuacg

SEQ ID NO: 812465 - RNA, 19 nt, Homo sapiens
  misc_RNA (1)...(19): siRNA sense strand
gccaacaccugguucauug

SEQ ID NO: 812466 - RNA, 19 nt, Homo sapiens
  misc_RNA (1)...(19): siRNA sense strand
gaacaacagucaucuacac

SEQ ID NO: 812467 - RNA, 19 nt, Homo sapiens
  misc_RNA (1)...(19): siRNA sense strand
cuacauaccugaaggaucu

SEQ ID NO: 812468 - RNA, 19 nt, Homo sapiens
  misc_RNA (1)...(19): siRNA sense strand
ccaaggcccugcuggcuuu

SEQ ID NO: 812469 - RNA, 19 nt, Homo sapiens
  misc_RNA (1)...(19): siRNA sense strand
ccaggacaaucgcuacaua

SEQ ID NO: 812470 - RNA, 19 nt, Homo sapiens
  misc_RNA (1)...(19): siRNA sense strand
caacagcaauggaccaauc

SEQ ID NO: 812471 - RNA, 19 nt, Homo sapiens
  misc_RNA (1)...(19): siRNA sense strand
ggaauaacacugaccaaau

SEQ ID NO: 812472 - RNA, 19 nt, Homo sapiens
  misc_RNA (1)...(19): siRNA sense strand
gauguguguugucacuuua

SEQ ID NO: 812473 - RNA, 19 nt, Homo sapiens
  misc_RNA (1)...(19): siRNA sense strand
gagcauaaaugugacaaca

SEQ ID NO: 812474 - RNA, 19 nt, Homo sapiens
  misc_RNA (1)...(19): siRNA sense strand
guucacagcuacuacauuc

SEQ ID NO: 812475 - RNA, 19 nt, Homo sapiens
  misc_RNA (1)...(19): siRNA sense strand
cagaggcagugcaaacaua

SEQ ID NO: 812476 - RNA, 19 nt, Homo sapiens
  misc_RNA (1)...(19): siRNA sense strand
ggaauuacgagucuacuau

SEQ ID NO: 812477 - RNA, 19 nt, Homo sapiens
  misc_RNA (1)...(19): siRNA sense strand
ggauggagacuacaaaguu

SEQ ID NO: 812478 - RNA, 19 nt, Homo sapiens
  misc_RNA (1)...(19): siRNA sense strand
uaaagccaaugaacaaguu

SEQ ID NO: 812479 - RNA, 19 nt, Homo sapiens
  misc_RNA (1)...(19): siRNA sense strand
cgacaacaauccuguaucu

SEQ ID NO: 812480 - RNA, 19 nt, Homo sapiens
  misc_RNA (1)...(19): siRNA sense strand
gagaagagcagccuguuuc

SEQ ID NO: 812481 - RNA, 19 nt, Homo sapiens
  misc_RNA (1)...(19): siRNA sense strand
caucuacacuugugaguuc

SEQ ID NO: 812482 - RNA, 19 nt, Homo sapiens
  misc_RNA (1)...(19): siRNA sense strand
gacaaucgcuacauacucu

SEQ ID NO: 812483 - RNA, 19 nt, Homo sapiens
  misc_RNA (1)...(19): siRNA sense strand
ggaguggaauggaaccuau

SEQ ID NO: 812484 - RNA, 19 nt, Homo sapiens
  misc_RNA (1)...(19): siRNA sense strand
cagacuaaauguaggcuuu

SEQ ID NO: 812485 - RNA, 19 nt, Homo sapiens
  misc_RNA (1)...(19): siRNA sense strand
ucuaugaguucuccaauau

SEQ ID NO: 812486 - RNA, 19 nt, Homo sapiens
  misc_RNA (1)...(19): siRNA sense strand
caacaucccuggguucauc

SEQ ID NO: 812487 - RNA, 19 nt, Homo sapiens
  misc_RNA (1)...(19): siRNA sense strand
gaaccuaucacugcauauu

SEQ ID NO: 812488 - RNA, 19 nt, Homo sapiens
  misc_RNA (1)...(19): siRNA sense strand
gaagaggcacugaggcaaa

SEQ ID NO: 812489 - RNA, 19 nt, Homo sapiens
  misc_RNA (1)...(19): siRNA sense strand
gccauugccuucugucuug

SEQ ID NO: 812490 - RNA, 19 nt, Homo sapiens
  misc_RNA (1)...(19): siRNA sense strand
guaacuaugaugagguuua

SEQ ID NO: 812491 - RNA, 19 nt, Homo sapiens
  misc_RNA (1)...(19): siRNA sense strand
acaacaauccuguaucuuu

SEQ ID NO: 812492 - RNA, 19 nt, Homo sapiens
  misc_RNA (1)...(19): siRNA sense strand
ggaccaaccuuguguucca

SEQ ID NO: 812493 - RNA, 19 nt, Homo sapiens
  misc_RNA (1)...(19): siRNA sense strand
gaaagccauugccuucugu

SEQ ID NO: 812494 - RNA, 19 nt, Homo sapiens
  misc_RNA (1)...(19): siRNA sense strand
gcuacuacauucaguggaa

SEQ ID NO: 812495 - RNA, 19 nt, Homo sapiens
  misc_RNA (1)...(19): siRNA sense strand
agacaaagcggaacaugaa

SEQ ID NO: 812496 - RNA, 19 nt, Homo sapiens
  misc_RNA (1)...(19): siRNA sense strand
gaguaacuaugaugagguu

SEQ ID NO: 812497 - RNA, 19 nt, Homo sapiens
  misc_RNA (1)...(19): siRNA sense strand
ggagcaaaguagaauggaa

SEQ ID NO: 812498 - RNA, 19 nt, Homo sapiens
  misc_RNA (1)...(19): siRNA sense strand
caccaucacuugaguuaau

SEQ ID NO: 812499 - RNA, 19 nt, Homo sapiens
  misc_RNA (1)...(19): siRNA sense strand
gcuaaggcuuugaucaaga

SEQ ID NO: 812500 - RNA, 19 nt, Homo sapiens
  misc_RNA (1)...(19): siRNA sense strand
gcagucaggguaauguuaa

SEQ ID NO: 812501 - RNA, 19 nt, Homo sapiens
  misc_RNA (1)...(19): siRNA sense strand
gaggagguaucuugaugga

SEQ ID NO: 812502 - RNA, 19 nt, Homo sapiens
  misc_RNA (1)...(19): siRNA sense strand
aaaggugucuucacaaucu

SEQ ID NO: 812503 - RNA, 19 nt, Homo sapiens
  misc_RNA (1)...(19): siRNA sense strand
cacgugcucucuacgguua

SEQ ID NO: 812504 - RNA, 19 nt, Homo sapiens
  misc_RNA (1)...(19): siRNA sense strand
gaacagcaguuggaaaucc

SEQ ID NO: 812505 - RNA, 19 nt, Homo sapiens
  misc_RNA (1)...(19): siRNA sense strand
gaagaacagcaguuggaaa

SEQ ID NO: 812506 - RNA, 19 nt, Homo sapiens
  misc_RNA (1)...(19): siRNA sense strand
ucagugaugugaguaacua

SEQ ID NO: 812507 - RNA, 19 nt, Homo sapiens
  misc_RNA (1)...(19): siRNA sense strand
ccugaaggaucuuucuauu

SEQ ID NO: 812508 - RNA, 19 nt, Homo sapiens
  misc_RNA (1)...(19): siRNA sense strand
uaugaguucuccaauauca

SEQ ID NO: 812509 - RNA, 19 nt, Homo sapiens
  misc_RNA (1)...(19): siRNA sense strand
ggagaagagcagccuguuu

SEQ ID NO: 812510 - RNA, 19 nt, Homo sapiens
  misc_RNA (1)...(19): siRNA sense strand
ggaucuuucuauuagcaua

SEQ ID NO: 812511 - RNA, 19 nt, Homo sapiens
  misc_RNA (1)...(19): siRNA sense strand
caagaagaccucaugaaca

SEQ ID NO: 812512 - RNA, 19 nt, Homo sapiens
  misc_RNA (1)...(19): siRNA sense strand
ggcuauggcugcccacuug

SEQ ID NO: 812513 - RNA, 19 nt, Homo sapiens
  misc_RNA (1)...(19): siRNA sense strand
ugacaagagcuaucuagaa

SEQ ID NO: 812514 - RNA, 19 nt, Homo sapiens
  misc_RNA (1)...(19): siRNA sense strand
caacccaaguaaauucaga

SEQ ID NO: 812515 - RNA, 19 nt, Homo sapiens
  misc_RNA (1)...(19): siRNA sense strand
gaacaugaaaucagcucuu

SEQ ID NO: 812516 - RNA, 19 nt, Homo sapiens
  misc_RNA (1)...(19): siRNA sense strand
gaauuacgagucuacuauu

SEQ ID NO: 812517 - RNA, 19 nt, Homo sapiens
  misc_RNA (1)...(19): siRNA sense strand
ccggaaggguuacggaauu

SEQ ID NO: 812518 - RNA, 19 nt, Homo sapiens
  misc_RNA (1)...(19): siRNA sense strand
acaagcagguccacucaga

SEQ ID NO: 812519 - RNA, 19 nt, Homo sapiens
  misc_RNA (1)...(19): siRNA sense strand
aaacuaaugugcagaugag

SEQ ID NO: 812520 - RNA, 19 nt, Homo sapiens
  misc_RNA (1)...(19): siRNA sense strand
ugauguguguugucacuuu

SEQ ID NO: 812521 - RNA, 19 nt, Homo sapiens
  misc_RNA (1)...(19): siRNA sense strand
guuaugcccauccaaauuu

SEQ ID NO: 812522 - RNA, 19 nt, Homo sapiens
  misc_RNA (1)...(19): siRNA sense strand
aaauguaggcuuucaagaa

SEQ ID NO: 812523 - RNA, 19 nt, Homo sapiens
  misc_RNA (1)...(19): siRNA sense strand
uuccagggauuauucauuu

SEQ ID NO: 812524 - RNA, 19 nt, Homo sapiens
  misc_RNA (1)...(19): siRNA sense strand
cgccacaccugcauaguga

SEQ ID NO: 812525 - RNA, 19 nt, Homo sapiens
  misc_RNA (1)...(19): siRNA sense strand
ccagauggcuaaggcuuug

SEQ ID NO: 812526 - RNA, 19 nt, Homo sapiens
  misc_RNA (1)...(19): siRNA sense strand
ccaaugcugcuaauaauuc

SEQ ID NO: 812527 - RNA, 19 nt, Homo sapiens
  misc_RNA (1)...(19): siRNA sense strand
uaccaaugcugcuaauaau

SEQ ID NO: 812528 - RNA, 19 nt, Homo sapiens
  misc_RNA (1)...(19): siRNA sense strand
gaagaccucaugaacacuu

SEQ ID NO: 812529 - RNA, 19 nt, Homo sapiens
  misc_RNA (1)...(19): siRNA sense strand
ccaauaucaaggagauuua

SEQ ID NO: 812530 - RNA, 19 nt, Homo sapiens
  misc_RNA (1)...(19): siRNA sense strand
ggaaagucauccagaagcu

SEQ ID NO: 812531 - RNA, 19 nt, Homo sapiens
  misc_RNA (1)...(19): siRNA sense strand
uuaccaaugcugcuaauaa

SEQ ID NO: 812532 - RNA, 19 nt, Homo sapiens
  misc_RNA (1)...(19): siRNA sense strand
caaacacaauuucaaugca

SEQ ID NO: 812533 - RNA, 19 nt, Homo sapiens
  misc_RNA (1)...(19): siRNA sense strand
aaacaagugugcuacaaac

SEQ ID NO: 812534 - RNA, 19 nt, Homo sapiens
  misc_RNA (1)...(19): siRNA sense strand
accuaucacugcauauuua

SEQ ID NO: 812535 - RNA, 19 nt, Homo sapiens
  misc_RNA (1)...(19): siRNA sense strand
gcaaacugauauuagacau

SEQ ID NO: 812536 - RNA, 19 nt, Homo sapiens
  misc_RNA (1)...(19): siRNA sense strand
ggacuacaacuccuuucaa

SEQ ID NO: 812537 - RNA, 19 nt, Homo sapiens
  misc_RNA (1)...(19): siRNA sense strand
gcagucggauucgucuauu

SEQ ID NO: 812538 - RNA, 19 nt, Homo sapiens
  misc_RNA (1)...(19): siRNA sense strand
uaacuuugcagagagcuua

SEQ ID NO: 812539 - RNA, 19 nt, Homo sapiens
  misc_RNA (1)...(19): siRNA sense strand
gcaaauaccuuaaagcaaa

SEQ ID NO: 812540 - RNA, 19 nt, Homo sapiens
  misc_RNA (1)...(19): siRNA sense strand
caacuuggguccuuauuua

SEQ ID NO: 812541 - RNA, 19 nt, Homo sapiens
  misc_RNA (1)...(19): siRNA sense strand
gcucuuagcuccaauaauu

SEQ ID NO: 812542 - RNA, 19 nt, Homo sapiens
  misc_RNA (1)...(19): siRNA sense strand
gcagagagcuauccuguga

SEQ ID NO: 812543 - RNA, 19 nt, Homo sapiens
  misc_RNA (1)...(19): siRNA sense strand
gaaaucaugugguuuaaga

SEQ ID NO: 812544 - RNA, 19 nt, Homo sapiens
  misc_RNA (1)...(19): siRNA sense strand
ggacaaguuucauacauuu

SEQ ID NO: 812545 - RNA, 19 nt, Homo sapiens
  misc_RNA (1)...(19): siRNA sense strand
ccagaugccuauaagauua

SEQ ID NO: 812546 - RNA, 19 nt, Homo sapiens
  misc_RNA (1)...(19): siRNA sense strand
ugaaacagcugccaacauu

SEQ ID NO: 812547 - RNA, 19 nt, Homo sapiens
  misc_RNA (1)...(19): siRNA sense strand
gaacaugggauacugcaua

SEQ ID NO: 812548 - RNA, 19 nt, Homo sapiens
  misc_RNA (1)...(19): siRNA sense strand
gauguacccuuuccuaauu

SEQ ID NO: 812549 - RNA, 19 nt, Homo sapiens
  misc_RNA (1)...(19): siRNA sense strand
guaaccaccuaacaaauuu

SEQ ID NO: 812550 - RNA, 19 nt, Homo sapiens
  misc_RNA (1)...(19): siRNA sense strand
gaacugauacccugacuga

SEQ ID NO: 812551 - RNA, 19 nt, Homo sapiens
  misc_RNA (1)...(19): siRNA sense strand
ccagcaacuuugauaauua

SEQ ID NO: 812552 - RNA, 19 nt, Homo sapiens
  misc_RNA (1)...(19): siRNA sense strand
gcacaggauuuguagugua

SEQ ID NO: 812553 - RNA, 19 nt, Homo sapiens
  misc_RNA (1)...(19): siRNA sense strand
gagcacagaaggaaacuua

SEQ ID NO: 812554 - RNA, 19 nt, Homo sapiens
  misc_RNA (1)...(19): siRNA sense strand
gagcuucgcuguccaggaa

SEQ ID NO: 812555 - RNA, 19 nt, Homo sapiens
  misc_RNA (1)...(19): siRNA sense strand
ggacucauguauauuaaug

SEQ ID NO: 812556 - RNA, 19 nt, Homo sapiens
  misc_RNA (1)...(19): siRNA sense strand
gaaagacccucuguuaaag

SEQ ID NO: 812557 - RNA, 19 nt, Homo sapiens
  misc_RNA (1)...(19): siRNA sense strand
cuagaaagacccucuguua

SEQ ID NO: 812558 - RNA, 19 nt, Homo sapiens
  misc_RNA (1)...(19): siRNA sense strand
cgagaaaucaugugguuua

SEQ ID NO: 812559 - RNA, 19 nt, Homo sapiens
  misc_RNA (1)...(19): siRNA sense strand
ggucaaaucuguauaugag

SEQ ID NO: 812560 - RNA, 19 nt, Homo sapiens
  misc_RNA (1)...(19): siRNA sense strand
gagaauauccgauguuauc

SEQ ID NO: 812561 - RNA, 19 nt, Homo sapiens
  misc_RNA (1)...(19): siRNA sense strand
gcaauggucgagacaguua

SEQ ID NO: 812562 - RNA, 19 nt, Homo sapiens
  misc_RNA (1)...(19): siRNA sense strand
gguaaucuaugcaacagaa

SEQ ID NO: 812563 - RNA, 19 nt, Homo sapiens
  misc_RNA (1)...(19): siRNA sense strand
caauucaccuugacucuga

SEQ ID NO: 812564 - RNA, 19 nt, Homo sapiens
  misc_RNA (1)...(19): siRNA sense strand
gagaaugggcuauggguaa

SEQ ID NO: 812565 - RNA, 19 nt, Homo sapiens
  misc_RNA (1)...(19): siRNA sense strand
ggaguaaagcuaaacauug

SEQ ID NO: 812566 - RNA, 19 nt, Homo sapiens
  misc_RNA (1)...(19): siRNA sense strand
ucagagucuuccuuuauua

SEQ ID NO: 812567 - RNA, 19 nt, Homo sapiens
  misc_RNA (1)...(19): siRNA sense strand
guugaaaucuggugaaaca

SEQ ID NO: 812568 - RNA, 19 nt, Homo sapiens
  misc_RNA (1)...(19): siRNA sense strand
ccaauugccugugcuguuu

SEQ ID NO: 812569 - RNA, 19 nt, Homo sapiens
  misc_RNA (1)...(19): siRNA sense strand
ucucaaagaugcaauaaca

SEQ ID NO: 812570 - RNA, 19 nt, Homo sapiens
  misc_RNA (1)...(19): siRNA sense strand
ggaaaugccugcgaacaca

SEQ ID NO: 812571 - RNA, 19 nt, Homo sapiens
  misc_RNA (1)...(19): siRNA sense strand
gagaaaucaugugguuuaa

SEQ ID NO: 812572 - RNA, 19 nt, Homo sapiens
  misc_RNA (1)...(19): siRNA sense strand
agaaagacccucuguuaaa

SEQ ID NO: 812573 - RNA, 19 nt, Homo sapiens
  misc_RNA (1)...(19): siRNA sense strand
cuagagagcuggcugaaca

SEQ ID NO: 812574 - RNA, 19 nt, Homo sapiens
  misc_RNA (1)...(19): siRNA sense strand
ggaagaagaaaccggagua

SEQ ID NO: 812575 - RNA, 19 nt, Homo sapiens
  misc_RNA (1)...(19): siRNA sense strand
ggaaugacacgguucgaaa

SEQ ID NO: 812576 - RNA, 19 nt, Homo sapiens
  misc_RNA (1)...(19): siRNA sense strand
uccaaugccuuuaugauuu

SEQ ID NO: 812577 - RNA, 19 nt, Homo sapiens
  misc_RNA (1)...(19): siRNA sense strand
caacagagagcccuacaga

SEQ ID NO: 812578 - RNA, 19 nt, Homo sapiens
  misc_RNA (1)...(19): siRNA sense strand
ccacaaaucauucuguuau

SEQ ID NO: 812579 - RNA, 19 nt, Homo sapiens
  misc_RNA (1)...(19): siRNA sense strand
gauaacagacccuucauca

SEQ ID NO: 812580 - RNA, 19 nt, Homo sapiens
  misc_RNA (1)...(19): siRNA sense strand
ccaggaacauaguaaaguu

SEQ ID NO: 812581 - RNA, 19 nt, Homo sapiens
  misc_RNA (1)...(19): siRNA sense strand
gaguaaagcuaaacauugc

SEQ ID NO: 812582 - RNA, 19 nt, Homo sapiens
  misc_RNA (1)...(19): siRNA sense strand
gccuaucucuucaccauuu

SEQ ID NO: 812583 - RNA, 19 nt, Homo sapiens
  misc_RNA (1)...(19): siRNA sense strand
gcucuucucugccuauuag

SEQ ID NO: 812584 - RNA, 19 nt, Homo sapiens
  misc_RNA (1)...(19): siRNA sense strand
uaacagacccuucaucaag

SEQ ID NO: 812585 - RNA, 19 nt, Homo sapiens
  misc_RNA (1)...(19): siRNA sense strand
guaacaccauccacaagaa

SEQ ID NO: 812586 - RNA, 19 nt, Homo sapiens
  misc_RNA (1)...(19): siRNA sense strand
ccugugguauuuacuguua

SEQ ID NO: 812587 - RNA, 19 nt, Homo sapiens
  misc_RNA (1)...(19): siRNA sense strand
gggacaaccuacuuuaugu

SEQ ID NO: 812588 - RNA, 19 nt, Homo sapiens
  misc_RNA (1)...(19): siRNA sense strand
gaaggaacaugggauacug

SEQ ID NO: 812589 - RNA, 19 nt, Homo sapiens
  misc_RNA (1)...(19): siRNA sense strand
ccaaugccuuuaugauuug

SEQ ID NO: 812590 - RNA, 19 nt, Homo sapiens
  misc_RNA (1)...(19): siRNA sense strand
gcacaucauggacaaguuu

SEQ ID NO: 812591 - RNA, 19 nt, Homo sapiens
  misc_RNA (1)...(19): siRNA sense strand
ggacaaccuacuuuaugua

SEQ ID NO: 812592 - RNA, 19 nt, Homo sapiens
  misc_RNA (1)...(19): siRNA sense strand
gaacauucacguaggaaau

SEQ ID NO: 812593 - RNA, 19 nt, Homo sapiens
  misc_RNA (1)...(19): siRNA sense strand
cuauagguguaucaacuua

SEQ ID NO: 812594 - RNA, 19 nt, Homo sapiens
  misc_RNA (1)...(19): siRNA sense strand
agaagaaaccggaguacua

SEQ ID NO: 812595 - RNA, 19 nt, Homo sapiens
  misc_RNA (1)...(19): siRNA sense strand
caaccuacuuuauguaugg

SEQ ID NO: 812596 - RNA, 19 nt, Homo sapiens
  misc_RNA (1)...(19): siRNA sense strand
uggcaggacugaugacaaa

SEQ ID NO: 812597 - RNA, 19 nt, Homo sapiens
  misc_RNA (1)...(19): siRNA sense strand
caaccgaacugaccaacca

SEQ ID NO: 812598 - RNA, 19 nt, Homo sapiens
  misc_RNA (1)...(19): siRNA sense strand
gaagaccaacuacaaccua

SEQ ID NO: 812599 - RNA, 19 nt, Homo sapiens
  misc_RNA (1)...(19): siRNA sense strand
uggagaauauccgauguua

SEQ ID NO: 812600 - RNA, 19 nt, Homo sapiens
  misc_RNA (1)...(19): siRNA sense strand
gaagaaaccggaguacuag

SEQ ID NO: 812601 - RNA, 19 nt, Homo sapiens
  misc_RNA (1)...(19): siRNA sense strand
acagagaguuccauugguu

SEQ ID NO: 812602 - RNA, 19 nt, Homo sapiens
  misc_RNA (1)...(19): siRNA sense strand
acaaagaguucaguaacaa

SEQ ID NO: 812603 - RNA, 19 nt, Homo sapiens
  misc_RNA (1)...(19): siRNA sense strand
gaacagacaagaaaucacu

SEQ ID NO: 812604 - RNA, 19 nt, Homo sapiens
  misc_RNA (1)...(19): siRNA sense strand
ggaacauaguaaaguuuga

SEQ ID NO: 812605 - RNA, 19 nt, Homo sapiens
  misc_RNA (1)...(19): siRNA sense strand
cagcgucacucaacagaga

SEQ ID NO: 812606 - RNA, 19 nt, Homo sapiens
  misc_RNA (1)...(19): siRNA sense strand
caucauggccuaucucuuc

SEQ ID NO: 812607 - RNA, 19 nt, Homo sapiens
  misc_RNA (1)...(19): siRNA sense strand
ucgcugcccuguuacauuu

SEQ ID NO: 812608 - RNA, 19 nt, Homo sapiens
  misc_RNA (1)...(19): siRNA sense strand
gaaguuaagcacagugaug

SEQ ID NO: 812609 - RNA, 19 nt, Homo sapiens
  misc_RNA (1)...(19): siRNA sense strand
gcacagaaggaaacuuaga

SEQ ID NO: 812610 - RNA, 19 nt, Homo sapiens
  misc_RNA (1)...(19): siRNA sense strand
caaugaggcuacuggaaau

SEQ ID NO: 812611 - RNA, 19 nt, Homo sapiens
  misc_RNA (1)...(19): siRNA sense strand
ugacauagaccuggcagua

SEQ ID NO: 812612 - RNA, 19 nt, Homo sapiens
  misc_RNA (1)...(19): siRNA sense strand
ggauacaagugucauggau

SEQ ID NO: 812613 - RNA, 19 nt, Homo sapiens
  misc_RNA (1)...(19): siRNA sense strand
gcuaaacauugcauaucaa

SEQ ID NO: 812614 - RNA, 19 nt, Homo sapiens
  misc_RNA (1)...(19): siRNA sense strand
gucagagucuuccuuuauu

SEQ ID NO: 812615 - RNA, 19 nt, Homo sapiens
  misc_RNA (1)...(19): siRNA sense strand
ggauugaccugggccuuug

SEQ ID NO: 812616 - RNA, 19 nt, Homo sapiens
  misc_RNA (1)...(19): siRNA sense strand
uaacacagaaguugaaauc

SEQ ID NO: 812617 - RNA, 19 nt, Homo sapiens
  misc_RNA (1)...(19): siRNA sense strand
gcaggcacaucauggacaa

SEQ ID NO: 812618 - RNA, 19 nt, Homo sapiens
  misc_RNA (1)...(19): siRNA sense strand
gaucagggcaggcacauca

SEQ ID NO: 812619 - RNA, 19 nt, Homo sapiens
  misc_RNA (1)...(19): siRNA sense strand
caacaaauaagacacauac

SEQ ID NO: 812620 - RNA, 19 nt, Homo sapiens
  misc_RNA (1)...(19): siRNA sense strand
caaauaagacacauacuac

SEQ ID NO: 812621 - RNA, 19 nt, Homo sapiens
  misc_RNA (1)...(19): siRNA sense strand
ccuacaagcucccucauag

SEQ ID NO: 812622 - RNA, 19 nt, Homo sapiens
  misc_RNA (1)...(19): siRNA sense strand
acagagagcccuacagaga

SEQ ID NO: 812623 - RNA, 19 nt, Homo sapiens
  misc_RNA (1)...(19): siRNA sense strand
gcagucagagucuuccuuu

SEQ ID NO: 812624 - RNA, 19 nt, Homo sapiens
  misc_RNA (1)...(19): siRNA sense strand
cuacagggaauguuuauau

SEQ ID NO: 812625 - RNA, 19 nt, Homo sapiens
  misc_RNA (1)...(19): siRNA sense strand
uagaaagacccucuguuaa

SEQ ID NO: 812626 - RNA, 19 nt, Homo sapiens
  misc_RNA (1)...(19): siRNA sense strand
gaguggagaggcuaucaua

SEQ ID NO: 812627 - RNA, 19 nt, Homo sapiens
  misc_RNA (1)...(19): siRNA sense strand
acaaagagcgcaccaggaa

SEQ ID NO: 812628 - RNA, 19 nt, Homo sapiens
  misc_RNA (1)...(19): siRNA sense strand
gaaccuauaaauaccuuga

SEQ ID NO: 812629 - RNA, 19 nt, Homo sapiens
  misc_RNA (1)...(19): siRNA sense strand
gauacaagugucauggaua

SEQ ID NO: 812630 - RNA, 19 nt, Homo sapiens
  misc_RNA (1)...(19): siRNA sense strand
ugauggagcuuuguucuuc

SEQ ID NO: 812631 - RNA, 19 nt, Homo sapiens
  misc_RNA (1)...(19): siRNA sense strand
gaaagcagucagagucuuc

SEQ ID NO: 812632 - RNA, 19 nt, Homo sapiens
  misc_RNA (1)...(19): siRNA sense strand
guacagagaguuccauugg

SEQ ID NO: 812633 - RNA, 19 nt, Homo sapiens
  misc_RNA (1)...(19): siRNA sense strand
ggaccagcaacuuugauaa

SEQ ID NO: 812634 - RNA, 19 nt, Homo sapiens
  misc_RNA (1)...(19): siRNA sense strand
uggaacagauaaaguaugu

SEQ ID NO: 812635 - RNA, 19 nt, Homo sapiens
  misc_RNA (1)...(19): siRNA sense strand
gccaccauguugcuucaua

SEQ ID NO: 812636 - RNA, 19 nt, Homo sapiens
  misc_RNA (1)...(19): siRNA sense strand
gacccucuguuaaagauau

SEQ ID NO: 812637 - RNA, 19 nt, Homo sapiens
  misc_RNA (1)...(19): siRNA sense strand
caaaugccaauuaccauga

SEQ ID NO: 812638 - RNA, 19 nt, Homo sapiens
  misc_RNA (1)...(19): siRNA sense strand
ucauagcaaaugccaauua

SEQ ID NO: 812639 - RNA, 19 nt, Homo sapiens
  misc_RNA (1)...(19): siRNA sense strand
gagaaagccucaccugaua

SEQ ID NO: 812640 - RNA, 19 nt, Homo sapiens
  misc_RNA (1)...(19): siRNA sense strand
gaagacagcuggagguaug

SEQ ID NO: 812641 - RNA, 19 nt, Homo sapiens
  misc_RNA (1)...(19): siRNA sense strand
ucacugaccucuacuauga

SEQ ID NO: 812642 - RNA, 19 nt, Homo sapiens
  misc_RNA (1)...(19): siRNA sense strand
gaacauaugcugaaggauu

SEQ ID NO: 812643 - RNA, 19 nt, Homo sapiens
  misc_RNA (1)...(19): siRNA sense strand
ggaaccagcuugugagaga

SEQ ID NO: 812644 - RNA, 19 nt, Homo sapiens
  misc_RNA (1)...(19): siRNA sense strand
gguuggagauuacuucaua

SEQ ID NO: 812645 - RNA, 19 nt, Homo sapiens
  misc_RNA (1)...(19): siRNA sense strand
gaaaguggccugugucuca

SEQ ID NO: 812646 - RNA, 19 nt, Homo sapiens
  misc_RNA (1)...(19): siRNA sense strand
gaacugagccuugguaaca

SEQ ID NO: 812647 - RNA, 19 nt, Homo sapiens
  misc_RNA (1)...(19): siRNA sense strand
ucaacaagcugaagagaga

SEQ ID NO: 812648 - RNA, 19 nt, Homo sapiens
  misc_RNA (1)...(19): siRNA sense strand
gguacaaccuucucagcua

SEQ ID NO: 812649 - RNA, 19 nt, Homo sapiens
  misc_RNA (1)...(19): siRNA sense strand
cauuaaagguggacaaaga

SEQ ID NO: 812650 - RNA, 19 nt, Homo sapiens
  misc_RNA (1)...(19): siRNA sense strand
caacaagaccagaaaguga

SEQ ID NO: 812651 - RNA, 19 nt, Homo sapiens
  misc_RNA (1)...(19): siRNA sense strand
aacauaugcugaaggauua

SEQ ID NO: 812652 - RNA, 19 nt, Homo sapiens
  misc_RNA (1)...(19): siRNA sense strand
gaaguaugaugagaagaau

SEQ ID NO: 812653 - RNA, 19 nt, Homo sapiens
  misc_RNA (1)...(19): siRNA sense strand
gagacugggugcuucagaa

SEQ ID NO: 812654 - RNA, 19 nt, Homo sapiens
  misc_RNA (1)...(19): siRNA sense strand
gcacacagacacuggaaga

SEQ ID NO: 812655 - RNA, 19 nt, Homo sapiens
  misc_RNA (1)...(19): siRNA sense strand
uggccaagcuugacaguga

SEQ ID NO: 812656 - RNA, 19 nt, Homo sapiens
  misc_RNA (1)...(19): siRNA sense strand
uaaccuuucugcucuguug

SEQ ID NO: 812657 - RNA, 19 nt, Homo sapiens
  misc_RNA (1)...(19): siRNA sense strand
uucagaagcugcugcauuu

SEQ ID NO: 812658 - RNA, 19 nt, Homo sapiens
  misc_RNA (1)...(19): siRNA sense strand
uaacagcgcccaggaaaga

SEQ ID NO: 812659 - RNA, 19 nt, Homo sapiens
  misc_RNA (1)...(19): siRNA sense strand
uaagagccuugccauguug

SEQ ID NO: 812660 - RNA, 19 nt, Homo sapiens
  misc_RNA (1)...(19): siRNA sense strand
acucagagcugcagagcaa

SEQ ID NO: 812661 - RNA, 19 nt, Homo sapiens
  misc_RNA (1)...(19): siRNA sense strand
gaaaagcaagaucucauua

SEQ ID NO: 812662 - RNA, 19 nt, Homo sapiens
  misc_RNA (1)...(19): siRNA sense strand
acaaauacuugaagaagca

SEQ ID NO: 812663 - RNA, 19 nt, Homo sapiens
  misc_RNA (1)...(19): siRNA sense strand
agauugcccugaaguauga

SEQ ID NO: 812664 - RNA, 19 nt, Homo sapiens
  misc_RNA (1)...(19): siRNA sense strand
uuaagagccuugccauguu

SEQ ID NO: 812665 - RNA, 19 nt, Homo sapiens
  misc_RNA (1)...(19): siRNA sense strand
gaaagccucaccugauaug

SEQ ID NO: 812666 - RNA, 19 nt, Homo sapiens
  misc_RNA (1)...(19): siRNA sense strand
aaagcaagaucucauuaag

SEQ ID NO: 812667 - RNA, 19 nt, Homo sapiens
  misc_RNA (1)...(19): siRNA sense strand
ugacggagagguuaaaguu

SEQ ID NO: 812668 - RNA, 19 nt, Homo sapiens
  misc_RNA (1)...(19): siRNA sense strand
aggaggagcugcugaagga

SEQ ID NO: 812669 - RNA, 19 nt, Homo sapiens
  misc_RNA (1)...(19): siRNA sense strand
gaugggaagaggcauauga

SEQ ID NO: 812670 - RNA, 19 nt, Homo sapiens
  misc_RNA (1)...(19): siRNA sense strand
ggcaaggucuacuacauag

SEQ ID NO: 812671 - RNA, 19 nt, Homo sapiens
  misc_RNA (1)...(19): siRNA sense strand
gguaugaggagaccaguga

SEQ ID NO: 812672 - RNA, 19 nt, Homo sapiens
  misc_RNA (1)...(19): siRNA sense strand
gguaacagcgcccaggaaa

SEQ ID NO: 812673 - RNA, 19 nt, Homo sapiens
  misc_RNA (1)...(19): siRNA sense strand
acaaucaguuggcagagaa

SEQ ID NO: 812674 - RNA, 19 nt, Homo sapiens
  misc_RNA (1)...(19): siRNA sense strand
cgagaaagccucaccugau

SEQ ID NO: 812675 - RNA, 19 nt, Homo sapiens
  misc_RNA (1)...(19): siRNA sense strand
gcaacaagaccagaaagug

SEQ ID NO: 812676 - RNA, 19 nt, Homo sapiens
  misc_RNA (1)...(19): siRNA sense strand
gagaagaauaagcaauuug

SEQ ID NO: 812677 - RNA, 19 nt, Homo sapiens
  misc_RNA (1)...(19): siRNA sense strand
ugaaguaugaugagaagaa

SEQ ID NO: 812678 - RNA, 19 nt, Homo sapiens
  misc_RNA (1)...(19): siRNA sense strand
gaaccagcuugugagagaa

SEQ ID NO: 812679 - RNA, 19 nt, Homo sapiens
  misc_RNA (1)...(19): siRNA sense strand
caggcugucuugagagaaa

SEQ ID NO: 812680 - RNA, 19 nt, Homo sapiens
  misc_RNA (1)...(19): siRNA sense strand
gcaccaucauccgcucuaa

SEQ ID NO: 812681 - RNA, 19 nt, Homo sapiens
  misc_RNA (1)...(19): siRNA sense strand
ggaagcggcuggaaaagga

SEQ ID NO: 812682 - RNA, 19 nt, Homo sapiens
  misc_RNA (1)...(19): siRNA sense strand
agggugagcuucagacaga

SEQ ID NO: 812683 - RNA, 19 nt, Homo sapiens
  misc_RNA (1)...(19): siRNA sense strand
caucauccagcuccaagua

SEQ ID NO: 812684 - RNA, 19 nt, Homo sapiens
  misc_RNA (1)...(19): siRNA sense strand
gcacaagggugagcuucag

SEQ ID NO: 812685 - RNA, 19 nt, Homo sapiens
  misc_RNA (1)...(19): siRNA sense strand
caccuuugcugacugcauu

SEQ ID NO: 812686 - RNA, 19 nt, Homo sapiens
  misc_RNA (1)...(19): siRNA sense strand
cagcuucacugaccucuac

SEQ ID NO: 812687 - RNA, 19 nt, Homo sapiens
  misc_RNA (1)...(19): siRNA sense strand
gauugcgccuucgauauga

SEQ ID NO: 812688 - RNA, 19 nt, Homo sapiens
  misc_RNA (1)...(19): siRNA sense strand
cggcaaggucuacuacaua

SEQ ID NO: 812689 - RNA, 19 nt, Homo sapiens
  misc_RNA (1)...(19): siRNA sense strand
gggaccggcugauccuuau

SEQ ID NO: 812690 - RNA, 19 nt, Homo sapiens
  misc_RNA (1)...(19): siRNA sense strand
gacggagagguuaaaguua

SEQ ID NO: 812691 - RNA, 19 nt, Homo sapiens
  misc_RNA (1)...(19): siRNA sense strand
acccacagguuggagauua

SEQ ID NO: 812692 - RNA, 19 nt, Homo sapiens
  misc_RNA (1)...(19): siRNA sense strand
caguggagcuggagaagag

SEQ ID NO: 812693 - RNA, 19 nt, Homo sapiens
  misc_RNA (1)...(19): siRNA sense strand
gcagcaacaagaccagaaa

SEQ ID NO: 812694 - RNA, 19 nt, Homo sapiens
  misc_RNA (1)...(19): siRNA sense strand
cagaagcugcugcauuuga

SEQ ID NO: 812695 - RNA, 19 nt, Homo sapiens
  misc_RNA (1)...(19): siRNA sense strand
caccaaaccgcucaccuuu

SEQ ID NO: 812696 - RNA, 19 nt, Homo sapiens
  misc_RNA (1)...(19): siRNA sense strand
ggugaugccuuccucaacu

SEQ ID NO: 812697 - RNA, 19 nt, Homo sapiens
  misc_RNA (1)...(19): siRNA sense strand
gauccugaaagcugaaauu

SEQ ID NO: 812698 - RNA, 19 nt, Homo sapiens
  misc_RNA (1)...(19): siRNA sense strand
ucagauugcgccuucgaua

SEQ ID NO: 812699 - RNA, 19 nt, Homo sapiens
  misc_RNA (1)...(19): siRNA sense strand
agcaagaucucauuaagag

SEQ ID NO: 812700 - RNA, 19 nt, Homo sapiens
  misc_RNA (1)...(19): siRNA sense strand
gaauaucccagcucucucu

SEQ ID NO: 812701 - RNA, 19 nt, Homo sapiens
  misc_RNA (1)...(19): siRNA sense strand
ucaaggagcagcuggaaca

SEQ ID NO: 812702 - RNA, 19 nt, Homo sapiens
  misc_RNA (1)...(19): siRNA sense strand
cgacaggagccaucuggaa

SEQ ID NO: 812703 - RNA, 19 nt, Homo sapiens
  misc_RNA (1)...(19): siRNA sense strand
gcaggaacauaugcugaag

SEQ ID NO: 812704 - RNA, 19 nt, Homo sapiens
  misc_RNA (1)...(19): siRNA sense strand
gaaacaaaagccaucaaaa

SEQ ID NO: 812705 - RNA, 19 nt, Homo sapiens
  misc_RNA (1)...(19): siRNA sense strand
aggaacauaugcugaagga

SEQ ID NO: 812706 - RNA, 19 nt, Homo sapiens
  misc_RNA (1)...(19): siRNA sense strand
gaggagaccagugagaaug

SEQ ID NO: 812707 - RNA, 19 nt, Homo sapiens
  misc_RNA (1)...(19): siRNA sense strand
ggcaggagcagcacacaga

SEQ ID NO: 812708 - RNA, 19 nt, Homo sapiens
  misc_RNA (1)...(19): siRNA sense strand
uuaaucauccagcugagua

SEQ ID NO: 812709 - RNA, 19 nt, Homo sapiens
  misc_RNA (1)...(19): siRNA sense strand
aaacaguaccuggauguga

SEQ ID NO: 812710 - RNA, 19 nt, Homo sapiens
  misc_RNA (1)...(19): siRNA sense strand
ggagggagaagaggauguu

SEQ ID NO: 812711 - RNA, 19 nt, Homo sapiens
  misc_RNA (1)...(19): siRNA sense strand
gucaguggcuggagacagu

SEQ ID NO: 812712 - RNA, 19 nt, Homo sapiens
  misc_RNA (1)...(19): siRNA sense strand
gauaugaagaggcuaagag

SEQ ID NO: 812713 - RNA, 19 nt, Homo sapiens
  misc_RNA (1)...(19): siRNA sense strand
uggcagagaaggucagauu

SEQ ID NO: 812714 - RNA, 19 nt, Homo sapiens
  misc_RNA (1)...(19): siRNA sense strand
ggacgccucagacacucua

SEQ ID NO: 812715 - RNA, 19 nt, Homo sapiens
  misc_RNA (1)...(19): siRNA sense strand
ucauccagcuccaaguaug

SEQ ID NO: 812716 - RNA, 19 nt, Homo sapiens
  misc_RNA (1)...(19): siRNA sense strand
gagaaggagcugccacagu

SEQ ID NO: 812717 - RNA, 19 nt, Homo sapiens
  misc_RNA (1)...(19): siRNA sense strand
ggcgggagcaggaacauau

SEQ ID NO: 812718 - RNA, 19 nt, Homo sapiens
  misc_RNA (1)...(19): siRNA sense strand
cggcugaaucggagugaua

SEQ ID NO: 812719 - RNA, 19 nt, Homo sapiens
  misc_RNA (1)...(19): siRNA sense strand
gcagagaaggucagauugc

SEQ ID NO: 812720 - RNA, 19 nt, Homo sapiens
  misc_RNA (1)...(19): siRNA sense strand
gcaucaacagcaacaauca

SEQ ID NO: 812721 - RNA, 19 nt, Homo sapiens
  misc_RNA (1)...(19): siRNA sense strand
gcagcuacaaacuggauga

SEQ ID NO: 812722 - RNA, 19 nt, Homo sapiens
  misc_RNA (1)...(19): siRNA sense strand
aaugagguguucuggguau

SEQ ID NO: 812723 - RNA, 19 nt, Homo sapiens
  misc_RNA (1)...(19): siRNA sense strand
aagaggaaccagcuuguga

SEQ ID NO: 812724 - RNA, 19 nt, Homo sapiens
  misc_RNA (1)...(19): siRNA sense strand
cugcauuagugaugaguug

SEQ ID NO: 812725 - RNA, 19 nt, Homo sapiens
  misc_RNA (1)...(19): siRNA sense strand
gaagaggcuaagagaagga

SEQ ID NO: 812726 - RNA, 19 nt, Homo sapiens
  misc_RNA (1)...(19): siRNA sense strand
cgaaacaguaccuggaugu

SEQ ID NO: 812727 - RNA, 19 nt, Homo sapiens
  misc_RNA (1)...(19): siRNA sense strand
ggaaaagcaagaucucauu

SEQ ID NO: 812728 - RNA, 19 nt, Homo sapiens
  misc_RNA (1)...(19): siRNA sense strand
ucgggaagcuucggcauca

SEQ ID NO: 812729 - RNA, 19 nt, Homo sapiens
  misc_RNA (1)...(19): siRNA sense strand
ucagggagaagauggcauu

SEQ ID NO: 812730 - RNA, 19 nt, Homo sapiens
  misc_RNA (1)...(19): siRNA sense strand
ugaaucggagugauaguga

SEQ ID NO: 812731 - RNA, 19 nt, Homo sapiens
  misc_RNA (1)...(19): siRNA sense strand
ggaagacagcuggagguau

SEQ ID NO: 812732 - RNA, 19 nt, Homo sapiens
  misc_RNA (1)...(19): siRNA sense strand
gcuacaaauacuugaagaa

SEQ ID NO: 812733 - RNA, 19 nt, Homo sapiens
  misc_RNA (1)...(19): siRNA sense strand
gaugagaagaauaagcaau

SEQ ID NO: 812734 - RNA, 19 nt, Homo sapiens
  misc_RNA (1)...(19): siRNA sense strand
ggugcgacccgaauucaga

SEQ ID NO: 812735 - RNA, 19 nt, Homo sapiens
  misc_RNA (1)...(19): siRNA sense strand
gaggaaccagcuugugaga

SEQ ID NO: 812736 - RNA, 19 nt, Homo sapiens
  misc_RNA (1)...(19): siRNA sense strand
cagauugcccugaaguaug

SEQ ID NO: 812737 - RNA, 19 nt, Homo sapiens
  misc_RNA (1)...(19): siRNA sense strand
cagcuccacucuguccaaa

SEQ ID NO: 812738 - RNA, 19 nt, Homo sapiens
  misc_RNA (1)...(19): siRNA sense strand
ccugaaguaugaugagaag

SEQ ID NO: 812739 - RNA, 19 nt, Homo sapiens
  misc_RNA (1)...(19): siRNA sense strand
gaacauaucuucuaaagga

SEQ ID NO: 812740 - RNA, 19 nt, Homo sapiens
  misc_RNA (1)...(19): siRNA sense strand
gaacauaucugccauuuca

SEQ ID NO: 812741 - RNA, 19 nt, Homo sapiens
  misc_RNA (1)...(19): siRNA sense strand
ggaaagauguguuauguga

SEQ ID NO: 812742 - RNA, 19 nt, Homo sapiens
  misc_RNA (1)...(19): siRNA sense strand
gaaucaagcugcaaaguaa

SEQ ID NO: 812743 - RNA, 19 nt, Homo sapiens
  misc_RNA (1)...(19): siRNA sense strand
cgaauuacauugcagaaua

SEQ ID NO: 812744 - RNA, 19 nt, Homo sapiens
  misc_RNA (1)...(19): siRNA sense strand
caaaggugguucacaaaua

SEQ ID NO: 812745 - RNA, 19 nt, Homo sapiens
  misc_RNA (1)...(19): siRNA sense strand
uaucauagaucguguggua

SEQ ID NO: 812746 - RNA, 19 nt, Homo sapiens
  misc_RNA (1)...(19): siRNA sense strand
ggaaauaggaguacaaaga

SEQ ID NO: 812747 - RNA, 19 nt, Homo sapiens
  misc_RNA (1)...(19): siRNA sense strand
aaucaucgcuguucuuuaa

SEQ ID NO: 812748 - RNA, 19 nt, Homo sapiens
  misc_RNA (1)...(19): siRNA sense strand
ggacugacauuuguuacua

SEQ ID NO: 812749 - RNA, 19 nt, Homo sapiens
  misc_RNA (1)...(19): siRNA sense strand
ggaguaaaggcuagaauua

SEQ ID NO: 812750 - RNA, 19 nt, Homo sapiens
  misc_RNA (1)...(19): siRNA sense strand
gaaugaagaugaccuagau

SEQ ID NO: 812751 - RNA, 19 nt, Homo sapiens
  misc_RNA (1)...(19): siRNA sense strand
ugaaguggaugacguagua

SEQ ID NO: 812752 - RNA, 19 nt, Homo sapiens
  misc_RNA (1)...(19): siRNA sense strand
gaauaucucaugagcaaua

SEQ ID NO: 812753 - RNA, 19 nt, Homo sapiens
  misc_RNA (1)...(19): siRNA sense strand
gaaauaggaguacaaagaa

SEQ ID NO: 812754 - RNA, 19 nt, Homo sapiens
  misc_RNA (1)...(19): siRNA sense strand
ccacuuaugucuuggauga

SEQ ID NO: 812755 - RNA, 19 nt, Homo sapiens
  misc_RNA (1)...(19): siRNA sense strand
uaaaggagaugaaggugaa

SEQ ID NO: 812756 - RNA, 19 nt, Homo sapiens
  misc_RNA (1)...(19): siRNA sense strand
uaacuagcccuaccacuua

SEQ ID NO: 812757 - RNA, 19 nt, Homo sapiens
  misc_RNA (1)...(19): siRNA sense strand
gaauauuccuucucaaaca

SEQ ID NO: 812758 - RNA, 19 nt, Homo sapiens
  misc_RNA (1)...(19): siRNA sense strand
gaaaggaacguuggaauau

SEQ ID NO: 812759 - RNA, 19 nt, Homo sapiens
  misc_RNA (1)...(19): siRNA sense strand
gaauauaacccugaauuug

SEQ ID NO: 812760 - RNA, 19 nt, Homo sapiens
  misc_RNA (1)...(19): siRNA sense strand
caacgaugauauugaugua

SEQ ID NO: 812761 - RNA, 19 nt, Homo sapiens
  misc_RNA (1)...(19): siRNA sense strand
gaagaugaccuagaucaaa

SEQ ID NO: 812762 - RNA, 19 nt, Homo sapiens
  misc_RNA (1)...(19): siRNA sense strand
agaaaggccuuauggugua

SEQ ID NO: 812763 - RNA, 19 nt, Homo sapiens
  misc_RNA (1)...(19): siRNA sense strand
gcuuaucacuauccauaua

SEQ ID NO: 812764 - RNA, 19 nt, Homo sapiens
  misc_RNA (1)...(19): siRNA sense strand
gaacugaagaugaugaaga

SEQ ID NO: 812765 - RNA, 19 nt, Homo sapiens
  misc_RNA (1)...(19): siRNA sense strand
gaaccucgauuccuugaag

SEQ ID NO: 812766 - RNA, 19 nt, Homo sapiens
  misc_RNA (1)...(19): siRNA sense strand
gaaaucaucgcuguucuuu

SEQ ID NO: 812767 - RNA, 19 nt, Homo sapiens
  misc_RNA (1)...(19): siRNA sense strand
ccaacagucaguuuaauua

SEQ ID NO: 812768 - RNA, 19 nt, Homo sapiens
  misc_RNA (1)...(19): siRNA sense strand
aaacgaaacugagaaugaa

SEQ ID NO: 812769 - RNA, 19 nt, Homo sapiens
  misc_RNA (1)...(19): siRNA sense strand
gaucuucaaacuacacuua

SEQ ID NO: 812770 - RNA, 19 nt, Homo sapiens
  misc_RNA (1)...(19): siRNA sense strand
ugaguuagauauugaguug

SEQ ID NO: 812771 - RNA, 19 nt, Homo sapiens
  misc_RNA (1)...(19): siRNA sense strand
gaaaugacagccaaagguu

SEQ ID NO: 812772 - RNA, 19 nt, Homo sapiens
  misc_RNA (1)...(19): siRNA sense strand
cuacuuugcuuaucacuau

SEQ ID NO: 812773 - RNA, 19 nt, Homo sapiens
  misc_RNA (1)...(19): siRNA sense strand
guggaaauguucuguuuga

SEQ ID NO: 812774 - RNA, 19 nt, Homo sapiens
  misc_RNA (1)...(19): siRNA sense strand
cagcuuaccuccugaagug

SEQ ID NO: 812775 - RNA, 19 nt, Homo sapiens
  misc_RNA (1)...(19): siRNA sense strand
auacaaggguuuacagauu

SEQ ID NO: 812776 - RNA, 19 nt, Homo sapiens
  misc_RNA (1)...(19): siRNA sense strand
gaagauacugagucaaauu

SEQ ID NO: 812777 - RNA, 19 nt, Homo sapiens
  misc_RNA (1)...(19): siRNA sense strand
ugacaacgaugauauugau

SEQ ID NO: 812778 - RNA, 19 nt, Homo sapiens
  misc_RNA (1)...(19): siRNA sense strand
gaacaagcaucgguugaag

SEQ ID NO: 812779 - RNA, 19 nt, Homo sapiens
  misc_RNA (1)...(19): siRNA sense strand
caaaagaucuucaaacuac

SEQ ID NO: 812780 - RNA, 19 nt, Homo sapiens
  misc_RNA (1)...(19): siRNA sense strand
agaaaucgcccuuacguuu

SEQ ID NO: 812781 - RNA, 19 nt, Homo sapiens
  misc_RNA (1)...(19): siRNA sense strand
gugaaacccugucuggaaa

SEQ ID NO: 812782 - RNA, 19 nt, Homo sapiens
  misc_RNA (1)...(19): siRNA sense strand
guauucaacuuuacagaug

SEQ ID NO: 812783 - RNA, 19 nt, Homo sapiens
  misc_RNA (1)...(19): siRNA sense strand
aaaggugguucacaaauau

SEQ ID NO: 812784 - RNA, 19 nt, Homo sapiens
  misc_RNA (1)...(19): siRNA sense strand
ugaaaggaacguuggaaua

SEQ ID NO: 812785 - RNA, 19 nt, Homo sapiens
  misc_RNA (1)...(19): siRNA sense strand
uggaauaucucaugagcaa

SEQ ID NO: 812786 - RNA, 19 nt, Homo sapiens
  misc_RNA (1)...(19): siRNA sense strand
gauauugaguuggcugaaa

SEQ ID NO: 812787 - RNA, 19 nt, Homo sapiens
  misc_RNA (1)...(19): siRNA sense strand
ggaguacaaagaaguuaua

SEQ ID NO: 812788 - RNA, 19 nt, Homo sapiens
  misc_RNA (1)...(19): siRNA sense strand
gaguaaaggcuagaauuaa

SEQ ID NO: 812789 - RNA, 19 nt, Homo sapiens
  misc_RNA (1)...(19): siRNA sense strand
gacauaaacagcaaucauu

SEQ ID NO: 812790 - RNA, 19 nt, Homo sapiens
  misc_RNA (1)...(19): siRNA sense strand
ucccugagcuuguugauga

SEQ ID NO: 812791 - RNA, 19 nt, Homo sapiens
  misc_RNA (1)...(19): siRNA sense strand
gaaccgggacgaacaauag

SEQ ID NO: 812792 - RNA, 19 nt, Homo sapiens
  misc_RNA (1)...(19): siRNA sense strand
aaacugagaaugaagauga

SEQ ID NO: 812793 - RNA, 19 nt, Homo sapiens
  misc_RNA (1)...(19): siRNA sense strand
gcagaaucaucgcuugguu

SEQ ID NO: 812794 - RNA, 19 nt, Homo sapiens
  misc_RNA (1)...(19): siRNA sense strand
caugauaaccggcauagaa

SEQ ID NO: 812795 - RNA, 19 nt, Homo sapiens
  misc_RNA (1)...(19): siRNA sense strand
ugaagaaguugauuacagu

SEQ ID NO: 812796 - RNA, 19 nt, Homo sapiens
  misc_RNA (1)...(19): siRNA sense strand
caaguuggguuaugaaagg

SEQ ID NO: 812797 - RNA, 19 nt, Homo sapiens
  misc_RNA (1)...(19): siRNA sense strand
gaugauguuugcuacuuug

SEQ ID NO: 812798 - RNA, 19 nt, Homo sapiens
  misc_RNA (1)...(19): siRNA sense strand
gaaaggcuaauacaucaga

SEQ ID NO: 812799 - RNA, 19 nt, Homo sapiens
  misc_RNA (1)...(19): siRNA sense strand
uggcuuaucccgauuauuu

SEQ ID NO: 812800 - RNA, 19 nt, Homo sapiens
  misc_RNA (1)...(19): siRNA sense strand
ggacuuaaugguacagauu

SEQ ID NO: 812801 - RNA, 19 nt, Homo sapiens
  misc_RNA (1)...(19): siRNA sense strand
gacacugcccgauauguua

SEQ ID NO: 812802 - RNA, 19 nt, Homo sapiens
  misc_RNA (1)...(19): siRNA sense strand
gcuuacagguuuaacauca

SEQ ID NO: 812803 - RNA, 19 nt, Homo sapiens
  misc_RNA (1)...(19): siRNA sense strand
gaauuccagucuuauaaag

SEQ ID NO: 812804 - RNA, 19 nt, Homo sapiens
  misc_RNA (1)...(19): siRNA sense strand
gggaaucugcgcaaaguaa

SEQ ID NO: 812805 - RNA, 19 nt, Homo sapiens
  misc_RNA (1)...(19): siRNA sense strand
uaacccaaauuacaccauu

SEQ ID NO: 812806 - RNA, 19 nt, Homo sapiens
  misc_RNA (1)...(19): siRNA sense strand
caaagguucuacaggaaug

SEQ ID NO: 812807 - RNA, 19 nt, Homo sapiens
  misc_RNA (1)...(19): siRNA sense strand
cagaggauauguccaagug

SEQ ID NO: 812808 - RNA, 19 nt, Homo sapiens
  misc_RNA (1)...(19): siRNA sense strand
gaaauucugcugucaacau

SEQ ID NO: 812809 - RNA, 19 nt, Homo sapiens
  misc_RNA (1)...(19): siRNA sense strand
gaucaaugcugagccuuca

SEQ ID NO: 812810 - RNA, 19 nt, Homo sapiens
  misc_RNA (1)...(19): siRNA sense strand
gagggaacaucugggaauu

SEQ ID NO: 812811 - RNA, 19 nt, Homo sapiens
  misc_RNA (1)...(19): siRNA sense strand
guacagauucauucuauuc

SEQ ID NO: 812812 - RNA, 19 nt, Homo sapiens
  misc_RNA (1)...(19): siRNA sense strand
acccagaccucuauauuga

SEQ ID NO: 812813 - RNA, 19 nt, Homo sapiens
  misc_RNA (1)...(19): siRNA sense strand
guaacuagcccuaccacuu

SEQ ID NO: 812814 - RNA, 19 nt, Homo sapiens
  misc_RNA (1)...(19): siRNA sense strand
ccauauacguauucaacuu

SEQ ID NO: 812815 - RNA, 19 nt, Homo sapiens
  misc_RNA (1)...(19): siRNA sense strand
cagauucauucuauucuug

SEQ ID NO: 812816 - RNA, 19 nt, Homo sapiens
  misc_RNA (1)...(19): siRNA sense strand
ugaaucaagcugcaaagua

SEQ ID NO: 812817 - RNA, 19 nt, Homo sapiens
  misc_RNA (1)...(19): siRNA sense strand
guacaaagaaguuauacca

SEQ ID NO: 812818 - RNA, 19 nt, Homo sapiens
  misc_RNA (1)...(19): siRNA sense strand
gcuaaagcauguccacaca

SEQ ID NO: 812819 - RNA, 19 nt, Homo sapiens
  misc_RNA (1)...(19): siRNA sense strand
ugaauuuggucaagcagaa

SEQ ID NO: 812820 - RNA, 19 nt, Homo sapiens
  misc_RNA (1)...(19): siRNA sense strand
gcaauugccuguuauuccu

SEQ ID NO: 812821 - RNA, 19 nt, Homo sapiens
  misc_RNA (1)...(19): siRNA sense strand
cuaaggggcuguugcaaua

SEQ ID NO: 812822 - RNA, 19 nt, Homo sapiens
  misc_RNA (1)...(19): siRNA sense strand
gcacacaauccucagcaaa

SEQ ID NO: 812823 - RNA, 19 nt, Homo sapiens
  misc_RNA (1)...(19): siRNA sense strand
gccaaagguucuacaggaa

SEQ ID NO: 812824 - RNA, 19 nt, Homo sapiens
  misc_RNA (1)...(19): siRNA sense strand
gcaagaaccgggacgaaca

SEQ ID NO: 812825 - RNA, 19 nt, Homo sapiens
  misc_RNA (1)...(19): siRNA sense strand
agacugaccucuccauugg

SEQ ID NO: 812826 - RNA, 19 nt, Homo sapiens
  misc_RNA (1)...(19): siRNA sense strand
ccuaagauacugagccaua

SEQ ID NO: 812827 - RNA, 19 nt, Homo sapiens
  misc_RNA (1)...(19): siRNA sense strand
ggacauugccuaagauacu

SEQ ID NO: 812828 - RNA, 19 nt, Homo sapiens
  misc_RNA (1)...(19): siRNA sense strand
caaagagccuauuuuagaa

SEQ ID NO: 812829 - RNA, 19 nt, Homo sapiens
  misc_RNA (1)...(19): siRNA sense strand
ccagaccucuauauugaga

SEQ ID NO: 812830 - RNA, 19 nt, Homo sapiens
  misc_RNA (1)...(19): siRNA sense strand
agagugaguuucuuaguca

SEQ ID NO: 812831 - RNA, 19 nt, Homo sapiens
  misc_RNA (1)...(19): siRNA sense strand
uacaaggguuuacagauug

SEQ ID NO: 812832 - RNA, 19 nt, Homo sapiens
  misc_RNA (1)...(19): siRNA sense strand
gauguuugcuacuuugcuu

SEQ ID NO: 812833 - RNA, 19 nt, Homo sapiens
  misc_RNA (1)...(19): siRNA sense strand
ugaaagugaugacaacgau

SEQ ID NO: 812834 - RNA, 19 nt, Homo sapiens
  misc_RNA (1)...(19): siRNA sense strand
cugcagaaaugaagaagga

SEQ ID NO: 812835 - RNA, 19 nt, Homo sapiens
  misc_RNA (1)...(19): siRNA sense strand
uacaggacauugccuaaga

SEQ ID NO: 812836 - RNA, 19 nt, Homo sapiens
  misc_RNA (1)...(19): siRNA sense strand
gcaaugccagagucuaauu

SEQ ID NO: 812837 - RNA, 19 nt, Homo sapiens
  misc_RNA (1)...(19): siRNA sense strand
uagaucgugugguauauga

SEQ ID NO: 812838 - RNA, 19 nt, Homo sapiens
  misc_RNA (1)...(19): siRNA sense strand
ucauagaucgugugguaua

SEQ ID NO: 812839 - RNA, 19 nt, Homo sapiens
  misc_RNA (1)...(19): siRNA sense strand
cgaagaggcugaaucauaa

SEQ ID NO: 812840 - RNA, 19 nt, Homo sapiens
  misc_RNA (1)...(19): siRNA sense strand
gaacagauuccacucuuua

SEQ ID NO: 812841 - RNA, 19 nt, Homo sapiens
  misc_RNA (1)...(19): siRNA sense strand
caacugggauggaagauuu

SEQ ID NO: 812842 - RNA, 19 nt, Homo sapiens
  misc_RNA (1)...(19): siRNA sense strand
gaacucacauggucuagaa

SEQ ID NO: 812843 - RNA, 19 nt, Homo sapiens
  misc_RNA (1)...(19): siRNA sense strand
guaaaggccuccaaauaga

SEQ ID NO: 812844 - RNA, 19 nt, Homo sapiens
  misc_RNA (1)...(19): siRNA sense strand
ggacauggauaacccuauu

SEQ ID NO: 812845 - RNA, 19 nt, Homo sapiens
  misc_RNA (1)...(19): siRNA sense strand
aaagaaggcuuggagauaa

SEQ ID NO: 812846 - RNA, 19 nt, Homo sapiens
  misc_RNA (1)...(19): siRNA sense strand
agagauaucuacagacuuu

SEQ ID NO: 812847 - RNA, 19 nt, Homo sapiens
  misc_RNA (1)...(19): siRNA sense strand
ggacagaaauuguuaaucc

SEQ ID NO: 812848 - RNA, 19 nt, Homo sapiens
  misc_RNA (1)...(19): siRNA sense strand
ggaagaaggucguggucaa

SEQ ID NO: 812849 - RNA, 19 nt, Homo sapiens
  misc_RNA (1)...(19): siRNA sense strand
ggauuuaccucugaagaaa

SEQ ID NO: 812850 - RNA, 19 nt, Homo sapiens
  misc_RNA (1)...(19): siRNA sense strand
ggagaguacuugaagaugu

SEQ ID NO: 812851 - RNA, 19 nt, Homo sapiens
  misc_RNA (1)...(19): siRNA sense strand
ggaauauucuuuggaguug

SEQ ID NO: 812852 - RNA, 19 nt, Homo sapiens
  misc_RNA (1)...(19): siRNA sense strand
guggagggcuugcaaugua

SEQ ID NO: 812853 - RNA, 19 nt, Homo sapiens
  misc_RNA (1)...(19): siRNA sense strand
uuaaaugggucuucuguug

SEQ ID NO: 812854 - RNA, 19 nt, Homo sapiens
  misc_RNA (1)...(19): siRNA sense strand
gagaacagauuccacucuu

SEQ ID NO: 812855 - RNA, 19 nt, Homo sapiens
  misc_RNA (1)...(19): siRNA sense strand
gagugcagcuuuguaguuu

SEQ ID NO: 812856 - RNA, 19 nt, Homo sapiens
  misc_RNA (1)...(19): siRNA sense strand
uuacuuagacucaaccuua

SEQ ID NO: 812857 - RNA, 19 nt, Homo sapiens
  misc_RNA (1)...(19): siRNA sense strand
uuacagagauaucuacaga

SEQ ID NO: 812858 - RNA, 19 nt, Homo sapiens
  misc_RNA (1)...(19): siRNA sense strand
gcaguucucuuuguugaug

SEQ ID NO: 812859 - RNA, 19 nt, Homo sapiens
  misc_RNA (1)...(19): siRNA sense strand
ccgaagaggcugaaucaua

SEQ ID NO: 812860 - RNA, 19 nt, Homo sapiens
  misc_RNA (1)...(19): siRNA sense strand
aauagaaucuggaacaguu

SEQ ID NO: 812861 - RNA, 19 nt, Homo sapiens
  misc_RNA (1)...(19): siRNA sense strand
gaagguuggagaaacaaua

SEQ ID NO: 812862 - RNA, 19 nt, Homo sapiens
  misc_RNA (1)...(19): siRNA sense strand
gacgugggcuguccuguga

SEQ ID NO: 812863 - RNA, 19 nt, Homo sapiens
  misc_RNA (1)...(19): siRNA sense strand
gacuggaacuggaagauga

SEQ ID NO: 812864 - RNA, 19 nt, Homo sapiens
  misc_RNA (1)...(19): siRNA sense strand
ggacaagcuagaacucaua

SEQ ID NO: 812865 - RNA, 19 nt, Homo sapiens
  misc_RNA (1)...(19): siRNA sense strand
gaggcugaaucauaaauau

SEQ ID NO: 812866 - RNA, 19 nt, Homo sapiens
  misc_RNA (1)...(19): siRNA sense strand
gcacgaagacugcuuugug

SEQ ID NO: 812867 - RNA, 19 nt, Homo sapiens
  misc_RNA (1)...(19): siRNA sense strand
gaaaagaaagcuuaggaua

SEQ ID NO: 812868 - RNA, 19 nt, Homo sapiens
  misc_RNA (1)...(19): siRNA sense strand
uaagugaaguaguagaaga

SEQ ID NO: 812869 - RNA, 19 nt, Homo sapiens
  misc_RNA (1)...(19): siRNA sense strand
aaacuugccuuuaugucaa

SEQ ID NO: 812870 - RNA, 19 nt, Homo sapiens
  misc_RNA (1)...(19): siRNA sense strand
aaaggauguuguagagaua

SEQ ID NO: 812871 - RNA, 19 nt, Homo sapiens
  misc_RNA (1)...(19): siRNA sense strand
agaaggcgcuguuugugaa

SEQ ID NO: 812872 - RNA, 19 nt, Homo sapiens
  misc_RNA (1)...(19): siRNA sense strand
gaggacagucuccggaaua

SEQ ID NO: 812873 - RNA, 19 nt, Homo sapiens
  misc_RNA (1)...(19): siRNA sense strand
guacauugaugaaguugca

SEQ ID NO: 812874 - RNA, 19 nt, Homo sapiens
  misc_RNA (1)...(19): siRNA sense strand
cuucaagaaugcagcguua

SEQ ID NO: 812875 - RNA, 19 nt, Homo sapiens
  misc_RNA (1)...(19): siRNA sense strand
caacaguaaccugaaauuu

SEQ ID NO: 812876 - RNA, 19 nt, Homo sapiens
  misc_RNA (1)...(19): siRNA sense strand
cacgaagacugcuuuguga

SEQ ID NO: 812877 - RNA, 19 nt, Homo sapiens
  misc_RNA (1)...(19): siRNA sense strand
aaagguucauccagucaua

SEQ ID NO: 812878 - RNA, 19 nt, Homo sapiens
  misc_RNA (1)...(19): siRNA sense strand
ucagaugccucgauuugga

SEQ ID NO: 812879 - RNA, 19 nt, Homo sapiens
  misc_RNA (1)...(19): siRNA sense strand
uuacuuagacccaaagaaa

SEQ ID NO: 812880 - RNA, 19 nt, Homo sapiens
  misc_RNA (1)...(19): siRNA sense strand
ucaccaagaugcccaauac

SEQ ID NO: 812881 - RNA, 19 nt, Homo sapiens
  misc_RNA (1)...(19): siRNA sense strand
gaaauagaaacagaucuga

SEQ ID NO: 812882 - RNA, 19 nt, Homo sapiens
  misc_RNA (1)...(19): siRNA sense strand
ugaagauuguggcguguuu

SEQ ID NO: 812883 - RNA, 19 nt, Homo sapiens
  misc_RNA (1)...(19): siRNA sense strand
uaucaacaguaaccugaaa

SEQ ID NO: 812884 - RNA, 19 nt, Homo sapiens
  misc_RNA (1)...(19): siRNA sense strand
caaccacaauccaaaucaa

SEQ ID NO: 812885 - RNA, 19 nt, Homo sapiens
  misc_RNA (1)...(19): siRNA sense strand
gaaacagacuaaguaaagg

SEQ ID NO: 812886 - RNA, 19 nt, Homo sapiens
  misc_RNA (1)...(19): siRNA sense strand
gaggcugcaucaggauuua

SEQ ID NO: 812887 - RNA, 19 nt, Homo sapiens
  misc_RNA (1)...(19): siRNA sense strand
ggaaauagaaacagaucug

SEQ ID NO: 812888 - RNA, 19 nt, Homo sapiens
  misc_RNA (1)...(19): siRNA sense strand
guucauccagucauaauaa

SEQ ID NO: 812889 - RNA, 19 nt, Homo sapiens
  misc_RNA (1)...(19): siRNA sense strand
gaaacaauagaaucuggaa

SEQ ID NO: 812890 - RNA, 19 nt, Homo sapiens
  misc_RNA (1)...(19): siRNA sense strand
cauagaagaugaugacacu

SEQ ID NO: 812891 - RNA, 19 nt, Homo sapiens
  misc_RNA (1)...(19): siRNA sense strand
gggcuguccugugaaagua

SEQ ID NO: 812892 - RNA, 19 nt, Homo sapiens
  misc_RNA (1)...(19): siRNA sense strand
aaguaaaggccuccaaaua

SEQ ID NO: 812893 - RNA, 19 nt, Homo sapiens
  misc_RNA (1)...(19): siRNA sense strand
ggucgaacuuccuccuuug

SEQ ID NO: 812894 - RNA, 19 nt, Homo sapiens
  misc_RNA (1)...(19): siRNA sense strand
ccaaggcugugcacgaaga

SEQ ID NO: 812895 - RNA, 19 nt, Homo sapiens
  misc_RNA (1)...(19): siRNA sense strand
gagaguacuugaagauguc

SEQ ID NO: 812896 - RNA, 19 nt, Homo sapiens
  misc_RNA (1)...(19): siRNA sense strand
caagcuagaacucauagaa

SEQ ID NO: 812897 - RNA, 19 nt, Homo sapiens
  misc_RNA (1)...(19): siRNA sense strand
guaccagaguccaacaaug

SEQ ID NO: 812898 - RNA, 19 nt, Homo sapiens
  misc_RNA (1)...(19): siRNA sense strand
cuguaacucuuuagcauuu

SEQ ID NO: 812899 - RNA, 19 nt, Homo sapiens
  misc_RNA (1)...(19): siRNA sense strand
ggagugcagcuuuguaguu

SEQ ID NO: 812900 - RNA, 19 nt, Homo sapiens
  misc_RNA (1)...(19): siRNA sense strand
gagagguucagccuguuua

SEQ ID NO: 812901 - RNA, 19 nt, Homo sapiens
  misc_RNA (1)...(19): siRNA sense strand
gguagaaccuuugcuaaaa

SEQ ID NO: 812902 - RNA, 19 nt, Homo sapiens
  misc_RNA (1)...(19): siRNA sense strand
gaaauuguuaauccucuga

SEQ ID NO: 812903 - RNA, 19 nt, Homo sapiens
  misc_RNA (1)...(19): siRNA sense strand
gcucauuggcugaaguuaa

SEQ ID NO: 812904 - RNA, 19 nt, Homo sapiens
  misc_RNA (1)...(19): siRNA sense strand
gacagucuccggaauauuc

SEQ ID NO: 812905 - RNA, 19 nt, Homo sapiens
  misc_RNA (1)...(19): siRNA sense strand
gaguugaauugcuggaaga

SEQ ID NO: 812906 - RNA, 19 nt, Homo sapiens
  misc_RNA (1)...(19): siRNA sense strand
gaggcaccaucaugucuga

SEQ ID NO: 812907 - RNA, 19 nt, Homo sapiens
  misc_RNA (1)...(19): siRNA sense strand
ggguagaaccuuugcuaaa

SEQ ID NO: 812908 - RNA, 19 nt, Homo sapiens
  misc_RNA (1)...(19): siRNA sense strand
gaagaaggcgcuguuugug

SEQ ID NO: 812909 - RNA, 19 nt, Homo sapiens
  misc_RNA (1)...(19): siRNA sense strand
caaacuugccuuuauguca

SEQ ID NO: 812910 - RNA, 19 nt, Homo sapiens
  misc_RNA (1)...(19): siRNA sense strand
gauaucaucccagcuuuau

SEQ ID NO: 812911 - RNA, 19 nt, Homo sapiens
  misc_RNA (1)...(19): siRNA sense strand
ggaaaauacuugaaaaggu

SEQ ID NO: 812912 - RNA, 19 nt, Homo sapiens
  misc_RNA (1)...(19): siRNA sense strand
cacaaaagcuccuuaaagu

SEQ ID NO: 812913 - RNA, 19 nt, Homo sapiens
  misc_RNA (1)...(19): siRNA sense strand
guaggagaguacuugaaga

SEQ ID NO: 812914 - RNA, 19 nt, Homo sapiens
  misc_RNA (1)...(19): siRNA sense strand
ggaguuauuugcuguucuc

SEQ ID NO: 812915 - RNA, 19 nt, Homo sapiens
  misc_RNA (1)...(19): siRNA sense strand
gaaugcagcguuacagaca

SEQ ID NO: 812916 - RNA, 19 nt, Homo sapiens
  misc_RNA (1)...(19): siRNA sense strand
agagcaaccucaugcaguu

SEQ ID NO: 812917 - RNA, 19 nt, Homo sapiens
  misc_RNA (1)...(19): siRNA sense strand
ugaugacacugcauuggaa

SEQ ID NO: 812918 - RNA, 19 nt, Homo sapiens
  misc_RNA (1)...(19): siRNA sense strand
agaaacagacuaaguaaag

SEQ ID NO: 812919 - RNA, 19 nt, Homo sapiens
  misc_RNA (1)...(19): siRNA sense strand
aaacagaaacagacuaagu

SEQ ID NO: 812920 - RNA, 19 nt, Homo sapiens
  misc_RNA (1)...(19): siRNA sense strand
uaccagaguccaacaauga

SEQ ID NO: 812921 - RNA, 19 nt, Homo sapiens
  misc_RNA (1)...(19): siRNA sense strand
gcccagaaguaggagagua

SEQ ID NO: 812922 - RNA, 19 nt, Homo sapiens
  misc_RNA (1)...(19): siRNA sense strand
gaagaggcugaaucauaaa

SEQ ID NO: 812923 - RNA, 19 nt, Homo sapiens
  misc_RNA (1)...(19): siRNA sense strand
acaguaaccugaaauuugc

SEQ ID NO: 812924 - RNA, 19 nt, Homo sapiens
  misc_RNA (1)...(19): siRNA sense strand
gcauuuggaggcuacuuaa

SEQ ID NO: 812925 - RNA, 19 nt, Homo sapiens
  misc_RNA (1)...(19): siRNA sense strand
ugaagaaggcgcuguuugu

SEQ ID NO: 812926 - RNA, 19 nt, Homo sapiens
  misc_RNA (1)...(19): siRNA sense strand
caccaggacugaaugaagu

SEQ ID NO: 812927 - RNA, 19 nt, Homo sapiens
  misc_RNA (1)...(19): siRNA sense strand
uggcugaaguuaaggagaa

SEQ ID NO: 812928 - RNA, 19 nt, Homo sapiens
  misc_RNA (1)...(19): siRNA sense strand
ggucuucuguugacucaca

SEQ ID NO: 812929 - RNA, 19 nt, Homo sapiens
  misc_RNA (1)...(19): siRNA sense strand
uaaaugggucuucuguuga

SEQ ID NO: 812930 - RNA, 19 nt, Homo sapiens
  misc_RNA (1)...(19): siRNA sense strand
gaauauucuuuggaguuga

SEQ ID NO: 812931 - RNA, 19 nt, Homo sapiens
  misc_RNA (1)...(19): siRNA sense strand
caauucagcaguuguuaga

SEQ ID NO: 812932 - RNA, 19 nt, Homo sapiens
  misc_RNA (1)...(19): siRNA sense strand
cauccagggucauuacaau

SEQ ID NO: 812933 - RNA, 19 nt, Homo sapiens
  misc_RNA (1)...(19): siRNA sense strand
caugguacauugaugaagu

SEQ ID NO: 812934 - RNA, 19 nt, Homo sapiens
  misc_RNA (1)...(19): siRNA sense strand
ggagagguucagccuguuu

SEQ ID NO: 812935 - RNA, 19 nt, Homo sapiens
  misc_RNA (1)...(19): siRNA sense strand
ggaggcugcaucaggauuu

SEQ ID NO: 812936 - RNA, 19 nt, Homo sapiens
  misc_RNA (1)...(19): siRNA sense strand
agaacagauuccacucuuu

SEQ ID NO: 812937 - RNA, 19 nt, Homo sapiens
  misc_RNA (1)...(19): siRNA sense strand
gauuguggcguguuuguug

SEQ ID NO: 812938 - RNA, 19 nt, Homo sapiens
  misc_RNA (1)...(19): siRNA sense strand
gauaaugauugggaagaag

SEQ ID NO: 812939 - RNA, 19 nt, Homo sapiens
  misc_RNA (1)...(19): siRNA sense strand
gcaaggagcugucacacua

SEQ ID NO: 812940 - RNA, 19 nt, Homo sapiens
  misc_RNA (1)...(19): siRNA sense strand
ugaaggagaucaaccagaa

SEQ ID NO: 812941 - RNA, 19 nt, Homo sapiens
  misc_RNA (1)...(19): siRNA sense strand
agacggagcugaagcaguu

SEQ ID NO: 812942 - RNA, 19 nt, Homo sapiens
  misc_RNA (1)...(19): siRNA sense strand
caacgggccugagaucuug

SEQ ID NO: 812943 - RNA, 19 nt, Homo sapiens
  misc_RNA (1)...(19): siRNA sense strand
ugaugaagcugcgcaauga

SEQ ID NO: 812944 - RNA, 19 nt, Homo sapiens
  misc_RNA (1)...(19): siRNA sense strand
gugaggagcuggccaaucu

SEQ ID NO: 812945 - RNA, 19 nt, Homo sapiens
  misc_RNA (1)...(19): siRNA sense strand
gcaaguaugagaaugagaa

SEQ ID NO: 812946 - RNA, 19 nt, Homo sapiens
  misc_RNA (1)...(19): siRNA sense strand
uuacacagcuggaugagau

SEQ ID NO: 812947 - RNA, 19 nt, Homo sapiens
  misc_RNA (1)...(19): siRNA sense strand
agaaggagcuaaagaaggu

SEQ ID NO: 812948 - RNA, 19 nt, Homo sapiens
  misc_RNA (1)...(19): siRNA sense strand
gaacaucuacaaccugauc

SEQ ID NO: 812949 - RNA, 19 nt, Homo sapiens
  misc_RNA (1)...(19): siRNA sense strand
gaagagcaaguaugagaau

SEQ ID NO: 812950 - RNA, 19 nt, Homo sapiens
  misc_RNA (1)...(19): siRNA sense strand
ucagugagcucaacaucuc

SEQ ID NO: 812951 - RNA, 19 nt, Homo sapiens
  misc_RNA (1)...(19): siRNA sense strand
agacagcccuggacaacga

SEQ ID NO: 812952 - RNA, 19 nt, Homo sapiens
  misc_RNA (1)...(19): siRNA sense strand
agaaccagguggaguuuga

SEQ ID NO: 812953 - RNA, 19 nt, Homo sapiens
  misc_RNA (1)...(19): siRNA sense strand
caucaaggaguacaaauuc

SEQ ID NO: 812954 - RNA, 19 nt, Homo sapiens
  misc_RNA (1)...(19): siRNA sense strand
gcauggccauccagcagaa

SEQ ID NO: 812955 - RNA, 19 nt, Homo sapiens
  misc_RNA (1)...(19): siRNA sense strand
gccaggcacucacggagaa

SEQ ID NO: 812956 - RNA, 19 nt, Homo sapiens
  misc_RNA (1)...(19): siRNA sense strand
aggaugagcuggugaccuu

SEQ ID NO: 812957 - RNA, 19 nt, Homo sapiens
  misc_RNA (1)...(19): siRNA sense strand
gcaccaagcgggagcagau

SEQ ID NO: 812958 - RNA, 19 nt, Homo sapiens
  misc_RNA (1)...(19): siRNA sense strand
gcaauguccucaccaacac

SEQ ID NO: 812959 - RNA, 19 nt, Homo sapiens
  misc_RNA (1)...(19): siRNA sense strand
gggagcccaugaacaucua

SEQ ID NO: 812960 - RNA, 19 nt, Homo sapiens
  misc_RNA (1)...(19): siRNA sense strand
ggagaaggagcuaaagaag

SEQ ID NO: 812961 - RNA, 19 nt, Homo sapiens
  misc_RNA (1)...(19): siRNA sense strand
gcacacacaaaccacaaga

SEQ ID NO: 812962 - RNA, 19 nt, Homo sapiens
  misc_RNA (1)...(19): siRNA sense strand
ggacaaggaagcgcuuaug

SEQ ID NO: 812963 - RNA, 19 nt, Homo sapiens
  misc_RNA (1)...(19): siRNA sense strand
ucuacaaccugaucgcuau

SEQ ID NO: 812964 - RNA, 19 nt, Homo sapiens
  misc_RNA (1)...(19): siRNA sense strand
cccaggagcugaaggagau

SEQ ID NO: 812965 - RNA, 19 nt, Homo sapiens
  misc_RNA (1)...(19): siRNA sense strand
gaacaucagccugcagaag

SEQ ID NO: 812966 - RNA, 19 nt, Homo sapiens
  misc_RNA (1)...(19): siRNA sense strand
gagcaaguaugagaaugag

SEQ ID NO: 812967 - RNA, 19 nt, Homo sapiens
  misc_RNA (1)...(19): siRNA sense strand
agacggagcgcgaacagaa

SEQ ID NO: 812968 - RNA, 19 nt, Homo sapiens
  misc_RNA (1)...(19): siRNA sense strand
gacagaaccagguggaguu

SEQ ID NO: 812969 - RNA, 19 nt, Homo sapiens
  misc_RNA (1)...(19): siRNA sense strand
uaucauccgugaccagauc

SEQ ID NO: 812970 - RNA, 19 nt, Homo sapiens
  misc_RNA (1)...(19): siRNA sense strand
ccaaggagcaguacuacgu

SEQ ID NO: 812971 - RNA, 19 nt, Homo sapiens
  misc_RNA (1)...(19): siRNA sense strand
ugaagcaguugcgcaaugu

SEQ ID NO: 812972 - RNA, 19 nt, Homo sapiens
  misc_RNA (1)...(19): siRNA sense strand
acacaaaccacaagaaggu

SEQ ID NO: 812973 - RNA, 19 nt, Homo sapiens
  misc_RNA (1)...(19): siRNA sense strand
aaugagaaggccaugguua

SEQ ID NO: 812974 - RNA, 19 nt, Homo sapiens
  misc_RNA (1)...(19): siRNA sense strand
ucuccgaccuacucaguga

SEQ ID NO: 812975 - RNA, 19 nt, Homo sapiens
  misc_RNA (1)...(19): siRNA sense strand
acacgcagucggagaauga

SEQ ID NO: 812976 - RNA, 19 nt, Homo sapiens
  misc_RNA (1)...(19): siRNA sense strand
ugacccgccucacagagaa

SEQ ID NO: 812977 - RNA, 19 nt, Homo sapiens
  misc_RNA (1)...(19): siRNA sense strand
gaaugagaaggccaugguu

SEQ ID NO: 812978 - RNA, 19 nt, Homo sapiens
  misc_RNA (1)...(19): siRNA sense strand
ccaacacgcagucggagaa

SEQ ID NO: 812979 - RNA, 19 nt, Homo sapiens
  misc_RNA (1)...(19): siRNA sense strand
ucaccacgcugcgcacugu

SEQ ID NO: 812980 - RNA, 19 nt, Homo sapiens
  misc_RNA (1)...(19): siRNA sense strand
gaaggucucccugcuagag

SEQ ID NO: 812981 - RNA, 19 nt, Homo sapiens
  misc_RNA (1)...(19): siRNA sense strand
cagaacagcaggagaaggu

SEQ ID NO: 812982 - RNA, 19 nt, Homo sapiens
  misc_RNA (1)...(19): siRNA sense strand
ugucagaacagcaggagaa

SEQ ID NO: 812983 - RNA, 19 nt, Homo sapiens
  misc_RNA (1)...(19): siRNA sense strand
ggagcugucacacuacaug

SEQ ID NO: 812984 - RNA, 19 nt, Homo sapiens
  misc_RNA (1)...(19): siRNA sense strand
caaccagaauguggagauc

SEQ ID NO: 812985 - RNA, 19 nt, Homo sapiens
  misc_RNA (1)...(19): siRNA sense strand
gaaggagaucaaccagaau

SEQ ID NO: 812986 - RNA, 19 nt, Homo sapiens
  misc_RNA (1)...(19): siRNA sense strand
gagaagaagacgcugaacu

SEQ ID NO: 812987 - RNA, 19 nt, Homo sapiens
  misc_RNA (1)...(19): siRNA sense strand
gugucaugcuggacuacua

SEQ ID NO: 812988 - RNA, 19 nt, Homo sapiens
  misc_RNA (1)...(19): siRNA sense strand
uggagaaggagcuaaagaa

SEQ ID NO: 812989 - RNA, 19 nt, Homo sapiens
  misc_RNA (1)...(19): siRNA sense strand
cugaagcaguugcgcaaug

SEQ ID NO: 812990 - RNA, 19 nt, Homo sapiens
  misc_RNA (1)...(19): siRNA sense strand
gcagacagcccuggacaac

SEQ ID NO: 812991 - RNA, 19 nt, Homo sapiens
  misc_RNA (1)...(19): siRNA sense strand
ggagaucaaccagaaugug

SEQ ID NO: 812992 - RNA, 19 nt, Homo sapiens
  misc_RNA (1)...(19): siRNA sense strand
uuaccgagaccaugaugaa

SEQ ID NO: 812993 - RNA, 19 nt, Homo sapiens
  misc_RNA (1)...(19): siRNA sense strand
cugaagagcaaguaugaga

SEQ ID NO: 812994 - RNA, 19 nt, Homo sapiens
  misc_RNA (1)...(19): siRNA sense strand
uggcggugcucgaggagaa

SEQ ID NO: 812995 - RNA, 19 nt, Homo sapiens
  misc_RNA (1)...(19): siRNA sense strand
gcaucaaugacuccuucua

SEQ ID NO: 812996 - RNA, 19 nt, Homo sapiens
  misc_RNA (1)...(19): siRNA sense strand
cgucggaggaggaggagua

SEQ ID NO: 812997 - RNA, 19 nt, Homo sapiens
  misc_RNA (1)...(19): siRNA sense strand
caaguucagugacgaugcu

SEQ ID NO: 812998 - RNA, 19 nt, Homo sapiens
  misc_RNA (1)...(19): siRNA sense strand
ggaggccuuuggacaagca

SEQ ID NO: 812999 - RNA, 19 nt, Homo sapiens
  misc_RNA (1)...(19): siRNA sense strand
gcgcucacccauccuccua

SEQ ID NO: 813000 - RNA, 19 nt, Homo sapiens
  misc_RNA (1)...(19): siRNA sense strand
gacaucaacgggccugaga

SEQ ID NO: 813001 - RNA, 19 nt, Homo sapiens
  misc_RNA (1)...(19): siRNA sense strand
ugacaucaaggaguacaaa

SEQ ID NO: 813002 - RNA, 19 nt, Homo sapiens
  misc_RNA (1)...(19): siRNA sense strand
agaagaagacgcugaacuc

SEQ ID NO: 813003 - RNA, 19 nt, Homo sapiens
  misc_RNA (1)...(19): siRNA sense strand
ucaacgggccugagaucuu

SEQ ID NO: 813004 - RNA, 19 nt, Homo sapiens
  misc_RNA (1)...(19): siRNA sense strand
gagcugucacacuacauga

SEQ ID NO: 813005 - RNA, 19 nt, Homo sapiens
  misc_RNA (1)...(19): siRNA sense strand
ugaagagcaaguaugagaa

SEQ ID NO: 813006 - RNA, 19 nt, Homo sapiens
  misc_RNA (1)...(19): siRNA sense strand
acaaggaagcgcuuaugga

SEQ ID NO: 813007 - RNA, 19 nt, Homo sapiens
  misc_RNA (1)...(19): siRNA sense strand
ggagcuggccaaucucuac

SEQ ID NO: 813008 - RNA, 19 nt, Homo sapiens
  misc_RNA (1)...(19): siRNA sense strand
acaucaaggaguacaaauu

SEQ ID NO: 813009 - RNA, 19 nt, Homo sapiens
  misc_RNA (1)...(19): siRNA sense strand
agagcaaguaugagaauga

SEQ ID NO: 813010 - RNA, 19 nt, Homo sapiens
  misc_RNA (1)...(19): siRNA sense strand
acuacgagguggacaucaa

SEQ ID NO: 813011 - RNA, 19 nt, Homo sapiens
  misc_RNA (1)...(19): siRNA sense strand
uggaggaggagaccgagua

SEQ ID NO: 813012 - RNA, 19 nt, Homo sapiens
  misc_RNA (1)...(19): siRNA sense strand
gacaagcacacacaaacca

SEQ ID NO: 813013 - RNA, 19 nt, Homo sapiens
  misc_RNA (1)...(19): siRNA sense strand
gccgggagcccaugaacau

SEQ ID NO: 813014 - RNA, 19 nt, Homo sapiens
  misc_RNA (1)...(19): siRNA sense strand
gacaaggaagcgcuuaugg

SEQ ID NO: 813015 - RNA, 19 nt, Homo sapiens
  misc_RNA (1)...(19): siRNA sense strand
gaagacggagcgcgaacag

SEQ ID NO: 813016 - RNA, 19 nt, Homo sapiens
  misc_RNA (1)...(19): siRNA sense strand
ugcucgagcuggaccauga

SEQ ID NO: 813017 - RNA, 19 nt, Homo sapiens
  misc_RNA (1)...(19): siRNA sense strand
gcugaggacgagaagaaga

SEQ ID NO: 813018 - RNA, 19 nt, Homo sapiens
  misc_RNA (1)...(19): siRNA sense strand
ccaugaacaucuacaaccu

SEQ ID NO: 813019 - RNA, 19 nt, Homo sapiens
  misc_RNA (1)...(19): siRNA sense strand
acacacaaaccacaagaag

SEQ ID NO: 813020 - RNA, 19 nt, Homo sapiens
  misc_RNA (1)...(19): siRNA sense strand
caucaaugacuccuucuac

SEQ ID NO: 813021 - RNA, 19 nt, Homo sapiens
  misc_RNA (1)...(19): siRNA sense strand
agaacagccugcgcaagga

SEQ ID NO: 813022 - RNA, 19 nt, Homo sapiens
  misc_RNA (1)...(19): siRNA sense strand
caucaacgggccugagauc

SEQ ID NO: 813023 - RNA, 19 nt, Homo sapiens
  misc_RNA (1)...(19): siRNA sense strand
caaccugaagagcaaguau

SEQ ID NO: 813024 - RNA, 19 nt, Homo sapiens
  misc_RNA (1)...(19): siRNA sense strand
gccagcgcauugccucuca

SEQ ID NO: 813025 - RNA, 19 nt, Homo sapiens
  misc_RNA (1)...(19): siRNA sense strand
gaugagcuggugaccuuca

SEQ ID NO: 813026 - RNA, 19 nt, Homo sapiens
  misc_RNA (1)...(19): siRNA sense strand
gaccacgcgugagaagauc

SEQ ID NO: 813027 - RNA, 19 nt, Homo sapiens
  misc_RNA (1)...(19): siRNA sense strand
cugcugaggacgagaagaa

SEQ ID NO: 813028 - RNA, 19 nt, Homo sapiens
  misc_RNA (1)...(19): siRNA sense strand
ggagaagcaccagcucaag

SEQ ID NO: 813029 - RNA, 19 nt, Homo sapiens
  misc_RNA (1)...(19): siRNA sense strand
ggacaagcacacacaaacc

SEQ ID NO: 813030 - RNA, 19 nt, Homo sapiens
  misc_RNA (1)...(19): siRNA sense strand
ugaguguggcccaggauga

SEQ ID NO: 813031 - RNA, 19 nt, Homo sapiens
  misc_RNA (1)...(19): siRNA sense strand
ccuccacgcccaagaagga

SEQ ID NO: 813032 - RNA, 19 nt, Homo sapiens
  misc_RNA (1)...(19): siRNA sense strand
ggagaccgaguaccucaac

SEQ ID NO: 813033 - RNA, 19 nt, Homo sapiens
  misc_RNA (1)...(19): siRNA sense strand
caacgcugcaggacacaca

SEQ ID NO: 813034 - RNA, 19 nt, Homo sapiens
  misc_RNA (1)...(19): siRNA sense strand
ucacacuacaugagcauca

SEQ ID NO: 813035 - RNA, 19 nt, Homo sapiens
  misc_RNA (1)...(19): siRNA sense strand
gagaccgaguaccucaaca

SEQ ID NO: 813036 - RNA, 19 nt, Homo sapiens
  misc_RNA (1)...(19): siRNA sense strand
gagaugaacuuacuaacuu

SEQ ID NO: 813037 - RNA, 19 nt, Homo sapiens
  misc_RNA (1)...(19): siRNA sense strand
ggagaucccugaaggcuuu

SEQ ID NO: 813038 - RNA, 19 nt, Homo sapiens
  misc_RNA (1)...(19): siRNA sense strand
gaaaagaucucucuacuuc

SEQ ID NO: 813039 - RNA, 19 nt, Homo sapiens
  misc_RNA (1)...(19): siRNA sense strand
gaagaugaagugcuuaaua

SEQ ID NO: 813040 - RNA, 19 nt, Homo sapiens
  misc_RNA (1)...(19): siRNA sense strand
aaacucaacuucagucuuu

SEQ ID NO: 813041 - RNA, 19 nt, Homo sapiens
  misc_RNA (1)...(19): siRNA sense strand
aagaagagaugcagccuua

SEQ ID NO: 813042 - RNA, 19 nt, Homo sapiens
  misc_RNA (1)...(19): siRNA sense strand
gaacacagaagaagaagaa

SEQ ID NO: 813043 - RNA, 19 nt, Homo sapiens
  misc_RNA (1)...(19): siRNA sense strand
ggaugacucuguauuugua

SEQ ID NO: 813044 - RNA, 19 nt, Homo sapiens
  misc_RNA (1)...(19): siRNA sense strand
ggauaugucuccacccuuu

SEQ ID NO: 813045 - RNA, 19 nt, Homo sapiens
  misc_RNA (1)...(19): siRNA sense strand
gcaaauaugcguucagcua

SEQ ID NO: 813046 - RNA, 19 nt, Homo sapiens
  misc_RNA (1)...(19): siRNA sense strand
gagcuuaucaacaaacuua

SEQ ID NO: 813047 - RNA, 19 nt, Homo sapiens
  misc_RNA (1)...(19): siRNA sense strand
ggagagcucuugcuacuag

SEQ ID NO: 813048 - RNA, 19 nt, Homo sapiens
  misc_RNA (1)...(19): siRNA sense strand
gcaggaaugguuuauguua

SEQ ID NO: 813049 - RNA, 19 nt, Homo sapiens
  misc_RNA (1)...(19): siRNA sense strand
ggagaaaugguuuaucuuu

SEQ ID NO: 813050 - RNA, 19 nt, Homo sapiens
  misc_RNA (1)...(19): siRNA sense strand
caauuuagaugacuucgaa

SEQ ID NO: 813051 - RNA, 19 nt, Homo sapiens
  misc_RNA (1)...(19): siRNA sense strand
gcaucaauaugaaacagua

SEQ ID NO: 813052 - RNA, 19 nt, Homo sapiens
  misc_RNA (1)...(19): siRNA sense strand
ggaauaagcacaauaccaa

SEQ ID NO: 813053 - RNA, 19 nt, Homo sapiens
  misc_RNA (1)...(19): siRNA sense strand
gguaaauccuguucaagaa

SEQ ID NO: 813054 - RNA, 19 nt, Homo sapiens
  misc_RNA (1)...(19): siRNA sense strand
cagcaucgauuguuaucua

SEQ ID NO: 813055 - RNA, 19 nt, Homo sapiens
  misc_RNA (1)...(19): siRNA sense strand
gcgaacagcuucugcuaga

SEQ ID NO: 813056 - RNA, 19 nt, Homo sapiens
  misc_RNA (1)...(19): siRNA sense strand
ugaagaagcuccuagaagu

SEQ ID NO: 813057 - RNA, 19 nt, Homo sapiens
  misc_RNA (1)...(19): siRNA sense strand
gcauaaagcaagcaaauau

SEQ ID NO: 813058 - RNA, 19 nt, Homo sapiens
  misc_RNA (1)...(19): siRNA sense strand
gcuauaaucccuuuaaaga

SEQ ID NO: 813059 - RNA, 19 nt, Homo sapiens
  misc_RNA (1)...(19): siRNA sense strand
uaacagcuauaaucccuuu

SEQ ID NO: 813060 - RNA, 19 nt, Homo sapiens
  misc_RNA (1)...(19): siRNA sense strand
cugaagagcuuaucaacaa

SEQ ID NO: 813061 - RNA, 19 nt, Homo sapiens
  misc_RNA (1)...(19): siRNA sense strand
ugaaaucacuguaacacuu

SEQ ID NO: 813062 - RNA, 19 nt, Homo sapiens
  misc_RNA (1)...(19): siRNA sense strand
gaaauguguucuucaguag

SEQ ID NO: 813063 - RNA, 19 nt, Homo sapiens
  misc_RNA (1)...(19): siRNA sense strand
gaagaagaauuggaugaau

SEQ ID NO: 813064 - RNA, 19 nt, Homo sapiens
  misc_RNA (1)...(19): siRNA sense strand
gaaacagcuucaccuagaa

SEQ ID NO: 813065 - RNA, 19 nt, Homo sapiens
  misc_RNA (1)...(19): siRNA sense strand
gaacagagugaaccaagaa

SEQ ID NO: 813066 - RNA, 19 nt, Homo sapiens
  misc_RNA (1)...(19): siRNA sense strand
cgaagaagauaaugaagau

SEQ ID NO: 813067 - RNA, 19 nt, Homo sapiens
  misc_RNA (1)...(19): siRNA sense strand
gaaaaggcagcuaaaauua

SEQ ID NO: 813068 - RNA, 19 nt, Homo sapiens
  misc_RNA (1)...(19): siRNA sense strand
gaagagaugcagccuuaaa

SEQ ID NO: 813069 - RNA, 19 nt, Homo sapiens
  misc_RNA (1)...(19): siRNA sense strand
caacuccuccuccaaauaa

SEQ ID NO: 813070 - RNA, 19 nt, Homo sapiens
  misc_RNA (1)...(19): siRNA sense strand
agacugaugucaaguuaaa

SEQ ID NO: 813071 - RNA, 19 nt, Homo sapiens
  misc_RNA (1)...(19): siRNA sense strand
gaaaggaaaugaggagaag

SEQ ID NO: 813072 - RNA, 19 nt, Homo sapiens
  misc_RNA (1)...(19): siRNA sense strand
cagaagaaccuaucacuga

SEQ ID NO: 813073 - RNA, 19 nt, Homo sapiens
  misc_RNA (1)...(19): siRNA sense strand
gcagaaaaguugaaagaaa

SEQ ID NO: 813074 - RNA, 19 nt, Homo sapiens
  misc_RNA (1)...(19): siRNA sense strand
guaguaacuuggagaaaga

SEQ ID NO: 813075 - RNA, 19 nt, Homo sapiens
  misc_RNA (1)...(19): siRNA sense strand
gaagcaggccgaagaagaa

SEQ ID NO: 813076 - RNA, 19 nt, Homo sapiens
  misc_RNA (1)...(19): siRNA sense strand
gagaauagaccagagauga

SEQ ID NO: 813077 - RNA, 19 nt, Homo sapiens
  misc_RNA (1)...(19): siRNA sense strand
cagaagaucuccggacuga

SEQ ID NO: 813078 - RNA, 19 nt, Homo sapiens
  misc_RNA (1)...(19): siRNA sense strand
gaaaucacuguaacacuuu

SEQ ID NO: 813079 - RNA, 19 nt, Homo sapiens
  misc_RNA (1)...(19): siRNA sense strand
cagcuuagaugaagaucaa

SEQ ID NO: 813080 - RNA, 19 nt, Homo sapiens
  misc_RNA (1)...(19): siRNA sense strand
ugucagaacuucccagcua

SEQ ID NO: 813081 - RNA, 19 nt, Homo sapiens
  misc_RNA (1)...(19): siRNA sense strand
ggaaccuucugauauggua

SEQ ID NO: 813082 - RNA, 19 nt, Homo sapiens
  misc_RNA (1)...(19): siRNA sense strand
gaaauggcaaccagauaaa

SEQ ID NO: 813083 - RNA, 19 nt, Homo sapiens
  misc_RNA (1)...(19): siRNA sense strand
gcugauagaaccacuuuaa

SEQ ID NO: 813084 - RNA, 19 nt, Homo sapiens
  misc_RNA (1)...(19): siRNA sense strand
gaccagauuuaauugacua

SEQ ID NO: 813085 - RNA, 19 nt, Homo sapiens
  misc_RNA (1)...(19): siRNA sense strand
gauagaaccacuuuaaauc

SEQ ID NO: 813086 - RNA, 19 nt, Homo sapiens
  misc_RNA (1)...(19): siRNA sense strand
caagaugacugcauaaagc

SEQ ID NO: 813087 - RNA, 19 nt, Homo sapiens
  misc_RNA (1)...(19): siRNA sense strand
gaagauacaaagaaaggaa

SEQ ID NO: 813088 - RNA, 19 nt, Homo sapiens
  misc_RNA (1)...(19): siRNA sense strand
gaauagaccagagaugaaa

SEQ ID NO: 813089 - RNA, 19 nt, Homo sapiens
  misc_RNA (1)...(19): siRNA sense strand
gaagcucgaucuggaguga

SEQ ID NO: 813090 - RNA, 19 nt, Homo sapiens
  misc_RNA (1)...(19): siRNA sense strand
aagaagaacuuaaggaaag

SEQ ID NO: 813091 - RNA, 19 nt, Homo sapiens
  misc_RNA (1)...(19): siRNA sense strand
gcacauauaaaguuggaaa

SEQ ID NO: 813092 - RNA, 19 nt, Homo sapiens
  misc_RNA (1)...(19): siRNA sense strand
agacaucgguaguaacuug

SEQ ID NO: 813093 - RNA, 19 nt, Homo sapiens
  misc_RNA (1)...(19): siRNA sense strand
agaagaagaugagcauuug

SEQ ID NO: 813094 - RNA, 19 nt, Homo sapiens
  misc_RNA (1)...(19): siRNA sense strand
acaggaagauacaaagaaa

SEQ ID NO: 813095 - RNA, 19 nt, Homo sapiens
  misc_RNA (1)...(19): siRNA sense strand
caaagauucuacagucaga

SEQ ID NO: 813096 - RNA, 19 nt, Homo sapiens
  misc_RNA (1)...(19): siRNA sense strand
gaagaagcuccuagaaguu

SEQ ID NO: 813097 - RNA, 19 nt, Homo sapiens
  misc_RNA (1)...(19): siRNA sense strand
caaauaugcguucagcuaa

SEQ ID NO: 813098 - RNA, 19 nt, Homo sapiens
  misc_RNA (1)...(19): siRNA sense strand
gaacagcuucugcuagaug

SEQ ID NO: 813099 - RNA, 19 nt, Homo sapiens
  misc_RNA (1)...(19): siRNA sense strand
gauccagaaucuccuauca

SEQ ID NO: 813100 - RNA, 19 nt, Homo sapiens
  misc_RNA (1)...(19): siRNA sense strand
ccugauaaacugacuguua

SEQ ID NO: 813101 - RNA, 19 nt, Homo sapiens
  misc_RNA (1)...(19): siRNA sense strand
uauaagaccuguggauaug

SEQ ID NO: 813102 - RNA, 19 nt, Homo sapiens
  misc_RNA (1)...(19): siRNA sense strand
gaacuacaacagccuauca

SEQ ID NO: 813103 - RNA, 19 nt, Homo sapiens
  misc_RNA (1)...(19): siRNA sense strand
gcagagaucaauacaggaa

SEQ ID NO: 813104 - RNA, 19 nt, Homo sapiens
  misc_RNA (1)...(19): siRNA sense strand
gcaacaggcagcuaaguga

SEQ ID NO: 813105 - RNA, 19 nt, Homo sapiens
  misc_RNA (1)...(19): siRNA sense strand
ggaaagagcaagaguucug

SEQ ID NO: 813106 - RNA, 19 nt, Homo sapiens
  misc_RNA (1)...(19): siRNA sense strand
gcagcuaagugaucagcaa

SEQ ID NO: 813107 - RNA, 19 nt, Homo sapiens
  misc_RNA (1)...(19): siRNA sense strand
gaugaagacaugcaaaguu

SEQ ID NO: 813108 - RNA, 19 nt, Homo sapiens
  misc_RNA (1)...(19): siRNA sense strand
gcaagauggccaagaaaga

SEQ ID NO: 813109 - RNA, 19 nt, Homo sapiens
  misc_RNA (1)...(19): siRNA sense strand
gaaggaacacagaagaaga

SEQ ID NO: 813110 - RNA, 19 nt, Homo sapiens
  misc_RNA (1)...(19): siRNA sense strand
ucuccggacugaacgauua

SEQ ID NO: 813111 - RNA, 19 nt, Homo sapiens
  misc_RNA (1)...(19): siRNA sense strand
uaagugaucagcaagauga

SEQ ID NO: 813112 - RNA, 19 nt, Homo sapiens
  misc_RNA (1)...(19): siRNA sense strand
gcaauauuacaccacuuua

SEQ ID NO: 813113 - RNA, 19 nt, Homo sapiens
  misc_RNA (1)...(19): siRNA sense strand
caaaugcuagucagucuuu

SEQ ID NO: 813114 - RNA, 19 nt, Homo sapiens
  misc_RNA (1)...(19): siRNA sense strand
gaagaaauggcaaccagau

SEQ ID NO: 813115 - RNA, 19 nt, Homo sapiens
  misc_RNA (1)...(19): siRNA sense strand
caagaagaacuuaaggaaa

SEQ ID NO: 813116 - RNA, 19 nt, Homo sapiens
  misc_RNA (1)...(19): siRNA sense strand
uccagaaucuccuaucaaa

SEQ ID NO: 813117 - RNA, 19 nt, Homo sapiens
  misc_RNA (1)...(19): siRNA sense strand
ugaaacagauacaaacagu

SEQ ID NO: 813118 - RNA, 19 nt, Homo sapiens
  misc_RNA (1)...(19): siRNA sense strand
gaagaaccuaucacugaaa

SEQ ID NO: 813119 - RNA, 19 nt, Homo sapiens
  misc_RNA (1)...(19): siRNA sense strand
augaagacaugcaaaguuu

SEQ ID NO: 813120 - RNA, 19 nt, Homo sapiens
  misc_RNA (1)...(19): siRNA sense strand
uggcagcacuagagaauga

SEQ ID NO: 813121 - RNA, 19 nt, Homo sapiens
  misc_RNA (1)...(19): siRNA sense strand
uaaaugucguucagauaga

SEQ ID NO: 813122 - RNA, 19 nt, Homo sapiens
  misc_RNA (1)...(19): siRNA sense strand
agaagaaccuaucacugaa

SEQ ID NO: 813123 - RNA, 19 nt, Homo sapiens
  misc_RNA (1)...(19): siRNA sense strand
gcugagacuuuagaauuga

SEQ ID NO: 813124 - RNA, 19 nt, Homo sapiens
  misc_RNA (1)...(19): siRNA sense strand
ugaaucagcucucucuucu

SEQ ID NO: 813125 - RNA, 19 nt, Homo sapiens
  misc_RNA (1)...(19): siRNA sense strand
ggaaugguuuauguuaguu

SEQ ID NO: 813126 - RNA, 19 nt, Homo sapiens
  misc_RNA (1)...(19): siRNA sense strand
cagauaaacuggugguagu

SEQ ID NO: 813127 - RNA, 19 nt, Homo sapiens
  misc_RNA (1)...(19): siRNA sense strand
agaaauggcaaccagauaa

SEQ ID NO: 813128 - RNA, 19 nt, Homo sapiens
  misc_RNA (1)...(19): siRNA sense strand
gguaguaacuuggagaaag

SEQ ID NO: 813129 - RNA, 19 nt, Homo sapiens
  misc_RNA (1)...(19): siRNA sense strand
ggacuuggccaccgugaau

SEQ ID NO: 813130 - RNA, 19 nt, Homo sapiens
  misc_RNA (1)...(19): siRNA sense strand
caaagacaccagucaguau

SEQ ID NO: 813131 - RNA, 19 nt, Homo sapiens
  misc_RNA (1)...(19): siRNA sense strand
uagaaauccuguuguguuc

SEQ ID NO: 813132 - RNA, 19 nt, Homo sapiens
  misc_RNA (1)...(19): siRNA sense strand
caacagaacguuuuagaaa

SEQ ID NO: 813133 - RNA, 19 nt, Homo sapiens
  misc_RNA (1)...(19): siRNA sense strand
gaacuuaaggaaagagcaa

SEQ ID NO: 813134 - RNA, 19 nt, Homo sapiens
  misc_RNA (1)...(19): siRNA sense strand
caggaugacucuguauuug

SEQ ID NO: 813135 - RNA, 19 nt, Homo sapiens
  misc_RNA (1)...(19): siRNA sense strand
guggagaaaugguuuaucu

SEQ ID NO: 813136 - RNA, 19 nt, Homo sapiens
  misc_RNA (1)...(19): siRNA sense strand
gagagaagcuaauuacauu

SEQ ID NO: 813137 - RNA, 19 nt, Homo sapiens
  misc_RNA (1)...(19): siRNA sense strand
gauaaaugcuuccuuguga

SEQ ID NO: 813138 - RNA, 19 nt, Homo sapiens
  misc_RNA (1)...(19): siRNA sense strand
guacuuggaucaacaauug

SEQ ID NO: 813139 - RNA, 19 nt, Homo sapiens
  misc_RNA (1)...(19): siRNA sense strand
ggaugaaucugucaaagaa

SEQ ID NO: 813140 - RNA, 19 nt, Homo sapiens
  misc_RNA (1)...(19): siRNA sense strand
gcaggaaucugggacuuua

SEQ ID NO: 813141 - RNA, 19 nt, Homo sapiens
  misc_RNA (1)...(19): siRNA sense strand
gaauaucucuucagucuuc

SEQ ID NO: 813142 - RNA, 19 nt, Homo sapiens
  misc_RNA (1)...(19): siRNA sense strand
ugaaugagcuucuggugua

SEQ ID NO: 813143 - RNA, 19 nt, Homo sapiens
  misc_RNA (1)...(19): siRNA sense strand
gcaaacaagguuauucuua

SEQ ID NO: 813144 - RNA, 19 nt, Homo sapiens
  misc_RNA (1)...(19): siRNA sense strand
ggaagaaucugagaagcua

SEQ ID NO: 813145 - RNA, 19 nt, Homo sapiens
  misc_RNA (1)...(19): siRNA sense strand
cgacaaaccugccaaagug

SEQ ID NO: 813146 - RNA, 19 nt, Homo sapiens
  misc_RNA (1)...(19): siRNA sense strand
gaaagagugugaagaagau

SEQ ID NO: 813147 - RNA, 19 nt, Homo sapiens
  misc_RNA (1)...(19): siRNA sense strand
gaagaacaccagaacauuu

SEQ ID NO: 813148 - RNA, 19 nt, Homo sapiens
  misc_RNA (1)...(19): siRNA sense strand
ggaagaacgggaagcauua

SEQ ID NO: 813149 - RNA, 19 nt, Homo sapiens
  misc_RNA (1)...(19): siRNA sense strand
ggauuuagcuggcagugaa

SEQ ID NO: 813150 - RNA, 19 nt, Homo sapiens
  misc_RNA (1)...(19): siRNA sense strand
gauuucagcucucaggaua

SEQ ID NO: 813151 - RNA, 19 nt, Homo sapiens
  misc_RNA (1)...(19): siRNA sense strand
aagcgaggcucucuucuua

SEQ ID NO: 813152 - RNA, 19 nt, Homo sapiens
  misc_RNA (1)...(19): siRNA sense strand
gccagaggcuuauguauga

SEQ ID NO: 813153 - RNA, 19 nt, Homo sapiens
  misc_RNA (1)...(19): siRNA sense strand
gagaagcaacguugaauaa

SEQ ID NO: 813154 - RNA, 19 nt, Homo sapiens
  misc_RNA (1)...(19): siRNA sense strand
ggacuuaaaugcugaugau

SEQ ID NO: 813155 - RNA, 19 nt, Homo sapiens
  misc_RNA (1)...(19): siRNA sense strand
uaacaucaccgaagacuuu

SEQ ID NO: 813156 - RNA, 19 nt, Homo sapiens
  misc_RNA (1)...(19): siRNA sense strand
gagagaauauccugcagaa

SEQ ID NO: 813157 - RNA, 19 nt, Homo sapiens
  misc_RNA (1)...(19): siRNA sense strand
gagaugcgguugacccuaa

SEQ ID NO: 813158 - RNA, 19 nt, Homo sapiens
  misc_RNA (1)...(19): siRNA sense strand
ugaagaagauaacccagua

SEQ ID NO: 813159 - RNA, 19 nt, Homo sapiens
  misc_RNA (1)...(19): siRNA sense strand
gaagcaacguugaauaaca

SEQ ID NO: 813160 - RNA, 19 nt, Homo sapiens
  misc_RNA (1)...(19): siRNA sense strand
gagaauauccugcagaaug

SEQ ID NO: 813161 - RNA, 19 nt, Homo sapiens
  misc_RNA (1)...(19): siRNA sense strand
gagaaucugugucaauguu

SEQ ID NO: 813162 - RNA, 19 nt, Homo sapiens
  misc_RNA (1)...(19): siRNA sense strand
gaacagaguuuuaaaguag

SEQ ID NO: 813163 - RNA, 19 nt, Homo sapiens
  misc_RNA (1)...(19): siRNA sense strand
aaacuggugugcaugguua

SEQ ID NO: 813164 - RNA, 19 nt, Homo sapiens
  misc_RNA (1)...(19): siRNA sense strand
ggagugaagugaccaggaa

SEQ ID NO: 813165 - RNA, 19 nt, Homo sapiens
  misc_RNA (1)...(19): siRNA sense strand
guaauacgaucauacuuca

SEQ ID NO: 813166 - RNA, 19 nt, Homo sapiens
  misc_RNA (1)...(19): siRNA sense strand
cuaccaggaucgagauuua

SEQ ID NO: 813167 - RNA, 19 nt, Homo sapiens
  misc_RNA (1)...(19): siRNA sense strand
gaagauaacccaguaauac

SEQ ID NO: 813168 - RNA, 19 nt, Homo sapiens
  misc_RNA (1)...(19): siRNA sense strand
guaaaugggucaucugucu

SEQ ID NO: 813169 - RNA, 19 nt, Homo sapiens
  misc_RNA (1)...(19): siRNA sense strand
gcaaugaguuuucuguuaa

SEQ ID NO: 813170 - RNA, 19 nt, Homo sapiens
  misc_RNA (1)...(19): siRNA sense strand
gcugauaacuaugaugaaa

SEQ ID NO: 813171 - RNA, 19 nt, Homo sapiens
  misc_RNA (1)...(19): siRNA sense strand
ggaucgagauuuagagaga

SEQ ID NO: 813172 - RNA, 19 nt, Homo sapiens
  misc_RNA (1)...(19): siRNA sense strand
ggaaagagugugaagaaga

SEQ ID NO: 813173 - RNA, 19 nt, Homo sapiens
  misc_RNA (1)...(19): siRNA sense strand
ggaagaauguauacugucu

SEQ ID NO: 813174 - RNA, 19 nt, Homo sapiens
  misc_RNA (1)...(19): siRNA sense strand
aaacgggcguggugagaua

SEQ ID NO: 813175 - RNA, 19 nt, Homo sapiens
  misc_RNA (1)...(19): siRNA sense strand
caacugguguuacgcaaga

SEQ ID NO: 813176 - RNA, 19 nt, Homo sapiens
  misc_RNA (1)...(19): siRNA sense strand
acacauuccuguuauauuc

SEQ ID NO: 813177 - RNA, 19 nt, Homo sapiens
  misc_RNA (1)...(19): siRNA sense strand
gaauguauacugucuguug

SEQ ID NO: 813178 - RNA, 19 nt, Homo sapiens
  misc_RNA (1)...(19): siRNA sense strand
gaaguguccuacauggaaa

SEQ ID NO: 813179 - RNA, 19 nt, Homo sapiens
  misc_RNA (1)...(19): siRNA sense strand
cagcaacgcuuaagacagu

SEQ ID NO: 813180 - RNA, 19 nt, Homo sapiens
  misc_RNA (1)...(19): siRNA sense strand
aaugaaaucuccagagcua

SEQ ID NO: 813181 - RNA, 19 nt, Homo sapiens
  misc_RNA (1)...(19): siRNA sense strand
aaacaacgcuguggugaau

SEQ ID NO: 813182 - RNA, 19 nt, Homo sapiens
  misc_RNA (1)...(19): siRNA sense strand
gauauugagucguugaugu

SEQ ID NO: 813183 - RNA, 19 nt, Homo sapiens
  misc_RNA (1)...(19): siRNA sense strand
gccacaagcuacaaggaua

SEQ ID NO: 813184 - RNA, 19 nt, Homo sapiens
  misc_RNA (1)...(19): siRNA sense strand
uguccuacauggaaauuua

SEQ ID NO: 813185 - RNA, 19 nt, Homo sapiens
  misc_RNA (1)...(19): siRNA sense strand
gaaaguggcggugcggaua

SEQ ID NO: 813186 - RNA, 19 nt, Homo sapiens
  misc_RNA (1)...(19): siRNA sense strand
gaaugagaauggugaauac

SEQ ID NO: 813187 - RNA, 19 nt, Homo sapiens
  misc_RNA (1)...(19): siRNA sense strand
ucaccuggcugcucaaaga

SEQ ID NO: 813188 - RNA, 19 nt, Homo sapiens
  misc_RNA (1)...(19): siRNA sense strand
guaugcaggucaagauauu

SEQ ID NO: 813189 - RNA, 19 nt, Homo sapiens
  misc_RNA (1)...(19): siRNA sense strand
caaacgugcugauccauuc

SEQ ID NO: 813190 - RNA, 19 nt, Homo sapiens
  misc_RNA (1)...(19): siRNA sense strand
gaggcucucuucuuaguga

SEQ ID NO: 813191 - RNA, 19 nt, Homo sapiens
  misc_RNA (1)...(19): siRNA sense strand
agaaacagcuugagagucu

SEQ ID NO: 813192 - RNA, 19 nt, Homo sapiens
  misc_RNA (1)...(19): siRNA sense strand
ugaccaaccuggauuaauc

SEQ ID NO: 813193 - RNA, 19 nt, Homo sapiens
  misc_RNA (1)...(19): siRNA sense strand
ccaaaugugugguggaugu

SEQ ID NO: 813194 - RNA, 19 nt, Homo sapiens
  misc_RNA (1)...(19): siRNA sense strand
gagacacacauuccuguua

SEQ ID NO: 813195 - RNA, 19 nt, Homo sapiens
  misc_RNA (1)...(19): siRNA sense strand
gaucauuguuucuggucua

SEQ ID NO: 813196 - RNA, 19 nt, Homo sapiens
  misc_RNA (1)...(19): siRNA sense strand
gauugucgcuccugaagug

SEQ ID NO: 813197 - RNA, 19 nt, Homo sapiens
  misc_RNA (1)...(19): siRNA sense strand
acaaggauauugagucguu

SEQ ID NO: 813198 - RNA, 19 nt, Homo sapiens
  misc_RNA (1)...(19): siRNA sense strand
gaaggaagggagcaacauu

SEQ ID NO: 813199 - RNA, 19 nt, Homo sapiens
  misc_RNA (1)...(19): siRNA sense strand
ccugaacacuguauuauag

SEQ ID NO: 813200 - RNA, 19 nt, Homo sapiens
  misc_RNA (1)...(19): siRNA sense strand
gaggagaaauuaaggaaaa

SEQ ID NO: 813201 - RNA, 19 nt, Homo sapiens
  misc_RNA (1)...(19): siRNA sense strand
uagaaaaccuccugacuuu

SEQ ID NO: 813202 - RNA, 19 nt, Homo sapiens
  misc_RNA (1)...(19): siRNA sense strand
gcauguaucuuugccuaug

SEQ ID NO: 813203 - RNA, 19 nt, Homo sapiens
  misc_RNA (1)...(19): siRNA sense strand
gcaaggagccgcacugcau

SEQ ID NO: 813204 - RNA, 19 nt, Homo sapiens
  misc_RNA (1)...(19): siRNA sense strand
gcugauccauucuaugaug

SEQ ID NO: 813205 - RNA, 19 nt, Homo sapiens
  misc_RNA (1)...(19): siRNA sense strand
caaaguuacccuacagauu

SEQ ID NO: 813206 - RNA, 19 nt, Homo sapiens
  misc_RNA (1)...(19): siRNA sense strand
ccagcgagguguccaguga

SEQ ID NO: 813207 - RNA, 19 nt, Homo sapiens
  misc_RNA (1)...(19): siRNA sense strand
caaagcagaggcaaugaaa

SEQ ID NO: 813208 - RNA, 19 nt, Homo sapiens
  misc_RNA (1)...(19): siRNA sense strand
gagccaagcacauuguaaa

SEQ ID NO: 813209 - RNA, 19 nt, Homo sapiens
  misc_RNA (1)...(19): siRNA sense strand
gcuugagagucuuggaaua

SEQ ID NO: 813210 - RNA, 19 nt, Homo sapiens
  misc_RNA (1)...(19): siRNA sense strand
caggaucccuccaugaaga

SEQ ID NO: 813211 - RNA, 19 nt, Homo sapiens
  misc_RNA (1)...(19): siRNA sense strand
gaacaccagaacauuugua

SEQ ID NO: 813212 - RNA, 19 nt, Homo sapiens
  misc_RNA (1)...(19): siRNA sense strand
ucagcaaauucccaagaua

SEQ ID NO: 813213 - RNA, 19 nt, Homo sapiens
  misc_RNA (1)...(19): siRNA sense strand
gguguacuauuuaaaggaa

SEQ ID NO: 813214 - RNA, 19 nt, Homo sapiens
  misc_RNA (1)...(19): siRNA sense strand
uggaauaucucuucagucu

SEQ ID NO: 813215 - RNA, 19 nt, Homo sapiens
  misc_RNA (1)...(19): siRNA sense strand
gacacacauuccuguuaua

SEQ ID NO: 813216 - RNA, 19 nt, Homo sapiens
  misc_RNA (1)...(19): siRNA sense strand
gaagugaccaggaaauugg

SEQ ID NO: 813217 - RNA, 19 nt, Homo sapiens
  misc_RNA (1)...(19): siRNA sense strand
ccgaugcaguccauauuaa

SEQ ID NO: 813218 - RNA, 19 nt, Homo sapiens
  misc_RNA (1)...(19): siRNA sense strand
gaaaaucucagucucauug

SEQ ID NO: 813219 - RNA, 19 nt, Homo sapiens
  misc_RNA (1)...(19): siRNA sense strand
gaguaucaguucuccaaau

SEQ ID NO: 813220 - RNA, 19 nt, Homo sapiens
  misc_RNA (1)...(19): siRNA sense strand
agacacacauuccuguuau

SEQ ID NO: 813221 - RNA, 19 nt, Homo sapiens
  misc_RNA (1)...(19): siRNA sense strand
ggaggagauugcacaggaa

SEQ ID NO: 813222 - RNA, 19 nt, Homo sapiens
  misc_RNA (1)...(19): siRNA sense strand
ggauguggaugcaaacaag

SEQ ID NO: 813223 - RNA, 19 nt, Homo sapiens
  misc_RNA (1)...(19): siRNA sense strand
ggaugaugcugaccgugaa

SEQ ID NO: 813224 - RNA, 19 nt, Homo sapiens
  misc_RNA (1)...(19): siRNA sense strand
gaaguuacaauacgcuguu

SEQ ID NO: 813225 - RNA, 19 nt, Homo sapiens
  misc_RNA (1)...(19): siRNA sense strand
gaagaagauaacccaguaa

SEQ ID NO: 813226 - RNA, 19 nt, Homo sapiens
  misc_RNA (1)...(19): siRNA sense strand
gaacagaauacaaaguuac

SEQ ID NO: 813227 - RNA, 19 nt, Homo sapiens
  misc_RNA (1)...(19): siRNA sense strand
aaaguuacccuacagauuc

SEQ ID NO: 813228 - RNA, 19 nt, Homo sapiens
  misc_RNA (1)...(19): siRNA sense strand
uuagagagacuucguagaa

SEQ ID NO: 813229 - RNA, 19 nt, Homo sapiens
  misc_RNA (1)...(19): siRNA sense strand
gaagugauuucugcaaagg

SEQ ID NO: 813230 - RNA, 19 nt, Homo sapiens
  misc_RNA (1)...(19): siRNA sense strand
cagcaucugucccacuuug

SEQ ID NO: 813231 - RNA, 19 nt, Homo sapiens
  misc_RNA (1)...(19): siRNA sense strand
gugcugauccauucuauga

SEQ ID NO: 813232 - RNA, 19 nt, Homo sapiens
  misc_RNA (1)...(19): siRNA sense strand
gaaagcagaacgagaggau

SEQ ID NO: 813233 - RNA, 19 nt, Homo sapiens
  misc_RNA (1)...(19): siRNA sense strand
cauuggaugugucaaaguu

SEQ ID NO: 813234 - RNA, 19 nt, Homo sapiens
  misc_RNA (1)...(19): siRNA sense strand
cagauuuggucuuuggaaa

SEQ ID NO: 813235 - RNA, 19 nt, Homo sapiens
  misc_RNA (1)...(19): siRNA sense strand
gcgaggcucucuucuuagu

SEQ ID NO: 813236 - RNA, 19 nt, Homo sapiens
  misc_RNA (1)...(19): siRNA sense strand
gaacagaagucuccugauu

SEQ ID NO: 813237 - RNA, 19 nt, Homo sapiens
  misc_RNA (1)...(19): siRNA sense strand
gaacggaacccucuacauu

SEQ ID NO: 813238 - RNA, 19 nt, Homo sapiens
  misc_RNA (1)...(19): siRNA sense strand
gcaagcagcucucuguaug

SEQ ID NO: 813239 - RNA, 19 nt, Homo sapiens
  misc_RNA (1)...(19): siRNA sense strand
guagacacaugcagaauga

SEQ ID NO: 813240 - RNA, 19 nt, Homo sapiens
  misc_RNA (1)...(19): siRNA sense strand
ggacaccaguuccugauga

SEQ ID NO: 813241 - RNA, 19 nt, Homo sapiens
  misc_RNA (1)...(19): siRNA sense strand
ccaaugaguucccugauga

SEQ ID NO: 813242 - RNA, 19 nt, Homo sapiens
  misc_RNA (1)...(19): siRNA sense strand
aaacugacauggaaaucua

SEQ ID NO: 813243 - RNA, 19 nt, Homo sapiens
  misc_RNA (1)...(19): siRNA sense strand
ggaaauagcaguggaguau

SEQ ID NO: 813244 - RNA, 19 nt, Homo sapiens
  misc_RNA (1)...(19): siRNA sense strand
ugagaacaauggucagaua

SEQ ID NO: 813245 - RNA, 19 nt, Homo sapiens
  misc_RNA (1)...(19): siRNA sense strand
gaacaucucagcagcaaga

SEQ ID NO: 813246 - RNA, 19 nt, Homo sapiens
  misc_RNA (1)...(19): siRNA sense strand
aaauagcaguggaguauaa

SEQ ID NO: 813247 - RNA, 19 nt, Homo sapiens
  misc_RNA (1)...(19): siRNA sense strand
ggaaucaucuugaaguuuu

SEQ ID NO: 813248 - RNA, 19 nt, Homo sapiens
  misc_RNA (1)...(19): siRNA sense strand
gaggaaugcuggacuggaa

SEQ ID NO: 813249 - RNA, 19 nt, Homo sapiens
  misc_RNA (1)...(19): siRNA sense strand
gaccauauuuauacuguug

SEQ ID NO: 813250 - RNA, 19 nt, Homo sapiens
  misc_RNA (1)...(19): siRNA sense strand
uaagauggauacauuggaa

SEQ ID NO: 813251 - RNA, 19 nt, Homo sapiens
  misc_RNA (1)...(19): siRNA sense strand
cggaagaaauuuauuguag

SEQ ID NO: 813252 - RNA, 19 nt, Homo sapiens
  misc_RNA (1)...(19): siRNA sense strand
uuacagaugugauucguau

SEQ ID NO: 813253 - RNA, 19 nt, Homo sapiens
  misc_RNA (1)...(19): siRNA sense strand
gaugagugccacaacuuua

SEQ ID NO: 813254 - RNA, 19 nt, Homo sapiens
  misc_RNA (1)...(19): siRNA sense strand
gcaagcggcuggaaaugca

SEQ ID NO: 813255 - RNA, 19 nt, Homo sapiens
  misc_RNA (1)...(19): siRNA sense strand
cggccaagaugcucauuaa

SEQ ID NO: 813256 - RNA, 19 nt, Homo sapiens
  misc_RNA (1)...(19): siRNA sense strand
gcagugcccuccaucuuca

SEQ ID NO: 813257 - RNA, 19 nt, Homo sapiens
  misc_RNA (1)...(19): siRNA sense strand
ggacggaacaccacacaga

SEQ ID NO: 813258 - RNA, 19 nt, Homo sapiens
  misc_RNA (1)...(19): siRNA sense strand
gauaugcaaccuccaauga

SEQ ID NO: 813259 - RNA, 19 nt, Homo sapiens
  misc_RNA (1)...(19): siRNA sense strand
ggacauagagcguggcaau

SEQ ID NO: 813260 - RNA, 19 nt, Homo sapiens
  misc_RNA (1)...(19): siRNA sense strand
ucagaagccuugcugcuau

SEQ ID NO: 813261 - RNA, 19 nt, Homo sapiens
  misc_RNA (1)...(19): siRNA sense strand
ggagaugaguguuuacaac

SEQ ID NO: 813262 - RNA, 19 nt, Homo sapiens
  misc_RNA (1)...(19): siRNA sense strand
gcuagggaccauauuuaua

SEQ ID NO: 813263 - RNA, 19 nt, Homo sapiens
  misc_RNA (1)...(19): siRNA sense strand
aagccuugcugcuauauuu

SEQ ID NO: 813264 - RNA, 19 nt, Homo sapiens
  misc_RNA (1)...(19): siRNA sense strand
ccgccacacuggaguauaa

SEQ ID NO: 813265 - RNA, 19 nt, Homo sapiens
  misc_RNA (1)...(19): siRNA sense strand
uggaggagaugaguguuua

SEQ ID NO: 813266 - RNA, 19 nt, Homo sapiens
  misc_RNA (1)...(19): siRNA sense strand
gaugaugcauuguuugucu

SEQ ID NO: 813267 - RNA, 19 nt, Homo sapiens
  misc_RNA (1)...(19): siRNA sense strand
cagaagccuugcugcuaua

SEQ ID NO: 813268 - RNA, 19 nt, Homo sapiens
  misc_RNA (1)...(19): siRNA sense strand
gcucagguuuguaagaaug

SEQ ID NO: 813269 - RNA, 19 nt, Homo sapiens
  misc_RNA (1)...(19): siRNA sense strand
gaaauagcaguggaguaua

SEQ ID NO: 813270 - RNA, 19 nt, Homo sapiens
  misc_RNA (1)...(19): siRNA sense strand
gggugaaccuuguggagaa

SEQ ID NO: 813271 - RNA, 19 nt, Homo sapiens
  misc_RNA (1)...(19): siRNA sense strand
gagaagggaaucaucuuga

SEQ ID NO: 813272 - RNA, 19 nt, Homo sapiens
  misc_RNA (1)...(19): siRNA sense strand
gauaugggaggaucucaaa

SEQ ID NO: 813273 - RNA, 19 nt, Homo sapiens
  misc_RNA (1)...(19): siRNA sense strand
ccaaugaugcguguacaua

SEQ ID NO: 813274 - RNA, 19 nt, Homo sapiens
  misc_RNA (1)...(19): siRNA sense strand
ccucucaccucuccagaaa

SEQ ID NO: 813275 - RNA, 19 nt, Homo sapiens
  misc_RNA (1)...(19): siRNA sense strand
cauccuggcuuucgucaug

SEQ ID NO: 813276 - RNA, 19 nt, Homo sapiens
  misc_RNA (1)...(19): siRNA sense strand
aaagaguccuggagaaaca

SEQ ID NO: 813277 - RNA, 19 nt, Homo sapiens
  misc_RNA (1)...(19): siRNA sense strand
gaaacuauaagauggauac

SEQ ID NO: 813278 - RNA, 19 nt, Homo sapiens
  misc_RNA (1)...(19): siRNA sense strand
ccaagaugcucauuaaagc

SEQ ID NO: 813279 - RNA, 19 nt, Homo sapiens
  misc_RNA (1)...(19): siRNA sense strand
gcacaaccacaucagauuc

SEQ ID NO: 813280 - RNA, 19 nt, Homo sapiens
  misc_RNA (1)...(19): siRNA sense strand
agaagggaaucaucuugaa

SEQ ID NO: 813281 - RNA, 19 nt, Homo sapiens
  misc_RNA (1)...(19): siRNA sense strand
gaaccagaaccucaucaau

SEQ ID NO: 813282 - RNA, 19 nt, Homo sapiens
  misc_RNA (1)...(19): siRNA sense strand
ggcagugucuucccauaau

SEQ ID NO: 813283 - RNA, 19 nt, Homo sapiens
  misc_RNA (1)...(19): siRNA sense strand
ggaugagugccacaacuuu

SEQ ID NO: 813284 - RNA, 19 nt, Homo sapiens
  misc_RNA (1)...(19): siRNA sense strand
caaugaugcguguacauaa

SEQ ID NO: 813285 - RNA, 19 nt, Homo sapiens
  misc_RNA (1)...(19): siRNA sense strand
gaaaugcaccacuccucuu

SEQ ID NO: 813286 - RNA, 19 nt, Homo sapiens
  misc_RNA (1)...(19): siRNA sense strand
gcauuccaguucccucuug

SEQ ID NO: 813287 - RNA, 19 nt, Homo sapiens
  misc_RNA (1)...(19): siRNA sense strand
gguggugccugcagccauu

SEQ ID NO: 813288 - RNA, 19 nt, Homo sapiens
  misc_RNA (1)...(19): siRNA sense strand
gggaccauauuuauacugu

SEQ ID NO: 813289 - RNA, 19 nt, Homo sapiens
  misc_RNA (1)...(19): siRNA sense strand
aacacuaacuccuccaauu

SEQ ID NO: 813290 - RNA, 19 nt, Homo sapiens
  misc_RNA (1)...(19): siRNA sense strand
gcagaaacuauaagaugga

SEQ ID NO: 813291 - RNA, 19 nt, Homo sapiens
  misc_RNA (1)...(19): siRNA sense strand
cagcuaugauggagucgaa

SEQ ID NO: 813292 - RNA, 19 nt, Homo sapiens
  misc_RNA (1)...(19): siRNA sense strand
ucaaagaguccuggagaaa

SEQ ID NO: 813293 - RNA, 19 nt, Homo sapiens
  misc_RNA (1)...(19): siRNA sense strand
gaauaggaaauagugguuu

SEQ ID NO: 813294 - RNA, 19 nt, Homo sapiens
  misc_RNA (1)...(19): siRNA sense strand
ccucaacgccuacaacuca

SEQ ID NO: 813295 - RNA, 19 nt, Homo sapiens
  misc_RNA (1)...(19): siRNA sense strand
ucgggaaaguuaccucaaa

SEQ ID NO: 813296 - RNA, 19 nt, Homo sapiens
  misc_RNA (1)...(19): siRNA sense strand
ggaccauauuuauacuguu

SEQ ID NO: 813297 - RNA, 19 nt, Homo sapiens
  misc_RNA (1)...(19): siRNA sense strand
gagugauucgggaaaguua

SEQ ID NO: 813298 - RNA, 19 nt, Homo sapiens
  misc_RNA (1)...(19): siRNA sense strand
ugccaacguugcacuguuu

SEQ ID NO: 813299 - RNA, 19 nt, Homo sapiens
  misc_RNA (1)...(19): siRNA sense strand
gagugccacaacuuuauua

SEQ ID NO: 813300 - RNA, 19 nt, Homo sapiens
  misc_RNA (1)...(19): siRNA sense strand
gauauagacacaucacaca

SEQ ID NO: 813301 - RNA, 19 nt, Homo sapiens
  misc_RNA (1)...(19): siRNA sense strand
gacaccaguuccugaugaa

SEQ ID NO: 813302 - RNA, 19 nt, Homo sapiens
  misc_RNA (1)...(19): siRNA sense strand
gccaagaugcucauuaaag

SEQ ID NO: 813303 - RNA, 19 nt, Homo sapiens
  misc_RNA (1)...(19): siRNA sense strand
ucacgccacucaugcacaa

SEQ ID NO: 813304 - RNA, 19 nt, Homo sapiens
  misc_RNA (1)...(19): siRNA sense strand
gcagugucuucccauaauc

SEQ ID NO: 813305 - RNA, 19 nt, Homo sapiens
  misc_RNA (1)...(19): siRNA sense strand
gggcagugucuucccauaa

SEQ ID NO: 813306 - RNA, 19 nt, Homo sapiens
  misc_RNA (1)...(19): siRNA sense strand
gaguggcucagguuuguaa

SEQ ID NO: 813307 - RNA, 19 nt, Homo sapiens
  misc_RNA (1)...(19): siRNA sense strand
ggacugucacaauuccuuu

SEQ ID NO: 813308 - RNA, 19 nt, Homo sapiens
  misc_RNA (1)...(19): siRNA sense strand
gagcguggcaauacagaug

SEQ ID NO: 813309 - RNA, 19 nt, Homo sapiens
  misc_RNA (1)...(19): siRNA sense strand
aagcagcucucuguauguu

SEQ ID NO: 813310 - RNA, 19 nt, Homo sapiens
  misc_RNA (1)...(19): siRNA sense strand
cauccuccuuagaaagaua

SEQ ID NO: 813311 - RNA, 19 nt, Homo sapiens
  misc_RNA (1)...(19): siRNA sense strand
ugccaaacaugccaacguu

SEQ ID NO: 813312 - RNA, 19 nt, Homo sapiens
  misc_RNA (1)...(19): siRNA sense strand
guauaagaccaucaaggaa

SEQ ID NO: 813313 - RNA, 19 nt, Homo sapiens
  misc_RNA (1)...(19): siRNA sense strand
caagaguggcucagguuug

SEQ ID NO: 813314 - RNA, 19 nt, Homo sapiens
  misc_RNA (1)...(19): siRNA sense strand
gggaaucaucuugaaguuu

SEQ ID NO: 813315 - RNA, 19 nt, Homo sapiens
  misc_RNA (1)...(19): siRNA sense strand
gccuacaacucacugacaa

SEQ ID NO: 813316 - RNA, 19 nt, Homo sapiens
  misc_RNA (1)...(19): siRNA sense strand
uaagcaagcggcuggaaau

SEQ ID NO: 813317 - RNA, 19 nt, Homo sapiens
  misc_RNA (1)...(19): siRNA sense strand
ucagauaccgccuuaccaa

SEQ ID NO: 813318 - RNA, 19 nt, Homo sapiens
  misc_RNA (1)...(19): siRNA sense strand
ccaccacucucaaaagaaa

SEQ ID NO: 813319 - RNA, 19 nt, Homo sapiens
  misc_RNA (1)...(19): siRNA sense strand
ggagugauucgggaaaguu

SEQ ID NO: 813320 - RNA, 19 nt, Homo sapiens
  misc_RNA (1)...(19): siRNA sense strand
acacggaagaaauuuauug

SEQ ID NO: 813321 - RNA, 19 nt, Homo sapiens
  misc_RNA (1)...(19): siRNA sense strand
ugacagcacagacccuuug

SEQ ID NO: 813322 - RNA, 19 nt, Homo sapiens
  misc_RNA (1)...(19): siRNA sense strand
cauagagcguggcaauaca

SEQ ID NO: 813323 - RNA, 19 nt, Homo sapiens
  misc_RNA (1)...(19): siRNA sense strand
gaaugaagggaaaacauaa

SEQ ID NO: 813324 - RNA, 19 nt, Homo sapiens
  misc_RNA (1)...(19): siRNA sense strand
gcacagcucccagccaucu

SEQ ID NO: 813325 - RNA, 19 nt, Homo sapiens
  misc_RNA (1)...(19): siRNA sense strand
aaccagaaccucaucaaug

SEQ ID NO: 813326 - RNA, 19 nt, Homo sapiens
  misc_RNA (1)...(19): siRNA sense strand
gcugcuagggaccauauuu

SEQ ID NO: 813327 - RNA, 19 nt, Homo sapiens
  misc_RNA (1)...(19): siRNA sense strand
gaagggaaucaucuugaag

SEQ ID NO: 813328 - RNA, 19 nt, Homo sapiens
  misc_RNA (1)...(19): siRNA sense strand
uggcucagguuuguaagaa

SEQ ID NO: 813329 - RNA, 19 nt, Homo sapiens
  misc_RNA (1)...(19): siRNA sense strand
aagaguggcucagguuugu

SEQ ID NO: 813330 - RNA, 19 nt, Homo sapiens
  misc_RNA (1)...(19): siRNA sense strand
ggaaccagaaccucaucaa

SEQ ID NO: 813331 - RNA, 19 nt, Homo sapiens
  misc_RNA (1)...(19): siRNA sense strand
gacauagagcguggcaaua

SEQ ID NO: 813332 - RNA, 19 nt, Homo sapiens
  misc_RNA (1)...(19): siRNA sense strand
uaugcaaccuccaaugagu

SEQ ID NO: 813333 - RNA, 19 nt, Homo sapiens
  misc_RNA (1)...(19): siRNA sense strand
acacaucacacacggaaga

SEQ ID NO: 813334 - RNA, 19 nt, Homo sapiens
  misc_RNA (1)...(19): siRNA sense strand
ggagauucaaggaacagaa

SEQ ID NO: 813335 - RNA, 19 nt, Homo sapiens
  misc_RNA (1)...(19): siRNA sense strand
acacuaacuccuccaauuc

SEQ ID NO: 813336 - RNA, 19 nt, Homo sapiens
  misc_RNA (1)...(19): siRNA sense strand
ggacugcgauguguaguuu

SEQ ID NO: 813337 - RNA, 19 nt, Homo sapiens
  misc_RNA (1)...(19): siRNA sense strand
uaagugcuguucagaauuu

SEQ ID NO: 813338 - RNA, 19 nt, Homo sapiens
  misc_RNA (1)...(19): siRNA sense strand
gaaaaugccuuuguucuuu

SEQ ID NO: 813339 - RNA, 19 nt, Homo sapiens
  misc_RNA (1)...(19): siRNA sense strand
ugaagaaacugaaggagau

SEQ ID NO: 813340 - RNA, 19 nt, Homo sapiens
  misc_RNA (1)...(19): siRNA sense strand
uaacguagaauaccaagaa

SEQ ID NO: 813341 - RNA, 19 nt, Homo sapiens
  misc_RNA (1)...(19): siRNA sense strand
gaauguauuugcagaucaa

SEQ ID NO: 813342 - RNA, 19 nt, Homo sapiens
  misc_RNA (1)...(19): siRNA sense strand
aaagugaugcaaccaauua

SEQ ID NO: 813343 - RNA, 19 nt, Homo sapiens
  misc_RNA (1)...(19): siRNA sense strand
gagauugcauucccaagga

SEQ ID NO: 813344 - RNA, 19 nt, Homo sapiens
  misc_RNA (1)...(19): siRNA sense strand
aauagaaaccuguggaaua

SEQ ID NO: 813345 - RNA, 19 nt, Homo sapiens
  misc_RNA (1)...(19): siRNA sense strand
gaguagagauggagaggau

SEQ ID NO: 813346 - RNA, 19 nt, Homo sapiens
  misc_RNA (1)...(19): siRNA sense strand
gaagaaggaaauuuggaaa

SEQ ID NO: 813347 - RNA, 19 nt, Homo sapiens
  misc_RNA (1)...(19): siRNA sense strand
ggaagaaggaaauuuggaa

SEQ ID NO: 813348 - RNA, 19 nt, Homo sapiens
  misc_RNA (1)...(19): siRNA sense strand
aaggacagaugaauugaaa

SEQ ID NO: 813349 - RNA, 19 nt, Homo sapiens
  misc_RNA (1)...(19): siRNA sense strand
cagaagaucuuugccacaa

SEQ ID NO: 813350 - RNA, 19 nt, Homo sapiens
  misc_RNA (1)...(19): siRNA sense strand
ggaagcggauugcucagau

SEQ ID NO: 813351 - RNA, 19 nt, Homo sapiens
  misc_RNA (1)...(19): siRNA sense strand
gcagaaaggaagcggauug

SEQ ID NO: 813352 - RNA, 19 nt, Homo sapiens
  misc_RNA (1)...(19): siRNA sense strand
caacuggcagaaucuaaua

SEQ ID NO: 813353 - RNA, 19 nt, Homo sapiens
  misc_RNA (1)...(19): siRNA sense strand
gcguugaucuucacacuca

SEQ ID NO: 813354 - RNA, 19 nt, Homo sapiens
  misc_RNA (1)...(19): siRNA sense strand
gaggauggcgucuguguau

SEQ ID NO: 813355 - RNA, 19 nt, Homo sapiens
  misc_RNA (1)...(19): siRNA sense strand
ggaccagacuauugugaca

SEQ ID NO: 813356 - RNA, 19 nt, Homo sapiens
  misc_RNA (1)...(19): siRNA sense strand
ggauggcgucuguguauuu

SEQ ID NO: 813357 - RNA, 19 nt, Homo sapiens
  misc_RNA (1)...(19): siRNA sense strand
ggagaauguagaggaauua

SEQ ID NO: 813358 - RNA, 19 nt, Homo sapiens
  misc_RNA (1)...(19): siRNA sense strand
guggaaaacugacacauaa

SEQ ID NO: 813359 - RNA, 19 nt, Homo sapiens
  misc_RNA (1)...(19): siRNA sense strand
ccacacaccagaacaauuc

SEQ ID NO: 813360 - RNA, 19 nt, Homo sapiens
  misc_RNA (1)...(19): siRNA sense strand
gaauuuagugguugaagga

SEQ ID NO: 813361 - RNA, 19 nt, Homo sapiens
  misc_RNA (1)...(19): siRNA sense strand
gaagcggauugcucagaug

SEQ ID NO: 813362 - RNA, 19 nt, Homo sapiens
  misc_RNA (1)...(19): siRNA sense strand
ucuaagugcuguucagaau

SEQ ID NO: 813363 - RNA, 19 nt, Homo sapiens
  misc_RNA (1)...(19): siRNA sense strand
caaaugcgaagucagcaaa

SEQ ID NO: 813364 - RNA, 19 nt, Homo sapiens
  misc_RNA (1)...(19): siRNA sense strand
aagcuugguuguaauauca

SEQ ID NO: 813365 - RNA, 19 nt, Homo sapiens
  misc_RNA (1)...(19): siRNA sense strand
ggaauagaaaccuguggaa

SEQ ID NO: 813366 - RNA, 19 nt, Homo sapiens
  misc_RNA (1)...(19): siRNA sense strand
ccacaaauuucugcaacug

SEQ ID NO: 813367 - RNA, 19 nt, Homo sapiens
  misc_RNA (1)...(19): siRNA sense strand
cguagaauaccaagaauau

SEQ ID NO: 813368 - RNA, 19 nt, Homo sapiens
  misc_RNA (1)...(19): siRNA sense strand
gauggcgucuguguauuug

SEQ ID NO: 813369 - RNA, 19 nt, Homo sapiens
  misc_RNA (1)...(19): siRNA sense strand
ugagguuucugcuuguaaa

SEQ ID NO: 813370 - RNA, 19 nt, Homo sapiens
  misc_RNA (1)...(19): siRNA sense strand
gaaggacugcgauguguag

SEQ ID NO: 813371 - RNA, 19 nt, Homo sapiens
  misc_RNA (1)...(19): siRNA sense strand
gcuagaaucggagcaguuu

SEQ ID NO: 813372 - RNA, 19 nt, Homo sapiens
  misc_RNA (1)...(19): siRNA sense strand
gcaaugugcaguaccugaa

SEQ ID NO: 813373 - RNA, 19 nt, Homo sapiens
  misc_RNA (1)...(19): siRNA sense strand
gcaacuggcagaaucuaau

SEQ ID NO: 813374 - RNA, 19 nt, Homo sapiens
  misc_RNA (1)...(19): siRNA sense strand
caagaauauuugcaaagca

SEQ ID NO: 813375 - RNA, 19 nt, Homo sapiens
  misc_RNA (1)...(19): siRNA sense strand
gcagaucaaccuaauaaaa

SEQ ID NO: 813376 - RNA, 19 nt, Homo sapiens
  misc_RNA (1)...(19): siRNA sense strand
gaaaagcaggauauuauga

SEQ ID NO: 813377 - RNA, 19 nt, Homo sapiens
  misc_RNA (1)...(19): siRNA sense strand
uggagaauguagaggaauu

SEQ ID NO: 813378 - RNA, 19 nt, Homo sapiens
  misc_RNA (1)...(19): siRNA sense strand
aagaucaacucaagaagca

SEQ ID NO: 813379 - RNA, 19 nt, Homo sapiens
  misc_RNA (1)...(19): siRNA sense strand
gcuguucaguauaugcaaa

SEQ ID NO: 813380 - RNA, 19 nt, Homo sapiens
  misc_RNA (1)...(19): siRNA sense strand
cauggagaauguagaggaa

SEQ ID NO: 813381 - RNA, 19 nt, Homo sapiens
  misc_RNA (1)...(19): siRNA sense strand
gaauagaaaccuguggaau

SEQ ID NO: 813382 - RNA, 19 nt, Homo sapiens
  misc_RNA (1)...(19): siRNA sense strand
ccaucgagauuaccagcaa

SEQ ID NO: 813383 - RNA, 19 nt, Homo sapiens
  misc_RNA (1)...(19): siRNA sense strand
auagaaaccuguggaauac

SEQ ID NO: 813384 - RNA, 19 nt, Homo sapiens
  misc_RNA (1)...(19): siRNA sense strand
gaucagccuuuuacuguga

SEQ ID NO: 813385 - RNA, 19 nt, Homo sapiens
  misc_RNA (1)...(19): siRNA sense strand
caagcuugguuguaauauc

SEQ ID NO: 813386 - RNA, 19 nt, Homo sapiens
  misc_RNA (1)...(19): siRNA sense strand
uagccacucuccuccugua

SEQ ID NO: 813387 - RNA, 19 nt, Homo sapiens
  misc_RNA (1)...(19): siRNA sense strand
ccaagaauauuugcaaagc

SEQ ID NO: 813388 - RNA, 19 nt, Homo sapiens
  misc_RNA (1)...(19): siRNA sense strand
gaagaaacugaaggagauu

SEQ ID NO: 813389 - RNA, 19 nt, Homo sapiens
  misc_RNA (1)...(19): siRNA sense strand
agcaggauauuaugaagaa

SEQ ID NO: 813390 - RNA, 19 nt, Homo sapiens
  misc_RNA (1)...(19): siRNA sense strand
uugcagaucaaccuaauaa

SEQ ID NO: 813391 - RNA, 19 nt, Homo sapiens
  misc_RNA (1)...(19): siRNA sense strand
gaucuucacacucacuguu

SEQ ID NO: 813392 - RNA, 19 nt, Homo sapiens
  misc_RNA (1)...(19): siRNA sense strand
acagugagaggaauagaaa

SEQ ID NO: 813393 - RNA, 19 nt, Homo sapiens
  misc_RNA (1)...(19): siRNA sense strand
auacagauguuucccuaag

SEQ ID NO: 813394 - RNA, 19 nt, Homo sapiens
  misc_RNA (1)...(19): siRNA sense strand
cagaggccauugccauugu

SEQ ID NO: 813395 - RNA, 19 nt, Homo sapiens
  misc_RNA (1)...(19): siRNA sense strand
uagaaaagcuuccuaacca

SEQ ID NO: 813396 - RNA, 19 nt, Homo sapiens
  misc_RNA (1)...(19): siRNA sense strand
gaaaacugacacauaauga

SEQ ID NO: 813397 - RNA, 19 nt, Homo sapiens
  misc_RNA (1)...(19): siRNA sense strand
gagcgaguccgugcccuaa

SEQ ID NO: 813398 - RNA, 19 nt, Homo sapiens
  misc_RNA (1)...(19): siRNA sense strand
gaggucaaaugcgaaguca

SEQ ID NO: 813399 - RNA, 19 nt, Homo sapiens
  misc_RNA (1)...(19): siRNA sense strand
caccaucagugaagacauc

SEQ ID NO: 813400 - RNA, 19 nt, Homo sapiens
  misc_RNA (1)...(19): siRNA sense strand
cccaggcuguucaguauau

SEQ ID NO: 813401 - RNA, 19 nt, Homo sapiens
  misc_RNA (1)...(19): siRNA sense strand
ggaaaaugccuuuguucuu

SEQ ID NO: 813402 - RNA, 19 nt, Homo sapiens
  misc_RNA (1)...(19): siRNA sense strand
uaauacagugagaggaaua

SEQ ID NO: 813403 - RNA, 19 nt, Homo sapiens
  misc_RNA (1)...(19): siRNA sense strand
gaugcaaccaauuaugcua

SEQ ID NO: 813404 - RNA, 19 nt, Homo sapiens
  misc_RNA (1)...(19): siRNA sense strand
ugaauguauuugcagauca

SEQ ID NO: 813405 - RNA, 19 nt, Homo sapiens
  misc_RNA (1)...(19): siRNA sense strand
ccacgacguuacuuuaggu

SEQ ID NO: 813406 - RNA, 19 nt, Homo sapiens
  misc_RNA (1)...(19): siRNA sense strand
uuucgaagaucaacucaag

SEQ ID NO: 813407 - RNA, 19 nt, Homo sapiens
  misc_RNA (1)...(19): siRNA sense strand
auaauuguguuggaucuga

SEQ ID NO: 813408 - RNA, 19 nt, Homo sapiens
  misc_RNA (1)...(19): siRNA sense strand
caugaucuccucacucuag

SEQ ID NO: 813409 - RNA, 19 nt, Homo sapiens
  misc_RNA (1)...(19): siRNA sense strand
aacaugaucuccucacucu

SEQ ID NO: 813410 - RNA, 19 nt, Homo sapiens
  misc_RNA (1)...(19): siRNA sense strand
gagaggauggcgucugugu

SEQ ID NO: 813411 - RNA, 19 nt, Homo sapiens
  misc_RNA (1)...(19): siRNA sense strand
caauuaugcuagccacucu

SEQ ID NO: 813412 - RNA, 19 nt, Homo sapiens
  misc_RNA (1)...(19): siRNA sense strand
ucgaagaucaacucaagaa

SEQ ID NO: 813413 - RNA, 19 nt, Homo sapiens
  misc_RNA (1)...(19): siRNA sense strand
gcaggauauuaugaagaaa

SEQ ID NO: 813414 - RNA, 19 nt, Homo sapiens
  misc_RNA (1)...(19): siRNA sense strand
ggucuggaguagagaugga

SEQ ID NO: 813415 - RNA, 19 nt, Homo sapiens
  misc_RNA (1)...(19): siRNA sense strand
caaggacagaugaauugaa

SEQ ID NO: 813416 - RNA, 19 nt, Homo sapiens
  misc_RNA (1)...(19): siRNA sense strand
ugauagaggcagaaaggaa

SEQ ID NO: 813417 - RNA, 19 nt, Homo sapiens
  misc_RNA (1)...(19): siRNA sense strand
gcucaccaaagcauaaaga

SEQ ID NO: 813418 - RNA, 19 nt, Homo sapiens
  misc_RNA (1)...(19): siRNA sense strand
ccauacacaucccacucaa

SEQ ID NO: 813419 - RNA, 19 nt, Homo sapiens
  misc_RNA (1)...(19): siRNA sense strand
ggaaaacugacacauaaug

SEQ ID NO: 813420 - RNA, 19 nt, Homo sapiens
  misc_RNA (1)...(19): siRNA sense strand
cccaaggacagaugaauug

SEQ ID NO: 813421 - RNA, 19 nt, Homo sapiens
  misc_RNA (1)...(19): siRNA sense strand
aaagcaggauauuaugaag

SEQ ID NO: 813422 - RNA, 19 nt, Homo sapiens
  misc_RNA (1)...(19): siRNA sense strand
uggagaggauggcgucugu

SEQ ID NO: 813423 - RNA, 19 nt, Homo sapiens
  misc_RNA (1)...(19): siRNA sense strand
guggaauacucuguggaaa

SEQ ID NO: 813424 - RNA, 19 nt, Homo sapiens
  misc_RNA (1)...(19): siRNA sense strand
ccacucuccuccuguaaac

SEQ ID NO: 813425 - RNA, 19 nt, Homo sapiens
  misc_RNA (1)...(19): siRNA sense strand
uaaaagugaugcaaccaau

SEQ ID NO: 813426 - RNA, 19 nt, Homo sapiens
  misc_RNA (1)...(19): siRNA sense strand
ggagcgcuuuguccugcuu

SEQ ID NO: 813427 - RNA, 19 nt, Homo sapiens
  misc_RNA (1)...(19): siRNA sense strand
gcaaaccucagggcuguca

SEQ ID NO: 813428 - RNA, 19 nt, Homo sapiens
  misc_RNA (1)...(19): siRNA sense strand
aaucggagcaguuucuguu

SEQ ID NO: 813429 - RNA, 19 nt, Homo sapiens
  misc_RNA (1)...(19): siRNA sense strand
agaguuagcccgaggucaa

SEQ ID NO: 813430 - RNA, 19 nt, Homo sapiens
  misc_RNA (1)...(19): siRNA sense strand
ggaauacucuguggaaaac

SEQ ID NO: 813431 - RNA, 19 nt, Homo sapiens
  misc_RNA (1)...(19): siRNA sense strand
agaaaccuguggaauacuc

SEQ ID NO: 813432 - RNA, 19 nt, Homo sapiens
  misc_RNA (1)...(19): siRNA sense strand
ucuaauacagugagaggaa

SEQ ID NO: 813433 - RNA, 19 nt, Homo sapiens
  misc_RNA (1)...(19): siRNA sense strand
uucaguauaugcaaacaug

SEQ ID NO: 813434 - RNA, 19 nt, Homo sapiens
  misc_RNA (1)...(19): siRNA sense strand
uauucaauguucaggauca

SEQ ID NO: 813435 - RNA, 19 nt, Homo sapiens
  misc_RNA (1)...(19): siRNA sense strand
gagaauguagaggaauuau

SEQ ID NO: 813436 - RNA, 19 nt, Homo sapiens
  misc_RNA (1)...(19): siRNA sense strand
gaauuacacugaagaagua

SEQ ID NO: 813437 - RNA, 19 nt, Homo sapiens
  misc_RNA (1)...(19): siRNA sense strand
uaucaacacuccuucauua

SEQ ID NO: 813438 - RNA, 19 nt, Homo sapiens
  misc_RNA (1)...(19): siRNA sense strand
gugaagaguuugacaauaa

SEQ ID NO: 813439 - RNA, 19 nt, Homo sapiens
  misc_RNA (1)...(19): siRNA sense strand
cgaaagagaugaugauaau

SEQ ID NO: 813440 - RNA, 19 nt, Homo sapiens
  misc_RNA (1)...(19): siRNA sense strand
gaacugcucuucccgaaug

SEQ ID NO: 813441 - RNA, 19 nt, Homo sapiens
  misc_RNA (1)...(19): siRNA sense strand
gaaggaauuuacagucuuu

SEQ ID NO: 813442 - RNA, 19 nt, Homo sapiens
  misc_RNA (1)...(19): siRNA sense strand
gcacaggccuuggcuacua

SEQ ID NO: 813443 - RNA, 19 nt, Homo sapiens
  misc_RNA (1)...(19): siRNA sense strand
gaacaaaggcggaacaauc

SEQ ID NO: 813444 - RNA, 19 nt, Homo sapiens
  misc_RNA (1)...(19): siRNA sense strand
uaaaacagcuuguggcuaa

SEQ ID NO: 813445 - RNA, 19 nt, Homo sapiens
  misc_RNA (1)...(19): siRNA sense strand
ggaccacuguuugcauaua

SEQ ID NO: 813446 - RNA, 19 nt, Homo sapiens
  misc_RNA (1)...(19): siRNA sense strand
cugaagaaguagaguauuu

SEQ ID NO: 813447 - RNA, 19 nt, Homo sapiens
  misc_RNA (1)...(19): siRNA sense strand
aaaguacgcuggacugaau

SEQ ID NO: 813448 - RNA, 19 nt, Homo sapiens
  misc_RNA (1)...(19): siRNA sense strand
ggaauauucacuaauggua

SEQ ID NO: 813449 - RNA, 19 nt, Homo sapiens
  misc_RNA (1)...(19): siRNA sense strand
ggugaagaguuugacaaua

SEQ ID NO: 813450 - RNA, 19 nt, Homo sapiens
  misc_RNA (1)...(19): siRNA sense strand
guagaguauuucaaccaua

SEQ ID NO: 813451 - RNA, 19 nt, Homo sapiens
  misc_RNA (1)...(19): siRNA sense strand
gcaaugucccuguguauuc

SEQ ID NO: 813452 - RNA, 19 nt, Homo sapiens
  misc_RNA (1)...(19): siRNA sense strand
caacacuccuucauuacug

SEQ ID NO: 813453 - RNA, 19 nt, Homo sapiens
  misc_RNA (1)...(19): siRNA sense strand
uagcagaaccucaagugua

SEQ ID NO: 813454 - RNA, 19 nt, Homo sapiens
  misc_RNA (1)...(19): siRNA sense strand
gacaauaagcuuugacugu

SEQ ID NO: 813455 - RNA, 19 nt, Homo sapiens
  misc_RNA (1)...(19): siRNA sense strand
agcagaaccucaaguguaa

SEQ ID NO: 813456 - RNA, 19 nt, Homo sapiens
  misc_RNA (1)...(19): siRNA sense strand
ggauauuccuggagcuaug

SEQ ID NO: 813457 - RNA, 19 nt, Homo sapiens
  misc_RNA (1)...(19): siRNA sense strand
gaaagacagagacguggaa

SEQ ID NO: 813458 - RNA, 19 nt, Homo sapiens
  misc_RNA (1)...(19): siRNA sense strand
gaccacuguuugcauauau

SEQ ID NO: 813459 - RNA, 19 nt, Homo sapiens
  misc_RNA (1)...(19): siRNA sense strand
cguggaauauucacuaaug

SEQ ID NO: 813460 - RNA, 19 nt, Homo sapiens
  misc_RNA (1)...(19): siRNA sense strand
caggaaggguaaauuuaga

SEQ ID NO: 813461 - RNA, 19 nt, Homo sapiens
  misc_RNA (1)...(19): siRNA sense strand
auucagagauugauccaaa

SEQ ID NO: 813462 - RNA, 19 nt, Homo sapiens
  misc_RNA (1)...(19): siRNA sense strand
gaaaguacgcuggacugaa

SEQ ID NO: 813463 - RNA, 19 nt, Homo sapiens
  misc_RNA (1)...(19): siRNA sense strand
caguguagcaugaauauga

SEQ ID NO: 813464 - RNA, 19 nt, Homo sapiens
  misc_RNA (1)...(19): siRNA sense strand
aagaggacaugcgaaagua

SEQ ID NO: 813465 - RNA, 19 nt, Homo sapiens
  misc_RNA (1)...(19): siRNA sense strand
gaagaaguagaguauuuca

SEQ ID NO: 813466 - RNA, 19 nt, Homo sapiens
  misc_RNA (1)...(19): siRNA sense strand
aaggaccacuguuugcaua

SEQ ID NO: 813467 - RNA, 19 nt, Homo sapiens
  misc_RNA (1)...(19): siRNA sense strand
gacguggaauggcaaguug

SEQ ID NO: 813468 - RNA, 19 nt, Homo sapiens
  misc_RNA (1)...(19): siRNA sense strand
ccaggaguuucgauucuug

SEQ ID NO: 813469 - RNA, 19 nt, Homo sapiens
  misc_RNA (1)...(19): siRNA sense strand
gcacgaaagagaugaugau

SEQ ID NO: 813470 - RNA, 19 nt, Homo sapiens
  misc_RNA (1)...(19): siRNA sense strand
gaugauaauuccgaagaag

SEQ ID NO: 813471 - RNA, 19 nt, Homo sapiens
  misc_RNA (1)...(19): siRNA sense strand
uugcauauauccaggaguu

SEQ ID NO: 813472 - RNA, 19 nt, Homo sapiens
  misc_RNA (1)...(19): siRNA sense strand
gauauuugcugagauugag

SEQ ID NO: 813473 - RNA, 19 nt, Homo sapiens
  misc_RNA (1)...(19): siRNA sense strand
caagaggacaugcgaaagu

SEQ ID NO: 813474 - RNA, 19 nt, Homo sapiens
  misc_RNA (1)...(19): siRNA sense strand
ggcccaauauccuuaagug

SEQ ID NO: 813475 - RNA, 19 nt, Homo sapiens
  misc_RNA (1)...(19): siRNA sense strand
guauaauccgcguggaaua

SEQ ID NO: 813476 - RNA, 19 nt, Homo sapiens
  misc_RNA (1)...(19): siRNA sense strand
caaaggcggaacaaucuug

SEQ ID NO: 813477 - RNA, 19 nt, Homo sapiens
  misc_RNA (1)...(19): siRNA sense strand
cuaaugguauauguggaua

SEQ ID NO: 813478 - RNA, 19 nt, Homo sapiens
  misc_RNA (1)...(19): siRNA sense strand
ccaaacacaggccuucuau

SEQ ID NO: 813479 - RNA, 19 nt, Homo sapiens
  misc_RNA (1)...(19): siRNA sense strand
caauaagcuuugacugucu

SEQ ID NO: 813480 - RNA, 19 nt, Homo sapiens
  misc_RNA (1)...(19): siRNA sense strand
guuuaucacuuccugaaag

SEQ ID NO: 813481 - RNA, 19 nt, Homo sapiens
  misc_RNA (1)...(19): siRNA sense strand
aaacacaggccuucuaugc

SEQ ID NO: 813482 - RNA, 19 nt, Homo sapiens
  misc_RNA (1)...(19): siRNA sense strand
agaaggaauuuacagucuu

SEQ ID NO: 813483 - RNA, 19 nt, Homo sapiens
  misc_RNA (1)...(19): siRNA sense strand
auacacagaauuacacuga

SEQ ID NO: 813484 - RNA, 19 nt, Homo sapiens
  misc_RNA (1)...(19): siRNA sense strand
cuggagcuauggauuuauu

SEQ ID NO: 813485 - RNA, 19 nt, Homo sapiens
  misc_RNA (1)...(19): siRNA sense strand
ugaagaguuugacaauaag

SEQ ID NO: 813486 - RNA, 19 nt, Homo sapiens
  misc_RNA (1)...(19): siRNA sense strand
aagaaggaauuuacagucu

SEQ ID NO: 813487 - RNA, 19 nt, Homo sapiens
  misc_RNA (1)...(19): siRNA sense strand
acacagaauuacacugaag

SEQ ID NO: 813488 - RNA, 19 nt, Homo sapiens
  misc_RNA (1)...(19): siRNA sense strand
caucuuaauugggcacgaa

SEQ ID NO: 813489 - RNA, 19 nt, Homo sapiens
  misc_RNA (1)...(19): siRNA sense strand
gagugcuugugaugacuuu

SEQ ID NO: 813490 - RNA, 19 nt, Homo sapiens
  misc_RNA (1)...(19): siRNA sense strand
cagcuaugcagaaguggua

SEQ ID NO: 813491 - RNA, 19 nt, Homo sapiens
  misc_RNA (1)...(19): siRNA sense strand
uuucuuaauuugccacuug

SEQ ID NO: 813492 - RNA, 19 nt, Homo sapiens
  misc_RNA (1)...(19): siRNA sense strand
ucucaggaaggguaaauuu

SEQ ID NO: 813493 - RNA, 19 nt, Homo sapiens
  misc_RNA (1)...(19): siRNA sense strand
uuacagucuuugagcauau

SEQ ID NO: 813494 - RNA, 19 nt, Homo sapiens
  misc_RNA (1)...(19): siRNA sense strand
gaauccuuaucaucuggaa

SEQ ID NO: 813495 - RNA, 19 nt, Homo sapiens
  misc_RNA (1)...(19): siRNA sense strand
ucagucagcagaugauaga

SEQ ID NO: 813496 - RNA, 19 nt, Homo sapiens
  misc_RNA (1)...(19): siRNA sense strand
augcagaagugguaacaga

SEQ ID NO: 813497 - RNA, 19 nt, Homo sapiens
  misc_RNA (1)...(19): siRNA sense strand
cuuaucaucuggaaagaca

SEQ ID NO: 813498 - RNA, 19 nt, Homo sapiens
  misc_RNA (1)...(19): siRNA sense strand
uaauugggcacgaaagaga

SEQ ID NO: 813499 - RNA, 19 nt, Homo sapiens
  misc_RNA (1)...(19): siRNA sense strand
gcauauauccaggaguuuc

SEQ ID NO: 813500 - RNA, 19 nt, Homo sapiens
  misc_RNA (1)...(19): siRNA sense strand
uccuggagcuauggauuua

SEQ ID NO: 813501 - RNA, 19 nt, Homo sapiens
  misc_RNA (1)...(19): siRNA sense strand
uauccucgacuguaguaua

SEQ ID NO: 813502 - RNA, 19 nt, Homo sapiens
  misc_RNA (1)...(19): siRNA sense strand
uugcugagauugagaacug

SEQ ID NO: 813503 - RNA, 19 nt, Homo sapiens
  misc_RNA (1)...(19): siRNA sense strand
ucaggaaggguaaauuuag

SEQ ID NO: 813504 - RNA, 19 nt, Homo sapiens
  misc_RNA (1)...(19): siRNA sense strand
ugaugauaauuccgaagaa

SEQ ID NO: 813505 - RNA, 19 nt, Homo sapiens
  misc_RNA (1)...(19): siRNA sense strand
cugccuauacacagaauua

SEQ ID NO: 813506 - RNA, 19 nt, Homo sapiens
  misc_RNA (1)...(19): siRNA sense strand
uggcucaguuuaucacuuc

SEQ ID NO: 813507 - RNA, 19 nt, Homo sapiens
  misc_RNA (1)...(19): siRNA sense strand
agaauuacacugaagaagu

SEQ ID NO: 813508 - RNA, 19 nt, Homo sapiens
  misc_RNA (1)...(19): siRNA sense strand
gguaacagaggaacaaagg

SEQ ID NO: 813509 - RNA, 19 nt, Homo sapiens
  misc_RNA (1)...(19): siRNA sense strand
caaugucccuguguauucu

SEQ ID NO: 813510 - RNA, 19 nt, Homo sapiens
  misc_RNA (1)...(19): siRNA sense strand
ccaauacugccuauacaca

SEQ ID NO: 813511 - RNA, 19 nt, Homo sapiens
  misc_RNA (1)...(19): siRNA sense strand
ccauuccucuacauccauu

SEQ ID NO: 813512 - RNA, 19 nt, Homo sapiens
  misc_RNA (1)...(19): siRNA sense strand
gauaucaacacuccuucau

SEQ ID NO: 813513 - RNA, 19 nt, Homo sapiens
  misc_RNA (1)...(19): siRNA sense strand
gaguuugacaauaagcuuu

SEQ ID NO: 813514 - RNA, 19 nt, Homo sapiens
  misc_RNA (1)...(19): siRNA sense strand
acacugaagaaguagagua

SEQ ID NO: 813515 - RNA, 19 nt, Homo sapiens
  misc_RNA (1)...(19): siRNA sense strand
ggaauuuacagucuuugag

SEQ ID NO: 813516 - RNA, 19 nt, Homo sapiens
  misc_RNA (1)...(19): siRNA sense strand
gguagcagaaccucaagug

SEQ ID NO: 813517 - RNA, 19 nt, Homo sapiens
  misc_RNA (1)...(19): siRNA sense strand
ggagcuauggauuuauuuc

SEQ ID NO: 813518 - RNA, 19 nt, Homo sapiens
  misc_RNA (1)...(19): siRNA sense strand
auccucgacuguaguauaa

SEQ ID NO: 813519 - RNA, 19 nt, Homo sapiens
  misc_RNA (1)...(19): siRNA sense strand
aauacugccuauacacaga

SEQ ID NO: 813520 - RNA, 19 nt, Homo sapiens
  misc_RNA (1)...(19): siRNA sense strand
ccucuauccucgacuguag

SEQ ID NO: 813521 - RNA, 19 nt, Homo sapiens
  misc_RNA (1)...(19): siRNA sense strand
ccaccaguuucucccucua

SEQ ID NO: 813522 - RNA, 19 nt, Homo sapiens
  misc_RNA (1)...(19): siRNA sense strand
agacagagacguggaaugg

SEQ ID NO: 813523 - RNA, 19 nt, Homo sapiens
  misc_RNA (1)...(19): siRNA sense strand
aaaggcagccauuuaccaa

SEQ ID NO: 813524 - RNA, 19 nt, Homo sapiens
  misc_RNA (1)...(19): siRNA sense strand
uacagucuuugagcauaua

SEQ ID NO: 813525 - RNA, 19 nt, Homo sapiens
  misc_RNA (1)...(19): siRNA sense strand
gcuccaauacugccuauac

SEQ ID NO: 813526 - RNA, 19 nt, Homo sapiens
  misc_RNA (1)...(19): siRNA sense strand
uccaaauccugaucaguca

SEQ ID NO: 813527 - RNA, 19 nt, Homo sapiens
  misc_RNA (1)...(19): siRNA sense strand
cuccaccucuuuauucaga

SEQ ID NO: 813528 - RNA, 19 nt, Homo sapiens
  misc_RNA (1)...(19): siRNA sense strand
gaaggguaaauuuagaagu

SEQ ID NO: 813529 - RNA, 19 nt, Homo sapiens
  misc_RNA (1)...(19): siRNA sense strand
ccucgacuguaguauaauc

SEQ ID NO: 813530 - RNA, 19 nt, Homo sapiens
  misc_RNA (1)...(19): siRNA sense strand
acgcuggacugaaucuaga

SEQ ID NO: 813531 - RNA, 19 nt, Homo sapiens
  misc_RNA (1)...(19): siRNA sense strand
caaaggcagccauuuacca

SEQ ID NO: 813532 - RNA, 19 nt, Homo sapiens
  misc_RNA (1)...(19): siRNA sense strand
ggaaggguaaauuuagaag

SEQ ID NO: 813533 - RNA, 19 nt, Homo sapiens
  misc_RNA (1)...(19): siRNA sense strand
gaagcaccacccagcuaug

SEQ ID NO: 813534 - RNA, 19 nt, Homo sapiens
  misc_RNA (1)...(19): siRNA sense strand
gcuuugacugucuuaauga

SEQ ID NO: 813535 - RNA, 19 nt, Homo sapiens
  misc_RNA (1)...(19): siRNA sense strand
uauaauccgcguggaauau

SEQ ID NO: 813536 - RNA, 19 nt, Homo sapiens
  misc_RNA (1)...(19): siRNA sense strand
gacgguaucuucuguauga

SEQ ID NO: 813537 - RNA, 19 nt, Homo sapiens
  misc_RNA (1)...(19): siRNA sense strand
gaagggaccugggaagaga

SEQ ID NO: 813538 - RNA, 19 nt, Homo sapiens
  misc_RNA (1)...(19): siRNA sense strand
aaaggaauaugaagagcua

SEQ ID NO: 813539 - RNA, 19 nt, Homo sapiens
  misc_RNA (1)...(19): siRNA sense strand
gggaaagaauacugggaua

SEQ ID NO: 813540 - RNA, 19 nt, Homo sapiens
  misc_RNA (1)...(19): siRNA sense strand
ggaugaagaugaaggucaa

SEQ ID NO: 813541 - RNA, 19 nt, Homo sapiens
  misc_RNA (1)...(19): siRNA sense strand
ggacggaggcguugcgauu

SEQ ID NO: 813542 - RNA, 19 nt, Homo sapiens
  misc_RNA (1)...(19): siRNA sense strand
gcgcagggaugucuauauc

SEQ ID NO: 813543 - RNA, 19 nt, Homo sapiens
  misc_RNA (1)...(19): siRNA sense strand
ccacagaugccgucagaaa

SEQ ID NO: 813544 - RNA, 19 nt, Homo sapiens
  misc_RNA (1)...(19): siRNA sense strand
gaucuuccaagucucaaua

SEQ ID NO: 813545 - RNA, 19 nt, Homo sapiens
  misc_RNA (1)...(19): siRNA sense strand
caggaggacuggaugaaga

SEQ ID NO: 813546 - RNA, 19 nt, Homo sapiens
  misc_RNA (1)...(19): siRNA sense strand
ggccacagaugccgucaga

SEQ ID NO: 813547 - RNA, 19 nt, Homo sapiens
  misc_RNA (1)...(19): siRNA sense strand
cuaaacgucuccugucugu

SEQ ID NO: 813548 - RNA, 19 nt, Homo sapiens
  misc_RNA (1)...(19): siRNA sense strand
agacagagccgagaaccua

SEQ ID NO: 813549 - RNA, 19 nt, Homo sapiens
  misc_RNA (1)...(19): siRNA sense strand
ggaguccaccugagaagaa

SEQ ID NO: 813550 - RNA, 19 nt, Homo sapiens
  misc_RNA (1)...(19): siRNA sense strand
cgaccacuauggagggaaa

SEQ ID NO: 813551 - RNA, 19 nt, Homo sapiens
  misc_RNA (1)...(19): siRNA sense strand
gaagauccgcagccucaug

SEQ ID NO: 813552 - RNA, 19 nt, Homo sapiens
  misc_RNA (1)...(19): siRNA sense strand
ugaagacucugcugaagac

SEQ ID NO: 813553 - RNA, 19 nt, Homo sapiens
  misc_RNA (1)...(19): siRNA sense strand
guauugaucagcuccugua

SEQ ID NO: 813554 - RNA, 19 nt, Homo sapiens
  misc_RNA (1)...(19): siRNA sense strand
guacuacagaggaugguuu

SEQ ID NO: 813555 - RNA, 19 nt, Homo sapiens
  misc_RNA (1)...(19): siRNA sense strand
ucagaaaggaauaugaaga

SEQ ID NO: 813556 - RNA, 19 nt, Homo sapiens
  misc_RNA (1)...(19): siRNA sense strand
gacggaggcguugcgauua

SEQ ID NO: 813557 - RNA, 19 nt, Homo sapiens
  misc_RNA (1)...(19): siRNA sense strand
uuuacguccugcaaaguua

SEQ ID NO: 813558 - RNA, 19 nt, Homo sapiens
  misc_RNA (1)...(19): siRNA sense strand
gaaucuggugggcccuuua

SEQ ID NO: 813559 - RNA, 19 nt, Homo sapiens
  misc_RNA (1)...(19): siRNA sense strand
gaguccaccugagaagaaa

SEQ ID NO: 813560 - RNA, 19 nt, Homo sapiens
  misc_RNA (1)...(19): siRNA sense strand
gacaggauguacccagucu

SEQ ID NO: 813561 - RNA, 19 nt, Homo sapiens
  misc_RNA (1)...(19): siRNA sense strand
gaggaugguuuugggguua

SEQ ID NO: 813562 - RNA, 19 nt, Homo sapiens
  misc_RNA (1)...(19): siRNA sense strand
uacccgagauggugagguu

SEQ ID NO: 813563 - RNA, 19 nt, Homo sapiens
  misc_RNA (1)...(19): siRNA sense strand
cgucagaaaggaauaugaa

SEQ ID NO: 813564 - RNA, 19 nt, Homo sapiens
  misc_RNA (1)...(19): siRNA sense strand
ggaggugggagacgaguuc

SEQ ID NO: 813565 - RNA, 19 nt, Homo sapiens
  misc_RNA (1)...(19): siRNA sense strand
gcagagggguggaaagaag

SEQ ID NO: 813566 - RNA, 19 nt, Homo sapiens
  misc_RNA (1)...(19): siRNA sense strand
cggauucccuggucugagu

SEQ ID NO: 813567 - RNA, 19 nt, Homo sapiens
  misc_RNA (1)...(19): siRNA sense strand
ggacaagcacgaguacuac

SEQ ID NO: 813568 - RNA, 19 nt, Homo sapiens
  misc_RNA (1)...(19): siRNA sense strand
caucgaguaugagcaguuc

SEQ ID NO: 813569 - RNA, 19 nt, Homo sapiens
  misc_RNA (1)...(19): siRNA sense strand
gagccgagaaccuacuuca

SEQ ID NO: 813570 - RNA, 19 nt, Homo sapiens
  misc_RNA (1)...(19): siRNA sense strand
cagaaaggaauaugaagag

SEQ ID NO: 813571 - RNA, 19 nt, Homo sapiens
  misc_RNA (1)...(19): siRNA sense strand
ggaaagaauacugggauac

SEQ ID NO: 813572 - RNA, 19 nt, Homo sapiens
  misc_RNA (1)...(19): siRNA sense strand
cagaugccgucagaaagga

SEQ ID NO: 813573 - RNA, 19 nt, Homo sapiens
  misc_RNA (1)...(19): siRNA sense strand
gcaguucaucgcagaaucu

SEQ ID NO: 813574 - RNA, 19 nt, Homo sapiens
  misc_RNA (1)...(19): siRNA sense strand
caagcacgaguacuacaga

SEQ ID NO: 813575 - RNA, 19 nt, Homo sapiens
  misc_RNA (1)...(19): siRNA sense strand
gaggacuggaugaagauga

SEQ ID NO: 813576 - RNA, 19 nt, Homo sapiens
  misc_RNA (1)...(19): siRNA sense strand
aggacaagcacgaguacua

SEQ ID NO: 813577 - RNA, 19 nt, Homo sapiens
  misc_RNA (1)...(19): siRNA sense strand
ggaggcguugcgauuauug

SEQ ID NO: 813578 - RNA, 19 nt, Homo sapiens
  misc_RNA (1)...(19): siRNA sense strand
aggacuggaugaagaugaa

SEQ ID NO: 813579 - RNA, 19 nt, Homo sapiens
  misc_RNA (1)...(19): siRNA sense strand
uugaucagcuccuguacuc

SEQ ID NO: 813580 - RNA, 19 nt, Homo sapiens
  misc_RNA (1)...(19): siRNA sense strand
cggaggcguugcgauuauu

SEQ ID NO: 813581 - RNA, 19 nt, Homo sapiens
  misc_RNA (1)...(19): siRNA sense strand
gaaagaauacugggauacc

SEQ ID NO: 813582 - RNA, 19 nt, Homo sapiens
  misc_RNA (1)...(19): siRNA sense strand
ccgagauggugagguuuga

SEQ ID NO: 813583 - RNA, 19 nt, Homo sapiens
  misc_RNA (1)...(19): siRNA sense strand
cuggugggcccuuuauuga

SEQ ID NO: 813584 - RNA, 19 nt, Homo sapiens
  misc_RNA (1)...(19): siRNA sense strand
acggaggcguugcgauuau

SEQ ID NO: 813585 - RNA, 19 nt, Homo sapiens
  misc_RNA (1)...(19): siRNA sense strand
ucuggugggcccuuuauug

SEQ ID NO: 813586 - RNA, 19 nt, Homo sapiens
  misc_RNA (1)...(19): siRNA sense strand
guuuacguccugcaaaguu

SEQ ID NO: 813587 - RNA, 19 nt, Homo sapiens
  misc_RNA (1)...(19): siRNA sense strand
gagcaguucaucgcagaau

SEQ ID NO: 813588 - RNA, 19 nt, Homo sapiens
  misc_RNA (1)...(19): siRNA sense strand
ccugaagacucugcugaag

SEQ ID NO: 813589 - RNA, 19 nt, Homo sapiens
  misc_RNA (1)...(19): siRNA sense strand
gcccuuuauugaccagguu

SEQ ID NO: 813590 - RNA, 19 nt, Homo sapiens
  misc_RNA (1)...(19): siRNA sense strand
acuauggagggaaagaaua

SEQ ID NO: 813591 - RNA, 19 nt, Homo sapiens
  misc_RNA (1)...(19): siRNA sense strand
aaucgccucucuccugaag

SEQ ID NO: 813592 - RNA, 19 nt, Homo sapiens
  misc_RNA (1)...(19): siRNA sense strand
agaaucuggugggcccuuu

SEQ ID NO: 813593 - RNA, 19 nt, Homo sapiens
  misc_RNA (1)...(19): siRNA sense strand
aagauccgcagccucauga

SEQ ID NO: 813594 - RNA, 19 nt, Homo sapiens
  misc_RNA (1)...(19): siRNA sense strand
gucuaaacgucuccugucu

SEQ ID NO: 813595 - RNA, 19 nt, Homo sapiens
  misc_RNA (1)...(19): siRNA sense strand
gacgguaucuucuguauga

SEQ ID NO: 813596 - RNA, 19 nt, Homo sapiens
  misc_RNA (1)...(19): siRNA sense strand
gaagggaccugggaagaga

SEQ ID NO: 813597 - RNA, 19 nt, Homo sapiens
  misc_RNA (1)...(19): siRNA sense strand
aaaggaauaugaagagcua

SEQ ID NO: 813598 - RNA, 19 nt, Homo sapiens
  misc_RNA (1)...(19): siRNA sense strand
gggaaagaauacugggaua

SEQ ID NO: 813599 - RNA, 19 nt, Homo sapiens
  misc_RNA (1)...(19): siRNA sense strand
ggaugaagaugaaggucaa

SEQ ID NO: 813600 - RNA, 19 nt, Homo sapiens
  misc_RNA (1)...(19): siRNA sense strand
ggacggaggcguugcgauu

SEQ ID NO: 813601 - RNA, 19 nt, Homo sapiens
  misc_RNA (1)...(19): siRNA sense strand
gcgcagggaugucuauauc

SEQ ID NO: 813602 - RNA, 19 nt, Homo sapiens
  misc_RNA (1)...(19): siRNA sense strand
ccacagaugccgucagaaa

SEQ ID NO: 813603 - RNA, 19 nt, Homo sapiens
  misc_RNA (1)...(19): siRNA sense strand
gaucuuccaagucucaaua

SEQ ID NO: 813604 - RNA, 19 nt, Homo sapiens
  misc_RNA (1)...(19): siRNA sense strand
caggaggacuggaugaaga

SEQ ID NO: 813605 - RNA, 19 nt, Homo sapiens
  misc_RNA (1)...(19): siRNA sense strand
ggccacagaugccgucaga

SEQ ID NO: 813606 - RNA, 19 nt, Homo sapiens
  misc_RNA (1)...(19): siRNA sense strand
cuaaacgucuccugucugu

SEQ ID NO: 813607 - RNA, 19 nt, Homo sapiens
  misc_RNA (1)...(19): siRNA sense strand
agacagagccgagaaccua

SEQ ID NO: 813608 - RNA, 19 nt, Homo sapiens
  misc_RNA (1)...(19): siRNA sense strand
ggaguccaccugagaagaa

SEQ ID NO: 813609 - RNA, 19 nt, Homo sapiens
  misc_RNA (1)...(19): siRNA sense strand
cgaccacuauggagggaaa

SEQ ID NO: 813610 - RNA, 19 nt, Homo sapiens
  misc_RNA (1)...(19): siRNA sense strand
gaagauccgcagccucaug

SEQ ID NO: 813611 - RNA, 19 nt, Homo sapiens
  misc_RNA (1)...(19): siRNA sense strand
ugaagacucugcugaagac

SEQ ID NO: 813612 - RNA, 19 nt, Homo sapiens
  misc_RNA (1)...(19): siRNA sense strand
guauugaucagcuccugua

SEQ ID NO: 813613 - RNA, 19 nt, Homo sapiens
  misc_RNA (1)...(19): siRNA sense strand
guacuacagaggaugguuu

SEQ ID NO: 813614 - RNA, 19 nt, Homo sapiens
  misc_RNA (1)...(19): siRNA sense strand
ucagaaaggaauaugaaga

SEQ ID NO: 813615 - RNA, 19 nt, Homo sapiens
  misc_RNA (1)...(19): siRNA sense strand
gacggaggcguugcgauua

SEQ ID NO: 813616 - RNA, 19 nt, Homo sapiens
  misc_RNA (1)...(19): siRNA sense strand
uuuacguccugcaaaguua

SEQ ID NO: 813617 - RNA, 19 nt, Homo sapiens
  misc_RNA (1)...(19): siRNA sense strand
gaaucuggugggcccuuua

SEQ ID NO: 813618 - RNA, 19 nt, Homo sapiens
  misc_RNA (1)...(19): siRNA sense strand
gaguccaccugagaagaaa

SEQ ID NO: 813619 - RNA, 19 nt, Homo sapiens
  misc_RNA (1)...(19): siRNA sense strand
gacaggauguacccagucu

SEQ ID NO: 813620 - RNA, 19 nt, Homo sapiens
  misc_RNA (1)...(19): siRNA sense strand
gaggaugguuuugggguua

SEQ ID NO: 813621 - RNA, 19 nt, Homo sapiens
  misc_RNA (1)...(19): siRNA sense strand
uacccgagauggugagguu

SEQ ID NO: 813622 - RNA, 19 nt, Homo sapiens
  misc_RNA (1)...(19): siRNA sense strand
cgucagaaaggaauaugaa

SEQ ID NO: 813623 - RNA, 19 nt, Homo sapiens
  misc_RNA (1)...(19): siRNA sense strand
ggaggugggagacgaguuc

SEQ ID NO: 813624 - RNA, 19 nt, Homo sapiens
  misc_RNA (1)...(19): siRNA sense strand
gcagagggguggaaagaag

SEQ ID NO: 813625 - RNA, 19 nt, Homo sapiens
  misc_RNA (1)...(19): siRNA sense strand
cggauucccuggucugagu

SEQ ID NO: 813626 - RNA, 19 nt, Homo sapiens
  misc_RNA (1)...(19): siRNA sense strand
ggacaagcacgaguacuac

SEQ ID NO: 813627 - RNA, 19 nt, Homo sapiens
  misc_RNA (1)...(19): siRNA sense strand
caucgaguaugagcaguuc

SEQ ID NO: 813628 - RNA, 19 nt, Homo sapiens
  misc_RNA (1)...(19): siRNA sense strand
gagccgagaaccuacuuca

SEQ ID NO: 813629 - RNA, 19 nt, Homo sapiens
  misc_RNA (1)...(19): siRNA sense strand
cagaaaggaauaugaagag

SEQ ID NO: 813630 - RNA, 19 nt, Homo sapiens
  misc_RNA (1)...(19): siRNA sense strand
ggaaagaauacugggauac

SEQ ID NO: 813631 - RNA, 19 nt, Homo sapiens
  misc_RNA (1)...(19): siRNA sense strand
cagaugccgucagaaagga

SEQ ID NO: 813632 - RNA, 19 nt, Homo sapiens
  misc_RNA (1)...(19): siRNA sense strand
gcaguucaucgcagaaucu

SEQ ID NO: 813633 - RNA, 19 nt, Homo sapiens
  misc_RNA (1)...(19): siRNA sense strand
caagcacgaguacuacaga

SEQ ID NO: 813634 - RNA, 19 nt, Homo sapiens
  misc_RNA (1)...(19): siRNA sense strand
gaggacuggaugaagauga

SEQ ID NO: 813635 - RNA, 19 nt, Homo sapiens
  misc_RNA (1)...(19): siRNA sense strand
aggacaagcacgaguacua

SEQ ID NO: 813636 - RNA, 19 nt, Homo sapiens
  misc_RNA (1)...(19): siRNA sense strand
ggaggcguugcgauuauug

SEQ ID NO: 813637 - RNA, 19 nt, Homo sapiens
  misc_RNA (1)...(19): siRNA sense strand
aggacuggaugaagaugaa

SEQ ID NO: 813638 - RNA, 19 nt, Homo sapiens
  misc_RNA (1)...(19): siRNA sense strand
uugaucagcuccuguacuc

SEQ ID NO: 813639 - RNA, 19 nt, Homo sapiens
  misc_RNA (1)...(19): siRNA sense strand
cggaggcguugcgauuauu

SEQ ID NO: 813640 - RNA, 19 nt, Homo sapiens
  misc_RNA (1)...(19): siRNA sense strand
gaaagaauacugggauacc

SEQ ID NO: 813641 - RNA, 19 nt, Homo sapiens
  misc_RNA (1)...(19): siRNA sense strand
ccgagauggugagguuuga

SEQ ID NO: 813642 - RNA, 19 nt, Homo sapiens
  misc_RNA (1)...(19): siRNA sense strand
cuggugggcccuuuauuga

SEQ ID NO: 813643 - RNA, 19 nt, Homo sapiens
  misc_RNA (1)...(19): siRNA sense strand
acggaggcguugcgauuau

SEQ ID NO: 813644 - RNA, 19 nt, Homo sapiens
  misc_RNA (1)...(19): siRNA sense strand
ucuggugggcccuuuauug

SEQ ID NO: 813645 - RNA, 19 nt, Homo sapiens
  misc_RNA (1)...(19): siRNA sense strand
guuuacguccugcaaaguu

SEQ ID NO: 813646 - RNA, 19 nt, Homo sapiens
  misc_RNA (1)...(19): siRNA sense strand
gagcaguucaucgcagaau

SEQ ID NO: 813647 - RNA, 19 nt, Homo sapiens
  misc_RNA (1)...(19): siRNA sense strand
ccugaagacucugcugaag

SEQ ID NO: 813648 - RNA, 19 nt, Homo sapiens
  misc_RNA (1)...(19): siRNA sense strand
gcccuuuauugaccagguu

SEQ ID NO: 813649 - RNA, 19 nt, Homo sapiens
  misc_RNA (1)...(19): siRNA sense strand
acuauggagggaaagaaua

SEQ ID NO: 813650 - RNA, 19 nt, Homo sapiens
  misc_RNA (1)...(19): siRNA sense strand
aaucgccucucuccugaag

SEQ ID NO: 813651 - RNA, 19 nt, Homo sapiens
  misc_RNA (1)...(19): siRNA sense strand
agaaucuggugggcccuuu

SEQ ID NO: 813652 - RNA, 19 nt, Homo sapiens
  misc_RNA (1)...(19): siRNA sense strand
aagauccgcagccucauga

SEQ ID NO: 813653 - RNA, 19 nt, Homo sapiens
  misc_RNA (1)...(19): siRNA sense strand
gucuaaacgucuccugucu

SEQ ID NO: 813654 - RNA, 19 nt, Homo sapiens
  misc_RNA (1)...(19): siRNA sense strand
gacgguaucuucuguauga

SEQ ID NO: 813655 - RNA, 19 nt, Homo sapiens
  misc_RNA (1)...(19): siRNA sense strand
gaagggaccugggaagaga

SEQ ID NO: 813656 - RNA, 19 nt, Homo sapiens
  misc_RNA (1)...(19): siRNA sense strand
gcaccucagucucaacauu

SEQ ID NO: 813657 - RNA, 19 nt, Homo sapiens
  misc_RNA (1)...(19): siRNA sense strand
aaaggaauaugaagagcua

SEQ ID NO: 813658 - RNA, 19 nt, Homo sapiens
  misc_RNA (1)...(19): siRNA sense strand
gggaaagaauacugggaua

SEQ ID NO: 813659 - RNA, 19 nt, Homo sapiens
  misc_RNA (1)...(19): siRNA sense strand
ggaugaagaugaaggucaa

SEQ ID NO: 813660 - RNA, 19 nt, Homo sapiens
  misc_RNA (1)...(19): siRNA sense strand
ggacggaggcguugcgauu

SEQ ID NO: 813661 - RNA, 19 nt, Homo sapiens
  misc_RNA (1)...(19): siRNA sense strand
gcgcagggaugucuauauc

SEQ ID NO: 813662 - RNA, 19 nt, Homo sapiens
  misc_RNA (1)...(19): siRNA sense strand
ccacagaugccgucagaaa

SEQ ID NO: 813663 - RNA, 19 nt, Homo sapiens
  misc_RNA (1)...(19): siRNA sense strand
gaucuuccaagucucaaua

SEQ ID NO: 813664 - RNA, 19 nt, Homo sapiens
  misc_RNA (1)...(19): siRNA sense strand
caggaggacuggaugaaga

SEQ ID NO: 813665 - RNA, 19 nt, Homo sapiens
  misc_RNA (1)...(19): siRNA sense strand
ggccacagaugccgucaga

SEQ ID NO: 813666 - RNA, 19 nt, Homo sapiens
  misc_RNA (1)...(19): siRNA sense strand
cuaaacgucuccugucugu

SEQ ID NO: 813667 - RNA, 19 nt, Homo sapiens
  misc_RNA (1)...(19): siRNA sense strand
agacagagccgagaaccua

SEQ ID NO: 813668 - RNA, 19 nt, Homo sapiens
  misc_RNA (1)...(19): siRNA sense strand
ggaguccaccugagaagaa

SEQ ID NO: 813669 - RNA, 19 nt, Homo sapiens
  misc_RNA (1)...(19): siRNA sense strand
cgaccacuauggagggaaa

SEQ ID NO: 813670 - RNA, 19 nt, Homo sapiens
  misc_RNA (1)...(19): siRNA sense strand
gaagauccgcagccucaug

SEQ ID NO: 813671 - RNA, 19 nt, Homo sapiens
  misc_RNA (1)...(19): siRNA sense strand
ugaagacucugcugaagac

SEQ ID NO: 813672 - RNA, 19 nt, Homo sapiens
  misc_RNA (1)...(19): siRNA sense strand
guauugaucagcuccugua

SEQ ID NO: 813673 - RNA, 19 nt, Homo sapiens
  misc_RNA (1)...(19): siRNA sense strand
guacuacagaggaugguuu

SEQ ID NO: 813674 - RNA, 19 nt, Homo sapiens
  misc_RNA (1)...(19): siRNA sense strand
ucagaaaggaauaugaaga

SEQ ID NO: 813675 - RNA, 19 nt, Homo sapiens
  misc_RNA (1)...(19): siRNA sense strand
gacggaggcguugcgauua

SEQ ID NO: 813676 - RNA, 19 nt, Homo sapiens
  misc_RNA (1)...(19): siRNA sense strand
uuuacguccugcaaaguua

SEQ ID NO: 813677 - RNA, 19 nt, Homo sapiens
  misc_RNA (1)...(19): siRNA sense strand
gaaucuggugggcccuuua

SEQ ID NO: 813678 - RNA, 19 nt, Homo sapiens
  misc_RNA (1)...(19): siRNA sense strand
gaguccaccugagaagaaa

SEQ ID NO: 813679 - RNA, 19 nt, Homo sapiens
  misc_RNA (1)...(19): siRNA sense strand
gacaggauguacccagucu

SEQ ID NO: 813680 - RNA, 19 nt, Homo sapiens
  misc_RNA (1)...(19): siRNA sense strand
gaggaugguuuugggguua

SEQ ID NO: 813681 - RNA, 19 nt, Homo sapiens
  misc_RNA (1)...(19): siRNA sense strand
uacccgagauggugagguu

SEQ ID NO: 813682 - RNA, 19 nt, Homo sapiens
  misc_RNA (1)...(19): siRNA sense strand
cgucagaaaggaauaugaa

SEQ ID NO: 813683 - RNA, 19 nt, Homo sapiens
  misc_RNA (1)...(19): siRNA sense strand
ggaggugggagacgaguuc

SEQ ID NO: 813684 - RNA, 19 nt, Homo sapiens
  misc_RNA (1)...(19): siRNA sense strand
gcagagggguggaaagaag

SEQ ID NO: 813685 - RNA, 19 nt, Homo sapiens
  misc_RNA (1)...(19): siRNA sense strand
cggauucccuggucugagu

SEQ ID NO: 813686 - RNA, 19 nt, Homo sapiens
  misc_RNA (1)...(19): siRNA sense strand
caccucagucucaacauuu

SEQ ID NO: 813687 - RNA, 19 nt, Homo sapiens
  misc_RNA (1)...(19): siRNA sense strand
ggacaagcacgaguacuac

SEQ ID NO: 813688 - RNA, 19 nt, Homo sapiens
  misc_RNA (1)...(19): siRNA sense strand
caucgaguaugagcaguuc

SEQ ID NO: 813689 - RNA, 19 nt, Homo sapiens
  misc_RNA (1)...(19): siRNA sense strand
gagccgagaaccuacuuca

SEQ ID NO: 813690 - RNA, 19 nt, Homo sapiens
  misc_RNA (1)...(19): siRNA sense strand
caacccacccacuggaaga

SEQ ID NO: 813691 - RNA, 19 nt, Homo sapiens
  misc_RNA (1)...(19): siRNA sense strand
cagaaaggaauaugaagag

SEQ ID NO: 813692 - RNA, 19 nt, Homo sapiens
  misc_RNA (1)...(19): siRNA sense strand
ggaaagaauacugggauac

SEQ ID NO: 813693 - RNA, 19 nt, Homo sapiens
  misc_RNA (1)...(19): siRNA sense strand
cagaugccgucagaaagga

SEQ ID NO: 813694 - RNA, 19 nt, Homo sapiens
  misc_RNA (1)...(19): siRNA sense strand
gcaguucaucgcagaaucu

SEQ ID NO: 813695 - RNA, 19 nt, Homo sapiens
  misc_RNA (1)...(19): siRNA sense strand
acuggaagaucaccuacug

SEQ ID NO: 813696 - RNA, 19 nt, Homo sapiens
  misc_RNA (1)...(19): siRNA sense strand
ggauucaugaggaaagaga

SEQ ID NO: 813697 - RNA, 19 nt, Homo sapiens
  misc_RNA (1)...(19): siRNA sense strand
caagcacgaguacuacaga

SEQ ID NO: 813698 - RNA, 19 nt, Homo sapiens
  misc_RNA (1)...(19): siRNA sense strand
gaggacuggaugaagauga

SEQ ID NO: 813699 - RNA, 19 nt, Homo sapiens
  misc_RNA (1)...(19): siRNA sense strand
aggacaagcacgaguacua

SEQ ID NO: 813700 - RNA, 19 nt, Homo sapiens
  misc_RNA (1)...(19): siRNA sense strand
agagaaggcgugugagcaa

SEQ ID NO: 813701 - RNA, 19 nt, Homo sapiens
  misc_RNA (1)...(19): siRNA sense strand
ggaggcguugcgauuauug

SEQ ID NO: 813702 - RNA, 19 nt, Homo sapiens
  misc_RNA (1)...(19): siRNA sense strand
aggacuggaugaagaugaa

SEQ ID NO: 813703 - RNA, 19 nt, Homo sapiens
  misc_RNA (1)...(19): siRNA sense strand
uugaucagcuccuguacuc

SEQ ID NO: 813704 - RNA, 19 nt, Homo sapiens
  misc_RNA (1)...(19): siRNA sense strand
ccaagacgacguacaacag

SEQ ID NO: 813705 - RNA, 19 nt, Homo sapiens
  misc_RNA (1)...(19): siRNA sense strand
cggaggcguugcgauuauu

SEQ ID NO: 813706 - RNA, 19 nt, Homo sapiens
  misc_RNA (1)...(19): siRNA sense strand
gaaagaauacugggauacc

SEQ ID NO: 813707 - RNA, 19 nt, Homo sapiens
  misc_RNA (1)...(19): siRNA sense strand
ccgagauggugagguuuga

SEQ ID NO: 813708 - RNA, 19 nt, Homo sapiens
  misc_RNA (1)...(19): siRNA sense strand
cuggugggcccuuuauuga

SEQ ID NO: 813709 - RNA, 19 nt, Homo sapiens
  misc_RNA (1)...(19): siRNA sense strand
acggaggcguugcgauuau

SEQ ID NO: 813710 - RNA, 19 nt, Homo sapiens
  misc_RNA (1)...(19): siRNA sense strand
ucuggugggcccuuuauug

SEQ ID NO: 813711 - RNA, 19 nt, Homo sapiens
  misc_RNA (1)...(19): siRNA sense strand
guuuacguccugcaaaguu

SEQ ID NO: 813712 - RNA, 19 nt, Homo sapiens
  misc_RNA (1)...(19): siRNA sense strand
gcccuuuauugaccagguu

SEQ ID NO: 813713 - RNA, 19 nt, Homo sapiens
  misc_RNA (1)...(19): siRNA sense strand
ccugaagacucugcugaag

SEQ ID NO: 813714 - RNA, 19 nt, Homo sapiens
  misc_RNA (1)...(19): siRNA sense strand
gagcaguucaucgcagaau

SEQ ID NO: 813715 - RNA, 19 nt, Homo sapiens
  misc_RNA (1)...(19): siRNA sense strand
acuauggagggaaagaaua

SEQ ID NO: 813716 - RNA, 19 nt, Homo sapiens
  misc_RNA (1)...(19): siRNA sense strand
aaucgccucucuccugaag

SEQ ID NO: 813717 - RNA, 19 nt, Homo sapiens
  misc_RNA (1)...(19): siRNA sense strand
agaaucuggugggcccuuu

SEQ ID NO: 813718 - RNA, 19 nt, Homo sapiens
  misc_RNA (1)...(19): siRNA sense strand
aagauccgcagccucauga

SEQ ID NO: 813719 - RNA, 19 nt, Homo sapiens
  misc_RNA (1)...(19): siRNA sense strand
gucuaaacgucuccugucu

SEQ ID NO: 813720 - RNA, 19 nt, Homo sapiens
  misc_RNA (1)...(19): siRNA sense strand
gcacgguggugguggauua

SEQ ID NO: 813721 - RNA, 19 nt, Homo sapiens
  misc_RNA (1)...(19): siRNA sense strand
gcacagguaccuccucuuu

SEQ ID NO: 813722 - RNA, 19 nt, Homo sapiens
  misc_RNA (1)...(19): siRNA sense strand
acagguaccuccucuuuau

SEQ ID NO: 813723 - RNA, 19 nt, Homo sapiens
  misc_RNA (1)...(19): siRNA sense strand
guccacagcuuaucacuuc

SEQ ID NO: 813724 - RNA, 19 nt, Homo sapiens
  misc_RNA (1)...(19): siRNA sense strand
gcaagaccguggugucaca

SEQ ID NO: 813725 - RNA, 19 nt, Homo sapiens
  misc_RNA (1)...(19): siRNA sense strand
gcaacgugcuggaccacuu

SEQ ID NO: 813726 - RNA, 19 nt, Homo sapiens
  misc_RNA (1)...(19): siRNA sense strand
cagagagccugaagaagga

SEQ ID NO: 813727 - RNA, 19 nt, Homo sapiens
  misc_RNA (1)...(19): siRNA sense strand
gagaaagggccauauucaa

SEQ ID NO: 813728 - RNA, 19 nt, Homo sapiens
  misc_RNA (1)...(19): siRNA sense strand
agaccaagaugcagauguu

SEQ ID NO: 813729 - RNA, 19 nt, Homo sapiens
  misc_RNA (1)...(19): siRNA sense strand
gaagaagggcuuggagaug

SEQ ID NO: 813730 - RNA, 19 nt, Homo sapiens
  misc_RNA (1)...(19): siRNA sense strand
ugaaucaguccacagcuua

SEQ ID NO: 813731 - RNA, 19 nt, Homo sapiens
  misc_RNA (1)...(19): siRNA sense strand
ggaagaagggcuuggagau

SEQ ID NO: 813732 - RNA, 19 nt, Homo sapiens
  misc_RNA (1)...(19): siRNA sense strand
ggaacaacaucuucuucag

SEQ ID NO: 813733 - RNA, 19 nt, Homo sapiens
  misc_RNA (1)...(19): siRNA sense strand
ccucgaggcugggcuauga

SEQ ID NO: 813734 - RNA, 19 nt, Homo sapiens
  misc_RNA (1)...(19): siRNA sense strand
cgagaaagggccauauuca

SEQ ID NO: 813735 - RNA, 19 nt, Homo sapiens
  misc_RNA (1)...(19): siRNA sense strand
ccaaggagcggaauaagag

SEQ ID NO: 813736 - RNA, 19 nt, Homo sapiens
  misc_RNA (1)...(19): siRNA sense strand
cagcaccgccuucgacauu

SEQ ID NO: 813737 - RNA, 19 nt, Homo sapiens
  misc_RNA (1)...(19): siRNA sense strand
gcacaccacccgaguacau

SEQ ID NO: 813738 - RNA, 19 nt, Homo sapiens
  misc_RNA (1)...(19): siRNA sense strand
gcccagagagccugaagaa

SEQ ID NO: 813739 - RNA, 19 nt, Homo sapiens
  misc_RNA (1)...(19): siRNA sense strand
ccuaagccauucccuagug

SEQ ID NO: 813740 - RNA, 19 nt, Homo sapiens
  misc_RNA (1)...(19): siRNA sense strand
ccgacgagcuggucuccaa

SEQ ID NO: 813741 - RNA, 19 nt, Homo sapiens
  misc_RNA (1)...(19): siRNA sense strand
ucgcugugcugcagaagaa

SEQ ID NO: 813742 - RNA, 19 nt, Homo sapiens
  misc_RNA (1)...(19): siRNA sense strand
ggaagucauugucauucag

SEQ ID NO: 813743 - RNA, 19 nt, Homo sapiens
  misc_RNA (1)...(19): siRNA sense strand
ucauguaccuguuugugau

SEQ ID NO: 813744 - RNA, 19 nt, Homo sapiens
  misc_RNA (1)...(19): siRNA sense strand
gaccucauguaccuguuug

SEQ ID NO: 813745 - RNA, 19 nt, Homo sapiens
  misc_RNA (1)...(19): siRNA sense strand
ugaauggcguccgcacgua

SEQ ID NO: 813746 - RNA, 19 nt, Homo sapiens
  misc_RNA (1)...(19): siRNA sense strand
ggaccucauguaccuguuu

SEQ ID NO: 813747 - RNA, 19 nt, Homo sapiens
  misc_RNA (1)...(19): siRNA sense strand
ggagcugccucgcaagaac

SEQ ID NO: 813748 - RNA, 19 nt, Homo sapiens
  misc_RNA (1)...(19): siRNA sense strand
ccaggaagucauugucauu

SEQ ID NO: 813749 - RNA, 19 nt, Homo sapiens
  misc_RNA (1)...(19): siRNA sense strand
cuucaauccugacaucuuc

SEQ ID NO: 813750 - RNA, 19 nt, Homo sapiens
  misc_RNA (1)...(19): siRNA sense strand
gacacgggcuuuucuguga

SEQ ID NO: 813751 - RNA, 19 nt, Homo sapiens
  misc_RNA (1)...(19): siRNA sense strand
gacaggaggcgggaaguga

SEQ ID NO: 813752 - RNA, 19 nt, Homo sapiens
  misc_RNA (1)...(19): siRNA sense strand
agaaagggccauauucaag

SEQ ID NO: 813753 - RNA, 19 nt, Homo sapiens
  misc_RNA (1)...(19): siRNA sense strand
ccagcuggaccacgucuuu

SEQ ID NO: 813754 - RNA, 19 nt, Homo sapiens
  misc_RNA (1)...(19): siRNA sense strand
gguaccuccucuuuaugaa

SEQ ID NO: 813755 - RNA, 19 nt, Homo sapiens
  misc_RNA (1)...(19): siRNA sense strand
ggagauggugcaggagauu

SEQ ID NO: 813756 - RNA, 19 nt, Homo sapiens
  misc_RNA (1)...(19): siRNA sense strand
cacagguaccuccucuuua

SEQ ID NO: 813757 - RNA, 19 nt, Homo sapiens
  misc_RNA (1)...(19): siRNA sense strand
cagaucagcccgaccuuca

SEQ ID NO: 813758 - RNA, 19 nt, Homo sapiens
  misc_RNA (1)...(19): siRNA sense strand
gaaucaguccacagcuuau

SEQ ID NO: 813759 - RNA, 19 nt, Homo sapiens
  misc_RNA (1)...(19): siRNA sense strand
gcuggaccacgucuuuaaa

SEQ ID NO: 813760 - RNA, 19 nt, Homo sapiens
  misc_RNA (1)...(19): siRNA sense strand
gcgaggagaccaagaugca

SEQ ID NO: 813761 - RNA, 19 nt, Homo sapiens
  misc_RNA (1)...(19): siRNA sense strand
ggagcugccugaggaaugc

SEQ ID NO: 813762 - RNA, 19 nt, Homo sapiens
  misc_RNA (1)...(19): siRNA sense strand
gccaggaagucauugucau

SEQ ID NO: 813763 - RNA, 19 nt, Homo sapiens
  misc_RNA (1)...(19): siRNA sense strand
cagcuggaccacgucuuua

SEQ ID NO: 813764 - RNA, 19 nt, Homo sapiens
  misc_RNA (1)...(19): siRNA sense strand
gaucagcccgaccuucaag

SEQ ID NO: 813765 - RNA, 19 nt, Homo sapiens
  misc_RNA (1)...(19): siRNA sense strand
uccgagaccugcucaagag

SEQ ID NO: 813766 - RNA, 19 nt, Homo sapiens
  misc_RNA (1)...(19): siRNA sense strand
aaagggccauauucaaggu

SEQ ID NO: 813767 - RNA, 19 nt, Homo sapiens
  misc_RNA (1)...(19): siRNA sense strand
agaagggcuuggagaugga

SEQ ID NO: 813768 - RNA, 19 nt, Homo sapiens
  misc_RNA (1)...(19): siRNA sense strand
aggaagucauugucauuca

SEQ ID NO: 813769 - RNA, 19 nt, Homo sapiens
  misc_RNA (1)...(19): siRNA sense strand
gagcacauuccuggacaga

SEQ ID NO: 813770 - RNA, 19 nt, Homo sapiens
  misc_RNA (1)...(19): siRNA sense strand
ccgagaaagggccauauuc

SEQ ID NO: 813771 - RNA, 19 nt, Homo sapiens
  misc_RNA (1)...(19): siRNA sense strand
ucgcuucaauccugacauc

SEQ ID NO: 813772 - RNA, 19 nt, Homo sapiens
  misc_RNA (1)...(19): siRNA sense strand
gcaccgccuucgacauucg

SEQ ID NO: 813773 - RNA, 19 nt, Homo sapiens
  misc_RNA (1)...(19): siRNA sense strand
cgagugcaagggcaucauu

SEQ ID NO: 813774 - RNA, 19 nt, Homo sapiens
  misc_RNA (1)...(19): siRNA sense strand
ccacagcuuaucacuucaa

SEQ ID NO: 813775 - RNA, 19 nt, Homo sapiens
  misc_RNA (1)...(19): siRNA sense strand
ugagaccaccggccaggaa

SEQ ID NO: 813776 - RNA, 19 nt, Homo sapiens
  misc_RNA (1)...(19): siRNA sense strand
caacgugcuggaccacuuc

SEQ ID NO: 813777 - RNA, 19 nt, Homo sapiens
  misc_RNA (1)...(19): siRNA sense strand
gccacuuccugaacugcuu

SEQ ID NO: 813778 - RNA, 19 nt, Homo sapiens
  misc_RNA (1)...(19): siRNA sense strand
uaaaaucggcauuggagaa

SEQ ID NO: 813779 - RNA, 19 nt, Homo sapiens
  misc_RNA (1)...(19): siRNA sense strand
gcuucaauccugacaucuu

SEQ ID NO: 813780 - RNA, 19 nt, Homo sapiens
  misc_RNA (1)...(19): siRNA sense strand
caaggugcacagcgacuuc

SEQ ID NO: 813781 - RNA, 19 nt, Homo sapiens
  misc_RNA (1)...(19): siRNA sense strand
gaccacgucuuuaaaaucg

SEQ ID NO: 813782 - RNA, 19 nt, Homo sapiens
  misc_RNA (1)...(19): siRNA sense strand
cuacggcuccaucgacuuc

SEQ ID NO: 813783 - RNA, 19 nt, Homo sapiens
  misc_RNA (1)...(19): siRNA sense strand
ccaagaugcagauguucau

SEQ ID NO: 813784 - RNA, 19 nt, Homo sapiens
  misc_RNA (1)...(19): siRNA sense strand
ggccaggaagucauuguca

SEQ ID NO: 813785 - RNA, 19 nt, Homo sapiens
  misc_RNA (1)...(19): siRNA sense strand
cggccaagcacaucuucaa

SEQ ID NO: 813786 - RNA, 19 nt, Homo sapiens
  misc_RNA (1)...(19): siRNA sense strand
gagugcaagggcaucauug

SEQ ID NO: 813787 - RNA, 19 nt, Homo sapiens
  misc_RNA (1)...(19): siRNA sense strand
uggaacaacaucuucuuca

SEQ ID NO: 813788 - RNA, 19 nt, Homo sapiens
  misc_RNA (1)...(19): siRNA sense strand
caucuggaacaacaucuuc

SEQ ID NO: 813789 - RNA, 19 nt, Homo sapiens
  misc_RNA (1)...(19): siRNA sense strand
gagaccaagaugcagaugu

SEQ ID NO: 813790 - RNA, 19 nt, Homo sapiens
  misc_RNA (1)...(19): siRNA sense strand
gacagacccgagacuggaa

SEQ ID NO: 813791 - RNA, 19 nt, Homo sapiens
  misc_RNA (1)...(19): siRNA sense strand
agaacaaucugcugaauga

SEQ ID NO: 813792 - RNA, 19 nt, Homo sapiens
  misc_RNA (1)...(19): siRNA sense strand
gcaacgaccugaugaacug

SEQ ID NO: 813793 - RNA, 19 nt, Homo sapiens
  misc_RNA (1)...(19): siRNA sense strand
caagaaggccuaccauuug

SEQ ID NO: 813794 - RNA, 19 nt, Homo sapiens
  misc_RNA (1)...(19): siRNA sense strand
ccaagaaggccuaccauuu

SEQ ID NO: 813795 - RNA, 19 nt, Homo sapiens
  misc_RNA (1)...(19): siRNA sense strand
gaagaacaaucugcugaau

SEQ ID NO: 813796 - RNA, 19 nt, Homo sapiens
  misc_RNA (1)...(19): siRNA sense strand
gaucauggguggcuucaag

SEQ ID NO: 813797 - RNA, 19 nt, Homo sapiens
  misc_RNA (1)...(19): siRNA sense strand
gagaaaggcccacaguaug

SEQ ID NO: 813798 - RNA, 19 nt, Homo sapiens
  misc_RNA (1)...(19): siRNA sense strand
ggagaaguaugagaaagug

SEQ ID NO: 813799 - RNA, 19 nt, Homo sapiens
  misc_RNA (1)...(19): siRNA sense strand
gaaggacgccuaucacaag

SEQ ID NO: 813800 - RNA, 19 nt, Homo sapiens
  misc_RNA (1)...(19): siRNA sense strand
agaaagugcuggaagaugu

SEQ ID NO: 813801 - RNA, 19 nt, Homo sapiens
  misc_RNA (1)...(19): siRNA sense strand
cgagaaaggcccacaguau

SEQ ID NO: 813802 - RNA, 19 nt, Homo sapiens
  misc_RNA (1)...(19): siRNA sense strand
gagcaaugccagcaauuug

SEQ ID NO: 813803 - RNA, 19 nt, Homo sapiens
  misc_RNA (1)...(19): siRNA sense strand
gaacagcagcuacauccau

SEQ ID NO: 813804 - RNA, 19 nt, Homo sapiens
  misc_RNA (1)...(19): siRNA sense strand
gcaagcaggaugugcagaa

SEQ ID NO: 813805 - RNA, 19 nt, Homo sapiens
  misc_RNA (1)...(19): siRNA sense strand
ccaacuacguggaggcuau

SEQ ID NO: 813806 - RNA, 19 nt, Homo sapiens
  misc_RNA (1)...(19): siRNA sense strand
gagacgaacucaccaagcu

SEQ ID NO: 813807 - RNA, 19 nt, Homo sapiens
  misc_RNA (1)...(19): siRNA sense strand
agacacaggagaaguauga

SEQ ID NO: 813808 - RNA, 19 nt, Homo sapiens
  misc_RNA (1)...(19): siRNA sense strand
aaaagaagcugcaggacaa

SEQ ID NO: 813809 - RNA, 19 nt, Homo sapiens
  misc_RNA (1)...(19): siRNA sense strand
ggucacaccugagcagcaa

SEQ ID NO: 813810 - RNA, 19 nt, Homo sapiens
  misc_RNA (1)...(19): siRNA sense strand
agaagacacaggagaagua

SEQ ID NO: 813811 - RNA, 19 nt, Homo sapiens
  misc_RNA (1)...(19): siRNA sense strand
gagcagguguuugagcaau

SEQ ID NO: 813812 - RNA, 19 nt, Homo sapiens
  misc_RNA (1)...(19): siRNA sense strand
gaagacacaggagaaguau

SEQ ID NO: 813813 - RNA, 19 nt, Homo sapiens
  misc_RNA (1)...(19): siRNA sense strand
gaguggcgcugaccaaugc

SEQ ID NO: 813814 - RNA, 19 nt, Homo sapiens
  misc_RNA (1)...(19): siRNA sense strand
ggagaaacagccuaagaag

SEQ ID NO: 813815 - RNA, 19 nt, Homo sapiens
  misc_RNA (1)...(19): siRNA sense strand
uggagaaggugaagaacug

SEQ ID NO: 813816 - RNA, 19 nt, Homo sapiens
  misc_RNA (1)...(19): siRNA sense strand
ugaaugaggaccuggagaa

SEQ ID NO: 813817 - RNA, 19 nt, Homo sapiens
  misc_RNA (1)...(19): siRNA sense strand
aggaagaccucagaugguu

SEQ ID NO: 813818 - RNA, 19 nt, Homo sapiens
  misc_RNA (1)...(19): siRNA sense strand
cacgggagaugaacagcaa

SEQ ID NO: 813819 - RNA, 19 nt, Homo sapiens
  misc_RNA (1)...(19): siRNA sense strand
ggcgccagcucaucgagaa

SEQ ID NO: 813820 - RNA, 19 nt, Homo sapiens
  misc_RNA (1)...(19): siRNA sense strand
gagaaagugcuggaagaug

SEQ ID NO: 813821 - RNA, 19 nt, Homo sapiens
  misc_RNA (1)...(19): siRNA sense strand
gaaagugcuggaagaugug

SEQ ID NO: 813822 - RNA, 19 nt, Homo sapiens
  misc_RNA (1)...(19): siRNA sense strand
ccaccaagaaggagaaaca

SEQ ID NO: 813823 - RNA, 19 nt, Homo sapiens
  misc_RNA (1)...(19): siRNA sense strand
ggaguggcgcugaccaaug

SEQ ID NO: 813824 - RNA, 19 nt, Homo sapiens
  misc_RNA (1)...(19): siRNA sense strand
agaaggagaaacagccuaa

SEQ ID NO: 813825 - RNA, 19 nt, Homo sapiens
  misc_RNA (1)...(19): siRNA sense strand
ugacagaggcagacaaggu

SEQ ID NO: 813826 - RNA, 19 nt, Homo sapiens
  misc_RNA (1)...(19): siRNA sense strand
acauggagcagguguuuga

SEQ ID NO: 813827 - RNA, 19 nt, Homo sapiens
  misc_RNA (1)...(19): siRNA sense strand
accaggaggugaagaacaa

SEQ ID NO: 813828 - RNA, 19 nt, Homo sapiens
  misc_RNA (1)...(19): siRNA sense strand
ggcagaaggacgccuauca

SEQ ID NO: 813829 - RNA, 19 nt, Homo sapiens
  misc_RNA (1)...(19): siRNA sense strand
ccucuacccugccaacuac

SEQ ID NO: 813830 - RNA, 19 nt, Homo sapiens
  misc_RNA (1)...(19): siRNA sense strand
agacgaaggaggcugaaga

SEQ ID NO: 813831 - RNA, 19 nt, Homo sapiens
  misc_RNA (1)...(19): siRNA sense strand
aagaaggccuaccauuugg

SEQ ID NO: 813832 - RNA, 19 nt, Homo sapiens
  misc_RNA (1)...(19): siRNA sense strand
gggccaagaagaugaagga

SEQ ID NO: 813833 - RNA, 19 nt, Homo sapiens
  misc_RNA (1)...(19): siRNA sense strand
ugaagaacaaucugcugaa

SEQ ID NO: 813834 - RNA, 19 nt, Homo sapiens
  misc_RNA (1)...(19): siRNA sense strand
ggaguggaacccagaccuu

SEQ ID NO: 813835 - RNA, 19 nt, Homo sapiens
  misc_RNA (1)...(19): siRNA sense strand
cacaggagaaguaugagaa

SEQ ID NO: 813836 - RNA, 19 nt, Homo sapiens
  misc_RNA (1)...(19): siRNA sense strand
gaagcugcaggacaaagug

SEQ ID NO: 813837 - RNA, 19 nt, Homo sapiens
  misc_RNA (1)...(19): siRNA sense strand
gccaagaaggccuaccauu

SEQ ID NO: 813838 - RNA, 19 nt, Homo sapiens
  misc_RNA (1)...(19): siRNA sense strand
ugagcaaugccagcaauuu

SEQ ID NO: 813839 - RNA, 19 nt, Homo sapiens
  misc_RNA (1)...(19): siRNA sense strand
agaaggacgccuaucacaa

SEQ ID NO: 813840 - RNA, 19 nt, Homo sapiens
  misc_RNA (1)...(19): siRNA sense strand
aggagaaacagccuaagaa

SEQ ID NO: 813841 - RNA, 19 nt, Homo sapiens
  misc_RNA (1)...(19): siRNA sense strand
augagaaagugcuggaaga

SEQ ID NO: 813842 - RNA, 19 nt, Homo sapiens
  misc_RNA (1)...(19): siRNA sense strand
caagcaggaugugcagaag

SEQ ID NO: 813843 - RNA, 19 nt, Homo sapiens
  misc_RNA (1)...(19): siRNA sense strand
cagaaggacgccuaucaca

SEQ ID NO: 813844 - RNA, 19 nt, Homo sapiens
  misc_RNA (1)...(19): siRNA sense strand
gcaaugccagcaauuugag

SEQ ID NO: 813845 - RNA, 19 nt, Homo sapiens
  misc_RNA (1)...(19): siRNA sense strand
gcagguguuugagcaaugc

SEQ ID NO: 813846 - RNA, 19 nt, Homo sapiens
  misc_RNA (1)...(19): siRNA sense strand
agaaaggcccacaguaugg

SEQ ID NO: 813847 - RNA, 19 nt, Homo sapiens
  misc_RNA (1)...(19): siRNA sense strand
cccaguacauggagaacau

SEQ ID NO: 813848 - RNA, 19 nt, Homo sapiens
  misc_RNA (1)...(19): siRNA sense strand
gcagaagacacaggagaag

SEQ ID NO: 813849 - RNA, 19 nt, Homo sapiens
  misc_RNA (1)...(19): siRNA sense strand
gaacagcaagacggagcaa

SEQ ID NO: 813850 - RNA, 19 nt, Homo sapiens
  misc_RNA (1)...(19): siRNA sense strand
gacgaaggaggcugaagau

SEQ ID NO: 813851 - RNA, 19 nt, Homo sapiens
  misc_RNA (1)...(19): siRNA sense strand
aggacaaaguggacaagug

SEQ ID NO: 813852 - RNA, 19 nt, Homo sapiens
  misc_RNA (1)...(19): siRNA sense strand
ccgugaagcgcaucgauga

SEQ ID NO: 813853 - RNA, 19 nt, Homo sapiens
  misc_RNA (1)...(19): siRNA sense strand
caggagaaguaugagaaag

SEQ ID NO: 813854 - RNA, 19 nt, Homo sapiens
  misc_RNA (1)...(19): siRNA sense strand
gcagaaggacgccuaucac

SEQ ID NO: 813855 - RNA, 19 nt, Homo sapiens
  misc_RNA (1)...(19): siRNA sense strand
aaggagaaacagccuaaga

SEQ ID NO: 813856 - RNA, 19 nt, Homo sapiens
  misc_RNA (1)...(19): siRNA sense strand
ccucacaccaccaccaaga

SEQ ID NO: 813857 - RNA, 19 nt, Homo sapiens
  misc_RNA (1)...(19): siRNA sense strand
gaaugaggaccuggagaag

SEQ ID NO: 813858 - RNA, 19 nt, Homo sapiens
  misc_RNA (1)...(19): siRNA sense strand
ugaagaacuggcagaagga

SEQ ID NO: 813859 - RNA, 19 nt, Homo sapiens
  misc_RNA (1)...(19): siRNA sense strand
ggacaagugcaagcaggau

SEQ ID NO: 813860 - RNA, 19 nt, Homo sapiens
  misc_RNA (1)...(19): siRNA sense strand
gccaugacacgggagauga

SEQ ID NO: 813861 - RNA, 19 nt, Homo sapiens
  misc_RNA (1)...(19): siRNA sense strand
ugcgggcacucuacgacua

SEQ ID NO: 813862 - RNA, 19 nt, Homo sapiens
  misc_RNA (1)...(19): siRNA sense strand
ucgagaaaggcccacagua

SEQ ID NO: 813863 - RNA, 19 nt, Homo sapiens
  misc_RNA (1)...(19): siRNA sense strand
acaggagaaguaugagaaa

SEQ ID NO: 813864 - RNA, 19 nt, Homo sapiens
  misc_RNA (1)...(19): siRNA sense strand
cuacguggaggcuaucuag

SEQ ID NO: 813865 - RNA, 19 nt, Homo sapiens
  misc_RNA (1)...(19): siRNA sense strand
gccucuacccugccaacua

SEQ ID NO: 813866 - RNA, 19 nt, Homo sapiens
  misc_RNA (1)...(19): siRNA sense strand
gccaggagcucaccaagaa

SEQ ID NO: 813867 - RNA, 19 nt, Homo sapiens
  misc_RNA (1)...(19): siRNA sense strand
ggacggagcccuugaugac

SEQ ID NO: 813868 - RNA, 19 nt, Homo sapiens
  misc_RNA (1)...(19): siRNA sense strand
gguuugaccuggaucuuuc

SEQ ID NO: 813869 - RNA, 19 nt, Homo sapiens
  misc_RNA (1)...(19): siRNA sense strand
gauggacgauccugacuac

SEQ ID NO: 813870 - RNA, 19 nt, Homo sapiens
  misc_RNA (1)...(19): siRNA sense strand
gcaagcuggugugguuuga

SEQ ID NO: 813871 - RNA, 19 nt, Homo sapiens
  misc_RNA (1)...(19): siRNA sense strand
ucucaggccuggaagauuc

SEQ ID NO: 813872 - RNA, 19 nt, Homo sapiens
  misc_RNA (1)...(19): siRNA sense strand
ugaagaguguggccuggaa

SEQ ID NO: 813873 - RNA, 19 nt, Homo sapiens
  misc_RNA (1)...(19): siRNA sense strand
gcaagaugagggugaaugu

SEQ ID NO: 813874 - RNA, 19 nt, Homo sapiens
  misc_RNA (1)...(19): siRNA sense strand
auagcaagcuggugugguu

SEQ ID NO: 813875 - RNA, 19 nt, Homo sapiens
  misc_RNA (1)...(19): siRNA sense strand
gcugcagaguggccaguuu

SEQ ID NO: 813876 - RNA, 19 nt, Homo sapiens
  misc_RNA (1)...(19): siRNA sense strand
ggagugguacgaugacuuc

SEQ ID NO: 813877 - RNA, 19 nt, Homo sapiens
  misc_RNA (1)...(19): siRNA sense strand
gaagauuccggcagugaca

SEQ ID NO: 813878 - RNA, 19 nt, Homo sapiens
  misc_RNA (1)...(19): siRNA sense strand
cagugaggaugaugacgaa

SEQ ID NO: 813879 - RNA, 19 nt, Homo sapiens
  misc_RNA (1)...(19): siRNA sense strand
cauacaggaugcugagaca

SEQ ID NO: 813880 - RNA, 19 nt, Homo sapiens
  misc_RNA (1)...(19): siRNA sense strand
ccacggcagcgcaagauga

SEQ ID NO: 813881 - RNA, 19 nt, Homo sapiens
  misc_RNA (1)...(19): siRNA sense strand
caagaugagggugaaugua

SEQ ID NO: 813882 - RNA, 19 nt, Homo sapiens
  misc_RNA (1)...(19): siRNA sense strand
ggacgacggcagugucauc

SEQ ID NO: 813883 - RNA, 19 nt, Homo sapiens
  misc_RNA (1)...(19): siRNA sense strand
ccaccaagccauacaggau

SEQ ID NO: 813884 - RNA, 19 nt, Homo sapiens
  misc_RNA (1)...(19): siRNA sense strand
ugacagcagugaggaugau

SEQ ID NO: 813885 - RNA, 19 nt, Homo sapiens
  misc_RNA (1)...(19): siRNA sense strand
ugagccggcugucgacuuc

SEQ ID NO: 813886 - RNA, 19 nt, Homo sapiens
  misc_RNA (1)...(19): siRNA sense strand
agaugagggugaauguaga

SEQ ID NO: 813887 - RNA, 19 nt, Homo sapiens
  misc_RNA (1)...(19): siRNA sense strand
gguguacaaugaccuucug

SEQ ID NO: 813888 - RNA, 19 nt, Homo sapiens
  misc_RNA (1)...(19): siRNA sense strand
gcugagacaccacaagaag

SEQ ID NO: 813889 - RNA, 19 nt, Homo sapiens
  misc_RNA (1)...(19): siRNA sense strand
gaggaggacauccggaaca

SEQ ID NO: 813890 - RNA, 19 nt, Homo sapiens
  misc_RNA (1)...(19): siRNA sense strand
ggaacacggugggcaacgu

SEQ ID NO: 813891 - RNA, 19 nt, Homo sapiens
  misc_RNA (1)...(19): siRNA sense strand
gcggaggacagcucugaug

SEQ ID NO: 813892 - RNA, 19 nt, Homo sapiens
  misc_RNA (1)...(19): siRNA sense strand
gagaggacggagcccuuga

SEQ ID NO: 813893 - RNA, 19 nt, Homo sapiens
  misc_RNA (1)...(19): siRNA sense strand
gcgcugccuugaccuguac

SEQ ID NO: 813894 - RNA, 19 nt, Homo sapiens
  misc_RNA (1)...(19): siRNA sense strand
aagaugagggugaauguag

SEQ ID NO: 813895 - RNA, 19 nt, Homo sapiens
  misc_RNA (1)...(19): siRNA sense strand
gaggacggagcccuugaug

SEQ ID NO: 813896 - RNA, 19 nt, Homo sapiens
  misc_RNA (1)...(19): siRNA sense strand
cggaggacagcucugauga

SEQ ID NO: 813897 - RNA, 19 nt, Homo sapiens
  misc_RNA (1)...(19): siRNA sense strand
ggugugguuugaccuggau

SEQ ID NO: 813898 - RNA, 19 nt, Homo sapiens
  misc_RNA (1)...(19): siRNA sense strand
ggaggacagcucugaugag

SEQ ID NO: 813899 - RNA, 19 nt, Homo sapiens
  misc_RNA (1)...(19): siRNA sense strand
acucggugcugcugcugaa

SEQ ID NO: 813900 - RNA, 19 nt, Homo sapiens
  misc_RNA (1)...(19): siRNA sense strand
gggccacagugaccuuguc

SEQ ID NO: 813901 - RNA, 19 nt, Homo sapiens
  misc_RNA (1)...(19): siRNA sense strand
agaagcugaugcccaacug

SEQ ID NO: 813902 - RNA, 19 nt, Homo sapiens
  misc_RNA (1)...(19): siRNA sense strand
uaacauaccugaucaagaa

SEQ ID NO: 813903 - RNA, 19 nt, Homo sapiens
  misc_RNA (1)...(19): siRNA sense strand
gaagcgaucucaaauuaaa

SEQ ID NO: 813904 - RNA, 19 nt, Homo sapiens
  misc_RNA (1)...(19): siRNA sense strand
gcaaggagaugaaagagaa

SEQ ID NO: 813905 - RNA, 19 nt, Homo sapiens
  misc_RNA (1)...(19): siRNA sense strand
gagaauagcacaacugaua

SEQ ID NO: 813906 - RNA, 19 nt, Homo sapiens
  misc_RNA (1)...(19): siRNA sense strand
gaagauuccugccauacua

SEQ ID NO: 813907 - RNA, 19 nt, Homo sapiens
  misc_RNA (1)...(19): siRNA sense strand
gcacagagauauaguaaag

SEQ ID NO: 813908 - RNA, 19 nt, Homo sapiens
  misc_RNA (1)...(19): siRNA sense strand
gaaagacucucucaucugu

SEQ ID NO: 813909 - RNA, 19 nt, Homo sapiens
  misc_RNA (1)...(19): siRNA sense strand
gcaagugagucccucuuua

SEQ ID NO: 813910 - RNA, 19 nt, Homo sapiens
  misc_RNA (1)...(19): siRNA sense strand
caaacauucuuguggauua

SEQ ID NO: 813911 - RNA, 19 nt, Homo sapiens
  misc_RNA (1)...(19): siRNA sense strand
ccagaaaguucaaguguaa

SEQ ID NO: 813912 - RNA, 19 nt, Homo sapiens
  misc_RNA (1)...(19): siRNA sense strand
gcaugaagcuugcaauguu

SEQ ID NO: 813913 - RNA, 19 nt, Homo sapiens
  misc_RNA (1)...(19): siRNA sense strand
caagguagcuuauuaacug

SEQ ID NO: 813914 - RNA, 19 nt, Homo sapiens
  misc_RNA (1)...(19): siRNA sense strand
gaagagagcaaucaaggua

SEQ ID NO: 813915 - RNA, 19 nt, Homo sapiens
  misc_RNA (1)...(19): siRNA sense strand
gaacaugaauccuuaacau

SEQ ID NO: 813916 - RNA, 19 nt, Homo sapiens
  misc_RNA (1)...(19): siRNA sense strand
gaugauaggcauauucuua

SEQ ID NO: 813917 - RNA, 19 nt, Homo sapiens
  misc_RNA (1)...(19): siRNA sense strand
caaucaagguagcuuauua

SEQ ID NO: 813918 - RNA, 19 nt, Homo sapiens
  misc_RNA (1)...(19): siRNA sense strand
gcaaacaucagaaagauuu

SEQ ID NO: 813919 - RNA, 19 nt, Homo sapiens
  misc_RNA (1)...(19): siRNA sense strand
ggagaugccuguugauaga

SEQ ID NO: 813920 - RNA, 19 nt, Homo sapiens
  misc_RNA (1)...(19): siRNA sense strand
cgaagaggcucaaucugua

SEQ ID NO: 813921 - RNA, 19 nt, Homo sapiens
  misc_RNA (1)...(19): siRNA sense strand
ccaaaucccucaaagaaug

SEQ ID NO: 813922 - RNA, 19 nt, Homo sapiens
  misc_RNA (1)...(19): siRNA sense strand
caaauacaauggcaaauca

SEQ ID NO: 813923 - RNA, 19 nt, Homo sapiens
  misc_RNA (1)...(19): siRNA sense strand
gaugaaaguuacacagauu

SEQ ID NO: 813924 - RNA, 19 nt, Homo sapiens
  misc_RNA (1)...(19): siRNA sense strand
gcagaggaguguggaauuu

SEQ ID NO: 813925 - RNA, 19 nt, Homo sapiens
  misc_RNA (1)...(19): siRNA sense strand
aaacagaaaggcaaaguua

SEQ ID NO: 813926 - RNA, 19 nt, Homo sapiens
  misc_RNA (1)...(19): siRNA sense strand
uagaugagauucagccaua

SEQ ID NO: 813927 - RNA, 19 nt, Homo sapiens
  misc_RNA (1)...(19): siRNA sense strand
gcagucaacucaaccagaa

SEQ ID NO: 813928 - RNA, 19 nt, Homo sapiens
  misc_RNA (1)...(19): siRNA sense strand
ggacuagauuguucagaaa

SEQ ID NO: 813929 - RNA, 19 nt, Homo sapiens
  misc_RNA (1)...(19): siRNA sense strand
gaagaaagaguaaagacaa

SEQ ID NO: 813930 - RNA, 19 nt, Homo sapiens
  misc_RNA (1)...(19): siRNA sense strand
gagcagauguuaacacaca

SEQ ID NO: 813931 - RNA, 19 nt, Homo sapiens
  misc_RNA (1)...(19): siRNA sense strand
aaacagauggcacuucuua

SEQ ID NO: 813932 - RNA, 19 nt, Homo sapiens
  misc_RNA (1)...(19): siRNA sense strand
ugaauugacuccuauauag

SEQ ID NO: 813933 - RNA, 19 nt, Homo sapiens
  misc_RNA (1)...(19): siRNA sense strand
gacuuuaucugcccaaauu

SEQ ID NO: 813934 - RNA, 19 nt, Homo sapiens
  misc_RNA (1)...(19): siRNA sense strand
aaacaggucuccuagauca

SEQ ID NO: 813935 - RNA, 19 nt, Homo sapiens
  misc_RNA (1)...(19): siRNA sense strand
gaucauaguccaacauuug

SEQ ID NO: 813936 - RNA, 19 nt, Homo sapiens
  misc_RNA (1)...(19): siRNA sense strand
guaaauccuucuaguguug

SEQ ID NO: 813937 - RNA, 19 nt, Homo sapiens
  misc_RNA (1)...(19): siRNA sense strand
cagauaagccuaaaccuaa

SEQ ID NO: 813938 - RNA, 19 nt, Homo sapiens
  misc_RNA (1)...(19): siRNA sense strand
uuacagagcugcaagaaca

SEQ ID NO: 813939 - RNA, 19 nt, Homo sapiens
  misc_RNA (1)...(19): siRNA sense strand
ugacagcacuauucaagaa

SEQ ID NO: 813940 - RNA, 19 nt, Homo sapiens
  misc_RNA (1)...(19): siRNA sense strand
cgacagaaagauaaaguua

SEQ ID NO: 813941 - RNA, 19 nt, Homo sapiens
  misc_RNA (1)...(19): siRNA sense strand
uacaagauguggaugauaa

SEQ ID NO: 813942 - RNA, 19 nt, Homo sapiens
  misc_RNA (1)...(19): siRNA sense strand
caaagaugaugaugaugaa

SEQ ID NO: 813943 - RNA, 19 nt, Homo sapiens
  misc_RNA (1)...(19): siRNA sense strand
gcagauaagccuaaaccua

SEQ ID NO: 813944 - RNA, 19 nt, Homo sapiens
  misc_RNA (1)...(19): siRNA sense strand
gcaagaacauuggcaaauc

SEQ ID NO: 813945 - RNA, 19 nt, Homo sapiens
  misc_RNA (1)...(19): siRNA sense strand
gaagugaugugagcaagga

SEQ ID NO: 813946 - RNA, 19 nt, Homo sapiens
  misc_RNA (1)...(19): siRNA sense strand
gaaaagagguuagugaaug

SEQ ID NO: 813947 - RNA, 19 nt, Homo sapiens
  misc_RNA (1)...(19): siRNA sense strand
uauggaacaugaauccuua

SEQ ID NO: 813948 - RNA, 19 nt, Homo sapiens
  misc_RNA (1)...(19): siRNA sense strand
gggcaaaugugaaugugaa

SEQ ID NO: 813949 - RNA, 19 nt, Homo sapiens
  misc_RNA (1)...(19): siRNA sense strand
aaaggaagcuggaaauaag

SEQ ID NO: 813950 - RNA, 19 nt, Homo sapiens
  misc_RNA (1)...(19): siRNA sense strand
gggagagacuuauaucuuc

SEQ ID NO: 813951 - RNA, 19 nt, Homo sapiens
  misc_RNA (1)...(19): siRNA sense strand
gcaaauuacuguguagugu

SEQ ID NO: 813952 - RNA, 19 nt, Homo sapiens
  misc_RNA (1)...(19): siRNA sense strand
uagcaugccuucugucauu

SEQ ID NO: 813953 - RNA, 19 nt, Homo sapiens
  misc_RNA (1)...(19): siRNA sense strand
cuaaagaugcuguaaguaa

SEQ ID NO: 813954 - RNA, 19 nt, Homo sapiens
  misc_RNA (1)...(19): siRNA sense strand
ucaaagaguucagaaguga

SEQ ID NO: 813955 - RNA, 19 nt, Homo sapiens
  misc_RNA (1)...(19): siRNA sense strand
caucuagggucuuauauuc

SEQ ID NO: 813956 - RNA, 19 nt, Homo sapiens
  misc_RNA (1)...(19): siRNA sense strand
guucaaagaugaugaugau

SEQ ID NO: 813957 - RNA, 19 nt, Homo sapiens
  misc_RNA (1)...(19): siRNA sense strand
gaaagaagguccagaaaag

SEQ ID NO: 813958 - RNA, 19 nt, Homo sapiens
  misc_RNA (1)...(19): siRNA sense strand
guaaaucucccaaacauuc

SEQ ID NO: 813959 - RNA, 19 nt, Homo sapiens
  misc_RNA (1)...(19): siRNA sense strand
uaacgacgacuuugaauug

SEQ ID NO: 813960 - RNA, 19 nt, Homo sapiens
  misc_RNA (1)...(19): siRNA sense strand
caagaacauuggcaaauca

SEQ ID NO: 813961 - RNA, 19 nt, Homo sapiens
  misc_RNA (1)...(19): siRNA sense strand
aaacauacccacagauaaa

SEQ ID NO: 813962 - RNA, 19 nt, Homo sapiens
  misc_RNA (1)...(19): siRNA sense strand
uaggaaacaugacaaagaa

SEQ ID NO: 813963 - RNA, 19 nt, Homo sapiens
  misc_RNA (1)...(19): siRNA sense strand
agacugaacugccaggaaa

SEQ ID NO: 813964 - RNA, 19 nt, Homo sapiens
  misc_RNA (1)...(19): siRNA sense strand
gaaaccauauggaagaaag

SEQ ID NO: 813965 - RNA, 19 nt, Homo sapiens
  misc_RNA (1)...(19): siRNA sense strand
gaacuuacuaggucaaaga

SEQ ID NO: 813966 - RNA, 19 nt, Homo sapiens
  misc_RNA (1)...(19): siRNA sense strand
gaggagaugugaaacaagu

SEQ ID NO: 813967 - RNA, 19 nt, Homo sapiens
  misc_RNA (1)...(19): siRNA sense strand
aaucaaacacugccauuua

SEQ ID NO: 813968 - RNA, 19 nt, Homo sapiens
  misc_RNA (1)...(19): siRNA sense strand
aaacgcaaauuacugugua

SEQ ID NO: 813969 - RNA, 19 nt, Homo sapiens
  misc_RNA (1)...(19): siRNA sense strand
caaacagacuuucaacauc

SEQ ID NO: 813970 - RNA, 19 nt, Homo sapiens
  misc_RNA (1)...(19): siRNA sense strand
gcaaacagacuuucaacau

SEQ ID NO: 813971 - RNA, 19 nt, Homo sapiens
  misc_RNA (1)...(19): siRNA sense strand
ggagaugugaaacaaguua

SEQ ID NO: 813972 - RNA, 19 nt, Homo sapiens
  misc_RNA (1)...(19): siRNA sense strand
gaagaugacgauccucaaa

SEQ ID NO: 813973 - RNA, 19 nt, Homo sapiens
  misc_RNA (1)...(19): siRNA sense strand
ugucauauguugcuaauca

SEQ ID NO: 813974 - RNA, 19 nt, Homo sapiens
  misc_RNA (1)...(19): siRNA sense strand
agaagugacugaugcauau

SEQ ID NO: 813975 - RNA, 19 nt, Homo sapiens
  misc_RNA (1)...(19): siRNA sense strand
gaaaucucaucaagaauac

SEQ ID NO: 813976 - RNA, 19 nt, Homo sapiens
  misc_RNA (1)...(19): siRNA sense strand
ggacauacucagagaaaga

SEQ ID NO: 813977 - RNA, 19 nt, Homo sapiens
  misc_RNA (1)...(19): siRNA sense strand
gaaaacauacccacagaua

SEQ ID NO: 813978 - RNA, 19 nt, Homo sapiens
  misc_RNA (1)...(19): siRNA sense strand
aaaugaaccugaagcagaa

SEQ ID NO: 813979 - RNA, 19 nt, Homo sapiens
  misc_RNA (1)...(19): siRNA sense strand
gauauuacgauguugcuaa

SEQ ID NO: 813980 - RNA, 19 nt, Homo sapiens
  misc_RNA (1)...(19): siRNA sense strand
uaaaugcuguccagagguu

SEQ ID NO: 813981 - RNA, 19 nt, Homo sapiens
  misc_RNA (1)...(19): siRNA sense strand
uaggugugauucugauuua

SEQ ID NO: 813982 - RNA, 19 nt, Homo sapiens
  misc_RNA (1)...(19): siRNA sense strand
caaacaauaucagaagaga

SEQ ID NO: 813983 - RNA, 19 nt, Homo sapiens
  misc_RNA (1)...(19): siRNA sense strand
ccaaacaauuccaaacaau

SEQ ID NO: 813984 - RNA, 19 nt, Homo sapiens
  misc_RNA (1)...(19): siRNA sense strand
gaaacaaccuaaagaugcu

SEQ ID NO: 813985 - RNA, 19 nt, Homo sapiens
  misc_RNA (1)...(19): siRNA sense strand
ccuuaaagaccuagaaaua

SEQ ID NO: 813986 - RNA, 19 nt, Homo sapiens
  misc_RNA (1)...(19): siRNA sense strand
gaggaacgagacaagauua

SEQ ID NO: 813987 - RNA, 19 nt, Homo sapiens
  misc_RNA (1)...(19): siRNA sense strand
gccagaaaguucaagugua

SEQ ID NO: 813988 - RNA, 19 nt, Homo sapiens
  misc_RNA (1)...(19): siRNA sense strand
gaguuggaguugcuacuaa

SEQ ID NO: 813989 - RNA, 19 nt, Homo sapiens
  misc_RNA (1)...(19): siRNA sense strand
gaagucaucuuuuguuuca

SEQ ID NO: 813990 - RNA, 19 nt, Homo sapiens
  misc_RNA (1)...(19): siRNA sense strand
ucaguacuaugacgaauau

SEQ ID NO: 813991 - RNA, 19 nt, Homo sapiens
  misc_RNA (1)...(19): siRNA sense strand
gccaugaaguugagaauag

SEQ ID NO: 813992 - RNA, 19 nt, Homo sapiens
  misc_RNA (1)...(19): siRNA sense strand
cauagaaguucgaagaugu

SEQ ID NO: 813993 - RNA, 19 nt, Homo sapiens
  misc_RNA (1)...(19): siRNA sense strand
gagaggugccuuuaucuga

SEQ ID NO: 813994 - RNA, 19 nt, Homo sapiens
  misc_RNA (1)...(19): siRNA sense strand
gcaaaucaaagcaaacaga

SEQ ID NO: 813995 - RNA, 19 nt, Homo sapiens
  misc_RNA (1)...(19): siRNA sense strand
guaugacucugacuuuaug

SEQ ID NO: 813996 - RNA, 19 nt, Homo sapiens
  misc_RNA (1)...(19): siRNA sense strand
guaaguaacagaucacaau

SEQ ID NO: 813997 - RNA, 19 nt, Homo sapiens
  misc_RNA (1)...(19): siRNA sense strand
guaauaaagcacaacauga

SEQ ID NO: 813998 - RNA, 19 nt, Homo sapiens
  misc_RNA (1)...(19): siRNA sense strand
ccaaacacauacaggaaga

SEQ ID NO: 813999 - RNA, 19 nt, Homo sapiens
  misc_RNA (1)...(19): siRNA sense strand
gaaccaagagcuaaagcaa

SEQ ID NO: 814000 - RNA, 19 nt, Homo sapiens
  misc_RNA (1)...(19): siRNA sense strand
guagagaaaccauauggaa

SEQ ID NO: 814001 - RNA, 19 nt, Homo sapiens
  misc_RNA (1)...(19): siRNA sense strand
gaagaggcucaaucuguaa

SEQ ID NO: 814002 - RNA, 19 nt, Homo sapiens
  misc_RNA (1)...(19): siRNA sense strand
gagaaacccuauaaaugua

SEQ ID NO: 814003 - RNA, 19 nt, Homo sapiens
  misc_RNA (1)...(19): siRNA sense strand
gagaaacucuuugaaugua

SEQ ID NO: 814004 - RNA, 19 nt, Homo sapiens
  misc_RNA (1)...(19): siRNA sense strand
caacaucacagaacacaua

SEQ ID NO: 814005 - RNA, 19 nt, Homo sapiens
  misc_RNA (1)...(19): siRNA sense strand
agagaaaccuuacaaaugu

SEQ ID NO: 814006 - RNA, 19 nt, Homo sapiens
  misc_RNA (1)...(19): siRNA sense strand
agagaaaccuuaugaaugu

SEQ ID NO: 814007 - RNA, 19 nt, Homo sapiens
  misc_RNA (1)...(19): siRNA sense strand
gaaagucuauguaggaaag

SEQ ID NO: 814008 - RNA, 19 nt, Homo sapiens
  misc_RNA (1)...(19): siRNA sense strand
gagagaaacccuauaaaug

SEQ ID NO: 814009 - RNA, 19 nt, Homo sapiens
  misc_RNA (1)...(19): siRNA sense strand
gagagaagccuuaugaaug

SEQ ID NO: 814010 - RNA, 19 nt, Homo sapiens
  misc_RNA (1)...(19): siRNA sense strand
gagagaaaccuuacaaaug

SEQ ID NO: 814011 - RNA, 19 nt, Homo sapiens
  misc_RNA (1)...(19): siRNA sense strand
gagaaacccuaugaaugua

SEQ ID NO: 814012 - RNA, 19 nt, Homo sapiens
  misc_RNA (1)...(19): siRNA sense strand
acccauagcucaucccuua

SEQ ID NO: 814013 - RNA, 19 nt, Homo sapiens
  misc_RNA (1)...(19): siRNA sense strand
gggaaagccuucagccaaa

SEQ ID NO: 814014 - RNA, 19 nt, Homo sapiens
  misc_RNA (1)...(19): siRNA sense strand
ggagagaaacccuauaaau

SEQ ID NO: 814015 - RNA, 19 nt, Homo sapiens
  misc_RNA (1)...(19): siRNA sense strand
gggaaagccuucaguguuc

SEQ ID NO: 814016 - RNA, 19 nt, Homo sapiens
  misc_RNA (1)...(19): siRNA sense strand
gaucacaccuugcccaaca

SEQ ID NO: 814017 - RNA, 19 nt, Homo sapiens
  misc_RNA (1)...(19): siRNA sense strand
gagagaaaccuuaugaaug

SEQ ID NO: 814018 - RNA, 19 nt, Homo sapiens
  misc_RNA (1)...(19): siRNA sense strand
gaaacccuaugaauguaaa

SEQ ID NO: 814019 - RNA, 19 nt, Homo sapiens
  misc_RNA (1)...(19): siRNA sense strand
agagaaaccuuaugagugu

SEQ ID NO: 814020 - RNA, 19 nt, Homo sapiens
  misc_RNA (1)...(19): siRNA sense strand
gagagaaacccuaugaaug

SEQ ID NO: 814021 - RNA, 19 nt, Homo sapiens
  misc_RNA (1)...(19): siRNA sense strand
guucacagcuggcuacuca

SEQ ID NO: 814022 - RNA, 19 nt, Homo sapiens
  misc_RNA (1)...(19): siRNA sense strand
gagagaaaccguaugaaug

SEQ ID NO: 814023 - RNA, 19 nt, Homo sapiens
  misc_RNA (1)...(19): siRNA sense strand
gggaaggcguucagaagaa

SEQ ID NO: 814024 - RNA, 19 nt, Homo sapiens
  misc_RNA (1)...(19): siRNA sense strand
ggaguaugauguuggagaa

SEQ ID NO: 814025 - RNA, 19 nt, Homo sapiens
  misc_RNA (1)...(19): siRNA sense strand
cagaagaaaguuauccuua

SEQ ID NO: 814026 - RNA, 19 nt, Homo sapiens
  misc_RNA (1)...(19): siRNA sense strand
ggaaggcguucagaagaaa

SEQ ID NO: 814027 - RNA, 19 nt, Homo sapiens
  misc_RNA (1)...(19): siRNA sense strand
ggagagaaaccuuaugaau

SEQ ID NO: 814028 - RNA, 19 nt, Homo sapiens
  misc_RNA (1)...(19): siRNA sense strand
ggagagaaaccuuacaaau

SEQ ID NO: 814029 - RNA, 19 nt, Homo sapiens
  misc_RNA (1)...(19): siRNA sense strand
ggaaaagccuucaagcaaa

SEQ ID NO: 814030 - RNA, 19 nt, Homo sapiens
  misc_RNA (1)...(19): siRNA sense strand
gcucaucccuuacuguuca

SEQ ID NO: 814031 - RNA, 19 nt, Homo sapiens
  misc_RNA (1)...(19): siRNA sense strand
gacaaaaccuucacccaua

SEQ ID NO: 814032 - RNA, 19 nt, Homo sapiens
  misc_RNA (1)...(19): siRNA sense strand
gcuauggacuugaguguuc

SEQ ID NO: 814033 - RNA, 19 nt, Homo sapiens
  misc_RNA (1)...(19): siRNA sense strand
gaugggaagucaugagaug

SEQ ID NO: 814034 - RNA, 19 nt, Homo sapiens
  misc_RNA (1)...(19): siRNA sense strand
agagaagccuuaugaaugu

SEQ ID NO: 814035 - RNA, 19 nt, Homo sapiens
  misc_RNA (1)...(19): siRNA sense strand
caaacaaagugaacaccuu

SEQ ID NO: 814036 - RNA, 19 nt, Homo sapiens
  misc_RNA (1)...(19): siRNA sense strand
ggaaagccuucaaacaaag

SEQ ID NO: 814037 - RNA, 19 nt, Homo sapiens
  misc_RNA (1)...(19): siRNA sense strand
caugagauguuuagcaaga

SEQ ID NO: 814038 - RNA, 19 nt, Homo sapiens
  misc_RNA (1)...(19): siRNA sense strand
acacaggaauuaccucuga

SEQ ID NO: 814039 - RNA, 19 nt, Homo sapiens
  misc_RNA (1)...(19): siRNA sense strand
ucaaggauguggcaauaga

SEQ ID NO: 814040 - RNA, 19 nt, Homo sapiens
  misc_RNA (1)...(19): siRNA sense strand
caagaaagucuauguagga

SEQ ID NO: 814041 - RNA, 19 nt, Homo sapiens
  misc_RNA (1)...(19): siRNA sense strand
ggagagaaacccuaugaau

SEQ ID NO: 814042 - RNA, 19 nt, Homo sapiens
  misc_RNA (1)...(19): siRNA sense strand
ggagagaagccuuaugaau

SEQ ID NO: 814043 - RNA, 19 nt, Homo sapiens
  misc_RNA (1)...(19): siRNA sense strand
ggagagaaaccguaugaau

SEQ ID NO: 814044 - RNA, 19 nt, Homo sapiens
  misc_RNA (1)...(19): siRNA sense strand
gagagaagccuuuuaauug

SEQ ID NO: 814045 - RNA, 19 nt, Homo sapiens
  misc_RNA (1)...(19): siRNA sense strand
gaugaacccugcucagaag

SEQ ID NO: 814046 - RNA, 19 nt, Homo sapiens
  misc_RNA (1)...(19): siRNA sense strand
ggcaaagccuucagugaug

SEQ ID NO: 814047 - RNA, 19 nt, Homo sapiens
  misc_RNA (1)...(19): siRNA sense strand
aaacaaagugaacaccuua

SEQ ID NO: 814048 - RNA, 19 nt, Homo sapiens
  misc_RNA (1)...(19): siRNA sense strand
gaaaccaucacuaaggaaa

SEQ ID NO: 814049 - RNA, 19 nt, Homo sapiens
  misc_RNA (1)...(19): siRNA sense strand
gaagaauggcaauggauga

SEQ ID NO: 814050 - RNA, 19 nt, Homo sapiens
  misc_RNA (1)...(19): siRNA sense strand
caaaggcccuaucaguguu

SEQ ID NO: 814051 - RNA, 19 nt, Homo sapiens
  misc_RNA (1)...(19): siRNA sense strand
gaacacauacuggagagaa

SEQ ID NO: 814052 - RNA, 19 nt, Homo sapiens
  misc_RNA (1)...(19): siRNA sense strand
cgagugagaugacaagaag

SEQ ID NO: 814053 - RNA, 19 nt, Homo sapiens
  misc_RNA (1)...(19): siRNA sense strand
agagaaacccuauaaaugu

SEQ ID NO: 814054 - RNA, 19 nt, Homo sapiens
  misc_RNA (1)...(19): siRNA sense strand
ggacuuauucugcauagga

SEQ ID NO: 814055 - RNA, 19 nt, Homo sapiens
  misc_RNA (1)...(19): siRNA sense strand
aggaaagccuucaaacaaa

SEQ ID NO: 814056 - RNA, 19 nt, Homo sapiens
  misc_RNA (1)...(19): siRNA sense strand
uaggaaagccuucaaacaa

SEQ ID NO: 814057 - RNA, 19 nt, Homo sapiens
  misc_RNA (1)...(19): siRNA sense strand
cagaauguacaccuuguua

SEQ ID NO: 814058 - RNA, 19 nt, Homo sapiens
  misc_RNA (1)...(19): siRNA sense strand
ggagagaaaccuuaugagu

SEQ ID NO: 814059 - RNA, 19 nt, Homo sapiens
  misc_RNA (1)...(19): siRNA sense strand
ggagggaauuacuagcuau

SEQ ID NO: 814060 - RNA, 19 nt, Homo sapiens
  misc_RNA (1)...(19): siRNA sense strand
agccaaacuuccaaucuua

SEQ ID NO: 814061 - RNA, 19 nt, Homo sapiens
  misc_RNA (1)...(19): siRNA sense strand
agagaaacccuaugaaugu

SEQ ID NO: 814062 - RNA, 19 nt, Homo sapiens
  misc_RNA (1)...(19): siRNA sense strand
ggaugaacccugcucagaa

SEQ ID NO: 814063 - RNA, 19 nt, Homo sapiens
  misc_RNA (1)...(19): siRNA sense strand
caaaagacccuaugaaugu

SEQ ID NO: 814064 - RNA, 19 nt, Homo sapiens
  misc_RNA (1)...(19): siRNA sense strand
ggagagagccuugggagau

SEQ ID NO: 814065 - RNA, 19 nt, Homo sapiens
  misc_RNA (1)...(19): siRNA sense strand
cagccaaacuuccaaucuu

SEQ ID NO: 814066 - RNA, 19 nt, Homo sapiens
  misc_RNA (1)...(19): siRNA sense strand
gagaagccuuaugaaugua

SEQ ID NO: 814067 - RNA, 19 nt, Homo sapiens
  misc_RNA (1)...(19): siRNA sense strand
cagcaucaaagaauucaua

SEQ ID NO: 814068 - RNA, 19 nt, Homo sapiens
  misc_RNA (1)...(19): siRNA sense strand
gagagagccuugggagaug

SEQ ID NO: 814069 - RNA, 19 nt, Homo sapiens
  misc_RNA (1)...(19): siRNA sense strand
gggaagucaugagauguuu

SEQ ID NO: 814070 - RNA, 19 nt, Homo sapiens
  misc_RNA (1)...(19): siRNA sense strand
gucaugagauguuuagcaa

SEQ ID NO: 814071 - RNA, 19 nt, Homo sapiens
  misc_RNA (1)...(19): siRNA sense strand
ggagagaagccuuuuaauu

SEQ ID NO: 814072 - RNA, 19 nt, Homo sapiens
  misc_RNA (1)...(19): siRNA sense strand
ccaaaggcccuaucagugu

SEQ ID NO: 814073 - RNA, 19 nt, Homo sapiens
  misc_RNA (1)...(19): siRNA sense strand
gaagcccauucucagauug

SEQ ID NO: 814074 - RNA, 19 nt, Homo sapiens
  misc_RNA (1)...(19): siRNA sense strand
gagaaaccuuacaaaugug

SEQ ID NO: 814075 - RNA, 19 nt, Homo sapiens
  misc_RNA (1)...(19): siRNA sense strand
cugcauaggagaauucaua

SEQ ID NO: 814076 - RNA, 19 nt, Homo sapiens
  misc_RNA (1)...(19): siRNA sense strand
cagcaucagagaauucaua

SEQ ID NO: 814077 - RNA, 19 nt, Homo sapiens
  misc_RNA (1)...(19): siRNA sense strand
ucacuuggucuuugcauuu

SEQ ID NO: 814078 - RNA, 19 nt, Homo sapiens
  misc_RNA (1)...(19): siRNA sense strand
ggaagucaugagauguuua

SEQ ID NO: 814079 - RNA, 19 nt, Homo sapiens
  misc_RNA (1)...(19): siRNA sense strand
guuagucauuugagaauuc

SEQ ID NO: 814080 - RNA, 19 nt, Homo sapiens
  misc_RNA (1)...(19): siRNA sense strand
ggaaagccuucaguguuca

SEQ ID NO: 814081 - RNA, 19 nt, Homo sapiens
  misc_RNA (1)...(19): siRNA sense strand
aagaaaccaucacuaagga

SEQ ID NO: 814082 - RNA, 19 nt, Homo sapiens
  misc_RNA (1)...(19): siRNA sense strand
gggaauuacuagcuaugga

SEQ ID NO: 814083 - RNA, 19 nt, Homo sapiens
  misc_RNA (1)...(19): siRNA sense strand
caucaaagaauucauacug

SEQ ID NO: 814084 - RNA, 19 nt, Homo sapiens
  misc_RNA (1)...(19): siRNA sense strand
gaagccuuaugaauguauu

SEQ ID NO: 814085 - RNA, 19 nt, Homo sapiens
  misc_RNA (1)...(19): siRNA sense strand
gaauguacaccuuguuagu

SEQ ID NO: 814086 - RNA, 19 nt, Homo sapiens
  misc_RNA (1)...(19): siRNA sense strand
caucaaagaauucauacug

SEQ ID NO: 814087 - RNA, 19 nt, Homo sapiens
  misc_RNA (1)...(19): siRNA sense strand
caaagugaacaccuuauuc

SEQ ID NO: 814088 - RNA, 19 nt, Homo sapiens
  misc_RNA (1)...(19): siRNA sense strand
ugagauguuuagcaagaaa

SEQ ID NO: 814089 - RNA, 19 nt, Homo sapiens
  misc_RNA (1)...(19): siRNA sense strand
guaugauguuggagaacua

SEQ ID NO: 814090 - RNA, 19 nt, Homo sapiens
  misc_RNA (1)...(19): siRNA sense strand
caugugugaucuccuuauu

SEQ ID NO: 814091 - RNA, 19 nt, Homo sapiens
  misc_RNA (1)...(19): siRNA sense strand
gagaaaccuuaugagugua

SEQ ID NO: 814092 - RNA, 19 nt, Homo sapiens
  misc_RNA (1)...(19): siRNA sense strand
gcucagaagcguuuauaca

SEQ ID NO: 814093 - RNA, 19 nt, Homo sapiens
  misc_RNA (1)...(19): siRNA sense strand
gaagucaugagauguuuag

SEQ ID NO: 814094 - RNA, 19 nt, Homo sapiens
  misc_RNA (1)...(19): siRNA sense strand
ucacuaaggaaacagaauu

SEQ ID NO: 814095 - RNA, 19 nt, Homo sapiens
  misc_RNA (1)...(19): siRNA sense strand
gcaaaagacccuaugaaug

SEQ ID NO: 814096 - RNA, 19 nt, Homo sapiens
  misc_RNA (1)...(19): siRNA sense strand
caucaaagaagucauacug

SEQ ID NO: 814097 - RNA, 19 nt, Homo sapiens
  misc_RNA (1)...(19): siRNA sense strand
caggagagaaaccuuauga

SEQ ID NO: 814098 - RNA, 19 nt, Homo sapiens
  misc_RNA (1)...(19): siRNA sense strand
caucagagaauucauacug

SEQ ID NO: 814099 - RNA, 19 nt, Homo sapiens
  misc_RNA (1)...(19): siRNA sense strand
gaauguaaagaauguggaa

SEQ ID NO: 814100 - RNA, 19 nt, Homo sapiens
  misc_RNA (1)...(19): siRNA sense strand
caggagagaaaccuuauga

SEQ ID NO: 814101 - RNA, 19 nt, Homo sapiens
  misc_RNA (1)...(19): siRNA sense strand
ggaaggcuuuuagguauaa

SEQ ID NO: 814102 - RNA, 19 nt, Homo sapiens
  misc_RNA (1)...(19): siRNA sense strand
ggagaaagccucagaguuu

SEQ ID NO: 814103 - RNA, 19 nt, Homo sapiens
  misc_RNA (1)...(19): siRNA sense strand
ggaagaaggugaugcuaaa

SEQ ID NO: 814104 - RNA, 19 nt, Homo sapiens
  misc_RNA (1)...(19): siRNA sense strand
gaaagggucuugcuaagga

SEQ ID NO: 814105 - RNA, 19 nt, Homo sapiens
  misc_RNA (1)...(19): siRNA sense strand
gaaaacaucugagcaaaua

SEQ ID NO: 814106 - RNA, 19 nt, Homo sapiens
  misc_RNA (1)...(19): siRNA sense strand
gaagguaguugaaauucuu

SEQ ID NO: 814107 - RNA, 19 nt, Homo sapiens
  misc_RNA (1)...(19): siRNA sense strand
ugaaagaacuugagaagca

SEQ ID NO: 814108 - RNA, 19 nt, Homo sapiens
  misc_RNA (1)...(19): siRNA sense strand
gaaggaaaccaaagcaauu

SEQ ID NO: 814109 - RNA, 19 nt, Homo sapiens
  misc_RNA (1)...(19): siRNA sense strand
gaagguaccacgagcuaua

SEQ ID NO: 814110 - RNA, 19 nt, Homo sapiens
  misc_RNA (1)...(19): siRNA sense strand
caaagaacauuaugaaagg

SEQ ID NO: 814111 - RNA, 19 nt, Homo sapiens
  misc_RNA (1)...(19): siRNA sense strand
ggaaacgguucacaaggaa

SEQ ID NO: 814112 - RNA, 19 nt, Homo sapiens
  misc_RNA (1)...(19): siRNA sense strand
agaagugacucccgaaauu

SEQ ID NO: 814113 - RNA, 19 nt, Homo sapiens
  misc_RNA (1)...(19): siRNA sense strand
ggcccaggcugaucaauuu

SEQ ID NO: 814114 - RNA, 19 nt, Homo sapiens
  misc_RNA (1)...(19): siRNA sense strand
gaaaguaccaccguucaaa

SEQ ID NO: 814115 - RNA, 19 nt, Homo sapiens
  misc_RNA (1)...(19): siRNA sense strand
gagaagcagaagagaauua

SEQ ID NO: 814116 - RNA, 19 nt, Homo sapiens
  misc_RNA (1)...(19): siRNA sense strand
gagaaagccucagaguuug

SEQ ID NO: 814117 - RNA, 19 nt, Homo sapiens
  misc_RNA (1)...(19): siRNA sense strand
gcaaauagaggaucaugau

SEQ ID NO: 814118 - RNA, 19 nt, Homo sapiens
  misc_RNA (1)...(19): siRNA sense strand
gaagagaagagacugaaga

SEQ ID NO: 814119 - RNA, 19 nt, Homo sapiens
  misc_RNA (1)...(19): siRNA sense strand
guggaacacuggauaaaga

SEQ ID NO: 814120 - RNA, 19 nt, Homo sapiens
  misc_RNA (1)...(19): siRNA sense strand
guaggaagguaguugaaau

SEQ ID NO: 814121 - RNA, 19 nt, Homo sapiens
  misc_RNA (1)...(19): siRNA sense strand
aggcacagcuugaaagaaa

SEQ ID NO: 814122 - RNA, 19 nt, Homo sapiens
  misc_RNA (1)...(19): siRNA sense strand
gagaggagacgcacuguga

SEQ ID NO: 814123 - RNA, 19 nt, Homo sapiens
  misc_RNA (1)...(19): siRNA sense strand
gcagaaggauccucgucuu

SEQ ID NO: 814124 - RNA, 19 nt, Homo sapiens
  misc_RNA (1)...(19): siRNA sense strand
gagcaugccuuagcaguca

SEQ ID NO: 814125 - RNA, 19 nt, Homo sapiens
  misc_RNA (1)...(19): siRNA sense strand
gaaagucuggcuagaaaga

SEQ ID NO: 814126 - RNA, 19 nt, Homo sapiens
  misc_RNA (1)...(19): siRNA sense strand
acaccaaacuuaagcaaga

SEQ ID NO: 814127 - RNA, 19 nt, Homo sapiens
  misc_RNA (1)...(19): siRNA sense strand
cgacacugcuuuacagaau

SEQ ID NO: 814128 - RNA, 19 nt, Homo sapiens
  misc_RNA (1)...(19): siRNA sense strand
gaugagacauaagcaggua

SEQ ID NO: 814129 - RNA, 19 nt, Homo sapiens
  misc_RNA (1)...(19): siRNA sense strand
ccauggagaugagacauaa

SEQ ID NO: 814130 - RNA, 19 nt, Homo sapiens
  misc_RNA (1)...(19): siRNA sense strand
agaaagaacuggaguacca

SEQ ID NO: 814131 - RNA, 19 nt, Homo sapiens
  misc_RNA (1)...(19): siRNA sense strand
ggacauggaagaaguuugu

SEQ ID NO: 814132 - RNA, 19 nt, Homo sapiens
  misc_RNA (1)...(19): siRNA sense strand
cucaggagcuggucaauga

SEQ ID NO: 814133 - RNA, 19 nt, Homo sapiens
  misc_RNA (1)...(19): siRNA sense strand
aaacaauucucgagcugaa

SEQ ID NO: 814134 - RNA, 19 nt, Homo sapiens
  misc_RNA (1)...(19): siRNA sense strand
uagaccaucugcuccauaa

SEQ ID NO: 814135 - RNA, 19 nt, Homo sapiens
  misc_RNA (1)...(19): siRNA sense strand
gaagagagagcaauucaac

SEQ ID NO: 814136 - RNA, 19 nt, Homo sapiens
  misc_RNA (1)...(19): siRNA sense strand
gccagaugcuugugaauuc

SEQ ID NO: 814137 - RNA, 19 nt, Homo sapiens
  misc_RNA (1)...(19): siRNA sense strand
ucaaaguacucacauucuu

SEQ ID NO: 814138 - RNA, 19 nt, Homo sapiens
  misc_RNA (1)...(19): siRNA sense strand
ugauuuauguggcuauuug

SEQ ID NO: 814139 - RNA, 19 nt, Homo sapiens
  misc_RNA (1)...(19): siRNA sense strand
gaaaggcgacagcaacuuc

SEQ ID NO: 814140 - RNA, 19 nt, Homo sapiens
  misc_RNA (1)...(19): siRNA sense strand
ugauugaucugcaggaaga

SEQ ID NO: 814141 - RNA, 19 nt, Homo sapiens
  misc_RNA (1)...(19): siRNA sense strand
ccaaagaacauuaugaaag

SEQ ID NO: 814142 - RNA, 19 nt, Homo sapiens
  misc_RNA (1)...(19): siRNA sense strand
gcaauaagcagcacaagac

SEQ ID NO: 814143 - RNA, 19 nt, Homo sapiens
  misc_RNA (1)...(19): siRNA sense strand
gaaagcagcauggaaaaua

SEQ ID NO: 814144 - RNA, 19 nt, Homo sapiens
  misc_RNA (1)...(19): siRNA sense strand
gguagauucugcaaugaug

SEQ ID NO: 814145 - RNA, 19 nt, Homo sapiens
  misc_RNA (1)...(19): siRNA sense strand
gaaagaggaagaggagauu

SEQ ID NO: 814146 - RNA, 19 nt, Homo sapiens
  misc_RNA (1)...(19): siRNA sense strand
gaugaaaucuaugcagaag

SEQ ID NO: 814147 - RNA, 19 nt, Homo sapiens
  misc_RNA (1)...(19): siRNA sense strand
ucagauacuugguccuuga

SEQ ID NO: 814148 - RNA, 19 nt, Homo sapiens
  misc_RNA (1)...(19): siRNA sense strand
aggaaagucuggcuagaaa

SEQ ID NO: 814149 - RNA, 19 nt, Homo sapiens
  misc_RNA (1)...(19): siRNA sense strand
acacaagauuccagaaguu

SEQ ID NO: 814150 - RNA, 19 nt, Homo sapiens
  misc_RNA (1)...(19): siRNA sense strand
ggagagacuacacaagauu

SEQ ID NO: 814151 - RNA, 19 nt, Homo sapiens
  misc_RNA (1)...(19): siRNA sense strand
agaagagaauuaagaggaa

SEQ ID NO: 814152 - RNA, 19 nt, Homo sapiens
  misc_RNA (1)...(19): siRNA sense strand
gagaagagacugaagaaaa

SEQ ID NO: 814153 - RNA, 19 nt, Homo sapiens
  misc_RNA (1)...(19): siRNA sense strand
ggaagguaguugaaauucu

SEQ ID NO: 814154 - RNA, 19 nt, Homo sapiens
  misc_RNA (1)...(19): siRNA sense strand
gggaagcagugguuguaug

SEQ ID NO: 814155 - RNA, 19 nt, Homo sapiens
  misc_RNA (1)...(19): siRNA sense strand
uaugaaagaggaaagagua

SEQ ID NO: 814156 - RNA, 19 nt, Homo sapiens
  misc_RNA (1)...(19): siRNA sense strand
uggaagagauugagaaugc

SEQ ID NO: 814157 - RNA, 19 nt, Homo sapiens
  misc_RNA (1)...(19): siRNA sense strand
uggaagaucuuggaaggaa

SEQ ID NO: 814158 - RNA, 19 nt, Homo sapiens
  misc_RNA (1)...(19): siRNA sense strand
aacaacaacuggccacuga

SEQ ID NO: 814159 - RNA, 19 nt, Homo sapiens
  misc_RNA (1)...(19): siRNA sense strand
caaagaaaaucaacagugu

SEQ ID NO: 814160 - RNA, 19 nt, Homo sapiens
  misc_RNA (1)...(19): siRNA sense strand
cagaaggauccucgucuua

SEQ ID NO: 814161 - RNA, 19 nt, Homo sapiens
  misc_RNA (1)...(19): siRNA sense strand
uggaaacgguucacaagga

SEQ ID NO: 814162 - RNA, 19 nt, Homo sapiens
  misc_RNA (1)...(19): siRNA sense strand
gacagcaacuucguaggaa

SEQ ID NO: 814163 - RNA, 19 nt, Homo sapiens
  misc_RNA (1)...(19): siRNA sense strand
caauagccaaagaacauua

SEQ ID NO: 814164 - RNA, 19 nt, Homo sapiens
  misc_RNA (1)...(19): siRNA sense strand
gaaaccaaagcaauugaug

SEQ ID NO: 814165 - RNA, 19 nt, Homo sapiens
  misc_RNA (1)...(19): siRNA sense strand
gguuagacaccaaacuuaa

SEQ ID NO: 814166 - RNA, 19 nt, Homo sapiens
  misc_RNA (1)...(19): siRNA sense strand
ggauaaagagaguggagaa

SEQ ID NO: 814167 - RNA, 19 nt, Homo sapiens
  misc_RNA (1)...(19): siRNA sense strand
agcaacagcugauugagaa

SEQ ID NO: 814168 - RNA, 19 nt, Homo sapiens
  misc_RNA (1)...(19): siRNA sense strand
gaucuuggaaggaaggaaa

SEQ ID NO: 814169 - RNA, 19 nt, Homo sapiens
  misc_RNA (1)...(19): siRNA sense strand
gaaaagggaggcagaagaa

SEQ ID NO: 814170 - RNA, 19 nt, Homo sapiens
  misc_RNA (1)...(19): siRNA sense strand
ggacucagaaggaaaccaa

SEQ ID NO: 814171 - RNA, 19 nt, Homo sapiens
  misc_RNA (1)...(19): siRNA sense strand
gaacaacaacaggcaacuu

SEQ ID NO: 814172 - RNA, 19 nt, Homo sapiens
  misc_RNA (1)...(19): siRNA sense strand
gaguauaaccggaaacaag

SEQ ID NO: 814173 - RNA, 19 nt, Homo sapiens
  misc_RNA (1)...(19): siRNA sense strand
gaggagacgcacugugaaa

SEQ ID NO: 814174 - RNA, 19 nt, Homo sapiens
  misc_RNA (1)...(19): siRNA sense strand
acaagaagcagcagaagga

SEQ ID NO: 814175 - RNA, 19 nt, Homo sapiens
  misc_RNA (1)...(19): siRNA sense strand
ugugguagauucugcaaug

SEQ ID NO: 814176 - RNA, 19 nt, Homo sapiens
  misc_RNA (1)...(19): siRNA sense strand
ccaaauacugcuuaagaga

SEQ ID NO: 814177 - RNA, 19 nt, Homo sapiens
  misc_RNA (1)...(19): siRNA sense strand
uaugaaagggucuugcuaa

SEQ ID NO: 814178 - RNA, 19 nt, Homo sapiens
  misc_RNA (1)...(19): siRNA sense strand
gaacuugagaagcagaaga

SEQ ID NO: 814179 - RNA, 19 nt, Homo sapiens
  misc_RNA (1)...(19): siRNA sense strand
gaagugacucccgaaauuc

SEQ ID NO: 814180 - RNA, 19 nt, Homo sapiens
  misc_RNA (1)...(19): siRNA sense strand
ggacugaaggcagaaguga

SEQ ID NO: 814181 - RNA, 19 nt, Homo sapiens
  misc_RNA (1)...(19): siRNA sense strand
ugaaaucuaugcagaagcu

SEQ ID NO: 814182 - RNA, 19 nt, Homo sapiens
  misc_RNA (1)...(19): siRNA sense strand
ucagggaggugaagaucga

SEQ ID NO: 814183 - RNA, 19 nt, Homo sapiens
  misc_RNA (1)...(19): siRNA sense strand
ggaagcaauagccaaagaa

SEQ ID NO: 814184 - RNA, 19 nt, Homo sapiens
  misc_RNA (1)...(19): siRNA sense strand
gaaaaucaacagugucaaa

SEQ ID NO: 814185 - RNA, 19 nt, Homo sapiens
  misc_RNA (1)...(19): siRNA sense strand
cuuaagacgugagaaagaa

SEQ ID NO: 814186 - RNA, 19 nt, Homo sapiens
  misc_RNA (1)...(19): siRNA sense strand
gaugauuuauguggcuauu

SEQ ID NO: 814187 - RNA, 19 nt, Homo sapiens
  misc_RNA (1)...(19): siRNA sense strand
caagucuggugaacgaaug

SEQ ID NO: 814188 - RNA, 19 nt, Homo sapiens
  misc_RNA (1)...(19): siRNA sense strand
cgacagcaacuucguagga

SEQ ID NO: 814189 - RNA, 19 nt, Homo sapiens
  misc_RNA (1)...(19): siRNA sense strand
gauugagaaugcaaagcaa

SEQ ID NO: 814190 - RNA, 19 nt, Homo sapiens
  misc_RNA (1)...(19): siRNA sense strand
gaagagauugagaaugcaa

SEQ ID NO: 814191 - RNA, 19 nt, Homo sapiens
  misc_RNA (1)...(19): siRNA sense strand
gagaagagaagagacugaa

SEQ ID NO: 814192 - RNA, 19 nt, Homo sapiens
  misc_RNA (1)...(19): siRNA sense strand
uaaagagaguggagaaagc

SEQ ID NO: 814193 - RNA, 19 nt, Homo sapiens
  misc_RNA (1)...(19): siRNA sense strand
caacuggccacugaguaua

SEQ ID NO: 814194 - RNA, 19 nt, Homo sapiens
  misc_RNA (1)...(19): siRNA sense strand
aaagggagauggugaagcu

SEQ ID NO: 814195 - RNA, 19 nt, Homo sapiens
  misc_RNA (1)...(19): siRNA sense strand
ggaaaguaccaccguucaa

SEQ ID NO: 814196 - RNA, 19 nt, Homo sapiens
  misc_RNA (1)...(19): siRNA sense strand
cgagcuauaucagcaauca

SEQ ID NO: 814197 - RNA, 19 nt, Homo sapiens
  misc_RNA (1)...(19): siRNA sense strand
ugaaauucuuccagacuuc

SEQ ID NO: 814198 - RNA, 19 nt, Homo sapiens
  misc_RNA (1)...(19): siRNA sense strand
gaaagaggaaagaguaaaa

SEQ ID NO: 814199 - RNA, 19 nt, Homo sapiens
  misc_RNA (1)...(19): siRNA sense strand
gcaauagccaaagaacauu

SEQ ID NO: 814200 - RNA, 19 nt, Homo sapiens
  misc_RNA (1)...(19): siRNA sense strand
agaauuagcaagugaggaa

SEQ ID NO: 814201 - RNA, 19 nt, Homo sapiens
  misc_RNA (1)...(19): siRNA sense strand
caaaguacucacauucuuc

SEQ ID NO: 814202 - RNA, 19 nt, Homo sapiens
  misc_RNA (1)...(19): siRNA sense strand
gaaaguugaugacguguua

SEQ ID NO: 814203 - RNA, 19 nt, Homo sapiens
  misc_RNA (1)...(19): siRNA sense strand
gaaaggaaauggaaaguug

SEQ ID NO: 814204 - RNA, 19 nt, Homo sapiens
  misc_RNA (1)...(19): siRNA sense strand
ggacaaggcuuccaugaug

SEQ ID NO: 814205 - RNA, 19 nt, Homo sapiens
  misc_RNA (1)...(19): siRNA sense strand
ggacaauccuuaugaauau

SEQ ID NO: 814206 - RNA, 19 nt, Homo sapiens
  misc_RNA (1)...(19): siRNA sense strand
gaaagaagccugaugaguu

SEQ ID NO: 814207 - RNA, 19 nt, Homo sapiens
  misc_RNA (1)...(19): siRNA sense strand
ggagagaagucuuauaaau

SEQ ID NO: 814208 - RNA, 19 nt, Homo sapiens
  misc_RNA (1)...(19): siRNA sense strand
gaagagcccuggauauuag

SEQ ID NO: 814209 - RNA, 19 nt, Homo sapiens
  misc_RNA (1)...(19): siRNA sense strand
gggaagaccuuuagucaga

SEQ ID NO: 814210 - RNA, 19 nt, Homo sapiens
  misc_RNA (1)...(19): siRNA sense strand
aaagaagccugaugaguuu

SEQ ID NO: 814211 - RNA, 19 nt, Homo sapiens
  misc_RNA (1)...(19): siRNA sense strand
gaacaaaucccaggaacaa

SEQ ID NO: 814212 - RNA, 19 nt, Homo sapiens
  misc_RNA (1)...(19): siRNA sense strand
ucagggagcuuacacaaga

SEQ ID NO: 814213 - RNA, 19 nt, Homo sapiens
  misc_RNA (1)...(19): siRNA sense strand
gagaaaccauauaagugua

SEQ ID NO: 814214 - RNA, 19 nt, Homo sapiens
  misc_RNA (1)...(19): siRNA sense strand
gagagaagcccuaugaaug

SEQ ID NO: 814215 - RNA, 19 nt, Homo sapiens
  misc_RNA (1)...(19): siRNA sense strand
gagaagagcccuggauauu

SEQ ID NO: 814216 - RNA, 19 nt, Homo sapiens
  misc_RNA (1)...(19): siRNA sense strand
agaaauugcuccuugauau

SEQ ID NO: 814217 - RNA, 19 nt, Homo sapiens
  misc_RNA (1)...(19): siRNA sense strand
ucaguaggguauugcauua

SEQ ID NO: 814218 - RNA, 19 nt, Homo sapiens
  misc_RNA (1)...(19): siRNA sense strand
gaaaucuucugugacaauu

SEQ ID NO: 814219 - RNA, 19 nt, Homo sapiens
  misc_RNA (1)...(19): siRNA sense strand
gagaagcccuaugaaugua

SEQ ID NO: 814220 - RNA, 19 nt, Homo sapiens
  misc_RNA (1)...(19): siRNA sense strand
gagaagcccuaugaaugua

SEQ ID NO: 814221 - RNA, 19 nt, Homo sapiens
  misc_RNA (1)...(19): siRNA sense strand
gaagucaaaccucauugua

SEQ ID NO: 814222 - RNA, 19 nt, Homo sapiens
  misc_RNA (1)...(19): siRNA sense strand
caauucagcuuucauuauc

SEQ ID NO: 814223 - RNA, 19 nt, Homo sapiens
  misc_RNA (1)...(19): siRNA sense strand
ggagaaaccauauaagugu

SEQ ID NO: 814224 - RNA, 19 nt, Homo sapiens
  misc_RNA (1)...(19): siRNA sense strand
gggaaagucuuaugauuac

SEQ ID NO: 814225 - RNA, 19 nt, Homo sapiens
  misc_RNA (1)...(19): siRNA sense strand
ggagaagcccuaugaaugu

SEQ ID NO: 814226 - RNA, 19 nt, Homo sapiens
  misc_RNA (1)...(19): siRNA sense strand
gaaauugcuccuugauauu

SEQ ID NO: 814227 - RNA, 19 nt, Homo sapiens
  misc_RNA (1)...(19): siRNA sense strand
ggaaauggaaaguugauga

SEQ ID NO: 814228 - RNA, 19 nt, Homo sapiens
  misc_RNA (1)...(19): siRNA sense strand
ggucagugcucaccaaaca

SEQ ID NO: 814229 - RNA, 19 nt, Homo sapiens
  misc_RNA (1)...(19): siRNA sense strand
aaccagaagugaucuuuaa

SEQ ID NO: 814230 - RNA, 19 nt, Homo sapiens
  misc_RNA (1)...(19): siRNA sense strand
ggaguaauuucagcaagaa

SEQ ID NO: 814231 - RNA, 19 nt, Homo sapiens
  misc_RNA (1)...(19): siRNA sense strand
gggaaaaccuucugugaaa

SEQ ID NO: 814232 - RNA, 19 nt, Homo sapiens
  misc_RNA (1)...(19): siRNA sense strand
gagaaauugcuccuugaua

SEQ ID NO: 814233 - RNA, 19 nt, Homo sapiens
  misc_RNA (1)...(19): siRNA sense strand
gggagaagcccuaugaaug

SEQ ID NO: 814234 - RNA, 19 nt, Homo sapiens
  misc_RNA (1)...(19): siRNA sense strand
ccguauggaugcaguauuu

SEQ ID NO: 814235 - RNA, 19 nt, Homo sapiens
  misc_RNA (1)...(19): siRNA sense strand
ggaaaauccuucuguguga

SEQ ID NO: 814236 - RNA, 19 nt, Homo sapiens
  misc_RNA (1)...(19): siRNA sense strand
ggaaaagucagcucucuua

SEQ ID NO: 814237 - RNA, 19 nt, Homo sapiens
  misc_RNA (1)...(19): siRNA sense strand
gacaaggcuuccaugauga

SEQ ID NO: 814238 - RNA, 19 nt, Homo sapiens
  misc_RNA (1)...(19): siRNA sense strand
ggagagaagcccuaugaau

SEQ ID NO: 814239 - RNA, 19 nt, Homo sapiens
  misc_RNA (1)...(19): siRNA sense strand
gggaguaauuucagcaaga

SEQ ID NO: 814240 - RNA, 19 nt, Homo sapiens
  misc_RNA (1)...(19): siRNA sense strand
gagcuucuauuccacaaca

SEQ ID NO: 814241 - RNA, 19 nt, Homo sapiens
  misc_RNA (1)...(19): siRNA sense strand
aaucagcucucacuaaaca

SEQ ID NO: 814242 - RNA, 19 nt, Homo sapiens
  misc_RNA (1)...(19): siRNA sense strand
ccagaaagaagccugauga

SEQ ID NO: 814243 - RNA, 19 nt, Homo sapiens
  misc_RNA (1)...(19): siRNA sense strand
aaagucagcucucuuaaaa

SEQ ID NO: 814244 - RNA, 19 nt, Homo sapiens
  misc_RNA (1)...(19): siRNA sense strand
agaagagcccuggauauua

SEQ ID NO: 814245 - RNA, 19 nt, Homo sapiens
  misc_RNA (1)...(19): siRNA sense strand
gaacaucagagaacacaca

SEQ ID NO: 814246 - RNA, 19 nt, Homo sapiens
  misc_RNA (1)...(19): siRNA sense strand
ggaaaucuucugugacaau

SEQ ID NO: 814247 - RNA, 19 nt, Homo sapiens
  misc_RNA (1)...(19): siRNA sense strand
gaauauaaagugagugaca

SEQ ID NO: 814248 - RNA, 19 nt, Homo sapiens
  misc_RNA (1)...(19): siRNA sense strand
gacaauucagcuuucauua

SEQ ID NO: 814249 - RNA, 19 nt, Homo sapiens
  misc_RNA (1)...(19): siRNA sense strand
ggagaagagcccuggauau

SEQ ID NO: 814250 - RNA, 19 nt, Homo sapiens
  misc_RNA (1)...(19): siRNA sense strand
caccaaacaucagagaauu

SEQ ID NO: 814251 - RNA, 19 nt, Homo sapiens
  misc_RNA (1)...(19): siRNA sense strand
gcgaacacauacaggagaa

SEQ ID NO: 814252 - RNA, 19 nt, Homo sapiens
  misc_RNA (1)...(19): siRNA sense strand
cugcaugaauuuaagguuu

SEQ ID NO: 814253 - RNA, 19 nt, Homo sapiens
  misc_RNA (1)...(19): siRNA sense strand
ccugaugaguuuaauguau

SEQ ID NO: 814254 - RNA, 19 nt, Homo sapiens
  misc_RNA (1)...(19): siRNA sense strand
aaaaucagcucucacuaaa

SEQ ID NO: 814255 - RNA, 19 nt, Homo sapiens
  misc_RNA (1)...(19): siRNA sense strand
gaaauggagccguauggau

SEQ ID NO: 814256 - RNA, 19 nt, Homo sapiens
  misc_RNA (1)...(19): siRNA sense strand
ggauguauguguggacuuc

SEQ ID NO: 814257 - RNA, 19 nt, Homo sapiens
  misc_RNA (1)...(19): siRNA sense strand
gagaagccguaugagugua

SEQ ID NO: 814258 - RNA, 19 nt, Homo sapiens
  misc_RNA (1)...(19): siRNA sense strand
ggagaagccguaugagugu

SEQ ID NO: 814259 - RNA, 19 nt, Homo sapiens
  misc_RNA (1)...(19): siRNA sense strand
agucaaaccucacugaaca

SEQ ID NO: 814260 - RNA, 19 nt, Homo sapiens
  misc_RNA (1)...(19): siRNA sense strand
gaagucaaaccucacugaa

SEQ ID NO: 814261 - RNA, 19 nt, Homo sapiens
  misc_RNA (1)...(19): siRNA sense strand
gaauguaagcaauguggaa

SEQ ID NO: 814262 - RNA, 19 nt, Homo sapiens
  misc_RNA (1)...(19): siRNA sense strand
agucaaaccucacucaaca

SEQ ID NO: 814263 - RNA, 19 nt, Homo sapiens
  misc_RNA (1)...(19): siRNA sense strand
caacaaaacaguaagugua

SEQ ID NO: 814264 - RNA, 19 nt, Homo sapiens
  misc_RNA (1)...(19): siRNA sense strand
gggagaaaccauauaagug

SEQ ID NO: 814265 - RNA, 19 nt, Homo sapiens
  misc_RNA (1)...(19): siRNA sense strand
ggacccugcucagaagauu

SEQ ID NO: 814266 - RNA, 19 nt, Homo sapiens
  misc_RNA (1)...(19): siRNA sense strand
caggagagaagcccuauga

SEQ ID NO: 814267 - RNA, 19 nt, Homo sapiens
  misc_RNA (1)...(19): siRNA sense strand
guaggguauugcauuacua

SEQ ID NO: 814268 - RNA, 19 nt, Homo sapiens
  misc_RNA (1)...(19): siRNA sense strand
gugagaaauugcuccuuga

SEQ ID NO: 814269 - RNA, 19 nt, Homo sapiens
  misc_RNA (1)...(19): siRNA sense strand
gaagcccuaugaauguaau

SEQ ID NO: 814270 - RNA, 19 nt, Homo sapiens
  misc_RNA (1)...(19): siRNA sense strand
gaacacacacaggagagaa

SEQ ID NO: 814271 - RNA, 19 nt, Homo sapiens
  misc_RNA (1)...(19): siRNA sense strand
caucagagaauucacacaa

SEQ ID NO: 814272 - RNA, 19 nt, Homo sapiens
  misc_RNA (1)...(19): siRNA sense strand
agucaaaccucauuguaca

SEQ ID NO: 814273 - RNA, 19 nt, Homo sapiens
  misc_RNA (1)...(19): siRNA sense strand
ggggaaagucuuaugauua

SEQ ID NO: 814274 - RNA, 19 nt, Homo sapiens
  misc_RNA (1)...(19): siRNA sense strand
uaagaucgagcaaggagaa

SEQ ID NO: 814275 - RNA, 19 nt, Homo sapiens
  misc_RNA (1)...(19): siRNA sense strand
uagcaaucuugucucagua

SEQ ID NO: 814276 - RNA, 19 nt, Homo sapiens
  misc_RNA (1)...(19): siRNA sense strand
ugacaauucagcuuucauu

SEQ ID NO: 814277 - RNA, 19 nt, Homo sapiens
  misc_RNA (1)...(19): siRNA sense strand
acaaauaagagaucucaga

SEQ ID NO: 814278 - RNA, 19 nt, Homo sapiens
  misc_RNA (1)...(19): siRNA sense strand
ggagauagaggaagcaaaa

SEQ ID NO: 814279 - RNA, 19 nt, Homo sapiens
  misc_RNA (1)...(19): siRNA sense strand
gaagucaaaccucacucaa

SEQ ID NO: 814280 - RNA, 19 nt, Homo sapiens
  misc_RNA (1)...(19): siRNA sense strand
uuagagagcagccaggaaa

SEQ ID NO: 814281 - RNA, 19 nt, Homo sapiens
  misc_RNA (1)...(19): siRNA sense strand
gcaugugggaagaccuuua

SEQ ID NO: 814282 - RNA, 19 nt, Homo sapiens
  misc_RNA (1)...(19): siRNA sense strand
agagaagcccuaugaaugu

SEQ ID NO: 814283 - RNA, 19 nt, Homo sapiens
  misc_RNA (1)...(19): siRNA sense strand
auaugugacucaugugaaa

SEQ ID NO: 814284 - RNA, 19 nt, Homo sapiens
  misc_RNA (1)...(19): siRNA sense strand
aaaccagaagugaucuuua

SEQ ID NO: 814285 - RNA, 19 nt, Homo sapiens
  misc_RNA (1)...(19): siRNA sense strand
aaucuucugugacaauuca

SEQ ID NO: 814286 - RNA, 19 nt, Homo sapiens
  misc_RNA (1)...(19): siRNA sense strand
uuggagagaagucuuauaa

SEQ ID NO: 814287 - RNA, 19 nt, Homo sapiens
  misc_RNA (1)...(19): siRNA sense strand
cugaugaguuuaauguaug

SEQ ID NO: 814288 - RNA, 19 nt, Homo sapiens
  misc_RNA (1)...(19): siRNA sense strand
ggaaaaccuucugugaaaa

SEQ ID NO: 814289 - RNA, 19 nt, Homo sapiens
  misc_RNA (1)...(19): siRNA sense strand
cuaugaauguacugaaugu

SEQ ID NO: 814290 - RNA, 19 nt, Homo sapiens
  misc_RNA (1)...(19): siRNA sense strand
caacaucagagaacacaca

SEQ ID NO: 814291 - RNA, 19 nt, Homo sapiens
  misc_RNA (1)...(19): siRNA sense strand
gugaauauaaagugaguga

SEQ ID NO: 814292 - RNA, 19 nt, Homo sapiens
  misc_RNA (1)...(19): siRNA sense strand
cagcuuucauuauccauca

SEQ ID NO: 814293 - RNA, 19 nt, Homo sapiens
  misc_RNA (1)...(19): siRNA sense strand
uauaacgaauguggaagaa

SEQ ID NO: 814294 - RNA, 19 nt, Homo sapiens
  misc_RNA (1)...(19): siRNA sense strand
gaucucagucagccaaguu

SEQ ID NO: 814295 - RNA, 19 nt, Homo sapiens
  misc_RNA (1)...(19): siRNA sense strand
gagaugugauccuggaaaa

SEQ ID NO: 814296 - RNA, 19 nt, Homo sapiens
  misc_RNA (1)...(19): siRNA sense strand
guacaucaaagaacucaca

SEQ ID NO: 814297 - RNA, 19 nt, Homo sapiens
  misc_RNA (1)...(19): siRNA sense strand
ggaaauggagccguaugga

SEQ ID NO: 814298 - RNA, 19 nt, Homo sapiens
  misc_RNA (1)...(19): siRNA sense strand
ggaacaagugucauucaag

SEQ ID NO: 814299 - RNA, 19 nt, Homo sapiens
  misc_RNA (1)...(19): siRNA sense strand
ccaaacaucagagaauuca

SEQ ID NO: 814300 - RNA, 19 nt, Homo sapiens
  misc_RNA (1)...(19): siRNA sense strand
caaaccucauuguacauca

SEQ ID NO: 814301 - RNA, 19 nt, Homo sapiens
  misc_RNA (1)...(19): siRNA sense strand
gcuggacccugcucagaag

SEQ ID NO: 814302 - RNA, 19 nt, Homo sapiens
  misc_RNA (1)...(19): siRNA sense strand
gaagugaccuaacagcuuu

SEQ ID NO: 814303 - RNA, 19 nt, Homo sapiens
  misc_RNA (1)...(19): siRNA sense strand
gaacuucaaccuucuauaa

SEQ ID NO: 814304 - RNA, 19 nt, Homo sapiens
  misc_RNA (1)...(19): siRNA sense strand
aaacggacgucuauaauga

SEQ ID NO: 814305 - RNA, 19 nt, Homo sapiens
  misc_RNA (1)...(19): siRNA sense strand
uauaagugcugcaaguuua

SEQ ID NO: 814306 - RNA, 19 nt, Homo sapiens
  misc_RNA (1)...(19): siRNA sense strand
ggaagacaaugcuggcuaa

SEQ ID NO: 814307 - RNA, 19 nt, Homo sapiens
  misc_RNA (1)...(19): siRNA sense strand
aggaauagcuguuauaguu

SEQ ID NO: 814308 - RNA, 19 nt, Homo sapiens
  misc_RNA (1)...(19): siRNA sense strand
cagaacaggugaagaauau

SEQ ID NO: 814309 - RNA, 19 nt, Homo sapiens
  misc_RNA (1)...(19): siRNA sense strand
aaacaagcauugcaagaaa

SEQ ID NO: 814310 - RNA, 19 nt, Homo sapiens
  misc_RNA (1)...(19): siRNA sense strand
caaccuugcuaaccuuaua

SEQ ID NO: 814311 - RNA, 19 nt, Homo sapiens
  misc_RNA (1)...(19): siRNA sense strand
cgucagcccucaaacuuua

SEQ ID NO: 814312 - RNA, 19 nt, Homo sapiens
  misc_RNA (1)...(19): siRNA sense strand
ggaaguccauugacccaaa

SEQ ID NO: 814313 - RNA, 19 nt, Homo sapiens
  misc_RNA (1)...(19): siRNA sense strand
gaacaaggacuuuggagau

SEQ ID NO: 814314 - RNA, 19 nt, Homo sapiens
  misc_RNA (1)...(19): siRNA sense strand
ggaauagcuguuauaguua

SEQ ID NO: 814315 - RNA, 19 nt, Homo sapiens
  misc_RNA (1)...(19): siRNA sense strand
ccagugagaugagaaauau

SEQ ID NO: 814316 - RNA, 19 nt, Homo sapiens
  misc_RNA (1)...(19): siRNA sense strand
ggacaucuccagucagaaa

SEQ ID NO: 814317 - RNA, 19 nt, Homo sapiens
  misc_RNA (1)...(19): siRNA sense strand
gagaagaugcaaccaguuu

SEQ ID NO: 814318 - RNA, 19 nt, Homo sapiens
  misc_RNA (1)...(19): siRNA sense strand
gaugacagaguacuuguaa

SEQ ID NO: 814319 - RNA, 19 nt, Homo sapiens
  misc_RNA (1)...(19): siRNA sense strand
guaaugggugcaacuaaua

SEQ ID NO: 814320 - RNA, 19 nt, Homo sapiens
  misc_RNA (1)...(19): siRNA sense strand
gaauagcuguuauaguuac

SEQ ID NO: 814321 - RNA, 19 nt, Homo sapiens
  misc_RNA (1)...(19): siRNA sense strand
gcaccuaguuacagugguu

SEQ ID NO: 814322 - RNA, 19 nt, Homo sapiens
  misc_RNA (1)...(19): siRNA sense strand
ggagcaagcuguggaaugg

SEQ ID NO: 814323 - RNA, 19 nt, Homo sapiens
  misc_RNA (1)...(19): siRNA sense strand
gcacaacuugcuagaauga

SEQ ID NO: 814324 - RNA, 19 nt, Homo sapiens
  misc_RNA (1)...(19): siRNA sense strand
gaggagacaagacuacuuu

SEQ ID NO: 814325 - RNA, 19 nt, Homo sapiens
  misc_RNA (1)...(19): siRNA sense strand
gaacaggugaagaauaugu

SEQ ID NO: 814326 - RNA, 19 nt, Homo sapiens
  misc_RNA (1)...(19): siRNA sense strand
gaaagguauugaagaacug

SEQ ID NO: 814327 - RNA, 19 nt, Homo sapiens
  misc_RNA (1)...(19): siRNA sense strand
guacauacguuggaacaag

SEQ ID NO: 814328 - RNA, 19 nt, Homo sapiens
  misc_RNA (1)...(19): siRNA sense strand
gaaugcaaccuucuuuaau

SEQ ID NO: 814329 - RNA, 19 nt, Homo sapiens
  misc_RNA (1)...(19): siRNA sense strand
cgaaugcaaccuucuuuaa

SEQ ID NO: 814330 - RNA, 19 nt, Homo sapiens
  misc_RNA (1)...(19): siRNA sense strand
ggaagugaccuaacagcuu

SEQ ID NO: 814331 - RNA, 19 nt, Homo sapiens
  misc_RNA (1)...(19): siRNA sense strand
uaauauaagugcugcaagu

SEQ ID NO: 814332 - RNA, 19 nt, Homo sapiens
  misc_RNA (1)...(19): siRNA sense strand
gcuguggaaugguauaaga

SEQ ID NO: 814333 - RNA, 19 nt, Homo sapiens
  misc_RNA (1)...(19): siRNA sense strand
ugauauagcuggucaagac

SEQ ID NO: 814334 - RNA, 19 nt, Homo sapiens
  misc_RNA (1)...(19): siRNA sense strand
gcuagacgccuucaagcua

SEQ ID NO: 814335 - RNA, 19 nt, Homo sapiens
  misc_RNA (1)...(19): siRNA sense strand
cuagacgccuucaagcuaa

SEQ ID NO: 814336 - RNA, 19 nt, Homo sapiens
  misc_RNA (1)...(19): siRNA sense strand
uagaaugacugauggauac

SEQ ID NO: 814337 - RNA, 19 nt, Homo sapiens
  misc_RNA (1)...(19): siRNA sense strand
gaaaagaccccuuaacaca

SEQ ID NO: 814338 - RNA, 19 nt, Homo sapiens
  misc_RNA (1)...(19): siRNA sense strand
ggacgucuauaaugacagu

SEQ ID NO: 814339 - RNA, 19 nt, Homo sapiens
  misc_RNA (1)...(19): siRNA sense strand
guauaugugucuuuaccaa

SEQ ID NO: 814340 - RNA, 19 nt, Homo sapiens
  misc_RNA (1)...(19): siRNA sense strand
aaacaaggaaguccauuga

SEQ ID NO: 814341 - RNA, 19 nt, Homo sapiens
  misc_RNA (1)...(19): siRNA sense strand
acaaacaggccuucgagua

SEQ ID NO: 814342 - RNA, 19 nt, Homo sapiens
  misc_RNA (1)...(19): siRNA sense strand
ugacagaguacuuguaaug

SEQ ID NO: 814343 - RNA, 19 nt, Homo sapiens
  misc_RNA (1)...(19): siRNA sense strand
aacaaggacuuuggagaua

SEQ ID NO: 814344 - RNA, 19 nt, Homo sapiens
  misc_RNA (1)...(19): siRNA sense strand
caacuaauaggccacaaga

SEQ ID NO: 814345 - RNA, 19 nt, Homo sapiens
  misc_RNA (1)...(19): siRNA sense strand
agcggaaccuguacuauuu

SEQ ID NO: 814346 - RNA, 19 nt, Homo sapiens
  misc_RNA (1)...(19): siRNA sense strand
gcauugcaagaaauuguua

SEQ ID NO: 814347 - RNA, 19 nt, Homo sapiens
  misc_RNA (1)...(19): siRNA sense strand
ccagaacaggugaagaaua

SEQ ID NO: 814348 - RNA, 19 nt, Homo sapiens
  misc_RNA (1)...(19): siRNA sense strand
ucucaggcguuucaucaaa

SEQ ID NO: 814349 - RNA, 19 nt, Homo sapiens
  misc_RNA (1)...(19): siRNA sense strand
cacaaacggacgucuauaa

SEQ ID NO: 814350 - RNA, 19 nt, Homo sapiens
  misc_RNA (1)...(19): siRNA sense strand
caaacggacgucuauaaug

SEQ ID NO: 814351 - RNA, 19 nt, Homo sapiens
  misc_RNA (1)...(19): siRNA sense strand
ggagaugacagaguacuug

SEQ ID NO: 814352 - RNA, 19 nt, Homo sapiens
  misc_RNA (1)...(19): siRNA sense strand
ggacaaauaaaccuucuac

SEQ ID NO: 814353 - RNA, 19 nt, Homo sapiens
  misc_RNA (1)...(19): siRNA sense strand
uaacacacacuaguaauuc

SEQ ID NO: 814354 - RNA, 19 nt, Homo sapiens
  misc_RNA (1)...(19): siRNA sense strand
gaacagugugaaagagcua

SEQ ID NO: 814355 - RNA, 19 nt, Homo sapiens
  misc_RNA (1)...(19): siRNA sense strand
gguccuauccgagaacuaa

SEQ ID NO: 814356 - RNA, 19 nt, Homo sapiens
  misc_RNA (1)...(19): siRNA sense strand
cuacaacugcuacucguaa

SEQ ID NO: 814357 - RNA, 19 nt, Homo sapiens
  misc_RNA (1)...(19): siRNA sense strand
uaaugacaguacuaacuug

SEQ ID NO: 814358 - RNA, 19 nt, Homo sapiens
  misc_RNA (1)...(19): siRNA sense strand
ggaaugguauaagaaaggu

SEQ ID NO: 814359 - RNA, 19 nt, Homo sapiens
  misc_RNA (1)...(19): siRNA sense strand
gcuucgcgcugcugcguuu

SEQ ID NO: 814360 - RNA, 19 nt, Homo sapiens
  misc_RNA (1)...(19): siRNA sense strand
uguaaugggugcaacuaau

SEQ ID NO: 814361 - RNA, 19 nt, Homo sapiens
  misc_RNA (1)...(19): siRNA sense strand
gggagaaggagagaaauug

SEQ ID NO: 814362 - RNA, 19 nt, Homo sapiens
  misc_RNA (1)...(19): siRNA sense strand
aaggaccgcuuacaacuuc

SEQ ID NO: 814363 - RNA, 19 nt, Homo sapiens
  misc_RNA (1)...(19): siRNA sense strand
caccauagagcaccuaguu

SEQ ID NO: 814364 - RNA, 19 nt, Homo sapiens
  misc_RNA (1)...(19): siRNA sense strand
caaacaggccuucgaguac

SEQ ID NO: 814365 - RNA, 19 nt, Homo sapiens
  misc_RNA (1)...(19): siRNA sense strand
agacaaugcuggcuaaagc

SEQ ID NO: 814366 - RNA, 19 nt, Homo sapiens
  misc_RNA (1)...(19): siRNA sense strand
ucauaaggguacuccgaaa

SEQ ID NO: 814367 - RNA, 19 nt, Homo sapiens
  misc_RNA (1)...(19): siRNA sense strand
agaaagguauugaagaacu

SEQ ID NO: 814368 - RNA, 19 nt, Homo sapiens
  misc_RNA (1)...(19): siRNA sense strand
gagaugagaaauauucgau

SEQ ID NO: 814369 - RNA, 19 nt, Homo sapiens
  misc_RNA (1)...(19): siRNA sense strand
gccagugagaugagaaaua

SEQ ID NO: 814370 - RNA, 19 nt, Homo sapiens
  misc_RNA (1)...(19): siRNA sense strand
aaacaggccuucgaguaca

SEQ ID NO: 814371 - RNA, 19 nt, Homo sapiens
  misc_RNA (1)...(19): siRNA sense strand
uaaacaaggaaguccauug

SEQ ID NO: 814372 - RNA, 19 nt, Homo sapiens
  misc_RNA (1)...(19): siRNA sense strand
ugagaaagcaggacagaag

SEQ ID NO: 814373 - RNA, 19 nt, Homo sapiens
  misc_RNA (1)...(19): siRNA sense strand
gaaggagcaagcuguggaa

SEQ ID NO: 814374 - RNA, 19 nt, Homo sapiens
  misc_RNA (1)...(19): siRNA sense strand
caacugcuacucguaagaa

SEQ ID NO: 814375 - RNA, 19 nt, Homo sapiens
  misc_RNA (1)...(19): siRNA sense strand
cuagaaugacugauggaua

SEQ ID NO: 814376 - RNA, 19 nt, Homo sapiens
  misc_RNA (1)...(19): siRNA sense strand
uaacuuggcaugccgcaau

SEQ ID NO: 814377 - RNA, 19 nt, Homo sapiens
  misc_RNA (1)...(19): siRNA sense strand
ucgauuaucugacuucacu

SEQ ID NO: 814378 - RNA, 19 nt, Homo sapiens
  misc_RNA (1)...(19): siRNA sense strand
caagacuacuuuugcuuaa

SEQ ID NO: 814379 - RNA, 19 nt, Homo sapiens
  misc_RNA (1)...(19): siRNA sense strand
caaaugaggagacaagacu

SEQ ID NO: 814380 - RNA, 19 nt, Homo sapiens
  misc_RNA (1)...(19): siRNA sense strand
gauggauacucaggaagug

SEQ ID NO: 814381 - RNA, 19 nt, Homo sapiens
  misc_RNA (1)...(19): siRNA sense strand
caaggugaacagugugaaa

SEQ ID NO: 814382 - RNA, 19 nt, Homo sapiens
  misc_RNA (1)...(19): siRNA sense strand
gauuaucugacuucacuga

SEQ ID NO: 814383 - RNA, 19 nt, Homo sapiens
  misc_RNA (1)...(19): siRNA sense strand
aagcggaaccuguacuauu

SEQ ID NO: 814384 - RNA, 19 nt, Homo sapiens
  misc_RNA (1)...(19): siRNA sense strand
aaagaacuagcacaacuug

SEQ ID NO: 814385 - RNA, 19 nt, Homo sapiens
  misc_RNA (1)...(19): siRNA sense strand
uuaggaauguggacagcaa

SEQ ID NO: 814386 - RNA, 19 nt, Homo sapiens
  misc_RNA (1)...(19): siRNA sense strand
caaggaccgcuuacaacuu

SEQ ID NO: 814387 - RNA, 19 nt, Homo sapiens
  misc_RNA (1)...(19): siRNA sense strand
gguauaagaaagguauuga

SEQ ID NO: 814388 - RNA, 19 nt, Homo sapiens
  misc_RNA (1)...(19): siRNA sense strand
acggguauaugugucuuua

SEQ ID NO: 814389 - RNA, 19 nt, Homo sapiens
  misc_RNA (1)...(19): siRNA sense strand
ggccaaggaccgcuuacaa

SEQ ID NO: 814390 - RNA, 19 nt, Homo sapiens
  misc_RNA (1)...(19): siRNA sense strand
gucagaaaguggagcuguu

SEQ ID NO: 814391 - RNA, 19 nt, Homo sapiens
  misc_RNA (1)...(19): siRNA sense strand
gaauguggacagcaaccuu

SEQ ID NO: 814392 - RNA, 19 nt, Homo sapiens
  misc_RNA (1)...(19): siRNA sense strand
uuggagauaccacuguuua

SEQ ID NO: 814393 - RNA, 19 nt, Homo sapiens
  misc_RNA (1)...(19): siRNA sense strand
aaccagaacaggugaagaa

SEQ ID NO: 814394 - RNA, 19 nt, Homo sapiens
  misc_RNA (1)...(19): siRNA sense strand
agcaagcuguggaauggua

SEQ ID NO: 814395 - RNA, 19 nt, Homo sapiens
  misc_RNA (1)...(19): siRNA sense strand
ucgaaugcaaccuucuuua

SEQ ID NO: 814396 - RNA, 19 nt, Homo sapiens
  misc_RNA (1)...(19): siRNA sense strand
cuugcuaaccuuauaauga

SEQ ID NO: 814397 - RNA, 19 nt, Homo sapiens
  misc_RNA (1)...(19): siRNA sense strand
uagagcaccuaguuacagu

SEQ ID NO: 814398 - RNA, 19 nt, Homo sapiens
  misc_RNA (1)...(19): siRNA sense strand
caucaaacggguauaugug

SEQ ID NO: 814399 - RNA, 19 nt, Homo sapiens
  misc_RNA (1)...(19): siRNA sense strand
ugcuggagaugacagagua

SEQ ID NO: 814400 - RNA, 19 nt, Homo sapiens
  misc_RNA (1)...(19): siRNA sense strand
gaugcuaguagacgccuaa

SEQ ID NO: 814401 - RNA, 19 nt, Homo sapiens
  misc_RNA (1)...(19): siRNA sense strand
ggagaaggagagaaauugg

SEQ ID NO: 814402 - RNA, 19 nt, Homo sapiens
  misc_RNA (1)...(19): siRNA sense strand
caaagaagcuguccucaaa

SEQ ID NO: 814403 - RNA, 19 nt, Homo sapiens
  misc_RNA (1)...(19): siRNA sense strand
gaaaugugguugccaaauu

SEQ ID NO: 814404 - RNA, 19 nt, Homo sapiens
  misc_RNA (1)...(19): siRNA sense strand
ggaaauaagccuugaaauu

SEQ ID NO: 814405 - RNA, 19 nt, Homo sapiens
  misc_RNA (1)...(19): siRNA sense strand
ggacugcgguaccuaauuu

SEQ ID NO: 814406 - RNA, 19 nt, Homo sapiens
  misc_RNA (1)...(19): siRNA sense strand
gaaaaccacuguuccauua

SEQ ID NO: 814407 - RNA, 19 nt, Homo sapiens
  misc_RNA (1)...(19): siRNA sense strand
guacuagaccugaaauuua

SEQ ID NO: 814408 - RNA, 19 nt, Homo sapiens
  misc_RNA (1)...(19): siRNA sense strand
gcacaugcuucuuuauuug

SEQ ID NO: 814409 - RNA, 19 nt, Homo sapiens
  misc_RNA (1)...(19): siRNA sense strand
ggaauuccaugaacacuug

SEQ ID NO: 814410 - RNA, 19 nt, Homo sapiens
  misc_RNA (1)...(19): siRNA sense strand
gaauaugcaucuuugagaa

SEQ ID NO: 814411 - RNA, 19 nt, Homo sapiens
  misc_RNA (1)...(19): siRNA sense strand
gcaaaucaguucaguucaa

SEQ ID NO: 814412 - RNA, 19 nt, Homo sapiens
  misc_RNA (1)...(19): siRNA sense strand
gagcuuaaguucaaagaau

SEQ ID NO: 814413 - RNA, 19 nt, Homo sapiens
  misc_RNA (1)...(19): siRNA sense strand
cgaugaaacuggagaauga

SEQ ID NO: 814414 - RNA, 19 nt, Homo sapiens
  misc_RNA (1)...(19): siRNA sense strand
guaaagaacugucugaacu

SEQ ID NO: 814415 - RNA, 19 nt, Homo sapiens
  misc_RNA (1)...(19): siRNA sense strand
gaagaaauccagggaauau

SEQ ID NO: 814416 - RNA, 19 nt, Homo sapiens
  misc_RNA (1)...(19): siRNA sense strand
guagauaaccuuggacaua

SEQ ID NO: 814417 - RNA, 19 nt, Homo sapiens
  misc_RNA (1)...(19): siRNA sense strand
ggaagaauuuauugagguu

SEQ ID NO: 814418 - RNA, 19 nt, Homo sapiens
  misc_RNA (1)...(19): siRNA sense strand
ggacauauaacucugugua

SEQ ID NO: 814419 - RNA, 19 nt, Homo sapiens
  misc_RNA (1)...(19): siRNA sense strand
gaaaguagccaagauaaca

SEQ ID NO: 814420 - RNA, 19 nt, Homo sapiens
  misc_RNA (1)...(19): siRNA sense strand
uaacaugaauccucaagau

SEQ ID NO: 814421 - RNA, 19 nt, Homo sapiens
  misc_RNA (1)...(19): siRNA sense strand
guaaugcugugcaauguau

SEQ ID NO: 814422 - RNA, 19 nt, Homo sapiens
  misc_RNA (1)...(19): siRNA sense strand
ucaccugacuguuauauau

SEQ ID NO: 814423 - RNA, 19 nt, Homo sapiens
  misc_RNA (1)...(19): siRNA sense strand
guaccgaggucacaaagga

SEQ ID NO: 814424 - RNA, 19 nt, Homo sapiens
  misc_RNA (1)...(19): siRNA sense strand
gaacggaaacuguggcuau

SEQ ID NO: 814425 - RNA, 19 nt, Homo sapiens
  misc_RNA (1)...(19): siRNA sense strand
gagacaagcucuauacaac

SEQ ID NO: 814426 - RNA, 19 nt, Homo sapiens
  misc_RNA (1)...(19): siRNA sense strand
aagaaggucugucaggaua

SEQ ID NO: 814427 - RNA, 19 nt, Homo sapiens
  misc_RNA (1)...(19): siRNA sense strand
caaaucaguucaguucaaa

SEQ ID NO: 814428 - RNA, 19 nt, Homo sapiens
  misc_RNA (1)...(19): siRNA sense strand
ggacaaugaaccuguaauu

SEQ ID NO: 814429 - RNA, 19 nt, Homo sapiens
  misc_RNA (1)...(19): siRNA sense strand
uagacggguucacuaauua

SEQ ID NO: 814430 - RNA, 19 nt, Homo sapiens
  misc_RNA (1)...(19): siRNA sense strand
caaggaagguuugaaggaa

SEQ ID NO: 814431 - RNA, 19 nt, Homo sapiens
  misc_RNA (1)...(19): siRNA sense strand
ugagaacacuguggauuaa

SEQ ID NO: 814432 - RNA, 19 nt, Homo sapiens
  misc_RNA (1)...(19): siRNA sense strand
guacacaauucccuuugaa

SEQ ID NO: 814433 - RNA, 19 nt, Homo sapiens
  misc_RNA (1)...(19): siRNA sense strand
aagccaagauugacauuaa

SEQ ID NO: 814434 - RNA, 19 nt, Homo sapiens
  misc_RNA (1)...(19): siRNA sense strand
gaucguacauugucagaag

SEQ ID NO: 814435 - RNA, 19 nt, Homo sapiens
  misc_RNA (1)...(19): siRNA sense strand
ccaauaaugugccugugaa

SEQ ID NO: 814436 - RNA, 19 nt, Homo sapiens
  misc_RNA (1)...(19): siRNA sense strand
cguaacaacuuaugacaug

SEQ ID NO: 814437 - RNA, 19 nt, Homo sapiens
  misc_RNA (1)...(19): siRNA sense strand
caauggagcugcagggaau

SEQ ID NO: 814438 - RNA, 19 nt, Homo sapiens
  misc_RNA (1)...(19): siRNA sense strand
gcagugucauugauauuau

SEQ ID NO: 814439 - RNA, 19 nt, Homo sapiens
  misc_RNA (1)...(19): siRNA sense strand
ccucuuaucuuguguuuag

SEQ ID NO: 814440 - RNA, 19 nt, Homo sapiens
  misc_RNA (1)...(19): siRNA sense strand
gggaagaaauccagggaau

SEQ ID NO: 814441 - RNA, 19 nt, Homo sapiens
  misc_RNA (1)...(19): siRNA sense strand
gaagucuguuccuuuaaug

SEQ ID NO: 814442 - RNA, 19 nt, Homo sapiens
  misc_RNA (1)...(19): siRNA sense strand
aaaugcagaugcuguauau

SEQ ID NO: 814443 - RNA, 19 nt, Homo sapiens
  misc_RNA (1)...(19): siRNA sense strand
gcaaacaucuggguuacag

SEQ ID NO: 814444 - RNA, 19 nt, Homo sapiens
  misc_RNA (1)...(19): siRNA sense strand
ggaagaaauccagggaaua

SEQ ID NO: 814445 - RNA, 19 nt, Homo sapiens
  misc_RNA (1)...(19): siRNA sense strand
ugccaaaggugauguggua

SEQ ID NO: 814446 - RNA, 19 nt, Homo sapiens
  misc_RNA (1)...(19): siRNA sense strand
gaacauggagcaacccaau

SEQ ID NO: 814447 - RNA, 19 nt, Homo sapiens
  misc_RNA (1)...(19): siRNA sense strand
aagaagcuguccucaaauu

SEQ ID NO: 814448 - RNA, 19 nt, Homo sapiens
  misc_RNA (1)...(19): siRNA sense strand
ggauauauucgagcucuua

SEQ ID NO: 814449 - RNA, 19 nt, Homo sapiens
  misc_RNA (1)...(19): siRNA sense strand
ggucacaaaggaagaauuu

SEQ ID NO: 814450 - RNA, 19 nt, Homo sapiens
  misc_RNA (1)...(19): siRNA sense strand
cgucauauauggagagaau

SEQ ID NO: 814451 - RNA, 19 nt, Homo sapiens
  misc_RNA (1)...(19): siRNA sense strand
ggaauaugcaucuuugaga

SEQ ID NO: 814452 - RNA, 19 nt, Homo sapiens
  misc_RNA (1)...(19): siRNA sense strand
caaaggaucaggugccaaa

SEQ ID NO: 814453 - RNA, 19 nt, Homo sapiens
  misc_RNA (1)...(19): siRNA sense strand
cgacaucacaggauauauu

SEQ ID NO: 814454 - RNA, 19 nt, Homo sapiens
  misc_RNA (1)...(19): siRNA sense strand
uagauaaccuuggacauau

SEQ ID NO: 814455 - RNA, 19 nt, Homo sapiens
  misc_RNA (1)...(19): siRNA sense strand
gcaaagaagcuguccucaa

SEQ ID NO: 814456 - RNA, 19 nt, Homo sapiens
  misc_RNA (1)...(19): siRNA sense strand
agcuuuaccuggaauauua

SEQ ID NO: 814457 - RNA, 19 nt, Homo sapiens
  misc_RNA (1)...(19): siRNA sense strand
ugaagaagaucguaacaac

SEQ ID NO: 814458 - RNA, 19 nt, Homo sapiens
  misc_RNA (1)...(19): siRNA sense strand
caagauaacaugaggacuu

SEQ ID NO: 814459 - RNA, 19 nt, Homo sapiens
  misc_RNA (1)...(19): siRNA sense strand
ggucucaccucaacuucuu

SEQ ID NO: 814460 - RNA, 19 nt, Homo sapiens
  misc_RNA (1)...(19): siRNA sense strand
aaaccacuguuccauuaaa

SEQ ID NO: 814461 - RNA, 19 nt, Homo sapiens
  misc_RNA (1)...(19): siRNA sense strand
gaaggucugucaggauaug

SEQ ID NO: 814462 - RNA, 19 nt, Homo sapiens
  misc_RNA (1)...(19): siRNA sense strand
gaggaaauaagccuugaaa

SEQ ID NO: 814463 - RNA, 19 nt, Homo sapiens
  misc_RNA (1)...(19): siRNA sense strand
ggagacaagcucuauacaa

SEQ ID NO: 814464 - RNA, 19 nt, Homo sapiens
  misc_RNA (1)...(19): siRNA sense strand
gaaauaugcuaagaaugag

SEQ ID NO: 814465 - RNA, 19 nt, Homo sapiens
  misc_RNA (1)...(19): siRNA sense strand
gacaagcucuauacaacau

SEQ ID NO: 814466 - RNA, 19 nt, Homo sapiens
  misc_RNA (1)...(19): siRNA sense strand
ugcgguaccuaauuucuua

SEQ ID NO: 814467 - RNA, 19 nt, Homo sapiens
  misc_RNA (1)...(19): siRNA sense strand
uggagaaccugaaacaaau

SEQ ID NO: 814468 - RNA, 19 nt, Homo sapiens
  misc_RNA (1)...(19): siRNA sense strand
agaagaucguaacaacuua

SEQ ID NO: 814469 - RNA, 19 nt, Homo sapiens
  misc_RNA (1)...(19): siRNA sense strand
gacaaugaaccuguaauuu

SEQ ID NO: 814470 - RNA, 19 nt, Homo sapiens
  misc_RNA (1)...(19): siRNA sense strand
guaccuaauuucuuaugga

SEQ ID NO: 814471 - RNA, 19 nt, Homo sapiens
  misc_RNA (1)...(19): siRNA sense strand
gcaauaaagaauuccuuga

SEQ ID NO: 814472 - RNA, 19 nt, Homo sapiens
  misc_RNA (1)...(19): siRNA sense strand
uggaugagguauucaagaa

SEQ ID NO: 814473 - RNA, 19 nt, Homo sapiens
  misc_RNA (1)...(19): siRNA sense strand
ucaaagaauuucagauguc

SEQ ID NO: 814474 - RNA, 19 nt, Homo sapiens
  misc_RNA (1)...(19): siRNA sense strand
ugaggaaucuuaucuacca

SEQ ID NO: 814475 - RNA, 19 nt, Homo sapiens
  misc_RNA (1)...(19): siRNA sense strand
caccaugaccucucagaua

SEQ ID NO: 814476 - RNA, 19 nt, Homo sapiens
  misc_RNA (1)...(19): siRNA sense strand
gauaaccuuggacauauaa

SEQ ID NO: 814477 - RNA, 19 nt, Homo sapiens
  misc_RNA (1)...(19): siRNA sense strand
aaaugugguugccaaauug

SEQ ID NO: 814478 - RNA, 19 nt, Homo sapiens
  misc_RNA (1)...(19): siRNA sense strand
agcaaccucugucucauua

SEQ ID NO: 814479 - RNA, 19 nt, Homo sapiens
  misc_RNA (1)...(19): siRNA sense strand
gaaggcagccauggaauuc

SEQ ID NO: 814480 - RNA, 19 nt, Homo sapiens
  misc_RNA (1)...(19): siRNA sense strand
ccacagaucugagagaaaa

SEQ ID NO: 814481 - RNA, 19 nt, Homo sapiens
  misc_RNA (1)...(19): siRNA sense strand
cagggaauaugcaucuuug

SEQ ID NO: 814482 - RNA, 19 nt, Homo sapiens
  misc_RNA (1)...(19): siRNA sense strand
gcuggaugaugacuacauu

SEQ ID NO: 814483 - RNA, 19 nt, Homo sapiens
  misc_RNA (1)...(19): siRNA sense strand
guucaaagaauuucagaug

SEQ ID NO: 814484 - RNA, 19 nt, Homo sapiens
  misc_RNA (1)...(19): siRNA sense strand
ggugggagccaucuaagaa

SEQ ID NO: 814485 - RNA, 19 nt, Homo sapiens
  misc_RNA (1)...(19): siRNA sense strand
gugaugugguagauccuua

SEQ ID NO: 814486 - RNA, 19 nt, Homo sapiens
  misc_RNA (1)...(19): siRNA sense strand
agauaaccuuggacauaua

SEQ ID NO: 814487 - RNA, 19 nt, Homo sapiens
  misc_RNA (1)...(19): siRNA sense strand
uggcauuucugaccggaua

SEQ ID NO: 814488 - RNA, 19 nt, Homo sapiens
  misc_RNA (1)...(19): siRNA sense strand
cguuucagguucagaagua

SEQ ID NO: 814489 - RNA, 19 nt, Homo sapiens
  misc_RNA (1)...(19): siRNA sense strand
auagacggguucacuaauu

SEQ ID NO: 814490 - RNA, 19 nt, Homo sapiens
  misc_RNA (1)...(19): siRNA sense strand
gcugugcaauguaucagaa

SEQ ID NO: 814491 - RNA, 19 nt, Homo sapiens
  misc_RNA (1)...(19): siRNA sense strand
gaagaugaaggagcagaaa

SEQ ID NO: 814492 - RNA, 19 nt, Homo sapiens
  misc_RNA (1)...(19): siRNA sense strand
gcagaugcuguauaugaaa

SEQ ID NO: 814493 - RNA, 19 nt, Homo sapiens
  misc_RNA (1)...(19): siRNA sense strand
ccucaacuucuucacauua

SEQ ID NO: 814494 - RNA, 19 nt, Homo sapiens
  misc_RNA (1)...(19): siRNA sense strand
gaugauggaccugaauauu

SEQ ID NO: 814495 - RNA, 19 nt, Homo sapiens
  misc_RNA (1)...(19): siRNA sense strand
gcacauauaaaugaggaaa

SEQ ID NO: 814496 - RNA, 19 nt, Homo sapiens
  misc_RNA (1)...(19): siRNA sense strand
ugcacaugcuucuuuauuu

SEQ ID NO: 814497 - RNA, 19 nt, Homo sapiens
  misc_RNA (1)...(19): siRNA sense strand
gguaaugguucagcacaug

SEQ ID NO: 814498 - RNA, 19 nt, Homo sapiens
  misc_RNA (1)...(19): siRNA sense strand
ucaguucaguucaaagaau

SEQ ID NO: 814499 - RNA, 19 nt, Homo sapiens
  misc_RNA (1)...(19): siRNA sense strand
gaagaucguaacaacuuau

SEQ ID NO: 814500 - RNA, 19 nt, Homo sapiens
  misc_RNA (1)...(19): siRNA sense strand
caaaggugaugugguagau

SEQ ID NO: 814501 - RNA, 19 nt, Homo sapiens
  misc_RNA (1)...(19): siRNA sense strand
caccaggacugaugaugga

SEQ ID NO: 814502 - RNA, 19 nt, Homo sapiens
  misc_RNA (1)...(19): siRNA sense strand
cgaaggaucucacagaaua

SEQ ID NO: 814503 - RNA, 19 nt, Homo sapiens
  misc_RNA (1)...(19): siRNA sense strand
gauaaacgguggcgaguaa

SEQ ID NO: 814504 - RNA, 19 nt, Homo sapiens
  misc_RNA (1)...(19): siRNA sense strand
gaacauguauuugaucuga

SEQ ID NO: 814505 - RNA, 19 nt, Homo sapiens
  misc_RNA (1)...(19): siRNA sense strand
ggaaggaaacccuauguua

SEQ ID NO: 814506 - RNA, 19 nt, Homo sapiens
  misc_RNA (1)...(19): siRNA sense strand
gaacagcauugacgacaaa

SEQ ID NO: 814507 - RNA, 19 nt, Homo sapiens
  misc_RNA (1)...(19): siRNA sense strand
ugaaagaucugcuaaugaa

SEQ ID NO: 814508 - RNA, 19 nt, Homo sapiens
  misc_RNA (1)...(19): siRNA sense strand
aaaggaagcugcagagaaa

SEQ ID NO: 814509 - RNA, 19 nt, Homo sapiens
  misc_RNA (1)...(19): siRNA sense strand
gcacgacaauguuuacuga

SEQ ID NO: 814510 - RNA, 19 nt, Homo sapiens
  misc_RNA (1)...(19): siRNA sense strand
gaagagcgauuagcuguug

SEQ ID NO: 814511 - RNA, 19 nt, Homo sapiens
  misc_RNA (1)...(19): siRNA sense strand
gcaauuaaacuucugguaa

SEQ ID NO: 814512 - RNA, 19 nt, Homo sapiens
  misc_RNA (1)...(19): siRNA sense strand
gaaauagcccggaaacuug

SEQ ID NO: 814513 - RNA, 19 nt, Homo sapiens
  misc_RNA (1)...(19): siRNA sense strand
gggaauacauuaagcagaa

SEQ ID NO: 814514 - RNA, 19 nt, Homo sapiens
  misc_RNA (1)...(19): siRNA sense strand
ggacaaacuucugcauauu

SEQ ID NO: 814515 - RNA, 19 nt, Homo sapiens
  misc_RNA (1)...(19): siRNA sense strand
gcagagaacaucaaguuaa

SEQ ID NO: 814516 - RNA, 19 nt, Homo sapiens
  misc_RNA (1)...(19): siRNA sense strand
uaacuguucugccauguuu

SEQ ID NO: 814517 - RNA, 19 nt, Homo sapiens
  misc_RNA (1)...(19): siRNA sense strand
uagcuuggguuaaaucaua

SEQ ID NO: 814518 - RNA, 19 nt, Homo sapiens
  misc_RNA (1)...(19): siRNA sense strand
caaauugacuuacaaaggu

SEQ ID NO: 814519 - RNA, 19 nt, Homo sapiens
  misc_RNA (1)...(19): siRNA sense strand
ugaagaagauggcagagaa

SEQ ID NO: 814520 - RNA, 19 nt, Homo sapiens
  misc_RNA (1)...(19): siRNA sense strand
ccacuagccuugcaucuug

SEQ ID NO: 814521 - RNA, 19 nt, Homo sapiens
  misc_RNA (1)...(19): siRNA sense strand
ggaagcagguaaugccaaa

SEQ ID NO: 814522 - RNA, 19 nt, Homo sapiens
  misc_RNA (1)...(19): siRNA sense strand
gacaagaguacuucuguua

SEQ ID NO: 814523 - RNA, 19 nt, Homo sapiens
  misc_RNA (1)...(19): siRNA sense strand
uaagugcacuagugaaauu

SEQ ID NO: 814524 - RNA, 19 nt, Homo sapiens
  misc_RNA (1)...(19): siRNA sense strand
gaaaggaagcugcagagaa

SEQ ID NO: 814525 - RNA, 19 nt, Homo sapiens
  misc_RNA (1)...(19): siRNA sense strand
ccauauacuucccaugaua

SEQ ID NO: 814526 - RNA, 19 nt, Homo sapiens
  misc_RNA (1)...(19): siRNA sense strand
ggaaagaacacuggauaaa

SEQ ID NO: 814527 - RNA, 19 nt, Homo sapiens
  misc_RNA (1)...(19): siRNA sense strand
gcgauuagcuguuguucga

SEQ ID NO: 814528 - RNA, 19 nt, Homo sapiens
  misc_RNA (1)...(19): siRNA sense strand
uuauugggcuccauucuua

SEQ ID NO: 814529 - RNA, 19 nt, Homo sapiens
  misc_RNA (1)...(19): siRNA sense strand
gagaaagucagcuggauaa

SEQ ID NO: 814530 - RNA, 19 nt, Homo sapiens
  misc_RNA (1)...(19): siRNA sense strand
gcaaagguacaggcaauua

SEQ ID NO: 814531 - RNA, 19 nt, Homo sapiens
  misc_RNA (1)...(19): siRNA sense strand
uaacaucugcuuugaauug

SEQ ID NO: 814532 - RNA, 19 nt, Homo sapiens
  misc_RNA (1)...(19): siRNA sense strand
gagacuggaagcaauauua

SEQ ID NO: 814533 - RNA, 19 nt, Homo sapiens
  misc_RNA (1)...(19): siRNA sense strand
gaaauacugucuucauggu

SEQ ID NO: 814534 - RNA, 19 nt, Homo sapiens
  misc_RNA (1)...(19): siRNA sense strand
gccaaagccugcuggagua

SEQ ID NO: 814535 - RNA, 19 nt, Homo sapiens
  misc_RNA (1)...(19): siRNA sense strand
guccacaguuuaauagaua

SEQ ID NO: 814536 - RNA, 19 nt, Homo sapiens
  misc_RNA (1)...(19): siRNA sense strand
gaaggaaacccuauguuag

SEQ ID NO: 814537 - RNA, 19 nt, Homo sapiens
  misc_RNA (1)...(19): siRNA sense strand
gaucaggacucagaagaug

SEQ ID NO: 814538 - RNA, 19 nt, Homo sapiens
  misc_RNA (1)...(19): siRNA sense strand
uaagguggcuguuggguau

SEQ ID NO: 814539 - RNA, 19 nt, Homo sapiens
  misc_RNA (1)...(19): siRNA sense strand
acaaagaguccacaguuua

SEQ ID NO: 814540 - RNA, 19 nt, Homo sapiens
  misc_RNA (1)...(19): siRNA sense strand
gcagauauuugcucagaag

SEQ ID NO: 814541 - RNA, 19 nt, Homo sapiens
  misc_RNA (1)...(19): siRNA sense strand
cagauacgaucgaccuuaa

SEQ ID NO: 814542 - RNA, 19 nt, Homo sapiens
  misc_RNA (1)...(19): siRNA sense strand
caaagaguccacaguuuaa

SEQ ID NO: 814543 - RNA, 19 nt, Homo sapiens
  misc_RNA (1)...(19): siRNA sense strand
ggaccuggccuuaguaaau

SEQ ID NO: 814544 - RNA, 19 nt, Homo sapiens
  misc_RNA (1)...(19): siRNA sense strand
uggcucagcuuuauaagaa

SEQ ID NO: 814545 - RNA, 19 nt, Homo sapiens
  misc_RNA (1)...(19): siRNA sense strand
gcgauuagcugcugguagu

SEQ ID NO: 814546 - RNA, 19 nt, Homo sapiens
  misc_RNA (1)...(19): siRNA sense strand
cacccaaacugcaagauuu

SEQ ID NO: 814547 - RNA, 19 nt, Homo sapiens
  misc_RNA (1)...(19): siRNA sense strand
ugcuauagauccucauuua

SEQ ID NO: 814548 - RNA, 19 nt, Homo sapiens
  misc_RNA (1)...(19): siRNA sense strand
gaucaacaauagccacaau

SEQ ID NO: 814549 - RNA, 19 nt, Homo sapiens
  misc_RNA (1)...(19): siRNA sense strand
gugaaaaccuuuauggaua

SEQ ID NO: 814550 - RNA, 19 nt, Homo sapiens
  misc_RNA (1)...(19): siRNA sense strand
ggucucaguuggaguuauu

SEQ ID NO: 814551 - RNA, 19 nt, Homo sapiens
  misc_RNA (1)...(19): siRNA sense strand
gaaauuugccagucauugu

SEQ ID NO: 814552 - RNA, 19 nt, Homo sapiens
  misc_RNA (1)...(19): siRNA sense strand
gaaccuuguuaccaugaaa

SEQ ID NO: 814553 - RNA, 19 nt, Homo sapiens
  misc_RNA (1)...(19): siRNA sense strand
gaaaaucuuugcucaguau

SEQ ID NO: 814554 - RNA, 19 nt, Homo sapiens
  misc_RNA (1)...(19): siRNA sense strand
caaaugcacaugcuagauu

SEQ ID NO: 814555 - RNA, 19 nt, Homo sapiens
  misc_RNA (1)...(19): siRNA sense strand
caauuaaacuucugguaag

SEQ ID NO: 814556 - RNA, 19 nt, Homo sapiens
  misc_RNA (1)...(19): siRNA sense strand
gacaaacuucugcauauuu

SEQ ID NO: 814557 - RNA, 19 nt, Homo sapiens
  misc_RNA (1)...(19): siRNA sense strand
cauauaacaucugcuuuga

SEQ ID NO: 814558 - RNA, 19 nt, Homo sapiens
  misc_RNA (1)...(19): siRNA sense strand
caaguaaggcagauauuug

SEQ ID NO: 814559 - RNA, 19 nt, Homo sapiens
  misc_RNA (1)...(19): siRNA sense strand
ggaucucacagaauauuua

SEQ ID NO: 814560 - RNA, 19 nt, Homo sapiens
  misc_RNA (1)...(19): siRNA sense strand
gagauuagaaagugugaaa

SEQ ID NO: 814561 - RNA, 19 nt, Homo sapiens
  misc_RNA (1)...(19): siRNA sense strand
aaagagcaaugauggagaa

SEQ ID NO: 814562 - RNA, 19 nt, Homo sapiens
  misc_RNA (1)...(19): siRNA sense strand
cauggaaggugauggaguu

SEQ ID NO: 814563 - RNA, 19 nt, Homo sapiens
  misc_RNA (1)...(19): siRNA sense strand
gcagagaauauccaacaaa

SEQ ID NO: 814564 - RNA, 19 nt, Homo sapiens
  misc_RNA (1)...(19): siRNA sense strand
ugaaaucuguaguagcaaa

SEQ ID NO: 814565 - RNA, 19 nt, Homo sapiens
  misc_RNA (1)...(19): siRNA sense strand
uacaaagaguccacaguuu

SEQ ID NO: 814566 - RNA, 19 nt, Homo sapiens
  misc_RNA (1)...(19): siRNA sense strand
caauagccaugccuuuaug

SEQ ID NO: 814567 - RNA, 19 nt, Homo sapiens
  misc_RNA (1)...(19): siRNA sense strand
ucugugcacuuguuauuaa

SEQ ID NO: 814568 - RNA, 19 nt, Homo sapiens
  misc_RNA (1)...(19): siRNA sense strand
aaagucagcuggauaaagg

SEQ ID NO: 814569 - RNA, 19 nt, Homo sapiens
  misc_RNA (1)...(19): siRNA sense strand
gagcaaugauggagaagag

SEQ ID NO: 814570 - RNA, 19 nt, Homo sapiens
  misc_RNA (1)...(19): siRNA sense strand
cugggaagaucaucaguaa

SEQ ID NO: 814571 - RNA, 19 nt, Homo sapiens
  misc_RNA (1)...(19): siRNA sense strand
ucacaccuguaaagaauau

SEQ ID NO: 814572 - RNA, 19 nt, Homo sapiens
  misc_RNA (1)...(19): siRNA sense strand
ggauauggaucaggacuca

SEQ ID NO: 814573 - RNA, 19 nt, Homo sapiens
  misc_RNA (1)...(19): siRNA sense strand
aaugaaaucuguaguagca

SEQ ID NO: 814574 - RNA, 19 nt, Homo sapiens
  misc_RNA (1)...(19): siRNA sense strand
ccaaugaaaucuguaguag

SEQ ID NO: 814575 - RNA, 19 nt, Homo sapiens
  misc_RNA (1)...(19): siRNA sense strand
ggucaaauuucuguuggaa

SEQ ID NO: 814576 - RNA, 19 nt, Homo sapiens
  misc_RNA (1)...(19): siRNA sense strand
gaagaucaucaguaaguga

SEQ ID NO: 814577 - RNA, 19 nt, Homo sapiens
  misc_RNA (1)...(19): siRNA sense strand
gagaauuuagcuuggguua

SEQ ID NO: 814578 - RNA, 19 nt, Homo sapiens
  misc_RNA (1)...(19): siRNA sense strand
ggaaagaaaagaacaguaa

SEQ ID NO: 814579 - RNA, 19 nt, Homo sapiens
  misc_RNA (1)...(19): siRNA sense strand
ugaugaguguuaccaagua

SEQ ID NO: 814580 - RNA, 19 nt, Homo sapiens
  misc_RNA (1)...(19): siRNA sense strand
caguaaaucugauaugucu

SEQ ID NO: 814581 - RNA, 19 nt, Homo sapiens
  misc_RNA (1)...(19): siRNA sense strand
caaagguacaggcaauuaa

SEQ ID NO: 814582 - RNA, 19 nt, Homo sapiens
  misc_RNA (1)...(19): siRNA sense strand
gaccuuaauucccauuuua

SEQ ID NO: 814583 - RNA, 19 nt, Homo sapiens
  misc_RNA (1)...(19): siRNA sense strand
caucagaggcuaacuguuc

SEQ ID NO: 814584 - RNA, 19 nt, Homo sapiens
  misc_RNA (1)...(19): siRNA sense strand
gaccuggccuuaguaaaug

SEQ ID NO: 814585 - RNA, 19 nt, Homo sapiens
  misc_RNA (1)...(19): siRNA sense strand
cuuggacgauuuaaugaua

SEQ ID NO: 814586 - RNA, 19 nt, Homo sapiens
  misc_RNA (1)...(19): siRNA sense strand
gggaagaucaucaguaagu

SEQ ID NO: 814587 - RNA, 19 nt, Homo sapiens
  misc_RNA (1)...(19): siRNA sense strand
ggacuucuguaacgauaag

SEQ ID NO: 814588 - RNA, 19 nt, Homo sapiens
  misc_RNA (1)...(19): siRNA sense strand
ccagaugaauccaagacaa

SEQ ID NO: 814589 - RNA, 19 nt, Homo sapiens
  misc_RNA (1)...(19): siRNA sense strand
gauacgaucgaccuuaauu

SEQ ID NO: 814590 - RNA, 19 nt, Homo sapiens
  misc_RNA (1)...(19): siRNA sense strand
caagagggaccuggccuua

SEQ ID NO: 814591 - RNA, 19 nt, Homo sapiens
  misc_RNA (1)...(19): siRNA sense strand
ggaaauuaauucugaucag

SEQ ID NO: 814592 - RNA, 19 nt, Homo sapiens
  misc_RNA (1)...(19): siRNA sense strand
gaaaaggacuucuguaacg

SEQ ID NO: 814593 - RNA, 19 nt, Homo sapiens
  misc_RNA (1)...(19): siRNA sense strand
gaaguuacugcucccauug

SEQ ID NO: 814594 - RNA, 19 nt, Homo sapiens
  misc_RNA (1)...(19): siRNA sense strand
gaagcugcuauucaaauuu

SEQ ID NO: 814595 - RNA, 19 nt, Homo sapiens
  misc_RNA (1)...(19): siRNA sense strand
agaagcugcuauucaaauu

SEQ ID NO: 814596 - RNA, 19 nt, Homo sapiens
  misc_RNA (1)...(19): siRNA sense strand
ggacagcagaugaugaaga

SEQ ID NO: 814597 - RNA, 19 nt, Homo sapiens
  misc_RNA (1)...(19): siRNA sense strand
gaaacagaagagagaauga

SEQ ID NO: 814598 - RNA, 19 nt, Homo sapiens
  misc_RNA (1)...(19): siRNA sense strand
caacuuauaacuccauuag

SEQ ID NO: 814599 - RNA, 19 nt, Homo sapiens
  misc_RNA (1)...(19): siRNA sense strand
caagaguacuucuguuaac

SEQ ID NO: 814600 - RNA, 19 nt, Homo sapiens
  misc_RNA (1)...(19): siRNA sense strand
ugaaguuacugcucccauu

SEQ ID NO: 814601 - RNA, 19 nt, Homo sapiens
  misc_RNA (1)...(19): siRNA sense strand
gugcacuuguuauuaauga

SEQ ID NO: 814602 - RNA, 19 nt, Homo sapiens
  misc_RNA (1)...(19): siRNA sense strand
caacaaggcagaagaaaua

SEQ ID NO: 814603 - RNA, 19 nt, Homo sapiens
  misc_RNA (1)...(19): siRNA sense strand
gaaaguggaugaauacaca

SEQ ID NO: 814604 - RNA, 19 nt, Homo sapiens
  misc_RNA (1)...(19): siRNA sense strand
agaaauagcugacaagauc

SEQ ID NO: 814605 - RNA, 19 nt, Homo sapiens
  misc_RNA (1)...(19): siRNA sense strand
cuacaacucucacuaugaa

SEQ ID NO: 814606 - RNA, 19 nt, Homo sapiens
  misc_RNA (1)...(19): siRNA sense strand
gaaacagugcccuaucuuu

SEQ ID NO: 814607 - RNA, 19 nt, Homo sapiens
  misc_RNA (1)...(19): siRNA sense strand
gcagauggccuacaacaca

SEQ ID NO: 814608 - RNA, 19 nt, Homo sapiens
  misc_RNA (1)...(19): siRNA sense strand
ccaucuaccugucaccuuu

SEQ ID NO: 814609 - RNA, 19 nt, Homo sapiens
  misc_RNA (1)...(19): siRNA sense strand
agaaggagcucaaguccau

SEQ ID NO: 814610 - RNA, 19 nt, Homo sapiens
  misc_RNA (1)...(19): siRNA sense strand
caaggucuccgacuauauu

SEQ ID NO: 814611 - RNA, 19 nt, Homo sapiens
  misc_RNA (1)...(19): siRNA sense strand
gaagaaauagcugacaaga

SEQ ID NO: 814612 - RNA, 19 nt, Homo sapiens
  misc_RNA (1)...(19): siRNA sense strand
cagaagaaauagcugacaa

SEQ ID NO: 814613 - RNA, 19 nt, Homo sapiens
  misc_RNA (1)...(19): siRNA sense strand
gggaggcacucagagcuaa

SEQ ID NO: 814614 - RNA, 19 nt, Homo sapiens
  misc_RNA (1)...(19): siRNA sense strand
gcaagaaggagcucaaguc

SEQ ID NO: 814615 - RNA, 19 nt, Homo sapiens
  misc_RNA (1)...(19): siRNA sense strand
gaguuuugcugaugacuua

SEQ ID NO: 814616 - RNA, 19 nt, Homo sapiens
  misc_RNA (1)...(19): siRNA sense strand
gagaagauggugucaaugg

SEQ ID NO: 814617 - RNA, 19 nt, Homo sapiens
  misc_RNA (1)...(19): siRNA sense strand
guacuguggucuccuugga

SEQ ID NO: 814618 - RNA, 19 nt, Homo sapiens
  misc_RNA (1)...(19): siRNA sense strand
acuauauucugcagcauaa

SEQ ID NO: 814619 - RNA, 19 nt, Homo sapiens
  misc_RNA (1)...(19): siRNA sense strand
ccaagacaauggcacaaag

SEQ ID NO: 814620 - RNA, 19 nt, Homo sapiens
  misc_RNA (1)...(19): siRNA sense strand
agagugcacugaugaguuc

SEQ ID NO: 814621 - RNA, 19 nt, Homo sapiens
  misc_RNA (1)...(19): siRNA sense strand
uaagaaaguggaugaauac

SEQ ID NO: 814622 - RNA, 19 nt, Homo sapiens
  misc_RNA (1)...(19): siRNA sense strand
ggaaacagugcccuaucuu

SEQ ID NO: 814623 - RNA, 19 nt, Homo sapiens
  misc_RNA (1)...(19): siRNA sense strand
ccacuacaacucucacuau

SEQ ID NO: 814624 - RNA, 19 nt, Homo sapiens
  misc_RNA (1)...(19): siRNA sense strand
aggagaagauggugucaau

SEQ ID NO: 814625 - RNA, 19 nt, Homo sapiens
  misc_RNA (1)...(19): siRNA sense strand
gcaggcauggugugguaua

SEQ ID NO: 814626 - RNA, 19 nt, Homo sapiens
  misc_RNA (1)...(19): siRNA sense strand
ggagaggucccugaaguca

SEQ ID NO: 814627 - RNA, 19 nt, Homo sapiens
  misc_RNA (1)...(19): siRNA sense strand
ccgacggucucuacaaguu

SEQ ID NO: 814628 - RNA, 19 nt, Homo sapiens
  misc_RNA (1)...(19): siRNA sense strand
cccagaugcugucagauga

SEQ ID NO: 814629 - RNA, 19 nt, Homo sapiens
  misc_RNA (1)...(19): siRNA sense strand
gacuauauucugcagcaua

SEQ ID NO: 814630 - RNA, 19 nt, Homo sapiens
  misc_RNA (1)...(19): siRNA sense strand
cugcaggcaugguguggua

SEQ ID NO: 814631 - RNA, 19 nt, Homo sapiens
  misc_RNA (1)...(19): siRNA sense strand
ugacaacaaggcagaagaa

SEQ ID NO: 814632 - RNA, 19 nt, Homo sapiens
  misc_RNA (1)...(19): siRNA sense strand
uacaauggguacacaagug

SEQ ID NO: 814633 - RNA, 19 nt, Homo sapiens
  misc_RNA (1)...(19): siRNA sense strand
uuuauacccucauccaaga

SEQ ID NO: 814634 - RNA, 19 nt, Homo sapiens
  misc_RNA (1)...(19): siRNA sense strand
ccaguacuguggucuccuu

SEQ ID NO: 814635 - RNA, 19 nt, Homo sapiens
  misc_RNA (1)...(19): siRNA sense strand
gaccucagcgccuuugaug

SEQ ID NO: 814636 - RNA, 19 nt, Homo sapiens
  misc_RNA (1)...(19): siRNA sense strand
gacggucucuacaaguuca

SEQ ID NO: 814637 - RNA, 19 nt, Homo sapiens
  misc_RNA (1)...(19): siRNA sense strand
gcccagaugcugucagaug

SEQ ID NO: 814638 - RNA, 19 nt, Homo sapiens
  misc_RNA (1)...(19): siRNA sense strand
ccuguccacugguagauga

SEQ ID NO: 814639 - RNA, 19 nt, Homo sapiens
  misc_RNA (1)...(19): siRNA sense strand
cuucaagagugcacugaug

SEQ ID NO: 814640 - RNA, 19 nt, Homo sapiens
  misc_RNA (1)...(19): siRNA sense strand
ggaaggcccaccugauucu

SEQ ID NO: 814641 - RNA, 19 nt, Homo sapiens
  misc_RNA (1)...(19): siRNA sense strand
gacggccuguccacuggua

SEQ ID NO: 814642 - RNA, 19 nt, Homo sapiens
  misc_RNA (1)...(19): siRNA sense strand
gaaaggggaugugaucgau

SEQ ID NO: 814643 - RNA, 19 nt, Homo sapiens
  misc_RNA (1)...(19): siRNA sense strand
guguggagauucgcuguga

SEQ ID NO: 814644 - RNA, 19 nt, Homo sapiens
  misc_RNA (1)...(19): siRNA sense strand
gauguucagccagcuauug

SEQ ID NO: 814645 - RNA, 19 nt, Homo sapiens
  misc_RNA (1)...(19): siRNA sense strand
uggaaacagugcccuaucu

SEQ ID NO: 814646 - RNA, 19 nt, Homo sapiens
  misc_RNA (1)...(19): siRNA sense strand
cacuacaacucucacuaug

SEQ ID NO: 814647 - RNA, 19 nt, Homo sapiens
  misc_RNA (1)...(19): siRNA sense strand
gcccgacggucucuacaag

SEQ ID NO: 814648 - RNA, 19 nt, Homo sapiens
  misc_RNA (1)...(19): siRNA sense strand
cauuucagguguggagauu

SEQ ID NO: 814649 - RNA, 19 nt, Homo sapiens
  misc_RNA (1)...(19): siRNA sense strand
ggcauggugugguauagca

SEQ ID NO: 814650 - RNA, 19 nt, Homo sapiens
  misc_RNA (1)...(19): siRNA sense strand
ucaaguccaugcccuucau

SEQ ID NO: 814651 - RNA, 19 nt, Homo sapiens
  misc_RNA (1)...(19): siRNA sense strand
accaaggucuccgacuaua

SEQ ID NO: 814652 - RNA, 19 nt, Homo sapiens
  misc_RNA (1)...(19): siRNA sense strand
aaacagugcccuaucuuuu

SEQ ID NO: 814653 - RNA, 19 nt, Homo sapiens
  misc_RNA (1)...(19): siRNA sense strand
caaguucacucuguaugcu

SEQ ID NO: 814654 - RNA, 19 nt, Homo sapiens
  misc_RNA (1)...(19): siRNA sense strand
ggagaauuccugaguuuug

SEQ ID NO: 814655 - RNA, 19 nt, Homo sapiens
  misc_RNA (1)...(19): siRNA sense strand
uggaguggguggauguuca

SEQ ID NO: 814656 - RNA, 19 nt, Homo sapiens
  misc_RNA (1)...(19): siRNA sense strand
acugguagaugacaacaag

SEQ ID NO: 814657 - RNA, 19 nt, Homo sapiens
  misc_RNA (1)...(19): siRNA sense strand
cauaagaaaguggaugaau

SEQ ID NO: 814658 - RNA, 19 nt, Homo sapiens
  misc_RNA (1)...(19): siRNA sense strand
gaaggcccaccugauucua

SEQ ID NO: 814659 - RNA, 19 nt, Homo sapiens
  misc_RNA (1)...(19): siRNA sense strand
gcagcaagaaggagcucaa

SEQ ID NO: 814660 - RNA, 19 nt, Homo sapiens
  misc_RNA (1)...(19): siRNA sense strand
gacaacaaggcagaagaaa

SEQ ID NO: 814661 - RNA, 19 nt, Homo sapiens
  misc_RNA (1)...(19): siRNA sense strand
uaucuacucagucaucuuc

SEQ ID NO: 814662 - RNA, 19 nt, Homo sapiens
  misc_RNA (1)...(19): siRNA sense strand
guggaugaauacacagaca

SEQ ID NO: 814663 - RNA, 19 nt, Homo sapiens
  misc_RNA (1)...(19): siRNA sense strand
uagcugacaagaucuacaa

SEQ ID NO: 814664 - RNA, 19 nt, Homo sapiens
  misc_RNA (1)...(19): siRNA sense strand
gaaauagcugacaagaucu

SEQ ID NO: 814665 - RNA, 19 nt, Homo sapiens
  misc_RNA (1)...(19): siRNA sense strand
gugcacugaugaguuccua

SEQ ID NO: 814666 - RNA, 19 nt, Homo sapiens
  misc_RNA (1)...(19): siRNA sense strand
gcacugaugaguuccuacu

SEQ ID NO: 814667 - RNA, 19 nt, Homo sapiens
  misc_RNA (1)...(19): siRNA sense strand
uauauucugcagcauaaga

SEQ ID NO: 814668 - RNA, 19 nt, Homo sapiens
  misc_RNA (1)...(19): siRNA sense strand
cagcagauggccuacaaca

SEQ ID NO: 814669 - RNA, 19 nt, Homo sapiens
  misc_RNA (1)...(19): siRNA sense strand
cuucaucaccuaccucuca

SEQ ID NO: 814670 - RNA, 19 nt, Homo sapiens
  misc_RNA (1)...(19): siRNA sense strand
ccaaggucuccgacuauau

SEQ ID NO: 814671 - RNA, 19 nt, Homo sapiens
  misc_RNA (1)...(19): siRNA sense strand
aaauagcugacaagaucua

SEQ ID NO: 814672 - RNA, 19 nt, Homo sapiens
  misc_RNA (1)...(19): siRNA sense strand
acaacaaggcagaagaaau

SEQ ID NO: 814673 - RNA, 19 nt, Homo sapiens
  misc_RNA (1)...(19): siRNA sense strand
gcauaagaaaguggaugaa

SEQ ID NO: 814674 - RNA, 19 nt, Homo sapiens
  misc_RNA (1)...(19): siRNA sense strand
cuacuggugcucagggaaa

SEQ ID NO: 814675 - RNA, 19 nt, Homo sapiens
  misc_RNA (1)...(19): siRNA sense strand
gcagaagaaauagcugaca

SEQ ID NO: 814676 - RNA, 19 nt, Homo sapiens
  misc_RNA (1)...(19): siRNA sense strand
acucagucaucuucaagug

SEQ ID NO: 814677 - RNA, 19 nt, Homo sapiens
  misc_RNA (1)...(19): siRNA sense strand
gaguccagcaccacuacaa

SEQ ID NO: 814678 - RNA, 19 nt, Homo sapiens
  misc_RNA (1)...(19): siRNA sense strand
caaggcagaagaaauagcu

SEQ ID NO: 814679 - RNA, 19 nt, Homo sapiens
  misc_RNA (1)...(19): siRNA sense strand
ggagaagauggugucaaug

SEQ ID NO: 814680 - RNA, 19 nt, Homo sapiens
  misc_RNA (1)...(19): siRNA sense strand
agcagcagauggccuacaa

SEQ ID NO: 814681 - RNA, 19 nt, Homo sapiens
  misc_RNA (1)...(19): siRNA sense strand
gcugacaagaucuacaauc

SEQ ID NO: 814682 - RNA, 19 nt, Homo sapiens
  misc_RNA (1)...(19): siRNA sense strand
caagagugcacugaugagu

SEQ ID NO: 814683 - RNA, 19 nt, Homo sapiens
  misc_RNA (1)...(19): siRNA sense strand
guggaaaggagcagcagau

SEQ ID NO: 814684 - RNA, 19 nt, Homo sapiens
  misc_RNA (1)...(19): siRNA sense strand
ccaugcccuucaucaccua

SEQ ID NO: 814685 - RNA, 19 nt, Homo sapiens
  misc_RNA (1)...(19): siRNA sense strand
ucuacucagucaucuucaa

SEQ ID NO: 814686 - RNA, 19 nt, Homo sapiens
  misc_RNA (1)...(19): siRNA sense strand
auggagaggucccugaagu

SEQ ID NO: 814687 - RNA, 19 nt, Homo sapiens
  misc_RNA (1)...(19): siRNA sense strand
caacaaggcagaagaaaua

SEQ ID NO: 814688 - RNA, 19 nt, Homo sapiens
  misc_RNA (1)...(19): siRNA sense strand
gaaaguggaugaauacaca

SEQ ID NO: 814689 - RNA, 19 nt, Homo sapiens
  misc_RNA (1)...(19): siRNA sense strand
agaaauagcugacaagauc

SEQ ID NO: 814690 - RNA, 19 nt, Homo sapiens
  misc_RNA (1)...(19): siRNA sense strand
cuacaacucucacuaugaa

SEQ ID NO: 814691 - RNA, 19 nt, Homo sapiens
  misc_RNA (1)...(19): siRNA sense strand
gaaacagugcccuaucuuu

SEQ ID NO: 814692 - RNA, 19 nt, Homo sapiens
  misc_RNA (1)...(19): siRNA sense strand
gcagauggccuacaacaca

SEQ ID NO: 814693 - RNA, 19 nt, Homo sapiens
  misc_RNA (1)...(19): siRNA sense strand
ccaucuaccugucaccuuu

SEQ ID NO: 814694 - RNA, 19 nt, Homo sapiens
  misc_RNA (1)...(19): siRNA sense strand
agaaggagcucaaguccau

SEQ ID NO: 814695 - RNA, 19 nt, Homo sapiens
  misc_RNA (1)...(19): siRNA sense strand
caaggucuccgacuauauu

SEQ ID NO: 814696 - RNA, 19 nt, Homo sapiens
  misc_RNA (1)...(19): siRNA sense strand
gaagaaauagcugacaaga

SEQ ID NO: 814697 - RNA, 19 nt, Homo sapiens
  misc_RNA (1)...(19): siRNA sense strand
cagaagaaauagcugacaa

SEQ ID NO: 814698 - RNA, 19 nt, Homo sapiens
  misc_RNA (1)...(19): siRNA sense strand
gggaggcacucagagcuaa

SEQ ID NO: 814699 - RNA, 19 nt, Homo sapiens
  misc_RNA (1)...(19): siRNA sense strand
gcaagaaggagcucaaguc

SEQ ID NO: 814700 - RNA, 19 nt, Homo sapiens
  misc_RNA (1)...(19): siRNA sense strand
gaguuuugcugaugacuua

SEQ ID NO: 814701 - RNA, 19 nt, Homo sapiens
  misc_RNA (1)...(19): siRNA sense strand
gagaagauggugucaaugg

SEQ ID NO: 814702 - RNA, 19 nt, Homo sapiens
  misc_RNA (1)...(19): siRNA sense strand
guacuguggucuccuugga

SEQ ID NO: 814703 - RNA, 19 nt, Homo sapiens
  misc_RNA (1)...(19): siRNA sense strand
acuauauucugcagcauaa

SEQ ID NO: 814704 - RNA, 19 nt, Homo sapiens
  misc_RNA (1)...(19): siRNA sense strand
ccaagacaauggcacaaag

SEQ ID NO: 814705 - RNA, 19 nt, Homo sapiens
  misc_RNA (1)...(19): siRNA sense strand
agagugcacugaugaguuc

SEQ ID NO: 814706 - RNA, 19 nt, Homo sapiens
  misc_RNA (1)...(19): siRNA sense strand
uaagaaaguggaugaauac

SEQ ID NO: 814707 - RNA, 19 nt, Homo sapiens
  misc_RNA (1)...(19): siRNA sense strand
ggaaacagugcccuaucuu

SEQ ID NO: 814708 - RNA, 19 nt, Homo sapiens
  misc_RNA (1)...(19): siRNA sense strand
ccacuacaacucucacuau

SEQ ID NO: 814709 - RNA, 19 nt, Homo sapiens
  misc_RNA (1)...(19): siRNA sense strand
aggagaagauggugucaau

SEQ ID NO: 814710 - RNA, 19 nt, Homo sapiens
  misc_RNA (1)...(19): siRNA sense strand
gcaggcauggugugguaua

SEQ ID NO: 814711 - RNA, 19 nt, Homo sapiens
  misc_RNA (1)...(19): siRNA sense strand
ggagaggucccugaaguca

SEQ ID NO: 814712 - RNA, 19 nt, Homo sapiens
  misc_RNA (1)...(19): siRNA sense strand
ccgacggucucuacaaguu

SEQ ID NO: 814713 - RNA, 19 nt, Homo sapiens
  misc_RNA (1)...(19): siRNA sense strand
cccagaugcugucagauga

SEQ ID NO: 814714 - RNA, 19 nt, Homo sapiens
  misc_RNA (1)...(19): siRNA sense strand
gacuauauucugcagcaua

SEQ ID NO: 814715 - RNA, 19 nt, Homo sapiens
  misc_RNA (1)...(19): siRNA sense strand
cugcaggcaugguguggua

SEQ ID NO: 814716 - RNA, 19 nt, Homo sapiens
  misc_RNA (1)...(19): siRNA sense strand
ugacaacaaggcagaagaa

SEQ ID NO: 814717 - RNA, 19 nt, Homo sapiens
  misc_RNA (1)...(19): siRNA sense strand
uacaauggguacacaagug

SEQ ID NO: 814718 - RNA, 19 nt, Homo sapiens
  misc_RNA (1)...(19): siRNA sense strand
uuuauacccucauccaaga

SEQ ID NO: 814719 - RNA, 19 nt, Homo sapiens
  misc_RNA (1)...(19): siRNA sense strand
ccaguacuguggucuccuu

SEQ ID NO: 814720 - RNA, 19 nt, Homo sapiens
  misc_RNA (1)...(19): siRNA sense strand
gaccucagcgccuuugaug

SEQ ID NO: 814721 - RNA, 19 nt, Homo sapiens
  misc_RNA (1)...(19): siRNA sense strand
gacggucucuacaaguuca

SEQ ID NO: 814722 - RNA, 19 nt, Homo sapiens
  misc_RNA (1)...(19): siRNA sense strand
gcccagaugcugucagaug

SEQ ID NO: 814723 - RNA, 19 nt, Homo sapiens
  misc_RNA (1)...(19): siRNA sense strand
ccuguccacugguagauga

SEQ ID NO: 814724 - RNA, 19 nt, Homo sapiens
  misc_RNA (1)...(19): siRNA sense strand
cuucaagagugcacugaug

SEQ ID NO: 814725 - RNA, 19 nt, Homo sapiens
  misc_RNA (1)...(19): siRNA sense strand
ggaaggcccaccugauucu

SEQ ID NO: 814726 - RNA, 19 nt, Homo sapiens
  misc_RNA (1)...(19): siRNA sense strand
gacggccuguccacuggua

SEQ ID NO: 814727 - RNA, 19 nt, Homo sapiens
  misc_RNA (1)...(19): siRNA sense strand
gaaaggggaugugaucgau

SEQ ID NO: 814728 - RNA, 19 nt, Homo sapiens
  misc_RNA (1)...(19): siRNA sense strand
guguggagauucgcuguga

SEQ ID NO: 814729 - RNA, 19 nt, Homo sapiens
  misc_RNA (1)...(19): siRNA sense strand
gauguucagccagcuauug

SEQ ID NO: 814730 - RNA, 19 nt, Homo sapiens
  misc_RNA (1)...(19): siRNA sense strand
uggaaacagugcccuaucu

SEQ ID NO: 814731 - RNA, 19 nt, Homo sapiens
  misc_RNA (1)...(19): siRNA sense strand
cacuacaacucucacuaug

SEQ ID NO: 814732 - RNA, 19 nt, Homo sapiens
  misc_RNA (1)...(19): siRNA sense strand
gcccgacggucucuacaag

SEQ ID NO: 814733 - RNA, 19 nt, Homo sapiens
  misc_RNA (1)...(19): siRNA sense strand
cauuucagguguggagauu

SEQ ID NO: 814734 - RNA, 19 nt, Homo sapiens
  misc_RNA (1)...(19): siRNA sense strand
ggcauggugugguauagca

SEQ ID NO: 814735 - RNA, 19 nt, Homo sapiens
  misc_RNA (1)...(19): siRNA sense strand
ucaaguccaugcccuucau

SEQ ID NO: 814736 - RNA, 19 nt, Homo sapiens
  misc_RNA (1)...(19): siRNA sense strand
accaaggucuccgacuaua

SEQ ID NO: 814737 - RNA, 19 nt, Homo sapiens
  misc_RNA (1)...(19): siRNA sense strand
aaacagugcccuaucuuuu

SEQ ID NO: 814738 - RNA, 19 nt, Homo sapiens
  misc_RNA (1)...(19): siRNA sense strand
caaguucacucuguaugcu

SEQ ID NO: 814739 - RNA, 19 nt, Homo sapiens
  misc_RNA (1)...(19): siRNA sense strand
ggagaauuccugaguuuug

SEQ ID NO: 814740 - RNA, 19 nt, Homo sapiens
  misc_RNA (1)...(19): siRNA sense strand
uggaguggguggauguuca

SEQ ID NO: 814741 - RNA, 19 nt, Homo sapiens
  misc_RNA (1)...(19): siRNA sense strand
acugguagaugacaacaag

SEQ ID NO: 814742 - RNA, 19 nt, Homo sapiens
  misc_RNA (1)...(19): siRNA sense strand
cauaagaaaguggaugaau

SEQ ID NO: 814743 - RNA, 19 nt, Homo sapiens
  misc_RNA (1)...(19): siRNA sense strand
gaaggcccaccugauucua

SEQ ID NO: 814744 - RNA, 19 nt, Homo sapiens
  misc_RNA (1)...(19): siRNA sense strand
gcagcaagaaggagcucaa

SEQ ID NO: 814745 - RNA, 19 nt, Homo sapiens
  misc_RNA (1)...(19): siRNA sense strand
gacaacaaggcagaagaaa

SEQ ID NO: 814746 - RNA, 19 nt, Homo sapiens
  misc_RNA (1)...(19): siRNA sense strand
uaucuacucagucaucuuc

SEQ ID NO: 814747 - RNA, 19 nt, Homo sapiens
  misc_RNA (1)...(19): siRNA sense strand
guggaugaauacacagaca

SEQ ID NO: 814748 - RNA, 19 nt, Homo sapiens
  misc_RNA (1)...(19): siRNA sense strand
uagcugacaagaucuacaa

SEQ ID NO: 814749 - RNA, 19 nt, Homo sapiens
  misc_RNA (1)...(19): siRNA sense strand
gaaauagcugacaagaucu

SEQ ID NO: 814750 - RNA, 19 nt, Homo sapiens
  misc_RNA (1)...(19): siRNA sense strand
gugcacugaugaguuccua

SEQ ID NO: 814751 - RNA, 19 nt, Homo sapiens
  misc_RNA (1)...(19): siRNA sense strand
gcacugaugaguuccuacu

SEQ ID NO: 814752 - RNA, 19 nt, Homo sapiens
  misc_RNA (1)...(19): siRNA sense strand
uauauucugcagcauaaga

SEQ ID NO: 814753 - RNA, 19 nt, Homo sapiens
  misc_RNA (1)...(19): siRNA sense strand
cagcagauggccuacaaca

SEQ ID NO: 814754 - RNA, 19 nt, Homo sapiens
  misc_RNA (1)...(19): siRNA sense strand
cuucaucaccuaccucuca

SEQ ID NO: 814755 - RNA, 19 nt, Homo sapiens
  misc_RNA (1)...(19): siRNA sense strand
ccaaggucuccgacuauau

SEQ ID NO: 814756 - RNA, 19 nt, Homo sapiens
  misc_RNA (1)...(19): siRNA sense strand
aaauagcugacaagaucua

SEQ ID NO: 814757 - RNA, 19 nt, Homo sapiens
  misc_RNA (1)...(19): siRNA sense strand
acaacaaggcagaagaaau

SEQ ID NO: 814758 - RNA, 19 nt, Homo sapiens
  misc_RNA (1)...(19): siRNA sense strand
gcauaagaaaguggaugaa

SEQ ID NO: 814759 - RNA, 19 nt, Homo sapiens
  misc_RNA (1)...(19): siRNA sense strand
cuacuggugcucagggaaa

SEQ ID NO: 814760 - RNA, 19 nt, Homo sapiens
  misc_RNA (1)...(19): siRNA sense strand
gcagaagaaauagcugaca

SEQ ID NO: 814761 - RNA, 19 nt, Homo sapiens
  misc_RNA (1)...(19): siRNA sense strand
acucagucaucuucaagug

SEQ ID NO: 814762 - RNA, 19 nt, Homo sapiens
  misc_RNA (1)...(19): siRNA sense strand
gaguccagcaccacuacaa

SEQ ID NO: 814763 - RNA, 19 nt, Homo sapiens
  misc_RNA (1)...(19): siRNA sense strand
caaggcagaagaaauagcu

SEQ ID NO: 814764 - RNA, 19 nt, Homo sapiens
  misc_RNA (1)...(19): siRNA sense strand
ggagaagauggugucaaug

SEQ ID NO: 814765 - RNA, 19 nt, Homo sapiens
  misc_RNA (1)...(19): siRNA sense strand
agcagcagauggccuacaa

SEQ ID NO: 814766 - RNA, 19 nt, Homo sapiens
  misc_RNA (1)...(19): siRNA sense strand
gcugacaagaucuacaauc

SEQ ID NO: 814767 - RNA, 19 nt, Homo sapiens
  misc_RNA (1)...(19): siRNA sense strand
caagagugcacugaugagu

SEQ ID NO: 814768 - RNA, 19 nt, Homo sapiens
  misc_RNA (1)...(19): siRNA sense strand
guggaaaggagcagcagau

SEQ ID NO: 814769 - RNA, 19 nt, Homo sapiens
  misc_RNA (1)...(19): siRNA sense strand
ccaugcccuucaucaccua

SEQ ID NO: 814770 - RNA, 19 nt, Homo sapiens
  misc_RNA (1)...(19): siRNA sense strand
ucuacucagucaucuucaa

SEQ ID NO: 814771 - RNA, 19 nt, Homo sapiens
  misc_RNA (1)...(19): siRNA sense strand
auggagaggucccugaagu

SEQ ID NO: 814772 - RNA, 19 nt, Homo sapiens
  misc_RNA (1)...(19): siRNA sense strand
caacaaggcagaagaaaua

SEQ ID NO: 814773 - RNA, 19 nt, Homo sapiens
  misc_RNA (1)...(19): siRNA sense strand
gaaaguggaugaauacaca

SEQ ID NO: 814774 - RNA, 19 nt, Homo sapiens
  misc_RNA (1)...(19): siRNA sense strand
agaaauagcugacaagauc

SEQ ID NO: 814775 - RNA, 19 nt, Homo sapiens
  misc_RNA (1)...(19): siRNA sense strand
cuacaacucucacuaugaa

SEQ ID NO: 814776 - RNA, 19 nt, Homo sapiens
  misc_RNA (1)...(19): siRNA sense strand
gaaacagugcccuaucuuu

SEQ ID NO: 814777 - RNA, 19 nt, Homo sapiens
  misc_RNA (1)...(19): siRNA sense strand
gcagauggccuacaacaca

SEQ ID NO: 814778 - RNA, 19 nt, Homo sapiens
  misc_RNA (1)...(19): siRNA sense strand
ccaucuaccugucaccuuu

SEQ ID NO: 814779 - RNA, 19 nt, Homo sapiens
  misc_RNA (1)...(19): siRNA sense strand
agaaggagcucaaguccau

SEQ ID NO: 814780 - RNA, 19 nt, Homo sapiens
  misc_RNA (1)...(19): siRNA sense strand
caaggucuccgacuauauu

SEQ ID NO: 814781 - RNA, 19 nt, Homo sapiens
  misc_RNA (1)...(19): siRNA sense strand
gaagaaauagcugacaaga

SEQ ID NO: 814782 - RNA, 19 nt, Homo sapiens
  misc_RNA (1)...(19): siRNA sense strand
cagaagaaauagcugacaa

SEQ ID NO: 814783 - RNA, 19 nt, Homo sapiens
  misc_RNA (1)...(19): siRNA sense strand
gggaggcacucagagcuaa

SEQ ID NO: 814784 - RNA, 19 nt, Homo sapiens
  misc_RNA (1)...(19): siRNA sense strand
gcaagaaggagcucaaguc

SEQ ID NO: 814785 - RNA, 19 nt, Homo sapiens
  misc_RNA (1)...(19): siRNA sense strand
gaguuuugcugaugacuua

SEQ ID NO: 814786 - RNA, 19 nt, Homo sapiens
  misc_RNA (1)...(19): siRNA sense strand
gagaagauggugucaaugg

SEQ ID NO: 814787 - RNA, 19 nt, Homo sapiens
  misc_RNA (1)...(19): siRNA sense strand
guacuguggucuccuugga

SEQ ID NO: 814788 - RNA, 19 nt, Homo sapiens
  misc_RNA (1)...(19): siRNA sense strand
acuauauucugcagcauaa

SEQ ID NO: 814789 - RNA, 19 nt, Homo sapiens
  misc_RNA (1)...(19): siRNA sense strand
ccaagacaauggcacaaag

SEQ ID NO: 814790 - RNA, 19 nt, Homo sapiens
  misc_RNA (1)...(19): siRNA sense strand
agagugcacugaugaguuc

SEQ ID NO: 814791 - RNA, 19 nt, Homo sapiens
  misc_RNA (1)...(19): siRNA sense strand
uaagaaaguggaugaauac

SEQ ID NO: 814792 - RNA, 19 nt, Homo sapiens
  misc_RNA (1)...(19): siRNA sense strand
ggaaacagugcccuaucuu

SEQ ID NO: 814793 - RNA, 19 nt, Homo sapiens
  misc_RNA (1)...(19): siRNA sense strand
ccacuacaacucucacuau

SEQ ID NO: 814794 - RNA, 19 nt, Homo sapiens
  misc_RNA (1)...(19): siRNA sense strand
aggagaagauggugucaau

SEQ ID NO: 814795 - RNA, 19 nt, Homo sapiens
  misc_RNA (1)...(19): siRNA sense strand
gcaggcauggugugguaua

SEQ ID NO: 814796 - RNA, 19 nt, Homo sapiens
  misc_RNA (1)...(19): siRNA sense strand
ggagaggucccugaaguca

SEQ ID NO: 814797 - RNA, 19 nt, Homo sapiens
  misc_RNA (1)...(19): siRNA sense strand
ccgacggucucuacaaguu

SEQ ID NO: 814798 - RNA, 19 nt, Homo sapiens
  misc_RNA (1)...(19): siRNA sense strand
cccagaugcugucagauga

SEQ ID NO: 814799 - RNA, 19 nt, Homo sapiens
  misc_RNA (1)...(19): siRNA sense strand
gacuauauucugcagcaua

SEQ ID NO: 814800 - RNA, 19 nt, Homo sapiens
  misc_RNA (1)...(19): siRNA sense strand
cugcaggcaugguguggua

SEQ ID NO: 814801 - RNA, 19 nt, Homo sapiens
  misc_RNA (1)...(19): siRNA sense strand
ugacaacaaggcagaagaa

SEQ ID NO: 814802 - RNA, 19 nt, Homo sapiens
  misc_RNA (1)...(19): siRNA sense strand
uacaauggguacacaagug

SEQ ID NO: 814803 - RNA, 19 nt, Homo sapiens
  misc_RNA (1)...(19): siRNA sense strand
uuuauacccucauccaaga

SEQ ID NO: 814804 - RNA, 19 nt, Homo sapiens
  misc_RNA (1)...(19): siRNA sense strand
ccaguacuguggucuccuu

SEQ ID NO: 814805 - RNA, 19 nt, Homo sapiens
  misc_RNA (1)...(19): siRNA sense strand
gaccucagcgccuuugaug

SEQ ID NO: 814806 - RNA, 19 nt, Homo sapiens
  misc_RNA (1)...(19): siRNA sense strand
gacggucucuacaaguuca

SEQ ID NO: 814807 - RNA, 19 nt, Homo sapiens
  misc_RNA (1)...(19): siRNA sense strand
gcccagaugcugucagaug

SEQ ID NO: 814808 - RNA, 19 nt, Homo sapiens
  misc_RNA (1)...(19): siRNA sense strand
ccuguccacugguagauga

SEQ ID NO: 814809 - RNA, 19 nt, Homo sapiens
  misc_RNA (1)...(19): siRNA sense strand
cuucaagagugcacugaug

SEQ ID NO: 814810 - RNA, 19 nt, Homo sapiens
  misc_RNA (1)...(19): siRNA sense strand
ggaaggcccaccugauucu

SEQ ID NO: 814811 - RNA, 19 nt, Homo sapiens
  misc_RNA (1)...(19): siRNA sense strand
gacggccuguccacuggua

SEQ ID NO: 814812 - RNA, 19 nt, Homo sapiens
  misc_RNA (1)...(19): siRNA sense strand
gaaaggggaugugaucgau

SEQ ID NO: 814813 - RNA, 19 nt, Homo sapiens
  misc_RNA (1)...(19): siRNA sense strand
guguggagauucgcuguga

SEQ ID NO: 814814 - RNA, 19 nt, Homo sapiens
  misc_RNA (1)...(19): siRNA sense strand
gauguucagccagcuauug

SEQ ID NO: 814815 - RNA, 19 nt, Homo sapiens
  misc_RNA (1)...(19): siRNA sense strand
uggaaacagugcccuaucu

SEQ ID NO: 814816 - RNA, 19 nt, Homo sapiens
  misc_RNA (1)...(19): siRNA sense strand
cacuacaacucucacuaug

SEQ ID NO: 814817 - RNA, 19 nt, Homo sapiens
  misc_RNA (1)...(19): siRNA sense strand
gcccgacggucucuacaag

SEQ ID NO: 814818 - RNA, 19 nt, Homo sapiens
  misc_RNA (1)...(19): siRNA sense strand
cauuucagguguggagauu

SEQ ID NO: 814819 - RNA, 19 nt, Homo sapiens
  misc_RNA (1)...(19): siRNA sense strand
ggcauggugugguauagca

SEQ ID NO: 814820 - RNA, 19 nt, Homo sapiens
  misc_RNA (1)...(19): siRNA sense strand
ucaaguccaugcccuucau

SEQ ID NO: 814821 - RNA, 19 nt, Homo sapiens
  misc_RNA (1)...(19): siRNA sense strand
accaaggucuccgacuaua

SEQ ID NO: 814822 - RNA, 19 nt, Homo sapiens
  misc_RNA (1)...(19): siRNA sense strand
aaacagugcccuaucuuuu

SEQ ID NO: 814823 - RNA, 19 nt, Homo sapiens
  misc_RNA (1)...(19): siRNA sense strand
caaguucacucuguaugcu

SEQ ID NO: 814824 - RNA, 19 nt, Homo sapiens
  misc_RNA (1)...(19): siRNA sense strand
ggagaauuccugaguuuug

SEQ ID NO: 814825 - RNA, 19 nt, Homo sapiens
  misc_RNA (1)...(19): siRNA sense strand
uggaguggguggauguuca

SEQ ID NO: 814826 - RNA, 19 nt, Homo sapiens
  misc_RNA (1)...(19): siRNA sense strand
acugguagaugacaacaag

SEQ ID NO: 814827 - RNA, 19 nt, Homo sapiens
  misc_RNA (1)...(19): siRNA sense strand
cauaagaaaguggaugaau

SEQ ID NO: 814828 - RNA, 19 nt, Homo sapiens
  misc_RNA (1)...(19): siRNA sense strand
gaaggcccaccugauucua

SEQ ID NO: 814829 - RNA, 19 nt, Homo sapiens
  misc_RNA (1)...(19): siRNA sense strand
gcagcaagaaggagcucaa

SEQ ID NO: 814830 - RNA, 19 nt, Homo sapiens
  misc_RNA (1)...(19): siRNA sense strand
gacaacaaggcagaagaaa

SEQ ID NO: 814831 - RNA, 19 nt, Homo sapiens
  misc_RNA (1)...(19): siRNA sense strand
uaucuacucagucaucuuc

SEQ ID NO: 814832 - RNA, 19 nt, Homo sapiens
  misc_RNA (1)...(19): siRNA sense strand
guggaugaauacacagaca

SEQ ID NO: 814833 - RNA, 19 nt, Homo sapiens
  misc_RNA (1)...(19): siRNA sense strand
uagcugacaagaucuacaa

SEQ ID NO: 814834 - RNA, 19 nt, Homo sapiens
  misc_RNA (1)...(19): siRNA sense strand
gaaauagcugacaagaucu

SEQ ID NO: 814835 - RNA, 19 nt, Homo sapiens
  misc_RNA (1)...(19): siRNA sense strand
gugcacugaugaguuccua

SEQ ID NO: 814836 - RNA, 19 nt, Homo sapiens
  misc_RNA (1)...(19): siRNA sense strand
gcacugaugaguuccuacu

SEQ ID NO: 814837 - RNA, 19 nt, Homo sapiens
  misc_RNA (1)...(19): siRNA sense strand
uauauucugcagcauaaga

SEQ ID NO: 814838 - RNA, 19 nt, Homo sapiens
  misc_RNA (1)...(19): siRNA sense strand
cagcagauggccuacaaca

SEQ ID NO: 814839 - RNA, 19 nt, Homo sapiens
  misc_RNA (1)...(19): siRNA sense strand
cuucaucaccuaccucuca

SEQ ID NO: 814840 - RNA, 19 nt, Homo sapiens
  misc_RNA (1)...(19): siRNA sense strand
ccaaggucuccgacuauau

SEQ ID NO: 814841 - RNA, 19 nt, Homo sapiens
  misc_RNA (1)...(19): siRNA sense strand
aaauagcugacaagaucua

SEQ ID NO: 814842 - RNA, 19 nt, Homo sapiens
  misc_RNA (1)...(19): siRNA sense strand
acaacaaggcagaagaaau

SEQ ID NO: 814843 - RNA, 19 nt, Homo sapiens
  misc_RNA (1)...(19): siRNA sense strand
gcauaagaaaguggaugaa

SEQ ID NO: 814844 - RNA, 19 nt, Homo sapiens
  misc_RNA (1)...(19): siRNA sense strand
cuacuggugcucagggaaa

SEQ ID NO: 814845 - RNA, 19 nt, Homo sapiens
  misc_RNA (1)...(19): siRNA sense strand
gcagaagaaauagcugaca

SEQ ID NO: 814846 - RNA, 19 nt, Homo sapiens
  misc_RNA (1)...(19): siRNA sense strand
acucagucaucuucaagug

SEQ ID NO: 814847 - RNA, 19 nt, Homo sapiens
  misc_RNA (1)...(19): siRNA sense strand
gaguccagcaccacuacaa

SEQ ID NO: 814848 - RNA, 19 nt, Homo sapiens
  misc_RNA (1)...(19): siRNA sense strand
caaggcagaagaaauagcu

SEQ ID NO: 814849 - RNA, 19 nt, Homo sapiens
  misc_RNA (1)...(19): siRNA sense strand
ggagaagauggugucaaug

SEQ ID NO: 814850 - RNA, 19 nt, Homo sapiens
  misc_RNA (1)...(19): siRNA sense strand
agcagcagauggccuacaa

SEQ ID NO: 814851 - RNA, 19 nt, Homo sapiens
  misc_RNA (1)...(19): siRNA sense strand
gcugacaagaucuacaauc

SEQ ID NO: 814852 - RNA, 19 nt, Homo sapiens
  misc_RNA (1)...(19): siRNA sense strand
caagagugcacugaugagu

SEQ ID NO: 814853 - RNA, 19 nt, Homo sapiens
  misc_RNA (1)...(19): siRNA sense strand
guggaaaggagcagcagau

SEQ ID NO: 814854 - RNA, 19 nt, Homo sapiens
  misc_RNA (1)...(19): siRNA sense strand
ccaugcccuucaucaccua

SEQ ID NO: 814855 - RNA, 19 nt, Homo sapiens
  misc_RNA (1)...(19): siRNA sense strand
ucuacucagucaucuucaa

SEQ ID NO: 814856 - RNA, 19 nt, Homo sapiens
  misc_RNA (1)...(19): siRNA sense strand
auggagaggucccugaagu

SEQ ID NO: 814857 - RNA, 19 nt, Homo sapiens
  misc_RNA (1)...(19): siRNA sense strand
caacaaggcagaagaaaua

SEQ ID NO: 814858 - RNA, 19 nt, Homo sapiens
  misc_RNA (1)...(19): siRNA sense strand
gaaaguggaugaauacaca

SEQ ID NO: 814859 - RNA, 19 nt, Homo sapiens
  misc_RNA (1)...(19): siRNA sense strand
agaaauagcugacaagauc

SEQ ID NO: 814860 - RNA, 19 nt, Homo sapiens
  misc_RNA (1)...(19): siRNA sense strand
cuacaacucucacuaugaa

SEQ ID NO: 814861 - RNA, 19 nt, Homo sapiens
  misc_RNA (1)...(19): siRNA sense strand
gaaacagugcccuaucuuu

SEQ ID NO: 814862 - RNA, 19 nt, Homo sapiens
  misc_RNA (1)...(19): siRNA sense strand
gcagauggccuacaacaca

SEQ ID NO: 814863 - RNA, 19 nt, Homo sapiens
  misc_RNA (1)...(19): siRNA sense strand
ccaucuaccugucaccuuu

SEQ ID NO: 814864 - RNA, 19 nt, Homo sapiens
  misc_RNA (1)...(19): siRNA sense strand
caaggucuccgacuauauu

SEQ ID NO: 814865 - RNA, 19 nt, Homo sapiens
  misc_RNA (1)...(19): siRNA sense strand
gaagaaauagcugacaaga

SEQ ID NO: 814866 - RNA, 19 nt, Homo sapiens
  misc_RNA (1)...(19): siRNA sense strand
cagaagaaauagcugacaa

SEQ ID NO: 814867 - RNA, 19 nt, Homo sapiens
  misc_RNA (1)...(19): siRNA sense strand
gggaggcacucagagcuaa

SEQ ID NO: 814868 - RNA, 19 nt, Homo sapiens
  misc_RNA (1)...(19): siRNA sense strand
gaguuuugcugaugacuua

SEQ ID NO: 814869 - RNA, 19 nt, Homo sapiens
  misc_RNA (1)...(19): siRNA sense strand
gagaagauggugucaaugg

SEQ ID NO: 814870 - RNA, 19 nt, Homo sapiens
  misc_RNA (1)...(19): siRNA sense strand
guacuguggucuccuugga

SEQ ID NO: 814871 - RNA, 19 nt, Homo sapiens
  misc_RNA (1)...(19): siRNA sense strand
acuauauucugcagcauaa

SEQ ID NO: 814872 - RNA, 19 nt, Homo sapiens
  misc_RNA (1)...(19): siRNA sense strand
ccaagacaauggcacaaag

SEQ ID NO: 814873 - RNA, 19 nt, Homo sapiens
  misc_RNA (1)...(19): siRNA sense strand
agagugcacugaugaguuc

SEQ ID NO: 814874 - RNA, 19 nt, Homo sapiens
  misc_RNA (1)...(19): siRNA sense strand
uaagaaaguggaugaauac

SEQ ID NO: 814875 - RNA, 19 nt, Homo sapiens
  misc_RNA (1)...(19): siRNA sense strand
ggaaacagugcccuaucuu

SEQ ID NO: 814876 - RNA, 19 nt, Homo sapiens
  misc_RNA (1)...(19): siRNA sense strand
ccacuacaacucucacuau

SEQ ID NO: 814877 - RNA, 19 nt, Homo sapiens
  misc_RNA (1)...(19): siRNA sense strand
aggagaagauggugucaau

SEQ ID NO: 814878 - RNA, 19 nt, Homo sapiens
  misc_RNA (1)...(19): siRNA sense strand
gcaggcauggugugguaua

SEQ ID NO: 814879 - RNA, 19 nt, Homo sapiens
  misc_RNA (1)...(19): siRNA sense strand
ggagaggucccugaaguca

SEQ ID NO: 814880 - RNA, 19 nt, Homo sapiens
  misc_RNA (1)...(19): siRNA sense strand
ccgacggucucuacaaguu

SEQ ID NO: 814881 - RNA, 19 nt, Homo sapiens
  misc_RNA (1)...(19): siRNA sense strand
cccagaugcugucagauga

SEQ ID NO: 814882 - RNA, 19 nt, Homo sapiens
  misc_RNA (1)...(19): siRNA sense strand
gacuauauucugcagcaua

SEQ ID NO: 814883 - RNA, 19 nt, Homo sapiens
  misc_RNA (1)...(19): siRNA sense strand
cugcaggcaugguguggua

SEQ ID NO: 814884 - RNA, 19 nt, Homo sapiens
  misc_RNA (1)...(19): siRNA sense strand
ugacaacaaggcagaagaa

SEQ ID NO: 814885 - RNA, 19 nt, Homo sapiens
  misc_RNA (1)...(19): siRNA sense strand
uacaauggguacacaagug

SEQ ID NO: 814886 - RNA, 19 nt, Homo sapiens
  misc_RNA (1)...(19): siRNA sense strand
gaccucagcgccuuugaug

SEQ ID NO: 814887 - RNA, 19 nt, Homo sapiens
  misc_RNA (1)...(19): siRNA sense strand
uuuauacccucauccaaga

SEQ ID NO: 814888 - RNA, 19 nt, Homo sapiens
  misc_RNA (1)...(19): siRNA sense strand
ccaguacuguggucuccuu

SEQ ID NO: 814889 - RNA, 19 nt, Homo sapiens
  misc_RNA (1)...(19): siRNA sense strand
gacggucucuacaaguuca

SEQ ID NO: 814890 - RNA, 19 nt, Homo sapiens
  misc_RNA (1)...(19): siRNA sense strand
gcccagaugcugucagaug

SEQ ID NO: 814891 - RNA, 19 nt, Homo sapiens
  misc_RNA (1)...(19): siRNA sense strand
ccuguccacugguagauga

SEQ ID NO: 814892 - RNA, 19 nt, Homo sapiens
  misc_RNA (1)...(19): siRNA sense strand
cuucaagagugcacugaug

SEQ ID NO: 814893 - RNA, 19 nt, Homo sapiens
  misc_RNA (1)...(19): siRNA sense strand
ggaaggcccaccugauucu

SEQ ID NO: 814894 - RNA, 19 nt, Homo sapiens
  misc_RNA (1)...(19): siRNA sense strand
gacggccuguccacuggua

SEQ ID NO: 814895 - RNA, 19 nt, Homo sapiens
  misc_RNA (1)...(19): siRNA sense strand
gaaaggggaugugaucgau

SEQ ID NO: 814896 - RNA, 19 nt, Homo sapiens
  misc_RNA (1)...(19): siRNA sense strand
guguggagauucgcuguga

SEQ ID NO: 814897 - RNA, 19 nt, Homo sapiens
  misc_RNA (1)...(19): siRNA sense strand
gauguucagccagcuauug

SEQ ID NO: 814898 - RNA, 19 nt, Homo sapiens
  misc_RNA (1)...(19): siRNA sense strand
uggaaacagugcccuaucu

SEQ ID NO: 814899 - RNA, 19 nt, Homo sapiens
  misc_RNA (1)...(19): siRNA sense strand
cacuacaacucucacuaug

SEQ ID NO: 814900 - RNA, 19 nt, Homo sapiens
  misc_RNA (1)...(19): siRNA sense strand
gcccgacggucucuacaag

SEQ ID NO: 814901 - RNA, 19 nt, Homo sapiens
  misc_RNA (1)...(19): siRNA sense strand
cauuucagguguggagauu

SEQ ID NO: 814902 - RNA, 19 nt, Homo sapiens
  misc_RNA (1)...(19): siRNA sense strand
ggcauggugugguauagca

SEQ ID NO: 814903 - RNA, 19 nt, Homo sapiens
  misc_RNA (1)...(19): siRNA sense strand
accaaggucuccgacuaua

SEQ ID NO: 814904 - RNA, 19 nt, Homo sapiens
  misc_RNA (1)...(19): siRNA sense strand
aaacagugcccuaucuuuu

SEQ ID NO: 814905 - RNA, 19 nt, Homo sapiens
  misc_RNA (1)...(19): siRNA sense strand
caaguucacucuguaugcu

SEQ ID NO: 814906 - RNA, 19 nt, Homo sapiens
  misc_RNA (1)...(19): siRNA sense strand
ggagaauuccugaguuuug

SEQ ID NO: 814907 - RNA, 19 nt, Homo sapiens
  misc_RNA (1)...(19): siRNA sense strand
uggaguggguggauguuca

SEQ ID NO: 814908 - RNA, 19 nt, Homo sapiens
  misc_RNA (1)...(19): siRNA sense strand
acugguagaugacaacaag

SEQ ID NO: 814909 - RNA, 19 nt, Homo sapiens
  misc_RNA (1)...(19): siRNA sense strand
cauaagaaaguggaugaau

SEQ ID NO: 814910 - RNA, 19 nt, Homo sapiens
  misc_RNA (1)...(19): siRNA sense strand
gaaggcccaccugauucua

SEQ ID NO: 814911 - RNA, 19 nt, Homo sapiens
  misc_RNA (1)...(19): siRNA sense strand
gacaacaaggcagaagaaa

SEQ ID NO: 814912 - RNA, 19 nt, Homo sapiens
  misc_RNA (1)...(19): siRNA sense strand
uaucuacucagucaucuuc

SEQ ID NO: 814913 - RNA, 19 nt, Homo sapiens
  misc_RNA (1)...(19): siRNA sense strand
guggaugaauacacagaca

SEQ ID NO: 814914 - RNA, 19 nt, Homo sapiens
  misc_RNA (1)...(19): siRNA sense strand
gugcacugaugaguuccua

SEQ ID NO: 814915 - RNA, 19 nt, Homo sapiens
  misc_RNA (1)...(19): siRNA sense strand
gcacugaugaguuccuacu

SEQ ID NO: 814916 - RNA, 19 nt, Homo sapiens
  misc_RNA (1)...(19): siRNA sense strand
uagcugacaagaucuacaa

SEQ ID NO: 814917 - RNA, 19 nt, Homo sapiens
  misc_RNA (1)...(19): siRNA sense strand
gaaauagcugacaagaucu

SEQ ID NO: 814918 - RNA, 19 nt, Homo sapiens
  misc_RNA (1)...(19): siRNA sense strand
uauauucugcagcauaaga

SEQ ID NO: 814919 - RNA, 19 nt, Homo sapiens
  misc_RNA (1)...(19): siRNA sense strand
cagcagauggccuacaaca

SEQ ID NO: 814920 - RNA, 19 nt, Homo sapiens
  misc_RNA (1)...(19): siRNA sense strand
cuucaucaccuaccucuca

SEQ ID NO: 814921 - RNA, 19 nt, Homo sapiens
  misc_RNA (1)...(19): siRNA sense strand
ccaaggucuccgacuauau

SEQ ID NO: 814922 - RNA, 19 nt, Homo sapiens
  misc_RNA (1)...(19): siRNA sense strand
aaauagcugacaagaucua

SEQ ID NO: 814923 - RNA, 19 nt, Homo sapiens
  misc_RNA (1)...(19): siRNA sense strand
acaacaaggcagaagaaau

SEQ ID NO: 814924 - RNA, 19 nt, Homo sapiens
  misc_RNA (1)...(19): siRNA sense strand
gcauaagaaaguggaugaa

SEQ ID NO: 814925 - RNA, 19 nt, Homo sapiens
  misc_RNA (1)...(19): siRNA sense strand
acucagucaucuucaagug

SEQ ID NO: 814926 - RNA, 19 nt, Homo sapiens
  misc_RNA (1)...(19): siRNA sense strand
gcagaagaaauagcugaca

SEQ ID NO: 814927 - RNA, 19 nt, Homo sapiens
  misc_RNA (1)...(19): siRNA sense strand
cuacuggugcucagggaaa

SEQ ID NO: 814928 - RNA, 19 nt, Homo sapiens
  misc_RNA (1)...(19): siRNA sense strand
gaguccagcaccacuacaa

SEQ ID NO: 814929 - RNA, 19 nt, Homo sapiens
  misc_RNA (1)...(19): siRNA sense strand
caaggcagaagaaauagcu

SEQ ID NO: 814930 - RNA, 19 nt, Homo sapiens
  misc_RNA (1)...(19): siRNA sense strand
ggagaagauggugucaaug

SEQ ID NO: 814931 - RNA, 19 nt, Homo sapiens
  misc_RNA (1)...(19): siRNA sense strand
agcagcagauggccuacaa

SEQ ID NO: 814932 - RNA, 19 nt, Homo sapiens
  misc_RNA (1)...(19): siRNA sense strand
gcugacaagaucuacaauc

SEQ ID NO: 814933 - RNA, 19 nt, Homo sapiens
  misc_RNA (1)...(19): siRNA sense strand
auggagaggucccugaagu

SEQ ID NO: 814934 - RNA, 19 nt, Homo sapiens
  misc_RNA (1)...(19): siRNA sense strand
caagagugcacugaugagu

SEQ ID NO: 814935 - RNA, 19 nt, Homo sapiens
  misc_RNA (1)...(19): siRNA sense strand
guggaaaggagcagcagau

SEQ ID NO: 814936 - RNA, 19 nt, Homo sapiens
  misc_RNA (1)...(19): siRNA sense strand
ucuacucagucaucuucaa

SEQ ID NO: 814937 - RNA, 19 nt, Homo sapiens
  misc_RNA (1)...(19): siRNA sense strand
uaaagaagcugucauccua

SEQ ID NO: 814938 - RNA, 19 nt, Homo sapiens
  misc_RNA (1)...(19): siRNA sense strand
ucaaaggagucaagauuua

SEQ ID NO: 814939 - RNA, 19 nt, Homo sapiens
  misc_RNA (1)...(19): siRNA sense strand
ggagacagcucuucaguuc

SEQ ID NO: 814940 - RNA, 19 nt, Homo sapiens
  misc_RNA (1)...(19): siRNA sense strand
gaaaggaaacuucucagua

SEQ ID NO: 814941 - RNA, 19 nt, Homo sapiens
  misc_RNA (1)...(19): siRNA sense strand
aaaggaaacuucucaguaa

SEQ ID NO: 814942 - RNA, 19 nt, Homo sapiens
  misc_RNA (1)...(19): siRNA sense strand
guaaaucacuugcaucaga

SEQ ID NO: 814943 - RNA, 19 nt, Homo sapiens
  misc_RNA (1)...(19): siRNA sense strand
gaugauaaauggcgagauu

SEQ ID NO: 814944 - RNA, 19 nt, Homo sapiens
  misc_RNA (1)...(19): siRNA sense strand
gaaaauagcagaucgguua

SEQ ID NO: 814945 - RNA, 19 nt, Homo sapiens
  misc_RNA (1)...(19): siRNA sense strand
uaaagaagauccucuagau

SEQ ID NO: 814946 - RNA, 19 nt, Homo sapiens
  misc_RNA (1)...(19): siRNA sense strand
gauacaacauuggaacuua

SEQ ID NO: 814947 - RNA, 19 nt, Homo sapiens
  misc_RNA (1)...(19): siRNA sense strand
agacagagaugauaugcua

SEQ ID NO: 814948 - RNA, 19 nt, Homo sapiens
  misc_RNA (1)...(19): siRNA sense strand
gagcaaagcagaacaguug

SEQ ID NO: 814949 - RNA, 19 nt, Homo sapiens
  misc_RNA (1)...(19): siRNA sense strand
gaaaagauaucacuaggaa

SEQ ID NO: 814950 - RNA, 19 nt, Homo sapiens
  misc_RNA (1)...(19): siRNA sense strand
gcaaucagauacuuuagau

SEQ ID NO: 814951 - RNA, 19 nt, Homo sapiens
  misc_RNA (1)...(19): siRNA sense strand
ucacagcacuggcauauuc

SEQ ID NO: 814952 - RNA, 19 nt, Homo sapiens
  misc_RNA (1)...(19): siRNA sense strand
gagcagcccaucaguguua

SEQ ID NO: 814953 - RNA, 19 nt, Homo sapiens
  misc_RNA (1)...(19): siRNA sense strand
gaucaucauugccaaagaa

SEQ ID NO: 814954 - RNA, 19 nt, Homo sapiens
  misc_RNA (1)...(19): siRNA sense strand
gggaauggcugauauugau

SEQ ID NO: 814955 - RNA, 19 nt, Homo sapiens
  misc_RNA (1)...(19): siRNA sense strand
gaacaaagugaaacuguau

SEQ ID NO: 814956 - RNA, 19 nt, Homo sapiens
  misc_RNA (1)...(19): siRNA sense strand
uaacagggaucuaauuagu

SEQ ID NO: 814957 - RNA, 19 nt, Homo sapiens
  misc_RNA (1)...(19): siRNA sense strand
gaugauagacgagguauuu

SEQ ID NO: 814958 - RNA, 19 nt, Homo sapiens
  misc_RNA (1)...(19): siRNA sense strand
gcaaaccaguacaccagua

SEQ ID NO: 814959 - RNA, 19 nt, Homo sapiens
  misc_RNA (1)...(19): siRNA sense strand
caagaaaccuagcaauagu

SEQ ID NO: 814960 - RNA, 19 nt, Homo sapiens
  misc_RNA (1)...(19): siRNA sense strand
gggacaggaugaaaccuua

SEQ ID NO: 814961 - RNA, 19 nt, Homo sapiens
  misc_RNA (1)...(19): siRNA sense strand
gcacguaccuagucugaag

SEQ ID NO: 814962 - RNA, 19 nt, Homo sapiens
  misc_RNA (1)...(19): siRNA sense strand
gaacagugucacaaugaua

SEQ ID NO: 814963 - RNA, 19 nt, Homo sapiens
  misc_RNA (1)...(19): siRNA sense strand
gagaaagacauuugagaaa

SEQ ID NO: 814964 - RNA, 19 nt, Homo sapiens
  misc_RNA (1)...(19): siRNA sense strand
gagccucucuucacaaaug

SEQ ID NO: 814965 - RNA, 19 nt, Homo sapiens
  misc_RNA (1)...(19): siRNA sense strand
ugaaugagcagaccucuuu

SEQ ID NO: 814966 - RNA, 19 nt, Homo sapiens
  misc_RNA (1)...(19): siRNA sense strand
gugauaagcaguuuacuaa

SEQ ID NO: 814967 - RNA, 19 nt, Homo sapiens
  misc_RNA (1)...(19): siRNA sense strand
ggaaacuucucaguaaaga

SEQ ID NO: 814968 - RNA, 19 nt, Homo sapiens
  misc_RNA (1)...(19): siRNA sense strand
gaaaaggcauuccaaguau

SEQ ID NO: 814969 - RNA, 19 nt, Homo sapiens
  misc_RNA (1)...(19): siRNA sense strand
gagagagaaucugaacuuu

SEQ ID NO: 814970 - RNA, 19 nt, Homo sapiens
  misc_RNA (1)...(19): siRNA sense strand
gcaaauuaguugaagaaag

SEQ ID NO: 814971 - RNA, 19 nt, Homo sapiens
  misc_RNA (1)...(19): siRNA sense strand
aagaacaucucaaggcuuu

SEQ ID NO: 814972 - RNA, 19 nt, Homo sapiens
  misc_RNA (1)...(19): siRNA sense strand
gaaaucaaccaguccagaa

SEQ ID NO: 814973 - RNA, 19 nt, Homo sapiens
  misc_RNA (1)...(19): siRNA sense strand
gcagcaaccuaaacgaaga

SEQ ID NO: 814974 - RNA, 19 nt, Homo sapiens
  misc_RNA (1)...(19): siRNA sense strand
ggaagauucugugcuaaug

SEQ ID NO: 814975 - RNA, 19 nt, Homo sapiens
  misc_RNA (1)...(19): siRNA sense strand
gaacugaagaagugaggua

SEQ ID NO: 814976 - RNA, 19 nt, Homo sapiens
  misc_RNA (1)...(19): siRNA sense strand
cugagaagguuguagauuu

SEQ ID NO: 814977 - RNA, 19 nt, Homo sapiens
  misc_RNA (1)...(19): siRNA sense strand
gaagguuguagauuuguua

SEQ ID NO: 814978 - RNA, 19 nt, Homo sapiens
  misc_RNA (1)...(19): siRNA sense strand
ggagagagaaucugaacuu

SEQ ID NO: 814979 - RNA, 19 nt, Homo sapiens
  misc_RNA (1)...(19): siRNA sense strand
gcaucagucuuacaucuug

SEQ ID NO: 814980 - RNA, 19 nt, Homo sapiens
  misc_RNA (1)...(19): siRNA sense strand
aaacagugauacaacauug

SEQ ID NO: 814981 - RNA, 19 nt, Homo sapiens
  misc_RNA (1)...(19): siRNA sense strand
gcucuucaguucccauaaa

SEQ ID NO: 814982 - RNA, 19 nt, Homo sapiens
  misc_RNA (1)...(19): siRNA sense strand
gagggaaguuuaacaucaa

SEQ ID NO: 814983 - RNA, 19 nt, Homo sapiens
  misc_RNA (1)...(19): siRNA sense strand
ggaagaagccgaaagaaaa

SEQ ID NO: 814984 - RNA, 19 nt, Homo sapiens
  misc_RNA (1)...(19): siRNA sense strand
gaacuccaauaccugauuc

SEQ ID NO: 814985 - RNA, 19 nt, Homo sapiens
  misc_RNA (1)...(19): siRNA sense strand
caagaaagacuggaagauu

SEQ ID NO: 814986 - RNA, 19 nt, Homo sapiens
  misc_RNA (1)...(19): siRNA sense strand
ccacucaucuaauucauca

SEQ ID NO: 814987 - RNA, 19 nt, Homo sapiens
  misc_RNA (1)...(19): siRNA sense strand
ugagaagguuguagauuug

SEQ ID NO: 814988 - RNA, 19 nt, Homo sapiens
  misc_RNA (1)...(19): siRNA sense strand
gcagaucgguuaaaacuga

SEQ ID NO: 814989 - RNA, 19 nt, Homo sapiens
  misc_RNA (1)...(19): siRNA sense strand
gcacugacgucuccaucug

SEQ ID NO: 814990 - RNA, 19 nt, Homo sapiens
  misc_RNA (1)...(19): siRNA sense strand
acauagaacugaagaagug

SEQ ID NO: 814991 - RNA, 19 nt, Homo sapiens
  misc_RNA (1)...(19): siRNA sense strand
cgagggaaguuuaacauca

SEQ ID NO: 814992 - RNA, 19 nt, Homo sapiens
  misc_RNA (1)...(19): siRNA sense strand
ggucuugaauauacaggua

SEQ ID NO: 814993 - RNA, 19 nt, Homo sapiens
  misc_RNA (1)...(19): siRNA sense strand
ucagaggucuucagugaug

SEQ ID NO: 814994 - RNA, 19 nt, Homo sapiens
  misc_RNA (1)...(19): siRNA sense strand
gugaaaguccgaaguaauu

SEQ ID NO: 814995 - RNA, 19 nt, Homo sapiens
  misc_RNA (1)...(19): siRNA sense strand
ggaucugugucgcaguuua

SEQ ID NO: 814996 - RNA, 19 nt, Homo sapiens
  misc_RNA (1)...(19): siRNA sense strand
gaaaggcaacgaagcuuau

SEQ ID NO: 814997 - RNA, 19 nt, Homo sapiens
  misc_RNA (1)...(19): siRNA sense strand
gcgcagacauacacuagga

SEQ ID NO: 814998 - RNA, 19 nt, Homo sapiens
  misc_RNA (1)...(19): siRNA sense strand
ccacaugccugaccaguac

SEQ ID NO: 814999 - RNA, 19 nt, Homo sapiens
  misc_RNA (1)...(19): siRNA sense strand
aaacuuugcuuggugcuaa

SEQ ID NO: 815000 - RNA, 19 nt, Homo sapiens
  misc_RNA (1)...(19): siRNA sense strand
gaauacaacaaucugauga

SEQ ID NO: 815001 - RNA, 19 nt, Homo sapiens
  misc_RNA (1)...(19): siRNA sense strand
aagaaagacuggaagauuc

SEQ ID NO: 815002 - RNA, 19 nt, Homo sapiens
  misc_RNA (1)...(19): siRNA sense strand
uaaaucacuugcaucagaa

SEQ ID NO: 815003 - RNA, 19 nt, Homo sapiens
  misc_RNA (1)...(19): siRNA sense strand
cgaagcaccucucaugauc

SEQ ID NO: 815004 - RNA, 19 nt, Homo sapiens
  misc_RNA (1)...(19): siRNA sense strand
gcgaaugcccaaccucaua

SEQ ID NO: 815005 - RNA, 19 nt, Homo sapiens
  misc_RNA (1)...(19): siRNA sense strand
gaaaucagcguuuugaauu

SEQ ID NO: 815006 - RNA, 19 nt, Homo sapiens
  misc_RNA (1)...(19): siRNA sense strand
aaacagaagaucaucauug

SEQ ID NO: 815007 - RNA, 19 nt, Homo sapiens
  misc_RNA (1)...(19): siRNA sense strand
gccgucagcucucacauga

SEQ ID NO: 815008 - RNA, 19 nt, Homo sapiens
  misc_RNA (1)...(19): siRNA sense strand
gucgagagguccacauaaa

SEQ ID NO: 815009 - RNA, 19 nt, Homo sapiens
  misc_RNA (1)...(19): siRNA sense strand
ggagucaagauuuaaguuu

SEQ ID NO: 815010 - RNA, 19 nt, Homo sapiens
  misc_RNA (1)...(19): siRNA sense strand
gaagcuggauuauguacag

SEQ ID NO: 815011 - RNA, 19 nt, Homo sapiens
  misc_RNA (1)...(19): siRNA sense strand
ggaagagucggaaaggaaa

SEQ ID NO: 815012 - RNA, 19 nt, Homo sapiens
  misc_RNA (1)...(19): siRNA sense strand
agaacaaagugaaacugua

SEQ ID NO: 815013 - RNA, 19 nt, Homo sapiens
  misc_RNA (1)...(19): siRNA sense strand
uaacagacgauugcacaua

SEQ ID NO: 815014 - RNA, 19 nt, Homo sapiens
  misc_RNA (1)...(19): siRNA sense strand
caaaaccuauucccaagua

SEQ ID NO: 815015 - RNA, 19 nt, Homo sapiens
  misc_RNA (1)...(19): siRNA sense strand
gaacgccuacgcaccagua

SEQ ID NO: 815016 - RNA, 19 nt, Homo sapiens
  misc_RNA (1)...(19): siRNA sense strand
gcaagaagaacucaacaag

SEQ ID NO: 815017 - RNA, 19 nt, Homo sapiens
  misc_RNA (1)...(19): siRNA sense strand
uguuaaugcuugcuugaua

SEQ ID NO: 815018 - RNA, 19 nt, Homo sapiens
  misc_RNA (1)...(19): siRNA sense strand
gauaagggcaagcgaguug

SEQ ID NO: 815019 - RNA, 19 nt, Homo sapiens
  misc_RNA (1)...(19): siRNA sense strand
ggaguggguuuacugaaca

SEQ ID NO: 815020 - RNA, 19 nt, Homo sapiens
  misc_RNA (1)...(19): siRNA sense strand
gaaguauuguccaagaagu

SEQ ID NO: 815021 - RNA, 19 nt, Homo sapiens
  misc_RNA (1)...(19): siRNA sense strand
ggacaauacaagaaagauu

SEQ ID NO: 815022 - RNA, 19 nt, Homo sapiens
  misc_RNA (1)...(19): siRNA sense strand
caagaugccuaccugaaag

SEQ ID NO: 815023 - RNA, 19 nt, Homo sapiens
  misc_RNA (1)...(19): siRNA sense strand
gaaauuacaguggacauuc

SEQ ID NO: 815024 - RNA, 19 nt, Homo sapiens
  misc_RNA (1)...(19): siRNA sense strand
gcaccaucaccucagauua

SEQ ID NO: 815025 - RNA, 19 nt, Homo sapiens
  misc_RNA (1)...(19): siRNA sense strand
acaacaaucugaugagcaa

SEQ ID NO: 815026 - RNA, 19 nt, Homo sapiens
  misc_RNA (1)...(19): siRNA sense strand
cagagaagaugcaaaauug

SEQ ID NO: 815027 - RNA, 19 nt, Homo sapiens
  misc_RNA (1)...(19): siRNA sense strand
acaggugaccgaauuauaa

SEQ ID NO: 815028 - RNA, 19 nt, Homo sapiens
  misc_RNA (1)...(19): siRNA sense strand
ggaacagugucacaaugau

SEQ ID NO: 815029 - RNA, 19 nt, Homo sapiens
  misc_RNA (1)...(19): siRNA sense strand
caggagagcagcaaccuaa

SEQ ID NO: 815030 - RNA, 19 nt, Homo sapiens
  misc_RNA (1)...(19): siRNA sense strand
gucauucacuuuaccugua

SEQ ID NO: 815031 - RNA, 19 nt, Homo sapiens
  misc_RNA (1)...(19): siRNA sense strand
caaaggagucaagauuuaa

SEQ ID NO: 815032 - RNA, 19 nt, Homo sapiens
  misc_RNA (1)...(19): siRNA sense strand
gaacuaccugucagucaaa

SEQ ID NO: 815033 - RNA, 19 nt, Homo sapiens
  misc_RNA (1)...(19): siRNA sense strand
cgaaguaauucucugaaag

SEQ ID NO: 815034 - RNA, 19 nt, Homo sapiens
  misc_RNA (1)...(19): siRNA sense strand
gaugaaaccuuagaaaaug

SEQ ID NO: 815035 - RNA, 19 nt, Homo sapiens
  misc_RNA (1)...(19): siRNA sense strand
gaaaguguaaggacuguca

SEQ ID NO: 815036 - RNA, 19 nt, Homo sapiens
  misc_RNA (1)...(19): siRNA sense strand
cccauaaacucaucgaaug

SEQ ID NO: 815037 - RNA, 19 nt, Homo sapiens
  misc_RNA (1)...(19): siRNA sense strand
gaagaucucugccgaggaa

SEQ ID NO: 815038 - RNA, 19 nt, Homo sapiens
  misc_RNA (1)...(19): siRNA sense strand
gaacacaacuuuccugaac

SEQ ID NO: 815039 - RNA, 19 nt, Homo sapiens
  misc_RNA (1)...(19): siRNA sense strand
caagggaacuggcuauuau

SEQ ID NO: 815040 - RNA, 19 nt, Homo sapiens
  misc_RNA (1)...(19): siRNA sense strand
uaagaaaugucgaggguuu

SEQ ID NO: 815041 - RNA, 19 nt, Homo sapiens
  misc_RNA (1)...(19): siRNA sense strand
gagaagaccucaucuggau

SEQ ID NO: 815042 - RNA, 19 nt, Homo sapiens
  misc_RNA (1)...(19): siRNA sense strand
ggaauaucguggaguguaa

SEQ ID NO: 815043 - RNA, 19 nt, Homo sapiens
  misc_RNA (1)...(19): siRNA sense strand
gagaagaaggugaaagaua

SEQ ID NO: 815044 - RNA, 19 nt, Homo sapiens
  misc_RNA (1)...(19): siRNA sense strand
ggaagaagcugcggaaguc

SEQ ID NO: 815045 - RNA, 19 nt, Homo sapiens
  misc_RNA (1)...(19): siRNA sense strand
gcacguguccugacuguaa

SEQ ID NO: 815046 - RNA, 19 nt, Homo sapiens
  misc_RNA (1)...(19): siRNA sense strand
gcgagaagauuucgucaga

SEQ ID NO: 815047 - RNA, 19 nt, Homo sapiens
  misc_RNA (1)...(19): siRNA sense strand
gcaccaaacucugcucuga

SEQ ID NO: 815048 - RNA, 19 nt, Homo sapiens
  misc_RNA (1)...(19): siRNA sense strand
agagacaacugcauacuuu

SEQ ID NO: 815049 - RNA, 19 nt, Homo sapiens
  misc_RNA (1)...(19): siRNA sense strand
agaggaagcugaccugauu

SEQ ID NO: 815050 - RNA, 19 nt, Homo sapiens
  misc_RNA (1)...(19): siRNA sense strand
ggaacuggcuauuauucaa

SEQ ID NO: 815051 - RNA, 19 nt, Homo sapiens
  misc_RNA (1)...(19): siRNA sense strand
ggaagauccucagcuauga

SEQ ID NO: 815052 - RNA, 19 nt, Homo sapiens
  misc_RNA (1)...(19): siRNA sense strand
ggaaggagcaacagugaaa

SEQ ID NO: 815053 - RNA, 19 nt, Homo sapiens
  misc_RNA (1)...(19): siRNA sense strand
gggaaagucucaugaaugg

SEQ ID NO: 815054 - RNA, 19 nt, Homo sapiens
  misc_RNA (1)...(19): siRNA sense strand
ccaacaaccugaugaacuu

SEQ ID NO: 815055 - RNA, 19 nt, Homo sapiens
  misc_RNA (1)...(19): siRNA sense strand
gaacggcuagugaaaguaa

SEQ ID NO: 815056 - RNA, 19 nt, Homo sapiens
  misc_RNA (1)...(19): siRNA sense strand
caaauuagccuccagaagu

SEQ ID NO: 815057 - RNA, 19 nt, Homo sapiens
  misc_RNA (1)...(19): siRNA sense strand
caucuguucuuaaguauga

SEQ ID NO: 815058 - RNA, 19 nt, Homo sapiens
  misc_RNA (1)...(19): siRNA sense strand
cgacgaagcuagagaccaa

SEQ ID NO: 815059 - RNA, 19 nt, Homo sapiens
  misc_RNA (1)...(19): siRNA sense strand
ccaagaggaugaacaacuu

SEQ ID NO: 815060 - RNA, 19 nt, Homo sapiens
  misc_RNA (1)...(19): siRNA sense strand
uaagggagcugaggaacaa

SEQ ID NO: 815061 - RNA, 19 nt, Homo sapiens
  misc_RNA (1)...(19): siRNA sense strand
gaagagcgagugcagauug

SEQ ID NO: 815062 - RNA, 19 nt, Homo sapiens
  misc_RNA (1)...(19): siRNA sense strand
agaagaaggugaaagauag

SEQ ID NO: 815063 - RNA, 19 nt, Homo sapiens
  misc_RNA (1)...(19): siRNA sense strand
ggagcaagaucauucauac

SEQ ID NO: 815064 - RNA, 19 nt, Homo sapiens
  misc_RNA (1)...(19): siRNA sense strand
ccacaggugcugccaaaua

SEQ ID NO: 815065 - RNA, 19 nt, Homo sapiens
  misc_RNA (1)...(19): siRNA sense strand
gaggagaguucgcugauag

SEQ ID NO: 815066 - RNA, 19 nt, Homo sapiens
  misc_RNA (1)...(19): siRNA sense strand
cgaagggccuacaugagua

SEQ ID NO: 815067 - RNA, 19 nt, Homo sapiens
  misc_RNA (1)...(19): siRNA sense strand
cuagaaaucaggccaauaa

SEQ ID NO: 815068 - RNA, 19 nt, Homo sapiens
  misc_RNA (1)...(19): siRNA sense strand
uaagugaccuccgaaguga

SEQ ID NO: 815069 - RNA, 19 nt, Homo sapiens
  misc_RNA (1)...(19): siRNA sense strand
aacaguaccugcagaagua

SEQ ID NO: 815070 - RNA, 19 nt, Homo sapiens
  misc_RNA (1)...(19): siRNA sense strand
cgaagaaacugggcuacaa

SEQ ID NO: 815071 - RNA, 19 nt, Homo sapiens
  misc_RNA (1)...(19): siRNA sense strand
ggaggagaguucgcugaua

SEQ ID NO: 815072 - RNA, 19 nt, Homo sapiens
  misc_RNA (1)...(19): siRNA sense strand
gauggaagccuugcaguuu

SEQ ID NO: 815073 - RNA, 19 nt, Homo sapiens
  misc_RNA (1)...(19): siRNA sense strand
uguaugaucuggccaagaa

SEQ ID NO: 815074 - RNA, 19 nt, Homo sapiens
  misc_RNA (1)...(19): siRNA sense strand
gaaggcaucuacaauuguc

SEQ ID NO: 815075 - RNA, 19 nt, Homo sapiens
  misc_RNA (1)...(19): siRNA sense strand
aaucauccaucuguucuua

SEQ ID NO: 815076 - RNA, 19 nt, Homo sapiens
  misc_RNA (1)...(19): siRNA sense strand
gaaggugaaagauagcaua

SEQ ID NO: 815077 - RNA, 19 nt, Homo sapiens
  misc_RNA (1)...(19): siRNA sense strand
gagcuucacuagccaggaa

SEQ ID NO: 815078 - RNA, 19 nt, Homo sapiens
  misc_RNA (1)...(19): siRNA sense strand
caugaaaucuaacuuccuu

SEQ ID NO: 815079 - RNA, 19 nt, Homo sapiens
  misc_RNA (1)...(19): siRNA sense strand
ccaacgagaucgaggaugu

SEQ ID NO: 815080 - RNA, 19 nt, Homo sapiens
  misc_RNA (1)...(19): siRNA sense strand
gacaugaccaggagaauga

SEQ ID NO: 815081 - RNA, 19 nt, Homo sapiens
  misc_RNA (1)...(19): siRNA sense strand
ggaagagaaaguuugauga

SEQ ID NO: 815082 - RNA, 19 nt, Homo sapiens
  misc_RNA (1)...(19): siRNA sense strand
ggugaaagauagcauagca

SEQ ID NO: 815083 - RNA, 19 nt, Homo sapiens
  misc_RNA (1)...(19): siRNA sense strand
caagaucauucauacacuu

SEQ ID NO: 815084 - RNA, 19 nt, Homo sapiens
  misc_RNA (1)...(19): siRNA sense strand
gaacaguaccugcagaagu

SEQ ID NO: 815085 - RNA, 19 nt, Homo sapiens
  misc_RNA (1)...(19): siRNA sense strand
gcacauaagcaacaucauc

SEQ ID NO: 815086 - RNA, 19 nt, Homo sapiens
  misc_RNA (1)...(19): siRNA sense strand
ugaaugaacagaaggauga

SEQ ID NO: 815087 - RNA, 19 nt, Homo sapiens
  misc_RNA (1)...(19): siRNA sense strand
gaugaggucacccaaauau

SEQ ID NO: 815088 - RNA, 19 nt, Homo sapiens
  misc_RNA (1)...(19): siRNA sense strand
aaauuagccuccagaaguu

SEQ ID NO: 815089 - RNA, 19 nt, Homo sapiens
  misc_RNA (1)...(19): siRNA sense strand
uggaaggcaucuacaauug

SEQ ID NO: 815090 - RNA, 19 nt, Homo sapiens
  misc_RNA (1)...(19): siRNA sense strand
gaaagauagcauagcagua

SEQ ID NO: 815091 - RNA, 19 nt, Homo sapiens
  misc_RNA (1)...(19): siRNA sense strand
ggagaaucauccaucuguu

SEQ ID NO: 815092 - RNA, 19 nt, Homo sapiens
  misc_RNA (1)...(19): siRNA sense strand
ccagaguguucuccaugua

SEQ ID NO: 815093 - RNA, 19 nt, Homo sapiens
  misc_RNA (1)...(19): siRNA sense strand
ugguagagcugugcaagua

SEQ ID NO: 815094 - RNA, 19 nt, Homo sapiens
  misc_RNA (1)...(19): siRNA sense strand
gaauacagcccaggcagaa

SEQ ID NO: 815095 - RNA, 19 nt, Homo sapiens
  misc_RNA (1)...(19): siRNA sense strand
gcaggauagugaauggauu

SEQ ID NO: 815096 - RNA, 19 nt, Homo sapiens
  misc_RNA (1)...(19): siRNA sense strand
ggacaacuucgagacauuu

SEQ ID NO: 815097 - RNA, 19 nt, Homo sapiens
  misc_RNA (1)...(19): siRNA sense strand
cgaagggcguuuccaugaa

SEQ ID NO: 815098 - RNA, 19 nt, Homo sapiens
  misc_RNA (1)...(19): siRNA sense strand
ucccagaauuaaugucuua

SEQ ID NO: 815099 - RNA, 19 nt, Homo sapiens
  misc_RNA (1)...(19): siRNA sense strand
ccaucuugguuguguguua

SEQ ID NO: 815100 - RNA, 19 nt, Homo sapiens
  misc_RNA (1)...(19): siRNA sense strand
ccagcuugcuucugaaaug

SEQ ID NO: 815101 - RNA, 19 nt, Homo sapiens
  misc_RNA (1)...(19): siRNA sense strand
cauguaaguucacccaaga

SEQ ID NO: 815102 - RNA, 19 nt, Homo sapiens
  misc_RNA (1)...(19): siRNA sense strand
gccggaagauccucagcua

SEQ ID NO: 815103 - RNA, 19 nt, Homo sapiens
  misc_RNA (1)...(19): siRNA sense strand
ccaugaggcuagaccauug

SEQ ID NO: 815104 - RNA, 19 nt, Homo sapiens
  misc_RNA (1)...(19): siRNA sense strand
gugaaauccugaagcaguu

SEQ ID NO: 815105 - RNA, 19 nt, Homo sapiens
  misc_RNA (1)...(19): siRNA sense strand
gcagaauuccaaacgauug

SEQ ID NO: 815106 - RNA, 19 nt, Homo sapiens
  misc_RNA (1)...(19): siRNA sense strand
gaagucgccaucagauuga

SEQ ID NO: 815107 - RNA, 19 nt, Homo sapiens
  misc_RNA (1)...(19): siRNA sense strand
gaagggcguuuccaugaac

SEQ ID NO: 815108 - RNA, 19 nt, Homo sapiens
  misc_RNA (1)...(19): siRNA sense strand
gcagagggaagagagauuu

SEQ ID NO: 815109 - RNA, 19 nt, Homo sapiens
  misc_RNA (1)...(19): siRNA sense strand
gguacagacuaucauugaa

SEQ ID NO: 815110 - RNA, 19 nt, Homo sapiens
  misc_RNA (1)...(19): siRNA sense strand
gagaaaacauguaaguuca

SEQ ID NO: 815111 - RNA, 19 nt, Homo sapiens
  misc_RNA (1)...(19): siRNA sense strand
caaagcuucugacuuccaa

SEQ ID NO: 815112 - RNA, 19 nt, Homo sapiens
  misc_RNA (1)...(19): siRNA sense strand
caccguaugugcccugaaa

SEQ ID NO: 815113 - RNA, 19 nt, Homo sapiens
  misc_RNA (1)...(19): siRNA sense strand
ucuacaaggugcaguuuga

SEQ ID NO: 815114 - RNA, 19 nt, Homo sapiens
  misc_RNA (1)...(19): siRNA sense strand
guggauaccuacacucuag

SEQ ID NO: 815115 - RNA, 19 nt, Homo sapiens
  misc_RNA (1)...(19): siRNA sense strand
gcacaucagcagaaagaau

SEQ ID NO: 815116 - RNA, 19 nt, Homo sapiens
  misc_RNA (1)...(19): siRNA sense strand
ucuauaguguccagaauau

SEQ ID NO: 815117 - RNA, 19 nt, Homo sapiens
  misc_RNA (1)...(19): siRNA sense strand
cuacaugaaugaacagaag

SEQ ID NO: 815118 - RNA, 19 nt, Homo sapiens
  misc_RNA (1)...(19): siRNA sense strand
guccagcucugcuucaaug

SEQ ID NO: 815119 - RNA, 19 nt, Homo sapiens
  misc_RNA (1)...(19): siRNA sense strand
acagaaggaugaugaaguc

SEQ ID NO: 815120 - RNA, 19 nt, Homo sapiens
  misc_RNA (1)...(19): siRNA sense strand
gaaacccacaccuuaguau

SEQ ID NO: 815121 - RNA, 19 nt, Homo sapiens
  misc_RNA (1)...(19): siRNA sense strand
cgagagaacaaucaaauag

SEQ ID NO: 815122 - RNA, 19 nt, Homo sapiens
  misc_RNA (1)...(19): siRNA sense strand
agaguucgcugauagagau

SEQ ID NO: 815123 - RNA, 19 nt, Homo sapiens
  misc_RNA (1)...(19): siRNA sense strand
gaagauuucgucagaccuu

SEQ ID NO: 815124 - RNA, 19 nt, Homo sapiens
  misc_RNA (1)...(19): siRNA sense strand
gauggagaguuaccaccaa

SEQ ID NO: 815125 - RNA, 19 nt, Homo sapiens
  misc_RNA (1)...(19): siRNA sense strand
cagagaagaaggugaaaga

SEQ ID NO: 815126 - RNA, 19 nt, Homo sapiens
  misc_RNA (1)...(19): siRNA sense strand
ugaagucgccaucagauug

SEQ ID NO: 815127 - RNA, 19 nt, Homo sapiens
  misc_RNA (1)...(19): siRNA sense strand
ggaugaggucacccaaaua

SEQ ID NO: 815128 - RNA, 19 nt, Homo sapiens
  misc_RNA (1)...(19): siRNA sense strand
caucaggcauagucuacaa

SEQ ID NO: 815129 - RNA, 19 nt, Homo sapiens
  misc_RNA (1)...(19): siRNA sense strand
ugagacaucccagaauuaa

SEQ ID NO: 815130 - RNA, 19 nt, Homo sapiens
  misc_RNA (1)...(19): siRNA sense strand
uggaugaggucacccaaau

SEQ ID NO: 815131 - RNA, 19 nt, Homo sapiens
  misc_RNA (1)...(19): siRNA sense strand
gcaagaucauucauacacu

SEQ ID NO: 815132 - RNA, 19 nt, Homo sapiens
  misc_RNA (1)...(19): siRNA sense strand
agacaucccagaauuaaug

SEQ ID NO: 815133 - RNA, 19 nt, Homo sapiens
  misc_RNA (1)...(19): siRNA sense strand
gcuaugugccuuguacuaa

SEQ ID NO: 815134 - RNA, 19 nt, Homo sapiens
  misc_RNA (1)...(19): siRNA sense strand
aaagauggaagcucugaaa

SEQ ID NO: 815135 - RNA, 19 nt, Homo sapiens
  misc_RNA (1)...(19): siRNA sense strand
caagauagcagagaagaag

SEQ ID NO: 815136 - RNA, 19 nt, Homo sapiens
  misc_RNA (1)...(19): siRNA sense strand
cuagaccgcuacaugaaug

SEQ ID NO: 815137 - RNA, 19 nt, Homo sapiens
  misc_RNA (1)...(19): siRNA sense strand
gaucauagcuccucauuug

SEQ ID NO: 815138 - RNA, 19 nt, Homo sapiens
  misc_RNA (1)...(19): siRNA sense strand
ggacacagaugcuaaauau

SEQ ID NO: 815139 - RNA, 19 nt, Homo sapiens
  misc_RNA (1)...(19): siRNA sense strand
uaacauagcuaccauaaga

SEQ ID NO: 815140 - RNA, 19 nt, Homo sapiens
  misc_RNA (1)...(19): siRNA sense strand
ggaaguaacugauggugaa

SEQ ID NO: 815141 - RNA, 19 nt, Homo sapiens
  misc_RNA (1)...(19): siRNA sense strand
gaaacgaaauacugaugua

SEQ ID NO: 815142 - RNA, 19 nt, Homo sapiens
  misc_RNA (1)...(19): siRNA sense strand
gaaauaaaccucagcagaa

SEQ ID NO: 815143 - RNA, 19 nt, Homo sapiens
  misc_RNA (1)...(19): siRNA sense strand
caaagaauaugucugugua

SEQ ID NO: 815144 - RNA, 19 nt, Homo sapiens
  misc_RNA (1)...(19): siRNA sense strand
cgaaauagcggacaaauug

SEQ ID NO: 815145 - RNA, 19 nt, Homo sapiens
  misc_RNA (1)...(19): siRNA sense strand
ggaagaggauaaacugaaa

SEQ ID NO: 815146 - RNA, 19 nt, Homo sapiens
  misc_RNA (1)...(19): siRNA sense strand
cagcaaaccuucaggauga

SEQ ID NO: 815147 - RNA, 19 nt, Homo sapiens
  misc_RNA (1)...(19): siRNA sense strand
aaaccaagcucauucugua

SEQ ID NO: 815148 - RNA, 19 nt, Homo sapiens
  misc_RNA (1)...(19): siRNA sense strand
ggacaaagaacgagagaaa

SEQ ID NO: 815149 - RNA, 19 nt, Homo sapiens
  misc_RNA (1)...(19): siRNA sense strand
gaaagagucuacaacuguu

SEQ ID NO: 815150 - RNA, 19 nt, Homo sapiens
  misc_RNA (1)...(19): siRNA sense strand
ucaaguagguggcaggaua

SEQ ID NO: 815151 - RNA, 19 nt, Homo sapiens
  misc_RNA (1)...(19): siRNA sense strand
gaaaugauagcaacaagaa

SEQ ID NO: 815152 - RNA, 19 nt, Homo sapiens
  misc_RNA (1)...(19): siRNA sense strand
ggagauaguugccggaaug

SEQ ID NO: 815153 - RNA, 19 nt, Homo sapiens
  misc_RNA (1)...(19): siRNA sense strand
gaacuuaagggacaaggua

SEQ ID NO: 815154 - RNA, 19 nt, Homo sapiens
  misc_RNA (1)...(19): siRNA sense strand
ggagucagguuaaagaaga

SEQ ID NO: 815155 - RNA, 19 nt, Homo sapiens
  misc_RNA (1)...(19): siRNA sense strand
ugaaggaguuguuaaagaa

SEQ ID NO: 815156 - RNA, 19 nt, Homo sapiens
  misc_RNA (1)...(19): siRNA sense strand
aaacagacauaccauagaa

SEQ ID NO: 815157 - RNA, 19 nt, Homo sapiens
  misc_RNA (1)...(19): siRNA sense strand
guaagaaguuugcgacaga

SEQ ID NO: 815158 - RNA, 19 nt, Homo sapiens
  misc_RNA (1)...(19): siRNA sense strand
ggaugaagauggauuagau

SEQ ID NO: 815159 - RNA, 19 nt, Homo sapiens
  misc_RNA (1)...(19): siRNA sense strand
ggaucaaacuuuaguacaa

SEQ ID NO: 815160 - RNA, 19 nt, Homo sapiens
  misc_RNA (1)...(19): siRNA sense strand
ucacaagcaucaagguaua

SEQ ID NO: 815161 - RNA, 19 nt, Homo sapiens
  misc_RNA (1)...(19): siRNA sense strand
gaagagacuuacagacuca

SEQ ID NO: 815162 - RNA, 19 nt, Homo sapiens
  misc_RNA (1)...(19): siRNA sense strand
ucagugagaucuccaagaa

SEQ ID NO: 815163 - RNA, 19 nt, Homo sapiens
  misc_RNA (1)...(19): siRNA sense strand
ugaagcagguuaaagauau

SEQ ID NO: 815164 - RNA, 19 nt, Homo sapiens
  misc_RNA (1)...(19): siRNA sense strand
gaaagaaccucaucauccu

SEQ ID NO: 815165 - RNA, 19 nt, Homo sapiens
  misc_RNA (1)...(19): siRNA sense strand
gaacacccuugaaagaaau

SEQ ID NO: 815166 - RNA, 19 nt, Homo sapiens
  misc_RNA (1)...(19): siRNA sense strand
gaaggaugaagauggauua

SEQ ID NO: 815167 - RNA, 19 nt, Homo sapiens
  misc_RNA (1)...(19): siRNA sense strand
gcacuuaacagaacaaauc

SEQ ID NO: 815168 - RNA, 19 nt, Homo sapiens
  misc_RNA (1)...(19): siRNA sense strand
caaguaaccaguucuguuu

SEQ ID NO: 815169 - RNA, 19 nt, Homo sapiens
  misc_RNA (1)...(19): siRNA sense strand
aaugugagcuguagugaaa

SEQ ID NO: 815170 - RNA, 19 nt, Homo sapiens
  misc_RNA (1)...(19): siRNA sense strand
caacacagacagcaucuuu

SEQ ID NO: 815171 - RNA, 19 nt, Homo sapiens
  misc_RNA (1)...(19): siRNA sense strand
gaaauacuagauccagaua

SEQ ID NO: 815172 - RNA, 19 nt, Homo sapiens
  misc_RNA (1)...(19): siRNA sense strand
gagaugugaugacugguuu

SEQ ID NO: 815173 - RNA, 19 nt, Homo sapiens
  misc_RNA (1)...(19): siRNA sense strand
gaagaugcggagucuaaua

SEQ ID NO: 815174 - RNA, 19 nt, Homo sapiens
  misc_RNA (1)...(19): siRNA sense strand
ccaugaagaugaccauauu

SEQ ID NO: 815175 - RNA, 19 nt, Homo sapiens
  misc_RNA (1)...(19): siRNA sense strand
ggaaaguaauaucuuggaa

SEQ ID NO: 815176 - RNA, 19 nt, Homo sapiens
  misc_RNA (1)...(19): siRNA sense strand
gaaguugagucuaccuuuc

SEQ ID NO: 815177 - RNA, 19 nt, Homo sapiens
  misc_RNA (1)...(19): siRNA sense strand
caaugaagcagaaaguaua

SEQ ID NO: 815178 - RNA, 19 nt, Homo sapiens
  misc_RNA (1)...(19): siRNA sense strand
aaaccaagcuacaguugaa

SEQ ID NO: 815179 - RNA, 19 nt, Homo sapiens
  misc_RNA (1)...(19): siRNA sense strand
gcccuuaacucauucuuug

SEQ ID NO: 815180 - RNA, 19 nt, Homo sapiens
  misc_RNA (1)...(19): siRNA sense strand
caucuugucuugaaaugaa

SEQ ID NO: 815181 - RNA, 19 nt, Homo sapiens
  misc_RNA (1)...(19): siRNA sense strand
gaagccagauaaaccuaaa

SEQ ID NO: 815182 - RNA, 19 nt, Homo sapiens
  misc_RNA (1)...(19): siRNA sense strand
aaacacauguccaucagaa

SEQ ID NO: 815183 - RNA, 19 nt, Homo sapiens
  misc_RNA (1)...(19): siRNA sense strand
gaaaacagauaauguggaa

SEQ ID NO: 815184 - RNA, 19 nt, Homo sapiens
  misc_RNA (1)...(19): siRNA sense strand
ccauagaaaugauugagaa

SEQ ID NO: 815185 - RNA, 19 nt, Homo sapiens
  misc_RNA (1)...(19): siRNA sense strand
gaacuagcuucuaaagagu

SEQ ID NO: 815186 - RNA, 19 nt, Homo sapiens
  misc_RNA (1)...(19): siRNA sense strand
gaggauaaacugaaacuga

SEQ ID NO: 815187 - RNA, 19 nt, Homo sapiens
  misc_RNA (1)...(19): siRNA sense strand
ggagagcacugaguuuaau

SEQ ID NO: 815188 - RNA, 19 nt, Homo sapiens
  misc_RNA (1)...(19): siRNA sense strand
uaaagaaaguggcaaugau

SEQ ID NO: 815189 - RNA, 19 nt, Homo sapiens
  misc_RNA (1)...(19): siRNA sense strand
guaggaauguagacaagaa

SEQ ID NO: 815190 - RNA, 19 nt, Homo sapiens
  misc_RNA (1)...(19): siRNA sense strand
gauaacauagcuaccauaa

SEQ ID NO: 815191 - RNA, 19 nt, Homo sapiens
  misc_RNA (1)...(19): siRNA sense strand
ccagaaaggagucagguua

SEQ ID NO: 815192 - RNA, 19 nt, Homo sapiens
  misc_RNA (1)...(19): siRNA sense strand
cagaaugaguccagaagaa

SEQ ID NO: 815193 - RNA, 19 nt, Homo sapiens
  misc_RNA (1)...(19): siRNA sense strand
guaggguccucuuccauuu

SEQ ID NO: 815194 - RNA, 19 nt, Homo sapiens
  misc_RNA (1)...(19): siRNA sense strand
gagguugacucuaugucua

SEQ ID NO: 815195 - RNA, 19 nt, Homo sapiens
  misc_RNA (1)...(19): siRNA sense strand
ccacauggcaacagguuua

SEQ ID NO: 815196 - RNA, 19 nt, Homo sapiens
  misc_RNA (1)...(19): siRNA sense strand
ggacgaagucagccuguaa

SEQ ID NO: 815197 - RNA, 19 nt, Homo sapiens
  misc_RNA (1)...(19): siRNA sense strand
gauaaccagacuucaaaua

SEQ ID NO: 815198 - RNA, 19 nt, Homo sapiens
  misc_RNA (1)...(19): siRNA sense strand
gaaagugcaccaccaauag

SEQ ID NO: 815199 - RNA, 19 nt, Homo sapiens
  misc_RNA (1)...(19): siRNA sense strand
caaggaaauuugugugguu

SEQ ID NO: 815200 - RNA, 19 nt, Homo sapiens
  misc_RNA (1)...(19): siRNA sense strand
cgauaaggauccuaugcua

SEQ ID NO: 815201 - RNA, 19 nt, Homo sapiens
  misc_RNA (1)...(19): siRNA sense strand
gcaaagauggagauaguug

SEQ ID NO: 815202 - RNA, 19 nt, Homo sapiens
  misc_RNA (1)...(19): siRNA sense strand
gaagucagccuguaacuac

SEQ ID NO: 815203 - RNA, 19 nt, Homo sapiens
  misc_RNA (1)...(19): siRNA sense strand
ucaggaagaucaagagaau

SEQ ID NO: 815204 - RNA, 19 nt, Homo sapiens
  misc_RNA (1)...(19): siRNA sense strand
uaccaaagccuauccagua

SEQ ID NO: 815205 - RNA, 19 nt, Homo sapiens
  misc_RNA (1)...(19): siRNA sense strand
agaaacagccagucaagua

SEQ ID NO: 815206 - RNA, 19 nt, Homo sapiens
  misc_RNA (1)...(19): siRNA sense strand
gauaucaccucagacaguu

SEQ ID NO: 815207 - RNA, 19 nt, Homo sapiens
  misc_RNA (1)...(19): siRNA sense strand
acaaaucaauguagaggaa

SEQ ID NO: 815208 - RNA, 19 nt, Homo sapiens
  misc_RNA (1)...(19): siRNA sense strand
aaagaaaguggcaaugaua

SEQ ID NO: 815209 - RNA, 19 nt, Homo sapiens
  misc_RNA (1)...(19): siRNA sense strand
ucagcagagugacaauuua

SEQ ID NO: 815210 - RNA, 19 nt, Homo sapiens
  misc_RNA (1)...(19): siRNA sense strand
auacuuugcucuuugcaua

SEQ ID NO: 815211 - RNA, 19 nt, Homo sapiens
  misc_RNA (1)...(19): siRNA sense strand
ugugccaucucaugaauua

SEQ ID NO: 815212 - RNA, 19 nt, Homo sapiens
  misc_RNA (1)...(19): siRNA sense strand
gcaaguaaccaguucuguu

SEQ ID NO: 815213 - RNA, 19 nt, Homo sapiens
  misc_RNA (1)...(19): siRNA sense strand
gcaacuggauaggccauuu

SEQ ID NO: 815214 - RNA, 19 nt, Homo sapiens
  misc_RNA (1)...(19): siRNA sense strand
gacucuaugucuaaagaua

SEQ ID NO: 815215 - RNA, 19 nt, Homo sapiens
  misc_RNA (1)...(19): siRNA sense strand
gcacaaacuggacauguau

SEQ ID NO: 815216 - RNA, 19 nt, Homo sapiens
  misc_RNA (1)...(19): siRNA sense strand
gcagcaaaguaugaaguaa

SEQ ID NO: 815217 - RNA, 19 nt, Homo sapiens
  misc_RNA (1)...(19): siRNA sense strand
ccacagaugcuccgaagaa

SEQ ID NO: 815218 - RNA, 19 nt, Homo sapiens
  misc_RNA (1)...(19): siRNA sense strand
gacgcuggaucuucugaua

SEQ ID NO: 815219 - RNA, 19 nt, Homo sapiens
  misc_RNA (1)...(19): siRNA sense strand
aaaugaagcuuugauggaa

SEQ ID NO: 815220 - RNA, 19 nt, Homo sapiens
  misc_RNA (1)...(19): siRNA sense strand
ugaagugacugaauguaau

SEQ ID NO: 815221 - RNA, 19 nt, Homo sapiens
  misc_RNA (1)...(19): siRNA sense strand
gaggaagggcacaaagaua

SEQ ID NO: 815222 - RNA, 19 nt, Homo sapiens
  misc_RNA (1)...(19): siRNA sense strand
ucaaauaguucuccaugca

SEQ ID NO: 815223 - RNA, 19 nt, Homo sapiens
  misc_RNA (1)...(19): siRNA sense strand
caccagauguuucuacaga

SEQ ID NO: 815224 - RNA, 19 nt, Homo sapiens
  misc_RNA (1)...(19): siRNA sense strand
aaguauagcagaugcauua

SEQ ID NO: 815225 - RNA, 19 nt, Homo sapiens
  misc_RNA (1)...(19): siRNA sense strand
gaacugauuuuaccuaaca

SEQ ID NO: 815226 - RNA, 19 nt, Homo sapiens
  misc_RNA (1)...(19): siRNA sense strand
cagaacaaaucaauguaga

SEQ ID NO: 815227 - RNA, 19 nt, Homo sapiens
  misc_RNA (1)...(19): siRNA sense strand
gaaauagaaacaucaguag

SEQ ID NO: 815228 - RNA, 19 nt, Homo sapiens
  misc_RNA (1)...(19): siRNA sense strand
uaagucagcagaaauagaa

SEQ ID NO: 815229 - RNA, 19 nt, Homo sapiens
  misc_RNA (1)...(19): siRNA sense strand
ugaaagugcaccaccaaua

SEQ ID NO: 815230 - RNA, 19 nt, Homo sapiens
  misc_RNA (1)...(19): siRNA sense strand
agaacacccuugaaagaaa

SEQ ID NO: 815231 - RNA, 19 nt, Homo sapiens
  misc_RNA (1)...(19): siRNA sense strand
gagaacacccuugaaagaa

SEQ ID NO: 815232 - RNA, 19 nt, Homo sapiens
  misc_RNA (1)...(19): siRNA sense strand
gaagugacugaauguaauu

SEQ ID NO: 815233 - RNA, 19 nt, Homo sapiens
  misc_RNA (1)...(19): siRNA sense strand
cuggauaggccauuuaaua

SEQ ID NO: 815234 - RNA, 19 nt, Homo sapiens
  misc_RNA (1)...(19): siRNA sense strand
uaaccagacuucaaauagu

SEQ ID NO: 815235 - RNA, 19 nt, Homo sapiens
  misc_RNA (1)...(19): siRNA sense strand
gaagcagguuaaagauaug

SEQ ID NO: 815236 - RNA, 19 nt, Homo sapiens
  misc_RNA (1)...(19): siRNA sense strand
ggaccuaccagauaguauu

SEQ ID NO: 815237 - RNA, 19 nt, Homo sapiens
  misc_RNA (1)...(19): siRNA sense strand
cgacagauccagaauauua

SEQ ID NO: 815238 - RNA, 19 nt, Homo sapiens
  misc_RNA (1)...(19): siRNA sense strand
caacaaaugcuuccagaua

SEQ ID NO: 815239 - RNA, 19 nt, Homo sapiens
  misc_RNA (1)...(19): siRNA sense strand
ggaauugguuucagucaaa

SEQ ID NO: 815240 - RNA, 19 nt, Homo sapiens
  misc_RNA (1)...(19): siRNA sense strand
aaacagugcucucaaagaa

SEQ ID NO: 815241 - RNA, 19 nt, Homo sapiens
  misc_RNA (1)...(19): siRNA sense strand
aagcaaaguuggaugaaua

SEQ ID NO: 815242 - RNA, 19 nt, Homo sapiens
  misc_RNA (1)...(19): siRNA sense strand
uagcaagucuggugaaauu

SEQ ID NO: 815243 - RNA, 19 nt, Homo sapiens
  misc_RNA (1)...(19): siRNA sense strand
gaacaaaucagugguacaa

SEQ ID NO: 815244 - RNA, 19 nt, Homo sapiens
  misc_RNA (1)...(19): siRNA sense strand
ggaagaagacgaggacuaa

SEQ ID NO: 815245 - RNA, 19 nt, Homo sapiens
  misc_RNA (1)...(19): siRNA sense strand
gacaaacagugcucucaaa

SEQ ID NO: 815246 - RNA, 19 nt, Homo sapiens
  misc_RNA (1)...(19): siRNA sense strand
gagcgaggaugaacuggaa

SEQ ID NO: 815247 - RNA, 19 nt, Homo sapiens
  misc_RNA (1)...(19): siRNA sense strand
ggacaaucuuggcauguug

SEQ ID NO: 815248 - RNA, 19 nt, Homo sapiens
  misc_RNA (1)...(19): siRNA sense strand
ccaauaauggccagaauaa

SEQ ID NO: 815249 - RNA, 19 nt, Homo sapiens
  misc_RNA (1)...(19): siRNA sense strand
ggcagaacaugguaaagaa

SEQ ID NO: 815250 - RNA, 19 nt, Homo sapiens
  misc_RNA (1)...(19): siRNA sense strand
aacaaaugcuuccagauaa

SEQ ID NO: 815251 - RNA, 19 nt, Homo sapiens
  misc_RNA (1)...(19): siRNA sense strand
gaagcaaaguuggaugaau

SEQ ID NO: 815252 - RNA, 19 nt, Homo sapiens
  misc_RNA (1)...(19): siRNA sense strand
ccauuaagaugcccgaaga

SEQ ID NO: 815253 - RNA, 19 nt, Homo sapiens
  misc_RNA (1)...(19): siRNA sense strand
acaaaugcuuccagauaaa

SEQ ID NO: 815254 - RNA, 19 nt, Homo sapiens
  misc_RNA (1)...(19): siRNA sense strand
cgacgccgcuucaacauag

SEQ ID NO: 815255 - RNA, 19 nt, Homo sapiens
  misc_RNA (1)...(19): siRNA sense strand
gagcaagccuuuaguuuuc

SEQ ID NO: 815256 - RNA, 19 nt, Homo sapiens
  misc_RNA (1)...(19): siRNA sense strand
uacaagccaucaggaaaua

SEQ ID NO: 815257 - RNA, 19 nt, Homo sapiens
  misc_RNA (1)...(19): siRNA sense strand
ccauugacauugagguuga

SEQ ID NO: 815258 - RNA, 19 nt, Homo sapiens
  misc_RNA (1)...(19): siRNA sense strand
guacaagccaucaggaaau

SEQ ID NO: 815259 - RNA, 19 nt, Homo sapiens
  misc_RNA (1)...(19): siRNA sense strand
uaagaugcccgaagaggaa

SEQ ID NO: 815260 - RNA, 19 nt, Homo sapiens
  misc_RNA (1)...(19): siRNA sense strand
guaaagaagagaccaaugg

SEQ ID NO: 815261 - RNA, 19 nt, Homo sapiens
  misc_RNA (1)...(19): siRNA sense strand
gggacaaucuuggcauguu

SEQ ID NO: 815262 - RNA, 19 nt, Homo sapiens
  misc_RNA (1)...(19): siRNA sense strand
ugagacaacuagacaugga

SEQ ID NO: 815263 - RNA, 19 nt, Homo sapiens
  misc_RNA (1)...(19): siRNA sense strand
acaaaucagugguacaagu

SEQ ID NO: 815264 - RNA, 19 nt, Homo sapiens
  misc_RNA (1)...(19): siRNA sense strand
aacgacagauccagaauau

SEQ ID NO: 815265 - RNA, 19 nt, Homo sapiens
  misc_RNA (1)...(19): siRNA sense strand
aaacgacagauccagaaua

SEQ ID NO: 815266 - RNA, 19 nt, Homo sapiens
  misc_RNA (1)...(19): siRNA sense strand
caggaaauauggccgagau

SEQ ID NO: 815267 - RNA, 19 nt, Homo sapiens
  misc_RNA (1)...(19): siRNA sense strand
caagucuggugaaauuuua

SEQ ID NO: 815268 - RNA, 19 nt, Homo sapiens
  misc_RNA (1)...(19): siRNA sense strand
caaacagugcucucaaaga

SEQ ID NO: 815269 - RNA, 19 nt, Homo sapiens
  misc_RNA (1)...(19): siRNA sense strand
gggaggagagcgaggauga

SEQ ID NO: 815270 - RNA, 19 nt, Homo sapiens
  misc_RNA (1)...(19): siRNA sense strand
ggaggcagaacaugguaaa

SEQ ID NO: 815271 - RNA, 19 nt, Homo sapiens
  misc_RNA (1)...(19): siRNA sense strand
gacagauccagaauauuaa

SEQ ID NO: 815272 - RNA, 19 nt, Homo sapiens
  misc_RNA (1)...(19): siRNA sense strand
gaaaagucauuggcugauu

SEQ ID NO: 815273 - RNA, 19 nt, Homo sapiens
  misc_RNA (1)...(19): siRNA sense strand
agacgaggcuccuguucug

SEQ ID NO: 815274 - RNA, 19 nt, Homo sapiens
  misc_RNA (1)...(19): siRNA sense strand
gacaguuccucaggucaaa

SEQ ID NO: 815275 - RNA, 19 nt, Homo sapiens
  misc_RNA (1)...(19): siRNA sense strand
gcaagacgcagucaagaac

SEQ ID NO: 815276 - RNA, 19 nt, Homo sapiens
  misc_RNA (1)...(19): siRNA sense strand
gcugauuugcccaacuuua

SEQ ID NO: 815277 - RNA, 19 nt, Homo sapiens
  misc_RNA (1)...(19): siRNA sense strand
gaacaugguaaagaagaga

SEQ ID NO: 815278 - RNA, 19 nt, Homo sapiens
  misc_RNA (1)...(19): siRNA sense strand
gaagaagacgaggacuaaa

SEQ ID NO: 815279 - RNA, 19 nt, Homo sapiens
  misc_RNA (1)...(19): siRNA sense strand
gaagauguggaggcuguuu

SEQ ID NO: 815280 - RNA, 19 nt, Homo sapiens
  misc_RNA (1)...(19): siRNA sense strand
uuccagaggucauucagaa

SEQ ID NO: 815281 - RNA, 19 nt, Homo sapiens
  misc_RNA (1)...(19): siRNA sense strand
ggaugaauacauugccauu

SEQ ID NO: 815282 - RNA, 19 nt, Homo sapiens
  misc_RNA (1)...(19): siRNA sense strand
ggaagacgaggcuccuguu

SEQ ID NO: 815283 - RNA, 19 nt, Homo sapiens
  misc_RNA (1)...(19): siRNA sense strand
caaaucagugguacaagug

SEQ ID NO: 815284 - RNA, 19 nt, Homo sapiens
  misc_RNA (1)...(19): siRNA sense strand
ggagagcgaggaugaacug

SEQ ID NO: 815285 - RNA, 19 nt, Homo sapiens
  misc_RNA (1)...(19): siRNA sense strand
uauagcaagucuggugaaa

SEQ ID NO: 815286 - RNA, 19 nt, Homo sapiens
  misc_RNA (1)...(19): siRNA sense strand
ccagaggucauucagaaau

SEQ ID NO: 815287 - RNA, 19 nt, Homo sapiens
  misc_RNA (1)...(19): siRNA sense strand
cagaagcaaaguuggauga

SEQ ID NO: 815288 - RNA, 19 nt, Homo sapiens
  misc_RNA (1)...(19): siRNA sense strand
agaggcaaauggaaacaau

SEQ ID NO: 815289 - RNA, 19 nt, Homo sapiens
  misc_RNA (1)...(19): siRNA sense strand
ucauagaauccaacaaaug

SEQ ID NO: 815290 - RNA, 19 nt, Homo sapiens
  misc_RNA (1)...(19): siRNA sense strand
gaagacgaggcuccuguuc

SEQ ID NO: 815291 - RNA, 19 nt, Homo sapiens
  misc_RNA (1)...(19): siRNA sense strand
ggcaagacgcagucaagaa

SEQ ID NO: 815292 - RNA, 19 nt, Homo sapiens
  misc_RNA (1)...(19): siRNA sense strand
ggaagaggcaaauggaaac

SEQ ID NO: 815293 - RNA, 19 nt, Homo sapiens
  misc_RNA (1)...(19): siRNA sense strand
acauugccauugccaaaga

SEQ ID NO: 815294 - RNA, 19 nt, Homo sapiens
  misc_RNA (1)...(19): siRNA sense strand
gcugagacaacuagacaug

SEQ ID NO: 815295 - RNA, 19 nt, Homo sapiens
  misc_RNA (1)...(19): siRNA sense strand
ggaucgccaugcccggaaa

SEQ ID NO: 815296 - RNA, 19 nt, Homo sapiens
  misc_RNA (1)...(19): siRNA sense strand
aaaagucauuggcugauuu

SEQ ID NO: 815297 - RNA, 19 nt, Homo sapiens
  misc_RNA (1)...(19): siRNA sense strand
cagaacaugguaaagaaga

SEQ ID NO: 815298 - RNA, 19 nt, Homo sapiens
  misc_RNA (1)...(19): siRNA sense strand
aaaacuugaugguggaaua

SEQ ID NO: 815299 - RNA, 19 nt, Homo sapiens
  misc_RNA (1)...(19): siRNA sense strand
ucaaacgacagauccagaa

SEQ ID NO: 815300 - RNA, 19 nt, Homo sapiens
  misc_RNA (1)...(19): siRNA sense strand
gaacuggaagaggcaaaug

SEQ ID NO: 815301 - RNA, 19 nt, Homo sapiens
  misc_RNA (1)...(19): siRNA sense strand
cauagaauccaacaaaugc

SEQ ID NO: 815302 - RNA, 19 nt, Homo sapiens
  misc_RNA (1)...(19): siRNA sense strand
aguggacuguggaagauaa

SEQ ID NO: 815303 - RNA, 19 nt, Homo sapiens
  misc_RNA (1)...(19): siRNA sense strand
ugaguggacuguggaagau

SEQ ID NO: 815304 - RNA, 19 nt, Homo sapiens
  misc_RNA (1)...(19): siRNA sense strand
caaaugcuuccagauaaau

SEQ ID NO: 815305 - RNA, 19 nt, Homo sapiens
  misc_RNA (1)...(19): siRNA sense strand
gauccagaauauuaaacag

SEQ ID NO: 815306 - RNA, 19 nt, Homo sapiens
  misc_RNA (1)...(19): siRNA sense strand
uggaagaggcaaauggaaa

SEQ ID NO: 815307 - RNA, 19 nt, Homo sapiens
  misc_RNA (1)...(19): siRNA sense strand
caauaauggccagaauaaa

SEQ ID NO: 815308 - RNA, 19 nt, Homo sapiens
  misc_RNA (1)...(19): siRNA sense strand
ggcauaaacauaauaucga

SEQ ID NO: 815309 - RNA, 19 nt, Homo sapiens
  misc_RNA (1)...(19): siRNA sense strand
gcaagucuggugaaauuuu

SEQ ID NO: 815310 - RNA, 19 nt, Homo sapiens
  misc_RNA (1)...(19): siRNA sense strand
uggcugauuugcccaacuu

SEQ ID NO: 815311 - RNA, 19 nt, Homo sapiens
  misc_RNA (1)...(19): siRNA sense strand
caagccaucaggaaauaug

SEQ ID NO: 815312 - RNA, 19 nt, Homo sapiens
  misc_RNA (1)...(19): siRNA sense strand
caaaguuggaugaauacau

SEQ ID NO: 815313 - RNA, 19 nt, Homo sapiens
  misc_RNA (1)...(19): siRNA sense strand
gaugaauacauugccauug

SEQ ID NO: 815314 - RNA, 19 nt, Homo sapiens
  misc_RNA (1)...(19): siRNA sense strand
cccaauaauggccagaaua

SEQ ID NO: 815315 - RNA, 19 nt, Homo sapiens
  misc_RNA (1)...(19): siRNA sense strand
agacgugauugggaacaaa

SEQ ID NO: 815316 - RNA, 19 nt, Homo sapiens
  misc_RNA (1)...(19): siRNA sense strand
cguacaagccaucaggaaa

SEQ ID NO: 815317 - RNA, 19 nt, Homo sapiens
  misc_RNA (1)...(19): siRNA sense strand
cuaccacggugcugagaca

SEQ ID NO: 815318 - RNA, 19 nt, Homo sapiens
  misc_RNA (1)...(19): siRNA sense strand
ggacuguggaagauaaagu

SEQ ID NO: 815319 - RNA, 19 nt, Homo sapiens
  misc_RNA (1)...(19): siRNA sense strand
uaucgacgccgcuucaaca

SEQ ID NO: 815320 - RNA, 19 nt, Homo sapiens
  misc_RNA (1)...(19): siRNA sense strand
acagugcucucaaagaaaa

SEQ ID NO: 815321 - RNA, 19 nt, Homo sapiens
  misc_RNA (1)...(19): siRNA sense strand
uggaauugguuucagucaa

SEQ ID NO: 815322 - RNA, 19 nt, Homo sapiens
  misc_RNA (1)...(19): siRNA sense strand
aaggaauguuucuuucuca

SEQ ID NO: 815323 - RNA, 19 nt, Homo sapiens
  misc_RNA (1)...(19): siRNA sense strand
cgccaugcccggaaacaaa

SEQ ID NO: 815324 - RNA, 19 nt, Homo sapiens
  misc_RNA (1)...(19): siRNA sense strand
gaagaggcaaauggaaaca

SEQ ID NO: 815325 - RNA, 19 nt, Homo sapiens
  misc_RNA (1)...(19): siRNA sense strand
gcagaacaugguaaagaag

SEQ ID NO: 815326 - RNA, 19 nt, Homo sapiens
  misc_RNA (1)...(19): siRNA sense strand
aaucagugguacaagugaa

SEQ ID NO: 815327 - RNA, 19 nt, Homo sapiens
  misc_RNA (1)...(19): siRNA sense strand
auagaaccauaucgacuuc

SEQ ID NO: 815328 - RNA, 19 nt, Homo sapiens
  misc_RNA (1)...(19): siRNA sense strand
aauagaaccauaucgacuu

SEQ ID NO: 815329 - RNA, 19 nt, Homo sapiens
  misc_RNA (1)...(19): siRNA sense strand
gucaagaacgggacaaucu

SEQ ID NO: 815330 - RNA, 19 nt, Homo sapiens
  misc_RNA (1)...(19): siRNA sense strand
acaacuagacauggaauug

SEQ ID NO: 815331 - RNA, 19 nt, Homo sapiens
  misc_RNA (1)...(19): siRNA sense strand
gagacaacuagacauggaa

SEQ ID NO: 815332 - RNA, 19 nt, Homo sapiens
  misc_RNA (1)...(19): siRNA sense strand
ggaggcuguuucugccaau

SEQ ID NO: 815333 - RNA, 19 nt, Homo sapiens
  misc_RNA (1)...(19): siRNA sense strand
aaggaaaccuccaaaagga

SEQ ID NO: 815334 - RNA, 19 nt, Homo sapiens
  misc_RNA (1)...(19): siRNA sense strand
gcacguuggacuacagaag

SEQ ID NO: 815335 - RNA, 19 nt, Homo sapiens
  misc_RNA (1)...(19): siRNA sense strand
agaccaaugggcccaguaa

SEQ ID NO: 815336 - RNA, 19 nt, Homo sapiens
  misc_RNA (1)...(19): siRNA sense strand
gguaaagaagagaccaaug

SEQ ID NO: 815337 - RNA, 19 nt, Homo sapiens
  misc_RNA (1)...(19): siRNA sense strand
gaauaaguuuggacaguuu

SEQ ID NO: 815338 - RNA, 19 nt, Homo sapiens
  misc_RNA (1)...(19): siRNA sense strand
gagagucgcuucuaagaug

SEQ ID NO: 815339 - RNA, 19 nt, Homo sapiens
  misc_RNA (1)...(19): siRNA sense strand
gaaauaccuuaguggaauu

SEQ ID NO: 815340 - RNA, 19 nt, Homo sapiens
  misc_RNA (1)...(19): siRNA sense strand
ugacugaccugcccacgua

SEQ ID NO: 815341 - RNA, 19 nt, Homo sapiens
  misc_RNA (1)...(19): siRNA sense strand
gagaggugcugcauuccua

SEQ ID NO: 815342 - RNA, 19 nt, Homo sapiens
  misc_RNA (1)...(19): siRNA sense strand
cgaaauaccuuaguggaau

SEQ ID NO: 815343 - RNA, 19 nt, Homo sapiens
  misc_RNA (1)...(19): siRNA sense strand
gcuaacagaugaagaaguc

SEQ ID NO: 815344 - RNA, 19 nt, Homo sapiens
  misc_RNA (1)...(19): siRNA sense strand
cagcaaagaugaaauucug

SEQ ID NO: 815345 - RNA, 19 nt, Homo sapiens
  misc_RNA (1)...(19): siRNA sense strand
gaaagagacauguccaaug

SEQ ID NO: 815346 - RNA, 19 nt, Homo sapiens
  misc_RNA (1)...(19): siRNA sense strand
caagagacaccaccaugua

SEQ ID NO: 815347 - RNA, 19 nt, Homo sapiens
  misc_RNA (1)...(19): siRNA sense strand
gaagcgaaauaccuuagug

SEQ ID NO: 815348 - RNA, 19 nt, Homo sapiens
  misc_RNA (1)...(19): siRNA sense strand
ggauggcgguccaguuuga

SEQ ID NO: 815349 - RNA, 19 nt, Homo sapiens
  misc_RNA (1)...(19): siRNA sense strand
agacgcagcugacaucaau

SEQ ID NO: 815350 - RNA, 19 nt, Homo sapiens
  misc_RNA (1)...(19): siRNA sense strand
caagacagguucgagaaau

SEQ ID NO: 815351 - RNA, 19 nt, Homo sapiens
  misc_RNA (1)...(19): siRNA sense strand
cgagauaugaagcgaaaua

SEQ ID NO: 815352 - RNA, 19 nt, Homo sapiens
  misc_RNA (1)...(19): siRNA sense strand
aaaccaaaguaaccacauu

SEQ ID NO: 815353 - RNA, 19 nt, Homo sapiens
  misc_RNA (1)...(19): siRNA sense strand
aaaguaaccacauuggaua

SEQ ID NO: 815354 - RNA, 19 nt, Homo sapiens
  misc_RNA (1)...(19): siRNA sense strand
gcgcagaggccguggauau

SEQ ID NO: 815355 - RNA, 19 nt, Homo sapiens
  misc_RNA (1)...(19): siRNA sense strand
ggacacggugguugccuua

SEQ ID NO: 815356 - RNA, 19 nt, Homo sapiens
  misc_RNA (1)...(19): siRNA sense strand
caaaguaaccacauuggau

SEQ ID NO: 815357 - RNA, 19 nt, Homo sapiens
  misc_RNA (1)...(19): siRNA sense strand
agaccgcccugucgaguaa

SEQ ID NO: 815358 - RNA, 19 nt, Homo sapiens
  misc_RNA (1)...(19): siRNA sense strand
gcguacagacgguuuagua

SEQ ID NO: 815359 - RNA, 19 nt, Homo sapiens
  misc_RNA (1)...(19): siRNA sense strand
gaaaugguagaaaucauca

SEQ ID NO: 815360 - RNA, 19 nt, Homo sapiens
  misc_RNA (1)...(19): siRNA sense strand
cagaggccguggauauuga

SEQ ID NO: 815361 - RNA, 19 nt, Homo sapiens
  misc_RNA (1)...(19): siRNA sense strand
gcggauggcgguccaguuu

SEQ ID NO: 815362 - RNA, 19 nt, Homo sapiens
  misc_RNA (1)...(19): siRNA sense strand
ugacagcaaagaugaaauu

SEQ ID NO: 815363 - RNA, 19 nt, Homo sapiens
  misc_RNA (1)...(19): siRNA sense strand
guagaaaucaucacaaagg

SEQ ID NO: 815364 - RNA, 19 nt, Homo sapiens
  misc_RNA (1)...(19): siRNA sense strand
agaauaaguuuggacaguu

SEQ ID NO: 815365 - RNA, 19 nt, Homo sapiens
  misc_RNA (1)...(19): siRNA sense strand
gcagaggccguggauauug

SEQ ID NO: 815366 - RNA, 19 nt, Homo sapiens
  misc_RNA (1)...(19): siRNA sense strand
gagaaaugguagaaaucau

SEQ ID NO: 815367 - RNA, 19 nt, Homo sapiens
  misc_RNA (1)...(19): siRNA sense strand
ugguagaaaucaucacaaa

SEQ ID NO: 815368 - RNA, 19 nt, Homo sapiens
  misc_RNA (1)...(19): siRNA sense strand
cagaauaaguuuggacagu

SEQ ID NO: 815369 - RNA, 19 nt, Homo sapiens
  misc_RNA (1)...(19): siRNA sense strand
cggaagaugugaagagagu

SEQ ID NO: 815370 - RNA, 19 nt, Homo sapiens
  misc_RNA (1)...(19): siRNA sense strand
ggaguacccaagccuguuu

SEQ ID NO: 815371 - RNA, 19 nt, Homo sapiens
  misc_RNA (1)...(19): siRNA sense strand
gcgaaauaccuuaguggaa

SEQ ID NO: 815372 - RNA, 19 nt, Homo sapiens
  misc_RNA (1)...(19): siRNA sense strand
uagaaaucaucacaaagga

SEQ ID NO: 815373 - RNA, 19 nt, Homo sapiens
  misc_RNA (1)...(19): siRNA sense strand
aggcaccacuggauguaua

SEQ ID NO: 815374 - RNA, 19 nt, Homo sapiens
  misc_RNA (1)...(19): siRNA sense strand
uacagacgguuuaguagug

SEQ ID NO: 815375 - RNA, 19 nt, Homo sapiens
  misc_RNA (1)...(19): siRNA sense strand
caguuggccuccaccguuu

SEQ ID NO: 815376 - RNA, 19 nt, Homo sapiens
  misc_RNA (1)...(19): siRNA sense strand
ggccguggauauugacaga

SEQ ID NO: 815377 - RNA, 19 nt, Homo sapiens
  misc_RNA (1)...(19): siRNA sense strand
caguaggaauucuuaucaa

SEQ ID NO: 815378 - RNA, 19 nt, Homo sapiens
  misc_RNA (1)...(19): siRNA sense strand
gccggaagaugugaagaga

SEQ ID NO: 815379 - RNA, 19 nt, Homo sapiens
  misc_RNA (1)...(19): siRNA sense strand
guacagacgguuuaguagu

SEQ ID NO: 815380 - RNA, 19 nt, Homo sapiens
  misc_RNA (1)...(19): siRNA sense strand
cuuacuggcugaugugguu

SEQ ID NO: 815381 - RNA, 19 nt, Homo sapiens
  misc_RNA (1)...(19): siRNA sense strand
ccaagacagguucgagaaa

SEQ ID NO: 815382 - RNA, 19 nt, Homo sapiens
  misc_RNA (1)...(19): siRNA sense strand
cgagaaaugguagaaauca

SEQ ID NO: 815383 - RNA, 19 nt, Homo sapiens
  misc_RNA (1)...(19): siRNA sense strand
ucaauucaggaucgagaua

SEQ ID NO: 815384 - RNA, 19 nt, Homo sapiens
  misc_RNA (1)...(19): siRNA sense strand
ccaagacgcagcugacauc

SEQ ID NO: 815385 - RNA, 19 nt, Homo sapiens
  misc_RNA (1)...(19): siRNA sense strand
aagaugaaauucugcuuac

SEQ ID NO: 815386 - RNA, 19 nt, Homo sapiens
  misc_RNA (1)...(19): siRNA sense strand
cgcguggcaucucagaaua

SEQ ID NO: 815387 - RNA, 19 nt, Homo sapiens
  misc_RNA (1)...(19): siRNA sense strand
acacuggccuccuuugcau

SEQ ID NO: 815388 - RNA, 19 nt, Homo sapiens
  misc_RNA (1)...(19): siRNA sense strand
uugccaagcuagaaagaga

SEQ ID NO: 815389 - RNA, 19 nt, Homo sapiens
  misc_RNA (1)...(19): siRNA sense strand
uggcaucucagaauaaguu

SEQ ID NO: 815390 - RNA, 19 nt, Homo sapiens
  misc_RNA (1)...(19): siRNA sense strand
gggauugccaagcuagaaa

SEQ ID NO: 815391 - RNA, 19 nt, Homo sapiens
  misc_RNA (1)...(19): siRNA sense strand
gauaugaagcgaaauaccu

SEQ ID NO: 815392 - RNA, 19 nt, Homo sapiens
  misc_RNA (1)...(19): siRNA sense strand
gguggugccuaucccaaca

SEQ ID NO: 815393 - RNA, 19 nt, Homo sapiens
  misc_RNA (1)...(19): siRNA sense strand
aagacagguucgagaaaug

SEQ ID NO: 815394 - RNA, 19 nt, Homo sapiens
  misc_RNA (1)...(19): siRNA sense strand
caccauguaugcugugucu

SEQ ID NO: 815395 - RNA, 19 nt, Homo sapiens
  misc_RNA (1)...(19): siRNA sense strand
gaugaaauucugcuuacgu

SEQ ID NO: 815396 - RNA, 19 nt, Homo sapiens
  misc_RNA (1)...(19): siRNA sense strand
aaauucugcuuacguugga

SEQ ID NO: 815397 - RNA, 19 nt, Homo sapiens
  misc_RNA (1)...(19): siRNA sense strand
gaugaagaagucgagauga

SEQ ID NO: 815398 - RNA, 19 nt, Homo sapiens
  misc_RNA (1)...(19): siRNA sense strand
gaaaccaaaguaaccacau

SEQ ID NO: 815399 - RNA, 19 nt, Homo sapiens
  misc_RNA (1)...(19): siRNA sense strand
ugccagacaucaagagaca

SEQ ID NO: 815400 - RNA, 19 nt, Homo sapiens
  misc_RNA (1)...(19): siRNA sense strand
acaguaggaauucuuauca

SEQ ID NO: 815401 - RNA, 19 nt, Homo sapiens
  misc_RNA (1)...(19): siRNA sense strand
uacaguugauggacaggaa

SEQ ID NO: 815402 - RNA, 19 nt, Homo sapiens
  misc_RNA (1)...(19): siRNA sense strand
caagcuagaaagagacaug

SEQ ID NO: 815403 - RNA, 19 nt, Homo sapiens
  misc_RNA (1)...(19): siRNA sense strand
augaaauucugcuuacguu

SEQ ID NO: 815404 - RNA, 19 nt, Homo sapiens
  misc_RNA (1)...(19): siRNA sense strand
ucaagagacaccaccaugu

SEQ ID NO: 815405 - RNA, 19 nt, Homo sapiens
  misc_RNA (1)...(19): siRNA sense strand
gcuguucgcggcugagguu

SEQ ID NO: 815406 - RNA, 19 nt, Homo sapiens
  misc_RNA (1)...(19): siRNA sense strand
ggacaguuuuguacaguag

SEQ ID NO: 815407 - RNA, 19 nt, Homo sapiens
  misc_RNA (1)...(19): siRNA sense strand
uaugaagcgaaauaccuua

SEQ ID NO: 815408 - RNA, 19 nt, Homo sapiens
  misc_RNA (1)...(19): siRNA sense strand
uguacaguaggaauucuua

SEQ ID NO: 815409 - RNA, 19 nt, Homo sapiens
  misc_RNA (1)...(19): siRNA sense strand
aagagagucgcuucuaaga

SEQ ID NO: 815410 - RNA, 19 nt, Homo sapiens
  misc_RNA (1)...(19): siRNA sense strand
gccacucgcuccagaaagc

SEQ ID NO: 815411 - RNA, 19 nt, Homo sapiens
  misc_RNA (1)...(19): siRNA sense strand
caucacaaaggaguuuauu

SEQ ID NO: 815412 - RNA, 19 nt, Homo sapiens
  misc_RNA (1)...(19): siRNA sense strand
gcguggcaucucagaauaa

SEQ ID NO: 815413 - RNA, 19 nt, Homo sapiens
  misc_RNA (1)...(19): siRNA sense strand
ggacugugcccggaaguac

SEQ ID NO: 815414 - RNA, 19 nt, Homo sapiens
  misc_RNA (1)...(19): siRNA sense strand
uaugcugugucugcugaua

SEQ ID NO: 815415 - RNA, 19 nt, Homo sapiens
  misc_RNA (1)...(19): siRNA sense strand
cagaaaacguagcaaagau

SEQ ID NO: 815416 - RNA, 19 nt, Homo sapiens
  misc_RNA (1)...(19): siRNA sense strand
uguauaacgcgaccuccua

SEQ ID NO: 815417 - RNA, 19 nt, Homo sapiens
  misc_RNA (1)...(19): siRNA sense strand
caaagaugaaauucugcuu

SEQ ID NO: 815418 - RNA, 19 nt, Homo sapiens
  misc_RNA (1)...(19): siRNA sense strand
gcaacgugaagccggaaga

SEQ ID NO: 815419 - RNA, 19 nt, Homo sapiens
  misc_RNA (1)...(19): siRNA sense strand
agaaaugguagaaaucauc

SEQ ID NO: 815420 - RNA, 19 nt, Homo sapiens
  misc_RNA (1)...(19): siRNA sense strand
uucgagaaaugguagaaau

SEQ ID NO: 815421 - RNA, 19 nt, Homo sapiens
  misc_RNA (1)...(19): siRNA sense strand
ucuccaggcucuaccucaa

SEQ ID NO: 815422 - RNA, 19 nt, Homo sapiens
  misc_RNA (1)...(19): siRNA sense strand
gaaaacguagcaaagauca

SEQ ID NO: 815423 - RNA, 19 nt, Homo sapiens
  misc_RNA (1)...(19): siRNA sense strand
ggacaggaaaaguuugaaa

SEQ ID NO: 815424 - RNA, 19 nt, Homo sapiens
  misc_RNA (1)...(19): siRNA sense strand
guacaguaggaauucuuau

SEQ ID NO: 815425 - RNA, 19 nt, Homo sapiens
  misc_RNA (1)...(19): siRNA sense strand
caucucagaauaaguuugg

SEQ ID NO: 815426 - RNA, 19 nt, Homo sapiens
  misc_RNA (1)...(19): siRNA sense strand
gagcuggaacgagccaaga

SEQ ID NO: 815427 - RNA, 19 nt, Homo sapiens
  misc_RNA (1)...(19): siRNA sense strand
agaaagagacauguccaau

SEQ ID NO: 815428 - RNA, 19 nt, Homo sapiens
  misc_RNA (1)...(19): siRNA sense strand
ccguggauauugacagauc

SEQ ID NO: 815429 - RNA, 19 nt, Homo sapiens
  misc_RNA (1)...(19): siRNA sense strand
uaguagugguggugccuau

SEQ ID NO: 815430 - RNA, 19 nt, Homo sapiens
  misc_RNA (1)...(19): siRNA sense strand
caauucaggaucgagauau

SEQ ID NO: 815431 - RNA, 19 nt, Homo sapiens
  misc_RNA (1)...(19): siRNA sense strand
aaucaucacaaaggaguuu

SEQ ID NO: 815432 - RNA, 19 nt, Homo sapiens
  misc_RNA (1)...(19): siRNA sense strand
aucgagauaugaagcgaaa

SEQ ID NO: 815433 - RNA, 19 nt, Homo sapiens
  misc_RNA (1)...(19): siRNA sense strand
ggaauccaggccugugauc

SEQ ID NO: 815434 - RNA, 19 nt, Homo sapiens
  misc_RNA (1)...(19): siRNA sense strand
gguagaaaucaucacaaag

SEQ ID NO: 815435 - RNA, 19 nt, Homo sapiens
  misc_RNA (1)...(19): siRNA sense strand
gacacuggccuccuuugca

SEQ ID NO: 815436 - RNA, 19 nt, Homo sapiens
  misc_RNA (1)...(19): siRNA sense strand
ggacacuggccuccuuugc

SEQ ID NO: 815437 - RNA, 19 nt, Homo sapiens
  misc_RNA (1)...(19): siRNA sense strand
cagcaaagauuccaugaaa

SEQ ID NO: 815438 - RNA, 19 nt, Homo sapiens
  misc_RNA (1)...(19): siRNA sense strand
gcaaagauuccaugaaauu

SEQ ID NO: 815439 - RNA, 19 nt, Homo sapiens
  misc_RNA (1)...(19): siRNA sense strand
aaacgccucuucacacuaa

SEQ ID NO: 815440 - RNA, 19 nt, Homo sapiens
  misc_RNA (1)...(19): siRNA sense strand
ggacuaaaccaacauggaa

SEQ ID NO: 815441 - RNA, 19 nt, Homo sapiens
  misc_RNA (1)...(19): siRNA sense strand
gcugauggcugauaaaguc

SEQ ID NO: 815442 - RNA, 19 nt, Homo sapiens
  misc_RNA (1)...(19): siRNA sense strand
aaaccaacauggaaucauu

SEQ ID NO: 815443 - RNA, 19 nt, Homo sapiens
  misc_RNA (1)...(19): siRNA sense strand
ccuaagauguacuucauga

SEQ ID NO: 815444 - RNA, 19 nt, Homo sapiens
  misc_RNA (1)...(19): siRNA sense strand
ggaaacgccucuucacacu

SEQ ID NO: 815445 - RNA, 19 nt, Homo sapiens
  misc_RNA (1)...(19): siRNA sense strand
gugcuuggcugacuaccuu

SEQ ID NO: 815446 - RNA, 19 nt, Homo sapiens
  misc_RNA (1)...(19): siRNA sense strand
gaagaacagcugcaaggau

SEQ ID NO: 815447 - RNA, 19 nt, Homo sapiens
  misc_RNA (1)...(19): siRNA sense strand
caagagggagauaaacaaa

SEQ ID NO: 815448 - RNA, 19 nt, Homo sapiens
  misc_RNA (1)...(19): siRNA sense strand
ucaugggugugguuucuuu

SEQ ID NO: 815449 - RNA, 19 nt, Homo sapiens
  misc_RNA (1)...(19): siRNA sense strand
ucuuugguguuucugauua

SEQ ID NO: 815450 - RNA, 19 nt, Homo sapiens
  misc_RNA (1)...(19): siRNA sense strand
uaaauggaccacugaacaa

SEQ ID NO: 815451 - RNA, 19 nt, Homo sapiens
  misc_RNA (1)...(19): siRNA sense strand
gaaacgccucuucacacua

SEQ ID NO: 815452 - RNA, 19 nt, Homo sapiens
  misc_RNA (1)...(19): siRNA sense strand
cugauuaucuacuaucuag

SEQ ID NO: 815453 - RNA, 19 nt, Homo sapiens
  misc_RNA (1)...(19): siRNA sense strand
ugacuaccuuguucccauu

SEQ ID NO: 815454 - RNA, 19 nt, Homo sapiens
  misc_RNA (1)...(19): siRNA sense strand
ccaauaaauggaccacuga

SEQ ID NO: 815455 - RNA, 19 nt, Homo sapiens
  misc_RNA (1)...(19): siRNA sense strand
ccaagagggagauaaacaa

SEQ ID NO: 815456 - RNA, 19 nt, Homo sapiens
  misc_RNA (1)...(19): siRNA sense strand
caacauggaaucauuuuga

SEQ ID NO: 815457 - RNA, 19 nt, Homo sapiens
  misc_RNA (1)...(19): siRNA sense strand
ggaagaacagcugcaagga

SEQ ID NO: 815458 - RNA, 19 nt, Homo sapiens
  misc_RNA (1)...(19): siRNA sense strand
cugcaagucuggaagaaca

SEQ ID NO: 815459 - RNA, 19 nt, Homo sapiens
  misc_RNA (1)...(19): siRNA sense strand
agagggagauaaacaaacu

SEQ ID NO: 815460 - RNA, 19 nt, Homo sapiens
  misc_RNA (1)...(19): siRNA sense strand
caucaugggugugguuucu

SEQ ID NO: 815461 - RNA, 19 nt, Homo sapiens
  misc_RNA (1)...(19): siRNA sense strand
gaacaacagcaaagauucc

SEQ ID NO: 815462 - RNA, 19 nt, Homo sapiens
  misc_RNA (1)...(19): siRNA sense strand
ugaugcugauggcugauaa

SEQ ID NO: 815463 - RNA, 19 nt, Homo sapiens
  misc_RNA (1)...(19): siRNA sense strand
acaaccugcuucucaccua

SEQ ID NO: 815464 - RNA, 19 nt, Homo sapiens
  misc_RNA (1)...(19): siRNA sense strand
gagauaaucgcagcaccaa

SEQ ID NO: 815465 - RNA, 19 nt, Homo sapiens
  misc_RNA (1)...(19): siRNA sense strand
gcuucucaccuaccugaua

SEQ ID NO: 815466 - RNA, 19 nt, Homo sapiens
  misc_RNA (1)...(19): siRNA sense strand
aaccuaagauguacuucau

SEQ ID NO: 815467 - RNA, 19 nt, Homo sapiens
  misc_RNA (1)...(19): siRNA sense strand
gacaacaaguccacaaccu

SEQ ID NO: 815468 - RNA, 19 nt, Homo sapiens
  misc_RNA (1)...(19): siRNA sense strand
ccugauagugacuuccuua

SEQ ID NO: 815469 - RNA, 19 nt, Homo sapiens
  misc_RNA (1)...(19): siRNA sense strand
uguccggcguuuccuguuu

SEQ ID NO: 815470 - RNA, 19 nt, Homo sapiens
  misc_RNA (1)...(19): siRNA sense strand
gccaagagggagauaaaca

SEQ ID NO: 815471 - RNA, 19 nt, Homo sapiens
  misc_RNA (1)...(19): siRNA sense strand
ggcguuuccuguuuuguua

SEQ ID NO: 815472 - RNA, 19 nt, Homo sapiens
  misc_RNA (1)...(19): siRNA sense strand
cugaacaacagcaaagauu

SEQ ID NO: 815473 - RNA, 19 nt, Homo sapiens
  misc_RNA (1)...(19): siRNA sense strand
cuaccuuguucccauucua

SEQ ID NO: 815474 - RNA, 19 nt, Homo sapiens
  misc_RNA (1)...(19): siRNA sense strand
ccacugaacaacagcaaag

SEQ ID NO: 815475 - RNA, 19 nt, Homo sapiens
  misc_RNA (1)...(19): siRNA sense strand
auaaauggaccacugaaca

SEQ ID NO: 815476 - RNA, 19 nt, Homo sapiens
  misc_RNA (1)...(19): siRNA sense strand
guccacaaccugcuucuca

SEQ ID NO: 815477 - RNA, 19 nt, Homo sapiens
  misc_RNA (1)...(19): siRNA sense strand
ugaacaacagcaaagauuc

SEQ ID NO: 815478 - RNA, 19 nt, Homo sapiens
  misc_RNA (1)...(19): siRNA sense strand
ugugguuucuuugguguuu

SEQ ID NO: 815479 - RNA, 19 nt, Homo sapiens
  misc_RNA (1)...(19): siRNA sense strand
caauaaauggaccacugaa

SEQ ID NO: 815480 - RNA, 19 nt, Homo sapiens
  misc_RNA (1)...(19): siRNA sense strand
aaaguccuccgaugggaaa

SEQ ID NO: 815481 - RNA, 19 nt, Homo sapiens
  misc_RNA (1)...(19): siRNA sense strand
ggaaucauuuugaaguaca

SEQ ID NO: 815482 - RNA, 19 nt, Homo sapiens
  misc_RNA (1)...(19): siRNA sense strand
aagauuccaugaaauuugc

SEQ ID NO: 815483 - RNA, 19 nt, Homo sapiens
  misc_RNA (1)...(19): siRNA sense strand
cuucucaccuaccugauag

SEQ ID NO: 815484 - RNA, 19 nt, Homo sapiens
  misc_RNA (1)...(19): siRNA sense strand
ccucuucacacuaaaggaa

SEQ ID NO: 815485 - RNA, 19 nt, Homo sapiens
  misc_RNA (1)...(19): siRNA sense strand
ugguguuucugauuaucua

SEQ ID NO: 815486 - RNA, 19 nt, Homo sapiens
  misc_RNA (1)...(19): siRNA sense strand
aaaccuaagauguacuuca

SEQ ID NO: 815487 - RNA, 19 nt, Homo sapiens
  misc_RNA (1)...(19): siRNA sense strand
gaugggaaagagccugguu

SEQ ID NO: 815488 - RNA, 19 nt, Homo sapiens
  misc_RNA (1)...(19): siRNA sense strand
acuauugcuuccuggacua

SEQ ID NO: 815489 - RNA, 19 nt, Homo sapiens
  misc_RNA (1)...(19): siRNA sense strand
guuuccaccugccaucaug

SEQ ID NO: 815490 - RNA, 19 nt, Homo sapiens
  misc_RNA (1)...(19): siRNA sense strand
guggaaacgccucuucaca

SEQ ID NO: 815491 - RNA, 19 nt, Homo sapiens
  misc_RNA (1)...(19): siRNA sense strand
gcuguggguugguggaaac

SEQ ID NO: 815492 - RNA, 19 nt, Homo sapiens
  misc_RNA (1)...(19): siRNA sense strand
caugaucguuucccuugcu

SEQ ID NO: 815493 - RNA, 19 nt, Homo sapiens
  misc_RNA (1)...(19): siRNA sense strand
gacuaaaccaacauggaau

SEQ ID NO: 815494 - RNA, 19 nt, Homo sapiens
  misc_RNA (1)...(19): siRNA sense strand
ggaaauaucggaaccagaa

SEQ ID NO: 815495 - RNA, 19 nt, Homo sapiens
  misc_RNA (1)...(19): siRNA sense strand
gaacugggauucacaucga

SEQ ID NO: 815496 - RNA, 19 nt, Homo sapiens
  misc_RNA (1)...(19): siRNA sense strand
ggauaacgauggcuacuca

SEQ ID NO: 815497 - RNA, 19 nt, Homo sapiens
  misc_RNA (1)...(19): siRNA sense strand
gaaggaaacuuuuggaaga

SEQ ID NO: 815498 - RNA, 19 nt, Homo sapiens
  misc_RNA (1)...(19): siRNA sense strand
ggagagcacucgagaugau

SEQ ID NO: 815499 - RNA, 19 nt, Homo sapiens
  misc_RNA (1)...(19): siRNA sense strand
gaccaaaguuaucaaggaa

SEQ ID NO: 815500 - RNA, 19 nt, Homo sapiens
  misc_RNA (1)...(19): siRNA sense strand
ucaaggaaaugguauagga

SEQ ID NO: 815501 - RNA, 19 nt, Homo sapiens
  misc_RNA (1)...(19): siRNA sense strand
ccagggaacucaucaaagu

SEQ ID NO: 815502 - RNA, 19 nt, Homo sapiens
  misc_RNA (1)...(19): siRNA sense strand
gaagcuauuaccugguuua

SEQ ID NO: 815503 - RNA, 19 nt, Homo sapiens
  misc_RNA (1)...(19): siRNA sense strand
ccaaaguuaucaaggaaau

SEQ ID NO: 815504 - RNA, 19 nt, Homo sapiens
  misc_RNA (1)...(19): siRNA sense strand
caacuucccugugguaugg

SEQ ID NO: 815505 - RNA, 19 nt, Homo sapiens
  misc_RNA (1)...(19): siRNA sense strand
caaagugacccgagacgaa

SEQ ID NO: 815506 - RNA, 19 nt, Homo sapiens
  misc_RNA (1)...(19): siRNA sense strand
cagugaagaugaagaugaa

SEQ ID NO: 815507 - RNA, 19 nt, Homo sapiens
  misc_RNA (1)...(19): siRNA sense strand
agaccaaaguuaucaagga

SEQ ID NO: 815508 - RNA, 19 nt, Homo sapiens
  misc_RNA (1)...(19): siRNA sense strand
caaccuggccaccugaauu

SEQ ID NO: 815509 - RNA, 19 nt, Homo sapiens
  misc_RNA (1)...(19): siRNA sense strand
ggaggcugguggcauguug

SEQ ID NO: 815510 - RNA, 19 nt, Homo sapiens
  misc_RNA (1)...(19): siRNA sense strand
ggacccggcacaacuacua

SEQ ID NO: 815511 - RNA, 19 nt, Homo sapiens
  misc_RNA (1)...(19): siRNA sense strand
cagcaagacgaagcuauua

SEQ ID NO: 815512 - RNA, 19 nt, Homo sapiens
  misc_RNA (1)...(19): siRNA sense strand
gcuacucagugaagaugaa

SEQ ID NO: 815513 - RNA, 19 nt, Homo sapiens
  misc_RNA (1)...(19): siRNA sense strand
ggucugcgcaggagaaaug

SEQ ID NO: 815514 - RNA, 19 nt, Homo sapiens
  misc_RNA (1)...(19): siRNA sense strand
ccuuacaggugguuuguga

SEQ ID NO: 815515 - RNA, 19 nt, Homo sapiens
  misc_RNA (1)...(19): siRNA sense strand
acuacaaggugccaaaguu

SEQ ID NO: 815516 - RNA, 19 nt, Homo sapiens
  misc_RNA (1)...(19): siRNA sense strand
cuacaaggugccaaaguuu

SEQ ID NO: 815517 - RNA, 19 nt, Homo sapiens
  misc_RNA (1)...(19): siRNA sense strand
aacgauggcuacucaguga

SEQ ID NO: 815518 - RNA, 19 nt, Homo sapiens
  misc_RNA (1)...(19): siRNA sense strand
guucaaguguggugaggau

SEQ ID NO: 815519 - RNA, 19 nt, Homo sapiens
  misc_RNA (1)...(19): siRNA sense strand
ucaaguguggugaggauaa

SEQ ID NO: 815520 - RNA, 19 nt, Homo sapiens
  misc_RNA (1)...(19): siRNA sense strand
uaagagggagaccaaaguu

SEQ ID NO: 815521 - RNA, 19 nt, Homo sapiens
  misc_RNA (1)...(19): siRNA sense strand
ucagugaagaugaagauga

SEQ ID NO: 815522 - RNA, 19 nt, Homo sapiens
  misc_RNA (1)...(19): siRNA sense strand
guaagagggagaccaaagu

SEQ ID NO: 815523 - RNA, 19 nt, Homo sapiens
  misc_RNA (1)...(19): siRNA sense strand
ccagcaagacgaagcuauu

SEQ ID NO: 815524 - RNA, 19 nt, Homo sapiens
  misc_RNA (1)...(19): siRNA sense strand
gagagcacucgagaugaua

SEQ ID NO: 815525 - RNA, 19 nt, Homo sapiens
  misc_RNA (1)...(19): siRNA sense strand
acgaagcuauuaccugguu

SEQ ID NO: 815526 - RNA, 19 nt, Homo sapiens
  misc_RNA (1)...(19): siRNA sense strand
ucaaggacucgcuggauug

SEQ ID NO: 815527 - RNA, 19 nt, Homo sapiens
  misc_RNA (1)...(19): siRNA sense strand
gagaugauaguccccuuua

SEQ ID NO: 815528 - RNA, 19 nt, Homo sapiens
  misc_RNA (1)...(19): siRNA sense strand
cagacucgguugaccuuca

SEQ ID NO: 815529 - RNA, 19 nt, Homo sapiens
  misc_RNA (1)...(19): siRNA sense strand
agagggagaccaaaguuau

SEQ ID NO: 815530 - RNA, 19 nt, Homo sapiens
  misc_RNA (1)...(19): siRNA sense strand
gaagaugaagaugaaauac

SEQ ID NO: 815531 - RNA, 19 nt, Homo sapiens
  misc_RNA (1)...(19): siRNA sense strand
cucaaggacucgcuggauu

SEQ ID NO: 815532 - RNA, 19 nt, Homo sapiens
  misc_RNA (1)...(19): siRNA sense strand
gguaugaaagaccuuacaa

SEQ ID NO: 815533 - RNA, 19 nt, Homo sapiens
  misc_RNA (1)...(19): siRNA sense strand
aagagggagaccaaaguua

SEQ ID NO: 815534 - RNA, 19 nt, Homo sapiens
  misc_RNA (1)...(19): siRNA sense strand
cugaugaccuuuuccagua

SEQ ID NO: 815535 - RNA, 19 nt, Homo sapiens
  misc_RNA (1)...(19): siRNA sense strand
ugacagcagcuauggugaa

SEQ ID NO: 815536 - RNA, 19 nt, Homo sapiens
  misc_RNA (1)...(19): siRNA sense strand
ucaggaguccacagggaua

SEQ ID NO: 815537 - RNA, 19 nt, Homo sapiens
  misc_RNA (1)...(19): siRNA sense strand
gguaagagggagaccaaag

SEQ ID NO: 815538 - RNA, 19 nt, Homo sapiens
  misc_RNA (1)...(19): siRNA sense strand
gguauaggauuuugaagca

SEQ ID NO: 815539 - RNA, 19 nt, Homo sapiens
  misc_RNA (1)...(19): siRNA sense strand
gauggcuacucagugaaga

SEQ ID NO: 815540 - RNA, 19 nt, Homo sapiens
  misc_RNA (1)...(19): siRNA sense strand
gguggcauguuguccucaa

SEQ ID NO: 815541 - RNA, 19 nt, Homo sapiens
  misc_RNA (1)...(19): siRNA sense strand
ggaaacuuuuggaagacua

SEQ ID NO: 815542 - RNA, 19 nt, Homo sapiens
  misc_RNA (1)...(19): siRNA sense strand
gugaagaugaagaugaaau

SEQ ID NO: 815543 - RNA, 19 nt, Homo sapiens
  misc_RNA (1)...(19): siRNA sense strand
gagggagaccaaaguuauc

SEQ ID NO: 815544 - RNA, 19 nt, Homo sapiens
  misc_RNA (1)...(19): siRNA sense strand
cuggccaccugaauucaaa

SEQ ID NO: 815545 - RNA, 19 nt, Homo sapiens
  misc_RNA (1)...(19): siRNA sense strand
ugccuggaaugccuuaguu

SEQ ID NO: 815546 - RNA, 19 nt, Homo sapiens
  misc_RNA (1)...(19): siRNA sense strand
cagcagcuauggugaacac

SEQ ID NO: 815547 - RNA, 19 nt, Homo sapiens
  misc_RNA (1)...(19): siRNA sense strand
gacagcagcuauggugaac

SEQ ID NO: 815548 - RNA, 19 nt, Homo sapiens
  misc_RNA (1)...(19): siRNA sense strand
caagcgcuggugccuguuu

SEQ ID NO: 815549 - RNA, 19 nt, Homo sapiens
  misc_RNA (1)...(19): siRNA sense strand
caaggaaaugguauaggau

SEQ ID NO: 815550 - RNA, 19 nt, Homo sapiens
  misc_RNA (1)...(19): siRNA sense strand
ggagaccaaaguuaucaag

SEQ ID NO: 815551 - RNA, 19 nt, Homo sapiens
  misc_RNA (1)...(19): siRNA sense strand
cgaaggagggaaccagcaa

SEQ ID NO: 815552 - RNA, 19 nt, Homo sapiens
  misc_RNA (1)...(19): siRNA sense strand
cgaagcuauuaccugguuu

SEQ ID NO: 815553 - RNA, 19 nt, Homo sapiens
  misc_RNA (1)...(19): siRNA sense strand
cgacagcuccagcgacucu

SEQ ID NO: 815554 - RNA, 19 nt, Homo sapiens
  misc_RNA (1)...(19): siRNA sense strand
aaggaaaugguauaggauu

SEQ ID NO: 815555 - RNA, 19 nt, Homo sapiens
  misc_RNA (1)...(19): siRNA sense strand
ggcauguuguccucaaucu

SEQ ID NO: 815556 - RNA, 19 nt, Homo sapiens
  misc_RNA (1)...(19): siRNA sense strand
gaaauaucggaaccagaag

SEQ ID NO: 815557 - RNA, 19 nt, Homo sapiens
  misc_RNA (1)...(19): siRNA sense strand
cgucagacuccgacucaga

SEQ ID NO: 815558 - RNA, 19 nt, Homo sapiens
  misc_RNA (1)...(19): siRNA sense strand
guauggcacaagacgguaa

SEQ ID NO: 815559 - RNA, 19 nt, Homo sapiens
  misc_RNA (1)...(19): siRNA sense strand
ucaaaccccuggaaaucuu

SEQ ID NO: 815560 - RNA, 19 nt, Homo sapiens
  misc_RNA (1)...(19): siRNA sense strand
gaaccacaagagcaagaag

SEQ ID NO: 815561 - RNA, 19 nt, Homo sapiens
  misc_RNA (1)...(19): siRNA sense strand
uuacaggugguuugugaug

SEQ ID NO: 815562 - RNA, 19 nt, Homo sapiens
  misc_RNA (1)...(19): siRNA sense strand
caaguguggugaggauaac

SEQ ID NO: 815563 - RNA, 19 nt, Homo sapiens
  misc_RNA (1)...(19): siRNA sense strand
gcucaaggacucgcuggau

SEQ ID NO: 815564 - RNA, 19 nt, Homo sapiens
  misc_RNA (1)...(19): siRNA sense strand
guaugaaagaccuuacaag

SEQ ID NO: 815565 - RNA, 19 nt, Homo sapiens
  misc_RNA (1)...(19): siRNA sense strand
gcaagagcaccccgaguug

SEQ ID NO: 815566 - RNA, 19 nt, Homo sapiens
  misc_RNA (1)...(19): siRNA sense strand
gauuggacccggcacaacu

SEQ ID NO: 815567 - RNA, 19 nt, Homo sapiens
  misc_RNA (1)...(19): siRNA sense strand
ugacuagggccaccaauaa

SEQ ID NO: 815568 - RNA, 19 nt, Homo sapiens
  misc_RNA (1)...(19): siRNA sense strand
gaggaaagaggaggaagua

SEQ ID NO: 815569 - RNA, 19 nt, Homo sapiens
  misc_RNA (1)...(19): siRNA sense strand
ggacuuugcagccgagaaa

SEQ ID NO: 815570 - RNA, 19 nt, Homo sapiens
  misc_RNA (1)...(19): siRNA sense strand
ggacgaggcagagaaguug

SEQ ID NO: 815571 - RNA, 19 nt, Homo sapiens
  misc_RNA (1)...(19): siRNA sense strand
ccaaagaauggcugauuga

SEQ ID NO: 815572 - RNA, 19 nt, Homo sapiens
  misc_RNA (1)...(19): siRNA sense strand
caagaagccucagcuggau

SEQ ID NO: 815573 - RNA, 19 nt, Homo sapiens
  misc_RNA (1)...(19): siRNA sense strand
gcaucacggugcacaagga

SEQ ID NO: 815574 - RNA, 19 nt, Homo sapiens
  misc_RNA (1)...(19): siRNA sense strand
ggacgacaccaaagaaugg

SEQ ID NO: 815575 - RNA, 19 nt, Homo sapiens
  misc_RNA (1)...(19): siRNA sense strand
acacgcaacugcucaucaa

SEQ ID NO: 815576 - RNA, 19 nt, Homo sapiens
  misc_RNA (1)...(19): siRNA sense strand
aggaaaggguggccaagaa

SEQ ID NO: 815577 - RNA, 19 nt, Homo sapiens
  misc_RNA (1)...(19): siRNA sense strand
ggauucaggccaagaagga

SEQ ID NO: 815578 - RNA, 19 nt, Homo sapiens
  misc_RNA (1)...(19): siRNA sense strand
gccagaagggcaagagaaa

SEQ ID NO: 815579 - RNA, 19 nt, Homo sapiens
  misc_RNA (1)...(19): siRNA sense strand
ggagcugcuucgugucaug

SEQ ID NO: 815580 - RNA, 19 nt, Homo sapiens
  misc_RNA (1)...(19): siRNA sense strand
gugacuagggccaccaaua

SEQ ID NO: 815581 - RNA, 19 nt, Homo sapiens
  misc_RNA (1)...(19): siRNA sense strand
accaaagaauggcugauug

SEQ ID NO: 815582 - RNA, 19 nt, Homo sapiens
  misc_RNA (1)...(19): siRNA sense strand
ggaggaaagaggaggaagu

SEQ ID NO: 815583 - RNA, 19 nt, Homo sapiens
  misc_RNA (1)...(19): siRNA sense strand
gggacgacaccaaagaaug

SEQ ID NO: 815584 - RNA, 19 nt, Homo sapiens
  misc_RNA (1)...(19): siRNA sense strand
caccaaagaauggcugauu

SEQ ID NO: 815585 - RNA, 19 nt, Homo sapiens
  misc_RNA (1)...(19): siRNA sense strand
ggaggaaaaugagccagaa

SEQ ID NO: 815586 - RNA, 19 nt, Homo sapiens
  misc_RNA (1)...(19): siRNA sense strand
ggaaaggguggccaagaac

SEQ ID NO: 815587 - RNA, 19 nt, Homo sapiens
  misc_RNA (1)...(19): siRNA sense strand
cuaccggacaccagaguaa

SEQ ID NO: 815588 - RNA, 19 nt, Homo sapiens
  misc_RNA (1)...(19): siRNA sense strand
gagaaguugcaacgcauca

SEQ ID NO: 815589 - RNA, 19 nt, Homo sapiens
  misc_RNA (1)...(19): siRNA sense strand
gcaggacgaggcagagaag

SEQ ID NO: 815590 - RNA, 19 nt, Homo sapiens
  misc_RNA (1)...(19): siRNA sense strand
gccaagaggaggaaaauga

SEQ ID NO: 815591 - RNA, 19 nt, Homo sapiens
  misc_RNA (1)...(19): siRNA sense strand
gagcugcuucgugucauga

SEQ ID NO: 815592 - RNA, 19 nt, Homo sapiens
  misc_RNA (1)...(19): siRNA sense strand
cagaagggcaagagaaagg

SEQ ID NO: 815593 - RNA, 19 nt, Homo sapiens
  misc_RNA (1)...(19): siRNA sense strand
ccaugcaaguggccaaggu

SEQ ID NO: 815594 - RNA, 19 nt, Homo sapiens
  misc_RNA (1)...(19): siRNA sense strand
gcgcguggaagaggcgaua

SEQ ID NO: 815595 - RNA, 19 nt, Homo sapiens
  misc_RNA (1)...(19): siRNA sense strand
gagcaggacgaggcagaga

SEQ ID NO: 815596 - RNA, 19 nt, Homo sapiens
  misc_RNA (1)...(19): siRNA sense strand
ggaggcaagaugaauucug

SEQ ID NO: 815597 - RNA, 19 nt, Homo sapiens
  misc_RNA (1)...(19): siRNA sense strand
ggaaauccaugccauauga

SEQ ID NO: 815598 - RNA, 19 nt, Homo sapiens
  misc_RNA (1)...(19): siRNA sense strand
ggaaguaugugcacaauca

SEQ ID NO: 815599 - RNA, 19 nt, Homo sapiens
  misc_RNA (1)...(19): siRNA sense strand
ggagaauacuuacaucauu

SEQ ID NO: 815600 - RNA, 19 nt, Homo sapiens
  misc_RNA (1)...(19): siRNA sense strand
caaaucacuugcccaaaua

SEQ ID NO: 815601 - RNA, 19 nt, Homo sapiens
  misc_RNA (1)...(19): siRNA sense strand
gaauguagcugcaguaaac

SEQ ID NO: 815602 - RNA, 19 nt, Homo sapiens
  misc_RNA (1)...(19): siRNA sense strand
gaagaagaauugcaagugu

SEQ ID NO: 815603 - RNA, 19 nt, Homo sapiens
  misc_RNA (1)...(19): siRNA sense strand
ggaagaagaagaagaauug

SEQ ID NO: 815604 - RNA, 19 nt, Homo sapiens
  misc_RNA (1)...(19): siRNA sense strand
uaacaacacuggcuacaga

SEQ ID NO: 815605 - RNA, 19 nt, Homo sapiens
  misc_RNA (1)...(19): siRNA sense strand
gaaggaagccugaggaaug

SEQ ID NO: 815606 - RNA, 19 nt, Homo sapiens
  misc_RNA (1)...(19): siRNA sense strand
gagaauggcuuggauuaau

SEQ ID NO: 815607 - RNA, 19 nt, Homo sapiens
  misc_RNA (1)...(19): siRNA sense strand
ggaaguagauagcaaacug

SEQ ID NO: 815608 - RNA, 19 nt, Homo sapiens
  misc_RNA (1)...(19): siRNA sense strand
ggaaggaccauaaggcaua

SEQ ID NO: 815609 - RNA, 19 nt, Homo sapiens
  misc_RNA (1)...(19): siRNA sense strand
cgagaaagauuauggaaca

SEQ ID NO: 815610 - RNA, 19 nt, Homo sapiens
  misc_RNA (1)...(19): siRNA sense strand
gaagaauccagcaagaaua

SEQ ID NO: 815611 - RNA, 19 nt, Homo sapiens
  misc_RNA (1)...(19): siRNA sense strand
gguaacagguuucgaacaa

SEQ ID NO: 815612 - RNA, 19 nt, Homo sapiens
  misc_RNA (1)...(19): siRNA sense strand
ucacagacuuaaucacuaa

SEQ ID NO: 815613 - RNA, 19 nt, Homo sapiens
  misc_RNA (1)...(19): siRNA sense strand
caaggaggcugcucaggaa

SEQ ID NO: 815614 - RNA, 19 nt, Homo sapiens
  misc_RNA (1)...(19): siRNA sense strand
gcaguaaacaaagcuauua

SEQ ID NO: 815615 - RNA, 19 nt, Homo sapiens
  misc_RNA (1)...(19): siRNA sense strand
gaagugagaggacaucuga

SEQ ID NO: 815616 - RNA, 19 nt, Homo sapiens
  misc_RNA (1)...(19): siRNA sense strand
ucaaaucacuugcccaaau

SEQ ID NO: 815617 - RNA, 19 nt, Homo sapiens
  misc_RNA (1)...(19): siRNA sense strand
ugacauaaaucuggaagaa

SEQ ID NO: 815618 - RNA, 19 nt, Homo sapiens
  misc_RNA (1)...(19): siRNA sense strand
gcacgaguucuaacaauaa

SEQ ID NO: 815619 - RNA, 19 nt, Homo sapiens
  misc_RNA (1)...(19): siRNA sense strand
cuaacgagagcauuaauua

SEQ ID NO: 815620 - RNA, 19 nt, Homo sapiens
  misc_RNA (1)...(19): siRNA sense strand
ggauacaucuggcaagcuu

SEQ ID NO: 815621 - RNA, 19 nt, Homo sapiens
  misc_RNA (1)...(19): siRNA sense strand
acauaaaucuggaagaaga

SEQ ID NO: 815622 - RNA, 19 nt, Homo sapiens
  misc_RNA (1)...(19): siRNA sense strand
ggaagaauccagcaagaau

SEQ ID NO: 815623 - RNA, 19 nt, Homo sapiens
  misc_RNA (1)...(19): siRNA sense strand
gaggacaucugaagagaag

SEQ ID NO: 815624 - RNA, 19 nt, Homo sapiens
  misc_RNA (1)...(19): siRNA sense strand
gcaggaugcuggcagauag

SEQ ID NO: 815625 - RNA, 19 nt, Homo sapiens
  misc_RNA (1)...(19): siRNA sense strand
caccaaauauggauaaaca

SEQ ID NO: 815626 - RNA, 19 nt, Homo sapiens
  misc_RNA (1)...(19): siRNA sense strand
gauagcaaacugcaacuuu

SEQ ID NO: 815627 - RNA, 19 nt, Homo sapiens
  misc_RNA (1)...(19): siRNA sense strand
cggcaagucuguccucaaa

SEQ ID NO: 815628 - RNA, 19 nt, Homo sapiens
  misc_RNA (1)...(19): siRNA sense strand
gcgagaauggcuuggauua

SEQ ID NO: 815629 - RNA, 19 nt, Homo sapiens
  misc_RNA (1)...(19): siRNA sense strand
cagaagcugucaaggauau

SEQ ID NO: 815630 - RNA, 19 nt, Homo sapiens
  misc_RNA (1)...(19): siRNA sense strand
gaauacagauccuuaucag

SEQ ID NO: 815631 - RNA, 19 nt, Homo sapiens
  misc_RNA (1)...(19): siRNA sense strand
agagagaacuguaccaauc

SEQ ID NO: 815632 - RNA, 19 nt, Homo sapiens
  misc_RNA (1)...(19): siRNA sense strand
ggacuacuucacagacuua

SEQ ID NO: 815633 - RNA, 19 nt, Homo sapiens
  misc_RNA (1)...(19): siRNA sense strand
uugaagcucugcaagauaa

SEQ ID NO: 815634 - RNA, 19 nt, Homo sapiens
  misc_RNA (1)...(19): siRNA sense strand
gcaagucuguccucaaacu

SEQ ID NO: 815635 - RNA, 19 nt, Homo sapiens
  misc_RNA (1)...(19): siRNA sense strand
ggaggcugcucaggaagua

SEQ ID NO: 815636 - RNA, 19 nt, Homo sapiens
  misc_RNA (1)...(19): siRNA sense strand
gagaggacaucugaagaga

SEQ ID NO: 815637 - RNA, 19 nt, Homo sapiens
  misc_RNA (1)...(19): siRNA sense strand
gauugaagcucugcaagau

SEQ ID NO: 815638 - RNA, 19 nt, Homo sapiens
  misc_RNA (1)...(19): siRNA sense strand
gaggcaaauuucuacguaa

SEQ ID NO: 815639 - RNA, 19 nt, Homo sapiens
  misc_RNA (1)...(19): siRNA sense strand
gaacaaaacgagaaagauu

SEQ ID NO: 815640 - RNA, 19 nt, Homo sapiens
  misc_RNA (1)...(19): siRNA sense strand
aggcauacauugacaaaga

SEQ ID NO: 815641 - RNA, 19 nt, Homo sapiens
  misc_RNA (1)...(19): siRNA sense strand
acagaucguucucaacauu

SEQ ID NO: 815642 - RNA, 19 nt, Homo sapiens
  misc_RNA (1)...(19): siRNA sense strand
caaaguacaagcccagauu

SEQ ID NO: 815643 - RNA, 19 nt, Homo sapiens
  misc_RNA (1)...(19): siRNA sense strand
gcaauggcaucaaagaaaa

SEQ ID NO: 815644 - RNA, 19 nt, Homo sapiens
  misc_RNA (1)...(19): siRNA sense strand
ggauacagcaggaacgaaa

SEQ ID NO: 815645 - RNA, 19 nt, Homo sapiens
  misc_RNA (1)...(19): siRNA sense strand
gagcguggaaggaccauaa

SEQ ID NO: 815646 - RNA, 19 nt, Homo sapiens
  misc_RNA (1)...(19): siRNA sense strand
gaaucuugauguuggaaau

SEQ ID NO: 815647 - RNA, 19 nt, Homo sapiens
  misc_RNA (1)...(19): siRNA sense strand
gaauuuaagagaagugaga

SEQ ID NO: 815648 - RNA, 19 nt, Homo sapiens
  misc_RNA (1)...(19): siRNA sense strand
agaggcaaauuucuacgua

SEQ ID NO: 815649 - RNA, 19 nt, Homo sapiens
  misc_RNA (1)...(19): siRNA sense strand
ggaggaagaaggagaggaa

SEQ ID NO: 815650 - RNA, 19 nt, Homo sapiens
  misc_RNA (1)...(19): siRNA sense strand
gaccauaaggcauacauug

SEQ ID NO: 815651 - RNA, 19 nt, Homo sapiens
  misc_RNA (1)...(19): siRNA sense strand
gaucaauagucccacagau

SEQ ID NO: 815652 - RNA, 19 nt, Homo sapiens
  misc_RNA (1)...(19): siRNA sense strand
gcucagaagcugucaagga

SEQ ID NO: 815653 - RNA, 19 nt, Homo sapiens
  misc_RNA (1)...(19): siRNA sense strand
gggcagaaguggcaaugca

SEQ ID NO: 815654 - RNA, 19 nt, Homo sapiens
  misc_RNA (1)...(19): siRNA sense strand
ccacagaucguucucaaca

SEQ ID NO: 815655 - RNA, 19 nt, Homo sapiens
  misc_RNA (1)...(19): siRNA sense strand
ggacucagccccacaguuu

SEQ ID NO: 815656 - RNA, 19 nt, Homo sapiens
  misc_RNA (1)...(19): siRNA sense strand
cuuaucagcucacaaauac

SEQ ID NO: 815657 - RNA, 19 nt, Homo sapiens
  misc_RNA (1)...(19): siRNA sense strand
ugaguuugcuacuggcuuu

SEQ ID NO: 815658 - RNA, 19 nt, Homo sapiens
  misc_RNA (1)...(19): siRNA sense strand
caauaaagagaaaggugua

SEQ ID NO: 815659 - RNA, 19 nt, Homo sapiens
  misc_RNA (1)...(19): siRNA sense strand
guaacagguuucgaacaaa

SEQ ID NO: 815660 - RNA, 19 nt, Homo sapiens
  misc_RNA (1)...(19): siRNA sense strand
ucacuugcuucacgcauga

SEQ ID NO: 815661 - RNA, 19 nt, Homo sapiens
  misc_RNA (1)...(19): siRNA sense strand
uguagaaccaggaucaaua

SEQ ID NO: 815662 - RNA, 19 nt, Homo sapiens
  misc_RNA (1)...(19): siRNA sense strand
cagcuacacguacaacuaa

SEQ ID NO: 815663 - RNA, 19 nt, Homo sapiens
  misc_RNA (1)...(19): siRNA sense strand
ugaaucagcuacacguaca

SEQ ID NO: 815664 - RNA, 19 nt, Homo sapiens
  misc_RNA (1)...(19): siRNA sense strand
gaaccugggaucuuucugu

SEQ ID NO: 815665 - RNA, 19 nt, Homo sapiens
  misc_RNA (1)...(19): siRNA sense strand
gacccaacauuauucuugu

SEQ ID NO: 815666 - RNA, 19 nt, Homo sapiens
  misc_RNA (1)...(19): siRNA sense strand
gaaagagucaacggcaauu

SEQ ID NO: 815667 - RNA, 19 nt, Homo sapiens
  misc_RNA (1)...(19): siRNA sense strand
gcucgcggcuuccaugaca

SEQ ID NO: 815668 - RNA, 19 nt, Homo sapiens
  misc_RNA (1)...(19): siRNA sense strand
gaagcugucaaggauauaa

SEQ ID NO: 815669 - RNA, 19 nt, Homo sapiens
  misc_RNA (1)...(19): siRNA sense strand
ggaagaaggagaggaagga

SEQ ID NO: 815670 - RNA, 19 nt, Homo sapiens
  misc_RNA (1)...(19): siRNA sense strand
uaacuaugcaccaaauaug

SEQ ID NO: 815671 - RNA, 19 nt, Homo sapiens
  misc_RNA (1)...(19): siRNA sense strand
ggaaauaaagauggaggaa

SEQ ID NO: 815672 - RNA, 19 nt, Homo sapiens
  misc_RNA (1)...(19): siRNA sense strand
caaccaagaaacauugcua

SEQ ID NO: 815673 - RNA, 19 nt, Homo sapiens
  misc_RNA (1)...(19): siRNA sense strand
aagcauggauuugauuaug

SEQ ID NO: 815674 - RNA, 19 nt, Homo sapiens
  misc_RNA (1)...(19): siRNA sense strand
ugcacgaguucuaacaaua

SEQ ID NO: 815675 - RNA, 19 nt, Homo sapiens
  misc_RNA (1)...(19): siRNA sense strand
aagaagaauugcaaguguu

SEQ ID NO: 815676 - RNA, 19 nt, Homo sapiens
  misc_RNA (1)...(19): siRNA sense strand
gaaggugaaauauaugaca

SEQ ID NO: 815677 - RNA, 19 nt, Homo sapiens
  misc_RNA (1)...(19): siRNA sense strand
gcagaaguggcaaugcauu

SEQ ID NO: 815678 - RNA, 19 nt, Homo sapiens
  misc_RNA (1)...(19): siRNA sense strand
gaacgggucaaagaacuau

SEQ ID NO: 815679 - RNA, 19 nt, Homo sapiens
  misc_RNA (1)...(19): siRNA sense strand
cgagagcauuaauuacuuc

SEQ ID NO: 815680 - RNA, 19 nt, Homo sapiens
  misc_RNA (1)...(19): siRNA sense strand
ggauggaugggaagguuaa

SEQ ID NO: 815681 - RNA, 19 nt, Homo sapiens
  misc_RNA (1)...(19): siRNA sense strand
ggacaguuaugggauggau

SEQ ID NO: 815682 - RNA, 19 nt, Homo sapiens
  misc_RNA (1)...(19): siRNA sense strand
guuaaugagacgcauaauu

SEQ ID NO: 815683 - RNA, 19 nt, Homo sapiens
  misc_RNA (1)...(19): siRNA sense strand
ucuggaaccugggaucuuu

SEQ ID NO: 815684 - RNA, 19 nt, Homo sapiens
  misc_RNA (1)...(19): siRNA sense strand
ggaauguagcugcaguaaa

SEQ ID NO: 815685 - RNA, 19 nt, Homo sapiens
  misc_RNA (1)...(19): siRNA sense strand
uggagaggcuguauaacau

SEQ ID NO: 815686 - RNA, 19 nt, Homo sapiens
  misc_RNA (1)...(19): siRNA sense strand
cacauggaauuuacaaaca

SEQ ID NO: 815687 - RNA, 19 nt, Homo sapiens
  misc_RNA (1)...(19): siRNA sense strand
gcaguacacaggaccaaug

SEQ ID NO: 815688 - RNA, 19 nt, Homo sapiens
  misc_RNA (1)...(19): siRNA sense strand
aaagccagguaacagguuu

SEQ ID NO: 815689 - RNA, 19 nt, Homo sapiens
  misc_RNA (1)...(19): siRNA sense strand
ggacaucugaagagaagga

SEQ ID NO: 815690 - RNA, 19 nt, Homo sapiens
  misc_RNA (1)...(19): siRNA sense strand
cauaaggcauacauugaca

SEQ ID NO: 815691 - RNA, 19 nt, Homo sapiens
  misc_RNA (1)...(19): siRNA sense strand
ccagguaacagguuucgaa

SEQ ID NO: 815692 - RNA, 19 nt, Homo sapiens
  misc_RNA (1)...(19): siRNA sense strand
caaaggacuacuucacaga

SEQ ID NO: 815693 - RNA, 19 nt, Homo sapiens
  misc_RNA (1)...(19): siRNA sense strand
caacuaauggagcucagaa

SEQ ID NO: 815694 - RNA, 19 nt, Homo sapiens
  misc_RNA (1)...(19): siRNA sense strand
aaauuuggcgugauacauu

SEQ ID NO: 815695 - RNA, 19 nt, Homo sapiens
  misc_RNA (1)...(19): siRNA sense strand
gagaaggaagccugaggaa

SEQ ID NO: 815696 - RNA, 19 nt, Homo sapiens
  misc_RNA (1)...(19): siRNA sense strand
aaacauccgacccaacauu

SEQ ID NO: 815697 - RNA, 19 nt, Homo sapiens
  misc_RNA (1)...(19): siRNA sense strand
caacagagcuccagccuaa

SEQ ID NO: 815698 - RNA, 19 nt, Homo sapiens
  misc_RNA (1)...(19): siRNA sense strand
gcaaagaccuuguuauaga

SEQ ID NO: 815699 - RNA, 19 nt, Homo sapiens
  misc_RNA (1)...(19): siRNA sense strand
gaaagaagcuagagagaga

SEQ ID NO: 815700 - RNA, 19 nt, Homo sapiens
  misc_RNA (1)...(19): siRNA sense strand
ugaaggagcuugauaaauu

SEQ ID NO: 815701 - RNA, 19 nt, Homo sapiens
  misc_RNA (1)...(19): siRNA sense strand
gcaaguagcugaugaagau

SEQ ID NO: 815702 - RNA, 19 nt, Homo sapiens
  misc_RNA (1)...(19): siRNA sense strand
gaaaguggaugcucuauca

SEQ ID NO: 815703 - RNA, 19 nt, Homo sapiens
  misc_RNA (1)...(19): siRNA sense strand
gaacgcccauccauucuua

SEQ ID NO: 815704 - RNA, 19 nt, Homo sapiens
  misc_RNA (1)...(19): siRNA sense strand
gaaauuaggucccauuagu

SEQ ID NO: 815705 - RNA, 19 nt, Homo sapiens
  misc_RNA (1)...(19): siRNA sense strand
ggacacaagucauuuauuc

SEQ ID NO: 815706 - RNA, 19 nt, Homo sapiens
  misc_RNA (1)...(19): siRNA sense strand
gaaggagcuugauaaauuu

SEQ ID NO: 815707 - RNA, 19 nt, Homo sapiens
  misc_RNA (1)...(19): siRNA sense strand
gaaauuuccuucaacagaa

SEQ ID NO: 815708 - RNA, 19 nt, Homo sapiens
  misc_RNA (1)...(19): siRNA sense strand
gaaaggaacguucauuaaa

SEQ ID NO: 815709 - RNA, 19 nt, Homo sapiens
  misc_RNA (1)...(19): siRNA sense strand
gaaguggcauugauauaaa

SEQ ID NO: 815710 - RNA, 19 nt, Homo sapiens
  misc_RNA (1)...(19): siRNA sense strand
gauaauagacugcuagaaa

SEQ ID NO: 815711 - RNA, 19 nt, Homo sapiens
  misc_RNA (1)...(19): siRNA sense strand
gaaggaagaacaagucaua

SEQ ID NO: 815712 - RNA, 19 nt, Homo sapiens
  misc_RNA (1)...(19): siRNA sense strand
gaauaagacaccagauuua

SEQ ID NO: 815713 - RNA, 19 nt, Homo sapiens
  misc_RNA (1)...(19): siRNA sense strand
gcaaugauccuaauguaaa

SEQ ID NO: 815714 - RNA, 19 nt, Homo sapiens
  misc_RNA (1)...(19): siRNA sense strand
caacagaaacugcaacuuu

SEQ ID NO: 815715 - RNA, 19 nt, Homo sapiens
  misc_RNA (1)...(19): siRNA sense strand
gaaaacagcuguaauaaag

SEQ ID NO: 815716 - RNA, 19 nt, Homo sapiens
  misc_RNA (1)...(19): siRNA sense strand
agaaagagcuggagaagga

SEQ ID NO: 815717 - RNA, 19 nt, Homo sapiens
  misc_RNA (1)...(19): siRNA sense strand
gaugaaauauggaagcaaa

SEQ ID NO: 815718 - RNA, 19 nt, Homo sapiens
  misc_RNA (1)...(19): siRNA sense strand
ggaagaaguuaaugauaga

SEQ ID NO: 815719 - RNA, 19 nt, Homo sapiens
  misc_RNA (1)...(19): siRNA sense strand
gaaaaggggucuccaguaa

SEQ ID NO: 815720 - RNA, 19 nt, Homo sapiens
  misc_RNA (1)...(19): siRNA sense strand
gaggauacuuugguuaaua

SEQ ID NO: 815721 - RNA, 19 nt, Homo sapiens
  misc_RNA (1)...(19): siRNA sense strand
ggaauaagacaccagauuu

SEQ ID NO: 815722 - RNA, 19 nt, Homo sapiens
  misc_RNA (1)...(19): siRNA sense strand
gcagagaaauuuccuucaa

SEQ ID NO: 815723 - RNA, 19 nt, Homo sapiens
  misc_RNA (1)...(19): siRNA sense strand
ggaaaggaacguucauuaa

SEQ ID NO: 815724 - RNA, 19 nt, Homo sapiens
  misc_RNA (1)...(19): siRNA sense strand
gguaucaucugcagaauau

SEQ ID NO: 815725 - RNA, 19 nt, Homo sapiens
  misc_RNA (1)...(19): siRNA sense strand
caaaagaacuccaaagauu

SEQ ID NO: 815726 - RNA, 19 nt, Homo sapiens
  misc_RNA (1)...(19): siRNA sense strand
gaagaauggucaagaaagu

SEQ ID NO: 815727 - RNA, 19 nt, Homo sapiens
  misc_RNA (1)...(19): siRNA sense strand
aaagagaaauggagaaaga

SEQ ID NO: 815728 - RNA, 19 nt, Homo sapiens
  misc_RNA (1)...(19): siRNA sense strand
cgaccaagcucuaacagaa

SEQ ID NO: 815729 - RNA, 19 nt, Homo sapiens
  misc_RNA (1)...(19): siRNA sense strand
gagcuaugaugccuccuua

SEQ ID NO: 815730 - RNA, 19 nt, Homo sapiens
  misc_RNA (1)...(19): siRNA sense strand
gcaacacucaguuuauuua

SEQ ID NO: 815731 - RNA, 19 nt, Homo sapiens
  misc_RNA (1)...(19): siRNA sense strand
cagcaaagaccuuguuaua

SEQ ID NO: 815732 - RNA, 19 nt, Homo sapiens
  misc_RNA (1)...(19): siRNA sense strand
gauccaagguggcucauga

SEQ ID NO: 815733 - RNA, 19 nt, Homo sapiens
  misc_RNA (1)...(19): siRNA sense strand
ggaaguggcauugauauaa

SEQ ID NO: 815734 - RNA, 19 nt, Homo sapiens
  misc_RNA (1)...(19): siRNA sense strand
ucacaaccguccaguagua

SEQ ID NO: 815735 - RNA, 19 nt, Homo sapiens
  misc_RNA (1)...(19): siRNA sense strand
gggaagaaguuaaugauag

SEQ ID NO: 815736 - RNA, 19 nt, Homo sapiens
  misc_RNA (1)...(19): siRNA sense strand
ggucgaagcuauagagguu

SEQ ID NO: 815737 - RNA, 19 nt, Homo sapiens
  misc_RNA (1)...(19): siRNA sense strand
gaacaaugaucucgguauc

SEQ ID NO: 815738 - RNA, 19 nt, Homo sapiens
  misc_RNA (1)...(19): siRNA sense strand
gaacugaaggagcuugaua

SEQ ID NO: 815739 - RNA, 19 nt, Homo sapiens
  misc_RNA (1)...(19): siRNA sense strand
acacaaaccuggucccauu

SEQ ID NO: 815740 - RNA, 19 nt, Homo sapiens
  misc_RNA (1)...(19): siRNA sense strand
caaaauaccugaaccuaaa

SEQ ID NO: 815741 - RNA, 19 nt, Homo sapiens
  misc_RNA (1)...(19): siRNA sense strand
gagauuauccucaguauag

SEQ ID NO: 815742 - RNA, 19 nt, Homo sapiens
  misc_RNA (1)...(19): siRNA sense strand
gaaaguggacucgaaauug

SEQ ID NO: 815743 - RNA, 19 nt, Homo sapiens
  misc_RNA (1)...(19): siRNA sense strand
cccagaagcuuccagauuu

SEQ ID NO: 815744 - RNA, 19 nt, Homo sapiens
  misc_RNA (1)...(19): siRNA sense strand
caacaaugguccacccaaa

SEQ ID NO: 815745 - RNA, 19 nt, Homo sapiens
  misc_RNA (1)...(19): siRNA sense strand
caacagaauccgcaaguuu

SEQ ID NO: 815746 - RNA, 19 nt, Homo sapiens
  misc_RNA (1)...(19): siRNA sense strand
gcagagaagugaaccaucu

SEQ ID NO: 815747 - RNA, 19 nt, Homo sapiens
  misc_RNA (1)...(19): siRNA sense strand
ggaaacaaaugaugacaac

SEQ ID NO: 815748 - RNA, 19 nt, Homo sapiens
  misc_RNA (1)...(19): siRNA sense strand
caaccaccaccaucaauua

SEQ ID NO: 815749 - RNA, 19 nt, Homo sapiens
  misc_RNA (1)...(19): siRNA sense strand
aaaccaggcuuucuuccua

SEQ ID NO: 815750 - RNA, 19 nt, Homo sapiens
  misc_RNA (1)...(19): siRNA sense strand
ggagugagagcucugauuu

SEQ ID NO: 815751 - RNA, 19 nt, Homo sapiens
  misc_RNA (1)...(19): siRNA sense strand
gaagaucaggucccauuaa

SEQ ID NO: 815752 - RNA, 19 nt, Homo sapiens
  misc_RNA (1)...(19): siRNA sense strand
gcuaaccucccaagucuua

SEQ ID NO: 815753 - RNA, 19 nt, Homo sapiens
  misc_RNA (1)...(19): siRNA sense strand
gauguuagaccucaccaua

SEQ ID NO: 815754 - RNA, 19 nt, Homo sapiens
  misc_RNA (1)...(19): siRNA sense strand
ccaaauaccugcccaacca

SEQ ID NO: 815755 - RNA, 19 nt, Homo sapiens
  misc_RNA (1)...(19): siRNA sense strand
gaaguaacaguccuaaaga

SEQ ID NO: 815756 - RNA, 19 nt, Homo sapiens
  misc_RNA (1)...(19): siRNA sense strand
uaaacgaccuccaaaauuu

SEQ ID NO: 815757 - RNA, 19 nt, Homo sapiens
  misc_RNA (1)...(19): siRNA sense strand
ccaagugaauagucaguuu

SEQ ID NO: 815758 - RNA, 19 nt, Homo sapiens
  misc_RNA (1)...(19): siRNA sense strand
guacugcuauucacaacuu

SEQ ID NO: 815759 - RNA, 19 nt, Homo sapiens
  misc_RNA (1)...(19): siRNA sense strand
gcuccucacuucaaccaua

SEQ ID NO: 815760 - RNA, 19 nt, Homo sapiens
  misc_RNA (1)...(19): siRNA sense strand
gacaaggacaguuuaagua

SEQ ID NO: 815761 - RNA, 19 nt, Homo sapiens
  misc_RNA (1)...(19): siRNA sense strand
caccaaauguugcuuguug

SEQ ID NO: 815762 - RNA, 19 nt, Homo sapiens
  misc_RNA (1)...(19): siRNA sense strand
caaauggcacaguuaauaa

SEQ ID NO: 815763 - RNA, 19 nt, Homo sapiens
  misc_RNA (1)...(19): siRNA sense strand
gagauucccaccuucuuua

SEQ ID NO: 815764 - RNA, 19 nt, Homo sapiens
  misc_RNA (1)...(19): siRNA sense strand
gcuaugaugccuccuuaua

SEQ ID NO: 815765 - RNA, 19 nt, Homo sapiens
  misc_RNA (1)...(19): siRNA sense strand
ucaagaaaguggacucgaa

SEQ ID NO: 815766 - RNA, 19 nt, Homo sapiens
  misc_RNA (1)...(19): siRNA sense strand
gacaagccaccucgauuua

SEQ ID NO: 815767 - RNA, 19 nt, Homo sapiens
  misc_RNA (1)...(19): siRNA sense strand
gagauugguuuccagauca

SEQ ID NO: 815768 - RNA, 19 nt, Homo sapiens
  misc_RNA (1)...(19): siRNA sense strand
gaagggaagaaguuaauga

SEQ ID NO: 815769 - RNA, 19 nt, Homo sapiens
  misc_RNA (1)...(19): siRNA sense strand
ggaaguaacaguccuaaag

SEQ ID NO: 815770 - RNA, 19 nt, Homo sapiens
  misc_RNA (1)...(19): siRNA sense strand
gaugaaguuuccaacacua

SEQ ID NO: 815771 - RNA, 19 nt, Homo sapiens
  misc_RNA (1)...(19): siRNA sense strand
guacauacacuaccucuuc

SEQ ID NO: 815772 - RNA, 19 nt, Homo sapiens
  misc_RNA (1)...(19): siRNA sense strand
gauggagucugcacgcaaa

SEQ ID NO: 815773 - RNA, 19 nt, Homo sapiens
  misc_RNA (1)...(19): siRNA sense strand
gaucagcuccuucaucaga

SEQ ID NO: 815774 - RNA, 19 nt, Homo sapiens
  misc_RNA (1)...(19): siRNA sense strand
gagaagaucaggucccauu

SEQ ID NO: 815775 - RNA, 19 nt, Homo sapiens
  misc_RNA (1)...(19): siRNA sense strand
cuacauggauccucgaaug

SEQ ID NO: 815776 - RNA, 19 nt, Homo sapiens
  misc_RNA (1)...(19): siRNA sense strand
cggagaaacugaaacgauu

SEQ ID NO: 815777 - RNA, 19 nt, Homo sapiens
  misc_RNA (1)...(19): siRNA sense strand
gaugacauauccuccucua

SEQ ID NO: 815778 - RNA, 19 nt, Homo sapiens
  misc_RNA (1)...(19): siRNA sense strand
aaucagaacucuucagauc

SEQ ID NO: 815779 - RNA, 19 nt, Homo sapiens
  misc_RNA (1)...(19): siRNA sense strand
acaaauggcacaguuaaua

SEQ ID NO: 815780 - RNA, 19 nt, Homo sapiens
  misc_RNA (1)...(19): siRNA sense strand
ggaaaucauuagaaacaca

SEQ ID NO: 815781 - RNA, 19 nt, Homo sapiens
  misc_RNA (1)...(19): siRNA sense strand
cuaaagagaauaacaguga

SEQ ID NO: 815782 - RNA, 19 nt, Homo sapiens
  misc_RNA (1)...(19): siRNA sense strand
aagcacagcuggaacauca

SEQ ID NO: 815783 - RNA, 19 nt, Homo sapiens
  misc_RNA (1)...(19): siRNA sense strand
cagcuuuccuugccuaauu

SEQ ID NO: 815784 - RNA, 19 nt, Homo sapiens
  misc_RNA (1)...(19): siRNA sense strand
caaagauucuacugggaaa

SEQ ID NO: 815785 - RNA, 19 nt, Homo sapiens
  misc_RNA (1)...(19): siRNA sense strand
gaagagagggccauuugau

SEQ ID NO: 815786 - RNA, 19 nt, Homo sapiens
  misc_RNA (1)...(19): siRNA sense strand
uguaagggaugacgauaaa

SEQ ID NO: 815787 - RNA, 19 nt, Homo sapiens
  misc_RNA (1)...(19): siRNA sense strand
uaacagaagggaagaaguu

SEQ ID NO: 815788 - RNA, 19 nt, Homo sapiens
  misc_RNA (1)...(19): siRNA sense strand
uguauuaucuggcuauuuc

SEQ ID NO: 815789 - RNA, 19 nt, Homo sapiens
  misc_RNA (1)...(19): siRNA sense strand
auacagagcaacugaauuu

SEQ ID NO: 815790 - RNA, 19 nt, Homo sapiens
  misc_RNA (1)...(19): siRNA sense strand
caaaggcaaugauccuaau

SEQ ID NO: 815791 - RNA, 19 nt, Homo sapiens
  misc_RNA (1)...(19): siRNA sense strand
agugaaaccucagcaguua

SEQ ID NO: 815792 - RNA, 19 nt, Homo sapiens
  misc_RNA (1)...(19): siRNA sense strand
gaagacaugagcaguuuau

SEQ ID NO: 815793 - RNA, 19 nt, Homo sapiens
  misc_RNA (1)...(19): siRNA sense strand
cagaagagccugaggaugu

SEQ ID NO: 815794 - RNA, 19 nt, Homo sapiens
  misc_RNA (1)...(19): siRNA sense strand
caagagaucacgcaauuuc

SEQ ID NO: 815795 - RNA, 19 nt, Homo sapiens
  misc_RNA (1)...(19): siRNA sense strand
uaacaguccuaaagagaau

SEQ ID NO: 815796 - RNA, 19 nt, Homo sapiens
  misc_RNA (1)...(19): siRNA sense strand
gaauuucagugaugaugau

SEQ ID NO: 815797 - RNA, 19 nt, Homo sapiens
  misc_RNA (1)...(19): siRNA sense strand
gaacagaggucauauuuaa

SEQ ID NO: 815798 - RNA, 19 nt, Homo sapiens
  misc_RNA (1)...(19): siRNA sense strand
ggacaucgcuaaacaguua

SEQ ID NO: 815799 - RNA, 19 nt, Homo sapiens
  misc_RNA (1)...(19): siRNA sense strand
gaaauuacucccugucuua

SEQ ID NO: 815800 - RNA, 19 nt, Homo sapiens
  misc_RNA (1)...(19): siRNA sense strand
aaaggaaacuuaugaggua

SEQ ID NO: 815801 - RNA, 19 nt, Homo sapiens
  misc_RNA (1)...(19): siRNA sense strand
caacagauacugcugcuua

SEQ ID NO: 815802 - RNA, 19 nt, Homo sapiens
  misc_RNA (1)...(19): siRNA sense strand
gaagcucgauuaugaagaa

SEQ ID NO: 815803 - RNA, 19 nt, Homo sapiens
  misc_RNA (1)...(19): siRNA sense strand
cgagguugcuucaugauua

SEQ ID NO: 815804 - RNA, 19 nt, Homo sapiens
  misc_RNA (1)...(19): siRNA sense strand
gcacagagacgccucauga

SEQ ID NO: 815805 - RNA, 19 nt, Homo sapiens
  misc_RNA (1)...(19): siRNA sense strand
caaaggaugugccauacaa

SEQ ID NO: 815806 - RNA, 19 nt, Homo sapiens
  misc_RNA (1)...(19): siRNA sense strand
guuacaagcuuaugaaguu

SEQ ID NO: 815807 - RNA, 19 nt, Homo sapiens
  misc_RNA (1)...(19): siRNA sense strand
cagcagauaugaagauuau

SEQ ID NO: 815808 - RNA, 19 nt, Homo sapiens
  misc_RNA (1)...(19): siRNA sense strand
caggacagcuaucgcuuua

SEQ ID NO: 815809 - RNA, 19 nt, Homo sapiens
  misc_RNA (1)...(19): siRNA sense strand
gcugagcaauuccaccuua

SEQ ID NO: 815810 - RNA, 19 nt, Homo sapiens
  misc_RNA (1)...(19): siRNA sense strand
aagaagaacuuaucgauuc

SEQ ID NO: 815811 - RNA, 19 nt, Homo sapiens
  misc_RNA (1)...(19): siRNA sense strand
ggacagcuaucgcuuuaca

SEQ ID NO: 815812 - RNA, 19 nt, Homo sapiens
  misc_RNA (1)...(19): siRNA sense strand
cuaaacaguuacaagcuua

SEQ ID NO: 815813 - RNA, 19 nt, Homo sapiens
  misc_RNA (1)...(19): siRNA sense strand
gaccaucaaucagguauuu

SEQ ID NO: 815814 - RNA, 19 nt, Homo sapiens
  misc_RNA (1)...(19): siRNA sense strand
gccugaagcucgauuauga

SEQ ID NO: 815815 - RNA, 19 nt, Homo sapiens
  misc_RNA (1)...(19): siRNA sense strand
gcaaacagcagccaaagga

SEQ ID NO: 815816 - RNA, 19 nt, Homo sapiens
  misc_RNA (1)...(19): siRNA sense strand
gaggugaaaucuggaaauu

SEQ ID NO: 815817 - RNA, 19 nt, Homo sapiens
  misc_RNA (1)...(19): siRNA sense strand
gggaacagaggucauauuu

SEQ ID NO: 815818 - RNA, 19 nt, Homo sapiens
  misc_RNA (1)...(19): siRNA sense strand
gcagauauuccuccgagua

SEQ ID NO: 815819 - RNA, 19 nt, Homo sapiens
  misc_RNA (1)...(19): siRNA sense strand
ggaacagaggucauauuua

SEQ ID NO: 815820 - RNA, 19 nt, Homo sapiens
  misc_RNA (1)...(19): siRNA sense strand
gcucgauuaugaagaaauu

SEQ ID NO: 815821 - RNA, 19 nt, Homo sapiens
  misc_RNA (1)...(19): siRNA sense strand
gcuaaacaguuacaagcuu

SEQ ID NO: 815822 - RNA, 19 nt, Homo sapiens
  misc_RNA (1)...(19): siRNA sense strand
gcagauaugaagauuauuc

SEQ ID NO: 815823 - RNA, 19 nt, Homo sapiens
  misc_RNA (1)...(19): siRNA sense strand
gcaaaaggcuauucuucaa

SEQ ID NO: 815824 - RNA, 19 nt, Homo sapiens
  misc_RNA (1)...(19): siRNA sense strand
gcucaaguuucugauguuu

SEQ ID NO: 815825 - RNA, 19 nt, Homo sapiens
  misc_RNA (1)...(19): siRNA sense strand
gccagagucuuugauauga

SEQ ID NO: 815826 - RNA, 19 nt, Homo sapiens
  misc_RNA (1)...(19): siRNA sense strand
gagcaaacacccugaguca

SEQ ID NO: 815827 - RNA, 19 nt, Homo sapiens
  misc_RNA (1)...(19): siRNA sense strand
gcaaaugguaggauccaaa

SEQ ID NO: 815828 - RNA, 19 nt, Homo sapiens
  misc_RNA (1)...(19): siRNA sense strand
ggaaacuuaugagguauca

SEQ ID NO: 815829 - RNA, 19 nt, Homo sapiens
  misc_RNA (1)...(19): siRNA sense strand
caacagcagcuuacgcaaa

SEQ ID NO: 815830 - RNA, 19 nt, Homo sapiens
  misc_RNA (1)...(19): siRNA sense strand
caagaagaacuuaucgauu

SEQ ID NO: 815831 - RNA, 19 nt, Homo sapiens
  misc_RNA (1)...(19): siRNA sense strand
gaaaccauaguugacuuua

SEQ ID NO: 815832 - RNA, 19 nt, Homo sapiens
  misc_RNA (1)...(19): siRNA sense strand
gcuuagcacuccaggaaga

SEQ ID NO: 815833 - RNA, 19 nt, Homo sapiens
  misc_RNA (1)...(19): siRNA sense strand
cagagucuuugauaugauu

SEQ ID NO: 815834 - RNA, 19 nt, Homo sapiens
  misc_RNA (1)...(19): siRNA sense strand
cuggauagcucccugucua

SEQ ID NO: 815835 - RNA, 19 nt, Homo sapiens
  misc_RNA (1)...(19): siRNA sense strand
ccagaggccugcaggaaca

SEQ ID NO: 815836 - RNA, 19 nt, Homo sapiens
  misc_RNA (1)...(19): siRNA sense strand
gcaaacacccugagucacu

SEQ ID NO: 815837 - RNA, 19 nt, Homo sapiens
  misc_RNA (1)...(19): siRNA sense strand
ggccagacaugauuauuuu

SEQ ID NO: 815838 - RNA, 19 nt, Homo sapiens
  misc_RNA (1)...(19): siRNA sense strand
gaaccaguuugugaagaug

SEQ ID NO: 815839 - RNA, 19 nt, Homo sapiens
  misc_RNA (1)...(19): siRNA sense strand
gcaggacagcuaucgcuuu

SEQ ID NO: 815840 - RNA, 19 nt, Homo sapiens
  misc_RNA (1)...(19): siRNA sense strand
gauagcucccugucuagua

SEQ ID NO: 815841 - RNA, 19 nt, Homo sapiens
  misc_RNA (1)...(19): siRNA sense strand
agagucaucucccagaaga

SEQ ID NO: 815842 - RNA, 19 nt, Homo sapiens
  misc_RNA (1)...(19): siRNA sense strand
gaaccuugaccuccuugaa

SEQ ID NO: 815843 - RNA, 19 nt, Homo sapiens
  misc_RNA (1)...(19): siRNA sense strand
aaauggacaucgcuaaaca

SEQ ID NO: 815844 - RNA, 19 nt, Homo sapiens
  misc_RNA (1)...(19): siRNA sense strand
gugaagacccggaggcauu

SEQ ID NO: 815845 - RNA, 19 nt, Homo sapiens
  misc_RNA (1)...(19): siRNA sense strand
gcagugagagcaagcugaa

SEQ ID NO: 815846 - RNA, 19 nt, Homo sapiens
  misc_RNA (1)...(19): siRNA sense strand
gcuaucgcuuuacaacauu

SEQ ID NO: 815847 - RNA, 19 nt, Homo sapiens
  misc_RNA (1)...(19): siRNA sense strand
ggaugugccauacaaagaa

SEQ ID NO: 815848 - RNA, 19 nt, Homo sapiens
  misc_RNA (1)...(19): siRNA sense strand
cccacgaucuccuuuagaa

SEQ ID NO: 815849 - RNA, 19 nt, Homo sapiens
  misc_RNA (1)...(19): siRNA sense strand
ucugagagcuccuuuaagc

SEQ ID NO: 815850 - RNA, 19 nt, Homo sapiens
  misc_RNA (1)...(19): siRNA sense strand
caaagagccaucugugugu

SEQ ID NO: 815851 - RNA, 19 nt, Homo sapiens
  misc_RNA (1)...(19): siRNA sense strand
guagccagagucuuugaua

SEQ ID NO: 815852 - RNA, 19 nt, Homo sapiens
  misc_RNA (1)...(19): siRNA sense strand
gggcgaaccuuuccuacac

SEQ ID NO: 815853 - RNA, 19 nt, Homo sapiens
  misc_RNA (1)...(19): siRNA sense strand
caaacacccugagucacuu

SEQ ID NO: 815854 - RNA, 19 nt, Homo sapiens
  misc_RNA (1)...(19): siRNA sense strand
gcauuuugcuucuucauau

SEQ ID NO: 815855 - RNA, 19 nt, Homo sapiens
  misc_RNA (1)...(19): siRNA sense strand
ugaaauggacaucgcuaaa

SEQ ID NO: 815856 - RNA, 19 nt, Homo sapiens
  misc_RNA (1)...(19): siRNA sense strand
ggaagaggcguuuaaaaug

SEQ ID NO: 815857 - RNA, 19 nt, Homo sapiens
  misc_RNA (1)...(19): siRNA sense strand
gaucuuuaacagagucuuu

SEQ ID NO: 815858 - RNA, 19 nt, Homo sapiens
  misc_RNA (1)...(19): siRNA sense strand
gaagaggcguuuaaaaugc

SEQ ID NO: 815859 - RNA, 19 nt, Homo sapiens
  misc_RNA (1)...(19): siRNA sense strand
cagcaugcgauucuuauug

SEQ ID NO: 815860 - RNA, 19 nt, Homo sapiens
  misc_RNA (1)...(19): siRNA sense strand
cagcagcaugcgauucuua

SEQ ID NO: 815861 - RNA, 19 nt, Homo sapiens
  misc_RNA (1)...(19): siRNA sense strand
agaaauuacucccugucuu

SEQ ID NO: 815862 - RNA, 19 nt, Homo sapiens
  misc_RNA (1)...(19): siRNA sense strand
gccaaggucucagcuuugu

SEQ ID NO: 815863 - RNA, 19 nt, Homo sapiens
  misc_RNA (1)...(19): siRNA sense strand
gcaggaacacuccaucagu

SEQ ID NO: 815864 - RNA, 19 nt, Homo sapiens
  misc_RNA (1)...(19): siRNA sense strand
gccauaagcccuugauucu

SEQ ID NO: 815865 - RNA, 19 nt, Homo sapiens
  misc_RNA (1)...(19): siRNA sense strand
ucgcaaaggaaacuuauga

SEQ ID NO: 815866 - RNA, 19 nt, Homo sapiens
  misc_RNA (1)...(19): siRNA sense strand
gaaauggacaucgcuaaac

SEQ ID NO: 815867 - RNA, 19 nt, Homo sapiens
  misc_RNA (1)...(19): siRNA sense strand
uaaguaacaccagcaaaga

SEQ ID NO: 815868 - RNA, 19 nt, Homo sapiens
  misc_RNA (1)...(19): siRNA sense strand
ggccaugcuuaccuuagaa

SEQ ID NO: 815869 - RNA, 19 nt, Homo sapiens
  misc_RNA (1)...(19): siRNA sense strand
gaaaaccaacagcagcuua

SEQ ID NO: 815870 - RNA, 19 nt, Homo sapiens
  misc_RNA (1)...(19): siRNA sense strand
ucaagaagaacuuaucgau

SEQ ID NO: 815871 - RNA, 19 nt, Homo sapiens
  misc_RNA (1)...(19): siRNA sense strand
uagaaaccauaguugacuu

SEQ ID NO: 815872 - RNA, 19 nt, Homo sapiens
  misc_RNA (1)...(19): siRNA sense strand
ucucgagguugcuucauga

SEQ ID NO: 815873 - RNA, 19 nt, Homo sapiens
  misc_RNA (1)...(19): siRNA sense strand
uguaccagcucucgagguu

SEQ ID NO: 815874 - RNA, 19 nt, Homo sapiens
  misc_RNA (1)...(19): siRNA sense strand
gacaaccaaagaauggaua

SEQ ID NO: 815875 - RNA, 19 nt, Homo sapiens
  misc_RNA (1)...(19): siRNA sense strand
guaccacguccuucaagaa

SEQ ID NO: 815876 - RNA, 19 nt, Homo sapiens
  misc_RNA (1)...(19): siRNA sense strand
uagccagagucuuugauau

SEQ ID NO: 815877 - RNA, 19 nt, Homo sapiens
  misc_RNA (1)...(19): siRNA sense strand
cagauacugcugcuuagaa

SEQ ID NO: 815878 - RNA, 19 nt, Homo sapiens
  misc_RNA (1)...(19): siRNA sense strand
ugaccuccuugaacaguug

SEQ ID NO: 815879 - RNA, 19 nt, Homo sapiens
  misc_RNA (1)...(19): siRNA sense strand
ccaggaaccuccacaaccu

SEQ ID NO: 815880 - RNA, 19 nt, Homo sapiens
  misc_RNA (1)...(19): siRNA sense strand
aaaccuagaaaccauaguu

SEQ ID NO: 815881 - RNA, 19 nt, Homo sapiens
  misc_RNA (1)...(19): siRNA sense strand
ucagggaacagaggucaua

SEQ ID NO: 815882 - RNA, 19 nt, Homo sapiens
  misc_RNA (1)...(19): siRNA sense strand
gugaggaagaggcguuuaa

SEQ ID NO: 815883 - RNA, 19 nt, Homo sapiens
  misc_RNA (1)...(19): siRNA sense strand
agcaugcgauucuuauuga

SEQ ID NO: 815884 - RNA, 19 nt, Homo sapiens
  misc_RNA (1)...(19): siRNA sense strand
guaacuacagugugggaaa

SEQ ID NO: 815885 - RNA, 19 nt, Homo sapiens
  misc_RNA (1)...(19): siRNA sense strand
auacuucucugcccagcuu

SEQ ID NO: 815886 - RNA, 19 nt, Homo sapiens
  misc_RNA (1)...(19): siRNA sense strand
gagguugcuucaugauuac

SEQ ID NO: 815887 - RNA, 19 nt, Homo sapiens
  misc_RNA (1)...(19): siRNA sense strand
caaggucucagcuuuguag

SEQ ID NO: 815888 - RNA, 19 nt, Homo sapiens
  misc_RNA (1)...(19): siRNA sense strand
uugccaaggucucagcuuu

SEQ ID NO: 815889 - RNA, 19 nt, Homo sapiens
  misc_RNA (1)...(19): siRNA sense strand
agaaccaguuugugaagau

SEQ ID NO: 815890 - RNA, 19 nt, Homo sapiens
  misc_RNA (1)...(19): siRNA sense strand
cucccugucuaguacauua

SEQ ID NO: 815891 - RNA, 19 nt, Homo sapiens
  misc_RNA (1)...(19): siRNA sense strand
agagacgccucaugaacga

SEQ ID NO: 815892 - RNA, 19 nt, Homo sapiens
  misc_RNA (1)...(19): siRNA sense strand
gcuuggagcaggacagcua

SEQ ID NO: 815893 - RNA, 19 nt, Homo sapiens
  misc_RNA (1)...(19): siRNA sense strand
ggcuauucuucaacagaua

SEQ ID NO: 815894 - RNA, 19 nt, Homo sapiens
  misc_RNA (1)...(19): siRNA sense strand
aaacaaagcaaagagaucu

SEQ ID NO: 815895 - RNA, 19 nt, Homo sapiens
  misc_RNA (1)...(19): siRNA sense strand
gccaaaggaugugccauac

SEQ ID NO: 815896 - RNA, 19 nt, Homo sapiens
  misc_RNA (1)...(19): siRNA sense strand
cggccagacaugauuauuu

SEQ ID NO: 815897 - RNA, 19 nt, Homo sapiens
  misc_RNA (1)...(19): siRNA sense strand
ucaacgagcucaugaagua

SEQ ID NO: 815898 - RNA, 19 nt, Homo sapiens
  misc_RNA (1)...(19): siRNA sense strand
ggaaagugcuguaggaaau

SEQ ID NO: 815899 - RNA, 19 nt, Homo sapiens
  misc_RNA (1)...(19): siRNA sense strand
aaacaaggcugucacuauu

SEQ ID NO: 815900 - RNA, 19 nt, Homo sapiens
  misc_RNA (1)...(19): siRNA sense strand
gagaacauccucagcuuua

SEQ ID NO: 815901 - RNA, 19 nt, Homo sapiens
  misc_RNA (1)...(19): siRNA sense strand
caggaaaggugauugauga

SEQ ID NO: 815902 - RNA, 19 nt, Homo sapiens
  misc_RNA (1)...(19): siRNA sense strand
gaaacaaggcugucacuau

SEQ ID NO: 815903 - RNA, 19 nt, Homo sapiens
  misc_RNA (1)...(19): siRNA sense strand
gaaacaaguuaaagcacaa

SEQ ID NO: 815904 - RNA, 19 nt, Homo sapiens
  misc_RNA (1)...(19): siRNA sense strand
gaaaggugauugaugagau

SEQ ID NO: 815905 - RNA, 19 nt, Homo sapiens
  misc_RNA (1)...(19): siRNA sense strand
gaucauaggugaacaaaau

SEQ ID NO: 815906 - RNA, 19 nt, Homo sapiens
  misc_RNA (1)...(19): siRNA sense strand
gaaauuaccaggaucagau

SEQ ID NO: 815907 - RNA, 19 nt, Homo sapiens
  misc_RNA (1)...(19): siRNA sense strand
gacaagagguuaccaaacu

SEQ ID NO: 815908 - RNA, 19 nt, Homo sapiens
  misc_RNA (1)...(19): siRNA sense strand
gcaauggaguacuuugaug

SEQ ID NO: 815909 - RNA, 19 nt, Homo sapiens
  misc_RNA (1)...(19): siRNA sense strand
cauagacucucuuaggaaa

SEQ ID NO: 815910 - RNA, 19 nt, Homo sapiens
  misc_RNA (1)...(19): siRNA sense strand
acaaggcugucacuauuaa

SEQ ID NO: 815911 - RNA, 19 nt, Homo sapiens
  misc_RNA (1)...(19): siRNA sense strand
caaugcagcucuucuccaa

SEQ ID NO: 815912 - RNA, 19 nt, Homo sapiens
  misc_RNA (1)...(19): siRNA sense strand
ggagagguaccauaaucua

SEQ ID NO: 815913 - RNA, 19 nt, Homo sapiens
  misc_RNA (1)...(19): siRNA sense strand
ugagauaugucaauucuac

SEQ ID NO: 815914 - RNA, 19 nt, Homo sapiens
  misc_RNA (1)...(19): siRNA sense strand
aaggagaaaccauucauua

SEQ ID NO: 815915 - RNA, 19 nt, Homo sapiens
  misc_RNA (1)...(19): siRNA sense strand
uaacaacaaugcagcucuu

SEQ ID NO: 815916 - RNA, 19 nt, Homo sapiens
  misc_RNA (1)...(19): siRNA sense strand
cgacggcgguuccucuuug

SEQ ID NO: 815917 - RNA, 19 nt, Homo sapiens
  misc_RNA (1)...(19): siRNA sense strand
gagaaaccauucauuagcu

SEQ ID NO: 815918 - RNA, 19 nt, Homo sapiens
  misc_RNA (1)...(19): siRNA sense strand
gaugagauuuaucgugugu

SEQ ID NO: 815919 - RNA, 19 nt, Homo sapiens
  misc_RNA (1)...(19): siRNA sense strand
gccauagacucucuuagga

SEQ ID NO: 815920 - RNA, 19 nt, Homo sapiens
  misc_RNA (1)...(19): siRNA sense strand
gagcagacccagaucauag

SEQ ID NO: 815921 - RNA, 19 nt, Homo sapiens
  misc_RNA (1)...(19): siRNA sense strand
cuucaagaauuaagggaua

SEQ ID NO: 815922 - RNA, 19 nt, Homo sapiens
  misc_RNA (1)...(19): siRNA sense strand
gaacauccucagcuuuaug

SEQ ID NO: 815923 - RNA, 19 nt, Homo sapiens
  misc_RNA (1)...(19): siRNA sense strand
gaagccauagacucucuua

SEQ ID NO: 815924 - RNA, 19 nt, Homo sapiens
  misc_RNA (1)...(19): siRNA sense strand
gccagagaauguugaauca

SEQ ID NO: 815925 - RNA, 19 nt, Homo sapiens
  misc_RNA (1)...(19): siRNA sense strand
guggagagguaccauaauc

SEQ ID NO: 815926 - RNA, 19 nt, Homo sapiens
  misc_RNA (1)...(19): siRNA sense strand
gaacgcaaacuacgagaag

SEQ ID NO: 815927 - RNA, 19 nt, Homo sapiens
  misc_RNA (1)...(19): siRNA sense strand
ugagauuuaucguguguug

SEQ ID NO: 815928 - RNA, 19 nt, Homo sapiens
  misc_RNA (1)...(19): siRNA sense strand
aaaggugauugaugagauu

SEQ ID NO: 815929 - RNA, 19 nt, Homo sapiens
  misc_RNA (1)...(19): siRNA sense strand
gaaaggagaaaccauucau

SEQ ID NO: 815930 - RNA, 19 nt, Homo sapiens
  misc_RNA (1)...(19): siRNA sense strand
caaacuacgagaaguaaug

SEQ ID NO: 815931 - RNA, 19 nt, Homo sapiens
  misc_RNA (1)...(19): siRNA sense strand
gcaaaauccuucaagacaa

SEQ ID NO: 815932 - RNA, 19 nt, Homo sapiens
  misc_RNA (1)...(19): siRNA sense strand
ggugauugaugagauuuau

SEQ ID NO: 815933 - RNA, 19 nt, Homo sapiens
  misc_RNA (1)...(19): siRNA sense strand
gaaagugcuguaggaaauu

SEQ ID NO: 815934 - RNA, 19 nt, Homo sapiens
  misc_RNA (1)...(19): siRNA sense strand
ucagaaaggagaaaccauu

SEQ ID NO: 815935 - RNA, 19 nt, Homo sapiens
  misc_RNA (1)...(19): siRNA sense strand
cuaaacgucuucggaauag

SEQ ID NO: 815936 - RNA, 19 nt, Homo sapiens
  misc_RNA (1)...(19): siRNA sense strand
ccaaggagagagucagaaa

SEQ ID NO: 815937 - RNA, 19 nt, Homo sapiens
  misc_RNA (1)...(19): siRNA sense strand
uaggaaaucuaaacgucuu

SEQ ID NO: 815938 - RNA, 19 nt, Homo sapiens
  misc_RNA (1)...(19): siRNA sense strand
ggagaaaccauucauuagc

SEQ ID NO: 815939 - RNA, 19 nt, Homo sapiens
  misc_RNA (1)...(19): siRNA sense strand
ucuaaacgucuucggaaua

SEQ ID NO: 815940 - RNA, 19 nt, Homo sapiens
  misc_RNA (1)...(19): siRNA sense strand
caugggcucuccuccaguu

SEQ ID NO: 815941 - RNA, 19 nt, Homo sapiens
  misc_RNA (1)...(19): siRNA sense strand
caauggaguacuuugauga

SEQ ID NO: 815942 - RNA, 19 nt, Homo sapiens
  misc_RNA (1)...(19): siRNA sense strand
uuaccaggaucagauguuu

SEQ ID NO: 815943 - RNA, 19 nt, Homo sapiens
  misc_RNA (1)...(19): siRNA sense strand
ggaaaggugauugaugaga

SEQ ID NO: 815944 - RNA, 19 nt, Homo sapiens
  misc_RNA (1)...(19): siRNA sense strand
gagagguaccauaaucuau

SEQ ID NO: 815945 - RNA, 19 nt, Homo sapiens
  misc_RNA (1)...(19): siRNA sense strand
guucucaggcgugaaauuu

SEQ ID NO: 815946 - RNA, 19 nt, Homo sapiens
  misc_RNA (1)...(19): siRNA sense strand
aagaggaaauuaccaggau

SEQ ID NO: 815947 - RNA, 19 nt, Homo sapiens
  misc_RNA (1)...(19): siRNA sense strand
aauggaaagugcuguagga

SEQ ID NO: 815948 - RNA, 19 nt, Homo sapiens
  misc_RNA (1)...(19): siRNA sense strand
ggaaauuaccaggaucaga

SEQ ID NO: 815949 - RNA, 19 nt, Homo sapiens
  misc_RNA (1)...(19): siRNA sense strand
gaggaaauuaccaggauca

SEQ ID NO: 815950 - RNA, 19 nt, Homo sapiens
  misc_RNA (1)...(19): siRNA sense strand
aaacgucuucggaauagaa

SEQ ID NO: 815951 - RNA, 19 nt, Homo sapiens
  misc_RNA (1)...(19): siRNA sense strand
cagcucuucuccaagcaaa

SEQ ID NO: 815952 - RNA, 19 nt, Homo sapiens
  misc_RNA (1)...(19): siRNA sense strand
uccaaucucuguugcuuca

SEQ ID NO: 815953 - RNA, 19 nt, Homo sapiens
  misc_RNA (1)...(19): siRNA sense strand
cgagaacauccucagcuuu

SEQ ID NO: 815954 - RNA, 19 nt, Homo sapiens
  misc_RNA (1)...(19): siRNA sense strand
ucgagaacauccucagcuu

SEQ ID NO: 815955 - RNA, 19 nt, Homo sapiens
  misc_RNA (1)...(19): siRNA sense strand
caagcaaaauccuucaaga

SEQ ID NO: 815956 - RNA, 19 nt, Homo sapiens
  misc_RNA (1)...(19): siRNA sense strand
caaagugcaagaacagcaa

SEQ ID NO: 815957 - RNA, 19 nt, Homo sapiens
  misc_RNA (1)...(19): siRNA sense strand
caagacaagagguuaccaa

SEQ ID NO: 815958 - RNA, 19 nt, Homo sapiens
  misc_RNA (1)...(19): siRNA sense strand
ucagaaacaaguuaaagca

SEQ ID NO: 815959 - RNA, 19 nt, Homo sapiens
  misc_RNA (1)...(19): siRNA sense strand
ccauagacucucuuaggaa

SEQ ID NO: 815960 - RNA, 19 nt, Homo sapiens
  misc_RNA (1)...(19): siRNA sense strand
gagcuagaacgcaaacuac

SEQ ID NO: 815961 - RNA, 19 nt, Homo sapiens
  misc_RNA (1)...(19): siRNA sense strand
gcgugaaauuucugagcuu

SEQ ID NO: 815962 - RNA, 19 nt, Homo sapiens
  misc_RNA (1)...(19): siRNA sense strand
cugcagcccuaacaacaau

SEQ ID NO: 815963 - RNA, 19 nt, Homo sapiens
  misc_RNA (1)...(19): siRNA sense strand
caaucucuguugcuucauc

SEQ ID NO: 815964 - RNA, 19 nt, Homo sapiens
  misc_RNA (1)...(19): siRNA sense strand
aacaaggcugucacuauua

SEQ ID NO: 815965 - RNA, 19 nt, Homo sapiens
  misc_RNA (1)...(19): siRNA sense strand
uagacucucuuaggaaauc

SEQ ID NO: 815966 - RNA, 19 nt, Homo sapiens
  misc_RNA (1)...(19): siRNA sense strand
aaagugcuguaggaaauuc

SEQ ID NO: 815967 - RNA, 19 nt, Homo sapiens
  misc_RNA (1)...(19): siRNA sense strand
caacaaugcagcucuucuc

SEQ ID NO: 815968 - RNA, 19 nt, Homo sapiens
  misc_RNA (1)...(19): siRNA sense strand
ccaggaaaggugauugaug

SEQ ID NO: 815969 - RNA, 19 nt, Homo sapiens
  misc_RNA (1)...(19): siRNA sense strand
aaaggagaaaccauucauu

SEQ ID NO: 815970 - RNA, 19 nt, Homo sapiens
  misc_RNA (1)...(19): siRNA sense strand
uuucugagcuucgcaccaa

SEQ ID NO: 815971 - RNA, 19 nt, Homo sapiens
  misc_RNA (1)...(19): siRNA sense strand
aaacuccagcagcagguua

SEQ ID NO: 815972 - RNA, 19 nt, Homo sapiens
  misc_RNA (1)...(19): siRNA sense strand
cagaaaggagaaaccauuc

SEQ ID NO: 815973 - RNA, 19 nt, Homo sapiens
  misc_RNA (1)...(19): siRNA sense strand
agagcuagaacgcaaacua

SEQ ID NO: 815974 - RNA, 19 nt, Homo sapiens
  misc_RNA (1)...(19): siRNA sense strand
ucaagaccaggaccagaaa

SEQ ID NO: 815975 - RNA, 19 nt, Homo sapiens
  misc_RNA (1)...(19): siRNA sense strand
ucucaggcgugaaauuucu

SEQ ID NO: 815976 - RNA, 19 nt, Homo sapiens
  misc_RNA (1)...(19): siRNA sense strand
aaaguggagagguaccaua

SEQ ID NO: 815977 - RNA, 19 nt, Homo sapiens
  misc_RNA (1)...(19): siRNA sense strand
caaaauccuucaagacaag

SEQ ID NO: 815978 - RNA, 19 nt, Homo sapiens
  misc_RNA (1)...(19): siRNA sense strand
cuauggcaauggaguacuu

SEQ ID NO: 815979 - RNA, 19 nt, Homo sapiens
  misc_RNA (1)...(19): siRNA sense strand
cauucuugcugcuguugaa

SEQ ID NO: 815980 - RNA, 19 nt, Homo sapiens
  misc_RNA (1)...(19): siRNA sense strand
uucauuagcucgucaugca

SEQ ID NO: 815981 - RNA, 19 nt, Homo sapiens
  misc_RNA (1)...(19): siRNA sense strand
gcuagaacgcaaacuacga

SEQ ID NO: 815982 - RNA, 19 nt, Homo sapiens
  misc_RNA (1)...(19): siRNA sense strand
caucguagccaucgagaac

SEQ ID NO: 815983 - RNA, 19 nt, Homo sapiens
  misc_RNA (1)...(19): siRNA sense strand
cagcuccgccugguuugua

SEQ ID NO: 815984 - RNA, 19 nt, Homo sapiens
  misc_RNA (1)...(19): siRNA sense strand
guaaaagaauggacuuggu

SEQ ID NO: 815985 - RNA, 19 nt, Homo sapiens
  misc_RNA (1)...(19): siRNA sense strand
agacauucuugcugcuguu

SEQ ID NO: 815986 - RNA, 19 nt, Homo sapiens
  misc_RNA (1)...(19): siRNA sense strand
gcaaacuacgagaaguaau

SEQ ID NO: 815987 - RNA, 19 nt, Homo sapiens
  misc_RNA (1)...(19): siRNA sense strand
acgcaaacuacgagaagua

SEQ ID NO: 815988 - RNA, 19 nt, Homo sapiens
  misc_RNA (1)...(19): siRNA sense strand
agaacauccucagcuuuau

SEQ ID NO: 815989 - RNA, 19 nt, Homo sapiens
  misc_RNA (1)...(19): siRNA sense strand
uauccucuauggcaaugga

SEQ ID NO: 815990 - RNA, 19 nt, Homo sapiens
  misc_RNA (1)...(19): siRNA sense strand
ggcaauggaguacuuugau

SEQ ID NO: 815991 - RNA, 19 nt, Homo sapiens
  misc_RNA (1)...(19): siRNA sense strand
aaaggccacggaagccaua

SEQ ID NO: 815992 - RNA, 19 nt, Homo sapiens
  misc_RNA (1)...(19): siRNA sense strand
uacgagaaguaauggaaag

SEQ ID NO: 815993 - RNA, 19 nt, Homo sapiens
  misc_RNA (1)...(19): siRNA sense strand
cuacgagaaguaauggaaa

SEQ ID NO: 815994 - RNA, 19 nt, Homo sapiens
  misc_RNA (1)...(19): siRNA sense strand
gauuuaucguguguugaga

SEQ ID NO: 815995 - RNA, 19 nt, Homo sapiens
  misc_RNA (1)...(19): siRNA sense strand
uggaaagugcuguaggaaa

SEQ ID NO: 815996 - RNA, 19 nt, Homo sapiens
  misc_RNA (1)...(19): siRNA sense strand
aaguggagagguaccauaa

SEQ ID NO: 815997 - RNA, 19 nt, Homo sapiens
  misc_RNA (1)...(19): siRNA sense strand
gcaacaagauggaggaaga

SEQ ID NO: 815998 - RNA, 19 nt, Homo sapiens
  misc_RNA (1)...(19): siRNA sense strand
gugaagagcugcagugaga

SEQ ID NO: 815999 - RNA, 19 nt, Homo sapiens
  misc_RNA (1)...(19): siRNA sense strand
guacuucgcugcucugaug

SEQ ID NO: 816000 - RNA, 19 nt, Homo sapiens
  misc_RNA (1)...(19): siRNA sense strand
gggcaaaggugacagcauu

SEQ ID NO: 816001 - RNA, 19 nt, Homo sapiens
  misc_RNA (1)...(19): siRNA sense strand
gcagugaauucauguuuga

SEQ ID NO: 816002 - RNA, 19 nt, Homo sapiens
  misc_RNA (1)...(19): siRNA sense strand
gcacaaggccuacagaugu

SEQ ID NO: 816003 - RNA, 19 nt, Homo sapiens
  misc_RNA (1)...(19): siRNA sense strand
ggaaggagacggagacuga

SEQ ID NO: 816004 - RNA, 19 nt, Homo sapiens
  misc_RNA (1)...(19): siRNA sense strand
gaacuuaccucaccaucac

SEQ ID NO: 816005 - RNA, 19 nt, Homo sapiens
  misc_RNA (1)...(19): siRNA sense strand
gcugugaaguuacauaaug

SEQ ID NO: 816006 - RNA, 19 nt, Homo sapiens
  misc_RNA (1)...(19): siRNA sense strand
gcagcacaguggaaucuaa

SEQ ID NO: 816007 - RNA, 19 nt, Homo sapiens
  misc_RNA (1)...(19): siRNA sense strand
ugacgaagcugccaucagu

SEQ ID NO: 816008 - RNA, 19 nt, Homo sapiens
  misc_RNA (1)...(19): siRNA sense strand
gcggugaccugccuccuuu

SEQ ID NO: 816009 - RNA, 19 nt, Homo sapiens
  misc_RNA (1)...(19): siRNA sense strand
gcacaaacgucaccuucag

SEQ ID NO: 816010 - RNA, 19 nt, Homo sapiens
  misc_RNA (1)...(19): siRNA sense strand
ggagaaagcccacaucaac

SEQ ID NO: 816011 - RNA, 19 nt, Homo sapiens
  misc_RNA (1)...(19): siRNA sense strand
ccaaagccuucauggauau

SEQ ID NO: 816012 - RNA, 19 nt, Homo sapiens
  misc_RNA (1)...(19): siRNA sense strand
gcucucagcugaacacaag

SEQ ID NO: 816013 - RNA, 19 nt, Homo sapiens
  misc_RNA (1)...(19): siRNA sense strand
agagauggcugacccaaug

SEQ ID NO: 816014 - RNA, 19 nt, Homo sapiens
  misc_RNA (1)...(19): siRNA sense strand
ucacggcccuguacgacua

SEQ ID NO: 816015 - RNA, 19 nt, Homo sapiens
  misc_RNA (1)...(19): siRNA sense strand
caagggcagugaauucaug

SEQ ID NO: 816016 - RNA, 19 nt, Homo sapiens
  misc_RNA (1)...(19): siRNA sense strand
gggcugcggugaccaguau

SEQ ID NO: 816017 - RNA, 19 nt, Homo sapiens
  misc_RNA (1)...(19): siRNA sense strand
caacucggcugcccacaag

SEQ ID NO: 816018 - RNA, 19 nt, Homo sapiens
  misc_RNA (1)...(19): siRNA sense strand
uggaaaccaucagaacuua

SEQ ID NO: 816019 - RNA, 19 nt, Homo sapiens
  misc_RNA (1)...(19): siRNA sense strand
ggagaucugugcuguucug

SEQ ID NO: 816020 - RNA, 19 nt, Homo sapiens
  misc_RNA (1)...(19): siRNA sense strand
uugggaagcuuucagauga

SEQ ID NO: 816021 - RNA, 19 nt, Homo sapiens
  misc_RNA (1)...(19): siRNA sense strand
ggaagaaggaccacagcuu

SEQ ID NO: 816022 - RNA, 19 nt, Homo sapiens
  misc_RNA (1)...(19): siRNA sense strand
ggugaacagucuccuggaa

SEQ ID NO: 816023 - RNA, 19 nt, Homo sapiens
  misc_RNA (1)...(19): siRNA sense strand
guucaucacugcccucauc

SEQ ID NO: 816024 - RNA, 19 nt, Homo sapiens
  misc_RNA (1)...(19): siRNA sense strand
ggaagaggaaggugccaaa

SEQ ID NO: 816025 - RNA, 19 nt, Homo sapiens
  misc_RNA (1)...(19): siRNA sense strand
aaggugaugugaagaagaa

SEQ ID NO: 816026 - RNA, 19 nt, Homo sapiens
  misc_RNA (1)...(19): siRNA sense strand
aaacgucaccuucagcaaa

SEQ ID NO: 816027 - RNA, 19 nt, Homo sapiens
  misc_RNA (1)...(19): siRNA sense strand
caagauggaggaagaggaa

SEQ ID NO: 816028 - RNA, 19 nt, Homo sapiens
  misc_RNA (1)...(19): siRNA sense strand
gggcagugaauucauguuu

SEQ ID NO: 816029 - RNA, 19 nt, Homo sapiens
  misc_RNA (1)...(19): siRNA sense strand
agucgaugcugugaaguua

SEQ ID NO: 816030 - RNA, 19 nt, Homo sapiens
  misc_RNA (1)...(19): siRNA sense strand
gugagucgcuuugccaaga

SEQ ID NO: 816031 - RNA, 19 nt, Homo sapiens
  misc_RNA (1)...(19): siRNA sense strand
ggcagugaauucauguuug

SEQ ID NO: 816032 - RNA, 19 nt, Homo sapiens
  misc_RNA (1)...(19): siRNA sense strand
ggcuuaaggucauggagaa

SEQ ID NO: 816033 - RNA, 19 nt, Homo sapiens
  misc_RNA (1)...(19): siRNA sense strand
caaguucauccgcaaguuu

SEQ ID NO: 816034 - RNA, 19 nt, Homo sapiens
  misc_RNA (1)...(19): siRNA sense strand
aggcgaagaugaagagaug

SEQ ID NO: 816035 - RNA, 19 nt, Homo sapiens
  misc_RNA (1)...(19): siRNA sense strand
gcaaaggugacagcauuga

SEQ ID NO: 816036 - RNA, 19 nt, Homo sapiens
  misc_RNA (1)...(19): siRNA sense strand
ugaagugccuccuacacau

SEQ ID NO: 816037 - RNA, 19 nt, Homo sapiens
  misc_RNA (1)...(19): siRNA sense strand
ugacagcauugaggagauu

SEQ ID NO: 816038 - RNA, 19 nt, Homo sapiens
  misc_RNA (1)...(19): siRNA sense strand
agacggagacugaguacuu

SEQ ID NO: 816039 - RNA, 19 nt, Homo sapiens
  misc_RNA (1)...(19): siRNA sense strand
gcuggaggcucuggcauuc

SEQ ID NO: 816040 - RNA, 19 nt, Homo sapiens
  misc_RNA (1)...(19): siRNA sense strand
ggaggaggagcuggagaua

SEQ ID NO: 816041 - RNA, 19 nt, Homo sapiens
  misc_RNA (1)...(19): siRNA sense strand
gauuugagcuggugaaaag

SEQ ID NO: 816042 - RNA, 19 nt, Homo sapiens
  misc_RNA (1)...(19): siRNA sense strand
aagaggcccugcagugcua

SEQ ID NO: 816043 - RNA, 19 nt, Homo sapiens
  misc_RNA (1)...(19): siRNA sense strand
ccagcccugugcuuauuaa

SEQ ID NO: 816044 - RNA, 19 nt, Homo sapiens
  misc_RNA (1)...(19): siRNA sense strand
gaagcucaagcaccagaaa

SEQ ID NO: 816045 - RNA, 19 nt, Homo sapiens
  misc_RNA (1)...(19): siRNA sense strand
aaggagaucugugcuguuc

SEQ ID NO: 816046 - RNA, 19 nt, Homo sapiens
  misc_RNA (1)...(19): siRNA sense strand
gcaugaagcuucggaaccu

SEQ ID NO: 816047 - RNA, 19 nt, Homo sapiens
  misc_RNA (1)...(19): siRNA sense strand
ccugccagcucugacuuua

SEQ ID NO: 816048 - RNA, 19 nt, Homo sapiens
  misc_RNA (1)...(19): siRNA sense strand
cuaacacccugaagagcaa

SEQ ID NO: 816049 - RNA, 19 nt, Homo sapiens
  misc_RNA (1)...(19): siRNA sense strand
cugaggagacucuggauuu

SEQ ID NO: 816050 - RNA, 19 nt, Homo sapiens
  misc_RNA (1)...(19): siRNA sense strand
cagcugaacacaaggaguu

SEQ ID NO: 816051 - RNA, 19 nt, Homo sapiens
  misc_RNA (1)...(19): siRNA sense strand
gcaccuggccaaacaugug

SEQ ID NO: 816052 - RNA, 19 nt, Homo sapiens
  misc_RNA (1)...(19): siRNA sense strand
cggaaggccuggugaagag

SEQ ID NO: 816053 - RNA, 19 nt, Homo sapiens
  misc_RNA (1)...(19): siRNA sense strand
gggcugugcuggaaaccau

SEQ ID NO: 816054 - RNA, 19 nt, Homo sapiens
  misc_RNA (1)...(19): siRNA sense strand
gaggagggccugacguaca

SEQ ID NO: 816055 - RNA, 19 nt, Homo sapiens
  misc_RNA (1)...(19): siRNA sense strand
uugaagcgcuggaagaaag

SEQ ID NO: 816056 - RNA, 19 nt, Homo sapiens
  misc_RNA (1)...(19): siRNA sense strand
gagcucaacgcccagauca

SEQ ID NO: 816057 - RNA, 19 nt, Homo sapiens
  misc_RNA (1)...(19): siRNA sense strand
gacggagacugaguacuuc

SEQ ID NO: 816058 - RNA, 19 nt, Homo sapiens
  misc_RNA (1)...(19): siRNA sense strand
ugaggagacucuggauuuc

SEQ ID NO: 816059 - RNA, 19 nt, Homo sapiens
  misc_RNA (1)...(19): siRNA sense strand
cagugagaaugauuuacaa

SEQ ID NO: 816060 - RNA, 19 nt, Homo sapiens
  misc_RNA (1)...(19): siRNA sense strand
gaucaucacggcccuguac

SEQ ID NO: 816061 - RNA, 19 nt, Homo sapiens
  misc_RNA (1)...(19): siRNA sense strand
ccagugagaaugauuuaca

SEQ ID NO: 816062 - RNA, 19 nt, Homo sapiens
  misc_RNA (1)...(19): siRNA sense strand
ccaaguucauccgcaaguu

SEQ ID NO: 816063 - RNA, 19 nt, Homo sapiens
  misc_RNA (1)...(19): siRNA sense strand
ccgagaccauguucaggaa

SEQ ID NO: 816064 - RNA, 19 nt, Homo sapiens
  misc_RNA (1)...(19): siRNA sense strand
gcucaacgcccagaucauc

SEQ ID NO: 816065 - RNA, 19 nt, Homo sapiens
  misc_RNA (1)...(19): siRNA sense strand
gcaggaagaagaugaagcu

SEQ ID NO: 816066 - RNA, 19 nt, Homo sapiens
  misc_RNA (1)...(19): siRNA sense strand
gaauacaaggccaagaaag

SEQ ID NO: 816067 - RNA, 19 nt, Homo sapiens
  misc_RNA (1)...(19): siRNA sense strand
ugaauacaaggccaagaaa

SEQ ID NO: 816068 - RNA, 19 nt, Homo sapiens
  misc_RNA (1)...(19): siRNA sense strand
caaaggcgaagaugaagag

SEQ ID NO: 816069 - RNA, 19 nt, Homo sapiens
  misc_RNA (1)...(19): siRNA sense strand
gaagcuuucagaugacaug

SEQ ID NO: 816070 - RNA, 19 nt, Homo sapiens
  misc_RNA (1)...(19): siRNA sense strand
gggccaugcuuuccuaagg

SEQ ID NO: 816071 - RNA, 19 nt, Homo sapiens
  misc_RNA (1)...(19): siRNA sense strand
gcugugccuuuggaaauug

SEQ ID NO: 816072 - RNA, 19 nt, Homo sapiens
  misc_RNA (1)...(19): siRNA sense strand
ggcugugccuuuggaaauu

SEQ ID NO: 816073 - RNA, 19 nt, Homo sapiens
  misc_RNA (1)...(19): siRNA sense strand
ggaggcagacggcaacaag

SEQ ID NO: 816074 - RNA, 19 nt, Homo sapiens
  misc_RNA (1)...(19): siRNA sense strand
gccaugcuuuccuaagguu

SEQ ID NO: 816075 - RNA, 19 nt, Homo sapiens
  misc_RNA (1)...(19): siRNA sense strand
ugaccgugcugaagugagu

SEQ ID NO: 816076 - RNA, 19 nt, Homo sapiens
  misc_RNA (1)...(19): siRNA sense strand
caggaaacgcgacuugguu

SEQ ID NO: 816077 - RNA, 19 nt, Homo sapiens
  misc_RNA (1)...(19): siRNA sense strand
gagaccauguucaggaaac

SEQ ID NO: 816078 - RNA, 19 nt, Homo sapiens
  misc_RNA (1)...(19): siRNA sense strand
uccaggagauugagaaguc

SEQ ID NO: 816079 - RNA, 19 nt, Homo sapiens
  misc_RNA (1)...(19): siRNA sense strand
ggacaaugaggaggaggaa

SEQ ID NO: 816080 - RNA, 19 nt, Homo sapiens
  misc_RNA (1)...(19): siRNA sense strand
gcccugacccaccuccuuu

SEQ ID NO: 816081 - RNA, 19 nt, Homo sapiens
  misc_RNA (1)...(19): siRNA sense strand
gcgcacggaagaacgcuuu

SEQ ID NO: 816082 - RNA, 19 nt, Homo sapiens
  misc_RNA (1)...(19): siRNA sense strand
gaagugccuccuacacauc

SEQ ID NO: 816083 - RNA, 19 nt, Homo sapiens
  misc_RNA (1)...(19): siRNA sense strand
acgacuauguucccaguga

SEQ ID NO: 816084 - RNA, 19 nt, Homo sapiens
  misc_RNA (1)...(19): siRNA sense strand
gcucugaugacaacaaugg

SEQ ID NO: 816085 - RNA, 19 nt, Homo sapiens
  misc_RNA (1)...(19): siRNA sense strand
cugugaaguuacauaauga

SEQ ID NO: 816086 - RNA, 19 nt, Homo sapiens
  misc_RNA (1)...(19): siRNA sense strand
uggaggaccugaagaagac

SEQ ID NO: 816087 - RNA, 19 nt, Homo sapiens
  misc_RNA (1)...(19): siRNA sense strand
ggcccuaccuagagagcaa

SEQ ID NO: 816088 - RNA, 19 nt, Homo sapiens
  misc_RNA (1)...(19): siRNA sense strand
gugaacagucuccuggaaa

SEQ ID NO: 816089 - RNA, 19 nt, Homo sapiens
  misc_RNA (1)...(19): siRNA sense strand
gcugcugugugucuucuuc

SEQ ID NO: 816090 - RNA, 19 nt, Homo sapiens
  misc_RNA (1)...(19): siRNA sense strand
gcugaaccuuguccugaag

SEQ ID NO: 816091 - RNA, 19 nt, Homo sapiens
  misc_RNA (1)...(19): siRNA sense strand
gcaaggagcagcggaagcu

SEQ ID NO: 816092 - RNA, 19 nt, Homo sapiens
  misc_RNA (1)...(19): siRNA sense strand
acagaguccuggucaacau

SEQ ID NO: 816093 - RNA, 19 nt, Homo sapiens
  misc_RNA (1)...(19): siRNA sense strand
cggagacgcccauggaaga

SEQ ID NO: 816094 - RNA, 19 nt, Homo sapiens
  misc_RNA (1)...(19): siRNA sense strand
agacgcccauggaagaaga

SEQ ID NO: 816095 - RNA, 19 nt, Homo sapiens
  misc_RNA (1)...(19): siRNA sense strand
ccaccacgcugcacaugcu

SEQ ID NO: 816096 - RNA, 19 nt, Homo sapiens
  misc_RNA (1)...(19): siRNA sense strand
guucccagcccugugcuua

SEQ ID NO: 816097 - RNA, 19 nt, Homo sapiens
  misc_RNA (1)...(19): siRNA sense strand
ccaagaaccuccacucuaa

SEQ ID NO: 816098 - RNA, 19 nt, Homo sapiens
  misc_RNA (1)...(19): siRNA sense strand
ggaacgagaugaucauguu

SEQ ID NO: 816099 - RNA, 19 nt, Homo sapiens
  misc_RNA (1)...(19): siRNA sense strand
ggaaggaugucucugucaa

SEQ ID NO: 816100 - RNA, 19 nt, Homo sapiens
  misc_RNA (1)...(19): siRNA sense strand
caucaacuaugcagacuau

SEQ ID NO: 816101 - RNA, 19 nt, Homo sapiens
  misc_RNA (1)...(19): siRNA sense strand
ucagaaggcagaauuguuu

SEQ ID NO: 816102 - RNA, 19 nt, Homo sapiens
  misc_RNA (1)...(19): siRNA sense strand
ugaagaagaagcagacuaa

SEQ ID NO: 816103 - RNA, 19 nt, Homo sapiens
  misc_RNA (1)...(19): siRNA sense strand
gagcuaagcacaagaucaa

SEQ ID NO: 816104 - RNA, 19 nt, Homo sapiens
  misc_RNA (1)...(19): siRNA sense strand
cuccagaggucaucaacua

SEQ ID NO: 816105 - RNA, 19 nt, Homo sapiens
  misc_RNA (1)...(19): siRNA sense strand
gaacgagaugaucauguuu

SEQ ID NO: 816106 - RNA, 19 nt, Homo sapiens
  misc_RNA (1)...(19): siRNA sense strand
caacuaugcagacuauuca

SEQ ID NO: 816107 - RNA, 19 nt, Homo sapiens
  misc_RNA (1)...(19): siRNA sense strand
ggcaccagcugcaccugua

SEQ ID NO: 816108 - RNA, 19 nt, Homo sapiens
  misc_RNA (1)...(19): siRNA sense strand
gcucagacagcccuaaaga

SEQ ID NO: 816109 - RNA, 19 nt, Homo sapiens
  misc_RNA (1)...(19): siRNA sense strand
gaaugacagucgccucaag

SEQ ID NO: 816110 - RNA, 19 nt, Homo sapiens
  misc_RNA (1)...(19): siRNA sense strand
cagagaaggcugccaguug

SEQ ID NO: 816111 - RNA, 19 nt, Homo sapiens
  misc_RNA (1)...(19): siRNA sense strand
gccaagaaccuccacucua

SEQ ID NO: 816112 - RNA, 19 nt, Homo sapiens
  misc_RNA (1)...(19): siRNA sense strand
cucggaagcugaagaagaa

SEQ ID NO: 816113 - RNA, 19 nt, Homo sapiens
  misc_RNA (1)...(19): siRNA sense strand
uaaacgagcuaagcacaag

SEQ ID NO: 816114 - RNA, 19 nt, Homo sapiens
  misc_RNA (1)...(19): siRNA sense strand
caaguucccagacaucuau

SEQ ID NO: 816115 - RNA, 19 nt, Homo sapiens
  misc_RNA (1)...(19): siRNA sense strand
gaagaagaagcagacuaaa

SEQ ID NO: 816116 - RNA, 19 nt, Homo sapiens
  misc_RNA (1)...(19): siRNA sense strand
gcucggaagcugaagaaga

SEQ ID NO: 816117 - RNA, 19 nt, Homo sapiens
  misc_RNA (1)...(19): siRNA sense strand
acuacugccuggacuauga

SEQ ID NO: 816118 - RNA, 19 nt, Homo sapiens
  misc_RNA (1)...(19): siRNA sense strand
ucagacagcccuaaagaag

SEQ ID NO: 816119 - RNA, 19 nt, Homo sapiens
  misc_RNA (1)...(19): siRNA sense strand
ucaagaggcaggucacaga

SEQ ID NO: 816120 - RNA, 19 nt, Homo sapiens
  misc_RNA (1)...(19): siRNA sense strand
gaagaagcagacuaaacga

SEQ ID NO: 816121 - RNA, 19 nt, Homo sapiens
  misc_RNA (1)...(19): siRNA sense strand
caagggaguguggccaaua

SEQ ID NO: 816122 - RNA, 19 nt, Homo sapiens
  misc_RNA (1)...(19): siRNA sense strand
gcucgggucugcacaacag

SEQ ID NO: 816123 - RNA, 19 nt, Homo sapiens
  misc_RNA (1)...(19): siRNA sense strand
ggagagguccuacuaucca

SEQ ID NO: 816124 - RNA, 19 nt, Homo sapiens
  misc_RNA (1)...(19): siRNA sense strand
uaugcagacuauucacuga

SEQ ID NO: 816125 - RNA, 19 nt, Homo sapiens
  misc_RNA (1)...(19): siRNA sense strand
acgagaugaucauguuuga

SEQ ID NO: 816126 - RNA, 19 nt, Homo sapiens
  misc_RNA (1)...(19): siRNA sense strand
gaaggcagaauuguuugug

SEQ ID NO: 816127 - RNA, 19 nt, Homo sapiens
  misc_RNA (1)...(19): siRNA sense strand
guuugugacucgccuggaa

SEQ ID NO: 816128 - RNA, 19 nt, Homo sapiens
  misc_RNA (1)...(19): siRNA sense strand
gcaccagcugcaccuguaa

SEQ ID NO: 816129 - RNA, 19 nt, Homo sapiens
  misc_RNA (1)...(19): siRNA sense strand
gagagguccuacuauccau

SEQ ID NO: 816130 - RNA, 19 nt, Homo sapiens
  misc_RNA (1)...(19): siRNA sense strand
ccagaggucaucaacuaug

SEQ ID NO: 816131 - RNA, 19 nt, Homo sapiens
  misc_RNA (1)...(19): siRNA sense strand
ucaacuaugcagacuauuc

SEQ ID NO: 816132 - RNA, 19 nt, Homo sapiens
  misc_RNA (1)...(19): siRNA sense strand
gaaggaugucucugucaag

SEQ ID NO: 816133 - RNA, 19 nt, Homo sapiens
  misc_RNA (1)...(19): siRNA sense strand
ggaggaugucugugucaug

SEQ ID NO: 816134 - RNA, 19 nt, Homo sapiens
  misc_RNA (1)...(19): siRNA sense strand
agaagaagcagacuaaacg

SEQ ID NO: 816135 - RNA, 19 nt, Homo sapiens
  misc_RNA (1)...(19): siRNA sense strand
cuggagagguccuacuauc

SEQ ID NO: 816136 - RNA, 19 nt, Homo sapiens
  misc_RNA (1)...(19): siRNA sense strand
aaggcagaauuguuuguga

SEQ ID NO: 816137 - RNA, 19 nt, Homo sapiens
  misc_RNA (1)...(19): siRNA sense strand
cccgugcccuccucaaguu

SEQ ID NO: 816138 - RNA, 19 nt, Homo sapiens
  misc_RNA (1)...(19): siRNA sense strand
ccaagggaguguggccaau

SEQ ID NO: 816139 - RNA, 19 nt, Homo sapiens
  misc_RNA (1)...(19): siRNA sense strand
cgggacaucugugccucua

SEQ ID NO: 816140 - RNA, 19 nt, Homo sapiens
  misc_RNA (1)...(19): siRNA sense strand
aagggaguguggccaauag

SEQ ID NO: 816141 - RNA, 19 nt, Homo sapiens
  misc_RNA (1)...(19): siRNA sense strand
ucaaguucccagacaucua

SEQ ID NO: 816142 - RNA, 19 nt, Homo sapiens
  misc_RNA (1)...(19): siRNA sense strand
gucagaaggcagaauuguu

SEQ ID NO: 816143 - RNA, 19 nt, Homo sapiens
  misc_RNA (1)...(19): siRNA sense strand
cagaggucaucaacuaugc

SEQ ID NO: 816144 - RNA, 19 nt, Homo sapiens
  misc_RNA (1)...(19): siRNA sense strand
cugcacaacaguucaaugu

SEQ ID NO: 816145 - RNA, 19 nt, Homo sapiens
  misc_RNA (1)...(19): siRNA sense strand
ccacuacugccuggacuau

SEQ ID NO: 816146 - RNA, 19 nt, Homo sapiens
  misc_RNA (1)...(19): siRNA sense strand
gagguccuacuauccauca

SEQ ID NO: 816147 - RNA, 19 nt, Homo sapiens
  misc_RNA (1)...(19): siRNA sense strand
gaccgcuucucccgucaca

SEQ ID NO: 816148 - RNA, 19 nt, Homo sapiens
  misc_RNA (1)...(19): siRNA sense strand
ccaauaggaccggcucugu

SEQ ID NO: 816149 - RNA, 19 nt, Homo sapiens
  misc_RNA (1)...(19): siRNA sense strand
ggaagcugaagaagaagca

SEQ ID NO: 816150 - RNA, 19 nt, Homo sapiens
  misc_RNA (1)...(19): siRNA sense strand
agacuaaacgagcuaagca

SEQ ID NO: 816151 - RNA, 19 nt, Homo sapiens
  misc_RNA (1)...(19): siRNA sense strand
gagaaggcugccaguugga

SEQ ID NO: 816152 - RNA, 19 nt, Homo sapiens
  misc_RNA (1)...(19): siRNA sense strand
ccagcauccucgcguugug

SEQ ID NO: 816153 - RNA, 19 nt, Homo sapiens
  misc_RNA (1)...(19): siRNA sense strand
cuaaacgagcuaagcacaa

SEQ ID NO: 816154 - RNA, 19 nt, Homo sapiens
  misc_RNA (1)...(19): siRNA sense strand
gggaaggaugucucuguca

SEQ ID NO: 816155 - RNA, 19 nt, Homo sapiens
  misc_RNA (1)...(19): siRNA sense strand
gggaguguggccaauagga

SEQ ID NO: 816156 - RNA, 19 nt, Homo sapiens
  misc_RNA (1)...(19): siRNA sense strand
cagaaggcagaauuguuug

SEQ ID NO: 816157 - RNA, 19 nt, Homo sapiens
  misc_RNA (1)...(19): siRNA sense strand
gaagaaagcuauggcaauu

SEQ ID NO: 816158 - RNA, 19 nt, Homo sapiens
  misc_RNA (1)...(19): siRNA sense strand
gaaauagccucugaaauuc

SEQ ID NO: 816159 - RNA, 19 nt, Homo sapiens
  misc_RNA (1)...(19): siRNA sense strand
agaaauagccucugaaauu

SEQ ID NO: 816160 - RNA, 19 nt, Homo sapiens
  misc_RNA (1)...(19): siRNA sense strand
gcacuuggaggaacauuua

SEQ ID NO: 816161 - RNA, 19 nt, Homo sapiens
  misc_RNA (1)...(19): siRNA sense strand
gcacaaguacgaaguauau

SEQ ID NO: 816162 - RNA, 19 nt, Homo sapiens
  misc_RNA (1)...(19): siRNA sense strand
ggaaagccguugccuaugg

SEQ ID NO: 816163 - RNA, 19 nt, Homo sapiens
  misc_RNA (1)...(19): siRNA sense strand
caucgaaucuugcgaacaa

SEQ ID NO: 816164 - RNA, 19 nt, Homo sapiens
  misc_RNA (1)...(19): siRNA sense strand
ggaggaacauuuauuaugc

SEQ ID NO: 816165 - RNA, 19 nt, Homo sapiens
  misc_RNA (1)...(19): siRNA sense strand
gaucaauggucucagaaau

SEQ ID NO: 816166 - RNA, 19 nt, Homo sapiens
  misc_RNA (1)...(19): siRNA sense strand
caaagcgcauggagacuaa

SEQ ID NO: 816167 - RNA, 19 nt, Homo sapiens
  misc_RNA (1)...(19): siRNA sense strand
gcaggaguuuguuuaaaga

SEQ ID NO: 816168 - RNA, 19 nt, Homo sapiens
  misc_RNA (1)...(19): siRNA sense strand
gaacauggaauugugguuu

SEQ ID NO: 816169 - RNA, 19 nt, Homo sapiens
  misc_RNA (1)...(19): siRNA sense strand
gaauuugaagccuacauua

SEQ ID NO: 816170 - RNA, 19 nt, Homo sapiens
  misc_RNA (1)...(19): siRNA sense strand
gcuuaauuguugccaaaua

SEQ ID NO: 816171 - RNA, 19 nt, Homo sapiens
  misc_RNA (1)...(19): siRNA sense strand
ggagugacccugaauguuc

SEQ ID NO: 816172 - RNA, 19 nt, Homo sapiens
  misc_RNA (1)...(19): siRNA sense strand
gaaagccguugccuaugga

SEQ ID NO: 816173 - RNA, 19 nt, Homo sapiens
  misc_RNA (1)...(19): siRNA sense strand
ggcaauugcugaugcuuug

SEQ ID NO: 816174 - RNA, 19 nt, Homo sapiens
  misc_RNA (1)...(19): siRNA sense strand
ucaauggucucagaaauuc

SEQ ID NO: 816175 - RNA, 19 nt, Homo sapiens
  misc_RNA (1)...(19): siRNA sense strand
gcaaagcgcauggagacua

SEQ ID NO: 816176 - RNA, 19 nt, Homo sapiens
  misc_RNA (1)...(19): siRNA sense strand
gcacagugaagacuuauuc

SEQ ID NO: 816177 - RNA, 19 nt, Homo sapiens
  misc_RNA (1)...(19): siRNA sense strand
ggaauuugaagccuacauu

SEQ ID NO: 816178 - RNA, 19 nt, Homo sapiens
  misc_RNA (1)...(19): siRNA sense strand
uaagaaagcccacaaaucc

SEQ ID NO: 816179 - RNA, 19 nt, Homo sapiens
  misc_RNA (1)...(19): siRNA sense strand
gcgaacaacacgauacuug

SEQ ID NO: 816180 - RNA, 19 nt, Homo sapiens
  misc_RNA (1)...(19): siRNA sense strand
gaauugugguuuucucuuu

SEQ ID NO: 816181 - RNA, 19 nt, Homo sapiens
  misc_RNA (1)...(19): siRNA sense strand
gagcuggagugacccugaa

SEQ ID NO: 816182 - RNA, 19 nt, Homo sapiens
  misc_RNA (1)...(19): siRNA sense strand
uuaauggguucauacaaug

SEQ ID NO: 816183 - RNA, 19 nt, Homo sapiens
  misc_RNA (1)...(19): siRNA sense strand
ucucagaugccaugacuuu

SEQ ID NO: 816184 - RNA, 19 nt, Homo sapiens
  misc_RNA (1)...(19): siRNA sense strand
cauauacccuggaggaucu

SEQ ID NO: 816185 - RNA, 19 nt, Homo sapiens
  misc_RNA (1)...(19): siRNA sense strand
ugaggucggugguggagaa

SEQ ID NO: 816186 - RNA, 19 nt, Homo sapiens
  misc_RNA (1)...(19): siRNA sense strand
acacaucaauuugguuguu

SEQ ID NO: 816187 - RNA, 19 nt, Homo sapiens
  misc_RNA (1)...(19): siRNA sense strand
ucaauggaaagcacaagua

SEQ ID NO: 816188 - RNA, 19 nt, Homo sapiens
  misc_RNA (1)...(19): siRNA sense strand
gaaagcacaaguacgaagu

SEQ ID NO: 816189 - RNA, 19 nt, Homo sapiens
  misc_RNA (1)...(19): siRNA sense strand
ggcaugaggugguuguagu

SEQ ID NO: 816190 - RNA, 19 nt, Homo sapiens
  misc_RNA (1)...(19): siRNA sense strand
cgugauugguuuccucuug

SEQ ID NO: 816191 - RNA, 19 nt, Homo sapiens
  misc_RNA (1)...(19): siRNA sense strand
gacccugaauguucuggaa

SEQ ID NO: 816192 - RNA, 19 nt, Homo sapiens
  misc_RNA (1)...(19): siRNA sense strand
cagaugccaugacuuucaa

SEQ ID NO: 816193 - RNA, 19 nt, Homo sapiens
  misc_RNA (1)...(19): siRNA sense strand
cuagaaauagccucugaaa

SEQ ID NO: 816194 - RNA, 19 nt, Homo sapiens
  misc_RNA (1)...(19): siRNA sense strand
cccacgaccucaccuggua

SEQ ID NO: 816195 - RNA, 19 nt, Homo sapiens
  misc_RNA (1)...(19): siRNA sense strand
gugaucagauggacaaugc

SEQ ID NO: 816196 - RNA, 19 nt, Homo sapiens
  misc_RNA (1)...(19): siRNA sense strand
gccguugccuauggaauuu

SEQ ID NO: 816197 - RNA, 19 nt, Homo sapiens
  misc_RNA (1)...(19): siRNA sense strand
gaucuucauuggugguauc

SEQ ID NO: 816198 - RNA, 19 nt, Homo sapiens
  misc_RNA (1)...(19): siRNA sense strand
ugaggugguuguagucaug

SEQ ID NO: 816199 - RNA, 19 nt, Homo sapiens
  misc_RNA (1)...(19): siRNA sense strand
gaugggagccacugguuca

SEQ ID NO: 816200 - RNA, 19 nt, Homo sapiens
  misc_RNA (1)...(19): siRNA sense strand
gaugacccgugccuuuauc

SEQ ID NO: 816201 - RNA, 19 nt, Homo sapiens
  misc_RNA (1)...(19): siRNA sense strand
cuuggaggaacauuuauua

SEQ ID NO: 816202 - RNA, 19 nt, Homo sapiens
  misc_RNA (1)...(19): siRNA sense strand
cuucaucaccuuuaaaugu

SEQ ID NO: 816203 - RNA, 19 nt, Homo sapiens
  misc_RNA (1)...(19): siRNA sense strand
gaucagauggacaaugcaa

SEQ ID NO: 816204 - RNA, 19 nt, Homo sapiens
  misc_RNA (1)...(19): siRNA sense strand
gaaauuccagagaagaaag

SEQ ID NO: 816205 - RNA, 19 nt, Homo sapiens
  misc_RNA (1)...(19): siRNA sense strand
caguguuucucgauccuuu

SEQ ID NO: 816206 - RNA, 19 nt, Homo sapiens
  misc_RNA (1)...(19): siRNA sense strand
ccuuggacgugauugguuu

SEQ ID NO: 816207 - RNA, 19 nt, Homo sapiens
  misc_RNA (1)...(19): siRNA sense strand
ccgaugacccgugccuuua

SEQ ID NO: 816208 - RNA, 19 nt, Homo sapiens
  misc_RNA (1)...(19): siRNA sense strand
agaaagcuauggcaauugc

SEQ ID NO: 816209 - RNA, 19 nt, Homo sapiens
  misc_RNA (1)...(19): siRNA sense strand
cagaaauuccagagaagaa

SEQ ID NO: 816210 - RNA, 19 nt, Homo sapiens
  misc_RNA (1)...(19): siRNA sense strand
uggagaacauggaauugug

SEQ ID NO: 816211 - RNA, 19 nt, Homo sapiens
  misc_RNA (1)...(19): siRNA sense strand
caacugccaucagggaaag

SEQ ID NO: 816212 - RNA, 19 nt, Homo sapiens
  misc_RNA (1)...(19): siRNA sense strand
uuugaagccuacauuaaug

SEQ ID NO: 816213 - RNA, 19 nt, Homo sapiens
  misc_RNA (1)...(19): siRNA sense strand
ggaucaauggucucagaaa

SEQ ID NO: 816214 - RNA, 19 nt, Homo sapiens
  misc_RNA (1)...(19): siRNA sense strand
gagugacccugaauguucu

SEQ ID NO: 816215 - RNA, 19 nt, Homo sapiens
  misc_RNA (1)...(19): siRNA sense strand
guuaagaaagcccacaaau

SEQ ID NO: 816216 - RNA, 19 nt, Homo sapiens
  misc_RNA (1)...(19): siRNA sense strand
ccucugaaauucuccaaac

SEQ ID NO: 816217 - RNA, 19 nt, Homo sapiens
  misc_RNA (1)...(19): siRNA sense strand
uuaagaaagcccacaaauc

SEQ ID NO: 816218 - RNA, 19 nt, Homo sapiens
  misc_RNA (1)...(19): siRNA sense strand
ugcaggaguuuguuuaaag

SEQ ID NO: 816219 - RNA, 19 nt, Homo sapiens
  misc_RNA (1)...(19): siRNA sense strand
acaaauccaagacccauug

SEQ ID NO: 816220 - RNA, 19 nt, Homo sapiens
  misc_RNA (1)...(19): siRNA sense strand
gugaugaugcccuuguuug

SEQ ID NO: 816221 - RNA, 19 nt, Homo sapiens
  misc_RNA (1)...(19): siRNA sense strand
ucagaugccaugacuuuca

SEQ ID NO: 816222 - RNA, 19 nt, Homo sapiens
  misc_RNA (1)...(19): siRNA sense strand
gcccugcuccucuuuccua

SEQ ID NO: 816223 - RNA, 19 nt, Homo sapiens
  misc_RNA (1)...(19): siRNA sense strand
guucucagaugccaugacu

SEQ ID NO: 816224 - RNA, 19 nt, Homo sapiens
  misc_RNA (1)...(19): siRNA sense strand
gaacccgaccaucgaaucu

SEQ ID NO: 816225 - RNA, 19 nt, Homo sapiens
  misc_RNA (1)...(19): siRNA sense strand
ugggaucaauggucucaga

SEQ ID NO: 816226 - RNA, 19 nt, Homo sapiens
  misc_RNA (1)...(19): siRNA sense strand
uggaggaacauuuauuaug

SEQ ID NO: 816227 - RNA, 19 nt, Homo sapiens
  misc_RNA (1)...(19): siRNA sense strand
cugcuccucuuuccuaugu

SEQ ID NO: 816228 - RNA, 19 nt, Homo sapiens
  misc_RNA (1)...(19): siRNA sense strand
agaaagcccacaaauccaa

SEQ ID NO: 816229 - RNA, 19 nt, Homo sapiens
  misc_RNA (1)...(19): siRNA sense strand
ggucggugguggagaaacu

SEQ ID NO: 816230 - RNA, 19 nt, Homo sapiens
  misc_RNA (1)...(19): siRNA sense strand
guacgaaguauauauucuc

SEQ ID NO: 816231 - RNA, 19 nt, Homo sapiens
  misc_RNA (1)...(19): siRNA sense strand
ugaauguucuggaaaugac

SEQ ID NO: 816232 - RNA, 19 nt, Homo sapiens
  misc_RNA (1)...(19): siRNA sense strand
ggugaugaugcccuuguuu

SEQ ID NO: 816233 - RNA, 19 nt, Homo sapiens
  misc_RNA (1)...(19): siRNA sense strand
agaagaaagcuauggcaau

SEQ ID NO: 816234 - RNA, 19 nt, Homo sapiens
  misc_RNA (1)...(19): siRNA sense strand
agggaaagccguugccuau

SEQ ID NO: 816235 - RNA, 19 nt, Homo sapiens
  misc_RNA (1)...(19): siRNA sense strand
uugcaggaguuuguuuaaa

SEQ ID NO: 816236 - RNA, 19 nt, Homo sapiens
  misc_RNA (1)...(19): siRNA sense strand
aaagcacaaguacgaagua

SEQ ID NO: 816237 - RNA, 19 nt, Homo sapiens
  misc_RNA (1)...(19): siRNA sense strand
ggagaguucuuuugaugca

SEQ ID NO: 816238 - RNA, 19 nt, Homo sapiens
  misc_RNA (1)...(19): siRNA sense strand
ucaucaccuuuaaauguug

SEQ ID NO: 816239 - RNA, 19 nt, Homo sapiens
  misc_RNA (1)...(19): siRNA sense strand
uuaaguggcuaccccaaaa

SEQ ID NO: 816240 - RNA, 19 nt, Homo sapiens
  misc_RNA (1)...(19): siRNA sense strand
cugcugaccuguggcuuug

SEQ ID NO: 816241 - RNA, 19 nt, Homo sapiens
  misc_RNA (1)...(19): siRNA sense strand
ggaacccgaccaucgaauc

SEQ ID NO: 816242 - RNA, 19 nt, Homo sapiens
  misc_RNA (1)...(19): siRNA sense strand
gcugcugaccuguggcuuu

SEQ ID NO: 816243 - RNA, 19 nt, Homo sapiens
  misc_RNA (1)...(19): siRNA sense strand
caaauccaagacccauuga

SEQ ID NO: 816244 - RNA, 19 nt, Homo sapiens
  misc_RNA (1)...(19): siRNA sense strand
acagugcccugcuccucuu

SEQ ID NO: 816245 - RNA, 19 nt, Homo sapiens
  misc_RNA (1)...(19): siRNA sense strand
auugcacagugaagacuua

SEQ ID NO: 816246 - RNA, 19 nt, Homo sapiens
  misc_RNA (1)...(19): siRNA sense strand
cacaucaauuugguuguug

SEQ ID NO: 816247 - RNA, 19 nt, Homo sapiens
  misc_RNA (1)...(19): siRNA sense strand
cccuagaaauagccucuga

SEQ ID NO: 816248 - RNA, 19 nt, Homo sapiens
  misc_RNA (1)...(19): siRNA sense strand
aagcacaaguacgaaguau

SEQ ID NO: 816249 - RNA, 19 nt, Homo sapiens
  misc_RNA (1)...(19): siRNA sense strand
gaucuggaccgggaguuca

SEQ ID NO: 816250 - RNA, 19 nt, Homo sapiens
  misc_RNA (1)...(19): siRNA sense strand
uggccuucaucaccuuuaa

SEQ ID NO: 816251 - RNA, 19 nt, Homo sapiens
  misc_RNA (1)...(19): siRNA sense strand
ggguggaguuugugaugag

SEQ ID NO: 816252 - RNA, 19 nt, Homo sapiens
  misc_RNA (1)...(19): siRNA sense strand
gagaguacggaaccacauc

SEQ ID NO: 816253 - RNA, 19 nt, Homo sapiens
  misc_RNA (1)...(19): siRNA sense strand
caucaccuuuaaauguugu

SEQ ID NO: 816254 - RNA, 19 nt, Homo sapiens
  misc_RNA (1)...(19): siRNA sense strand
uuacaaggagaacaucaug

SEQ ID NO: 816255 - RNA, 19 nt, Homo sapiens
  misc_RNA (1)...(19): siRNA sense strand
agaaauuccagagaagaaa

SEQ ID NO: 816256 - RNA, 19 nt, Homo sapiens
  misc_RNA (1)...(19): siRNA sense strand
ucagaaauuccagagaaga

SEQ ID NO: 816257 - RNA, 19 nt, Homo sapiens
  misc_RNA (1)...(19): siRNA sense strand
ggaaagacaugagaugauu

SEQ ID NO: 816258 - RNA, 19 nt, Homo sapiens
  misc_RNA (1)...(19): siRNA sense strand
caaaggagguuauaaugga

SEQ ID NO: 816259 - RNA, 19 nt, Homo sapiens
  misc_RNA (1)...(19): siRNA sense strand
gacaagacauacuggaaua

SEQ ID NO: 816260 - RNA, 19 nt, Homo sapiens
  misc_RNA (1)...(19): siRNA sense strand
ggacuuaaccaauguuuga

SEQ ID NO: 816261 - RNA, 19 nt, Homo sapiens
  misc_RNA (1)...(19): siRNA sense strand
agagaaaccuuacaaaugu

SEQ ID NO: 816262 - RNA, 19 nt, Homo sapiens
  misc_RNA (1)...(19): siRNA sense strand
gagaagauaugaagaaugc

SEQ ID NO: 816263 - RNA, 19 nt, Homo sapiens
  misc_RNA (1)...(19): siRNA sense strand
gagagaaaccuuacaaaug

SEQ ID NO: 816264 - RNA, 19 nt, Homo sapiens
  misc_RNA (1)...(19): siRNA sense strand
gcacagcggaauuuauaua

SEQ ID NO: 816265 - RNA, 19 nt, Homo sapiens
  misc_RNA (1)...(19): siRNA sense strand
gcacaaaggagguuauaau

SEQ ID NO: 816266 - RNA, 19 nt, Homo sapiens
  misc_RNA (1)...(19): siRNA sense strand
ccucagaccuuaauaaaca

SEQ ID NO: 816267 - RNA, 19 nt, Homo sapiens
  misc_RNA (1)...(19): siRNA sense strand
aaacgguccucaacccuua

SEQ ID NO: 816268 - RNA, 19 nt, Homo sapiens
  misc_RNA (1)...(19): siRNA sense strand
uuacagaugugaagaaugu

SEQ ID NO: 816269 - RNA, 19 nt, Homo sapiens
  misc_RNA (1)...(19): siRNA sense strand
agagaaaccuuacagaugu

SEQ ID NO: 816270 - RNA, 19 nt, Homo sapiens
  misc_RNA (1)...(19): siRNA sense strand
uaaccaaucugcaaaccuu

SEQ ID NO: 816271 - RNA, 19 nt, Homo sapiens
  misc_RNA (1)...(19): siRNA sense strand
gagagaaaccuuacagaug

SEQ ID NO: 816272 - RNA, 19 nt, Homo sapiens
  misc_RNA (1)...(19): siRNA sense strand
augcagacaugacaauuua

SEQ ID NO: 816273 - RNA, 19 nt, Homo sapiens
  misc_RNA (1)...(19): siRNA sense strand
ggagagaaaccuuacaaau

SEQ ID NO: 816274 - RNA, 19 nt, Homo sapiens
  misc_RNA (1)...(19): siRNA sense strand
ggagagaaaccuuacagau

SEQ ID NO: 816275 - RNA, 19 nt, Homo sapiens
  misc_RNA (1)...(19): siRNA sense strand
gcaaaccuuacuacacaua

SEQ ID NO: 816276 - RNA, 19 nt, Homo sapiens
  misc_RNA (1)...(19): siRNA sense strand
gaagaaugcagacaugaca

SEQ ID NO: 816277 - RNA, 19 nt, Homo sapiens
  misc_RNA (1)...(19): siRNA sense strand
ugaagaaugugacagaucu

SEQ ID NO: 816278 - RNA, 19 nt, Homo sapiens
  misc_RNA (1)...(19): siRNA sense strand
auaauggacuuaaccaaug

SEQ ID NO: 816279 - RNA, 19 nt, Homo sapiens
  misc_RNA (1)...(19): siRNA sense strand
guuuagagauguggccaua

SEQ ID NO: 816280 - RNA, 19 nt, Homo sapiens
  misc_RNA (1)...(19): siRNA sense strand
cugcaaaccuuacuacaca

SEQ ID NO: 816281 - RNA, 19 nt, Homo sapiens
  misc_RNA (1)...(19): siRNA sense strand
uuagagauguggccauaga

SEQ ID NO: 816282 - RNA, 19 nt, Homo sapiens
  misc_RNA (1)...(19): siRNA sense strand
caaauagggaugcugagaa

SEQ ID NO: 816283 - RNA, 19 nt, Homo sapiens
  misc_RNA (1)...(19): siRNA sense strand
gagaaaccuuacaaaugug

SEQ ID NO: 816284 - RNA, 19 nt, Homo sapiens
  misc_RNA (1)...(19): siRNA sense strand
ccucaacccuuacuacaca

SEQ ID NO: 816285 - RNA, 19 nt, Homo sapiens
  misc_RNA (1)...(19): siRNA sense strand
caacuacccagaaagaaau

SEQ ID NO: 816286 - RNA, 19 nt, Homo sapiens
  misc_RNA (1)...(19): siRNA sense strand
gcugagaagauaugaagaa

SEQ ID NO: 816287 - RNA, 19 nt, Homo sapiens
  misc_RNA (1)...(19): siRNA sense strand
gagauguggccauagaauu

SEQ ID NO: 816288 - RNA, 19 nt, Homo sapiens
  misc_RNA (1)...(19): siRNA sense strand
ugacaacuacccagaaaga

SEQ ID NO: 816289 - RNA, 19 nt, Homo sapiens
  misc_RNA (1)...(19): siRNA sense strand
uauaauauguggcaaagcu

SEQ ID NO: 816290 - RNA, 19 nt, Homo sapiens
  misc_RNA (1)...(19): siRNA sense strand
cugcacagcggaauuuaua

SEQ ID NO: 816291 - RNA, 19 nt, Homo sapiens
  misc_RNA (1)...(19): siRNA sense strand
ggucuuccuugguauuguu

SEQ ID NO: 816292 - RNA, 19 nt, Homo sapiens
  misc_RNA (1)...(19): siRNA sense strand
gaaugugacagaucuuuua

SEQ ID NO: 816293 - RNA, 19 nt, Homo sapiens
  misc_RNA (1)...(19): siRNA sense strand
cgaaaacccuacauaguga

SEQ ID NO: 816294 - RNA, 19 nt, Homo sapiens
  misc_RNA (1)...(19): siRNA sense strand
gagaaaccuuacagaugug

SEQ ID NO: 816295 - RNA, 19 nt, Homo sapiens
  misc_RNA (1)...(19): siRNA sense strand
caagacauacuggaauaaa

SEQ ID NO: 816296 - RNA, 19 nt, Homo sapiens
  misc_RNA (1)...(19): siRNA sense strand
gaaagacaugagaugauug

SEQ ID NO: 816297 - RNA, 19 nt, Homo sapiens
  misc_RNA (1)...(19): siRNA sense strand
uuagagaacuacagaaacu

SEQ ID NO: 816298 - RNA, 19 nt, Homo sapiens
  misc_RNA (1)...(19): siRNA sense strand
uaugaagaaugcagacaug

SEQ ID NO: 816299 - RNA, 19 nt, Homo sapiens
  misc_RNA (1)...(19): siRNA sense strand
uagggaugcugagaagaua

SEQ ID NO: 816300 - RNA, 19 nt, Homo sapiens
  misc_RNA (1)...(19): siRNA sense strand
caagaccuuuggccagaga

SEQ ID NO: 816301 - RNA, 19 nt, Homo sapiens
  misc_RNA (1)...(19): siRNA sense strand
ugaagaauguggcaaagcu

SEQ ID NO: 816302 - RNA, 19 nt, Homo sapiens
  misc_RNA (1)...(19): siRNA sense strand
ugaagaauguggcaaagcu

SEQ ID NO: 816303 - RNA, 19 nt, Homo sapiens
  misc_RNA (1)...(19): siRNA sense strand
gaccauugcaguuuagaga

SEQ ID NO: 816304 - RNA, 19 nt, Homo sapiens
  misc_RNA (1)...(19): siRNA sense strand
aaauagggaugcugagaag

SEQ ID NO: 816305 - RNA, 19 nt, Homo sapiens
  misc_RNA (1)...(19): siRNA sense strand
gacaugacaauuuacaguu

SEQ ID NO: 816306 - RNA, 19 nt, Homo sapiens
  misc_RNA (1)...(19): siRNA sense strand
gauguuagagaacuacaga

SEQ ID NO: 816307 - RNA, 19 nt, Homo sapiens
  misc_RNA (1)...(19): siRNA sense strand
uaauggacuuaaccaaugu

SEQ ID NO: 816308 - RNA, 19 nt, Homo sapiens
  misc_RNA (1)...(19): siRNA sense strand
gagcauaaggugcacaaag

SEQ ID NO: 816309 - RNA, 19 nt, Homo sapiens
  misc_RNA (1)...(19): siRNA sense strand
ccauugcaguuuagagaug

SEQ ID NO: 816310 - RNA, 19 nt, Homo sapiens
  misc_RNA (1)...(19): siRNA sense strand
ccagagaacauacaaaauu

SEQ ID NO: 816311 - RNA, 19 nt, Homo sapiens
  misc_RNA (1)...(19): siRNA sense strand
uuaaauguuccuccacuuu

SEQ ID NO: 816312 - RNA, 19 nt, Homo sapiens
  misc_RNA (1)...(19): siRNA sense strand
gaacgaaaacccuacauag

SEQ ID NO: 816313 - RNA, 19 nt, Homo sapiens
  misc_RNA (1)...(19): siRNA sense strand
gcagacaugacaauuuaca

SEQ ID NO: 816314 - RNA, 19 nt, Homo sapiens
  misc_RNA (1)...(19): siRNA sense strand
gaaugcagacaugacaauu

SEQ ID NO: 816315 - RNA, 19 nt, Homo sapiens
  misc_RNA (1)...(19): siRNA sense strand
gcaaagcuuuuaaccaauc

SEQ ID NO: 816316 - RNA, 19 nt, Homo sapiens
  misc_RNA (1)...(19): siRNA sense strand
uggcaaagcuuuuaaccaa

SEQ ID NO: 816317 - RNA, 19 nt, Homo sapiens
  misc_RNA (1)...(19): siRNA sense strand
cacaaaggagguuauaaug

SEQ ID NO: 816318 - RNA, 19 nt, Homo sapiens
  misc_RNA (1)...(19): siRNA sense strand
acaacuacccagaaagaaa

SEQ ID NO: 816319 - RNA, 19 nt, Homo sapiens
  misc_RNA (1)...(19): siRNA sense strand
aaccaauguuugacaacua

SEQ ID NO: 816320 - RNA, 19 nt, Homo sapiens
  misc_RNA (1)...(19): siRNA sense strand
gagguuauaauggacuuaa

SEQ ID NO: 816321 - RNA, 19 nt, Homo sapiens
  misc_RNA (1)...(19): siRNA sense strand
uaauauguggcaaagcuuu

SEQ ID NO: 816322 - RNA, 19 nt, Homo sapiens
  misc_RNA (1)...(19): siRNA sense strand
gaagaauguggcaaagcuu

SEQ ID NO: 816323 - RNA, 19 nt, Homo sapiens
  misc_RNA (1)...(19): siRNA sense strand
caaaccuuacuacacauaa

SEQ ID NO: 816324 - RNA, 19 nt, Homo sapiens
  misc_RNA (1)...(19): siRNA sense strand
gaagaauguggcaaagcuu

SEQ ID NO: 816325 - RNA, 19 nt, Homo sapiens
  misc_RNA (1)...(19): siRNA sense strand
gcauaaggugcacaaagga

SEQ ID NO: 816326 - RNA, 19 nt, Homo sapiens
  misc_RNA (1)...(19): siRNA sense strand
uuugacaacuacccagaaa

SEQ ID NO: 816327 - RNA, 19 nt, Homo sapiens
  misc_RNA (1)...(19): siRNA sense strand
aaauguuccuccacuuuua

SEQ ID NO: 816328 - RNA, 19 nt, Homo sapiens
  misc_RNA (1)...(19): siRNA sense strand
guccucagaccuuaauaaa

SEQ ID NO: 816329 - RNA, 19 nt, Homo sapiens
  misc_RNA (1)...(19): siRNA sense strand
acacauauaagacaagaca

SEQ ID NO: 816330 - RNA, 19 nt, Homo sapiens
  misc_RNA (1)...(19): siRNA sense strand
ccaaauagggaugcugaga

SEQ ID NO: 816331 - RNA, 19 nt, Homo sapiens
  misc_RNA (1)...(19): siRNA sense strand
cuacagaaacuuggucuuc

SEQ ID NO: 816332 - RNA, 19 nt, Homo sapiens
  misc_RNA (1)...(19): siRNA sense strand
caacccuuacuacacauaa

SEQ ID NO: 816333 - RNA, 19 nt, Homo sapiens
  misc_RNA (1)...(19): siRNA sense strand
agacauacuggaauaaauc

SEQ ID NO: 816334 - RNA, 19 nt, Homo sapiens
  misc_RNA (1)...(19): siRNA sense strand
uaaccaauguuugacaacu

SEQ ID NO: 816335 - RNA, 19 nt, Homo sapiens
  misc_RNA (1)...(19): siRNA sense strand
gaauucauaccggagagaa

SEQ ID NO: 816336 - RNA, 19 nt, Homo sapiens
  misc_RNA (1)...(19): siRNA sense strand
cagagaacauacaaaauuc

SEQ ID NO: 816337 - RNA, 19 nt, Homo sapiens
  misc_RNA (1)...(19): siRNA sense strand
uauaagacaagacauacug

SEQ ID NO: 816338 - RNA, 19 nt, Homo sapiens
  misc_RNA (1)...(19): siRNA sense strand
acacugcacagcggaauuu

SEQ ID NO: 816339 - RNA, 19 nt, Homo sapiens
  misc_RNA (1)...(19): siRNA sense strand
agacaagacauacuggaau

SEQ ID NO: 816340 - RNA, 19 nt, Homo sapiens
  misc_RNA (1)...(19): siRNA sense strand
aacuuggucuuccuuggua

SEQ ID NO: 816341 - RNA, 19 nt, Homo sapiens
  misc_RNA (1)...(19): siRNA sense strand
gugcacaaaggagguuaua

SEQ ID NO: 816342 - RNA, 19 nt, Homo sapiens
  misc_RNA (1)...(19): siRNA sense strand
gaauguggcaaagcuuuua

SEQ ID NO: 816343 - RNA, 19 nt, Homo sapiens
  misc_RNA (1)...(19): siRNA sense strand
gaauguggcaaagcuuuua

SEQ ID NO: 816344 - RNA, 19 nt, Homo sapiens
  misc_RNA (1)...(19): siRNA sense strand
auacuggagagaaaccuua

SEQ ID NO: 816345 - RNA, 19 nt, Homo sapiens
  misc_RNA (1)...(19): siRNA sense strand
uguuagagaacuacagaaa

SEQ ID NO: 816346 - RNA, 19 nt, Homo sapiens
  misc_RNA (1)...(19): siRNA sense strand
cuuaaccaauguuugacaa

SEQ ID NO: 816347 - RNA, 19 nt, Homo sapiens
  misc_RNA (1)...(19): siRNA sense strand
agagaacuacagaaacuug

SEQ ID NO: 816348 - RNA, 19 nt, Homo sapiens
  misc_RNA (1)...(19): siRNA sense strand
aagaauguggcaaagcuuu

SEQ ID NO: 816349 - RNA, 19 nt, Homo sapiens
  misc_RNA (1)...(19): siRNA sense strand
aagaauguggcaaagcuuu

SEQ ID NO: 816350 - RNA, 19 nt, Homo sapiens
  misc_RNA (1)...(19): siRNA sense strand
acaaaggagguuauaaugg

SEQ ID NO: 816351 - RNA, 19 nt, Homo sapiens
  misc_RNA (1)...(19): siRNA sense strand
cugagaagauaugaagaau

SEQ ID NO: 816352 - RNA, 19 nt, Homo sapiens
  misc_RNA (1)...(19): siRNA sense strand
aaugcagacaugacaauuu

SEQ ID NO: 816353 - RNA, 19 nt, Homo sapiens
  misc_RNA (1)...(19): siRNA sense strand
aacccuacauagugaagaa

SEQ ID NO: 816354 - RNA, 19 nt, Homo sapiens
  misc_RNA (1)...(19): siRNA sense strand
uguauaauauguggcaaag

SEQ ID NO: 816355 - RNA, 19 nt, Homo sapiens
  misc_RNA (1)...(19): siRNA sense strand
agauguggccauagaauuc

SEQ ID NO: 816356 - RNA, 19 nt, Homo sapiens
  misc_RNA (1)...(19): siRNA sense strand
ccuuacagaugugaagaau

SEQ ID NO: 816357 - RNA, 19 nt, Homo sapiens
  misc_RNA (1)...(19): siRNA sense strand
ucgaagaccugcagaauua

SEQ ID NO: 816358 - RNA, 19 nt, Homo sapiens
  misc_RNA (1)...(19): siRNA sense strand
gaagguagaugucauucaa

SEQ ID NO: 816359 - RNA, 19 nt, Homo sapiens
  misc_RNA (1)...(19): siRNA sense strand
ucauagagcugaacaguug

SEQ ID NO: 816360 - RNA, 19 nt, Homo sapiens
  misc_RNA (1)...(19): siRNA sense strand
gcgaguggaugcugaaauu

SEQ ID NO: 816361 - RNA, 19 nt, Homo sapiens
  misc_RNA (1)...(19): siRNA sense strand
gaagugaggccaaugauca

SEQ ID NO: 816362 - RNA, 19 nt, Homo sapiens
  misc_RNA (1)...(19): siRNA sense strand
acacagaggugguggaaga

SEQ ID NO: 816363 - RNA, 19 nt, Homo sapiens
  misc_RNA (1)...(19): siRNA sense strand
gaagaccugcagaauuaua

SEQ ID NO: 816364 - RNA, 19 nt, Homo sapiens
  misc_RNA (1)...(19): siRNA sense strand
ugcaaagaauggugaaaua

SEQ ID NO: 816365 - RNA, 19 nt, Homo sapiens
  misc_RNA (1)...(19): siRNA sense strand
gagaagaaauggcaaucag

SEQ ID NO: 816366 - RNA, 19 nt, Homo sapiens
  misc_RNA (1)...(19): siRNA sense strand
uauggcaucuucacaacua

SEQ ID NO: 816367 - RNA, 19 nt, Homo sapiens
  misc_RNA (1)...(19): siRNA sense strand
cacagugacucuuggaauu

SEQ ID NO: 816368 - RNA, 19 nt, Homo sapiens
  misc_RNA (1)...(19): siRNA sense strand
gguaauaucagaauguuuc

SEQ ID NO: 816369 - RNA, 19 nt, Homo sapiens
  misc_RNA (1)...(19): siRNA sense strand
ggucuggucuuggugguaa

SEQ ID NO: 816370 - RNA, 19 nt, Homo sapiens
  misc_RNA (1)...(19): siRNA sense strand
gaucagaggaggcucauag

SEQ ID NO: 816371 - RNA, 19 nt, Homo sapiens
  misc_RNA (1)...(19): siRNA sense strand
ggagagaagugaggccaau

SEQ ID NO: 816372 - RNA, 19 nt, Homo sapiens
  misc_RNA (1)...(19): siRNA sense strand
ccugcagaauuauaucuua

SEQ ID NO: 816373 - RNA, 19 nt, Homo sapiens
  misc_RNA (1)...(19): siRNA sense strand
ccuuguagaugaugaagaa

SEQ ID NO: 816374 - RNA, 19 nt, Homo sapiens
  misc_RNA (1)...(19): siRNA sense strand
gcagaauuauaucuuagag

SEQ ID NO: 816375 - RNA, 19 nt, Homo sapiens
  misc_RNA (1)...(19): siRNA sense strand
ggaugaagcagaggaagaa

SEQ ID NO: 816376 - RNA, 19 nt, Homo sapiens
  misc_RNA (1)...(19): siRNA sense strand
ucaccacucucccagcauu

SEQ ID NO: 816377 - RNA, 19 nt, Homo sapiens
  misc_RNA (1)...(19): siRNA sense strand
gauauggcaucuucacaac

SEQ ID NO: 816378 - RNA, 19 nt, Homo sapiens
  misc_RNA (1)...(19): siRNA sense strand
aagacagccuuguagauga

SEQ ID NO: 816379 - RNA, 19 nt, Homo sapiens
  misc_RNA (1)...(19): siRNA sense strand
cgucauagccaccuugguu

SEQ ID NO: 816380 - RNA, 19 nt, Homo sapiens
  misc_RNA (1)...(19): siRNA sense strand
caaagacagccuuguagau

SEQ ID NO: 816381 - RNA, 19 nt, Homo sapiens
  misc_RNA (1)...(19): siRNA sense strand
gcauuuaucugagcguucu

SEQ ID NO: 816382 - RNA, 19 nt, Homo sapiens
  misc_RNA (1)...(19): siRNA sense strand
gcaaagaauggugaaauac

SEQ ID NO: 816383 - RNA, 19 nt, Homo sapiens
  misc_RNA (1)...(19): siRNA sense strand
aaagacagccuuguagaug

SEQ ID NO: 816384 - RNA, 19 nt, Homo sapiens
  misc_RNA (1)...(19): siRNA sense strand
gugguaauaucagaauguu

SEQ ID NO: 816385 - RNA, 19 nt, Homo sapiens
  misc_RNA (1)...(19): siRNA sense strand
caaagaauggugaaauacu

SEQ ID NO: 816386 - RNA, 19 nt, Homo sapiens
  misc_RNA (1)...(19): siRNA sense strand
ugaagaagagaaagaagau

SEQ ID NO: 816387 - RNA, 19 nt, Homo sapiens
  misc_RNA (1)...(19): siRNA sense strand
ggucuuggugguaauauca

SEQ ID NO: 816388 - RNA, 19 nt, Homo sapiens
  misc_RNA (1)...(19): siRNA sense strand
agacagccuuguagaugau

SEQ ID NO: 816389 - RNA, 19 nt, Homo sapiens
  misc_RNA (1)...(19): siRNA sense strand
ugcaaaggaugggauauuc

SEQ ID NO: 816390 - RNA, 19 nt, Homo sapiens
  misc_RNA (1)...(19): siRNA sense strand
ccacuuccaaggcauuuau

SEQ ID NO: 816391 - RNA, 19 nt, Homo sapiens
  misc_RNA (1)...(19): siRNA sense strand
uugguguucuuauguguuu

SEQ ID NO: 816392 - RNA, 19 nt, Homo sapiens
  misc_RNA (1)...(19): siRNA sense strand
cagcuucucuaacgauguc

SEQ ID NO: 816393 - RNA, 19 nt, Homo sapiens
  misc_RNA (1)...(19): siRNA sense strand
ggaagguagaugucauuca

SEQ ID NO: 816394 - RNA, 19 nt, Homo sapiens
  misc_RNA (1)...(19): siRNA sense strand
guagaugucauucaagaac

SEQ ID NO: 816395 - RNA, 19 nt, Homo sapiens
  misc_RNA (1)...(19): siRNA sense strand
agguagaugucauucaaga

SEQ ID NO: 816396 - RNA, 19 nt, Homo sapiens
  misc_RNA (1)...(19): siRNA sense strand
ggcaucuucacaacuauuu

SEQ ID NO: 816397 - RNA, 19 nt, Homo sapiens
  misc_RNA (1)...(19): siRNA sense strand
agagaagugaggccaauga

SEQ ID NO: 816398 - RNA, 19 nt, Homo sapiens
  misc_RNA (1)...(19): siRNA sense strand
cuaacgaugucuggaaugg

SEQ ID NO: 816399 - RNA, 19 nt, Homo sapiens
  misc_RNA (1)...(19): siRNA sense strand
caacuggacgcuggugaug

SEQ ID NO: 816400 - RNA, 19 nt, Homo sapiens
  misc_RNA (1)...(19): siRNA sense strand
gagaagugaggccaaugau

SEQ ID NO: 816401 - RNA, 19 nt, Homo sapiens
  misc_RNA (1)...(19): siRNA sense strand
ggaauuccugcuugguguu

SEQ ID NO: 816402 - RNA, 19 nt, Homo sapiens
  misc_RNA (1)...(19): siRNA sense strand
ggugguaauaucagaaugu

SEQ ID NO: 816403 - RNA, 19 nt, Homo sapiens
  misc_RNA (1)...(19): siRNA sense strand
aguggaugcugaaauuuua

SEQ ID NO: 816404 - RNA, 19 nt, Homo sapiens
  misc_RNA (1)...(19): siRNA sense strand
caucuucacaacuauuuca

SEQ ID NO: 816405 - RNA, 19 nt, Homo sapiens
  misc_RNA (1)...(19): siRNA sense strand
cugaagaaggcaucucuga

SEQ ID NO: 816406 - RNA, 19 nt, Homo sapiens
  misc_RNA (1)...(19): siRNA sense strand
aagaagaggaggaggacaa

SEQ ID NO: 816407 - RNA, 19 nt, Homo sapiens
  misc_RNA (1)...(19): siRNA sense strand
gaagaagagaaagaagauc

SEQ ID NO: 816408 - RNA, 19 nt, Homo sapiens
  misc_RNA (1)...(19): siRNA sense strand
cugcagaauuauaucuuag

SEQ ID NO: 816409 - RNA, 19 nt, Homo sapiens
  misc_RNA (1)...(19): siRNA sense strand
acuggacgcuggugaugga

SEQ ID NO: 816410 - RNA, 19 nt, Homo sapiens
  misc_RNA (1)...(19): siRNA sense strand
gguagaugucauucaagaa

SEQ ID NO: 816411 - RNA, 19 nt, Homo sapiens
  misc_RNA (1)...(19): siRNA sense strand
uuccaaggcauuuaucuga

SEQ ID NO: 816412 - RNA, 19 nt, Homo sapiens
  misc_RNA (1)...(19): siRNA sense strand
ugaugaagaagagaaagaa

SEQ ID NO: 816413 - RNA, 19 nt, Homo sapiens
  misc_RNA (1)...(19): siRNA sense strand
uguagaugaugaagaagag

SEQ ID NO: 816414 - RNA, 19 nt, Homo sapiens
  misc_RNA (1)...(19): siRNA sense strand
gagcagaaucggagaucag

SEQ ID NO: 816415 - RNA, 19 nt, Homo sapiens
  misc_RNA (1)...(19): siRNA sense strand
gcuugguguucuuaugugu

SEQ ID NO: 816416 - RNA, 19 nt, Homo sapiens
  misc_RNA (1)...(19): siRNA sense strand
ugacacagaggugguggaa

SEQ ID NO: 816417 - RNA, 19 nt, Homo sapiens
  misc_RNA (1)...(19): siRNA sense strand
aagaggaggaggacaacuu

SEQ ID NO: 816418 - RNA, 19 nt, Homo sapiens
  misc_RNA (1)...(19): siRNA sense strand
aguggccgcuucuuuguca

SEQ ID NO: 816419 - RNA, 19 nt, Homo sapiens
  misc_RNA (1)...(19): siRNA sense strand
gucauagccaccuugguuu

SEQ ID NO: 816420 - RNA, 19 nt, Homo sapiens
  misc_RNA (1)...(19): siRNA sense strand
gaguggaugcugaaauuuu

SEQ ID NO: 816421 - RNA, 19 nt, Homo sapiens
  misc_RNA (1)...(19): siRNA sense strand
gcaggaugcggaggaggaa

SEQ ID NO: 816422 - RNA, 19 nt, Homo sapiens
  misc_RNA (1)...(19): siRNA sense strand
gccucugacuggcuggaaa

SEQ ID NO: 816423 - RNA, 19 nt, Homo sapiens
  misc_RNA (1)...(19): siRNA sense strand
agaggaggaggacaacuug

SEQ ID NO: 816424 - RNA, 19 nt, Homo sapiens
  misc_RNA (1)...(19): siRNA sense strand
ugaagcagaggaagaagag

SEQ ID NO: 816425 - RNA, 19 nt, Homo sapiens
  misc_RNA (1)...(19): siRNA sense strand
uagaugaugaagaagagaa

SEQ ID NO: 816426 - RNA, 19 nt, Homo sapiens
  misc_RNA (1)...(19): siRNA sense strand
uuuagcaucucuggcaaga

SEQ ID NO: 816427 - RNA, 19 nt, Homo sapiens
  misc_RNA (1)...(19): siRNA sense strand
cgaguggaugcugaaauuu

SEQ ID NO: 816428 - RNA, 19 nt, Homo sapiens
  misc_RNA (1)...(19): siRNA sense strand
gaugaagaagagaaagaag

SEQ ID NO: 816429 - RNA, 19 nt, Homo sapiens
  misc_RNA (1)...(19): siRNA sense strand
agaaauagaucacgcugua

SEQ ID NO: 816430 - RNA, 19 nt, Homo sapiens
  misc_RNA (1)...(19): siRNA sense strand
gaugaaaccuggccagaug

SEQ ID NO: 816431 - RNA, 19 nt, Homo sapiens
  misc_RNA (1)...(19): siRNA sense strand
aaagguacuucucagauua

SEQ ID NO: 816432 - RNA, 19 nt, Homo sapiens
  misc_RNA (1)...(19): siRNA sense strand
ggacugcggugacaagaga

SEQ ID NO: 816433 - RNA, 19 nt, Homo sapiens
  misc_RNA (1)...(19): siRNA sense strand
gaacaggcucuuaaaggua

SEQ ID NO: 816434 - RNA, 19 nt, Homo sapiens
  misc_RNA (1)...(19): siRNA sense strand
uaaagguacuucucagauu

SEQ ID NO: 816435 - RNA, 19 nt, Homo sapiens
  misc_RNA (1)...(19): siRNA sense strand
gaagucgggccauguauuu

SEQ ID NO: 816436 - RNA, 19 nt, Homo sapiens
  misc_RNA (1)...(19): siRNA sense strand
gcaaauggguuuucaguug

SEQ ID NO: 816437 - RNA, 19 nt, Homo sapiens
  misc_RNA (1)...(19): siRNA sense strand
gaagucauuugccauggaa

SEQ ID NO: 816438 - RNA, 19 nt, Homo sapiens
  misc_RNA (1)...(19): siRNA sense strand
gaagggaugcgacuuguau

SEQ ID NO: 816439 - RNA, 19 nt, Homo sapiens
  misc_RNA (1)...(19): siRNA sense strand
uagcauguauugcaagaaa

SEQ ID NO: 816440 - RNA, 19 nt, Homo sapiens
  misc_RNA (1)...(19): siRNA sense strand
agaucacgcuguacacuua

SEQ ID NO: 816441 - RNA, 19 nt, Homo sapiens
  misc_RNA (1)...(19): siRNA sense strand
uaaagcaguuggagugaug

SEQ ID NO: 816442 - RNA, 19 nt, Homo sapiens
  misc_RNA (1)...(19): siRNA sense strand
ggaaagcggucugcucagu

SEQ ID NO: 816443 - RNA, 19 nt, Homo sapiens
  misc_RNA (1)...(19): siRNA sense strand
caagaaggugacauuguua

SEQ ID NO: 816444 - RNA, 19 nt, Homo sapiens
  misc_RNA (1)...(19): siRNA sense strand
aaagcggucugcucaguuu

SEQ ID NO: 816445 - RNA, 19 nt, Homo sapiens
  misc_RNA (1)...(19): siRNA sense strand
uauguaggcuugcuagaga

SEQ ID NO: 816446 - RNA, 19 nt, Homo sapiens
  misc_RNA (1)...(19): siRNA sense strand
gaaacauuauccagaagca

SEQ ID NO: 816447 - RNA, 19 nt, Homo sapiens
  misc_RNA (1)...(19): siRNA sense strand
gaugaagucgggccaugua

SEQ ID NO: 816448 - RNA, 19 nt, Homo sapiens
  misc_RNA (1)...(19): siRNA sense strand
ugaacaggcucuuaaaggu

SEQ ID NO: 816449 - RNA, 19 nt, Homo sapiens
  misc_RNA (1)...(19): siRNA sense strand
ggaugcgacuuguauguag

SEQ ID NO: 816450 - RNA, 19 nt, Homo sapiens
  misc_RNA (1)...(19): siRNA sense strand
gcacggaaacuuguucaga

SEQ ID NO: 816451 - RNA, 19 nt, Homo sapiens
  misc_RNA (1)...(19): siRNA sense strand
gcauguauugcaagaaauu

SEQ ID NO: 816452 - RNA, 19 nt, Homo sapiens
  misc_RNA (1)...(19): siRNA sense strand
ugggaaacauuauccagaa

SEQ ID NO: 816453 - RNA, 19 nt, Homo sapiens
  misc_RNA (1)...(19): siRNA sense strand
gaaagcggucugcucaguu

SEQ ID NO: 816454 - RNA, 19 nt, Homo sapiens
  misc_RNA (1)...(19): siRNA sense strand
gaagcaugcccaagcaaau

SEQ ID NO: 816455 - RNA, 19 nt, Homo sapiens
  misc_RNA (1)...(19): siRNA sense strand
guaccucagugaaugaagu

SEQ ID NO: 816456 - RNA, 19 nt, Homo sapiens
  misc_RNA (1)...(19): siRNA sense strand
aaauuacucucaucugaag

SEQ ID NO: 816457 - RNA, 19 nt, Homo sapiens
  misc_RNA (1)...(19): siRNA sense strand
ccagaagcaugcccaagca

SEQ ID NO: 816458 - RNA, 19 nt, Homo sapiens
  misc_RNA (1)...(19): siRNA sense strand
ucacuucaugucucaauuu

SEQ ID NO: 816459 - RNA, 19 nt, Homo sapiens
  misc_RNA (1)...(19): siRNA sense strand
gguguucgguacagagaau

SEQ ID NO: 816460 - RNA, 19 nt, Homo sapiens
  misc_RNA (1)...(19): siRNA sense strand
gagaauugggaaacauuau

SEQ ID NO: 816461 - RNA, 19 nt, Homo sapiens
  misc_RNA (1)...(19): siRNA sense strand
aaucugaacaggcucuuaa

SEQ ID NO: 816462 - RNA, 19 nt, Homo sapiens
  misc_RNA (1)...(19): siRNA sense strand
gggaugcgacuuguaugua

SEQ ID NO: 816463 - RNA, 19 nt, Homo sapiens
  misc_RNA (1)...(19): siRNA sense strand
gauggagcacggaaacuug

SEQ ID NO: 816464 - RNA, 19 nt, Homo sapiens
  misc_RNA (1)...(19): siRNA sense strand
gauuaaaccagguguaacu

SEQ ID NO: 816465 - RNA, 19 nt, Homo sapiens
  misc_RNA (1)...(19): siRNA sense strand
agagaauugggaaacauua

SEQ ID NO: 816466 - RNA, 19 nt, Homo sapiens
  misc_RNA (1)...(19): siRNA sense strand
ugaagucauuugccaugga

SEQ ID NO: 816467 - RNA, 19 nt, Homo sapiens
  misc_RNA (1)...(19): siRNA sense strand
uaaaccagguguaacuacu

SEQ ID NO: 816468 - RNA, 19 nt, Homo sapiens
  misc_RNA (1)...(19): siRNA sense strand
guucagaccacauaugagu

SEQ ID NO: 816469 - RNA, 19 nt, Homo sapiens
  misc_RNA (1)...(19): siRNA sense strand
acacuuagcauguauugca

SEQ ID NO: 816470 - RNA, 19 nt, Homo sapiens
  misc_RNA (1)...(19): siRNA sense strand
gggaaacauuauccagaag

SEQ ID NO: 816471 - RNA, 19 nt, Homo sapiens
  misc_RNA (1)...(19): siRNA sense strand
gaaucugaacaggcucuua

SEQ ID NO: 816472 - RNA, 19 nt, Homo sapiens
  misc_RNA (1)...(19): siRNA sense strand
gcaguuggagugaugaagu

SEQ ID NO: 816473 - RNA, 19 nt, Homo sapiens
  misc_RNA (1)...(19): siRNA sense strand
cuucuccccugaauuauua

SEQ ID NO: 816474 - RNA, 19 nt, Homo sapiens
  misc_RNA (1)...(19): siRNA sense strand
gcagugaagccugguguuc

SEQ ID NO: 816475 - RNA, 19 nt, Homo sapiens
  misc_RNA (1)...(19): siRNA sense strand
uaauguggauaucacucuu

SEQ ID NO: 816476 - RNA, 19 nt, Homo sapiens
  misc_RNA (1)...(19): siRNA sense strand
aaccagguguaacuacuga

SEQ ID NO: 816477 - RNA, 19 nt, Homo sapiens
  misc_RNA (1)...(19): siRNA sense strand
uagaagggaugcgacuugu

SEQ ID NO: 816478 - RNA, 19 nt, Homo sapiens
  misc_RNA (1)...(19): siRNA sense strand
cagagaauugggaaacauu

SEQ ID NO: 816479 - RNA, 19 nt, Homo sapiens
  misc_RNA (1)...(19): siRNA sense strand
auguggauaucacucuuua

SEQ ID NO: 816480 - RNA, 19 nt, Homo sapiens
  misc_RNA (1)...(19): siRNA sense strand
agguguaacuacugaagaa

SEQ ID NO: 816481 - RNA, 19 nt, Homo sapiens
  misc_RNA (1)...(19): siRNA sense strand
guacagagaauugggaaac

SEQ ID NO: 816482 - RNA, 19 nt, Homo sapiens
  misc_RNA (1)...(19): siRNA sense strand
caaauggguuuucaguugu

SEQ ID NO: 816483 - RNA, 19 nt, Homo sapiens
  misc_RNA (1)...(19): siRNA sense strand
ggccucacuucaugucuca

SEQ ID NO: 816484 - RNA, 19 nt, Homo sapiens
  misc_RNA (1)...(19): siRNA sense strand
ugaagucgggccauguauu

SEQ ID NO: 816485 - RNA, 19 nt, Homo sapiens
  misc_RNA (1)...(19): siRNA sense strand
aagaaggugacauuguuaa

SEQ ID NO: 816486 - RNA, 19 nt, Homo sapiens
  misc_RNA (1)...(19): siRNA sense strand
guugcugccggcaugauua

SEQ ID NO: 816487 - RNA, 19 nt, Homo sapiens
  misc_RNA (1)...(19): siRNA sense strand
uaggcuugcuagagaaguu

SEQ ID NO: 816488 - RNA, 19 nt, Homo sapiens
  misc_RNA (1)...(19): siRNA sense strand
ggaugaaaccuggccagau

SEQ ID NO: 816489 - RNA, 19 nt, Homo sapiens
  misc_RNA (1)...(19): siRNA sense strand
cuagagaaguuuuggaugu

SEQ ID NO: 816490 - RNA, 19 nt, Homo sapiens
  misc_RNA (1)...(19): siRNA sense strand
uucccaaagucuuguugua

SEQ ID NO: 816491 - RNA, 19 nt, Homo sapiens
  misc_RNA (1)...(19): siRNA sense strand
gagccaaugauuugugaag

SEQ ID NO: 816492 - RNA, 19 nt, Homo sapiens
  misc_RNA (1)...(19): siRNA sense strand
uuaaagguacuucucagau

SEQ ID NO: 816493 - RNA, 19 nt, Homo sapiens
  misc_RNA (1)...(19): siRNA sense strand
cuacugaagaaauagauca

SEQ ID NO: 816494 - RNA, 19 nt, Homo sapiens
  misc_RNA (1)...(19): siRNA sense strand
gacacuggcugugaaaucc

SEQ ID NO: 816495 - RNA, 19 nt, Homo sapiens
  misc_RNA (1)...(19): siRNA sense strand
agaagcaugcccaagcaaa

SEQ ID NO: 816496 - RNA, 19 nt, Homo sapiens
  misc_RNA (1)...(19): siRNA sense strand
acagagaauugggaaacau

SEQ ID NO: 816497 - RNA, 19 nt, Homo sapiens
  misc_RNA (1)...(19): siRNA sense strand
agucauuugccauggaaua

SEQ ID NO: 816498 - RNA, 19 nt, Homo sapiens
  misc_RNA (1)...(19): siRNA sense strand
aaauagaucacgcuguaca

SEQ ID NO: 816499 - RNA, 19 nt, Homo sapiens
  misc_RNA (1)...(19): siRNA sense strand
cuuagcauguauugcaaga

SEQ ID NO: 816500 - RNA, 19 nt, Homo sapiens
  misc_RNA (1)...(19): siRNA sense strand
gcacggccucacuucaugu

SEQ ID NO: 816501 - RNA, 19 nt, Homo sapiens
  misc_RNA (1)...(19): siRNA sense strand
uugagccaaugauuuguga

SEQ ID NO: 816502 - RNA, 19 nt, Homo sapiens
  misc_RNA (1)...(19): siRNA sense strand
uguuguaccucagugaaug

SEQ ID NO: 816503 - RNA, 19 nt, Homo sapiens
  misc_RNA (1)...(19): siRNA sense strand
gaugauggagcacggaaac

SEQ ID NO: 816504 - RNA, 19 nt, Homo sapiens
  misc_RNA (1)...(19): siRNA sense strand
gagcacggaaacuuguuca

SEQ ID NO: 816505 - RNA, 19 nt, Homo sapiens
  misc_RNA (1)...(19): siRNA sense strand
cacuggcugugaaauccua

SEQ ID NO: 816506 - RNA, 19 nt, Homo sapiens
  misc_RNA (1)...(19): siRNA sense strand
gcggauggcaggaugaaac

SEQ ID NO: 816507 - RNA, 19 nt, Homo sapiens
  misc_RNA (1)...(19): siRNA sense strand
ggagcacggaaacuuguuc

SEQ ID NO: 816508 - RNA, 19 nt, Homo sapiens
  misc_RNA (1)...(19): siRNA sense strand
caguuggagugaugaaguc

SEQ ID NO: 816509 - RNA, 19 nt, Homo sapiens
  misc_RNA (1)...(19): siRNA sense strand
ccaaagucuuguuguaccu

SEQ ID NO: 816510 - RNA, 19 nt, Homo sapiens
  misc_RNA (1)...(19): siRNA sense strand
auagaagggaugcgacuug

SEQ ID NO: 816511 - RNA, 19 nt, Homo sapiens
  misc_RNA (1)...(19): siRNA sense strand
gaaauagaucacgcuguac

SEQ ID NO: 816512 - RNA, 19 nt, Homo sapiens
  misc_RNA (1)...(19): siRNA sense strand
ggaugauggagcacggaaa

SEQ ID NO: 816513 - RNA, 19 nt, Homo sapiens
  misc_RNA (1)...(19): siRNA sense strand
cuuacaagaaggugacauu

SEQ ID NO: 816514 - RNA, 19 nt, Homo sapiens
  misc_RNA (1)...(19): siRNA sense strand
gaaacucauuccuugcuua

SEQ ID NO: 816515 - RNA, 19 nt, Homo sapiens
  misc_RNA (1)...(19): siRNA sense strand
uaaaggaucuggaccaaga

SEQ ID NO: 816516 - RNA, 19 nt, Homo sapiens
  misc_RNA (1)...(19): siRNA sense strand
caaacuuccuguccuaaua

SEQ ID NO: 816517 - RNA, 19 nt, Homo sapiens
  misc_RNA (1)...(19): siRNA sense strand
gcgggaaccuaucuuguua

SEQ ID NO: 816518 - RNA, 19 nt, Homo sapiens
  misc_RNA (1)...(19): siRNA sense strand
ugacagaaauguugaaugu

SEQ ID NO: 816519 - RNA, 19 nt, Homo sapiens
  misc_RNA (1)...(19): siRNA sense strand
gaagugacggaauuuauuu

SEQ ID NO: 816520 - RNA, 19 nt, Homo sapiens
  misc_RNA (1)...(19): siRNA sense strand
gaagagaacuuggagaaac

SEQ ID NO: 816521 - RNA, 19 nt, Homo sapiens
  misc_RNA (1)...(19): siRNA sense strand
uaaaguagguaccgugaug

SEQ ID NO: 816522 - RNA, 19 nt, Homo sapiens
  misc_RNA (1)...(19): siRNA sense strand
gcaaacagccguccaugga

SEQ ID NO: 816523 - RNA, 19 nt, Homo sapiens
  misc_RNA (1)...(19): siRNA sense strand
uaacaucaguaaccaaauc

SEQ ID NO: 816524 - RNA, 19 nt, Homo sapiens
  misc_RNA (1)...(19): siRNA sense strand
gggcaaacuuccuguccua

SEQ ID NO: 816525 - RNA, 19 nt, Homo sapiens
  misc_RNA (1)...(19): siRNA sense strand
gaacuuggagaaacucauu

SEQ ID NO: 816526 - RNA, 19 nt, Homo sapiens
  misc_RNA (1)...(19): siRNA sense strand
acagaaauguugaauguuc

SEQ ID NO: 816527 - RNA, 19 nt, Homo sapiens
  misc_RNA (1)...(19): siRNA sense strand
ggcaaucccucccuuucua

SEQ ID NO: 816528 - RNA, 19 nt, Homo sapiens
  misc_RNA (1)...(19): siRNA sense strand
cgacagcgcugaggagaau

SEQ ID NO: 816529 - RNA, 19 nt, Homo sapiens
  misc_RNA (1)...(19): siRNA sense strand
guacacagccaacaccaaa

SEQ ID NO: 816530 - RNA, 19 nt, Homo sapiens
  misc_RNA (1)...(19): siRNA sense strand
caagaucacuccaagaacu

SEQ ID NO: 816531 - RNA, 19 nt, Homo sapiens
  misc_RNA (1)...(19): siRNA sense strand
gaagaaaggaauaaaggau

SEQ ID NO: 816532 - RNA, 19 nt, Homo sapiens
  misc_RNA (1)...(19): siRNA sense strand
ugacagacguguggagauu

SEQ ID NO: 816533 - RNA, 19 nt, Homo sapiens
  misc_RNA (1)...(19): siRNA sense strand
agauagaccugaagggauu

SEQ ID NO: 816534 - RNA, 19 nt, Homo sapiens
  misc_RNA (1)...(19): siRNA sense strand
ggaccaagaagcagcauga

SEQ ID NO: 816535 - RNA, 19 nt, Homo sapiens
  misc_RNA (1)...(19): siRNA sense strand
ccaagaggcccuuaggaaa

SEQ ID NO: 816536 - RNA, 19 nt, Homo sapiens
  misc_RNA (1)...(19): siRNA sense strand
gcaaagaagaagcucaaga

SEQ ID NO: 816537 - RNA, 19 nt, Homo sapiens
  misc_RNA (1)...(19): siRNA sense strand
ccucugaagugacggaauu

SEQ ID NO: 816538 - RNA, 19 nt, Homo sapiens
  misc_RNA (1)...(19): siRNA sense strand
gccaggagcucacgcagau

SEQ ID NO: 816539 - RNA, 19 nt, Homo sapiens
  misc_RNA (1)...(19): siRNA sense strand
gcaugaaaguggacaagag

SEQ ID NO: 816540 - RNA, 19 nt, Homo sapiens
  misc_RNA (1)...(19): siRNA sense strand
aaccaaaucuuccucugaa

SEQ ID NO: 816541 - RNA, 19 nt, Homo sapiens
  misc_RNA (1)...(19): siRNA sense strand
uuaagcagcucuccaugga

SEQ ID NO: 816542 - RNA, 19 nt, Homo sapiens
  misc_RNA (1)...(19): siRNA sense strand
gaaacauuccugccucgaa

SEQ ID NO: 816543 - RNA, 19 nt, Homo sapiens
  misc_RNA (1)...(19): siRNA sense strand
gagccuuacugaagaagau

SEQ ID NO: 816544 - RNA, 19 nt, Homo sapiens
  misc_RNA (1)...(19): siRNA sense strand
ccaagaagcagcaugaaag

SEQ ID NO: 816545 - RNA, 19 nt, Homo sapiens
  misc_RNA (1)...(19): siRNA sense strand
guaauaguuuggagaaugc

SEQ ID NO: 816546 - RNA, 19 nt, Homo sapiens
  misc_RNA (1)...(19): siRNA sense strand
cacaagaucacuccaagaa

SEQ ID NO: 816547 - RNA, 19 nt, Homo sapiens
  misc_RNA (1)...(19): siRNA sense strand
gcaaucccucccuuucuaa

SEQ ID NO: 816548 - RNA, 19 nt, Homo sapiens
  misc_RNA (1)...(19): siRNA sense strand
ugaagugacggaauuuauu

SEQ ID NO: 816549 - RNA, 19 nt, Homo sapiens
  misc_RNA (1)...(19): siRNA sense strand
cugaagaagaucugaauaa

SEQ ID NO: 816550 - RNA, 19 nt, Homo sapiens
  misc_RNA (1)...(19): siRNA sense strand
caggguggcuucugugcaa

SEQ ID NO: 816551 - RNA, 19 nt, Homo sapiens
  misc_RNA (1)...(19): siRNA sense strand
gagcgcagccucacacauc

SEQ ID NO: 816552 - RNA, 19 nt, Homo sapiens
  misc_RNA (1)...(19): siRNA sense strand
ggagguuucucagcacuuc

SEQ ID NO: 816553 - RNA, 19 nt, Homo sapiens
  misc_RNA (1)...(19): siRNA sense strand
gggaaccuaucuuguuaca

SEQ ID NO: 816554 - RNA, 19 nt, Homo sapiens
  misc_RNA (1)...(19): siRNA sense strand
agaaugcccugcacacauc

SEQ ID NO: 816555 - RNA, 19 nt, Homo sapiens
  misc_RNA (1)...(19): siRNA sense strand
aaacuuccuguccuaauaa

SEQ ID NO: 816556 - RNA, 19 nt, Homo sapiens
  misc_RNA (1)...(19): siRNA sense strand
ccacguggaucuggacuca

SEQ ID NO: 816557 - RNA, 19 nt, Homo sapiens
  misc_RNA (1)...(19): siRNA sense strand
guggucugauucuucaaua

SEQ ID NO: 816558 - RNA, 19 nt, Homo sapiens
  misc_RNA (1)...(19): siRNA sense strand
ggaaaacacagcaaaguga

SEQ ID NO: 816559 - RNA, 19 nt, Homo sapiens
  misc_RNA (1)...(19): siRNA sense strand
gcagugucaguaauaguuu

SEQ ID NO: 816560 - RNA, 19 nt, Homo sapiens
  misc_RNA (1)...(19): siRNA sense strand
uaaccaaaucuuccucuga

SEQ ID NO: 816561 - RNA, 19 nt, Homo sapiens
  misc_RNA (1)...(19): siRNA sense strand
gagaaugcccugcacacau

SEQ ID NO: 816562 - RNA, 19 nt, Homo sapiens
  misc_RNA (1)...(19): siRNA sense strand
gcaaacuuccuguccuaau

SEQ ID NO: 816563 - RNA, 19 nt, Homo sapiens
  misc_RNA (1)...(19): siRNA sense strand
caaagaagaagcucaagac

SEQ ID NO: 816564 - RNA, 19 nt, Homo sapiens
  misc_RNA (1)...(19): siRNA sense strand
gaggccagcuccaauccau

SEQ ID NO: 816565 - RNA, 19 nt, Homo sapiens
  misc_RNA (1)...(19): siRNA sense strand
cugaagggauuaucacaca

SEQ ID NO: 816566 - RNA, 19 nt, Homo sapiens
  misc_RNA (1)...(19): siRNA sense strand
gaaugaggccagcuccaau

SEQ ID NO: 816567 - RNA, 19 nt, Homo sapiens
  misc_RNA (1)...(19): siRNA sense strand
gggcaaagaagaagcucaa

SEQ ID NO: 816568 - RNA, 19 nt, Homo sapiens
  misc_RNA (1)...(19): siRNA sense strand
ucaauaacaucaguaacca

SEQ ID NO: 816569 - RNA, 19 nt, Homo sapiens
  misc_RNA (1)...(19): siRNA sense strand
gaagggauuaucacacaca

SEQ ID NO: 816570 - RNA, 19 nt, Homo sapiens
  misc_RNA (1)...(19): siRNA sense strand
agaaaggaauaaaggaucu

SEQ ID NO: 816571 - RNA, 19 nt, Homo sapiens
  misc_RNA (1)...(19): siRNA sense strand
aguaauaguuuggagaaug

SEQ ID NO: 816572 - RNA, 19 nt, Homo sapiens
  misc_RNA (1)...(19): siRNA sense strand
gaggucuuguggucugauu

SEQ ID NO: 816573 - RNA, 19 nt, Homo sapiens
  misc_RNA (1)...(19): siRNA sense strand
guguggagauucacuugga

SEQ ID NO: 816574 - RNA, 19 nt, Homo sapiens
  misc_RNA (1)...(19): siRNA sense strand
caaagugaguguugaaaag

SEQ ID NO: 816575 - RNA, 19 nt, Homo sapiens
  misc_RNA (1)...(19): siRNA sense strand
ccgccaggcugcauugugu

SEQ ID NO: 816576 - RNA, 19 nt, Homo sapiens
  misc_RNA (1)...(19): siRNA sense strand
caagaagcagcaugaaagu

SEQ ID NO: 816577 - RNA, 19 nt, Homo sapiens
  misc_RNA (1)...(19): siRNA sense strand
aauaaaggaucuggaccaa

SEQ ID NO: 816578 - RNA, 19 nt, Homo sapiens
  misc_RNA (1)...(19): siRNA sense strand
aauguugaauguuccuuug

SEQ ID NO: 816579 - RNA, 19 nt, Homo sapiens
  misc_RNA (1)...(19): siRNA sense strand
cagcuacgccaacuacuuc

SEQ ID NO: 816580 - RNA, 19 nt, Homo sapiens
  misc_RNA (1)...(19): siRNA sense strand
ucaguaauaguuuggagaa

SEQ ID NO: 816581 - RNA, 19 nt, Homo sapiens
  misc_RNA (1)...(19): siRNA sense strand
gggauucuagacuggcuua

SEQ ID NO: 816582 - RNA, 19 nt, Homo sapiens
  misc_RNA (1)...(19): siRNA sense strand
gugacggaauuuauuucaa

SEQ ID NO: 816583 - RNA, 19 nt, Homo sapiens
  misc_RNA (1)...(19): siRNA sense strand
gacggaauuuauuucaaag

SEQ ID NO: 816584 - RNA, 19 nt, Homo sapiens
  misc_RNA (1)...(19): siRNA sense strand
ccacguccuuugccaacau

SEQ ID NO: 816585 - RNA, 19 nt, Homo sapiens
  misc_RNA (1)...(19): siRNA sense strand
caagaggcccuuaggaaaa

SEQ ID NO: 816586 - RNA, 19 nt, Homo sapiens
  misc_RNA (1)...(19): siRNA sense strand
gcacacaucagcacauucc

SEQ ID NO: 816587 - RNA, 19 nt, Homo sapiens
  misc_RNA (1)...(19): siRNA sense strand
uaccuggccucauuaccuu

SEQ ID NO: 816588 - RNA, 19 nt, Homo sapiens
  misc_RNA (1)...(19): siRNA sense strand
gaccaugucaggagguuuc

SEQ ID NO: 816589 - RNA, 19 nt, Homo sapiens
  misc_RNA (1)...(19): siRNA sense strand
ggagaaugcccugcacaca

SEQ ID NO: 816590 - RNA, 19 nt, Homo sapiens
  misc_RNA (1)...(19): siRNA sense strand
gcaaagugaguguugaaaa

SEQ ID NO: 816591 - RNA, 19 nt, Homo sapiens
  misc_RNA (1)...(19): siRNA sense strand
ugucagcagugucaguaau

SEQ ID NO: 816592 - RNA, 19 nt, Homo sapiens
  misc_RNA (1)...(19): siRNA sense strand
cccaagaggcccuuaggaa

SEQ ID NO: 816593 - RNA, 19 nt, Homo sapiens
  misc_RNA (1)...(19): siRNA sense strand
gucagcagugucaguaaua

SEQ ID NO: 816594 - RNA, 19 nt, Homo sapiens
  misc_RNA (1)...(19): siRNA sense strand
acagacguguggagauuca

SEQ ID NO: 816595 - RNA, 19 nt, Homo sapiens
  misc_RNA (1)...(19): siRNA sense strand
cugaagagaacuuggagaa

SEQ ID NO: 816596 - RNA, 19 nt, Homo sapiens
  misc_RNA (1)...(19): siRNA sense strand
gacuucaaccggccaggua

SEQ ID NO: 816597 - RNA, 19 nt, Homo sapiens
  misc_RNA (1)...(19): siRNA sense strand
gugaugggcgugucuggaa

SEQ ID NO: 816598 - RNA, 19 nt, Homo sapiens
  misc_RNA (1)...(19): siRNA sense strand
cagcaaagugaguguugaa

SEQ ID NO: 816599 - RNA, 19 nt, Homo sapiens
  misc_RNA (1)...(19): siRNA sense strand
gggauuaucacacacaaaa

SEQ ID NO: 816600 - RNA, 19 nt, Homo sapiens
  misc_RNA (1)...(19): siRNA sense strand
gagcgggaaccuaucuugu

SEQ ID NO: 816601 - RNA, 19 nt, Homo sapiens
  misc_RNA (1)...(19): siRNA sense strand
uagaagaaaggaauaaagg

SEQ ID NO: 816602 - RNA, 19 nt, Homo sapiens
  misc_RNA (1)...(19): siRNA sense strand
ugcguuugcacaaguauua

SEQ ID NO: 816603 - RNA, 19 nt, Homo sapiens
  misc_RNA (1)...(19): siRNA sense strand
auucuagacuggcuuagga

SEQ ID NO: 816604 - RNA, 19 nt, Homo sapiens
  misc_RNA (1)...(19): siRNA sense strand
gagaaacucauuccuugcu

SEQ ID NO: 816605 - RNA, 19 nt, Homo sapiens
  misc_RNA (1)...(19): siRNA sense strand
ugaagagaacuuggagaaa

SEQ ID NO: 816606 - RNA, 19 nt, Homo sapiens
  misc_RNA (1)...(19): siRNA sense strand
caucaguaaccaaaucuuc

SEQ ID NO: 816607 - RNA, 19 nt, Homo sapiens
  misc_RNA (1)...(19): siRNA sense strand
agaaacucauuccuugcuu

SEQ ID NO: 816608 - RNA, 19 nt, Homo sapiens
  misc_RNA (1)...(19): siRNA sense strand
gauagaccugaagggauua

SEQ ID NO: 816609 - RNA, 19 nt, Homo sapiens
  misc_RNA (1)...(19): siRNA sense strand
ggagcgaaaccacguggau

SEQ ID NO: 816610 - RNA, 19 nt, Homo sapiens
  misc_RNA (1)...(19): siRNA sense strand
cugcacacaucagcacauu

SEQ ID NO: 816611 - RNA, 19 nt, Homo sapiens
  misc_RNA (1)...(19): siRNA sense strand
ccacaagaucacuccaaga

SEQ ID NO: 816612 - RNA, 19 nt, Homo sapiens
  misc_RNA (1)...(19): siRNA sense strand
aaauuugagucucuuacca

SEQ ID NO: 816613 - RNA, 19 nt, Homo sapiens
  misc_RNA (1)...(19): siRNA sense strand
aagagaacuuggagaaacu

SEQ ID NO: 816614 - RNA, 19 nt, Homo sapiens
  misc_RNA (1)...(19): siRNA sense strand
gcagccagguccaaucuua

SEQ ID NO: 816615 - RNA, 19 nt, Homo sapiens
  misc_RNA (1)...(19): siRNA sense strand
ggaaagugaugacgaguau

SEQ ID NO: 816616 - RNA, 19 nt, Homo sapiens
  misc_RNA (1)...(19): siRNA sense strand
ggaagcaucugaagacaca

SEQ ID NO: 816617 - RNA, 19 nt, Homo sapiens
  misc_RNA (1)...(19): siRNA sense strand
gaacccaaauaaagaguau

SEQ ID NO: 816618 - RNA, 19 nt, Homo sapiens
  misc_RNA (1)...(19): siRNA sense strand
uuacaagucucaagucuuc

SEQ ID NO: 816619 - RNA, 19 nt, Homo sapiens
  misc_RNA (1)...(19): siRNA sense strand
gaagaucugcuugacuaua

SEQ ID NO: 816620 - RNA, 19 nt, Homo sapiens
  misc_RNA (1)...(19): siRNA sense strand
ccacgcagaucgccuguau

SEQ ID NO: 816621 - RNA, 19 nt, Homo sapiens
  misc_RNA (1)...(19): siRNA sense strand
ucaaaucaccuacuaaugu

SEQ ID NO: 816622 - RNA, 19 nt, Homo sapiens
  misc_RNA (1)...(19): siRNA sense strand
caaaucaccuacuaauguc

SEQ ID NO: 816623 - RNA, 19 nt, Homo sapiens
  misc_RNA (1)...(19): siRNA sense strand
gcaguggcccuccagagua

SEQ ID NO: 816624 - RNA, 19 nt, Homo sapiens
  misc_RNA (1)...(19): siRNA sense strand
agucuucucugcagcuuua

SEQ ID NO: 816625 - RNA, 19 nt, Homo sapiens
  misc_RNA (1)...(19): siRNA sense strand
ggagaacaccccaguuuua

SEQ ID NO: 816626 - RNA, 19 nt, Homo sapiens
  misc_RNA (1)...(19): siRNA sense strand
gguccaaucuuacaagucu

SEQ ID NO: 816627 - RNA, 19 nt, Homo sapiens
  misc_RNA (1)...(19): siRNA sense strand
ggguagaccuggauagcuu

SEQ ID NO: 816628 - RNA, 19 nt, Homo sapiens
  misc_RNA (1)...(19): siRNA sense strand
aagaggaaguggaaaguga

SEQ ID NO: 816629 - RNA, 19 nt, Homo sapiens
  misc_RNA (1)...(19): siRNA sense strand
gcacagagucuagguggaa

SEQ ID NO: 816630 - RNA, 19 nt, Homo sapiens
  misc_RNA (1)...(19): siRNA sense strand
augaagaucugcuugacua

SEQ ID NO: 816631 - RNA, 19 nt, Homo sapiens
  misc_RNA (1)...(19): siRNA sense strand
uaaagaguaugaagaucug

SEQ ID NO: 816632 - RNA, 19 nt, Homo sapiens
  misc_RNA (1)...(19): siRNA sense strand
cagcuuuaccggcaauuua

SEQ ID NO: 816633 - RNA, 19 nt, Homo sapiens
  misc_RNA (1)...(19): siRNA sense strand
acacaaaggcccaguccua

SEQ ID NO: 816634 - RNA, 19 nt, Homo sapiens
  misc_RNA (1)...(19): siRNA sense strand
ggagccaacuugcaucuac

SEQ ID NO: 816635 - RNA, 19 nt, Homo sapiens
  misc_RNA (1)...(19): siRNA sense strand
gcagaucgccuguaugacu

SEQ ID NO: 816636 - RNA, 19 nt, Homo sapiens
  misc_RNA (1)...(19): siRNA sense strand
gaaaucagaagaggaagug

SEQ ID NO: 816637 - RNA, 19 nt, Homo sapiens
  misc_RNA (1)...(19): siRNA sense strand
gcgaaggaccggcugacua

SEQ ID NO: 816638 - RNA, 19 nt, Homo sapiens
  misc_RNA (1)...(19): siRNA sense strand
ccagagagccaagccuuaa

SEQ ID NO: 816639 - RNA, 19 nt, Homo sapiens
  misc_RNA (1)...(19): siRNA sense strand
uguauaauguugcagaugu

SEQ ID NO: 816640 - RNA, 19 nt, Homo sapiens
  misc_RNA (1)...(19): siRNA sense strand
cgaaggaccggcugacuau

SEQ ID NO: 816641 - RNA, 19 nt, Homo sapiens
  misc_RNA (1)...(19): siRNA sense strand
ggccucagcucccaaagca

SEQ ID NO: 816642 - RNA, 19 nt, Homo sapiens
  misc_RNA (1)...(19): siRNA sense strand
guauaauguugcagauguu

SEQ ID NO: 816643 - RNA, 19 nt, Homo sapiens
  misc_RNA (1)...(19): siRNA sense strand
cuggauagcuucucugucu

SEQ ID NO: 816644 - RNA, 19 nt, Homo sapiens
  misc_RNA (1)...(19): siRNA sense strand
gaagaggaccagccagagu

SEQ ID NO: 816645 - RNA, 19 nt, Homo sapiens
  misc_RNA (1)...(19): siRNA sense strand
gcaugggcuuggcaucuug

SEQ ID NO: 816646 - RNA, 19 nt, Homo sapiens
  misc_RNA (1)...(19): siRNA sense strand
ggccagugaugccaacaga

SEQ ID NO: 816647 - RNA, 19 nt, Homo sapiens
  misc_RNA (1)...(19): siRNA sense strand
gacuauacuuacccacuga

SEQ ID NO: 816648 - RNA, 19 nt, Homo sapiens
  misc_RNA (1)...(19): siRNA sense strand
ggaacccaaauaaagagua

SEQ ID NO: 816649 - RNA, 19 nt, Homo sapiens
  misc_RNA (1)...(19): siRNA sense strand
caacagagagcccguagcu

SEQ ID NO: 816650 - RNA, 19 nt, Homo sapiens
  misc_RNA (1)...(19): siRNA sense strand
cggagagugucuuacagaa

SEQ ID NO: 816651 - RNA, 19 nt, Homo sapiens
  misc_RNA (1)...(19): siRNA sense strand
ucugcuggcuguauaaugu

SEQ ID NO: 816652 - RNA, 19 nt, Homo sapiens
  misc_RNA (1)...(19): siRNA sense strand
guggaaaucagaagaggaa

SEQ ID NO: 816653 - RNA, 19 nt, Homo sapiens
  misc_RNA (1)...(19): siRNA sense strand
ccagaacaacaacuauuug

SEQ ID NO: 816654 - RNA, 19 nt, Homo sapiens
  misc_RNA (1)...(19): siRNA sense strand
gggaaagccagguggagaa

SEQ ID NO: 816655 - RNA, 19 nt, Homo sapiens
  misc_RNA (1)...(19): siRNA sense strand
caaaggcccaguccuaugg

SEQ ID NO: 816656 - RNA, 19 nt, Homo sapiens
  misc_RNA (1)...(19): siRNA sense strand
cuggcuggcugcacccuua

SEQ ID NO: 816657 - RNA, 19 nt, Homo sapiens
  misc_RNA (1)...(19): siRNA sense strand
acgcagaucgccuguauga

SEQ ID NO: 816658 - RNA, 19 nt, Homo sapiens
  misc_RNA (1)...(19): siRNA sense strand
gaagaggaaguggaaagug

SEQ ID NO: 816659 - RNA, 19 nt, Homo sapiens
  misc_RNA (1)...(19): siRNA sense strand
gaaggaccggcugacuaua

SEQ ID NO: 816660 - RNA, 19 nt, Homo sapiens
  misc_RNA (1)...(19): siRNA sense strand
ccagugaugccaacagaga

SEQ ID NO: 816661 - RNA, 19 nt, Homo sapiens
  misc_RNA (1)...(19): siRNA sense strand
ccaaauaaagaguaugaag

SEQ ID NO: 816662 - RNA, 19 nt, Homo sapiens
  misc_RNA (1)...(19): siRNA sense strand
cccagaacaacaacuauuu

SEQ ID NO: 816663 - RNA, 19 nt, Homo sapiens
  misc_RNA (1)...(19): siRNA sense strand
cugaucugcuggcuguaua

SEQ ID NO: 816664 - RNA, 19 nt, Homo sapiens
  misc_RNA (1)...(19): siRNA sense strand
ggcaugggcuuggcaucuu

SEQ ID NO: 816665 - RNA, 19 nt, Homo sapiens
  misc_RNA (1)...(19): siRNA sense strand
ccucacagcucaggucucu

SEQ ID NO: 816666 - RNA, 19 nt, Homo sapiens
  misc_RNA (1)...(19): siRNA sense strand
ggaaaucagaagaggaagu

SEQ ID NO: 816667 - RNA, 19 nt, Homo sapiens
  misc_RNA (1)...(19): siRNA sense strand
ccucaaaucaccuacuaau

SEQ ID NO: 816668 - RNA, 19 nt, Homo sapiens
  misc_RNA (1)...(19): siRNA sense strand
aagaucugcuugacuauac

SEQ ID NO: 816669 - RNA, 19 nt, Homo sapiens
  misc_RNA (1)...(19): siRNA sense strand
ccagcaagcacccucaaau

SEQ ID NO: 816670 - RNA, 19 nt, Homo sapiens
  misc_RNA (1)...(19): siRNA sense strand
ccugugugcugccagauuc

SEQ ID NO: 816671 - RNA, 19 nt, Homo sapiens
  misc_RNA (1)...(19): siRNA sense strand
ugacggagagugucuuaca

SEQ ID NO: 816672 - RNA, 19 nt, Homo sapiens
  misc_RNA (1)...(19): siRNA sense strand
guggagaagaccaagcuuu

SEQ ID NO: 816673 - RNA, 19 nt, Homo sapiens
  misc_RNA (1)...(19): siRNA sense strand
gggcucaucuccccuguau

SEQ ID NO: 816674 - RNA, 19 nt, Homo sapiens
  misc_RNA (1)...(19): siRNA sense strand
cagcaagcacccucaaauc

SEQ ID NO: 816675 - RNA, 19 nt, Homo sapiens
  misc_RNA (1)...(19): siRNA sense strand
ccacugcccugccauuuuc

SEQ ID NO: 816676 - RNA, 19 nt, Homo sapiens
  misc_RNA (1)...(19): siRNA sense strand
gcacccuuaucccugacaa

SEQ ID NO: 816677 - RNA, 19 nt, Homo sapiens
  misc_RNA (1)...(19): siRNA sense strand
ggagagugucuuacagaag

SEQ ID NO: 816678 - RNA, 19 nt, Homo sapiens
  misc_RNA (1)...(19): siRNA sense strand
auccaucccuagcagauuu

SEQ ID NO: 816679 - RNA, 19 nt, Homo sapiens
  misc_RNA (1)...(19): siRNA sense strand
gcuguauaauguugcagau

SEQ ID NO: 816680 - RNA, 19 nt, Homo sapiens
  misc_RNA (1)...(19): siRNA sense strand
gcaagcacccucaaaucac

SEQ ID NO: 816681 - RNA, 19 nt, Homo sapiens
  misc_RNA (1)...(19): siRNA sense strand
gugguucucuggccaaggu

SEQ ID NO: 816682 - RNA, 19 nt, Homo sapiens
  misc_RNA (1)...(19): siRNA sense strand
ucuggaacccaaauaaaga

SEQ ID NO: 816683 - RNA, 19 nt, Homo sapiens
  misc_RNA (1)...(19): siRNA sense strand
gcggaagcaucugaagaca

SEQ ID NO: 816684 - RNA, 19 nt, Homo sapiens
  misc_RNA (1)...(19): siRNA sense strand
gagucuagguggaaaucag

SEQ ID NO: 816685 - RNA, 19 nt, Homo sapiens
  misc_RNA (1)...(19): siRNA sense strand
acccucaaaucaccuacua

SEQ ID NO: 816686 - RNA, 19 nt, Homo sapiens
  misc_RNA (1)...(19): siRNA sense strand
ucccaaagcaccuugauag

SEQ ID NO: 816687 - RNA, 19 nt, Homo sapiens
  misc_RNA (1)...(19): siRNA sense strand
ggcagaagcggaagcaucu

SEQ ID NO: 816688 - RNA, 19 nt, Homo sapiens
  misc_RNA (1)...(19): siRNA sense strand
gcagcuuuaccggcaauuu

SEQ ID NO: 816689 - RNA, 19 nt, Homo sapiens
  misc_RNA (1)...(19): siRNA sense strand
gaaagccagguggagaaga

SEQ ID NO: 816690 - RNA, 19 nt, Homo sapiens
  misc_RNA (1)...(19): siRNA sense strand
guaugaagaucugcuugac

SEQ ID NO: 816691 - RNA, 19 nt, Homo sapiens
  misc_RNA (1)...(19): siRNA sense strand
ucacagcucaggucucucu

SEQ ID NO: 816692 - RNA, 19 nt, Homo sapiens
  misc_RNA (1)...(19): siRNA sense strand
uaccggcaauuuaagaaag

SEQ ID NO: 816693 - RNA, 19 nt, Homo sapiens
  misc_RNA (1)...(19): siRNA sense strand
cacaaaggcccaguccuau

SEQ ID NO: 816694 - RNA, 19 nt, Homo sapiens
  misc_RNA (1)...(19): siRNA sense strand
aaagugaugacgaguaucu

SEQ ID NO: 816695 - RNA, 19 nt, Homo sapiens
  misc_RNA (1)...(19): siRNA sense strand
uggaaagugaugacgagua

SEQ ID NO: 816696 - RNA, 19 nt, Homo sapiens
  misc_RNA (1)...(19): siRNA sense strand
cagaagaggaaguggaaag

SEQ ID NO: 816697 - RNA, 19 nt, Homo sapiens
  misc_RNA (1)...(19): siRNA sense strand
gcuaaggacacgggacaga

SEQ ID NO: 816698 - RNA, 19 nt, Homo sapiens
  misc_RNA (1)...(19): siRNA sense strand
ucucuggaacccaaauaaa

SEQ ID NO: 816699 - RNA, 19 nt, Homo sapiens
  misc_RNA (1)...(19): siRNA sense strand
gaucgccuguaugacucua

SEQ ID NO: 816700 - RNA, 19 nt, Homo sapiens
  misc_RNA (1)...(19): siRNA sense strand
uggagaagaccaagcuuuc

SEQ ID NO: 816701 - RNA, 19 nt, Homo sapiens
  misc_RNA (1)...(19): siRNA sense strand
caagucuucucugcagcuu

SEQ ID NO: 816702 - RNA, 19 nt, Homo sapiens
  misc_RNA (1)...(19): siRNA sense strand
gaggaaguggaaagugaug

SEQ ID NO: 816703 - RNA, 19 nt, Homo sapiens
  misc_RNA (1)...(19): siRNA sense strand
cacagagucuagguggaaa

SEQ ID NO: 816704 - RNA, 19 nt, Homo sapiens
  misc_RNA (1)...(19): siRNA sense strand
ggccagagagggagaagag

SEQ ID NO: 816705 - RNA, 19 nt, Homo sapiens
  misc_RNA (1)...(19): siRNA sense strand
acaaaggcccaguccuaug

SEQ ID NO: 816706 - RNA, 19 nt, Homo sapiens
  misc_RNA (1)...(19): siRNA sense strand
gacggagagugucuuacag

SEQ ID NO: 816707 - RNA, 19 nt, Homo sapiens
  misc_RNA (1)...(19): siRNA sense strand
gauccaucccuagcagauu

SEQ ID NO: 816708 - RNA, 19 nt, Homo sapiens
  misc_RNA (1)...(19): siRNA sense strand
acuauuugcucaggacaug

SEQ ID NO: 816709 - RNA, 19 nt, Homo sapiens
  misc_RNA (1)...(19): siRNA sense strand
uucagugccuguuggagaa

SEQ ID NO: 816710 - RNA, 19 nt, Homo sapiens
  misc_RNA (1)...(19): siRNA sense strand
aaagccagguggagaagac

SEQ ID NO: 816711 - RNA, 19 nt, Homo sapiens
  misc_RNA (1)...(19): siRNA sense strand
ggaaagccagguggagaag

SEQ ID NO: 816712 - RNA, 19 nt, Homo sapiens
  misc_RNA (1)...(19): siRNA sense strand
gaagcggaagcaucugaag

SEQ ID NO: 816713 - RNA, 19 nt, Homo sapiens
  misc_RNA (1)...(19): siRNA sense strand
cagguccaaucuuacaagu

SEQ ID NO: 816714 - RNA, 19 nt, Homo sapiens
  misc_RNA (1)...(19): siRNA sense strand
gaaugaaccucuacuuaaa

SEQ ID NO: 816715 - RNA, 19 nt, Homo sapiens
  misc_RNA (1)...(19): siRNA sense strand
uaacaaacgugcuggauuu

SEQ ID NO: 816716 - RNA, 19 nt, Homo sapiens
  misc_RNA (1)...(19): siRNA sense strand
gaagugccauuaacaagaa

SEQ ID NO: 816717 - RNA, 19 nt, Homo sapiens
  misc_RNA (1)...(19): siRNA sense strand
ccauaaagcugcaguguga

SEQ ID NO: 816718 - RNA, 19 nt, Homo sapiens
  misc_RNA (1)...(19): siRNA sense strand
gaagagacguucuguccuu

SEQ ID NO: 816719 - RNA, 19 nt, Homo sapiens
  misc_RNA (1)...(19): siRNA sense strand
gaaagugugcuucuauaaa

SEQ ID NO: 816720 - RNA, 19 nt, Homo sapiens
  misc_RNA (1)...(19): siRNA sense strand
gaugaacggucuaaguuau

SEQ ID NO: 816721 - RNA, 19 nt, Homo sapiens
  misc_RNA (1)...(19): siRNA sense strand
ggagaaauaugcgucaguu

SEQ ID NO: 816722 - RNA, 19 nt, Homo sapiens
  misc_RNA (1)...(19): siRNA sense strand
ggucuaaguuaugguguua

SEQ ID NO: 816723 - RNA, 19 nt, Homo sapiens
  misc_RNA (1)...(19): siRNA sense strand
ugacaggguucguuuggua

SEQ ID NO: 816724 - RNA, 19 nt, Homo sapiens
  misc_RNA (1)...(19): siRNA sense strand
ggagagaucuggguaagca

SEQ ID NO: 816725 - RNA, 19 nt, Homo sapiens
  misc_RNA (1)...(19): siRNA sense strand
caggagagguggcagcuuu

SEQ ID NO: 816726 - RNA, 19 nt, Homo sapiens
  misc_RNA (1)...(19): siRNA sense strand
ccaaagcgcccuccacuga

SEQ ID NO: 816727 - RNA, 19 nt, Homo sapiens
  misc_RNA (1)...(19): siRNA sense strand
ggaaagccgucuacacucu

SEQ ID NO: 816728 - RNA, 19 nt, Homo sapiens
  misc_RNA (1)...(19): siRNA sense strand
cacagacgcuugucagaaa

SEQ ID NO: 816729 - RNA, 19 nt, Homo sapiens
  misc_RNA (1)...(19): siRNA sense strand
agaaugaaccucuacuuaa

SEQ ID NO: 816730 - RNA, 19 nt, Homo sapiens
  misc_RNA (1)...(19): siRNA sense strand
gcuaauguauguguuguga

SEQ ID NO: 816731 - RNA, 19 nt, Homo sapiens
  misc_RNA (1)...(19): siRNA sense strand
gucaaccacugggauauua

SEQ ID NO: 816732 - RNA, 19 nt, Homo sapiens
  misc_RNA (1)...(19): siRNA sense strand
ccacauagaucugcauucu

SEQ ID NO: 816733 - RNA, 19 nt, Homo sapiens
  misc_RNA (1)...(19): siRNA sense strand
gcacaacacagcccaaauc

SEQ ID NO: 816734 - RNA, 19 nt, Homo sapiens
  misc_RNA (1)...(19): siRNA sense strand
caaacgugcuggauuucaa

SEQ ID NO: 816735 - RNA, 19 nt, Homo sapiens
  misc_RNA (1)...(19): siRNA sense strand
gcgcucguguuuccgaaua

SEQ ID NO: 816736 - RNA, 19 nt, Homo sapiens
  misc_RNA (1)...(19): siRNA sense strand
gauggagucuggaaagauc

SEQ ID NO: 816737 - RNA, 19 nt, Homo sapiens
  misc_RNA (1)...(19): siRNA sense strand
gaggagcacccaucuuuga

SEQ ID NO: 816738 - RNA, 19 nt, Homo sapiens
  misc_RNA (1)...(19): siRNA sense strand
gcacuggucucuccuagcu

SEQ ID NO: 816739 - RNA, 19 nt, Homo sapiens
  misc_RNA (1)...(19): siRNA sense strand
aaagugugcuucuauaaag

SEQ ID NO: 816740 - RNA, 19 nt, Homo sapiens
  misc_RNA (1)...(19): siRNA sense strand
aagaaugaaccucuacuua

SEQ ID NO: 816741 - RNA, 19 nt, Homo sapiens
  misc_RNA (1)...(19): siRNA sense strand
gaaaaguugucaguccuua

SEQ ID NO: 816742 - RNA, 19 nt, Homo sapiens
  misc_RNA (1)...(19): siRNA sense strand
cagaguggauacugaagaa

SEQ ID NO: 816743 - RNA, 19 nt, Homo sapiens
  misc_RNA (1)...(19): siRNA sense strand
gcaagcagagaauagaauu

SEQ ID NO: 816744 - RNA, 19 nt, Homo sapiens
  misc_RNA (1)...(19): siRNA sense strand
gaggucaucuguccuugug

SEQ ID NO: 816745 - RNA, 19 nt, Homo sapiens
  misc_RNA (1)...(19): siRNA sense strand
gauauuagcgggagugaag

SEQ ID NO: 816746 - RNA, 19 nt, Homo sapiens
  misc_RNA (1)...(19): siRNA sense strand
cugccuacauugaguauaa

SEQ ID NO: 816747 - RNA, 19 nt, Homo sapiens
  misc_RNA (1)...(19): siRNA sense strand
ucacgaagaauguguuuga

SEQ ID NO: 816748 - RNA, 19 nt, Homo sapiens
  misc_RNA (1)...(19): siRNA sense strand
gggcagcuguggagucuuc

SEQ ID NO: 816749 - RNA, 19 nt, Homo sapiens
  misc_RNA (1)...(19): siRNA sense strand
ucuccaagcucuucaagga

SEQ ID NO: 816750 - RNA, 19 nt, Homo sapiens
  misc_RNA (1)...(19): siRNA sense strand
ggaguucgcagacacaaug

SEQ ID NO: 816751 - RNA, 19 nt, Homo sapiens
  misc_RNA (1)...(19): siRNA sense strand
uaacaagcgucaugaacag

SEQ ID NO: 816752 - RNA, 19 nt, Homo sapiens
  misc_RNA (1)...(19): siRNA sense strand
gcagacacaaugcagauga

SEQ ID NO: 816753 - RNA, 19 nt, Homo sapiens
  misc_RNA (1)...(19): siRNA sense strand
gcacagcguacuauggauu

SEQ ID NO: 816754 - RNA, 19 nt, Homo sapiens
  misc_RNA (1)...(19): siRNA sense strand
gcugaaacauuaacaaacg

SEQ ID NO: 816755 - RNA, 19 nt, Homo sapiens
  misc_RNA (1)...(19): siRNA sense strand
gggugaaccugucaugugu

SEQ ID NO: 816756 - RNA, 19 nt, Homo sapiens
  misc_RNA (1)...(19): siRNA sense strand
ggugaugccuggagcuaau

SEQ ID NO: 816757 - RNA, 19 nt, Homo sapiens
  misc_RNA (1)...(19): siRNA sense strand
cgaugaacggucuaaguua

SEQ ID NO: 816758 - RNA, 19 nt, Homo sapiens
  misc_RNA (1)...(19): siRNA sense strand
caaugcagaugacguugug

SEQ ID NO: 816759 - RNA, 19 nt, Homo sapiens
  misc_RNA (1)...(19): siRNA sense strand
uaauguauguguugugaag

SEQ ID NO: 816760 - RNA, 19 nt, Homo sapiens
  misc_RNA (1)...(19): siRNA sense strand
gccuggagcuaauguaugu

SEQ ID NO: 816761 - RNA, 19 nt, Homo sapiens
  misc_RNA (1)...(19): siRNA sense strand
ggacguuggucaggugaug

SEQ ID NO: 816762 - RNA, 19 nt, Homo sapiens
  misc_RNA (1)...(19): siRNA sense strand
gaauagugacccugugaug

SEQ ID NO: 816763 - RNA, 19 nt, Homo sapiens
  misc_RNA (1)...(19): siRNA sense strand
guugugaaguuagaaggua

SEQ ID NO: 816764 - RNA, 19 nt, Homo sapiens
  misc_RNA (1)...(19): siRNA sense strand
gaaaagcaguccugucgau

SEQ ID NO: 816765 - RNA, 19 nt, Homo sapiens
  misc_RNA (1)...(19): siRNA sense strand
gacugggacugccuacauu

SEQ ID NO: 816766 - RNA, 19 nt, Homo sapiens
  misc_RNA (1)...(19): siRNA sense strand
gcagauggugucccuguga

SEQ ID NO: 816767 - RNA, 19 nt, Homo sapiens
  misc_RNA (1)...(19): siRNA sense strand
cagaguggcgcucguguuu

SEQ ID NO: 816768 - RNA, 19 nt, Homo sapiens
  misc_RNA (1)...(19): siRNA sense strand
cgucuacacucucaccuau

SEQ ID NO: 816769 - RNA, 19 nt, Homo sapiens
  misc_RNA (1)...(19): siRNA sense strand
ggacugccuacauugagua

SEQ ID NO: 816770 - RNA, 19 nt, Homo sapiens
  misc_RNA (1)...(19): siRNA sense strand
ccgcacagccugccauuga

SEQ ID NO: 816771 - RNA, 19 nt, Homo sapiens
  misc_RNA (1)...(19): siRNA sense strand
ucacugcgcaugcugauug

SEQ ID NO: 816772 - RNA, 19 nt, Homo sapiens
  misc_RNA (1)...(19): siRNA sense strand
ggacugggacugccuacau

SEQ ID NO: 816773 - RNA, 19 nt, Homo sapiens
  misc_RNA (1)...(19): siRNA sense strand
caugaaguuugucuacaga

SEQ ID NO: 816774 - RNA, 19 nt, Homo sapiens
  misc_RNA (1)...(19): siRNA sense strand
ucuguggcauggcguguua

SEQ ID NO: 816775 - RNA, 19 nt, Homo sapiens
  misc_RNA (1)...(19): siRNA sense strand
gagcuaauguauguguugu

SEQ ID NO: 816776 - RNA, 19 nt, Homo sapiens
  misc_RNA (1)...(19): siRNA sense strand
gcacguuauauaccgcuua

SEQ ID NO: 816777 - RNA, 19 nt, Homo sapiens
  misc_RNA (1)...(19): siRNA sense strand
gaagauagcaagcguuuuc

SEQ ID NO: 816778 - RNA, 19 nt, Homo sapiens
  misc_RNA (1)...(19): siRNA sense strand
ugaugaagugggagaaaua

SEQ ID NO: 816779 - RNA, 19 nt, Homo sapiens
  misc_RNA (1)...(19): siRNA sense strand
ccaaauacaaagagaggaa

SEQ ID NO: 816780 - RNA, 19 nt, Homo sapiens
  misc_RNA (1)...(19): siRNA sense strand
aaacugacaaguaagaaug

SEQ ID NO: 816781 - RNA, 19 nt, Homo sapiens
  misc_RNA (1)...(19): siRNA sense strand
caacuggcacagcguacua

SEQ ID NO: 816782 - RNA, 19 nt, Homo sapiens
  misc_RNA (1)...(19): siRNA sense strand
gaagcugaaacauuaacaa

SEQ ID NO: 816783 - RNA, 19 nt, Homo sapiens
  misc_RNA (1)...(19): siRNA sense strand
ccauagaagugccauuaac

SEQ ID NO: 816784 - RNA, 19 nt, Homo sapiens
  misc_RNA (1)...(19): siRNA sense strand
gcggcacgaugcacuguau

SEQ ID NO: 816785 - RNA, 19 nt, Homo sapiens
  misc_RNA (1)...(19): siRNA sense strand
gaauguguuugaggcaguu

SEQ ID NO: 816786 - RNA, 19 nt, Homo sapiens
  misc_RNA (1)...(19): siRNA sense strand
gaaauaugcgucaguucca

SEQ ID NO: 816787 - RNA, 19 nt, Homo sapiens
  misc_RNA (1)...(19): siRNA sense strand
guucuguccuugugcauuc

SEQ ID NO: 816788 - RNA, 19 nt, Homo sapiens
  misc_RNA (1)...(19): siRNA sense strand
acuuaaaccuggagacaga

SEQ ID NO: 816789 - RNA, 19 nt, Homo sapiens
  misc_RNA (1)...(19): siRNA sense strand
gagacguucuguccuugug

SEQ ID NO: 816790 - RNA, 19 nt, Homo sapiens
  misc_RNA (1)...(19): siRNA sense strand
aagcaguccugucgaugaa

SEQ ID NO: 816791 - RNA, 19 nt, Homo sapiens
  misc_RNA (1)...(19): siRNA sense strand
ccacagacgcuugucagaa

SEQ ID NO: 816792 - RNA, 19 nt, Homo sapiens
  misc_RNA (1)...(19): siRNA sense strand
ucggagggauucacauuuc

SEQ ID NO: 816793 - RNA, 19 nt, Homo sapiens
  misc_RNA (1)...(19): siRNA sense strand
gaggcaggaucgcuguguu

SEQ ID NO: 816794 - RNA, 19 nt, Homo sapiens
  misc_RNA (1)...(19): siRNA sense strand
ucuccuggcuagugauuga

SEQ ID NO: 816795 - RNA, 19 nt, Homo sapiens
  misc_RNA (1)...(19): siRNA sense strand
ccaucuaugucgccuacaa

SEQ ID NO: 816796 - RNA, 19 nt, Homo sapiens
  misc_RNA (1)...(19): siRNA sense strand
ggaggagcacccaucuuug

SEQ ID NO: 816797 - RNA, 19 nt, Homo sapiens
  misc_RNA (1)...(19): siRNA sense strand
uguauguguugugaaguua

SEQ ID NO: 816798 - RNA, 19 nt, Homo sapiens
  misc_RNA (1)...(19): siRNA sense strand
guuaugguguuaucagagu

SEQ ID NO: 816799 - RNA, 19 nt, Homo sapiens
  misc_RNA (1)...(19): siRNA sense strand
cagauggugucccugugaa

SEQ ID NO: 816800 - RNA, 19 nt, Homo sapiens
  misc_RNA (1)...(19): siRNA sense strand
gcacacaccgagaccaaag

SEQ ID NO: 816801 - RNA, 19 nt, Homo sapiens
  misc_RNA (1)...(19): siRNA sense strand
gcacagccugccauugaug

SEQ ID NO: 816802 - RNA, 19 nt, Homo sapiens
  misc_RNA (1)...(19): siRNA sense strand
aagaagauagcaagcguuu

SEQ ID NO: 816803 - RNA, 19 nt, Homo sapiens
  misc_RNA (1)...(19): siRNA sense strand
ggaucgcuguguucucugu

SEQ ID NO: 816804 - RNA, 19 nt, Homo sapiens
  misc_RNA (1)...(19): siRNA sense strand
caggaucgcuguguucucu

SEQ ID NO: 816805 - RNA, 19 nt, Homo sapiens
  misc_RNA (1)...(19): siRNA sense strand
aggaggagcacccaucuuu

SEQ ID NO: 816806 - RNA, 19 nt, Homo sapiens
  misc_RNA (1)...(19): siRNA sense strand
ggagcuaauguauguguug

SEQ ID NO: 816807 - RNA, 19 nt, Homo sapiens
  misc_RNA (1)...(19): siRNA sense strand
gaaggaguucuuuguggau

SEQ ID NO: 816808 - RNA, 19 nt, Homo sapiens
  misc_RNA (1)...(19): siRNA sense strand
ccaaaccucgucagaaaca

SEQ ID NO: 816809 - RNA, 19 nt, Homo sapiens
  misc_RNA (1)...(19): siRNA sense strand
caaacagcgcuuucuggaa

SEQ ID NO: 816810 - RNA, 19 nt, Homo sapiens
  misc_RNA (1)...(19): siRNA sense strand
gauguucaugguugcauuu

SEQ ID NO: 816811 - RNA, 19 nt, Homo sapiens
  misc_RNA (1)...(19): siRNA sense strand
gaugaagugggagaaauau

SEQ ID NO: 816812 - RNA, 19 nt, Homo sapiens
  misc_RNA (1)...(19): siRNA sense strand
gagggauucacauuucuga

SEQ ID NO: 816813 - RNA, 19 nt, Homo sapiens
  misc_RNA (1)...(19): siRNA sense strand
uacuauggauugcuuggaa

SEQ ID NO: 816814 - RNA, 19 nt, Homo sapiens
  misc_RNA (1)...(19): siRNA sense strand
ccaaagaccuuaugaaugu

SEQ ID NO: 816815 - RNA, 19 nt, Homo sapiens
  misc_RNA (1)...(19): siRNA sense strand
ggacaggaauugaaccuaa

SEQ ID NO: 816816 - RNA, 19 nt, Homo sapiens
  misc_RNA (1)...(19): siRNA sense strand
gagaaacccuauaaaugua

SEQ ID NO: 816817 - RNA, 19 nt, Homo sapiens
  misc_RNA (1)...(19): siRNA sense strand
gaaagagaacguacauaua

SEQ ID NO: 816818 - RNA, 19 nt, Homo sapiens
  misc_RNA (1)...(19): siRNA sense strand
gaaaggcauucaagacaaa

SEQ ID NO: 816819 - RNA, 19 nt, Homo sapiens
  misc_RNA (1)...(19): siRNA sense strand
ggagagagaucuuauaacu

SEQ ID NO: 816820 - RNA, 19 nt, Homo sapiens
  misc_RNA (1)...(19): siRNA sense strand
ggugauaacucauccugua

SEQ ID NO: 816821 - RNA, 19 nt, Homo sapiens
  misc_RNA (1)...(19): siRNA sense strand
gaaagaaaccauaugaaug

SEQ ID NO: 816822 - RNA, 19 nt, Homo sapiens
  misc_RNA (1)...(19): siRNA sense strand
gacagaaccucaaacacua

SEQ ID NO: 816823 - RNA, 19 nt, Homo sapiens
  misc_RNA (1)...(19): siRNA sense strand
gaagaugguucuauuugga

SEQ ID NO: 816824 - RNA, 19 nt, Homo sapiens
  misc_RNA (1)...(19): siRNA sense strand
ggaaagagaacguacauau

SEQ ID NO: 816825 - RNA, 19 nt, Homo sapiens
  misc_RNA (1)...(19): siRNA sense strand
gagagaaaccuuauaaaug

SEQ ID NO: 816826 - RNA, 19 nt, Homo sapiens
  misc_RNA (1)...(19): siRNA sense strand
caacacaggagaauucaua

SEQ ID NO: 816827 - RNA, 19 nt, Homo sapiens
  misc_RNA (1)...(19): siRNA sense strand
ggaaaggcauucaagacaa

SEQ ID NO: 816828 - RNA, 19 nt, Homo sapiens
  misc_RNA (1)...(19): siRNA sense strand
agagaaaccuuacaaaugu

SEQ ID NO: 816829 - RNA, 19 nt, Homo sapiens
  misc_RNA (1)...(19): siRNA sense strand
gagagaaaccuuacaaaug

SEQ ID NO: 816830 - RNA, 19 nt, Homo sapiens
  misc_RNA (1)...(19): siRNA sense strand
ggaaagaaaccauaugaau

SEQ ID NO: 816831 - RNA, 19 nt, Homo sapiens
  misc_RNA (1)...(19): siRNA sense strand
ggaguuaccucucaagaag

SEQ ID NO: 816832 - RNA, 19 nt, Homo sapiens
  misc_RNA (1)...(19): siRNA sense strand
acacuaaacuugauuguuc

SEQ ID NO: 816833 - RNA, 19 nt, Homo sapiens
  misc_RNA (1)...(19): siRNA sense strand
caggcaaacugcucacuua

SEQ ID NO: 816834 - RNA, 19 nt, Homo sapiens
  misc_RNA (1)...(19): siRNA sense strand
ggagagaaaccuuauaaau

SEQ ID NO: 816835 - RNA, 19 nt, Homo sapiens
  misc_RNA (1)...(19): siRNA sense strand
ggauguggcuguagauuuc

SEQ ID NO: 816836 - RNA, 19 nt, Homo sapiens
  misc_RNA (1)...(19): siRNA sense strand
gggaaggccuuuggugaua

SEQ ID NO: 816837 - RNA, 19 nt, Homo sapiens
  misc_RNA (1)...(19): siRNA sense strand
gagagaagcccuaugaaug

SEQ ID NO: 816838 - RNA, 19 nt, Homo sapiens
  misc_RNA (1)...(19): siRNA sense strand
gaagagaaaguucauaauc

SEQ ID NO: 816839 - RNA, 19 nt, Homo sapiens
  misc_RNA (1)...(19): siRNA sense strand
ggaauggccucgcauccaa

SEQ ID NO: 816840 - RNA, 19 nt, Homo sapiens
  misc_RNA (1)...(19): siRNA sense strand
gaauguaagguuuguagua

SEQ ID NO: 816841 - RNA, 19 nt, Homo sapiens
  misc_RNA (1)...(19): siRNA sense strand
ggaaggugauguuggagaa

SEQ ID NO: 816842 - RNA, 19 nt, Homo sapiens
  misc_RNA (1)...(19): siRNA sense strand
guaaagcguucacccagaa

SEQ ID NO: 816843 - RNA, 19 nt, Homo sapiens
  misc_RNA (1)...(19): siRNA sense strand
gagaagcccuaugaaugua

SEQ ID NO: 816844 - RNA, 19 nt, Homo sapiens
  misc_RNA (1)...(19): siRNA sense strand
ggauuaugaugcucuguuu

SEQ ID NO: 816845 - RNA, 19 nt, Homo sapiens
  misc_RNA (1)...(19): siRNA sense strand
gagcucaucucuuacuguu

SEQ ID NO: 816846 - RNA, 19 nt, Homo sapiens
  misc_RNA (1)...(19): siRNA sense strand
gcucaucucuuacuguuca

SEQ ID NO: 816847 - RNA, 19 nt, Homo sapiens
  misc_RNA (1)...(19): siRNA sense strand
ccacacaccucauucaaca

SEQ ID NO: 816848 - RNA, 19 nt, Homo sapiens
  misc_RNA (1)...(19): siRNA sense strand
gccaauuacucauaacaaa

SEQ ID NO: 816849 - RNA, 19 nt, Homo sapiens
  misc_RNA (1)...(19): siRNA sense strand
caacauaagagaguucaua

SEQ ID NO: 816850 - RNA, 19 nt, Homo sapiens
  misc_RNA (1)...(19): siRNA sense strand
guacaucaaaggauucaua

SEQ ID NO: 816851 - RNA, 19 nt, Homo sapiens
  misc_RNA (1)...(19): siRNA sense strand
ggagagaaaccuuacaaau

SEQ ID NO: 816852 - RNA, 19 nt, Homo sapiens
  misc_RNA (1)...(19): siRNA sense strand
gcuauaaucuggaguacuc

SEQ ID NO: 816853 - RNA, 19 nt, Homo sapiens
  misc_RNA (1)...(19): siRNA sense strand
ugagaaacccuauaaaugu

SEQ ID NO: 816854 - RNA, 19 nt, Homo sapiens
  misc_RNA (1)...(19): siRNA sense strand
gggagaaacccuuugauug

SEQ ID NO: 816855 - RNA, 19 nt, Homo sapiens
  misc_RNA (1)...(19): siRNA sense strand
ggaaggccuuuggugauaa

SEQ ID NO: 816856 - RNA, 19 nt, Homo sapiens
  misc_RNA (1)...(19): siRNA sense strand
ucacaaauccuucagguau

SEQ ID NO: 816857 - RNA, 19 nt, Homo sapiens
  misc_RNA (1)...(19): siRNA sense strand
cagagagacucacaagcua

SEQ ID NO: 816858 - RNA, 19 nt, Homo sapiens
  misc_RNA (1)...(19): siRNA sense strand
gaaaccauaugaauguaag

SEQ ID NO: 816859 - RNA, 19 nt, Homo sapiens
  misc_RNA (1)...(19): siRNA sense strand
ggaagaugguucuauuugg

SEQ ID NO: 816860 - RNA, 19 nt, Homo sapiens
  misc_RNA (1)...(19): siRNA sense strand
aaaccuggcuguugacuuc

SEQ ID NO: 816861 - RNA, 19 nt, Homo sapiens
  misc_RNA (1)...(19): siRNA sense strand
caagagccaauuacucaua

SEQ ID NO: 816862 - RNA, 19 nt, Homo sapiens
  misc_RNA (1)...(19): siRNA sense strand
ggaucuguuucccaaauuu

SEQ ID NO: 816863 - RNA, 19 nt, Homo sapiens
  misc_RNA (1)...(19): siRNA sense strand
cagaagagaaaguucauaa

SEQ ID NO: 816864 - RNA, 19 nt, Homo sapiens
  misc_RNA (1)...(19): siRNA sense strand
caucaucagcgaauucaua

SEQ ID NO: 816865 - RNA, 19 nt, Homo sapiens
  misc_RNA (1)...(19): siRNA sense strand
ucacuuagcucaucaucag

SEQ ID NO: 816866 - RNA, 19 nt, Homo sapiens
  misc_RNA (1)...(19): siRNA sense strand
gcaaacugcucacuuagcu

SEQ ID NO: 816867 - RNA, 19 nt, Homo sapiens
  misc_RNA (1)...(19): siRNA sense strand
gacaggaauugaaccuaaa

SEQ ID NO: 816868 - RNA, 19 nt, Homo sapiens
  misc_RNA (1)...(19): siRNA sense strand
ggagagaagcccuaugaau

SEQ ID NO: 816869 - RNA, 19 nt, Homo sapiens
  misc_RNA (1)...(19): siRNA sense strand
guucucagcuugccacuca

SEQ ID NO: 816870 - RNA, 19 nt, Homo sapiens
  misc_RNA (1)...(19): siRNA sense strand
ggagaagccuuuugaaugu

SEQ ID NO: 816871 - RNA, 19 nt, Homo sapiens
  misc_RNA (1)...(19): siRNA sense strand
gagagacucacaagcuaua

SEQ ID NO: 816872 - RNA, 19 nt, Homo sapiens
  misc_RNA (1)...(19): siRNA sense strand
auacagaacacaucccuua

SEQ ID NO: 816873 - RNA, 19 nt, Homo sapiens
  misc_RNA (1)...(19): siRNA sense strand
ggagaaacccuuugauugc

SEQ ID NO: 816874 - RNA, 19 nt, Homo sapiens
  misc_RNA (1)...(19): siRNA sense strand
gugagaaacccuauaaaug

SEQ ID NO: 816875 - RNA, 19 nt, Homo sapiens
  misc_RNA (1)...(19): siRNA sense strand
ggagagaaaccauaugagu

SEQ ID NO: 816876 - RNA, 19 nt, Homo sapiens
  misc_RNA (1)...(19): siRNA sense strand
aaauugggauucugacuau

SEQ ID NO: 816877 - RNA, 19 nt, Homo sapiens
  misc_RNA (1)...(19): siRNA sense strand
ccauaugaaugugauguuu

SEQ ID NO: 816878 - RNA, 19 nt, Homo sapiens
  misc_RNA (1)...(19): siRNA sense strand
gagaaacccuuugauugca

SEQ ID NO: 816879 - RNA, 19 nt, Homo sapiens
  misc_RNA (1)...(19): siRNA sense strand
ggacgauucagaagagaaa

SEQ ID NO: 816880 - RNA, 19 nt, Homo sapiens
  misc_RNA (1)...(19): siRNA sense strand
gagagagaucuuauaacua

SEQ ID NO: 816881 - RNA, 19 nt, Homo sapiens
  misc_RNA (1)...(19): siRNA sense strand
ggugagaaacccuauaaau

SEQ ID NO: 816882 - RNA, 19 nt, Homo sapiens
  misc_RNA (1)...(19): siRNA sense strand
ccacauagggcuuaaucaa

SEQ ID NO: 816883 - RNA, 19 nt, Homo sapiens
  misc_RNA (1)...(19): siRNA sense strand
uaacagacagaaccucaaa

SEQ ID NO: 816884 - RNA, 19 nt, Homo sapiens
  misc_RNA (1)...(19): siRNA sense strand
ugucaucgcagaagucaua

SEQ ID NO: 816885 - RNA, 19 nt, Homo sapiens
  misc_RNA (1)...(19): siRNA sense strand
gaaacccuauaaauguaug

SEQ ID NO: 816886 - RNA, 19 nt, Homo sapiens
  misc_RNA (1)...(19): siRNA sense strand
acauagggcuuaaucaaca

SEQ ID NO: 816887 - RNA, 19 nt, Homo sapiens
  misc_RNA (1)...(19): siRNA sense strand
ggcaagagccaauuacuca

SEQ ID NO: 816888 - RNA, 19 nt, Homo sapiens
  misc_RNA (1)...(19): siRNA sense strand
aaagagccuuggacaguga

SEQ ID NO: 816889 - RNA, 19 nt, Homo sapiens
  misc_RNA (1)...(19): siRNA sense strand
caaagaccuuaugaaugua

SEQ ID NO: 816890 - RNA, 19 nt, Homo sapiens
  misc_RNA (1)...(19): siRNA sense strand
ggccaaagaccuuaugaau

SEQ ID NO: 816891 - RNA, 19 nt, Homo sapiens
  misc_RNA (1)...(19): siRNA sense strand
ggaaaauccuucagcauca

SEQ ID NO: 816892 - RNA, 19 nt, Homo sapiens
  misc_RNA (1)...(19): siRNA sense strand
gaaaguucauaaucgugau

SEQ ID NO: 816893 - RNA, 19 nt, Homo sapiens
  misc_RNA (1)...(19): siRNA sense strand
caaauuggacaccuuaauc

SEQ ID NO: 816894 - RNA, 19 nt, Homo sapiens
  misc_RNA (1)...(19): siRNA sense strand
gagaaaccuuacaaaugug

SEQ ID NO: 816895 - RNA, 19 nt, Homo sapiens
  misc_RNA (1)...(19): siRNA sense strand
acaggaaggugauguugga

SEQ ID NO: 816896 - RNA, 19 nt, Homo sapiens
  misc_RNA (1)...(19): siRNA sense strand
ucuggaagaugguucuauu

SEQ ID NO: 816897 - RNA, 19 nt, Homo sapiens
  misc_RNA (1)...(19): siRNA sense strand
cagcaucaguucucagcuu

SEQ ID NO: 816898 - RNA, 19 nt, Homo sapiens
  misc_RNA (1)...(19): siRNA sense strand
aagagccaauuacucauaa

SEQ ID NO: 816899 - RNA, 19 nt, Homo sapiens
  misc_RNA (1)...(19): siRNA sense strand
guacaucagagaauccauu

SEQ ID NO: 816900 - RNA, 19 nt, Homo sapiens
  misc_RNA (1)...(19): siRNA sense strand
caucgucaaucccuuagug

SEQ ID NO: 816901 - RNA, 19 nt, Homo sapiens
  misc_RNA (1)...(19): siRNA sense strand
gccaaagaccuuaugaaug

SEQ ID NO: 816902 - RNA, 19 nt, Homo sapiens
  misc_RNA (1)...(19): siRNA sense strand
uguggaagaucaaggaguu

SEQ ID NO: 816903 - RNA, 19 nt, Homo sapiens
  misc_RNA (1)...(19): siRNA sense strand
cauaagagaguucauacug

SEQ ID NO: 816904 - RNA, 19 nt, Homo sapiens
  misc_RNA (1)...(19): siRNA sense strand
ggacaccuuaaucaacaua

SEQ ID NO: 816905 - RNA, 19 nt, Homo sapiens
  misc_RNA (1)...(19): siRNA sense strand
ccauaugaauguaaggaau

SEQ ID NO: 816906 - RNA, 19 nt, Homo sapiens
  misc_RNA (1)...(19): siRNA sense strand
caacaucaaagaguacauu

SEQ ID NO: 816907 - RNA, 19 nt, Homo sapiens
  misc_RNA (1)...(19): siRNA sense strand
caagcuauaaucuggagua

SEQ ID NO: 816908 - RNA, 19 nt, Homo sapiens
  misc_RNA (1)...(19): siRNA sense strand
gaaaagagccuuggacagu

SEQ ID NO: 816909 - RNA, 19 nt, Homo sapiens
  misc_RNA (1)...(19): siRNA sense strand
caggagagaaaccauauga

SEQ ID NO: 816910 - RNA, 19 nt, Homo sapiens
  misc_RNA (1)...(19): siRNA sense strand
gggauguggcuguagauuu

SEQ ID NO: 816911 - RNA, 19 nt, Homo sapiens
  misc_RNA (1)...(19): siRNA sense strand
uaacucauccuguacucaa

SEQ ID NO: 816912 - RNA, 19 nt, Homo sapiens
  misc_RNA (1)...(19): siRNA sense strand
ggaaaaccuucauccaaau

SEQ ID NO: 816913 - RNA, 19 nt, Homo sapiens
  misc_RNA (1)...(19): siRNA sense strand
gacaaaauccucccuuauu

SEQ ID NO: 816914 - RNA, 19 nt, Homo sapiens
  misc_RNA (1)...(19): siRNA sense strand
ggaagaagaugaugaugag

SEQ ID NO: 816915 - RNA, 19 nt, Homo sapiens
  misc_RNA (1)...(19): siRNA sense strand
gcccuaagaugauugcuaa

SEQ ID NO: 816916 - RNA, 19 nt, Homo sapiens
  misc_RNA (1)...(19): siRNA sense strand
ggaggagacugcugggaaa

SEQ ID NO: 816917 - RNA, 19 nt, Homo sapiens
  misc_RNA (1)...(19): siRNA sense strand
gaaggagcauggcaaguca

SEQ ID NO: 816918 - RNA, 19 nt, Homo sapiens
  misc_RNA (1)...(19): siRNA sense strand
ugacaucccugacauugau

SEQ ID NO: 816919 - RNA, 19 nt, Homo sapiens
  misc_RNA (1)...(19): siRNA sense strand
cuaagaugauugcuaagaa

SEQ ID NO: 816920 - RNA, 19 nt, Homo sapiens
  misc_RNA (1)...(19): siRNA sense strand
gaaggaagaagaugaugau

SEQ ID NO: 816921 - RNA, 19 nt, Homo sapiens
  misc_RNA (1)...(19): siRNA sense strand
ggugugaacuccaucaagu

SEQ ID NO: 816922 - RNA, 19 nt, Homo sapiens
  misc_RNA (1)...(19): siRNA sense strand
gagcauggcaagucaguga

SEQ ID NO: 816923 - RNA, 19 nt, Homo sapiens
  misc_RNA (1)...(19): siRNA sense strand
ggagucgucuucaucuuca

SEQ ID NO: 816924 - RNA, 19 nt, Homo sapiens
  misc_RNA (1)...(19): siRNA sense strand
ggaccaugcuggaacaucu

SEQ ID NO: 816925 - RNA, 19 nt, Homo sapiens
  misc_RNA (1)...(19): siRNA sense strand
ggaagugaaucugaagaca

SEQ ID NO: 816926 - RNA, 19 nt, Homo sapiens
  misc_RNA (1)...(19): siRNA sense strand
gaggcccacugaccuguaa

SEQ ID NO: 816927 - RNA, 19 nt, Homo sapiens
  misc_RNA (1)...(19): siRNA sense strand
guggaggccuucaacaaga

SEQ ID NO: 816928 - RNA, 19 nt, Homo sapiens
  misc_RNA (1)...(19): siRNA sense strand
gacuguggcuugugcuuug

SEQ ID NO: 816929 - RNA, 19 nt, Homo sapiens
  misc_RNA (1)...(19): siRNA sense strand
gugcggaucaagaccauua

SEQ ID NO: 816930 - RNA, 19 nt, Homo sapiens
  misc_RNA (1)...(19): siRNA sense strand
ucacaaggacuguaacuca

SEQ ID NO: 816931 - RNA, 19 nt, Homo sapiens
  misc_RNA (1)...(19): siRNA sense strand
ggugcaaccuucaaagaca

SEQ ID NO: 816932 - RNA, 19 nt, Homo sapiens
  misc_RNA (1)...(19): siRNA sense strand
agacauuucuguagucagu

SEQ ID NO: 816933 - RNA, 19 nt, Homo sapiens
  misc_RNA (1)...(19): siRNA sense strand
ccaaagugcccgucuguca

SEQ ID NO: 816934 - RNA, 19 nt, Homo sapiens
  misc_RNA (1)...(19): siRNA sense strand
aggccaagcugaucuacaa

SEQ ID NO: 816935 - RNA, 19 nt, Homo sapiens
  misc_RNA (1)...(19): siRNA sense strand
ucaacaagauccucaacag

SEQ ID NO: 816936 - RNA, 19 nt, Homo sapiens
  misc_RNA (1)...(19): siRNA sense strand
cugaggagcuggcuguuuc

SEQ ID NO: 816937 - RNA, 19 nt, Homo sapiens
  misc_RNA (1)...(19): siRNA sense strand
caagaacacccaucagucu

SEQ ID NO: 816938 - RNA, 19 nt, Homo sapiens
  misc_RNA (1)...(19): siRNA sense strand
gacacagucuucacucaca

SEQ ID NO: 816939 - RNA, 19 nt, Homo sapiens
  misc_RNA (1)...(19): siRNA sense strand
gaagccagaaccaggugua

SEQ ID NO: 816940 - RNA, 19 nt, Homo sapiens
  misc_RNA (1)...(19): siRNA sense strand
ccaagcugaucuacaagug

SEQ ID NO: 816941 - RNA, 19 nt, Homo sapiens
  misc_RNA (1)...(19): siRNA sense strand
ucagugucauugucaagaa

SEQ ID NO: 816942 - RNA, 19 nt, Homo sapiens
  misc_RNA (1)...(19): siRNA sense strand
cccaaucgcugcagcuuca

SEQ ID NO: 816943 - RNA, 19 nt, Homo sapiens
  misc_RNA (1)...(19): siRNA sense strand
gaagaccccugauuuugau

SEQ ID NO: 816944 - RNA, 19 nt, Homo sapiens
  misc_RNA (1)...(19): siRNA sense strand
uguaggaagugaaucugaa

SEQ ID NO: 816945 - RNA, 19 nt, Homo sapiens
  misc_RNA (1)...(19): siRNA sense strand
ucccugagcgugaugaaua

SEQ ID NO: 816946 - RNA, 19 nt, Homo sapiens
  misc_RNA (1)...(19): siRNA sense strand
gaggagucgucuucaucuu

SEQ ID NO: 816947 - RNA, 19 nt, Homo sapiens
  misc_RNA (1)...(19): siRNA sense strand
uaagaugauugcuaagaac

SEQ ID NO: 816948 - RNA, 19 nt, Homo sapiens
  misc_RNA (1)...(19): siRNA sense strand
caccagcgcaugcauaaga

SEQ ID NO: 816949 - RNA, 19 nt, Homo sapiens
  misc_RNA (1)...(19): siRNA sense strand
gcaugcacgugaacacaag

SEQ ID NO: 816950 - RNA, 19 nt, Homo sapiens
  misc_RNA (1)...(19): siRNA sense strand
acaagauccucaacagcaa

SEQ ID NO: 816951 - RNA, 19 nt, Homo sapiens
  misc_RNA (1)...(19): siRNA sense strand
gcagccgccugauccuaga

SEQ ID NO: 816952 - RNA, 19 nt, Homo sapiens
  misc_RNA (1)...(19): siRNA sense strand
gcgacacagucuucacuca

SEQ ID NO: 816953 - RNA, 19 nt, Homo sapiens
  misc_RNA (1)...(19): siRNA sense strand
caucccagcuuccaaacuc

SEQ ID NO: 816954 - RNA, 19 nt, Homo sapiens
  misc_RNA (1)...(19): siRNA sense strand
gaauaucacaaggacugua

SEQ ID NO: 816955 - RNA, 19 nt, Homo sapiens
  misc_RNA (1)...(19): siRNA sense strand
gcuggaacaucucaagaac

SEQ ID NO: 816956 - RNA, 19 nt, Homo sapiens
  misc_RNA (1)...(19): siRNA sense strand
ggccaccucugcuuacaca

SEQ ID NO: 816957 - RNA, 19 nt, Homo sapiens
  misc_RNA (1)...(19): siRNA sense strand
gucaugcagugcucacauu

SEQ ID NO: 816958 - RNA, 19 nt, Homo sapiens
  misc_RNA (1)...(19): siRNA sense strand
ggaccuguuugcucauuuu

SEQ ID NO: 816959 - RNA, 19 nt, Homo sapiens
  misc_RNA (1)...(19): siRNA sense strand
uguaaggucuguggcaaga

SEQ ID NO: 816960 - RNA, 19 nt, Homo sapiens
  misc_RNA (1)...(19): siRNA sense strand
gaggcgccaugucagaguu

SEQ ID NO: 816961 - RNA, 19 nt, Homo sapiens
  misc_RNA (1)...(19): siRNA sense strand
caccagcccuaagaugauu

SEQ ID NO: 816962 - RNA, 19 nt, Homo sapiens
  misc_RNA (1)...(19): siRNA sense strand
ggacugccaccagcccuaa

SEQ ID NO: 816963 - RNA, 19 nt, Homo sapiens
  misc_RNA (1)...(19): siRNA sense strand
cagaugaggacagcaauga

SEQ ID NO: 816964 - RNA, 19 nt, Homo sapiens
  misc_RNA (1)...(19): siRNA sense strand
gccaccagcccuaagauga

SEQ ID NO: 816965 - RNA, 19 nt, Homo sapiens
  misc_RNA (1)...(19): siRNA sense strand
gagggcaucaagcgaguuu

SEQ ID NO: 816966 - RNA, 19 nt, Homo sapiens
  misc_RNA (1)...(19): siRNA sense strand
ugaaggaagaagaugauga

SEQ ID NO: 816967 - RNA, 19 nt, Homo sapiens
  misc_RNA (1)...(19): siRNA sense strand
aaaggaccaugcuggaaca

SEQ ID NO: 816968 - RNA, 19 nt, Homo sapiens
  misc_RNA (1)...(19): siRNA sense strand
cagcaucccagcuuccaaa

SEQ ID NO: 816969 - RNA, 19 nt, Homo sapiens
  misc_RNA (1)...(19): siRNA sense strand
gggaugccuucucauugga

SEQ ID NO: 816970 - RNA, 19 nt, Homo sapiens
  misc_RNA (1)...(19): siRNA sense strand
cugcaacaccuacuucuga

SEQ ID NO: 816971 - RNA, 19 nt, Homo sapiens
  misc_RNA (1)...(19): siRNA sense strand
aagugaaucugaagacaca

SEQ ID NO: 816972 - RNA, 19 nt, Homo sapiens
  misc_RNA (1)...(19): siRNA sense strand
uaacucagguccccucaga

SEQ ID NO: 816973 - RNA, 19 nt, Homo sapiens
  misc_RNA (1)...(19): siRNA sense strand
ugaccuccuugcugccuuu

SEQ ID NO: 816974 - RNA, 19 nt, Homo sapiens
  misc_RNA (1)...(19): siRNA sense strand
caucaccuccucugccauu

SEQ ID NO: 816975 - RNA, 19 nt, Homo sapiens
  misc_RNA (1)...(19): siRNA sense strand
gcauggcaagucagugaaa

SEQ ID NO: 816976 - RNA, 19 nt, Homo sapiens
  misc_RNA (1)...(19): siRNA sense strand
cuacugaggagucgucuuc

SEQ ID NO: 816977 - RNA, 19 nt, Homo sapiens
  misc_RNA (1)...(19): siRNA sense strand
agaaccagguguaggaagu

SEQ ID NO: 816978 - RNA, 19 nt, Homo sapiens
  misc_RNA (1)...(19): siRNA sense strand
cagcgugucagugucuuua

SEQ ID NO: 816979 - RNA, 19 nt, Homo sapiens
  misc_RNA (1)...(19): siRNA sense strand
gcuguucagugguguuugg

SEQ ID NO: 816980 - RNA, 19 nt, Homo sapiens
  misc_RNA (1)...(19): siRNA sense strand
ccaugucuguccugagugu

SEQ ID NO: 816981 - RNA, 19 nt, Homo sapiens
  misc_RNA (1)...(19): siRNA sense strand
gaaccugcucccugccuau

SEQ ID NO: 816982 - RNA, 19 nt, Homo sapiens
  misc_RNA (1)...(19): siRNA sense strand
ggcaugcagccaccuguuu

SEQ ID NO: 816983 - RNA, 19 nt, Homo sapiens
  misc_RNA (1)...(19): siRNA sense strand
gccagaaccagguguagga

SEQ ID NO: 816984 - RNA, 19 nt, Homo sapiens
  misc_RNA (1)...(19): siRNA sense strand
gcuccugcaugcacgugaa

SEQ ID NO: 816985 - RNA, 19 nt, Homo sapiens
  misc_RNA (1)...(19): siRNA sense strand
gcagaugaggacagcaaug

SEQ ID NO: 816986 - RNA, 19 nt, Homo sapiens
  misc_RNA (1)...(19): siRNA sense strand
gcaugcagccaccuguuuc

SEQ ID NO: 816987 - RNA, 19 nt, Homo sapiens
  misc_RNA (1)...(19): siRNA sense strand
caucgaaugcagaaugguu

SEQ ID NO: 816988 - RNA, 19 nt, Homo sapiens
  misc_RNA (1)...(19): siRNA sense strand
gguggaggccuucaacaag

SEQ ID NO: 816989 - RNA, 19 nt, Homo sapiens
  misc_RNA (1)...(19): siRNA sense strand
aggaagaagaugaugauga

SEQ ID NO: 816990 - RNA, 19 nt, Homo sapiens
  misc_RNA (1)...(19): siRNA sense strand
ggaggcccacugaccugua

SEQ ID NO: 816991 - RNA, 19 nt, Homo sapiens
  misc_RNA (1)...(19): siRNA sense strand
uggaacaucucaagaacac

SEQ ID NO: 816992 - RNA, 19 nt, Homo sapiens
  misc_RNA (1)...(19): siRNA sense strand
acaguugggugaugguaca

SEQ ID NO: 816993 - RNA, 19 nt, Homo sapiens
  misc_RNA (1)...(19): siRNA sense strand
caaagguggugagcguaca

SEQ ID NO: 816994 - RNA, 19 nt, Homo sapiens
  misc_RNA (1)...(19): siRNA sense strand
gaucaagaccauuaaaaca

SEQ ID NO: 816995 - RNA, 19 nt, Homo sapiens
  misc_RNA (1)...(19): siRNA sense strand
ccucugccauuacuacagu

SEQ ID NO: 816996 - RNA, 19 nt, Homo sapiens
  misc_RNA (1)...(19): siRNA sense strand
gugcucacauuuggucaug

SEQ ID NO: 816997 - RNA, 19 nt, Homo sapiens
  misc_RNA (1)...(19): siRNA sense strand
cgccuggucuucuucaaca

SEQ ID NO: 816998 - RNA, 19 nt, Homo sapiens
  misc_RNA (1)...(19): siRNA sense strand
aauaucacaaggacuguaa

SEQ ID NO: 816999 - RNA, 19 nt, Homo sapiens
  misc_RNA (1)...(19): siRNA sense strand
ccucaucgaaugcagaaug

SEQ ID NO: 817000 - RNA, 19 nt, Homo sapiens
  misc_RNA (1)...(19): siRNA sense strand
acacagucuucacucacaa

SEQ ID NO: 817001 - RNA, 19 nt, Homo sapiens
  misc_RNA (1)...(19): siRNA sense strand
guagucagugucauuguca

SEQ ID NO: 817002 - RNA, 19 nt, Homo sapiens
  misc_RNA (1)...(19): siRNA sense strand
ccuaagaugauugcuaaga

SEQ ID NO: 817003 - RNA, 19 nt, Homo sapiens
  misc_RNA (1)...(19): siRNA sense strand
gguggugagcguacaguug

SEQ ID NO: 817004 - RNA, 19 nt, Homo sapiens
  misc_RNA (1)...(19): siRNA sense strand
ccucuaggccucuuaaggu

SEQ ID NO: 817005 - RNA, 19 nt, Homo sapiens
  misc_RNA (1)...(19): siRNA sense strand
guacaguugggugauggua

SEQ ID NO: 817006 - RNA, 19 nt, Homo sapiens
  misc_RNA (1)...(19): siRNA sense strand
aaacucccuuggaccuguu

SEQ ID NO: 817007 - RNA, 19 nt, Homo sapiens
  misc_RNA (1)...(19): siRNA sense strand
cagaacagagccucaugau

SEQ ID NO: 817008 - RNA, 19 nt, Homo sapiens
  misc_RNA (1)...(19): siRNA sense strand
gaaccagguguaggaagug

SEQ ID NO: 817009 - RNA, 19 nt, Homo sapiens
  misc_RNA (1)...(19): siRNA sense strand
gguauugcacagagggaaa

SEQ ID NO: 817010 - RNA, 19 nt, Homo sapiens
  misc_RNA (1)...(19): siRNA sense strand
uggcauggcagcucacuuc

SEQ ID NO: 817011 - RNA, 19 nt, Homo sapiens
  misc_RNA (1)...(19): siRNA sense strand
gaugguacaaggcugaaag

SEQ ID NO: 817012 - RNA, 19 nt, Homo sapiens
  misc_RNA (1)...(19): siRNA sense strand
gcggaucaagaccauuaaa

SEQ ID NO: 817013 - RNA, 19 nt, Homo sapiens
  misc_RNA (1)...(19): siRNA sense strand
gaugaggacagcaaugacu

SEQ ID NO: 817014 - RNA, 19 nt, Homo sapiens
  misc_RNA (1)...(19): siRNA sense strand
ucaaaucccuucucucuuu

SEQ ID NO: 817015 - RNA, 19 nt, Homo sapiens
  misc_RNA (1)...(19): siRNA sense strand
aaacugauaucccucaauu

SEQ ID NO: 817016 - RNA, 19 nt, Homo sapiens
  misc_RNA (1)...(19): siRNA sense strand
ggaggaagaugaugaugau

SEQ ID NO: 817017 - RNA, 19 nt, Homo sapiens
  misc_RNA (1)...(19): siRNA sense strand
gguauuagcuggucaucug

SEQ ID NO: 817018 - RNA, 19 nt, Homo sapiens
  misc_RNA (1)...(19): siRNA sense strand
uagaacagaucacugguuu

SEQ ID NO: 817019 - RNA, 19 nt, Homo sapiens
  misc_RNA (1)...(19): siRNA sense strand
gcagcuggcuauccuuaaa

SEQ ID NO: 817020 - RNA, 19 nt, Homo sapiens
  misc_RNA (1)...(19): siRNA sense strand
gcaguggccucucaaagga

SEQ ID NO: 817021 - RNA, 19 nt, Homo sapiens
  misc_RNA (1)...(19): siRNA sense strand
gccagaagaugaugaggaa

SEQ ID NO: 817022 - RNA, 19 nt, Homo sapiens
  misc_RNA (1)...(19): siRNA sense strand
ggaagaugaugaugaugau

SEQ ID NO: 817023 - RNA, 19 nt, Homo sapiens
  misc_RNA (1)...(19): siRNA sense strand
cagcugaggugguaguuug

SEQ ID NO: 817024 - RNA, 19 nt, Homo sapiens
  misc_RNA (1)...(19): siRNA sense strand
gagucagcaucuaguguua

SEQ ID NO: 817025 - RNA, 19 nt, Homo sapiens
  misc_RNA (1)...(19): siRNA sense strand
ccaaagagcagcuggcuau

SEQ ID NO: 817026 - RNA, 19 nt, Homo sapiens
  misc_RNA (1)...(19): siRNA sense strand
ccagugagcuagacagcaa

SEQ ID NO: 817027 - RNA, 19 nt, Homo sapiens
  misc_RNA (1)...(19): siRNA sense strand
cuggucaucugaagaaaua

SEQ ID NO: 817028 - RNA, 19 nt, Homo sapiens
  misc_RNA (1)...(19): siRNA sense strand
gaacagaucacugguuuac

SEQ ID NO: 817029 - RNA, 19 nt, Homo sapiens
  misc_RNA (1)...(19): siRNA sense strand
uuaaaggagucccugauga

SEQ ID NO: 817030 - RNA, 19 nt, Homo sapiens
  misc_RNA (1)...(19): siRNA sense strand
gagcagcuggcuauccuua

SEQ ID NO: 817031 - RNA, 19 nt, Homo sapiens
  misc_RNA (1)...(19): siRNA sense strand
aggaagaacugccagaaga

SEQ ID NO: 817032 - RNA, 19 nt, Homo sapiens
  misc_RNA (1)...(19): siRNA sense strand
ggugguaguuugucuagau

SEQ ID NO: 817033 - RNA, 19 nt, Homo sapiens
  misc_RNA (1)...(19): siRNA sense strand
ggaccaacuccauuucaaa

SEQ ID NO: 817034 - RNA, 19 nt, Homo sapiens
  misc_RNA (1)...(19): siRNA sense strand
ucaaagcaguggccucuca

SEQ ID NO: 817035 - RNA, 19 nt, Homo sapiens
  misc_RNA (1)...(19): siRNA sense strand
cgaaaggauugaagguaga

SEQ ID NO: 817036 - RNA, 19 nt, Homo sapiens
  misc_RNA (1)...(19): siRNA sense strand
gccacaagcucgggauaaa

SEQ ID NO: 817037 - RNA, 19 nt, Homo sapiens
  misc_RNA (1)...(19): siRNA sense strand
gcaaugaacaccugcucaa

SEQ ID NO: 817038 - RNA, 19 nt, Homo sapiens
  misc_RNA (1)...(19): siRNA sense strand
agucaggcaucaaggcuua

SEQ ID NO: 817039 - RNA, 19 nt, Homo sapiens
  misc_RNA (1)...(19): siRNA sense strand
gaacgaaagggcugagaca

SEQ ID NO: 817040 - RNA, 19 nt, Homo sapiens
  misc_RNA (1)...(19): siRNA sense strand
gagcuacugccgccucuaa

SEQ ID NO: 817041 - RNA, 19 nt, Homo sapiens
  misc_RNA (1)...(19): siRNA sense strand
gaauagguccuccaacucu

SEQ ID NO: 817042 - RNA, 19 nt, Homo sapiens
  misc_RNA (1)...(19): siRNA sense strand
gcccuucucugccuacguu

SEQ ID NO: 817043 - RNA, 19 nt, Homo sapiens
  misc_RNA (1)...(19): siRNA sense strand
ggagucagcaucuaguguu

SEQ ID NO: 817044 - RNA, 19 nt, Homo sapiens
  misc_RNA (1)...(19): siRNA sense strand
caaccagucacauggcaua

SEQ ID NO: 817045 - RNA, 19 nt, Homo sapiens
  misc_RNA (1)...(19): siRNA sense strand
cgccuccgcugugguauua

SEQ ID NO: 817046 - RNA, 19 nt, Homo sapiens
  misc_RNA (1)...(19): siRNA sense strand
gggaccaacuccauuucaa

SEQ ID NO: 817047 - RNA, 19 nt, Homo sapiens
  misc_RNA (1)...(19): siRNA sense strand
gguaguuugucuagaugaa

SEQ ID NO: 817048 - RNA, 19 nt, Homo sapiens
  misc_RNA (1)...(19): siRNA sense strand
cagagucaccagaaauuaa

SEQ ID NO: 817049 - RNA, 19 nt, Homo sapiens
  misc_RNA (1)...(19): siRNA sense strand
ggaaacugauaucccucaa

SEQ ID NO: 817050 - RNA, 19 nt, Homo sapiens
  misc_RNA (1)...(19): siRNA sense strand
gaagaacugccagaagaug

SEQ ID NO: 817051 - RNA, 19 nt, Homo sapiens
  misc_RNA (1)...(19): siRNA sense strand
gcuacggcauaacucagua

SEQ ID NO: 817052 - RNA, 19 nt, Homo sapiens
  misc_RNA (1)...(19): siRNA sense strand
ggaagaggaggaggaagaa

SEQ ID NO: 817053 - RNA, 19 nt, Homo sapiens
  misc_RNA (1)...(19): siRNA sense strand
gacgaaaggauugaaggua

SEQ ID NO: 817054 - RNA, 19 nt, Homo sapiens
  misc_RNA (1)...(19): siRNA sense strand
ccacagagucaccagaaau

SEQ ID NO: 817055 - RNA, 19 nt, Homo sapiens
  misc_RNA (1)...(19): siRNA sense strand
ggaagaacugccagaagau

SEQ ID NO: 817056 - RNA, 19 nt, Homo sapiens
  misc_RNA (1)...(19): siRNA sense strand
gguugcagauggagaaagu

SEQ ID NO: 817057 - RNA, 19 nt, Homo sapiens
  misc_RNA (1)...(19): siRNA sense strand
cagaagaugaugaggaaga

SEQ ID NO: 817058 - RNA, 19 nt, Homo sapiens
  misc_RNA (1)...(19): siRNA sense strand
acugauaucccucaauuga

SEQ ID NO: 817059 - RNA, 19 nt, Homo sapiens
  misc_RNA (1)...(19): siRNA sense strand
uaaagugguuucgggacaa

SEQ ID NO: 817060 - RNA, 19 nt, Homo sapiens
  misc_RNA (1)...(19): siRNA sense strand
cccaagggcuacggcauaa

SEQ ID NO: 817061 - RNA, 19 nt, Homo sapiens
  misc_RNA (1)...(19): siRNA sense strand
uuaauugccaguaguugua

SEQ ID NO: 817062 - RNA, 19 nt, Homo sapiens
  misc_RNA (1)...(19): siRNA sense strand
gcauuaauugccaguaguu

SEQ ID NO: 817063 - RNA, 19 nt, Homo sapiens
  misc_RNA (1)...(19): siRNA sense strand
ugagaucauucagugguuu

SEQ ID NO: 817064 - RNA, 19 nt, Homo sapiens
  misc_RNA (1)...(19): siRNA sense strand
uagcagacauugcccuucu

SEQ ID NO: 817065 - RNA, 19 nt, Homo sapiens
  misc_RNA (1)...(19): siRNA sense strand
gaggccagcggucucagua

SEQ ID NO: 817066 - RNA, 19 nt, Homo sapiens
  misc_RNA (1)...(19): siRNA sense strand
ggaggaagaacugccagaa

SEQ ID NO: 817067 - RNA, 19 nt, Homo sapiens
  misc_RNA (1)...(19): siRNA sense strand
gagcaaguugguauuggaa

SEQ ID NO: 817068 - RNA, 19 nt, Homo sapiens
  misc_RNA (1)...(19): siRNA sense strand
ucaauugagucaggcauca

SEQ ID NO: 817069 - RNA, 19 nt, Homo sapiens
  misc_RNA (1)...(19): siRNA sense strand
gccacagagucaccagaaa

SEQ ID NO: 817070 - RNA, 19 nt, Homo sapiens
  misc_RNA (1)...(19): siRNA sense strand
gcaagccuacccagacgaa

SEQ ID NO: 817071 - RNA, 19 nt, Homo sapiens
  misc_RNA (1)...(19): siRNA sense strand
guuauggguugcagaugga

SEQ ID NO: 817072 - RNA, 19 nt, Homo sapiens
  misc_RNA (1)...(19): siRNA sense strand
ggaauagguccuccaacuc

SEQ ID NO: 817073 - RNA, 19 nt, Homo sapiens
  misc_RNA (1)...(19): siRNA sense strand
cagcuacgggaaacugaua

SEQ ID NO: 817074 - RNA, 19 nt, Homo sapiens
  misc_RNA (1)...(19): siRNA sense strand
gacacacgcuaugccuuga

SEQ ID NO: 817075 - RNA, 19 nt, Homo sapiens
  misc_RNA (1)...(19): siRNA sense strand
ccagucacauggcauaggu

SEQ ID NO: 817076 - RNA, 19 nt, Homo sapiens
  misc_RNA (1)...(19): siRNA sense strand
cacagagucaccagaaauu

SEQ ID NO: 817077 - RNA, 19 nt, Homo sapiens
  misc_RNA (1)...(19): siRNA sense strand
gaaacugauaucccucaau

SEQ ID NO: 817078 - RNA, 19 nt, Homo sapiens
  misc_RNA (1)...(19): siRNA sense strand
ggccagcggucucaguagu

SEQ ID NO: 817079 - RNA, 19 nt, Homo sapiens
  misc_RNA (1)...(19): siRNA sense strand
acagagucaccagaaauua

SEQ ID NO: 817080 - RNA, 19 nt, Homo sapiens
  misc_RNA (1)...(19): siRNA sense strand
gcagauggagaaagucaag

SEQ ID NO: 817081 - RNA, 19 nt, Homo sapiens
  misc_RNA (1)...(19): siRNA sense strand
gaugugaucauacaagacu

SEQ ID NO: 817082 - RNA, 19 nt, Homo sapiens
  misc_RNA (1)...(19): siRNA sense strand
ggaggaggaagaugaugau

SEQ ID NO: 817083 - RNA, 19 nt, Homo sapiens
  misc_RNA (1)...(19): siRNA sense strand
agagucaccagaaauuaaa

SEQ ID NO: 817084 - RNA, 19 nt, Homo sapiens
  misc_RNA (1)...(19): siRNA sense strand
caaugaacaccugcucaaa

SEQ ID NO: 817085 - RNA, 19 nt, Homo sapiens
  misc_RNA (1)...(19): siRNA sense strand
uagcuggucaucugaagaa

SEQ ID NO: 817086 - RNA, 19 nt, Homo sapiens
  misc_RNA (1)...(19): siRNA sense strand
aagaugaugaugaugauga

SEQ ID NO: 817087 - RNA, 19 nt, Homo sapiens
  misc_RNA (1)...(19): siRNA sense strand
uaguuugucuagaugaaga

SEQ ID NO: 817088 - RNA, 19 nt, Homo sapiens
  misc_RNA (1)...(19): siRNA sense strand
agagcaaguugguauugga

SEQ ID NO: 817089 - RNA, 19 nt, Homo sapiens
  misc_RNA (1)...(19): siRNA sense strand
acagaucacugguuuaccu

SEQ ID NO: 817090 - RNA, 19 nt, Homo sapiens
  misc_RNA (1)...(19): siRNA sense strand
ggaggaggaggaagaugau

SEQ ID NO: 817091 - RNA, 19 nt, Homo sapiens
  misc_RNA (1)...(19): siRNA sense strand
gcaggugcuggauugguuu

SEQ ID NO: 817092 - RNA, 19 nt, Homo sapiens
  misc_RNA (1)...(19): siRNA sense strand
caagacccagcaauuccua

SEQ ID NO: 817093 - RNA, 19 nt, Homo sapiens
  misc_RNA (1)...(19): siRNA sense strand
uccaaucucugaggagcua

SEQ ID NO: 817094 - RNA, 19 nt, Homo sapiens
  misc_RNA (1)...(19): siRNA sense strand
ccagcggucucaguaguuc

SEQ ID NO: 817095 - RNA, 19 nt, Homo sapiens
  misc_RNA (1)...(19): siRNA sense strand
aggaagaugaugaugauga

SEQ ID NO: 817096 - RNA, 19 nt, Homo sapiens
  misc_RNA (1)...(19): siRNA sense strand
gaggaagaacugccagaag

SEQ ID NO: 817097 - RNA, 19 nt, Homo sapiens
  misc_RNA (1)...(19): siRNA sense strand
caacagcuacgggaaacug

SEQ ID NO: 817098 - RNA, 19 nt, Homo sapiens
  misc_RNA (1)...(19): siRNA sense strand
uacaacccuuggagaggua

SEQ ID NO: 817099 - RNA, 19 nt, Homo sapiens
  misc_RNA (1)...(19): siRNA sense strand
uggcuauccuuaaauccuu

SEQ ID NO: 817100 - RNA, 19 nt, Homo sapiens
  misc_RNA (1)...(19): siRNA sense strand
ggucaucugaagaaauaga

SEQ ID NO: 817101 - RNA, 19 nt, Homo sapiens
  misc_RNA (1)...(19): siRNA sense strand
caucugaagaaauagaaga

SEQ ID NO: 817102 - RNA, 19 nt, Homo sapiens
  misc_RNA (1)...(19): siRNA sense strand
gaacugccagaagaugaug

SEQ ID NO: 817103 - RNA, 19 nt, Homo sapiens
  misc_RNA (1)...(19): siRNA sense strand
gugguaguuugucuagaug

SEQ ID NO: 817104 - RNA, 19 nt, Homo sapiens
  misc_RNA (1)...(19): siRNA sense strand
ucacauggcauagguacug

SEQ ID NO: 817105 - RNA, 19 nt, Homo sapiens
  misc_RNA (1)...(19): siRNA sense strand
ccagagcaaguugguauug

SEQ ID NO: 817106 - RNA, 19 nt, Homo sapiens
  misc_RNA (1)...(19): siRNA sense strand
caaaucccuucucucuuuu

SEQ ID NO: 817107 - RNA, 19 nt, Homo sapiens
  misc_RNA (1)...(19): siRNA sense strand
ugaugaugaugaugugauc

SEQ ID NO: 817108 - RNA, 19 nt, Homo sapiens
  misc_RNA (1)...(19): siRNA sense strand
ugaugaugaugaugaugug

SEQ ID NO: 817109 - RNA, 19 nt, Homo sapiens
  misc_RNA (1)...(19): siRNA sense strand
gaagcaugggcaacuaaag

SEQ ID NO: 817110 - RNA, 19 nt, Homo sapiens
  misc_RNA (1)...(19): siRNA sense strand
ggcuauccuuaaauccuuu

SEQ ID NO: 817111 - RNA, 19 nt, Homo sapiens
  misc_RNA (1)...(19): siRNA sense strand
gcgaaagaccaagcgcaaa

SEQ ID NO: 817112 - RNA, 19 nt, Homo sapiens
  misc_RNA (1)...(19): siRNA sense strand
gagcuagacagcaaugaac

SEQ ID NO: 817113 - RNA, 19 nt, Homo sapiens
  misc_RNA (1)...(19): siRNA sense strand
ugaugaugaugaugaugau

SEQ ID NO: 817114 - RNA, 19 nt, Homo sapiens
  misc_RNA (1)...(19): siRNA sense strand
ggaagaaagucguggauuu

SEQ ID NO: 817115 - RNA, 19 nt, Homo sapiens
  misc_RNA (1)...(19): siRNA sense strand
gaauuuagaugaugcugua

SEQ ID NO: 817116 - RNA, 19 nt, Homo sapiens
  misc_RNA (1)...(19): siRNA sense strand
gaagaucuauccuugugua

SEQ ID NO: 817117 - RNA, 19 nt, Homo sapiens
  misc_RNA (1)...(19): siRNA sense strand
ggaauaaucuuugcugaga

SEQ ID NO: 817118 - RNA, 19 nt, Homo sapiens
  misc_RNA (1)...(19): siRNA sense strand
caagaagucugaagaucua

SEQ ID NO: 817119 - RNA, 19 nt, Homo sapiens
  misc_RNA (1)...(19): siRNA sense strand
caaacuauauggaaagaga

SEQ ID NO: 817120 - RNA, 19 nt, Homo sapiens
  misc_RNA (1)...(19): siRNA sense strand
ggaaagagacaagaaauau

SEQ ID NO: 817121 - RNA, 19 nt, Homo sapiens
  misc_RNA (1)...(19): siRNA sense strand
caagaaauaugguacaaag

SEQ ID NO: 817122 - RNA, 19 nt, Homo sapiens
  misc_RNA (1)...(19): siRNA sense strand
gaucuauccuuguguaaug

SEQ ID NO: 817123 - RNA, 19 nt, Homo sapiens
  misc_RNA (1)...(19): siRNA sense strand
caagaugacuuugguauca

SEQ ID NO: 817124 - RNA, 19 nt, Homo sapiens
  misc_RNA (1)...(19): siRNA sense strand
gaagagauguuugaagaag

SEQ ID NO: 817125 - RNA, 19 nt, Homo sapiens
  misc_RNA (1)...(19): siRNA sense strand
ggauacaaguccaggauau

SEQ ID NO: 817126 - RNA, 19 nt, Homo sapiens
  misc_RNA (1)...(19): siRNA sense strand
gaaauaugguacaaagaca

SEQ ID NO: 817127 - RNA, 19 nt, Homo sapiens
  misc_RNA (1)...(19): siRNA sense strand
gcagacagcauuuacagaa

SEQ ID NO: 817128 - RNA, 19 nt, Homo sapiens
  misc_RNA (1)...(19): siRNA sense strand
agaagaagcugaagaagag

SEQ ID NO: 817129 - RNA, 19 nt, Homo sapiens
  misc_RNA (1)...(19): siRNA sense strand
uggaagagauguuugaaga

SEQ ID NO: 817130 - RNA, 19 nt, Homo sapiens
  misc_RNA (1)...(19): siRNA sense strand
agagauacuugguguaauu

SEQ ID NO: 817131 - RNA, 19 nt, Homo sapiens
  misc_RNA (1)...(19): siRNA sense strand
gauauugcaugcagaagau

SEQ ID NO: 817132 - RNA, 19 nt, Homo sapiens
  misc_RNA (1)...(19): siRNA sense strand
gacagcauuuacagaauuu

SEQ ID NO: 817133 - RNA, 19 nt, Homo sapiens
  misc_RNA (1)...(19): siRNA sense strand
gaaagagacaagaaauaug

SEQ ID NO: 817134 - RNA, 19 nt, Homo sapiens
  misc_RNA (1)...(19): siRNA sense strand
uggacaaucuuauuacuga

SEQ ID NO: 817135 - RNA, 19 nt, Homo sapiens
  misc_RNA (1)...(19): siRNA sense strand
auaaauuccugcccucuuu

SEQ ID NO: 817136 - RNA, 19 nt, Homo sapiens
  misc_RNA (1)...(19): siRNA sense strand
agacagcauuuacagaauu

SEQ ID NO: 817137 - RNA, 19 nt, Homo sapiens
  misc_RNA (1)...(19): siRNA sense strand
uaagagauacuugguguaa

SEQ ID NO: 817138 - RNA, 19 nt, Homo sapiens
  misc_RNA (1)...(19): siRNA sense strand
guaaaugggucugcaugga

SEQ ID NO: 817139 - RNA, 19 nt, Homo sapiens
  misc_RNA (1)...(19): siRNA sense strand
cuaaugaacuccguuaaca

SEQ ID NO: 817140 - RNA, 19 nt, Homo sapiens
  misc_RNA (1)...(19): siRNA sense strand
ccucaaauuugugauauug

SEQ ID NO: 817141 - RNA, 19 nt, Homo sapiens
  misc_RNA (1)...(19): siRNA sense strand
gguguaauuuccaguucua

SEQ ID NO: 817142 - RNA, 19 nt, Homo sapiens
  misc_RNA (1)...(19): siRNA sense strand
uaucaaacccggaauaauc

SEQ ID NO: 817143 - RNA, 19 nt, Homo sapiens
  misc_RNA (1)...(19): siRNA sense strand
gacaagaaauaugguacaa

SEQ ID NO: 817144 - RNA, 19 nt, Homo sapiens
  misc_RNA (1)...(19): siRNA sense strand
ugaagaagaagcugaagaa

SEQ ID NO: 817145 - RNA, 19 nt, Homo sapiens
  misc_RNA (1)...(19): siRNA sense strand
uuaacaggcagcauaaaua

SEQ ID NO: 817146 - RNA, 19 nt, Homo sapiens
  misc_RNA (1)...(19): siRNA sense strand
agagauguuugaagaagaa

SEQ ID NO: 817147 - RNA, 19 nt, Homo sapiens
  misc_RNA (1)...(19): siRNA sense strand
ggaagagauguuugaagaa

SEQ ID NO: 817148 - RNA, 19 nt, Homo sapiens
  misc_RNA (1)...(19): siRNA sense strand
gcuacaagaugacuuuggu

SEQ ID NO: 817149 - RNA, 19 nt, Homo sapiens
  misc_RNA (1)...(19): siRNA sense strand
cagaagaugacacagauga

SEQ ID NO: 817150 - RNA, 19 nt, Homo sapiens
  misc_RNA (1)...(19): siRNA sense strand
caucaaugccuuagaggaa

SEQ ID NO: 817151 - RNA, 19 nt, Homo sapiens
  misc_RNA (1)...(19): siRNA sense strand
gcauaaauacaacucuguu

SEQ ID NO: 817152 - RNA, 19 nt, Homo sapiens
  misc_RNA (1)...(19): siRNA sense strand
caacaaacuauauggaaag

SEQ ID NO: 817153 - RNA, 19 nt, Homo sapiens
  misc_RNA (1)...(19): siRNA sense strand
caggauaucaugagucaga

SEQ ID NO: 817154 - RNA, 19 nt, Homo sapiens
  misc_RNA (1)...(19): siRNA sense strand
uggaaagagacaagaaaua

SEQ ID NO: 817155 - RNA, 19 nt, Homo sapiens
  misc_RNA (1)...(19): siRNA sense strand
uggauuuccuacacaagua

SEQ ID NO: 817156 - RNA, 19 nt, Homo sapiens
  misc_RNA (1)...(19): siRNA sense strand
gguaucaaacccggaauaa

SEQ ID NO: 817157 - RNA, 19 nt, Homo sapiens
  misc_RNA (1)...(19): siRNA sense strand
ugagucagauuccaagaag

SEQ ID NO: 817158 - RNA, 19 nt, Homo sapiens
  misc_RNA (1)...(19): siRNA sense strand
cugaagaucuauccuugug

SEQ ID NO: 817159 - RNA, 19 nt, Homo sapiens
  misc_RNA (1)...(19): siRNA sense strand
gagcguggaagagauguuu

SEQ ID NO: 817160 - RNA, 19 nt, Homo sapiens
  misc_RNA (1)...(19): siRNA sense strand
gaagaugacacagaugaag

SEQ ID NO: 817161 - RNA, 19 nt, Homo sapiens
  misc_RNA (1)...(19): siRNA sense strand
uaacaggcagcauaaauac

SEQ ID NO: 817162 - RNA, 19 nt, Homo sapiens
  misc_RNA (1)...(19): siRNA sense strand
aagaagaagcugaagaaga

SEQ ID NO: 817163 - RNA, 19 nt, Homo sapiens
  misc_RNA (1)...(19): siRNA sense strand
aaagagacaagaaauaugg

SEQ ID NO: 817164 - RNA, 19 nt, Homo sapiens
  misc_RNA (1)...(19): siRNA sense strand
gauaucaugagucagauuc

SEQ ID NO: 817165 - RNA, 19 nt, Homo sapiens
  misc_RNA (1)...(19): siRNA sense strand
gagauacuugguguaauuu

SEQ ID NO: 817166 - RNA, 19 nt, Homo sapiens
  misc_RNA (1)...(19): siRNA sense strand
cagacagcauuuacagaau

SEQ ID NO: 817167 - RNA, 19 nt, Homo sapiens
  misc_RNA (1)...(19): siRNA sense strand
guuaacaggcagcauaaau

SEQ ID NO: 817168 - RNA, 19 nt, Homo sapiens
  misc_RNA (1)...(19): siRNA sense strand
ccaagaagucugaagaucu

SEQ ID NO: 817169 - RNA, 19 nt, Homo sapiens
  misc_RNA (1)...(19): siRNA sense strand
ccaaaccaucaaugccuua

SEQ ID NO: 817170 - RNA, 19 nt, Homo sapiens
  misc_RNA (1)...(19): siRNA sense strand
guaauuuccaguucuauac

SEQ ID NO: 817171 - RNA, 19 nt, Homo sapiens
  misc_RNA (1)...(19): siRNA sense strand
cacaacaaacuauauggaa

SEQ ID NO: 817172 - RNA, 19 nt, Homo sapiens
  misc_RNA (1)...(19): siRNA sense strand
gagcacagcaauacaacag

SEQ ID NO: 817173 - RNA, 19 nt, Homo sapiens
  misc_RNA (1)...(19): siRNA sense strand
ucaaugccuuagaggaaga

SEQ ID NO: 817174 - RNA, 19 nt, Homo sapiens
  misc_RNA (1)...(19): siRNA sense strand
caaacccggaauaaucuuu

SEQ ID NO: 817175 - RNA, 19 nt, Homo sapiens
  misc_RNA (1)...(19): siRNA sense strand
ugcagaagaugacacagau

SEQ ID NO: 817176 - RNA, 19 nt, Homo sapiens
  misc_RNA (1)...(19): siRNA sense strand
acaggcagcauaaauacaa

SEQ ID NO: 817177 - RNA, 19 nt, Homo sapiens
  misc_RNA (1)...(19): siRNA sense strand
uccaggauaucaugaguca

SEQ ID NO: 817178 - RNA, 19 nt, Homo sapiens
  misc_RNA (1)...(19): siRNA sense strand
ugcauggacaaucuuauua

SEQ ID NO: 817179 - RNA, 19 nt, Homo sapiens
  misc_RNA (1)...(19): siRNA sense strand
uagaugaugcuguaaaugg

SEQ ID NO: 817180 - RNA, 19 nt, Homo sapiens
  misc_RNA (1)...(19): siRNA sense strand
agacacaacaaacuauaug

SEQ ID NO: 817181 - RNA, 19 nt, Homo sapiens
  misc_RNA (1)...(19): siRNA sense strand
aagagauguuugaagaaga

SEQ ID NO: 817182 - RNA, 19 nt, Homo sapiens
  misc_RNA (1)...(19): siRNA sense strand
gaagaagaagcugaagaag

SEQ ID NO: 817183 - RNA, 19 nt, Homo sapiens
  misc_RNA (1)...(19): siRNA sense strand
guuccucaaauuugugaua

SEQ ID NO: 817184 - RNA, 19 nt, Homo sapiens
  misc_RNA (1)...(19): siRNA sense strand
ucaggagucuguguauaag

SEQ ID NO: 817185 - RNA, 19 nt, Homo sapiens
  misc_RNA (1)...(19): siRNA sense strand
uuucaggagucuguguaua

SEQ ID NO: 817186 - RNA, 19 nt, Homo sapiens
  misc_RNA (1)...(19): siRNA sense strand
uucuauacgucccuaauga

SEQ ID NO: 817187 - RNA, 19 nt, Homo sapiens
  misc_RNA (1)...(19): siRNA sense strand
gcauggacaaucuuauuac

SEQ ID NO: 817188 - RNA, 19 nt, Homo sapiens
  misc_RNA (1)...(19): siRNA sense strand
guauaagacacaacaaacu

SEQ ID NO: 817189 - RNA, 19 nt, Homo sapiens
  misc_RNA (1)...(19): siRNA sense strand
uauggaaagagacaagaaa

SEQ ID NO: 817190 - RNA, 19 nt, Homo sapiens
  misc_RNA (1)...(19): siRNA sense strand
gauacuugguguaauuucc

SEQ ID NO: 817191 - RNA, 19 nt, Homo sapiens
  misc_RNA (1)...(19): siRNA sense strand
ggauaucaugagucagauu

SEQ ID NO: 817192 - RNA, 19 nt, Homo sapiens
  misc_RNA (1)...(19): siRNA sense strand
uucaggagucuguguauaa

SEQ ID NO: 817193 - RNA, 19 nt, Homo sapiens
  misc_RNA (1)...(19): siRNA sense strand
cauggacaaucuuauuacu

SEQ ID NO: 817194 - RNA, 19 nt, Homo sapiens
  misc_RNA (1)...(19): siRNA sense strand
ccauguggcagacagcauu

SEQ ID NO: 817195 - RNA, 19 nt, Homo sapiens
  misc_RNA (1)...(19): siRNA sense strand
ugauauugcaugcagaaga

SEQ ID NO: 817196 - RNA, 19 nt, Homo sapiens
  misc_RNA (1)...(19): siRNA sense strand
agaaauaugguacaaagac

SEQ ID NO: 817197 - RNA, 19 nt, Homo sapiens
  misc_RNA (1)...(19): siRNA sense strand
acacaacaaacuauaugga

SEQ ID NO: 817198 - RNA, 19 nt, Homo sapiens
  misc_RNA (1)...(19): siRNA sense strand
cugcauggacaaucuuauu

SEQ ID NO: 817199 - RNA, 19 nt, Homo sapiens
  misc_RNA (1)...(19): siRNA sense strand
gcaugcagaagaugacaca

SEQ ID NO: 817200 - RNA, 19 nt, Homo sapiens
  misc_RNA (1)...(19): siRNA sense strand
gcagaagaugacacagaug

SEQ ID NO: 817201 - RNA, 19 nt, Homo sapiens
  misc_RNA (1)...(19): siRNA sense strand
agagacaagaaauauggua

SEQ ID NO: 817202 - RNA, 19 nt, Homo sapiens
  misc_RNA (1)...(19): siRNA sense strand
uacaagaugacuuugguau

SEQ ID NO: 817203 - RNA, 19 nt, Homo sapiens
  misc_RNA (1)...(19): siRNA sense strand
cagaugaagcccucagagu

SEQ ID NO: 817204 - RNA, 19 nt, Homo sapiens
  misc_RNA (1)...(19): siRNA sense strand
gcguggaagagauguuuga

SEQ ID NO: 817205 - RNA, 19 nt, Homo sapiens
  misc_RNA (1)...(19): siRNA sense strand
aaccaucaaugccuuagag

SEQ ID NO: 817206 - RNA, 19 nt, Homo sapiens
  misc_RNA (1)...(19): siRNA sense strand
cuacaagaugacuuuggua

SEQ ID NO: 817207 - RNA, 19 nt, Homo sapiens
  misc_RNA (1)...(19): siRNA sense strand
guucuauacgucccuaaug

SEQ ID NO: 817208 - RNA, 19 nt, Homo sapiens
  misc_RNA (1)...(19): siRNA sense strand
gaggaagaaagucguggau

SEQ ID NO: 817209 - RNA, 19 nt, Homo sapiens
  misc_RNA (1)...(19): siRNA sense strand
aagaugacuuugguaucaa

SEQ ID NO: 817210 - RNA, 19 nt, Homo sapiens
  misc_RNA (1)...(19): siRNA sense strand
auacgucccuaaugaacuc

SEQ ID NO: 817211 - RNA, 19 nt, Homo sapiens
  misc_RNA (1)...(19): siRNA sense strand
caaucuuauuacugacuga

SEQ ID NO: 817212 - RNA, 19 nt, Homo sapiens
  misc_RNA (1)...(19): siRNA sense strand
guaucaaacccggaauaau

SEQ ID NO: 817213 - RNA, 19 nt, Homo sapiens
  misc_RNA (1)...(19): siRNA sense strand
uccaagaagucugaagauc

SEQ ID NO: 817214 - RNA, 19 nt, Homo sapiens
  misc_RNA (1)...(19): siRNA sense strand
ggaagaaagucguggauuu

SEQ ID NO: 817215 - RNA, 19 nt, Homo sapiens
  misc_RNA (1)...(19): siRNA sense strand
gaauuuagaugaugcugua

SEQ ID NO: 817216 - RNA, 19 nt, Homo sapiens
  misc_RNA (1)...(19): siRNA sense strand
gaagaucuauccuugugua

SEQ ID NO: 817217 - RNA, 19 nt, Homo sapiens
  misc_RNA (1)...(19): siRNA sense strand
ggaauaaucuuugcugaga

SEQ ID NO: 817218 - RNA, 19 nt, Homo sapiens
  misc_RNA (1)...(19): siRNA sense strand
caagaagucugaagaucua

SEQ ID NO: 817219 - RNA, 19 nt, Homo sapiens
  misc_RNA (1)...(19): siRNA sense strand
caaacuauauggaaagaga

SEQ ID NO: 817220 - RNA, 19 nt, Homo sapiens
  misc_RNA (1)...(19): siRNA sense strand
ggaaagagacaagaaauau

SEQ ID NO: 817221 - RNA, 19 nt, Homo sapiens
  misc_RNA (1)...(19): siRNA sense strand
caagaaauaugguacaaag

SEQ ID NO: 817222 - RNA, 19 nt, Homo sapiens
  misc_RNA (1)...(19): siRNA sense strand
gaucuauccuuguguaaug

SEQ ID NO: 817223 - RNA, 19 nt, Homo sapiens
  misc_RNA (1)...(19): siRNA sense strand
caagaugacuuugguauca

SEQ ID NO: 817224 - RNA, 19 nt, Homo sapiens
  misc_RNA (1)...(19): siRNA sense strand
gaagagauguuugaagaag

SEQ ID NO: 817225 - RNA, 19 nt, Homo sapiens
  misc_RNA (1)...(19): siRNA sense strand
ggauacaaguccaggauau

SEQ ID NO: 817226 - RNA, 19 nt, Homo sapiens
  misc_RNA (1)...(19): siRNA sense strand
gaaauaugguacaaagaca

SEQ ID NO: 817227 - RNA, 19 nt, Homo sapiens
  misc_RNA (1)...(19): siRNA sense strand
gcagacagcauuuacagaa

SEQ ID NO: 817228 - RNA, 19 nt, Homo sapiens
  misc_RNA (1)...(19): siRNA sense strand
agaagaagcugaagaagag

SEQ ID NO: 817229 - RNA, 19 nt, Homo sapiens
  misc_RNA (1)...(19): siRNA sense strand
uggaagagauguuugaaga

SEQ ID NO: 817230 - RNA, 19 nt, Homo sapiens
  misc_RNA (1)...(19): siRNA sense strand
agagauacuugguguaauu

SEQ ID NO: 817231 - RNA, 19 nt, Homo sapiens
  misc_RNA (1)...(19): siRNA sense strand
gauauugcaugcagaagau

SEQ ID NO: 817232 - RNA, 19 nt, Homo sapiens
  misc_RNA (1)...(19): siRNA sense strand
gacagcauuuacagaauuu

SEQ ID NO: 817233 - RNA, 19 nt, Homo sapiens
  misc_RNA (1)...(19): siRNA sense strand
gaaagagacaagaaauaug

SEQ ID NO: 817234 - RNA, 19 nt, Homo sapiens
  misc_RNA (1)...(19): siRNA sense strand
uggacaaucuuauuacuga

SEQ ID NO: 817235 - RNA, 19 nt, Homo sapiens
  misc_RNA (1)...(19): siRNA sense strand
auaaauuccugcccucuuu

SEQ ID NO: 817236 - RNA, 19 nt, Homo sapiens
  misc_RNA (1)...(19): siRNA sense strand
agacagcauuuacagaauu

SEQ ID NO: 817237 - RNA, 19 nt, Homo sapiens
  misc_RNA (1)...(19): siRNA sense strand
uaagagauacuugguguaa

SEQ ID NO: 817238 - RNA, 19 nt, Homo sapiens
  misc_RNA (1)...(19): siRNA sense strand
guaaaugggucugcaugga

SEQ ID NO: 817239 - RNA, 19 nt, Homo sapiens
  misc_RNA (1)...(19): siRNA sense strand
cuaaugaacuccguuaaca

SEQ ID NO: 817240 - RNA, 19 nt, Homo sapiens
  misc_RNA (1)...(19): siRNA sense strand
ccucaaauuugugauauug

SEQ ID NO: 817241 - RNA, 19 nt, Homo sapiens
  misc_RNA (1)...(19): siRNA sense strand
gguguaauuuccaguucua

SEQ ID NO: 817242 - RNA, 19 nt, Homo sapiens
  misc_RNA (1)...(19): siRNA sense strand
uaucaaacccggaauaauc

SEQ ID NO: 817243 - RNA, 19 nt, Homo sapiens
  misc_RNA (1)...(19): siRNA sense strand
gacaagaaauaugguacaa

SEQ ID NO: 817244 - RNA, 19 nt, Homo sapiens
  misc_RNA (1)...(19): siRNA sense strand
ugaagaagaagcugaagaa

SEQ ID NO: 817245 - RNA, 19 nt, Homo sapiens
  misc_RNA (1)...(19): siRNA sense strand
uuaacaggcagcauaaaua

SEQ ID NO: 817246 - RNA, 19 nt, Homo sapiens
  misc_RNA (1)...(19): siRNA sense strand
agagauguuugaagaagaa

SEQ ID NO: 817247 - RNA, 19 nt, Homo sapiens
  misc_RNA (1)...(19): siRNA sense strand
ggaagagauguuugaagaa

SEQ ID NO: 817248 - RNA, 19 nt, Homo sapiens
  misc_RNA (1)...(19): siRNA sense strand
gcuacaagaugacuuuggu

SEQ ID NO: 817249 - RNA, 19 nt, Homo sapiens
  misc_RNA (1)...(19): siRNA sense strand
cagaagaugacacagauga

SEQ ID NO: 817250 - RNA, 19 nt, Homo sapiens
  misc_RNA (1)...(19): siRNA sense strand
caucaaugccuuagaggaa

SEQ ID NO: 817251 - RNA, 19 nt, Homo sapiens
  misc_RNA (1)...(19): siRNA sense strand
gcauaaauacaacucuguu

SEQ ID NO: 817252 - RNA, 19 nt, Homo sapiens
  misc_RNA (1)...(19): siRNA sense strand
caacaaacuauauggaaag

SEQ ID NO: 817253 - RNA, 19 nt, Homo sapiens
  misc_RNA (1)...(19): siRNA sense strand
caggauaucaugagucaga

SEQ ID NO: 817254 - RNA, 19 nt, Homo sapiens
  misc_RNA (1)...(19): siRNA sense strand
uggaaagagacaagaaaua

SEQ ID NO: 817255 - RNA, 19 nt, Homo sapiens
  misc_RNA (1)...(19): siRNA sense strand
uggauuuccuacacaagua

SEQ ID NO: 817256 - RNA, 19 nt, Homo sapiens
  misc_RNA (1)...(19): siRNA sense strand
gguaucaaacccggaauaa

SEQ ID NO: 817257 - RNA, 19 nt, Homo sapiens
  misc_RNA (1)...(19): siRNA sense strand
ugagucagauuccaagaag

SEQ ID NO: 817258 - RNA, 19 nt, Homo sapiens
  misc_RNA (1)...(19): siRNA sense strand
cugaagaucuauccuugug

SEQ ID NO: 817259 - RNA, 19 nt, Homo sapiens
  misc_RNA (1)...(19): siRNA sense strand
gagcguggaagagauguuu

SEQ ID NO: 817260 - RNA, 19 nt, Homo sapiens
  misc_RNA (1)...(19): siRNA sense strand
gaagaugacacagaugaag

SEQ ID NO: 817261 - RNA, 19 nt, Homo sapiens
  misc_RNA (1)...(19): siRNA sense strand
uaacaggcagcauaaauac

SEQ ID NO: 817262 - RNA, 19 nt, Homo sapiens
  misc_RNA (1)...(19): siRNA sense strand
aagaagaagcugaagaaga

SEQ ID NO: 817263 - RNA, 19 nt, Homo sapiens
  misc_RNA (1)...(19): siRNA sense strand
aaagagacaagaaauaugg

SEQ ID NO: 817264 - RNA, 19 nt, Homo sapiens
  misc_RNA (1)...(19): siRNA sense strand
gauaucaugagucagauuc

SEQ ID NO: 817265 - RNA, 19 nt, Homo sapiens
  misc_RNA (1)...(19): siRNA sense strand
gagauacuugguguaauuu

SEQ ID NO: 817266 - RNA, 19 nt, Homo sapiens
  misc_RNA (1)...(19): siRNA sense strand
cagacagcauuuacagaau

SEQ ID NO: 817267 - RNA, 19 nt, Homo sapiens
  misc_RNA (1)...(19): siRNA sense strand
guuaacaggcagcauaaau

SEQ ID NO: 817268 - RNA, 19 nt, Homo sapiens
  misc_RNA (1)...(19): siRNA sense strand
ccaagaagucugaagaucu

SEQ ID NO: 817269 - RNA, 19 nt, Homo sapiens
  misc_RNA (1)...(19): siRNA sense strand
ccaaaccaucaaugccuua

SEQ ID NO: 817270 - RNA, 19 nt, Homo sapiens
  misc_RNA (1)...(19): siRNA sense strand
guaauuuccaguucuauac

SEQ ID NO: 817271 - RNA, 19 nt, Homo sapiens
  misc_RNA (1)...(19): siRNA sense strand
cacaacaaacuauauggaa

SEQ ID NO: 817272 - RNA, 19 nt, Homo sapiens
  misc_RNA (1)...(19): siRNA sense strand
gagcacagcaauacaacag

SEQ ID NO: 817273 - RNA, 19 nt, Homo sapiens
  misc_RNA (1)...(19): siRNA sense strand
ucaaugccuuagaggaaga

SEQ ID NO: 817274 - RNA, 19 nt, Homo sapiens
  misc_RNA (1)...(19): siRNA sense strand
caaacccggaauaaucuuu

SEQ ID NO: 817275 - RNA, 19 nt, Homo sapiens
  misc_RNA (1)...(19): siRNA sense strand
ugcagaagaugacacagau

SEQ ID NO: 817276 - RNA, 19 nt, Homo sapiens
  misc_RNA (1)...(19): siRNA sense strand
acaggcagcauaaauacaa

SEQ ID NO: 817277 - RNA, 19 nt, Homo sapiens
  misc_RNA (1)...(19): siRNA sense strand
uccaggauaucaugaguca

SEQ ID NO: 817278 - RNA, 19 nt, Homo sapiens
  misc_RNA (1)...(19): siRNA sense strand
ugcauggacaaucuuauua

SEQ ID NO: 817279 - RNA, 19 nt, Homo sapiens
  misc_RNA (1)...(19): siRNA sense strand
uagaugaugcuguaaaugg

SEQ ID NO: 817280 - RNA, 19 nt, Homo sapiens
  misc_RNA (1)...(19): siRNA sense strand
agacacaacaaacuauaug

SEQ ID NO: 817281 - RNA, 19 nt, Homo sapiens
  misc_RNA (1)...(19): siRNA sense strand
aagagauguuugaagaaga

SEQ ID NO: 817282 - RNA, 19 nt, Homo sapiens
  misc_RNA (1)...(19): siRNA sense strand
gaagaagaagcugaagaag

SEQ ID NO: 817283 - RNA, 19 nt, Homo sapiens
  misc_RNA (1)...(19): siRNA sense strand
guuccucaaauuugugaua

SEQ ID NO: 817284 - RNA, 19 nt, Homo sapiens
  misc_RNA (1)...(19): siRNA sense strand
ucaggagucuguguauaag

SEQ ID NO: 817285 - RNA, 19 nt, Homo sapiens
  misc_RNA (1)...(19): siRNA sense strand
uuucaggagucuguguaua

SEQ ID NO: 817286 - RNA, 19 nt, Homo sapiens
  misc_RNA (1)...(19): siRNA sense strand
uucuauacgucccuaauga

SEQ ID NO: 817287 - RNA, 19 nt, Homo sapiens
  misc_RNA (1)...(19): siRNA sense strand
gcauggacaaucuuauuac

SEQ ID NO: 817288 - RNA, 19 nt, Homo sapiens
  misc_RNA (1)...(19): siRNA sense strand
guauaagacacaacaaacu

SEQ ID NO: 817289 - RNA, 19 nt, Homo sapiens
  misc_RNA (1)...(19): siRNA sense strand
uauggaaagagacaagaaa

SEQ ID NO: 817290 - RNA, 19 nt, Homo sapiens
  misc_RNA (1)...(19): siRNA sense strand
gauacuugguguaauuucc

SEQ ID NO: 817291 - RNA, 19 nt, Homo sapiens
  misc_RNA (1)...(19): siRNA sense strand
ggauaucaugagucagauu

SEQ ID NO: 817292 - RNA, 19 nt, Homo sapiens
  misc_RNA (1)...(19): siRNA sense strand
uucaggagucuguguauaa

SEQ ID NO: 817293 - RNA, 19 nt, Homo sapiens
  misc_RNA (1)...(19): siRNA sense strand
cauggacaaucuuauuacu

SEQ ID NO: 817294 - RNA, 19 nt, Homo sapiens
  misc_RNA (1)...(19): siRNA sense strand
ccauguggcagacagcauu

SEQ ID NO: 817295 - RNA, 19 nt, Homo sapiens
  misc_RNA (1)...(19): siRNA sense strand
ugauauugcaugcagaaga

SEQ ID NO: 817296 - RNA, 19 nt, Homo sapiens
  misc_RNA (1)...(19): siRNA sense strand
agaaauaugguacaaagac

SEQ ID NO: 817297 - RNA, 19 nt, Homo sapiens
  misc_RNA (1)...(19): siRNA sense strand
acacaacaaacuauaugga

SEQ ID NO: 817298 - RNA, 19 nt, Homo sapiens
  misc_RNA (1)...(19): siRNA sense strand
cugcauggacaaucuuauu

SEQ ID NO: 817299 - RNA, 19 nt, Homo sapiens
  misc_RNA (1)...(19): siRNA sense strand
gcaugcagaagaugacaca

SEQ ID NO: 817300 - RNA, 19 nt, Homo sapiens
  misc_RNA (1)...(19): siRNA sense strand
gcagaagaugacacagaug

SEQ ID NO: 817301 - RNA, 19 nt, Homo sapiens
  misc_RNA (1)...(19): siRNA sense strand
agagacaagaaauauggua

SEQ ID NO: 817302 - RNA, 19 nt, Homo sapiens
  misc_RNA (1)...(19): siRNA sense strand
uacaagaugacuuugguau

SEQ ID NO: 817303 - RNA, 19 nt, Homo sapiens
  misc_RNA (1)...(19): siRNA sense strand
cagaugaagcccucagagu

SEQ ID NO: 817304 - RNA, 19 nt, Homo sapiens
  misc_RNA (1)...(19): siRNA sense strand
gcguggaagagauguuuga

SEQ ID NO: 817305 - RNA, 19 nt, Homo sapiens
  misc_RNA (1)...(19): siRNA sense strand
aaccaucaaugccuuagag

SEQ ID NO: 817306 - RNA, 19 nt, Homo sapiens
  misc_RNA (1)...(19): siRNA sense strand
cuacaagaugacuuuggua

SEQ ID NO: 817307 - RNA, 19 nt, Homo sapiens
  misc_RNA (1)...(19): siRNA sense strand
guucuauacgucccuaaug

SEQ ID NO: 817308 - RNA, 19 nt, Homo sapiens
  misc_RNA (1)...(19): siRNA sense strand
gaggaagaaagucguggau

SEQ ID NO: 817309 - RNA, 19 nt, Homo sapiens
  misc_RNA (1)...(19): siRNA sense strand
aagaugacuuugguaucaa

SEQ ID NO: 817310 - RNA, 19 nt, Homo sapiens
  misc_RNA (1)...(19): siRNA sense strand
auacgucccuaaugaacuc

SEQ ID NO: 817311 - RNA, 19 nt, Homo sapiens
  misc_RNA (1)...(19): siRNA sense strand
caaucuuauuacugacuga

SEQ ID NO: 817312 - RNA, 19 nt, Homo sapiens
  misc_RNA (1)...(19): siRNA sense strand
guaucaaacccggaauaau

SEQ ID NO: 817313 - RNA, 19 nt, Homo sapiens
  misc_RNA (1)...(19): siRNA sense strand
uccaagaagucugaagauc

SEQ ID NO: 817314 - RNA, 19 nt, Homo sapiens
  misc_RNA (1)...(19): siRNA sense strand
ggacgacacuucaauuauu

SEQ ID NO: 817315 - RNA, 19 nt, Homo sapiens
  misc_RNA (1)...(19): siRNA sense strand
aaacuaugguguucucuua

SEQ ID NO: 817316 - RNA, 19 nt, Homo sapiens
  misc_RNA (1)...(19): siRNA sense strand
cagaugaaguugccacaua

SEQ ID NO: 817317 - RNA, 19 nt, Homo sapiens
  misc_RNA (1)...(19): siRNA sense strand
gauaaaggauggugguuca

SEQ ID NO: 817318 - RNA, 19 nt, Homo sapiens
  misc_RNA (1)...(19): siRNA sense strand
gacgacacuucaauuauuu

SEQ ID NO: 817319 - RNA, 19 nt, Homo sapiens
  misc_RNA (1)...(19): siRNA sense strand
guucauauguggccaaaga

SEQ ID NO: 817320 - RNA, 19 nt, Homo sapiens
  misc_RNA (1)...(19): siRNA sense strand
gaauagaccugagccuuca

SEQ ID NO: 817321 - RNA, 19 nt, Homo sapiens
  misc_RNA (1)...(19): siRNA sense strand
uaucgaagauccuuuacaa

SEQ ID NO: 817322 - RNA, 19 nt, Homo sapiens
  misc_RNA (1)...(19): siRNA sense strand
gaagcaggccuuugauuau

SEQ ID NO: 817323 - RNA, 19 nt, Homo sapiens
  misc_RNA (1)...(19): siRNA sense strand
ggccaucaaugcuuuauau

SEQ ID NO: 817324 - RNA, 19 nt, Homo sapiens
  misc_RNA (1)...(19): siRNA sense strand
ugaagcaggccuuugauua

SEQ ID NO: 817325 - RNA, 19 nt, Homo sapiens
  misc_RNA (1)...(19): siRNA sense strand
gcaaaguacuaucccaaca

SEQ ID NO: 817326 - RNA, 19 nt, Homo sapiens
  misc_RNA (1)...(19): siRNA sense strand
acagaaagcauacuaggua

SEQ ID NO: 817327 - RNA, 19 nt, Homo sapiens
  misc_RNA (1)...(19): siRNA sense strand
caaugaaacagaaagcaua

SEQ ID NO: 817328 - RNA, 19 nt, Homo sapiens
  misc_RNA (1)...(19): siRNA sense strand
gaaagcauacuagguagaa

SEQ ID NO: 817329 - RNA, 19 nt, Homo sapiens
  misc_RNA (1)...(19): siRNA sense strand
caucaaugcuuuauaucga

SEQ ID NO: 817330 - RNA, 19 nt, Homo sapiens
  misc_RNA (1)...(19): siRNA sense strand
gagauuggauaucaaagca

SEQ ID NO: 817331 - RNA, 19 nt, Homo sapiens
  misc_RNA (1)...(19): siRNA sense strand
gauuaugccuacguuguuu

SEQ ID NO: 817332 - RNA, 19 nt, Homo sapiens
  misc_RNA (1)...(19): siRNA sense strand
gcagucaguuuccuucagu

SEQ ID NO: 817333 - RNA, 19 nt, Homo sapiens
  misc_RNA (1)...(19): siRNA sense strand
gaccugagccuucaugcaa

SEQ ID NO: 817334 - RNA, 19 nt, Homo sapiens
  misc_RNA (1)...(19): siRNA sense strand
uaucaccaauagcaaagua

SEQ ID NO: 817335 - RNA, 19 nt, Homo sapiens
  misc_RNA (1)...(19): siRNA sense strand
ggccaaagaugaaguacag

SEQ ID NO: 817336 - RNA, 19 nt, Homo sapiens
  misc_RNA (1)...(19): siRNA sense strand
caauggaaaugaaacucuu

SEQ ID NO: 817337 - RNA, 19 nt, Homo sapiens
  misc_RNA (1)...(19): siRNA sense strand
uaaaggauggugguucaua

SEQ ID NO: 817338 - RNA, 19 nt, Homo sapiens
  misc_RNA (1)...(19): siRNA sense strand
guccagcucuagugacgua

SEQ ID NO: 817339 - RNA, 19 nt, Homo sapiens
  misc_RNA (1)...(19): siRNA sense strand
caaagaugaaguacagaaa

SEQ ID NO: 817340 - RNA, 19 nt, Homo sapiens
  misc_RNA (1)...(19): siRNA sense strand
aaaggauggugguucauau

SEQ ID NO: 817341 - RNA, 19 nt, Homo sapiens
  misc_RNA (1)...(19): siRNA sense strand
aaaguacuaucccaacaau

SEQ ID NO: 817342 - RNA, 19 nt, Homo sapiens
  misc_RNA (1)...(19): siRNA sense strand
ugaaacagaaagcauacua

SEQ ID NO: 817343 - RNA, 19 nt, Homo sapiens
  misc_RNA (1)...(19): siRNA sense strand
gaaguugccacauauagag

SEQ ID NO: 817344 - RNA, 19 nt, Homo sapiens
  misc_RNA (1)...(19): siRNA sense strand
cuaugguguucucuuaaua

SEQ ID NO: 817345 - RNA, 19 nt, Homo sapiens
  misc_RNA (1)...(19): siRNA sense strand
gaugaaguugccacauaua

SEQ ID NO: 817346 - RNA, 19 nt, Homo sapiens
  misc_RNA (1)...(19): siRNA sense strand
uagaguaacagaugaaguu

SEQ ID NO: 817347 - RNA, 19 nt, Homo sapiens
  misc_RNA (1)...(19): siRNA sense strand
gaaacagaaagcauacuag

SEQ ID NO: 817348 - RNA, 19 nt, Homo sapiens
  misc_RNA (1)...(19): siRNA sense strand
agaugaaguugccacauau

SEQ ID NO: 817349 - RNA, 19 nt, Homo sapiens
  misc_RNA (1)...(19): siRNA sense strand
ggauggugguucauaugug

SEQ ID NO: 817350 - RNA, 19 nt, Homo sapiens
  misc_RNA (1)...(19): siRNA sense strand
caaaguacuaucccaacaa

SEQ ID NO: 817351 - RNA, 19 nt, Homo sapiens
  misc_RNA (1)...(19): siRNA sense strand
cgaagauccuuuacaacca

SEQ ID NO: 817352 - RNA, 19 nt, Homo sapiens
  misc_RNA (1)...(19): siRNA sense strand
ccaaagaugaaguacagaa

SEQ ID NO: 817353 - RNA, 19 nt, Homo sapiens
  misc_RNA (1)...(19): siRNA sense strand
aagcaggccuuugauuaug

SEQ ID NO: 817354 - RNA, 19 nt, Homo sapiens
  misc_RNA (1)...(19): siRNA sense strand
gagccuucaugcaauggaa

SEQ ID NO: 817355 - RNA, 19 nt, Homo sapiens
  misc_RNA (1)...(19): siRNA sense strand
aagcauacuagguagaaua

SEQ ID NO: 817356 - RNA, 19 nt, Homo sapiens
  misc_RNA (1)...(19): siRNA sense strand
uacaggccaucaaugcuuu

SEQ ID NO: 817357 - RNA, 19 nt, Homo sapiens
  misc_RNA (1)...(19): siRNA sense strand
ucaguuuccuucaguuaca

SEQ ID NO: 817358 - RNA, 19 nt, Homo sapiens
  misc_RNA (1)...(19): siRNA sense strand
gcaauggaaaugaaacucu

SEQ ID NO: 817359 - RNA, 19 nt, Homo sapiens
  misc_RNA (1)...(19): siRNA sense strand
aguacuaucccaacaauga

SEQ ID NO: 817360 - RNA, 19 nt, Homo sapiens
  misc_RNA (1)...(19): siRNA sense strand
caauacaaacuaugguguu

SEQ ID NO: 817361 - RNA, 19 nt, Homo sapiens
  misc_RNA (1)...(19): siRNA sense strand
guacuaucccaacaaugaa

SEQ ID NO: 817362 - RNA, 19 nt, Homo sapiens
  misc_RNA (1)...(19): siRNA sense strand
ucccaacaaugaaacagaa

SEQ ID NO: 817363 - RNA, 19 nt, Homo sapiens
  misc_RNA (1)...(19): siRNA sense strand
cauauguggccaaagauga

SEQ ID NO: 817364 - RNA, 19 nt, Homo sapiens
  misc_RNA (1)...(19): siRNA sense strand
caguggggcuugaagaaua

SEQ ID NO: 817365 - RNA, 19 nt, Homo sapiens
  misc_RNA (1)...(19): siRNA sense strand
agacuggcauccggauaaa

SEQ ID NO: 817366 - RNA, 19 nt, Homo sapiens
  misc_RNA (1)...(19): siRNA sense strand
acaaccagguaacgauguu

SEQ ID NO: 817367 - RNA, 19 nt, Homo sapiens
  misc_RNA (1)...(19): siRNA sense strand
ugaaguugccacauauaga

SEQ ID NO: 817368 - RNA, 19 nt, Homo sapiens
  misc_RNA (1)...(19): siRNA sense strand
caugcuguaucaccaauag

SEQ ID NO: 817369 - RNA, 19 nt, Homo sapiens
  misc_RNA (1)...(19): siRNA sense strand
gcaagugaagcaggccuuu

SEQ ID NO: 817370 - RNA, 19 nt, Homo sapiens
  misc_RNA (1)...(19): siRNA sense strand
ccacauauagagauuggau

SEQ ID NO: 817371 - RNA, 19 nt, Homo sapiens
  misc_RNA (1)...(19): siRNA sense strand
aauacaaacuaugguguuc

SEQ ID NO: 817372 - RNA, 19 nt, Homo sapiens
  misc_RNA (1)...(19): siRNA sense strand
aagacuggcauccggauaa

SEQ ID NO: 817373 - RNA, 19 nt, Homo sapiens
  misc_RNA (1)...(19): siRNA sense strand
acuaugguguucucuuaau

SEQ ID NO: 817374 - RNA, 19 nt, Homo sapiens
  misc_RNA (1)...(19): siRNA sense strand
gugaagcaggccuuugauu

SEQ ID NO: 817375 - RNA, 19 nt, Homo sapiens
  misc_RNA (1)...(19): siRNA sense strand
cuacaggccaucaaugcuu

SEQ ID NO: 817376 - RNA, 19 nt, Homo sapiens
  misc_RNA (1)...(19): siRNA sense strand
caaacuaugguguucucuu

SEQ ID NO: 817377 - RNA, 19 nt, Homo sapiens
  misc_RNA (1)...(19): siRNA sense strand
guuggaaggaguucauaug

SEQ ID NO: 817378 - RNA, 19 nt, Homo sapiens
  misc_RNA (1)...(19): siRNA sense strand
cuagguagaauaauuagag

SEQ ID NO: 817379 - RNA, 19 nt, Homo sapiens
  misc_RNA (1)...(19): siRNA sense strand
guugccacauauagagauu

SEQ ID NO: 817380 - RNA, 19 nt, Homo sapiens
  misc_RNA (1)...(19): siRNA sense strand
ccugagccuucaugcaaug

SEQ ID NO: 817381 - RNA, 19 nt, Homo sapiens
  misc_RNA (1)...(19): siRNA sense strand
ugauuaugccuacguuguu

SEQ ID NO: 817382 - RNA, 19 nt, Homo sapiens
  misc_RNA (1)...(19): siRNA sense strand
gauccuuuacaaccaggua

SEQ ID NO: 817383 - RNA, 19 nt, Homo sapiens
  misc_RNA (1)...(19): siRNA sense strand
gccacacaguccagcucua

SEQ ID NO: 817384 - RNA, 19 nt, Homo sapiens
  misc_RNA (1)...(19): siRNA sense strand
aagugaagcaggccuuuga

SEQ ID NO: 817385 - RNA, 19 nt, Homo sapiens
  misc_RNA (1)...(19): siRNA sense strand
uauggacgacacuucaauu

SEQ ID NO: 817386 - RNA, 19 nt, Homo sapiens
  misc_RNA (1)...(19): siRNA sense strand
gguccagugucguccucuu

SEQ ID NO: 817387 - RNA, 19 nt, Homo sapiens
  misc_RNA (1)...(19): siRNA sense strand
agucaguuuccuucaguua

SEQ ID NO: 817388 - RNA, 19 nt, Homo sapiens
  misc_RNA (1)...(19): siRNA sense strand
auggacgacacuucaauua

SEQ ID NO: 817389 - RNA, 19 nt, Homo sapiens
  misc_RNA (1)...(19): siRNA sense strand
uacaaacuaugguguucuc

SEQ ID NO: 817390 - RNA, 19 nt, Homo sapiens
  misc_RNA (1)...(19): siRNA sense strand
ccacacaguccagcucuag

SEQ ID NO: 817391 - RNA, 19 nt, Homo sapiens
  misc_RNA (1)...(19): siRNA sense strand
caagugaagcaggccuuug

SEQ ID NO: 817392 - RNA, 19 nt, Homo sapiens
  misc_RNA (1)...(19): siRNA sense strand
uggacgacacuucaauuau

SEQ ID NO: 817393 - RNA, 19 nt, Homo sapiens
  misc_RNA (1)...(19): siRNA sense strand
aaagacuggcauccggaua

SEQ ID NO: 817394 - RNA, 19 nt, Homo sapiens
  misc_RNA (1)...(19): siRNA sense strand
caacaaugaaacagaaagc

SEQ ID NO: 817395 - RNA, 19 nt, Homo sapiens
  misc_RNA (1)...(19): siRNA sense strand
ucacaaaggugguggaugu

SEQ ID NO: 817396 - RNA, 19 nt, Homo sapiens
  misc_RNA (1)...(19): siRNA sense strand
aagaacgacuucaagagua

SEQ ID NO: 817397 - RNA, 19 nt, Homo sapiens
  misc_RNA (1)...(19): siRNA sense strand
ccaccucucugaagcuuga

SEQ ID NO: 817398 - RNA, 19 nt, Homo sapiens
  misc_RNA (1)...(19): siRNA sense strand
ucaauacaguggcccaaga

SEQ ID NO: 817399 - RNA, 19 nt, Homo sapiens
  misc_RNA (1)...(19): siRNA sense strand
agaaguugcuguucaugga

SEQ ID NO: 817400 - RNA, 19 nt, Homo sapiens
  misc_RNA (1)...(19): siRNA sense strand
cauggaaacuucggccaaa

SEQ ID NO: 817401 - RNA, 19 nt, Homo sapiens
  misc_RNA (1)...(19): siRNA sense strand
caagagcuacugcagagaa

SEQ ID NO: 817402 - RNA, 19 nt, Homo sapiens
  misc_RNA (1)...(19): siRNA sense strand
ugucggagguguucaauac

SEQ ID NO: 817403 - RNA, 19 nt, Homo sapiens
  misc_RNA (1)...(19): siRNA sense strand
gaaguggcuccguggguaa

SEQ ID NO: 817404 - RNA, 19 nt, Homo sapiens
  misc_RNA (1)...(19): siRNA sense strand
agaacgacuucaagaguau

SEQ ID NO: 817405 - RNA, 19 nt, Homo sapiens
  misc_RNA (1)...(19): siRNA sense strand
acgcugcgcuucuggugua

SEQ ID NO: 817406 - RNA, 19 nt, Homo sapiens
  misc_RNA (1)...(19): siRNA sense strand
cagcuggccaggagaagua

SEQ ID NO: 817407 - RNA, 19 nt, Homo sapiens
  misc_RNA (1)...(19): siRNA sense strand
gagaaguccuggugaugcu

SEQ ID NO: 817408 - RNA, 19 nt, Homo sapiens
  misc_RNA (1)...(19): siRNA sense strand
gaaguugcuguucauggaa

SEQ ID NO: 817409 - RNA, 19 nt, Homo sapiens
  misc_RNA (1)...(19): siRNA sense strand
gaaacuucggccaaacuga

SEQ ID NO: 817410 - RNA, 19 nt, Homo sapiens
  misc_RNA (1)...(19): siRNA sense strand
aaacuucggccaaacugaa

SEQ ID NO: 817411 - RNA, 19 nt, Homo sapiens
  misc_RNA (1)...(19): siRNA sense strand
caaaugcugcgcccacuag

SEQ ID NO: 817412 - RNA, 19 nt, Homo sapiens
  misc_RNA (1)...(19): siRNA sense strand
gccagaaguugcuguucau

SEQ ID NO: 817413 - RNA, 19 nt, Homo sapiens
  misc_RNA (1)...(19): siRNA sense strand
gacaucaccaggaaggauu

SEQ ID NO: 817414 - RNA, 19 nt, Homo sapiens
  misc_RNA (1)...(19): siRNA sense strand
uguacgacaucaccaggaa

SEQ ID NO: 817415 - RNA, 19 nt, Homo sapiens
  misc_RNA (1)...(19): siRNA sense strand
ggaaacuucggccaaacug

SEQ ID NO: 817416 - RNA, 19 nt, Homo sapiens
  misc_RNA (1)...(19): siRNA sense strand
uacaguggcccaagagcua

SEQ ID NO: 817417 - RNA, 19 nt, Homo sapiens
  misc_RNA (1)...(19): siRNA sense strand
ggagcugcacccaggagaa

SEQ ID NO: 817418 - RNA, 19 nt, Homo sapiens
  misc_RNA (1)...(19): siRNA sense strand
ccaaaugcugcgcccacua

SEQ ID NO: 817419 - RNA, 19 nt, Homo sapiens
  misc_RNA (1)...(19): siRNA sense strand
ccaggaagggaaggaguuu

SEQ ID NO: 817420 - RNA, 19 nt, Homo sapiens
  misc_RNA (1)...(19): siRNA sense strand
agccagaaguugcuguuca

SEQ ID NO: 817421 - RNA, 19 nt, Homo sapiens
  misc_RNA (1)...(19): siRNA sense strand
ggugggcugugcguucuuc

SEQ ID NO: 817422 - RNA, 19 nt, Homo sapiens
  misc_RNA (1)...(19): siRNA sense strand
aaguugcuguucauggaaa

SEQ ID NO: 817423 - RNA, 19 nt, Homo sapiens
  misc_RNA (1)...(19): siRNA sense strand
cagcuguggcucugaacaa

SEQ ID NO: 817424 - RNA, 19 nt, Homo sapiens
  misc_RNA (1)...(19): siRNA sense strand
gagcugcacccaggagaag

SEQ ID NO: 817425 - RNA, 19 nt, Homo sapiens
  misc_RNA (1)...(19): siRNA sense strand
ccacaagcuucgccucuuu

SEQ ID NO: 817426 - RNA, 19 nt, Homo sapiens
  misc_RNA (1)...(19): siRNA sense strand
aagcuugacuuucggaaug

SEQ ID NO: 817427 - RNA, 19 nt, Homo sapiens
  misc_RNA (1)...(19): siRNA sense strand
gcguguggcuuacaugauc

SEQ ID NO: 817428 - RNA, 19 nt, Homo sapiens
  misc_RNA (1)...(19): siRNA sense strand
gccuucaccugcuguuuga

SEQ ID NO: 817429 - RNA, 19 nt, Homo sapiens
  misc_RNA (1)...(19): siRNA sense strand
gaagggugacucccacaag

SEQ ID NO: 817430 - RNA, 19 nt, Homo sapiens
  misc_RNA (1)...(19): siRNA sense strand
ccgcaguccucugaccuuu

SEQ ID NO: 817431 - RNA, 19 nt, Homo sapiens
  misc_RNA (1)...(19): siRNA sense strand
gcaguccucugaccuuucc

SEQ ID NO: 817432 - RNA, 19 nt, Homo sapiens
  misc_RNA (1)...(19): siRNA sense strand
ggccuucaccugcuguuug

SEQ ID NO: 817433 - RNA, 19 nt, Homo sapiens
  misc_RNA (1)...(19): siRNA sense strand
ucaccaaggaggagaagga

SEQ ID NO: 817434 - RNA, 19 nt, Homo sapiens
  misc_RNA (1)...(19): siRNA sense strand
cccacaagcuugacuuucg

SEQ ID NO: 817435 - RNA, 19 nt, Homo sapiens
  misc_RNA (1)...(19): siRNA sense strand
uaaaggaagagcggaagga

SEQ ID NO: 817436 - RNA, 19 nt, Homo sapiens
  misc_RNA (1)...(19): siRNA sense strand
cacccacauugaucccuuu

SEQ ID NO: 817437 - RNA, 19 nt, Homo sapiens
  misc_RNA (1)...(19): siRNA sense strand
ggacuccaggcucagacaa

SEQ ID NO: 817438 - RNA, 19 nt, Homo sapiens
  misc_RNA (1)...(19): siRNA sense strand
ugaggcgggugaggagcua

SEQ ID NO: 817439 - RNA, 19 nt, Homo sapiens
  misc_RNA (1)...(19): siRNA sense strand
gugcguguggcuuacauga

SEQ ID NO: 817440 - RNA, 19 nt, Homo sapiens
  misc_RNA (1)...(19): siRNA sense strand
cgccgucuuugcccagaaa

SEQ ID NO: 817441 - RNA, 19 nt, Homo sapiens
  misc_RNA (1)...(19): siRNA sense strand
gaugauaucuguauucuga

SEQ ID NO: 817442 - RNA, 19 nt, Homo sapiens
  misc_RNA (1)...(19): siRNA sense strand
ggacagagguggaaacuca

SEQ ID NO: 817443 - RNA, 19 nt, Homo sapiens
  misc_RNA (1)...(19): siRNA sense strand
gaaauucucuggaagacaa

SEQ ID NO: 817444 - RNA, 19 nt, Homo sapiens
  misc_RNA (1)...(19): siRNA sense strand
aaucagaacugccuuuaua

SEQ ID NO: 817445 - RNA, 19 nt, Homo sapiens
  misc_RNA (1)...(19): siRNA sense strand
gcuacaaucuaaagaagua

SEQ ID NO: 817446 - RNA, 19 nt, Homo sapiens
  misc_RNA (1)...(19): siRNA sense strand
aaacugcacuugaugaauu

SEQ ID NO: 817447 - RNA, 19 nt, Homo sapiens
  misc_RNA (1)...(19): siRNA sense strand
gaacugccuuuauaagaau

SEQ ID NO: 817448 - RNA, 19 nt, Homo sapiens
  misc_RNA (1)...(19): siRNA sense strand
gaauuuaaauccaccuuca

SEQ ID NO: 817449 - RNA, 19 nt, Homo sapiens
  misc_RNA (1)...(19): siRNA sense strand
gaagacaauuccuggguau

SEQ ID NO: 817450 - RNA, 19 nt, Homo sapiens
  misc_RNA (1)...(19): siRNA sense strand
agacaacucugaaucuuug

SEQ ID NO: 817451 - RNA, 19 nt, Homo sapiens
  misc_RNA (1)...(19): siRNA sense strand
cgagagguuugcauugaua

SEQ ID NO: 817452 - RNA, 19 nt, Homo sapiens
  misc_RNA (1)...(19): siRNA sense strand
gagauaauuugaagagcaa

SEQ ID NO: 817453 - RNA, 19 nt, Homo sapiens
  misc_RNA (1)...(19): siRNA sense strand
gacgagaacaaguaaauaa

SEQ ID NO: 817454 - RNA, 19 nt, Homo sapiens
  misc_RNA (1)...(19): siRNA sense strand
gaacugaugaggaaagaau

SEQ ID NO: 817455 - RNA, 19 nt, Homo sapiens
  misc_RNA (1)...(19): siRNA sense strand
gaauaaagacaacucugaa

SEQ ID NO: 817456 - RNA, 19 nt, Homo sapiens
  misc_RNA (1)...(19): siRNA sense strand
gcacaaaacugcacuugau

SEQ ID NO: 817457 - RNA, 19 nt, Homo sapiens
  misc_RNA (1)...(19): siRNA sense strand
cuaagcauuucaagugaua

SEQ ID NO: 817458 - RNA, 19 nt, Homo sapiens
  misc_RNA (1)...(19): siRNA sense strand
aaacuaagcauuucaagug

SEQ ID NO: 817459 - RNA, 19 nt, Homo sapiens
  misc_RNA (1)...(19): siRNA sense strand
gaacaagagcuggaacuga

SEQ ID NO: 817460 - RNA, 19 nt, Homo sapiens
  misc_RNA (1)...(19): siRNA sense strand
gaaagaauguagcgaucuc

SEQ ID NO: 817461 - RNA, 19 nt, Homo sapiens
  misc_RNA (1)...(19): siRNA sense strand
aagcugaacuacuaagaaa

SEQ ID NO: 817462 - RNA, 19 nt, Homo sapiens
  misc_RNA (1)...(19): siRNA sense strand
agaacugccuuuauaagaa

SEQ ID NO: 817463 - RNA, 19 nt, Homo sapiens
  misc_RNA (1)...(19): siRNA sense strand
ccaaacaaacggauccaua

SEQ ID NO: 817464 - RNA, 19 nt, Homo sapiens
  misc_RNA (1)...(19): siRNA sense strand
gaaagcaauccuccaauca

SEQ ID NO: 817465 - RNA, 19 nt, Homo sapiens
  misc_RNA (1)...(19): siRNA sense strand
gugaagaccuuggaagaga

SEQ ID NO: 817466 - RNA, 19 nt, Homo sapiens
  misc_RNA (1)...(19): siRNA sense strand
ggacgagaacaaguaaaua

SEQ ID NO: 817467 - RNA, 19 nt, Homo sapiens
  misc_RNA (1)...(19): siRNA sense strand
caaacaaacggauccauau

SEQ ID NO: 817468 - RNA, 19 nt, Homo sapiens
  misc_RNA (1)...(19): siRNA sense strand
guaaauaaggccuaucaug

SEQ ID NO: 817469 - RNA, 19 nt, Homo sapiens
  misc_RNA (1)...(19): siRNA sense strand
gaacugaagagagaaaugu

SEQ ID NO: 817470 - RNA, 19 nt, Homo sapiens
  misc_RNA (1)...(19): siRNA sense strand
uaaauccaccuucaucaaa

SEQ ID NO: 817471 - RNA, 19 nt, Homo sapiens
  misc_RNA (1)...(19): siRNA sense strand
ggacagacaaugagagauc

SEQ ID NO: 817472 - RNA, 19 nt, Homo sapiens
  misc_RNA (1)...(19): siRNA sense strand
guacaugcuuucaggaaca

SEQ ID NO: 817473 - RNA, 19 nt, Homo sapiens
  misc_RNA (1)...(19): siRNA sense strand
caacugcaaucaagaaagc

SEQ ID NO: 817474 - RNA, 19 nt, Homo sapiens
  misc_RNA (1)...(19): siRNA sense strand
cauaagagagauacaguga

SEQ ID NO: 817475 - RNA, 19 nt, Homo sapiens
  misc_RNA (1)...(19): siRNA sense strand
cuacagaaagccaaacaaa

SEQ ID NO: 817476 - RNA, 19 nt, Homo sapiens
  misc_RNA (1)...(19): siRNA sense strand
uaaggccuaucaugcauau

SEQ ID NO: 817477 - RNA, 19 nt, Homo sapiens
  misc_RNA (1)...(19): siRNA sense strand
gaugaggaauuuaaaucca

SEQ ID NO: 817478 - RNA, 19 nt, Homo sapiens
  misc_RNA (1)...(19): siRNA sense strand
gcagcuacaaucuaaagaa

SEQ ID NO: 817479 - RNA, 19 nt, Homo sapiens
  misc_RNA (1)...(19): siRNA sense strand
ugaauaaagacaacucuga

SEQ ID NO: 817480 - RNA, 19 nt, Homo sapiens
  misc_RNA (1)...(19): siRNA sense strand
gaagagcaaacuggacaaa

SEQ ID NO: 817481 - RNA, 19 nt, Homo sapiens
  misc_RNA (1)...(19): siRNA sense strand
agaaagcaauccuccaauc

SEQ ID NO: 817482 - RNA, 19 nt, Homo sapiens
  misc_RNA (1)...(19): siRNA sense strand
ucaaguacaagcugaacua

SEQ ID NO: 817483 - RNA, 19 nt, Homo sapiens
  misc_RNA (1)...(19): siRNA sense strand
aacaagagcuggaacugau

SEQ ID NO: 817484 - RNA, 19 nt, Homo sapiens
  misc_RNA (1)...(19): siRNA sense strand
ugaaugagcagcuacaauc

SEQ ID NO: 817485 - RNA, 19 nt, Homo sapiens
  misc_RNA (1)...(19): siRNA sense strand
gacaauuccuggguauuuc

SEQ ID NO: 817486 - RNA, 19 nt, Homo sapiens
  misc_RNA (1)...(19): siRNA sense strand
cagaacugccuuuauaaga

SEQ ID NO: 817487 - RNA, 19 nt, Homo sapiens
  misc_RNA (1)...(19): siRNA sense strand
gaagagcagagaucuccaa

SEQ ID NO: 817488 - RNA, 19 nt, Homo sapiens
  misc_RNA (1)...(19): siRNA sense strand
augagcagcuacaaucuaa

SEQ ID NO: 817489 - RNA, 19 nt, Homo sapiens
  misc_RNA (1)...(19): siRNA sense strand
gaagagagaaaugucuaau

SEQ ID NO: 817490 - RNA, 19 nt, Homo sapiens
  misc_RNA (1)...(19): siRNA sense strand
aaauagaacuacagaaagc

SEQ ID NO: 817491 - RNA, 19 nt, Homo sapiens
  misc_RNA (1)...(19): siRNA sense strand
aagcaauccuccaaucaug

SEQ ID NO: 817492 - RNA, 19 nt, Homo sapiens
  misc_RNA (1)...(19): siRNA sense strand
cagcuacaaucuaaagaag

SEQ ID NO: 817493 - RNA, 19 nt, Homo sapiens
  misc_RNA (1)...(19): siRNA sense strand
ccuccuaaaucaagugaga

SEQ ID NO: 817494 - RNA, 19 nt, Homo sapiens
  misc_RNA (1)...(19): siRNA sense strand
agacaauuccuggguauuu

SEQ ID NO: 817495 - RNA, 19 nt, Homo sapiens
  misc_RNA (1)...(19): siRNA sense strand
uaaugaugguacaugcuuu

SEQ ID NO: 817496 - RNA, 19 nt, Homo sapiens
  misc_RNA (1)...(19): siRNA sense strand
guacaagcugaacuacuaa

SEQ ID NO: 817497 - RNA, 19 nt, Homo sapiens
  misc_RNA (1)...(19): siRNA sense strand
uaaagacaacucugaaucu

SEQ ID NO: 817498 - RNA, 19 nt, Homo sapiens
  misc_RNA (1)...(19): siRNA sense strand
gcugugaccugaagaucca

SEQ ID NO: 817499 - RNA, 19 nt, Homo sapiens
  misc_RNA (1)...(19): siRNA sense strand
acuuaaggauucagagaaa

SEQ ID NO: 817500 - RNA, 19 nt, Homo sapiens
  misc_RNA (1)...(19): siRNA sense strand
caagcugaacuacuaagaa

SEQ ID NO: 817501 - RNA, 19 nt, Homo sapiens
  misc_RNA (1)...(19): siRNA sense strand
gcacugguagaagaugaua

SEQ ID NO: 817502 - RNA, 19 nt, Homo sapiens
  misc_RNA (1)...(19): siRNA sense strand
gggacgagaacaaguaaau

SEQ ID NO: 817503 - RNA, 19 nt, Homo sapiens
  misc_RNA (1)...(19): siRNA sense strand
acugggaacugaagagaga

SEQ ID NO: 817504 - RNA, 19 nt, Homo sapiens
  misc_RNA (1)...(19): siRNA sense strand
guagcgaucucaaaauaga

SEQ ID NO: 817505 - RNA, 19 nt, Homo sapiens
  misc_RNA (1)...(19): siRNA sense strand
caggugaugaggaauuuaa

SEQ ID NO: 817506 - RNA, 19 nt, Homo sapiens
  misc_RNA (1)...(19): siRNA sense strand
gagcagcuacaaucuaaag

SEQ ID NO: 817507 - RNA, 19 nt, Homo sapiens
  misc_RNA (1)...(19): siRNA sense strand
caacucugaaucuuugaaa

SEQ ID NO: 817508 - RNA, 19 nt, Homo sapiens
  misc_RNA (1)...(19): siRNA sense strand
gaacuacuaagaaaacuga

SEQ ID NO: 817509 - RNA, 19 nt, Homo sapiens
  misc_RNA (1)...(19): siRNA sense strand
uaccacaucuuccccuuua

SEQ ID NO: 817510 - RNA, 19 nt, Homo sapiens
  misc_RNA (1)...(19): siRNA sense strand
gaauguagcgaucucaaaa

SEQ ID NO: 817511 - RNA, 19 nt, Homo sapiens
  misc_RNA (1)...(19): siRNA sense strand
accaggagauguaaagguu

SEQ ID NO: 817512 - RNA, 19 nt, Homo sapiens
  misc_RNA (1)...(19): siRNA sense strand
gaaagccugugccccugua

SEQ ID NO: 817513 - RNA, 19 nt, Homo sapiens
  misc_RNA (1)...(19): siRNA sense strand
ucuggugacucaaguacaa

SEQ ID NO: 817514 - RNA, 19 nt, Homo sapiens
  misc_RNA (1)...(19): siRNA sense strand
ugagagauccauuccuaau

SEQ ID NO: 817515 - RNA, 19 nt, Homo sapiens
  misc_RNA (1)...(19): siRNA sense strand
caagugagacagcauuugg

SEQ ID NO: 817516 - RNA, 19 nt, Homo sapiens
  misc_RNA (1)...(19): siRNA sense strand
uccaaguccuccuaaauca

SEQ ID NO: 817517 - RNA, 19 nt, Homo sapiens
  misc_RNA (1)...(19): siRNA sense strand
acaaguaaauaaggccuau

SEQ ID NO: 817518 - RNA, 19 nt, Homo sapiens
  misc_RNA (1)...(19): siRNA sense strand
caagagcuggaacugauga

SEQ ID NO: 817519 - RNA, 19 nt, Homo sapiens
  misc_RNA (1)...(19): siRNA sense strand
ucaugcauaucgagagguu

SEQ ID NO: 817520 - RNA, 19 nt, Homo sapiens
  misc_RNA (1)...(19): siRNA sense strand
gagaaagcaauccuccaau

SEQ ID NO: 817521 - RNA, 19 nt, Homo sapiens
  misc_RNA (1)...(19): siRNA sense strand
ugaagagagaaaugucuaa

SEQ ID NO: 817522 - RNA, 19 nt, Homo sapiens
  misc_RNA (1)...(19): siRNA sense strand
gaaacucagcaggugauga

SEQ ID NO: 817523 - RNA, 19 nt, Homo sapiens
  misc_RNA (1)...(19): siRNA sense strand
aaauaaggccuaucaugca

SEQ ID NO: 817524 - RNA, 19 nt, Homo sapiens
  misc_RNA (1)...(19): siRNA sense strand
ggaacugaagagagaaaug

SEQ ID NO: 817525 - RNA, 19 nt, Homo sapiens
  misc_RNA (1)...(19): siRNA sense strand
cgacuuaaggauucagaga

SEQ ID NO: 817526 - RNA, 19 nt, Homo sapiens
  misc_RNA (1)...(19): siRNA sense strand
gaccugaagauccaugguu

SEQ ID NO: 817527 - RNA, 19 nt, Homo sapiens
  misc_RNA (1)...(19): siRNA sense strand
cagcaggugaugaggaauu

SEQ ID NO: 817528 - RNA, 19 nt, Homo sapiens
  misc_RNA (1)...(19): siRNA sense strand
ggaucaacauaaucagaac

SEQ ID NO: 817529 - RNA, 19 nt, Homo sapiens
  misc_RNA (1)...(19): siRNA sense strand
agagaaagcaauccuccaa

SEQ ID NO: 817530 - RNA, 19 nt, Homo sapiens
  misc_RNA (1)...(19): siRNA sense strand
aauaaggccuaucaugcau

SEQ ID NO: 817531 - RNA, 19 nt, Homo sapiens
  misc_RNA (1)...(19): siRNA sense strand
caaguccuccuaaaucaag

SEQ ID NO: 817532 - RNA, 19 nt, Homo sapiens
  misc_RNA (1)...(19): siRNA sense strand
uaauagcucgauuugaaga

SEQ ID NO: 817533 - RNA, 19 nt, Homo sapiens
  misc_RNA (1)...(19): siRNA sense strand
gugaugaggaauuuaaauc

SEQ ID NO: 817534 - RNA, 19 nt, Homo sapiens
  misc_RNA (1)...(19): siRNA sense strand
gacuuaaggauucagagaa

SEQ ID NO: 817535 - RNA, 19 nt, Homo sapiens
  misc_RNA (1)...(19): siRNA sense strand
gaaugagcagcuacaaucu

SEQ ID NO: 817536 - RNA, 19 nt, Homo sapiens
  misc_RNA (1)...(19): siRNA sense strand
ggaaagaauguagcgaucu

SEQ ID NO: 817537 - RNA, 19 nt, Homo sapiens
  misc_RNA (1)...(19): siRNA sense strand
aacuaagcauuucaaguga

SEQ ID NO: 817538 - RNA, 19 nt, Homo sapiens
  misc_RNA (1)...(19): siRNA sense strand
aaacaaacggauccauauc

SEQ ID NO: 817539 - RNA, 19 nt, Homo sapiens
  misc_RNA (1)...(19): siRNA sense strand
ucuugucacugcauaugaa

SEQ ID NO: 817540 - RNA, 19 nt, Homo sapiens
  misc_RNA (1)...(19): siRNA sense strand
cauaaucagaacugccuuu

SEQ ID NO: 817541 - RNA, 19 nt, Homo sapiens
  misc_RNA (1)...(19): siRNA sense strand
ggucauaccuccaaaguua

SEQ ID NO: 817542 - RNA, 19 nt, Homo sapiens
  misc_RNA (1)...(19): siRNA sense strand
gcaaucuggugauaauuua

SEQ ID NO: 817543 - RNA, 19 nt, Homo sapiens
  misc_RNA (1)...(19): siRNA sense strand
gaaauaaacucugaugaca

SEQ ID NO: 817544 - RNA, 19 nt, Homo sapiens
  misc_RNA (1)...(19): siRNA sense strand
gaucuaacccggcacauua

SEQ ID NO: 817545 - RNA, 19 nt, Homo sapiens
  misc_RNA (1)...(19): siRNA sense strand
gcaugaagguggugaauga

SEQ ID NO: 817546 - RNA, 19 nt, Homo sapiens
  misc_RNA (1)...(19): siRNA sense strand
gaaauuggcacucgcuaua

SEQ ID NO: 817547 - RNA, 19 nt, Homo sapiens
  misc_RNA (1)...(19): siRNA sense strand
gcagucagcugucuugcua

SEQ ID NO: 817548 - RNA, 19 nt, Homo sapiens
  misc_RNA (1)...(19): siRNA sense strand
gcacaaagauaacguugau

SEQ ID NO: 817549 - RNA, 19 nt, Homo sapiens
  misc_RNA (1)...(19): siRNA sense strand
gcacauuucuggccaguug

SEQ ID NO: 817550 - RNA, 19 nt, Homo sapiens
  misc_RNA (1)...(19): siRNA sense strand
gaacaaagucgacaagaug

SEQ ID NO: 817551 - RNA, 19 nt, Homo sapiens
  misc_RNA (1)...(19): siRNA sense strand
ugaaagacaucacugguaa

SEQ ID NO: 817552 - RNA, 19 nt, Homo sapiens
  misc_RNA (1)...(19): siRNA sense strand
gaaauguauuggugucuuu

SEQ ID NO: 817553 - RNA, 19 nt, Homo sapiens
  misc_RNA (1)...(19): siRNA sense strand
ggaagaaugcugcccuuua

SEQ ID NO: 817554 - RNA, 19 nt, Homo sapiens
  misc_RNA (1)...(19): siRNA sense strand
caugaucgauuacaaguuu

SEQ ID NO: 817555 - RNA, 19 nt, Homo sapiens
  misc_RNA (1)...(19): siRNA sense strand
gaagaaugcugcccuuuac

SEQ ID NO: 817556 - RNA, 19 nt, Homo sapiens
  misc_RNA (1)...(19): siRNA sense strand
cuacagggauuacaagaaa

SEQ ID NO: 817557 - RNA, 19 nt, Homo sapiens
  misc_RNA (1)...(19): siRNA sense strand
gagaagaccgaauuccuua

SEQ ID NO: 817558 - RNA, 19 nt, Homo sapiens
  misc_RNA (1)...(19): siRNA sense strand
agaaaccucucuuugauuu

SEQ ID NO: 817559 - RNA, 19 nt, Homo sapiens
  misc_RNA (1)...(19): siRNA sense strand
gaaacugucugucaucaag

SEQ ID NO: 817560 - RNA, 19 nt, Homo sapiens
  misc_RNA (1)...(19): siRNA sense strand
ucagacagcuuauguggaa

SEQ ID NO: 817561 - RNA, 19 nt, Homo sapiens
  misc_RNA (1)...(19): siRNA sense strand
gaacaagaagccuuagauu

SEQ ID NO: 817562 - RNA, 19 nt, Homo sapiens
  misc_RNA (1)...(19): siRNA sense strand
ggacacaaagacaugauua

SEQ ID NO: 817563 - RNA, 19 nt, Homo sapiens
  misc_RNA (1)...(19): siRNA sense strand
ggacagagccagaaagcaa

SEQ ID NO: 817564 - RNA, 19 nt, Homo sapiens
  misc_RNA (1)...(19): siRNA sense strand
ucuuaugacugcacaauua

SEQ ID NO: 817565 - RNA, 19 nt, Homo sapiens
  misc_RNA (1)...(19): siRNA sense strand
gcagauaacuauggagaug

SEQ ID NO: 817566 - RNA, 19 nt, Homo sapiens
  misc_RNA (1)...(19): siRNA sense strand
gagaugagccagauaguga

SEQ ID NO: 817567 - RNA, 19 nt, Homo sapiens
  misc_RNA (1)...(19): siRNA sense strand
caagaugaaccuuccaaua

SEQ ID NO: 817568 - RNA, 19 nt, Homo sapiens
  misc_RNA (1)...(19): siRNA sense strand
gcaaagaaauaccagaaac

SEQ ID NO: 817569 - RNA, 19 nt, Homo sapiens
  misc_RNA (1)...(19): siRNA sense strand
caaauacagucacgacaga

SEQ ID NO: 817570 - RNA, 19 nt, Homo sapiens
  misc_RNA (1)...(19): siRNA sense strand
ggaaagagaagaugaugga

SEQ ID NO: 817571 - RNA, 19 nt, Homo sapiens
  misc_RNA (1)...(19): siRNA sense strand
uaaccaugguccuuacaua

SEQ ID NO: 817572 - RNA, 19 nt, Homo sapiens
  misc_RNA (1)...(19): siRNA sense strand
gguaacaagucagaaauga

SEQ ID NO: 817573 - RNA, 19 nt, Homo sapiens
  misc_RNA (1)...(19): siRNA sense strand
caauagcaaccaagaaaua

SEQ ID NO: 817574 - RNA, 19 nt, Homo sapiens
  misc_RNA (1)...(19): siRNA sense strand
acaagaagccuuagauuug

SEQ ID NO: 817575 - RNA, 19 nt, Homo sapiens
  misc_RNA (1)...(19): siRNA sense strand
aguaaaagcuggaaaguua

SEQ ID NO: 817576 - RNA, 19 nt, Homo sapiens
  misc_RNA (1)...(19): siRNA sense strand
gcacugaggacccauagaa

SEQ ID NO: 817577 - RNA, 19 nt, Homo sapiens
  misc_RNA (1)...(19): siRNA sense strand
cuagagagcuauccacuuc

SEQ ID NO: 817578 - RNA, 19 nt, Homo sapiens
  misc_RNA (1)...(19): siRNA sense strand
acaccaagcugccguaaau

SEQ ID NO: 817579 - RNA, 19 nt, Homo sapiens
  misc_RNA (1)...(19): siRNA sense strand
cuugauaacuacaggaaua

SEQ ID NO: 817580 - RNA, 19 nt, Homo sapiens
  misc_RNA (1)...(19): siRNA sense strand
caaauaaccacgucuccua

SEQ ID NO: 817581 - RNA, 19 nt, Homo sapiens
  misc_RNA (1)...(19): siRNA sense strand
gcgacauagugcacaauua

SEQ ID NO: 817582 - RNA, 19 nt, Homo sapiens
  misc_RNA (1)...(19): siRNA sense strand
gaagguacaggcaaagaaa

SEQ ID NO: 817583 - RNA, 19 nt, Homo sapiens
  misc_RNA (1)...(19): siRNA sense strand
gaacaacaguaacggaaac

SEQ ID NO: 817584 - RNA, 19 nt, Homo sapiens
  misc_RNA (1)...(19): siRNA sense strand
ccaaucagcuggucuuucu

SEQ ID NO: 817585 - RNA, 19 nt, Homo sapiens
  misc_RNA (1)...(19): siRNA sense strand
aaugauggccaaaguauua

SEQ ID NO: 817586 - RNA, 19 nt, Homo sapiens
  misc_RNA (1)...(19): siRNA sense strand
guagaaauguagaagaauc

SEQ ID NO: 817587 - RNA, 19 nt, Homo sapiens
  misc_RNA (1)...(19): siRNA sense strand
guggucaccuucaacauaa

SEQ ID NO: 817588 - RNA, 19 nt, Homo sapiens
  misc_RNA (1)...(19): siRNA sense strand
gccaggagaugaugaugaa

SEQ ID NO: 817589 - RNA, 19 nt, Homo sapiens
  misc_RNA (1)...(19): siRNA sense strand
cggagccucucuucaaaua

SEQ ID NO: 817590 - RNA, 19 nt, Homo sapiens
  misc_RNA (1)...(19): siRNA sense strand
ggaaaagcauggaacaaaa

SEQ ID NO: 817591 - RNA, 19 nt, Homo sapiens
  misc_RNA (1)...(19): siRNA sense strand
cacaaggccucuucugauu

SEQ ID NO: 817592 - RNA, 19 nt, Homo sapiens
  misc_RNA (1)...(19): siRNA sense strand
ggauaacaaucuucugcaa

SEQ ID NO: 817593 - RNA, 19 nt, Homo sapiens
  misc_RNA (1)...(19): siRNA sense strand
gaacugcugaugagaaaga

SEQ ID NO: 817594 - RNA, 19 nt, Homo sapiens
  misc_RNA (1)...(19): siRNA sense strand
ggaagaggaagaagauuau

SEQ ID NO: 817595 - RNA, 19 nt, Homo sapiens
  misc_RNA (1)...(19): siRNA sense strand
gaauuacagucucaugauc

SEQ ID NO: 817596 - RNA, 19 nt, Homo sapiens
  misc_RNA (1)...(19): siRNA sense strand
caaacgacuugagaucuuu

SEQ ID NO: 817597 - RNA, 19 nt, Homo sapiens
  misc_RNA (1)...(19): siRNA sense strand
gcuggaaaguuaauuaaag

SEQ ID NO: 817598 - RNA, 19 nt, Homo sapiens
  misc_RNA (1)...(19): siRNA sense strand
agaagaaacuccggaagaa

SEQ ID NO: 817599 - RNA, 19 nt, Homo sapiens
  misc_RNA (1)...(19): siRNA sense strand
gaaaaccucucuagaagau

SEQ ID NO: 817600 - RNA, 19 nt, Homo sapiens
  misc_RNA (1)...(19): siRNA sense strand
gugguuggcuuucaaauag

SEQ ID NO: 817601 - RNA, 19 nt, Homo sapiens
  misc_RNA (1)...(19): siRNA sense strand
gcaagaaaaugacaaacuu

SEQ ID NO: 817602 - RNA, 19 nt, Homo sapiens
  misc_RNA (1)...(19): siRNA sense strand
gcccaugucuccugaacaa

SEQ ID NO: 817603 - RNA, 19 nt, Homo sapiens
  misc_RNA (1)...(19): siRNA sense strand
gaacgaaggaacaguagau

SEQ ID NO: 817604 - RNA, 19 nt, Homo sapiens
  misc_RNA (1)...(19): siRNA sense strand
aaagcaaucuggugauaau

SEQ ID NO: 817605 - RNA, 19 nt, Homo sapiens
  misc_RNA (1)...(19): siRNA sense strand
gacuugagaucuuugaaug

SEQ ID NO: 817606 - RNA, 19 nt, Homo sapiens
  misc_RNA (1)...(19): siRNA sense strand
gcacuguggucaccuucaa

SEQ ID NO: 817607 - RNA, 19 nt, Homo sapiens
  misc_RNA (1)...(19): siRNA sense strand
gagaguguguggagcaguu

SEQ ID NO: 817608 - RNA, 19 nt, Homo sapiens
  misc_RNA (1)...(19): siRNA sense strand
uuugggaacuugcuauaua

SEQ ID NO: 817609 - RNA, 19 nt, Homo sapiens
  misc_RNA (1)...(19): siRNA sense strand
caaaguuaguggaaagaau

SEQ ID NO: 817610 - RNA, 19 nt, Homo sapiens
  misc_RNA (1)...(19): siRNA sense strand
ggaaauguauuggugucuu

SEQ ID NO: 817611 - RNA, 19 nt, Homo sapiens
  misc_RNA (1)...(19): siRNA sense strand
gagcaaagaaauaccagaa

SEQ ID NO: 817612 - RNA, 19 nt, Homo sapiens
  misc_RNA (1)...(19): siRNA sense strand
gaccauauaauaccuuuga

SEQ ID NO: 817613 - RNA, 19 nt, Homo sapiens
  misc_RNA (1)...(19): siRNA sense strand
cagaugguuucaccuagua

SEQ ID NO: 817614 - RNA, 19 nt, Homo sapiens
  misc_RNA (1)...(19): siRNA sense strand
gcaaaggcuuacccagguu

SEQ ID NO: 817615 - RNA, 19 nt, Homo sapiens
  misc_RNA (1)...(19): siRNA sense strand
aaagcaagauccaaagaau

SEQ ID NO: 817616 - RNA, 19 nt, Homo sapiens
  misc_RNA (1)...(19): siRNA sense strand
caagagcauacaccaaaua

SEQ ID NO: 817617 - RNA, 19 nt, Homo sapiens
  misc_RNA (1)...(19): siRNA sense strand
gauuuacacuggcuguuau

SEQ ID NO: 817618 - RNA, 19 nt, Homo sapiens
  misc_RNA (1)...(19): siRNA sense strand
gaaguaguagccauugauu

SEQ ID NO: 817619 - RNA, 19 nt, Homo sapiens
  misc_RNA (1)...(19): siRNA sense strand
gaaauccaguguacguagu

SEQ ID NO: 817620 - RNA, 19 nt, Homo sapiens
  misc_RNA (1)...(19): siRNA sense strand
acugugaucuccuccauaa

SEQ ID NO: 817621 - RNA, 19 nt, Homo sapiens
  misc_RNA (1)...(19): siRNA sense strand
gaacaagaugagaauguga

SEQ ID NO: 817622 - RNA, 19 nt, Homo sapiens
  misc_RNA (1)...(19): siRNA sense strand
acucaucaguucagauuaa

SEQ ID NO: 817623 - RNA, 19 nt, Homo sapiens
  misc_RNA (1)...(19): siRNA sense strand
cgacauagugcacaauuau

SEQ ID NO: 817624 - RNA, 19 nt, Homo sapiens
  misc_RNA (1)...(19): siRNA sense strand
gaaagagugagacagagaa

SEQ ID NO: 817625 - RNA, 19 nt, Homo sapiens
  misc_RNA (1)...(19): siRNA sense strand
uaacguugaugcccaggaa

SEQ ID NO: 817626 - RNA, 19 nt, Homo sapiens
  misc_RNA (1)...(19): siRNA sense strand
gaacaagagcauacaccaa

SEQ ID NO: 817627 - RNA, 19 nt, Homo sapiens
  misc_RNA (1)...(19): siRNA sense strand
agacaucacugguaacaag

SEQ ID NO: 817628 - RNA, 19 nt, Homo sapiens
  misc_RNA (1)...(19): siRNA sense strand
gaagacaugacuaugcuau

SEQ ID NO: 817629 - RNA, 19 nt, Homo sapiens
  misc_RNA (1)...(19): siRNA sense strand
agucaucacugcuagauug

SEQ ID NO: 817630 - RNA, 19 nt, Homo sapiens
  misc_RNA (1)...(19): siRNA sense strand
gcagaugguuucaccuagu

SEQ ID NO: 817631 - RNA, 19 nt, Homo sapiens
  misc_RNA (1)...(19): siRNA sense strand
caagaagccuuagauuugg

SEQ ID NO: 817632 - RNA, 19 nt, Homo sapiens
  misc_RNA (1)...(19): siRNA sense strand
ggaggugguuggcuuucaa

SEQ ID NO: 817633 - RNA, 19 nt, Homo sapiens
  misc_RNA (1)...(19): siRNA sense strand
cugcuugccuggauaaauu

SEQ ID NO: 817634 - RNA, 19 nt, Homo sapiens
  misc_RNA (1)...(19): siRNA sense strand
gcuggucuuucuagcauaa

SEQ ID NO: 817635 - RNA, 19 nt, Homo sapiens
  misc_RNA (1)...(19): siRNA sense strand
gccaaaguauuagaaagaa

SEQ ID NO: 817636 - RNA, 19 nt, Homo sapiens
  misc_RNA (1)...(19): siRNA sense strand
gagccaaaccucaauagug

SEQ ID NO: 817637 - RNA, 19 nt, Homo sapiens
  misc_RNA (1)...(19): siRNA sense strand
ucuagaagaugcacagguu

SEQ ID NO: 817638 - RNA, 19 nt, Homo sapiens
  misc_RNA (1)...(19): siRNA sense strand
gaagauaaccaugguccuu

SEQ ID NO: 817639 - RNA, 19 nt, Homo sapiens
  misc_RNA (1)...(19): siRNA sense strand
agucagaaaugauagagaa

SEQ ID NO: 817640 - RNA, 19 nt, Homo sapiens
  misc_RNA (1)...(19): siRNA sense strand
gugauaaauuuccuucaga

SEQ ID NO: 817641 - RNA, 19 nt, Homo sapiens
  misc_RNA (1)...(19): siRNA sense strand
ggaaggaauugucuuagaa

SEQ ID NO: 817642 - RNA, 19 nt, Homo sapiens
  misc_RNA (1)...(19): siRNA sense strand
caagagagauggagcagaa

SEQ ID NO: 817643 - RNA, 19 nt, Homo sapiens
  misc_RNA (1)...(19): siRNA sense strand
gacaagaacuaacugcuuu

SEQ ID NO: 817644 - RNA, 19 nt, Homo sapiens
  misc_RNA (1)...(19): siRNA sense strand
gaacaauggccacuacuuu

SEQ ID NO: 817645 - RNA, 19 nt, Homo sapiens
  misc_RNA (1)...(19): siRNA sense strand
gagaagaauuuguauggaa

SEQ ID NO: 817646 - RNA, 19 nt, Homo sapiens
  misc_RNA (1)...(19): siRNA sense strand
gaucaacucuggcaaaaua

SEQ ID NO: 817647 - RNA, 19 nt, Homo sapiens
  misc_RNA (1)...(19): siRNA sense strand
ccaaagaccggaauagaua

SEQ ID NO: 817648 - RNA, 19 nt, Homo sapiens
  misc_RNA (1)...(19): siRNA sense strand
gaggagaucuuaaccuaug

SEQ ID NO: 817649 - RNA, 19 nt, Homo sapiens
  misc_RNA (1)...(19): siRNA sense strand
gaaauggacucugucauca

SEQ ID NO: 817650 - RNA, 19 nt, Homo sapiens
  misc_RNA (1)...(19): siRNA sense strand
ugaaggagaugaaguucua

SEQ ID NO: 817651 - RNA, 19 nt, Homo sapiens
  misc_RNA (1)...(19): siRNA sense strand
gaaacaaaccauagaagaa

SEQ ID NO: 817652 - RNA, 19 nt, Homo sapiens
  misc_RNA (1)...(19): siRNA sense strand
gaggauauuucacugcuuu

SEQ ID NO: 817653 - RNA, 19 nt, Homo sapiens
  misc_RNA (1)...(19): siRNA sense strand
gaauuccgaucuugauaaa

SEQ ID NO: 817654 - RNA, 19 nt, Homo sapiens
  misc_RNA (1)...(19): siRNA sense strand
caacauacuuugguagauu

SEQ ID NO: 817655 - RNA, 19 nt, Homo sapiens
  misc_RNA (1)...(19): siRNA sense strand
guaaugaaauggacucugu

SEQ ID NO: 817656 - RNA, 19 nt, Homo sapiens
  misc_RNA (1)...(19): siRNA sense strand
gaacuugaccuuaauucuu

SEQ ID NO: 817657 - RNA, 19 nt, Homo sapiens
  misc_RNA (1)...(19): siRNA sense strand
gaacuagcauagauucugu

SEQ ID NO: 817658 - RNA, 19 nt, Homo sapiens
  misc_RNA (1)...(19): siRNA sense strand
gaucuuaaccuaugaggaa

SEQ ID NO: 817659 - RNA, 19 nt, Homo sapiens
  misc_RNA (1)...(19): siRNA sense strand
gaugagagaguuuaugaaa

SEQ ID NO: 817660 - RNA, 19 nt, Homo sapiens
  misc_RNA (1)...(19): siRNA sense strand
ugagagaaaucauugagaa

SEQ ID NO: 817661 - RNA, 19 nt, Homo sapiens
  misc_RNA (1)...(19): siRNA sense strand
gaggaaaugucacuuuauc

SEQ ID NO: 817662 - RNA, 19 nt, Homo sapiens
  misc_RNA (1)...(19): siRNA sense strand
ggaaucagacagcgaagua

SEQ ID NO: 817663 - RNA, 19 nt, Homo sapiens
  misc_RNA (1)...(19): siRNA sense strand
ggaauugucuuagaaaguc

SEQ ID NO: 817664 - RNA, 19 nt, Homo sapiens
  misc_RNA (1)...(19): siRNA sense strand
gcaaagggaagccaugaaa

SEQ ID NO: 817665 - RNA, 19 nt, Homo sapiens
  misc_RNA (1)...(19): siRNA sense strand
gagaugaaguucuagagau

SEQ ID NO: 817666 - RNA, 19 nt, Homo sapiens
  misc_RNA (1)...(19): siRNA sense strand
gaccuuaauucuuccauga

SEQ ID NO: 817667 - RNA, 19 nt, Homo sapiens
  misc_RNA (1)...(19): siRNA sense strand
cauagcagcuggaaaguuc

SEQ ID NO: 817668 - RNA, 19 nt, Homo sapiens
  misc_RNA (1)...(19): siRNA sense strand
aaaguggucuguugcauga

SEQ ID NO: 817669 - RNA, 19 nt, Homo sapiens
  misc_RNA (1)...(19): siRNA sense strand
agaaagacuucgggcauua

SEQ ID NO: 817670 - RNA, 19 nt, Homo sapiens
  misc_RNA (1)...(19): siRNA sense strand
ugagagaguuuaugaaagu

SEQ ID NO: 817671 - RNA, 19 nt, Homo sapiens
  misc_RNA (1)...(19): siRNA sense strand
gaaacaguaauccauguaa

SEQ ID NO: 817672 - RNA, 19 nt, Homo sapiens
  misc_RNA (1)...(19): siRNA sense strand
ugacugcccuggagauuug

SEQ ID NO: 817673 - RNA, 19 nt, Homo sapiens
  misc_RNA (1)...(19): siRNA sense strand
ccagaaugcauuuaagaua

SEQ ID NO: 817674 - RNA, 19 nt, Homo sapiens
  misc_RNA (1)...(19): siRNA sense strand
gaagauaaggagccagaaa

SEQ ID NO: 817675 - RNA, 19 nt, Homo sapiens
  misc_RNA (1)...(19): siRNA sense strand
gaaggaauugucuuagaaa

SEQ ID NO: 817676 - RNA, 19 nt, Homo sapiens
  misc_RNA (1)...(19): siRNA sense strand
gaaguagccgguagagauu

SEQ ID NO: 817677 - RNA, 19 nt, Homo sapiens
  misc_RNA (1)...(19): siRNA sense strand
ggugauauacuucauguga

SEQ ID NO: 817678 - RNA, 19 nt, Homo sapiens
  misc_RNA (1)...(19): siRNA sense strand
gcagaacaauggccacuac

SEQ ID NO: 817679 - RNA, 19 nt, Homo sapiens
  misc_RNA (1)...(19): siRNA sense strand
cagaaugaauugcgucaga

SEQ ID NO: 817680 - RNA, 19 nt, Homo sapiens
  misc_RNA (1)...(19): siRNA sense strand
gcaccaggaugaugccaau

SEQ ID NO: 817681 - RNA, 19 nt, Homo sapiens
  misc_RNA (1)...(19): siRNA sense strand
ggacgaagauaaucaaccu

SEQ ID NO: 817682 - RNA, 19 nt, Homo sapiens
  misc_RNA (1)...(19): siRNA sense strand
ggaaacaguaauccaugua

SEQ ID NO: 817683 - RNA, 19 nt, Homo sapiens
  misc_RNA (1)...(19): siRNA sense strand
uagauaacccuauguuuga

SEQ ID NO: 817684 - RNA, 19 nt, Homo sapiens
  misc_RNA (1)...(19): siRNA sense strand
caaggccaguccuccauuu

SEQ ID NO: 817685 - RNA, 19 nt, Homo sapiens
  misc_RNA (1)...(19): siRNA sense strand
ggacaagaacuaacugcuu

SEQ ID NO: 817686 - RNA, 19 nt, Homo sapiens
  misc_RNA (1)...(19): siRNA sense strand
uaaggaaggacaagaacua

SEQ ID NO: 817687 - RNA, 19 nt, Homo sapiens
  misc_RNA (1)...(19): siRNA sense strand
uuaagaaacuagcccaaau

SEQ ID NO: 817688 - RNA, 19 nt, Homo sapiens
  misc_RNA (1)...(19): siRNA sense strand
gaagauaaucaaccucuag

SEQ ID NO: 817689 - RNA, 19 nt, Homo sapiens
  misc_RNA (1)...(19): siRNA sense strand
gagagaguuuaugaaagua

SEQ ID NO: 817690 - RNA, 19 nt, Homo sapiens
  misc_RNA (1)...(19): siRNA sense strand
gacaacaucccauaugaau

SEQ ID NO: 817691 - RNA, 19 nt, Homo sapiens
  misc_RNA (1)...(19): siRNA sense strand
cauugagcauggugaauuu

SEQ ID NO: 817692 - RNA, 19 nt, Homo sapiens
  misc_RNA (1)...(19): siRNA sense strand
gagauuaccacuuuguuuc

SEQ ID NO: 817693 - RNA, 19 nt, Homo sapiens
  misc_RNA (1)...(19): siRNA sense strand
ggaaaugucacuuuaucau

SEQ ID NO: 817694 - RNA, 19 nt, Homo sapiens
  misc_RNA (1)...(19): siRNA sense strand
gcaugaaggagaugaaguu

SEQ ID NO: 817695 - RNA, 19 nt, Homo sapiens
  misc_RNA (1)...(19): siRNA sense strand
gaagccaguucaucauaag

SEQ ID NO: 817696 - RNA, 19 nt, Homo sapiens
  misc_RNA (1)...(19): siRNA sense strand
cagaaugcauuuaagauac

SEQ ID NO: 817697 - RNA, 19 nt, Homo sapiens
  misc_RNA (1)...(19): siRNA sense strand
agaaaaggcucgugauauu

SEQ ID NO: 817698 - RNA, 19 nt, Homo sapiens
  misc_RNA (1)...(19): siRNA sense strand
uaaagccuaucaggaauug

SEQ ID NO: 817699 - RNA, 19 nt, Homo sapiens
  misc_RNA (1)...(19): siRNA sense strand
ugaagacucuccggaauuc

SEQ ID NO: 817700 - RNA, 19 nt, Homo sapiens
  misc_RNA (1)...(19): siRNA sense strand
gucagaggcucaugaacaa

SEQ ID NO: 817701 - RNA, 19 nt, Homo sapiens
  misc_RNA (1)...(19): siRNA sense strand
ugacaacgaggagaucuua

SEQ ID NO: 817702 - RNA, 19 nt, Homo sapiens
  misc_RNA (1)...(19): siRNA sense strand
gaugaaguucuagagauua

SEQ ID NO: 817703 - RNA, 19 nt, Homo sapiens
  misc_RNA (1)...(19): siRNA sense strand
uaagaaacuagcccaaauu

SEQ ID NO: 817704 - RNA, 19 nt, Homo sapiens
  misc_RNA (1)...(19): siRNA sense strand
acgaggagaucuuaaccua

SEQ ID NO: 817705 - RNA, 19 nt, Homo sapiens
  misc_RNA (1)...(19): siRNA sense strand
gauauuccguugggugcua

SEQ ID NO: 817706 - RNA, 19 nt, Homo sapiens
  misc_RNA (1)...(19): siRNA sense strand
gaaacuagcccaaauuccu

SEQ ID NO: 817707 - RNA, 19 nt, Homo sapiens
  misc_RNA (1)...(19): siRNA sense strand
gaaaugucacuuuaucauc

SEQ ID NO: 817708 - RNA, 19 nt, Homo sapiens
  misc_RNA (1)...(19): siRNA sense strand
augaggaaaugucacuuua

SEQ ID NO: 817709 - RNA, 19 nt, Homo sapiens
  misc_RNA (1)...(19): siRNA sense strand
agaugaaguucuagagauu

SEQ ID NO: 817710 - RNA, 19 nt, Homo sapiens
  misc_RNA (1)...(19): siRNA sense strand
uaacugcuuugcugaauac

SEQ ID NO: 817711 - RNA, 19 nt, Homo sapiens
  misc_RNA (1)...(19): siRNA sense strand
cauaugaaugggcauguua

SEQ ID NO: 817712 - RNA, 19 nt, Homo sapiens
  misc_RNA (1)...(19): siRNA sense strand
cuaacugcuuugcugaaua

SEQ ID NO: 817713 - RNA, 19 nt, Homo sapiens
  misc_RNA (1)...(19): siRNA sense strand
gaaguucuagagauuaaug

SEQ ID NO: 817714 - RNA, 19 nt, Homo sapiens
  misc_RNA (1)...(19): siRNA sense strand
gaaaguauuggccaguaug

SEQ ID NO: 817715 - RNA, 19 nt, Homo sapiens
  misc_RNA (1)...(19): siRNA sense strand
gauaacccuauguuugaua

SEQ ID NO: 817716 - RNA, 19 nt, Homo sapiens
  misc_RNA (1)...(19): siRNA sense strand
ccugaagaguugagagaaa

SEQ ID NO: 817717 - RNA, 19 nt, Homo sapiens
  misc_RNA (1)...(19): siRNA sense strand
ugaaacaaaccauagaaga

SEQ ID NO: 817718 - RNA, 19 nt, Homo sapiens
  misc_RNA (1)...(19): siRNA sense strand
ggagaugaaguucuagaga

SEQ ID NO: 817719 - RNA, 19 nt, Homo sapiens
  misc_RNA (1)...(19): siRNA sense strand
cagaugagagaguuuauga

SEQ ID NO: 817720 - RNA, 19 nt, Homo sapiens
  misc_RNA (1)...(19): siRNA sense strand
cuuagaaaguccucauuau

SEQ ID NO: 817721 - RNA, 19 nt, Homo sapiens
  misc_RNA (1)...(19): siRNA sense strand
caaagaccggaauagauaa

SEQ ID NO: 817722 - RNA, 19 nt, Homo sapiens
  misc_RNA (1)...(19): siRNA sense strand
uccaaagccugaagaguug

SEQ ID NO: 817723 - RNA, 19 nt, Homo sapiens
  misc_RNA (1)...(19): siRNA sense strand
gggcauuauuggccaaaga

SEQ ID NO: 817724 - RNA, 19 nt, Homo sapiens
  misc_RNA (1)...(19): siRNA sense strand
cgaagauaaucaaccucua

SEQ ID NO: 817725 - RNA, 19 nt, Homo sapiens
  misc_RNA (1)...(19): siRNA sense strand
agaggaaggaauugucuua

SEQ ID NO: 817726 - RNA, 19 nt, Homo sapiens
  misc_RNA (1)...(19): siRNA sense strand
gagaaaucauugagaagac

SEQ ID NO: 817727 - RNA, 19 nt, Homo sapiens
  misc_RNA (1)...(19): siRNA sense strand
gauacacaaugccaucaca

SEQ ID NO: 817728 - RNA, 19 nt, Homo sapiens
  misc_RNA (1)...(19): siRNA sense strand
ugaaaguauuggccaguau

SEQ ID NO: 817729 - RNA, 19 nt, Homo sapiens
  misc_RNA (1)...(19): siRNA sense strand
ugaaugggcauguuacaga

SEQ ID NO: 817730 - RNA, 19 nt, Homo sapiens
  misc_RNA (1)...(19): siRNA sense strand
ugauaugcaugguacuuug

SEQ ID NO: 817731 - RNA, 19 nt, Homo sapiens
  misc_RNA (1)...(19): siRNA sense strand
gugcuacaguucguaauga

SEQ ID NO: 817732 - RNA, 19 nt, Homo sapiens
  misc_RNA (1)...(19): siRNA sense strand
acacaaugccaucacagua

SEQ ID NO: 817733 - RNA, 19 nt, Homo sapiens
  misc_RNA (1)...(19): siRNA sense strand
ugaauuccgaucuugauaa

SEQ ID NO: 817734 - RNA, 19 nt, Homo sapiens
  misc_RNA (1)...(19): siRNA sense strand
agaaguagccgguagagau

SEQ ID NO: 817735 - RNA, 19 nt, Homo sapiens
  misc_RNA (1)...(19): siRNA sense strand
gugcacaguuggagcguau

SEQ ID NO: 817736 - RNA, 19 nt, Homo sapiens
  misc_RNA (1)...(19): siRNA sense strand
aaacuguggugugcaaaga

SEQ ID NO: 817737 - RNA, 19 nt, Homo sapiens
  misc_RNA (1)...(19): siRNA sense strand
gggaagccaugaaacaaac

SEQ ID NO: 817738 - RNA, 19 nt, Homo sapiens
  misc_RNA (1)...(19): siRNA sense strand
ucagaugacccuuauguuc

SEQ ID NO: 817739 - RNA, 19 nt, Homo sapiens
  misc_RNA (1)...(19): siRNA sense strand
gaaagaugucaaugagguu

SEQ ID NO: 817740 - RNA, 19 nt, Homo sapiens
  misc_RNA (1)...(19): siRNA sense strand
uaucaggaauugcuuaggu

SEQ ID NO: 817741 - RNA, 19 nt, Homo sapiens
  misc_RNA (1)...(19): siRNA sense strand
gaagcaauacccagaauuu

SEQ ID NO: 817742 - RNA, 19 nt, Homo sapiens
  misc_RNA (1)...(19): siRNA sense strand
ggaacgagcugugcuacaa

SEQ ID NO: 817743 - RNA, 19 nt, Homo sapiens
  misc_RNA (1)...(19): siRNA sense strand
gcgagaaccugcugacugu

SEQ ID NO: 817744 - RNA, 19 nt, Homo sapiens
  misc_RNA (1)...(19): siRNA sense strand
ucaacgaccuggaugacua

SEQ ID NO: 817745 - RNA, 19 nt, Homo sapiens
  misc_RNA (1)...(19): siRNA sense strand
gaggagauguggaaguuca

SEQ ID NO: 817746 - RNA, 19 nt, Homo sapiens
  misc_RNA (1)...(19): siRNA sense strand
ugaagcaggugcacuguga

SEQ ID NO: 817747 - RNA, 19 nt, Homo sapiens
  misc_RNA (1)...(19): siRNA sense strand
ggaggugacccgagacuuu

SEQ ID NO: 817748 - RNA, 19 nt, Homo sapiens
  misc_RNA (1)...(19): siRNA sense strand
ccaagguuguguccaagua

SEQ ID NO: 817749 - RNA, 19 nt, Homo sapiens
  misc_RNA (1)...(19): siRNA sense strand
caucgaaagucccguguug

SEQ ID NO: 817750 - RNA, 19 nt, Homo sapiens
  misc_RNA (1)...(19): siRNA sense strand
gagaagcaauacccagaau

SEQ ID NO: 817751 - RNA, 19 nt, Homo sapiens
  misc_RNA (1)...(19): siRNA sense strand
ggacaacggcccagaugga

SEQ ID NO: 817752 - RNA, 19 nt, Homo sapiens
  misc_RNA (1)...(19): siRNA sense strand
aggagaagcugccacuuga

SEQ ID NO: 817753 - RNA, 19 nt, Homo sapiens
  misc_RNA (1)...(19): siRNA sense strand
gagaagacgugggaaaggu

SEQ ID NO: 817754 - RNA, 19 nt, Homo sapiens
  misc_RNA (1)...(19): siRNA sense strand
ggaaguguuugggaucaug

SEQ ID NO: 817755 - RNA, 19 nt, Homo sapiens
  misc_RNA (1)...(19): siRNA sense strand
ccacggcacccuucuucua

SEQ ID NO: 817756 - RNA, 19 nt, Homo sapiens
  misc_RNA (1)...(19): siRNA sense strand
guucguguaugauguguuc

SEQ ID NO: 817757 - RNA, 19 nt, Homo sapiens
  misc_RNA (1)...(19): siRNA sense strand
ggacagcugaggagaagau

SEQ ID NO: 817758 - RNA, 19 nt, Homo sapiens
  misc_RNA (1)...(19): siRNA sense strand
ccaagagccugcacagcau

SEQ ID NO: 817759 - RNA, 19 nt, Homo sapiens
  misc_RNA (1)...(19): siRNA sense strand
gguauaucauggacgaguu

SEQ ID NO: 817760 - RNA, 19 nt, Homo sapiens
  misc_RNA (1)...(19): siRNA sense strand
gcaaguggaggagguagaa

SEQ ID NO: 817761 - RNA, 19 nt, Homo sapiens
  misc_RNA (1)...(19): siRNA sense strand
gaagaugccggugugguau

SEQ ID NO: 817762 - RNA, 19 nt, Homo sapiens
  misc_RNA (1)...(19): siRNA sense strand
uggaggagauguggaaguu

SEQ ID NO: 817763 - RNA, 19 nt, Homo sapiens
  misc_RNA (1)...(19): siRNA sense strand
agaagaugccgguguggua

SEQ ID NO: 817764 - RNA, 19 nt, Homo sapiens
  misc_RNA (1)...(19): siRNA sense strand
caacuucucacacuucaag

SEQ ID NO: 817765 - RNA, 19 nt, Homo sapiens
  misc_RNA (1)...(19): siRNA sense strand
gagaagcugccacuugaca

SEQ ID NO: 817766 - RNA, 19 nt, Homo sapiens
  misc_RNA (1)...(19): siRNA sense strand
caacagcaucuuccucauc

SEQ ID NO: 817767 - RNA, 19 nt, Homo sapiens
  misc_RNA (1)...(19): siRNA sense strand
ugggaaaggucaaguucga

SEQ ID NO: 817768 - RNA, 19 nt, Homo sapiens
  misc_RNA (1)...(19): siRNA sense strand
ucucacacuucaaggacua

SEQ ID NO: 817769 - RNA, 19 nt, Homo sapiens
  misc_RNA (1)...(19): siRNA sense strand
cgacauccucuucaacuuc

SEQ ID NO: 817770 - RNA, 19 nt, Homo sapiens
  misc_RNA (1)...(19): siRNA sense strand
gacauccucuucaacuucu

SEQ ID NO: 817771 - RNA, 19 nt, Homo sapiens
  misc_RNA (1)...(19): siRNA sense strand
ggaaguucaaccagaccua

SEQ ID NO: 817772 - RNA, 19 nt, Homo sapiens
  misc_RNA (1)...(19): siRNA sense strand
gaggugacccgagacuuug

SEQ ID NO: 817773 - RNA, 19 nt, Homo sapiens
  misc_RNA (1)...(19): siRNA sense strand
gaagcugccacuugacauc

SEQ ID NO: 817774 - RNA, 19 nt, Homo sapiens
  misc_RNA (1)...(19): siRNA sense strand
cacguuaccugccuugucu

SEQ ID NO: 817775 - RNA, 19 nt, Homo sapiens
  misc_RNA (1)...(19): siRNA sense strand
gaacuaugacccggaugug

SEQ ID NO: 817776 - RNA, 19 nt, Homo sapiens
  misc_RNA (1)...(19): siRNA sense strand
ggacgccgacauccucuuc

SEQ ID NO: 817777 - RNA, 19 nt, Homo sapiens
  misc_RNA (1)...(19): siRNA sense strand
ggugcacugugaagaguuc

SEQ ID NO: 817778 - RNA, 19 nt, Homo sapiens
  misc_RNA (1)...(19): siRNA sense strand
gacaacggcccagauggaa

SEQ ID NO: 817779 - RNA, 19 nt, Homo sapiens
  misc_RNA (1)...(19): siRNA sense strand
gaacgagcugugcuacaag

SEQ ID NO: 817780 - RNA, 19 nt, Homo sapiens
  misc_RNA (1)...(19): siRNA sense strand
ucgaaagucccguguuguu

SEQ ID NO: 817781 - RNA, 19 nt, Homo sapiens
  misc_RNA (1)...(19): siRNA sense strand
cuucaaggacuacaggaaa

SEQ ID NO: 817782 - RNA, 19 nt, Homo sapiens
  misc_RNA (1)...(19): siRNA sense strand
acggugagcugcccaguac

SEQ ID NO: 817783 - RNA, 19 nt, Homo sapiens
  misc_RNA (1)...(19): siRNA sense strand
cguccaggcugagaucuuc

SEQ ID NO: 817784 - RNA, 19 nt, Homo sapiens
  misc_RNA (1)...(19): siRNA sense strand
ggacguccaggcugagauc

SEQ ID NO: 817785 - RNA, 19 nt, Homo sapiens
  misc_RNA (1)...(19): siRNA sense strand
gcaggugcacugugaagag

SEQ ID NO: 817786 - RNA, 19 nt, Homo sapiens
  misc_RNA (1)...(19): siRNA sense strand
gaggacaaccacuggaucu

SEQ ID NO: 817787 - RNA, 19 nt, Homo sapiens
  misc_RNA (1)...(19): siRNA sense strand
aaggagaagcugccacuug

SEQ ID NO: 817788 - RNA, 19 nt, Homo sapiens
  misc_RNA (1)...(19): siRNA sense strand
ccgcauggccaaccugaug

SEQ ID NO: 817789 - RNA, 19 nt, Homo sapiens
  misc_RNA (1)...(19): siRNA sense strand
gcgugcugcugaaccaguu

SEQ ID NO: 817790 - RNA, 19 nt, Homo sapiens
  misc_RNA (1)...(19): siRNA sense strand
cgaaagucccguguuguuc

SEQ ID NO: 817791 - RNA, 19 nt, Homo sapiens
  misc_RNA (1)...(19): siRNA sense strand
ccgacauccucuucaacuu

SEQ ID NO: 817792 - RNA, 19 nt, Homo sapiens
  misc_RNA (1)...(19): siRNA sense strand
uacgguuguucguguauga

SEQ ID NO: 817793 - RNA, 19 nt, Homo sapiens
  misc_RNA (1)...(19): siRNA sense strand
gaaaggucaaguucgacau

SEQ ID NO: 817794 - RNA, 19 nt, Homo sapiens
  misc_RNA (1)...(19): siRNA sense strand
ugagaagcaauacccagaa

SEQ ID NO: 817795 - RNA, 19 nt, Homo sapiens
  misc_RNA (1)...(19): siRNA sense strand
gaagcaggugcacugugaa

SEQ ID NO: 817796 - RNA, 19 nt, Homo sapiens
  misc_RNA (1)...(19): siRNA sense strand
gcacuaccaggccauucug

SEQ ID NO: 817797 - RNA, 19 nt, Homo sapiens
  misc_RNA (1)...(19): siRNA sense strand
gaacuucaaccccgacugu

SEQ ID NO: 817798 - RNA, 19 nt, Homo sapiens
  misc_RNA (1)...(19): siRNA sense strand
ccaaccugaugggcauuga

SEQ ID NO: 817799 - RNA, 19 nt, Homo sapiens
  misc_RNA (1)...(19): siRNA sense strand
gguuguucguguaugaugu

SEQ ID NO: 817800 - RNA, 19 nt, Homo sapiens
  misc_RNA (1)...(19): siRNA sense strand
caagcuggagcacgagguu

SEQ ID NO: 817801 - RNA, 19 nt, Homo sapiens
  misc_RNA (1)...(19): siRNA sense strand
cgucuucagcaccuuguuu

SEQ ID NO: 817802 - RNA, 19 nt, Homo sapiens
  misc_RNA (1)...(19): siRNA sense strand
caggugcacugugaagagu

SEQ ID NO: 817803 - RNA, 19 nt, Homo sapiens
  misc_RNA (1)...(19): siRNA sense strand
gugcugcugcggucaguga

SEQ ID NO: 817804 - RNA, 19 nt, Homo sapiens
  misc_RNA (1)...(19): siRNA sense strand
ccaacagcaucuuccucau

SEQ ID NO: 817805 - RNA, 19 nt, Homo sapiens
  misc_RNA (1)...(19): siRNA sense strand
ugggacagcugaggagaag

SEQ ID NO: 817806 - RNA, 19 nt, Homo sapiens
  misc_RNA (1)...(19): siRNA sense strand
gaacggccuucucuucaaa

SEQ ID NO: 817807 - RNA, 19 nt, Homo sapiens
  misc_RNA (1)...(19): siRNA sense strand
uaucagaucugcuacgaaa

SEQ ID NO: 817808 - RNA, 19 nt, Homo sapiens
  misc_RNA (1)...(19): siRNA sense strand
ggaagaccauugaagaguu

SEQ ID NO: 817809 - RNA, 19 nt, Homo sapiens
  misc_RNA (1)...(19): siRNA sense strand
gaauuaccgugguugauga

SEQ ID NO: 817810 - RNA, 19 nt, Homo sapiens
  misc_RNA (1)...(19): siRNA sense strand
gaagaccauugaagaguug

SEQ ID NO: 817811 - RNA, 19 nt, Homo sapiens
  misc_RNA (1)...(19): siRNA sense strand
gaacugggaagaccauuga

SEQ ID NO: 817812 - RNA, 19 nt, Homo sapiens
  misc_RNA (1)...(19): siRNA sense strand
ggacacaagcugccagaaa

SEQ ID NO: 817813 - RNA, 19 nt, Homo sapiens
  misc_RNA (1)...(19): siRNA sense strand
ggcugaagcucauuucuga

SEQ ID NO: 817814 - RNA, 19 nt, Homo sapiens
  misc_RNA (1)...(19): siRNA sense strand
agaaggagaugcugaaugg

SEQ ID NO: 817815 - RNA, 19 nt, Homo sapiens
  misc_RNA (1)...(19): siRNA sense strand
gugagaagauggguauuga

SEQ ID NO: 817816 - RNA, 19 nt, Homo sapiens
  misc_RNA (1)...(19): siRNA sense strand
gcagcaaaguaauggagaa

SEQ ID NO: 817817 - RNA, 19 nt, Homo sapiens
  misc_RNA (1)...(19): siRNA sense strand
gcucauuucugacaucauc

SEQ ID NO: 817818 - RNA, 19 nt, Homo sapiens
  misc_RNA (1)...(19): siRNA sense strand
guugccaugucaaaucuua

SEQ ID NO: 817819 - RNA, 19 nt, Homo sapiens
  misc_RNA (1)...(19): siRNA sense strand
gagauguugucuugucuuc

SEQ ID NO: 817820 - RNA, 19 nt, Homo sapiens
  misc_RNA (1)...(19): siRNA sense strand
gccaggaucuucugcaaag

SEQ ID NO: 817821 - RNA, 19 nt, Homo sapiens
  misc_RNA (1)...(19): siRNA sense strand
gcagaccaguucaagagau

SEQ ID NO: 817822 - RNA, 19 nt, Homo sapiens
  misc_RNA (1)...(19): siRNA sense strand
gcagaaaacugacagacau

SEQ ID NO: 817823 - RNA, 19 nt, Homo sapiens
  misc_RNA (1)...(19): siRNA sense strand
gaagcucauuucugacauc

SEQ ID NO: 817824 - RNA, 19 nt, Homo sapiens
  misc_RNA (1)...(19): siRNA sense strand
gacacaagcugccagaaaa

SEQ ID NO: 817825 - RNA, 19 nt, Homo sapiens
  misc_RNA (1)...(19): siRNA sense strand
aaacugacagacaucauaa

SEQ ID NO: 817826 - RNA, 19 nt, Homo sapiens
  misc_RNA (1)...(19): siRNA sense strand
gagaagauggguauugaca

SEQ ID NO: 817827 - RNA, 19 nt, Homo sapiens
  misc_RNA (1)...(19): siRNA sense strand
aaauuugccuccacaguca

SEQ ID NO: 817828 - RNA, 19 nt, Homo sapiens
  misc_RNA (1)...(19): siRNA sense strand
ugagguggcugcagagaag

SEQ ID NO: 817829 - RNA, 19 nt, Homo sapiens
  misc_RNA (1)...(19): siRNA sense strand
gaaagcagaccaguucaag

SEQ ID NO: 817830 - RNA, 19 nt, Homo sapiens
  misc_RNA (1)...(19): siRNA sense strand
ugcagacacuguugaacua

SEQ ID NO: 817831 - RNA, 19 nt, Homo sapiens
  misc_RNA (1)...(19): siRNA sense strand
gaacuucugcagacuccaa

SEQ ID NO: 817832 - RNA, 19 nt, Homo sapiens
  misc_RNA (1)...(19): siRNA sense strand
gaacuauguggugcgcuua

SEQ ID NO: 817833 - RNA, 19 nt, Homo sapiens
  misc_RNA (1)...(19): siRNA sense strand
caagaaagcgcugggaauc

SEQ ID NO: 817834 - RNA, 19 nt, Homo sapiens
  misc_RNA (1)...(19): siRNA sense strand
gauguugucuugucuucag

SEQ ID NO: 817835 - RNA, 19 nt, Homo sapiens
  misc_RNA (1)...(19): siRNA sense strand
guggugcgcuuaagaacau

SEQ ID NO: 817836 - RNA, 19 nt, Homo sapiens
  misc_RNA (1)...(19): siRNA sense strand
uugaagaguuggagaagga

SEQ ID NO: 817837 - RNA, 19 nt, Homo sapiens
  misc_RNA (1)...(19): siRNA sense strand
gagaaggagaugcugaaug

SEQ ID NO: 817838 - RNA, 19 nt, Homo sapiens
  misc_RNA (1)...(19): siRNA sense strand
gggaaucacccucaucaag

SEQ ID NO: 817839 - RNA, 19 nt, Homo sapiens
  misc_RNA (1)...(19): siRNA sense strand
gcaaaggccaagugucuac

SEQ ID NO: 817840 - RNA, 19 nt, Homo sapiens
  misc_RNA (1)...(19): siRNA sense strand
caccaucggcagcaaagua

SEQ ID NO: 817841 - RNA, 19 nt, Homo sapiens
  misc_RNA (1)...(19): siRNA sense strand
agaagggacuacuggacaa

SEQ ID NO: 817842 - RNA, 19 nt, Homo sapiens
  misc_RNA (1)...(19): siRNA sense strand
agacacuguugaacuaugu

SEQ ID NO: 817843 - RNA, 19 nt, Homo sapiens
  misc_RNA (1)...(19): siRNA sense strand
ggagagugcccaagaaagc

SEQ ID NO: 817844 - RNA, 19 nt, Homo sapiens
  misc_RNA (1)...(19): siRNA sense strand
gcugaugggagccaacauu

SEQ ID NO: 817845 - RNA, 19 nt, Homo sapiens
  misc_RNA (1)...(19): siRNA sense strand
cgaauuaccgugguugaug

SEQ ID NO: 817846 - RNA, 19 nt, Homo sapiens
  misc_RNA (1)...(19): siRNA sense strand
gucaagaaacuucagaaau

SEQ ID NO: 817847 - RNA, 19 nt, Homo sapiens
  misc_RNA (1)...(19): siRNA sense strand
cagaccaguucaagagaug

SEQ ID NO: 817848 - RNA, 19 nt, Homo sapiens
  misc_RNA (1)...(19): siRNA sense strand
aaaugugguugccauguca

SEQ ID NO: 817849 - RNA, 19 nt, Homo sapiens
  misc_RNA (1)...(19): siRNA sense strand
ccaagaaagcgcugggaau

SEQ ID NO: 817850 - RNA, 19 nt, Homo sapiens
  misc_RNA (1)...(19): siRNA sense strand
uuacugcaguguaucagau

SEQ ID NO: 817851 - RNA, 19 nt, Homo sapiens
  misc_RNA (1)...(19): siRNA sense strand
gaccugaucaccaccuguu

SEQ ID NO: 817852 - RNA, 19 nt, Homo sapiens
  misc_RNA (1)...(19): siRNA sense strand
acagccaccuuccuagaga

SEQ ID NO: 817853 - RNA, 19 nt, Homo sapiens
  misc_RNA (1)...(19): siRNA sense strand
ggguucagcuguugcaaaa

SEQ ID NO: 817854 - RNA, 19 nt, Homo sapiens
  misc_RNA (1)...(19): siRNA sense strand
cugacagacaucauaaaua

SEQ ID NO: 817855 - RNA, 19 nt, Homo sapiens
  misc_RNA (1)...(19): siRNA sense strand
cagacacuguugaacuaug

SEQ ID NO: 817856 - RNA, 19 nt, Homo sapiens
  misc_RNA (1)...(19): siRNA sense strand
gaugaugcagacacuguug

SEQ ID NO: 817857 - RNA, 19 nt, Homo sapiens
  misc_RNA (1)...(19): siRNA sense strand
uacgaaagcagaccaguuc

SEQ ID NO: 817858 - RNA, 19 nt, Homo sapiens
  misc_RNA (1)...(19): siRNA sense strand
gacaucauccgugagaaga

SEQ ID NO: 817859 - RNA, 19 nt, Homo sapiens
  misc_RNA (1)...(19): siRNA sense strand
gggacuacuggacaaguuu

SEQ ID NO: 817860 - RNA, 19 nt, Homo sapiens
  misc_RNA (1)...(19): siRNA sense strand
gggaagaccauugaagagu

SEQ ID NO: 817861 - RNA, 19 nt, Homo sapiens
  misc_RNA (1)...(19): siRNA sense strand
uagcgaggcugugcaggau

SEQ ID NO: 817862 - RNA, 19 nt, Homo sapiens
  misc_RNA (1)...(19): siRNA sense strand
ucagagccauccagagcau

SEQ ID NO: 817863 - RNA, 19 nt, Homo sapiens
  misc_RNA (1)...(19): siRNA sense strand
cgaaagcagaccaguucaa

SEQ ID NO: 817864 - RNA, 19 nt, Homo sapiens
  misc_RNA (1)...(19): siRNA sense strand
gccugggacucauggaaau

SEQ ID NO: 817865 - RNA, 19 nt, Homo sapiens
  misc_RNA (1)...(19): siRNA sense strand
caguguaucagaucugcua

SEQ ID NO: 817866 - RNA, 19 nt, Homo sapiens
  misc_RNA (1)...(19): siRNA sense strand
ugucaagaaacuucagaaa

SEQ ID NO: 817867 - RNA, 19 nt, Homo sapiens
  misc_RNA (1)...(19): siRNA sense strand
ccauccagagcauacauaa

SEQ ID NO: 817868 - RNA, 19 nt, Homo sapiens
  misc_RNA (1)...(19): siRNA sense strand
aaacagugaauggcagaaa

SEQ ID NO: 817869 - RNA, 19 nt, Homo sapiens
  misc_RNA (1)...(19): siRNA sense strand
ggacuacuggacaaguuuc

SEQ ID NO: 817870 - RNA, 19 nt, Homo sapiens
  misc_RNA (1)...(19): siRNA sense strand
gguaauaaugucaagaaac

SEQ ID NO: 817871 - RNA, 19 nt, Homo sapiens
  misc_RNA (1)...(19): siRNA sense strand
gcagacacuguugaacuau

SEQ ID NO: 817872 - RNA, 19 nt, Homo sapiens
  misc_RNA (1)...(19): siRNA sense strand
gggcugaagcucauuucug

SEQ ID NO: 817873 - RNA, 19 nt, Homo sapiens
  misc_RNA (1)...(19): siRNA sense strand
cagaccugcugguguuugu

SEQ ID NO: 817874 - RNA, 19 nt, Homo sapiens
  misc_RNA (1)...(19): siRNA sense strand
cuacgaaagcagaccaguu

SEQ ID NO: 817875 - RNA, 19 nt, Homo sapiens
  misc_RNA (1)...(19): siRNA sense strand
cuacagccaccuuccuaga

SEQ ID NO: 817876 - RNA, 19 nt, Homo sapiens
  misc_RNA (1)...(19): siRNA sense strand
ggagaaggagaugcugaau

SEQ ID NO: 817877 - RNA, 19 nt, Homo sapiens
  misc_RNA (1)...(19): siRNA sense strand
ccauugaagaguuggagaa

SEQ ID NO: 817878 - RNA, 19 nt, Homo sapiens
  misc_RNA (1)...(19): siRNA sense strand
aagcagaccaguucaagag

SEQ ID NO: 817879 - RNA, 19 nt, Homo sapiens
  misc_RNA (1)...(19): siRNA sense strand
agaaagcgcugggaaucac

SEQ ID NO: 817880 - RNA, 19 nt, Homo sapiens
  misc_RNA (1)...(19): siRNA sense strand
uguaucagaucugcuacga

SEQ ID NO: 817881 - RNA, 19 nt, Homo sapiens
  misc_RNA (1)...(19): siRNA sense strand
caucggcagcaaaguaaug

SEQ ID NO: 817882 - RNA, 19 nt, Homo sapiens
  misc_RNA (1)...(19): siRNA sense strand
gugaauggcagaaaacuga

SEQ ID NO: 817883 - RNA, 19 nt, Homo sapiens
  misc_RNA (1)...(19): siRNA sense strand
uauguggugcgcuuaagaa

SEQ ID NO: 817884 - RNA, 19 nt, Homo sapiens
  misc_RNA (1)...(19): siRNA sense strand
gccauccagagcauacaua

SEQ ID NO: 817885 - RNA, 19 nt, Homo sapiens
  misc_RNA (1)...(19): siRNA sense strand
gaccaguucaagagauguu

SEQ ID NO: 817886 - RNA, 19 nt, Homo sapiens
  misc_RNA (1)...(19): siRNA sense strand
uaccgcauccucaaacaga

SEQ ID NO: 817887 - RNA, 19 nt, Homo sapiens
  misc_RNA (1)...(19): siRNA sense strand
gaaacagugaauggcagaa

SEQ ID NO: 817888 - RNA, 19 nt, Homo sapiens
  misc_RNA (1)...(19): siRNA sense strand
cugcaaaggccaagugucu

SEQ ID NO: 817889 - RNA, 19 nt, Homo sapiens
  misc_RNA (1)...(19): siRNA sense strand
aaaacugacagacaucaua

SEQ ID NO: 817890 - RNA, 19 nt, Homo sapiens
  misc_RNA (1)...(19): siRNA sense strand
agggacuacuggacaaguu

SEQ ID NO: 817891 - RNA, 19 nt, Homo sapiens
  misc_RNA (1)...(19): siRNA sense strand
caaacagaagggacuacug

SEQ ID NO: 817892 - RNA, 19 nt, Homo sapiens
  misc_RNA (1)...(19): siRNA sense strand
gaccugcugguguuuguca

SEQ ID NO: 817893 - RNA, 19 nt, Homo sapiens
  misc_RNA (1)...(19): siRNA sense strand
cugggaagaccauugaaga

SEQ ID NO: 817894 - RNA, 19 nt, Homo sapiens
  misc_RNA (1)...(19): siRNA sense strand
acaacgagcucuauaggaa

SEQ ID NO: 817895 - RNA, 19 nt, Homo sapiens
  misc_RNA (1)...(19): siRNA sense strand
caacagccaucugcuagaa

SEQ ID NO: 817896 - RNA, 19 nt, Homo sapiens
  misc_RNA (1)...(19): siRNA sense strand
gcccagaacuccacugaca

SEQ ID NO: 817897 - RNA, 19 nt, Homo sapiens
  misc_RNA (1)...(19): siRNA sense strand
uggagaaggucacggagaa

SEQ ID NO: 817898 - RNA, 19 nt, Homo sapiens
  misc_RNA (1)...(19): siRNA sense strand
gcaagcggcuguccuacac

SEQ ID NO: 817899 - RNA, 19 nt, Homo sapiens
  misc_RNA (1)...(19): siRNA sense strand
gaggacaacgagcucuaua

SEQ ID NO: 817900 - RNA, 19 nt, Homo sapiens
  misc_RNA (1)...(19): siRNA sense strand
gagaagcugcgcaggauuc

SEQ ID NO: 817901 - RNA, 19 nt, Homo sapiens
  misc_RNA (1)...(19): siRNA sense strand
gcaugggccagcacuauga

SEQ ID NO: 817902 - RNA, 19 nt, Homo sapiens
  misc_RNA (1)...(19): siRNA sense strand
gcaaggacagccucaccaa

SEQ ID NO: 817903 - RNA, 19 nt, Homo sapiens
  misc_RNA (1)...(19): siRNA sense strand
ggacaacgagcucuauagg

SEQ ID NO: 817904 - RNA, 19 nt, Homo sapiens
  misc_RNA (1)...(19): siRNA sense strand
aggaaggacugcaaucuag

SEQ ID NO: 817905 - RNA, 19 nt, Homo sapiens
  misc_RNA (1)...(19): siRNA sense strand
gcgcugagccacgagauug

SEQ ID NO: 817906 - RNA, 19 nt, Homo sapiens
  misc_RNA (1)...(19): siRNA sense strand
gccacuaccuggagaucga

SEQ ID NO: 817907 - RNA, 19 nt, Homo sapiens
  misc_RNA (1)...(19): siRNA sense strand
gcagugacacagcccucua

SEQ ID NO: 817908 - RNA, 19 nt, Homo sapiens
  misc_RNA (1)...(19): siRNA sense strand
uaggaaggacugcaaucua

SEQ ID NO: 817909 - RNA, 19 nt, Homo sapiens
  misc_RNA (1)...(19): siRNA sense strand
cggagaagcugcgcaggau

SEQ ID NO: 817910 - RNA, 19 nt, Homo sapiens
  misc_RNA (1)...(19): siRNA sense strand
ccacacacaagcucgagaa

SEQ ID NO: 817911 - RNA, 19 nt, Homo sapiens
  misc_RNA (1)...(19): siRNA sense strand
aggaggaacuggagaaggu

SEQ ID NO: 817912 - RNA, 19 nt, Homo sapiens
  misc_RNA (1)...(19): siRNA sense strand
gacaucuacugcagugaca

SEQ ID NO: 817913 - RNA, 19 nt, Homo sapiens
  misc_RNA (1)...(19): siRNA sense strand
gacaacgagcucuauagga

SEQ ID NO: 817914 - RNA, 19 nt, Homo sapiens
  misc_RNA (1)...(19): siRNA sense strand
gcgugagccugcacaugga

SEQ ID NO: 817915 - RNA, 19 nt, Homo sapiens
  misc_RNA (1)...(19): siRNA sense strand
gcaggauucagagcaacua

SEQ ID NO: 817916 - RNA, 19 nt, Homo sapiens
  misc_RNA (1)...(19): siRNA sense strand
ucaccaaggcccagcucua

SEQ ID NO: 817917 - RNA, 19 nt, Homo sapiens
  misc_RNA (1)...(19): siRNA sense strand
gcuacaaggccgacagcuu

SEQ ID NO: 817918 - RNA, 19 nt, Homo sapiens
  misc_RNA (1)...(19): siRNA sense strand
ccacgucggaggagaagga

SEQ ID NO: 817919 - RNA, 19 nt, Homo sapiens
  misc_RNA (1)...(19): siRNA sense strand
ggagaagcugcgcaggauu

SEQ ID NO: 817920 - RNA, 19 nt, Homo sapiens
  misc_RNA (1)...(19): siRNA sense strand
ccucaacagccaucugcua

SEQ ID NO: 817921 - RNA, 19 nt, Homo sapiens
  misc_RNA (1)...(19): siRNA sense strand
gcucuacgccagcuacaag

SEQ ID NO: 817922 - RNA, 19 nt, Homo sapiens
  misc_RNA (1)...(19): siRNA sense strand
ggauucagagcaacuacau

SEQ ID NO: 817923 - RNA, 19 nt, Homo sapiens
  misc_RNA (1)...(19): siRNA sense strand
uugccaaggugcuggagaa

SEQ ID NO: 817924 - RNA, 19 nt, Homo sapiens
  misc_RNA (1)...(19): siRNA sense strand
aagccaaggugaccaucga

SEQ ID NO: 817925 - RNA, 19 nt, Homo sapiens
  misc_RNA (1)...(19): siRNA sense strand
ccaaggugaccaucgacaa

SEQ ID NO: 817926 - RNA, 19 nt, Homo sapiens
  misc_RNA (1)...(19): siRNA sense strand
caaggugaccaucgacaag

SEQ ID NO: 817927 - RNA, 19 nt, Homo sapiens
  misc_RNA (1)...(19): siRNA sense strand
cuacaagggagacaucuac

SEQ ID NO: 817928 - RNA, 19 nt, Homo sapiens
  misc_RNA (1)...(19): siRNA sense strand
cgucgcagcaggccaucua

SEQ ID NO: 817929 - RNA, 19 nt, Homo sapiens
  misc_RNA (1)...(19): siRNA sense strand
gagcugcccucggauuucc

SEQ ID NO: 817930 - RNA, 19 nt, Homo sapiens
  misc_RNA (1)...(19): siRNA sense strand
uacggaaccuugcucaacu

SEQ ID NO: 817931 - RNA, 19 nt, Homo sapiens
  misc_RNA (1)...(19): siRNA sense strand
aagcugcgcaggauucaga

SEQ ID NO: 817932 - RNA, 19 nt, Homo sapiens
  misc_RNA (1)...(19): siRNA sense strand
gggcccagaacuccacuga

SEQ ID NO: 817933 - RNA, 19 nt, Homo sapiens
  misc_RNA (1)...(19): siRNA sense strand
acauggcacugcagaggau

SEQ ID NO: 817934 - RNA, 19 nt, Homo sapiens
  misc_RNA (1)...(19): siRNA sense strand
acgcgaagcucaccaagau

SEQ ID NO: 817935 - RNA, 19 nt, Homo sapiens
  misc_RNA (1)...(19): siRNA sense strand
gcgcuucgcccacaacuac

SEQ ID NO: 817936 - RNA, 19 nt, Homo sapiens
  misc_RNA (1)...(19): siRNA sense strand
gcauagcggaccacagcuu

SEQ ID NO: 817937 - RNA, 19 nt, Homo sapiens
  misc_RNA (1)...(19): siRNA sense strand
uagcggaccacagcuugua

SEQ ID NO: 817938 - RNA, 19 nt, Homo sapiens
  misc_RNA (1)...(19): siRNA sense strand
ggcgaaagaaggccaacga

SEQ ID NO: 817939 - RNA, 19 nt, Homo sapiens
  misc_RNA (1)...(19): siRNA sense strand
ucugggcgcugacucaaac

SEQ ID NO: 817940 - RNA, 19 nt, Homo sapiens
  misc_RNA (1)...(19): siRNA sense strand
gaauuuaccuugguuguga

SEQ ID NO: 817941 - RNA, 19 nt, Homo sapiens
  misc_RNA (1)...(19): siRNA sense strand
caaacgaucugaaggugaa

SEQ ID NO: 817942 - RNA, 19 nt, Homo sapiens
  misc_RNA (1)...(19): siRNA sense strand
uuaccaagauggcguauuu

SEQ ID NO: 817943 - RNA, 19 nt, Homo sapiens
  misc_RNA (1)...(19): siRNA sense strand
ggaauacucucuucuugca

SEQ ID NO: 817944 - RNA, 19 nt, Homo sapiens
  misc_RNA (1)...(19): siRNA sense strand
gauggcguauuuaaguuua

SEQ ID NO: 817945 - RNA, 19 nt, Homo sapiens
  misc_RNA (1)...(19): siRNA sense strand
uuacaucccugauaacuau

SEQ ID NO: 817946 - RNA, 19 nt, Homo sapiens
  misc_RNA (1)...(19): siRNA sense strand
gaagagagcauuugcaaaa

SEQ ID NO: 817947 - RNA, 19 nt, Homo sapiens
  misc_RNA (1)...(19): siRNA sense strand
gaacugcaccaaagaaaca

SEQ ID NO: 817948 - RNA, 19 nt, Homo sapiens
  misc_RNA (1)...(19): siRNA sense strand
gcacugcucguuuguuuga

SEQ ID NO: 817949 - RNA, 19 nt, Homo sapiens
  misc_RNA (1)...(19): siRNA sense strand
gugcacugcucguuuguuu

SEQ ID NO: 817950 - RNA, 19 nt, Homo sapiens
  misc_RNA (1)...(19): siRNA sense strand
gcaauuagcuuuucuccau

SEQ ID NO: 817951 - RNA, 19 nt, Homo sapiens
  misc_RNA (1)...(19): siRNA sense strand
gagaaaagaugcugacuca

SEQ ID NO: 817952 - RNA, 19 nt, Homo sapiens
  misc_RNA (1)...(19): siRNA sense strand
gcagcacagucaacaaaug

SEQ ID NO: 817953 - RNA, 19 nt, Homo sapiens
  misc_RNA (1)...(19): siRNA sense strand
gaagaccccuaugcaauua

SEQ ID NO: 817954 - RNA, 19 nt, Homo sapiens
  misc_RNA (1)...(19): siRNA sense strand
guaaaguuguugacagugu

SEQ ID NO: 817955 - RNA, 19 nt, Homo sapiens
  misc_RNA (1)...(19): siRNA sense strand
caggugagcuggaugugaa

SEQ ID NO: 817956 - RNA, 19 nt, Homo sapiens
  misc_RNA (1)...(19): siRNA sense strand
caagauggcguauuuaagu

SEQ ID NO: 817957 - RNA, 19 nt, Homo sapiens
  misc_RNA (1)...(19): siRNA sense strand
caguuuacaucccugauaa

SEQ ID NO: 817958 - RNA, 19 nt, Homo sapiens
  misc_RNA (1)...(19): siRNA sense strand
gaaccauaaucauauuugg

SEQ ID NO: 817959 - RNA, 19 nt, Homo sapiens
  misc_RNA (1)...(19): siRNA sense strand
gaacccagaggcugcagua

SEQ ID NO: 817960 - RNA, 19 nt, Homo sapiens
  misc_RNA (1)...(19): siRNA sense strand
ggcauggacuuuaccaaga

SEQ ID NO: 817961 - RNA, 19 nt, Homo sapiens
  misc_RNA (1)...(19): siRNA sense strand
gaagcuaccaggcgucuau

SEQ ID NO: 817962 - RNA, 19 nt, Homo sapiens
  misc_RNA (1)...(19): siRNA sense strand
caguacagccuuucaguaa

SEQ ID NO: 817963 - RNA, 19 nt, Homo sapiens
  misc_RNA (1)...(19): siRNA sense strand
cugaagaacagcacaauaa

SEQ ID NO: 817964 - RNA, 19 nt, Homo sapiens
  misc_RNA (1)...(19): siRNA sense strand
gcggaaccauaaucauauu

SEQ ID NO: 817965 - RNA, 19 nt, Homo sapiens
  misc_RNA (1)...(19): siRNA sense strand
gcauggacuuuaccaagau

SEQ ID NO: 817966 - RNA, 19 nt, Homo sapiens
  misc_RNA (1)...(19): siRNA sense strand
gaagagaagacauuaacag

SEQ ID NO: 817967 - RNA, 19 nt, Homo sapiens
  misc_RNA (1)...(19): siRNA sense strand
ggugugcacugcucguuug

SEQ ID NO: 817968 - RNA, 19 nt, Homo sapiens
  misc_RNA (1)...(19): siRNA sense strand
aaacagcugccuucuauuc

SEQ ID NO: 817969 - RNA, 19 nt, Homo sapiens
  misc_RNA (1)...(19): siRNA sense strand
aaugugguuuggaguaaua

SEQ ID NO: 817970 - RNA, 19 nt, Homo sapiens
  misc_RNA (1)...(19): siRNA sense strand
agaaaacaguggcgacuua

SEQ ID NO: 817971 - RNA, 19 nt, Homo sapiens
  misc_RNA (1)...(19): siRNA sense strand
aaucauauuuggcagguau

SEQ ID NO: 817972 - RNA, 19 nt, Homo sapiens
  misc_RNA (1)...(19): siRNA sense strand
ggaaccauaaucauauuug

SEQ ID NO: 817973 - RNA, 19 nt, Homo sapiens
  misc_RNA (1)...(19): siRNA sense strand
gaucugaaggugaagagaa

SEQ ID NO: 817974 - RNA, 19 nt, Homo sapiens
  misc_RNA (1)...(19): siRNA sense strand
uaaaguuguugacaguguu

SEQ ID NO: 817975 - RNA, 19 nt, Homo sapiens
  misc_RNA (1)...(19): siRNA sense strand
ugaagaacagcacaauaaa

SEQ ID NO: 817976 - RNA, 19 nt, Homo sapiens
  misc_RNA (1)...(19): siRNA sense strand
ucuuaucgcucugcauuaa

SEQ ID NO: 817977 - RNA, 19 nt, Homo sapiens
  misc_RNA (1)...(19): siRNA sense strand
cagcagcacagucaacaaa

SEQ ID NO: 817978 - RNA, 19 nt, Homo sapiens
  misc_RNA (1)...(19): siRNA sense strand
ggaauccuucuguacauga

SEQ ID NO: 817979 - RNA, 19 nt, Homo sapiens
  misc_RNA (1)...(19): siRNA sense strand
uuaaugugguuuggaguaa

SEQ ID NO: 817980 - RNA, 19 nt, Homo sapiens
  misc_RNA (1)...(19): siRNA sense strand
caucuuaucgcucugcauu

SEQ ID NO: 817981 - RNA, 19 nt, Homo sapiens
  misc_RNA (1)...(19): siRNA sense strand
gaagaacagcacaauaaaa

SEQ ID NO: 817982 - RNA, 19 nt, Homo sapiens
  misc_RNA (1)...(19): siRNA sense strand
guucgauauuccugucuuu

SEQ ID NO: 817983 - RNA, 19 nt, Homo sapiens
  misc_RNA (1)...(19): siRNA sense strand
gugaagagagcauuugcaa

SEQ ID NO: 817984 - RNA, 19 nt, Homo sapiens
  misc_RNA (1)...(19): siRNA sense strand
ucuaugugcagccaucuua

SEQ ID NO: 817985 - RNA, 19 nt, Homo sapiens
  misc_RNA (1)...(19): siRNA sense strand
guauuaauguaugcaagga

SEQ ID NO: 817986 - RNA, 19 nt, Homo sapiens
  misc_RNA (1)...(19): siRNA sense strand
uggcagguauuaauguaug

SEQ ID NO: 817987 - RNA, 19 nt, Homo sapiens
  misc_RNA (1)...(19): siRNA sense strand
aagauggcguauuuaaguu

SEQ ID NO: 817988 - RNA, 19 nt, Homo sapiens
  misc_RNA (1)...(19): siRNA sense strand
gcucugcauuaaugugguu

SEQ ID NO: 817989 - RNA, 19 nt, Homo sapiens
  misc_RNA (1)...(19): siRNA sense strand
gcuggccugucauggguaa

SEQ ID NO: 817990 - RNA, 19 nt, Homo sapiens
  misc_RNA (1)...(19): siRNA sense strand
aggcggaaccauaaucaua

SEQ ID NO: 817991 - RNA, 19 nt, Homo sapiens
  misc_RNA (1)...(19): siRNA sense strand
cuggaauacucucuucuug

SEQ ID NO: 817992 - RNA, 19 nt, Homo sapiens
  misc_RNA (1)...(19): siRNA sense strand
ucaguacagccuuucagua

SEQ ID NO: 817993 - RNA, 19 nt, Homo sapiens
  misc_RNA (1)...(19): siRNA sense strand
gaacagcacaauaaaagug

SEQ ID NO: 817994 - RNA, 19 nt, Homo sapiens
  misc_RNA (1)...(19): siRNA sense strand
ugaccaaccuaaaauagaa

SEQ ID NO: 817995 - RNA, 19 nt, Homo sapiens
  misc_RNA (1)...(19): siRNA sense strand
ggaggcggaaccauaauca

SEQ ID NO: 817996 - RNA, 19 nt, Homo sapiens
  misc_RNA (1)...(19): siRNA sense strand
gaaacagcugccuucuauu

SEQ ID NO: 817997 - RNA, 19 nt, Homo sapiens
  misc_RNA (1)...(19): siRNA sense strand
ucauguugcuggccuguca

SEQ ID NO: 817998 - RNA, 19 nt, Homo sapiens
  misc_RNA (1)...(19): siRNA sense strand
gaauccuucuguacaugau

SEQ ID NO: 817999 - RNA, 19 nt, Homo sapiens
  misc_RNA (1)...(19): siRNA sense strand
ccacgaacugcaccaaaga

SEQ ID NO: 818000 - RNA, 19 nt, Homo sapiens
  misc_RNA (1)...(19): siRNA sense strand
ggugaagagaagacauuaa

SEQ ID NO: 818001 - RNA, 19 nt, Homo sapiens
  misc_RNA (1)...(19): siRNA sense strand
ggcggaaccauaaucauau

SEQ ID NO: 818002 - RNA, 19 nt, Homo sapiens
  misc_RNA (1)...(19): siRNA sense strand
uuaucgcucugcauuaaug

SEQ ID NO: 818003 - RNA, 19 nt, Homo sapiens
  misc_RNA (1)...(19): siRNA sense strand
gcccauaacuaagccuaca

SEQ ID NO: 818004 - RNA, 19 nt, Homo sapiens
  misc_RNA (1)...(19): siRNA sense strand
ggaugugaagagagcauuu

SEQ ID NO: 818005 - RNA, 19 nt, Homo sapiens
  misc_RNA (1)...(19): siRNA sense strand
aguacagccuuucaguaaa

SEQ ID NO: 818006 - RNA, 19 nt, Homo sapiens
  misc_RNA (1)...(19): siRNA sense strand
aaguaaaguuguugacagu

SEQ ID NO: 818007 - RNA, 19 nt, Homo sapiens
  misc_RNA (1)...(19): siRNA sense strand
cccagaggcugcaguacug

SEQ ID NO: 818008 - RNA, 19 nt, Homo sapiens
  misc_RNA (1)...(19): siRNA sense strand
caaggagaguuuucuacaa

SEQ ID NO: 818009 - RNA, 19 nt, Homo sapiens
  misc_RNA (1)...(19): siRNA sense strand
gaugugaagagagcauuug

SEQ ID NO: 818010 - RNA, 19 nt, Homo sapiens
  misc_RNA (1)...(19): siRNA sense strand
aaaguuguugacaguguua

SEQ ID NO: 818011 - RNA, 19 nt, Homo sapiens
  misc_RNA (1)...(19): siRNA sense strand
uuuggcagguauuaaugua

SEQ ID NO: 818012 - RNA, 19 nt, Homo sapiens
  misc_RNA (1)...(19): siRNA sense strand
gugaagagaagacauuaac

SEQ ID NO: 818013 - RNA, 19 nt, Homo sapiens
  misc_RNA (1)...(19): siRNA sense strand
ccugaagaacagcacaaua

SEQ ID NO: 818014 - RNA, 19 nt, Homo sapiens
  misc_RNA (1)...(19): siRNA sense strand
caugaugaagccagagaaa

SEQ ID NO: 818015 - RNA, 19 nt, Homo sapiens
  misc_RNA (1)...(19): siRNA sense strand
aggcugcaguacuguauga

SEQ ID NO: 818016 - RNA, 19 nt, Homo sapiens
  misc_RNA (1)...(19): siRNA sense strand
acaguuuacaucccugaua

SEQ ID NO: 818017 - RNA, 19 nt, Homo sapiens
  misc_RNA (1)...(19): siRNA sense strand
uccauggaauccuucugua

SEQ ID NO: 818018 - RNA, 19 nt, Homo sapiens
  misc_RNA (1)...(19): siRNA sense strand
cauggaauccuucuguaca

SEQ ID NO: 818019 - RNA, 19 nt, Homo sapiens
  misc_RNA (1)...(19): siRNA sense strand
ucauacggcauggacuuua

SEQ ID NO: 818020 - RNA, 19 nt, Homo sapiens
  misc_RNA (1)...(19): siRNA sense strand
ggacccuucuaccuggaau

SEQ ID NO: 818021 - RNA, 19 nt, Homo sapiens
  misc_RNA (1)...(19): siRNA sense strand
ugaagagagcauuugcaaa

SEQ ID NO: 818022 - RNA, 19 nt, Homo sapiens
  misc_RNA (1)...(19): siRNA sense strand
ugagcuggaugugaagaga

SEQ ID NO: 818023 - RNA, 19 nt, Homo sapiens
  misc_RNA (1)...(19): siRNA sense strand
ccaagauggcguauuuaag

SEQ ID NO: 818024 - RNA, 19 nt, Homo sapiens
  misc_RNA (1)...(19): siRNA sense strand
gaaaacaguggcgacuuaa

SEQ ID NO: 818025 - RNA, 19 nt, Homo sapiens
  misc_RNA (1)...(19): siRNA sense strand
gcugcaguacuguaugaaa

SEQ ID NO: 818026 - RNA, 19 nt, Homo sapiens
  misc_RNA (1)...(19): siRNA sense strand
cauacggcauggacuuuac

SEQ ID NO: 818027 - RNA, 19 nt, Homo sapiens
  misc_RNA (1)...(19): siRNA sense strand
ucauauuuggcagguauua

SEQ ID NO: 818028 - RNA, 19 nt, Homo sapiens
  misc_RNA (1)...(19): siRNA sense strand
accaagauggcguauuuaa

SEQ ID NO: 818029 - RNA, 19 nt, Homo sapiens
  misc_RNA (1)...(19): siRNA sense strand
uaaugugguuuggaguaau

SEQ ID NO: 818030 - RNA, 19 nt, Homo sapiens
  misc_RNA (1)...(19): siRNA sense strand
augcuuugcccauaacuaa

SEQ ID NO: 818031 - RNA, 19 nt, Homo sapiens
  misc_RNA (1)...(19): siRNA sense strand
cuauccagauggugacugu

SEQ ID NO: 818032 - RNA, 19 nt, Homo sapiens
  misc_RNA (1)...(19): siRNA sense strand
cauggacuuuaccaagaug

SEQ ID NO: 818033 - RNA, 19 nt, Homo sapiens
  misc_RNA (1)...(19): siRNA sense strand
uaccuggaauacucucuuc

SEQ ID NO: 818034 - RNA, 19 nt, Homo sapiens
  misc_RNA (1)...(19): siRNA sense strand
ggagaguuuucuacaagau

SEQ ID NO: 818035 - RNA, 19 nt, Homo sapiens
  misc_RNA (1)...(19): siRNA sense strand
cagcacagucaacaaaugg

SEQ ID NO: 818036 - RNA, 19 nt, Homo sapiens
  misc_RNA (1)...(19): siRNA sense strand
cauauuuggcagguauuaa

SEQ ID NO: 818037 - RNA, 19 nt, Homo sapiens
  misc_RNA (1)...(19): siRNA sense strand
gcaaggagaguuuucuaca

SEQ ID NO: 818038 - RNA, 19 nt, Homo sapiens
  misc_RNA (1)...(19): siRNA sense strand
gaaggugaagagaagacau

SEQ ID NO: 818039 - RNA, 19 nt, Homo sapiens
  misc_RNA (1)...(19): siRNA sense strand
uuaccuugguugugaagca

SEQ ID NO: 818040 - RNA, 19 nt, Homo sapiens
  misc_RNA (1)...(19): siRNA sense strand
ccacacagcuucacucuuu

SEQ ID NO: 818041 - RNA, 19 nt, Homo sapiens
  misc_RNA (1)...(19): siRNA sense strand
ggacuaaugucuacuuaaa

SEQ ID NO: 818042 - RNA, 19 nt, Homo sapiens
  misc_RNA (1)...(19): siRNA sense strand
gaagaaagagguaguuaaa

SEQ ID NO: 818043 - RNA, 19 nt, Homo sapiens
  misc_RNA (1)...(19): siRNA sense strand
guagauggcucgcccaaga

SEQ ID NO: 818044 - RNA, 19 nt, Homo sapiens
  misc_RNA (1)...(19): siRNA sense strand
ggaaagcggugcaguucug

SEQ ID NO: 818045 - RNA, 19 nt, Homo sapiens
  misc_RNA (1)...(19): siRNA sense strand
gauccaaacccuuuaaaug

SEQ ID NO: 818046 - RNA, 19 nt, Homo sapiens
  misc_RNA (1)...(19): siRNA sense strand
agaaccacaugcugauuua

SEQ ID NO: 818047 - RNA, 19 nt, Homo sapiens
  misc_RNA (1)...(19): siRNA sense strand
caaccuggcugcaguccaa

SEQ ID NO: 818048 - RNA, 19 nt, Homo sapiens
  misc_RNA (1)...(19): siRNA sense strand
gaagaagaagagcaacuuu

SEQ ID NO: 818049 - RNA, 19 nt, Homo sapiens
  misc_RNA (1)...(19): siRNA sense strand
uggcaugucuucagauuug

SEQ ID NO: 818050 - RNA, 19 nt, Homo sapiens
  misc_RNA (1)...(19): siRNA sense strand
ccaaacccuuuaaauguga

SEQ ID NO: 818051 - RNA, 19 nt, Homo sapiens
  misc_RNA (1)...(19): siRNA sense strand
gaaguguuccuuaaugaga

SEQ ID NO: 818052 - RNA, 19 nt, Homo sapiens
  misc_RNA (1)...(19): siRNA sense strand
cggauaaauugcugucuuu

SEQ ID NO: 818053 - RNA, 19 nt, Homo sapiens
  misc_RNA (1)...(19): siRNA sense strand
gugcugaguuggaggaauu

SEQ ID NO: 818054 - RNA, 19 nt, Homo sapiens
  misc_RNA (1)...(19): siRNA sense strand
ugacuuugcuucauuucuu

SEQ ID NO: 818055 - RNA, 19 nt, Homo sapiens
  misc_RNA (1)...(19): siRNA sense strand
cugaaaagcugaaauguuu

SEQ ID NO: 818056 - RNA, 19 nt, Homo sapiens
  misc_RNA (1)...(19): siRNA sense strand
agaagaagagcaacuuuaa

SEQ ID NO: 818057 - RNA, 19 nt, Homo sapiens
  misc_RNA (1)...(19): siRNA sense strand
ugucuacacugcaaaggua

SEQ ID NO: 818058 - RNA, 19 nt, Homo sapiens
  misc_RNA (1)...(19): siRNA sense strand
gcaagggccugaguuccaa

SEQ ID NO: 818059 - RNA, 19 nt, Homo sapiens
  misc_RNA (1)...(19): siRNA sense strand
agcaguggcucccaaguua

SEQ ID NO: 818060 - RNA, 19 nt, Homo sapiens
  misc_RNA (1)...(19): siRNA sense strand
ccaggcaggugcugaguug

SEQ ID NO: 818061 - RNA, 19 nt, Homo sapiens
  misc_RNA (1)...(19): siRNA sense strand
ucacuguaccagcauauua

SEQ ID NO: 818062 - RNA, 19 nt, Homo sapiens
  misc_RNA (1)...(19): siRNA sense strand
ggugcaagauucacucaga

SEQ ID NO: 818063 - RNA, 19 nt, Homo sapiens
  misc_RNA (1)...(19): siRNA sense strand
guacuaggacuaaugucua

SEQ ID NO: 818064 - RNA, 19 nt, Homo sapiens
  misc_RNA (1)...(19): siRNA sense strand
cauuuaaccuacugcauga

SEQ ID NO: 818065 - RNA, 19 nt, Homo sapiens
  misc_RNA (1)...(19): siRNA sense strand
ccaguggucucacggauuc

SEQ ID NO: 818066 - RNA, 19 nt, Homo sapiens
  misc_RNA (1)...(19): siRNA sense strand
aagcugaaauguuuggauu

SEQ ID NO: 818067 - RNA, 19 nt, Homo sapiens
  misc_RNA (1)...(19): siRNA sense strand
uaggacuaaugucuacuua

SEQ ID NO: 818068 - RNA, 19 nt, Homo sapiens
  misc_RNA (1)...(19): siRNA sense strand
ugaaacauguggcaagagu

SEQ ID NO: 818069 - RNA, 19 nt, Homo sapiens
  misc_RNA (1)...(19): siRNA sense strand
ggaggaauugucaaagaaa

SEQ ID NO: 818070 - RNA, 19 nt, Homo sapiens
  misc_RNA (1)...(19): siRNA sense strand
gauguuagagucaguacuu

SEQ ID NO: 818071 - RNA, 19 nt, Homo sapiens
  misc_RNA (1)...(19): siRNA sense strand
gagaagaguguggauggua

SEQ ID NO: 818072 - RNA, 19 nt, Homo sapiens
  misc_RNA (1)...(19): siRNA sense strand
aagaagaagagcaacuuua

SEQ ID NO: 818073 - RNA, 19 nt, Homo sapiens
  misc_RNA (1)...(19): siRNA sense strand
ggacuacccaggagagaga

SEQ ID NO: 818074 - RNA, 19 nt, Homo sapiens
  misc_RNA (1)...(19): siRNA sense strand
caaacuagacaagaagaaa

SEQ ID NO: 818075 - RNA, 19 nt, Homo sapiens
  misc_RNA (1)...(19): siRNA sense strand
ggaggaggaggacgaagaa

SEQ ID NO: 818076 - RNA, 19 nt, Homo sapiens
  misc_RNA (1)...(19): siRNA sense strand
ggauuuaucagaaacuugu

SEQ ID NO: 818077 - RNA, 19 nt, Homo sapiens
  misc_RNA (1)...(19): siRNA sense strand
gugcaagauucacucagaa

SEQ ID NO: 818078 - RNA, 19 nt, Homo sapiens
  misc_RNA (1)...(19): siRNA sense strand
ugaugaauguggugcaaga

SEQ ID NO: 818079 - RNA, 19 nt, Homo sapiens
  misc_RNA (1)...(19): siRNA sense strand
gaggaauugucaaagaaag

SEQ ID NO: 818080 - RNA, 19 nt, Homo sapiens
  misc_RNA (1)...(19): siRNA sense strand
uggaggaauugucaaagaa

SEQ ID NO: 818081 - RNA, 19 nt, Homo sapiens
  misc_RNA (1)...(19): siRNA sense strand
ggacaaacuagacaagaag

SEQ ID NO: 818082 - RNA, 19 nt, Homo sapiens
  misc_RNA (1)...(19): siRNA sense strand
gaacgaugacggacacaag

SEQ ID NO: 818083 - RNA, 19 nt, Homo sapiens
  misc_RNA (1)...(19): siRNA sense strand
cagaaccacaugcugauuu

SEQ ID NO: 818084 - RNA, 19 nt, Homo sapiens
  misc_RNA (1)...(19): siRNA sense strand
aagaguaugugucauccaa

SEQ ID NO: 818085 - RNA, 19 nt, Homo sapiens
  misc_RNA (1)...(19): siRNA sense strand
acaccucaauacacgauaa

SEQ ID NO: 818086 - RNA, 19 nt, Homo sapiens
  misc_RNA (1)...(19): siRNA sense strand
gcagguugcugacuuugcu

SEQ ID NO: 818087 - RNA, 19 nt, Homo sapiens
  misc_RNA (1)...(19): siRNA sense strand
gauaagaauacuccaugga

SEQ ID NO: 818088 - RNA, 19 nt, Homo sapiens
  misc_RNA (1)...(19): siRNA sense strand
gaguuugucuacacugcaa

SEQ ID NO: 818089 - RNA, 19 nt, Homo sapiens
  misc_RNA (1)...(19): siRNA sense strand
gaaggucuuuguggagauc

SEQ ID NO: 818090 - RNA, 19 nt, Homo sapiens
  misc_RNA (1)...(19): siRNA sense strand
agaagaaagagguaguuaa

SEQ ID NO: 818091 - RNA, 19 nt, Homo sapiens
  misc_RNA (1)...(19): siRNA sense strand
agaaagagguaguuaaacc

SEQ ID NO: 818092 - RNA, 19 nt, Homo sapiens
  misc_RNA (1)...(19): siRNA sense strand
ucaagacgcacaugagaau

SEQ ID NO: 818093 - RNA, 19 nt, Homo sapiens
  misc_RNA (1)...(19): siRNA sense strand
ggaaggucuuuguggagau

SEQ ID NO: 818094 - RNA, 19 nt, Homo sapiens
  misc_RNA (1)...(19): siRNA sense strand
cuucauuucuugaguuugu

SEQ ID NO: 818095 - RNA, 19 nt, Homo sapiens
  misc_RNA (1)...(19): siRNA sense strand
guaccagcauauuaaaguc

SEQ ID NO: 818096 - RNA, 19 nt, Homo sapiens
  misc_RNA (1)...(19): siRNA sense strand
uccaaacccuuuaaaugug

SEQ ID NO: 818097 - RNA, 19 nt, Homo sapiens
  misc_RNA (1)...(19): siRNA sense strand
guaucaggguguccgcaaa

SEQ ID NO: 818098 - RNA, 19 nt, Homo sapiens
  misc_RNA (1)...(19): siRNA sense strand
uuaaaccucccuacccuaa

SEQ ID NO: 818099 - RNA, 19 nt, Homo sapiens
  misc_RNA (1)...(19): siRNA sense strand
aggacaaacuagacaagaa

SEQ ID NO: 818100 - RNA, 19 nt, Homo sapiens
  misc_RNA (1)...(19): siRNA sense strand
ggacauucaccgacaaguc

SEQ ID NO: 818101 - RNA, 19 nt, Homo sapiens
  misc_RNA (1)...(19): siRNA sense strand
gacuuugcuucauuucuug

SEQ ID NO: 818102 - RNA, 19 nt, Homo sapiens
  misc_RNA (1)...(19): siRNA sense strand
caagcuuucggauaaauug

SEQ ID NO: 818103 - RNA, 19 nt, Homo sapiens
  misc_RNA (1)...(19): siRNA sense strand
ugaacagccugacgaagag

SEQ ID NO: 818104 - RNA, 19 nt, Homo sapiens
  misc_RNA (1)...(19): siRNA sense strand
caaagguacagguggaaga

SEQ ID NO: 818105 - RNA, 19 nt, Homo sapiens
  misc_RNA (1)...(19): siRNA sense strand
ucacggauuccuuggacua

SEQ ID NO: 818106 - RNA, 19 nt, Homo sapiens
  misc_RNA (1)...(19): siRNA sense strand
gaugguacuaggacuaaug

SEQ ID NO: 818107 - RNA, 19 nt, Homo sapiens
  misc_RNA (1)...(19): siRNA sense strand
caagaagaaagagguaguu

SEQ ID NO: 818108 - RNA, 19 nt, Homo sapiens
  misc_RNA (1)...(19): siRNA sense strand
cugaacagccugacgaaga

SEQ ID NO: 818109 - RNA, 19 nt, Homo sapiens
  misc_RNA (1)...(19): siRNA sense strand
cacaauagaauccauacug

SEQ ID NO: 818110 - RNA, 19 nt, Homo sapiens
  misc_RNA (1)...(19): siRNA sense strand
gaaguucaagcgcaagaag

SEQ ID NO: 818111 - RNA, 19 nt, Homo sapiens
  misc_RNA (1)...(19): siRNA sense strand
aagaagaaagagguaguua

SEQ ID NO: 818112 - RNA, 19 nt, Homo sapiens
  misc_RNA (1)...(19): siRNA sense strand
ucggauaaauugcugucuu

SEQ ID NO: 818113 - RNA, 19 nt, Homo sapiens
  misc_RNA (1)...(19): siRNA sense strand
uugcugacuuugcuucauu

SEQ ID NO: 818114 - RNA, 19 nt, Homo sapiens
  misc_RNA (1)...(19): siRNA sense strand
gaagucuuuccuugucauu

SEQ ID NO: 818115 - RNA, 19 nt, Homo sapiens
  misc_RNA (1)...(19): siRNA sense strand
auaagaauacuccauggaa

SEQ ID NO: 818116 - RNA, 19 nt, Homo sapiens
  misc_RNA (1)...(19): siRNA sense strand
gaaacauguggcaagaguu

SEQ ID NO: 818117 - RNA, 19 nt, Homo sapiens
  misc_RNA (1)...(19): siRNA sense strand
uuggaggaauugucaaaga

SEQ ID NO: 818118 - RNA, 19 nt, Homo sapiens
  misc_RNA (1)...(19): siRNA sense strand
cagauuugccaccgaagaa

SEQ ID NO: 818119 - RNA, 19 nt, Homo sapiens
  misc_RNA (1)...(19): siRNA sense strand
uaugugucauccaagcuuu

SEQ ID NO: 818120 - RNA, 19 nt, Homo sapiens
  misc_RNA (1)...(19): siRNA sense strand
gcacaccucaauacacgau

SEQ ID NO: 818121 - RNA, 19 nt, Homo sapiens
  misc_RNA (1)...(19): siRNA sense strand
ggauccaaacccuuuaaau

SEQ ID NO: 818122 - RNA, 19 nt, Homo sapiens
  misc_RNA (1)...(19): siRNA sense strand
agacaagaagaaagaggua

SEQ ID NO: 818123 - RNA, 19 nt, Homo sapiens
  misc_RNA (1)...(19): siRNA sense strand
cagacucgaugcccacaca

SEQ ID NO: 818124 - RNA, 19 nt, Homo sapiens
  misc_RNA (1)...(19): siRNA sense strand
caauacacgauaagaauac

SEQ ID NO: 818125 - RNA, 19 nt, Homo sapiens
  misc_RNA (1)...(19): siRNA sense strand
gggagaggccauucaugug

SEQ ID NO: 818126 - RNA, 19 nt, Homo sapiens
  misc_RNA (1)...(19): siRNA sense strand
ugugaaacauguggcaaga

SEQ ID NO: 818127 - RNA, 19 nt, Homo sapiens
  misc_RNA (1)...(19): siRNA sense strand
agacgcacaugagaauuca

SEQ ID NO: 818128 - RNA, 19 nt, Homo sapiens
  misc_RNA (1)...(19): siRNA sense strand
uaccuaccaugcaggagaa

SEQ ID NO: 818129 - RNA, 19 nt, Homo sapiens
  misc_RNA (1)...(19): siRNA sense strand
ccucaauacacgauaagaa

SEQ ID NO: 818130 - RNA, 19 nt, Homo sapiens
  misc_RNA (1)...(19): siRNA sense strand
cacuguaccagcauauuaa

SEQ ID NO: 818131 - RNA, 19 nt, Homo sapiens
  misc_RNA (1)...(19): siRNA sense strand
gacaaacuagacaagaaga

SEQ ID NO: 818132 - RNA, 19 nt, Homo sapiens
  misc_RNA (1)...(19): siRNA sense strand
gggccugaguuccaagaca

SEQ ID NO: 818133 - RNA, 19 nt, Homo sapiens
  misc_RNA (1)...(19): siRNA sense strand
aaaccucccuacccuaaaa

SEQ ID NO: 818134 - RNA, 19 nt, Homo sapiens
  misc_RNA (1)...(19): siRNA sense strand
caaacccuuuaaaugugaa

SEQ ID NO: 818135 - RNA, 19 nt, Homo sapiens
  misc_RNA (1)...(19): siRNA sense strand
ggaauugucaaagaaagca

SEQ ID NO: 818136 - RNA, 19 nt, Homo sapiens
  misc_RNA (1)...(19): siRNA sense strand
gcgcucaagacgcacauga

SEQ ID NO: 818137 - RNA, 19 nt, Homo sapiens
  misc_RNA (1)...(19): siRNA sense strand
gaaccacaugcugauuuau

SEQ ID NO: 818138 - RNA, 19 nt, Homo sapiens
  misc_RNA (1)...(19): siRNA sense strand
auccaaacccuuuaaaugu

SEQ ID NO: 818139 - RNA, 19 nt, Homo sapiens
  misc_RNA (1)...(19): siRNA sense strand
agucuuuccuugucauugu

SEQ ID NO: 818140 - RNA, 19 nt, Homo sapiens
  misc_RNA (1)...(19): siRNA sense strand
gaacacauguaccaauuua

SEQ ID NO: 818141 - RNA, 19 nt, Homo sapiens
  misc_RNA (1)...(19): siRNA sense strand
ggaaagaucacuucuguuu

SEQ ID NO: 818142 - RNA, 19 nt, Homo sapiens
  misc_RNA (1)...(19): siRNA sense strand
ccaaagauguuccagauga

SEQ ID NO: 818143 - RNA, 19 nt, Homo sapiens
  misc_RNA (1)...(19): siRNA sense strand
gaggaaagaucacuucugu

SEQ ID NO: 818144 - RNA, 19 nt, Homo sapiens
  misc_RNA (1)...(19): siRNA sense strand
gcaaauaaacucaagaaga

SEQ ID NO: 818145 - RNA, 19 nt, Homo sapiens
  misc_RNA (1)...(19): siRNA sense strand
gaauggaccugaaccuuuc

SEQ ID NO: 818146 - RNA, 19 nt, Homo sapiens
  misc_RNA (1)...(19): siRNA sense strand
caagaucucauaugugaua

SEQ ID NO: 818147 - RNA, 19 nt, Homo sapiens
  misc_RNA (1)...(19): siRNA sense strand
gaaggaauuugcccaggaa

SEQ ID NO: 818148 - RNA, 19 nt, Homo sapiens
  misc_RNA (1)...(19): siRNA sense strand
ggaaaugaccuuuaauauc

SEQ ID NO: 818149 - RNA, 19 nt, Homo sapiens
  misc_RNA (1)...(19): siRNA sense strand
ggaauggaccugaaccuuu

SEQ ID NO: 818150 - RNA, 19 nt, Homo sapiens
  misc_RNA (1)...(19): siRNA sense strand
ugugugagauggcaaauaa

SEQ ID NO: 818151 - RNA, 19 nt, Homo sapiens
  misc_RNA (1)...(19): siRNA sense strand
ggccagagaugguaucaga

SEQ ID NO: 818152 - RNA, 19 nt, Homo sapiens
  misc_RNA (1)...(19): siRNA sense strand
gaugauggaaguuucaaua

SEQ ID NO: 818153 - RNA, 19 nt, Homo sapiens
  misc_RNA (1)...(19): siRNA sense strand
cccaagaucucauauguga

SEQ ID NO: 818154 - RNA, 19 nt, Homo sapiens
  misc_RNA (1)...(19): siRNA sense strand
gaaauuauacgucuagucu

SEQ ID NO: 818155 - RNA, 19 nt, Homo sapiens
  misc_RNA (1)...(19): siRNA sense strand
cagaacacauguaccaauu

SEQ ID NO: 818156 - RNA, 19 nt, Homo sapiens
  misc_RNA (1)...(19): siRNA sense strand
ccagacagcugaaguugau

SEQ ID NO: 818157 - RNA, 19 nt, Homo sapiens
  misc_RNA (1)...(19): siRNA sense strand
ggugguaucuggcuaacuu

SEQ ID NO: 818158 - RNA, 19 nt, Homo sapiens
  misc_RNA (1)...(19): siRNA sense strand
uggaggagauguauuuauu

SEQ ID NO: 818159 - RNA, 19 nt, Homo sapiens
  misc_RNA (1)...(19): siRNA sense strand
ugaaguugaucucuuagaa

SEQ ID NO: 818160 - RNA, 19 nt, Homo sapiens
  misc_RNA (1)...(19): siRNA sense strand
auacguggcugcagaacua

SEQ ID NO: 818161 - RNA, 19 nt, Homo sapiens
  misc_RNA (1)...(19): siRNA sense strand
aaaggcaccuggagagaaa

SEQ ID NO: 818162 - RNA, 19 nt, Homo sapiens
  misc_RNA (1)...(19): siRNA sense strand
gaaaccugcuugagaugga

SEQ ID NO: 818163 - RNA, 19 nt, Homo sapiens
  misc_RNA (1)...(19): siRNA sense strand
ucaguaacauuucaggauu

SEQ ID NO: 818164 - RNA, 19 nt, Homo sapiens
  misc_RNA (1)...(19): siRNA sense strand
ggccaaagauguuccagau

SEQ ID NO: 818165 - RNA, 19 nt, Homo sapiens
  misc_RNA (1)...(19): siRNA sense strand
caggaaaugaccuuuaaua

SEQ ID NO: 818166 - RNA, 19 nt, Homo sapiens
  misc_RNA (1)...(19): siRNA sense strand
acaagugaauggaauaaga

SEQ ID NO: 818167 - RNA, 19 nt, Homo sapiens
  misc_RNA (1)...(19): siRNA sense strand
gaugguaucagaaggaauu

SEQ ID NO: 818168 - RNA, 19 nt, Homo sapiens
  misc_RNA (1)...(19): siRNA sense strand
uaggaaaguuggaucagaa

SEQ ID NO: 818169 - RNA, 19 nt, Homo sapiens
  misc_RNA (1)...(19): siRNA sense strand
aaacagaccaucaguaaca

SEQ ID NO: 818170 - RNA, 19 nt, Homo sapiens
  misc_RNA (1)...(19): siRNA sense strand
gaaaggcaccuggagagaa

SEQ ID NO: 818171 - RNA, 19 nt, Homo sapiens
  misc_RNA (1)...(19): siRNA sense strand
gaggaaagccaaggagaaa

SEQ ID NO: 818172 - RNA, 19 nt, Homo sapiens
  misc_RNA (1)...(19): siRNA sense strand
gaaagaucacuucuguuug

SEQ ID NO: 818173 - RNA, 19 nt, Homo sapiens
  misc_RNA (1)...(19): siRNA sense strand
cccaggaaaugaccuuuaa

SEQ ID NO: 818174 - RNA, 19 nt, Homo sapiens
  misc_RNA (1)...(19): siRNA sense strand
uggcaacccuccagaaaug

SEQ ID NO: 818175 - RNA, 19 nt, Homo sapiens
  misc_RNA (1)...(19): siRNA sense strand
gaccaucaguaacauuuca

SEQ ID NO: 818176 - RNA, 19 nt, Homo sapiens
  misc_RNA (1)...(19): siRNA sense strand
gcaaauaacaauagcaacu

SEQ ID NO: 818177 - RNA, 19 nt, Homo sapiens
  misc_RNA (1)...(19): siRNA sense strand
gaacuacuggccaaagaug

SEQ ID NO: 818178 - RNA, 19 nt, Homo sapiens
  misc_RNA (1)...(19): siRNA sense strand
aaagaucacuucuguuugc

SEQ ID NO: 818179 - RNA, 19 nt, Homo sapiens
  misc_RNA (1)...(19): siRNA sense strand
gagaugguaucagaaggaa

SEQ ID NO: 818180 - RNA, 19 nt, Homo sapiens
  misc_RNA (1)...(19): siRNA sense strand
acaagugccuguagugugu

SEQ ID NO: 818181 - RNA, 19 nt, Homo sapiens
  misc_RNA (1)...(19): siRNA sense strand
gaacaagugccuguagugu

SEQ ID NO: 818182 - RNA, 19 nt, Homo sapiens
  misc_RNA (1)...(19): siRNA sense strand
gaucagaacacauguacca

SEQ ID NO: 818183 - RNA, 19 nt, Homo sapiens
  misc_RNA (1)...(19): siRNA sense strand
cagaacuacuggccaaaga

SEQ ID NO: 818184 - RNA, 19 nt, Homo sapiens
  misc_RNA (1)...(19): siRNA sense strand
aaugaaaccugcuugagau

SEQ ID NO: 818185 - RNA, 19 nt, Homo sapiens
  misc_RNA (1)...(19): siRNA sense strand
gaagauacaguuucaagcu

SEQ ID NO: 818186 - RNA, 19 nt, Homo sapiens
  misc_RNA (1)...(19): siRNA sense strand
gcagauggcggguguugga

SEQ ID NO: 818187 - RNA, 19 nt, Homo sapiens
  misc_RNA (1)...(19): siRNA sense strand
ggaccaaucaguucauauc

SEQ ID NO: 818188 - RNA, 19 nt, Homo sapiens
  misc_RNA (1)...(19): siRNA sense strand
caguaacauuucaggauuu

SEQ ID NO: 818189 - RNA, 19 nt, Homo sapiens
  misc_RNA (1)...(19): siRNA sense strand
gauuauacggugaauguga

SEQ ID NO: 818190 - RNA, 19 nt, Homo sapiens
  misc_RNA (1)...(19): siRNA sense strand
uaaugaaaccugcuugaga

SEQ ID NO: 818191 - RNA, 19 nt, Homo sapiens
  misc_RNA (1)...(19): siRNA sense strand
uaaaacagaccaucaguaa

SEQ ID NO: 818192 - RNA, 19 nt, Homo sapiens
  misc_RNA (1)...(19): siRNA sense strand
gaagaugauggaaguuuca

SEQ ID NO: 818193 - RNA, 19 nt, Homo sapiens
  misc_RNA (1)...(19): siRNA sense strand
caaagauguuccagaugau

SEQ ID NO: 818194 - RNA, 19 nt, Homo sapiens
  misc_RNA (1)...(19): siRNA sense strand
caacaucguuuaacuucac

SEQ ID NO: 818195 - RNA, 19 nt, Homo sapiens
  misc_RNA (1)...(19): siRNA sense strand
gcaacaucguuuaacuuca

SEQ ID NO: 818196 - RNA, 19 nt, Homo sapiens
  misc_RNA (1)...(19): siRNA sense strand
cagcugauauggaggagau

SEQ ID NO: 818197 - RNA, 19 nt, Homo sapiens
  misc_RNA (1)...(19): siRNA sense strand
gguaccaacuacaauguca

SEQ ID NO: 818198 - RNA, 19 nt, Homo sapiens
  misc_RNA (1)...(19): siRNA sense strand
cagcugaaguugaucucuu

SEQ ID NO: 818199 - RNA, 19 nt, Homo sapiens
  misc_RNA (1)...(19): siRNA sense strand
caacgccucugaugcugau

SEQ ID NO: 818200 - RNA, 19 nt, Homo sapiens
  misc_RNA (1)...(19): siRNA sense strand
ugagagcccuggaggaaag

SEQ ID NO: 818201 - RNA, 19 nt, Homo sapiens
  misc_RNA (1)...(19): siRNA sense strand
caguucauaucagguguua

SEQ ID NO: 818202 - RNA, 19 nt, Homo sapiens
  misc_RNA (1)...(19): siRNA sense strand
ugacaacccagauaacaga

SEQ ID NO: 818203 - RNA, 19 nt, Homo sapiens
  misc_RNA (1)...(19): siRNA sense strand
cgucaucgguuuccagaca

SEQ ID NO: 818204 - RNA, 19 nt, Homo sapiens
  misc_RNA (1)...(19): siRNA sense strand
cuuagaagaugauggaagu

SEQ ID NO: 818205 - RNA, 19 nt, Homo sapiens
  misc_RNA (1)...(19): siRNA sense strand
gccaaggaauggaccugaa

SEQ ID NO: 818206 - RNA, 19 nt, Homo sapiens
  misc_RNA (1)...(19): siRNA sense strand
gggaacaagugccuguagu

SEQ ID NO: 818207 - RNA, 19 nt, Homo sapiens
  misc_RNA (1)...(19): siRNA sense strand
gaggagauguauuuauucc

SEQ ID NO: 818208 - RNA, 19 nt, Homo sapiens
  misc_RNA (1)...(19): siRNA sense strand
ggaacaagugccuguagug

SEQ ID NO: 818209 - RNA, 19 nt, Homo sapiens
  misc_RNA (1)...(19): siRNA sense strand
gcccaggaaaugaccuuua

SEQ ID NO: 818210 - RNA, 19 nt, Homo sapiens
  misc_RNA (1)...(19): siRNA sense strand
ccucugaugcugauggaua

SEQ ID NO: 818211 - RNA, 19 nt, Homo sapiens
  misc_RNA (1)...(19): siRNA sense strand
gauggcaaauaaacucaag

SEQ ID NO: 818212 - RNA, 19 nt, Homo sapiens
  misc_RNA (1)...(19): siRNA sense strand
ggaggagauguauuuauuc

SEQ ID NO: 818213 - RNA, 19 nt, Homo sapiens
  misc_RNA (1)...(19): siRNA sense strand
agaagaugauggaaguuuc

SEQ ID NO: 818214 - RNA, 19 nt, Homo sapiens
  misc_RNA (1)...(19): siRNA sense strand
gaaguugaucucuuagaag

SEQ ID NO: 818215 - RNA, 19 nt, Homo sapiens
  misc_RNA (1)...(19): siRNA sense strand
cagaccaucaguaacauuu

SEQ ID NO: 818216 - RNA, 19 nt, Homo sapiens
  misc_RNA (1)...(19): siRNA sense strand
ggcgcuuccuccuucuuua

SEQ ID NO: 818217 - RNA, 19 nt, Homo sapiens
  misc_RNA (1)...(19): siRNA sense strand
guucauaucagguguuagu

SEQ ID NO: 818218 - RNA, 19 nt, Homo sapiens
  misc_RNA (1)...(19): siRNA sense strand
gauguaucacuguuuaaug

SEQ ID NO: 818219 - RNA, 19 nt, Homo sapiens
  misc_RNA (1)...(19): siRNA sense strand
gaaugugacccugcugaga

SEQ ID NO: 818220 - RNA, 19 nt, Homo sapiens
  misc_RNA (1)...(19): siRNA sense strand
cuaggaaaguuggaucaga

SEQ ID NO: 818221 - RNA, 19 nt, Homo sapiens
  misc_RNA (1)...(19): siRNA sense strand
uagaagaugauggaaguuu

SEQ ID NO: 818222 - RNA, 19 nt, Homo sapiens
  misc_RNA (1)...(19): siRNA sense strand
agcugaaguugaucucuua

SEQ ID NO: 818223 - RNA, 19 nt, Homo sapiens
  misc_RNA (1)...(19): siRNA sense strand
aaugauaccugugugagau

SEQ ID NO: 818224 - RNA, 19 nt, Homo sapiens
  misc_RNA (1)...(19): siRNA sense strand
aaaguuggaucagaacaca

SEQ ID NO: 818225 - RNA, 19 nt, Homo sapiens
  misc_RNA (1)...(19): siRNA sense strand
cacaucaugcacagaaaua

SEQ ID NO: 818226 - RNA, 19 nt, Homo sapiens
  misc_RNA (1)...(19): siRNA sense strand
caacuacaccgugaacauc

SEQ ID NO: 818227 - RNA, 19 nt, Homo sapiens
  misc_RNA (1)...(19): siRNA sense strand
caagugaauggaauaagau

SEQ ID NO: 818228 - RNA, 19 nt, Homo sapiens
  misc_RNA (1)...(19): siRNA sense strand
gugcaaauaacaauagcaa

SEQ ID NO: 818229 - RNA, 19 nt, Homo sapiens
  misc_RNA (1)...(19): siRNA sense strand
ucucaugcaacaucguuua

SEQ ID NO: 818230 - RNA, 19 nt, Homo sapiens
  misc_RNA (1)...(19): siRNA sense strand
aaauuacauugccaagaga

SEQ ID NO: 818231 - RNA, 19 nt, Homo sapiens
  misc_RNA (1)...(19): siRNA sense strand
uccagaagauacaguuuca

SEQ ID NO: 818232 - RNA, 19 nt, Homo sapiens
  misc_RNA (1)...(19): siRNA sense strand
acuuuaacaugcacagaaa

SEQ ID NO: 818233 - RNA, 19 nt, Homo sapiens
  misc_RNA (1)...(19): siRNA sense strand
ugaggaaagccaaggagaa

SEQ ID NO: 818234 - RNA, 19 nt, Homo sapiens
  misc_RNA (1)...(19): siRNA sense strand
auauggaggagauguauuu

SEQ ID NO: 818235 - RNA, 19 nt, Homo sapiens
  misc_RNA (1)...(19): siRNA sense strand
gcagccagguucguuaugc

SEQ ID NO: 818236 - RNA, 19 nt, Homo sapiens
  misc_RNA (1)...(19): siRNA sense strand
cagaagauacaguuucaag

SEQ ID NO: 818237 - RNA, 19 nt, Homo sapiens
  misc_RNA (1)...(19): siRNA sense strand
gaaaagagggagugauuac

SEQ ID NO: 818238 - RNA, 19 nt, Homo sapiens
  misc_RNA (1)...(19): siRNA sense strand
gaccaaucaguucauauca

SEQ ID NO: 818239 - RNA, 19 nt, Homo sapiens
  misc_RNA (1)...(19): siRNA sense strand
caucaugcacagaaauaga

SEQ ID NO: 818240 - RNA, 19 nt, Homo sapiens
  misc_RNA (1)...(19): siRNA sense strand
ggacaaagcugacuacaga

SEQ ID NO: 818241 - RNA, 19 nt, Homo sapiens
  misc_RNA (1)...(19): siRNA sense strand
gaagagagcuagaacaguu

SEQ ID NO: 818242 - RNA, 19 nt, Homo sapiens
  misc_RNA (1)...(19): siRNA sense strand
guacggagccaaaguauaa

SEQ ID NO: 818243 - RNA, 19 nt, Homo sapiens
  misc_RNA (1)...(19): siRNA sense strand
caaccuuagugaagaauua

SEQ ID NO: 818244 - RNA, 19 nt, Homo sapiens
  misc_RNA (1)...(19): siRNA sense strand
gcacaacuauggauaaagu

SEQ ID NO: 818245 - RNA, 19 nt, Homo sapiens
  misc_RNA (1)...(19): siRNA sense strand
ugaauaagcuagacauguu

SEQ ID NO: 818246 - RNA, 19 nt, Homo sapiens
  misc_RNA (1)...(19): siRNA sense strand
gaacaugccugagauccuu

SEQ ID NO: 818247 - RNA, 19 nt, Homo sapiens
  misc_RNA (1)...(19): siRNA sense strand
ggauaaaguugucgaaauc

SEQ ID NO: 818248 - RNA, 19 nt, Homo sapiens
  misc_RNA (1)...(19): siRNA sense strand
gcagagcucucguuucaca

SEQ ID NO: 818249 - RNA, 19 nt, Homo sapiens
  misc_RNA (1)...(19): siRNA sense strand
ucaaagacauccaaagugu

SEQ ID NO: 818250 - RNA, 19 nt, Homo sapiens
  misc_RNA (1)...(19): siRNA sense strand
caaaggauacuuacucuga

SEQ ID NO: 818251 - RNA, 19 nt, Homo sapiens
  misc_RNA (1)...(19): siRNA sense strand
gaacgcauauccaaauguc

SEQ ID NO: 818252 - RNA, 19 nt, Homo sapiens
  misc_RNA (1)...(19): siRNA sense strand
gaccaacaaucaaagagaa

SEQ ID NO: 818253 - RNA, 19 nt, Homo sapiens
  misc_RNA (1)...(19): siRNA sense strand
gaucugggcucuguacuuc

SEQ ID NO: 818254 - RNA, 19 nt, Homo sapiens
  misc_RNA (1)...(19): siRNA sense strand
gaauuccacuccacauaau

SEQ ID NO: 818255 - RNA, 19 nt, Homo sapiens
  misc_RNA (1)...(19): siRNA sense strand
caacagaccgcaacacuca

SEQ ID NO: 818256 - RNA, 19 nt, Homo sapiens
  misc_RNA (1)...(19): siRNA sense strand
caacuacucuaagcaguga

SEQ ID NO: 818257 - RNA, 19 nt, Homo sapiens
  misc_RNA (1)...(19): siRNA sense strand
cgagagcauuuacaauauu

SEQ ID NO: 818258 - RNA, 19 nt, Homo sapiens
  misc_RNA (1)...(19): siRNA sense strand
gaucgaagauuuuaccaaa

SEQ ID NO: 818259 - RNA, 19 nt, Homo sapiens
  misc_RNA (1)...(19): siRNA sense strand
ggagaaccaacuacucuaa

SEQ ID NO: 818260 - RNA, 19 nt, Homo sapiens
  misc_RNA (1)...(19): siRNA sense strand
caacacacauaacagaaca

SEQ ID NO: 818261 - RNA, 19 nt, Homo sapiens
  misc_RNA (1)...(19): siRNA sense strand
guucugugaucgaagauuu

SEQ ID NO: 818262 - RNA, 19 nt, Homo sapiens
  misc_RNA (1)...(19): siRNA sense strand
gauacuacguucugugauc

SEQ ID NO: 818263 - RNA, 19 nt, Homo sapiens
  misc_RNA (1)...(19): siRNA sense strand
aggagaagcugcuagaaug

SEQ ID NO: 818264 - RNA, 19 nt, Homo sapiens
  misc_RNA (1)...(19): siRNA sense strand
caccaaagcuuuucaguga

SEQ ID NO: 818265 - RNA, 19 nt, Homo sapiens
  misc_RNA (1)...(19): siRNA sense strand
gaauaagcuagacauguuu

SEQ ID NO: 818266 - RNA, 19 nt, Homo sapiens
  misc_RNA (1)...(19): siRNA sense strand
ccagaauucuucccaguca

SEQ ID NO: 818267 - RNA, 19 nt, Homo sapiens
  misc_RNA (1)...(19): siRNA sense strand
uaauggaacuguccuguac

SEQ ID NO: 818268 - RNA, 19 nt, Homo sapiens
  misc_RNA (1)...(19): siRNA sense strand
gaagcugaguuaccuaaac

SEQ ID NO: 818269 - RNA, 19 nt, Homo sapiens
  misc_RNA (1)...(19): siRNA sense strand
cagccaaucugauacuguu

SEQ ID NO: 818270 - RNA, 19 nt, Homo sapiens
  misc_RNA (1)...(19): siRNA sense strand
gcaaggagaagcugcuaga

SEQ ID NO: 818271 - RNA, 19 nt, Homo sapiens
  misc_RNA (1)...(19): siRNA sense strand
gauacuuacucugauuuga

SEQ ID NO: 818272 - RNA, 19 nt, Homo sapiens
  misc_RNA (1)...(19): siRNA sense strand
acacauaacagaacaagga

SEQ ID NO: 818273 - RNA, 19 nt, Homo sapiens
  misc_RNA (1)...(19): siRNA sense strand
aacgagagcauuuacaaua

SEQ ID NO: 818274 - RNA, 19 nt, Homo sapiens
  misc_RNA (1)...(19): siRNA sense strand
ccaaggcagaggaauauuu

SEQ ID NO: 818275 - RNA, 19 nt, Homo sapiens
  misc_RNA (1)...(19): siRNA sense strand
guacacaggagacuucaga

SEQ ID NO: 818276 - RNA, 19 nt, Homo sapiens
  misc_RNA (1)...(19): siRNA sense strand
augcagagcucucguuuca

SEQ ID NO: 818277 - RNA, 19 nt, Homo sapiens
  misc_RNA (1)...(19): siRNA sense strand
cuacagaccaacaaucaaa

SEQ ID NO: 818278 - RNA, 19 nt, Homo sapiens
  misc_RNA (1)...(19): siRNA sense strand
gacaauaguuccuaguacu

SEQ ID NO: 818279 - RNA, 19 nt, Homo sapiens
  misc_RNA (1)...(19): siRNA sense strand
aagcagagauaaagaugug

SEQ ID NO: 818280 - RNA, 19 nt, Homo sapiens
  misc_RNA (1)...(19): siRNA sense strand
gauggagaaucaacucaca

SEQ ID NO: 818281 - RNA, 19 nt, Homo sapiens
  misc_RNA (1)...(19): siRNA sense strand
gagauaaagaugugacaau

SEQ ID NO: 818282 - RNA, 19 nt, Homo sapiens
  misc_RNA (1)...(19): siRNA sense strand
gaugaaaucacagaugaga

SEQ ID NO: 818283 - RNA, 19 nt, Homo sapiens
  misc_RNA (1)...(19): siRNA sense strand
ggacuggagagaguucaua

SEQ ID NO: 818284 - RNA, 19 nt, Homo sapiens
  misc_RNA (1)...(19): siRNA sense strand
caaagacauccaaagugua

SEQ ID NO: 818285 - RNA, 19 nt, Homo sapiens
  misc_RNA (1)...(19): siRNA sense strand
uggauaaaguugucgaaau

SEQ ID NO: 818286 - RNA, 19 nt, Homo sapiens
  misc_RNA (1)...(19): siRNA sense strand
gaaguaggaaucccagcuu

SEQ ID NO: 818287 - RNA, 19 nt, Homo sapiens
  misc_RNA (1)...(19): siRNA sense strand
gauaaagaugugacaauag

SEQ ID NO: 818288 - RNA, 19 nt, Homo sapiens
  misc_RNA (1)...(19): siRNA sense strand
aaagacauccaaaguguau

SEQ ID NO: 818289 - RNA, 19 nt, Homo sapiens
  misc_RNA (1)...(19): siRNA sense strand
ucacaucuccucccagaau

SEQ ID NO: 818290 - RNA, 19 nt, Homo sapiens
  misc_RNA (1)...(19): siRNA sense strand
ccagugggaaguauucuuu

SEQ ID NO: 818291 - RNA, 19 nt, Homo sapiens
  misc_RNA (1)...(19): siRNA sense strand
agaauuccacuccacauaa

SEQ ID NO: 818292 - RNA, 19 nt, Homo sapiens
  misc_RNA (1)...(19): siRNA sense strand
cuuuguagauugugaagaa

SEQ ID NO: 818293 - RNA, 19 nt, Homo sapiens
  misc_RNA (1)...(19): siRNA sense strand
aaaguacggagccaaagua

SEQ ID NO: 818294 - RNA, 19 nt, Homo sapiens
  misc_RNA (1)...(19): siRNA sense strand
cacaggagacuucagauug

SEQ ID NO: 818295 - RNA, 19 nt, Homo sapiens
  misc_RNA (1)...(19): siRNA sense strand
acgagagcauuuacaauau

SEQ ID NO: 818296 - RNA, 19 nt, Homo sapiens
  misc_RNA (1)...(19): siRNA sense strand
guucauacagagcuuguuu

SEQ ID NO: 818297 - RNA, 19 nt, Homo sapiens
  misc_RNA (1)...(19): siRNA sense strand
aaucacagaugagaguuug

SEQ ID NO: 818298 - RNA, 19 nt, Homo sapiens
  misc_RNA (1)...(19): siRNA sense strand
augacuaucucuuugauga

SEQ ID NO: 818299 - RNA, 19 nt, Homo sapiens
  misc_RNA (1)...(19): siRNA sense strand
cggcuuauggcuaugaaua

SEQ ID NO: 818300 - RNA, 19 nt, Homo sapiens
  misc_RNA (1)...(19): siRNA sense strand
ugacaauaguuccuaguac

SEQ ID NO: 818301 - RNA, 19 nt, Homo sapiens
  misc_RNA (1)...(19): siRNA sense strand
ccaacaaucaaagagaaua

SEQ ID NO: 818302 - RNA, 19 nt, Homo sapiens
  misc_RNA (1)...(19): siRNA sense strand
uagaauuccacuccacaua

SEQ ID NO: 818303 - RNA, 19 nt, Homo sapiens
  misc_RNA (1)...(19): siRNA sense strand
uucaaugacugcaguauca

SEQ ID NO: 818304 - RNA, 19 nt, Homo sapiens
  misc_RNA (1)...(19): siRNA sense strand
gcuggcaacuggugagagu

SEQ ID NO: 818305 - RNA, 19 nt, Homo sapiens
  misc_RNA (1)...(19): siRNA sense strand
cagugacucugauggagaa

SEQ ID NO: 818306 - RNA, 19 nt, Homo sapiens
  misc_RNA (1)...(19): siRNA sense strand
ugccugagauccuucauca

SEQ ID NO: 818307 - RNA, 19 nt, Homo sapiens
  misc_RNA (1)...(19): siRNA sense strand
aaggauacuuacucugauu

SEQ ID NO: 818308 - RNA, 19 nt, Homo sapiens
  misc_RNA (1)...(19): siRNA sense strand
gacuacagaccaacaauca

SEQ ID NO: 818309 - RNA, 19 nt, Homo sapiens
  misc_RNA (1)...(19): siRNA sense strand
ugggacagccaaucugaua

SEQ ID NO: 818310 - RNA, 19 nt, Homo sapiens
  misc_RNA (1)...(19): siRNA sense strand
uaacagaacaaggaaguca

SEQ ID NO: 818311 - RNA, 19 nt, Homo sapiens
  misc_RNA (1)...(19): siRNA sense strand
agugggaaguauucuuuaa

SEQ ID NO: 818312 - RNA, 19 nt, Homo sapiens
  misc_RNA (1)...(19): siRNA sense strand
ugaagaagaaguaggaauc

SEQ ID NO: 818313 - RNA, 19 nt, Homo sapiens
  misc_RNA (1)...(19): siRNA sense strand
gugaacgcauauccaaaug

SEQ ID NO: 818314 - RNA, 19 nt, Homo sapiens
  misc_RNA (1)...(19): siRNA sense strand
gcaaauuacccuguggaau

SEQ ID NO: 818315 - RNA, 19 nt, Homo sapiens
  misc_RNA (1)...(19): siRNA sense strand
gugacaauaguuccuagua

SEQ ID NO: 818316 - RNA, 19 nt, Homo sapiens
  misc_RNA (1)...(19): siRNA sense strand
uggcacaacuauggauaaa

SEQ ID NO: 818317 - RNA, 19 nt, Homo sapiens
  misc_RNA (1)...(19): siRNA sense strand
gcuuauggcuaugaauauc

SEQ ID NO: 818318 - RNA, 19 nt, Homo sapiens
  misc_RNA (1)...(19): siRNA sense strand
cagaagcugaguuaccuaa

SEQ ID NO: 818319 - RNA, 19 nt, Homo sapiens
  misc_RNA (1)...(19): siRNA sense strand
gaaccaacuacucuaagca

SEQ ID NO: 818320 - RNA, 19 nt, Homo sapiens
  misc_RNA (1)...(19): siRNA sense strand
cagauuggcgcaaggagaa

SEQ ID NO: 818321 - RNA, 19 nt, Homo sapiens
  misc_RNA (1)...(19): siRNA sense strand
aaucccagcuucacugcaa

SEQ ID NO: 818322 - RNA, 19 nt, Homo sapiens
  misc_RNA (1)...(19): siRNA sense strand
caagucgggaggaguguuu

SEQ ID NO: 818323 - RNA, 19 nt, Homo sapiens
  misc_RNA (1)...(19): siRNA sense strand
gacuaucucuuugaugauc

SEQ ID NO: 818324 - RNA, 19 nt, Homo sapiens
  misc_RNA (1)...(19): siRNA sense strand
gcauuaagccauccaccau

SEQ ID NO: 818325 - RNA, 19 nt, Homo sapiens
  misc_RNA (1)...(19): siRNA sense strand
ugaugauccucugccaaua

SEQ ID NO: 818326 - RNA, 19 nt, Homo sapiens
  misc_RNA (1)...(19): siRNA sense strand
acaggagacuucagauugg

SEQ ID NO: 818327 - RNA, 19 nt, Homo sapiens
  misc_RNA (1)...(19): siRNA sense strand
ugaaaucacagaugagagu

SEQ ID NO: 818328 - RNA, 19 nt, Homo sapiens
  misc_RNA (1)...(19): siRNA sense strand
cagaaaagcagccugaaaa

SEQ ID NO: 818329 - RNA, 19 nt, Homo sapiens
  misc_RNA (1)...(19): siRNA sense strand
caccaaccuuagugaagaa

SEQ ID NO: 818330 - RNA, 19 nt, Homo sapiens
  misc_RNA (1)...(19): siRNA sense strand
cgggaggaguguuuaagug

SEQ ID NO: 818331 - RNA, 19 nt, Homo sapiens
  misc_RNA (1)...(19): siRNA sense strand
gagaguucauacagagcuu

SEQ ID NO: 818332 - RNA, 19 nt, Homo sapiens
  misc_RNA (1)...(19): siRNA sense strand
uggagagaguucauacaga

SEQ ID NO: 818333 - RNA, 19 nt, Homo sapiens
  misc_RNA (1)...(19): siRNA sense strand
uaucuguucaccaaccuua

SEQ ID NO: 818334 - RNA, 19 nt, Homo sapiens
  misc_RNA (1)...(19): siRNA sense strand
ggcaacuggugagaguaua

SEQ ID NO: 818335 - RNA, 19 nt, Homo sapiens
  misc_RNA (1)...(19): siRNA sense strand
gaaaagcagagauaaagau

SEQ ID NO: 818336 - RNA, 19 nt, Homo sapiens
  misc_RNA (1)...(19): siRNA sense strand
aaaggauacuuacucugau

SEQ ID NO: 818337 - RNA, 19 nt, Homo sapiens
  misc_RNA (1)...(19): siRNA sense strand
gaaaucacagaugagaguu

SEQ ID NO: 818338 - RNA, 19 nt, Homo sapiens
  misc_RNA (1)...(19): siRNA sense strand
aaggagaucugggcucugu

SEQ ID NO: 818339 - RNA, 19 nt, Homo sapiens
  misc_RNA (1)...(19): siRNA sense strand
gauccuucaucaucucaca

SEQ ID NO: 818340 - RNA, 19 nt, Homo sapiens
  misc_RNA (1)...(19): siRNA sense strand
caaagaaacugugugugau

SEQ ID NO: 818341 - RNA, 19 nt, Homo sapiens
  misc_RNA (1)...(19): siRNA sense strand
acaaagaaacuguguguga

SEQ ID NO: 818342 - RNA, 19 nt, Homo sapiens
  misc_RNA (1)...(19): siRNA sense strand
acacaucccuggacaaguc

SEQ ID NO: 818343 - RNA, 19 nt, Homo sapiens
  misc_RNA (1)...(19): siRNA sense strand
ggaggugugugucaucgau

SEQ ID NO: 818344 - RNA, 19 nt, Homo sapiens
  misc_RNA (1)...(19): siRNA sense strand
gcgauguccuaaccacuga

SEQ ID NO: 818345 - RNA, 19 nt, Homo sapiens
  misc_RNA (1)...(19): siRNA sense strand
aaacaaagaaacugugugu

SEQ ID NO: 818346 - RNA, 19 nt, Homo sapiens
  misc_RNA (1)...(19): siRNA sense strand
ggacacaucccuggacaag

SEQ ID NO: 818347 - RNA, 19 nt, Homo sapiens
  misc_RNA (1)...(19): siRNA sense strand
gaggcguucuuccugguau

SEQ ID NO: 818348 - RNA, 19 nt, Homo sapiens
  misc_RNA (1)...(19): siRNA sense strand
ggaaguucaaggcaagaug

SEQ ID NO: 818349 - RNA, 19 nt, Homo sapiens
  misc_RNA (1)...(19): siRNA sense strand
gagccuguggccaccagua

SEQ ID NO: 818350 - RNA, 19 nt, Homo sapiens
  misc_RNA (1)...(19): siRNA sense strand
aaagaaacugugugugauc

SEQ ID NO: 818351 - RNA, 19 nt, Homo sapiens
  misc_RNA (1)...(19): siRNA sense strand
ggaggaggugugugucauc

SEQ ID NO: 818352 - RNA, 19 nt, Homo sapiens
  misc_RNA (1)...(19): siRNA sense strand
ggaugccagcgauguccua

SEQ ID NO: 818353 - RNA, 19 nt, Homo sapiens
  misc_RNA (1)...(19): siRNA sense strand
gaagcaggaggaggugugu

SEQ ID NO: 818354 - RNA, 19 nt, Homo sapiens
  misc_RNA (1)...(19): siRNA sense strand
ggaccgggaagcgaaggaa

SEQ ID NO: 818355 - RNA, 19 nt, Homo sapiens
  misc_RNA (1)...(19): siRNA sense strand
gaacagaguuggcaaugaa

SEQ ID NO: 818356 - RNA, 19 nt, Homo sapiens
  misc_RNA (1)...(19): siRNA sense strand
gaacagccauugcaccuuu

SEQ ID NO: 818357 - RNA, 19 nt, Homo sapiens
  misc_RNA (1)...(19): siRNA sense strand
gaagaaauacugaagauga

SEQ ID NO: 818358 - RNA, 19 nt, Homo sapiens
  misc_RNA (1)...(19): siRNA sense strand
gcacauacaugacuuccaa

SEQ ID NO: 818359 - RNA, 19 nt, Homo sapiens
  misc_RNA (1)...(19): siRNA sense strand
gcaaagcggaggaagauua

SEQ ID NO: 818360 - RNA, 19 nt, Homo sapiens
  misc_RNA (1)...(19): siRNA sense strand
cuacaacaauggcagauua

SEQ ID NO: 818361 - RNA, 19 nt, Homo sapiens
  misc_RNA (1)...(19): siRNA sense strand
ggaaguauaugaugcugaa

SEQ ID NO: 818362 - RNA, 19 nt, Homo sapiens
  misc_RNA (1)...(19): siRNA sense strand
gaagauuacugcauaugug

SEQ ID NO: 818363 - RNA, 19 nt, Homo sapiens
  misc_RNA (1)...(19): siRNA sense strand
gaagacguguauaaauuug

SEQ ID NO: 818364 - RNA, 19 nt, Homo sapiens
  misc_RNA (1)...(19): siRNA sense strand
auacaugacuuccaaauug

SEQ ID NO: 818365 - RNA, 19 nt, Homo sapiens
  misc_RNA (1)...(19): siRNA sense strand
caagaccucuggccaaaug

SEQ ID NO: 818366 - RNA, 19 nt, Homo sapiens
  misc_RNA (1)...(19): siRNA sense strand
caacaugcagccacuauuu

SEQ ID NO: 818367 - RNA, 19 nt, Homo sapiens
  misc_RNA (1)...(19): siRNA sense strand
gcgaugcuauccacaauga

SEQ ID NO: 818368 - RNA, 19 nt, Homo sapiens
  misc_RNA (1)...(19): siRNA sense strand
cugaagacguguauaaauu

SEQ ID NO: 818369 - RNA, 19 nt, Homo sapiens
  misc_RNA (1)...(19): siRNA sense strand
uagaagcguugaagucuuu

SEQ ID NO: 818370 - RNA, 19 nt, Homo sapiens
  misc_RNA (1)...(19): siRNA sense strand
gaacuuaauuucggauucu

SEQ ID NO: 818371 - RNA, 19 nt, Homo sapiens
  misc_RNA (1)...(19): siRNA sense strand
gauggauucuuguauugaa

SEQ ID NO: 818372 - RNA, 19 nt, Homo sapiens
  misc_RNA (1)...(19): siRNA sense strand
uggauacccucaucaaauu

SEQ ID NO: 818373 - RNA, 19 nt, Homo sapiens
  misc_RNA (1)...(19): siRNA sense strand
cagaagaaauacugaagau

SEQ ID NO: 818374 - RNA, 19 nt, Homo sapiens
  misc_RNA (1)...(19): siRNA sense strand
cacaaugacuugcaagaug

SEQ ID NO: 818375 - RNA, 19 nt, Homo sapiens
  misc_RNA (1)...(19): siRNA sense strand
aggcgaagauuacugcaua

SEQ ID NO: 818376 - RNA, 19 nt, Homo sapiens
  misc_RNA (1)...(19): siRNA sense strand
acaaugacuugcaagauga

SEQ ID NO: 818377 - RNA, 19 nt, Homo sapiens
  misc_RNA (1)...(19): siRNA sense strand
gaccaaaacuuacagagaa

SEQ ID NO: 818378 - RNA, 19 nt, Homo sapiens
  misc_RNA (1)...(19): siRNA sense strand
gaaauacugaagaugauug

SEQ ID NO: 818379 - RNA, 19 nt, Homo sapiens
  misc_RNA (1)...(19): siRNA sense strand
caaauugaccugacagugu

SEQ ID NO: 818380 - RNA, 19 nt, Homo sapiens
  misc_RNA (1)...(19): siRNA sense strand
ggaacuuaauuucggauuc

SEQ ID NO: 818381 - RNA, 19 nt, Homo sapiens
  misc_RNA (1)...(19): siRNA sense strand
gcauaugguuucuggauac

SEQ ID NO: 818382 - RNA, 19 nt, Homo sapiens
  misc_RNA (1)...(19): siRNA sense strand
ugaagaugauugaggagaa

SEQ ID NO: 818383 - RNA, 19 nt, Homo sapiens
  misc_RNA (1)...(19): siRNA sense strand
aaauugaccugacaguguu

SEQ ID NO: 818384 - RNA, 19 nt, Homo sapiens
  misc_RNA (1)...(19): siRNA sense strand
ggacuggagcccucaaaug

SEQ ID NO: 818385 - RNA, 19 nt, Homo sapiens
  misc_RNA (1)...(19): siRNA sense strand
gagcccaucugaagcuuuc

SEQ ID NO: 818386 - RNA, 19 nt, Homo sapiens
  misc_RNA (1)...(19): siRNA sense strand
ggcaaugaaucuuugaauc

SEQ ID NO: 818387 - RNA, 19 nt, Homo sapiens
  misc_RNA (1)...(19): siRNA sense strand
ccauugcaccuuugucaua

SEQ ID NO: 818388 - RNA, 19 nt, Homo sapiens
  misc_RNA (1)...(19): siRNA sense strand
agagugaacuggcgcuaga

SEQ ID NO: 818389 - RNA, 19 nt, Homo sapiens
  misc_RNA (1)...(19): siRNA sense strand
gcaaugaaucuuugaaucg

SEQ ID NO: 818390 - RNA, 19 nt, Homo sapiens
  misc_RNA (1)...(19): siRNA sense strand
caaauggaaguauaugaug

SEQ ID NO: 818391 - RNA, 19 nt, Homo sapiens
  misc_RNA (1)...(19): siRNA sense strand
uacaugacuuccaaauuga

SEQ ID NO: 818392 - RNA, 19 nt, Homo sapiens
  misc_RNA (1)...(19): siRNA sense strand
cugcagagacuaucauuga

SEQ ID NO: 818393 - RNA, 19 nt, Homo sapiens
  misc_RNA (1)...(19): siRNA sense strand
cgucacgucagaagaaaua

SEQ ID NO: 818394 - RNA, 19 nt, Homo sapiens
  misc_RNA (1)...(19): siRNA sense strand
ccaggcaacaugcgcuuua

SEQ ID NO: 818395 - RNA, 19 nt, Homo sapiens
  misc_RNA (1)...(19): siRNA sense strand
aguauaugaugcugaauug

SEQ ID NO: 818396 - RNA, 19 nt, Homo sapiens
  misc_RNA (1)...(19): siRNA sense strand
ucuaugaaggcgaagauua

SEQ ID NO: 818397 - RNA, 19 nt, Homo sapiens
  misc_RNA (1)...(19): siRNA sense strand
gagcucauaggguaguuaa

SEQ ID NO: 818398 - RNA, 19 nt, Homo sapiens
  misc_RNA (1)...(19): siRNA sense strand
ugaagucuuugccaucaga

SEQ ID NO: 818399 - RNA, 19 nt, Homo sapiens
  misc_RNA (1)...(19): siRNA sense strand
gcucugaacaccaggagaa

SEQ ID NO: 818400 - RNA, 19 nt, Homo sapiens
  misc_RNA (1)...(19): siRNA sense strand
ccaaauggaaguauaugau

SEQ ID NO: 818401 - RNA, 19 nt, Homo sapiens
  misc_RNA (1)...(19): siRNA sense strand
ucagauguaucaguugaga

SEQ ID NO: 818402 - RNA, 19 nt, Homo sapiens
  misc_RNA (1)...(19): siRNA sense strand
gaagaugauugaggagaac

SEQ ID NO: 818403 - RNA, 19 nt, Homo sapiens
  misc_RNA (1)...(19): siRNA sense strand
ugaacagaguuggcaauga

SEQ ID NO: 818404 - RNA, 19 nt, Homo sapiens
  misc_RNA (1)...(19): siRNA sense strand
gcaggcacuuugugggaau

SEQ ID NO: 818405 - RNA, 19 nt, Homo sapiens
  misc_RNA (1)...(19): siRNA sense strand
guugaagucuuugccauca

SEQ ID NO: 818406 - RNA, 19 nt, Homo sapiens
  misc_RNA (1)...(19): siRNA sense strand
ggcuaaagcugcagagacu

SEQ ID NO: 818407 - RNA, 19 nt, Homo sapiens
  misc_RNA (1)...(19): siRNA sense strand
gcuagagagucagaccaaa

SEQ ID NO: 818408 - RNA, 19 nt, Homo sapiens
  misc_RNA (1)...(19): siRNA sense strand
cagcgaugcuauccacaau

SEQ ID NO: 818409 - RNA, 19 nt, Homo sapiens
  misc_RNA (1)...(19): siRNA sense strand
aacaagaccucuggccaaa

SEQ ID NO: 818410 - RNA, 19 nt, Homo sapiens
  misc_RNA (1)...(19): siRNA sense strand
cugaagaucuccaaaagaa

SEQ ID NO: 818411 - RNA, 19 nt, Homo sapiens
  misc_RNA (1)...(19): siRNA sense strand
uuucagauguaucaguuga

SEQ ID NO: 818412 - RNA, 19 nt, Homo sapiens
  misc_RNA (1)...(19): siRNA sense strand
ggauacccucaucaaauuu

SEQ ID NO: 818413 - RNA, 19 nt, Homo sapiens
  misc_RNA (1)...(19): siRNA sense strand
gauccuggcagcugaaaca

SEQ ID NO: 818414 - RNA, 19 nt, Homo sapiens
  misc_RNA (1)...(19): siRNA sense strand
caaugaaucuuugaaucgu

SEQ ID NO: 818415 - RNA, 19 nt, Homo sapiens
  misc_RNA (1)...(19): siRNA sense strand
ccaggagaaugaacagagu

SEQ ID NO: 818416 - RNA, 19 nt, Homo sapiens
  misc_RNA (1)...(19): siRNA sense strand
ccuggcagcugaaacagau

SEQ ID NO: 818417 - RNA, 19 nt, Homo sapiens
  misc_RNA (1)...(19): siRNA sense strand
gaugauggagauagccaaa

SEQ ID NO: 818418 - RNA, 19 nt, Homo sapiens
  misc_RNA (1)...(19): siRNA sense strand
caucaaauuucgagcucau

SEQ ID NO: 818419 - RNA, 19 nt, Homo sapiens
  misc_RNA (1)...(19): siRNA sense strand
gcccucaaaugcaacacuu

SEQ ID NO: 818420 - RNA, 19 nt, Homo sapiens
  misc_RNA (1)...(19): siRNA sense strand
auacuugccuugcacauac

SEQ ID NO: 818421 - RNA, 19 nt, Homo sapiens
  misc_RNA (1)...(19): siRNA sense strand
aacaugcgcuuuaccuugu

SEQ ID NO: 818422 - RNA, 19 nt, Homo sapiens
  misc_RNA (1)...(19): siRNA sense strand
gaggagaacagccauugca

SEQ ID NO: 818423 - RNA, 19 nt, Homo sapiens
  misc_RNA (1)...(19): siRNA sense strand
gcaagaugacucccucuac

SEQ ID NO: 818424 - RNA, 19 nt, Homo sapiens
  misc_RNA (1)...(19): siRNA sense strand
cgcuuuaccuuguaugaga

SEQ ID NO: 818425 - RNA, 19 nt, Homo sapiens
  misc_RNA (1)...(19): siRNA sense strand
gaccugacaguguuacaga

SEQ ID NO: 818426 - RNA, 19 nt, Homo sapiens
  misc_RNA (1)...(19): siRNA sense strand
gcaacaugcgcuuuaccuu

SEQ ID NO: 818427 - RNA, 19 nt, Homo sapiens
  misc_RNA (1)...(19): siRNA sense strand
cauacaugacuuccaaauu

SEQ ID NO: 818428 - RNA, 19 nt, Homo sapiens
  misc_RNA (1)...(19): siRNA sense strand
uuacuugcuugaccuacaa

SEQ ID NO: 818429 - RNA, 19 nt, Homo sapiens
  misc_RNA (1)...(19): siRNA sense strand
ugcauaugguuucuggaua

SEQ ID NO: 818430 - RNA, 19 nt, Homo sapiens
  misc_RNA (1)...(19): siRNA sense strand
gaguuggcaaugaaucuuu

SEQ ID NO: 818431 - RNA, 19 nt, Homo sapiens
  misc_RNA (1)...(19): siRNA sense strand
ccaugaggcugaagaucuc

SEQ ID NO: 818432 - RNA, 19 nt, Homo sapiens
  misc_RNA (1)...(19): siRNA sense strand
cgaagauuacugcauaugu

SEQ ID NO: 818433 - RNA, 19 nt, Homo sapiens
  misc_RNA (1)...(19): siRNA sense strand
gcuuuaccuuguaugagaa

SEQ ID NO: 818434 - RNA, 19 nt, Homo sapiens
  misc_RNA (1)...(19): siRNA sense strand
cugaacaccaggagaauga

SEQ ID NO: 818435 - RNA, 19 nt, Homo sapiens
  misc_RNA (1)...(19): siRNA sense strand
ccucagaccgccuggcaaa

SEQ ID NO: 818436 - RNA, 19 nt, Homo sapiens
  misc_RNA (1)...(19): siRNA sense strand
auaugaugcugaauuguuc

SEQ ID NO: 818437 - RNA, 19 nt, Homo sapiens
  misc_RNA (1)...(19): siRNA sense strand
uguaugagaacaaagauuc

SEQ ID NO: 818438 - RNA, 19 nt, Homo sapiens
  misc_RNA (1)...(19): siRNA sense strand
cauacuugccuugcacaua

SEQ ID NO: 818439 - RNA, 19 nt, Homo sapiens
  misc_RNA (1)...(19): siRNA sense strand
gccaaauggaaguauauga

SEQ ID NO: 818440 - RNA, 19 nt, Homo sapiens
  misc_RNA (1)...(19): siRNA sense strand
ggcgaagauuacugcauau

SEQ ID NO: 818441 - RNA, 19 nt, Homo sapiens
  misc_RNA (1)...(19): siRNA sense strand
ccacaucaucaacaccaaa

SEQ ID NO: 818442 - RNA, 19 nt, Homo sapiens
  misc_RNA (1)...(19): siRNA sense strand
ccugaagacguguauaaau

SEQ ID NO: 818443 - RNA, 19 nt, Homo sapiens
  misc_RNA (1)...(19): siRNA sense strand
cuaaagcugcagagacuau

SEQ ID NO: 818444 - RNA, 19 nt, Homo sapiens
  misc_RNA (1)...(19): siRNA sense strand
uauccacaaugacuugcaa

SEQ ID NO: 818445 - RNA, 19 nt, Homo sapiens
  misc_RNA (1)...(19): siRNA sense strand
gauacccucaucaaauuuc

SEQ ID NO: 818446 - RNA, 19 nt, Homo sapiens
  misc_RNA (1)...(19): siRNA sense strand
cuggagcccucaaaugcaa

SEQ ID NO: 818447 - RNA, 19 nt, Homo sapiens
  misc_RNA (1)...(19): siRNA sense strand
cuaccuuccucccugcuau

SEQ ID NO: 818448 - RNA, 19 nt, Homo sapiens
  misc_RNA (1)...(19): siRNA sense strand
gccaugaggcugaagaucu

SEQ ID NO: 818449 - RNA, 19 nt, Homo sapiens
  misc_RNA (1)...(19): siRNA sense strand
gagauagccaaagccauga

SEQ ID NO: 818450 - RNA, 19 nt, Homo sapiens
  misc_RNA (1)...(19): siRNA sense strand
gacuggagcccucaaaugc

SEQ ID NO: 818451 - RNA, 19 nt, Homo sapiens
  misc_RNA (1)...(19): siRNA sense strand
cuggauacccucaucaaau

SEQ ID NO: 818452 - RNA, 19 nt, Homo sapiens
  misc_RNA (1)...(19): siRNA sense strand
ccacaaugacuugcaagau

SEQ ID NO: 818453 - RNA, 19 nt, Homo sapiens
  misc_RNA (1)...(19): siRNA sense strand
cauagaagcguugaagucu

SEQ ID NO: 818454 - RNA, 19 nt, Homo sapiens
  misc_RNA (1)...(19): siRNA sense strand
agaaaaggaugauggagau

SEQ ID NO: 818455 - RNA, 19 nt, Homo sapiens
  misc_RNA (1)...(19): siRNA sense strand
gaagaugggucaagaggaa

SEQ ID NO: 818456 - RNA, 19 nt, Homo sapiens
  misc_RNA (1)...(19): siRNA sense strand
gaaaucaacuggacagagu

SEQ ID NO: 818457 - RNA, 19 nt, Homo sapiens
  misc_RNA (1)...(19): siRNA sense strand
ggaauucgguccagaggau

SEQ ID NO: 818458 - RNA, 19 nt, Homo sapiens
  misc_RNA (1)...(19): siRNA sense strand
gaaacagaaagcagagaaa

SEQ ID NO: 818459 - RNA, 19 nt, Homo sapiens
  misc_RNA (1)...(19): siRNA sense strand
gaagaagcgucaaaaggaa

SEQ ID NO: 818460 - RNA, 19 nt, Homo sapiens
  misc_RNA (1)...(19): siRNA sense strand
aagaggacauaguggauuu

SEQ ID NO: 818461 - RNA, 19 nt, Homo sapiens
  misc_RNA (1)...(19): siRNA sense strand
gaagaggacauaguggauu

SEQ ID NO: 818462 - RNA, 19 nt, Homo sapiens
  misc_RNA (1)...(19): siRNA sense strand
gaggagcgcaugaaacaga

SEQ ID NO: 818463 - RNA, 19 nt, Homo sapiens
  misc_RNA (1)...(19): siRNA sense strand
gggacaguguggugaagaa

SEQ ID NO: 818464 - RNA, 19 nt, Homo sapiens
  misc_RNA (1)...(19): siRNA sense strand
ggaagcgacaggagcguuu

SEQ ID NO: 818465 - RNA, 19 nt, Homo sapiens
  misc_RNA (1)...(19): siRNA sense strand
ggucgcugcugcacccaaa

SEQ ID NO: 818466 - RNA, 19 nt, Homo sapiens
  misc_RNA (1)...(19): siRNA sense strand
gcaaguccuuccuguaucc

SEQ ID NO: 818467 - RNA, 19 nt, Homo sapiens
  misc_RNA (1)...(19): siRNA sense strand
gcagagagaagggacugaa

SEQ ID NO: 818468 - RNA, 19 nt, Homo sapiens
  misc_RNA (1)...(19): siRNA sense strand
ccgcaaguccuuccuguau

SEQ ID NO: 818469 - RNA, 19 nt, Homo sapiens
  misc_RNA (1)...(19): siRNA sense strand
ggccagcacuaccucagau

SEQ ID NO: 818470 - RNA, 19 nt, Homo sapiens
  misc_RNA (1)...(19): siRNA sense strand
ggaucuaucuagcacuuuu

SEQ ID NO: 818471 - RNA, 19 nt, Homo sapiens
  misc_RNA (1)...(19): siRNA sense strand
ugaaacagaaagcagagaa

SEQ ID NO: 818472 - RNA, 19 nt, Homo sapiens
  misc_RNA (1)...(19): siRNA sense strand
aaaagcgacucaagaagaa

SEQ ID NO: 818473 - RNA, 19 nt, Homo sapiens
  misc_RNA (1)...(19): siRNA sense strand
gacagaagaggaagccaau

SEQ ID NO: 818474 - RNA, 19 nt, Homo sapiens
  misc_RNA (1)...(19): siRNA sense strand
ggacauaguggauuuucuu

SEQ ID NO: 818475 - RNA, 19 nt, Homo sapiens
  misc_RNA (1)...(19): siRNA sense strand
agaagcuccuggugacaga

SEQ ID NO: 818476 - RNA, 19 nt, Homo sapiens
  misc_RNA (1)...(19): siRNA sense strand
ggacucacuggaucuaucu

SEQ ID NO: 818477 - RNA, 19 nt, Homo sapiens
  misc_RNA (1)...(19): siRNA sense strand
gaugaagggaaaucaacug

SEQ ID NO: 818478 - RNA, 19 nt, Homo sapiens
  misc_RNA (1)...(19): siRNA sense strand
ugaggaggagcgcaugaaa

SEQ ID NO: 818479 - RNA, 19 nt, Homo sapiens
  misc_RNA (1)...(19): siRNA sense strand
uccagaagaugggucaaga

SEQ ID NO: 818480 - RNA, 19 nt, Homo sapiens
  misc_RNA (1)...(19): siRNA sense strand
gcugcugcacccaaacuuu

SEQ ID NO: 818481 - RNA, 19 nt, Homo sapiens
  misc_RNA (1)...(19): siRNA sense strand
cgaagaggacauaguggau

SEQ ID NO: 818482 - RNA, 19 nt, Homo sapiens
  misc_RNA (1)...(19): siRNA sense strand
gacaguguggugaagaaga

SEQ ID NO: 818483 - RNA, 19 nt, Homo sapiens
  misc_RNA (1)...(19): siRNA sense strand
gagagaagggacugaacca

SEQ ID NO: 818484 - RNA, 19 nt, Homo sapiens
  misc_RNA (1)...(19): siRNA sense strand
gaagcgacaggagcguuug

SEQ ID NO: 818485 - RNA, 19 nt, Homo sapiens
  misc_RNA (1)...(19): siRNA sense strand
cggcgaagaggacauagug

SEQ ID NO: 818486 - RNA, 19 nt, Homo sapiens
  misc_RNA (1)...(19): siRNA sense strand
gacggcuuguggagaguga

SEQ ID NO: 818487 - RNA, 19 nt, Homo sapiens
  misc_RNA (1)...(19): siRNA sense strand
cuggaucuaucuagcacuu

SEQ ID NO: 818488 - RNA, 19 nt, Homo sapiens
  misc_RNA (1)...(19): siRNA sense strand
agaagaggacucacuggau

SEQ ID NO: 818489 - RNA, 19 nt, Homo sapiens
  misc_RNA (1)...(19): siRNA sense strand
aggaggagcgcaugaaaca

SEQ ID NO: 818490 - RNA, 19 nt, Homo sapiens
  misc_RNA (1)...(19): siRNA sense strand
uuacggcgaagaggacaua

SEQ ID NO: 818491 - RNA, 19 nt, Homo sapiens
  misc_RNA (1)...(19): siRNA sense strand
acaguguggugaagaagag

SEQ ID NO: 818492 - RNA, 19 nt, Homo sapiens
  misc_RNA (1)...(19): siRNA sense strand
cuuggaugaugaagggaaa

SEQ ID NO: 818493 - RNA, 19 nt, Homo sapiens
  misc_RNA (1)...(19): siRNA sense strand
agaagaagcgucaaaagga

SEQ ID NO: 818494 - RNA, 19 nt, Homo sapiens
  misc_RNA (1)...(19): siRNA sense strand
cagaagaggaagccaaucg

SEQ ID NO: 818495 - RNA, 19 nt, Homo sapiens
  misc_RNA (1)...(19): siRNA sense strand
gggagcuacuuccaaauua

SEQ ID NO: 818496 - RNA, 19 nt, Homo sapiens
  misc_RNA (1)...(19): siRNA sense strand
ggagcuacuuccaaauuaa

SEQ ID NO: 818497 - RNA, 19 nt, Homo sapiens
  misc_RNA (1)...(19): siRNA sense strand
gcagagaccgugcuuauca

SEQ ID NO: 818498 - RNA, 19 nt, Homo sapiens
  misc_RNA (1)...(19): siRNA sense strand
caucaagccugucaaagug

SEQ ID NO: 818499 - RNA, 19 nt, Homo sapiens
  misc_RNA (1)...(19): siRNA sense strand
gacgggagcuacuuccaaa

SEQ ID NO: 818500 - RNA, 19 nt, Homo sapiens
  misc_RNA (1)...(19): siRNA sense strand
ugacggaccuggaugacuu

SEQ ID NO: 818501 - RNA, 19 nt, Homo sapiens
  misc_RNA (1)...(19): siRNA sense strand
gauacugccaggaaauuaa

SEQ ID NO: 818502 - RNA, 19 nt, Homo sapiens
  misc_RNA (1)...(19): siRNA sense strand
ccaggaaauuaaccucauu

SEQ ID NO: 818503 - RNA, 19 nt, Homo sapiens
  misc_RNA (1)...(19): siRNA sense strand
ggagagccagcgagaguuu

SEQ ID NO: 818504 - RNA, 19 nt, Homo sapiens
  misc_RNA (1)...(19): siRNA sense strand
gcaucaagccugucaaagu

SEQ ID NO: 818505 - RNA, 19 nt, Homo sapiens
  misc_RNA (1)...(19): siRNA sense strand
ggaaauuaaccucauucuu

SEQ ID NO: 818506 - RNA, 19 nt, Homo sapiens
  misc_RNA (1)...(19): siRNA sense strand
cagcugaauccuacagaua

SEQ ID NO: 818507 - RNA, 19 nt, Homo sapiens
  misc_RNA (1)...(19): siRNA sense strand
gaucugcuaugccgagaag

SEQ ID NO: 818508 - RNA, 19 nt, Homo sapiens
  misc_RNA (1)...(19): siRNA sense strand
ucagguugcuggaggaaga

SEQ ID NO: 818509 - RNA, 19 nt, Homo sapiens
  misc_RNA (1)...(19): siRNA sense strand
cuacagauacugccaggaa

SEQ ID NO: 818510 - RNA, 19 nt, Homo sapiens
  misc_RNA (1)...(19): siRNA sense strand
cccgagagcucuuuggaau

SEQ ID NO: 818511 - RNA, 19 nt, Homo sapiens
  misc_RNA (1)...(19): siRNA sense strand
ggccaagauucgcauugaa

SEQ ID NO: 818512 - RNA, 19 nt, Homo sapiens
  misc_RNA (1)...(19): siRNA sense strand
gugaugcccugcuaugaca

SEQ ID NO: 818513 - RNA, 19 nt, Homo sapiens
  misc_RNA (1)...(19): siRNA sense strand
acgaggagcugaagaaggu

SEQ ID NO: 818514 - RNA, 19 nt, Homo sapiens
  misc_RNA (1)...(19): siRNA sense strand
gcagaggcugguuguaguu

SEQ ID NO: 818515 - RNA, 19 nt, Homo sapiens
  misc_RNA (1)...(19): siRNA sense strand
gccaaggucucgcuaaacg

SEQ ID NO: 818516 - RNA, 19 nt, Homo sapiens
  misc_RNA (1)...(19): siRNA sense strand
caagaucuaccacgucaca

SEQ ID NO: 818517 - RNA, 19 nt, Homo sapiens
  misc_RNA (1)...(19): siRNA sense strand
gguucuagaugcuaacaag

SEQ ID NO: 818518 - RNA, 19 nt, Homo sapiens
  misc_RNA (1)...(19): siRNA sense strand
ccgcagagaccgugcuuau

SEQ ID NO: 818519 - RNA, 19 nt, Homo sapiens
  misc_RNA (1)...(19): siRNA sense strand
gcguacggcuuccgcaaca

SEQ ID NO: 818520 - RNA, 19 nt, Homo sapiens
  misc_RNA (1)...(19): siRNA sense strand
ucuagaugcuaacaagaug

SEQ ID NO: 818521 - RNA, 19 nt, Homo sapiens
  misc_RNA (1)...(19): siRNA sense strand
ccucacaacaggagaaguu

SEQ ID NO: 818522 - RNA, 19 nt, Homo sapiens
  misc_RNA (1)...(19): siRNA sense strand
gaagaugacgggagcuacu

SEQ ID NO: 818523 - RNA, 19 nt, Homo sapiens
  misc_RNA (1)...(19): siRNA sense strand
uggccaagauucgcauuga

SEQ ID NO: 818524 - RNA, 19 nt, Homo sapiens
  misc_RNA (1)...(19): siRNA sense strand
uacagauacugccaggaaa

SEQ ID NO: 818525 - RNA, 19 nt, Homo sapiens
  misc_RNA (1)...(19): siRNA sense strand
uucaggagcuguacacaca

SEQ ID NO: 818526 - RNA, 19 nt, Homo sapiens
  misc_RNA (1)...(19): siRNA sense strand
ccaagauucgcauugaaga

SEQ ID NO: 818527 - RNA, 19 nt, Homo sapiens
  misc_RNA (1)...(19): siRNA sense strand
gagaguuugugcggcgauu

SEQ ID NO: 818528 - RNA, 19 nt, Homo sapiens
  misc_RNA (1)...(19): siRNA sense strand
gccaggaaauuaaccucau

SEQ ID NO: 818529 - RNA, 19 nt, Homo sapiens
  misc_RNA (1)...(19): siRNA sense strand
cgggagcuacuuccaaauu

SEQ ID NO: 818530 - RNA, 19 nt, Homo sapiens
  misc_RNA (1)...(19): siRNA sense strand
cgagagcucuuuggaaucc

SEQ ID NO: 818531 - RNA, 19 nt, Homo sapiens
  misc_RNA (1)...(19): siRNA sense strand
aggccaaggucucgcuaaa

SEQ ID NO: 818532 - RNA, 19 nt, Homo sapiens
  misc_RNA (1)...(19): siRNA sense strand
gguuguaguuucggucuca

SEQ ID NO: 818533 - RNA, 19 nt, Homo sapiens
  misc_RNA (1)...(19): siRNA sense strand
gugcaucaagccugucaaa

SEQ ID NO: 818534 - RNA, 19 nt, Homo sapiens
  misc_RNA (1)...(19): siRNA sense strand
agauucgcauugaagauga

SEQ ID NO: 818535 - RNA, 19 nt, Homo sapiens
  misc_RNA (1)...(19): siRNA sense strand
caggagaaguuuucagguu

SEQ ID NO: 818536 - RNA, 19 nt, Homo sapiens
  misc_RNA (1)...(19): siRNA sense strand
cacgggauguggacugugu

SEQ ID NO: 818537 - RNA, 19 nt, Homo sapiens
  misc_RNA (1)...(19): siRNA sense strand
cagauacugccaggaaauu

SEQ ID NO: 818538 - RNA, 19 nt, Homo sapiens
  misc_RNA (1)...(19): siRNA sense strand
gacacgggauguggacugu

SEQ ID NO: 818539 - RNA, 19 nt, Homo sapiens
  misc_RNA (1)...(19): siRNA sense strand
gcacguggagagacuguac

SEQ ID NO: 818540 - RNA, 19 nt, Homo sapiens
  misc_RNA (1)...(19): siRNA sense strand
gccacgaggagcugaagaa

SEQ ID NO: 818541 - RNA, 19 nt, Homo sapiens
  misc_RNA (1)...(19): siRNA sense strand
gcugaauccuacagauacu

SEQ ID NO: 818542 - RNA, 19 nt, Homo sapiens
  misc_RNA (1)...(19): siRNA sense strand
caagauucgcauugaagau

SEQ ID NO: 818543 - RNA, 19 nt, Homo sapiens
  misc_RNA (1)...(19): siRNA sense strand
ucagcugaauccuacagau

SEQ ID NO: 818544 - RNA, 19 nt, Homo sapiens
  misc_RNA (1)...(19): siRNA sense strand
agauacugccaggaaauua

SEQ ID NO: 818545 - RNA, 19 nt, Homo sapiens
  misc_RNA (1)...(19): siRNA sense strand
gccaagauucgcauugaag

SEQ ID NO: 818546 - RNA, 19 nt, Homo sapiens
  misc_RNA (1)...(19): siRNA sense strand
ucaccacagucuagagcau

SEQ ID NO: 818547 - RNA, 19 nt, Homo sapiens
  misc_RNA (1)...(19): siRNA sense strand
caaccaggagcaccagaca

SEQ ID NO: 818548 - RNA, 19 nt, Homo sapiens
  misc_RNA (1)...(19): siRNA sense strand
gaggcugguuguaguuucg

SEQ ID NO: 818549 - RNA, 19 nt, Homo sapiens
  misc_RNA (1)...(19): siRNA sense strand
gagcuacuuccaaauuaac

SEQ ID NO: 818550 - RNA, 19 nt, Homo sapiens
  misc_RNA (1)...(19): siRNA sense strand
gaugcccugcuaugacaaa

SEQ ID NO: 818551 - RNA, 19 nt, Homo sapiens
  misc_RNA (1)...(19): siRNA sense strand
gcuaugccgagaagacuca

SEQ ID NO: 818552 - RNA, 19 nt, Homo sapiens
  misc_RNA (1)...(19): siRNA sense strand
ugacgggagcuacuuccaa

SEQ ID NO: 818553 - RNA, 19 nt, Homo sapiens
  misc_RNA (1)...(19): siRNA sense strand
gaagguguuucaagaauaa

SEQ ID NO: 818554 - RNA, 19 nt, Homo sapiens
  misc_RNA (1)...(19): siRNA sense strand
caauacagcuuaacaauag

SEQ ID NO: 818555 - RNA, 19 nt, Homo sapiens
  misc_RNA (1)...(19): siRNA sense strand
ggacugucaugauucuuua

SEQ ID NO: 818556 - RNA, 19 nt, Homo sapiens
  misc_RNA (1)...(19): siRNA sense strand
ggacuugaguggccaguaa

SEQ ID NO: 818557 - RNA, 19 nt, Homo sapiens
  misc_RNA (1)...(19): siRNA sense strand
ucaacuagaugaagucuuu

SEQ ID NO: 818558 - RNA, 19 nt, Homo sapiens
  misc_RNA (1)...(19): siRNA sense strand
gggauuagcuuuaggaaca

SEQ ID NO: 818559 - RNA, 19 nt, Homo sapiens
  misc_RNA (1)...(19): siRNA sense strand
ccauguaucuccaguauug

SEQ ID NO: 818560 - RNA, 19 nt, Homo sapiens
  misc_RNA (1)...(19): siRNA sense strand
ggaaguagauggaggaacu

SEQ ID NO: 818561 - RNA, 19 nt, Homo sapiens
  misc_RNA (1)...(19): siRNA sense strand
uauagaagguguuucaaga

SEQ ID NO: 818562 - RNA, 19 nt, Homo sapiens
  misc_RNA (1)...(19): siRNA sense strand
ucacaucacugcagaaagu

SEQ ID NO: 818563 - RNA, 19 nt, Homo sapiens
  misc_RNA (1)...(19): siRNA sense strand
gauaagagagucagaagug

SEQ ID NO: 818564 - RNA, 19 nt, Homo sapiens
  misc_RNA (1)...(19): siRNA sense strand
ccaauacagcuuaacaaua

SEQ ID NO: 818565 - RNA, 19 nt, Homo sapiens
  misc_RNA (1)...(19): siRNA sense strand
gaaaauguguggaaaagug

SEQ ID NO: 818566 - RNA, 19 nt, Homo sapiens
  misc_RNA (1)...(19): siRNA sense strand
gaccaucacuguccuugga

SEQ ID NO: 818567 - RNA, 19 nt, Homo sapiens
  misc_RNA (1)...(19): siRNA sense strand
ucagaaguguucgcuauaa

SEQ ID NO: 818568 - RNA, 19 nt, Homo sapiens
  misc_RNA (1)...(19): siRNA sense strand
guagauggaggaacuuuaa

SEQ ID NO: 818569 - RNA, 19 nt, Homo sapiens
  misc_RNA (1)...(19): siRNA sense strand
gagauccucuuccaauugu

SEQ ID NO: 818570 - RNA, 19 nt, Homo sapiens
  misc_RNA (1)...(19): siRNA sense strand
uuacuucaaugccauguuu

SEQ ID NO: 818571 - RNA, 19 nt, Homo sapiens
  misc_RNA (1)...(19): siRNA sense strand
gguacguucuguucgguua

SEQ ID NO: 818572 - RNA, 19 nt, Homo sapiens
  misc_RNA (1)...(19): siRNA sense strand
aaacuucuauugagucaug

SEQ ID NO: 818573 - RNA, 19 nt, Homo sapiens
  misc_RNA (1)...(19): siRNA sense strand
aaauuggacugucaugauu

SEQ ID NO: 818574 - RNA, 19 nt, Homo sapiens
  misc_RNA (1)...(19): siRNA sense strand
gaugauuccuuuauagaag

SEQ ID NO: 818575 - RNA, 19 nt, Homo sapiens
  misc_RNA (1)...(19): siRNA sense strand
gaggaacuuuaaacaggua

SEQ ID NO: 818576 - RNA, 19 nt, Homo sapiens
  misc_RNA (1)...(19): siRNA sense strand
caucauagcccuugguguu

SEQ ID NO: 818577 - RNA, 19 nt, Homo sapiens
  misc_RNA (1)...(19): siRNA sense strand
gaagagaaggcuaaagauc

SEQ ID NO: 818578 - RNA, 19 nt, Homo sapiens
  misc_RNA (1)...(19): siRNA sense strand
gcagaaaguguaacagaug

SEQ ID NO: 818579 - RNA, 19 nt, Homo sapiens
  misc_RNA (1)...(19): siRNA sense strand
agaagguguuucaagaaua

SEQ ID NO: 818580 - RNA, 19 nt, Homo sapiens
  misc_RNA (1)...(19): siRNA sense strand
cuaaagaucgaauucagua

SEQ ID NO: 818581 - RNA, 19 nt, Homo sapiens
  misc_RNA (1)...(19): siRNA sense strand
uaacagaugugugaugaag

SEQ ID NO: 818582 - RNA, 19 nt, Homo sapiens
  misc_RNA (1)...(19): siRNA sense strand
cacaagagguuuacgauac

SEQ ID NO: 818583 - RNA, 19 nt, Homo sapiens
  misc_RNA (1)...(19): siRNA sense strand
caauagaacaguugaaaca

SEQ ID NO: 818584 - RNA, 19 nt, Homo sapiens
  misc_RNA (1)...(19): siRNA sense strand
cagaaguguucgcuauaaa

SEQ ID NO: 818585 - RNA, 19 nt, Homo sapiens
  misc_RNA (1)...(19): siRNA sense strand
ccggaaauuucucaggaua

SEQ ID NO: 818586 - RNA, 19 nt, Homo sapiens
  misc_RNA (1)...(19): siRNA sense strand
agagaaggcugucaccaau

SEQ ID NO: 818587 - RNA, 19 nt, Homo sapiens
  misc_RNA (1)...(19): siRNA sense strand
uagaagguguuucaagaau

SEQ ID NO: 818588 - RNA, 19 nt, Homo sapiens
  misc_RNA (1)...(19): siRNA sense strand
ugaaggagauggacuugag

SEQ ID NO: 818589 - RNA, 19 nt, Homo sapiens
  misc_RNA (1)...(19): siRNA sense strand
ccacaagagguuuacgaua

SEQ ID NO: 818590 - RNA, 19 nt, Homo sapiens
  misc_RNA (1)...(19): siRNA sense strand
gagaaggcugucaccaaua

SEQ ID NO: 818591 - RNA, 19 nt, Homo sapiens
  misc_RNA (1)...(19): siRNA sense strand
aguguucgcuauaaaguaa

SEQ ID NO: 818592 - RNA, 19 nt, Homo sapiens
  misc_RNA (1)...(19): siRNA sense strand
uauccaugcugcuuucauu

SEQ ID NO: 818593 - RNA, 19 nt, Homo sapiens
  misc_RNA (1)...(19): siRNA sense strand
agucauggauugaagagaa

SEQ ID NO: 818594 - RNA, 19 nt, Homo sapiens
  misc_RNA (1)...(19): siRNA sense strand
uguaacagaugugugauga

SEQ ID NO: 818595 - RNA, 19 nt, Homo sapiens
  misc_RNA (1)...(19): siRNA sense strand
gagacaaaauucuugauga

SEQ ID NO: 818596 - RNA, 19 nt, Homo sapiens
  misc_RNA (1)...(19): siRNA sense strand
ggaacacagugaagaucga

SEQ ID NO: 818597 - RNA, 19 nt, Homo sapiens
  misc_RNA (1)...(19): siRNA sense strand
cagaaaguguaacagaugu

SEQ ID NO: 818598 - RNA, 19 nt, Homo sapiens
  misc_RNA (1)...(19): siRNA sense strand
cgaagagccucgaauacag

SEQ ID NO: 818599 - RNA, 19 nt, Homo sapiens
  misc_RNA (1)...(19): siRNA sense strand
gaugugugaugaagaugga

SEQ ID NO: 818600 - RNA, 19 nt, Homo sapiens
  misc_RNA (1)...(19): siRNA sense strand
uaccauguaucuccaguau

SEQ ID NO: 818601 - RNA, 19 nt, Homo sapiens
  misc_RNA (1)...(19): siRNA sense strand
ggauugaagagaaggcuaa

SEQ ID NO: 818602 - RNA, 19 nt, Homo sapiens
  misc_RNA (1)...(19): siRNA sense strand
cauagcccuugguguuaua

SEQ ID NO: 818603 - RNA, 19 nt, Homo sapiens
  misc_RNA (1)...(19): siRNA sense strand
uaaauuggacugucaugau

SEQ ID NO: 818604 - RNA, 19 nt, Homo sapiens
  misc_RNA (1)...(19): siRNA sense strand
uuacgauacugguuauaug

SEQ ID NO: 818605 - RNA, 19 nt, Homo sapiens
  misc_RNA (1)...(19): siRNA sense strand
gaaguguucgcuauaaagu

SEQ ID NO: 818606 - RNA, 19 nt, Homo sapiens
  misc_RNA (1)...(19): siRNA sense strand
acagaugugugaugaagau

SEQ ID NO: 818607 - RNA, 19 nt, Homo sapiens
  misc_RNA (1)...(19): siRNA sense strand
ucuauugagucauggauug

SEQ ID NO: 818608 - RNA, 19 nt, Homo sapiens
  misc_RNA (1)...(19): siRNA sense strand
ucuguucgguuaucaaguu

SEQ ID NO: 818609 - RNA, 19 nt, Homo sapiens
  misc_RNA (1)...(19): siRNA sense strand
agagaaggcuaaagaucga

SEQ ID NO: 818610 - RNA, 19 nt, Homo sapiens
  misc_RNA (1)...(19): siRNA sense strand
agucagaaguguucgcuau

SEQ ID NO: 818611 - RNA, 19 nt, Homo sapiens
  misc_RNA (1)...(19): siRNA sense strand
gcagauaagagagucagaa

SEQ ID NO: 818612 - RNA, 19 nt, Homo sapiens
  misc_RNA (1)...(19): siRNA sense strand
gcuuaacaauagaacaguu

SEQ ID NO: 818613 - RNA, 19 nt, Homo sapiens
  misc_RNA (1)...(19): siRNA sense strand
cugguuauauggagacaaa

SEQ ID NO: 818614 - RNA, 19 nt, Homo sapiens
  misc_RNA (1)...(19): siRNA sense strand
caccgaagagccucgaaua

SEQ ID NO: 818615 - RNA, 19 nt, Homo sapiens
  misc_RNA (1)...(19): siRNA sense strand
gaaaguguaacagaugugu

SEQ ID NO: 818616 - RNA, 19 nt, Homo sapiens
  misc_RNA (1)...(19): siRNA sense strand
cuagaugaagucuuuguuu

SEQ ID NO: 818617 - RNA, 19 nt, Homo sapiens
  misc_RNA (1)...(19): siRNA sense strand
gcaccacguucacaucacu

SEQ ID NO: 818618 - RNA, 19 nt, Homo sapiens
  misc_RNA (1)...(19): siRNA sense strand
agaaggcugucaccaauac

SEQ ID NO: 818619 - RNA, 19 nt, Homo sapiens
  misc_RNA (1)...(19): siRNA sense strand
gauaugggaaguagaugga

SEQ ID NO: 818620 - RNA, 19 nt, Homo sapiens
  misc_RNA (1)...(19): siRNA sense strand
guugugguauuggcccuua

SEQ ID NO: 818621 - RNA, 19 nt, Homo sapiens
  misc_RNA (1)...(19): siRNA sense strand
gauggaggaacuuuaaaca

SEQ ID NO: 818622 - RNA, 19 nt, Homo sapiens
  misc_RNA (1)...(19): siRNA sense strand
cgaauucaguauuaucaac

SEQ ID NO: 818623 - RNA, 19 nt, Homo sapiens
  misc_RNA (1)...(19): siRNA sense strand
uauuggcccuuacauacaa

SEQ ID NO: 818624 - RNA, 19 nt, Homo sapiens
  misc_RNA (1)...(19): siRNA sense strand
uggauuagcugcauuugcu

SEQ ID NO: 818625 - RNA, 19 nt, Homo sapiens
  misc_RNA (1)...(19): siRNA sense strand
uagcaccacuggguuguau

SEQ ID NO: 818626 - RNA, 19 nt, Homo sapiens
  misc_RNA (1)...(19): siRNA sense strand
uaagagagucagaaguguu

SEQ ID NO: 818627 - RNA, 19 nt, Homo sapiens
  misc_RNA (1)...(19): siRNA sense strand
acauacaacuggaggaagu

SEQ ID NO: 818628 - RNA, 19 nt, Homo sapiens
  misc_RNA (1)...(19): siRNA sense strand
uaucaucggcucuccuuug

SEQ ID NO: 818629 - RNA, 19 nt, Homo sapiens
  misc_RNA (1)...(19): siRNA sense strand
uguaaagucugccaagcau

SEQ ID NO: 818630 - RNA, 19 nt, Homo sapiens
  misc_RNA (1)...(19): siRNA sense strand
gguuuacgauacugguuau

SEQ ID NO: 818631 - RNA, 19 nt, Homo sapiens
  misc_RNA (1)...(19): siRNA sense strand
ggauuagcuuuaggaacaa

SEQ ID NO: 818632 - RNA, 19 nt, Homo sapiens
  misc_RNA (1)...(19): siRNA sense strand
gguguuauagcaauauguu

SEQ ID NO: 818633 - RNA, 19 nt, Homo sapiens
  misc_RNA (1)...(19): siRNA sense strand
ucauagcccuugguguuau

SEQ ID NO: 818634 - RNA, 19 nt, Homo sapiens
  misc_RNA (1)...(19): siRNA sense strand
ggaaauuucucaggauacc

SEQ ID NO: 818635 - RNA, 19 nt, Homo sapiens
  misc_RNA (1)...(19): siRNA sense strand
caugauugacucuguguug

SEQ ID NO: 818636 - RNA, 19 nt, Homo sapiens
  misc_RNA (1)...(19): siRNA sense strand
gaucgaauucaguauuauc

SEQ ID NO: 818637 - RNA, 19 nt, Homo sapiens
  misc_RNA (1)...(19): siRNA sense strand
guccuuggaucaacaacug

SEQ ID NO: 818638 - RNA, 19 nt, Homo sapiens
  misc_RNA (1)...(19): siRNA sense strand
guaaagucugccaagcaua

SEQ ID NO: 818639 - RNA, 19 nt, Homo sapiens
  misc_RNA (1)...(19): siRNA sense strand
gaaggcuaaagaucgaauu

SEQ ID NO: 818640 - RNA, 19 nt, Homo sapiens
  misc_RNA (1)...(19): siRNA sense strand
uuaaagagacugugucacu

SEQ ID NO: 818641 - RNA, 19 nt, Homo sapiens
  misc_RNA (1)...(19): siRNA sense strand
uugaagagaaggcuaaaga

SEQ ID NO: 818642 - RNA, 19 nt, Homo sapiens
  misc_RNA (1)...(19): siRNA sense strand
ggaaaagugucccugugau

SEQ ID NO: 818643 - RNA, 19 nt, Homo sapiens
  misc_RNA (1)...(19): siRNA sense strand
ugucaccaauacagcuuaa

SEQ ID NO: 818644 - RNA, 19 nt, Homo sapiens
  misc_RNA (1)...(19): siRNA sense strand
uaaagucugccaagcauac

SEQ ID NO: 818645 - RNA, 19 nt, Homo sapiens
  misc_RNA (1)...(19): siRNA sense strand
ccgaagagccucgaauaca

SEQ ID NO: 818646 - RNA, 19 nt, Homo sapiens
  misc_RNA (1)...(19): siRNA sense strand
ggcuaaagaucgaauucag

SEQ ID NO: 818647 - RNA, 19 nt, Homo sapiens
  misc_RNA (1)...(19): siRNA sense strand
ggguggaaaccggaaauuu

SEQ ID NO: 818648 - RNA, 19 nt, Homo sapiens
  misc_RNA (1)...(19): siRNA sense strand
ccauagcuguugggauguu

SEQ ID NO: 818649 - RNA, 19 nt, Homo sapiens
  misc_RNA (1)...(19): siRNA sense strand
cuauguacacacagcuuua

SEQ ID NO: 818650 - RNA, 19 nt, Homo sapiens
  misc_RNA (1)...(19): siRNA sense strand
gcauacaaggcaccacguu

SEQ ID NO: 818651 - RNA, 19 nt, Homo sapiens
  misc_RNA (1)...(19): siRNA sense strand
cugcugcccucugaauaaa

SEQ ID NO: 818652 - RNA, 19 nt, Homo sapiens
  misc_RNA (1)...(19): siRNA sense strand
cuugaugauuccuuuauag

SEQ ID NO: 818653 - RNA, 19 nt, Homo sapiens
  misc_RNA (1)...(19): siRNA sense strand
ccacagacaugcuuaacua

SEQ ID NO: 818654 - RNA, 19 nt, Homo sapiens
  misc_RNA (1)...(19): siRNA sense strand
ggacauauguacguuggua

SEQ ID NO: 818655 - RNA, 19 nt, Homo sapiens
  misc_RNA (1)...(19): siRNA sense strand
gaagagagauuuugagaga

SEQ ID NO: 818656 - RNA, 19 nt, Homo sapiens
  misc_RNA (1)...(19): siRNA sense strand
ggaggaaauugauuauaga

SEQ ID NO: 818657 - RNA, 19 nt, Homo sapiens
  misc_RNA (1)...(19): siRNA sense strand
gaaaaucucaggcaaaaua

SEQ ID NO: 818658 - RNA, 19 nt, Homo sapiens
  misc_RNA (1)...(19): siRNA sense strand
agagagagauguugacuug

SEQ ID NO: 818659 - RNA, 19 nt, Homo sapiens
  misc_RNA (1)...(19): siRNA sense strand
caagacacaucagggaaua

SEQ ID NO: 818660 - RNA, 19 nt, Homo sapiens
  misc_RNA (1)...(19): siRNA sense strand
gauguugacuugagauuuc

SEQ ID NO: 818661 - RNA, 19 nt, Homo sapiens
  misc_RNA (1)...(19): siRNA sense strand
aaagaaagcaguacugaaa

SEQ ID NO: 818662 - RNA, 19 nt, Homo sapiens
  misc_RNA (1)...(19): siRNA sense strand
ggauccauauaauguguua

SEQ ID NO: 818663 - RNA, 19 nt, Homo sapiens
  misc_RNA (1)...(19): siRNA sense strand
cuaccgagcuguggacaua

SEQ ID NO: 818664 - RNA, 19 nt, Homo sapiens
  misc_RNA (1)...(19): siRNA sense strand
agucauaaaucaccuguuu

SEQ ID NO: 818665 - RNA, 19 nt, Homo sapiens
  misc_RNA (1)...(19): siRNA sense strand
ggacuggacuggaaguauc

SEQ ID NO: 818666 - RNA, 19 nt, Homo sapiens
  misc_RNA (1)...(19): siRNA sense strand
cagacaugcuuaacuauga

SEQ ID NO: 818667 - RNA, 19 nt, Homo sapiens
  misc_RNA (1)...(19): siRNA sense strand
uuaaagcacucaugaagga

SEQ ID NO: 818668 - RNA, 19 nt, Homo sapiens
  misc_RNA (1)...(19): siRNA sense strand
gcacuucggccacgggaua

SEQ ID NO: 818669 - RNA, 19 nt, Homo sapiens
  misc_RNA (1)...(19): siRNA sense strand
guucuuugcuccuuuguga

SEQ ID NO: 818670 - RNA, 19 nt, Homo sapiens
  misc_RNA (1)...(19): siRNA sense strand
gaaguucauggaccuauaa

SEQ ID NO: 818671 - RNA, 19 nt, Homo sapiens
  misc_RNA (1)...(19): siRNA sense strand
ggaaguaucugggaauggu

SEQ ID NO: 818672 - RNA, 19 nt, Homo sapiens
  misc_RNA (1)...(19): siRNA sense strand
gaaagaaagcaguacugaa

SEQ ID NO: 818673 - RNA, 19 nt, Homo sapiens
  misc_RNA (1)...(19): siRNA sense strand
ggauggaauuggauguauu

SEQ ID NO: 818674 - RNA, 19 nt, Homo sapiens
  misc_RNA (1)...(19): siRNA sense strand
gaaggcacaccgaaagaaa

SEQ ID NO: 818675 - RNA, 19 nt, Homo sapiens
  misc_RNA (1)...(19): siRNA sense strand
gcaguuacauucaccacau

SEQ ID NO: 818676 - RNA, 19 nt, Homo sapiens
  misc_RNA (1)...(19): siRNA sense strand
caaaggcacuugcaguuac

SEQ ID NO: 818677 - RNA, 19 nt, Homo sapiens
  misc_RNA (1)...(19): siRNA sense strand
gauggaauuggauguauuu

SEQ ID NO: 818678 - RNA, 19 nt, Homo sapiens
  misc_RNA (1)...(19): siRNA sense strand
uaugagcucuuacuaguca

SEQ ID NO: 818679 - RNA, 19 nt, Homo sapiens
  misc_RNA (1)...(19): siRNA sense strand
gaagacggcaggaggaaau

SEQ ID NO: 818680 - RNA, 19 nt, Homo sapiens
  misc_RNA (1)...(19): siRNA sense strand
aaaaggaacuggggaauuu

SEQ ID NO: 818681 - RNA, 19 nt, Homo sapiens
  misc_RNA (1)...(19): siRNA sense strand
gagagauguugacuugaga

SEQ ID NO: 818682 - RNA, 19 nt, Homo sapiens
  misc_RNA (1)...(19): siRNA sense strand
uaacuaugaugcugcuuca

SEQ ID NO: 818683 - RNA, 19 nt, Homo sapiens
  misc_RNA (1)...(19): siRNA sense strand
cauuagccauccugaguuu

SEQ ID NO: 818684 - RNA, 19 nt, Homo sapiens
  misc_RNA (1)...(19): siRNA sense strand
ggaaguggcgauucgaaga

SEQ ID NO: 818685 - RNA, 19 nt, Homo sapiens
  misc_RNA (1)...(19): siRNA sense strand
gagggaagacuaugaaagu

SEQ ID NO: 818686 - RNA, 19 nt, Homo sapiens
  misc_RNA (1)...(19): siRNA sense strand
ggcaggaggaaauugauua

SEQ ID NO: 818687 - RNA, 19 nt, Homo sapiens
  misc_RNA (1)...(19): siRNA sense strand
gagcaggugaugccgauuu

SEQ ID NO: 818688 - RNA, 19 nt, Homo sapiens
  misc_RNA (1)...(19): siRNA sense strand
gggaaugguuuagaaguuc

SEQ ID NO: 818689 - RNA, 19 nt, Homo sapiens
  misc_RNA (1)...(19): siRNA sense strand
caacaagagcccugaagug

SEQ ID NO: 818690 - RNA, 19 nt, Homo sapiens
  misc_RNA (1)...(19): siRNA sense strand
uaacggagccauugaagca

SEQ ID NO: 818691 - RNA, 19 nt, Homo sapiens
  misc_RNA (1)...(19): siRNA sense strand
ggaaugguuuagaaguuca

SEQ ID NO: 818692 - RNA, 19 nt, Homo sapiens
  misc_RNA (1)...(19): siRNA sense strand
ucagcuuucuguucaguuu

SEQ ID NO: 818693 - RNA, 19 nt, Homo sapiens
  misc_RNA (1)...(19): siRNA sense strand
gaagugcuccgggcauuug

SEQ ID NO: 818694 - RNA, 19 nt, Homo sapiens
  misc_RNA (1)...(19): siRNA sense strand
agaaguucauggaccuaua

SEQ ID NO: 818695 - RNA, 19 nt, Homo sapiens
  misc_RNA (1)...(19): siRNA sense strand
aggaggaaauugauuauag

SEQ ID NO: 818696 - RNA, 19 nt, Homo sapiens
  misc_RNA (1)...(19): siRNA sense strand
gcugguagcugguuaugcu

SEQ ID NO: 818697 - RNA, 19 nt, Homo sapiens
  misc_RNA (1)...(19): siRNA sense strand
gaggguagaagagagauuu

SEQ ID NO: 818698 - RNA, 19 nt, Homo sapiens
  misc_RNA (1)...(19): siRNA sense strand
gaugccgauuuccauuaua

SEQ ID NO: 818699 - RNA, 19 nt, Homo sapiens
  misc_RNA (1)...(19): siRNA sense strand
gggauggaauuggauguau

SEQ ID NO: 818700 - RNA, 19 nt, Homo sapiens
  misc_RNA (1)...(19): siRNA sense strand
gcacuugcaguuacauuca

SEQ ID NO: 818701 - RNA, 19 nt, Homo sapiens
  misc_RNA (1)...(19): siRNA sense strand
acaaaggcacuugcaguua

SEQ ID NO: 818702 - RNA, 19 nt, Homo sapiens
  misc_RNA (1)...(19): siRNA sense strand
aagauggacuggacuggaa

SEQ ID NO: 818703 - RNA, 19 nt, Homo sapiens
  misc_RNA (1)...(19): siRNA sense strand
agucaaagcaauccuguuu

SEQ ID NO: 818704 - RNA, 19 nt, Homo sapiens
  misc_RNA (1)...(19): siRNA sense strand
cgaaagaaagcaguacuga

SEQ ID NO: 818705 - RNA, 19 nt, Homo sapiens
  misc_RNA (1)...(19): siRNA sense strand
ggaaggcacaccgaaagaa

SEQ ID NO: 818706 - RNA, 19 nt, Homo sapiens
  misc_RNA (1)...(19): siRNA sense strand
guucauggaccuauaagga

SEQ ID NO: 818707 - RNA, 19 nt, Homo sapiens
  misc_RNA (1)...(19): siRNA sense strand
gaguggauccauauaaugu

SEQ ID NO: 818708 - RNA, 19 nt, Homo sapiens
  misc_RNA (1)...(19): siRNA sense strand
ggaguggauccauauaaug

SEQ ID NO: 818709 - RNA, 19 nt, Homo sapiens
  misc_RNA (1)...(19): siRNA sense strand
gcgauucgaagauuccuuu

SEQ ID NO: 818710 - RNA, 19 nt, Homo sapiens
  misc_RNA (1)...(19): siRNA sense strand
uaagauugaugagugugaa

SEQ ID NO: 818711 - RNA, 19 nt, Homo sapiens
  misc_RNA (1)...(19): siRNA sense strand
ggugguacccagucauaaa

SEQ ID NO: 818712 - RNA, 19 nt, Homo sapiens
  misc_RNA (1)...(19): siRNA sense strand
gaacuggggaauuuauuaa

SEQ ID NO: 818713 - RNA, 19 nt, Homo sapiens
  misc_RNA (1)...(19): siRNA sense strand
gcuccgggcauuugaugua

SEQ ID NO: 818714 - RNA, 19 nt, Homo sapiens
  misc_RNA (1)...(19): siRNA sense strand
gcaggaggaaauugauuau

SEQ ID NO: 818715 - RNA, 19 nt, Homo sapiens
  misc_RNA (1)...(19): siRNA sense strand
gugaugccgauuuccauua

SEQ ID NO: 818716 - RNA, 19 nt, Homo sapiens
  misc_RNA (1)...(19): siRNA sense strand
gguacccagucauaaauca

SEQ ID NO: 818717 - RNA, 19 nt, Homo sapiens
  misc_RNA (1)...(19): siRNA sense strand
ugggaaugguuuagaaguu

SEQ ID NO: 818718 - RNA, 19 nt, Homo sapiens
  misc_RNA (1)...(19): siRNA sense strand
gcaacaagagcccugaagu

SEQ ID NO: 818719 - RNA, 19 nt, Homo sapiens
  misc_RNA (1)...(19): siRNA sense strand
cauugaagcauauuggaaa

SEQ ID NO: 818720 - RNA, 19 nt, Homo sapiens
  misc_RNA (1)...(19): siRNA sense strand
gaaguggcgauucgaagau

SEQ ID NO: 818721 - RNA, 19 nt, Homo sapiens
  misc_RNA (1)...(19): siRNA sense strand
gaccaaggcagcacauaca

SEQ ID NO: 818722 - RNA, 19 nt, Homo sapiens
  misc_RNA (1)...(19): siRNA sense strand
agagagauguugacuugag

SEQ ID NO: 818723 - RNA, 19 nt, Homo sapiens
  misc_RNA (1)...(19): siRNA sense strand
ggaacuggggaauuuauua

SEQ ID NO: 818724 - RNA, 19 nt, Homo sapiens
  misc_RNA (1)...(19): siRNA sense strand
uuacuagucaacccuauuu

SEQ ID NO: 818725 - RNA, 19 nt, Homo sapiens
  misc_RNA (1)...(19): siRNA sense strand
aaagagggaagacuaugaa

SEQ ID NO: 818726 - RNA, 19 nt, Homo sapiens
  misc_RNA (1)...(19): siRNA sense strand
ugaugccgauuuccauuau

SEQ ID NO: 818727 - RNA, 19 nt, Homo sapiens
  misc_RNA (1)...(19): siRNA sense strand
uuccagugcugauaauuau

SEQ ID NO: 818728 - RNA, 19 nt, Homo sapiens
  misc_RNA (1)...(19): siRNA sense strand
aggcccagcucaagucuga

SEQ ID NO: 818729 - RNA, 19 nt, Homo sapiens
  misc_RNA (1)...(19): siRNA sense strand
uaaaucaccuguuuuggau

SEQ ID NO: 818730 - RNA, 19 nt, Homo sapiens
  misc_RNA (1)...(19): siRNA sense strand
cauauaggcgguccugaga

SEQ ID NO: 818731 - RNA, 19 nt, Homo sapiens
  misc_RNA (1)...(19): siRNA sense strand
cuaugaaagucaaagcaau

SEQ ID NO: 818732 - RNA, 19 nt, Homo sapiens
  misc_RNA (1)...(19): siRNA sense strand
cauccugaguuucugcuau

SEQ ID NO: 818733 - RNA, 19 nt, Homo sapiens
  misc_RNA (1)...(19): siRNA sense strand
gcauuagccauccugaguu

SEQ ID NO: 818734 - RNA, 19 nt, Homo sapiens
  misc_RNA (1)...(19): siRNA sense strand
caucuuccagugcugauaa

SEQ ID NO: 818735 - RNA, 19 nt, Homo sapiens
  misc_RNA (1)...(19): siRNA sense strand
acggagccauugaagcaua

SEQ ID NO: 818736 - RNA, 19 nt, Homo sapiens
  misc_RNA (1)...(19): siRNA sense strand
guggauccauauaaugugu

SEQ ID NO: 818737 - RNA, 19 nt, Homo sapiens
  misc_RNA (1)...(19): siRNA sense strand
ugagagagagagauguuga

SEQ ID NO: 818738 - RNA, 19 nt, Homo sapiens
  misc_RNA (1)...(19): siRNA sense strand
uaaugguacuucuuugucu

SEQ ID NO: 818739 - RNA, 19 nt, Homo sapiens
  misc_RNA (1)...(19): siRNA sense strand
cuuccagugcugauaauua

SEQ ID NO: 818740 - RNA, 19 nt, Homo sapiens
  misc_RNA (1)...(19): siRNA sense strand
auucgaagauuccuuugga

SEQ ID NO: 818741 - RNA, 19 nt, Homo sapiens
  misc_RNA (1)...(19): siRNA sense strand
gggaaggcacaccgaaaga

SEQ ID NO: 818742 - RNA, 19 nt, Homo sapiens
  misc_RNA (1)...(19): siRNA sense strand
gagauguugacuugagauu

SEQ ID NO: 818743 - RNA, 19 nt, Homo sapiens
  misc_RNA (1)...(19): siRNA sense strand
gaaaaggaacuggggaauu

SEQ ID NO: 818744 - RNA, 19 nt, Homo sapiens
  misc_RNA (1)...(19): siRNA sense strand
gaaagcaguacugaaagca

SEQ ID NO: 818745 - RNA, 19 nt, Homo sapiens
  misc_RNA (1)...(19): siRNA sense strand
caguuacauucaccacauu

SEQ ID NO: 818746 - RNA, 19 nt, Homo sapiens
  misc_RNA (1)...(19): siRNA sense strand
ggcauuagccauccugagu

SEQ ID NO: 818747 - RNA, 19 nt, Homo sapiens
  misc_RNA (1)...(19): siRNA sense strand
acauucaccacauuuguaa

SEQ ID NO: 818748 - RNA, 19 nt, Homo sapiens
  misc_RNA (1)...(19): siRNA sense strand
agacaugcuuaacuaugau

SEQ ID NO: 818749 - RNA, 19 nt, Homo sapiens
  misc_RNA (1)...(19): siRNA sense strand
uauuaaagcacucaugaag

SEQ ID NO: 818750 - RNA, 19 nt, Homo sapiens
  misc_RNA (1)...(19): siRNA sense strand
gagagagagauguugacuu

SEQ ID NO: 818751 - RNA, 19 nt, Homo sapiens
  misc_RNA (1)...(19): siRNA sense strand
ccaagacacaucagggaau

SEQ ID NO: 818752 - RNA, 19 nt, Homo sapiens
  misc_RNA (1)...(19): siRNA sense strand
caaggagacagguggaauc

SEQ ID NO: 818753 - RNA, 19 nt, Homo sapiens
  misc_RNA (1)...(19): siRNA sense strand
cgacuuggauggagaaauu

SEQ ID NO: 818754 - RNA, 19 nt, Homo sapiens
  misc_RNA (1)...(19): siRNA sense strand
ggaaauacaguaccugaaa

SEQ ID NO: 818755 - RNA, 19 nt, Homo sapiens
  misc_RNA (1)...(19): siRNA sense strand
gaggagagcgccaugagua

SEQ ID NO: 818756 - RNA, 19 nt, Homo sapiens
  misc_RNA (1)...(19): siRNA sense strand
acaaagacaucuacacaga

SEQ ID NO: 818757 - RNA, 19 nt, Homo sapiens
  misc_RNA (1)...(19): siRNA sense strand
aagaaaggcuggcugacua

SEQ ID NO: 818758 - RNA, 19 nt, Homo sapiens
  misc_RNA (1)...(19): siRNA sense strand
gaucaaagccugagauacu

SEQ ID NO: 818759 - RNA, 19 nt, Homo sapiens
  misc_RNA (1)...(19): siRNA sense strand
cgacgguucuucauccuuu

SEQ ID NO: 818760 - RNA, 19 nt, Homo sapiens
  misc_RNA (1)...(19): siRNA sense strand
gaagaaacgcaccagaaga

SEQ ID NO: 818761 - RNA, 19 nt, Homo sapiens
  misc_RNA (1)...(19): siRNA sense strand
gguugaagcucuuugaauc

SEQ ID NO: 818762 - RNA, 19 nt, Homo sapiens
  misc_RNA (1)...(19): siRNA sense strand
aagcaacccugacuucuug

SEQ ID NO: 818763 - RNA, 19 nt, Homo sapiens
  misc_RNA (1)...(19): siRNA sense strand
caaggaugccuaugaacua

SEQ ID NO: 818764 - RNA, 19 nt, Homo sapiens
  misc_RNA (1)...(19): siRNA sense strand
gaaauacaguaccugaaac

SEQ ID NO: 818765 - RNA, 19 nt, Homo sapiens
  misc_RNA (1)...(19): siRNA sense strand
gguaaaggaaucggaaaua

SEQ ID NO: 818766 - RNA, 19 nt, Homo sapiens
  misc_RNA (1)...(19): siRNA sense strand
guuacgaugucacagagua

SEQ ID NO: 818767 - RNA, 19 nt, Homo sapiens
  misc_RNA (1)...(19): siRNA sense strand
ccagggacuugaagaaaga

SEQ ID NO: 818768 - RNA, 19 nt, Homo sapiens
  misc_RNA (1)...(19): siRNA sense strand
guacaaagacaucuacaca

SEQ ID NO: 818769 - RNA, 19 nt, Homo sapiens
  misc_RNA (1)...(19): siRNA sense strand
guaaaggaaucggaaauac

SEQ ID NO: 818770 - RNA, 19 nt, Homo sapiens
  misc_RNA (1)...(19): siRNA sense strand
gagcaguacucgcagaagu

SEQ ID NO: 818771 - RNA, 19 nt, Homo sapiens
  misc_RNA (1)...(19): siRNA sense strand
ccaacaagcagaaucagaa

SEQ ID NO: 818772 - RNA, 19 nt, Homo sapiens
  misc_RNA (1)...(19): siRNA sense strand
gagaacccgugcaggaaau

SEQ ID NO: 818773 - RNA, 19 nt, Homo sapiens
  misc_RNA (1)...(19): siRNA sense strand
gaaacgcaccagaagaaga

SEQ ID NO: 818774 - RNA, 19 nt, Homo sapiens
  misc_RNA (1)...(19): siRNA sense strand
ggaagaaacgcaccagaag

SEQ ID NO: 818775 - RNA, 19 nt, Homo sapiens
  misc_RNA (1)...(19): siRNA sense strand
aaacuauggcuuccagaua

SEQ ID NO: 818776 - RNA, 19 nt, Homo sapiens
  misc_RNA (1)...(19): siRNA sense strand
cgcccgaccugcugaauuu

SEQ ID NO: 818777 - RNA, 19 nt, Homo sapiens
  misc_RNA (1)...(19): siRNA sense strand
gaaguucucccuguguauu

SEQ ID NO: 818778 - RNA, 19 nt, Homo sapiens
  misc_RNA (1)...(19): siRNA sense strand
caagugacaaguacaaaga

SEQ ID NO: 818779 - RNA, 19 nt, Homo sapiens
  misc_RNA (1)...(19): siRNA sense strand
ggacuugaaggcugaagaa

SEQ ID NO: 818780 - RNA, 19 nt, Homo sapiens
  misc_RNA (1)...(19): siRNA sense strand
ggagaacccgugcaggaaa

SEQ ID NO: 818781 - RNA, 19 nt, Homo sapiens
  misc_RNA (1)...(19): siRNA sense strand
ugaacuagaggucuuauug

SEQ ID NO: 818782 - RNA, 19 nt, Homo sapiens
  misc_RNA (1)...(19): siRNA sense strand
ggaccaacaagcagaauca

SEQ ID NO: 818783 - RNA, 19 nt, Homo sapiens
  misc_RNA (1)...(19): siRNA sense strand
gcaagugucagaacugcuu

SEQ ID NO: 818784 - RNA, 19 nt, Homo sapiens
  misc_RNA (1)...(19): siRNA sense strand
ggaggucccaggugauuga

SEQ ID NO: 818785 - RNA, 19 nt, Homo sapiens
  misc_RNA (1)...(19): siRNA sense strand
gcaccggucucggaaaugg

SEQ ID NO: 818786 - RNA, 19 nt, Homo sapiens
  misc_RNA (1)...(19): siRNA sense strand
gaaauuccaggccaacauc

SEQ ID NO: 818787 - RNA, 19 nt, Homo sapiens
  misc_RNA (1)...(19): siRNA sense strand
gacaagaaguacgcaagug

SEQ ID NO: 818788 - RNA, 19 nt, Homo sapiens
  misc_RNA (1)...(19): siRNA sense strand
gaaacuauggcuuccagau

SEQ ID NO: 818789 - RNA, 19 nt, Homo sapiens
  misc_RNA (1)...(19): siRNA sense strand
ggaggcagccgacuuggau

SEQ ID NO: 818790 - RNA, 19 nt, Homo sapiens
  misc_RNA (1)...(19): siRNA sense strand
ggauggagaaauugacuug

SEQ ID NO: 818791 - RNA, 19 nt, Homo sapiens
  misc_RNA (1)...(19): siRNA sense strand
agagaaagaccgccuccua

SEQ ID NO: 818792 - RNA, 19 nt, Homo sapiens
  misc_RNA (1)...(19): siRNA sense strand
ccacaccucuccgggaaga

SEQ ID NO: 818793 - RNA, 19 nt, Homo sapiens
  misc_RNA (1)...(19): siRNA sense strand
gugccacgguguccggaua

SEQ ID NO: 818794 - RNA, 19 nt, Homo sapiens
  misc_RNA (1)...(19): siRNA sense strand
gaaguacgcaagugacaag

SEQ ID NO: 818795 - RNA, 19 nt, Homo sapiens
  misc_RNA (1)...(19): siRNA sense strand
gcaaggaugccuaugaacu

SEQ ID NO: 818796 - RNA, 19 nt, Homo sapiens
  misc_RNA (1)...(19): siRNA sense strand
aagaaacgcaccagaagaa

SEQ ID NO: 818797 - RNA, 19 nt, Homo sapiens
  misc_RNA (1)...(19): siRNA sense strand
gacgguucuucauccuuua

SEQ ID NO: 818798 - RNA, 19 nt, Homo sapiens
  misc_RNA (1)...(19): siRNA sense strand
ucagaaacaucagguccaa

SEQ ID NO: 818799 - RNA, 19 nt, Homo sapiens
  misc_RNA (1)...(19): siRNA sense strand
ggacaagaaguacgcaagu

SEQ ID NO: 818800 - RNA, 19 nt, Homo sapiens
  misc_RNA (1)...(19): siRNA sense strand
caaaggagggcgaguuuac

SEQ ID NO: 818801 - RNA, 19 nt, Homo sapiens
  misc_RNA (1)...(19): siRNA sense strand
aagcgggacuucaccaaug

SEQ ID NO: 818802 - RNA, 19 nt, Homo sapiens
  misc_RNA (1)...(19): siRNA sense strand
agaagugccuggagaaugc

SEQ ID NO: 818803 - RNA, 19 nt, Homo sapiens
  misc_RNA (1)...(19): siRNA sense strand
gaagaagaaacggaaagug

SEQ ID NO: 818804 - RNA, 19 nt, Homo sapiens
  misc_RNA (1)...(19): siRNA sense strand
cagaugggaccgacuuuga

SEQ ID NO: 818805 - RNA, 19 nt, Homo sapiens
  misc_RNA (1)...(19): siRNA sense strand
gaagaggagagcgccauga

SEQ ID NO: 818806 - RNA, 19 nt, Homo sapiens
  misc_RNA (1)...(19): siRNA sense strand
uuagcucccucaaggauga

SEQ ID NO: 818807 - RNA, 19 nt, Homo sapiens
  misc_RNA (1)...(19): siRNA sense strand
uaaaggaaucggaaauaca

SEQ ID NO: 818808 - RNA, 19 nt, Homo sapiens
  misc_RNA (1)...(19): siRNA sense strand
gaggucuuauugcggguaa

SEQ ID NO: 818809 - RNA, 19 nt, Homo sapiens
  misc_RNA (1)...(19): siRNA sense strand
gugcaccggucucggaaau

SEQ ID NO: 818810 - RNA, 19 nt, Homo sapiens
  misc_RNA (1)...(19): siRNA sense strand
gcuacgcccuggaugagau

SEQ ID NO: 818811 - RNA, 19 nt, Homo sapiens
  misc_RNA (1)...(19): siRNA sense strand
agaaacaucagguccaaga

SEQ ID NO: 818812 - RNA, 19 nt, Homo sapiens
  misc_RNA (1)...(19): siRNA sense strand
gaacuagaggucuuauugc

SEQ ID NO: 818813 - RNA, 19 nt, Homo sapiens
  misc_RNA (1)...(19): siRNA sense strand
ccuaugaacuagaggucuu

SEQ ID NO: 818814 - RNA, 19 nt, Homo sapiens
  misc_RNA (1)...(19): siRNA sense strand
cacacgagcugaccucucu

SEQ ID NO: 818815 - RNA, 19 nt, Homo sapiens
  misc_RNA (1)...(19): siRNA sense strand
acaagcagaaucagaagaa

SEQ ID NO: 818816 - RNA, 19 nt, Homo sapiens
  misc_RNA (1)...(19): siRNA sense strand
gcaagugacaaguacaaag

SEQ ID NO: 818817 - RNA, 19 nt, Homo sapiens
  misc_RNA (1)...(19): siRNA sense strand
gcuuccagauacauacaaa

SEQ ID NO: 818818 - RNA, 19 nt, Homo sapiens
  misc_RNA (1)...(19): siRNA sense strand
cagagcacauggagaccaa

SEQ ID NO: 818819 - RNA, 19 nt, Homo sapiens
  misc_RNA (1)...(19): siRNA sense strand
uggagaugcucauggucua

SEQ ID NO: 818820 - RNA, 19 nt, Homo sapiens
  misc_RNA (1)...(19): siRNA sense strand
acaagaaguacgcaaguga

SEQ ID NO: 818821 - RNA, 19 nt, Homo sapiens
  misc_RNA (1)...(19): siRNA sense strand
gcccgaggccuacugagaa

SEQ ID NO: 818822 - RNA, 19 nt, Homo sapiens
  misc_RNA (1)...(19): siRNA sense strand
gccaugacaucugggauuc

SEQ ID NO: 818823 - RNA, 19 nt, Homo sapiens
  misc_RNA (1)...(19): siRNA sense strand
gggcggagaccaaggagau

SEQ ID NO: 818824 - RNA, 19 nt, Homo sapiens
  misc_RNA (1)...(19): siRNA sense strand
ggacuugaagaaagacuag

SEQ ID NO: 818825 - RNA, 19 nt, Homo sapiens
  misc_RNA (1)...(19): siRNA sense strand
ucacagaguauccaguuca

SEQ ID NO: 818826 - RNA, 19 nt, Homo sapiens
  misc_RNA (1)...(19): siRNA sense strand
gaggacggccaguggaaga

SEQ ID NO: 818827 - RNA, 19 nt, Homo sapiens
  misc_RNA (1)...(19): siRNA sense strand
gaagaccaaacaggacuug

SEQ ID NO: 818828 - RNA, 19 nt, Homo sapiens
  misc_RNA (1)...(19): siRNA sense strand
cauggacuguggccgcaaa

SEQ ID NO: 818829 - RNA, 19 nt, Homo sapiens
  misc_RNA (1)...(19): siRNA sense strand
gguccaagagucugaagga

SEQ ID NO: 818830 - RNA, 19 nt, Homo sapiens
  misc_RNA (1)...(19): siRNA sense strand
gauuagcucccucaaggau

SEQ ID NO: 818831 - RNA, 19 nt, Homo sapiens
  misc_RNA (1)...(19): siRNA sense strand
ggaugccuaugaacuagag

SEQ ID NO: 818832 - RNA, 19 nt, Homo sapiens
  misc_RNA (1)...(19): siRNA sense strand
ucaacaagagcaaguguca

SEQ ID NO: 818833 - RNA, 19 nt, Homo sapiens
  misc_RNA (1)...(19): siRNA sense strand
aaacgcaccagaagaagau

SEQ ID NO: 818834 - RNA, 19 nt, Homo sapiens
  misc_RNA (1)...(19): siRNA sense strand
ggauccagaccaucaugaa

SEQ ID NO: 818835 - RNA, 19 nt, Homo sapiens
  misc_RNA (1)...(19): siRNA sense strand
gcacauggagaccaaugca

SEQ ID NO: 818836 - RNA, 19 nt, Homo sapiens
  misc_RNA (1)...(19): siRNA sense strand
gaccaaacaggacuugaag

SEQ ID NO: 818837 - RNA, 19 nt, Homo sapiens
  misc_RNA (1)...(19): siRNA sense strand
uacaaaggagggcgaguuu

SEQ ID NO: 818838 - RNA, 19 nt, Homo sapiens
  misc_RNA (1)...(19): siRNA sense strand
ggacggccaguggaagaaa

SEQ ID NO: 818839 - RNA, 19 nt, Homo sapiens
  misc_RNA (1)...(19): siRNA sense strand
gcagaagugccuggagaau

SEQ ID NO: 818840 - RNA, 19 nt, Homo sapiens
  misc_RNA (1)...(19): siRNA sense strand
uggaagaaacgcaccagaa

SEQ ID NO: 818841 - RNA, 19 nt, Homo sapiens
  misc_RNA (1)...(19): siRNA sense strand
ggccaugacaucugggauu

SEQ ID NO: 818842 - RNA, 19 nt, Homo sapiens
  misc_RNA (1)...(19): siRNA sense strand
ugaggaggcagccgacuug

SEQ ID NO: 818843 - RNA, 19 nt, Homo sapiens
  misc_RNA (1)...(19): siRNA sense strand
cuugaaggcugaagaacag

SEQ ID NO: 818844 - RNA, 19 nt, Homo sapiens
  misc_RNA (1)...(19): siRNA sense strand
aaagcaacccugacuucuu

SEQ ID NO: 818845 - RNA, 19 nt, Homo sapiens
  misc_RNA (1)...(19): siRNA sense strand
aggcuaaggcugacuguga

SEQ ID NO: 818846 - RNA, 19 nt, Homo sapiens
  misc_RNA (1)...(19): siRNA sense strand
ggagcucaaugcccacaac

SEQ ID NO: 818847 - RNA, 19 nt, Homo sapiens
  misc_RNA (1)...(19): siRNA sense strand
ggucccaggugauugaaaa

SEQ ID NO: 818848 - RNA, 19 nt, Homo sapiens
  misc_RNA (1)...(19): siRNA sense strand
gaacgguugaagcucuuug

SEQ ID NO: 818849 - RNA, 19 nt, Homo sapiens
  misc_RNA (1)...(19): siRNA sense strand
gcuagagaaacuucgagaa

SEQ ID NO: 818850 - RNA, 19 nt, Homo sapiens
  misc_RNA (1)...(19): siRNA sense strand
cgccugagaaggagcauuu

SEQ ID NO: 818851 - RNA, 19 nt, Homo sapiens
  misc_RNA (1)...(19): siRNA sense strand
agaaaggcuggcugacuaa

SEQ ID NO: 818852 - RNA, 19 nt, Homo sapiens
  misc_RNA (1)...(19): siRNA sense strand
gagcacauggagaccaaug

SEQ ID NO: 818853 - RNA, 19 nt, Homo sapiens
  misc_RNA (1)...(19): siRNA sense strand
gaacaaggcugcugcaaag

SEQ ID NO: 818854 - RNA, 19 nt, Homo sapiens
  misc_RNA (1)...(19): siRNA sense strand
gcauauaccucaaugacuu

SEQ ID NO: 818855 - RNA, 19 nt, Homo sapiens
  misc_RNA (1)...(19): siRNA sense strand
ucaagucgcugccugcaua

SEQ ID NO: 818856 - RNA, 19 nt, Homo sapiens
  misc_RNA (1)...(19): siRNA sense strand
gaaauuaacagcugucuca

SEQ ID NO: 818857 - RNA, 19 nt, Homo sapiens
  misc_RNA (1)...(19): siRNA sense strand
caaaggcugugaugugaaa

SEQ ID NO: 818858 - RNA, 19 nt, Homo sapiens
  misc_RNA (1)...(19): siRNA sense strand
gcaauggcaucuucuguuc

SEQ ID NO: 818859 - RNA, 19 nt, Homo sapiens
  misc_RNA (1)...(19): siRNA sense strand
augaugagcucacguauaa

SEQ ID NO: 818860 - RNA, 19 nt, Homo sapiens
  misc_RNA (1)...(19): siRNA sense strand
ggaagcaaguggugcagaa

SEQ ID NO: 818861 - RNA, 19 nt, Homo sapiens
  misc_RNA (1)...(19): siRNA sense strand
ggagaucaccgucaccuuu

SEQ ID NO: 818862 - RNA, 19 nt, Homo sapiens
  misc_RNA (1)...(19): siRNA sense strand
cuacaaggccaacaacaua

SEQ ID NO: 818863 - RNA, 19 nt, Homo sapiens
  misc_RNA (1)...(19): siRNA sense strand
ggacugccgcuacgaagua

SEQ ID NO: 818864 - RNA, 19 nt, Homo sapiens
  misc_RNA (1)...(19): siRNA sense strand
ggugauggcuucagcuguu

SEQ ID NO: 818865 - RNA, 19 nt, Homo sapiens
  misc_RNA (1)...(19): siRNA sense strand
gagaucaccgucaccuuua

SEQ ID NO: 818866 - RNA, 19 nt, Homo sapiens
  misc_RNA (1)...(19): siRNA sense strand
gggauaagcaugccucauu

SEQ ID NO: 818867 - RNA, 19 nt, Homo sapiens
  misc_RNA (1)...(19): siRNA sense strand
ggauaagcaugccucauuc

SEQ ID NO: 818868 - RNA, 19 nt, Homo sapiens
  misc_RNA (1)...(19): siRNA sense strand
ggauguggcugaccuccuu

SEQ ID NO: 818869 - RNA, 19 nt, Homo sapiens
  misc_RNA (1)...(19): siRNA sense strand
gacggaagcugugucugua

SEQ ID NO: 818870 - RNA, 19 nt, Homo sapiens
  misc_RNA (1)...(19): siRNA sense strand
ggaacaaggcugcugcaaa

SEQ ID NO: 818871 - RNA, 19 nt, Homo sapiens
  misc_RNA (1)...(19): siRNA sense strand
ggaccaccgugacaagcua

SEQ ID NO: 818872 - RNA, 19 nt, Homo sapiens
  misc_RNA (1)...(19): siRNA sense strand
ggacagauccucgccucua

SEQ ID NO: 818873 - RNA, 19 nt, Homo sapiens
  misc_RNA (1)...(19): siRNA sense strand
gaggaggacuucccugaca

SEQ ID NO: 818874 - RNA, 19 nt, Homo sapiens
  misc_RNA (1)...(19): siRNA sense strand
gggcugcucuuacacaugu

SEQ ID NO: 818875 - RNA, 19 nt, Homo sapiens
  misc_RNA (1)...(19): siRNA sense strand
aaacaagcauggagagcaa

SEQ ID NO: 818876 - RNA, 19 nt, Homo sapiens
  misc_RNA (1)...(19): siRNA sense strand
guaccugccugcccgacua

SEQ ID NO: 818877 - RNA, 19 nt, Homo sapiens
  misc_RNA (1)...(19): siRNA sense strand
gcugcacucuuugggauua

SEQ ID NO: 818878 - RNA, 19 nt, Homo sapiens
  misc_RNA (1)...(19): siRNA sense strand
gagcugugccaggaaauua

SEQ ID NO: 818879 - RNA, 19 nt, Homo sapiens
  misc_RNA (1)...(19): siRNA sense strand
cagcaacucuacuuugugu

SEQ ID NO: 818880 - RNA, 19 nt, Homo sapiens
  misc_RNA (1)...(19): siRNA sense strand
gaugaugagcucacguaua

SEQ ID NO: 818881 - RNA, 19 nt, Homo sapiens
  misc_RNA (1)...(19): siRNA sense strand
gaugagcucacguauaaga

SEQ ID NO: 818882 - RNA, 19 nt, Homo sapiens
  misc_RNA (1)...(19): siRNA sense strand
ggacggaagcugugucugu

SEQ ID NO: 818883 - RNA, 19 nt, Homo sapiens
  misc_RNA (1)...(19): siRNA sense strand
gagccguccuugcuucauu

SEQ ID NO: 818884 - RNA, 19 nt, Homo sapiens
  misc_RNA (1)...(19): siRNA sense strand
cagcagacguucaacaucu

SEQ ID NO: 818885 - RNA, 19 nt, Homo sapiens
  misc_RNA (1)...(19): siRNA sense strand
gugguuagccguaucauug

SEQ ID NO: 818886 - RNA, 19 nt, Homo sapiens
  misc_RNA (1)...(19): siRNA sense strand
caacuucuccaccuucuau

SEQ ID NO: 818887 - RNA, 19 nt, Homo sapiens
  misc_RNA (1)...(19): siRNA sense strand
gggcuucgguuacaagauc

SEQ ID NO: 818888 - RNA, 19 nt, Homo sapiens
  misc_RNA (1)...(19): siRNA sense strand
gguccuggcugugaacauu

SEQ ID NO: 818889 - RNA, 19 nt, Homo sapiens
  misc_RNA (1)...(19): siRNA sense strand
caaggcugcugcaaagguu

SEQ ID NO: 818890 - RNA, 19 nt, Homo sapiens
  misc_RNA (1)...(19): siRNA sense strand
ucacagcgggucucucuaa

SEQ ID NO: 818891 - RNA, 19 nt, Homo sapiens
  misc_RNA (1)...(19): siRNA sense strand
caaaggcaauugcagugau

SEQ ID NO: 818892 - RNA, 19 nt, Homo sapiens
  misc_RNA (1)...(19): siRNA sense strand
caaggagugugucuacauc

SEQ ID NO: 818893 - RNA, 19 nt, Homo sapiens
  misc_RNA (1)...(19): siRNA sense strand
uaggaacaauggucacuug

SEQ ID NO: 818894 - RNA, 19 nt, Homo sapiens
  misc_RNA (1)...(19): siRNA sense strand
gcagaaggccacacagaca

SEQ ID NO: 818895 - RNA, 19 nt, Homo sapiens
  misc_RNA (1)...(19): siRNA sense strand
ggagcucccggaucagaua

SEQ ID NO: 818896 - RNA, 19 nt, Homo sapiens
  misc_RNA (1)...(19): siRNA sense strand
cugcugcccugguuucuuu

SEQ ID NO: 818897 - RNA, 19 nt, Homo sapiens
  misc_RNA (1)...(19): siRNA sense strand
caacugcaccggagugugu

SEQ ID NO: 818898 - RNA, 19 nt, Homo sapiens
  misc_RNA (1)...(19): siRNA sense strand
aagcaugccucauucuuca

SEQ ID NO: 818899 - RNA, 19 nt, Homo sapiens
  misc_RNA (1)...(19): siRNA sense strand
gugugaagcuggacaucuu

SEQ ID NO: 818900 - RNA, 19 nt, Homo sapiens
  misc_RNA (1)...(19): siRNA sense strand
gcgauggacugcagugucu

SEQ ID NO: 818901 - RNA, 19 nt, Homo sapiens
  misc_RNA (1)...(19): siRNA sense strand
gcagcugccgugaggguua

SEQ ID NO: 818902 - RNA, 19 nt, Homo sapiens
  misc_RNA (1)...(19): siRNA sense strand
gagauucgcaacauuagug

SEQ ID NO: 818903 - RNA, 19 nt, Homo sapiens
  misc_RNA (1)...(19): siRNA sense strand
gggaagaccagcugugugu

SEQ ID NO: 818904 - RNA, 19 nt, Homo sapiens
  misc_RNA (1)...(19): siRNA sense strand
agaugucgcugucuugaug

SEQ ID NO: 818905 - RNA, 19 nt, Homo sapiens
  misc_RNA (1)...(19): siRNA sense strand
cugcaugcccgcuguguua

SEQ ID NO: 818906 - RNA, 19 nt, Homo sapiens
  misc_RNA (1)...(19): siRNA sense strand
gcgaggagcagcacaagau

SEQ ID NO: 818907 - RNA, 19 nt, Homo sapiens
  misc_RNA (1)...(19): siRNA sense strand
gcgaugggauggugugucu

SEQ ID NO: 818908 - RNA, 19 nt, Homo sapiens
  misc_RNA (1)...(19): siRNA sense strand
cauaggcccuucacaaugc

SEQ ID NO: 818909 - RNA, 19 nt, Homo sapiens
  misc_RNA (1)...(19): siRNA sense strand
ccacugcacaugccacaaa

SEQ ID NO: 818910 - RNA, 19 nt, Homo sapiens
  misc_RNA (1)...(19): siRNA sense strand
gugauggcuucagcuguua

SEQ ID NO: 818911 - RNA, 19 nt, Homo sapiens
  misc_RNA (1)...(19): siRNA sense strand
guucaaaggcugugaugug

SEQ ID NO: 818912 - RNA, 19 nt, Homo sapiens
  misc_RNA (1)...(19): siRNA sense strand
gcaacucuacuuugugugu

SEQ ID NO: 818913 - RNA, 19 nt, Homo sapiens
  misc_RNA (1)...(19): siRNA sense strand
gugcauggccgcugugaug

SEQ ID NO: 818914 - RNA, 19 nt, Homo sapiens
  misc_RNA (1)...(19): siRNA sense strand
gaacaccugcagcaucugu

SEQ ID NO: 818915 - RNA, 19 nt, Homo sapiens
  misc_RNA (1)...(19): siRNA sense strand
cguggaggcugcucagaga

SEQ ID NO: 818916 - RNA, 19 nt, Homo sapiens
  misc_RNA (1)...(19): siRNA sense strand
ggaggguguugccagaugu

SEQ ID NO: 818917 - RNA, 19 nt, Homo sapiens
  misc_RNA (1)...(19): siRNA sense strand
ccacguuugucacucaugu

SEQ ID NO: 818918 - RNA, 19 nt, Homo sapiens
  misc_RNA (1)...(19): siRNA sense strand
acgcagaucuaaugagcaa

SEQ ID NO: 818919 - RNA, 19 nt, Homo sapiens
  misc_RNA (1)...(19): siRNA sense strand
caaggacgcugccgaaccu

SEQ ID NO: 818920 - RNA, 19 nt, Homo sapiens
  misc_RNA (1)...(19): siRNA sense strand
ggaggcugcucagagaaug

SEQ ID NO: 818921 - RNA, 19 nt, Homo sapiens
  misc_RNA (1)...(19): siRNA sense strand
cagcgggucucucuaaacu

SEQ ID NO: 818922 - RNA, 19 nt, Homo sapiens
  misc_RNA (1)...(19): siRNA sense strand
ugggagauucgcaacauua

SEQ ID NO: 818923 - RNA, 19 nt, Homo sapiens
  misc_RNA (1)...(19): siRNA sense strand
cgagagggagggcagcaua

SEQ ID NO: 818924 - RNA, 19 nt, Homo sapiens
  misc_RNA (1)...(19): siRNA sense strand
ggacacaaggacccaacaa

SEQ ID NO: 818925 - RNA, 19 nt, Homo sapiens
  misc_RNA (1)...(19): siRNA sense strand
ggacaucauggccuucaau

SEQ ID NO: 818926 - RNA, 19 nt, Homo sapiens
  misc_RNA (1)...(19): siRNA sense strand
gggaucagcacgugcaaug

SEQ ID NO: 818927 - RNA, 19 nt, Homo sapiens
  misc_RNA (1)...(19): siRNA sense strand
uuacacaugugccaagaag

SEQ ID NO: 818928 - RNA, 19 nt, Homo sapiens
  misc_RNA (1)...(19): siRNA sense strand
ggaagugccggaagcaagu

SEQ ID NO: 818929 - RNA, 19 nt, Homo sapiens
  misc_RNA (1)...(19): siRNA sense strand
gacacaaggacccaacaaa

SEQ ID NO: 818930 - RNA, 19 nt, Homo sapiens
  misc_RNA (1)...(19): siRNA sense strand
cuucgucccugucaaugaa

SEQ ID NO: 818931 - RNA, 19 nt, Homo sapiens
  misc_RNA (1)...(19): siRNA sense strand
gcagaggguagacgugaug

SEQ ID NO: 818932 - RNA, 19 nt, Homo sapiens
  misc_RNA (1)...(19): siRNA sense strand
ggccucagccucaucauca

SEQ ID NO: 818933 - RNA, 19 nt, Homo sapiens
  misc_RNA (1)...(19): siRNA sense strand
cagaugccaugugcacuga

SEQ ID NO: 818934 - RNA, 19 nt, Homo sapiens
  misc_RNA (1)...(19): siRNA sense strand
aggccuggcuguaccauga

SEQ ID NO: 818935 - RNA, 19 nt, Homo sapiens
  misc_RNA (1)...(19): siRNA sense strand
aaaggcaauugcagugaug

SEQ ID NO: 818936 - RNA, 19 nt, Homo sapiens
  misc_RNA (1)...(19): siRNA sense strand
ccaaggacccaugcacuga

SEQ ID NO: 818937 - RNA, 19 nt, Homo sapiens
  misc_RNA (1)...(19): siRNA sense strand
caacgccacccuccuaagu

SEQ ID NO: 818938 - RNA, 19 nt, Homo sapiens
  misc_RNA (1)...(19): siRNA sense strand
gcacugaccagcacuucca

SEQ ID NO: 818939 - RNA, 19 nt, Homo sapiens
  misc_RNA (1)...(19): siRNA sense strand
gcacugggagccugaugau

SEQ ID NO: 818940 - RNA, 19 nt, Homo sapiens
  misc_RNA (1)...(19): siRNA sense strand
ggaggaugcagcccauaug

SEQ ID NO: 818941 - RNA, 19 nt, Homo sapiens
  misc_RNA (1)...(19): siRNA sense strand
ggcaauggcaucuucuguu

SEQ ID NO: 818942 - RNA, 19 nt, Homo sapiens
  misc_RNA (1)...(19): siRNA sense strand
ggacugcugcccugguuuc

SEQ ID NO: 818943 - RNA, 19 nt, Homo sapiens
  misc_RNA (1)...(19): siRNA sense strand
gcugggagauucgcaacau

SEQ ID NO: 818944 - RNA, 19 nt, Homo sapiens
  misc_RNA (1)...(19): siRNA sense strand
ggaaguggccacccugaac

SEQ ID NO: 818945 - RNA, 19 nt, Homo sapiens
  misc_RNA (1)...(19): siRNA sense strand
gaggagcagcacaagauug

SEQ ID NO: 818946 - RNA, 19 nt, Homo sapiens
  misc_RNA (1)...(19): siRNA sense strand
ggcucaaugugcuaaagaa

SEQ ID NO: 818947 - RNA, 19 nt, Homo sapiens
  misc_RNA (1)...(19): siRNA sense strand
cugcugcccuggucacuau

SEQ ID NO: 818948 - RNA, 19 nt, Homo sapiens
  misc_RNA (1)...(19): siRNA sense strand
caucugaccugcccaaccu

SEQ ID NO: 818949 - RNA, 19 nt, Homo sapiens
  misc_RNA (1)...(19): siRNA sense strand
ccauaggcccuucacaaug

SEQ ID NO: 818950 - RNA, 19 nt, Homo sapiens
  misc_RNA (1)...(19): siRNA sense strand
ggcaggugcuguucaaagg

SEQ ID NO: 818951 - RNA, 19 nt, Homo sapiens
  misc_RNA (1)...(19): siRNA sense strand
uucaaaggcugugauguga

SEQ ID NO: 818952 - RNA, 19 nt, Homo sapiens
  misc_RNA (1)...(19): siRNA sense strand
uccgggagcuggaggcaaa

SEQ ID NO: 818953 - RNA, 19 nt, Homo sapiens
  misc_RNA (1)...(19): siRNA sense strand
gaacauauccgcuaucagu

SEQ ID NO: 818954 - RNA, 19 nt, Homo sapiens
  misc_RNA (1)...(19): siRNA sense strand
gaaagugaguuuaugaagu

SEQ ID NO: 818955 - RNA, 19 nt, Homo sapiens
  misc_RNA (1)...(19): siRNA sense strand
gaagagaucccucccaaau

SEQ ID NO: 818956 - RNA, 19 nt, Homo sapiens
  misc_RNA (1)...(19): siRNA sense strand
gagcaagggucaaggcaaa

SEQ ID NO: 818957 - RNA, 19 nt, Homo sapiens
  misc_RNA (1)...(19): siRNA sense strand
ggagaucucugaacuugga

SEQ ID NO: 818958 - RNA, 19 nt, Homo sapiens
  misc_RNA (1)...(19): siRNA sense strand
gaagaucuguucaaaguac

SEQ ID NO: 818959 - RNA, 19 nt, Homo sapiens
  misc_RNA (1)...(19): siRNA sense strand
gaugacaaauccagugaaa

SEQ ID NO: 818960 - RNA, 19 nt, Homo sapiens
  misc_RNA (1)...(19): siRNA sense strand
gaacuuggaagacuacaaa

SEQ ID NO: 818961 - RNA, 19 nt, Homo sapiens
  misc_RNA (1)...(19): siRNA sense strand
ccagugaggucuacucuga

SEQ ID NO: 818962 - RNA, 19 nt, Homo sapiens
  misc_RNA (1)...(19): siRNA sense strand
gaagaaacaggccaacaaa

SEQ ID NO: 818963 - RNA, 19 nt, Homo sapiens
  misc_RNA (1)...(19): siRNA sense strand
gaagaagacucagcuacug

SEQ ID NO: 818964 - RNA, 19 nt, Homo sapiens
  misc_RNA (1)...(19): siRNA sense strand
ccaaacaaauccaagauca

SEQ ID NO: 818965 - RNA, 19 nt, Homo sapiens
  misc_RNA (1)...(19): siRNA sense strand
ggacaaggccaaacaaauc

SEQ ID NO: 818966 - RNA, 19 nt, Homo sapiens
  misc_RNA (1)...(19): siRNA sense strand
ggucuacucugaugaugaa

SEQ ID NO: 818967 - RNA, 19 nt, Homo sapiens
  misc_RNA (1)...(19): siRNA sense strand
ccagugaccucucagaaga

SEQ ID NO: 818968 - RNA, 19 nt, Homo sapiens
  misc_RNA (1)...(19): siRNA sense strand
caacagauggaucccuuua

SEQ ID NO: 818969 - RNA, 19 nt, Homo sapiens
  misc_RNA (1)...(19): siRNA sense strand
gaugaagaguuccaugaug

SEQ ID NO: 818970 - RNA, 19 nt, Homo sapiens
  misc_RNA (1)...(19): siRNA sense strand
ggaggaagaggaugacaaa

SEQ ID NO: 818971 - RNA, 19 nt, Homo sapiens
  misc_RNA (1)...(19): siRNA sense strand
aaagugaguuuaugaagug

SEQ ID NO: 818972 - RNA, 19 nt, Homo sapiens
  misc_RNA (1)...(19): siRNA sense strand
ucaagaaucucagguaaca

SEQ ID NO: 818973 - RNA, 19 nt, Homo sapiens
  misc_RNA (1)...(19): siRNA sense strand
ugaggaaggugaaguguca

SEQ ID NO: 818974 - RNA, 19 nt, Homo sapiens
  misc_RNA (1)...(19): siRNA sense strand
auacgguucuggaguguua

SEQ ID NO: 818975 - RNA, 19 nt, Homo sapiens
  misc_RNA (1)...(19): siRNA sense strand
ucagaccgcucaucacgaa

SEQ ID NO: 818976 - RNA, 19 nt, Homo sapiens
  misc_RNA (1)...(19): siRNA sense strand
gcaagaagaggagcaagaa

SEQ ID NO: 818977 - RNA, 19 nt, Homo sapiens
  misc_RNA (1)...(19): siRNA sense strand
ccaaggagaucucugaacu

SEQ ID NO: 818978 - RNA, 19 nt, Homo sapiens
  misc_RNA (1)...(19): siRNA sense strand
ccaagaacauauccgcuau

SEQ ID NO: 818979 - RNA, 19 nt, Homo sapiens
  misc_RNA (1)...(19): siRNA sense strand
aaacgacgagggcuuauuu

SEQ ID NO: 818980 - RNA, 19 nt, Homo sapiens
  misc_RNA (1)...(19): siRNA sense strand
gaagagggagguguugaaa

SEQ ID NO: 818981 - RNA, 19 nt, Homo sapiens
  misc_RNA (1)...(19): siRNA sense strand
cuagaacgcuggugucaca

SEQ ID NO: 818982 - RNA, 19 nt, Homo sapiens
  misc_RNA (1)...(19): siRNA sense strand
caacuacgcuaugaagaag

SEQ ID NO: 818983 - RNA, 19 nt, Homo sapiens
  misc_RNA (1)...(19): siRNA sense strand
uggaacagaugacagagaa

SEQ ID NO: 818984 - RNA, 19 nt, Homo sapiens
  misc_RNA (1)...(19): siRNA sense strand
uaacaucccacaacaagga

SEQ ID NO: 818985 - RNA, 19 nt, Homo sapiens
  misc_RNA (1)...(19): siRNA sense strand
caagcgggaugagaaacua

SEQ ID NO: 818986 - RNA, 19 nt, Homo sapiens
  misc_RNA (1)...(19): siRNA sense strand
gauuacggguguuguggaa

SEQ ID NO: 818987 - RNA, 19 nt, Homo sapiens
  misc_RNA (1)...(19): siRNA sense strand
cacaugcccuucuuugcua

SEQ ID NO: 818988 - RNA, 19 nt, Homo sapiens
  misc_RNA (1)...(19): siRNA sense strand
uuccuuaccugaagaauug

SEQ ID NO: 818989 - RNA, 19 nt, Homo sapiens
  misc_RNA (1)...(19): siRNA sense strand
aaggagaucucugaacuug

SEQ ID NO: 818990 - RNA, 19 nt, Homo sapiens
  misc_RNA (1)...(19): siRNA sense strand
ggaacauuguagagucuga

SEQ ID NO: 818991 - RNA, 19 nt, Homo sapiens
  misc_RNA (1)...(19): siRNA sense strand
agaaagaaagguucagaaa

SEQ ID NO: 818992 - RNA, 19 nt, Homo sapiens
  misc_RNA (1)...(19): siRNA sense strand
ggacauugaagagauugua

SEQ ID NO: 818993 - RNA, 19 nt, Homo sapiens
  misc_RNA (1)...(19): siRNA sense strand
aaacaaagggcugcaacua

SEQ ID NO: 818994 - RNA, 19 nt, Homo sapiens
  misc_RNA (1)...(19): siRNA sense strand
gaaaagcuccacccaacua

SEQ ID NO: 818995 - RNA, 19 nt, Homo sapiens
  misc_RNA (1)...(19): siRNA sense strand
gaacagaugacagagaaag

SEQ ID NO: 818996 - RNA, 19 nt, Homo sapiens
  misc_RNA (1)...(19): siRNA sense strand
gugcaagccuaccaucguu

SEQ ID NO: 818997 - RNA, 19 nt, Homo sapiens
  misc_RNA (1)...(19): siRNA sense strand
gaaagaaagguucagaaaa

SEQ ID NO: 818998 - RNA, 19 nt, Homo sapiens
  misc_RNA (1)...(19): siRNA sense strand
gagaaagaaagguucagaa

SEQ ID NO: 818999 - RNA, 19 nt, Homo sapiens
  misc_RNA (1)...(19): siRNA sense strand
gaaacuagacaagaaaucu

SEQ ID NO: 819000 - RNA, 19 nt, Homo sapiens
  misc_RNA (1)...(19): siRNA sense strand
gaaagagagagagcaagaa

SEQ ID NO: 819001 - RNA, 19 nt, Homo sapiens
  misc_RNA (1)...(19): siRNA sense strand
gaaaugagcaagggucaag

SEQ ID NO: 819002 - RNA, 19 nt, Homo sapiens
  misc_RNA (1)...(19): siRNA sense strand
aauccaagaucaacugaau

SEQ ID NO: 819003 - RNA, 19 nt, Homo sapiens
  misc_RNA (1)...(19): siRNA sense strand
ccaacuacgcuaugaagaa

SEQ ID NO: 819004 - RNA, 19 nt, Homo sapiens
  misc_RNA (1)...(19): siRNA sense strand
cguguuccguuuagaguuu

SEQ ID NO: 819005 - RNA, 19 nt, Homo sapiens
  misc_RNA (1)...(19): siRNA sense strand
gaugagaaacuagacaaga

SEQ ID NO: 819006 - RNA, 19 nt, Homo sapiens
  misc_RNA (1)...(19): siRNA sense strand
gcugaaagucacaacauga

SEQ ID NO: 819007 - RNA, 19 nt, Homo sapiens
  misc_RNA (1)...(19): siRNA sense strand
aaagaaagguucagaaaag

SEQ ID NO: 819008 - RNA, 19 nt, Homo sapiens
  misc_RNA (1)...(19): siRNA sense strand
guucgauuaucacggcaua

SEQ ID NO: 819009 - RNA, 19 nt, Homo sapiens
  misc_RNA (1)...(19): siRNA sense strand
acauauccgcuaucaguua

SEQ ID NO: 819010 - RNA, 19 nt, Homo sapiens
  misc_RNA (1)...(19): siRNA sense strand
ccacccaacuacgcuauga

SEQ ID NO: 819011 - RNA, 19 nt, Homo sapiens
  misc_RNA (1)...(19): siRNA sense strand
ucaggacauugaagagauu

SEQ ID NO: 819012 - RNA, 19 nt, Homo sapiens
  misc_RNA (1)...(19): siRNA sense strand
gguaacaucccacaacaag

SEQ ID NO: 819013 - RNA, 19 nt, Homo sapiens
  misc_RNA (1)...(19): siRNA sense strand
ugacagagaaagagagaga

SEQ ID NO: 819014 - RNA, 19 nt, Homo sapiens
  misc_RNA (1)...(19): siRNA sense strand
gaucaggacauugaagaga

SEQ ID NO: 819015 - RNA, 19 nt, Homo sapiens
  misc_RNA (1)...(19): siRNA sense strand
augagaaacuagacaagaa

SEQ ID NO: 819016 - RNA, 19 nt, Homo sapiens
  misc_RNA (1)...(19): siRNA sense strand
aaagacaguucagcugaga

SEQ ID NO: 819017 - RNA, 19 nt, Homo sapiens
  misc_RNA (1)...(19): siRNA sense strand
cagguaacaucccacaaca

SEQ ID NO: 819018 - RNA, 19 nt, Homo sapiens
  misc_RNA (1)...(19): siRNA sense strand
gaaccgggaguggaacauu

SEQ ID NO: 819019 - RNA, 19 nt, Homo sapiens
  misc_RNA (1)...(19): siRNA sense strand
ugaagaagaggagaaagaa

SEQ ID NO: 819020 - RNA, 19 nt, Homo sapiens
  misc_RNA (1)...(19): siRNA sense strand
aagaagaggagaaagaaga

SEQ ID NO: 819021 - RNA, 19 nt, Homo sapiens
  misc_RNA (1)...(19): siRNA sense strand
uggcccagcugaaugcaaa

SEQ ID NO: 819022 - RNA, 19 nt, Homo sapiens
  misc_RNA (1)...(19): siRNA sense strand
cucagaagaugaagaguuc

SEQ ID NO: 819023 - RNA, 19 nt, Homo sapiens
  misc_RNA (1)...(19): siRNA sense strand
ugagaaacuagacaagaaa

SEQ ID NO: 819024 - RNA, 19 nt, Homo sapiens
  misc_RNA (1)...(19): siRNA sense strand
gaaagucacaacaugaaaa

SEQ ID NO: 819025 - RNA, 19 nt, Homo sapiens
  misc_RNA (1)...(19): siRNA sense strand
aagaacauauccgcuauca

SEQ ID NO: 819026 - RNA, 19 nt, Homo sapiens
  misc_RNA (1)...(19): siRNA sense strand
caaacaaauccaagaucaa

SEQ ID NO: 819027 - RNA, 19 nt, Homo sapiens
  misc_RNA (1)...(19): siRNA sense strand
gcaguugcccacucuagau

SEQ ID NO: 819028 - RNA, 19 nt, Homo sapiens
  misc_RNA (1)...(19): siRNA sense strand
aaccaagaauucaccgaaa

SEQ ID NO: 819029 - RNA, 19 nt, Homo sapiens
  misc_RNA (1)...(19): siRNA sense strand
caagaagaggagcaagaaa

SEQ ID NO: 819030 - RNA, 19 nt, Homo sapiens
  misc_RNA (1)...(19): siRNA sense strand
gacauugaagagauuguaa

SEQ ID NO: 819031 - RNA, 19 nt, Homo sapiens
  misc_RNA (1)...(19): siRNA sense strand
gugaguuuaugaaguggaa

SEQ ID NO: 819032 - RNA, 19 nt, Homo sapiens
  misc_RNA (1)...(19): siRNA sense strand
agaaagagagagagcaaga

SEQ ID NO: 819033 - RNA, 19 nt, Homo sapiens
  misc_RNA (1)...(19): siRNA sense strand
gaugacagagaaagagaga

SEQ ID NO: 819034 - RNA, 19 nt, Homo sapiens
  misc_RNA (1)...(19): siRNA sense strand
ccaguuuccuuaccugaag

SEQ ID NO: 819035 - RNA, 19 nt, Homo sapiens
  misc_RNA (1)...(19): siRNA sense strand
gagaaacuagacaagaaau

SEQ ID NO: 819036 - RNA, 19 nt, Homo sapiens
  misc_RNA (1)...(19): siRNA sense strand
cagcuccucuuccaguuca

SEQ ID NO: 819037 - RNA, 19 nt, Homo sapiens
  misc_RNA (1)...(19): siRNA sense strand
gagaagagggagguguuga

SEQ ID NO: 819038 - RNA, 19 nt, Homo sapiens
  misc_RNA (1)...(19): siRNA sense strand
cuaccaucguuucuaauuc

SEQ ID NO: 819039 - RNA, 19 nt, Homo sapiens
  misc_RNA (1)...(19): siRNA sense strand
acagauggaucccuuuacu

SEQ ID NO: 819040 - RNA, 19 nt, Homo sapiens
  misc_RNA (1)...(19): siRNA sense strand
ggcugaaagucacaacaug

SEQ ID NO: 819041 - RNA, 19 nt, Homo sapiens
  misc_RNA (1)...(19): siRNA sense strand
gaagaccucaugggagaug

SEQ ID NO: 819042 - RNA, 19 nt, Homo sapiens
  misc_RNA (1)...(19): siRNA sense strand
gcaugcaguugcccacucu

SEQ ID NO: 819043 - RNA, 19 nt, Homo sapiens
  misc_RNA (1)...(19): siRNA sense strand
ccacaacagcaaaccaguu

SEQ ID NO: 819044 - RNA, 19 nt, Homo sapiens
  misc_RNA (1)...(19): siRNA sense strand
gaagaagaggagaaagaag

SEQ ID NO: 819045 - RNA, 19 nt, Homo sapiens
  misc_RNA (1)...(19): siRNA sense strand
ggugucacaugcccuucuu

SEQ ID NO: 819046 - RNA, 19 nt, Homo sapiens
  misc_RNA (1)...(19): siRNA sense strand
caaggcaaagauaaagauu

SEQ ID NO: 819047 - RNA, 19 nt, Homo sapiens
  misc_RNA (1)...(19): siRNA sense strand
gcaagggucaaggcaaaga

SEQ ID NO: 819048 - RNA, 19 nt, Homo sapiens
  misc_RNA (1)...(19): siRNA sense strand
ccagagacccagcuguuca

SEQ ID NO: 819049 - RNA, 19 nt, Homo sapiens
  misc_RNA (1)...(19): siRNA sense strand
caccgaaagugaguuuaug

SEQ ID NO: 819050 - RNA, 19 nt, Homo sapiens
  misc_RNA (1)...(19): siRNA sense strand
guuccaagcgggaugagaa

SEQ ID NO: 819051 - RNA, 19 nt, Homo sapiens
  misc_RNA (1)...(19): siRNA sense strand
gaagagauuguaaaagaga

SEQ ID NO: 819052 - RNA, 19 nt, Homo sapiens
  misc_RNA (1)...(19): siRNA sense strand
agccuaccaucguuucuaa

SEQ ID NO: 819053 - RNA, 19 nt, Homo sapiens
  misc_RNA (1)...(19): siRNA sense strand
caaaagagcugggaaaaua

SEQ ID NO: 819054 - RNA, 19 nt, Homo sapiens
  misc_RNA (1)...(19): siRNA sense strand
gauaaacgauguccuaaca

SEQ ID NO: 819055 - RNA, 19 nt, Homo sapiens
  misc_RNA (1)...(19): siRNA sense strand
aaacugaacuugccaaugu

SEQ ID NO: 819056 - RNA, 19 nt, Homo sapiens
  misc_RNA (1)...(19): siRNA sense strand
ggacugcucuauuacaaug

SEQ ID NO: 819057 - RNA, 19 nt, Homo sapiens
  misc_RNA (1)...(19): siRNA sense strand
auaacaagcuggacauuaa

SEQ ID NO: 819058 - RNA, 19 nt, Homo sapiens
  misc_RNA (1)...(19): siRNA sense strand
gcucaccaauuacagauuu

SEQ ID NO: 819059 - RNA, 19 nt, Homo sapiens
  misc_RNA (1)...(19): siRNA sense strand
cauuugaucuggaaggaua

SEQ ID NO: 819060 - RNA, 19 nt, Homo sapiens
  misc_RNA (1)...(19): siRNA sense strand
gaaaggcgcucagaguagu

SEQ ID NO: 819061 - RNA, 19 nt, Homo sapiens
  misc_RNA (1)...(19): siRNA sense strand
ggaaggauaugcuuuuauu

SEQ ID NO: 819062 - RNA, 19 nt, Homo sapiens
  misc_RNA (1)...(19): siRNA sense strand
gcacaaagaaacugaacuu

SEQ ID NO: 819063 - RNA, 19 nt, Homo sapiens
  misc_RNA (1)...(19): siRNA sense strand
gcaaauggugcauacguaa

SEQ ID NO: 819064 - RNA, 19 nt, Homo sapiens
  misc_RNA (1)...(19): siRNA sense strand
gcucugacuuggcauuuga

SEQ ID NO: 819065 - RNA, 19 nt, Homo sapiens
  misc_RNA (1)...(19): siRNA sense strand
auaguuggcuguauuaaga

SEQ ID NO: 819066 - RNA, 19 nt, Homo sapiens
  misc_RNA (1)...(19): siRNA sense strand
gggaaaggcgcucagagua

SEQ ID NO: 819067 - RNA, 19 nt, Homo sapiens
  misc_RNA (1)...(19): siRNA sense strand
gcucagaguagucaaguuu

SEQ ID NO: 819068 - RNA, 19 nt, Homo sapiens
  misc_RNA (1)...(19): siRNA sense strand
gcaaacagucagaggcuaa

SEQ ID NO: 819069 - RNA, 19 nt, Homo sapiens
  misc_RNA (1)...(19): siRNA sense strand
caguauaauucugcucuua

SEQ ID NO: 819070 - RNA, 19 nt, Homo sapiens
  misc_RNA (1)...(19): siRNA sense strand
ggucuuugguggagauuau

SEQ ID NO: 819071 - RNA, 19 nt, Homo sapiens
  misc_RNA (1)...(19): siRNA sense strand
ccgaaacgcugaccguguu

SEQ ID NO: 819072 - RNA, 19 nt, Homo sapiens
  misc_RNA (1)...(19): siRNA sense strand
ggaaaggcgcucagaguag

SEQ ID NO: 819073 - RNA, 19 nt, Homo sapiens
  misc_RNA (1)...(19): siRNA sense strand
acagaaauguaccucgaaa

SEQ ID NO: 819074 - RNA, 19 nt, Homo sapiens
  misc_RNA (1)...(19): siRNA sense strand
ggacuguucagcacaaaga

SEQ ID NO: 819075 - RNA, 19 nt, Homo sapiens
  misc_RNA (1)...(19): siRNA sense strand
guauaauucugcucuuaca

SEQ ID NO: 819076 - RNA, 19 nt, Homo sapiens
  misc_RNA (1)...(19): siRNA sense strand
acaaugcacuguucaugau

SEQ ID NO: 819077 - RNA, 19 nt, Homo sapiens
  misc_RNA (1)...(19): siRNA sense strand
gacuguauuugcaaugauu

SEQ ID NO: 819078 - RNA, 19 nt, Homo sapiens
  misc_RNA (1)...(19): siRNA sense strand
uggacaaacuucauugguu

SEQ ID NO: 819079 - RNA, 19 nt, Homo sapiens
  misc_RNA (1)...(19): siRNA sense strand
uccacuaccucuacuauau

SEQ ID NO: 819080 - RNA, 19 nt, Homo sapiens
  misc_RNA (1)...(19): siRNA sense strand
agaaauguaccucgaaaga

SEQ ID NO: 819081 - RNA, 19 nt, Homo sapiens
  misc_RNA (1)...(19): siRNA sense strand
ccaaaucacgggacuguuc

SEQ ID NO: 819082 - RNA, 19 nt, Homo sapiens
  misc_RNA (1)...(19): siRNA sense strand
cacuaccucuacuauauuu

SEQ ID NO: 819083 - RNA, 19 nt, Homo sapiens
  misc_RNA (1)...(19): siRNA sense strand
gcucuuacaacuacaauag

SEQ ID NO: 819084 - RNA, 19 nt, Homo sapiens
  misc_RNA (1)...(19): siRNA sense strand
gcugggagccugguauauu

SEQ ID NO: 819085 - RNA, 19 nt, Homo sapiens
  misc_RNA (1)...(19): siRNA sense strand
acaaaaggcuguggaguuu

SEQ ID NO: 819086 - RNA, 19 nt, Homo sapiens
  misc_RNA (1)...(19): siRNA sense strand
agauuucccuccucacuau

SEQ ID NO: 819087 - RNA, 19 nt, Homo sapiens
  misc_RNA (1)...(19): siRNA sense strand
gcugacacccucuuucuuc

SEQ ID NO: 819088 - RNA, 19 nt, Homo sapiens
  misc_RNA (1)...(19): siRNA sense strand
uuccugaccuugacagaaa

SEQ ID NO: 819089 - RNA, 19 nt, Homo sapiens
  misc_RNA (1)...(19): siRNA sense strand
aauaacaagcuggacauua

SEQ ID NO: 819090 - RNA, 19 nt, Homo sapiens
  misc_RNA (1)...(19): siRNA sense strand
caaauggugcauacguaaa

SEQ ID NO: 819091 - RNA, 19 nt, Homo sapiens
  misc_RNA (1)...(19): siRNA sense strand
ugaucgugguggugaauaa

SEQ ID NO: 819092 - RNA, 19 nt, Homo sapiens
  misc_RNA (1)...(19): siRNA sense strand
gaagagcagcugagcaaac

SEQ ID NO: 819093 - RNA, 19 nt, Homo sapiens
  misc_RNA (1)...(19): siRNA sense strand
ccacuaccucuacuauauu

SEQ ID NO: 819094 - RNA, 19 nt, Homo sapiens
  misc_RNA (1)...(19): siRNA sense strand
agucagaggcuaauaacaa

SEQ ID NO: 819095 - RNA, 19 nt, Homo sapiens
  misc_RNA (1)...(19): siRNA sense strand
ggauaugcuuuuauucuga

SEQ ID NO: 819096 - RNA, 19 nt, Homo sapiens
  misc_RNA (1)...(19): siRNA sense strand
aauguuugcugaaggaguu

SEQ ID NO: 819097 - RNA, 19 nt, Homo sapiens
  misc_RNA (1)...(19): siRNA sense strand
cauccuguuuacaauguuu

SEQ ID NO: 819098 - RNA, 19 nt, Homo sapiens
  misc_RNA (1)...(19): siRNA sense strand
gaaacugaacuugccaaug

SEQ ID NO: 819099 - RNA, 19 nt, Homo sapiens
  misc_RNA (1)...(19): siRNA sense strand
aagagcagcugagcaaaca

SEQ ID NO: 819100 - RNA, 19 nt, Homo sapiens
  misc_RNA (1)...(19): siRNA sense strand
gauuauuggagccuuugua

SEQ ID NO: 819101 - RNA, 19 nt, Homo sapiens
  misc_RNA (1)...(19): siRNA sense strand
gugcauacguaaaacaaaa

SEQ ID NO: 819102 - RNA, 19 nt, Homo sapiens
  misc_RNA (1)...(19): siRNA sense strand
gaacuugccaauguuuaca

SEQ ID NO: 819103 - RNA, 19 nt, Homo sapiens
  misc_RNA (1)...(19): siRNA sense strand
gucagaggcuaauaacaag

SEQ ID NO: 819104 - RNA, 19 nt, Homo sapiens
  misc_RNA (1)...(19): siRNA sense strand
uacaauguuugcugaagga

SEQ ID NO: 819105 - RNA, 19 nt, Homo sapiens
  misc_RNA (1)...(19): siRNA sense strand
agcaaauggugcauacgua

SEQ ID NO: 819106 - RNA, 19 nt, Homo sapiens
  misc_RNA (1)...(19): siRNA sense strand
ggagccugguauauuccua

SEQ ID NO: 819107 - RNA, 19 nt, Homo sapiens
  misc_RNA (1)...(19): siRNA sense strand
gugaugggguuuaucuuaa

SEQ ID NO: 819108 - RNA, 19 nt, Homo sapiens
  misc_RNA (1)...(19): siRNA sense strand
gaaaauauggacugcucua

SEQ ID NO: 819109 - RNA, 19 nt, Homo sapiens
  misc_RNA (1)...(19): siRNA sense strand
cugggagccugguauauuc

SEQ ID NO: 819110 - RNA, 19 nt, Homo sapiens
  misc_RNA (1)...(19): siRNA sense strand
cuauuacaaugcacuguuc

SEQ ID NO: 819111 - RNA, 19 nt, Homo sapiens
  misc_RNA (1)...(19): siRNA sense strand
ucugauaaacgauguccua

SEQ ID NO: 819112 - RNA, 19 nt, Homo sapiens
  misc_RNA (1)...(19): siRNA sense strand
uacaaugcacuguucauga

SEQ ID NO: 819113 - RNA, 19 nt, Homo sapiens
  misc_RNA (1)...(19): siRNA sense strand
gaaauguaccucgaaagac

SEQ ID NO: 819114 - RNA, 19 nt, Homo sapiens
  misc_RNA (1)...(19): siRNA sense strand
ucagcaugcucggguuaaa

SEQ ID NO: 819115 - RNA, 19 nt, Homo sapiens
  misc_RNA (1)...(19): siRNA sense strand
aaaaggcuguggaguuuga

SEQ ID NO: 819116 - RNA, 19 nt, Homo sapiens
  misc_RNA (1)...(19): siRNA sense strand
cagauuucccuccucacua

SEQ ID NO: 819117 - RNA, 19 nt, Homo sapiens
  misc_RNA (1)...(19): siRNA sense strand
cuuaauguacgccacagua

SEQ ID NO: 819118 - RNA, 19 nt, Homo sapiens
  misc_RNA (1)...(19): siRNA sense strand
gaucuggaaggauaugcuu

SEQ ID NO: 819119 - RNA, 19 nt, Homo sapiens
  misc_RNA (1)...(19): siRNA sense strand
ugacuuggcauuugaucug

SEQ ID NO: 819120 - RNA, 19 nt, Homo sapiens
  misc_RNA (1)...(19): siRNA sense strand
gacagaaauguaccucgaa

SEQ ID NO: 819121 - RNA, 19 nt, Homo sapiens
  misc_RNA (1)...(19): siRNA sense strand
caaaucacgggacuguuca

SEQ ID NO: 819122 - RNA, 19 nt, Homo sapiens
  misc_RNA (1)...(19): siRNA sense strand
aaugauuauuggagccuuu

SEQ ID NO: 819123 - RNA, 19 nt, Homo sapiens
  misc_RNA (1)...(19): siRNA sense strand
gagcagcugagcaaacagu

SEQ ID NO: 819124 - RNA, 19 nt, Homo sapiens
  misc_RNA (1)...(19): siRNA sense strand
cugaagagcagcugagcaa

SEQ ID NO: 819125 - RNA, 19 nt, Homo sapiens
  misc_RNA (1)...(19): siRNA sense strand
gaccuugacagaaauguac

SEQ ID NO: 819126 - RNA, 19 nt, Homo sapiens
  misc_RNA (1)...(19): siRNA sense strand
ccuccacacuccgagauga

SEQ ID NO: 819127 - RNA, 19 nt, Homo sapiens
  misc_RNA (1)...(19): siRNA sense strand
uaauucugcucuuacaacu

SEQ ID NO: 819128 - RNA, 19 nt, Homo sapiens
  misc_RNA (1)...(19): siRNA sense strand
ggcauuugaucuggaagga

SEQ ID NO: 819129 - RNA, 19 nt, Homo sapiens
  misc_RNA (1)...(19): siRNA sense strand
uugccaauguuuacaguuc

SEQ ID NO: 819130 - RNA, 19 nt, Homo sapiens
  misc_RNA (1)...(19): siRNA sense strand
cccuggccauugcguauuu

SEQ ID NO: 819131 - RNA, 19 nt, Homo sapiens
  misc_RNA (1)...(19): siRNA sense strand
ugacuguauuugcaaugau

SEQ ID NO: 819132 - RNA, 19 nt, Homo sapiens
  misc_RNA (1)...(19): siRNA sense strand
gggcugacacccucuuucu

SEQ ID NO: 819133 - RNA, 19 nt, Homo sapiens
  misc_RNA (1)...(19): siRNA sense strand
aaacagucagaggcuaaua

SEQ ID NO: 819134 - RNA, 19 nt, Homo sapiens
  misc_RNA (1)...(19): siRNA sense strand
gaagguucuccauccuguu

SEQ ID NO: 819135 - RNA, 19 nt, Homo sapiens
  misc_RNA (1)...(19): siRNA sense strand
uaacaagcuggacauuaag

SEQ ID NO: 819136 - RNA, 19 nt, Homo sapiens
  misc_RNA (1)...(19): siRNA sense strand
gguuuaaauaucagcauug

SEQ ID NO: 819137 - RNA, 19 nt, Homo sapiens
  misc_RNA (1)...(19): siRNA sense strand
acgcugaccguguuucuga

SEQ ID NO: 819138 - RNA, 19 nt, Homo sapiens
  misc_RNA (1)...(19): siRNA sense strand
ggccauugcguauuucaca

SEQ ID NO: 819139 - RNA, 19 nt, Homo sapiens
  misc_RNA (1)...(19): siRNA sense strand
aagguucuccauccuguuu

SEQ ID NO: 819140 - RNA, 19 nt, Homo sapiens
  misc_RNA (1)...(19): siRNA sense strand
ugaccuugacagaaaugua

SEQ ID NO: 819141 - RNA, 19 nt, Homo sapiens
  misc_RNA (1)...(19): siRNA sense strand
gagccugguauauuccuau

SEQ ID NO: 819142 - RNA, 19 nt, Homo sapiens
  misc_RNA (1)...(19): siRNA sense strand
cagcagcaaauggugcaua

SEQ ID NO: 819143 - RNA, 19 nt, Homo sapiens
  misc_RNA (1)...(19): siRNA sense strand
cgucagcaugcucggguua

SEQ ID NO: 819144 - RNA, 19 nt, Homo sapiens
  misc_RNA (1)...(19): siRNA sense strand
caaugcacuguucaugauu

SEQ ID NO: 819145 - RNA, 19 nt, Homo sapiens
  misc_RNA (1)...(19): siRNA sense strand
ucuccauccuguuuacaau

SEQ ID NO: 819146 - RNA, 19 nt, Homo sapiens
  misc_RNA (1)...(19): siRNA sense strand
ccuaacagcagcaaauggu

SEQ ID NO: 819147 - RNA, 19 nt, Homo sapiens
  misc_RNA (1)...(19): siRNA sense strand
uaauaacaagcuggacauu

SEQ ID NO: 819148 - RNA, 19 nt, Homo sapiens
  misc_RNA (1)...(19): siRNA sense strand
aacagucagaggcuaauaa

SEQ ID NO: 819149 - RNA, 19 nt, Homo sapiens
  misc_RNA (1)...(19): siRNA sense strand
ccuauaucacuuucacuga

SEQ ID NO: 819150 - RNA, 19 nt, Homo sapiens
  misc_RNA (1)...(19): siRNA sense strand
auucugcucuuacaacuac

SEQ ID NO: 819151 - RNA, 19 nt, Homo sapiens
  misc_RNA (1)...(19): siRNA sense strand
cacaggagaugcacaaaag

SEQ ID NO: 819152 - RNA, 19 nt, Homo sapiens
  misc_RNA (1)...(19): siRNA sense strand
aaugcacuguucaugauuc

SEQ ID NO: 819153 - RNA, 19 nt, Homo sapiens
  misc_RNA (1)...(19): siRNA sense strand
ggaagaagcucgacaguuu

SEQ ID NO: 819154 - RNA, 19 nt, Homo sapiens
  misc_RNA (1)...(19): siRNA sense strand
gcaaugcaaucaauguuua

SEQ ID NO: 819155 - RNA, 19 nt, Homo sapiens
  misc_RNA (1)...(19): siRNA sense strand
gaaauggacccuucagaua

SEQ ID NO: 819156 - RNA, 19 nt, Homo sapiens
  misc_RNA (1)...(19): siRNA sense strand
gaauaaacgucaugauguu

SEQ ID NO: 819157 - RNA, 19 nt, Homo sapiens
  misc_RNA (1)...(19): siRNA sense strand
gaagaauucuggcaguauu

SEQ ID NO: 819158 - RNA, 19 nt, Homo sapiens
  misc_RNA (1)...(19): siRNA sense strand
ggagauggaacuucuaaua

SEQ ID NO: 819159 - RNA, 19 nt, Homo sapiens
  misc_RNA (1)...(19): siRNA sense strand
ggagauaaacacuuugaua

SEQ ID NO: 819160 - RNA, 19 nt, Homo sapiens
  misc_RNA (1)...(19): siRNA sense strand
ccaaguccaucaacagaua

SEQ ID NO: 819161 - RNA, 19 nt, Homo sapiens
  misc_RNA (1)...(19): siRNA sense strand
gguaaaggcucaucauaca

SEQ ID NO: 819162 - RNA, 19 nt, Homo sapiens
  misc_RNA (1)...(19): siRNA sense strand
gaagaacaguuaacuagag

SEQ ID NO: 819163 - RNA, 19 nt, Homo sapiens
  misc_RNA (1)...(19): siRNA sense strand
caacagcagugaugccaaa

SEQ ID NO: 819164 - RNA, 19 nt, Homo sapiens
  misc_RNA (1)...(19): siRNA sense strand
gaacaagaagcccgaauug

SEQ ID NO: 819165 - RNA, 19 nt, Homo sapiens
  misc_RNA (1)...(19): siRNA sense strand
gauggaacuucuaauacua

SEQ ID NO: 819166 - RNA, 19 nt, Homo sapiens
  misc_RNA (1)...(19): siRNA sense strand
gcaagaaaccuaauagcuu

SEQ ID NO: 819167 - RNA, 19 nt, Homo sapiens
  misc_RNA (1)...(19): siRNA sense strand
gcagugauguucuguuuag

SEQ ID NO: 819168 - RNA, 19 nt, Homo sapiens
  misc_RNA (1)...(19): siRNA sense strand
guaaggaggugcuaaugau

SEQ ID NO: 819169 - RNA, 19 nt, Homo sapiens
  misc_RNA (1)...(19): siRNA sense strand
ucaagcugcugguggauua

SEQ ID NO: 819170 - RNA, 19 nt, Homo sapiens
  misc_RNA (1)...(19): siRNA sense strand
gaucaaaggaugacaguga

SEQ ID NO: 819171 - RNA, 19 nt, Homo sapiens
  misc_RNA (1)...(19): siRNA sense strand
gaagacagaugcucaaagc

SEQ ID NO: 819172 - RNA, 19 nt, Homo sapiens
  misc_RNA (1)...(19): siRNA sense strand
acagaaaggucaauuuguu

SEQ ID NO: 819173 - RNA, 19 nt, Homo sapiens
  misc_RNA (1)...(19): siRNA sense strand
gcaauguccugaucucuuc

SEQ ID NO: 819174 - RNA, 19 nt, Homo sapiens
  misc_RNA (1)...(19): siRNA sense strand
uauagaaucucaucccaaa

SEQ ID NO: 819175 - RNA, 19 nt, Homo sapiens
  misc_RNA (1)...(19): siRNA sense strand
gaagaagaacaguuaacua

SEQ ID NO: 819176 - RNA, 19 nt, Homo sapiens
  misc_RNA (1)...(19): siRNA sense strand
gaacaacagaggcaagaaa

SEQ ID NO: 819177 - RNA, 19 nt, Homo sapiens
  misc_RNA (1)...(19): siRNA sense strand
gaacaauugcagaaucuaa

SEQ ID NO: 819178 - RNA, 19 nt, Homo sapiens
  misc_RNA (1)...(19): siRNA sense strand
gcaaagaugaugauggaaa

SEQ ID NO: 819179 - RNA, 19 nt, Homo sapiens
  misc_RNA (1)...(19): siRNA sense strand
gcaggacucuuacaugcaa

SEQ ID NO: 819180 - RNA, 19 nt, Homo sapiens
  misc_RNA (1)...(19): siRNA sense strand
gaagugcaguuacaagcaa

SEQ ID NO: 819181 - RNA, 19 nt, Homo sapiens
  misc_RNA (1)...(19): siRNA sense strand
caauagucaugacaaagua

SEQ ID NO: 819182 - RNA, 19 nt, Homo sapiens
  misc_RNA (1)...(19): siRNA sense strand
cgacgaagcuuaaauuuug

SEQ ID NO: 819183 - RNA, 19 nt, Homo sapiens
  misc_RNA (1)...(19): siRNA sense strand
gcagaaggccucacgcaaa

SEQ ID NO: 819184 - RNA, 19 nt, Homo sapiens
  misc_RNA (1)...(19): siRNA sense strand
guacuguucccuucacuua

SEQ ID NO: 819185 - RNA, 19 nt, Homo sapiens
  misc_RNA (1)...(19): siRNA sense strand
gaacagauugaacaaagaa

SEQ ID NO: 819186 - RNA, 19 nt, Homo sapiens
  misc_RNA (1)...(19): siRNA sense strand
aaauucagcucaagcauga

SEQ ID NO: 819187 - RNA, 19 nt, Homo sapiens
  misc_RNA (1)...(19): siRNA sense strand
uaaugaugcuggauaacua

SEQ ID NO: 819188 - RNA, 19 nt, Homo sapiens
  misc_RNA (1)...(19): siRNA sense strand
ugcaauaacuguucagaaa

SEQ ID NO: 819189 - RNA, 19 nt, Homo sapiens
  misc_RNA (1)...(19): siRNA sense strand
gaagaagaagcuaagguaa

SEQ ID NO: 819190 - RNA, 19 nt, Homo sapiens
  misc_RNA (1)...(19): siRNA sense strand
ggaugacagugauaaagaa

SEQ ID NO: 819191 - RNA, 19 nt, Homo sapiens
  misc_RNA (1)...(19): siRNA sense strand
uuaaugagcuacaggaaga

SEQ ID NO: 819192 - RNA, 19 nt, Homo sapiens
  misc_RNA (1)...(19): siRNA sense strand
ggaacagauugaacaaaga

SEQ ID NO: 819193 - RNA, 19 nt, Homo sapiens
  misc_RNA (1)...(19): siRNA sense strand
gaucaacgacgcaggauga

SEQ ID NO: 819194 - RNA, 19 nt, Homo sapiens
  misc_RNA (1)...(19): siRNA sense strand
caaagucagugcugugguu

SEQ ID NO: 819195 - RNA, 19 nt, Homo sapiens
  misc_RNA (1)...(19): siRNA sense strand
gugauguucuguuuaguaa

SEQ ID NO: 819196 - RNA, 19 nt, Homo sapiens
  misc_RNA (1)...(19): siRNA sense strand
gcucaugggcaaacaauaa

SEQ ID NO: 819197 - RNA, 19 nt, Homo sapiens
  misc_RNA (1)...(19): siRNA sense strand
gaagaggaaagaacaagaa

SEQ ID NO: 819198 - RNA, 19 nt, Homo sapiens
  misc_RNA (1)...(19): siRNA sense strand
gaauaugaacagaggcuua

SEQ ID NO: 819199 - RNA, 19 nt, Homo sapiens
  misc_RNA (1)...(19): siRNA sense strand
gaacaguuaacuagagaaa

SEQ ID NO: 819200 - RNA, 19 nt, Homo sapiens
  misc_RNA (1)...(19): siRNA sense strand
ccacuuucauucaggauuu

SEQ ID NO: 819201 - RNA, 19 nt, Homo sapiens
  misc_RNA (1)...(19): siRNA sense strand
ggagagaucacuagaauac

SEQ ID NO: 819202 - RNA, 19 nt, Homo sapiens
  misc_RNA (1)...(19): siRNA sense strand
ccaaagaucuucuaaaaca

SEQ ID NO: 819203 - RNA, 19 nt, Homo sapiens
  misc_RNA (1)...(19): siRNA sense strand
caagagaugagcuguguuu

SEQ ID NO: 819204 - RNA, 19 nt, Homo sapiens
  misc_RNA (1)...(19): siRNA sense strand
uaacagcccuugaacacau

SEQ ID NO: 819205 - RNA, 19 nt, Homo sapiens
  misc_RNA (1)...(19): siRNA sense strand
gaauguggcagaucagauu

SEQ ID NO: 819206 - RNA, 19 nt, Homo sapiens
  misc_RNA (1)...(19): siRNA sense strand
gacuggagauaaacacuuu

SEQ ID NO: 819207 - RNA, 19 nt, Homo sapiens
  misc_RNA (1)...(19): siRNA sense strand
ggcgugaacugucagauga

SEQ ID NO: 819208 - RNA, 19 nt, Homo sapiens
  misc_RNA (1)...(19): siRNA sense strand
gaaggcacauggaacagau

SEQ ID NO: 819209 - RNA, 19 nt, Homo sapiens
  misc_RNA (1)...(19): siRNA sense strand
ggaaguggaaggaagaauu

SEQ ID NO: 819210 - RNA, 19 nt, Homo sapiens
  misc_RNA (1)...(19): siRNA sense strand
gcaguauucgagacaauua

SEQ ID NO: 819211 - RNA, 19 nt, Homo sapiens
  misc_RNA (1)...(19): siRNA sense strand
ggauaacuauguaagagau

SEQ ID NO: 819212 - RNA, 19 nt, Homo sapiens
  misc_RNA (1)...(19): siRNA sense strand
uaggagagaucacuagaau

SEQ ID NO: 819213 - RNA, 19 nt, Homo sapiens
  misc_RNA (1)...(19): siRNA sense strand
gcucaagcaugaugaaagu

SEQ ID NO: 819214 - RNA, 19 nt, Homo sapiens
  misc_RNA (1)...(19): siRNA sense strand
gaagcuaagguaaaugaaa

SEQ ID NO: 819215 - RNA, 19 nt, Homo sapiens
  misc_RNA (1)...(19): siRNA sense strand
agaagaagcuaagguaaau

SEQ ID NO: 819216 - RNA, 19 nt, Homo sapiens
  misc_RNA (1)...(19): siRNA sense strand
gaaguggaaggaagaauug

SEQ ID NO: 819217 - RNA, 19 nt, Homo sapiens
  misc_RNA (1)...(19): siRNA sense strand
aagcaaagaugaugaugga

SEQ ID NO: 819218 - RNA, 19 nt, Homo sapiens
  misc_RNA (1)...(19): siRNA sense strand
cuauguaacuugcgaauca

SEQ ID NO: 819219 - RNA, 19 nt, Homo sapiens
  misc_RNA (1)...(19): siRNA sense strand
cagaucagauugcauuuca

SEQ ID NO: 819220 - RNA, 19 nt, Homo sapiens
  misc_RNA (1)...(19): siRNA sense strand
gaugaaagcauacagaaag

SEQ ID NO: 819221 - RNA, 19 nt, Homo sapiens
  misc_RNA (1)...(19): siRNA sense strand
uguaagagauuucaaagca

SEQ ID NO: 819222 - RNA, 19 nt, Homo sapiens
  misc_RNA (1)...(19): siRNA sense strand
gaugcuggauaacuaugua

SEQ ID NO: 819223 - RNA, 19 nt, Homo sapiens
  misc_RNA (1)...(19): siRNA sense strand
gaacaugggucugauugac

SEQ ID NO: 819224 - RNA, 19 nt, Homo sapiens
  misc_RNA (1)...(19): siRNA sense strand
gcacagcagcuaagggaaa

SEQ ID NO: 819225 - RNA, 19 nt, Homo sapiens
  misc_RNA (1)...(19): siRNA sense strand
gcagugggaguguuucuuu

SEQ ID NO: 819226 - RNA, 19 nt, Homo sapiens
  misc_RNA (1)...(19): siRNA sense strand
ccuaauagcuuggaguguu

SEQ ID NO: 819227 - RNA, 19 nt, Homo sapiens
  misc_RNA (1)...(19): siRNA sense strand
caaauuccauggcagaagu

SEQ ID NO: 819228 - RNA, 19 nt, Homo sapiens
  misc_RNA (1)...(19): siRNA sense strand
ugagcuggcuaacagauuu

SEQ ID NO: 819229 - RNA, 19 nt, Homo sapiens
  misc_RNA (1)...(19): siRNA sense strand
ggucauacagcauauuuga

SEQ ID NO: 819230 - RNA, 19 nt, Homo sapiens
  misc_RNA (1)...(19): siRNA sense strand
acaagaagcccgaauugaa

SEQ ID NO: 819231 - RNA, 19 nt, Homo sapiens
  misc_RNA (1)...(19): siRNA sense strand
uggcagaaguccuugcuaa

SEQ ID NO: 819232 - RNA, 19 nt, Homo sapiens
  misc_RNA (1)...(19): siRNA sense strand
caguugggcugacaaggua

SEQ ID NO: 819233 - RNA, 19 nt, Homo sapiens
  misc_RNA (1)...(19): siRNA sense strand
acacauccuucaagcagua

SEQ ID NO: 819234 - RNA, 19 nt, Homo sapiens
  misc_RNA (1)...(19): siRNA sense strand
gacaugcaaauacugauua

SEQ ID NO: 819235 - RNA, 19 nt, Homo sapiens
  misc_RNA (1)...(19): siRNA sense strand
uguucgaacuucugaaaua

SEQ ID NO: 819236 - RNA, 19 nt, Homo sapiens
  misc_RNA (1)...(19): siRNA sense strand
caacagaagccacaagauc

SEQ ID NO: 819237 - RNA, 19 nt, Homo sapiens
  misc_RNA (1)...(19): siRNA sense strand
ggaagagcgucagagaaga

SEQ ID NO: 819238 - RNA, 19 nt, Homo sapiens
  misc_RNA (1)...(19): siRNA sense strand
gcagccaagucuccuguga

SEQ ID NO: 819239 - RNA, 19 nt, Homo sapiens
  misc_RNA (1)...(19): siRNA sense strand
ggaaggucauacagcauau

SEQ ID NO: 819240 - RNA, 19 nt, Homo sapiens
  misc_RNA (1)...(19): siRNA sense strand
gagaaagcaaggauagaaa

SEQ ID NO: 819241 - RNA, 19 nt, Homo sapiens
  misc_RNA (1)...(19): siRNA sense strand
aaacaaacccucacaaggu

SEQ ID NO: 819242 - RNA, 19 nt, Homo sapiens
  misc_RNA (1)...(19): siRNA sense strand
uaauggaccuccugauaca

SEQ ID NO: 819243 - RNA, 19 nt, Homo sapiens
  misc_RNA (1)...(19): siRNA sense strand
gcaggcccguguagaagaa

SEQ ID NO: 819244 - RNA, 19 nt, Homo sapiens
  misc_RNA (1)...(19): siRNA sense strand
gaaauugaagcugaagaaa

SEQ ID NO: 819245 - RNA, 19 nt, Homo sapiens
  misc_RNA (1)...(19): siRNA sense strand
ggauucagcuucaggaaaa

SEQ ID NO: 819246 - RNA, 19 nt, Homo sapiens
  misc_RNA (1)...(19): siRNA sense strand
gcaugccgcaggacucuua

SEQ ID NO: 819247 - RNA, 19 nt, Homo sapiens
  misc_RNA (1)...(19): siRNA sense strand
gaacuucagggcuaaggaa

SEQ ID NO: 819248 - RNA, 19 nt, Homo sapiens
  misc_RNA (1)...(19): siRNA sense strand
aaaccuaaaugucaaacug

SEQ ID NO: 819249 - RNA, 19 nt, Homo sapiens
  misc_RNA (1)...(19): siRNA sense strand
acucacagcugcucaacaa

SEQ ID NO: 819250 - RNA, 19 nt, Homo sapiens
  misc_RNA (1)...(19): siRNA sense strand
aaagaacaauugcagaauc

SEQ ID NO: 819251 - RNA, 19 nt, Homo sapiens
  misc_RNA (1)...(19): siRNA sense strand
uggaugaugugaagaauuc

SEQ ID NO: 819252 - RNA, 19 nt, Homo sapiens
  misc_RNA (1)...(19): siRNA sense strand
cgaccuggcuggaguucuu

SEQ ID NO: 819253 - RNA, 19 nt, Homo sapiens
  misc_RNA (1)...(19): siRNA sense strand
gaaauucuccaucgacauu

SEQ ID NO: 819254 - RNA, 19 nt, Homo sapiens
  misc_RNA (1)...(19): siRNA sense strand
ccacugagcucgucaagca

SEQ ID NO: 819255 - RNA, 19 nt, Homo sapiens
  misc_RNA (1)...(19): siRNA sense strand
gcacagaguucguggucuu

SEQ ID NO: 819256 - RNA, 19 nt, Homo sapiens
  misc_RNA (1)...(19): siRNA sense strand
gcaaggaagugucgguguu

SEQ ID NO: 819257 - RNA, 19 nt, Homo sapiens
  misc_RNA (1)...(19): siRNA sense strand
caaccucucuccuguggaa

SEQ ID NO: 819258 - RNA, 19 nt, Homo sapiens
  misc_RNA (1)...(19): siRNA sense strand
gagccaaccuugccuaugg

SEQ ID NO: 819259 - RNA, 19 nt, Homo sapiens
  misc_RNA (1)...(19): siRNA sense strand
ccaaggacaucaccaagug

SEQ ID NO: 819260 - RNA, 19 nt, Homo sapiens
  misc_RNA (1)...(19): siRNA sense strand
ccaaggacguggcggugua

SEQ ID NO: 819261 - RNA, 19 nt, Homo sapiens
  misc_RNA (1)...(19): siRNA sense strand
gaagagccguaacgagaca

SEQ ID NO: 819262 - RNA, 19 nt, Homo sapiens
  misc_RNA (1)...(19): siRNA sense strand
ggagcuggauggcaaggaa

SEQ ID NO: 819263 - RNA, 19 nt, Homo sapiens
  misc_RNA (1)...(19): siRNA sense strand
caaugaccguggaggagua

SEQ ID NO: 819264 - RNA, 19 nt, Homo sapiens
  misc_RNA (1)...(19): siRNA sense strand
gaccugggcuaccucauca

SEQ ID NO: 819265 - RNA, 19 nt, Homo sapiens
  misc_RNA (1)...(19): siRNA sense strand
agaacuggaucgaggagua

SEQ ID NO: 819266 - RNA, 19 nt, Homo sapiens
  misc_RNA (1)...(19): siRNA sense strand
guaaccagccggugucuga

SEQ ID NO: 819267 - RNA, 19 nt, Homo sapiens
  misc_RNA (1)...(19): siRNA sense strand
ccaagaagggcgaugcuaa

SEQ ID NO: 819268 - RNA, 19 nt, Homo sapiens
  misc_RNA (1)...(19): siRNA sense strand
gaguggcucuaccuggaua

SEQ ID NO: 819269 - RNA, 19 nt, Homo sapiens
  misc_RNA (1)...(19): siRNA sense strand
caucgacauugaaaccuuu

SEQ ID NO: 819270 - RNA, 19 nt, Homo sapiens
  misc_RNA (1)...(19): siRNA sense strand
gcguggagauccuggagaa

SEQ ID NO: 819271 - RNA, 19 nt, Homo sapiens
  misc_RNA (1)...(19): siRNA sense strand
cagcaucgacgguuccuuu

SEQ ID NO: 819272 - RNA, 19 nt, Homo sapiens
  misc_RNA (1)...(19): siRNA sense strand
caacgaguauaagacagaa

SEQ ID NO: 819273 - RNA, 19 nt, Homo sapiens
  misc_RNA (1)...(19): siRNA sense strand
gguaugggcugagcaugga

SEQ ID NO: 819274 - RNA, 19 nt, Homo sapiens
  misc_RNA (1)...(19): siRNA sense strand
gaaaagaaccagcugacaa

SEQ ID NO: 819275 - RNA, 19 nt, Homo sapiens
  misc_RNA (1)...(19): siRNA sense strand
ugacaacuccagcaucuug

SEQ ID NO: 819276 - RNA, 19 nt, Homo sapiens
  misc_RNA (1)...(19): siRNA sense strand
caucauagaggacgagguu

SEQ ID NO: 819277 - RNA, 19 nt, Homo sapiens
  misc_RNA (1)...(19): siRNA sense strand
cgacacagaggaaauguuc

SEQ ID NO: 819278 - RNA, 19 nt, Homo sapiens
  misc_RNA (1)...(19): siRNA sense strand
caugacaacuccagcaucu

SEQ ID NO: 819279 - RNA, 19 nt, Homo sapiens
  misc_RNA (1)...(19): siRNA sense strand
gccagaagcggaucgacua

SEQ ID NO: 819280 - RNA, 19 nt, Homo sapiens
  misc_RNA (1)...(19): siRNA sense strand
gaaggaggcacagcucaug

SEQ ID NO: 819281 - RNA, 19 nt, Homo sapiens
  misc_RNA (1)...(19): siRNA sense strand
ucaccgaccucuuccucuu

SEQ ID NO: 819282 - RNA, 19 nt, Homo sapiens
  misc_RNA (1)...(19): siRNA sense strand
uaagauggcccaguucaau

SEQ ID NO: 819283 - RNA, 19 nt, Homo sapiens
  misc_RNA (1)...(19): siRNA sense strand
aggcacagcucaugcuuuc

SEQ ID NO: 819284 - RNA, 19 nt, Homo sapiens
  misc_RNA (1)...(19): siRNA sense strand
cauacaagcucugcaaggu

SEQ ID NO: 819285 - RNA, 19 nt, Homo sapiens
  misc_RNA (1)...(19): siRNA sense strand
gugacggccuggugcauga

SEQ ID NO: 819286 - RNA, 19 nt, Homo sapiens
  misc_RNA (1)...(19): siRNA sense strand
gcaagucuacaaccucuuc

SEQ ID NO: 819287 - RNA, 19 nt, Homo sapiens
  misc_RNA (1)...(19): siRNA sense strand
gaguggaggaugcagagua

SEQ ID NO: 819288 - RNA, 19 nt, Homo sapiens
  misc_RNA (1)...(19): siRNA sense strand
ccacaacgaguauaagaca

SEQ ID NO: 819289 - RNA, 19 nt, Homo sapiens
  misc_RNA (1)...(19): siRNA sense strand
ccaaccaccggaucaauga

SEQ ID NO: 819290 - RNA, 19 nt, Homo sapiens
  misc_RNA (1)...(19): siRNA sense strand
ggaucgaggaguacaagaa

SEQ ID NO: 819291 - RNA, 19 nt, Homo sapiens
  misc_RNA (1)...(19): siRNA sense strand
agaaccagcugacaaucga

SEQ ID NO: 819292 - RNA, 19 nt, Homo sapiens
  misc_RNA (1)...(19): siRNA sense strand
cagcagcagugccaguuca

SEQ ID NO: 819293 - RNA, 19 nt, Homo sapiens
  misc_RNA (1)...(19): siRNA sense strand
gcaagaggagcgacucauc

SEQ ID NO: 819294 - RNA, 19 nt, Homo sapiens
  misc_RNA (1)...(19): siRNA sense strand
guggaggagucuuggaaug

SEQ ID NO: 819295 - RNA, 19 nt, Homo sapiens
  misc_RNA (1)...(19): siRNA sense strand
augaugcccuugccaauga

SEQ ID NO: 819296 - RNA, 19 nt, Homo sapiens
  misc_RNA (1)...(19): siRNA sense strand
ccuacgagcuggauaccau

SEQ ID NO: 819297 - RNA, 19 nt, Homo sapiens
  misc_RNA (1)...(19): siRNA sense strand
ugagaucaccgaccucuuc

SEQ ID NO: 819298 - RNA, 19 nt, Homo sapiens
  misc_RNA (1)...(19): siRNA sense strand
ggaagacacacaagauggu

SEQ ID NO: 819299 - RNA, 19 nt, Homo sapiens
  misc_RNA (1)...(19): siRNA sense strand
ugggcuaccucaucaucua

SEQ ID NO: 819300 - RNA, 19 nt, Homo sapiens
  misc_RNA (1)...(19): siRNA sense strand
gcaagcggacccacgugaa

SEQ ID NO: 819301 - RNA, 19 nt, Homo sapiens
  misc_RNA (1)...(19): siRNA sense strand
uccgggagcuggagaagga

SEQ ID NO: 819302 - RNA, 19 nt, Homo sapiens
  misc_RNA (1)...(19): siRNA sense strand
ggaccugggcuaccucauc

SEQ ID NO: 819303 - RNA, 19 nt, Homo sapiens
  misc_RNA (1)...(19): siRNA sense strand
ugucuacccuaucaagaug

SEQ ID NO: 819304 - RNA, 19 nt, Homo sapiens
  misc_RNA (1)...(19): siRNA sense strand
gagaagucgcugcaaagug

SEQ ID NO: 819305 - RNA, 19 nt, Homo sapiens
  misc_RNA (1)...(19): siRNA sense strand
ucccugagcuggacauugg

SEQ ID NO: 819306 - RNA, 19 nt, Homo sapiens
  misc_RNA (1)...(19): siRNA sense strand
ccacaaugcagccuuccaa

SEQ ID NO: 819307 - RNA, 19 nt, Homo sapiens
  misc_RNA (1)...(19): siRNA sense strand
cacacaagauggucuguac

SEQ ID NO: 819308 - RNA, 19 nt, Homo sapiens
  misc_RNA (1)...(19): siRNA sense strand
ccaucgacauugaaaccuu

SEQ ID NO: 819309 - RNA, 19 nt, Homo sapiens
  misc_RNA (1)...(19): siRNA sense strand
ggagaagucgcugcaaagu

SEQ ID NO: 819310 - RNA, 19 nt, Homo sapiens
  misc_RNA (1)...(19): siRNA sense strand
caaugcagccuuccaagag

SEQ ID NO: 819311 - RNA, 19 nt, Homo sapiens
  misc_RNA (1)...(19): siRNA sense strand
gagcccagcagcagcaaug

SEQ ID NO: 819312 - RNA, 19 nt, Homo sapiens
  misc_RNA (1)...(19): siRNA sense strand
aguccaagaucgagagguu

SEQ ID NO: 819313 - RNA, 19 nt, Homo sapiens
  misc_RNA (1)...(19): siRNA sense strand
gcgcauacaagcucugcaa

SEQ ID NO: 819314 - RNA, 19 nt, Homo sapiens
  misc_RNA (1)...(19): siRNA sense strand
gaucgaggaguacaagaag

SEQ ID NO: 819315 - RNA, 19 nt, Homo sapiens
  misc_RNA (1)...(19): siRNA sense strand
uggagcagcugaacaucau

SEQ ID NO: 819316 - RNA, 19 nt, Homo sapiens
  misc_RNA (1)...(19): siRNA sense strand
cccguaagauggcccaguu

SEQ ID NO: 819317 - RNA, 19 nt, Homo sapiens
  misc_RNA (1)...(19): siRNA sense strand
gcucaugcuuucccguaag

SEQ ID NO: 819318 - RNA, 19 nt, Homo sapiens
  misc_RNA (1)...(19): siRNA sense strand
gggcagguuugacuuugag

SEQ ID NO: 819319 - RNA, 19 nt, Homo sapiens
  misc_RNA (1)...(19): siRNA sense strand
caagauccacgugcugcua

SEQ ID NO: 819320 - RNA, 19 nt, Homo sapiens
  misc_RNA (1)...(19): siRNA sense strand
gccagggacucggaugaga

SEQ ID NO: 819321 - RNA, 19 nt, Homo sapiens
  misc_RNA (1)...(19): siRNA sense strand
guaagauggcccaguucaa

SEQ ID NO: 819322 - RNA, 19 nt, Homo sapiens
  misc_RNA (1)...(19): siRNA sense strand
gcucugggcaguacacaca

SEQ ID NO: 819323 - RNA, 19 nt, Homo sapiens
  misc_RNA (1)...(19): siRNA sense strand
ccucaaagccaagggagaa

SEQ ID NO: 819324 - RNA, 19 nt, Homo sapiens
  misc_RNA (1)...(19): siRNA sense strand
gagaaaaccccgacguguu

SEQ ID NO: 819325 - RNA, 19 nt, Homo sapiens
  misc_RNA (1)...(19): siRNA sense strand
uuggagaagucgcugcaaa

SEQ ID NO: 819326 - RNA, 19 nt, Homo sapiens
  misc_RNA (1)...(19): siRNA sense strand
cauccagcaucgcccagaa

SEQ ID NO: 819327 - RNA, 19 nt, Homo sapiens
  misc_RNA (1)...(19): siRNA sense strand
aguggaggaugcagaguau

SEQ ID NO: 819328 - RNA, 19 nt, Homo sapiens
  misc_RNA (1)...(19): siRNA sense strand
cagcagugccaguucauca

SEQ ID NO: 819329 - RNA, 19 nt, Homo sapiens
  misc_RNA (1)...(19): siRNA sense strand
ugacgggcagguucaugua

SEQ ID NO: 819330 - RNA, 19 nt, Homo sapiens
  misc_RNA (1)...(19): siRNA sense strand
uaaaacugaugcuggagaa

SEQ ID NO: 819331 - RNA, 19 nt, Homo sapiens
  misc_RNA (1)...(19): siRNA sense strand
gcaguugccacagugauuc

SEQ ID NO: 819332 - RNA, 19 nt, Homo sapiens
  misc_RNA (1)...(19): siRNA sense strand
caccaucgccaacguguuc

SEQ ID NO: 819333 - RNA, 19 nt, Homo sapiens
  misc_RNA (1)...(19): siRNA sense strand
gcuggcaggacgaguggua

SEQ ID NO: 819334 - RNA, 19 nt, Homo sapiens
  misc_RNA (1)...(19): siRNA sense strand
uggcgcagcugaaguacag

SEQ ID NO: 819335 - RNA, 19 nt, Homo sapiens
  misc_RNA (1)...(19): siRNA sense strand
gcccagcuguacaugauac

SEQ ID NO: 819336 - RNA, 19 nt, Homo sapiens
  misc_RNA (1)...(19): siRNA sense strand
gagcagcugaacaucauag

SEQ ID NO: 819337 - RNA, 19 nt, Homo sapiens
  misc_RNA (1)...(19): siRNA sense strand
gaggcacagcucaugcuuu

SEQ ID NO: 819338 - RNA, 19 nt, Homo sapiens
  misc_RNA (1)...(19): siRNA sense strand
gggcugagcauggagaaca

SEQ ID NO: 819339 - RNA, 19 nt, Homo sapiens
  misc_RNA (1)...(19): siRNA sense strand
gccaaccaccggaucaaug

SEQ ID NO: 819340 - RNA, 19 nt, Homo sapiens
  misc_RNA (1)...(19): siRNA sense strand
ggauuccucugccaaugac

SEQ ID NO: 819341 - RNA, 19 nt, Homo sapiens
  misc_RNA (1)...(19): siRNA sense strand
ucgcccagcuguacaugau

SEQ ID NO: 819342 - RNA, 19 nt, Homo sapiens
  misc_RNA (1)...(19): siRNA sense strand
caagaagggcgaugcuaac

SEQ ID NO: 819343 - RNA, 19 nt, Homo sapiens
  misc_RNA (1)...(19): siRNA sense strand
gcuggacauuggagaaguc

SEQ ID NO: 819344 - RNA, 19 nt, Homo sapiens
  misc_RNA (1)...(19): siRNA sense strand
ggcccgacaugcagaagca

SEQ ID NO: 819345 - RNA, 19 nt, Homo sapiens
  misc_RNA (1)...(19): siRNA sense strand
acagugggcgugucuccua

SEQ ID NO: 819346 - RNA, 19 nt, Homo sapiens
  misc_RNA (1)...(19): siRNA sense strand
gaucgacuacgcccuguac

SEQ ID NO: 819347 - RNA, 19 nt, Homo sapiens
  misc_RNA (1)...(19): siRNA sense strand
caucaugugcgcauacaag

SEQ ID NO: 819348 - RNA, 19 nt, Homo sapiens
  misc_RNA (1)...(19): siRNA sense strand
caaugaugcccuugccaau

SEQ ID NO: 819349 - RNA, 19 nt, Homo sapiens
  misc_RNA (1)...(19): siRNA sense strand
ccgaugcgcucagccauac

SEQ ID NO: 819350 - RNA, 19 nt, Homo sapiens
  misc_RNA (1)...(19): siRNA sense strand
acaaugcagccuuccaaga

SEQ ID NO: 819351 - RNA, 19 nt, Homo sapiens
  misc_RNA (1)...(19): siRNA sense strand
ucagcaugcaggacaauga

SEQ ID NO: 819352 - RNA, 19 nt, Homo sapiens
  misc_RNA (1)...(19): siRNA sense strand
uggaggaugcagaguauug

SEQ ID NO: 819353 - RNA, 19 nt, Homo sapiens
  misc_RNA (1)...(19): siRNA sense strand
ggagaaacuucaaggaaua

SEQ ID NO: 819354 - RNA, 19 nt, Homo sapiens
  misc_RNA (1)...(19): siRNA sense strand
gaugaaagguggaaacaaa

SEQ ID NO: 819355 - RNA, 19 nt, Homo sapiens
  misc_RNA (1)...(19): siRNA sense strand
caaauuggcuuguucuaaa

SEQ ID NO: 819356 - RNA, 19 nt, Homo sapiens
  misc_RNA (1)...(19): siRNA sense strand
gaaagcaaaucugaaagua

SEQ ID NO: 819357 - RNA, 19 nt, Homo sapiens
  misc_RNA (1)...(19): siRNA sense strand
gaaaguagcaacaauagaa

SEQ ID NO: 819358 - RNA, 19 nt, Homo sapiens
  misc_RNA (1)...(19): siRNA sense strand
ggagaucagucguuucuuu

SEQ ID NO: 819359 - RNA, 19 nt, Homo sapiens
  misc_RNA (1)...(19): siRNA sense strand
gcaauaagauggaccuuuc

SEQ ID NO: 819360 - RNA, 19 nt, Homo sapiens
  misc_RNA (1)...(19): siRNA sense strand
aaacagaacugacuuagau

SEQ ID NO: 819361 - RNA, 19 nt, Homo sapiens
  misc_RNA (1)...(19): siRNA sense strand
gcacaaagccagucucuga

SEQ ID NO: 819362 - RNA, 19 nt, Homo sapiens
  misc_RNA (1)...(19): siRNA sense strand
ucaagugccuccuccauua

SEQ ID NO: 819363 - RNA, 19 nt, Homo sapiens
  misc_RNA (1)...(19): siRNA sense strand
ggaagagucuccauuuguu

SEQ ID NO: 819364 - RNA, 19 nt, Homo sapiens
  misc_RNA (1)...(19): siRNA sense strand
gcaacaaucucgucaacuu

SEQ ID NO: 819365 - RNA, 19 nt, Homo sapiens
  misc_RNA (1)...(19): siRNA sense strand
gaacacaucuuuggaucaa

SEQ ID NO: 819366 - RNA, 19 nt, Homo sapiens
  misc_RNA (1)...(19): siRNA sense strand
gaaaugacuggaccaaaua

SEQ ID NO: 819367 - RNA, 19 nt, Homo sapiens
  misc_RNA (1)...(19): siRNA sense strand
gaaagguuauccaaacauu

SEQ ID NO: 819368 - RNA, 19 nt, Homo sapiens
  misc_RNA (1)...(19): siRNA sense strand
gaagaagcguggauaaauc

SEQ ID NO: 819369 - RNA, 19 nt, Homo sapiens
  misc_RNA (1)...(19): siRNA sense strand
ggagaaggcugcauggaau

SEQ ID NO: 819370 - RNA, 19 nt, Homo sapiens
  misc_RNA (1)...(19): siRNA sense strand
gaauggagauagauaaaca

SEQ ID NO: 819371 - RNA, 19 nt, Homo sapiens
  misc_RNA (1)...(19): siRNA sense strand
ggaacaaacugccuagcaa

SEQ ID NO: 819372 - RNA, 19 nt, Homo sapiens
  misc_RNA (1)...(19): siRNA sense strand
gaaccucccucacggaaau

SEQ ID NO: 819373 - RNA, 19 nt, Homo sapiens
  misc_RNA (1)...(19): siRNA sense strand
aaagauggccuucggaaua

SEQ ID NO: 819374 - RNA, 19 nt, Homo sapiens
  misc_RNA (1)...(19): siRNA sense strand
ggaagaggauguggagauu

SEQ ID NO: 819375 - RNA, 19 nt, Homo sapiens
  misc_RNA (1)...(19): siRNA sense strand
acaaauggauggaaaucua

SEQ ID NO: 819376 - RNA, 19 nt, Homo sapiens
  misc_RNA (1)...(19): siRNA sense strand
gaacaagcaacaagacauu

SEQ ID NO: 819377 - RNA, 19 nt, Homo sapiens
  misc_RNA (1)...(19): siRNA sense strand
ugaaaugacuggaccaaau

SEQ ID NO: 819378 - RNA, 19 nt, Homo sapiens
  misc_RNA (1)...(19): siRNA sense strand
ggaggaauguuacaagaca

SEQ ID NO: 819379 - RNA, 19 nt, Homo sapiens
  misc_RNA (1)...(19): siRNA sense strand
gggagaaacuucaaggaau

SEQ ID NO: 819380 - RNA, 19 nt, Homo sapiens
  misc_RNA (1)...(19): siRNA sense strand
uaauuacucuggagacaaa

SEQ ID NO: 819381 - RNA, 19 nt, Homo sapiens
  misc_RNA (1)...(19): siRNA sense strand
aaagggccaucaccaauaa

SEQ ID NO: 819382 - RNA, 19 nt, Homo sapiens
  misc_RNA (1)...(19): siRNA sense strand
ccacaagcauuaagcaaau

SEQ ID NO: 819383 - RNA, 19 nt, Homo sapiens
  misc_RNA (1)...(19): siRNA sense strand
gagagaaacaucacuauca

SEQ ID NO: 819384 - RNA, 19 nt, Homo sapiens
  misc_RNA (1)...(19): siRNA sense strand
gagauuggaauguggaaua

SEQ ID NO: 819385 - RNA, 19 nt, Homo sapiens
  misc_RNA (1)...(19): siRNA sense strand
ggaaacaacauaaauccaa

SEQ ID NO: 819386 - RNA, 19 nt, Homo sapiens
  misc_RNA (1)...(19): siRNA sense strand
gaccaaauaacacuacuaa

SEQ ID NO: 819387 - RNA, 19 nt, Homo sapiens
  misc_RNA (1)...(19): siRNA sense strand
aaacaacgguggccugaau

SEQ ID NO: 819388 - RNA, 19 nt, Homo sapiens
  misc_RNA (1)...(19): siRNA sense strand
ugauaaggauggcauugua

SEQ ID NO: 819389 - RNA, 19 nt, Homo sapiens
  misc_RNA (1)...(19): siRNA sense strand
ccaaauaauucaucaggau

SEQ ID NO: 819390 - RNA, 19 nt, Homo sapiens
  misc_RNA (1)...(19): siRNA sense strand
ccacaucucagacaaauga

SEQ ID NO: 819391 - RNA, 19 nt, Homo sapiens
  misc_RNA (1)...(19): siRNA sense strand
ggaaaucuacugaggaaga

SEQ ID NO: 819392 - RNA, 19 nt, Homo sapiens
  misc_RNA (1)...(19): siRNA sense strand
gaagaugauucugcugcua

SEQ ID NO: 819393 - RNA, 19 nt, Homo sapiens
  misc_RNA (1)...(19): siRNA sense strand
uaaaccagcuuucucagau

SEQ ID NO: 819394 - RNA, 19 nt, Homo sapiens
  misc_RNA (1)...(19): siRNA sense strand
gaauagcacuggacuuggu

SEQ ID NO: 819395 - RNA, 19 nt, Homo sapiens
  misc_RNA (1)...(19): siRNA sense strand
ucaggaaacuugugaaucu

SEQ ID NO: 819396 - RNA, 19 nt, Homo sapiens
  misc_RNA (1)...(19): siRNA sense strand
gccuaaauauuggugauua

SEQ ID NO: 819397 - RNA, 19 nt, Homo sapiens
  misc_RNA (1)...(19): siRNA sense strand
ggagauagauaaacauagc

SEQ ID NO: 819398 - RNA, 19 nt, Homo sapiens
  misc_RNA (1)...(19): siRNA sense strand
gauaugccauugccuggaa

SEQ ID NO: 819399 - RNA, 19 nt, Homo sapiens
  misc_RNA (1)...(19): siRNA sense strand
ccaaagcauuguaaacaga

SEQ ID NO: 819400 - RNA, 19 nt, Homo sapiens
  misc_RNA (1)...(19): siRNA sense strand
ggagagcgaugguaguaca

SEQ ID NO: 819401 - RNA, 19 nt, Homo sapiens
  misc_RNA (1)...(19): siRNA sense strand
auaaugagcugccuaguag

SEQ ID NO: 819402 - RNA, 19 nt, Homo sapiens
  misc_RNA (1)...(19): siRNA sense strand
guacacagaagguuucauu

SEQ ID NO: 819403 - RNA, 19 nt, Homo sapiens
  misc_RNA (1)...(19): siRNA sense strand
gaauggcacuucccuuucu

SEQ ID NO: 819404 - RNA, 19 nt, Homo sapiens
  misc_RNA (1)...(19): siRNA sense strand
ggccucagauuuccaaaga

SEQ ID NO: 819405 - RNA, 19 nt, Homo sapiens
  misc_RNA (1)...(19): siRNA sense strand
caagugccaucucaaacaa

SEQ ID NO: 819406 - RNA, 19 nt, Homo sapiens
  misc_RNA (1)...(19): siRNA sense strand
gaaguaagugguacacaga

SEQ ID NO: 819407 - RNA, 19 nt, Homo sapiens
  misc_RNA (1)...(19): siRNA sense strand
ccaguuacagcgauuguua

SEQ ID NO: 819408 - RNA, 19 nt, Homo sapiens
  misc_RNA (1)...(19): siRNA sense strand
cagcacacauuacuccaaa

SEQ ID NO: 819409 - RNA, 19 nt, Homo sapiens
  misc_RNA (1)...(19): siRNA sense strand
gaauucagcuagcaaccau

SEQ ID NO: 819410 - RNA, 19 nt, Homo sapiens
  misc_RNA (1)...(19): siRNA sense strand
ggaccuuucuggaggaaug

SEQ ID NO: 819411 - RNA, 19 nt, Homo sapiens
  misc_RNA (1)...(19): siRNA sense strand
gcaaauggcaaugguaaga

SEQ ID NO: 819412 - RNA, 19 nt, Homo sapiens
  misc_RNA (1)...(19): siRNA sense strand
ggaaacuugugaaucugaa

SEQ ID NO: 819413 - RNA, 19 nt, Homo sapiens
  misc_RNA (1)...(19): siRNA sense strand
acaauggacuugcccuaaa

SEQ ID NO: 819414 - RNA, 19 nt, Homo sapiens
  misc_RNA (1)...(19): siRNA sense strand
gcacaugucaggucucugu

SEQ ID NO: 819415 - RNA, 19 nt, Homo sapiens
  misc_RNA (1)...(19): siRNA sense strand
ccauggagcgcaauccuua

SEQ ID NO: 819416 - RNA, 19 nt, Homo sapiens
  misc_RNA (1)...(19): siRNA sense strand
caaacauggugcuauuuca

SEQ ID NO: 819417 - RNA, 19 nt, Homo sapiens
  misc_RNA (1)...(19): siRNA sense strand
guaaguucuucaucaaaug

SEQ ID NO: 819418 - RNA, 19 nt, Homo sapiens
  misc_RNA (1)...(19): siRNA sense strand
gcaaacauggugcuauuuc

SEQ ID NO: 819419 - RNA, 19 nt, Homo sapiens
  misc_RNA (1)...(19): siRNA sense strand
gaauggcaaucccaguaug

SEQ ID NO: 819420 - RNA, 19 nt, Homo sapiens
  misc_RNA (1)...(19): siRNA sense strand
caagaagaagcguggauaa

SEQ ID NO: 819421 - RNA, 19 nt, Homo sapiens
  misc_RNA (1)...(19): siRNA sense strand
caaagaaaaugucaucgaa

SEQ ID NO: 819422 - RNA, 19 nt, Homo sapiens
  misc_RNA (1)...(19): siRNA sense strand
ggaugaaucuucuaaaccu

SEQ ID NO: 819423 - RNA, 19 nt, Homo sapiens
  misc_RNA (1)...(19): siRNA sense strand
gaacaaacugccuagcaau

SEQ ID NO: 819424 - RNA, 19 nt, Homo sapiens
  misc_RNA (1)...(19): siRNA sense strand
ccaaauaacacuacuaacu

SEQ ID NO: 819425 - RNA, 19 nt, Homo sapiens
  misc_RNA (1)...(19): siRNA sense strand
ucagggagaauaacaaauu

SEQ ID NO: 819426 - RNA, 19 nt, Homo sapiens
  misc_RNA (1)...(19): siRNA sense strand
cagcagggucgaccucuua

SEQ ID NO: 819427 - RNA, 19 nt, Homo sapiens
  misc_RNA (1)...(19): siRNA sense strand
guugguagcagcagcaaua

SEQ ID NO: 819428 - RNA, 19 nt, Homo sapiens
  misc_RNA (1)...(19): siRNA sense strand
gaugaaucuucuaaaccua

SEQ ID NO: 819429 - RNA, 19 nt, Homo sapiens
  misc_RNA (1)...(19): siRNA sense strand
aauauucagugcaguacua

SEQ ID NO: 819430 - RNA, 19 nt, Homo sapiens
  misc_RNA (1)...(19): siRNA sense strand
cagaaauagugauuccaaa

SEQ ID NO: 819431 - RNA, 19 nt, Homo sapiens
  misc_RNA (1)...(19): siRNA sense strand
uaauucaucucaagagcuu

SEQ ID NO: 819432 - RNA, 19 nt, Homo sapiens
  misc_RNA (1)...(19): siRNA sense strand
gcaagugccaucucaaaca

SEQ ID NO: 819433 - RNA, 19 nt, Homo sapiens
  misc_RNA (1)...(19): siRNA sense strand
ggagauugaugauggaacu

SEQ ID NO: 819434 - RNA, 19 nt, Homo sapiens
  misc_RNA (1)...(19): siRNA sense strand
gugccuaugguucuaauua

SEQ ID NO: 819435 - RNA, 19 nt, Homo sapiens
  misc_RNA (1)...(19): siRNA sense strand
gaagaggagaucagucguu

SEQ ID NO: 819436 - RNA, 19 nt, Homo sapiens
  misc_RNA (1)...(19): siRNA sense strand
gacauggucuccugguuca

SEQ ID NO: 819437 - RNA, 19 nt, Homo sapiens
  misc_RNA (1)...(19): siRNA sense strand
uaacggcucuagcaguguu

SEQ ID NO: 819438 - RNA, 19 nt, Homo sapiens
  misc_RNA (1)...(19): siRNA sense strand
caguuuauguccagucaaa

SEQ ID NO: 819439 - RNA, 19 nt, Homo sapiens
  misc_RNA (1)...(19): siRNA sense strand
gguagcagcagcaauaaug

SEQ ID NO: 819440 - RNA, 19 nt, Homo sapiens
  misc_RNA (1)...(19): siRNA sense strand
cucaagagcuuaacucauc

SEQ ID NO: 819441 - RNA, 19 nt, Homo sapiens
  misc_RNA (1)...(19): siRNA sense strand
ggaauguggaauaguaauu

SEQ ID NO: 819442 - RNA, 19 nt, Homo sapiens
  misc_RNA (1)...(19): siRNA sense strand
gauaagacuagcccuaaug

SEQ ID NO: 819443 - RNA, 19 nt, Homo sapiens
  misc_RNA (1)...(19): siRNA sense strand
ccgguucagugcagaauaa

SEQ ID NO: 819444 - RNA, 19 nt, Homo sapiens
  misc_RNA (1)...(19): siRNA sense strand
cuacuauucuugcugaguu

SEQ ID NO: 819445 - RNA, 19 nt, Homo sapiens
  misc_RNA (1)...(19): siRNA sense strand
ggugagccauggaaagguu

SEQ ID NO: 819446 - RNA, 19 nt, Homo sapiens
  misc_RNA (1)...(19): siRNA sense strand
caucaccaauaaaugcuuu

SEQ ID NO: 819447 - RNA, 19 nt, Homo sapiens
  misc_RNA (1)...(19): siRNA sense strand
aaacgaauggagauagaua

SEQ ID NO: 819448 - RNA, 19 nt, Homo sapiens
  misc_RNA (1)...(19): siRNA sense strand
uaaauuggccaccauauac

SEQ ID NO: 819449 - RNA, 19 nt, Homo sapiens
  misc_RNA (1)...(19): siRNA sense strand
gaacgaaagacugacaaug

SEQ ID NO: 819450 - RNA, 19 nt, Homo sapiens
  misc_RNA (1)...(19): siRNA sense strand
guucagugcagaauaauga

SEQ ID NO: 819451 - RNA, 19 nt, Homo sapiens
  misc_RNA (1)...(19): siRNA sense strand
acaccucucuggcucauga

SEQ ID NO: 819452 - RNA, 19 nt, Homo sapiens
  misc_RNA (1)...(19): siRNA sense strand
ggaauuagcagcccaucuc

SEQ ID NO: 819453 - RNA, 19 nt, Homo sapiens
  misc_RNA (1)...(19): siRNA sense strand
ggagaaacuucaaggaaua

SEQ ID NO: 819454 - RNA, 19 nt, Homo sapiens
  misc_RNA (1)...(19): siRNA sense strand
gaugaaagguggaaacaaa

SEQ ID NO: 819455 - RNA, 19 nt, Homo sapiens
  misc_RNA (1)...(19): siRNA sense strand
caaauuggcuuguucuaaa

SEQ ID NO: 819456 - RNA, 19 nt, Homo sapiens
  misc_RNA (1)...(19): siRNA sense strand
gaaagcaaaucugaaagua

SEQ ID NO: 819457 - RNA, 19 nt, Homo sapiens
  misc_RNA (1)...(19): siRNA sense strand
gaaaguagcaacaauagaa

SEQ ID NO: 819458 - RNA, 19 nt, Homo sapiens
  misc_RNA (1)...(19): siRNA sense strand
ggagaucagucguuucuuu

SEQ ID NO: 819459 - RNA, 19 nt, Homo sapiens
  misc_RNA (1)...(19): siRNA sense strand
ggaguuggcuucagaaugu

SEQ ID NO: 819460 - RNA, 19 nt, Homo sapiens
  misc_RNA (1)...(19): siRNA sense strand
gcaauaagauggaccuuuc

SEQ ID NO: 819461 - RNA, 19 nt, Homo sapiens
  misc_RNA (1)...(19): siRNA sense strand
aaacagaacugacuuagau

SEQ ID NO: 819462 - RNA, 19 nt, Homo sapiens
  misc_RNA (1)...(19): siRNA sense strand
gcacaaagccagucucuga

SEQ ID NO: 819463 - RNA, 19 nt, Homo sapiens
  misc_RNA (1)...(19): siRNA sense strand
ucaagugccuccuccauua

SEQ ID NO: 819464 - RNA, 19 nt, Homo sapiens
  misc_RNA (1)...(19): siRNA sense strand
ggaagagucuccauuuguu

SEQ ID NO: 819465 - RNA, 19 nt, Homo sapiens
  misc_RNA (1)...(19): siRNA sense strand
gcaacaaucucgucaacuu

SEQ ID NO: 819466 - RNA, 19 nt, Homo sapiens
  misc_RNA (1)...(19): siRNA sense strand
gaacacaucuuuggaucaa

SEQ ID NO: 819467 - RNA, 19 nt, Homo sapiens
  misc_RNA (1)...(19): siRNA sense strand
gaaaugacuggaccaaaua

SEQ ID NO: 819468 - RNA, 19 nt, Homo sapiens
  misc_RNA (1)...(19): siRNA sense strand
gaaagguuauccaaacauu

SEQ ID NO: 819469 - RNA, 19 nt, Homo sapiens
  misc_RNA (1)...(19): siRNA sense strand
gaagaagcguggauaaauc

SEQ ID NO: 819470 - RNA, 19 nt, Homo sapiens
  misc_RNA (1)...(19): siRNA sense strand
ggagaaggcugcauggaau

SEQ ID NO: 819471 - RNA, 19 nt, Homo sapiens
  misc_RNA (1)...(19): siRNA sense strand
gaauggagauagauaaaca

SEQ ID NO: 819472 - RNA, 19 nt, Homo sapiens
  misc_RNA (1)...(19): siRNA sense strand
ggaacaaacugccuagcaa

SEQ ID NO: 819473 - RNA, 19 nt, Homo sapiens
  misc_RNA (1)...(19): siRNA sense strand
gaaccucccucacggaaau

SEQ ID NO: 819474 - RNA, 19 nt, Homo sapiens
  misc_RNA (1)...(19): siRNA sense strand
aaagauggccuucggaaua

SEQ ID NO: 819475 - RNA, 19 nt, Homo sapiens
  misc_RNA (1)...(19): siRNA sense strand
ggaagaggauguggagauu

SEQ ID NO: 819476 - RNA, 19 nt, Homo sapiens
  misc_RNA (1)...(19): siRNA sense strand
acaaauggauggaaaucua

SEQ ID NO: 819477 - RNA, 19 nt, Homo sapiens
  misc_RNA (1)...(19): siRNA sense strand
gaacaagcaacaagacauu

SEQ ID NO: 819478 - RNA, 19 nt, Homo sapiens
  misc_RNA (1)...(19): siRNA sense strand
uaagaaugcuguuguaagu

SEQ ID NO: 819479 - RNA, 19 nt, Homo sapiens
  misc_RNA (1)...(19): siRNA sense strand
ugaaaugacuggaccaaau

SEQ ID NO: 819480 - RNA, 19 nt, Homo sapiens
  misc_RNA (1)...(19): siRNA sense strand
ggaggaauguuacaagaca

SEQ ID NO: 819481 - RNA, 19 nt, Homo sapiens
  misc_RNA (1)...(19): siRNA sense strand
gggagaaacuucaaggaau

SEQ ID NO: 819482 - RNA, 19 nt, Homo sapiens
  misc_RNA (1)...(19): siRNA sense strand
uaauuacucuggagacaaa

SEQ ID NO: 819483 - RNA, 19 nt, Homo sapiens
  misc_RNA (1)...(19): siRNA sense strand
aaagggccaucaccaauaa

SEQ ID NO: 819484 - RNA, 19 nt, Homo sapiens
  misc_RNA (1)...(19): siRNA sense strand
ccacaagcauuaagcaaau

SEQ ID NO: 819485 - RNA, 19 nt, Homo sapiens
  misc_RNA (1)...(19): siRNA sense strand
gagagaaacaucacuauca

SEQ ID NO: 819486 - RNA, 19 nt, Homo sapiens
  misc_RNA (1)...(19): siRNA sense strand
gagauuggaauguggaaua

SEQ ID NO: 819487 - RNA, 19 nt, Homo sapiens
  misc_RNA (1)...(19): siRNA sense strand
ggaaacaacauaaauccaa

SEQ ID NO: 819488 - RNA, 19 nt, Homo sapiens
  misc_RNA (1)...(19): siRNA sense strand
gaccaaauaacacuacuaa

SEQ ID NO: 819489 - RNA, 19 nt, Homo sapiens
  misc_RNA (1)...(19): siRNA sense strand
aaacaacgguggccugaau

SEQ ID NO: 819490 - RNA, 19 nt, Homo sapiens
  misc_RNA (1)...(19): siRNA sense strand
ugauaaggauggcauugua

SEQ ID NO: 819491 - RNA, 19 nt, Homo sapiens
  misc_RNA (1)...(19): siRNA sense strand
ccaaauaauucaucaggau

SEQ ID NO: 819492 - RNA, 19 nt, Homo sapiens
  misc_RNA (1)...(19): siRNA sense strand
ccacaucucagacaaauga

SEQ ID NO: 819493 - RNA, 19 nt, Homo sapiens
  misc_RNA (1)...(19): siRNA sense strand
ggaaaucuacugaggaaga

SEQ ID NO: 819494 - RNA, 19 nt, Homo sapiens
  misc_RNA (1)...(19): siRNA sense strand
gaauagcacuggacuuggu

SEQ ID NO: 819495 - RNA, 19 nt, Homo sapiens
  misc_RNA (1)...(19): siRNA sense strand
uaaaccagcuuucucagau

SEQ ID NO: 819496 - RNA, 19 nt, Homo sapiens
  misc_RNA (1)...(19): siRNA sense strand
gaagaugauucugcugcua

SEQ ID NO: 819497 - RNA, 19 nt, Homo sapiens
  misc_RNA (1)...(19): siRNA sense strand
ucaggaaacuugugaaucu

SEQ ID NO: 819498 - RNA, 19 nt, Homo sapiens
  misc_RNA (1)...(19): siRNA sense strand
gccuaaauauuggugauua

SEQ ID NO: 819499 - RNA, 19 nt, Homo sapiens
  misc_RNA (1)...(19): siRNA sense strand
ggagauagauaaacauagc

SEQ ID NO: 819500 - RNA, 19 nt, Homo sapiens
  misc_RNA (1)...(19): siRNA sense strand
gauaugccauugccuggaa

SEQ ID NO: 819501 - RNA, 19 nt, Homo sapiens
  misc_RNA (1)...(19): siRNA sense strand
ccaaagcauuguaaacaga

SEQ ID NO: 819502 - RNA, 19 nt, Homo sapiens
  misc_RNA (1)...(19): siRNA sense strand
ggagagcgaugguaguaca

SEQ ID NO: 819503 - RNA, 19 nt, Homo sapiens
  misc_RNA (1)...(19): siRNA sense strand
auaaugagcugccuaguag

SEQ ID NO: 819504 - RNA, 19 nt, Homo sapiens
  misc_RNA (1)...(19): siRNA sense strand
guacacagaagguuucauu

SEQ ID NO: 819505 - RNA, 19 nt, Homo sapiens
  misc_RNA (1)...(19): siRNA sense strand
ggaccugugucuucuacaa

SEQ ID NO: 819506 - RNA, 19 nt, Homo sapiens
  misc_RNA (1)...(19): siRNA sense strand
gaauggcacuucccuuucu

SEQ ID NO: 819507 - RNA, 19 nt, Homo sapiens
  misc_RNA (1)...(19): siRNA sense strand
ggccucagauuuccaaaga

SEQ ID NO: 819508 - RNA, 19 nt, Homo sapiens
  misc_RNA (1)...(19): siRNA sense strand
caagugccaucucaaacaa

SEQ ID NO: 819509 - RNA, 19 nt, Homo sapiens
  misc_RNA (1)...(19): siRNA sense strand
gaaguaagugguacacaga

SEQ ID NO: 819510 - RNA, 19 nt, Homo sapiens
  misc_RNA (1)...(19): siRNA sense strand
ccaguuacagcgauuguua

SEQ ID NO: 819511 - RNA, 19 nt, Homo sapiens
  misc_RNA (1)...(19): siRNA sense strand
cagcacacauuacuccaaa

SEQ ID NO: 819512 - RNA, 19 nt, Homo sapiens
  misc_RNA (1)...(19): siRNA sense strand
agaaugcuguuguaaguga

SEQ ID NO: 819513 - RNA, 19 nt, Homo sapiens
  misc_RNA (1)...(19): siRNA sense strand
ggaccuuucuggaggaaug

SEQ ID NO: 819514 - RNA, 19 nt, Homo sapiens
  misc_RNA (1)...(19): siRNA sense strand
gaucugcuguuaagguguu

SEQ ID NO: 819515 - RNA, 19 nt, Homo sapiens
  misc_RNA (1)...(19): siRNA sense strand
gcaaauggcaaugguaaga

SEQ ID NO: 819516 - RNA, 19 nt, Homo sapiens
  misc_RNA (1)...(19): siRNA sense strand
ggaaacuugugaaucugaa

SEQ ID NO: 819517 - RNA, 19 nt, Homo sapiens
  misc_RNA (1)...(19): siRNA sense strand
acaauggacuugcccuaaa

SEQ ID NO: 819518 - RNA, 19 nt, Homo sapiens
  misc_RNA (1)...(19): siRNA sense strand
gaauucagcuagcaaccau

SEQ ID NO: 819519 - RNA, 19 nt, Homo sapiens
  misc_RNA (1)...(19): siRNA sense strand
gcacaugucaggucucugu

SEQ ID NO: 819520 - RNA, 19 nt, Homo sapiens
  misc_RNA (1)...(19): siRNA sense strand
ccauggagcgcaauccuua

SEQ ID NO: 819521 - RNA, 19 nt, Homo sapiens
  misc_RNA (1)...(19): siRNA sense strand
gcagugcuuuaacaaauca

SEQ ID NO: 819522 - RNA, 19 nt, Homo sapiens
  misc_RNA (1)...(19): siRNA sense strand
caaacauggugcuauuuca

SEQ ID NO: 819523 - RNA, 19 nt, Homo sapiens
  misc_RNA (1)...(19): siRNA sense strand
guaaguucuucaucaaaug

SEQ ID NO: 819524 - RNA, 19 nt, Homo sapiens
  misc_RNA (1)...(19): siRNA sense strand
gcaaacauggugcuauuuc

SEQ ID NO: 819525 - RNA, 19 nt, Homo sapiens
  misc_RNA (1)...(19): siRNA sense strand
gaauggcaaucccaguaug

SEQ ID NO: 819526 - RNA, 19 nt, Homo sapiens
  misc_RNA (1)...(19): siRNA sense strand
caagaagaagcguggauaa

SEQ ID NO: 819527 - RNA, 19 nt, Homo sapiens
  misc_RNA (1)...(19): siRNA sense strand
caaagaaaaugucaucgaa

SEQ ID NO: 819528 - RNA, 19 nt, Homo sapiens
  misc_RNA (1)...(19): siRNA sense strand
ggaugaaucuucuaaaccu

SEQ ID NO: 819529 - RNA, 19 nt, Homo sapiens
  misc_RNA (1)...(19): siRNA sense strand
gaacaaacugccuagcaau

SEQ ID NO: 819530 - RNA, 19 nt, Homo sapiens
  misc_RNA (1)...(19): siRNA sense strand
guugguagcagcagcaaua

SEQ ID NO: 819531 - RNA, 19 nt, Homo sapiens
  misc_RNA (1)...(19): siRNA sense strand
ucagggagaauaacaaauu

SEQ ID NO: 819532 - RNA, 19 nt, Homo sapiens
  misc_RNA (1)...(19): siRNA sense strand
cagcagggucgaccucuua

SEQ ID NO: 819533 - RNA, 19 nt, Homo sapiens
  misc_RNA (1)...(19): siRNA sense strand
gaugaaucuucuaaaccua

SEQ ID NO: 819534 - RNA, 19 nt, Homo sapiens
  misc_RNA (1)...(19): siRNA sense strand
ccaaauaacacuacuaacu

SEQ ID NO: 819535 - RNA, 19 nt, Homo sapiens
  misc_RNA (1)...(19): siRNA sense strand
aauauucagugcaguacua

SEQ ID NO: 819536 - RNA, 19 nt, Homo sapiens
  misc_RNA (1)...(19): siRNA sense strand
cagaaauagugauuccaaa

SEQ ID NO: 819537 - RNA, 19 nt, Homo sapiens
  misc_RNA (1)...(19): siRNA sense strand
uaauucaucucaagagcuu

SEQ ID NO: 819538 - RNA, 19 nt, Homo sapiens
  misc_RNA (1)...(19): siRNA sense strand
gcaagugccaucucaaaca

SEQ ID NO: 819539 - RNA, 19 nt, Homo sapiens
  misc_RNA (1)...(19): siRNA sense strand
ggagauugaugauggaacu

SEQ ID NO: 819540 - RNA, 19 nt, Homo sapiens
  misc_RNA (1)...(19): siRNA sense strand
gguagcagcagcaauaaug

SEQ ID NO: 819541 - RNA, 19 nt, Homo sapiens
  misc_RNA (1)...(19): siRNA sense strand
gaagaggagaucagucguu

SEQ ID NO: 819542 - RNA, 19 nt, Homo sapiens
  misc_RNA (1)...(19): siRNA sense strand
gacauggucuccugguuca

SEQ ID NO: 819543 - RNA, 19 nt, Homo sapiens
  misc_RNA (1)...(19): siRNA sense strand
uaacggcucuagcaguguu

SEQ ID NO: 819544 - RNA, 19 nt, Homo sapiens
  misc_RNA (1)...(19): siRNA sense strand
caguuuauguccagucaaa

SEQ ID NO: 819545 - RNA, 19 nt, Homo sapiens
  misc_RNA (1)...(19): siRNA sense strand
cucaagagcuuaacucauc

SEQ ID NO: 819546 - RNA, 19 nt, Homo sapiens
  misc_RNA (1)...(19): siRNA sense strand
ggaauguggaauaguaauu

SEQ ID NO: 819547 - RNA, 19 nt, Homo sapiens
  misc_RNA (1)...(19): siRNA sense strand
gauaagacuagcccuaaug

SEQ ID NO: 819548 - RNA, 19 nt, Homo sapiens
  misc_RNA (1)...(19): siRNA sense strand
gugccuaugguucuaauua

SEQ ID NO: 819549 - RNA, 19 nt, Homo sapiens
  misc_RNA (1)...(19): siRNA sense strand
aaacgaauggagauagaua

SEQ ID NO: 819550 - RNA, 19 nt, Homo sapiens
  misc_RNA (1)...(19): siRNA sense strand
cuacuauucuugcugaguu

SEQ ID NO: 819551 - RNA, 19 nt, Homo sapiens
  misc_RNA (1)...(19): siRNA sense strand
ggugagccauggaaagguu

SEQ ID NO: 819552 - RNA, 19 nt, Homo sapiens
  misc_RNA (1)...(19): siRNA sense strand
caucaccaauaaaugcuuu

SEQ ID NO: 819553 - RNA, 19 nt, Homo sapiens
  misc_RNA (1)...(19): siRNA sense strand
gcacaaccaauuugcauua

SEQ ID NO: 819554 - RNA, 19 nt, Homo sapiens
  misc_RNA (1)...(19): siRNA sense strand
gggaagggauaguggaaua

SEQ ID NO: 819555 - RNA, 19 nt, Homo sapiens
  misc_RNA (1)...(19): siRNA sense strand
gaaaguuuguacaggguaa

SEQ ID NO: 819556 - RNA, 19 nt, Homo sapiens
  misc_RNA (1)...(19): siRNA sense strand
caggaucaauuacauguuu

SEQ ID NO: 819557 - RNA, 19 nt, Homo sapiens
  misc_RNA (1)...(19): siRNA sense strand
ggaggucuauuucaugaga

SEQ ID NO: 819558 - RNA, 19 nt, Homo sapiens
  misc_RNA (1)...(19): siRNA sense strand
gcaguaccaugucucagaa

SEQ ID NO: 819559 - RNA, 19 nt, Homo sapiens
  misc_RNA (1)...(19): siRNA sense strand
gggauaccauugaauuuau

SEQ ID NO: 819560 - RNA, 19 nt, Homo sapiens
  misc_RNA (1)...(19): siRNA sense strand
ggaccuccuccaccuauua

SEQ ID NO: 819561 - RNA, 19 nt, Homo sapiens
  misc_RNA (1)...(19): siRNA sense strand
gauaccaccuccuuucuac

SEQ ID NO: 819562 - RNA, 19 nt, Homo sapiens
  misc_RNA (1)...(19): siRNA sense strand
ggaaguuacugggauuaca

SEQ ID NO: 819563 - RNA, 19 nt, Homo sapiens
  misc_RNA (1)...(19): siRNA sense strand
ggauaccauugaauuuaug

SEQ ID NO: 819564 - RNA, 19 nt, Homo sapiens
  misc_RNA (1)...(19): siRNA sense strand
gauggaaauucuucaggau

SEQ ID NO: 819565 - RNA, 19 nt, Homo sapiens
  misc_RNA (1)...(19): siRNA sense strand
cauuaaacauggaggucua

SEQ ID NO: 819566 - RNA, 19 nt, Homo sapiens
  misc_RNA (1)...(19): siRNA sense strand
ucaggguucuaauuaugua

SEQ ID NO: 819567 - RNA, 19 nt, Homo sapiens
  misc_RNA (1)...(19): siRNA sense strand
caggguaacucuacagaag

SEQ ID NO: 819568 - RNA, 19 nt, Homo sapiens
  misc_RNA (1)...(19): siRNA sense strand
aaacauggaggucuauuuc

SEQ ID NO: 819569 - RNA, 19 nt, Homo sapiens
  misc_RNA (1)...(19): siRNA sense strand
gagaauaugcguagaccau

SEQ ID NO: 819570 - RNA, 19 nt, Homo sapiens
  misc_RNA (1)...(19): siRNA sense strand
auucugaccuuguggguuu

SEQ ID NO: 819571 - RNA, 19 nt, Homo sapiens
  misc_RNA (1)...(19): siRNA sense strand
uaaacauggaggucuauuu

SEQ ID NO: 819572 - RNA, 19 nt, Homo sapiens
  misc_RNA (1)...(19): siRNA sense strand
ucaggaaguuacugggauu

SEQ ID NO: 819573 - RNA, 19 nt, Homo sapiens
  misc_RNA (1)...(19): siRNA sense strand
uggaaauucuucaggauca

SEQ ID NO: 819574 - RNA, 19 nt, Homo sapiens
  misc_RNA (1)...(19): siRNA sense strand
ggaaauucuucaggaucaa

SEQ ID NO: 819575 - RNA, 19 nt, Homo sapiens
  misc_RNA (1)...(19): siRNA sense strand
cacaaccaauuugcauuaa

SEQ ID NO: 819576 - RNA, 19 nt, Homo sapiens
  misc_RNA (1)...(19): siRNA sense strand
ggcaccaccuagaugcaua

SEQ ID NO: 819577 - RNA, 19 nt, Homo sapiens
  misc_RNA (1)...(19): siRNA sense strand
gggauauaaugcaaauaca

SEQ ID NO: 819578 - RNA, 19 nt, Homo sapiens
  misc_RNA (1)...(19): siRNA sense strand
gagacuccgucaggaaguu

SEQ ID NO: 819579 - RNA, 19 nt, Homo sapiens
  misc_RNA (1)...(19): siRNA sense strand
cuucaggguucuaauuaug

SEQ ID NO: 819580 - RNA, 19 nt, Homo sapiens
  misc_RNA (1)...(19): siRNA sense strand
ccaccuccuuucuacuaaa

SEQ ID NO: 819581 - RNA, 19 nt, Homo sapiens
  misc_RNA (1)...(19): siRNA sense strand
ggucagcacaaccaauuug

SEQ ID NO: 819582 - RNA, 19 nt, Homo sapiens
  misc_RNA (1)...(19): siRNA sense strand
gaaguuacugggauuacau

SEQ ID NO: 819583 - RNA, 19 nt, Homo sapiens
  misc_RNA (1)...(19): siRNA sense strand
gacagaacaugcucaaaau

SEQ ID NO: 819584 - RNA, 19 nt, Homo sapiens
  misc_RNA (1)...(19): siRNA sense strand
gaagaagugacagaaaaua

SEQ ID NO: 819585 - RNA, 19 nt, Homo sapiens
  misc_RNA (1)...(19): siRNA sense strand
ccuauuagcaauggugaua

SEQ ID NO: 819586 - RNA, 19 nt, Homo sapiens
  misc_RNA (1)...(19): siRNA sense strand
caacagcagauggaaauuc

SEQ ID NO: 819587 - RNA, 19 nt, Homo sapiens
  misc_RNA (1)...(19): siRNA sense strand
cugaaucuuccucuauuua

SEQ ID NO: 819588 - RNA, 19 nt, Homo sapiens
  misc_RNA (1)...(19): siRNA sense strand
uuacugggauuacauucau

SEQ ID NO: 819589 - RNA, 19 nt, Homo sapiens
  misc_RNA (1)...(19): siRNA sense strand
ucugaaucuuccucuauuu

SEQ ID NO: 819590 - RNA, 19 nt, Homo sapiens
  misc_RNA (1)...(19): siRNA sense strand
uuacauucauugcacacaa

SEQ ID NO: 819591 - RNA, 19 nt, Homo sapiens
  misc_RNA (1)...(19): siRNA sense strand
agugaaaccuugugauuuu

SEQ ID NO: 819592 - RNA, 19 nt, Homo sapiens
  misc_RNA (1)...(19): siRNA sense strand
uacauucauugcacacaaa

SEQ ID NO: 819593 - RNA, 19 nt, Homo sapiens
  misc_RNA (1)...(19): siRNA sense strand
gaaauucuucaggaucaau

SEQ ID NO: 819594 - RNA, 19 nt, Homo sapiens
  misc_RNA (1)...(19): siRNA sense strand
uguaacauguaguaaugga

SEQ ID NO: 819595 - RNA, 19 nt, Homo sapiens
  misc_RNA (1)...(19): siRNA sense strand
ccaaugccaguccuacuau

SEQ ID NO: 819596 - RNA, 19 nt, Homo sapiens
  misc_RNA (1)...(19): siRNA sense strand
uaccaccuccuuucuacua

SEQ ID NO: 819597 - RNA, 19 nt, Homo sapiens
  misc_RNA (1)...(19): siRNA sense strand
acauggaggucuauuucau

SEQ ID NO: 819598 - RNA, 19 nt, Homo sapiens
  misc_RNA (1)...(19): siRNA sense strand
uccaguagcuguaggaaaa

SEQ ID NO: 819599 - RNA, 19 nt, Homo sapiens
  misc_RNA (1)...(19): siRNA sense strand
ggggauaccauugaauuua

SEQ ID NO: 819600 - RNA, 19 nt, Homo sapiens
  misc_RNA (1)...(19): siRNA sense strand
cagcagauggaaauucuuc

SEQ ID NO: 819601 - RNA, 19 nt, Homo sapiens
  misc_RNA (1)...(19): siRNA sense strand
auggaggucuauuucauga

SEQ ID NO: 819602 - RNA, 19 nt, Homo sapiens
  misc_RNA (1)...(19): siRNA sense strand
caaugccaguccuacuaug

SEQ ID NO: 819603 - RNA, 19 nt, Homo sapiens
  misc_RNA (1)...(19): siRNA sense strand
gaggucuauuucaugagaa

SEQ ID NO: 819604 - RNA, 19 nt, Homo sapiens
  misc_RNA (1)...(19): siRNA sense strand
uuacauguacggagaaugg

SEQ ID NO: 819605 - RNA, 19 nt, Homo sapiens
  misc_RNA (1)...(19): siRNA sense strand
guaaauugggauauaaugc

SEQ ID NO: 819606 - RNA, 19 nt, Homo sapiens
  misc_RNA (1)...(19): siRNA sense strand
aaaggaagaagugacagaa

SEQ ID NO: 819607 - RNA, 19 nt, Homo sapiens
  misc_RNA (1)...(19): siRNA sense strand
ugauaccaccuccuuucua

SEQ ID NO: 819608 - RNA, 19 nt, Homo sapiens
  misc_RNA (1)...(19): siRNA sense strand
agacagaacaugcucaaaa

SEQ ID NO: 819609 - RNA, 19 nt, Homo sapiens
  misc_RNA (1)...(19): siRNA sense strand
cauccuggcuacggucuuc

SEQ ID NO: 819610 - RNA, 19 nt, Homo sapiens
  misc_RNA (1)...(19): siRNA sense strand
aggaagaagugacagaaaa

SEQ ID NO: 819611 - RNA, 19 nt, Homo sapiens
  misc_RNA (1)...(19): siRNA sense strand
ggucggcaccaccuagaug

SEQ ID NO: 819612 - RNA, 19 nt, Homo sapiens
  misc_RNA (1)...(19): siRNA sense strand
aacuucaggguucuaauua

SEQ ID NO: 819613 - RNA, 19 nt, Homo sapiens
  misc_RNA (1)...(19): siRNA sense strand
uuacauguuugcgaaaugg

SEQ ID NO: 819614 - RNA, 19 nt, Homo sapiens
  misc_RNA (1)...(19): siRNA sense strand
uaaaccaggauaugcaaca

SEQ ID NO: 819615 - RNA, 19 nt, Homo sapiens
  misc_RNA (1)...(19): siRNA sense strand
gaacaugcucaaaaucaga

SEQ ID NO: 819616 - RNA, 19 nt, Homo sapiens
  misc_RNA (1)...(19): siRNA sense strand
agaccacaguuacauguac

SEQ ID NO: 819617 - RNA, 19 nt, Homo sapiens
  misc_RNA (1)...(19): siRNA sense strand
guccgucagaccacaguua

SEQ ID NO: 819618 - RNA, 19 nt, Homo sapiens
  misc_RNA (1)...(19): siRNA sense strand
aagugaaaccuugugauuu

SEQ ID NO: 819619 - RNA, 19 nt, Homo sapiens
  misc_RNA (1)...(19): siRNA sense strand
aacagcagauggaaauucu

SEQ ID NO: 819620 - RNA, 19 nt, Homo sapiens
  misc_RNA (1)...(19): siRNA sense strand
cuauuacugugaugaacau

SEQ ID NO: 819621 - RNA, 19 nt, Homo sapiens
  misc_RNA (1)...(19): siRNA sense strand
gcaacagcagauggaaauu

SEQ ID NO: 819622 - RNA, 19 nt, Homo sapiens
  misc_RNA (1)...(19): siRNA sense strand
cgagacagaacaugcucaa

SEQ ID NO: 819623 - RNA, 19 nt, Homo sapiens
  misc_RNA (1)...(19): siRNA sense strand
caagagucgaguaccaaug

SEQ ID NO: 819624 - RNA, 19 nt, Homo sapiens
  misc_RNA (1)...(19): siRNA sense strand
caggaaguuacugggauua

SEQ ID NO: 819625 - RNA, 19 nt, Homo sapiens
  misc_RNA (1)...(19): siRNA sense strand
ggaagaagugacagaaaau

SEQ ID NO: 819626 - RNA, 19 nt, Homo sapiens
  misc_RNA (1)...(19): siRNA sense strand
cagcacaaccaauuugcau

SEQ ID NO: 819627 - RNA, 19 nt, Homo sapiens
  misc_RNA (1)...(19): siRNA sense strand
cagaccacaguuacaugua

SEQ ID NO: 819628 - RNA, 19 nt, Homo sapiens
  misc_RNA (1)...(19): siRNA sense strand
ucagaccacaguuacaugu

SEQ ID NO: 819629 - RNA, 19 nt, Homo sapiens
  misc_RNA (1)...(19): siRNA sense strand
uucugaaucuuccucuauu

SEQ ID NO: 819630 - RNA, 19 nt, Homo sapiens
  misc_RNA (1)...(19): siRNA sense strand
ccaguccuacuaugaacuu

SEQ ID NO: 819631 - RNA, 19 nt, Homo sapiens
  misc_RNA (1)...(19): siRNA sense strand
gcagauggaaauucuucag

SEQ ID NO: 819632 - RNA, 19 nt, Homo sapiens
  misc_RNA (1)...(19): siRNA sense strand
gcuacggucuuccaaaagu

SEQ ID NO: 819633 - RNA, 19 nt, Homo sapiens
  misc_RNA (1)...(19): siRNA sense strand
aaacaggggauaccauuga

SEQ ID NO: 819634 - RNA, 19 nt, Homo sapiens
  misc_RNA (1)...(19): siRNA sense strand
ggguucuaauuauguaaca

SEQ ID NO: 819635 - RNA, 19 nt, Homo sapiens
  misc_RNA (1)...(19): siRNA sense strand
uuacuccuauuacugugau

SEQ ID NO: 819636 - RNA, 19 nt, Homo sapiens
  misc_RNA (1)...(19): siRNA sense strand
caauuacauguuugcgaaa

SEQ ID NO: 819637 - RNA, 19 nt, Homo sapiens
  misc_RNA (1)...(19): siRNA sense strand
ugcaacagcagauggaaau

SEQ ID NO: 819638 - RNA, 19 nt, Homo sapiens
  misc_RNA (1)...(19): siRNA sense strand
ggacagaaauugaagauuc

SEQ ID NO: 819639 - RNA, 19 nt, Homo sapiens
  misc_RNA (1)...(19): siRNA sense strand
gaaaggcguuggacagaaa

SEQ ID NO: 819640 - RNA, 19 nt, Homo sapiens
  misc_RNA (1)...(19): siRNA sense strand
gauaaaggcuugcucauac

SEQ ID NO: 819641 - RNA, 19 nt, Homo sapiens
  misc_RNA (1)...(19): siRNA sense strand
gcacgugccuccugagaga

SEQ ID NO: 819642 - RNA, 19 nt, Homo sapiens
  misc_RNA (1)...(19): siRNA sense strand
gaacuuccauccagaccaa

SEQ ID NO: 819643 - RNA, 19 nt, Homo sapiens
  misc_RNA (1)...(19): siRNA sense strand
ccacugcccugcuggagua

SEQ ID NO: 819644 - RNA, 19 nt, Homo sapiens
  misc_RNA (1)...(19): siRNA sense strand
ggacagugacggcgaguuu

SEQ ID NO: 819645 - RNA, 19 nt, Homo sapiens
  misc_RNA (1)...(19): siRNA sense strand
gaaaggcgccuaccucaag

SEQ ID NO: 819646 - RNA, 19 nt, Homo sapiens
  misc_RNA (1)...(19): siRNA sense strand
ggaaaggcguuggacagaa

SEQ ID NO: 819647 - RNA, 19 nt, Homo sapiens
  misc_RNA (1)...(19): siRNA sense strand
gaacagagcgcaggacauc

SEQ ID NO: 819648 - RNA, 19 nt, Homo sapiens
  misc_RNA (1)...(19): siRNA sense strand
ugaagauucccacacauua

SEQ ID NO: 819649 - RNA, 19 nt, Homo sapiens
  misc_RNA (1)...(19): siRNA sense strand
cauacaggaugcccacuuu

SEQ ID NO: 819650 - RNA, 19 nt, Homo sapiens
  misc_RNA (1)...(19): siRNA sense strand
gcagcguacuucuggcuuu

SEQ ID NO: 819651 - RNA, 19 nt, Homo sapiens
  misc_RNA (1)...(19): siRNA sense strand
gcaagucucagaaggauca

SEQ ID NO: 819652 - RNA, 19 nt, Homo sapiens
  misc_RNA (1)...(19): siRNA sense strand
ucagccaccucacccauuu

SEQ ID NO: 819653 - RNA, 19 nt, Homo sapiens
  misc_RNA (1)...(19): siRNA sense strand
gcgccuaccucaaggacaa

SEQ ID NO: 819654 - RNA, 19 nt, Homo sapiens
  misc_RNA (1)...(19): siRNA sense strand
ccucagcccuugacaggaa

SEQ ID NO: 819655 - RNA, 19 nt, Homo sapiens
  misc_RNA (1)...(19): siRNA sense strand
caaucaagcagcaauggua

SEQ ID NO: 819656 - RNA, 19 nt, Homo sapiens
  misc_RNA (1)...(19): siRNA sense strand
ggcuggaacucaagucuga

SEQ ID NO: 819657 - RNA, 19 nt, Homo sapiens
  misc_RNA (1)...(19): siRNA sense strand
gaagauucccacacauuag

SEQ ID NO: 819658 - RNA, 19 nt, Homo sapiens
  misc_RNA (1)...(19): siRNA sense strand
cugaggagcuggccaagug

SEQ ID NO: 819659 - RNA, 19 nt, Homo sapiens
  misc_RNA (1)...(19): siRNA sense strand
gauaguggacgucccauuc

SEQ ID NO: 819660 - RNA, 19 nt, Homo sapiens
  misc_RNA (1)...(19): siRNA sense strand
cugagaagccagaagauaa

SEQ ID NO: 819661 - RNA, 19 nt, Homo sapiens
  misc_RNA (1)...(19): siRNA sense strand
gggcaagucucagaaggau

SEQ ID NO: 819662 - RNA, 19 nt, Homo sapiens
  misc_RNA (1)...(19): siRNA sense strand
ugagaagccagaagauaaa

SEQ ID NO: 819663 - RNA, 19 nt, Homo sapiens
  misc_RNA (1)...(19): siRNA sense strand
aagcagcaaugguacuuau

SEQ ID NO: 819664 - RNA, 19 nt, Homo sapiens
  misc_RNA (1)...(19): siRNA sense strand
ugcggaagcucaaguacaa

SEQ ID NO: 819665 - RNA, 19 nt, Homo sapiens
  misc_RNA (1)...(19): siRNA sense strand
agauaaaggcuugcucaua

SEQ ID NO: 819666 - RNA, 19 nt, Homo sapiens
  misc_RNA (1)...(19): siRNA sense strand
gagaaggaacgagcaucua

SEQ ID NO: 819667 - RNA, 19 nt, Homo sapiens
  misc_RNA (1)...(19): siRNA sense strand
uggaccaccucaucaagaa

SEQ ID NO: 819668 - RNA, 19 nt, Homo sapiens
  misc_RNA (1)...(19): siRNA sense strand
gagcaucuacucccuacau

SEQ ID NO: 819669 - RNA, 19 nt, Homo sapiens
  misc_RNA (1)...(19): siRNA sense strand
gcaugcggaagcucaagua

SEQ ID NO: 819670 - RNA, 19 nt, Homo sapiens
  misc_RNA (1)...(19): siRNA sense strand
ugauggagccgguggagaa

SEQ ID NO: 819671 - RNA, 19 nt, Homo sapiens
  misc_RNA (1)...(19): siRNA sense strand
ggagaaggaacgagcaucu

SEQ ID NO: 819672 - RNA, 19 nt, Homo sapiens
  misc_RNA (1)...(19): siRNA sense strand
ggacuugcugggucgcuuu

SEQ ID NO: 819673 - RNA, 19 nt, Homo sapiens
  misc_RNA (1)...(19): siRNA sense strand
uaaugaaccgccuggaaga

SEQ ID NO: 819674 - RNA, 19 nt, Homo sapiens
  misc_RNA (1)...(19): siRNA sense strand
ggacgucccauucuaugag

SEQ ID NO: 819675 - RNA, 19 nt, Homo sapiens
  misc_RNA (1)...(19): siRNA sense strand
uaguggacgucccauucua

SEQ ID NO: 819676 - RNA, 19 nt, Homo sapiens
  misc_RNA (1)...(19): siRNA sense strand
agaagcugcuccacaucaa

SEQ ID NO: 819677 - RNA, 19 nt, Homo sapiens
  misc_RNA (1)...(19): siRNA sense strand
gacagaaauugaagauucc

SEQ ID NO: 819678 - RNA, 19 nt, Homo sapiens
  misc_RNA (1)...(19): siRNA sense strand
ucucggagccacuaaugaa

SEQ ID NO: 819679 - RNA, 19 nt, Homo sapiens
  misc_RNA (1)...(19): siRNA sense strand
aauugaagauucccacaca

SEQ ID NO: 819680 - RNA, 19 nt, Homo sapiens
  misc_RNA (1)...(19): siRNA sense strand
caagcagcaaugguacuua

SEQ ID NO: 819681 - RNA, 19 nt, Homo sapiens
  misc_RNA (1)...(19): siRNA sense strand
ggaacucaagucugaaugg

SEQ ID NO: 819682 - RNA, 19 nt, Homo sapiens
  misc_RNA (1)...(19): siRNA sense strand
cagaagcugcuccacauca

SEQ ID NO: 819683 - RNA, 19 nt, Homo sapiens
  misc_RNA (1)...(19): siRNA sense strand
uccagaagcugcuccacau

SEQ ID NO: 819684 - RNA, 19 nt, Homo sapiens
  misc_RNA (1)...(19): siRNA sense strand
ccucccagguuccuugaug

SEQ ID NO: 819685 - RNA, 19 nt, Homo sapiens
  misc_RNA (1)...(19): siRNA sense strand
ugaaccgccuggaagacaa

SEQ ID NO: 819686 - RNA, 19 nt, Homo sapiens
  misc_RNA (1)...(19): siRNA sense strand
ucucucacuugcugucuga

SEQ ID NO: 819687 - RNA, 19 nt, Homo sapiens
  misc_RNA (1)...(19): siRNA sense strand
cgacuuggacagcaaucaa

SEQ ID NO: 819688 - RNA, 19 nt, Homo sapiens
  misc_RNA (1)...(19): siRNA sense strand
gcgaguuucugcccguaag

SEQ ID NO: 819689 - RNA, 19 nt, Homo sapiens
  misc_RNA (1)...(19): siRNA sense strand
cccauaagacucugacuuc

SEQ ID NO: 819690 - RNA, 19 nt, Homo sapiens
  misc_RNA (1)...(19): siRNA sense strand
gccucggucuggcauggua

SEQ ID NO: 819691 - RNA, 19 nt, Homo sapiens
  misc_RNA (1)...(19): siRNA sense strand
auaaaggcuugcucauaca

SEQ ID NO: 819692 - RNA, 19 nt, Homo sapiens
  misc_RNA (1)...(19): siRNA sense strand
gaaggaacgagcaucuacu

SEQ ID NO: 819693 - RNA, 19 nt, Homo sapiens
  misc_RNA (1)...(19): siRNA sense strand
ccacuuucaucaacuucuc

SEQ ID NO: 819694 - RNA, 19 nt, Homo sapiens
  misc_RNA (1)...(19): siRNA sense strand
gcccauaagacucugacuu

SEQ ID NO: 819695 - RNA, 19 nt, Homo sapiens
  misc_RNA (1)...(19): siRNA sense strand
gcaaucaagcagcaauggu

SEQ ID NO: 819696 - RNA, 19 nt, Homo sapiens
  misc_RNA (1)...(19): siRNA sense strand
cguccuccacccugaauuu

SEQ ID NO: 819697 - RNA, 19 nt, Homo sapiens
  misc_RNA (1)...(19): siRNA sense strand
agaccaagaggaucaguuc

SEQ ID NO: 819698 - RNA, 19 nt, Homo sapiens
  misc_RNA (1)...(19): siRNA sense strand
agcaucuacucccuacaua

SEQ ID NO: 819699 - RNA, 19 nt, Homo sapiens
  misc_RNA (1)...(19): siRNA sense strand
gacgucccauucuaugagu

SEQ ID NO: 819700 - RNA, 19 nt, Homo sapiens
  misc_RNA (1)...(19): siRNA sense strand
ggcguuggacagaaauuga

SEQ ID NO: 819701 - RNA, 19 nt, Homo sapiens
  misc_RNA (1)...(19): siRNA sense strand
uggagccgguggagaagga

SEQ ID NO: 819702 - RNA, 19 nt, Homo sapiens
  misc_RNA (1)...(19): siRNA sense strand
ucuucagccugguacauga

SEQ ID NO: 819703 - RNA, 19 nt, Homo sapiens
  misc_RNA (1)...(19): siRNA sense strand
gcaucuacucccuacauag

SEQ ID NO: 819704 - RNA, 19 nt, Homo sapiens
  misc_RNA (1)...(19): siRNA sense strand
uugaagauucccacacauu

SEQ ID NO: 819705 - RNA, 19 nt, Homo sapiens
  misc_RNA (1)...(19): siRNA sense strand
gcguuggacagaaauugaa

SEQ ID NO: 819706 - RNA, 19 nt, Homo sapiens
  misc_RNA (1)...(19): siRNA sense strand
gagguggccacgcaguaug

SEQ ID NO: 819707 - RNA, 19 nt, Homo sapiens
  misc_RNA (1)...(19): siRNA sense strand
ccaccuccagggucuaaga

SEQ ID NO: 819708 - RNA, 19 nt, Homo sapiens
  misc_RNA (1)...(19): siRNA sense strand
ggacagaaauugaagauuc

SEQ ID NO: 819709 - RNA, 19 nt, Homo sapiens
  misc_RNA (1)...(19): siRNA sense strand
gaaaggcguuggacagaaa

SEQ ID NO: 819710 - RNA, 19 nt, Homo sapiens
  misc_RNA (1)...(19): siRNA sense strand
gauaaaggcuugcucauac

SEQ ID NO: 819711 - RNA, 19 nt, Homo sapiens
  misc_RNA (1)...(19): siRNA sense strand
gcacgugccuccugagaga

SEQ ID NO: 819712 - RNA, 19 nt, Homo sapiens
  misc_RNA (1)...(19): siRNA sense strand
gaacuuccauccagaccaa

SEQ ID NO: 819713 - RNA, 19 nt, Homo sapiens
  misc_RNA (1)...(19): siRNA sense strand
ccacugcccugcuggagua

SEQ ID NO: 819714 - RNA, 19 nt, Homo sapiens
  misc_RNA (1)...(19): siRNA sense strand
ggacagugacggcgaguuu

SEQ ID NO: 819715 - RNA, 19 nt, Homo sapiens
  misc_RNA (1)...(19): siRNA sense strand
gaaaggcgccuaccucaag

SEQ ID NO: 819716 - RNA, 19 nt, Homo sapiens
  misc_RNA (1)...(19): siRNA sense strand
ggaaaggcguuggacagaa

SEQ ID NO: 819717 - RNA, 19 nt, Homo sapiens
  misc_RNA (1)...(19): siRNA sense strand
gaacagagcgcaggacauc

SEQ ID NO: 819718 - RNA, 19 nt, Homo sapiens
  misc_RNA (1)...(19): siRNA sense strand
ugaagauucccacacauua

SEQ ID NO: 819719 - RNA, 19 nt, Homo sapiens
  misc_RNA (1)...(19): siRNA sense strand
cauacaggaugcccacuuu

SEQ ID NO: 819720 - RNA, 19 nt, Homo sapiens
  misc_RNA (1)...(19): siRNA sense strand
gcagcguacuucuggcuuu

SEQ ID NO: 819721 - RNA, 19 nt, Homo sapiens
  misc_RNA (1)...(19): siRNA sense strand
gcaagucucagaaggauca

SEQ ID NO: 819722 - RNA, 19 nt, Homo sapiens
  misc_RNA (1)...(19): siRNA sense strand
ucagccaccucacccauuu

SEQ ID NO: 819723 - RNA, 19 nt, Homo sapiens
  misc_RNA (1)...(19): siRNA sense strand
gcgccuaccucaaggacaa

SEQ ID NO: 819724 - RNA, 19 nt, Homo sapiens
  misc_RNA (1)...(19): siRNA sense strand
ccucagcccuugacaggaa

SEQ ID NO: 819725 - RNA, 19 nt, Homo sapiens
  misc_RNA (1)...(19): siRNA sense strand
caaucaagcagcaauggua

SEQ ID NO: 819726 - RNA, 19 nt, Homo sapiens
  misc_RNA (1)...(19): siRNA sense strand
ggcuggaacucaagucuga

SEQ ID NO: 819727 - RNA, 19 nt, Homo sapiens
  misc_RNA (1)...(19): siRNA sense strand
gaagauucccacacauuag

SEQ ID NO: 819728 - RNA, 19 nt, Homo sapiens
  misc_RNA (1)...(19): siRNA sense strand
cugaggagcuggccaagug

SEQ ID NO: 819729 - RNA, 19 nt, Homo sapiens
  misc_RNA (1)...(19): siRNA sense strand
gauaguggacgucccauuc

SEQ ID NO: 819730 - RNA, 19 nt, Homo sapiens
  misc_RNA (1)...(19): siRNA sense strand
cugagaagccagaagauaa

SEQ ID NO: 819731 - RNA, 19 nt, Homo sapiens
  misc_RNA (1)...(19): siRNA sense strand
gggcaagucucagaaggau

SEQ ID NO: 819732 - RNA, 19 nt, Homo sapiens
  misc_RNA (1)...(19): siRNA sense strand
ugagaagccagaagauaaa

SEQ ID NO: 819733 - RNA, 19 nt, Homo sapiens
  misc_RNA (1)...(19): siRNA sense strand
aagcagcaaugguacuuau

SEQ ID NO: 819734 - RNA, 19 nt, Homo sapiens
  misc_RNA (1)...(19): siRNA sense strand
ugcggaagcucaaguacaa

SEQ ID NO: 819735 - RNA, 19 nt, Homo sapiens
  misc_RNA (1)...(19): siRNA sense strand
agauaaaggcuugcucaua

SEQ ID NO: 819736 - RNA, 19 nt, Homo sapiens
  misc_RNA (1)...(19): siRNA sense strand
gagaaggaacgagcaucua

SEQ ID NO: 819737 - RNA, 19 nt, Homo sapiens
  misc_RNA (1)...(19): siRNA sense strand
uggaccaccucaucaagaa

SEQ ID NO: 819738 - RNA, 19 nt, Homo sapiens
  misc_RNA (1)...(19): siRNA sense strand
gagcaucuacucccuacau

SEQ ID NO: 819739 - RNA, 19 nt, Homo sapiens
  misc_RNA (1)...(19): siRNA sense strand
gcaugcggaagcucaagua

SEQ ID NO: 819740 - RNA, 19 nt, Homo sapiens
  misc_RNA (1)...(19): siRNA sense strand
ugauggagccgguggagaa

SEQ ID NO: 819741 - RNA, 19 nt, Homo sapiens
  misc_RNA (1)...(19): siRNA sense strand
ggagaaggaacgagcaucu

SEQ ID NO: 819742 - RNA, 19 nt, Homo sapiens
  misc_RNA (1)...(19): siRNA sense strand
ggacuugcugggucgcuuu

SEQ ID NO: 819743 - RNA, 19 nt, Homo sapiens
  misc_RNA (1)...(19): siRNA sense strand
uaaugaaccgccuggaaga

SEQ ID NO: 819744 - RNA, 19 nt, Homo sapiens
  misc_RNA (1)...(19): siRNA sense strand
ggacgucccauucuaugag

SEQ ID NO: 819745 - RNA, 19 nt, Homo sapiens
  misc_RNA (1)...(19): siRNA sense strand
uaguggacgucccauucua

SEQ ID NO: 819746 - RNA, 19 nt, Homo sapiens
  misc_RNA (1)...(19): siRNA sense strand
agaagcugcuccacaucaa

SEQ ID NO: 819747 - RNA, 19 nt, Homo sapiens
  misc_RNA (1)...(19): siRNA sense strand
gacagaaauugaagauucc

SEQ ID NO: 819748 - RNA, 19 nt, Homo sapiens
  misc_RNA (1)...(19): siRNA sense strand
ucucggagccacuaaugaa

SEQ ID NO: 819749 - RNA, 19 nt, Homo sapiens
  misc_RNA (1)...(19): siRNA sense strand
aauugaagauucccacaca

SEQ ID NO: 819750 - RNA, 19 nt, Homo sapiens
  misc_RNA (1)...(19): siRNA sense strand
caagcagcaaugguacuua

SEQ ID NO: 819751 - RNA, 19 nt, Homo sapiens
  misc_RNA (1)...(19): siRNA sense strand
ggaacucaagucugaaugg

SEQ ID NO: 819752 - RNA, 19 nt, Homo sapiens
  misc_RNA (1)...(19): siRNA sense strand
cagaagcugcuccacauca

SEQ ID NO: 819753 - RNA, 19 nt, Homo sapiens
  misc_RNA (1)...(19): siRNA sense strand
uccagaagcugcuccacau

SEQ ID NO: 819754 - RNA, 19 nt, Homo sapiens
  misc_RNA (1)...(19): siRNA sense strand
ccucccagguuccuugaug

SEQ ID NO: 819755 - RNA, 19 nt, Homo sapiens
  misc_RNA (1)...(19): siRNA sense strand
ugaaccgccuggaagacaa

SEQ ID NO: 819756 - RNA, 19 nt, Homo sapiens
  misc_RNA (1)...(19): siRNA sense strand
ucucucacuugcugucuga

SEQ ID NO: 819757 - RNA, 19 nt, Homo sapiens
  misc_RNA (1)...(19): siRNA sense strand
cgacuuggacagcaaucaa

SEQ ID NO: 819758 - RNA, 19 nt, Homo sapiens
  misc_RNA (1)...(19): siRNA sense strand
gcgaguuucugcccguaag

SEQ ID NO: 819759 - RNA, 19 nt, Homo sapiens
  misc_RNA (1)...(19): siRNA sense strand
cccauaagacucugacuuc

SEQ ID NO: 819760 - RNA, 19 nt, Homo sapiens
  misc_RNA (1)...(19): siRNA sense strand
gccucggucuggcauggua

SEQ ID NO: 819761 - RNA, 19 nt, Homo sapiens
  misc_RNA (1)...(19): siRNA sense strand
auaaaggcuugcucauaca

SEQ ID NO: 819762 - RNA, 19 nt, Homo sapiens
  misc_RNA (1)...(19): siRNA sense strand
gaaggaacgagcaucuacu

SEQ ID NO: 819763 - RNA, 19 nt, Homo sapiens
  misc_RNA (1)...(19): siRNA sense strand
ccacuuucaucaacuucuc

SEQ ID NO: 819764 - RNA, 19 nt, Homo sapiens
  misc_RNA (1)...(19): siRNA sense strand
gcccauaagacucugacuu

SEQ ID NO: 819765 - RNA, 19 nt, Homo sapiens
  misc_RNA (1)...(19): siRNA sense strand
gcaaucaagcagcaauggu

SEQ ID NO: 819766 - RNA, 19 nt, Homo sapiens
  misc_RNA (1)...(19): siRNA sense strand
cguccuccacccugaauuu

SEQ ID NO: 819767 - RNA, 19 nt, Homo sapiens
  misc_RNA (1)...(19): siRNA sense strand
agaccaagaggaucaguuc

SEQ ID NO: 819768 - RNA, 19 nt, Homo sapiens
  misc_RNA (1)...(19): siRNA sense strand
agcaucuacucccuacaua

SEQ ID NO: 819769 - RNA, 19 nt, Homo sapiens
  misc_RNA (1)...(19): siRNA sense strand
gacgucccauucuaugagu

SEQ ID NO: 819770 - RNA, 19 nt, Homo sapiens
  misc_RNA (1)...(19): siRNA sense strand
ggcguuggacagaaauuga

SEQ ID NO: 819771 - RNA, 19 nt, Homo sapiens
  misc_RNA (1)...(19): siRNA sense strand
uggagccgguggagaagga

SEQ ID NO: 819772 - RNA, 19 nt, Homo sapiens
  misc_RNA (1)...(19): siRNA sense strand
ucuucagccugguacauga

SEQ ID NO: 819773 - RNA, 19 nt, Homo sapiens
  misc_RNA (1)...(19): siRNA sense strand
gcaucuacucccuacauag

SEQ ID NO: 819774 - RNA, 19 nt, Homo sapiens
  misc_RNA (1)...(19): siRNA sense strand
uugaagauucccacacauu

SEQ ID NO: 819775 - RNA, 19 nt, Homo sapiens
  misc_RNA (1)...(19): siRNA sense strand
gcguuggacagaaauugaa

SEQ ID NO: 819776 - RNA, 19 nt, Homo sapiens
  misc_RNA (1)...(19): siRNA sense strand
gagguggccacgcaguaug

SEQ ID NO: 819777 - RNA, 19 nt, Homo sapiens
  misc_RNA (1)...(19): siRNA sense strand
ccaccuccagggucuaaga

SEQ ID NO: 819778 - RNA, 19 nt, Homo sapiens
  misc_RNA (1)...(19): siRNA sense strand
ggagaaaccuuaugaaugu

SEQ ID NO: 819779 - RNA, 19 nt, Homo sapiens
  misc_RNA (1)...(19): siRNA sense strand
ggagaaauccuaugaaugu

SEQ ID NO: 819780 - RNA, 19 nt, Homo sapiens
  misc_RNA (1)...(19): siRNA sense strand
ggagaaacccuaugaaugu

SEQ ID NO: 819781 - RNA, 19 nt, Homo sapiens
  misc_RNA (1)...(19): siRNA sense strand
ggagaaacccuaugaaugu

SEQ ID NO: 819782 - RNA, 19 nt, Homo sapiens
  misc_RNA (1)...(19): siRNA sense strand
ggagaaacccuaugaaugu

SEQ ID NO: 819783 - RNA, 19 nt, Homo sapiens
  misc_RNA (1)...(19): siRNA sense strand
ggagaaacccuaugaaugu

SEQ ID NO: 819784 - RNA, 19 nt, Homo sapiens
  misc_RNA (1)...(19): siRNA sense strand
ggagaaacccuaugaaugu

SEQ ID NO: 819785 - RNA, 19 nt, Homo sapiens
  misc_RNA (1)...(19): siRNA sense strand
ggagaaacccuaugaaugu

SEQ ID NO: 819786 - RNA, 19 nt, Homo sapiens
  misc_RNA (1)...(19): siRNA sense strand
ggagaaacccuaugaaugu

SEQ ID NO: 819787 - RNA, 19 nt, Homo sapiens
  misc_RNA (1)...(19): siRNA sense strand
ggagaaacccuaugaaugu

SEQ ID NO: 819788 - RNA, 19 nt, Homo sapiens
  misc_RNA (1)...(19): siRNA sense strand
gggagaaacucuaugaaug

SEQ ID NO: 819789 - RNA, 19 nt, Homo sapiens
  misc_RNA (1)...(19): siRNA sense strand
ggagaaacccuacgaaugu

SEQ ID NO: 819790 - RNA, 19 nt, Homo sapiens
  misc_RNA (1)...(19): siRNA sense strand
gaagacaucacaucucaaa

SEQ ID NO: 819791 - RNA, 19 nt, Homo sapiens
  misc_RNA (1)...(19): siRNA sense strand
gagaaacucuaugaaugua

SEQ ID NO: 819792 - RNA, 19 nt, Homo sapiens
  misc_RNA (1)...(19): siRNA sense strand
gcacaucagagaauucaua

SEQ ID NO: 819793 - RNA, 19 nt, Homo sapiens
  misc_RNA (1)...(19): siRNA sense strand
ucugagaagucauauguua

SEQ ID NO: 819794 - RNA, 19 nt, Homo sapiens
  misc_RNA (1)...(19): siRNA sense strand
gagagcacaucaaagaauu

SEQ ID NO: 819795 - RNA, 19 nt, Homo sapiens
  misc_RNA (1)...(19): siRNA sense strand
caaaggacaucagagaauu

SEQ ID NO: 819796 - RNA, 19 nt, Homo sapiens
  misc_RNA (1)...(19): siRNA sense strand
gagaaacccuaugaaugua

SEQ ID NO: 819797 - RNA, 19 nt, Homo sapiens
  misc_RNA (1)...(19): siRNA sense strand
gagaaacccuaugaaugua

SEQ ID NO: 819798 - RNA, 19 nt, Homo sapiens
  misc_RNA (1)...(19): siRNA sense strand
gagaaacccuaugaaugua

SEQ ID NO: 819799 - RNA, 19 nt, Homo sapiens
  misc_RNA (1)...(19): siRNA sense strand
gagaaacccuaugaaugua

SEQ ID NO: 819800 - RNA, 19 nt, Homo sapiens
  misc_RNA (1)...(19): siRNA sense strand
gagaaacccuaugaaugua

SEQ ID NO: 819801 - RNA, 19 nt, Homo sapiens
  misc_RNA (1)...(19): siRNA sense strand
gagaaacccuaugaaugua

SEQ ID NO: 819802 - RNA, 19 nt, Homo sapiens
  misc_RNA (1)...(19): siRNA sense strand
gagaaacccuaugaaugua

SEQ ID NO: 819803 - RNA, 19 nt, Homo sapiens
  misc_RNA (1)...(19): siRNA sense strand
cagaguacaucaaagaauu

SEQ ID NO: 819804 - RNA, 19 nt, Homo sapiens
  misc_RNA (1)...(19): siRNA sense strand
gggaagacaucacaucuca

SEQ ID NO: 819805 - RNA, 19 nt, Homo sapiens
  misc_RNA (1)...(19): siRNA sense strand
ggagaaacccuaugagugu

SEQ ID NO: 819806 - RNA, 19 nt, Homo sapiens
  misc_RNA (1)...(19): siRNA sense strand
ggaaaacguuugcugauaa

SEQ ID NO: 819807 - RNA, 19 nt, Homo sapiens
  misc_RNA (1)...(19): siRNA sense strand
gagaaacccuacgaaugua

SEQ ID NO: 819808 - RNA, 19 nt, Homo sapiens
  misc_RNA (1)...(19): siRNA sense strand
caaggcacaucaaagaauu

SEQ ID NO: 819809 - RNA, 19 nt, Homo sapiens
  misc_RNA (1)...(19): siRNA sense strand
gaaacccuaugaauguauu

SEQ ID NO: 819810 - RNA, 19 nt, Homo sapiens
  misc_RNA (1)...(19): siRNA sense strand
ggaagccauuugcccauaa

SEQ ID NO: 819811 - RNA, 19 nt, Homo sapiens
  misc_RNA (1)...(19): siRNA sense strand
ggagaucuuucaccuacaa

SEQ ID NO: 819812 - RNA, 19 nt, Homo sapiens
  misc_RNA (1)...(19): siRNA sense strand
gggaagacuuucuccaaga

SEQ ID NO: 819813 - RNA, 19 nt, Homo sapiens
  misc_RNA (1)...(19): siRNA sense strand
gagaaacccuaugagugua

SEQ ID NO: 819814 - RNA, 19 nt, Homo sapiens
  misc_RNA (1)...(19): siRNA sense strand
gagaaauccuaugaaugua

SEQ ID NO: 819815 - RNA, 19 nt, Homo sapiens
  misc_RNA (1)...(19): siRNA sense strand
ggagaaacccuaugaaugc

SEQ ID NO: 819816 - RNA, 19 nt, Homo sapiens
  misc_RNA (1)...(19): siRNA sense strand
ggagaaacucuaugaaugu

SEQ ID NO: 819817 - RNA, 19 nt, Homo sapiens
  misc_RNA (1)...(19): siRNA sense strand
gaaacucuaugaauguagu

SEQ ID NO: 819818 - RNA, 19 nt, Homo sapiens
  misc_RNA (1)...(19): siRNA sense strand
cauagugcaucaaagaauu

SEQ ID NO: 819819 - RNA, 19 nt, Homo sapiens
  misc_RNA (1)...(19): siRNA sense strand
ucccagaaaucacaccuua

SEQ ID NO: 819820 - RNA, 19 nt, Homo sapiens
  misc_RNA (1)...(19): siRNA sense strand
cagagcacaucauagaauu

SEQ ID NO: 819821 - RNA, 19 nt, Homo sapiens
  misc_RNA (1)...(19): siRNA sense strand
gggagaaaccuuaugaaug

SEQ ID NO: 819822 - RNA, 19 nt, Homo sapiens
  misc_RNA (1)...(19): siRNA sense strand
gaaacccuaugaauguaau

SEQ ID NO: 819823 - RNA, 19 nt, Homo sapiens
  misc_RNA (1)...(19): siRNA sense strand
cuacgaauguaauguaugu

SEQ ID NO: 819824 - RNA, 19 nt, Homo sapiens
  misc_RNA (1)...(19): siRNA sense strand
gcacaucagagaguucaua

SEQ ID NO: 819825 - RNA, 19 nt, Homo sapiens
  misc_RNA (1)...(19): siRNA sense strand
gaaacccuaugaauguaau

SEQ ID NO: 819826 - RNA, 19 nt, Homo sapiens
  misc_RNA (1)...(19): siRNA sense strand
gcacaucacagaauucaca

SEQ ID NO: 819827 - RNA, 19 nt, Homo sapiens
  misc_RNA (1)...(19): siRNA sense strand
gaaacccuaugaauguaau

SEQ ID NO: 819828 - RNA, 19 nt, Homo sapiens
  misc_RNA (1)...(19): siRNA sense strand
gaaacccuaugaauguaau

SEQ ID NO: 819829 - RNA, 19 nt, Homo sapiens
  misc_RNA (1)...(19): siRNA sense strand
gagagcacaucagagaauu

SEQ ID NO: 819830 - RNA, 19 nt, Homo sapiens
  misc_RNA (1)...(19): siRNA sense strand
gcccauaauucagcccuua

SEQ ID NO: 819831 - RNA, 19 nt, Homo sapiens
  misc_RNA (1)...(19): siRNA sense strand
gggagaaacccuaugaaug

SEQ ID NO: 819832 - RNA, 19 nt, Homo sapiens
  misc_RNA (1)...(19): siRNA sense strand
gggagaaacccuaugaaug

SEQ ID NO: 819833 - RNA, 19 nt, Homo sapiens
  misc_RNA (1)...(19): siRNA sense strand
gacaucacaucucaaagga

SEQ ID NO: 819834 - RNA, 19 nt, Homo sapiens
  misc_RNA (1)...(19): siRNA sense strand
gggaagccauuugcccaua

SEQ ID NO: 819835 - RNA, 19 nt, Homo sapiens
  misc_RNA (1)...(19): siRNA sense strand
gggagaaacccuaugaaug

SEQ ID NO: 819836 - RNA, 19 nt, Homo sapiens
  misc_RNA (1)...(19): siRNA sense strand
gggagaaacccuaugaaug

SEQ ID NO: 819837 - RNA, 19 nt, Homo sapiens
  misc_RNA (1)...(19): siRNA sense strand
caucucagagcacaucuua

SEQ ID NO: 819838 - RNA, 19 nt, Homo sapiens
  misc_RNA (1)...(19): siRNA sense strand
gggagaaacccuaugaaug

SEQ ID NO: 819839 - RNA, 19 nt, Homo sapiens
  misc_RNA (1)...(19): siRNA sense strand
gggagaaacccuaugaaug

SEQ ID NO: 819840 - RNA, 19 nt, Homo sapiens
  misc_RNA (1)...(19): siRNA sense strand
gggagaaacccuaugaaug

SEQ ID NO: 819841 - RNA, 19 nt, Homo sapiens
  misc_RNA (1)...(19): siRNA sense strand
gggagaaacccuaugaaug

SEQ ID NO: 819842 - RNA, 19 nt, Homo sapiens
  misc_RNA (1)...(19): siRNA sense strand
gggagaaacccuaugaaug

SEQ ID NO: 819843 - RNA, 19 nt, Homo sapiens
  misc_RNA (1)...(19): siRNA sense strand
gagaaaccuuaugaaugua

SEQ ID NO: 819844 - RNA, 19 nt, Homo sapiens
  misc_RNA (1)...(19): siRNA sense strand
guaugaauguaacguaugu

SEQ ID NO: 819845 - RNA, 19 nt, Homo sapiens
  misc_RNA (1)...(19): siRNA sense strand
ccaaagaacacaccucugu

SEQ ID NO: 819846 - RNA, 19 nt, Homo sapiens
  misc_RNA (1)...(19): siRNA sense strand
gugagaagcccuaugaaug

SEQ ID NO: 819847 - RNA, 19 nt, Homo sapiens
  misc_RNA (1)...(19): siRNA sense strand
cagaagacacgccucagua

SEQ ID NO: 819848 - RNA, 19 nt, Homo sapiens
  misc_RNA (1)...(19): siRNA sense strand
gagaaaacauuugcccaua

SEQ ID NO: 819849 - RNA, 19 nt, Homo sapiens
  misc_RNA (1)...(19): siRNA sense strand
gagaaacccuaugaaugug

SEQ ID NO: 819850 - RNA, 19 nt, Homo sapiens
  misc_RNA (1)...(19): siRNA sense strand
gggagaaacccuacgaaug

SEQ ID NO: 819851 - RNA, 19 nt, Homo sapiens
  misc_RNA (1)...(19): siRNA sense strand
gaaaacauuugcccauaau

SEQ ID NO: 819852 - RNA, 19 nt, Homo sapiens
  misc_RNA (1)...(19): siRNA sense strand
caagacaucacaucucaga

SEQ ID NO: 819853 - RNA, 19 nt, Homo sapiens
  misc_RNA (1)...(19): siRNA sense strand
caucacaccagaaugcaua

SEQ ID NO: 819854 - RNA, 19 nt, Homo sapiens
  misc_RNA (1)...(19): siRNA sense strand
caagacaucacaucucaga

SEQ ID NO: 819855 - RNA, 19 nt, Homo sapiens
  misc_RNA (1)...(19): siRNA sense strand
gaagccauuugcccauaau

SEQ ID NO: 819856 - RNA, 19 nt, Homo sapiens
  misc_RNA (1)...(19): siRNA sense strand
cuaugaauguguugaaugu

SEQ ID NO: 819857 - RNA, 19 nt, Homo sapiens
  misc_RNA (1)...(19): siRNA sense strand
cuaugaaugugaugaaugu

SEQ ID NO: 819858 - RNA, 19 nt, Homo sapiens
  misc_RNA (1)...(19): siRNA sense strand
gcacaucaaagaauucaca

SEQ ID NO: 819859 - RNA, 19 nt, Homo sapiens
  misc_RNA (1)...(19): siRNA sense strand
gcacaucaaagaauucaca

SEQ ID NO: 819860 - RNA, 19 nt, Homo sapiens
  misc_RNA (1)...(19): siRNA sense strand
ccucagagcacaucauaga

SEQ ID NO: 819861 - RNA, 19 nt, Homo sapiens
  misc_RNA (1)...(19): siRNA sense strand
gaaacccuaugaaugugau

SEQ ID NO: 819862 - RNA, 19 nt, Homo sapiens
  misc_RNA (1)...(19): siRNA sense strand
uaauucaacccucagagua

SEQ ID NO: 819863 - RNA, 19 nt, Homo sapiens
  misc_RNA (1)...(19): siRNA sense strand
ccugagagcacaucaaaga

SEQ ID NO: 819864 - RNA, 19 nt, Homo sapiens
  misc_RNA (1)...(19): siRNA sense strand
ccuagcauguaauggauuu

SEQ ID NO: 819865 - RNA, 19 nt, Homo sapiens
  misc_RNA (1)...(19): siRNA sense strand
gggaaaacguuugcugaua

SEQ ID NO: 819866 - RNA, 19 nt, Homo sapiens
  misc_RNA (1)...(19): siRNA sense strand
uaaggcagcccucauagug

SEQ ID NO: 819867 - RNA, 19 nt, Homo sapiens
  misc_RNA (1)...(19): siRNA sense strand
gcacaucagagaauucaca

SEQ ID NO: 819868 - RNA, 19 nt, Homo sapiens
  misc_RNA (1)...(19): siRNA sense strand
gcacaucagagaauucaca

SEQ ID NO: 819869 - RNA, 19 nt, Homo sapiens
  misc_RNA (1)...(19): siRNA sense strand
ggacaugagagaauucaca

SEQ ID NO: 819870 - RNA, 19 nt, Homo sapiens
  misc_RNA (1)...(19): siRNA sense strand
ggaagacuuucuccaagac

SEQ ID NO: 819871 - RNA, 19 nt, Homo sapiens
  misc_RNA (1)...(19): siRNA sense strand
cuauaaggcagcccucaua

SEQ ID NO: 819872 - RNA, 19 nt, Homo sapiens
  misc_RNA (1)...(19): siRNA sense strand
gagaaacccuaugaaugca

SEQ ID NO: 819873 - RNA, 19 nt, Homo sapiens
  misc_RNA (1)...(19): siRNA sense strand
ucucagagcacaucuuaga

SEQ ID NO: 819874 - RNA, 19 nt, Homo sapiens
  misc_RNA (1)...(19): siRNA sense strand
cagggcacaucacagaauu

SEQ ID NO: 819875 - RNA, 19 nt, Homo sapiens
  misc_RNA (1)...(19): siRNA sense strand
caucagagaauucauacug

SEQ ID NO: 819876 - RNA, 19 nt, Homo sapiens
  misc_RNA (1)...(19): siRNA sense strand
gaaugugggagaucuuuca

SEQ ID NO: 819877 - RNA, 19 nt, Homo sapiens
  misc_RNA (1)...(19): siRNA sense strand
aaacauuugcccauaauuc

SEQ ID NO: 819878 - RNA, 19 nt, Homo sapiens
  misc_RNA (1)...(19): siRNA sense strand
gaugggagaucucaaguuu

SEQ ID NO: 819879 - RNA, 19 nt, Homo sapiens
  misc_RNA (1)...(19): siRNA sense strand
gaugauggcuauccagaaa

SEQ ID NO: 819880 - RNA, 19 nt, Homo sapiens
  misc_RNA (1)...(19): siRNA sense strand
ugaagugccucucaugaua

SEQ ID NO: 819881 - RNA, 19 nt, Homo sapiens
  misc_RNA (1)...(19): siRNA sense strand
gcugugacauagauauuua

SEQ ID NO: 819882 - RNA, 19 nt, Homo sapiens
  misc_RNA (1)...(19): siRNA sense strand
gacccuggauguugaauug

SEQ ID NO: 819883 - RNA, 19 nt, Homo sapiens
  misc_RNA (1)...(19): siRNA sense strand
gaucucaaguuucaauauc

SEQ ID NO: 819884 - RNA, 19 nt, Homo sapiens
  misc_RNA (1)...(19): siRNA sense strand
caacagagcuacagaaaag

SEQ ID NO: 819885 - RNA, 19 nt, Homo sapiens
  misc_RNA (1)...(19): siRNA sense strand
ugauggcuauccagaaaua

SEQ ID NO: 819886 - RNA, 19 nt, Homo sapiens
  misc_RNA (1)...(19): siRNA sense strand
gaucuauguugauaaggaa

SEQ ID NO: 819887 - RNA, 19 nt, Homo sapiens
  misc_RNA (1)...(19): siRNA sense strand
ugagaagacuguuaaagca

SEQ ID NO: 819888 - RNA, 19 nt, Homo sapiens
  misc_RNA (1)...(19): siRNA sense strand
gcagucuccuuuaagcauu

SEQ ID NO: 819889 - RNA, 19 nt, Homo sapiens
  misc_RNA (1)...(19): siRNA sense strand
ugggagaucucaaguuuca

SEQ ID NO: 819890 - RNA, 19 nt, Homo sapiens
  misc_RNA (1)...(19): siRNA sense strand
agaagacuguuaaagcaaa

SEQ ID NO: 819891 - RNA, 19 nt, Homo sapiens
  misc_RNA (1)...(19): siRNA sense strand
ugacugagaagacuguuaa

SEQ ID NO: 819892 - RNA, 19 nt, Homo sapiens
  misc_RNA (1)...(19): siRNA sense strand
gaggagagagagcuugaaa

SEQ ID NO: 819893 - RNA, 19 nt, Homo sapiens
  misc_RNA (1)...(19): siRNA sense strand
acucugaucuauguugaua

SEQ ID NO: 819894 - RNA, 19 nt, Homo sapiens
  misc_RNA (1)...(19): siRNA sense strand
ggagaucucaaguuucaau

SEQ ID NO: 819895 - RNA, 19 nt, Homo sapiens
  misc_RNA (1)...(19): siRNA sense strand
gucuggaccuucaaucaaa

SEQ ID NO: 819896 - RNA, 19 nt, Homo sapiens
  misc_RNA (1)...(19): siRNA sense strand
gcucccacauccuuaccua

SEQ ID NO: 819897 - RNA, 19 nt, Homo sapiens
  misc_RNA (1)...(19): siRNA sense strand
gagaagacuguuaaagcaa

SEQ ID NO: 819898 - RNA, 19 nt, Homo sapiens
  misc_RNA (1)...(19): siRNA sense strand
ugaucuauguugauaagga

SEQ ID NO: 819899 - RNA, 19 nt, Homo sapiens
  misc_RNA (1)...(19): siRNA sense strand
cgaagaaccaggcauccuu

SEQ ID NO: 819900 - RNA, 19 nt, Homo sapiens
  misc_RNA (1)...(19): siRNA sense strand
ggaaauccaaucuguugca

SEQ ID NO: 819901 - RNA, 19 nt, Homo sapiens
  misc_RNA (1)...(19): siRNA sense strand
cuacucugaucuauguuga

SEQ ID NO: 819902 - RNA, 19 nt, Homo sapiens
  misc_RNA (1)...(19): siRNA sense strand
gagaucucaaguuucaaua

SEQ ID NO: 819903 - RNA, 19 nt, Homo sapiens
  misc_RNA (1)...(19): siRNA sense strand
aaagaugacugagaagacu

SEQ ID NO: 819904 - RNA, 19 nt, Homo sapiens
  misc_RNA (1)...(19): siRNA sense strand
uaccuaaagcuaccagaaa

SEQ ID NO: 819905 - RNA, 19 nt, Homo sapiens
  misc_RNA (1)...(19): siRNA sense strand
gaagugccucucaugauac

SEQ ID NO: 819906 - RNA, 19 nt, Homo sapiens
  misc_RNA (1)...(19): siRNA sense strand
gaagacuguuaaagcaaaa

SEQ ID NO: 819907 - RNA, 19 nt, Homo sapiens
  misc_RNA (1)...(19): siRNA sense strand
ucugaucuauguugauaag

SEQ ID NO: 819908 - RNA, 19 nt, Homo sapiens
  misc_RNA (1)...(19): siRNA sense strand
ccuuuaagcauucuguuga

SEQ ID NO: 819909 - RNA, 19 nt, Homo sapiens
  misc_RNA (1)...(19): siRNA sense strand
ggagagagagcuugaaaag

SEQ ID NO: 819910 - RNA, 19 nt, Homo sapiens
  misc_RNA (1)...(19): siRNA sense strand
ucaaucaaagccuuagaug

SEQ ID NO: 819911 - RNA, 19 nt, Homo sapiens
  misc_RNA (1)...(19): siRNA sense strand
gugaagugccucucaugau

SEQ ID NO: 819912 - RNA, 19 nt, Homo sapiens
  misc_RNA (1)...(19): siRNA sense strand
ccacauccuuaccuaaagc

SEQ ID NO: 819913 - RNA, 19 nt, Homo sapiens
  misc_RNA (1)...(19): siRNA sense strand
ugccucagaugauggcuau

SEQ ID NO: 819914 - RNA, 19 nt, Homo sapiens
  misc_RNA (1)...(19): siRNA sense strand
guugaauugccaccuguuu

SEQ ID NO: 819915 - RNA, 19 nt, Homo sapiens
  misc_RNA (1)...(19): siRNA sense strand
guuccugccucagaugaug

SEQ ID NO: 819916 - RNA, 19 nt, Homo sapiens
  misc_RNA (1)...(19): siRNA sense strand
ccaccuguuugcugugaca

SEQ ID NO: 819917 - RNA, 19 nt, Homo sapiens
  misc_RNA (1)...(19): siRNA sense strand
acagaaaagucaguaaaga

SEQ ID NO: 819918 - RNA, 19 nt, Homo sapiens
  misc_RNA (1)...(19): siRNA sense strand
uguugacccuggauguuga

SEQ ID NO: 819919 - RNA, 19 nt, Homo sapiens
  misc_RNA (1)...(19): siRNA sense strand
cuguugcagucuccuuuaa

SEQ ID NO: 819920 - RNA, 19 nt, Homo sapiens
  misc_RNA (1)...(19): siRNA sense strand
gcuacucugaucuauguug

SEQ ID NO: 819921 - RNA, 19 nt, Homo sapiens
  misc_RNA (1)...(19): siRNA sense strand
caaaggaugggcugaagcu

SEQ ID NO: 819922 - RNA, 19 nt, Homo sapiens
  misc_RNA (1)...(19): siRNA sense strand
ucccacauccuuaccuaaa

SEQ ID NO: 819923 - RNA, 19 nt, Homo sapiens
  misc_RNA (1)...(19): siRNA sense strand
cuacaaaggaugggcugaa

SEQ ID NO: 819924 - RNA, 19 nt, Homo sapiens
  misc_RNA (1)...(19): siRNA sense strand
gagugaagugccucucaug

SEQ ID NO: 819925 - RNA, 19 nt, Homo sapiens
  misc_RNA (1)...(19): siRNA sense strand
uacaaaggaugggcugaag

SEQ ID NO: 819926 - RNA, 19 nt, Homo sapiens
  misc_RNA (1)...(19): siRNA sense strand
gugccucucaugauacuug

SEQ ID NO: 819927 - RNA, 19 nt, Homo sapiens
  misc_RNA (1)...(19): siRNA sense strand
ccuguuugcugugacauag

SEQ ID NO: 819928 - RNA, 19 nt, Homo sapiens
  misc_RNA (1)...(19): siRNA sense strand
gccugaagagcaccagauu

SEQ ID NO: 819929 - RNA, 19 nt, Homo sapiens
  misc_RNA (1)...(19): siRNA sense strand
gaagaguugucgucuauaa

SEQ ID NO: 819930 - RNA, 19 nt, Homo sapiens
  misc_RNA (1)...(19): siRNA sense strand
gagaggagcuggugugcaa

SEQ ID NO: 819931 - RNA, 19 nt, Homo sapiens
  misc_RNA (1)...(19): siRNA sense strand
ggaaauucaucuuuaagga

SEQ ID NO: 819932 - RNA, 19 nt, Homo sapiens
  misc_RNA (1)...(19): siRNA sense strand
ccaaaucacugaaauuauc

SEQ ID NO: 819933 - RNA, 19 nt, Homo sapiens
  misc_RNA (1)...(19): siRNA sense strand
gaacccagcucccucuuca

SEQ ID NO: 819934 - RNA, 19 nt, Homo sapiens
  misc_RNA (1)...(19): siRNA sense strand
gaaauuauccugggugaga

SEQ ID NO: 819935 - RNA, 19 nt, Homo sapiens
  misc_RNA (1)...(19): siRNA sense strand
gaccaaagccuauguguuc

SEQ ID NO: 819936 - RNA, 19 nt, Homo sapiens
  misc_RNA (1)...(19): siRNA sense strand
cugcggaaauucaucuuua

SEQ ID NO: 819937 - RNA, 19 nt, Homo sapiens
  misc_RNA (1)...(19): siRNA sense strand
ucgaagaguugucgucuau

SEQ ID NO: 819938 - RNA, 19 nt, Homo sapiens
  misc_RNA (1)...(19): siRNA sense strand
ggaagacgccuacauucug

SEQ ID NO: 819939 - RNA, 19 nt, Homo sapiens
  misc_RNA (1)...(19): siRNA sense strand
cggcugaccucgcaggaaa

SEQ ID NO: 819940 - RNA, 19 nt, Homo sapiens
  misc_RNA (1)...(19): siRNA sense strand
cauaguaacaucaaccaaa

SEQ ID NO: 819941 - RNA, 19 nt, Homo sapiens
  misc_RNA (1)...(19): siRNA sense strand
caacauggaagagaacuug

SEQ ID NO: 819942 - RNA, 19 nt, Homo sapiens
  misc_RNA (1)...(19): siRNA sense strand
gaacaaaacccaggauuuc

SEQ ID NO: 819943 - RNA, 19 nt, Homo sapiens
  misc_RNA (1)...(19): siRNA sense strand
caaccaaaucacugaaauu

SEQ ID NO: 819944 - RNA, 19 nt, Homo sapiens
  misc_RNA (1)...(19): siRNA sense strand
aagccuauguguucuuuga

SEQ ID NO: 819945 - RNA, 19 nt, Homo sapiens
  misc_RNA (1)...(19): siRNA sense strand
ggaggcagccagacuguuc

SEQ ID NO: 819946 - RNA, 19 nt, Homo sapiens
  misc_RNA (1)...(19): siRNA sense strand
ucaaccaaaucacugaaau

SEQ ID NO: 819947 - RNA, 19 nt, Homo sapiens
  misc_RNA (1)...(19): siRNA sense strand
gcccagagaucuugaacac

SEQ ID NO: 819948 - RNA, 19 nt, Homo sapiens
  misc_RNA (1)...(19): siRNA sense strand
gcauugcguuucuuguauc

SEQ ID NO: 819949 - RNA, 19 nt, Homo sapiens
  misc_RNA (1)...(19): siRNA sense strand
agacuguucuaccagauug

SEQ ID NO: 819950 - RNA, 19 nt, Homo sapiens
  misc_RNA (1)...(19): siRNA sense strand
ugugcaagguguuugauau

SEQ ID NO: 819951 - RNA, 19 nt, Homo sapiens
  misc_RNA (1)...(19): siRNA sense strand
uaugggagaucgcggaaca

SEQ ID NO: 819952 - RNA, 19 nt, Homo sapiens
  misc_RNA (1)...(19): siRNA sense strand
ggcgguacccuuuccauga

SEQ ID NO: 819953 - RNA, 19 nt, Homo sapiens
  misc_RNA (1)...(19): siRNA sense strand
gcccgagacuccgaacuug

SEQ ID NO: 819954 - RNA, 19 nt, Homo sapiens
  misc_RNA (1)...(19): siRNA sense strand
gaaauucuggaccauccuu

SEQ ID NO: 819955 - RNA, 19 nt, Homo sapiens
  misc_RNA (1)...(19): siRNA sense strand
ggaacaaaacccaggauuu

SEQ ID NO: 819956 - RNA, 19 nt, Homo sapiens
  misc_RNA (1)...(19): siRNA sense strand
gcaagguguuugauaucag

SEQ ID NO: 819957 - RNA, 19 nt, Homo sapiens
  misc_RNA (1)...(19): siRNA sense strand
ccaucacaauagcgagaua

SEQ ID NO: 819958 - RNA, 19 nt, Homo sapiens
  misc_RNA (1)...(19): siRNA sense strand
ccagcucccucuucagcaa

SEQ ID NO: 819959 - RNA, 19 nt, Homo sapiens
  misc_RNA (1)...(19): siRNA sense strand
acuccgaacuugucgcauu

SEQ ID NO: 819960 - RNA, 19 nt, Homo sapiens
  misc_RNA (1)...(19): siRNA sense strand
ugcggaaauucaucuuuaa

SEQ ID NO: 819961 - RNA, 19 nt, Homo sapiens
  misc_RNA (1)...(19): siRNA sense strand
uaacaucaaccaaaucacu

SEQ ID NO: 819962 - RNA, 19 nt, Homo sapiens
  misc_RNA (1)...(19): siRNA sense strand
gagcccagccagaguuuca

SEQ ID NO: 819963 - RNA, 19 nt, Homo sapiens
  misc_RNA (1)...(19): siRNA sense strand
cgucucgaauucagcauau

SEQ ID NO: 819964 - RNA, 19 nt, Homo sapiens
  misc_RNA (1)...(19): siRNA sense strand
ccuggaagacgccuacauu

SEQ ID NO: 819965 - RNA, 19 nt, Homo sapiens
  misc_RNA (1)...(19): siRNA sense strand
gcaggaaauucuggaccau

SEQ ID NO: 819966 - RNA, 19 nt, Homo sapiens
  misc_RNA (1)...(19): siRNA sense strand
gugcuaaggaagugucuga

SEQ ID NO: 819967 - RNA, 19 nt, Homo sapiens
  misc_RNA (1)...(19): siRNA sense strand
uaucagcugcuaccaggaa

SEQ ID NO: 819968 - RNA, 19 nt, Homo sapiens
  misc_RNA (1)...(19): siRNA sense strand
gugaugcuguacaccaugu

SEQ ID NO: 819969 - RNA, 19 nt, Homo sapiens
  misc_RNA (1)...(19): siRNA sense strand
cccaggauuucgaagaguu

SEQ ID NO: 819970 - RNA, 19 nt, Homo sapiens
  misc_RNA (1)...(19): siRNA sense strand
cagccagacuguucuacca

SEQ ID NO: 819971 - RNA, 19 nt, Homo sapiens
  misc_RNA (1)...(19): siRNA sense strand
gauuuuagcgucucgaauu

SEQ ID NO: 819972 - RNA, 19 nt, Homo sapiens
  misc_RNA (1)...(19): siRNA sense strand
aaacccaggauuucgaaga

SEQ ID NO: 819973 - RNA, 19 nt, Homo sapiens
  misc_RNA (1)...(19): siRNA sense strand
gcgguacccuuuccaugac

SEQ ID NO: 819974 - RNA, 19 nt, Homo sapiens
  misc_RNA (1)...(19): siRNA sense strand
ugcaagguguuugauauca

SEQ ID NO: 819975 - RNA, 19 nt, Homo sapiens
  misc_RNA (1)...(19): siRNA sense strand
uauccugggugagaccaaa

SEQ ID NO: 819976 - RNA, 19 nt, Homo sapiens
  misc_RNA (1)...(19): siRNA sense strand
guucaacauuccagagacu

SEQ ID NO: 819977 - RNA, 19 nt, Homo sapiens
  misc_RNA (1)...(19): siRNA sense strand
gaccucaagcugcggaaau

SEQ ID NO: 819978 - RNA, 19 nt, Homo sapiens
  misc_RNA (1)...(19): siRNA sense strand
ccagacuguucuaccagau

SEQ ID NO: 819979 - RNA, 19 nt, Homo sapiens
  misc_RNA (1)...(19): siRNA sense strand
gaguugucgucuauaaggu

SEQ ID NO: 819980 - RNA, 19 nt, Homo sapiens
  misc_RNA (1)...(19): siRNA sense strand
agagaggacucgggucaag

SEQ ID NO: 819981 - RNA, 19 nt, Homo sapiens
  misc_RNA (1)...(19): siRNA sense strand
gcugcggaaauucaucuuu

SEQ ID NO: 819982 - RNA, 19 nt, Homo sapiens
  misc_RNA (1)...(19): siRNA sense strand
cuccgaacuugucgcauug

SEQ ID NO: 819983 - RNA, 19 nt, Homo sapiens
  misc_RNA (1)...(19): siRNA sense strand
gcugaccucgcaggaaauu

SEQ ID NO: 819984 - RNA, 19 nt, Homo sapiens
  misc_RNA (1)...(19): siRNA sense strand
uuacguaagcccagagauc

SEQ ID NO: 819985 - RNA, 19 nt, Homo sapiens
  misc_RNA (1)...(19): siRNA sense strand
gaggaggcagccagacugu

SEQ ID NO: 819986 - RNA, 19 nt, Homo sapiens
  misc_RNA (1)...(19): siRNA sense strand
ccaaagccuauguguucuu

SEQ ID NO: 819987 - RNA, 19 nt, Homo sapiens
  misc_RNA (1)...(19): siRNA sense strand
gagaccaaagccuaugugu

SEQ ID NO: 819988 - RNA, 19 nt, Homo sapiens
  misc_RNA (1)...(19): siRNA sense strand
gaugcuguacaccauguug

SEQ ID NO: 819989 - RNA, 19 nt, Homo sapiens
  misc_RNA (1)...(19): siRNA sense strand
gccugucugcucauaguaa

SEQ ID NO: 819990 - RNA, 19 nt, Homo sapiens
  misc_RNA (1)...(19): siRNA sense strand
ggagaucgcggaacaaaac

SEQ ID NO: 819991 - RNA, 19 nt, Homo sapiens
  misc_RNA (1)...(19): siRNA sense strand
cauauggugcuaaggaagu

SEQ ID NO: 819992 - RNA, 19 nt, Homo sapiens
  misc_RNA (1)...(19): siRNA sense strand
gcggaaauucaucuuuaag

SEQ ID NO: 819993 - RNA, 19 nt, Homo sapiens
  misc_RNA (1)...(19): siRNA sense strand
agaccaaagccuauguguu

SEQ ID NO: 819994 - RNA, 19 nt, Homo sapiens
  misc_RNA (1)...(19): siRNA sense strand
aguaacaucaaccaaauca

SEQ ID NO: 819995 - RNA, 19 nt, Homo sapiens
  misc_RNA (1)...(19): siRNA sense strand
gcacaacucgucacucuuu

SEQ ID NO: 819996 - RNA, 19 nt, Homo sapiens
  misc_RNA (1)...(19): siRNA sense strand
ggagagcagucgccgcuuu

SEQ ID NO: 819997 - RNA, 19 nt, Homo sapiens
  misc_RNA (1)...(19): siRNA sense strand
gucaagaccugguuccaaa

SEQ ID NO: 819998 - RNA, 19 nt, Homo sapiens
  misc_RNA (1)...(19): siRNA sense strand
ggaggauaguuccaagguu

SEQ ID NO: 819999 - RNA, 19 nt, Homo sapiens
  misc_RNA (1)...(19): siRNA sense strand
caacacgacgccuuccaaa

SEQ ID NO: 820000 - RNA, 19 nt, Homo sapiens
  misc_RNA (1)...(19): siRNA sense strand
gcaucgaccagauccuuaa

SEQ ID NO: 820001 - RNA, 19 nt, Homo sapiens
  misc_RNA (1)...(19): siRNA sense strand
gccuagggcgucucaauuu

SEQ ID NO: 820002 - RNA, 19 nt, Homo sapiens
  misc_RNA (1)...(19): siRNA sense strand
gcaacacgacgccuuccaa

SEQ ID NO: 820003 - RNA, 19 nt, Homo sapiens
  misc_RNA (1)...(19): siRNA sense strand
ccuagggcgucucaauuuc

SEQ ID NO: 820004 - RNA, 19 nt, Homo sapiens
  misc_RNA (1)...(19): siRNA sense strand
gagagcagucgccgcuuug

SEQ ID NO: 820005 - RNA, 19 nt, Homo sapiens
  misc_RNA (1)...(19): siRNA sense strand
cugcacaacucgucacucu

SEQ ID NO: 820006 - RNA, 19 nt, Homo sapiens
  misc_RNA (1)...(19): siRNA sense strand
ggcaucgaccagauccuua

SEQ ID NO: 820007 - RNA, 19 nt, Homo sapiens
  misc_RNA (1)...(19): siRNA sense strand
ucgaggacgcgggaucuua

SEQ ID NO: 820008 - RNA, 19 nt, Homo sapiens
  misc_RNA (1)...(19): siRNA sense strand
ggacgcgggaucuuacagu

SEQ ID NO: 820009 - RNA, 19 nt, Homo sapiens
  misc_RNA (1)...(19): siRNA sense strand
gcagucgccgcuuugugaa

SEQ ID NO: 820010 - RNA, 19 nt, Homo sapiens
  misc_RNA (1)...(19): siRNA sense strand
gagcagucgccgcuuugug

SEQ ID NO: 820011 - RNA, 19 nt, Homo sapiens
  misc_RNA (1)...(19): siRNA sense strand
cacaacucgucacucuuug

SEQ ID NO: 820012 - RNA, 19 nt, Homo sapiens
  misc_RNA (1)...(19): siRNA sense strand
gaucuuacagugucaaccu

SEQ ID NO: 820013 - RNA, 19 nt, Homo sapiens
  misc_RNA (1)...(19): siRNA sense strand
gggaggaggauaguuccaa

SEQ ID NO: 820014 - RNA, 19 nt, Homo sapiens
  misc_RNA (1)...(19): siRNA sense strand
ucuuugcucugcagaaucu

SEQ ID NO: 820015 - RNA, 19 nt, Homo sapiens
  misc_RNA (1)...(19): siRNA sense strand
gcagaggugucgccuuuaa

SEQ ID NO: 820016 - RNA, 19 nt, Homo sapiens
  misc_RNA (1)...(19): siRNA sense strand
gcagaaagcuagagaucuc

SEQ ID NO: 820017 - RNA, 19 nt, Homo sapiens
  misc_RNA (1)...(19): siRNA sense strand
gugcagaggugucgccuuu

SEQ ID NO: 820018 - RNA, 19 nt, Homo sapiens
  misc_RNA (1)...(19): siRNA sense strand
ggugucgccuuuaauguga

SEQ ID NO: 820019 - RNA, 19 nt, Homo sapiens
  misc_RNA (1)...(19): siRNA sense strand
gaacagagaccugguacac

SEQ ID NO: 820020 - RNA, 19 nt, Homo sapiens
  misc_RNA (1)...(19): siRNA sense strand
cacaaggucucagaacaga

SEQ ID NO: 820021 - RNA, 19 nt, Homo sapiens
  misc_RNA (1)...(19): siRNA sense strand
gggcgguucugaaggacuu

SEQ ID NO: 820022 - RNA, 19 nt, Homo sapiens
  misc_RNA (1)...(19): siRNA sense strand
gcaaccuacuguuuauguc

SEQ ID NO: 820023 - RNA, 19 nt, Homo sapiens
  misc_RNA (1)...(19): siRNA sense strand
ucagaacacccaaacacaa

SEQ ID NO: 820024 - RNA, 19 nt, Homo sapiens
  misc_RNA (1)...(19): siRNA sense strand
ccaaacacaaggucucaga

SEQ ID NO: 820025 - RNA, 19 nt, Homo sapiens
  misc_RNA (1)...(19): siRNA sense strand
gggcagaaagcuagagauc

SEQ ID NO: 820026 - RNA, 19 nt, Homo sapiens
  misc_RNA (1)...(19): siRNA sense strand
ccggcaaccuacuguuuau

SEQ ID NO: 820027 - RNA, 19 nt, Homo sapiens
  misc_RNA (1)...(19): siRNA sense strand
gaaagcuagagaucucaga

SEQ ID NO: 820028 - RNA, 19 nt, Homo sapiens
  misc_RNA (1)...(19): siRNA sense strand
caaccuacuguuuauguca

SEQ ID NO: 820029 - RNA, 19 nt, Homo sapiens
  misc_RNA (1)...(19): siRNA sense strand
ucagaacagagaccuggua

SEQ ID NO: 820030 - RNA, 19 nt, Homo sapiens
  misc_RNA (1)...(19): siRNA sense strand
caaacacaaggucucagaa

SEQ ID NO: 820031 - RNA, 19 nt, Homo sapiens
  misc_RNA (1)...(19): siRNA sense strand
gaacacccaaacacaaggu

SEQ ID NO: 820032 - RNA, 19 nt, Homo sapiens
  misc_RNA (1)...(19): siRNA sense strand
ggcaaccuacuguuuaugu

SEQ ID NO: 820033 - RNA, 19 nt, Homo sapiens
  misc_RNA (1)...(19): siRNA sense strand
aacacaaggucucagaaca

SEQ ID NO: 820034 - RNA, 19 nt, Homo sapiens
  misc_RNA (1)...(19): siRNA sense strand
cagaacacccaaacacaag

SEQ ID NO: 820035 - RNA, 19 nt, Homo sapiens
  misc_RNA (1)...(19): siRNA sense strand
cugcuucaguugcacauca

SEQ ID NO: 820036 - RNA, 19 nt, Homo sapiens
  misc_RNA (1)...(19): siRNA sense strand
gaucucagaacacccaaac

SEQ ID NO: 820037 - RNA, 19 nt, Homo sapiens
  misc_RNA (1)...(19): siRNA sense strand
gaggugucgccuuuaaugu

SEQ ID NO: 820038 - RNA, 19 nt, Homo sapiens
  misc_RNA (1)...(19): siRNA sense strand
agaggugucgccuuuaaug

SEQ ID NO: 820039 - RNA, 19 nt, Homo sapiens
  misc_RNA (1)...(19): siRNA sense strand
guccggcaaccuacuguuu

SEQ ID NO: 820040 - RNA, 19 nt, Homo sapiens
  misc_RNA (1)...(19): siRNA sense strand
caccguguccggcaaccua

SEQ ID NO: 820041 - RNA, 19 nt, Homo sapiens
  misc_RNA (1)...(19): siRNA sense strand
gacagccgccugcuucagu

SEQ ID NO: 820042 - RNA, 19 nt, Homo sapiens
  misc_RNA (1)...(19): siRNA sense strand
uccggcaaccuacuguuua

SEQ ID NO: 820043 - RNA, 19 nt, Homo sapiens
  misc_RNA (1)...(19): siRNA sense strand
aaagcuagagaucucagaa

SEQ ID NO: 820044 - RNA, 19 nt, Homo sapiens
  misc_RNA (1)...(19): siRNA sense strand
acagccgccugcuucaguu

SEQ ID NO: 820045 - RNA, 19 nt, Homo sapiens
  misc_RNA (1)...(19): siRNA sense strand
gcaaagugaucuaacauua

SEQ ID NO: 820046 - RNA, 19 nt, Homo sapiens
  misc_RNA (1)...(19): siRNA sense strand
gggcaaaguucacauauuu

SEQ ID NO: 820047 - RNA, 19 nt, Homo sapiens
  misc_RNA (1)...(19): siRNA sense strand
gaucuaacauuacagagua

SEQ ID NO: 820048 - RNA, 19 nt, Homo sapiens
  misc_RNA (1)...(19): siRNA sense strand
gcagauaggucaguugaaa

SEQ ID NO: 820049 - RNA, 19 nt, Homo sapiens
  misc_RNA (1)...(19): siRNA sense strand
gaagaaagagaccaguuua

SEQ ID NO: 820050 - RNA, 19 nt, Homo sapiens
  misc_RNA (1)...(19): siRNA sense strand
ggacauggauauagcaaug

SEQ ID NO: 820051 - RNA, 19 nt, Homo sapiens
  misc_RNA (1)...(19): siRNA sense strand
ggauuaagcacagauauua

SEQ ID NO: 820052 - RNA, 19 nt, Homo sapiens
  misc_RNA (1)...(19): siRNA sense strand
caaaugagauuagagagaa

SEQ ID NO: 820053 - RNA, 19 nt, Homo sapiens
  misc_RNA (1)...(19): siRNA sense strand
gaagagcuguuacggauag

SEQ ID NO: 820054 - RNA, 19 nt, Homo sapiens
  misc_RNA (1)...(19): siRNA sense strand
agaaagagcugguggaaca

SEQ ID NO: 820055 - RNA, 19 nt, Homo sapiens
  misc_RNA (1)...(19): siRNA sense strand
gagagaagcaguagauuug

SEQ ID NO: 820056 - RNA, 19 nt, Homo sapiens
  misc_RNA (1)...(19): siRNA sense strand
gaaggucagucuacacgaa

SEQ ID NO: 820057 - RNA, 19 nt, Homo sapiens
  misc_RNA (1)...(19): siRNA sense strand
auacaagcaugccagauua

SEQ ID NO: 820058 - RNA, 19 nt, Homo sapiens
  misc_RNA (1)...(19): siRNA sense strand
gaaagacuguugacacucu

SEQ ID NO: 820059 - RNA, 19 nt, Homo sapiens
  misc_RNA (1)...(19): siRNA sense strand
gaagaaauguggaaaacuu

SEQ ID NO: 820060 - RNA, 19 nt, Homo sapiens
  misc_RNA (1)...(19): siRNA sense strand
gcaaacugagggcauaaua

SEQ ID NO: 820061 - RNA, 19 nt, Homo sapiens
  misc_RNA (1)...(19): siRNA sense strand
caacaaagugcucgugauu

SEQ ID NO: 820062 - RNA, 19 nt, Homo sapiens
  misc_RNA (1)...(19): siRNA sense strand
gcauugagaugagauugaa

SEQ ID NO: 820063 - RNA, 19 nt, Homo sapiens
  misc_RNA (1)...(19): siRNA sense strand
gaagauggcaagaaggauu

SEQ ID NO: 820064 - RNA, 19 nt, Homo sapiens
  misc_RNA (1)...(19): siRNA sense strand
gcacaaagggcaaaguuca

SEQ ID NO: 820065 - RNA, 19 nt, Homo sapiens
  misc_RNA (1)...(19): siRNA sense strand
ugaagcagcugcaaguguu

SEQ ID NO: 820066 - RNA, 19 nt, Homo sapiens
  misc_RNA (1)...(19): siRNA sense strand
agcagaagccuuagaauua

SEQ ID NO: 820067 - RNA, 19 nt, Homo sapiens
  misc_RNA (1)...(19): siRNA sense strand
gaagugauaauggagauaa

SEQ ID NO: 820068 - RNA, 19 nt, Homo sapiens
  misc_RNA (1)...(19): siRNA sense strand
gggaucagcagaagccuua

SEQ ID NO: 820069 - RNA, 19 nt, Homo sapiens
  misc_RNA (1)...(19): siRNA sense strand
gcagaagccuuagaauuac

SEQ ID NO: 820070 - RNA, 19 nt, Homo sapiens
  misc_RNA (1)...(19): siRNA sense strand
aaacagcacagcuccauuu

SEQ ID NO: 820071 - RNA, 19 nt, Homo sapiens
  misc_RNA (1)...(19): siRNA sense strand
aagaacagaucaucaagga

SEQ ID NO: 820072 - RNA, 19 nt, Homo sapiens
  misc_RNA (1)...(19): siRNA sense strand
cuuauaggcuucugucuug

SEQ ID NO: 820073 - RNA, 19 nt, Homo sapiens
  misc_RNA (1)...(19): siRNA sense strand
aaauacagcuggagacauc

SEQ ID NO: 820074 - RNA, 19 nt, Homo sapiens
  misc_RNA (1)...(19): siRNA sense strand
ugacuuaccugaacuugag

SEQ ID NO: 820075 - RNA, 19 nt, Homo sapiens
  misc_RNA (1)...(19): siRNA sense strand
ugucaaacaucauggaaga

SEQ ID NO: 820076 - RNA, 19 nt, Homo sapiens
  misc_RNA (1)...(19): siRNA sense strand
gaagaagaacagaucauca

SEQ ID NO: 820077 - RNA, 19 nt, Homo sapiens
  misc_RNA (1)...(19): siRNA sense strand
caacucaggagaagaaaga

SEQ ID NO: 820078 - RNA, 19 nt, Homo sapiens
  misc_RNA (1)...(19): siRNA sense strand
gcaacaaagugcucgugau

SEQ ID NO: 820079 - RNA, 19 nt, Homo sapiens
  misc_RNA (1)...(19): siRNA sense strand
cagcagaagccuuagaauu

SEQ ID NO: 820080 - RNA, 19 nt, Homo sapiens
  misc_RNA (1)...(19): siRNA sense strand
gaugugcacuggcaaacug

SEQ ID NO: 820081 - RNA, 19 nt, Homo sapiens
  misc_RNA (1)...(19): siRNA sense strand
gaauaacccucugcagucu

SEQ ID NO: 820082 - RNA, 19 nt, Homo sapiens
  misc_RNA (1)...(19): siRNA sense strand
caaacugagggcauaauaa

SEQ ID NO: 820083 - RNA, 19 nt, Homo sapiens
  misc_RNA (1)...(19): siRNA sense strand
gcagaugagagaagagaaa

SEQ ID NO: 820084 - RNA, 19 nt, Homo sapiens
  misc_RNA (1)...(19): siRNA sense strand
ccaaagaucaggacaugga

SEQ ID NO: 820085 - RNA, 19 nt, Homo sapiens
  misc_RNA (1)...(19): siRNA sense strand
ugugugaggugcaaaguga

SEQ ID NO: 820086 - RNA, 19 nt, Homo sapiens
  misc_RNA (1)...(19): siRNA sense strand
gagccaguauucuccaaau

SEQ ID NO: 820087 - RNA, 19 nt, Homo sapiens
  misc_RNA (1)...(19): siRNA sense strand
cacaagaacuaguagaucu

SEQ ID NO: 820088 - RNA, 19 nt, Homo sapiens
  misc_RNA (1)...(19): siRNA sense strand
ugagagaagcaguagauuu

SEQ ID NO: 820089 - RNA, 19 nt, Homo sapiens
  misc_RNA (1)...(19): siRNA sense strand
caaacaucauggaagaaga

SEQ ID NO: 820090 - RNA, 19 nt, Homo sapiens
  misc_RNA (1)...(19): siRNA sense strand
gaagcagcugcaaguguua

SEQ ID NO: 820091 - RNA, 19 nt, Homo sapiens
  misc_RNA (1)...(19): siRNA sense strand
agacaucuccgguguguga

SEQ ID NO: 820092 - RNA, 19 nt, Homo sapiens
  misc_RNA (1)...(19): siRNA sense strand
ucagagaaauuuggaaucu

SEQ ID NO: 820093 - RNA, 19 nt, Homo sapiens
  misc_RNA (1)...(19): siRNA sense strand
ucuaagaccucagagaaau

SEQ ID NO: 820094 - RNA, 19 nt, Homo sapiens
  misc_RNA (1)...(19): siRNA sense strand
cauacaagcaugccagauu

SEQ ID NO: 820095 - RNA, 19 nt, Homo sapiens
  misc_RNA (1)...(19): siRNA sense strand
gccaggaaauugaaggaau

SEQ ID NO: 820096 - RNA, 19 nt, Homo sapiens
  misc_RNA (1)...(19): siRNA sense strand
ggugcaaagugaucuaaca

SEQ ID NO: 820097 - RNA, 19 nt, Homo sapiens
  misc_RNA (1)...(19): siRNA sense strand
ggcaaaguucacauauuua

SEQ ID NO: 820098 - RNA, 19 nt, Homo sapiens
  misc_RNA (1)...(19): siRNA sense strand
aaacagacugguugaaguu

SEQ ID NO: 820099 - RNA, 19 nt, Homo sapiens
  misc_RNA (1)...(19): siRNA sense strand
cagagaaauuuggaaucua

SEQ ID NO: 820100 - RNA, 19 nt, Homo sapiens
  misc_RNA (1)...(19): siRNA sense strand
gcugcaagaucccaaugga

SEQ ID NO: 820101 - RNA, 19 nt, Homo sapiens
  misc_RNA (1)...(19): siRNA sense strand
gagaagaaagagaccaguu

SEQ ID NO: 820102 - RNA, 19 nt, Homo sapiens
  misc_RNA (1)...(19): siRNA sense strand
ggaagaagaacagaucauc

SEQ ID NO: 820103 - RNA, 19 nt, Homo sapiens
  misc_RNA (1)...(19): siRNA sense strand
uaagaccucagagaaauuu

SEQ ID NO: 820104 - RNA, 19 nt, Homo sapiens
  misc_RNA (1)...(19): siRNA sense strand
gcacugaauggucaaauac

SEQ ID NO: 820105 - RNA, 19 nt, Homo sapiens
  misc_RNA (1)...(19): siRNA sense strand
gaucaggacauggauauag

SEQ ID NO: 820106 - RNA, 19 nt, Homo sapiens
  misc_RNA (1)...(19): siRNA sense strand
agaagaaagagaccaguuu

SEQ ID NO: 820107 - RNA, 19 nt, Homo sapiens
  misc_RNA (1)...(19): siRNA sense strand
gcucgugauuccaauuugu

SEQ ID NO: 820108 - RNA, 19 nt, Homo sapiens
  misc_RNA (1)...(19): siRNA sense strand
ucuauagacccgcaguuua

SEQ ID NO: 820109 - RNA, 19 nt, Homo sapiens
  misc_RNA (1)...(19): siRNA sense strand
ccaaaugagauuagagaga

SEQ ID NO: 820110 - RNA, 19 nt, Homo sapiens
  misc_RNA (1)...(19): siRNA sense strand
caccgagccuucugacgaa

SEQ ID NO: 820111 - RNA, 19 nt, Homo sapiens
  misc_RNA (1)...(19): siRNA sense strand
gcuucugucuuguccauau

SEQ ID NO: 820112 - RNA, 19 nt, Homo sapiens
  misc_RNA (1)...(19): siRNA sense strand
gccaguauucuccaaauga

SEQ ID NO: 820113 - RNA, 19 nt, Homo sapiens
  misc_RNA (1)...(19): siRNA sense strand
ucaaugugccaaugucaaa

SEQ ID NO: 820114 - RNA, 19 nt, Homo sapiens
  misc_RNA (1)...(19): siRNA sense strand
aaacuuagcauggccaaau

SEQ ID NO: 820115 - RNA, 19 nt, Homo sapiens
  misc_RNA (1)...(19): siRNA sense strand
gucagaagaaauuaccuua

SEQ ID NO: 820116 - RNA, 19 nt, Homo sapiens
  misc_RNA (1)...(19): siRNA sense strand
gccaaaugcagaagaaaug

SEQ ID NO: 820117 - RNA, 19 nt, Homo sapiens
  misc_RNA (1)...(19): siRNA sense strand
aagcauccaugucccauca

SEQ ID NO: 820118 - RNA, 19 nt, Homo sapiens
  misc_RNA (1)...(19): siRNA sense strand
ugcacugaauggucaaaua

SEQ ID NO: 820119 - RNA, 19 nt, Homo sapiens
  misc_RNA (1)...(19): siRNA sense strand
gccuuagaauuacaagauu

SEQ ID NO: 820120 - RNA, 19 nt, Homo sapiens
  misc_RNA (1)...(19): siRNA sense strand
gauauuacagagagaagug

SEQ ID NO: 820121 - RNA, 19 nt, Homo sapiens
  misc_RNA (1)...(19): siRNA sense strand
gcugagagaagcaguagau

SEQ ID NO: 820122 - RNA, 19 nt, Homo sapiens
  misc_RNA (1)...(19): siRNA sense strand
ccauggagaggccacauuu

SEQ ID NO: 820123 - RNA, 19 nt, Homo sapiens
  misc_RNA (1)...(19): siRNA sense strand
agacagcugacucccuuua

SEQ ID NO: 820124 - RNA, 19 nt, Homo sapiens
  misc_RNA (1)...(19): siRNA sense strand
ggaguuggaagugauaaug

SEQ ID NO: 820125 - RNA, 19 nt, Homo sapiens
  misc_RNA (1)...(19): siRNA sense strand
gugcuggucuauaucacuu

SEQ ID NO: 820126 - RNA, 19 nt, Homo sapiens
  misc_RNA (1)...(19): siRNA sense strand
aaauggagcagaugagaga

SEQ ID NO: 820127 - RNA, 19 nt, Homo sapiens
  misc_RNA (1)...(19): siRNA sense strand
aaacaucauggaagaagaa

SEQ ID NO: 820128 - RNA, 19 nt, Homo sapiens
  misc_RNA (1)...(19): siRNA sense strand
cagcagauaggucaguuga

SEQ ID NO: 820129 - RNA, 19 nt, Homo sapiens
  misc_RNA (1)...(19): siRNA sense strand
gagcagaugagagaagaga

SEQ ID NO: 820130 - RNA, 19 nt, Homo sapiens
  misc_RNA (1)...(19): siRNA sense strand
aaacugagggcauaauaag

SEQ ID NO: 820131 - RNA, 19 nt, Homo sapiens
  misc_RNA (1)...(19): siRNA sense strand
ggaauugugccauuuugua

SEQ ID NO: 820132 - RNA, 19 nt, Homo sapiens
  misc_RNA (1)...(19): siRNA sense strand
aaagggcaaaguucacaua

SEQ ID NO: 820133 - RNA, 19 nt, Homo sapiens
  misc_RNA (1)...(19): siRNA sense strand
uuacaagauucugcacuga

SEQ ID NO: 820134 - RNA, 19 nt, Homo sapiens
  misc_RNA (1)...(19): siRNA sense strand
gaugcugacuuaccugaac

SEQ ID NO: 820135 - RNA, 19 nt, Homo sapiens
  misc_RNA (1)...(19): siRNA sense strand
gaagcgaaccccaaccuuu

SEQ ID NO: 820136 - RNA, 19 nt, Homo sapiens
  misc_RNA (1)...(19): siRNA sense strand
cguggaagauggcaagaag

SEQ ID NO: 820137 - RNA, 19 nt, Homo sapiens
  misc_RNA (1)...(19): siRNA sense strand
gauugaaggucagucuaca

SEQ ID NO: 820138 - RNA, 19 nt, Homo sapiens
  misc_RNA (1)...(19): siRNA sense strand
caaccggagccuucccuuu

SEQ ID NO: 820139 - RNA, 19 nt, Homo sapiens
  misc_RNA (1)...(19): siRNA sense strand
aagaagaacagaucaucaa

SEQ ID NO: 820140 - RNA, 19 nt, Homo sapiens
  misc_RNA (1)...(19): siRNA sense strand
caagcaugccagauuaaga

SEQ ID NO: 820141 - RNA, 19 nt, Homo sapiens
  misc_RNA (1)...(19): siRNA sense strand
uaaucuguaucacaacugu

SEQ ID NO: 820142 - RNA, 19 nt, Homo sapiens
  misc_RNA (1)...(19): siRNA sense strand
guaacgggagccaguauuc

SEQ ID NO: 820143 - RNA, 19 nt, Homo sapiens
  misc_RNA (1)...(19): siRNA sense strand
ucgaaagacuguugacacu

SEQ ID NO: 820144 - RNA, 19 nt, Homo sapiens
  misc_RNA (1)...(19): siRNA sense strand
guccauauucucuuuauag

SEQ ID NO: 820145 - RNA, 19 nt, Homo sapiens
  misc_RNA (1)...(19): siRNA sense strand
gcaaagugaucuaacauua

SEQ ID NO: 820146 - RNA, 19 nt, Homo sapiens
  misc_RNA (1)...(19): siRNA sense strand
gggcaaaguucacauauuu

SEQ ID NO: 820147 - RNA, 19 nt, Homo sapiens
  misc_RNA (1)...(19): siRNA sense strand
gaucuaacauuacagagua

SEQ ID NO: 820148 - RNA, 19 nt, Homo sapiens
  misc_RNA (1)...(19): siRNA sense strand
gcagauaggucaguugaaa

SEQ ID NO: 820149 - RNA, 19 nt, Homo sapiens
  misc_RNA (1)...(19): siRNA sense strand
gaagaaagagaccaguuua

SEQ ID NO: 820150 - RNA, 19 nt, Homo sapiens
  misc_RNA (1)...(19): siRNA sense strand
ggacauggauauagcaaug

SEQ ID NO: 820151 - RNA, 19 nt, Homo sapiens
  misc_RNA (1)...(19): siRNA sense strand
ggauuaagcacagauauua

SEQ ID NO: 820152 - RNA, 19 nt, Homo sapiens
  misc_RNA (1)...(19): siRNA sense strand
caaaugagauuagagagaa

SEQ ID NO: 820153 - RNA, 19 nt, Homo sapiens
  misc_RNA (1)...(19): siRNA sense strand
gaagagcuguuacggauag

SEQ ID NO: 820154 - RNA, 19 nt, Homo sapiens
  misc_RNA (1)...(19): siRNA sense strand
agaaagagcugguggaaca

SEQ ID NO: 820155 - RNA, 19 nt, Homo sapiens
  misc_RNA (1)...(19): siRNA sense strand
gagagaagcaguagauuug

SEQ ID NO: 820156 - RNA, 19 nt, Homo sapiens
  misc_RNA (1)...(19): siRNA sense strand
gaaggucagucuacacgaa

SEQ ID NO: 820157 - RNA, 19 nt, Homo sapiens
  misc_RNA (1)...(19): siRNA sense strand
auacaagcaugccagauua

SEQ ID NO: 820158 - RNA, 19 nt, Homo sapiens
  misc_RNA (1)...(19): siRNA sense strand
gaaagacuguugacacucu

SEQ ID NO: 820159 - RNA, 19 nt, Homo sapiens
  misc_RNA (1)...(19): siRNA sense strand
gaagaaauguggaaaacuu

SEQ ID NO: 820160 - RNA, 19 nt, Homo sapiens
  misc_RNA (1)...(19): siRNA sense strand
gcaaacugagggcauaaua

SEQ ID NO: 820161 - RNA, 19 nt, Homo sapiens
  misc_RNA (1)...(19): siRNA sense strand
caacaaagugcucgugauu

SEQ ID NO: 820162 - RNA, 19 nt, Homo sapiens
  misc_RNA (1)...(19): siRNA sense strand
gcauugagaugagauugaa

SEQ ID NO: 820163 - RNA, 19 nt, Homo sapiens
  misc_RNA (1)...(19): siRNA sense strand
gaagauggcaagaaggauu

SEQ ID NO: 820164 - RNA, 19 nt, Homo sapiens
  misc_RNA (1)...(19): siRNA sense strand
gcacaaagggcaaaguuca

SEQ ID NO: 820165 - RNA, 19 nt, Homo sapiens
  misc_RNA (1)...(19): siRNA sense strand
ugaagcagcugcaaguguu

SEQ ID NO: 820166 - RNA, 19 nt, Homo sapiens
  misc_RNA (1)...(19): siRNA sense strand
agcagaagccuuagaauua

SEQ ID NO: 820167 - RNA, 19 nt, Homo sapiens
  misc_RNA (1)...(19): siRNA sense strand
gaagugauaauggagauaa

SEQ ID NO: 820168 - RNA, 19 nt, Homo sapiens
  misc_RNA (1)...(19): siRNA sense strand
gggaucagcagaagccuua

SEQ ID NO: 820169 - RNA, 19 nt, Homo sapiens
  misc_RNA (1)...(19): siRNA sense strand
gcagaagccuuagaauuac

SEQ ID NO: 820170 - RNA, 19 nt, Homo sapiens
  misc_RNA (1)...(19): siRNA sense strand
aaacagcacagcuccauuu

SEQ ID NO: 820171 - RNA, 19 nt, Homo sapiens
  misc_RNA (1)...(19): siRNA sense strand
aagaacagaucaucaagga

SEQ ID NO: 820172 - RNA, 19 nt, Homo sapiens
  misc_RNA (1)...(19): siRNA sense strand
cuuauaggcuucugucuug

SEQ ID NO: 820173 - RNA, 19 nt, Homo sapiens
  misc_RNA (1)...(19): siRNA sense strand
aaauacagcuggagacauc

SEQ ID NO: 820174 - RNA, 19 nt, Homo sapiens
  misc_RNA (1)...(19): siRNA sense strand
ugacuuaccugaacuugag

SEQ ID NO: 820175 - RNA, 19 nt, Homo sapiens
  misc_RNA (1)...(19): siRNA sense strand
ugucaaacaucauggaaga

SEQ ID NO: 820176 - RNA, 19 nt, Homo sapiens
  misc_RNA (1)...(19): siRNA sense strand
gaagaagaacagaucauca

SEQ ID NO: 820177 - RNA, 19 nt, Homo sapiens
  misc_RNA (1)...(19): siRNA sense strand
caacucaggagaagaaaga

SEQ ID NO: 820178 - RNA, 19 nt, Homo sapiens
  misc_RNA (1)...(19): siRNA sense strand
gcaacaaagugcucgugau

SEQ ID NO: 820179 - RNA, 19 nt, Homo sapiens
  misc_RNA (1)...(19): siRNA sense strand
cagcagaagccuuagaauu

SEQ ID NO: 820180 - RNA, 19 nt, Homo sapiens
  misc_RNA (1)...(19): siRNA sense strand
gaugugcacuggcaaacug

SEQ ID NO: 820181 - RNA, 19 nt, Homo sapiens
  misc_RNA (1)...(19): siRNA sense strand
gaauaacccucugcagucu

SEQ ID NO: 820182 - RNA, 19 nt, Homo sapiens
  misc_RNA (1)...(19): siRNA sense strand
caaacugagggcauaauaa

SEQ ID NO: 820183 - RNA, 19 nt, Homo sapiens
  misc_RNA (1)...(19): siRNA sense strand
gcagaugagagaagagaaa

SEQ ID NO: 820184 - RNA, 19 nt, Homo sapiens
  misc_RNA (1)...(19): siRNA sense strand
ccaaagaucaggacaugga

SEQ ID NO: 820185 - RNA, 19 nt, Homo sapiens
  misc_RNA (1)...(19): siRNA sense strand
ugugugaggugcaaaguga

SEQ ID NO: 820186 - RNA, 19 nt, Homo sapiens
  misc_RNA (1)...(19): siRNA sense strand
gagccaguauucuccaaau

SEQ ID NO: 820187 - RNA, 19 nt, Homo sapiens
  misc_RNA (1)...(19): siRNA sense strand
cacaagaacuaguagaucu

SEQ ID NO: 820188 - RNA, 19 nt, Homo sapiens
  misc_RNA (1)...(19): siRNA sense strand
ugagagaagcaguagauuu

SEQ ID NO: 820189 - RNA, 19 nt, Homo sapiens
  misc_RNA (1)...(19): siRNA sense strand
caaacaucauggaagaaga

SEQ ID NO: 820190 - RNA, 19 nt, Homo sapiens
  misc_RNA (1)...(19): siRNA sense strand
gaagcagcugcaaguguua

SEQ ID NO: 820191 - RNA, 19 nt, Homo sapiens
  misc_RNA (1)...(19): siRNA sense strand
agacaucuccgguguguga

SEQ ID NO: 820192 - RNA, 19 nt, Homo sapiens
  misc_RNA (1)...(19): siRNA sense strand
ucagagaaauuuggaaucu

SEQ ID NO: 820193 - RNA, 19 nt, Homo sapiens
  misc_RNA (1)...(19): siRNA sense strand
ucuaagaccucagagaaau

SEQ ID NO: 820194 - RNA, 19 nt, Homo sapiens
  misc_RNA (1)...(19): siRNA sense strand
cauacaagcaugccagauu

SEQ ID NO: 820195 - RNA, 19 nt, Homo sapiens
  misc_RNA (1)...(19): siRNA sense strand
ggugcaaagugaucuaaca

SEQ ID NO: 820196 - RNA, 19 nt, Homo sapiens
  misc_RNA (1)...(19): siRNA sense strand
gccaggaaauugaaggaau

SEQ ID NO: 820197 - RNA, 19 nt, Homo sapiens
  misc_RNA (1)...(19): siRNA sense strand
ggcaaaguucacauauuua

SEQ ID NO: 820198 - RNA, 19 nt, Homo sapiens
  misc_RNA (1)...(19): siRNA sense strand
cagagaaauuuggaaucua

SEQ ID NO: 820199 - RNA, 19 nt, Homo sapiens
  misc_RNA (1)...(19): siRNA sense strand
gcugcaagaucccaaugga

SEQ ID NO: 820200 - RNA, 19 nt, Homo sapiens
  misc_RNA (1)...(19): siRNA sense strand
gagaagaaagagaccaguu

SEQ ID NO: 820201 - RNA, 19 nt, Homo sapiens
  misc_RNA (1)...(19): siRNA sense strand
aaacagacugguugaaguu

SEQ ID NO: 820202 - RNA, 19 nt, Homo sapiens
  misc_RNA (1)...(19): siRNA sense strand
ggaagaagaacagaucauc

SEQ ID NO: 820203 - RNA, 19 nt, Homo sapiens
  misc_RNA (1)...(19): siRNA sense strand
uaagaccucagagaaauuu

SEQ ID NO: 820204 - RNA, 19 nt, Homo sapiens
  misc_RNA (1)...(19): siRNA sense strand
gcacugaauggucaaauac

SEQ ID NO: 820205 - RNA, 19 nt, Homo sapiens
  misc_RNA (1)...(19): siRNA sense strand
gaucaggacauggauauag

SEQ ID NO: 820206 - RNA, 19 nt, Homo sapiens
  misc_RNA (1)...(19): siRNA sense strand
agaagaaagagaccaguuu

SEQ ID NO: 820207 - RNA, 19 nt, Homo sapiens
  misc_RNA (1)...(19): siRNA sense strand
gcucgugauuccaauuugu

SEQ ID NO: 820208 - RNA, 19 nt, Homo sapiens
  misc_RNA (1)...(19): siRNA sense strand
ucuauagacccgcaguuua

SEQ ID NO: 820209 - RNA, 19 nt, Homo sapiens
  misc_RNA (1)...(19): siRNA sense strand
ccaaaugagauuagagaga

SEQ ID NO: 820210 - RNA, 19 nt, Homo sapiens
  misc_RNA (1)...(19): siRNA sense strand
caccgagccuucugacgaa

SEQ ID NO: 820211 - RNA, 19 nt, Homo sapiens
  misc_RNA (1)...(19): siRNA sense strand
gcuucugucuuguccauau

SEQ ID NO: 820212 - RNA, 19 nt, Homo sapiens
  misc_RNA (1)...(19): siRNA sense strand
gccaguauucuccaaauga

SEQ ID NO: 820213 - RNA, 19 nt, Homo sapiens
  misc_RNA (1)...(19): siRNA sense strand
ucaaugugccaaugucaaa

SEQ ID NO: 820214 - RNA, 19 nt, Homo sapiens
  misc_RNA (1)...(19): siRNA sense strand
aaacuuagcauggccaaau

SEQ ID NO: 820215 - RNA, 19 nt, Homo sapiens
  misc_RNA (1)...(19): siRNA sense strand
gucagaagaaauuaccuua

SEQ ID NO: 820216 - RNA, 19 nt, Homo sapiens
  misc_RNA (1)...(19): siRNA sense strand
gccaaaugcagaagaaaug

SEQ ID NO: 820217 - RNA, 19 nt, Homo sapiens
  misc_RNA (1)...(19): siRNA sense strand
aagcauccaugucccauca

SEQ ID NO: 820218 - RNA, 19 nt, Homo sapiens
  misc_RNA (1)...(19): siRNA sense strand
ugcacugaauggucaaaua

SEQ ID NO: 820219 - RNA, 19 nt, Homo sapiens
  misc_RNA (1)...(19): siRNA sense strand
gccuuagaauuacaagauu

SEQ ID NO: 820220 - RNA, 19 nt, Homo sapiens
  misc_RNA (1)...(19): siRNA sense strand
gauauuacagagagaagug

SEQ ID NO: 820221 - RNA, 19 nt, Homo sapiens
  misc_RNA (1)...(19): siRNA sense strand
gcugagagaagcaguagau

SEQ ID NO: 820222 - RNA, 19 nt, Homo sapiens
  misc_RNA (1)...(19): siRNA sense strand
ccauggagaggccacauuu

SEQ ID NO: 820223 - RNA, 19 nt, Homo sapiens
  misc_RNA (1)...(19): siRNA sense strand
agacagcugacucccuuua

SEQ ID NO: 820224 - RNA, 19 nt, Homo sapiens
  misc_RNA (1)...(19): siRNA sense strand
ggaguuggaagugauaaug

SEQ ID NO: 820225 - RNA, 19 nt, Homo sapiens
  misc_RNA (1)...(19): siRNA sense strand
gugcuggucuauaucacuu

SEQ ID NO: 820226 - RNA, 19 nt, Homo sapiens
  misc_RNA (1)...(19): siRNA sense strand
aaauggagcagaugagaga

SEQ ID NO: 820227 - RNA, 19 nt, Homo sapiens
  misc_RNA (1)...(19): siRNA sense strand
aaacaucauggaagaagaa

SEQ ID NO: 820228 - RNA, 19 nt, Homo sapiens
  misc_RNA (1)...(19): siRNA sense strand
cagcagauaggucaguuga

SEQ ID NO: 820229 - RNA, 19 nt, Homo sapiens
  misc_RNA (1)...(19): siRNA sense strand
gagcagaugagagaagaga

SEQ ID NO: 820230 - RNA, 19 nt, Homo sapiens
  misc_RNA (1)...(19): siRNA sense strand
aaacugagggcauaauaag

SEQ ID NO: 820231 - RNA, 19 nt, Homo sapiens
  misc_RNA (1)...(19): siRNA sense strand
aaagggcaaaguucacaua

SEQ ID NO: 820232 - RNA, 19 nt, Homo sapiens
  misc_RNA (1)...(19): siRNA sense strand
ggaauugugccauuuugua

SEQ ID NO: 820233 - RNA, 19 nt, Homo sapiens
  misc_RNA (1)...(19): siRNA sense strand
gaugcugacuuaccugaac

SEQ ID NO: 820234 - RNA, 19 nt, Homo sapiens
  misc_RNA (1)...(19): siRNA sense strand
uuacaagauucugcacuga

SEQ ID NO: 820235 - RNA, 19 nt, Homo sapiens
  misc_RNA (1)...(19): siRNA sense strand
gaagcgaaccccaaccuuu

SEQ ID NO: 820236 - RNA, 19 nt, Homo sapiens
  misc_RNA (1)...(19): siRNA sense strand
cguggaagauggcaagaag

SEQ ID NO: 820237 - RNA, 19 nt, Homo sapiens
  misc_RNA (1)...(19): siRNA sense strand
gauugaaggucagucuaca

SEQ ID NO: 820238 - RNA, 19 nt, Homo sapiens
  misc_RNA (1)...(19): siRNA sense strand
caaccggagccuucccuuu

SEQ ID NO: 820239 - RNA, 19 nt, Homo sapiens
  misc_RNA (1)...(19): siRNA sense strand
aagaagaacagaucaucaa

SEQ ID NO: 820240 - RNA, 19 nt, Homo sapiens
  misc_RNA (1)...(19): siRNA sense strand
caagcaugccagauuaaga

SEQ ID NO: 820241 - RNA, 19 nt, Homo sapiens
  misc_RNA (1)...(19): siRNA sense strand
guaacgggagccaguauuc

SEQ ID NO: 820242 - RNA, 19 nt, Homo sapiens
  misc_RNA (1)...(19): siRNA sense strand
uaaucuguaucacaacugu

SEQ ID NO: 820243 - RNA, 19 nt, Homo sapiens
  misc_RNA (1)...(19): siRNA sense strand
ucgaaagacuguugacacu

SEQ ID NO: 820244 - RNA, 19 nt, Homo sapiens
  misc_RNA (1)...(19): siRNA sense strand
guccauauucucuuuauag

SEQ ID NO: 820245 - RNA, 19 nt, Homo sapiens
  misc_RNA (1)...(19): siRNA sense strand
caaaguaucugccaacaag

SEQ ID NO: 820246 - RNA, 19 nt, Homo sapiens
  misc_RNA (1)...(19): siRNA sense strand
gaaauacucccucgugaau

SEQ ID NO: 820247 - RNA, 19 nt, Homo sapiens
  misc_RNA (1)...(19): siRNA sense strand
ggacagaccagcaguagga

SEQ ID NO: 820248 - RNA, 19 nt, Homo sapiens
  misc_RNA (1)...(19): siRNA sense strand
guugugaccugucgaacua

SEQ ID NO: 820249 - RNA, 19 nt, Homo sapiens
  misc_RNA (1)...(19): siRNA sense strand
ggaagccucugcacaucaa

SEQ ID NO: 820250 - RNA, 19 nt, Homo sapiens
  misc_RNA (1)...(19): siRNA sense strand
gagcagcccuguccugaag

SEQ ID NO: 820251 - RNA, 19 nt, Homo sapiens
  misc_RNA (1)...(19): siRNA sense strand
gcucucggcuuacaaagug

SEQ ID NO: 820252 - RNA, 19 nt, Homo sapiens
  misc_RNA (1)...(19): siRNA sense strand
gaacguggucaucaaaguu

SEQ ID NO: 820253 - RNA, 19 nt, Homo sapiens
  misc_RNA (1)...(19): siRNA sense strand
cagaguggcugcagagaau

SEQ ID NO: 820254 - RNA, 19 nt, Homo sapiens
  misc_RNA (1)...(19): siRNA sense strand
ccacacagaucagccaguu

SEQ ID NO: 820255 - RNA, 19 nt, Homo sapiens
  misc_RNA (1)...(19): siRNA sense strand
ccaacaagcucuccaagac

SEQ ID NO: 820256 - RNA, 19 nt, Homo sapiens
  misc_RNA (1)...(19): siRNA sense strand
gugaagagccgcaccaaga

SEQ ID NO: 820257 - RNA, 19 nt, Homo sapiens
  misc_RNA (1)...(19): siRNA sense strand
caucaaaccacgucuguga

SEQ ID NO: 820258 - RNA, 19 nt, Homo sapiens
  misc_RNA (1)...(19): siRNA sense strand
gggagaagaggaaggagua

SEQ ID NO: 820259 - RNA, 19 nt, Homo sapiens
  misc_RNA (1)...(19): siRNA sense strand
ggagaagccgcagcucaua

SEQ ID NO: 820260 - RNA, 19 nt, Homo sapiens
  misc_RNA (1)...(19): siRNA sense strand
ggaaggaguacugcaugua

SEQ ID NO: 820261 - RNA, 19 nt, Homo sapiens
  misc_RNA (1)...(19): siRNA sense strand
ggacugcacccaccagcaa

SEQ ID NO: 820262 - RNA, 19 nt, Homo sapiens
  misc_RNA (1)...(19): siRNA sense strand
caagcugccuuccuucauc

SEQ ID NO: 820263 - RNA, 19 nt, Homo sapiens
  misc_RNA (1)...(19): siRNA sense strand
gcagcccuguccugaagaa

SEQ ID NO: 820264 - RNA, 19 nt, Homo sapiens
  misc_RNA (1)...(19): siRNA sense strand
ucugauugaugacuacaaa

SEQ ID NO: 820265 - RNA, 19 nt, Homo sapiens
  misc_RNA (1)...(19): siRNA sense strand
cuucguggcgcaagaaaua

SEQ ID NO: 820266 - RNA, 19 nt, Homo sapiens
  misc_RNA (1)...(19): siRNA sense strand
gggcuacucuucccaccau

SEQ ID NO: 820267 - RNA, 19 nt, Homo sapiens
  misc_RNA (1)...(19): siRNA sense strand
gaagcuggguucucauucc

SEQ ID NO: 820268 - RNA, 19 nt, Homo sapiens
  misc_RNA (1)...(19): siRNA sense strand
gccggaagcuggguucuca

SEQ ID NO: 820269 - RNA, 19 nt, Homo sapiens
  misc_RNA (1)...(19): siRNA sense strand
ugcagggucugauugauga

SEQ ID NO: 820270 - RNA, 19 nt, Homo sapiens
  misc_RNA (1)...(19): siRNA sense strand
caaagugcaagaagaaaca

SEQ ID NO: 820271 - RNA, 19 nt, Homo sapiens
  misc_RNA (1)...(19): siRNA sense strand
gcuaccgcauugucaagaa

SEQ ID NO: 820272 - RNA, 19 nt, Homo sapiens
  misc_RNA (1)...(19): siRNA sense strand
gcagcgacuuccucaaagg

SEQ ID NO: 820273 - RNA, 19 nt, Homo sapiens
  misc_RNA (1)...(19): siRNA sense strand
ggucagaacguggucauca

SEQ ID NO: 820274 - RNA, 19 nt, Homo sapiens
  misc_RNA (1)...(19): siRNA sense strand
ccagcaaggugaucaagac

SEQ ID NO: 820275 - RNA, 19 nt, Homo sapiens
  misc_RNA (1)...(19): siRNA sense strand
gaagagccgcaccaagauc

SEQ ID NO: 820276 - RNA, 19 nt, Homo sapiens
  misc_RNA (1)...(19): siRNA sense strand
gucagaacguggucaucaa

SEQ ID NO: 820277 - RNA, 19 nt, Homo sapiens
  misc_RNA (1)...(19): siRNA sense strand
gcaaagugcaagaagaaac

SEQ ID NO: 820278 - RNA, 19 nt, Homo sapiens
  misc_RNA (1)...(19): siRNA sense strand
gcagggagaagaggaagga

SEQ ID NO: 820279 - RNA, 19 nt, Homo sapiens
  misc_RNA (1)...(19): siRNA sense strand
gcuccaccguacccagaaa

SEQ ID NO: 820280 - RNA, 19 nt, Homo sapiens
  misc_RNA (1)...(19): siRNA sense strand
aaaguuaaaccgccaucaa

SEQ ID NO: 820281 - RNA, 19 nt, Homo sapiens
  misc_RNA (1)...(19): siRNA sense strand
ucugcaagcugccuuccuu

SEQ ID NO: 820282 - RNA, 19 nt, Homo sapiens
  misc_RNA (1)...(19): siRNA sense strand
ucagaacguggucaucaaa

SEQ ID NO: 820283 - RNA, 19 nt, Homo sapiens
  misc_RNA (1)...(19): siRNA sense strand
ccaggauggugaagucagu

SEQ ID NO: 820284 - RNA, 19 nt, Homo sapiens
  misc_RNA (1)...(19): siRNA sense strand
gagaagccgcagcucauag

SEQ ID NO: 820285 - RNA, 19 nt, Homo sapiens
  misc_RNA (1)...(19): siRNA sense strand
gcagcagcauguccuugag

SEQ ID NO: 820286 - RNA, 19 nt, Homo sapiens
  misc_RNA (1)...(19): siRNA sense strand
gccaacaagcucuccaaga

SEQ ID NO: 820287 - RNA, 19 nt, Homo sapiens
  misc_RNA (1)...(19): siRNA sense strand
agaaauacucccucgugaa

SEQ ID NO: 820288 - RNA, 19 nt, Homo sapiens
  misc_RNA (1)...(19): siRNA sense strand
ggucaccacgcaccgacua

SEQ ID NO: 820289 - RNA, 19 nt, Homo sapiens
  misc_RNA (1)...(19): siRNA sense strand
gaccugcaguguggaagau

SEQ ID NO: 820290 - RNA, 19 nt, Homo sapiens
  misc_RNA (1)...(19): siRNA sense strand
guuaaaccgccaucaaagu

SEQ ID NO: 820291 - RNA, 19 nt, Homo sapiens
  misc_RNA (1)...(19): siRNA sense strand
aaguuaaaccgccaucaaa

SEQ ID NO: 820292 - RNA, 19 nt, Homo sapiens
  misc_RNA (1)...(19): siRNA sense strand
agaacguggucaucaaagu

SEQ ID NO: 820293 - RNA, 19 nt, Homo sapiens
  misc_RNA (1)...(19): siRNA sense strand
gcaagcugccuuccuucau

SEQ ID NO: 820294 - RNA, 19 nt, Homo sapiens
  misc_RNA (1)...(19): siRNA sense strand
cugcagcgacuuccucaaa

SEQ ID NO: 820295 - RNA, 19 nt, Homo sapiens
  misc_RNA (1)...(19): siRNA sense strand
cauccacgaucccgagaag

SEQ ID NO: 820296 - RNA, 19 nt, Homo sapiens
  misc_RNA (1)...(19): siRNA sense strand
ggaggaaaaggagauguua

SEQ ID NO: 820297 - RNA, 19 nt, Homo sapiens
  misc_RNA (1)...(19): siRNA sense strand
caagacccgcuaccgcauu

SEQ ID NO: 820298 - RNA, 19 nt, Homo sapiens
  misc_RNA (1)...(19): siRNA sense strand
ccagaguggcugcagagaa

SEQ ID NO: 820299 - RNA, 19 nt, Homo sapiens
  misc_RNA (1)...(19): siRNA sense strand
ugaagucagugggcagugu

SEQ ID NO: 820300 - RNA, 19 nt, Homo sapiens
  misc_RNA (1)...(19): siRNA sense strand
ggaccugcaguguggaaga

SEQ ID NO: 820301 - RNA, 19 nt, Homo sapiens
  misc_RNA (1)...(19): siRNA sense strand
aacguggucaucaaaguua

SEQ ID NO: 820302 - RNA, 19 nt, Homo sapiens
  misc_RNA (1)...(19): siRNA sense strand
cacaguggcagagccuuua

SEQ ID NO: 820303 - RNA, 19 nt, Homo sapiens
  misc_RNA (1)...(19): siRNA sense strand
ggaagcuggguucucauuc

SEQ ID NO: 820304 - RNA, 19 nt, Homo sapiens
  misc_RNA (1)...(19): siRNA sense strand
guggcugccuccucgaaga

SEQ ID NO: 820305 - RNA, 19 nt, Homo sapiens
  misc_RNA (1)...(19): siRNA sense strand
ccaacaggcucugcaagcu

SEQ ID NO: 820306 - RNA, 19 nt, Homo sapiens
  misc_RNA (1)...(19): siRNA sense strand
cagcaacugucccuauagc

SEQ ID NO: 820307 - RNA, 19 nt, Homo sapiens
  misc_RNA (1)...(19): siRNA sense strand
gaaccaccugcguccaguu

SEQ ID NO: 820308 - RNA, 19 nt, Homo sapiens
  misc_RNA (1)...(19): siRNA sense strand
ccgggaaggugaagguaag

SEQ ID NO: 820309 - RNA, 19 nt, Homo sapiens
  misc_RNA (1)...(19): siRNA sense strand
gggaagccucugcacauca

SEQ ID NO: 820310 - RNA, 19 nt, Homo sapiens
  misc_RNA (1)...(19): siRNA sense strand
cagggaagccucugcacau

SEQ ID NO: 820311 - RNA, 19 nt, Homo sapiens
  misc_RNA (1)...(19): siRNA sense strand
ugaagggcaucugcagcaa

SEQ ID NO: 820312 - RNA, 19 nt, Homo sapiens
  misc_RNA (1)...(19): siRNA sense strand
ugaagagccgcaccaagau

SEQ ID NO: 820313 - RNA, 19 nt, Homo sapiens
  misc_RNA (1)...(19): siRNA sense strand
caacaagggccugguacag

SEQ ID NO: 820314 - RNA, 19 nt, Homo sapiens
  misc_RNA (1)...(19): siRNA sense strand
aagggcaucugcagcaaca

SEQ ID NO: 820315 - RNA, 19 nt, Homo sapiens
  misc_RNA (1)...(19): siRNA sense strand
cugcuggcauggcaaacaa

SEQ ID NO: 820316 - RNA, 19 nt, Homo sapiens
  misc_RNA (1)...(19): siRNA sense strand
aagacccgcuaccgcauug

SEQ ID NO: 820317 - RNA, 19 nt, Homo sapiens
  misc_RNA (1)...(19): siRNA sense strand
uuaaaccgccaucaaaguc

SEQ ID NO: 820318 - RNA, 19 nt, Homo sapiens
  misc_RNA (1)...(19): siRNA sense strand
aauacucccucgugaaucg

SEQ ID NO: 820319 - RNA, 19 nt, Homo sapiens
  misc_RNA (1)...(19): siRNA sense strand
ggaccacgaggcaccaucu

SEQ ID NO: 820320 - RNA, 19 nt, Homo sapiens
  misc_RNA (1)...(19): siRNA sense strand
cuacugcagggucugauug

SEQ ID NO: 820321 - RNA, 19 nt, Homo sapiens
  misc_RNA (1)...(19): siRNA sense strand
agaccccgcucucggcuua

SEQ ID NO: 820322 - RNA, 19 nt, Homo sapiens
  misc_RNA (1)...(19): siRNA sense strand
uggcaaacaagguggagaa

SEQ ID NO: 820323 - RNA, 19 nt, Homo sapiens
  misc_RNA (1)...(19): siRNA sense strand
aguagaugcuggccacaca

SEQ ID NO: 820324 - RNA, 19 nt, Homo sapiens
  misc_RNA (1)...(19): siRNA sense strand
ggacaggagaguagaugcu

SEQ ID NO: 820325 - RNA, 19 nt, Homo sapiens
  misc_RNA (1)...(19): siRNA sense strand
cggaagcuggguucucauu

SEQ ID NO: 820326 - RNA, 19 nt, Homo sapiens
  misc_RNA (1)...(19): siRNA sense strand
gaugcuggccacacagauc

SEQ ID NO: 820327 - RNA, 19 nt, Homo sapiens
  misc_RNA (1)...(19): siRNA sense strand
uacaaaguaucugccaaca

SEQ ID NO: 820328 - RNA, 19 nt, Homo sapiens
  misc_RNA (1)...(19): siRNA sense strand
ccagcaaguacaaguggaa

SEQ ID NO: 820329 - RNA, 19 nt, Homo sapiens
  misc_RNA (1)...(19): siRNA sense strand
gcagcauguccuugagaga

SEQ ID NO: 820330 - RNA, 19 nt, Homo sapiens
  misc_RNA (1)...(19): siRNA sense strand
aggaaggaguacugcaugu

SEQ ID NO: 820331 - RNA, 19 nt, Homo sapiens
  misc_RNA (1)...(19): siRNA sense strand
ccaaggagcuggcggacuu

SEQ ID NO: 820332 - RNA, 19 nt, Homo sapiens
  misc_RNA (1)...(19): siRNA sense strand
gcaggugcaugaggaauuu

SEQ ID NO: 820333 - RNA, 19 nt, Homo sapiens
  misc_RNA (1)...(19): siRNA sense strand
gagcugacuuugagcagaa

SEQ ID NO: 820334 - RNA, 19 nt, Homo sapiens
  misc_RNA (1)...(19): siRNA sense strand
ggaacggcccagcuucuua

SEQ ID NO: 820335 - RNA, 19 nt, Homo sapiens
  misc_RNA (1)...(19): siRNA sense strand
ccacagccuucacggagua

SEQ ID NO: 820336 - RNA, 19 nt, Homo sapiens
  misc_RNA (1)...(19): siRNA sense strand
ggagccaccugcagcugua

SEQ ID NO: 820337 - RNA, 19 nt, Homo sapiens
  misc_RNA (1)...(19): siRNA sense strand
gcaugucgcuggugaagag

SEQ ID NO: 820338 - RNA, 19 nt, Homo sapiens
  misc_RNA (1)...(19): siRNA sense strand
ggacaaggcggagacuaaa

SEQ ID NO: 820339 - RNA, 19 nt, Homo sapiens
  misc_RNA (1)...(19): siRNA sense strand
gaacggcccagcuucuuau

SEQ ID NO: 820340 - RNA, 19 nt, Homo sapiens
  misc_RNA (1)...(19): siRNA sense strand
uacaggaucucaucaagga

SEQ ID NO: 820341 - RNA, 19 nt, Homo sapiens
  misc_RNA (1)...(19): siRNA sense strand
aggaagcgaugaaacguuu

SEQ ID NO: 820342 - RNA, 19 nt, Homo sapiens
  misc_RNA (1)...(19): siRNA sense strand
gaaguuacaggaucucauc

SEQ ID NO: 820343 - RNA, 19 nt, Homo sapiens
  misc_RNA (1)...(19): siRNA sense strand
ggccugaugugacccagaa

SEQ ID NO: 820344 - RNA, 19 nt, Homo sapiens
  misc_RNA (1)...(19): siRNA sense strand
ggaaguuugcagagaguaa

SEQ ID NO: 820345 - RNA, 19 nt, Homo sapiens
  misc_RNA (1)...(19): siRNA sense strand
gagaagcggcucacuugga

SEQ ID NO: 820346 - RNA, 19 nt, Homo sapiens
  misc_RNA (1)...(19): siRNA sense strand
caaccgcuauugagcacuu

SEQ ID NO: 820347 - RNA, 19 nt, Homo sapiens
  misc_RNA (1)...(19): siRNA sense strand
cgaaggcgauggcgaaacu

SEQ ID NO: 820348 - RNA, 19 nt, Homo sapiens
  misc_RNA (1)...(19): siRNA sense strand
ccuggaaccuggaggagaa

SEQ ID NO: 820349 - RNA, 19 nt, Homo sapiens
  misc_RNA (1)...(19): siRNA sense strand
ccaagucccgcgagaacua

SEQ ID NO: 820350 - RNA, 19 nt, Homo sapiens
  misc_RNA (1)...(19): siRNA sense strand
caacgccgaucugcuguuc

SEQ ID NO: 820351 - RNA, 19 nt, Homo sapiens
  misc_RNA (1)...(19): siRNA sense strand
ccacaccacucacgaacgu

SEQ ID NO: 820352 - RNA, 19 nt, Homo sapiens
  misc_RNA (1)...(19): siRNA sense strand
ccgaucugcuguucaguga

SEQ ID NO: 820353 - RNA, 19 nt, Homo sapiens
  misc_RNA (1)...(19): siRNA sense strand
gcucaagacccacaagaag

SEQ ID NO: 820354 - RNA, 19 nt, Homo sapiens
  misc_RNA (1)...(19): siRNA sense strand
ggacuucgaggcauacagu

SEQ ID NO: 820355 - RNA, 19 nt, Homo sapiens
  misc_RNA (1)...(19): siRNA sense strand
gaacgucagcguggagaug

SEQ ID NO: 820356 - RNA, 19 nt, Homo sapiens
  misc_RNA (1)...(19): siRNA sense strand
cgccagcacugccuuggaa

SEQ ID NO: 820357 - RNA, 19 nt, Homo sapiens
  misc_RNA (1)...(19): siRNA sense strand
gaggagaagcggcucacuu

SEQ ID NO: 820358 - RNA, 19 nt, Homo sapiens
  misc_RNA (1)...(19): siRNA sense strand
guacacacaaccgcuauug

SEQ ID NO: 820359 - RNA, 19 nt, Homo sapiens
  misc_RNA (1)...(19): siRNA sense strand
cagagagauugcagucaga

SEQ ID NO: 820360 - RNA, 19 nt, Homo sapiens
  misc_RNA (1)...(19): siRNA sense strand
ccaaagacuucuggcucaa

SEQ ID NO: 820361 - RNA, 19 nt, Homo sapiens
  misc_RNA (1)...(19): siRNA sense strand
gagugacccugagaccaaa

SEQ ID NO: 820362 - RNA, 19 nt, Homo sapiens
  misc_RNA (1)...(19): siRNA sense strand
aggagcagguguccaagaa

SEQ ID NO: 820363 - RNA, 19 nt, Homo sapiens
  misc_RNA (1)...(19): siRNA sense strand
gcacugcugggcucauaug

SEQ ID NO: 820364 - RNA, 19 nt, Homo sapiens
  misc_RNA (1)...(19): siRNA sense strand
cagaggagcagguguccaa

SEQ ID NO: 820365 - RNA, 19 nt, Homo sapiens
  misc_RNA (1)...(19): siRNA sense strand
gcuuugagguccuguacca

SEQ ID NO: 820366 - RNA, 19 nt, Homo sapiens
  misc_RNA (1)...(19): siRNA sense strand
ccaggagacuucgcucuag

SEQ ID NO: 820367 - RNA, 19 nt, Homo sapiens
  misc_RNA (1)...(19): siRNA sense strand
aaagacuucuggcucaaca

SEQ ID NO: 820368 - RNA, 19 nt, Homo sapiens
  misc_RNA (1)...(19): siRNA sense strand
guuacaggaucucaucaag

SEQ ID NO: 820369 - RNA, 19 nt, Homo sapiens
  misc_RNA (1)...(19): siRNA sense strand
agagguggaugaagaaggu

SEQ ID NO: 820370 - RNA, 19 nt, Homo sapiens
  misc_RNA (1)...(19): siRNA sense strand
ucaagacccacaagaagug

SEQ ID NO: 820371 - RNA, 19 nt, Homo sapiens
  misc_RNA (1)...(19): siRNA sense strand
ccaugaaacgccauucuuc

SEQ ID NO: 820372 - RNA, 19 nt, Homo sapiens
  misc_RNA (1)...(19): siRNA sense strand
gagaugcuacucaggaagu

SEQ ID NO: 820373 - RNA, 19 nt, Homo sapiens
  misc_RNA (1)...(19): siRNA sense strand
uggacaaggcggagacuaa

SEQ ID NO: 820374 - RNA, 19 nt, Homo sapiens
  misc_RNA (1)...(19): siRNA sense strand
ggagacuucgcucuaggaa

SEQ ID NO: 820375 - RNA, 19 nt, Homo sapiens
  misc_RNA (1)...(19): siRNA sense strand
uggcgaaacucuccaagcu

SEQ ID NO: 820376 - RNA, 19 nt, Homo sapiens
  misc_RNA (1)...(19): siRNA sense strand
ggagcuggcggacuucauc

SEQ ID NO: 820377 - RNA, 19 nt, Homo sapiens
  misc_RNA (1)...(19): siRNA sense strand
caccugcagcuguagauuu

SEQ ID NO: 820378 - RNA, 19 nt, Homo sapiens
  misc_RNA (1)...(19): siRNA sense strand
uggagaugcuacucaggaa

SEQ ID NO: 820379 - RNA, 19 nt, Homo sapiens
  misc_RNA (1)...(19): siRNA sense strand
acgggacgcugcugggaaa

SEQ ID NO: 820380 - RNA, 19 nt, Homo sapiens
  misc_RNA (1)...(19): siRNA sense strand
aggagaagcggcucacuug

SEQ ID NO: 820381 - RNA, 19 nt, Homo sapiens
  misc_RNA (1)...(19): siRNA sense strand
ccuuugaccacgaagauuu

SEQ ID NO: 820382 - RNA, 19 nt, Homo sapiens
  misc_RNA (1)...(19): siRNA sense strand
gaggagcagguguccaaga

SEQ ID NO: 820383 - RNA, 19 nt, Homo sapiens
  misc_RNA (1)...(19): siRNA sense strand
agacacaccugaggcacau

SEQ ID NO: 820384 - RNA, 19 nt, Homo sapiens
  misc_RNA (1)...(19): siRNA sense strand
agagugacccugagaccaa

SEQ ID NO: 820385 - RNA, 19 nt, Homo sapiens
  misc_RNA (1)...(19): siRNA sense strand
aggcacugcugggcucaua

SEQ ID NO: 820386 - RNA, 19 nt, Homo sapiens
  misc_RNA (1)...(19): siRNA sense strand
gaagugcaaggaggaagug

SEQ ID NO: 820387 - RNA, 19 nt, Homo sapiens
  misc_RNA (1)...(19): siRNA sense strand
gcagcugugcagagagauu

SEQ ID NO: 820388 - RNA, 19 nt, Homo sapiens
  misc_RNA (1)...(19): siRNA sense strand
caggaaguuugcagagagu

SEQ ID NO: 820389 - RNA, 19 nt, Homo sapiens
  misc_RNA (1)...(19): siRNA sense strand
ggcaggugcaugaggaauu

SEQ ID NO: 820390 - RNA, 19 nt, Homo sapiens
  misc_RNA (1)...(19): siRNA sense strand
acacacaaccgcuauugag

SEQ ID NO: 820391 - RNA, 19 nt, Homo sapiens
  misc_RNA (1)...(19): siRNA sense strand
uuaagcagaacaucgagaa

SEQ ID NO: 820392 - RNA, 19 nt, Homo sapiens
  misc_RNA (1)...(19): siRNA sense strand
ggagaguaccagccagaag

SEQ ID NO: 820393 - RNA, 19 nt, Homo sapiens
  misc_RNA (1)...(19): siRNA sense strand
ccacugccuccuacuacaa

SEQ ID NO: 820394 - RNA, 19 nt, Homo sapiens
  misc_RNA (1)...(19): siRNA sense strand
augaggaauuuaagcagaa

SEQ ID NO: 820395 - RNA, 19 nt, Homo sapiens
  misc_RNA (1)...(19): siRNA sense strand
gccagaaggagauggacaa

SEQ ID NO: 820396 - RNA, 19 nt, Homo sapiens
  misc_RNA (1)...(19): siRNA sense strand
gaaguuugcagagaguaag

SEQ ID NO: 820397 - RNA, 19 nt, Homo sapiens
  misc_RNA (1)...(19): siRNA sense strand
ucacgaacguccagauccu

SEQ ID NO: 820398 - RNA, 19 nt, Homo sapiens
  misc_RNA (1)...(19): siRNA sense strand
ccgaaaacguggaggauuc

SEQ ID NO: 820399 - RNA, 19 nt, Homo sapiens
  misc_RNA (1)...(19): siRNA sense strand
gcgaggaacagcucaagac

SEQ ID NO: 820400 - RNA, 19 nt, Homo sapiens
  misc_RNA (1)...(19): siRNA sense strand
gccuggaccucuggacuuc

SEQ ID NO: 820401 - RNA, 19 nt, Homo sapiens
  misc_RNA (1)...(19): siRNA sense strand
agauugggcaggugcauga

SEQ ID NO: 820402 - RNA, 19 nt, Homo sapiens
  misc_RNA (1)...(19): siRNA sense strand
gcaggaagcgaugaaacgu

SEQ ID NO: 820403 - RNA, 19 nt, Homo sapiens
  misc_RNA (1)...(19): siRNA sense strand
caagaagugcaaggaggaa

SEQ ID NO: 820404 - RNA, 19 nt, Homo sapiens
  misc_RNA (1)...(19): siRNA sense strand
cuuggaugcugugcaggua

SEQ ID NO: 820405 - RNA, 19 nt, Homo sapiens
  misc_RNA (1)...(19): siRNA sense strand
ggaaguuacaggaucucau

SEQ ID NO: 820406 - RNA, 19 nt, Homo sapiens
  misc_RNA (1)...(19): siRNA sense strand
acuccgacuucgacgauga

SEQ ID NO: 820407 - RNA, 19 nt, Homo sapiens
  misc_RNA (1)...(19): siRNA sense strand
guccagcgacuccgacuuc

SEQ ID NO: 820408 - RNA, 19 nt, Homo sapiens
  misc_RNA (1)...(19): siRNA sense strand
guaccagccagaaggagau

SEQ ID NO: 820409 - RNA, 19 nt, Homo sapiens
  misc_RNA (1)...(19): siRNA sense strand
acguggugcugcugcgaua

SEQ ID NO: 820410 - RNA, 19 nt, Homo sapiens
  misc_RNA (1)...(19): siRNA sense strand
guauguccacgccuacuuc

SEQ ID NO: 820411 - RNA, 19 nt, Homo sapiens
  misc_RNA (1)...(19): siRNA sense strand
cgacuccgacuucgacgau

SEQ ID NO: 820412 - RNA, 19 nt, Homo sapiens
  misc_RNA (1)...(19): siRNA sense strand
caagauguguccacuauua

SEQ ID NO: 820413 - RNA, 19 nt, Homo sapiens
  misc_RNA (1)...(19): siRNA sense strand
gaaauugucuccugcauuc

SEQ ID NO: 820414 - RNA, 19 nt, Homo sapiens
  misc_RNA (1)...(19): siRNA sense strand
gagcaaaucagaagacuua

SEQ ID NO: 820415 - RNA, 19 nt, Homo sapiens
  misc_RNA (1)...(19): siRNA sense strand
cuacagaacuuggaaauuu

SEQ ID NO: 820416 - RNA, 19 nt, Homo sapiens
  misc_RNA (1)...(19): siRNA sense strand
aagagaagcuguuaucaaa

SEQ ID NO: 820417 - RNA, 19 nt, Homo sapiens
  misc_RNA (1)...(19): siRNA sense strand
agacauccaucuuucaaua

SEQ ID NO: 820418 - RNA, 19 nt, Homo sapiens
  misc_RNA (1)...(19): siRNA sense strand
gugaacaacuuacagauug

SEQ ID NO: 820419 - RNA, 19 nt, Homo sapiens
  misc_RNA (1)...(19): siRNA sense strand
gaaauggacuuccucaaaa

SEQ ID NO: 820420 - RNA, 19 nt, Homo sapiens
  misc_RNA (1)...(19): siRNA sense strand
gaaaugggguccucacuaa

SEQ ID NO: 820421 - RNA, 19 nt, Homo sapiens
  misc_RNA (1)...(19): siRNA sense strand
gcacuuuccuguuguuuca

SEQ ID NO: 820422 - RNA, 19 nt, Homo sapiens
  misc_RNA (1)...(19): siRNA sense strand
gggaacagauuaaucacaa

SEQ ID NO: 820423 - RNA, 19 nt, Homo sapiens
  misc_RNA (1)...(19): siRNA sense strand
ggacugacauggaacaucu

SEQ ID NO: 820424 - RNA, 19 nt, Homo sapiens
  misc_RNA (1)...(19): siRNA sense strand
gaacacaaacuccacaugu

SEQ ID NO: 820425 - RNA, 19 nt, Homo sapiens
  misc_RNA (1)...(19): siRNA sense strand
caaagagaguugcuggaaa

SEQ ID NO: 820426 - RNA, 19 nt, Homo sapiens
  misc_RNA (1)...(19): siRNA sense strand
caccuuaccuuccuaaaga

SEQ ID NO: 820427 - RNA, 19 nt, Homo sapiens
  misc_RNA (1)...(19): siRNA sense strand
ucagaggauuuaaugguua

SEQ ID NO: 820428 - RNA, 19 nt, Homo sapiens
  misc_RNA (1)...(19): siRNA sense strand
gaccaacauucuuugcaua

SEQ ID NO: 820429 - RNA, 19 nt, Homo sapiens
  misc_RNA (1)...(19): siRNA sense strand
ugaauucucugucaggauu

SEQ ID NO: 820430 - RNA, 19 nt, Homo sapiens
  misc_RNA (1)...(19): siRNA sense strand
guggagcacuggcaccuua

SEQ ID NO: 820431 - RNA, 19 nt, Homo sapiens
  misc_RNA (1)...(19): siRNA sense strand
uguagaagcugaacuuuua

SEQ ID NO: 820432 - RNA, 19 nt, Homo sapiens
  misc_RNA (1)...(19): siRNA sense strand
gaaagaguaguuagugcua

SEQ ID NO: 820433 - RNA, 19 nt, Homo sapiens
  misc_RNA (1)...(19): siRNA sense strand
gaagcugauuccacuauuc

SEQ ID NO: 820434 - RNA, 19 nt, Homo sapiens
  misc_RNA (1)...(19): siRNA sense strand
ucacaaauacccagaaaga

SEQ ID NO: 820435 - RNA, 19 nt, Homo sapiens
  misc_RNA (1)...(19): siRNA sense strand
caaaugauacugacagguu

SEQ ID NO: 820436 - RNA, 19 nt, Homo sapiens
  misc_RNA (1)...(19): siRNA sense strand
acaaauaucaucaggguuu

SEQ ID NO: 820437 - RNA, 19 nt, Homo sapiens
  misc_RNA (1)...(19): siRNA sense strand
ugaaauggacuuccucaaa

SEQ ID NO: 820438 - RNA, 19 nt, Homo sapiens
  misc_RNA (1)...(19): siRNA sense strand
acuguuaguuggauucuua

SEQ ID NO: 820439 - RNA, 19 nt, Homo sapiens
  misc_RNA (1)...(19): siRNA sense strand
gagaguugcuggaaagagu

SEQ ID NO: 820440 - RNA, 19 nt, Homo sapiens
  misc_RNA (1)...(19): siRNA sense strand
ggaacagauuaaucacaaa

SEQ ID NO: 820441 - RNA, 19 nt, Homo sapiens
  misc_RNA (1)...(19): siRNA sense strand
gccaauguauuucagagaa

SEQ ID NO: 820442 - RNA, 19 nt, Homo sapiens
  misc_RNA (1)...(19): siRNA sense strand
acacagacauccaucuuuc

SEQ ID NO: 820443 - RNA, 19 nt, Homo sapiens
  misc_RNA (1)...(19): siRNA sense strand
ggaaacaguaauucaaaga

SEQ ID NO: 820444 - RNA, 19 nt, Homo sapiens
  misc_RNA (1)...(19): siRNA sense strand
ggucauugauggagcaaau

SEQ ID NO: 820445 - RNA, 19 nt, Homo sapiens
  misc_RNA (1)...(19): siRNA sense strand
uaaggcagauuugguaaga

SEQ ID NO: 820446 - RNA, 19 nt, Homo sapiens
  misc_RNA (1)...(19): siRNA sense strand
gccacaacuuauagaaaua

SEQ ID NO: 820447 - RNA, 19 nt, Homo sapiens
  misc_RNA (1)...(19): siRNA sense strand
gcaaaucagaagacuuaaa

SEQ ID NO: 820448 - RNA, 19 nt, Homo sapiens
  misc_RNA (1)...(19): siRNA sense strand
gcagauagucguuuaggau

SEQ ID NO: 820449 - RNA, 19 nt, Homo sapiens
  misc_RNA (1)...(19): siRNA sense strand
ggacauugcuacgcaucuu

SEQ ID NO: 820450 - RNA, 19 nt, Homo sapiens
  misc_RNA (1)...(19): siRNA sense strand
gcacuauuauggaaacagu

SEQ ID NO: 820451 - RNA, 19 nt, Homo sapiens
  misc_RNA (1)...(19): siRNA sense strand
guccuuacguguuauauuc

SEQ ID NO: 820452 - RNA, 19 nt, Homo sapiens
  misc_RNA (1)...(19): siRNA sense strand
cauguuggccaauguauuu

SEQ ID NO: 820453 - RNA, 19 nt, Homo sapiens
  misc_RNA (1)...(19): siRNA sense strand
aaagagaguugcuggaaag

SEQ ID NO: 820454 - RNA, 19 nt, Homo sapiens
  misc_RNA (1)...(19): siRNA sense strand
gauccugaauucucuguca

SEQ ID NO: 820455 - RNA, 19 nt, Homo sapiens
  misc_RNA (1)...(19): siRNA sense strand
ccucaaggcucaaugucaa

SEQ ID NO: 820456 - RNA, 19 nt, Homo sapiens
  misc_RNA (1)...(19): siRNA sense strand
gagcaaaggcaaaugauac

SEQ ID NO: 820457 - RNA, 19 nt, Homo sapiens
  misc_RNA (1)...(19): siRNA sense strand
ggaagauccucaguaucaa

SEQ ID NO: 820458 - RNA, 19 nt, Homo sapiens
  misc_RNA (1)...(19): siRNA sense strand
ccuggaagauccucaguau

SEQ ID NO: 820459 - RNA, 19 nt, Homo sapiens
  misc_RNA (1)...(19): siRNA sense strand
aaaugcaguuggcuucuuu

SEQ ID NO: 820460 - RNA, 19 nt, Homo sapiens
  misc_RNA (1)...(19): siRNA sense strand
cuucuucucuaucaaguaa

SEQ ID NO: 820461 - RNA, 19 nt, Homo sapiens
  misc_RNA (1)...(19): siRNA sense strand
aggcaugagugaagcguua

SEQ ID NO: 820462 - RNA, 19 nt, Homo sapiens
  misc_RNA (1)...(19): siRNA sense strand
caaagacucugaggacagu

SEQ ID NO: 820463 - RNA, 19 nt, Homo sapiens
  misc_RNA (1)...(19): siRNA sense strand
gucagcagauagucguuua

SEQ ID NO: 820464 - RNA, 19 nt, Homo sapiens
  misc_RNA (1)...(19): siRNA sense strand
ggaaauugucuccugcauu

SEQ ID NO: 820465 - RNA, 19 nt, Homo sapiens
  misc_RNA (1)...(19): siRNA sense strand
ccacauacuuuucaauuug

SEQ ID NO: 820466 - RNA, 19 nt, Homo sapiens
  misc_RNA (1)...(19): siRNA sense strand
aacacaaacuccacaugua

SEQ ID NO: 820467 - RNA, 19 nt, Homo sapiens
  misc_RNA (1)...(19): siRNA sense strand
uaagagaagcuguuaucaa

SEQ ID NO: 820468 - RNA, 19 nt, Homo sapiens
  misc_RNA (1)...(19): siRNA sense strand
caaaggcaaaugauacuga

SEQ ID NO: 820469 - RNA, 19 nt, Homo sapiens
  misc_RNA (1)...(19): siRNA sense strand
gaugagcaaaggcaaauga

SEQ ID NO: 820470 - RNA, 19 nt, Homo sapiens
  misc_RNA (1)...(19): siRNA sense strand
gaacuuggaaauuuacagu

SEQ ID NO: 820471 - RNA, 19 nt, Homo sapiens
  misc_RNA (1)...(19): siRNA sense strand
uggaagauccucaguauca

SEQ ID NO: 820472 - RNA, 19 nt, Homo sapiens
  misc_RNA (1)...(19): siRNA sense strand
agauagaagugacuagguu

SEQ ID NO: 820473 - RNA, 19 nt, Homo sapiens
  misc_RNA (1)...(19): siRNA sense strand
gcaaagagagaggaguuga

SEQ ID NO: 820474 - RNA, 19 nt, Homo sapiens
  misc_RNA (1)...(19): siRNA sense strand
ucaagaggccagaugauga

SEQ ID NO: 820475 - RNA, 19 nt, Homo sapiens
  misc_RNA (1)...(19): siRNA sense strand
ugucgaaugucagcagaua

SEQ ID NO: 820476 - RNA, 19 nt, Homo sapiens
  misc_RNA (1)...(19): siRNA sense strand
gaagauacaaagaccaagu

SEQ ID NO: 820477 - RNA, 19 nt, Homo sapiens
  misc_RNA (1)...(19): siRNA sense strand
cguguuauauucaggaaga

SEQ ID NO: 820478 - RNA, 19 nt, Homo sapiens
  misc_RNA (1)...(19): siRNA sense strand
gauagaagugacuagguuu

SEQ ID NO: 820479 - RNA, 19 nt, Homo sapiens
  misc_RNA (1)...(19): siRNA sense strand
gaucccaucucucuuugca

SEQ ID NO: 820480 - RNA, 19 nt, Homo sapiens
  misc_RNA (1)...(19): siRNA sense strand
gaaauuuacagucucaucu

SEQ ID NO: 820481 - RNA, 19 nt, Homo sapiens
  misc_RNA (1)...(19): siRNA sense strand
gguaagagaagcuguuauc

SEQ ID NO: 820482 - RNA, 19 nt, Homo sapiens
  misc_RNA (1)...(19): siRNA sense strand
aaucacaaauacccagaaa

SEQ ID NO: 820483 - RNA, 19 nt, Homo sapiens
  misc_RNA (1)...(19): siRNA sense strand
cagauagucguuuaggaua

SEQ ID NO: 820484 - RNA, 19 nt, Homo sapiens
  misc_RNA (1)...(19): siRNA sense strand
gagagaaagagaaggaaug

SEQ ID NO: 820485 - RNA, 19 nt, Homo sapiens
  misc_RNA (1)...(19): siRNA sense strand
ggugaacaacuuacagauu

SEQ ID NO: 820486 - RNA, 19 nt, Homo sapiens
  misc_RNA (1)...(19): siRNA sense strand
caacaggcugggagaguuu

SEQ ID NO: 820487 - RNA, 19 nt, Homo sapiens
  misc_RNA (1)...(19): siRNA sense strand
aaacuccacauguaucuuu

SEQ ID NO: 820488 - RNA, 19 nt, Homo sapiens
  misc_RNA (1)...(19): siRNA sense strand
gaacauggacuggaugaac

SEQ ID NO: 820489 - RNA, 19 nt, Homo sapiens
  misc_RNA (1)...(19): siRNA sense strand
gauaaggcagauuugguaa

SEQ ID NO: 820490 - RNA, 19 nt, Homo sapiens
  misc_RNA (1)...(19): siRNA sense strand
caaaagccuugguaucauu

SEQ ID NO: 820491 - RNA, 19 nt, Homo sapiens
  misc_RNA (1)...(19): siRNA sense strand
gauguaaugacgcugcuuu

SEQ ID NO: 820492 - RNA, 19 nt, Homo sapiens
  misc_RNA (1)...(19): siRNA sense strand
ugccacaacuuauagaaau

SEQ ID NO: 820493 - RNA, 19 nt, Homo sapiens
  misc_RNA (1)...(19): siRNA sense strand
cagcuucuccacauacuuu

SEQ ID NO: 820494 - RNA, 19 nt, Homo sapiens
  misc_RNA (1)...(19): siRNA sense strand
gagaugaguuuguuauacc

SEQ ID NO: 820495 - RNA, 19 nt, Homo sapiens
  misc_RNA (1)...(19): siRNA sense strand
cgagaugaguuuguuauac

SEQ ID NO: 820496 - RNA, 19 nt, Homo sapiens
  misc_RNA (1)...(19): siRNA sense strand
cuaccaugaguuacuauua

SEQ ID NO: 820497 - RNA, 19 nt, Homo sapiens
  misc_RNA (1)...(19): siRNA sense strand
cuacugaacaagauugaaa

SEQ ID NO: 820498 - RNA, 19 nt, Homo sapiens
  misc_RNA (1)...(19): siRNA sense strand
uugaugauccagacaaaua

SEQ ID NO: 820499 - RNA, 19 nt, Homo sapiens
  misc_RNA (1)...(19): siRNA sense strand
gaggccagaugaugagcaa

SEQ ID NO: 820500 - RNA, 19 nt, Homo sapiens
  misc_RNA (1)...(19): siRNA sense strand
uaccacauuugcauaaguu

SEQ ID NO: 820501 - RNA, 19 nt, Homo sapiens
  misc_RNA (1)...(19): siRNA sense strand
guccagugauccugaauuc

SEQ ID NO: 820502 - RNA, 19 nt, Homo sapiens
  misc_RNA (1)...(19): siRNA sense strand
gagguguacugcugcuaga

SEQ ID NO: 820503 - RNA, 19 nt, Homo sapiens
  misc_RNA (1)...(19): siRNA sense strand
gaacaagaggguacaacag

SEQ ID NO: 820504 - RNA, 19 nt, Homo sapiens
  misc_RNA (1)...(19): siRNA sense strand
cagugcugcugcaacuuua

SEQ ID NO: 820505 - RNA, 19 nt, Homo sapiens
  misc_RNA (1)...(19): siRNA sense strand
uaucggaagucgugagcaa

SEQ ID NO: 820506 - RNA, 19 nt, Homo sapiens
  misc_RNA (1)...(19): siRNA sense strand
ucccaucucucuuugcauu

SEQ ID NO: 820507 - RNA, 19 nt, Homo sapiens
  misc_RNA (1)...(19): siRNA sense strand
ccacuauuccuaaagagaa

SEQ ID NO: 820508 - RNA, 19 nt, Homo sapiens
  misc_RNA (1)...(19): siRNA sense strand
agauaaggcagauuuggua

SEQ ID NO: 820509 - RNA, 19 nt, Homo sapiens
  misc_RNA (1)...(19): siRNA sense strand
uaccuggucucagauguuu

SEQ ID NO: 820510 - RNA, 19 nt, Homo sapiens
  misc_RNA (1)...(19): siRNA sense strand
ugacgcugcuuucauuauc

SEQ ID NO: 820511 - RNA, 19 nt, Homo sapiens
  misc_RNA (1)...(19): siRNA sense strand
acacaaacuccacauguau

SEQ ID NO: 820512 - RNA, 19 nt, Homo sapiens
  misc_RNA (1)...(19): siRNA sense strand
guucaacacccucuucaug

SEQ ID NO: 820513 - RNA, 19 nt, Homo sapiens
  misc_RNA (1)...(19): siRNA sense strand
ugaagucuagggacaggaa

SEQ ID NO: 820514 - RNA, 19 nt, Homo sapiens
  misc_RNA (1)...(19): siRNA sense strand
cuucuucucuccugucaac

SEQ ID NO: 820515 - RNA, 19 nt, Homo sapiens
  misc_RNA (1)...(19): siRNA sense strand
ugccugggcuucauagcau

SEQ ID NO: 820516 - RNA, 19 nt, Homo sapiens
  misc_RNA (1)...(19): siRNA sense strand
ggacaaaguuggagaauuu

SEQ ID NO: 820517 - RNA, 19 nt, Homo sapiens
  misc_RNA (1)...(19): siRNA sense strand
gaagcgacauuuagauuua

SEQ ID NO: 820518 - RNA, 19 nt, Homo sapiens
  misc_RNA (1)...(19): siRNA sense strand
gaagaaagaucaagagcuu

SEQ ID NO: 820519 - RNA, 19 nt, Homo sapiens
  misc_RNA (1)...(19): siRNA sense strand
gaagcaagauguuauagaa

SEQ ID NO: 820520 - RNA, 19 nt, Homo sapiens
  misc_RNA (1)...(19): siRNA sense strand
gaaacuuguuaccgaauua

SEQ ID NO: 820521 - RNA, 19 nt, Homo sapiens
  misc_RNA (1)...(19): siRNA sense strand
ccaaacacauggaauuuaa

SEQ ID NO: 820522 - RNA, 19 nt, Homo sapiens
  misc_RNA (1)...(19): siRNA sense strand
gcaaacaucuggagcacaa

SEQ ID NO: 820523 - RNA, 19 nt, Homo sapiens
  misc_RNA (1)...(19): siRNA sense strand
gaaaagagcuaggcaagua

SEQ ID NO: 820524 - RNA, 19 nt, Homo sapiens
  misc_RNA (1)...(19): siRNA sense strand
guacucaacugcaugaauu

SEQ ID NO: 820525 - RNA, 19 nt, Homo sapiens
  misc_RNA (1)...(19): siRNA sense strand
uaaaagagcugguagaaaa

SEQ ID NO: 820526 - RNA, 19 nt, Homo sapiens
  misc_RNA (1)...(19): siRNA sense strand
gaacggagaguguuugaaa

SEQ ID NO: 820527 - RNA, 19 nt, Homo sapiens
  misc_RNA (1)...(19): siRNA sense strand
ggaugaaauugaugcuuua

SEQ ID NO: 820528 - RNA, 19 nt, Homo sapiens
  misc_RNA (1)...(19): siRNA sense strand
gaaggaagauaagcuaaga

SEQ ID NO: 820529 - RNA, 19 nt, Homo sapiens
  misc_RNA (1)...(19): siRNA sense strand
cuaaauagauguccauuca

SEQ ID NO: 820530 - RNA, 19 nt, Homo sapiens
  misc_RNA (1)...(19): siRNA sense strand
ucaggaauaugaagaagua

SEQ ID NO: 820531 - RNA, 19 nt, Homo sapiens
  misc_RNA (1)...(19): siRNA sense strand
gaagauaagcuaagacaga

SEQ ID NO: 820532 - RNA, 19 nt, Homo sapiens
  misc_RNA (1)...(19): siRNA sense strand
aaagaaagguggcuuaauc

SEQ ID NO: 820533 - RNA, 19 nt, Homo sapiens
  misc_RNA (1)...(19): siRNA sense strand
agagaaaguugcagccuua

SEQ ID NO: 820534 - RNA, 19 nt, Homo sapiens
  misc_RNA (1)...(19): siRNA sense strand
gaaccaaacacauggaauu

SEQ ID NO: 820535 - RNA, 19 nt, Homo sapiens
  misc_RNA (1)...(19): siRNA sense strand
gcagugugcuggugaaguu

SEQ ID NO: 820536 - RNA, 19 nt, Homo sapiens
  misc_RNA (1)...(19): siRNA sense strand
gcacaaagacaaugaacuu

SEQ ID NO: 820537 - RNA, 19 nt, Homo sapiens
  misc_RNA (1)...(19): siRNA sense strand
cuuaagagccuuuguauuu

SEQ ID NO: 820538 - RNA, 19 nt, Homo sapiens
  misc_RNA (1)...(19): siRNA sense strand
ucagcaggcuuuaauagua

SEQ ID NO: 820539 - RNA, 19 nt, Homo sapiens
  misc_RNA (1)...(19): siRNA sense strand
gagaagacacuuagaagaa

SEQ ID NO: 820540 - RNA, 19 nt, Homo sapiens
  misc_RNA (1)...(19): siRNA sense strand
caaagacaaugaacuuaga

SEQ ID NO: 820541 - RNA, 19 nt, Homo sapiens
  misc_RNA (1)...(19): siRNA sense strand
ggccauggguggaauauga

SEQ ID NO: 820542 - RNA, 19 nt, Homo sapiens
  misc_RNA (1)...(19): siRNA sense strand
gaauggacccaaucaauga

SEQ ID NO: 820543 - RNA, 19 nt, Homo sapiens
  misc_RNA (1)...(19): siRNA sense strand
ggacugaauccuacaauug

SEQ ID NO: 820544 - RNA, 19 nt, Homo sapiens
  misc_RNA (1)...(19): siRNA sense strand
gaagagaggauguucuaga

SEQ ID NO: 820545 - RNA, 19 nt, Homo sapiens
  misc_RNA (1)...(19): siRNA sense strand
cuacaauuguucaggaaua

SEQ ID NO: 820546 - RNA, 19 nt, Homo sapiens
  misc_RNA (1)...(19): siRNA sense strand
gaagaacagcuaaaggaaa

SEQ ID NO: 820547 - RNA, 19 nt, Homo sapiens
  misc_RNA (1)...(19): siRNA sense strand
ccuauaacaugucgaauug

SEQ ID NO: 820548 - RNA, 19 nt, Homo sapiens
  misc_RNA (1)...(19): siRNA sense strand
gaaaguugcagccuuaaau

SEQ ID NO: 820549 - RNA, 19 nt, Homo sapiens
  misc_RNA (1)...(19): siRNA sense strand
guucagggcuucuggaaau

SEQ ID NO: 820550 - RNA, 19 nt, Homo sapiens
  misc_RNA (1)...(19): siRNA sense strand
caaagcaccuucaagaucu

SEQ ID NO: 820551 - RNA, 19 nt, Homo sapiens
  misc_RNA (1)...(19): siRNA sense strand
cgacagaggagaauaggua

SEQ ID NO: 820552 - RNA, 19 nt, Homo sapiens
  misc_RNA (1)...(19): siRNA sense strand
gaagggcagauuccuauaa

SEQ ID NO: 820553 - RNA, 19 nt, Homo sapiens
  misc_RNA (1)...(19): siRNA sense strand
gaacggaagcgacauuuag

SEQ ID NO: 820554 - RNA, 19 nt, Homo sapiens
  misc_RNA (1)...(19): siRNA sense strand
cagcaggcuuuaauaguaa

SEQ ID NO: 820555 - RNA, 19 nt, Homo sapiens
  misc_RNA (1)...(19): siRNA sense strand
gaacuaaagaccacggaaa

SEQ ID NO: 820556 - RNA, 19 nt, Homo sapiens
  misc_RNA (1)...(19): siRNA sense strand
gagggaaacucuagagaag

SEQ ID NO: 820557 - RNA, 19 nt, Homo sapiens
  misc_RNA (1)...(19): siRNA sense strand
gcaaggaacuuaugaaaag

SEQ ID NO: 820558 - RNA, 19 nt, Homo sapiens
  misc_RNA (1)...(19): siRNA sense strand
gaacggguaauacaagaaa

SEQ ID NO: 820559 - RNA, 19 nt, Homo sapiens
  misc_RNA (1)...(19): siRNA sense strand
uaagagccuuuguauuuga

SEQ ID NO: 820560 - RNA, 19 nt, Homo sapiens
  misc_RNA (1)...(19): siRNA sense strand
ggaagcgacauuuagauuu

SEQ ID NO: 820561 - RNA, 19 nt, Homo sapiens
  misc_RNA (1)...(19): siRNA sense strand
ggaauggacccaaucaaug

SEQ ID NO: 820562 - RNA, 19 nt, Homo sapiens
  misc_RNA (1)...(19): siRNA sense strand
gcagagaagacacuuagaa

SEQ ID NO: 820563 - RNA, 19 nt, Homo sapiens
  misc_RNA (1)...(19): siRNA sense strand
caaagagguucgugacaau

SEQ ID NO: 820564 - RNA, 19 nt, Homo sapiens
  misc_RNA (1)...(19): siRNA sense strand
gggaaacucuagagaagga

SEQ ID NO: 820565 - RNA, 19 nt, Homo sapiens
  misc_RNA (1)...(19): siRNA sense strand
gcagauuccuauaacaugu

SEQ ID NO: 820566 - RNA, 19 nt, Homo sapiens
  misc_RNA (1)...(19): siRNA sense strand
gaagaggucagaaaacuua

SEQ ID NO: 820567 - RNA, 19 nt, Homo sapiens
  misc_RNA (1)...(19): siRNA sense strand
agacagagauuccgugaca

SEQ ID NO: 820568 - RNA, 19 nt, Homo sapiens
  misc_RNA (1)...(19): siRNA sense strand
ucagaggaaugaaagauau

SEQ ID NO: 820569 - RNA, 19 nt, Homo sapiens
  misc_RNA (1)...(19): siRNA sense strand
cagaguaguugaugaaauc

SEQ ID NO: 820570 - RNA, 19 nt, Homo sapiens
  misc_RNA (1)...(19): siRNA sense strand
aaauagauguccauucaga

SEQ ID NO: 820571 - RNA, 19 nt, Homo sapiens
  misc_RNA (1)...(19): siRNA sense strand
ugaauuaacuccucaucau

SEQ ID NO: 820572 - RNA, 19 nt, Homo sapiens
  misc_RNA (1)...(19): siRNA sense strand
agagucaaauuucgaagua

SEQ ID NO: 820573 - RNA, 19 nt, Homo sapiens
  misc_RNA (1)...(19): siRNA sense strand
aaacgagcgucacaauuug

SEQ ID NO: 820574 - RNA, 19 nt, Homo sapiens
  misc_RNA (1)...(19): siRNA sense strand
gcacuucaggagcuaaaua

SEQ ID NO: 820575 - RNA, 19 nt, Homo sapiens
  misc_RNA (1)...(19): siRNA sense strand
gagcuaggcaaguauguaa

SEQ ID NO: 820576 - RNA, 19 nt, Homo sapiens
  misc_RNA (1)...(19): siRNA sense strand
guuuaaagcugauggaaca

SEQ ID NO: 820577 - RNA, 19 nt, Homo sapiens
  misc_RNA (1)...(19): siRNA sense strand
gcaaacagaagcaagaugu

SEQ ID NO: 820578 - RNA, 19 nt, Homo sapiens
  misc_RNA (1)...(19): siRNA sense strand
gaaggcgaaauaauugaua

SEQ ID NO: 820579 - RNA, 19 nt, Homo sapiens
  misc_RNA (1)...(19): siRNA sense strand
ucaaagagguucgugacaa

SEQ ID NO: 820580 - RNA, 19 nt, Homo sapiens
  misc_RNA (1)...(19): siRNA sense strand
gaagacacuuagaagaaca

SEQ ID NO: 820581 - RNA, 19 nt, Homo sapiens
  misc_RNA (1)...(19): siRNA sense strand
gagaguguuugaaaugguu

SEQ ID NO: 820582 - RNA, 19 nt, Homo sapiens
  misc_RNA (1)...(19): siRNA sense strand
gaacuaaagggaaagaaag

SEQ ID NO: 820583 - RNA, 19 nt, Homo sapiens
  misc_RNA (1)...(19): siRNA sense strand
agacaaagcaccuucaaga

SEQ ID NO: 820584 - RNA, 19 nt, Homo sapiens
  misc_RNA (1)...(19): siRNA sense strand
ggaacuaaagggaaagaaa

SEQ ID NO: 820585 - RNA, 19 nt, Homo sapiens
  misc_RNA (1)...(19): siRNA sense strand
uggaugaaauugaugcuuu

SEQ ID NO: 820586 - RNA, 19 nt, Homo sapiens
  misc_RNA (1)...(19): siRNA sense strand
gaaaugcaaggaacuuaug

SEQ ID NO: 820587 - RNA, 19 nt, Homo sapiens
  misc_RNA (1)...(19): siRNA sense strand
caggauacuugcaaucuug

SEQ ID NO: 820588 - RNA, 19 nt, Homo sapiens
  misc_RNA (1)...(19): siRNA sense strand
gaaagaauugaacggguaa

SEQ ID NO: 820589 - RNA, 19 nt, Homo sapiens
  misc_RNA (1)...(19): siRNA sense strand
gaaaauaguggaagagaaa

SEQ ID NO: 820590 - RNA, 19 nt, Homo sapiens
  misc_RNA (1)...(19): siRNA sense strand
gacaaugaacuuagacaaa

SEQ ID NO: 820591 - RNA, 19 nt, Homo sapiens
  misc_RNA (1)...(19): siRNA sense strand
aagaacagcuaaaggaaau

SEQ ID NO: 820592 - RNA, 19 nt, Homo sapiens
  misc_RNA (1)...(19): siRNA sense strand
gaguucauaugcagacaaa

SEQ ID NO: 820593 - RNA, 19 nt, Homo sapiens
  misc_RNA (1)...(19): siRNA sense strand
ugagacggauucaggauga

SEQ ID NO: 820594 - RNA, 19 nt, Homo sapiens
  misc_RNA (1)...(19): siRNA sense strand
uggagaacuuccuaacaua

SEQ ID NO: 820595 - RNA, 19 nt, Homo sapiens
  misc_RNA (1)...(19): siRNA sense strand
gaaaaggcaacagauauua

SEQ ID NO: 820596 - RNA, 19 nt, Homo sapiens
  misc_RNA (1)...(19): siRNA sense strand
cgaaacuuguuaccgaauu

SEQ ID NO: 820597 - RNA, 19 nt, Homo sapiens
  misc_RNA (1)...(19): siRNA sense strand
gaaaaggcauuaugugaag

SEQ ID NO: 820598 - RNA, 19 nt, Homo sapiens
  misc_RNA (1)...(19): siRNA sense strand
ggaacaggauacuugcaau

SEQ ID NO: 820599 - RNA, 19 nt, Homo sapiens
  misc_RNA (1)...(19): siRNA sense strand
ugaaucagaaggaagauaa

SEQ ID NO: 820600 - RNA, 19 nt, Homo sapiens
  misc_RNA (1)...(19): siRNA sense strand
gaacuucagcaggcuuuaa

SEQ ID NO: 820601 - RNA, 19 nt, Homo sapiens
  misc_RNA (1)...(19): siRNA sense strand
ggagaacuuccuaacauau

SEQ ID NO: 820602 - RNA, 19 nt, Homo sapiens
  misc_RNA (1)...(19): siRNA sense strand
gggacugaauccuacaauu

SEQ ID NO: 820603 - RNA, 19 nt, Homo sapiens
  misc_RNA (1)...(19): siRNA sense strand
gaauugaacggguaauaca

SEQ ID NO: 820604 - RNA, 19 nt, Homo sapiens
  misc_RNA (1)...(19): siRNA sense strand
cagaggagaauagguaaua

SEQ ID NO: 820605 - RNA, 19 nt, Homo sapiens
  misc_RNA (1)...(19): siRNA sense strand
guacuucuuugcauauaca

SEQ ID NO: 820606 - RNA, 19 nt, Homo sapiens
  misc_RNA (1)...(19): siRNA sense strand
caccaaagcuccugcaaaa

SEQ ID NO: 820607 - RNA, 19 nt, Homo sapiens
  misc_RNA (1)...(19): siRNA sense strand
ggaggugaaagaaguguuu

SEQ ID NO: 820608 - RNA, 19 nt, Homo sapiens
  misc_RNA (1)...(19): siRNA sense strand
ccauaaugcucacgaucaa

SEQ ID NO: 820609 - RNA, 19 nt, Homo sapiens
  misc_RNA (1)...(19): siRNA sense strand
aauacugccuguaaagaaa

SEQ ID NO: 820610 - RNA, 19 nt, Homo sapiens
  misc_RNA (1)...(19): siRNA sense strand
caaacacauuggaugaaau

SEQ ID NO: 820611 - RNA, 19 nt, Homo sapiens
  misc_RNA (1)...(19): siRNA sense strand
gagcagagaagacacuuag

SEQ ID NO: 820612 - RNA, 19 nt, Homo sapiens
  misc_RNA (1)...(19): siRNA sense strand
ugaguuaccuuugcuguca

SEQ ID NO: 820613 - RNA, 19 nt, Homo sapiens
  misc_RNA (1)...(19): siRNA sense strand
ucaagaagauauggagguu

SEQ ID NO: 820614 - RNA, 19 nt, Homo sapiens
  misc_RNA (1)...(19): siRNA sense strand
gaggcaugguugaaauuga

SEQ ID NO: 820615 - RNA, 19 nt, Homo sapiens
  misc_RNA (1)...(19): siRNA sense strand
uuaagagccuuuguauuug

SEQ ID NO: 820616 - RNA, 19 nt, Homo sapiens
  misc_RNA (1)...(19): siRNA sense strand
ccagaaggcugaauuuauu

SEQ ID NO: 820617 - RNA, 19 nt, Homo sapiens
  misc_RNA (1)...(19): siRNA sense strand
gacaagggauuaaauguga

SEQ ID NO: 820618 - RNA, 19 nt, Homo sapiens
  misc_RNA (1)...(19): siRNA sense strand
gaagaguucuaccaccuuu

SEQ ID NO: 820619 - RNA, 19 nt, Homo sapiens
  misc_RNA (1)...(19): siRNA sense strand
gaggauggcugccuugaga

SEQ ID NO: 820620 - RNA, 19 nt, Homo sapiens
  misc_RNA (1)...(19): siRNA sense strand
ucaggaugauuguaaguua

SEQ ID NO: 820621 - RNA, 19 nt, Homo sapiens
  misc_RNA (1)...(19): siRNA sense strand
gaaucacguuuacaaagaa

SEQ ID NO: 820622 - RNA, 19 nt, Homo sapiens
  misc_RNA (1)...(19): siRNA sense strand
aaagaaagauucccaaagg

SEQ ID NO: 820623 - RNA, 19 nt, Homo sapiens
  misc_RNA (1)...(19): siRNA sense strand
ccacucugcugaagaauau

SEQ ID NO: 820624 - RNA, 19 nt, Homo sapiens
  misc_RNA (1)...(19): siRNA sense strand
ugaagaagaucaacaagca

SEQ ID NO: 820625 - RNA, 19 nt, Homo sapiens
  misc_RNA (1)...(19): siRNA sense strand
gcccugagcuuuauucauc

SEQ ID NO: 820626 - RNA, 19 nt, Homo sapiens
  misc_RNA (1)...(19): siRNA sense strand
ugaaucacguuuacaaaga

SEQ ID NO: 820627 - RNA, 19 nt, Homo sapiens
  misc_RNA (1)...(19): siRNA sense strand
ggagggaauucaucacaga

SEQ ID NO: 820628 - RNA, 19 nt, Homo sapiens
  misc_RNA (1)...(19): siRNA sense strand
gaccggagcugggugauug

SEQ ID NO: 820629 - RNA, 19 nt, Homo sapiens
  misc_RNA (1)...(19): siRNA sense strand
ccauuaagcucaucagcaa

SEQ ID NO: 820630 - RNA, 19 nt, Homo sapiens
  misc_RNA (1)...(19): siRNA sense strand
ggaguggccucauuacauc

SEQ ID NO: 820631 - RNA, 19 nt, Homo sapiens
  misc_RNA (1)...(19): siRNA sense strand
caguaauccugacauauuu

SEQ ID NO: 820632 - RNA, 19 nt, Homo sapiens
  misc_RNA (1)...(19): siRNA sense strand
uagccaaccuccaggauuu

SEQ ID NO: 820633 - RNA, 19 nt, Homo sapiens
  misc_RNA (1)...(19): siRNA sense strand
ccugacaaccuccuaauua

SEQ ID NO: 820634 - RNA, 19 nt, Homo sapiens
  misc_RNA (1)...(19): siRNA sense strand
gaagaaauggcccaguuga

SEQ ID NO: 820635 - RNA, 19 nt, Homo sapiens
  misc_RNA (1)...(19): siRNA sense strand
gaguugagccuuccaagaa

SEQ ID NO: 820636 - RNA, 19 nt, Homo sapiens
  misc_RNA (1)...(19): siRNA sense strand
gagacugccuggauaaauc

SEQ ID NO: 820637 - RNA, 19 nt, Homo sapiens
  misc_RNA (1)...(19): siRNA sense strand
aaaugcaccugcucacuuu

SEQ ID NO: 820638 - RNA, 19 nt, Homo sapiens
  misc_RNA (1)...(19): siRNA sense strand
ccaaacugcuccaccagaa

SEQ ID NO: 820639 - RNA, 19 nt, Homo sapiens
  misc_RNA (1)...(19): siRNA sense strand
agagacagaugauucuauu

SEQ ID NO: 820640 - RNA, 19 nt, Homo sapiens
  misc_RNA (1)...(19): siRNA sense strand
uagaagaaauggcccaguu

SEQ ID NO: 820641 - RNA, 19 nt, Homo sapiens
  misc_RNA (1)...(19): siRNA sense strand
gauggagcccugagcuuua

SEQ ID NO: 820642 - RNA, 19 nt, Homo sapiens
  misc_RNA (1)...(19): siRNA sense strand
gcauuauccuguaugaguu

SEQ ID NO: 820643 - RNA, 19 nt, Homo sapiens
  misc_RNA (1)...(19): siRNA sense strand
uggaaugccuggaguuuga

SEQ ID NO: 820644 - RNA, 19 nt, Homo sapiens
  misc_RNA (1)...(19): siRNA sense strand
ccaccgagcuggcaagaag

SEQ ID NO: 820645 - RNA, 19 nt, Homo sapiens
  misc_RNA (1)...(19): siRNA sense strand
gcccgagacugccuggaua

SEQ ID NO: 820646 - RNA, 19 nt, Homo sapiens
  misc_RNA (1)...(19): siRNA sense strand
gggagucgcugcagaagca

SEQ ID NO: 820647 - RNA, 19 nt, Homo sapiens
  misc_RNA (1)...(19): siRNA sense strand
ggacaagggauuaaaugug

SEQ ID NO: 820648 - RNA, 19 nt, Homo sapiens
  misc_RNA (1)...(19): siRNA sense strand
gaagcagcacccauucuuu

SEQ ID NO: 820649 - RNA, 19 nt, Homo sapiens
  misc_RNA (1)...(19): siRNA sense strand
cauggugcgucuauacuuu

SEQ ID NO: 820650 - RNA, 19 nt, Homo sapiens
  misc_RNA (1)...(19): siRNA sense strand
aagcagcacccauucuuua

SEQ ID NO: 820651 - RNA, 19 nt, Homo sapiens
  misc_RNA (1)...(19): siRNA sense strand
gcaaggagcaggauguagu

SEQ ID NO: 820652 - RNA, 19 nt, Homo sapiens
  misc_RNA (1)...(19): siRNA sense strand
gagcguaccagaugaggaa

SEQ ID NO: 820653 - RNA, 19 nt, Homo sapiens
  misc_RNA (1)...(19): siRNA sense strand
ucaagagaauuuggagaaa

SEQ ID NO: 820654 - RNA, 19 nt, Homo sapiens
  misc_RNA (1)...(19): siRNA sense strand
gaaacuggcagcagcacuu

SEQ ID NO: 820655 - RNA, 19 nt, Homo sapiens
  misc_RNA (1)...(19): siRNA sense strand
ggaaacaagguggccauuu

SEQ ID NO: 820656 - RNA, 19 nt, Homo sapiens
  misc_RNA (1)...(19): siRNA sense strand
gaaggaggaccauucagau

SEQ ID NO: 820657 - RNA, 19 nt, Homo sapiens
  misc_RNA (1)...(19): siRNA sense strand
caaaugcaccugcucacuu

SEQ ID NO: 820658 - RNA, 19 nt, Homo sapiens
  misc_RNA (1)...(19): siRNA sense strand
ggagcaggauguaguaacu

SEQ ID NO: 820659 - RNA, 19 nt, Homo sapiens
  misc_RNA (1)...(19): siRNA sense strand
uaaaggagcaggagagagu

SEQ ID NO: 820660 - RNA, 19 nt, Homo sapiens
  misc_RNA (1)...(19): siRNA sense strand
gggaauuccuggacaagca

SEQ ID NO: 820661 - RNA, 19 nt, Homo sapiens
  misc_RNA (1)...(19): siRNA sense strand
agacagaugauucuauuga

SEQ ID NO: 820662 - RNA, 19 nt, Homo sapiens
  misc_RNA (1)...(19): siRNA sense strand
cagcacgucuccuggaaug

SEQ ID NO: 820663 - RNA, 19 nt, Homo sapiens
  misc_RNA (1)...(19): siRNA sense strand
ucuacgaacuucaagagaa

SEQ ID NO: 820664 - RNA, 19 nt, Homo sapiens
  misc_RNA (1)...(19): siRNA sense strand
cuacgaacuucaagagaau

SEQ ID NO: 820665 - RNA, 19 nt, Homo sapiens
  misc_RNA (1)...(19): siRNA sense strand
ucaacaaagugaucaaguc

SEQ ID NO: 820666 - RNA, 19 nt, Homo sapiens
  misc_RNA (1)...(19): siRNA sense strand
ggagaaggaggaccauuca

SEQ ID NO: 820667 - RNA, 19 nt, Homo sapiens
  misc_RNA (1)...(19): siRNA sense strand
gccagaaggcugaauuuau

SEQ ID NO: 820668 - RNA, 19 nt, Homo sapiens
  misc_RNA (1)...(19): siRNA sense strand
caucagcaauggcgccuau

SEQ ID NO: 820669 - RNA, 19 nt, Homo sapiens
  misc_RNA (1)...(19): siRNA sense strand
ggagcugucucagucuuug

SEQ ID NO: 820670 - RNA, 19 nt, Homo sapiens
  misc_RNA (1)...(19): siRNA sense strand
gcacuugccgccucugaga

SEQ ID NO: 820671 - RNA, 19 nt, Homo sapiens
  misc_RNA (1)...(19): siRNA sense strand
gcccaggccuuucccacaa

SEQ ID NO: 820672 - RNA, 19 nt, Homo sapiens
  misc_RNA (1)...(19): siRNA sense strand
gugccacucugcugaagaa

SEQ ID NO: 820673 - RNA, 19 nt, Homo sapiens
  misc_RNA (1)...(19): siRNA sense strand
ggagaaacuuuuacaagau

SEQ ID NO: 820674 - RNA, 19 nt, Homo sapiens
  misc_RNA (1)...(19): siRNA sense strand
gcuggucuuuggccucuuu

SEQ ID NO: 820675 - RNA, 19 nt, Homo sapiens
  misc_RNA (1)...(19): siRNA sense strand
acacacagccacagccuuu

SEQ ID NO: 820676 - RNA, 19 nt, Homo sapiens
  misc_RNA (1)...(19): siRNA sense strand
ucaugagucugacaacgaa

SEQ ID NO: 820677 - RNA, 19 nt, Homo sapiens
  misc_RNA (1)...(19): siRNA sense strand
caaggagcaggauguagua

SEQ ID NO: 820678 - RNA, 19 nt, Homo sapiens
  misc_RNA (1)...(19): siRNA sense strand
gaugaaucacguuuacaaa

SEQ ID NO: 820679 - RNA, 19 nt, Homo sapiens
  misc_RNA (1)...(19): siRNA sense strand
caaagagggacaagggauu

SEQ ID NO: 820680 - RNA, 19 nt, Homo sapiens
  misc_RNA (1)...(19): siRNA sense strand
uaucugggccugucacuga

SEQ ID NO: 820681 - RNA, 19 nt, Homo sapiens
  misc_RNA (1)...(19): siRNA sense strand
gacucaagcccuccaauga

SEQ ID NO: 820682 - RNA, 19 nt, Homo sapiens
  misc_RNA (1)...(19): siRNA sense strand
ggacauggugcgucuauac

SEQ ID NO: 820683 - RNA, 19 nt, Homo sapiens
  misc_RNA (1)...(19): siRNA sense strand
cgacuagcagaguuuauuu

SEQ ID NO: 820684 - RNA, 19 nt, Homo sapiens
  misc_RNA (1)...(19): siRNA sense strand
ccagcucucuaucggguaa

SEQ ID NO: 820685 - RNA, 19 nt, Homo sapiens
  misc_RNA (1)...(19): siRNA sense strand
aaagagggacaagggauua

SEQ ID NO: 820686 - RNA, 19 nt, Homo sapiens
  misc_RNA (1)...(19): siRNA sense strand
caaguaaccgcaagagcuu

SEQ ID NO: 820687 - RNA, 19 nt, Homo sapiens
  misc_RNA (1)...(19): siRNA sense strand
gcagaagcaagaagccauu

SEQ ID NO: 820688 - RNA, 19 nt, Homo sapiens
  misc_RNA (1)...(19): siRNA sense strand
acucugaacuaaagaagga

SEQ ID NO: 820689 - RNA, 19 nt, Homo sapiens
  misc_RNA (1)...(19): siRNA sense strand
gcaggcagcaucccacugu

SEQ ID NO: 820690 - RNA, 19 nt, Homo sapiens
  misc_RNA (1)...(19): siRNA sense strand
acagagagcguaccagaug

SEQ ID NO: 820691 - RNA, 19 nt, Homo sapiens
  misc_RNA (1)...(19): siRNA sense strand
ggaguugagccuuccaaga

SEQ ID NO: 820692 - RNA, 19 nt, Homo sapiens
  misc_RNA (1)...(19): siRNA sense strand
ccaauggucccaagccuau

SEQ ID NO: 820693 - RNA, 19 nt, Homo sapiens
  misc_RNA (1)...(19): siRNA sense strand
cggcaaggaugggcaagaa

SEQ ID NO: 820694 - RNA, 19 nt, Homo sapiens
  misc_RNA (1)...(19): siRNA sense strand
gauacuagcuauuuugaca

SEQ ID NO: 820695 - RNA, 19 nt, Homo sapiens
  misc_RNA (1)...(19): siRNA sense strand
ugagucaggaugauuguaa

SEQ ID NO: 820696 - RNA, 19 nt, Homo sapiens
  misc_RNA (1)...(19): siRNA sense strand
ccaugggcauuauccugua

SEQ ID NO: 820697 - RNA, 19 nt, Homo sapiens
  misc_RNA (1)...(19): siRNA sense strand
gagaauuuggagaaacuuu

SEQ ID NO: 820698 - RNA, 19 nt, Homo sapiens
  misc_RNA (1)...(19): siRNA sense strand
caggaugauuguaaguuau

SEQ ID NO: 820699 - RNA, 19 nt, Homo sapiens
  misc_RNA (1)...(19): siRNA sense strand
gaguuuauuuccuccaaca

SEQ ID NO: 820700 - RNA, 19 nt, Homo sapiens
  misc_RNA (1)...(19): siRNA sense strand
gaagagcgacuagcagagu

SEQ ID NO: 820701 - RNA, 19 nt, Homo sapiens
  misc_RNA (1)...(19): siRNA sense strand
caaagaaagauucccaaag

SEQ ID NO: 820702 - RNA, 19 nt, Homo sapiens
  misc_RNA (1)...(19): siRNA sense strand
cagagagcguaccagauga

SEQ ID NO: 820703 - RNA, 19 nt, Homo sapiens
  misc_RNA (1)...(19): siRNA sense strand
gcaaggaugggcaagaaag

SEQ ID NO: 820704 - RNA, 19 nt, Homo sapiens
  misc_RNA (1)...(19): siRNA sense strand
caagagaauuuggagaaac

SEQ ID NO: 820705 - RNA, 19 nt, Homo sapiens
  misc_RNA (1)...(19): siRNA sense strand
gggaagacacagccaccua

SEQ ID NO: 820706 - RNA, 19 nt, Homo sapiens
  misc_RNA (1)...(19): siRNA sense strand
gagcaugugguccuggaaa

SEQ ID NO: 820707 - RNA, 19 nt, Homo sapiens
  misc_RNA (1)...(19): siRNA sense strand
ggaccucaccuccaaacug

SEQ ID NO: 820708 - RNA, 19 nt, Homo sapiens
  misc_RNA (1)...(19): siRNA sense strand
uagcuccacugucucauca

SEQ ID NO: 820709 - RNA, 19 nt, Homo sapiens
  misc_RNA (1)...(19): siRNA sense strand
gagaagaagcuagccacuu

SEQ ID NO: 820710 - RNA, 19 nt, Homo sapiens
  misc_RNA (1)...(19): siRNA sense strand
caagguggccauuucaaca

SEQ ID NO: 820711 - RNA, 19 nt, Homo sapiens
  misc_RNA (1)...(19): siRNA sense strand
gagaaacuuuuacaagaug

SEQ ID NO: 820712 - RNA, 19 nt, Homo sapiens
  misc_RNA (1)...(19): siRNA sense strand
gcgacuagcagaguuuauu

SEQ ID NO: 820713 - RNA, 19 nt, Homo sapiens
  misc_RNA (1)...(19): siRNA sense strand
ggcauuauccuguaugagu

SEQ ID NO: 820714 - RNA, 19 nt, Homo sapiens
  misc_RNA (1)...(19): siRNA sense strand
cagccaaggccaucaguga

SEQ ID NO: 820715 - RNA, 19 nt, Homo sapiens
  misc_RNA (1)...(19): siRNA sense strand
ggacucggaggaugaggaa

SEQ ID NO: 820716 - RNA, 19 nt, Homo sapiens
  misc_RNA (1)...(19): siRNA sense strand
gaguuuagcagaacaauua

SEQ ID NO: 820717 - RNA, 19 nt, Homo sapiens
  misc_RNA (1)...(19): siRNA sense strand
gaagaagccuuuucaagua

SEQ ID NO: 820718 - RNA, 19 nt, Homo sapiens
  misc_RNA (1)...(19): siRNA sense strand
gcagaacaauuaaucuuga

SEQ ID NO: 820719 - RNA, 19 nt, Homo sapiens
  misc_RNA (1)...(19): siRNA sense strand
gaauaaagacugaagaaga

SEQ ID NO: 820720 - RNA, 19 nt, Homo sapiens
  misc_RNA (1)...(19): siRNA sense strand
ugacuucucuccaauguga

SEQ ID NO: 820721 - RNA, 19 nt, Homo sapiens
  misc_RNA (1)...(19): siRNA sense strand
ugauuuaucugccaagaaa

SEQ ID NO: 820722 - RNA, 19 nt, Homo sapiens
  misc_RNA (1)...(19): siRNA sense strand
ggagugguauaaagacaaa

SEQ ID NO: 820723 - RNA, 19 nt, Homo sapiens
  misc_RNA (1)...(19): siRNA sense strand
uggaaugguucuaugaaua

SEQ ID NO: 820724 - RNA, 19 nt, Homo sapiens
  misc_RNA (1)...(19): siRNA sense strand
ggaaugacuucucuccaau

SEQ ID NO: 820725 - RNA, 19 nt, Homo sapiens
  misc_RNA (1)...(19): siRNA sense strand
gauggagcauggccaguuu

SEQ ID NO: 820726 - RNA, 19 nt, Homo sapiens
  misc_RNA (1)...(19): siRNA sense strand
ggaaugguucuaugaauau

SEQ ID NO: 820727 - RNA, 19 nt, Homo sapiens
  misc_RNA (1)...(19): siRNA sense strand
caacuaugaugaagaugga

SEQ ID NO: 820728 - RNA, 19 nt, Homo sapiens
  misc_RNA (1)...(19): siRNA sense strand
cgacuagaauaaagacuga

SEQ ID NO: 820729 - RNA, 19 nt, Homo sapiens
  misc_RNA (1)...(19): siRNA sense strand
gcaauguccuagaguuuag

SEQ ID NO: 820730 - RNA, 19 nt, Homo sapiens
  misc_RNA (1)...(19): siRNA sense strand
cagcaacuaugaugaagau

SEQ ID NO: 820731 - RNA, 19 nt, Homo sapiens
  misc_RNA (1)...(19): siRNA sense strand
uguccuagcuuggaaauug

SEQ ID NO: 820732 - RNA, 19 nt, Homo sapiens
  misc_RNA (1)...(19): siRNA sense strand
gaaauuggaugcacaaaac

SEQ ID NO: 820733 - RNA, 19 nt, Homo sapiens
  misc_RNA (1)...(19): siRNA sense strand
cugaaggcauggagaaauu

SEQ ID NO: 820734 - RNA, 19 nt, Homo sapiens
  misc_RNA (1)...(19): siRNA sense strand
ccaaugugauacaacagaa

SEQ ID NO: 820735 - RNA, 19 nt, Homo sapiens
  misc_RNA (1)...(19): siRNA sense strand
gugaagacauugguguuga

SEQ ID NO: 820736 - RNA, 19 nt, Homo sapiens
  misc_RNA (1)...(19): siRNA sense strand
guauaaagacaaacagaug

SEQ ID NO: 820737 - RNA, 19 nt, Homo sapiens
  misc_RNA (1)...(19): siRNA sense strand
gauaugcguuugacuuugc

SEQ ID NO: 820738 - RNA, 19 nt, Homo sapiens
  misc_RNA (1)...(19): siRNA sense strand
ugaagacauugguguugaa

SEQ ID NO: 820739 - RNA, 19 nt, Homo sapiens
  misc_RNA (1)...(19): siRNA sense strand
cagauaugcguuugacuuu

SEQ ID NO: 820740 - RNA, 19 nt, Homo sapiens
  misc_RNA (1)...(19): siRNA sense strand
gaaaauaugauucgacuag

SEQ ID NO: 820741 - RNA, 19 nt, Homo sapiens
  misc_RNA (1)...(19): siRNA sense strand
ggugcaauguccuagaguu

SEQ ID NO: 820742 - RNA, 19 nt, Homo sapiens
  misc_RNA (1)...(19): siRNA sense strand
gaauaugcaggaacugaug

SEQ ID NO: 820743 - RNA, 19 nt, Homo sapiens
  misc_RNA (1)...(19): siRNA sense strand
gaaugguucuaugaauaug

SEQ ID NO: 820744 - RNA, 19 nt, Homo sapiens
  misc_RNA (1)...(19): siRNA sense strand
ugcaggaacugaugauguu

SEQ ID NO: 820745 - RNA, 19 nt, Homo sapiens
  misc_RNA (1)...(19): siRNA sense strand
gaugauuuaucugccaaga

SEQ ID NO: 820746 - RNA, 19 nt, Homo sapiens
  misc_RNA (1)...(19): siRNA sense strand
aggaaugacuucucuccaa

SEQ ID NO: 820747 - RNA, 19 nt, Homo sapiens
  misc_RNA (1)...(19): siRNA sense strand
gcacaaaacauggguuauu

SEQ ID NO: 820748 - RNA, 19 nt, Homo sapiens
  misc_RNA (1)...(19): siRNA sense strand
cacaaaacauggguuauuu

SEQ ID NO: 820749 - RNA, 19 nt, Homo sapiens
  misc_RNA (1)...(19): siRNA sense strand
aaaggugcuuggaaugguu

SEQ ID NO: 820750 - RNA, 19 nt, Homo sapiens
  misc_RNA (1)...(19): siRNA sense strand
cagaaauacuuuggauuac

SEQ ID NO: 820751 - RNA, 19 nt, Homo sapiens
  misc_RNA (1)...(19): siRNA sense strand
aggaacugaugauguugua

SEQ ID NO: 820752 - RNA, 19 nt, Homo sapiens
  misc_RNA (1)...(19): siRNA sense strand
guccuagaguuuagcagaa

SEQ ID NO: 820753 - RNA, 19 nt, Homo sapiens
  misc_RNA (1)...(19): siRNA sense strand
gaaugacuucucuccaaug

SEQ ID NO: 820754 - RNA, 19 nt, Homo sapiens
  misc_RNA (1)...(19): siRNA sense strand
gcacggcaaucaaaauaca

SEQ ID NO: 820755 - RNA, 19 nt, Homo sapiens
  misc_RNA (1)...(19): siRNA sense strand
gugcaauguccuagaguuu

SEQ ID NO: 820756 - RNA, 19 nt, Homo sapiens
  misc_RNA (1)...(19): siRNA sense strand
gacugaagaagaagccuuu

SEQ ID NO: 820757 - RNA, 19 nt, Homo sapiens
  misc_RNA (1)...(19): siRNA sense strand
gguauaaagacaaacagau

SEQ ID NO: 820758 - RNA, 19 nt, Homo sapiens
  misc_RNA (1)...(19): siRNA sense strand
acagauaugcguuugacuu

SEQ ID NO: 820759 - RNA, 19 nt, Homo sapiens
  misc_RNA (1)...(19): siRNA sense strand
gaccucagcaacuaugaug

SEQ ID NO: 820760 - RNA, 19 nt, Homo sapiens
  misc_RNA (1)...(19): siRNA sense strand
caagaaaaguagacaugau

SEQ ID NO: 820761 - RNA, 19 nt, Homo sapiens
  misc_RNA (1)...(19): siRNA sense strand
acucagaaauacuuuggau

SEQ ID NO: 820762 - RNA, 19 nt, Homo sapiens
  misc_RNA (1)...(19): siRNA sense strand
uaaaaggaaugacuucucu

SEQ ID NO: 820763 - RNA, 19 nt, Homo sapiens
  misc_RNA (1)...(19): siRNA sense strand
ggagaaauuuugugaagac

SEQ ID NO: 820764 - RNA, 19 nt, Homo sapiens
  misc_RNA (1)...(19): siRNA sense strand
aaugacuucucuccaaugu

SEQ ID NO: 820765 - RNA, 19 nt, Homo sapiens
  misc_RNA (1)...(19): siRNA sense strand
ggaaauuggaugcacaaaa

SEQ ID NO: 820766 - RNA, 19 nt, Homo sapiens
  misc_RNA (1)...(19): siRNA sense strand
ugcaauguccuagaguuua

SEQ ID NO: 820767 - RNA, 19 nt, Homo sapiens
  misc_RNA (1)...(19): siRNA sense strand
ccucagcaacuaugaugaa

SEQ ID NO: 820768 - RNA, 19 nt, Homo sapiens
  misc_RNA (1)...(19): siRNA sense strand
aaacguaguuaugcuuguc

SEQ ID NO: 820769 - RNA, 19 nt, Homo sapiens
  misc_RNA (1)...(19): siRNA sense strand
gagcauggccaguuuuguu

SEQ ID NO: 820770 - RNA, 19 nt, Homo sapiens
  misc_RNA (1)...(19): siRNA sense strand
ucuccaaugugauacaaca

SEQ ID NO: 820771 - RNA, 19 nt, Homo sapiens
  misc_RNA (1)...(19): siRNA sense strand
gcuuggaaugguucuauga

SEQ ID NO: 820772 - RNA, 19 nt, Homo sapiens
  misc_RNA (1)...(19): siRNA sense strand
caaugugauacaacagaaa

SEQ ID NO: 820773 - RNA, 19 nt, Homo sapiens
  misc_RNA (1)...(19): siRNA sense strand
agauaugcguuugacuuug

SEQ ID NO: 820774 - RNA, 19 nt, Homo sapiens
  misc_RNA (1)...(19): siRNA sense strand
aagaagccuuuucaaguaa

SEQ ID NO: 820775 - RNA, 19 nt, Homo sapiens
  misc_RNA (1)...(19): siRNA sense strand
cuaugaauaugcaggaacu

SEQ ID NO: 820776 - RNA, 19 nt, Homo sapiens
  misc_RNA (1)...(19): siRNA sense strand
guggagugguauaaagaca

SEQ ID NO: 820777 - RNA, 19 nt, Homo sapiens
  misc_RNA (1)...(19): siRNA sense strand
acgaguuuguggaguggua

SEQ ID NO: 820778 - RNA, 19 nt, Homo sapiens
  misc_RNA (1)...(19): siRNA sense strand
agaccugccucuggagaug

SEQ ID NO: 820779 - RNA, 19 nt, Homo sapiens
  misc_RNA (1)...(19): siRNA sense strand
uuacagauaugcguuugac

SEQ ID NO: 820780 - RNA, 19 nt, Homo sapiens
  misc_RNA (1)...(19): siRNA sense strand
ugaaggcauggagaaauuu

SEQ ID NO: 820781 - RNA, 19 nt, Homo sapiens
  misc_RNA (1)...(19): siRNA sense strand
gaaggcauggagaaauuuu

SEQ ID NO: 820782 - RNA, 19 nt, Homo sapiens
  misc_RNA (1)...(19): siRNA sense strand
uuggaaugguucuaugaau

SEQ ID NO: 820783 - RNA, 19 nt, Homo sapiens
  misc_RNA (1)...(19): siRNA sense strand
cuacaggagugguuaaaag

SEQ ID NO: 820784 - RNA, 19 nt, Homo sapiens
  misc_RNA (1)...(19): siRNA sense strand
gcccugaaggcauggagaa

SEQ ID NO: 820785 - RNA, 19 nt, Homo sapiens
  misc_RNA (1)...(19): siRNA sense strand
gaagaagaagccuuuucaa

SEQ ID NO: 820786 - RNA, 19 nt, Homo sapiens
  misc_RNA (1)...(19): siRNA sense strand
guggugcaauguccuagag

SEQ ID NO: 820787 - RNA, 19 nt, Homo sapiens
  misc_RNA (1)...(19): siRNA sense strand
aaacucagaaauacuuugg

SEQ ID NO: 820788 - RNA, 19 nt, Homo sapiens
  misc_RNA (1)...(19): siRNA sense strand
gcaggaacugaugauguug

SEQ ID NO: 820789 - RNA, 19 nt, Homo sapiens
  misc_RNA (1)...(19): siRNA sense strand
agaagaagccuuuucaagu

SEQ ID NO: 820790 - RNA, 19 nt, Homo sapiens
  misc_RNA (1)...(19): siRNA sense strand
cagaacaauuaaucuugac

SEQ ID NO: 820791 - RNA, 19 nt, Homo sapiens
  misc_RNA (1)...(19): siRNA sense strand
ccaguggugcaauguccua

SEQ ID NO: 820792 - RNA, 19 nt, Homo sapiens
  misc_RNA (1)...(19): siRNA sense strand
gagaaugccuugucagaua

SEQ ID NO: 820793 - RNA, 19 nt, Homo sapiens
  misc_RNA (1)...(19): siRNA sense strand
ucacaacccugcuggauga

SEQ ID NO: 820794 - RNA, 19 nt, Homo sapiens
  misc_RNA (1)...(19): siRNA sense strand
aaagacaucugccgucgua

SEQ ID NO: 820795 - RNA, 19 nt, Homo sapiens
  misc_RNA (1)...(19): siRNA sense strand
ugacaucucuuccaaauac

SEQ ID NO: 820796 - RNA, 19 nt, Homo sapiens
  misc_RNA (1)...(19): siRNA sense strand
caagcacgcuguuaaacuu

SEQ ID NO: 820797 - RNA, 19 nt, Homo sapiens
  misc_RNA (1)...(19): siRNA sense strand
agacaagccuggcgaagaa

SEQ ID NO: 820798 - RNA, 19 nt, Homo sapiens
  misc_RNA (1)...(19): siRNA sense strand
caccaacucugcuaugaaa

SEQ ID NO: 820799 - RNA, 19 nt, Homo sapiens
  misc_RNA (1)...(19): siRNA sense strand
gaaaaugacuuagaagaga

SEQ ID NO: 820800 - RNA, 19 nt, Homo sapiens
  misc_RNA (1)...(19): siRNA sense strand
gcaacagccuggcggagaa

SEQ ID NO: 820801 - RNA, 19 nt, Homo sapiens
  misc_RNA (1)...(19): siRNA sense strand
ugagaaaguugccaaagug

SEQ ID NO: 820802 - RNA, 19 nt, Homo sapiens
  misc_RNA (1)...(19): siRNA sense strand
cugaagaacuugacagaga

SEQ ID NO: 820803 - RNA, 19 nt, Homo sapiens
  misc_RNA (1)...(19): siRNA sense strand
gcuguuaaacuucaccuua

SEQ ID NO: 820804 - RNA, 19 nt, Homo sapiens
  misc_RNA (1)...(19): siRNA sense strand
gauggucacuggccacuuc

SEQ ID NO: 820805 - RNA, 19 nt, Homo sapiens
  misc_RNA (1)...(19): siRNA sense strand
ucaccuagagucacacuua

SEQ ID NO: 820806 - RNA, 19 nt, Homo sapiens
  misc_RNA (1)...(19): siRNA sense strand
guacaucagucaccuagag

SEQ ID NO: 820807 - RNA, 19 nt, Homo sapiens
  misc_RNA (1)...(19): siRNA sense strand
ccgaacagauuaacaguca

SEQ ID NO: 820808 - RNA, 19 nt, Homo sapiens
  misc_RNA (1)...(19): siRNA sense strand
gaacagauuaacagucaga

SEQ ID NO: 820809 - RNA, 19 nt, Homo sapiens
  misc_RNA (1)...(19): siRNA sense strand
caacaacgaccagcccaua

SEQ ID NO: 820810 - RNA, 19 nt, Homo sapiens
  misc_RNA (1)...(19): siRNA sense strand
gaaggaagacgcccagaag

SEQ ID NO: 820811 - RNA, 19 nt, Homo sapiens
  misc_RNA (1)...(19): siRNA sense strand
ggagcucacugcccacaug

SEQ ID NO: 820812 - RNA, 19 nt, Homo sapiens
  misc_RNA (1)...(19): siRNA sense strand
ggauuugaguguccauaug

SEQ ID NO: 820813 - RNA, 19 nt, Homo sapiens
  misc_RNA (1)...(19): siRNA sense strand
ggaagucgcagauccugaa

SEQ ID NO: 820814 - RNA, 19 nt, Homo sapiens
  misc_RNA (1)...(19): siRNA sense strand
caaauaccauuacuugacu

SEQ ID NO: 820815 - RNA, 19 nt, Homo sapiens
  misc_RNA (1)...(19): siRNA sense strand
agaaggaagucgacaagga

SEQ ID NO: 820816 - RNA, 19 nt, Homo sapiens
  misc_RNA (1)...(19): siRNA sense strand
ggaugcauaucuccagguu

SEQ ID NO: 820817 - RNA, 19 nt, Homo sapiens
  misc_RNA (1)...(19): siRNA sense strand
uaccauuacuugacugaaa

SEQ ID NO: 820818 - RNA, 19 nt, Homo sapiens
  misc_RNA (1)...(19): siRNA sense strand
caucugccgucguaucauu

SEQ ID NO: 820819 - RNA, 19 nt, Homo sapiens
  misc_RNA (1)...(19): siRNA sense strand
aaaggucacugagaaaguu

SEQ ID NO: 820820 - RNA, 19 nt, Homo sapiens
  misc_RNA (1)...(19): siRNA sense strand
caacccugcuggaugagaa

SEQ ID NO: 820821 - RNA, 19 nt, Homo sapiens
  misc_RNA (1)...(19): siRNA sense strand
ggaaggaagacgcccagaa

SEQ ID NO: 820822 - RNA, 19 nt, Homo sapiens
  misc_RNA (1)...(19): siRNA sense strand
ggacagguggaacaaaguu

SEQ ID NO: 820823 - RNA, 19 nt, Homo sapiens
  misc_RNA (1)...(19): siRNA sense strand
ccgauaugcugaagaacuu

SEQ ID NO: 820824 - RNA, 19 nt, Homo sapiens
  misc_RNA (1)...(19): siRNA sense strand
caacuucccaacaugauga

SEQ ID NO: 820825 - RNA, 19 nt, Homo sapiens
  misc_RNA (1)...(19): siRNA sense strand
ggaaauggaagggaaggaa

SEQ ID NO: 820826 - RNA, 19 nt, Homo sapiens
  misc_RNA (1)...(19): siRNA sense strand
gauuugaguguccauauga

SEQ ID NO: 820827 - RNA, 19 nt, Homo sapiens
  misc_RNA (1)...(19): siRNA sense strand
gacgagaaaccuaagcaaa

SEQ ID NO: 820828 - RNA, 19 nt, Homo sapiens
  misc_RNA (1)...(19): siRNA sense strand
agaagaacuccaacccuua

SEQ ID NO: 820829 - RNA, 19 nt, Homo sapiens
  misc_RNA (1)...(19): siRNA sense strand
gaggagaagugugacaucu

SEQ ID NO: 820830 - RNA, 19 nt, Homo sapiens
  misc_RNA (1)...(19): siRNA sense strand
uugagucccugcaggauuu

SEQ ID NO: 820831 - RNA, 19 nt, Homo sapiens
  misc_RNA (1)...(19): siRNA sense strand
ugugacaucucuuccaaau

SEQ ID NO: 820832 - RNA, 19 nt, Homo sapiens
  misc_RNA (1)...(19): siRNA sense strand
ggaagucgacaaggagaaa

SEQ ID NO: 820833 - RNA, 19 nt, Homo sapiens
  misc_RNA (1)...(19): siRNA sense strand
gaagaacuccaacccuuac

SEQ ID NO: 820834 - RNA, 19 nt, Homo sapiens
  misc_RNA (1)...(19): siRNA sense strand
ccaaagccaccaucucaga

SEQ ID NO: 820835 - RNA, 19 nt, Homo sapiens
  misc_RNA (1)...(19): siRNA sense strand
cgagaagucugacauugac

SEQ ID NO: 820836 - RNA, 19 nt, Homo sapiens
  misc_RNA (1)...(19): siRNA sense strand
agaaugccuugucagauau

SEQ ID NO: 820837 - RNA, 19 nt, Homo sapiens
  misc_RNA (1)...(19): siRNA sense strand
aagaagaggagaaguguga

SEQ ID NO: 820838 - RNA, 19 nt, Homo sapiens
  misc_RNA (1)...(19): siRNA sense strand
gaacuccaacccuuacauc

SEQ ID NO: 820839 - RNA, 19 nt, Homo sapiens
  misc_RNA (1)...(19): siRNA sense strand
guacuguggccacuccuuu

SEQ ID NO: 820840 - RNA, 19 nt, Homo sapiens
  misc_RNA (1)...(19): siRNA sense strand
cagauuaacagucagauag

SEQ ID NO: 820841 - RNA, 19 nt, Homo sapiens
  misc_RNA (1)...(19): siRNA sense strand
gcgagaaugccuugucaga

SEQ ID NO: 820842 - RNA, 19 nt, Homo sapiens
  misc_RNA (1)...(19): siRNA sense strand
ucacugacgagaaaccuaa

SEQ ID NO: 820843 - RNA, 19 nt, Homo sapiens
  misc_RNA (1)...(19): siRNA sense strand
gcuccuugcuggaaaugga

SEQ ID NO: 820844 - RNA, 19 nt, Homo sapiens
  misc_RNA (1)...(19): siRNA sense strand
cccagaaggugcugaagug

SEQ ID NO: 820845 - RNA, 19 nt, Homo sapiens
  misc_RNA (1)...(19): siRNA sense strand
aaacgcuccuugcuggaaa

SEQ ID NO: 820846 - RNA, 19 nt, Homo sapiens
  misc_RNA (1)...(19): siRNA sense strand
gcgaagaagaggagaagug

SEQ ID NO: 820847 - RNA, 19 nt, Homo sapiens
  misc_RNA (1)...(19): siRNA sense strand
aagaccaccuucuguaugu

SEQ ID NO: 820848 - RNA, 19 nt, Homo sapiens
  misc_RNA (1)...(19): siRNA sense strand
gcccagaacggcacuccua

SEQ ID NO: 820849 - RNA, 19 nt, Homo sapiens
  misc_RNA (1)...(19): siRNA sense strand
ugugggagcucgcaugaca

SEQ ID NO: 820850 - RNA, 19 nt, Homo sapiens
  misc_RNA (1)...(19): siRNA sense strand
gcaagcacgcuguuaaacu

SEQ ID NO: 820851 - RNA, 19 nt, Homo sapiens
  misc_RNA (1)...(19): siRNA sense strand
cuacgggacuuauccaaac

SEQ ID NO: 820852 - RNA, 19 nt, Homo sapiens
  misc_RNA (1)...(19): siRNA sense strand
ccaaauaccauuacuugac

SEQ ID NO: 820853 - RNA, 19 nt, Homo sapiens
  misc_RNA (1)...(19): siRNA sense strand
augcauaucuccagguuca

SEQ ID NO: 820854 - RNA, 19 nt, Homo sapiens
  misc_RNA (1)...(19): siRNA sense strand
ccuuacaucacgccaaaua

SEQ ID NO: 820855 - RNA, 19 nt, Homo sapiens
  misc_RNA (1)...(19): siRNA sense strand
gaaggacagguggaacaaa

SEQ ID NO: 820856 - RNA, 19 nt, Homo sapiens
  misc_RNA (1)...(19): siRNA sense strand
gaaugccuugucagauaua

SEQ ID NO: 820857 - RNA, 19 nt, Homo sapiens
  misc_RNA (1)...(19): siRNA sense strand
acagugacauccgcaauca

SEQ ID NO: 820858 - RNA, 19 nt, Homo sapiens
  misc_RNA (1)...(19): siRNA sense strand
ccgagaagucugacauuga

SEQ ID NO: 820859 - RNA, 19 nt, Homo sapiens
  misc_RNA (1)...(19): siRNA sense strand
cugagaaaguugccaaagu

SEQ ID NO: 820860 - RNA, 19 nt, Homo sapiens
  misc_RNA (1)...(19): siRNA sense strand
cuaccaacuucccaacaug

SEQ ID NO: 820861 - RNA, 19 nt, Homo sapiens
  misc_RNA (1)...(19): siRNA sense strand
caagaaggaagucgacaag

SEQ ID NO: 820862 - RNA, 19 nt, Homo sapiens
  misc_RNA (1)...(19): siRNA sense strand
gauuaacagucagauagca

SEQ ID NO: 820863 - RNA, 19 nt, Homo sapiens
  misc_RNA (1)...(19): siRNA sense strand
uuacaucacgccaaauaau

SEQ ID NO: 820864 - RNA, 19 nt, Homo sapiens
  misc_RNA (1)...(19): siRNA sense strand
agaaggugcugaagugcau

SEQ ID NO: 820865 - RNA, 19 nt, Homo sapiens
  misc_RNA (1)...(19): siRNA sense strand
gcuacgggacuuauccaaa

SEQ ID NO: 820866 - RNA, 19 nt, Homo sapiens
  misc_RNA (1)...(19): siRNA sense strand
ucagucaccuagagucaca

SEQ ID NO: 820867 - RNA, 19 nt, Homo sapiens
  misc_RNA (1)...(19): siRNA sense strand
gaguugacagugcacauga

SEQ ID NO: 820868 - RNA, 19 nt, Homo sapiens
  misc_RNA (1)...(19): siRNA sense strand
ucgcugagccgguggagaa

SEQ ID NO: 820869 - RNA, 19 nt, Homo sapiens
  misc_RNA (1)...(19): siRNA sense strand
gaagagcacgccccugaaa

SEQ ID NO: 820870 - RNA, 19 nt, Homo sapiens
  misc_RNA (1)...(19): siRNA sense strand
gcucacugcccacaugaug

SEQ ID NO: 820871 - RNA, 19 nt, Homo sapiens
  misc_RNA (1)...(19): siRNA sense strand
gucaccaacucugcuauga

SEQ ID NO: 820872 - RNA, 19 nt, Homo sapiens
  misc_RNA (1)...(19): siRNA sense strand
cagagagccacacgucaaa

SEQ ID NO: 820873 - RNA, 19 nt, Homo sapiens
  misc_RNA (1)...(19): siRNA sense strand
cgucguaucauucauguca

SEQ ID NO: 820874 - RNA, 19 nt, Homo sapiens
  misc_RNA (1)...(19): siRNA sense strand
gagcaugcuuuucaagaug

SEQ ID NO: 820875 - RNA, 19 nt, Homo sapiens
  misc_RNA (1)...(19): siRNA sense strand
gaagaggagaagugugaca

SEQ ID NO: 820876 - RNA, 19 nt, Homo sapiens
  misc_RNA (1)...(19): siRNA sense strand
gaauguggaggucaagaag

SEQ ID NO: 820877 - RNA, 19 nt, Homo sapiens
  misc_RNA (1)...(19): siRNA sense strand
ugucacaccuaccaucaca

SEQ ID NO: 820878 - RNA, 19 nt, Homo sapiens
  misc_RNA (1)...(19): siRNA sense strand
aaggacagguggaacaaag

SEQ ID NO: 820879 - RNA, 19 nt, Homo sapiens
  misc_RNA (1)...(19): siRNA sense strand
caacgugaaauaccagcuu

SEQ ID NO: 820880 - RNA, 19 nt, Homo sapiens
  misc_RNA (1)...(19): siRNA sense strand
gacaucugccgucguauca

SEQ ID NO: 820881 - RNA, 19 nt, Homo sapiens
  misc_RNA (1)...(19): siRNA sense strand
caaaguggaggagaagaug

SEQ ID NO: 820882 - RNA, 19 nt, Homo sapiens
  misc_RNA (1)...(19): siRNA sense strand
gaguguccauaugaucaaa

SEQ ID NO: 820883 - RNA, 19 nt, Homo sapiens
  misc_RNA (1)...(19): siRNA sense strand
agucgcagauccugaagug

SEQ ID NO: 820884 - RNA, 19 nt, Homo sapiens
  misc_RNA (1)...(19): siRNA sense strand
ugacagugcacaugaacga

SEQ ID NO: 820885 - RNA, 19 nt, Homo sapiens
  misc_RNA (1)...(19): siRNA sense strand
gauccuccaggcccaguuu

SEQ ID NO: 820886 - RNA, 19 nt, Homo sapiens
  misc_RNA (1)...(19): siRNA sense strand
gcccugcagucagucauga

SEQ ID NO: 820887 - RNA, 19 nt, Homo sapiens
  misc_RNA (1)...(19): siRNA sense strand
ugacauccgcaaucaacaa

SEQ ID NO: 820888 - RNA, 19 nt, Homo sapiens
  misc_RNA (1)...(19): siRNA sense strand
cgaagaagaggagaagugu

SEQ ID NO: 820889 - RNA, 19 nt, Homo sapiens
  misc_RNA (1)...(19): siRNA sense strand
uaucauucaugucaaacuc

SEQ ID NO: 820890 - RNA, 19 nt, Homo sapiens
  misc_RNA (1)...(19): siRNA sense strand
uccuaucagugcaaacuuu

SEQ ID NO: 820891 - RNA, 19 nt, Homo sapiens
  misc_RNA (1)...(19): siRNA sense strand
gauaugcugaagaacuuga

SEQ ID NO: 820892 - RNA, 19 nt, Homo sapiens
  misc_RNA (1)...(19): siRNA sense strand
gcucaucgcuugcaaacag

SEQ ID NO: 820893 - RNA, 19 nt, Homo sapiens
  misc_RNA (1)...(19): siRNA sense strand
ccaggagcguuuccaguuu

SEQ ID NO: 820894 - RNA, 19 nt, Homo sapiens
  misc_RNA (1)...(19): siRNA sense strand
guucagaucugcgagaagu

SEQ ID NO: 820895 - RNA, 19 nt, Homo sapiens
  misc_RNA (1)...(19): siRNA sense strand
aaacaguacuuccuugacu

SEQ ID NO: 820896 - RNA, 19 nt, Homo sapiens
  misc_RNA (1)...(19): siRNA sense strand
gccaggagcguuuccaguu

SEQ ID NO: 820897 - RNA, 19 nt, Homo sapiens
  misc_RNA (1)...(19): siRNA sense strand
gauccuucguuuccuuuua

SEQ ID NO: 820898 - RNA, 19 nt, Homo sapiens
  misc_RNA (1)...(19): siRNA sense strand
guacuuccuugacucacau

SEQ ID NO: 820899 - RNA, 19 nt, Homo sapiens
  misc_RNA (1)...(19): siRNA sense strand
caggagcguuuccaguuuc

SEQ ID NO: 820900 - RNA, 19 nt, Homo sapiens
  misc_RNA (1)...(19): siRNA sense strand
cagcaggccaggagcguuu

SEQ ID NO: 820901 - RNA, 19 nt, Homo sapiens
  misc_RNA (1)...(19): siRNA sense strand
uacgcgagguaacguugua

SEQ ID NO: 820902 - RNA, 19 nt, Homo sapiens
  misc_RNA (1)...(19): siRNA sense strand
acagauccuucguuuccuu

SEQ ID NO: 820903 - RNA, 19 nt, Homo sapiens
  misc_RNA (1)...(19): siRNA sense strand
ugaauugcugagcccauua

SEQ ID NO: 820904 - RNA, 19 nt, Homo sapiens
  misc_RNA (1)...(19): siRNA sense strand
gcguuucucuuucugaacu

SEQ ID NO: 820905 - RNA, 19 nt, Homo sapiens
  misc_RNA (1)...(19): siRNA sense strand
ccauugcguuucucuuucu

SEQ ID NO: 820906 - RNA, 19 nt, Homo sapiens
  misc_RNA (1)...(19): siRNA sense strand
ccauaaacaguacuuccuu

SEQ ID NO: 820907 - RNA, 19 nt, Homo sapiens
  misc_RNA (1)...(19): siRNA sense strand
ggacuguaugggcaaguug

SEQ ID NO: 820908 - RNA, 19 nt, Homo sapiens
  misc_RNA (1)...(19): siRNA sense strand
uugaauugcugagcccauu

SEQ ID NO: 820909 - RNA, 19 nt, Homo sapiens
  misc_RNA (1)...(19): siRNA sense strand
gcuucuuccugacauuuca

SEQ ID NO: 820910 - RNA, 19 nt, Homo sapiens
  misc_RNA (1)...(19): siRNA sense strand
gcugguggccauaaacagu

SEQ ID NO: 820911 - RNA, 19 nt, Homo sapiens
  misc_RNA (1)...(19): siRNA sense strand
auaaacaguacuuccuuga

SEQ ID NO: 820912 - RNA, 19 nt, Homo sapiens
  misc_RNA (1)...(19): siRNA sense strand
gaauugcugagcccauuac

SEQ ID NO: 820913 - RNA, 19 nt, Homo sapiens
  misc_RNA (1)...(19): siRNA sense strand
acuaugccuucaccagcua

SEQ ID NO: 820914 - RNA, 19 nt, Homo sapiens
  misc_RNA (1)...(19): siRNA sense strand
ggaagaggaugcaaguaaa

SEQ ID NO: 820915 - RNA, 19 nt, Homo sapiens
  misc_RNA (1)...(19): siRNA sense strand
ugaugaagcugauggauaa

SEQ ID NO: 820916 - RNA, 19 nt, Homo sapiens
  misc_RNA (1)...(19): siRNA sense strand
gaaaggcacucaacacaag

SEQ ID NO: 820917 - RNA, 19 nt, Homo sapiens
  misc_RNA (1)...(19): siRNA sense strand
ccuaagggcuucuauaaga

SEQ ID NO: 820918 - RNA, 19 nt, Homo sapiens
  misc_RNA (1)...(19): siRNA sense strand
gagcaucaguuuaagaaga

SEQ ID NO: 820919 - RNA, 19 nt, Homo sapiens
  misc_RNA (1)...(19): siRNA sense strand
guucauagauguugacaau

SEQ ID NO: 820920 - RNA, 19 nt, Homo sapiens
  misc_RNA (1)...(19): siRNA sense strand
ugaaggcacugaauauuga

SEQ ID NO: 820921 - RNA, 19 nt, Homo sapiens
  misc_RNA (1)...(19): siRNA sense strand
gcagaacccuugcucaucu

SEQ ID NO: 820922 - RNA, 19 nt, Homo sapiens
  misc_RNA (1)...(19): siRNA sense strand
gaugggauuugaugagauu

SEQ ID NO: 820923 - RNA, 19 nt, Homo sapiens
  misc_RNA (1)...(19): siRNA sense strand
gguaauugaucgagagcua

SEQ ID NO: 820924 - RNA, 19 nt, Homo sapiens
  misc_RNA (1)...(19): siRNA sense strand
cggacaagcugacuuucua

SEQ ID NO: 820925 - RNA, 19 nt, Homo sapiens
  misc_RNA (1)...(19): siRNA sense strand
guacaaggaguauuaugaa

SEQ ID NO: 820926 - RNA, 19 nt, Homo sapiens
  misc_RNA (1)...(19): siRNA sense strand
ggaaggaggccucggacaa

SEQ ID NO: 820927 - RNA, 19 nt, Homo sapiens
  misc_RNA (1)...(19): siRNA sense strand
caaccucccuggacacugu

SEQ ID NO: 820928 - RNA, 19 nt, Homo sapiens
  misc_RNA (1)...(19): siRNA sense strand
acugggaacugauuuauau

SEQ ID NO: 820929 - RNA, 19 nt, Homo sapiens
  misc_RNA (1)...(19): siRNA sense strand
ucucaguugucccuaaaua

SEQ ID NO: 820930 - RNA, 19 nt, Homo sapiens
  misc_RNA (1)...(19): siRNA sense strand
caauggaacccucccagua

SEQ ID NO: 820931 - RNA, 19 nt, Homo sapiens
  misc_RNA (1)...(19): siRNA sense strand
ggaaaggcacucaacacaa

SEQ ID NO: 820932 - RNA, 19 nt, Homo sapiens
  misc_RNA (1)...(19): siRNA sense strand
agaaagcagugcccaaugu

SEQ ID NO: 820933 - RNA, 19 nt, Homo sapiens
  misc_RNA (1)...(19): siRNA sense strand
ccacagacccucaaucuac

SEQ ID NO: 820934 - RNA, 19 nt, Homo sapiens
  misc_RNA (1)...(19): siRNA sense strand
ccgaguacaaggaguauua

SEQ ID NO: 820935 - RNA, 19 nt, Homo sapiens
  misc_RNA (1)...(19): siRNA sense strand
ggacuacaccuggaccuuu

SEQ ID NO: 820936 - RNA, 19 nt, Homo sapiens
  misc_RNA (1)...(19): siRNA sense strand
cagacaagaugggauuuga

SEQ ID NO: 820937 - RNA, 19 nt, Homo sapiens
  misc_RNA (1)...(19): siRNA sense strand
uggaugaaccagagucuua

SEQ ID NO: 820938 - RNA, 19 nt, Homo sapiens
  misc_RNA (1)...(19): siRNA sense strand
cuaaauauccagacaagau

SEQ ID NO: 820939 - RNA, 19 nt, Homo sapiens
  misc_RNA (1)...(19): siRNA sense strand
uaauugaccucaggaagga

SEQ ID NO: 820940 - RNA, 19 nt, Homo sapiens
  misc_RNA (1)...(19): siRNA sense strand
ccacuccaccuuccuaauu

SEQ ID NO: 820941 - RNA, 19 nt, Homo sapiens
  misc_RNA (1)...(19): siRNA sense strand
gacuacaccuggaccuuug

SEQ ID NO: 820942 - RNA, 19 nt, Homo sapiens
  misc_RNA (1)...(19): siRNA sense strand
ucgagaaccucauccaugu

SEQ ID NO: 820943 - RNA, 19 nt, Homo sapiens
  misc_RNA (1)...(19): siRNA sense strand
gagacucuaucacuaugug

SEQ ID NO: 820944 - RNA, 19 nt, Homo sapiens
  misc_RNA (1)...(19): siRNA sense strand
agacuacauucuguucaua

SEQ ID NO: 820945 - RNA, 19 nt, Homo sapiens
  misc_RNA (1)...(19): siRNA sense strand
caauguggauaauacaaca

SEQ ID NO: 820946 - RNA, 19 nt, Homo sapiens
  misc_RNA (1)...(19): siRNA sense strand
cagcugaaggcacugaaua

SEQ ID NO: 820947 - RNA, 19 nt, Homo sapiens
  misc_RNA (1)...(19): siRNA sense strand
gcagaaaacaaaacuauug

SEQ ID NO: 820948 - RNA, 19 nt, Homo sapiens
  misc_RNA (1)...(19): siRNA sense strand
gggccuguauucuaauuuc

SEQ ID NO: 820949 - RNA, 19 nt, Homo sapiens
  misc_RNA (1)...(19): siRNA sense strand
cagcuggacugggaacuga

SEQ ID NO: 820950 - RNA, 19 nt, Homo sapiens
  misc_RNA (1)...(19): siRNA sense strand
gacaagaugggauuugaug

SEQ ID NO: 820951 - RNA, 19 nt, Homo sapiens
  misc_RNA (1)...(19): siRNA sense strand
gacaauuuccugacuaauc

SEQ ID NO: 820952 - RNA, 19 nt, Homo sapiens
  misc_RNA (1)...(19): siRNA sense strand
gcaaugccaagaacacaga

SEQ ID NO: 820953 - RNA, 19 nt, Homo sapiens
  misc_RNA (1)...(19): siRNA sense strand
ggaacugauuuauauuggu

SEQ ID NO: 820954 - RNA, 19 nt, Homo sapiens
  misc_RNA (1)...(19): siRNA sense strand
gggaacugauuuauauugg

SEQ ID NO: 820955 - RNA, 19 nt, Homo sapiens
  misc_RNA (1)...(19): siRNA sense strand
gucuuacccugaugaaauu

SEQ ID NO: 820956 - RNA, 19 nt, Homo sapiens
  misc_RNA (1)...(19): siRNA sense strand
caaggaguauuaugaaucc

SEQ ID NO: 820957 - RNA, 19 nt, Homo sapiens
  misc_RNA (1)...(19): siRNA sense strand
ggacugggaacugauuuau

SEQ ID NO: 820958 - RNA, 19 nt, Homo sapiens
  misc_RNA (1)...(19): siRNA sense strand
guugacaauuuccugacua

SEQ ID NO: 820959 - RNA, 19 nt, Homo sapiens
  misc_RNA (1)...(19): siRNA sense strand
ccaaagcacuggccaaccu

SEQ ID NO: 820960 - RNA, 19 nt, Homo sapiens
  misc_RNA (1)...(19): siRNA sense strand
cauagauguugacaauuuc

SEQ ID NO: 820961 - RNA, 19 nt, Homo sapiens
  misc_RNA (1)...(19): siRNA sense strand
gaaagcagugcccaaugug

SEQ ID NO: 820962 - RNA, 19 nt, Homo sapiens
  misc_RNA (1)...(19): siRNA sense strand
gaagaggaugcaaguaaag

SEQ ID NO: 820963 - RNA, 19 nt, Homo sapiens
  misc_RNA (1)...(19): siRNA sense strand
gagaggagccggugguuuu

SEQ ID NO: 820964 - RNA, 19 nt, Homo sapiens
  misc_RNA (1)...(19): siRNA sense strand
aggaagaggaugcaaguaa

SEQ ID NO: 820965 - RNA, 19 nt, Homo sapiens
  misc_RNA (1)...(19): siRNA sense strand
cgucaucucucuggaagga

SEQ ID NO: 820966 - RNA, 19 nt, Homo sapiens
  misc_RNA (1)...(19): siRNA sense strand
uaaaggagccagagaaagc

SEQ ID NO: 820967 - RNA, 19 nt, Homo sapiens
  misc_RNA (1)...(19): siRNA sense strand
ccacuacucagucuggaaa

SEQ ID NO: 820968 - RNA, 19 nt, Homo sapiens
  misc_RNA (1)...(19): siRNA sense strand
gaaggaggccucggacaag

SEQ ID NO: 820969 - RNA, 19 nt, Homo sapiens
  misc_RNA (1)...(19): siRNA sense strand
gaagcaaagccgcaucuac

SEQ ID NO: 820970 - RNA, 19 nt, Homo sapiens
  misc_RNA (1)...(19): siRNA sense strand
ggaagucccggaagcaaag

SEQ ID NO: 820971 - RNA, 19 nt, Homo sapiens
  misc_RNA (1)...(19): siRNA sense strand
gagaaagcagugcccaaug

SEQ ID NO: 820972 - RNA, 19 nt, Homo sapiens
  misc_RNA (1)...(19): siRNA sense strand
gcugaaggcacugaauauu

SEQ ID NO: 820973 - RNA, 19 nt, Homo sapiens
  misc_RNA (1)...(19): siRNA sense strand
uacauucuguucauagaug

SEQ ID NO: 820974 - RNA, 19 nt, Homo sapiens
  misc_RNA (1)...(19): siRNA sense strand
cagaacccuugcucaucua

SEQ ID NO: 820975 - RNA, 19 nt, Homo sapiens
  misc_RNA (1)...(19): siRNA sense strand
uuaagaagaagcugaugaa

SEQ ID NO: 820976 - RNA, 19 nt, Homo sapiens
  misc_RNA (1)...(19): siRNA sense strand
ccucauccaugugcagauu

SEQ ID NO: 820977 - RNA, 19 nt, Homo sapiens
  misc_RNA (1)...(19): siRNA sense strand
ggcagccacugaucacaau

SEQ ID NO: 820978 - RNA, 19 nt, Homo sapiens
  misc_RNA (1)...(19): siRNA sense strand
aagcaaagccgcaucuaca

SEQ ID NO: 820979 - RNA, 19 nt, Homo sapiens
  misc_RNA (1)...(19): siRNA sense strand
gaagcugauggauaacauu

SEQ ID NO: 820980 - RNA, 19 nt, Homo sapiens
  misc_RNA (1)...(19): siRNA sense strand
uguaugaacaggagauuga

SEQ ID NO: 820981 - RNA, 19 nt, Homo sapiens
  misc_RNA (1)...(19): siRNA sense strand
uaaauauccagacaagaug

SEQ ID NO: 820982 - RNA, 19 nt, Homo sapiens
  misc_RNA (1)...(19): siRNA sense strand
gacugggaacugauuuaua

SEQ ID NO: 820983 - RNA, 19 nt, Homo sapiens
  misc_RNA (1)...(19): siRNA sense strand
cuacagcaaugccaagaac

SEQ ID NO: 820984 - RNA, 19 nt, Homo sapiens
  misc_RNA (1)...(19): siRNA sense strand
ggagaggagccggugguuu

SEQ ID NO: 820985 - RNA, 19 nt, Homo sapiens
  misc_RNA (1)...(19): siRNA sense strand
aagaugggauuugaugaga

SEQ ID NO: 820986 - RNA, 19 nt, Homo sapiens
  misc_RNA (1)...(19): siRNA sense strand
ggcacugaauauugaaaug

SEQ ID NO: 820987 - RNA, 19 nt, Homo sapiens
  misc_RNA (1)...(19): siRNA sense strand
uugacaauuuccugacuaa

SEQ ID NO: 820988 - RNA, 19 nt, Homo sapiens
  misc_RNA (1)...(19): siRNA sense strand
guaggaagaggaugcaagu

SEQ ID NO: 820989 - RNA, 19 nt, Homo sapiens
  misc_RNA (1)...(19): siRNA sense strand
gaaagagguaauugaucga

SEQ ID NO: 820990 - RNA, 19 nt, Homo sapiens
  misc_RNA (1)...(19): siRNA sense strand
ugucucaguugucccuaaa

SEQ ID NO: 820991 - RNA, 19 nt, Homo sapiens
  misc_RNA (1)...(19): siRNA sense strand
gcaggaagacaucgagaac

SEQ ID NO: 820992 - RNA, 19 nt, Homo sapiens
  misc_RNA (1)...(19): siRNA sense strand
ggacacaugccuggaaguc

SEQ ID NO: 820993 - RNA, 19 nt, Homo sapiens
  misc_RNA (1)...(19): siRNA sense strand
cacuccaccuuccuaauug

SEQ ID NO: 820994 - RNA, 19 nt, Homo sapiens
  misc_RNA (1)...(19): siRNA sense strand
cugaugaagcugauggaua

SEQ ID NO: 820995 - RNA, 19 nt, Homo sapiens
  misc_RNA (1)...(19): siRNA sense strand
cugaaggcacugaauauug

SEQ ID NO: 820996 - RNA, 19 nt, Homo sapiens
  misc_RNA (1)...(19): siRNA sense strand
acaccuggaccuuugauga

SEQ ID NO: 820997 - RNA, 19 nt, Homo sapiens
  misc_RNA (1)...(19): siRNA sense strand
gcugauggauaacauugac

SEQ ID NO: 820998 - RNA, 19 nt, Homo sapiens
  misc_RNA (1)...(19): siRNA sense strand
ugaagcugauggauaacau

SEQ ID NO: 820999 - RNA, 19 nt, Homo sapiens
  misc_RNA (1)...(19): siRNA sense strand
agcaucaguuuaagaagaa

SEQ ID NO: 821000 - RNA, 19 nt, Homo sapiens
  misc_RNA (1)...(19): siRNA sense strand
gaaggcacugaauauugaa

SEQ ID NO: 821001 - RNA, 19 nt, Homo sapiens
  misc_RNA (1)...(19): siRNA sense strand
caagaugggauuugaugag

SEQ ID NO: 821002 - RNA, 19 nt, Homo sapiens
  misc_RNA (1)...(19): siRNA sense strand
guggauaauacaacagaaa

SEQ ID NO: 821003 - RNA, 19 nt, Homo sapiens
  misc_RNA (1)...(19): siRNA sense strand
ucaguugucccuaaauauc

SEQ ID NO: 821004 - RNA, 19 nt, Homo sapiens
  misc_RNA (1)...(19): siRNA sense strand
ucauccaugugcagauuga

SEQ ID NO: 821005 - RNA, 19 nt, Homo sapiens
  misc_RNA (1)...(19): siRNA sense strand
ccucggacaagcugacuuu

SEQ ID NO: 821006 - RNA, 19 nt, Homo sapiens
  misc_RNA (1)...(19): siRNA sense strand
uucaagggaugagcuauga

SEQ ID NO: 821007 - RNA, 19 nt, Homo sapiens
  misc_RNA (1)...(19): siRNA sense strand
ggaagcaaagccgcaucua

SEQ ID NO: 821008 - RNA, 19 nt, Homo sapiens
  misc_RNA (1)...(19): siRNA sense strand
gaagaugcugccaguggau

SEQ ID NO: 821009 - RNA, 19 nt, Homo sapiens
  misc_RNA (1)...(19): siRNA sense strand
caaguaaaggagccagaga

SEQ ID NO: 821010 - RNA, 19 nt, Homo sapiens
  misc_RNA (1)...(19): siRNA sense strand
gggcagccacugaucacaa

SEQ ID NO: 821011 - RNA, 19 nt, Homo sapiens
  misc_RNA (1)...(19): siRNA sense strand
aauggaacccucccaguau

SEQ ID NO: 821012 - RNA, 19 nt, Homo sapiens
  misc_RNA (1)...(19): siRNA sense strand
aguacaaggaguauuauga

SEQ ID NO: 821013 - RNA, 19 nt, Homo sapiens
  misc_RNA (1)...(19): siRNA sense strand
acaauuuccugacuaaucc

SEQ ID NO: 821014 - RNA, 19 nt, Homo sapiens
  misc_RNA (1)...(19): siRNA sense strand
uggcagagauuuauaagua

SEQ ID NO: 821015 - RNA, 19 nt, Homo sapiens
  misc_RNA (1)...(19): siRNA sense strand
ggacacaacugcagcacaa

SEQ ID NO: 821016 - RNA, 19 nt, Homo sapiens
  misc_RNA (1)...(19): siRNA sense strand
ugacagaucucaccaagga

SEQ ID NO: 821017 - RNA, 19 nt, Homo sapiens
  misc_RNA (1)...(19): siRNA sense strand
ggaaauaccagaaugaguu

SEQ ID NO: 821018 - RNA, 19 nt, Homo sapiens
  misc_RNA (1)...(19): siRNA sense strand
cagcagcacuccuguguuu

SEQ ID NO: 821019 - RNA, 19 nt, Homo sapiens
  misc_RNA (1)...(19): siRNA sense strand
gcauggagauggccuguga

SEQ ID NO: 821020 - RNA, 19 nt, Homo sapiens
  misc_RNA (1)...(19): siRNA sense strand
ggagauggccugugacuau

SEQ ID NO: 821021 - RNA, 19 nt, Homo sapiens
  misc_RNA (1)...(19): siRNA sense strand
uuaacacgcuggcccauua

SEQ ID NO: 821022 - RNA, 19 nt, Homo sapiens
  misc_RNA (1)...(19): siRNA sense strand
gagcugaugcgcacagaua

SEQ ID NO: 821023 - RNA, 19 nt, Homo sapiens
  misc_RNA (1)...(19): siRNA sense strand
ccacgugacuguugagaug

SEQ ID NO: 821024 - RNA, 19 nt, Homo sapiens
  misc_RNA (1)...(19): siRNA sense strand
gcaagaaugugcccuacuc

SEQ ID NO: 821025 - RNA, 19 nt, Homo sapiens
  misc_RNA (1)...(19): siRNA sense strand
ugaaagacuuggacacaga

SEQ ID NO: 821026 - RNA, 19 nt, Homo sapiens
  misc_RNA (1)...(19): siRNA sense strand
ccaguggacuucuucauca

SEQ ID NO: 821027 - RNA, 19 nt, Homo sapiens
  misc_RNA (1)...(19): siRNA sense strand
agagaaguauuuccauuug

SEQ ID NO: 821028 - RNA, 19 nt, Homo sapiens
  misc_RNA (1)...(19): siRNA sense strand
gagcguuacuggcagaaga

SEQ ID NO: 821029 - RNA, 19 nt, Homo sapiens
  misc_RNA (1)...(19): siRNA sense strand
cagacuccguuuaccuuua

SEQ ID NO: 821030 - RNA, 19 nt, Homo sapiens
  misc_RNA (1)...(19): siRNA sense strand
ucgcugagcugcagacaga

SEQ ID NO: 821031 - RNA, 19 nt, Homo sapiens
  misc_RNA (1)...(19): siRNA sense strand
gcagagccaucgcaagaag

SEQ ID NO: 821032 - RNA, 19 nt, Homo sapiens
  misc_RNA (1)...(19): siRNA sense strand
ucaaggccauucugaguau

SEQ ID NO: 821033 - RNA, 19 nt, Homo sapiens
  misc_RNA (1)...(19): siRNA sense strand
gacaacauccucaagauca

SEQ ID NO: 821034 - RNA, 19 nt, Homo sapiens
  misc_RNA (1)...(19): siRNA sense strand
agaaugaguucaacaccaa

SEQ ID NO: 821035 - RNA, 19 nt, Homo sapiens
  misc_RNA (1)...(19): siRNA sense strand
gaagagggaauuagcuugu

SEQ ID NO: 821036 - RNA, 19 nt, Homo sapiens
  misc_RNA (1)...(19): siRNA sense strand
agacagacaugacagaucu

SEQ ID NO: 821037 - RNA, 19 nt, Homo sapiens
  misc_RNA (1)...(19): siRNA sense strand
gggugaacauccugaagaa

SEQ ID NO: 821038 - RNA, 19 nt, Homo sapiens
  misc_RNA (1)...(19): siRNA sense strand
acagagaaguauuuccauu

SEQ ID NO: 821039 - RNA, 19 nt, Homo sapiens
  misc_RNA (1)...(19): siRNA sense strand
ggaacaacauccgcacugu

SEQ ID NO: 821040 - RNA, 19 nt, Homo sapiens
  misc_RNA (1)...(19): siRNA sense strand
cagaggacgucgaccuuga

SEQ ID NO: 821041 - RNA, 19 nt, Homo sapiens
  misc_RNA (1)...(19): siRNA sense strand
gaggagaucguguguguca

SEQ ID NO: 821042 - RNA, 19 nt, Homo sapiens
  misc_RNA (1)...(19): siRNA sense strand
cagagaaguauuuccauuu

SEQ ID NO: 821043 - RNA, 19 nt, Homo sapiens
  misc_RNA (1)...(19): siRNA sense strand
gugcagcccuggaguguag

SEQ ID NO: 821044 - RNA, 19 nt, Homo sapiens
  misc_RNA (1)...(19): siRNA sense strand
gagauggccugugacuaug

SEQ ID NO: 821045 - RNA, 19 nt, Homo sapiens
  misc_RNA (1)...(19): siRNA sense strand
gaaauaccagaaugaguuc

SEQ ID NO: 821046 - RNA, 19 nt, Homo sapiens
  misc_RNA (1)...(19): siRNA sense strand
caacauggaagagggaauu

SEQ ID NO: 821047 - RNA, 19 nt, Homo sapiens
  misc_RNA (1)...(19): siRNA sense strand
cggaggagaucgugugugu

SEQ ID NO: 821048 - RNA, 19 nt, Homo sapiens
  misc_RNA (1)...(19): siRNA sense strand
ccgcucagccuccaacuaa

SEQ ID NO: 821049 - RNA, 19 nt, Homo sapiens
  misc_RNA (1)...(19): siRNA sense strand
guuccucccuuuaugaaga

SEQ ID NO: 821050 - RNA, 19 nt, Homo sapiens
  misc_RNA (1)...(19): siRNA sense strand
caagauaggccaaguaagc

SEQ ID NO: 821051 - RNA, 19 nt, Homo sapiens
  misc_RNA (1)...(19): siRNA sense strand
gggaaugaccuccauguag

SEQ ID NO: 821052 - RNA, 19 nt, Homo sapiens
  misc_RNA (1)...(19): siRNA sense strand
gagccucucacccucguua

SEQ ID NO: 821053 - RNA, 19 nt, Homo sapiens
  misc_RNA (1)...(19): siRNA sense strand
ggacaacuacaacaagauc

SEQ ID NO: 821054 - RNA, 19 nt, Homo sapiens
  misc_RNA (1)...(19): siRNA sense strand
gcacuuccucaucgucuuu

SEQ ID NO: 821055 - RNA, 19 nt, Homo sapiens
  misc_RNA (1)...(19): siRNA sense strand
caacaagcacuuccucauc

SEQ ID NO: 821056 - RNA, 19 nt, Homo sapiens
  misc_RNA (1)...(19): siRNA sense strand
ggaggcuucucaagaucaa

SEQ ID NO: 821057 - RNA, 19 nt, Homo sapiens
  misc_RNA (1)...(19): siRNA sense strand
ccaaguguuccucccuuua

SEQ ID NO: 821058 - RNA, 19 nt, Homo sapiens
  misc_RNA (1)...(19): siRNA sense strand
gagaggaaauccgcaaagg

SEQ ID NO: 821059 - RNA, 19 nt, Homo sapiens
  misc_RNA (1)...(19): siRNA sense strand
gcaaggauucgccaaccaa

SEQ ID NO: 821060 - RNA, 19 nt, Homo sapiens
  misc_RNA (1)...(19): siRNA sense strand
agaaggugcucccggaaau

SEQ ID NO: 821061 - RNA, 19 nt, Homo sapiens
  misc_RNA (1)...(19): siRNA sense strand
gagaaguauuuccauuugg

SEQ ID NO: 821062 - RNA, 19 nt, Homo sapiens
  misc_RNA (1)...(19): siRNA sense strand
agaagaugcucaccaacug

SEQ ID NO: 821063 - RNA, 19 nt, Homo sapiens
  misc_RNA (1)...(19): siRNA sense strand
uggagaagaugcucaccaa

SEQ ID NO: 821064 - RNA, 19 nt, Homo sapiens
  misc_RNA (1)...(19): siRNA sense strand
acggcaagcuggaguacua

SEQ ID NO: 821065 - RNA, 19 nt, Homo sapiens
  misc_RNA (1)...(19): siRNA sense strand
guacuacaccagcaucaug

SEQ ID NO: 821066 - RNA, 19 nt, Homo sapiens
  misc_RNA (1)...(19): siRNA sense strand
ggucaagauaggccaagua

SEQ ID NO: 821067 - RNA, 19 nt, Homo sapiens
  misc_RNA (1)...(19): siRNA sense strand
gaguauccgugaagacaag

SEQ ID NO: 821068 - RNA, 19 nt, Homo sapiens
  misc_RNA (1)...(19): siRNA sense strand
gaccaccgcuucgagaaca

SEQ ID NO: 821069 - RNA, 19 nt, Homo sapiens
  misc_RNA (1)...(19): siRNA sense strand
uggccaagcucuucaccuu

SEQ ID NO: 821070 - RNA, 19 nt, Homo sapiens
  misc_RNA (1)...(19): siRNA sense strand
gagaagaugcucaccaacu

SEQ ID NO: 821071 - RNA, 19 nt, Homo sapiens
  misc_RNA (1)...(19): siRNA sense strand
caaguguuccucccuuuau

SEQ ID NO: 821072 - RNA, 19 nt, Homo sapiens
  misc_RNA (1)...(19): siRNA sense strand
gcagacuccguuuaccuuu

SEQ ID NO: 821073 - RNA, 19 nt, Homo sapiens
  misc_RNA (1)...(19): siRNA sense strand
gucaagauaggccaaguaa

SEQ ID NO: 821074 - RNA, 19 nt, Homo sapiens
  misc_RNA (1)...(19): siRNA sense strand
ggacacagagaaguauuuc

SEQ ID NO: 821075 - RNA, 19 nt, Homo sapiens
  misc_RNA (1)...(19): siRNA sense strand
caucgacgccugccuuuca

SEQ ID NO: 821076 - RNA, 19 nt, Homo sapiens
  misc_RNA (1)...(19): siRNA sense strand
cggcagagccaucgcaaga

SEQ ID NO: 821077 - RNA, 19 nt, Homo sapiens
  misc_RNA (1)...(19): siRNA sense strand
gcugcgacauccagauugu

SEQ ID NO: 821078 - RNA, 19 nt, Homo sapiens
  misc_RNA (1)...(19): siRNA sense strand
cgaggaaauaccagaauga

SEQ ID NO: 821079 - RNA, 19 nt, Homo sapiens
  misc_RNA (1)...(19): siRNA sense strand
ccucacuacucaacaacaa

SEQ ID NO: 821080 - RNA, 19 nt, Homo sapiens
  misc_RNA (1)...(19): siRNA sense strand
gaugacgucccaccagaug

SEQ ID NO: 821081 - RNA, 19 nt, Homo sapiens
  misc_RNA (1)...(19): siRNA sense strand
auaaguacgccaagaggua

SEQ ID NO: 821082 - RNA, 19 nt, Homo sapiens
  misc_RNA (1)...(19): siRNA sense strand
cgacaagacagaccacauc

SEQ ID NO: 821083 - RNA, 19 nt, Homo sapiens
  misc_RNA (1)...(19): siRNA sense strand
ucaagcagcaaaucaacaa

SEQ ID NO: 821084 - RNA, 19 nt, Homo sapiens
  misc_RNA (1)...(19): siRNA sense strand
gcagauggaggagauggaa

SEQ ID NO: 821085 - RNA, 19 nt, Homo sapiens
  misc_RNA (1)...(19): siRNA sense strand
ccaaguaagcugcgacauc

SEQ ID NO: 821086 - RNA, 19 nt, Homo sapiens
  misc_RNA (1)...(19): siRNA sense strand
ggugaaugagucuguugua

SEQ ID NO: 821087 - RNA, 19 nt, Homo sapiens
  misc_RNA (1)...(19): siRNA sense strand
ccauggcagagauuuauaa

SEQ ID NO: 821088 - RNA, 19 nt, Homo sapiens
  misc_RNA (1)...(19): siRNA sense strand
agaaguauuuccauuuggu

SEQ ID NO: 821089 - RNA, 19 nt, Homo sapiens
  misc_RNA (1)...(19): siRNA sense strand
gcccugagcccaugacagu

SEQ ID NO: 821090 - RNA, 19 nt, Homo sapiens
  misc_RNA (1)...(19): siRNA sense strand
ccgaggagucgaggaaaua

SEQ ID NO: 821091 - RNA, 19 nt, Homo sapiens
  misc_RNA (1)...(19): siRNA sense strand
acaagcagauccaggacau

SEQ ID NO: 821092 - RNA, 19 nt, Homo sapiens
  misc_RNA (1)...(19): siRNA sense strand
gacgacaacauccucaaga

SEQ ID NO: 821093 - RNA, 19 nt, Homo sapiens
  misc_RNA (1)...(19): siRNA sense strand
cgaguaccgggucaagaua

SEQ ID NO: 821094 - RNA, 19 nt, Homo sapiens
  misc_RNA (1)...(19): siRNA sense strand
gaacaucgucaaggccaau

SEQ ID NO: 821095 - RNA, 19 nt, Homo sapiens
  misc_RNA (1)...(19): siRNA sense strand
ucgaggaaauaccagaaug

SEQ ID NO: 821096 - RNA, 19 nt, Homo sapiens
  misc_RNA (1)...(19): siRNA sense strand
acaccagcaucaugaagga

SEQ ID NO: 821097 - RNA, 19 nt, Homo sapiens
  misc_RNA (1)...(19): siRNA sense strand
ucacggacaacuacaacaa

SEQ ID NO: 821098 - RNA, 19 nt, Homo sapiens
  misc_RNA (1)...(19): siRNA sense strand
guggacuucuucaucaaug

SEQ ID NO: 821099 - RNA, 19 nt, Homo sapiens
  misc_RNA (1)...(19): siRNA sense strand
gguggugacuguggccuau

SEQ ID NO: 821100 - RNA, 19 nt, Homo sapiens
  misc_RNA (1)...(19): siRNA sense strand
uugagcaggugguggcuuu

SEQ ID NO: 821101 - RNA, 19 nt, Homo sapiens
  misc_RNA (1)...(19): siRNA sense strand
gccgaggagucgaggaaau

SEQ ID NO: 821102 - RNA, 19 nt, Homo sapiens
  misc_RNA (1)...(19): siRNA sense strand
caaccaacaagcuccucua

SEQ ID NO: 821103 - RNA, 19 nt, Homo sapiens
  misc_RNA (1)...(19): siRNA sense strand
ccaaggagcagcacaagcu

SEQ ID NO: 821104 - RNA, 19 nt, Homo sapiens
  misc_RNA (1)...(19): siRNA sense strand
cuggaggccuucugcaaga

SEQ ID NO: 821105 - RNA, 19 nt, Homo sapiens
  misc_RNA (1)...(19): siRNA sense strand
ggaguacccaggcaugauc

SEQ ID NO: 821106 - RNA, 19 nt, Homo sapiens
  misc_RNA (1)...(19): siRNA sense strand
caucagcgccaguggacuu

SEQ ID NO: 821107 - RNA, 19 nt, Homo sapiens
  misc_RNA (1)...(19): siRNA sense strand
ccaagggcacguugcagaa

SEQ ID NO: 821108 - RNA, 19 nt, Homo sapiens
  misc_RNA (1)...(19): siRNA sense strand
gcccaucacaauccaggua

SEQ ID NO: 821109 - RNA, 19 nt, Homo sapiens
  misc_RNA (1)...(19): siRNA sense strand
acaacauccucaagaucaa

SEQ ID NO: 821110 - RNA, 19 nt, Homo sapiens
  misc_RNA (1)...(19): siRNA sense strand
ggccauggcagagauuuau

SEQ ID NO: 821111 - RNA, 19 nt, Homo sapiens
  misc_RNA (1)...(19): siRNA sense strand
guucaaggccauucugagu

SEQ ID NO: 821112 - RNA, 19 nt, Homo sapiens
  misc_RNA (1)...(19): siRNA sense strand
caacuacacagcggucuuc

SEQ ID NO: 821113 - RNA, 19 nt, Homo sapiens
  misc_RNA (1)...(19): siRNA sense strand
gcaggugguggcuuugaug

SEQ ID NO: 821114 - RNA, 19 nt, Homo sapiens
  misc_RNA (1)...(19): siRNA sense strand
uaaagacgaugaugugaua

SEQ ID NO: 821115 - RNA, 19 nt, Homo sapiens
  misc_RNA (1)...(19): siRNA sense strand
ucagugagcuucagcagua

SEQ ID NO: 821116 - RNA, 19 nt, Homo sapiens
  misc_RNA (1)...(19): siRNA sense strand
ggacagcucucggaacuga

SEQ ID NO: 821117 - RNA, 19 nt, Homo sapiens
  misc_RNA (1)...(19): siRNA sense strand
caacaagccugaagaaguc

SEQ ID NO: 821118 - RNA, 19 nt, Homo sapiens
  misc_RNA (1)...(19): siRNA sense strand
gcccagagaucaucaguga

SEQ ID NO: 821119 - RNA, 19 nt, Homo sapiens
  misc_RNA (1)...(19): siRNA sense strand
gcacaaauccauccaugaa

SEQ ID NO: 821120 - RNA, 19 nt, Homo sapiens
  misc_RNA (1)...(19): siRNA sense strand
gcacagaaguggguucgaa

SEQ ID NO: 821121 - RNA, 19 nt, Homo sapiens
  misc_RNA (1)...(19): siRNA sense strand
gaaguacccucaccucauc

SEQ ID NO: 821122 - RNA, 19 nt, Homo sapiens
  misc_RNA (1)...(19): siRNA sense strand
caucguaugcgcaguauua

SEQ ID NO: 821123 - RNA, 19 nt, Homo sapiens
  misc_RNA (1)...(19): siRNA sense strand
gagagggagcggcuuauua

SEQ ID NO: 821124 - RNA, 19 nt, Homo sapiens
  misc_RNA (1)...(19): siRNA sense strand
ccaugucaaugaugucuua

SEQ ID NO: 821125 - RNA, 19 nt, Homo sapiens
  misc_RNA (1)...(19): siRNA sense strand
gggagcggcuuauuaauca

SEQ ID NO: 821126 - RNA, 19 nt, Homo sapiens
  misc_RNA (1)...(19): siRNA sense strand
gagaugaggugauugaacu

SEQ ID NO: 821127 - RNA, 19 nt, Homo sapiens
  misc_RNA (1)...(19): siRNA sense strand
caacagcuccacagaugua

SEQ ID NO: 821128 - RNA, 19 nt, Homo sapiens
  misc_RNA (1)...(19): siRNA sense strand
gaaguggguucgaaacauc

SEQ ID NO: 821129 - RNA, 19 nt, Homo sapiens
  misc_RNA (1)...(19): siRNA sense strand
ugugaaaccucaucagauu

SEQ ID NO: 821130 - RNA, 19 nt, Homo sapiens
  misc_RNA (1)...(19): siRNA sense strand
caagaagaguuggaaagaa

SEQ ID NO: 821131 - RNA, 19 nt, Homo sapiens
  misc_RNA (1)...(19): siRNA sense strand
agaauuggcuggcagaguu

SEQ ID NO: 821132 - RNA, 19 nt, Homo sapiens
  misc_RNA (1)...(19): siRNA sense strand
ggaggacacucugcacauu

SEQ ID NO: 821133 - RNA, 19 nt, Homo sapiens
  misc_RNA (1)...(19): siRNA sense strand
caacuggccugucugaagu

SEQ ID NO: 821134 - RNA, 19 nt, Homo sapiens
  misc_RNA (1)...(19): siRNA sense strand
gauguacaggcaagaauua

SEQ ID NO: 821135 - RNA, 19 nt, Homo sapiens
  misc_RNA (1)...(19): siRNA sense strand
gaacacggguauccagucu

SEQ ID NO: 821136 - RNA, 19 nt, Homo sapiens
  misc_RNA (1)...(19): siRNA sense strand
cuaaagugauggcugauug

SEQ ID NO: 821137 - RNA, 19 nt, Homo sapiens
  misc_RNA (1)...(19): siRNA sense strand
gcaagaagaguuggaaaga

SEQ ID NO: 821138 - RNA, 19 nt, Homo sapiens
  misc_RNA (1)...(19): siRNA sense strand
ccgaaaggaucacaagcua

SEQ ID NO: 821139 - RNA, 19 nt, Homo sapiens
  misc_RNA (1)...(19): siRNA sense strand
ggugguggaugaucuaaau

SEQ ID NO: 821140 - RNA, 19 nt, Homo sapiens
  misc_RNA (1)...(19): siRNA sense strand
cacaggcucugaagaauau

SEQ ID NO: 821141 - RNA, 19 nt, Homo sapiens
  misc_RNA (1)...(19): siRNA sense strand
gcacccaugucaaugaugu

SEQ ID NO: 821142 - RNA, 19 nt, Homo sapiens
  misc_RNA (1)...(19): siRNA sense strand
ccaaugaugaugaggauaa

SEQ ID NO: 821143 - RNA, 19 nt, Homo sapiens
  misc_RNA (1)...(19): siRNA sense strand
aaacaguccuugccauugu

SEQ ID NO: 821144 - RNA, 19 nt, Homo sapiens
  misc_RNA (1)...(19): siRNA sense strand
ggauaaagacgaugaugug

SEQ ID NO: 821145 - RNA, 19 nt, Homo sapiens
  misc_RNA (1)...(19): siRNA sense strand
acuaccagcuguccaauuu

SEQ ID NO: 821146 - RNA, 19 nt, Homo sapiens
  misc_RNA (1)...(19): siRNA sense strand
uaaauccaaugcugaacuu

SEQ ID NO: 821147 - RNA, 19 nt, Homo sapiens
  misc_RNA (1)...(19): siRNA sense strand
cccaggaagucauuuguuu

SEQ ID NO: 821148 - RNA, 19 nt, Homo sapiens
  misc_RNA (1)...(19): siRNA sense strand
cgacagauauuguuauucc

SEQ ID NO: 821149 - RNA, 19 nt, Homo sapiens
  misc_RNA (1)...(19): siRNA sense strand
gcagugaaucugucaguga

SEQ ID NO: 821150 - RNA, 19 nt, Homo sapiens
  misc_RNA (1)...(19): siRNA sense strand
ucaaugaugucuuaaacca

SEQ ID NO: 821151 - RNA, 19 nt, Homo sapiens
  misc_RNA (1)...(19): siRNA sense strand
guacaggcaagaauuaaug

SEQ ID NO: 821152 - RNA, 19 nt, Homo sapiens
  misc_RNA (1)...(19): siRNA sense strand
ggguucagcuccaaugaug

SEQ ID NO: 821153 - RNA, 19 nt, Homo sapiens
  misc_RNA (1)...(19): siRNA sense strand
gaagaaacauacgaaagcu

SEQ ID NO: 821154 - RNA, 19 nt, Homo sapiens
  misc_RNA (1)...(19): siRNA sense strand
cagugaagaugaugaggaa

SEQ ID NO: 821155 - RNA, 19 nt, Homo sapiens
  misc_RNA (1)...(19): siRNA sense strand
ggugagagcauccacauca

SEQ ID NO: 821156 - RNA, 19 nt, Homo sapiens
  misc_RNA (1)...(19): siRNA sense strand
gaaaggaucacaagcuaac

SEQ ID NO: 821157 - RNA, 19 nt, Homo sapiens
  misc_RNA (1)...(19): siRNA sense strand
agagggagcggcuuauuaa

SEQ ID NO: 821158 - RNA, 19 nt, Homo sapiens
  misc_RNA (1)...(19): siRNA sense strand
ggaccuagacguggaagaa

SEQ ID NO: 821159 - RNA, 19 nt, Homo sapiens
  misc_RNA (1)...(19): siRNA sense strand
ggaguucagcaacauguuu

SEQ ID NO: 821160 - RNA, 19 nt, Homo sapiens
  misc_RNA (1)...(19): siRNA sense strand
caaagcagcacagcaagaa

SEQ ID NO: 821161 - RNA, 19 nt, Homo sapiens
  misc_RNA (1)...(19): siRNA sense strand
cacgacagauauuguuauu

SEQ ID NO: 821162 - RNA, 19 nt, Homo sapiens
  misc_RNA (1)...(19): siRNA sense strand
ccaaugagcaggaccuaga

SEQ ID NO: 821163 - RNA, 19 nt, Homo sapiens
  misc_RNA (1)...(19): siRNA sense strand
ucacaggcucugaagaaua

SEQ ID NO: 821164 - RNA, 19 nt, Homo sapiens
  misc_RNA (1)...(19): siRNA sense strand
gguuaauacucuucagaau

SEQ ID NO: 821165 - RNA, 19 nt, Homo sapiens
  misc_RNA (1)...(19): siRNA sense strand
aagaagaguuggaaagaag

SEQ ID NO: 821166 - RNA, 19 nt, Homo sapiens
  misc_RNA (1)...(19): siRNA sense strand
gagcagcagaggaaagauu

SEQ ID NO: 821167 - RNA, 19 nt, Homo sapiens
  misc_RNA (1)...(19): siRNA sense strand
gaucaauuggagccuguua

SEQ ID NO: 821168 - RNA, 19 nt, Homo sapiens
  misc_RNA (1)...(19): siRNA sense strand
cagaucgggugguggauga

SEQ ID NO: 821169 - RNA, 19 nt, Homo sapiens
  misc_RNA (1)...(19): siRNA sense strand
gagcgaggcaacaacauug

SEQ ID NO: 821170 - RNA, 19 nt, Homo sapiens
  misc_RNA (1)...(19): siRNA sense strand
cagugaaucugucagugaa

SEQ ID NO: 821171 - RNA, 19 nt, Homo sapiens
  misc_RNA (1)...(19): siRNA sense strand
gagaagaaacauacgaaag

SEQ ID NO: 821172 - RNA, 19 nt, Homo sapiens
  misc_RNA (1)...(19): siRNA sense strand
gcaacuggccugucugaag

SEQ ID NO: 821173 - RNA, 19 nt, Homo sapiens
  misc_RNA (1)...(19): siRNA sense strand
cuacugcacuuuguugaga

SEQ ID NO: 821174 - RNA, 19 nt, Homo sapiens
  misc_RNA (1)...(19): siRNA sense strand
ggagcgaggcaacaacauu

SEQ ID NO: 821175 - RNA, 19 nt, Homo sapiens
  misc_RNA (1)...(19): siRNA sense strand
aaggagagcuuggccaaug

SEQ ID NO: 821176 - RNA, 19 nt, Homo sapiens
  misc_RNA (1)...(19): siRNA sense strand
ugaagaugaugaggaagaa

SEQ ID NO: 821177 - RNA, 19 nt, Homo sapiens
  misc_RNA (1)...(19): siRNA sense strand
gccagagucuuuccaccuu

SEQ ID NO: 821178 - RNA, 19 nt, Homo sapiens
  misc_RNA (1)...(19): siRNA sense strand
caaugaugaugaggauaaa

SEQ ID NO: 821179 - RNA, 19 nt, Homo sapiens
  misc_RNA (1)...(19): siRNA sense strand
gauacuacccagcuauuca

SEQ ID NO: 821180 - RNA, 19 nt, Homo sapiens
  misc_RNA (1)...(19): siRNA sense strand
uccaugaacuuucccauca

SEQ ID NO: 821181 - RNA, 19 nt, Homo sapiens
  misc_RNA (1)...(19): siRNA sense strand
cuuuaaaguucacaucuug

SEQ ID NO: 821182 - RNA, 19 nt, Homo sapiens
  misc_RNA (1)...(19): siRNA sense strand
gauaaagacgaugauguga

SEQ ID NO: 821183 - RNA, 19 nt, Homo sapiens
  misc_RNA (1)...(19): siRNA sense strand
ggucccaggugccuccauu

SEQ ID NO: 821184 - RNA, 19 nt, Homo sapiens
  misc_RNA (1)...(19): siRNA sense strand
gcuauucacucccauucuc

SEQ ID NO: 821185 - RNA, 19 nt, Homo sapiens
  misc_RNA (1)...(19): siRNA sense strand
caagauccagcgagauuug

SEQ ID NO: 821186 - RNA, 19 nt, Homo sapiens
  misc_RNA (1)...(19): siRNA sense strand
uggcagaguucaacaugug

SEQ ID NO: 821187 - RNA, 19 nt, Homo sapiens
  misc_RNA (1)...(19): siRNA sense strand
cucaacagcuccacagaug

SEQ ID NO: 821188 - RNA, 19 nt, Homo sapiens
  misc_RNA (1)...(19): siRNA sense strand
gaacuuucccaucaacuac

SEQ ID NO: 821189 - RNA, 19 nt, Homo sapiens
  misc_RNA (1)...(19): siRNA sense strand
gcacaucaguccccuauac

SEQ ID NO: 821190 - RNA, 19 nt, Homo sapiens
  misc_RNA (1)...(19): siRNA sense strand
ggaagacaaacgcacauca

SEQ ID NO: 821191 - RNA, 19 nt, Homo sapiens
  misc_RNA (1)...(19): siRNA sense strand
gaaccgaaaggaucacaag

SEQ ID NO: 821192 - RNA, 19 nt, Homo sapiens
  misc_RNA (1)...(19): siRNA sense strand
uuacaucuaucgccuugug

SEQ ID NO: 821193 - RNA, 19 nt, Homo sapiens
  misc_RNA (1)...(19): siRNA sense strand
cagccucgguucuuuaaag

SEQ ID NO: 821194 - RNA, 19 nt, Homo sapiens
  misc_RNA (1)...(19): siRNA sense strand
ccucaauaguucccucuug

SEQ ID NO: 821195 - RNA, 19 nt, Homo sapiens
  misc_RNA (1)...(19): siRNA sense strand
uaugucggguauaccguua

SEQ ID NO: 821196 - RNA, 19 nt, Homo sapiens
  misc_RNA (1)...(19): siRNA sense strand
ccaccuggcuguuccuucu

SEQ ID NO: 821197 - RNA, 19 nt, Homo sapiens
  misc_RNA (1)...(19): siRNA sense strand
guguuuagccagagucuuu

SEQ ID NO: 821198 - RNA, 19 nt, Homo sapiens
  misc_RNA (1)...(19): siRNA sense strand
gugaaucugucagugaaga

SEQ ID NO: 821199 - RNA, 19 nt, Homo sapiens
  misc_RNA (1)...(19): siRNA sense strand
gggcaugucuaucuaucca

SEQ ID NO: 821200 - RNA, 19 nt, Homo sapiens
  misc_RNA (1)...(19): siRNA sense strand
cgaggauguuugcgccuuu

SEQ ID NO: 821201 - RNA, 19 nt, Homo sapiens
  misc_RNA (1)...(19): siRNA sense strand
cuagaaaacucucccaaga

SEQ ID NO: 821202 - RNA, 19 nt, Homo sapiens
  misc_RNA (1)...(19): siRNA sense strand
aggaccuucugacuaauua

SEQ ID NO: 821203 - RNA, 19 nt, Homo sapiens
  misc_RNA (1)...(19): siRNA sense strand
caacauugucacauaugaa

SEQ ID NO: 821204 - RNA, 19 nt, Homo sapiens
  misc_RNA (1)...(19): siRNA sense strand
ccucacaggcucugaagaa

SEQ ID NO: 821205 - RNA, 19 nt, Homo sapiens
  misc_RNA (1)...(19): siRNA sense strand
ccucgguucuuuaaaguuc

SEQ ID NO: 821206 - RNA, 19 nt, Homo sapiens
  misc_RNA (1)...(19): siRNA sense strand
ugacaacaagccugaagaa

SEQ ID NO: 821207 - RNA, 19 nt, Homo sapiens
  misc_RNA (1)...(19): siRNA sense strand
gcaguggcuuuggcuguau

SEQ ID NO: 821208 - RNA, 19 nt, Homo sapiens
  misc_RNA (1)...(19): siRNA sense strand
gcaagugaucucuuucauc

SEQ ID NO: 821209 - RNA, 19 nt, Homo sapiens
  misc_RNA (1)...(19): siRNA sense strand
acccugaugugcuguauga

SEQ ID NO: 821210 - RNA, 19 nt, Homo sapiens
  misc_RNA (1)...(19): siRNA sense strand
ugaggaaauugcuuuaagg

SEQ ID NO: 821211 - RNA, 19 nt, Homo sapiens
  misc_RNA (1)...(19): siRNA sense strand
acaaauccauccaugaacu

SEQ ID NO: 821212 - RNA, 19 nt, Homo sapiens
  misc_RNA (1)...(19): siRNA sense strand
gaacuucacacggaaagag

SEQ ID NO: 821213 - RNA, 19 nt, Homo sapiens
  misc_RNA (1)...(19): siRNA sense strand
gcaguggcagugaggauga

SEQ ID NO: 821214 - RNA, 19 nt, Homo sapiens
  misc_RNA (1)...(19): siRNA sense strand
ggagaaggcugcugacauu

SEQ ID NO: 821215 - RNA, 19 nt, Homo sapiens
  misc_RNA (1)...(19): siRNA sense strand
gaaccaagauagcaaagaa

SEQ ID NO: 821216 - RNA, 19 nt, Homo sapiens
  misc_RNA (1)...(19): siRNA sense strand
ccacagaaauggcaaacua

SEQ ID NO: 821217 - RNA, 19 nt, Homo sapiens
  misc_RNA (1)...(19): siRNA sense strand
cagcagaccucuucagauu

SEQ ID NO: 821218 - RNA, 19 nt, Homo sapiens
  misc_RNA (1)...(19): siRNA sense strand
ggagggaacuucuuacaca

SEQ ID NO: 821219 - RNA, 19 nt, Homo sapiens
  misc_RNA (1)...(19): siRNA sense strand
caaagagauugaugugauu

SEQ ID NO: 821220 - RNA, 19 nt, Homo sapiens
  misc_RNA (1)...(19): siRNA sense strand
gaaguugaguuugacauug

SEQ ID NO: 821221 - RNA, 19 nt, Homo sapiens
  misc_RNA (1)...(19): siRNA sense strand
ggacaucuuucgcgguuug

SEQ ID NO: 821222 - RNA, 19 nt, Homo sapiens
  misc_RNA (1)...(19): siRNA sense strand
gggagaaaguccucaaugu

SEQ ID NO: 821223 - RNA, 19 nt, Homo sapiens
  misc_RNA (1)...(19): siRNA sense strand
gaagaagccuuugcugaag

SEQ ID NO: 821224 - RNA, 19 nt, Homo sapiens
  misc_RNA (1)...(19): siRNA sense strand
caggagaaguugaguuuga

SEQ ID NO: 821225 - RNA, 19 nt, Homo sapiens
  misc_RNA (1)...(19): siRNA sense strand
gugaagaguuuauccaaau

SEQ ID NO: 821226 - RNA, 19 nt, Homo sapiens
  misc_RNA (1)...(19): siRNA sense strand
ggagaaggcgacccugaua

SEQ ID NO: 821227 - RNA, 19 nt, Homo sapiens
  misc_RNA (1)...(19): siRNA sense strand
cagcucagaugaagugauu

SEQ ID NO: 821228 - RNA, 19 nt, Homo sapiens
  misc_RNA (1)...(19): siRNA sense strand
cagaacaggugauggaaga

SEQ ID NO: 821229 - RNA, 19 nt, Homo sapiens
  misc_RNA (1)...(19): siRNA sense strand
gagaaaguccucaauguca

SEQ ID NO: 821230 - RNA, 19 nt, Homo sapiens
  misc_RNA (1)...(19): siRNA sense strand
acaaagagauugaugugau

SEQ ID NO: 821231 - RNA, 19 nt, Homo sapiens
  misc_RNA (1)...(19): siRNA sense strand
guacaccgcucgucccaau

SEQ ID NO: 821232 - RNA, 19 nt, Homo sapiens
  misc_RNA (1)...(19): siRNA sense strand
gaaggcgacccugauaaua

SEQ ID NO: 821233 - RNA, 19 nt, Homo sapiens
  misc_RNA (1)...(19): siRNA sense strand
ggaagacgaauuugacuug

SEQ ID NO: 821234 - RNA, 19 nt, Homo sapiens
  misc_RNA (1)...(19): siRNA sense strand
gaaagcacauccuggacau

SEQ ID NO: 821235 - RNA, 19 nt, Homo sapiens
  misc_RNA (1)...(19): siRNA sense strand
gacccaauguacagaagua

SEQ ID NO: 821236 - RNA, 19 nt, Homo sapiens
  misc_RNA (1)...(19): siRNA sense strand
cagaaguacugccucauga

SEQ ID NO: 821237 - RNA, 19 nt, Homo sapiens
  misc_RNA (1)...(19): siRNA sense strand
agaugaagcuuggugauuu

SEQ ID NO: 821238 - RNA, 19 nt, Homo sapiens
  misc_RNA (1)...(19): siRNA sense strand
gaugugacccgcuucauga

SEQ ID NO: 821239 - RNA, 19 nt, Homo sapiens
  misc_RNA (1)...(19): siRNA sense strand
ggugaagaguuuauccaaa

SEQ ID NO: 821240 - RNA, 19 nt, Homo sapiens
  misc_RNA (1)...(19): siRNA sense strand
cgagauagcuauacagacu

SEQ ID NO: 821241 - RNA, 19 nt, Homo sapiens
  misc_RNA (1)...(19): siRNA sense strand
cgaaaagggugaagaguuu

SEQ ID NO: 821242 - RNA, 19 nt, Homo sapiens
  misc_RNA (1)...(19): siRNA sense strand
caagauagcaaagaaggua

SEQ ID NO: 821243 - RNA, 19 nt, Homo sapiens
  misc_RNA (1)...(19): siRNA sense strand
ccguacagcucauuaaaga

SEQ ID NO: 821244 - RNA, 19 nt, Homo sapiens
  misc_RNA (1)...(19): siRNA sense strand
auacagacuuucacauuga

SEQ ID NO: 821245 - RNA, 19 nt, Homo sapiens
  misc_RNA (1)...(19): siRNA sense strand
ugacucagaugacgacuca

SEQ ID NO: 821246 - RNA, 19 nt, Homo sapiens
  misc_RNA (1)...(19): siRNA sense strand
ggacaagugcuacaagugu

SEQ ID NO: 821247 - RNA, 19 nt, Homo sapiens
  misc_RNA (1)...(19): siRNA sense strand
ucagagagcuccggaguag

SEQ ID NO: 821248 - RNA, 19 nt, Homo sapiens
  misc_RNA (1)...(19): siRNA sense strand
ccucaagacuccaaucuca

SEQ ID NO: 821249 - RNA, 19 nt, Homo sapiens
  misc_RNA (1)...(19): siRNA sense strand
ggugauggaagacgaauuu

SEQ ID NO: 821250 - RNA, 19 nt, Homo sapiens
  misc_RNA (1)...(19): siRNA sense strand
gaaccguacagcucauuaa

SEQ ID NO: 821251 - RNA, 19 nt, Homo sapiens
  misc_RNA (1)...(19): siRNA sense strand
gcacauccuggacaucuuu

SEQ ID NO: 821252 - RNA, 19 nt, Homo sapiens
  misc_RNA (1)...(19): siRNA sense strand
uauacagacuuucacauug

SEQ ID NO: 821253 - RNA, 19 nt, Homo sapiens
  misc_RNA (1)...(19): siRNA sense strand
gaagcccacuggaaaucaa

SEQ ID NO: 821254 - RNA, 19 nt, Homo sapiens
  misc_RNA (1)...(19): siRNA sense strand
gagcacagcagaccucuuc

SEQ ID NO: 821255 - RNA, 19 nt, Homo sapiens
  misc_RNA (1)...(19): siRNA sense strand
augaugagcugcagauuga

SEQ ID NO: 821256 - RNA, 19 nt, Homo sapiens
  misc_RNA (1)...(19): siRNA sense strand
gacaagugcuacaaguguu

SEQ ID NO: 821257 - RNA, 19 nt, Homo sapiens
  misc_RNA (1)...(19): siRNA sense strand
ugacuuggauucagaugau

SEQ ID NO: 821258 - RNA, 19 nt, Homo sapiens
  misc_RNA (1)...(19): siRNA sense strand
gagaaggcgacccugauaa

SEQ ID NO: 821259 - RNA, 19 nt, Homo sapiens
  misc_RNA (1)...(19): siRNA sense strand
ugaugacccugcuuugaaa

SEQ ID NO: 821260 - RNA, 19 nt, Homo sapiens
  misc_RNA (1)...(19): siRNA sense strand
gaaagcaaaguucaacauc

SEQ ID NO: 821261 - RNA, 19 nt, Homo sapiens
  misc_RNA (1)...(19): siRNA sense strand
agaagaagccuuugcugaa

SEQ ID NO: 821262 - RNA, 19 nt, Homo sapiens
  misc_RNA (1)...(19): siRNA sense strand
aaagcaaaguucaacauca

SEQ ID NO: 821263 - RNA, 19 nt, Homo sapiens
  misc_RNA (1)...(19): siRNA sense strand
ggacugccuugccuuugga

SEQ ID NO: 821264 - RNA, 19 nt, Homo sapiens
  misc_RNA (1)...(19): siRNA sense strand
cuucaaggaugcagaguau

SEQ ID NO: 821265 - RNA, 19 nt, Homo sapiens
  misc_RNA (1)...(19): siRNA sense strand
guacagcucauuaaagauc

SEQ ID NO: 821266 - RNA, 19 nt, Homo sapiens
  misc_RNA (1)...(19): siRNA sense strand
gcaguuguguugguguuga

SEQ ID NO: 821267 - RNA, 19 nt, Homo sapiens
  misc_RNA (1)...(19): siRNA sense strand
gccuugaacuuggccuuua

SEQ ID NO: 821268 - RNA, 19 nt, Homo sapiens
  misc_RNA (1)...(19): siRNA sense strand
gaugaugagcugcagauug

SEQ ID NO: 821269 - RNA, 19 nt, Homo sapiens
  misc_RNA (1)...(19): siRNA sense strand
ggagaaaguccucaauguc

SEQ ID NO: 821270 - RNA, 19 nt, Homo sapiens
  misc_RNA (1)...(19): siRNA sense strand
gaaagggcaaggagaguuc

SEQ ID NO: 821271 - RNA, 19 nt, Homo sapiens
  misc_RNA (1)...(19): siRNA sense strand
ggaggacuauacaacagau

SEQ ID NO: 821272 - RNA, 19 nt, Homo sapiens
  misc_RNA (1)...(19): siRNA sense strand
gaugaugacccugcuuuga

SEQ ID NO: 821273 - RNA, 19 nt, Homo sapiens
  misc_RNA (1)...(19): siRNA sense strand
agauagcuauacagacuuu

SEQ ID NO: 821274 - RNA, 19 nt, Homo sapiens
  misc_RNA (1)...(19): siRNA sense strand
ucaaggaugcagaguauau

SEQ ID NO: 821275 - RNA, 19 nt, Homo sapiens
  misc_RNA (1)...(19): siRNA sense strand
gaggaggacuauacaacag

SEQ ID NO: 821276 - RNA, 19 nt, Homo sapiens
  misc_RNA (1)...(19): siRNA sense strand
caggcugacugcaagauga

SEQ ID NO: 821277 - RNA, 19 nt, Homo sapiens
  misc_RNA (1)...(19): siRNA sense strand
ggacccggguagccucuau

SEQ ID NO: 821278 - RNA, 19 nt, Homo sapiens
  misc_RNA (1)...(19): siRNA sense strand
ggaugcagaguauaucuau

SEQ ID NO: 821279 - RNA, 19 nt, Homo sapiens
  misc_RNA (1)...(19): siRNA sense strand
agacaaggcuaggcugaug

SEQ ID NO: 821280 - RNA, 19 nt, Homo sapiens
  misc_RNA (1)...(19): siRNA sense strand
ggaaugugucuuugagaga

SEQ ID NO: 821281 - RNA, 19 nt, Homo sapiens
  misc_RNA (1)...(19): siRNA sense strand
gggaccagguggacaagug

SEQ ID NO: 821282 - RNA, 19 nt, Homo sapiens
  misc_RNA (1)...(19): siRNA sense strand
gacgagagauugggaaagg

SEQ ID NO: 821283 - RNA, 19 nt, Homo sapiens
  misc_RNA (1)...(19): siRNA sense strand
caccagacuuggaccuuga

SEQ ID NO: 821284 - RNA, 19 nt, Homo sapiens
  misc_RNA (1)...(19): siRNA sense strand
uggcaaagccuugaacuug

SEQ ID NO: 821285 - RNA, 19 nt, Homo sapiens
  misc_RNA (1)...(19): siRNA sense strand
gcagaccucuucagauucc

SEQ ID NO: 821286 - RNA, 19 nt, Homo sapiens
  misc_RNA (1)...(19): siRNA sense strand
ggacagacacuuuucauuc

SEQ ID NO: 821287 - RNA, 19 nt, Homo sapiens
  misc_RNA (1)...(19): siRNA sense strand
cuacaaguguuccgugaag

SEQ ID NO: 821288 - RNA, 19 nt, Homo sapiens
  misc_RNA (1)...(19): siRNA sense strand
ccagaggaaugugucuuug

SEQ ID NO: 821289 - RNA, 19 nt, Homo sapiens
  misc_RNA (1)...(19): siRNA sense strand
gcagauugacgagagauug

SEQ ID NO: 821290 - RNA, 19 nt, Homo sapiens
  misc_RNA (1)...(19): siRNA sense strand
gaaggcugcugacauugac

SEQ ID NO: 821291 - RNA, 19 nt, Homo sapiens
  misc_RNA (1)...(19): siRNA sense strand
gcuggccaguugagcuaua

SEQ ID NO: 821292 - RNA, 19 nt, Homo sapiens
  misc_RNA (1)...(19): siRNA sense strand
gaaguacugccucaugagu

SEQ ID NO: 821293 - RNA, 19 nt, Homo sapiens
  misc_RNA (1)...(19): siRNA sense strand
agauugaugugauugaugu

SEQ ID NO: 821294 - RNA, 19 nt, Homo sapiens
  misc_RNA (1)...(19): siRNA sense strand
ugaaaucucgacccaagaa

SEQ ID NO: 821295 - RNA, 19 nt, Homo sapiens
  misc_RNA (1)...(19): siRNA sense strand
aaguugaguuugacauuga

SEQ ID NO: 821296 - RNA, 19 nt, Homo sapiens
  misc_RNA (1)...(19): siRNA sense strand
gugcgaagccuugcucuga

SEQ ID NO: 821297 - RNA, 19 nt, Homo sapiens
  misc_RNA (1)...(19): siRNA sense strand
ggaccuugauggaaaugag

SEQ ID NO: 821298 - RNA, 19 nt, Homo sapiens
  misc_RNA (1)...(19): siRNA sense strand
ugacagcucagaugaagug

SEQ ID NO: 821299 - RNA, 19 nt, Homo sapiens
  misc_RNA (1)...(19): siRNA sense strand
gaacagccucgcccucaag

SEQ ID NO: 821300 - RNA, 19 nt, Homo sapiens
  misc_RNA (1)...(19): siRNA sense strand
aaggcgacccugauaauaa

SEQ ID NO: 821301 - RNA, 19 nt, Homo sapiens
  misc_RNA (1)...(19): siRNA sense strand
agacgaauuugacuuggau

SEQ ID NO: 821302 - RNA, 19 nt, Homo sapiens
  misc_RNA (1)...(19): siRNA sense strand
gaugacgacucaccagacu

SEQ ID NO: 821303 - RNA, 19 nt, Homo sapiens
  misc_RNA (1)...(19): siRNA sense strand
ucaagaaggcagagcgaaa

SEQ ID NO: 821304 - RNA, 19 nt, Homo sapiens
  misc_RNA (1)...(19): siRNA sense strand
cuauacagacuuucacauu

SEQ ID NO: 821305 - RNA, 19 nt, Homo sapiens
  misc_RNA (1)...(19): siRNA sense strand
gaugaagcuuggugauuuu

SEQ ID NO: 821306 - RNA, 19 nt, Homo sapiens
  misc_RNA (1)...(19): siRNA sense strand
gcaguuccucuaaucagaa

SEQ ID NO: 821307 - RNA, 19 nt, Homo sapiens
  misc_RNA (1)...(19): siRNA sense strand
agaaauggcaaacuacuuc

SEQ ID NO: 821308 - RNA, 19 nt, Homo sapiens
  misc_RNA (1)...(19): siRNA sense strand
cggguagccucuauugaga

SEQ ID NO: 821309 - RNA, 19 nt, Homo sapiens
  misc_RNA (1)...(19): siRNA sense strand
gaaaucucgacccaagaaa

SEQ ID NO: 821310 - RNA, 19 nt, Homo sapiens
  misc_RNA (1)...(19): siRNA sense strand
gcccuacguucgucagaga

SEQ ID NO: 821311 - RNA, 19 nt, Homo sapiens
  misc_RNA (1)...(19): siRNA sense strand
uaaacaagaggcccuguca

SEQ ID NO: 821312 - RNA, 19 nt, Homo sapiens
  misc_RNA (1)...(19): siRNA sense strand
uagcaaagaagguagacaa

SEQ ID NO: 821313 - RNA, 19 nt, Homo sapiens
  misc_RNA (1)...(19): siRNA sense strand
ugaagaguuuauccaaauc

SEQ ID NO: 821314 - RNA, 19 nt, Homo sapiens
  misc_RNA (1)...(19): siRNA sense strand
ccaaugaguuugacaagua

SEQ ID NO: 821315 - RNA, 19 nt, Homo sapiens
  misc_RNA (1)...(19): siRNA sense strand
gcagugagcauguugguua

SEQ ID NO: 821316 - RNA, 19 nt, Homo sapiens
  misc_RNA (1)...(19): siRNA sense strand
caaggagaguggauacaua

SEQ ID NO: 821317 - RNA, 19 nt, Homo sapiens
  misc_RNA (1)...(19): siRNA sense strand
ggaggaggcuggagagaga

SEQ ID NO: 821318 - RNA, 19 nt, Homo sapiens
  misc_RNA (1)...(19): siRNA sense strand
gaaagagcacccacaguaa

SEQ ID NO: 821319 - RNA, 19 nt, Homo sapiens
  misc_RNA (1)...(19): siRNA sense strand
gcagauaucucaggguaug

SEQ ID NO: 821320 - RNA, 19 nt, Homo sapiens
  misc_RNA (1)...(19): siRNA sense strand
gcagagucuuccaaguuua

SEQ ID NO: 821321 - RNA, 19 nt, Homo sapiens
  misc_RNA (1)...(19): siRNA sense strand
aaagaaggcugagcucauu

SEQ ID NO: 821322 - RNA, 19 nt, Homo sapiens
  misc_RNA (1)...(19): siRNA sense strand
ggagaaccauuaaucaucu

SEQ ID NO: 821323 - RNA, 19 nt, Homo sapiens
  misc_RNA (1)...(19): siRNA sense strand
acauuaaccucuccacuuu

SEQ ID NO: 821324 - RNA, 19 nt, Homo sapiens
  misc_RNA (1)...(19): siRNA sense strand
gcaaagccauuggugauuc

SEQ ID NO: 821325 - RNA, 19 nt, Homo sapiens
  misc_RNA (1)...(19): siRNA sense strand
ggucuagccuugaucagaa

SEQ ID NO: 821326 - RNA, 19 nt, Homo sapiens
  misc_RNA (1)...(19): siRNA sense strand
gauauucgcuaugucaaga

SEQ ID NO: 821327 - RNA, 19 nt, Homo sapiens
  misc_RNA (1)...(19): siRNA sense strand
agaaagagcacccacagua

SEQ ID NO: 821328 - RNA, 19 nt, Homo sapiens
  misc_RNA (1)...(19): siRNA sense strand
gugaaaggauccuacaaga

SEQ ID NO: 821329 - RNA, 19 nt, Homo sapiens
  misc_RNA (1)...(19): siRNA sense strand
gaagcuggaugacaagauc

SEQ ID NO: 821330 - RNA, 19 nt, Homo sapiens
  misc_RNA (1)...(19): siRNA sense strand
ggucagggcuaugauaaau

SEQ ID NO: 821331 - RNA, 19 nt, Homo sapiens
  misc_RNA (1)...(19): siRNA sense strand
ucacucaguuguucagaaa

SEQ ID NO: 821332 - RNA, 19 nt, Homo sapiens
  misc_RNA (1)...(19): siRNA sense strand
ggaucuaggucacucaguu

SEQ ID NO: 821333 - RNA, 19 nt, Homo sapiens
  misc_RNA (1)...(19): siRNA sense strand
caaaguccauuucuguuca

SEQ ID NO: 821334 - RNA, 19 nt, Homo sapiens
  misc_RNA (1)...(19): siRNA sense strand
gcacggagaaccauuaauc

SEQ ID NO: 821335 - RNA, 19 nt, Homo sapiens
  misc_RNA (1)...(19): siRNA sense strand
gacaguggcuuuggucuug

SEQ ID NO: 821336 - RNA, 19 nt, Homo sapiens
  misc_RNA (1)...(19): siRNA sense strand
gaagaaaccagaagcuaca

SEQ ID NO: 821337 - RNA, 19 nt, Homo sapiens
  misc_RNA (1)...(19): siRNA sense strand
gcaggcagauauucgcuau

SEQ ID NO: 821338 - RNA, 19 nt, Homo sapiens
  misc_RNA (1)...(19): siRNA sense strand
gaagagggaacgaggaaga

SEQ ID NO: 821339 - RNA, 19 nt, Homo sapiens
  misc_RNA (1)...(19): siRNA sense strand
gaaagaggccaagaagaga

SEQ ID NO: 821340 - RNA, 19 nt, Homo sapiens
  misc_RNA (1)...(19): siRNA sense strand
caagaggaaugaagacaag

SEQ ID NO: 821341 - RNA, 19 nt, Homo sapiens
  misc_RNA (1)...(19): siRNA sense strand
uugcaaaccugaagcacua

SEQ ID NO: 821342 - RNA, 19 nt, Homo sapiens
  misc_RNA (1)...(19): siRNA sense strand
ggagcacggagaaccauua

SEQ ID NO: 821343 - RNA, 19 nt, Homo sapiens
  misc_RNA (1)...(19): siRNA sense strand
gaagaugccaguaaugaag

SEQ ID NO: 821344 - RNA, 19 nt, Homo sapiens
  misc_RNA (1)...(19): siRNA sense strand
uaacugcccugccuacuac

SEQ ID NO: 821345 - RNA, 19 nt, Homo sapiens
  misc_RNA (1)...(19): siRNA sense strand
ugaaggauccauguuauuu

SEQ ID NO: 821346 - RNA, 19 nt, Homo sapiens
  misc_RNA (1)...(19): siRNA sense strand
gcagauauucgcuauguca

SEQ ID NO: 821347 - RNA, 19 nt, Homo sapiens
  misc_RNA (1)...(19): siRNA sense strand
ccaagggaagguacauuua

SEQ ID NO: 821348 - RNA, 19 nt, Homo sapiens
  misc_RNA (1)...(19): siRNA sense strand
cggacaaccuuccuccuaa

SEQ ID NO: 821349 - RNA, 19 nt, Homo sapiens
  misc_RNA (1)...(19): siRNA sense strand
caacaacgcccugggagaa

SEQ ID NO: 821350 - RNA, 19 nt, Homo sapiens
  misc_RNA (1)...(19): siRNA sense strand
caaggaaauuguccaccaa

SEQ ID NO: 821351 - RNA, 19 nt, Homo sapiens
  misc_RNA (1)...(19): siRNA sense strand
cagaagacaucagaacaga

SEQ ID NO: 821352 - RNA, 19 nt, Homo sapiens
  misc_RNA (1)...(19): siRNA sense strand
gaaggauccauguuauuug

SEQ ID NO: 821353 - RNA, 19 nt, Homo sapiens
  misc_RNA (1)...(19): siRNA sense strand
ggcccgagcugaagcaguu

SEQ ID NO: 821354 - RNA, 19 nt, Homo sapiens
  misc_RNA (1)...(19): siRNA sense strand
gcaagcgggugaagacaag

SEQ ID NO: 821355 - RNA, 19 nt, Homo sapiens
  misc_RNA (1)...(19): siRNA sense strand
cagugaagcccaagcauaa

SEQ ID NO: 821356 - RNA, 19 nt, Homo sapiens
  misc_RNA (1)...(19): siRNA sense strand
gaagacgaaguguuuguga

SEQ ID NO: 821357 - RNA, 19 nt, Homo sapiens
  misc_RNA (1)...(19): siRNA sense strand
gagaagaaaccagaagcua

SEQ ID NO: 821358 - RNA, 19 nt, Homo sapiens
  misc_RNA (1)...(19): siRNA sense strand
gggaugagguugugcacau

SEQ ID NO: 821359 - RNA, 19 nt, Homo sapiens
  misc_RNA (1)...(19): siRNA sense strand
acauuuaucuggaggcauu

SEQ ID NO: 821360 - RNA, 19 nt, Homo sapiens
  misc_RNA (1)...(19): siRNA sense strand
caguggaacucaggguuua

SEQ ID NO: 821361 - RNA, 19 nt, Homo sapiens
  misc_RNA (1)...(19): siRNA sense strand
ggagaagaguccagagaac

SEQ ID NO: 821362 - RNA, 19 nt, Homo sapiens
  misc_RNA (1)...(19): siRNA sense strand
cagcagagucuuccaaguu

SEQ ID NO: 821363 - RNA, 19 nt, Homo sapiens
  misc_RNA (1)...(19): siRNA sense strand
gcaagacaguggcuuuggu

SEQ ID NO: 821364 - RNA, 19 nt, Homo sapiens
  misc_RNA (1)...(19): siRNA sense strand
ccacuuccauaacaagaga

SEQ ID NO: 821365 - RNA, 19 nt, Homo sapiens
  misc_RNA (1)...(19): siRNA sense strand
gaggaaggccauacagaga

SEQ ID NO: 821366 - RNA, 19 nt, Homo sapiens
  misc_RNA (1)...(19): siRNA sense strand
ggacaaccuuccuccuaag

SEQ ID NO: 821367 - RNA, 19 nt, Homo sapiens
  misc_RNA (1)...(19): siRNA sense strand
ccaacuaugaccaugcuua

SEQ ID NO: 821368 - RNA, 19 nt, Homo sapiens
  misc_RNA (1)...(19): siRNA sense strand
caaugaguuugacaaguau

SEQ ID NO: 821369 - RNA, 19 nt, Homo sapiens
  misc_RNA (1)...(19): siRNA sense strand
ggaacaggcagaugucaau

SEQ ID NO: 821370 - RNA, 19 nt, Homo sapiens
  misc_RNA (1)...(19): siRNA sense strand
gcaagaggaaugaagacaa

SEQ ID NO: 821371 - RNA, 19 nt, Homo sapiens
  misc_RNA (1)...(19): siRNA sense strand
acaccacccuccuucauga

SEQ ID NO: 821372 - RNA, 19 nt, Homo sapiens
  misc_RNA (1)...(19): siRNA sense strand
cauuccagcuccucuacua

SEQ ID NO: 821373 - RNA, 19 nt, Homo sapiens
  misc_RNA (1)...(19): siRNA sense strand
gaaguccacgcuccucauu

SEQ ID NO: 821374 - RNA, 19 nt, Homo sapiens
  misc_RNA (1)...(19): siRNA sense strand
cgcaagggcuggucacaga

SEQ ID NO: 821375 - RNA, 19 nt, Homo sapiens
  misc_RNA (1)...(19): siRNA sense strand
caagccuagugccacauua

SEQ ID NO: 821376 - RNA, 19 nt, Homo sapiens
  misc_RNA (1)...(19): siRNA sense strand
aguaugaggugaacucuuc

SEQ ID NO: 821377 - RNA, 19 nt, Homo sapiens
  misc_RNA (1)...(19): siRNA sense strand
acaggcagaugucaaugaa

SEQ ID NO: 821378 - RNA, 19 nt, Homo sapiens
  misc_RNA (1)...(19): siRNA sense strand
ugucagcucuucaggaugu

SEQ ID NO: 821379 - RNA, 19 nt, Homo sapiens
  misc_RNA (1)...(19): siRNA sense strand
gcacccauccagacucaaa

SEQ ID NO: 821380 - RNA, 19 nt, Homo sapiens
  misc_RNA (1)...(19): siRNA sense strand
caagggaagguacauuuau

SEQ ID NO: 821381 - RNA, 19 nt, Homo sapiens
  misc_RNA (1)...(19): siRNA sense strand
gcuuuggucuugugaagga

SEQ ID NO: 821382 - RNA, 19 nt, Homo sapiens
  misc_RNA (1)...(19): siRNA sense strand
guaacaaaccaucuucuca

SEQ ID NO: 821383 - RNA, 19 nt, Homo sapiens
  misc_RNA (1)...(19): siRNA sense strand
ccagugaagcccaagcaua

SEQ ID NO: 821384 - RNA, 19 nt, Homo sapiens
  misc_RNA (1)...(19): siRNA sense strand
caaauggucagggcuauga

SEQ ID NO: 821385 - RNA, 19 nt, Homo sapiens
  misc_RNA (1)...(19): siRNA sense strand
gcacaucaaugaggugacu

SEQ ID NO: 821386 - RNA, 19 nt, Homo sapiens
  misc_RNA (1)...(19): siRNA sense strand
ucacggacaucaagcucaa

SEQ ID NO: 821387 - RNA, 19 nt, Homo sapiens
  misc_RNA (1)...(19): siRNA sense strand
gaagaguucagaagacauc

SEQ ID NO: 821388 - RNA, 19 nt, Homo sapiens
  misc_RNA (1)...(19): siRNA sense strand
cagcucagccacuuccaua

SEQ ID NO: 821389 - RNA, 19 nt, Homo sapiens
  misc_RNA (1)...(19): siRNA sense strand
aggcugagcuacugaacaa

SEQ ID NO: 821390 - RNA, 19 nt, Homo sapiens
  misc_RNA (1)...(19): siRNA sense strand
cagaagaguucagaagaca

SEQ ID NO: 821391 - RNA, 19 nt, Homo sapiens
  misc_RNA (1)...(19): siRNA sense strand
caagucagccuucucaucu

SEQ ID NO: 821392 - RNA, 19 nt, Homo sapiens
  misc_RNA (1)...(19): siRNA sense strand
caacagcccacauuccaau

SEQ ID NO: 821393 - RNA, 19 nt, Homo sapiens
  misc_RNA (1)...(19): siRNA sense strand
ggaugaggcaggcagauau

SEQ ID NO: 821394 - RNA, 19 nt, Homo sapiens
  misc_RNA (1)...(19): siRNA sense strand
caacuaugaccaugcuuau

SEQ ID NO: 821395 - RNA, 19 nt, Homo sapiens
  misc_RNA (1)...(19): siRNA sense strand
gugaagaugccaguaauga

SEQ ID NO: 821396 - RNA, 19 nt, Homo sapiens
  misc_RNA (1)...(19): siRNA sense strand
gagcacggagaaccauuaa

SEQ ID NO: 821397 - RNA, 19 nt, Homo sapiens
  misc_RNA (1)...(19): siRNA sense strand
gaacucaggguuuagaaaa

SEQ ID NO: 821398 - RNA, 19 nt, Homo sapiens
  misc_RNA (1)...(19): siRNA sense strand
ggaacucaggguuuagaaa

SEQ ID NO: 821399 - RNA, 19 nt, Homo sapiens
  misc_RNA (1)...(19): siRNA sense strand
aggcgcagcuggacaguga

SEQ ID NO: 821400 - RNA, 19 nt, Homo sapiens
  misc_RNA (1)...(19): siRNA sense strand
gcauaacuauacccagaag

SEQ ID NO: 821401 - RNA, 19 nt, Homo sapiens
  misc_RNA (1)...(19): siRNA sense strand
gggcauacccacccuguca

SEQ ID NO: 821402 - RNA, 19 nt, Homo sapiens
  misc_RNA (1)...(19): siRNA sense strand
uaacaaaccaucuucucau

SEQ ID NO: 821403 - RNA, 19 nt, Homo sapiens
  misc_RNA (1)...(19): siRNA sense strand
uacccacccugucaucuuu

SEQ ID NO: 821404 - RNA, 19 nt, Homo sapiens
  misc_RNA (1)...(19): siRNA sense strand
ugacaguuacgcagcauuu

SEQ ID NO: 821405 - RNA, 19 nt, Homo sapiens
  misc_RNA (1)...(19): siRNA sense strand
cccgggagcugaaggagaa

SEQ ID NO: 821406 - RNA, 19 nt, Homo sapiens
  misc_RNA (1)...(19): siRNA sense strand
uuaugaagacgaaguguuu

SEQ ID NO: 821407 - RNA, 19 nt, Homo sapiens
  misc_RNA (1)...(19): siRNA sense strand
agcagagucuuccaaguuu

SEQ ID NO: 821408 - RNA, 19 nt, Homo sapiens
  misc_RNA (1)...(19): siRNA sense strand
ugugaaggauccauguuau

SEQ ID NO: 821409 - RNA, 19 nt, Homo sapiens
  misc_RNA (1)...(19): siRNA sense strand
gcucggugcuggagaaggu

SEQ ID NO: 821410 - RNA, 19 nt, Homo sapiens
  misc_RNA (1)...(19): siRNA sense strand
caacagcacagacccaagu

SEQ ID NO: 821411 - RNA, 19 nt, Homo sapiens
  misc_RNA (1)...(19): siRNA sense strand
ucucaucucuccagaacau

SEQ ID NO: 821412 - RNA, 19 nt, Homo sapiens
  misc_RNA (1)...(19): siRNA sense strand
caaggcaacagcccacauu

SEQ ID NO: 821413 - RNA, 19 nt, Homo sapiens
  misc_RNA (1)...(19): siRNA sense strand
cagaagcuacagccaagua

SEQ ID NO: 821414 - RNA, 19 nt, Homo sapiens
  misc_RNA (1)...(19): siRNA sense strand
gaacauaacuccagcuuag

SEQ ID NO: 821415 - RNA, 19 nt, Homo sapiens
  misc_RNA (1)...(19): siRNA sense strand
ggaagucguuuaaccauaa

SEQ ID NO: 821416 - RNA, 19 nt, Homo sapiens
  misc_RNA (1)...(19): siRNA sense strand
ggacaaacccuacaaaugu

SEQ ID NO: 821417 - RNA, 19 nt, Homo sapiens
  misc_RNA (1)...(19): siRNA sense strand
ggagaaagaccuuauaugu

SEQ ID NO: 821418 - RNA, 19 nt, Homo sapiens
  misc_RNA (1)...(19): siRNA sense strand
gacagacccuucaaaugua

SEQ ID NO: 821419 - RNA, 19 nt, Homo sapiens
  misc_RNA (1)...(19): siRNA sense strand
ggauguggcuguggacuuu

SEQ ID NO: 821420 - RNA, 19 nt, Homo sapiens
  misc_RNA (1)...(19): siRNA sense strand
cgacagacccuucaaaugu

SEQ ID NO: 821421 - RNA, 19 nt, Homo sapiens
  misc_RNA (1)...(19): siRNA sense strand
gccagaggcugaucuuuga

SEQ ID NO: 821422 - RNA, 19 nt, Homo sapiens
  misc_RNA (1)...(19): siRNA sense strand
ccaaauccauucccagaga

SEQ ID NO: 821423 - RNA, 19 nt, Homo sapiens
  misc_RNA (1)...(19): siRNA sense strand
gggaagucguuuaaccaua

SEQ ID NO: 821424 - RNA, 19 nt, Homo sapiens
  misc_RNA (1)...(19): siRNA sense strand
gaagagggccugccugaag

SEQ ID NO: 821425 - RNA, 19 nt, Homo sapiens
  misc_RNA (1)...(19): siRNA sense strand
gagaaagaccuuauaugug

SEQ ID NO: 821426 - RNA, 19 nt, Homo sapiens
  misc_RNA (1)...(19): siRNA sense strand
gagacaagcccuacaagug

SEQ ID NO: 821427 - RNA, 19 nt, Homo sapiens
  misc_RNA (1)...(19): siRNA sense strand
ggagaagcccuaugagugu

SEQ ID NO: 821428 - RNA, 19 nt, Homo sapiens
  misc_RNA (1)...(19): siRNA sense strand
ucaaggagcagaauaacuu

SEQ ID NO: 821429 - RNA, 19 nt, Homo sapiens
  misc_RNA (1)...(19): siRNA sense strand
cuacaagugugccgaaugu

SEQ ID NO: 821430 - RNA, 19 nt, Homo sapiens
  misc_RNA (1)...(19): siRNA sense strand
ugugggugcuuccauguua

SEQ ID NO: 821431 - RNA, 19 nt, Homo sapiens
  misc_RNA (1)...(19): siRNA sense strand
gugcuuccauguuauuuga

SEQ ID NO: 821432 - RNA, 19 nt, Homo sapiens
  misc_RNA (1)...(19): siRNA sense strand
gaggagccaucccauguca

SEQ ID NO: 821433 - RNA, 19 nt, Homo sapiens
  misc_RNA (1)...(19): siRNA sense strand
ggaaagccuucagccagaa

SEQ ID NO: 821434 - RNA, 19 nt, Homo sapiens
  misc_RNA (1)...(19): siRNA sense strand
gggaaguguuucauucaga

SEQ ID NO: 821435 - RNA, 19 nt, Homo sapiens
  misc_RNA (1)...(19): siRNA sense strand
gcacucaaggagcagaaua

SEQ ID NO: 821436 - RNA, 19 nt, Homo sapiens
  misc_RNA (1)...(19): siRNA sense strand
cacccgaacuccagaaaga

SEQ ID NO: 821437 - RNA, 19 nt, Homo sapiens
  misc_RNA (1)...(19): siRNA sense strand
ggagaggcccuacgagugu

SEQ ID NO: 821438 - RNA, 19 nt, Homo sapiens
  misc_RNA (1)...(19): siRNA sense strand
gggaagucuuucugccaua

SEQ ID NO: 821439 - RNA, 19 nt, Homo sapiens
  misc_RNA (1)...(19): siRNA sense strand
gaaaacagcccggugaaaa

SEQ ID NO: 821440 - RNA, 19 nt, Homo sapiens
  misc_RNA (1)...(19): siRNA sense strand
caaggaagcaccaguucaa

SEQ ID NO: 821441 - RNA, 19 nt, Homo sapiens
  misc_RNA (1)...(19): siRNA sense strand
ggaauuuggccucaaggaa

SEQ ID NO: 821442 - RNA, 19 nt, Homo sapiens
  misc_RNA (1)...(19): siRNA sense strand
ucagagcucucaccucauc

SEQ ID NO: 821443 - RNA, 19 nt, Homo sapiens
  misc_RNA (1)...(19): siRNA sense strand
ggaagcaccaguucaagau

SEQ ID NO: 821444 - RNA, 19 nt, Homo sapiens
  misc_RNA (1)...(19): siRNA sense strand
agucaggccauuccaauua

SEQ ID NO: 821445 - RNA, 19 nt, Homo sapiens
  misc_RNA (1)...(19): siRNA sense strand
ggagggccuucaaccagaa

SEQ ID NO: 821446 - RNA, 19 nt, Homo sapiens
  misc_RNA (1)...(19): siRNA sense strand
gaaggauucccgacagaug

SEQ ID NO: 821447 - RNA, 19 nt, Homo sapiens
  misc_RNA (1)...(19): siRNA sense strand
gagaggcccuacgagugua

SEQ ID NO: 821448 - RNA, 19 nt, Homo sapiens
  misc_RNA (1)...(19): siRNA sense strand
ggaagucuuucugccauag

SEQ ID NO: 821449 - RNA, 19 nt, Homo sapiens
  misc_RNA (1)...(19): siRNA sense strand
caucagagaauccacauag

SEQ ID NO: 821450 - RNA, 19 nt, Homo sapiens
  misc_RNA (1)...(19): siRNA sense strand
acagacccuucaaauguaa

SEQ ID NO: 821451 - RNA, 19 nt, Homo sapiens
  misc_RNA (1)...(19): siRNA sense strand
ugaagcaguuggaauuugg

SEQ ID NO: 821452 - RNA, 19 nt, Homo sapiens
  misc_RNA (1)...(19): siRNA sense strand
gugcacaagaggauucaua

SEQ ID NO: 821453 - RNA, 19 nt, Homo sapiens
  misc_RNA (1)...(19): siRNA sense strand
gcaggacaaacccuacaaa

SEQ ID NO: 821454 - RNA, 19 nt, Homo sapiens
  misc_RNA (1)...(19): siRNA sense strand
uuacagacucagaacauaa

SEQ ID NO: 821455 - RNA, 19 nt, Homo sapiens
  misc_RNA (1)...(19): siRNA sense strand
cuucaaauguaaucagugu

SEQ ID NO: 821456 - RNA, 19 nt, Homo sapiens
  misc_RNA (1)...(19): siRNA sense strand
agacaagcccuacaagugu

SEQ ID NO: 821457 - RNA, 19 nt, Homo sapiens
  misc_RNA (1)...(19): siRNA sense strand
aagagggccugccugaaga

SEQ ID NO: 821458 - RNA, 19 nt, Homo sapiens
  misc_RNA (1)...(19): siRNA sense strand
ggagacaagcccuacaagu

SEQ ID NO: 821459 - RNA, 19 nt, Homo sapiens
  misc_RNA (1)...(19): siRNA sense strand
gaucaaggcuacaaaacuc

SEQ ID NO: 821460 - RNA, 19 nt, Homo sapiens
  misc_RNA (1)...(19): siRNA sense strand
gcgacagacccuucaaaug

SEQ ID NO: 821461 - RNA, 19 nt, Homo sapiens
  misc_RNA (1)...(19): siRNA sense strand
caaauccauucccagagau

SEQ ID NO: 821462 - RNA, 19 nt, Homo sapiens
  misc_RNA (1)...(19): siRNA sense strand
ccaagcaucacgcaaggaa

SEQ ID NO: 821463 - RNA, 19 nt, Homo sapiens
  misc_RNA (1)...(19): siRNA sense strand
gacgccagcucucacaaag

SEQ ID NO: 821464 - RNA, 19 nt, Homo sapiens
  misc_RNA (1)...(19): siRNA sense strand
gcaagggaccgagcuaugg

SEQ ID NO: 821465 - RNA, 19 nt, Homo sapiens
  misc_RNA (1)...(19): siRNA sense strand
gggagaaagaccuuauaug

SEQ ID NO: 821466 - RNA, 19 nt, Homo sapiens
  misc_RNA (1)...(19): siRNA sense strand
ggagcagaauaacuugaag

SEQ ID NO: 821467 - RNA, 19 nt, Homo sapiens
  misc_RNA (1)...(19): siRNA sense strand
ugugggaaguguuucauuc

SEQ ID NO: 821468 - RNA, 19 nt, Homo sapiens
  misc_RNA (1)...(19): siRNA sense strand
gauuacagacucagaacau

SEQ ID NO: 821469 - RNA, 19 nt, Homo sapiens
  misc_RNA (1)...(19): siRNA sense strand
guucaagcccaaauccauu

SEQ ID NO: 821470 - RNA, 19 nt, Homo sapiens
  misc_RNA (1)...(19): siRNA sense strand
ggacuuuacccaggaggaa

SEQ ID NO: 821471 - RNA, 19 nt, Homo sapiens
  misc_RNA (1)...(19): siRNA sense strand
aagcaugaauggacagaag

SEQ ID NO: 821472 - RNA, 19 nt, Homo sapiens
  misc_RNA (1)...(19): siRNA sense strand
cuccauagguccugagcuu

SEQ ID NO: 821473 - RNA, 19 nt, Homo sapiens
  misc_RNA (1)...(19): siRNA sense strand
cgacagaugcuccuuaucc

SEQ ID NO: 821474 - RNA, 19 nt, Homo sapiens
  misc_RNA (1)...(19): siRNA sense strand
cgccagcucucacaaagca

SEQ ID NO: 821475 - RNA, 19 nt, Homo sapiens
  misc_RNA (1)...(19): siRNA sense strand
uagcgggagugaugucugu

SEQ ID NO: 821476 - RNA, 19 nt, Homo sapiens
  misc_RNA (1)...(19): siRNA sense strand
aaagccaggugcaggacaa

SEQ ID NO: 821477 - RNA, 19 nt, Homo sapiens
  misc_RNA (1)...(19): siRNA sense strand
aagcaccaguucaagauca

SEQ ID NO: 821478 - RNA, 19 nt, Homo sapiens
  misc_RNA (1)...(19): siRNA sense strand
ggaagagggccugccugaa

SEQ ID NO: 821479 - RNA, 19 nt, Homo sapiens
  misc_RNA (1)...(19): siRNA sense strand
ugccauaguacacaccuua

SEQ ID NO: 821480 - RNA, 19 nt, Homo sapiens
  misc_RNA (1)...(19): siRNA sense strand
ccucuaccgugacgugaug

SEQ ID NO: 821481 - RNA, 19 nt, Homo sapiens
  misc_RNA (1)...(19): siRNA sense strand
ccgaaugugggaagucuuu

SEQ ID NO: 821482 - RNA, 19 nt, Homo sapiens
  misc_RNA (1)...(19): siRNA sense strand
cccgacagaugcuccuuau

SEQ ID NO: 821483 - RNA, 19 nt, Homo sapiens
  misc_RNA (1)...(19): siRNA sense strand
ccucauccggcaccagaua

SEQ ID NO: 821484 - RNA, 19 nt, Homo sapiens
  misc_RNA (1)...(19): siRNA sense strand
cgccagaggcugaucuuug

SEQ ID NO: 821485 - RNA, 19 nt, Homo sapiens
  misc_RNA (1)...(19): siRNA sense strand
gugcaaggagugugggaaa

SEQ ID NO: 821486 - RNA, 19 nt, Homo sapiens
  misc_RNA (1)...(19): siRNA sense strand
gaagucguuuaaccauaac

SEQ ID NO: 821487 - RNA, 19 nt, Homo sapiens
  misc_RNA (1)...(19): siRNA sense strand
caauuacggaacucacaaa

SEQ ID NO: 821488 - RNA, 19 nt, Homo sapiens
  misc_RNA (1)...(19): siRNA sense strand
ggagcaagggaccgagcua

SEQ ID NO: 821489 - RNA, 19 nt, Homo sapiens
  misc_RNA (1)...(19): siRNA sense strand
aagaggagccaucccaugu

SEQ ID NO: 821490 - RNA, 19 nt, Homo sapiens
  misc_RNA (1)...(19): siRNA sense strand
ucucggaccacuugccuuu

SEQ ID NO: 821491 - RNA, 19 nt, Homo sapiens
  misc_RNA (1)...(19): siRNA sense strand
gaagcaccaguucaagauc

SEQ ID NO: 821492 - RNA, 19 nt, Homo sapiens
  misc_RNA (1)...(19): siRNA sense strand
gagcaagggaccgagcuau

SEQ ID NO: 821493 - RNA, 19 nt, Homo sapiens
  misc_RNA (1)...(19): siRNA sense strand
gcagacgccagcucucaca

SEQ ID NO: 821494 - RNA, 19 nt, Homo sapiens
  misc_RNA (1)...(19): siRNA sense strand
aagucuuucugccauagua

SEQ ID NO: 821495 - RNA, 19 nt, Homo sapiens
  misc_RNA (1)...(19): siRNA sense strand
auuacagacucagaacaua

SEQ ID NO: 821496 - RNA, 19 nt, Homo sapiens
  misc_RNA (1)...(19): siRNA sense strand
uugaagcaguuggaauuug

SEQ ID NO: 821497 - RNA, 19 nt, Homo sapiens
  misc_RNA (1)...(19): siRNA sense strand
aagcaucacgcaaggaaga

SEQ ID NO: 821498 - RNA, 19 nt, Homo sapiens
  misc_RNA (1)...(19): siRNA sense strand
ccugggagccucgaucuga

SEQ ID NO: 821499 - RNA, 19 nt, Homo sapiens
  misc_RNA (1)...(19): siRNA sense strand
gaggauucauacgggagaa

SEQ ID NO: 821500 - RNA, 19 nt, Homo sapiens
  misc_RNA (1)...(19): siRNA sense strand
ccaccacguuagggaaaga

SEQ ID NO: 821501 - RNA, 19 nt, Homo sapiens
  misc_RNA (1)...(19): siRNA sense strand
aggacaaacccuacaaaug

SEQ ID NO: 821502 - RNA, 19 nt, Homo sapiens
  misc_RNA (1)...(19): siRNA sense strand
caggacaaacccuacaaau

SEQ ID NO: 821503 - RNA, 19 nt, Homo sapiens
  misc_RNA (1)...(19): siRNA sense strand
ccaauuacggaacucacaa

SEQ ID NO: 821504 - RNA, 19 nt, Homo sapiens
  misc_RNA (1)...(19): siRNA sense strand
agaacauaacuccagcuua

SEQ ID NO: 821505 - RNA, 19 nt, Homo sapiens
  misc_RNA (1)...(19): siRNA sense strand
guuggaauuuggccucaag

SEQ ID NO: 821506 - RNA, 19 nt, Homo sapiens
  misc_RNA (1)...(19): siRNA sense strand
ccagucaggccauuccaau

SEQ ID NO: 821507 - RNA, 19 nt, Homo sapiens
  misc_RNA (1)...(19): siRNA sense strand
ccucaaggaagcaccaguu

SEQ ID NO: 821508 - RNA, 19 nt, Homo sapiens
  misc_RNA (1)...(19): siRNA sense strand
ggucaccugcucuccauag

SEQ ID NO: 821509 - RNA, 19 nt, Homo sapiens
  misc_RNA (1)...(19): siRNA sense strand
gcuuccauguuauuugaca

SEQ ID NO: 821510 - RNA, 19 nt, Homo sapiens
  misc_RNA (1)...(19): siRNA sense strand
gcccuggcuuuguuugaca

SEQ ID NO: 821511 - RNA, 19 nt, Homo sapiens
  misc_RNA (1)...(19): siRNA sense strand
cgggagaaagaccuuauau

SEQ ID NO: 821512 - RNA, 19 nt, Homo sapiens
  misc_RNA (1)...(19): siRNA sense strand
uccgaagccugaagucauc

SEQ ID NO: 821513 - RNA, 19 nt, Homo sapiens
  misc_RNA (1)...(19): siRNA sense strand
caacacccgaacuccagaa

SEQ ID NO: 821514 - RNA, 19 nt, Homo sapiens
  misc_RNA (1)...(19): siRNA sense strand
gagaaacucugugaaagua

SEQ ID NO: 821515 - RNA, 19 nt, Homo sapiens
  misc_RNA (1)...(19): siRNA sense strand
ugaaagaacucauaccauu

SEQ ID NO: 821516 - RNA, 19 nt, Homo sapiens
  misc_RNA (1)...(19): siRNA sense strand
gguaaagccuucagaugua

SEQ ID NO: 821517 - RNA, 19 nt, Homo sapiens
  misc_RNA (1)...(19): siRNA sense strand
gaaagaacucauaccauua

SEQ ID NO: 821518 - RNA, 19 nt, Homo sapiens
  misc_RNA (1)...(19): siRNA sense strand
ggucauucaucucuuaaua

SEQ ID NO: 821519 - RNA, 19 nt, Homo sapiens
  misc_RNA (1)...(19): siRNA sense strand
guaagaaagccuucaguua

SEQ ID NO: 821520 - RNA, 19 nt, Homo sapiens
  misc_RNA (1)...(19): siRNA sense strand
gaaacucugugaaaguaaa

SEQ ID NO: 821521 - RNA, 19 nt, Homo sapiens
  misc_RNA (1)...(19): siRNA sense strand
ugauaaagcuugcacuaaa

SEQ ID NO: 821522 - RNA, 19 nt, Homo sapiens
  misc_RNA (1)...(19): siRNA sense strand
gguaaagaauguacagaaa

SEQ ID NO: 821523 - RNA, 19 nt, Homo sapiens
  misc_RNA (1)...(19): siRNA sense strand
ggaauaacaccaugugaaa

SEQ ID NO: 821524 - RNA, 19 nt, Homo sapiens
  misc_RNA (1)...(19): siRNA sense strand
uaaagaaagucaucacugu

SEQ ID NO: 821525 - RNA, 19 nt, Homo sapiens
  misc_RNA (1)...(19): siRNA sense strand
uaagaaagccuucaguuau

SEQ ID NO: 821526 - RNA, 19 nt, Homo sapiens
  misc_RNA (1)...(19): siRNA sense strand
gagaaacccuaugaaugua

SEQ ID NO: 821527 - RNA, 19 nt, Homo sapiens
  misc_RNA (1)...(19): siRNA sense strand
gaacucauaccauuaauag

SEQ ID NO: 821528 - RNA, 19 nt, Homo sapiens
  misc_RNA (1)...(19): siRNA sense strand
gagaaacccuaugaaugua

SEQ ID NO: 821529 - RNA, 19 nt, Homo sapiens
  misc_RNA (1)...(19): siRNA sense strand
gauaaacccuauggaugua

SEQ ID NO: 821530 - RNA, 19 nt, Homo sapiens
  misc_RNA (1)...(19): siRNA sense strand
gagaaacccuaugaaugua

SEQ ID NO: 821531 - RNA, 19 nt, Homo sapiens
  misc_RNA (1)...(19): siRNA sense strand
gcaaagccuucacuuguuc

SEQ ID NO: 821532 - RNA, 19 nt, Homo sapiens
  misc_RNA (1)...(19): siRNA sense strand
ggacacaagucaucugagu

SEQ ID NO: 821533 - RNA, 19 nt, Homo sapiens
  misc_RNA (1)...(19): siRNA sense strand
ggagauggaccuuauaaau

SEQ ID NO: 821534 - RNA, 19 nt, Homo sapiens
  misc_RNA (1)...(19): siRNA sense strand
gagagaauccauauagaaa

SEQ ID NO: 821535 - RNA, 19 nt, Homo sapiens
  misc_RNA (1)...(19): siRNA sense strand
ucaagaaccugaccucugu

SEQ ID NO: 821536 - RNA, 19 nt, Homo sapiens
  misc_RNA (1)...(19): siRNA sense strand
ggagagaauccauauagaa

SEQ ID NO: 821537 - RNA, 19 nt, Homo sapiens
  misc_RNA (1)...(19): siRNA sense strand
gagagaaacccuaucaaug

SEQ ID NO: 821538 - RNA, 19 nt, Homo sapiens
  misc_RNA (1)...(19): siRNA sense strand
ccaauuacauucgauauca

SEQ ID NO: 821539 - RNA, 19 nt, Homo sapiens
  misc_RNA (1)...(19): siRNA sense strand
gagagaaacccuaugaaug

SEQ ID NO: 821540 - RNA, 19 nt, Homo sapiens
  misc_RNA (1)...(19): siRNA sense strand
gagagaaacccuaugaaug

SEQ ID NO: 821541 - RNA, 19 nt, Homo sapiens
  misc_RNA (1)...(19): siRNA sense strand
gagagaaacccuaugaaug

SEQ ID NO: 821542 - RNA, 19 nt, Homo sapiens
  misc_RNA (1)...(19): siRNA sense strand
gaaugccgaugaauguaaa

SEQ ID NO: 821543 - RNA, 19 nt, Homo sapiens
  misc_RNA (1)...(19): siRNA sense strand
gagauggaccuuauaaaug

SEQ ID NO: 821544 - RNA, 19 nt, Homo sapiens
  misc_RNA (1)...(19): siRNA sense strand
gaauguaggcaauguggua

SEQ ID NO: 821545 - RNA, 19 nt, Homo sapiens
  misc_RNA (1)...(19): siRNA sense strand
ggauaaacccuauggaugu

SEQ ID NO: 821546 - RNA, 19 nt, Homo sapiens
  misc_RNA (1)...(19): siRNA sense strand
gauaaagcuugcacuaaag

SEQ ID NO: 821547 - RNA, 19 nt, Homo sapiens
  misc_RNA (1)...(19): siRNA sense strand
gaaaagcauucagguauuu

SEQ ID NO: 821548 - RNA, 19 nt, Homo sapiens
  misc_RNA (1)...(19): siRNA sense strand
ucaguuaucuugacuccuu

SEQ ID NO: 821549 - RNA, 19 nt, Homo sapiens
  misc_RNA (1)...(19): siRNA sense strand
ggagagaaacccuaucaau

SEQ ID NO: 821550 - RNA, 19 nt, Homo sapiens
  misc_RNA (1)...(19): siRNA sense strand
ggagagaaacccuaugaau

SEQ ID NO: 821551 - RNA, 19 nt, Homo sapiens
  misc_RNA (1)...(19): siRNA sense strand
ggcaaagccuucacuuguu

SEQ ID NO: 821552 - RNA, 19 nt, Homo sapiens
  misc_RNA (1)...(19): siRNA sense strand
ggagagaaacccuaugaau

SEQ ID NO: 821553 - RNA, 19 nt, Homo sapiens
  misc_RNA (1)...(19): siRNA sense strand
ggagagaaacccuaugaau

SEQ ID NO: 821554 - RNA, 19 nt, Homo sapiens
  misc_RNA (1)...(19): siRNA sense strand
ggacacacacuggagauaa

SEQ ID NO: 821555 - RNA, 19 nt, Homo sapiens
  misc_RNA (1)...(19): siRNA sense strand
ucaaccagauugcagauga

SEQ ID NO: 821556 - RNA, 19 nt, Homo sapiens
  misc_RNA (1)...(19): siRNA sense strand
gaaccugaccucuguagga

SEQ ID NO: 821557 - RNA, 19 nt, Homo sapiens
  misc_RNA (1)...(19): siRNA sense strand
agauggaccuuauaaaugu

SEQ ID NO: 821558 - RNA, 19 nt, Homo sapiens
  misc_RNA (1)...(19): siRNA sense strand
gagaaacccuaucaaugca

SEQ ID NO: 821559 - RNA, 19 nt, Homo sapiens
  misc_RNA (1)...(19): siRNA sense strand
gaauguaagcacuguggua

SEQ ID NO: 821560 - RNA, 19 nt, Homo sapiens
  misc_RNA (1)...(19): siRNA sense strand
uaaggaauguggaaaagua

SEQ ID NO: 821561 - RNA, 19 nt, Homo sapiens
  misc_RNA (1)...(19): siRNA sense strand
gauaagccauaugagugua

SEQ ID NO: 821562 - RNA, 19 nt, Homo sapiens
  misc_RNA (1)...(19): siRNA sense strand
ggagauaagccauaugagu

SEQ ID NO: 821563 - RNA, 19 nt, Homo sapiens
  misc_RNA (1)...(19): siRNA sense strand
gaaaguaaagaaagucauc

SEQ ID NO: 821564 - RNA, 19 nt, Homo sapiens
  misc_RNA (1)...(19): siRNA sense strand
agagaaacccuaugaaugu

SEQ ID NO: 821565 - RNA, 19 nt, Homo sapiens
  misc_RNA (1)...(19): siRNA sense strand
ggaaaagcauucagguauu

SEQ ID NO: 821566 - RNA, 19 nt, Homo sapiens
  misc_RNA (1)...(19): siRNA sense strand
agagaaacccuaugaaugu

SEQ ID NO: 821567 - RNA, 19 nt, Homo sapiens
  misc_RNA (1)...(19): siRNA sense strand
agagaaacccuaugaaugu

SEQ ID NO: 821568 - RNA, 19 nt, Homo sapiens
  misc_RNA (1)...(19): siRNA sense strand
gagaaagcuucaaccagau

SEQ ID NO: 821569 - RNA, 19 nt, Homo sapiens
  misc_RNA (1)...(19): siRNA sense strand
gguaaggccuuuauuucca

SEQ ID NO: 821570 - RNA, 19 nt, Homo sapiens
  misc_RNA (1)...(19): siRNA sense strand
cuucacaacuucaaauuca

SEQ ID NO: 821571 - RNA, 19 nt, Homo sapiens
  misc_RNA (1)...(19): siRNA sense strand
gugaaaccauauaagugua

SEQ ID NO: 821572 - RNA, 19 nt, Homo sapiens
  misc_RNA (1)...(19): siRNA sense strand
gauggaccuuauaaaugua

SEQ ID NO: 821573 - RNA, 19 nt, Homo sapiens
  misc_RNA (1)...(19): siRNA sense strand
ggagugggcuuugcuggau

SEQ ID NO: 821574 - RNA, 19 nt, Homo sapiens
  misc_RNA (1)...(19): siRNA sense strand
ucaggaauauggagagaau

SEQ ID NO: 821575 - RNA, 19 nt, Homo sapiens
  misc_RNA (1)...(19): siRNA sense strand
gaaguuggcacgggucauu

SEQ ID NO: 821576 - RNA, 19 nt, Homo sapiens
  misc_RNA (1)...(19): siRNA sense strand
gaacauugaagaugaguac

SEQ ID NO: 821577 - RNA, 19 nt, Homo sapiens
  misc_RNA (1)...(19): siRNA sense strand
ucaguuccauucaguauca

SEQ ID NO: 821578 - RNA, 19 nt, Homo sapiens
  misc_RNA (1)...(19): siRNA sense strand
guaaggccuuuauuuccaa

SEQ ID NO: 821579 - RNA, 19 nt, Homo sapiens
  misc_RNA (1)...(19): siRNA sense strand
aagaaagccuucaguuauc

SEQ ID NO: 821580 - RNA, 19 nt, Homo sapiens
  misc_RNA (1)...(19): siRNA sense strand
cgaugaauguaaagaaugu

SEQ ID NO: 821581 - RNA, 19 nt, Homo sapiens
  misc_RNA (1)...(19): siRNA sense strand
ccacuacccuuccaguaca

SEQ ID NO: 821582 - RNA, 19 nt, Homo sapiens
  misc_RNA (1)...(19): siRNA sense strand
ccauaugaguguaagguau

SEQ ID NO: 821583 - RNA, 19 nt, Homo sapiens
  misc_RNA (1)...(19): siRNA sense strand
gaauguaagcaauguggaa

SEQ ID NO: 821584 - RNA, 19 nt, Homo sapiens
  misc_RNA (1)...(19): siRNA sense strand
cauugaagaugaguacaaa

SEQ ID NO: 821585 - RNA, 19 nt, Homo sapiens
  misc_RNA (1)...(19): siRNA sense strand
agacacacacugaggauaa

SEQ ID NO: 821586 - RNA, 19 nt, Homo sapiens
  misc_RNA (1)...(19): siRNA sense strand
caggagaaaucuaagucuu

SEQ ID NO: 821587 - RNA, 19 nt, Homo sapiens
  misc_RNA (1)...(19): siRNA sense strand
gcacugugguaaggccuuu

SEQ ID NO: 821588 - RNA, 19 nt, Homo sapiens
  misc_RNA (1)...(19): siRNA sense strand
gaaacccuaugaauguaag

SEQ ID NO: 821589 - RNA, 19 nt, Homo sapiens
  misc_RNA (1)...(19): siRNA sense strand
gcaggaaaccuucaagaac

SEQ ID NO: 821590 - RNA, 19 nt, Homo sapiens
  misc_RNA (1)...(19): siRNA sense strand
gaaacccuaugaauguaag

SEQ ID NO: 821591 - RNA, 19 nt, Homo sapiens
  misc_RNA (1)...(19): siRNA sense strand
gugggaaagccuucuauuu

SEQ ID NO: 821592 - RNA, 19 nt, Homo sapiens
  misc_RNA (1)...(19): siRNA sense strand
gacacacacugaggauaaa

SEQ ID NO: 821593 - RNA, 19 nt, Homo sapiens
  misc_RNA (1)...(19): siRNA sense strand
gcagaugacaugcugaaca

SEQ ID NO: 821594 - RNA, 19 nt, Homo sapiens
  misc_RNA (1)...(19): siRNA sense strand
gccgaugaauguaaagaau

SEQ ID NO: 821595 - RNA, 19 nt, Homo sapiens
  misc_RNA (1)...(19): siRNA sense strand
gaggauaaacccuauggau

SEQ ID NO: 821596 - RNA, 19 nt, Homo sapiens
  misc_RNA (1)...(19): siRNA sense strand
uaaagaaugugggaaugca

SEQ ID NO: 821597 - RNA, 19 nt, Homo sapiens
  misc_RNA (1)...(19): siRNA sense strand
gcauucagguauuucucuu

SEQ ID NO: 821598 - RNA, 19 nt, Homo sapiens
  misc_RNA (1)...(19): siRNA sense strand
acacaagucaucugaguau

SEQ ID NO: 821599 - RNA, 19 nt, Homo sapiens
  misc_RNA (1)...(19): siRNA sense strand
caguggagauggaccuuau

SEQ ID NO: 821600 - RNA, 19 nt, Homo sapiens
  misc_RNA (1)...(19): siRNA sense strand
guauuucucuuccuugcau

SEQ ID NO: 821601 - RNA, 19 nt, Homo sapiens
  misc_RNA (1)...(19): siRNA sense strand
aggccuuuauuuccaauua

SEQ ID NO: 821602 - RNA, 19 nt, Homo sapiens
  misc_RNA (1)...(19): siRNA sense strand
ccaguuccauucgauauca

SEQ ID NO: 821603 - RNA, 19 nt, Homo sapiens
  misc_RNA (1)...(19): siRNA sense strand
ugaaugccgaugaauguaa

SEQ ID NO: 821604 - RNA, 19 nt, Homo sapiens
  misc_RNA (1)...(19): siRNA sense strand
gacucacacuggagagaaa

SEQ ID NO: 821605 - RNA, 19 nt, Homo sapiens
  misc_RNA (1)...(19): siRNA sense strand
gacucacacuggagagaaa

SEQ ID NO: 821606 - RNA, 19 nt, Homo sapiens
  misc_RNA (1)...(19): siRNA sense strand
gacacacacuggagauaag

SEQ ID NO: 821607 - RNA, 19 nt, Homo sapiens
  misc_RNA (1)...(19): siRNA sense strand
ucagguauuucucuuccuu

SEQ ID NO: 821608 - RNA, 19 nt, Homo sapiens
  misc_RNA (1)...(19): siRNA sense strand
gaauguaaggaauguggaa

SEQ ID NO: 821609 - RNA, 19 nt, Homo sapiens
  misc_RNA (1)...(19): siRNA sense strand
gacucacacuggagagaaa

SEQ ID NO: 821610 - RNA, 19 nt, Homo sapiens
  misc_RNA (1)...(19): siRNA sense strand
gacucacacuggagagaaa

SEQ ID NO: 821611 - RNA, 19 nt, Homo sapiens
  misc_RNA (1)...(19): siRNA sense strand
gaaagcuucaaccagauug

SEQ ID NO: 821612 - RNA, 19 nt, Homo sapiens
  misc_RNA (1)...(19): siRNA sense strand
aaacauggaaaguucagaa

SEQ ID NO: 821613 - RNA, 19 nt, Homo sapiens
  misc_RNA (1)...(19): siRNA sense strand
uggcaaagccuucacuugu

SEQ ID NO: 821614 - RNA, 19 nt, Homo sapiens
  misc_RNA (1)...(19): siRNA sense strand
gagaaacucugugaaagua

SEQ ID NO: 821615 - RNA, 19 nt, Homo sapiens
  misc_RNA (1)...(19): siRNA sense strand
ugaaagaacucauaccauu

SEQ ID NO: 821616 - RNA, 19 nt, Homo sapiens
  misc_RNA (1)...(19): siRNA sense strand
gguaaagccuucagaugua

SEQ ID NO: 821617 - RNA, 19 nt, Homo sapiens
  misc_RNA (1)...(19): siRNA sense strand
gaaagaacucauaccauua

SEQ ID NO: 821618 - RNA, 19 nt, Homo sapiens
  misc_RNA (1)...(19): siRNA sense strand
ggucauucaucucuuaaua

SEQ ID NO: 821619 - RNA, 19 nt, Homo sapiens
  misc_RNA (1)...(19): siRNA sense strand
guaagaaagccuucaguua

SEQ ID NO: 821620 - RNA, 19 nt, Homo sapiens
  misc_RNA (1)...(19): siRNA sense strand
gaaacucugugaaaguaaa

SEQ ID NO: 821621 - RNA, 19 nt, Homo sapiens
  misc_RNA (1)...(19): siRNA sense strand
ugauaaagcuugcacuaaa

SEQ ID NO: 821622 - RNA, 19 nt, Homo sapiens
  misc_RNA (1)...(19): siRNA sense strand
gguaaagaauguacagaaa

SEQ ID NO: 821623 - RNA, 19 nt, Homo sapiens
  misc_RNA (1)...(19): siRNA sense strand
ggaauaacaccaugugaaa

SEQ ID NO: 821624 - RNA, 19 nt, Homo sapiens
  misc_RNA (1)...(19): siRNA sense strand
uaaagaaagucaucacugu

SEQ ID NO: 821625 - RNA, 19 nt, Homo sapiens
  misc_RNA (1)...(19): siRNA sense strand
uaagaaagccuucaguuau

SEQ ID NO: 821626 - RNA, 19 nt, Homo sapiens
  misc_RNA (1)...(19): siRNA sense strand
gagaaacccuaugaaugua

SEQ ID NO: 821627 - RNA, 19 nt, Homo sapiens
  misc_RNA (1)...(19): siRNA sense strand
gaacucauaccauuaauag

SEQ ID NO: 821628 - RNA, 19 nt, Homo sapiens
  misc_RNA (1)...(19): siRNA sense strand
gagaaacccuaugaaugua

SEQ ID NO: 821629 - RNA, 19 nt, Homo sapiens
  misc_RNA (1)...(19): siRNA sense strand
gauaaacccuauggaugua

SEQ ID NO: 821630 - RNA, 19 nt, Homo sapiens
  misc_RNA (1)...(19): siRNA sense strand
gagaaacccuaugaaugua

SEQ ID NO: 821631 - RNA, 19 nt, Homo sapiens
  misc_RNA (1)...(19): siRNA sense strand
gcaaagccuucacuuguuc

SEQ ID NO: 821632 - RNA, 19 nt, Homo sapiens
  misc_RNA (1)...(19): siRNA sense strand
ggacacaagucaucugagu

SEQ ID NO: 821633 - RNA, 19 nt, Homo sapiens
  misc_RNA (1)...(19): siRNA sense strand
ggagauggaccuuauaaau

SEQ ID NO: 821634 - RNA, 19 nt, Homo sapiens
  misc_RNA (1)...(19): siRNA sense strand
gagagaauccauauagaaa

SEQ ID NO: 821635 - RNA, 19 nt, Homo sapiens
  misc_RNA (1)...(19): siRNA sense strand
ucaagaaccugaccucugu

SEQ ID NO: 821636 - RNA, 19 nt, Homo sapiens
  misc_RNA (1)...(19): siRNA sense strand
ggagagaauccauauagaa

SEQ ID NO: 821637 - RNA, 19 nt, Homo sapiens
  misc_RNA (1)...(19): siRNA sense strand
gagagaaacccuaucaaug

SEQ ID NO: 821638 - RNA, 19 nt, Homo sapiens
  misc_RNA (1)...(19): siRNA sense strand
ccaauuacauucgauauca

SEQ ID NO: 821639 - RNA, 19 nt, Homo sapiens
  misc_RNA (1)...(19): siRNA sense strand
gagagaaacccuaugaaug

SEQ ID NO: 821640 - RNA, 19 nt, Homo sapiens
  misc_RNA (1)...(19): siRNA sense strand
gagagaaacccuaugaaug

SEQ ID NO: 821641 - RNA, 19 nt, Homo sapiens
  misc_RNA (1)...(19): siRNA sense strand
gagagaaacccuaugaaug

SEQ ID NO: 821642 - RNA, 19 nt, Homo sapiens
  misc_RNA (1)...(19): siRNA sense strand
gaaugccgaugaauguaaa

SEQ ID NO: 821643 - RNA, 19 nt, Homo sapiens
  misc_RNA (1)...(19): siRNA sense strand
gagauggaccuuauaaaug

SEQ ID NO: 821644 - RNA, 19 nt, Homo sapiens
  misc_RNA (1)...(19): siRNA sense strand
gaauguaggcaauguggua

SEQ ID NO: 821645 - RNA, 19 nt, Homo sapiens
  misc_RNA (1)...(19): siRNA sense strand
ggauaaacccuauggaugu

SEQ ID NO: 821646 - RNA, 19 nt, Homo sapiens
  misc_RNA (1)...(19): siRNA sense strand
gauaaagcuugcacuaaag

SEQ ID NO: 821647 - RNA, 19 nt, Homo sapiens
  misc_RNA (1)...(19): siRNA sense strand
gaaaagcauucagguauuu

SEQ ID NO: 821648 - RNA, 19 nt, Homo sapiens
  misc_RNA (1)...(19): siRNA sense strand
ucaguuaucuugacuccuu

SEQ ID NO: 821649 - RNA, 19 nt, Homo sapiens
  misc_RNA (1)...(19): siRNA sense strand
ggagagaaacccuaucaau

SEQ ID NO: 821650 - RNA, 19 nt, Homo sapiens
  misc_RNA (1)...(19): siRNA sense strand
ggagagaaacccuaugaau

SEQ ID NO: 821651 - RNA, 19 nt, Homo sapiens
  misc_RNA (1)...(19): siRNA sense strand
ggcaaagccuucacuuguu

SEQ ID NO: 821652 - RNA, 19 nt, Homo sapiens
  misc_RNA (1)...(19): siRNA sense strand
ggagagaaacccuaugaau

SEQ ID NO: 821653 - RNA, 19 nt, Homo sapiens
  misc_RNA (1)...(19): siRNA sense strand
ggagagaaacccuaugaau

SEQ ID NO: 821654 - RNA, 19 nt, Homo sapiens
  misc_RNA (1)...(19): siRNA sense strand
ggacacacacuggagauaa

SEQ ID NO: 821655 - RNA, 19 nt, Homo sapiens
  misc_RNA (1)...(19): siRNA sense strand
gaaccugaccucuguagga

SEQ ID NO: 821656 - RNA, 19 nt, Homo sapiens
  misc_RNA (1)...(19): siRNA sense strand
ucaaccagauugcagauga

SEQ ID NO: 821657 - RNA, 19 nt, Homo sapiens
  misc_RNA (1)...(19): siRNA sense strand
agauggaccuuauaaaugu

SEQ ID NO: 821658 - RNA, 19 nt, Homo sapiens
  misc_RNA (1)...(19): siRNA sense strand
gagaaacccuaucaaugca

SEQ ID NO: 821659 - RNA, 19 nt, Homo sapiens
  misc_RNA (1)...(19): siRNA sense strand
gaauguaagcacuguggua

SEQ ID NO: 821660 - RNA, 19 nt, Homo sapiens
  misc_RNA (1)...(19): siRNA sense strand
uaaggaauguggaaaagua

SEQ ID NO: 821661 - RNA, 19 nt, Homo sapiens
  misc_RNA (1)...(19): siRNA sense strand
gauaagccauaugagugua

SEQ ID NO: 821662 - RNA, 19 nt, Homo sapiens
  misc_RNA (1)...(19): siRNA sense strand
ggagauaagccauaugagu

SEQ ID NO: 821663 - RNA, 19 nt, Homo sapiens
  misc_RNA (1)...(19): siRNA sense strand
gaaaguaaagaaagucauc

SEQ ID NO: 821664 - RNA, 19 nt, Homo sapiens
  misc_RNA (1)...(19): siRNA sense strand
agagaaacccuaugaaugu

SEQ ID NO: 821665 - RNA, 19 nt, Homo sapiens
  misc_RNA (1)...(19): siRNA sense strand
ggaaaagcauucagguauu

SEQ ID NO: 821666 - RNA, 19 nt, Homo sapiens
  misc_RNA (1)...(19): siRNA sense strand
agagaaacccuaugaaugu

SEQ ID NO: 821667 - RNA, 19 nt, Homo sapiens
  misc_RNA (1)...(19): siRNA sense strand
agagaaacccuaugaaugu

SEQ ID NO: 821668 - RNA, 19 nt, Homo sapiens
  misc_RNA (1)...(19): siRNA sense strand
gagaaagcuucaaccagau

SEQ ID NO: 821669 - RNA, 19 nt, Homo sapiens
  misc_RNA (1)...(19): siRNA sense strand
gguaaggccuuuauuucca

SEQ ID NO: 821670 - RNA, 19 nt, Homo sapiens
  misc_RNA (1)...(19): siRNA sense strand
ggagugggcuuugcuggau

SEQ ID NO: 821671 - RNA, 19 nt, Homo sapiens
  misc_RNA (1)...(19): siRNA sense strand
cuucacaacuucaaauuca

SEQ ID NO: 821672 - RNA, 19 nt, Homo sapiens
  misc_RNA (1)...(19): siRNA sense strand
gugaaaccauauaagugua

SEQ ID NO: 821673 - RNA, 19 nt, Homo sapiens
  misc_RNA (1)...(19): siRNA sense strand
gauggaccuuauaaaugua

SEQ ID NO: 821674 - RNA, 19 nt, Homo sapiens
  misc_RNA (1)...(19): siRNA sense strand
ucaggaauauggagagaau

SEQ ID NO: 821675 - RNA, 19 nt, Homo sapiens
  misc_RNA (1)...(19): siRNA sense strand
gaaguuggcacgggucauu

SEQ ID NO: 821676 - RNA, 19 nt, Homo sapiens
  misc_RNA (1)...(19): siRNA sense strand
ucaguuccauucaguauca

SEQ ID NO: 821677 - RNA, 19 nt, Homo sapiens
  misc_RNA (1)...(19): siRNA sense strand
gaacauugaagaugaguac

SEQ ID NO: 821678 - RNA, 19 nt, Homo sapiens
  misc_RNA (1)...(19): siRNA sense strand
guaaggccuuuauuuccaa

SEQ ID NO: 821679 - RNA, 19 nt, Homo sapiens
  misc_RNA (1)...(19): siRNA sense strand
aagaaagccuucaguuauc

SEQ ID NO: 821680 - RNA, 19 nt, Homo sapiens
  misc_RNA (1)...(19): siRNA sense strand
cgaugaauguaaagaaugu

SEQ ID NO: 821681 - RNA, 19 nt, Homo sapiens
  misc_RNA (1)...(19): siRNA sense strand
ccacuacccuuccaguaca

SEQ ID NO: 821682 - RNA, 19 nt, Homo sapiens
  misc_RNA (1)...(19): siRNA sense strand
cauugaagaugaguacaaa

SEQ ID NO: 821683 - RNA, 19 nt, Homo sapiens
  misc_RNA (1)...(19): siRNA sense strand
ccauaugaguguaagguau

SEQ ID NO: 821684 - RNA, 19 nt, Homo sapiens
  misc_RNA (1)...(19): siRNA sense strand
gaauguaagcaauguggaa

SEQ ID NO: 821685 - RNA, 19 nt, Homo sapiens
  misc_RNA (1)...(19): siRNA sense strand
agacacacacugaggauaa

SEQ ID NO: 821686 - RNA, 19 nt, Homo sapiens
  misc_RNA (1)...(19): siRNA sense strand
gaaacccuaugaauguaag

SEQ ID NO: 821687 - RNA, 19 nt, Homo sapiens
  misc_RNA (1)...(19): siRNA sense strand
gcacugugguaaggccuuu

SEQ ID NO: 821688 - RNA, 19 nt, Homo sapiens
  misc_RNA (1)...(19): siRNA sense strand
caggagaaaucuaagucuu

SEQ ID NO: 821689 - RNA, 19 nt, Homo sapiens
  misc_RNA (1)...(19): siRNA sense strand
gaaacccuaugaauguaag

SEQ ID NO: 821690 - RNA, 19 nt, Homo sapiens
  misc_RNA (1)...(19): siRNA sense strand
gcaggaaaccuucaagaac

SEQ ID NO: 821691 - RNA, 19 nt, Homo sapiens
  misc_RNA (1)...(19): siRNA sense strand
gugggaaagccuucuauuu

SEQ ID NO: 821692 - RNA, 19 nt, Homo sapiens
  misc_RNA (1)...(19): siRNA sense strand
gacacacacugaggauaaa

SEQ ID NO: 821693 - RNA, 19 nt, Homo sapiens
  misc_RNA (1)...(19): siRNA sense strand
gcagaugacaugcugaaca

SEQ ID NO: 821694 - RNA, 19 nt, Homo sapiens
  misc_RNA (1)...(19): siRNA sense strand
gccgaugaauguaaagaau

SEQ ID NO: 821695 - RNA, 19 nt, Homo sapiens
  misc_RNA (1)...(19): siRNA sense strand
gaggauaaacccuauggau

SEQ ID NO: 821696 - RNA, 19 nt, Homo sapiens
  misc_RNA (1)...(19): siRNA sense strand
uaaagaaugugggaaugca

SEQ ID NO: 821697 - RNA, 19 nt, Homo sapiens
  misc_RNA (1)...(19): siRNA sense strand
gcauucagguauuucucuu

SEQ ID NO: 821698 - RNA, 19 nt, Homo sapiens
  misc_RNA (1)...(19): siRNA sense strand
acacaagucaucugaguau

SEQ ID NO: 821699 - RNA, 19 nt, Homo sapiens
  misc_RNA (1)...(19): siRNA sense strand
caguggagauggaccuuau

SEQ ID NO: 821700 - RNA, 19 nt, Homo sapiens
  misc_RNA (1)...(19): siRNA sense strand
guauuucucuuccuugcau

SEQ ID NO: 821701 - RNA, 19 nt, Homo sapiens
  misc_RNA (1)...(19): siRNA sense strand
aggccuuuauuuccaauua

SEQ ID NO: 821702 - RNA, 19 nt, Homo sapiens
  misc_RNA (1)...(19): siRNA sense strand
ccaguuccauucgauauca

SEQ ID NO: 821703 - RNA, 19 nt, Homo sapiens
  misc_RNA (1)...(19): siRNA sense strand
ugaaugccgaugaauguaa

SEQ ID NO: 821704 - RNA, 19 nt, Homo sapiens
  misc_RNA (1)...(19): siRNA sense strand
gacucacacuggagagaaa

SEQ ID NO: 821705 - RNA, 19 nt, Homo sapiens
  misc_RNA (1)...(19): siRNA sense strand
gacucacacuggagagaaa

SEQ ID NO: 821706 - RNA, 19 nt, Homo sapiens
  misc_RNA (1)...(19): siRNA sense strand
gacacacacuggagauaag

SEQ ID NO: 821707 - RNA, 19 nt, Homo sapiens
  misc_RNA (1)...(19): siRNA sense strand
ucagguauuucucuuccuu

SEQ ID NO: 821708 - RNA, 19 nt, Homo sapiens
  misc_RNA (1)...(19): siRNA sense strand
gaauguaaggaauguggaa

SEQ ID NO: 821709 - RNA, 19 nt, Homo sapiens
  misc_RNA (1)...(19): siRNA sense strand
gacucacacuggagagaaa

SEQ ID NO: 821710 - RNA, 19 nt, Homo sapiens
  misc_RNA (1)...(19): siRNA sense strand
gacucacacuggagagaaa

SEQ ID NO: 821711 - RNA, 19 nt, Homo sapiens
  misc_RNA (1)...(19): siRNA sense strand
aaacauggaaaguucagaa

SEQ ID NO: 821712 - RNA, 19 nt, Homo sapiens
  misc_RNA (1)...(19): siRNA sense strand
uggcaaagccuucacuugu

SEQ ID NO: 821713 - RNA, 19 nt, Homo sapiens
  misc_RNA (1)...(19): siRNA sense strand
agucaucacuguggagaaa

SEQ ID NO: 821714 - RNA, 19 nt, Homo sapiens
  misc_RNA (1)...(19): siRNA sense strand
caagagggacuacguguga

SEQ ID NO: 821715 - RNA, 19 nt, Homo sapiens
  misc_RNA (1)...(19): siRNA sense strand
caucacaggugcccagugu

SEQ ID NO: 821716 - RNA, 19 nt, Homo sapiens
  misc_RNA (1)...(19): siRNA sense strand
gcacgugcccucuguguca

SEQ ID NO: 821717 - RNA, 19 nt, Homo sapiens
  misc_RNA (1)...(19): siRNA sense strand
caucuggacuggacaagag

SEQ ID NO: 821718 - RNA, 19 nt, Homo sapiens
  misc_RNA (1)...(19): siRNA sense strand
ucacaggugcccaguguac

SEQ ID NO: 821719 - RNA, 19 nt, Homo sapiens
  misc_RNA (1)...(19): siRNA sense strand
ugggagggccuguggaugu

SEQ ID NO: 821720 - RNA, 19 nt, Homo sapiens
  misc_RNA (1)...(19): siRNA sense strand
caaagaaggugguggaguu

SEQ ID NO: 821721 - RNA, 19 nt, Homo sapiens
  misc_RNA (1)...(19): siRNA sense strand
acaaagaacugacacagaa

SEQ ID NO: 821722 - RNA, 19 nt, Homo sapiens
  misc_RNA (1)...(19): siRNA sense strand
uagaggagcuggaagauga

SEQ ID NO: 821723 - RNA, 19 nt, Homo sapiens
  misc_RNA (1)...(19): siRNA sense strand
ggaaaugggccaagucaaa

SEQ ID NO: 821724 - RNA, 19 nt, Homo sapiens
  misc_RNA (1)...(19): siRNA sense strand
ggacagugauggagagaga

SEQ ID NO: 821725 - RNA, 19 nt, Homo sapiens
  misc_RNA (1)...(19): siRNA sense strand
gaaaggaaaggccaagaaa

SEQ ID NO: 821726 - RNA, 19 nt, Homo sapiens
  misc_RNA (1)...(19): siRNA sense strand
gcacagaaguggaagaacu

SEQ ID NO: 821727 - RNA, 19 nt, Homo sapiens
  misc_RNA (1)...(19): siRNA sense strand
gaacagauccacagagaag

SEQ ID NO: 821728 - RNA, 19 nt, Homo sapiens
  misc_RNA (1)...(19): siRNA sense strand
cgaaugaagugcagaugaa

SEQ ID NO: 821729 - RNA, 19 nt, Homo sapiens
  misc_RNA (1)...(19): siRNA sense strand
gaaagaauaggcggaaauu

SEQ ID NO: 821730 - RNA, 19 nt, Homo sapiens
  misc_RNA (1)...(19): siRNA sense strand
gaccaaaggcagaugauaa

SEQ ID NO: 821731 - RNA, 19 nt, Homo sapiens
  misc_RNA (1)...(19): siRNA sense strand
gcaacugaauagagucaaa

SEQ ID NO: 821732 - RNA, 19 nt, Homo sapiens
  misc_RNA (1)...(19): siRNA sense strand
aggaagaacuaguggauuu

SEQ ID NO: 821733 - RNA, 19 nt, Homo sapiens
  misc_RNA (1)...(19): siRNA sense strand
gaaguagcauucaguaaaa

SEQ ID NO: 821734 - RNA, 19 nt, Homo sapiens
  misc_RNA (1)...(19): siRNA sense strand
ggagagagaaagcaucaaa

SEQ ID NO: 821735 - RNA, 19 nt, Homo sapiens
  misc_RNA (1)...(19): siRNA sense strand
gugcuuccauauccauuua

SEQ ID NO: 821736 - RNA, 19 nt, Homo sapiens
  misc_RNA (1)...(19): siRNA sense strand
agacgccaguuucucauua

SEQ ID NO: 821737 - RNA, 19 nt, Homo sapiens
  misc_RNA (1)...(19): siRNA sense strand
gcaauuauggccaaauaug

SEQ ID NO: 821738 - RNA, 19 nt, Homo sapiens
  misc_RNA (1)...(19): siRNA sense strand
aaaggcagaugauaaagga

SEQ ID NO: 821739 - RNA, 19 nt, Homo sapiens
  misc_RNA (1)...(19): siRNA sense strand
ucucagaaauugaaggaaa

SEQ ID NO: 821740 - RNA, 19 nt, Homo sapiens
  misc_RNA (1)...(19): siRNA sense strand
gugguggaguuaccucuua

SEQ ID NO: 821741 - RNA, 19 nt, Homo sapiens
  misc_RNA (1)...(19): siRNA sense strand
gagcagcuacagaagguua

SEQ ID NO: 821742 - RNA, 19 nt, Homo sapiens
  misc_RNA (1)...(19): siRNA sense strand
ggcacuaucucagaaauug

SEQ ID NO: 821743 - RNA, 19 nt, Homo sapiens
  misc_RNA (1)...(19): siRNA sense strand
ccacagagaaguagcauuc

SEQ ID NO: 821744 - RNA, 19 nt, Homo sapiens
  misc_RNA (1)...(19): siRNA sense strand
ccagaaugauggaaagaau

SEQ ID NO: 821745 - RNA, 19 nt, Homo sapiens
  misc_RNA (1)...(19): siRNA sense strand
agaaguagcauucaguaaa

SEQ ID NO: 821746 - RNA, 19 nt, Homo sapiens
  misc_RNA (1)...(19): siRNA sense strand
ccaaagaggcugcaacaca

SEQ ID NO: 821747 - RNA, 19 nt, Homo sapiens
  misc_RNA (1)...(19): siRNA sense strand
caccacacgucacaauaaa

SEQ ID NO: 821748 - RNA, 19 nt, Homo sapiens
  misc_RNA (1)...(19): siRNA sense strand
cgcagcagcucaucaggua

SEQ ID NO: 821749 - RNA, 19 nt, Homo sapiens
  misc_RNA (1)...(19): siRNA sense strand
gcuugcagcucaugagguu

SEQ ID NO: 821750 - RNA, 19 nt, Homo sapiens
  misc_RNA (1)...(19): siRNA sense strand
gcaguucccacaauaauag

SEQ ID NO: 821751 - RNA, 19 nt, Homo sapiens
  misc_RNA (1)...(19): siRNA sense strand
ggaaagaauaggcggaaau

SEQ ID NO: 821752 - RNA, 19 nt, Homo sapiens
  misc_RNA (1)...(19): siRNA sense strand
caacugaucaaccuacaga

SEQ ID NO: 821753 - RNA, 19 nt, Homo sapiens
  misc_RNA (1)...(19): siRNA sense strand
ggaggacccugagcaagug

SEQ ID NO: 821754 - RNA, 19 nt, Homo sapiens
  misc_RNA (1)...(19): siRNA sense strand
aggcaauuauggccaaaua

SEQ ID NO: 821755 - RNA, 19 nt, Homo sapiens
  misc_RNA (1)...(19): siRNA sense strand
gaauagagucaaaucaaag

SEQ ID NO: 821756 - RNA, 19 nt, Homo sapiens
  misc_RNA (1)...(19): siRNA sense strand
gacgccaguuucucauuaa

SEQ ID NO: 821757 - RNA, 19 nt, Homo sapiens
  misc_RNA (1)...(19): siRNA sense strand
gaacaagcagccagugaca

SEQ ID NO: 821758 - RNA, 19 nt, Homo sapiens
  misc_RNA (1)...(19): siRNA sense strand
gagaaguagcauucaguaa

SEQ ID NO: 821759 - RNA, 19 nt, Homo sapiens
  misc_RNA (1)...(19): siRNA sense strand
caaaugggacccuaucauc

SEQ ID NO: 821760 - RNA, 19 nt, Homo sapiens
  misc_RNA (1)...(19): siRNA sense strand
ccacacgucacaauaaaga

SEQ ID NO: 821761 - RNA, 19 nt, Homo sapiens
  misc_RNA (1)...(19): siRNA sense strand
ccagcaagcagucaagaaa

SEQ ID NO: 821762 - RNA, 19 nt, Homo sapiens
  misc_RNA (1)...(19): siRNA sense strand
caauuauggccaaauauga

SEQ ID NO: 821763 - RNA, 19 nt, Homo sapiens
  misc_RNA (1)...(19): siRNA sense strand
gaaagaaugagccuuaagc

SEQ ID NO: 821764 - RNA, 19 nt, Homo sapiens
  misc_RNA (1)...(19): siRNA sense strand
gaaaugggccaagucaaag

SEQ ID NO: 821765 - RNA, 19 nt, Homo sapiens
  misc_RNA (1)...(19): siRNA sense strand
ucaccacacgucacaauaa

SEQ ID NO: 821766 - RNA, 19 nt, Homo sapiens
  misc_RNA (1)...(19): siRNA sense strand
ccaaauaaucggccugaug

SEQ ID NO: 821767 - RNA, 19 nt, Homo sapiens
  misc_RNA (1)...(19): siRNA sense strand
ugagagaauuugaggaaag

SEQ ID NO: 821768 - RNA, 19 nt, Homo sapiens
  misc_RNA (1)...(19): siRNA sense strand
ucacagguccucuccaaau

SEQ ID NO: 821769 - RNA, 19 nt, Homo sapiens
  misc_RNA (1)...(19): siRNA sense strand
ggacguggaccugacacua

SEQ ID NO: 821770 - RNA, 19 nt, Homo sapiens
  misc_RNA (1)...(19): siRNA sense strand
ggagggaggcacagaagug

SEQ ID NO: 821771 - RNA, 19 nt, Homo sapiens
  misc_RNA (1)...(19): siRNA sense strand
guacaagugcuuccauauc

SEQ ID NO: 821772 - RNA, 19 nt, Homo sapiens
  misc_RNA (1)...(19): siRNA sense strand
gaagaaagagaaggagcaa

SEQ ID NO: 821773 - RNA, 19 nt, Homo sapiens
  misc_RNA (1)...(19): siRNA sense strand
ccucacagguccucuccaa

SEQ ID NO: 821774 - RNA, 19 nt, Homo sapiens
  misc_RNA (1)...(19): siRNA sense strand
cuaaggagaagaaagagaa

SEQ ID NO: 821775 - RNA, 19 nt, Homo sapiens
  misc_RNA (1)...(19): siRNA sense strand
ucccagaccuguguuagaa

SEQ ID NO: 821776 - RNA, 19 nt, Homo sapiens
  misc_RNA (1)...(19): siRNA sense strand
uagaagagcugggaaaaga

SEQ ID NO: 821777 - RNA, 19 nt, Homo sapiens
  misc_RNA (1)...(19): siRNA sense strand
gaggugcuguccgaauuga

SEQ ID NO: 821778 - RNA, 19 nt, Homo sapiens
  misc_RNA (1)...(19): siRNA sense strand
gcucugcaguccuacuaug

SEQ ID NO: 821779 - RNA, 19 nt, Homo sapiens
  misc_RNA (1)...(19): siRNA sense strand
gccagugacagauccuuua

SEQ ID NO: 821780 - RNA, 19 nt, Homo sapiens
  misc_RNA (1)...(19): siRNA sense strand
gcgaaugaagugcagauga

SEQ ID NO: 821781 - RNA, 19 nt, Homo sapiens
  misc_RNA (1)...(19): siRNA sense strand
caagccaggccauaucauu

SEQ ID NO: 821782 - RNA, 19 nt, Homo sapiens
  misc_RNA (1)...(19): siRNA sense strand
uaauagaggagcuggaaga

SEQ ID NO: 821783 - RNA, 19 nt, Homo sapiens
  misc_RNA (1)...(19): siRNA sense strand
gaaagugucagaguucagu

SEQ ID NO: 821784 - RNA, 19 nt, Homo sapiens
  misc_RNA (1)...(19): siRNA sense strand
aagccaggccauaucauua

SEQ ID NO: 821785 - RNA, 19 nt, Homo sapiens
  misc_RNA (1)...(19): siRNA sense strand
gagagaauuugaggaaagg

SEQ ID NO: 821786 - RNA, 19 nt, Homo sapiens
  misc_RNA (1)...(19): siRNA sense strand
caaagaacugacacagaaa

SEQ ID NO: 821787 - RNA, 19 nt, Homo sapiens
  misc_RNA (1)...(19): siRNA sense strand
uugaacagauccacagaga

SEQ ID NO: 821788 - RNA, 19 nt, Homo sapiens
  misc_RNA (1)...(19): siRNA sense strand
gccaagcuaugcaggaaca

SEQ ID NO: 821789 - RNA, 19 nt, Homo sapiens
  misc_RNA (1)...(19): siRNA sense strand
gaaggacagcagucagaga

SEQ ID NO: 821790 - RNA, 19 nt, Homo sapiens
  misc_RNA (1)...(19): siRNA sense strand
guugagagaauuugaggaa

SEQ ID NO: 821791 - RNA, 19 nt, Homo sapiens
  misc_RNA (1)...(19): siRNA sense strand
gaacaguuggccaagaaca

SEQ ID NO: 821792 - RNA, 19 nt, Homo sapiens
  misc_RNA (1)...(19): siRNA sense strand
aggaacaguuggccaagaa

SEQ ID NO: 821793 - RNA, 19 nt, Homo sapiens
  misc_RNA (1)...(19): siRNA sense strand
ggaagaacuaguggauuug

SEQ ID NO: 821794 - RNA, 19 nt, Homo sapiens
  misc_RNA (1)...(19): siRNA sense strand
ggcaguucccacaauaaua

SEQ ID NO: 821795 - RNA, 19 nt, Homo sapiens
  misc_RNA (1)...(19): siRNA sense strand
gagaaggagcaacugauca

SEQ ID NO: 821796 - RNA, 19 nt, Homo sapiens
  misc_RNA (1)...(19): siRNA sense strand
agaaugauggaaagaauga

SEQ ID NO: 821797 - RNA, 19 nt, Homo sapiens
  misc_RNA (1)...(19): siRNA sense strand
cacagguccucuccaaaug

SEQ ID NO: 821798 - RNA, 19 nt, Homo sapiens
  misc_RNA (1)...(19): siRNA sense strand
gaagaggagagagaccaaa

SEQ ID NO: 821799 - RNA, 19 nt, Homo sapiens
  misc_RNA (1)...(19): siRNA sense strand
ggaagaaauuuuguugaga

SEQ ID NO: 821800 - RNA, 19 nt, Homo sapiens
  misc_RNA (1)...(19): siRNA sense strand
gaauguggacggaccgaau

SEQ ID NO: 821801 - RNA, 19 nt, Homo sapiens
  misc_RNA (1)...(19): siRNA sense strand
uggaaagaaugagccuuaa

SEQ ID NO: 821802 - RNA, 19 nt, Homo sapiens
  misc_RNA (1)...(19): siRNA sense strand
gaaggagcagccagccauu

SEQ ID NO: 821803 - RNA, 19 nt, Homo sapiens
  misc_RNA (1)...(19): siRNA sense strand
aaagaaggugguggaguua

SEQ ID NO: 821804 - RNA, 19 nt, Homo sapiens
  misc_RNA (1)...(19): siRNA sense strand
ugaucaaccuacagaacuu

SEQ ID NO: 821805 - RNA, 19 nt, Homo sapiens
  misc_RNA (1)...(19): siRNA sense strand
gcaagugaggcagaagaaa

SEQ ID NO: 821806 - RNA, 19 nt, Homo sapiens
  misc_RNA (1)...(19): siRNA sense strand
gcaccagugacaccaaaga

SEQ ID NO: 821807 - RNA, 19 nt, Homo sapiens
  misc_RNA (1)...(19): siRNA sense strand
ccaagucaaaggcaauuau

SEQ ID NO: 821808 - RNA, 19 nt, Homo sapiens
  misc_RNA (1)...(19): siRNA sense strand
caucggcaauuugaaagga

SEQ ID NO: 821809 - RNA, 19 nt, Homo sapiens
  misc_RNA (1)...(19): siRNA sense strand
aagcaaucauuucccuuga

SEQ ID NO: 821810 - RNA, 19 nt, Homo sapiens
  misc_RNA (1)...(19): siRNA sense strand
aggaggugcuguccgaauu

SEQ ID NO: 821811 - RNA, 19 nt, Homo sapiens
  misc_RNA (1)...(19): siRNA sense strand
caagugaggcagaagaaag

SEQ ID NO: 821812 - RNA, 19 nt, Homo sapiens
  misc_RNA (1)...(19): siRNA sense strand
gacccuaucauccugaaga

SEQ ID NO: 821813 - RNA, 19 nt, Homo sapiens
  misc_RNA (1)...(19): siRNA sense strand
aaagagaaggagcaacuga

SEQ ID NO: 821814 - RNA, 19 nt, Homo sapiens
  misc_RNA (1)...(19): siRNA sense strand
gagcuucccagaccugugu

SEQ ID NO: 821815 - RNA, 19 nt, Homo sapiens
  misc_RNA (1)...(19): siRNA sense strand
ggaaagaaugagccuuaag

SEQ ID NO: 821816 - RNA, 19 nt, Homo sapiens
  misc_RNA (1)...(19): siRNA sense strand
ggaggugcuguccgaauug

SEQ ID NO: 821817 - RNA, 19 nt, Homo sapiens
  misc_RNA (1)...(19): siRNA sense strand
caccaucggcaauuugaaa

SEQ ID NO: 821818 - RNA, 19 nt, Homo sapiens
  misc_RNA (1)...(19): siRNA sense strand
aagaauaggcggaaauugg

SEQ ID NO: 821819 - RNA, 19 nt, Homo sapiens
  misc_RNA (1)...(19): siRNA sense strand
gcacuaucucagaaauuga

SEQ ID NO: 821820 - RNA, 19 nt, Homo sapiens
  misc_RNA (1)...(19): siRNA sense strand
gcacagaacugaugaauag

SEQ ID NO: 821821 - RNA, 19 nt, Homo sapiens
  misc_RNA (1)...(19): siRNA sense strand
ggacaucacuucuuccaua

SEQ ID NO: 821822 - RNA, 19 nt, Homo sapiens
  misc_RNA (1)...(19): siRNA sense strand
gaaauagacucagaagaua

SEQ ID NO: 821823 - RNA, 19 nt, Homo sapiens
  misc_RNA (1)...(19): siRNA sense strand
gaucagagcuuugaaguga

SEQ ID NO: 821824 - RNA, 19 nt, Homo sapiens
  misc_RNA (1)...(19): siRNA sense strand
gaaugaagcggaugaaaua

SEQ ID NO: 821825 - RNA, 19 nt, Homo sapiens
  misc_RNA (1)...(19): siRNA sense strand
caaaggaugucgaagauuu

SEQ ID NO: 821826 - RNA, 19 nt, Homo sapiens
  misc_RNA (1)...(19): siRNA sense strand
gaacugaugaauaguguua

SEQ ID NO: 821827 - RNA, 19 nt, Homo sapiens
  misc_RNA (1)...(19): siRNA sense strand
caaggaagaugaaaucaau

SEQ ID NO: 821828 - RNA, 19 nt, Homo sapiens
  misc_RNA (1)...(19): siRNA sense strand
cuacagaaaucaucuuuga

SEQ ID NO: 821829 - RNA, 19 nt, Homo sapiens
  misc_RNA (1)...(19): siRNA sense strand
ccacagaaguagcagauga

SEQ ID NO: 821830 - RNA, 19 nt, Homo sapiens
  misc_RNA (1)...(19): siRNA sense strand
gaaucugucuugccuuuga

SEQ ID NO: 821831 - RNA, 19 nt, Homo sapiens
  misc_RNA (1)...(19): siRNA sense strand
ggaagaggauucugacaca

SEQ ID NO: 821832 - RNA, 19 nt, Homo sapiens
  misc_RNA (1)...(19): siRNA sense strand
gaacaauauugaacgcuau

SEQ ID NO: 821833 - RNA, 19 nt, Homo sapiens
  misc_RNA (1)...(19): siRNA sense strand
ucaaggagcuccggauaaa

SEQ ID NO: 821834 - RNA, 19 nt, Homo sapiens
  misc_RNA (1)...(19): siRNA sense strand
gauaaggauucucugacua

SEQ ID NO: 821835 - RNA, 19 nt, Homo sapiens
  misc_RNA (1)...(19): siRNA sense strand
ucaacuaccugaauuggaa

SEQ ID NO: 821836 - RNA, 19 nt, Homo sapiens
  misc_RNA (1)...(19): siRNA sense strand
gaagauaaggauucucuga

SEQ ID NO: 821837 - RNA, 19 nt, Homo sapiens
  misc_RNA (1)...(19): siRNA sense strand
gaaaagcaaugucguucua

SEQ ID NO: 821838 - RNA, 19 nt, Homo sapiens
  misc_RNA (1)...(19): siRNA sense strand
ggauaaagcauggcaauga

SEQ ID NO: 821839 - RNA, 19 nt, Homo sapiens
  misc_RNA (1)...(19): siRNA sense strand
gaggaaguuucagcaguua

SEQ ID NO: 821840 - RNA, 19 nt, Homo sapiens
  misc_RNA (1)...(19): siRNA sense strand
gcucauguauccaaauuca

SEQ ID NO: 821841 - RNA, 19 nt, Homo sapiens
  misc_RNA (1)...(19): siRNA sense strand
gaaggauacuugcaacaca

SEQ ID NO: 821842 - RNA, 19 nt, Homo sapiens
  misc_RNA (1)...(19): siRNA sense strand
aggauucucugacuaauaa

SEQ ID NO: 821843 - RNA, 19 nt, Homo sapiens
  misc_RNA (1)...(19): siRNA sense strand
guauugaaccuccacauaa

SEQ ID NO: 821844 - RNA, 19 nt, Homo sapiens
  misc_RNA (1)...(19): siRNA sense strand
ggucagaacagaagaagaa

SEQ ID NO: 821845 - RNA, 19 nt, Homo sapiens
  misc_RNA (1)...(19): siRNA sense strand
gaaguggacagaagaagaa

SEQ ID NO: 821846 - RNA, 19 nt, Homo sapiens
  misc_RNA (1)...(19): siRNA sense strand
aagcaugguuuacaacuaa

SEQ ID NO: 821847 - RNA, 19 nt, Homo sapiens
  misc_RNA (1)...(19): siRNA sense strand
ugaaauagacucagaagau

SEQ ID NO: 821848 - RNA, 19 nt, Homo sapiens
  misc_RNA (1)...(19): siRNA sense strand
gaacacuacagacauuuga

SEQ ID NO: 821849 - RNA, 19 nt, Homo sapiens
  misc_RNA (1)...(19): siRNA sense strand
gacagucgauagugauauu

SEQ ID NO: 821850 - RNA, 19 nt, Homo sapiens
  misc_RNA (1)...(19): siRNA sense strand
caggaagaaucaaauauca

SEQ ID NO: 821851 - RNA, 19 nt, Homo sapiens
  misc_RNA (1)...(19): siRNA sense strand
caagcaugguuuacaacua

SEQ ID NO: 821852 - RNA, 19 nt, Homo sapiens
  misc_RNA (1)...(19): siRNA sense strand
gcagacacuuucccagaug

SEQ ID NO: 821853 - RNA, 19 nt, Homo sapiens
  misc_RNA (1)...(19): siRNA sense strand
ccacaauggcuacgaagua

SEQ ID NO: 821854 - RNA, 19 nt, Homo sapiens
  misc_RNA (1)...(19): siRNA sense strand
gcaaugucguucuaaaugg

SEQ ID NO: 821855 - RNA, 19 nt, Homo sapiens
  misc_RNA (1)...(19): siRNA sense strand
gaagugaccaugacugcaa

SEQ ID NO: 821856 - RNA, 19 nt, Homo sapiens
  misc_RNA (1)...(19): siRNA sense strand
gggcaguccuguuucagaa

SEQ ID NO: 821857 - RNA, 19 nt, Homo sapiens
  misc_RNA (1)...(19): siRNA sense strand
acaccgaccuuaaacaaga

SEQ ID NO: 821858 - RNA, 19 nt, Homo sapiens
  misc_RNA (1)...(19): siRNA sense strand
gacauuaacugggaucugu

SEQ ID NO: 821859 - RNA, 19 nt, Homo sapiens
  misc_RNA (1)...(19): siRNA sense strand
gauagcagaacuugaugua

SEQ ID NO: 821860 - RNA, 19 nt, Homo sapiens
  misc_RNA (1)...(19): siRNA sense strand
cgaggaaguuucagcaguu

SEQ ID NO: 821861 - RNA, 19 nt, Homo sapiens
  misc_RNA (1)...(19): siRNA sense strand
uauugaaccuccacauaaa

SEQ ID NO: 821862 - RNA, 19 nt, Homo sapiens
  misc_RNA (1)...(19): siRNA sense strand
gagaauaaaucaggaucug

SEQ ID NO: 821863 - RNA, 19 nt, Homo sapiens
  misc_RNA (1)...(19): siRNA sense strand
cacaauggcuacgaaguaa

SEQ ID NO: 821864 - RNA, 19 nt, Homo sapiens
  misc_RNA (1)...(19): siRNA sense strand
gcugagggauggaguagug

SEQ ID NO: 821865 - RNA, 19 nt, Homo sapiens
  misc_RNA (1)...(19): siRNA sense strand
cagaggacaucacuucuuc

SEQ ID NO: 821866 - RNA, 19 nt, Homo sapiens
  misc_RNA (1)...(19): siRNA sense strand
cuacagacauuugagauuc

SEQ ID NO: 821867 - RNA, 19 nt, Homo sapiens
  misc_RNA (1)...(19): siRNA sense strand
gcaccuaccuacuucaaac

SEQ ID NO: 821868 - RNA, 19 nt, Homo sapiens
  misc_RNA (1)...(19): siRNA sense strand
gaaaccaugugggaaaaua

SEQ ID NO: 821869 - RNA, 19 nt, Homo sapiens
  misc_RNA (1)...(19): siRNA sense strand
gcaguccuguuucagaaga

SEQ ID NO: 821870 - RNA, 19 nt, Homo sapiens
  misc_RNA (1)...(19): siRNA sense strand
gaagaacaaguugaucaaa

SEQ ID NO: 821871 - RNA, 19 nt, Homo sapiens
  misc_RNA (1)...(19): siRNA sense strand
gaaauucaucacccuaaga

SEQ ID NO: 821872 - RNA, 19 nt, Homo sapiens
  misc_RNA (1)...(19): siRNA sense strand
gaucacccauguuucuuca

SEQ ID NO: 821873 - RNA, 19 nt, Homo sapiens
  misc_RNA (1)...(19): siRNA sense strand
ggaguuccaaacaguaaua

SEQ ID NO: 821874 - RNA, 19 nt, Homo sapiens
  misc_RNA (1)...(19): siRNA sense strand
cagaagugguucaugaguu

SEQ ID NO: 821875 - RNA, 19 nt, Homo sapiens
  misc_RNA (1)...(19): siRNA sense strand
aaagauuucuacaggacua

SEQ ID NO: 821876 - RNA, 19 nt, Homo sapiens
  misc_RNA (1)...(19): siRNA sense strand
agaagugguucaugaguug

SEQ ID NO: 821877 - RNA, 19 nt, Homo sapiens
  misc_RNA (1)...(19): siRNA sense strand
ggaaguggacagaagaaga

SEQ ID NO: 821878 - RNA, 19 nt, Homo sapiens
  misc_RNA (1)...(19): siRNA sense strand
ccacagaggacaucacuuc

SEQ ID NO: 821879 - RNA, 19 nt, Homo sapiens
  misc_RNA (1)...(19): siRNA sense strand
guggaacacuacagacauu

SEQ ID NO: 821880 - RNA, 19 nt, Homo sapiens
  misc_RNA (1)...(19): siRNA sense strand
aaagcaaugucguucuaaa

SEQ ID NO: 821881 - RNA, 19 nt, Homo sapiens
  misc_RNA (1)...(19): siRNA sense strand
ggccuuuguuugcaguuua

SEQ ID NO: 821882 - RNA, 19 nt, Homo sapiens
  misc_RNA (1)...(19): siRNA sense strand
gacaucacuucuuccauau

SEQ ID NO: 821883 - RNA, 19 nt, Homo sapiens
  misc_RNA (1)...(19): siRNA sense strand
cuaaauggcucaacuaccu

SEQ ID NO: 821884 - RNA, 19 nt, Homo sapiens
  misc_RNA (1)...(19): siRNA sense strand
gaacaaguugaucaaacaa

SEQ ID NO: 821885 - RNA, 19 nt, Homo sapiens
  misc_RNA (1)...(19): siRNA sense strand
agaacaaguugaucaaaca

SEQ ID NO: 821886 - RNA, 19 nt, Homo sapiens
  misc_RNA (1)...(19): siRNA sense strand
uagaaacugugaacucugu

SEQ ID NO: 821887 - RNA, 19 nt, Homo sapiens
  misc_RNA (1)...(19): siRNA sense strand
agaaugagcaacuagauga

SEQ ID NO: 821888 - RNA, 19 nt, Homo sapiens
  misc_RNA (1)...(19): siRNA sense strand
caucaggaagaaucaaaua

SEQ ID NO: 821889 - RNA, 19 nt, Homo sapiens
  misc_RNA (1)...(19): siRNA sense strand
gaagaagaaaucucugaca

SEQ ID NO: 821890 - RNA, 19 nt, Homo sapiens
  misc_RNA (1)...(19): siRNA sense strand
uugcagaagugguucauga

SEQ ID NO: 821891 - RNA, 19 nt, Homo sapiens
  misc_RNA (1)...(19): siRNA sense strand
gaaccggccuuuguuugca

SEQ ID NO: 821892 - RNA, 19 nt, Homo sapiens
  misc_RNA (1)...(19): siRNA sense strand
ggaugucgaagauuuggua

SEQ ID NO: 821893 - RNA, 19 nt, Homo sapiens
  misc_RNA (1)...(19): siRNA sense strand
agaggauucugacacagua

SEQ ID NO: 821894 - RNA, 19 nt, Homo sapiens
  misc_RNA (1)...(19): siRNA sense strand
gauaaagcauggcaaugac

SEQ ID NO: 821895 - RNA, 19 nt, Homo sapiens
  misc_RNA (1)...(19): siRNA sense strand
gaaaauauacaccugaaga

SEQ ID NO: 821896 - RNA, 19 nt, Homo sapiens
  misc_RNA (1)...(19): siRNA sense strand
gcauguaugaugacagaaa

SEQ ID NO: 821897 - RNA, 19 nt, Homo sapiens
  misc_RNA (1)...(19): siRNA sense strand
ugacacagauacagauuuu

SEQ ID NO: 821898 - RNA, 19 nt, Homo sapiens
  misc_RNA (1)...(19): siRNA sense strand
uuuagagucucccacuaua

SEQ ID NO: 821899 - RNA, 19 nt, Homo sapiens
  misc_RNA (1)...(19): siRNA sense strand
aaauaucucccuuggguaa

SEQ ID NO: 821900 - RNA, 19 nt, Homo sapiens
  misc_RNA (1)...(19): siRNA sense strand
caacuaaagaagauaagga

SEQ ID NO: 821901 - RNA, 19 nt, Homo sapiens
  misc_RNA (1)...(19): siRNA sense strand
ucacugcccucagaaugaa

SEQ ID NO: 821902 - RNA, 19 nt, Homo sapiens
  misc_RNA (1)...(19): siRNA sense strand
guccagaucacccauguuu

SEQ ID NO: 821903 - RNA, 19 nt, Homo sapiens
  misc_RNA (1)...(19): siRNA sense strand
acagaaaucaucuuugaga

SEQ ID NO: 821904 - RNA, 19 nt, Homo sapiens
  misc_RNA (1)...(19): siRNA sense strand
cauaucaguuguugcacuu

SEQ ID NO: 821905 - RNA, 19 nt, Homo sapiens
  misc_RNA (1)...(19): siRNA sense strand
cugaaucugucuugccuuu

SEQ ID NO: 821906 - RNA, 19 nt, Homo sapiens
  misc_RNA (1)...(19): siRNA sense strand
caaauucagugaccaaaau

SEQ ID NO: 821907 - RNA, 19 nt, Homo sapiens
  misc_RNA (1)...(19): siRNA sense strand
caccaagagucaucauuca

SEQ ID NO: 821908 - RNA, 19 nt, Homo sapiens
  misc_RNA (1)...(19): siRNA sense strand
cuuaaacaguuacaugaga

SEQ ID NO: 821909 - RNA, 19 nt, Homo sapiens
  misc_RNA (1)...(19): siRNA sense strand
guucaugaguugacaagca

SEQ ID NO: 821910 - RNA, 19 nt, Homo sapiens
  misc_RNA (1)...(19): siRNA sense strand
ggcaaugacugggcaacaa

SEQ ID NO: 821911 - RNA, 19 nt, Homo sapiens
  misc_RNA (1)...(19): siRNA sense strand
ggucugaaccggccuuugu

SEQ ID NO: 821912 - RNA, 19 nt, Homo sapiens
  misc_RNA (1)...(19): siRNA sense strand
cuaaagaagauaaggauuc

SEQ ID NO: 821913 - RNA, 19 nt, Homo sapiens
  misc_RNA (1)...(19): siRNA sense strand
gaacagaagaagaaaucuc

SEQ ID NO: 821914 - RNA, 19 nt, Homo sapiens
  misc_RNA (1)...(19): siRNA sense strand
cagaacugaugaauagugu

SEQ ID NO: 821915 - RNA, 19 nt, Homo sapiens
  misc_RNA (1)...(19): siRNA sense strand
caaaauagcacagaacuga

SEQ ID NO: 821916 - RNA, 19 nt, Homo sapiens
  misc_RNA (1)...(19): siRNA sense strand
gauaauacagccaucucuu

SEQ ID NO: 821917 - RNA, 19 nt, Homo sapiens
  misc_RNA (1)...(19): siRNA sense strand
uaaaucaggaucuggaguu

SEQ ID NO: 821918 - RNA, 19 nt, Homo sapiens
  misc_RNA (1)...(19): siRNA sense strand
ccaggcaccuaccuacuuc

SEQ ID NO: 821919 - RNA, 19 nt, Homo sapiens
  misc_RNA (1)...(19): siRNA sense strand
ccaagagucaucauucaga

SEQ ID NO: 821920 - RNA, 19 nt, Homo sapiens
  misc_RNA (1)...(19): siRNA sense strand
gaagaaaucagucgaauua

SEQ ID NO: 821921 - RNA, 19 nt, Homo sapiens
  misc_RNA (1)...(19): siRNA sense strand
ggagaucacugaaucauuu

SEQ ID NO: 821922 - RNA, 19 nt, Homo sapiens
  misc_RNA (1)...(19): siRNA sense strand
gcaaugcuguuaucaauga

SEQ ID NO: 821923 - RNA, 19 nt, Homo sapiens
  misc_RNA (1)...(19): siRNA sense strand
caaacugguucgugaauua

SEQ ID NO: 821924 - RNA, 19 nt, Homo sapiens
  misc_RNA (1)...(19): siRNA sense strand
ugaagaagcuccugauuau

SEQ ID NO: 821925 - RNA, 19 nt, Homo sapiens
  misc_RNA (1)...(19): siRNA sense strand
gcacuuugcuggaugguaa

SEQ ID NO: 821926 - RNA, 19 nt, Homo sapiens
  misc_RNA (1)...(19): siRNA sense strand
gaacucagcuuaugcaaaa

SEQ ID NO: 821927 - RNA, 19 nt, Homo sapiens
  misc_RNA (1)...(19): siRNA sense strand
ggacacagcaugaauuuga

SEQ ID NO: 821928 - RNA, 19 nt, Homo sapiens
  misc_RNA (1)...(19): siRNA sense strand
gaagaucauugcugaguug

SEQ ID NO: 821929 - RNA, 19 nt, Homo sapiens
  misc_RNA (1)...(19): siRNA sense strand
caaggcaacucgaccagua

SEQ ID NO: 821930 - RNA, 19 nt, Homo sapiens
  misc_RNA (1)...(19): siRNA sense strand
agaaagagcuggcuaccaa

SEQ ID NO: 821931 - RNA, 19 nt, Homo sapiens
  misc_RNA (1)...(19): siRNA sense strand
gaaaucagucgaauuaaug

SEQ ID NO: 821932 - RNA, 19 nt, Homo sapiens
  misc_RNA (1)...(19): siRNA sense strand
gcaaggaaaugcucuuaca

SEQ ID NO: 821933 - RNA, 19 nt, Homo sapiens
  misc_RNA (1)...(19): siRNA sense strand
gaggugagcuacauggaaa

SEQ ID NO: 821934 - RNA, 19 nt, Homo sapiens
  misc_RNA (1)...(19): siRNA sense strand
ugagcuacauggaaauuua

SEQ ID NO: 821935 - RNA, 19 nt, Homo sapiens
  misc_RNA (1)...(19): siRNA sense strand
ggaagaagaggaagaaguu

SEQ ID NO: 821936 - RNA, 19 nt, Homo sapiens
  misc_RNA (1)...(19): siRNA sense strand
ugggauagcucucugcaua

SEQ ID NO: 821937 - RNA, 19 nt, Homo sapiens
  misc_RNA (1)...(19): siRNA sense strand
ggaugaagcugcaguugau

SEQ ID NO: 821938 - RNA, 19 nt, Homo sapiens
  misc_RNA (1)...(19): siRNA sense strand
caaagggacucgcuuaaag

SEQ ID NO: 821939 - RNA, 19 nt, Homo sapiens
  misc_RNA (1)...(19): siRNA sense strand
ucugauaucucuccaauug

SEQ ID NO: 821940 - RNA, 19 nt, Homo sapiens
  misc_RNA (1)...(19): siRNA sense strand
aagaugagauggaggauuu

SEQ ID NO: 821941 - RNA, 19 nt, Homo sapiens
  misc_RNA (1)...(19): siRNA sense strand
gcaaugccguguaccuaaa

SEQ ID NO: 821942 - RNA, 19 nt, Homo sapiens
  misc_RNA (1)...(19): siRNA sense strand
ggucaucacuccuccagaa

SEQ ID NO: 821943 - RNA, 19 nt, Homo sapiens
  misc_RNA (1)...(19): siRNA sense strand
caacuguaaugaagaaaug

SEQ ID NO: 821944 - RNA, 19 nt, Homo sapiens
  misc_RNA (1)...(19): siRNA sense strand
ucucagaucucaaccacua

SEQ ID NO: 821945 - RNA, 19 nt, Homo sapiens
  misc_RNA (1)...(19): siRNA sense strand
gccauccucucccuaaaua

SEQ ID NO: 821946 - RNA, 19 nt, Homo sapiens
  misc_RNA (1)...(19): siRNA sense strand
ggagagagaggcuuuguug

SEQ ID NO: 821947 - RNA, 19 nt, Homo sapiens
  misc_RNA (1)...(19): siRNA sense strand
gaaggagcaaucaucaaua

SEQ ID NO: 821948 - RNA, 19 nt, Homo sapiens
  misc_RNA (1)...(19): siRNA sense strand
gacuguaaguugucugaua

SEQ ID NO: 821949 - RNA, 19 nt, Homo sapiens
  misc_RNA (1)...(19): siRNA sense strand
gauuauggcucuggaauuc

SEQ ID NO: 821950 - RNA, 19 nt, Homo sapiens
  misc_RNA (1)...(19): siRNA sense strand
gcagcgaucccuucuauga

SEQ ID NO: 821951 - RNA, 19 nt, Homo sapiens
  misc_RNA (1)...(19): siRNA sense strand
gaucauugcugaguugaau

SEQ ID NO: 821952 - RNA, 19 nt, Homo sapiens
  misc_RNA (1)...(19): siRNA sense strand
acaauacggucaaagcuuu

SEQ ID NO: 821953 - RNA, 19 nt, Homo sapiens
  misc_RNA (1)...(19): siRNA sense strand
gcucaguggucucuaagaa

SEQ ID NO: 821954 - RNA, 19 nt, Homo sapiens
  misc_RNA (1)...(19): siRNA sense strand
ggaaauuuacugugaaaga

SEQ ID NO: 821955 - RNA, 19 nt, Homo sapiens
  misc_RNA (1)...(19): siRNA sense strand
cugagugccuacuuuauua

SEQ ID NO: 821956 - RNA, 19 nt, Homo sapiens
  misc_RNA (1)...(19): siRNA sense strand
ugacaacuguaaugaagaa

SEQ ID NO: 821957 - RNA, 19 nt, Homo sapiens
  misc_RNA (1)...(19): siRNA sense strand
ggaagcuauugaacguuua

SEQ ID NO: 821958 - RNA, 19 nt, Homo sapiens
  misc_RNA (1)...(19): siRNA sense strand
gaaauuuacugugaaagag

SEQ ID NO: 821959 - RNA, 19 nt, Homo sapiens
  misc_RNA (1)...(19): siRNA sense strand
ggaaggagcaaucaucaau

SEQ ID NO: 821960 - RNA, 19 nt, Homo sapiens
  misc_RNA (1)...(19): siRNA sense strand
gaagacaccaaacaccuuu

SEQ ID NO: 821961 - RNA, 19 nt, Homo sapiens
  misc_RNA (1)...(19): siRNA sense strand
gaaguccccuggccuuuua

SEQ ID NO: 821962 - RNA, 19 nt, Homo sapiens
  misc_RNA (1)...(19): siRNA sense strand
caguagaaguccaggauuu

SEQ ID NO: 821963 - RNA, 19 nt, Homo sapiens
  misc_RNA (1)...(19): siRNA sense strand
ggaaauggaagucucauca

SEQ ID NO: 821964 - RNA, 19 nt, Homo sapiens
  misc_RNA (1)...(19): siRNA sense strand
caacuacgaugagacuuug

SEQ ID NO: 821965 - RNA, 19 nt, Homo sapiens
  misc_RNA (1)...(19): siRNA sense strand
aaggagcaaucaucaauaa

SEQ ID NO: 821966 - RNA, 19 nt, Homo sapiens
  misc_RNA (1)...(19): siRNA sense strand
gaaugaaacuugggaagag

SEQ ID NO: 821967 - RNA, 19 nt, Homo sapiens
  misc_RNA (1)...(19): siRNA sense strand
gaaggugcaguuucaguuu

SEQ ID NO: 821968 - RNA, 19 nt, Homo sapiens
  misc_RNA (1)...(19): siRNA sense strand
caagcucaguggucucuaa

SEQ ID NO: 821969 - RNA, 19 nt, Homo sapiens
  misc_RNA (1)...(19): siRNA sense strand
gagacagccucauccuuga

SEQ ID NO: 821970 - RNA, 19 nt, Homo sapiens
  misc_RNA (1)...(19): siRNA sense strand
aaccaagccuauuguauuu

SEQ ID NO: 821971 - RNA, 19 nt, Homo sapiens
  misc_RNA (1)...(19): siRNA sense strand
aaaccaagccuauuguauu

SEQ ID NO: 821972 - RNA, 19 nt, Homo sapiens
  misc_RNA (1)...(19): siRNA sense strand
caaaucaugacaacuguaa

SEQ ID NO: 821973 - RNA, 19 nt, Homo sapiens
  misc_RNA (1)...(19): siRNA sense strand
ggccuuaugucuucaucua

SEQ ID NO: 821974 - RNA, 19 nt, Homo sapiens
  misc_RNA (1)...(19): siRNA sense strand
guaacugggcuaaacauuu

SEQ ID NO: 821975 - RNA, 19 nt, Homo sapiens
  misc_RNA (1)...(19): siRNA sense strand
ccaagccuauuguauuuga

SEQ ID NO: 821976 - RNA, 19 nt, Homo sapiens
  misc_RNA (1)...(19): siRNA sense strand
gaauggagcaacacacuau

SEQ ID NO: 821977 - RNA, 19 nt, Homo sapiens
  misc_RNA (1)...(19): siRNA sense strand
gaagaaacacgauaaugag

SEQ ID NO: 821978 - RNA, 19 nt, Homo sapiens
  misc_RNA (1)...(19): siRNA sense strand
agaagaaacacgauaauga

SEQ ID NO: 821979 - RNA, 19 nt, Homo sapiens
  misc_RNA (1)...(19): siRNA sense strand
agacauugcugaccucaug

SEQ ID NO: 821980 - RNA, 19 nt, Homo sapiens
  misc_RNA (1)...(19): siRNA sense strand
uaaaugcaaugcuguuauc

SEQ ID NO: 821981 - RNA, 19 nt, Homo sapiens
  misc_RNA (1)...(19): siRNA sense strand
ccuuaugucuucaucuaua

SEQ ID NO: 821982 - RNA, 19 nt, Homo sapiens
  misc_RNA (1)...(19): siRNA sense strand
uaacugggcuaaacauuuu

SEQ ID NO: 821983 - RNA, 19 nt, Homo sapiens
  misc_RNA (1)...(19): siRNA sense strand
ucagaaaccuacguaaaug

SEQ ID NO: 821984 - RNA, 19 nt, Homo sapiens
  misc_RNA (1)...(19): siRNA sense strand
gaaguuaucgugaccuuag

SEQ ID NO: 821985 - RNA, 19 nt, Homo sapiens
  misc_RNA (1)...(19): siRNA sense strand
aaacagaggccaucagaau

SEQ ID NO: 821986 - RNA, 19 nt, Homo sapiens
  misc_RNA (1)...(19): siRNA sense strand
uggcaucauuccacaguua

SEQ ID NO: 821987 - RNA, 19 nt, Homo sapiens
  misc_RNA (1)...(19): siRNA sense strand
caaggagccucuuuacagu

SEQ ID NO: 821988 - RNA, 19 nt, Homo sapiens
  misc_RNA (1)...(19): siRNA sense strand
uaaguugucugauaucucu

SEQ ID NO: 821989 - RNA, 19 nt, Homo sapiens
  misc_RNA (1)...(19): siRNA sense strand
gcacagugguagcaguaga

SEQ ID NO: 821990 - RNA, 19 nt, Homo sapiens
  misc_RNA (1)...(19): siRNA sense strand
gggcucacauuaaagaaga

SEQ ID NO: 821991 - RNA, 19 nt, Homo sapiens
  misc_RNA (1)...(19): siRNA sense strand
gagcaaucaucaauaaguc

SEQ ID NO: 821992 - RNA, 19 nt, Homo sapiens
  misc_RNA (1)...(19): siRNA sense strand
cugcauaacucccuucuuc

SEQ ID NO: 821993 - RNA, 19 nt, Homo sapiens
  misc_RNA (1)...(19): siRNA sense strand
gaauaagccugagguggau

SEQ ID NO: 821994 - RNA, 19 nt, Homo sapiens
  misc_RNA (1)...(19): siRNA sense strand
cuacaaacaugaaugaaac

SEQ ID NO: 821995 - RNA, 19 nt, Homo sapiens
  misc_RNA (1)...(19): siRNA sense strand
gcccagaauuugaacaguu

SEQ ID NO: 821996 - RNA, 19 nt, Homo sapiens
  misc_RNA (1)...(19): siRNA sense strand
gcucagaaaccuacguaaa

SEQ ID NO: 821997 - RNA, 19 nt, Homo sapiens
  misc_RNA (1)...(19): siRNA sense strand
caaugaagacccacuaaug

SEQ ID NO: 821998 - RNA, 19 nt, Homo sapiens
  misc_RNA (1)...(19): siRNA sense strand
caagagaggaucaugucua

SEQ ID NO: 821999 - RNA, 19 nt, Homo sapiens
  misc_RNA (1)...(19): siRNA sense strand
gauaucaacuacgaugaga

SEQ ID NO: 822000 - RNA, 19 nt, Homo sapiens
  misc_RNA (1)...(19): siRNA sense strand
caugacaacuguaaugaag

SEQ ID NO: 822001 - RNA, 19 nt, Homo sapiens
  misc_RNA (1)...(19): siRNA sense strand
gaaagcgccaucacaccua

SEQ ID NO: 822002 - RNA, 19 nt, Homo sapiens
  misc_RNA (1)...(19): siRNA sense strand
gaucucaaccacuaccuuu

SEQ ID NO: 822003 - RNA, 19 nt, Homo sapiens
  misc_RNA (1)...(19): siRNA sense strand
ggaaauggagaucuuauac

SEQ ID NO: 822004 - RNA, 19 nt, Homo sapiens
  misc_RNA (1)...(19): siRNA sense strand
gggauucuguacuuacuug

SEQ ID NO: 822005 - RNA, 19 nt, Homo sapiens
  misc_RNA (1)...(19): siRNA sense strand
agaaauguccuacucugua

SEQ ID NO: 822006 - RNA, 19 nt, Homo sapiens
  misc_RNA (1)...(19): siRNA sense strand
acauggaaauuuacuguga

SEQ ID NO: 822007 - RNA, 19 nt, Homo sapiens
  misc_RNA (1)...(19): siRNA sense strand
ggaauucgacagucaggaa

SEQ ID NO: 822008 - RNA, 19 nt, Homo sapiens
  misc_RNA (1)...(19): siRNA sense strand
ccaaugggccuuccggaaa

SEQ ID NO: 822009 - RNA, 19 nt, Homo sapiens
  misc_RNA (1)...(19): siRNA sense strand
ugacgucugugaccaguau

SEQ ID NO: 822010 - RNA, 19 nt, Homo sapiens
  misc_RNA (1)...(19): siRNA sense strand
gcuacaaacaugaaugaaa

SEQ ID NO: 822011 - RNA, 19 nt, Homo sapiens
  misc_RNA (1)...(19): siRNA sense strand
ugaaagaguacgagauuug

SEQ ID NO: 822012 - RNA, 19 nt, Homo sapiens
  misc_RNA (1)...(19): siRNA sense strand
gcaacacacuauuggucuu

SEQ ID NO: 822013 - RNA, 19 nt, Homo sapiens
  misc_RNA (1)...(19): siRNA sense strand
cccuuugccuccugaauua

SEQ ID NO: 822014 - RNA, 19 nt, Homo sapiens
  misc_RNA (1)...(19): siRNA sense strand
gaaauggagaucuuauaca

SEQ ID NO: 822015 - RNA, 19 nt, Homo sapiens
  misc_RNA (1)...(19): siRNA sense strand
ggacaguggcagcuacaaa

SEQ ID NO: 822016 - RNA, 19 nt, Homo sapiens
  misc_RNA (1)...(19): siRNA sense strand
ggacuaugagaguaaauug

SEQ ID NO: 822017 - RNA, 19 nt, Homo sapiens
  misc_RNA (1)...(19): siRNA sense strand
caaagucaccagauucgaa

SEQ ID NO: 822018 - RNA, 19 nt, Homo sapiens
  misc_RNA (1)...(19): siRNA sense strand
caucacuccuccagaagaa

SEQ ID NO: 822019 - RNA, 19 nt, Homo sapiens
  misc_RNA (1)...(19): siRNA sense strand
caaugggccuuccggaaau

SEQ ID NO: 822020 - RNA, 19 nt, Homo sapiens
  misc_RNA (1)...(19): siRNA sense strand
gagcaugacuuguggcaua

SEQ ID NO: 822021 - RNA, 19 nt, Homo sapiens
  misc_RNA (1)...(19): siRNA sense strand
gauaaagacugggaagaua

SEQ ID NO: 822022 - RNA, 19 nt, Homo sapiens
  misc_RNA (1)...(19): siRNA sense strand
uuagaaagaugccagaaua

SEQ ID NO: 822023 - RNA, 19 nt, Homo sapiens
  misc_RNA (1)...(19): siRNA sense strand
gaauaugcauugaagcaaa

SEQ ID NO: 822024 - RNA, 19 nt, Homo sapiens
  misc_RNA (1)...(19): siRNA sense strand
gagaauuccuuaaugaaga

SEQ ID NO: 822025 - RNA, 19 nt, Homo sapiens
  misc_RNA (1)...(19): siRNA sense strand
gaucggauauuuaguguca

SEQ ID NO: 822026 - RNA, 19 nt, Homo sapiens
  misc_RNA (1)...(19): siRNA sense strand
uaaaguacauggagaaaca

SEQ ID NO: 822027 - RNA, 19 nt, Homo sapiens
  misc_RNA (1)...(19): siRNA sense strand
caagaucuaugguuaaauc

SEQ ID NO: 822028 - RNA, 19 nt, Homo sapiens
  misc_RNA (1)...(19): siRNA sense strand
gaagcacccuaaugugauu

SEQ ID NO: 822029 - RNA, 19 nt, Homo sapiens
  misc_RNA (1)...(19): siRNA sense strand
gcaaauauccuaguaaugg

SEQ ID NO: 822030 - RNA, 19 nt, Homo sapiens
  misc_RNA (1)...(19): siRNA sense strand
gauccaaccaagagaauua

SEQ ID NO: 822031 - RNA, 19 nt, Homo sapiens
  misc_RNA (1)...(19): siRNA sense strand
caaaggccauugauauaug

SEQ ID NO: 822032 - RNA, 19 nt, Homo sapiens
  misc_RNA (1)...(19): siRNA sense strand
acaguagccucauaaagua

SEQ ID NO: 822033 - RNA, 19 nt, Homo sapiens
  misc_RNA (1)...(19): siRNA sense strand
uaaagccacuagcagauuu

SEQ ID NO: 822034 - RNA, 19 nt, Homo sapiens
  misc_RNA (1)...(19): siRNA sense strand
aaacgagaauuccuuaaug

SEQ ID NO: 822035 - RNA, 19 nt, Homo sapiens
  misc_RNA (1)...(19): siRNA sense strand
caacuggaucggauauuua

SEQ ID NO: 822036 - RNA, 19 nt, Homo sapiens
  misc_RNA (1)...(19): siRNA sense strand
gaauaucccacacuucaaa

SEQ ID NO: 822037 - RNA, 19 nt, Homo sapiens
  misc_RNA (1)...(19): siRNA sense strand
cagcaaauauccuaguaau

SEQ ID NO: 822038 - RNA, 19 nt, Homo sapiens
  misc_RNA (1)...(19): siRNA sense strand
ccaguucucgccugaauua

SEQ ID NO: 822039 - RNA, 19 nt, Homo sapiens
  misc_RNA (1)...(19): siRNA sense strand
gggaagauauuagaaagau

SEQ ID NO: 822040 - RNA, 19 nt, Homo sapiens
  misc_RNA (1)...(19): siRNA sense strand
guagagagauugcacuuuu

SEQ ID NO: 822041 - RNA, 19 nt, Homo sapiens
  misc_RNA (1)...(19): siRNA sense strand
uaaugaagaugauccugaa

SEQ ID NO: 822042 - RNA, 19 nt, Homo sapiens
  misc_RNA (1)...(19): siRNA sense strand
gaaaccagcaaauauccua

SEQ ID NO: 822043 - RNA, 19 nt, Homo sapiens
  misc_RNA (1)...(19): siRNA sense strand
caugacuuguggcauauua

SEQ ID NO: 822044 - RNA, 19 nt, Homo sapiens
  misc_RNA (1)...(19): siRNA sense strand
gaucuaugguuaaauccuu

SEQ ID NO: 822045 - RNA, 19 nt, Homo sapiens
  misc_RNA (1)...(19): siRNA sense strand
gccaagaucuaugguuaaa

SEQ ID NO: 822046 - RNA, 19 nt, Homo sapiens
  misc_RNA (1)...(19): siRNA sense strand
uauggcugcuguuugauua

SEQ ID NO: 822047 - RNA, 19 nt, Homo sapiens
  misc_RNA (1)...(19): siRNA sense strand
ugaagaugauccugaagaa

SEQ ID NO: 822048 - RNA, 19 nt, Homo sapiens
  misc_RNA (1)...(19): siRNA sense strand
ucaacuggaucggauauuu

SEQ ID NO: 822049 - RNA, 19 nt, Homo sapiens
  misc_RNA (1)...(19): siRNA sense strand
gggagcggguggaggauuu

SEQ ID NO: 822050 - RNA, 19 nt, Homo sapiens
  misc_RNA (1)...(19): siRNA sense strand
gcacaggaauauccauguc

SEQ ID NO: 822051 - RNA, 19 nt, Homo sapiens
  misc_RNA (1)...(19): siRNA sense strand
gugcaaggcauuauacaaa

SEQ ID NO: 822052 - RNA, 19 nt, Homo sapiens
  misc_RNA (1)...(19): siRNA sense strand
gaagguauggcugcuguuu

SEQ ID NO: 822053 - RNA, 19 nt, Homo sapiens
  misc_RNA (1)...(19): siRNA sense strand
uacaaaggccauugauaua

SEQ ID NO: 822054 - RNA, 19 nt, Homo sapiens
  misc_RNA (1)...(19): siRNA sense strand
uugccaagaucuaugguua

SEQ ID NO: 822055 - RNA, 19 nt, Homo sapiens
  misc_RNA (1)...(19): siRNA sense strand
aaaggaauaugcauugaag

SEQ ID NO: 822056 - RNA, 19 nt, Homo sapiens
  misc_RNA (1)...(19): siRNA sense strand
caacguaugccaacaguag

SEQ ID NO: 822057 - RNA, 19 nt, Homo sapiens
  misc_RNA (1)...(19): siRNA sense strand
auacaaaggccauugauau

SEQ ID NO: 822058 - RNA, 19 nt, Homo sapiens
  misc_RNA (1)...(19): siRNA sense strand
gaauugaagcacccuaaug

SEQ ID NO: 822059 - RNA, 19 nt, Homo sapiens
  misc_RNA (1)...(19): siRNA sense strand
cagaauaucccacacuuca

SEQ ID NO: 822060 - RNA, 19 nt, Homo sapiens
  misc_RNA (1)...(19): siRNA sense strand
caagcaaucccuuucauca

SEQ ID NO: 822061 - RNA, 19 nt, Homo sapiens
  misc_RNA (1)...(19): siRNA sense strand
gaagaugauccugaagaaa

SEQ ID NO: 822062 - RNA, 19 nt, Homo sapiens
  misc_RNA (1)...(19): siRNA sense strand
gaaaaggaauaugcauuga

SEQ ID NO: 822063 - RNA, 19 nt, Homo sapiens
  misc_RNA (1)...(19): siRNA sense strand
caaacgagaauuccuuaau

SEQ ID NO: 822064 - RNA, 19 nt, Homo sapiens
  misc_RNA (1)...(19): siRNA sense strand
ggaagauauuagaaagaug

SEQ ID NO: 822065 - RNA, 19 nt, Homo sapiens
  misc_RNA (1)...(19): siRNA sense strand
guacgaagggugcaaagug

SEQ ID NO: 822066 - RNA, 19 nt, Homo sapiens
  misc_RNA (1)...(19): siRNA sense strand
uggaggauuuguuugagua

SEQ ID NO: 822067 - RNA, 19 nt, Homo sapiens
  misc_RNA (1)...(19): siRNA sense strand
gagaauugaagcacccuaa

SEQ ID NO: 822068 - RNA, 19 nt, Homo sapiens
  misc_RNA (1)...(19): siRNA sense strand
guaucgggcuccagaacuu

SEQ ID NO: 822069 - RNA, 19 nt, Homo sapiens
  misc_RNA (1)...(19): siRNA sense strand
aacgagaauuccuuaauga

SEQ ID NO: 822070 - RNA, 19 nt, Homo sapiens
  misc_RNA (1)...(19): siRNA sense strand
uccauuaccuccaugcaaa

SEQ ID NO: 822071 - RNA, 19 nt, Homo sapiens
  misc_RNA (1)...(19): siRNA sense strand
guucagggauccucucagu

SEQ ID NO: 822072 - RNA, 19 nt, Homo sapiens
  misc_RNA (1)...(19): siRNA sense strand
ugaaccaggugccuccaaa

SEQ ID NO: 822073 - RNA, 19 nt, Homo sapiens
  misc_RNA (1)...(19): siRNA sense strand
ggaggacccuuugccaaca

SEQ ID NO: 822074 - RNA, 19 nt, Homo sapiens
  misc_RNA (1)...(19): siRNA sense strand
gccagaauaucccacacuu

SEQ ID NO: 822075 - RNA, 19 nt, Homo sapiens
  misc_RNA (1)...(19): siRNA sense strand
agauuuggauccaguaguu

SEQ ID NO: 822076 - RNA, 19 nt, Homo sapiens
  misc_RNA (1)...(19): siRNA sense strand
gcaaggcauuauacaaagg

SEQ ID NO: 822077 - RNA, 19 nt, Homo sapiens
  misc_RNA (1)...(19): siRNA sense strand
gagcacacuuggcuacucu

SEQ ID NO: 822078 - RNA, 19 nt, Homo sapiens
  misc_RNA (1)...(19): siRNA sense strand
uaaagacugggaagauauu

SEQ ID NO: 822079 - RNA, 19 nt, Homo sapiens
  misc_RNA (1)...(19): siRNA sense strand
cagcaaaguguuccucuug

SEQ ID NO: 822080 - RNA, 19 nt, Homo sapiens
  misc_RNA (1)...(19): siRNA sense strand
ccaggugccuccaaacaag

SEQ ID NO: 822081 - RNA, 19 nt, Homo sapiens
  misc_RNA (1)...(19): siRNA sense strand
agguauggcugcuguuuga

SEQ ID NO: 822082 - RNA, 19 nt, Homo sapiens
  misc_RNA (1)...(19): siRNA sense strand
gaacaacguaugccaacag

SEQ ID NO: 822083 - RNA, 19 nt, Homo sapiens
  misc_RNA (1)...(19): siRNA sense strand
gaaagaugccagaauaucc

SEQ ID NO: 822084 - RNA, 19 nt, Homo sapiens
  misc_RNA (1)...(19): siRNA sense strand
gcaaauugggugcuucaca

SEQ ID NO: 822085 - RNA, 19 nt, Homo sapiens
  misc_RNA (1)...(19): siRNA sense strand
caaauugaaggcacaggaa

SEQ ID NO: 822086 - RNA, 19 nt, Homo sapiens
  misc_RNA (1)...(19): siRNA sense strand
gcggaaagauggaaaagau

SEQ ID NO: 822087 - RNA, 19 nt, Homo sapiens
  misc_RNA (1)...(19): siRNA sense strand
gacuuguggcauauuauua

SEQ ID NO: 822088 - RNA, 19 nt, Homo sapiens
  misc_RNA (1)...(19): siRNA sense strand
caacaguagccucauaaag

SEQ ID NO: 822089 - RNA, 19 nt, Homo sapiens
  misc_RNA (1)...(19): siRNA sense strand
gacuugaaaccagcaaaua

SEQ ID NO: 822090 - RNA, 19 nt, Homo sapiens
  misc_RNA (1)...(19): siRNA sense strand
uauacaaaggccauugaua

SEQ ID NO: 822091 - RNA, 19 nt, Homo sapiens
  misc_RNA (1)...(19): siRNA sense strand
uggaaaagaugaaaaggaa

SEQ ID NO: 822092 - RNA, 19 nt, Homo sapiens
  misc_RNA (1)...(19): siRNA sense strand
acaaaggccauugauauau

SEQ ID NO: 822093 - RNA, 19 nt, Homo sapiens
  misc_RNA (1)...(19): siRNA sense strand
ggauuuguuugaguacgaa

SEQ ID NO: 822094 - RNA, 19 nt, Homo sapiens
  misc_RNA (1)...(19): siRNA sense strand
uaucagcacuccaguucuc

SEQ ID NO: 822095 - RNA, 19 nt, Homo sapiens
  misc_RNA (1)...(19): siRNA sense strand
ggaauaugcauugaagcaa

SEQ ID NO: 822096 - RNA, 19 nt, Homo sapiens
  misc_RNA (1)...(19): siRNA sense strand
gccaacaguagccucauaa

SEQ ID NO: 822097 - RNA, 19 nt, Homo sapiens
  misc_RNA (1)...(19): siRNA sense strand
gcggguggaggauuuguuu

SEQ ID NO: 822098 - RNA, 19 nt, Homo sapiens
  misc_RNA (1)...(19): siRNA sense strand
agcaaucccuuucaucaug

SEQ ID NO: 822099 - RNA, 19 nt, Homo sapiens
  misc_RNA (1)...(19): siRNA sense strand
gauauaugggcaauagguu

SEQ ID NO: 822100 - RNA, 19 nt, Homo sapiens
  misc_RNA (1)...(19): siRNA sense strand
ugacuuguggcauauuauu

SEQ ID NO: 822101 - RNA, 19 nt, Homo sapiens
  misc_RNA (1)...(19): siRNA sense strand
aacaguagccucauaaagu

SEQ ID NO: 822102 - RNA, 19 nt, Homo sapiens
  misc_RNA (1)...(19): siRNA sense strand
ugccaacaguagccucaua

SEQ ID NO: 822103 - RNA, 19 nt, Homo sapiens
  misc_RNA (1)...(19): siRNA sense strand
ggaaagauggaaaagauga

SEQ ID NO: 822104 - RNA, 19 nt, Homo sapiens
  misc_RNA (1)...(19): siRNA sense strand
gguuguauauuugcugaau

SEQ ID NO: 822105 - RNA, 19 nt, Homo sapiens
  misc_RNA (1)...(19): siRNA sense strand
uccaguaguugugacauuu

SEQ ID NO: 822106 - RNA, 19 nt, Homo sapiens
  misc_RNA (1)...(19): siRNA sense strand
aaacaagcaaucccuuuca

SEQ ID NO: 822107 - RNA, 19 nt, Homo sapiens
  misc_RNA (1)...(19): siRNA sense strand
gcaccuacggucacgucua

SEQ ID NO: 822108 - RNA, 19 nt, Homo sapiens
  misc_RNA (1)...(19): siRNA sense strand
agaaacuccugaccaugga

SEQ ID NO: 822109 - RNA, 19 nt, Homo sapiens
  misc_RNA (1)...(19): siRNA sense strand
ggguggaggauuuguuuga

SEQ ID NO: 822110 - RNA, 19 nt, Homo sapiens
  misc_RNA (1)...(19): siRNA sense strand
guacauggagaaacacaag

SEQ ID NO: 822111 - RNA, 19 nt, Homo sapiens
  misc_RNA (1)...(19): siRNA sense strand
guauggcugcuguuugauu

SEQ ID NO: 822112 - RNA, 19 nt, Homo sapiens
  misc_RNA (1)...(19): siRNA sense strand
cgagaauuccuuaaugaag

SEQ ID NO: 822113 - RNA, 19 nt, Homo sapiens
  misc_RNA (1)...(19): siRNA sense strand
caaaguguuccucuugcuu

SEQ ID NO: 822114 - RNA, 19 nt, Homo sapiens
  misc_RNA (1)...(19): siRNA sense strand
uugaagcacccuaauguga

SEQ ID NO: 822115 - RNA, 19 nt, Homo sapiens
  misc_RNA (1)...(19): siRNA sense strand
ucauaaaguacauggagaa

SEQ ID NO: 822116 - RNA, 19 nt, Homo sapiens
  misc_RNA (1)...(19): siRNA sense strand
ccagcaaauauccuaguaa

SEQ ID NO: 822117 - RNA, 19 nt, Homo sapiens
  misc_RNA (1)...(19): siRNA sense strand
ucacagagacuugaaacca

SEQ ID NO: 822118 - RNA, 19 nt, Homo sapiens
  misc_RNA (1)...(19): siRNA sense strand
gcauugaagcaaauugaag

SEQ ID NO: 822119 - RNA, 19 nt, Homo sapiens
  misc_RNA (1)...(19): siRNA sense strand
agacugggaagauauuaga

SEQ ID NO: 822120 - RNA, 19 nt, Homo sapiens
  misc_RNA (1)...(19): siRNA sense strand
gagcacauguucaagcauu

SEQ ID NO: 822121 - RNA, 19 nt, Homo sapiens
  misc_RNA (1)...(19): siRNA sense strand
gaccaugacugcaaggauu

SEQ ID NO: 822122 - RNA, 19 nt, Homo sapiens
  misc_RNA (1)...(19): siRNA sense strand
ucacggagcucaagaccuu

SEQ ID NO: 822123 - RNA, 19 nt, Homo sapiens
  misc_RNA (1)...(19): siRNA sense strand
gcaaggauugggugcauaa

SEQ ID NO: 822124 - RNA, 19 nt, Homo sapiens
  misc_RNA (1)...(19): siRNA sense strand
gaacauugugcccaucauu

SEQ ID NO: 822125 - RNA, 19 nt, Homo sapiens
  misc_RNA (1)...(19): siRNA sense strand
ggaaggaggccgagguuca

SEQ ID NO: 822126 - RNA, 19 nt, Homo sapiens
  misc_RNA (1)...(19): siRNA sense strand
gagcguggcaggcaucuug

SEQ ID NO: 822127 - RNA, 19 nt, Homo sapiens
  misc_RNA (1)...(19): siRNA sense strand
ucaagaccuucgccaacua

SEQ ID NO: 822128 - RNA, 19 nt, Homo sapiens
  misc_RNA (1)...(19): siRNA sense strand
ggagauugugacugcuuua

SEQ ID NO: 822129 - RNA, 19 nt, Homo sapiens
  misc_RNA (1)...(19): siRNA sense strand
gcuggaagcaggcaaguuc

SEQ ID NO: 822130 - RNA, 19 nt, Homo sapiens
  misc_RNA (1)...(19): siRNA sense strand
ugccguugcucgacucuaa

SEQ ID NO: 822131 - RNA, 19 nt, Homo sapiens
  misc_RNA (1)...(19): siRNA sense strand
uggcuucagugucuucauu

SEQ ID NO: 822132 - RNA, 19 nt, Homo sapiens
  misc_RNA (1)...(19): siRNA sense strand
cugcauggcuucagugucu

SEQ ID NO: 822133 - RNA, 19 nt, Homo sapiens
  misc_RNA (1)...(19): siRNA sense strand
ggacaugcaggcugugcuu

SEQ ID NO: 822134 - RNA, 19 nt, Homo sapiens
  misc_RNA (1)...(19): siRNA sense strand
uagcgguguuggcgacuaa

SEQ ID NO: 822135 - RNA, 19 nt, Homo sapiens
  misc_RNA (1)...(19): siRNA sense strand
gagauugugacugcuuuaa

SEQ ID NO: 822136 - RNA, 19 nt, Homo sapiens
  misc_RNA (1)...(19): siRNA sense strand
uggacgcggugcuguauug

SEQ ID NO: 822137 - RNA, 19 nt, Homo sapiens
  misc_RNA (1)...(19): siRNA sense strand
gcagcugcauggcuucagu

SEQ ID NO: 822138 - RNA, 19 nt, Homo sapiens
  misc_RNA (1)...(19): siRNA sense strand
gcccuguacugguggcaaa

SEQ ID NO: 822139 - RNA, 19 nt, Homo sapiens
  misc_RNA (1)...(19): siRNA sense strand
ggcaugaaaucgggcauca

SEQ ID NO: 822140 - RNA, 19 nt, Homo sapiens
  misc_RNA (1)...(19): siRNA sense strand
aggauugggugcauaagga

SEQ ID NO: 822141 - RNA, 19 nt, Homo sapiens
  misc_RNA (1)...(19): siRNA sense strand
gcuucagugucuucauuga

SEQ ID NO: 822142 - RNA, 19 nt, Homo sapiens
  misc_RNA (1)...(19): siRNA sense strand
agaccgaccugggcaugaa

SEQ ID NO: 822143 - RNA, 19 nt, Homo sapiens
  misc_RNA (1)...(19): siRNA sense strand
ugcaggcugugcuuacuuu

SEQ ID NO: 822144 - RNA, 19 nt, Homo sapiens
  misc_RNA (1)...(19): siRNA sense strand
gugcauaaggagauuguga

SEQ ID NO: 822145 - RNA, 19 nt, Homo sapiens
  misc_RNA (1)...(19): siRNA sense strand
caugggugcccgcaacuuu

SEQ ID NO: 822146 - RNA, 19 nt, Homo sapiens
  misc_RNA (1)...(19): siRNA sense strand
gcauugggcugggcgugau

SEQ ID NO: 822147 - RNA, 19 nt, Homo sapiens
  misc_RNA (1)...(19): siRNA sense strand
guucccagcuggccagucu

SEQ ID NO: 822148 - RNA, 19 nt, Homo sapiens
  misc_RNA (1)...(19): siRNA sense strand
caagaccuucgccaacuau

SEQ ID NO: 822149 - RNA, 19 nt, Homo sapiens
  misc_RNA (1)...(19): siRNA sense strand
aggcugugcuuacuuucaa

SEQ ID NO: 822150 - RNA, 19 nt, Homo sapiens
  misc_RNA (1)...(19): siRNA sense strand
caggcaaguucgaggacaa

SEQ ID NO: 822151 - RNA, 19 nt, Homo sapiens
  misc_RNA (1)...(19): siRNA sense strand
gaccuucgccaacuauucu

SEQ ID NO: 822152 - RNA, 19 nt, Homo sapiens
  misc_RNA (1)...(19): siRNA sense strand
caucuuggagcacauguuc

SEQ ID NO: 822153 - RNA, 19 nt, Homo sapiens
  misc_RNA (1)...(19): siRNA sense strand
uucagugucuucauugaug

SEQ ID NO: 822154 - RNA, 19 nt, Homo sapiens
  misc_RNA (1)...(19): siRNA sense strand
guagcgguguuggcgacua

SEQ ID NO: 822155 - RNA, 19 nt, Homo sapiens
  misc_RNA (1)...(19): siRNA sense strand
agaucgguuucuccaagua

SEQ ID NO: 822156 - RNA, 19 nt, Homo sapiens
  misc_RNA (1)...(19): siRNA sense strand
cagaucgguuucuccaagu

SEQ ID NO: 822157 - RNA, 19 nt, Homo sapiens
  misc_RNA (1)...(19): siRNA sense strand
gaaggaggccgagguucag

SEQ ID NO: 822158 - RNA, 19 nt, Homo sapiens
  misc_RNA (1)...(19): siRNA sense strand
gacaugcaggcugugcuua

SEQ ID NO: 822159 - RNA, 19 nt, Homo sapiens
  misc_RNA (1)...(19): siRNA sense strand
ucauugauguggagaagcu

SEQ ID NO: 822160 - RNA, 19 nt, Homo sapiens
  misc_RNA (1)...(19): siRNA sense strand
acauugugcccaucauuga

SEQ ID NO: 822161 - RNA, 19 nt, Homo sapiens
  misc_RNA (1)...(19): siRNA sense strand
caggaggccaccauugaga

SEQ ID NO: 822162 - RNA, 19 nt, Homo sapiens
  misc_RNA (1)...(19): siRNA sense strand
ggaacgcgaacccguagag

SEQ ID NO: 822163 - RNA, 19 nt, Homo sapiens
  misc_RNA (1)...(19): siRNA sense strand
uggagcacauguucaagca

SEQ ID NO: 822164 - RNA, 19 nt, Homo sapiens
  misc_RNA (1)...(19): siRNA sense strand
aggagauugugacugcuuu

SEQ ID NO: 822165 - RNA, 19 nt, Homo sapiens
  misc_RNA (1)...(19): siRNA sense strand
ucagugucuucauugaugu

SEQ ID NO: 822166 - RNA, 19 nt, Homo sapiens
  misc_RNA (1)...(19): siRNA sense strand
gcaucacccgcaagagguu

SEQ ID NO: 822167 - RNA, 19 nt, Homo sapiens
  misc_RNA (1)...(19): siRNA sense strand
gcucugacaccaguuugga

SEQ ID NO: 822168 - RNA, 19 nt, Homo sapiens
  misc_RNA (1)...(19): siRNA sense strand
ccaaguacugcgagagcuu

SEQ ID NO: 822169 - RNA, 19 nt, Homo sapiens
  misc_RNA (1)...(19): siRNA sense strand
gcaaugagcucaagaauuc

SEQ ID NO: 822170 - RNA, 19 nt, Homo sapiens
  misc_RNA (1)...(19): siRNA sense strand
ucagagaccuuaugaguga

SEQ ID NO: 822171 - RNA, 19 nt, Homo sapiens
  misc_RNA (1)...(19): siRNA sense strand
agaaagaccuguccaguca

SEQ ID NO: 822172 - RNA, 19 nt, Homo sapiens
  misc_RNA (1)...(19): siRNA sense strand
cagaagagaugggaauauu

SEQ ID NO: 822173 - RNA, 19 nt, Homo sapiens
  misc_RNA (1)...(19): siRNA sense strand
ggagcaagcauuuguuaaa

SEQ ID NO: 822174 - RNA, 19 nt, Homo sapiens
  misc_RNA (1)...(19): siRNA sense strand
gaagagaugggaauauugu

SEQ ID NO: 822175 - RNA, 19 nt, Homo sapiens
  misc_RNA (1)...(19): siRNA sense strand
aggaagagcuggaacaguu

SEQ ID NO: 822176 - RNA, 19 nt, Homo sapiens
  misc_RNA (1)...(19): siRNA sense strand
uaaggacgcugaagagcaa

SEQ ID NO: 822177 - RNA, 19 nt, Homo sapiens
  misc_RNA (1)...(19): siRNA sense strand
gaaguaaggacgcugaaga

SEQ ID NO: 822178 - RNA, 19 nt, Homo sapiens
  misc_RNA (1)...(19): siRNA sense strand
uuagugacauccucuuuaa

SEQ ID NO: 822179 - RNA, 19 nt, Homo sapiens
  misc_RNA (1)...(19): siRNA sense strand
gaaggaaacaaaggaguaa

SEQ ID NO: 822180 - RNA, 19 nt, Homo sapiens
  misc_RNA (1)...(19): siRNA sense strand
uacaggagcuucagcagaa

SEQ ID NO: 822181 - RNA, 19 nt, Homo sapiens
  misc_RNA (1)...(19): siRNA sense strand
ggaagagcuggaacaguua

SEQ ID NO: 822182 - RNA, 19 nt, Homo sapiens
  misc_RNA (1)...(19): siRNA sense strand
gagaacaagcugcaaauca

SEQ ID NO: 822183 - RNA, 19 nt, Homo sapiens
  misc_RNA (1)...(19): siRNA sense strand
gaacucugcccaacaacaa

SEQ ID NO: 822184 - RNA, 19 nt, Homo sapiens
  misc_RNA (1)...(19): siRNA sense strand
agaaggcgcuggagaaaca

SEQ ID NO: 822185 - RNA, 19 nt, Homo sapiens
  misc_RNA (1)...(19): siRNA sense strand
uggacaggcugaaagauaa

SEQ ID NO: 822186 - RNA, 19 nt, Homo sapiens
  misc_RNA (1)...(19): siRNA sense strand
ccagagauaacacugauuu

SEQ ID NO: 822187 - RNA, 19 nt, Homo sapiens
  misc_RNA (1)...(19): siRNA sense strand
gggaucugauggcaaagua

SEQ ID NO: 822188 - RNA, 19 nt, Homo sapiens
  misc_RNA (1)...(19): siRNA sense strand
agagggaucugauggcaaa

SEQ ID NO: 822189 - RNA, 19 nt, Homo sapiens
  misc_RNA (1)...(19): siRNA sense strand
gagaggacauaaugauagu

SEQ ID NO: 822190 - RNA, 19 nt, Homo sapiens
  misc_RNA (1)...(19): siRNA sense strand
auacagaaguuacgcaaug

SEQ ID NO: 822191 - RNA, 19 nt, Homo sapiens
  misc_RNA (1)...(19): siRNA sense strand
ggacuguaccugaggauga

SEQ ID NO: 822192 - RNA, 19 nt, Homo sapiens
  misc_RNA (1)...(19): siRNA sense strand
guacaaaacccaaaacaaa

SEQ ID NO: 822193 - RNA, 19 nt, Homo sapiens
  misc_RNA (1)...(19): siRNA sense strand
ccaaaaggaugaucagauu

SEQ ID NO: 822194 - RNA, 19 nt, Homo sapiens
  misc_RNA (1)...(19): siRNA sense strand
ggagaggacauaaugauag

SEQ ID NO: 822195 - RNA, 19 nt, Homo sapiens
  misc_RNA (1)...(19): siRNA sense strand
gggagaggacauaaugaua

SEQ ID NO: 822196 - RNA, 19 nt, Homo sapiens
  misc_RNA (1)...(19): siRNA sense strand
uaugaaggaccaaagguua

SEQ ID NO: 822197 - RNA, 19 nt, Homo sapiens
  misc_RNA (1)...(19): siRNA sense strand
cagaaggcauacagaaguu

SEQ ID NO: 822198 - RNA, 19 nt, Homo sapiens
  misc_RNA (1)...(19): siRNA sense strand
gaagagcuggaacaguuaa

SEQ ID NO: 822199 - RNA, 19 nt, Homo sapiens
  misc_RNA (1)...(19): siRNA sense strand
caacugguuucugguggua

SEQ ID NO: 822200 - RNA, 19 nt, Homo sapiens
  misc_RNA (1)...(19): siRNA sense strand
ccaggaaguucaaggacaa

SEQ ID NO: 822201 - RNA, 19 nt, Homo sapiens
  misc_RNA (1)...(19): siRNA sense strand
ugauauugcuccaagaaau

SEQ ID NO: 822202 - RNA, 19 nt, Homo sapiens
  misc_RNA (1)...(19): siRNA sense strand
ggaggaugcucugcagguu

SEQ ID NO: 822203 - RNA, 19 nt, Homo sapiens
  misc_RNA (1)...(19): siRNA sense strand
gggacucuuuccuuuauga

SEQ ID NO: 822204 - RNA, 19 nt, Homo sapiens
  misc_RNA (1)...(19): siRNA sense strand
gauaucggcuacugucaag

SEQ ID NO: 822205 - RNA, 19 nt, Homo sapiens
  misc_RNA (1)...(19): siRNA sense strand
gcagaaggcgcuggagaaa

SEQ ID NO: 822206 - RNA, 19 nt, Homo sapiens
  misc_RNA (1)...(19): siRNA sense strand
gggcauccaaauuccauua

SEQ ID NO: 822207 - RNA, 19 nt, Homo sapiens
  misc_RNA (1)...(19): siRNA sense strand
gagcaagcauuuguuaaac

SEQ ID NO: 822208 - RNA, 19 nt, Homo sapiens
  misc_RNA (1)...(19): siRNA sense strand
gaacuggacaggcugaaag

SEQ ID NO: 822209 - RNA, 19 nt, Homo sapiens
  misc_RNA (1)...(19): siRNA sense strand
gaucugauggcaaaguauu

SEQ ID NO: 822210 - RNA, 19 nt, Homo sapiens
  misc_RNA (1)...(19): siRNA sense strand
ggaacaagaagaugcuuuc

SEQ ID NO: 822211 - RNA, 19 nt, Homo sapiens
  misc_RNA (1)...(19): siRNA sense strand
guuagugacauccucuuua

SEQ ID NO: 822212 - RNA, 19 nt, Homo sapiens
  misc_RNA (1)...(19): siRNA sense strand
cgacuacacucucaucacu

SEQ ID NO: 822213 - RNA, 19 nt, Homo sapiens
  misc_RNA (1)...(19): siRNA sense strand
gcauccaaauuccauuaau

SEQ ID NO: 822214 - RNA, 19 nt, Homo sapiens
  misc_RNA (1)...(19): siRNA sense strand
ugaaggaaacaaaggagua

SEQ ID NO: 822215 - RNA, 19 nt, Homo sapiens
  misc_RNA (1)...(19): siRNA sense strand
guaacagucuugacauggu

SEQ ID NO: 822216 - RNA, 19 nt, Homo sapiens
  misc_RNA (1)...(19): siRNA sense strand
acucucagcucuacgaaga

SEQ ID NO: 822217 - RNA, 19 nt, Homo sapiens
  misc_RNA (1)...(19): siRNA sense strand
uggaacaguuaaagaaaga

SEQ ID NO: 822218 - RNA, 19 nt, Homo sapiens
  misc_RNA (1)...(19): siRNA sense strand
acuacacucucaucacuuu

SEQ ID NO: 822219 - RNA, 19 nt, Homo sapiens
  misc_RNA (1)...(19): siRNA sense strand
ccucgagacuauuauacaa

SEQ ID NO: 822220 - RNA, 19 nt, Homo sapiens
  misc_RNA (1)...(19): siRNA sense strand
uuucaugccucgagacuau

SEQ ID NO: 822221 - RNA, 19 nt, Homo sapiens
  misc_RNA (1)...(19): siRNA sense strand
aaccucaucuugucaguga

SEQ ID NO: 822222 - RNA, 19 nt, Homo sapiens
  misc_RNA (1)...(19): siRNA sense strand
gauauugcuccaagaaaug

SEQ ID NO: 822223 - RNA, 19 nt, Homo sapiens
  misc_RNA (1)...(19): siRNA sense strand
ggaauauuguaacagucuu

SEQ ID NO: 822224 - RNA, 19 nt, Homo sapiens
  misc_RNA (1)...(19): siRNA sense strand
guacaaggaagaggagauu

SEQ ID NO: 822225 - RNA, 19 nt, Homo sapiens
  misc_RNA (1)...(19): siRNA sense strand
gaaggaccaaagguuauuu

SEQ ID NO: 822226 - RNA, 19 nt, Homo sapiens
  misc_RNA (1)...(19): siRNA sense strand
ggagagagagggaucugau

SEQ ID NO: 822227 - RNA, 19 nt, Homo sapiens
  misc_RNA (1)...(19): siRNA sense strand
guacaaagucgacuacacu

SEQ ID NO: 822228 - RNA, 19 nt, Homo sapiens
  misc_RNA (1)...(19): siRNA sense strand
guucagagaccuuaugagu

SEQ ID NO: 822229 - RNA, 19 nt, Homo sapiens
  misc_RNA (1)...(19): siRNA sense strand
ggucuuguagccagagaua

SEQ ID NO: 822230 - RNA, 19 nt, Homo sapiens
  misc_RNA (1)...(19): siRNA sense strand
gagcuggaacaguuaaaga

SEQ ID NO: 822231 - RNA, 19 nt, Homo sapiens
  misc_RNA (1)...(19): siRNA sense strand
cuacuucacucgcacuauc

SEQ ID NO: 822232 - RNA, 19 nt, Homo sapiens
  misc_RNA (1)...(19): siRNA sense strand
caagauucgaugucuauau

SEQ ID NO: 822233 - RNA, 19 nt, Homo sapiens
  misc_RNA (1)...(19): siRNA sense strand
uggauagugucguuaguga

SEQ ID NO: 822234 - RNA, 19 nt, Homo sapiens
  misc_RNA (1)...(19): siRNA sense strand
gcaagcauuuguuaaaccu

SEQ ID NO: 822235 - RNA, 19 nt, Homo sapiens
  misc_RNA (1)...(19): siRNA sense strand
ccagauagaaaguaaauac

SEQ ID NO: 822236 - RNA, 19 nt, Homo sapiens
  misc_RNA (1)...(19): siRNA sense strand
aaagaccuguccagucaga

SEQ ID NO: 822237 - RNA, 19 nt, Homo sapiens
  misc_RNA (1)...(19): siRNA sense strand
agaacaagcugcaaaucag

SEQ ID NO: 822238 - RNA, 19 nt, Homo sapiens
  misc_RNA (1)...(19): siRNA sense strand
ggcaaugagcucaagaauu

SEQ ID NO: 822239 - RNA, 19 nt, Homo sapiens
  misc_RNA (1)...(19): siRNA sense strand
gucaaggccuaaacagguu

SEQ ID NO: 822240 - RNA, 19 nt, Homo sapiens
  misc_RNA (1)...(19): siRNA sense strand
gcagaagagaugggaauau

SEQ ID NO: 822241 - RNA, 19 nt, Homo sapiens
  misc_RNA (1)...(19): siRNA sense strand
gcuggaacaguuaaagaaa

SEQ ID NO: 822242 - RNA, 19 nt, Homo sapiens
  misc_RNA (1)...(19): siRNA sense strand
guggugacccuucaaguga

SEQ ID NO: 822243 - RNA, 19 nt, Homo sapiens
  misc_RNA (1)...(19): siRNA sense strand
gcuuucuggugucucguua

SEQ ID NO: 822244 - RNA, 19 nt, Homo sapiens
  misc_RNA (1)...(19): siRNA sense strand
aaaguauucuagccuggaa

SEQ ID NO: 822245 - RNA, 19 nt, Homo sapiens
  misc_RNA (1)...(19): siRNA sense strand
gcucaagaauucgaugucu

SEQ ID NO: 822246 - RNA, 19 nt, Homo sapiens
  misc_RNA (1)...(19): siRNA sense strand
caaagguuauuuuccguuu

SEQ ID NO: 822247 - RNA, 19 nt, Homo sapiens
  misc_RNA (1)...(19): siRNA sense strand
auaugggacucuuuccuuu

SEQ ID NO: 822248 - RNA, 19 nt, Homo sapiens
  misc_RNA (1)...(19): siRNA sense strand
aaugaagagugggaacuuu

SEQ ID NO: 822249 - RNA, 19 nt, Homo sapiens
  misc_RNA (1)...(19): siRNA sense strand
uaauuuacccacacccaaa

SEQ ID NO: 822250 - RNA, 19 nt, Homo sapiens
  misc_RNA (1)...(19): siRNA sense strand
ccuagaggaguccauagua

SEQ ID NO: 822251 - RNA, 19 nt, Homo sapiens
  misc_RNA (1)...(19): siRNA sense strand
cagcaguggugacccuuca

SEQ ID NO: 822252 - RNA, 19 nt, Homo sapiens
  misc_RNA (1)...(19): siRNA sense strand
agagaugggaauauuguaa

SEQ ID NO: 822253 - RNA, 19 nt, Homo sapiens
  misc_RNA (1)...(19): siRNA sense strand
cagagauaacacugauuua

SEQ ID NO: 822254 - RNA, 19 nt, Homo sapiens
  misc_RNA (1)...(19): siRNA sense strand
gacaaguauuucacaagca

SEQ ID NO: 822255 - RNA, 19 nt, Homo sapiens
  misc_RNA (1)...(19): siRNA sense strand
uaugggacucuuuccuuua

SEQ ID NO: 822256 - RNA, 19 nt, Homo sapiens
  misc_RNA (1)...(19): siRNA sense strand
aaagucgacuacacucuca

SEQ ID NO: 822257 - RNA, 19 nt, Homo sapiens
  misc_RNA (1)...(19): siRNA sense strand
acgaagaaaugcagaaagg

SEQ ID NO: 822258 - RNA, 19 nt, Homo sapiens
  misc_RNA (1)...(19): siRNA sense strand
ucucagcucuacgaagaaa

SEQ ID NO: 822259 - RNA, 19 nt, Homo sapiens
  misc_RNA (1)...(19): siRNA sense strand
cuagaggaguccauaguac

SEQ ID NO: 822260 - RNA, 19 nt, Homo sapiens
  misc_RNA (1)...(19): siRNA sense strand
gcaagauucgaugucuaua

SEQ ID NO: 822261 - RNA, 19 nt, Homo sapiens
  misc_RNA (1)...(19): siRNA sense strand
gaagcugccucgguugcau

SEQ ID NO: 822262 - RNA, 19 nt, Homo sapiens
  misc_RNA (1)...(19): siRNA sense strand
ccggagcaagcauuuguua

SEQ ID NO: 822263 - RNA, 19 nt, Homo sapiens
  misc_RNA (1)...(19): siRNA sense strand
gaauauuguaacagucuug

SEQ ID NO: 822264 - RNA, 19 nt, Homo sapiens
  misc_RNA (1)...(19): siRNA sense strand
ggaacucucagcucuacga

SEQ ID NO: 822265 - RNA, 19 nt, Homo sapiens
  misc_RNA (1)...(19): siRNA sense strand
cccaguaugacaaguauuu

SEQ ID NO: 822266 - RNA, 19 nt, Homo sapiens
  misc_RNA (1)...(19): siRNA sense strand
aggaugcucugcagguuga

SEQ ID NO: 822267 - RNA, 19 nt, Homo sapiens
  misc_RNA (1)...(19): siRNA sense strand
ucagaaggcauacagaagu

SEQ ID NO: 822268 - RNA, 19 nt, Homo sapiens
  misc_RNA (1)...(19): siRNA sense strand
uguuaaaccucaucuuguc

SEQ ID NO: 822269 - RNA, 19 nt, Homo sapiens
  misc_RNA (1)...(19): siRNA sense strand
gaaagugccuucccacaga

SEQ ID NO: 822270 - RNA, 19 nt, Homo sapiens
  misc_RNA (1)...(19): siRNA sense strand
guacagauguccucucuug

SEQ ID NO: 822271 - RNA, 19 nt, Homo sapiens
  misc_RNA (1)...(19): siRNA sense strand
caacugcucugccauggua

SEQ ID NO: 822272 - RNA, 19 nt, Homo sapiens
  misc_RNA (1)...(19): siRNA sense strand
gagagaagcuagugaagau

SEQ ID NO: 822273 - RNA, 19 nt, Homo sapiens
  misc_RNA (1)...(19): siRNA sense strand
gagauucuauccacucuuu

SEQ ID NO: 822274 - RNA, 19 nt, Homo sapiens
  misc_RNA (1)...(19): siRNA sense strand
gaacaugucucuucuacac

SEQ ID NO: 822275 - RNA, 19 nt, Homo sapiens
  misc_RNA (1)...(19): siRNA sense strand
ccaagcagcucgucuacuu

SEQ ID NO: 822276 - RNA, 19 nt, Homo sapiens
  misc_RNA (1)...(19): siRNA sense strand
gaagaacucauucgacaga

SEQ ID NO: 822277 - RNA, 19 nt, Homo sapiens
  misc_RNA (1)...(19): siRNA sense strand
gcaggaagaugaggaggaa

SEQ ID NO: 822278 - RNA, 19 nt, Homo sapiens
  misc_RNA (1)...(19): siRNA sense strand
caaaguggguguggaagaa

SEQ ID NO: 822279 - RNA, 19 nt, Homo sapiens
  misc_RNA (1)...(19): siRNA sense strand
gaaccaagcagcucgucua

SEQ ID NO: 822280 - RNA, 19 nt, Homo sapiens
  misc_RNA (1)...(19): siRNA sense strand
gcacuucuaucagcauuau

SEQ ID NO: 822281 - RNA, 19 nt, Homo sapiens
  misc_RNA (1)...(19): siRNA sense strand
acacaaaccugcagcuuuc

SEQ ID NO: 822282 - RNA, 19 nt, Homo sapiens
  misc_RNA (1)...(19): siRNA sense strand
gggcugagcugcaguuugg

SEQ ID NO: 822283 - RNA, 19 nt, Homo sapiens
  misc_RNA (1)...(19): siRNA sense strand
ggaugacccugcccacuga

SEQ ID NO: 822284 - RNA, 19 nt, Homo sapiens
  misc_RNA (1)...(19): siRNA sense strand
ggaagaggaugaagaugag

SEQ ID NO: 822285 - RNA, 19 nt, Homo sapiens
  misc_RNA (1)...(19): siRNA sense strand
gaaaagggccuccacauug

SEQ ID NO: 822286 - RNA, 19 nt, Homo sapiens
  misc_RNA (1)...(19): siRNA sense strand
uaacccgacugcuggauuu

SEQ ID NO: 822287 - RNA, 19 nt, Homo sapiens
  misc_RNA (1)...(19): siRNA sense strand
gguguggccuguaccagua

SEQ ID NO: 822288 - RNA, 19 nt, Homo sapiens
  misc_RNA (1)...(19): siRNA sense strand
agaggaagcugagaaagaa

SEQ ID NO: 822289 - RNA, 19 nt, Homo sapiens
  misc_RNA (1)...(19): siRNA sense strand
gaucaguacuuagaacaga

SEQ ID NO: 822290 - RNA, 19 nt, Homo sapiens
  misc_RNA (1)...(19): siRNA sense strand
gcugggagcuggagaccaa

SEQ ID NO: 822291 - RNA, 19 nt, Homo sapiens
  misc_RNA (1)...(19): siRNA sense strand
ugacagagugugagaagua

SEQ ID NO: 822292 - RNA, 19 nt, Homo sapiens
  misc_RNA (1)...(19): siRNA sense strand
gaaaccacauccucugaag

SEQ ID NO: 822293 - RNA, 19 nt, Homo sapiens
  misc_RNA (1)...(19): siRNA sense strand
ggaagaggaagcugagaaa

SEQ ID NO: 822294 - RNA, 19 nt, Homo sapiens
  misc_RNA (1)...(19): siRNA sense strand
gauggcugcuggaucagua

SEQ ID NO: 822295 - RNA, 19 nt, Homo sapiens
  misc_RNA (1)...(19): siRNA sense strand
aguaugggcugcugucuaa

SEQ ID NO: 822296 - RNA, 19 nt, Homo sapiens
  misc_RNA (1)...(19): siRNA sense strand
augaggagcuggacaauga

SEQ ID NO: 822297 - RNA, 19 nt, Homo sapiens
  misc_RNA (1)...(19): siRNA sense strand
ggaagcugagaaagaauua

SEQ ID NO: 822298 - RNA, 19 nt, Homo sapiens
  misc_RNA (1)...(19): siRNA sense strand
gaggucaucuccaaguaug

SEQ ID NO: 822299 - RNA, 19 nt, Homo sapiens
  misc_RNA (1)...(19): siRNA sense strand
gaacuuagagccagauguc

SEQ ID NO: 822300 - RNA, 19 nt, Homo sapiens
  misc_RNA (1)...(19): siRNA sense strand
gugaugcccuugaccguuu

SEQ ID NO: 822301 - RNA, 19 nt, Homo sapiens
  misc_RNA (1)...(19): siRNA sense strand
ucaaugaccugcucaacuc

SEQ ID NO: 822302 - RNA, 19 nt, Homo sapiens
  misc_RNA (1)...(19): siRNA sense strand
cagaggaggugucaguaga

SEQ ID NO: 822303 - RNA, 19 nt, Homo sapiens
  misc_RNA (1)...(19): siRNA sense strand
uggaugggcuguacccuuu

SEQ ID NO: 822304 - RNA, 19 nt, Homo sapiens
  misc_RNA (1)...(19): siRNA sense strand
ggaugaagaugaggccuau

SEQ ID NO: 822305 - RNA, 19 nt, Homo sapiens
  misc_RNA (1)...(19): siRNA sense strand
ggaagacgaugaggaugau

SEQ ID NO: 822306 - RNA, 19 nt, Homo sapiens
  misc_RNA (1)...(19): siRNA sense strand
gaaguagaaggguugauga

SEQ ID NO: 822307 - RNA, 19 nt, Homo sapiens
  misc_RNA (1)...(19): siRNA sense strand
ggaggcagccagugaaaug

SEQ ID NO: 822308 - RNA, 19 nt, Homo sapiens
  misc_RNA (1)...(19): siRNA sense strand
gcaagcaccuggccaagcu

SEQ ID NO: 822309 - RNA, 19 nt, Homo sapiens
  misc_RNA (1)...(19): siRNA sense strand
gcaggagacgcugaacuua

SEQ ID NO: 822310 - RNA, 19 nt, Homo sapiens
  misc_RNA (1)...(19): siRNA sense strand
gcugcuggaucaguacuua

SEQ ID NO: 822311 - RNA, 19 nt, Homo sapiens
  misc_RNA (1)...(19): siRNA sense strand
ucacgucccuccuggauca

SEQ ID NO: 822312 - RNA, 19 nt, Homo sapiens
  misc_RNA (1)...(19): siRNA sense strand
gaaguacgcacagcucuau

SEQ ID NO: 822313 - RNA, 19 nt, Homo sapiens
  misc_RNA (1)...(19): siRNA sense strand
gcacauggauuuugacagu

SEQ ID NO: 822314 - RNA, 19 nt, Homo sapiens
  misc_RNA (1)...(19): siRNA sense strand
cagaggucaucuccaagua

SEQ ID NO: 822315 - RNA, 19 nt, Homo sapiens
  misc_RNA (1)...(19): siRNA sense strand
ggaagaggaggaagaggaa

SEQ ID NO: 822316 - RNA, 19 nt, Homo sapiens
  misc_RNA (1)...(19): siRNA sense strand
gagcacuucuaucagcauu

SEQ ID NO: 822317 - RNA, 19 nt, Homo sapiens
  misc_RNA (1)...(19): siRNA sense strand
gaaggaggcagccagugaa

SEQ ID NO: 822318 - RNA, 19 nt, Homo sapiens
  misc_RNA (1)...(19): siRNA sense strand
gugaagcgcuaccuuugug

SEQ ID NO: 822319 - RNA, 19 nt, Homo sapiens
  misc_RNA (1)...(19): siRNA sense strand
ggaggaagacgaugaggau

SEQ ID NO: 822320 - RNA, 19 nt, Homo sapiens
  misc_RNA (1)...(19): siRNA sense strand
gaacguagagaaggaugaa

SEQ ID NO: 822321 - RNA, 19 nt, Homo sapiens
  misc_RNA (1)...(19): siRNA sense strand
gauggaguguccugaagug

SEQ ID NO: 822322 - RNA, 19 nt, Homo sapiens
  misc_RNA (1)...(19): siRNA sense strand
ccagguacauugaccaaca

SEQ ID NO: 822323 - RNA, 19 nt, Homo sapiens
  misc_RNA (1)...(19): siRNA sense strand
gugagcaguuugccaggua

SEQ ID NO: 822324 - RNA, 19 nt, Homo sapiens
  misc_RNA (1)...(19): siRNA sense strand
acagaucgcugagagagaa

SEQ ID NO: 822325 - RNA, 19 nt, Homo sapiens
  misc_RNA (1)...(19): siRNA sense strand
gacacaaaccugcagcuuu

SEQ ID NO: 822326 - RNA, 19 nt, Homo sapiens
  misc_RNA (1)...(19): siRNA sense strand
gccgaacccuggaacagaa

SEQ ID NO: 822327 - RNA, 19 nt, Homo sapiens
  misc_RNA (1)...(19): siRNA sense strand
ucacaaagacuauuacaac

SEQ ID NO: 822328 - RNA, 19 nt, Homo sapiens
  misc_RNA (1)...(19): siRNA sense strand
aggcauaccugaacguaga

SEQ ID NO: 822329 - RNA, 19 nt, Homo sapiens
  misc_RNA (1)...(19): siRNA sense strand
ggaaguagaaggguugaug

SEQ ID NO: 822330 - RNA, 19 nt, Homo sapiens
  misc_RNA (1)...(19): siRNA sense strand
ucacugagccagcaagaug

SEQ ID NO: 822331 - RNA, 19 nt, Homo sapiens
  misc_RNA (1)...(19): siRNA sense strand
gaagccaaaucacaaagac

SEQ ID NO: 822332 - RNA, 19 nt, Homo sapiens
  misc_RNA (1)...(19): siRNA sense strand
cgaugacgguggcuacuau

SEQ ID NO: 822333 - RNA, 19 nt, Homo sapiens
  misc_RNA (1)...(19): siRNA sense strand
gcaaaguggguguggaaga

SEQ ID NO: 822334 - RNA, 19 nt, Homo sapiens
  misc_RNA (1)...(19): siRNA sense strand
ccacauugaucagcugguu

SEQ ID NO: 822335 - RNA, 19 nt, Homo sapiens
  misc_RNA (1)...(19): siRNA sense strand
acgcacagcucuauagcaa

SEQ ID NO: 822336 - RNA, 19 nt, Homo sapiens
  misc_RNA (1)...(19): siRNA sense strand
ggauuucccugaggcaaug

SEQ ID NO: 822337 - RNA, 19 nt, Homo sapiens
  misc_RNA (1)...(19): siRNA sense strand
gaccaaagcuccccaugug

SEQ ID NO: 822338 - RNA, 19 nt, Homo sapiens
  misc_RNA (1)...(19): siRNA sense strand
cugagaaccuggaccaaga

SEQ ID NO: 822339 - RNA, 19 nt, Homo sapiens
  misc_RNA (1)...(19): siRNA sense strand
uaaacucuaugagcacuug

SEQ ID NO: 822340 - RNA, 19 nt, Homo sapiens
  misc_RNA (1)...(19): siRNA sense strand
ugcggaugcuggaugauua

SEQ ID NO: 822341 - RNA, 19 nt, Homo sapiens
  misc_RNA (1)...(19): siRNA sense strand
aggagacgcugaacuuaga

SEQ ID NO: 822342 - RNA, 19 nt, Homo sapiens
  misc_RNA (1)...(19): siRNA sense strand
gaggaggugucaguagaga

SEQ ID NO: 822343 - RNA, 19 nt, Homo sapiens
  misc_RNA (1)...(19): siRNA sense strand
gacagucgcuauacauugc

SEQ ID NO: 822344 - RNA, 19 nt, Homo sapiens
  misc_RNA (1)...(19): siRNA sense strand
gcucugccaugguaagcaa

SEQ ID NO: 822345 - RNA, 19 nt, Homo sapiens
  misc_RNA (1)...(19): siRNA sense strand
gcagaaggguccaaauccu

SEQ ID NO: 822346 - RNA, 19 nt, Homo sapiens
  misc_RNA (1)...(19): siRNA sense strand
ugggauggcugcuggauca

SEQ ID NO: 822347 - RNA, 19 nt, Homo sapiens
  misc_RNA (1)...(19): siRNA sense strand
cagggaggguggcaucuau

SEQ ID NO: 822348 - RNA, 19 nt, Homo sapiens
  misc_RNA (1)...(19): siRNA sense strand
gugauucucagcuguuuaa

SEQ ID NO: 822349 - RNA, 19 nt, Homo sapiens
  misc_RNA (1)...(19): siRNA sense strand
gagugauucucagcuguuu

SEQ ID NO: 822350 - RNA, 19 nt, Homo sapiens
  misc_RNA (1)...(19): siRNA sense strand
ggaagccacugaggauaag

SEQ ID NO: 822351 - RNA, 19 nt, Homo sapiens
  misc_RNA (1)...(19): siRNA sense strand
gagugcggaugcuggauga

SEQ ID NO: 822352 - RNA, 19 nt, Homo sapiens
  misc_RNA (1)...(19): siRNA sense strand
auacauugcuggagcuguu

SEQ ID NO: 822353 - RNA, 19 nt, Homo sapiens
  misc_RNA (1)...(19): siRNA sense strand
gcccgaaccucagaagaau

SEQ ID NO: 822354 - RNA, 19 nt, Homo sapiens
  misc_RNA (1)...(19): siRNA sense strand
cagaagaggaggaggaaga

SEQ ID NO: 822355 - RNA, 19 nt, Homo sapiens
  misc_RNA (1)...(19): siRNA sense strand
ggaagccaaaucacaaaga

SEQ ID NO: 822356 - RNA, 19 nt, Homo sapiens
  misc_RNA (1)...(19): siRNA sense strand
cgccagaggucaucuccaa

SEQ ID NO: 822357 - RNA, 19 nt, Homo sapiens
  misc_RNA (1)...(19): siRNA sense strand
ggagcugaccugcuuccua

SEQ ID NO: 822358 - RNA, 19 nt, Homo sapiens
  misc_RNA (1)...(19): siRNA sense strand
gggcagcacucucaaugac

SEQ ID NO: 822359 - RNA, 19 nt, Homo sapiens
  misc_RNA (1)...(19): siRNA sense strand
ccaaauguaaccauggauu

SEQ ID NO: 822360 - RNA, 19 nt, Homo sapiens
  misc_RNA (1)...(19): siRNA sense strand
uggccaagcucaucuccaa

SEQ ID NO: 822361 - RNA, 19 nt, Homo sapiens
  misc_RNA (1)...(19): siRNA sense strand
gaggcacacuacccugcua

SEQ ID NO: 822362 - RNA, 19 nt, Homo sapiens
  misc_RNA (1)...(19): siRNA sense strand
uagaaggguugaugaagca

SEQ ID NO: 822363 - RNA, 19 nt, Homo sapiens
  misc_RNA (1)...(19): siRNA sense strand
ggaaaagggccuccacauu

SEQ ID NO: 822364 - RNA, 19 nt, Homo sapiens
  misc_RNA (1)...(19): siRNA sense strand
guacauugaccaacagauc

SEQ ID NO: 822365 - RNA, 19 nt, Homo sapiens
  misc_RNA (1)...(19): siRNA sense strand
cagacuuugugccucguua

SEQ ID NO: 822366 - RNA, 19 nt, Homo sapiens
  misc_RNA (1)...(19): siRNA sense strand
ugacgggcauccugaauac

SEQ ID NO: 822367 - RNA, 19 nt, Homo sapiens
  misc_RNA (1)...(19): siRNA sense strand
gcaccaagaacagaaccua

SEQ ID NO: 822368 - RNA, 19 nt, Homo sapiens
  misc_RNA (1)...(19): siRNA sense strand
gcugagagacacguuguuu

SEQ ID NO: 822369 - RNA, 19 nt, Homo sapiens
  misc_RNA (1)...(19): siRNA sense strand
ccacagaccuccaggauaa

SEQ ID NO: 822370 - RNA, 19 nt, Homo sapiens
  misc_RNA (1)...(19): siRNA sense strand
gcacacaaaucaguucuug

SEQ ID NO: 822371 - RNA, 19 nt, Homo sapiens
  misc_RNA (1)...(19): siRNA sense strand
gaaguacgagugcacaaua

SEQ ID NO: 822372 - RNA, 19 nt, Homo sapiens
  misc_RNA (1)...(19): siRNA sense strand
gaacagggcaucaaguuuc

SEQ ID NO: 822373 - RNA, 19 nt, Homo sapiens
  misc_RNA (1)...(19): siRNA sense strand
gaagaggaaugggagcuuu

SEQ ID NO: 822374 - RNA, 19 nt, Homo sapiens
  misc_RNA (1)...(19): siRNA sense strand
caaacaaacccuacaaaug

SEQ ID NO: 822375 - RNA, 19 nt, Homo sapiens
  misc_RNA (1)...(19): siRNA sense strand
gaaaccaacugacauacag

SEQ ID NO: 822376 - RNA, 19 nt, Homo sapiens
  misc_RNA (1)...(19): siRNA sense strand
gcauucagauugcagauca

SEQ ID NO: 822377 - RNA, 19 nt, Homo sapiens
  misc_RNA (1)...(19): siRNA sense strand
caaaucaguucuugcuuca

SEQ ID NO: 822378 - RNA, 19 nt, Homo sapiens
  misc_RNA (1)...(19): siRNA sense strand
gaucaucaguugagacaag

SEQ ID NO: 822379 - RNA, 19 nt, Homo sapiens
  misc_RNA (1)...(19): siRNA sense strand
gauugcagaucaucaguug

SEQ ID NO: 822380 - RNA, 19 nt, Homo sapiens
  misc_RNA (1)...(19): siRNA sense strand
ggagucagauggacaacau

SEQ ID NO: 822381 - RNA, 19 nt, Homo sapiens
  misc_RNA (1)...(19): siRNA sense strand
ggaguaccuuucacaucua

SEQ ID NO: 822382 - RNA, 19 nt, Homo sapiens
  misc_RNA (1)...(19): siRNA sense strand
aguguuagcuuccaucaaa

SEQ ID NO: 822383 - RNA, 19 nt, Homo sapiens
  misc_RNA (1)...(19): siRNA sense strand
ggaaagaugccauggaagu

SEQ ID NO: 822384 - RNA, 19 nt, Homo sapiens
  misc_RNA (1)...(19): siRNA sense strand
gagacaagccaccaagauu

SEQ ID NO: 822385 - RNA, 19 nt, Homo sapiens
  misc_RNA (1)...(19): siRNA sense strand
caucuucagcuaucucuua

SEQ ID NO: 822386 - RNA, 19 nt, Homo sapiens
  misc_RNA (1)...(19): siRNA sense strand
aaacaaacccuacaaaugc

SEQ ID NO: 822387 - RNA, 19 nt, Homo sapiens
  misc_RNA (1)...(19): siRNA sense strand
ggccaaccauggacuuauu

SEQ ID NO: 822388 - RNA, 19 nt, Homo sapiens
  misc_RNA (1)...(19): siRNA sense strand
aaucaguucuugcuucauu

SEQ ID NO: 822389 - RNA, 19 nt, Homo sapiens
  misc_RNA (1)...(19): siRNA sense strand
cgggaaagaugccauggaa

SEQ ID NO: 822390 - RNA, 19 nt, Homo sapiens
  misc_RNA (1)...(19): siRNA sense strand
cagcugaccucgggaaaga

SEQ ID NO: 822391 - RNA, 19 nt, Homo sapiens
  misc_RNA (1)...(19): siRNA sense strand
aaccagaacucggauguuu

SEQ ID NO: 822392 - RNA, 19 nt, Homo sapiens
  misc_RNA (1)...(19): siRNA sense strand
ucagcuaucucuuacacuu

SEQ ID NO: 822393 - RNA, 19 nt, Homo sapiens
  misc_RNA (1)...(19): siRNA sense strand
guuaaacauucaugccaaa

SEQ ID NO: 822394 - RNA, 19 nt, Homo sapiens
  misc_RNA (1)...(19): siRNA sense strand
gugaaucggacaaauauga

SEQ ID NO: 822395 - RNA, 19 nt, Homo sapiens
  misc_RNA (1)...(19): siRNA sense strand
uugcuucauucuccaauua

SEQ ID NO: 822396 - RNA, 19 nt, Homo sapiens
  misc_RNA (1)...(19): siRNA sense strand
gauguacacugggaagaug

SEQ ID NO: 822397 - RNA, 19 nt, Homo sapiens
  misc_RNA (1)...(19): siRNA sense strand
ucucccagcugacuucaaa

SEQ ID NO: 822398 - RNA, 19 nt, Homo sapiens
  misc_RNA (1)...(19): siRNA sense strand
caggugaaucggacaaaua

SEQ ID NO: 822399 - RNA, 19 nt, Homo sapiens
  misc_RNA (1)...(19): siRNA sense strand
caaauaugacucccucaga

SEQ ID NO: 822400 - RNA, 19 nt, Homo sapiens
  misc_RNA (1)...(19): siRNA sense strand
acagugagcugcagcacau

SEQ ID NO: 822401 - RNA, 19 nt, Homo sapiens
  misc_RNA (1)...(19): siRNA sense strand
ggagggaacacauguacau

SEQ ID NO: 822402 - RNA, 19 nt, Homo sapiens
  misc_RNA (1)...(19): siRNA sense strand
gaaagaugccauggaagug

SEQ ID NO: 822403 - RNA, 19 nt, Homo sapiens
  misc_RNA (1)...(19): siRNA sense strand
cuggaacucugcacauuug

SEQ ID NO: 822404 - RNA, 19 nt, Homo sapiens
  misc_RNA (1)...(19): siRNA sense strand
ccacuggcuucuucauugu

SEQ ID NO: 822405 - RNA, 19 nt, Homo sapiens
  misc_RNA (1)...(19): siRNA sense strand
ggaggagaccaaucuggaa

SEQ ID NO: 822406 - RNA, 19 nt, Homo sapiens
  misc_RNA (1)...(19): siRNA sense strand
cccacuggcuucuucauug

SEQ ID NO: 822407 - RNA, 19 nt, Homo sapiens
  misc_RNA (1)...(19): siRNA sense strand
aaaugcaacuugugugaca

SEQ ID NO: 822408 - RNA, 19 nt, Homo sapiens
  misc_RNA (1)...(19): siRNA sense strand
gcaaauuuauccagaaaag

SEQ ID NO: 822409 - RNA, 19 nt, Homo sapiens
  misc_RNA (1)...(19): siRNA sense strand
cacaauagcccacgucaag

SEQ ID NO: 822410 - RNA, 19 nt, Homo sapiens
  misc_RNA (1)...(19): siRNA sense strand
agacaagccaccaagauug

SEQ ID NO: 822411 - RNA, 19 nt, Homo sapiens
  misc_RNA (1)...(19): siRNA sense strand
gacgcaaauuuauccagaa

SEQ ID NO: 822412 - RNA, 19 nt, Homo sapiens
  misc_RNA (1)...(19): siRNA sense strand
cgacccgguucgauuagaa

SEQ ID NO: 822413 - RNA, 19 nt, Homo sapiens
  misc_RNA (1)...(19): siRNA sense strand
aaacaaacaaacccuacaa

SEQ ID NO: 822414 - RNA, 19 nt, Homo sapiens
  misc_RNA (1)...(19): siRNA sense strand
gagggaacacauguacaua

SEQ ID NO: 822415 - RNA, 19 nt, Homo sapiens
  misc_RNA (1)...(19): siRNA sense strand
acgcaaauuuauccagaaa

SEQ ID NO: 822416 - RNA, 19 nt, Homo sapiens
  misc_RNA (1)...(19): siRNA sense strand
aagccgggaugauaaguga

SEQ ID NO: 822417 - RNA, 19 nt, Homo sapiens
  misc_RNA (1)...(19): siRNA sense strand
accagagcaucgacacuua

SEQ ID NO: 822418 - RNA, 19 nt, Homo sapiens
  misc_RNA (1)...(19): siRNA sense strand
uagaacagggcaucaaguu

SEQ ID NO: 822419 - RNA, 19 nt, Homo sapiens
  misc_RNA (1)...(19): siRNA sense strand
agacauugcugacauugac

SEQ ID NO: 822420 - RNA, 19 nt, Homo sapiens
  misc_RNA (1)...(19): siRNA sense strand
caagcaucaugaagaggaa

SEQ ID NO: 822421 - RNA, 19 nt, Homo sapiens
  misc_RNA (1)...(19): siRNA sense strand
aggaguaccuuucacaucu

SEQ ID NO: 822422 - RNA, 19 nt, Homo sapiens
  misc_RNA (1)...(19): siRNA sense strand
acaaacaaacccuacaaau

SEQ ID NO: 822423 - RNA, 19 nt, Homo sapiens
  misc_RNA (1)...(19): siRNA sense strand
guacgagugcacaauaugu

SEQ ID NO: 822424 - RNA, 19 nt, Homo sapiens
  misc_RNA (1)...(19): siRNA sense strand
ggagaccaaucuggaagca

SEQ ID NO: 822425 - RNA, 19 nt, Homo sapiens
  misc_RNA (1)...(19): siRNA sense strand
auauguggacgcaaauuua

SEQ ID NO: 822426 - RNA, 19 nt, Homo sapiens
  misc_RNA (1)...(19): siRNA sense strand
gugaacaccuccagaucca

SEQ ID NO: 822427 - RNA, 19 nt, Homo sapiens
  misc_RNA (1)...(19): siRNA sense strand
ggauuuggccaaccaugga

SEQ ID NO: 822428 - RNA, 19 nt, Homo sapiens
  misc_RNA (1)...(19): siRNA sense strand
gacgaagggcgauccauuc

SEQ ID NO: 822429 - RNA, 19 nt, Homo sapiens
  misc_RNA (1)...(19): siRNA sense strand
ccgggaagccuuucaagug

SEQ ID NO: 822430 - RNA, 19 nt, Homo sapiens
  misc_RNA (1)...(19): siRNA sense strand
ggaaguacgagugcacaau

SEQ ID NO: 822431 - RNA, 19 nt, Homo sapiens
  misc_RNA (1)...(19): siRNA sense strand
ccacacaggaguaccuuuc

SEQ ID NO: 822432 - RNA, 19 nt, Homo sapiens
  misc_RNA (1)...(19): siRNA sense strand
ccagauccacacaggagua

SEQ ID NO: 822433 - RNA, 19 nt, Homo sapiens
  misc_RNA (1)...(19): siRNA sense strand
cggagcagcuuacgugaac

SEQ ID NO: 822434 - RNA, 19 nt, Homo sapiens
  misc_RNA (1)...(19): siRNA sense strand
cuucaaggcacacaaauca

SEQ ID NO: 822435 - RNA, 19 nt, Homo sapiens
  misc_RNA (1)...(19): siRNA sense strand
ccagcugacuucaaaucug

SEQ ID NO: 822436 - RNA, 19 nt, Homo sapiens
  misc_RNA (1)...(19): siRNA sense strand
cuugaaaccaacugacaua

SEQ ID NO: 822437 - RNA, 19 nt, Homo sapiens
  misc_RNA (1)...(19): siRNA sense strand
ugaagaggcggaaguacga

SEQ ID NO: 822438 - RNA, 19 nt, Homo sapiens
  misc_RNA (1)...(19): siRNA sense strand
ccugaagccgggaugauaa

SEQ ID NO: 822439 - RNA, 19 nt, Homo sapiens
  misc_RNA (1)...(19): siRNA sense strand
gccugaagccgggaugaua

SEQ ID NO: 822440 - RNA, 19 nt, Homo sapiens
  misc_RNA (1)...(19): siRNA sense strand
caaccauggacuuauucua

SEQ ID NO: 822441 - RNA, 19 nt, Homo sapiens
  misc_RNA (1)...(19): siRNA sense strand
agacgaagggcgauccauu

SEQ ID NO: 822442 - RNA, 19 nt, Homo sapiens
  misc_RNA (1)...(19): siRNA sense strand
agaguuugguuuccugugu

SEQ ID NO: 822443 - RNA, 19 nt, Homo sapiens
  misc_RNA (1)...(19): siRNA sense strand
gaguaccuuucacaucuag

SEQ ID NO: 822444 - RNA, 19 nt, Homo sapiens
  misc_RNA (1)...(19): siRNA sense strand
gccacagaccuccaggaua

SEQ ID NO: 822445 - RNA, 19 nt, Homo sapiens
  misc_RNA (1)...(19): siRNA sense strand
aauauguggacgcaaauuu

SEQ ID NO: 822446 - RNA, 19 nt, Homo sapiens
  misc_RNA (1)...(19): siRNA sense strand
cagcacaucucugauucuc

SEQ ID NO: 822447 - RNA, 19 nt, Homo sapiens
  misc_RNA (1)...(19): siRNA sense strand
caaggcacacaaaucaguu

SEQ ID NO: 822448 - RNA, 19 nt, Homo sapiens
  misc_RNA (1)...(19): siRNA sense strand
ugacauacagcccgacauc

SEQ ID NO: 822449 - RNA, 19 nt, Homo sapiens
  misc_RNA (1)...(19): siRNA sense strand
gcucagcgagaguuugguu

SEQ ID NO: 822450 - RNA, 19 nt, Homo sapiens
  misc_RNA (1)...(19): siRNA sense strand
ccaggugaaucggacaaau

SEQ ID NO: 822451 - RNA, 19 nt, Homo sapiens
  misc_RNA (1)...(19): siRNA sense strand
agaacagggcaucaaguuu

SEQ ID NO: 822452 - RNA, 19 nt, Homo sapiens
  misc_RNA (1)...(19): siRNA sense strand
gaagccgggaugauaagug

SEQ ID NO: 822453 - RNA, 19 nt, Homo sapiens
  misc_RNA (1)...(19): siRNA sense strand
aagccaagcaucaugaaga

SEQ ID NO: 822454 - RNA, 19 nt, Homo sapiens
  misc_RNA (1)...(19): siRNA sense strand
cgagauccacggccacaga

SEQ ID NO: 822455 - RNA, 19 nt, Homo sapiens
  misc_RNA (1)...(19): siRNA sense strand
cugacucucuguagcaaug

SEQ ID NO: 822456 - RNA, 19 nt, Homo sapiens
  misc_RNA (1)...(19): siRNA sense strand
caaacaaacaaacccuaca

SEQ ID NO: 822457 - RNA, 19 nt, Homo sapiens
  misc_RNA (1)...(19): siRNA sense strand
aaguacgagugcacaauau

SEQ ID NO: 822458 - RNA, 19 nt, Homo sapiens
  misc_RNA (1)...(19): siRNA sense strand
uguguccgcuugaaaccaa

SEQ ID NO: 822459 - RNA, 19 nt, Homo sapiens
  misc_RNA (1)...(19): siRNA sense strand
gacaacaugcuggugcaaa

SEQ ID NO: 822460 - RNA, 19 nt, Homo sapiens
  misc_RNA (1)...(19): siRNA sense strand
gauuagaacagggcaucaa

SEQ ID NO: 822461 - RNA, 19 nt, Homo sapiens
  misc_RNA (1)...(19): siRNA sense strand
uauguggacgcaaauuuau

SEQ ID NO: 822462 - RNA, 19 nt, Homo sapiens
  misc_RNA (1)...(19): siRNA sense strand
acauacagcccgacaucuu

SEQ ID NO: 822463 - RNA, 19 nt, Homo sapiens
  misc_RNA (1)...(19): siRNA sense strand
ugagacaagccaccaagau

SEQ ID NO: 822464 - RNA, 19 nt, Homo sapiens
  misc_RNA (1)...(19): siRNA sense strand
cauacagcccgacaucuuc

SEQ ID NO: 822465 - RNA, 19 nt, Homo sapiens
  misc_RNA (1)...(19): siRNA sense strand
ucaaggcacacaaaucagu

SEQ ID NO: 822466 - RNA, 19 nt, Homo sapiens
  misc_RNA (1)...(19): siRNA sense strand
ggaugauaagugacaguga

SEQ ID NO: 822467 - RNA, 19 nt, Homo sapiens
  misc_RNA (1)...(19): siRNA sense strand
gugaguguguccgcuugaa

SEQ ID NO: 822468 - RNA, 19 nt, Homo sapiens
  misc_RNA (1)...(19): siRNA sense strand
ccauggacuuauucuacug

SEQ ID NO: 822469 - RNA, 19 nt, Homo sapiens
  misc_RNA (1)...(19): siRNA sense strand
caaaugaacccaacaauaa

SEQ ID NO: 822470 - RNA, 19 nt, Homo sapiens
  misc_RNA (1)...(19): siRNA sense strand
ggagauucaucgaagauua

SEQ ID NO: 822471 - RNA, 19 nt, Homo sapiens
  misc_RNA (1)...(19): siRNA sense strand
ccaguaugcucuucuguua

SEQ ID NO: 822472 - RNA, 19 nt, Homo sapiens
  misc_RNA (1)...(19): siRNA sense strand
gaugauaaaugacucuuug

SEQ ID NO: 822473 - RNA, 19 nt, Homo sapiens
  misc_RNA (1)...(19): siRNA sense strand
cagaugaacucacaaauuc

SEQ ID NO: 822474 - RNA, 19 nt, Homo sapiens
  misc_RNA (1)...(19): siRNA sense strand
ugauaaagaucuuggcaua

SEQ ID NO: 822475 - RNA, 19 nt, Homo sapiens
  misc_RNA (1)...(19): siRNA sense strand
ucacagacuugaaauugua

SEQ ID NO: 822476 - RNA, 19 nt, Homo sapiens
  misc_RNA (1)...(19): siRNA sense strand
ggacaugucauuaaacuga

SEQ ID NO: 822477 - RNA, 19 nt, Homo sapiens
  misc_RNA (1)...(19): siRNA sense strand
gcacaauccucaaauucuu

SEQ ID NO: 822478 - RNA, 19 nt, Homo sapiens
  misc_RNA (1)...(19): siRNA sense strand
gcaauucuaugcugaagga

SEQ ID NO: 822479 - RNA, 19 nt, Homo sapiens
  misc_RNA (1)...(19): siRNA sense strand
acagauaaguuccauauug

SEQ ID NO: 822480 - RNA, 19 nt, Homo sapiens
  misc_RNA (1)...(19): siRNA sense strand
uaacagcccuccacagaga

SEQ ID NO: 822481 - RNA, 19 nt, Homo sapiens
  misc_RNA (1)...(19): siRNA sense strand
ucaaggaacugggaaguaa

SEQ ID NO: 822482 - RNA, 19 nt, Homo sapiens
  misc_RNA (1)...(19): siRNA sense strand
gaaguaaaggaccaaauaa

SEQ ID NO: 822483 - RNA, 19 nt, Homo sapiens
  misc_RNA (1)...(19): siRNA sense strand
guuaaauccuccagaagua

SEQ ID NO: 822484 - RNA, 19 nt, Homo sapiens
  misc_RNA (1)...(19): siRNA sense strand
cagauaaguuccauauuga

SEQ ID NO: 822485 - RNA, 19 nt, Homo sapiens
  misc_RNA (1)...(19): siRNA sense strand
gaaaccagauugucuuugg

SEQ ID NO: 822486 - RNA, 19 nt, Homo sapiens
  misc_RNA (1)...(19): siRNA sense strand
gccaaugcauuucauguaa

SEQ ID NO: 822487 - RNA, 19 nt, Homo sapiens
  misc_RNA (1)...(19): siRNA sense strand
ccaaauaacagcugugaaa

SEQ ID NO: 822488 - RNA, 19 nt, Homo sapiens
  misc_RNA (1)...(19): siRNA sense strand
aagauuagguucaguagaa

SEQ ID NO: 822489 - RNA, 19 nt, Homo sapiens
  misc_RNA (1)...(19): siRNA sense strand
cgacugacaucuucuggaa

SEQ ID NO: 822490 - RNA, 19 nt, Homo sapiens
  misc_RNA (1)...(19): siRNA sense strand
gaagcuauccugaagaaga

SEQ ID NO: 822491 - RNA, 19 nt, Homo sapiens
  misc_RNA (1)...(19): siRNA sense strand
gauaaaugacucuuuggua

SEQ ID NO: 822492 - RNA, 19 nt, Homo sapiens
  misc_RNA (1)...(19): siRNA sense strand
ucaaaugaacccaacaaua

SEQ ID NO: 822493 - RNA, 19 nt, Homo sapiens
  misc_RNA (1)...(19): siRNA sense strand
ggcagcaaauucuuuauga

SEQ ID NO: 822494 - RNA, 19 nt, Homo sapiens
  misc_RNA (1)...(19): siRNA sense strand
agacuugccuuccugauga

SEQ ID NO: 822495 - RNA, 19 nt, Homo sapiens
  misc_RNA (1)...(19): siRNA sense strand
gagcaaguaucaucucuac

SEQ ID NO: 822496 - RNA, 19 nt, Homo sapiens
  misc_RNA (1)...(19): siRNA sense strand
ccaacacucagcagaauua

SEQ ID NO: 822497 - RNA, 19 nt, Homo sapiens
  misc_RNA (1)...(19): siRNA sense strand
uaggaaagccagaaauuaa

SEQ ID NO: 822498 - RNA, 19 nt, Homo sapiens
  misc_RNA (1)...(19): siRNA sense strand
gauaggaaagccagaaauu

SEQ ID NO: 822499 - RNA, 19 nt, Homo sapiens
  misc_RNA (1)...(19): siRNA sense strand
gaacaucuccauccucaca

SEQ ID NO: 822500 - RNA, 19 nt, Homo sapiens
  misc_RNA (1)...(19): siRNA sense strand
gaauuaaucaagcaccuaa

SEQ ID NO: 822501 - RNA, 19 nt, Homo sapiens
  misc_RNA (1)...(19): siRNA sense strand
gaaacugccuuacauugac

SEQ ID NO: 822502 - RNA, 19 nt, Homo sapiens
  misc_RNA (1)...(19): siRNA sense strand
ggucauaacguaucugaga

SEQ ID NO: 822503 - RNA, 19 nt, Homo sapiens
  misc_RNA (1)...(19): siRNA sense strand
gaggccagcugguuacaga

SEQ ID NO: 822504 - RNA, 19 nt, Homo sapiens
  misc_RNA (1)...(19): siRNA sense strand
agaaguaaaggaccaaaua

SEQ ID NO: 822505 - RNA, 19 nt, Homo sapiens
  misc_RNA (1)...(19): siRNA sense strand
ugggauugcugacugguua

SEQ ID NO: 822506 - RNA, 19 nt, Homo sapiens
  misc_RNA (1)...(19): siRNA sense strand
gagaagagcaaguaucauc

SEQ ID NO: 822507 - RNA, 19 nt, Homo sapiens
  misc_RNA (1)...(19): siRNA sense strand
gcaaauucuuuaugacagu

SEQ ID NO: 822508 - RNA, 19 nt, Homo sapiens
  misc_RNA (1)...(19): siRNA sense strand
ccugacagcuuuaaaucaa

SEQ ID NO: 822509 - RNA, 19 nt, Homo sapiens
  misc_RNA (1)...(19): siRNA sense strand
ccaagacugugguaagaug

SEQ ID NO: 822510 - RNA, 19 nt, Homo sapiens
  misc_RNA (1)...(19): siRNA sense strand
gcucuucuguuaauaaugg

SEQ ID NO: 822511 - RNA, 19 nt, Homo sapiens
  misc_RNA (1)...(19): siRNA sense strand
gaucuuggcauacgaugaa

SEQ ID NO: 822512 - RNA, 19 nt, Homo sapiens
  misc_RNA (1)...(19): siRNA sense strand
ucaggaaacugggaaguga

SEQ ID NO: 822513 - RNA, 19 nt, Homo sapiens
  misc_RNA (1)...(19): siRNA sense strand
ccagaugaacucacaaauu

SEQ ID NO: 822514 - RNA, 19 nt, Homo sapiens
  misc_RNA (1)...(19): siRNA sense strand
gcaggagauucaucgaaga

SEQ ID NO: 822515 - RNA, 19 nt, Homo sapiens
  misc_RNA (1)...(19): siRNA sense strand
uggagaauuucaccacaua

SEQ ID NO: 822516 - RNA, 19 nt, Homo sapiens
  misc_RNA (1)...(19): siRNA sense strand
ggaaagcaguauccguauc

SEQ ID NO: 822517 - RNA, 19 nt, Homo sapiens
  misc_RNA (1)...(19): siRNA sense strand
cauaugaugucaaacagau

SEQ ID NO: 822518 - RNA, 19 nt, Homo sapiens
  misc_RNA (1)...(19): siRNA sense strand
uagggaaguuugggaguua

SEQ ID NO: 822519 - RNA, 19 nt, Homo sapiens
  misc_RNA (1)...(19): siRNA sense strand
ggaagaaauaucugugcua

SEQ ID NO: 822520 - RNA, 19 nt, Homo sapiens
  misc_RNA (1)...(19): siRNA sense strand
ggaagggaauugcuauugc

SEQ ID NO: 822521 - RNA, 19 nt, Homo sapiens
  misc_RNA (1)...(19): siRNA sense strand
gaaugaggagcccguguuu

SEQ ID NO: 822522 - RNA, 19 nt, Homo sapiens
  misc_RNA (1)...(19): siRNA sense strand
gaauuucaccacauagcua

SEQ ID NO: 822523 - RNA, 19 nt, Homo sapiens
  misc_RNA (1)...(19): siRNA sense strand
gcaucaagacauucaguuu

SEQ ID NO: 822524 - RNA, 19 nt, Homo sapiens
  misc_RNA (1)...(19): siRNA sense strand
guggucagccuacauagua

SEQ ID NO: 822525 - RNA, 19 nt, Homo sapiens
  misc_RNA (1)...(19): siRNA sense strand
gaaacugggaagugauaaa

SEQ ID NO: 822526 - RNA, 19 nt, Homo sapiens
  misc_RNA (1)...(19): siRNA sense strand
aaaccgagcucagaacauc

SEQ ID NO: 822527 - RNA, 19 nt, Homo sapiens
  misc_RNA (1)...(19): siRNA sense strand
gcaaguaucaucucuacag

SEQ ID NO: 822528 - RNA, 19 nt, Homo sapiens
  misc_RNA (1)...(19): siRNA sense strand
ggagugaauuauacuaugc

SEQ ID NO: 822529 - RNA, 19 nt, Homo sapiens
  misc_RNA (1)...(19): siRNA sense strand
cagccagugugcuacauaa

SEQ ID NO: 822530 - RNA, 19 nt, Homo sapiens
  misc_RNA (1)...(19): siRNA sense strand
gggauuccguacucauuga

SEQ ID NO: 822531 - RNA, 19 nt, Homo sapiens
  misc_RNA (1)...(19): siRNA sense strand
gaagauaggaaagccagaa

SEQ ID NO: 822532 - RNA, 19 nt, Homo sapiens
  misc_RNA (1)...(19): siRNA sense strand
ugaagaagaagauaggaaa

SEQ ID NO: 822533 - RNA, 19 nt, Homo sapiens
  misc_RNA (1)...(19): siRNA sense strand
gaagggaauugcuauugcu

SEQ ID NO: 822534 - RNA, 19 nt, Homo sapiens
  misc_RNA (1)...(19): siRNA sense strand
agaaauaucugugcuacca

SEQ ID NO: 822535 - RNA, 19 nt, Homo sapiens
  misc_RNA (1)...(19): siRNA sense strand
ugaaacugccuuacauuga

SEQ ID NO: 822536 - RNA, 19 nt, Homo sapiens
  misc_RNA (1)...(19): siRNA sense strand
ugacagcuuuaaaucaaga

SEQ ID NO: 822537 - RNA, 19 nt, Homo sapiens
  misc_RNA (1)...(19): siRNA sense strand
uaucaucucuacagcacaa

SEQ ID NO: 822538 - RNA, 19 nt, Homo sapiens
  misc_RNA (1)...(19): siRNA sense strand
cgacuaugaacuuccuuua

SEQ ID NO: 822539 - RNA, 19 nt, Homo sapiens
  misc_RNA (1)...(19): siRNA sense strand
gagaaagacuugccuuccu

SEQ ID NO: 822540 - RNA, 19 nt, Homo sapiens
  misc_RNA (1)...(19): siRNA sense strand
gaggcucgguggaucaaug

SEQ ID NO: 822541 - RNA, 19 nt, Homo sapiens
  misc_RNA (1)...(19): siRNA sense strand
aauaaaagcuggagugaau

SEQ ID NO: 822542 - RNA, 19 nt, Homo sapiens
  misc_RNA (1)...(19): siRNA sense strand
acuaugaacuuccuuuaca

SEQ ID NO: 822543 - RNA, 19 nt, Homo sapiens
  misc_RNA (1)...(19): siRNA sense strand
gggaagugauaaagaucuu

SEQ ID NO: 822544 - RNA, 19 nt, Homo sapiens
  misc_RNA (1)...(19): siRNA sense strand
guuaaauggguaagcaaua

SEQ ID NO: 822545 - RNA, 19 nt, Homo sapiens
  misc_RNA (1)...(19): siRNA sense strand
gacggcagcaaauucuuua

SEQ ID NO: 822546 - RNA, 19 nt, Homo sapiens
  misc_RNA (1)...(19): siRNA sense strand
ggaaccagaagaagaugaa

SEQ ID NO: 822547 - RNA, 19 nt, Homo sapiens
  misc_RNA (1)...(19): siRNA sense strand
uaucacagacuugaaauug

SEQ ID NO: 822548 - RNA, 19 nt, Homo sapiens
  misc_RNA (1)...(19): siRNA sense strand
aagcuauccugaagaagaa

SEQ ID NO: 822549 - RNA, 19 nt, Homo sapiens
  misc_RNA (1)...(19): siRNA sense strand
ccaguggucagccuacaua

SEQ ID NO: 822550 - RNA, 19 nt, Homo sapiens
  misc_RNA (1)...(19): siRNA sense strand
ccaaugcauuucauguaau

SEQ ID NO: 822551 - RNA, 19 nt, Homo sapiens
  misc_RNA (1)...(19): siRNA sense strand
uaaggcaggucaaaugaac

SEQ ID NO: 822552 - RNA, 19 nt, Homo sapiens
  misc_RNA (1)...(19): siRNA sense strand
ucauggaacugcugacaca

SEQ ID NO: 822553 - RNA, 19 nt, Homo sapiens
  misc_RNA (1)...(19): siRNA sense strand
guuguaugcucacucauca

SEQ ID NO: 822554 - RNA, 19 nt, Homo sapiens
  misc_RNA (1)...(19): siRNA sense strand
gccagcugguuacagauaa

SEQ ID NO: 822555 - RNA, 19 nt, Homo sapiens
  misc_RNA (1)...(19): siRNA sense strand
aauaauggaugaagaacca

SEQ ID NO: 822556 - RNA, 19 nt, Homo sapiens
  misc_RNA (1)...(19): siRNA sense strand
ggacaacccagcaaaauau

SEQ ID NO: 822557 - RNA, 19 nt, Homo sapiens
  misc_RNA (1)...(19): siRNA sense strand
caugccaccugacagcuuu

SEQ ID NO: 822558 - RNA, 19 nt, Homo sapiens
  misc_RNA (1)...(19): siRNA sense strand
acagcacaauccucaaauu

SEQ ID NO: 822559 - RNA, 19 nt, Homo sapiens
  misc_RNA (1)...(19): siRNA sense strand
cagcagaauuaaucaagca

SEQ ID NO: 822560 - RNA, 19 nt, Homo sapiens
  misc_RNA (1)...(19): siRNA sense strand
gacaugucauuaaacugaa

SEQ ID NO: 822561 - RNA, 19 nt, Homo sapiens
  misc_RNA (1)...(19): siRNA sense strand
gauccgugguugcaccuau

SEQ ID NO: 822562 - RNA, 19 nt, Homo sapiens
  misc_RNA (1)...(19): siRNA sense strand
caaagcaucaagacauuca

SEQ ID NO: 822563 - RNA, 19 nt, Homo sapiens
  misc_RNA (1)...(19): siRNA sense strand
uaugcucacucaucacuau

SEQ ID NO: 822564 - RNA, 19 nt, Homo sapiens
  misc_RNA (1)...(19): siRNA sense strand
gcaggucuacccagaugaa

SEQ ID NO: 822565 - RNA, 19 nt, Homo sapiens
  misc_RNA (1)...(19): siRNA sense strand
gcaccuaucacagacuuga

SEQ ID NO: 822566 - RNA, 19 nt, Homo sapiens
  misc_RNA (1)...(19): siRNA sense strand
ugacugggauuccguacuc

SEQ ID NO: 822567 - RNA, 19 nt, Homo sapiens
  misc_RNA (1)...(19): siRNA sense strand
aaagcuggagugaauuaua

SEQ ID NO: 822568 - RNA, 19 nt, Homo sapiens
  misc_RNA (1)...(19): siRNA sense strand
gugauuguuugaaggaaga

SEQ ID NO: 822569 - RNA, 19 nt, Homo sapiens
  misc_RNA (1)...(19): siRNA sense strand
gaaagaggaugaacuagag

SEQ ID NO: 822570 - RNA, 19 nt, Homo sapiens
  misc_RNA (1)...(19): siRNA sense strand
gaucguagguucucgaaau

SEQ ID NO: 822571 - RNA, 19 nt, Homo sapiens
  misc_RNA (1)...(19): siRNA sense strand
agaaggagauauuguguuu

SEQ ID NO: 822572 - RNA, 19 nt, Homo sapiens
  misc_RNA (1)...(19): siRNA sense strand
ucgaggagcuucccaguaa

SEQ ID NO: 822573 - RNA, 19 nt, Homo sapiens
  misc_RNA (1)...(19): siRNA sense strand
aaacugggcugaaggaaug

SEQ ID NO: 822574 - RNA, 19 nt, Homo sapiens
  misc_RNA (1)...(19): siRNA sense strand
aaacugggcugaaggaaug

SEQ ID NO: 822575 - RNA, 19 nt, Homo sapiens
  misc_RNA (1)...(19): siRNA sense strand
cuaagcagcugauagaaug

SEQ ID NO: 822576 - RNA, 19 nt, Homo sapiens
  misc_RNA (1)...(19): siRNA sense strand
gaggauggcugguucaaag

SEQ ID NO: 822577 - RNA, 19 nt, Homo sapiens
  misc_RNA (1)...(19): siRNA sense strand
cuaagcagcugauagaaug

SEQ ID NO: 822578 - RNA, 19 nt, Homo sapiens
  misc_RNA (1)...(19): siRNA sense strand
gcagauuauuaaaccguua

SEQ ID NO: 822579 - RNA, 19 nt, Homo sapiens
  misc_RNA (1)...(19): siRNA sense strand
aggcagaacuugaacuuaa

SEQ ID NO: 822580 - RNA, 19 nt, Homo sapiens
  misc_RNA (1)...(19): siRNA sense strand
aaagggacauccaugcaua

SEQ ID NO: 822581 - RNA, 19 nt, Homo sapiens
  misc_RNA (1)...(19): siRNA sense strand
ggaaagaggaugaacuaga

SEQ ID NO: 822582 - RNA, 19 nt, Homo sapiens
  misc_RNA (1)...(19): siRNA sense strand
gcagauuauuaaaccguua

SEQ ID NO: 822583 - RNA, 19 nt, Homo sapiens
  misc_RNA (1)...(19): siRNA sense strand
cagcaaaggugacaucauc

SEQ ID NO: 822584 - RNA, 19 nt, Homo sapiens
  misc_RNA (1)...(19): siRNA sense strand
cagcaaaggugacaucauc

SEQ ID NO: 822585 - RNA, 19 nt, Homo sapiens
  misc_RNA (1)...(19): siRNA sense strand
ccaggaagcuuuguggaaa

SEQ ID NO: 822586 - RNA, 19 nt, Homo sapiens
  misc_RNA (1)...(19): siRNA sense strand
ccaaagcauuauacaacua

SEQ ID NO: 822587 - RNA, 19 nt, Homo sapiens
  misc_RNA (1)...(19): siRNA sense strand
gaacuuaaagaaggagaua

SEQ ID NO: 822588 - RNA, 19 nt, Homo sapiens
  misc_RNA (1)...(19): siRNA sense strand
ccaaagcauuauacaacua

SEQ ID NO: 822589 - RNA, 19 nt, Homo sapiens
  misc_RNA (1)...(19): siRNA sense strand
gcagcacuguggcuaauug

SEQ ID NO: 822590 - RNA, 19 nt, Homo sapiens
  misc_RNA (1)...(19): siRNA sense strand
gaagacaaguggaugaaaa

SEQ ID NO: 822591 - RNA, 19 nt, Homo sapiens
  misc_RNA (1)...(19): siRNA sense strand
gaagacaaguggaugaaaa

SEQ ID NO: 822592 - RNA, 19 nt, Homo sapiens
  misc_RNA (1)...(19): siRNA sense strand
aaaggcacauuacaacgua

SEQ ID NO: 822593 - RNA, 19 nt, Homo sapiens
  misc_RNA (1)...(19): siRNA sense strand
ugaccagauugcacauuua

SEQ ID NO: 822594 - RNA, 19 nt, Homo sapiens
  misc_RNA (1)...(19): siRNA sense strand
gaacuugaacuuaaagaag

SEQ ID NO: 822595 - RNA, 19 nt, Homo sapiens
  misc_RNA (1)...(19): siRNA sense strand
guguguauguugcuauaua

SEQ ID NO: 822596 - RNA, 19 nt, Homo sapiens
  misc_RNA (1)...(19): siRNA sense strand
gggaccaacugcacaaaug

SEQ ID NO: 822597 - RNA, 19 nt, Homo sapiens
  misc_RNA (1)...(19): siRNA sense strand
caaggaagcagacaaagau

SEQ ID NO: 822598 - RNA, 19 nt, Homo sapiens
  misc_RNA (1)...(19): siRNA sense strand
gaccuuaaauucagcaaag

SEQ ID NO: 822599 - RNA, 19 nt, Homo sapiens
  misc_RNA (1)...(19): siRNA sense strand
caaggaagcagacaaagau

SEQ ID NO: 822600 - RNA, 19 nt, Homo sapiens
  misc_RNA (1)...(19): siRNA sense strand
gaccuuaaauucagcaaag

SEQ ID NO: 822601 - RNA, 19 nt, Homo sapiens
  misc_RNA (1)...(19): siRNA sense strand
ggcagaacuugaacuuaaa

SEQ ID NO: 822602 - RNA, 19 nt, Homo sapiens
  misc_RNA (1)...(19): siRNA sense strand
ggaugaaucagccuuguug

SEQ ID NO: 822603 - RNA, 19 nt, Homo sapiens
  misc_RNA (1)...(19): siRNA sense strand
cccagaagcuccagggaaa

SEQ ID NO: 822604 - RNA, 19 nt, Homo sapiens
  misc_RNA (1)...(19): siRNA sense strand
gcuaaagucccuaugucua

SEQ ID NO: 822605 - RNA, 19 nt, Homo sapiens
  misc_RNA (1)...(19): siRNA sense strand
caggauggcugguucaaag

SEQ ID NO: 822606 - RNA, 19 nt, Homo sapiens
  misc_RNA (1)...(19): siRNA sense strand
gagcagcacuguggcuaau

SEQ ID NO: 822607 - RNA, 19 nt, Homo sapiens
  misc_RNA (1)...(19): siRNA sense strand
aaagauugccuuccauuug

SEQ ID NO: 822608 - RNA, 19 nt, Homo sapiens
  misc_RNA (1)...(19): siRNA sense strand
caaagauugccuuccauuu

SEQ ID NO: 822609 - RNA, 19 nt, Homo sapiens
  misc_RNA (1)...(19): siRNA sense strand
aaagauugccuuccauuug

SEQ ID NO: 822610 - RNA, 19 nt, Homo sapiens
  misc_RNA (1)...(19): siRNA sense strand
caaagauugccuuccauuu

SEQ ID NO: 822611 - RNA, 19 nt, Homo sapiens
  misc_RNA (1)...(19): siRNA sense strand
agacaaagauugccuucca

SEQ ID NO: 822612 - RNA, 19 nt, Homo sapiens
  misc_RNA (1)...(19): siRNA sense strand
ggagauauuguguuuguuc

SEQ ID NO: 822613 - RNA, 19 nt, Homo sapiens
  misc_RNA (1)...(19): siRNA sense strand
agacaaguccucaggcuaa

SEQ ID NO: 822614 - RNA, 19 nt, Homo sapiens
  misc_RNA (1)...(19): siRNA sense strand
agacaaagauugccuucca

SEQ ID NO: 822615 - RNA, 19 nt, Homo sapiens
  misc_RNA (1)...(19): siRNA sense strand
uaaagaaggagauauugug

SEQ ID NO: 822616 - RNA, 19 nt, Homo sapiens
  misc_RNA (1)...(19): siRNA sense strand
gagauauuguguuuguuca

SEQ ID NO: 822617 - RNA, 19 nt, Homo sapiens
  misc_RNA (1)...(19): siRNA sense strand
caagggcggugacaaaugc

SEQ ID NO: 822618 - RNA, 19 nt, Homo sapiens
  misc_RNA (1)...(19): siRNA sense strand
aaaggugacaucaucauuu

SEQ ID NO: 822619 - RNA, 19 nt, Homo sapiens
  misc_RNA (1)...(19): siRNA sense strand
aaggagauauuguguuugu

SEQ ID NO: 822620 - RNA, 19 nt, Homo sapiens
  misc_RNA (1)...(19): siRNA sense strand
aaaggugacaucaucauuu

SEQ ID NO: 822621 - RNA, 19 nt, Homo sapiens
  misc_RNA (1)...(19): siRNA sense strand
caaccaaaccagacaagga

SEQ ID NO: 822622 - RNA, 19 nt, Homo sapiens
  misc_RNA (1)...(19): siRNA sense strand
gcacuguggcuaauuguag

SEQ ID NO: 822623 - RNA, 19 nt, Homo sapiens
  misc_RNA (1)...(19): siRNA sense strand
guucaaaggcacauuacaa

SEQ ID NO: 822624 - RNA, 19 nt, Homo sapiens
  misc_RNA (1)...(19): siRNA sense strand
caaaggugacaucaucauu

SEQ ID NO: 822625 - RNA, 19 nt, Homo sapiens
  misc_RNA (1)...(19): siRNA sense strand
gguccugucuugaaugagu

SEQ ID NO: 822626 - RNA, 19 nt, Homo sapiens
  misc_RNA (1)...(19): siRNA sense strand
caguguguauguugcuaua

SEQ ID NO: 822627 - RNA, 19 nt, Homo sapiens
  misc_RNA (1)...(19): siRNA sense strand
gaugauguucugacuguga

SEQ ID NO: 822628 - RNA, 19 nt, Homo sapiens
  misc_RNA (1)...(19): siRNA sense strand
caaaggugacaucaucauu

SEQ ID NO: 822629 - RNA, 19 nt, Homo sapiens
  misc_RNA (1)...(19): siRNA sense strand
gaugauguucugacuguga

SEQ ID NO: 822630 - RNA, 19 nt, Homo sapiens
  misc_RNA (1)...(19): siRNA sense strand
aagcugcccuuggaacuuu

SEQ ID NO: 822631 - RNA, 19 nt, Homo sapiens
  misc_RNA (1)...(19): siRNA sense strand
cuagaccugucguuuguga

SEQ ID NO: 822632 - RNA, 19 nt, Homo sapiens
  misc_RNA (1)...(19): siRNA sense strand
aaacagaggccuuggaaac

SEQ ID NO: 822633 - RNA, 19 nt, Homo sapiens
  misc_RNA (1)...(19): siRNA sense strand
cugaccagauugcacauuu

SEQ ID NO: 822634 - RNA, 19 nt, Homo sapiens
  misc_RNA (1)...(19): siRNA sense strand
agacaaggaagcagacaaa

SEQ ID NO: 822635 - RNA, 19 nt, Homo sapiens
  misc_RNA (1)...(19): siRNA sense strand
ccaacuuugugcagauuau

SEQ ID NO: 822636 - RNA, 19 nt, Homo sapiens
  misc_RNA (1)...(19): siRNA sense strand
agacaaggaagcagacaaa

SEQ ID NO: 822637 - RNA, 19 nt, Homo sapiens
  misc_RNA (1)...(19): siRNA sense strand
ccaacuuugugcagauuau

SEQ ID NO: 822638 - RNA, 19 nt, Homo sapiens
  misc_RNA (1)...(19): siRNA sense strand
gcuaagcagcugauagaau

SEQ ID NO: 822639 - RNA, 19 nt, Homo sapiens
  misc_RNA (1)...(19): siRNA sense strand
ggucuugccuugccagcau

SEQ ID NO: 822640 - RNA, 19 nt, Homo sapiens
  misc_RNA (1)...(19): siRNA sense strand
gcuaagcagcugauagaau

SEQ ID NO: 822641 - RNA, 19 nt, Homo sapiens
  misc_RNA (1)...(19): siRNA sense strand
ucaaacagaggccuuggaa

SEQ ID NO: 822642 - RNA, 19 nt, Homo sapiens
  misc_RNA (1)...(19): siRNA sense strand
cagcaucgcccacccuaga

SEQ ID NO: 822643 - RNA, 19 nt, Homo sapiens
  misc_RNA (1)...(19): siRNA sense strand
cguagguucucgaaaugaa

SEQ ID NO: 822644 - RNA, 19 nt, Homo sapiens
  misc_RNA (1)...(19): siRNA sense strand
gucuagaccugucguuugu

SEQ ID NO: 822645 - RNA, 19 nt, Homo sapiens
  misc_RNA (1)...(19): siRNA sense strand
ucaguuaccaugugccaaa

SEQ ID NO: 822646 - RNA, 19 nt, Homo sapiens
  misc_RNA (1)...(19): siRNA sense strand
uauaaguaccaccggguua

SEQ ID NO: 822647 - RNA, 19 nt, Homo sapiens
  misc_RNA (1)...(19): siRNA sense strand
gccaaagcauuauacaacu

SEQ ID NO: 822648 - RNA, 19 nt, Homo sapiens
  misc_RNA (1)...(19): siRNA sense strand
ucaguuaccaugugccaaa

SEQ ID NO: 822649 - RNA, 19 nt, Homo sapiens
  misc_RNA (1)...(19): siRNA sense strand
gccaaagcauuauacaacu

SEQ ID NO: 822650 - RNA, 19 nt, Homo sapiens
  misc_RNA (1)...(19): siRNA sense strand
ccaccaacuuugugcagau

SEQ ID NO: 822651 - RNA, 19 nt, Homo sapiens
  misc_RNA (1)...(19): siRNA sense strand
gaggcagaacuugaacuua

SEQ ID NO: 822652 - RNA, 19 nt, Homo sapiens
  misc_RNA (1)...(19): siRNA sense strand
gaaggaaugcuggcagaca

SEQ ID NO: 822653 - RNA, 19 nt, Homo sapiens
  misc_RNA (1)...(19): siRNA sense strand
ccaccaacuuugugcagau

SEQ ID NO: 822654 - RNA, 19 nt, Homo sapiens
  misc_RNA (1)...(19): siRNA sense strand
gaaggaaugcuggcagaca

SEQ ID NO: 822655 - RNA, 19 nt, Homo sapiens
  misc_RNA (1)...(19): siRNA sense strand
gcaaaggugacaucaucau

SEQ ID NO: 822656 - RNA, 19 nt, Homo sapiens
  misc_RNA (1)...(19): siRNA sense strand
ucggaaagaggaugaacua

SEQ ID NO: 822657 - RNA, 19 nt, Homo sapiens
  misc_RNA (1)...(19): siRNA sense strand
gacaaagauugccuuccau

SEQ ID NO: 822658 - RNA, 19 nt, Homo sapiens
  misc_RNA (1)...(19): siRNA sense strand
gcaaaggugacaucaucau

SEQ ID NO: 822659 - RNA, 19 nt, Homo sapiens
  misc_RNA (1)...(19): siRNA sense strand
caaaugcauuaaggucuca

SEQ ID NO: 822660 - RNA, 19 nt, Homo sapiens
  misc_RNA (1)...(19): siRNA sense strand
gacaaagauugccuuccau

SEQ ID NO: 822661 - RNA, 19 nt, Homo sapiens
  misc_RNA (1)...(19): siRNA sense strand
aaggaaugcuggcagacaa

SEQ ID NO: 822662 - RNA, 19 nt, Homo sapiens
  misc_RNA (1)...(19): siRNA sense strand
gagugaggcagaacuugaa

SEQ ID NO: 822663 - RNA, 19 nt, Homo sapiens
  misc_RNA (1)...(19): siRNA sense strand
gacagugcuucaucagcuu

SEQ ID NO: 822664 - RNA, 19 nt, Homo sapiens
  misc_RNA (1)...(19): siRNA sense strand
gguaucagcagcucacauc

SEQ ID NO: 822665 - RNA, 19 nt, Homo sapiens
  misc_RNA (1)...(19): siRNA sense strand
uaaagucccuaugucuaca

SEQ ID NO: 822666 - RNA, 19 nt, Homo sapiens
  misc_RNA (1)...(19): siRNA sense strand
caagcuaaagucccuaugu

SEQ ID NO: 822667 - RNA, 19 nt, Homo sapiens
  misc_RNA (1)...(19): siRNA sense strand
aaggaaugcuggcagacaa

SEQ ID NO: 822668 - RNA, 19 nt, Homo sapiens
  misc_RNA (1)...(19): siRNA sense strand
aggaugauguucugacugu

SEQ ID NO: 822669 - RNA, 19 nt, Homo sapiens
  misc_RNA (1)...(19): siRNA sense strand
gaagaaagauggaacauuu

SEQ ID NO: 822670 - RNA, 19 nt, Homo sapiens
  misc_RNA (1)...(19): siRNA sense strand
gaaaauagcugcucaguua

SEQ ID NO: 822671 - RNA, 19 nt, Homo sapiens
  misc_RNA (1)...(19): siRNA sense strand
gauauuagcugcaaugaga

SEQ ID NO: 822672 - RNA, 19 nt, Homo sapiens
  misc_RNA (1)...(19): siRNA sense strand
acagaaagcugcaucauuu

SEQ ID NO: 822673 - RNA, 19 nt, Homo sapiens
  misc_RNA (1)...(19): siRNA sense strand
ggaagaggaugaugauuug

SEQ ID NO: 822674 - RNA, 19 nt, Homo sapiens
  misc_RNA (1)...(19): siRNA sense strand
gagcagacaucaagaaaug

SEQ ID NO: 822675 - RNA, 19 nt, Homo sapiens
  misc_RNA (1)...(19): siRNA sense strand
gcacagauauguuuaaagg

SEQ ID NO: 822676 - RNA, 19 nt, Homo sapiens
  misc_RNA (1)...(19): siRNA sense strand
gaacaaccguggccagaau

SEQ ID NO: 822677 - RNA, 19 nt, Homo sapiens
  misc_RNA (1)...(19): siRNA sense strand
gaucuuccaucauugagua

SEQ ID NO: 822678 - RNA, 19 nt, Homo sapiens
  misc_RNA (1)...(19): siRNA sense strand
gagaaacgauuauccacaa

SEQ ID NO: 822679 - RNA, 19 nt, Homo sapiens
  misc_RNA (1)...(19): siRNA sense strand
gaaguaagacugauucuca

SEQ ID NO: 822680 - RNA, 19 nt, Homo sapiens
  misc_RNA (1)...(19): siRNA sense strand
gcuaauaugucaacacaau

SEQ ID NO: 822681 - RNA, 19 nt, Homo sapiens
  misc_RNA (1)...(19): siRNA sense strand
guaauaaagugaccgaaau

SEQ ID NO: 822682 - RNA, 19 nt, Homo sapiens
  misc_RNA (1)...(19): siRNA sense strand
gccagaaucucacccuaua

SEQ ID NO: 822683 - RNA, 19 nt, Homo sapiens
  misc_RNA (1)...(19): siRNA sense strand
ugaaggaaguaacugauuu

SEQ ID NO: 822684 - RNA, 19 nt, Homo sapiens
  misc_RNA (1)...(19): siRNA sense strand
gaagaaauugggaaguuaa

SEQ ID NO: 822685 - RNA, 19 nt, Homo sapiens
  misc_RNA (1)...(19): siRNA sense strand
gaagaacgaggacuuguga

SEQ ID NO: 822686 - RNA, 19 nt, Homo sapiens
  misc_RNA (1)...(19): siRNA sense strand
gcacauauuggaucauuug

SEQ ID NO: 822687 - RNA, 19 nt, Homo sapiens
  misc_RNA (1)...(19): siRNA sense strand
gaacagggaaaugcacaua

SEQ ID NO: 822688 - RNA, 19 nt, Homo sapiens
  misc_RNA (1)...(19): siRNA sense strand
ccauuuagccaaucauaua

SEQ ID NO: 822689 - RNA, 19 nt, Homo sapiens
  misc_RNA (1)...(19): siRNA sense strand
agaagaaauugggaaguua

SEQ ID NO: 822690 - RNA, 19 nt, Homo sapiens
  misc_RNA (1)...(19): siRNA sense strand
gagcaaauacgacaacuuc

SEQ ID NO: 822691 - RNA, 19 nt, Homo sapiens
  misc_RNA (1)...(19): siRNA sense strand
ucagaaggaucaaauagau

SEQ ID NO: 822692 - RNA, 19 nt, Homo sapiens
  misc_RNA (1)...(19): siRNA sense strand
cagaagaaauugggaaguu

SEQ ID NO: 822693 - RNA, 19 nt, Homo sapiens
  misc_RNA (1)...(19): siRNA sense strand
gcucaucucgccaagaaua

SEQ ID NO: 822694 - RNA, 19 nt, Homo sapiens
  misc_RNA (1)...(19): siRNA sense strand
gaacagaagaacaggauuc

SEQ ID NO: 822695 - RNA, 19 nt, Homo sapiens
  misc_RNA (1)...(19): siRNA sense strand
guaaggugcacauauuuaa

SEQ ID NO: 822696 - RNA, 19 nt, Homo sapiens
  misc_RNA (1)...(19): siRNA sense strand
gguaaggugcacauauuua

SEQ ID NO: 822697 - RNA, 19 nt, Homo sapiens
  misc_RNA (1)...(19): siRNA sense strand
gcaaacagauuagaaaaga

SEQ ID NO: 822698 - RNA, 19 nt, Homo sapiens
  misc_RNA (1)...(19): siRNA sense strand
ugacagaacugaugguuuu

SEQ ID NO: 822699 - RNA, 19 nt, Homo sapiens
  misc_RNA (1)...(19): siRNA sense strand
ggagcaaacagauuagaaa

SEQ ID NO: 822700 - RNA, 19 nt, Homo sapiens
  misc_RNA (1)...(19): siRNA sense strand
ggucgucaguaauaauaaa

SEQ ID NO: 822701 - RNA, 19 nt, Homo sapiens
  misc_RNA (1)...(19): siRNA sense strand
gaauaugacagaacugaug

SEQ ID NO: 822702 - RNA, 19 nt, Homo sapiens
  misc_RNA (1)...(19): siRNA sense strand
cacagaagauguagcaguu

SEQ ID NO: 822703 - RNA, 19 nt, Homo sapiens
  misc_RNA (1)...(19): siRNA sense strand
cuggauuucucuuguaaua

SEQ ID NO: 822704 - RNA, 19 nt, Homo sapiens
  misc_RNA (1)...(19): siRNA sense strand
agaaagaccaggagguaua

SEQ ID NO: 822705 - RNA, 19 nt, Homo sapiens
  misc_RNA (1)...(19): siRNA sense strand
aacauuagccgaaaucuuu

SEQ ID NO: 822706 - RNA, 19 nt, Homo sapiens
  misc_RNA (1)...(19): siRNA sense strand
caacuucgcaacaaucuug

SEQ ID NO: 822707 - RNA, 19 nt, Homo sapiens
  misc_RNA (1)...(19): siRNA sense strand
gaaaggaggcggagcaaac

SEQ ID NO: 822708 - RNA, 19 nt, Homo sapiens
  misc_RNA (1)...(19): siRNA sense strand
acagggaaaugcacauauu

SEQ ID NO: 822709 - RNA, 19 nt, Homo sapiens
  misc_RNA (1)...(19): siRNA sense strand
cagacaguauggaagauuu

SEQ ID NO: 822710 - RNA, 19 nt, Homo sapiens
  misc_RNA (1)...(19): siRNA sense strand
cauuggagcugcacugaug

SEQ ID NO: 822711 - RNA, 19 nt, Homo sapiens
  misc_RNA (1)...(19): siRNA sense strand
gaaggaaguaacugauuug

SEQ ID NO: 822712 - RNA, 19 nt, Homo sapiens
  misc_RNA (1)...(19): siRNA sense strand
cagcacagauauguuuaaa

SEQ ID NO: 822713 - RNA, 19 nt, Homo sapiens
  misc_RNA (1)...(19): siRNA sense strand
ucugaugucugguuauuug

SEQ ID NO: 822714 - RNA, 19 nt, Homo sapiens
  misc_RNA (1)...(19): siRNA sense strand
gaauccagguuaaaaguaa

SEQ ID NO: 822715 - RNA, 19 nt, Homo sapiens
  misc_RNA (1)...(19): siRNA sense strand
ugaccgaaauuccaguuug

SEQ ID NO: 822716 - RNA, 19 nt, Homo sapiens
  misc_RNA (1)...(19): siRNA sense strand
ggaagagcgagagcaaaua

SEQ ID NO: 822717 - RNA, 19 nt, Homo sapiens
  misc_RNA (1)...(19): siRNA sense strand
ucaagcauguugcagaaug

SEQ ID NO: 822718 - RNA, 19 nt, Homo sapiens
  misc_RNA (1)...(19): siRNA sense strand
gaaauuccaguuuguuaca

SEQ ID NO: 822719 - RNA, 19 nt, Homo sapiens
  misc_RNA (1)...(19): siRNA sense strand
gaccgaaauuccaguuugu

SEQ ID NO: 822720 - RNA, 19 nt, Homo sapiens
  misc_RNA (1)...(19): siRNA sense strand
ggauuuacaaugagaagaa

SEQ ID NO: 822721 - RNA, 19 nt, Homo sapiens
  misc_RNA (1)...(19): siRNA sense strand
ggagguauaugauuuuguu

SEQ ID NO: 822722 - RNA, 19 nt, Homo sapiens
  misc_RNA (1)...(19): siRNA sense strand
gagagcagacaucaagaaa

SEQ ID NO: 822723 - RNA, 19 nt, Homo sapiens
  misc_RNA (1)...(19): siRNA sense strand
guaaacgaaugcccucaca

SEQ ID NO: 822724 - RNA, 19 nt, Homo sapiens
  misc_RNA (1)...(19): siRNA sense strand
gaaauuccuucugaugucu

SEQ ID NO: 822725 - RNA, 19 nt, Homo sapiens
  misc_RNA (1)...(19): siRNA sense strand
ccgcucaucucgccaagaa

SEQ ID NO: 822726 - RNA, 19 nt, Homo sapiens
  misc_RNA (1)...(19): siRNA sense strand
gaaagaccaggagguauau

SEQ ID NO: 822727 - RNA, 19 nt, Homo sapiens
  misc_RNA (1)...(19): siRNA sense strand
ggaauuggaagugauaaug

SEQ ID NO: 822728 - RNA, 19 nt, Homo sapiens
  misc_RNA (1)...(19): siRNA sense strand
uaggagaccuucccuuagu

SEQ ID NO: 822729 - RNA, 19 nt, Homo sapiens
  misc_RNA (1)...(19): siRNA sense strand
aaucuugaauccagguuaa

SEQ ID NO: 822730 - RNA, 19 nt, Homo sapiens
  misc_RNA (1)...(19): siRNA sense strand
caacacagaagauguagca

SEQ ID NO: 822731 - RNA, 19 nt, Homo sapiens
  misc_RNA (1)...(19): siRNA sense strand
ucaacacaaucuccaguau

SEQ ID NO: 822732 - RNA, 19 nt, Homo sapiens
  misc_RNA (1)...(19): siRNA sense strand
gcaagacagugauaaugcu

SEQ ID NO: 822733 - RNA, 19 nt, Homo sapiens
  misc_RNA (1)...(19): siRNA sense strand
ucauucaacuucugugaug

SEQ ID NO: 822734 - RNA, 19 nt, Homo sapiens
  misc_RNA (1)...(19): siRNA sense strand
cagaaagcugcaucauuua

SEQ ID NO: 822735 - RNA, 19 nt, Homo sapiens
  misc_RNA (1)...(19): siRNA sense strand
gaagagcgagagcaaauac

SEQ ID NO: 822736 - RNA, 19 nt, Homo sapiens
  misc_RNA (1)...(19): siRNA sense strand
gggaagagcgagagcaaau

SEQ ID NO: 822737 - RNA, 19 nt, Homo sapiens
  misc_RNA (1)...(19): siRNA sense strand
gagcaagacagugauaaug

SEQ ID NO: 822738 - RNA, 19 nt, Homo sapiens
  misc_RNA (1)...(19): siRNA sense strand
gcauguugcagaauggaua

SEQ ID NO: 822739 - RNA, 19 nt, Homo sapiens
  misc_RNA (1)...(19): siRNA sense strand
ccgaaauuccaguuuguua

SEQ ID NO: 822740 - RNA, 19 nt, Homo sapiens
  misc_RNA (1)...(19): siRNA sense strand
gagccucaguggucggaaa

SEQ ID NO: 822741 - RNA, 19 nt, Homo sapiens
  misc_RNA (1)...(19): siRNA sense strand
ggaaaugcacauauuggau

SEQ ID NO: 822742 - RNA, 19 nt, Homo sapiens
  misc_RNA (1)...(19): siRNA sense strand
ucagaaagaccaggaggua

SEQ ID NO: 822743 - RNA, 19 nt, Homo sapiens
  misc_RNA (1)...(19): siRNA sense strand
gaagugauaauggagagaa

SEQ ID NO: 822744 - RNA, 19 nt, Homo sapiens
  misc_RNA (1)...(19): siRNA sense strand
gcugcaucauuuacaagua

SEQ ID NO: 822745 - RNA, 19 nt, Homo sapiens
  misc_RNA (1)...(19): siRNA sense strand
gaaagcugcaucauuuaca

SEQ ID NO: 822746 - RNA, 19 nt, Homo sapiens
  misc_RNA (1)...(19): siRNA sense strand
aacaaacuguggaauguga

SEQ ID NO: 822747 - RNA, 19 nt, Homo sapiens
  misc_RNA (1)...(19): siRNA sense strand
ggacaccacccaagcagau

SEQ ID NO: 822748 - RNA, 19 nt, Homo sapiens
  misc_RNA (1)...(19): siRNA sense strand
aacacaaucuccaguauca

SEQ ID NO: 822749 - RNA, 19 nt, Homo sapiens
  misc_RNA (1)...(19): siRNA sense strand
gguauccauuccagaagaa

SEQ ID NO: 822750 - RNA, 19 nt, Homo sapiens
  misc_RNA (1)...(19): siRNA sense strand
gaugagcaagacagugaua

SEQ ID NO: 822751 - RNA, 19 nt, Homo sapiens
  misc_RNA (1)...(19): siRNA sense strand
ucacagacaguauggaaga

SEQ ID NO: 822752 - RNA, 19 nt, Homo sapiens
  misc_RNA (1)...(19): siRNA sense strand
aggguaaggugcacauauu

SEQ ID NO: 822753 - RNA, 19 nt, Homo sapiens
  misc_RNA (1)...(19): siRNA sense strand
caccagcacagauauguuu

SEQ ID NO: 822754 - RNA, 19 nt, Homo sapiens
  misc_RNA (1)...(19): siRNA sense strand
ggaagaacgaggacuugug

SEQ ID NO: 822755 - RNA, 19 nt, Homo sapiens
  misc_RNA (1)...(19): siRNA sense strand
gguuguucuuugccauuua

SEQ ID NO: 822756 - RNA, 19 nt, Homo sapiens
  misc_RNA (1)...(19): siRNA sense strand
gaaucucacccuauaaucu

SEQ ID NO: 822757 - RNA, 19 nt, Homo sapiens
  misc_RNA (1)...(19): siRNA sense strand
agaaggaucaaauagauga

SEQ ID NO: 822758 - RNA, 19 nt, Homo sapiens
  misc_RNA (1)...(19): siRNA sense strand
ggaugaugauuugaaggaa

SEQ ID NO: 822759 - RNA, 19 nt, Homo sapiens
  misc_RNA (1)...(19): siRNA sense strand
aggaagaggaugaugauuu

SEQ ID NO: 822760 - RNA, 19 nt, Homo sapiens
  misc_RNA (1)...(19): siRNA sense strand
accaggagguauaugauuu

SEQ ID NO: 822761 - RNA, 19 nt, Homo sapiens
  misc_RNA (1)...(19): siRNA sense strand
ggagagaaacgauuaucca

SEQ ID NO: 822762 - RNA, 19 nt, Homo sapiens
  misc_RNA (1)...(19): siRNA sense strand
aaagcugcaucauuuacaa

SEQ ID NO: 822763 - RNA, 19 nt, Homo sapiens
  misc_RNA (1)...(19): siRNA sense strand
gaagaauuaggagaugaaa

SEQ ID NO: 822764 - RNA, 19 nt, Homo sapiens
  misc_RNA (1)...(19): siRNA sense strand
ccucacagccucucacaga

SEQ ID NO: 822765 - RNA, 19 nt, Homo sapiens
  misc_RNA (1)...(19): siRNA sense strand
gaucuuccccuuaaaguuu

SEQ ID NO: 822766 - RNA, 19 nt, Homo sapiens
  misc_RNA (1)...(19): siRNA sense strand
gacagucacauaauaggaa

SEQ ID NO: 822767 - RNA, 19 nt, Homo sapiens
  misc_RNA (1)...(19): siRNA sense strand
aggcggagcaaacagauua

SEQ ID NO: 822768 - RNA, 19 nt, Homo sapiens
  misc_RNA (1)...(19): siRNA sense strand
gaccaggagguauaugauu

SEQ ID NO: 822769 - RNA, 19 nt, Homo sapiens
  misc_RNA (1)...(19): siRNA sense strand
gcagauacauccacugaua

SEQ ID NO: 822770 - RNA, 19 nt, Homo sapiens
  misc_RNA (1)...(19): siRNA sense strand
ccaaagcucuggccucuua

SEQ ID NO: 822771 - RNA, 19 nt, Homo sapiens
  misc_RNA (1)...(19): siRNA sense strand
gacgaaagccucucaaaua

SEQ ID NO: 822772 - RNA, 19 nt, Homo sapiens
  misc_RNA (1)...(19): siRNA sense strand
cagaagagcucacacuaaa

SEQ ID NO: 822773 - RNA, 19 nt, Homo sapiens
  misc_RNA (1)...(19): siRNA sense strand
gaacaaggacucaugaaug

SEQ ID NO: 822774 - RNA, 19 nt, Homo sapiens
  misc_RNA (1)...(19): siRNA sense strand
ccagguaucuguccucauu

SEQ ID NO: 822775 - RNA, 19 nt, Homo sapiens
  misc_RNA (1)...(19): siRNA sense strand
gggaaauccuuuagucaaa

SEQ ID NO: 822776 - RNA, 19 nt, Homo sapiens
  misc_RNA (1)...(19): siRNA sense strand
gagaaaggccuuaugaaug

SEQ ID NO: 822777 - RNA, 19 nt, Homo sapiens
  misc_RNA (1)...(19): siRNA sense strand
ggagaaagaccuuaugugu

SEQ ID NO: 822778 - RNA, 19 nt, Homo sapiens
  misc_RNA (1)...(19): siRNA sense strand
gagaaaggccuuacaagug

SEQ ID NO: 822779 - RNA, 19 nt, Homo sapiens
  misc_RNA (1)...(19): siRNA sense strand
ggagaaaggccuuaugaau

SEQ ID NO: 822780 - RNA, 19 nt, Homo sapiens
  misc_RNA (1)...(19): siRNA sense strand
ccacagcacuaaccucuau

SEQ ID NO: 822781 - RNA, 19 nt, Homo sapiens
  misc_RNA (1)...(19): siRNA sense strand
gcauuuaguugcaauaucu

SEQ ID NO: 822782 - RNA, 19 nt, Homo sapiens
  misc_RNA (1)...(19): siRNA sense strand
ggaaaauccuuuagccaua

SEQ ID NO: 822783 - RNA, 19 nt, Homo sapiens
  misc_RNA (1)...(19): siRNA sense strand
ccauagcacuaaccucuuu

SEQ ID NO: 822784 - RNA, 19 nt, Homo sapiens
  misc_RNA (1)...(19): siRNA sense strand
ccaaagcucugcccuccuu

SEQ ID NO: 822785 - RNA, 19 nt, Homo sapiens
  misc_RNA (1)...(19): siRNA sense strand
ggagaaaggccuuacaagu

SEQ ID NO: 822786 - RNA, 19 nt, Homo sapiens
  misc_RNA (1)...(19): siRNA sense strand
gagaaugugggaaaucuuu

SEQ ID NO: 822787 - RNA, 19 nt, Homo sapiens
  misc_RNA (1)...(19): siRNA sense strand
ggagaaaggccuuaugagu

SEQ ID NO: 822788 - RNA, 19 nt, Homo sapiens
  misc_RNA (1)...(19): siRNA sense strand
ggagaaaggccuuaugagu

SEQ ID NO: 822789 - RNA, 19 nt, Homo sapiens
  misc_RNA (1)...(19): siRNA sense strand
ggagaaaggccuuaugagu

SEQ ID NO: 822790 - RNA, 19 nt, Homo sapiens
  misc_RNA (1)...(19): siRNA sense strand
ggagaaaggccuuaugagu

SEQ ID NO: 822791 - RNA, 19 nt, Homo sapiens
  misc_RNA (1)...(19): siRNA sense strand
gaaagccucucaaauacac

SEQ ID NO: 822792 - RNA, 19 nt, Homo sapiens
  misc_RNA (1)...(19): siRNA sense strand
gaaagcauuuaguugcaau

SEQ ID NO: 822793 - RNA, 19 nt, Homo sapiens
  misc_RNA (1)...(19): siRNA sense strand
ccaagagauuucuggauga

SEQ ID NO: 822794 - RNA, 19 nt, Homo sapiens
  misc_RNA (1)...(19): siRNA sense strand
ggacgaaagccucucaaau

SEQ ID NO: 822795 - RNA, 19 nt, Homo sapiens
  misc_RNA (1)...(19): siRNA sense strand
ggaccaggccucauuuaug

SEQ ID NO: 822796 - RNA, 19 nt, Homo sapiens
  misc_RNA (1)...(19): siRNA sense strand
ucaccuaacucaacaccaa

SEQ ID NO: 822797 - RNA, 19 nt, Homo sapiens
  misc_RNA (1)...(19): siRNA sense strand
caaauccuuucgccaggua

SEQ ID NO: 822798 - RNA, 19 nt, Homo sapiens
  misc_RNA (1)...(19): siRNA sense strand
uugaggauguggccauuua

SEQ ID NO: 822799 - RNA, 19 nt, Homo sapiens
  misc_RNA (1)...(19): siRNA sense strand
ggaaagcauuuaguugcaa

SEQ ID NO: 822800 - RNA, 19 nt, Homo sapiens
  misc_RNA (1)...(19): siRNA sense strand
gaaugugggaaauccuuua

SEQ ID NO: 822801 - RNA, 19 nt, Homo sapiens
  misc_RNA (1)...(19): siRNA sense strand
ggaaaauccuuuagccaaa

SEQ ID NO: 822802 - RNA, 19 nt, Homo sapiens
  misc_RNA (1)...(19): siRNA sense strand
agaaaggccuuaugaaugc

SEQ ID NO: 822803 - RNA, 19 nt, Homo sapiens
  misc_RNA (1)...(19): siRNA sense strand
agaaaucuguccucauuca

SEQ ID NO: 822804 - RNA, 19 nt, Homo sapiens
  misc_RNA (1)...(19): siRNA sense strand
gaccuuaugugugcaguga

SEQ ID NO: 822805 - RNA, 19 nt, Homo sapiens
  misc_RNA (1)...(19): siRNA sense strand
gggaaauccuauagccaaa

SEQ ID NO: 822806 - RNA, 19 nt, Homo sapiens
  misc_RNA (1)...(19): siRNA sense strand
gcucuggccucuuaagaca

SEQ ID NO: 822807 - RNA, 19 nt, Homo sapiens
  misc_RNA (1)...(19): siRNA sense strand
gaaagcacacgguagaaca

SEQ ID NO: 822808 - RNA, 19 nt, Homo sapiens
  misc_RNA (1)...(19): siRNA sense strand
agugggagcuccuugauga

SEQ ID NO: 822809 - RNA, 19 nt, Homo sapiens
  misc_RNA (1)...(19): siRNA sense strand
ggagaaaggccuuaugacu

SEQ ID NO: 822810 - RNA, 19 nt, Homo sapiens
  misc_RNA (1)...(19): siRNA sense strand
uccagaagcuugauaaugg

SEQ ID NO: 822811 - RNA, 19 nt, Homo sapiens
  misc_RNA (1)...(19): siRNA sense strand
aacaaggacucaugaaugu

SEQ ID NO: 822812 - RNA, 19 nt, Homo sapiens
  misc_RNA (1)...(19): siRNA sense strand
aaacucaccuaacucaaca

SEQ ID NO: 822813 - RNA, 19 nt, Homo sapiens
  misc_RNA (1)...(19): siRNA sense strand
ggaaaucuuuuauccgaaa

SEQ ID NO: 822814 - RNA, 19 nt, Homo sapiens
  misc_RNA (1)...(19): siRNA sense strand
gggaaagcauuuaguugca

SEQ ID NO: 822815 - RNA, 19 nt, Homo sapiens
  misc_RNA (1)...(19): siRNA sense strand
agagauuucuggaugaguu

SEQ ID NO: 822816 - RNA, 19 nt, Homo sapiens
  misc_RNA (1)...(19): siRNA sense strand
gcgaugugaugcuggagaa

SEQ ID NO: 822817 - RNA, 19 nt, Homo sapiens
  misc_RNA (1)...(19): siRNA sense strand
gaaugugggaaauccuaua

SEQ ID NO: 822818 - RNA, 19 nt, Homo sapiens
  misc_RNA (1)...(19): siRNA sense strand
cuaaugaaaggccuuauga

SEQ ID NO: 822819 - RNA, 19 nt, Homo sapiens
  misc_RNA (1)...(19): siRNA sense strand
agagagaaaucuguauuca

SEQ ID NO: 822820 - RNA, 19 nt, Homo sapiens
  misc_RNA (1)...(19): siRNA sense strand
gaaauccuauagccaaagc

SEQ ID NO: 822821 - RNA, 19 nt, Homo sapiens
  misc_RNA (1)...(19): siRNA sense strand
ccagaagcuugauaaugga

SEQ ID NO: 822822 - RNA, 19 nt, Homo sapiens
  misc_RNA (1)...(19): siRNA sense strand
guagaacaaggacucauga

SEQ ID NO: 822823 - RNA, 19 nt, Homo sapiens
  misc_RNA (1)...(19): siRNA sense strand
ggauguggccauuuacuuc

SEQ ID NO: 822824 - RNA, 19 nt, Homo sapiens
  misc_RNA (1)...(19): siRNA sense strand
agagagcguuucuguggaa

SEQ ID NO: 822825 - RNA, 19 nt, Homo sapiens
  misc_RNA (1)...(19): siRNA sense strand
acgaaagccucucaaauac

SEQ ID NO: 822826 - RNA, 19 nt, Homo sapiens
  misc_RNA (1)...(19): siRNA sense strand
ucaugaauguagugaaugu

SEQ ID NO: 822827 - RNA, 19 nt, Homo sapiens
  misc_RNA (1)...(19): siRNA sense strand
cagcaggauuagacacuug

SEQ ID NO: 822828 - RNA, 19 nt, Homo sapiens
  misc_RNA (1)...(19): siRNA sense strand
guuauggcaucccuagguu

SEQ ID NO: 822829 - RNA, 19 nt, Homo sapiens
  misc_RNA (1)...(19): siRNA sense strand
gugcagagaaugugggaaa

SEQ ID NO: 822830 - RNA, 19 nt, Homo sapiens
  misc_RNA (1)...(19): siRNA sense strand
gugaaugugggaaaucuuu

SEQ ID NO: 822831 - RNA, 19 nt, Homo sapiens
  misc_RNA (1)...(19): siRNA sense strand
acagaagagcucacacuaa

SEQ ID NO: 822832 - RNA, 19 nt, Homo sapiens
  misc_RNA (1)...(19): siRNA sense strand
ggagcuccuugaugagaug

SEQ ID NO: 822833 - RNA, 19 nt, Homo sapiens
  misc_RNA (1)...(19): siRNA sense strand
agaccacacagcaggauua

SEQ ID NO: 822834 - RNA, 19 nt, Homo sapiens
  misc_RNA (1)...(19): siRNA sense strand
caggaaagcacacgguaga

SEQ ID NO: 822835 - RNA, 19 nt, Homo sapiens
  misc_RNA (1)...(19): siRNA sense strand
cagagaaugugggaaaucu

SEQ ID NO: 822836 - RNA, 19 nt, Homo sapiens
  misc_RNA (1)...(19): siRNA sense strand
guugcaauaucuaccuuau

SEQ ID NO: 822837 - RNA, 19 nt, Homo sapiens
  misc_RNA (1)...(19): siRNA sense strand
gaauguggcaaauccuuuc

SEQ ID NO: 822838 - RNA, 19 nt, Homo sapiens
  misc_RNA (1)...(19): siRNA sense strand
caaggacucaugaauguag

SEQ ID NO: 822839 - RNA, 19 nt, Homo sapiens
  misc_RNA (1)...(19): siRNA sense strand
gcacacgguagaacaagga

SEQ ID NO: 822840 - RNA, 19 nt, Homo sapiens
  misc_RNA (1)...(19): siRNA sense strand
gaagcucuuuaaaguggau

SEQ ID NO: 822841 - RNA, 19 nt, Homo sapiens
  misc_RNA (1)...(19): siRNA sense strand
ugagugcagugaaugugaa

SEQ ID NO: 822842 - RNA, 19 nt, Homo sapiens
  misc_RNA (1)...(19): siRNA sense strand
cagauacauccacugauaa

SEQ ID NO: 822843 - RNA, 19 nt, Homo sapiens
  misc_RNA (1)...(19): siRNA sense strand
ccuuaugacugcagugaau

SEQ ID NO: 822844 - RNA, 19 nt, Homo sapiens
  misc_RNA (1)...(19): siRNA sense strand
acucaugaauguagugaau

SEQ ID NO: 822845 - RNA, 19 nt, Homo sapiens
  misc_RNA (1)...(19): siRNA sense strand
caagagauuucuggaugag

SEQ ID NO: 822846 - RNA, 19 nt, Homo sapiens
  misc_RNA (1)...(19): siRNA sense strand
gaaaucuguccucauucaa

SEQ ID NO: 822847 - RNA, 19 nt, Homo sapiens
  misc_RNA (1)...(19): siRNA sense strand
gaaaauccuuuagccauag

SEQ ID NO: 822848 - RNA, 19 nt, Homo sapiens
  misc_RNA (1)...(19): siRNA sense strand
ucacagggcaggacuccaa

SEQ ID NO: 822849 - RNA, 19 nt, Homo sapiens
  misc_RNA (1)...(19): siRNA sense strand
ccacacagcaggauuagac

SEQ ID NO: 822850 - RNA, 19 nt, Homo sapiens
  misc_RNA (1)...(19): siRNA sense strand
uaucuguccucauucaaca

SEQ ID NO: 822851 - RNA, 19 nt, Homo sapiens
  misc_RNA (1)...(19): siRNA sense strand
ggaaaucuuuuagagagaa

SEQ ID NO: 822852 - RNA, 19 nt, Homo sapiens
  misc_RNA (1)...(19): siRNA sense strand
gguagaacaaggacucaug

SEQ ID NO: 822853 - RNA, 19 nt, Homo sapiens
  misc_RNA (1)...(19): siRNA sense strand
gauuagacacuugagaguu

SEQ ID NO: 822854 - RNA, 19 nt, Homo sapiens
  misc_RNA (1)...(19): siRNA sense strand
gaaaggccuuaugaaugca

SEQ ID NO: 822855 - RNA, 19 nt, Homo sapiens
  misc_RNA (1)...(19): siRNA sense strand
gaaugugggaaaucuuuua

SEQ ID NO: 822856 - RNA, 19 nt, Homo sapiens
  misc_RNA (1)...(19): siRNA sense strand
agacuguucacacuaauga

SEQ ID NO: 822857 - RNA, 19 nt, Homo sapiens
  misc_RNA (1)...(19): siRNA sense strand
ccuuaugagugcaguguau

SEQ ID NO: 822858 - RNA, 19 nt, Homo sapiens
  misc_RNA (1)...(19): siRNA sense strand
gaaugugggaaaucuuuua

SEQ ID NO: 822859 - RNA, 19 nt, Homo sapiens
  misc_RNA (1)...(19): siRNA sense strand
caacaucaacgaguucaca

SEQ ID NO: 822860 - RNA, 19 nt, Homo sapiens
  misc_RNA (1)...(19): siRNA sense strand
cauucaacaucaacgaguu

SEQ ID NO: 822861 - RNA, 19 nt, Homo sapiens
  misc_RNA (1)...(19): siRNA sense strand
gcaaaacucaccuaacuca

SEQ ID NO: 822862 - RNA, 19 nt, Homo sapiens
  misc_RNA (1)...(19): siRNA sense strand
gagagaaaucuguauucau

SEQ ID NO: 822863 - RNA, 19 nt, Homo sapiens
  misc_RNA (1)...(19): siRNA sense strand
cagugaaugugggaaaguu

SEQ ID NO: 822864 - RNA, 19 nt, Homo sapiens
  misc_RNA (1)...(19): siRNA sense strand
aaaaucaccucauucaaca

SEQ ID NO: 822865 - RNA, 19 nt, Homo sapiens
  misc_RNA (1)...(19): siRNA sense strand
gggaccaggccucauuuau

SEQ ID NO: 822866 - RNA, 19 nt, Homo sapiens
  misc_RNA (1)...(19): siRNA sense strand
accagacuguucacacuaa

SEQ ID NO: 822867 - RNA, 19 nt, Homo sapiens
  misc_RNA (1)...(19): siRNA sense strand
cacagaagagcucacacua

SEQ ID NO: 822868 - RNA, 19 nt, Homo sapiens
  misc_RNA (1)...(19): siRNA sense strand
cagugaaugugggaaauca

SEQ ID NO: 822869 - RNA, 19 nt, Homo sapiens
  misc_RNA (1)...(19): siRNA sense strand
ccagggaaauucucacuaa

SEQ ID NO: 822870 - RNA, 19 nt, Homo sapiens
  misc_RNA (1)...(19): siRNA sense strand
gggaaauucucacuaaaga

SEQ ID NO: 822871 - RNA, 19 nt, Homo sapiens
  misc_RNA (1)...(19): siRNA sense strand
gagagaagcccuuugaaug

SEQ ID NO: 822872 - RNA, 19 nt, Homo sapiens
  misc_RNA (1)...(19): siRNA sense strand
gagaaaguccuuaugaaug

SEQ ID NO: 822873 - RNA, 19 nt, Homo sapiens
  misc_RNA (1)...(19): siRNA sense strand
ggagaaaguccuuaugaau

SEQ ID NO: 822874 - RNA, 19 nt, Homo sapiens
  misc_RNA (1)...(19): siRNA sense strand
agaaaguccuuaugaaugu

SEQ ID NO: 822875 - RNA, 19 nt, Homo sapiens
  misc_RNA (1)...(19): siRNA sense strand
ggagagaagcccuuugaau

SEQ ID NO: 822876 - RNA, 19 nt, Homo sapiens
  misc_RNA (1)...(19): siRNA sense strand
caggaagccuuaugagugu

SEQ ID NO: 822877 - RNA, 19 nt, Homo sapiens
  misc_RNA (1)...(19): siRNA sense strand
ccacaugaaugcagcgaau

SEQ ID NO: 822878 - RNA, 19 nt, Homo sapiens
  misc_RNA (1)...(19): siRNA sense strand
gaauagacaucagaaagcu

SEQ ID NO: 822879 - RNA, 19 nt, Homo sapiens
  misc_RNA (1)...(19): siRNA sense strand
gagacaagccacaugaaug

SEQ ID NO: 822880 - RNA, 19 nt, Homo sapiens
  misc_RNA (1)...(19): siRNA sense strand
gacccucgcuaucagugua

SEQ ID NO: 822881 - RNA, 19 nt, Homo sapiens
  misc_RNA (1)...(19): siRNA sense strand
gagaagcccuuugaaugca

SEQ ID NO: 822882 - RNA, 19 nt, Homo sapiens
  misc_RNA (1)...(19): siRNA sense strand
uauggugucucgucucuga

SEQ ID NO: 822883 - RNA, 19 nt, Homo sapiens
  misc_RNA (1)...(19): siRNA sense strand
uuugaccgcucaucccuua

SEQ ID NO: 822884 - RNA, 19 nt, Homo sapiens
  misc_RNA (1)...(19): siRNA sense strand
ggagacaagccacaugaau

SEQ ID NO: 822885 - RNA, 19 nt, Homo sapiens
  misc_RNA (1)...(19): siRNA sense strand
uggagaaaguccuuaugaa

SEQ ID NO: 822886 - RNA, 19 nt, Homo sapiens
  misc_RNA (1)...(19): siRNA sense strand
cagggaaauucucacuaaa

SEQ ID NO: 822887 - RNA, 19 nt, Homo sapiens
  misc_RNA (1)...(19): siRNA sense strand
ggaagccuuaugaguguaa

SEQ ID NO: 822888 - RNA, 19 nt, Homo sapiens
  misc_RNA (1)...(19): siRNA sense strand
ggugucucgucucugaaua

SEQ ID NO: 822889 - RNA, 19 nt, Homo sapiens
  misc_RNA (1)...(19): siRNA sense strand
uuacacagcaucagaagau

SEQ ID NO: 822890 - RNA, 19 nt, Homo sapiens
  misc_RNA (1)...(19): siRNA sense strand
gaaaguccuuaugaauguc

SEQ ID NO: 822891 - RNA, 19 nt, Homo sapiens
  misc_RNA (1)...(19): siRNA sense strand
uaacgaguguggcaaagcu

SEQ ID NO: 822892 - RNA, 19 nt, Homo sapiens
  misc_RNA (1)...(19): siRNA sense strand
gggagacucguaagaaauc

SEQ ID NO: 822893 - RNA, 19 nt, Homo sapiens
  misc_RNA (1)...(19): siRNA sense strand
caaacagggaauagacuga

SEQ ID NO: 822894 - RNA, 19 nt, Homo sapiens
  misc_RNA (1)...(19): siRNA sense strand
ggagcagccucagcagaca

SEQ ID NO: 822895 - RNA, 19 nt, Homo sapiens
  misc_RNA (1)...(19): siRNA sense strand
gaauucacacuggagagaa

SEQ ID NO: 822896 - RNA, 19 nt, Homo sapiens
  misc_RNA (1)...(19): siRNA sense strand
gagaauucacacuggagaa

SEQ ID NO: 822897 - RNA, 19 nt, Homo sapiens
  misc_RNA (1)...(19): siRNA sense strand
uuugaccguucaucccuua

SEQ ID NO: 822898 - RNA, 19 nt, Homo sapiens
  misc_RNA (1)...(19): siRNA sense strand
acacuggcaggaagccuua

SEQ ID NO: 822899 - RNA, 19 nt, Homo sapiens
  misc_RNA (1)...(19): siRNA sense strand
cgggagagaagcccuuuga

SEQ ID NO: 822900 - RNA, 19 nt, Homo sapiens
  misc_RNA (1)...(19): siRNA sense strand
aauucacacuggagagaaa

SEQ ID NO: 822901 - RNA, 19 nt, Homo sapiens
  misc_RNA (1)...(19): siRNA sense strand
cuggagaaaguccuuauga

SEQ ID NO: 822902 - RNA, 19 nt, Homo sapiens
  misc_RNA (1)...(19): siRNA sense strand
gaccguucgucccuaacug

SEQ ID NO: 822903 - RNA, 19 nt, Homo sapiens
  misc_RNA (1)...(19): siRNA sense strand
cgaauucacacuggagaga

SEQ ID NO: 822904 - RNA, 19 nt, Homo sapiens
  misc_RNA (1)...(19): siRNA sense strand
agaauucacacuggagaaa

SEQ ID NO: 822905 - RNA, 19 nt, Homo sapiens
  misc_RNA (1)...(19): siRNA sense strand
agagaagcccuuugaaugc

SEQ ID NO: 822906 - RNA, 19 nt, Homo sapiens
  misc_RNA (1)...(19): siRNA sense strand
ggaaauucucacuaaagag

SEQ ID NO: 822907 - RNA, 19 nt, Homo sapiens
  misc_RNA (1)...(19): siRNA sense strand
agacaagccacaugaaugc

SEQ ID NO: 822908 - RNA, 19 nt, Homo sapiens
  misc_RNA (1)...(19): siRNA sense strand
gggagagaagcccuuugaa

SEQ ID NO: 822909 - RNA, 19 nt, Homo sapiens
  misc_RNA (1)...(19): siRNA sense strand
gaccguucaucccuuacuc

SEQ ID NO: 822910 - RNA, 19 nt, Homo sapiens
  misc_RNA (1)...(19): siRNA sense strand
uaacuguccaucagcgaau

SEQ ID NO: 822911 - RNA, 19 nt, Homo sapiens
  misc_RNA (1)...(19): siRNA sense strand
ugaauagacaucagaaagc

SEQ ID NO: 822912 - RNA, 19 nt, Homo sapiens
  misc_RNA (1)...(19): siRNA sense strand
ugucucgucucugaauaga

SEQ ID NO: 822913 - RNA, 19 nt, Homo sapiens
  misc_RNA (1)...(19): siRNA sense strand
ggcaggaagccuuaugagu

SEQ ID NO: 822914 - RNA, 19 nt, Homo sapiens
  misc_RNA (1)...(19): siRNA sense strand
gaauucacacuggagaaag

SEQ ID NO: 822915 - RNA, 19 nt, Homo sapiens
  misc_RNA (1)...(19): siRNA sense strand
gaaagugacucaucuguua

SEQ ID NO: 822916 - RNA, 19 nt, Homo sapiens
  misc_RNA (1)...(19): siRNA sense strand
caaagaagcuuccucauuu

SEQ ID NO: 822917 - RNA, 19 nt, Homo sapiens
  misc_RNA (1)...(19): siRNA sense strand
gcacagaaaucuagaguaa

SEQ ID NO: 822918 - RNA, 19 nt, Homo sapiens
  misc_RNA (1)...(19): siRNA sense strand
gauaagagguuuacugaaa

SEQ ID NO: 822919 - RNA, 19 nt, Homo sapiens
  misc_RNA (1)...(19): siRNA sense strand
caacuuggaugaccuagua

SEQ ID NO: 822920 - RNA, 19 nt, Homo sapiens
  misc_RNA (1)...(19): siRNA sense strand
ggaaaggaaugaggaguua

SEQ ID NO: 822921 - RNA, 19 nt, Homo sapiens
  misc_RNA (1)...(19): siRNA sense strand
gaagaggaaucuaaagcua

SEQ ID NO: 822922 - RNA, 19 nt, Homo sapiens
  misc_RNA (1)...(19): siRNA sense strand
gaaagcagguugagugaga

SEQ ID NO: 822923 - RNA, 19 nt, Homo sapiens
  misc_RNA (1)...(19): siRNA sense strand
caucauauauccuguauug

SEQ ID NO: 822924 - RNA, 19 nt, Homo sapiens
  misc_RNA (1)...(19): siRNA sense strand
gaaagcaugugaagaaauc

SEQ ID NO: 822925 - RNA, 19 nt, Homo sapiens
  misc_RNA (1)...(19): siRNA sense strand
ggaaauggcuucuguugag

SEQ ID NO: 822926 - RNA, 19 nt, Homo sapiens
  misc_RNA (1)...(19): siRNA sense strand
aaacaaggcaggugaaaua

SEQ ID NO: 822927 - RNA, 19 nt, Homo sapiens
  misc_RNA (1)...(19): siRNA sense strand
caucaaagcaacacauuua

SEQ ID NO: 822928 - RNA, 19 nt, Homo sapiens
  misc_RNA (1)...(19): siRNA sense strand
gaagacauguagcuacuau

SEQ ID NO: 822929 - RNA, 19 nt, Homo sapiens
  misc_RNA (1)...(19): siRNA sense strand
caaagcaauuccaaaguuu

SEQ ID NO: 822930 - RNA, 19 nt, Homo sapiens
  misc_RNA (1)...(19): siRNA sense strand
uaacagacaugguaauauc

SEQ ID NO: 822931 - RNA, 19 nt, Homo sapiens
  misc_RNA (1)...(19): siRNA sense strand
gcaagaagcuuacauuuuc

SEQ ID NO: 822932 - RNA, 19 nt, Homo sapiens
  misc_RNA (1)...(19): siRNA sense strand
gagguggucucaauauauu

SEQ ID NO: 822933 - RNA, 19 nt, Homo sapiens
  misc_RNA (1)...(19): siRNA sense strand
gagcaagaguggguuuaua

SEQ ID NO: 822934 - RNA, 19 nt, Homo sapiens
  misc_RNA (1)...(19): siRNA sense strand
gcacacagauaaauccaau

SEQ ID NO: 822935 - RNA, 19 nt, Homo sapiens
  misc_RNA (1)...(19): siRNA sense strand
caaauaagccugccucuca

SEQ ID NO: 822936 - RNA, 19 nt, Homo sapiens
  misc_RNA (1)...(19): siRNA sense strand
ccacaugccucaacuggaa

SEQ ID NO: 822937 - RNA, 19 nt, Homo sapiens
  misc_RNA (1)...(19): siRNA sense strand
caagugaaccgcuuaauau

SEQ ID NO: 822938 - RNA, 19 nt, Homo sapiens
  misc_RNA (1)...(19): siRNA sense strand
ggaagcaaauaguguauca

SEQ ID NO: 822939 - RNA, 19 nt, Homo sapiens
  misc_RNA (1)...(19): siRNA sense strand
uaagaacccuggcuuccua

SEQ ID NO: 822940 - RNA, 19 nt, Homo sapiens
  misc_RNA (1)...(19): siRNA sense strand
gaaaugaaaguugggcuua

SEQ ID NO: 822941 - RNA, 19 nt, Homo sapiens
  misc_RNA (1)...(19): siRNA sense strand
ucaaagcaauuccaaaguu

SEQ ID NO: 822942 - RNA, 19 nt, Homo sapiens
  misc_RNA (1)...(19): siRNA sense strand
gauguuagccaaauguuaa

SEQ ID NO: 822943 - RNA, 19 nt, Homo sapiens
  misc_RNA (1)...(19): siRNA sense strand
gaagucagcuugggaucaa

SEQ ID NO: 822944 - RNA, 19 nt, Homo sapiens
  misc_RNA (1)...(19): siRNA sense strand
gaaugaauguuccaaaguc

SEQ ID NO: 822945 - RNA, 19 nt, Homo sapiens
  misc_RNA (1)...(19): siRNA sense strand
ggacaagcacaauuuauga

SEQ ID NO: 822946 - RNA, 19 nt, Homo sapiens
  misc_RNA (1)...(19): siRNA sense strand
ugacagagacuuugaaaug

SEQ ID NO: 822947 - RNA, 19 nt, Homo sapiens
  misc_RNA (1)...(19): siRNA sense strand
gugaaccgcuuaauaucua

SEQ ID NO: 822948 - RNA, 19 nt, Homo sapiens
  misc_RNA (1)...(19): siRNA sense strand
ccaagagaauuaccucaaa

SEQ ID NO: 822949 - RNA, 19 nt, Homo sapiens
  misc_RNA (1)...(19): siRNA sense strand
gacagagacuuugaaauga

SEQ ID NO: 822950 - RNA, 19 nt, Homo sapiens
  misc_RNA (1)...(19): siRNA sense strand
gaaagcacuucuauugaca

SEQ ID NO: 822951 - RNA, 19 nt, Homo sapiens
  misc_RNA (1)...(19): siRNA sense strand
cacagcagcucagaauuua

SEQ ID NO: 822952 - RNA, 19 nt, Homo sapiens
  misc_RNA (1)...(19): siRNA sense strand
caucaaagcaugagaauuc

SEQ ID NO: 822953 - RNA, 19 nt, Homo sapiens
  misc_RNA (1)...(19): siRNA sense strand
gaucuggcuuugaccauuu

SEQ ID NO: 822954 - RNA, 19 nt, Homo sapiens
  misc_RNA (1)...(19): siRNA sense strand
gcaggaaggcugaagauga

SEQ ID NO: 822955 - RNA, 19 nt, Homo sapiens
  misc_RNA (1)...(19): siRNA sense strand
gaaaguuccuccggcguuu

SEQ ID NO: 822956 - RNA, 19 nt, Homo sapiens
  misc_RNA (1)...(19): siRNA sense strand
ccacuuacauacaggcuaa

SEQ ID NO: 822957 - RNA, 19 nt, Homo sapiens
  misc_RNA (1)...(19): siRNA sense strand
aaacuuggcucaacagcuu

SEQ ID NO: 822958 - RNA, 19 nt, Homo sapiens
  misc_RNA (1)...(19): siRNA sense strand
cgucaaaucuagugaguug

SEQ ID NO: 822959 - RNA, 19 nt, Homo sapiens
  misc_RNA (1)...(19): siRNA sense strand
gccauaauguuucuucuga

SEQ ID NO: 822960 - RNA, 19 nt, Homo sapiens
  misc_RNA (1)...(19): siRNA sense strand
ugacuuggauagcaaauug

SEQ ID NO: 822961 - RNA, 19 nt, Homo sapiens
  misc_RNA (1)...(19): siRNA sense strand
gaagaagacaaacagcuaa

SEQ ID NO: 822962 - RNA, 19 nt, Homo sapiens
  misc_RNA (1)...(19): siRNA sense strand
gaacaacaguuagcuuucu

SEQ ID NO: 822963 - RNA, 19 nt, Homo sapiens
  misc_RNA (1)...(19): siRNA sense strand
caggaaggcugaagaugaa

SEQ ID NO: 822964 - RNA, 19 nt, Homo sapiens
  misc_RNA (1)...(19): siRNA sense strand
gagagaaugacaaauguaa

SEQ ID NO: 822965 - RNA, 19 nt, Homo sapiens
  misc_RNA (1)...(19): siRNA sense strand
caacagggcuaugucaugu

SEQ ID NO: 822966 - RNA, 19 nt, Homo sapiens
  misc_RNA (1)...(19): siRNA sense strand
ugaauucucugucaacaau

SEQ ID NO: 822967 - RNA, 19 nt, Homo sapiens
  misc_RNA (1)...(19): siRNA sense strand
agaauuaccuacaucaaga

SEQ ID NO: 822968 - RNA, 19 nt, Homo sapiens
  misc_RNA (1)...(19): siRNA sense strand
caaggaagauuauggaaac

SEQ ID NO: 822969 - RNA, 19 nt, Homo sapiens
  misc_RNA (1)...(19): siRNA sense strand
gaagucaggaggcaaauau

SEQ ID NO: 822970 - RNA, 19 nt, Homo sapiens
  misc_RNA (1)...(19): siRNA sense strand
caccaggaauuaacuguaa

SEQ ID NO: 822971 - RNA, 19 nt, Homo sapiens
  misc_RNA (1)...(19): siRNA sense strand
uuaccaacguguuaguuua

SEQ ID NO: 822972 - RNA, 19 nt, Homo sapiens
  misc_RNA (1)...(19): siRNA sense strand
gaaaggagacuucaaagcu

SEQ ID NO: 822973 - RNA, 19 nt, Homo sapiens
  misc_RNA (1)...(19): siRNA sense strand
ccaagugaaccgcuuaaua

SEQ ID NO: 822974 - RNA, 19 nt, Homo sapiens
  misc_RNA (1)...(19): siRNA sense strand
gaagaaauccgagaaccuu

SEQ ID NO: 822975 - RNA, 19 nt, Homo sapiens
  misc_RNA (1)...(19): siRNA sense strand
agaauuaccucaaagaagu

SEQ ID NO: 822976 - RNA, 19 nt, Homo sapiens
  misc_RNA (1)...(19): siRNA sense strand
gcucagacuugucaggaaa

SEQ ID NO: 822977 - RNA, 19 nt, Homo sapiens
  misc_RNA (1)...(19): siRNA sense strand
ggacagaaaggaugugaug

SEQ ID NO: 822978 - RNA, 19 nt, Homo sapiens
  misc_RNA (1)...(19): siRNA sense strand
ccacagaugaugaauacua

SEQ ID NO: 822979 - RNA, 19 nt, Homo sapiens
  misc_RNA (1)...(19): siRNA sense strand
gguagagccauuccauuua

SEQ ID NO: 822980 - RNA, 19 nt, Homo sapiens
  misc_RNA (1)...(19): siRNA sense strand
gcaauucaguugacucucu

SEQ ID NO: 822981 - RNA, 19 nt, Homo sapiens
  misc_RNA (1)...(19): siRNA sense strand
ggaaaucauucaguucuuc

SEQ ID NO: 822982 - RNA, 19 nt, Homo sapiens
  misc_RNA (1)...(19): siRNA sense strand
gaccucgugugauucuuua

SEQ ID NO: 822983 - RNA, 19 nt, Homo sapiens
  misc_RNA (1)...(19): siRNA sense strand
gugaaacccugcauacuuc

SEQ ID NO: 822984 - RNA, 19 nt, Homo sapiens
  misc_RNA (1)...(19): siRNA sense strand
uaagacgacuaguacguuu

SEQ ID NO: 822985 - RNA, 19 nt, Homo sapiens
  misc_RNA (1)...(19): siRNA sense strand
ccagaagucuaacagcauu

SEQ ID NO: 822986 - RNA, 19 nt, Homo sapiens
  misc_RNA (1)...(19): siRNA sense strand
auacagaccuaucgacuau

SEQ ID NO: 822987 - RNA, 19 nt, Homo sapiens
  misc_RNA (1)...(19): siRNA sense strand
ucacagcagcucagaauuu

SEQ ID NO: 822988 - RNA, 19 nt, Homo sapiens
  misc_RNA (1)...(19): siRNA sense strand
ccaccucccuuccaaauca

SEQ ID NO: 822989 - RNA, 19 nt, Homo sapiens
  misc_RNA (1)...(19): siRNA sense strand
guagucaggugccagaaga

SEQ ID NO: 822990 - RNA, 19 nt, Homo sapiens
  misc_RNA (1)...(19): siRNA sense strand
ggaagauuauggaaaccaa

SEQ ID NO: 822991 - RNA, 19 nt, Homo sapiens
  misc_RNA (1)...(19): siRNA sense strand
caaagcaugagaauucuaa

SEQ ID NO: 822992 - RNA, 19 nt, Homo sapiens
  misc_RNA (1)...(19): siRNA sense strand
uagagagucugcagucuga

SEQ ID NO: 822993 - RNA, 19 nt, Homo sapiens
  misc_RNA (1)...(19): siRNA sense strand
caaagagucagaacuguga

SEQ ID NO: 822994 - RNA, 19 nt, Homo sapiens
  misc_RNA (1)...(19): siRNA sense strand
caaacucuuuaccugauuu

SEQ ID NO: 822995 - RNA, 19 nt, Homo sapiens
  misc_RNA (1)...(19): siRNA sense strand
gguaacagacaugguaaua

SEQ ID NO: 822996 - RNA, 19 nt, Homo sapiens
  misc_RNA (1)...(19): siRNA sense strand
uaacagcauuucacaacga

SEQ ID NO: 822997 - RNA, 19 nt, Homo sapiens
  misc_RNA (1)...(19): siRNA sense strand
ggagguggucucaauauau

SEQ ID NO: 822998 - RNA, 19 nt, Homo sapiens
  misc_RNA (1)...(19): siRNA sense strand
ccacagagagaaugacaaa

SEQ ID NO: 822999 - RNA, 19 nt, Homo sapiens
  misc_RNA (1)...(19): siRNA sense strand
gaacaugccauucuaccau

SEQ ID NO: 823000 - RNA, 19 nt, Homo sapiens
  misc_RNA (1)...(19): siRNA sense strand
gaucagauuccucuagaga

SEQ ID NO: 823001 - RNA, 19 nt, Homo sapiens
  misc_RNA (1)...(19): siRNA sense strand
gggagugacuggugaaugg

SEQ ID NO: 823002 - RNA, 19 nt, Homo sapiens
  misc_RNA (1)...(19): siRNA sense strand
gugaaugguuugaagaaau

SEQ ID NO: 823003 - RNA, 19 nt, Homo sapiens
  misc_RNA (1)...(19): siRNA sense strand
aaacauuuccuaacgcuuu

SEQ ID NO: 823004 - RNA, 19 nt, Homo sapiens
  misc_RNA (1)...(19): siRNA sense strand
ccacuuccauuccucauca

SEQ ID NO: 823005 - RNA, 19 nt, Homo sapiens
  misc_RNA (1)...(19): siRNA sense strand
cagagagaaugacaaaugu

SEQ ID NO: 823006 - RNA, 19 nt, Homo sapiens
  misc_RNA (1)...(19): siRNA sense strand
ggacgaagcggagaacaga

SEQ ID NO: 823007 - RNA, 19 nt, Homo sapiens
  misc_RNA (1)...(19): siRNA sense strand
acaaagaagcuuccucauu

SEQ ID NO: 823008 - RNA, 19 nt, Homo sapiens
  misc_RNA (1)...(19): siRNA sense strand
gacaucagaaugaguuuaa

SEQ ID NO: 823009 - RNA, 19 nt, Homo sapiens
  misc_RNA (1)...(19): siRNA sense strand
gccccuagcuccuacauua

SEQ ID NO: 823010 - RNA, 19 nt, Homo sapiens
  misc_RNA (1)...(19): siRNA sense strand
gcgaaugaauguuccaaag

SEQ ID NO: 823011 - RNA, 19 nt, Homo sapiens
  misc_RNA (1)...(19): siRNA sense strand
gaucacaggagccucauug

SEQ ID NO: 823012 - RNA, 19 nt, Homo sapiens
  misc_RNA (1)...(19): siRNA sense strand
acagauaaauccaaugaca

SEQ ID NO: 823013 - RNA, 19 nt, Homo sapiens
  misc_RNA (1)...(19): siRNA sense strand
aaagaagcuuccucauuug

SEQ ID NO: 823014 - RNA, 19 nt, Homo sapiens
  misc_RNA (1)...(19): siRNA sense strand
gcagaaaauucccagcuaa

SEQ ID NO: 823015 - RNA, 19 nt, Homo sapiens
  misc_RNA (1)...(19): siRNA sense strand
gaacaugacucagaacuuu

SEQ ID NO: 823016 - RNA, 19 nt, Homo sapiens
  misc_RNA (1)...(19): siRNA sense strand
uaagcgcgcucaagaauuu

SEQ ID NO: 823017 - RNA, 19 nt, Homo sapiens
  misc_RNA (1)...(19): siRNA sense strand
ucaaggagcucaucaagga

SEQ ID NO: 823018 - RNA, 19 nt, Homo sapiens
  misc_RNA (1)...(19): siRNA sense strand
gaacggauacggaugauug

SEQ ID NO: 823019 - RNA, 19 nt, Homo sapiens
  misc_RNA (1)...(19): siRNA sense strand
gaaguuugcagauuccuua

SEQ ID NO: 823020 - RNA, 19 nt, Homo sapiens
  misc_RNA (1)...(19): siRNA sense strand
gggagaagaugaaucaguu

SEQ ID NO: 823021 - RNA, 19 nt, Homo sapiens
  misc_RNA (1)...(19): siRNA sense strand
ggagaaacgucacuuugga

SEQ ID NO: 823022 - RNA, 19 nt, Homo sapiens
  misc_RNA (1)...(19): siRNA sense strand
ccaaacagcauccuuaauu

SEQ ID NO: 823023 - RNA, 19 nt, Homo sapiens
  misc_RNA (1)...(19): siRNA sense strand
caaagaaguuucaucaaag

SEQ ID NO: 823024 - RNA, 19 nt, Homo sapiens
  misc_RNA (1)...(19): siRNA sense strand
gaaagauguuugaguuugu

SEQ ID NO: 823025 - RNA, 19 nt, Homo sapiens
  misc_RNA (1)...(19): siRNA sense strand
gaugagauguguauagcaa

SEQ ID NO: 823026 - RNA, 19 nt, Homo sapiens
  misc_RNA (1)...(19): siRNA sense strand
agagaaagauguuugaguu

SEQ ID NO: 823027 - RNA, 19 nt, Homo sapiens
  misc_RNA (1)...(19): siRNA sense strand
ggacaagaccaacaaauuc

SEQ ID NO: 823028 - RNA, 19 nt, Homo sapiens
  misc_RNA (1)...(19): siRNA sense strand
gaacaaaggaacagcauca

SEQ ID NO: 823029 - RNA, 19 nt, Homo sapiens
  misc_RNA (1)...(19): siRNA sense strand
gacgggaagucacucauaa

SEQ ID NO: 823030 - RNA, 19 nt, Homo sapiens
  misc_RNA (1)...(19): siRNA sense strand
gaaucugucucaucaaauc

SEQ ID NO: 823031 - RNA, 19 nt, Homo sapiens
  misc_RNA (1)...(19): siRNA sense strand
gaacaaagacagccagagu

SEQ ID NO: 823032 - RNA, 19 nt, Homo sapiens
  misc_RNA (1)...(19): siRNA sense strand
cauaggagaugcagaaaca

SEQ ID NO: 823033 - RNA, 19 nt, Homo sapiens
  misc_RNA (1)...(19): siRNA sense strand
caaacagcauccuuaauuc

SEQ ID NO: 823034 - RNA, 19 nt, Homo sapiens
  misc_RNA (1)...(19): siRNA sense strand
ggagaaguuucgaaaggaa

SEQ ID NO: 823035 - RNA, 19 nt, Homo sapiens
  misc_RNA (1)...(19): siRNA sense strand
agaaacagaugaugagaug

SEQ ID NO: 823036 - RNA, 19 nt, Homo sapiens
  misc_RNA (1)...(19): siRNA sense strand
gaaagaaucucagcuucag

SEQ ID NO: 823037 - RNA, 19 nt, Homo sapiens
  misc_RNA (1)...(19): siRNA sense strand
caacgggauuccaaacaaa

SEQ ID NO: 823038 - RNA, 19 nt, Homo sapiens
  misc_RNA (1)...(19): siRNA sense strand
ggauacggaugauugagaa

SEQ ID NO: 823039 - RNA, 19 nt, Homo sapiens
  misc_RNA (1)...(19): siRNA sense strand
aaaguauuguggcaucuua

SEQ ID NO: 823040 - RNA, 19 nt, Homo sapiens
  misc_RNA (1)...(19): siRNA sense strand
gaacacaagaaaucgcuuu

SEQ ID NO: 823041 - RNA, 19 nt, Homo sapiens
  misc_RNA (1)...(19): siRNA sense strand
caucauggacaucaaauuu

SEQ ID NO: 823042 - RNA, 19 nt, Homo sapiens
  misc_RNA (1)...(19): siRNA sense strand
ggacuucaagacacaguua

SEQ ID NO: 823043 - RNA, 19 nt, Homo sapiens
  misc_RNA (1)...(19): siRNA sense strand
gagaagagguuuugcuuug

SEQ ID NO: 823044 - RNA, 19 nt, Homo sapiens
  misc_RNA (1)...(19): siRNA sense strand
cacaagaaaucgcuuugaa

SEQ ID NO: 823045 - RNA, 19 nt, Homo sapiens
  misc_RNA (1)...(19): siRNA sense strand
gcacuacuguacauaucaa

SEQ ID NO: 823046 - RNA, 19 nt, Homo sapiens
  misc_RNA (1)...(19): siRNA sense strand
caagggcuguaucgaauug

SEQ ID NO: 823047 - RNA, 19 nt, Homo sapiens
  misc_RNA (1)...(19): siRNA sense strand
caaaggaacagcaucauca

SEQ ID NO: 823048 - RNA, 19 nt, Homo sapiens
  misc_RNA (1)...(19): siRNA sense strand
ucauugagauccuaauaga

SEQ ID NO: 823049 - RNA, 19 nt, Homo sapiens
  misc_RNA (1)...(19): siRNA sense strand
ggacgggaagucacucaua

SEQ ID NO: 823050 - RNA, 19 nt, Homo sapiens
  misc_RNA (1)...(19): siRNA sense strand
caaggacucuucacuuucu

SEQ ID NO: 823051 - RNA, 19 nt, Homo sapiens
  misc_RNA (1)...(19): siRNA sense strand
caggaccacucaugaugua

SEQ ID NO: 823052 - RNA, 19 nt, Homo sapiens
  misc_RNA (1)...(19): siRNA sense strand
gagcaagggcuguaucgaa

SEQ ID NO: 823053 - RNA, 19 nt, Homo sapiens
  misc_RNA (1)...(19): siRNA sense strand
agaaagauguuugaguuug

SEQ ID NO: 823054 - RNA, 19 nt, Homo sapiens
  misc_RNA (1)...(19): siRNA sense strand
cugaagaccuaccuaagaa

SEQ ID NO: 823055 - RNA, 19 nt, Homo sapiens
  misc_RNA (1)...(19): siRNA sense strand
aagacacaguuaaccauua

SEQ ID NO: 823056 - RNA, 19 nt, Homo sapiens
  misc_RNA (1)...(19): siRNA sense strand
ugcaaggacucuucacuuu

SEQ ID NO: 823057 - RNA, 19 nt, Homo sapiens
  misc_RNA (1)...(19): siRNA sense strand
gagaaagauguuugaguuu

SEQ ID NO: 823058 - RNA, 19 nt, Homo sapiens
  misc_RNA (1)...(19): siRNA sense strand
ugaaucaguuauccucaaa

SEQ ID NO: 823059 - RNA, 19 nt, Homo sapiens
  misc_RNA (1)...(19): siRNA sense strand
ggagaagaugaaucaguua

SEQ ID NO: 823060 - RNA, 19 nt, Homo sapiens
  misc_RNA (1)...(19): siRNA sense strand
gcauacagaacacaagaaa

SEQ ID NO: 823061 - RNA, 19 nt, Homo sapiens
  misc_RNA (1)...(19): siRNA sense strand
ugaaggcacuagaucagaa

SEQ ID NO: 823062 - RNA, 19 nt, Homo sapiens
  misc_RNA (1)...(19): siRNA sense strand
ccaacaaauucaucaagga

SEQ ID NO: 823063 - RNA, 19 nt, Homo sapiens
  misc_RNA (1)...(19): siRNA sense strand
caagacugcuucugagaca

SEQ ID NO: 823064 - RNA, 19 nt, Homo sapiens
  misc_RNA (1)...(19): siRNA sense strand
aaacgucacuuuggaacuu

SEQ ID NO: 823065 - RNA, 19 nt, Homo sapiens
  misc_RNA (1)...(19): siRNA sense strand
gcacggucuucgauaaugu

SEQ ID NO: 823066 - RNA, 19 nt, Homo sapiens
  misc_RNA (1)...(19): siRNA sense strand
cagaagaagcgguacauga

SEQ ID NO: 823067 - RNA, 19 nt, Homo sapiens
  misc_RNA (1)...(19): siRNA sense strand
gaagaccuaccuaagaaug

SEQ ID NO: 823068 - RNA, 19 nt, Homo sapiens
  misc_RNA (1)...(19): siRNA sense strand
gagauaaagaccaucacua

SEQ ID NO: 823069 - RNA, 19 nt, Homo sapiens
  misc_RNA (1)...(19): siRNA sense strand
ugaaguaucccuggaauau

SEQ ID NO: 823070 - RNA, 19 nt, Homo sapiens
  misc_RNA (1)...(19): siRNA sense strand
uggaaucugucucaucaaa

SEQ ID NO: 823071 - RNA, 19 nt, Homo sapiens
  misc_RNA (1)...(19): siRNA sense strand
gacaucaaauuucagaaca

SEQ ID NO: 823072 - RNA, 19 nt, Homo sapiens
  misc_RNA (1)...(19): siRNA sense strand
gaaauccacagccuuguuc

SEQ ID NO: 823073 - RNA, 19 nt, Homo sapiens
  misc_RNA (1)...(19): siRNA sense strand
cuagugcucugaagaccua

SEQ ID NO: 823074 - RNA, 19 nt, Homo sapiens
  misc_RNA (1)...(19): siRNA sense strand
agcauuggcuucagcauaa

SEQ ID NO: 823075 - RNA, 19 nt, Homo sapiens
  misc_RNA (1)...(19): siRNA sense strand
gaagaugaaucaguuaucc

SEQ ID NO: 823076 - RNA, 19 nt, Homo sapiens
  misc_RNA (1)...(19): siRNA sense strand
gcaggaaguccaagagaga

SEQ ID NO: 823077 - RNA, 19 nt, Homo sapiens
  misc_RNA (1)...(19): siRNA sense strand
caagagagaaagauguuug

SEQ ID NO: 823078 - RNA, 19 nt, Homo sapiens
  misc_RNA (1)...(19): siRNA sense strand
aagcagagcuggacaagac

SEQ ID NO: 823079 - RNA, 19 nt, Homo sapiens
  misc_RNA (1)...(19): siRNA sense strand
ucaacgggauuccaaacaa

SEQ ID NO: 823080 - RNA, 19 nt, Homo sapiens
  misc_RNA (1)...(19): siRNA sense strand
gaagcacuacuguacauau

SEQ ID NO: 823081 - RNA, 19 nt, Homo sapiens
  misc_RNA (1)...(19): siRNA sense strand
guuacgaacuggccaagga

SEQ ID NO: 823082 - RNA, 19 nt, Homo sapiens
  misc_RNA (1)...(19): siRNA sense strand
gaugaacggauacggauga

SEQ ID NO: 823083 - RNA, 19 nt, Homo sapiens
  misc_RNA (1)...(19): siRNA sense strand
ccaaacaaaucaccauggu

SEQ ID NO: 823084 - RNA, 19 nt, Homo sapiens
  misc_RNA (1)...(19): siRNA sense strand
agaagaagcgguacaugaa

SEQ ID NO: 823085 - RNA, 19 nt, Homo sapiens
  misc_RNA (1)...(19): siRNA sense strand
gaaauaugacaaagagaca

SEQ ID NO: 823086 - RNA, 19 nt, Homo sapiens
  misc_RNA (1)...(19): siRNA sense strand
caggcacggucuucgauaa

SEQ ID NO: 823087 - RNA, 19 nt, Homo sapiens
  misc_RNA (1)...(19): siRNA sense strand
caacagagaaacaggaaca

SEQ ID NO: 823088 - RNA, 19 nt, Homo sapiens
  misc_RNA (1)...(19): siRNA sense strand
ucauggacaucaaauuuca

SEQ ID NO: 823089 - RNA, 19 nt, Homo sapiens
  misc_RNA (1)...(19): siRNA sense strand
aaacagacuccauugagaa

SEQ ID NO: 823090 - RNA, 19 nt, Homo sapiens
  misc_RNA (1)...(19): siRNA sense strand
gcaggagaaacgucacuuu

SEQ ID NO: 823091 - RNA, 19 nt, Homo sapiens
  misc_RNA (1)...(19): siRNA sense strand
caaggucuuugcaggaguu

SEQ ID NO: 823092 - RNA, 19 nt, Homo sapiens
  misc_RNA (1)...(19): siRNA sense strand
ggaacagcaucaucaacuc

SEQ ID NO: 823093 - RNA, 19 nt, Homo sapiens
  misc_RNA (1)...(19): siRNA sense strand
cgauaugccucucaccaau

SEQ ID NO: 823094 - RNA, 19 nt, Homo sapiens
  misc_RNA (1)...(19): siRNA sense strand
acaguuaaccauuagcaua

SEQ ID NO: 823095 - RNA, 19 nt, Homo sapiens
  misc_RNA (1)...(19): siRNA sense strand
gcaaggacucuucacuuuc

SEQ ID NO: 823096 - RNA, 19 nt, Homo sapiens
  misc_RNA (1)...(19): siRNA sense strand
gcucgguccucucuucaug

SEQ ID NO: 823097 - RNA, 19 nt, Homo sapiens
  misc_RNA (1)...(19): siRNA sense strand
gacaagaccaacaaauuca

SEQ ID NO: 823098 - RNA, 19 nt, Homo sapiens
  misc_RNA (1)...(19): siRNA sense strand
gagaagaugaaucaguuau

SEQ ID NO: 823099 - RNA, 19 nt, Homo sapiens
  misc_RNA (1)...(19): siRNA sense strand
uggaauaugucuucaaggu

SEQ ID NO: 823100 - RNA, 19 nt, Homo sapiens
  misc_RNA (1)...(19): siRNA sense strand
gaacauugucauugagauc

SEQ ID NO: 823101 - RNA, 19 nt, Homo sapiens
  misc_RNA (1)...(19): siRNA sense strand
aaagaaagaaucucagcuu

SEQ ID NO: 823102 - RNA, 19 nt, Homo sapiens
  misc_RNA (1)...(19): siRNA sense strand
cggaaagacuggccucauc

SEQ ID NO: 823103 - RNA, 19 nt, Homo sapiens
  misc_RNA (1)...(19): siRNA sense strand
aagaagcgguacaugaaga

SEQ ID NO: 823104 - RNA, 19 nt, Homo sapiens
  misc_RNA (1)...(19): siRNA sense strand
guuugcagauuccuuaaau

SEQ ID NO: 823105 - RNA, 19 nt, Homo sapiens
  misc_RNA (1)...(19): siRNA sense strand
gcuuacagcccaacaugaa

SEQ ID NO: 823106 - RNA, 19 nt, Homo sapiens
  misc_RNA (1)...(19): siRNA sense strand
uguuacagcugcucaugaa

SEQ ID NO: 823107 - RNA, 19 nt, Homo sapiens
  misc_RNA (1)...(19): siRNA sense strand
gagaaacgucacuuuggaa

SEQ ID NO: 823108 - RNA, 19 nt, Homo sapiens
  misc_RNA (1)...(19): siRNA sense strand
caagacacaguuaaccauu

SEQ ID NO: 823109 - RNA, 19 nt, Homo sapiens
  misc_RNA (1)...(19): siRNA sense strand
gcucugaagaccuaccuaa

SEQ ID NO: 823110 - RNA, 19 nt, Homo sapiens
  misc_RNA (1)...(19): siRNA sense strand
cauaagcgcgcucaagaau

SEQ ID NO: 823111 - RNA, 19 nt, Homo sapiens
  misc_RNA (1)...(19): siRNA sense strand
cagcauuggcuucagcaua

SEQ ID NO: 823112 - RNA, 19 nt, Homo sapiens
  misc_RNA (1)...(19): siRNA sense strand
caaacaaaucaccauggua

SEQ ID NO: 823113 - RNA, 19 nt, Homo sapiens
  misc_RNA (1)...(19): siRNA sense strand
gugaagcacuacuguacau

SEQ ID NO: 823114 - RNA, 19 nt, Homo sapiens
  misc_RNA (1)...(19): siRNA sense strand
agacacaguuaaccauuag

SEQ ID NO: 823115 - RNA, 19 nt, Homo sapiens
  misc_RNA (1)...(19): siRNA sense strand
gcaaggagcuuauucgaaa

SEQ ID NO: 823116 - RNA, 19 nt, Homo sapiens
  misc_RNA (1)...(19): siRNA sense strand
gaaagagccuccaacuauu

SEQ ID NO: 823117 - RNA, 19 nt, Homo sapiens
  misc_RNA (1)...(19): siRNA sense strand
gaagguggcucaagcgaaa

SEQ ID NO: 823118 - RNA, 19 nt, Homo sapiens
  misc_RNA (1)...(19): siRNA sense strand
gaagacuuguucucaguua

SEQ ID NO: 823119 - RNA, 19 nt, Homo sapiens
  misc_RNA (1)...(19): siRNA sense strand
ggagugagauugaacaaga

SEQ ID NO: 823120 - RNA, 19 nt, Homo sapiens
  misc_RNA (1)...(19): siRNA sense strand
gcauucaccuuaucauuaa

SEQ ID NO: 823121 - RNA, 19 nt, Homo sapiens
  misc_RNA (1)...(19): siRNA sense strand
ggcaauacauguugguuua

SEQ ID NO: 823122 - RNA, 19 nt, Homo sapiens
  misc_RNA (1)...(19): siRNA sense strand
ugcaagagcuucaguauuu

SEQ ID NO: 823123 - RNA, 19 nt, Homo sapiens
  misc_RNA (1)...(19): siRNA sense strand
ggaaagguaugugaaauau

SEQ ID NO: 823124 - RNA, 19 nt, Homo sapiens
  misc_RNA (1)...(19): siRNA sense strand
gaaagugacacacauauga

SEQ ID NO: 823125 - RNA, 19 nt, Homo sapiens
  misc_RNA (1)...(19): siRNA sense strand
gcaugaagauuauaguuug

SEQ ID NO: 823126 - RNA, 19 nt, Homo sapiens
  misc_RNA (1)...(19): siRNA sense strand
gaggauaacuggcgguuug

SEQ ID NO: 823127 - RNA, 19 nt, Homo sapiens
  misc_RNA (1)...(19): siRNA sense strand
gaaguggcaugaagauuau

SEQ ID NO: 823128 - RNA, 19 nt, Homo sapiens
  misc_RNA (1)...(19): siRNA sense strand
cauaugacauuaccacuuu

SEQ ID NO: 823129 - RNA, 19 nt, Homo sapiens
  misc_RNA (1)...(19): siRNA sense strand
ggacaagagcguugguuua

SEQ ID NO: 823130 - RNA, 19 nt, Homo sapiens
  misc_RNA (1)...(19): siRNA sense strand
ggaagaaguugaaagagau

SEQ ID NO: 823131 - RNA, 19 nt, Homo sapiens
  misc_RNA (1)...(19): siRNA sense strand
ugaaagagauuccuaugga

SEQ ID NO: 823132 - RNA, 19 nt, Homo sapiens
  misc_RNA (1)...(19): siRNA sense strand
gaagcaaccucugcagaaa

SEQ ID NO: 823133 - RNA, 19 nt, Homo sapiens
  misc_RNA (1)...(19): siRNA sense strand
gggaagaaguugaaagaga

SEQ ID NO: 823134 - RNA, 19 nt, Homo sapiens
  misc_RNA (1)...(19): siRNA sense strand
ugaaagagccuccaacuau

SEQ ID NO: 823135 - RNA, 19 nt, Homo sapiens
  misc_RNA (1)...(19): siRNA sense strand
gaaacuaaacgcucaaaga

SEQ ID NO: 823136 - RNA, 19 nt, Homo sapiens
  misc_RNA (1)...(19): siRNA sense strand
gaaauaagagagaguguau

SEQ ID NO: 823137 - RNA, 19 nt, Homo sapiens
  misc_RNA (1)...(19): siRNA sense strand
ugagaaauguuagugcuua

SEQ ID NO: 823138 - RNA, 19 nt, Homo sapiens
  misc_RNA (1)...(19): siRNA sense strand
gaaagaucaaucagcauua

SEQ ID NO: 823139 - RNA, 19 nt, Homo sapiens
  misc_RNA (1)...(19): siRNA sense strand
gaccagacauccaaggaaa

SEQ ID NO: 823140 - RNA, 19 nt, Homo sapiens
  misc_RNA (1)...(19): siRNA sense strand
gccaaaugcuguuaaauca

SEQ ID NO: 823141 - RNA, 19 nt, Homo sapiens
  misc_RNA (1)...(19): siRNA sense strand
aaacgguuaucgcaacuua

SEQ ID NO: 823142 - RNA, 19 nt, Homo sapiens
  misc_RNA (1)...(19): siRNA sense strand
ggacuacucuacaucacaa

SEQ ID NO: 823143 - RNA, 19 nt, Homo sapiens
  misc_RNA (1)...(19): siRNA sense strand
ugacaucucuguuacugaa

SEQ ID NO: 823144 - RNA, 19 nt, Homo sapiens
  misc_RNA (1)...(19): siRNA sense strand
caagagcguugguuuacaa

SEQ ID NO: 823145 - RNA, 19 nt, Homo sapiens
  misc_RNA (1)...(19): siRNA sense strand
ccauugaggucaugagaaa

SEQ ID NO: 823146 - RNA, 19 nt, Homo sapiens
  misc_RNA (1)...(19): siRNA sense strand
uuauagaccuuacucauga

SEQ ID NO: 823147 - RNA, 19 nt, Homo sapiens
  misc_RNA (1)...(19): siRNA sense strand
ugaaucagaucaaauguca

SEQ ID NO: 823148 - RNA, 19 nt, Homo sapiens
  misc_RNA (1)...(19): siRNA sense strand
ugacacacauaugacauua

SEQ ID NO: 823149 - RNA, 19 nt, Homo sapiens
  misc_RNA (1)...(19): siRNA sense strand
gaacaaaucugaaaaucca

SEQ ID NO: 823150 - RNA, 19 nt, Homo sapiens
  misc_RNA (1)...(19): siRNA sense strand
agaaguggcaugaagauua

SEQ ID NO: 823151 - RNA, 19 nt, Homo sapiens
  misc_RNA (1)...(19): siRNA sense strand
gaaggaaauugguccagau

SEQ ID NO: 823152 - RNA, 19 nt, Homo sapiens
  misc_RNA (1)...(19): siRNA sense strand
cagaugaggagauaaauuu

SEQ ID NO: 823153 - RNA, 19 nt, Homo sapiens
  misc_RNA (1)...(19): siRNA sense strand
ggaacaguuugcagauaaa

SEQ ID NO: 823154 - RNA, 19 nt, Homo sapiens
  misc_RNA (1)...(19): siRNA sense strand
gcuguuaaaucaacugaga

SEQ ID NO: 823155 - RNA, 19 nt, Homo sapiens
  misc_RNA (1)...(19): siRNA sense strand
gugcagcuguucuauggua

SEQ ID NO: 823156 - RNA, 19 nt, Homo sapiens
  misc_RNA (1)...(19): siRNA sense strand
ucuaucagcuugccaaaga

SEQ ID NO: 823157 - RNA, 19 nt, Homo sapiens
  misc_RNA (1)...(19): siRNA sense strand
aaagcuaccuccaguguug

SEQ ID NO: 823158 - RNA, 19 nt, Homo sapiens
  misc_RNA (1)...(19): siRNA sense strand
acuaaacgcucaaagagaa

SEQ ID NO: 823159 - RNA, 19 nt, Homo sapiens
  misc_RNA (1)...(19): siRNA sense strand
gcauguccuugucuacuuu

SEQ ID NO: 823160 - RNA, 19 nt, Homo sapiens
  misc_RNA (1)...(19): siRNA sense strand
cacacaagcuccuggauug

SEQ ID NO: 823161 - RNA, 19 nt, Homo sapiens
  misc_RNA (1)...(19): siRNA sense strand
gagaguguauucgaaaguu

SEQ ID NO: 823162 - RNA, 19 nt, Homo sapiens
  misc_RNA (1)...(19): siRNA sense strand
gaaaucaucgucuugaaag

SEQ ID NO: 823163 - RNA, 19 nt, Homo sapiens
  misc_RNA (1)...(19): siRNA sense strand
uggaacaguuugcagauaa

SEQ ID NO: 823164 - RNA, 19 nt, Homo sapiens
  misc_RNA (1)...(19): siRNA sense strand
guacugcgauccucuccuu

SEQ ID NO: 823165 - RNA, 19 nt, Homo sapiens
  misc_RNA (1)...(19): siRNA sense strand
aaagguaugugaaauaugg

SEQ ID NO: 823166 - RNA, 19 nt, Homo sapiens
  misc_RNA (1)...(19): siRNA sense strand
ccaguauccucuucaggua

SEQ ID NO: 823167 - RNA, 19 nt, Homo sapiens
  misc_RNA (1)...(19): siRNA sense strand
uaacugagggcauuaaugu

SEQ ID NO: 823168 - RNA, 19 nt, Homo sapiens
  misc_RNA (1)...(19): siRNA sense strand
gaacccuucuggaacaguu

SEQ ID NO: 823169 - RNA, 19 nt, Homo sapiens
  misc_RNA (1)...(19): siRNA sense strand
aaacuacccuacuucaaug

SEQ ID NO: 823170 - RNA, 19 nt, Homo sapiens
  misc_RNA (1)...(19): siRNA sense strand
caaacuacccuacuucaau

SEQ ID NO: 823171 - RNA, 19 nt, Homo sapiens
  misc_RNA (1)...(19): siRNA sense strand
gcaagagcuucaguauuug

SEQ ID NO: 823172 - RNA, 19 nt, Homo sapiens
  misc_RNA (1)...(19): siRNA sense strand
cuguggaacucaagcauua

SEQ ID NO: 823173 - RNA, 19 nt, Homo sapiens
  misc_RNA (1)...(19): siRNA sense strand
cuaaaccacugacaucuuc

SEQ ID NO: 823174 - RNA, 19 nt, Homo sapiens
  misc_RNA (1)...(19): siRNA sense strand
gagcuucaguauuuguuug

SEQ ID NO: 823175 - RNA, 19 nt, Homo sapiens
  misc_RNA (1)...(19): siRNA sense strand
caaaugcuguuaaaucaac

SEQ ID NO: 823176 - RNA, 19 nt, Homo sapiens
  misc_RNA (1)...(19): siRNA sense strand
cagaugacaugaauaugga

SEQ ID NO: 823177 - RNA, 19 nt, Homo sapiens
  misc_RNA (1)...(19): siRNA sense strand
aagcgaaacugaaggaaau

SEQ ID NO: 823178 - RNA, 19 nt, Homo sapiens
  misc_RNA (1)...(19): siRNA sense strand
gaacucaagcauuacauuc

SEQ ID NO: 823179 - RNA, 19 nt, Homo sapiens
  misc_RNA (1)...(19): siRNA sense strand
guacuacucagacuauuga

SEQ ID NO: 823180 - RNA, 19 nt, Homo sapiens
  misc_RNA (1)...(19): siRNA sense strand
acaugaauauggaagagua

SEQ ID NO: 823181 - RNA, 19 nt, Homo sapiens
  misc_RNA (1)...(19): siRNA sense strand
ugaccuauguagccgauuu

SEQ ID NO: 823182 - RNA, 19 nt, Homo sapiens
  misc_RNA (1)...(19): siRNA sense strand
ucccggacaugcugaaaua

SEQ ID NO: 823183 - RNA, 19 nt, Homo sapiens
  misc_RNA (1)...(19): siRNA sense strand
gcagaaaucaucgucuuga

SEQ ID NO: 823184 - RNA, 19 nt, Homo sapiens
  misc_RNA (1)...(19): siRNA sense strand
aaacacagcccgugccuau

SEQ ID NO: 823185 - RNA, 19 nt, Homo sapiens
  misc_RNA (1)...(19): siRNA sense strand
acaaggaaguauuagcaaa

SEQ ID NO: 823186 - RNA, 19 nt, Homo sapiens
  misc_RNA (1)...(19): siRNA sense strand
uacaaugacaucucuguua

SEQ ID NO: 823187 - RNA, 19 nt, Homo sapiens
  misc_RNA (1)...(19): siRNA sense strand
caacuuagacgaguguuug

SEQ ID NO: 823188 - RNA, 19 nt, Homo sapiens
  misc_RNA (1)...(19): siRNA sense strand
gaaaauugucgaagucaua

SEQ ID NO: 823189 - RNA, 19 nt, Homo sapiens
  misc_RNA (1)...(19): siRNA sense strand
ggaaauugguccagaugac

SEQ ID NO: 823190 - RNA, 19 nt, Homo sapiens
  misc_RNA (1)...(19): siRNA sense strand
ucaguagccucuucucaug

SEQ ID NO: 823191 - RNA, 19 nt, Homo sapiens
  misc_RNA (1)...(19): siRNA sense strand
gcagcaagaugugagugaa

SEQ ID NO: 823192 - RNA, 19 nt, Homo sapiens
  misc_RNA (1)...(19): siRNA sense strand
gaacagcagcaagauguga

SEQ ID NO: 823193 - RNA, 19 nt, Homo sapiens
  misc_RNA (1)...(19): siRNA sense strand
caacaaggaaguauuagca

SEQ ID NO: 823194 - RNA, 19 nt, Homo sapiens
  misc_RNA (1)...(19): siRNA sense strand
gaugaucacuccguaacug

SEQ ID NO: 823195 - RNA, 19 nt, Homo sapiens
  misc_RNA (1)...(19): siRNA sense strand
ucacagaugaggagauaaa

SEQ ID NO: 823196 - RNA, 19 nt, Homo sapiens
  misc_RNA (1)...(19): siRNA sense strand
ggagggugauguugagcuu

SEQ ID NO: 823197 - RNA, 19 nt, Homo sapiens
  misc_RNA (1)...(19): siRNA sense strand
gagcaugcugugauuguaa

SEQ ID NO: 823198 - RNA, 19 nt, Homo sapiens
  misc_RNA (1)...(19): siRNA sense strand
ucacaggacuacucuacau

SEQ ID NO: 823199 - RNA, 19 nt, Homo sapiens
  misc_RNA (1)...(19): siRNA sense strand
caaguacaaugacaucucu

SEQ ID NO: 823200 - RNA, 19 nt, Homo sapiens
  misc_RNA (1)...(19): siRNA sense strand
gaaaguugaaggaggaaau

SEQ ID NO: 823201 - RNA, 19 nt, Homo sapiens
  misc_RNA (1)...(19): siRNA sense strand
ggaggccugagaaauguua

SEQ ID NO: 823202 - RNA, 19 nt, Homo sapiens
  misc_RNA (1)...(19): siRNA sense strand
ugaaagaucaaucagcauu

SEQ ID NO: 823203 - RNA, 19 nt, Homo sapiens
  misc_RNA (1)...(19): siRNA sense strand
gauuaaggcauuccaugaa

SEQ ID NO: 823204 - RNA, 19 nt, Homo sapiens
  misc_RNA (1)...(19): siRNA sense strand
gcugagcccugccaugcaa

SEQ ID NO: 823205 - RNA, 19 nt, Homo sapiens
  misc_RNA (1)...(19): siRNA sense strand
gaauuucgaagacuuguuc

SEQ ID NO: 823206 - RNA, 19 nt, Homo sapiens
  misc_RNA (1)...(19): siRNA sense strand
cagaaaucaucgucuugaa

SEQ ID NO: 823207 - RNA, 19 nt, Homo sapiens
  misc_RNA (1)...(19): siRNA sense strand
ucaagacacuguugcuaca

SEQ ID NO: 823208 - RNA, 19 nt, Homo sapiens
  misc_RNA (1)...(19): siRNA sense strand
gaagaaguugaaagagauu

SEQ ID NO: 823209 - RNA, 19 nt, Homo sapiens
  misc_RNA (1)...(19): siRNA sense strand
agucacagaugaggagaua

SEQ ID NO: 823210 - RNA, 19 nt, Homo sapiens
  misc_RNA (1)...(19): siRNA sense strand
guauuuguuugcucuaaug

SEQ ID NO: 823211 - RNA, 19 nt, Homo sapiens
  misc_RNA (1)...(19): siRNA sense strand
ucaaaugucagaaguggaa

SEQ ID NO: 823212 - RNA, 19 nt, Homo sapiens
  misc_RNA (1)...(19): siRNA sense strand
ggcaugaagauuauaguuu

SEQ ID NO: 823213 - RNA, 19 nt, Homo sapiens
  misc_RNA (1)...(19): siRNA sense strand
ggaacucaagcauuacauu

SEQ ID NO: 823214 - RNA, 19 nt, Homo sapiens
  misc_RNA (1)...(19): siRNA sense strand
ugcauucaccuuaucauua

SEQ ID NO: 823215 - RNA, 19 nt, Homo sapiens
  misc_RNA (1)...(19): siRNA sense strand
gcaaacagcugacaagaca

SEQ ID NO: 823216 - RNA, 19 nt, Homo sapiens
  misc_RNA (1)...(19): siRNA sense strand
gaagacacagcaugaauua

SEQ ID NO: 823217 - RNA, 19 nt, Homo sapiens
  misc_RNA (1)...(19): siRNA sense strand
gaagguuccugaugcuaua

SEQ ID NO: 823218 - RNA, 19 nt, Homo sapiens
  misc_RNA (1)...(19): siRNA sense strand
acacagaggugaaagcuaa

SEQ ID NO: 823219 - RNA, 19 nt, Homo sapiens
  misc_RNA (1)...(19): siRNA sense strand
gaaagacuguccaaucaca

SEQ ID NO: 823220 - RNA, 19 nt, Homo sapiens
  misc_RNA (1)...(19): siRNA sense strand
ccaaugaacugacuuguac

SEQ ID NO: 823221 - RNA, 19 nt, Homo sapiens
  misc_RNA (1)...(19): siRNA sense strand
gcagaaugaugucgacgaa

SEQ ID NO: 823222 - RNA, 19 nt, Homo sapiens
  misc_RNA (1)...(19): siRNA sense strand
ggacagaucggccagcaaa

SEQ ID NO: 823223 - RNA, 19 nt, Homo sapiens
  misc_RNA (1)...(19): siRNA sense strand
gaaagaaacgagagcagaa

SEQ ID NO: 823224 - RNA, 19 nt, Homo sapiens
  misc_RNA (1)...(19): siRNA sense strand
cagagaaggcugauauuaa

SEQ ID NO: 823225 - RNA, 19 nt, Homo sapiens
  misc_RNA (1)...(19): siRNA sense strand
ggaccuccguugacagauu

SEQ ID NO: 823226 - RNA, 19 nt, Homo sapiens
  misc_RNA (1)...(19): siRNA sense strand
aagaaagacuguccaauca

SEQ ID NO: 823227 - RNA, 19 nt, Homo sapiens
  misc_RNA (1)...(19): siRNA sense strand
gggauuagcacccagaauu

SEQ ID NO: 823228 - RNA, 19 nt, Homo sapiens
  misc_RNA (1)...(19): siRNA sense strand
ugaauuagaucacaauggu

SEQ ID NO: 823229 - RNA, 19 nt, Homo sapiens
  misc_RNA (1)...(19): siRNA sense strand
gauauuaagccuguuauug

SEQ ID NO: 823230 - RNA, 19 nt, Homo sapiens
  misc_RNA (1)...(19): siRNA sense strand
gcacuuagccacccaagca

SEQ ID NO: 823231 - RNA, 19 nt, Homo sapiens
  misc_RNA (1)...(19): siRNA sense strand
agagaaggcugauauuaag

SEQ ID NO: 823232 - RNA, 19 nt, Homo sapiens
  misc_RNA (1)...(19): siRNA sense strand
gaguggcucuguaguguug

SEQ ID NO: 823233 - RNA, 19 nt, Homo sapiens
  misc_RNA (1)...(19): siRNA sense strand
agaaugaugucgacgaaga

SEQ ID NO: 823234 - RNA, 19 nt, Homo sapiens
  misc_RNA (1)...(19): siRNA sense strand
gauaggaccuccguugaca

SEQ ID NO: 823235 - RNA, 19 nt, Homo sapiens
  misc_RNA (1)...(19): siRNA sense strand
ggagcugggucaugucaau

SEQ ID NO: 823236 - RNA, 19 nt, Homo sapiens
  misc_RNA (1)...(19): siRNA sense strand
ucaauggacugguggacaa

SEQ ID NO: 823237 - RNA, 19 nt, Homo sapiens
  misc_RNA (1)...(19): siRNA sense strand
gaugguaucuuggccacaa

SEQ ID NO: 823238 - RNA, 19 nt, Homo sapiens
  misc_RNA (1)...(19): siRNA sense strand
gcagcauauugaaacauuu

SEQ ID NO: 823239 - RNA, 19 nt, Homo sapiens
  misc_RNA (1)...(19): siRNA sense strand
gugcugaaccagaagaaua

SEQ ID NO: 823240 - RNA, 19 nt, Homo sapiens
  misc_RNA (1)...(19): siRNA sense strand
ggaggaaaccacagggaaa

SEQ ID NO: 823241 - RNA, 19 nt, Homo sapiens
  misc_RNA (1)...(19): siRNA sense strand
caaggaagguggagaucuc

SEQ ID NO: 823242 - RNA, 19 nt, Homo sapiens
  misc_RNA (1)...(19): siRNA sense strand
cuauugcccucuccuguuu

SEQ ID NO: 823243 - RNA, 19 nt, Homo sapiens
  misc_RNA (1)...(19): siRNA sense strand
gacaucggcugcaguucuu

SEQ ID NO: 823244 - RNA, 19 nt, Homo sapiens
  misc_RNA (1)...(19): siRNA sense strand
aaagaaagacuguccaauc

SEQ ID NO: 823245 - RNA, 19 nt, Homo sapiens
  misc_RNA (1)...(19): siRNA sense strand
caauuucaguugcccaaug

SEQ ID NO: 823246 - RNA, 19 nt, Homo sapiens
  misc_RNA (1)...(19): siRNA sense strand
gcaaagaaagacuguccaa

SEQ ID NO: 823247 - RNA, 19 nt, Homo sapiens
  misc_RNA (1)...(19): siRNA sense strand
agacacagcaugaauuaga

SEQ ID NO: 823248 - RNA, 19 nt, Homo sapiens
  misc_RNA (1)...(19): siRNA sense strand
aaagucugcuucacgugua

SEQ ID NO: 823249 - RNA, 19 nt, Homo sapiens
  misc_RNA (1)...(19): siRNA sense strand
acagagaaggcugauauua

SEQ ID NO: 823250 - RNA, 19 nt, Homo sapiens
  misc_RNA (1)...(19): siRNA sense strand
agacagagaaggcugauau

SEQ ID NO: 823251 - RNA, 19 nt, Homo sapiens
  misc_RNA (1)...(19): siRNA sense strand
cagcaaaacugaacuaaag

SEQ ID NO: 823252 - RNA, 19 nt, Homo sapiens
  misc_RNA (1)...(19): siRNA sense strand
uuugaacucugagcacuua

SEQ ID NO: 823253 - RNA, 19 nt, Homo sapiens
  misc_RNA (1)...(19): siRNA sense strand
gcugauauuaagccuguua

SEQ ID NO: 823254 - RNA, 19 nt, Homo sapiens
  misc_RNA (1)...(19): siRNA sense strand
cagcggagccagacuaugu

SEQ ID NO: 823255 - RNA, 19 nt, Homo sapiens
  misc_RNA (1)...(19): siRNA sense strand
caacagccaaccaacgauu

SEQ ID NO: 823256 - RNA, 19 nt, Homo sapiens
  misc_RNA (1)...(19): siRNA sense strand
ggacaucggcugcaguucu

SEQ ID NO: 823257 - RNA, 19 nt, Homo sapiens
  misc_RNA (1)...(19): siRNA sense strand
gacacagcaugaauuagau

SEQ ID NO: 823258 - RNA, 19 nt, Homo sapiens
  misc_RNA (1)...(19): siRNA sense strand
gacaagacaccuacaccuu

SEQ ID NO: 823259 - RNA, 19 nt, Homo sapiens
  misc_RNA (1)...(19): siRNA sense strand
uuaagaagacacagcauga

SEQ ID NO: 823260 - RNA, 19 nt, Homo sapiens
  misc_RNA (1)...(19): siRNA sense strand
gaacaccagcacuuugcaa

SEQ ID NO: 823261 - RNA, 19 nt, Homo sapiens
  misc_RNA (1)...(19): siRNA sense strand
uauuaagccuguuauugug

SEQ ID NO: 823262 - RNA, 19 nt, Homo sapiens
  misc_RNA (1)...(19): siRNA sense strand
cagaagaauaugacacuga

SEQ ID NO: 823263 - RNA, 19 nt, Homo sapiens
  misc_RNA (1)...(19): siRNA sense strand
gaaccgaauccacaagaag

SEQ ID NO: 823264 - RNA, 19 nt, Homo sapiens
  misc_RNA (1)...(19): siRNA sense strand
gcgcuccagugcagcauau

SEQ ID NO: 823265 - RNA, 19 nt, Homo sapiens
  misc_RNA (1)...(19): siRNA sense strand
gcaagcagcaggagauggu

SEQ ID NO: 823266 - RNA, 19 nt, Homo sapiens
  misc_RNA (1)...(19): siRNA sense strand
ggauuagcacccagaauuc

SEQ ID NO: 823267 - RNA, 19 nt, Homo sapiens
  misc_RNA (1)...(19): siRNA sense strand
ugaaccgaauccacaagaa

SEQ ID NO: 823268 - RNA, 19 nt, Homo sapiens
  misc_RNA (1)...(19): siRNA sense strand
gaggacaucggcugcaguu

SEQ ID NO: 823269 - RNA, 19 nt, Homo sapiens
  misc_RNA (1)...(19): siRNA sense strand
agaagacacagcaugaauu

SEQ ID NO: 823270 - RNA, 19 nt, Homo sapiens
  misc_RNA (1)...(19): siRNA sense strand
gaccuccguugacagauuc

SEQ ID NO: 823271 - RNA, 19 nt, Homo sapiens
  misc_RNA (1)...(19): siRNA sense strand
gccagguguuugaucguuu

SEQ ID NO: 823272 - RNA, 19 nt, Homo sapiens
  misc_RNA (1)...(19): siRNA sense strand
cagcaugaauuagaucaca

SEQ ID NO: 823273 - RNA, 19 nt, Homo sapiens
  misc_RNA (1)...(19): siRNA sense strand
agaccaagacgaucgugua

SEQ ID NO: 823274 - RNA, 19 nt, Homo sapiens
  misc_RNA (1)...(19): siRNA sense strand
cuaccagguucuagcaaga

SEQ ID NO: 823275 - RNA, 19 nt, Homo sapiens
  misc_RNA (1)...(19): siRNA sense strand
uacagcagcccuacugauu

SEQ ID NO: 823276 - RNA, 19 nt, Homo sapiens
  misc_RNA (1)...(19): siRNA sense strand
gaacacagaggugaaagcu

SEQ ID NO: 823277 - RNA, 19 nt, Homo sapiens
  misc_RNA (1)...(19): siRNA sense strand
ugcagcauauugaaacauu

SEQ ID NO: 823278 - RNA, 19 nt, Homo sapiens
  misc_RNA (1)...(19): siRNA sense strand
agacaucauugacguggau

SEQ ID NO: 823279 - RNA, 19 nt, Homo sapiens
  misc_RNA (1)...(19): siRNA sense strand
cgagaacaccagcacuuug

SEQ ID NO: 823280 - RNA, 19 nt, Homo sapiens
  misc_RNA (1)...(19): siRNA sense strand
gcaucauugugaagacaga

SEQ ID NO: 823281 - RNA, 19 nt, Homo sapiens
  misc_RNA (1)...(19): siRNA sense strand
ccacaccgucggcaucauu

SEQ ID NO: 823282 - RNA, 19 nt, Homo sapiens
  misc_RNA (1)...(19): siRNA sense strand
aauuucaguugcccaauga

SEQ ID NO: 823283 - RNA, 19 nt, Homo sapiens
  misc_RNA (1)...(19): siRNA sense strand
aaaaggagcugggucaugu

SEQ ID NO: 823284 - RNA, 19 nt, Homo sapiens
  misc_RNA (1)...(19): siRNA sense strand
cagauaggaccuccguuga

SEQ ID NO: 823285 - RNA, 19 nt, Homo sapiens
  misc_RNA (1)...(19): siRNA sense strand
gaauaugacacugagcaau

SEQ ID NO: 823286 - RNA, 19 nt, Homo sapiens
  misc_RNA (1)...(19): siRNA sense strand
gcacuaccagguucuagca

SEQ ID NO: 823287 - RNA, 19 nt, Homo sapiens
  misc_RNA (1)...(19): siRNA sense strand
gaaucacagaugcaccuuu

SEQ ID NO: 823288 - RNA, 19 nt, Homo sapiens
  misc_RNA (1)...(19): siRNA sense strand
ucgaacauguggugcugaa

SEQ ID NO: 823289 - RNA, 19 nt, Homo sapiens
  misc_RNA (1)...(19): siRNA sense strand
uaagaagacacagcaugaa

SEQ ID NO: 823290 - RNA, 19 nt, Homo sapiens
  misc_RNA (1)...(19): siRNA sense strand
aaagaaacgagagcagaaa

SEQ ID NO: 823291 - RNA, 19 nt, Homo sapiens
  misc_RNA (1)...(19): siRNA sense strand
gagaacaccagcacuuugc

SEQ ID NO: 823292 - RNA, 19 nt, Homo sapiens
  misc_RNA (1)...(19): siRNA sense strand
ugucaccggugcacuguuc

SEQ ID NO: 823293 - RNA, 19 nt, Homo sapiens
  misc_RNA (1)...(19): siRNA sense strand
gacagagaaggcugauauu

SEQ ID NO: 823294 - RNA, 19 nt, Homo sapiens
  misc_RNA (1)...(19): siRNA sense strand
aaucacagaugcaccuuuu

SEQ ID NO: 823295 - RNA, 19 nt, Homo sapiens
  misc_RNA (1)...(19): siRNA sense strand
ggacaccguuucgcagcau

SEQ ID NO: 823296 - RNA, 19 nt, Homo sapiens
  misc_RNA (1)...(19): siRNA sense strand
ccagguguuugaucguuuc

SEQ ID NO: 823297 - RNA, 19 nt, Homo sapiens
  misc_RNA (1)...(19): siRNA sense strand
gcaugaauuagaucacaau

SEQ ID NO: 823298 - RNA, 19 nt, Homo sapiens
  misc_RNA (1)...(19): siRNA sense strand
ccuuugagcugcugauugc

SEQ ID NO: 823299 - RNA, 19 nt, Homo sapiens
  misc_RNA (1)...(19): siRNA sense strand
gucggaagccugagaagga

SEQ ID NO: 823300 - RNA, 19 nt, Homo sapiens
  misc_RNA (1)...(19): siRNA sense strand
ugggaucccugaggaauca

SEQ ID NO: 823301 - RNA, 19 nt, Homo sapiens
  misc_RNA (1)...(19): siRNA sense strand
gaaccagaagaauaugaca

SEQ ID NO: 823302 - RNA, 19 nt, Homo sapiens
  misc_RNA (1)...(19): siRNA sense strand
gcaagaggagaagaaagga

SEQ ID NO: 823303 - RNA, 19 nt, Homo sapiens
  misc_RNA (1)...(19): siRNA sense strand
cccaaugaacugacuugua

SEQ ID NO: 823304 - RNA, 19 nt, Homo sapiens
  misc_RNA (1)...(19): siRNA sense strand
ugaagguuccugaugcuau

SEQ ID NO: 823305 - RNA, 19 nt, Homo sapiens
  misc_RNA (1)...(19): siRNA sense strand
gcagucggaagccugagaa

SEQ ID NO: 823306 - RNA, 19 nt, Homo sapiens
  misc_RNA (1)...(19): siRNA sense strand
caccuacaccuucccacua

SEQ ID NO: 823307 - RNA, 19 nt, Homo sapiens
  misc_RNA (1)...(19): siRNA sense strand
ccagugcagcauauugaaa

SEQ ID NO: 823308 - RNA, 19 nt, Homo sapiens
  misc_RNA (1)...(19): siRNA sense strand
agauggauguguccgaauc

SEQ ID NO: 823309 - RNA, 19 nt, Homo sapiens
  misc_RNA (1)...(19): siRNA sense strand
caaagaaagacuguccaau

SEQ ID NO: 823310 - RNA, 19 nt, Homo sapiens
  misc_RNA (1)...(19): siRNA sense strand
gucaccaccucccugcaaa

SEQ ID NO: 823311 - RNA, 19 nt, Homo sapiens
  misc_RNA (1)...(19): siRNA sense strand
uaaaaucucaguaccaguu

SEQ ID NO: 823312 - RNA, 19 nt, Homo sapiens
  misc_RNA (1)...(19): siRNA sense strand
gggagaaaauggagaccaa

SEQ ID NO: 823313 - RNA, 19 nt, Homo sapiens
  misc_RNA (1)...(19): siRNA sense strand
aaauggagaccaagacgau

SEQ ID NO: 823314 - RNA, 19 nt, Homo sapiens
  misc_RNA (1)...(19): siRNA sense strand
cacaacagccaaccaacga

SEQ ID NO: 823315 - RNA, 19 nt, Homo sapiens
  misc_RNA (1)...(19): siRNA sense strand
gaacaaagguugcagauuc

SEQ ID NO: 823316 - RNA, 19 nt, Homo sapiens
  misc_RNA (1)...(19): siRNA sense strand
gagaauaucugacauaaug

SEQ ID NO: 823317 - RNA, 19 nt, Homo sapiens
  misc_RNA (1)...(19): siRNA sense strand
gagcaucucuuucaacaua

SEQ ID NO: 823318 - RNA, 19 nt, Homo sapiens
  misc_RNA (1)...(19): siRNA sense strand
gaacagaacagauaagaaa

SEQ ID NO: 823319 - RNA, 19 nt, Homo sapiens
  misc_RNA (1)...(19): siRNA sense strand
gaacauaagcuagcaaauu

SEQ ID NO: 823320 - RNA, 19 nt, Homo sapiens
  misc_RNA (1)...(19): siRNA sense strand
gcaaugauccacaguuuaa

SEQ ID NO: 823321 - RNA, 19 nt, Homo sapiens
  misc_RNA (1)...(19): siRNA sense strand
cacauuagcuuccaaagaa

SEQ ID NO: 823322 - RNA, 19 nt, Homo sapiens
  misc_RNA (1)...(19): siRNA sense strand
ucaaagaacucaagcugaa

SEQ ID NO: 823323 - RNA, 19 nt, Homo sapiens
  misc_RNA (1)...(19): siRNA sense strand
gaacaaacacucccacaug

SEQ ID NO: 823324 - RNA, 19 nt, Homo sapiens
  misc_RNA (1)...(19): siRNA sense strand
gaaacucacacgacuauuu

SEQ ID NO: 823325 - RNA, 19 nt, Homo sapiens
  misc_RNA (1)...(19): siRNA sense strand
caaacuugcugcugaugua

SEQ ID NO: 823326 - RNA, 19 nt, Homo sapiens
  misc_RNA (1)...(19): siRNA sense strand
gaaaagaguugagcauuaa

SEQ ID NO: 823327 - RNA, 19 nt, Homo sapiens
  misc_RNA (1)...(19): siRNA sense strand
gagauugucuucagaauac

SEQ ID NO: 823328 - RNA, 19 nt, Homo sapiens
  misc_RNA (1)...(19): siRNA sense strand
ugagagaaguugagagaaa

SEQ ID NO: 823329 - RNA, 19 nt, Homo sapiens
  misc_RNA (1)...(19): siRNA sense strand
ucacucagaugauguuuga

SEQ ID NO: 823330 - RNA, 19 nt, Homo sapiens
  misc_RNA (1)...(19): siRNA sense strand
gaaaagaaguacagaauca

SEQ ID NO: 823331 - RNA, 19 nt, Homo sapiens
  misc_RNA (1)...(19): siRNA sense strand
uaaaggaucagauuuguga

SEQ ID NO: 823332 - RNA, 19 nt, Homo sapiens
  misc_RNA (1)...(19): siRNA sense strand
gaaagaguccuuggugaaa

SEQ ID NO: 823333 - RNA, 19 nt, Homo sapiens
  misc_RNA (1)...(19): siRNA sense strand
gaaagagcgcagagugaua

SEQ ID NO: 823334 - RNA, 19 nt, Homo sapiens
  misc_RNA (1)...(19): siRNA sense strand
gcagcaaguugaaucagaa

SEQ ID NO: 823335 - RNA, 19 nt, Homo sapiens
  misc_RNA (1)...(19): siRNA sense strand
gagaaaguauagcagcaaa

SEQ ID NO: 823336 - RNA, 19 nt, Homo sapiens
  misc_RNA (1)...(19): siRNA sense strand
caaacacucccacaugaua

SEQ ID NO: 823337 - RNA, 19 nt, Homo sapiens
  misc_RNA (1)...(19): siRNA sense strand
ugauggaucuccuuaagaa

SEQ ID NO: 823338 - RNA, 19 nt, Homo sapiens
  misc_RNA (1)...(19): siRNA sense strand
gaugaggcuuuaacaagaa

SEQ ID NO: 823339 - RNA, 19 nt, Homo sapiens
  misc_RNA (1)...(19): siRNA sense strand
aaacucacacgacuauuua

SEQ ID NO: 823340 - RNA, 19 nt, Homo sapiens
  misc_RNA (1)...(19): siRNA sense strand
ccauugauauccuuagaaa

SEQ ID NO: 823341 - RNA, 19 nt, Homo sapiens
  misc_RNA (1)...(19): siRNA sense strand
ggaaagggaagauaaggaa

SEQ ID NO: 823342 - RNA, 19 nt, Homo sapiens
  misc_RNA (1)...(19): siRNA sense strand
gaacucaagcugaaacaga

SEQ ID NO: 823343 - RNA, 19 nt, Homo sapiens
  misc_RNA (1)...(19): siRNA sense strand
gaagccauacuaaauguuu

SEQ ID NO: 823344 - RNA, 19 nt, Homo sapiens
  misc_RNA (1)...(19): siRNA sense strand
guacaaagccgugaaguca

SEQ ID NO: 823345 - RNA, 19 nt, Homo sapiens
  misc_RNA (1)...(19): siRNA sense strand
gcuuuaacgucagauaaua

SEQ ID NO: 823346 - RNA, 19 nt, Homo sapiens
  misc_RNA (1)...(19): siRNA sense strand
uagcaaugauccacaguuu

SEQ ID NO: 823347 - RNA, 19 nt, Homo sapiens
  misc_RNA (1)...(19): siRNA sense strand
gaacucuuaucaccuuguu

SEQ ID NO: 823348 - RNA, 19 nt, Homo sapiens
  misc_RNA (1)...(19): siRNA sense strand
gaacaugaaauacugacaa

SEQ ID NO: 823349 - RNA, 19 nt, Homo sapiens
  misc_RNA (1)...(19): siRNA sense strand
gcacggacacuugcuagua

SEQ ID NO: 823350 - RNA, 19 nt, Homo sapiens
  misc_RNA (1)...(19): siRNA sense strand
gaaagcaggcuacaagauc

SEQ ID NO: 823351 - RNA, 19 nt, Homo sapiens
  misc_RNA (1)...(19): siRNA sense strand
gaaaugaaacuauccacau

SEQ ID NO: 823352 - RNA, 19 nt, Homo sapiens
  misc_RNA (1)...(19): siRNA sense strand
gaaacauucaucagacuuu

SEQ ID NO: 823353 - RNA, 19 nt, Homo sapiens
  misc_RNA (1)...(19): siRNA sense strand
gugagaauaucugacauaa

SEQ ID NO: 823354 - RNA, 19 nt, Homo sapiens
  misc_RNA (1)...(19): siRNA sense strand
ggaagaaaccauugauauc

SEQ ID NO: 823355 - RNA, 19 nt, Homo sapiens
  misc_RNA (1)...(19): siRNA sense strand
ugaagaacaugaaauacug

SEQ ID NO: 823356 - RNA, 19 nt, Homo sapiens
  misc_RNA (1)...(19): siRNA sense strand
gcagugcauucaacuucua

SEQ ID NO: 823357 - RNA, 19 nt, Homo sapiens
  misc_RNA (1)...(19): siRNA sense strand
guuccuggauugaauauug

SEQ ID NO: 823358 - RNA, 19 nt, Homo sapiens
  misc_RNA (1)...(19): siRNA sense strand
guaccacucuuauagaaca

SEQ ID NO: 823359 - RNA, 19 nt, Homo sapiens
  misc_RNA (1)...(19): siRNA sense strand
ggaaauauuugaggauguc

SEQ ID NO: 823360 - RNA, 19 nt, Homo sapiens
  misc_RNA (1)...(19): siRNA sense strand
gaaggucguuuggaagaga

SEQ ID NO: 823361 - RNA, 19 nt, Homo sapiens
  misc_RNA (1)...(19): siRNA sense strand
gguaaaggaucagauuugu

SEQ ID NO: 823362 - RNA, 19 nt, Homo sapiens
  misc_RNA (1)...(19): siRNA sense strand
gcacaaucuuucuguucaa

SEQ ID NO: 823363 - RNA, 19 nt, Homo sapiens
  misc_RNA (1)...(19): siRNA sense strand
aagcagaacagaacagaua

SEQ ID NO: 823364 - RNA, 19 nt, Homo sapiens
  misc_RNA (1)...(19): siRNA sense strand
guguuuaacuccucauuug

SEQ ID NO: 823365 - RNA, 19 nt, Homo sapiens
  misc_RNA (1)...(19): siRNA sense strand
cagaacauauacccagaaa

SEQ ID NO: 823366 - RNA, 19 nt, Homo sapiens
  misc_RNA (1)...(19): siRNA sense strand
gggaagccauacuaaaugu

SEQ ID NO: 823367 - RNA, 19 nt, Homo sapiens
  misc_RNA (1)...(19): siRNA sense strand
aaacgcacauaaagacauu

SEQ ID NO: 823368 - RNA, 19 nt, Homo sapiens
  misc_RNA (1)...(19): siRNA sense strand
gcuaguauguugagagaag

SEQ ID NO: 823369 - RNA, 19 nt, Homo sapiens
  misc_RNA (1)...(19): siRNA sense strand
caccagauaugagcacuuu

SEQ ID NO: 823370 - RNA, 19 nt, Homo sapiens
  misc_RNA (1)...(19): siRNA sense strand
ggugauggcacucuaacua

SEQ ID NO: 823371 - RNA, 19 nt, Homo sapiens
  misc_RNA (1)...(19): siRNA sense strand
ugacucagcugcgccauau

SEQ ID NO: 823372 - RNA, 19 nt, Homo sapiens
  misc_RNA (1)...(19): siRNA sense strand
uuaauuacguuccugauag

SEQ ID NO: 823373 - RNA, 19 nt, Homo sapiens
  misc_RNA (1)...(19): siRNA sense strand
agaaaagaguugagcauua

SEQ ID NO: 823374 - RNA, 19 nt, Homo sapiens
  misc_RNA (1)...(19): siRNA sense strand
aaaucuagaugaggcuuua

SEQ ID NO: 823375 - RNA, 19 nt, Homo sapiens
  misc_RNA (1)...(19): siRNA sense strand
cauagaugcugcuaacugu

SEQ ID NO: 823376 - RNA, 19 nt, Homo sapiens
  misc_RNA (1)...(19): siRNA sense strand
ucaacuagcaguagacauu

SEQ ID NO: 823377 - RNA, 19 nt, Homo sapiens
  misc_RNA (1)...(19): siRNA sense strand
aacaaacacucccacauga

SEQ ID NO: 823378 - RNA, 19 nt, Homo sapiens
  misc_RNA (1)...(19): siRNA sense strand
caagaggaauugaacaaac

SEQ ID NO: 823379 - RNA, 19 nt, Homo sapiens
  misc_RNA (1)...(19): siRNA sense strand
gcaaguugaaucagaaaga

SEQ ID NO: 823380 - RNA, 19 nt, Homo sapiens
  misc_RNA (1)...(19): siRNA sense strand
acaggaaacagaacauaua

SEQ ID NO: 823381 - RNA, 19 nt, Homo sapiens
  misc_RNA (1)...(19): siRNA sense strand
caacaggaaacagaacaua

SEQ ID NO: 823382 - RNA, 19 nt, Homo sapiens
  misc_RNA (1)...(19): siRNA sense strand
agaugaggcuuuaacaaga

SEQ ID NO: 823383 - RNA, 19 nt, Homo sapiens
  misc_RNA (1)...(19): siRNA sense strand
gaauuaagcagaacagaac

SEQ ID NO: 823384 - RNA, 19 nt, Homo sapiens
  misc_RNA (1)...(19): siRNA sense strand
agacagagaacauaagcua

SEQ ID NO: 823385 - RNA, 19 nt, Homo sapiens
  misc_RNA (1)...(19): siRNA sense strand
acaaagccgugaagucaga

SEQ ID NO: 823386 - RNA, 19 nt, Homo sapiens
  misc_RNA (1)...(19): siRNA sense strand
gauuugugaugugagaaua

SEQ ID NO: 823387 - RNA, 19 nt, Homo sapiens
  misc_RNA (1)...(19): siRNA sense strand
gaaaguauagcagcaaaca

SEQ ID NO: 823388 - RNA, 19 nt, Homo sapiens
  misc_RNA (1)...(19): siRNA sense strand
gugaaaggauugccaaguc

SEQ ID NO: 823389 - RNA, 19 nt, Homo sapiens
  misc_RNA (1)...(19): siRNA sense strand
aaacaaugccuauagacaa

SEQ ID NO: 823390 - RNA, 19 nt, Homo sapiens
  misc_RNA (1)...(19): siRNA sense strand
gcaagaggaauugaacaaa

SEQ ID NO: 823391 - RNA, 19 nt, Homo sapiens
  misc_RNA (1)...(19): siRNA sense strand
gcucgaaacauucaucaga

SEQ ID NO: 823392 - RNA, 19 nt, Homo sapiens
  misc_RNA (1)...(19): siRNA sense strand
gaaaccauugauauccuua

SEQ ID NO: 823393 - RNA, 19 nt, Homo sapiens
  misc_RNA (1)...(19): siRNA sense strand
gaagaacaugaaauacuga

SEQ ID NO: 823394 - RNA, 19 nt, Homo sapiens
  misc_RNA (1)...(19): siRNA sense strand
gagcgcagagugauauuga

SEQ ID NO: 823395 - RNA, 19 nt, Homo sapiens
  misc_RNA (1)...(19): siRNA sense strand
gaauggugguaaaggauca

SEQ ID NO: 823396 - RNA, 19 nt, Homo sapiens
  misc_RNA (1)...(19): siRNA sense strand
gauaauagagaacaaguac

SEQ ID NO: 823397 - RNA, 19 nt, Homo sapiens
  misc_RNA (1)...(19): siRNA sense strand
caaguauuaggucuucuua

SEQ ID NO: 823398 - RNA, 19 nt, Homo sapiens
  misc_RNA (1)...(19): siRNA sense strand
ggcacaaucuuucuguuca

SEQ ID NO: 823399 - RNA, 19 nt, Homo sapiens
  misc_RNA (1)...(19): siRNA sense strand
gacacuugcuaguauguug

SEQ ID NO: 823400 - RNA, 19 nt, Homo sapiens
  misc_RNA (1)...(19): siRNA sense strand
uaauuacguuccugauaga

SEQ ID NO: 823401 - RNA, 19 nt, Homo sapiens
  misc_RNA (1)...(19): siRNA sense strand
gagaacauaagcuagcaaa

SEQ ID NO: 823402 - RNA, 19 nt, Homo sapiens
  misc_RNA (1)...(19): siRNA sense strand
gaaacuauccacauuagcu

SEQ ID NO: 823403 - RNA, 19 nt, Homo sapiens
  misc_RNA (1)...(19): siRNA sense strand
caucagacuuuucaacuaa

SEQ ID NO: 823404 - RNA, 19 nt, Homo sapiens
  misc_RNA (1)...(19): siRNA sense strand
gcacauaaagacauugagu

SEQ ID NO: 823405 - RNA, 19 nt, Homo sapiens
  misc_RNA (1)...(19): siRNA sense strand
gugccaauauagaugaauu

SEQ ID NO: 823406 - RNA, 19 nt, Homo sapiens
  misc_RNA (1)...(19): siRNA sense strand
ucacacgacuauuuacauc

SEQ ID NO: 823407 - RNA, 19 nt, Homo sapiens
  misc_RNA (1)...(19): siRNA sense strand
guguaccacucuuauagaa

SEQ ID NO: 823408 - RNA, 19 nt, Homo sapiens
  misc_RNA (1)...(19): siRNA sense strand
aaagaaagcaggcuacaag

SEQ ID NO: 823409 - RNA, 19 nt, Homo sapiens
  misc_RNA (1)...(19): siRNA sense strand
uaacuccucauuugaaaga

SEQ ID NO: 823410 - RNA, 19 nt, Homo sapiens
  misc_RNA (1)...(19): siRNA sense strand
gaccugggauuuggaacaa

SEQ ID NO: 823411 - RNA, 19 nt, Homo sapiens
  misc_RNA (1)...(19): siRNA sense strand
acacgacuauuuacaucaa

SEQ ID NO: 823412 - RNA, 19 nt, Homo sapiens
  misc_RNA (1)...(19): siRNA sense strand
gugcuucacugaucuuaag

SEQ ID NO: 823413 - RNA, 19 nt, Homo sapiens
  misc_RNA (1)...(19): siRNA sense strand
gaagaaaccauugauaucc

SEQ ID NO: 823414 - RNA, 19 nt, Homo sapiens
  misc_RNA (1)...(19): siRNA sense strand
gauaaggaagaaaccauug

SEQ ID NO: 823415 - RNA, 19 nt, Homo sapiens
  misc_RNA (1)...(19): siRNA sense strand
caacaagacuuccagcuuu

SEQ ID NO: 823416 - RNA, 19 nt, Homo sapiens
  misc_RNA (1)...(19): siRNA sense strand
ggaccauccucauaguuua

SEQ ID NO: 823417 - RNA, 19 nt, Homo sapiens
  misc_RNA (1)...(19): siRNA sense strand
gagauggaccgcaacauua

SEQ ID NO: 823418 - RNA, 19 nt, Homo sapiens
  misc_RNA (1)...(19): siRNA sense strand
ggaacgagauccaccacaa

SEQ ID NO: 823419 - RNA, 19 nt, Homo sapiens
  misc_RNA (1)...(19): siRNA sense strand
gcaaccagcucguggacuu

SEQ ID NO: 823420 - RNA, 19 nt, Homo sapiens
  misc_RNA (1)...(19): siRNA sense strand
ugaccaaccucccugcaua

SEQ ID NO: 823421 - RNA, 19 nt, Homo sapiens
  misc_RNA (1)...(19): siRNA sense strand
caacuacacugucaacuac

SEQ ID NO: 823422 - RNA, 19 nt, Homo sapiens
  misc_RNA (1)...(19): siRNA sense strand
caggaccgcuucuguguuu

SEQ ID NO: 823423 - RNA, 19 nt, Homo sapiens
  misc_RNA (1)...(19): siRNA sense strand
ccucauaguuuacagcauu

SEQ ID NO: 823424 - RNA, 19 nt, Homo sapiens
  misc_RNA (1)...(19): siRNA sense strand
guuaagagauugaggaaaa

SEQ ID NO: 823425 - RNA, 19 nt, Homo sapiens
  misc_RNA (1)...(19): siRNA sense strand
guauuacgguuccagaugu

SEQ ID NO: 823426 - RNA, 19 nt, Homo sapiens
  misc_RNA (1)...(19): siRNA sense strand
gggaccauccucauaguuu

SEQ ID NO: 823427 - RNA, 19 nt, Homo sapiens
  misc_RNA (1)...(19): siRNA sense strand
ccaacuaccugcagaacgu

SEQ ID NO: 823428 - RNA, 19 nt, Homo sapiens
  misc_RNA (1)...(19): siRNA sense strand
ggacucccugugugucuua

SEQ ID NO: 823429 - RNA, 19 nt, Homo sapiens
  misc_RNA (1)...(19): siRNA sense strand
agggaaagauggagguauu

SEQ ID NO: 823430 - RNA, 19 nt, Homo sapiens
  misc_RNA (1)...(19): siRNA sense strand
gggaaagauggagguauua

SEQ ID NO: 823431 - RNA, 19 nt, Homo sapiens
  misc_RNA (1)...(19): siRNA sense strand
ggguacaacuacacuguca

SEQ ID NO: 823432 - RNA, 19 nt, Homo sapiens
  misc_RNA (1)...(19): siRNA sense strand
ggauggaagucugcagugu

SEQ ID NO: 823433 - RNA, 19 nt, Homo sapiens
  misc_RNA (1)...(19): siRNA sense strand
gcuccuggacugccuauga

SEQ ID NO: 823434 - RNA, 19 nt, Homo sapiens
  misc_RNA (1)...(19): siRNA sense strand
acaacuacacugucaacua

SEQ ID NO: 823435 - RNA, 19 nt, Homo sapiens
  misc_RNA (1)...(19): siRNA sense strand
ccaacaagacuuccagcuu

SEQ ID NO: 823436 - RNA, 19 nt, Homo sapiens
  misc_RNA (1)...(19): siRNA sense strand
agagauggaccgcaacauu

SEQ ID NO: 823437 - RNA, 19 nt, Homo sapiens
  misc_RNA (1)...(19): siRNA sense strand
gcaauaaggauggaagucu

SEQ ID NO: 823438 - RNA, 19 nt, Homo sapiens
  misc_RNA (1)...(19): siRNA sense strand
gaaaauguccgugaaagga

SEQ ID NO: 823439 - RNA, 19 nt, Homo sapiens
  misc_RNA (1)...(19): siRNA sense strand
gaacgagauccaccacaag

SEQ ID NO: 823440 - RNA, 19 nt, Homo sapiens
  misc_RNA (1)...(19): siRNA sense strand
caugacgaguguucugaug

SEQ ID NO: 823441 - RNA, 19 nt, Homo sapiens
  misc_RNA (1)...(19): siRNA sense strand
gguauuacgguuccagaug

SEQ ID NO: 823442 - RNA, 19 nt, Homo sapiens
  misc_RNA (1)...(19): siRNA sense strand
agucacggcucaguuaaga

SEQ ID NO: 823443 - RNA, 19 nt, Homo sapiens
  misc_RNA (1)...(19): siRNA sense strand
ugacgaguguucugauguc

SEQ ID NO: 823444 - RNA, 19 nt, Homo sapiens
  misc_RNA (1)...(19): siRNA sense strand
gcagaagggccaacguuuu

SEQ ID NO: 823445 - RNA, 19 nt, Homo sapiens
  misc_RNA (1)...(19): siRNA sense strand
caacggcaauaaggaugga

SEQ ID NO: 823446 - RNA, 19 nt, Homo sapiens
  misc_RNA (1)...(19): siRNA sense strand
ucacggcucaguuaagaga

SEQ ID NO: 823447 - RNA, 19 nt, Homo sapiens
  misc_RNA (1)...(19): siRNA sense strand
aaaagucacggcucaguua

SEQ ID NO: 823448 - RNA, 19 nt, Homo sapiens
  misc_RNA (1)...(19): siRNA sense strand
cagcagaagggccaacguu

SEQ ID NO: 823449 - RNA, 19 nt, Homo sapiens
  misc_RNA (1)...(19): siRNA sense strand
gauacagcgaugugacuga

SEQ ID NO: 823450 - RNA, 19 nt, Homo sapiens
  misc_RNA (1)...(19): siRNA sense strand
agccagagcaggucauaaa

SEQ ID NO: 823451 - RNA, 19 nt, Homo sapiens
  misc_RNA (1)...(19): siRNA sense strand
ucgcaggcaugacgagugu

SEQ ID NO: 823452 - RNA, 19 nt, Homo sapiens
  misc_RNA (1)...(19): siRNA sense strand
ggaaagauggagguauuac

SEQ ID NO: 823453 - RNA, 19 nt, Homo sapiens
  misc_RNA (1)...(19): siRNA sense strand
guacugcaacggcaauaag

SEQ ID NO: 823454 - RNA, 19 nt, Homo sapiens
  misc_RNA (1)...(19): siRNA sense strand
cagcgucugugacuaucug

SEQ ID NO: 823455 - RNA, 19 nt, Homo sapiens
  misc_RNA (1)...(19): siRNA sense strand
gcaggcaugacgaguguuc

SEQ ID NO: 823456 - RNA, 19 nt, Homo sapiens
  misc_RNA (1)...(19): siRNA sense strand
gaagccagcgucugugacu

SEQ ID NO: 823457 - RNA, 19 nt, Homo sapiens
  misc_RNA (1)...(19): siRNA sense strand
ccacugugcccaugcagau

SEQ ID NO: 823458 - RNA, 19 nt, Homo sapiens
  misc_RNA (1)...(19): siRNA sense strand
gcgggaccauccucauagu

SEQ ID NO: 823459 - RNA, 19 nt, Homo sapiens
  misc_RNA (1)...(19): siRNA sense strand
uccuagagcuccugaaggu

SEQ ID NO: 823460 - RNA, 19 nt, Homo sapiens
  misc_RNA (1)...(19): siRNA sense strand
aaagucacggcucaguuaa

SEQ ID NO: 823461 - RNA, 19 nt, Homo sapiens
  misc_RNA (1)...(19): siRNA sense strand
cgagauccaccacaagaca

SEQ ID NO: 823462 - RNA, 19 nt, Homo sapiens
  misc_RNA (1)...(19): siRNA sense strand
cuccuggacugccuaugaa

SEQ ID NO: 823463 - RNA, 19 nt, Homo sapiens
  misc_RNA (1)...(19): siRNA sense strand
gaaagauggagguauuacg

SEQ ID NO: 823464 - RNA, 19 nt, Homo sapiens
  misc_RNA (1)...(19): siRNA sense strand
guacaacuacacugucaac

SEQ ID NO: 823465 - RNA, 19 nt, Homo sapiens
  misc_RNA (1)...(19): siRNA sense strand
gacgaguguucugauguca

SEQ ID NO: 823466 - RNA, 19 nt, Homo sapiens
  misc_RNA (1)...(19): siRNA sense strand
gccauuggacucccugugu

SEQ ID NO: 823467 - RNA, 19 nt, Homo sapiens
  misc_RNA (1)...(19): siRNA sense strand
guucacugccagaggguuu

SEQ ID NO: 823468 - RNA, 19 nt, Homo sapiens
  misc_RNA (1)...(19): siRNA sense strand
cggacaccgugguauggaa

SEQ ID NO: 823469 - RNA, 19 nt, Homo sapiens
  misc_RNA (1)...(19): siRNA sense strand
gcgaugugacugacagcaa

SEQ ID NO: 823470 - RNA, 19 nt, Homo sapiens
  misc_RNA (1)...(19): siRNA sense strand
agugcuaccuuccagacaa

SEQ ID NO: 823471 - RNA, 19 nt, Homo sapiens
  misc_RNA (1)...(19): siRNA sense strand
cuaugaagccagcgucugu

SEQ ID NO: 823472 - RNA, 19 nt, Homo sapiens
  misc_RNA (1)...(19): siRNA sense strand
ugacugacagcaaggcaau

SEQ ID NO: 823473 - RNA, 19 nt, Homo sapiens
  misc_RNA (1)...(19): siRNA sense strand
cggcucaguuaagagauug

SEQ ID NO: 823474 - RNA, 19 nt, Homo sapiens
  misc_RNA (1)...(19): siRNA sense strand
uggaagaggcggcucaucu

SEQ ID NO: 823475 - RNA, 19 nt, Homo sapiens
  misc_RNA (1)...(19): siRNA sense strand
gcuggccccuuacauuauu

SEQ ID NO: 823476 - RNA, 19 nt, Homo sapiens
  misc_RNA (1)...(19): siRNA sense strand
acacggaagagcugaaagu

SEQ ID NO: 823477 - RNA, 19 nt, Homo sapiens
  misc_RNA (1)...(19): siRNA sense strand
cugcgggaccauccucaua

SEQ ID NO: 823478 - RNA, 19 nt, Homo sapiens
  misc_RNA (1)...(19): siRNA sense strand
gaucaaggcugcccaauac

SEQ ID NO: 823479 - RNA, 19 nt, Homo sapiens
  misc_RNA (1)...(19): siRNA sense strand
ggaaguauguagagaguuc

SEQ ID NO: 823480 - RNA, 19 nt, Homo sapiens
  misc_RNA (1)...(19): siRNA sense strand
ggagauaaauggacgcaau

SEQ ID NO: 823481 - RNA, 19 nt, Homo sapiens
  misc_RNA (1)...(19): siRNA sense strand
cauaauaucugccgaacau

SEQ ID NO: 823482 - RNA, 19 nt, Homo sapiens
  misc_RNA (1)...(19): siRNA sense strand
gggaauuccucaagcugua

SEQ ID NO: 823483 - RNA, 19 nt, Homo sapiens
  misc_RNA (1)...(19): siRNA sense strand
aaacgcaguuggagauaaa

SEQ ID NO: 823484 - RNA, 19 nt, Homo sapiens
  misc_RNA (1)...(19): siRNA sense strand
gagauaaauggacgcaaua

SEQ ID NO: 823485 - RNA, 19 nt, Homo sapiens
  misc_RNA (1)...(19): siRNA sense strand
gaaaaugauugucgguuug

SEQ ID NO: 823486 - RNA, 19 nt, Homo sapiens
  misc_RNA (1)...(19): siRNA sense strand
ggccagacacggaauguaa

SEQ ID NO: 823487 - RNA, 19 nt, Homo sapiens
  misc_RNA (1)...(19): siRNA sense strand
gacacggaauguaaauuug

SEQ ID NO: 823488 - RNA, 19 nt, Homo sapiens
  misc_RNA (1)...(19): siRNA sense strand
gcaacaacaucugccacaa

SEQ ID NO: 823489 - RNA, 19 nt, Homo sapiens
  misc_RNA (1)...(19): siRNA sense strand
agacacggaauguaaauuu

SEQ ID NO: 823490 - RNA, 19 nt, Homo sapiens
  misc_RNA (1)...(19): siRNA sense strand
caacaucugccacaagugu

SEQ ID NO: 823491 - RNA, 19 nt, Homo sapiens
  misc_RNA (1)...(19): siRNA sense strand
uaaauggacgcaauaacuu

SEQ ID NO: 823492 - RNA, 19 nt, Homo sapiens
  misc_RNA (1)...(19): siRNA sense strand
acaaguauguuacccagau

SEQ ID NO: 823493 - RNA, 19 nt, Homo sapiens
  misc_RNA (1)...(19): siRNA sense strand
ccagggagaacugcaaaua

SEQ ID NO: 823494 - RNA, 19 nt, Homo sapiens
  misc_RNA (1)...(19): siRNA sense strand
gaauccgggugucccugua

SEQ ID NO: 823495 - RNA, 19 nt, Homo sapiens
  misc_RNA (1)...(19): siRNA sense strand
ucgaaaagcugccaaguug

SEQ ID NO: 823496 - RNA, 19 nt, Homo sapiens
  misc_RNA (1)...(19): siRNA sense strand
caaccagauacccauaaua

SEQ ID NO: 823497 - RNA, 19 nt, Homo sapiens
  misc_RNA (1)...(19): siRNA sense strand
caucagcagccgccuuuaa

SEQ ID NO: 823498 - RNA, 19 nt, Homo sapiens
  misc_RNA (1)...(19): siRNA sense strand
gcaaaugcaacuagccaau

SEQ ID NO: 823499 - RNA, 19 nt, Homo sapiens
  misc_RNA (1)...(19): siRNA sense strand
agacagacuugagguaugu

SEQ ID NO: 823500 - RNA, 19 nt, Homo sapiens
  misc_RNA (1)...(19): siRNA sense strand
ccaaccagauacccauaau

SEQ ID NO: 823501 - RNA, 19 nt, Homo sapiens
  misc_RNA (1)...(19): siRNA sense strand
gaacugcaaauaucuucau

SEQ ID NO: 823502 - RNA, 19 nt, Homo sapiens
  misc_RNA (1)...(19): siRNA sense strand
gcauuucucccaccaguuc

SEQ ID NO: 823503 - RNA, 19 nt, Homo sapiens
  misc_RNA (1)...(19): siRNA sense strand
acaacagcauacagcauuu

SEQ ID NO: 823504 - RNA, 19 nt, Homo sapiens
  misc_RNA (1)...(19): siRNA sense strand
ugacaccaaugacaacaca

SEQ ID NO: 823505 - RNA, 19 nt, Homo sapiens
  misc_RNA (1)...(19): siRNA sense strand
gaaaagcugccaaguugaa

SEQ ID NO: 823506 - RNA, 19 nt, Homo sapiens
  misc_RNA (1)...(19): siRNA sense strand
ugagguaugucgagaguac

SEQ ID NO: 823507 - RNA, 19 nt, Homo sapiens
  misc_RNA (1)...(19): siRNA sense strand
agggagaacugcaaauauc

SEQ ID NO: 823508 - RNA, 19 nt, Homo sapiens
  misc_RNA (1)...(19): siRNA sense strand
ggagaacugcaaauaucuu

SEQ ID NO: 823509 - RNA, 19 nt, Homo sapiens
  misc_RNA (1)...(19): siRNA sense strand
aaccagauacccauaauau

SEQ ID NO: 823510 - RNA, 19 nt, Homo sapiens
  misc_RNA (1)...(19): siRNA sense strand
ucacuguguguauggauua

SEQ ID NO: 823511 - RNA, 19 nt, Homo sapiens
  misc_RNA (1)...(19): siRNA sense strand
guaccaacguggcaauugc

SEQ ID NO: 823512 - RNA, 19 nt, Homo sapiens
  misc_RNA (1)...(19): siRNA sense strand
cagacagacuugagguaug

SEQ ID NO: 823513 - RNA, 19 nt, Homo sapiens
  misc_RNA (1)...(19): siRNA sense strand
cgaguaaucgccugcuuug

SEQ ID NO: 823514 - RNA, 19 nt, Homo sapiens
  misc_RNA (1)...(19): siRNA sense strand
ugacuagccacaaguaugu

SEQ ID NO: 823515 - RNA, 19 nt, Homo sapiens
  misc_RNA (1)...(19): siRNA sense strand
ggcuaacacuggaaguaug

SEQ ID NO: 823516 - RNA, 19 nt, Homo sapiens
  misc_RNA (1)...(19): siRNA sense strand
caaguauguuacccagaug

SEQ ID NO: 823517 - RNA, 19 nt, Homo sapiens
  misc_RNA (1)...(19): siRNA sense strand
gagaacugcaaauaucuuc

SEQ ID NO: 823518 - RNA, 19 nt, Homo sapiens
  misc_RNA (1)...(19): siRNA sense strand
aacaacaucugccacaagu

SEQ ID NO: 823519 - RNA, 19 nt, Homo sapiens
  misc_RNA (1)...(19): siRNA sense strand
uacaacagcauacagcauu

SEQ ID NO: 823520 - RNA, 19 nt, Homo sapiens
  misc_RNA (1)...(19): siRNA sense strand
agaaauuaaugcgaacaga

SEQ ID NO: 823521 - RNA, 19 nt, Homo sapiens
  misc_RNA (1)...(19): siRNA sense strand
caaaugcaacuagccaaug

SEQ ID NO: 823522 - RNA, 19 nt, Homo sapiens
  misc_RNA (1)...(19): siRNA sense strand
caacaacaucugccacaag

SEQ ID NO: 823523 - RNA, 19 nt, Homo sapiens
  misc_RNA (1)...(19): siRNA sense strand
agaaaaugauugucgguuu

SEQ ID NO: 823524 - RNA, 19 nt, Homo sapiens
  misc_RNA (1)...(19): siRNA sense strand
uuacaacccgugccaaugu

SEQ ID NO: 823525 - RNA, 19 nt, Homo sapiens
  misc_RNA (1)...(19): siRNA sense strand
uagccaacaugcaguuaca

SEQ ID NO: 823526 - RNA, 19 nt, Homo sapiens
  misc_RNA (1)...(19): siRNA sense strand
gcaguuggagauaaaugga

SEQ ID NO: 823527 - RNA, 19 nt, Homo sapiens
  misc_RNA (1)...(19): siRNA sense strand
agaucaaggcugcccaaua

SEQ ID NO: 823528 - RNA, 19 nt, Homo sapiens
  misc_RNA (1)...(19): siRNA sense strand
cagggagaacugcaaauau

SEQ ID NO: 823529 - RNA, 19 nt, Homo sapiens
  misc_RNA (1)...(19): siRNA sense strand
gcuaacacuggaaguaugu

SEQ ID NO: 823530 - RNA, 19 nt, Homo sapiens
  misc_RNA (1)...(19): siRNA sense strand
caacaugcaguuacaacag

SEQ ID NO: 823531 - RNA, 19 nt, Homo sapiens
  misc_RNA (1)...(19): siRNA sense strand
gauugucgguuugcucauc

SEQ ID NO: 823532 - RNA, 19 nt, Homo sapiens
  misc_RNA (1)...(19): siRNA sense strand
caacuagccaaugccauga

SEQ ID NO: 823533 - RNA, 19 nt, Homo sapiens
  misc_RNA (1)...(19): siRNA sense strand
uaacuugauucagcagaag

SEQ ID NO: 823534 - RNA, 19 nt, Homo sapiens
  misc_RNA (1)...(19): siRNA sense strand
gacgaguaaucgccugcuu

SEQ ID NO: 823535 - RNA, 19 nt, Homo sapiens
  misc_RNA (1)...(19): siRNA sense strand
auaacuugauucagcagaa

SEQ ID NO: 823536 - RNA, 19 nt, Homo sapiens
  misc_RNA (1)...(19): siRNA sense strand
cugcaaauaucuucaucca

SEQ ID NO: 823537 - RNA, 19 nt, Homo sapiens
  misc_RNA (1)...(19): siRNA sense strand
cauguuggcccagcaaaug

SEQ ID NO: 823538 - RNA, 19 nt, Homo sapiens
  misc_RNA (1)...(19): siRNA sense strand
agccacagccaaccagaua

SEQ ID NO: 823539 - RNA, 19 nt, Homo sapiens
  misc_RNA (1)...(19): siRNA sense strand
caauugcaaccgaggagaa

SEQ ID NO: 823540 - RNA, 19 nt, Homo sapiens
  misc_RNA (1)...(19): siRNA sense strand
aaauggacgcaauaacuug

SEQ ID NO: 823541 - RNA, 19 nt, Homo sapiens
  misc_RNA (1)...(19): siRNA sense strand
gccaaccagauacccauaa

SEQ ID NO: 823542 - RNA, 19 nt, Homo sapiens
  misc_RNA (1)...(19): siRNA sense strand
gccagacacggaauguaaa

SEQ ID NO: 823543 - RNA, 19 nt, Homo sapiens
  misc_RNA (1)...(19): siRNA sense strand
aaaugcaacuagccaaugc

SEQ ID NO: 823544 - RNA, 19 nt, Homo sapiens
  misc_RNA (1)...(19): siRNA sense strand
ggacgcaauaacuugauuc

SEQ ID NO: 823545 - RNA, 19 nt, Homo sapiens
  misc_RNA (1)...(19): siRNA sense strand
cgccugcuuugauucauug

SEQ ID NO: 823546 - RNA, 19 nt, Homo sapiens
  misc_RNA (1)...(19): siRNA sense strand
uacaacccgugccaauguu

SEQ ID NO: 823547 - RNA, 19 nt, Homo sapiens
  misc_RNA (1)...(19): siRNA sense strand
auaaauggacgcaauaacu

SEQ ID NO: 823548 - RNA, 19 nt, Homo sapiens
  misc_RNA (1)...(19): siRNA sense strand
aguaaucgccugcuuugau

SEQ ID NO: 823549 - RNA, 19 nt, Homo sapiens
  misc_RNA (1)...(19): siRNA sense strand
gauaaauggacgcaauaac

SEQ ID NO: 823550 - RNA, 19 nt, Homo sapiens
  misc_RNA (1)...(19): siRNA sense strand
aaauuaaugcgaacagaca

SEQ ID NO: 823551 - RNA, 19 nt, Homo sapiens
  misc_RNA (1)...(19): siRNA sense strand
gcaguuacaacagcauaca

SEQ ID NO: 823552 - RNA, 19 nt, Homo sapiens
  misc_RNA (1)...(19): siRNA sense strand
gcacauuugcaagccaaga

SEQ ID NO: 823553 - RNA, 19 nt, Homo sapiens
  misc_RNA (1)...(19): siRNA sense strand
gucacuguguguauggauu

SEQ ID NO: 823554 - RNA, 19 nt, Homo sapiens
  misc_RNA (1)...(19): siRNA sense strand
gggagaacugcaaauaucu

SEQ ID NO: 823555 - RNA, 19 nt, Homo sapiens
  misc_RNA (1)...(19): siRNA sense strand
gaaaauggacgaguaaucg

SEQ ID NO: 823556 - RNA, 19 nt, Homo sapiens
  misc_RNA (1)...(19): siRNA sense strand
ccagacacggaauguaaau

SEQ ID NO: 823557 - RNA, 19 nt, Homo sapiens
  misc_RNA (1)...(19): siRNA sense strand
uggacgcaauaacuugauu

SEQ ID NO: 823558 - RNA, 19 nt, Homo sapiens
  misc_RNA (1)...(19): siRNA sense strand
caacagcauacagcauuuc

SEQ ID NO: 823559 - RNA, 19 nt, Homo sapiens
  misc_RNA (1)...(19): siRNA sense strand
caccaauucgggacacaaa

SEQ ID NO: 823560 - RNA, 19 nt, Homo sapiens
  misc_RNA (1)...(19): siRNA sense strand
gugccaauguuuucaguug

SEQ ID NO: 823561 - RNA, 19 nt, Homo sapiens
  misc_RNA (1)...(19): siRNA sense strand
uaauaucugccgaacaucu

SEQ ID NO: 823562 - RNA, 19 nt, Homo sapiens
  misc_RNA (1)...(19): siRNA sense strand
caacagccacagccaacca

SEQ ID NO: 823563 - RNA, 19 nt, Homo sapiens
  misc_RNA (1)...(19): siRNA sense strand
gcagcugccaugggaauuc

SEQ ID NO: 823564 - RNA, 19 nt, Homo sapiens
  misc_RNA (1)...(19): siRNA sense strand
gcugcugcacagaaauuaa

SEQ ID NO: 823565 - RNA, 19 nt, Homo sapiens
  misc_RNA (1)...(19): siRNA sense strand
agauaaauggacgcaauaa

SEQ ID NO: 823566 - RNA, 19 nt, Homo sapiens
  misc_RNA (1)...(19): siRNA sense strand
gugcuacgccagccacugu

SEQ ID NO: 823567 - RNA, 19 nt, Homo sapiens
  misc_RNA (1)...(19): siRNA sense strand
ccaacaugcaguuacaaca

SEQ ID NO: 823568 - RNA, 19 nt, Homo sapiens
  misc_RNA (1)...(19): siRNA sense strand
gucuuuaacacugguauuu

SEQ ID NO: 823569 - RNA, 19 nt, Homo sapiens
  misc_RNA (1)...(19): siRNA sense strand
gcgaacagacagacuugag

SEQ ID NO: 823570 - RNA, 19 nt, Homo sapiens
  misc_RNA (1)...(19): siRNA sense strand
gcacauccuucgaaaagcu

SEQ ID NO: 823571 - RNA, 19 nt, Homo sapiens
  misc_RNA (1)...(19): siRNA sense strand
ucgccugcuuugauucauu

SEQ ID NO: 823572 - RNA, 19 nt, Homo sapiens
  misc_RNA (1)...(19): siRNA sense strand
caugggaauuccucaagcu

SEQ ID NO: 823573 - RNA, 19 nt, Homo sapiens
  misc_RNA (1)...(19): siRNA sense strand
cuggaaguauguagagagu

SEQ ID NO: 823574 - RNA, 19 nt, Homo sapiens
  misc_RNA (1)...(19): siRNA sense strand
cuacucaacucaggagauu

SEQ ID NO: 823575 - RNA, 19 nt, Homo sapiens
  misc_RNA (1)...(19): siRNA sense strand
aaacucuucugcucaggaa

SEQ ID NO: 823576 - RNA, 19 nt, Homo sapiens
  misc_RNA (1)...(19): siRNA sense strand
aaucugauauccaaacucu

SEQ ID NO: 823577 - RNA, 19 nt, Homo sapiens
  misc_RNA (1)...(19): siRNA sense strand
gaacuuccggcagaaacuu

SEQ ID NO: 823578 - RNA, 19 nt, Homo sapiens
  misc_RNA (1)...(19): siRNA sense strand
gaaacuucugaaucugaua

SEQ ID NO: 823579 - RNA, 19 nt, Homo sapiens
  misc_RNA (1)...(19): siRNA sense strand
ucugauauccaaacucuuc

SEQ ID NO: 823580 - RNA, 19 nt, Homo sapiens
  misc_RNA (1)...(19): siRNA sense strand
acucaacucaggagauuug

SEQ ID NO: 823581 - RNA, 19 nt, Homo sapiens
  misc_RNA (1)...(19): siRNA sense strand
ugaaucugauauccaaacu

SEQ ID NO: 823582 - RNA, 19 nt, Homo sapiens
  misc_RNA (1)...(19): siRNA sense strand
gagaaaggauuugguuaua

SEQ ID NO: 823583 - RNA, 19 nt, Homo sapiens
  misc_RNA (1)...(19): siRNA sense strand
gaaaggauuugguuauaag

SEQ ID NO: 823584 - RNA, 19 nt, Homo sapiens
  misc_RNA (1)...(19): siRNA sense strand
gagagaaaggauuugguua

SEQ ID NO: 823585 - RNA, 19 nt, Homo sapiens
  misc_RNA (1)...(19): siRNA sense strand
ggagagaaaggauuugguu

SEQ ID NO: 823586 - RNA, 19 nt, Homo sapiens
  misc_RNA (1)...(19): siRNA sense strand
ucugagcacuggagagaaa

SEQ ID NO: 823587 - RNA, 19 nt, Homo sapiens
  misc_RNA (1)...(19): siRNA sense strand
gcagacaaggucccaaaga

SEQ ID NO: 823588 - RNA, 19 nt, Homo sapiens
  misc_RNA (1)...(19): siRNA sense strand
gaucaccauugcugacugu

SEQ ID NO: 823589 - RNA, 19 nt, Homo sapiens
  misc_RNA (1)...(19): siRNA sense strand
gcacuggagagaaaggauu

SEQ ID NO: 823590 - RNA, 19 nt, Homo sapiens
  misc_RNA (1)...(19): siRNA sense strand
agagaaaggauuugguuau

SEQ ID NO: 823591 - RNA, 19 nt, Homo sapiens
  misc_RNA (1)...(19): siRNA sense strand
cagacaaggucccaaagac

SEQ ID NO: 823592 - RNA, 19 nt, Homo sapiens
  misc_RNA (1)...(19): siRNA sense strand
caucugcacugccaagacu

SEQ ID NO: 823593 - RNA, 19 nt, Homo sapiens
  misc_RNA (1)...(19): siRNA sense strand
gguggcaaguccaucuaug

SEQ ID NO: 823594 - RNA, 19 nt, Homo sapiens
  misc_RNA (1)...(19): siRNA sense strand
caaagacagcagaaaauuu

SEQ ID NO: 823595 - RNA, 19 nt, Homo sapiens
  misc_RNA (1)...(19): siRNA sense strand
acaaaugguucccaguuuu

SEQ ID NO: 823596 - RNA, 19 nt, Homo sapiens
  misc_RNA (1)...(19): siRNA sense strand
agacaaggucccaaagaca

SEQ ID NO: 823597 - RNA, 19 nt, Homo sapiens
  misc_RNA (1)...(19): siRNA sense strand
gugguuggauggcaagcau

SEQ ID NO: 823598 - RNA, 19 nt, Homo sapiens
  misc_RNA (1)...(19): siRNA sense strand
ccaaagacagcagaaaauu

SEQ ID NO: 823599 - RNA, 19 nt, Homo sapiens
  misc_RNA (1)...(19): siRNA sense strand
gcacugguggcaaguccau

SEQ ID NO: 823600 - RNA, 19 nt, Homo sapiens
  misc_RNA (1)...(19): siRNA sense strand
uuccaggguuuauguguca

SEQ ID NO: 823601 - RNA, 19 nt, Homo sapiens
  misc_RNA (1)...(19): siRNA sense strand
cagcaagaagaucaccauu

SEQ ID NO: 823602 - RNA, 19 nt, Homo sapiens
  misc_RNA (1)...(19): siRNA sense strand
gcagacaccuuacugaaua

SEQ ID NO: 823603 - RNA, 19 nt, Homo sapiens
  misc_RNA (1)...(19): siRNA sense strand
gaaagaaggucgaguagau

SEQ ID NO: 823604 - RNA, 19 nt, Homo sapiens
  misc_RNA (1)...(19): siRNA sense strand
ugacauccauggccaauuu

SEQ ID NO: 823605 - RNA, 19 nt, Homo sapiens
  misc_RNA (1)...(19): siRNA sense strand
ugacagaaauguugguaaa

SEQ ID NO: 823606 - RNA, 19 nt, Homo sapiens
  misc_RNA (1)...(19): siRNA sense strand
ucgaguagaugaagaaauu

SEQ ID NO: 823607 - RNA, 19 nt, Homo sapiens
  misc_RNA (1)...(19): siRNA sense strand
gcuauagaauguacagaaa

SEQ ID NO: 823608 - RNA, 19 nt, Homo sapiens
  misc_RNA (1)...(19): siRNA sense strand
gaagaaauugcgcuuagaa

SEQ ID NO: 823609 - RNA, 19 nt, Homo sapiens
  misc_RNA (1)...(19): siRNA sense strand
gcuaauacacgauaccuuu

SEQ ID NO: 823610 - RNA, 19 nt, Homo sapiens
  misc_RNA (1)...(19): siRNA sense strand
gaaagagucuaugaagcuu

SEQ ID NO: 823611 - RNA, 19 nt, Homo sapiens
  misc_RNA (1)...(19): siRNA sense strand
gaagaaguauuugauuugg

SEQ ID NO: 823612 - RNA, 19 nt, Homo sapiens
  misc_RNA (1)...(19): siRNA sense strand
cuaugaagcuuguauggaa

SEQ ID NO: 823613 - RNA, 19 nt, Homo sapiens
  misc_RNA (1)...(19): siRNA sense strand
ggacagagguuauuuuagu

SEQ ID NO: 823614 - RNA, 19 nt, Homo sapiens
  misc_RNA (1)...(19): siRNA sense strand
guaggaggaucaccugcua

SEQ ID NO: 823615 - RNA, 19 nt, Homo sapiens
  misc_RNA (1)...(19): siRNA sense strand
gaugaauauucgacaguuu

SEQ ID NO: 823616 - RNA, 19 nt, Homo sapiens
  misc_RNA (1)...(19): siRNA sense strand
ccaagcacauuauuucuuc

SEQ ID NO: 823617 - RNA, 19 nt, Homo sapiens
  misc_RNA (1)...(19): siRNA sense strand
cuugacaucugaagaagua

SEQ ID NO: 823618 - RNA, 19 nt, Homo sapiens
  misc_RNA (1)...(19): siRNA sense strand
gcaagaugguuucaauucu

SEQ ID NO: 823619 - RNA, 19 nt, Homo sapiens
  misc_RNA (1)...(19): siRNA sense strand
caaagagccaccugcauuu

SEQ ID NO: 823620 - RNA, 19 nt, Homo sapiens
  misc_RNA (1)...(19): siRNA sense strand
uaaagcugcuguauuaaag

SEQ ID NO: 823621 - RNA, 19 nt, Homo sapiens
  misc_RNA (1)...(19): siRNA sense strand
gaugcaggcuauagaaugu

SEQ ID NO: 823622 - RNA, 19 nt, Homo sapiens
  misc_RNA (1)...(19): siRNA sense strand
ucaaagagccaccugcauu

SEQ ID NO: 823623 - RNA, 19 nt, Homo sapiens
  misc_RNA (1)...(19): siRNA sense strand
ccacauagaaucugcaguu

SEQ ID NO: 823624 - RNA, 19 nt, Homo sapiens
  misc_RNA (1)...(19): siRNA sense strand
acacaucgcuugacaucug

SEQ ID NO: 823625 - RNA, 19 nt, Homo sapiens
  misc_RNA (1)...(19): siRNA sense strand
ggugaaagaaggucgagua

SEQ ID NO: 823626 - RNA, 19 nt, Homo sapiens
  misc_RNA (1)...(19): siRNA sense strand
uaguauagagugugucuua

SEQ ID NO: 823627 - RNA, 19 nt, Homo sapiens
  misc_RNA (1)...(19): siRNA sense strand
cagaaauguugguaaaugu

SEQ ID NO: 823628 - RNA, 19 nt, Homo sapiens
  misc_RNA (1)...(19): siRNA sense strand
acagaaauguugguaaaug

SEQ ID NO: 823629 - RNA, 19 nt, Homo sapiens
  misc_RNA (1)...(19): siRNA sense strand
caauacaguucgaggaugu

SEQ ID NO: 823630 - RNA, 19 nt, Homo sapiens
  misc_RNA (1)...(19): siRNA sense strand
ggaaagagucuaugaagcu

SEQ ID NO: 823631 - RNA, 19 nt, Homo sapiens
  misc_RNA (1)...(19): siRNA sense strand
accaaugugugacuuguua

SEQ ID NO: 823632 - RNA, 19 nt, Homo sapiens
  misc_RNA (1)...(19): siRNA sense strand
gaaguagaagcuccaauca

SEQ ID NO: 823633 - RNA, 19 nt, Homo sapiens
  misc_RNA (1)...(19): siRNA sense strand
gcgcuuagaauuaucaaug

SEQ ID NO: 823634 - RNA, 19 nt, Homo sapiens
  misc_RNA (1)...(19): siRNA sense strand
gagaaugccaccucggaaa

SEQ ID NO: 823635 - RNA, 19 nt, Homo sapiens
  misc_RNA (1)...(19): siRNA sense strand
aguagaagcuccaaucaca

SEQ ID NO: 823636 - RNA, 19 nt, Homo sapiens
  misc_RNA (1)...(19): siRNA sense strand
gaggaucaccugcuaauac

SEQ ID NO: 823637 - RNA, 19 nt, Homo sapiens
  misc_RNA (1)...(19): siRNA sense strand
caagaugguuucaauucuc

SEQ ID NO: 823638 - RNA, 19 nt, Homo sapiens
  misc_RNA (1)...(19): siRNA sense strand
cauagaaucugcaguuuug

SEQ ID NO: 823639 - RNA, 19 nt, Homo sapiens
  misc_RNA (1)...(19): siRNA sense strand
gaaauguugguaaauguuc

SEQ ID NO: 823640 - RNA, 19 nt, Homo sapiens
  misc_RNA (1)...(19): siRNA sense strand
caacacaucgcuugacauc

SEQ ID NO: 823641 - RNA, 19 nt, Homo sapiens
  misc_RNA (1)...(19): siRNA sense strand
aagcugcuguauuaaagua

SEQ ID NO: 823642 - RNA, 19 nt, Homo sapiens
  misc_RNA (1)...(19): siRNA sense strand
ucaugaagcucaagaugca

SEQ ID NO: 823643 - RNA, 19 nt, Homo sapiens
  misc_RNA (1)...(19): siRNA sense strand
cacauuauuucuucugaga

SEQ ID NO: 823644 - RNA, 19 nt, Homo sapiens
  misc_RNA (1)...(19): siRNA sense strand
caagaugcaggcuauagaa

SEQ ID NO: 823645 - RNA, 19 nt, Homo sapiens
  misc_RNA (1)...(19): siRNA sense strand
ggaccaaugugugacuugu

SEQ ID NO: 823646 - RNA, 19 nt, Homo sapiens
  misc_RNA (1)...(19): siRNA sense strand
caugaaugcagacaccuua

SEQ ID NO: 823647 - RNA, 19 nt, Homo sapiens
  misc_RNA (1)...(19): siRNA sense strand
cacguggucuuuaccguuu

SEQ ID NO: 823648 - RNA, 19 nt, Homo sapiens
  misc_RNA (1)...(19): siRNA sense strand
acagcaagaugguuucaau

SEQ ID NO: 823649 - RNA, 19 nt, Homo sapiens
  misc_RNA (1)...(19): siRNA sense strand
acuaaugacugaaggugaa

SEQ ID NO: 823650 - RNA, 19 nt, Homo sapiens
  misc_RNA (1)...(19): siRNA sense strand
gaugaagaaauugcgcuua

SEQ ID NO: 823651 - RNA, 19 nt, Homo sapiens
  misc_RNA (1)...(19): siRNA sense strand
gguaaauguucugaguauu

SEQ ID NO: 823652 - RNA, 19 nt, Homo sapiens
  misc_RNA (1)...(19): siRNA sense strand
ugguaaauguucugaguau

SEQ ID NO: 823653 - RNA, 19 nt, Homo sapiens
  misc_RNA (1)...(19): siRNA sense strand
uuugauaguuugccucuug

SEQ ID NO: 823654 - RNA, 19 nt, Homo sapiens
  misc_RNA (1)...(19): siRNA sense strand
ccuuuaagcaggaauguaa

SEQ ID NO: 823655 - RNA, 19 nt, Homo sapiens
  misc_RNA (1)...(19): siRNA sense strand
ugaagaaauugcgcuuaga

SEQ ID NO: 823656 - RNA, 19 nt, Homo sapiens
  misc_RNA (1)...(19): siRNA sense strand
acagggauguugccuagug

SEQ ID NO: 823657 - RNA, 19 nt, Homo sapiens
  misc_RNA (1)...(19): siRNA sense strand
augaugaacuaaugacuga

SEQ ID NO: 823658 - RNA, 19 nt, Homo sapiens
  misc_RNA (1)...(19): siRNA sense strand
cuuacugguugccuaauuu

SEQ ID NO: 823659 - RNA, 19 nt, Homo sapiens
  misc_RNA (1)...(19): siRNA sense strand
ggguucccuucauuaauaa

SEQ ID NO: 823660 - RNA, 19 nt, Homo sapiens
  misc_RNA (1)...(19): siRNA sense strand
uggaugauauuaggagauu

SEQ ID NO: 823661 - RNA, 19 nt, Homo sapiens
  misc_RNA (1)...(19): siRNA sense strand
ggaggaucaccugcuaaua

SEQ ID NO: 823662 - RNA, 19 nt, Homo sapiens
  misc_RNA (1)...(19): siRNA sense strand
cacauagaaucugcaguuu

SEQ ID NO: 823663 - RNA, 19 nt, Homo sapiens
  misc_RNA (1)...(19): siRNA sense strand
uauuugcucugaugaugaa

SEQ ID NO: 823664 - RNA, 19 nt, Homo sapiens
  misc_RNA (1)...(19): siRNA sense strand
ggaugauauuaggagauua

SEQ ID NO: 823665 - RNA, 19 nt, Homo sapiens
  misc_RNA (1)...(19): siRNA sense strand
guugguaaauguucugagu

SEQ ID NO: 823666 - RNA, 19 nt, Homo sapiens
  misc_RNA (1)...(19): siRNA sense strand
uacacacacuggaugauau

SEQ ID NO: 823667 - RNA, 19 nt, Homo sapiens
  misc_RNA (1)...(19): siRNA sense strand
gggaggagagugaaagugu

SEQ ID NO: 823668 - RNA, 19 nt, Homo sapiens
  misc_RNA (1)...(19): siRNA sense strand
gaugauauuaggagauuag

SEQ ID NO: 823669 - RNA, 19 nt, Homo sapiens
  misc_RNA (1)...(19): siRNA sense strand
gacaucugaagaaguauuu

SEQ ID NO: 823670 - RNA, 19 nt, Homo sapiens
  misc_RNA (1)...(19): siRNA sense strand
gcaaagugccacaguugag

SEQ ID NO: 823671 - RNA, 19 nt, Homo sapiens
  misc_RNA (1)...(19): siRNA sense strand
gacagagguuauuuuagua

SEQ ID NO: 823672 - RNA, 19 nt, Homo sapiens
  misc_RNA (1)...(19): siRNA sense strand
gauaggaucaaugagagaa

SEQ ID NO: 823673 - RNA, 19 nt, Homo sapiens
  misc_RNA (1)...(19): siRNA sense strand
ugaugaauauucgacaguu

SEQ ID NO: 823674 - RNA, 19 nt, Homo sapiens
  misc_RNA (1)...(19): siRNA sense strand
ugagggugcugccauccuu

SEQ ID NO: 823675 - RNA, 19 nt, Homo sapiens
  misc_RNA (1)...(19): siRNA sense strand
ggugaagaccaguuugaug

SEQ ID NO: 823676 - RNA, 19 nt, Homo sapiens
  misc_RNA (1)...(19): siRNA sense strand
ucuauacccaagcacauua

SEQ ID NO: 823677 - RNA, 19 nt, Homo sapiens
  misc_RNA (1)...(19): siRNA sense strand
gaaacaaaauucgagcaau

SEQ ID NO: 823678 - RNA, 19 nt, Homo sapiens
  misc_RNA (1)...(19): siRNA sense strand
cggaaagaaaucauaagaa

SEQ ID NO: 823679 - RNA, 19 nt, Homo sapiens
  misc_RNA (1)...(19): siRNA sense strand
gaaggugaagaccaguuug

SEQ ID NO: 823680 - RNA, 19 nt, Homo sapiens
  misc_RNA (1)...(19): siRNA sense strand
ugaaggugaagaccaguuu

SEQ ID NO: 823681 - RNA, 19 nt, Homo sapiens
  misc_RNA (1)...(19): siRNA sense strand
gcugcuguauuaaaguaug

SEQ ID NO: 823682 - RNA, 19 nt, Homo sapiens
  misc_RNA (1)...(19): siRNA sense strand
gcucaugaagcucaagaug

SEQ ID NO: 823683 - RNA, 19 nt, Homo sapiens
  misc_RNA (1)...(19): siRNA sense strand
caucugaagaaguauuuga

SEQ ID NO: 823684 - RNA, 19 nt, Homo sapiens
  misc_RNA (1)...(19): siRNA sense strand
gaaugcagacaccuuacug

SEQ ID NO: 823685 - RNA, 19 nt, Homo sapiens
  misc_RNA (1)...(19): siRNA sense strand
uucggcaccuaauuacuua

SEQ ID NO: 823686 - RNA, 19 nt, Homo sapiens
  misc_RNA (1)...(19): siRNA sense strand
cgcuuagaauuaucaauga

SEQ ID NO: 823687 - RNA, 19 nt, Homo sapiens
  misc_RNA (1)...(19): siRNA sense strand
ucggaaagaugcuguacag

SEQ ID NO: 823688 - RNA, 19 nt, Homo sapiens
  misc_RNA (1)...(19): siRNA sense strand
gaaugccaccucggaaaga

SEQ ID NO: 823689 - RNA, 19 nt, Homo sapiens
  misc_RNA (1)...(19): siRNA sense strand
gcccggaaagaaaucauaa

SEQ ID NO: 823690 - RNA, 19 nt, Homo sapiens
  misc_RNA (1)...(19): siRNA sense strand
cagacaccuuacugaauau

SEQ ID NO: 823691 - RNA, 19 nt, Homo sapiens
  misc_RNA (1)...(19): siRNA sense strand
ccggaaagaaaucauaaga

SEQ ID NO: 823692 - RNA, 19 nt, Homo sapiens
  misc_RNA (1)...(19): siRNA sense strand
ucaagaugcaggcuauaga

SEQ ID NO: 823693 - RNA, 19 nt, Homo sapiens
  misc_RNA (1)...(19): siRNA sense strand
gcaggaauguaaaauuaag

SEQ ID NO: 823694 - RNA, 19 nt, Homo sapiens
  misc_RNA (1)...(19): siRNA sense strand
uaggaucaaugagagaaug

SEQ ID NO: 823695 - RNA, 19 nt, Homo sapiens
  misc_RNA (1)...(19): siRNA sense strand
ccacaguugaggcuauuga

SEQ ID NO: 823696 - RNA, 19 nt, Homo sapiens
  misc_RNA (1)...(19): siRNA sense strand
gagugaaagugugcugaca

SEQ ID NO: 823697 - RNA, 19 nt, Homo sapiens
  misc_RNA (1)...(19): siRNA sense strand
aaaccaugauagaaguaga

SEQ ID NO: 823698 - RNA, 19 nt, Homo sapiens
  misc_RNA (1)...(19): siRNA sense strand
cugaguauuugcucugaug

SEQ ID NO: 823699 - RNA, 19 nt, Homo sapiens
  misc_RNA (1)...(19): siRNA sense strand
ggcuauagaauguacagaa

SEQ ID NO: 823700 - RNA, 19 nt, Homo sapiens
  misc_RNA (1)...(19): siRNA sense strand
gaagcuccaaucacagugu

SEQ ID NO: 823701 - RNA, 19 nt, Homo sapiens
  misc_RNA (1)...(19): siRNA sense strand
cagcaagaugguuucaauu

SEQ ID NO: 823702 - RNA, 19 nt, Homo sapiens
  misc_RNA (1)...(19): siRNA sense strand
ugaaggaccucuaccauua

SEQ ID NO: 823703 - RNA, 19 nt, Homo sapiens
  misc_RNA (1)...(19): siRNA sense strand
cguaguagauggucaaaua

SEQ ID NO: 823704 - RNA, 19 nt, Homo sapiens
  misc_RNA (1)...(19): siRNA sense strand
ggucagagccucccuauga

SEQ ID NO: 823705 - RNA, 19 nt, Homo sapiens
  misc_RNA (1)...(19): siRNA sense strand
gaacuacaccuacauuugg

SEQ ID NO: 823706 - RNA, 19 nt, Homo sapiens
  misc_RNA (1)...(19): siRNA sense strand
gaaacaggacccuaucaau

SEQ ID NO: 823707 - RNA, 19 nt, Homo sapiens
  misc_RNA (1)...(19): siRNA sense strand
gacaauuaaugggaaguuu

SEQ ID NO: 823708 - RNA, 19 nt, Homo sapiens
  misc_RNA (1)...(19): siRNA sense strand
gaggagaaacuggacauuu

SEQ ID NO: 823709 - RNA, 19 nt, Homo sapiens
  misc_RNA (1)...(19): siRNA sense strand
aaacaggacccuaucaaug

SEQ ID NO: 823710 - RNA, 19 nt, Homo sapiens
  misc_RNA (1)...(19): siRNA sense strand
guacaaagggcaaaugaag

SEQ ID NO: 823711 - RNA, 19 nt, Homo sapiens
  misc_RNA (1)...(19): siRNA sense strand
ggacaucuuccuggccuua

SEQ ID NO: 823712 - RNA, 19 nt, Homo sapiens
  misc_RNA (1)...(19): siRNA sense strand
ggaccucuaccauuacauu

SEQ ID NO: 823713 - RNA, 19 nt, Homo sapiens
  misc_RNA (1)...(19): siRNA sense strand
gcucacagcaucacuuuua

SEQ ID NO: 823714 - RNA, 19 nt, Homo sapiens
  misc_RNA (1)...(19): siRNA sense strand
cauuacaucauacguagua

SEQ ID NO: 823715 - RNA, 19 nt, Homo sapiens
  misc_RNA (1)...(19): siRNA sense strand
cgcaggauccuacaccuua

SEQ ID NO: 823716 - RNA, 19 nt, Homo sapiens
  misc_RNA (1)...(19): siRNA sense strand
guaguagauggucaaauaa

SEQ ID NO: 823717 - RNA, 19 nt, Homo sapiens
  misc_RNA (1)...(19): siRNA sense strand
cagcaucacuuuuaaacuu

SEQ ID NO: 823718 - RNA, 19 nt, Homo sapiens
  misc_RNA (1)...(19): siRNA sense strand
acucacagcuugcaguugu

SEQ ID NO: 823719 - RNA, 19 nt, Homo sapiens
  misc_RNA (1)...(19): siRNA sense strand
gcaaaugaaggaccucuac

SEQ ID NO: 823720 - RNA, 19 nt, Homo sapiens
  misc_RNA (1)...(19): siRNA sense strand
uaacccaccagcagaauau

SEQ ID NO: 823721 - RNA, 19 nt, Homo sapiens
  misc_RNA (1)...(19): siRNA sense strand
gaccucuaccauuacauua

SEQ ID NO: 823722 - RNA, 19 nt, Homo sapiens
  misc_RNA (1)...(19): siRNA sense strand
gaaagcuccaaauccauga

SEQ ID NO: 823723 - RNA, 19 nt, Homo sapiens
  misc_RNA (1)...(19): siRNA sense strand
gaaaacaggauccucauuc

SEQ ID NO: 823724 - RNA, 19 nt, Homo sapiens
  misc_RNA (1)...(19): siRNA sense strand
cauuucaccuucaccuuau

SEQ ID NO: 823725 - RNA, 19 nt, Homo sapiens
  misc_RNA (1)...(19): siRNA sense strand
acauuucaccuucaccuua

SEQ ID NO: 823726 - RNA, 19 nt, Homo sapiens
  misc_RNA (1)...(19): siRNA sense strand
caagcuaccugugguggau

SEQ ID NO: 823727 - RNA, 19 nt, Homo sapiens
  misc_RNA (1)...(19): siRNA sense strand
aaacaggauccucauucua

SEQ ID NO: 823728 - RNA, 19 nt, Homo sapiens
  misc_RNA (1)...(19): siRNA sense strand
acaaagggcaaaugaagga

SEQ ID NO: 823729 - RNA, 19 nt, Homo sapiens
  misc_RNA (1)...(19): siRNA sense strand
ggacaauuaaugggaaguu

SEQ ID NO: 823730 - RNA, 19 nt, Homo sapiens
  misc_RNA (1)...(19): siRNA sense strand
agaacuacaccuacauuug

SEQ ID NO: 823731 - RNA, 19 nt, Homo sapiens
  misc_RNA (1)...(19): siRNA sense strand
caauuaaugggaaguuuca

SEQ ID NO: 823732 - RNA, 19 nt, Homo sapiens
  misc_RNA (1)...(19): siRNA sense strand
ccucuaccauuacauuaca

SEQ ID NO: 823733 - RNA, 19 nt, Homo sapiens
  misc_RNA (1)...(19): siRNA sense strand
ggcuacaucugguacaaag

SEQ ID NO: 823734 - RNA, 19 nt, Homo sapiens
  misc_RNA (1)...(19): siRNA sense strand
ugaaacaggacccuaucaa

SEQ ID NO: 823735 - RNA, 19 nt, Homo sapiens
  misc_RNA (1)...(19): siRNA sense strand
ugaugggacuagaggagaa

SEQ ID NO: 823736 - RNA, 19 nt, Homo sapiens
  misc_RNA (1)...(19): siRNA sense strand
aaacuggacauuucaccuu

SEQ ID NO: 823737 - RNA, 19 nt, Homo sapiens
  misc_RNA (1)...(19): siRNA sense strand
gaaggaccucuaccauuac

SEQ ID NO: 823738 - RNA, 19 nt, Homo sapiens
  misc_RNA (1)...(19): siRNA sense strand
gcaggauccuacaccuuac

SEQ ID NO: 823739 - RNA, 19 nt, Homo sapiens
  misc_RNA (1)...(19): siRNA sense strand
caucccugcugauccagaa

SEQ ID NO: 823740 - RNA, 19 nt, Homo sapiens
  misc_RNA (1)...(19): siRNA sense strand
caucuccagcagcaacuua

SEQ ID NO: 823741 - RNA, 19 nt, Homo sapiens
  misc_RNA (1)...(19): siRNA sense strand
aacaggacccuaucaaugu

SEQ ID NO: 823742 - RNA, 19 nt, Homo sapiens
  misc_RNA (1)...(19): siRNA sense strand
gguacaaagggcaaaugaa

SEQ ID NO: 823743 - RNA, 19 nt, Homo sapiens
  misc_RNA (1)...(19): siRNA sense strand
acaggacccuaucaaugug

SEQ ID NO: 823744 - RNA, 19 nt, Homo sapiens
  misc_RNA (1)...(19): siRNA sense strand
aaaugaaacaggacccuau

SEQ ID NO: 823745 - RNA, 19 nt, Homo sapiens
  misc_RNA (1)...(19): siRNA sense strand
gauccuacaccuuacacau

SEQ ID NO: 823746 - RNA, 19 nt, Homo sapiens
  misc_RNA (1)...(19): siRNA sense strand
uaccugugguggaugaaug

SEQ ID NO: 823747 - RNA, 19 nt, Homo sapiens
  misc_RNA (1)...(19): siRNA sense strand
aggacccucuuucuauuug

SEQ ID NO: 823748 - RNA, 19 nt, Homo sapiens
  misc_RNA (1)...(19): siRNA sense strand
gccgagccaaccaaaguuu

SEQ ID NO: 823749 - RNA, 19 nt, Homo sapiens
  misc_RNA (1)...(19): siRNA sense strand
ccagaccuccccagaauuu

SEQ ID NO: 823750 - RNA, 19 nt, Homo sapiens
  misc_RNA (1)...(19): siRNA sense strand
uuccuggccuuaauccauu

SEQ ID NO: 823751 - RNA, 19 nt, Homo sapiens
  misc_RNA (1)...(19): siRNA sense strand
ucaggaacaggacaucuuc

SEQ ID NO: 823752 - RNA, 19 nt, Homo sapiens
  misc_RNA (1)...(19): siRNA sense strand
cuaacccaccagcagaaua

SEQ ID NO: 823753 - RNA, 19 nt, Homo sapiens
  misc_RNA (1)...(19): siRNA sense strand
ugacucacagcuugcaguu

SEQ ID NO: 823754 - RNA, 19 nt, Homo sapiens
  misc_RNA (1)...(19): siRNA sense strand
uaaugggaaguuucagcua

SEQ ID NO: 823755 - RNA, 19 nt, Homo sapiens
  misc_RNA (1)...(19): siRNA sense strand
guccagaccuccccagaau

SEQ ID NO: 823756 - RNA, 19 nt, Homo sapiens
  misc_RNA (1)...(19): siRNA sense strand
gcccaagucacgauugaag

SEQ ID NO: 823757 - RNA, 19 nt, Homo sapiens
  misc_RNA (1)...(19): siRNA sense strand
cugcccaagucacgauuga

SEQ ID NO: 823758 - RNA, 19 nt, Homo sapiens
  misc_RNA (1)...(19): siRNA sense strand
aaggacccucuuucuauuu

SEQ ID NO: 823759 - RNA, 19 nt, Homo sapiens
  misc_RNA (1)...(19): siRNA sense strand
ggacccucuuucuauuugg

SEQ ID NO: 823760 - RNA, 19 nt, Homo sapiens
  misc_RNA (1)...(19): siRNA sense strand
ucaauucacugcagaagga

SEQ ID NO: 823761 - RNA, 19 nt, Homo sapiens
  misc_RNA (1)...(19): siRNA sense strand
gauuugacguguccauuug

SEQ ID NO: 823762 - RNA, 19 nt, Homo sapiens
  misc_RNA (1)...(19): siRNA sense strand
gaaggugguucccaugucu

SEQ ID NO: 823763 - RNA, 19 nt, Homo sapiens
  misc_RNA (1)...(19): siRNA sense strand
cgacacagccaacaacuuc

SEQ ID NO: 823764 - RNA, 19 nt, Homo sapiens
  misc_RNA (1)...(19): siRNA sense strand
uugaguaucuguccuguga

SEQ ID NO: 823765 - RNA, 19 nt, Homo sapiens
  misc_RNA (1)...(19): siRNA sense strand
cuucguagaccgcaaguua

SEQ ID NO: 823766 - RNA, 19 nt, Homo sapiens
  misc_RNA (1)...(19): siRNA sense strand
cuacuuugcuguugcuguu

SEQ ID NO: 823767 - RNA, 19 nt, Homo sapiens
  misc_RNA (1)...(19): siRNA sense strand
gaggcuggcuucccacauc

SEQ ID NO: 823768 - RNA, 19 nt, Homo sapiens
  misc_RNA (1)...(19): siRNA sense strand
gaccuuggaugccgacaca

SEQ ID NO: 823769 - RNA, 19 nt, Homo sapiens
  misc_RNA (1)...(19): siRNA sense strand
gcaaagggaggauccaucu

SEQ ID NO: 823770 - RNA, 19 nt, Homo sapiens
  misc_RNA (1)...(19): siRNA sense strand
ugacuuuccucuucguaga

SEQ ID NO: 823771 - RNA, 19 nt, Homo sapiens
  misc_RNA (1)...(19): siRNA sense strand
aaagggaggauccaucuga

SEQ ID NO: 823772 - RNA, 19 nt, Homo sapiens
  misc_RNA (1)...(19): siRNA sense strand
gcuguuccauggucucuca

SEQ ID NO: 823773 - RNA, 19 nt, Homo sapiens
  misc_RNA (1)...(19): siRNA sense strand
gauucuggacugugaguuu

SEQ ID NO: 823774 - RNA, 19 nt, Homo sapiens
  misc_RNA (1)...(19): siRNA sense strand
gaggaucuacuuugcuguu

SEQ ID NO: 823775 - RNA, 19 nt, Homo sapiens
  misc_RNA (1)...(19): siRNA sense strand
gcucagacuaucuagagaa

SEQ ID NO: 823776 - RNA, 19 nt, Homo sapiens
  misc_RNA (1)...(19): siRNA sense strand
cguggauucuggacuguga

SEQ ID NO: 823777 - RNA, 19 nt, Homo sapiens
  misc_RNA (1)...(19): siRNA sense strand
uccauggucucucagaaga

SEQ ID NO: 823778 - RNA, 19 nt, Homo sapiens
  misc_RNA (1)...(19): siRNA sense strand
gaagugggugcaucacaca

SEQ ID NO: 823779 - RNA, 19 nt, Homo sapiens
  misc_RNA (1)...(19): siRNA sense strand
gugggugcaucacacagaa

SEQ ID NO: 823780 - RNA, 19 nt, Homo sapiens
  misc_RNA (1)...(19): siRNA sense strand
agcccaagcugaagaagau

SEQ ID NO: 823781 - RNA, 19 nt, Homo sapiens
  misc_RNA (1)...(19): siRNA sense strand
guuccauggucucucagaa

SEQ ID NO: 823782 - RNA, 19 nt, Homo sapiens
  misc_RNA (1)...(19): siRNA sense strand
cucagacuaucuagagaaa

SEQ ID NO: 823783 - RNA, 19 nt, Homo sapiens
  misc_RNA (1)...(19): siRNA sense strand
gccgcugacuuuccucuuc

SEQ ID NO: 823784 - RNA, 19 nt, Homo sapiens
  misc_RNA (1)...(19): siRNA sense strand
gagcccaagcugaagaaga

SEQ ID NO: 823785 - RNA, 19 nt, Homo sapiens
  misc_RNA (1)...(19): siRNA sense strand
gaucuacuuugcuguugcu

SEQ ID NO: 823786 - RNA, 19 nt, Homo sapiens
  misc_RNA (1)...(19): siRNA sense strand
ugaaggugguucccauguc

SEQ ID NO: 823787 - RNA, 19 nt, Homo sapiens
  misc_RNA (1)...(19): siRNA sense strand
gaccuugccgagagauuug

SEQ ID NO: 823788 - RNA, 19 nt, Homo sapiens
  misc_RNA (1)...(19): siRNA sense strand
agauuugacguguccauuu

SEQ ID NO: 823789 - RNA, 19 nt, Homo sapiens
  misc_RNA (1)...(19): siRNA sense strand
gagauuugacguguccauu

SEQ ID NO: 823790 - RNA, 19 nt, Homo sapiens
  misc_RNA (1)...(19): siRNA sense strand
gcaugcagaacguuuccuu

SEQ ID NO: 823791 - RNA, 19 nt, Homo sapiens
  misc_RNA (1)...(19): siRNA sense strand
ggagccacugcacuuguuu

SEQ ID NO: 823792 - RNA, 19 nt, Homo sapiens
  misc_RNA (1)...(19): siRNA sense strand
gggaacaagcacagaaugg

SEQ ID NO: 823793 - RNA, 19 nt, Homo sapiens
  misc_RNA (1)...(19): siRNA sense strand
gaggagccacugcacuugu

SEQ ID NO: 823794 - RNA, 19 nt, Homo sapiens
  misc_RNA (1)...(19): siRNA sense strand
ucacacagaaucggcaaga

SEQ ID NO: 823795 - RNA, 19 nt, Homo sapiens
  misc_RNA (1)...(19): siRNA sense strand
agaaucuguucaccgcaaa

SEQ ID NO: 823796 - RNA, 19 nt, Homo sapiens
  misc_RNA (1)...(19): siRNA sense strand
cagacuaucuagagaaacc

SEQ ID NO: 823797 - RNA, 19 nt, Homo sapiens
  misc_RNA (1)...(19): siRNA sense strand
cugggagucugcagagaau

SEQ ID NO: 823798 - RNA, 19 nt, Homo sapiens
  misc_RNA (1)...(19): siRNA sense strand
ggauggaagccgccucucu

SEQ ID NO: 823799 - RNA, 19 nt, Homo sapiens
  misc_RNA (1)...(19): siRNA sense strand
aaguggauaugaccuugga

SEQ ID NO: 823800 - RNA, 19 nt, Homo sapiens
  misc_RNA (1)...(19): siRNA sense strand
ccuccaaguccaccuaaug

SEQ ID NO: 823801 - RNA, 19 nt, Homo sapiens
  misc_RNA (1)...(19): siRNA sense strand
aggagccacugcacuuguu

SEQ ID NO: 823802 - RNA, 19 nt, Homo sapiens
  misc_RNA (1)...(19): siRNA sense strand
ggagguggacgugggaaca

SEQ ID NO: 823803 - RNA, 19 nt, Homo sapiens
  misc_RNA (1)...(19): siRNA sense strand
acccaaggaugcggaaguu

SEQ ID NO: 823804 - RNA, 19 nt, Homo sapiens
  misc_RNA (1)...(19): siRNA sense strand
gaaugggaccugggagucu

SEQ ID NO: 823805 - RNA, 19 nt, Homo sapiens
  misc_RNA (1)...(19): siRNA sense strand
agaccuugccgagagauuu

SEQ ID NO: 823806 - RNA, 19 nt, Homo sapiens
  misc_RNA (1)...(19): siRNA sense strand
gaguguggaugcgcugucu

SEQ ID NO: 823807 - RNA, 19 nt, Homo sapiens
  misc_RNA (1)...(19): siRNA sense strand
cuaauggugauaagagugu

SEQ ID NO: 823808 - RNA, 19 nt, Homo sapiens
  misc_RNA (1)...(19): siRNA sense strand
gauagagucucguggcuua

SEQ ID NO: 823809 - RNA, 19 nt, Homo sapiens
  misc_RNA (1)...(19): siRNA sense strand
gcaaagggauuaucguaug

SEQ ID NO: 823810 - RNA, 19 nt, Homo sapiens
  misc_RNA (1)...(19): siRNA sense strand
acacaucucucauuucuga

SEQ ID NO: 823811 - RNA, 19 nt, Homo sapiens
  misc_RNA (1)...(19): siRNA sense strand
ccacugcuguuucucaaua

SEQ ID NO: 823812 - RNA, 19 nt, Homo sapiens
  misc_RNA (1)...(19): siRNA sense strand
gaagcaagauauaugucua

SEQ ID NO: 823813 - RNA, 19 nt, Homo sapiens
  misc_RNA (1)...(19): siRNA sense strand
acacugacaucucaauuaa

SEQ ID NO: 823814 - RNA, 19 nt, Homo sapiens
  misc_RNA (1)...(19): siRNA sense strand
gaacagcacacuuaaggaa

SEQ ID NO: 823815 - RNA, 19 nt, Homo sapiens
  misc_RNA (1)...(19): siRNA sense strand
uaaagacacugacaucuca

SEQ ID NO: 823816 - RNA, 19 nt, Homo sapiens
  misc_RNA (1)...(19): siRNA sense strand
caaagaagcaaagggauua

SEQ ID NO: 823817 - RNA, 19 nt, Homo sapiens
  misc_RNA (1)...(19): siRNA sense strand
gaccacaccuucucaacaa

SEQ ID NO: 823818 - RNA, 19 nt, Homo sapiens
  misc_RNA (1)...(19): siRNA sense strand
gacuuggacuuuaagaaua

SEQ ID NO: 823819 - RNA, 19 nt, Homo sapiens
  misc_RNA (1)...(19): siRNA sense strand
aagcagaggccuauaaaua

SEQ ID NO: 823820 - RNA, 19 nt, Homo sapiens
  misc_RNA (1)...(19): siRNA sense strand
gaaagcagaggccuauaaa

SEQ ID NO: 823821 - RNA, 19 nt, Homo sapiens
  misc_RNA (1)...(19): siRNA sense strand
uggcaaagauucaggcuaa

SEQ ID NO: 823822 - RNA, 19 nt, Homo sapiens
  misc_RNA (1)...(19): siRNA sense strand
gaagaagacucgaguucca

SEQ ID NO: 823823 - RNA, 19 nt, Homo sapiens
  misc_RNA (1)...(19): siRNA sense strand
cacauuugcuccauacaua

SEQ ID NO: 823824 - RNA, 19 nt, Homo sapiens
  misc_RNA (1)...(19): siRNA sense strand
cuauugaccuguuguauug

SEQ ID NO: 823825 - RNA, 19 nt, Homo sapiens
  misc_RNA (1)...(19): siRNA sense strand
gcagaggccuauaaauaca

SEQ ID NO: 823826 - RNA, 19 nt, Homo sapiens
  misc_RNA (1)...(19): siRNA sense strand
caagauauaugucuaaagc

SEQ ID NO: 823827 - RNA, 19 nt, Homo sapiens
  misc_RNA (1)...(19): siRNA sense strand
caaagggauuaucguauga

SEQ ID NO: 823828 - RNA, 19 nt, Homo sapiens
  misc_RNA (1)...(19): siRNA sense strand
gcuggaagauaaagacuug

SEQ ID NO: 823829 - RNA, 19 nt, Homo sapiens
  misc_RNA (1)...(19): siRNA sense strand
uaaaugcuguuguggcaaa

SEQ ID NO: 823830 - RNA, 19 nt, Homo sapiens
  misc_RNA (1)...(19): siRNA sense strand
ucucguggcuuauuuaguu

SEQ ID NO: 823831 - RNA, 19 nt, Homo sapiens
  misc_RNA (1)...(19): siRNA sense strand
caaggaccauuuauuggaa

SEQ ID NO: 823832 - RNA, 19 nt, Homo sapiens
  misc_RNA (1)...(19): siRNA sense strand
caucaaggaccauuuauug

SEQ ID NO: 823833 - RNA, 19 nt, Homo sapiens
  misc_RNA (1)...(19): siRNA sense strand
ccacggaagugaacaagau

SEQ ID NO: 823834 - RNA, 19 nt, Homo sapiens
  misc_RNA (1)...(19): siRNA sense strand
gcucauggcugugguuuca

SEQ ID NO: 823835 - RNA, 19 nt, Homo sapiens
  misc_RNA (1)...(19): siRNA sense strand
gacacugacaucucaauua

SEQ ID NO: 823836 - RNA, 19 nt, Homo sapiens
  misc_RNA (1)...(19): siRNA sense strand
ucaggaggauucuacauau

SEQ ID NO: 823837 - RNA, 19 nt, Homo sapiens
  misc_RNA (1)...(19): siRNA sense strand
gcugugguuucaauguuua

SEQ ID NO: 823838 - RNA, 19 nt, Homo sapiens
  misc_RNA (1)...(19): siRNA sense strand
ggaagugaacaagaucuua

SEQ ID NO: 823839 - RNA, 19 nt, Homo sapiens
  misc_RNA (1)...(19): siRNA sense strand
gaauaaagacacugacauc

SEQ ID NO: 823840 - RNA, 19 nt, Homo sapiens
  misc_RNA (1)...(19): siRNA sense strand
gaucaccgccaucaaagaa

SEQ ID NO: 823841 - RNA, 19 nt, Homo sapiens
  misc_RNA (1)...(19): siRNA sense strand
aggagcagauucagaagua

SEQ ID NO: 823842 - RNA, 19 nt, Homo sapiens
  misc_RNA (1)...(19): siRNA sense strand
uuacacaucucucauuucu

SEQ ID NO: 823843 - RNA, 19 nt, Homo sapiens
  misc_RNA (1)...(19): siRNA sense strand
ugaaagcagaggccuauaa

SEQ ID NO: 823844 - RNA, 19 nt, Homo sapiens
  misc_RNA (1)...(19): siRNA sense strand
uaagaggcacgcugaguaa

SEQ ID NO: 823845 - RNA, 19 nt, Homo sapiens
  misc_RNA (1)...(19): siRNA sense strand
ugauguggcuccugaccua

SEQ ID NO: 823846 - RNA, 19 nt, Homo sapiens
  misc_RNA (1)...(19): siRNA sense strand
gaagugaacaagaucuuag

SEQ ID NO: 823847 - RNA, 19 nt, Homo sapiens
  misc_RNA (1)...(19): siRNA sense strand
gcuauugaccuguuguauu

SEQ ID NO: 823848 - RNA, 19 nt, Homo sapiens
  misc_RNA (1)...(19): siRNA sense strand
ggaccugguggauuccuua

SEQ ID NO: 823849 - RNA, 19 nt, Homo sapiens
  misc_RNA (1)...(19): siRNA sense strand
caggaggauucuacauauu

SEQ ID NO: 823850 - RNA, 19 nt, Homo sapiens
  misc_RNA (1)...(19): siRNA sense strand
gcagacgggcaucguguuu

SEQ ID NO: 823851 - RNA, 19 nt, Homo sapiens
  misc_RNA (1)...(19): siRNA sense strand
ggacagcgagcucaucauc

SEQ ID NO: 823852 - RNA, 19 nt, Homo sapiens
  misc_RNA (1)...(19): siRNA sense strand
gaugaaagcagaggccuau

SEQ ID NO: 823853 - RNA, 19 nt, Homo sapiens
  misc_RNA (1)...(19): siRNA sense strand
aaucaucaaggaccauuua

SEQ ID NO: 823854 - RNA, 19 nt, Homo sapiens
  misc_RNA (1)...(19): siRNA sense strand
cuaagaggcacgcugagua

SEQ ID NO: 823855 - RNA, 19 nt, Homo sapiens
  misc_RNA (1)...(19): siRNA sense strand
gaugaucucucugaagaac

SEQ ID NO: 823856 - RNA, 19 nt, Homo sapiens
  misc_RNA (1)...(19): siRNA sense strand
ucaaagaagcaaagggauu

SEQ ID NO: 823857 - RNA, 19 nt, Homo sapiens
  misc_RNA (1)...(19): siRNA sense strand
ggaggauucuacauauuuu

SEQ ID NO: 823858 - RNA, 19 nt, Homo sapiens
  misc_RNA (1)...(19): siRNA sense strand
uguuacacaucucucauuu

SEQ ID NO: 823859 - RNA, 19 nt, Homo sapiens
  misc_RNA (1)...(19): siRNA sense strand
cuacaagucuguuuuacaa

SEQ ID NO: 823860 - RNA, 19 nt, Homo sapiens
  misc_RNA (1)...(19): siRNA sense strand
ucaaggaccauuuauugga

SEQ ID NO: 823861 - RNA, 19 nt, Homo sapiens
  misc_RNA (1)...(19): siRNA sense strand
ggaccacaccuucucaaca

SEQ ID NO: 823862 - RNA, 19 nt, Homo sapiens
  misc_RNA (1)...(19): siRNA sense strand
uacgugaacagcacacuua

SEQ ID NO: 823863 - RNA, 19 nt, Homo sapiens
  misc_RNA (1)...(19): siRNA sense strand
ggcugugguuucaauguuu

SEQ ID NO: 823864 - RNA, 19 nt, Homo sapiens
  misc_RNA (1)...(19): siRNA sense strand
ggaagaauccacauuugcu

SEQ ID NO: 823865 - RNA, 19 nt, Homo sapiens
  misc_RNA (1)...(19): siRNA sense strand
gagcuugagaucacccuuu

SEQ ID NO: 823866 - RNA, 19 nt, Homo sapiens
  misc_RNA (1)...(19): siRNA sense strand
aagcaaagggauuaucgua

SEQ ID NO: 823867 - RNA, 19 nt, Homo sapiens
  misc_RNA (1)...(19): siRNA sense strand
acagcgagcucaucaucga

SEQ ID NO: 823868 - RNA, 19 nt, Homo sapiens
  misc_RNA (1)...(19): siRNA sense strand
agacuuggacuuuaagaau

SEQ ID NO: 823869 - RNA, 19 nt, Homo sapiens
  misc_RNA (1)...(19): siRNA sense strand
caauaucugggacuuguga

SEQ ID NO: 823870 - RNA, 19 nt, Homo sapiens
  misc_RNA (1)...(19): siRNA sense strand
ugaaaccacuacccaagag

SEQ ID NO: 823871 - RNA, 19 nt, Homo sapiens
  misc_RNA (1)...(19): siRNA sense strand
gaccauuuauuggaagaau

SEQ ID NO: 823872 - RNA, 19 nt, Homo sapiens
  misc_RNA (1)...(19): siRNA sense strand
cacggaagccugaagaaga

SEQ ID NO: 823873 - RNA, 19 nt, Homo sapiens
  misc_RNA (1)...(19): siRNA sense strand
aauguuuacucuaccugua

SEQ ID NO: 823874 - RNA, 19 nt, Homo sapiens
  misc_RNA (1)...(19): siRNA sense strand
aaaucacacugacggaaau

SEQ ID NO: 823875 - RNA, 19 nt, Homo sapiens
  misc_RNA (1)...(19): siRNA sense strand
gaagacgacagcccaggau

SEQ ID NO: 823876 - RNA, 19 nt, Homo sapiens
  misc_RNA (1)...(19): siRNA sense strand
agagucucguggcuuauuu

SEQ ID NO: 823877 - RNA, 19 nt, Homo sapiens
  misc_RNA (1)...(19): siRNA sense strand
gacgacagcccaggaucua

SEQ ID NO: 823878 - RNA, 19 nt, Homo sapiens
  misc_RNA (1)...(19): siRNA sense strand
aggaggauucuacauauuu

SEQ ID NO: 823879 - RNA, 19 nt, Homo sapiens
  misc_RNA (1)...(19): siRNA sense strand
gccuauaaauacauugaca

SEQ ID NO: 823880 - RNA, 19 nt, Homo sapiens
  misc_RNA (1)...(19): siRNA sense strand
gacucgaguuccaaccaaa

SEQ ID NO: 823881 - RNA, 19 nt, Homo sapiens
  misc_RNA (1)...(19): siRNA sense strand
acugacaucucaauuaaac

SEQ ID NO: 823882 - RNA, 19 nt, Homo sapiens
  misc_RNA (1)...(19): siRNA sense strand
gaaaccacuacccaagaga

SEQ ID NO: 823883 - RNA, 19 nt, Homo sapiens
  misc_RNA (1)...(19): siRNA sense strand
uaccuguaguguauguuaa

SEQ ID NO: 823884 - RNA, 19 nt, Homo sapiens
  misc_RNA (1)...(19): siRNA sense strand
cguuggcgcucucuucaau

SEQ ID NO: 823885 - RNA, 19 nt, Homo sapiens
  misc_RNA (1)...(19): siRNA sense strand
ucucagccaccaucaguuu

SEQ ID NO: 823886 - RNA, 19 nt, Homo sapiens
  misc_RNA (1)...(19): siRNA sense strand
ugagaagcaagauauaugu

SEQ ID NO: 823887 - RNA, 19 nt, Homo sapiens
  misc_RNA (1)...(19): siRNA sense strand
gagucucguggcuuauuua

SEQ ID NO: 823888 - RNA, 19 nt, Homo sapiens
  misc_RNA (1)...(19): siRNA sense strand
gugaacagcacacuuaagg

SEQ ID NO: 823889 - RNA, 19 nt, Homo sapiens
  misc_RNA (1)...(19): siRNA sense strand
aauccacauuugcuccaua

SEQ ID NO: 823890 - RNA, 19 nt, Homo sapiens
  misc_RNA (1)...(19): siRNA sense strand
ggcaaagauucaggcuaaa

SEQ ID NO: 823891 - RNA, 19 nt, Homo sapiens
  misc_RNA (1)...(19): siRNA sense strand
ugaccaauaucugggacuu

SEQ ID NO: 823892 - RNA, 19 nt, Homo sapiens
  misc_RNA (1)...(19): siRNA sense strand
gcagaguccacggaaguga

SEQ ID NO: 823893 - RNA, 19 nt, Homo sapiens
  misc_RNA (1)...(19): siRNA sense strand
uggcugugguuucaauguu

SEQ ID NO: 823894 - RNA, 19 nt, Homo sapiens
  misc_RNA (1)...(19): siRNA sense strand
ucauggcugugguuucaau

SEQ ID NO: 823895 - RNA, 19 nt, Homo sapiens
  misc_RNA (1)...(19): siRNA sense strand
gcaucguguuugggaguuu

SEQ ID NO: 823896 - RNA, 19 nt, Homo sapiens
  misc_RNA (1)...(19): siRNA sense strand
caucucaauuaaaccugaa

SEQ ID NO: 823897 - RNA, 19 nt, Homo sapiens
  misc_RNA (1)...(19): siRNA sense strand
agaggccuauaaauacauu

SEQ ID NO: 823898 - RNA, 19 nt, Homo sapiens
  misc_RNA (1)...(19): siRNA sense strand
aagggauuaucguaugaaa

SEQ ID NO: 823899 - RNA, 19 nt, Homo sapiens
  misc_RNA (1)...(19): siRNA sense strand
gagcagauucagaaguaca

SEQ ID NO: 823900 - RNA, 19 nt, Homo sapiens
  misc_RNA (1)...(19): siRNA sense strand
ucacacugacggaaauaga

SEQ ID NO: 823901 - RNA, 19 nt, Homo sapiens
  misc_RNA (1)...(19): siRNA sense strand
cucaggaggauucuacaua

SEQ ID NO: 823902 - RNA, 19 nt, Homo sapiens
  misc_RNA (1)...(19): siRNA sense strand
gaagaccccugagaagcaa

SEQ ID NO: 823903 - RNA, 19 nt, Homo sapiens
  misc_RNA (1)...(19): siRNA sense strand
agacgggcaucguguuugg

SEQ ID NO: 823904 - RNA, 19 nt, Homo sapiens
  misc_RNA (1)...(19): siRNA sense strand
agacucgaguuccaaccaa

SEQ ID NO: 823905 - RNA, 19 nt, Homo sapiens
  misc_RNA (1)...(19): siRNA sense strand
cguaugaaaccgccgagaa

SEQ ID NO: 823906 - RNA, 19 nt, Homo sapiens
  misc_RNA (1)...(19): siRNA sense strand
cgacagcccaggaucuauc

SEQ ID NO: 823907 - RNA, 19 nt, Homo sapiens
  misc_RNA (1)...(19): siRNA sense strand
gcaagauauaugucuaaag

SEQ ID NO: 823908 - RNA, 19 nt, Homo sapiens
  misc_RNA (1)...(19): siRNA sense strand
caagaaggcuggaauauuu

SEQ ID NO: 823909 - RNA, 19 nt, Homo sapiens
  misc_RNA (1)...(19): siRNA sense strand
gaaguaggcugacauauga

SEQ ID NO: 823910 - RNA, 19 nt, Homo sapiens
  misc_RNA (1)...(19): siRNA sense strand
gcagaaagcuuuagaugaa

SEQ ID NO: 823911 - RNA, 19 nt, Homo sapiens
  misc_RNA (1)...(19): siRNA sense strand
gcaaagaccucaauuaucu

SEQ ID NO: 823912 - RNA, 19 nt, Homo sapiens
  misc_RNA (1)...(19): siRNA sense strand
gaaugugucugcaagauuu

SEQ ID NO: 823913 - RNA, 19 nt, Homo sapiens
  misc_RNA (1)...(19): siRNA sense strand
caaagaagauacucucauu

SEQ ID NO: 823914 - RNA, 19 nt, Homo sapiens
  misc_RNA (1)...(19): siRNA sense strand
ggagagauguuugauguaa

SEQ ID NO: 823915 - RNA, 19 nt, Homo sapiens
  misc_RNA (1)...(19): siRNA sense strand
gaagauacucucauugaua

SEQ ID NO: 823916 - RNA, 19 nt, Homo sapiens
  misc_RNA (1)...(19): siRNA sense strand
ggauuaaucugguguuuau

SEQ ID NO: 823917 - RNA, 19 nt, Homo sapiens
  misc_RNA (1)...(19): siRNA sense strand
gaauucaacuccagagaaa

SEQ ID NO: 823918 - RNA, 19 nt, Homo sapiens
  misc_RNA (1)...(19): siRNA sense strand
ggacaaagaauguggagua

SEQ ID NO: 823919 - RNA, 19 nt, Homo sapiens
  misc_RNA (1)...(19): siRNA sense strand
gaagacagcauaagaagaa

SEQ ID NO: 823920 - RNA, 19 nt, Homo sapiens
  misc_RNA (1)...(19): siRNA sense strand
ggaggugucugcuauuauu

SEQ ID NO: 823921 - RNA, 19 nt, Homo sapiens
  misc_RNA (1)...(19): siRNA sense strand
gcaugcagcucuuugguaa

SEQ ID NO: 823922 - RNA, 19 nt, Homo sapiens
  misc_RNA (1)...(19): siRNA sense strand
gaacacccaucaaagaaga

SEQ ID NO: 823923 - RNA, 19 nt, Homo sapiens
  misc_RNA (1)...(19): siRNA sense strand
gaguauaccuuuacaggaa

SEQ ID NO: 823924 - RNA, 19 nt, Homo sapiens
  misc_RNA (1)...(19): siRNA sense strand
cagaagaacagaagaaaua

SEQ ID NO: 823925 - RNA, 19 nt, Homo sapiens
  misc_RNA (1)...(19): siRNA sense strand
ggaagaggcugaacagaag

SEQ ID NO: 823926 - RNA, 19 nt, Homo sapiens
  misc_RNA (1)...(19): siRNA sense strand
aaacugaucucucuucguu

SEQ ID NO: 823927 - RNA, 19 nt, Homo sapiens
  misc_RNA (1)...(19): siRNA sense strand
gggaaacucugguggaauu

SEQ ID NO: 823928 - RNA, 19 nt, Homo sapiens
  misc_RNA (1)...(19): siRNA sense strand
gcaauggccuccagauaau

SEQ ID NO: 823929 - RNA, 19 nt, Homo sapiens
  misc_RNA (1)...(19): siRNA sense strand
gaggaggugucugcuauua

SEQ ID NO: 823930 - RNA, 19 nt, Homo sapiens
  misc_RNA (1)...(19): siRNA sense strand
caaagaauguggaguauac

SEQ ID NO: 823931 - RNA, 19 nt, Homo sapiens
  misc_RNA (1)...(19): siRNA sense strand
gaagacaaagggaaagaua

SEQ ID NO: 823932 - RNA, 19 nt, Homo sapiens
  misc_RNA (1)...(19): siRNA sense strand
guugaugucucacugguua

SEQ ID NO: 823933 - RNA, 19 nt, Homo sapiens
  misc_RNA (1)...(19): siRNA sense strand
gcaaagagcaaugaguaua

SEQ ID NO: 823934 - RNA, 19 nt, Homo sapiens
  misc_RNA (1)...(19): siRNA sense strand
gcacgcugcucuuugcuuu

SEQ ID NO: 823935 - RNA, 19 nt, Homo sapiens
  misc_RNA (1)...(19): siRNA sense strand
guucaaguguugucagaua

SEQ ID NO: 823936 - RNA, 19 nt, Homo sapiens
  misc_RNA (1)...(19): siRNA sense strand
caaagaaugugauggaaca

SEQ ID NO: 823937 - RNA, 19 nt, Homo sapiens
  misc_RNA (1)...(19): siRNA sense strand
gaagacaaccuguacaugu

SEQ ID NO: 823938 - RNA, 19 nt, Homo sapiens
  misc_RNA (1)...(19): siRNA sense strand
ggaaguaggcugacauaug

SEQ ID NO: 823939 - RNA, 19 nt, Homo sapiens
  misc_RNA (1)...(19): siRNA sense strand
gagaaugacuuugcugaug

SEQ ID NO: 823940 - RNA, 19 nt, Homo sapiens
  misc_RNA (1)...(19): siRNA sense strand
ggaugaaagugauuacaug

SEQ ID NO: 823941 - RNA, 19 nt, Homo sapiens
  misc_RNA (1)...(19): siRNA sense strand
ggacagugagcauauuuaa

SEQ ID NO: 823942 - RNA, 19 nt, Homo sapiens
  misc_RNA (1)...(19): siRNA sense strand
ggaaagauaucagggaaag

SEQ ID NO: 823943 - RNA, 19 nt, Homo sapiens
  misc_RNA (1)...(19): siRNA sense strand
gagaacagccugagguuga

SEQ ID NO: 823944 - RNA, 19 nt, Homo sapiens
  misc_RNA (1)...(19): siRNA sense strand
caaaggacauuggcucuga

SEQ ID NO: 823945 - RNA, 19 nt, Homo sapiens
  misc_RNA (1)...(19): siRNA sense strand
gcucuggccuuugaagaua

SEQ ID NO: 823946 - RNA, 19 nt, Homo sapiens
  misc_RNA (1)...(19): siRNA sense strand
gaugacauguucaacuuug

SEQ ID NO: 823947 - RNA, 19 nt, Homo sapiens
  misc_RNA (1)...(19): siRNA sense strand
gaaagaacagucuggagaa

SEQ ID NO: 823948 - RNA, 19 nt, Homo sapiens
  misc_RNA (1)...(19): siRNA sense strand
ugacaaacauucuguacug

SEQ ID NO: 823949 - RNA, 19 nt, Homo sapiens
  misc_RNA (1)...(19): siRNA sense strand
uaaaguggguugcauaugg

SEQ ID NO: 823950 - RNA, 19 nt, Homo sapiens
  misc_RNA (1)...(19): siRNA sense strand
guacggaaguucaaguguu

SEQ ID NO: 823951 - RNA, 19 nt, Homo sapiens
  misc_RNA (1)...(19): siRNA sense strand
gaaauuaaaccgcuugaag

SEQ ID NO: 823952 - RNA, 19 nt, Homo sapiens
  misc_RNA (1)...(19): siRNA sense strand
gauccuacaucaaggcaaa

SEQ ID NO: 823953 - RNA, 19 nt, Homo sapiens
  misc_RNA (1)...(19): siRNA sense strand
ggaaaccgaugaccagagu

SEQ ID NO: 823954 - RNA, 19 nt, Homo sapiens
  misc_RNA (1)...(19): siRNA sense strand
gcacaacuacugaaacaga

SEQ ID NO: 823955 - RNA, 19 nt, Homo sapiens
  misc_RNA (1)...(19): siRNA sense strand
gaaagacaaaggcaaagaa

SEQ ID NO: 823956 - RNA, 19 nt, Homo sapiens
  misc_RNA (1)...(19): siRNA sense strand
gaagaaauacuacaaugca

SEQ ID NO: 823957 - RNA, 19 nt, Homo sapiens
  misc_RNA (1)...(19): siRNA sense strand
ggauaucugucucuacuuc

SEQ ID NO: 823958 - RNA, 19 nt, Homo sapiens
  misc_RNA (1)...(19): siRNA sense strand
gagcacaauugguucgaaa

SEQ ID NO: 823959 - RNA, 19 nt, Homo sapiens
  misc_RNA (1)...(19): siRNA sense strand
gcacgauucuuaccaacug

SEQ ID NO: 823960 - RNA, 19 nt, Homo sapiens
  misc_RNA (1)...(19): siRNA sense strand
cagaagaaauacuacaaug

SEQ ID NO: 823961 - RNA, 19 nt, Homo sapiens
  misc_RNA (1)...(19): siRNA sense strand
guaugcagcuguugauuca

SEQ ID NO: 823962 - RNA, 19 nt, Homo sapiens
  misc_RNA (1)...(19): siRNA sense strand
ggaaugagggcuguuguaa

SEQ ID NO: 823963 - RNA, 19 nt, Homo sapiens
  misc_RNA (1)...(19): siRNA sense strand
gaaggcagcacgguugaua

SEQ ID NO: 823964 - RNA, 19 nt, Homo sapiens
  misc_RNA (1)...(19): siRNA sense strand
gcaaagagaagcuaaaugc

SEQ ID NO: 823965 - RNA, 19 nt, Homo sapiens
  misc_RNA (1)...(19): siRNA sense strand
ccagauaauucuuccuuug

SEQ ID NO: 823966 - RNA, 19 nt, Homo sapiens
  misc_RNA (1)...(19): siRNA sense strand
gaagcuuucugaugucaug

SEQ ID NO: 823967 - RNA, 19 nt, Homo sapiens
  misc_RNA (1)...(19): siRNA sense strand
ugaaagugauuacauguca

SEQ ID NO: 823968 - RNA, 19 nt, Homo sapiens
  misc_RNA (1)...(19): siRNA sense strand
caagauaauugccauggau

SEQ ID NO: 823969 - RNA, 19 nt, Homo sapiens
  misc_RNA (1)...(19): siRNA sense strand
caagaaagacaaaggcaaa

SEQ ID NO: 823970 - RNA, 19 nt, Homo sapiens
  misc_RNA (1)...(19): siRNA sense strand
gcaaggaugaggaugauga

SEQ ID NO: 823971 - RNA, 19 nt, Homo sapiens
  misc_RNA (1)...(19): siRNA sense strand
aaugagggcuguuguaaau

SEQ ID NO: 823972 - RNA, 19 nt, Homo sapiens
  misc_RNA (1)...(19): siRNA sense strand
gggcacaacuacugaaaca

SEQ ID NO: 823973 - RNA, 19 nt, Homo sapiens
  misc_RNA (1)...(19): siRNA sense strand
aagacaaccuguacaugua

SEQ ID NO: 823974 - RNA, 19 nt, Homo sapiens
  misc_RNA (1)...(19): siRNA sense strand
gaagcuaaaugcaacuagu

SEQ ID NO: 823975 - RNA, 19 nt, Homo sapiens
  misc_RNA (1)...(19): siRNA sense strand
gaaagagacgguccaguuc

SEQ ID NO: 823976 - RNA, 19 nt, Homo sapiens
  misc_RNA (1)...(19): siRNA sense strand
ucaauaugcucauuaugug

SEQ ID NO: 823977 - RNA, 19 nt, Homo sapiens
  misc_RNA (1)...(19): siRNA sense strand
gauggaugcccuucgaaua

SEQ ID NO: 823978 - RNA, 19 nt, Homo sapiens
  misc_RNA (1)...(19): siRNA sense strand
caucauauccuuccugguu

SEQ ID NO: 823979 - RNA, 19 nt, Homo sapiens
  misc_RNA (1)...(19): siRNA sense strand
gagaaugugugcugaaacu

SEQ ID NO: 823980 - RNA, 19 nt, Homo sapiens
  misc_RNA (1)...(19): siRNA sense strand
gaaauacuacaaugcaaug

SEQ ID NO: 823981 - RNA, 19 nt, Homo sapiens
  misc_RNA (1)...(19): siRNA sense strand
ggauggauauuauguaugc

SEQ ID NO: 823982 - RNA, 19 nt, Homo sapiens
  misc_RNA (1)...(19): siRNA sense strand
ggccaaaccaugugccuua

SEQ ID NO: 823983 - RNA, 19 nt, Homo sapiens
  misc_RNA (1)...(19): siRNA sense strand
uggaagaacuugaagaauc

SEQ ID NO: 823984 - RNA, 19 nt, Homo sapiens
  misc_RNA (1)...(19): siRNA sense strand
ucagagaguucuucaguag

SEQ ID NO: 823985 - RNA, 19 nt, Homo sapiens
  misc_RNA (1)...(19): siRNA sense strand
gaucuugacuguguucugu

SEQ ID NO: 823986 - RNA, 19 nt, Homo sapiens
  misc_RNA (1)...(19): siRNA sense strand
gaggaugacuuugagaugu

SEQ ID NO: 823987 - RNA, 19 nt, Homo sapiens
  misc_RNA (1)...(19): siRNA sense strand
uggagaaucugacuuugaa

SEQ ID NO: 823988 - RNA, 19 nt, Homo sapiens
  misc_RNA (1)...(19): siRNA sense strand
agaaugacuuugcugauga

SEQ ID NO: 823989 - RNA, 19 nt, Homo sapiens
  misc_RNA (1)...(19): siRNA sense strand
gcaaggggcuuuuguuuag

SEQ ID NO: 823990 - RNA, 19 nt, Homo sapiens
  misc_RNA (1)...(19): siRNA sense strand
gcccaaagccaaacaguga

SEQ ID NO: 823991 - RNA, 19 nt, Homo sapiens
  misc_RNA (1)...(19): siRNA sense strand
uaacguaggacuuggauau

SEQ ID NO: 823992 - RNA, 19 nt, Homo sapiens
  misc_RNA (1)...(19): siRNA sense strand
agaauaugcugacaagguu

SEQ ID NO: 823993 - RNA, 19 nt, Homo sapiens
  misc_RNA (1)...(19): siRNA sense strand
gaaaucuagugguucugaa

SEQ ID NO: 823994 - RNA, 19 nt, Homo sapiens
  misc_RNA (1)...(19): siRNA sense strand
gaauguggaguauaccuuu

SEQ ID NO: 823995 - RNA, 19 nt, Homo sapiens
  misc_RNA (1)...(19): siRNA sense strand
aaagauaucagggaaagua

SEQ ID NO: 823996 - RNA, 19 nt, Homo sapiens
  misc_RNA (1)...(19): siRNA sense strand
gaacuucaguguugcuacu

SEQ ID NO: 823997 - RNA, 19 nt, Homo sapiens
  misc_RNA (1)...(19): siRNA sense strand
gcaaaugccuuggguuacu

SEQ ID NO: 823998 - RNA, 19 nt, Homo sapiens
  misc_RNA (1)...(19): siRNA sense strand
gaaagcaaagagaagcuaa

SEQ ID NO: 823999 - RNA, 19 nt, Homo sapiens
  misc_RNA (1)...(19): siRNA sense strand
ggaagaacuugaagaaucc

SEQ ID NO: 824000 - RNA, 19 nt, Homo sapiens
  misc_RNA (1)...(19): siRNA sense strand
gaaugguacuacuuucaau

SEQ ID NO: 824001 - RNA, 19 nt, Homo sapiens
  misc_RNA (1)...(19): siRNA sense strand
gaacaacgcauugcagaag

SEQ ID NO: 824002 - RNA, 19 nt, Homo sapiens
  misc_RNA (1)...(19): siRNA sense strand
ccuccaaagucucuuauga

SEQ ID NO: 824003 - RNA, 19 nt, Homo sapiens
  misc_RNA (1)...(19): siRNA sense strand
cuggagaacuucaguguug

SEQ ID NO: 824004 - RNA, 19 nt, Homo sapiens
  misc_RNA (1)...(19): siRNA sense strand
gcuagcaccuauucuuaau

SEQ ID NO: 824005 - RNA, 19 nt, Homo sapiens
  misc_RNA (1)...(19): siRNA sense strand
caucauagauaacuucaac

SEQ ID NO: 824006 - RNA, 19 nt, Homo sapiens
  misc_RNA (1)...(19): siRNA sense strand
uggcuaauauucaguauca

SEQ ID NO: 824007 - RNA, 19 nt, Homo sapiens
  misc_RNA (1)...(19): siRNA sense strand
aaagacagcuguauuucca

SEQ ID NO: 824008 - RNA, 19 nt, Homo sapiens
  misc_RNA (1)...(19): siRNA sense strand
gaagaaagggccaauguaa

SEQ ID NO: 824009 - RNA, 19 nt, Homo sapiens
  misc_RNA (1)...(19): siRNA sense strand
ggaauaaaccagauacuuu

SEQ ID NO: 824010 - RNA, 19 nt, Homo sapiens
  misc_RNA (1)...(19): siRNA sense strand
gaaauggacuucagcucuu

SEQ ID NO: 824011 - RNA, 19 nt, Homo sapiens
  misc_RNA (1)...(19): siRNA sense strand
gaacuaagugaccaaauga

SEQ ID NO: 824012 - RNA, 19 nt, Homo sapiens
  misc_RNA (1)...(19): siRNA sense strand
gggagcagcuguuaguuug

SEQ ID NO: 824013 - RNA, 19 nt, Homo sapiens
  misc_RNA (1)...(19): siRNA sense strand
cgaaggaaauggaagaguu

SEQ ID NO: 824014 - RNA, 19 nt, Homo sapiens
  misc_RNA (1)...(19): siRNA sense strand
gaaggaaauggaagaguuu

SEQ ID NO: 824015 - RNA, 19 nt, Homo sapiens
  misc_RNA (1)...(19): siRNA sense strand
acauauggcuuauucgaaa

SEQ ID NO: 824016 - RNA, 19 nt, Homo sapiens
  misc_RNA (1)...(19): siRNA sense strand
cuacaggagucaagauuug

SEQ ID NO: 824017 - RNA, 19 nt, Homo sapiens
  misc_RNA (1)...(19): siRNA sense strand
gcugacauauggcuuauuc

SEQ ID NO: 824018 - RNA, 19 nt, Homo sapiens
  misc_RNA (1)...(19): siRNA sense strand
ggacuucuguucccuccuu

SEQ ID NO: 824019 - RNA, 19 nt, Homo sapiens
  misc_RNA (1)...(19): siRNA sense strand
gggaucaguucuacaguga

SEQ ID NO: 824020 - RNA, 19 nt, Homo sapiens
  misc_RNA (1)...(19): siRNA sense strand
gaauucagccacuggauga

SEQ ID NO: 824021 - RNA, 19 nt, Homo sapiens
  misc_RNA (1)...(19): siRNA sense strand
agaaagggccaauguaauu

SEQ ID NO: 824022 - RNA, 19 nt, Homo sapiens
  misc_RNA (1)...(19): siRNA sense strand
ucaagcagcugguuaagag

SEQ ID NO: 824023 - RNA, 19 nt, Homo sapiens
  misc_RNA (1)...(19): siRNA sense strand
gagauuugaugggaauaaa

SEQ ID NO: 824024 - RNA, 19 nt, Homo sapiens
  misc_RNA (1)...(19): siRNA sense strand
gggcagaacuuccaaaaga

SEQ ID NO: 824025 - RNA, 19 nt, Homo sapiens
  misc_RNA (1)...(19): siRNA sense strand
gaauuugucaugcgccaua

SEQ ID NO: 824026 - RNA, 19 nt, Homo sapiens
  misc_RNA (1)...(19): siRNA sense strand
gaagugggaucaguucuac

SEQ ID NO: 824027 - RNA, 19 nt, Homo sapiens
  misc_RNA (1)...(19): siRNA sense strand
ggaugaacuuguccagaga

SEQ ID NO: 824028 - RNA, 19 nt, Homo sapiens
  misc_RNA (1)...(19): siRNA sense strand
ggugggcguuccauuguuu

SEQ ID NO: 824029 - RNA, 19 nt, Homo sapiens
  misc_RNA (1)...(19): siRNA sense strand
ggcaaucucuccuagaauc

SEQ ID NO: 824030 - RNA, 19 nt, Homo sapiens
  misc_RNA (1)...(19): siRNA sense strand
agaacuaagugaccaaaug

SEQ ID NO: 824031 - RNA, 19 nt, Homo sapiens
  misc_RNA (1)...(19): siRNA sense strand
gccacuggaugaauauaaa

SEQ ID NO: 824032 - RNA, 19 nt, Homo sapiens
  misc_RNA (1)...(19): siRNA sense strand
guuguuaugucagaacuaa

SEQ ID NO: 824033 - RNA, 19 nt, Homo sapiens
  misc_RNA (1)...(19): siRNA sense strand
cgagcagucuucuggauug

SEQ ID NO: 824034 - RNA, 19 nt, Homo sapiens
  misc_RNA (1)...(19): siRNA sense strand
gaagaagugggaucaguuc

SEQ ID NO: 824035 - RNA, 19 nt, Homo sapiens
  misc_RNA (1)...(19): siRNA sense strand
guacagacuuacucaaugc

SEQ ID NO: 824036 - RNA, 19 nt, Homo sapiens
  misc_RNA (1)...(19): siRNA sense strand
cuacugggauuuucaauuu

SEQ ID NO: 824037 - RNA, 19 nt, Homo sapiens
  misc_RNA (1)...(19): siRNA sense strand
gaucaguucuacagugaag

SEQ ID NO: 824038 - RNA, 19 nt, Homo sapiens
  misc_RNA (1)...(19): siRNA sense strand
gcagucuucuggauugaau

SEQ ID NO: 824039 - RNA, 19 nt, Homo sapiens
  misc_RNA (1)...(19): siRNA sense strand
guucuacagugaaguucua

SEQ ID NO: 824040 - RNA, 19 nt, Homo sapiens
  misc_RNA (1)...(19): siRNA sense strand
gcccaucuacucuuaaauu

SEQ ID NO: 824041 - RNA, 19 nt, Homo sapiens
  misc_RNA (1)...(19): siRNA sense strand
ggaagacccacuacguuau

SEQ ID NO: 824042 - RNA, 19 nt, Homo sapiens
  misc_RNA (1)...(19): siRNA sense strand
gagcagcuguuaguuugga

SEQ ID NO: 824043 - RNA, 19 nt, Homo sapiens
  misc_RNA (1)...(19): siRNA sense strand
ggcaaaagcugacauaugg

SEQ ID NO: 824044 - RNA, 19 nt, Homo sapiens
  misc_RNA (1)...(19): siRNA sense strand
gauaacauugcacacauga

SEQ ID NO: 824045 - RNA, 19 nt, Homo sapiens
  misc_RNA (1)...(19): siRNA sense strand
cagcccaucuacucuuaaa

SEQ ID NO: 824046 - RNA, 19 nt, Homo sapiens
  misc_RNA (1)...(19): siRNA sense strand
aaggcaaucucuccuagaa

SEQ ID NO: 824047 - RNA, 19 nt, Homo sapiens
  misc_RNA (1)...(19): siRNA sense strand
cuacaggccucgcuucucu

SEQ ID NO: 824048 - RNA, 19 nt, Homo sapiens
  misc_RNA (1)...(19): siRNA sense strand
cccaucuacucuuaaauuu

SEQ ID NO: 824049 - RNA, 19 nt, Homo sapiens
  misc_RNA (1)...(19): siRNA sense strand
gaaagaaggggaaaagaga

SEQ ID NO: 824050 - RNA, 19 nt, Homo sapiens
  misc_RNA (1)...(19): siRNA sense strand
ccagauacuuuaggacuca

SEQ ID NO: 824051 - RNA, 19 nt, Homo sapiens
  misc_RNA (1)...(19): siRNA sense strand
caagggagcagcuguuagu

SEQ ID NO: 824052 - RNA, 19 nt, Homo sapiens
  misc_RNA (1)...(19): siRNA sense strand
gaaaguucuguaaggauau

SEQ ID NO: 824053 - RNA, 19 nt, Homo sapiens
  misc_RNA (1)...(19): siRNA sense strand
gggaauaaaccagauacuu

SEQ ID NO: 824054 - RNA, 19 nt, Homo sapiens
  misc_RNA (1)...(19): siRNA sense strand
ggagauuugaugggaauaa

SEQ ID NO: 824055 - RNA, 19 nt, Homo sapiens
  misc_RNA (1)...(19): siRNA sense strand
cacccacucuuaccaaaug

SEQ ID NO: 824056 - RNA, 19 nt, Homo sapiens
  misc_RNA (1)...(19): siRNA sense strand
aggaagacccacuacguua

SEQ ID NO: 824057 - RNA, 19 nt, Homo sapiens
  misc_RNA (1)...(19): siRNA sense strand
uaagagaugggcagaacuu

SEQ ID NO: 824058 - RNA, 19 nt, Homo sapiens
  misc_RNA (1)...(19): siRNA sense strand
auacucggcuguacaagug

SEQ ID NO: 824059 - RNA, 19 nt, Homo sapiens
  misc_RNA (1)...(19): siRNA sense strand
gaagacccacuacguuauc

SEQ ID NO: 824060 - RNA, 19 nt, Homo sapiens
  misc_RNA (1)...(19): siRNA sense strand
cagugaaguucuaggaaga

SEQ ID NO: 824061 - RNA, 19 nt, Homo sapiens
  misc_RNA (1)...(19): siRNA sense strand
gaaacuacaggagucaaga

SEQ ID NO: 824062 - RNA, 19 nt, Homo sapiens
  misc_RNA (1)...(19): siRNA sense strand
caacagcccaucuacucuu

SEQ ID NO: 824063 - RNA, 19 nt, Homo sapiens
  misc_RNA (1)...(19): siRNA sense strand
gagcagucuucuggauuga

SEQ ID NO: 824064 - RNA, 19 nt, Homo sapiens
  misc_RNA (1)...(19): siRNA sense strand
uaacauugcacacaugaag

SEQ ID NO: 824065 - RNA, 19 nt, Homo sapiens
  misc_RNA (1)...(19): siRNA sense strand
ugaaguuuauccuguaucu

SEQ ID NO: 824066 - RNA, 19 nt, Homo sapiens
  misc_RNA (1)...(19): siRNA sense strand
guaccacucuuuggaugug

SEQ ID NO: 824067 - RNA, 19 nt, Homo sapiens
  misc_RNA (1)...(19): siRNA sense strand
cagaagaaagggccaaugu

SEQ ID NO: 824068 - RNA, 19 nt, Homo sapiens
  misc_RNA (1)...(19): siRNA sense strand
uauuugacaugaagaagug

SEQ ID NO: 824069 - RNA, 19 nt, Homo sapiens
  misc_RNA (1)...(19): siRNA sense strand
aacagcccaucuacucuua

SEQ ID NO: 824070 - RNA, 19 nt, Homo sapiens
  misc_RNA (1)...(19): siRNA sense strand
cuaugugccuguuguuaug

SEQ ID NO: 824071 - RNA, 19 nt, Homo sapiens
  misc_RNA (1)...(19): siRNA sense strand
gaagaaacuacaggaguca

SEQ ID NO: 824072 - RNA, 19 nt, Homo sapiens
  misc_RNA (1)...(19): siRNA sense strand
agaagaaagggccaaugua

SEQ ID NO: 824073 - RNA, 19 nt, Homo sapiens
  misc_RNA (1)...(19): siRNA sense strand
gaugggaauaaaccagaua

SEQ ID NO: 824074 - RNA, 19 nt, Homo sapiens
  misc_RNA (1)...(19): siRNA sense strand
guuaagagaugggcagaac

SEQ ID NO: 824075 - RNA, 19 nt, Homo sapiens
  misc_RNA (1)...(19): siRNA sense strand
guauuggcaucuucagcuu

SEQ ID NO: 824076 - RNA, 19 nt, Homo sapiens
  misc_RNA (1)...(19): siRNA sense strand
gauacuuuaggacucaaua

SEQ ID NO: 824077 - RNA, 19 nt, Homo sapiens
  misc_RNA (1)...(19): siRNA sense strand
gccaagggagcagcuguua

SEQ ID NO: 824078 - RNA, 19 nt, Homo sapiens
  misc_RNA (1)...(19): siRNA sense strand
cagcuuccauuucuuucga

SEQ ID NO: 824079 - RNA, 19 nt, Homo sapiens
  misc_RNA (1)...(19): siRNA sense strand
ugauaacauugcacacaug

SEQ ID NO: 824080 - RNA, 19 nt, Homo sapiens
  misc_RNA (1)...(19): siRNA sense strand
ucaauacucggcuguacaa

SEQ ID NO: 824081 - RNA, 19 nt, Homo sapiens
  misc_RNA (1)...(19): siRNA sense strand
guggagauuugaugggaau

SEQ ID NO: 824082 - RNA, 19 nt, Homo sapiens
  misc_RNA (1)...(19): siRNA sense strand
ucaguaacacgucagaaga

SEQ ID NO: 824083 - RNA, 19 nt, Homo sapiens
  misc_RNA (1)...(19): siRNA sense strand
gacauauggcuuauucgaa

SEQ ID NO: 824084 - RNA, 19 nt, Homo sapiens
  misc_RNA (1)...(19): siRNA sense strand
uaucugagacaauggcaaa

SEQ ID NO: 824085 - RNA, 19 nt, Homo sapiens
  misc_RNA (1)...(19): siRNA sense strand
uaaaauacccuuugucuac

SEQ ID NO: 824086 - RNA, 19 nt, Homo sapiens
  misc_RNA (1)...(19): siRNA sense strand
ugaagaagugggaucaguu

SEQ ID NO: 824087 - RNA, 19 nt, Homo sapiens
  misc_RNA (1)...(19): siRNA sense strand
aaugucgaguacagacuua

SEQ ID NO: 824088 - RNA, 19 nt, Homo sapiens
  misc_RNA (1)...(19): siRNA sense strand
ggaaauggaagaguuuguc

SEQ ID NO: 824089 - RNA, 19 nt, Homo sapiens
  misc_RNA (1)...(19): siRNA sense strand
gaucccaacagcccaucua

SEQ ID NO: 824090 - RNA, 19 nt, Homo sapiens
  misc_RNA (1)...(19): siRNA sense strand
aagguucuguggagauuug

SEQ ID NO: 824091 - RNA, 19 nt, Homo sapiens
  misc_RNA (1)...(19): siRNA sense strand
uacguuaucugagacaaug

SEQ ID NO: 824092 - RNA, 19 nt, Homo sapiens
  misc_RNA (1)...(19): siRNA sense strand
acaaguacaagaaaucaug

SEQ ID NO: 824093 - RNA, 19 nt, Homo sapiens
  misc_RNA (1)...(19): siRNA sense strand
ugacauauggcuuauucga

SEQ ID NO: 824094 - RNA, 19 nt, Homo sapiens
  misc_RNA (1)...(19): siRNA sense strand
cugaagacaguaauuaaug

SEQ ID NO: 824095 - RNA, 19 nt, Homo sapiens
  misc_RNA (1)...(19): siRNA sense strand
aguaacacgucagaagaaa

SEQ ID NO: 824096 - RNA, 19 nt, Homo sapiens
  misc_RNA (1)...(19): siRNA sense strand
gugagcugcuggccgaguu

SEQ ID NO: 824097 - RNA, 19 nt, Homo sapiens
  misc_RNA (1)...(19): siRNA sense strand
ugacuguauuggcaucuuc

SEQ ID NO: 824098 - RNA, 19 nt, Homo sapiens
  misc_RNA (1)...(19): siRNA sense strand
uaacacgucagaagaaagg

SEQ ID NO: 824099 - RNA, 19 nt, Homo sapiens
  misc_RNA (1)...(19): siRNA sense strand
auucgaaacuacugggauu

SEQ ID NO: 824100 - RNA, 19 nt, Homo sapiens
  misc_RNA (1)...(19): siRNA sense strand
uaggaagacccacuacguu

SEQ ID NO: 824101 - RNA, 19 nt, Homo sapiens
  misc_RNA (1)...(19): siRNA sense strand
ucuguucccuccuuccuau

SEQ ID NO: 824102 - RNA, 19 nt, Homo sapiens
  misc_RNA (1)...(19): siRNA sense strand
gacccacuacguuaucuga

SEQ ID NO: 824103 - RNA, 19 nt, Homo sapiens
  misc_RNA (1)...(19): siRNA sense strand
cccacgaccucaccugguu

SEQ ID NO: 824104 - RNA, 19 nt, Homo sapiens
  misc_RNA (1)...(19): siRNA sense strand
caguaacacgucagaagaa

SEQ ID NO: 824105 - RNA, 19 nt, Homo sapiens
  misc_RNA (1)...(19): siRNA sense strand
uacuuuagcucugggaguu

SEQ ID NO: 824106 - RNA, 19 nt, Homo sapiens
  misc_RNA (1)...(19): siRNA sense strand
uauaaggcaaucucuccua

SEQ ID NO: 824107 - RNA, 19 nt, Homo sapiens
  misc_RNA (1)...(19): siRNA sense strand
uguggcaacugugauauuc

SEQ ID NO: 824108 - RNA, 19 nt, Homo sapiens
  misc_RNA (1)...(19): siRNA sense strand
gcaagucuaugaccaauuu

SEQ ID NO: 824109 - RNA, 19 nt, Homo sapiens
  misc_RNA (1)...(19): siRNA sense strand
ggaaggugcuauucaagua

SEQ ID NO: 824110 - RNA, 19 nt, Homo sapiens
  misc_RNA (1)...(19): siRNA sense strand
uacauuagcuccuccauua

SEQ ID NO: 824111 - RNA, 19 nt, Homo sapiens
  misc_RNA (1)...(19): siRNA sense strand
gaacagcuccgcgcaaaua

SEQ ID NO: 824112 - RNA, 19 nt, Homo sapiens
  misc_RNA (1)...(19): siRNA sense strand
ugacuaaacuuccugcuuu

SEQ ID NO: 824113 - RNA, 19 nt, Homo sapiens
  misc_RNA (1)...(19): siRNA sense strand
ggaaauaucauucugcaaa

SEQ ID NO: 824114 - RNA, 19 nt, Homo sapiens
  misc_RNA (1)...(19): siRNA sense strand
gaaagucaguuugucuuaa

SEQ ID NO: 824115 - RNA, 19 nt, Homo sapiens
  misc_RNA (1)...(19): siRNA sense strand
ccacagaaauuacagcauu

SEQ ID NO: 824116 - RNA, 19 nt, Homo sapiens
  misc_RNA (1)...(19): siRNA sense strand
gcucauuacuguagcauuu

SEQ ID NO: 824117 - RNA, 19 nt, Homo sapiens
  misc_RNA (1)...(19): siRNA sense strand
gcagauacaugguguucaa

SEQ ID NO: 824118 - RNA, 19 nt, Homo sapiens
  misc_RNA (1)...(19): siRNA sense strand
gagaguaauucacgaaaga

SEQ ID NO: 824119 - RNA, 19 nt, Homo sapiens
  misc_RNA (1)...(19): siRNA sense strand
gggcuuauguucaaaguga

SEQ ID NO: 824120 - RNA, 19 nt, Homo sapiens
  misc_RNA (1)...(19): siRNA sense strand
uaagaacucugaagcaaug

SEQ ID NO: 824121 - RNA, 19 nt, Homo sapiens
  misc_RNA (1)...(19): siRNA sense strand
gcacuugcagcacgaauua

SEQ ID NO: 824122 - RNA, 19 nt, Homo sapiens
  misc_RNA (1)...(19): siRNA sense strand
gaaucuuucugcacaagua

SEQ ID NO: 824123 - RNA, 19 nt, Homo sapiens
  misc_RNA (1)...(19): siRNA sense strand
ugaccuaucugaugacaaa

SEQ ID NO: 824124 - RNA, 19 nt, Homo sapiens
  misc_RNA (1)...(19): siRNA sense strand
gcauuucagugggcaauua

SEQ ID NO: 824125 - RNA, 19 nt, Homo sapiens
  misc_RNA (1)...(19): siRNA sense strand
cagcacgaauuaaguauuu

SEQ ID NO: 824126 - RNA, 19 nt, Homo sapiens
  misc_RNA (1)...(19): siRNA sense strand
gagaagggauggaagaauc

SEQ ID NO: 824127 - RNA, 19 nt, Homo sapiens
  misc_RNA (1)...(19): siRNA sense strand
ggaagcagauccuaauucu

SEQ ID NO: 824128 - RNA, 19 nt, Homo sapiens
  misc_RNA (1)...(19): siRNA sense strand
gaacauaugguagaaguga

SEQ ID NO: 824129 - RNA, 19 nt, Homo sapiens
  misc_RNA (1)...(19): siRNA sense strand
ggaaagucaguuugucuua

SEQ ID NO: 824130 - RNA, 19 nt, Homo sapiens
  misc_RNA (1)...(19): siRNA sense strand
ggaaguacagacacuauuu

SEQ ID NO: 824131 - RNA, 19 nt, Homo sapiens
  misc_RNA (1)...(19): siRNA sense strand
caaugucuguguccauaua

SEQ ID NO: 824132 - RNA, 19 nt, Homo sapiens
  misc_RNA (1)...(19): siRNA sense strand
cgaaagaccuacauaguac

SEQ ID NO: 824133 - RNA, 19 nt, Homo sapiens
  misc_RNA (1)...(19): siRNA sense strand
gguggaagcuaacaaugaa

SEQ ID NO: 824134 - RNA, 19 nt, Homo sapiens
  misc_RNA (1)...(19): siRNA sense strand
gccaacagcugacucauca

SEQ ID NO: 824135 - RNA, 19 nt, Homo sapiens
  misc_RNA (1)...(19): siRNA sense strand
ggaaauggaaguaauggaa

SEQ ID NO: 824136 - RNA, 19 nt, Homo sapiens
  misc_RNA (1)...(19): siRNA sense strand
uaaacgugaugcuuucuuu

SEQ ID NO: 824137 - RNA, 19 nt, Homo sapiens
  misc_RNA (1)...(19): siRNA sense strand
ggaacaaauugcaaagugu

SEQ ID NO: 824138 - RNA, 19 nt, Homo sapiens
  misc_RNA (1)...(19): siRNA sense strand
gguacgaucuacuggaauu

SEQ ID NO: 824139 - RNA, 19 nt, Homo sapiens
  misc_RNA (1)...(19): siRNA sense strand
aagaagaaccagcucauua

SEQ ID NO: 824140 - RNA, 19 nt, Homo sapiens
  misc_RNA (1)...(19): siRNA sense strand
gaaauggaaguaauggaaa

SEQ ID NO: 824141 - RNA, 19 nt, Homo sapiens
  misc_RNA (1)...(19): siRNA sense strand
gcuauuggcuggugcaaca

SEQ ID NO: 824142 - RNA, 19 nt, Homo sapiens
  misc_RNA (1)...(19): siRNA sense strand
aaacuuugguggaagcuaa

SEQ ID NO: 824143 - RNA, 19 nt, Homo sapiens
  misc_RNA (1)...(19): siRNA sense strand
gcuguucgcugcuaugaau

SEQ ID NO: 824144 - RNA, 19 nt, Homo sapiens
  misc_RNA (1)...(19): siRNA sense strand
aagcaaauguuccagugua

SEQ ID NO: 824145 - RNA, 19 nt, Homo sapiens
  misc_RNA (1)...(19): siRNA sense strand
gaacacagcacagcagaau

SEQ ID NO: 824146 - RNA, 19 nt, Homo sapiens
  misc_RNA (1)...(19): siRNA sense strand
ucacauugcccacuuauau

SEQ ID NO: 824147 - RNA, 19 nt, Homo sapiens
  misc_RNA (1)...(19): siRNA sense strand
gcacucacucuaccucaua

SEQ ID NO: 824148 - RNA, 19 nt, Homo sapiens
  misc_RNA (1)...(19): siRNA sense strand
ggaccaauauugaccuauc

SEQ ID NO: 824149 - RNA, 19 nt, Homo sapiens
  misc_RNA (1)...(19): siRNA sense strand
ugcuggagcucuuaaguua

SEQ ID NO: 824150 - RNA, 19 nt, Homo sapiens
  misc_RNA (1)...(19): siRNA sense strand
gagcaagccuucaggaaac

SEQ ID NO: 824151 - RNA, 19 nt, Homo sapiens
  misc_RNA (1)...(19): siRNA sense strand
gaguugggcuuauguucaa

SEQ ID NO: 824152 - RNA, 19 nt, Homo sapiens
  misc_RNA (1)...(19): siRNA sense strand
caacaacauugcuuggaau

SEQ ID NO: 824153 - RNA, 19 nt, Homo sapiens
  misc_RNA (1)...(19): siRNA sense strand
ggaaguugcagcuacauga

SEQ ID NO: 824154 - RNA, 19 nt, Homo sapiens
  misc_RNA (1)...(19): siRNA sense strand
cauaaagaccacucagaua

SEQ ID NO: 824155 - RNA, 19 nt, Homo sapiens
  misc_RNA (1)...(19): siRNA sense strand
ccaccuacaccuaguauuu

SEQ ID NO: 824156 - RNA, 19 nt, Homo sapiens
  misc_RNA (1)...(19): siRNA sense strand
ccauggagauucuaaguca

SEQ ID NO: 824157 - RNA, 19 nt, Homo sapiens
  misc_RNA (1)...(19): siRNA sense strand
ucaaucaccucuccucuca

SEQ ID NO: 824158 - RNA, 19 nt, Homo sapiens
  misc_RNA (1)...(19): siRNA sense strand
gcagcuggcucugguauuc

SEQ ID NO: 824159 - RNA, 19 nt, Homo sapiens
  misc_RNA (1)...(19): siRNA sense strand
gcucauucaugguguuuga

SEQ ID NO: 824160 - RNA, 19 nt, Homo sapiens
  misc_RNA (1)...(19): siRNA sense strand
ggaaagcuaugcuauucag

SEQ ID NO: 824161 - RNA, 19 nt, Homo sapiens
  misc_RNA (1)...(19): siRNA sense strand
cauaguacauugccaagau

SEQ ID NO: 824162 - RNA, 19 nt, Homo sapiens
  misc_RNA (1)...(19): siRNA sense strand
cuacuuaaaugcaacuaga

SEQ ID NO: 824163 - RNA, 19 nt, Homo sapiens
  misc_RNA (1)...(19): siRNA sense strand
ucaauuaggucacuucaac

SEQ ID NO: 824164 - RNA, 19 nt, Homo sapiens
  misc_RNA (1)...(19): siRNA sense strand
ggcauuaccuuaaccaaag

SEQ ID NO: 824165 - RNA, 19 nt, Homo sapiens
  misc_RNA (1)...(19): siRNA sense strand
ucacaaaggucagaguuca

SEQ ID NO: 824166 - RNA, 19 nt, Homo sapiens
  misc_RNA (1)...(19): siRNA sense strand
gauacaugguguucaauag

SEQ ID NO: 824167 - RNA, 19 nt, Homo sapiens
  misc_RNA (1)...(19): siRNA sense strand
ccagagguacuacaguuua

SEQ ID NO: 824168 - RNA, 19 nt, Homo sapiens
  misc_RNA (1)...(19): siRNA sense strand
uagcuuugguugacuguaa

SEQ ID NO: 824169 - RNA, 19 nt, Homo sapiens
  misc_RNA (1)...(19): siRNA sense strand
gagauuuggucuggauaaa

SEQ ID NO: 824170 - RNA, 19 nt, Homo sapiens
  misc_RNA (1)...(19): siRNA sense strand
gaagcuaacaaugaacaua

SEQ ID NO: 824171 - RNA, 19 nt, Homo sapiens
  misc_RNA (1)...(19): siRNA sense strand
gaucauaccaucaaugucu

SEQ ID NO: 824172 - RNA, 19 nt, Homo sapiens
  misc_RNA (1)...(19): siRNA sense strand
gcaacaacaccaaaugaga

SEQ ID NO: 824173 - RNA, 19 nt, Homo sapiens
  misc_RNA (1)...(19): siRNA sense strand
gauaaagccaccaaggaaa

SEQ ID NO: 824174 - RNA, 19 nt, Homo sapiens
  misc_RNA (1)...(19): siRNA sense strand
caggaugccuuuauaucuu

SEQ ID NO: 824175 - RNA, 19 nt, Homo sapiens
  misc_RNA (1)...(19): siRNA sense strand
ggucucagauccaaagcuu

SEQ ID NO: 824176 - RNA, 19 nt, Homo sapiens
  misc_RNA (1)...(19): siRNA sense strand
ucagcgaccuggagauuug

SEQ ID NO: 824177 - RNA, 19 nt, Homo sapiens
  misc_RNA (1)...(19): siRNA sense strand
uugaaugacuucugugaaa

SEQ ID NO: 824178 - RNA, 19 nt, Homo sapiens
  misc_RNA (1)...(19): siRNA sense strand
gcaaggcuguucgcugcua

SEQ ID NO: 824179 - RNA, 19 nt, Homo sapiens
  misc_RNA (1)...(19): siRNA sense strand
guacuacaguuuacagucu

SEQ ID NO: 824180 - RNA, 19 nt, Homo sapiens
  misc_RNA (1)...(19): siRNA sense strand
gagggaagcucucauugcu

SEQ ID NO: 824181 - RNA, 19 nt, Homo sapiens
  misc_RNA (1)...(19): siRNA sense strand
gaauggaacaaauugcaaa

SEQ ID NO: 824182 - RNA, 19 nt, Homo sapiens
  misc_RNA (1)...(19): siRNA sense strand
ccacccagcuguucauaca

SEQ ID NO: 824183 - RNA, 19 nt, Homo sapiens
  misc_RNA (1)...(19): siRNA sense strand
acucaucacugccuacaaa

SEQ ID NO: 824184 - RNA, 19 nt, Homo sapiens
  misc_RNA (1)...(19): siRNA sense strand
gaauacuucugacaauugg

SEQ ID NO: 824185 - RNA, 19 nt, Homo sapiens
  misc_RNA (1)...(19): siRNA sense strand
gagauaaagccaccaagga

SEQ ID NO: 824186 - RNA, 19 nt, Homo sapiens
  misc_RNA (1)...(19): siRNA sense strand
agaaccagcucauuacugu

SEQ ID NO: 824187 - RNA, 19 nt, Homo sapiens
  misc_RNA (1)...(19): siRNA sense strand
gcaaauguuccaguguaua

SEQ ID NO: 824188 - RNA, 19 nt, Homo sapiens
  misc_RNA (1)...(19): siRNA sense strand
aaauaaacgugaugcuuuc

SEQ ID NO: 824189 - RNA, 19 nt, Homo sapiens
  misc_RNA (1)...(19): siRNA sense strand
ccacagaucauaccaucaa

SEQ ID NO: 824190 - RNA, 19 nt, Homo sapiens
  misc_RNA (1)...(19): siRNA sense strand
guaauggaaacgugccuua

SEQ ID NO: 824191 - RNA, 19 nt, Homo sapiens
  misc_RNA (1)...(19): siRNA sense strand
gcuaugcuauucaguaucu

SEQ ID NO: 824192 - RNA, 19 nt, Homo sapiens
  misc_RNA (1)...(19): siRNA sense strand
gagucuaguuuaaagcauu

SEQ ID NO: 824193 - RNA, 19 nt, Homo sapiens
  misc_RNA (1)...(19): siRNA sense strand
guacgaauggaacaaauug

SEQ ID NO: 824194 - RNA, 19 nt, Homo sapiens
  misc_RNA (1)...(19): siRNA sense strand
gaauguugguccacuuaca

SEQ ID NO: 824195 - RNA, 19 nt, Homo sapiens
  misc_RNA (1)...(19): siRNA sense strand
uacaugagcugacuaaacu

SEQ ID NO: 824196 - RNA, 19 nt, Homo sapiens
  misc_RNA (1)...(19): siRNA sense strand
gaagugaggacacaguugu

SEQ ID NO: 824197 - RNA, 19 nt, Homo sapiens
  misc_RNA (1)...(19): siRNA sense strand
uacaggcagucuauugaua

SEQ ID NO: 824198 - RNA, 19 nt, Homo sapiens
  misc_RNA (1)...(19): siRNA sense strand
caaggaaagcuaugcuauu

SEQ ID NO: 824199 - RNA, 19 nt, Homo sapiens
  misc_RNA (1)...(19): siRNA sense strand
aaggaaagcuaugcuauuc

SEQ ID NO: 824200 - RNA, 19 nt, Homo sapiens
  misc_RNA (1)...(19): siRNA sense strand
uggaauauggcacgaaaua

SEQ ID NO: 824201 - RNA, 19 nt, Homo sapiens
  misc_RNA (1)...(19): siRNA sense strand
ucaccagguuuacuaaguu

SEQ ID NO: 824202 - RNA, 19 nt, Homo sapiens
  misc_RNA (1)...(19): siRNA sense strand
cuuaaaagcugaaggaaaa

SEQ ID NO: 824203 - RNA, 19 nt, Homo sapiens
  misc_RNA (1)...(19): siRNA sense strand
ggaccuaggcacucucuau

SEQ ID NO: 824204 - RNA, 19 nt, Homo sapiens
  misc_RNA (1)...(19): siRNA sense strand
gcuauucaguaucuccaaa

SEQ ID NO: 824205 - RNA, 19 nt, Homo sapiens
  misc_RNA (1)...(19): siRNA sense strand
gcacagguacgaucuacug

SEQ ID NO: 824206 - RNA, 19 nt, Homo sapiens
  misc_RNA (1)...(19): siRNA sense strand
aguaauaccucugcacuug

SEQ ID NO: 824207 - RNA, 19 nt, Homo sapiens
  misc_RNA (1)...(19): siRNA sense strand
ggagauuuggucuggauaa

SEQ ID NO: 824208 - RNA, 19 nt, Homo sapiens
  misc_RNA (1)...(19): siRNA sense strand
gcacagagcuggaaagaga

SEQ ID NO: 824209 - RNA, 19 nt, Homo sapiens
  misc_RNA (1)...(19): siRNA sense strand
ggacaaguauccauuaauu

SEQ ID NO: 824210 - RNA, 19 nt, Homo sapiens
  misc_RNA (1)...(19): siRNA sense strand
gagaagaacuggaaagaga

SEQ ID NO: 824211 - RNA, 19 nt, Homo sapiens
  misc_RNA (1)...(19): siRNA sense strand
ggaaagaacuccggaagaa

SEQ ID NO: 824212 - RNA, 19 nt, Homo sapiens
  misc_RNA (1)...(19): siRNA sense strand
ugacaaagauggaaagaaa

SEQ ID NO: 824213 - RNA, 19 nt, Homo sapiens
  misc_RNA (1)...(19): siRNA sense strand
caagagggcugaacuagaa

SEQ ID NO: 824214 - RNA, 19 nt, Homo sapiens
  misc_RNA (1)...(19): siRNA sense strand
gagagaagcuuaucagaca

SEQ ID NO: 824215 - RNA, 19 nt, Homo sapiens
  misc_RNA (1)...(19): siRNA sense strand
gaacgaugguuuguacuaa

SEQ ID NO: 824216 - RNA, 19 nt, Homo sapiens
  misc_RNA (1)...(19): siRNA sense strand
gugaggaucugaaggauaa

SEQ ID NO: 824217 - RNA, 19 nt, Homo sapiens
  misc_RNA (1)...(19): siRNA sense strand
gagauugaauaccugcuua

SEQ ID NO: 824218 - RNA, 19 nt, Homo sapiens
  misc_RNA (1)...(19): siRNA sense strand
gaaaucagugcuucagaua

SEQ ID NO: 824219 - RNA, 19 nt, Homo sapiens
  misc_RNA (1)...(19): siRNA sense strand
gaacuggagcgacaaauga

SEQ ID NO: 824220 - RNA, 19 nt, Homo sapiens
  misc_RNA (1)...(19): siRNA sense strand
gaggacaaguauccauuaa

SEQ ID NO: 824221 - RNA, 19 nt, Homo sapiens
  misc_RNA (1)...(19): siRNA sense strand
caacuuugaugacaguaaa

SEQ ID NO: 824222 - RNA, 19 nt, Homo sapiens
  misc_RNA (1)...(19): siRNA sense strand
caagacaacuuugacaaga

SEQ ID NO: 824223 - RNA, 19 nt, Homo sapiens
  misc_RNA (1)...(19): siRNA sense strand
uugaauaccugcuuaagaa

SEQ ID NO: 824224 - RNA, 19 nt, Homo sapiens
  misc_RNA (1)...(19): siRNA sense strand
caaaguggcccaucaugaa

SEQ ID NO: 824225 - RNA, 19 nt, Homo sapiens
  misc_RNA (1)...(19): siRNA sense strand
gaacuuauugagcuuauug

SEQ ID NO: 824226 - RNA, 19 nt, Homo sapiens
  misc_RNA (1)...(19): siRNA sense strand
cuacaugccuuauuuaaac

SEQ ID NO: 824227 - RNA, 19 nt, Homo sapiens
  misc_RNA (1)...(19): siRNA sense strand
gaaauggacaguuuagcaa

SEQ ID NO: 824228 - RNA, 19 nt, Homo sapiens
  misc_RNA (1)...(19): siRNA sense strand
ggcaauuaaugaagucuuu

SEQ ID NO: 824229 - RNA, 19 nt, Homo sapiens
  misc_RNA (1)...(19): siRNA sense strand
uggaggagcuugaguuaga

SEQ ID NO: 824230 - RNA, 19 nt, Homo sapiens
  misc_RNA (1)...(19): siRNA sense strand
gacauucucuuggaugaaa

SEQ ID NO: 824231 - RNA, 19 nt, Homo sapiens
  misc_RNA (1)...(19): siRNA sense strand
cagaagaagaugcauuuaa

SEQ ID NO: 824232 - RNA, 19 nt, Homo sapiens
  misc_RNA (1)...(19): siRNA sense strand
agacaacuuugacaagauu

SEQ ID NO: 824233 - RNA, 19 nt, Homo sapiens
  misc_RNA (1)...(19): siRNA sense strand
uggaagacauguaccuaaa

SEQ ID NO: 824234 - RNA, 19 nt, Homo sapiens
  misc_RNA (1)...(19): siRNA sense strand
gaagaacuggaaagagaaa

SEQ ID NO: 824235 - RNA, 19 nt, Homo sapiens
  misc_RNA (1)...(19): siRNA sense strand
aaagaacccucaccugauc

SEQ ID NO: 824236 - RNA, 19 nt, Homo sapiens
  misc_RNA (1)...(19): siRNA sense strand
gaagacauguaccuaaagc

SEQ ID NO: 824237 - RNA, 19 nt, Homo sapiens
  misc_RNA (1)...(19): siRNA sense strand
ggaaauggacaguuuagca

SEQ ID NO: 824238 - RNA, 19 nt, Homo sapiens
  misc_RNA (1)...(19): siRNA sense strand
gcaguacgaggaaguuaaa

SEQ ID NO: 824239 - RNA, 19 nt, Homo sapiens
  misc_RNA (1)...(19): siRNA sense strand
ggaguggauucaagccauu

SEQ ID NO: 824240 - RNA, 19 nt, Homo sapiens
  misc_RNA (1)...(19): siRNA sense strand
cagaagagauugaauaccu

SEQ ID NO: 824241 - RNA, 19 nt, Homo sapiens
  misc_RNA (1)...(19): siRNA sense strand
uauuggaaauggacaguuu

SEQ ID NO: 824242 - RNA, 19 nt, Homo sapiens
  misc_RNA (1)...(19): siRNA sense strand
aaacaggaguggauucaag

SEQ ID NO: 824243 - RNA, 19 nt, Homo sapiens
  misc_RNA (1)...(19): siRNA sense strand
aggauuaauucgacugaua

SEQ ID NO: 824244 - RNA, 19 nt, Homo sapiens
  misc_RNA (1)...(19): siRNA sense strand
gcagauggaagaacagguu

SEQ ID NO: 824245 - RNA, 19 nt, Homo sapiens
  misc_RNA (1)...(19): siRNA sense strand
gacagcagauggaagaaca

SEQ ID NO: 824246 - RNA, 19 nt, Homo sapiens
  misc_RNA (1)...(19): siRNA sense strand
gaaagagagaagcuuauca

SEQ ID NO: 824247 - RNA, 19 nt, Homo sapiens
  misc_RNA (1)...(19): siRNA sense strand
gaaaagaaacgccuucaga

SEQ ID NO: 824248 - RNA, 19 nt, Homo sapiens
  misc_RNA (1)...(19): siRNA sense strand
gcaagaacaauuugaacau

SEQ ID NO: 824249 - RNA, 19 nt, Homo sapiens
  misc_RNA (1)...(19): siRNA sense strand
agaaacgccuucagacuca

SEQ ID NO: 824250 - RNA, 19 nt, Homo sapiens
  misc_RNA (1)...(19): siRNA sense strand
gaagaaacaggaguggauu

SEQ ID NO: 824251 - RNA, 19 nt, Homo sapiens
  misc_RNA (1)...(19): siRNA sense strand
gcagcaagaacaauuugaa

SEQ ID NO: 824252 - RNA, 19 nt, Homo sapiens
  misc_RNA (1)...(19): siRNA sense strand
caaagaacccucaccugau

SEQ ID NO: 824253 - RNA, 19 nt, Homo sapiens
  misc_RNA (1)...(19): siRNA sense strand
guagaguccuugccugaca

SEQ ID NO: 824254 - RNA, 19 nt, Homo sapiens
  misc_RNA (1)...(19): siRNA sense strand
gagagaagaacuggaaaga

SEQ ID NO: 824255 - RNA, 19 nt, Homo sapiens
  misc_RNA (1)...(19): siRNA sense strand
gcuggaggagcuugaguua

SEQ ID NO: 824256 - RNA, 19 nt, Homo sapiens
  misc_RNA (1)...(19): siRNA sense strand
aaaguccucugaacuggaa

SEQ ID NO: 824257 - RNA, 19 nt, Homo sapiens
  misc_RNA (1)...(19): siRNA sense strand
gaagaacagguugcucaaa

SEQ ID NO: 824258 - RNA, 19 nt, Homo sapiens
  misc_RNA (1)...(19): siRNA sense strand
ugucagaagagauugaaua

SEQ ID NO: 824259 - RNA, 19 nt, Homo sapiens
  misc_RNA (1)...(19): siRNA sense strand
ggaggagcuugaguuagaa

SEQ ID NO: 824260 - RNA, 19 nt, Homo sapiens
  misc_RNA (1)...(19): siRNA sense strand
gaaaauugcuguguagagu

SEQ ID NO: 824261 - RNA, 19 nt, Homo sapiens
  misc_RNA (1)...(19): siRNA sense strand
gcuacaugccuuauuuaaa

SEQ ID NO: 824262 - RNA, 19 nt, Homo sapiens
  misc_RNA (1)...(19): siRNA sense strand
gccauucauucuacuauuc

SEQ ID NO: 824263 - RNA, 19 nt, Homo sapiens
  misc_RNA (1)...(19): siRNA sense strand
gaacuugaagagagagaga

SEQ ID NO: 824264 - RNA, 19 nt, Homo sapiens
  misc_RNA (1)...(19): siRNA sense strand
gagauggcaacuaauaaga

SEQ ID NO: 824265 - RNA, 19 nt, Homo sapiens
  misc_RNA (1)...(19): siRNA sense strand
ggaacuggagcgacaaaug

SEQ ID NO: 824266 - RNA, 19 nt, Homo sapiens
  misc_RNA (1)...(19): siRNA sense strand
aaagcaggguuacaugaug

SEQ ID NO: 824267 - RNA, 19 nt, Homo sapiens
  misc_RNA (1)...(19): siRNA sense strand
gaagagagagagaagaacu

SEQ ID NO: 824268 - RNA, 19 nt, Homo sapiens
  misc_RNA (1)...(19): siRNA sense strand
ggcagaacuugaagagaga

SEQ ID NO: 824269 - RNA, 19 nt, Homo sapiens
  misc_RNA (1)...(19): siRNA sense strand
gaaggauuaauucgacuga

SEQ ID NO: 824270 - RNA, 19 nt, Homo sapiens
  misc_RNA (1)...(19): siRNA sense strand
ggcccaucaugaaggauua

SEQ ID NO: 824271 - RNA, 19 nt, Homo sapiens
  misc_RNA (1)...(19): siRNA sense strand
ggagauggcaacuaauaag

SEQ ID NO: 824272 - RNA, 19 nt, Homo sapiens
  misc_RNA (1)...(19): siRNA sense strand
ggauaagaaaggagacauu

SEQ ID NO: 824273 - RNA, 19 nt, Homo sapiens
  misc_RNA (1)...(19): siRNA sense strand
ugaggacaaguauccauua

SEQ ID NO: 824274 - RNA, 19 nt, Homo sapiens
  misc_RNA (1)...(19): siRNA sense strand
cagauaagaagaagaaaca

SEQ ID NO: 824275 - RNA, 19 nt, Homo sapiens
  misc_RNA (1)...(19): siRNA sense strand
aaucagugcuucagauaag

SEQ ID NO: 824276 - RNA, 19 nt, Homo sapiens
  misc_RNA (1)...(19): siRNA sense strand
gauaagaaaggagacauuc

SEQ ID NO: 824277 - RNA, 19 nt, Homo sapiens
  misc_RNA (1)...(19): siRNA sense strand
guacuaaaacccaacauaa

SEQ ID NO: 824278 - RNA, 19 nt, Homo sapiens
  misc_RNA (1)...(19): siRNA sense strand
gggaggagguuggcagcaa

SEQ ID NO: 824279 - RNA, 19 nt, Homo sapiens
  misc_RNA (1)...(19): siRNA sense strand
gggcuacaugccuuauuua

SEQ ID NO: 824280 - RNA, 19 nt, Homo sapiens
  misc_RNA (1)...(19): siRNA sense strand
ggaugaaaauugcugugua

SEQ ID NO: 824281 - RNA, 19 nt, Homo sapiens
  misc_RNA (1)...(19): siRNA sense strand
uacagaagaagaugcauuu

SEQ ID NO: 824282 - RNA, 19 nt, Homo sapiens
  misc_RNA (1)...(19): siRNA sense strand
caucaugaaggauuaauuc

SEQ ID NO: 824283 - RNA, 19 nt, Homo sapiens
  misc_RNA (1)...(19): siRNA sense strand
caacuaauaagaccaagag

SEQ ID NO: 824284 - RNA, 19 nt, Homo sapiens
  misc_RNA (1)...(19): siRNA sense strand
ucagacagcagauggaaga

SEQ ID NO: 824285 - RNA, 19 nt, Homo sapiens
  misc_RNA (1)...(19): siRNA sense strand
ggaaagagagaagcuuauc

SEQ ID NO: 824286 - RNA, 19 nt, Homo sapiens
  misc_RNA (1)...(19): siRNA sense strand
aagcaggguuacaugauga

SEQ ID NO: 824287 - RNA, 19 nt, Homo sapiens
  misc_RNA (1)...(19): siRNA sense strand
gggaacuuauugagcuuau

SEQ ID NO: 824288 - RNA, 19 nt, Homo sapiens
  misc_RNA (1)...(19): siRNA sense strand
ggacaaaguggcccaucau

SEQ ID NO: 824289 - RNA, 19 nt, Homo sapiens
  misc_RNA (1)...(19): siRNA sense strand
gagcaguacgaggaaguua

SEQ ID NO: 824290 - RNA, 19 nt, Homo sapiens
  misc_RNA (1)...(19): siRNA sense strand
ggaagaacagguugcucaa

SEQ ID NO: 824291 - RNA, 19 nt, Homo sapiens
  misc_RNA (1)...(19): siRNA sense strand
ggaacuuauugagcuuauu

SEQ ID NO: 824292 - RNA, 19 nt, Homo sapiens
  misc_RNA (1)...(19): siRNA sense strand
ucacugaggcagaacuuga

SEQ ID NO: 824293 - RNA, 19 nt, Homo sapiens
  misc_RNA (1)...(19): siRNA sense strand
acccucaccugaucacuaa

SEQ ID NO: 824294 - RNA, 19 nt, Homo sapiens
  misc_RNA (1)...(19): siRNA sense strand
guccuugccugacaaagau

SEQ ID NO: 824295 - RNA, 19 nt, Homo sapiens
  misc_RNA (1)...(19): siRNA sense strand
agggcuacaugccuuauuu

SEQ ID NO: 824296 - RNA, 19 nt, Homo sapiens
  misc_RNA (1)...(19): siRNA sense strand
acaaagauggaaagaaaug

SEQ ID NO: 824297 - RNA, 19 nt, Homo sapiens
  misc_RNA (1)...(19): siRNA sense strand
ugaacgaugguuuguacua

SEQ ID NO: 824298 - RNA, 19 nt, Homo sapiens
  misc_RNA (1)...(19): siRNA sense strand
agagagagaagaacuggaa

SEQ ID NO: 824299 - RNA, 19 nt, Homo sapiens
  misc_RNA (1)...(19): siRNA sense strand
ggauuaauucgacugauag

SEQ ID NO: 824300 - RNA, 19 nt, Homo sapiens
  misc_RNA (1)...(19): siRNA sense strand
gcggcaaggucuccaaguc

SEQ ID NO: 824301 - RNA, 19 nt, Homo sapiens
  misc_RNA (1)...(19): siRNA sense strand
ggacugaacgaugguuugu

SEQ ID NO: 824302 - RNA, 19 nt, Homo sapiens
  misc_RNA (1)...(19): siRNA sense strand
gaccugcagcuuucacuga

SEQ ID NO: 824303 - RNA, 19 nt, Homo sapiens
  misc_RNA (1)...(19): siRNA sense strand
acaaaguggcccaucauga

SEQ ID NO: 824304 - RNA, 19 nt, Homo sapiens
  misc_RNA (1)...(19): siRNA sense strand
caaccgaggcggagaagca

SEQ ID NO: 824305 - RNA, 19 nt, Homo sapiens
  misc_RNA (1)...(19): siRNA sense strand
ccaagagggcugaacuaga

SEQ ID NO: 824306 - RNA, 19 nt, Homo sapiens
  misc_RNA (1)...(19): siRNA sense strand
gaaagaacuccggaagaag

SEQ ID NO: 824307 - RNA, 19 nt, Homo sapiens
  misc_RNA (1)...(19): siRNA sense strand
ggauucaagccauucauuc

SEQ ID NO: 824308 - RNA, 19 nt, Homo sapiens
  misc_RNA (1)...(19): siRNA sense strand
gaaggaagcucgauauauu

SEQ ID NO: 824309 - RNA, 19 nt, Homo sapiens
  misc_RNA (1)...(19): siRNA sense strand
gaaaaggacuugcauauua

SEQ ID NO: 824310 - RNA, 19 nt, Homo sapiens
  misc_RNA (1)...(19): siRNA sense strand
gaaaugagauaucuacguu

SEQ ID NO: 824311 - RNA, 19 nt, Homo sapiens
  misc_RNA (1)...(19): siRNA sense strand
ggacaggucuucacauuug

SEQ ID NO: 824312 - RNA, 19 nt, Homo sapiens
  misc_RNA (1)...(19): siRNA sense strand
gaagauuugugcagaauaa

SEQ ID NO: 824313 - RNA, 19 nt, Homo sapiens
  misc_RNA (1)...(19): siRNA sense strand
ggaaguaguucuguuauuu

SEQ ID NO: 824314 - RNA, 19 nt, Homo sapiens
  misc_RNA (1)...(19): siRNA sense strand
ggaguaagcugacuaacuu

SEQ ID NO: 824315 - RNA, 19 nt, Homo sapiens
  misc_RNA (1)...(19): siRNA sense strand
ucagauaccucaguuauua

SEQ ID NO: 824316 - RNA, 19 nt, Homo sapiens
  misc_RNA (1)...(19): siRNA sense strand
ggaagagacucaagcagua

SEQ ID NO: 824317 - RNA, 19 nt, Homo sapiens
  misc_RNA (1)...(19): siRNA sense strand
gaauuuaggucuccaguga

SEQ ID NO: 824318 - RNA, 19 nt, Homo sapiens
  misc_RNA (1)...(19): siRNA sense strand
gaagauggagaaucaauua

SEQ ID NO: 824319 - RNA, 19 nt, Homo sapiens
  misc_RNA (1)...(19): siRNA sense strand
caaagaacaugcuccuaua

SEQ ID NO: 824320 - RNA, 19 nt, Homo sapiens
  misc_RNA (1)...(19): siRNA sense strand
ggaaacaucucaacaucuu

SEQ ID NO: 824321 - RNA, 19 nt, Homo sapiens
  misc_RNA (1)...(19): siRNA sense strand
gcaaagcaguagaagauuu

SEQ ID NO: 824322 - RNA, 19 nt, Homo sapiens
  misc_RNA (1)...(19): siRNA sense strand
gaagaugccuccucugaug

SEQ ID NO: 824323 - RNA, 19 nt, Homo sapiens
  misc_RNA (1)...(19): siRNA sense strand
ggaacgugcucauccuuua

SEQ ID NO: 824324 - RNA, 19 nt, Homo sapiens
  misc_RNA (1)...(19): siRNA sense strand
ggaauaaaguuaccucaau

SEQ ID NO: 824325 - RNA, 19 nt, Homo sapiens
  misc_RNA (1)...(19): siRNA sense strand
cuagagagcugugguguua

SEQ ID NO: 824326 - RNA, 19 nt, Homo sapiens
  misc_RNA (1)...(19): siRNA sense strand
agacaaaccuggaauaguu

SEQ ID NO: 824327 - RNA, 19 nt, Homo sapiens
  misc_RNA (1)...(19): siRNA sense strand
gaaaucaccguucgaagua

SEQ ID NO: 824328 - RNA, 19 nt, Homo sapiens
  misc_RNA (1)...(19): siRNA sense strand
ucagauagcugcuucaaga

SEQ ID NO: 824329 - RNA, 19 nt, Homo sapiens
  misc_RNA (1)...(19): siRNA sense strand
ggacaucucuggaauuagu

SEQ ID NO: 824330 - RNA, 19 nt, Homo sapiens
  misc_RNA (1)...(19): siRNA sense strand
ggaauaagcuggguaucuu

SEQ ID NO: 824331 - RNA, 19 nt, Homo sapiens
  misc_RNA (1)...(19): siRNA sense strand
ucuagaaggucuugaaaua

SEQ ID NO: 824332 - RNA, 19 nt, Homo sapiens
  misc_RNA (1)...(19): siRNA sense strand
aaagaaaccucaaaggauu

SEQ ID NO: 824333 - RNA, 19 nt, Homo sapiens
  misc_RNA (1)...(19): siRNA sense strand
gaaaucugcuugucgaguu

SEQ ID NO: 824334 - RNA, 19 nt, Homo sapiens
  misc_RNA (1)...(19): siRNA sense strand
gauuacgucucaaguauuu

SEQ ID NO: 824335 - RNA, 19 nt, Homo sapiens
  misc_RNA (1)...(19): siRNA sense strand
gaugggagcauauucuuua

SEQ ID NO: 824336 - RNA, 19 nt, Homo sapiens
  misc_RNA (1)...(19): siRNA sense strand
caaugucuguggaaauuua

SEQ ID NO: 824337 - RNA, 19 nt, Homo sapiens
  misc_RNA (1)...(19): siRNA sense strand
gaauaaaguuaccucaaug

SEQ ID NO: 824338 - RNA, 19 nt, Homo sapiens
  misc_RNA (1)...(19): siRNA sense strand
ccacagcucucuuucuaaa

SEQ ID NO: 824339 - RNA, 19 nt, Homo sapiens
  misc_RNA (1)...(19): siRNA sense strand
gggcaaagcucacacuugu

SEQ ID NO: 824340 - RNA, 19 nt, Homo sapiens
  misc_RNA (1)...(19): siRNA sense strand
caacagcaauggaugaaga

SEQ ID NO: 824341 - RNA, 19 nt, Homo sapiens
  misc_RNA (1)...(19): siRNA sense strand
ucaacuggcuucuguguaa

SEQ ID NO: 824342 - RNA, 19 nt, Homo sapiens
  misc_RNA (1)...(19): siRNA sense strand
ggagaacucuacauguuug

SEQ ID NO: 824343 - RNA, 19 nt, Homo sapiens
  misc_RNA (1)...(19): siRNA sense strand
gcagaaaugcccacacuuu

SEQ ID NO: 824344 - RNA, 19 nt, Homo sapiens
  misc_RNA (1)...(19): siRNA sense strand
gaacagggccucucugcuu

SEQ ID NO: 824345 - RNA, 19 nt, Homo sapiens
  misc_RNA (1)...(19): siRNA sense strand
caacugggcagaccaauuu

SEQ ID NO: 824346 - RNA, 19 nt, Homo sapiens
  misc_RNA (1)...(19): siRNA sense strand
ggagagguguggacauuug

SEQ ID NO: 824347 - RNA, 19 nt, Homo sapiens
  misc_RNA (1)...(19): siRNA sense strand
gcaaagaaaccucaaagga

SEQ ID NO: 824348 - RNA, 19 nt, Homo sapiens
  misc_RNA (1)...(19): siRNA sense strand
gaugagaagucuaugaugu

SEQ ID NO: 824349 - RNA, 19 nt, Homo sapiens
  misc_RNA (1)...(19): siRNA sense strand
gcaaggauggauuauauaa

SEQ ID NO: 824350 - RNA, 19 nt, Homo sapiens
  misc_RNA (1)...(19): siRNA sense strand
ccacaagccugaagcaaga

SEQ ID NO: 824351 - RNA, 19 nt, Homo sapiens
  misc_RNA (1)...(19): siRNA sense strand
caagauggaagaagaauuu

SEQ ID NO: 824352 - RNA, 19 nt, Homo sapiens
  misc_RNA (1)...(19): siRNA sense strand
ggaagaagaggaugaagaa

SEQ ID NO: 824353 - RNA, 19 nt, Homo sapiens
  misc_RNA (1)...(19): siRNA sense strand
ccacuucucuccaugauau

SEQ ID NO: 824354 - RNA, 19 nt, Homo sapiens
  misc_RNA (1)...(19): siRNA sense strand
gugaaucccucaucuuaaa

SEQ ID NO: 824355 - RNA, 19 nt, Homo sapiens
  misc_RNA (1)...(19): siRNA sense strand
cagauuaugugaaagauga

SEQ ID NO: 824356 - RNA, 19 nt, Homo sapiens
  misc_RNA (1)...(19): siRNA sense strand
cagcuacacuccuagauuu

SEQ ID NO: 824357 - RNA, 19 nt, Homo sapiens
  misc_RNA (1)...(19): siRNA sense strand
ugaagaacuuagaggauua

SEQ ID NO: 824358 - RNA, 19 nt, Homo sapiens
  misc_RNA (1)...(19): siRNA sense strand
gcaaaccagugaaccugua

SEQ ID NO: 824359 - RNA, 19 nt, Homo sapiens
  misc_RNA (1)...(19): siRNA sense strand
gaacuugccuuaccaacag

SEQ ID NO: 824360 - RNA, 19 nt, Homo sapiens
  misc_RNA (1)...(19): siRNA sense strand
gaaaggguuuggaguugaa

SEQ ID NO: 824361 - RNA, 19 nt, Homo sapiens
  misc_RNA (1)...(19): siRNA sense strand
gaaagauugugguauauac

SEQ ID NO: 824362 - RNA, 19 nt, Homo sapiens
  misc_RNA (1)...(19): siRNA sense strand
agaagaagcuauaaagguu

SEQ ID NO: 824363 - RNA, 19 nt, Homo sapiens
  misc_RNA (1)...(19): siRNA sense strand
gcaaaggaguuacaacagu

SEQ ID NO: 824364 - RNA, 19 nt, Homo sapiens
  misc_RNA (1)...(19): siRNA sense strand
agagaaagauacaagagua

SEQ ID NO: 824365 - RNA, 19 nt, Homo sapiens
  misc_RNA (1)...(19): siRNA sense strand
aaacacagcagaucgcuua

SEQ ID NO: 824366 - RNA, 19 nt, Homo sapiens
  misc_RNA (1)...(19): siRNA sense strand
caucuuugauccugaauaa

SEQ ID NO: 824367 - RNA, 19 nt, Homo sapiens
  misc_RNA (1)...(19): siRNA sense strand
cagcagcucugaugaagaa

SEQ ID NO: 824368 - RNA, 19 nt, Homo sapiens
  misc_RNA (1)...(19): siRNA sense strand
gaaaugauaccuuuagauc

SEQ ID NO: 824369 - RNA, 19 nt, Homo sapiens
  misc_RNA (1)...(19): siRNA sense strand
aaggaaagauugugguaua

SEQ ID NO: 824370 - RNA, 19 nt, Homo sapiens
  misc_RNA (1)...(19): siRNA sense strand
gaaacaggcccuaaggaaa

SEQ ID NO: 824371 - RNA, 19 nt, Homo sapiens
  misc_RNA (1)...(19): siRNA sense strand
gcccacagcucucuuucua

SEQ ID NO: 824372 - RNA, 19 nt, Homo sapiens
  misc_RNA (1)...(19): siRNA sense strand
gaaagucaauggaacuauc

SEQ ID NO: 824373 - RNA, 19 nt, Homo sapiens
  misc_RNA (1)...(19): siRNA sense strand
gcagauaggcauagugaaa

SEQ ID NO: 824374 - RNA, 19 nt, Homo sapiens
  misc_RNA (1)...(19): siRNA sense strand
ccacagauacucuacuaua

SEQ ID NO: 824375 - RNA, 19 nt, Homo sapiens
  misc_RNA (1)...(19): siRNA sense strand
gaucaaagagacacgauuu

SEQ ID NO: 824376 - RNA, 19 nt, Homo sapiens
  misc_RNA (1)...(19): siRNA sense strand
gcaugucgcuucugugguu

SEQ ID NO: 824377 - RNA, 19 nt, Homo sapiens
  misc_RNA (1)...(19): siRNA sense strand
gggaaaggauggacaacaa

SEQ ID NO: 824378 - RNA, 19 nt, Homo sapiens
  misc_RNA (1)...(19): siRNA sense strand
caaaggaguuacaacaguu

SEQ ID NO: 824379 - RNA, 19 nt, Homo sapiens
  misc_RNA (1)...(19): siRNA sense strand
gaauaguugugguugguuu

SEQ ID NO: 824380 - RNA, 19 nt, Homo sapiens
  misc_RNA (1)...(19): siRNA sense strand
gaugauggcuuuguuguca

SEQ ID NO: 824381 - RNA, 19 nt, Homo sapiens
  misc_RNA (1)...(19): siRNA sense strand
ucaaugaccuucuuaacug

SEQ ID NO: 824382 - RNA, 19 nt, Homo sapiens
  misc_RNA (1)...(19): siRNA sense strand
gaacaucaccaucaacugu

SEQ ID NO: 824383 - RNA, 19 nt, Homo sapiens
  misc_RNA (1)...(19): siRNA sense strand
gaaagagugugagaaagga

SEQ ID NO: 824384 - RNA, 19 nt, Homo sapiens
  misc_RNA (1)...(19): siRNA sense strand
gaagaagaccuugaaauuc

SEQ ID NO: 824385 - RNA, 19 nt, Homo sapiens
  misc_RNA (1)...(19): siRNA sense strand
gcaaacagcaaaccaguga

SEQ ID NO: 824386 - RNA, 19 nt, Homo sapiens
  misc_RNA (1)...(19): siRNA sense strand
gcaaggauuuggugugugu

SEQ ID NO: 824387 - RNA, 19 nt, Homo sapiens
  misc_RNA (1)...(19): siRNA sense strand
gauggagaaucaauuaaga

SEQ ID NO: 824388 - RNA, 19 nt, Homo sapiens
  misc_RNA (1)...(19): siRNA sense strand
ggaagaagaacuagaugaa

SEQ ID NO: 824389 - RNA, 19 nt, Homo sapiens
  misc_RNA (1)...(19): siRNA sense strand
gaugacagcagugaauuua

SEQ ID NO: 824390 - RNA, 19 nt, Homo sapiens
  misc_RNA (1)...(19): siRNA sense strand
ggacagaucccacagauac

SEQ ID NO: 824391 - RNA, 19 nt, Homo sapiens
  misc_RNA (1)...(19): siRNA sense strand
gaacguacacaacggauga

SEQ ID NO: 824392 - RNA, 19 nt, Homo sapiens
  misc_RNA (1)...(19): siRNA sense strand
agacugauguauuggcuua

SEQ ID NO: 824393 - RNA, 19 nt, Homo sapiens
  misc_RNA (1)...(19): siRNA sense strand
gaacauaugguuggaauca

SEQ ID NO: 824394 - RNA, 19 nt, Homo sapiens
  misc_RNA (1)...(19): siRNA sense strand
caacgucuuucaucacauu

SEQ ID NO: 824395 - RNA, 19 nt, Homo sapiens
  misc_RNA (1)...(19): siRNA sense strand
gaaauaucaucugcacuga

SEQ ID NO: 824396 - RNA, 19 nt, Homo sapiens
  misc_RNA (1)...(19): siRNA sense strand
ccaacaaccuacagaagaa

SEQ ID NO: 824397 - RNA, 19 nt, Homo sapiens
  misc_RNA (1)...(19): siRNA sense strand
gcagugaauuuaagagugu

SEQ ID NO: 824398 - RNA, 19 nt, Homo sapiens
  misc_RNA (1)...(19): siRNA sense strand
ccaaaggauucuacagauu

SEQ ID NO: 824399 - RNA, 19 nt, Homo sapiens
  misc_RNA (1)...(19): siRNA sense strand
gaggaaacaucucaacauc

SEQ ID NO: 824400 - RNA, 19 nt, Homo sapiens
  misc_RNA (1)...(19): siRNA sense strand
gagaacgacucaacacuag

SEQ ID NO: 824401 - RNA, 19 nt, Homo sapiens
  misc_RNA (1)...(19): siRNA sense strand
cuucaggaaugucauaaua

SEQ ID NO: 824402 - RNA, 19 nt, Homo sapiens
  misc_RNA (1)...(19): siRNA sense strand
ggaaaggguuuggaguuga

SEQ ID NO: 824403 - RNA, 19 nt, Homo sapiens
  misc_RNA (1)...(19): siRNA sense strand
gcaagacgccgaugacaug

SEQ ID NO: 824404 - RNA, 19 nt, Homo sapiens
  misc_RNA (1)...(19): siRNA sense strand
ggaugacaaucgaauuuga

SEQ ID NO: 824405 - RNA, 19 nt, Homo sapiens
  misc_RNA (1)...(19): siRNA sense strand
ccuaaucagucgacagaua

SEQ ID NO: 824406 - RNA, 19 nt, Homo sapiens
  misc_RNA (1)...(19): siRNA sense strand
caagguggcuguagaaguc

SEQ ID NO: 824407 - RNA, 19 nt, Homo sapiens
  misc_RNA (1)...(19): siRNA sense strand
guucaagaguucaaagaaa

SEQ ID NO: 824408 - RNA, 19 nt, Homo sapiens
  misc_RNA (1)...(19): siRNA sense strand
ggaaacagcugcuuaagua

SEQ ID NO: 824409 - RNA, 19 nt, Homo sapiens
  misc_RNA (1)...(19): siRNA sense strand
gaacauagcucgcaucaau

SEQ ID NO: 824410 - RNA, 19 nt, Homo sapiens
  misc_RNA (1)...(19): siRNA sense strand
gaacaagucuccuuauuuc

SEQ ID NO: 824411 - RNA, 19 nt, Homo sapiens
  misc_RNA (1)...(19): siRNA sense strand
ugacaaagcuuaugcauau

SEQ ID NO: 824412 - RNA, 19 nt, Homo sapiens
  misc_RNA (1)...(19): siRNA sense strand
gaaguucgauucacuaaug

SEQ ID NO: 824413 - RNA, 19 nt, Homo sapiens
  misc_RNA (1)...(19): siRNA sense strand
ggaaagacauggugaagau

SEQ ID NO: 824414 - RNA, 19 nt, Homo sapiens
  misc_RNA (1)...(19): siRNA sense strand
gagaggacaucuacacuuu

SEQ ID NO: 824415 - RNA, 19 nt, Homo sapiens
  misc_RNA (1)...(19): siRNA sense strand
gaagaagagucaucugcua

SEQ ID NO: 824416 - RNA, 19 nt, Homo sapiens
  misc_RNA (1)...(19): siRNA sense strand
gugcugagcuccagguuua

SEQ ID NO: 824417 - RNA, 19 nt, Homo sapiens
  misc_RNA (1)...(19): siRNA sense strand
gaagauggaucccagauag

SEQ ID NO: 824418 - RNA, 19 nt, Homo sapiens
  misc_RNA (1)...(19): siRNA sense strand
gaagaagaguguggcauuu

SEQ ID NO: 824419 - RNA, 19 nt, Homo sapiens
  misc_RNA (1)...(19): siRNA sense strand
gagaauucaugaucacuuu

SEQ ID NO: 824420 - RNA, 19 nt, Homo sapiens
  misc_RNA (1)...(19): siRNA sense strand
ggaacaagucuccuuauuu

SEQ ID NO: 824421 - RNA, 19 nt, Homo sapiens
  misc_RNA (1)...(19): siRNA sense strand
gaugauggcuccuuuagca

SEQ ID NO: 824422 - RNA, 19 nt, Homo sapiens
  misc_RNA (1)...(19): siRNA sense strand
caaaggugauuccuccuaa

SEQ ID NO: 824423 - RNA, 19 nt, Homo sapiens
  misc_RNA (1)...(19): siRNA sense strand
gauaucagcuuuggaaaca

SEQ ID NO: 824424 - RNA, 19 nt, Homo sapiens
  misc_RNA (1)...(19): siRNA sense strand
gaaaggauauauacaccau

SEQ ID NO: 824425 - RNA, 19 nt, Homo sapiens
  misc_RNA (1)...(19): siRNA sense strand
acaaauaccuugcauacau

SEQ ID NO: 824426 - RNA, 19 nt, Homo sapiens
  misc_RNA (1)...(19): siRNA sense strand
cacuuuagaugaagaguua

SEQ ID NO: 824427 - RNA, 19 nt, Homo sapiens
  misc_RNA (1)...(19): siRNA sense strand
ccaagggugugaugcauuu

SEQ ID NO: 824428 - RNA, 19 nt, Homo sapiens
  misc_RNA (1)...(19): siRNA sense strand
gagcagaauuuaucagauc

SEQ ID NO: 824429 - RNA, 19 nt, Homo sapiens
  misc_RNA (1)...(19): siRNA sense strand
gaucaaauauugcccacau

SEQ ID NO: 824430 - RNA, 19 nt, Homo sapiens
  misc_RNA (1)...(19): siRNA sense strand
guaaugguguguuaacaga

SEQ ID NO: 824431 - RNA, 19 nt, Homo sapiens
  misc_RNA (1)...(19): siRNA sense strand
caugaucacuuucccauau

SEQ ID NO: 824432 - RNA, 19 nt, Homo sapiens
  misc_RNA (1)...(19): siRNA sense strand
gaaaggacacaaauagaug

SEQ ID NO: 824433 - RNA, 19 nt, Homo sapiens
  misc_RNA (1)...(19): siRNA sense strand
ccagacagauaucagcuuu

SEQ ID NO: 824434 - RNA, 19 nt, Homo sapiens
  misc_RNA (1)...(19): siRNA sense strand
cagaagaagugccagaaga

SEQ ID NO: 824435 - RNA, 19 nt, Homo sapiens
  misc_RNA (1)...(19): siRNA sense strand
gaugaagaguuacccaaga

SEQ ID NO: 824436 - RNA, 19 nt, Homo sapiens
  misc_RNA (1)...(19): siRNA sense strand
gccaagugaugaagaauug

SEQ ID NO: 824437 - RNA, 19 nt, Homo sapiens
  misc_RNA (1)...(19): siRNA sense strand
ccagagauguguuuuauuu

SEQ ID NO: 824438 - RNA, 19 nt, Homo sapiens
  misc_RNA (1)...(19): siRNA sense strand
ccagcaagaucuccgauga

SEQ ID NO: 824439 - RNA, 19 nt, Homo sapiens
  misc_RNA (1)...(19): siRNA sense strand
caaauaccuugcauacaug

SEQ ID NO: 824440 - RNA, 19 nt, Homo sapiens
  misc_RNA (1)...(19): siRNA sense strand
gaggacaucuacacuuuag

SEQ ID NO: 824441 - RNA, 19 nt, Homo sapiens
  misc_RNA (1)...(19): siRNA sense strand
gaagagagaggacaucuac

SEQ ID NO: 824442 - RNA, 19 nt, Homo sapiens
  misc_RNA (1)...(19): siRNA sense strand
cagcugagcaagaguauaa

SEQ ID NO: 824443 - RNA, 19 nt, Homo sapiens
  misc_RNA (1)...(19): siRNA sense strand
agagaguaaugguguguua

SEQ ID NO: 824444 - RNA, 19 nt, Homo sapiens
  misc_RNA (1)...(19): siRNA sense strand
gaaacaaggaaaggauaua

SEQ ID NO: 824445 - RNA, 19 nt, Homo sapiens
  misc_RNA (1)...(19): siRNA sense strand
gugcagaaucuacaaauuu

SEQ ID NO: 824446 - RNA, 19 nt, Homo sapiens
  misc_RNA (1)...(19): siRNA sense strand
gcuccagguuuaagaauga

SEQ ID NO: 824447 - RNA, 19 nt, Homo sapiens
  misc_RNA (1)...(19): siRNA sense strand
agagagaaauagcuucaaa

SEQ ID NO: 824448 - RNA, 19 nt, Homo sapiens
  misc_RNA (1)...(19): siRNA sense strand
gcaagaguauaaugcaaca

SEQ ID NO: 824449 - RNA, 19 nt, Homo sapiens
  misc_RNA (1)...(19): siRNA sense strand
gagcaagaguauaaugcaa

SEQ ID NO: 824450 - RNA, 19 nt, Homo sapiens
  misc_RNA (1)...(19): siRNA sense strand
caacaaauaccuugcauac

SEQ ID NO: 824451 - RNA, 19 nt, Homo sapiens
  misc_RNA (1)...(19): siRNA sense strand
uugcauacauggagucuaa

SEQ ID NO: 824452 - RNA, 19 nt, Homo sapiens
  misc_RNA (1)...(19): siRNA sense strand
ucagauggauugacuaugg

SEQ ID NO: 824453 - RNA, 19 nt, Homo sapiens
  misc_RNA (1)...(19): siRNA sense strand
uuaauuaucuccacuuugg

SEQ ID NO: 824454 - RNA, 19 nt, Homo sapiens
  misc_RNA (1)...(19): siRNA sense strand
gcuaugaugacauugauaa

SEQ ID NO: 824455 - RNA, 19 nt, Homo sapiens
  misc_RNA (1)...(19): siRNA sense strand
ggaugcagguggagcagaa

SEQ ID NO: 824456 - RNA, 19 nt, Homo sapiens
  misc_RNA (1)...(19): siRNA sense strand
ccaagacagugcuaugaug

SEQ ID NO: 824457 - RNA, 19 nt, Homo sapiens
  misc_RNA (1)...(19): siRNA sense strand
gauggaacaagucuccuua

SEQ ID NO: 824458 - RNA, 19 nt, Homo sapiens
  misc_RNA (1)...(19): siRNA sense strand
caaagucaccugagucaug

SEQ ID NO: 824459 - RNA, 19 nt, Homo sapiens
  misc_RNA (1)...(19): siRNA sense strand
gcaaaggugauuccuccua

SEQ ID NO: 824460 - RNA, 19 nt, Homo sapiens
  misc_RNA (1)...(19): siRNA sense strand
caugcaaguuguuauggua

SEQ ID NO: 824461 - RNA, 19 nt, Homo sapiens
  misc_RNA (1)...(19): siRNA sense strand
gaaagacuagcucaagguu

SEQ ID NO: 824462 - RNA, 19 nt, Homo sapiens
  misc_RNA (1)...(19): siRNA sense strand
gaagacauggaccucuaua

SEQ ID NO: 824463 - RNA, 19 nt, Homo sapiens
  misc_RNA (1)...(19): siRNA sense strand
gguauucccuuugacaaga

SEQ ID NO: 824464 - RNA, 19 nt, Homo sapiens
  misc_RNA (1)...(19): siRNA sense strand
ggagagaaagagacaaaga

SEQ ID NO: 824465 - RNA, 19 nt, Homo sapiens
  misc_RNA (1)...(19): siRNA sense strand
gcagguggagcagaauuua

SEQ ID NO: 824466 - RNA, 19 nt, Homo sapiens
  misc_RNA (1)...(19): siRNA sense strand
aagaggaagugucagauga

SEQ ID NO: 824467 - RNA, 19 nt, Homo sapiens
  misc_RNA (1)...(19): siRNA sense strand
uagcaggccuccagcaaga

SEQ ID NO: 824468 - RNA, 19 nt, Homo sapiens
  misc_RNA (1)...(19): siRNA sense strand
gcuguaagauaaugaccuu

SEQ ID NO: 824469 - RNA, 19 nt, Homo sapiens
  misc_RNA (1)...(19): siRNA sense strand
gaucccagauagcaaugaa

SEQ ID NO: 824470 - RNA, 19 nt, Homo sapiens
  misc_RNA (1)...(19): siRNA sense strand
ccagaaaggacacaaauag

SEQ ID NO: 824471 - RNA, 19 nt, Homo sapiens
  misc_RNA (1)...(19): siRNA sense strand
caaauauuguacuccaaga

SEQ ID NO: 824472 - RNA, 19 nt, Homo sapiens
  misc_RNA (1)...(19): siRNA sense strand
ugacaucgcagaccuucua

SEQ ID NO: 824473 - RNA, 19 nt, Homo sapiens
  misc_RNA (1)...(19): siRNA sense strand
ucacuaaugucccagaaag

SEQ ID NO: 824474 - RNA, 19 nt, Homo sapiens
  misc_RNA (1)...(19): siRNA sense strand
gaagaggaagugucagaug

SEQ ID NO: 824475 - RNA, 19 nt, Homo sapiens
  misc_RNA (1)...(19): siRNA sense strand
ggaccucuauagcauuaau

SEQ ID NO: 824476 - RNA, 19 nt, Homo sapiens
  misc_RNA (1)...(19): siRNA sense strand
ucaauacagucuuggaugu

SEQ ID NO: 824477 - RNA, 19 nt, Homo sapiens
  misc_RNA (1)...(19): siRNA sense strand
gaguguggcauuucuauug

SEQ ID NO: 824478 - RNA, 19 nt, Homo sapiens
  misc_RNA (1)...(19): siRNA sense strand
ggagaagucguccaaguca

SEQ ID NO: 824479 - RNA, 19 nt, Homo sapiens
  misc_RNA (1)...(19): siRNA sense strand
gaacauuacaugcuuucga

SEQ ID NO: 824480 - RNA, 19 nt, Homo sapiens
  misc_RNA (1)...(19): siRNA sense strand
gauggagccugaugauugg

SEQ ID NO: 824481 - RNA, 19 nt, Homo sapiens
  misc_RNA (1)...(19): siRNA sense strand
ugaagaggauggaacaagu

SEQ ID NO: 824482 - RNA, 19 nt, Homo sapiens
  misc_RNA (1)...(19): siRNA sense strand
caaagcuuaugcauauaga

SEQ ID NO: 824483 - RNA, 19 nt, Homo sapiens
  misc_RNA (1)...(19): siRNA sense strand
gacaaagcuuaugcauaua

SEQ ID NO: 824484 - RNA, 19 nt, Homo sapiens
  misc_RNA (1)...(19): siRNA sense strand
cagaggaggaggaaaguaa

SEQ ID NO: 824485 - RNA, 19 nt, Homo sapiens
  misc_RNA (1)...(19): siRNA sense strand
ggaaacaaggaaaggauau

SEQ ID NO: 824486 - RNA, 19 nt, Homo sapiens
  misc_RNA (1)...(19): siRNA sense strand
ccgaagacauggaccucua

SEQ ID NO: 824487 - RNA, 19 nt, Homo sapiens
  misc_RNA (1)...(19): siRNA sense strand
caucgcagaccuucuauga

SEQ ID NO: 824488 - RNA, 19 nt, Homo sapiens
  misc_RNA (1)...(19): siRNA sense strand
gucaaacggucaucacgaa

SEQ ID NO: 824489 - RNA, 19 nt, Homo sapiens
  misc_RNA (1)...(19): siRNA sense strand
uggaacaagucuccuuauu

SEQ ID NO: 824490 - RNA, 19 nt, Homo sapiens
  misc_RNA (1)...(19): siRNA sense strand
gaucuccgaugacucuugu

SEQ ID NO: 824491 - RNA, 19 nt, Homo sapiens
  misc_RNA (1)...(19): siRNA sense strand
gagcgcaaguacuggaaga

SEQ ID NO: 824492 - RNA, 19 nt, Homo sapiens
  misc_RNA (1)...(19): siRNA sense strand
gagagugaaagcucgauuu

SEQ ID NO: 824493 - RNA, 19 nt, Homo sapiens
  misc_RNA (1)...(19): siRNA sense strand
uccgggaguucaacaaaua

SEQ ID NO: 824494 - RNA, 19 nt, Homo sapiens
  misc_RNA (1)...(19): siRNA sense strand
caaauauugcccacaugua

SEQ ID NO: 824495 - RNA, 19 nt, Homo sapiens
  misc_RNA (1)...(19): siRNA sense strand
ugauggagccugaugauug

SEQ ID NO: 824496 - RNA, 19 nt, Homo sapiens
  misc_RNA (1)...(19): siRNA sense strand
ggagcagaauuuaucagau

SEQ ID NO: 824497 - RNA, 19 nt, Homo sapiens
  misc_RNA (1)...(19): siRNA sense strand
aaggauauauacaccauug

SEQ ID NO: 824498 - RNA, 19 nt, Homo sapiens
  misc_RNA (1)...(19): siRNA sense strand
cacaagaugacauugauuu

SEQ ID NO: 824499 - RNA, 19 nt, Homo sapiens
  misc_RNA (1)...(19): siRNA sense strand
caagacagugcuaugauga

SEQ ID NO: 824500 - RNA, 19 nt, Homo sapiens
  misc_RNA (1)...(19): siRNA sense strand
ccagauagcagcaaugaag

SEQ ID NO: 824501 - RNA, 19 nt, Homo sapiens
  misc_RNA (1)...(19): siRNA sense strand
ggaagugucagaugaaguc

SEQ ID NO: 824502 - RNA, 19 nt, Homo sapiens
  misc_RNA (1)...(19): siRNA sense strand
gaagaagugccagaagaga

SEQ ID NO: 824503 - RNA, 19 nt, Homo sapiens
  misc_RNA (1)...(19): siRNA sense strand
acagugcuaugaugacauu

SEQ ID NO: 824504 - RNA, 19 nt, Homo sapiens
  misc_RNA (1)...(19): siRNA sense strand
ggugaacauuacaugcuuu

SEQ ID NO: 824505 - RNA, 19 nt, Homo sapiens
  misc_RNA (1)...(19): siRNA sense strand
guuaugguauuccuucuca

SEQ ID NO: 824506 - RNA, 19 nt, Homo sapiens
  misc_RNA (1)...(19): siRNA sense strand
gcaaguuguuaugguauuc

SEQ ID NO: 824507 - RNA, 19 nt, Homo sapiens
  misc_RNA (1)...(19): siRNA sense strand
ggagagagaaauagcuuca

SEQ ID NO: 824508 - RNA, 19 nt, Homo sapiens
  misc_RNA (1)...(19): siRNA sense strand
gugaugagcugauucgaua

SEQ ID NO: 824509 - RNA, 19 nt, Homo sapiens
  misc_RNA (1)...(19): siRNA sense strand
gcucagauguccagaauga

SEQ ID NO: 824510 - RNA, 19 nt, Homo sapiens
  misc_RNA (1)...(19): siRNA sense strand
gaacaacuaccacaguaua

SEQ ID NO: 824511 - RNA, 19 nt, Homo sapiens
  misc_RNA (1)...(19): siRNA sense strand
cagaaugacugaagaauug

SEQ ID NO: 824512 - RNA, 19 nt, Homo sapiens
  misc_RNA (1)...(19): siRNA sense strand
ggaacucgcugcucgaauu

SEQ ID NO: 824513 - RNA, 19 nt, Homo sapiens
  misc_RNA (1)...(19): siRNA sense strand
ugaggaaucuucucucuuu

SEQ ID NO: 824514 - RNA, 19 nt, Homo sapiens
  misc_RNA (1)...(19): siRNA sense strand
gaagaaaaccucaugaaua

SEQ ID NO: 824515 - RNA, 19 nt, Homo sapiens
  misc_RNA (1)...(19): siRNA sense strand
caagaaagaugaguuacuu

SEQ ID NO: 824516 - RNA, 19 nt, Homo sapiens
  misc_RNA (1)...(19): siRNA sense strand
gaccaggugucauuacuaa

SEQ ID NO: 824517 - RNA, 19 nt, Homo sapiens
  misc_RNA (1)...(19): siRNA sense strand
ggaaccauaucuuaucuga

SEQ ID NO: 824518 - RNA, 19 nt, Homo sapiens
  misc_RNA (1)...(19): siRNA sense strand
ggaaucuucucucuuuaaa

SEQ ID NO: 824519 - RNA, 19 nt, Homo sapiens
  misc_RNA (1)...(19): siRNA sense strand
gaagagacuuuccguuaca

SEQ ID NO: 824520 - RNA, 19 nt, Homo sapiens
  misc_RNA (1)...(19): siRNA sense strand
cagaaacuguuaccuauga

SEQ ID NO: 824521 - RNA, 19 nt, Homo sapiens
  misc_RNA (1)...(19): siRNA sense strand
ucaaggaacuggaagaaga

SEQ ID NO: 824522 - RNA, 19 nt, Homo sapiens
  misc_RNA (1)...(19): siRNA sense strand
caauggagcugcacgaguu

SEQ ID NO: 824523 - RNA, 19 nt, Homo sapiens
  misc_RNA (1)...(19): siRNA sense strand
gaaauaaaggaacuucgua

SEQ ID NO: 824524 - RNA, 19 nt, Homo sapiens
  misc_RNA (1)...(19): siRNA sense strand
ggagauguauggcuugaga

SEQ ID NO: 824525 - RNA, 19 nt, Homo sapiens
  misc_RNA (1)...(19): siRNA sense strand
gaagagugaugagcugauu

SEQ ID NO: 824526 - RNA, 19 nt, Homo sapiens
  misc_RNA (1)...(19): siRNA sense strand
ggaaguagcgguagcaguu

SEQ ID NO: 824527 - RNA, 19 nt, Homo sapiens
  misc_RNA (1)...(19): siRNA sense strand
uuaaucagcugcagcauga

SEQ ID NO: 824528 - RNA, 19 nt, Homo sapiens
  misc_RNA (1)...(19): siRNA sense strand
gcaaacagaggacaaauca

SEQ ID NO: 824529 - RNA, 19 nt, Homo sapiens
  misc_RNA (1)...(19): siRNA sense strand
gaagaaagugaaacugauu

SEQ ID NO: 824530 - RNA, 19 nt, Homo sapiens
  misc_RNA (1)...(19): siRNA sense strand
uaaaggaacuucguaguag

SEQ ID NO: 824531 - RNA, 19 nt, Homo sapiens
  misc_RNA (1)...(19): siRNA sense strand
ggacaagccuuugaucaag

SEQ ID NO: 824532 - RNA, 19 nt, Homo sapiens
  misc_RNA (1)...(19): siRNA sense strand
uaaagaacuucgugaaaca

SEQ ID NO: 824533 - RNA, 19 nt, Homo sapiens
  misc_RNA (1)...(19): siRNA sense strand
ugaaacaaaugcucagaug

SEQ ID NO: 824534 - RNA, 19 nt, Homo sapiens
  misc_RNA (1)...(19): siRNA sense strand
ggacuaaggaggaaucaga

SEQ ID NO: 824535 - RNA, 19 nt, Homo sapiens
  misc_RNA (1)...(19): siRNA sense strand
gaggaaucuucucucuuua

SEQ ID NO: 824536 - RNA, 19 nt, Homo sapiens
  misc_RNA (1)...(19): siRNA sense strand
caaugaguccuuuagcuua

SEQ ID NO: 824537 - RNA, 19 nt, Homo sapiens
  misc_RNA (1)...(19): siRNA sense strand
aaagaugaguuacuucgaa

SEQ ID NO: 824538 - RNA, 19 nt, Homo sapiens
  misc_RNA (1)...(19): siRNA sense strand
gaucacaaacucuguauca

SEQ ID NO: 824539 - RNA, 19 nt, Homo sapiens
  misc_RNA (1)...(19): siRNA sense strand
caccaccuguagaauauua

SEQ ID NO: 824540 - RNA, 19 nt, Homo sapiens
  misc_RNA (1)...(19): siRNA sense strand
aagaacaacuaccacagua

SEQ ID NO: 824541 - RNA, 19 nt, Homo sapiens
  misc_RNA (1)...(19): siRNA sense strand
gcaauugggacaagccuuu

SEQ ID NO: 824542 - RNA, 19 nt, Homo sapiens
  misc_RNA (1)...(19): siRNA sense strand
aaauucagguagcaguuua

SEQ ID NO: 824543 - RNA, 19 nt, Homo sapiens
  misc_RNA (1)...(19): siRNA sense strand
gacacucucuuucuauaug

SEQ ID NO: 824544 - RNA, 19 nt, Homo sapiens
  misc_RNA (1)...(19): siRNA sense strand
gaagaauugucagggaaga

SEQ ID NO: 824545 - RNA, 19 nt, Homo sapiens
  misc_RNA (1)...(19): siRNA sense strand
cugaagagacuuuccguua

SEQ ID NO: 824546 - RNA, 19 nt, Homo sapiens
  misc_RNA (1)...(19): siRNA sense strand
gcucuggguucccuucauu

SEQ ID NO: 824547 - RNA, 19 nt, Homo sapiens
  misc_RNA (1)...(19): siRNA sense strand
ccaggacccucaggagaua

SEQ ID NO: 824548 - RNA, 19 nt, Homo sapiens
  misc_RNA (1)...(19): siRNA sense strand
cagaagcggguauuugaua

SEQ ID NO: 824549 - RNA, 19 nt, Homo sapiens
  misc_RNA (1)...(19): siRNA sense strand
cagcgacuguguuaaagaa

SEQ ID NO: 824550 - RNA, 19 nt, Homo sapiens
  misc_RNA (1)...(19): siRNA sense strand
gaaacugauuccagcuguu

SEQ ID NO: 824551 - RNA, 19 nt, Homo sapiens
  misc_RNA (1)...(19): siRNA sense strand
gaauauggagugucuagga

SEQ ID NO: 824552 - RNA, 19 nt, Homo sapiens
  misc_RNA (1)...(19): siRNA sense strand
gcagaaauugguccucaaa

SEQ ID NO: 824553 - RNA, 19 nt, Homo sapiens
  misc_RNA (1)...(19): siRNA sense strand
gagcuuggccaaacuucua

SEQ ID NO: 824554 - RNA, 19 nt, Homo sapiens
  misc_RNA (1)...(19): siRNA sense strand
caacacggcugugaauucu

SEQ ID NO: 824555 - RNA, 19 nt, Homo sapiens
  misc_RNA (1)...(19): siRNA sense strand
ggacaaaucacuccugaac

SEQ ID NO: 824556 - RNA, 19 nt, Homo sapiens
  misc_RNA (1)...(19): siRNA sense strand
caacagaagcggguauuug

SEQ ID NO: 824557 - RNA, 19 nt, Homo sapiens
  misc_RNA (1)...(19): siRNA sense strand
gaacuucgugaaacaaaug

SEQ ID NO: 824558 - RNA, 19 nt, Homo sapiens
  misc_RNA (1)...(19): siRNA sense strand
gaauauuacaucccucuga

SEQ ID NO: 824559 - RNA, 19 nt, Homo sapiens
  misc_RNA (1)...(19): siRNA sense strand
gaagaggaggguauuacuu

SEQ ID NO: 824560 - RNA, 19 nt, Homo sapiens
  misc_RNA (1)...(19): siRNA sense strand
cgacaaaacuauuuaagug

SEQ ID NO: 824561 - RNA, 19 nt, Homo sapiens
  misc_RNA (1)...(19): siRNA sense strand
gaagaacaacuaccacagu

SEQ ID NO: 824562 - RNA, 19 nt, Homo sapiens
  misc_RNA (1)...(19): siRNA sense strand
gaccuucagcauaaacuua

SEQ ID NO: 824563 - RNA, 19 nt, Homo sapiens
  misc_RNA (1)...(19): siRNA sense strand
ucagcaaccucuugaagug

SEQ ID NO: 824564 - RNA, 19 nt, Homo sapiens
  misc_RNA (1)...(19): siRNA sense strand
gaugaggaaucuucucucu

SEQ ID NO: 824565 - RNA, 19 nt, Homo sapiens
  misc_RNA (1)...(19): siRNA sense strand
ugaagaaagugaaacugau

SEQ ID NO: 824566 - RNA, 19 nt, Homo sapiens
  misc_RNA (1)...(19): siRNA sense strand
aagaacaugugauugagaa

SEQ ID NO: 824567 - RNA, 19 nt, Homo sapiens
  misc_RNA (1)...(19): siRNA sense strand
uuguagaccuucagcauaa

SEQ ID NO: 824568 - RNA, 19 nt, Homo sapiens
  misc_RNA (1)...(19): siRNA sense strand
gaacuggaagaagagaaua

SEQ ID NO: 824569 - RNA, 19 nt, Homo sapiens
  misc_RNA (1)...(19): siRNA sense strand
uggacaagcucucuuaaag

SEQ ID NO: 824570 - RNA, 19 nt, Homo sapiens
  misc_RNA (1)...(19): siRNA sense strand
acaaaucacuccugaacca

SEQ ID NO: 824571 - RNA, 19 nt, Homo sapiens
  misc_RNA (1)...(19): siRNA sense strand
cgaaucgucuccauugcuu

SEQ ID NO: 824572 - RNA, 19 nt, Homo sapiens
  misc_RNA (1)...(19): siRNA sense strand
ccaguugccuucgagguuu

SEQ ID NO: 824573 - RNA, 19 nt, Homo sapiens
  misc_RNA (1)...(19): siRNA sense strand
caaugaggaucucccugaa

SEQ ID NO: 824574 - RNA, 19 nt, Homo sapiens
  misc_RNA (1)...(19): siRNA sense strand
ucagagucuuccagucaua

SEQ ID NO: 824575 - RNA, 19 nt, Homo sapiens
  misc_RNA (1)...(19): siRNA sense strand
gggacaagccuuugaucaa

SEQ ID NO: 824576 - RNA, 19 nt, Homo sapiens
  misc_RNA (1)...(19): siRNA sense strand
cgacgagauuccacuacaa

SEQ ID NO: 824577 - RNA, 19 nt, Homo sapiens
  misc_RNA (1)...(19): siRNA sense strand
caaacucaacauucacuuu

SEQ ID NO: 824578 - RNA, 19 nt, Homo sapiens
  misc_RNA (1)...(19): siRNA sense strand
auaaaggaacuucguagua

SEQ ID NO: 824579 - RNA, 19 nt, Homo sapiens
  misc_RNA (1)...(19): siRNA sense strand
ccaagaagaaauaaaggaa

SEQ ID NO: 824580 - RNA, 19 nt, Homo sapiens
  misc_RNA (1)...(19): siRNA sense strand
guuaaagaacuucgugaaa

SEQ ID NO: 824581 - RNA, 19 nt, Homo sapiens
  misc_RNA (1)...(19): siRNA sense strand
ugaagagacuuuccguuac

SEQ ID NO: 824582 - RNA, 19 nt, Homo sapiens
  misc_RNA (1)...(19): siRNA sense strand
uggccaaacuucuacaaga

SEQ ID NO: 824583 - RNA, 19 nt, Homo sapiens
  misc_RNA (1)...(19): siRNA sense strand
cuacuucucccaaucauau

SEQ ID NO: 824584 - RNA, 19 nt, Homo sapiens
  misc_RNA (1)...(19): siRNA sense strand
ccugcaagcuuccaaagau

SEQ ID NO: 824585 - RNA, 19 nt, Homo sapiens
  misc_RNA (1)...(19): siRNA sense strand
ccagaaugacugaagaauu

SEQ ID NO: 824586 - RNA, 19 nt, Homo sapiens
  misc_RNA (1)...(19): siRNA sense strand
gaaacaaaugcucagaugu

SEQ ID NO: 824587 - RNA, 19 nt, Homo sapiens
  misc_RNA (1)...(19): siRNA sense strand
gacuuuccguuacaugauu

SEQ ID NO: 824588 - RNA, 19 nt, Homo sapiens
  misc_RNA (1)...(19): siRNA sense strand
ucagguagcaguuuauuag

SEQ ID NO: 824589 - RNA, 19 nt, Homo sapiens
  misc_RNA (1)...(19): siRNA sense strand
gauguuggccaguugaaga

SEQ ID NO: 824590 - RNA, 19 nt, Homo sapiens
  misc_RNA (1)...(19): siRNA sense strand
gcaucucucugaaaauuuu

SEQ ID NO: 824591 - RNA, 19 nt, Homo sapiens
  misc_RNA (1)...(19): siRNA sense strand
gguagcaguucauccaaca

SEQ ID NO: 824592 - RNA, 19 nt, Homo sapiens
  misc_RNA (1)...(19): siRNA sense strand
uuacaucccucugacauca

SEQ ID NO: 824593 - RNA, 19 nt, Homo sapiens
  misc_RNA (1)...(19): siRNA sense strand
gaagaauggcagcggaaga

SEQ ID NO: 824594 - RNA, 19 nt, Homo sapiens
  misc_RNA (1)...(19): siRNA sense strand
uaaagaacaugugauugag

SEQ ID NO: 824595 - RNA, 19 nt, Homo sapiens
  misc_RNA (1)...(19): siRNA sense strand
uuaaagaacuucgugaaac

SEQ ID NO: 824596 - RNA, 19 nt, Homo sapiens
  misc_RNA (1)...(19): siRNA sense strand
gagaauauggcucuucgau

SEQ ID NO: 824597 - RNA, 19 nt, Homo sapiens
  misc_RNA (1)...(19): siRNA sense strand
aaagcggaaccauaucuua

SEQ ID NO: 824598 - RNA, 19 nt, Homo sapiens
  misc_RNA (1)...(19): siRNA sense strand
aagaggaggguauuacuuu

SEQ ID NO: 824599 - RNA, 19 nt, Homo sapiens
  misc_RNA (1)...(19): siRNA sense strand
aaaggaacuucguaguaga

SEQ ID NO: 824600 - RNA, 19 nt, Homo sapiens
  misc_RNA (1)...(19): siRNA sense strand
aagaaaaccucaugaauag

SEQ ID NO: 824601 - RNA, 19 nt, Homo sapiens
  misc_RNA (1)...(19): siRNA sense strand
gaacucgcugcucgaauug

SEQ ID NO: 824602 - RNA, 19 nt, Homo sapiens
  misc_RNA (1)...(19): siRNA sense strand
gaugaagaggaggguauua

SEQ ID NO: 824603 - RNA, 19 nt, Homo sapiens
  misc_RNA (1)...(19): siRNA sense strand
ugaaucccaagaagaaaua

SEQ ID NO: 824604 - RNA, 19 nt, Homo sapiens
  misc_RNA (1)...(19): siRNA sense strand
gaggaucucccugaaguug

SEQ ID NO: 824605 - RNA, 19 nt, Homo sapiens
  misc_RNA (1)...(19): siRNA sense strand
gacaagccuuugaucaagu

SEQ ID NO: 824606 - RNA, 19 nt, Homo sapiens
  misc_RNA (1)...(19): siRNA sense strand
ggccaaacuucuacaagag

SEQ ID NO: 824607 - RNA, 19 nt, Homo sapiens
  misc_RNA (1)...(19): siRNA sense strand
ccggaacccuccugauguu

SEQ ID NO: 824608 - RNA, 19 nt, Homo sapiens
  misc_RNA (1)...(19): siRNA sense strand
ggaaagagaaagaugauua

SEQ ID NO: 824609 - RNA, 19 nt, Homo sapiens
  misc_RNA (1)...(19): siRNA sense strand
gaucaaagcucuggcgaaa

SEQ ID NO: 824610 - RNA, 19 nt, Homo sapiens
  misc_RNA (1)...(19): siRNA sense strand
gaagauggcuaacauggau

SEQ ID NO: 824611 - RNA, 19 nt, Homo sapiens
  misc_RNA (1)...(19): siRNA sense strand
gaauucagcuugccgagaa

SEQ ID NO: 824612 - RNA, 19 nt, Homo sapiens
  misc_RNA (1)...(19): siRNA sense strand
gaggagaacugacccagaa

SEQ ID NO: 824613 - RNA, 19 nt, Homo sapiens
  misc_RNA (1)...(19): siRNA sense strand
caagggagaccaugaauuu

SEQ ID NO: 824614 - RNA, 19 nt, Homo sapiens
  misc_RNA (1)...(19): siRNA sense strand
cgaggagucuucuuucuaa

SEQ ID NO: 824615 - RNA, 19 nt, Homo sapiens
  misc_RNA (1)...(19): siRNA sense strand
gaaccucccuccucuguca

SEQ ID NO: 824616 - RNA, 19 nt, Homo sapiens
  misc_RNA (1)...(19): siRNA sense strand
ccacacugcucaccucuaa

SEQ ID NO: 824617 - RNA, 19 nt, Homo sapiens
  misc_RNA (1)...(19): siRNA sense strand
gaagagauggagaagauuu

SEQ ID NO: 824618 - RNA, 19 nt, Homo sapiens
  misc_RNA (1)...(19): siRNA sense strand
gaagauccgcccuguguuu

SEQ ID NO: 824619 - RNA, 19 nt, Homo sapiens
  misc_RNA (1)...(19): siRNA sense strand
ggaagccacuggugaagga

SEQ ID NO: 824620 - RNA, 19 nt, Homo sapiens
  misc_RNA (1)...(19): siRNA sense strand
ggaggccacuucaucugua

SEQ ID NO: 824621 - RNA, 19 nt, Homo sapiens
  misc_RNA (1)...(19): siRNA sense strand
uagaugauguucgggauua

SEQ ID NO: 824622 - RNA, 19 nt, Homo sapiens
  misc_RNA (1)...(19): siRNA sense strand
gaacgaguuugucucuuca

SEQ ID NO: 824623 - RNA, 19 nt, Homo sapiens
  misc_RNA (1)...(19): siRNA sense strand
caacacagcucugacucuu

SEQ ID NO: 824624 - RNA, 19 nt, Homo sapiens
  misc_RNA (1)...(19): siRNA sense strand
cgaagaggcuugggucuga

SEQ ID NO: 824625 - RNA, 19 nt, Homo sapiens
  misc_RNA (1)...(19): siRNA sense strand
gaucgcauguucacaaauc

SEQ ID NO: 824626 - RNA, 19 nt, Homo sapiens
  misc_RNA (1)...(19): siRNA sense strand
gaaaauccaugccuuuguu

SEQ ID NO: 824627 - RNA, 19 nt, Homo sapiens
  misc_RNA (1)...(19): siRNA sense strand
gagaagauccgcccugugu

SEQ ID NO: 824628 - RNA, 19 nt, Homo sapiens
  misc_RNA (1)...(19): siRNA sense strand
cagggaaggugaaggauug

SEQ ID NO: 824629 - RNA, 19 nt, Homo sapiens
  misc_RNA (1)...(19): siRNA sense strand
guaagagcguguuugaugu

SEQ ID NO: 824630 - RNA, 19 nt, Homo sapiens
  misc_RNA (1)...(19): siRNA sense strand
caaugaagauggcuaacau

SEQ ID NO: 824631 - RNA, 19 nt, Homo sapiens
  misc_RNA (1)...(19): siRNA sense strand
gagcaggugucaugguuuc

SEQ ID NO: 824632 - RNA, 19 nt, Homo sapiens
  misc_RNA (1)...(19): siRNA sense strand
gagcguguuugaugucuug

SEQ ID NO: 824633 - RNA, 19 nt, Homo sapiens
  misc_RNA (1)...(19): siRNA sense strand
ugaauuuacugacuacaug

SEQ ID NO: 824634 - RNA, 19 nt, Homo sapiens
  misc_RNA (1)...(19): siRNA sense strand
uggaagagauggagaagau

SEQ ID NO: 824635 - RNA, 19 nt, Homo sapiens
  misc_RNA (1)...(19): siRNA sense strand
ggaucaagcuagaccugaa

SEQ ID NO: 824636 - RNA, 19 nt, Homo sapiens
  misc_RNA (1)...(19): siRNA sense strand
ggaaacaacacagcucuga

SEQ ID NO: 824637 - RNA, 19 nt, Homo sapiens
  misc_RNA (1)...(19): siRNA sense strand
ggagucuucuuucuaaaca

SEQ ID NO: 824638 - RNA, 19 nt, Homo sapiens
  misc_RNA (1)...(19): siRNA sense strand
gugaaggauuggguaaaua

SEQ ID NO: 824639 - RNA, 19 nt, Homo sapiens
  misc_RNA (1)...(19): siRNA sense strand
gcaaaagcaucuacuacaa

SEQ ID NO: 824640 - RNA, 19 nt, Homo sapiens
  misc_RNA (1)...(19): siRNA sense strand
ggaagaaguggcaugcaaa

SEQ ID NO: 824641 - RNA, 19 nt, Homo sapiens
  misc_RNA (1)...(19): siRNA sense strand
gauccgaggagucuucuuu

SEQ ID NO: 824642 - RNA, 19 nt, Homo sapiens
  misc_RNA (1)...(19): siRNA sense strand
ggugaaggauuggguaaau

SEQ ID NO: 824643 - RNA, 19 nt, Homo sapiens
  misc_RNA (1)...(19): siRNA sense strand
gaaguucuuugagcuaauc

SEQ ID NO: 824644 - RNA, 19 nt, Homo sapiens
  misc_RNA (1)...(19): siRNA sense strand
ccagguggcuucucagagu

SEQ ID NO: 824645 - RNA, 19 nt, Homo sapiens
  misc_RNA (1)...(19): siRNA sense strand
ugaacgaguuugucucuuc

SEQ ID NO: 824646 - RNA, 19 nt, Homo sapiens
  misc_RNA (1)...(19): siRNA sense strand
aaaccaaggacucuacuuu

SEQ ID NO: 824647 - RNA, 19 nt, Homo sapiens
  misc_RNA (1)...(19): siRNA sense strand
gaucaagggagaccaugaa

SEQ ID NO: 824648 - RNA, 19 nt, Homo sapiens
  misc_RNA (1)...(19): siRNA sense strand
cuaaaucgaaguucuuuga

SEQ ID NO: 824649 - RNA, 19 nt, Homo sapiens
  misc_RNA (1)...(19): siRNA sense strand
ggaauuuuguccuggauaa

SEQ ID NO: 824650 - RNA, 19 nt, Homo sapiens
  misc_RNA (1)...(19): siRNA sense strand
ugaaugagcccuggacuau

SEQ ID NO: 824651 - RNA, 19 nt, Homo sapiens
  misc_RNA (1)...(19): siRNA sense strand
ugaaggagguguacagacu

SEQ ID NO: 824652 - RNA, 19 nt, Homo sapiens
  misc_RNA (1)...(19): siRNA sense strand
gugagcaggugucaugguu

SEQ ID NO: 824653 - RNA, 19 nt, Homo sapiens
  misc_RNA (1)...(19): siRNA sense strand
gggacacucugcuaucugu

SEQ ID NO: 824654 - RNA, 19 nt, Homo sapiens
  misc_RNA (1)...(19): siRNA sense strand
gaggccacuucaucuguaa

SEQ ID NO: 824655 - RNA, 19 nt, Homo sapiens
  misc_RNA (1)...(19): siRNA sense strand
caaagcagacucucuugug

SEQ ID NO: 824656 - RNA, 19 nt, Homo sapiens
  misc_RNA (1)...(19): siRNA sense strand
gaacuucuucucgcuauuc

SEQ ID NO: 824657 - RNA, 19 nt, Homo sapiens
  misc_RNA (1)...(19): siRNA sense strand
gaccaugaauuuacugacu

SEQ ID NO: 824658 - RNA, 19 nt, Homo sapiens
  misc_RNA (1)...(19): siRNA sense strand
gauuaccucuucgcaguga

SEQ ID NO: 824659 - RNA, 19 nt, Homo sapiens
  misc_RNA (1)...(19): siRNA sense strand
gaggagucuucuuucuaaa

SEQ ID NO: 824660 - RNA, 19 nt, Homo sapiens
  misc_RNA (1)...(19): siRNA sense strand
gccaaucccuaugagauga

SEQ ID NO: 824661 - RNA, 19 nt, Homo sapiens
  misc_RNA (1)...(19): siRNA sense strand
uguaagagcguguuugaug

SEQ ID NO: 824662 - RNA, 19 nt, Homo sapiens
  misc_RNA (1)...(19): siRNA sense strand
ugauggagauggagauauc

SEQ ID NO: 824663 - RNA, 19 nt, Homo sapiens
  misc_RNA (1)...(19): siRNA sense strand
gcagugaauauuaaacuca

SEQ ID NO: 824664 - RNA, 19 nt, Homo sapiens
  misc_RNA (1)...(19): siRNA sense strand
ucaaagcucuggcgaaaau

SEQ ID NO: 824665 - RNA, 19 nt, Homo sapiens
  misc_RNA (1)...(19): siRNA sense strand
ggaacuucuucucgcuauu

SEQ ID NO: 824666 - RNA, 19 nt, Homo sapiens
  misc_RNA (1)...(19): siRNA sense strand
guacagacuggaagagaug

SEQ ID NO: 824667 - RNA, 19 nt, Homo sapiens
  misc_RNA (1)...(19): siRNA sense strand
ccaaugagagccacuguag

SEQ ID NO: 824668 - RNA, 19 nt, Homo sapiens
  misc_RNA (1)...(19): siRNA sense strand
gaauuuacugacuacauga

SEQ ID NO: 824669 - RNA, 19 nt, Homo sapiens
  misc_RNA (1)...(19): siRNA sense strand
gaagaaguggcaugcaaag

SEQ ID NO: 824670 - RNA, 19 nt, Homo sapiens
  misc_RNA (1)...(19): siRNA sense strand
ugucaugguuuccagaaug

SEQ ID NO: 824671 - RNA, 19 nt, Homo sapiens
  misc_RNA (1)...(19): siRNA sense strand
aaacagggcagcaaugaag

SEQ ID NO: 824672 - RNA, 19 nt, Homo sapiens
  misc_RNA (1)...(19): siRNA sense strand
guucaagacacgacacuga

SEQ ID NO: 824673 - RNA, 19 nt, Homo sapiens
  misc_RNA (1)...(19): siRNA sense strand
gcuuuggaaugacuuugaa

SEQ ID NO: 824674 - RNA, 19 nt, Homo sapiens
  misc_RNA (1)...(19): siRNA sense strand
acacagcucugacucuuuu

SEQ ID NO: 824675 - RNA, 19 nt, Homo sapiens
  misc_RNA (1)...(19): siRNA sense strand
acaguguguugcaguguaa

SEQ ID NO: 824676 - RNA, 19 nt, Homo sapiens
  misc_RNA (1)...(19): siRNA sense strand
ggagaacugacccagaaug

SEQ ID NO: 824677 - RNA, 19 nt, Homo sapiens
  misc_RNA (1)...(19): siRNA sense strand
gaaggugggcauagaugau

SEQ ID NO: 824678 - RNA, 19 nt, Homo sapiens
  misc_RNA (1)...(19): siRNA sense strand
gcaaugaagauggcuaaca

SEQ ID NO: 824679 - RNA, 19 nt, Homo sapiens
  misc_RNA (1)...(19): siRNA sense strand
gaacguggacuggcgagau

SEQ ID NO: 824680 - RNA, 19 nt, Homo sapiens
  misc_RNA (1)...(19): siRNA sense strand
agagguauguggugugcaa

SEQ ID NO: 824681 - RNA, 19 nt, Homo sapiens
  misc_RNA (1)...(19): siRNA sense strand
gaccuguucacaccguuua

SEQ ID NO: 824682 - RNA, 19 nt, Homo sapiens
  misc_RNA (1)...(19): siRNA sense strand
gacaggaggccacuucauc

SEQ ID NO: 824683 - RNA, 19 nt, Homo sapiens
  misc_RNA (1)...(19): siRNA sense strand
aaugagcccuggacuaugg

SEQ ID NO: 824684 - RNA, 19 nt, Homo sapiens
  misc_RNA (1)...(19): siRNA sense strand
gaucagugccauccacauc

SEQ ID NO: 824685 - RNA, 19 nt, Homo sapiens
  misc_RNA (1)...(19): siRNA sense strand
ucugcuaucuguggaaauu

SEQ ID NO: 824686 - RNA, 19 nt, Homo sapiens
  misc_RNA (1)...(19): siRNA sense strand
ggaaaucccagaucuacac

SEQ ID NO: 824687 - RNA, 19 nt, Homo sapiens
  misc_RNA (1)...(19): siRNA sense strand
ucgaaguucuuugagcuaa

SEQ ID NO: 824688 - RNA, 19 nt, Homo sapiens
  misc_RNA (1)...(19): siRNA sense strand
cagaauguaccacugaaau

SEQ ID NO: 824689 - RNA, 19 nt, Homo sapiens
  misc_RNA (1)...(19): siRNA sense strand
ggauuccgacgucaacuug

SEQ ID NO: 824690 - RNA, 19 nt, Homo sapiens
  misc_RNA (1)...(19): siRNA sense strand
cuacucugcuuccagugaa

SEQ ID NO: 824691 - RNA, 19 nt, Homo sapiens
  misc_RNA (1)...(19): siRNA sense strand
aggaagaaguggcaugcaa

SEQ ID NO: 824692 - RNA, 19 nt, Homo sapiens
  misc_RNA (1)...(19): siRNA sense strand
cagguggcuucucagagua

SEQ ID NO: 824693 - RNA, 19 nt, Homo sapiens
  misc_RNA (1)...(19): siRNA sense strand
gcaucuacuacaagccuua

SEQ ID NO: 824694 - RNA, 19 nt, Homo sapiens
  misc_RNA (1)...(19): siRNA sense strand
auaauagcgucucccagaa

SEQ ID NO: 824695 - RNA, 19 nt, Homo sapiens
  misc_RNA (1)...(19): siRNA sense strand
gggagaccaugaauuuacu

SEQ ID NO: 824696 - RNA, 19 nt, Homo sapiens
  misc_RNA (1)...(19): siRNA sense strand
cuaaacagggcagcaauga

SEQ ID NO: 824697 - RNA, 19 nt, Homo sapiens
  misc_RNA (1)...(19): siRNA sense strand
gcacuuuaaccagcgaauu

SEQ ID NO: 824698 - RNA, 19 nt, Homo sapiens
  misc_RNA (1)...(19): siRNA sense strand
gggaaggcccagaggaaga

SEQ ID NO: 824699 - RNA, 19 nt, Homo sapiens
  misc_RNA (1)...(19): siRNA sense strand
aaucccagaucuacacaug

SEQ ID NO: 824700 - RNA, 19 nt, Homo sapiens
  misc_RNA (1)...(19): siRNA sense strand
gacccuaaaucgaaguucu

SEQ ID NO: 824701 - RNA, 19 nt, Homo sapiens
  misc_RNA (1)...(19): siRNA sense strand
guacugcugcuuugaacga

SEQ ID NO: 824702 - RNA, 19 nt, Homo sapiens
  misc_RNA (1)...(19): siRNA sense strand
agaauguaccacugaaauu

SEQ ID NO: 824703 - RNA, 19 nt, Homo sapiens
  misc_RNA (1)...(19): siRNA sense strand
ugaagggcccuaaugacuu

SEQ ID NO: 824704 - RNA, 19 nt, Homo sapiens
  misc_RNA (1)...(19): siRNA sense strand
uguauuugaucgcauguuc

SEQ ID NO: 824705 - RNA, 19 nt, Homo sapiens
  misc_RNA (1)...(19): siRNA sense strand
cagcaaugaagauggcuaa

SEQ ID NO: 824706 - RNA, 19 nt, Homo sapiens
  misc_RNA (1)...(19): siRNA sense strand
gagaugauccgaggagucu

SEQ ID NO: 824707 - RNA, 19 nt, Homo sapiens
  misc_RNA (1)...(19): siRNA sense strand
cauuucacauuugcuacua

SEQ ID NO: 824708 - RNA, 19 nt, Homo sapiens
  misc_RNA (1)...(19): siRNA sense strand
ggaaagagcuccagcgaaa

SEQ ID NO: 824709 - RNA, 19 nt, Homo sapiens
  misc_RNA (1)...(19): siRNA sense strand
ugagugaccuggaauauuu

SEQ ID NO: 824710 - RNA, 19 nt, Homo sapiens
  misc_RNA (1)...(19): siRNA sense strand
caacaucacagacaucuua

SEQ ID NO: 824711 - RNA, 19 nt, Homo sapiens
  misc_RNA (1)...(19): siRNA sense strand
cuaaaugacuggcggaaua

SEQ ID NO: 824712 - RNA, 19 nt, Homo sapiens
  misc_RNA (1)...(19): siRNA sense strand
ggagaggccucagaaguuu

SEQ ID NO: 824713 - RNA, 19 nt, Homo sapiens
  misc_RNA (1)...(19): siRNA sense strand
gaugaggucuuguccgaaa

SEQ ID NO: 824714 - RNA, 19 nt, Homo sapiens
  misc_RNA (1)...(19): siRNA sense strand
aagaagagauuauguccua

SEQ ID NO: 824715 - RNA, 19 nt, Homo sapiens
  misc_RNA (1)...(19): siRNA sense strand
gaggagauuucccugagua

SEQ ID NO: 824716 - RNA, 19 nt, Homo sapiens
  misc_RNA (1)...(19): siRNA sense strand
gaaggugaauguccuauac

SEQ ID NO: 824717 - RNA, 19 nt, Homo sapiens
  misc_RNA (1)...(19): siRNA sense strand
gaccucacuuucacuguua

SEQ ID NO: 824718 - RNA, 19 nt, Homo sapiens
  misc_RNA (1)...(19): siRNA sense strand
guggagcgcuucaauaaug

SEQ ID NO: 824719 - RNA, 19 nt, Homo sapiens
  misc_RNA (1)...(19): siRNA sense strand
caacagagagguccgaaga

SEQ ID NO: 824720 - RNA, 19 nt, Homo sapiens
  misc_RNA (1)...(19): siRNA sense strand
gcaagaaaccacacacuca

SEQ ID NO: 824721 - RNA, 19 nt, Homo sapiens
  misc_RNA (1)...(19): siRNA sense strand
gaugccagcucguacuuug

SEQ ID NO: 824722 - RNA, 19 nt, Homo sapiens
  misc_RNA (1)...(19): siRNA sense strand
uaaagcacaugauucugaa

SEQ ID NO: 824723 - RNA, 19 nt, Homo sapiens
  misc_RNA (1)...(19): siRNA sense strand
gggauaggguggucagcua

SEQ ID NO: 824724 - RNA, 19 nt, Homo sapiens
  misc_RNA (1)...(19): siRNA sense strand
acuaagaucugcuucaaau

SEQ ID NO: 824725 - RNA, 19 nt, Homo sapiens
  misc_RNA (1)...(19): siRNA sense strand
cagccaagcuuagcaagaa

SEQ ID NO: 824726 - RNA, 19 nt, Homo sapiens
  misc_RNA (1)...(19): siRNA sense strand
ccacugacgugcuggaaau

SEQ ID NO: 824727 - RNA, 19 nt, Homo sapiens
  misc_RNA (1)...(19): siRNA sense strand
aaacuaagaucugcuucaa

SEQ ID NO: 824728 - RNA, 19 nt, Homo sapiens
  misc_RNA (1)...(19): siRNA sense strand
acacacaggugacggagaa

SEQ ID NO: 824729 - RNA, 19 nt, Homo sapiens
  misc_RNA (1)...(19): siRNA sense strand
caucaucacuacccaacaa

SEQ ID NO: 824730 - RNA, 19 nt, Homo sapiens
  misc_RNA (1)...(19): siRNA sense strand
gagaaguuguccugugaug

SEQ ID NO: 824731 - RNA, 19 nt, Homo sapiens
  misc_RNA (1)...(19): siRNA sense strand
gaagccaacaucaacauga

SEQ ID NO: 824732 - RNA, 19 nt, Homo sapiens
  misc_RNA (1)...(19): siRNA sense strand
gagcagaggcugagauuac

SEQ ID NO: 824733 - RNA, 19 nt, Homo sapiens
  misc_RNA (1)...(19): siRNA sense strand
gaacggucgucuucccaau

SEQ ID NO: 824734 - RNA, 19 nt, Homo sapiens
  misc_RNA (1)...(19): siRNA sense strand
ugaacaaccugauggaaag

SEQ ID NO: 824735 - RNA, 19 nt, Homo sapiens
  misc_RNA (1)...(19): siRNA sense strand
gggccucggugaagagaaa

SEQ ID NO: 824736 - RNA, 19 nt, Homo sapiens
  misc_RNA (1)...(19): siRNA sense strand
gcuucucucucucagauuu

SEQ ID NO: 824737 - RNA, 19 nt, Homo sapiens
  misc_RNA (1)...(19): siRNA sense strand
gagcuaccacuuucauuga

SEQ ID NO: 824738 - RNA, 19 nt, Homo sapiens
  misc_RNA (1)...(19): siRNA sense strand
gcacaugauucugaaaguc

SEQ ID NO: 824739 - RNA, 19 nt, Homo sapiens
  misc_RNA (1)...(19): siRNA sense strand
cagcugcaauuccgauuug

SEQ ID NO: 824740 - RNA, 19 nt, Homo sapiens
  misc_RNA (1)...(19): siRNA sense strand
aaauugaggugaaggacaa

SEQ ID NO: 824741 - RNA, 19 nt, Homo sapiens
  misc_RNA (1)...(19): siRNA sense strand
gucagcagcuccuacuauu

SEQ ID NO: 824742 - RNA, 19 nt, Homo sapiens
  misc_RNA (1)...(19): siRNA sense strand
gaggaaaccagcaccuuug

SEQ ID NO: 824743 - RNA, 19 nt, Homo sapiens
  misc_RNA (1)...(19): siRNA sense strand
uaccgagucuucaccagua

SEQ ID NO: 824744 - RNA, 19 nt, Homo sapiens
  misc_RNA (1)...(19): siRNA sense strand
ugagauuacugcaguuugu

SEQ ID NO: 824745 - RNA, 19 nt, Homo sapiens
  misc_RNA (1)...(19): siRNA sense strand
ggacuggauuggcauguac

SEQ ID NO: 824746 - RNA, 19 nt, Homo sapiens
  misc_RNA (1)...(19): siRNA sense strand
gaaacuaagaucugcuuca

SEQ ID NO: 824747 - RNA, 19 nt, Homo sapiens
  misc_RNA (1)...(19): siRNA sense strand
ggacauaaaggaggaagug

SEQ ID NO: 824748 - RNA, 19 nt, Homo sapiens
  misc_RNA (1)...(19): siRNA sense strand
gaaaucgaccuaaaugacu

SEQ ID NO: 824749 - RNA, 19 nt, Homo sapiens
  misc_RNA (1)...(19): siRNA sense strand
ggaaaucgaccuaaaugac

SEQ ID NO: 824750 - RNA, 19 nt, Homo sapiens
  misc_RNA (1)...(19): siRNA sense strand
gagaggagggccuggacua

SEQ ID NO: 824751 - RNA, 19 nt, Homo sapiens
  misc_RNA (1)...(19): siRNA sense strand
uccagaggcuccgaaguua

SEQ ID NO: 824752 - RNA, 19 nt, Homo sapiens
  misc_RNA (1)...(19): siRNA sense strand
guggucagcuacacacuug

SEQ ID NO: 824753 - RNA, 19 nt, Homo sapiens
  misc_RNA (1)...(19): siRNA sense strand
cagcuucucucucucagau

SEQ ID NO: 824754 - RNA, 19 nt, Homo sapiens
  misc_RNA (1)...(19): siRNA sense strand
agacugcccugugauuuga

SEQ ID NO: 824755 - RNA, 19 nt, Homo sapiens
  misc_RNA (1)...(19): siRNA sense strand
ucacgaggcccuucuacaa

SEQ ID NO: 824756 - RNA, 19 nt, Homo sapiens
  misc_RNA (1)...(19): siRNA sense strand
aggccaagcuccgcaauuu

SEQ ID NO: 824757 - RNA, 19 nt, Homo sapiens
  misc_RNA (1)...(19): siRNA sense strand
uuaaagcacaugauucuga

SEQ ID NO: 824758 - RNA, 19 nt, Homo sapiens
  misc_RNA (1)...(19): siRNA sense strand
guuaacagcaguagaggaa

SEQ ID NO: 824759 - RNA, 19 nt, Homo sapiens
  misc_RNA (1)...(19): siRNA sense strand
gagacugcccugugauuug

SEQ ID NO: 824760 - RNA, 19 nt, Homo sapiens
  misc_RNA (1)...(19): siRNA sense strand
ggcauauaaugacaagauu

SEQ ID NO: 824761 - RNA, 19 nt, Homo sapiens
  misc_RNA (1)...(19): siRNA sense strand
ggaagucggaggcugauca

SEQ ID NO: 824762 - RNA, 19 nt, Homo sapiens
  misc_RNA (1)...(19): siRNA sense strand
cguacuccauguuguauga

SEQ ID NO: 824763 - RNA, 19 nt, Homo sapiens
  misc_RNA (1)...(19): siRNA sense strand
ccgcggaaaucgaccuaaa

SEQ ID NO: 824764 - RNA, 19 nt, Homo sapiens
  misc_RNA (1)...(19): siRNA sense strand
gggacuggauuggcaugua

SEQ ID NO: 824765 - RNA, 19 nt, Homo sapiens
  misc_RNA (1)...(19): siRNA sense strand
gaagggaagaagaggagaa

SEQ ID NO: 824766 - RNA, 19 nt, Homo sapiens
  misc_RNA (1)...(19): siRNA sense strand
cuugagugguucagguuua

SEQ ID NO: 824767 - RNA, 19 nt, Homo sapiens
  misc_RNA (1)...(19): siRNA sense strand
gcuccgcaauuucuacaga

SEQ ID NO: 824768 - RNA, 19 nt, Homo sapiens
  misc_RNA (1)...(19): siRNA sense strand
uaagaucugcuucaaauac

SEQ ID NO: 824769 - RNA, 19 nt, Homo sapiens
  misc_RNA (1)...(19): siRNA sense strand
uaaaugacuggcggaauaa

SEQ ID NO: 824770 - RNA, 19 nt, Homo sapiens
  misc_RNA (1)...(19): siRNA sense strand
gcggaaaucgaccuaaaug

SEQ ID NO: 824771 - RNA, 19 nt, Homo sapiens
  misc_RNA (1)...(19): siRNA sense strand
cuacaaggcacuccugaga

SEQ ID NO: 824772 - RNA, 19 nt, Homo sapiens
  misc_RNA (1)...(19): siRNA sense strand
cuucaacccuuacuaugga

SEQ ID NO: 824773 - RNA, 19 nt, Homo sapiens
  misc_RNA (1)...(19): siRNA sense strand
gguaaucacgggcuugaga

SEQ ID NO: 824774 - RNA, 19 nt, Homo sapiens
  misc_RNA (1)...(19): siRNA sense strand
gaccacaacagucgagcua

SEQ ID NO: 824775 - RNA, 19 nt, Homo sapiens
  misc_RNA (1)...(19): siRNA sense strand
guccuauacuccauaauuc

SEQ ID NO: 824776 - RNA, 19 nt, Homo sapiens
  misc_RNA (1)...(19): siRNA sense strand
ggucagcagcuccuacuau

SEQ ID NO: 824777 - RNA, 19 nt, Homo sapiens
  misc_RNA (1)...(19): siRNA sense strand
caucuuagaccucacuuuc

SEQ ID NO: 824778 - RNA, 19 nt, Homo sapiens
  misc_RNA (1)...(19): siRNA sense strand
acagagagccagugcaaga

SEQ ID NO: 824779 - RNA, 19 nt, Homo sapiens
  misc_RNA (1)...(19): siRNA sense strand
aaacggaccagcagggaaa

SEQ ID NO: 824780 - RNA, 19 nt, Homo sapiens
  misc_RNA (1)...(19): siRNA sense strand
ggucauccacugggacaua

SEQ ID NO: 824781 - RNA, 19 nt, Homo sapiens
  misc_RNA (1)...(19): siRNA sense strand
gggaagaagaggagaagga

SEQ ID NO: 824782 - RNA, 19 nt, Homo sapiens
  misc_RNA (1)...(19): siRNA sense strand
uaacagcaguagaggaaac

SEQ ID NO: 824783 - RNA, 19 nt, Homo sapiens
  misc_RNA (1)...(19): siRNA sense strand
ucacuuucacuguuaauga

SEQ ID NO: 824784 - RNA, 19 nt, Homo sapiens
  misc_RNA (1)...(19): siRNA sense strand
uugagaaguuguccuguga

SEQ ID NO: 824785 - RNA, 19 nt, Homo sapiens
  misc_RNA (1)...(19): siRNA sense strand
gcauauaaugacaagauug

SEQ ID NO: 824786 - RNA, 19 nt, Homo sapiens
  misc_RNA (1)...(19): siRNA sense strand
ccacuggcauauaaugaca

SEQ ID NO: 824787 - RNA, 19 nt, Homo sapiens
  misc_RNA (1)...(19): siRNA sense strand
aaacugggaagcucgaauu

SEQ ID NO: 824788 - RNA, 19 nt, Homo sapiens
  misc_RNA (1)...(19): siRNA sense strand
cauaauucccagccaguaa

SEQ ID NO: 824789 - RNA, 19 nt, Homo sapiens
  misc_RNA (1)...(19): siRNA sense strand
gaauguccuauacuccaua

SEQ ID NO: 824790 - RNA, 19 nt, Homo sapiens
  misc_RNA (1)...(19): siRNA sense strand
gaucagcuucucucucuca

SEQ ID NO: 824791 - RNA, 19 nt, Homo sapiens
  misc_RNA (1)...(19): siRNA sense strand
cgguggagcgcuucaauaa

SEQ ID NO: 824792 - RNA, 19 nt, Homo sapiens
  misc_RNA (1)...(19): siRNA sense strand
agaccucacuuucacuguu

SEQ ID NO: 824793 - RNA, 19 nt, Homo sapiens
  misc_RNA (1)...(19): siRNA sense strand
gcucuucaacccuuacuau

SEQ ID NO: 824794 - RNA, 19 nt, Homo sapiens
  misc_RNA (1)...(19): siRNA sense strand
gagaaaauccauuacauuc

SEQ ID NO: 824795 - RNA, 19 nt, Homo sapiens
  misc_RNA (1)...(19): siRNA sense strand
ggccugaacaucaucacua

SEQ ID NO: 824796 - RNA, 19 nt, Homo sapiens
  misc_RNA (1)...(19): siRNA sense strand
ggaaagaagcccggaaggu

SEQ ID NO: 824797 - RNA, 19 nt, Homo sapiens
  misc_RNA (1)...(19): siRNA sense strand
gcaauuccgauuugagauc

SEQ ID NO: 824798 - RNA, 19 nt, Homo sapiens
  misc_RNA (1)...(19): siRNA sense strand
ggaagaggacagagaagag

SEQ ID NO: 824799 - RNA, 19 nt, Homo sapiens
  misc_RNA (1)...(19): siRNA sense strand
cuucggcgcuucugcauag

SEQ ID NO: 824800 - RNA, 19 nt, Homo sapiens
  misc_RNA (1)...(19): siRNA sense strand
ggaauuccaccagaguuug

SEQ ID NO: 824801 - RNA, 19 nt, Homo sapiens
  misc_RNA (1)...(19): siRNA sense strand
ggagggaaccuucaaucag

SEQ ID NO: 824802 - RNA, 19 nt, Homo sapiens
  misc_RNA (1)...(19): siRNA sense strand
ggagaaaauccauuacauu

SEQ ID NO: 824803 - RNA, 19 nt, Homo sapiens
  misc_RNA (1)...(19): siRNA sense strand
gccaggacacagcuuagua

SEQ ID NO: 824804 - RNA, 19 nt, Homo sapiens
  misc_RNA (1)...(19): siRNA sense strand
cgagcuaccacuuucauug

SEQ ID NO: 824805 - RNA, 19 nt, Homo sapiens
  misc_RNA (1)...(19): siRNA sense strand
gaaggacaacaacaucaca

SEQ ID NO: 824806 - RNA, 19 nt, Homo sapiens
  misc_RNA (1)...(19): siRNA sense strand
gcgguggagcgcuucaaua

SEQ ID NO: 824807 - RNA, 19 nt, Homo sapiens
  misc_RNA (1)...(19): siRNA sense strand
gacaacaacaucacagaca

SEQ ID NO: 824808 - RNA, 19 nt, Homo sapiens
  misc_RNA (1)...(19): siRNA sense strand
gaagugacaugucugaaga

SEQ ID NO: 824809 - RNA, 19 nt, Homo sapiens
  misc_RNA (1)...(19): siRNA sense strand
ugacaugucugaagaagga

SEQ ID NO: 824810 - RNA, 19 nt, Homo sapiens
  misc_RNA (1)...(19): siRNA sense strand
gugaggagcuauugacaga

SEQ ID NO: 824811 - RNA, 19 nt, Homo sapiens
  misc_RNA (1)...(19): siRNA sense strand
ggacagcccacaccuuuga

SEQ ID NO: 824812 - RNA, 19 nt, Homo sapiens
  misc_RNA (1)...(19): siRNA sense strand
gaagcugucucuggaggaa

SEQ ID NO: 824813 - RNA, 19 nt, Homo sapiens
  misc_RNA (1)...(19): siRNA sense strand
gagcggcauugaagacuau

SEQ ID NO: 824814 - RNA, 19 nt, Homo sapiens
  misc_RNA (1)...(19): siRNA sense strand
ggagcggcauugaagacua

SEQ ID NO: 824815 - RNA, 19 nt, Homo sapiens
  misc_RNA (1)...(19): siRNA sense strand
gaggagcuauugacagaca

SEQ ID NO: 824816 - RNA, 19 nt, Homo sapiens
  misc_RNA (1)...(19): siRNA sense strand
ggacaaggaggagcaggua

SEQ ID NO: 824817 - RNA, 19 nt, Homo sapiens
  misc_RNA (1)...(19): siRNA sense strand
acaaguaacuccucuucau

SEQ ID NO: 824818 - RNA, 19 nt, Homo sapiens
  misc_RNA (1)...(19): siRNA sense strand
caucaacucugucuuccau

SEQ ID NO: 824819 - RNA, 19 nt, Homo sapiens
  misc_RNA (1)...(19): siRNA sense strand
ugaaggaagugacaugucu

SEQ ID NO: 824820 - RNA, 19 nt, Homo sapiens
  misc_RNA (1)...(19): siRNA sense strand
agacuuggcugcccugcuu

SEQ ID NO: 824821 - RNA, 19 nt, Homo sapiens
  misc_RNA (1)...(19): siRNA sense strand
ccacuuauaagcagcguaa

SEQ ID NO: 824822 - RNA, 19 nt, Homo sapiens
  misc_RNA (1)...(19): siRNA sense strand
ccguggagcuccuggauga

SEQ ID NO: 824823 - RNA, 19 nt, Homo sapiens
  misc_RNA (1)...(19): siRNA sense strand
gaagcagaacgccucauug

SEQ ID NO: 824824 - RNA, 19 nt, Homo sapiens
  misc_RNA (1)...(19): siRNA sense strand
ccaaggaagugggagaugu

SEQ ID NO: 824825 - RNA, 19 nt, Homo sapiens
  misc_RNA (1)...(19): siRNA sense strand
gcacggagagcgagaagca

SEQ ID NO: 824826 - RNA, 19 nt, Homo sapiens
  misc_RNA (1)...(19): siRNA sense strand
cagaaugcacugcuugaaa

SEQ ID NO: 824827 - RNA, 19 nt, Homo sapiens
  misc_RNA (1)...(19): siRNA sense strand
ucucagacccucccuuuga

SEQ ID NO: 824828 - RNA, 19 nt, Homo sapiens
  misc_RNA (1)...(19): siRNA sense strand
gcguggaggugcacaagug

SEQ ID NO: 824829 - RNA, 19 nt, Homo sapiens
  misc_RNA (1)...(19): siRNA sense strand
cuacagcagugcaaguuca

SEQ ID NO: 824830 - RNA, 19 nt, Homo sapiens
  misc_RNA (1)...(19): siRNA sense strand
ggaagugacaugucugaag

SEQ ID NO: 824831 - RNA, 19 nt, Homo sapiens
  misc_RNA (1)...(19): siRNA sense strand
gggcagaggaggacaagga

SEQ ID NO: 824832 - RNA, 19 nt, Homo sapiens
  misc_RNA (1)...(19): siRNA sense strand
ggaagugggagaugugauc

SEQ ID NO: 824833 - RNA, 19 nt, Homo sapiens
  misc_RNA (1)...(19): siRNA sense strand
gaacuggaucugcuucuac

SEQ ID NO: 824834 - RNA, 19 nt, Homo sapiens
  misc_RNA (1)...(19): siRNA sense strand
ucaacguccugcucuucua

SEQ ID NO: 824835 - RNA, 19 nt, Homo sapiens
  misc_RNA (1)...(19): siRNA sense strand
cgaagcagaacgccucauu

SEQ ID NO: 824836 - RNA, 19 nt, Homo sapiens
  misc_RNA (1)...(19): siRNA sense strand
ccagugaggaugaggacua

SEQ ID NO: 824837 - RNA, 19 nt, Homo sapiens
  misc_RNA (1)...(19): siRNA sense strand
ucaacucugucuuccaugu

SEQ ID NO: 824838 - RNA, 19 nt, Homo sapiens
  misc_RNA (1)...(19): siRNA sense strand
ccgagugucuucugagauc

SEQ ID NO: 824839 - RNA, 19 nt, Homo sapiens
  misc_RNA (1)...(19): siRNA sense strand
gaacgccucauuguggauu

SEQ ID NO: 824840 - RNA, 19 nt, Homo sapiens
  misc_RNA (1)...(19): siRNA sense strand
ugaagacuauuuccaccau

SEQ ID NO: 824841 - RNA, 19 nt, Homo sapiens
  misc_RNA (1)...(19): siRNA sense strand
gagauccgcuaccgaaagc

SEQ ID NO: 824842 - RNA, 19 nt, Homo sapiens
  misc_RNA (1)...(19): siRNA sense strand
agaaugcacugcuugaaaa

SEQ ID NO: 824843 - RNA, 19 nt, Homo sapiens
  misc_RNA (1)...(19): siRNA sense strand
guucucaucagcauuguga

SEQ ID NO: 824844 - RNA, 19 nt, Homo sapiens
  misc_RNA (1)...(19): siRNA sense strand
ccauccagcugaaggaagu

SEQ ID NO: 824845 - RNA, 19 nt, Homo sapiens
  misc_RNA (1)...(19): siRNA sense strand
cuuauaagcagcguaauga

SEQ ID NO: 824846 - RNA, 19 nt, Homo sapiens
  misc_RNA (1)...(19): siRNA sense strand
gcagagcugguacaguaug

SEQ ID NO: 824847 - RNA, 19 nt, Homo sapiens
  misc_RNA (1)...(19): siRNA sense strand
caaguaacuccucuucauc

SEQ ID NO: 824848 - RNA, 19 nt, Homo sapiens
  misc_RNA (1)...(19): siRNA sense strand
ggaaacuguucagcaaacu

SEQ ID NO: 824849 - RNA, 19 nt, Homo sapiens
  misc_RNA (1)...(19): siRNA sense strand
uaaugaggacuuccggaaa

SEQ ID NO: 824850 - RNA, 19 nt, Homo sapiens
  misc_RNA (1)...(19): siRNA sense strand
cuggugaagucgcucauug

SEQ ID NO: 824851 - RNA, 19 nt, Homo sapiens
  misc_RNA (1)...(19): siRNA sense strand
ggacuuccggaaacuguuc

SEQ ID NO: 824852 - RNA, 19 nt, Homo sapiens
  misc_RNA (1)...(19): siRNA sense strand
aagcagaacgccucauugu

SEQ ID NO: 824853 - RNA, 19 nt, Homo sapiens
  misc_RNA (1)...(19): siRNA sense strand
uggaucugcugcccaguga

SEQ ID NO: 824854 - RNA, 19 nt, Homo sapiens
  misc_RNA (1)...(19): siRNA sense strand
ggaggaaggcgggaaggau

SEQ ID NO: 824855 - RNA, 19 nt, Homo sapiens
  misc_RNA (1)...(19): siRNA sense strand
caaggaagugggagaugug

SEQ ID NO: 824856 - RNA, 19 nt, Homo sapiens
  misc_RNA (1)...(19): siRNA sense strand
cggaaacuguucagcaaac

SEQ ID NO: 824857 - RNA, 19 nt, Homo sapiens
  misc_RNA (1)...(19): siRNA sense strand
gcuauugacagacacaagu

SEQ ID NO: 824858 - RNA, 19 nt, Homo sapiens
  misc_RNA (1)...(19): siRNA sense strand
gcauuucuucacuuccuuu

SEQ ID NO: 824859 - RNA, 19 nt, Homo sapiens
  misc_RNA (1)...(19): siRNA sense strand
uccggaaacuguucagcaa

SEQ ID NO: 824860 - RNA, 19 nt, Homo sapiens
  misc_RNA (1)...(19): siRNA sense strand
gugaggaugaggacuaugu

SEQ ID NO: 824861 - RNA, 19 nt, Homo sapiens
  misc_RNA (1)...(19): siRNA sense strand
aaugaggacuuccggaaac

SEQ ID NO: 824862 - RNA, 19 nt, Homo sapiens
  misc_RNA (1)...(19): siRNA sense strand
ccucaucaacucugucuuc

SEQ ID NO: 824863 - RNA, 19 nt, Homo sapiens
  misc_RNA (1)...(19): siRNA sense strand
ccaacgccauccagaucug

SEQ ID NO: 824864 - RNA, 19 nt, Homo sapiens
  misc_RNA (1)...(19): siRNA sense strand
gaacucguggagcggcauu

SEQ ID NO: 824865 - RNA, 19 nt, Homo sapiens
  misc_RNA (1)...(19): siRNA sense strand
uaccaggacuacuucuaca

SEQ ID NO: 824866 - RNA, 19 nt, Homo sapiens
  misc_RNA (1)...(19): siRNA sense strand
acacaaguaacuccucuuc

SEQ ID NO: 824867 - RNA, 19 nt, Homo sapiens
  misc_RNA (1)...(19): siRNA sense strand
cagugaggaugaggacuau

SEQ ID NO: 824868 - RNA, 19 nt, Homo sapiens
  misc_RNA (1)...(19): siRNA sense strand
ggagagcgagaagcauuuc

SEQ ID NO: 824869 - RNA, 19 nt, Homo sapiens
  misc_RNA (1)...(19): siRNA sense strand
gcuccuggaugagaugaag

SEQ ID NO: 824870 - RNA, 19 nt, Homo sapiens
  misc_RNA (1)...(19): siRNA sense strand
cguggagccuggugaaguc

SEQ ID NO: 824871 - RNA, 19 nt, Homo sapiens
  misc_RNA (1)...(19): siRNA sense strand
acaaggaggagcagguaga

SEQ ID NO: 824872 - RNA, 19 nt, Homo sapiens
  misc_RNA (1)...(19): siRNA sense strand
gaggacuuccggaaacugu

SEQ ID NO: 824873 - RNA, 19 nt, Homo sapiens
  misc_RNA (1)...(19): siRNA sense strand
gcagcguaaugaggacuuc

SEQ ID NO: 824874 - RNA, 19 nt, Homo sapiens
  misc_RNA (1)...(19): siRNA sense strand
gcugcuuccuccucaucuu

SEQ ID NO: 824875 - RNA, 19 nt, Homo sapiens
  misc_RNA (1)...(19): siRNA sense strand
cuauugacagacacaagua

SEQ ID NO: 824876 - RNA, 19 nt, Homo sapiens
  misc_RNA (1)...(19): siRNA sense strand
caugucacgcccaaccuuu

SEQ ID NO: 824877 - RNA, 19 nt, Homo sapiens
  misc_RNA (1)...(19): siRNA sense strand
caccaaggcaucacagucu

SEQ ID NO: 824878 - RNA, 19 nt, Homo sapiens
  misc_RNA (1)...(19): siRNA sense strand
cggagagcgagaagcauuu

SEQ ID NO: 824879 - RNA, 19 nt, Homo sapiens
  misc_RNA (1)...(19): siRNA sense strand
gaaacuguucagcaaacuc

SEQ ID NO: 824880 - RNA, 19 nt, Homo sapiens
  misc_RNA (1)...(19): siRNA sense strand
caacaacccuggcuccuau

SEQ ID NO: 824881 - RNA, 19 nt, Homo sapiens
  misc_RNA (1)...(19): siRNA sense strand
cagcagggcuccaacauga

SEQ ID NO: 824882 - RNA, 19 nt, Homo sapiens
  misc_RNA (1)...(19): siRNA sense strand
ggacagaucucagcagaag

SEQ ID NO: 824883 - RNA, 19 nt, Homo sapiens
  misc_RNA (1)...(19): siRNA sense strand
ggacacagaggaagagaga

SEQ ID NO: 824884 - RNA, 19 nt, Homo sapiens
  misc_RNA (1)...(19): siRNA sense strand
acaacaacaucgucaacua

SEQ ID NO: 824885 - RNA, 19 nt, Homo sapiens
  misc_RNA (1)...(19): siRNA sense strand
gccaggaucuuuccagugu

SEQ ID NO: 824886 - RNA, 19 nt, Homo sapiens
  misc_RNA (1)...(19): siRNA sense strand
gggaagggauaccacauuc

SEQ ID NO: 824887 - RNA, 19 nt, Homo sapiens
  misc_RNA (1)...(19): siRNA sense strand
caggaaaugccaagacaua

SEQ ID NO: 824888 - RNA, 19 nt, Homo sapiens
  misc_RNA (1)...(19): siRNA sense strand
ggucggagauuugcaagga

SEQ ID NO: 824889 - RNA, 19 nt, Homo sapiens
  misc_RNA (1)...(19): siRNA sense strand
ggaaaugccaagacauaga

SEQ ID NO: 824890 - RNA, 19 nt, Homo sapiens
  misc_RNA (1)...(19): siRNA sense strand
gaaaugccaagacauagau

SEQ ID NO: 824891 - RNA, 19 nt, Homo sapiens
  misc_RNA (1)...(19): siRNA sense strand
gagagugacuuuucccuuu

SEQ ID NO: 824892 - RNA, 19 nt, Homo sapiens
  misc_RNA (1)...(19): siRNA sense strand
gagaagagccuguguuucc

SEQ ID NO: 824893 - RNA, 19 nt, Homo sapiens
  misc_RNA (1)...(19): siRNA sense strand
gcguggaccugaacgaaug

SEQ ID NO: 824894 - RNA, 19 nt, Homo sapiens
  misc_RNA (1)...(19): siRNA sense strand
ggaagugggcgcugacugu

SEQ ID NO: 824895 - RNA, 19 nt, Homo sapiens
  misc_RNA (1)...(19): siRNA sense strand
cuucagggcuccuaugugu

SEQ ID NO: 824896 - RNA, 19 nt, Homo sapiens
  misc_RNA (1)...(19): siRNA sense strand
gcaacacgccaggaucuuu

SEQ ID NO: 824897 - RNA, 19 nt, Homo sapiens
  misc_RNA (1)...(19): siRNA sense strand
gcugguggguggcaggaaa

SEQ ID NO: 824898 - RNA, 19 nt, Homo sapiens
  misc_RNA (1)...(19): siRNA sense strand
caagagaugaggacaguuc

SEQ ID NO: 824899 - RNA, 19 nt, Homo sapiens
  misc_RNA (1)...(19): siRNA sense strand
ucaagugcaucgccuguca

SEQ ID NO: 824900 - RNA, 19 nt, Homo sapiens
  misc_RNA (1)...(19): siRNA sense strand
ggaacggagugugugagaa

SEQ ID NO: 824901 - RNA, 19 nt, Homo sapiens
  misc_RNA (1)...(19): siRNA sense strand
gagcaagugccacaagugu

SEQ ID NO: 824902 - RNA, 19 nt, Homo sapiens
  misc_RNA (1)...(19): siRNA sense strand
gaacggagugugugagaac

SEQ ID NO: 824903 - RNA, 19 nt, Homo sapiens
  misc_RNA (1)...(19): siRNA sense strand
guucagaggaggauucaga

SEQ ID NO: 824904 - RNA, 19 nt, Homo sapiens
  misc_RNA (1)...(19): siRNA sense strand
gaagggauaccacauucuc

SEQ ID NO: 824905 - RNA, 19 nt, Homo sapiens
  misc_RNA (1)...(19): siRNA sense strand
cagcagagccacccaacug

SEQ ID NO: 824906 - RNA, 19 nt, Homo sapiens
  misc_RNA (1)...(19): siRNA sense strand
gagaugaggacaguucaga

SEQ ID NO: 824907 - RNA, 19 nt, Homo sapiens
  misc_RNA (1)...(19): siRNA sense strand
cauggugacugccucaaca

SEQ ID NO: 824908 - RNA, 19 nt, Homo sapiens
  misc_RNA (1)...(19): siRNA sense strand
gcucgugcguggaccugaa

SEQ ID NO: 824909 - RNA, 19 nt, Homo sapiens
  misc_RNA (1)...(19): siRNA sense strand
ccagcaagcacgccaucua

SEQ ID NO: 824910 - RNA, 19 nt, Homo sapiens
  misc_RNA (1)...(19): siRNA sense strand
caacaacaucgucaacuac

SEQ ID NO: 824911 - RNA, 19 nt, Homo sapiens
  misc_RNA (1)...(19): siRNA sense strand
cagacaaaccggaggagaa

SEQ ID NO: 824912 - RNA, 19 nt, Homo sapiens
  misc_RNA (1)...(19): siRNA sense strand
cgaggacauugaugagugu

SEQ ID NO: 824913 - RNA, 19 nt, Homo sapiens
  misc_RNA (1)...(19): siRNA sense strand
caggaucuuuccaguguca

SEQ ID NO: 824914 - RNA, 19 nt, Homo sapiens
  misc_RNA (1)...(19): siRNA sense strand
cgacugaaccagaacaucu

SEQ ID NO: 824915 - RNA, 19 nt, Homo sapiens
  misc_RNA (1)...(19): siRNA sense strand
caacacgccaggaucuuuc

SEQ ID NO: 824916 - RNA, 19 nt, Homo sapiens
  misc_RNA (1)...(19): siRNA sense strand
caauggcuccuacagaugu

SEQ ID NO: 824917 - RNA, 19 nt, Homo sapiens
  misc_RNA (1)...(19): siRNA sense strand
gcaccgcugcguucaagga

SEQ ID NO: 824918 - RNA, 19 nt, Homo sapiens
  misc_RNA (1)...(19): siRNA sense strand
gcuacugcguggaugugaa

SEQ ID NO: 824919 - RNA, 19 nt, Homo sapiens
  misc_RNA (1)...(19): siRNA sense strand
cagagcaagugccacaagu

SEQ ID NO: 824920 - RNA, 19 nt, Homo sapiens
  misc_RNA (1)...(19): siRNA sense strand
ggacaacaacaucgucaac

SEQ ID NO: 824921 - RNA, 19 nt, Homo sapiens
  misc_RNA (1)...(19): siRNA sense strand
accaauggcuccuacagau

SEQ ID NO: 824922 - RNA, 19 nt, Homo sapiens
  misc_RNA (1)...(19): siRNA sense strand
ugucagcgcugcccaacag

SEQ ID NO: 824923 - RNA, 19 nt, Homo sapiens
  misc_RNA (1)...(19): siRNA sense strand
gaggagaagagccuguguu

SEQ ID NO: 824924 - RNA, 19 nt, Homo sapiens
  misc_RNA (1)...(19): siRNA sense strand
caucaacgagugcgcaaug

SEQ ID NO: 824925 - RNA, 19 nt, Homo sapiens
  misc_RNA (1)...(19): siRNA sense strand
gaaggagugcuaccugaac

SEQ ID NO: 824926 - RNA, 19 nt, Homo sapiens
  misc_RNA (1)...(19): siRNA sense strand
acgggaaccugcuggaaug

SEQ ID NO: 824927 - RNA, 19 nt, Homo sapiens
  misc_RNA (1)...(19): siRNA sense strand
caucgacgagugcauguug

SEQ ID NO: 824928 - RNA, 19 nt, Homo sapiens
  misc_RNA (1)...(19): siRNA sense strand
guucugcgacagcguauug

SEQ ID NO: 824929 - RNA, 19 nt, Homo sapiens
  misc_RNA (1)...(19): siRNA sense strand
caacuuucccggucacuac

SEQ ID NO: 824930 - RNA, 19 nt, Homo sapiens
  misc_RNA (1)...(19): siRNA sense strand
uaccugaacuucgaugaca

SEQ ID NO: 824931 - RNA, 19 nt, Homo sapiens
  misc_RNA (1)...(19): siRNA sense strand
gauggcaaaugcgagaaca

SEQ ID NO: 824932 - RNA, 19 nt, Homo sapiens
  misc_RNA (1)...(19): siRNA sense strand
ccaccuggccauaguuuag

SEQ ID NO: 824933 - RNA, 19 nt, Homo sapiens
  misc_RNA (1)...(19): siRNA sense strand
cuacagcucagccgaguuc

SEQ ID NO: 824934 - RNA, 19 nt, Homo sapiens
  misc_RNA (1)...(19): siRNA sense strand
acugaugagugccgacuga

SEQ ID NO: 824935 - RNA, 19 nt, Homo sapiens
  misc_RNA (1)...(19): siRNA sense strand
accagacgcucaccauuca

SEQ ID NO: 824936 - RNA, 19 nt, Homo sapiens
  misc_RNA (1)...(19): siRNA sense strand
aggagaagagccuguguuu

SEQ ID NO: 824937 - RNA, 19 nt, Homo sapiens
  misc_RNA (1)...(19): siRNA sense strand
caccagacgcucaccauuc

SEQ ID NO: 824938 - RNA, 19 nt, Homo sapiens
  misc_RNA (1)...(19): siRNA sense strand
gacgggaaccugcuggaau

SEQ ID NO: 824939 - RNA, 19 nt, Homo sapiens
  misc_RNA (1)...(19): siRNA sense strand
gugacugcaucaauaccaa

SEQ ID NO: 824940 - RNA, 19 nt, Homo sapiens
  misc_RNA (1)...(19): siRNA sense strand
ucaacaacccuggcuccua

SEQ ID NO: 824941 - RNA, 19 nt, Homo sapiens
  misc_RNA (1)...(19): siRNA sense strand
ggaggauucagacgagugu

SEQ ID NO: 824942 - RNA, 19 nt, Homo sapiens
  misc_RNA (1)...(19): siRNA sense strand
cccaagagaugaggacagu

SEQ ID NO: 824943 - RNA, 19 nt, Homo sapiens
  misc_RNA (1)...(19): siRNA sense strand
gcgacucuguggccagcaa

SEQ ID NO: 824944 - RNA, 19 nt, Homo sapiens
  misc_RNA (1)...(19): siRNA sense strand
aauggcaucugcagcaaca

SEQ ID NO: 824945 - RNA, 19 nt, Homo sapiens
  misc_RNA (1)...(19): siRNA sense strand
gcugguuccugccggacuu

SEQ ID NO: 824946 - RNA, 19 nt, Homo sapiens
  misc_RNA (1)...(19): siRNA sense strand
ggagaagagccuguguuuc

SEQ ID NO: 824947 - RNA, 19 nt, Homo sapiens
  misc_RNA (1)...(19): siRNA sense strand
ucagggcuccuaugugugu

SEQ ID NO: 824948 - RNA, 19 nt, Homo sapiens
  misc_RNA (1)...(19): siRNA sense strand
ggagugcuaccugaacuuc

SEQ ID NO: 824949 - RNA, 19 nt, Homo sapiens
  misc_RNA (1)...(19): siRNA sense strand
acagaucucagcagaagug

SEQ ID NO: 824950 - RNA, 19 nt, Homo sapiens
  misc_RNA (1)...(19): siRNA sense strand
ugaaugugcgcguccauca

SEQ ID NO: 824951 - RNA, 19 nt, Homo sapiens
  misc_RNA (1)...(19): siRNA sense strand
caggugcaccgcauugaga

SEQ ID NO: 824952 - RNA, 19 nt, Homo sapiens
  misc_RNA (1)...(19): siRNA sense strand
gagggcaagugcgugaaca

SEQ ID NO: 824953 - RNA, 19 nt, Homo sapiens
  misc_RNA (1)...(19): siRNA sense strand
gcgaaaccagugccugugu

SEQ ID NO: 824954 - RNA, 19 nt, Homo sapiens
  misc_RNA (1)...(19): siRNA sense strand
ccaauggcuccuacagaug

SEQ ID NO: 824955 - RNA, 19 nt, Homo sapiens
  misc_RNA (1)...(19): siRNA sense strand
ccaccagacgcucaccauu

SEQ ID NO: 824956 - RNA, 19 nt, Homo sapiens
  misc_RNA (1)...(19): siRNA sense strand
gcuucaagguggucuuugc

SEQ ID NO: 824957 - RNA, 19 nt, Homo sapiens
  misc_RNA (1)...(19): siRNA sense strand
gggcgaccacugcgaaauc

SEQ ID NO: 824958 - RNA, 19 nt, Homo sapiens
  misc_RNA (1)...(19): siRNA sense strand
gaaccuucagggcuccuau

SEQ ID NO: 824959 - RNA, 19 nt, Homo sapiens
  misc_RNA (1)...(19): siRNA sense strand
ccacugcgaggacauugau

SEQ ID NO: 824960 - RNA, 19 nt, Homo sapiens
  misc_RNA (1)...(19): siRNA sense strand
ucagggcgagagugacuuu

SEQ ID NO: 824961 - RNA, 19 nt, Homo sapiens
  misc_RNA (1)...(19): siRNA sense strand
ggacaguucagaggaggau

SEQ ID NO: 824962 - RNA, 19 nt, Homo sapiens
  misc_RNA (1)...(19): siRNA sense strand
gcuacacccaggacaacaa

SEQ ID NO: 824963 - RNA, 19 nt, Homo sapiens
  misc_RNA (1)...(19): siRNA sense strand
acaauggcaucugcagcaa

SEQ ID NO: 824964 - RNA, 19 nt, Homo sapiens
  misc_RNA (1)...(19): siRNA sense strand
gcaccgcuacugcguggau

SEQ ID NO: 824965 - RNA, 19 nt, Homo sapiens
  misc_RNA (1)...(19): siRNA sense strand
ccgcugcguucaaggagau

SEQ ID NO: 824966 - RNA, 19 nt, Homo sapiens
  misc_RNA (1)...(19): siRNA sense strand
guacacaggagugcagaag

SEQ ID NO: 824967 - RNA, 19 nt, Homo sapiens
  misc_RNA (1)...(19): siRNA sense strand
cggcuucugcaucaacuuu

SEQ ID NO: 824968 - RNA, 19 nt, Homo sapiens
  misc_RNA (1)...(19): siRNA sense strand
gcgcuucaagguggucuuu

SEQ ID NO: 824969 - RNA, 19 nt, Homo sapiens
  misc_RNA (1)...(19): siRNA sense strand
ccauucagggcgagaguga

SEQ ID NO: 824970 - RNA, 19 nt, Homo sapiens
  misc_RNA (1)...(19): siRNA sense strand
caagcggaccugucucaag

SEQ ID NO: 824971 - RNA, 19 nt, Homo sapiens
  misc_RNA (1)...(19): siRNA sense strand
gcccaccuggccauaguuu

SEQ ID NO: 824972 - RNA, 19 nt, Homo sapiens
  misc_RNA (1)...(19): siRNA sense strand
ggaagggauaccacauucu

SEQ ID NO: 824973 - RNA, 19 nt, Homo sapiens
  misc_RNA (1)...(19): siRNA sense strand
cagcaacacgccaggaucu

SEQ ID NO: 824974 - RNA, 19 nt, Homo sapiens
  misc_RNA (1)...(19): siRNA sense strand
agaaggagugcuaccugaa

SEQ ID NO: 824975 - RNA, 19 nt, Homo sapiens
  misc_RNA (1)...(19): siRNA sense strand
gcaggaaaugccaagacau

SEQ ID NO: 824976 - RNA, 19 nt, Homo sapiens
  misc_RNA (1)...(19): siRNA sense strand
gugccucucuggcuaccau

SEQ ID NO: 824977 - RNA, 19 nt, Homo sapiens
  misc_RNA (1)...(19): siRNA sense strand
gaaauaugcuuuacaguca

SEQ ID NO: 824978 - RNA, 19 nt, Homo sapiens
  misc_RNA (1)...(19): siRNA sense strand
ugaaagaucuucucaugaa

SEQ ID NO: 824979 - RNA, 19 nt, Homo sapiens
  misc_RNA (1)...(19): siRNA sense strand
ugauaaagauguucgcuua

SEQ ID NO: 824980 - RNA, 19 nt, Homo sapiens
  misc_RNA (1)...(19): siRNA sense strand
gaacggaucuuugcucaau

SEQ ID NO: 824981 - RNA, 19 nt, Homo sapiens
  misc_RNA (1)...(19): siRNA sense strand
gaugaaugcuaucaaguaa

SEQ ID NO: 824982 - RNA, 19 nt, Homo sapiens
  misc_RNA (1)...(19): siRNA sense strand
gaaauuugcuagccauugu

SEQ ID NO: 824983 - RNA, 19 nt, Homo sapiens
  misc_RNA (1)...(19): siRNA sense strand
ggauuuaaaugcugugaaa

SEQ ID NO: 824984 - RNA, 19 nt, Homo sapiens
  misc_RNA (1)...(19): siRNA sense strand
guuagaagaugaugagaaa

SEQ ID NO: 824985 - RNA, 19 nt, Homo sapiens
  misc_RNA (1)...(19): siRNA sense strand
gaagaaagacaaaguggaa

SEQ ID NO: 824986 - RNA, 19 nt, Homo sapiens
  misc_RNA (1)...(19): siRNA sense strand
caugaaccauccugauuua

SEQ ID NO: 824987 - RNA, 19 nt, Homo sapiens
  misc_RNA (1)...(19): siRNA sense strand
gaacuucuaccuuaagauu

SEQ ID NO: 824988 - RNA, 19 nt, Homo sapiens
  misc_RNA (1)...(19): siRNA sense strand
gaucuuugcucaauacaug

SEQ ID NO: 824989 - RNA, 19 nt, Homo sapiens
  misc_RNA (1)...(19): siRNA sense strand
ggacuugcccaaauuuaua

SEQ ID NO: 824990 - RNA, 19 nt, Homo sapiens
  misc_RNA (1)...(19): siRNA sense strand
gauuaaagaugguugugaa

SEQ ID NO: 824991 - RNA, 19 nt, Homo sapiens
  misc_RNA (1)...(19): siRNA sense strand
gaacaaaucaauagaugga

SEQ ID NO: 824992 - RNA, 19 nt, Homo sapiens
  misc_RNA (1)...(19): siRNA sense strand
gcuauugagccauauauua

SEQ ID NO: 824993 - RNA, 19 nt, Homo sapiens
  misc_RNA (1)...(19): siRNA sense strand
aaaccuagcuuuacaucuu

SEQ ID NO: 824994 - RNA, 19 nt, Homo sapiens
  misc_RNA (1)...(19): siRNA sense strand
gaucaaagacaaauugcua

SEQ ID NO: 824995 - RNA, 19 nt, Homo sapiens
  misc_RNA (1)...(19): siRNA sense strand
ggucaagucauauaacaua

SEQ ID NO: 824996 - RNA, 19 nt, Homo sapiens
  misc_RNA (1)...(19): siRNA sense strand
gaccuuaugagcucuauua

SEQ ID NO: 824997 - RNA, 19 nt, Homo sapiens
  misc_RNA (1)...(19): siRNA sense strand
gaaagacaaaguggaaaua

SEQ ID NO: 824998 - RNA, 19 nt, Homo sapiens
  misc_RNA (1)...(19): siRNA sense strand
ccaaauaugccauucauug

SEQ ID NO: 824999 - RNA, 19 nt, Homo sapiens
  misc_RNA (1)...(19): siRNA sense strand
caacaauauugcauaguga

SEQ ID NO: 825000 - RNA, 19 nt, Homo sapiens
  misc_RNA (1)...(19): siRNA sense strand
aaacaucuaucagcgauuu

SEQ ID NO: 825001 - RNA, 19 nt, Homo sapiens
  misc_RNA (1)...(19): siRNA sense strand
agacgacucugaucuugua

SEQ ID NO: 825002 - RNA, 19 nt, Homo sapiens
  misc_RNA (1)...(19): siRNA sense strand
gacaagaauuucaguaaca

SEQ ID NO: 825003 - RNA, 19 nt, Homo sapiens
  misc_RNA (1)...(19): siRNA sense strand
gcaugcagcuguuagugaa

SEQ ID NO: 825004 - RNA, 19 nt, Homo sapiens
  misc_RNA (1)...(19): siRNA sense strand
gaagcugcacuacaaauuu

SEQ ID NO: 825005 - RNA, 19 nt, Homo sapiens
  misc_RNA (1)...(19): siRNA sense strand
ccaggacucugaagaagaa

SEQ ID NO: 825006 - RNA, 19 nt, Homo sapiens
  misc_RNA (1)...(19): siRNA sense strand
caugguuccucacaauuua

SEQ ID NO: 825007 - RNA, 19 nt, Homo sapiens
  misc_RNA (1)...(19): siRNA sense strand
gcauagugauggagacuug

SEQ ID NO: 825008 - RNA, 19 nt, Homo sapiens
  misc_RNA (1)...(19): siRNA sense strand
ugaaugcuaucaaguaaga

SEQ ID NO: 825009 - RNA, 19 nt, Homo sapiens
  misc_RNA (1)...(19): siRNA sense strand
ggaggaagaagaagaaaga

SEQ ID NO: 825010 - RNA, 19 nt, Homo sapiens
  misc_RNA (1)...(19): siRNA sense strand
gcaauugaauccacacagu

SEQ ID NO: 825011 - RNA, 19 nt, Homo sapiens
  misc_RNA (1)...(19): siRNA sense strand
gaggagcgccuacaaguug

SEQ ID NO: 825012 - RNA, 19 nt, Homo sapiens
  misc_RNA (1)...(19): siRNA sense strand
gaaagaucuucucaugaau

SEQ ID NO: 825013 - RNA, 19 nt, Homo sapiens
  misc_RNA (1)...(19): siRNA sense strand
gaacagcagaugaugaaga

SEQ ID NO: 825014 - RNA, 19 nt, Homo sapiens
  misc_RNA (1)...(19): siRNA sense strand
gacaucaaguaaaggauuu

SEQ ID NO: 825015 - RNA, 19 nt, Homo sapiens
  misc_RNA (1)...(19): siRNA sense strand
ggucaaugaucacuuacuu

SEQ ID NO: 825016 - RNA, 19 nt, Homo sapiens
  misc_RNA (1)...(19): siRNA sense strand
gaaccauccugauuuagca

SEQ ID NO: 825017 - RNA, 19 nt, Homo sapiens
  misc_RNA (1)...(19): siRNA sense strand
uaaacaagcaagcauauga

SEQ ID NO: 825018 - RNA, 19 nt, Homo sapiens
  misc_RNA (1)...(19): siRNA sense strand
gaacagaaguccaaaagca

SEQ ID NO: 825019 - RNA, 19 nt, Homo sapiens
  misc_RNA (1)...(19): siRNA sense strand
ggaagaagaagaaagacaa

SEQ ID NO: 825020 - RNA, 19 nt, Homo sapiens
  misc_RNA (1)...(19): siRNA sense strand
uaucaacgaugaaugcuau

SEQ ID NO: 825021 - RNA, 19 nt, Homo sapiens
  misc_RNA (1)...(19): siRNA sense strand
cggaugaaaugcuuauauu

SEQ ID NO: 825022 - RNA, 19 nt, Homo sapiens
  misc_RNA (1)...(19): siRNA sense strand
gaugaucgacuacuuguug

SEQ ID NO: 825023 - RNA, 19 nt, Homo sapiens
  misc_RNA (1)...(19): siRNA sense strand
gaauuucaguaacaccaaa

SEQ ID NO: 825024 - RNA, 19 nt, Homo sapiens
  misc_RNA (1)...(19): siRNA sense strand
guuagaagauagcaaugaa

SEQ ID NO: 825025 - RNA, 19 nt, Homo sapiens
  misc_RNA (1)...(19): siRNA sense strand
ucaauuugcugcuccuuug

SEQ ID NO: 825026 - RNA, 19 nt, Homo sapiens
  misc_RNA (1)...(19): siRNA sense strand
gaaucuaucagugcucuua

SEQ ID NO: 825027 - RNA, 19 nt, Homo sapiens
  misc_RNA (1)...(19): siRNA sense strand
uaaaggauuugcuugacuu

SEQ ID NO: 825028 - RNA, 19 nt, Homo sapiens
  misc_RNA (1)...(19): siRNA sense strand
ugaaugaaauguggaaaug

SEQ ID NO: 825029 - RNA, 19 nt, Homo sapiens
  misc_RNA (1)...(19): siRNA sense strand
caagcaagcauaugauuug

SEQ ID NO: 825030 - RNA, 19 nt, Homo sapiens
  misc_RNA (1)...(19): siRNA sense strand
gcaguuagaaguacuuguu

SEQ ID NO: 825031 - RNA, 19 nt, Homo sapiens
  misc_RNA (1)...(19): siRNA sense strand
gcaagcagcagcucaaauc

SEQ ID NO: 825032 - RNA, 19 nt, Homo sapiens
  misc_RNA (1)...(19): siRNA sense strand
gaacaucucauaacaccau

SEQ ID NO: 825033 - RNA, 19 nt, Homo sapiens
  misc_RNA (1)...(19): siRNA sense strand
caucccaucucauuucauu

SEQ ID NO: 825034 - RNA, 19 nt, Homo sapiens
  misc_RNA (1)...(19): siRNA sense strand
gugaacaaaucaauagaug

SEQ ID NO: 825035 - RNA, 19 nt, Homo sapiens
  misc_RNA (1)...(19): siRNA sense strand
ucagugcucuuauuaaaca

SEQ ID NO: 825036 - RNA, 19 nt, Homo sapiens
  misc_RNA (1)...(19): siRNA sense strand
gaaaguccauaugcacaug

SEQ ID NO: 825037 - RNA, 19 nt, Homo sapiens
  misc_RNA (1)...(19): siRNA sense strand
gaagaagaagaaagacaaa

SEQ ID NO: 825038 - RNA, 19 nt, Homo sapiens
  misc_RNA (1)...(19): siRNA sense strand
cacaaugucuucaccuuug

SEQ ID NO: 825039 - RNA, 19 nt, Homo sapiens
  misc_RNA (1)...(19): siRNA sense strand
gaaugucuuugguuuguuc

SEQ ID NO: 825040 - RNA, 19 nt, Homo sapiens
  misc_RNA (1)...(19): siRNA sense strand
uaagaaagcaguuagaagu

SEQ ID NO: 825041 - RNA, 19 nt, Homo sapiens
  misc_RNA (1)...(19): siRNA sense strand
gacaaacgauggagaguac

SEQ ID NO: 825042 - RNA, 19 nt, Homo sapiens
  misc_RNA (1)...(19): siRNA sense strand
ggagauggugagacgauua

SEQ ID NO: 825043 - RNA, 19 nt, Homo sapiens
  misc_RNA (1)...(19): siRNA sense strand
guagcuacuuucauuguga

SEQ ID NO: 825044 - RNA, 19 nt, Homo sapiens
  misc_RNA (1)...(19): siRNA sense strand
gaagaagaaagacaaagug

SEQ ID NO: 825045 - RNA, 19 nt, Homo sapiens
  misc_RNA (1)...(19): siRNA sense strand
gaggagaaauuagguaugg

SEQ ID NO: 825046 - RNA, 19 nt, Homo sapiens
  misc_RNA (1)...(19): siRNA sense strand
caagcaaucucagaccaaa

SEQ ID NO: 825047 - RNA, 19 nt, Homo sapiens
  misc_RNA (1)...(19): siRNA sense strand
ugucaaagaguacuacaua

SEQ ID NO: 825048 - RNA, 19 nt, Homo sapiens
  misc_RNA (1)...(19): siRNA sense strand
gagagaagagcucaugcua

SEQ ID NO: 825049 - RNA, 19 nt, Homo sapiens
  misc_RNA (1)...(19): siRNA sense strand
gcaaaagacuuaacagagu

SEQ ID NO: 825050 - RNA, 19 nt, Homo sapiens
  misc_RNA (1)...(19): siRNA sense strand
gaaauuagguauggaugac

SEQ ID NO: 825051 - RNA, 19 nt, Homo sapiens
  misc_RNA (1)...(19): siRNA sense strand
caaaguacaggauauugaa

SEQ ID NO: 825052 - RNA, 19 nt, Homo sapiens
  misc_RNA (1)...(19): siRNA sense strand
gcacaugacccagauuaug

SEQ ID NO: 825053 - RNA, 19 nt, Homo sapiens
  misc_RNA (1)...(19): siRNA sense strand
ugugaaagaucuucucaug

SEQ ID NO: 825054 - RNA, 19 nt, Homo sapiens
  misc_RNA (1)...(19): siRNA sense strand
caucagagcaggucuugaa

SEQ ID NO: 825055 - RNA, 19 nt, Homo sapiens
  misc_RNA (1)...(19): siRNA sense strand
gcucaggauuucaugaaga

SEQ ID NO: 825056 - RNA, 19 nt, Homo sapiens
  misc_RNA (1)...(19): siRNA sense strand
ggauuugcuugacuugauu

SEQ ID NO: 825057 - RNA, 19 nt, Homo sapiens
  misc_RNA (1)...(19): siRNA sense strand
cuacagaacggaugaaaug

SEQ ID NO: 825058 - RNA, 19 nt, Homo sapiens
  misc_RNA (1)...(19): siRNA sense strand
uagcauggaucaaagacaa

SEQ ID NO: 825059 - RNA, 19 nt, Homo sapiens
  misc_RNA (1)...(19): siRNA sense strand
ggaccaggacucugaagaa

SEQ ID NO: 825060 - RNA, 19 nt, Homo sapiens
  misc_RNA (1)...(19): siRNA sense strand
gaccaaaucaucacgaaug

SEQ ID NO: 825061 - RNA, 19 nt, Homo sapiens
  misc_RNA (1)...(19): siRNA sense strand
ucaggaacuucuaccuuaa

SEQ ID NO: 825062 - RNA, 19 nt, Homo sapiens
  misc_RNA (1)...(19): siRNA sense strand
caaccuggaacaucucaua

SEQ ID NO: 825063 - RNA, 19 nt, Homo sapiens
  misc_RNA (1)...(19): siRNA sense strand
caagcaaccuggaacaucu

SEQ ID NO: 825064 - RNA, 19 nt, Homo sapiens
  misc_RNA (1)...(19): siRNA sense strand
gaaauguggaaaugucaaa

SEQ ID NO: 825065 - RNA, 19 nt, Homo sapiens
  misc_RNA (1)...(19): siRNA sense strand
caaaucaucacgaauggaa

SEQ ID NO: 825066 - RNA, 19 nt, Homo sapiens
  misc_RNA (1)...(19): siRNA sense strand
ucuaggagcuguuaacaag

SEQ ID NO: 825067 - RNA, 19 nt, Homo sapiens
  misc_RNA (1)...(19): siRNA sense strand
ucagaaagaugguagaaaa

SEQ ID NO: 825068 - RNA, 19 nt, Homo sapiens
  misc_RNA (1)...(19): siRNA sense strand
caaagacuaggaccaauga

SEQ ID NO: 825069 - RNA, 19 nt, Homo sapiens
  misc_RNA (1)...(19): siRNA sense strand
gaaaucaucacauuagaac

SEQ ID NO: 825070 - RNA, 19 nt, Homo sapiens
  misc_RNA (1)...(19): siRNA sense strand
gguuccagaugaagaagua

SEQ ID NO: 825071 - RNA, 19 nt, Homo sapiens
  misc_RNA (1)...(19): siRNA sense strand
ucaagcauccugauaaaga

SEQ ID NO: 825072 - RNA, 19 nt, Homo sapiens
  misc_RNA (1)...(19): siRNA sense strand
gaacggaugaaaugcuuau

SEQ ID NO: 825073 - RNA, 19 nt, Homo sapiens
  misc_RNA (1)...(19): siRNA sense strand
uaacaagccacuuucauca

SEQ ID NO: 825074 - RNA, 19 nt, Homo sapiens
  misc_RNA (1)...(19): siRNA sense strand
ucaaguaagacaaguguuu

SEQ ID NO: 825075 - RNA, 19 nt, Homo sapiens
  misc_RNA (1)...(19): siRNA sense strand
ccuugcaccugaucaauuu

SEQ ID NO: 825076 - RNA, 19 nt, Homo sapiens
  misc_RNA (1)...(19): siRNA sense strand
caagcaggcugaagguugu

SEQ ID NO: 825077 - RNA, 19 nt, Homo sapiens
  misc_RNA (1)...(19): siRNA sense strand
gaaauaugcuuuacaguca

SEQ ID NO: 825078 - RNA, 19 nt, Homo sapiens
  misc_RNA (1)...(19): siRNA sense strand
ugaaagaucuucucaugaa

SEQ ID NO: 825079 - RNA, 19 nt, Homo sapiens
  misc_RNA (1)...(19): siRNA sense strand
ugauaaagauguucgcuua

SEQ ID NO: 825080 - RNA, 19 nt, Homo sapiens
  misc_RNA (1)...(19): siRNA sense strand
gaacggaucuuugcucaau

SEQ ID NO: 825081 - RNA, 19 nt, Homo sapiens
  misc_RNA (1)...(19): siRNA sense strand
gaugaaugcuaucaaguaa

SEQ ID NO: 825082 - RNA, 19 nt, Homo sapiens
  misc_RNA (1)...(19): siRNA sense strand
gaaauuugcuagccauugu

SEQ ID NO: 825083 - RNA, 19 nt, Homo sapiens
  misc_RNA (1)...(19): siRNA sense strand
ggauuuaaaugcugugaaa

SEQ ID NO: 825084 - RNA, 19 nt, Homo sapiens
  misc_RNA (1)...(19): siRNA sense strand
guuagaagaugaugagaaa

SEQ ID NO: 825085 - RNA, 19 nt, Homo sapiens
  misc_RNA (1)...(19): siRNA sense strand
gaagaaagacaaaguggaa

SEQ ID NO: 825086 - RNA, 19 nt, Homo sapiens
  misc_RNA (1)...(19): siRNA sense strand
caugaaccauccugauuua

SEQ ID NO: 825087 - RNA, 19 nt, Homo sapiens
  misc_RNA (1)...(19): siRNA sense strand
gaacuucuaccuuaagauu

SEQ ID NO: 825088 - RNA, 19 nt, Homo sapiens
  misc_RNA (1)...(19): siRNA sense strand
gaucuuugcucaauacaug

SEQ ID NO: 825089 - RNA, 19 nt, Homo sapiens
  misc_RNA (1)...(19): siRNA sense strand
ggacuugcccaaauuuaua

SEQ ID NO: 825090 - RNA, 19 nt, Homo sapiens
  misc_RNA (1)...(19): siRNA sense strand
gauuaaagaugguugugaa

SEQ ID NO: 825091 - RNA, 19 nt, Homo sapiens
  misc_RNA (1)...(19): siRNA sense strand
gaacaaaucaauagaugga

SEQ ID NO: 825092 - RNA, 19 nt, Homo sapiens
  misc_RNA (1)...(19): siRNA sense strand
gcuauugagccauauauua

SEQ ID NO: 825093 - RNA, 19 nt, Homo sapiens
  misc_RNA (1)...(19): siRNA sense strand
aaaccuagcuuuacaucuu

SEQ ID NO: 825094 - RNA, 19 nt, Homo sapiens
  misc_RNA (1)...(19): siRNA sense strand
gaucaaagacaaauugcua

SEQ ID NO: 825095 - RNA, 19 nt, Homo sapiens
  misc_RNA (1)...(19): siRNA sense strand
ggucaagucauauaacaua

SEQ ID NO: 825096 - RNA, 19 nt, Homo sapiens
  misc_RNA (1)...(19): siRNA sense strand
gaccuuaugagcucuauua

SEQ ID NO: 825097 - RNA, 19 nt, Homo sapiens
  misc_RNA (1)...(19): siRNA sense strand
gaaagacaaaguggaaaua

SEQ ID NO: 825098 - RNA, 19 nt, Homo sapiens
  misc_RNA (1)...(19): siRNA sense strand
ccaaauaugccauucauug

SEQ ID NO: 825099 - RNA, 19 nt, Homo sapiens
  misc_RNA (1)...(19): siRNA sense strand
caacaauauugcauaguga

SEQ ID NO: 825100 - RNA, 19 nt, Homo sapiens
  misc_RNA (1)...(19): siRNA sense strand
aaacaucuaucagcgauuu

SEQ ID NO: 825101 - RNA, 19 nt, Homo sapiens
  misc_RNA (1)...(19): siRNA sense strand
agacgacucugaucuugua

SEQ ID NO: 825102 - RNA, 19 nt, Homo sapiens
  misc_RNA (1)...(19): siRNA sense strand
gacaagaauuucaguaaca

SEQ ID NO: 825103 - RNA, 19 nt, Homo sapiens
  misc_RNA (1)...(19): siRNA sense strand
gcaugcagcuguuagugaa

SEQ ID NO: 825104 - RNA, 19 nt, Homo sapiens
  misc_RNA (1)...(19): siRNA sense strand
gaagcugcacuacaaauuu

SEQ ID NO: 825105 - RNA, 19 nt, Homo sapiens
  misc_RNA (1)...(19): siRNA sense strand
ccaggacucugaagaagaa

SEQ ID NO: 825106 - RNA, 19 nt, Homo sapiens
  misc_RNA (1)...(19): siRNA sense strand
caugguuccucacaauuua

SEQ ID NO: 825107 - RNA, 19 nt, Homo sapiens
  misc_RNA (1)...(19): siRNA sense strand
gcauagugauggagacuug

SEQ ID NO: 825108 - RNA, 19 nt, Homo sapiens
  misc_RNA (1)...(19): siRNA sense strand
ugaaugcuaucaaguaaga

SEQ ID NO: 825109 - RNA, 19 nt, Homo sapiens
  misc_RNA (1)...(19): siRNA sense strand
ggaggaagaagaagaaaga

SEQ ID NO: 825110 - RNA, 19 nt, Homo sapiens
  misc_RNA (1)...(19): siRNA sense strand
gcaauugaauccacacagu

SEQ ID NO: 825111 - RNA, 19 nt, Homo sapiens
  misc_RNA (1)...(19): siRNA sense strand
gaggagcgccuacaaguug

SEQ ID NO: 825112 - RNA, 19 nt, Homo sapiens
  misc_RNA (1)...(19): siRNA sense strand
gaaagaucuucucaugaau

SEQ ID NO: 825113 - RNA, 19 nt, Homo sapiens
  misc_RNA (1)...(19): siRNA sense strand
gaacagcagaugaugaaga

SEQ ID NO: 825114 - RNA, 19 nt, Homo sapiens
  misc_RNA (1)...(19): siRNA sense strand
gacaucaaguaaaggauuu

SEQ ID NO: 825115 - RNA, 19 nt, Homo sapiens
  misc_RNA (1)...(19): siRNA sense strand
ggucaaugaucacuuacuu

SEQ ID NO: 825116 - RNA, 19 nt, Homo sapiens
  misc_RNA (1)...(19): siRNA sense strand
gaaccauccugauuuagca

SEQ ID NO: 825117 - RNA, 19 nt, Homo sapiens
  misc_RNA (1)...(19): siRNA sense strand
uaaacaagcaagcauauga

SEQ ID NO: 825118 - RNA, 19 nt, Homo sapiens
  misc_RNA (1)...(19): siRNA sense strand
gaacagaaguccaaaagca

SEQ ID NO: 825119 - RNA, 19 nt, Homo sapiens
  misc_RNA (1)...(19): siRNA sense strand
ggaagaagaagaaagacaa

SEQ ID NO: 825120 - RNA, 19 nt, Homo sapiens
  misc_RNA (1)...(19): siRNA sense strand
uaucaacgaugaaugcuau

SEQ ID NO: 825121 - RNA, 19 nt, Homo sapiens
  misc_RNA (1)...(19): siRNA sense strand
cggaugaaaugcuuauauu

SEQ ID NO: 825122 - RNA, 19 nt, Homo sapiens
  misc_RNA (1)...(19): siRNA sense strand
gaugaucgacuacuuguug

SEQ ID NO: 825123 - RNA, 19 nt, Homo sapiens
  misc_RNA (1)...(19): siRNA sense strand
gaauuucaguaacaccaaa

SEQ ID NO: 825124 - RNA, 19 nt, Homo sapiens
  misc_RNA (1)...(19): siRNA sense strand
guuagaagauagcaaugaa

SEQ ID NO: 825125 - RNA, 19 nt, Homo sapiens
  misc_RNA (1)...(19): siRNA sense strand
ucaauuugcugcuccuuug

SEQ ID NO: 825126 - RNA, 19 nt, Homo sapiens
  misc_RNA (1)...(19): siRNA sense strand
gaaucuaucagugcucuua

SEQ ID NO: 825127 - RNA, 19 nt, Homo sapiens
  misc_RNA (1)...(19): siRNA sense strand
uaaaggauuugcuugacuu

SEQ ID NO: 825128 - RNA, 19 nt, Homo sapiens
  misc_RNA (1)...(19): siRNA sense strand
ugaaugaaauguggaaaug

SEQ ID NO: 825129 - RNA, 19 nt, Homo sapiens
  misc_RNA (1)...(19): siRNA sense strand
caagcaagcauaugauuug

SEQ ID NO: 825130 - RNA, 19 nt, Homo sapiens
  misc_RNA (1)...(19): siRNA sense strand
gcaguuagaaguacuuguu

SEQ ID NO: 825131 - RNA, 19 nt, Homo sapiens
  misc_RNA (1)...(19): siRNA sense strand
gcaagcagcagcucaaauc

SEQ ID NO: 825132 - RNA, 19 nt, Homo sapiens
  misc_RNA (1)...(19): siRNA sense strand
gaacaucucauaacaccau

SEQ ID NO: 825133 - RNA, 19 nt, Homo sapiens
  misc_RNA (1)...(19): siRNA sense strand
caucccaucucauuucauu

SEQ ID NO: 825134 - RNA, 19 nt, Homo sapiens
  misc_RNA (1)...(19): siRNA sense strand
gugaacaaaucaauagaug

SEQ ID NO: 825135 - RNA, 19 nt, Homo sapiens
  misc_RNA (1)...(19): siRNA sense strand
ucagugcucuuauuaaaca

SEQ ID NO: 825136 - RNA, 19 nt, Homo sapiens
  misc_RNA (1)...(19): siRNA sense strand
gaaaguccauaugcacaug

SEQ ID NO: 825137 - RNA, 19 nt, Homo sapiens
  misc_RNA (1)...(19): siRNA sense strand
gaagaagaagaaagacaaa

SEQ ID NO: 825138 - RNA, 19 nt, Homo sapiens
  misc_RNA (1)...(19): siRNA sense strand
cacaaugucuucaccuuug

SEQ ID NO: 825139 - RNA, 19 nt, Homo sapiens
  misc_RNA (1)...(19): siRNA sense strand
gaaugucuuugguuuguuc

SEQ ID NO: 825140 - RNA, 19 nt, Homo sapiens
  misc_RNA (1)...(19): siRNA sense strand
uaagaaagcaguuagaagu

SEQ ID NO: 825141 - RNA, 19 nt, Homo sapiens
  misc_RNA (1)...(19): siRNA sense strand
gacaaacgauggagaguac

SEQ ID NO: 825142 - RNA, 19 nt, Homo sapiens
  misc_RNA (1)...(19): siRNA sense strand
ggagauggugagacgauua

SEQ ID NO: 825143 - RNA, 19 nt, Homo sapiens
  misc_RNA (1)...(19): siRNA sense strand
guagcuacuuucauuguga

SEQ ID NO: 825144 - RNA, 19 nt, Homo sapiens
  misc_RNA (1)...(19): siRNA sense strand
gaagaagaaagacaaagug

SEQ ID NO: 825145 - RNA, 19 nt, Homo sapiens
  misc_RNA (1)...(19): siRNA sense strand
gaggagaaauuagguaugg

SEQ ID NO: 825146 - RNA, 19 nt, Homo sapiens
  misc_RNA (1)...(19): siRNA sense strand
caagcaaucucagaccaaa

SEQ ID NO: 825147 - RNA, 19 nt, Homo sapiens
  misc_RNA (1)...(19): siRNA sense strand
ugucaaagaguacuacaua

SEQ ID NO: 825148 - RNA, 19 nt, Homo sapiens
  misc_RNA (1)...(19): siRNA sense strand
gagagaagagcucaugcua

SEQ ID NO: 825149 - RNA, 19 nt, Homo sapiens
  misc_RNA (1)...(19): siRNA sense strand
gcaaaagacuuaacagagu

SEQ ID NO: 825150 - RNA, 19 nt, Homo sapiens
  misc_RNA (1)...(19): siRNA sense strand
gaaauuagguauggaugac

SEQ ID NO: 825151 - RNA, 19 nt, Homo sapiens
  misc_RNA (1)...(19): siRNA sense strand
caaaguacaggauauugaa

SEQ ID NO: 825152 - RNA, 19 nt, Homo sapiens
  misc_RNA (1)...(19): siRNA sense strand
gcacaugacccagauuaug

SEQ ID NO: 825153 - RNA, 19 nt, Homo sapiens
  misc_RNA (1)...(19): siRNA sense strand
ugugaaagaucuucucaug

SEQ ID NO: 825154 - RNA, 19 nt, Homo sapiens
  misc_RNA (1)...(19): siRNA sense strand
caucagagcaggucuugaa

SEQ ID NO: 825155 - RNA, 19 nt, Homo sapiens
  misc_RNA (1)...(19): siRNA sense strand
gcucaggauuucaugaaga

SEQ ID NO: 825156 - RNA, 19 nt, Homo sapiens
  misc_RNA (1)...(19): siRNA sense strand
ggauuugcuugacuugauu

SEQ ID NO: 825157 - RNA, 19 nt, Homo sapiens
  misc_RNA (1)...(19): siRNA sense strand
cuacagaacggaugaaaug

SEQ ID NO: 825158 - RNA, 19 nt, Homo sapiens
  misc_RNA (1)...(19): siRNA sense strand
uagcauggaucaaagacaa

SEQ ID NO: 825159 - RNA, 19 nt, Homo sapiens
  misc_RNA (1)...(19): siRNA sense strand
ggaccaggacucugaagaa

SEQ ID NO: 825160 - RNA, 19 nt, Homo sapiens
  misc_RNA (1)...(19): siRNA sense strand
gaccaaaucaucacgaaug

SEQ ID NO: 825161 - RNA, 19 nt, Homo sapiens
  misc_RNA (1)...(19): siRNA sense strand
ucaggaacuucuaccuuaa

SEQ ID NO: 825162 - RNA, 19 nt, Homo sapiens
  misc_RNA (1)...(19): siRNA sense strand
caaccuggaacaucucaua

SEQ ID NO: 825163 - RNA, 19 nt, Homo sapiens
  misc_RNA (1)...(19): siRNA sense strand
caagcaaccuggaacaucu

SEQ ID NO: 825164 - RNA, 19 nt, Homo sapiens
  misc_RNA (1)...(19): siRNA sense strand
gaaauguggaaaugucaaa

SEQ ID NO: 825165 - RNA, 19 nt, Homo sapiens
  misc_RNA (1)...(19): siRNA sense strand
caaaucaucacgaauggaa

SEQ ID NO: 825166 - RNA, 19 nt, Homo sapiens
  misc_RNA (1)...(19): siRNA sense strand
ucuaggagcuguuaacaag

SEQ ID NO: 825167 - RNA, 19 nt, Homo sapiens
  misc_RNA (1)...(19): siRNA sense strand
ucagaaagaugguagaaaa

SEQ ID NO: 825168 - RNA, 19 nt, Homo sapiens
  misc_RNA (1)...(19): siRNA sense strand
caaagacuaggaccaauga

SEQ ID NO: 825169 - RNA, 19 nt, Homo sapiens
  misc_RNA (1)...(19): siRNA sense strand
gaaaucaucacauuagaac

SEQ ID NO: 825170 - RNA, 19 nt, Homo sapiens
  misc_RNA (1)...(19): siRNA sense strand
gguuccagaugaagaagua

SEQ ID NO: 825171 - RNA, 19 nt, Homo sapiens
  misc_RNA (1)...(19): siRNA sense strand
ucaagcauccugauaaaga

SEQ ID NO: 825172 - RNA, 19 nt, Homo sapiens
  misc_RNA (1)...(19): siRNA sense strand
gaacggaugaaaugcuuau

SEQ ID NO: 825173 - RNA, 19 nt, Homo sapiens
  misc_RNA (1)...(19): siRNA sense strand
uaacaagccacuuucauca

SEQ ID NO: 825174 - RNA, 19 nt, Homo sapiens
  misc_RNA (1)...(19): siRNA sense strand
ucaaguaagacaaguguuu

SEQ ID NO: 825175 - RNA, 19 nt, Homo sapiens
  misc_RNA (1)...(19): siRNA sense strand
ccuugcaccugaucaauuu

SEQ ID NO: 825176 - RNA, 19 nt, Homo sapiens
  misc_RNA (1)...(19): siRNA sense strand
caagcaggcugaagguugu

SEQ ID NO: 825177 - RNA, 19 nt, Homo sapiens
  misc_RNA (1)...(19): siRNA sense strand
gaaaauggcucucuggaaa

SEQ ID NO: 825178 - RNA, 19 nt, Homo sapiens
  misc_RNA (1)...(19): siRNA sense strand
gaagaacggccaacucaaa

SEQ ID NO: 825179 - RNA, 19 nt, Homo sapiens
  misc_RNA (1)...(19): siRNA sense strand
gaucacaguuccaucauca

SEQ ID NO: 825180 - RNA, 19 nt, Homo sapiens
  misc_RNA (1)...(19): siRNA sense strand
uaagaaaucucaugaacag

SEQ ID NO: 825181 - RNA, 19 nt, Homo sapiens
  misc_RNA (1)...(19): siRNA sense strand
gaaaugcccagcagccaua

SEQ ID NO: 825182 - RNA, 19 nt, Homo sapiens
  misc_RNA (1)...(19): siRNA sense strand
cacuuuagauggcuauuua

SEQ ID NO: 825183 - RNA, 19 nt, Homo sapiens
  misc_RNA (1)...(19): siRNA sense strand
gaccaaguauccagaagaa

SEQ ID NO: 825184 - RNA, 19 nt, Homo sapiens
  misc_RNA (1)...(19): siRNA sense strand
gagcagagcaucccugaga

SEQ ID NO: 825185 - RNA, 19 nt, Homo sapiens
  misc_RNA (1)...(19): siRNA sense strand
caagaaggcugaggagaau

SEQ ID NO: 825186 - RNA, 19 nt, Homo sapiens
  misc_RNA (1)...(19): siRNA sense strand
gaacuggaccgccugagaa

SEQ ID NO: 825187 - RNA, 19 nt, Homo sapiens
  misc_RNA (1)...(19): siRNA sense strand
gcaccagacuccugacuuc

SEQ ID NO: 825188 - RNA, 19 nt, Homo sapiens
  misc_RNA (1)...(19): siRNA sense strand
aggcaaagcugaagccaaa

SEQ ID NO: 825189 - RNA, 19 nt, Homo sapiens
  misc_RNA (1)...(19): siRNA sense strand
cacacaagaugcuguauga

SEQ ID NO: 825190 - RNA, 19 nt, Homo sapiens
  misc_RNA (1)...(19): siRNA sense strand
gagcacacagacuuuaaua

SEQ ID NO: 825191 - RNA, 19 nt, Homo sapiens
  misc_RNA (1)...(19): siRNA sense strand
gacgucagcucgaaacaga

SEQ ID NO: 825192 - RNA, 19 nt, Homo sapiens
  misc_RNA (1)...(19): siRNA sense strand
gcagugguuugcugagaaa

SEQ ID NO: 825193 - RNA, 19 nt, Homo sapiens
  misc_RNA (1)...(19): siRNA sense strand
ccagagaggugcggaaaug

SEQ ID NO: 825194 - RNA, 19 nt, Homo sapiens
  misc_RNA (1)...(19): siRNA sense strand
caauuacgguucuaaauac

SEQ ID NO: 825195 - RNA, 19 nt, Homo sapiens
  misc_RNA (1)...(19): siRNA sense strand
gcucacagcaguucacaaa

SEQ ID NO: 825196 - RNA, 19 nt, Homo sapiens
  misc_RNA (1)...(19): siRNA sense strand
aagccgagcucugcuauuu

SEQ ID NO: 825197 - RNA, 19 nt, Homo sapiens
  misc_RNA (1)...(19): siRNA sense strand
acaagaugcuguaugaaga

SEQ ID NO: 825198 - RNA, 19 nt, Homo sapiens
  misc_RNA (1)...(19): siRNA sense strand
gcaggacuauuacaugaca

SEQ ID NO: 825199 - RNA, 19 nt, Homo sapiens
  misc_RNA (1)...(19): siRNA sense strand
gccgagcucugcuauuuga

SEQ ID NO: 825200 - RNA, 19 nt, Homo sapiens
  misc_RNA (1)...(19): siRNA sense strand
gcugagaccuugccugaag

SEQ ID NO: 825201 - RNA, 19 nt, Homo sapiens
  misc_RNA (1)...(19): siRNA sense strand
gcacagaaccccagcagua

SEQ ID NO: 825202 - RNA, 19 nt, Homo sapiens
  misc_RNA (1)...(19): siRNA sense strand
gcucuacacuggccaaugg

SEQ ID NO: 825203 - RNA, 19 nt, Homo sapiens
  misc_RNA (1)...(19): siRNA sense strand
gcagaaaucaucauuacca

SEQ ID NO: 825204 - RNA, 19 nt, Homo sapiens
  misc_RNA (1)...(19): siRNA sense strand
agaaauugauagcugguuu

SEQ ID NO: 825205 - RNA, 19 nt, Homo sapiens
  misc_RNA (1)...(19): siRNA sense strand
caaaugguacgaagacuau

SEQ ID NO: 825206 - RNA, 19 nt, Homo sapiens
  misc_RNA (1)...(19): siRNA sense strand
ccaagaaggcugaggagaa

SEQ ID NO: 825207 - RNA, 19 nt, Homo sapiens
  misc_RNA (1)...(19): siRNA sense strand
caccagcacuccugaccua

SEQ ID NO: 825208 - RNA, 19 nt, Homo sapiens
  misc_RNA (1)...(19): siRNA sense strand
caagcaaccaggacuauga

SEQ ID NO: 825209 - RNA, 19 nt, Homo sapiens
  misc_RNA (1)...(19): siRNA sense strand
ggagaucacaguuccauca

SEQ ID NO: 825210 - RNA, 19 nt, Homo sapiens
  misc_RNA (1)...(19): siRNA sense strand
gaagauaaugaaaggcaaa

SEQ ID NO: 825211 - RNA, 19 nt, Homo sapiens
  misc_RNA (1)...(19): siRNA sense strand
ccugagaagugaaaccaaa

SEQ ID NO: 825212 - RNA, 19 nt, Homo sapiens
  misc_RNA (1)...(19): siRNA sense strand
gaagaacagcucaagaucu

SEQ ID NO: 825213 - RNA, 19 nt, Homo sapiens
  misc_RNA (1)...(19): siRNA sense strand
gauagcagguacgcacuga

SEQ ID NO: 825214 - RNA, 19 nt, Homo sapiens
  misc_RNA (1)...(19): siRNA sense strand
gagggucacugaagccaau

SEQ ID NO: 825215 - RNA, 19 nt, Homo sapiens
  misc_RNA (1)...(19): siRNA sense strand
aagaacagcucaagaucug

SEQ ID NO: 825216 - RNA, 19 nt, Homo sapiens
  misc_RNA (1)...(19): siRNA sense strand
gaugaugagucaaacaaac

SEQ ID NO: 825217 - RNA, 19 nt, Homo sapiens
  misc_RNA (1)...(19): siRNA sense strand
gagcgaaguugaacaucuc

SEQ ID NO: 825218 - RNA, 19 nt, Homo sapiens
  misc_RNA (1)...(19): siRNA sense strand
gauugaggaugcccggaaa

SEQ ID NO: 825219 - RNA, 19 nt, Homo sapiens
  misc_RNA (1)...(19): siRNA sense strand
gggcuuuccuugcacaaug

SEQ ID NO: 825220 - RNA, 19 nt, Homo sapiens
  misc_RNA (1)...(19): siRNA sense strand
cuaagggucucuggugaaa

SEQ ID NO: 825221 - RNA, 19 nt, Homo sapiens
  misc_RNA (1)...(19): siRNA sense strand
gcugucgacuggagaaaug

SEQ ID NO: 825222 - RNA, 19 nt, Homo sapiens
  misc_RNA (1)...(19): siRNA sense strand
gcagugaggcagcacagaa

SEQ ID NO: 825223 - RNA, 19 nt, Homo sapiens
  misc_RNA (1)...(19): siRNA sense strand
gcagguacgcacugaagaa

SEQ ID NO: 825224 - RNA, 19 nt, Homo sapiens
  misc_RNA (1)...(19): siRNA sense strand
acaguuccaucaucauuga

SEQ ID NO: 825225 - RNA, 19 nt, Homo sapiens
  misc_RNA (1)...(19): siRNA sense strand
gauuucagaucccaugaca

SEQ ID NO: 825226 - RNA, 19 nt, Homo sapiens
  misc_RNA (1)...(19): siRNA sense strand
ucacagcaguucacaaagg

SEQ ID NO: 825227 - RNA, 19 nt, Homo sapiens
  misc_RNA (1)...(19): siRNA sense strand
cugcaggacuauuacauga

SEQ ID NO: 825228 - RNA, 19 nt, Homo sapiens
  misc_RNA (1)...(19): siRNA sense strand
aaacuccaaucaugaagau

SEQ ID NO: 825229 - RNA, 19 nt, Homo sapiens
  misc_RNA (1)...(19): siRNA sense strand
ggaugaggguggagaagag

SEQ ID NO: 825230 - RNA, 19 nt, Homo sapiens
  misc_RNA (1)...(19): siRNA sense strand
cagaagaacagcucaagau

SEQ ID NO: 825231 - RNA, 19 nt, Homo sapiens
  misc_RNA (1)...(19): siRNA sense strand
ugacaugacccaauuugug

SEQ ID NO: 825232 - RNA, 19 nt, Homo sapiens
  misc_RNA (1)...(19): siRNA sense strand
gaacggccaacucaaaugg

SEQ ID NO: 825233 - RNA, 19 nt, Homo sapiens
  misc_RNA (1)...(19): siRNA sense strand
ggauuuggccagugagcua

SEQ ID NO: 825234 - RNA, 19 nt, Homo sapiens
  misc_RNA (1)...(19): siRNA sense strand
cagaaaucaucauuaccaa

SEQ ID NO: 825235 - RNA, 19 nt, Homo sapiens
  misc_RNA (1)...(19): siRNA sense strand
gccagacaaucaugugguu

SEQ ID NO: 825236 - RNA, 19 nt, Homo sapiens
  misc_RNA (1)...(19): siRNA sense strand
ggaacuggaccgccugaga

SEQ ID NO: 825237 - RNA, 19 nt, Homo sapiens
  misc_RNA (1)...(19): siRNA sense strand
ccaaguauccagaagaaca

SEQ ID NO: 825238 - RNA, 19 nt, Homo sapiens
  misc_RNA (1)...(19): siRNA sense strand
ugagcagcauuccaacgua

SEQ ID NO: 825239 - RNA, 19 nt, Homo sapiens
  misc_RNA (1)...(19): siRNA sense strand
aagaggauuuggccaguga

SEQ ID NO: 825240 - RNA, 19 nt, Homo sapiens
  misc_RNA (1)...(19): siRNA sense strand
gaaguugaacaucucacaa

SEQ ID NO: 825241 - RNA, 19 nt, Homo sapiens
  misc_RNA (1)...(19): siRNA sense strand
gcacuuuagauggcuauuu

SEQ ID NO: 825242 - RNA, 19 nt, Homo sapiens
  misc_RNA (1)...(19): siRNA sense strand
ggacaggcagaaaucauca

SEQ ID NO: 825243 - RNA, 19 nt, Homo sapiens
  misc_RNA (1)...(19): siRNA sense strand
agacugugguguugcaaga

SEQ ID NO: 825244 - RNA, 19 nt, Homo sapiens
  misc_RNA (1)...(19): siRNA sense strand
gcagagcgaaguugaacau

SEQ ID NO: 825245 - RNA, 19 nt, Homo sapiens
  misc_RNA (1)...(19): siRNA sense strand
ggugaggccuuaccaaagc

SEQ ID NO: 825246 - RNA, 19 nt, Homo sapiens
  misc_RNA (1)...(19): siRNA sense strand
ggaccauuccuucaucaau

SEQ ID NO: 825247 - RNA, 19 nt, Homo sapiens
  misc_RNA (1)...(19): siRNA sense strand
guucagugaucguagauac

SEQ ID NO: 825248 - RNA, 19 nt, Homo sapiens
  misc_RNA (1)...(19): siRNA sense strand
gugccucagcccacaauua

SEQ ID NO: 825249 - RNA, 19 nt, Homo sapiens
  misc_RNA (1)...(19): siRNA sense strand
gauaggaacagugccaguu

SEQ ID NO: 825250 - RNA, 19 nt, Homo sapiens
  misc_RNA (1)...(19): siRNA sense strand
gagaaauggaggugagaga

SEQ ID NO: 825251 - RNA, 19 nt, Homo sapiens
  misc_RNA (1)...(19): siRNA sense strand
ucaaaugguacgaagacua

SEQ ID NO: 825252 - RNA, 19 nt, Homo sapiens
  misc_RNA (1)...(19): siRNA sense strand
aaauggcucucuggaaaug

SEQ ID NO: 825253 - RNA, 19 nt, Homo sapiens
  misc_RNA (1)...(19): siRNA sense strand
agaggaggcugcugaggau

SEQ ID NO: 825254 - RNA, 19 nt, Homo sapiens
  misc_RNA (1)...(19): siRNA sense strand
gacaacagccacacuagca

SEQ ID NO: 825255 - RNA, 19 nt, Homo sapiens
  misc_RNA (1)...(19): siRNA sense strand
ucacaguuccaucaucauu

SEQ ID NO: 825256 - RNA, 19 nt, Homo sapiens
  misc_RNA (1)...(19): siRNA sense strand
gagaggugcggaaaugguu

SEQ ID NO: 825257 - RNA, 19 nt, Homo sapiens
  misc_RNA (1)...(19): siRNA sense strand
ccacaauuacgguucuaaa

SEQ ID NO: 825258 - RNA, 19 nt, Homo sapiens
  misc_RNA (1)...(19): siRNA sense strand
caauuugugggacauauga

SEQ ID NO: 825259 - RNA, 19 nt, Homo sapiens
  misc_RNA (1)...(19): siRNA sense strand
aggcagaaaucaucauuac

SEQ ID NO: 825260 - RNA, 19 nt, Homo sapiens
  misc_RNA (1)...(19): siRNA sense strand
acuauuacaugacacacaa

SEQ ID NO: 825261 - RNA, 19 nt, Homo sapiens
  misc_RNA (1)...(19): siRNA sense strand
ucagagcacacagacuuua

SEQ ID NO: 825262 - RNA, 19 nt, Homo sapiens
  misc_RNA (1)...(19): siRNA sense strand
augcagccauggacucuaa

SEQ ID NO: 825263 - RNA, 19 nt, Homo sapiens
  misc_RNA (1)...(19): siRNA sense strand
ugacacacaagaugcugua

SEQ ID NO: 825264 - RNA, 19 nt, Homo sapiens
  misc_RNA (1)...(19): siRNA sense strand
ggaugaugagucaaacaaa

SEQ ID NO: 825265 - RNA, 19 nt, Homo sapiens
  misc_RNA (1)...(19): siRNA sense strand
ugacuucacaccaaccaaa

SEQ ID NO: 825266 - RNA, 19 nt, Homo sapiens
  misc_RNA (1)...(19): siRNA sense strand
cggaaaugguucagugauc

SEQ ID NO: 825267 - RNA, 19 nt, Homo sapiens
  misc_RNA (1)...(19): siRNA sense strand
ugggacauaugaacucaga

SEQ ID NO: 825268 - RNA, 19 nt, Homo sapiens
  misc_RNA (1)...(19): siRNA sense strand
uuacaugacacacaagaug

SEQ ID NO: 825269 - RNA, 19 nt, Homo sapiens
  misc_RNA (1)...(19): siRNA sense strand
caaaaugacccgacgagaa

SEQ ID NO: 825270 - RNA, 19 nt, Homo sapiens
  misc_RNA (1)...(19): siRNA sense strand
ggagagcaguuuugcacaa

SEQ ID NO: 825271 - RNA, 19 nt, Homo sapiens
  misc_RNA (1)...(19): siRNA sense strand
ccaaagccgagcucugcua

SEQ ID NO: 825272 - RNA, 19 nt, Homo sapiens
  misc_RNA (1)...(19): siRNA sense strand
ccugugacccugaggauga

SEQ ID NO: 825273 - RNA, 19 nt, Homo sapiens
  misc_RNA (1)...(19): siRNA sense strand
ucacaccaaccaaauacaa

SEQ ID NO: 825274 - RNA, 19 nt, Homo sapiens
  misc_RNA (1)...(19): siRNA sense strand
ccagacuccugacuucaca

SEQ ID NO: 825275 - RNA, 19 nt, Homo sapiens
  misc_RNA (1)...(19): siRNA sense strand
ugaagacugugguguugca

SEQ ID NO: 825276 - RNA, 19 nt, Homo sapiens
  misc_RNA (1)...(19): siRNA sense strand
aaagugacgggccucagua

SEQ ID NO: 825277 - RNA, 19 nt, Homo sapiens
  misc_RNA (1)...(19): siRNA sense strand
gaaaggaucucaccacuga

SEQ ID NO: 825278 - RNA, 19 nt, Homo sapiens
  misc_RNA (1)...(19): siRNA sense strand
ggagucagauuaagaauga

SEQ ID NO: 825279 - RNA, 19 nt, Homo sapiens
  misc_RNA (1)...(19): siRNA sense strand
aaucagaccuacaccauua

SEQ ID NO: 825280 - RNA, 19 nt, Homo sapiens
  misc_RNA (1)...(19): siRNA sense strand
ggaaugaguucucuguaug

SEQ ID NO: 825281 - RNA, 19 nt, Homo sapiens
  misc_RNA (1)...(19): siRNA sense strand
gaaguggugugccuagaga

SEQ ID NO: 825282 - RNA, 19 nt, Homo sapiens
  misc_RNA (1)...(19): siRNA sense strand
gcaauucuuucccuuccua

SEQ ID NO: 825283 - RNA, 19 nt, Homo sapiens
  misc_RNA (1)...(19): siRNA sense strand
gcacagacgcgcaccauga

SEQ ID NO: 825284 - RNA, 19 nt, Homo sapiens
  misc_RNA (1)...(19): siRNA sense strand
gggaaugaguucucuguau

SEQ ID NO: 825285 - RNA, 19 nt, Homo sapiens
  misc_RNA (1)...(19): siRNA sense strand
guugauagaugaugaauac

SEQ ID NO: 825286 - RNA, 19 nt, Homo sapiens
  misc_RNA (1)...(19): siRNA sense strand
gaacaucucccagaaagug

SEQ ID NO: 825287 - RNA, 19 nt, Homo sapiens
  misc_RNA (1)...(19): siRNA sense strand
gaaacaguaucuacccaau

SEQ ID NO: 825288 - RNA, 19 nt, Homo sapiens
  misc_RNA (1)...(19): siRNA sense strand
ggagaagucuaguucaaag

SEQ ID NO: 825289 - RNA, 19 nt, Homo sapiens
  misc_RNA (1)...(19): siRNA sense strand
caaaggcccuguccauauc

SEQ ID NO: 825290 - RNA, 19 nt, Homo sapiens
  misc_RNA (1)...(19): siRNA sense strand
ggaguccacuuguuugguu

SEQ ID NO: 825291 - RNA, 19 nt, Homo sapiens
  misc_RNA (1)...(19): siRNA sense strand
gaaugggaguugagacaga

SEQ ID NO: 825292 - RNA, 19 nt, Homo sapiens
  misc_RNA (1)...(19): siRNA sense strand
gcagugagcacguucauuc

SEQ ID NO: 825293 - RNA, 19 nt, Homo sapiens
  misc_RNA (1)...(19): siRNA sense strand
ggccugaacugggagauaa

SEQ ID NO: 825294 - RNA, 19 nt, Homo sapiens
  misc_RNA (1)...(19): siRNA sense strand
gcagagcgauucaucaacu

SEQ ID NO: 825295 - RNA, 19 nt, Homo sapiens
  misc_RNA (1)...(19): siRNA sense strand
gagaacuacugcucauuuc

SEQ ID NO: 825296 - RNA, 19 nt, Homo sapiens
  misc_RNA (1)...(19): siRNA sense strand
gcagagaggagaacuuaau

SEQ ID NO: 825297 - RNA, 19 nt, Homo sapiens
  misc_RNA (1)...(19): siRNA sense strand
ggacaccacgauaacauuu

SEQ ID NO: 825298 - RNA, 19 nt, Homo sapiens
  misc_RNA (1)...(19): siRNA sense strand
gauaucggcuucgaaagga

SEQ ID NO: 825299 - RNA, 19 nt, Homo sapiens
  misc_RNA (1)...(19): siRNA sense strand
ccuaugguuuggacauuua

SEQ ID NO: 825300 - RNA, 19 nt, Homo sapiens
  misc_RNA (1)...(19): siRNA sense strand
gauaacauuuagccuggaa

SEQ ID NO: 825301 - RNA, 19 nt, Homo sapiens
  misc_RNA (1)...(19): siRNA sense strand
ugacuaugacuacguguua

SEQ ID NO: 825302 - RNA, 19 nt, Homo sapiens
  misc_RNA (1)...(19): siRNA sense strand
gauagaugaugaauacaag

SEQ ID NO: 825303 - RNA, 19 nt, Homo sapiens
  misc_RNA (1)...(19): siRNA sense strand
gaauucaaccuccagaaga

SEQ ID NO: 825304 - RNA, 19 nt, Homo sapiens
  misc_RNA (1)...(19): siRNA sense strand
gacaaggagucgggaauga

SEQ ID NO: 825305 - RNA, 19 nt, Homo sapiens
  misc_RNA (1)...(19): siRNA sense strand
ccagacaguuucucgaaug

SEQ ID NO: 825306 - RNA, 19 nt, Homo sapiens
  misc_RNA (1)...(19): siRNA sense strand
ccaaaggcccuguccauau

SEQ ID NO: 825307 - RNA, 19 nt, Homo sapiens
  misc_RNA (1)...(19): siRNA sense strand
aauacaaggucacagcuuu

SEQ ID NO: 825308 - RNA, 19 nt, Homo sapiens
  misc_RNA (1)...(19): siRNA sense strand
gaagauggagagauuguuc

SEQ ID NO: 825309 - RNA, 19 nt, Homo sapiens
  misc_RNA (1)...(19): siRNA sense strand
ugaaacgccucucgucuca

SEQ ID NO: 825310 - RNA, 19 nt, Homo sapiens
  misc_RNA (1)...(19): siRNA sense strand
gacgguggcugcagucaug

SEQ ID NO: 825311 - RNA, 19 nt, Homo sapiens
  misc_RNA (1)...(19): siRNA sense strand
gguggaacaucucccagaa

SEQ ID NO: 825312 - RNA, 19 nt, Homo sapiens
  misc_RNA (1)...(19): siRNA sense strand
ggccagagaugaauucaac

SEQ ID NO: 825313 - RNA, 19 nt, Homo sapiens
  misc_RNA (1)...(19): siRNA sense strand
cacguucccuccaaacuuu

SEQ ID NO: 825314 - RNA, 19 nt, Homo sapiens
  misc_RNA (1)...(19): siRNA sense strand
uguggaagauggagagauu

SEQ ID NO: 825315 - RNA, 19 nt, Homo sapiens
  misc_RNA (1)...(19): siRNA sense strand
caugagcgcaccuuuauug

SEQ ID NO: 825316 - RNA, 19 nt, Homo sapiens
  misc_RNA (1)...(19): siRNA sense strand
aagccagacuccuccuuua

SEQ ID NO: 825317 - RNA, 19 nt, Homo sapiens
  misc_RNA (1)...(19): siRNA sense strand
ugagugggcuucucguuuc

SEQ ID NO: 825318 - RNA, 19 nt, Homo sapiens
  misc_RNA (1)...(19): siRNA sense strand
ggaacgcugaguuugcuua

SEQ ID NO: 825319 - RNA, 19 nt, Homo sapiens
  misc_RNA (1)...(19): siRNA sense strand
gcauuaaauucccgaacug

SEQ ID NO: 825320 - RNA, 19 nt, Homo sapiens
  misc_RNA (1)...(19): siRNA sense strand
ggaaugaagugcagaaaag

SEQ ID NO: 825321 - RNA, 19 nt, Homo sapiens
  misc_RNA (1)...(19): siRNA sense strand
gagcucacguucccuccaa

SEQ ID NO: 825322 - RNA, 19 nt, Homo sapiens
  misc_RNA (1)...(19): siRNA sense strand
gccaagguguugcuguuga

SEQ ID NO: 825323 - RNA, 19 nt, Homo sapiens
  misc_RNA (1)...(19): siRNA sense strand
gaggaucaucugcuacuuu

SEQ ID NO: 825324 - RNA, 19 nt, Homo sapiens
  misc_RNA (1)...(19): siRNA sense strand
ggccugagcggcuguauau

SEQ ID NO: 825325 - RNA, 19 nt, Homo sapiens
  misc_RNA (1)...(19): siRNA sense strand
gaacgcugaguuugcuuaa

SEQ ID NO: 825326 - RNA, 19 nt, Homo sapiens
  misc_RNA (1)...(19): siRNA sense strand
gagcgauucaucaacuaua

SEQ ID NO: 825327 - RNA, 19 nt, Homo sapiens
  misc_RNA (1)...(19): siRNA sense strand
guacaucgcaguccugaag

SEQ ID NO: 825328 - RNA, 19 nt, Homo sapiens
  misc_RNA (1)...(19): siRNA sense strand
caagugggcaaguuugauu

SEQ ID NO: 825329 - RNA, 19 nt, Homo sapiens
  misc_RNA (1)...(19): siRNA sense strand
ggagauaacccuggacagu

SEQ ID NO: 825330 - RNA, 19 nt, Homo sapiens
  misc_RNA (1)...(19): siRNA sense strand
aagcagagaggagaacuua

SEQ ID NO: 825331 - RNA, 19 nt, Homo sapiens
  misc_RNA (1)...(19): siRNA sense strand
ucaaguggguggaacaucu

SEQ ID NO: 825332 - RNA, 19 nt, Homo sapiens
  misc_RNA (1)...(19): siRNA sense strand
gggcuuuggugcagacaga

SEQ ID NO: 825333 - RNA, 19 nt, Homo sapiens
  misc_RNA (1)...(19): siRNA sense strand
caacagaacaaagcagaga

SEQ ID NO: 825334 - RNA, 19 nt, Homo sapiens
  misc_RNA (1)...(19): siRNA sense strand
gcaacgaguuuaccguacu

SEQ ID NO: 825335 - RNA, 19 nt, Homo sapiens
  misc_RNA (1)...(19): siRNA sense strand
ugugaacauugucaaguuu

SEQ ID NO: 825336 - RNA, 19 nt, Homo sapiens
  misc_RNA (1)...(19): siRNA sense strand
ugaguucucuguaugucuu

SEQ ID NO: 825337 - RNA, 19 nt, Homo sapiens
  misc_RNA (1)...(19): siRNA sense strand
ccuacaccauuaaccuaua

SEQ ID NO: 825338 - RNA, 19 nt, Homo sapiens
  misc_RNA (1)...(19): siRNA sense strand
gagauuguucagcagguua

SEQ ID NO: 825339 - RNA, 19 nt, Homo sapiens
  misc_RNA (1)...(19): siRNA sense strand
caauggaggccgaaucaug

SEQ ID NO: 825340 - RNA, 19 nt, Homo sapiens
  misc_RNA (1)...(19): siRNA sense strand
gccaaaggcccuguccaua

SEQ ID NO: 825341 - RNA, 19 nt, Homo sapiens
  misc_RNA (1)...(19): siRNA sense strand
ggacggcuguguggauauc

SEQ ID NO: 825342 - RNA, 19 nt, Homo sapiens
  misc_RNA (1)...(19): siRNA sense strand
agagaacuacugcucauuu

SEQ ID NO: 825343 - RNA, 19 nt, Homo sapiens
  misc_RNA (1)...(19): siRNA sense strand
ccagagaacuacugcucau

SEQ ID NO: 825344 - RNA, 19 nt, Homo sapiens
  misc_RNA (1)...(19): siRNA sense strand
aacaguaucuacccaaugu

SEQ ID NO: 825345 - RNA, 19 nt, Homo sapiens
  misc_RNA (1)...(19): siRNA sense strand
gaagaugauggugauggua

SEQ ID NO: 825346 - RNA, 19 nt, Homo sapiens
  misc_RNA (1)...(19): siRNA sense strand
gacaccacgauaacauuua

SEQ ID NO: 825347 - RNA, 19 nt, Homo sapiens
  misc_RNA (1)...(19): siRNA sense strand
gaaggaugacuaugacuac

SEQ ID NO: 825348 - RNA, 19 nt, Homo sapiens
  misc_RNA (1)...(19): siRNA sense strand
uuaccaaacucgagucuac

SEQ ID NO: 825349 - RNA, 19 nt, Homo sapiens
  misc_RNA (1)...(19): siRNA sense strand
caucaacuauaaccagaca

SEQ ID NO: 825350 - RNA, 19 nt, Homo sapiens
  misc_RNA (1)...(19): siRNA sense strand
gaaugaguucucuguaugu

SEQ ID NO: 825351 - RNA, 19 nt, Homo sapiens
  misc_RNA (1)...(19): siRNA sense strand
gcacggacaggaugugauc

SEQ ID NO: 825352 - RNA, 19 nt, Homo sapiens
  misc_RNA (1)...(19): siRNA sense strand
gacuaugacuacguguuaa

SEQ ID NO: 825353 - RNA, 19 nt, Homo sapiens
  misc_RNA (1)...(19): siRNA sense strand
ugaaggaugacuaugacua

SEQ ID NO: 825354 - RNA, 19 nt, Homo sapiens
  misc_RNA (1)...(19): siRNA sense strand
ggacaaggagucgggaaug

SEQ ID NO: 825355 - RNA, 19 nt, Homo sapiens
  misc_RNA (1)...(19): siRNA sense strand
gccagacuccuccuuuaaa

SEQ ID NO: 825356 - RNA, 19 nt, Homo sapiens
  misc_RNA (1)...(19): siRNA sense strand
gcaccauccuguggaaaca

SEQ ID NO: 825357 - RNA, 19 nt, Homo sapiens
  misc_RNA (1)...(19): siRNA sense strand
uggaacaucucccagaaag

SEQ ID NO: 825358 - RNA, 19 nt, Homo sapiens
  misc_RNA (1)...(19): siRNA sense strand
cagagcgauucaucaacua

SEQ ID NO: 825359 - RNA, 19 nt, Homo sapiens
  misc_RNA (1)...(19): siRNA sense strand
gaacuuaaucccguauucu

SEQ ID NO: 825360 - RNA, 19 nt, Homo sapiens
  misc_RNA (1)...(19): siRNA sense strand
ucacugggcguaucauuca

SEQ ID NO: 825361 - RNA, 19 nt, Homo sapiens
  misc_RNA (1)...(19): siRNA sense strand
caagccagacuccuccuuu

SEQ ID NO: 825362 - RNA, 19 nt, Homo sapiens
  misc_RNA (1)...(19): siRNA sense strand
gaccuacaccauuaaccua

SEQ ID NO: 825363 - RNA, 19 nt, Homo sapiens
  misc_RNA (1)...(19): siRNA sense strand
ccacagacugcccuaguga

SEQ ID NO: 825364 - RNA, 19 nt, Homo sapiens
  misc_RNA (1)...(19): siRNA sense strand
gugaacauugucaaguuua

SEQ ID NO: 825365 - RNA, 19 nt, Homo sapiens
  misc_RNA (1)...(19): siRNA sense strand
caccaugagcgcaccuuua

SEQ ID NO: 825366 - RNA, 19 nt, Homo sapiens
  misc_RNA (1)...(19): siRNA sense strand
ggacuaccuucuggagcaa

SEQ ID NO: 825367 - RNA, 19 nt, Homo sapiens
  misc_RNA (1)...(19): siRNA sense strand
gggcuacgcugcugauucc

SEQ ID NO: 825368 - RNA, 19 nt, Homo sapiens
  misc_RNA (1)...(19): siRNA sense strand
caacgaguuuaccguacug

SEQ ID NO: 825369 - RNA, 19 nt, Homo sapiens
  misc_RNA (1)...(19): siRNA sense strand
ggauaucggcuucgaaagg

SEQ ID NO: 825370 - RNA, 19 nt, Homo sapiens
  misc_RNA (1)...(19): siRNA sense strand
gaauacaaggucacagcuu

SEQ ID NO: 825371 - RNA, 19 nt, Homo sapiens
  misc_RNA (1)...(19): siRNA sense strand
aaacugaugguccagagaa

SEQ ID NO: 825372 - RNA, 19 nt, Homo sapiens
  misc_RNA (1)...(19): siRNA sense strand
cgagcuggaaggagaauuu

SEQ ID NO: 825373 - RNA, 19 nt, Homo sapiens
  misc_RNA (1)...(19): siRNA sense strand
gucauggccugucggaaug

SEQ ID NO: 825374 - RNA, 19 nt, Homo sapiens
  misc_RNA (1)...(19): siRNA sense strand
ccaagcaguuugacguucu

SEQ ID NO: 825375 - RNA, 19 nt, Homo sapiens
  misc_RNA (1)...(19): siRNA sense strand
guggauaucggcuucgaaa

SEQ ID NO: 825376 - RNA, 19 nt, Homo sapiens
  misc_RNA (1)...(19): siRNA sense strand
ucggagaagucuaguucaa

SEQ ID NO: 825377 - RNA, 19 nt, Homo sapiens
  misc_RNA (1)...(19): siRNA sense strand
ggagaaccaucacuuaaau

SEQ ID NO: 825378 - RNA, 19 nt, Homo sapiens
  misc_RNA (1)...(19): siRNA sense strand
gaagcugagugcagagaua

SEQ ID NO: 825379 - RNA, 19 nt, Homo sapiens
  misc_RNA (1)...(19): siRNA sense strand
ggagucaacuuucucaaug

SEQ ID NO: 825380 - RNA, 19 nt, Homo sapiens
  misc_RNA (1)...(19): siRNA sense strand
ggaaguggcugaaguuaac

SEQ ID NO: 825381 - RNA, 19 nt, Homo sapiens
  misc_RNA (1)...(19): siRNA sense strand
gaaggauucuagccuggua

SEQ ID NO: 825382 - RNA, 19 nt, Homo sapiens
  misc_RNA (1)...(19): siRNA sense strand
ccacauggauggacacuuc

SEQ ID NO: 825383 - RNA, 19 nt, Homo sapiens
  misc_RNA (1)...(19): siRNA sense strand
guacaguugucagaaagua

SEQ ID NO: 825384 - RNA, 19 nt, Homo sapiens
  misc_RNA (1)...(19): siRNA sense strand
acacggagcugauggaaca

SEQ ID NO: 825385 - RNA, 19 nt, Homo sapiens
  misc_RNA (1)...(19): siRNA sense strand
gugcagagauacuucgauu

SEQ ID NO: 825386 - RNA, 19 nt, Homo sapiens
  misc_RNA (1)...(19): siRNA sense strand
ggagaaacaggaauugcua

SEQ ID NO: 825387 - RNA, 19 nt, Homo sapiens
  misc_RNA (1)...(19): siRNA sense strand
agaaagugcugacgaagga

SEQ ID NO: 825388 - RNA, 19 nt, Homo sapiens
  misc_RNA (1)...(19): siRNA sense strand
aaacaggaauugcuagagu

SEQ ID NO: 825389 - RNA, 19 nt, Homo sapiens
  misc_RNA (1)...(19): siRNA sense strand
uggagaagguggcagauga

SEQ ID NO: 825390 - RNA, 19 nt, Homo sapiens
  misc_RNA (1)...(19): siRNA sense strand
gaaaguacaacugaugguu

SEQ ID NO: 825391 - RNA, 19 nt, Homo sapiens
  misc_RNA (1)...(19): siRNA sense strand
gaaccaucacuuaaauuug

SEQ ID NO: 825392 - RNA, 19 nt, Homo sapiens
  misc_RNA (1)...(19): siRNA sense strand
gugagaaagugcugacgaa

SEQ ID NO: 825393 - RNA, 19 nt, Homo sapiens
  misc_RNA (1)...(19): siRNA sense strand
gcagagauacuucgauugg

SEQ ID NO: 825394 - RNA, 19 nt, Homo sapiens
  misc_RNA (1)...(19): siRNA sense strand
gaagguggcagaugagaag

SEQ ID NO: 825395 - RNA, 19 nt, Homo sapiens
  misc_RNA (1)...(19): siRNA sense strand
ggacaggcuuagagacaca

SEQ ID NO: 825396 - RNA, 19 nt, Homo sapiens
  misc_RNA (1)...(19): siRNA sense strand
gagcucgguuugcacuuga

SEQ ID NO: 825397 - RNA, 19 nt, Homo sapiens
  misc_RNA (1)...(19): siRNA sense strand
caggagaaccaucacuuaa

SEQ ID NO: 825398 - RNA, 19 nt, Homo sapiens
  misc_RNA (1)...(19): siRNA sense strand
ggaagaaucaccacuaagc

SEQ ID NO: 825399 - RNA, 19 nt, Homo sapiens
  misc_RNA (1)...(19): siRNA sense strand
gggauuaccacacauuugu

SEQ ID NO: 825400 - RNA, 19 nt, Homo sapiens
  misc_RNA (1)...(19): siRNA sense strand
gaccaucagugagaaagug

SEQ ID NO: 825401 - RNA, 19 nt, Homo sapiens
  misc_RNA (1)...(19): siRNA sense strand
ggauuggcaucuucaaggu

SEQ ID NO: 825402 - RNA, 19 nt, Homo sapiens
  misc_RNA (1)...(19): siRNA sense strand
gauggcagcugugcagagu

SEQ ID NO: 825403 - RNA, 19 nt, Homo sapiens
  misc_RNA (1)...(19): siRNA sense strand
acaggagaaccaucacuua

SEQ ID NO: 825404 - RNA, 19 nt, Homo sapiens
  misc_RNA (1)...(19): siRNA sense strand
gagucaacuuucucaaugu

SEQ ID NO: 825405 - RNA, 19 nt, Homo sapiens
  misc_RNA (1)...(19): siRNA sense strand
agucaacuuucucaaugua

SEQ ID NO: 825406 - RNA, 19 nt, Homo sapiens
  misc_RNA (1)...(19): siRNA sense strand
gaugagagccagcaagaac

SEQ ID NO: 825407 - RNA, 19 nt, Homo sapiens
  misc_RNA (1)...(19): siRNA sense strand
gagaaccaucacuuaaauu

SEQ ID NO: 825408 - RNA, 19 nt, Homo sapiens
  misc_RNA (1)...(19): siRNA sense strand
aaccaucacuuaaauuugg

SEQ ID NO: 825409 - RNA, 19 nt, Homo sapiens
  misc_RNA (1)...(19): siRNA sense strand
aacaggaauugcuagagua

SEQ ID NO: 825410 - RNA, 19 nt, Homo sapiens
  misc_RNA (1)...(19): siRNA sense strand
ugacuggauuggcaucuuc

SEQ ID NO: 825411 - RNA, 19 nt, Homo sapiens
  misc_RNA (1)...(19): siRNA sense strand
guggguacccugucagaaa

SEQ ID NO: 825412 - RNA, 19 nt, Homo sapiens
  misc_RNA (1)...(19): siRNA sense strand
cagaugagaaguggaauga

SEQ ID NO: 825413 - RNA, 19 nt, Homo sapiens
  misc_RNA (1)...(19): siRNA sense strand
gcaacugaaagaaguacaa

SEQ ID NO: 825414 - RNA, 19 nt, Homo sapiens
  misc_RNA (1)...(19): siRNA sense strand
gcaguuacaggaggagaaa

SEQ ID NO: 825415 - RNA, 19 nt, Homo sapiens
  misc_RNA (1)...(19): siRNA sense strand
gaauugcuagaguacauga

SEQ ID NO: 825416 - RNA, 19 nt, Homo sapiens
  misc_RNA (1)...(19): siRNA sense strand
ggucuuccgugccugaaag

SEQ ID NO: 825417 - RNA, 19 nt, Homo sapiens
  misc_RNA (1)...(19): siRNA sense strand
gcagugccuucuaugacau

SEQ ID NO: 825418 - RNA, 19 nt, Homo sapiens
  misc_RNA (1)...(19): siRNA sense strand
gaaggaaaaggagcaguua

SEQ ID NO: 825419 - RNA, 19 nt, Homo sapiens
  misc_RNA (1)...(19): siRNA sense strand
gcgcuuuccugcugagagu

SEQ ID NO: 825420 - RNA, 19 nt, Homo sapiens
  misc_RNA (1)...(19): siRNA sense strand
cagacaaggagcaaaguga

SEQ ID NO: 825421 - RNA, 19 nt, Homo sapiens
  misc_RNA (1)...(19): siRNA sense strand
ggaguguccuaucuguaag

SEQ ID NO: 825422 - RNA, 19 nt, Homo sapiens
  misc_RNA (1)...(19): siRNA sense strand
caacuuacugcuuccugaa

SEQ ID NO: 825423 - RNA, 19 nt, Homo sapiens
  misc_RNA (1)...(19): siRNA sense strand
gggugaggaggccaacuua

SEQ ID NO: 825424 - RNA, 19 nt, Homo sapiens
  misc_RNA (1)...(19): siRNA sense strand
gacaagguggcccagauga

SEQ ID NO: 825425 - RNA, 19 nt, Homo sapiens
  misc_RNA (1)...(19): siRNA sense strand
ggaggagaaacaggaauug

SEQ ID NO: 825426 - RNA, 19 nt, Homo sapiens
  misc_RNA (1)...(19): siRNA sense strand
agaacggaaugaccugaug

SEQ ID NO: 825427 - RNA, 19 nt, Homo sapiens
  misc_RNA (1)...(19): siRNA sense strand
gcagaugagaaguggaaug

SEQ ID NO: 825428 - RNA, 19 nt, Homo sapiens
  misc_RNA (1)...(19): siRNA sense strand
uaaauuuggaccugaagga

SEQ ID NO: 825429 - RNA, 19 nt, Homo sapiens
  misc_RNA (1)...(19): siRNA sense strand
cggagcugauggaacagua

SEQ ID NO: 825430 - RNA, 19 nt, Homo sapiens
  misc_RNA (1)...(19): siRNA sense strand
gcacacggagcugauggaa

SEQ ID NO: 825431 - RNA, 19 nt, Homo sapiens
  misc_RNA (1)...(19): siRNA sense strand
gcagacaaggagcaaagug

SEQ ID NO: 825432 - RNA, 19 nt, Homo sapiens
  misc_RNA (1)...(19): siRNA sense strand
uacagaaccagcucgauga

SEQ ID NO: 825433 - RNA, 19 nt, Homo sapiens
  misc_RNA (1)...(19): siRNA sense strand
acucggaggcugaagauga

SEQ ID NO: 825434 - RNA, 19 nt, Homo sapiens
  misc_RNA (1)...(19): siRNA sense strand
ugagcucgguuugcacuug

SEQ ID NO: 825435 - RNA, 19 nt, Homo sapiens
  misc_RNA (1)...(19): siRNA sense strand
aggagaaccaucacuuaaa

SEQ ID NO: 825436 - RNA, 19 nt, Homo sapiens
  misc_RNA (1)...(19): siRNA sense strand
gcucuaccaguuccgauau

SEQ ID NO: 825437 - RNA, 19 nt, Homo sapiens
  misc_RNA (1)...(19): siRNA sense strand
ggcugaagaugagaaguca

SEQ ID NO: 825438 - RNA, 19 nt, Homo sapiens
  misc_RNA (1)...(19): siRNA sense strand
gaaacaggaauugcuagag

SEQ ID NO: 825439 - RNA, 19 nt, Homo sapiens
  misc_RNA (1)...(19): siRNA sense strand
cugguacaguugucagaaa

SEQ ID NO: 825440 - RNA, 19 nt, Homo sapiens
  misc_RNA (1)...(19): siRNA sense strand
aagacaagguggcccagau

SEQ ID NO: 825441 - RNA, 19 nt, Homo sapiens
  misc_RNA (1)...(19): siRNA sense strand
gcaacagggagaccaugug

SEQ ID NO: 825442 - RNA, 19 nt, Homo sapiens
  misc_RNA (1)...(19): siRNA sense strand
uaccaguuccgauauguga

SEQ ID NO: 825443 - RNA, 19 nt, Homo sapiens
  misc_RNA (1)...(19): siRNA sense strand
auucuagccugguacaguu

SEQ ID NO: 825444 - RNA, 19 nt, Homo sapiens
  misc_RNA (1)...(19): siRNA sense strand
cagagauacuucgauugga

SEQ ID NO: 825445 - RNA, 19 nt, Homo sapiens
  misc_RNA (1)...(19): siRNA sense strand
caccauagccgaacuacac

SEQ ID NO: 825446 - RNA, 19 nt, Homo sapiens
  misc_RNA (1)...(19): siRNA sense strand
gagcuggacaggcuuagag

SEQ ID NO: 825447 - RNA, 19 nt, Homo sapiens
  misc_RNA (1)...(19): siRNA sense strand
ccaaggcaacuguguuaca

SEQ ID NO: 825448 - RNA, 19 nt, Homo sapiens
  misc_RNA (1)...(19): siRNA sense strand
caagguggcccagaugaag

SEQ ID NO: 825449 - RNA, 19 nt, Homo sapiens
  misc_RNA (1)...(19): siRNA sense strand
caagguggaaugucacuac

SEQ ID NO: 825450 - RNA, 19 nt, Homo sapiens
  misc_RNA (1)...(19): siRNA sense strand
uggaaguggcugaaguuaa

SEQ ID NO: 825451 - RNA, 19 nt, Homo sapiens
  misc_RNA (1)...(19): siRNA sense strand
agccaaggcccauggauga

SEQ ID NO: 825452 - RNA, 19 nt, Homo sapiens
  misc_RNA (1)...(19): siRNA sense strand
ccagccggcucccauuucu

SEQ ID NO: 825453 - RNA, 19 nt, Homo sapiens
  misc_RNA (1)...(19): siRNA sense strand
gagaagguggcagaugaga

SEQ ID NO: 825454 - RNA, 19 nt, Homo sapiens
  misc_RNA (1)...(19): siRNA sense strand
aggaauugcuagaguacau

SEQ ID NO: 825455 - RNA, 19 nt, Homo sapiens
  misc_RNA (1)...(19): siRNA sense strand
guaagcgggagcugacaga

SEQ ID NO: 825456 - RNA, 19 nt, Homo sapiens
  misc_RNA (1)...(19): siRNA sense strand
gauuggagaaggcaguuca

SEQ ID NO: 825457 - RNA, 19 nt, Homo sapiens
  misc_RNA (1)...(19): siRNA sense strand
uggcugagcucgguuugca

SEQ ID NO: 825458 - RNA, 19 nt, Homo sapiens
  misc_RNA (1)...(19): siRNA sense strand
gaagcuccuugggcaacug

SEQ ID NO: 825459 - RNA, 19 nt, Homo sapiens
  misc_RNA (1)...(19): siRNA sense strand
ccagcuaccugcccaaacc

SEQ ID NO: 825460 - RNA, 19 nt, Homo sapiens
  misc_RNA (1)...(19): siRNA sense strand
ggaggccaacuuacugcuu

SEQ ID NO: 825461 - RNA, 19 nt, Homo sapiens
  misc_RNA (1)...(19): siRNA sense strand
caaggcccauggaugaacu

SEQ ID NO: 825462 - RNA, 19 nt, Homo sapiens
  misc_RNA (1)...(19): siRNA sense strand
ggagaggacccaaaaccaa

SEQ ID NO: 825463 - RNA, 19 nt, Homo sapiens
  misc_RNA (1)...(19): siRNA sense strand
cacaacaggagaaccauca

SEQ ID NO: 825464 - RNA, 19 nt, Homo sapiens
  misc_RNA (1)...(19): siRNA sense strand
cugccuguguucgggauua

SEQ ID NO: 825465 - RNA, 19 nt, Homo sapiens
  misc_RNA (1)...(19): siRNA sense strand
gcuuagagacacagugaag

SEQ ID NO: 825466 - RNA, 19 nt, Homo sapiens
  misc_RNA (1)...(19): siRNA sense strand
cauggauggacacuucuuu

SEQ ID NO: 825467 - RNA, 19 nt, Homo sapiens
  misc_RNA (1)...(19): siRNA sense strand
ggaauugcuagaguacaug

SEQ ID NO: 825468 - RNA, 19 nt, Homo sapiens
  misc_RNA (1)...(19): siRNA sense strand
ccugaaaguacaacugaug

SEQ ID NO: 825469 - RNA, 19 nt, Homo sapiens
  misc_RNA (1)...(19): siRNA sense strand
ggaacaagagaagcuccuu

SEQ ID NO: 825470 - RNA, 19 nt, Homo sapiens
  misc_RNA (1)...(19): siRNA sense strand
ugaggaggccaacuuacug

SEQ ID NO: 825471 - RNA, 19 nt, Homo sapiens
  misc_RNA (1)...(19): siRNA sense strand
uggcagaugagaaguggaa

SEQ ID NO: 825472 - RNA, 19 nt, Homo sapiens
  misc_RNA (1)...(19): siRNA sense strand
uagaguacaugagaaagcu

SEQ ID NO: 825473 - RNA, 19 nt, Homo sapiens
  misc_RNA (1)...(19): siRNA sense strand
agaaacaggaauugcuaga

SEQ ID NO: 825474 - RNA, 19 nt, Homo sapiens
  misc_RNA (1)...(19): siRNA sense strand
accaaguguucaagacuga

SEQ ID NO: 825475 - RNA, 19 nt, Homo sapiens
  misc_RNA (1)...(19): siRNA sense strand
ucgaugagagccagcaaga

SEQ ID NO: 825476 - RNA, 19 nt, Homo sapiens
  misc_RNA (1)...(19): siRNA sense strand
ggagaagguggcagaugag

SEQ ID NO: 825477 - RNA, 19 nt, Homo sapiens
  misc_RNA (1)...(19): siRNA sense strand
gaacagagccuccuagaaa

SEQ ID NO: 825478 - RNA, 19 nt, Homo sapiens
  misc_RNA (1)...(19): siRNA sense strand
gagcagaaaucaugagauc

SEQ ID NO: 825479 - RNA, 19 nt, Homo sapiens
  misc_RNA (1)...(19): siRNA sense strand
cagcagaccuucaaucucu

SEQ ID NO: 825480 - RNA, 19 nt, Homo sapiens
  misc_RNA (1)...(19): siRNA sense strand
gaacuuuaccagcaacuga

SEQ ID NO: 825481 - RNA, 19 nt, Homo sapiens
  misc_RNA (1)...(19): siRNA sense strand
gcacaaaugggaagaaucu

SEQ ID NO: 825482 - RNA, 19 nt, Homo sapiens
  misc_RNA (1)...(19): siRNA sense strand
gaaauacuuccaaagaauc

SEQ ID NO: 825483 - RNA, 19 nt, Homo sapiens
  misc_RNA (1)...(19): siRNA sense strand
gaagaaauacagcccuugu

SEQ ID NO: 825484 - RNA, 19 nt, Homo sapiens
  misc_RNA (1)...(19): siRNA sense strand
ccuggaagcaugugugaua

SEQ ID NO: 825485 - RNA, 19 nt, Homo sapiens
  misc_RNA (1)...(19): siRNA sense strand
ggaacagagccuccuagaa

SEQ ID NO: 825486 - RNA, 19 nt, Homo sapiens
  misc_RNA (1)...(19): siRNA sense strand
ggaagagacuccccugaug

SEQ ID NO: 825487 - RNA, 19 nt, Homo sapiens
  misc_RNA (1)...(19): siRNA sense strand
ugucagagcagaaaucaug

SEQ ID NO: 825488 - RNA, 19 nt, Homo sapiens
  misc_RNA (1)...(19): siRNA sense strand
uaauaggagggccuugaua

SEQ ID NO: 825489 - RNA, 19 nt, Homo sapiens
  misc_RNA (1)...(19): siRNA sense strand
ggaagcaugugugauacag

SEQ ID NO: 825490 - RNA, 19 nt, Homo sapiens
  misc_RNA (1)...(19): siRNA sense strand
gguaauaggagggccuuga

SEQ ID NO: 825491 - RNA, 19 nt, Homo sapiens
  misc_RNA (1)...(19): siRNA sense strand
gaagagacuccccugauga

SEQ ID NO: 825492 - RNA, 19 nt, Homo sapiens
  misc_RNA (1)...(19): siRNA sense strand
ccaucucuguccuccauga

SEQ ID NO: 825493 - RNA, 19 nt, Homo sapiens
  misc_RNA (1)...(19): siRNA sense strand
gggaacagagccuccuaga

SEQ ID NO: 825494 - RNA, 19 nt, Homo sapiens
  misc_RNA (1)...(19): siRNA sense strand
guaauaggagggccuugau

SEQ ID NO: 825495 - RNA, 19 nt, Homo sapiens
  misc_RNA (1)...(19): siRNA sense strand
gagguugucagagcagaaa

SEQ ID NO: 825496 - RNA, 19 nt, Homo sapiens
  misc_RNA (1)...(19): siRNA sense strand
agacuccccugaugaauga

SEQ ID NO: 825497 - RNA, 19 nt, Homo sapiens
  misc_RNA (1)...(19): siRNA sense strand
ugauacuccuggcacaaau

SEQ ID NO: 825498 - RNA, 19 nt, Homo sapiens
  misc_RNA (1)...(19): siRNA sense strand
uggcacaaaugggaagaau

SEQ ID NO: 825499 - RNA, 19 nt, Homo sapiens
  misc_RNA (1)...(19): siRNA sense strand
gcagaccuucaaucucuuc

SEQ ID NO: 825500 - RNA, 19 nt, Homo sapiens
  misc_RNA (1)...(19): siRNA sense strand
cagcacagaggacucaucu

SEQ ID NO: 825501 - RNA, 19 nt, Homo sapiens
  misc_RNA (1)...(19): siRNA sense strand
cagagcagaaaucaugaga

SEQ ID NO: 825502 - RNA, 19 nt, Homo sapiens
  misc_RNA (1)...(19): siRNA sense strand
gauacuccuggcacaaaug

SEQ ID NO: 825503 - RNA, 19 nt, Homo sapiens
  misc_RNA (1)...(19): siRNA sense strand
ggagguugucagagcagaa

SEQ ID NO: 825504 - RNA, 19 nt, Homo sapiens
  misc_RNA (1)...(19): siRNA sense strand
gaagcuacaucuuaccuua

SEQ ID NO: 825505 - RNA, 19 nt, Homo sapiens
  misc_RNA (1)...(19): siRNA sense strand
caaagaagcaucugaagua

SEQ ID NO: 825506 - RNA, 19 nt, Homo sapiens
  misc_RNA (1)...(19): siRNA sense strand
agagaaagaugaaauggua

SEQ ID NO: 825507 - RNA, 19 nt, Homo sapiens
  misc_RNA (1)...(19): siRNA sense strand
gcagaaggccuagacauua

SEQ ID NO: 825508 - RNA, 19 nt, Homo sapiens
  misc_RNA (1)...(19): siRNA sense strand
ugaauuagcugaaacacaa

SEQ ID NO: 825509 - RNA, 19 nt, Homo sapiens
  misc_RNA (1)...(19): siRNA sense strand
ggcagcagcucgacaguua

SEQ ID NO: 825510 - RNA, 19 nt, Homo sapiens
  misc_RNA (1)...(19): siRNA sense strand
gcaaacaaguaaauaugga

SEQ ID NO: 825511 - RNA, 19 nt, Homo sapiens
  misc_RNA (1)...(19): siRNA sense strand
caacagacccagaagguuu

SEQ ID NO: 825512 - RNA, 19 nt, Homo sapiens
  misc_RNA (1)...(19): siRNA sense strand
cagaaggccuagacauuaa

SEQ ID NO: 825513 - RNA, 19 nt, Homo sapiens
  misc_RNA (1)...(19): siRNA sense strand
gacaagcuguuccuaaaga

SEQ ID NO: 825514 - RNA, 19 nt, Homo sapiens
  misc_RNA (1)...(19): siRNA sense strand
guaaagccacccagagaua

SEQ ID NO: 825515 - RNA, 19 nt, Homo sapiens
  misc_RNA (1)...(19): siRNA sense strand
gaaaacaucugcaguccaa

SEQ ID NO: 825516 - RNA, 19 nt, Homo sapiens
  misc_RNA (1)...(19): siRNA sense strand
cuauaaagcuccaauacug

SEQ ID NO: 825517 - RNA, 19 nt, Homo sapiens
  misc_RNA (1)...(19): siRNA sense strand
gaaacuauguagcugaucu

SEQ ID NO: 825518 - RNA, 19 nt, Homo sapiens
  misc_RNA (1)...(19): siRNA sense strand
gaagugauagcugugaaua

SEQ ID NO: 825519 - RNA, 19 nt, Homo sapiens
  misc_RNA (1)...(19): siRNA sense strand
gcucgacaguuacaaaguu

SEQ ID NO: 825520 - RNA, 19 nt, Homo sapiens
  misc_RNA (1)...(19): siRNA sense strand
caaagaaacuguggugucu

SEQ ID NO: 825521 - RNA, 19 nt, Homo sapiens
  misc_RNA (1)...(19): siRNA sense strand
cgagucaaaccuuuauuua

SEQ ID NO: 825522 - RNA, 19 nt, Homo sapiens
  misc_RNA (1)...(19): siRNA sense strand
ggaaguugucauucaguua

SEQ ID NO: 825523 - RNA, 19 nt, Homo sapiens
  misc_RNA (1)...(19): siRNA sense strand
ucucaacucucucccuuaa

SEQ ID NO: 825524 - RNA, 19 nt, Homo sapiens
  misc_RNA (1)...(19): siRNA sense strand
aaagaagcaucugaaguaa

SEQ ID NO: 825525 - RNA, 19 nt, Homo sapiens
  misc_RNA (1)...(19): siRNA sense strand
gcuagaagcuacaucuuac

SEQ ID NO: 825526 - RNA, 19 nt, Homo sapiens
  misc_RNA (1)...(19): siRNA sense strand
gcgagaagcgggaagaauu

SEQ ID NO: 825527 - RNA, 19 nt, Homo sapiens
  misc_RNA (1)...(19): siRNA sense strand
gcaaggaauaugaugaauu

SEQ ID NO: 825528 - RNA, 19 nt, Homo sapiens
  misc_RNA (1)...(19): siRNA sense strand
agauucagcugacauuuga

SEQ ID NO: 825529 - RNA, 19 nt, Homo sapiens
  misc_RNA (1)...(19): siRNA sense strand
ggaauaugaugaauuagcu

SEQ ID NO: 825530 - RNA, 19 nt, Homo sapiens
  misc_RNA (1)...(19): siRNA sense strand
caucuuaccuuagucauca

SEQ ID NO: 825531 - RNA, 19 nt, Homo sapiens
  misc_RNA (1)...(19): siRNA sense strand
cggacaagcuguuccuaaa

SEQ ID NO: 825532 - RNA, 19 nt, Homo sapiens
  misc_RNA (1)...(19): siRNA sense strand
agaagcaugucaaagauga

SEQ ID NO: 825533 - RNA, 19 nt, Homo sapiens
  misc_RNA (1)...(19): siRNA sense strand
cuacacggcuucaggaugu

SEQ ID NO: 825534 - RNA, 19 nt, Homo sapiens
  misc_RNA (1)...(19): siRNA sense strand
ugucaaagaugagcagauu

SEQ ID NO: 825535 - RNA, 19 nt, Homo sapiens
  misc_RNA (1)...(19): siRNA sense strand
gaugaugacuuugaguuca

SEQ ID NO: 825536 - RNA, 19 nt, Homo sapiens
  misc_RNA (1)...(19): siRNA sense strand
agaagcaucugaaguaaag

SEQ ID NO: 825537 - RNA, 19 nt, Homo sapiens
  misc_RNA (1)...(19): siRNA sense strand
cuauguagcugaucuugga

SEQ ID NO: 825538 - RNA, 19 nt, Homo sapiens
  misc_RNA (1)...(19): siRNA sense strand
gaagaugaguauuauucag

SEQ ID NO: 825539 - RNA, 19 nt, Homo sapiens
  misc_RNA (1)...(19): siRNA sense strand
gaauggaugucacacuuuu

SEQ ID NO: 825540 - RNA, 19 nt, Homo sapiens
  misc_RNA (1)...(19): siRNA sense strand
ccaccgaguucacaguuau

SEQ ID NO: 825541 - RNA, 19 nt, Homo sapiens
  misc_RNA (1)...(19): siRNA sense strand
ggauccaagugucaauuug

SEQ ID NO: 825542 - RNA, 19 nt, Homo sapiens
  misc_RNA (1)...(19): siRNA sense strand
ggaauggaugucacacuuu

SEQ ID NO: 825543 - RNA, 19 nt, Homo sapiens
  misc_RNA (1)...(19): siRNA sense strand
cagaagaugaguauuauuc

SEQ ID NO: 825544 - RNA, 19 nt, Homo sapiens
  misc_RNA (1)...(19): siRNA sense strand
agaagcaccuuauaacagu

SEQ ID NO: 825545 - RNA, 19 nt, Homo sapiens
  misc_RNA (1)...(19): siRNA sense strand
ccacaccucucucaacucu

SEQ ID NO: 825546 - RNA, 19 nt, Homo sapiens
  misc_RNA (1)...(19): siRNA sense strand
gaacauuggaagaagauag

SEQ ID NO: 825547 - RNA, 19 nt, Homo sapiens
  misc_RNA (1)...(19): siRNA sense strand
acagacaaauacuugauug

SEQ ID NO: 825548 - RNA, 19 nt, Homo sapiens
  misc_RNA (1)...(19): siRNA sense strand
gucauggucuuaucaacuu

SEQ ID NO: 825549 - RNA, 19 nt, Homo sapiens
  misc_RNA (1)...(19): siRNA sense strand
gaugguaaauuugaaagag

SEQ ID NO: 825550 - RNA, 19 nt, Homo sapiens
  misc_RNA (1)...(19): siRNA sense strand
aagagaagcaugucaaaga

SEQ ID NO: 825551 - RNA, 19 nt, Homo sapiens
  misc_RNA (1)...(19): siRNA sense strand
agagagaaaugccaaagca

SEQ ID NO: 825552 - RNA, 19 nt, Homo sapiens
  misc_RNA (1)...(19): siRNA sense strand
gacaggaaagguaauuauu

SEQ ID NO: 825553 - RNA, 19 nt, Homo sapiens
  misc_RNA (1)...(19): siRNA sense strand
caaagauucagcugacauu

SEQ ID NO: 825554 - RNA, 19 nt, Homo sapiens
  misc_RNA (1)...(19): siRNA sense strand
gaugggauuuggcaaccuu

SEQ ID NO: 825555 - RNA, 19 nt, Homo sapiens
  misc_RNA (1)...(19): siRNA sense strand
uaaaaccccuaccaacuaa

SEQ ID NO: 825556 - RNA, 19 nt, Homo sapiens
  misc_RNA (1)...(19): siRNA sense strand
caaggaaagcuagaagaaa

SEQ ID NO: 825557 - RNA, 19 nt, Homo sapiens
  misc_RNA (1)...(19): siRNA sense strand
aggcuacucuccaacaauu

SEQ ID NO: 825558 - RNA, 19 nt, Homo sapiens
  misc_RNA (1)...(19): siRNA sense strand
ggaagaagauagugaaaac

SEQ ID NO: 825559 - RNA, 19 nt, Homo sapiens
  misc_RNA (1)...(19): siRNA sense strand
agagaagcaugucaaagau

SEQ ID NO: 825560 - RNA, 19 nt, Homo sapiens
  misc_RNA (1)...(19): siRNA sense strand
agacuucaauguccucaau

SEQ ID NO: 825561 - RNA, 19 nt, Homo sapiens
  misc_RNA (1)...(19): siRNA sense strand
gaaaugccaaagcagagaa

SEQ ID NO: 825562 - RNA, 19 nt, Homo sapiens
  misc_RNA (1)...(19): siRNA sense strand
caauuagaagcaccuuaua

SEQ ID NO: 825563 - RNA, 19 nt, Homo sapiens
  misc_RNA (1)...(19): siRNA sense strand
cauaagugacgaugugauu

SEQ ID NO: 825564 - RNA, 19 nt, Homo sapiens
  misc_RNA (1)...(19): siRNA sense strand
cagcaaacaaguaaauaug

SEQ ID NO: 825565 - RNA, 19 nt, Homo sapiens
  misc_RNA (1)...(19): siRNA sense strand
uggacgaguugccacauuu

SEQ ID NO: 825566 - RNA, 19 nt, Homo sapiens
  misc_RNA (1)...(19): siRNA sense strand
uggaauggaugucacacuu

SEQ ID NO: 825567 - RNA, 19 nt, Homo sapiens
  misc_RNA (1)...(19): siRNA sense strand
gaaguugucauucaguuac

SEQ ID NO: 825568 - RNA, 19 nt, Homo sapiens
  misc_RNA (1)...(19): siRNA sense strand
gcaggaucaucuggaaaug

SEQ ID NO: 825569 - RNA, 19 nt, Homo sapiens
  misc_RNA (1)...(19): siRNA sense strand
gccuagacauuaaacugaa

SEQ ID NO: 825570 - RNA, 19 nt, Homo sapiens
  misc_RNA (1)...(19): siRNA sense strand
gccuguggcuuuagcagaa

SEQ ID NO: 825571 - RNA, 19 nt, Homo sapiens
  misc_RNA (1)...(19): siRNA sense strand
ggaagaauugaaagaacuu

SEQ ID NO: 825572 - RNA, 19 nt, Homo sapiens
  misc_RNA (1)...(19): siRNA sense strand
caaaggaaacuauguagcu

SEQ ID NO: 825573 - RNA, 19 nt, Homo sapiens
  misc_RNA (1)...(19): siRNA sense strand
gcugcaggaucaucuggaa

SEQ ID NO: 825574 - RNA, 19 nt, Homo sapiens
  misc_RNA (1)...(19): siRNA sense strand
gaaacuguggugucucguu

SEQ ID NO: 825575 - RNA, 19 nt, Homo sapiens
  misc_RNA (1)...(19): siRNA sense strand
ggugagcucuuccucuucu

SEQ ID NO: 825576 - RNA, 19 nt, Homo sapiens
  misc_RNA (1)...(19): siRNA sense strand
cauuggaaguugucauuca

SEQ ID NO: 825577 - RNA, 19 nt, Homo sapiens
  misc_RNA (1)...(19): siRNA sense strand
ggucagcaaacaaguaaau

SEQ ID NO: 825578 - RNA, 19 nt, Homo sapiens
  misc_RNA (1)...(19): siRNA sense strand
gaagaauugcagaccaguu

SEQ ID NO: 825579 - RNA, 19 nt, Homo sapiens
  misc_RNA (1)...(19): siRNA sense strand
agaagcugcugguaucaug

SEQ ID NO: 825580 - RNA, 19 nt, Homo sapiens
  misc_RNA (1)...(19): siRNA sense strand
gccaccagccguucaguuu

SEQ ID NO: 825581 - RNA, 19 nt, Homo sapiens
  misc_RNA (1)...(19): siRNA sense strand
gcagccaccugacaguaag

SEQ ID NO: 825582 - RNA, 19 nt, Homo sapiens
  misc_RNA (1)...(19): siRNA sense strand
gaccacaacagacccagaa

SEQ ID NO: 825583 - RNA, 19 nt, Homo sapiens
  misc_RNA (1)...(19): siRNA sense strand
aagaauugcagaccaguuu

SEQ ID NO: 825584 - RNA, 19 nt, Homo sapiens
  misc_RNA (1)...(19): siRNA sense strand
caucagcaauacaaagaag

SEQ ID NO: 825585 - RNA, 19 nt, Homo sapiens
  misc_RNA (1)...(19): siRNA sense strand
gcagcucgacaguuacaaa

SEQ ID NO: 825586 - RNA, 19 nt, Homo sapiens
  misc_RNA (1)...(19): siRNA sense strand
uggccaaccucucagaaga

SEQ ID NO: 825587 - RNA, 19 nt, Homo sapiens
  misc_RNA (1)...(19): siRNA sense strand
acaauuagaagcaccuuau

SEQ ID NO: 825588 - RNA, 19 nt, Homo sapiens
  misc_RNA (1)...(19): siRNA sense strand
cgagaagcgggaagaauug

SEQ ID NO: 825589 - RNA, 19 nt, Homo sapiens
  misc_RNA (1)...(19): siRNA sense strand
gaagagagaaaugccaaag

SEQ ID NO: 825590 - RNA, 19 nt, Homo sapiens
  misc_RNA (1)...(19): siRNA sense strand
aaggaaagcuagaagaaaa

SEQ ID NO: 825591 - RNA, 19 nt, Homo sapiens
  misc_RNA (1)...(19): siRNA sense strand
acaaggaaagcuagaagaa

SEQ ID NO: 825592 - RNA, 19 nt, Homo sapiens
  misc_RNA (1)...(19): siRNA sense strand
ugaaacacaaggaaagcua

SEQ ID NO: 825593 - RNA, 19 nt, Homo sapiens
  misc_RNA (1)...(19): siRNA sense strand
uaaagaacuccaucagcaa

SEQ ID NO: 825594 - RNA, 19 nt, Homo sapiens
  misc_RNA (1)...(19): siRNA sense strand
gucauucaguuacaagaga

SEQ ID NO: 825595 - RNA, 19 nt, Homo sapiens
  misc_RNA (1)...(19): siRNA sense strand
ggacaagcuguuccuaaag

SEQ ID NO: 825596 - RNA, 19 nt, Homo sapiens
  misc_RNA (1)...(19): siRNA sense strand
ggccaggcauuggaaguug

SEQ ID NO: 825597 - RNA, 19 nt, Homo sapiens
  misc_RNA (1)...(19): siRNA sense strand
caucuggaaaugacuauga

SEQ ID NO: 825598 - RNA, 19 nt, Homo sapiens
  misc_RNA (1)...(19): siRNA sense strand
guaccucagcccaaagaaa

SEQ ID NO: 825599 - RNA, 19 nt, Homo sapiens
  misc_RNA (1)...(19): siRNA sense strand
aggagaagcugcugguauc

SEQ ID NO: 825600 - RNA, 19 nt, Homo sapiens
  misc_RNA (1)...(19): siRNA sense strand
gggauccaagugucaauuu

SEQ ID NO: 825601 - RNA, 19 nt, Homo sapiens
  misc_RNA (1)...(19): siRNA sense strand
gacagacaaauacuugauu

SEQ ID NO: 825602 - RNA, 19 nt, Homo sapiens
  misc_RNA (1)...(19): siRNA sense strand
ggccuagacauuaaacuga

SEQ ID NO: 825603 - RNA, 19 nt, Homo sapiens
  misc_RNA (1)...(19): siRNA sense strand
caccagccguucaguuugu

SEQ ID NO: 825604 - RNA, 19 nt, Homo sapiens
  misc_RNA (1)...(19): siRNA sense strand
ugaaaucagugcuauguua

SEQ ID NO: 825605 - RNA, 19 nt, Homo sapiens
  misc_RNA (1)...(19): siRNA sense strand
gaauaaauaucccagagaa

SEQ ID NO: 825606 - RNA, 19 nt, Homo sapiens
  misc_RNA (1)...(19): siRNA sense strand
ccaaagggauguuuagaaa

SEQ ID NO: 825607 - RNA, 19 nt, Homo sapiens
  misc_RNA (1)...(19): siRNA sense strand
cauccuaacugaagcaaua

SEQ ID NO: 825608 - RNA, 19 nt, Homo sapiens
  misc_RNA (1)...(19): siRNA sense strand
gaauuuaaccguagacaaa

SEQ ID NO: 825609 - RNA, 19 nt, Homo sapiens
  misc_RNA (1)...(19): siRNA sense strand
gauagaaaccuguaagaaa

SEQ ID NO: 825610 - RNA, 19 nt, Homo sapiens
  misc_RNA (1)...(19): siRNA sense strand
gggcauggcuuucuggauu

SEQ ID NO: 825611 - RNA, 19 nt, Homo sapiens
  misc_RNA (1)...(19): siRNA sense strand
ccauaaagcucgaagaugu

SEQ ID NO: 825612 - RNA, 19 nt, Homo sapiens
  misc_RNA (1)...(19): siRNA sense strand
ggacgugccucuucugaug

SEQ ID NO: 825613 - RNA, 19 nt, Homo sapiens
  misc_RNA (1)...(19): siRNA sense strand
uauaagaggucgccuaaug

SEQ ID NO: 825614 - RNA, 19 nt, Homo sapiens
  misc_RNA (1)...(19): siRNA sense strand
gcaagauccugaaacagaa

SEQ ID NO: 825615 - RNA, 19 nt, Homo sapiens
  misc_RNA (1)...(19): siRNA sense strand
gaaaccagccuaccaaugu

SEQ ID NO: 825616 - RNA, 19 nt, Homo sapiens
  misc_RNA (1)...(19): siRNA sense strand
gcaggaagcucugacucua

SEQ ID NO: 825617 - RNA, 19 nt, Homo sapiens
  misc_RNA (1)...(19): siRNA sense strand
gaaccggacgcuagaauuu

SEQ ID NO: 825618 - RNA, 19 nt, Homo sapiens
  misc_RNA (1)...(19): siRNA sense strand
gaagaacauuugguuagaa

SEQ ID NO: 825619 - RNA, 19 nt, Homo sapiens
  misc_RNA (1)...(19): siRNA sense strand
ugaauugccugacgagaaa

SEQ ID NO: 825620 - RNA, 19 nt, Homo sapiens
  misc_RNA (1)...(19): siRNA sense strand
ggagcaagauccugaaaca

SEQ ID NO: 825621 - RNA, 19 nt, Homo sapiens
  misc_RNA (1)...(19): siRNA sense strand
gaaaucagugcuauguuaa

SEQ ID NO: 825622 - RNA, 19 nt, Homo sapiens
  misc_RNA (1)...(19): siRNA sense strand
gaaaugcuugggccuguua

SEQ ID NO: 825623 - RNA, 19 nt, Homo sapiens
  misc_RNA (1)...(19): siRNA sense strand
gcagugcauucucaguaua

SEQ ID NO: 825624 - RNA, 19 nt, Homo sapiens
  misc_RNA (1)...(19): siRNA sense strand
gaaccaagauaucuguaag

SEQ ID NO: 825625 - RNA, 19 nt, Homo sapiens
  misc_RNA (1)...(19): siRNA sense strand
cgauggagaugaacagauu

SEQ ID NO: 825626 - RNA, 19 nt, Homo sapiens
  misc_RNA (1)...(19): siRNA sense strand
gaauguacgcauagcuuua

SEQ ID NO: 825627 - RNA, 19 nt, Homo sapiens
  misc_RNA (1)...(19): siRNA sense strand
caaagaggaagaaauacua

SEQ ID NO: 825628 - RNA, 19 nt, Homo sapiens
  misc_RNA (1)...(19): siRNA sense strand
guaagagugucacagagaa

SEQ ID NO: 825629 - RNA, 19 nt, Homo sapiens
  misc_RNA (1)...(19): siRNA sense strand
gaacagauuccggcugauu

SEQ ID NO: 825630 - RNA, 19 nt, Homo sapiens
  misc_RNA (1)...(19): siRNA sense strand
caggauaucuuagaggaaa

SEQ ID NO: 825631 - RNA, 19 nt, Homo sapiens
  misc_RNA (1)...(19): siRNA sense strand
caagauaccuauacuuuug

SEQ ID NO: 825632 - RNA, 19 nt, Homo sapiens
  misc_RNA (1)...(19): siRNA sense strand
aaggaaagaugauggagaa

SEQ ID NO: 825633 - RNA, 19 nt, Homo sapiens
  misc_RNA (1)...(19): siRNA sense strand
uaaggagagugaccuaaga

SEQ ID NO: 825634 - RNA, 19 nt, Homo sapiens
  misc_RNA (1)...(19): siRNA sense strand
gaaagaugauggagaaaau

SEQ ID NO: 825635 - RNA, 19 nt, Homo sapiens
  misc_RNA (1)...(19): siRNA sense strand
gaagugggcacauccauag

SEQ ID NO: 825636 - RNA, 19 nt, Homo sapiens
  misc_RNA (1)...(19): siRNA sense strand
gaagagccaugagccacaa

SEQ ID NO: 825637 - RNA, 19 nt, Homo sapiens
  misc_RNA (1)...(19): siRNA sense strand
ccacagagccugcuaucga

SEQ ID NO: 825638 - RNA, 19 nt, Homo sapiens
  misc_RNA (1)...(19): siRNA sense strand
ggagaaagccguacaucag

SEQ ID NO: 825639 - RNA, 19 nt, Homo sapiens
  misc_RNA (1)...(19): siRNA sense strand
guauauaacugcuucuacu

SEQ ID NO: 825640 - RNA, 19 nt, Homo sapiens
  misc_RNA (1)...(19): siRNA sense strand
caaacacagugacccauuc

SEQ ID NO: 825641 - RNA, 19 nt, Homo sapiens
  misc_RNA (1)...(19): siRNA sense strand
aggcaaagaggaagaaaua

SEQ ID NO: 825642 - RNA, 19 nt, Homo sapiens
  misc_RNA (1)...(19): siRNA sense strand
gccaagcgguuucauaugg

SEQ ID NO: 825643 - RNA, 19 nt, Homo sapiens
  misc_RNA (1)...(19): siRNA sense strand
gagaaagccguacaucaga

SEQ ID NO: 825644 - RNA, 19 nt, Homo sapiens
  misc_RNA (1)...(19): siRNA sense strand
ccaacaccaucccaagaaa

SEQ ID NO: 825645 - RNA, 19 nt, Homo sapiens
  misc_RNA (1)...(19): siRNA sense strand
gugccugggucacagcuua

SEQ ID NO: 825646 - RNA, 19 nt, Homo sapiens
  misc_RNA (1)...(19): siRNA sense strand
ggaaccaagauaucuguaa

SEQ ID NO: 825647 - RNA, 19 nt, Homo sapiens
  misc_RNA (1)...(19): siRNA sense strand
ggaauguacgcauagcuuu

SEQ ID NO: 825648 - RNA, 19 nt, Homo sapiens
  misc_RNA (1)...(19): siRNA sense strand
gagagugaccuaagaagau

SEQ ID NO: 825649 - RNA, 19 nt, Homo sapiens
  misc_RNA (1)...(19): siRNA sense strand
gaaagccguacaucagaaa

SEQ ID NO: 825650 - RNA, 19 nt, Homo sapiens
  misc_RNA (1)...(19): siRNA sense strand
ugacaggcuugcuggauau

SEQ ID NO: 825651 - RNA, 19 nt, Homo sapiens
  misc_RNA (1)...(19): siRNA sense strand
agucaagaguccaggcuua

SEQ ID NO: 825652 - RNA, 19 nt, Homo sapiens
  misc_RNA (1)...(19): siRNA sense strand
ggauagaaaccuguaagaa

SEQ ID NO: 825653 - RNA, 19 nt, Homo sapiens
  misc_RNA (1)...(19): siRNA sense strand
gcuugggccuguuacguuu

SEQ ID NO: 825654 - RNA, 19 nt, Homo sapiens
  misc_RNA (1)...(19): siRNA sense strand
ggagagugaccuaagaaga

SEQ ID NO: 825655 - RNA, 19 nt, Homo sapiens
  misc_RNA (1)...(19): siRNA sense strand
uacaggagauugcccagaa

SEQ ID NO: 825656 - RNA, 19 nt, Homo sapiens
  misc_RNA (1)...(19): siRNA sense strand
uaacaucaccagcagaaau

SEQ ID NO: 825657 - RNA, 19 nt, Homo sapiens
  misc_RNA (1)...(19): siRNA sense strand
guucacugcuugucuggaa

SEQ ID NO: 825658 - RNA, 19 nt, Homo sapiens
  misc_RNA (1)...(19): siRNA sense strand
agaagaacauuugguuaga

SEQ ID NO: 825659 - RNA, 19 nt, Homo sapiens
  misc_RNA (1)...(19): siRNA sense strand
gcagaggccagcaaggauu

SEQ ID NO: 825660 - RNA, 19 nt, Homo sapiens
  misc_RNA (1)...(19): siRNA sense strand
gaugcagggugucaagaau

SEQ ID NO: 825661 - RNA, 19 nt, Homo sapiens
  misc_RNA (1)...(19): siRNA sense strand
gaagagcaagcuaagaauc

SEQ ID NO: 825662 - RNA, 19 nt, Homo sapiens
  misc_RNA (1)...(19): siRNA sense strand
gaaauuccggcagguacua

SEQ ID NO: 825663 - RNA, 19 nt, Homo sapiens
  misc_RNA (1)...(19): siRNA sense strand
acacagggcugacguuugc

SEQ ID NO: 825664 - RNA, 19 nt, Homo sapiens
  misc_RNA (1)...(19): siRNA sense strand
gguuucauauggucaagaa

SEQ ID NO: 825665 - RNA, 19 nt, Homo sapiens
  misc_RNA (1)...(19): siRNA sense strand
gaaaggcaaagaggaagaa

SEQ ID NO: 825666 - RNA, 19 nt, Homo sapiens
  misc_RNA (1)...(19): siRNA sense strand
caaaugguaaggagaguga

SEQ ID NO: 825667 - RNA, 19 nt, Homo sapiens
  misc_RNA (1)...(19): siRNA sense strand
gcagaaauuccggcaggua

SEQ ID NO: 825668 - RNA, 19 nt, Homo sapiens
  misc_RNA (1)...(19): siRNA sense strand
gcaaagaggaagaaauacu

SEQ ID NO: 825669 - RNA, 19 nt, Homo sapiens
  misc_RNA (1)...(19): siRNA sense strand
gaaaauuacugaagcaacu

SEQ ID NO: 825670 - RNA, 19 nt, Homo sapiens
  misc_RNA (1)...(19): siRNA sense strand
gaaaacacgccaagaaaau

SEQ ID NO: 825671 - RNA, 19 nt, Homo sapiens
  misc_RNA (1)...(19): siRNA sense strand
gcaggcagcuguggaucug

SEQ ID NO: 825672 - RNA, 19 nt, Homo sapiens
  misc_RNA (1)...(19): siRNA sense strand
agaaagccguacaucagaa

SEQ ID NO: 825673 - RNA, 19 nt, Homo sapiens
  misc_RNA (1)...(19): siRNA sense strand
cggaagagcaagcuaagaa

SEQ ID NO: 825674 - RNA, 19 nt, Homo sapiens
  misc_RNA (1)...(19): siRNA sense strand
ccaagauaaugagaaaguu

SEQ ID NO: 825675 - RNA, 19 nt, Homo sapiens
  misc_RNA (1)...(19): siRNA sense strand
auagaaaccuguaagaaac

SEQ ID NO: 825676 - RNA, 19 nt, Homo sapiens
  misc_RNA (1)...(19): siRNA sense strand
uaaacaggauaucuuagag

SEQ ID NO: 825677 - RNA, 19 nt, Homo sapiens
  misc_RNA (1)...(19): siRNA sense strand
gcuagaauuuaaccguaga

SEQ ID NO: 825678 - RNA, 19 nt, Homo sapiens
  misc_RNA (1)...(19): siRNA sense strand
ugaaacagaaagagaagaa

SEQ ID NO: 825679 - RNA, 19 nt, Homo sapiens
  misc_RNA (1)...(19): siRNA sense strand
gggagcaguuaacucaaga

SEQ ID NO: 825680 - RNA, 19 nt, Homo sapiens
  misc_RNA (1)...(19): siRNA sense strand
ccuuaaacaggauaucuua

SEQ ID NO: 825681 - RNA, 19 nt, Homo sapiens
  misc_RNA (1)...(19): siRNA sense strand
gaacauuugguuagaaacu

SEQ ID NO: 825682 - RNA, 19 nt, Homo sapiens
  misc_RNA (1)...(19): siRNA sense strand
ugagcagucuuccuccaaa

SEQ ID NO: 825683 - RNA, 19 nt, Homo sapiens
  misc_RNA (1)...(19): siRNA sense strand
ccacaggcauuauaaucag

SEQ ID NO: 825684 - RNA, 19 nt, Homo sapiens
  misc_RNA (1)...(19): siRNA sense strand
uaaauaucccagagaaaug

SEQ ID NO: 825685 - RNA, 19 nt, Homo sapiens
  misc_RNA (1)...(19): siRNA sense strand
aaacagaaagagaagaaga

SEQ ID NO: 825686 - RNA, 19 nt, Homo sapiens
  misc_RNA (1)...(19): siRNA sense strand
aguccaggcuuacgaagaa

SEQ ID NO: 825687 - RNA, 19 nt, Homo sapiens
  misc_RNA (1)...(19): siRNA sense strand
ggaagagcaagcuaagaau

SEQ ID NO: 825688 - RNA, 19 nt, Homo sapiens
  misc_RNA (1)...(19): siRNA sense strand
uccaagauaccuauacuuu

SEQ ID NO: 825689 - RNA, 19 nt, Homo sapiens
  misc_RNA (1)...(19): siRNA sense strand
gggauccucgaauaaauuu

SEQ ID NO: 825690 - RNA, 19 nt, Homo sapiens
  misc_RNA (1)...(19): siRNA sense strand
ccaaccacaggcauuauaa

SEQ ID NO: 825691 - RNA, 19 nt, Homo sapiens
  misc_RNA (1)...(19): siRNA sense strand
gaacuagagauccaugucu

SEQ ID NO: 825692 - RNA, 19 nt, Homo sapiens
  misc_RNA (1)...(19): siRNA sense strand
cugcaucgcugacccacuu

SEQ ID NO: 825693 - RNA, 19 nt, Homo sapiens
  misc_RNA (1)...(19): siRNA sense strand
ggauaucuuagaggaaaua

SEQ ID NO: 825694 - RNA, 19 nt, Homo sapiens
  misc_RNA (1)...(19): siRNA sense strand
ccuguggaauguacgcaua

SEQ ID NO: 825695 - RNA, 19 nt, Homo sapiens
  misc_RNA (1)...(19): siRNA sense strand
uugacaggcuugcuggaua

SEQ ID NO: 825696 - RNA, 19 nt, Homo sapiens
  misc_RNA (1)...(19): siRNA sense strand
cgagaaaauuggcaagaaa

SEQ ID NO: 825697 - RNA, 19 nt, Homo sapiens
  misc_RNA (1)...(19): siRNA sense strand
gaacucuccuaggcuuugu

SEQ ID NO: 825698 - RNA, 19 nt, Homo sapiens
  misc_RNA (1)...(19): siRNA sense strand
ugaagugggcacauccaua

SEQ ID NO: 825699 - RNA, 19 nt, Homo sapiens
  misc_RNA (1)...(19): siRNA sense strand
uaaaccggaugaggaguga

SEQ ID NO: 825700 - RNA, 19 nt, Homo sapiens
  misc_RNA (1)...(19): siRNA sense strand
ugacagcguuucccuucau

SEQ ID NO: 825701 - RNA, 19 nt, Homo sapiens
  misc_RNA (1)...(19): siRNA sense strand
uugcgaggauugcuauuga

SEQ ID NO: 825702 - RNA, 19 nt, Homo sapiens
  misc_RNA (1)...(19): siRNA sense strand
ggaugcagggugucaagaa

SEQ ID NO: 825703 - RNA, 19 nt, Homo sapiens
  misc_RNA (1)...(19): siRNA sense strand
guagcuucaucuccaaaug

SEQ ID NO: 825704 - RNA, 19 nt, Homo sapiens
  misc_RNA (1)...(19): siRNA sense strand
gaagagacacagcaaugua

SEQ ID NO: 825705 - RNA, 19 nt, Homo sapiens
  misc_RNA (1)...(19): siRNA sense strand
gggagaccuuugucacuua

SEQ ID NO: 825706 - RNA, 19 nt, Homo sapiens
  misc_RNA (1)...(19): siRNA sense strand
ucagaucacugugcgaaua

SEQ ID NO: 825707 - RNA, 19 nt, Homo sapiens
  misc_RNA (1)...(19): siRNA sense strand
gagaggcccugcucacuuc

SEQ ID NO: 825708 - RNA, 19 nt, Homo sapiens
  misc_RNA (1)...(19): siRNA sense strand
ucaauacacucaagcucua

SEQ ID NO: 825709 - RNA, 19 nt, Homo sapiens
  misc_RNA (1)...(19): siRNA sense strand
uagcagagauuggagcuuu

SEQ ID NO: 825710 - RNA, 19 nt, Homo sapiens
  misc_RNA (1)...(19): siRNA sense strand
gaaggacucugacuuacac

SEQ ID NO: 825711 - RNA, 19 nt, Homo sapiens
  misc_RNA (1)...(19): siRNA sense strand
ugagaaagcugcggaagca

SEQ ID NO: 825712 - RNA, 19 nt, Homo sapiens
  misc_RNA (1)...(19): siRNA sense strand
ggaggaggaugaggaggaa

SEQ ID NO: 825713 - RNA, 19 nt, Homo sapiens
  misc_RNA (1)...(19): siRNA sense strand
gguccuaccugaugagaag

SEQ ID NO: 825714 - RNA, 19 nt, Homo sapiens
  misc_RNA (1)...(19): siRNA sense strand
cugccucgguuaucacuua

SEQ ID NO: 825715 - RNA, 19 nt, Homo sapiens
  misc_RNA (1)...(19): siRNA sense strand
ccaggacccuaucauuuca

SEQ ID NO: 825716 - RNA, 19 nt, Homo sapiens
  misc_RNA (1)...(19): siRNA sense strand
cggaggagcugggaggaaa

SEQ ID NO: 825717 - RNA, 19 nt, Homo sapiens
  misc_RNA (1)...(19): siRNA sense strand
caagcugccucgguuauca

SEQ ID NO: 825718 - RNA, 19 nt, Homo sapiens
  misc_RNA (1)...(19): siRNA sense strand
ggaaggacucugacuuaca

SEQ ID NO: 825719 - RNA, 19 nt, Homo sapiens
  misc_RNA (1)...(19): siRNA sense strand
cuggaaggacucugacuua

SEQ ID NO: 825720 - RNA, 19 nt, Homo sapiens
  misc_RNA (1)...(19): siRNA sense strand
cacccucugucaucacuuu

SEQ ID NO: 825721 - RNA, 19 nt, Homo sapiens
  misc_RNA (1)...(19): siRNA sense strand
caagucccuucuucagaga

SEQ ID NO: 825722 - RNA, 19 nt, Homo sapiens
  misc_RNA (1)...(19): siRNA sense strand
gauaggggcugccaaaguc

SEQ ID NO: 825723 - RNA, 19 nt, Homo sapiens
  misc_RNA (1)...(19): siRNA sense strand
gcuacaagcccaagcucaa

SEQ ID NO: 825724 - RNA, 19 nt, Homo sapiens
  misc_RNA (1)...(19): siRNA sense strand
ggugaugccuggguaccuu

SEQ ID NO: 825725 - RNA, 19 nt, Homo sapiens
  misc_RNA (1)...(19): siRNA sense strand
agaccuuugucacuuacua

SEQ ID NO: 825726 - RNA, 19 nt, Homo sapiens
  misc_RNA (1)...(19): siRNA sense strand
cgccuacccuuacaacuuc

SEQ ID NO: 825727 - RNA, 19 nt, Homo sapiens
  misc_RNA (1)...(19): siRNA sense strand
caacaugguccuaccugau

SEQ ID NO: 825728 - RNA, 19 nt, Homo sapiens
  misc_RNA (1)...(19): siRNA sense strand
uuucugauguccucaacuu

SEQ ID NO: 825729 - RNA, 19 nt, Homo sapiens
  misc_RNA (1)...(19): siRNA sense strand
ggaggaggccaucgucaag

SEQ ID NO: 825730 - RNA, 19 nt, Homo sapiens
  misc_RNA (1)...(19): siRNA sense strand
ggagaccuuugucacuuac

SEQ ID NO: 825731 - RNA, 19 nt, Homo sapiens
  misc_RNA (1)...(19): siRNA sense strand
gggcagcuguagcagagau

SEQ ID NO: 825732 - RNA, 19 nt, Homo sapiens
  misc_RNA (1)...(19): siRNA sense strand
ccuacaagccuaagugcaa

SEQ ID NO: 825733 - RNA, 19 nt, Homo sapiens
  misc_RNA (1)...(19): siRNA sense strand
uguuugcucuggcggagua

SEQ ID NO: 825734 - RNA, 19 nt, Homo sapiens
  misc_RNA (1)...(19): siRNA sense strand
gggaaaaucugggagugaa

SEQ ID NO: 825735 - RNA, 19 nt, Homo sapiens
  misc_RNA (1)...(19): siRNA sense strand
cguccuggcugcuucaagu

SEQ ID NO: 825736 - RNA, 19 nt, Homo sapiens
  misc_RNA (1)...(19): siRNA sense strand
guccucaacuucaucuaca

SEQ ID NO: 825737 - RNA, 19 nt, Homo sapiens
  misc_RNA (1)...(19): siRNA sense strand
gggaggaggccaucgucaa

SEQ ID NO: 825738 - RNA, 19 nt, Homo sapiens
  misc_RNA (1)...(19): siRNA sense strand
ugggagaccuuugucacuu

SEQ ID NO: 825739 - RNA, 19 nt, Homo sapiens
  misc_RNA (1)...(19): siRNA sense strand
gcagguaccagugcaucuu

SEQ ID NO: 825740 - RNA, 19 nt, Homo sapiens
  misc_RNA (1)...(19): siRNA sense strand
ccaccucgcagccugaaga

SEQ ID NO: 825741 - RNA, 19 nt, Homo sapiens
  misc_RNA (1)...(19): siRNA sense strand
cuccaggacccuaucauuu

SEQ ID NO: 825742 - RNA, 19 nt, Homo sapiens
  misc_RNA (1)...(19): siRNA sense strand
uacaagcccaagcucaaua

SEQ ID NO: 825743 - RNA, 19 nt, Homo sapiens
  misc_RNA (1)...(19): siRNA sense strand
gcggccacgugcuguaugu

SEQ ID NO: 825744 - RNA, 19 nt, Homo sapiens
  misc_RNA (1)...(19): siRNA sense strand
gaauuuccacuggccuuga

SEQ ID NO: 825745 - RNA, 19 nt, Homo sapiens
  misc_RNA (1)...(19): siRNA sense strand
caagcucaauacacucaag

SEQ ID NO: 825746 - RNA, 19 nt, Homo sapiens
  misc_RNA (1)...(19): siRNA sense strand
gaccuucaccacccugaga

SEQ ID NO: 825747 - RNA, 19 nt, Homo sapiens
  misc_RNA (1)...(19): siRNA sense strand
gaacccagaagggcgaugu

SEQ ID NO: 825748 - RNA, 19 nt, Homo sapiens
  misc_RNA (1)...(19): siRNA sense strand
gugagaagacacccaaugg

SEQ ID NO: 825749 - RNA, 19 nt, Homo sapiens
  misc_RNA (1)...(19): siRNA sense strand
ccgccuacccuuacaacuu

SEQ ID NO: 825750 - RNA, 19 nt, Homo sapiens
  misc_RNA (1)...(19): siRNA sense strand
ccuacccgcucgucuaugg

SEQ ID NO: 825751 - RNA, 19 nt, Homo sapiens
  misc_RNA (1)...(19): siRNA sense strand
aggaugaggaggaaucaaa

SEQ ID NO: 825752 - RNA, 19 nt, Homo sapiens
  misc_RNA (1)...(19): siRNA sense strand
uccguggccucuucuguga

SEQ ID NO: 825753 - RNA, 19 nt, Homo sapiens
  misc_RNA (1)...(19): siRNA sense strand
gcuggaaggacucugacuu

SEQ ID NO: 825754 - RNA, 19 nt, Homo sapiens
  misc_RNA (1)...(19): siRNA sense strand
ugagaagacacccaaugga

SEQ ID NO: 825755 - RNA, 19 nt, Homo sapiens
  misc_RNA (1)...(19): siRNA sense strand
cugaagagacacagcaaug

SEQ ID NO: 825756 - RNA, 19 nt, Homo sapiens
  misc_RNA (1)...(19): siRNA sense strand
ggaugaggaggaaucaaag

SEQ ID NO: 825757 - RNA, 19 nt, Homo sapiens
  misc_RNA (1)...(19): siRNA sense strand
ucacuuacuauaaccugaa

SEQ ID NO: 825758 - RNA, 19 nt, Homo sapiens
  misc_RNA (1)...(19): siRNA sense strand
gugacccuguccagucuga

SEQ ID NO: 825759 - RNA, 19 nt, Homo sapiens
  misc_RNA (1)...(19): siRNA sense strand
caacucuuccuccaccaau

SEQ ID NO: 825760 - RNA, 19 nt, Homo sapiens
  misc_RNA (1)...(19): siRNA sense strand
agagugaggaggacgaaga

SEQ ID NO: 825761 - RNA, 19 nt, Homo sapiens
  misc_RNA (1)...(19): siRNA sense strand
ccuccacugugucagauca

SEQ ID NO: 825762 - RNA, 19 nt, Homo sapiens
  misc_RNA (1)...(19): siRNA sense strand
gcuauugugagaaaguguu

SEQ ID NO: 825763 - RNA, 19 nt, Homo sapiens
  misc_RNA (1)...(19): siRNA sense strand
cugccgcuauugugagaaa

SEQ ID NO: 825764 - RNA, 19 nt, Homo sapiens
  misc_RNA (1)...(19): siRNA sense strand
gaaguaccccugccgcuau

SEQ ID NO: 825765 - RNA, 19 nt, Homo sapiens
  misc_RNA (1)...(19): siRNA sense strand
ugaagagacacagcaaugu

SEQ ID NO: 825766 - RNA, 19 nt, Homo sapiens
  misc_RNA (1)...(19): siRNA sense strand
agagaggcccugcucacuu

SEQ ID NO: 825767 - RNA, 19 nt, Homo sapiens
  misc_RNA (1)...(19): siRNA sense strand
acaugguccuaccugauga

SEQ ID NO: 825768 - RNA, 19 nt, Homo sapiens
  misc_RNA (1)...(19): siRNA sense strand
uccaggacccuaucauuuc

SEQ ID NO: 825769 - RNA, 19 nt, Homo sapiens
  misc_RNA (1)...(19): siRNA sense strand
gcgccaaggugugcaagac

SEQ ID NO: 825770 - RNA, 19 nt, Homo sapiens
  misc_RNA (1)...(19): siRNA sense strand
aagaggaggaggacgaaga

SEQ ID NO: 825771 - RNA, 19 nt, Homo sapiens
  misc_RNA (1)...(19): siRNA sense strand
ggagagugaggaggacgaa

SEQ ID NO: 825772 - RNA, 19 nt, Homo sapiens
  misc_RNA (1)...(19): siRNA sense strand
ccaccuccacugugucaga

SEQ ID NO: 825773 - RNA, 19 nt, Homo sapiens
  misc_RNA (1)...(19): siRNA sense strand
accagugcaucuucuguug

SEQ ID NO: 825774 - RNA, 19 nt, Homo sapiens
  misc_RNA (1)...(19): siRNA sense strand
gccugaagaggacagcuuu

SEQ ID NO: 825775 - RNA, 19 nt, Homo sapiens
  misc_RNA (1)...(19): siRNA sense strand
gcccuacccgcucgucuau

SEQ ID NO: 825776 - RNA, 19 nt, Homo sapiens
  misc_RNA (1)...(19): siRNA sense strand
ggaggaugaggaggaauca

SEQ ID NO: 825777 - RNA, 19 nt, Homo sapiens
  misc_RNA (1)...(19): siRNA sense strand
gcagcugcguuuucugaug

SEQ ID NO: 825778 - RNA, 19 nt, Homo sapiens
  misc_RNA (1)...(19): siRNA sense strand
cgacuaggaucacgauuua

SEQ ID NO: 825779 - RNA, 19 nt, Homo sapiens
  misc_RNA (1)...(19): siRNA sense strand
ccaaauggcuagaaaugua

SEQ ID NO: 825780 - RNA, 19 nt, Homo sapiens
  misc_RNA (1)...(19): siRNA sense strand
ggagggacaugguaauaaa

SEQ ID NO: 825781 - RNA, 19 nt, Homo sapiens
  misc_RNA (1)...(19): siRNA sense strand
ggucugagauuuauggauu

SEQ ID NO: 825782 - RNA, 19 nt, Homo sapiens
  misc_RNA (1)...(19): siRNA sense strand
ggaucacgauuuagauaua

SEQ ID NO: 825783 - RNA, 19 nt, Homo sapiens
  misc_RNA (1)...(19): siRNA sense strand
gcacauugguuggauggua

SEQ ID NO: 825784 - RNA, 19 nt, Homo sapiens
  misc_RNA (1)...(19): siRNA sense strand
gagaaaugccuuaauaaug

SEQ ID NO: 825785 - RNA, 19 nt, Homo sapiens
  misc_RNA (1)...(19): siRNA sense strand
gaacaggaacauacauuug

SEQ ID NO: 825786 - RNA, 19 nt, Homo sapiens
  misc_RNA (1)...(19): siRNA sense strand
aaaggaagcuacagaugaa

SEQ ID NO: 825787 - RNA, 19 nt, Homo sapiens
  misc_RNA (1)...(19): siRNA sense strand
gagcuaacccgguauuuau

SEQ ID NO: 825788 - RNA, 19 nt, Homo sapiens
  misc_RNA (1)...(19): siRNA sense strand
gaagauaaccagauuggau

SEQ ID NO: 825789 - RNA, 19 nt, Homo sapiens
  misc_RNA (1)...(19): siRNA sense strand
acugagaaaugccuuaaua

SEQ ID NO: 825790 - RNA, 19 nt, Homo sapiens
  misc_RNA (1)...(19): siRNA sense strand
gcaaagaacaggaacauac

SEQ ID NO: 825791 - RNA, 19 nt, Homo sapiens
  misc_RNA (1)...(19): siRNA sense strand
aagcagaaguguuuacuga

SEQ ID NO: 825792 - RNA, 19 nt, Homo sapiens
  misc_RNA (1)...(19): siRNA sense strand
gauggaaucucacugaucu

SEQ ID NO: 825793 - RNA, 19 nt, Homo sapiens
  misc_RNA (1)...(19): siRNA sense strand
ggagcuaacccgguauuua

SEQ ID NO: 825794 - RNA, 19 nt, Homo sapiens
  misc_RNA (1)...(19): siRNA sense strand
gcaauuggcagcuuauaau

SEQ ID NO: 825795 - RNA, 19 nt, Homo sapiens
  misc_RNA (1)...(19): siRNA sense strand
ucucaucgaucaggauuua

SEQ ID NO: 825796 - RNA, 19 nt, Homo sapiens
  misc_RNA (1)...(19): siRNA sense strand
agaagaagcuguccugaag

SEQ ID NO: 825797 - RNA, 19 nt, Homo sapiens
  misc_RNA (1)...(19): siRNA sense strand
uaaaggaagcuacagauga

SEQ ID NO: 825798 - RNA, 19 nt, Homo sapiens
  misc_RNA (1)...(19): siRNA sense strand
gaaguugacugagaaaugc

SEQ ID NO: 825799 - RNA, 19 nt, Homo sapiens
  misc_RNA (1)...(19): siRNA sense strand
gcaagaagaucaacauccu

SEQ ID NO: 825800 - RNA, 19 nt, Homo sapiens
  misc_RNA (1)...(19): siRNA sense strand
gaaauggaaggaauacaga

SEQ ID NO: 825801 - RNA, 19 nt, Homo sapiens
  misc_RNA (1)...(19): siRNA sense strand
gaaagaaggcccagcaaac

SEQ ID NO: 825802 - RNA, 19 nt, Homo sapiens
  misc_RNA (1)...(19): siRNA sense strand
ggccgaagauaaccagauu

SEQ ID NO: 825803 - RNA, 19 nt, Homo sapiens
  misc_RNA (1)...(19): siRNA sense strand
ggaaggagggacaugguaa

SEQ ID NO: 825804 - RNA, 19 nt, Homo sapiens
  misc_RNA (1)...(19): siRNA sense strand
gacgaacucuacaaaugaa

SEQ ID NO: 825805 - RNA, 19 nt, Homo sapiens
  misc_RNA (1)...(19): siRNA sense strand
ccaccaggcuuccgggauu

SEQ ID NO: 825806 - RNA, 19 nt, Homo sapiens
  misc_RNA (1)...(19): siRNA sense strand
gagaguuccuccugacuuc

SEQ ID NO: 825807 - RNA, 19 nt, Homo sapiens
  misc_RNA (1)...(19): siRNA sense strand
aaccugaaguugaauauga

SEQ ID NO: 825808 - RNA, 19 nt, Homo sapiens
  misc_RNA (1)...(19): siRNA sense strand
gggaaugacuauaguuugg

SEQ ID NO: 825809 - RNA, 19 nt, Homo sapiens
  misc_RNA (1)...(19): siRNA sense strand
gaaaugccuuaauaauguc

SEQ ID NO: 825810 - RNA, 19 nt, Homo sapiens
  misc_RNA (1)...(19): siRNA sense strand
aaagaguucucaucgauca

SEQ ID NO: 825811 - RNA, 19 nt, Homo sapiens
  misc_RNA (1)...(19): siRNA sense strand
ggaacauacauuugucuuu

SEQ ID NO: 825812 - RNA, 19 nt, Homo sapiens
  misc_RNA (1)...(19): siRNA sense strand
ugaauuggaugccuugcuu

SEQ ID NO: 825813 - RNA, 19 nt, Homo sapiens
  misc_RNA (1)...(19): siRNA sense strand
caauaaagcaagaagauca

SEQ ID NO: 825814 - RNA, 19 nt, Homo sapiens
  misc_RNA (1)...(19): siRNA sense strand
caagauauucucaguggaa

SEQ ID NO: 825815 - RNA, 19 nt, Homo sapiens
  misc_RNA (1)...(19): siRNA sense strand
gaaucuaauugaucacaca

SEQ ID NO: 825816 - RNA, 19 nt, Homo sapiens
  misc_RNA (1)...(19): siRNA sense strand
gaagcagugcauaagguua

SEQ ID NO: 825817 - RNA, 19 nt, Homo sapiens
  misc_RNA (1)...(19): siRNA sense strand
gagcauaguccugaacuug

SEQ ID NO: 825818 - RNA, 19 nt, Homo sapiens
  misc_RNA (1)...(19): siRNA sense strand
cagcacaaguagcacauug

SEQ ID NO: 825819 - RNA, 19 nt, Homo sapiens
  misc_RNA (1)...(19): siRNA sense strand
gaaggaacgacuccgagaa

SEQ ID NO: 825820 - RNA, 19 nt, Homo sapiens
  misc_RNA (1)...(19): siRNA sense strand
aaauuagacugucccuuug

SEQ ID NO: 825821 - RNA, 19 nt, Homo sapiens
  misc_RNA (1)...(19): siRNA sense strand
gcagaguggugccaugucu

SEQ ID NO: 825822 - RNA, 19 nt, Homo sapiens
  misc_RNA (1)...(19): siRNA sense strand
ccuccugacuucaagagua

SEQ ID NO: 825823 - RNA, 19 nt, Homo sapiens
  misc_RNA (1)...(19): siRNA sense strand
gcugaaaccaauuaucuga

SEQ ID NO: 825824 - RNA, 19 nt, Homo sapiens
  misc_RNA (1)...(19): siRNA sense strand
gagauggaacuggcuauuu

SEQ ID NO: 825825 - RNA, 19 nt, Homo sapiens
  misc_RNA (1)...(19): siRNA sense strand
gcuaacccgguauuuauuu

SEQ ID NO: 825826 - RNA, 19 nt, Homo sapiens
  misc_RNA (1)...(19): siRNA sense strand
gauugaaugucaugagagu

SEQ ID NO: 825827 - RNA, 19 nt, Homo sapiens
  misc_RNA (1)...(19): siRNA sense strand
cagaguaucagaccacaaa

SEQ ID NO: 825828 - RNA, 19 nt, Homo sapiens
  misc_RNA (1)...(19): siRNA sense strand
ugaaggagauaccaaaauu

SEQ ID NO: 825829 - RNA, 19 nt, Homo sapiens
  misc_RNA (1)...(19): siRNA sense strand
gagaugggaaugacuauag

SEQ ID NO: 825830 - RNA, 19 nt, Homo sapiens
  misc_RNA (1)...(19): siRNA sense strand
ggacuugcgggaugugaaa

SEQ ID NO: 825831 - RNA, 19 nt, Homo sapiens
  misc_RNA (1)...(19): siRNA sense strand
ggaagcuacagaugaauug

SEQ ID NO: 825832 - RNA, 19 nt, Homo sapiens
  misc_RNA (1)...(19): siRNA sense strand
gaucacgauuuagauauag

SEQ ID NO: 825833 - RNA, 19 nt, Homo sapiens
  misc_RNA (1)...(19): siRNA sense strand
caaaagaguucucaucgau

SEQ ID NO: 825834 - RNA, 19 nt, Homo sapiens
  misc_RNA (1)...(19): siRNA sense strand
gauucuaaguccaucauca

SEQ ID NO: 825835 - RNA, 19 nt, Homo sapiens
  misc_RNA (1)...(19): siRNA sense strand
aagcugaacuuggugacua

SEQ ID NO: 825836 - RNA, 19 nt, Homo sapiens
  misc_RNA (1)...(19): siRNA sense strand
ggacaugguaauaaagaug

SEQ ID NO: 825837 - RNA, 19 nt, Homo sapiens
  misc_RNA (1)...(19): siRNA sense strand
gcauaguccugaacuuguc

SEQ ID NO: 825838 - RNA, 19 nt, Homo sapiens
  misc_RNA (1)...(19): siRNA sense strand
cugagaaucuaauugauca

SEQ ID NO: 825839 - RNA, 19 nt, Homo sapiens
  misc_RNA (1)...(19): siRNA sense strand
gcugaauagcccagacuua

SEQ ID NO: 825840 - RNA, 19 nt, Homo sapiens
  misc_RNA (1)...(19): siRNA sense strand
ccaaaagcaugcaaacauu

SEQ ID NO: 825841 - RNA, 19 nt, Homo sapiens
  misc_RNA (1)...(19): siRNA sense strand
caagaguuguuugaucaga

SEQ ID NO: 825842 - RNA, 19 nt, Homo sapiens
  misc_RNA (1)...(19): siRNA sense strand
ucuaauugaucacacaguu

SEQ ID NO: 825843 - RNA, 19 nt, Homo sapiens
  misc_RNA (1)...(19): siRNA sense strand
uaucacaccugccgacagu

SEQ ID NO: 825844 - RNA, 19 nt, Homo sapiens
  misc_RNA (1)...(19): siRNA sense strand
guggugaaguugacugaga

SEQ ID NO: 825845 - RNA, 19 nt, Homo sapiens
  misc_RNA (1)...(19): siRNA sense strand
agacgaacucuacaaauga

SEQ ID NO: 825846 - RNA, 19 nt, Homo sapiens
  misc_RNA (1)...(19): siRNA sense strand
ggaauacagaggucaaaca

SEQ ID NO: 825847 - RNA, 19 nt, Homo sapiens
  misc_RNA (1)...(19): siRNA sense strand
ggaugguacugauguuagu

SEQ ID NO: 825848 - RNA, 19 nt, Homo sapiens
  misc_RNA (1)...(19): siRNA sense strand
caaagaacaggaacauaca

SEQ ID NO: 825849 - RNA, 19 nt, Homo sapiens
  misc_RNA (1)...(19): siRNA sense strand
guaaacaugcagagaagga

SEQ ID NO: 825850 - RNA, 19 nt, Homo sapiens
  misc_RNA (1)...(19): siRNA sense strand
gcguaaacaugcagagaag

SEQ ID NO: 825851 - RNA, 19 nt, Homo sapiens
  misc_RNA (1)...(19): siRNA sense strand
ugauugaaagcgacuauuu

SEQ ID NO: 825852 - RNA, 19 nt, Homo sapiens
  misc_RNA (1)...(19): siRNA sense strand
aauaauguuucgacccaaa

SEQ ID NO: 825853 - RNA, 19 nt, Homo sapiens
  misc_RNA (1)...(19): siRNA sense strand
gaaggcccagcaaacgaua

SEQ ID NO: 825854 - RNA, 19 nt, Homo sapiens
  misc_RNA (1)...(19): siRNA sense strand
gaaggaauacagaggucaa

SEQ ID NO: 825855 - RNA, 19 nt, Homo sapiens
  misc_RNA (1)...(19): siRNA sense strand
ugaaagaaggcccagcaaa

SEQ ID NO: 825856 - RNA, 19 nt, Homo sapiens
  misc_RNA (1)...(19): siRNA sense strand
gaaggagggacaugguaau

SEQ ID NO: 825857 - RNA, 19 nt, Homo sapiens
  misc_RNA (1)...(19): siRNA sense strand
agaguuguuugaucagauu

SEQ ID NO: 825858 - RNA, 19 nt, Homo sapiens
  misc_RNA (1)...(19): siRNA sense strand
aggaggaaguggugaaguu

SEQ ID NO: 825859 - RNA, 19 nt, Homo sapiens
  misc_RNA (1)...(19): siRNA sense strand
aacgauuggugauguaauu

SEQ ID NO: 825860 - RNA, 19 nt, Homo sapiens
  misc_RNA (1)...(19): siRNA sense strand
aagaagaucaacauccuuu

SEQ ID NO: 825861 - RNA, 19 nt, Homo sapiens
  misc_RNA (1)...(19): siRNA sense strand
uagaagcagugcauaaggu

SEQ ID NO: 825862 - RNA, 19 nt, Homo sapiens
  misc_RNA (1)...(19): siRNA sense strand
aaacgauauucuagacgaa

SEQ ID NO: 825863 - RNA, 19 nt, Homo sapiens
  misc_RNA (1)...(19): siRNA sense strand
gcagugcaauuggcagcuu

SEQ ID NO: 825864 - RNA, 19 nt, Homo sapiens
  misc_RNA (1)...(19): siRNA sense strand
cagaagaagcuguccugaa

SEQ ID NO: 825865 - RNA, 19 nt, Homo sapiens
  misc_RNA (1)...(19): siRNA sense strand
gggaaggagggacauggua

SEQ ID NO: 825866 - RNA, 19 nt, Homo sapiens
  misc_RNA (1)...(19): siRNA sense strand
ugaaguugacugagaaaug

SEQ ID NO: 825867 - RNA, 19 nt, Homo sapiens
  misc_RNA (1)...(19): siRNA sense strand
gaaguugaauaugagacau

SEQ ID NO: 825868 - RNA, 19 nt, Homo sapiens
  misc_RNA (1)...(19): siRNA sense strand
caccaggcuuccgggauua

SEQ ID NO: 825869 - RNA, 19 nt, Homo sapiens
  misc_RNA (1)...(19): siRNA sense strand
uaggaucacgauuuagaua

SEQ ID NO: 825870 - RNA, 19 nt, Homo sapiens
  misc_RNA (1)...(19): siRNA sense strand
caaauggcuagaaauguau

SEQ ID NO: 825871 - RNA, 19 nt, Homo sapiens
  misc_RNA (1)...(19): siRNA sense strand
gcacaggcugaaaccaauu

SEQ ID NO: 825872 - RNA, 19 nt, Homo sapiens
  misc_RNA (1)...(19): siRNA sense strand
gaacuuggugacuaugauc

SEQ ID NO: 825873 - RNA, 19 nt, Homo sapiens
  misc_RNA (1)...(19): siRNA sense strand
gugguucuguucuaaagga

SEQ ID NO: 825874 - RNA, 19 nt, Homo sapiens
  misc_RNA (1)...(19): siRNA sense strand
gcaacgauuggugauguaa

SEQ ID NO: 825875 - RNA, 19 nt, Homo sapiens
  misc_RNA (1)...(19): siRNA sense strand
ucagauucgugccuauuca

SEQ ID NO: 825876 - RNA, 19 nt, Homo sapiens
  misc_RNA (1)...(19): siRNA sense strand
cagugcaauuggcagcuua

SEQ ID NO: 825877 - RNA, 19 nt, Homo sapiens
  misc_RNA (1)...(19): siRNA sense strand
gcauaagguuacaaaagaa

SEQ ID NO: 825878 - RNA, 19 nt, Homo sapiens
  misc_RNA (1)...(19): siRNA sense strand
ggacagaagugcccuagaa

SEQ ID NO: 825879 - RNA, 19 nt, Homo sapiens
  misc_RNA (1)...(19): siRNA sense strand
gaucauaucucugcaguga

SEQ ID NO: 825880 - RNA, 19 nt, Homo sapiens
  misc_RNA (1)...(19): siRNA sense strand
cgaagacgcugaagaagaa

SEQ ID NO: 825881 - RNA, 19 nt, Homo sapiens
  misc_RNA (1)...(19): siRNA sense strand
gauggaaacuucuauggaa

SEQ ID NO: 825882 - RNA, 19 nt, Homo sapiens
  misc_RNA (1)...(19): siRNA sense strand
ugaagacuguuccaaguua

SEQ ID NO: 825883 - RNA, 19 nt, Homo sapiens
  misc_RNA (1)...(19): siRNA sense strand
gaagauaaaccaccaaaca

SEQ ID NO: 825884 - RNA, 19 nt, Homo sapiens
  misc_RNA (1)...(19): siRNA sense strand
gaaauggccuacacugaca

SEQ ID NO: 825885 - RNA, 19 nt, Homo sapiens
  misc_RNA (1)...(19): siRNA sense strand
ggaaauaaaguucuucuuc

SEQ ID NO: 825886 - RNA, 19 nt, Homo sapiens
  misc_RNA (1)...(19): siRNA sense strand
gaaaagaugucuccacuuc

SEQ ID NO: 825887 - RNA, 19 nt, Homo sapiens
  misc_RNA (1)...(19): siRNA sense strand
caggcaaagucauuaauaa

SEQ ID NO: 825888 - RNA, 19 nt, Homo sapiens
  misc_RNA (1)...(19): siRNA sense strand
ggauagcucucuuccugaa

SEQ ID NO: 825889 - RNA, 19 nt, Homo sapiens
  misc_RNA (1)...(19): siRNA sense strand
ggaagaagaugaggacaag

SEQ ID NO: 825890 - RNA, 19 nt, Homo sapiens
  misc_RNA (1)...(19): siRNA sense strand
gaugaagacuguuccaagu

SEQ ID NO: 825891 - RNA, 19 nt, Homo sapiens
  misc_RNA (1)...(19): siRNA sense strand
ggagagacuugcaugaauc

SEQ ID NO: 825892 - RNA, 19 nt, Homo sapiens
  misc_RNA (1)...(19): siRNA sense strand
ccauggacuuuagaaauua

SEQ ID NO: 825893 - RNA, 19 nt, Homo sapiens
  misc_RNA (1)...(19): siRNA sense strand
gugacuaucccuuugauua

SEQ ID NO: 825894 - RNA, 19 nt, Homo sapiens
  misc_RNA (1)...(19): siRNA sense strand
ccagauguuucaauuggua

SEQ ID NO: 825895 - RNA, 19 nt, Homo sapiens
  misc_RNA (1)...(19): siRNA sense strand
uaccaggaguggauuauaa

SEQ ID NO: 825896 - RNA, 19 nt, Homo sapiens
  misc_RNA (1)...(19): siRNA sense strand
gaccugaccagucuauaua

SEQ ID NO: 825897 - RNA, 19 nt, Homo sapiens
  misc_RNA (1)...(19): siRNA sense strand
gaaagugggacauaugaug

SEQ ID NO: 825898 - RNA, 19 nt, Homo sapiens
  misc_RNA (1)...(19): siRNA sense strand
acacagggaugaucuacuu

SEQ ID NO: 825899 - RNA, 19 nt, Homo sapiens
  misc_RNA (1)...(19): siRNA sense strand
ccgcgcagcugaugaacua

SEQ ID NO: 825900 - RNA, 19 nt, Homo sapiens
  misc_RNA (1)...(19): siRNA sense strand
agagauccaucccagcuua

SEQ ID NO: 825901 - RNA, 19 nt, Homo sapiens
  misc_RNA (1)...(19): siRNA sense strand
ccugaaaucuaagacuuua

SEQ ID NO: 825902 - RNA, 19 nt, Homo sapiens
  misc_RNA (1)...(19): siRNA sense strand
auaaagauuugcggcauua

SEQ ID NO: 825903 - RNA, 19 nt, Homo sapiens
  misc_RNA (1)...(19): siRNA sense strand
gggagagacuugcaugaau

SEQ ID NO: 825904 - RNA, 19 nt, Homo sapiens
  misc_RNA (1)...(19): siRNA sense strand
uuaccuaagucuucaguuu

SEQ ID NO: 825905 - RNA, 19 nt, Homo sapiens
  misc_RNA (1)...(19): siRNA sense strand
ggucauugcugaagaagag

SEQ ID NO: 825906 - RNA, 19 nt, Homo sapiens
  misc_RNA (1)...(19): siRNA sense strand
gaaaccaggcaaagucauu

SEQ ID NO: 825907 - RNA, 19 nt, Homo sapiens
  misc_RNA (1)...(19): siRNA sense strand
ggaaaucacacaaacaagu

SEQ ID NO: 825908 - RNA, 19 nt, Homo sapiens
  misc_RNA (1)...(19): siRNA sense strand
agauagaccugaugaguuc

SEQ ID NO: 825909 - RNA, 19 nt, Homo sapiens
  misc_RNA (1)...(19): siRNA sense strand
gaaacccgagcaacauuaa

SEQ ID NO: 825910 - RNA, 19 nt, Homo sapiens
  misc_RNA (1)...(19): siRNA sense strand
gaauuuaacacaucuccaa

SEQ ID NO: 825911 - RNA, 19 nt, Homo sapiens
  misc_RNA (1)...(19): siRNA sense strand
gaugcagaaucucaaagaa

SEQ ID NO: 825912 - RNA, 19 nt, Homo sapiens
  misc_RNA (1)...(19): siRNA sense strand
gagauagaccugaugaguu

SEQ ID NO: 825913 - RNA, 19 nt, Homo sapiens
  misc_RNA (1)...(19): siRNA sense strand
caaguccucuuugauaaug

SEQ ID NO: 825914 - RNA, 19 nt, Homo sapiens
  misc_RNA (1)...(19): siRNA sense strand
acacaaggaaucacacaua

SEQ ID NO: 825915 - RNA, 19 nt, Homo sapiens
  misc_RNA (1)...(19): siRNA sense strand
gcugauguaccauugcuua

SEQ ID NO: 825916 - RNA, 19 nt, Homo sapiens
  misc_RNA (1)...(19): siRNA sense strand
gacauaugauggaaacuuc

SEQ ID NO: 825917 - RNA, 19 nt, Homo sapiens
  misc_RNA (1)...(19): siRNA sense strand
ccuagaaggugaaauugga

SEQ ID NO: 825918 - RNA, 19 nt, Homo sapiens
  misc_RNA (1)...(19): siRNA sense strand
caccaaacaccaaagauuu

SEQ ID NO: 825919 - RNA, 19 nt, Homo sapiens
  misc_RNA (1)...(19): siRNA sense strand
guuauccacuuccugauga

SEQ ID NO: 825920 - RNA, 19 nt, Homo sapiens
  misc_RNA (1)...(19): siRNA sense strand
caaguuacaaccaaacaaa

SEQ ID NO: 825921 - RNA, 19 nt, Homo sapiens
  misc_RNA (1)...(19): siRNA sense strand
uccauggacuuuagaaauu

SEQ ID NO: 825922 - RNA, 19 nt, Homo sapiens
  misc_RNA (1)...(19): siRNA sense strand
gcaguaauuucaguuguag

SEQ ID NO: 825923 - RNA, 19 nt, Homo sapiens
  misc_RNA (1)...(19): siRNA sense strand
gauguaccauugcuuaucu

SEQ ID NO: 825924 - RNA, 19 nt, Homo sapiens
  misc_RNA (1)...(19): siRNA sense strand
cuaaagcaguuuccaguag

SEQ ID NO: 825925 - RNA, 19 nt, Homo sapiens
  misc_RNA (1)...(19): siRNA sense strand
gaaauugggucuucaaaac

SEQ ID NO: 825926 - RNA, 19 nt, Homo sapiens
  misc_RNA (1)...(19): siRNA sense strand
ggacauaugauggaaacuu

SEQ ID NO: 825927 - RNA, 19 nt, Homo sapiens
  misc_RNA (1)...(19): siRNA sense strand
ucauaucucugcagugaau

SEQ ID NO: 825928 - RNA, 19 nt, Homo sapiens
  misc_RNA (1)...(19): siRNA sense strand
gggagcagcugagaaagau

SEQ ID NO: 825929 - RNA, 19 nt, Homo sapiens
  misc_RNA (1)...(19): siRNA sense strand
ggaccugaccagucuauau

SEQ ID NO: 825930 - RNA, 19 nt, Homo sapiens
  misc_RNA (1)...(19): siRNA sense strand
gaugaguuccuacaaguga

SEQ ID NO: 825931 - RNA, 19 nt, Homo sapiens
  misc_RNA (1)...(19): siRNA sense strand
ucagcaagauggaaagaau

SEQ ID NO: 825932 - RNA, 19 nt, Homo sapiens
  misc_RNA (1)...(19): siRNA sense strand
ggaguggauuauaauuuca

SEQ ID NO: 825933 - RNA, 19 nt, Homo sapiens
  misc_RNA (1)...(19): siRNA sense strand
gauagucaguggugucaag

SEQ ID NO: 825934 - RNA, 19 nt, Homo sapiens
  misc_RNA (1)...(19): siRNA sense strand
ugacuaucccuuugauuaa

SEQ ID NO: 825935 - RNA, 19 nt, Homo sapiens
  misc_RNA (1)...(19): siRNA sense strand
agacaucaauggcaacugu

SEQ ID NO: 825936 - RNA, 19 nt, Homo sapiens
  misc_RNA (1)...(19): siRNA sense strand
gugcagaauuuaacacauc

SEQ ID NO: 825937 - RNA, 19 nt, Homo sapiens
  misc_RNA (1)...(19): siRNA sense strand
ccaggcaaagucauuaaua

SEQ ID NO: 825938 - RNA, 19 nt, Homo sapiens
  misc_RNA (1)...(19): siRNA sense strand
ccugaccagucuauauaua

SEQ ID NO: 825939 - RNA, 19 nt, Homo sapiens
  misc_RNA (1)...(19): siRNA sense strand
uccaguaggugcugaugua

SEQ ID NO: 825940 - RNA, 19 nt, Homo sapiens
  misc_RNA (1)...(19): siRNA sense strand
gcacaaugggauuugguuu

SEQ ID NO: 825941 - RNA, 19 nt, Homo sapiens
  misc_RNA (1)...(19): siRNA sense strand
aaagauggcagaauucaug

SEQ ID NO: 825942 - RNA, 19 nt, Homo sapiens
  misc_RNA (1)...(19): siRNA sense strand
uaacggucauugcugaaga

SEQ ID NO: 825943 - RNA, 19 nt, Homo sapiens
  misc_RNA (1)...(19): siRNA sense strand
gaaaucacacaaacaaguc

SEQ ID NO: 825944 - RNA, 19 nt, Homo sapiens
  misc_RNA (1)...(19): siRNA sense strand
ggccauaaaugagccuauu

SEQ ID NO: 825945 - RNA, 19 nt, Homo sapiens
  misc_RNA (1)...(19): siRNA sense strand
gaaguuuggaggccauaaa

SEQ ID NO: 825946 - RNA, 19 nt, Homo sapiens
  misc_RNA (1)...(19): siRNA sense strand
ggacagaaggugaaaauga

SEQ ID NO: 825947 - RNA, 19 nt, Homo sapiens
  misc_RNA (1)...(19): siRNA sense strand
gcuaaagcaguuuccagua

SEQ ID NO: 825948 - RNA, 19 nt, Homo sapiens
  misc_RNA (1)...(19): siRNA sense strand
ccaccaaacaccaaagauu

SEQ ID NO: 825949 - RNA, 19 nt, Homo sapiens
  misc_RNA (1)...(19): siRNA sense strand
guuagaaagugggacauau

SEQ ID NO: 825950 - RNA, 19 nt, Homo sapiens
  misc_RNA (1)...(19): siRNA sense strand
gcccuaugauguugucuug

SEQ ID NO: 825951 - RNA, 19 nt, Homo sapiens
  misc_RNA (1)...(19): siRNA sense strand
ugauggaauuccuguuaaa

SEQ ID NO: 825952 - RNA, 19 nt, Homo sapiens
  misc_RNA (1)...(19): siRNA sense strand
ggagauagaccugaugagu

SEQ ID NO: 825953 - RNA, 19 nt, Homo sapiens
  misc_RNA (1)...(19): siRNA sense strand
ccucuuugauaaugaguuu

SEQ ID NO: 825954 - RNA, 19 nt, Homo sapiens
  misc_RNA (1)...(19): siRNA sense strand
ugaagacugugaagaugga

SEQ ID NO: 825955 - RNA, 19 nt, Homo sapiens
  misc_RNA (1)...(19): siRNA sense strand
ugaaacccgagcaacauua

SEQ ID NO: 825956 - RNA, 19 nt, Homo sapiens
  misc_RNA (1)...(19): siRNA sense strand
gaaaguuggagaucauauc

SEQ ID NO: 825957 - RNA, 19 nt, Homo sapiens
  misc_RNA (1)...(19): siRNA sense strand
ucucaggccuucauuucaa

SEQ ID NO: 825958 - RNA, 19 nt, Homo sapiens
  misc_RNA (1)...(19): siRNA sense strand
cagcaagugaucagagaua

SEQ ID NO: 825959 - RNA, 19 nt, Homo sapiens
  misc_RNA (1)...(19): siRNA sense strand
gcaagugagcagagaguau

SEQ ID NO: 825960 - RNA, 19 nt, Homo sapiens
  misc_RNA (1)...(19): siRNA sense strand
cgcaguaauuucaguugua

SEQ ID NO: 825961 - RNA, 19 nt, Homo sapiens
  misc_RNA (1)...(19): siRNA sense strand
uaaagggaaaucacacaaa

SEQ ID NO: 825962 - RNA, 19 nt, Homo sapiens
  misc_RNA (1)...(19): siRNA sense strand
gggaaauggccuacacuga

SEQ ID NO: 825963 - RNA, 19 nt, Homo sapiens
  misc_RNA (1)...(19): siRNA sense strand
gaaccuacacaaggaauca

SEQ ID NO: 825964 - RNA, 19 nt, Homo sapiens
  misc_RNA (1)...(19): siRNA sense strand
gauggcagaauucauguug

SEQ ID NO: 825965 - RNA, 19 nt, Homo sapiens
  misc_RNA (1)...(19): siRNA sense strand
caggaguggauuauaauuu

SEQ ID NO: 825966 - RNA, 19 nt, Homo sapiens
  misc_RNA (1)...(19): siRNA sense strand
gcagucggcacaaucagaa

SEQ ID NO: 825967 - RNA, 19 nt, Homo sapiens
  misc_RNA (1)...(19): siRNA sense strand
ggguuuggguuugcaauug

SEQ ID NO: 825968 - RNA, 19 nt, Homo sapiens
  misc_RNA (1)...(19): siRNA sense strand
guccagauguuucaauugg

SEQ ID NO: 825969 - RNA, 19 nt, Homo sapiens
  misc_RNA (1)...(19): siRNA sense strand
guuaggacagguugaaauu

SEQ ID NO: 825970 - RNA, 19 nt, Homo sapiens
  misc_RNA (1)...(19): siRNA sense strand
gaagacuguuccaaguuac

SEQ ID NO: 825971 - RNA, 19 nt, Homo sapiens
  misc_RNA (1)...(19): siRNA sense strand
cagcagaacccagcccuuu

SEQ ID NO: 825972 - RNA, 19 nt, Homo sapiens
  misc_RNA (1)...(19): siRNA sense strand
agagaggcauucugaguca

SEQ ID NO: 825973 - RNA, 19 nt, Homo sapiens
  misc_RNA (1)...(19): siRNA sense strand
aaagggaaaucacacaaac

SEQ ID NO: 825974 - RNA, 19 nt, Homo sapiens
  misc_RNA (1)...(19): siRNA sense strand
aggaguggauuauaauuuc

SEQ ID NO: 825975 - RNA, 19 nt, Homo sapiens
  misc_RNA (1)...(19): siRNA sense strand
aaacaaauagcuccaugga

SEQ ID NO: 825976 - RNA, 19 nt, Homo sapiens
  misc_RNA (1)...(19): siRNA sense strand
uaccugaaaucuaagacuu

SEQ ID NO: 825977 - RNA, 19 nt, Homo sapiens
  misc_RNA (1)...(19): siRNA sense strand
aauaaagauuugcggcauu

SEQ ID NO: 825978 - RNA, 19 nt, Homo sapiens
  misc_RNA (1)...(19): siRNA sense strand
ggacagaagugcccuagaa

SEQ ID NO: 825979 - RNA, 19 nt, Homo sapiens
  misc_RNA (1)...(19): siRNA sense strand
gaucauaucucugcaguga

SEQ ID NO: 825980 - RNA, 19 nt, Homo sapiens
  misc_RNA (1)...(19): siRNA sense strand
cgaagacgcugaagaagaa

SEQ ID NO: 825981 - RNA, 19 nt, Homo sapiens
  misc_RNA (1)...(19): siRNA sense strand
gauggaaacuucuauggaa

SEQ ID NO: 825982 - RNA, 19 nt, Homo sapiens
  misc_RNA (1)...(19): siRNA sense strand
ugaagacuguuccaaguua

SEQ ID NO: 825983 - RNA, 19 nt, Homo sapiens
  misc_RNA (1)...(19): siRNA sense strand
gaagauaaaccaccaaaca

SEQ ID NO: 825984 - RNA, 19 nt, Homo sapiens
  misc_RNA (1)...(19): siRNA sense strand
gaaauggccuacacugaca

SEQ ID NO: 825985 - RNA, 19 nt, Homo sapiens
  misc_RNA (1)...(19): siRNA sense strand
ggaaauaaaguucuucuuc

SEQ ID NO: 825986 - RNA, 19 nt, Homo sapiens
  misc_RNA (1)...(19): siRNA sense strand
gaaaagaugucuccacuuc

SEQ ID NO: 825987 - RNA, 19 nt, Homo sapiens
  misc_RNA (1)...(19): siRNA sense strand
caggcaaagucauuaauaa

SEQ ID NO: 825988 - RNA, 19 nt, Homo sapiens
  misc_RNA (1)...(19): siRNA sense strand
ggauagcucucuuccugaa

SEQ ID NO: 825989 - RNA, 19 nt, Homo sapiens
  misc_RNA (1)...(19): siRNA sense strand
ggaagaagaugaggacaag

SEQ ID NO: 825990 - RNA, 19 nt, Homo sapiens
  misc_RNA (1)...(19): siRNA sense strand
gaugaagacuguuccaagu

SEQ ID NO: 825991 - RNA, 19 nt, Homo sapiens
  misc_RNA (1)...(19): siRNA sense strand
ggagagacuugcaugaauc

SEQ ID NO: 825992 - RNA, 19 nt, Homo sapiens
  misc_RNA (1)...(19): siRNA sense strand
ccauggacuuuagaaauua

SEQ ID NO: 825993 - RNA, 19 nt, Homo sapiens
  misc_RNA (1)...(19): siRNA sense strand
gugacuaucccuuugauua

SEQ ID NO: 825994 - RNA, 19 nt, Homo sapiens
  misc_RNA (1)...(19): siRNA sense strand
ccagauguuucaauuggua

SEQ ID NO: 825995 - RNA, 19 nt, Homo sapiens
  misc_RNA (1)...(19): siRNA sense strand
uaccaggaguggauuauaa

SEQ ID NO: 825996 - RNA, 19 nt, Homo sapiens
  misc_RNA (1)...(19): siRNA sense strand
gaccugaccagucuauaua

SEQ ID NO: 825997 - RNA, 19 nt, Homo sapiens
  misc_RNA (1)...(19): siRNA sense strand
gaaagugggacauaugaug

SEQ ID NO: 825998 - RNA, 19 nt, Homo sapiens
  misc_RNA (1)...(19): siRNA sense strand
acacagggaugaucuacuu

SEQ ID NO: 825999 - RNA, 19 nt, Homo sapiens
  misc_RNA (1)...(19): siRNA sense strand
ccgcgcagcugaugaacua

SEQ ID NO: 826000 - RNA, 19 nt, Homo sapiens
  misc_RNA (1)...(19): siRNA sense strand
agagauccaucccagcuua

SEQ ID NO: 826001 - RNA, 19 nt, Homo sapiens
  misc_RNA (1)...(19): siRNA sense strand
ccugaaaucuaagacuuua

SEQ ID NO: 826002 - RNA, 19 nt, Homo sapiens
  misc_RNA (1)...(19): siRNA sense strand
auaaagauuugcggcauua

SEQ ID NO: 826003 - RNA, 19 nt, Homo sapiens
  misc_RNA (1)...(19): siRNA sense strand
gggagagacuugcaugaau

SEQ ID NO: 826004 - RNA, 19 nt, Homo sapiens
  misc_RNA (1)...(19): siRNA sense strand
uuaccuaagucuucaguuu

SEQ ID NO: 826005 - RNA, 19 nt, Homo sapiens
  misc_RNA (1)...(19): siRNA sense strand
ggucauugcugaagaagag

SEQ ID NO: 826006 - RNA, 19 nt, Homo sapiens
  misc_RNA (1)...(19): siRNA sense strand
gaaaccaggcaaagucauu

SEQ ID NO: 826007 - RNA, 19 nt, Homo sapiens
  misc_RNA (1)...(19): siRNA sense strand
ggaaaucacacaaacaagu

SEQ ID NO: 826008 - RNA, 19 nt, Homo sapiens
  misc_RNA (1)...(19): siRNA sense strand
agauagaccugaugaguuc

SEQ ID NO: 826009 - RNA, 19 nt, Homo sapiens
  misc_RNA (1)...(19): siRNA sense strand
gaaacccgagcaacauuaa

SEQ ID NO: 826010 - RNA, 19 nt, Homo sapiens
  misc_RNA (1)...(19): siRNA sense strand
gaauuuaacacaucuccaa

SEQ ID NO: 826011 - RNA, 19 nt, Homo sapiens
  misc_RNA (1)...(19): siRNA sense strand
gaugcagaaucucaaagaa

SEQ ID NO: 826012 - RNA, 19 nt, Homo sapiens
  misc_RNA (1)...(19): siRNA sense strand
gagauagaccugaugaguu

SEQ ID NO: 826013 - RNA, 19 nt, Homo sapiens
  misc_RNA (1)...(19): siRNA sense strand
caaguccucuuugauaaug

SEQ ID NO: 826014 - RNA, 19 nt, Homo sapiens
  misc_RNA (1)...(19): siRNA sense strand
acacaaggaaucacacaua

SEQ ID NO: 826015 - RNA, 19 nt, Homo sapiens
  misc_RNA (1)...(19): siRNA sense strand
gcugauguaccauugcuua

SEQ ID NO: 826016 - RNA, 19 nt, Homo sapiens
  misc_RNA (1)...(19): siRNA sense strand
gacauaugauggaaacuuc

SEQ ID NO: 826017 - RNA, 19 nt, Homo sapiens
  misc_RNA (1)...(19): siRNA sense strand
ccuagaaggugaaauugga

SEQ ID NO: 826018 - RNA, 19 nt, Homo sapiens
  misc_RNA (1)...(19): siRNA sense strand
caccaaacaccaaagauuu

SEQ ID NO: 826019 - RNA, 19 nt, Homo sapiens
  misc_RNA (1)...(19): siRNA sense strand
guuauccacuuccugauga

SEQ ID NO: 826020 - RNA, 19 nt, Homo sapiens
  misc_RNA (1)...(19): siRNA sense strand
caaguuacaaccaaacaaa

SEQ ID NO: 826021 - RNA, 19 nt, Homo sapiens
  misc_RNA (1)...(19): siRNA sense strand
uccauggacuuuagaaauu

SEQ ID NO: 826022 - RNA, 19 nt, Homo sapiens
  misc_RNA (1)...(19): siRNA sense strand
gcaguaauuucaguuguag

SEQ ID NO: 826023 - RNA, 19 nt, Homo sapiens
  misc_RNA (1)...(19): siRNA sense strand
gauguaccauugcuuaucu

SEQ ID NO: 826024 - RNA, 19 nt, Homo sapiens
  misc_RNA (1)...(19): siRNA sense strand
cuaaagcaguuuccaguag

SEQ ID NO: 826025 - RNA, 19 nt, Homo sapiens
  misc_RNA (1)...(19): siRNA sense strand
gaaauugggucuucaaaac

SEQ ID NO: 826026 - RNA, 19 nt, Homo sapiens
  misc_RNA (1)...(19): siRNA sense strand
ggacauaugauggaaacuu

SEQ ID NO: 826027 - RNA, 19 nt, Homo sapiens
  misc_RNA (1)...(19): siRNA sense strand
ucauaucucugcagugaau

SEQ ID NO: 826028 - RNA, 19 nt, Homo sapiens
  misc_RNA (1)...(19): siRNA sense strand
gggagcagcugagaaagau

SEQ ID NO: 826029 - RNA, 19 nt, Homo sapiens
  misc_RNA (1)...(19): siRNA sense strand
ggaccugaccagucuauau

SEQ ID NO: 826030 - RNA, 19 nt, Homo sapiens
  misc_RNA (1)...(19): siRNA sense strand
gaugaguuccuacaaguga

SEQ ID NO: 826031 - RNA, 19 nt, Homo sapiens
  misc_RNA (1)...(19): siRNA sense strand
ucagcaagauggaaagaau

SEQ ID NO: 826032 - RNA, 19 nt, Homo sapiens
  misc_RNA (1)...(19): siRNA sense strand
ggaguggauuauaauuuca

SEQ ID NO: 826033 - RNA, 19 nt, Homo sapiens
  misc_RNA (1)...(19): siRNA sense strand
gauagucaguggugucaag

SEQ ID NO: 826034 - RNA, 19 nt, Homo sapiens
  misc_RNA (1)...(19): siRNA sense strand
ugacuaucccuuugauuaa

SEQ ID NO: 826035 - RNA, 19 nt, Homo sapiens
  misc_RNA (1)...(19): siRNA sense strand
agacaucaauggcaacugu

SEQ ID NO: 826036 - RNA, 19 nt, Homo sapiens
  misc_RNA (1)...(19): siRNA sense strand
gugcagaauuuaacacauc

SEQ ID NO: 826037 - RNA, 19 nt, Homo sapiens
  misc_RNA (1)...(19): siRNA sense strand
ccaggcaaagucauuaaua

SEQ ID NO: 826038 - RNA, 19 nt, Homo sapiens
  misc_RNA (1)...(19): siRNA sense strand
ccugaccagucuauauaua

SEQ ID NO: 826039 - RNA, 19 nt, Homo sapiens
  misc_RNA (1)...(19): siRNA sense strand
uccaguaggugcugaugua

SEQ ID NO: 826040 - RNA, 19 nt, Homo sapiens
  misc_RNA (1)...(19): siRNA sense strand
gcacaaugggauuugguuu

SEQ ID NO: 826041 - RNA, 19 nt, Homo sapiens
  misc_RNA (1)...(19): siRNA sense strand
aaagauggcagaauucaug

SEQ ID NO: 826042 - RNA, 19 nt, Homo sapiens
  misc_RNA (1)...(19): siRNA sense strand
uaacggucauugcugaaga

SEQ ID NO: 826043 - RNA, 19 nt, Homo sapiens
  misc_RNA (1)...(19): siRNA sense strand
gaaaucacacaaacaaguc

SEQ ID NO: 826044 - RNA, 19 nt, Homo sapiens
  misc_RNA (1)...(19): siRNA sense strand
ggccauaaaugagccuauu

SEQ ID NO: 826045 - RNA, 19 nt, Homo sapiens
  misc_RNA (1)...(19): siRNA sense strand
gaaguuuggaggccauaaa

SEQ ID NO: 826046 - RNA, 19 nt, Homo sapiens
  misc_RNA (1)...(19): siRNA sense strand
ggacagaaggugaaaauga

SEQ ID NO: 826047 - RNA, 19 nt, Homo sapiens
  misc_RNA (1)...(19): siRNA sense strand
gcuaaagcaguuuccagua

SEQ ID NO: 826048 - RNA, 19 nt, Homo sapiens
  misc_RNA (1)...(19): siRNA sense strand
ccaccaaacaccaaagauu

SEQ ID NO: 826049 - RNA, 19 nt, Homo sapiens
  misc_RNA (1)...(19): siRNA sense strand
guuagaaagugggacauau

SEQ ID NO: 826050 - RNA, 19 nt, Homo sapiens
  misc_RNA (1)...(19): siRNA sense strand
gcccuaugauguugucuug

SEQ ID NO: 826051 - RNA, 19 nt, Homo sapiens
  misc_RNA (1)...(19): siRNA sense strand
ugauggaauuccuguuaaa

SEQ ID NO: 826052 - RNA, 19 nt, Homo sapiens
  misc_RNA (1)...(19): siRNA sense strand
ggagauagaccugaugagu

SEQ ID NO: 826053 - RNA, 19 nt, Homo sapiens
  misc_RNA (1)...(19): siRNA sense strand
ccucuuugauaaugaguuu

SEQ ID NO: 826054 - RNA, 19 nt, Homo sapiens
  misc_RNA (1)...(19): siRNA sense strand
ugaagacugugaagaugga

SEQ ID NO: 826055 - RNA, 19 nt, Homo sapiens
  misc_RNA (1)...(19): siRNA sense strand
ugaaacccgagcaacauua

SEQ ID NO: 826056 - RNA, 19 nt, Homo sapiens
  misc_RNA (1)...(19): siRNA sense strand
gaaaguuggagaucauauc

SEQ ID NO: 826057 - RNA, 19 nt, Homo sapiens
  misc_RNA (1)...(19): siRNA sense strand
ucucaggccuucauuucaa

SEQ ID NO: 826058 - RNA, 19 nt, Homo sapiens
  misc_RNA (1)...(19): siRNA sense strand
cagcaagugaucagagaua

SEQ ID NO: 826059 - RNA, 19 nt, Homo sapiens
  misc_RNA (1)...(19): siRNA sense strand
gcaagugagcagagaguau

SEQ ID NO: 826060 - RNA, 19 nt, Homo sapiens
  misc_RNA (1)...(19): siRNA sense strand
cgcaguaauuucaguugua

SEQ ID NO: 826061 - RNA, 19 nt, Homo sapiens
  misc_RNA (1)...(19): siRNA sense strand
uaaagggaaaucacacaaa

SEQ ID NO: 826062 - RNA, 19 nt, Homo sapiens
  misc_RNA (1)...(19): siRNA sense strand
gggaaauggccuacacuga

SEQ ID NO: 826063 - RNA, 19 nt, Homo sapiens
  misc_RNA (1)...(19): siRNA sense strand
gaaccuacacaaggaauca

SEQ ID NO: 826064 - RNA, 19 nt, Homo sapiens
  misc_RNA (1)...(19): siRNA sense strand
gauggcagaauucauguug

SEQ ID NO: 826065 - RNA, 19 nt, Homo sapiens
  misc_RNA (1)...(19): siRNA sense strand
caggaguggauuauaauuu

SEQ ID NO: 826066 - RNA, 19 nt, Homo sapiens
  misc_RNA (1)...(19): siRNA sense strand
gcagucggcacaaucagaa

SEQ ID NO: 826067 - RNA, 19 nt, Homo sapiens
  misc_RNA (1)...(19): siRNA sense strand
ggguuuggguuugcaauug

SEQ ID NO: 826068 - RNA, 19 nt, Homo sapiens
  misc_RNA (1)...(19): siRNA sense strand
guccagauguuucaauugg

SEQ ID NO: 826069 - RNA, 19 nt, Homo sapiens
  misc_RNA (1)...(19): siRNA sense strand
guuaggacagguugaaauu

SEQ ID NO: 826070 - RNA, 19 nt, Homo sapiens
  misc_RNA (1)...(19): siRNA sense strand
gaagacuguuccaaguuac

SEQ ID NO: 826071 - RNA, 19 nt, Homo sapiens
  misc_RNA (1)...(19): siRNA sense strand
cagcagaacccagcccuuu

SEQ ID NO: 826072 - RNA, 19 nt, Homo sapiens
  misc_RNA (1)...(19): siRNA sense strand
agagaggcauucugaguca

SEQ ID NO: 826073 - RNA, 19 nt, Homo sapiens
  misc_RNA (1)...(19): siRNA sense strand
aaagggaaaucacacaaac

SEQ ID NO: 826074 - RNA, 19 nt, Homo sapiens
  misc_RNA (1)...(19): siRNA sense strand
aggaguggauuauaauuuc

SEQ ID NO: 826075 - RNA, 19 nt, Homo sapiens
  misc_RNA (1)...(19): siRNA sense strand
aaacaaauagcuccaugga

SEQ ID NO: 826076 - RNA, 19 nt, Homo sapiens
  misc_RNA (1)...(19): siRNA sense strand
uaccugaaaucuaagacuu

SEQ ID NO: 826077 - RNA, 19 nt, Homo sapiens
  misc_RNA (1)...(19): siRNA sense strand
aauaaagauuugcggcauu

SEQ ID NO: 826078 - RNA, 19 nt, Homo sapiens
  misc_RNA (1)...(19): siRNA sense strand
gcaaacagguuauggagaa

SEQ ID NO: 826079 - RNA, 19 nt, Homo sapiens
  misc_RNA (1)...(19): siRNA sense strand
cgaaggauguccacuuuaa

SEQ ID NO: 826080 - RNA, 19 nt, Homo sapiens
  misc_RNA (1)...(19): siRNA sense strand
guucugagguugcaauuaa

SEQ ID NO: 826081 - RNA, 19 nt, Homo sapiens
  misc_RNA (1)...(19): siRNA sense strand
ccacaucccuccugaaaga

SEQ ID NO: 826082 - RNA, 19 nt, Homo sapiens
  misc_RNA (1)...(19): siRNA sense strand
gacgaaggauguccacuuu

SEQ ID NO: 826083 - RNA, 19 nt, Homo sapiens
  misc_RNA (1)...(19): siRNA sense strand
ccuaugagcuguuuaaagu

SEQ ID NO: 826084 - RNA, 19 nt, Homo sapiens
  misc_RNA (1)...(19): siRNA sense strand
uagaagcccagaagaauua

SEQ ID NO: 826085 - RNA, 19 nt, Homo sapiens
  misc_RNA (1)...(19): siRNA sense strand
gaacguucauuccacuuca

SEQ ID NO: 826086 - RNA, 19 nt, Homo sapiens
  misc_RNA (1)...(19): siRNA sense strand
ggaaagacagcaucaugga

SEQ ID NO: 826087 - RNA, 19 nt, Homo sapiens
  misc_RNA (1)...(19): siRNA sense strand
ggacuccacagcaguauga

SEQ ID NO: 826088 - RNA, 19 nt, Homo sapiens
  misc_RNA (1)...(19): siRNA sense strand
guucauuccacuucaaaua

SEQ ID NO: 826089 - RNA, 19 nt, Homo sapiens
  misc_RNA (1)...(19): siRNA sense strand
guaccaaggcuguagcaaa

SEQ ID NO: 826090 - RNA, 19 nt, Homo sapiens
  misc_RNA (1)...(19): siRNA sense strand
gaggaaagacagcaucaug

SEQ ID NO: 826091 - RNA, 19 nt, Homo sapiens
  misc_RNA (1)...(19): siRNA sense strand
caacagaugcaagaagauu

SEQ ID NO: 826092 - RNA, 19 nt, Homo sapiens
  misc_RNA (1)...(19): siRNA sense strand
gggaaccagacacuauuua

SEQ ID NO: 826093 - RNA, 19 nt, Homo sapiens
  misc_RNA (1)...(19): siRNA sense strand
cagacacuauuuaccauau

SEQ ID NO: 826094 - RNA, 19 nt, Homo sapiens
  misc_RNA (1)...(19): siRNA sense strand
gacacuauuuaccauauuc

SEQ ID NO: 826095 - RNA, 19 nt, Homo sapiens
  misc_RNA (1)...(19): siRNA sense strand
augcaucccugauccuaua

SEQ ID NO: 826096 - RNA, 19 nt, Homo sapiens
  misc_RNA (1)...(19): siRNA sense strand
uauugcaucucucuccuuu

SEQ ID NO: 826097 - RNA, 19 nt, Homo sapiens
  misc_RNA (1)...(19): siRNA sense strand
ggaaccugagcacauauaa

SEQ ID NO: 826098 - RNA, 19 nt, Homo sapiens
  misc_RNA (1)...(19): siRNA sense strand
caaacagguuauggagaaa

SEQ ID NO: 826099 - RNA, 19 nt, Homo sapiens
  misc_RNA (1)...(19): siRNA sense strand
gccaauuccuuuccacauc

SEQ ID NO: 826100 - RNA, 19 nt, Homo sapiens
  misc_RNA (1)...(19): siRNA sense strand
cauagaagcccagaagaau

SEQ ID NO: 826101 - RNA, 19 nt, Homo sapiens
  misc_RNA (1)...(19): siRNA sense strand
gaaggauguccacuuuaau

SEQ ID NO: 826102 - RNA, 19 nt, Homo sapiens
  misc_RNA (1)...(19): siRNA sense strand
guccauugaucaacagaug

SEQ ID NO: 826103 - RNA, 19 nt, Homo sapiens
  misc_RNA (1)...(19): siRNA sense strand
cugggaaccugagcacaua

SEQ ID NO: 826104 - RNA, 19 nt, Homo sapiens
  misc_RNA (1)...(19): siRNA sense strand
ccacagcaguaugaacguu

SEQ ID NO: 826105 - RNA, 19 nt, Homo sapiens
  misc_RNA (1)...(19): siRNA sense strand
gggauuauuucacaaaaga

SEQ ID NO: 826106 - RNA, 19 nt, Homo sapiens
  misc_RNA (1)...(19): siRNA sense strand
uaccaaggcuguagcaaac

SEQ ID NO: 826107 - RNA, 19 nt, Homo sapiens
  misc_RNA (1)...(19): siRNA sense strand
ccacuuuaaugccuacaca

SEQ ID NO: 826108 - RNA, 19 nt, Homo sapiens
  misc_RNA (1)...(19): siRNA sense strand
gggaaccugagcacauaua

SEQ ID NO: 826109 - RNA, 19 nt, Homo sapiens
  misc_RNA (1)...(19): siRNA sense strand
ccagacacuauuuaccaua

SEQ ID NO: 826110 - RNA, 19 nt, Homo sapiens
  misc_RNA (1)...(19): siRNA sense strand
ccaggacuccacagcagua

SEQ ID NO: 826111 - RNA, 19 nt, Homo sapiens
  misc_RNA (1)...(19): siRNA sense strand
acauagaagcccagaagaa

SEQ ID NO: 826112 - RNA, 19 nt, Homo sapiens
  misc_RNA (1)...(19): siRNA sense strand
gaccagugucaucaucuuu

SEQ ID NO: 826113 - RNA, 19 nt, Homo sapiens
  misc_RNA (1)...(19): siRNA sense strand
agaagaggcacaggaguuu

SEQ ID NO: 826114 - RNA, 19 nt, Homo sapiens
  misc_RNA (1)...(19): siRNA sense strand
gaucaacagaugcaagaag

SEQ ID NO: 826115 - RNA, 19 nt, Homo sapiens
  misc_RNA (1)...(19): siRNA sense strand
gaagaggcacaggaguuug

SEQ ID NO: 826116 - RNA, 19 nt, Homo sapiens
  misc_RNA (1)...(19): siRNA sense strand
gagaaucuggcuccuugga

SEQ ID NO: 826117 - RNA, 19 nt, Homo sapiens
  misc_RNA (1)...(19): siRNA sense strand
ggaaccagacacuauuuac

SEQ ID NO: 826118 - RNA, 19 nt, Homo sapiens
  misc_RNA (1)...(19): siRNA sense strand
guagcaaacagguuaugga

SEQ ID NO: 826119 - RNA, 19 nt, Homo sapiens
  misc_RNA (1)...(19): siRNA sense strand
aagcccagaagaauuauuu

SEQ ID NO: 826120 - RNA, 19 nt, Homo sapiens
  misc_RNA (1)...(19): siRNA sense strand
agacauagaagcccagaag

SEQ ID NO: 826121 - RNA, 19 nt, Homo sapiens
  misc_RNA (1)...(19): siRNA sense strand
gcaccagguucuuuugaug

SEQ ID NO: 826122 - RNA, 19 nt, Homo sapiens
  misc_RNA (1)...(19): siRNA sense strand
caagaaaugcaucccugau

SEQ ID NO: 826123 - RNA, 19 nt, Homo sapiens
  misc_RNA (1)...(19): siRNA sense strand
aagaagaggcacaggaguu

SEQ ID NO: 826124 - RNA, 19 nt, Homo sapiens
  misc_RNA (1)...(19): siRNA sense strand
cagguuauggagaaacuaa

SEQ ID NO: 826125 - RNA, 19 nt, Homo sapiens
  misc_RNA (1)...(19): siRNA sense strand
gaucaguaccaaggcugua

SEQ ID NO: 826126 - RNA, 19 nt, Homo sapiens
  misc_RNA (1)...(19): siRNA sense strand
cuauagcuauugcaucucu

SEQ ID NO: 826127 - RNA, 19 nt, Homo sapiens
  misc_RNA (1)...(19): siRNA sense strand
uaacucaaggggauuauuu

SEQ ID NO: 826128 - RNA, 19 nt, Homo sapiens
  misc_RNA (1)...(19): siRNA sense strand
aucaacagaugcaagaaga

SEQ ID NO: 826129 - RNA, 19 nt, Homo sapiens
  misc_RNA (1)...(19): siRNA sense strand
aagacagcaucauggagaa

SEQ ID NO: 826130 - RNA, 19 nt, Homo sapiens
  misc_RNA (1)...(19): siRNA sense strand
aaggauguccacuuuaaug

SEQ ID NO: 826131 - RNA, 19 nt, Homo sapiens
  misc_RNA (1)...(19): siRNA sense strand
ucaaggggauuauuucaca

SEQ ID NO: 826132 - RNA, 19 nt, Homo sapiens
  misc_RNA (1)...(19): siRNA sense strand
caguacuucucccucaaga

SEQ ID NO: 826133 - RNA, 19 nt, Homo sapiens
  misc_RNA (1)...(19): siRNA sense strand
caucccuccugaaagaaga

SEQ ID NO: 826134 - RNA, 19 nt, Homo sapiens
  misc_RNA (1)...(19): siRNA sense strand
auagaagcccagaagaauu

SEQ ID NO: 826135 - RNA, 19 nt, Homo sapiens
  misc_RNA (1)...(19): siRNA sense strand
gacauagaagcccagaaga

SEQ ID NO: 826136 - RNA, 19 nt, Homo sapiens
  misc_RNA (1)...(19): siRNA sense strand
uccuauagcuauugcaucu

SEQ ID NO: 826137 - RNA, 19 nt, Homo sapiens
  misc_RNA (1)...(19): siRNA sense strand
gaaccugagcacauauaac

SEQ ID NO: 826138 - RNA, 19 nt, Homo sapiens
  misc_RNA (1)...(19): siRNA sense strand
uuggaggccugcugccauu

SEQ ID NO: 826139 - RNA, 19 nt, Homo sapiens
  misc_RNA (1)...(19): siRNA sense strand
cauucugacuuuacuagag

SEQ ID NO: 826140 - RNA, 19 nt, Homo sapiens
  misc_RNA (1)...(19): siRNA sense strand
gcccagaagaauuauuuua

SEQ ID NO: 826141 - RNA, 19 nt, Homo sapiens
  misc_RNA (1)...(19): siRNA sense strand
gaagcccagaagaauuauu

SEQ ID NO: 826142 - RNA, 19 nt, Homo sapiens
  misc_RNA (1)...(19): siRNA sense strand
cgacuucgcaccagguucu

SEQ ID NO: 826143 - RNA, 19 nt, Homo sapiens
  misc_RNA (1)...(19): siRNA sense strand
gauccuauagcuauugcau

SEQ ID NO: 826144 - RNA, 19 nt, Homo sapiens
  misc_RNA (1)...(19): siRNA sense strand
ucccugauccuauagcuau

SEQ ID NO: 826145 - RNA, 19 nt, Homo sapiens
  misc_RNA (1)...(19): siRNA sense strand
ugggugcaccuguacagua

SEQ ID NO: 826146 - RNA, 19 nt, Homo sapiens
  misc_RNA (1)...(19): siRNA sense strand
ugugcuaugaggugcauua

SEQ ID NO: 826147 - RNA, 19 nt, Homo sapiens
  misc_RNA (1)...(19): siRNA sense strand
gaaccagacacuauuuacc

SEQ ID NO: 826148 - RNA, 19 nt, Homo sapiens
  misc_RNA (1)...(19): siRNA sense strand
gaugagaaucuggcuccuu

SEQ ID NO: 826149 - RNA, 19 nt, Homo sapiens
  misc_RNA (1)...(19): siRNA sense strand
cugccugggugcaccugua

SEQ ID NO: 826150 - RNA, 19 nt, Homo sapiens
  misc_RNA (1)...(19): siRNA sense strand
ccugagcacauauaacugu

SEQ ID NO: 826151 - RNA, 19 nt, Homo sapiens
  misc_RNA (1)...(19): siRNA sense strand
uaugagcuaccacccaaga

SEQ ID NO: 826152 - RNA, 19 nt, Homo sapiens
  misc_RNA (1)...(19): siRNA sense strand
gacagcaucauggagaaug

SEQ ID NO: 826153 - RNA, 19 nt, Homo sapiens
  misc_RNA (1)...(19): siRNA sense strand
uacaguacuucucccucaa

SEQ ID NO: 826154 - RNA, 19 nt, Homo sapiens
  misc_RNA (1)...(19): siRNA sense strand
gaagagauauuccacauga

SEQ ID NO: 826155 - RNA, 19 nt, Homo sapiens
  misc_RNA (1)...(19): siRNA sense strand
gaagacaguucugaaauca

SEQ ID NO: 826156 - RNA, 19 nt, Homo sapiens
  misc_RNA (1)...(19): siRNA sense strand
ggaggaauauccaaugaug

SEQ ID NO: 826157 - RNA, 19 nt, Homo sapiens
  misc_RNA (1)...(19): siRNA sense strand
caauacaugucauuccaua

SEQ ID NO: 826158 - RNA, 19 nt, Homo sapiens
  misc_RNA (1)...(19): siRNA sense strand
gucagaagauacaugauua

SEQ ID NO: 826159 - RNA, 19 nt, Homo sapiens
  misc_RNA (1)...(19): siRNA sense strand
gaaaugaagcugacagaug

SEQ ID NO: 826160 - RNA, 19 nt, Homo sapiens
  misc_RNA (1)...(19): siRNA sense strand
ggacugggacugucaauga

SEQ ID NO: 826161 - RNA, 19 nt, Homo sapiens
  misc_RNA (1)...(19): siRNA sense strand
ccaaagugaucaagaugaa

SEQ ID NO: 826162 - RNA, 19 nt, Homo sapiens
  misc_RNA (1)...(19): siRNA sense strand
acagauggcucuuacuuug

SEQ ID NO: 826163 - RNA, 19 nt, Homo sapiens
  misc_RNA (1)...(19): siRNA sense strand
ggcaaucgcucccaucaau

SEQ ID NO: 826164 - RNA, 19 nt, Homo sapiens
  misc_RNA (1)...(19): siRNA sense strand
ggaaacugguggcuacaau

SEQ ID NO: 826165 - RNA, 19 nt, Homo sapiens
  misc_RNA (1)...(19): siRNA sense strand
ucaagcagauugugaaaca

SEQ ID NO: 826166 - RNA, 19 nt, Homo sapiens
  misc_RNA (1)...(19): siRNA sense strand
acaacaccauggauuauuu

SEQ ID NO: 826167 - RNA, 19 nt, Homo sapiens
  misc_RNA (1)...(19): siRNA sense strand
caaucgcucccaucaauua

SEQ ID NO: 826168 - RNA, 19 nt, Homo sapiens
  misc_RNA (1)...(19): siRNA sense strand
gaggagagccuuugagaca

SEQ ID NO: 826169 - RNA, 19 nt, Homo sapiens
  misc_RNA (1)...(19): siRNA sense strand
uuacagugauuucagguuu

SEQ ID NO: 826170 - RNA, 19 nt, Homo sapiens
  misc_RNA (1)...(19): siRNA sense strand
auaagcaaguggaacaaua

SEQ ID NO: 826171 - RNA, 19 nt, Homo sapiens
  misc_RNA (1)...(19): siRNA sense strand
caaaugacaacccugaauu

SEQ ID NO: 826172 - RNA, 19 nt, Homo sapiens
  misc_RNA (1)...(19): siRNA sense strand
caucaauuauccucaaaug

SEQ ID NO: 826173 - RNA, 19 nt, Homo sapiens
  misc_RNA (1)...(19): siRNA sense strand
cccaguggauuauaucuuu

SEQ ID NO: 826174 - RNA, 19 nt, Homo sapiens
  misc_RNA (1)...(19): siRNA sense strand
cgacuuucaagguuaauua

SEQ ID NO: 826175 - RNA, 19 nt, Homo sapiens
  misc_RNA (1)...(19): siRNA sense strand
gcaaguggaacaauacaug

SEQ ID NO: 826176 - RNA, 19 nt, Homo sapiens
  misc_RNA (1)...(19): siRNA sense strand
acaacaacaccauggauua

SEQ ID NO: 826177 - RNA, 19 nt, Homo sapiens
  misc_RNA (1)...(19): siRNA sense strand
ugaagacaguucugaaauc

SEQ ID NO: 826178 - RNA, 19 nt, Homo sapiens
  misc_RNA (1)...(19): siRNA sense strand
gagaaggagccguggguaa

SEQ ID NO: 826179 - RNA, 19 nt, Homo sapiens
  misc_RNA (1)...(19): siRNA sense strand
gauacauauugucgucuuu

SEQ ID NO: 826180 - RNA, 19 nt, Homo sapiens
  misc_RNA (1)...(19): siRNA sense strand
acugcaggcuucuggauua

SEQ ID NO: 826181 - RNA, 19 nt, Homo sapiens
  misc_RNA (1)...(19): siRNA sense strand
cuaaugcggauccuaauuu

SEQ ID NO: 826182 - RNA, 19 nt, Homo sapiens
  misc_RNA (1)...(19): siRNA sense strand
agacaguucugaaaucauc

SEQ ID NO: 826183 - RNA, 19 nt, Homo sapiens
  misc_RNA (1)...(19): siRNA sense strand
gaaucuuccucagucuuaa

SEQ ID NO: 826184 - RNA, 19 nt, Homo sapiens
  misc_RNA (1)...(19): siRNA sense strand
ggagagccuuugagacagu

SEQ ID NO: 826185 - RNA, 19 nt, Homo sapiens
  misc_RNA (1)...(19): siRNA sense strand
caacuucaacugucggaaa

SEQ ID NO: 826186 - RNA, 19 nt, Homo sapiens
  misc_RNA (1)...(19): siRNA sense strand
caccugcuaugccauguuu

SEQ ID NO: 826187 - RNA, 19 nt, Homo sapiens
  misc_RNA (1)...(19): siRNA sense strand
ggaaaucuagucaucauac

SEQ ID NO: 826188 - RNA, 19 nt, Homo sapiens
  misc_RNA (1)...(19): siRNA sense strand
ccgacuagaucgaauagga

SEQ ID NO: 826189 - RNA, 19 nt, Homo sapiens
  misc_RNA (1)...(19): siRNA sense strand
guugagauuugagguguuu

SEQ ID NO: 826190 - RNA, 19 nt, Homo sapiens
  misc_RNA (1)...(19): siRNA sense strand
ugauaugcgucagaagaua

SEQ ID NO: 826191 - RNA, 19 nt, Homo sapiens
  misc_RNA (1)...(19): siRNA sense strand
ccacugggaugguugucuu

SEQ ID NO: 826192 - RNA, 19 nt, Homo sapiens
  misc_RNA (1)...(19): siRNA sense strand
uauuggaccugaucaugaa

SEQ ID NO: 826193 - RNA, 19 nt, Homo sapiens
  misc_RNA (1)...(19): siRNA sense strand
caacaacaccauggauuau

SEQ ID NO: 826194 - RNA, 19 nt, Homo sapiens
  misc_RNA (1)...(19): siRNA sense strand
uaaguuaccagcugauaug

SEQ ID NO: 826195 - RNA, 19 nt, Homo sapiens
  misc_RNA (1)...(19): siRNA sense strand
gcucgaacuuuccacuaug

SEQ ID NO: 826196 - RNA, 19 nt, Homo sapiens
  misc_RNA (1)...(19): siRNA sense strand
acaaugccuuuauuugcua

SEQ ID NO: 826197 - RNA, 19 nt, Homo sapiens
  misc_RNA (1)...(19): siRNA sense strand
gaccugaucaugaauuuua

SEQ ID NO: 826198 - RNA, 19 nt, Homo sapiens
  misc_RNA (1)...(19): siRNA sense strand
gaggugcccacucugauuu

SEQ ID NO: 826199 - RNA, 19 nt, Homo sapiens
  misc_RNA (1)...(19): siRNA sense strand
gcacgcaggcgcuucacaa

SEQ ID NO: 826200 - RNA, 19 nt, Homo sapiens
  misc_RNA (1)...(19): siRNA sense strand
caauuauccucaaaugaca

SEQ ID NO: 826201 - RNA, 19 nt, Homo sapiens
  misc_RNA (1)...(19): siRNA sense strand
gcuacaaugccuuuauuug

SEQ ID NO: 826202 - RNA, 19 nt, Homo sapiens
  misc_RNA (1)...(19): siRNA sense strand
acacagauaccaaggcaaa

SEQ ID NO: 826203 - RNA, 19 nt, Homo sapiens
  misc_RNA (1)...(19): siRNA sense strand
ggcaguaucaagagaagua

SEQ ID NO: 826204 - RNA, 19 nt, Homo sapiens
  misc_RNA (1)...(19): siRNA sense strand
aaugaugguuggaaaucua

SEQ ID NO: 826205 - RNA, 19 nt, Homo sapiens
  misc_RNA (1)...(19): siRNA sense strand
gacagauggcucuuacuuu

SEQ ID NO: 826206 - RNA, 19 nt, Homo sapiens
  misc_RNA (1)...(19): siRNA sense strand
gauagucaacuucaacugu

SEQ ID NO: 826207 - RNA, 19 nt, Homo sapiens
  misc_RNA (1)...(19): siRNA sense strand
ggggaaagcaguauucaua

SEQ ID NO: 826208 - RNA, 19 nt, Homo sapiens
  misc_RNA (1)...(19): siRNA sense strand
uuacgacuuucaagguuaa

SEQ ID NO: 826209 - RNA, 19 nt, Homo sapiens
  misc_RNA (1)...(19): siRNA sense strand
gacugggacugucaaugaa

SEQ ID NO: 826210 - RNA, 19 nt, Homo sapiens
  misc_RNA (1)...(19): siRNA sense strand
gaacucaaugauccucuga

SEQ ID NO: 826211 - RNA, 19 nt, Homo sapiens
  misc_RNA (1)...(19): siRNA sense strand
caucauaccaguuggaauc

SEQ ID NO: 826212 - RNA, 19 nt, Homo sapiens
  misc_RNA (1)...(19): siRNA sense strand
agaaucuuccucagucuua

SEQ ID NO: 826213 - RNA, 19 nt, Homo sapiens
  misc_RNA (1)...(19): siRNA sense strand
guuucaaccuggagauuau

SEQ ID NO: 826214 - RNA, 19 nt, Homo sapiens
  misc_RNA (1)...(19): siRNA sense strand
caugucauuccauaaguua

SEQ ID NO: 826215 - RNA, 19 nt, Homo sapiens
  misc_RNA (1)...(19): siRNA sense strand
gaaacugguggcuacaaug

SEQ ID NO: 826216 - RNA, 19 nt, Homo sapiens
  misc_RNA (1)...(19): siRNA sense strand
ccggaggaauauccaauga

SEQ ID NO: 826217 - RNA, 19 nt, Homo sapiens
  misc_RNA (1)...(19): siRNA sense strand
uguucgagcugauacauau

SEQ ID NO: 826218 - RNA, 19 nt, Homo sapiens
  misc_RNA (1)...(19): siRNA sense strand
ugacagauggcucuuacuu

SEQ ID NO: 826219 - RNA, 19 nt, Homo sapiens
  misc_RNA (1)...(19): siRNA sense strand
gcugacagauggcucuuac

SEQ ID NO: 826220 - RNA, 19 nt, Homo sapiens
  misc_RNA (1)...(19): siRNA sense strand
uggcuacaaugccuuuauu

SEQ ID NO: 826221 - RNA, 19 nt, Homo sapiens
  misc_RNA (1)...(19): siRNA sense strand
gguuggaaaucuagucauc

SEQ ID NO: 826222 - RNA, 19 nt, Homo sapiens
  misc_RNA (1)...(19): siRNA sense strand
gauuauaucguacgagaag

SEQ ID NO: 826223 - RNA, 19 nt, Homo sapiens
  misc_RNA (1)...(19): siRNA sense strand
ugauuacuaugaacacaga

SEQ ID NO: 826224 - RNA, 19 nt, Homo sapiens
  misc_RNA (1)...(19): siRNA sense strand
ggaugguugucuucaguuc

SEQ ID NO: 826225 - RNA, 19 nt, Homo sapiens
  misc_RNA (1)...(19): siRNA sense strand
ccagugcaguggugagaau

SEQ ID NO: 826226 - RNA, 19 nt, Homo sapiens
  misc_RNA (1)...(19): siRNA sense strand
cgucagaagauacaugauu

SEQ ID NO: 826227 - RNA, 19 nt, Homo sapiens
  misc_RNA (1)...(19): siRNA sense strand
cacuuuccguggacaauuu

SEQ ID NO: 826228 - RNA, 19 nt, Homo sapiens
  misc_RNA (1)...(19): siRNA sense strand
ugagcaaguugagauuuga

SEQ ID NO: 826229 - RNA, 19 nt, Homo sapiens
  misc_RNA (1)...(19): siRNA sense strand
uauuacgacuuucaagguu

SEQ ID NO: 826230 - RNA, 19 nt, Homo sapiens
  misc_RNA (1)...(19): siRNA sense strand
gcaaucgcucccaucaauu

SEQ ID NO: 826231 - RNA, 19 nt, Homo sapiens
  misc_RNA (1)...(19): siRNA sense strand
gcuaaugcggauccuaauu

SEQ ID NO: 826232 - RNA, 19 nt, Homo sapiens
  misc_RNA (1)...(19): siRNA sense strand
gaaguauaagcaaguggaa

SEQ ID NO: 826233 - RNA, 19 nt, Homo sapiens
  misc_RNA (1)...(19): siRNA sense strand
gaacaauacaugucauucc

SEQ ID NO: 826234 - RNA, 19 nt, Homo sapiens
  misc_RNA (1)...(19): siRNA sense strand
gcagaaaagccacgauuug

SEQ ID NO: 826235 - RNA, 19 nt, Homo sapiens
  misc_RNA (1)...(19): siRNA sense strand
agaacgaaauccucaagca

SEQ ID NO: 826236 - RNA, 19 nt, Homo sapiens
  misc_RNA (1)...(19): siRNA sense strand
ggagauagucaacuucaac

SEQ ID NO: 826237 - RNA, 19 nt, Homo sapiens
  misc_RNA (1)...(19): siRNA sense strand
gagcaaacaacaacaccau

SEQ ID NO: 826238 - RNA, 19 nt, Homo sapiens
  misc_RNA (1)...(19): siRNA sense strand
gcaacuccgugugcuucaa

SEQ ID NO: 826239 - RNA, 19 nt, Homo sapiens
  misc_RNA (1)...(19): siRNA sense strand
agaaggagccguggguaaa

SEQ ID NO: 826240 - RNA, 19 nt, Homo sapiens
  misc_RNA (1)...(19): siRNA sense strand
gggagauagucaacuucaa

SEQ ID NO: 826241 - RNA, 19 nt, Homo sapiens
  misc_RNA (1)...(19): siRNA sense strand
gcggcaagcccaacucuuc

SEQ ID NO: 826242 - RNA, 19 nt, Homo sapiens
  misc_RNA (1)...(19): siRNA sense strand
caaugaagacaguucugaa

SEQ ID NO: 826243 - RNA, 19 nt, Homo sapiens
  misc_RNA (1)...(19): siRNA sense strand
ucaauuauccucaaaugac

SEQ ID NO: 826244 - RNA, 19 nt, Homo sapiens
  misc_RNA (1)...(19): siRNA sense strand
cugagcaaguugagauuug

SEQ ID NO: 826245 - RNA, 19 nt, Homo sapiens
  misc_RNA (1)...(19): siRNA sense strand
cugggugucuuuaaaugaa

SEQ ID NO: 826246 - RNA, 19 nt, Homo sapiens
  misc_RNA (1)...(19): siRNA sense strand
gcuggucugugguugacuu

SEQ ID NO: 826247 - RNA, 19 nt, Homo sapiens
  misc_RNA (1)...(19): siRNA sense strand
gaggaauauccaaugauga

SEQ ID NO: 826248 - RNA, 19 nt, Homo sapiens
  misc_RNA (1)...(19): siRNA sense strand
ccagggcacuucgcauugu

SEQ ID NO: 826249 - RNA, 19 nt, Homo sapiens
  misc_RNA (1)...(19): siRNA sense strand
uauuccacaugacauauga

SEQ ID NO: 826250 - RNA, 19 nt, Homo sapiens
  misc_RNA (1)...(19): siRNA sense strand
gggagauggugcaggcaau

SEQ ID NO: 826251 - RNA, 19 nt, Homo sapiens
  misc_RNA (1)...(19): siRNA sense strand
ugauacauauugucgucuu

SEQ ID NO: 826252 - RNA, 19 nt, Homo sapiens
  misc_RNA (1)...(19): siRNA sense strand
caaugccuuuauuugcuaa

SEQ ID NO: 826253 - RNA, 19 nt, Homo sapiens
  misc_RNA (1)...(19): siRNA sense strand
ggaacaauacaugucauuc

SEQ ID NO: 826254 - RNA, 19 nt, Homo sapiens
  misc_RNA (1)...(19): siRNA sense strand
ggacacaaguuuaaggaaa

SEQ ID NO: 826255 - RNA, 19 nt, Homo sapiens
  misc_RNA (1)...(19): siRNA sense strand
gcauggagcugcccaagaa

SEQ ID NO: 826256 - RNA, 19 nt, Homo sapiens
  misc_RNA (1)...(19): siRNA sense strand
ggcgauaccugcccaaauu

SEQ ID NO: 826257 - RNA, 19 nt, Homo sapiens
  misc_RNA (1)...(19): siRNA sense strand
caaggaggcugguguggaa

SEQ ID NO: 826258 - RNA, 19 nt, Homo sapiens
  misc_RNA (1)...(19): siRNA sense strand
gaacgaaugaagcagauuu

SEQ ID NO: 826259 - RNA, 19 nt, Homo sapiens
  misc_RNA (1)...(19): siRNA sense strand
gcagccaagugcaucauug

SEQ ID NO: 826260 - RNA, 19 nt, Homo sapiens
  misc_RNA (1)...(19): siRNA sense strand
cgauggagguuccuacuuc

SEQ ID NO: 826261 - RNA, 19 nt, Homo sapiens
  misc_RNA (1)...(19): siRNA sense strand
gaaugaagcagauuuacca

SEQ ID NO: 826262 - RNA, 19 nt, Homo sapiens
  misc_RNA (1)...(19): siRNA sense strand
gggccgagauccaggagaa

SEQ ID NO: 826263 - RNA, 19 nt, Homo sapiens
  misc_RNA (1)...(19): siRNA sense strand
ccagccggcuuaacauuga

SEQ ID NO: 826264 - RNA, 19 nt, Homo sapiens
  misc_RNA (1)...(19): siRNA sense strand
ucaugaagauggccaagga

SEQ ID NO: 826265 - RNA, 19 nt, Homo sapiens
  misc_RNA (1)...(19): siRNA sense strand
gauuuggacacaaguuuaa

SEQ ID NO: 826266 - RNA, 19 nt, Homo sapiens
  misc_RNA (1)...(19): siRNA sense strand
gcuccuggaugcagauuuc

SEQ ID NO: 826267 - RNA, 19 nt, Homo sapiens
  misc_RNA (1)...(19): siRNA sense strand
ucccaaggcuguucaagga

SEQ ID NO: 826268 - RNA, 19 nt, Homo sapiens
  misc_RNA (1)...(19): siRNA sense strand
gggacuacaucaggcgaua

SEQ ID NO: 826269 - RNA, 19 nt, Homo sapiens
  misc_RNA (1)...(19): siRNA sense strand
ggaggcugguguggaagua

SEQ ID NO: 826270 - RNA, 19 nt, Homo sapiens
  misc_RNA (1)...(19): siRNA sense strand
ccaaggcuguucaaggaau

SEQ ID NO: 826271 - RNA, 19 nt, Homo sapiens
  misc_RNA (1)...(19): siRNA sense strand
gcuugaccuuugaauauga

SEQ ID NO: 826272 - RNA, 19 nt, Homo sapiens
  misc_RNA (1)...(19): siRNA sense strand
gauggagguuccuacuuca

SEQ ID NO: 826273 - RNA, 19 nt, Homo sapiens
  misc_RNA (1)...(19): siRNA sense strand
gagaccagccggcuuaaca

SEQ ID NO: 826274 - RNA, 19 nt, Homo sapiens
  misc_RNA (1)...(19): siRNA sense strand
gaacucccgccuguuugua

SEQ ID NO: 826275 - RNA, 19 nt, Homo sapiens
  misc_RNA (1)...(19): siRNA sense strand
gaagauuuggacacaaguu

SEQ ID NO: 826276 - RNA, 19 nt, Homo sapiens
  misc_RNA (1)...(19): siRNA sense strand
ccgcuugaccuuugaauau

SEQ ID NO: 826277 - RNA, 19 nt, Homo sapiens
  misc_RNA (1)...(19): siRNA sense strand
ccucuucggugcacugguu

SEQ ID NO: 826278 - RNA, 19 nt, Homo sapiens
  misc_RNA (1)...(19): siRNA sense strand
gagcagugcaggcccaaga

SEQ ID NO: 826279 - RNA, 19 nt, Homo sapiens
  misc_RNA (1)...(19): siRNA sense strand
uucagucucuggaagauuu

SEQ ID NO: 826280 - RNA, 19 nt, Homo sapiens
  misc_RNA (1)...(19): siRNA sense strand
auaugacucugaacccuuu

SEQ ID NO: 826281 - RNA, 19 nt, Homo sapiens
  misc_RNA (1)...(19): siRNA sense strand
gugaagaacucagcaaacg

SEQ ID NO: 826282 - RNA, 19 nt, Homo sapiens
  misc_RNA (1)...(19): siRNA sense strand
gaauucucauacccucuau

SEQ ID NO: 826283 - RNA, 19 nt, Homo sapiens
  misc_RNA (1)...(19): siRNA sense strand
gaaguagugacggagaauu

SEQ ID NO: 826284 - RNA, 19 nt, Homo sapiens
  misc_RNA (1)...(19): siRNA sense strand
gugacccgcuugaccuuug

SEQ ID NO: 826285 - RNA, 19 nt, Homo sapiens
  misc_RNA (1)...(19): siRNA sense strand
gcagggaggagagacagaa

SEQ ID NO: 826286 - RNA, 19 nt, Homo sapiens
  misc_RNA (1)...(19): siRNA sense strand
gaccagccggcuuaacauu

SEQ ID NO: 826287 - RNA, 19 nt, Homo sapiens
  misc_RNA (1)...(19): siRNA sense strand
caaggcuguucaaggaaug

SEQ ID NO: 826288 - RNA, 19 nt, Homo sapiens
  misc_RNA (1)...(19): siRNA sense strand
ggaagcagccgaggaacca

SEQ ID NO: 826289 - RNA, 19 nt, Homo sapiens
  misc_RNA (1)...(19): siRNA sense strand
aagacaggcuucccuugga

SEQ ID NO: 826290 - RNA, 19 nt, Homo sapiens
  misc_RNA (1)...(19): siRNA sense strand
gauaccugcccaaauugaa

SEQ ID NO: 826291 - RNA, 19 nt, Homo sapiens
  misc_RNA (1)...(19): siRNA sense strand
uggaagauuuggacacaag

SEQ ID NO: 826292 - RNA, 19 nt, Homo sapiens
  misc_RNA (1)...(19): siRNA sense strand
gggcagaagccaccccuua

SEQ ID NO: 826293 - RNA, 19 nt, Homo sapiens
  misc_RNA (1)...(19): siRNA sense strand
ggcuuaacauugaacgaau

SEQ ID NO: 826294 - RNA, 19 nt, Homo sapiens
  misc_RNA (1)...(19): siRNA sense strand
agauuuggacacaaguuua

SEQ ID NO: 826295 - RNA, 19 nt, Homo sapiens
  misc_RNA (1)...(19): siRNA sense strand
agaauucucauacccucua

SEQ ID NO: 826296 - RNA, 19 nt, Homo sapiens
  misc_RNA (1)...(19): siRNA sense strand
gcgcugcguuuacauucuc

SEQ ID NO: 826297 - RNA, 19 nt, Homo sapiens
  misc_RNA (1)...(19): siRNA sense strand
guccugcagugcuuucuuc

SEQ ID NO: 826298 - RNA, 19 nt, Homo sapiens
  misc_RNA (1)...(19): siRNA sense strand
agacaggcuucccuuggau

SEQ ID NO: 826299 - RNA, 19 nt, Homo sapiens
  misc_RNA (1)...(19): siRNA sense strand
uggaaguagugacggagaa

SEQ ID NO: 826300 - RNA, 19 nt, Homo sapiens
  misc_RNA (1)...(19): siRNA sense strand
acugaacucccgccuguuu

SEQ ID NO: 826301 - RNA, 19 nt, Homo sapiens
  misc_RNA (1)...(19): siRNA sense strand
caucauugguguggacuac

SEQ ID NO: 826302 - RNA, 19 nt, Homo sapiens
  misc_RNA (1)...(19): siRNA sense strand
gcgauaccugcccaaauug

SEQ ID NO: 826303 - RNA, 19 nt, Homo sapiens
  misc_RNA (1)...(19): siRNA sense strand
ggaaguagugacggagaau

SEQ ID NO: 826304 - RNA, 19 nt, Homo sapiens
  misc_RNA (1)...(19): siRNA sense strand
cagauuuaccagcagcuuu

SEQ ID NO: 826305 - RNA, 19 nt, Homo sapiens
  misc_RNA (1)...(19): siRNA sense strand
ggcgagaguucuucuacac

SEQ ID NO: 826306 - RNA, 19 nt, Homo sapiens
  misc_RNA (1)...(19): siRNA sense strand
ccugccgccucuucuacua

SEQ ID NO: 826307 - RNA, 19 nt, Homo sapiens
  misc_RNA (1)...(19): siRNA sense strand
ugacccgcuugaccuuuga

SEQ ID NO: 826308 - RNA, 19 nt, Homo sapiens
  misc_RNA (1)...(19): siRNA sense strand
aagauuuggacacaaguuu

SEQ ID NO: 826309 - RNA, 19 nt, Homo sapiens
  misc_RNA (1)...(19): siRNA sense strand
aacgaaugaagcagauuua

SEQ ID NO: 826310 - RNA, 19 nt, Homo sapiens
  misc_RNA (1)...(19): siRNA sense strand
cgauaccugcccaaauuga

SEQ ID NO: 826311 - RNA, 19 nt, Homo sapiens
  misc_RNA (1)...(19): siRNA sense strand
uaugagagaccccgaauga

SEQ ID NO: 826312 - RNA, 19 nt, Homo sapiens
  misc_RNA (1)...(19): siRNA sense strand
ucuggaagauuuggacaca

SEQ ID NO: 826313 - RNA, 19 nt, Homo sapiens
  misc_RNA (1)...(19): siRNA sense strand
gccugugggaccuguauaa

SEQ ID NO: 826314 - RNA, 19 nt, Homo sapiens
  misc_RNA (1)...(19): siRNA sense strand
cuuugaauaugacucugaa

SEQ ID NO: 826315 - RNA, 19 nt, Homo sapiens
  misc_RNA (1)...(19): siRNA sense strand
caggaucauugagcugaau

SEQ ID NO: 826316 - RNA, 19 nt, Homo sapiens
  misc_RNA (1)...(19): siRNA sense strand
augcagccaucaugaagau

SEQ ID NO: 826317 - RNA, 19 nt, Homo sapiens
  misc_RNA (1)...(19): siRNA sense strand
cggcuuaacauugaacgaa

SEQ ID NO: 826318 - RNA, 19 nt, Homo sapiens
  misc_RNA (1)...(19): siRNA sense strand
gugcacugguuccgcaaag

SEQ ID NO: 826319 - RNA, 19 nt, Homo sapiens
  misc_RNA (1)...(19): siRNA sense strand
acacggcagcuaccaacaa

SEQ ID NO: 826320 - RNA, 19 nt, Homo sapiens
  misc_RNA (1)...(19): siRNA sense strand
acaggaucauugagcugaa

SEQ ID NO: 826321 - RNA, 19 nt, Homo sapiens
  misc_RNA (1)...(19): siRNA sense strand
caucugucccuuccugugu

SEQ ID NO: 826322 - RNA, 19 nt, Homo sapiens
  misc_RNA (1)...(19): siRNA sense strand
gccaucaugacccaacuga

SEQ ID NO: 826323 - RNA, 19 nt, Homo sapiens
  misc_RNA (1)...(19): siRNA sense strand
gacaggcuucccuuggauu

SEQ ID NO: 826324 - RNA, 19 nt, Homo sapiens
  misc_RNA (1)...(19): siRNA sense strand
ccaaaugucucagaaugua

SEQ ID NO: 826325 - RNA, 19 nt, Homo sapiens
  misc_RNA (1)...(19): siRNA sense strand
ugugaaggcugcccaauuu

SEQ ID NO: 826326 - RNA, 19 nt, Homo sapiens
  misc_RNA (1)...(19): siRNA sense strand
gggcagcucuucaccaaug

SEQ ID NO: 826327 - RNA, 19 nt, Homo sapiens
  misc_RNA (1)...(19): siRNA sense strand
gaaauucucccguuuggau

SEQ ID NO: 826328 - RNA, 19 nt, Homo sapiens
  misc_RNA (1)...(19): siRNA sense strand
gaccaugucaacaguaaua

SEQ ID NO: 826329 - RNA, 19 nt, Homo sapiens
  misc_RNA (1)...(19): siRNA sense strand
ggacaagccucuggucaag

SEQ ID NO: 826330 - RNA, 19 nt, Homo sapiens
  misc_RNA (1)...(19): siRNA sense strand
cagaauguaugucccagaa

SEQ ID NO: 826331 - RNA, 19 nt, Homo sapiens
  misc_RNA (1)...(19): siRNA sense strand
gaauguaugucccagaaac

SEQ ID NO: 826332 - RNA, 19 nt, Homo sapiens
  misc_RNA (1)...(19): siRNA sense strand
caacaaugacuaugaaaca

SEQ ID NO: 826333 - RNA, 19 nt, Homo sapiens
  misc_RNA (1)...(19): siRNA sense strand
ugacugugcuuuccgaaug

SEQ ID NO: 826334 - RNA, 19 nt, Homo sapiens
  misc_RNA (1)...(19): siRNA sense strand
ccacugcacaggaaacaua

SEQ ID NO: 826335 - RNA, 19 nt, Homo sapiens
  misc_RNA (1)...(19): siRNA sense strand
caacgaccaugucaacagu

SEQ ID NO: 826336 - RNA, 19 nt, Homo sapiens
  misc_RNA (1)...(19): siRNA sense strand
gauuaccacugcacaggaa

SEQ ID NO: 826337 - RNA, 19 nt, Homo sapiens
  misc_RNA (1)...(19): siRNA sense strand
caaaggcugugcugaaacu

SEQ ID NO: 826338 - RNA, 19 nt, Homo sapiens
  misc_RNA (1)...(19): siRNA sense strand
gagagcgacuccauucagu

SEQ ID NO: 826339 - RNA, 19 nt, Homo sapiens
  misc_RNA (1)...(19): siRNA sense strand
gaagaaaccaacaaugacu

SEQ ID NO: 826340 - RNA, 19 nt, Homo sapiens
  misc_RNA (1)...(19): siRNA sense strand
ccaccuggacgucaaauga

SEQ ID NO: 826341 - RNA, 19 nt, Homo sapiens
  misc_RNA (1)...(19): siRNA sense strand
cccaaaggcugugcugaaa

SEQ ID NO: 826342 - RNA, 19 nt, Homo sapiens
  misc_RNA (1)...(19): siRNA sense strand
aaaccaacaaugacuauga

SEQ ID NO: 826343 - RNA, 19 nt, Homo sapiens
  misc_RNA (1)...(19): siRNA sense strand
ggagggagaaaccaucaug

SEQ ID NO: 826344 - RNA, 19 nt, Homo sapiens
  misc_RNA (1)...(19): siRNA sense strand
gcgacuccauucagugguu

SEQ ID NO: 826345 - RNA, 19 nt, Homo sapiens
  misc_RNA (1)...(19): siRNA sense strand
aaccaacaaugacuaugaa

SEQ ID NO: 826346 - RNA, 19 nt, Homo sapiens
  misc_RNA (1)...(19): siRNA sense strand
cauuguggcuguggucauu

SEQ ID NO: 826347 - RNA, 19 nt, Homo sapiens
  misc_RNA (1)...(19): siRNA sense strand
guucaaggccaacaacaau

SEQ ID NO: 826348 - RNA, 19 nt, Homo sapiens
  misc_RNA (1)...(19): siRNA sense strand
ucaaggccaacaacaauga

SEQ ID NO: 826349 - RNA, 19 nt, Homo sapiens
  misc_RNA (1)...(19): siRNA sense strand
ugaaggcugcccaauuuga

SEQ ID NO: 826350 - RNA, 19 nt, Homo sapiens
  misc_RNA (1)...(19): siRNA sense strand
cauuguugcugcuguagug

SEQ ID NO: 826351 - RNA, 19 nt, Homo sapiens
  misc_RNA (1)...(19): siRNA sense strand
gcggcuacaugacucugaa

SEQ ID NO: 826352 - RNA, 19 nt, Homo sapiens
  misc_RNA (1)...(19): siRNA sense strand
acccaaaugucucagaaug

SEQ ID NO: 826353 - RNA, 19 nt, Homo sapiens
  misc_RNA (1)...(19): siRNA sense strand
aggcugugcugaaacuuga

SEQ ID NO: 826354 - RNA, 19 nt, Homo sapiens
  misc_RNA (1)...(19): siRNA sense strand
ggucauugcgacugcugua

SEQ ID NO: 826355 - RNA, 19 nt, Homo sapiens
  misc_RNA (1)...(19): siRNA sense strand
cagcccagcuacagguuca

SEQ ID NO: 826356 - RNA, 19 nt, Homo sapiens
  misc_RNA (1)...(19): siRNA sense strand
acgaccaugucaacaguaa

SEQ ID NO: 826357 - RNA, 19 nt, Homo sapiens
  misc_RNA (1)...(19): siRNA sense strand
ggucaaggucacauucuuc

SEQ ID NO: 826358 - RNA, 19 nt, Homo sapiens
  misc_RNA (1)...(19): siRNA sense strand
acaagccucuggucaaggu

SEQ ID NO: 826359 - RNA, 19 nt, Homo sapiens
  misc_RNA (1)...(19): siRNA sense strand
caagcaaaccacagucaca

SEQ ID NO: 826360 - RNA, 19 nt, Homo sapiens
  misc_RNA (1)...(19): siRNA sense strand
gaaggcugcccaauuugag

SEQ ID NO: 826361 - RNA, 19 nt, Homo sapiens
  misc_RNA (1)...(19): siRNA sense strand
aagcggauuucagccaauu

SEQ ID NO: 826362 - RNA, 19 nt, Homo sapiens
  misc_RNA (1)...(19): siRNA sense strand
cauccaagccugugaccau

SEQ ID NO: 826363 - RNA, 19 nt, Homo sapiens
  misc_RNA (1)...(19): siRNA sense strand
gaaaccaacaaugacuaug

SEQ ID NO: 826364 - RNA, 19 nt, Homo sapiens
  misc_RNA (1)...(19): siRNA sense strand
gaauggaaaaucccagaaa

SEQ ID NO: 826365 - RNA, 19 nt, Homo sapiens
  misc_RNA (1)...(19): siRNA sense strand
caaaugucucagaauguau

SEQ ID NO: 826366 - RNA, 19 nt, Homo sapiens
  misc_RNA (1)...(19): siRNA sense strand
aagaaaccaacaaugacua

SEQ ID NO: 826367 - RNA, 19 nt, Homo sapiens
  misc_RNA (1)...(19): siRNA sense strand
ccugagagcgacuccauuc

SEQ ID NO: 826368 - RNA, 19 nt, Homo sapiens
  misc_RNA (1)...(19): siRNA sense strand
gguucaaggccaacaacaa

SEQ ID NO: 826369 - RNA, 19 nt, Homo sapiens
  misc_RNA (1)...(19): siRNA sense strand
agaaaccaacaaugacuau

SEQ ID NO: 826370 - RNA, 19 nt, Homo sapiens
  misc_RNA (1)...(19): siRNA sense strand
ugagccaccuggacgucaa

SEQ ID NO: 826371 - RNA, 19 nt, Homo sapiens
  misc_RNA (1)...(19): siRNA sense strand
ugaagaaaccaacaaugac

SEQ ID NO: 826372 - RNA, 19 nt, Homo sapiens
  misc_RNA (1)...(19): siRNA sense strand
ggaguacacgugccagacu

SEQ ID NO: 826373 - RNA, 19 nt, Homo sapiens
  misc_RNA (1)...(19): siRNA sense strand
uguggcugcuucaaccauu

SEQ ID NO: 826374 - RNA, 19 nt, Homo sapiens
  misc_RNA (1)...(19): siRNA sense strand
cagcgacccugugcaucug

SEQ ID NO: 826375 - RNA, 19 nt, Homo sapiens
  misc_RNA (1)...(19): siRNA sense strand
cagcaugggcagcucuuca

SEQ ID NO: 826376 - RNA, 19 nt, Homo sapiens
  misc_RNA (1)...(19): siRNA sense strand
gaagaucgaccuauuauug

SEQ ID NO: 826377 - RNA, 19 nt, Homo sapiens
  misc_RNA (1)...(19): siRNA sense strand
cgaggaagaucgaccuauu

SEQ ID NO: 826378 - RNA, 19 nt, Homo sapiens
  misc_RNA (1)...(19): siRNA sense strand
gaggaagaucgaccuauua

SEQ ID NO: 826379 - RNA, 19 nt, Homo sapiens
  misc_RNA (1)...(19): siRNA sense strand
gaaaagcaaucacaguguu

SEQ ID NO: 826380 - RNA, 19 nt, Homo sapiens
  misc_RNA (1)...(19): siRNA sense strand
gaaaacgccugaagaaggu

SEQ ID NO: 826381 - RNA, 19 nt, Homo sapiens
  misc_RNA (1)...(19): siRNA sense strand
gagauggacccgccaaauc

SEQ ID NO: 826382 - RNA, 19 nt, Homo sapiens
  misc_RNA (1)...(19): siRNA sense strand
gggagcaucugcaggucaa

SEQ ID NO: 826383 - RNA, 19 nt, Homo sapiens
  misc_RNA (1)...(19): siRNA sense strand
ggaagaucgaccuauuauu

SEQ ID NO: 826384 - RNA, 19 nt, Homo sapiens
  misc_RNA (1)...(19): siRNA sense strand
ugaagaaggugaaaagcaa

SEQ ID NO: 826385 - RNA, 19 nt, Homo sapiens
  misc_RNA (1)...(19): siRNA sense strand
ggagauggacccgccaaau

SEQ ID NO: 826386 - RNA, 19 nt, Homo sapiens
  misc_RNA (1)...(19): siRNA sense strand
gaccaaggcgcuauguaca

SEQ ID NO: 826387 - RNA, 19 nt, Homo sapiens
  misc_RNA (1)...(19): siRNA sense strand
ggaaccagcaacaccugaa

SEQ ID NO: 826388 - RNA, 19 nt, Homo sapiens
  misc_RNA (1)...(19): siRNA sense strand
ggcccgagcaguucaguga

SEQ ID NO: 826389 - RNA, 19 nt, Homo sapiens
  misc_RNA (1)...(19): siRNA sense strand
ccgagcaguucagugauga

SEQ ID NO: 826390 - RNA, 19 nt, Homo sapiens
  misc_RNA (1)...(19): siRNA sense strand
gaaccagcaacaccugaag

SEQ ID NO: 826391 - RNA, 19 nt, Homo sapiens
  misc_RNA (1)...(19): siRNA sense strand
aaagcaaucacaguguuaa

SEQ ID NO: 826392 - RNA, 19 nt, Homo sapiens
  misc_RNA (1)...(19): siRNA sense strand
gugugaagaugguccugau

SEQ ID NO: 826393 - RNA, 19 nt, Homo sapiens
  misc_RNA (1)...(19): siRNA sense strand
aggaagaucgaccuauuau

SEQ ID NO: 826394 - RNA, 19 nt, Homo sapiens
  misc_RNA (1)...(19): siRNA sense strand
ggugaaaacgccugaagaa

SEQ ID NO: 826395 - RNA, 19 nt, Homo sapiens
  misc_RNA (1)...(19): siRNA sense strand
ggaaccagcaacucaacgu

SEQ ID NO: 826396 - RNA, 19 nt, Homo sapiens
  misc_RNA (1)...(19): siRNA sense strand
ugaaguggaaccagcaaca

SEQ ID NO: 826397 - RNA, 19 nt, Homo sapiens
  misc_RNA (1)...(19): siRNA sense strand
gaccuauuauuggccuaga

SEQ ID NO: 826398 - RNA, 19 nt, Homo sapiens
  misc_RNA (1)...(19): siRNA sense strand
uauguacagccuccugaaa

SEQ ID NO: 826399 - RNA, 19 nt, Homo sapiens
  misc_RNA (1)...(19): siRNA sense strand
cccgagcaguucagugaug

SEQ ID NO: 826400 - RNA, 19 nt, Homo sapiens
  misc_RNA (1)...(19): siRNA sense strand
agacugggugugaguguga

SEQ ID NO: 826401 - RNA, 19 nt, Homo sapiens
  misc_RNA (1)...(19): siRNA sense strand
caaauccagaggaggugaa

SEQ ID NO: 826402 - RNA, 19 nt, Homo sapiens
  misc_RNA (1)...(19): siRNA sense strand
agaccaaggcgcuauguac

SEQ ID NO: 826403 - RNA, 19 nt, Homo sapiens
  misc_RNA (1)...(19): siRNA sense strand
agaaagagaucaucaagaa

SEQ ID NO: 826404 - RNA, 19 nt, Homo sapiens
  misc_RNA (1)...(19): siRNA sense strand
cgaaaccacucaugucuuu

SEQ ID NO: 826405 - RNA, 19 nt, Homo sapiens
  misc_RNA (1)...(19): siRNA sense strand
ccauggagcuggucaauga

SEQ ID NO: 826406 - RNA, 19 nt, Homo sapiens
  misc_RNA (1)...(19): siRNA sense strand
gcacaacauucucuacuuc

SEQ ID NO: 826407 - RNA, 19 nt, Homo sapiens
  misc_RNA (1)...(19): siRNA sense strand
ccaagcaggucuauuucua

SEQ ID NO: 826408 - RNA, 19 nt, Homo sapiens
  misc_RNA (1)...(19): siRNA sense strand
ugagacaccugcccaguuu

SEQ ID NO: 826409 - RNA, 19 nt, Homo sapiens
  misc_RNA (1)...(19): siRNA sense strand
ggacguggcuaccuacaag

SEQ ID NO: 826410 - RNA, 19 nt, Homo sapiens
  misc_RNA (1)...(19): siRNA sense strand
ggagagcguuccuggcauu

SEQ ID NO: 826411 - RNA, 19 nt, Homo sapiens
  misc_RNA (1)...(19): siRNA sense strand
gaaggaguaucacaucaag

SEQ ID NO: 826412 - RNA, 19 nt, Homo sapiens
  misc_RNA (1)...(19): siRNA sense strand
ugaaccaccugaaggagua

SEQ ID NO: 826413 - RNA, 19 nt, Homo sapiens
  misc_RNA (1)...(19): siRNA sense strand
acaccaagcaggucuauuu

SEQ ID NO: 826414 - RNA, 19 nt, Homo sapiens
  misc_RNA (1)...(19): siRNA sense strand
aauggaaccuguaagugua

SEQ ID NO: 826415 - RNA, 19 nt, Homo sapiens
  misc_RNA (1)...(19): siRNA sense strand
ucacggagauugucuucug

SEQ ID NO: 826416 - RNA, 19 nt, Homo sapiens
  misc_RNA (1)...(19): siRNA sense strand
ugagaaaccuaauauugag

SEQ ID NO: 826417 - RNA, 19 nt, Homo sapiens
  misc_RNA (1)...(19): siRNA sense strand
ggacccaccugaugaacca

SEQ ID NO: 826418 - RNA, 19 nt, Homo sapiens
  misc_RNA (1)...(19): siRNA sense strand
agaggacgcucccagagaa

SEQ ID NO: 826419 - RNA, 19 nt, Homo sapiens
  misc_RNA (1)...(19): siRNA sense strand
acacggagcugucccacau

SEQ ID NO: 826420 - RNA, 19 nt, Homo sapiens
  misc_RNA (1)...(19): siRNA sense strand
gaguggagaaggacaaauu

SEQ ID NO: 826421 - RNA, 19 nt, Homo sapiens
  misc_RNA (1)...(19): siRNA sense strand
ucauggagccugugaagaa

SEQ ID NO: 826422 - RNA, 19 nt, Homo sapiens
  misc_RNA (1)...(19): siRNA sense strand
acaaauuggugcccgagaa

SEQ ID NO: 826423 - RNA, 19 nt, Homo sapiens
  misc_RNA (1)...(19): siRNA sense strand
caauggaaccuguaagugu

SEQ ID NO: 826424 - RNA, 19 nt, Homo sapiens
  misc_RNA (1)...(19): siRNA sense strand
gcgcaugccuaaggaguau

SEQ ID NO: 826425 - RNA, 19 nt, Homo sapiens
  misc_RNA (1)...(19): siRNA sense strand
ucaagaagcagaaagagau

SEQ ID NO: 826426 - RNA, 19 nt, Homo sapiens
  misc_RNA (1)...(19): siRNA sense strand
gcagaaagagaucaucaag

SEQ ID NO: 826427 - RNA, 19 nt, Homo sapiens
  misc_RNA (1)...(19): siRNA sense strand
cgacgcugauggaguguga

SEQ ID NO: 826428 - RNA, 19 nt, Homo sapiens
  misc_RNA (1)...(19): siRNA sense strand
uaaguguaauggcuggaaa

SEQ ID NO: 826429 - RNA, 19 nt, Homo sapiens
  misc_RNA (1)...(19): siRNA sense strand
ugucagaggaugagauaaa

SEQ ID NO: 826430 - RNA, 19 nt, Homo sapiens
  misc_RNA (1)...(19): siRNA sense strand
ccauugaccugaagaccau

SEQ ID NO: 826431 - RNA, 19 nt, Homo sapiens
  misc_RNA (1)...(19): siRNA sense strand
ucacaucaagcacaacauu

SEQ ID NO: 826432 - RNA, 19 nt, Homo sapiens
  misc_RNA (1)...(19): siRNA sense strand
augagcaggucaaggguua

SEQ ID NO: 826433 - RNA, 19 nt, Homo sapiens
  misc_RNA (1)...(19): siRNA sense strand
gagcguuccuggcauucga

SEQ ID NO: 826434 - RNA, 19 nt, Homo sapiens
  misc_RNA (1)...(19): siRNA sense strand
cuucaugucuguucacaag

SEQ ID NO: 826435 - RNA, 19 nt, Homo sapiens
  misc_RNA (1)...(19): siRNA sense strand
gaagcugauugagcgcaaa

SEQ ID NO: 826436 - RNA, 19 nt, Homo sapiens
  misc_RNA (1)...(19): siRNA sense strand
gaggccucauugacaagua

SEQ ID NO: 826437 - RNA, 19 nt, Homo sapiens
  misc_RNA (1)...(19): siRNA sense strand
ccaaauuccuguccaugcu

SEQ ID NO: 826438 - RNA, 19 nt, Homo sapiens
  misc_RNA (1)...(19): siRNA sense strand
gaaagagaucaucaagaag

SEQ ID NO: 826439 - RNA, 19 nt, Homo sapiens
  misc_RNA (1)...(19): siRNA sense strand
ucaugucuguucacaagga

SEQ ID NO: 826440 - RNA, 19 nt, Homo sapiens
  misc_RNA (1)...(19): siRNA sense strand
gauggagugugagcugaau

SEQ ID NO: 826441 - RNA, 19 nt, Homo sapiens
  misc_RNA (1)...(19): siRNA sense strand
ucaccuacgccgacgagua

SEQ ID NO: 826442 - RNA, 19 nt, Homo sapiens
  misc_RNA (1)...(19): siRNA sense strand
cugaggacguggcuaccua

SEQ ID NO: 826443 - RNA, 19 nt, Homo sapiens
  misc_RNA (1)...(19): siRNA sense strand
gagcugugccgcaguugug

SEQ ID NO: 826444 - RNA, 19 nt, Homo sapiens
  misc_RNA (1)...(19): siRNA sense strand
ggugguggauguggagaau

SEQ ID NO: 826445 - RNA, 19 nt, Homo sapiens
  misc_RNA (1)...(19): siRNA sense strand
gcucuacacaacccucaaa

SEQ ID NO: 826446 - RNA, 19 nt, Homo sapiens
  misc_RNA (1)...(19): siRNA sense strand
cagaaagagaucaucaaga

SEQ ID NO: 826447 - RNA, 19 nt, Homo sapiens
  misc_RNA (1)...(19): siRNA sense strand
ccauuugagaaaccuaaua

SEQ ID NO: 826448 - RNA, 19 nt, Homo sapiens
  misc_RNA (1)...(19): siRNA sense strand
ggagcugucccacaucauc

SEQ ID NO: 826449 - RNA, 19 nt, Homo sapiens
  misc_RNA (1)...(19): siRNA sense strand
ggcaucugcuuccgcaugu

SEQ ID NO: 826450 - RNA, 19 nt, Homo sapiens
  misc_RNA (1)...(19): siRNA sense strand
ggacccucauccucacuca

SEQ ID NO: 826451 - RNA, 19 nt, Homo sapiens
  misc_RNA (1)...(19): siRNA sense strand
uguucgagcucucaaagau

SEQ ID NO: 826452 - RNA, 19 nt, Homo sapiens
  misc_RNA (1)...(19): siRNA sense strand
gcuacgaaaccacucaugu

SEQ ID NO: 826453 - RNA, 19 nt, Homo sapiens
  misc_RNA (1)...(19): siRNA sense strand
ugucccacaucaucaagaa

SEQ ID NO: 826454 - RNA, 19 nt, Homo sapiens
  misc_RNA (1)...(19): siRNA sense strand
caucugcuuccgcauguuu

SEQ ID NO: 826455 - RNA, 19 nt, Homo sapiens
  misc_RNA (1)...(19): siRNA sense strand
gaaccugacccuggaggau

SEQ ID NO: 826456 - RNA, 19 nt, Homo sapiens
  misc_RNA (1)...(19): siRNA sense strand
ucaagcuacugcggaaaug

SEQ ID NO: 826457 - RNA, 19 nt, Homo sapiens
  misc_RNA (1)...(19): siRNA sense strand
cgccaucggcuacuucaaa

SEQ ID NO: 826458 - RNA, 19 nt, Homo sapiens
  misc_RNA (1)...(19): siRNA sense strand
ugaaggaguaucacaucaa

SEQ ID NO: 826459 - RNA, 19 nt, Homo sapiens
  misc_RNA (1)...(19): siRNA sense strand
gccaauggaaccuguaagu

SEQ ID NO: 826460 - RNA, 19 nt, Homo sapiens
  misc_RNA (1)...(19): siRNA sense strand
gcgcaaacaggcccagauc

SEQ ID NO: 826461 - RNA, 19 nt, Homo sapiens
  misc_RNA (1)...(19): siRNA sense strand
gaaccuguaaguguaaugg

SEQ ID NO: 826462 - RNA, 19 nt, Homo sapiens
  misc_RNA (1)...(19): siRNA sense strand
agggaggccucauugacaa

SEQ ID NO: 826463 - RNA, 19 nt, Homo sapiens
  misc_RNA (1)...(19): siRNA sense strand
ccaacugucgcgaguacaa

SEQ ID NO: 826464 - RNA, 19 nt, Homo sapiens
  misc_RNA (1)...(19): siRNA sense strand
gagcugucccacaucauca

SEQ ID NO: 826465 - RNA, 19 nt, Homo sapiens
  misc_RNA (1)...(19): siRNA sense strand
ugggcuacaucaaggacua

SEQ ID NO: 826466 - RNA, 19 nt, Homo sapiens
  misc_RNA (1)...(19): siRNA sense strand
cugaaggaguaucacauca

SEQ ID NO: 826467 - RNA, 19 nt, Homo sapiens
  misc_RNA (1)...(19): siRNA sense strand
ccacuuggagaauguguca

SEQ ID NO: 826468 - RNA, 19 nt, Homo sapiens
  misc_RNA (1)...(19): siRNA sense strand
gcaugccuaaggaguauau

SEQ ID NO: 826469 - RNA, 19 nt, Homo sapiens
  misc_RNA (1)...(19): siRNA sense strand
acaaggaagaggacacaga

SEQ ID NO: 826470 - RNA, 19 nt, Homo sapiens
  misc_RNA (1)...(19): siRNA sense strand
ccaagcggcuccgugugau

SEQ ID NO: 826471 - RNA, 19 nt, Homo sapiens
  misc_RNA (1)...(19): siRNA sense strand
gggcaaacucuccaaucug

SEQ ID NO: 826472 - RNA, 19 nt, Homo sapiens
  misc_RNA (1)...(19): siRNA sense strand
ccuacaaggucaauuacac

SEQ ID NO: 826473 - RNA, 19 nt, Homo sapiens
  misc_RNA (1)...(19): siRNA sense strand
uaucccacuuggagaaugu

SEQ ID NO: 826474 - RNA, 19 nt, Homo sapiens
  misc_RNA (1)...(19): siRNA sense strand
gggagcggcagacgauguu

SEQ ID NO: 826475 - RNA, 19 nt, Homo sapiens
  misc_RNA (1)...(19): siRNA sense strand
ccgaccagcucuacacaac

SEQ ID NO: 826476 - RNA, 19 nt, Homo sapiens
  misc_RNA (1)...(19): siRNA sense strand
ucaucaagaagcagaaaga

SEQ ID NO: 826477 - RNA, 19 nt, Homo sapiens
  misc_RNA (1)...(19): siRNA sense strand
aguaucacaucaagcacaa

SEQ ID NO: 826478 - RNA, 19 nt, Homo sapiens
  misc_RNA (1)...(19): siRNA sense strand
ugaugaaccaccugaagga

SEQ ID NO: 826479 - RNA, 19 nt, Homo sapiens
  misc_RNA (1)...(19): siRNA sense strand
ugugucagaggaugagaua

SEQ ID NO: 826480 - RNA, 19 nt, Homo sapiens
  misc_RNA (1)...(19): siRNA sense strand
ucacucacuuccccaaauu

SEQ ID NO: 826481 - RNA, 19 nt, Homo sapiens
  misc_RNA (1)...(19): siRNA sense strand
gauguucgagcucucaaag

SEQ ID NO: 826482 - RNA, 19 nt, Homo sapiens
  misc_RNA (1)...(19): siRNA sense strand
caaauuggugcccgagaag

SEQ ID NO: 826483 - RNA, 19 nt, Homo sapiens
  misc_RNA (1)...(19): siRNA sense strand
ucaagcacaacauucucua

SEQ ID NO: 826484 - RNA, 19 nt, Homo sapiens
  misc_RNA (1)...(19): siRNA sense strand
gagcaggucaaggguuaug

SEQ ID NO: 826485 - RNA, 19 nt, Homo sapiens
  misc_RNA (1)...(19): siRNA sense strand
gcagcccuccauuugagaa

SEQ ID NO: 826486 - RNA, 19 nt, Homo sapiens
  misc_RNA (1)...(19): siRNA sense strand
caagaagcagaaagagauc

SEQ ID NO: 826487 - RNA, 19 nt, Homo sapiens
  misc_RNA (1)...(19): siRNA sense strand
ccaauggaaccuguaagug

SEQ ID NO: 826488 - RNA, 19 nt, Homo sapiens
  misc_RNA (1)...(19): siRNA sense strand
cuacgaaaccacucauguc

SEQ ID NO: 826489 - RNA, 19 nt, Homo sapiens
  misc_RNA (1)...(19): siRNA sense strand
ggagaaugugucagaggau

SEQ ID NO: 826490 - RNA, 19 nt, Homo sapiens
  misc_RNA (1)...(19): siRNA sense strand
cauggagccugugaagaag

SEQ ID NO: 826491 - RNA, 19 nt, Homo sapiens
  misc_RNA (1)...(19): siRNA sense strand
guuccuggcauucgagaga

SEQ ID NO: 826492 - RNA, 19 nt, Homo sapiens
  misc_RNA (1)...(19): siRNA sense strand
guaaguguaauggcuggaa

SEQ ID NO: 826493 - RNA, 19 nt, Homo sapiens
  misc_RNA (1)...(19): siRNA sense strand
gacaucaaggugcccaaga

SEQ ID NO: 826494 - RNA, 19 nt, Homo sapiens
  misc_RNA (1)...(19): siRNA sense strand
gugcugucaccucgaauga

SEQ ID NO: 826495 - RNA, 19 nt, Homo sapiens
  misc_RNA (1)...(19): siRNA sense strand
caucaucgaguuccauguc

SEQ ID NO: 826496 - RNA, 19 nt, Homo sapiens
  misc_RNA (1)...(19): siRNA sense strand
agggugugcugaacuuugu

SEQ ID NO: 826497 - RNA, 19 nt, Homo sapiens
  misc_RNA (1)...(19): siRNA sense strand
acaucaaggugcccaagag

SEQ ID NO: 826498 - RNA, 19 nt, Homo sapiens
  misc_RNA (1)...(19): siRNA sense strand
ucugugcugucaccucgaa

SEQ ID NO: 826499 - RNA, 19 nt, Homo sapiens
  misc_RNA (1)...(19): siRNA sense strand
ccugagacgagccugcuuu

SEQ ID NO: 826500 - RNA, 19 nt, Homo sapiens
  misc_RNA (1)...(19): siRNA sense strand
ccggccagcuucagucagu

SEQ ID NO: 826501 - RNA, 19 nt, Homo sapiens
  misc_RNA (1)...(19): siRNA sense strand
uucgagcucucaaagaugu

SEQ ID NO: 826502 - RNA, 19 nt, Homo sapiens
  misc_RNA (1)...(19): siRNA sense strand
uggcccaaaucaagucuca

SEQ ID NO: 826503 - RNA, 19 nt, Homo sapiens
  misc_RNA (1)...(19): siRNA sense strand
gaacagagccuccuagaaa

SEQ ID NO: 826504 - RNA, 19 nt, Homo sapiens
  misc_RNA (1)...(19): siRNA sense strand
gagcagaaaucaugagauc

SEQ ID NO: 826505 - RNA, 19 nt, Homo sapiens
  misc_RNA (1)...(19): siRNA sense strand
cagcagaccuucaaucucu

SEQ ID NO: 826506 - RNA, 19 nt, Homo sapiens
  misc_RNA (1)...(19): siRNA sense strand
gaacuuuaccagcaacuga

SEQ ID NO: 826507 - RNA, 19 nt, Homo sapiens
  misc_RNA (1)...(19): siRNA sense strand
gaaauacuuccaaagaauc

SEQ ID NO: 826508 - RNA, 19 nt, Homo sapiens
  misc_RNA (1)...(19): siRNA sense strand
gaagaaauacagcccuugu

SEQ ID NO: 826509 - RNA, 19 nt, Homo sapiens
  misc_RNA (1)...(19): siRNA sense strand
ggaacagagccuccuagaa

SEQ ID NO: 826510 - RNA, 19 nt, Homo sapiens
  misc_RNA (1)...(19): siRNA sense strand
ggaagagacuccccugaug

SEQ ID NO: 826511 - RNA, 19 nt, Homo sapiens
  misc_RNA (1)...(19): siRNA sense strand
gaaggacagacaugauuuc

SEQ ID NO: 826512 - RNA, 19 nt, Homo sapiens
  misc_RNA (1)...(19): siRNA sense strand
ugucagagcagaaaucaug

SEQ ID NO: 826513 - RNA, 19 nt, Homo sapiens
  misc_RNA (1)...(19): siRNA sense strand
gauuaaggaggaaggauug

SEQ ID NO: 826514 - RNA, 19 nt, Homo sapiens
  misc_RNA (1)...(19): siRNA sense strand
ugaaggacagacaugauuu

SEQ ID NO: 826515 - RNA, 19 nt, Homo sapiens
  misc_RNA (1)...(19): siRNA sense strand
ggaagcaugugugauacag

SEQ ID NO: 826516 - RNA, 19 nt, Homo sapiens
  misc_RNA (1)...(19): siRNA sense strand
uaauaggagggccuugaua

SEQ ID NO: 826517 - RNA, 19 nt, Homo sapiens
  misc_RNA (1)...(19): siRNA sense strand
cagacaugauuucggauuc

SEQ ID NO: 826518 - RNA, 19 nt, Homo sapiens
  misc_RNA (1)...(19): siRNA sense strand
gaagagacuccccugauga

SEQ ID NO: 826519 - RNA, 19 nt, Homo sapiens
  misc_RNA (1)...(19): siRNA sense strand
gguaauaggagggccuuga

SEQ ID NO: 826520 - RNA, 19 nt, Homo sapiens
  misc_RNA (1)...(19): siRNA sense strand
ccaucucuguccuccauga

SEQ ID NO: 826521 - RNA, 19 nt, Homo sapiens
  misc_RNA (1)...(19): siRNA sense strand
gggaacagagccuccuaga

SEQ ID NO: 826522 - RNA, 19 nt, Homo sapiens
  misc_RNA (1)...(19): siRNA sense strand
guaauaggagggccuugau

SEQ ID NO: 826523 - RNA, 19 nt, Homo sapiens
  misc_RNA (1)...(19): siRNA sense strand
gagguugucagagcagaaa

SEQ ID NO: 826524 - RNA, 19 nt, Homo sapiens
  misc_RNA (1)...(19): siRNA sense strand
agacuccccugaugaauga

SEQ ID NO: 826525 - RNA, 19 nt, Homo sapiens
  misc_RNA (1)...(19): siRNA sense strand
gcagaccuucaaucucuuc

SEQ ID NO: 826526 - RNA, 19 nt, Homo sapiens
  misc_RNA (1)...(19): siRNA sense strand
agauuaaggaggaaggauu

SEQ ID NO: 826527 - RNA, 19 nt, Homo sapiens
  misc_RNA (1)...(19): siRNA sense strand
cagcacagaggacucaucu

SEQ ID NO: 826528 - RNA, 19 nt, Homo sapiens
  misc_RNA (1)...(19): siRNA sense strand
cagagcagaaaucaugaga

SEQ ID NO: 826529 - RNA, 19 nt, Homo sapiens
  misc_RNA (1)...(19): siRNA sense strand
acagacaugauuucggauu

SEQ ID NO: 826530 - RNA, 19 nt, Homo sapiens
  misc_RNA (1)...(19): siRNA sense strand
ggagguugucagagcagaa

SEQ ID NO: 826531 - RNA, 19 nt, Homo sapiens
  misc_RNA (1)...(19): siRNA sense strand
ggacagacaugacuucaga

SEQ ID NO: 826532 - RNA, 19 nt, Homo sapiens
  misc_RNA (1)...(19): siRNA sense strand
gagcagaaaucaugagauc

SEQ ID NO: 826533 - RNA, 19 nt, Homo sapiens
  misc_RNA (1)...(19): siRNA sense strand
acaaaggacucaucuguug

SEQ ID NO: 826534 - RNA, 19 nt, Homo sapiens
  misc_RNA (1)...(19): siRNA sense strand
agacaugacuucagauuuc

SEQ ID NO: 826535 - RNA, 19 nt, Homo sapiens
  misc_RNA (1)...(19): siRNA sense strand
gcacaaaggacucaucugu

SEQ ID NO: 826536 - RNA, 19 nt, Homo sapiens
  misc_RNA (1)...(19): siRNA sense strand
cagcagaccuucaaucucu

SEQ ID NO: 826537 - RNA, 19 nt, Homo sapiens
  misc_RNA (1)...(19): siRNA sense strand
gcacaaaugaggagaaucu

SEQ ID NO: 826538 - RNA, 19 nt, Homo sapiens
  misc_RNA (1)...(19): siRNA sense strand
gaugagaggcuucuagaca

SEQ ID NO: 826539 - RNA, 19 nt, Homo sapiens
  misc_RNA (1)...(19): siRNA sense strand
ggacuccccugaugaauga

SEQ ID NO: 826540 - RNA, 19 nt, Homo sapiens
  misc_RNA (1)...(19): siRNA sense strand
caaacucuauacugaacuu

SEQ ID NO: 826541 - RNA, 19 nt, Homo sapiens
  misc_RNA (1)...(19): siRNA sense strand
gcagcugaaugaccuggaa

SEQ ID NO: 826542 - RNA, 19 nt, Homo sapiens
  misc_RNA (1)...(19): siRNA sense strand
ugagaggcuucuagacaaa

SEQ ID NO: 826543 - RNA, 19 nt, Homo sapiens
  misc_RNA (1)...(19): siRNA sense strand
aaacuugcaagaaagguua

SEQ ID NO: 826544 - RNA, 19 nt, Homo sapiens
  misc_RNA (1)...(19): siRNA sense strand
gacaaacucuauacugaac

SEQ ID NO: 826545 - RNA, 19 nt, Homo sapiens
  misc_RNA (1)...(19): siRNA sense strand
gcugcucucuggacuguga

SEQ ID NO: 826546 - RNA, 19 nt, Homo sapiens
  misc_RNA (1)...(19): siRNA sense strand
gagaaaauacuuccaaaga

SEQ ID NO: 826547 - RNA, 19 nt, Homo sapiens
  misc_RNA (1)...(19): siRNA sense strand
gugcucagcugcaagucaa

SEQ ID NO: 826548 - RNA, 19 nt, Homo sapiens
  misc_RNA (1)...(19): siRNA sense strand
gaaacuugcaagaaagguu

SEQ ID NO: 826549 - RNA, 19 nt, Homo sapiens
  misc_RNA (1)...(19): siRNA sense strand
gguuaaggaggaaggaaua

SEQ ID NO: 826550 - RNA, 19 nt, Homo sapiens
  misc_RNA (1)...(19): siRNA sense strand
ugucagagcagaaaucaug

SEQ ID NO: 826551 - RNA, 19 nt, Homo sapiens
  misc_RNA (1)...(19): siRNA sense strand
gaaaucaugagauccuucu

SEQ ID NO: 826552 - RNA, 19 nt, Homo sapiens
  misc_RNA (1)...(19): siRNA sense strand
gggaugagaggcuucuaga

SEQ ID NO: 826553 - RNA, 19 nt, Homo sapiens
  misc_RNA (1)...(19): siRNA sense strand
agacaaacucuauacugaa

SEQ ID NO: 826554 - RNA, 19 nt, Homo sapiens
  misc_RNA (1)...(19): siRNA sense strand
ccuggaagccugugugaug

SEQ ID NO: 826555 - RNA, 19 nt, Homo sapiens
  misc_RNA (1)...(19): siRNA sense strand
gcagaaaucaugagauccu

SEQ ID NO: 826556 - RNA, 19 nt, Homo sapiens
  misc_RNA (1)...(19): siRNA sense strand
cagacaugacuucagauuu

SEQ ID NO: 826557 - RNA, 19 nt, Homo sapiens
  misc_RNA (1)...(19): siRNA sense strand
ccaucucuguccuccauga

SEQ ID NO: 826558 - RNA, 19 nt, Homo sapiens
  misc_RNA (1)...(19): siRNA sense strand
uccaaagaaucacucucua

SEQ ID NO: 826559 - RNA, 19 nt, Homo sapiens
  misc_RNA (1)...(19): siRNA sense strand
augagaggcuucuagacaa

SEQ ID NO: 826560 - RNA, 19 nt, Homo sapiens
  misc_RNA (1)...(19): siRNA sense strand
cacaaaggacucaucuguu

SEQ ID NO: 826561 - RNA, 19 nt, Homo sapiens
  misc_RNA (1)...(19): siRNA sense strand
uucaaucucuucagcacaa

SEQ ID NO: 826562 - RNA, 19 nt, Homo sapiens
  misc_RNA (1)...(19): siRNA sense strand
gagguugucagagcagaaa

SEQ ID NO: 826563 - RNA, 19 nt, Homo sapiens
  misc_RNA (1)...(19): siRNA sense strand
ccaaagaaucacucucuac

SEQ ID NO: 826564 - RNA, 19 nt, Homo sapiens
  misc_RNA (1)...(19): siRNA sense strand
acagacaugacuucagauu

SEQ ID NO: 826565 - RNA, 19 nt, Homo sapiens
  misc_RNA (1)...(19): siRNA sense strand
cagaaaucaugagauccuu

SEQ ID NO: 826566 - RNA, 19 nt, Homo sapiens
  misc_RNA (1)...(19): siRNA sense strand
ggcuuugccuuuugcuuua

SEQ ID NO: 826567 - RNA, 19 nt, Homo sapiens
  misc_RNA (1)...(19): siRNA sense strand
gaccuggaagccuguguga

SEQ ID NO: 826568 - RNA, 19 nt, Homo sapiens
  misc_RNA (1)...(19): siRNA sense strand
guuaaggaggaaggaauaa

SEQ ID NO: 826569 - RNA, 19 nt, Homo sapiens
  misc_RNA (1)...(19): siRNA sense strand
uggcacaaaugaggagaau

SEQ ID NO: 826570 - RNA, 19 nt, Homo sapiens
  misc_RNA (1)...(19): siRNA sense strand
aagaaagguuaaggaggaa

SEQ ID NO: 826571 - RNA, 19 nt, Homo sapiens
  misc_RNA (1)...(19): siRNA sense strand
aagcugcucucuggacugu

SEQ ID NO: 826572 - RNA, 19 nt, Homo sapiens
  misc_RNA (1)...(19): siRNA sense strand
gcagaccuucaaucucuuc

SEQ ID NO: 826573 - RNA, 19 nt, Homo sapiens
  misc_RNA (1)...(19): siRNA sense strand
acucuauacugaacuuuac

SEQ ID NO: 826574 - RNA, 19 nt, Homo sapiens
  misc_RNA (1)...(19): siRNA sense strand
gugagaaaauacuuccaaa

SEQ ID NO: 826575 - RNA, 19 nt, Homo sapiens
  misc_RNA (1)...(19): siRNA sense strand
cagagcagaaaucaugaga

SEQ ID NO: 826576 - RNA, 19 nt, Homo sapiens
  misc_RNA (1)...(19): siRNA sense strand
ggagguugucagagcagaa

SEQ ID NO: 826577 - RNA, 19 nt, Homo sapiens
  misc_RNA (1)...(19): siRNA sense strand
gaacagagccuccuagaaa

SEQ ID NO: 826578 - RNA, 19 nt, Homo sapiens
  misc_RNA (1)...(19): siRNA sense strand
gagcagaaaucaugagauc

SEQ ID NO: 826579 - RNA, 19 nt, Homo sapiens
  misc_RNA (1)...(19): siRNA sense strand
cagcagaccuucaaucucu

SEQ ID NO: 826580 - RNA, 19 nt, Homo sapiens
  misc_RNA (1)...(19): siRNA sense strand
gaacuuuaccagcaacuga

SEQ ID NO: 826581 - RNA, 19 nt, Homo sapiens
  misc_RNA (1)...(19): siRNA sense strand
gcacaaaugggaagaaucu

SEQ ID NO: 826582 - RNA, 19 nt, Homo sapiens
  misc_RNA (1)...(19): siRNA sense strand
gaaauacuuccaaagaauc

SEQ ID NO: 826583 - RNA, 19 nt, Homo sapiens
  misc_RNA (1)...(19): siRNA sense strand
gaagaaauacagcccuugu

SEQ ID NO: 826584 - RNA, 19 nt, Homo sapiens
  misc_RNA (1)...(19): siRNA sense strand
gaaggacagacaugaauuc

SEQ ID NO: 826585 - RNA, 19 nt, Homo sapiens
  misc_RNA (1)...(19): siRNA sense strand
ggauuaaggaggaaggauu

SEQ ID NO: 826586 - RNA, 19 nt, Homo sapiens
  misc_RNA (1)...(19): siRNA sense strand
ggaacagagccuccuagaa

SEQ ID NO: 826587 - RNA, 19 nt, Homo sapiens
  misc_RNA (1)...(19): siRNA sense strand
ggaagagacuccccugaug

SEQ ID NO: 826588 - RNA, 19 nt, Homo sapiens
  misc_RNA (1)...(19): siRNA sense strand
acccacagccugcguaaua

SEQ ID NO: 826589 - RNA, 19 nt, Homo sapiens
  misc_RNA (1)...(19): siRNA sense strand
ugucagagcagaaaucaug

SEQ ID NO: 826590 - RNA, 19 nt, Homo sapiens
  misc_RNA (1)...(19): siRNA sense strand
gauuaaggaggaaggauug

SEQ ID NO: 826591 - RNA, 19 nt, Homo sapiens
  misc_RNA (1)...(19): siRNA sense strand
ugggaagaaucucuccuuu

SEQ ID NO: 826592 - RNA, 19 nt, Homo sapiens
  misc_RNA (1)...(19): siRNA sense strand
uaauaggagggccuugaua

SEQ ID NO: 826593 - RNA, 19 nt, Homo sapiens
  misc_RNA (1)...(19): siRNA sense strand
ggaagcaugugugauacag

SEQ ID NO: 826594 - RNA, 19 nt, Homo sapiens
  misc_RNA (1)...(19): siRNA sense strand
gggaagaaucucuccuuuc

SEQ ID NO: 826595 - RNA, 19 nt, Homo sapiens
  misc_RNA (1)...(19): siRNA sense strand
gaagagacuccccugauga

SEQ ID NO: 826596 - RNA, 19 nt, Homo sapiens
  misc_RNA (1)...(19): siRNA sense strand
ugaaggacagacaugaauu

SEQ ID NO: 826597 - RNA, 19 nt, Homo sapiens
  misc_RNA (1)...(19): siRNA sense strand
ccaucucuguccuccauga

SEQ ID NO: 826598 - RNA, 19 nt, Homo sapiens
  misc_RNA (1)...(19): siRNA sense strand
gggaacagagccuccuaga

SEQ ID NO: 826599 - RNA, 19 nt, Homo sapiens
  misc_RNA (1)...(19): siRNA sense strand
guaauaggagggccuugau

SEQ ID NO: 826600 - RNA, 19 nt, Homo sapiens
  misc_RNA (1)...(19): siRNA sense strand
gagguugucagagcagaaa

SEQ ID NO: 826601 - RNA, 19 nt, Homo sapiens
  misc_RNA (1)...(19): siRNA sense strand
agacuccccugaugaauga

SEQ ID NO: 826602 - RNA, 19 nt, Homo sapiens
  misc_RNA (1)...(19): siRNA sense strand
ugauacuccuggcacaaau

SEQ ID NO: 826603 - RNA, 19 nt, Homo sapiens
  misc_RNA (1)...(19): siRNA sense strand
uggcacaaaugggaagaau

SEQ ID NO: 826604 - RNA, 19 nt, Homo sapiens
  misc_RNA (1)...(19): siRNA sense strand
gcagaccuucaaucucuuc

SEQ ID NO: 826605 - RNA, 19 nt, Homo sapiens
  misc_RNA (1)...(19): siRNA sense strand
cguaauaggagggccuuga

SEQ ID NO: 826606 - RNA, 19 nt, Homo sapiens
  misc_RNA (1)...(19): siRNA sense strand
cagagcagaaaucaugaga

SEQ ID NO: 826607 - RNA, 19 nt, Homo sapiens
  misc_RNA (1)...(19): siRNA sense strand
gauacuccuggcacaaaug

SEQ ID NO: 826608 - RNA, 19 nt, Homo sapiens
  misc_RNA (1)...(19): siRNA sense strand
cagcacagaggacucaucu

SEQ ID NO: 826609 - RNA, 19 nt, Homo sapiens
  misc_RNA (1)...(19): siRNA sense strand
ggagguugucagagcagaa

SEQ ID NO: 826610 - RNA, 19 nt, Homo sapiens
  misc_RNA (1)...(19): siRNA sense strand
guacaaauacugcagaaau

SEQ ID NO: 826611 - RNA, 19 nt, Homo sapiens
  misc_RNA (1)...(19): siRNA sense strand
ggaauccuccugcuaaaga

SEQ ID NO: 826612 - RNA, 19 nt, Homo sapiens
  misc_RNA (1)...(19): siRNA sense strand
ggaggcugcugguacaaau

SEQ ID NO: 826613 - RNA, 19 nt, Homo sapiens
  misc_RNA (1)...(19): siRNA sense strand
uacaaauacugcagaaaug

SEQ ID NO: 826614 - RNA, 19 nt, Homo sapiens
  misc_RNA (1)...(19): siRNA sense strand
gaauccuccugcuaaagaa

SEQ ID NO: 826615 - RNA, 19 nt, Homo sapiens
  misc_RNA (1)...(19): siRNA sense strand
gucaugaucugcucggaau

SEQ ID NO: 826616 - RNA, 19 nt, Homo sapiens
  misc_RNA (1)...(19): siRNA sense strand
ggccaccggucacuucaug

SEQ ID NO: 826617 - RNA, 19 nt, Homo sapiens
  misc_RNA (1)...(19): siRNA sense strand
gcagcugagucaugaucug

SEQ ID NO: 826618 - RNA, 19 nt, Homo sapiens
  misc_RNA (1)...(19): siRNA sense strand
acaggaggcugcugguaca

SEQ ID NO: 826619 - RNA, 19 nt, Homo sapiens
  misc_RNA (1)...(19): siRNA sense strand
acaaauacugcagaaauga

SEQ ID NO: 826620 - RNA, 19 nt, Homo sapiens
  misc_RNA (1)...(19): siRNA sense strand
gcucggaauccuccugcua

SEQ ID NO: 826621 - RNA, 19 nt, Homo sapiens
  misc_RNA (1)...(19): siRNA sense strand
guacaggaggcugcuggua

SEQ ID NO: 826622 - RNA, 19 nt, Homo sapiens
  misc_RNA (1)...(19): siRNA sense strand
ucggaauccuccugcuaaa

SEQ ID NO: 826623 - RNA, 19 nt, Homo sapiens
  misc_RNA (1)...(19): siRNA sense strand
gaggcugcugguacaaaua

SEQ ID NO: 826624 - RNA, 19 nt, Homo sapiens
  misc_RNA (1)...(19): siRNA sense strand
cagccgagccagcaagauc

SEQ ID NO: 826625 - RNA, 19 nt, Homo sapiens
  misc_RNA (1)...(19): siRNA sense strand
gaucaaaucucauugcuuu

SEQ ID NO: 826626 - RNA, 19 nt, Homo sapiens
  misc_RNA (1)...(19): siRNA sense strand
gaaggaaccugaagcagaa

SEQ ID NO: 826627 - RNA, 19 nt, Homo sapiens
  misc_RNA (1)...(19): siRNA sense strand
ucacaaggcuuaaaggaaa

SEQ ID NO: 826628 - RNA, 19 nt, Homo sapiens
  misc_RNA (1)...(19): siRNA sense strand
gaaaugagccagaacaguu

SEQ ID NO: 826629 - RNA, 19 nt, Homo sapiens
  misc_RNA (1)...(19): siRNA sense strand
ggaagaggaucaagaaaca

SEQ ID NO: 826630 - RNA, 19 nt, Homo sapiens
  misc_RNA (1)...(19): siRNA sense strand
ggagggagauuuacaagau

SEQ ID NO: 826631 - RNA, 19 nt, Homo sapiens
  misc_RNA (1)...(19): siRNA sense strand
ggagaaagacgaucaucua

SEQ ID NO: 826632 - RNA, 19 nt, Homo sapiens
  misc_RNA (1)...(19): siRNA sense strand
ugaaagaguuuaaggaaga

SEQ ID NO: 826633 - RNA, 19 nt, Homo sapiens
  misc_RNA (1)...(19): siRNA sense strand
gaaaggagcaagaagaaga

SEQ ID NO: 826634 - RNA, 19 nt, Homo sapiens
  misc_RNA (1)...(19): siRNA sense strand
aagaugagcuggauuauca

SEQ ID NO: 826635 - RNA, 19 nt, Homo sapiens
  misc_RNA (1)...(19): siRNA sense strand
cagaggagaugauggauga

SEQ ID NO: 826636 - RNA, 19 nt, Homo sapiens
  misc_RNA (1)...(19): siRNA sense strand
ggaggaagaaagagaaaua

SEQ ID NO: 826637 - RNA, 19 nt, Homo sapiens
  misc_RNA (1)...(19): siRNA sense strand
gaagaucuccguugucuca

SEQ ID NO: 826638 - RNA, 19 nt, Homo sapiens
  misc_RNA (1)...(19): siRNA sense strand
gaaagaaggccucacuugu

SEQ ID NO: 826639 - RNA, 19 nt, Homo sapiens
  misc_RNA (1)...(19): siRNA sense strand
ccaaaggaaucacugaaga

SEQ ID NO: 826640 - RNA, 19 nt, Homo sapiens
  misc_RNA (1)...(19): siRNA sense strand
gcaggaggcuguuguggau

SEQ ID NO: 826641 - RNA, 19 nt, Homo sapiens
  misc_RNA (1)...(19): siRNA sense strand
gagagaggagggagauuua

SEQ ID NO: 826642 - RNA, 19 nt, Homo sapiens
  misc_RNA (1)...(19): siRNA sense strand
aaagaaggccucacuugua

SEQ ID NO: 826643 - RNA, 19 nt, Homo sapiens
  misc_RNA (1)...(19): siRNA sense strand
gacagucacucagguagua

SEQ ID NO: 826644 - RNA, 19 nt, Homo sapiens
  misc_RNA (1)...(19): siRNA sense strand
cagagcagaucgaaauuug

SEQ ID NO: 826645 - RNA, 19 nt, Homo sapiens
  misc_RNA (1)...(19): siRNA sense strand
gaaaggagaaagacgauca

SEQ ID NO: 826646 - RNA, 19 nt, Homo sapiens
  misc_RNA (1)...(19): siRNA sense strand
ccaaaucauucaagaggaa

SEQ ID NO: 826647 - RNA, 19 nt, Homo sapiens
  misc_RNA (1)...(19): siRNA sense strand
gaaccucccaugccuauug

SEQ ID NO: 826648 - RNA, 19 nt, Homo sapiens
  misc_RNA (1)...(19): siRNA sense strand
gaaagaguuuaaggaagaa

SEQ ID NO: 826649 - RNA, 19 nt, Homo sapiens
  misc_RNA (1)...(19): siRNA sense strand
ggaggaagaggaucaagaa

SEQ ID NO: 826650 - RNA, 19 nt, Homo sapiens
  misc_RNA (1)...(19): siRNA sense strand
gaagggcguuggcggaaau

SEQ ID NO: 826651 - RNA, 19 nt, Homo sapiens
  misc_RNA (1)...(19): siRNA sense strand
ucgagaagcugcagaacuu

SEQ ID NO: 826652 - RNA, 19 nt, Homo sapiens
  misc_RNA (1)...(19): siRNA sense strand
cagcagaaguccggaguuu

SEQ ID NO: 826653 - RNA, 19 nt, Homo sapiens
  misc_RNA (1)...(19): siRNA sense strand
ggaauuagcacuggccaaa

SEQ ID NO: 826654 - RNA, 19 nt, Homo sapiens
  misc_RNA (1)...(19): siRNA sense strand
caagaaacaccuuccagaa

SEQ ID NO: 826655 - RNA, 19 nt, Homo sapiens
  misc_RNA (1)...(19): siRNA sense strand
gcaagaagaagaagagcaa

SEQ ID NO: 826656 - RNA, 19 nt, Homo sapiens
  misc_RNA (1)...(19): siRNA sense strand
gguccguccuuucacuuua

SEQ ID NO: 826657 - RNA, 19 nt, Homo sapiens
  misc_RNA (1)...(19): siRNA sense strand
gagcagaucgaaauuugaa

SEQ ID NO: 826658 - RNA, 19 nt, Homo sapiens
  misc_RNA (1)...(19): siRNA sense strand
ggucagagcagaucgaaau

SEQ ID NO: 826659 - RNA, 19 nt, Homo sapiens
  misc_RNA (1)...(19): siRNA sense strand
caaaggggcucuaaugcua

SEQ ID NO: 826660 - RNA, 19 nt, Homo sapiens
  misc_RNA (1)...(19): siRNA sense strand
uaucaccacugaaucacua

SEQ ID NO: 826661 - RNA, 19 nt, Homo sapiens
  misc_RNA (1)...(19): siRNA sense strand
ucaguuaucuccuccuaau

SEQ ID NO: 826662 - RNA, 19 nt, Homo sapiens
  misc_RNA (1)...(19): siRNA sense strand
ggaaagggaccgagaacga

SEQ ID NO: 826663 - RNA, 19 nt, Homo sapiens
  misc_RNA (1)...(19): siRNA sense strand
ccauagcgaagaagaaaua

SEQ ID NO: 826664 - RNA, 19 nt, Homo sapiens
  misc_RNA (1)...(19): siRNA sense strand
gaguuuccauuaccauuga

SEQ ID NO: 826665 - RNA, 19 nt, Homo sapiens
  misc_RNA (1)...(19): siRNA sense strand
ggagggcaguguugaagau

SEQ ID NO: 826666 - RNA, 19 nt, Homo sapiens
  misc_RNA (1)...(19): siRNA sense strand
gaaacagccaucuuuggaa

SEQ ID NO: 826667 - RNA, 19 nt, Homo sapiens
  misc_RNA (1)...(19): siRNA sense strand
gcacagccaccacacagaa

SEQ ID NO: 826668 - RNA, 19 nt, Homo sapiens
  misc_RNA (1)...(19): siRNA sense strand
gaccgucccucugaaacua

SEQ ID NO: 826669 - RNA, 19 nt, Homo sapiens
  misc_RNA (1)...(19): siRNA sense strand
ccgaguaccucacgcaaga

SEQ ID NO: 826670 - RNA, 19 nt, Homo sapiens
  misc_RNA (1)...(19): siRNA sense strand
ccagggagcuauuaguauc

SEQ ID NO: 826671 - RNA, 19 nt, Homo sapiens
  misc_RNA (1)...(19): siRNA sense strand
aaacagaggaggaagaaga

SEQ ID NO: 826672 - RNA, 19 nt, Homo sapiens
  misc_RNA (1)...(19): siRNA sense strand
gcaccaauccugaaagagu

SEQ ID NO: 826673 - RNA, 19 nt, Homo sapiens
  misc_RNA (1)...(19): siRNA sense strand
aaagaagagugagaagaaa

SEQ ID NO: 826674 - RNA, 19 nt, Homo sapiens
  misc_RNA (1)...(19): siRNA sense strand
ggaagaagaggaagaagag

SEQ ID NO: 826675 - RNA, 19 nt, Homo sapiens
  misc_RNA (1)...(19): siRNA sense strand
ggacacaagugaaaacaga

SEQ ID NO: 826676 - RNA, 19 nt, Homo sapiens
  misc_RNA (1)...(19): siRNA sense strand
gaaacagucagcugauuca

SEQ ID NO: 826677 - RNA, 19 nt, Homo sapiens
  misc_RNA (1)...(19): siRNA sense strand
aggaaucacugaagaaugu

SEQ ID NO: 826678 - RNA, 19 nt, Homo sapiens
  misc_RNA (1)...(19): siRNA sense strand
cagcuauacugaaaccaaa

SEQ ID NO: 826679 - RNA, 19 nt, Homo sapiens
  misc_RNA (1)...(19): siRNA sense strand
gcaaggaacgugcgaaguc

SEQ ID NO: 826680 - RNA, 19 nt, Homo sapiens
  misc_RNA (1)...(19): siRNA sense strand
cgaaagaaggccucacuug

SEQ ID NO: 826681 - RNA, 19 nt, Homo sapiens
  misc_RNA (1)...(19): siRNA sense strand
ugaaugggaucgggacaaa

SEQ ID NO: 826682 - RNA, 19 nt, Homo sapiens
  misc_RNA (1)...(19): siRNA sense strand
gggcaagauuagcaacauu

SEQ ID NO: 826683 - RNA, 19 nt, Homo sapiens
  misc_RNA (1)...(19): siRNA sense strand
gaauucaucacacuguuga

SEQ ID NO: 826684 - RNA, 19 nt, Homo sapiens
  misc_RNA (1)...(19): siRNA sense strand
aaagaagugugaagcugaa

SEQ ID NO: 826685 - RNA, 19 nt, Homo sapiens
  misc_RNA (1)...(19): siRNA sense strand
caagaugggcuccagauca

SEQ ID NO: 826686 - RNA, 19 nt, Homo sapiens
  misc_RNA (1)...(19): siRNA sense strand
gcgaaaggagcaagaagaa

SEQ ID NO: 826687 - RNA, 19 nt, Homo sapiens
  misc_RNA (1)...(19): siRNA sense strand
gcagagggaagaagaggaa

SEQ ID NO: 826688 - RNA, 19 nt, Homo sapiens
  misc_RNA (1)...(19): siRNA sense strand
gacagcagcaccagcuaua

SEQ ID NO: 826689 - RNA, 19 nt, Homo sapiens
  misc_RNA (1)...(19): siRNA sense strand
gaaaggugacucugaugau

SEQ ID NO: 826690 - RNA, 19 nt, Homo sapiens
  misc_RNA (1)...(19): siRNA sense strand
cugccaagcugcuggauga

SEQ ID NO: 826691 - RNA, 19 nt, Homo sapiens
  misc_RNA (1)...(19): siRNA sense strand
aagaaaccuuccaucagua

SEQ ID NO: 826692 - RNA, 19 nt, Homo sapiens
  misc_RNA (1)...(19): siRNA sense strand
caaaggaaucacugaagaa

SEQ ID NO: 826693 - RNA, 19 nt, Homo sapiens
  misc_RNA (1)...(19): siRNA sense strand
aagaaggccucacuuguag

SEQ ID NO: 826694 - RNA, 19 nt, Homo sapiens
  misc_RNA (1)...(19): siRNA sense strand
ugacucugaugaugagaaa

SEQ ID NO: 826695 - RNA, 19 nt, Homo sapiens
  misc_RNA (1)...(19): siRNA sense strand
ccagaacaguuucauaaaa

SEQ ID NO: 826696 - RNA, 19 nt, Homo sapiens
  misc_RNA (1)...(19): siRNA sense strand
uuaacucgacguuccauua

SEQ ID NO: 826697 - RNA, 19 nt, Homo sapiens
  misc_RNA (1)...(19): siRNA sense strand
gacuuuaggagauaccuua

SEQ ID NO: 826698 - RNA, 19 nt, Homo sapiens
  misc_RNA (1)...(19): siRNA sense strand
aaacagaccugaaaaugau

SEQ ID NO: 826699 - RNA, 19 nt, Homo sapiens
  misc_RNA (1)...(19): siRNA sense strand
gccagaaucagaaagaauu

SEQ ID NO: 826700 - RNA, 19 nt, Homo sapiens
  misc_RNA (1)...(19): siRNA sense strand
aaagcacacuggcugacua

SEQ ID NO: 826701 - RNA, 19 nt, Homo sapiens
  misc_RNA (1)...(19): siRNA sense strand
gaggaagaaagagaaauaa

SEQ ID NO: 826702 - RNA, 19 nt, Homo sapiens
  misc_RNA (1)...(19): siRNA sense strand
agaaacaccuuccagaaac

SEQ ID NO: 826703 - RNA, 19 nt, Homo sapiens
  misc_RNA (1)...(19): siRNA sense strand
gcagacauucgcccagaaa

SEQ ID NO: 826704 - RNA, 19 nt, Homo sapiens
  misc_RNA (1)...(19): siRNA sense strand
ggaaacauccgaggacauc

SEQ ID NO: 826705 - RNA, 19 nt, Homo sapiens
  misc_RNA (1)...(19): siRNA sense strand
gaacagaaggaaggcagaa

SEQ ID NO: 826706 - RNA, 19 nt, Homo sapiens
  misc_RNA (1)...(19): siRNA sense strand
cuauuaguaucucagcaua

SEQ ID NO: 826707 - RNA, 19 nt, Homo sapiens
  misc_RNA (1)...(19): siRNA sense strand
agaaauagagcccauggaa

SEQ ID NO: 826708 - RNA, 19 nt, Homo sapiens
  misc_RNA (1)...(19): siRNA sense strand
gcuccucaauuucugaaga

SEQ ID NO: 826709 - RNA, 19 nt, Homo sapiens
  misc_RNA (1)...(19): siRNA sense strand
aagaaacaccuuccagaaa

SEQ ID NO: 826710 - RNA, 19 nt, Homo sapiens
  misc_RNA (1)...(19): siRNA sense strand
ggacagggagagagagaga

SEQ ID NO: 826711 - RNA, 19 nt, Homo sapiens
  misc_RNA (1)...(19): siRNA sense strand
gccaagagcgggcagaaga

SEQ ID NO: 826712 - RNA, 19 nt, Homo sapiens
  misc_RNA (1)...(19): siRNA sense strand
gcaugugacccagagguua

SEQ ID NO: 826713 - RNA, 19 nt, Homo sapiens
  misc_RNA (1)...(19): siRNA sense strand
aagaugggcuccagaucaa

SEQ ID NO: 826714 - RNA, 19 nt, Homo sapiens
  misc_RNA (1)...(19): siRNA sense strand
gcaggagaaggaaaugaaa

SEQ ID NO: 826715 - RNA, 19 nt, Homo sapiens
  misc_RNA (1)...(19): siRNA sense strand
caccaauccugaaagaguu

SEQ ID NO: 826716 - RNA, 19 nt, Homo sapiens
  misc_RNA (1)...(19): siRNA sense strand
gaugagaaaccaaggaaag

SEQ ID NO: 826717 - RNA, 19 nt, Homo sapiens
  misc_RNA (1)...(19): siRNA sense strand
gaaaacagaccugaaaaug

SEQ ID NO: 826718 - RNA, 19 nt, Homo sapiens
  misc_RNA (1)...(19): siRNA sense strand
ugaaacagccaucuuugga

SEQ ID NO: 826719 - RNA, 19 nt, Homo sapiens
  misc_RNA (1)...(19): siRNA sense strand
ccagauuggugaggaaaug

SEQ ID NO: 826720 - RNA, 19 nt, Homo sapiens
  misc_RNA (1)...(19): siRNA sense strand
gacugaagaucgaaagaag

SEQ ID NO: 826721 - RNA, 19 nt, Homo sapiens
  misc_RNA (1)...(19): siRNA sense strand
agaggaagaucuccguugu

SEQ ID NO: 826722 - RNA, 19 nt, Homo sapiens
  misc_RNA (1)...(19): siRNA sense strand
ccaguccaaucccaaauuc

SEQ ID NO: 826723 - RNA, 19 nt, Homo sapiens
  misc_RNA (1)...(19): siRNA sense strand
ggaguuuccauuaccauug

SEQ ID NO: 826724 - RNA, 19 nt, Homo sapiens
  misc_RNA (1)...(19): siRNA sense strand
gggaagaagaggaagaaga

SEQ ID NO: 826725 - RNA, 19 nt, Homo sapiens
  misc_RNA (1)...(19): siRNA sense strand
caaagaaacugaauacaga

SEQ ID NO: 826726 - RNA, 19 nt, Homo sapiens
  misc_RNA (1)...(19): siRNA sense strand
gcaauggucuggucacuuu

SEQ ID NO: 826727 - RNA, 19 nt, Homo sapiens
  misc_RNA (1)...(19): siRNA sense strand
gcaaagacguggauuagau

SEQ ID NO: 826728 - RNA, 19 nt, Homo sapiens
  misc_RNA (1)...(19): siRNA sense strand
ggacuugaauucagaggua

SEQ ID NO: 826729 - RNA, 19 nt, Homo sapiens
  misc_RNA (1)...(19): siRNA sense strand
caucauauguccaguaauu

SEQ ID NO: 826730 - RNA, 19 nt, Homo sapiens
  misc_RNA (1)...(19): siRNA sense strand
ggaaggaagugaagaacaa

SEQ ID NO: 826731 - RNA, 19 nt, Homo sapiens
  misc_RNA (1)...(19): siRNA sense strand
uaaaggagauuuccguauu

SEQ ID NO: 826732 - RNA, 19 nt, Homo sapiens
  misc_RNA (1)...(19): siRNA sense strand
gcaagaagagcauccaaua

SEQ ID NO: 826733 - RNA, 19 nt, Homo sapiens
  misc_RNA (1)...(19): siRNA sense strand
ugacacagauucucaugua

SEQ ID NO: 826734 - RNA, 19 nt, Homo sapiens
  misc_RNA (1)...(19): siRNA sense strand
gaacggaccgggacacuaa

SEQ ID NO: 826735 - RNA, 19 nt, Homo sapiens
  misc_RNA (1)...(19): siRNA sense strand
caaacacacucauaaagaa

SEQ ID NO: 826736 - RNA, 19 nt, Homo sapiens
  misc_RNA (1)...(19): siRNA sense strand
caaggauucuucagagaua

SEQ ID NO: 826737 - RNA, 19 nt, Homo sapiens
  misc_RNA (1)...(19): siRNA sense strand
gaacagcagcaacuauuaa

SEQ ID NO: 826738 - RNA, 19 nt, Homo sapiens
  misc_RNA (1)...(19): siRNA sense strand
caaaugaguucacggauca

SEQ ID NO: 826739 - RNA, 19 nt, Homo sapiens
  misc_RNA (1)...(19): siRNA sense strand
gagcaaagccuguggaugu

SEQ ID NO: 826740 - RNA, 19 nt, Homo sapiens
  misc_RNA (1)...(19): siRNA sense strand
uuauuuggcucuuggauua

SEQ ID NO: 826741 - RNA, 19 nt, Homo sapiens
  misc_RNA (1)...(19): siRNA sense strand
uaacagugguggcaauauu

SEQ ID NO: 826742 - RNA, 19 nt, Homo sapiens
  misc_RNA (1)...(19): siRNA sense strand
gaucuuugcugacauggaa

SEQ ID NO: 826743 - RNA, 19 nt, Homo sapiens
  misc_RNA (1)...(19): siRNA sense strand
agaggaagaugaaggauuu

SEQ ID NO: 826744 - RNA, 19 nt, Homo sapiens
  misc_RNA (1)...(19): siRNA sense strand
gcaaccaaguucaaauuau

SEQ ID NO: 826745 - RNA, 19 nt, Homo sapiens
  misc_RNA (1)...(19): siRNA sense strand
gcuaagacuucugaugaua

SEQ ID NO: 826746 - RNA, 19 nt, Homo sapiens
  misc_RNA (1)...(19): siRNA sense strand
ggaauaacuuucaccaauc

SEQ ID NO: 826747 - RNA, 19 nt, Homo sapiens
  misc_RNA (1)...(19): siRNA sense strand
guaaagauguugguggaaa

SEQ ID NO: 826748 - RNA, 19 nt, Homo sapiens
  misc_RNA (1)...(19): siRNA sense strand
gcaguagccuuauuguaug

SEQ ID NO: 826749 - RNA, 19 nt, Homo sapiens
  misc_RNA (1)...(19): siRNA sense strand
ggaaauaucaggaacuuca

SEQ ID NO: 826750 - RNA, 19 nt, Homo sapiens
  misc_RNA (1)...(19): siRNA sense strand
ccuaucagcuugggaaaua

SEQ ID NO: 826751 - RNA, 19 nt, Homo sapiens
  misc_RNA (1)...(19): siRNA sense strand
gcuguuggaucucuucuuu

SEQ ID NO: 826752 - RNA, 19 nt, Homo sapiens
  misc_RNA (1)...(19): siRNA sense strand
ggauugaaaugucugaguu

SEQ ID NO: 826753 - RNA, 19 nt, Homo sapiens
  misc_RNA (1)...(19): siRNA sense strand
uaacagugcugcuucuaug

SEQ ID NO: 826754 - RNA, 19 nt, Homo sapiens
  misc_RNA (1)...(19): siRNA sense strand
gaaagcuacugcaguggaa

SEQ ID NO: 826755 - RNA, 19 nt, Homo sapiens
  misc_RNA (1)...(19): siRNA sense strand
agaaauagcuggaaagacu

SEQ ID NO: 826756 - RNA, 19 nt, Homo sapiens
  misc_RNA (1)...(19): siRNA sense strand
ggaacagcagcaacuauua

SEQ ID NO: 826757 - RNA, 19 nt, Homo sapiens
  misc_RNA (1)...(19): siRNA sense strand
uaauuggugugcuguauuu

SEQ ID NO: 826758 - RNA, 19 nt, Homo sapiens
  misc_RNA (1)...(19): siRNA sense strand
gaaaguauaaagcccuuaa

SEQ ID NO: 826759 - RNA, 19 nt, Homo sapiens
  misc_RNA (1)...(19): siRNA sense strand
gaugagcuaucuuuauuag

SEQ ID NO: 826760 - RNA, 19 nt, Homo sapiens
  misc_RNA (1)...(19): siRNA sense strand
ggagagagacuauaacaca

SEQ ID NO: 826761 - RNA, 19 nt, Homo sapiens
  misc_RNA (1)...(19): siRNA sense strand
ggauuggcauuaacuuuga

SEQ ID NO: 826762 - RNA, 19 nt, Homo sapiens
  misc_RNA (1)...(19): siRNA sense strand
gaagugaagaacaagauuu

SEQ ID NO: 826763 - RNA, 19 nt, Homo sapiens
  misc_RNA (1)...(19): siRNA sense strand
gagaguuucugugugauuu

SEQ ID NO: 826764 - RNA, 19 nt, Homo sapiens
  misc_RNA (1)...(19): siRNA sense strand
gacauggaauugcuaagaa

SEQ ID NO: 826765 - RNA, 19 nt, Homo sapiens
  misc_RNA (1)...(19): siRNA sense strand
aaacucaucuugugaucaa

SEQ ID NO: 826766 - RNA, 19 nt, Homo sapiens
  misc_RNA (1)...(19): siRNA sense strand
uagcuucucuuguaccuuu

SEQ ID NO: 826767 - RNA, 19 nt, Homo sapiens
  misc_RNA (1)...(19): siRNA sense strand
gagaagaaccucguaauag

SEQ ID NO: 826768 - RNA, 19 nt, Homo sapiens
  misc_RNA (1)...(19): siRNA sense strand
gaauggaucuuugcugaca

SEQ ID NO: 826769 - RNA, 19 nt, Homo sapiens
  misc_RNA (1)...(19): siRNA sense strand
ugagcuaucuuuauuagga

SEQ ID NO: 826770 - RNA, 19 nt, Homo sapiens
  misc_RNA (1)...(19): siRNA sense strand
aaaggagauuuccguauuu

SEQ ID NO: 826771 - RNA, 19 nt, Homo sapiens
  misc_RNA (1)...(19): siRNA sense strand
gagagagacuauaacacaa

SEQ ID NO: 826772 - RNA, 19 nt, Homo sapiens
  misc_RNA (1)...(19): siRNA sense strand
caacaagcuuugggaacua

SEQ ID NO: 826773 - RNA, 19 nt, Homo sapiens
  misc_RNA (1)...(19): siRNA sense strand
ccaauccacugguguuuau

SEQ ID NO: 826774 - RNA, 19 nt, Homo sapiens
  misc_RNA (1)...(19): siRNA sense strand
ugucaauacucacugcuua

SEQ ID NO: 826775 - RNA, 19 nt, Homo sapiens
  misc_RNA (1)...(19): siRNA sense strand
cggaagcucuuucgucuug

SEQ ID NO: 826776 - RNA, 19 nt, Homo sapiens
  misc_RNA (1)...(19): siRNA sense strand
caacaggacauugaucuaa

SEQ ID NO: 826777 - RNA, 19 nt, Homo sapiens
  misc_RNA (1)...(19): siRNA sense strand
gaucuauucuucucauaca

SEQ ID NO: 826778 - RNA, 19 nt, Homo sapiens
  misc_RNA (1)...(19): siRNA sense strand
gcacagucuucacaguauu

SEQ ID NO: 826779 - RNA, 19 nt, Homo sapiens
  misc_RNA (1)...(19): siRNA sense strand
caaagugcguaaagauguu

SEQ ID NO: 826780 - RNA, 19 nt, Homo sapiens
  misc_RNA (1)...(19): siRNA sense strand
ugagaagaaccucguaaua

SEQ ID NO: 826781 - RNA, 19 nt, Homo sapiens
  misc_RNA (1)...(19): siRNA sense strand
gauguggacccgaccuuua

SEQ ID NO: 826782 - RNA, 19 nt, Homo sapiens
  misc_RNA (1)...(19): siRNA sense strand
uggaauaacuuucaccaau

SEQ ID NO: 826783 - RNA, 19 nt, Homo sapiens
  misc_RNA (1)...(19): siRNA sense strand
ccaaacacacucauaaaga

SEQ ID NO: 826784 - RNA, 19 nt, Homo sapiens
  misc_RNA (1)...(19): siRNA sense strand
ugucggcgcucuucuacua

SEQ ID NO: 826785 - RNA, 19 nt, Homo sapiens
  misc_RNA (1)...(19): siRNA sense strand
caaucugaauuccaucuuu

SEQ ID NO: 826786 - RNA, 19 nt, Homo sapiens
  misc_RNA (1)...(19): siRNA sense strand
uugcagcacuuuacaguuu

SEQ ID NO: 826787 - RNA, 19 nt, Homo sapiens
  misc_RNA (1)...(19): siRNA sense strand
gaccauugauacagauuug

SEQ ID NO: 826788 - RNA, 19 nt, Homo sapiens
  misc_RNA (1)...(19): siRNA sense strand
gaaugacucaaacagguua

SEQ ID NO: 826789 - RNA, 19 nt, Homo sapiens
  misc_RNA (1)...(19): siRNA sense strand
gauuagauccaguuaguga

SEQ ID NO: 826790 - RNA, 19 nt, Homo sapiens
  misc_RNA (1)...(19): siRNA sense strand
gcagauacagugcucuaaa

SEQ ID NO: 826791 - RNA, 19 nt, Homo sapiens
  misc_RNA (1)...(19): siRNA sense strand
gaugauaucaguuuaaguc

SEQ ID NO: 826792 - RNA, 19 nt, Homo sapiens
  misc_RNA (1)...(19): siRNA sense strand
gacccgaccuuuaauccaa

SEQ ID NO: 826793 - RNA, 19 nt, Homo sapiens
  misc_RNA (1)...(19): siRNA sense strand
ccucacaugcuuucauuua

SEQ ID NO: 826794 - RNA, 19 nt, Homo sapiens
  misc_RNA (1)...(19): siRNA sense strand
cagauuggcuucccagcuu

SEQ ID NO: 826795 - RNA, 19 nt, Homo sapiens
  misc_RNA (1)...(19): siRNA sense strand
ggucauaaucguaucauug

SEQ ID NO: 826796 - RNA, 19 nt, Homo sapiens
  misc_RNA (1)...(19): siRNA sense strand
gaucagagugacuugagua

SEQ ID NO: 826797 - RNA, 19 nt, Homo sapiens
  misc_RNA (1)...(19): siRNA sense strand
caaagaauccuugguggaa

SEQ ID NO: 826798 - RNA, 19 nt, Homo sapiens
  misc_RNA (1)...(19): siRNA sense strand
ccaagggacuucagugaca

SEQ ID NO: 826799 - RNA, 19 nt, Homo sapiens
  misc_RNA (1)...(19): siRNA sense strand
gccacacagugcuauauuu

SEQ ID NO: 826800 - RNA, 19 nt, Homo sapiens
  misc_RNA (1)...(19): siRNA sense strand
gagcuacaguggccugaug

SEQ ID NO: 826801 - RNA, 19 nt, Homo sapiens
  misc_RNA (1)...(19): siRNA sense strand
gagcagcagugcagagaca

SEQ ID NO: 826802 - RNA, 19 nt, Homo sapiens
  misc_RNA (1)...(19): siRNA sense strand
gguaguaugcauuguaauu

SEQ ID NO: 826803 - RNA, 19 nt, Homo sapiens
  misc_RNA (1)...(19): siRNA sense strand
gacgaagacucuagugauc

SEQ ID NO: 826804 - RNA, 19 nt, Homo sapiens
  misc_RNA (1)...(19): siRNA sense strand
agccagggauuuaguuaua

SEQ ID NO: 826805 - RNA, 19 nt, Homo sapiens
  misc_RNA (1)...(19): siRNA sense strand
ugagaaacaugauaaacuc

SEQ ID NO: 826806 - RNA, 19 nt, Homo sapiens
  misc_RNA (1)...(19): siRNA sense strand
ccaguaauuuagagucauu

SEQ ID NO: 826807 - RNA, 19 nt, Homo sapiens
  misc_RNA (1)...(19): siRNA sense strand
gaccuuuaauccaaacauu

SEQ ID NO: 826808 - RNA, 19 nt, Homo sapiens
  misc_RNA (1)...(19): siRNA sense strand
ggccauuacugaaggugua

SEQ ID NO: 826809 - RNA, 19 nt, Homo sapiens
  misc_RNA (1)...(19): siRNA sense strand
uaaaggagauacagacacu

SEQ ID NO: 826810 - RNA, 19 nt, Homo sapiens
  misc_RNA (1)...(19): siRNA sense strand
uggauugcaugcccuauuu

SEQ ID NO: 826811 - RNA, 19 nt, Homo sapiens
  misc_RNA (1)...(19): siRNA sense strand
aaagauucaucccuaguga

SEQ ID NO: 826812 - RNA, 19 nt, Homo sapiens
  misc_RNA (1)...(19): siRNA sense strand
gcuaaagacacuagaguau

SEQ ID NO: 826813 - RNA, 19 nt, Homo sapiens
  misc_RNA (1)...(19): siRNA sense strand
gcaguuuauuguccuguga

SEQ ID NO: 826814 - RNA, 19 nt, Homo sapiens
  misc_RNA (1)...(19): siRNA sense strand
cgugaacgcagcacauuua

SEQ ID NO: 826815 - RNA, 19 nt, Homo sapiens
  misc_RNA (1)...(19): siRNA sense strand
aggacgggcuucccaguua

SEQ ID NO: 826816 - RNA, 19 nt, Homo sapiens
  misc_RNA (1)...(19): siRNA sense strand
gaccaaacacacucauaaa

SEQ ID NO: 826817 - RNA, 19 nt, Homo sapiens
  misc_RNA (1)...(19): siRNA sense strand
gaugaaggaauccgguuaa

SEQ ID NO: 826818 - RNA, 19 nt, Homo sapiens
  misc_RNA (1)...(19): siRNA sense strand
gauaucgcuucgaaacuug

SEQ ID NO: 826819 - RNA, 19 nt, Homo sapiens
  misc_RNA (1)...(19): siRNA sense strand
caaagcaagcccugagaaa

SEQ ID NO: 826820 - RNA, 19 nt, Homo sapiens
  misc_RNA (1)...(19): siRNA sense strand
gaauguguccgaggucuuu

SEQ ID NO: 826821 - RNA, 19 nt, Homo sapiens
  misc_RNA (1)...(19): siRNA sense strand
gaugauggcaccaaugaau

SEQ ID NO: 826822 - RNA, 19 nt, Homo sapiens
  misc_RNA (1)...(19): siRNA sense strand
gaaaugcagccacuaugau

SEQ ID NO: 826823 - RNA, 19 nt, Homo sapiens
  misc_RNA (1)...(19): siRNA sense strand
gagcauccaauaucuguga

SEQ ID NO: 826824 - RNA, 19 nt, Homo sapiens
  misc_RNA (1)...(19): siRNA sense strand
aauggcaccugaaaguaua

SEQ ID NO: 826825 - RNA, 19 nt, Homo sapiens
  misc_RNA (1)...(19): siRNA sense strand
gaacaaccaugcccaaaga

SEQ ID NO: 826826 - RNA, 19 nt, Homo sapiens
  misc_RNA (1)...(19): siRNA sense strand
ggagaaagcucuagcaaaa

SEQ ID NO: 826827 - RNA, 19 nt, Homo sapiens
  misc_RNA (1)...(19): siRNA sense strand
gagauugcaucaacaguuu

SEQ ID NO: 826828 - RNA, 19 nt, Homo sapiens
  misc_RNA (1)...(19): siRNA sense strand
gaagaggagaggaacauua

SEQ ID NO: 826829 - RNA, 19 nt, Homo sapiens
  misc_RNA (1)...(19): siRNA sense strand
cgggagacaucaccuauua

SEQ ID NO: 826830 - RNA, 19 nt, Homo sapiens
  misc_RNA (1)...(19): siRNA sense strand
gaagugaaccuccuagaga

SEQ ID NO: 826831 - RNA, 19 nt, Homo sapiens
  misc_RNA (1)...(19): siRNA sense strand
gaaaggugauuuggauuau

SEQ ID NO: 826832 - RNA, 19 nt, Homo sapiens
  misc_RNA (1)...(19): siRNA sense strand
gcagaaugccuacauacua

SEQ ID NO: 826833 - RNA, 19 nt, Homo sapiens
  misc_RNA (1)...(19): siRNA sense strand
gauggaacccugagugaua

SEQ ID NO: 826834 - RNA, 19 nt, Homo sapiens
  misc_RNA (1)...(19): siRNA sense strand
gguauaaacuucagacaca

SEQ ID NO: 826835 - RNA, 19 nt, Homo sapiens
  misc_RNA (1)...(19): siRNA sense strand
gagagauccucauagaauu

SEQ ID NO: 826836 - RNA, 19 nt, Homo sapiens
  misc_RNA (1)...(19): siRNA sense strand
ggagagauccucauagaau

SEQ ID NO: 826837 - RNA, 19 nt, Homo sapiens
  misc_RNA (1)...(19): siRNA sense strand
ggucaucucugcuccuauu

SEQ ID NO: 826838 - RNA, 19 nt, Homo sapiens
  misc_RNA (1)...(19): siRNA sense strand
cgagaaaggugauuuggau

SEQ ID NO: 826839 - RNA, 19 nt, Homo sapiens
  misc_RNA (1)...(19): siRNA sense strand
gaaauucauccaacaagaa

SEQ ID NO: 826840 - RNA, 19 nt, Homo sapiens
  misc_RNA (1)...(19): siRNA sense strand
gggaugaaguucuagaaug

SEQ ID NO: 826841 - RNA, 19 nt, Homo sapiens
  misc_RNA (1)...(19): siRNA sense strand
gaaagccgcguucacguuu

SEQ ID NO: 826842 - RNA, 19 nt, Homo sapiens
  misc_RNA (1)...(19): siRNA sense strand
gaaccaaaauggaaucaaa

SEQ ID NO: 826843 - RNA, 19 nt, Homo sapiens
  misc_RNA (1)...(19): siRNA sense strand
ccagagauguggauaguca

SEQ ID NO: 826844 - RNA, 19 nt, Homo sapiens
  misc_RNA (1)...(19): siRNA sense strand
gaacgggagcgcaaagaaa

SEQ ID NO: 826845 - RNA, 19 nt, Homo sapiens
  misc_RNA (1)...(19): siRNA sense strand
gagaacgaauguuagaaau

SEQ ID NO: 826846 - RNA, 19 nt, Homo sapiens
  misc_RNA (1)...(19): siRNA sense strand
gacaccagcugauuguaaa

SEQ ID NO: 826847 - RNA, 19 nt, Homo sapiens
  misc_RNA (1)...(19): siRNA sense strand
ggacaccagcugauuguaa

SEQ ID NO: 826848 - RNA, 19 nt, Homo sapiens
  misc_RNA (1)...(19): siRNA sense strand
ggaugaaguucuagaaugg

SEQ ID NO: 826849 - RNA, 19 nt, Homo sapiens
  misc_RNA (1)...(19): siRNA sense strand
gaucauagaaccagagaug

SEQ ID NO: 826850 - RNA, 19 nt, Homo sapiens
  misc_RNA (1)...(19): siRNA sense strand
gcaagaagaagaaagugaa

SEQ ID NO: 826851 - RNA, 19 nt, Homo sapiens
  misc_RNA (1)...(19): siRNA sense strand
gugaaguugugguaugaua

SEQ ID NO: 826852 - RNA, 19 nt, Homo sapiens
  misc_RNA (1)...(19): siRNA sense strand
gaaguccaguugaucauag

SEQ ID NO: 826853 - RNA, 19 nt, Homo sapiens
  misc_RNA (1)...(19): siRNA sense strand
caauuuaugucgaaagcaa

SEQ ID NO: 826854 - RNA, 19 nt, Homo sapiens
  misc_RNA (1)...(19): siRNA sense strand
gaaguugugguaugauaaa

SEQ ID NO: 826855 - RNA, 19 nt, Homo sapiens
  misc_RNA (1)...(19): siRNA sense strand
guucuagaauggaauggua

SEQ ID NO: 826856 - RNA, 19 nt, Homo sapiens
  misc_RNA (1)...(19): siRNA sense strand
gaaaagaggaggauuauca

SEQ ID NO: 826857 - RNA, 19 nt, Homo sapiens
  misc_RNA (1)...(19): siRNA sense strand
agaaaggugauuuggauua

SEQ ID NO: 826858 - RNA, 19 nt, Homo sapiens
  misc_RNA (1)...(19): siRNA sense strand
ggcuauaggucuagugcua

SEQ ID NO: 826859 - RNA, 19 nt, Homo sapiens
  misc_RNA (1)...(19): siRNA sense strand
gauuguaaauguucugcaa

SEQ ID NO: 826860 - RNA, 19 nt, Homo sapiens
  misc_RNA (1)...(19): siRNA sense strand
uaacguggcaaccaucuaa

SEQ ID NO: 826861 - RNA, 19 nt, Homo sapiens
  misc_RNA (1)...(19): siRNA sense strand
ccaguaggcuauaggucua

SEQ ID NO: 826862 - RNA, 19 nt, Homo sapiens
  misc_RNA (1)...(19): siRNA sense strand
cagaggaguuuagaugaaa

SEQ ID NO: 826863 - RNA, 19 nt, Homo sapiens
  misc_RNA (1)...(19): siRNA sense strand
gcaagaagcggcagauguc

SEQ ID NO: 826864 - RNA, 19 nt, Homo sapiens
  misc_RNA (1)...(19): siRNA sense strand
ggaaagccgcguucacguu

SEQ ID NO: 826865 - RNA, 19 nt, Homo sapiens
  misc_RNA (1)...(19): siRNA sense strand
acaaagaucucagcgaauc

SEQ ID NO: 826866 - RNA, 19 nt, Homo sapiens
  misc_RNA (1)...(19): siRNA sense strand
caaagacucaggugcauug

SEQ ID NO: 826867 - RNA, 19 nt, Homo sapiens
  misc_RNA (1)...(19): siRNA sense strand
gaagccugcugccugcaaa

SEQ ID NO: 826868 - RNA, 19 nt, Homo sapiens
  misc_RNA (1)...(19): siRNA sense strand
aaagggcgaucacaggauu

SEQ ID NO: 826869 - RNA, 19 nt, Homo sapiens
  misc_RNA (1)...(19): siRNA sense strand
gaucucagcgaaucaguga

SEQ ID NO: 826870 - RNA, 19 nt, Homo sapiens
  misc_RNA (1)...(19): siRNA sense strand
gaaccgcauugguauaaac

SEQ ID NO: 826871 - RNA, 19 nt, Homo sapiens
  misc_RNA (1)...(19): siRNA sense strand
agacagcgcuuuuagauga

SEQ ID NO: 826872 - RNA, 19 nt, Homo sapiens
  misc_RNA (1)...(19): siRNA sense strand
caaguuccuuugaaucuca

SEQ ID NO: 826873 - RNA, 19 nt, Homo sapiens
  misc_RNA (1)...(19): siRNA sense strand
gccgggagcuacaaaugaa

SEQ ID NO: 826874 - RNA, 19 nt, Homo sapiens
  misc_RNA (1)...(19): siRNA sense strand
gaagaagccaugcucaagu

SEQ ID NO: 826875 - RNA, 19 nt, Homo sapiens
  misc_RNA (1)...(19): siRNA sense strand
aaagaaagcacgacuccaa

SEQ ID NO: 826876 - RNA, 19 nt, Homo sapiens
  misc_RNA (1)...(19): siRNA sense strand
gaggagaggaacauuauca

SEQ ID NO: 826877 - RNA, 19 nt, Homo sapiens
  misc_RNA (1)...(19): siRNA sense strand
gaaaguuguuggaggaaaa

SEQ ID NO: 826878 - RNA, 19 nt, Homo sapiens
  misc_RNA (1)...(19): siRNA sense strand
agacaucaccuauuaguuc

SEQ ID NO: 826879 - RNA, 19 nt, Homo sapiens
  misc_RNA (1)...(19): siRNA sense strand
acagaggaguuuagaugaa

SEQ ID NO: 826880 - RNA, 19 nt, Homo sapiens
  misc_RNA (1)...(19): siRNA sense strand
uggcguaguuccuccagua

SEQ ID NO: 826881 - RNA, 19 nt, Homo sapiens
  misc_RNA (1)...(19): siRNA sense strand
gcagacaagucaggaugga

SEQ ID NO: 826882 - RNA, 19 nt, Homo sapiens
  misc_RNA (1)...(19): siRNA sense strand
cagaaugccuacauacuac

SEQ ID NO: 826883 - RNA, 19 nt, Homo sapiens
  misc_RNA (1)...(19): siRNA sense strand
gaacagcaaagaacaacuc

SEQ ID NO: 826884 - RNA, 19 nt, Homo sapiens
  misc_RNA (1)...(19): siRNA sense strand
guagauggacguccucgaa

SEQ ID NO: 826885 - RNA, 19 nt, Homo sapiens
  misc_RNA (1)...(19): siRNA sense strand
caagagaggcggcaagaag

SEQ ID NO: 826886 - RNA, 19 nt, Homo sapiens
  misc_RNA (1)...(19): siRNA sense strand
ccaagcagcuaacgaacca

SEQ ID NO: 826887 - RNA, 19 nt, Homo sapiens
  misc_RNA (1)...(19): siRNA sense strand
gccgaaggcuugagaaagg

SEQ ID NO: 826888 - RNA, 19 nt, Homo sapiens
  misc_RNA (1)...(19): siRNA sense strand
ggaaacgcgugccaaagac

SEQ ID NO: 826889 - RNA, 19 nt, Homo sapiens
  misc_RNA (1)...(19): siRNA sense strand
ggagacaucaccuauuagu

SEQ ID NO: 826890 - RNA, 19 nt, Homo sapiens
  misc_RNA (1)...(19): siRNA sense strand
ggagaggaacauuaucaug

SEQ ID NO: 826891 - RNA, 19 nt, Homo sapiens
  misc_RNA (1)...(19): siRNA sense strand
gaugaaccgcauugguaua

SEQ ID NO: 826892 - RNA, 19 nt, Homo sapiens
  misc_RNA (1)...(19): siRNA sense strand
aaacaacgaggacaaagug

SEQ ID NO: 826893 - RNA, 19 nt, Homo sapiens
  misc_RNA (1)...(19): siRNA sense strand
uaucagaacaagacaguga

SEQ ID NO: 826894 - RNA, 19 nt, Homo sapiens
  misc_RNA (1)...(19): siRNA sense strand
caugaugccucccgaaguc

SEQ ID NO: 826895 - RNA, 19 nt, Homo sapiens
  misc_RNA (1)...(19): siRNA sense strand
gcaaaggagcccugaagag

SEQ ID NO: 826896 - RNA, 19 nt, Homo sapiens
  misc_RNA (1)...(19): siRNA sense strand
caacgaggacaaagugguu

SEQ ID NO: 826897 - RNA, 19 nt, Homo sapiens
  misc_RNA (1)...(19): siRNA sense strand
guaugcaauuuaugucgaa

SEQ ID NO: 826898 - RNA, 19 nt, Homo sapiens
  misc_RNA (1)...(19): siRNA sense strand
uuacagaggaguuuagaug

SEQ ID NO: 826899 - RNA, 19 nt, Homo sapiens
  misc_RNA (1)...(19): siRNA sense strand
ugagguugaugaugguauu

SEQ ID NO: 826900 - RNA, 19 nt, Homo sapiens
  misc_RNA (1)...(19): siRNA sense strand
cagggcaacuuucugugaa

SEQ ID NO: 826901 - RNA, 19 nt, Homo sapiens
  misc_RNA (1)...(19): siRNA sense strand
cgauuaauuggacguguua

SEQ ID NO: 826902 - RNA, 19 nt, Homo sapiens
  misc_RNA (1)...(19): siRNA sense strand
acagugagcuucuuaugcu

SEQ ID NO: 826903 - RNA, 19 nt, Homo sapiens
  misc_RNA (1)...(19): siRNA sense strand
cagauuaugagguugauga

SEQ ID NO: 826904 - RNA, 19 nt, Homo sapiens
  misc_RNA (1)...(19): siRNA sense strand
uuggagagauccucauaga

SEQ ID NO: 826905 - RNA, 19 nt, Homo sapiens
  misc_RNA (1)...(19): siRNA sense strand
ggccuuccauuucuguuau

SEQ ID NO: 826906 - RNA, 19 nt, Homo sapiens
  misc_RNA (1)...(19): siRNA sense strand
ugaaagcuauaaggaacaa

SEQ ID NO: 826907 - RNA, 19 nt, Homo sapiens
  misc_RNA (1)...(19): siRNA sense strand
agauguaguuggacaccua

SEQ ID NO: 826908 - RNA, 19 nt, Homo sapiens
  misc_RNA (1)...(19): siRNA sense strand
aaagaaggguagccuagca

SEQ ID NO: 826909 - RNA, 19 nt, Homo sapiens
  misc_RNA (1)...(19): siRNA sense strand
ucaccgagauugcaucaac

SEQ ID NO: 826910 - RNA, 19 nt, Homo sapiens
  misc_RNA (1)...(19): siRNA sense strand
cagcaaagaacaacucauc

SEQ ID NO: 826911 - RNA, 19 nt, Homo sapiens
  misc_RNA (1)...(19): siRNA sense strand
ccucagccaucaccuuuca

SEQ ID NO: 826912 - RNA, 19 nt, Homo sapiens
  misc_RNA (1)...(19): siRNA sense strand
aagaagccaugcucaagug

SEQ ID NO: 826913 - RNA, 19 nt, Homo sapiens
  misc_RNA (1)...(19): siRNA sense strand
ccuagcagauguaguugga

SEQ ID NO: 826914 - RNA, 19 nt, Homo sapiens
  misc_RNA (1)...(19): siRNA sense strand
gcggucaucucugcuccua

SEQ ID NO: 826915 - RNA, 19 nt, Homo sapiens
  misc_RNA (1)...(19): siRNA sense strand
aaagccgcguucacguuua

SEQ ID NO: 826916 - RNA, 19 nt, Homo sapiens
  misc_RNA (1)...(19): siRNA sense strand
agagaacgaauguuagaaa

SEQ ID NO: 826917 - RNA, 19 nt, Homo sapiens
  misc_RNA (1)...(19): siRNA sense strand
guaaauguucugcaagcaa

SEQ ID NO: 826918 - RNA, 19 nt, Homo sapiens
  misc_RNA (1)...(19): siRNA sense strand
guugugguaugauaaagug

SEQ ID NO: 826919 - RNA, 19 nt, Homo sapiens
  misc_RNA (1)...(19): siRNA sense strand
gaaguucuagaauggaaug

SEQ ID NO: 826920 - RNA, 19 nt, Homo sapiens
  misc_RNA (1)...(19): siRNA sense strand
uagccuagcagauguaguu

SEQ ID NO: 826921 - RNA, 19 nt, Homo sapiens
  misc_RNA (1)...(19): siRNA sense strand
gcgccaagcagcuaacgaa

SEQ ID NO: 826922 - RNA, 19 nt, Homo sapiens
  misc_RNA (1)...(19): siRNA sense strand
cggaaacgcgugccaaaga

SEQ ID NO: 826923 - RNA, 19 nt, Homo sapiens
  misc_RNA (1)...(19): siRNA sense strand
cgagauugcaucaacaguu

SEQ ID NO: 826924 - RNA, 19 nt, Homo sapiens
  misc_RNA (1)...(19): siRNA sense strand
caugaugagucuucacuac

SEQ ID NO: 826925 - RNA, 19 nt, Homo sapiens
  misc_RNA (1)...(19): siRNA sense strand
ggagagacauguuuccauu

SEQ ID NO: 826926 - RNA, 19 nt, Homo sapiens
  misc_RNA (1)...(19): siRNA sense strand
gaacaaaggaauugaggaa

SEQ ID NO: 826927 - RNA, 19 nt, Homo sapiens
  misc_RNA (1)...(19): siRNA sense strand
gaguaaaccuugccauaug

SEQ ID NO: 826928 - RNA, 19 nt, Homo sapiens
  misc_RNA (1)...(19): siRNA sense strand
cuacagagauucaaaugga

SEQ ID NO: 826929 - RNA, 19 nt, Homo sapiens
  misc_RNA (1)...(19): siRNA sense strand
caagagagauuccaugcau

SEQ ID NO: 826930 - RNA, 19 nt, Homo sapiens
  misc_RNA (1)...(19): siRNA sense strand
gaacaaguuuaacgacaag

SEQ ID NO: 826931 - RNA, 19 nt, Homo sapiens
  misc_RNA (1)...(19): siRNA sense strand
aaacugggucaaagaauua

SEQ ID NO: 826932 - RNA, 19 nt, Homo sapiens
  misc_RNA (1)...(19): siRNA sense strand
ccaauuuacuacagagauu

SEQ ID NO: 826933 - RNA, 19 nt, Homo sapiens
  misc_RNA (1)...(19): siRNA sense strand
cauaacagaugaagauucu

SEQ ID NO: 826934 - RNA, 19 nt, Homo sapiens
  misc_RNA (1)...(19): siRNA sense strand
ggucaaagaauuacggaaa

SEQ ID NO: 826935 - RNA, 19 nt, Homo sapiens
  misc_RNA (1)...(19): siRNA sense strand
guguacagauuauugauga

SEQ ID NO: 826936 - RNA, 19 nt, Homo sapiens
  misc_RNA (1)...(19): siRNA sense strand
gugcuguucuucuggauaa

SEQ ID NO: 826937 - RNA, 19 nt, Homo sapiens
  misc_RNA (1)...(19): siRNA sense strand
gauagaaacagcacaagug

SEQ ID NO: 826938 - RNA, 19 nt, Homo sapiens
  misc_RNA (1)...(19): siRNA sense strand
ugacauaacagaugaagau

SEQ ID NO: 826939 - RNA, 19 nt, Homo sapiens
  misc_RNA (1)...(19): siRNA sense strand
ggagggugcuguucuucug

SEQ ID NO: 826940 - RNA, 19 nt, Homo sapiens
  misc_RNA (1)...(19): siRNA sense strand
aaacagaacaaaggaauug

SEQ ID NO: 826941 - RNA, 19 nt, Homo sapiens
  misc_RNA (1)...(19): siRNA sense strand
gaaaaggagagacauguuu

SEQ ID NO: 826942 - RNA, 19 nt, Homo sapiens
  misc_RNA (1)...(19): siRNA sense strand
ggaacucuuucuugaccuu

SEQ ID NO: 826943 - RNA, 19 nt, Homo sapiens
  misc_RNA (1)...(19): siRNA sense strand
uugaggaacucuuucuuga

SEQ ID NO: 826944 - RNA, 19 nt, Homo sapiens
  misc_RNA (1)...(19): siRNA sense strand
gcaggcaucauucuuaaca

SEQ ID NO: 826945 - RNA, 19 nt, Homo sapiens
  misc_RNA (1)...(19): siRNA sense strand
agagacauguuuccauuca

SEQ ID NO: 826946 - RNA, 19 nt, Homo sapiens
  misc_RNA (1)...(19): siRNA sense strand
guugggaaaugaaaucugu

SEQ ID NO: 826947 - RNA, 19 nt, Homo sapiens
  misc_RNA (1)...(19): siRNA sense strand
gggaaaugaaaucuguuua

SEQ ID NO: 826948 - RNA, 19 nt, Homo sapiens
  misc_RNA (1)...(19): siRNA sense strand
agaacaaguuuaacgacaa

SEQ ID NO: 826949 - RNA, 19 nt, Homo sapiens
  misc_RNA (1)...(19): siRNA sense strand
cugcaggcaucauucuuaa

SEQ ID NO: 826950 - RNA, 19 nt, Homo sapiens
  misc_RNA (1)...(19): siRNA sense strand
ggaaaauguugggaaauga

SEQ ID NO: 826951 - RNA, 19 nt, Homo sapiens
  misc_RNA (1)...(19): siRNA sense strand
aaacagcacaaguggauga

SEQ ID NO: 826952 - RNA, 19 nt, Homo sapiens
  misc_RNA (1)...(19): siRNA sense strand
gaugauagaaacagcacaa

SEQ ID NO: 826953 - RNA, 19 nt, Homo sapiens
  misc_RNA (1)...(19): siRNA sense strand
aagaguaaaccuugccaua

SEQ ID NO: 826954 - RNA, 19 nt, Homo sapiens
  misc_RNA (1)...(19): siRNA sense strand
ccaaacagaacaaaggaau

SEQ ID NO: 826955 - RNA, 19 nt, Homo sapiens
  misc_RNA (1)...(19): siRNA sense strand
aggcaucauucuuaacaaa

SEQ ID NO: 826956 - RNA, 19 nt, Homo sapiens
  misc_RNA (1)...(19): siRNA sense strand
gguggagggugcuguucuu

SEQ ID NO: 826957 - RNA, 19 nt, Homo sapiens
  misc_RNA (1)...(19): siRNA sense strand
aaggcgagguguacagauu

SEQ ID NO: 826958 - RNA, 19 nt, Homo sapiens
  misc_RNA (1)...(19): siRNA sense strand
caaaggaauugaggaacuc

SEQ ID NO: 826959 - RNA, 19 nt, Homo sapiens
  misc_RNA (1)...(19): siRNA sense strand
caaacagaacaaaggaauu

SEQ ID NO: 826960 - RNA, 19 nt, Homo sapiens
  misc_RNA (1)...(19): siRNA sense strand
guuaaauauuggugggaaa

SEQ ID NO: 826961 - RNA, 19 nt, Homo sapiens
  misc_RNA (1)...(19): siRNA sense strand
guaaaaggaugauagaaac

SEQ ID NO: 826962 - RNA, 19 nt, Homo sapiens
  misc_RNA (1)...(19): siRNA sense strand
gagacauguuuccauucaa

SEQ ID NO: 826963 - RNA, 19 nt, Homo sapiens
  misc_RNA (1)...(19): siRNA sense strand
acaaaggaauugaggaacu

SEQ ID NO: 826964 - RNA, 19 nt, Homo sapiens
  misc_RNA (1)...(19): siRNA sense strand
agacauguuuccauucaag

SEQ ID NO: 826965 - RNA, 19 nt, Homo sapiens
  misc_RNA (1)...(19): siRNA sense strand
ucaagaagcagagucguau

SEQ ID NO: 826966 - RNA, 19 nt, Homo sapiens
  misc_RNA (1)...(19): siRNA sense strand
gagguguacagauuauuga

SEQ ID NO: 826967 - RNA, 19 nt, Homo sapiens
  misc_RNA (1)...(19): siRNA sense strand
agaaacagcacaaguggau

SEQ ID NO: 826968 - RNA, 19 nt, Homo sapiens
  misc_RNA (1)...(19): siRNA sense strand
guacagauuauugaugaug

SEQ ID NO: 826969 - RNA, 19 nt, Homo sapiens
  misc_RNA (1)...(19): siRNA sense strand
agagagauuccaugcauug

SEQ ID NO: 826970 - RNA, 19 nt, Homo sapiens
  misc_RNA (1)...(19): siRNA sense strand
cgagguguacagauuauug

SEQ ID NO: 826971 - RNA, 19 nt, Homo sapiens
  misc_RNA (1)...(19): siRNA sense strand
ggcgagguguacagauuau

SEQ ID NO: 826972 - RNA, 19 nt, Homo sapiens
  misc_RNA (1)...(19): siRNA sense strand
gaauugaggaacucuuucu

SEQ ID NO: 826973 - RNA, 19 nt, Homo sapiens
  misc_RNA (1)...(19): siRNA sense strand
aaaacugggucaaagaauu

SEQ ID NO: 826974 - RNA, 19 nt, Homo sapiens
  misc_RNA (1)...(19): siRNA sense strand
gcaaggcgagguguacaga

SEQ ID NO: 826975 - RNA, 19 nt, Homo sapiens
  misc_RNA (1)...(19): siRNA sense strand
cuacugcgagaacaaguuu

SEQ ID NO: 826976 - RNA, 19 nt, Homo sapiens
  misc_RNA (1)...(19): siRNA sense strand
gcgagaacaaguuuaacga

SEQ ID NO: 826977 - RNA, 19 nt, Homo sapiens
  misc_RNA (1)...(19): siRNA sense strand
ucugcaggcaucauucuua

SEQ ID NO: 826978 - RNA, 19 nt, Homo sapiens
  misc_RNA (1)...(19): siRNA sense strand
agaguaaaccuugccauau

SEQ ID NO: 826979 - RNA, 19 nt, Homo sapiens
  misc_RNA (1)...(19): siRNA sense strand
agauucaaauggagcgauu

SEQ ID NO: 826980 - RNA, 19 nt, Homo sapiens
  misc_RNA (1)...(19): siRNA sense strand
gauuauugaugaugaaccu

SEQ ID NO: 826981 - RNA, 19 nt, Homo sapiens
  misc_RNA (1)...(19): siRNA sense strand
acaagcacaucaccacucu

SEQ ID NO: 826982 - RNA, 19 nt, Homo sapiens
  misc_RNA (1)...(19): siRNA sense strand
gagcaaaacauuaucauac

SEQ ID NO: 826983 - RNA, 19 nt, Homo sapiens
  misc_RNA (1)...(19): siRNA sense strand
gcagagucguaugcagaau

SEQ ID NO: 826984 - RNA, 19 nt, Homo sapiens
  misc_RNA (1)...(19): siRNA sense strand
aagagagauuccaugcauu

SEQ ID NO: 826985 - RNA, 19 nt, Homo sapiens
  misc_RNA (1)...(19): siRNA sense strand
ggaauugaggaacucuuuc

SEQ ID NO: 826986 - RNA, 19 nt, Homo sapiens
  misc_RNA (1)...(19): siRNA sense strand
ggagcaaaacauuaucaua

SEQ ID NO: 826987 - RNA, 19 nt, Homo sapiens
  misc_RNA (1)...(19): siRNA sense strand
gaaaauguugggaaaugaa

SEQ ID NO: 826988 - RNA, 19 nt, Homo sapiens
  misc_RNA (1)...(19): siRNA sense strand
ccacucugcaggcaucauu

SEQ ID NO: 826989 - RNA, 19 nt, Homo sapiens
  misc_RNA (1)...(19): siRNA sense strand
uacggcaggucaagagaga

SEQ ID NO: 826990 - RNA, 19 nt, Homo sapiens
  misc_RNA (1)...(19): siRNA sense strand
gaacucuuucuugaccuuu

SEQ ID NO: 826991 - RNA, 19 nt, Homo sapiens
  misc_RNA (1)...(19): siRNA sense strand
gagagacauguuuccauuc

SEQ ID NO: 826992 - RNA, 19 nt, Homo sapiens
  misc_RNA (1)...(19): siRNA sense strand
ggauacggcaggucaagag

SEQ ID NO: 826993 - RNA, 19 nt, Homo sapiens
  misc_RNA (1)...(19): siRNA sense strand
gucaaagaauuacggaaaa

SEQ ID NO: 826994 - RNA, 19 nt, Homo sapiens
  misc_RNA (1)...(19): siRNA sense strand
gacauaacagaugaagauu

SEQ ID NO: 826995 - RNA, 19 nt, Homo sapiens
  misc_RNA (1)...(19): siRNA sense strand
ugggaaaugaaaucuguuu

SEQ ID NO: 826996 - RNA, 19 nt, Homo sapiens
  misc_RNA (1)...(19): siRNA sense strand
aguaaaccuugccauaugg

SEQ ID NO: 826997 - RNA, 19 nt, Homo sapiens
  misc_RNA (1)...(19): siRNA sense strand
gagcgauuuuaguuuauga

SEQ ID NO: 826998 - RNA, 19 nt, Homo sapiens
  misc_RNA (1)...(19): siRNA sense strand
gguguacagauuauugaug

SEQ ID NO: 826999 - RNA, 19 nt, Homo sapiens
  misc_RNA (1)...(19): siRNA sense strand
uaucauacuucagccaaac

SEQ ID NO: 827000 - RNA, 19 nt, Homo sapiens
  misc_RNA (1)...(19): siRNA sense strand
ggaaaaggagagacauguu

SEQ ID NO: 827001 - RNA, 19 nt, Homo sapiens
  misc_RNA (1)...(19): siRNA sense strand
gauacggcaggucaagaga

SEQ ID NO: 827002 - RNA, 19 nt, Homo sapiens
  misc_RNA (1)...(19): siRNA sense strand
aggcgagguguacagauua

SEQ ID NO: 827003 - RNA, 19 nt, Homo sapiens
  misc_RNA (1)...(19): siRNA sense strand
caggcaucauucuuaacaa

SEQ ID NO: 827004 - RNA, 19 nt, Homo sapiens
  misc_RNA (1)...(19): siRNA sense strand
cggcaggucaagagagauu

SEQ ID NO: 827005 - RNA, 19 nt, Homo sapiens
  misc_RNA (1)...(19): siRNA sense strand
aggaauugaggaacucuuu

SEQ ID NO: 827006 - RNA, 19 nt, Homo sapiens
  misc_RNA (1)...(19): siRNA sense strand
agagucguaugcagaaucu

SEQ ID NO: 827007 - RNA, 19 nt, Homo sapiens
  misc_RNA (1)...(19): siRNA sense strand
aaauagacuuggaaaagga

SEQ ID NO: 827008 - RNA, 19 nt, Homo sapiens
  misc_RNA (1)...(19): siRNA sense strand
cggaaaauguugggaaaug

SEQ ID NO: 827009 - RNA, 19 nt, Homo sapiens
  misc_RNA (1)...(19): siRNA sense strand
gcuacugcgagaacaaguu

SEQ ID NO: 827010 - RNA, 19 nt, Homo sapiens
  misc_RNA (1)...(19): siRNA sense strand
ggguccaauuuacuacaga

SEQ ID NO: 827011 - RNA, 19 nt, Homo sapiens
  misc_RNA (1)...(19): siRNA sense strand
aaccuugccauaugggaua

SEQ ID NO: 827012 - RNA, 19 nt, Homo sapiens
  misc_RNA (1)...(19): siRNA sense strand
auacuucagccaaacagaa

SEQ ID NO: 827013 - RNA, 19 nt, Homo sapiens
  misc_RNA (1)...(19): siRNA sense strand
caagaagcagagucguaug

SEQ ID NO: 827014 - RNA, 19 nt, Homo sapiens
  misc_RNA (1)...(19): siRNA sense strand
gagccuacucguucaaggu

SEQ ID NO: 827015 - RNA, 19 nt, Homo sapiens
  misc_RNA (1)...(19): siRNA sense strand
gaaagaaacucugguauuu

SEQ ID NO: 827016 - RNA, 19 nt, Homo sapiens
  misc_RNA (1)...(19): siRNA sense strand
ggacuuaauucucagauuu

SEQ ID NO: 827017 - RNA, 19 nt, Homo sapiens
  misc_RNA (1)...(19): siRNA sense strand
gaaacacaguucuacauuu

SEQ ID NO: 827018 - RNA, 19 nt, Homo sapiens
  misc_RNA (1)...(19): siRNA sense strand
caugaaagcugggaaguua

SEQ ID NO: 827019 - RNA, 19 nt, Homo sapiens
  misc_RNA (1)...(19): siRNA sense strand
ggagacaacuggcauauuc

SEQ ID NO: 827020 - RNA, 19 nt, Homo sapiens
  misc_RNA (1)...(19): siRNA sense strand
gagaaagucugauaugcuu

SEQ ID NO: 827021 - RNA, 19 nt, Homo sapiens
  misc_RNA (1)...(19): siRNA sense strand
gaagaaggauuagcagaug

SEQ ID NO: 827022 - RNA, 19 nt, Homo sapiens
  misc_RNA (1)...(19): siRNA sense strand
uuacauugcuccagaagua

SEQ ID NO: 827023 - RNA, 19 nt, Homo sapiens
  misc_RNA (1)...(19): siRNA sense strand
gcagaaacuuggaagaaga

SEQ ID NO: 827024 - RNA, 19 nt, Homo sapiens
  misc_RNA (1)...(19): siRNA sense strand
gugaugaacuggaaagaaa

SEQ ID NO: 827025 - RNA, 19 nt, Homo sapiens
  misc_RNA (1)...(19): siRNA sense strand
ggaaagaaacucugguauu

SEQ ID NO: 827026 - RNA, 19 nt, Homo sapiens
  misc_RNA (1)...(19): siRNA sense strand
acaacaaccuuuccuauga

SEQ ID NO: 827027 - RNA, 19 nt, Homo sapiens
  misc_RNA (1)...(19): siRNA sense strand
gaggugacaugaugacauu

SEQ ID NO: 827028 - RNA, 19 nt, Homo sapiens
  misc_RNA (1)...(19): siRNA sense strand
ugaaacaccucaagaaaca

SEQ ID NO: 827029 - RNA, 19 nt, Homo sapiens
  misc_RNA (1)...(19): siRNA sense strand
gcagacugguuacaacaaa

SEQ ID NO: 827030 - RNA, 19 nt, Homo sapiens
  misc_RNA (1)...(19): siRNA sense strand
aaacacaguucuacauuuc

SEQ ID NO: 827031 - RNA, 19 nt, Homo sapiens
  misc_RNA (1)...(19): siRNA sense strand
gcagcaaucccuauagaaa

SEQ ID NO: 827032 - RNA, 19 nt, Homo sapiens
  misc_RNA (1)...(19): siRNA sense strand
gaagaaagacaccuugaca

SEQ ID NO: 827033 - RNA, 19 nt, Homo sapiens
  misc_RNA (1)...(19): siRNA sense strand
gccaaggacuuaauucuca

SEQ ID NO: 827034 - RNA, 19 nt, Homo sapiens
  misc_RNA (1)...(19): siRNA sense strand
ggaaacacaguucuacauu

SEQ ID NO: 827035 - RNA, 19 nt, Homo sapiens
  misc_RNA (1)...(19): siRNA sense strand
ugagaaagccaaggacuua

SEQ ID NO: 827036 - RNA, 19 nt, Homo sapiens
  misc_RNA (1)...(19): siRNA sense strand
ccacagaaccggacuacaa

SEQ ID NO: 827037 - RNA, 19 nt, Homo sapiens
  misc_RNA (1)...(19): siRNA sense strand
gaaagacaccuugacagaa

SEQ ID NO: 827038 - RNA, 19 nt, Homo sapiens
  misc_RNA (1)...(19): siRNA sense strand
gaaaagugaugaacuggaa

SEQ ID NO: 827039 - RNA, 19 nt, Homo sapiens
  misc_RNA (1)...(19): siRNA sense strand
acaacacgcucgcaaagaa

SEQ ID NO: 827040 - RNA, 19 nt, Homo sapiens
  misc_RNA (1)...(19): siRNA sense strand
gaaagccaaggacuuaauu

SEQ ID NO: 827041 - RNA, 19 nt, Homo sapiens
  misc_RNA (1)...(19): siRNA sense strand
cauggaagaagaaggauua

SEQ ID NO: 827042 - RNA, 19 nt, Homo sapiens
  misc_RNA (1)...(19): siRNA sense strand
gaaagucugauaugcuuga

SEQ ID NO: 827043 - RNA, 19 nt, Homo sapiens
  misc_RNA (1)...(19): siRNA sense strand
ggaagaagaaggauuagca

SEQ ID NO: 827044 - RNA, 19 nt, Homo sapiens
  misc_RNA (1)...(19): siRNA sense strand
auagaaaucucacacacaa

SEQ ID NO: 827045 - RNA, 19 nt, Homo sapiens
  misc_RNA (1)...(19): siRNA sense strand
aaagacaccuugacagaag

SEQ ID NO: 827046 - RNA, 19 nt, Homo sapiens
  misc_RNA (1)...(19): siRNA sense strand
cagcagcaaucccuauaga

SEQ ID NO: 827047 - RNA, 19 nt, Homo sapiens
  misc_RNA (1)...(19): siRNA sense strand
aaaguuacgucgaucacaa

SEQ ID NO: 827048 - RNA, 19 nt, Homo sapiens
  misc_RNA (1)...(19): siRNA sense strand
caagggucauguaaaauua

SEQ ID NO: 827049 - RNA, 19 nt, Homo sapiens
  misc_RNA (1)...(19): siRNA sense strand
ggagugauuauguaugaaa

SEQ ID NO: 827050 - RNA, 19 nt, Homo sapiens
  misc_RNA (1)...(19): siRNA sense strand
aaaccaggcagaagaaauu

SEQ ID NO: 827051 - RNA, 19 nt, Homo sapiens
  misc_RNA (1)...(19): siRNA sense strand
gagaaaccaggcagaagaa

SEQ ID NO: 827052 - RNA, 19 nt, Homo sapiens
  misc_RNA (1)...(19): siRNA sense strand
ggaaaggccagcagcaauc

SEQ ID NO: 827053 - RNA, 19 nt, Homo sapiens
  misc_RNA (1)...(19): siRNA sense strand
gaaauaguggaguagaaga

SEQ ID NO: 827054 - RNA, 19 nt, Homo sapiens
  misc_RNA (1)...(19): siRNA sense strand
ucacaggacugaauuuuau

SEQ ID NO: 827055 - RNA, 19 nt, Homo sapiens
  misc_RNA (1)...(19): siRNA sense strand
caacaaccuuuccuaugag

SEQ ID NO: 827056 - RNA, 19 nt, Homo sapiens
  misc_RNA (1)...(19): siRNA sense strand
gcagaagaaauuagaagug

SEQ ID NO: 827057 - RNA, 19 nt, Homo sapiens
  misc_RNA (1)...(19): siRNA sense strand
gaaaccaggcagaagaaau

SEQ ID NO: 827058 - RNA, 19 nt, Homo sapiens
  misc_RNA (1)...(19): siRNA sense strand
gaaccggacuacaaaucca

SEQ ID NO: 827059 - RNA, 19 nt, Homo sapiens
  misc_RNA (1)...(19): siRNA sense strand
uuacaaccagugccaaaua

SEQ ID NO: 827060 - RNA, 19 nt, Homo sapiens
  misc_RNA (1)...(19): siRNA sense strand
aaacaccucaagaaacaua

SEQ ID NO: 827061 - RNA, 19 nt, Homo sapiens
  misc_RNA (1)...(19): siRNA sense strand
ugggagugauuauguauga

SEQ ID NO: 827062 - RNA, 19 nt, Homo sapiens
  misc_RNA (1)...(19): siRNA sense strand
uagaugcgauccaccaguu

SEQ ID NO: 827063 - RNA, 19 nt, Homo sapiens
  misc_RNA (1)...(19): siRNA sense strand
gaggaaucuuuaucuaauc

SEQ ID NO: 827064 - RNA, 19 nt, Homo sapiens
  misc_RNA (1)...(19): siRNA sense strand
gaccagacuuggcuuggau

SEQ ID NO: 827065 - RNA, 19 nt, Homo sapiens
  misc_RNA (1)...(19): siRNA sense strand
gacaugaugacauugcuaa

SEQ ID NO: 827066 - RNA, 19 nt, Homo sapiens
  misc_RNA (1)...(19): siRNA sense strand
ggaccagacuuggcuugga

SEQ ID NO: 827067 - RNA, 19 nt, Homo sapiens
  misc_RNA (1)...(19): siRNA sense strand
ugacuucccugaaucugau

SEQ ID NO: 827068 - RNA, 19 nt, Homo sapiens
  misc_RNA (1)...(19): siRNA sense strand
agaaagacaccuugacaga

SEQ ID NO: 827069 - RNA, 19 nt, Homo sapiens
  misc_RNA (1)...(19): siRNA sense strand
agacuguucuggcaauaga

SEQ ID NO: 827070 - RNA, 19 nt, Homo sapiens
  misc_RNA (1)...(19): siRNA sense strand
ggaaagcagaaacuuggaa

SEQ ID NO: 827071 - RNA, 19 nt, Homo sapiens
  misc_RNA (1)...(19): siRNA sense strand
gcccauauccgagcagaaa

SEQ ID NO: 827072 - RNA, 19 nt, Homo sapiens
  misc_RNA (1)...(19): siRNA sense strand
cuaauaggauauccaccuu

SEQ ID NO: 827073 - RNA, 19 nt, Homo sapiens
  misc_RNA (1)...(19): siRNA sense strand
aagagcagguggcccauau

SEQ ID NO: 827074 - RNA, 19 nt, Homo sapiens
  misc_RNA (1)...(19): siRNA sense strand
guaccuauaucugagaaag

SEQ ID NO: 827075 - RNA, 19 nt, Homo sapiens
  misc_RNA (1)...(19): siRNA sense strand
aauaggauauccaccuuuc

SEQ ID NO: 827076 - RNA, 19 nt, Homo sapiens
  misc_RNA (1)...(19): siRNA sense strand
caacacgcucgcaaagaaa

SEQ ID NO: 827077 - RNA, 19 nt, Homo sapiens
  misc_RNA (1)...(19): siRNA sense strand
ggaaauaguggaguagaag

SEQ ID NO: 827078 - RNA, 19 nt, Homo sapiens
  misc_RNA (1)...(19): siRNA sense strand
ucugaaaguuauaggaaga

SEQ ID NO: 827079 - RNA, 19 nt, Homo sapiens
  misc_RNA (1)...(19): siRNA sense strand
gaagauauugagaaagucu

SEQ ID NO: 827080 - RNA, 19 nt, Homo sapiens
  misc_RNA (1)...(19): siRNA sense strand
uggaaauaguggaguagaa

SEQ ID NO: 827081 - RNA, 19 nt, Homo sapiens
  misc_RNA (1)...(19): siRNA sense strand
ggaagaagaacaggagaca

SEQ ID NO: 827082 - RNA, 19 nt, Homo sapiens
  misc_RNA (1)...(19): siRNA sense strand
acacacaacccaccaagug

SEQ ID NO: 827083 - RNA, 19 nt, Homo sapiens
  misc_RNA (1)...(19): siRNA sense strand
ccaguuggguuucauccau

SEQ ID NO: 827084 - RNA, 19 nt, Homo sapiens
  misc_RNA (1)...(19): siRNA sense strand
auuagcagaugaagagaaa

SEQ ID NO: 827085 - RNA, 19 nt, Homo sapiens
  misc_RNA (1)...(19): siRNA sense strand
aagcauugaugauacuuca

SEQ ID NO: 827086 - RNA, 19 nt, Homo sapiens
  misc_RNA (1)...(19): siRNA sense strand
caagaaacauacagaaaag

SEQ ID NO: 827087 - RNA, 19 nt, Homo sapiens
  misc_RNA (1)...(19): siRNA sense strand
gugaagauguuuuacaguu

SEQ ID NO: 827088 - RNA, 19 nt, Homo sapiens
  misc_RNA (1)...(19): siRNA sense strand
cagaagaggaaacacaguu

SEQ ID NO: 827089 - RNA, 19 nt, Homo sapiens
  misc_RNA (1)...(19): siRNA sense strand
gagaaagccaaggacuuaa

SEQ ID NO: 827090 - RNA, 19 nt, Homo sapiens
  misc_RNA (1)...(19): siRNA sense strand
gcaaugacggcagggacua

SEQ ID NO: 827091 - RNA, 19 nt, Homo sapiens
  misc_RNA (1)...(19): siRNA sense strand
gaaaugcuaauaggauauc

SEQ ID NO: 827092 - RNA, 19 nt, Homo sapiens
  misc_RNA (1)...(19): siRNA sense strand
agagaaaccaggcagaaga

SEQ ID NO: 827093 - RNA, 19 nt, Homo sapiens
  misc_RNA (1)...(19): siRNA sense strand
cacagaaccggacuacaaa

SEQ ID NO: 827094 - RNA, 19 nt, Homo sapiens
  misc_RNA (1)...(19): siRNA sense strand
ucaaagaggaaagcagaaa

SEQ ID NO: 827095 - RNA, 19 nt, Homo sapiens
  misc_RNA (1)...(19): siRNA sense strand
cuacaacaaccuuuccuau

SEQ ID NO: 827096 - RNA, 19 nt, Homo sapiens
  misc_RNA (1)...(19): siRNA sense strand
aagaaggauuagcagauga

SEQ ID NO: 827097 - RNA, 19 nt, Homo sapiens
  misc_RNA (1)...(19): siRNA sense strand
cagcaaucccuauagaaau

SEQ ID NO: 827098 - RNA, 19 nt, Homo sapiens
  misc_RNA (1)...(19): siRNA sense strand
gggaaaggccagcagcaau

SEQ ID NO: 827099 - RNA, 19 nt, Homo sapiens
  misc_RNA (1)...(19): siRNA sense strand
uugagucucugaaaguuau

SEQ ID NO: 827100 - RNA, 19 nt, Homo sapiens
  misc_RNA (1)...(19): siRNA sense strand
gaagaggaaacacaguucu

SEQ ID NO: 827101 - RNA, 19 nt, Homo sapiens
  misc_RNA (1)...(19): siRNA sense strand
uaguggaguagaagaaaua

SEQ ID NO: 827102 - RNA, 19 nt, Homo sapiens
  misc_RNA (1)...(19): siRNA sense strand
aauuggaaauaguggagua

SEQ ID NO: 827103 - RNA, 19 nt, Homo sapiens
  misc_RNA (1)...(19): siRNA sense strand
ucugaaacaccucaagaaa

SEQ ID NO: 827104 - RNA, 19 nt, Homo sapiens
  misc_RNA (1)...(19): siRNA sense strand
gcucugaaacaccucaaga

SEQ ID NO: 827105 - RNA, 19 nt, Homo sapiens
  misc_RNA (1)...(19): siRNA sense strand
gaagaacaggagacaacug

SEQ ID NO: 827106 - RNA, 19 nt, Homo sapiens
  misc_RNA (1)...(19): siRNA sense strand
ugacagaagaggaaacaca

SEQ ID NO: 827107 - RNA, 19 nt, Homo sapiens
  misc_RNA (1)...(19): siRNA sense strand
gagcagaaagagauauuuu

SEQ ID NO: 827108 - RNA, 19 nt, Homo sapiens
  misc_RNA (1)...(19): siRNA sense strand
cccugaaucugauauuuua

SEQ ID NO: 827109 - RNA, 19 nt, Homo sapiens
  misc_RNA (1)...(19): siRNA sense strand
uuugaugacuucccugaau

SEQ ID NO: 827110 - RNA, 19 nt, Homo sapiens
  misc_RNA (1)...(19): siRNA sense strand
uguaugaaaugcuaauagg

SEQ ID NO: 827111 - RNA, 19 nt, Homo sapiens
  misc_RNA (1)...(19): siRNA sense strand
gaagaagaacaggagacaa

SEQ ID NO: 827112 - RNA, 19 nt, Homo sapiens
  misc_RNA (1)...(19): siRNA sense strand
gccagcagcaaucccuaua

SEQ ID NO: 827113 - RNA, 19 nt, Homo sapiens
  misc_RNA (1)...(19): siRNA sense strand
gaaagcugggaaguuauga

SEQ ID NO: 827114 - RNA, 19 nt, Homo sapiens
  misc_RNA (1)...(19): siRNA sense strand
ugaaagcugggaaguuaug

SEQ ID NO: 827115 - RNA, 19 nt, Homo sapiens
  misc_RNA (1)...(19): siRNA sense strand
uuaaagacccucugcauua

SEQ ID NO: 827116 - RNA, 19 nt, Homo sapiens
  misc_RNA (1)...(19): siRNA sense strand
ggaaugugguggaaauuug

SEQ ID NO: 827117 - RNA, 19 nt, Homo sapiens
  misc_RNA (1)...(19): siRNA sense strand
uaaaagcagugucgacuua

SEQ ID NO: 827118 - RNA, 19 nt, Homo sapiens
  misc_RNA (1)...(19): siRNA sense strand
uguaaaggcugcucucuuc

SEQ ID NO: 827119 - RNA, 19 nt, Homo sapiens
  misc_RNA (1)...(19): siRNA sense strand
aaacugaugugguguccaa

SEQ ID NO: 827120 - RNA, 19 nt, Homo sapiens
  misc_RNA (1)...(19): siRNA sense strand
ggaguucuuuguugacugu

SEQ ID NO: 827121 - RNA, 19 nt, Homo sapiens
  misc_RNA (1)...(19): siRNA sense strand
uaaagacccucugcauuag

SEQ ID NO: 827122 - RNA, 19 nt, Homo sapiens
  misc_RNA (1)...(19): siRNA sense strand
ggucgaaggacauugaauu

SEQ ID NO: 827123 - RNA, 19 nt, Homo sapiens
  misc_RNA (1)...(19): siRNA sense strand
gguggaaauuuguuugaug

SEQ ID NO: 827124 - RNA, 19 nt, Homo sapiens
  misc_RNA (1)...(19): siRNA sense strand
gcaccgagaucgcuaacac

SEQ ID NO: 827125 - RNA, 19 nt, Homo sapiens
  misc_RNA (1)...(19): siRNA sense strand
gcugcucucuucaauacaa

SEQ ID NO: 827126 - RNA, 19 nt, Homo sapiens
  misc_RNA (1)...(19): siRNA sense strand
gacuaaguguggagaaugu

SEQ ID NO: 827127 - RNA, 19 nt, Homo sapiens
  misc_RNA (1)...(19): siRNA sense strand
gaagguagaggaggugaug

SEQ ID NO: 827128 - RNA, 19 nt, Homo sapiens
  misc_RNA (1)...(19): siRNA sense strand
aaagcagugucgacuuaaa

SEQ ID NO: 827129 - RNA, 19 nt, Homo sapiens
  misc_RNA (1)...(19): siRNA sense strand
caaaugaaggcuacuugga

SEQ ID NO: 827130 - RNA, 19 nt, Homo sapiens
  misc_RNA (1)...(19): siRNA sense strand
ccauuuccauugcuguaaa

SEQ ID NO: 827131 - RNA, 19 nt, Homo sapiens
  misc_RNA (1)...(19): siRNA sense strand
gcacugcuggguucucuau

SEQ ID NO: 827132 - RNA, 19 nt, Homo sapiens
  misc_RNA (1)...(19): siRNA sense strand
acauugaauugucagauga

SEQ ID NO: 827133 - RNA, 19 nt, Homo sapiens
  misc_RNA (1)...(19): siRNA sense strand
cuaccgaugugucgaagug

SEQ ID NO: 827134 - RNA, 19 nt, Homo sapiens
  misc_RNA (1)...(19): siRNA sense strand
ggacuaccgaugugucgaa

SEQ ID NO: 827135 - RNA, 19 nt, Homo sapiens
  misc_RNA (1)...(19): siRNA sense strand
ucucuucaauacaaggaua

SEQ ID NO: 827136 - RNA, 19 nt, Homo sapiens
  misc_RNA (1)...(19): siRNA sense strand
aaaggcugcucucuucaau

SEQ ID NO: 827137 - RNA, 19 nt, Homo sapiens
  misc_RNA (1)...(19): siRNA sense strand
ggaguugugacgugcauga

SEQ ID NO: 827138 - RNA, 19 nt, Homo sapiens
  misc_RNA (1)...(19): siRNA sense strand
gaaugugguggaaauuugu

SEQ ID NO: 827139 - RNA, 19 nt, Homo sapiens
  misc_RNA (1)...(19): siRNA sense strand
agaguguucugcacaagga

SEQ ID NO: 827140 - RNA, 19 nt, Homo sapiens
  misc_RNA (1)...(19): siRNA sense strand
ggacgccgaagcuggagaa

SEQ ID NO: 827141 - RNA, 19 nt, Homo sapiens
  misc_RNA (1)...(19): siRNA sense strand
caagagacagaaaguugga

SEQ ID NO: 827142 - RNA, 19 nt, Homo sapiens
  misc_RNA (1)...(19): siRNA sense strand
uaaaggcugcucucuucaa

SEQ ID NO: 827143 - RNA, 19 nt, Homo sapiens
  misc_RNA (1)...(19): siRNA sense strand
cccaagagacagaaaguug

SEQ ID NO: 827144 - RNA, 19 nt, Homo sapiens
  misc_RNA (1)...(19): siRNA sense strand
gaagcuggagaaaccaaau

SEQ ID NO: 827145 - RNA, 19 nt, Homo sapiens
  misc_RNA (1)...(19): siRNA sense strand
aggcugcucucuucaauac

SEQ ID NO: 827146 - RNA, 19 nt, Homo sapiens
  misc_RNA (1)...(19): siRNA sense strand
gugucgaaguggaaacuga

SEQ ID NO: 827147 - RNA, 19 nt, Homo sapiens
  misc_RNA (1)...(19): siRNA sense strand
ucuggaaugugguggaaau

SEQ ID NO: 827148 - RNA, 19 nt, Homo sapiens
  misc_RNA (1)...(19): siRNA sense strand
cuacuuggaguucuuuguu

SEQ ID NO: 827149 - RNA, 19 nt, Homo sapiens
  misc_RNA (1)...(19): siRNA sense strand
gggagugaaagcagaaaug

SEQ ID NO: 827150 - RNA, 19 nt, Homo sapiens
  misc_RNA (1)...(19): siRNA sense strand
ugacgugcaugaggaaagu

SEQ ID NO: 827151 - RNA, 19 nt, Homo sapiens
  misc_RNA (1)...(19): siRNA sense strand
cuuaaagacccucugcauu

SEQ ID NO: 827152 - RNA, 19 nt, Homo sapiens
  misc_RNA (1)...(19): siRNA sense strand
cggagaagguguacaucgu

SEQ ID NO: 827153 - RNA, 19 nt, Homo sapiens
  misc_RNA (1)...(19): siRNA sense strand
auaccaaggguucgaguuu

SEQ ID NO: 827154 - RNA, 19 nt, Homo sapiens
  misc_RNA (1)...(19): siRNA sense strand
ggagugaaagcagaaaugg

SEQ ID NO: 827155 - RNA, 19 nt, Homo sapiens
  misc_RNA (1)...(19): siRNA sense strand
gucacucugugcaagauug

SEQ ID NO: 827156 - RNA, 19 nt, Homo sapiens
  misc_RNA (1)...(19): siRNA sense strand
gcgaggcggagaaggugua

SEQ ID NO: 827157 - RNA, 19 nt, Homo sapiens
  misc_RNA (1)...(19): siRNA sense strand
guucuuuguugacuguuca

SEQ ID NO: 827158 - RNA, 19 nt, Homo sapiens
  misc_RNA (1)...(19): siRNA sense strand
gcaagcgugugggcaaggu

SEQ ID NO: 827159 - RNA, 19 nt, Homo sapiens
  misc_RNA (1)...(19): siRNA sense strand
gucgaaggacauugaauug

SEQ ID NO: 827160 - RNA, 19 nt, Homo sapiens
  misc_RNA (1)...(19): siRNA sense strand
gaaggcuacuuggaguucu

SEQ ID NO: 827161 - RNA, 19 nt, Homo sapiens
  misc_RNA (1)...(19): siRNA sense strand
ggacccagagagcaucuuc

SEQ ID NO: 827162 - RNA, 19 nt, Homo sapiens
  misc_RNA (1)...(19): siRNA sense strand
ggaagaccuccguguggau

SEQ ID NO: 827163 - RNA, 19 nt, Homo sapiens
  misc_RNA (1)...(19): siRNA sense strand
caucuuggugggagugaaa

SEQ ID NO: 827164 - RNA, 19 nt, Homo sapiens
  misc_RNA (1)...(19): siRNA sense strand
gagacagaaaguuggauuc

SEQ ID NO: 827165 - RNA, 19 nt, Homo sapiens
  misc_RNA (1)...(19): siRNA sense strand
gaagguguacaucgugcau

SEQ ID NO: 827166 - RNA, 19 nt, Homo sapiens
  misc_RNA (1)...(19): siRNA sense strand
cgacuaaguguggagaaug

SEQ ID NO: 827167 - RNA, 19 nt, Homo sapiens
  misc_RNA (1)...(19): siRNA sense strand
ucagaugacccuuaugacu

SEQ ID NO: 827168 - RNA, 19 nt, Homo sapiens
  misc_RNA (1)...(19): siRNA sense strand
uacuuggaguucuuuguug

SEQ ID NO: 827169 - RNA, 19 nt, Homo sapiens
  misc_RNA (1)...(19): siRNA sense strand
gauaccaaggguucgaguu

SEQ ID NO: 827170 - RNA, 19 nt, Homo sapiens
  misc_RNA (1)...(19): siRNA sense strand
guaaaggcugcucucuuca

SEQ ID NO: 827171 - RNA, 19 nt, Homo sapiens
  misc_RNA (1)...(19): siRNA sense strand
gaugugcugcuucuggaau

SEQ ID NO: 827172 - RNA, 19 nt, Homo sapiens
  misc_RNA (1)...(19): siRNA sense strand
acuuggaguucuuuguuga

SEQ ID NO: 827173 - RNA, 19 nt, Homo sapiens
  misc_RNA (1)...(19): siRNA sense strand
cgccgaagcuggagaaacc

SEQ ID NO: 827174 - RNA, 19 nt, Homo sapiens
  misc_RNA (1)...(19): siRNA sense strand
uggaaugugguggaaauuu

SEQ ID NO: 827175 - RNA, 19 nt, Homo sapiens
  misc_RNA (1)...(19): siRNA sense strand
ugugaggacuaccgaugug

SEQ ID NO: 827176 - RNA, 19 nt, Homo sapiens
  misc_RNA (1)...(19): siRNA sense strand
gcuggagaaaccaaaugaa

SEQ ID NO: 827177 - RNA, 19 nt, Homo sapiens
  misc_RNA (1)...(19): siRNA sense strand
agagacagaaaguuggauu

SEQ ID NO: 827178 - RNA, 19 nt, Homo sapiens
  misc_RNA (1)...(19): siRNA sense strand
cgaaguggaaacugaugug

SEQ ID NO: 827179 - RNA, 19 nt, Homo sapiens
  misc_RNA (1)...(19): siRNA sense strand
gaaagcgccuggccacuua

SEQ ID NO: 827180 - RNA, 19 nt, Homo sapiens
  misc_RNA (1)...(19): siRNA sense strand
ggaagaccauccacaaaua

SEQ ID NO: 827181 - RNA, 19 nt, Homo sapiens
  misc_RNA (1)...(19): siRNA sense strand
gaaggcagaugaaguauug

SEQ ID NO: 827182 - RNA, 19 nt, Homo sapiens
  misc_RNA (1)...(19): siRNA sense strand
gaagaaggcagaugaagua

SEQ ID NO: 827183 - RNA, 19 nt, Homo sapiens
  misc_RNA (1)...(19): siRNA sense strand
ugaagaagauugagaagaa

SEQ ID NO: 827184 - RNA, 19 nt, Homo sapiens
  misc_RNA (1)...(19): siRNA sense strand
guggaugacuucaagauua

SEQ ID NO: 827185 - RNA, 19 nt, Homo sapiens
  misc_RNA (1)...(19): siRNA sense strand
gaaacucccugaggaagua

SEQ ID NO: 827186 - RNA, 19 nt, Homo sapiens
  misc_RNA (1)...(19): siRNA sense strand
ucaacaagaugaaggguua

SEQ ID NO: 827187 - RNA, 19 nt, Homo sapiens
  misc_RNA (1)...(19): siRNA sense strand
ugaaugaaaucgucuauga

SEQ ID NO: 827188 - RNA, 19 nt, Homo sapiens
  misc_RNA (1)...(19): siRNA sense strand
ggaaggugaugaagacgua

SEQ ID NO: 827189 - RNA, 19 nt, Homo sapiens
  misc_RNA (1)...(19): siRNA sense strand
gaaugggccugucuuagaa

SEQ ID NO: 827190 - RNA, 19 nt, Homo sapiens
  misc_RNA (1)...(19): siRNA sense strand
agaacaaucuggucaagua

SEQ ID NO: 827191 - RNA, 19 nt, Homo sapiens
  misc_RNA (1)...(19): siRNA sense strand
gcaagaaccuagagcugaa

SEQ ID NO: 827192 - RNA, 19 nt, Homo sapiens
  misc_RNA (1)...(19): siRNA sense strand
gaaggagacuggaaagaca

SEQ ID NO: 827193 - RNA, 19 nt, Homo sapiens
  misc_RNA (1)...(19): siRNA sense strand
gggcacagcuuacagacaa

SEQ ID NO: 827194 - RNA, 19 nt, Homo sapiens
  misc_RNA (1)...(19): siRNA sense strand
gcaagaacgugcagaacau

SEQ ID NO: 827195 - RNA, 19 nt, Homo sapiens
  misc_RNA (1)...(19): siRNA sense strand
gaugaaguauuggagauuu

SEQ ID NO: 827196 - RNA, 19 nt, Homo sapiens
  misc_RNA (1)...(19): siRNA sense strand
ggaaacacauaaacaugga

SEQ ID NO: 827197 - RNA, 19 nt, Homo sapiens
  misc_RNA (1)...(19): siRNA sense strand
caacaccuuugauuucauu

SEQ ID NO: 827198 - RNA, 19 nt, Homo sapiens
  misc_RNA (1)...(19): siRNA sense strand
aaacagaugauaccagaua

SEQ ID NO: 827199 - RNA, 19 nt, Homo sapiens
  misc_RNA (1)...(19): siRNA sense strand
gcagaaaucgugcuaggaa

SEQ ID NO: 827200 - RNA, 19 nt, Homo sapiens
  misc_RNA (1)...(19): siRNA sense strand
gaucaacguucuucugcaa

SEQ ID NO: 827201 - RNA, 19 nt, Homo sapiens
  misc_RNA (1)...(19): siRNA sense strand
ugaaucggauccagaguaa

SEQ ID NO: 827202 - RNA, 19 nt, Homo sapiens
  misc_RNA (1)...(19): siRNA sense strand
uguaaccgcuacccuaaua

SEQ ID NO: 827203 - RNA, 19 nt, Homo sapiens
  misc_RNA (1)...(19): siRNA sense strand
gcacauacagucaucauca

SEQ ID NO: 827204 - RNA, 19 nt, Homo sapiens
  misc_RNA (1)...(19): siRNA sense strand
ccacaaauauguccaucug

SEQ ID NO: 827205 - RNA, 19 nt, Homo sapiens
  misc_RNA (1)...(19): siRNA sense strand
ccaagaagccugucauugu

SEQ ID NO: 827206 - RNA, 19 nt, Homo sapiens
  misc_RNA (1)...(19): siRNA sense strand
acaaauauguccaucuguu

SEQ ID NO: 827207 - RNA, 19 nt, Homo sapiens
  misc_RNA (1)...(19): siRNA sense strand
ggaggaaggugaugaagac

SEQ ID NO: 827208 - RNA, 19 nt, Homo sapiens
  misc_RNA (1)...(19): siRNA sense strand
uguacgaccugaaucauaa

SEQ ID NO: 827209 - RNA, 19 nt, Homo sapiens
  misc_RNA (1)...(19): siRNA sense strand
gaagaagaauuuccccuuu

SEQ ID NO: 827210 - RNA, 19 nt, Homo sapiens
  misc_RNA (1)...(19): siRNA sense strand
gcuaggaaauguccagaau

SEQ ID NO: 827211 - RNA, 19 nt, Homo sapiens
  misc_RNA (1)...(19): siRNA sense strand
caagaagccugucauuguc

SEQ ID NO: 827212 - RNA, 19 nt, Homo sapiens
  misc_RNA (1)...(19): siRNA sense strand
agacagugauucagauuga

SEQ ID NO: 827213 - RNA, 19 nt, Homo sapiens
  misc_RNA (1)...(19): siRNA sense strand
ggagaugccaaguccaaua

SEQ ID NO: 827214 - RNA, 19 nt, Homo sapiens
  misc_RNA (1)...(19): siRNA sense strand
gaauaacccuaaguucaau

SEQ ID NO: 827215 - RNA, 19 nt, Homo sapiens
  misc_RNA (1)...(19): siRNA sense strand
caacaacuuccuauugaaa

SEQ ID NO: 827216 - RNA, 19 nt, Homo sapiens
  misc_RNA (1)...(19): siRNA sense strand
ggagauggaggaugaagaa

SEQ ID NO: 827217 - RNA, 19 nt, Homo sapiens
  misc_RNA (1)...(19): siRNA sense strand
uggaaaagcugccaaagua

SEQ ID NO: 827218 - RNA, 19 nt, Homo sapiens
  misc_RNA (1)...(19): siRNA sense strand
ugaagcagcugccacacuu

SEQ ID NO: 827219 - RNA, 19 nt, Homo sapiens
  misc_RNA (1)...(19): siRNA sense strand
ccaagaccauugagaacaa

SEQ ID NO: 827220 - RNA, 19 nt, Homo sapiens
  misc_RNA (1)...(19): siRNA sense strand
acacagaucuggaaaccau

SEQ ID NO: 827221 - RNA, 19 nt, Homo sapiens
  misc_RNA (1)...(19): siRNA sense strand
ugacagaacugggccguau

SEQ ID NO: 827222 - RNA, 19 nt, Homo sapiens
  misc_RNA (1)...(19): siRNA sense strand
gaggauguccgacucauug

SEQ ID NO: 827223 - RNA, 19 nt, Homo sapiens
  misc_RNA (1)...(19): siRNA sense strand
caacuuccaucccaaugug

SEQ ID NO: 827224 - RNA, 19 nt, Homo sapiens
  misc_RNA (1)...(19): siRNA sense strand
gcucuucgcucuccaaugc

SEQ ID NO: 827225 - RNA, 19 nt, Homo sapiens
  misc_RNA (1)...(19): siRNA sense strand
gcagcucagucguuucuau

SEQ ID NO: 827226 - RNA, 19 nt, Homo sapiens
  misc_RNA (1)...(19): siRNA sense strand
guacuacaauggcaagauc

SEQ ID NO: 827227 - RNA, 19 nt, Homo sapiens
  misc_RNA (1)...(19): siRNA sense strand
gaagaccauccacaaauau

SEQ ID NO: 827228 - RNA, 19 nt, Homo sapiens
  misc_RNA (1)...(19): siRNA sense strand
ucucacagcugaaauugga

SEQ ID NO: 827229 - RNA, 19 nt, Homo sapiens
  misc_RNA (1)...(19): siRNA sense strand
ucauacagcugcccugaug

SEQ ID NO: 827230 - RNA, 19 nt, Homo sapiens
  misc_RNA (1)...(19): siRNA sense strand
gaugagacauacgguguga

SEQ ID NO: 827231 - RNA, 19 nt, Homo sapiens
  misc_RNA (1)...(19): siRNA sense strand
caaauauguccaucuguuu

SEQ ID NO: 827232 - RNA, 19 nt, Homo sapiens
  misc_RNA (1)...(19): siRNA sense strand
gacuagaucugguucauac

SEQ ID NO: 827233 - RNA, 19 nt, Homo sapiens
  misc_RNA (1)...(19): siRNA sense strand
aaagccagaugguuucaaa

SEQ ID NO: 827234 - RNA, 19 nt, Homo sapiens
  misc_RNA (1)...(19): siRNA sense strand
gaggugcugucccuuguug

SEQ ID NO: 827235 - RNA, 19 nt, Homo sapiens
  misc_RNA (1)...(19): siRNA sense strand
gaaucucccugcacauaca

SEQ ID NO: 827236 - RNA, 19 nt, Homo sapiens
  misc_RNA (1)...(19): siRNA sense strand
gagaggugcugucccuugu

SEQ ID NO: 827237 - RNA, 19 nt, Homo sapiens
  misc_RNA (1)...(19): siRNA sense strand
ggcaugacaucaacaagau

SEQ ID NO: 827238 - RNA, 19 nt, Homo sapiens
  misc_RNA (1)...(19): siRNA sense strand
ugaaagaagcugagacaga

SEQ ID NO: 827239 - RNA, 19 nt, Homo sapiens
  misc_RNA (1)...(19): siRNA sense strand
gagaaacagugccuuugag

SEQ ID NO: 827240 - RNA, 19 nt, Homo sapiens
  misc_RNA (1)...(19): siRNA sense strand
gaagaagauugagaagaag

SEQ ID NO: 827241 - RNA, 19 nt, Homo sapiens
  misc_RNA (1)...(19): siRNA sense strand
ccagaugguuucaaagcuu

SEQ ID NO: 827242 - RNA, 19 nt, Homo sapiens
  misc_RNA (1)...(19): siRNA sense strand
gaaugaaaucgucuaugaa

SEQ ID NO: 827243 - RNA, 19 nt, Homo sapiens
  misc_RNA (1)...(19): siRNA sense strand
cagagguccugucuuagaa

SEQ ID NO: 827244 - RNA, 19 nt, Homo sapiens
  misc_RNA (1)...(19): siRNA sense strand
gagauugggaaacacauaa

SEQ ID NO: 827245 - RNA, 19 nt, Homo sapiens
  misc_RNA (1)...(19): siRNA sense strand
ggagggcauugaugagaug

SEQ ID NO: 827246 - RNA, 19 nt, Homo sapiens
  misc_RNA (1)...(19): siRNA sense strand
ccauugagcucuucagcau

SEQ ID NO: 827247 - RNA, 19 nt, Homo sapiens
  misc_RNA (1)...(19): siRNA sense strand
guucuuauaugagccauug

SEQ ID NO: 827248 - RNA, 19 nt, Homo sapiens
  misc_RNA (1)...(19): siRNA sense strand
caagggagccacuuuaugg

SEQ ID NO: 827249 - RNA, 19 nt, Homo sapiens
  misc_RNA (1)...(19): siRNA sense strand
gaaaggauuaugggaaaga

SEQ ID NO: 827250 - RNA, 19 nt, Homo sapiens
  misc_RNA (1)...(19): siRNA sense strand
cagcacaggaugaugauuu

SEQ ID NO: 827251 - RNA, 19 nt, Homo sapiens
  misc_RNA (1)...(19): siRNA sense strand
caacauugaugagacauac

SEQ ID NO: 827252 - RNA, 19 nt, Homo sapiens
  misc_RNA (1)...(19): siRNA sense strand
ggagauaaggaaauccaaa

SEQ ID NO: 827253 - RNA, 19 nt, Homo sapiens
  misc_RNA (1)...(19): siRNA sense strand
gaaguucuagcuguucuaa

SEQ ID NO: 827254 - RNA, 19 nt, Homo sapiens
  misc_RNA (1)...(19): siRNA sense strand
gaccaggaguacaaauuca

SEQ ID NO: 827255 - RNA, 19 nt, Homo sapiens
  misc_RNA (1)...(19): siRNA sense strand
ccaauagccucaucuccau

SEQ ID NO: 827256 - RNA, 19 nt, Homo sapiens
  misc_RNA (1)...(19): siRNA sense strand
aggaaacgcugcuaaaugg

SEQ ID NO: 827257 - RNA, 19 nt, Homo sapiens
  misc_RNA (1)...(19): siRNA sense strand
caacaucagccauacacaa

SEQ ID NO: 827258 - RNA, 19 nt, Homo sapiens
  misc_RNA (1)...(19): siRNA sense strand
gggaagaccauccacaaau

SEQ ID NO: 827259 - RNA, 19 nt, Homo sapiens
  misc_RNA (1)...(19): siRNA sense strand
gaacacucguggaggaucu

SEQ ID NO: 827260 - RNA, 19 nt, Homo sapiens
  misc_RNA (1)...(19): siRNA sense strand
ggaaagcgccuggccacuu

SEQ ID NO: 827261 - RNA, 19 nt, Homo sapiens
  misc_RNA (1)...(19): siRNA sense strand
aggaaaggauuaugggaaa

SEQ ID NO: 827262 - RNA, 19 nt, Homo sapiens
  misc_RNA (1)...(19): siRNA sense strand
ccacuucaaugcugagauc

SEQ ID NO: 827263 - RNA, 19 nt, Homo sapiens
  misc_RNA (1)...(19): siRNA sense strand
gcaagaugaucgacaaacg

SEQ ID NO: 827264 - RNA, 19 nt, Homo sapiens
  misc_RNA (1)...(19): siRNA sense strand
acccagagcuauccaaguu

SEQ ID NO: 827265 - RNA, 19 nt, Homo sapiens
  misc_RNA (1)...(19): siRNA sense strand
gauaccaugugcuagugaa

SEQ ID NO: 827266 - RNA, 19 nt, Homo sapiens
  misc_RNA (1)...(19): siRNA sense strand
cagcguggaugugaaagaa

SEQ ID NO: 827267 - RNA, 19 nt, Homo sapiens
  misc_RNA (1)...(19): siRNA sense strand
gcaaagggaacauuaucau

SEQ ID NO: 827268 - RNA, 19 nt, Homo sapiens
  misc_RNA (1)...(19): siRNA sense strand
gacuauuugugcagaguuu

SEQ ID NO: 827269 - RNA, 19 nt, Homo sapiens
  misc_RNA (1)...(19): siRNA sense strand
ggagggcuuugcacugaug

SEQ ID NO: 827270 - RNA, 19 nt, Homo sapiens
  misc_RNA (1)...(19): siRNA sense strand
acauugagaugacccaaga

SEQ ID NO: 827271 - RNA, 19 nt, Homo sapiens
  misc_RNA (1)...(19): siRNA sense strand
caauguggaugacuucaag

SEQ ID NO: 827272 - RNA, 19 nt, Homo sapiens
  misc_RNA (1)...(19): siRNA sense strand
gcuccaagcugaccguucu

SEQ ID NO: 827273 - RNA, 19 nt, Homo sapiens
  misc_RNA (1)...(19): siRNA sense strand
gcaugugccugcucugaag

SEQ ID NO: 827274 - RNA, 19 nt, Homo sapiens
  misc_RNA (1)...(19): siRNA sense strand
gcacaaagugaagcugaaa

SEQ ID NO: 827275 - RNA, 19 nt, Homo sapiens
  misc_RNA (1)...(19): siRNA sense strand
ggacuuggaggaccugguu

SEQ ID NO: 827276 - RNA, 19 nt, Homo sapiens
  misc_RNA (1)...(19): siRNA sense strand
gcugaccguucucucauug

SEQ ID NO: 827277 - RNA, 19 nt, Homo sapiens
  misc_RNA (1)...(19): siRNA sense strand
cgagaaugggccugucuua

SEQ ID NO: 827278 - RNA, 19 nt, Homo sapiens
  misc_RNA (1)...(19): siRNA sense strand
uuucaaagcuuccugacau

SEQ ID NO: 827279 - RNA, 19 nt, Homo sapiens
  misc_RNA (1)...(19): siRNA sense strand
ggaaagauguucucuauag

SEQ ID NO: 827280 - RNA, 19 nt, Homo sapiens
  misc_RNA (1)...(19): siRNA sense strand
agaaguggcugcugaauua

SEQ ID NO: 827281 - RNA, 19 nt, Homo sapiens
  misc_RNA (1)...(19): siRNA sense strand
gaauugaucucuccacauu

SEQ ID NO: 827282 - RNA, 19 nt, Homo sapiens
  misc_RNA (1)...(19): siRNA sense strand
gauaauaccuguuggaauc

SEQ ID NO: 827283 - RNA, 19 nt, Homo sapiens
  misc_RNA (1)...(19): siRNA sense strand
guucauagaucccauauug

SEQ ID NO: 827284 - RNA, 19 nt, Homo sapiens
  misc_RNA (1)...(19): siRNA sense strand
agaaagaaauguugcagua

SEQ ID NO: 827285 - RNA, 19 nt, Homo sapiens
  misc_RNA (1)...(19): siRNA sense strand
gaacagcaguagaguacaa

SEQ ID NO: 827286 - RNA, 19 nt, Homo sapiens
  misc_RNA (1)...(19): siRNA sense strand
cuucagaucugcaacuuua

SEQ ID NO: 827287 - RNA, 19 nt, Homo sapiens
  misc_RNA (1)...(19): siRNA sense strand
gaaagauguucucuauaga

SEQ ID NO: 827288 - RNA, 19 nt, Homo sapiens
  misc_RNA (1)...(19): siRNA sense strand
gaaggagguugauugcaaa

SEQ ID NO: 827289 - RNA, 19 nt, Homo sapiens
  misc_RNA (1)...(19): siRNA sense strand
caaugaaacucacacaaga

SEQ ID NO: 827290 - RNA, 19 nt, Homo sapiens
  misc_RNA (1)...(19): siRNA sense strand
gaaaguuuauccaguaugg

SEQ ID NO: 827291 - RNA, 19 nt, Homo sapiens
  misc_RNA (1)...(19): siRNA sense strand
ccagacaucuugauaauac

SEQ ID NO: 827292 - RNA, 19 nt, Homo sapiens
  misc_RNA (1)...(19): siRNA sense strand
uaggaaaguuuauccagua

SEQ ID NO: 827293 - RNA, 19 nt, Homo sapiens
  misc_RNA (1)...(19): siRNA sense strand
cgaaggagguugauugcaa

SEQ ID NO: 827294 - RNA, 19 nt, Homo sapiens
  misc_RNA (1)...(19): siRNA sense strand
caagagguguuauuagaau

SEQ ID NO: 827295 - RNA, 19 nt, Homo sapiens
  misc_RNA (1)...(19): siRNA sense strand
caucaaagcaccauacauu

SEQ ID NO: 827296 - RNA, 19 nt, Homo sapiens
  misc_RNA (1)...(19): siRNA sense strand
gagaagugaugaagaagau

SEQ ID NO: 827297 - RNA, 19 nt, Homo sapiens
  misc_RNA (1)...(19): siRNA sense strand
gaagauaucaguccuaguc

SEQ ID NO: 827298 - RNA, 19 nt, Homo sapiens
  misc_RNA (1)...(19): siRNA sense strand
guagagacacguccauuaa

SEQ ID NO: 827299 - RNA, 19 nt, Homo sapiens
  misc_RNA (1)...(19): siRNA sense strand
gauguaagcacacaaguga

SEQ ID NO: 827300 - RNA, 19 nt, Homo sapiens
  misc_RNA (1)...(19): siRNA sense strand
gaaagaaagccuaaugagu

SEQ ID NO: 827301 - RNA, 19 nt, Homo sapiens
  misc_RNA (1)...(19): siRNA sense strand
gaacaacugggcaaaccua

SEQ ID NO: 827302 - RNA, 19 nt, Homo sapiens
  misc_RNA (1)...(19): siRNA sense strand
ugaagaagaugaagacagu

SEQ ID NO: 827303 - RNA, 19 nt, Homo sapiens
  misc_RNA (1)...(19): siRNA sense strand
gaaccugaguaucugcaaa

SEQ ID NO: 827304 - RNA, 19 nt, Homo sapiens
  misc_RNA (1)...(19): siRNA sense strand
gaauuugccgcuucuguuu

SEQ ID NO: 827305 - RNA, 19 nt, Homo sapiens
  misc_RNA (1)...(19): siRNA sense strand
gaaccuuugucuuggagaa

SEQ ID NO: 827306 - RNA, 19 nt, Homo sapiens
  misc_RNA (1)...(19): siRNA sense strand
cagcacaacugucccauca

SEQ ID NO: 827307 - RNA, 19 nt, Homo sapiens
  misc_RNA (1)...(19): siRNA sense strand
gcaaaccuaagaagaauga

SEQ ID NO: 827308 - RNA, 19 nt, Homo sapiens
  misc_RNA (1)...(19): siRNA sense strand
uaucgaaggucacuacaau

SEQ ID NO: 827309 - RNA, 19 nt, Homo sapiens
  misc_RNA (1)...(19): siRNA sense strand
gaagcuuccugaaccuuug

SEQ ID NO: 827310 - RNA, 19 nt, Homo sapiens
  misc_RNA (1)...(19): siRNA sense strand
gguagagacacguccauua

SEQ ID NO: 827311 - RNA, 19 nt, Homo sapiens
  misc_RNA (1)...(19): siRNA sense strand
gcacacaagugaggaaugg

SEQ ID NO: 827312 - RNA, 19 nt, Homo sapiens
  misc_RNA (1)...(19): siRNA sense strand
cauauucuauucacugcua

SEQ ID NO: 827313 - RNA, 19 nt, Homo sapiens
  misc_RNA (1)...(19): siRNA sense strand
gcacagccauuuuccuuaa

SEQ ID NO: 827314 - RNA, 19 nt, Homo sapiens
  misc_RNA (1)...(19): siRNA sense strand
uaccaagucugccaugaaa

SEQ ID NO: 827315 - RNA, 19 nt, Homo sapiens
  misc_RNA (1)...(19): siRNA sense strand
gggcaaaccuaagaagaau

SEQ ID NO: 827316 - RNA, 19 nt, Homo sapiens
  misc_RNA (1)...(19): siRNA sense strand
caacuucagugguccuguu

SEQ ID NO: 827317 - RNA, 19 nt, Homo sapiens
  misc_RNA (1)...(19): siRNA sense strand
gaagugaugaagaagauga

SEQ ID NO: 827318 - RNA, 19 nt, Homo sapiens
  misc_RNA (1)...(19): siRNA sense strand
gcaagagguguuauuagaa

SEQ ID NO: 827319 - RNA, 19 nt, Homo sapiens
  misc_RNA (1)...(19): siRNA sense strand
gcacugacccuugguacaa

SEQ ID NO: 827320 - RNA, 19 nt, Homo sapiens
  misc_RNA (1)...(19): siRNA sense strand
guagcaagagguguuauua

SEQ ID NO: 827321 - RNA, 19 nt, Homo sapiens
  misc_RNA (1)...(19): siRNA sense strand
gaagaaugcugugaaaaug

SEQ ID NO: 827322 - RNA, 19 nt, Homo sapiens
  misc_RNA (1)...(19): siRNA sense strand
gagagugucuguuuuagaa

SEQ ID NO: 827323 - RNA, 19 nt, Homo sapiens
  misc_RNA (1)...(19): siRNA sense strand
gauacucugucuaccaaug

SEQ ID NO: 827324 - RNA, 19 nt, Homo sapiens
  misc_RNA (1)...(19): siRNA sense strand
cuaauaaccagaacagaaa

SEQ ID NO: 827325 - RNA, 19 nt, Homo sapiens
  misc_RNA (1)...(19): siRNA sense strand
ccacauuggucgaagacuu

SEQ ID NO: 827326 - RNA, 19 nt, Homo sapiens
  misc_RNA (1)...(19): siRNA sense strand
acggaaagauguucucuau

SEQ ID NO: 827327 - RNA, 19 nt, Homo sapiens
  misc_RNA (1)...(19): siRNA sense strand
caaaagagagugucuguuu

SEQ ID NO: 827328 - RNA, 19 nt, Homo sapiens
  misc_RNA (1)...(19): siRNA sense strand
caacugggcaaaccuaaga

SEQ ID NO: 827329 - RNA, 19 nt, Homo sapiens
  misc_RNA (1)...(19): siRNA sense strand
ucaguaccuugauccauaa

SEQ ID NO: 827330 - RNA, 19 nt, Homo sapiens
  misc_RNA (1)...(19): siRNA sense strand
ccaaggagcaccagcaguu

SEQ ID NO: 827331 - RNA, 19 nt, Homo sapiens
  misc_RNA (1)...(19): siRNA sense strand
gauaucaguccuagucuug

SEQ ID NO: 827332 - RNA, 19 nt, Homo sapiens
  misc_RNA (1)...(19): siRNA sense strand
agagacacguccauuaaug

SEQ ID NO: 827333 - RNA, 19 nt, Homo sapiens
  misc_RNA (1)...(19): siRNA sense strand
gaucccauauugacuaucu

SEQ ID NO: 827334 - RNA, 19 nt, Homo sapiens
  misc_RNA (1)...(19): siRNA sense strand
gaaagaaauguugcaguau

SEQ ID NO: 827335 - RNA, 19 nt, Homo sapiens
  misc_RNA (1)...(19): siRNA sense strand
gacgaaggcucgaugaaac

SEQ ID NO: 827336 - RNA, 19 nt, Homo sapiens
  misc_RNA (1)...(19): siRNA sense strand
gaaggcacacguucuagga

SEQ ID NO: 827337 - RNA, 19 nt, Homo sapiens
  misc_RNA (1)...(19): siRNA sense strand
gaacugagcagcacuuuuc

SEQ ID NO: 827338 - RNA, 19 nt, Homo sapiens
  misc_RNA (1)...(19): siRNA sense strand
gcacaaauaccuaauaacc

SEQ ID NO: 827339 - RNA, 19 nt, Homo sapiens
  misc_RNA (1)...(19): siRNA sense strand
gagcagcagugggacaaga

SEQ ID NO: 827340 - RNA, 19 nt, Homo sapiens
  misc_RNA (1)...(19): siRNA sense strand
gagacacguccauuaauga

SEQ ID NO: 827341 - RNA, 19 nt, Homo sapiens
  misc_RNA (1)...(19): siRNA sense strand
gcaaaucuggcugagcaua

SEQ ID NO: 827342 - RNA, 19 nt, Homo sapiens
  misc_RNA (1)...(19): siRNA sense strand
gaaaugcaacagaugaauc

SEQ ID NO: 827343 - RNA, 19 nt, Homo sapiens
  misc_RNA (1)...(19): siRNA sense strand
ggaaagaaagccuaaugag

SEQ ID NO: 827344 - RNA, 19 nt, Homo sapiens
  misc_RNA (1)...(19): siRNA sense strand
ccagaaaugcaacagauga

SEQ ID NO: 827345 - RNA, 19 nt, Homo sapiens
  misc_RNA (1)...(19): siRNA sense strand
agcaagagguguuauuaga

SEQ ID NO: 827346 - RNA, 19 nt, Homo sapiens
  misc_RNA (1)...(19): siRNA sense strand
uucaguaccuugauccaua

SEQ ID NO: 827347 - RNA, 19 nt, Homo sapiens
  misc_RNA (1)...(19): siRNA sense strand
uuucuuaucugccacauuc

SEQ ID NO: 827348 - RNA, 19 nt, Homo sapiens
  misc_RNA (1)...(19): siRNA sense strand
ggagaagugaugaagaaga

SEQ ID NO: 827349 - RNA, 19 nt, Homo sapiens
  misc_RNA (1)...(19): siRNA sense strand
acagaugaaucccuacgaa

SEQ ID NO: 827350 - RNA, 19 nt, Homo sapiens
  misc_RNA (1)...(19): siRNA sense strand
cgacgaaggcucgaugaaa

SEQ ID NO: 827351 - RNA, 19 nt, Homo sapiens
  misc_RNA (1)...(19): siRNA sense strand
ggacaagaagcuuccugaa

SEQ ID NO: 827352 - RNA, 19 nt, Homo sapiens
  misc_RNA (1)...(19): siRNA sense strand
caaugaagccaccaucuca

SEQ ID NO: 827353 - RNA, 19 nt, Homo sapiens
  misc_RNA (1)...(19): siRNA sense strand
gcuaccuucucuccaauga

SEQ ID NO: 827354 - RNA, 19 nt, Homo sapiens
  misc_RNA (1)...(19): siRNA sense strand
uuagaaagccaaagucaga

SEQ ID NO: 827355 - RNA, 19 nt, Homo sapiens
  misc_RNA (1)...(19): siRNA sense strand
cuacaauggugaacaacug

SEQ ID NO: 827356 - RNA, 19 nt, Homo sapiens
  misc_RNA (1)...(19): siRNA sense strand
caaguccugugccauuaug

SEQ ID NO: 827357 - RNA, 19 nt, Homo sapiens
  misc_RNA (1)...(19): siRNA sense strand
ccuaauaaccagaacagaa

SEQ ID NO: 827358 - RNA, 19 nt, Homo sapiens
  misc_RNA (1)...(19): siRNA sense strand
cagaagauguaguaaugca

SEQ ID NO: 827359 - RNA, 19 nt, Homo sapiens
  misc_RNA (1)...(19): siRNA sense strand
gccauuauguccacacaca

SEQ ID NO: 827360 - RNA, 19 nt, Homo sapiens
  misc_RNA (1)...(19): siRNA sense strand
caaaagccguuaacaaagu

SEQ ID NO: 827361 - RNA, 19 nt, Homo sapiens
  misc_RNA (1)...(19): siRNA sense strand
ugugaagaaugcugugaaa

SEQ ID NO: 827362 - RNA, 19 nt, Homo sapiens
  misc_RNA (1)...(19): siRNA sense strand
uagcaggaacgaugaguuu

SEQ ID NO: 827363 - RNA, 19 nt, Homo sapiens
  misc_RNA (1)...(19): siRNA sense strand
uucagaagauguaguaaug

SEQ ID NO: 827364 - RNA, 19 nt, Homo sapiens
  misc_RNA (1)...(19): siRNA sense strand
ccagugaugcugcugauga

SEQ ID NO: 827365 - RNA, 19 nt, Homo sapiens
  misc_RNA (1)...(19): siRNA sense strand
ccagauggacggaaagaug

SEQ ID NO: 827366 - RNA, 19 nt, Homo sapiens
  misc_RNA (1)...(19): siRNA sense strand
gcaguuuaucaccuucuua

SEQ ID NO: 827367 - RNA, 19 nt, Homo sapiens
  misc_RNA (1)...(19): siRNA sense strand
uuggagaagugaugaagaa

SEQ ID NO: 827368 - RNA, 19 nt, Homo sapiens
  misc_RNA (1)...(19): siRNA sense strand
cuacgaaggagguugauug

SEQ ID NO: 827369 - RNA, 19 nt, Homo sapiens
  misc_RNA (1)...(19): siRNA sense strand
guccagaaaugcaacagau

SEQ ID NO: 827370 - RNA, 19 nt, Homo sapiens
  misc_RNA (1)...(19): siRNA sense strand
gagagccuguggaguguag

SEQ ID NO: 827371 - RNA, 19 nt, Homo sapiens
  misc_RNA (1)...(19): siRNA sense strand
gaugaaucccuacgaagga

SEQ ID NO: 827372 - RNA, 19 nt, Homo sapiens
  misc_RNA (1)...(19): siRNA sense strand
uuuaucaccuucuuacaga

SEQ ID NO: 827373 - RNA, 19 nt, Homo sapiens
  misc_RNA (1)...(19): siRNA sense strand
gcugagagugccacauauu

SEQ ID NO: 827374 - RNA, 19 nt, Homo sapiens
  misc_RNA (1)...(19): siRNA sense strand
ucccagacaucuugauaau

SEQ ID NO: 827375 - RNA, 19 nt, Homo sapiens
  misc_RNA (1)...(19): siRNA sense strand
aaaucuggcugagcauauu

SEQ ID NO: 827376 - RNA, 19 nt, Homo sapiens
  misc_RNA (1)...(19): siRNA sense strand
uagcaaguccugugccauu

SEQ ID NO: 827377 - RNA, 19 nt, Homo sapiens
  misc_RNA (1)...(19): siRNA sense strand
guuggaagauguuguuacu

SEQ ID NO: 827378 - RNA, 19 nt, Homo sapiens
  misc_RNA (1)...(19): siRNA sense strand
agucugccaugaaacagua

SEQ ID NO: 827379 - RNA, 19 nt, Homo sapiens
  misc_RNA (1)...(19): siRNA sense strand
agaagaagcugcaggaaua

SEQ ID NO: 827380 - RNA, 19 nt, Homo sapiens
  misc_RNA (1)...(19): siRNA sense strand
gaagguggguucaguagaa

SEQ ID NO: 827381 - RNA, 19 nt, Homo sapiens
  misc_RNA (1)...(19): siRNA sense strand
gaauaccgggucuuaauua

SEQ ID NO: 827382 - RNA, 19 nt, Homo sapiens
  misc_RNA (1)...(19): siRNA sense strand
cgacagggcuuucccauca

SEQ ID NO: 827383 - RNA, 19 nt, Homo sapiens
  misc_RNA (1)...(19): siRNA sense strand
cuaaccagcucuauuauga

SEQ ID NO: 827384 - RNA, 19 nt, Homo sapiens
  misc_RNA (1)...(19): siRNA sense strand
gaagggcccugauggcuau

SEQ ID NO: 827385 - RNA, 19 nt, Homo sapiens
  misc_RNA (1)...(19): siRNA sense strand
cggcaagacugucacguua

SEQ ID NO: 827386 - RNA, 19 nt, Homo sapiens
  misc_RNA (1)...(19): siRNA sense strand
gcuaugaccuggaguuaag

SEQ ID NO: 827387 - RNA, 19 nt, Homo sapiens
  misc_RNA (1)...(19): siRNA sense strand
ggaaacagguggagaaaau

SEQ ID NO: 827388 - RNA, 19 nt, Homo sapiens
  misc_RNA (1)...(19): siRNA sense strand
gcccaaagcccacaucuug

SEQ ID NO: 827389 - RNA, 19 nt, Homo sapiens
  misc_RNA (1)...(19): siRNA sense strand
gcaggaauaccgggucuua

SEQ ID NO: 827390 - RNA, 19 nt, Homo sapiens
  misc_RNA (1)...(19): siRNA sense strand
gcaagacugucacguuagu

SEQ ID NO: 827391 - RNA, 19 nt, Homo sapiens
  misc_RNA (1)...(19): siRNA sense strand
ggaauaccgggucuuaauu

SEQ ID NO: 827392 - RNA, 19 nt, Homo sapiens
  misc_RNA (1)...(19): siRNA sense strand
ggucagauaucagcaaaca

SEQ ID NO: 827393 - RNA, 19 nt, Homo sapiens
  misc_RNA (1)...(19): siRNA sense strand
gcagcuggaucuggacuuu

SEQ ID NO: 827394 - RNA, 19 nt, Homo sapiens
  misc_RNA (1)...(19): siRNA sense strand
ccaguuugcuuucuacaau

SEQ ID NO: 827395 - RNA, 19 nt, Homo sapiens
  misc_RNA (1)...(19): siRNA sense strand
ggagucggguucagaagga

SEQ ID NO: 827396 - RNA, 19 nt, Homo sapiens
  misc_RNA (1)...(19): siRNA sense strand
gggcaaagaugagcgugaa

SEQ ID NO: 827397 - RNA, 19 nt, Homo sapiens
  misc_RNA (1)...(19): siRNA sense strand
gccaugaggcacauuguua

SEQ ID NO: 827398 - RNA, 19 nt, Homo sapiens
  misc_RNA (1)...(19): siRNA sense strand
ugacagggcugaguaucuu

SEQ ID NO: 827399 - RNA, 19 nt, Homo sapiens
  misc_RNA (1)...(19): siRNA sense strand
gacccugacuggaaaguau

SEQ ID NO: 827400 - RNA, 19 nt, Homo sapiens
  misc_RNA (1)...(19): siRNA sense strand
cuaaggagaucgcagagau

SEQ ID NO: 827401 - RNA, 19 nt, Homo sapiens
  misc_RNA (1)...(19): siRNA sense strand
gcaacagggacagaauuua

SEQ ID NO: 827402 - RNA, 19 nt, Homo sapiens
  misc_RNA (1)...(19): siRNA sense strand
acaacucccuguacaagaa

SEQ ID NO: 827403 - RNA, 19 nt, Homo sapiens
  misc_RNA (1)...(19): siRNA sense strand
uagcagggcugauggaagu

SEQ ID NO: 827404 - RNA, 19 nt, Homo sapiens
  misc_RNA (1)...(19): siRNA sense strand
gacgugcgguucccagaaa

SEQ ID NO: 827405 - RNA, 19 nt, Homo sapiens
  misc_RNA (1)...(19): siRNA sense strand
caacagcccauccuucuuc

SEQ ID NO: 827406 - RNA, 19 nt, Homo sapiens
  misc_RNA (1)...(19): siRNA sense strand
cccaagagguucaauguag

SEQ ID NO: 827407 - RNA, 19 nt, Homo sapiens
  misc_RNA (1)...(19): siRNA sense strand
gaaaguauuccuggaguuc

SEQ ID NO: 827408 - RNA, 19 nt, Homo sapiens
  misc_RNA (1)...(19): siRNA sense strand
cgagaugggcagcuccuua

SEQ ID NO: 827409 - RNA, 19 nt, Homo sapiens
  misc_RNA (1)...(19): siRNA sense strand
gugaagcacuugcccaaag

SEQ ID NO: 827410 - RNA, 19 nt, Homo sapiens
  misc_RNA (1)...(19): siRNA sense strand
ggaauuggaccgugucaag

SEQ ID NO: 827411 - RNA, 19 nt, Homo sapiens
  misc_RNA (1)...(19): siRNA sense strand
ugaaguggaggaacuauga

SEQ ID NO: 827412 - RNA, 19 nt, Homo sapiens
  misc_RNA (1)...(19): siRNA sense strand
gaccuggaguuaaguaugg

SEQ ID NO: 827413 - RNA, 19 nt, Homo sapiens
  misc_RNA (1)...(19): siRNA sense strand
agaaggagccggcacauuc

SEQ ID NO: 827414 - RNA, 19 nt, Homo sapiens
  misc_RNA (1)...(19): siRNA sense strand
ucacacacaucuucaucga

SEQ ID NO: 827415 - RNA, 19 nt, Homo sapiens
  misc_RNA (1)...(19): siRNA sense strand
ccaugacccugacuggaaa

SEQ ID NO: 827416 - RNA, 19 nt, Homo sapiens
  misc_RNA (1)...(19): siRNA sense strand
gccaguguuucgagaguuu

SEQ ID NO: 827417 - RNA, 19 nt, Homo sapiens
  misc_RNA (1)...(19): siRNA sense strand
gagaugggcagcuccuuau

SEQ ID NO: 827418 - RNA, 19 nt, Homo sapiens
  misc_RNA (1)...(19): siRNA sense strand
aaucuggguuuccuuaaga

SEQ ID NO: 827419 - RNA, 19 nt, Homo sapiens
  misc_RNA (1)...(19): siRNA sense strand
gcauggagccugagagucu

SEQ ID NO: 827420 - RNA, 19 nt, Homo sapiens
  misc_RNA (1)...(19): siRNA sense strand
gcaacugggacgcaaagaa

SEQ ID NO: 827421 - RNA, 19 nt, Homo sapiens
  misc_RNA (1)...(19): siRNA sense strand
ccucagaugugaaacucaa

SEQ ID NO: 827422 - RNA, 19 nt, Homo sapiens
  misc_RNA (1)...(19): siRNA sense strand
gcccaugacucccuucaag

SEQ ID NO: 827423 - RNA, 19 nt, Homo sapiens
  misc_RNA (1)...(19): siRNA sense strand
cuacauugcccgcuucuug

SEQ ID NO: 827424 - RNA, 19 nt, Homo sapiens
  misc_RNA (1)...(19): siRNA sense strand
gaacuccauguccauugua

SEQ ID NO: 827425 - RNA, 19 nt, Homo sapiens
  misc_RNA (1)...(19): siRNA sense strand
gagcggcugcggaccauuu

SEQ ID NO: 827426 - RNA, 19 nt, Homo sapiens
  misc_RNA (1)...(19): siRNA sense strand
gaaugaagcuggggucaga

SEQ ID NO: 827427 - RNA, 19 nt, Homo sapiens
  misc_RNA (1)...(19): siRNA sense strand
gagccagaguggaggaaug

SEQ ID NO: 827428 - RNA, 19 nt, Homo sapiens
  misc_RNA (1)...(19): siRNA sense strand
gaagaggcugccacaguga

SEQ ID NO: 827429 - RNA, 19 nt, Homo sapiens
  misc_RNA (1)...(19): siRNA sense strand
caauuaagcagguggugaa

SEQ ID NO: 827430 - RNA, 19 nt, Homo sapiens
  misc_RNA (1)...(19): siRNA sense strand
gcagauggagcaugauauc

SEQ ID NO: 827431 - RNA, 19 nt, Homo sapiens
  misc_RNA (1)...(19): siRNA sense strand
ggcggaacccagucuguua

SEQ ID NO: 827432 - RNA, 19 nt, Homo sapiens
  misc_RNA (1)...(19): siRNA sense strand
cagcaaacaccacaaguca

SEQ ID NO: 827433 - RNA, 19 nt, Homo sapiens
  misc_RNA (1)...(19): siRNA sense strand
caacagggacagaauuuac

SEQ ID NO: 827434 - RNA, 19 nt, Homo sapiens
  misc_RNA (1)...(19): siRNA sense strand
ccaagcugcuccgcaacua

SEQ ID NO: 827435 - RNA, 19 nt, Homo sapiens
  misc_RNA (1)...(19): siRNA sense strand
gcaaacaccacaagucacu

SEQ ID NO: 827436 - RNA, 19 nt, Homo sapiens
  misc_RNA (1)...(19): siRNA sense strand
ccaaggcccugcucaucau

SEQ ID NO: 827437 - RNA, 19 nt, Homo sapiens
  misc_RNA (1)...(19): siRNA sense strand
caucacauauaagggcuuu

SEQ ID NO: 827438 - RNA, 19 nt, Homo sapiens
  misc_RNA (1)...(19): siRNA sense strand
uggaggaacugcagaugga

SEQ ID NO: 827439 - RNA, 19 nt, Homo sapiens
  misc_RNA (1)...(19): siRNA sense strand
gauagaggaaggagagaga

SEQ ID NO: 827440 - RNA, 19 nt, Homo sapiens
  misc_RNA (1)...(19): siRNA sense strand
gcacagcugaagcccauga

SEQ ID NO: 827441 - RNA, 19 nt, Homo sapiens
  misc_RNA (1)...(19): siRNA sense strand
uagccaagaucuuuuauga

SEQ ID NO: 827442 - RNA, 19 nt, Homo sapiens
  misc_RNA (1)...(19): siRNA sense strand
ggacuuuaaucuggguuuc

SEQ ID NO: 827443 - RNA, 19 nt, Homo sapiens
  misc_RNA (1)...(19): siRNA sense strand
caacugggacgcaaagaag

SEQ ID NO: 827444 - RNA, 19 nt, Homo sapiens
  misc_RNA (1)...(19): siRNA sense strand
gacuggacauggagacaga

SEQ ID NO: 827445 - RNA, 19 nt, Homo sapiens
  misc_RNA (1)...(19): siRNA sense strand
uggaugggcugaccuucaa

SEQ ID NO: 827446 - RNA, 19 nt, Homo sapiens
  misc_RNA (1)...(19): siRNA sense strand
caugauauccggcacuaug

SEQ ID NO: 827447 - RNA, 19 nt, Homo sapiens
  misc_RNA (1)...(19): siRNA sense strand
gccaagaucuuuuaugaca

SEQ ID NO: 827448 - RNA, 19 nt, Homo sapiens
  misc_RNA (1)...(19): siRNA sense strand
gggacagaauuuacugcaa

SEQ ID NO: 827449 - RNA, 19 nt, Homo sapiens
  misc_RNA (1)...(19): siRNA sense strand
gccaugacccugacuggaa

SEQ ID NO: 827450 - RNA, 19 nt, Homo sapiens
  misc_RNA (1)...(19): siRNA sense strand
caaugaagaccaggaguug

SEQ ID NO: 827451 - RNA, 19 nt, Homo sapiens
  misc_RNA (1)...(19): siRNA sense strand
uuccuaaccagcucuauua

SEQ ID NO: 827452 - RNA, 19 nt, Homo sapiens
  misc_RNA (1)...(19): siRNA sense strand
uuaagcagguggugaagca

SEQ ID NO: 827453 - RNA, 19 nt, Homo sapiens
  misc_RNA (1)...(19): siRNA sense strand
gaccaccuguuugcccuuu

SEQ ID NO: 827454 - RNA, 19 nt, Homo sapiens
  misc_RNA (1)...(19): siRNA sense strand
gccggcacauucuacauug

SEQ ID NO: 827455 - RNA, 19 nt, Homo sapiens
  misc_RNA (1)...(19): siRNA sense strand
ugaaugcuaugaacuccau

SEQ ID NO: 827456 - RNA, 19 nt, Homo sapiens
  misc_RNA (1)...(19): siRNA sense strand
gcugauggaaguaaaggaa

SEQ ID NO: 827457 - RNA, 19 nt, Homo sapiens
  misc_RNA (1)...(19): siRNA sense strand
gggcuaugaccuggaguua

SEQ ID NO: 827458 - RNA, 19 nt, Homo sapiens
  misc_RNA (1)...(19): siRNA sense strand
ugaacuccauguccauugu

SEQ ID NO: 827459 - RNA, 19 nt, Homo sapiens
  misc_RNA (1)...(19): siRNA sense strand
gaggaacuaugaggugaag

SEQ ID NO: 827460 - RNA, 19 nt, Homo sapiens
  misc_RNA (1)...(19): siRNA sense strand
ggagguuccuggagugacu

SEQ ID NO: 827461 - RNA, 19 nt, Homo sapiens
  misc_RNA (1)...(19): siRNA sense strand
gaaggagccggcacauucu

SEQ ID NO: 827462 - RNA, 19 nt, Homo sapiens
  misc_RNA (1)...(19): siRNA sense strand
gggcuuucccaucaucuuu

SEQ ID NO: 827463 - RNA, 19 nt, Homo sapiens
  misc_RNA (1)...(19): siRNA sense strand
uuaauuaccacccucauca

SEQ ID NO: 827464 - RNA, 19 nt, Homo sapiens
  misc_RNA (1)...(19): siRNA sense strand
gggaacaaguaucuucacu

SEQ ID NO: 827465 - RNA, 19 nt, Homo sapiens
  misc_RNA (1)...(19): siRNA sense strand
cugagagucugguagcuau

SEQ ID NO: 827466 - RNA, 19 nt, Homo sapiens
  misc_RNA (1)...(19): siRNA sense strand
ucacuucacacacaucuuc

SEQ ID NO: 827467 - RNA, 19 nt, Homo sapiens
  misc_RNA (1)...(19): siRNA sense strand
caugguaccugaggacauc

SEQ ID NO: 827468 - RNA, 19 nt, Homo sapiens
  misc_RNA (1)...(19): siRNA sense strand
ccaagacucgggucagguu

SEQ ID NO: 827469 - RNA, 19 nt, Homo sapiens
  misc_RNA (1)...(19): siRNA sense strand
agcuggaucuggacuuuaa

SEQ ID NO: 827470 - RNA, 19 nt, Homo sapiens
  misc_RNA (1)...(19): siRNA sense strand
gcagggacauccgcauggu

SEQ ID NO: 827471 - RNA, 19 nt, Homo sapiens
  misc_RNA (1)...(19): siRNA sense strand
guggaggaaugagcucuga

SEQ ID NO: 827472 - RNA, 19 nt, Homo sapiens
  misc_RNA (1)...(19): siRNA sense strand
gccaaggcccugcucauca

SEQ ID NO: 827473 - RNA, 19 nt, Homo sapiens
  misc_RNA (1)...(19): siRNA sense strand
uaaucuggguuuccuuaag

SEQ ID NO: 827474 - RNA, 19 nt, Homo sapiens
  misc_RNA (1)...(19): siRNA sense strand
uugcaaaucuggccuacgu

SEQ ID NO: 827475 - RNA, 19 nt, Homo sapiens
  misc_RNA (1)...(19): siRNA sense strand
gcaacagcccauccuucuu

SEQ ID NO: 827476 - RNA, 19 nt, Homo sapiens
  misc_RNA (1)...(19): siRNA sense strand
gcagggcugauggaaguaa

SEQ ID NO: 827477 - RNA, 19 nt, Homo sapiens
  misc_RNA (1)...(19): siRNA sense strand
cggcugcggaccauuuaua

SEQ ID NO: 827478 - RNA, 19 nt, Homo sapiens
  misc_RNA (1)...(19): siRNA sense strand
gggccugucucugcaagug

SEQ ID NO: 827479 - RNA, 19 nt, Homo sapiens
  misc_RNA (1)...(19): siRNA sense strand
gagagaagcuguacaaaug

SEQ ID NO: 827480 - RNA, 19 nt, Homo sapiens
  misc_RNA (1)...(19): siRNA sense strand
gagagaaacuguacaaaug

SEQ ID NO: 827481 - RNA, 19 nt, Homo sapiens
  misc_RNA (1)...(19): siRNA sense strand
guacaaaugugaagaaugu

SEQ ID NO: 827482 - RNA, 19 nt, Homo sapiens
  misc_RNA (1)...(19): siRNA sense strand
gaagagacaugagauggua

SEQ ID NO: 827483 - RNA, 19 nt, Homo sapiens
  misc_RNA (1)...(19): siRNA sense strand
gacaugagaugguagcuaa

SEQ ID NO: 827484 - RNA, 19 nt, Homo sapiens
  misc_RNA (1)...(19): siRNA sense strand
gaaauucccuacaaaugug

SEQ ID NO: 827485 - RNA, 19 nt, Homo sapiens
  misc_RNA (1)...(19): siRNA sense strand
ggacuuaaccaauguuuga

SEQ ID NO: 827486 - RNA, 19 nt, Homo sapiens
  misc_RNA (1)...(19): siRNA sense strand
gaaagugacccuaagaaga

SEQ ID NO: 827487 - RNA, 19 nt, Homo sapiens
  misc_RNA (1)...(19): siRNA sense strand
cuacaaaugugaagaaugu

SEQ ID NO: 827488 - RNA, 19 nt, Homo sapiens
  misc_RNA (1)...(19): siRNA sense strand
cuacaaaugugaagaaugu

SEQ ID NO: 827489 - RNA, 19 nt, Homo sapiens
  misc_RNA (1)...(19): siRNA sense strand
cuacaaaugugaagaaugu

SEQ ID NO: 827490 - RNA, 19 nt, Homo sapiens
  misc_RNA (1)...(19): siRNA sense strand
cuacaaaugugaagcauau

SEQ ID NO: 827491 - RNA, 19 nt, Homo sapiens
  misc_RNA (1)...(19): siRNA sense strand
gagcagaacauaagagauu

SEQ ID NO: 827492 - RNA, 19 nt, Homo sapiens
  misc_RNA (1)...(19): siRNA sense strand
gaagagaaacccuacaaau

SEQ ID NO: 827493 - RNA, 19 nt, Homo sapiens
  misc_RNA (1)...(19): siRNA sense strand
ccacauaagacaauucaua

SEQ ID NO: 827494 - RNA, 19 nt, Homo sapiens
  misc_RNA (1)...(19): siRNA sense strand
gagagaaacccuacaaaug

SEQ ID NO: 827495 - RNA, 19 nt, Homo sapiens
  misc_RNA (1)...(19): siRNA sense strand
ccucaaagcuuacugaaca

SEQ ID NO: 827496 - RNA, 19 nt, Homo sapiens
  misc_RNA (1)...(19): siRNA sense strand
aaccagaccucacaccuua

SEQ ID NO: 827497 - RNA, 19 nt, Homo sapiens
  misc_RNA (1)...(19): siRNA sense strand
acaccuaacucaacauaaa

SEQ ID NO: 827498 - RNA, 19 nt, Homo sapiens
  misc_RNA (1)...(19): siRNA sense strand
gagaaacucuacaaaugug

SEQ ID NO: 827499 - RNA, 19 nt, Homo sapiens
  misc_RNA (1)...(19): siRNA sense strand
ccucaacgcuuacuaaaca

SEQ ID NO: 827500 - RNA, 19 nt, Homo sapiens
  misc_RNA (1)...(19): siRNA sense strand
uggcaaagcuaaccuauca

SEQ ID NO: 827501 - RNA, 19 nt, Homo sapiens
  misc_RNA (1)...(19): siRNA sense strand
gagaaacccuacaaaugug

SEQ ID NO: 827502 - RNA, 19 nt, Homo sapiens
  misc_RNA (1)...(19): siRNA sense strand
gagaaacccuacaaaugug

SEQ ID NO: 827503 - RNA, 19 nt, Homo sapiens
  misc_RNA (1)...(19): siRNA sense strand
gcacaaaggagauuauagu

SEQ ID NO: 827504 - RNA, 19 nt, Homo sapiens
  misc_RNA (1)...(19): siRNA sense strand
agagaaacguuaugaaugu

SEQ ID NO: 827505 - RNA, 19 nt, Homo sapiens
  misc_RNA (1)...(19): siRNA sense strand
ucaaauagacacaagauga

SEQ ID NO: 827506 - RNA, 19 nt, Homo sapiens
  misc_RNA (1)...(19): siRNA sense strand
ggagagaaacuguacaaau

SEQ ID NO: 827507 - RNA, 19 nt, Homo sapiens
  misc_RNA (1)...(19): siRNA sense strand
ggagagaaacguuaugaau

SEQ ID NO: 827508 - RNA, 19 nt, Homo sapiens
  misc_RNA (1)...(19): siRNA sense strand
ccucaacccuuaauaaaca

SEQ ID NO: 827509 - RNA, 19 nt, Homo sapiens
  misc_RNA (1)...(19): siRNA sense strand
ggagagaaacccuacaaau

SEQ ID NO: 827510 - RNA, 19 nt, Homo sapiens
  misc_RNA (1)...(19): siRNA sense strand
ggagagaagcuguacaaau

SEQ ID NO: 827511 - RNA, 19 nt, Homo sapiens
  misc_RNA (1)...(19): siRNA sense strand
gagagaaacguuaugaaug

SEQ ID NO: 827512 - RNA, 19 nt, Homo sapiens
  misc_RNA (1)...(19): siRNA sense strand
cuacaaaugugagaaaugu

SEQ ID NO: 827513 - RNA, 19 nt, Homo sapiens
  misc_RNA (1)...(19): siRNA sense strand
aaagugugguugaguguaa

SEQ ID NO: 827514 - RNA, 19 nt, Homo sapiens
  misc_RNA (1)...(19): siRNA sense strand
gaaacguuaugaaugugaa

SEQ ID NO: 827515 - RNA, 19 nt, Homo sapiens
  misc_RNA (1)...(19): siRNA sense strand
uaaagaaugugguaaagcu

SEQ ID NO: 827516 - RNA, 19 nt, Homo sapiens
  misc_RNA (1)...(19): siRNA sense strand
gagaagcuguacaaaugug

SEQ ID NO: 827517 - RNA, 19 nt, Homo sapiens
  misc_RNA (1)...(19): siRNA sense strand
gagaauucauacuggagaa

SEQ ID NO: 827518 - RNA, 19 nt, Homo sapiens
  misc_RNA (1)...(19): siRNA sense strand
agagaaacccuacaaaugu

SEQ ID NO: 827519 - RNA, 19 nt, Homo sapiens
  misc_RNA (1)...(19): siRNA sense strand
agagaaacccuacaaaugu

SEQ ID NO: 827520 - RNA, 19 nt, Homo sapiens
  misc_RNA (1)...(19): siRNA sense strand
agaaauguguuagagcuuu

SEQ ID NO: 827521 - RNA, 19 nt, Homo sapiens
  misc_RNA (1)...(19): siRNA sense strand
gaagaaugcggcaaagcuu

SEQ ID NO: 827522 - RNA, 19 nt, Homo sapiens
  misc_RNA (1)...(19): siRNA sense strand
ccucacaccuuauuagaca

SEQ ID NO: 827523 - RNA, 19 nt, Homo sapiens
  misc_RNA (1)...(19): siRNA sense strand
caucgacccuuacuacaca

SEQ ID NO: 827524 - RNA, 19 nt, Homo sapiens
  misc_RNA (1)...(19): siRNA sense strand
aaaacuaccuugagcaaaa

SEQ ID NO: 827525 - RNA, 19 nt, Homo sapiens
  misc_RNA (1)...(19): siRNA sense strand
uaacucauccucaaaccuu

SEQ ID NO: 827526 - RNA, 19 nt, Homo sapiens
  misc_RNA (1)...(19): siRNA sense strand
gcauauggaagagccuuua

SEQ ID NO: 827527 - RNA, 19 nt, Homo sapiens
  misc_RNA (1)...(19): siRNA sense strand
gguccucaacccuuaauaa

SEQ ID NO: 827528 - RNA, 19 nt, Homo sapiens
  misc_RNA (1)...(19): siRNA sense strand
gcaaagcuaaccuaucauc

SEQ ID NO: 827529 - RNA, 19 nt, Homo sapiens
  misc_RNA (1)...(19): siRNA sense strand
gaagaauguggcaaagcua

SEQ ID NO: 827530 - RNA, 19 nt, Homo sapiens
  misc_RNA (1)...(19): siRNA sense strand
aagagaaacccuacaaaug

SEQ ID NO: 827531 - RNA, 19 nt, Homo sapiens
  misc_RNA (1)...(19): siRNA sense strand
cauaagagaauucauacug

SEQ ID NO: 827532 - RNA, 19 nt, Homo sapiens
  misc_RNA (1)...(19): siRNA sense strand
cauaagagaauucauacug

SEQ ID NO: 827533 - RNA, 19 nt, Homo sapiens
  misc_RNA (1)...(19): siRNA sense strand
aaagugacccuaagaagau

SEQ ID NO: 827534 - RNA, 19 nt, Homo sapiens
  misc_RNA (1)...(19): siRNA sense strand
agaaaaggcuguaaaagug

SEQ ID NO: 827535 - RNA, 19 nt, Homo sapiens
  misc_RNA (1)...(19): siRNA sense strand
gagauuauaguggacuuaa

SEQ ID NO: 827536 - RNA, 19 nt, Homo sapiens
  misc_RNA (1)...(19): siRNA sense strand
gagaugguagcuaaacauu

SEQ ID NO: 827537 - RNA, 19 nt, Homo sapiens
  misc_RNA (1)...(19): siRNA sense strand
caacgcuuacuaaacauaa

SEQ ID NO: 827538 - RNA, 19 nt, Homo sapiens
  misc_RNA (1)...(19): siRNA sense strand
caaagcuuacugaacauaa

SEQ ID NO: 827539 - RNA, 19 nt, Homo sapiens
  misc_RNA (1)...(19): siRNA sense strand
agacacaagaugagacaua

SEQ ID NO: 827540 - RNA, 19 nt, Homo sapiens
  misc_RNA (1)...(19): siRNA sense strand
uaaagaaugucgcaaaaca

SEQ ID NO: 827541 - RNA, 19 nt, Homo sapiens
  misc_RNA (1)...(19): siRNA sense strand
uggcaaagcuuuuaacuca

SEQ ID NO: 827542 - RNA, 19 nt, Homo sapiens
  misc_RNA (1)...(19): siRNA sense strand
ucucacaccuugcuauaca

SEQ ID NO: 827543 - RNA, 19 nt, Homo sapiens
  misc_RNA (1)...(19): siRNA sense strand
gagaaacguuaugaaugug

SEQ ID NO: 827544 - RNA, 19 nt, Homo sapiens
  misc_RNA (1)...(19): siRNA sense strand
gaaacucuacaaaugugaa

SEQ ID NO: 827545 - RNA, 19 nt, Homo sapiens
  misc_RNA (1)...(19): siRNA sense strand
ugaagaauguggcaaagcu

SEQ ID NO: 827546 - RNA, 19 nt, Homo sapiens
  misc_RNA (1)...(19): siRNA sense strand
ugaagaauguggcaaagcu

SEQ ID NO: 827547 - RNA, 19 nt, Homo sapiens
  misc_RNA (1)...(19): siRNA sense strand
gaugagacauacugaaaau

SEQ ID NO: 827548 - RNA, 19 nt, Homo sapiens
  misc_RNA (1)...(19): siRNA sense strand
gaaauguguuagagcuuuu

SEQ ID NO: 827549 - RNA, 19 nt, Homo sapiens
  misc_RNA (1)...(19): siRNA sense strand
ucacaccuaacucaacaua

SEQ ID NO: 827550 - RNA, 19 nt, Homo sapiens
  misc_RNA (1)...(19): siRNA sense strand
auaguggacuuaaccaaug

SEQ ID NO: 827551 - RNA, 19 nt, Homo sapiens
  misc_RNA (1)...(19): siRNA sense strand
gaaugugacaaggccuuua

SEQ ID NO: 827552 - RNA, 19 nt, Homo sapiens
  misc_RNA (1)...(19): siRNA sense strand
aaccuguccucaacgcuua

SEQ ID NO: 827553 - RNA, 19 nt, Homo sapiens
  misc_RNA (1)...(19): siRNA sense strand
gacacaagaugagacauac

SEQ ID NO: 827554 - RNA, 19 nt, Homo sapiens
  misc_RNA (1)...(19): siRNA sense strand
ggccagagcagaacauaag

SEQ ID NO: 827555 - RNA, 19 nt, Homo sapiens
  misc_RNA (1)...(19): siRNA sense strand
gcaaagcuuuuaacucauc

SEQ ID NO: 827556 - RNA, 19 nt, Homo sapiens
  misc_RNA (1)...(19): siRNA sense strand
aagaugagacauacugaaa

SEQ ID NO: 827557 - RNA, 19 nt, Homo sapiens
  misc_RNA (1)...(19): siRNA sense strand
ggagauuauaguggacuua

SEQ ID NO: 827558 - RNA, 19 nt, Homo sapiens
  misc_RNA (1)...(19): siRNA sense strand
aaccagucaucgacccuua

SEQ ID NO: 827559 - RNA, 19 nt, Homo sapiens
  misc_RNA (1)...(19): siRNA sense strand
aaagcuaaccuaucaucaa

SEQ ID NO: 827560 - RNA, 19 nt, Homo sapiens
  misc_RNA (1)...(19): siRNA sense strand
caaauagacacaagaugag

SEQ ID NO: 827561 - RNA, 19 nt, Homo sapiens
  misc_RNA (1)...(19): siRNA sense strand
ccagaaagugacccuaaga

SEQ ID NO: 827562 - RNA, 19 nt, Homo sapiens
  misc_RNA (1)...(19): siRNA sense strand
gaagaauguggcaaagcuu

SEQ ID NO: 827563 - RNA, 19 nt, Homo sapiens
  misc_RNA (1)...(19): siRNA sense strand
guucucacaccuugcuaua

SEQ ID NO: 827564 - RNA, 19 nt, Homo sapiens
  misc_RNA (1)...(19): siRNA sense strand
cagaaagugacccuaagaa

SEQ ID NO: 827565 - RNA, 19 nt, Homo sapiens
  misc_RNA (1)...(19): siRNA sense strand
ucacaccuuauuagacaua

SEQ ID NO: 827566 - RNA, 19 nt, Homo sapiens
  misc_RNA (1)...(19): siRNA sense strand
guccucaacccuuaauaaa

SEQ ID NO: 827567 - RNA, 19 nt, Homo sapiens
  misc_RNA (1)...(19): siRNA sense strand
caagaugagacauacugaa

SEQ ID NO: 827568 - RNA, 19 nt, Homo sapiens
  misc_RNA (1)...(19): siRNA sense strand
gaccucacaccuuauuaga

SEQ ID NO: 827569 - RNA, 19 nt, Homo sapiens
  misc_RNA (1)...(19): siRNA sense strand
aaccuaucaucaacccuua

SEQ ID NO: 827570 - RNA, 19 nt, Homo sapiens
  misc_RNA (1)...(19): siRNA sense strand
aaaucguacuggagagaaa

SEQ ID NO: 827571 - RNA, 19 nt, Homo sapiens
  misc_RNA (1)...(19): siRNA sense strand
cagcacaaaggagauuaua

SEQ ID NO: 827572 - RNA, 19 nt, Homo sapiens
  misc_RNA (1)...(19): siRNA sense strand
acaccuugcuauacauaau

SEQ ID NO: 827573 - RNA, 19 nt, Homo sapiens
  misc_RNA (1)...(19): siRNA sense strand
ccucaaaacuuacugaaca

SEQ ID NO: 827574 - RNA, 19 nt, Homo sapiens
  misc_RNA (1)...(19): siRNA sense strand
ccagaccucacaccuuauu

SEQ ID NO: 827575 - RNA, 19 nt, Homo sapiens
  misc_RNA (1)...(19): siRNA sense strand
ucacaccuugcuauacaua

SEQ ID NO: 827576 - RNA, 19 nt, Homo sapiens
  misc_RNA (1)...(19): siRNA sense strand
ugaagagaaacccuacaaa

SEQ ID NO: 827577 - RNA, 19 nt, Homo sapiens
  misc_RNA (1)...(19): siRNA sense strand
caaaccuuacugcacauaa

SEQ ID NO: 827578 - RNA, 19 nt, Homo sapiens
  misc_RNA (1)...(19): siRNA sense strand
aagcuaaccuaucaucaac

SEQ ID NO: 827579 - RNA, 19 nt, Homo sapiens
  misc_RNA (1)...(19): siRNA sense strand
ggucuucgcccaggacuuu

SEQ ID NO: 827580 - RNA, 19 nt, Homo sapiens
  misc_RNA (1)...(19): siRNA sense strand
ggacuuuaccgccagugaa

SEQ ID NO: 827581 - RNA, 19 nt, Homo sapiens
  misc_RNA (1)...(19): siRNA sense strand
gcugcacccugcuaucuca

SEQ ID NO: 827582 - RNA, 19 nt, Homo sapiens
  misc_RNA (1)...(19): siRNA sense strand
gggagaggcugaggaacuc

SEQ ID NO: 827583 - RNA, 19 nt, Homo sapiens
  misc_RNA (1)...(19): siRNA sense strand
gaaggcugcacccugcuau

SEQ ID NO: 827584 - RNA, 19 nt, Homo sapiens
  misc_RNA (1)...(19): siRNA sense strand
caagucacgggaccgcuuu

SEQ ID NO: 827585 - RNA, 19 nt, Homo sapiens
  misc_RNA (1)...(19): siRNA sense strand
ccacugcaagggcaagaug

SEQ ID NO: 827586 - RNA, 19 nt, Homo sapiens
  misc_RNA (1)...(19): siRNA sense strand
gacuuuaccgccagugaau

SEQ ID NO: 827587 - RNA, 19 nt, Homo sapiens
  misc_RNA (1)...(19): siRNA sense strand
acagggagaggcugaggaa

SEQ ID NO: 827588 - RNA, 19 nt, Homo sapiens
  misc_RNA (1)...(19): siRNA sense strand
acaacaaccuguccuucau

SEQ ID NO: 827589 - RNA, 19 nt, Homo sapiens
  misc_RNA (1)...(19): siRNA sense strand
gaaaggccgagggauguug

SEQ ID NO: 827590 - RNA, 19 nt, Homo sapiens
  misc_RNA (1)...(19): siRNA sense strand
gcaacagcaucgccuucgu

SEQ ID NO: 827591 - RNA, 19 nt, Homo sapiens
  misc_RNA (1)...(19): siRNA sense strand
ucagcagccuccucuccaa

SEQ ID NO: 827592 - RNA, 19 nt, Homo sapiens
  misc_RNA (1)...(19): siRNA sense strand
caacaaccuguccuucauc

SEQ ID NO: 827593 - RNA, 19 nt, Homo sapiens
  misc_RNA (1)...(19): siRNA sense strand
cacaacaaccuguccuuca

SEQ ID NO: 827594 - RNA, 19 nt, Homo sapiens
  misc_RNA (1)...(19): siRNA sense strand
ggauguugguccugcuucu

SEQ ID NO: 827595 - RNA, 19 nt, Homo sapiens
  misc_RNA (1)...(19): siRNA sense strand
gguuucuccucgccucuug

SEQ ID NO: 827596 - RNA, 19 nt, Homo sapiens
  misc_RNA (1)...(19): siRNA sense strand
aacaaccuguccuucauca

SEQ ID NO: 827597 - RNA, 19 nt, Homo sapiens
  misc_RNA (1)...(19): siRNA sense strand
ccaccaccgugagcagguu

SEQ ID NO: 827598 - RNA, 19 nt, Homo sapiens
  misc_RNA (1)...(19): siRNA sense strand
cgaaaucgcgacuaucuua

SEQ ID NO: 827599 - RNA, 19 nt, Homo sapiens
  misc_RNA (1)...(19): siRNA sense strand
gcgcugaucgcaucgaauu

SEQ ID NO: 827600 - RNA, 19 nt, Homo sapiens
  misc_RNA (1)...(19): siRNA sense strand
ccacugcucuggugagucu

SEQ ID NO: 827601 - RNA, 19 nt, Homo sapiens
  misc_RNA (1)...(19): siRNA sense strand
gcaguuccgugcacucuac

SEQ ID NO: 827602 - RNA, 19 nt, Homo sapiens
  misc_RNA (1)...(19): siRNA sense strand
cggcauggacuacgaauug

SEQ ID NO: 827603 - RNA, 19 nt, Homo sapiens
  misc_RNA (1)...(19): siRNA sense strand
ccacgaacguuuggaggau

SEQ ID NO: 827604 - RNA, 19 nt, Homo sapiens
  misc_RNA (1)...(19): siRNA sense strand
caguggcccugucggcuaa

SEQ ID NO: 827605 - RNA, 19 nt, Homo sapiens
  misc_RNA (1)...(19): siRNA sense strand
ggcauggacuacgaauuga

SEQ ID NO: 827606 - RNA, 19 nt, Homo sapiens
  misc_RNA (1)...(19): siRNA sense strand
gcgcugaagcucaccaugu

SEQ ID NO: 827607 - RNA, 19 nt, Homo sapiens
  misc_RNA (1)...(19): siRNA sense strand
ggaggauacgcauuucguu

SEQ ID NO: 827608 - RNA, 19 nt, Homo sapiens
  misc_RNA (1)...(19): siRNA sense strand
gaaaucgcgacuaucuuag

SEQ ID NO: 827609 - RNA, 19 nt, Homo sapiens
  misc_RNA (1)...(19): siRNA sense strand
cacgaacguuuggaggaua

SEQ ID NO: 827610 - RNA, 19 nt, Homo sapiens
  misc_RNA (1)...(19): siRNA sense strand
gggcgcugaucgcaucgaa

SEQ ID NO: 827611 - RNA, 19 nt, Homo sapiens
  misc_RNA (1)...(19): siRNA sense strand
caucugguguggccaagca

SEQ ID NO: 827612 - RNA, 19 nt, Homo sapiens
  misc_RNA (1)...(19): siRNA sense strand
cuacgagguucgcuucaag

SEQ ID NO: 827613 - RNA, 19 nt, Homo sapiens
  misc_RNA (1)...(19): siRNA sense strand
uauccucggguuucaagua

SEQ ID NO: 827614 - RNA, 19 nt, Homo sapiens
  misc_RNA (1)...(19): siRNA sense strand
guuuggaggauacgcauuu

SEQ ID NO: 827615 - RNA, 19 nt, Homo sapiens
  misc_RNA (1)...(19): siRNA sense strand
gcauggacuacgaauugaa

SEQ ID NO: 827616 - RNA, 19 nt, Homo sapiens
  misc_RNA (1)...(19): siRNA sense strand
uaacggggaccugaauuua

SEQ ID NO: 827617 - RNA, 19 nt, Homo sapiens
  misc_RNA (1)...(19): siRNA sense strand
uggccaagcagauguauca

SEQ ID NO: 827618 - RNA, 19 nt, Homo sapiens
  misc_RNA (1)...(19): siRNA sense strand
gccaugaucugggacuucu

SEQ ID NO: 827619 - RNA, 19 nt, Homo sapiens
  misc_RNA (1)...(19): siRNA sense strand
ccauuugccacgaacguuu

SEQ ID NO: 827620 - RNA, 19 nt, Homo sapiens
  misc_RNA (1)...(19): siRNA sense strand
ucaugucgguggcagauac

SEQ ID NO: 827621 - RNA, 19 nt, Homo sapiens
  misc_RNA (1)...(19): siRNA sense strand
uaucuuagcuggggauguu

SEQ ID NO: 827622 - RNA, 19 nt, Homo sapiens
  misc_RNA (1)...(19): siRNA sense strand
ggauacgcauuucguucag

SEQ ID NO: 827623 - RNA, 19 nt, Homo sapiens
  misc_RNA (1)...(19): siRNA sense strand
ccagcaagcccaagauggu

SEQ ID NO: 827624 - RNA, 19 nt, Homo sapiens
  misc_RNA (1)...(19): siRNA sense strand
uugcuucccuugcucuaga

SEQ ID NO: 827625 - RNA, 19 nt, Homo sapiens
  misc_RNA (1)...(19): siRNA sense strand
ccuacgagguucgcuucaa

SEQ ID NO: 827626 - RNA, 19 nt, Homo sapiens
  misc_RNA (1)...(19): siRNA sense strand
cuagucgggucgaauguac

SEQ ID NO: 827627 - RNA, 19 nt, Homo sapiens
  misc_RNA (1)...(19): siRNA sense strand
caacuacgagggcgcugau

SEQ ID NO: 827628 - RNA, 19 nt, Homo sapiens
  misc_RNA (1)...(19): siRNA sense strand
cuggagcgcuacggccuaa

SEQ ID NO: 827629 - RNA, 19 nt, Homo sapiens
  misc_RNA (1)...(19): siRNA sense strand
ccaaacggcuuccccaaac

SEQ ID NO: 827630 - RNA, 19 nt, Homo sapiens
  misc_RNA (1)...(19): siRNA sense strand
gauacgcauuucguucagu

SEQ ID NO: 827631 - RNA, 19 nt, Homo sapiens
  misc_RNA (1)...(19): siRNA sense strand
ggccuauccucggguuuca

SEQ ID NO: 827632 - RNA, 19 nt, Homo sapiens
  misc_RNA (1)...(19): siRNA sense strand
guaacggggaccugaauuu

SEQ ID NO: 827633 - RNA, 19 nt, Homo sapiens
  misc_RNA (1)...(19): siRNA sense strand
cgcugaagcucaccauguc

SEQ ID NO: 827634 - RNA, 19 nt, Homo sapiens
  misc_RNA (1)...(19): siRNA sense strand
gcaauuggaugcaacauuu

SEQ ID NO: 827635 - RNA, 19 nt, Homo sapiens
  misc_RNA (1)...(19): siRNA sense strand
ggacauugaugguuuaauu

SEQ ID NO: 827636 - RNA, 19 nt, Homo sapiens
  misc_RNA (1)...(19): siRNA sense strand
gcaugucucugcuauauuu

SEQ ID NO: 827637 - RNA, 19 nt, Homo sapiens
  misc_RNA (1)...(19): siRNA sense strand
gaagauaucagcugcauug

SEQ ID NO: 827638 - RNA, 19 nt, Homo sapiens
  misc_RNA (1)...(19): siRNA sense strand
caggagagguguuauauga

SEQ ID NO: 827639 - RNA, 19 nt, Homo sapiens
  misc_RNA (1)...(19): siRNA sense strand
gaugugggaucuucgauuu

SEQ ID NO: 827640 - RNA, 19 nt, Homo sapiens
  misc_RNA (1)...(19): siRNA sense strand
gaaacaaguugacaagcuu

SEQ ID NO: 827641 - RNA, 19 nt, Homo sapiens
  misc_RNA (1)...(19): siRNA sense strand
ggaaugacccuccagcuuu

SEQ ID NO: 827642 - RNA, 19 nt, Homo sapiens
  misc_RNA (1)...(19): siRNA sense strand
ggaggaacauuuaauaucu

SEQ ID NO: 827643 - RNA, 19 nt, Homo sapiens
  misc_RNA (1)...(19): siRNA sense strand
gaaccaggcuugaaaauga

SEQ ID NO: 827644 - RNA, 19 nt, Homo sapiens
  misc_RNA (1)...(19): siRNA sense strand
gaacagacacuuucaccaa

SEQ ID NO: 827645 - RNA, 19 nt, Homo sapiens
  misc_RNA (1)...(19): siRNA sense strand
gaacagguccucagaaugg

SEQ ID NO: 827646 - RNA, 19 nt, Homo sapiens
  misc_RNA (1)...(19): siRNA sense strand
caagaaaccuauuccagau

SEQ ID NO: 827647 - RNA, 19 nt, Homo sapiens
  misc_RNA (1)...(19): siRNA sense strand
gaaauaccuuccagcaugu

SEQ ID NO: 827648 - RNA, 19 nt, Homo sapiens
  misc_RNA (1)...(19): siRNA sense strand
ggcagauccugaauuguua

SEQ ID NO: 827649 - RNA, 19 nt, Homo sapiens
  misc_RNA (1)...(19): siRNA sense strand
ccaauaagcugggugucua

SEQ ID NO: 827650 - RNA, 19 nt, Homo sapiens
  misc_RNA (1)...(19): siRNA sense strand
gaaugacccuccagcuuug

SEQ ID NO: 827651 - RNA, 19 nt, Homo sapiens
  misc_RNA (1)...(19): siRNA sense strand
ccgaaauccugcugucuua

SEQ ID NO: 827652 - RNA, 19 nt, Homo sapiens
  misc_RNA (1)...(19): siRNA sense strand
gaaaauaccuugaacuucu

SEQ ID NO: 827653 - RNA, 19 nt, Homo sapiens
  misc_RNA (1)...(19): siRNA sense strand
caacagacccucaaaccaa

SEQ ID NO: 827654 - RNA, 19 nt, Homo sapiens
  misc_RNA (1)...(19): siRNA sense strand
ggacaugaaucaccuaaaa

SEQ ID NO: 827655 - RNA, 19 nt, Homo sapiens
  misc_RNA (1)...(19): siRNA sense strand
gacuaaagcucaagaugga

SEQ ID NO: 827656 - RNA, 19 nt, Homo sapiens
  misc_RNA (1)...(19): siRNA sense strand
ggcuuuagcugcaguauug

SEQ ID NO: 827657 - RNA, 19 nt, Homo sapiens
  misc_RNA (1)...(19): siRNA sense strand
gaccaugcauacccacaua

SEQ ID NO: 827658 - RNA, 19 nt, Homo sapiens
  misc_RNA (1)...(19): siRNA sense strand
gaugaccgguuaccaguga

SEQ ID NO: 827659 - RNA, 19 nt, Homo sapiens
  misc_RNA (1)...(19): siRNA sense strand
gaccuuuguuuacaugaua

SEQ ID NO: 827660 - RNA, 19 nt, Homo sapiens
  misc_RNA (1)...(19): siRNA sense strand
gauccugaauuguuacuga

SEQ ID NO: 827661 - RNA, 19 nt, Homo sapiens
  misc_RNA (1)...(19): siRNA sense strand
gaggcaaacugguuacguu

SEQ ID NO: 827662 - RNA, 19 nt, Homo sapiens
  misc_RNA (1)...(19): siRNA sense strand
gaaagagauuguugagucu

SEQ ID NO: 827663 - RNA, 19 nt, Homo sapiens
  misc_RNA (1)...(19): siRNA sense strand
aagcacagaugguuuaaga

SEQ ID NO: 827664 - RNA, 19 nt, Homo sapiens
  misc_RNA (1)...(19): siRNA sense strand
cauagcagguggacaagaa

SEQ ID NO: 827665 - RNA, 19 nt, Homo sapiens
  misc_RNA (1)...(19): siRNA sense strand
cauaaugcauggaaauguu

SEQ ID NO: 827666 - RNA, 19 nt, Homo sapiens
  misc_RNA (1)...(19): siRNA sense strand
cauggcagauccugaauug

SEQ ID NO: 827667 - RNA, 19 nt, Homo sapiens
  misc_RNA (1)...(19): siRNA sense strand
uauaugaacuucccaccaa

SEQ ID NO: 827668 - RNA, 19 nt, Homo sapiens
  misc_RNA (1)...(19): siRNA sense strand
gaaguuaaaggaaguagau

SEQ ID NO: 827669 - RNA, 19 nt, Homo sapiens
  misc_RNA (1)...(19): siRNA sense strand
uagcugcaguauugacuua

SEQ ID NO: 827670 - RNA, 19 nt, Homo sapiens
  misc_RNA (1)...(19): siRNA sense strand
acacaguggugcuucgaua

SEQ ID NO: 827671 - RNA, 19 nt, Homo sapiens
  misc_RNA (1)...(19): siRNA sense strand
aaacacagccgccagaaga

SEQ ID NO: 827672 - RNA, 19 nt, Homo sapiens
  misc_RNA (1)...(19): siRNA sense strand
gaagguaaacuuugaggau

SEQ ID NO: 827673 - RNA, 19 nt, Homo sapiens
  misc_RNA (1)...(19): siRNA sense strand
ggagagguguuauaugaac

SEQ ID NO: 827674 - RNA, 19 nt, Homo sapiens
  misc_RNA (1)...(19): siRNA sense strand
uuacauaucuucugcuucu

SEQ ID NO: 827675 - RNA, 19 nt, Homo sapiens
  misc_RNA (1)...(19): siRNA sense strand
gcacagaugguuuaagaca

SEQ ID NO: 827676 - RNA, 19 nt, Homo sapiens
  misc_RNA (1)...(19): siRNA sense strand
cuuaucagcugcuucguuu

SEQ ID NO: 827677 - RNA, 19 nt, Homo sapiens
  misc_RNA (1)...(19): siRNA sense strand
cagggaauguagagaaauu

SEQ ID NO: 827678 - RNA, 19 nt, Homo sapiens
  misc_RNA (1)...(19): siRNA sense strand
agaaauuaguugcauguug

SEQ ID NO: 827679 - RNA, 19 nt, Homo sapiens
  misc_RNA (1)...(19): siRNA sense strand
agaaaccuauuccagauga

SEQ ID NO: 827680 - RNA, 19 nt, Homo sapiens
  misc_RNA (1)...(19): siRNA sense strand
aagaagaucuaggaaagaa

SEQ ID NO: 827681 - RNA, 19 nt, Homo sapiens
  misc_RNA (1)...(19): siRNA sense strand
guuuggaguuucuguauga

SEQ ID NO: 827682 - RNA, 19 nt, Homo sapiens
  misc_RNA (1)...(19): siRNA sense strand
gaagaacuggaaagagauu

SEQ ID NO: 827683 - RNA, 19 nt, Homo sapiens
  misc_RNA (1)...(19): siRNA sense strand
gaggaugauucucguggaa

SEQ ID NO: 827684 - RNA, 19 nt, Homo sapiens
  misc_RNA (1)...(19): siRNA sense strand
uggaguuucuguaugauaa

SEQ ID NO: 827685 - RNA, 19 nt, Homo sapiens
  misc_RNA (1)...(19): siRNA sense strand
caccaggccucuucaccua

SEQ ID NO: 827686 - RNA, 19 nt, Homo sapiens
  misc_RNA (1)...(19): siRNA sense strand
gaugcaacauuuaguacga

SEQ ID NO: 827687 - RNA, 19 nt, Homo sapiens
  misc_RNA (1)...(19): siRNA sense strand
acagacaaguucagcauau

SEQ ID NO: 827688 - RNA, 19 nt, Homo sapiens
  misc_RNA (1)...(19): siRNA sense strand
gagcaccucauucuaaaga

SEQ ID NO: 827689 - RNA, 19 nt, Homo sapiens
  misc_RNA (1)...(19): siRNA sense strand
guauagugcugccucugaa

SEQ ID NO: 827690 - RNA, 19 nt, Homo sapiens
  misc_RNA (1)...(19): siRNA sense strand
guacgaaugcuucccuuga

SEQ ID NO: 827691 - RNA, 19 nt, Homo sapiens
  misc_RNA (1)...(19): siRNA sense strand
gagcauggcagauccugaa

SEQ ID NO: 827692 - RNA, 19 nt, Homo sapiens
  misc_RNA (1)...(19): siRNA sense strand
gcuagaugaugccagcaaa

SEQ ID NO: 827693 - RNA, 19 nt, Homo sapiens
  misc_RNA (1)...(19): siRNA sense strand
gaaugcuucccuugagaua

SEQ ID NO: 827694 - RNA, 19 nt, Homo sapiens
  misc_RNA (1)...(19): siRNA sense strand
gcuaaugaaucugaaaucu

SEQ ID NO: 827695 - RNA, 19 nt, Homo sapiens
  misc_RNA (1)...(19): siRNA sense strand
ugagaccucugcuuucaug

SEQ ID NO: 827696 - RNA, 19 nt, Homo sapiens
  misc_RNA (1)...(19): siRNA sense strand
augaagaacuggaaagaga

SEQ ID NO: 827697 - RNA, 19 nt, Homo sapiens
  misc_RNA (1)...(19): siRNA sense strand
ugagagugcuguugaccuu

SEQ ID NO: 827698 - RNA, 19 nt, Homo sapiens
  misc_RNA (1)...(19): siRNA sense strand
acagaugguuuaagacaga

SEQ ID NO: 827699 - RNA, 19 nt, Homo sapiens
  misc_RNA (1)...(19): siRNA sense strand
aauuauagcuggagacaag

SEQ ID NO: 827700 - RNA, 19 nt, Homo sapiens
  misc_RNA (1)...(19): siRNA sense strand
gaauuagaccucucugauc

SEQ ID NO: 827701 - RNA, 19 nt, Homo sapiens
  misc_RNA (1)...(19): siRNA sense strand
aagaacagguccucagaau

SEQ ID NO: 827702 - RNA, 19 nt, Homo sapiens
  misc_RNA (1)...(19): siRNA sense strand
gaaaagaagaucuaggaaa

SEQ ID NO: 827703 - RNA, 19 nt, Homo sapiens
  misc_RNA (1)...(19): siRNA sense strand
cauaguaacagaaugcauu

SEQ ID NO: 827704 - RNA, 19 nt, Homo sapiens
  misc_RNA (1)...(19): siRNA sense strand
ucagugagaccucugcuuu

SEQ ID NO: 827705 - RNA, 19 nt, Homo sapiens
  misc_RNA (1)...(19): siRNA sense strand
caaagaacagguccucaga

SEQ ID NO: 827706 - RNA, 19 nt, Homo sapiens
  misc_RNA (1)...(19): siRNA sense strand
ggacacuaguacuguagga

SEQ ID NO: 827707 - RNA, 19 nt, Homo sapiens
  misc_RNA (1)...(19): siRNA sense strand
guagagaaauuaguugcau

SEQ ID NO: 827708 - RNA, 19 nt, Homo sapiens
  misc_RNA (1)...(19): siRNA sense strand
gacaagcuuucaucaucuu

SEQ ID NO: 827709 - RNA, 19 nt, Homo sapiens
  misc_RNA (1)...(19): siRNA sense strand
ggaggaagcacagaugguu

SEQ ID NO: 827710 - RNA, 19 nt, Homo sapiens
  misc_RNA (1)...(19): siRNA sense strand
cuacauaugggaucuaaau

SEQ ID NO: 827711 - RNA, 19 nt, Homo sapiens
  misc_RNA (1)...(19): siRNA sense strand
aaacuacucagaaggauug

SEQ ID NO: 827712 - RNA, 19 nt, Homo sapiens
  misc_RNA (1)...(19): siRNA sense strand
gaaacuacucagaaggauu

SEQ ID NO: 827713 - RNA, 19 nt, Homo sapiens
  misc_RNA (1)...(19): siRNA sense strand
ggaaauguuaauccaaaug

SEQ ID NO: 827714 - RNA, 19 nt, Homo sapiens
  misc_RNA (1)...(19): siRNA sense strand
gauggaagccacccuuugu

SEQ ID NO: 827715 - RNA, 19 nt, Homo sapiens
  misc_RNA (1)...(19): siRNA sense strand
gagccaaucaucaaaguca

SEQ ID NO: 827716 - RNA, 19 nt, Homo sapiens
  misc_RNA (1)...(19): siRNA sense strand
gcauugaaacucgaaacua

SEQ ID NO: 827717 - RNA, 19 nt, Homo sapiens
  misc_RNA (1)...(19): siRNA sense strand
cauggacacuaguacugua

SEQ ID NO: 827718 - RNA, 19 nt, Homo sapiens
  misc_RNA (1)...(19): siRNA sense strand
uuagucagguuguaacaga

SEQ ID NO: 827719 - RNA, 19 nt, Homo sapiens
  misc_RNA (1)...(19): siRNA sense strand
gaaauccugcugucuuauc

SEQ ID NO: 827720 - RNA, 19 nt, Homo sapiens
  misc_RNA (1)...(19): siRNA sense strand
gaaggauugaccaugcaua

SEQ ID NO: 827721 - RNA, 19 nt, Homo sapiens
  misc_RNA (1)...(19): siRNA sense strand
cauugaaacucgaaacuac

SEQ ID NO: 827722 - RNA, 19 nt, Homo sapiens
  misc_RNA (1)...(19): siRNA sense strand
gcaaggagcauugaaacuc

SEQ ID NO: 827723 - RNA, 19 nt, Homo sapiens
  misc_RNA (1)...(19): siRNA sense strand
ccaagaggaagcuagauga

SEQ ID NO: 827724 - RNA, 19 nt, Homo sapiens
  misc_RNA (1)...(19): siRNA sense strand
ucacaucaccaaucaugaa

SEQ ID NO: 827725 - RNA, 19 nt, Homo sapiens
  misc_RNA (1)...(19): siRNA sense strand
agaagaagaugccugaaaa

SEQ ID NO: 827726 - RNA, 19 nt, Homo sapiens
  misc_RNA (1)...(19): siRNA sense strand
ucacagguaccacaaguug

SEQ ID NO: 827727 - RNA, 19 nt, Homo sapiens
  misc_RNA (1)...(19): siRNA sense strand
gcagcaccauguguucauu

SEQ ID NO: 827728 - RNA, 19 nt, Homo sapiens
  misc_RNA (1)...(19): siRNA sense strand
gugagagccuuggauguga

SEQ ID NO: 827729 - RNA, 19 nt, Homo sapiens
  misc_RNA (1)...(19): siRNA sense strand
augcauacccacauaguua

SEQ ID NO: 827730 - RNA, 19 nt, Homo sapiens
  misc_RNA (1)...(19): siRNA sense strand
gaugaugccagcaaacguu

SEQ ID NO: 827731 - RNA, 19 nt, Homo sapiens
  misc_RNA (1)...(19): siRNA sense strand
gaaaagaugcuaagauucu

SEQ ID NO: 827732 - RNA, 19 nt, Homo sapiens
  misc_RNA (1)...(19): siRNA sense strand
uggaaaagaugcuaagauu

SEQ ID NO: 827733 - RNA, 19 nt, Homo sapiens
  misc_RNA (1)...(19): siRNA sense strand
cugcgaagaugagucagua

SEQ ID NO: 827734 - RNA, 19 nt, Homo sapiens
  misc_RNA (1)...(19): siRNA sense strand
gcaauuggaugcaacauuu

SEQ ID NO: 827735 - RNA, 19 nt, Homo sapiens
  misc_RNA (1)...(19): siRNA sense strand
ggacauugaugguuuaauu

SEQ ID NO: 827736 - RNA, 19 nt, Homo sapiens
  misc_RNA (1)...(19): siRNA sense strand
gcaugucucugcuauauuu

SEQ ID NO: 827737 - RNA, 19 nt, Homo sapiens
  misc_RNA (1)...(19): siRNA sense strand
gaagauaucagcugcauug

SEQ ID NO: 827738 - RNA, 19 nt, Homo sapiens
  misc_RNA (1)...(19): siRNA sense strand
caggagagguguuauauga

SEQ ID NO: 827739 - RNA, 19 nt, Homo sapiens
  misc_RNA (1)...(19): siRNA sense strand
gaugugggaucuucgauuu

SEQ ID NO: 827740 - RNA, 19 nt, Homo sapiens
  misc_RNA (1)...(19): siRNA sense strand
gaaacaaguugacaagcuu

SEQ ID NO: 827741 - RNA, 19 nt, Homo sapiens
  misc_RNA (1)...(19): siRNA sense strand
ggaaugacccuccagcuuu

SEQ ID NO: 827742 - RNA, 19 nt, Homo sapiens
  misc_RNA (1)...(19): siRNA sense strand
ggaggaacauuuaauaucu

SEQ ID NO: 827743 - RNA, 19 nt, Homo sapiens
  misc_RNA (1)...(19): siRNA sense strand
gaaccaggcuugaaaauga

SEQ ID NO: 827744 - RNA, 19 nt, Homo sapiens
  misc_RNA (1)...(19): siRNA sense strand
gaacagacacuuucaccaa

SEQ ID NO: 827745 - RNA, 19 nt, Homo sapiens
  misc_RNA (1)...(19): siRNA sense strand
gaacagguccucagaaugg

SEQ ID NO: 827746 - RNA, 19 nt, Homo sapiens
  misc_RNA (1)...(19): siRNA sense strand
caagaaaccuauuccagau

SEQ ID NO: 827747 - RNA, 19 nt, Homo sapiens
  misc_RNA (1)...(19): siRNA sense strand
gaaauaccuuccagcaugu

SEQ ID NO: 827748 - RNA, 19 nt, Homo sapiens
  misc_RNA (1)...(19): siRNA sense strand
ggcagauccugaauuguua

SEQ ID NO: 827749 - RNA, 19 nt, Homo sapiens
  misc_RNA (1)...(19): siRNA sense strand
ccaauaagcugggugucua

SEQ ID NO: 827750 - RNA, 19 nt, Homo sapiens
  misc_RNA (1)...(19): siRNA sense strand
gaaugacccuccagcuuug

SEQ ID NO: 827751 - RNA, 19 nt, Homo sapiens
  misc_RNA (1)...(19): siRNA sense strand
ccgaaauccugcugucuua

SEQ ID NO: 827752 - RNA, 19 nt, Homo sapiens
  misc_RNA (1)...(19): siRNA sense strand
gaaaauaccuugaacuucu

SEQ ID NO: 827753 - RNA, 19 nt, Homo sapiens
  misc_RNA (1)...(19): siRNA sense strand
caacagacccucaaaccaa

SEQ ID NO: 827754 - RNA, 19 nt, Homo sapiens
  misc_RNA (1)...(19): siRNA sense strand
ggacaugaaucaccuaaaa

SEQ ID NO: 827755 - RNA, 19 nt, Homo sapiens
  misc_RNA (1)...(19): siRNA sense strand
gacuaaagcucaagaugga

SEQ ID NO: 827756 - RNA, 19 nt, Homo sapiens
  misc_RNA (1)...(19): siRNA sense strand
ggcuuuagcugcaguauug

SEQ ID NO: 827757 - RNA, 19 nt, Homo sapiens
  misc_RNA (1)...(19): siRNA sense strand
gaccaugcauacccacaua

SEQ ID NO: 827758 - RNA, 19 nt, Homo sapiens
  misc_RNA (1)...(19): siRNA sense strand
gaugaccgguuaccaguga

SEQ ID NO: 827759 - RNA, 19 nt, Homo sapiens
  misc_RNA (1)...(19): siRNA sense strand
gaccuuuguuuacaugaua

SEQ ID NO: 827760 - RNA, 19 nt, Homo sapiens
  misc_RNA (1)...(19): siRNA sense strand
gauccugaauuguuacuga

SEQ ID NO: 827761 - RNA, 19 nt, Homo sapiens
  misc_RNA (1)...(19): siRNA sense strand
gaggcaaacugguuacguu

SEQ ID NO: 827762 - RNA, 19 nt, Homo sapiens
  misc_RNA (1)...(19): siRNA sense strand
gaaagagauuguugagucu

SEQ ID NO: 827763 - RNA, 19 nt, Homo sapiens
  misc_RNA (1)...(19): siRNA sense strand
aagcacagaugguuuaaga

SEQ ID NO: 827764 - RNA, 19 nt, Homo sapiens
  misc_RNA (1)...(19): siRNA sense strand
cauagcagguggacaagaa

SEQ ID NO: 827765 - RNA, 19 nt, Homo sapiens
  misc_RNA (1)...(19): siRNA sense strand
cauaaugcauggaaauguu

SEQ ID NO: 827766 - RNA, 19 nt, Homo sapiens
  misc_RNA (1)...(19): siRNA sense strand
cauggcagauccugaauug

SEQ ID NO: 827767 - RNA, 19 nt, Homo sapiens
  misc_RNA (1)...(19): siRNA sense strand
uauaugaacuucccaccaa

SEQ ID NO: 827768 - RNA, 19 nt, Homo sapiens
  misc_RNA (1)...(19): siRNA sense strand
gaaguuaaaggaaguagau

SEQ ID NO: 827769 - RNA, 19 nt, Homo sapiens
  misc_RNA (1)...(19): siRNA sense strand
uagcugcaguauugacuua

SEQ ID NO: 827770 - RNA, 19 nt, Homo sapiens
  misc_RNA (1)...(19): siRNA sense strand
acacaguggugcuucgaua

SEQ ID NO: 827771 - RNA, 19 nt, Homo sapiens
  misc_RNA (1)...(19): siRNA sense strand
aaacacagccgccagaaga

SEQ ID NO: 827772 - RNA, 19 nt, Homo sapiens
  misc_RNA (1)...(19): siRNA sense strand
gaagguaaacuuugaggau

SEQ ID NO: 827773 - RNA, 19 nt, Homo sapiens
  misc_RNA (1)...(19): siRNA sense strand
ggagagguguuauaugaac

SEQ ID NO: 827774 - RNA, 19 nt, Homo sapiens
  misc_RNA (1)...(19): siRNA sense strand
uuacauaucuucugcuucu

SEQ ID NO: 827775 - RNA, 19 nt, Homo sapiens
  misc_RNA (1)...(19): siRNA sense strand
gcacagaugguuuaagaca

SEQ ID NO: 827776 - RNA, 19 nt, Homo sapiens
  misc_RNA (1)...(19): siRNA sense strand
cuuaucagcugcuucguuu

SEQ ID NO: 827777 - RNA, 19 nt, Homo sapiens
  misc_RNA (1)...(19): siRNA sense strand
cagggaauguagagaaauu

SEQ ID NO: 827778 - RNA, 19 nt, Homo sapiens
  misc_RNA (1)...(19): siRNA sense strand
agaaauuaguugcauguug

SEQ ID NO: 827779 - RNA, 19 nt, Homo sapiens
  misc_RNA (1)...(19): siRNA sense strand
agaaaccuauuccagauga

SEQ ID NO: 827780 - RNA, 19 nt, Homo sapiens
  misc_RNA (1)...(19): siRNA sense strand
aagaagaucuaggaaagaa

SEQ ID NO: 827781 - RNA, 19 nt, Homo sapiens
  misc_RNA (1)...(19): siRNA sense strand
guuuggaguuucuguauga

SEQ ID NO: 827782 - RNA, 19 nt, Homo sapiens
  misc_RNA (1)...(19): siRNA sense strand
gaagaacuggaaagagauu

SEQ ID NO: 827783 - RNA, 19 nt, Homo sapiens
  misc_RNA (1)...(19): siRNA sense strand
gaggaugauucucguggaa

SEQ ID NO: 827784 - RNA, 19 nt, Homo sapiens
  misc_RNA (1)...(19): siRNA sense strand
uggaguuucuguaugauaa

SEQ ID NO: 827785 - RNA, 19 nt, Homo sapiens
  misc_RNA (1)...(19): siRNA sense strand
caccaggccucuucaccua

SEQ ID NO: 827786 - RNA, 19 nt, Homo sapiens
  misc_RNA (1)...(19): siRNA sense strand
gaugcaacauuuaguacga

SEQ ID NO: 827787 - RNA, 19 nt, Homo sapiens
  misc_RNA (1)...(19): siRNA sense strand
acagacaaguucagcauau

SEQ ID NO: 827788 - RNA, 19 nt, Homo sapiens
  misc_RNA (1)...(19): siRNA sense strand
gagcaccucauucuaaaga

SEQ ID NO: 827789 - RNA, 19 nt, Homo sapiens
  misc_RNA (1)...(19): siRNA sense strand
guauagugcugccucugaa

SEQ ID NO: 827790 - RNA, 19 nt, Homo sapiens
  misc_RNA (1)...(19): siRNA sense strand
guacgaaugcuucccuuga

SEQ ID NO: 827791 - RNA, 19 nt, Homo sapiens
  misc_RNA (1)...(19): siRNA sense strand
gagcauggcagauccugaa

SEQ ID NO: 827792 - RNA, 19 nt, Homo sapiens
  misc_RNA (1)...(19): siRNA sense strand
gcuagaugaugccagcaaa

SEQ ID NO: 827793 - RNA, 19 nt, Homo sapiens
  misc_RNA (1)...(19): siRNA sense strand
gaaugcuucccuugagaua

SEQ ID NO: 827794 - RNA, 19 nt, Homo sapiens
  misc_RNA (1)...(19): siRNA sense strand
gcuaaugaaucugaaaucu

SEQ ID NO: 827795 - RNA, 19 nt, Homo sapiens
  misc_RNA (1)...(19): siRNA sense strand
ugagaccucugcuuucaug

SEQ ID NO: 827796 - RNA, 19 nt, Homo sapiens
  misc_RNA (1)...(19): siRNA sense strand
augaagaacuggaaagaga

SEQ ID NO: 827797 - RNA, 19 nt, Homo sapiens
  misc_RNA (1)...(19): siRNA sense strand
ugagagugcuguugaccuu

SEQ ID NO: 827798 - RNA, 19 nt, Homo sapiens
  misc_RNA (1)...(19): siRNA sense strand
acagaugguuuaagacaga

SEQ ID NO: 827799 - RNA, 19 nt, Homo sapiens
  misc_RNA (1)...(19): siRNA sense strand
aauuauagcuggagacaag

SEQ ID NO: 827800 - RNA, 19 nt, Homo sapiens
  misc_RNA (1)...(19): siRNA sense strand
gaauuagaccucucugauc

SEQ ID NO: 827801 - RNA, 19 nt, Homo sapiens
  misc_RNA (1)...(19): siRNA sense strand
aagaacagguccucagaau

SEQ ID NO: 827802 - RNA, 19 nt, Homo sapiens
  misc_RNA (1)...(19): siRNA sense strand
gaaaagaagaucuaggaaa

SEQ ID NO: 827803 - RNA, 19 nt, Homo sapiens
  misc_RNA (1)...(19): siRNA sense strand
cauaguaacagaaugcauu

SEQ ID NO: 827804 - RNA, 19 nt, Homo sapiens
  misc_RNA (1)...(19): siRNA sense strand
ucagugagaccucugcuuu

SEQ ID NO: 827805 - RNA, 19 nt, Homo sapiens
  misc_RNA (1)...(19): siRNA sense strand
caaagaacagguccucaga

SEQ ID NO: 827806 - RNA, 19 nt, Homo sapiens
  misc_RNA (1)...(19): siRNA sense strand
ggacacuaguacuguagga

SEQ ID NO: 827807 - RNA, 19 nt, Homo sapiens
  misc_RNA (1)...(19): siRNA sense strand
guagagaaauuaguugcau

SEQ ID NO: 827808 - RNA, 19 nt, Homo sapiens
  misc_RNA (1)...(19): siRNA sense strand
gacaagcuuucaucaucuu

SEQ ID NO: 827809 - RNA, 19 nt, Homo sapiens
  misc_RNA (1)...(19): siRNA sense strand
ggaggaagcacagaugguu

SEQ ID NO: 827810 - RNA, 19 nt, Homo sapiens
  misc_RNA (1)...(19): siRNA sense strand
cuacauaugggaucuaaau

SEQ ID NO: 827811 - RNA, 19 nt, Homo sapiens
  misc_RNA (1)...(19): siRNA sense strand
aaacuacucagaaggauug

SEQ ID NO: 827812 - RNA, 19 nt, Homo sapiens
  misc_RNA (1)...(19): siRNA sense strand
gaaacuacucagaaggauu

SEQ ID NO: 827813 - RNA, 19 nt, Homo sapiens
  misc_RNA (1)...(19): siRNA sense strand
ggaaauguuaauccaaaug

SEQ ID NO: 827814 - RNA, 19 nt, Homo sapiens
  misc_RNA (1)...(19): siRNA sense strand
gauggaagccacccuuugu

SEQ ID NO: 827815 - RNA, 19 nt, Homo sapiens
  misc_RNA (1)...(19): siRNA sense strand
gagccaaucaucaaaguca

SEQ ID NO: 827816 - RNA, 19 nt, Homo sapiens
  misc_RNA (1)...(19): siRNA sense strand
gcauugaaacucgaaacua

SEQ ID NO: 827817 - RNA, 19 nt, Homo sapiens
  misc_RNA (1)...(19): siRNA sense strand
cauggacacuaguacugua

SEQ ID NO: 827818 - RNA, 19 nt, Homo sapiens
  misc_RNA (1)...(19): siRNA sense strand
uuagucagguuguaacaga

SEQ ID NO: 827819 - RNA, 19 nt, Homo sapiens
  misc_RNA (1)...(19): siRNA sense strand
gaaauccugcugucuuauc

SEQ ID NO: 827820 - RNA, 19 nt, Homo sapiens
  misc_RNA (1)...(19): siRNA sense strand
gaaggauugaccaugcaua

SEQ ID NO: 827821 - RNA, 19 nt, Homo sapiens
  misc_RNA (1)...(19): siRNA sense strand
cauugaaacucgaaacuac

SEQ ID NO: 827822 - RNA, 19 nt, Homo sapiens
  misc_RNA (1)...(19): siRNA sense strand
gcaaggagcauugaaacuc

SEQ ID NO: 827823 - RNA, 19 nt, Homo sapiens
  misc_RNA (1)...(19): siRNA sense strand
ccaagaggaagcuagauga

SEQ ID NO: 827824 - RNA, 19 nt, Homo sapiens
  misc_RNA (1)...(19): siRNA sense strand
ucacaucaccaaucaugaa

SEQ ID NO: 827825 - RNA, 19 nt, Homo sapiens
  misc_RNA (1)...(19): siRNA sense strand
agaagaagaugccugaaaa

SEQ ID NO: 827826 - RNA, 19 nt, Homo sapiens
  misc_RNA (1)...(19): siRNA sense strand
ucacagguaccacaaguug

SEQ ID NO: 827827 - RNA, 19 nt, Homo sapiens
  misc_RNA (1)...(19): siRNA sense strand
gcagcaccauguguucauu

SEQ ID NO: 827828 - RNA, 19 nt, Homo sapiens
  misc_RNA (1)...(19): siRNA sense strand
gugagagccuuggauguga

SEQ ID NO: 827829 - RNA, 19 nt, Homo sapiens
  misc_RNA (1)...(19): siRNA sense strand
augcauacccacauaguua

SEQ ID NO: 827830 - RNA, 19 nt, Homo sapiens
  misc_RNA (1)...(19): siRNA sense strand
gaugaugccagcaaacguu

SEQ ID NO: 827831 - RNA, 19 nt, Homo sapiens
  misc_RNA (1)...(19): siRNA sense strand
gaaaagaugcuaagauucu

SEQ ID NO: 827832 - RNA, 19 nt, Homo sapiens
  misc_RNA (1)...(19): siRNA sense strand
uggaaaagaugcuaagauu

SEQ ID NO: 827833 - RNA, 19 nt, Homo sapiens
  misc_RNA (1)...(19): siRNA sense strand
cugcgaagaugagucagua

SEQ ID NO: 827834 - RNA, 19 nt, Homo sapiens
  misc_RNA (1)...(19): siRNA sense strand
gaaggccucucuccugaua

SEQ ID NO: 827835 - RNA, 19 nt, Homo sapiens
  misc_RNA (1)...(19): siRNA sense strand
gauaaacauugacgaucuu

SEQ ID NO: 827836 - RNA, 19 nt, Homo sapiens
  misc_RNA (1)...(19): siRNA sense strand
ugucccagcucccuaauuu

SEQ ID NO: 827837 - RNA, 19 nt, Homo sapiens
  misc_RNA (1)...(19): siRNA sense strand
acacagaacugaaaaggua

SEQ ID NO: 827838 - RNA, 19 nt, Homo sapiens
  misc_RNA (1)...(19): siRNA sense strand
gaaacaccauugcucucuu

SEQ ID NO: 827839 - RNA, 19 nt, Homo sapiens
  misc_RNA (1)...(19): siRNA sense strand
ccagagaggcuaaguccua

SEQ ID NO: 827840 - RNA, 19 nt, Homo sapiens
  misc_RNA (1)...(19): siRNA sense strand
gacgagcccuuaccacguu

SEQ ID NO: 827841 - RNA, 19 nt, Homo sapiens
  misc_RNA (1)...(19): siRNA sense strand
gaacuacgaguaccugauc

SEQ ID NO: 827842 - RNA, 19 nt, Homo sapiens
  misc_RNA (1)...(19): siRNA sense strand
ggacagcacuggguugaac

SEQ ID NO: 827843 - RNA, 19 nt, Homo sapiens
  misc_RNA (1)...(19): siRNA sense strand
ggucacacuuucucuggaa

SEQ ID NO: 827844 - RNA, 19 nt, Homo sapiens
  misc_RNA (1)...(19): siRNA sense strand
caccauugcucucuucuuc

SEQ ID NO: 827845 - RNA, 19 nt, Homo sapiens
  misc_RNA (1)...(19): siRNA sense strand
agauaucgaucgcauccua

SEQ ID NO: 827846 - RNA, 19 nt, Homo sapiens
  misc_RNA (1)...(19): siRNA sense strand
ggucacuguugccaaacua

SEQ ID NO: 827847 - RNA, 19 nt, Homo sapiens
  misc_RNA (1)...(19): siRNA sense strand
gcaaacuccggaagaagaa

SEQ ID NO: 827848 - RNA, 19 nt, Homo sapiens
  misc_RNA (1)...(19): siRNA sense strand
gcuucgagcugauaaacau

SEQ ID NO: 827849 - RNA, 19 nt, Homo sapiens
  misc_RNA (1)...(19): siRNA sense strand
ugauaaacauugacgaucu

SEQ ID NO: 827850 - RNA, 19 nt, Homo sapiens
  misc_RNA (1)...(19): siRNA sense strand
ggagaacguccacgagguu

SEQ ID NO: 827851 - RNA, 19 nt, Homo sapiens
  misc_RNA (1)...(19): siRNA sense strand
ugagcuggcuggaggagaa

SEQ ID NO: 827852 - RNA, 19 nt, Homo sapiens
  misc_RNA (1)...(19): siRNA sense strand
gaaaacggacuagaagaua

SEQ ID NO: 827853 - RNA, 19 nt, Homo sapiens
  misc_RNA (1)...(19): siRNA sense strand
gcauuucgaucuccgugau

SEQ ID NO: 827854 - RNA, 19 nt, Homo sapiens
  misc_RNA (1)...(19): siRNA sense strand
gccaugugauccucucuga

SEQ ID NO: 827855 - RNA, 19 nt, Homo sapiens
  misc_RNA (1)...(19): siRNA sense strand
ccaggaagcacguucucua

SEQ ID NO: 827856 - RNA, 19 nt, Homo sapiens
  misc_RNA (1)...(19): siRNA sense strand
ucaagaggaucaggagaug

SEQ ID NO: 827857 - RNA, 19 nt, Homo sapiens
  misc_RNA (1)...(19): siRNA sense strand
ggaaacacagagagcaaga

SEQ ID NO: 827858 - RNA, 19 nt, Homo sapiens
  misc_RNA (1)...(19): siRNA sense strand
aaacaccauugcucucuuc

SEQ ID NO: 827859 - RNA, 19 nt, Homo sapiens
  misc_RNA (1)...(19): siRNA sense strand
ucagagcagucucaugcaa

SEQ ID NO: 827860 - RNA, 19 nt, Homo sapiens
  misc_RNA (1)...(19): siRNA sense strand
gcaagacggauggagauga

SEQ ID NO: 827861 - RNA, 19 nt, Homo sapiens
  misc_RNA (1)...(19): siRNA sense strand
uugacgaucuugaggauga

SEQ ID NO: 827862 - RNA, 19 nt, Homo sapiens
  misc_RNA (1)...(19): siRNA sense strand
gagcacagacacuugaauc

SEQ ID NO: 827863 - RNA, 19 nt, Homo sapiens
  misc_RNA (1)...(19): siRNA sense strand
ggcaaacuccggaagaaga

SEQ ID NO: 827864 - RNA, 19 nt, Homo sapiens
  misc_RNA (1)...(19): siRNA sense strand
gagcaagacggauggagau

SEQ ID NO: 827865 - RNA, 19 nt, Homo sapiens
  misc_RNA (1)...(19): siRNA sense strand
gaauauccaccgccaugug

SEQ ID NO: 827866 - RNA, 19 nt, Homo sapiens
  misc_RNA (1)...(19): siRNA sense strand
gcagagacaacguguguac

SEQ ID NO: 827867 - RNA, 19 nt, Homo sapiens
  misc_RNA (1)...(19): siRNA sense strand
gcaaaggccacggcagaga

SEQ ID NO: 827868 - RNA, 19 nt, Homo sapiens
  misc_RNA (1)...(19): siRNA sense strand
gagaugacaccgagacagu

SEQ ID NO: 827869 - RNA, 19 nt, Homo sapiens
  misc_RNA (1)...(19): siRNA sense strand
cagagaggcuaaguccuau

SEQ ID NO: 827870 - RNA, 19 nt, Homo sapiens
  misc_RNA (1)...(19): siRNA sense strand
acacuugaauccagacaca

SEQ ID NO: 827871 - RNA, 19 nt, Homo sapiens
  misc_RNA (1)...(19): siRNA sense strand
gagaggcuaaguccuauca

SEQ ID NO: 827872 - RNA, 19 nt, Homo sapiens
  misc_RNA (1)...(19): siRNA sense strand
cagcgugcacccaggaaua

SEQ ID NO: 827873 - RNA, 19 nt, Homo sapiens
  misc_RNA (1)...(19): siRNA sense strand
gcuucuaccuggcccucua

SEQ ID NO: 827874 - RNA, 19 nt, Homo sapiens
  misc_RNA (1)...(19): siRNA sense strand
uggacccaaugcugaaaua

SEQ ID NO: 827875 - RNA, 19 nt, Homo sapiens
  misc_RNA (1)...(19): siRNA sense strand
caagacggauggagaugac

SEQ ID NO: 827876 - RNA, 19 nt, Homo sapiens
  misc_RNA (1)...(19): siRNA sense strand
gcgacaugauggccaacuu

SEQ ID NO: 827877 - RNA, 19 nt, Homo sapiens
  misc_RNA (1)...(19): siRNA sense strand
ggaaacaccauugcucucu

SEQ ID NO: 827878 - RNA, 19 nt, Homo sapiens
  misc_RNA (1)...(19): siRNA sense strand
guggcaaacuccggaagaa

SEQ ID NO: 827879 - RNA, 19 nt, Homo sapiens
  misc_RNA (1)...(19): siRNA sense strand
cgaugacgcggaagaagaa

SEQ ID NO: 827880 - RNA, 19 nt, Homo sapiens
  misc_RNA (1)...(19): siRNA sense strand
gaggacagcacuggguuga

SEQ ID NO: 827881 - RNA, 19 nt, Homo sapiens
  misc_RNA (1)...(19): siRNA sense strand
ucacuguugccaaacuaua

SEQ ID NO: 827882 - RNA, 19 nt, Homo sapiens
  misc_RNA (1)...(19): siRNA sense strand
ggacccaaugcugaaauaa

SEQ ID NO: 827883 - RNA, 19 nt, Homo sapiens
  misc_RNA (1)...(19): siRNA sense strand
guagagagagcgcuguaca

SEQ ID NO: 827884 - RNA, 19 nt, Homo sapiens
  misc_RNA (1)...(19): siRNA sense strand
gcacagacacuugaaucca

SEQ ID NO: 827885 - RNA, 19 nt, Homo sapiens
  misc_RNA (1)...(19): siRNA sense strand
ccaugcggcugcuggaauc

SEQ ID NO: 827886 - RNA, 19 nt, Homo sapiens
  misc_RNA (1)...(19): siRNA sense strand
cggacacaaucuacuccua

SEQ ID NO: 827887 - RNA, 19 nt, Homo sapiens
  misc_RNA (1)...(19): siRNA sense strand
gcaugcugcugcucaucga

SEQ ID NO: 827888 - RNA, 19 nt, Homo sapiens
  misc_RNA (1)...(19): siRNA sense strand
ccgagacagugcccucaga

SEQ ID NO: 827889 - RNA, 19 nt, Homo sapiens
  misc_RNA (1)...(19): siRNA sense strand
ggcggaaggugcucuacca

SEQ ID NO: 827890 - RNA, 19 nt, Homo sapiens
  misc_RNA (1)...(19): siRNA sense strand
gcugauaaacauugacgau

SEQ ID NO: 827891 - RNA, 19 nt, Homo sapiens
  misc_RNA (1)...(19): siRNA sense strand
cauugacgaucuugaggau

SEQ ID NO: 827892 - RNA, 19 nt, Homo sapiens
  misc_RNA (1)...(19): siRNA sense strand
gcaccagggaacaaaggaa

SEQ ID NO: 827893 - RNA, 19 nt, Homo sapiens
  misc_RNA (1)...(19): siRNA sense strand
ggaaaacggacuagaagau

SEQ ID NO: 827894 - RNA, 19 nt, Homo sapiens
  misc_RNA (1)...(19): siRNA sense strand
cuguuccacuggcguauuu

SEQ ID NO: 827895 - RNA, 19 nt, Homo sapiens
  misc_RNA (1)...(19): siRNA sense strand
agcaggcgcucaccauguu

SEQ ID NO: 827896 - RNA, 19 nt, Homo sapiens
  misc_RNA (1)...(19): siRNA sense strand
ccacgagguucugcaagca

SEQ ID NO: 827897 - RNA, 19 nt, Homo sapiens
  misc_RNA (1)...(19): siRNA sense strand
cuugggaggucacacuuuc

SEQ ID NO: 827898 - RNA, 19 nt, Homo sapiens
  misc_RNA (1)...(19): siRNA sense strand
gccagcuggugaaccugua

SEQ ID NO: 827899 - RNA, 19 nt, Homo sapiens
  misc_RNA (1)...(19): siRNA sense strand
cggcagagacaacgugugu

SEQ ID NO: 827900 - RNA, 19 nt, Homo sapiens
  misc_RNA (1)...(19): siRNA sense strand
ggaugacccuguggugaac

SEQ ID NO: 827901 - RNA, 19 nt, Homo sapiens
  misc_RNA (1)...(19): siRNA sense strand
cuauggagccgaacaacau

SEQ ID NO: 827902 - RNA, 19 nt, Homo sapiens
  misc_RNA (1)...(19): siRNA sense strand
agagcagucucaugcaagu

SEQ ID NO: 827903 - RNA, 19 nt, Homo sapiens
  misc_RNA (1)...(19): siRNA sense strand
aaacauugacgaucuugag

SEQ ID NO: 827904 - RNA, 19 nt, Homo sapiens
  misc_RNA (1)...(19): siRNA sense strand
ggaacuacgaguaccugau

SEQ ID NO: 827905 - RNA, 19 nt, Homo sapiens
  misc_RNA (1)...(19): siRNA sense strand
caaccgcuucgagcugaua

SEQ ID NO: 827906 - RNA, 19 nt, Homo sapiens
  misc_RNA (1)...(19): siRNA sense strand
ccagcaggcucagcacaag

SEQ ID NO: 827907 - RNA, 19 nt, Homo sapiens
  misc_RNA (1)...(19): siRNA sense strand
cgacaugauggccaacuuc

SEQ ID NO: 827908 - RNA, 19 nt, Homo sapiens
  misc_RNA (1)...(19): siRNA sense strand
aaaacggacuagaagauau

SEQ ID NO: 827909 - RNA, 19 nt, Homo sapiens
  misc_RNA (1)...(19): siRNA sense strand
gacccaaugcugaaauaag

SEQ ID NO: 827910 - RNA, 19 nt, Homo sapiens
  misc_RNA (1)...(19): siRNA sense strand
gaauccagacacagaacug

SEQ ID NO: 827911 - RNA, 19 nt, Homo sapiens
  misc_RNA (1)...(19): siRNA sense strand
guggagcacagacacuuga

SEQ ID NO: 827912 - RNA, 19 nt, Homo sapiens
  misc_RNA (1)...(19): siRNA sense strand
aauauccaccgccauguga

SEQ ID NO: 827913 - RNA, 19 nt, Homo sapiens
  misc_RNA (1)...(19): siRNA sense strand
cagcaggcgcucaccaugu

SEQ ID NO: 827914 - RNA, 19 nt, Homo sapiens
  misc_RNA (1)...(19): siRNA sense strand
aaacggacuagaagauauc

SEQ ID NO: 827915 - RNA, 19 nt, Homo sapiens
  misc_RNA (1)...(19): siRNA sense strand
uccggucacuguugccaaa

SEQ ID NO: 827916 - RNA, 19 nt, Homo sapiens
  misc_RNA (1)...(19): siRNA sense strand
ggaauauccaccgccaugu

SEQ ID NO: 827917 - RNA, 19 nt, Homo sapiens
  misc_RNA (1)...(19): siRNA sense strand
gcaaaccaggucuguccau

SEQ ID NO: 827918 - RNA, 19 nt, Homo sapiens
  misc_RNA (1)...(19): siRNA sense strand
ggagcacagacacuugaau

SEQ ID NO: 827919 - RNA, 19 nt, Homo sapiens
  misc_RNA (1)...(19): siRNA sense strand
ucgagcugauaaacauuga

SEQ ID NO: 827920 - RNA, 19 nt, Homo sapiens
  misc_RNA (1)...(19): siRNA sense strand
cuaccuggcccucuacaag

SEQ ID NO: 827921 - RNA, 19 nt, Homo sapiens
  misc_RNA (1)...(19): siRNA sense strand
gugaauggcuuaaagauaa

SEQ ID NO: 827922 - RNA, 19 nt, Homo sapiens
  misc_RNA (1)...(19): siRNA sense strand
gaaagacgauucuauucaa

SEQ ID NO: 827923 - RNA, 19 nt, Homo sapiens
  misc_RNA (1)...(19): siRNA sense strand
ucagacgacuucauaauua

SEQ ID NO: 827924 - RNA, 19 nt, Homo sapiens
  misc_RNA (1)...(19): siRNA sense strand
gaacaaagaagaccauuau

SEQ ID NO: 827925 - RNA, 19 nt, Homo sapiens
  misc_RNA (1)...(19): siRNA sense strand
ucagaugacuggacucuua

SEQ ID NO: 827926 - RNA, 19 nt, Homo sapiens
  misc_RNA (1)...(19): siRNA sense strand
guaguaagcuuggauauau

SEQ ID NO: 827927 - RNA, 19 nt, Homo sapiens
  misc_RNA (1)...(19): siRNA sense strand
gagacuacauugaagguua

SEQ ID NO: 827928 - RNA, 19 nt, Homo sapiens
  misc_RNA (1)...(19): siRNA sense strand
gagggcaacuuucaccuua

SEQ ID NO: 827929 - RNA, 19 nt, Homo sapiens
  misc_RNA (1)...(19): siRNA sense strand
gcagaaggauccaaggaaa

SEQ ID NO: 827930 - RNA, 19 nt, Homo sapiens
  misc_RNA (1)...(19): siRNA sense strand
ccagaaacauaccaucaua

SEQ ID NO: 827931 - RNA, 19 nt, Homo sapiens
  misc_RNA (1)...(19): siRNA sense strand
gagaguggcugcuacuuau

SEQ ID NO: 827932 - RNA, 19 nt, Homo sapiens
  misc_RNA (1)...(19): siRNA sense strand
gaagaaggcagcacaauuc

SEQ ID NO: 827933 - RNA, 19 nt, Homo sapiens
  misc_RNA (1)...(19): siRNA sense strand
gcaggauccuuucccauaa

SEQ ID NO: 827934 - RNA, 19 nt, Homo sapiens
  misc_RNA (1)...(19): siRNA sense strand
caaagaagaccaugugauu

SEQ ID NO: 827935 - RNA, 19 nt, Homo sapiens
  misc_RNA (1)...(19): siRNA sense strand
gcaguucacucucauuuca

SEQ ID NO: 827936 - RNA, 19 nt, Homo sapiens
  misc_RNA (1)...(19): siRNA sense strand
gaauuuaggcucugaggua

SEQ ID NO: 827937 - RNA, 19 nt, Homo sapiens
  misc_RNA (1)...(19): siRNA sense strand
gauauggugucuuugauga

SEQ ID NO: 827938 - RNA, 19 nt, Homo sapiens
  misc_RNA (1)...(19): siRNA sense strand
gaaagaggccugguccaua

SEQ ID NO: 827939 - RNA, 19 nt, Homo sapiens
  misc_RNA (1)...(19): siRNA sense strand
gcaaagauaagcagugaaa

SEQ ID NO: 827940 - RNA, 19 nt, Homo sapiens
  misc_RNA (1)...(19): siRNA sense strand
gcaaagaaguaauccaucu

SEQ ID NO: 827941 - RNA, 19 nt, Homo sapiens
  misc_RNA (1)...(19): siRNA sense strand
caagagcuguugcaagauu

SEQ ID NO: 827942 - RNA, 19 nt, Homo sapiens
  misc_RNA (1)...(19): siRNA sense strand
cgaguuagcuacuacagaa

SEQ ID NO: 827943 - RNA, 19 nt, Homo sapiens
  misc_RNA (1)...(19): siRNA sense strand
cagagacaguccagaaaua

SEQ ID NO: 827944 - RNA, 19 nt, Homo sapiens
  misc_RNA (1)...(19): siRNA sense strand
uaaauaagcagccagauau

SEQ ID NO: 827945 - RNA, 19 nt, Homo sapiens
  misc_RNA (1)...(19): siRNA sense strand
gaguauugcacaucuauua

SEQ ID NO: 827946 - RNA, 19 nt, Homo sapiens
  misc_RNA (1)...(19): siRNA sense strand
gaauguguccuucgacuaa

SEQ ID NO: 827947 - RNA, 19 nt, Homo sapiens
  misc_RNA (1)...(19): siRNA sense strand
gaaguggccugauggaaag

SEQ ID NO: 827948 - RNA, 19 nt, Homo sapiens
  misc_RNA (1)...(19): siRNA sense strand
gaaggaagcagaauacaca

SEQ ID NO: 827949 - RNA, 19 nt, Homo sapiens
  misc_RNA (1)...(19): siRNA sense strand
gaaguggcaucuccagaau

SEQ ID NO: 827950 - RNA, 19 nt, Homo sapiens
  misc_RNA (1)...(19): siRNA sense strand
cagaucagcacaacauuua

SEQ ID NO: 827951 - RNA, 19 nt, Homo sapiens
  misc_RNA (1)...(19): siRNA sense strand
gcacagagacaguccagaa

SEQ ID NO: 827952 - RNA, 19 nt, Homo sapiens
  misc_RNA (1)...(19): siRNA sense strand
gaagaaguauuugagaaca

SEQ ID NO: 827953 - RNA, 19 nt, Homo sapiens
  misc_RNA (1)...(19): siRNA sense strand
ccaaucagacgacuucaua

SEQ ID NO: 827954 - RNA, 19 nt, Homo sapiens
  misc_RNA (1)...(19): siRNA sense strand
aaagaggccugguccauau

SEQ ID NO: 827955 - RNA, 19 nt, Homo sapiens
  misc_RNA (1)...(19): siRNA sense strand
guccauggaugacuuguuu

SEQ ID NO: 827956 - RNA, 19 nt, Homo sapiens
  misc_RNA (1)...(19): siRNA sense strand
uaaaggaugccaccuauga

SEQ ID NO: 827957 - RNA, 19 nt, Homo sapiens
  misc_RNA (1)...(19): siRNA sense strand
ggagguggcuagccgauuc

SEQ ID NO: 827958 - RNA, 19 nt, Homo sapiens
  misc_RNA (1)...(19): siRNA sense strand
cuucaaaccuagucuauau

SEQ ID NO: 827959 - RNA, 19 nt, Homo sapiens
  misc_RNA (1)...(19): siRNA sense strand
ggaaagggaacacugacua

SEQ ID NO: 827960 - RNA, 19 nt, Homo sapiens
  misc_RNA (1)...(19): siRNA sense strand
gauuccagcuucuugcuaa

SEQ ID NO: 827961 - RNA, 19 nt, Homo sapiens
  misc_RNA (1)...(19): siRNA sense strand
gaagauggguauggagaau

SEQ ID NO: 827962 - RNA, 19 nt, Homo sapiens
  misc_RNA (1)...(19): siRNA sense strand
gaaagcaugggacaauauu

SEQ ID NO: 827963 - RNA, 19 nt, Homo sapiens
  misc_RNA (1)...(19): siRNA sense strand
aaagacagaccuaaaguuu

SEQ ID NO: 827964 - RNA, 19 nt, Homo sapiens
  misc_RNA (1)...(19): siRNA sense strand
caaagaagaccauuaugug

SEQ ID NO: 827965 - RNA, 19 nt, Homo sapiens
  misc_RNA (1)...(19): siRNA sense strand
gcaacuuucaccuuaauaa

SEQ ID NO: 827966 - RNA, 19 nt, Homo sapiens
  misc_RNA (1)...(19): siRNA sense strand
ucaauaagcagagagauuu

SEQ ID NO: 827967 - RNA, 19 nt, Homo sapiens
  misc_RNA (1)...(19): siRNA sense strand
ggauaaugaucgcgaggaa

SEQ ID NO: 827968 - RNA, 19 nt, Homo sapiens
  misc_RNA (1)...(19): siRNA sense strand
gaacacugacuaugccaaa

SEQ ID NO: 827969 - RNA, 19 nt, Homo sapiens
  misc_RNA (1)...(19): siRNA sense strand
gacagaaucucaggcagaa

SEQ ID NO: 827970 - RNA, 19 nt, Homo sapiens
  misc_RNA (1)...(19): siRNA sense strand
gcagccagcucuugauuac

SEQ ID NO: 827971 - RNA, 19 nt, Homo sapiens
  misc_RNA (1)...(19): siRNA sense strand
gaacacucuuguagcaaau

SEQ ID NO: 827972 - RNA, 19 nt, Homo sapiens
  misc_RNA (1)...(19): siRNA sense strand
gaugacuuguuuccuguuu

SEQ ID NO: 827973 - RNA, 19 nt, Homo sapiens
  misc_RNA (1)...(19): siRNA sense strand
gcagaucagcacaacauuu

SEQ ID NO: 827974 - RNA, 19 nt, Homo sapiens
  misc_RNA (1)...(19): siRNA sense strand
gcuggugccuugucacuga

SEQ ID NO: 827975 - RNA, 19 nt, Homo sapiens
  misc_RNA (1)...(19): siRNA sense strand
cagcuuagcccuuguacaa

SEQ ID NO: 827976 - RNA, 19 nt, Homo sapiens
  misc_RNA (1)...(19): siRNA sense strand
gggccaggauuaggaauuu

SEQ ID NO: 827977 - RNA, 19 nt, Homo sapiens
  misc_RNA (1)...(19): siRNA sense strand
cuaaauaagcagccagaua

SEQ ID NO: 827978 - RNA, 19 nt, Homo sapiens
  misc_RNA (1)...(19): siRNA sense strand
ggaaccuacuucaaaccua

SEQ ID NO: 827979 - RNA, 19 nt, Homo sapiens
  misc_RNA (1)...(19): siRNA sense strand
ggaaauugacguccucuuc

SEQ ID NO: 827980 - RNA, 19 nt, Homo sapiens
  misc_RNA (1)...(19): siRNA sense strand
caaaguggcuacgagcuau

SEQ ID NO: 827981 - RNA, 19 nt, Homo sapiens
  misc_RNA (1)...(19): siRNA sense strand
gaggagcaguucacucuca

SEQ ID NO: 827982 - RNA, 19 nt, Homo sapiens
  misc_RNA (1)...(19): siRNA sense strand
ggauauauaagcagaguga

SEQ ID NO: 827983 - RNA, 19 nt, Homo sapiens
  misc_RNA (1)...(19): siRNA sense strand
cccaagcagucaaugaaua

SEQ ID NO: 827984 - RNA, 19 nt, Homo sapiens
  misc_RNA (1)...(19): siRNA sense strand
gaagacauuuacugggaau

SEQ ID NO: 827985 - RNA, 19 nt, Homo sapiens
  misc_RNA (1)...(19): siRNA sense strand
gaaagggaacacugacuau

SEQ ID NO: 827986 - RNA, 19 nt, Homo sapiens
  misc_RNA (1)...(19): siRNA sense strand
gccaguggguaauggauaa

SEQ ID NO: 827987 - RNA, 19 nt, Homo sapiens
  misc_RNA (1)...(19): siRNA sense strand
acaaggcaaugaacaaaga

SEQ ID NO: 827988 - RNA, 19 nt, Homo sapiens
  misc_RNA (1)...(19): siRNA sense strand
gagcaguucacucucauuu

SEQ ID NO: 827989 - RNA, 19 nt, Homo sapiens
  misc_RNA (1)...(19): siRNA sense strand
gaagaagcaauuccuaauc

SEQ ID NO: 827990 - RNA, 19 nt, Homo sapiens
  misc_RNA (1)...(19): siRNA sense strand
gaaacugucagaucauuca

SEQ ID NO: 827991 - RNA, 19 nt, Homo sapiens
  misc_RNA (1)...(19): siRNA sense strand
ugagaacacucuuguagca

SEQ ID NO: 827992 - RNA, 19 nt, Homo sapiens
  misc_RNA (1)...(19): siRNA sense strand
ggaaagcaugggacaauau

SEQ ID NO: 827993 - RNA, 19 nt, Homo sapiens
  misc_RNA (1)...(19): siRNA sense strand
aaacauggaguucuucuga

SEQ ID NO: 827994 - RNA, 19 nt, Homo sapiens
  misc_RNA (1)...(19): siRNA sense strand
gauguauucuggcauguuc

SEQ ID NO: 827995 - RNA, 19 nt, Homo sapiens
  misc_RNA (1)...(19): siRNA sense strand
caagcuguguuaccucauu

SEQ ID NO: 827996 - RNA, 19 nt, Homo sapiens
  misc_RNA (1)...(19): siRNA sense strand
ucaggccucuucucaguuu

SEQ ID NO: 827997 - RNA, 19 nt, Homo sapiens
  misc_RNA (1)...(19): siRNA sense strand
gggaagaacagguuaaaca

SEQ ID NO: 827998 - RNA, 19 nt, Homo sapiens
  misc_RNA (1)...(19): siRNA sense strand
gcuuagcccuuguacaaug

SEQ ID NO: 827999 - RNA, 19 nt, Homo sapiens
  misc_RNA (1)...(19): siRNA sense strand
ccacgaaagaugcuuguuu

SEQ ID NO: 828000 - RNA, 19 nt, Homo sapiens
  misc_RNA (1)...(19): siRNA sense strand
guaacgaguucuggauuau

SEQ ID NO: 828001 - RNA, 19 nt, Homo sapiens
  misc_RNA (1)...(19): siRNA sense strand
agagccagguuauguagua

SEQ ID NO: 828002 - RNA, 19 nt, Homo sapiens
  misc_RNA (1)...(19): siRNA sense strand
gauaaagacagaccuaaag

SEQ ID NO: 828003 - RNA, 19 nt, Homo sapiens
  misc_RNA (1)...(19): siRNA sense strand
uauggugucuuugaugaua

SEQ ID NO: 828004 - RNA, 19 nt, Homo sapiens
  misc_RNA (1)...(19): siRNA sense strand
gaauacagaaucccaaaca

SEQ ID NO: 828005 - RNA, 19 nt, Homo sapiens
  misc_RNA (1)...(19): siRNA sense strand
accaagagcuguugcaaga

SEQ ID NO: 828006 - RNA, 19 nt, Homo sapiens
  misc_RNA (1)...(19): siRNA sense strand
ggaguuuggucauccugaa

SEQ ID NO: 828007 - RNA, 19 nt, Homo sapiens
  misc_RNA (1)...(19): siRNA sense strand
gugacaaccuuccagagaa

SEQ ID NO: 828008 - RNA, 19 nt, Homo sapiens
  misc_RNA (1)...(19): siRNA sense strand
agaagaccaugugauuaua

SEQ ID NO: 828009 - RNA, 19 nt, Homo sapiens
  misc_RNA (1)...(19): siRNA sense strand
gaauucugcuggccagugu

SEQ ID NO: 828010 - RNA, 19 nt, Homo sapiens
  misc_RNA (1)...(19): siRNA sense strand
ccaccgcuguuuaugcuuu

SEQ ID NO: 828011 - RNA, 19 nt, Homo sapiens
  misc_RNA (1)...(19): siRNA sense strand
aguaacgaguucuggauua

SEQ ID NO: 828012 - RNA, 19 nt, Homo sapiens
  misc_RNA (1)...(19): siRNA sense strand
ggcaggauccuuucccaua

SEQ ID NO: 828013 - RNA, 19 nt, Homo sapiens
  misc_RNA (1)...(19): siRNA sense strand
aaagaagaccaugugauua

SEQ ID NO: 828014 - RNA, 19 nt, Homo sapiens
  misc_RNA (1)...(19): siRNA sense strand
ccuaaaggaugccaccuau

SEQ ID NO: 828015 - RNA, 19 nt, Homo sapiens
  misc_RNA (1)...(19): siRNA sense strand
ggaaauacugaauacuuug

SEQ ID NO: 828016 - RNA, 19 nt, Homo sapiens
  misc_RNA (1)...(19): siRNA sense strand
caagauuugucagaaguga

SEQ ID NO: 828017 - RNA, 19 nt, Homo sapiens
  misc_RNA (1)...(19): siRNA sense strand
ugcuaaagcuugcuacuug

SEQ ID NO: 828018 - RNA, 19 nt, Homo sapiens
  misc_RNA (1)...(19): siRNA sense strand
ggaaugguguggugguuac

SEQ ID NO: 828019 - RNA, 19 nt, Homo sapiens
  misc_RNA (1)...(19): siRNA sense strand
guucaggaauggcuuggaa

SEQ ID NO: 828020 - RNA, 19 nt, Homo sapiens
  misc_RNA (1)...(19): siRNA sense strand
ugaaguggccugauggaaa

SEQ ID NO: 828021 - RNA, 19 nt, Homo sapiens
  misc_RNA (1)...(19): siRNA sense strand
gcaccucgaucauuuauuu

SEQ ID NO: 828022 - RNA, 19 nt, Homo sapiens
  misc_RNA (1)...(19): siRNA sense strand
ggacauagaccucagaauu

SEQ ID NO: 828023 - RNA, 19 nt, Homo sapiens
  misc_RNA (1)...(19): siRNA sense strand
gcuaaaggaugaguuaaua

SEQ ID NO: 828024 - RNA, 19 nt, Homo sapiens
  misc_RNA (1)...(19): siRNA sense strand
gaccaacgcuuacaaauag

SEQ ID NO: 828025 - RNA, 19 nt, Homo sapiens
  misc_RNA (1)...(19): siRNA sense strand
gaacuaacacccaaauuug

SEQ ID NO: 828026 - RNA, 19 nt, Homo sapiens
  misc_RNA (1)...(19): siRNA sense strand
gggaugauauuaugaaguu

SEQ ID NO: 828027 - RNA, 19 nt, Homo sapiens
  misc_RNA (1)...(19): siRNA sense strand
ggaccaacgcuuacaaaua

SEQ ID NO: 828028 - RNA, 19 nt, Homo sapiens
  misc_RNA (1)...(19): siRNA sense strand
cagaagaugugaagauauu

SEQ ID NO: 828029 - RNA, 19 nt, Homo sapiens
  misc_RNA (1)...(19): siRNA sense strand
ggaagaguguguuuacgaa

SEQ ID NO: 828030 - RNA, 19 nt, Homo sapiens
  misc_RNA (1)...(19): siRNA sense strand
cagcauuggugccguguua

SEQ ID NO: 828031 - RNA, 19 nt, Homo sapiens
  misc_RNA (1)...(19): siRNA sense strand
agaaauugcugaaacaaga

SEQ ID NO: 828032 - RNA, 19 nt, Homo sapiens
  misc_RNA (1)...(19): siRNA sense strand
gacauagaccucagaauuu

SEQ ID NO: 828033 - RNA, 19 nt, Homo sapiens
  misc_RNA (1)...(19): siRNA sense strand
caacuacaaugcagaaaca

SEQ ID NO: 828034 - RNA, 19 nt, Homo sapiens
  misc_RNA (1)...(19): siRNA sense strand
gagagaaauugcugaaaca

SEQ ID NO: 828035 - RNA, 19 nt, Homo sapiens
  misc_RNA (1)...(19): siRNA sense strand
ggaagaauauaaggaugaa

SEQ ID NO: 828036 - RNA, 19 nt, Homo sapiens
  misc_RNA (1)...(19): siRNA sense strand
agagacagaugaagacaaa

SEQ ID NO: 828037 - RNA, 19 nt, Homo sapiens
  misc_RNA (1)...(19): siRNA sense strand
gaaacuggcaucacugcua

SEQ ID NO: 828038 - RNA, 19 nt, Homo sapiens
  misc_RNA (1)...(19): siRNA sense strand
guacuuacaagccgauaua

SEQ ID NO: 828039 - RNA, 19 nt, Homo sapiens
  misc_RNA (1)...(19): siRNA sense strand
uggaagagauaguacaauu

SEQ ID NO: 828040 - RNA, 19 nt, Homo sapiens
  misc_RNA (1)...(19): siRNA sense strand
gcaaagaugagcagagaga

SEQ ID NO: 828041 - RNA, 19 nt, Homo sapiens
  misc_RNA (1)...(19): siRNA sense strand
aaacuggcaucacugcuaa

SEQ ID NO: 828042 - RNA, 19 nt, Homo sapiens
  misc_RNA (1)...(19): siRNA sense strand
ugaagaauauccuaaacug

SEQ ID NO: 828043 - RNA, 19 nt, Homo sapiens
  misc_RNA (1)...(19): siRNA sense strand
ggacuugggaugauauuau

SEQ ID NO: 828044 - RNA, 19 nt, Homo sapiens
  misc_RNA (1)...(19): siRNA sense strand
uacagaagaugugaagaua

SEQ ID NO: 828045 - RNA, 19 nt, Homo sapiens
  misc_RNA (1)...(19): siRNA sense strand
gaagaaaauuugccauaug

SEQ ID NO: 828046 - RNA, 19 nt, Homo sapiens
  misc_RNA (1)...(19): siRNA sense strand
gaaagugccgacagcauug

SEQ ID NO: 828047 - RNA, 19 nt, Homo sapiens
  misc_RNA (1)...(19): siRNA sense strand
agaaacauaugcauccuau

SEQ ID NO: 828048 - RNA, 19 nt, Homo sapiens
  misc_RNA (1)...(19): siRNA sense strand
ggacuucauucaugcuaau

SEQ ID NO: 828049 - RNA, 19 nt, Homo sapiens
  misc_RNA (1)...(19): siRNA sense strand
uagcaaagaugagcagaga

SEQ ID NO: 828050 - RNA, 19 nt, Homo sapiens
  misc_RNA (1)...(19): siRNA sense strand
gaagaugugaagauauuug

SEQ ID NO: 828051 - RNA, 19 nt, Homo sapiens
  misc_RNA (1)...(19): siRNA sense strand
gaagaauauccuaaacuga

SEQ ID NO: 828052 - RNA, 19 nt, Homo sapiens
  misc_RNA (1)...(19): siRNA sense strand
agguuuagcugacagauuu

SEQ ID NO: 828053 - RNA, 19 nt, Homo sapiens
  misc_RNA (1)...(19): siRNA sense strand
agaacuaacacccaaauuu

SEQ ID NO: 828054 - RNA, 19 nt, Homo sapiens
  misc_RNA (1)...(19): siRNA sense strand
gaacacagagcuuaaaucc

SEQ ID NO: 828055 - RNA, 19 nt, Homo sapiens
  misc_RNA (1)...(19): siRNA sense strand
uggcaucacugcuaaugaa

SEQ ID NO: 828056 - RNA, 19 nt, Homo sapiens
  misc_RNA (1)...(19): siRNA sense strand
acaaauagcaacuacaaug

SEQ ID NO: 828057 - RNA, 19 nt, Homo sapiens
  misc_RNA (1)...(19): siRNA sense strand
gaugugaagauauuuguug

SEQ ID NO: 828058 - RNA, 19 nt, Homo sapiens
  misc_RNA (1)...(19): siRNA sense strand
cagaagaaauugagagacu

SEQ ID NO: 828059 - RNA, 19 nt, Homo sapiens
  misc_RNA (1)...(19): siRNA sense strand
gaagaagagauuuacaaag

SEQ ID NO: 828060 - RNA, 19 nt, Homo sapiens
  misc_RNA (1)...(19): siRNA sense strand
gcugacagauuugaagaau

SEQ ID NO: 828061 - RNA, 19 nt, Homo sapiens
  misc_RNA (1)...(19): siRNA sense strand
uauagaagccuuugacauc

SEQ ID NO: 828062 - RNA, 19 nt, Homo sapiens
  misc_RNA (1)...(19): siRNA sense strand
cgagaaagaaauagaucua

SEQ ID NO: 828063 - RNA, 19 nt, Homo sapiens
  misc_RNA (1)...(19): siRNA sense strand
gaagagauaguacaauucg

SEQ ID NO: 828064 - RNA, 19 nt, Homo sapiens
  misc_RNA (1)...(19): siRNA sense strand
gcagagagaaauugcugaa

SEQ ID NO: 828065 - RNA, 19 nt, Homo sapiens
  misc_RNA (1)...(19): siRNA sense strand
cagaagaaccugaaauugg

SEQ ID NO: 828066 - RNA, 19 nt, Homo sapiens
  misc_RNA (1)...(19): siRNA sense strand
gcaacaggaugaagaaaau

SEQ ID NO: 828067 - RNA, 19 nt, Homo sapiens
  misc_RNA (1)...(19): siRNA sense strand
gcuccuaauuccuacuuga

SEQ ID NO: 828068 - RNA, 19 nt, Homo sapiens
  misc_RNA (1)...(19): siRNA sense strand
gcagcaccucgaucauuua

SEQ ID NO: 828069 - RNA, 19 nt, Homo sapiens
  misc_RNA (1)...(19): siRNA sense strand
cagagaaacuggcaucacu

SEQ ID NO: 828070 - RNA, 19 nt, Homo sapiens
  misc_RNA (1)...(19): siRNA sense strand
gacuugggaugauauuaug

SEQ ID NO: 828071 - RNA, 19 nt, Homo sapiens
  misc_RNA (1)...(19): siRNA sense strand
gaagaguguguuuacgaaa

SEQ ID NO: 828072 - RNA, 19 nt, Homo sapiens
  misc_RNA (1)...(19): siRNA sense strand
ugaaagugccgacagcauu

SEQ ID NO: 828073 - RNA, 19 nt, Homo sapiens
  misc_RNA (1)...(19): siRNA sense strand
ggaagagauaguacaauuc

SEQ ID NO: 828074 - RNA, 19 nt, Homo sapiens
  misc_RNA (1)...(19): siRNA sense strand
aaggaugaguuaauagcua

SEQ ID NO: 828075 - RNA, 19 nt, Homo sapiens
  misc_RNA (1)...(19): siRNA sense strand
uguagacacuggacauaga

SEQ ID NO: 828076 - RNA, 19 nt, Homo sapiens
  misc_RNA (1)...(19): siRNA sense strand
acacagagguggcuuucca

SEQ ID NO: 828077 - RNA, 19 nt, Homo sapiens
  misc_RNA (1)...(19): siRNA sense strand
ggacgagaaagaaauagau

SEQ ID NO: 828078 - RNA, 19 nt, Homo sapiens
  misc_RNA (1)...(19): siRNA sense strand
cuacaaugcagaaacauau

SEQ ID NO: 828079 - RNA, 19 nt, Homo sapiens
  misc_RNA (1)...(19): siRNA sense strand
cacagaagaaccugaaauu

SEQ ID NO: 828080 - RNA, 19 nt, Homo sapiens
  misc_RNA (1)...(19): siRNA sense strand
gugaagauauuuguuggau

SEQ ID NO: 828081 - RNA, 19 nt, Homo sapiens
  misc_RNA (1)...(19): siRNA sense strand
ugcagcaccucgaucauuu

SEQ ID NO: 828082 - RNA, 19 nt, Homo sapiens
  misc_RNA (1)...(19): siRNA sense strand
acauagaccucagaauuuc

SEQ ID NO: 828083 - RNA, 19 nt, Homo sapiens
  misc_RNA (1)...(19): siRNA sense strand
uaacacuccucccauguac

SEQ ID NO: 828084 - RNA, 19 nt, Homo sapiens
  misc_RNA (1)...(19): siRNA sense strand
cuacuugacugguuguaca

SEQ ID NO: 828085 - RNA, 19 nt, Homo sapiens
  misc_RNA (1)...(19): siRNA sense strand
gaaguuagaaauugaugag

SEQ ID NO: 828086 - RNA, 19 nt, Homo sapiens
  misc_RNA (1)...(19): siRNA sense strand
gaucaaaggaacugugaag

SEQ ID NO: 828087 - RNA, 19 nt, Homo sapiens
  misc_RNA (1)...(19): siRNA sense strand
ucccagagguggaggaaga

SEQ ID NO: 828088 - RNA, 19 nt, Homo sapiens
  misc_RNA (1)...(19): siRNA sense strand
uaugauaccucugcuccaa

SEQ ID NO: 828089 - RNA, 19 nt, Homo sapiens
  misc_RNA (1)...(19): siRNA sense strand
gagcuuaaauccccauaau

SEQ ID NO: 828090 - RNA, 19 nt, Homo sapiens
  misc_RNA (1)...(19): siRNA sense strand
agagagaaauugcugaaac

SEQ ID NO: 828091 - RNA, 19 nt, Homo sapiens
  misc_RNA (1)...(19): siRNA sense strand
gggacuucauucaugcuaa

SEQ ID NO: 828092 - RNA, 19 nt, Homo sapiens
  misc_RNA (1)...(19): siRNA sense strand
aggaugaguuaauagcuaa

SEQ ID NO: 828093 - RNA, 19 nt, Homo sapiens
  misc_RNA (1)...(19): siRNA sense strand
cuuacaagccgauauagaa

SEQ ID NO: 828094 - RNA, 19 nt, Homo sapiens
  misc_RNA (1)...(19): siRNA sense strand
ugggaagacuaagacuuua

SEQ ID NO: 828095 - RNA, 19 nt, Homo sapiens
  misc_RNA (1)...(19): siRNA sense strand
gcauuggugccguguuaaa

SEQ ID NO: 828096 - RNA, 19 nt, Homo sapiens
  misc_RNA (1)...(19): siRNA sense strand
ucagugcuccuaauuccua

SEQ ID NO: 828097 - RNA, 19 nt, Homo sapiens
  misc_RNA (1)...(19): siRNA sense strand
acauaugcauccuauuuca

SEQ ID NO: 828098 - RNA, 19 nt, Homo sapiens
  misc_RNA (1)...(19): siRNA sense strand
acccaaauuugaugugauu

SEQ ID NO: 828099 - RNA, 19 nt, Homo sapiens
  misc_RNA (1)...(19): siRNA sense strand
uaacuuccgaggagaaaga

SEQ ID NO: 828100 - RNA, 19 nt, Homo sapiens
  misc_RNA (1)...(19): siRNA sense strand
aagacgccuucaucuauuu

SEQ ID NO: 828101 - RNA, 19 nt, Homo sapiens
  misc_RNA (1)...(19): siRNA sense strand
ugauaccucugcuccaaau

SEQ ID NO: 828102 - RNA, 19 nt, Homo sapiens
  misc_RNA (1)...(19): siRNA sense strand
caggcuaaaggaugaguua

SEQ ID NO: 828103 - RNA, 19 nt, Homo sapiens
  misc_RNA (1)...(19): siRNA sense strand
uugcagggcuuccuaugau

SEQ ID NO: 828104 - RNA, 19 nt, Homo sapiens
  misc_RNA (1)...(19): siRNA sense strand
ggaggaagagguggaacuu

SEQ ID NO: 828105 - RNA, 19 nt, Homo sapiens
  misc_RNA (1)...(19): siRNA sense strand
aaaaugggguuacagaaga

SEQ ID NO: 828106 - RNA, 19 nt, Homo sapiens
  misc_RNA (1)...(19): siRNA sense strand
gcaguugggagcugaaagu

SEQ ID NO: 828107 - RNA, 19 nt, Homo sapiens
  misc_RNA (1)...(19): siRNA sense strand
cuaacacuccucccaugua

SEQ ID NO: 828108 - RNA, 19 nt, Homo sapiens
  misc_RNA (1)...(19): siRNA sense strand
gagaacuaacacccaaauu

SEQ ID NO: 828109 - RNA, 19 nt, Homo sapiens
  misc_RNA (1)...(19): siRNA sense strand
gaugagcagagagaaauug

SEQ ID NO: 828110 - RNA, 19 nt, Homo sapiens
  misc_RNA (1)...(19): siRNA sense strand
aaagaugagcagagagaaa

SEQ ID NO: 828111 - RNA, 19 nt, Homo sapiens
  misc_RNA (1)...(19): siRNA sense strand
cugggaagacuaagacuuu

SEQ ID NO: 828112 - RNA, 19 nt, Homo sapiens
  misc_RNA (1)...(19): siRNA sense strand
cguguuaaauagcaaagau

SEQ ID NO: 828113 - RNA, 19 nt, Homo sapiens
  misc_RNA (1)...(19): siRNA sense strand
gcuuaaauccccauaauga

SEQ ID NO: 828114 - RNA, 19 nt, Homo sapiens
  misc_RNA (1)...(19): siRNA sense strand
ggaacacagagcuuaaauc

SEQ ID NO: 828115 - RNA, 19 nt, Homo sapiens
  misc_RNA (1)...(19): siRNA sense strand
auagaagccuuugacauca

SEQ ID NO: 828116 - RNA, 19 nt, Homo sapiens
  misc_RNA (1)...(19): siRNA sense strand
gcacacagagguggcuuuc

SEQ ID NO: 828117 - RNA, 19 nt, Homo sapiens
  misc_RNA (1)...(19): siRNA sense strand
gggaucaaaggaacuguga

SEQ ID NO: 828118 - RNA, 19 nt, Homo sapiens
  misc_RNA (1)...(19): siRNA sense strand
aaaggaacacugccucaug

SEQ ID NO: 828119 - RNA, 19 nt, Homo sapiens
  misc_RNA (1)...(19): siRNA sense strand
ugaaggagagacagaugaa

SEQ ID NO: 828120 - RNA, 19 nt, Homo sapiens
  misc_RNA (1)...(19): siRNA sense strand
gagaaauugcugaaacaag

SEQ ID NO: 828121 - RNA, 19 nt, Homo sapiens
  misc_RNA (1)...(19): siRNA sense strand
caacacagauuaugaguuc

SEQ ID NO: 828122 - RNA, 19 nt, Homo sapiens
  misc_RNA (1)...(19): siRNA sense strand
gcucguggcuuucaacaaa

SEQ ID NO: 828123 - RNA, 19 nt, Homo sapiens
  misc_RNA (1)...(19): siRNA sense strand
ggaaaugagacacagcuua

SEQ ID NO: 828124 - RNA, 19 nt, Homo sapiens
  misc_RNA (1)...(19): siRNA sense strand
gaaaugagacacagcuuau

SEQ ID NO: 828125 - RNA, 19 nt, Homo sapiens
  misc_RNA (1)...(19): siRNA sense strand
agaagaaagugaagcagua

SEQ ID NO: 828126 - RNA, 19 nt, Homo sapiens
  misc_RNA (1)...(19): siRNA sense strand
gagaagacauccucauugg

SEQ ID NO: 828127 - RNA, 19 nt, Homo sapiens
  misc_RNA (1)...(19): siRNA sense strand
gaacaacgacaccacagaa

SEQ ID NO: 828128 - RNA, 19 nt, Homo sapiens
  misc_RNA (1)...(19): siRNA sense strand
gguggaggcugaagucauu

SEQ ID NO: 828129 - RNA, 19 nt, Homo sapiens
  misc_RNA (1)...(19): siRNA sense strand
gaacgggacagcucgcuuu

SEQ ID NO: 828130 - RNA, 19 nt, Homo sapiens
  misc_RNA (1)...(19): siRNA sense strand
gaucucaucucggguguug

SEQ ID NO: 828131 - RNA, 19 nt, Homo sapiens
  misc_RNA (1)...(19): siRNA sense strand
caagauagaauacgguuug

SEQ ID NO: 828132 - RNA, 19 nt, Homo sapiens
  misc_RNA (1)...(19): siRNA sense strand
ggacauggaugggccuuuc

SEQ ID NO: 828133 - RNA, 19 nt, Homo sapiens
  misc_RNA (1)...(19): siRNA sense strand
ggagaagacauccucauug

SEQ ID NO: 828134 - RNA, 19 nt, Homo sapiens
  misc_RNA (1)...(19): siRNA sense strand
ggaaaggaagaucagauuu

SEQ ID NO: 828135 - RNA, 19 nt, Homo sapiens
  misc_RNA (1)...(19): siRNA sense strand
uggaguaucugauccugua

SEQ ID NO: 828136 - RNA, 19 nt, Homo sapiens
  misc_RNA (1)...(19): siRNA sense strand
gaacugggcagacgcuguu

SEQ ID NO: 828137 - RNA, 19 nt, Homo sapiens
  misc_RNA (1)...(19): siRNA sense strand
ggaagcccaucuccacaga

SEQ ID NO: 828138 - RNA, 19 nt, Homo sapiens
  misc_RNA (1)...(19): siRNA sense strand
caacgacaccacagaacua

SEQ ID NO: 828139 - RNA, 19 nt, Homo sapiens
  misc_RNA (1)...(19): siRNA sense strand
gaauaccaguuugcaguga

SEQ ID NO: 828140 - RNA, 19 nt, Homo sapiens
  misc_RNA (1)...(19): siRNA sense strand
gcaccaaccuacuaauugc

SEQ ID NO: 828141 - RNA, 19 nt, Homo sapiens
  misc_RNA (1)...(19): siRNA sense strand
ucaaacagcuccacaucca

SEQ ID NO: 828142 - RNA, 19 nt, Homo sapiens
  misc_RNA (1)...(19): siRNA sense strand
guacggauuucggcuggua

SEQ ID NO: 828143 - RNA, 19 nt, Homo sapiens
  misc_RNA (1)...(19): siRNA sense strand
gcauggacaauguggaaua

SEQ ID NO: 828144 - RNA, 19 nt, Homo sapiens
  misc_RNA (1)...(19): siRNA sense strand
cagucaagauugucaacua

SEQ ID NO: 828145 - RNA, 19 nt, Homo sapiens
  misc_RNA (1)...(19): siRNA sense strand
gaaaggaagaucagauuuu

SEQ ID NO: 828146 - RNA, 19 nt, Homo sapiens
  misc_RNA (1)...(19): siRNA sense strand
gagcgacacucgguacuuc

SEQ ID NO: 828147 - RNA, 19 nt, Homo sapiens
  misc_RNA (1)...(19): siRNA sense strand
gcaaugggcagguggugaa

SEQ ID NO: 828148 - RNA, 19 nt, Homo sapiens
  misc_RNA (1)...(19): siRNA sense strand
gggaaaggaagaucagauu

SEQ ID NO: 828149 - RNA, 19 nt, Homo sapiens
  misc_RNA (1)...(19): siRNA sense strand
aaacaagguguaucgagua

SEQ ID NO: 828150 - RNA, 19 nt, Homo sapiens
  misc_RNA (1)...(19): siRNA sense strand
cuacugaggugcgaggaaa

SEQ ID NO: 828151 - RNA, 19 nt, Homo sapiens
  misc_RNA (1)...(19): siRNA sense strand
gaagugcacagccuuaugg

SEQ ID NO: 828152 - RNA, 19 nt, Homo sapiens
  misc_RNA (1)...(19): siRNA sense strand
gaagaaagugaagcaguau

SEQ ID NO: 828153 - RNA, 19 nt, Homo sapiens
  misc_RNA (1)...(19): siRNA sense strand
caauguggaauaccaguuu

SEQ ID NO: 828154 - RNA, 19 nt, Homo sapiens
  misc_RNA (1)...(19): siRNA sense strand
gcuggagcacgaccacuua

SEQ ID NO: 828155 - RNA, 19 nt, Homo sapiens
  misc_RNA (1)...(19): siRNA sense strand
cagcucccaucauuacuug

SEQ ID NO: 828156 - RNA, 19 nt, Homo sapiens
  misc_RNA (1)...(19): siRNA sense strand
gcaaugggaggaagaaguc

SEQ ID NO: 828157 - RNA, 19 nt, Homo sapiens
  misc_RNA (1)...(19): siRNA sense strand
ggcaggacguggucauugu

SEQ ID NO: 828158 - RNA, 19 nt, Homo sapiens
  misc_RNA (1)...(19): siRNA sense strand
agaaggaccaggugacauu

SEQ ID NO: 828159 - RNA, 19 nt, Homo sapiens
  misc_RNA (1)...(19): siRNA sense strand
ccucccuggucaccuauua

SEQ ID NO: 828160 - RNA, 19 nt, Homo sapiens
  misc_RNA (1)...(19): siRNA sense strand
gaucucuggcuacaaacua

SEQ ID NO: 828161 - RNA, 19 nt, Homo sapiens
  misc_RNA (1)...(19): siRNA sense strand
gaaggugcaggcaaagaug

SEQ ID NO: 828162 - RNA, 19 nt, Homo sapiens
  misc_RNA (1)...(19): siRNA sense strand
ccacguccaugcggaauca

SEQ ID NO: 828163 - RNA, 19 nt, Homo sapiens
  misc_RNA (1)...(19): siRNA sense strand
gaacccaacacagauuaug

SEQ ID NO: 828164 - RNA, 19 nt, Homo sapiens
  misc_RNA (1)...(19): siRNA sense strand
cagacagacuuaccugcuu

SEQ ID NO: 828165 - RNA, 19 nt, Homo sapiens
  misc_RNA (1)...(19): siRNA sense strand
agaaagugaagcaguauga

SEQ ID NO: 828166 - RNA, 19 nt, Homo sapiens
  misc_RNA (1)...(19): siRNA sense strand
caucacaggacgcccagua

SEQ ID NO: 828167 - RNA, 19 nt, Homo sapiens
  misc_RNA (1)...(19): siRNA sense strand
gggcauggacaauguggaa

SEQ ID NO: 828168 - RNA, 19 nt, Homo sapiens
  misc_RNA (1)...(19): siRNA sense strand
gaucagauuuucucuacug

SEQ ID NO: 828169 - RNA, 19 nt, Homo sapiens
  misc_RNA (1)...(19): siRNA sense strand
gaaguacaagauagaauac

SEQ ID NO: 828170 - RNA, 19 nt, Homo sapiens
  misc_RNA (1)...(19): siRNA sense strand
gguggugaaguacaagaua

SEQ ID NO: 828171 - RNA, 19 nt, Homo sapiens
  misc_RNA (1)...(19): siRNA sense strand
ucaccacagucaagauugu

SEQ ID NO: 828172 - RNA, 19 nt, Homo sapiens
  misc_RNA (1)...(19): siRNA sense strand
ggaagggcaagacggagaa

SEQ ID NO: 828173 - RNA, 19 nt, Homo sapiens
  misc_RNA (1)...(19): siRNA sense strand
ccagacugcugucgucaag

SEQ ID NO: 828174 - RNA, 19 nt, Homo sapiens
  misc_RNA (1)...(19): siRNA sense strand
ggcagguggugaaguacaa

SEQ ID NO: 828175 - RNA, 19 nt, Homo sapiens
  misc_RNA (1)...(19): siRNA sense strand
uagaauacgguuugggaaa

SEQ ID NO: 828176 - RNA, 19 nt, Homo sapiens
  misc_RNA (1)...(19): siRNA sense strand
acacagauuaugaguucua

SEQ ID NO: 828177 - RNA, 19 nt, Homo sapiens
  misc_RNA (1)...(19): siRNA sense strand
ggucauugaaggcaacuau

SEQ ID NO: 828178 - RNA, 19 nt, Homo sapiens
  misc_RNA (1)...(19): siRNA sense strand
gaauacgguuugggaaagg

SEQ ID NO: 828179 - RNA, 19 nt, Homo sapiens
  misc_RNA (1)...(19): siRNA sense strand
cagacucgcuggacaugca

SEQ ID NO: 828180 - RNA, 19 nt, Homo sapiens
  misc_RNA (1)...(19): siRNA sense strand
gaaggaccaggugacauug

SEQ ID NO: 828181 - RNA, 19 nt, Homo sapiens
  misc_RNA (1)...(19): siRNA sense strand
gcagggaaacaucuucagu

SEQ ID NO: 828182 - RNA, 19 nt, Homo sapiens
  misc_RNA (1)...(19): siRNA sense strand
guggugaaguacaagauag

SEQ ID NO: 828183 - RNA, 19 nt, Homo sapiens
  misc_RNA (1)...(19): siRNA sense strand
gcacagcgagcagaucauc

SEQ ID NO: 828184 - RNA, 19 nt, Homo sapiens
  misc_RNA (1)...(19): siRNA sense strand
ggagaaggaccaggugaca

SEQ ID NO: 828185 - RNA, 19 nt, Homo sapiens
  misc_RNA (1)...(19): siRNA sense strand
gaggugcgaggaaaugaga

SEQ ID NO: 828186 - RNA, 19 nt, Homo sapiens
  misc_RNA (1)...(19): siRNA sense strand
cggcuucucucuccacuac

SEQ ID NO: 828187 - RNA, 19 nt, Homo sapiens
  misc_RNA (1)...(19): siRNA sense strand
caacggcguccuucagauc

SEQ ID NO: 828188 - RNA, 19 nt, Homo sapiens
  misc_RNA (1)...(19): siRNA sense strand
ggguggcgguguuucugaa

SEQ ID NO: 828189 - RNA, 19 nt, Homo sapiens
  misc_RNA (1)...(19): siRNA sense strand
gacacucgguacuucuuca

SEQ ID NO: 828190 - RNA, 19 nt, Homo sapiens
  misc_RNA (1)...(19): siRNA sense strand
cgggacagcucgcuuugag

SEQ ID NO: 828191 - RNA, 19 nt, Homo sapiens
  misc_RNA (1)...(19): siRNA sense strand
caucauuacuugggagaag

SEQ ID NO: 828192 - RNA, 19 nt, Homo sapiens
  misc_RNA (1)...(19): siRNA sense strand
agaguguggugauggaaug

SEQ ID NO: 828193 - RNA, 19 nt, Homo sapiens
  misc_RNA (1)...(19): siRNA sense strand
gccagaguguggugaugga

SEQ ID NO: 828194 - RNA, 19 nt, Homo sapiens
  misc_RNA (1)...(19): siRNA sense strand
ugaagucauuguccacucu

SEQ ID NO: 828195 - RNA, 19 nt, Homo sapiens
  misc_RNA (1)...(19): siRNA sense strand
agaauacgguuugggaaag

SEQ ID NO: 828196 - RNA, 19 nt, Homo sapiens
  misc_RNA (1)...(19): siRNA sense strand
ccaggaggcccuacucagu

SEQ ID NO: 828197 - RNA, 19 nt, Homo sapiens
  misc_RNA (1)...(19): siRNA sense strand
gaggagaccccuggagaua

SEQ ID NO: 828198 - RNA, 19 nt, Homo sapiens
  misc_RNA (1)...(19): siRNA sense strand
ccaacggcguccuucagau

SEQ ID NO: 828199 - RNA, 19 nt, Homo sapiens
  misc_RNA (1)...(19): siRNA sense strand
uggagaagacauccucauu

SEQ ID NO: 828200 - RNA, 19 nt, Homo sapiens
  misc_RNA (1)...(19): siRNA sense strand
gaaucaaacagcuccacau

SEQ ID NO: 828201 - RNA, 19 nt, Homo sapiens
  misc_RNA (1)...(19): siRNA sense strand
guguaucgaguacggauuu

SEQ ID NO: 828202 - RNA, 19 nt, Homo sapiens
  misc_RNA (1)...(19): siRNA sense strand
gggcaggacguggucauug

SEQ ID NO: 828203 - RNA, 19 nt, Homo sapiens
  misc_RNA (1)...(19): siRNA sense strand
ccaucuggcuucgguggaa

SEQ ID NO: 828204 - RNA, 19 nt, Homo sapiens
  misc_RNA (1)...(19): siRNA sense strand
caccagacaugccuaucca

SEQ ID NO: 828205 - RNA, 19 nt, Homo sapiens
  misc_RNA (1)...(19): siRNA sense strand
ccagagccaugucccuuuu

SEQ ID NO: 828206 - RNA, 19 nt, Homo sapiens
  misc_RNA (1)...(19): siRNA sense strand
augggcagguggugaagua

SEQ ID NO: 828207 - RNA, 19 nt, Homo sapiens
  misc_RNA (1)...(19): siRNA sense strand
ccgcaccaaccuacuaauu

SEQ ID NO: 828208 - RNA, 19 nt, Homo sapiens
  misc_RNA (1)...(19): siRNA sense strand
gcacuccggcgucuauguc

SEQ ID NO: 828209 - RNA, 19 nt, Homo sapiens
  misc_RNA (1)...(19): siRNA sense strand
gguguacgacgccauaaag

SEQ ID NO: 828210 - RNA, 19 nt, Homo sapiens
  misc_RNA (1)...(19): siRNA sense strand
ucaagaagaaagugaagca

SEQ ID NO: 828211 - RNA, 19 nt, Homo sapiens
  misc_RNA (1)...(19): siRNA sense strand
ucacaggacgcccaguaug

SEQ ID NO: 828212 - RNA, 19 nt, Homo sapiens
  misc_RNA (1)...(19): siRNA sense strand
uggaacccaacacagauua

SEQ ID NO: 828213 - RNA, 19 nt, Homo sapiens
  misc_RNA (1)...(19): siRNA sense strand
ggaccuggaacccaacaca

SEQ ID NO: 828214 - RNA, 19 nt, Homo sapiens
  misc_RNA (1)...(19): siRNA sense strand
gcagaucaucggcuucucu

SEQ ID NO: 828215 - RNA, 19 nt, Homo sapiens
  misc_RNA (1)...(19): siRNA sense strand
ggaacccaacacagauuau

SEQ ID NO: 828216 - RNA, 19 nt, Homo sapiens
  misc_RNA (1)...(19): siRNA sense strand
ggaggacagggcugaagug

SEQ ID NO: 828217 - RNA, 19 nt, Homo sapiens
  misc_RNA (1)...(19): siRNA sense strand
aguugaaggugcaggcaaa

SEQ ID NO: 828218 - RNA, 19 nt, Homo sapiens
  misc_RNA (1)...(19): siRNA sense strand
gaagaucagauuuucucua

SEQ ID NO: 828219 - RNA, 19 nt, Homo sapiens
  misc_RNA (1)...(19): siRNA sense strand
agaccaggcuugggaugug

SEQ ID NO: 828220 - RNA, 19 nt, Homo sapiens
  misc_RNA (1)...(19): siRNA sense strand
ccagauuucaccacaguca

SEQ ID NO: 828221 - RNA, 19 nt, Homo sapiens
  misc_RNA (1)...(19): siRNA sense strand
ucacagagcugaagaagaa

SEQ ID NO: 828222 - RNA, 19 nt, Homo sapiens
  misc_RNA (1)...(19): siRNA sense strand
ggaagaaaguggagaaaga

SEQ ID NO: 828223 - RNA, 19 nt, Homo sapiens
  misc_RNA (1)...(19): siRNA sense strand
ggaggacccuucagcuaaa

SEQ ID NO: 828224 - RNA, 19 nt, Homo sapiens
  misc_RNA (1)...(19): siRNA sense strand
gagcagcgauucauacauc

SEQ ID NO: 828225 - RNA, 19 nt, Homo sapiens
  misc_RNA (1)...(19): siRNA sense strand
ggagaaagaugagaacuac

SEQ ID NO: 828226 - RNA, 19 nt, Homo sapiens
  misc_RNA (1)...(19): siRNA sense strand
ugacaucuaugaagaguau

SEQ ID NO: 828227 - RNA, 19 nt, Homo sapiens
  misc_RNA (1)...(19): siRNA sense strand
gaaggaggcagacgccaua

SEQ ID NO: 828228 - RNA, 19 nt, Homo sapiens
  misc_RNA (1)...(19): siRNA sense strand
gcaaccaaguccagaagaa

SEQ ID NO: 828229 - RNA, 19 nt, Homo sapiens
  misc_RNA (1)...(19): siRNA sense strand
ccaaguaccacauggcuua

SEQ ID NO: 828230 - RNA, 19 nt, Homo sapiens
  misc_RNA (1)...(19): siRNA sense strand
ccacauggcuuaccucacu

SEQ ID NO: 828231 - RNA, 19 nt, Homo sapiens
  misc_RNA (1)...(19): siRNA sense strand
ccacugaaguugugaucuu

SEQ ID NO: 828232 - RNA, 19 nt, Homo sapiens
  misc_RNA (1)...(19): siRNA sense strand
ccauugacaucuaugaaga

SEQ ID NO: 828233 - RNA, 19 nt, Homo sapiens
  misc_RNA (1)...(19): siRNA sense strand
gcggagcuauccaccauug

SEQ ID NO: 828234 - RNA, 19 nt, Homo sapiens
  misc_RNA (1)...(19): siRNA sense strand
ucagagcgguuugagauga

SEQ ID NO: 828235 - RNA, 19 nt, Homo sapiens
  misc_RNA (1)...(19): siRNA sense strand
cguagccucuuccauguuu

SEQ ID NO: 828236 - RNA, 19 nt, Homo sapiens
  misc_RNA (1)...(19): siRNA sense strand
gaggaggacccuucagcua

SEQ ID NO: 828237 - RNA, 19 nt, Homo sapiens
  misc_RNA (1)...(19): siRNA sense strand
ggaagcagcggaggaagaa

SEQ ID NO: 828238 - RNA, 19 nt, Homo sapiens
  misc_RNA (1)...(19): siRNA sense strand
gccaagacgucagcugaaa

SEQ ID NO: 828239 - RNA, 19 nt, Homo sapiens
  misc_RNA (1)...(19): siRNA sense strand
gaagaaaguggagaaagau

SEQ ID NO: 828240 - RNA, 19 nt, Homo sapiens
  misc_RNA (1)...(19): siRNA sense strand
gcauacuccugcuuggauu

SEQ ID NO: 828241 - RNA, 19 nt, Homo sapiens
  misc_RNA (1)...(19): siRNA sense strand
ggacaucaccaagaaggaa

SEQ ID NO: 828242 - RNA, 19 nt, Homo sapiens
  misc_RNA (1)...(19): siRNA sense strand
gggaagcagugcaauuucu

SEQ ID NO: 828243 - RNA, 19 nt, Homo sapiens
  misc_RNA (1)...(19): siRNA sense strand
ggaaguuggcaguggcaua

SEQ ID NO: 828244 - RNA, 19 nt, Homo sapiens
  misc_RNA (1)...(19): siRNA sense strand
ggaguucgaaucuacuuug

SEQ ID NO: 828245 - RNA, 19 nt, Homo sapiens
  misc_RNA (1)...(19): siRNA sense strand
cugcuacaauggacagaua

SEQ ID NO: 828246 - RNA, 19 nt, Homo sapiens
  misc_RNA (1)...(19): siRNA sense strand
gaaagaugagaacuacguu

SEQ ID NO: 828247 - RNA, 19 nt, Homo sapiens
  misc_RNA (1)...(19): siRNA sense strand
gaggaguucuucgacauca

SEQ ID NO: 828248 - RNA, 19 nt, Homo sapiens
  misc_RNA (1)...(19): siRNA sense strand
ggacggaacccuggauauc

SEQ ID NO: 828249 - RNA, 19 nt, Homo sapiens
  misc_RNA (1)...(19): siRNA sense strand
ccaccgagacccuguguau

SEQ ID NO: 828250 - RNA, 19 nt, Homo sapiens
  misc_RNA (1)...(19): siRNA sense strand
ggaggcagacgccauaaag

SEQ ID NO: 828251 - RNA, 19 nt, Homo sapiens
  misc_RNA (1)...(19): siRNA sense strand
gagcgagcccacugaaguu

SEQ ID NO: 828252 - RNA, 19 nt, Homo sapiens
  misc_RNA (1)...(19): siRNA sense strand
ccaucuggcugcagucgaa

SEQ ID NO: 828253 - RNA, 19 nt, Homo sapiens
  misc_RNA (1)...(19): siRNA sense strand
gaugagaacuacguuaacg

SEQ ID NO: 828254 - RNA, 19 nt, Homo sapiens
  misc_RNA (1)...(19): siRNA sense strand
caucuacgcccuccagaga

SEQ ID NO: 828255 - RNA, 19 nt, Homo sapiens
  misc_RNA (1)...(19): siRNA sense strand
gacgucagcugaaaagauu

SEQ ID NO: 828256 - RNA, 19 nt, Homo sapiens
  misc_RNA (1)...(19): siRNA sense strand
aaagaugagaacuacguua

SEQ ID NO: 828257 - RNA, 19 nt, Homo sapiens
  misc_RNA (1)...(19): siRNA sense strand
ggaugaagaaguggaagaa

SEQ ID NO: 828258 - RNA, 19 nt, Homo sapiens
  misc_RNA (1)...(19): siRNA sense strand
ggaagaaggggaugaagaa

SEQ ID NO: 828259 - RNA, 19 nt, Homo sapiens
  misc_RNA (1)...(19): siRNA sense strand
aagaugagaacuacguuaa

SEQ ID NO: 828260 - RNA, 19 nt, Homo sapiens
  misc_RNA (1)...(19): siRNA sense strand
gagcugaacaucgacauca

SEQ ID NO: 828261 - RNA, 19 nt, Homo sapiens
  misc_RNA (1)...(19): siRNA sense strand
augaagaaguggaagaaga

SEQ ID NO: 828262 - RNA, 19 nt, Homo sapiens
  misc_RNA (1)...(19): siRNA sense strand
gaucccacccucagcuuga

SEQ ID NO: 828263 - RNA, 19 nt, Homo sapiens
  misc_RNA (1)...(19): siRNA sense strand
gaaaguggagaaagaugag

SEQ ID NO: 828264 - RNA, 19 nt, Homo sapiens
  misc_RNA (1)...(19): siRNA sense strand
gcagcucggcucuaucaug

SEQ ID NO: 828265 - RNA, 19 nt, Homo sapiens
  misc_RNA (1)...(19): siRNA sense strand
ucaugcagcucggcucuau

SEQ ID NO: 828266 - RNA, 19 nt, Homo sapiens
  misc_RNA (1)...(19): siRNA sense strand
cagagcgguuugagaugaa

SEQ ID NO: 828267 - RNA, 19 nt, Homo sapiens
  misc_RNA (1)...(19): siRNA sense strand
ggaacacgaggccaacuca

SEQ ID NO: 828268 - RNA, 19 nt, Homo sapiens
  misc_RNA (1)...(19): siRNA sense strand
gaagacagccgggaaucgu

SEQ ID NO: 828269 - RNA, 19 nt, Homo sapiens
  misc_RNA (1)...(19): siRNA sense strand
ucuacgcccuccagagaaa

SEQ ID NO: 828270 - RNA, 19 nt, Homo sapiens
  misc_RNA (1)...(19): siRNA sense strand
gaaguuggcaguggcauac

SEQ ID NO: 828271 - RNA, 19 nt, Homo sapiens
  misc_RNA (1)...(19): siRNA sense strand
caagaaggaacaguuggaa

SEQ ID NO: 828272 - RNA, 19 nt, Homo sapiens
  misc_RNA (1)...(19): siRNA sense strand
ucaagaagcgcagcgaguu

SEQ ID NO: 828273 - RNA, 19 nt, Homo sapiens
  misc_RNA (1)...(19): siRNA sense strand
ggugggacauccgaaagau

SEQ ID NO: 828274 - RNA, 19 nt, Homo sapiens
  misc_RNA (1)...(19): siRNA sense strand
gcaaggccgaggaggaguu

SEQ ID NO: 828275 - RNA, 19 nt, Homo sapiens
  misc_RNA (1)...(19): siRNA sense strand
ggauaucugggacuucaug

SEQ ID NO: 828276 - RNA, 19 nt, Homo sapiens
  misc_RNA (1)...(19): siRNA sense strand
agaaaguggagaaagauga

SEQ ID NO: 828277 - RNA, 19 nt, Homo sapiens
  misc_RNA (1)...(19): siRNA sense strand
ccccaaagauucccacgua

SEQ ID NO: 828278 - RNA, 19 nt, Homo sapiens
  misc_RNA (1)...(19): siRNA sense strand
agaugcggcugaaggagaa

SEQ ID NO: 828279 - RNA, 19 nt, Homo sapiens
  misc_RNA (1)...(19): siRNA sense strand
ucaccaagaaggaacaguu

SEQ ID NO: 828280 - RNA, 19 nt, Homo sapiens
  misc_RNA (1)...(19): siRNA sense strand
cuggguggcugcuacaaug

SEQ ID NO: 828281 - RNA, 19 nt, Homo sapiens
  misc_RNA (1)...(19): siRNA sense strand
gaggaggccauggaaguga

SEQ ID NO: 828282 - RNA, 19 nt, Homo sapiens
  misc_RNA (1)...(19): siRNA sense strand
augaggagcuggccguaga

SEQ ID NO: 828283 - RNA, 19 nt, Homo sapiens
  misc_RNA (1)...(19): siRNA sense strand
uaucugggacuucauguuc

SEQ ID NO: 828284 - RNA, 19 nt, Homo sapiens
  misc_RNA (1)...(19): siRNA sense strand
gggaaucguccaucaugug

SEQ ID NO: 828285 - RNA, 19 nt, Homo sapiens
  misc_RNA (1)...(19): siRNA sense strand
gcagcgaguucgggaagca

SEQ ID NO: 828286 - RNA, 19 nt, Homo sapiens
  misc_RNA (1)...(19): siRNA sense strand
aggaggacccuucagcuaa

SEQ ID NO: 828287 - RNA, 19 nt, Homo sapiens
  misc_RNA (1)...(19): siRNA sense strand
gaugagcgagcccacugaa

SEQ ID NO: 828288 - RNA, 19 nt, Homo sapiens
  misc_RNA (1)...(19): siRNA sense strand
agccugaacuugcucugaa

SEQ ID NO: 828289 - RNA, 19 nt, Homo sapiens
  misc_RNA (1)...(19): siRNA sense strand
ucgggaagcagugcaauuu

SEQ ID NO: 828290 - RNA, 19 nt, Homo sapiens
  misc_RNA (1)...(19): siRNA sense strand
gagcagaccauccguuucc

SEQ ID NO: 828291 - RNA, 19 nt, Homo sapiens
  misc_RNA (1)...(19): siRNA sense strand
cgacuggacagcccgcauu

SEQ ID NO: 828292 - RNA, 19 nt, Homo sapiens
  misc_RNA (1)...(19): siRNA sense strand
caaagauucccacguacuc

SEQ ID NO: 828293 - RNA, 19 nt, Homo sapiens
  misc_RNA (1)...(19): siRNA sense strand
caagaagcgcagcgaguuc

SEQ ID NO: 828294 - RNA, 19 nt, Homo sapiens
  misc_RNA (1)...(19): siRNA sense strand
gagcagggcaucgucaucu

SEQ ID NO: 828295 - RNA, 19 nt, Homo sapiens
  misc_RNA (1)...(19): siRNA sense strand
uggagaaagaugagaacua

SEQ ID NO: 828296 - RNA, 19 nt, Homo sapiens
  misc_RNA (1)...(19): siRNA sense strand
uggcggagcuauccaccau

SEQ ID NO: 828297 - RNA, 19 nt, Homo sapiens
  misc_RNA (1)...(19): siRNA sense strand
ggaguucuucgacaucauc

SEQ ID NO: 828298 - RNA, 19 nt, Homo sapiens
  misc_RNA (1)...(19): siRNA sense strand
gcuaaaaccaucaaugugu

SEQ ID NO: 828299 - RNA, 19 nt, Homo sapiens
  misc_RNA (1)...(19): siRNA sense strand
ugacgaggaggccauggaa

SEQ ID NO: 828300 - RNA, 19 nt, Homo sapiens
  misc_RNA (1)...(19): siRNA sense strand
gggaugaagaaguggaaga

SEQ ID NO: 828301 - RNA, 19 nt, Homo sapiens
  misc_RNA (1)...(19): siRNA sense strand
gggagaugcggcugaagga

SEQ ID NO: 828302 - RNA, 19 nt, Homo sapiens
  misc_RNA (1)...(19): siRNA sense strand
cuggauaucugggacuuca

SEQ ID NO: 828303 - RNA, 19 nt, Homo sapiens
  misc_RNA (1)...(19): siRNA sense strand
ggcauccagugcucgauca

SEQ ID NO: 828304 - RNA, 19 nt, Homo sapiens
  misc_RNA (1)...(19): siRNA sense strand
cgagcccacugaaguugug

SEQ ID NO: 828305 - RNA, 19 nt, Homo sapiens
  misc_RNA (1)...(19): siRNA sense strand
ugagcgagcccacugaagu

SEQ ID NO: 828306 - RNA, 19 nt, Homo sapiens
  misc_RNA (1)...(19): siRNA sense strand
aggccgagcugaacaucga

SEQ ID NO: 828307 - RNA, 19 nt, Homo sapiens
  misc_RNA (1)...(19): siRNA sense strand
gcugaacaucgacaucaug

SEQ ID NO: 828308 - RNA, 19 nt, Homo sapiens
  misc_RNA (1)...(19): siRNA sense strand
guucuucgacaucaucuuc

SEQ ID NO: 828309 - RNA, 19 nt, Homo sapiens
  misc_RNA (1)...(19): siRNA sense strand
ggaggaguucuucgacauc

SEQ ID NO: 828310 - RNA, 19 nt, Homo sapiens
  misc_RNA (1)...(19): siRNA sense strand
ccagaggaaugagaagaac

SEQ ID NO: 828311 - RNA, 19 nt, Homo sapiens
  misc_RNA (1)...(19): siRNA sense strand
ggagcuauccaccauugag

SEQ ID NO: 828312 - RNA, 19 nt, Homo sapiens
  misc_RNA (1)...(19): siRNA sense strand
uggagcagaccauccguuu

SEQ ID NO: 828313 - RNA, 19 nt, Homo sapiens
  misc_RNA (1)...(19): siRNA sense strand
ucaagagggcugccacaca

SEQ ID NO: 828314 - RNA, 19 nt, Homo sapiens
  misc_RNA (1)...(19): siRNA sense strand
cuaaaaccaucaauguguu

SEQ ID NO: 828315 - RNA, 19 nt, Homo sapiens
  misc_RNA (1)...(19): siRNA sense strand
gggcaugagcagcgauuca

SEQ ID NO: 828316 - RNA, 19 nt, Homo sapiens
  misc_RNA (1)...(19): siRNA sense strand
caccaagaaggaacaguug

SEQ ID NO: 828317 - RNA, 19 nt, Homo sapiens
  misc_RNA (1)...(19): siRNA sense strand
cacugaaguugugaucuug

SEQ ID NO: 828318 - RNA, 19 nt, Homo sapiens
  misc_RNA (1)...(19): siRNA sense strand
gacuggacagcccgcauuu

SEQ ID NO: 828319 - RNA, 19 nt, Homo sapiens
  misc_RNA (1)...(19): siRNA sense strand
aacguagccucuuccaugu

SEQ ID NO: 828320 - RNA, 19 nt, Homo sapiens
  misc_RNA (1)...(19): siRNA sense strand
ggaagcagugcaauuucuc

SEQ ID NO: 828321 - RNA, 19 nt, Homo sapiens
  misc_RNA (1)...(19): siRNA sense strand
gaacguuccucucuaauua

SEQ ID NO: 828322 - RNA, 19 nt, Homo sapiens
  misc_RNA (1)...(19): siRNA sense strand
gagaacagcuuaccaagua

SEQ ID NO: 828323 - RNA, 19 nt, Homo sapiens
  misc_RNA (1)...(19): siRNA sense strand
gcacucagguugcaaauuu

SEQ ID NO: 828324 - RNA, 19 nt, Homo sapiens
  misc_RNA (1)...(19): siRNA sense strand
gaacaaggaugaaugucaa

SEQ ID NO: 828325 - RNA, 19 nt, Homo sapiens
  misc_RNA (1)...(19): siRNA sense strand
gaacaacugcacuuuauuu

SEQ ID NO: 828326 - RNA, 19 nt, Homo sapiens
  misc_RNA (1)...(19): siRNA sense strand
gaaguucaguucuuuaaug

SEQ ID NO: 828327 - RNA, 19 nt, Homo sapiens
  misc_RNA (1)...(19): siRNA sense strand
ggaauagacugguauaugg

SEQ ID NO: 828328 - RNA, 19 nt, Homo sapiens
  misc_RNA (1)...(19): siRNA sense strand
gaacauggaauaccaauca

SEQ ID NO: 828329 - RNA, 19 nt, Homo sapiens
  misc_RNA (1)...(19): siRNA sense strand
caacaacuaucacaaagga

SEQ ID NO: 828330 - RNA, 19 nt, Homo sapiens
  misc_RNA (1)...(19): siRNA sense strand
ucaaagaugugaaggcauu

SEQ ID NO: 828331 - RNA, 19 nt, Homo sapiens
  misc_RNA (1)...(19): siRNA sense strand
ggaguuacaccucguuaua

SEQ ID NO: 828332 - RNA, 19 nt, Homo sapiens
  misc_RNA (1)...(19): siRNA sense strand
ggaaaugacacuuauugaa

SEQ ID NO: 828333 - RNA, 19 nt, Homo sapiens
  misc_RNA (1)...(19): siRNA sense strand
caacgagucaucuuuagua

SEQ ID NO: 828334 - RNA, 19 nt, Homo sapiens
  misc_RNA (1)...(19): siRNA sense strand
gcagagaagaugccuagua

SEQ ID NO: 828335 - RNA, 19 nt, Homo sapiens
  misc_RNA (1)...(19): siRNA sense strand
aaagauggcuaacuuacuu

SEQ ID NO: 828336 - RNA, 19 nt, Homo sapiens
  misc_RNA (1)...(19): siRNA sense strand
gacaggaacugcagaaagu

SEQ ID NO: 828337 - RNA, 19 nt, Homo sapiens
  misc_RNA (1)...(19): siRNA sense strand
agaaugcacugacaucaaa

SEQ ID NO: 828338 - RNA, 19 nt, Homo sapiens
  misc_RNA (1)...(19): siRNA sense strand
uaacuuacuuugcuacuuc

SEQ ID NO: 828339 - RNA, 19 nt, Homo sapiens
  misc_RNA (1)...(19): siRNA sense strand
ggaccaaccugaaauugca

SEQ ID NO: 828340 - RNA, 19 nt, Homo sapiens
  misc_RNA (1)...(19): siRNA sense strand
gaaagggcuucauucacaa

SEQ ID NO: 828341 - RNA, 19 nt, Homo sapiens
  misc_RNA (1)...(19): siRNA sense strand
caccagcacugaagaauau

SEQ ID NO: 828342 - RNA, 19 nt, Homo sapiens
  misc_RNA (1)...(19): siRNA sense strand
cuaaaggacuguuuuguua

SEQ ID NO: 828343 - RNA, 19 nt, Homo sapiens
  misc_RNA (1)...(19): siRNA sense strand
ggaugaaugucaaagaugu

SEQ ID NO: 828344 - RNA, 19 nt, Homo sapiens
  misc_RNA (1)...(19): siRNA sense strand
gaauccaugugaugauaaa

SEQ ID NO: 828345 - RNA, 19 nt, Homo sapiens
  misc_RNA (1)...(19): siRNA sense strand
agaaagggcuucauucaca

SEQ ID NO: 828346 - RNA, 19 nt, Homo sapiens
  misc_RNA (1)...(19): siRNA sense strand
ccacaacgagucaucuuua

SEQ ID NO: 828347 - RNA, 19 nt, Homo sapiens
  misc_RNA (1)...(19): siRNA sense strand
gcagaaagacccucuaugg

SEQ ID NO: 828348 - RNA, 19 nt, Homo sapiens
  misc_RNA (1)...(19): siRNA sense strand
gaaaacuugugaccacuua

SEQ ID NO: 828349 - RNA, 19 nt, Homo sapiens
  misc_RNA (1)...(19): siRNA sense strand
aaacaggaaaugacacuua

SEQ ID NO: 828350 - RNA, 19 nt, Homo sapiens
  misc_RNA (1)...(19): siRNA sense strand
cagaauccaugugaugaua

SEQ ID NO: 828351 - RNA, 19 nt, Homo sapiens
  misc_RNA (1)...(19): siRNA sense strand
uaauuacucugaagcacua

SEQ ID NO: 828352 - RNA, 19 nt, Homo sapiens
  misc_RNA (1)...(19): siRNA sense strand
gcucugagguucaauuucu

SEQ ID NO: 828353 - RNA, 19 nt, Homo sapiens
  misc_RNA (1)...(19): siRNA sense strand
gcacaagcucaucuucaua

SEQ ID NO: 828354 - RNA, 19 nt, Homo sapiens
  misc_RNA (1)...(19): siRNA sense strand
caaggaauuugcacuggaa

SEQ ID NO: 828355 - RNA, 19 nt, Homo sapiens
  misc_RNA (1)...(19): siRNA sense strand
ggacugaagaggaagauga

SEQ ID NO: 828356 - RNA, 19 nt, Homo sapiens
  misc_RNA (1)...(19): siRNA sense strand
guacagaaagggcuucauu

SEQ ID NO: 828357 - RNA, 19 nt, Homo sapiens
  misc_RNA (1)...(19): siRNA sense strand
ggaacuauccaaacugcua

SEQ ID NO: 828358 - RNA, 19 nt, Homo sapiens
  misc_RNA (1)...(19): siRNA sense strand
gaucaucaccauccucauu

SEQ ID NO: 828359 - RNA, 19 nt, Homo sapiens
  misc_RNA (1)...(19): siRNA sense strand
auagaaagauggcuaacuu

SEQ ID NO: 828360 - RNA, 19 nt, Homo sapiens
  misc_RNA (1)...(19): siRNA sense strand
acaaaggaauagacuggua

SEQ ID NO: 828361 - RNA, 19 nt, Homo sapiens
  misc_RNA (1)...(19): siRNA sense strand
aaagagugcuaauuacuuc

SEQ ID NO: 828362 - RNA, 19 nt, Homo sapiens
  misc_RNA (1)...(19): siRNA sense strand
gucaagauaucauagcuau

SEQ ID NO: 828363 - RNA, 19 nt, Homo sapiens
  misc_RNA (1)...(19): siRNA sense strand
ugaggaaguucaguucuuu

SEQ ID NO: 828364 - RNA, 19 nt, Homo sapiens
  misc_RNA (1)...(19): siRNA sense strand
gcagaugauucucaacaag

SEQ ID NO: 828365 - RNA, 19 nt, Homo sapiens
  misc_RNA (1)...(19): siRNA sense strand
cagagaagaugccuaguac

SEQ ID NO: 828366 - RNA, 19 nt, Homo sapiens
  misc_RNA (1)...(19): siRNA sense strand
gggaagaggcugacauugu

SEQ ID NO: 828367 - RNA, 19 nt, Homo sapiens
  misc_RNA (1)...(19): siRNA sense strand
cagcuacugugauggauga

SEQ ID NO: 828368 - RNA, 19 nt, Homo sapiens
  misc_RNA (1)...(19): siRNA sense strand
gugaaggcauuacuagaga

SEQ ID NO: 828369 - RNA, 19 nt, Homo sapiens
  misc_RNA (1)...(19): siRNA sense strand
ggaacaaggaugaauguca

SEQ ID NO: 828370 - RNA, 19 nt, Homo sapiens
  misc_RNA (1)...(19): siRNA sense strand
guacauccuuguggacauu

SEQ ID NO: 828371 - RNA, 19 nt, Homo sapiens
  misc_RNA (1)...(19): siRNA sense strand
gaagcagaaugcacugaca

SEQ ID NO: 828372 - RNA, 19 nt, Homo sapiens
  misc_RNA (1)...(19): siRNA sense strand
gaagaauauccacaucuga

SEQ ID NO: 828373 - RNA, 19 nt, Homo sapiens
  misc_RNA (1)...(19): siRNA sense strand
gaugaguucuggugguuuc

SEQ ID NO: 828374 - RNA, 19 nt, Homo sapiens
  misc_RNA (1)...(19): siRNA sense strand
ggggaagacuggacuauuu

SEQ ID NO: 828375 - RNA, 19 nt, Homo sapiens
  misc_RNA (1)...(19): siRNA sense strand
cgagucaucuuuaguagag

SEQ ID NO: 828376 - RNA, 19 nt, Homo sapiens
  misc_RNA (1)...(19): siRNA sense strand
ucucuacucuggcuacaaa

SEQ ID NO: 828377 - RNA, 19 nt, Homo sapiens
  misc_RNA (1)...(19): siRNA sense strand
aggaacaacugcacuuuau

SEQ ID NO: 828378 - RNA, 19 nt, Homo sapiens
  misc_RNA (1)...(19): siRNA sense strand
agauauaccuccucuuaca

SEQ ID NO: 828379 - RNA, 19 nt, Homo sapiens
  misc_RNA (1)...(19): siRNA sense strand
ugaagaauauccacaucug

SEQ ID NO: 828380 - RNA, 19 nt, Homo sapiens
  misc_RNA (1)...(19): siRNA sense strand
ggaaagagggaacaaggau

SEQ ID NO: 828381 - RNA, 19 nt, Homo sapiens
  misc_RNA (1)...(19): siRNA sense strand
ugaaaccacugcagaagca

SEQ ID NO: 828382 - RNA, 19 nt, Homo sapiens
  misc_RNA (1)...(19): siRNA sense strand
cuaccgagaucauaaugug

SEQ ID NO: 828383 - RNA, 19 nt, Homo sapiens
  misc_RNA (1)...(19): siRNA sense strand
guuguucacucacacuauu

SEQ ID NO: 828384 - RNA, 19 nt, Homo sapiens
  misc_RNA (1)...(19): siRNA sense strand
uaccuccucuuacagauaa

SEQ ID NO: 828385 - RNA, 19 nt, Homo sapiens
  misc_RNA (1)...(19): siRNA sense strand
caacggugauucaggaucu

SEQ ID NO: 828386 - RNA, 19 nt, Homo sapiens
  misc_RNA (1)...(19): siRNA sense strand
caacuaucacaaaggaaua

SEQ ID NO: 828387 - RNA, 19 nt, Homo sapiens
  misc_RNA (1)...(19): siRNA sense strand
ggaauucagagaguacuuu

SEQ ID NO: 828388 - RNA, 19 nt, Homo sapiens
  misc_RNA (1)...(19): siRNA sense strand
gaugauaaacgacacaaag

SEQ ID NO: 828389 - RNA, 19 nt, Homo sapiens
  misc_RNA (1)...(19): siRNA sense strand
caggaaaugacacuuauug

SEQ ID NO: 828390 - RNA, 19 nt, Homo sapiens
  misc_RNA (1)...(19): siRNA sense strand
gaguuacaccucguuauaa

SEQ ID NO: 828391 - RNA, 19 nt, Homo sapiens
  misc_RNA (1)...(19): siRNA sense strand
gaucugacccagcuacugu

SEQ ID NO: 828392 - RNA, 19 nt, Homo sapiens
  misc_RNA (1)...(19): siRNA sense strand
caggaacaacugcacuuua

SEQ ID NO: 828393 - RNA, 19 nt, Homo sapiens
  misc_RNA (1)...(19): siRNA sense strand
gauaaacgacacaaagaca

SEQ ID NO: 828394 - RNA, 19 nt, Homo sapiens
  misc_RNA (1)...(19): siRNA sense strand
gagcuggaccaaccugaaa

SEQ ID NO: 828395 - RNA, 19 nt, Homo sapiens
  misc_RNA (1)...(19): siRNA sense strand
agaggaagaugaaggagau

SEQ ID NO: 828396 - RNA, 19 nt, Homo sapiens
  misc_RNA (1)...(19): siRNA sense strand
cuuaccaaguacacaauua

SEQ ID NO: 828397 - RNA, 19 nt, Homo sapiens
  misc_RNA (1)...(19): siRNA sense strand
cugaagcacuaacguuuga

SEQ ID NO: 828398 - RNA, 19 nt, Homo sapiens
  misc_RNA (1)...(19): siRNA sense strand
ggaugaaguccagaaguuu

SEQ ID NO: 828399 - RNA, 19 nt, Homo sapiens
  misc_RNA (1)...(19): siRNA sense strand
ugacccagcuacugugaug

SEQ ID NO: 828400 - RNA, 19 nt, Homo sapiens
  misc_RNA (1)...(19): siRNA sense strand
gacauugggcuccaucuga

SEQ ID NO: 828401 - RNA, 19 nt, Homo sapiens
  misc_RNA (1)...(19): siRNA sense strand
gaggaaguucaguucuuua

SEQ ID NO: 828402 - RNA, 19 nt, Homo sapiens
  misc_RNA (1)...(19): siRNA sense strand
ggaacaacugcacuuuauu

SEQ ID NO: 828403 - RNA, 19 nt, Homo sapiens
  misc_RNA (1)...(19): siRNA sense strand
gaacuuggucaacuuugug

SEQ ID NO: 828404 - RNA, 19 nt, Homo sapiens
  misc_RNA (1)...(19): siRNA sense strand
gagcagaugauucucaaca

SEQ ID NO: 828405 - RNA, 19 nt, Homo sapiens
  misc_RNA (1)...(19): siRNA sense strand
cacagggacugaagaggaa

SEQ ID NO: 828406 - RNA, 19 nt, Homo sapiens
  misc_RNA (1)...(19): siRNA sense strand
ggcaacaacuaucacaaag

SEQ ID NO: 828407 - RNA, 19 nt, Homo sapiens
  misc_RNA (1)...(19): siRNA sense strand
gagcagaaagacccucuau

SEQ ID NO: 828408 - RNA, 19 nt, Homo sapiens
  misc_RNA (1)...(19): siRNA sense strand
ggcaacaacuugaacuuuu

SEQ ID NO: 828409 - RNA, 19 nt, Homo sapiens
  misc_RNA (1)...(19): siRNA sense strand
uagaaagauggcuaacuua

SEQ ID NO: 828410 - RNA, 19 nt, Homo sapiens
  misc_RNA (1)...(19): siRNA sense strand
gcacugacaucaaaauucu

SEQ ID NO: 828411 - RNA, 19 nt, Homo sapiens
  misc_RNA (1)...(19): siRNA sense strand
gcaacaacuugaacuuuug

SEQ ID NO: 828412 - RNA, 19 nt, Homo sapiens
  misc_RNA (1)...(19): siRNA sense strand
ucaacucggucaagauauc

SEQ ID NO: 828413 - RNA, 19 nt, Homo sapiens
  misc_RNA (1)...(19): siRNA sense strand
gaaagauggcuaacuuacu

SEQ ID NO: 828414 - RNA, 19 nt, Homo sapiens
  misc_RNA (1)...(19): siRNA sense strand
gaagauccagcugcucuga

SEQ ID NO: 828415 - RNA, 19 nt, Homo sapiens
  misc_RNA (1)...(19): siRNA sense strand
caccaacgaucacaugaag

SEQ ID NO: 828416 - RNA, 19 nt, Homo sapiens
  misc_RNA (1)...(19): siRNA sense strand
gcaccaacgaucacaugaa

SEQ ID NO: 828417 - RNA, 19 nt, Homo sapiens
  misc_RNA (1)...(19): siRNA sense strand
gaauagacugguauaugga

SEQ ID NO: 828418 - RNA, 19 nt, Homo sapiens
  misc_RNA (1)...(19): siRNA sense strand
aaagacauuugaggaaguu

SEQ ID NO: 828419 - RNA, 19 nt, Homo sapiens
  misc_RNA (1)...(19): siRNA sense strand
aaagagggaacaaggauga

SEQ ID NO: 828420 - RNA, 19 nt, Homo sapiens
  misc_RNA (1)...(19): siRNA sense strand
uguguggaauacaguguua

SEQ ID NO: 828421 - RNA, 19 nt, Homo sapiens
  misc_RNA (1)...(19): siRNA sense strand
ugaaggauaugcacaagag

SEQ ID NO: 828422 - RNA, 19 nt, Homo sapiens
  misc_RNA (1)...(19): siRNA sense strand
cggaaucgcuacccuaaag

SEQ ID NO: 828423 - RNA, 19 nt, Homo sapiens
  misc_RNA (1)...(19): siRNA sense strand
gugcaggcuuccauugaaa

SEQ ID NO: 828424 - RNA, 19 nt, Homo sapiens
  misc_RNA (1)...(19): siRNA sense strand
gaggagaaccugggcuuug

SEQ ID NO: 828425 - RNA, 19 nt, Homo sapiens
  misc_RNA (1)...(19): siRNA sense strand
caacuacagcuaccucauc

SEQ ID NO: 828426 - RNA, 19 nt, Homo sapiens
  misc_RNA (1)...(19): siRNA sense strand
gcugugggcggaccuuuga

SEQ ID NO: 828427 - RNA, 19 nt, Homo sapiens
  misc_RNA (1)...(19): siRNA sense strand
ugagcucacuggacacugu

SEQ ID NO: 828428 - RNA, 19 nt, Homo sapiens
  misc_RNA (1)...(19): siRNA sense strand
cuacaacccguuccugaga

SEQ ID NO: 828429 - RNA, 19 nt, Homo sapiens
  misc_RNA (1)...(19): siRNA sense strand
acagcuaccucaucaucga

SEQ ID NO: 828430 - RNA, 19 nt, Homo sapiens
  misc_RNA (1)...(19): siRNA sense strand
ugugcaggcuuccauugaa

SEQ ID NO: 828431 - RNA, 19 nt, Homo sapiens
  misc_RNA (1)...(19): siRNA sense strand
uacaacccguuccugagaa

SEQ ID NO: 828432 - RNA, 19 nt, Homo sapiens
  misc_RNA (1)...(19): siRNA sense strand
gcugaaggauaugcacaag

SEQ ID NO: 828433 - RNA, 19 nt, Homo sapiens
  misc_RNA (1)...(19): siRNA sense strand
cuacagcuaccucaucauc

SEQ ID NO: 828434 - RNA, 19 nt, Homo sapiens
  misc_RNA (1)...(19): siRNA sense strand
gauaugcacaagagcaagu

SEQ ID NO: 828435 - RNA, 19 nt, Homo sapiens
  misc_RNA (1)...(19): siRNA sense strand
ggcuacaccuggccacaca

SEQ ID NO: 828436 - RNA, 19 nt, Homo sapiens
  misc_RNA (1)...(19): siRNA sense strand
aacuacagcuaccucauca

SEQ ID NO: 828437 - RNA, 19 nt, Homo sapiens
  misc_RNA (1)...(19): siRNA sense strand
cacaaggccaucuggucua

SEQ ID NO: 828438 - RNA, 19 nt, Homo sapiens
  misc_RNA (1)...(19): siRNA sense strand
ucaccuuggucgccauucu

SEQ ID NO: 828439 - RNA, 19 nt, Homo sapiens
  misc_RNA (1)...(19): siRNA sense strand
ugaaggauaugcacaagag

SEQ ID NO: 828440 - RNA, 19 nt, Homo sapiens
  misc_RNA (1)...(19): siRNA sense strand
cggaaucgcuacccuaaag

SEQ ID NO: 828441 - RNA, 19 nt, Homo sapiens
  misc_RNA (1)...(19): siRNA sense strand
gugcaggcuuccauugaaa

SEQ ID NO: 828442 - RNA, 19 nt, Homo sapiens
  misc_RNA (1)...(19): siRNA sense strand
gaggagaaccugggcuuug

SEQ ID NO: 828443 - RNA, 19 nt, Homo sapiens
  misc_RNA (1)...(19): siRNA sense strand
caacuacagcuaccucauc

SEQ ID NO: 828444 - RNA, 19 nt, Homo sapiens
  misc_RNA (1)...(19): siRNA sense strand
gcugugggcggaccuuuga

SEQ ID NO: 828445 - RNA, 19 nt, Homo sapiens
  misc_RNA (1)...(19): siRNA sense strand
ugagcucacuggacacugu

SEQ ID NO: 828446 - RNA, 19 nt, Homo sapiens
  misc_RNA (1)...(19): siRNA sense strand
cuacaacccguuccugaga

SEQ ID NO: 828447 - RNA, 19 nt, Homo sapiens
  misc_RNA (1)...(19): siRNA sense strand
acagcuaccucaucaucga

SEQ ID NO: 828448 - RNA, 19 nt, Homo sapiens
  misc_RNA (1)...(19): siRNA sense strand
ugugcaggcuuccauugaa

SEQ ID NO: 828449 - RNA, 19 nt, Homo sapiens
  misc_RNA (1)...(19): siRNA sense strand
uacaacccguuccugagaa

SEQ ID NO: 828450 - RNA, 19 nt, Homo sapiens
  misc_RNA (1)...(19): siRNA sense strand
gcugaaggauaugcacaag

SEQ ID NO: 828451 - RNA, 19 nt, Homo sapiens
  misc_RNA (1)...(19): siRNA sense strand
cuacagcuaccucaucauc

SEQ ID NO: 828452 - RNA, 19 nt, Homo sapiens
  misc_RNA (1)...(19): siRNA sense strand
gauaugcacaagagcaagu

SEQ ID NO: 828453 - RNA, 19 nt, Homo sapiens
  misc_RNA (1)...(19): siRNA sense strand
ggcuacaccuggccacaca

SEQ ID NO: 828454 - RNA, 19 nt, Homo sapiens
  misc_RNA (1)...(19): siRNA sense strand
aacuacagcuaccucauca

SEQ ID NO: 828455 - RNA, 19 nt, Homo sapiens
  misc_RNA (1)...(19): siRNA sense strand
cacaaggccaucuggucua

SEQ ID NO: 828456 - RNA, 19 nt, Homo sapiens
  misc_RNA (1)...(19): siRNA sense strand
ucaccuuggucgccauucu

SEQ ID NO: 828457 - RNA, 19 nt, Homo sapiens
  misc_RNA (1)...(19): siRNA sense strand
ugacgaagaugaagacaug

SEQ ID NO: 828458 - RNA, 19 nt, Homo sapiens
  misc_RNA (1)...(19): siRNA sense strand
caagauugcugagauccua

SEQ ID NO: 828459 - RNA, 19 nt, Homo sapiens
  misc_RNA (1)...(19): siRNA sense strand
gcuguuggaugacauaaug

SEQ ID NO: 828460 - RNA, 19 nt, Homo sapiens
  misc_RNA (1)...(19): siRNA sense strand
gaagagaagcaucguguuc

SEQ ID NO: 828461 - RNA, 19 nt, Homo sapiens
  misc_RNA (1)...(19): siRNA sense strand
gaauacagggcuucucauu

SEQ ID NO: 828462 - RNA, 19 nt, Homo sapiens
  misc_RNA (1)...(19): siRNA sense strand
uugcugagauccuauguaa

SEQ ID NO: 828463 - RNA, 19 nt, Homo sapiens
  misc_RNA (1)...(19): siRNA sense strand
uaacaagauugcugagauc

SEQ ID NO: 828464 - RNA, 19 nt, Homo sapiens
  misc_RNA (1)...(19): siRNA sense strand
caacagcagccuuaacuuc

SEQ ID NO: 828465 - RNA, 19 nt, Homo sapiens
  misc_RNA (1)...(19): siRNA sense strand
gcaauccccugcaauacua

SEQ ID NO: 828466 - RNA, 19 nt, Homo sapiens
  misc_RNA (1)...(19): siRNA sense strand
ggaugaagccaccugaaga

SEQ ID NO: 828467 - RNA, 19 nt, Homo sapiens
  misc_RNA (1)...(19): siRNA sense strand
cuaacaagauugcugagau

SEQ ID NO: 828468 - RNA, 19 nt, Homo sapiens
  misc_RNA (1)...(19): siRNA sense strand
aggaauaucuggugaacau

SEQ ID NO: 828469 - RNA, 19 nt, Homo sapiens
  misc_RNA (1)...(19): siRNA sense strand
uaaagugauuaccaaggaa

SEQ ID NO: 828470 - RNA, 19 nt, Homo sapiens
  misc_RNA (1)...(19): siRNA sense strand
auaaagugauuaccaagga

SEQ ID NO: 828471 - RNA, 19 nt, Homo sapiens
  misc_RNA (1)...(19): siRNA sense strand
gaauaucuggugaacauca

SEQ ID NO: 828472 - RNA, 19 nt, Homo sapiens
  misc_RNA (1)...(19): siRNA sense strand
ccugaucacugacgaagau

SEQ ID NO: 828473 - RNA, 19 nt, Homo sapiens
  misc_RNA (1)...(19): siRNA sense strand
gcugagauccuauguaagg

SEQ ID NO: 828474 - RNA, 19 nt, Homo sapiens
  misc_RNA (1)...(19): siRNA sense strand
gaagacaugcugagcuaca

SEQ ID NO: 828475 - RNA, 19 nt, Homo sapiens
  misc_RNA (1)...(19): siRNA sense strand
gaccacaacuucgcaggau

SEQ ID NO: 828476 - RNA, 19 nt, Homo sapiens
  misc_RNA (1)...(19): siRNA sense strand
caccacaacagcagccuua

SEQ ID NO: 828477 - RNA, 19 nt, Homo sapiens
  misc_RNA (1)...(19): siRNA sense strand
gaucacugacgaagaugaa

SEQ ID NO: 828478 - RNA, 19 nt, Homo sapiens
  misc_RNA (1)...(19): siRNA sense strand
augaagacaugcugagcua

SEQ ID NO: 828479 - RNA, 19 nt, Homo sapiens
  misc_RNA (1)...(19): siRNA sense strand
gccuggagguggaagaaga

SEQ ID NO: 828480 - RNA, 19 nt, Homo sapiens
  misc_RNA (1)...(19): siRNA sense strand
caaggaauaucuggugaac

SEQ ID NO: 828481 - RNA, 19 nt, Homo sapiens
  misc_RNA (1)...(19): siRNA sense strand
ucugcaagaucauguuguu

SEQ ID NO: 828482 - RNA, 19 nt, Homo sapiens
  misc_RNA (1)...(19): siRNA sense strand
agugguauccggauuauga

SEQ ID NO: 828483 - RNA, 19 nt, Homo sapiens
  misc_RNA (1)...(19): siRNA sense strand
cagcagccuuaacuucuuc

SEQ ID NO: 828484 - RNA, 19 nt, Homo sapiens
  misc_RNA (1)...(19): siRNA sense strand
auacagggcuucucauucc

SEQ ID NO: 828485 - RNA, 19 nt, Homo sapiens
  misc_RNA (1)...(19): siRNA sense strand
guauccggauuaugaagug

SEQ ID NO: 828486 - RNA, 19 nt, Homo sapiens
  misc_RNA (1)...(19): siRNA sense strand
ugagugguauccggauuau

SEQ ID NO: 828487 - RNA, 19 nt, Homo sapiens
  misc_RNA (1)...(19): siRNA sense strand
caacuucgcaggaucuaac

SEQ ID NO: 828488 - RNA, 19 nt, Homo sapiens
  misc_RNA (1)...(19): siRNA sense strand
ggagguggaagaagagaag

SEQ ID NO: 828489 - RNA, 19 nt, Homo sapiens
  misc_RNA (1)...(19): siRNA sense strand
gaugaagccaccugaagag

SEQ ID NO: 828490 - RNA, 19 nt, Homo sapiens
  misc_RNA (1)...(19): siRNA sense strand
acagcagccuuaacuucuu

SEQ ID NO: 828491 - RNA, 19 nt, Homo sapiens
  misc_RNA (1)...(19): siRNA sense strand
cagaauaaagugauuacca

SEQ ID NO: 828492 - RNA, 19 nt, Homo sapiens
  misc_RNA (1)...(19): siRNA sense strand
agagaagcaucguguucau

SEQ ID NO: 828493 - RNA, 19 nt, Homo sapiens
  misc_RNA (1)...(19): siRNA sense strand
gagcuggagccgguuaaug

SEQ ID NO: 828494 - RNA, 19 nt, Homo sapiens
  misc_RNA (1)...(19): siRNA sense strand
gaagcaucguguucaucuc

SEQ ID NO: 828495 - RNA, 19 nt, Homo sapiens
  misc_RNA (1)...(19): siRNA sense strand
cuucugggccaauguuauu

SEQ ID NO: 828496 - RNA, 19 nt, Homo sapiens
  misc_RNA (1)...(19): siRNA sense strand
ucucauuccacuccaauug

SEQ ID NO: 828497 - RNA, 19 nt, Homo sapiens
  misc_RNA (1)...(19): siRNA sense strand
ccaaggaauaucuggugaa

SEQ ID NO: 828498 - RNA, 19 nt, Homo sapiens
  misc_RNA (1)...(19): siRNA sense strand
ucacugacgaagaugaaga

SEQ ID NO: 828499 - RNA, 19 nt, Homo sapiens
  misc_RNA (1)...(19): siRNA sense strand
gaggaugaagccaccugaa

SEQ ID NO: 828500 - RNA, 19 nt, Homo sapiens
  misc_RNA (1)...(19): siRNA sense strand
gcaccgccuucaggaugga

SEQ ID NO: 828501 - RNA, 19 nt, Homo sapiens
  misc_RNA (1)...(19): siRNA sense strand
agccuuaacuucuucaacu

SEQ ID NO: 828502 - RNA, 19 nt, Homo sapiens
  misc_RNA (1)...(19): siRNA sense strand
cacaacagcagccuuaacu

SEQ ID NO: 828503 - RNA, 19 nt, Homo sapiens
  misc_RNA (1)...(19): siRNA sense strand
cuuccagaauaaagugauu

SEQ ID NO: 828504 - RNA, 19 nt, Homo sapiens
  misc_RNA (1)...(19): siRNA sense strand
gccuuaacuucuucaacug

SEQ ID NO: 828505 - RNA, 19 nt, Homo sapiens
  misc_RNA (1)...(19): siRNA sense strand
ccacaacuucgcaggaucu

SEQ ID NO: 828506 - RNA, 19 nt, Homo sapiens
  misc_RNA (1)...(19): siRNA sense strand
gagaagcaucguguucauc

SEQ ID NO: 828507 - RNA, 19 nt, Homo sapiens
  misc_RNA (1)...(19): siRNA sense strand
cggugcugcuguuggauga

SEQ ID NO: 828508 - RNA, 19 nt, Homo sapiens
  misc_RNA (1)...(19): siRNA sense strand
ccuaugauguccacgauua

SEQ ID NO: 828509 - RNA, 19 nt, Homo sapiens
  misc_RNA (1)...(19): siRNA sense strand
gagcguggaugacuacuga

SEQ ID NO: 828510 - RNA, 19 nt, Homo sapiens
  misc_RNA (1)...(19): siRNA sense strand
ggaagugguucuacaagga

SEQ ID NO: 828511 - RNA, 19 nt, Homo sapiens
  misc_RNA (1)...(19): siRNA sense strand
gaaaugggcaccuuugaug

SEQ ID NO: 828512 - RNA, 19 nt, Homo sapiens
  misc_RNA (1)...(19): siRNA sense strand
gcuggaagccaaagaauuu

SEQ ID NO: 828513 - RNA, 19 nt, Homo sapiens
  misc_RNA (1)...(19): siRNA sense strand
cggaagagcugcaggacaa

SEQ ID NO: 828514 - RNA, 19 nt, Homo sapiens
  misc_RNA (1)...(19): siRNA sense strand
gaagaaaugggcaccuuug

SEQ ID NO: 828515 - RNA, 19 nt, Homo sapiens
  misc_RNA (1)...(19): siRNA sense strand
ccggagaucuggaggauga

SEQ ID NO: 828516 - RNA, 19 nt, Homo sapiens
  misc_RNA (1)...(19): siRNA sense strand
caaggugggucccggaaga

SEQ ID NO: 828517 - RNA, 19 nt, Homo sapiens
  misc_RNA (1)...(19): siRNA sense strand
cgaugaggaugaagaaaug

SEQ ID NO: 828518 - RNA, 19 nt, Homo sapiens
  misc_RNA (1)...(19): siRNA sense strand
ccaaagaagcaucgaagaa

SEQ ID NO: 828519 - RNA, 19 nt, Homo sapiens
  misc_RNA (1)...(19): siRNA sense strand
ggacgaugaggaugaagaa

SEQ ID NO: 828520 - RNA, 19 nt, Homo sapiens
  misc_RNA (1)...(19): siRNA sense strand
gcgcaaguuugaauuugau

SEQ ID NO: 828521 - RNA, 19 nt, Homo sapiens
  misc_RNA (1)...(19): siRNA sense strand
caaagaagcaucgaagaag

SEQ ID NO: 828522 - RNA, 19 nt, Homo sapiens
  misc_RNA (1)...(19): siRNA sense strand
ggcgcaaguuugaauuuga

SEQ ID NO: 828523 - RNA, 19 nt, Homo sapiens
  misc_RNA (1)...(19): siRNA sense strand
gcgaggugaucaagaugug

SEQ ID NO: 828524 - RNA, 19 nt, Homo sapiens
  misc_RNA (1)...(19): siRNA sense strand
ggaggaggaagagcuguuu

SEQ ID NO: 828525 - RNA, 19 nt, Homo sapiens
  misc_RNA (1)...(19): siRNA sense strand
gaagcgggaggaagaggaa

SEQ ID NO: 828526 - RNA, 19 nt, Homo sapiens
  misc_RNA (1)...(19): siRNA sense strand
aggaaaugcuggcucucua

SEQ ID NO: 828527 - RNA, 19 nt, Homo sapiens
  misc_RNA (1)...(19): siRNA sense strand
gagcagcccaucucucagu

SEQ ID NO: 828528 - RNA, 19 nt, Homo sapiens
  misc_RNA (1)...(19): siRNA sense strand
ggacgugcccauggcugua

SEQ ID NO: 828529 - RNA, 19 nt, Homo sapiens
  misc_RNA (1)...(19): siRNA sense strand
ugaagaaaugggcaccuuu

SEQ ID NO: 828530 - RNA, 19 nt, Homo sapiens
  misc_RNA (1)...(19): siRNA sense strand
gcccggaagugguucuaca

SEQ ID NO: 828531 - RNA, 19 nt, Homo sapiens
  misc_RNA (1)...(19): siRNA sense strand
ucgagagcguggaugacua

SEQ ID NO: 828532 - RNA, 19 nt, Homo sapiens
  misc_RNA (1)...(19): siRNA sense strand
uaugauguccacgauuaua

SEQ ID NO: 828533 - RNA, 19 nt, Homo sapiens
  misc_RNA (1)...(19): siRNA sense strand
gaccaggagcggcugaaga

SEQ ID NO: 828534 - RNA, 19 nt, Homo sapiens
  misc_RNA (1)...(19): siRNA sense strand
gcucagacagcgagaacug

SEQ ID NO: 828535 - RNA, 19 nt, Homo sapiens
  misc_RNA (1)...(19): siRNA sense strand
cggcgcaaguuugaauuug

SEQ ID NO: 828536 - RNA, 19 nt, Homo sapiens
  misc_RNA (1)...(19): siRNA sense strand
gcaagcgucgagaggagaa

SEQ ID NO: 828537 - RNA, 19 nt, Homo sapiens
  misc_RNA (1)...(19): siRNA sense strand
ggaaaugcuggcucucuac

SEQ ID NO: 828538 - RNA, 19 nt, Homo sapiens
  misc_RNA (1)...(19): siRNA sense strand
aguggugccuggacgauga

SEQ ID NO: 828539 - RNA, 19 nt, Homo sapiens
  misc_RNA (1)...(19): siRNA sense strand
agcagcagcucacggcauu

SEQ ID NO: 828540 - RNA, 19 nt, Homo sapiens
  misc_RNA (1)...(19): siRNA sense strand
aagaagagaagcugcugaa

SEQ ID NO: 828541 - RNA, 19 nt, Homo sapiens
  misc_RNA (1)...(19): siRNA sense strand
cggagcagcccaucucuca

SEQ ID NO: 828542 - RNA, 19 nt, Homo sapiens
  misc_RNA (1)...(19): siRNA sense strand
gagaucuggaggaugauga

SEQ ID NO: 828543 - RNA, 19 nt, Homo sapiens
  misc_RNA (1)...(19): siRNA sense strand
gcggagggccaagcagaaa

SEQ ID NO: 828544 - RNA, 19 nt, Homo sapiens
  misc_RNA (1)...(19): siRNA sense strand
ggacacgcuggaagccaaa

SEQ ID NO: 828545 - RNA, 19 nt, Homo sapiens
  misc_RNA (1)...(19): siRNA sense strand
gacagcacgauguggcuuu

SEQ ID NO: 828546 - RNA, 19 nt, Homo sapiens
  misc_RNA (1)...(19): siRNA sense strand
ugggcgaggugaucaagau

SEQ ID NO: 828547 - RNA, 19 nt, Homo sapiens
  misc_RNA (1)...(19): siRNA sense strand
agacggaggaagaagagaa

SEQ ID NO: 828548 - RNA, 19 nt, Homo sapiens
  misc_RNA (1)...(19): siRNA sense strand
cgaggaggguguggugaag

SEQ ID NO: 828549 - RNA, 19 nt, Homo sapiens
  misc_RNA (1)...(19): siRNA sense strand
ugacucauacagccaccua

SEQ ID NO: 828550 - RNA, 19 nt, Homo sapiens
  misc_RNA (1)...(19): siRNA sense strand
gcuuugaggaggacaagga

SEQ ID NO: 828551 - RNA, 19 nt, Homo sapiens
  misc_RNA (1)...(19): siRNA sense strand
gacagcugcuuuuaccaaa

SEQ ID NO: 828552 - RNA, 19 nt, Homo sapiens
  misc_RNA (1)...(19): siRNA sense strand
gaggaaaugcuggcucucu

SEQ ID NO: 828553 - RNA, 19 nt, Homo sapiens
  misc_RNA (1)...(19): siRNA sense strand
gggaugacagcacgaugug

SEQ ID NO: 828554 - RNA, 19 nt, Homo sapiens
  misc_RNA (1)...(19): siRNA sense strand
agaaaugggcaccuuugau

SEQ ID NO: 828555 - RNA, 19 nt, Homo sapiens
  misc_RNA (1)...(19): siRNA sense strand
ccuggacgaugaggaugaa

SEQ ID NO: 828556 - RNA, 19 nt, Homo sapiens
  misc_RNA (1)...(19): siRNA sense strand
aagaaaugggcaccuuuga

SEQ ID NO: 828557 - RNA, 19 nt, Homo sapiens
  misc_RNA (1)...(19): siRNA sense strand
aggagcggcugaagaagca

SEQ ID NO: 828558 - RNA, 19 nt, Homo sapiens
  misc_RNA (1)...(19): siRNA sense strand
ugagauaccucuucgcuuu

SEQ ID NO: 828559 - RNA, 19 nt, Homo sapiens
  misc_RNA (1)...(19): siRNA sense strand
caacgcagcuauaagcaaa

SEQ ID NO: 828560 - RNA, 19 nt, Homo sapiens
  misc_RNA (1)...(19): siRNA sense strand
gcaguaaccucaucaccaa

SEQ ID NO: 828561 - RNA, 19 nt, Homo sapiens
  misc_RNA (1)...(19): siRNA sense strand
ccaaugagcucuacacagu

SEQ ID NO: 828562 - RNA, 19 nt, Homo sapiens
  misc_RNA (1)...(19): siRNA sense strand
ugaagaagauugagaagau

SEQ ID NO: 828563 - RNA, 19 nt, Homo sapiens
  misc_RNA (1)...(19): siRNA sense strand
gcacggcucugcacgaguu

SEQ ID NO: 828564 - RNA, 19 nt, Homo sapiens
  misc_RNA (1)...(19): siRNA sense strand
gaauaugaagcccaaauaa

SEQ ID NO: 828565 - RNA, 19 nt, Homo sapiens
  misc_RNA (1)...(19): siRNA sense strand
gagaagcaguucaauaagu

SEQ ID NO: 828566 - RNA, 19 nt, Homo sapiens
  misc_RNA (1)...(19): siRNA sense strand
cagaacugcucaugcguua

SEQ ID NO: 828567 - RNA, 19 nt, Homo sapiens
  misc_RNA (1)...(19): siRNA sense strand
gcaaauacuacauccauga

SEQ ID NO: 828568 - RNA, 19 nt, Homo sapiens
  misc_RNA (1)...(19): siRNA sense strand
caacuacccugacaagaag

SEQ ID NO: 828569 - RNA, 19 nt, Homo sapiens
  misc_RNA (1)...(19): siRNA sense strand
gaggagaagcaguucaaua

SEQ ID NO: 828570 - RNA, 19 nt, Homo sapiens
  misc_RNA (1)...(19): siRNA sense strand
guauagccauaaacucuuu

SEQ ID NO: 828571 - RNA, 19 nt, Homo sapiens
  misc_RNA (1)...(19): siRNA sense strand
gaagaagauugagaagaug

SEQ ID NO: 828572 - RNA, 19 nt, Homo sapiens
  misc_RNA (1)...(19): siRNA sense strand
ugacaaggccucuuccaaa

SEQ ID NO: 828573 - RNA, 19 nt, Homo sapiens
  misc_RNA (1)...(19): siRNA sense strand
cggagcacaucucggauua

SEQ ID NO: 828574 - RNA, 19 nt, Homo sapiens
  misc_RNA (1)...(19): siRNA sense strand
ucaaccaccucucccagua

SEQ ID NO: 828575 - RNA, 19 nt, Homo sapiens
  misc_RNA (1)...(19): siRNA sense strand
gaucucagguggaagucaa

SEQ ID NO: 828576 - RNA, 19 nt, Homo sapiens
  misc_RNA (1)...(19): siRNA sense strand
caugaugucucugaucuga

SEQ ID NO: 828577 - RNA, 19 nt, Homo sapiens
  misc_RNA (1)...(19): siRNA sense strand
gaacugcucaugcguuauc

SEQ ID NO: 828578 - RNA, 19 nt, Homo sapiens
  misc_RNA (1)...(19): siRNA sense strand
caagaaagacaaagagauc

SEQ ID NO: 828579 - RNA, 19 nt, Homo sapiens
  misc_RNA (1)...(19): siRNA sense strand
aggagaagcaguucaauaa

SEQ ID NO: 828580 - RNA, 19 nt, Homo sapiens
  misc_RNA (1)...(19): siRNA sense strand
agagaucauugcugaauau

SEQ ID NO: 828581 - RNA, 19 nt, Homo sapiens
  misc_RNA (1)...(19): siRNA sense strand
gaaagacaaagagaucauu

SEQ ID NO: 828582 - RNA, 19 nt, Homo sapiens
  misc_RNA (1)...(19): siRNA sense strand
caucucggauuacggcuuu

SEQ ID NO: 828583 - RNA, 19 nt, Homo sapiens
  misc_RNA (1)...(19): siRNA sense strand
ucgaugaaguugaccauga

SEQ ID NO: 828584 - RNA, 19 nt, Homo sapiens
  misc_RNA (1)...(19): siRNA sense strand
gacugcagcugcuucaaga

SEQ ID NO: 828585 - RNA, 19 nt, Homo sapiens
  misc_RNA (1)...(19): siRNA sense strand
ucaacuacccugacaagaa

SEQ ID NO: 828586 - RNA, 19 nt, Homo sapiens
  misc_RNA (1)...(19): siRNA sense strand
caggagaccucagcaugaa

SEQ ID NO: 828587 - RNA, 19 nt, Homo sapiens
  misc_RNA (1)...(19): siRNA sense strand
ugaauaugaagcccaaaua

SEQ ID NO: 828588 - RNA, 19 nt, Homo sapiens
  misc_RNA (1)...(19): siRNA sense strand
ggccauugcuggaugacaa

SEQ ID NO: 828589 - RNA, 19 nt, Homo sapiens
  misc_RNA (1)...(19): siRNA sense strand
gauagagaaugaggagguu

SEQ ID NO: 828590 - RNA, 19 nt, Homo sapiens
  misc_RNA (1)...(19): siRNA sense strand
caaccuggauucccgaagu

SEQ ID NO: 828591 - RNA, 19 nt, Homo sapiens
  misc_RNA (1)...(19): siRNA sense strand
gcagcucugugaagaagau

SEQ ID NO: 828592 - RNA, 19 nt, Homo sapiens
  misc_RNA (1)...(19): siRNA sense strand
gagcagaucgaggcuauug

SEQ ID NO: 828593 - RNA, 19 nt, Homo sapiens
  misc_RNA (1)...(19): siRNA sense strand
agaagaggcaggccaagua

SEQ ID NO: 828594 - RNA, 19 nt, Homo sapiens
  misc_RNA (1)...(19): siRNA sense strand
caagcacgauuuacucaag

SEQ ID NO: 828595 - RNA, 19 nt, Homo sapiens
  misc_RNA (1)...(19): siRNA sense strand
gaaugaggagguuaggaaa

SEQ ID NO: 828596 - RNA, 19 nt, Homo sapiens
  misc_RNA (1)...(19): siRNA sense strand
cagaagacaucgagaagac

SEQ ID NO: 828597 - RNA, 19 nt, Homo sapiens
  misc_RNA (1)...(19): siRNA sense strand
gacaaggccucuuccaaaa

SEQ ID NO: 828598 - RNA, 19 nt, Homo sapiens
  misc_RNA (1)...(19): siRNA sense strand
aagagaucauugcugaaua

SEQ ID NO: 828599 - RNA, 19 nt, Homo sapiens
  misc_RNA (1)...(19): siRNA sense strand
ggauucaggacaagcuaua

SEQ ID NO: 828600 - RNA, 19 nt, Homo sapiens
  misc_RNA (1)...(19): siRNA sense strand
gcucuacacagucaugaaa

SEQ ID NO: 828601 - RNA, 19 nt, Homo sapiens
  misc_RNA (1)...(19): siRNA sense strand
uaccagcgaugaagaagug

SEQ ID NO: 828602 - RNA, 19 nt, Homo sapiens
  misc_RNA (1)...(19): siRNA sense strand
gcaggccaagcacgauuua

SEQ ID NO: 828603 - RNA, 19 nt, Homo sapiens
  misc_RNA (1)...(19): siRNA sense strand
caaguacucugagaacaag

SEQ ID NO: 828604 - RNA, 19 nt, Homo sapiens
  misc_RNA (1)...(19): siRNA sense strand
uugagaagaugaaggagaa

SEQ ID NO: 828605 - RNA, 19 nt, Homo sapiens
  misc_RNA (1)...(19): siRNA sense strand
guauggaagcauucauuaa

SEQ ID NO: 828606 - RNA, 19 nt, Homo sapiens
  misc_RNA (1)...(19): siRNA sense strand
uagagggaccuguguauga

SEQ ID NO: 828607 - RNA, 19 nt, Homo sapiens
  misc_RNA (1)...(19): siRNA sense strand
gccaggaucucagguggaa

SEQ ID NO: 828608 - RNA, 19 nt, Homo sapiens
  misc_RNA (1)...(19): siRNA sense strand
cauuaaggauucaggacaa

SEQ ID NO: 828609 - RNA, 19 nt, Homo sapiens
  misc_RNA (1)...(19): siRNA sense strand
gaauggcaguaaccucauc

SEQ ID NO: 828610 - RNA, 19 nt, Homo sapiens
  misc_RNA (1)...(19): siRNA sense strand
gaacuguugguaucugguu

SEQ ID NO: 828611 - RNA, 19 nt, Homo sapiens
  misc_RNA (1)...(19): siRNA sense strand
ggacaugugcaaucaaguc

SEQ ID NO: 828612 - RNA, 19 nt, Homo sapiens
  misc_RNA (1)...(19): siRNA sense strand
gaagugacaagcacacagu

SEQ ID NO: 828613 - RNA, 19 nt, Homo sapiens
  misc_RNA (1)...(19): siRNA sense strand
agaagcaguucaauaaguc

SEQ ID NO: 828614 - RNA, 19 nt, Homo sapiens
  misc_RNA (1)...(19): siRNA sense strand
gaaguugaccaugacaaug

SEQ ID NO: 828615 - RNA, 19 nt, Homo sapiens
  misc_RNA (1)...(19): siRNA sense strand
agagggaccuguguaugaa

SEQ ID NO: 828616 - RNA, 19 nt, Homo sapiens
  misc_RNA (1)...(19): siRNA sense strand
aaccaccucucccaguaua

SEQ ID NO: 828617 - RNA, 19 nt, Homo sapiens
  misc_RNA (1)...(19): siRNA sense strand
cgacagaguccgucaaguc

SEQ ID NO: 828618 - RNA, 19 nt, Homo sapiens
  misc_RNA (1)...(19): siRNA sense strand
ccaaguacucugagaacaa

SEQ ID NO: 828619 - RNA, 19 nt, Homo sapiens
  misc_RNA (1)...(19): siRNA sense strand
gcagaagacaucgagaaga

SEQ ID NO: 828620 - RNA, 19 nt, Homo sapiens
  misc_RNA (1)...(19): siRNA sense strand
agauugagcucgaguacuc

SEQ ID NO: 828621 - RNA, 19 nt, Homo sapiens
  misc_RNA (1)...(19): siRNA sense strand
gaagcauucauuaaggauu

SEQ ID NO: 828622 - RNA, 19 nt, Homo sapiens
  misc_RNA (1)...(19): siRNA sense strand
ucaagucggcugccucuga

SEQ ID NO: 828623 - RNA, 19 nt, Homo sapiens
  misc_RNA (1)...(19): siRNA sense strand
caugugcaaucaagucuuc

SEQ ID NO: 828624 - RNA, 19 nt, Homo sapiens
  misc_RNA (1)...(19): siRNA sense strand
gggagcaccaguucaagaa

SEQ ID NO: 828625 - RNA, 19 nt, Homo sapiens
  misc_RNA (1)...(19): siRNA sense strand
gcacaacggcguggaugga

SEQ ID NO: 828626 - RNA, 19 nt, Homo sapiens
  misc_RNA (1)...(19): siRNA sense strand
gcacacaucaaugaaguca

SEQ ID NO: 828627 - RNA, 19 nt, Homo sapiens
  misc_RNA (1)...(19): siRNA sense strand
gguaucugguucugcauca

SEQ ID NO: 828628 - RNA, 19 nt, Homo sapiens
  misc_RNA (1)...(19): siRNA sense strand
cgugagcuauccuucaaga

SEQ ID NO: 828629 - RNA, 19 nt, Homo sapiens
  misc_RNA (1)...(19): siRNA sense strand
cuaggccucucucagugua

SEQ ID NO: 828630 - RNA, 19 nt, Homo sapiens
  misc_RNA (1)...(19): siRNA sense strand
gaucgauugcugugauuug

SEQ ID NO: 828631 - RNA, 19 nt, Homo sapiens
  misc_RNA (1)...(19): siRNA sense strand
gcuauaagcaaauacuaca

SEQ ID NO: 828632 - RNA, 19 nt, Homo sapiens
  misc_RNA (1)...(19): siRNA sense strand
ugaaggaggcugagaagca

SEQ ID NO: 828633 - RNA, 19 nt, Homo sapiens
  misc_RNA (1)...(19): siRNA sense strand
caugauggaucccuacaac

SEQ ID NO: 828634 - RNA, 19 nt, Homo sapiens
  misc_RNA (1)...(19): siRNA sense strand
ccucuucgcuuuccucaac

SEQ ID NO: 828635 - RNA, 19 nt, Homo sapiens
  misc_RNA (1)...(19): siRNA sense strand
aagcauucauuaaggauuc

SEQ ID NO: 828636 - RNA, 19 nt, Homo sapiens
  misc_RNA (1)...(19): siRNA sense strand
agaaugaggagguuaggaa

SEQ ID NO: 828637 - RNA, 19 nt, Homo sapiens
  misc_RNA (1)...(19): siRNA sense strand
acgcagcuauaagcaaaua

SEQ ID NO: 828638 - RNA, 19 nt, Homo sapiens
  misc_RNA (1)...(19): siRNA sense strand
gagaacaagcugaaaugca

SEQ ID NO: 828639 - RNA, 19 nt, Homo sapiens
  misc_RNA (1)...(19): siRNA sense strand
ucaggagaccucagcauga

SEQ ID NO: 828640 - RNA, 19 nt, Homo sapiens
  misc_RNA (1)...(19): siRNA sense strand
ucucucagcugaauacaac

SEQ ID NO: 828641 - RNA, 19 nt, Homo sapiens
  misc_RNA (1)...(19): siRNA sense strand
cgagugcgguuacgaucug

SEQ ID NO: 828642 - RNA, 19 nt, Homo sapiens
  misc_RNA (1)...(19): siRNA sense strand
gagcacaucucggauuacg

SEQ ID NO: 828643 - RNA, 19 nt, Homo sapiens
  misc_RNA (1)...(19): siRNA sense strand
guacaggacauggaugaug

SEQ ID NO: 828644 - RNA, 19 nt, Homo sapiens
  misc_RNA (1)...(19): siRNA sense strand
ucgaggcuauugccaaguu

SEQ ID NO: 828645 - RNA, 19 nt, Homo sapiens
  misc_RNA (1)...(19): siRNA sense strand
gccaggcacacaucaauga

SEQ ID NO: 828646 - RNA, 19 nt, Homo sapiens
  misc_RNA (1)...(19): siRNA sense strand
ccugugaacuguugguauc

SEQ ID NO: 828647 - RNA, 19 nt, Homo sapiens
  misc_RNA (1)...(19): siRNA sense strand
uggaagcauucauuaagga

SEQ ID NO: 828648 - RNA, 19 nt, Homo sapiens
  misc_RNA (1)...(19): siRNA sense strand
gaccaugccacccucaaug

SEQ ID NO: 828649 - RNA, 19 nt, Homo sapiens
  misc_RNA (1)...(19): siRNA sense strand
gaccuaggccucucucagu

SEQ ID NO: 828650 - RNA, 19 nt, Homo sapiens
  misc_RNA (1)...(19): siRNA sense strand
ccaaccagcaggaaacaga

SEQ ID NO: 828651 - RNA, 19 nt, Homo sapiens
  misc_RNA (1)...(19): siRNA sense strand
ggcuggaugucauugagaa

SEQ ID NO: 828652 - RNA, 19 nt, Homo sapiens
  misc_RNA (1)...(19): siRNA sense strand
aagcugaaaugcacaaagg

SEQ ID NO: 828653 - RNA, 19 nt, Homo sapiens
  misc_RNA (1)...(19): siRNA sense strand
gaagaggcaggccaaguac

SEQ ID NO: 828654 - RNA, 19 nt, Homo sapiens
  misc_RNA (1)...(19): siRNA sense strand
ggagaagcaguucaauaag

SEQ ID NO: 828655 - RNA, 19 nt, Homo sapiens
  misc_RNA (1)...(19): siRNA sense strand
aaugagcucuacacaguca

SEQ ID NO: 828656 - RNA, 19 nt, Homo sapiens
  misc_RNA (1)...(19): siRNA sense strand
uccugaaggugaccaauga

SEQ ID NO: 828657 - RNA, 19 nt, Homo sapiens
  misc_RNA (1)...(19): siRNA sense strand
gagaugaugaccaccuuca

SEQ ID NO: 828658 - RNA, 19 nt, Homo sapiens
  misc_RNA (1)...(19): siRNA sense strand
acaagaagcuggagcacua

SEQ ID NO: 828659 - RNA, 19 nt, Homo sapiens
  misc_RNA (1)...(19): siRNA sense strand
ugaaggagauugagcagaa

SEQ ID NO: 828660 - RNA, 19 nt, Homo sapiens
  misc_RNA (1)...(19): siRNA sense strand
uggaagaccugaagacuca

SEQ ID NO: 828661 - RNA, 19 nt, Homo sapiens
  misc_RNA (1)...(19): siRNA sense strand
gaggagcgcuacagguaug

SEQ ID NO: 828662 - RNA, 19 nt, Homo sapiens
  misc_RNA (1)...(19): siRNA sense strand
caacaucgcccaccugaag

SEQ ID NO: 828663 - RNA, 19 nt, Homo sapiens
  misc_RNA (1)...(19): siRNA sense strand
ucaagcaaguguucgagaa

SEQ ID NO: 828664 - RNA, 19 nt, Homo sapiens
  misc_RNA (1)...(19): siRNA sense strand
gaagaagaaccagaaguca

SEQ ID NO: 828665 - RNA, 19 nt, Homo sapiens
  misc_RNA (1)...(19): siRNA sense strand
uaaguccaaugcacuguau

SEQ ID NO: 828666 - RNA, 19 nt, Homo sapiens
  misc_RNA (1)...(19): siRNA sense strand
cagcaggugucacgcauca

SEQ ID NO: 828667 - RNA, 19 nt, Homo sapiens
  misc_RNA (1)...(19): siRNA sense strand
ucgcccagcugcacaagaa

SEQ ID NO: 828668 - RNA, 19 nt, Homo sapiens
  misc_RNA (1)...(19): siRNA sense strand
gaagagcuacgggagauca

SEQ ID NO: 828669 - RNA, 19 nt, Homo sapiens
  misc_RNA (1)...(19): siRNA sense strand
uggaugcucugcuggaaga

SEQ ID NO: 828670 - RNA, 19 nt, Homo sapiens
  misc_RNA (1)...(19): siRNA sense strand
ucaccgagcagaucaagau

SEQ ID NO: 828671 - RNA, 19 nt, Homo sapiens
  misc_RNA (1)...(19): siRNA sense strand
uggcagugcugacaacauc

SEQ ID NO: 828672 - RNA, 19 nt, Homo sapiens
  misc_RNA (1)...(19): siRNA sense strand
cagccucucuggccucuca

SEQ ID NO: 828673 - RNA, 19 nt, Homo sapiens
  misc_RNA (1)...(19): siRNA sense strand
ccagguuguucagcccuua

SEQ ID NO: 828674 - RNA, 19 nt, Homo sapiens
  misc_RNA (1)...(19): siRNA sense strand
acgacaauguggcagagua

SEQ ID NO: 828675 - RNA, 19 nt, Homo sapiens
  misc_RNA (1)...(19): siRNA sense strand
gaucaaggagggacagucu

SEQ ID NO: 828676 - RNA, 19 nt, Homo sapiens
  misc_RNA (1)...(19): siRNA sense strand
ggaggagcgcuacagguau

SEQ ID NO: 828677 - RNA, 19 nt, Homo sapiens
  misc_RNA (1)...(19): siRNA sense strand
gagaagaagaaccagaagu

SEQ ID NO: 828678 - RNA, 19 nt, Homo sapiens
  misc_RNA (1)...(19): siRNA sense strand
accagaagauccugaagau

SEQ ID NO: 828679 - RNA, 19 nt, Homo sapiens
  misc_RNA (1)...(19): siRNA sense strand
aggaggagcgcuacaggua

SEQ ID NO: 828680 - RNA, 19 nt, Homo sapiens
  misc_RNA (1)...(19): siRNA sense strand
guuguucagcccuuaauga

SEQ ID NO: 828681 - RNA, 19 nt, Homo sapiens
  misc_RNA (1)...(19): siRNA sense strand
uggaagagcuacgggagau

SEQ ID NO: 828682 - RNA, 19 nt, Homo sapiens
  misc_RNA (1)...(19): siRNA sense strand
aagcaaguguucgagaaga

SEQ ID NO: 828683 - RNA, 19 nt, Homo sapiens
  misc_RNA (1)...(19): siRNA sense strand
gaaggagauugagcagaac

SEQ ID NO: 828684 - RNA, 19 nt, Homo sapiens
  misc_RNA (1)...(19): siRNA sense strand
gcaggugucacgcaucaag

SEQ ID NO: 828685 - RNA, 19 nt, Homo sapiens
  misc_RNA (1)...(19): siRNA sense strand
guauggugcuccuggaaac

SEQ ID NO: 828686 - RNA, 19 nt, Homo sapiens
  misc_RNA (1)...(19): siRNA sense strand
ccaaguauggcagcgauga

SEQ ID NO: 828687 - RNA, 19 nt, Homo sapiens
  misc_RNA (1)...(19): siRNA sense strand
ccucauccgcaacaaguuu

SEQ ID NO: 828688 - RNA, 19 nt, Homo sapiens
  misc_RNA (1)...(19): siRNA sense strand
agaagaagaaccagaaguc

SEQ ID NO: 828689 - RNA, 19 nt, Homo sapiens
  misc_RNA (1)...(19): siRNA sense strand
ggaguuugccagccucauc

SEQ ID NO: 828690 - RNA, 19 nt, Homo sapiens
  misc_RNA (1)...(19): siRNA sense strand
cagagggacuacaccuaca

SEQ ID NO: 828691 - RNA, 19 nt, Homo sapiens
  misc_RNA (1)...(19): siRNA sense strand
cgacaauguggcagaguau

SEQ ID NO: 828692 - RNA, 19 nt, Homo sapiens
  misc_RNA (1)...(19): siRNA sense strand
caccagaagauccugaaga

SEQ ID NO: 828693 - RNA, 19 nt, Homo sapiens
  misc_RNA (1)...(19): siRNA sense strand
ucaaggagggacagucuca

SEQ ID NO: 828694 - RNA, 19 nt, Homo sapiens
  misc_RNA (1)...(19): siRNA sense strand
ucgagaagaagaaccagaa

SEQ ID NO: 828695 - RNA, 19 nt, Homo sapiens
  misc_RNA (1)...(19): siRNA sense strand
agaacgagaugacgaaccu

SEQ ID NO: 828696 - RNA, 19 nt, Homo sapiens
  misc_RNA (1)...(19): siRNA sense strand
uggccuaccaguccuauga

SEQ ID NO: 828697 - RNA, 19 nt, Homo sapiens
  misc_RNA (1)...(19): siRNA sense strand
caccaucgccaacuucauc

SEQ ID NO: 828698 - RNA, 19 nt, Homo sapiens
  misc_RNA (1)...(19): siRNA sense strand
gcaacagcagcagguggua

SEQ ID NO: 828699 - RNA, 19 nt, Homo sapiens
  misc_RNA (1)...(19): siRNA sense strand
cuaaguccaaugcacugua

SEQ ID NO: 828700 - RNA, 19 nt, Homo sapiens
  misc_RNA (1)...(19): siRNA sense strand
ccaacaacgcggacaagca

SEQ ID NO: 828701 - RNA, 19 nt, Homo sapiens
  misc_RNA (1)...(19): siRNA sense strand
aggagaagguggccuacca

SEQ ID NO: 828702 - RNA, 19 nt, Homo sapiens
  misc_RNA (1)...(19): siRNA sense strand
gcaggcaucagcggcuuug

SEQ ID NO: 828703 - RNA, 19 nt, Homo sapiens
  misc_RNA (1)...(19): siRNA sense strand
gcaucaagcaaguguucga

SEQ ID NO: 828704 - RNA, 19 nt, Homo sapiens
  misc_RNA (1)...(19): siRNA sense strand
cgaccugacugagcuucau

SEQ ID NO: 828705 - RNA, 19 nt, Homo sapiens
  misc_RNA (1)...(19): siRNA sense strand
caaguguucgagaagaaga

SEQ ID NO: 828706 - RNA, 19 nt, Homo sapiens
  misc_RNA (1)...(19): siRNA sense strand
agcaaguguucgagaagaa

SEQ ID NO: 828707 - RNA, 19 nt, Homo sapiens
  misc_RNA (1)...(19): siRNA sense strand
gccuaccaguccuaugaga

SEQ ID NO: 828708 - RNA, 19 nt, Homo sapiens
  misc_RNA (1)...(19): siRNA sense strand
gagggacuacaccuacaug

SEQ ID NO: 828709 - RNA, 19 nt, Homo sapiens
  misc_RNA (1)...(19): siRNA sense strand
gggaagaucuccaguuaua

SEQ ID NO: 828710 - RNA, 19 nt, Homo sapiens
  misc_RNA (1)...(19): siRNA sense strand
ggaaugagccagacaaaua

SEQ ID NO: 828711 - RNA, 19 nt, Homo sapiens
  misc_RNA (1)...(19): siRNA sense strand
gaaagaagauugcucagau

SEQ ID NO: 828712 - RNA, 19 nt, Homo sapiens
  misc_RNA (1)...(19): siRNA sense strand
ggaagcacguccuccauua

SEQ ID NO: 828713 - RNA, 19 nt, Homo sapiens
  misc_RNA (1)...(19): siRNA sense strand
gaaauuugauccugaagaa

SEQ ID NO: 828714 - RNA, 19 nt, Homo sapiens
  misc_RNA (1)...(19): siRNA sense strand
ggaaauggcugcaguaugc

SEQ ID NO: 828715 - RNA, 19 nt, Homo sapiens
  misc_RNA (1)...(19): siRNA sense strand
gaaagaugcuggaaagauc

SEQ ID NO: 828716 - RNA, 19 nt, Homo sapiens
  misc_RNA (1)...(19): siRNA sense strand
gaagauugcucagauguug

SEQ ID NO: 828717 - RNA, 19 nt, Homo sapiens
  misc_RNA (1)...(19): siRNA sense strand
cagggaagaucuccaguua

SEQ ID NO: 828718 - RNA, 19 nt, Homo sapiens
  misc_RNA (1)...(19): siRNA sense strand
gagaagaaguaacgaguga

SEQ ID NO: 828719 - RNA, 19 nt, Homo sapiens
  misc_RNA (1)...(19): siRNA sense strand
gguaauagaccagauguua

SEQ ID NO: 828720 - RNA, 19 nt, Homo sapiens
  misc_RNA (1)...(19): siRNA sense strand
caagauggguacagguaua

SEQ ID NO: 828721 - RNA, 19 nt, Homo sapiens
  misc_RNA (1)...(19): siRNA sense strand
gagaacaguuguaaagaau

SEQ ID NO: 828722 - RNA, 19 nt, Homo sapiens
  misc_RNA (1)...(19): siRNA sense strand
ccaaauccaccaucaaaua

SEQ ID NO: 828723 - RNA, 19 nt, Homo sapiens
  misc_RNA (1)...(19): siRNA sense strand
gaauaaacauggugugucu

SEQ ID NO: 828724 - RNA, 19 nt, Homo sapiens
  misc_RNA (1)...(19): siRNA sense strand
ggguacagguauaauguua

SEQ ID NO: 828725 - RNA, 19 nt, Homo sapiens
  misc_RNA (1)...(19): siRNA sense strand
gaccagauguuauugaauc

SEQ ID NO: 828726 - RNA, 19 nt, Homo sapiens
  misc_RNA (1)...(19): siRNA sense strand
gauguuggaucguuaugaa

SEQ ID NO: 828727 - RNA, 19 nt, Homo sapiens
  misc_RNA (1)...(19): siRNA sense strand
caagaugacucucagauac

SEQ ID NO: 828728 - RNA, 19 nt, Homo sapiens
  misc_RNA (1)...(19): siRNA sense strand
gaacaguuguaaagaaucu

SEQ ID NO: 828729 - RNA, 19 nt, Homo sapiens
  misc_RNA (1)...(19): siRNA sense strand
gcacauguucuaaauggua

SEQ ID NO: 828730 - RNA, 19 nt, Homo sapiens
  misc_RNA (1)...(19): siRNA sense strand
caaagaaauugaagagcuu

SEQ ID NO: 828731 - RNA, 19 nt, Homo sapiens
  misc_RNA (1)...(19): siRNA sense strand
gaacagacagguuugugaa

SEQ ID NO: 828732 - RNA, 19 nt, Homo sapiens
  misc_RNA (1)...(19): siRNA sense strand
caagaucgauaugugagua

SEQ ID NO: 828733 - RNA, 19 nt, Homo sapiens
  misc_RNA (1)...(19): siRNA sense strand
ugagaacaguuguaaagaa

SEQ ID NO: 828734 - RNA, 19 nt, Homo sapiens
  misc_RNA (1)...(19): siRNA sense strand
gaagaucuccaguuauaau

SEQ ID NO: 828735 - RNA, 19 nt, Homo sapiens
  misc_RNA (1)...(19): siRNA sense strand
gaugagaugccugguaaua

SEQ ID NO: 828736 - RNA, 19 nt, Homo sapiens
  misc_RNA (1)...(19): siRNA sense strand
ggacaagcauaauggaaca

SEQ ID NO: 828737 - RNA, 19 nt, Homo sapiens
  misc_RNA (1)...(19): siRNA sense strand
gaugagauauauagcacaa

SEQ ID NO: 828738 - RNA, 19 nt, Homo sapiens
  misc_RNA (1)...(19): siRNA sense strand
ugagaugccugguaauaga

SEQ ID NO: 828739 - RNA, 19 nt, Homo sapiens
  misc_RNA (1)...(19): siRNA sense strand
gagaauaggaguaguguuc

SEQ ID NO: 828740 - RNA, 19 nt, Homo sapiens
  misc_RNA (1)...(19): siRNA sense strand
uaauaaagcuaugccauca

SEQ ID NO: 828741 - RNA, 19 nt, Homo sapiens
  misc_RNA (1)...(19): siRNA sense strand
gcauagaccuuugcaugau

SEQ ID NO: 828742 - RNA, 19 nt, Homo sapiens
  misc_RNA (1)...(19): siRNA sense strand
gaucuccaguuauaauaga

SEQ ID NO: 828743 - RNA, 19 nt, Homo sapiens
  misc_RNA (1)...(19): siRNA sense strand
uagcacaaguaaagcauuu

SEQ ID NO: 828744 - RNA, 19 nt, Homo sapiens
  misc_RNA (1)...(19): siRNA sense strand
agacaaauaucccuguaau

SEQ ID NO: 828745 - RNA, 19 nt, Homo sapiens
  misc_RNA (1)...(19): siRNA sense strand
gaaugagccagacaaauau

SEQ ID NO: 828746 - RNA, 19 nt, Homo sapiens
  misc_RNA (1)...(19): siRNA sense strand
gaaugaggcacauguucua

SEQ ID NO: 828747 - RNA, 19 nt, Homo sapiens
  misc_RNA (1)...(19): siRNA sense strand
cagaggacauaguuauuug

SEQ ID NO: 828748 - RNA, 19 nt, Homo sapiens
  misc_RNA (1)...(19): siRNA sense strand
ggaaagaucauuguaugga

SEQ ID NO: 828749 - RNA, 19 nt, Homo sapiens
  misc_RNA (1)...(19): siRNA sense strand
gaaauugaagagcuugaaa

SEQ ID NO: 828750 - RNA, 19 nt, Homo sapiens
  misc_RNA (1)...(19): siRNA sense strand
uauacaagcuugggaaaug

SEQ ID NO: 828751 - RNA, 19 nt, Homo sapiens
  misc_RNA (1)...(19): siRNA sense strand
gcucagauguuggaucguu

SEQ ID NO: 828752 - RNA, 19 nt, Homo sapiens
  misc_RNA (1)...(19): siRNA sense strand
gcauuuauaggacccauuu

SEQ ID NO: 828753 - RNA, 19 nt, Homo sapiens
  misc_RNA (1)...(19): siRNA sense strand
agagaaagaugcuggaaag

SEQ ID NO: 828754 - RNA, 19 nt, Homo sapiens
  misc_RNA (1)...(19): siRNA sense strand
caaauccaccaucaaauau

SEQ ID NO: 828755 - RNA, 19 nt, Homo sapiens
  misc_RNA (1)...(19): siRNA sense strand
ggaauugcaugacuuuuga

SEQ ID NO: 828756 - RNA, 19 nt, Homo sapiens
  misc_RNA (1)...(19): siRNA sense strand
ccaagaugacucucagaua

SEQ ID NO: 828757 - RNA, 19 nt, Homo sapiens
  misc_RNA (1)...(19): siRNA sense strand
ccagacaaauaucccugua

SEQ ID NO: 828758 - RNA, 19 nt, Homo sapiens
  misc_RNA (1)...(19): siRNA sense strand
ucucuuggcucacauaauc

SEQ ID NO: 828759 - RNA, 19 nt, Homo sapiens
  misc_RNA (1)...(19): siRNA sense strand
gguaaauucuugggaccua

SEQ ID NO: 828760 - RNA, 19 nt, Homo sapiens
  misc_RNA (1)...(19): siRNA sense strand
guucaucccucuggaaaug

SEQ ID NO: 828761 - RNA, 19 nt, Homo sapiens
  misc_RNA (1)...(19): siRNA sense strand
gacaaguaauaccuacauu

SEQ ID NO: 828762 - RNA, 19 nt, Homo sapiens
  misc_RNA (1)...(19): siRNA sense strand
ggaacagacagguuuguga

SEQ ID NO: 828763 - RNA, 19 nt, Homo sapiens
  misc_RNA (1)...(19): siRNA sense strand
ucacagaauccaagagaaa

SEQ ID NO: 828764 - RNA, 19 nt, Homo sapiens
  misc_RNA (1)...(19): siRNA sense strand
caaugaauauacugacugu

SEQ ID NO: 828765 - RNA, 19 nt, Homo sapiens
  misc_RNA (1)...(19): siRNA sense strand
cauguuaacuggaauugca

SEQ ID NO: 828766 - RNA, 19 nt, Homo sapiens
  misc_RNA (1)...(19): siRNA sense strand
ugaggcacauguucuaaau

SEQ ID NO: 828767 - RNA, 19 nt, Homo sapiens
  misc_RNA (1)...(19): siRNA sense strand
uguaaugaauucaguggaa

SEQ ID NO: 828768 - RNA, 19 nt, Homo sapiens
  misc_RNA (1)...(19): siRNA sense strand
ugagauauauagcacaagu

SEQ ID NO: 828769 - RNA, 19 nt, Homo sapiens
  misc_RNA (1)...(19): siRNA sense strand
aaagaagauugcucagaug

SEQ ID NO: 828770 - RNA, 19 nt, Homo sapiens
  misc_RNA (1)...(19): siRNA sense strand
ggaaaaggauacagaguag

SEQ ID NO: 828771 - RNA, 19 nt, Homo sapiens
  misc_RNA (1)...(19): siRNA sense strand
ggaaaugaagccauaugug

SEQ ID NO: 828772 - RNA, 19 nt, Homo sapiens
  misc_RNA (1)...(19): siRNA sense strand
gaguaaugguuucugugaa

SEQ ID NO: 828773 - RNA, 19 nt, Homo sapiens
  misc_RNA (1)...(19): siRNA sense strand
guaauagaccagauguuau

SEQ ID NO: 828774 - RNA, 19 nt, Homo sapiens
  misc_RNA (1)...(19): siRNA sense strand
gaaaagaggaauaaacaug

SEQ ID NO: 828775 - RNA, 19 nt, Homo sapiens
  misc_RNA (1)...(19): siRNA sense strand
gaagccauauguggaagug

SEQ ID NO: 828776 - RNA, 19 nt, Homo sapiens
  misc_RNA (1)...(19): siRNA sense strand
gauaugugaguaaugguuu

SEQ ID NO: 828777 - RNA, 19 nt, Homo sapiens
  misc_RNA (1)...(19): siRNA sense strand
gcaguaugcaagaucgaua

SEQ ID NO: 828778 - RNA, 19 nt, Homo sapiens
  misc_RNA (1)...(19): siRNA sense strand
gaauaggaguaguguucau

SEQ ID NO: 828779 - RNA, 19 nt, Homo sapiens
  misc_RNA (1)...(19): siRNA sense strand
uauacugacuguagugaga

SEQ ID NO: 828780 - RNA, 19 nt, Homo sapiens
  misc_RNA (1)...(19): siRNA sense strand
uauaggacccauuuacaaa

SEQ ID NO: 828781 - RNA, 19 nt, Homo sapiens
  misc_RNA (1)...(19): siRNA sense strand
uagaccagauguuauugaa

SEQ ID NO: 828782 - RNA, 19 nt, Homo sapiens
  misc_RNA (1)...(19): siRNA sense strand
gcacguccuccauuaguau

SEQ ID NO: 828783 - RNA, 19 nt, Homo sapiens
  misc_RNA (1)...(19): siRNA sense strand
ucagaggacauaguuauuu

SEQ ID NO: 828784 - RNA, 19 nt, Homo sapiens
  misc_RNA (1)...(19): siRNA sense strand
ggaaauuugauccugaaga

SEQ ID NO: 828785 - RNA, 19 nt, Homo sapiens
  misc_RNA (1)...(19): siRNA sense strand
ggaccuagagaagaaguaa

SEQ ID NO: 828786 - RNA, 19 nt, Homo sapiens
  misc_RNA (1)...(19): siRNA sense strand
caccaaauccaccaucaaa

SEQ ID NO: 828787 - RNA, 19 nt, Homo sapiens
  misc_RNA (1)...(19): siRNA sense strand
ggacaaguaauaccuacau

SEQ ID NO: 828788 - RNA, 19 nt, Homo sapiens
  misc_RNA (1)...(19): siRNA sense strand
guaaugaagggaggaauga

SEQ ID NO: 828789 - RNA, 19 nt, Homo sapiens
  misc_RNA (1)...(19): siRNA sense strand
cuggaaagaucauuguaug

SEQ ID NO: 828790 - RNA, 19 nt, Homo sapiens
  misc_RNA (1)...(19): siRNA sense strand
cauggugugucucgaaaga

SEQ ID NO: 828791 - RNA, 19 nt, Homo sapiens
  misc_RNA (1)...(19): siRNA sense strand
gauacagaguagaguuuca

SEQ ID NO: 828792 - RNA, 19 nt, Homo sapiens
  misc_RNA (1)...(19): siRNA sense strand
uaauggaacagacagguuu

SEQ ID NO: 828793 - RNA, 19 nt, Homo sapiens
  misc_RNA (1)...(19): siRNA sense strand
augaugagaugccugguaa

SEQ ID NO: 828794 - RNA, 19 nt, Homo sapiens
  misc_RNA (1)...(19): siRNA sense strand
cagaguagaguuucaugaa

SEQ ID NO: 828795 - RNA, 19 nt, Homo sapiens
  misc_RNA (1)...(19): siRNA sense strand
uaacuggaauugcaugacu

SEQ ID NO: 828796 - RNA, 19 nt, Homo sapiens
  misc_RNA (1)...(19): siRNA sense strand
caaauaucccuguaaugga

SEQ ID NO: 828797 - RNA, 19 nt, Homo sapiens
  misc_RNA (1)...(19): siRNA sense strand
ccgcagacgaugagauaua

SEQ ID NO: 828798 - RNA, 19 nt, Homo sapiens
  misc_RNA (1)...(19): siRNA sense strand
ggcagucaguauauccuuu

SEQ ID NO: 828799 - RNA, 19 nt, Homo sapiens
  misc_RNA (1)...(19): siRNA sense strand
guggaaauuugauccugaa

SEQ ID NO: 828800 - RNA, 19 nt, Homo sapiens
  misc_RNA (1)...(19): siRNA sense strand
cuugggaaaugaagccaua

SEQ ID NO: 828801 - RNA, 19 nt, Homo sapiens
  misc_RNA (1)...(19): siRNA sense strand
ggaagaucuccaguuauaa

SEQ ID NO: 828802 - RNA, 19 nt, Homo sapiens
  misc_RNA (1)...(19): siRNA sense strand
cgagugagccacgcuguaa

SEQ ID NO: 828803 - RNA, 19 nt, Homo sapiens
  misc_RNA (1)...(19): siRNA sense strand
ggaaugaggcacauguucu

SEQ ID NO: 828804 - RNA, 19 nt, Homo sapiens
  misc_RNA (1)...(19): siRNA sense strand
gaauggcagucaguauauc

SEQ ID NO: 828805 - RNA, 19 nt, Homo sapiens
  misc_RNA (1)...(19): siRNA sense strand
acaaauaucccuguaaugg

SEQ ID NO: 828806 - RNA, 19 nt, Homo sapiens
  misc_RNA (1)...(19): siRNA sense strand
cuuaaaaccugaugaagaa

SEQ ID NO: 828807 - RNA, 19 nt, Homo sapiens
  misc_RNA (1)...(19): siRNA sense strand
gaaucgugauggcauugug

SEQ ID NO: 828808 - RNA, 19 nt, Homo sapiens
  misc_RNA (1)...(19): siRNA sense strand
guuggaucguuaugaauau

SEQ ID NO: 828809 - RNA, 19 nt, Homo sapiens
  misc_RNA (1)...(19): siRNA sense strand
gaaaguaacuaguggcaua

SEQ ID NO: 828810 - RNA, 19 nt, Homo sapiens
  misc_RNA (1)...(19): siRNA sense strand
gaucugaacuguugcuuaa

SEQ ID NO: 828811 - RNA, 19 nt, Homo sapiens
  misc_RNA (1)...(19): siRNA sense strand
gaagauaacaggcagauaa

SEQ ID NO: 828812 - RNA, 19 nt, Homo sapiens
  misc_RNA (1)...(19): siRNA sense strand
gaagaugauugcucaaauu

SEQ ID NO: 828813 - RNA, 19 nt, Homo sapiens
  misc_RNA (1)...(19): siRNA sense strand
ggaaucagauggagaaaga

SEQ ID NO: 828814 - RNA, 19 nt, Homo sapiens
  misc_RNA (1)...(19): siRNA sense strand
uagauaagcuuccuucaaa

SEQ ID NO: 828815 - RNA, 19 nt, Homo sapiens
  misc_RNA (1)...(19): siRNA sense strand
ggaaguagcauaugaaaug

SEQ ID NO: 828816 - RNA, 19 nt, Homo sapiens
  misc_RNA (1)...(19): siRNA sense strand
gggaaaagcugccuuauaa

SEQ ID NO: 828817 - RNA, 19 nt, Homo sapiens
  misc_RNA (1)...(19): siRNA sense strand
gcagauuccugaaauuuga

SEQ ID NO: 828818 - RNA, 19 nt, Homo sapiens
  misc_RNA (1)...(19): siRNA sense strand
gaaugcagcucaaauauac

SEQ ID NO: 828819 - RNA, 19 nt, Homo sapiens
  misc_RNA (1)...(19): siRNA sense strand
ugagaaaccugauggaauu

SEQ ID NO: 828820 - RNA, 19 nt, Homo sapiens
  misc_RNA (1)...(19): siRNA sense strand
gagaugagaucagcaauug

SEQ ID NO: 828821 - RNA, 19 nt, Homo sapiens
  misc_RNA (1)...(19): siRNA sense strand
gaagcaaguucuccuaaga

SEQ ID NO: 828822 - RNA, 19 nt, Homo sapiens
  misc_RNA (1)...(19): siRNA sense strand
gaucugaagugugacaaua

SEQ ID NO: 828823 - RNA, 19 nt, Homo sapiens
  misc_RNA (1)...(19): siRNA sense strand
gggacuaaauuucagcuua

SEQ ID NO: 828824 - RNA, 19 nt, Homo sapiens
  misc_RNA (1)...(19): siRNA sense strand
gcucuaagcuucuguccaa

SEQ ID NO: 828825 - RNA, 19 nt, Homo sapiens
  misc_RNA (1)...(19): siRNA sense strand
caaacaaggugacaacuuc

SEQ ID NO: 828826 - RNA, 19 nt, Homo sapiens
  misc_RNA (1)...(19): siRNA sense strand
gauauugacugcugggaaa

SEQ ID NO: 828827 - RNA, 19 nt, Homo sapiens
  misc_RNA (1)...(19): siRNA sense strand
ugacaaaguugccgaauca

SEQ ID NO: 828828 - RNA, 19 nt, Homo sapiens
  misc_RNA (1)...(19): siRNA sense strand
caacauggauuucuucucu

SEQ ID NO: 828829 - RNA, 19 nt, Homo sapiens
  misc_RNA (1)...(19): siRNA sense strand
gcucucaaaugguuucuaa

SEQ ID NO: 828830 - RNA, 19 nt, Homo sapiens
  misc_RNA (1)...(19): siRNA sense strand
uaaaggaguucccaaacaa

SEQ ID NO: 828831 - RNA, 19 nt, Homo sapiens
  misc_RNA (1)...(19): siRNA sense strand
caaagacaaugaagcuauu

SEQ ID NO: 828832 - RNA, 19 nt, Homo sapiens
  misc_RNA (1)...(19): siRNA sense strand
uaagaaacuugcucuauca

SEQ ID NO: 828833 - RNA, 19 nt, Homo sapiens
  misc_RNA (1)...(19): siRNA sense strand
gacaacagcuucuacaaag

SEQ ID NO: 828834 - RNA, 19 nt, Homo sapiens
  misc_RNA (1)...(19): siRNA sense strand
gacggaagaugacaaaguu

SEQ ID NO: 828835 - RNA, 19 nt, Homo sapiens
  misc_RNA (1)...(19): siRNA sense strand
gaacgccuucggucaauua

SEQ ID NO: 828836 - RNA, 19 nt, Homo sapiens
  misc_RNA (1)...(19): siRNA sense strand
ggaaacagccuagcucuga

SEQ ID NO: 828837 - RNA, 19 nt, Homo sapiens
  misc_RNA (1)...(19): siRNA sense strand
gaagaacacuaugaugaau

SEQ ID NO: 828838 - RNA, 19 nt, Homo sapiens
  misc_RNA (1)...(19): siRNA sense strand
ggaagaagaagcagaaaug

SEQ ID NO: 828839 - RNA, 19 nt, Homo sapiens
  misc_RNA (1)...(19): siRNA sense strand
gauuggugaucuaggauua

SEQ ID NO: 828840 - RNA, 19 nt, Homo sapiens
  misc_RNA (1)...(19): siRNA sense strand
cuucaaagauuacgagaaa

SEQ ID NO: 828841 - RNA, 19 nt, Homo sapiens
  misc_RNA (1)...(19): siRNA sense strand
uuacaacucuggcauuuga

SEQ ID NO: 828842 - RNA, 19 nt, Homo sapiens
  misc_RNA (1)...(19): siRNA sense strand
guagaagaauugagagcua

SEQ ID NO: 828843 - RNA, 19 nt, Homo sapiens
  misc_RNA (1)...(19): siRNA sense strand
caagucagccugcuaauau

SEQ ID NO: 828844 - RNA, 19 nt, Homo sapiens
  misc_RNA (1)...(19): siRNA sense strand
guugagagguggacaagaa

SEQ ID NO: 828845 - RNA, 19 nt, Homo sapiens
  misc_RNA (1)...(19): siRNA sense strand
gcagccagcuauacuuuau

SEQ ID NO: 828846 - RNA, 19 nt, Homo sapiens
  misc_RNA (1)...(19): siRNA sense strand
uaaagucacugauccugaa

SEQ ID NO: 828847 - RNA, 19 nt, Homo sapiens
  misc_RNA (1)...(19): siRNA sense strand
gaauuaaggcugcaaugaa

SEQ ID NO: 828848 - RNA, 19 nt, Homo sapiens
  misc_RNA (1)...(19): siRNA sense strand
aaagcugccuuauaaauga

SEQ ID NO: 828849 - RNA, 19 nt, Homo sapiens
  misc_RNA (1)...(19): siRNA sense strand
gaacaagcuuaugcucaaa

SEQ ID NO: 828850 - RNA, 19 nt, Homo sapiens
  misc_RNA (1)...(19): siRNA sense strand
caaauauaccggaaaguaa

SEQ ID NO: 828851 - RNA, 19 nt, Homo sapiens
  misc_RNA (1)...(19): siRNA sense strand
ggaagaagcagagauguug

SEQ ID NO: 828852 - RNA, 19 nt, Homo sapiens
  misc_RNA (1)...(19): siRNA sense strand
gauguucacagaugacuua

SEQ ID NO: 828853 - RNA, 19 nt, Homo sapiens
  misc_RNA (1)...(19): siRNA sense strand
guuacaagcucuucaggaa

SEQ ID NO: 828854 - RNA, 19 nt, Homo sapiens
  misc_RNA (1)...(19): siRNA sense strand
gauacuagggcuuugaaua

SEQ ID NO: 828855 - RNA, 19 nt, Homo sapiens
  misc_RNA (1)...(19): siRNA sense strand
ccagcaaguuucaggguua

SEQ ID NO: 828856 - RNA, 19 nt, Homo sapiens
  misc_RNA (1)...(19): siRNA sense strand
ccaaagcuguugcuaaauc

SEQ ID NO: 828857 - RNA, 19 nt, Homo sapiens
  misc_RNA (1)...(19): siRNA sense strand
ggacauuaccagcaaguuu

SEQ ID NO: 828858 - RNA, 19 nt, Homo sapiens
  misc_RNA (1)...(19): siRNA sense strand
gaaggauacccaaagcaua

SEQ ID NO: 828859 - RNA, 19 nt, Homo sapiens
  misc_RNA (1)...(19): siRNA sense strand
acacauugcucacuauaga

SEQ ID NO: 828860 - RNA, 19 nt, Homo sapiens
  misc_RNA (1)...(19): siRNA sense strand
ggaguuagcagaagaagau

SEQ ID NO: 828861 - RNA, 19 nt, Homo sapiens
  misc_RNA (1)...(19): siRNA sense strand
gcaguaggaaauucucuua

SEQ ID NO: 828862 - RNA, 19 nt, Homo sapiens
  misc_RNA (1)...(19): siRNA sense strand
gaugggcucucaaaugguu

SEQ ID NO: 828863 - RNA, 19 nt, Homo sapiens
  misc_RNA (1)...(19): siRNA sense strand
gaauguguaugcuggaaau

SEQ ID NO: 828864 - RNA, 19 nt, Homo sapiens
  misc_RNA (1)...(19): siRNA sense strand
gaacaacacaacaaucugu

SEQ ID NO: 828865 - RNA, 19 nt, Homo sapiens
  misc_RNA (1)...(19): siRNA sense strand
gguggagcuucaaagauua

SEQ ID NO: 828866 - RNA, 19 nt, Homo sapiens
  misc_RNA (1)...(19): siRNA sense strand
gugaagaagccuuuauuaa

SEQ ID NO: 828867 - RNA, 19 nt, Homo sapiens
  misc_RNA (1)...(19): siRNA sense strand
cagaggauauugcagacua

SEQ ID NO: 828868 - RNA, 19 nt, Homo sapiens
  misc_RNA (1)...(19): siRNA sense strand
ccacaucggaguauccuua

SEQ ID NO: 828869 - RNA, 19 nt, Homo sapiens
  misc_RNA (1)...(19): siRNA sense strand
auaaaggacuggacacuga

SEQ ID NO: 828870 - RNA, 19 nt, Homo sapiens
  misc_RNA (1)...(19): siRNA sense strand
gaaagucaguggcaaagac

SEQ ID NO: 828871 - RNA, 19 nt, Homo sapiens
  misc_RNA (1)...(19): siRNA sense strand
ggugacaacuucuuaucuu

SEQ ID NO: 828872 - RNA, 19 nt, Homo sapiens
  misc_RNA (1)...(19): siRNA sense strand
ucaaaagccucaaaccuua

SEQ ID NO: 828873 - RNA, 19 nt, Homo sapiens
  misc_RNA (1)...(19): siRNA sense strand
ccacuggaguugauucuau

SEQ ID NO: 828874 - RNA, 19 nt, Homo sapiens
  misc_RNA (1)...(19): siRNA sense strand
caacaagcagcucuucuaa

SEQ ID NO: 828875 - RNA, 19 nt, Homo sapiens
  misc_RNA (1)...(19): siRNA sense strand
ccaggucgcugcaacuuug

SEQ ID NO: 828876 - RNA, 19 nt, Homo sapiens
  misc_RNA (1)...(19): siRNA sense strand
gaaagaguguugaaaugac

SEQ ID NO: 828877 - RNA, 19 nt, Homo sapiens
  misc_RNA (1)...(19): siRNA sense strand
gaauagaacacauaucagu

SEQ ID NO: 828878 - RNA, 19 nt, Homo sapiens
  misc_RNA (1)...(19): siRNA sense strand
gcaagucagccugcuaaua

SEQ ID NO: 828879 - RNA, 19 nt, Homo sapiens
  misc_RNA (1)...(19): siRNA sense strand
cagcaucucuagcaucuau

SEQ ID NO: 828880 - RNA, 19 nt, Homo sapiens
  misc_RNA (1)...(19): siRNA sense strand
gauggucaccuucaaguuu

SEQ ID NO: 828881 - RNA, 19 nt, Homo sapiens
  misc_RNA (1)...(19): siRNA sense strand
ggacuaaauuucagcuuac

SEQ ID NO: 828882 - RNA, 19 nt, Homo sapiens
  misc_RNA (1)...(19): siRNA sense strand
gcaaacacaaagacaauga

SEQ ID NO: 828883 - RNA, 19 nt, Homo sapiens
  misc_RNA (1)...(19): siRNA sense strand
ucugaaagguugucuauca

SEQ ID NO: 828884 - RNA, 19 nt, Homo sapiens
  misc_RNA (1)...(19): siRNA sense strand
ggacaagaaguuaaauaug

SEQ ID NO: 828885 - RNA, 19 nt, Homo sapiens
  misc_RNA (1)...(19): siRNA sense strand
acacaacaaucuguaguaa

SEQ ID NO: 828886 - RNA, 19 nt, Homo sapiens
  misc_RNA (1)...(19): siRNA sense strand
aagcauagacucuccauuu

SEQ ID NO: 828887 - RNA, 19 nt, Homo sapiens
  misc_RNA (1)...(19): siRNA sense strand
ccucaaaccuuaucaguac

SEQ ID NO: 828888 - RNA, 19 nt, Homo sapiens
  misc_RNA (1)...(19): siRNA sense strand
ugaaugugcuaguguagaa

SEQ ID NO: 828889 - RNA, 19 nt, Homo sapiens
  misc_RNA (1)...(19): siRNA sense strand
cagaaggucccacagauaa

SEQ ID NO: 828890 - RNA, 19 nt, Homo sapiens
  misc_RNA (1)...(19): siRNA sense strand
ucaaauauaccggaaagua

SEQ ID NO: 828891 - RNA, 19 nt, Homo sapiens
  misc_RNA (1)...(19): siRNA sense strand
ugacugaacuaaugacauc

SEQ ID NO: 828892 - RNA, 19 nt, Homo sapiens
  misc_RNA (1)...(19): siRNA sense strand
gacaaaccauucuagugaa

SEQ ID NO: 828893 - RNA, 19 nt, Homo sapiens
  misc_RNA (1)...(19): siRNA sense strand
ggccuaagcuuuacuuguc

SEQ ID NO: 828894 - RNA, 19 nt, Homo sapiens
  misc_RNA (1)...(19): siRNA sense strand
gaauuguguuuacaugaga

SEQ ID NO: 828895 - RNA, 19 nt, Homo sapiens
  misc_RNA (1)...(19): siRNA sense strand
gaagaagaagcagaaauga

SEQ ID NO: 828896 - RNA, 19 nt, Homo sapiens
  misc_RNA (1)...(19): siRNA sense strand
aaucagaaauagaggauga

SEQ ID NO: 828897 - RNA, 19 nt, Homo sapiens
  misc_RNA (1)...(19): siRNA sense strand
agacaaaccauucuaguga

SEQ ID NO: 828898 - RNA, 19 nt, Homo sapiens
  misc_RNA (1)...(19): siRNA sense strand
gaagagaugagaucagcaa

SEQ ID NO: 828899 - RNA, 19 nt, Homo sapiens
  misc_RNA (1)...(19): siRNA sense strand
gcuaauauaucaguguuca

SEQ ID NO: 828900 - RNA, 19 nt, Homo sapiens
  misc_RNA (1)...(19): siRNA sense strand
caaacaagcaagcauauuc

SEQ ID NO: 828901 - RNA, 19 nt, Homo sapiens
  misc_RNA (1)...(19): siRNA sense strand
ucagaaugcagcucaaaua

SEQ ID NO: 828902 - RNA, 19 nt, Homo sapiens
  misc_RNA (1)...(19): siRNA sense strand
uacacaagcugguggauga

SEQ ID NO: 828903 - RNA, 19 nt, Homo sapiens
  misc_RNA (1)...(19): siRNA sense strand
gaauugagagcuauuguag

SEQ ID NO: 828904 - RNA, 19 nt, Homo sapiens
  misc_RNA (1)...(19): siRNA sense strand
aaagggauguucacagaug

SEQ ID NO: 828905 - RNA, 19 nt, Homo sapiens
  misc_RNA (1)...(19): siRNA sense strand
agaacaagcuuaugcucaa

SEQ ID NO: 828906 - RNA, 19 nt, Homo sapiens
  misc_RNA (1)...(19): siRNA sense strand
cagauaauggcaccaguua

SEQ ID NO: 828907 - RNA, 19 nt, Homo sapiens
  misc_RNA (1)...(19): siRNA sense strand
ggacacauugcucacuaua

SEQ ID NO: 828908 - RNA, 19 nt, Homo sapiens
  misc_RNA (1)...(19): siRNA sense strand
gaaaauacuccgucuacua

SEQ ID NO: 828909 - RNA, 19 nt, Homo sapiens
  misc_RNA (1)...(19): siRNA sense strand
gaugggagaugguuugaua

SEQ ID NO: 828910 - RNA, 19 nt, Homo sapiens
  misc_RNA (1)...(19): siRNA sense strand
ggagaugguuugauaauga

SEQ ID NO: 828911 - RNA, 19 nt, Homo sapiens
  misc_RNA (1)...(19): siRNA sense strand
gacaaaggauauacacuua

SEQ ID NO: 828912 - RNA, 19 nt, Homo sapiens
  misc_RNA (1)...(19): siRNA sense strand
gagagaaacuggaaaggaa

SEQ ID NO: 828913 - RNA, 19 nt, Homo sapiens
  misc_RNA (1)...(19): siRNA sense strand
ugaguagccugaacacuua

SEQ ID NO: 828914 - RNA, 19 nt, Homo sapiens
  misc_RNA (1)...(19): siRNA sense strand
gaaaggaagccuacaaugu

SEQ ID NO: 828915 - RNA, 19 nt, Homo sapiens
  misc_RNA (1)...(19): siRNA sense strand
gauaaugacugugaguaaa

SEQ ID NO: 828916 - RNA, 19 nt, Homo sapiens
  misc_RNA (1)...(19): siRNA sense strand
guacaagacacuuccuuua

SEQ ID NO: 828917 - RNA, 19 nt, Homo sapiens
  misc_RNA (1)...(19): siRNA sense strand
cuaaacaacucuguaauga

SEQ ID NO: 828918 - RNA, 19 nt, Homo sapiens
  misc_RNA (1)...(19): siRNA sense strand
ggaucuagcugaacagaau

SEQ ID NO: 828919 - RNA, 19 nt, Homo sapiens
  misc_RNA (1)...(19): siRNA sense strand
caaaggauauacacuuaug

SEQ ID NO: 828920 - RNA, 19 nt, Homo sapiens
  misc_RNA (1)...(19): siRNA sense strand
gacaaucagucacacaauu

SEQ ID NO: 828921 - RNA, 19 nt, Homo sapiens
  misc_RNA (1)...(19): siRNA sense strand
cagcauaugucuccucuug

SEQ ID NO: 828922 - RNA, 19 nt, Homo sapiens
  misc_RNA (1)...(19): siRNA sense strand
ugaagaaccucaacacugu

SEQ ID NO: 828923 - RNA, 19 nt, Homo sapiens
  misc_RNA (1)...(19): siRNA sense strand
cagcaacacucgguuuaua

SEQ ID NO: 828924 - RNA, 19 nt, Homo sapiens
  misc_RNA (1)...(19): siRNA sense strand
acacaaaguuccaagcaaa

SEQ ID NO: 828925 - RNA, 19 nt, Homo sapiens
  misc_RNA (1)...(19): siRNA sense strand
acaagacacuuccuuuauu

SEQ ID NO: 828926 - RNA, 19 nt, Homo sapiens
  misc_RNA (1)...(19): siRNA sense strand
gaacagaauucagggaagu

SEQ ID NO: 828927 - RNA, 19 nt, Homo sapiens
  misc_RNA (1)...(19): siRNA sense strand
agaaauaccugugaaacaa

SEQ ID NO: 828928 - RNA, 19 nt, Homo sapiens
  misc_RNA (1)...(19): siRNA sense strand
caagacacuuccuuuauuc

SEQ ID NO: 828929 - RNA, 19 nt, Homo sapiens
  misc_RNA (1)...(19): siRNA sense strand
caaaugauauccucaacca

SEQ ID NO: 828930 - RNA, 19 nt, Homo sapiens
  misc_RNA (1)...(19): siRNA sense strand
aaggaagccuacaauguua

SEQ ID NO: 828931 - RNA, 19 nt, Homo sapiens
  misc_RNA (1)...(19): siRNA sense strand
ugucagaaaugaaguaaug

SEQ ID NO: 828932 - RNA, 19 nt, Homo sapiens
  misc_RNA (1)...(19): siRNA sense strand
ggugauacaaccagaaaua

SEQ ID NO: 828933 - RNA, 19 nt, Homo sapiens
  misc_RNA (1)...(19): siRNA sense strand
cagacauggucaucauuua

SEQ ID NO: 828934 - RNA, 19 nt, Homo sapiens
  misc_RNA (1)...(19): siRNA sense strand
ccaagaugguggcaacaaa

SEQ ID NO: 828935 - RNA, 19 nt, Homo sapiens
  misc_RNA (1)...(19): siRNA sense strand
gaagacagaggcaucauca

SEQ ID NO: 828936 - RNA, 19 nt, Homo sapiens
  misc_RNA (1)...(19): siRNA sense strand
aaaggaagccuacaauguu

SEQ ID NO: 828937 - RNA, 19 nt, Homo sapiens
  misc_RNA (1)...(19): siRNA sense strand
gugaucacauuaaacauga

SEQ ID NO: 828938 - RNA, 19 nt, Homo sapiens
  misc_RNA (1)...(19): siRNA sense strand
ugaguaaacccuguuauuu

SEQ ID NO: 828939 - RNA, 19 nt, Homo sapiens
  misc_RNA (1)...(19): siRNA sense strand
ggacagugauggaaagacu

SEQ ID NO: 828940 - RNA, 19 nt, Homo sapiens
  misc_RNA (1)...(19): siRNA sense strand
gaaugugaauguccuugug

SEQ ID NO: 828941 - RNA, 19 nt, Homo sapiens
  misc_RNA (1)...(19): siRNA sense strand
cagcuggcauuacaucaaa

SEQ ID NO: 828942 - RNA, 19 nt, Homo sapiens
  misc_RNA (1)...(19): siRNA sense strand
gaaagacucaccuggacaa

SEQ ID NO: 828943 - RNA, 19 nt, Homo sapiens
  misc_RNA (1)...(19): siRNA sense strand
gaaaugaguagccugaaca

SEQ ID NO: 828944 - RNA, 19 nt, Homo sapiens
  misc_RNA (1)...(19): siRNA sense strand
cgacaacacccgccucauu

SEQ ID NO: 828945 - RNA, 19 nt, Homo sapiens
  misc_RNA (1)...(19): siRNA sense strand
ggucaucauuuaccuguca

SEQ ID NO: 828946 - RNA, 19 nt, Homo sapiens
  misc_RNA (1)...(19): siRNA sense strand
ucagacugcugcccuacua

SEQ ID NO: 828947 - RNA, 19 nt, Homo sapiens
  misc_RNA (1)...(19): siRNA sense strand
aaaccaugaugaggacuua

SEQ ID NO: 828948 - RNA, 19 nt, Homo sapiens
  misc_RNA (1)...(19): siRNA sense strand
acaauucauucauccagua

SEQ ID NO: 828949 - RNA, 19 nt, Homo sapiens
  misc_RNA (1)...(19): siRNA sense strand
cgacaaaggauauacacuu

SEQ ID NO: 828950 - RNA, 19 nt, Homo sapiens
  misc_RNA (1)...(19): siRNA sense strand
ccaaccggaugauugauga

SEQ ID NO: 828951 - RNA, 19 nt, Homo sapiens
  misc_RNA (1)...(19): siRNA sense strand
gcacacaguccagaaagaa

SEQ ID NO: 828952 - RNA, 19 nt, Homo sapiens
  misc_RNA (1)...(19): siRNA sense strand
ggcauugacuucacacuca

SEQ ID NO: 828953 - RNA, 19 nt, Homo sapiens
  misc_RNA (1)...(19): siRNA sense strand
uaaacaagcugagagaaac

SEQ ID NO: 828954 - RNA, 19 nt, Homo sapiens
  misc_RNA (1)...(19): siRNA sense strand
gaugaggugaucacauuaa

SEQ ID NO: 828955 - RNA, 19 nt, Homo sapiens
  misc_RNA (1)...(19): siRNA sense strand
ggaaaugaguagccugaac

SEQ ID NO: 828956 - RNA, 19 nt, Homo sapiens
  misc_RNA (1)...(19): siRNA sense strand
gacaacacccgccucauug

SEQ ID NO: 828957 - RNA, 19 nt, Homo sapiens
  misc_RNA (1)...(19): siRNA sense strand
ggaaaggaagccuacaaug

SEQ ID NO: 828958 - RNA, 19 nt, Homo sapiens
  misc_RNA (1)...(19): siRNA sense strand
gaaaccuacuucugggaau

SEQ ID NO: 828959 - RNA, 19 nt, Homo sapiens
  misc_RNA (1)...(19): siRNA sense strand
gaucaggaacagaaaguga

SEQ ID NO: 828960 - RNA, 19 nt, Homo sapiens
  misc_RNA (1)...(19): siRNA sense strand
gagaaugacagagaugaaa

SEQ ID NO: 828961 - RNA, 19 nt, Homo sapiens
  misc_RNA (1)...(19): siRNA sense strand
ugacauacacagcuauuga

SEQ ID NO: 828962 - RNA, 19 nt, Homo sapiens
  misc_RNA (1)...(19): siRNA sense strand
caacgaaaccugcgacucu

SEQ ID NO: 828963 - RNA, 19 nt, Homo sapiens
  misc_RNA (1)...(19): siRNA sense strand
caaaauaaggugcuucaua

SEQ ID NO: 828964 - RNA, 19 nt, Homo sapiens
  misc_RNA (1)...(19): siRNA sense strand
gcacauaaacaagcugaga

SEQ ID NO: 828965 - RNA, 19 nt, Homo sapiens
  misc_RNA (1)...(19): siRNA sense strand
cagaaagugaucaugguua

SEQ ID NO: 828966 - RNA, 19 nt, Homo sapiens
  misc_RNA (1)...(19): siRNA sense strand
gaggugaucacauuaaaca

SEQ ID NO: 828967 - RNA, 19 nt, Homo sapiens
  misc_RNA (1)...(19): siRNA sense strand
ccuggaagaugguacaaga

SEQ ID NO: 828968 - RNA, 19 nt, Homo sapiens
  misc_RNA (1)...(19): siRNA sense strand
ggccauauuuauugucaga

SEQ ID NO: 828969 - RNA, 19 nt, Homo sapiens
  misc_RNA (1)...(19): siRNA sense strand
ccaagcaaauacagacaug

SEQ ID NO: 828970 - RNA, 19 nt, Homo sapiens
  misc_RNA (1)...(19): siRNA sense strand
acagaacgguccagagguu

SEQ ID NO: 828971 - RNA, 19 nt, Homo sapiens
  misc_RNA (1)...(19): siRNA sense strand
ccaauggcguccucagaau

SEQ ID NO: 828972 - RNA, 19 nt, Homo sapiens
  misc_RNA (1)...(19): siRNA sense strand
ugaaacaacugaagaaccu

SEQ ID NO: 828973 - RNA, 19 nt, Homo sapiens
  misc_RNA (1)...(19): siRNA sense strand
ggaggagccgguuauguug

SEQ ID NO: 828974 - RNA, 19 nt, Homo sapiens
  misc_RNA (1)...(19): siRNA sense strand
agacaaagcgcaugguaga

SEQ ID NO: 828975 - RNA, 19 nt, Homo sapiens
  misc_RNA (1)...(19): siRNA sense strand
cuuaugcacccaucucuua

SEQ ID NO: 828976 - RNA, 19 nt, Homo sapiens
  misc_RNA (1)...(19): siRNA sense strand
gaaaugucagugcguaugu

SEQ ID NO: 828977 - RNA, 19 nt, Homo sapiens
  misc_RNA (1)...(19): siRNA sense strand
gcauaugucuccucuugcu

SEQ ID NO: 828978 - RNA, 19 nt, Homo sapiens
  misc_RNA (1)...(19): siRNA sense strand
aaauacagauuagcaagga

SEQ ID NO: 828979 - RNA, 19 nt, Homo sapiens
  misc_RNA (1)...(19): siRNA sense strand
ugacacaaauggaaaugag

SEQ ID NO: 828980 - RNA, 19 nt, Homo sapiens
  misc_RNA (1)...(19): siRNA sense strand
gggagaugguuugauaaug

SEQ ID NO: 828981 - RNA, 19 nt, Homo sapiens
  misc_RNA (1)...(19): siRNA sense strand
ugagggaucuagcugaaca

SEQ ID NO: 828982 - RNA, 19 nt, Homo sapiens
  misc_RNA (1)...(19): siRNA sense strand
ggaacaaaaugaaugugaa

SEQ ID NO: 828983 - RNA, 19 nt, Homo sapiens
  misc_RNA (1)...(19): siRNA sense strand
ugacugguccuuacuuaga

SEQ ID NO: 828984 - RNA, 19 nt, Homo sapiens
  misc_RNA (1)...(19): siRNA sense strand
acacaaauggaaaugagua

SEQ ID NO: 828985 - RNA, 19 nt, Homo sapiens
  misc_RNA (1)...(19): siRNA sense strand
gaguaaacccuguuauuuu

SEQ ID NO: 828986 - RNA, 19 nt, Homo sapiens
  misc_RNA (1)...(19): siRNA sense strand
gugaguaaacccuguuauu

SEQ ID NO: 828987 - RNA, 19 nt, Homo sapiens
  misc_RNA (1)...(19): siRNA sense strand
ucucauagacgacaaagga

SEQ ID NO: 828988 - RNA, 19 nt, Homo sapiens
  misc_RNA (1)...(19): siRNA sense strand
cgaacgacaugcacacagu

SEQ ID NO: 828989 - RNA, 19 nt, Homo sapiens
  misc_RNA (1)...(19): siRNA sense strand
ggacgacgacagccacgaa

SEQ ID NO: 828990 - RNA, 19 nt, Homo sapiens
  misc_RNA (1)...(19): siRNA sense strand
auaaggugcuucauaaugg

SEQ ID NO: 828991 - RNA, 19 nt, Homo sapiens
  misc_RNA (1)...(19): siRNA sense strand
gaauggaugacacaaaugg

SEQ ID NO: 828992 - RNA, 19 nt, Homo sapiens
  misc_RNA (1)...(19): siRNA sense strand
gaugaauggaugacacaaa

SEQ ID NO: 828993 - RNA, 19 nt, Homo sapiens
  misc_RNA (1)...(19): siRNA sense strand
gugcuugccuccacuucaa

SEQ ID NO: 828994 - RNA, 19 nt, Homo sapiens
  misc_RNA (1)...(19): siRNA sense strand
gacacuuccuuuauucugu

SEQ ID NO: 828995 - RNA, 19 nt, Homo sapiens
  misc_RNA (1)...(19): siRNA sense strand
gguacaagacacuuccuuu

SEQ ID NO: 828996 - RNA, 19 nt, Homo sapiens
  misc_RNA (1)...(19): siRNA sense strand
ggccucaaauucucuguca

SEQ ID NO: 828997 - RNA, 19 nt, Homo sapiens
  misc_RNA (1)...(19): siRNA sense strand
ggagaaugacagagaugaa

SEQ ID NO: 828998 - RNA, 19 nt, Homo sapiens
  misc_RNA (1)...(19): siRNA sense strand
ggugaucacauuaaacaug

SEQ ID NO: 828999 - RNA, 19 nt, Homo sapiens
  misc_RNA (1)...(19): siRNA sense strand
ccucauggacaaagcauuu

SEQ ID NO: 829000 - RNA, 19 nt, Homo sapiens
  misc_RNA (1)...(19): siRNA sense strand
guaaugauucucaccuaug

SEQ ID NO: 829001 - RNA, 19 nt, Homo sapiens
  misc_RNA (1)...(19): siRNA sense strand
ccuacuaagucacaaguuc

SEQ ID NO: 829002 - RNA, 19 nt, Homo sapiens
  misc_RNA (1)...(19): siRNA sense strand
guuuauagcugcggucauc

SEQ ID NO: 829003 - RNA, 19 nt, Homo sapiens
  misc_RNA (1)...(19): siRNA sense strand
ugcaacagcuucagugaca

SEQ ID NO: 829004 - RNA, 19 nt, Homo sapiens
  misc_RNA (1)...(19): siRNA sense strand
uaaggugcuucauaaugga

SEQ ID NO: 829005 - RNA, 19 nt, Homo sapiens
  misc_RNA (1)...(19): siRNA sense strand
cgacagccacgaagacaga

SEQ ID NO: 829006 - RNA, 19 nt, Homo sapiens
  misc_RNA (1)...(19): siRNA sense strand
gaccgacucugucucaacu

SEQ ID NO: 829007 - RNA, 19 nt, Homo sapiens
  misc_RNA (1)...(19): siRNA sense strand
gcagccacuguuccaaaua

SEQ ID NO: 829008 - RNA, 19 nt, Homo sapiens
  misc_RNA (1)...(19): siRNA sense strand
guccagagguuuuauaaau

SEQ ID NO: 829009 - RNA, 19 nt, Homo sapiens
  misc_RNA (1)...(19): siRNA sense strand
gaaguacaguggauucaaa

SEQ ID NO: 829010 - RNA, 19 nt, Homo sapiens
  misc_RNA (1)...(19): siRNA sense strand
ggaugugacuauuggauuu

SEQ ID NO: 829011 - RNA, 19 nt, Homo sapiens
  misc_RNA (1)...(19): siRNA sense strand
gaagugagguaagaguaaa

SEQ ID NO: 829012 - RNA, 19 nt, Homo sapiens
  misc_RNA (1)...(19): siRNA sense strand
gaaaagaauugccaaguga

SEQ ID NO: 829013 - RNA, 19 nt, Homo sapiens
  misc_RNA (1)...(19): siRNA sense strand
gggaccaucuggauucaua

SEQ ID NO: 829014 - RNA, 19 nt, Homo sapiens
  misc_RNA (1)...(19): siRNA sense strand
gaacaccuuuggcuucuuc

SEQ ID NO: 829015 - RNA, 19 nt, Homo sapiens
  misc_RNA (1)...(19): siRNA sense strand
gaaugagccugaagacaag

SEQ ID NO: 829016 - RNA, 19 nt, Homo sapiens
  misc_RNA (1)...(19): siRNA sense strand
gccaggagccuaauguuaa

SEQ ID NO: 829017 - RNA, 19 nt, Homo sapiens
  misc_RNA (1)...(19): siRNA sense strand
gaaggccuuuacagucuuu

SEQ ID NO: 829018 - RNA, 19 nt, Homo sapiens
  misc_RNA (1)...(19): siRNA sense strand
ugaaugagccugaagacaa

SEQ ID NO: 829019 - RNA, 19 nt, Homo sapiens
  misc_RNA (1)...(19): siRNA sense strand
cuagacaucuccagaagug

SEQ ID NO: 829020 - RNA, 19 nt, Homo sapiens
  misc_RNA (1)...(19): siRNA sense strand
gaagaugugaauuacugua

SEQ ID NO: 829021 - RNA, 19 nt, Homo sapiens
  misc_RNA (1)...(19): siRNA sense strand
ggaugaagaugugaauuac

SEQ ID NO: 829022 - RNA, 19 nt, Homo sapiens
  misc_RNA (1)...(19): siRNA sense strand
caagugacaaguuuacauu

SEQ ID NO: 829023 - RNA, 19 nt, Homo sapiens
  misc_RNA (1)...(19): siRNA sense strand
uggaugaagaugugaauua

SEQ ID NO: 829024 - RNA, 19 nt, Homo sapiens
  misc_RNA (1)...(19): siRNA sense strand
ggaaaagaauugccaagug

SEQ ID NO: 829025 - RNA, 19 nt, Homo sapiens
  misc_RNA (1)...(19): siRNA sense strand
agacaaggaugugacuauu

SEQ ID NO: 829026 - RNA, 19 nt, Homo sapiens
  misc_RNA (1)...(19): siRNA sense strand
gaaugucaguagccucuca

SEQ ID NO: 829027 - RNA, 19 nt, Homo sapiens
  misc_RNA (1)...(19): siRNA sense strand
gacacaagaugguggaaag

SEQ ID NO: 829028 - RNA, 19 nt, Homo sapiens
  misc_RNA (1)...(19): siRNA sense strand
agaaggauccugacagcua

SEQ ID NO: 829029 - RNA, 19 nt, Homo sapiens
  misc_RNA (1)...(19): siRNA sense strand
aguaaagucuccaccagaa

SEQ ID NO: 829030 - RNA, 19 nt, Homo sapiens
  misc_RNA (1)...(19): siRNA sense strand
uuucauaaaugccuuggaa

SEQ ID NO: 829031 - RNA, 19 nt, Homo sapiens
  misc_RNA (1)...(19): siRNA sense strand
cagcacugaugaccaagaa

SEQ ID NO: 829032 - RNA, 19 nt, Homo sapiens
  misc_RNA (1)...(19): siRNA sense strand
caaaggccaugggagagaa

SEQ ID NO: 829033 - RNA, 19 nt, Homo sapiens
  misc_RNA (1)...(19): siRNA sense strand
gagaaaguccuuggucaga

SEQ ID NO: 829034 - RNA, 19 nt, Homo sapiens
  misc_RNA (1)...(19): siRNA sense strand
gacggaaugauguauuuaa

SEQ ID NO: 829035 - RNA, 19 nt, Homo sapiens
  misc_RNA (1)...(19): siRNA sense strand
acaaggaugugacuauugg

SEQ ID NO: 829036 - RNA, 19 nt, Homo sapiens
  misc_RNA (1)...(19): siRNA sense strand
ccaagaaggccuuuacagu

SEQ ID NO: 829037 - RNA, 19 nt, Homo sapiens
  misc_RNA (1)...(19): siRNA sense strand
gaugugaggcauaaaguuc

SEQ ID NO: 829038 - RNA, 19 nt, Homo sapiens
  misc_RNA (1)...(19): siRNA sense strand
gaugugacuauuggauuua

SEQ ID NO: 829039 - RNA, 19 nt, Homo sapiens
  misc_RNA (1)...(19): siRNA sense strand
aagaaggccuuuacagucu

SEQ ID NO: 829040 - RNA, 19 nt, Homo sapiens
  misc_RNA (1)...(19): siRNA sense strand
auauugagaucacagagaa

SEQ ID NO: 829041 - RNA, 19 nt, Homo sapiens
  misc_RNA (1)...(19): siRNA sense strand
ggcagugucauuucaguuu

SEQ ID NO: 829042 - RNA, 19 nt, Homo sapiens
  misc_RNA (1)...(19): siRNA sense strand
cauucagccuugauauuga

SEQ ID NO: 829043 - RNA, 19 nt, Homo sapiens
  misc_RNA (1)...(19): siRNA sense strand
gauauugagaucacagaga

SEQ ID NO: 829044 - RNA, 19 nt, Homo sapiens
  misc_RNA (1)...(19): siRNA sense strand
acgacggaaugauguauuu

SEQ ID NO: 829045 - RNA, 19 nt, Homo sapiens
  misc_RNA (1)...(19): siRNA sense strand
gacaaggaugugacuauug

SEQ ID NO: 829046 - RNA, 19 nt, Homo sapiens
  misc_RNA (1)...(19): siRNA sense strand
cagcagggaugagaaaguc

SEQ ID NO: 829047 - RNA, 19 nt, Homo sapiens
  misc_RNA (1)...(19): siRNA sense strand
guacccaguuaccaaagau

SEQ ID NO: 829048 - RNA, 19 nt, Homo sapiens
  misc_RNA (1)...(19): siRNA sense strand
aggaugaugugaggcauaa

SEQ ID NO: 829049 - RNA, 19 nt, Homo sapiens
  misc_RNA (1)...(19): siRNA sense strand
gguggaaagucuaaaagaa

SEQ ID NO: 829050 - RNA, 19 nt, Homo sapiens
  misc_RNA (1)...(19): siRNA sense strand
cagaagugagguaagagua

SEQ ID NO: 829051 - RNA, 19 nt, Homo sapiens
  misc_RNA (1)...(19): siRNA sense strand
caagaugguggaaagucua

SEQ ID NO: 829052 - RNA, 19 nt, Homo sapiens
  misc_RNA (1)...(19): siRNA sense strand
agaagugagguaagaguaa

SEQ ID NO: 829053 - RNA, 19 nt, Homo sapiens
  misc_RNA (1)...(19): siRNA sense strand
gccuuuacagucuuuauuu

SEQ ID NO: 829054 - RNA, 19 nt, Homo sapiens
  misc_RNA (1)...(19): siRNA sense strand
gaagacaaggaugugacua

SEQ ID NO: 829055 - RNA, 19 nt, Homo sapiens
  misc_RNA (1)...(19): siRNA sense strand
cgacggaaugauguauuua

SEQ ID NO: 829056 - RNA, 19 nt, Homo sapiens
  misc_RNA (1)...(19): siRNA sense strand
gccuagaccguacaaagaa

SEQ ID NO: 829057 - RNA, 19 nt, Homo sapiens
  misc_RNA (1)...(19): siRNA sense strand
uaaaugccuuggaaaagaa

SEQ ID NO: 829058 - RNA, 19 nt, Homo sapiens
  misc_RNA (1)...(19): siRNA sense strand
uaaaagaaguacaguggau

SEQ ID NO: 829059 - RNA, 19 nt, Homo sapiens
  misc_RNA (1)...(19): siRNA sense strand
augaagaugugaauuacug

SEQ ID NO: 829060 - RNA, 19 nt, Homo sapiens
  misc_RNA (1)...(19): siRNA sense strand
uuaccuggaugaagaugug

SEQ ID NO: 829061 - RNA, 19 nt, Homo sapiens
  misc_RNA (1)...(19): siRNA sense strand
gcagugucauuucaguuuu

SEQ ID NO: 829062 - RNA, 19 nt, Homo sapiens
  misc_RNA (1)...(19): siRNA sense strand
agugacaaguuuacauuca

SEQ ID NO: 829063 - RNA, 19 nt, Homo sapiens
  misc_RNA (1)...(19): siRNA sense strand
gaugaugugaggcauaaag

SEQ ID NO: 829064 - RNA, 19 nt, Homo sapiens
  misc_RNA (1)...(19): siRNA sense strand
ccaggagccuaauguuaac

SEQ ID NO: 829065 - RNA, 19 nt, Homo sapiens
  misc_RNA (1)...(19): siRNA sense strand
gaaaacgacggaaugaugu

SEQ ID NO: 829066 - RNA, 19 nt, Homo sapiens
  misc_RNA (1)...(19): siRNA sense strand
acauucagccuugauauug

SEQ ID NO: 829067 - RNA, 19 nt, Homo sapiens
  misc_RNA (1)...(19): siRNA sense strand
acaagaugguggaaagucu

SEQ ID NO: 829068 - RNA, 19 nt, Homo sapiens
  misc_RNA (1)...(19): siRNA sense strand
cuucaaggauggguacaug

SEQ ID NO: 829069 - RNA, 19 nt, Homo sapiens
  misc_RNA (1)...(19): siRNA sense strand
aggcauaaaguucaucuga

SEQ ID NO: 829070 - RNA, 19 nt, Homo sapiens
  misc_RNA (1)...(19): siRNA sense strand
caugggagagaaauccuuu

SEQ ID NO: 829071 - RNA, 19 nt, Homo sapiens
  misc_RNA (1)...(19): siRNA sense strand
gagccaggagccuaauguu

SEQ ID NO: 829072 - RNA, 19 nt, Homo sapiens
  misc_RNA (1)...(19): siRNA sense strand
cuccagaagugagguaaga

SEQ ID NO: 829073 - RNA, 19 nt, Homo sapiens
  misc_RNA (1)...(19): siRNA sense strand
gcacucaaggaugauguga

SEQ ID NO: 829074 - RNA, 19 nt, Homo sapiens
  misc_RNA (1)...(19): siRNA sense strand
aaagaaguacaguggauuc

SEQ ID NO: 829075 - RNA, 19 nt, Homo sapiens
  misc_RNA (1)...(19): siRNA sense strand
gcaaccagacccagaagac

SEQ ID NO: 829076 - RNA, 19 nt, Homo sapiens
  misc_RNA (1)...(19): siRNA sense strand
agccaggagccuaauguua

SEQ ID NO: 829077 - RNA, 19 nt, Homo sapiens
  misc_RNA (1)...(19): siRNA sense strand
ccuagaccguacaaagaau

SEQ ID NO: 829078 - RNA, 19 nt, Homo sapiens
  misc_RNA (1)...(19): siRNA sense strand
gaccguacaaagaaugaug

SEQ ID NO: 829079 - RNA, 19 nt, Homo sapiens
  misc_RNA (1)...(19): siRNA sense strand
aguagccucucacugaaug

SEQ ID NO: 829080 - RNA, 19 nt, Homo sapiens
  misc_RNA (1)...(19): siRNA sense strand
ggccuuuacagucuuuauu

SEQ ID NO: 829081 - RNA, 19 nt, Homo sapiens
  misc_RNA (1)...(19): siRNA sense strand
aaugauggcuuuucuucuu

SEQ ID NO: 829082 - RNA, 19 nt, Homo sapiens
  misc_RNA (1)...(19): siRNA sense strand
cgaaaacgacggaaugaug

SEQ ID NO: 829083 - RNA, 19 nt, Homo sapiens
  misc_RNA (1)...(19): siRNA sense strand
agaaauuccucuccccaaa

SEQ ID NO: 829084 - RNA, 19 nt, Homo sapiens
  misc_RNA (1)...(19): siRNA sense strand
uacauucagccuugauauu

SEQ ID NO: 829085 - RNA, 19 nt, Homo sapiens
  misc_RNA (1)...(19): siRNA sense strand
gugacaaguuuacauucag

SEQ ID NO: 829086 - RNA, 19 nt, Homo sapiens
  misc_RNA (1)...(19): siRNA sense strand
ccaagugacaaguuuacau

SEQ ID NO: 829087 - RNA, 19 nt, Homo sapiens
  misc_RNA (1)...(19): siRNA sense strand
ucaaaggccaugggagaga

SEQ ID NO: 829088 - RNA, 19 nt, Homo sapiens
  misc_RNA (1)...(19): siRNA sense strand
aagacaaggaugugacuau

SEQ ID NO: 829089 - RNA, 19 nt, Homo sapiens
  misc_RNA (1)...(19): siRNA sense strand
auaaaugccuuggaaaaga

SEQ ID NO: 829090 - RNA, 19 nt, Homo sapiens
  misc_RNA (1)...(19): siRNA sense strand
agaaggccuuuacagucuu

SEQ ID NO: 829091 - RNA, 19 nt, Homo sapiens
  misc_RNA (1)...(19): siRNA sense strand
gaccaagaaggccuuuaca

SEQ ID NO: 829092 - RNA, 19 nt, Homo sapiens
  misc_RNA (1)...(19): siRNA sense strand
ccagaagacacaagauggu

SEQ ID NO: 829093 - RNA, 19 nt, Homo sapiens
  misc_RNA (1)...(19): siRNA sense strand
caaccagacccagaagaca

SEQ ID NO: 829094 - RNA, 19 nt, Homo sapiens
  misc_RNA (1)...(19): siRNA sense strand
gggcagugucauuucaguu

SEQ ID NO: 829095 - RNA, 19 nt, Homo sapiens
  misc_RNA (1)...(19): siRNA sense strand
gaaauuccucuccccaaau

SEQ ID NO: 829096 - RNA, 19 nt, Homo sapiens
  misc_RNA (1)...(19): siRNA sense strand
gaagaacgguguugacuua

SEQ ID NO: 829097 - RNA, 19 nt, Homo sapiens
  misc_RNA (1)...(19): siRNA sense strand
ccagaaagcucuugaguuu

SEQ ID NO: 829098 - RNA, 19 nt, Homo sapiens
  misc_RNA (1)...(19): siRNA sense strand
ggagauugcuggacauaua

SEQ ID NO: 829099 - RNA, 19 nt, Homo sapiens
  misc_RNA (1)...(19): siRNA sense strand
ggaggcggcuauaauaaua

SEQ ID NO: 829100 - RNA, 19 nt, Homo sapiens
  misc_RNA (1)...(19): siRNA sense strand
gagauaagcuaggagauuu

SEQ ID NO: 829101 - RNA, 19 nt, Homo sapiens
  misc_RNA (1)...(19): siRNA sense strand
guaauuacgucauucagaa

SEQ ID NO: 829102 - RNA, 19 nt, Homo sapiens
  misc_RNA (1)...(19): siRNA sense strand
ggucagaguuuccauguga

SEQ ID NO: 829103 - RNA, 19 nt, Homo sapiens
  misc_RNA (1)...(19): siRNA sense strand
gcagugaccuuuauaagag

SEQ ID NO: 829104 - RNA, 19 nt, Homo sapiens
  misc_RNA (1)...(19): siRNA sense strand
ggaggaggcggcuauaaua

SEQ ID NO: 829105 - RNA, 19 nt, Homo sapiens
  misc_RNA (1)...(19): siRNA sense strand
ggaagaucgucaugcauaa

SEQ ID NO: 829106 - RNA, 19 nt, Homo sapiens
  misc_RNA (1)...(19): siRNA sense strand
agaaagcucuugaguuuau

SEQ ID NO: 829107 - RNA, 19 nt, Homo sapiens
  misc_RNA (1)...(19): siRNA sense strand
gcaaucacgugguucagaa

SEQ ID NO: 829108 - RNA, 19 nt, Homo sapiens
  misc_RNA (1)...(19): siRNA sense strand
gaacucugcuaaugaagug

SEQ ID NO: 829109 - RNA, 19 nt, Homo sapiens
  misc_RNA (1)...(19): siRNA sense strand
gaccagacacucccuauuu

SEQ ID NO: 829110 - RNA, 19 nt, Homo sapiens
  misc_RNA (1)...(19): siRNA sense strand
ggaggagggugaugugaug

SEQ ID NO: 829111 - RNA, 19 nt, Homo sapiens
  misc_RNA (1)...(19): siRNA sense strand
cagcaggcaugccagguua

SEQ ID NO: 829112 - RNA, 19 nt, Homo sapiens
  misc_RNA (1)...(19): siRNA sense strand
uggccaagcuggagaagua

SEQ ID NO: 829113 - RNA, 19 nt, Homo sapiens
  misc_RNA (1)...(19): siRNA sense strand
gagaaguacuacaugaaga

SEQ ID NO: 829114 - RNA, 19 nt, Homo sapiens
  misc_RNA (1)...(19): siRNA sense strand
gaacaaggguacguuugau

SEQ ID NO: 829115 - RNA, 19 nt, Homo sapiens
  misc_RNA (1)...(19): siRNA sense strand
ggacagguauuugccuuau

SEQ ID NO: 829116 - RNA, 19 nt, Homo sapiens
  misc_RNA (1)...(19): siRNA sense strand
gauauggaaugucugaugu

SEQ ID NO: 829117 - RNA, 19 nt, Homo sapiens
  misc_RNA (1)...(19): siRNA sense strand
gaaugguucugagggcuua

SEQ ID NO: 829118 - RNA, 19 nt, Homo sapiens
  misc_RNA (1)...(19): siRNA sense strand
ggaacuagauggccauguc

SEQ ID NO: 829119 - RNA, 19 nt, Homo sapiens
  misc_RNA (1)...(19): siRNA sense strand
gaagaacaaggguacguuu

SEQ ID NO: 829120 - RNA, 19 nt, Homo sapiens
  misc_RNA (1)...(19): siRNA sense strand
ucacauggauccucuucaa

SEQ ID NO: 829121 - RNA, 19 nt, Homo sapiens
  misc_RNA (1)...(19): siRNA sense strand
cauggagccucuucaguuu

SEQ ID NO: 829122 - RNA, 19 nt, Homo sapiens
  misc_RNA (1)...(19): siRNA sense strand
aaacaucgauggccuacug

SEQ ID NO: 829123 - RNA, 19 nt, Homo sapiens
  misc_RNA (1)...(19): siRNA sense strand
gaauggcaaucacgugguu

SEQ ID NO: 829124 - RNA, 19 nt, Homo sapiens
  misc_RNA (1)...(19): siRNA sense strand
gcauggagccucuucaguu

SEQ ID NO: 829125 - RNA, 19 nt, Homo sapiens
  misc_RNA (1)...(19): siRNA sense strand
caagcaauguuguggagaa

SEQ ID NO: 829126 - RNA, 19 nt, Homo sapiens
  misc_RNA (1)...(19): siRNA sense strand
ggauaacauucaugcagaa

SEQ ID NO: 829127 - RNA, 19 nt, Homo sapiens
  misc_RNA (1)...(19): siRNA sense strand
gcaauguuguggagaagug

SEQ ID NO: 829128 - RNA, 19 nt, Homo sapiens
  misc_RNA (1)...(19): siRNA sense strand
ugacuacaauucucaacaa

SEQ ID NO: 829129 - RNA, 19 nt, Homo sapiens
  misc_RNA (1)...(19): siRNA sense strand
cagcauggguccagauuca

SEQ ID NO: 829130 - RNA, 19 nt, Homo sapiens
  misc_RNA (1)...(19): siRNA sense strand
ccaaacuggugcccuugua

SEQ ID NO: 829131 - RNA, 19 nt, Homo sapiens
  misc_RNA (1)...(19): siRNA sense strand
ggagauaagcuaggagauu

SEQ ID NO: 829132 - RNA, 19 nt, Homo sapiens
  misc_RNA (1)...(19): siRNA sense strand
gaauauuccugggugauca

SEQ ID NO: 829133 - RNA, 19 nt, Homo sapiens
  misc_RNA (1)...(19): siRNA sense strand
ucgcaacucuucguaagua

SEQ ID NO: 829134 - RNA, 19 nt, Homo sapiens
  misc_RNA (1)...(19): siRNA sense strand
gcagaaauccgaggcaaug

SEQ ID NO: 829135 - RNA, 19 nt, Homo sapiens
  misc_RNA (1)...(19): siRNA sense strand
gaauucugcccuugcauuu

SEQ ID NO: 829136 - RNA, 19 nt, Homo sapiens
  misc_RNA (1)...(19): siRNA sense strand
ccaagccuguggaggauuu

SEQ ID NO: 829137 - RNA, 19 nt, Homo sapiens
  misc_RNA (1)...(19): siRNA sense strand
gaacaucagaucauucagu

SEQ ID NO: 829138 - RNA, 19 nt, Homo sapiens
  misc_RNA (1)...(19): siRNA sense strand
gaggaggcggcuauaauaa

SEQ ID NO: 829139 - RNA, 19 nt, Homo sapiens
  misc_RNA (1)...(19): siRNA sense strand
ccaacuacgugguccagaa

SEQ ID NO: 829140 - RNA, 19 nt, Homo sapiens
  misc_RNA (1)...(19): siRNA sense strand
gcacacagagcagcuugua

SEQ ID NO: 829141 - RNA, 19 nt, Homo sapiens
  misc_RNA (1)...(19): siRNA sense strand
ugaagugugugaaagauca

SEQ ID NO: 829142 - RNA, 19 nt, Homo sapiens
  misc_RNA (1)...(19): siRNA sense strand
ggcaacaacucucugaaca

SEQ ID NO: 829143 - RNA, 19 nt, Homo sapiens
  misc_RNA (1)...(19): siRNA sense strand
cagcaaagauggaccaaaa

SEQ ID NO: 829144 - RNA, 19 nt, Homo sapiens
  misc_RNA (1)...(19): siRNA sense strand
uggaaugucugaugucaug

SEQ ID NO: 829145 - RNA, 19 nt, Homo sapiens
  misc_RNA (1)...(19): siRNA sense strand
uggauccucuucaagcuua

SEQ ID NO: 829146 - RNA, 19 nt, Homo sapiens
  misc_RNA (1)...(19): siRNA sense strand
gcaacuaauucagcuaauc

SEQ ID NO: 829147 - RNA, 19 nt, Homo sapiens
  misc_RNA (1)...(19): siRNA sense strand
gcucuugaguuuauuccuu

SEQ ID NO: 829148 - RNA, 19 nt, Homo sapiens
  misc_RNA (1)...(19): siRNA sense strand
uaacauucaugcagaacau

SEQ ID NO: 829149 - RNA, 19 nt, Homo sapiens
  misc_RNA (1)...(19): siRNA sense strand
cggaagaucgucaugcaua

SEQ ID NO: 829150 - RNA, 19 nt, Homo sapiens
  misc_RNA (1)...(19): siRNA sense strand
gagauugcuggacauauaa

SEQ ID NO: 829151 - RNA, 19 nt, Homo sapiens
  misc_RNA (1)...(19): siRNA sense strand
gaauggcaguggaagauac

SEQ ID NO: 829152 - RNA, 19 nt, Homo sapiens
  misc_RNA (1)...(19): siRNA sense strand
augcagacgucaaagauuu

SEQ ID NO: 829153 - RNA, 19 nt, Homo sapiens
  misc_RNA (1)...(19): siRNA sense strand
caacuaauucagcuaauca

SEQ ID NO: 829154 - RNA, 19 nt, Homo sapiens
  misc_RNA (1)...(19): siRNA sense strand
ccuuauggcugccgaguga

SEQ ID NO: 829155 - RNA, 19 nt, Homo sapiens
  misc_RNA (1)...(19): siRNA sense strand
ggcgauuccugucuaagaa

SEQ ID NO: 829156 - RNA, 19 nt, Homo sapiens
  misc_RNA (1)...(19): siRNA sense strand
gcagcagugaccuuuauaa

SEQ ID NO: 829157 - RNA, 19 nt, Homo sapiens
  misc_RNA (1)...(19): siRNA sense strand
ggaccaguaugccaacuac

SEQ ID NO: 829158 - RNA, 19 nt, Homo sapiens
  misc_RNA (1)...(19): siRNA sense strand
gaggcaauguacuuguauu

SEQ ID NO: 829159 - RNA, 19 nt, Homo sapiens
  misc_RNA (1)...(19): siRNA sense strand
ccgaggcaauguacuugua

SEQ ID NO: 829160 - RNA, 19 nt, Homo sapiens
  misc_RNA (1)...(19): siRNA sense strand
gaaacaucacccucaagaa

SEQ ID NO: 829161 - RNA, 19 nt, Homo sapiens
  misc_RNA (1)...(19): siRNA sense strand
gaaagcucuugaguuuauu

SEQ ID NO: 829162 - RNA, 19 nt, Homo sapiens
  misc_RNA (1)...(19): siRNA sense strand
auguauggcugccguguua

SEQ ID NO: 829163 - RNA, 19 nt, Homo sapiens
  misc_RNA (1)...(19): siRNA sense strand
gaacagugaggucaauucu

SEQ ID NO: 829164 - RNA, 19 nt, Homo sapiens
  misc_RNA (1)...(19): siRNA sense strand
gcaugccucucccuaguca

SEQ ID NO: 829165 - RNA, 19 nt, Homo sapiens
  misc_RNA (1)...(19): siRNA sense strand
caucagaucauucaguuuc

SEQ ID NO: 829166 - RNA, 19 nt, Homo sapiens
  misc_RNA (1)...(19): siRNA sense strand
guggauguguuugguaauu

SEQ ID NO: 829167 - RNA, 19 nt, Homo sapiens
  misc_RNA (1)...(19): siRNA sense strand
gggcaugccucucccuagu

SEQ ID NO: 829168 - RNA, 19 nt, Homo sapiens
  misc_RNA (1)...(19): siRNA sense strand
cgacaaaggugaaaagaag

SEQ ID NO: 829169 - RNA, 19 nt, Homo sapiens
  misc_RNA (1)...(19): siRNA sense strand
gggaacaucagaucauuca

SEQ ID NO: 829170 - RNA, 19 nt, Homo sapiens
  misc_RNA (1)...(19): siRNA sense strand
gagcguugcaugugucuug

SEQ ID NO: 829171 - RNA, 19 nt, Homo sapiens
  misc_RNA (1)...(19): siRNA sense strand
ggagaaguacuacaugaag

SEQ ID NO: 829172 - RNA, 19 nt, Homo sapiens
  misc_RNA (1)...(19): siRNA sense strand
ucaccaguauuauggaguu

SEQ ID NO: 829173 - RNA, 19 nt, Homo sapiens
  misc_RNA (1)...(19): siRNA sense strand
ugaaacaucacccucaaga

SEQ ID NO: 829174 - RNA, 19 nt, Homo sapiens
  misc_RNA (1)...(19): siRNA sense strand
uggauguguuugguaauua

SEQ ID NO: 829175 - RNA, 19 nt, Homo sapiens
  misc_RNA (1)...(19): siRNA sense strand
gcguuagcaugguggagua

SEQ ID NO: 829176 - RNA, 19 nt, Homo sapiens
  misc_RNA (1)...(19): siRNA sense strand
caggaucaauauggaaauu

SEQ ID NO: 829177 - RNA, 19 nt, Homo sapiens
  misc_RNA (1)...(19): siRNA sense strand
gaggccacguccugucauu

SEQ ID NO: 829178 - RNA, 19 nt, Homo sapiens
  misc_RNA (1)...(19): siRNA sense strand
ggugaucaauggcgagaca

SEQ ID NO: 829179 - RNA, 19 nt, Homo sapiens
  misc_RNA (1)...(19): siRNA sense strand
cuucagaccagcagaauga

SEQ ID NO: 829180 - RNA, 19 nt, Homo sapiens
  misc_RNA (1)...(19): siRNA sense strand
caagggaugcagacaguga

SEQ ID NO: 829181 - RNA, 19 nt, Homo sapiens
  misc_RNA (1)...(19): siRNA sense strand
aacaucagaucauucaguu

SEQ ID NO: 829182 - RNA, 19 nt, Homo sapiens
  misc_RNA (1)...(19): siRNA sense strand
gaaauccgaggcaauguac

SEQ ID NO: 829183 - RNA, 19 nt, Homo sapiens
  misc_RNA (1)...(19): siRNA sense strand
gcauggguccagauucauu

SEQ ID NO: 829184 - RNA, 19 nt, Homo sapiens
  misc_RNA (1)...(19): siRNA sense strand
ggagcaggcuuuuggaaga

SEQ ID NO: 829185 - RNA, 19 nt, Homo sapiens
  misc_RNA (1)...(19): siRNA sense strand
uggcagcagugaccuuuau

SEQ ID NO: 829186 - RNA, 19 nt, Homo sapiens
  misc_RNA (1)...(19): siRNA sense strand
acaacucucugaacagcaa

SEQ ID NO: 829187 - RNA, 19 nt, Homo sapiens
  misc_RNA (1)...(19): siRNA sense strand
uaauucagcuaaucaacag

SEQ ID NO: 829188 - RNA, 19 nt, Homo sapiens
  misc_RNA (1)...(19): siRNA sense strand
cuacaauucucaacaacag

SEQ ID NO: 829189 - RNA, 19 nt, Homo sapiens
  misc_RNA (1)...(19): siRNA sense strand
caacauggagucccagagu

SEQ ID NO: 829190 - RNA, 19 nt, Homo sapiens
  misc_RNA (1)...(19): siRNA sense strand
gauaagcuaggagauuuga

SEQ ID NO: 829191 - RNA, 19 nt, Homo sapiens
  misc_RNA (1)...(19): siRNA sense strand
cagcaacuaauucagcuaa

SEQ ID NO: 829192 - RNA, 19 nt, Homo sapiens
  misc_RNA (1)...(19): siRNA sense strand
caucgcaacucuucguaag

SEQ ID NO: 829193 - RNA, 19 nt, Homo sapiens
  misc_RNA (1)...(19): siRNA sense strand
uaugguggacuacuucuuu

SEQ ID NO: 829194 - RNA, 19 nt, Homo sapiens
  misc_RNA (1)...(19): siRNA sense strand
gguaauuacgucauucaga

SEQ ID NO: 829195 - RNA, 19 nt, Homo sapiens
  misc_RNA (1)...(19): siRNA sense strand
ccauuucgcccuuuaggaa

SEQ ID NO: 829196 - RNA, 19 nt, Homo sapiens
  misc_RNA (1)...(19): siRNA sense strand
ggaaauagcuguucacaua

SEQ ID NO: 829197 - RNA, 19 nt, Homo sapiens
  misc_RNA (1)...(19): siRNA sense strand
gaagaaaccucaaguggua

SEQ ID NO: 829198 - RNA, 19 nt, Homo sapiens
  misc_RNA (1)...(19): siRNA sense strand
ggccaaagcuccaggauua

SEQ ID NO: 829199 - RNA, 19 nt, Homo sapiens
  misc_RNA (1)...(19): siRNA sense strand
ccagauagaugcagaauuu

SEQ ID NO: 829200 - RNA, 19 nt, Homo sapiens
  misc_RNA (1)...(19): siRNA sense strand
caagaaaccuggauggaaa

SEQ ID NO: 829201 - RNA, 19 nt, Homo sapiens
  misc_RNA (1)...(19): siRNA sense strand
caaaggaugucauucguaa

SEQ ID NO: 829202 - RNA, 19 nt, Homo sapiens
  misc_RNA (1)...(19): siRNA sense strand
uaaagaagguuguuggaaa

SEQ ID NO: 829203 - RNA, 19 nt, Homo sapiens
  misc_RNA (1)...(19): siRNA sense strand
ggaagaaauuuggacaaua

SEQ ID NO: 829204 - RNA, 19 nt, Homo sapiens
  misc_RNA (1)...(19): siRNA sense strand
gagcaagucugauaaggaa

SEQ ID NO: 829205 - RNA, 19 nt, Homo sapiens
  misc_RNA (1)...(19): siRNA sense strand
ggaagaagaugccaagcaa

SEQ ID NO: 829206 - RNA, 19 nt, Homo sapiens
  misc_RNA (1)...(19): siRNA sense strand
uaaguaagguguucaauca

SEQ ID NO: 829207 - RNA, 19 nt, Homo sapiens
  misc_RNA (1)...(19): siRNA sense strand
gaaagaaggccuagaugaa

SEQ ID NO: 829208 - RNA, 19 nt, Homo sapiens
  misc_RNA (1)...(19): siRNA sense strand
gaugaaagcacuagaauau

SEQ ID NO: 829209 - RNA, 19 nt, Homo sapiens
  misc_RNA (1)...(19): siRNA sense strand
uaacauagacgacuugaaa

SEQ ID NO: 829210 - RNA, 19 nt, Homo sapiens
  misc_RNA (1)...(19): siRNA sense strand
uagaugagauugagaauga

SEQ ID NO: 829211 - RNA, 19 nt, Homo sapiens
  misc_RNA (1)...(19): siRNA sense strand
gaugcaaucuuccuuacua

SEQ ID NO: 829212 - RNA, 19 nt, Homo sapiens
  misc_RNA (1)...(19): siRNA sense strand
gaaguggcagguauuauua

SEQ ID NO: 829213 - RNA, 19 nt, Homo sapiens
  misc_RNA (1)...(19): siRNA sense strand
ggacauuucugcacccaaa

SEQ ID NO: 829214 - RNA, 19 nt, Homo sapiens
  misc_RNA (1)...(19): siRNA sense strand
agaaaggacuggagacuaa

SEQ ID NO: 829215 - RNA, 19 nt, Homo sapiens
  misc_RNA (1)...(19): siRNA sense strand
ugaaagaacuagaagaaga

SEQ ID NO: 829216 - RNA, 19 nt, Homo sapiens
  misc_RNA (1)...(19): siRNA sense strand
ccagaaggcuguugagcua

SEQ ID NO: 829217 - RNA, 19 nt, Homo sapiens
  misc_RNA (1)...(19): siRNA sense strand
cuacagaccuuauccuuug

SEQ ID NO: 829218 - RNA, 19 nt, Homo sapiens
  misc_RNA (1)...(19): siRNA sense strand
ggacaugucuuccaaacuc

SEQ ID NO: 829219 - RNA, 19 nt, Homo sapiens
  misc_RNA (1)...(19): siRNA sense strand
gagaaugguucgacuguug

SEQ ID NO: 829220 - RNA, 19 nt, Homo sapiens
  misc_RNA (1)...(19): siRNA sense strand
gaaggugguuggcgagaaa

SEQ ID NO: 829221 - RNA, 19 nt, Homo sapiens
  misc_RNA (1)...(19): siRNA sense strand
ucucagagcuuguuaugaa

SEQ ID NO: 829222 - RNA, 19 nt, Homo sapiens
  misc_RNA (1)...(19): siRNA sense strand
ugaaaggcuuggacaauaa

SEQ ID NO: 829223 - RNA, 19 nt, Homo sapiens
  misc_RNA (1)...(19): siRNA sense strand
gccaugggcccaaauauua

SEQ ID NO: 829224 - RNA, 19 nt, Homo sapiens
  misc_RNA (1)...(19): siRNA sense strand
gcaaugaugucguugaucu

SEQ ID NO: 829225 - RNA, 19 nt, Homo sapiens
  misc_RNA (1)...(19): siRNA sense strand
gaauauaggugaacuucca

SEQ ID NO: 829226 - RNA, 19 nt, Homo sapiens
  misc_RNA (1)...(19): siRNA sense strand
uaauugcuguggagauuua

SEQ ID NO: 829227 - RNA, 19 nt, Homo sapiens
  misc_RNA (1)...(19): siRNA sense strand
gcacucaacaccauuguaa

SEQ ID NO: 829228 - RNA, 19 nt, Homo sapiens
  misc_RNA (1)...(19): siRNA sense strand
gaucaaagaauguucagaa

SEQ ID NO: 829229 - RNA, 19 nt, Homo sapiens
  misc_RNA (1)...(19): siRNA sense strand
gaagauuggcucuaaagaa

SEQ ID NO: 829230 - RNA, 19 nt, Homo sapiens
  misc_RNA (1)...(19): siRNA sense strand
ugacacagcuguuucagau

SEQ ID NO: 829231 - RNA, 19 nt, Homo sapiens
  misc_RNA (1)...(19): siRNA sense strand
ggaaagaaggccuagauga

SEQ ID NO: 829232 - RNA, 19 nt, Homo sapiens
  misc_RNA (1)...(19): siRNA sense strand
gaggaaagccuuaagugaa

SEQ ID NO: 829233 - RNA, 19 nt, Homo sapiens
  misc_RNA (1)...(19): siRNA sense strand
aagauuggcucuaaagaaa

SEQ ID NO: 829234 - RNA, 19 nt, Homo sapiens
  misc_RNA (1)...(19): siRNA sense strand
gauugaagaucuugaggaa

SEQ ID NO: 829235 - RNA, 19 nt, Homo sapiens
  misc_RNA (1)...(19): siRNA sense strand
gcauagagaucugucuuau

SEQ ID NO: 829236 - RNA, 19 nt, Homo sapiens
  misc_RNA (1)...(19): siRNA sense strand
aaagagcagucgcaaauga

SEQ ID NO: 829237 - RNA, 19 nt, Homo sapiens
  misc_RNA (1)...(19): siRNA sense strand
gaaagaacuagaagaagaa

SEQ ID NO: 829238 - RNA, 19 nt, Homo sapiens
  misc_RNA (1)...(19): siRNA sense strand
aagaaaggcuggcuuguau

SEQ ID NO: 829239 - RNA, 19 nt, Homo sapiens
  misc_RNA (1)...(19): siRNA sense strand
ggaaggaaccaaauccaaa

SEQ ID NO: 829240 - RNA, 19 nt, Homo sapiens
  misc_RNA (1)...(19): siRNA sense strand
gcaagauguuucccuuuau

SEQ ID NO: 829241 - RNA, 19 nt, Homo sapiens
  misc_RNA (1)...(19): siRNA sense strand
ccaaggagcugggcauaga

SEQ ID NO: 829242 - RNA, 19 nt, Homo sapiens
  misc_RNA (1)...(19): siRNA sense strand
uuaagaagauuggcucuaa

SEQ ID NO: 829243 - RNA, 19 nt, Homo sapiens
  misc_RNA (1)...(19): siRNA sense strand
cuacacaccuuaugcaaau

SEQ ID NO: 829244 - RNA, 19 nt, Homo sapiens
  misc_RNA (1)...(19): siRNA sense strand
gcauuaaccuagacagaau

SEQ ID NO: 829245 - RNA, 19 nt, Homo sapiens
  misc_RNA (1)...(19): siRNA sense strand
guacauagagauugagaaa

SEQ ID NO: 829246 - RNA, 19 nt, Homo sapiens
  misc_RNA (1)...(19): siRNA sense strand
ccaaugcagugguucaauu

SEQ ID NO: 829247 - RNA, 19 nt, Homo sapiens
  misc_RNA (1)...(19): siRNA sense strand
aaagggagcaucucgaaua

SEQ ID NO: 829248 - RNA, 19 nt, Homo sapiens
  misc_RNA (1)...(19): siRNA sense strand
gauugaaggugcuaaagug

SEQ ID NO: 829249 - RNA, 19 nt, Homo sapiens
  misc_RNA (1)...(19): siRNA sense strand
aaaggaggaugaagacaaa

SEQ ID NO: 829250 - RNA, 19 nt, Homo sapiens
  misc_RNA (1)...(19): siRNA sense strand
cuucagaguugguaucuaa

SEQ ID NO: 829251 - RNA, 19 nt, Homo sapiens
  misc_RNA (1)...(19): siRNA sense strand
gaucauaguggccuguaua

SEQ ID NO: 829252 - RNA, 19 nt, Homo sapiens
  misc_RNA (1)...(19): siRNA sense strand
auagagaucugucuuaugu

SEQ ID NO: 829253 - RNA, 19 nt, Homo sapiens
  misc_RNA (1)...(19): siRNA sense strand
gaaguugugucagguguug

SEQ ID NO: 829254 - RNA, 19 nt, Homo sapiens
  misc_RNA (1)...(19): siRNA sense strand
gcuaaaugguuacaagaug

SEQ ID NO: 829255 - RNA, 19 nt, Homo sapiens
  misc_RNA (1)...(19): siRNA sense strand
gaaaggagaggcuguucaa

SEQ ID NO: 829256 - RNA, 19 nt, Homo sapiens
  misc_RNA (1)...(19): siRNA sense strand
aaaccuggauggaaagaaa

SEQ ID NO: 829257 - RNA, 19 nt, Homo sapiens
  misc_RNA (1)...(19): siRNA sense strand
auucagaccuggauucuaa

SEQ ID NO: 829258 - RNA, 19 nt, Homo sapiens
  misc_RNA (1)...(19): siRNA sense strand
ccagagcuaugucgaaaga

SEQ ID NO: 829259 - RNA, 19 nt, Homo sapiens
  misc_RNA (1)...(19): siRNA sense strand
gagcaaaggaugaaagaug

SEQ ID NO: 829260 - RNA, 19 nt, Homo sapiens
  misc_RNA (1)...(19): siRNA sense strand
ggacaagauuggagaugug

SEQ ID NO: 829261 - RNA, 19 nt, Homo sapiens
  misc_RNA (1)...(19): siRNA sense strand
gagaggcuguucaagaaga

SEQ ID NO: 829262 - RNA, 19 nt, Homo sapiens
  misc_RNA (1)...(19): siRNA sense strand
gcacaaacuggaugacauu

SEQ ID NO: 829263 - RNA, 19 nt, Homo sapiens
  misc_RNA (1)...(19): siRNA sense strand
uaaagcaacuucuaaacca

SEQ ID NO: 829264 - RNA, 19 nt, Homo sapiens
  misc_RNA (1)...(19): siRNA sense strand
uaaaaucacuucagaguug

SEQ ID NO: 829265 - RNA, 19 nt, Homo sapiens
  misc_RNA (1)...(19): siRNA sense strand
acaaauagaugcuuaugag

SEQ ID NO: 829266 - RNA, 19 nt, Homo sapiens
  misc_RNA (1)...(19): siRNA sense strand
aagaagagcuccugaaagg

SEQ ID NO: 829267 - RNA, 19 nt, Homo sapiens
  misc_RNA (1)...(19): siRNA sense strand
gaugacaugcacaguaaua

SEQ ID NO: 829268 - RNA, 19 nt, Homo sapiens
  misc_RNA (1)...(19): siRNA sense strand
acaaagcccuugcuguuau

SEQ ID NO: 829269 - RNA, 19 nt, Homo sapiens
  misc_RNA (1)...(19): siRNA sense strand
gauuguauuuccagcagua

SEQ ID NO: 829270 - RNA, 19 nt, Homo sapiens
  misc_RNA (1)...(19): siRNA sense strand
cugaaaggcuuggacaaua

SEQ ID NO: 829271 - RNA, 19 nt, Homo sapiens
  misc_RNA (1)...(19): siRNA sense strand
gcacaagugguacagauga

SEQ ID NO: 829272 - RNA, 19 nt, Homo sapiens
  misc_RNA (1)...(19): siRNA sense strand
aagagaaacugaagcaaug

SEQ ID NO: 829273 - RNA, 19 nt, Homo sapiens
  misc_RNA (1)...(19): siRNA sense strand
cuaaaugguuacaagauga

SEQ ID NO: 829274 - RNA, 19 nt, Homo sapiens
  misc_RNA (1)...(19): siRNA sense strand
ugucagguguuguaaguaa

SEQ ID NO: 829275 - RNA, 19 nt, Homo sapiens
  misc_RNA (1)...(19): siRNA sense strand
gcaaagggagcaucucgaa

SEQ ID NO: 829276 - RNA, 19 nt, Homo sapiens
  misc_RNA (1)...(19): siRNA sense strand
guucgacuguugccugaua

SEQ ID NO: 829277 - RNA, 19 nt, Homo sapiens
  misc_RNA (1)...(19): siRNA sense strand
guuacaagaugagauguuu

SEQ ID NO: 829278 - RNA, 19 nt, Homo sapiens
  misc_RNA (1)...(19): siRNA sense strand
gaaacuaccuacucuucgu

SEQ ID NO: 829279 - RNA, 19 nt, Homo sapiens
  misc_RNA (1)...(19): siRNA sense strand
gcccaaauauuaagcaaca

SEQ ID NO: 829280 - RNA, 19 nt, Homo sapiens
  misc_RNA (1)...(19): siRNA sense strand
gaacugauacaugguaaga

SEQ ID NO: 829281 - RNA, 19 nt, Homo sapiens
  misc_RNA (1)...(19): siRNA sense strand
aacaagaacuagaagcuaa

SEQ ID NO: 829282 - RNA, 19 nt, Homo sapiens
  misc_RNA (1)...(19): siRNA sense strand
ucaaucaaccuaaagcuaa

SEQ ID NO: 829283 - RNA, 19 nt, Homo sapiens
  misc_RNA (1)...(19): siRNA sense strand
ucgaugacaugcacaguaa

SEQ ID NO: 829284 - RNA, 19 nt, Homo sapiens
  misc_RNA (1)...(19): siRNA sense strand
ugacaaugcuguacgcaau

SEQ ID NO: 829285 - RNA, 19 nt, Homo sapiens
  misc_RNA (1)...(19): siRNA sense strand
uaaaggaaauagcuguuca

SEQ ID NO: 829286 - RNA, 19 nt, Homo sapiens
  misc_RNA (1)...(19): siRNA sense strand
gccuggaucuuaucuuaaa

SEQ ID NO: 829287 - RNA, 19 nt, Homo sapiens
  misc_RNA (1)...(19): siRNA sense strand
caacuaaagacucaaaugu

SEQ ID NO: 829288 - RNA, 19 nt, Homo sapiens
  misc_RNA (1)...(19): siRNA sense strand
cuagagaaagccaaaguua

SEQ ID NO: 829289 - RNA, 19 nt, Homo sapiens
  misc_RNA (1)...(19): siRNA sense strand
caugaugcauuuaggauau

SEQ ID NO: 829290 - RNA, 19 nt, Homo sapiens
  misc_RNA (1)...(19): siRNA sense strand
gagcaaugaugucguugau

SEQ ID NO: 829291 - RNA, 19 nt, Homo sapiens
  misc_RNA (1)...(19): siRNA sense strand
ugagaagccugcccuccua

SEQ ID NO: 829292 - RNA, 19 nt, Homo sapiens
  misc_RNA (1)...(19): siRNA sense strand
cagcucagguuguauuaga

SEQ ID NO: 829293 - RNA, 19 nt, Homo sapiens
  misc_RNA (1)...(19): siRNA sense strand
ccuggagucuguagaagua

SEQ ID NO: 829294 - RNA, 19 nt, Homo sapiens
  misc_RNA (1)...(19): siRNA sense strand
uuuagaagcuguagaaauc

SEQ ID NO: 829295 - RNA, 19 nt, Homo sapiens
  misc_RNA (1)...(19): siRNA sense strand
ggaaagccuuaagugaauu

SEQ ID NO: 829296 - RNA, 19 nt, Homo sapiens
  misc_RNA (1)...(19): siRNA sense strand
caacacaucugcacugcuu

SEQ ID NO: 829297 - RNA, 19 nt, Homo sapiens
  misc_RNA (1)...(19): siRNA sense strand
agaacuaucugaagacaaa

SEQ ID NO: 829298 - RNA, 19 nt, Homo sapiens
  misc_RNA (1)...(19): siRNA sense strand
gcacaggcaucgagucauc

SEQ ID NO: 829299 - RNA, 19 nt, Homo sapiens
  misc_RNA (1)...(19): siRNA sense strand
gaaaugaggcagagcucua

SEQ ID NO: 829300 - RNA, 19 nt, Homo sapiens
  misc_RNA (1)...(19): siRNA sense strand
ugaggcagcuggagaaguu

SEQ ID NO: 829301 - RNA, 19 nt, Homo sapiens
  misc_RNA (1)...(19): siRNA sense strand
ggaaguggacaccaagaaa

SEQ ID NO: 829302 - RNA, 19 nt, Homo sapiens
  misc_RNA (1)...(19): siRNA sense strand
uacaagccgugguucuuua

SEQ ID NO: 829303 - RNA, 19 nt, Homo sapiens
  misc_RNA (1)...(19): siRNA sense strand
guggagaacuaucugaaga

SEQ ID NO: 829304 - RNA, 19 nt, Homo sapiens
  misc_RNA (1)...(19): siRNA sense strand
gagagggccuggaguacau

SEQ ID NO: 829305 - RNA, 19 nt, Homo sapiens
  misc_RNA (1)...(19): siRNA sense strand
ggaguacauucccuugaga

SEQ ID NO: 829306 - RNA, 19 nt, Homo sapiens
  misc_RNA (1)...(19): siRNA sense strand
uuaagcauguggagaacua

SEQ ID NO: 829307 - RNA, 19 nt, Homo sapiens
  misc_RNA (1)...(19): siRNA sense strand
caucaucccugccaagaag

SEQ ID NO: 829308 - RNA, 19 nt, Homo sapiens
  misc_RNA (1)...(19): siRNA sense strand
ggagaacuaucugaagaca

SEQ ID NO: 829309 - RNA, 19 nt, Homo sapiens
  misc_RNA (1)...(19): siRNA sense strand
gauggugccucccaagauc

SEQ ID NO: 829310 - RNA, 19 nt, Homo sapiens
  misc_RNA (1)...(19): siRNA sense strand
ggaaguacaagaagacaca

SEQ ID NO: 829311 - RNA, 19 nt, Homo sapiens
  misc_RNA (1)...(19): siRNA sense strand
ggaaggagcaggguagcaa

SEQ ID NO: 829312 - RNA, 19 nt, Homo sapiens
  misc_RNA (1)...(19): siRNA sense strand
aggcagagcucuacaucga

SEQ ID NO: 829313 - RNA, 19 nt, Homo sapiens
  misc_RNA (1)...(19): siRNA sense strand
guacaagaagacacacaaa

SEQ ID NO: 829314 - RNA, 19 nt, Homo sapiens
  misc_RNA (1)...(19): siRNA sense strand
acucagaccuguucuaugc

SEQ ID NO: 829315 - RNA, 19 nt, Homo sapiens
  misc_RNA (1)...(19): siRNA sense strand
caagaucucccuccugaag

SEQ ID NO: 829316 - RNA, 19 nt, Homo sapiens
  misc_RNA (1)...(19): siRNA sense strand
caucgacauuggagcauau

SEQ ID NO: 829317 - RNA, 19 nt, Homo sapiens
  misc_RNA (1)...(19): siRNA sense strand
ggacaccaagaaacagauu

SEQ ID NO: 829318 - RNA, 19 nt, Homo sapiens
  misc_RNA (1)...(19): siRNA sense strand
caucuuccgcuaccucuuu

SEQ ID NO: 829319 - RNA, 19 nt, Homo sapiens
  misc_RNA (1)...(19): siRNA sense strand
gaggaguucugggagaugu

SEQ ID NO: 829320 - RNA, 19 nt, Homo sapiens
  misc_RNA (1)...(19): siRNA sense strand
gcaugaggcagcuggagaa

SEQ ID NO: 829321 - RNA, 19 nt, Homo sapiens
  misc_RNA (1)...(19): siRNA sense strand
ccacaaguacggccuguuc

SEQ ID NO: 829322 - RNA, 19 nt, Homo sapiens
  misc_RNA (1)...(19): siRNA sense strand
uggaagggcugcucuacuc

SEQ ID NO: 829323 - RNA, 19 nt, Homo sapiens
  misc_RNA (1)...(19): siRNA sense strand
gaaguggacaccaagaaac

SEQ ID NO: 829324 - RNA, 19 nt, Homo sapiens
  misc_RNA (1)...(19): siRNA sense strand
gaggcuaucugugccaagu

SEQ ID NO: 829325 - RNA, 19 nt, Homo sapiens
  misc_RNA (1)...(19): siRNA sense strand
aaacucagaccuguucuau

SEQ ID NO: 829326 - RNA, 19 nt, Homo sapiens
  misc_RNA (1)...(19): siRNA sense strand
gcgccugggugguguucaa

SEQ ID NO: 829327 - RNA, 19 nt, Homo sapiens
  misc_RNA (1)...(19): siRNA sense strand
cuacaagccgugguucuuu

SEQ ID NO: 829328 - RNA, 19 nt, Homo sapiens
  misc_RNA (1)...(19): siRNA sense strand
guagcaagaccuucaugug

SEQ ID NO: 829329 - RNA, 19 nt, Homo sapiens
  misc_RNA (1)...(19): siRNA sense strand
ggaguucugggagauguuu

SEQ ID NO: 829330 - RNA, 19 nt, Homo sapiens
  misc_RNA (1)...(19): siRNA sense strand
ugauggacauucuggaagu

SEQ ID NO: 829331 - RNA, 19 nt, Homo sapiens
  misc_RNA (1)...(19): siRNA sense strand
gggaggaguucugggagau

SEQ ID NO: 829332 - RNA, 19 nt, Homo sapiens
  misc_RNA (1)...(19): siRNA sense strand
ggauggugccucccaagau

SEQ ID NO: 829333 - RNA, 19 nt, Homo sapiens
  misc_RNA (1)...(19): siRNA sense strand
agaagcaggugcgggaaug

SEQ ID NO: 829334 - RNA, 19 nt, Homo sapiens
  misc_RNA (1)...(19): siRNA sense strand
ucuucgauaucuacuacua

SEQ ID NO: 829335 - RNA, 19 nt, Homo sapiens
  misc_RNA (1)...(19): siRNA sense strand
gggcacaggcaucgaguca

SEQ ID NO: 829336 - RNA, 19 nt, Homo sapiens
  misc_RNA (1)...(19): siRNA sense strand
gauggacauucuggaagug

SEQ ID NO: 829337 - RNA, 19 nt, Homo sapiens
  misc_RNA (1)...(19): siRNA sense strand
uaugccgacugcuacauga

SEQ ID NO: 829338 - RNA, 19 nt, Homo sapiens
  misc_RNA (1)...(19): siRNA sense strand
ggcuaucugugccaaguuc

SEQ ID NO: 829339 - RNA, 19 nt, Homo sapiens
  misc_RNA (1)...(19): siRNA sense strand
gagcugguccuggcugaug

SEQ ID NO: 829340 - RNA, 19 nt, Homo sapiens
  misc_RNA (1)...(19): siRNA sense strand
gcaucaucccugccaagaa

SEQ ID NO: 829341 - RNA, 19 nt, Homo sapiens
  misc_RNA (1)...(19): siRNA sense strand
gucgggaaguacaagaaga

SEQ ID NO: 829342 - RNA, 19 nt, Homo sapiens
  misc_RNA (1)...(19): siRNA sense strand
gggagccgcgugugaaaca

SEQ ID NO: 829343 - RNA, 19 nt, Homo sapiens
  misc_RNA (1)...(19): siRNA sense strand
acaucgacauuggagcaua

SEQ ID NO: 829344 - RNA, 19 nt, Homo sapiens
  misc_RNA (1)...(19): siRNA sense strand
agucaucaucccacaagua

SEQ ID NO: 829345 - RNA, 19 nt, Homo sapiens
  misc_RNA (1)...(19): siRNA sense strand
uggaguacauucccuugag

SEQ ID NO: 829346 - RNA, 19 nt, Homo sapiens
  misc_RNA (1)...(19): siRNA sense strand
uacauucccuugagacacu

SEQ ID NO: 829347 - RNA, 19 nt, Homo sapiens
  misc_RNA (1)...(19): siRNA sense strand
caaguacggccuguuccaa

SEQ ID NO: 829348 - RNA, 19 nt, Homo sapiens
  misc_RNA (1)...(19): siRNA sense strand
gguagcaagaccuucaugu

SEQ ID NO: 829349 - RNA, 19 nt, Homo sapiens
  misc_RNA (1)...(19): siRNA sense strand
ucuuuaagcauguggagaa

SEQ ID NO: 829350 - RNA, 19 nt, Homo sapiens
  misc_RNA (1)...(19): siRNA sense strand
acaagccgugguucuuuaa

SEQ ID NO: 829351 - RNA, 19 nt, Homo sapiens
  misc_RNA (1)...(19): siRNA sense strand
cuggcucacugucucacua

SEQ ID NO: 829352 - RNA, 19 nt, Homo sapiens
  misc_RNA (1)...(19): siRNA sense strand
gcuuccagaugcuguaugc

SEQ ID NO: 829353 - RNA, 19 nt, Homo sapiens
  misc_RNA (1)...(19): siRNA sense strand
aaaacgacauccacgucua

SEQ ID NO: 829354 - RNA, 19 nt, Homo sapiens
  misc_RNA (1)...(19): siRNA sense strand
gcccugcacaccuuccaaa

SEQ ID NO: 829355 - RNA, 19 nt, Homo sapiens
  misc_RNA (1)...(19): siRNA sense strand
caaagagccucaacagaua

SEQ ID NO: 829356 - RNA, 19 nt, Homo sapiens
  misc_RNA (1)...(19): siRNA sense strand
gaacaacacaucucucaua

SEQ ID NO: 829357 - RNA, 19 nt, Homo sapiens
  misc_RNA (1)...(19): siRNA sense strand
ggaugaaguuacagaauua

SEQ ID NO: 829358 - RNA, 19 nt, Homo sapiens
  misc_RNA (1)...(19): siRNA sense strand
gaaaguacuugaaaugaga

SEQ ID NO: 829359 - RNA, 19 nt, Homo sapiens
  misc_RNA (1)...(19): siRNA sense strand
aaacagauguguaccuuaa

SEQ ID NO: 829360 - RNA, 19 nt, Homo sapiens
  misc_RNA (1)...(19): siRNA sense strand
gaacagaggcuugaagaaa

SEQ ID NO: 829361 - RNA, 19 nt, Homo sapiens
  misc_RNA (1)...(19): siRNA sense strand
caauguaguugucaaagua

SEQ ID NO: 829362 - RNA, 19 nt, Homo sapiens
  misc_RNA (1)...(19): siRNA sense strand
gcaaagagccucaacagau

SEQ ID NO: 829363 - RNA, 19 nt, Homo sapiens
  misc_RNA (1)...(19): siRNA sense strand
ucaagagccuguacuuuaa

SEQ ID NO: 829364 - RNA, 19 nt, Homo sapiens
  misc_RNA (1)...(19): siRNA sense strand
gaugaagacuuacaagaug

SEQ ID NO: 829365 - RNA, 19 nt, Homo sapiens
  misc_RNA (1)...(19): siRNA sense strand
gguaaaguguacauugaua

SEQ ID NO: 829366 - RNA, 19 nt, Homo sapiens
  misc_RNA (1)...(19): siRNA sense strand
gauguucacuucaguaaga

SEQ ID NO: 829367 - RNA, 19 nt, Homo sapiens
  misc_RNA (1)...(19): siRNA sense strand
gcagaaaucagacaagaaa

SEQ ID NO: 829368 - RNA, 19 nt, Homo sapiens
  misc_RNA (1)...(19): siRNA sense strand
aguaaucucuugccauuua

SEQ ID NO: 829369 - RNA, 19 nt, Homo sapiens
  misc_RNA (1)...(19): siRNA sense strand
caacacaucucucauaugc

SEQ ID NO: 829370 - RNA, 19 nt, Homo sapiens
  misc_RNA (1)...(19): siRNA sense strand
caggaugguuuccaauuua

SEQ ID NO: 829371 - RNA, 19 nt, Homo sapiens
  misc_RNA (1)...(19): siRNA sense strand
ggaaugcuguugucuccua

SEQ ID NO: 829372 - RNA, 19 nt, Homo sapiens
  misc_RNA (1)...(19): siRNA sense strand
guagaccucuucaaugauu

SEQ ID NO: 829373 - RNA, 19 nt, Homo sapiens
  misc_RNA (1)...(19): siRNA sense strand
gcuguugucuccuacauaa

SEQ ID NO: 829374 - RNA, 19 nt, Homo sapiens
  misc_RNA (1)...(19): siRNA sense strand
gaacuuuaaugaucucugu

SEQ ID NO: 829375 - RNA, 19 nt, Homo sapiens
  misc_RNA (1)...(19): siRNA sense strand
cagcucaucucacauauug

SEQ ID NO: 829376 - RNA, 19 nt, Homo sapiens
  misc_RNA (1)...(19): siRNA sense strand
cuauagagcugugauaauu

SEQ ID NO: 829377 - RNA, 19 nt, Homo sapiens
  misc_RNA (1)...(19): siRNA sense strand
gauguucuguuuacaacua

SEQ ID NO: 829378 - RNA, 19 nt, Homo sapiens
  misc_RNA (1)...(19): siRNA sense strand
gaagaucccaaucccaaua

SEQ ID NO: 829379 - RNA, 19 nt, Homo sapiens
  misc_RNA (1)...(19): siRNA sense strand
ggaaaucaauguaguuguc

SEQ ID NO: 829380 - RNA, 19 nt, Homo sapiens
  misc_RNA (1)...(19): siRNA sense strand
ccaaagaaaugaaggagau

SEQ ID NO: 829381 - RNA, 19 nt, Homo sapiens
  misc_RNA (1)...(19): siRNA sense strand
ucuaagaucucaaucagaa

SEQ ID NO: 829382 - RNA, 19 nt, Homo sapiens
  misc_RNA (1)...(19): siRNA sense strand
gguggaugaugaagacuua

SEQ ID NO: 829383 - RNA, 19 nt, Homo sapiens
  misc_RNA (1)...(19): siRNA sense strand
gcaagguuaugucgcuuaa

SEQ ID NO: 829384 - RNA, 19 nt, Homo sapiens
  misc_RNA (1)...(19): siRNA sense strand
gaagaggucugcauuuuau

SEQ ID NO: 829385 - RNA, 19 nt, Homo sapiens
  misc_RNA (1)...(19): siRNA sense strand
gcucaagacuucuaagauc

SEQ ID NO: 829386 - RNA, 19 nt, Homo sapiens
  misc_RNA (1)...(19): siRNA sense strand
ucaguaaucucuugccauu

SEQ ID NO: 829387 - RNA, 19 nt, Homo sapiens
  misc_RNA (1)...(19): siRNA sense strand
ucacaguucuugaccauga

SEQ ID NO: 829388 - RNA, 19 nt, Homo sapiens
  misc_RNA (1)...(19): siRNA sense strand
ugacacagaugccauggaa

SEQ ID NO: 829389 - RNA, 19 nt, Homo sapiens
  misc_RNA (1)...(19): siRNA sense strand
ggacuaagaauucagauca

SEQ ID NO: 829390 - RNA, 19 nt, Homo sapiens
  misc_RNA (1)...(19): siRNA sense strand
caaaguagaccucuucaau

SEQ ID NO: 829391 - RNA, 19 nt, Homo sapiens
  misc_RNA (1)...(19): siRNA sense strand
gaagauuggcuugaaagua

SEQ ID NO: 829392 - RNA, 19 nt, Homo sapiens
  misc_RNA (1)...(19): siRNA sense strand
gacagagacucauuucguu

SEQ ID NO: 829393 - RNA, 19 nt, Homo sapiens
  misc_RNA (1)...(19): siRNA sense strand
gccugaagaugaauuaauu

SEQ ID NO: 829394 - RNA, 19 nt, Homo sapiens
  misc_RNA (1)...(19): siRNA sense strand
aaguagaccucuucaauga

SEQ ID NO: 829395 - RNA, 19 nt, Homo sapiens
  misc_RNA (1)...(19): siRNA sense strand
gauguccauucucuacuua

SEQ ID NO: 829396 - RNA, 19 nt, Homo sapiens
  misc_RNA (1)...(19): siRNA sense strand
gagaggaaaugcaguugug

SEQ ID NO: 829397 - RNA, 19 nt, Homo sapiens
  misc_RNA (1)...(19): siRNA sense strand
gcacaacgucuauuccaaa

SEQ ID NO: 829398 - RNA, 19 nt, Homo sapiens
  misc_RNA (1)...(19): siRNA sense strand
ucaggaugguuuccaauuu

SEQ ID NO: 829399 - RNA, 19 nt, Homo sapiens
  misc_RNA (1)...(19): siRNA sense strand
uaauuggaccucugaaaua

SEQ ID NO: 829400 - RNA, 19 nt, Homo sapiens
  misc_RNA (1)...(19): siRNA sense strand
aaucaauccuccagagaua

SEQ ID NO: 829401 - RNA, 19 nt, Homo sapiens
  misc_RNA (1)...(19): siRNA sense strand
caggugagcugcagaggaa

SEQ ID NO: 829402 - RNA, 19 nt, Homo sapiens
  misc_RNA (1)...(19): siRNA sense strand
cuuacaagaugaaccuuua

SEQ ID NO: 829403 - RNA, 19 nt, Homo sapiens
  misc_RNA (1)...(19): siRNA sense strand
gaggaagauuggcuugaaa

SEQ ID NO: 829404 - RNA, 19 nt, Homo sapiens
  misc_RNA (1)...(19): siRNA sense strand
uagaagaacuuguggucaa

SEQ ID NO: 829405 - RNA, 19 nt, Homo sapiens
  misc_RNA (1)...(19): siRNA sense strand
gagcucauguugcugcauu

SEQ ID NO: 829406 - RNA, 19 nt, Homo sapiens
  misc_RNA (1)...(19): siRNA sense strand
ggagauugaugacacagau

SEQ ID NO: 829407 - RNA, 19 nt, Homo sapiens
  misc_RNA (1)...(19): siRNA sense strand
ggaaaagguugucuuauuc

SEQ ID NO: 829408 - RNA, 19 nt, Homo sapiens
  misc_RNA (1)...(19): siRNA sense strand
caaugaagacccagaauau

SEQ ID NO: 829409 - RNA, 19 nt, Homo sapiens
  misc_RNA (1)...(19): siRNA sense strand
cggaugaaguuacagaauu

SEQ ID NO: 829410 - RNA, 19 nt, Homo sapiens
  misc_RNA (1)...(19): siRNA sense strand
gcacagugucuuauaaaug

SEQ ID NO: 829411 - RNA, 19 nt, Homo sapiens
  misc_RNA (1)...(19): siRNA sense strand
cguguacucuggauaaauu

SEQ ID NO: 829412 - RNA, 19 nt, Homo sapiens
  misc_RNA (1)...(19): siRNA sense strand
cacagugucuuauaaaugu

SEQ ID NO: 829413 - RNA, 19 nt, Homo sapiens
  misc_RNA (1)...(19): siRNA sense strand
cagauucacuuccuucuca

SEQ ID NO: 829414 - RNA, 19 nt, Homo sapiens
  misc_RNA (1)...(19): siRNA sense strand
cagggaagcugaaggugaa

SEQ ID NO: 829415 - RNA, 19 nt, Homo sapiens
  misc_RNA (1)...(19): siRNA sense strand
aaauacagauguucacuuc

SEQ ID NO: 829416 - RNA, 19 nt, Homo sapiens
  misc_RNA (1)...(19): siRNA sense strand
gaauuagaccuuucacaug

SEQ ID NO: 829417 - RNA, 19 nt, Homo sapiens
  misc_RNA (1)...(19): siRNA sense strand
ugacacagauuugaguuug

SEQ ID NO: 829418 - RNA, 19 nt, Homo sapiens
  misc_RNA (1)...(19): siRNA sense strand
gggcagaaaucagacaaga

SEQ ID NO: 829419 - RNA, 19 nt, Homo sapiens
  misc_RNA (1)...(19): siRNA sense strand
gaugaaccuuuacagauca

SEQ ID NO: 829420 - RNA, 19 nt, Homo sapiens
  misc_RNA (1)...(19): siRNA sense strand
cuaaagccaugacaguuga

SEQ ID NO: 829421 - RNA, 19 nt, Homo sapiens
  misc_RNA (1)...(19): siRNA sense strand
uaaucaagcucucaauaag

SEQ ID NO: 829422 - RNA, 19 nt, Homo sapiens
  misc_RNA (1)...(19): siRNA sense strand
cuauagaccucccaacaga

SEQ ID NO: 829423 - RNA, 19 nt, Homo sapiens
  misc_RNA (1)...(19): siRNA sense strand
gaacugaauaugccauuuc

SEQ ID NO: 829424 - RNA, 19 nt, Homo sapiens
  misc_RNA (1)...(19): siRNA sense strand
cucaagagccuguacuuua

SEQ ID NO: 829425 - RNA, 19 nt, Homo sapiens
  misc_RNA (1)...(19): siRNA sense strand
gaucacaguucuugaccau

SEQ ID NO: 829426 - RNA, 19 nt, Homo sapiens
  misc_RNA (1)...(19): siRNA sense strand
cuaaucaagcucucaauaa

SEQ ID NO: 829427 - RNA, 19 nt, Homo sapiens
  misc_RNA (1)...(19): siRNA sense strand
ucagaaagcucggaugaag

SEQ ID NO: 829428 - RNA, 19 nt, Homo sapiens
  misc_RNA (1)...(19): siRNA sense strand
gaaaucaauccuccagaga

SEQ ID NO: 829429 - RNA, 19 nt, Homo sapiens
  misc_RNA (1)...(19): siRNA sense strand
aggaaugaaugcuuuguuu

SEQ ID NO: 829430 - RNA, 19 nt, Homo sapiens
  misc_RNA (1)...(19): siRNA sense strand
caacagaugcaacaguuau

SEQ ID NO: 829431 - RNA, 19 nt, Homo sapiens
  misc_RNA (1)...(19): siRNA sense strand
caucucacauauugcuaua

SEQ ID NO: 829432 - RNA, 19 nt, Homo sapiens
  misc_RNA (1)...(19): siRNA sense strand
ucaaugaagacccagaaua

SEQ ID NO: 829433 - RNA, 19 nt, Homo sapiens
  misc_RNA (1)...(19): siRNA sense strand
gaugacaccucuuucuuuu

SEQ ID NO: 829434 - RNA, 19 nt, Homo sapiens
  misc_RNA (1)...(19): siRNA sense strand
gaagauguccauucucuac

SEQ ID NO: 829435 - RNA, 19 nt, Homo sapiens
  misc_RNA (1)...(19): siRNA sense strand
caacuagcaucugugaaga

SEQ ID NO: 829436 - RNA, 19 nt, Homo sapiens
  misc_RNA (1)...(19): siRNA sense strand
ggagggcgagucuggguua

SEQ ID NO: 829437 - RNA, 19 nt, Homo sapiens
  misc_RNA (1)...(19): siRNA sense strand
ugaaucaacuagcaucugu

SEQ ID NO: 829438 - RNA, 19 nt, Homo sapiens
  misc_RNA (1)...(19): siRNA sense strand
gaaauacagauguucacuu

SEQ ID NO: 829439 - RNA, 19 nt, Homo sapiens
  misc_RNA (1)...(19): siRNA sense strand
caagaugaaccuuuacaga

SEQ ID NO: 829440 - RNA, 19 nt, Homo sapiens
  misc_RNA (1)...(19): siRNA sense strand
ggaaugaaugcuuuguuug

SEQ ID NO: 829441 - RNA, 19 nt, Homo sapiens
  misc_RNA (1)...(19): siRNA sense strand
caggcacagugucuuauaa

SEQ ID NO: 829442 - RNA, 19 nt, Homo sapiens
  misc_RNA (1)...(19): siRNA sense strand
gcuaaagccaugacaguug

SEQ ID NO: 829443 - RNA, 19 nt, Homo sapiens
  misc_RNA (1)...(19): siRNA sense strand
cggagugguuuaaauuuga

SEQ ID NO: 829444 - RNA, 19 nt, Homo sapiens
  misc_RNA (1)...(19): siRNA sense strand
aggcaacgcucaagacuuc

SEQ ID NO: 829445 - RNA, 19 nt, Homo sapiens
  misc_RNA (1)...(19): siRNA sense strand
gaaggaggagucagugguu

SEQ ID NO: 829446 - RNA, 19 nt, Homo sapiens
  misc_RNA (1)...(19): siRNA sense strand
aagauuggcuugaaaguac

SEQ ID NO: 829447 - RNA, 19 nt, Homo sapiens
  misc_RNA (1)...(19): siRNA sense strand
ucauggauuuguagaagaa

SEQ ID NO: 829448 - RNA, 19 nt, Homo sapiens
  misc_RNA (1)...(19): siRNA sense strand
aauuugagguggaugauga

SEQ ID NO: 829449 - RNA, 19 nt, Homo sapiens
  misc_RNA (1)...(19): siRNA sense strand
caguaucucugccugaaga

SEQ ID NO: 829450 - RNA, 19 nt, Homo sapiens
  misc_RNA (1)...(19): siRNA sense strand
gagccuguacuuuaaacua

SEQ ID NO: 829451 - RNA, 19 nt, Homo sapiens
  misc_RNA (1)...(19): siRNA sense strand
uaaauaauuggaccucuga

SEQ ID NO: 829452 - RNA, 19 nt, Homo sapiens
  misc_RNA (1)...(19): siRNA sense strand
gaaugaaugcuuuguuugg

SEQ ID NO: 829453 - RNA, 19 nt, Homo sapiens
  misc_RNA (1)...(19): siRNA sense strand
ccacaauccugaugaacca

SEQ ID NO: 829454 - RNA, 19 nt, Homo sapiens
  misc_RNA (1)...(19): siRNA sense strand
ugaaaguacuugaaaugag

SEQ ID NO: 829455 - RNA, 19 nt, Homo sapiens
  misc_RNA (1)...(19): siRNA sense strand
gaaaggagauaggaacauu

SEQ ID NO: 829456 - RNA, 19 nt, Homo sapiens
  misc_RNA (1)...(19): siRNA sense strand
ggagauaggaacauuauaa

SEQ ID NO: 829457 - RNA, 19 nt, Homo sapiens
  misc_RNA (1)...(19): siRNA sense strand
gaacuggcauuauuuccaa

SEQ ID NO: 829458 - RNA, 19 nt, Homo sapiens
  misc_RNA (1)...(19): siRNA sense strand
ggaaggauccggugauauu

SEQ ID NO: 829459 - RNA, 19 nt, Homo sapiens
  misc_RNA (1)...(19): siRNA sense strand
ggauuaacaucaacaguga

SEQ ID NO: 829460 - RNA, 19 nt, Homo sapiens
  misc_RNA (1)...(19): siRNA sense strand
aagcaggccugaaggauua

SEQ ID NO: 829461 - RNA, 19 nt, Homo sapiens
  misc_RNA (1)...(19): siRNA sense strand
ggaagaagaagaagaagaa

SEQ ID NO: 829462 - RNA, 19 nt, Homo sapiens
  misc_RNA (1)...(19): siRNA sense strand
aaagugaucuaaccuugua

SEQ ID NO: 829463 - RNA, 19 nt, Homo sapiens
  misc_RNA (1)...(19): siRNA sense strand
gaaaaguacugggaaauuu

SEQ ID NO: 829464 - RNA, 19 nt, Homo sapiens
  misc_RNA (1)...(19): siRNA sense strand
uaucagagccuguuacauu

SEQ ID NO: 829465 - RNA, 19 nt, Homo sapiens
  misc_RNA (1)...(19): siRNA sense strand
gcuaggagcuguaaaauug

SEQ ID NO: 829466 - RNA, 19 nt, Homo sapiens
  misc_RNA (1)...(19): siRNA sense strand
gaagacauccaacccauug

SEQ ID NO: 829467 - RNA, 19 nt, Homo sapiens
  misc_RNA (1)...(19): siRNA sense strand
ugaggaagaugacauuaga

SEQ ID NO: 829468 - RNA, 19 nt, Homo sapiens
  misc_RNA (1)...(19): siRNA sense strand
gaggagccaucuuccauug

SEQ ID NO: 829469 - RNA, 19 nt, Homo sapiens
  misc_RNA (1)...(19): siRNA sense strand
gaaauuuggugcuuguuuu

SEQ ID NO: 829470 - RNA, 19 nt, Homo sapiens
  misc_RNA (1)...(19): siRNA sense strand
gcagaugauggaccaaaua

SEQ ID NO: 829471 - RNA, 19 nt, Homo sapiens
  misc_RNA (1)...(19): siRNA sense strand
gaagaugacauuagaacug

SEQ ID NO: 829472 - RNA, 19 nt, Homo sapiens
  misc_RNA (1)...(19): siRNA sense strand
ccaggacucuguaagcaaa

SEQ ID NO: 829473 - RNA, 19 nt, Homo sapiens
  misc_RNA (1)...(19): siRNA sense strand
gcaguagcguggaucaguu

SEQ ID NO: 829474 - RNA, 19 nt, Homo sapiens
  misc_RNA (1)...(19): siRNA sense strand
ggaaauuuggugcuuguuu

SEQ ID NO: 829475 - RNA, 19 nt, Homo sapiens
  misc_RNA (1)...(19): siRNA sense strand
ggaguuuacuuccguguag

SEQ ID NO: 829476 - RNA, 19 nt, Homo sapiens
  misc_RNA (1)...(19): siRNA sense strand
caagccacguuuaucuuaa

SEQ ID NO: 829477 - RNA, 19 nt, Homo sapiens
  misc_RNA (1)...(19): siRNA sense strand
auaaacagcuucggagauu

SEQ ID NO: 829478 - RNA, 19 nt, Homo sapiens
  misc_RNA (1)...(19): siRNA sense strand
ggacagcuucugcuacaaa

SEQ ID NO: 829479 - RNA, 19 nt, Homo sapiens
  misc_RNA (1)...(19): siRNA sense strand
gcucaagccagaucaguuu

SEQ ID NO: 829480 - RNA, 19 nt, Homo sapiens
  misc_RNA (1)...(19): siRNA sense strand
gauuugaugucacugguau

SEQ ID NO: 829481 - RNA, 19 nt, Homo sapiens
  misc_RNA (1)...(19): siRNA sense strand
uagaaaagguggcagauaa

SEQ ID NO: 829482 - RNA, 19 nt, Homo sapiens
  misc_RNA (1)...(19): siRNA sense strand
cacaauugcugguuuggaa

SEQ ID NO: 829483 - RNA, 19 nt, Homo sapiens
  misc_RNA (1)...(19): siRNA sense strand
caguggaaguugcagcuua

SEQ ID NO: 829484 - RNA, 19 nt, Homo sapiens
  misc_RNA (1)...(19): siRNA sense strand
gagauggucuggagauguc

SEQ ID NO: 829485 - RNA, 19 nt, Homo sapiens
  misc_RNA (1)...(19): siRNA sense strand
ccaaggagaugacgaccau

SEQ ID NO: 829486 - RNA, 19 nt, Homo sapiens
  misc_RNA (1)...(19): siRNA sense strand
ucaaccagaugaggaagua

SEQ ID NO: 829487 - RNA, 19 nt, Homo sapiens
  misc_RNA (1)...(19): siRNA sense strand
ggagccaucuuccauugug

SEQ ID NO: 829488 - RNA, 19 nt, Homo sapiens
  misc_RNA (1)...(19): siRNA sense strand
cugcugagcugcuuugaug

SEQ ID NO: 829489 - RNA, 19 nt, Homo sapiens
  misc_RNA (1)...(19): siRNA sense strand
caacuuguaucuucauugc

SEQ ID NO: 829490 - RNA, 19 nt, Homo sapiens
  misc_RNA (1)...(19): siRNA sense strand
ucaagccacguuuaucuua

SEQ ID NO: 829491 - RNA, 19 nt, Homo sapiens
  misc_RNA (1)...(19): siRNA sense strand
ccaaauagcacacaguuac

SEQ ID NO: 829492 - RNA, 19 nt, Homo sapiens
  misc_RNA (1)...(19): siRNA sense strand
cagugcagcuuauuucaga

SEQ ID NO: 829493 - RNA, 19 nt, Homo sapiens
  misc_RNA (1)...(19): siRNA sense strand
caggagcccuucucuggaa

SEQ ID NO: 829494 - RNA, 19 nt, Homo sapiens
  misc_RNA (1)...(19): siRNA sense strand
ccagaucaguuugcagaaa

SEQ ID NO: 829495 - RNA, 19 nt, Homo sapiens
  misc_RNA (1)...(19): siRNA sense strand
gugcugaguuggaaugaau

SEQ ID NO: 829496 - RNA, 19 nt, Homo sapiens
  misc_RNA (1)...(19): siRNA sense strand
gagcguggaucgcccuugu

SEQ ID NO: 829497 - RNA, 19 nt, Homo sapiens
  misc_RNA (1)...(19): siRNA sense strand
aaaggaagaagaagaagaa

SEQ ID NO: 829498 - RNA, 19 nt, Homo sapiens
  misc_RNA (1)...(19): siRNA sense strand
cagcuuauuucagacgaua

SEQ ID NO: 829499 - RNA, 19 nt, Homo sapiens
  misc_RNA (1)...(19): siRNA sense strand
gaucacagcccggaacaau

SEQ ID NO: 829500 - RNA, 19 nt, Homo sapiens
  misc_RNA (1)...(19): siRNA sense strand
ucacgggacucggagauga

SEQ ID NO: 829501 - RNA, 19 nt, Homo sapiens
  misc_RNA (1)...(19): siRNA sense strand
cuacuggaaucaugugguu

SEQ ID NO: 829502 - RNA, 19 nt, Homo sapiens
  misc_RNA (1)...(19): siRNA sense strand
cagaaggguuuccgcucua

SEQ ID NO: 829503 - RNA, 19 nt, Homo sapiens
  misc_RNA (1)...(19): siRNA sense strand
ggcaugcugucacugauga

SEQ ID NO: 829504 - RNA, 19 nt, Homo sapiens
  misc_RNA (1)...(19): siRNA sense strand
acaguuacccuuccaagaa

SEQ ID NO: 829505 - RNA, 19 nt, Homo sapiens
  misc_RNA (1)...(19): siRNA sense strand
ggacucagccucucaaucc

SEQ ID NO: 829506 - RNA, 19 nt, Homo sapiens
  misc_RNA (1)...(19): siRNA sense strand
ggugauauugugucuguuu

SEQ ID NO: 829507 - RNA, 19 nt, Homo sapiens
  misc_RNA (1)...(19): siRNA sense strand
gaugauggaccaaauagca

SEQ ID NO: 829508 - RNA, 19 nt, Homo sapiens
  misc_RNA (1)...(19): siRNA sense strand
aagaugacauuagaacuga

SEQ ID NO: 829509 - RNA, 19 nt, Homo sapiens
  misc_RNA (1)...(19): siRNA sense strand
ugucacagcucccuggaau

SEQ ID NO: 829510 - RNA, 19 nt, Homo sapiens
  misc_RNA (1)...(19): siRNA sense strand
ccugaaggauuaacaucaa

SEQ ID NO: 829511 - RNA, 19 nt, Homo sapiens
  misc_RNA (1)...(19): siRNA sense strand
caaagauccagaaggguuu

SEQ ID NO: 829512 - RNA, 19 nt, Homo sapiens
  misc_RNA (1)...(19): siRNA sense strand
cagccuggauaaugauuga

SEQ ID NO: 829513 - RNA, 19 nt, Homo sapiens
  misc_RNA (1)...(19): siRNA sense strand
cggacuaugugguguuuga

SEQ ID NO: 829514 - RNA, 19 nt, Homo sapiens
  misc_RNA (1)...(19): siRNA sense strand
gacacggccuggaucauca

SEQ ID NO: 829515 - RNA, 19 nt, Homo sapiens
  misc_RNA (1)...(19): siRNA sense strand
ucacggcccucgacaccaa

SEQ ID NO: 829516 - RNA, 19 nt, Homo sapiens
  misc_RNA (1)...(19): siRNA sense strand
gaccaaauagcacacaguu

SEQ ID NO: 829517 - RNA, 19 nt, Homo sapiens
  misc_RNA (1)...(19): siRNA sense strand
caagcaggccugaaggauu

SEQ ID NO: 829518 - RNA, 19 nt, Homo sapiens
  misc_RNA (1)...(19): siRNA sense strand
gcacacaguuacccuucca

SEQ ID NO: 829519 - RNA, 19 nt, Homo sapiens
  misc_RNA (1)...(19): siRNA sense strand
uaaacagcuucggagauuu

SEQ ID NO: 829520 - RNA, 19 nt, Homo sapiens
  misc_RNA (1)...(19): siRNA sense strand
gagcaucacggacuaugug

SEQ ID NO: 829521 - RNA, 19 nt, Homo sapiens
  misc_RNA (1)...(19): siRNA sense strand
gcuauggcauccucagcuu

SEQ ID NO: 829522 - RNA, 19 nt, Homo sapiens
  misc_RNA (1)...(19): siRNA sense strand
ggaagacauccaacccauu

SEQ ID NO: 829523 - RNA, 19 nt, Homo sapiens
  misc_RNA (1)...(19): siRNA sense strand
ggaggugucaggaucaaug

SEQ ID NO: 829524 - RNA, 19 nt, Homo sapiens
  misc_RNA (1)...(19): siRNA sense strand
gaacggugucccacaggaa

SEQ ID NO: 829525 - RNA, 19 nt, Homo sapiens
  misc_RNA (1)...(19): siRNA sense strand
uaacaucaacagugagaga

SEQ ID NO: 829526 - RNA, 19 nt, Homo sapiens
  misc_RNA (1)...(19): siRNA sense strand
ggaggagccaucuuccauu

SEQ ID NO: 829527 - RNA, 19 nt, Homo sapiens
  misc_RNA (1)...(19): siRNA sense strand
ccauugugcagcuggauua

SEQ ID NO: 829528 - RNA, 19 nt, Homo sapiens
  misc_RNA (1)...(19): siRNA sense strand
gcaguggaagugugacauu

SEQ ID NO: 829529 - RNA, 19 nt, Homo sapiens
  misc_RNA (1)...(19): siRNA sense strand
ucaguuaagugcagagucu

SEQ ID NO: 829530 - RNA, 19 nt, Homo sapiens
  misc_RNA (1)...(19): siRNA sense strand
gaaggauccggugauauug

SEQ ID NO: 829531 - RNA, 19 nt, Homo sapiens
  misc_RNA (1)...(19): siRNA sense strand
gaguuggaaugaauauagu

SEQ ID NO: 829532 - RNA, 19 nt, Homo sapiens
  misc_RNA (1)...(19): siRNA sense strand
ucacagcccggaacaaugu

SEQ ID NO: 829533 - RNA, 19 nt, Homo sapiens
  misc_RNA (1)...(19): siRNA sense strand
agaagaagaagaagacaga

SEQ ID NO: 829534 - RNA, 19 nt, Homo sapiens
  misc_RNA (1)...(19): siRNA sense strand
gagagauggucuggagaug

SEQ ID NO: 829535 - RNA, 19 nt, Homo sapiens
  misc_RNA (1)...(19): siRNA sense strand
aaacagcuucggagauuug

SEQ ID NO: 829536 - RNA, 19 nt, Homo sapiens
  misc_RNA (1)...(19): siRNA sense strand
gaugacauuagaacugaaa

SEQ ID NO: 829537 - RNA, 19 nt, Homo sapiens
  misc_RNA (1)...(19): siRNA sense strand
gagauaggaacauuauaag

SEQ ID NO: 829538 - RNA, 19 nt, Homo sapiens
  misc_RNA (1)...(19): siRNA sense strand
gggaagacggaaucuauca

SEQ ID NO: 829539 - RNA, 19 nt, Homo sapiens
  misc_RNA (1)...(19): siRNA sense strand
gcuaagggaagucucauag

SEQ ID NO: 829540 - RNA, 19 nt, Homo sapiens
  misc_RNA (1)...(19): siRNA sense strand
uuagaacccgucugcauaa

SEQ ID NO: 829541 - RNA, 19 nt, Homo sapiens
  misc_RNA (1)...(19): siRNA sense strand
gcagaaguuugaagaugcu

SEQ ID NO: 829542 - RNA, 19 nt, Homo sapiens
  misc_RNA (1)...(19): siRNA sense strand
cagaucaguuugcagaaag

SEQ ID NO: 829543 - RNA, 19 nt, Homo sapiens
  misc_RNA (1)...(19): siRNA sense strand
ucagaaagaaauacccauu

SEQ ID NO: 829544 - RNA, 19 nt, Homo sapiens
  misc_RNA (1)...(19): siRNA sense strand
ugaagccuaucaaagugaa

SEQ ID NO: 829545 - RNA, 19 nt, Homo sapiens
  misc_RNA (1)...(19): siRNA sense strand
cgugaagccuaucaaagug

SEQ ID NO: 829546 - RNA, 19 nt, Homo sapiens
  misc_RNA (1)...(19): siRNA sense strand
aaaggagauaggaacauua

SEQ ID NO: 829547 - RNA, 19 nt, Homo sapiens
  misc_RNA (1)...(19): siRNA sense strand
ggccacaauugcugguuug

SEQ ID NO: 829548 - RNA, 19 nt, Homo sapiens
  misc_RNA (1)...(19): siRNA sense strand
uggcagaaguuugaagaug

SEQ ID NO: 829549 - RNA, 19 nt, Homo sapiens
  misc_RNA (1)...(19): siRNA sense strand
gaccagugcagcuuauuuc

SEQ ID NO: 829550 - RNA, 19 nt, Homo sapiens
  misc_RNA (1)...(19): siRNA sense strand
gcuggucucuacucugcaa

SEQ ID NO: 829551 - RNA, 19 nt, Homo sapiens
  misc_RNA (1)...(19): siRNA sense strand
gugggaaagucaccaucaa

SEQ ID NO: 829552 - RNA, 19 nt, Homo sapiens
  misc_RNA (1)...(19): siRNA sense strand
ccggugauauugugucugu

SEQ ID NO: 829553 - RNA, 19 nt, Homo sapiens
  misc_RNA (1)...(19): siRNA sense strand
gauaucagagccuguuaca

SEQ ID NO: 829554 - RNA, 19 nt, Homo sapiens
  misc_RNA (1)...(19): siRNA sense strand
ccacgucgcuaagggaagu

SEQ ID NO: 829555 - RNA, 19 nt, Homo sapiens
  misc_RNA (1)...(19): siRNA sense strand
cgucaaagccuguggauua

SEQ ID NO: 829556 - RNA, 19 nt, Homo sapiens
  misc_RNA (1)...(19): siRNA sense strand
gaaaggauaugagauugga

SEQ ID NO: 829557 - RNA, 19 nt, Homo sapiens
  misc_RNA (1)...(19): siRNA sense strand
ggaacagccucuacuuuca

SEQ ID NO: 829558 - RNA, 19 nt, Homo sapiens
  misc_RNA (1)...(19): siRNA sense strand
caacgugacugucuuugga

SEQ ID NO: 829559 - RNA, 19 nt, Homo sapiens
  misc_RNA (1)...(19): siRNA sense strand
ggauuaaacuucauugacu

SEQ ID NO: 829560 - RNA, 19 nt, Homo sapiens
  misc_RNA (1)...(19): siRNA sense strand
gcacaccaguggaguuugu

SEQ ID NO: 829561 - RNA, 19 nt, Homo sapiens
  misc_RNA (1)...(19): siRNA sense strand
caaguuaauucuggaugua

SEQ ID NO: 829562 - RNA, 19 nt, Homo sapiens
  misc_RNA (1)...(19): siRNA sense strand
gcaaguuaauucuggaugu

SEQ ID NO: 829563 - RNA, 19 nt, Homo sapiens
  misc_RNA (1)...(19): siRNA sense strand
gaacauuggcaaguuaauu

SEQ ID NO: 829564 - RNA, 19 nt, Homo sapiens
  misc_RNA (1)...(19): siRNA sense strand
uaaaucugcucuucaaaca

SEQ ID NO: 829565 - RNA, 19 nt, Homo sapiens
  misc_RNA (1)...(19): siRNA sense strand
ucauggcauuugucaauua

SEQ ID NO: 829566 - RNA, 19 nt, Homo sapiens
  misc_RNA (1)...(19): siRNA sense strand
ugacagaaaugcagacuac

SEQ ID NO: 829567 - RNA, 19 nt, Homo sapiens
  misc_RNA (1)...(19): siRNA sense strand
gaacagccucuacuuucaa

SEQ ID NO: 829568 - RNA, 19 nt, Homo sapiens
  misc_RNA (1)...(19): siRNA sense strand
gagggaacauuggcaaguu

SEQ ID NO: 829569 - RNA, 19 nt, Homo sapiens
  misc_RNA (1)...(19): siRNA sense strand
gaaccuacauuuuauaugg

SEQ ID NO: 829570 - RNA, 19 nt, Homo sapiens
  misc_RNA (1)...(19): siRNA sense strand
gucaaagccuguggauuaa

SEQ ID NO: 829571 - RNA, 19 nt, Homo sapiens
  misc_RNA (1)...(19): siRNA sense strand
aaacuucauugacuugaug

SEQ ID NO: 829572 - RNA, 19 nt, Homo sapiens
  misc_RNA (1)...(19): siRNA sense strand
gggacagcgugaaaggaua

SEQ ID NO: 829573 - RNA, 19 nt, Homo sapiens
  misc_RNA (1)...(19): siRNA sense strand
ggacaacacuggaaaaggu

SEQ ID NO: 829574 - RNA, 19 nt, Homo sapiens
  misc_RNA (1)...(19): siRNA sense strand
gugaaaggauaugagauug

SEQ ID NO: 829575 - RNA, 19 nt, Homo sapiens
  misc_RNA (1)...(19): siRNA sense strand
gaacuucgucacagccuau

SEQ ID NO: 829576 - RNA, 19 nt, Homo sapiens
  misc_RNA (1)...(19): siRNA sense strand
caaagccuguggauuaaac

SEQ ID NO: 829577 - RNA, 19 nt, Homo sapiens
  misc_RNA (1)...(19): siRNA sense strand
uuauauggcucauccaaca

SEQ ID NO: 829578 - RNA, 19 nt, Homo sapiens
  misc_RNA (1)...(19): siRNA sense strand
ugacaacccucccaagacu

SEQ ID NO: 829579 - RNA, 19 nt, Homo sapiens
  misc_RNA (1)...(19): siRNA sense strand
ggacagcgugaaaggauau

SEQ ID NO: 829580 - RNA, 19 nt, Homo sapiens
  misc_RNA (1)...(19): siRNA sense strand
gaggagacggagcaaauga

SEQ ID NO: 829581 - RNA, 19 nt, Homo sapiens
  misc_RNA (1)...(19): siRNA sense strand
aagaaucucugcugaaggu

SEQ ID NO: 829582 - RNA, 19 nt, Homo sapiens
  misc_RNA (1)...(19): siRNA sense strand
gcaaucaaagacucuguga

SEQ ID NO: 829583 - RNA, 19 nt, Homo sapiens
  misc_RNA (1)...(19): siRNA sense strand
ccuaugugaugcuguuuga

SEQ ID NO: 829584 - RNA, 19 nt, Homo sapiens
  misc_RNA (1)...(19): siRNA sense strand
ucauagggcucuacaacca

SEQ ID NO: 829585 - RNA, 19 nt, Homo sapiens
  misc_RNA (1)...(19): siRNA sense strand
gcaagaaguuaaaagaauc

SEQ ID NO: 829586 - RNA, 19 nt, Homo sapiens
  misc_RNA (1)...(19): siRNA sense strand
agggaacauuggcaaguua

SEQ ID NO: 829587 - RNA, 19 nt, Homo sapiens
  misc_RNA (1)...(19): siRNA sense strand
cgugaaaggauaugagauu

SEQ ID NO: 829588 - RNA, 19 nt, Homo sapiens
  misc_RNA (1)...(19): siRNA sense strand
gaagguguggacaucguuu

SEQ ID NO: 829589 - RNA, 19 nt, Homo sapiens
  misc_RNA (1)...(19): siRNA sense strand
gacaagggaauauugacaa

SEQ ID NO: 829590 - RNA, 19 nt, Homo sapiens
  misc_RNA (1)...(19): siRNA sense strand
aaucugcucuucaaacaag

SEQ ID NO: 829591 - RNA, 19 nt, Homo sapiens
  misc_RNA (1)...(19): siRNA sense strand
ccucuacuuucaagcauga

SEQ ID NO: 829592 - RNA, 19 nt, Homo sapiens
  misc_RNA (1)...(19): siRNA sense strand
gauuggagaccgugucaug

SEQ ID NO: 829593 - RNA, 19 nt, Homo sapiens
  misc_RNA (1)...(19): siRNA sense strand
cggagcaaaugaucgagaa

SEQ ID NO: 829594 - RNA, 19 nt, Homo sapiens
  misc_RNA (1)...(19): siRNA sense strand
gagaccgugucauggcauu

SEQ ID NO: 829595 - RNA, 19 nt, Homo sapiens
  misc_RNA (1)...(19): siRNA sense strand
ucaacaagcugcggcucuu

SEQ ID NO: 829596 - RNA, 19 nt, Homo sapiens
  misc_RNA (1)...(19): siRNA sense strand
gaaaaggucucagucuucu

SEQ ID NO: 829597 - RNA, 19 nt, Homo sapiens
  misc_RNA (1)...(19): siRNA sense strand
gugaugcuguuugaaguug

SEQ ID NO: 829598 - RNA, 19 nt, Homo sapiens
  misc_RNA (1)...(19): siRNA sense strand
ggacggcgagcucaagauc

SEQ ID NO: 829599 - RNA, 19 nt, Homo sapiens
  misc_RNA (1)...(19): siRNA sense strand
gcucaagauccgcgucaaa

SEQ ID NO: 829600 - RNA, 19 nt, Homo sapiens
  misc_RNA (1)...(19): siRNA sense strand
ccaccucuuugacagaaau

SEQ ID NO: 829601 - RNA, 19 nt, Homo sapiens
  misc_RNA (1)...(19): siRNA sense strand
cagacuacgugcaagaagu

SEQ ID NO: 829602 - RNA, 19 nt, Homo sapiens
  misc_RNA (1)...(19): siRNA sense strand
gguggcagguggagaaggu

SEQ ID NO: 829603 - RNA, 19 nt, Homo sapiens
  misc_RNA (1)...(19): siRNA sense strand
gggaacauuggcaaguuaa

SEQ ID NO: 829604 - RNA, 19 nt, Homo sapiens
  misc_RNA (1)...(19): siRNA sense strand
ccaaggaaggcguggagaa

SEQ ID NO: 829605 - RNA, 19 nt, Homo sapiens
  misc_RNA (1)...(19): siRNA sense strand
ggaggagacggagcaaaug

SEQ ID NO: 829606 - RNA, 19 nt, Homo sapiens
  misc_RNA (1)...(19): siRNA sense strand
ggagacggagcaaaugauc

SEQ ID NO: 829607 - RNA, 19 nt, Homo sapiens
  misc_RNA (1)...(19): siRNA sense strand
uggaacagccucuacuuuc

SEQ ID NO: 829608 - RNA, 19 nt, Homo sapiens
  misc_RNA (1)...(19): siRNA sense strand
ugucauggcauuugucaau

SEQ ID NO: 829609 - RNA, 19 nt, Homo sapiens
  misc_RNA (1)...(19): siRNA sense strand
ggagagaccaagagcuucu

SEQ ID NO: 829610 - RNA, 19 nt, Homo sapiens
  misc_RNA (1)...(19): siRNA sense strand
gccaaugacagcacagaga

SEQ ID NO: 829611 - RNA, 19 nt, Homo sapiens
  misc_RNA (1)...(19): siRNA sense strand
gcaugaagcaaucaaagac

SEQ ID NO: 829612 - RNA, 19 nt, Homo sapiens
  misc_RNA (1)...(19): siRNA sense strand
gaugcccuuuauccaguaa

SEQ ID NO: 829613 - RNA, 19 nt, Homo sapiens
  misc_RNA (1)...(19): siRNA sense strand
cgacaagggaauauugaca

SEQ ID NO: 829614 - RNA, 19 nt, Homo sapiens
  misc_RNA (1)...(19): siRNA sense strand
ggaaaaggucucagucuuc

SEQ ID NO: 829615 - RNA, 19 nt, Homo sapiens
  misc_RNA (1)...(19): siRNA sense strand
gucauggcauuugucaauu

SEQ ID NO: 829616 - RNA, 19 nt, Homo sapiens
  misc_RNA (1)...(19): siRNA sense strand
gagauuggagaccguguca

SEQ ID NO: 829617 - RNA, 19 nt, Homo sapiens
  misc_RNA (1)...(19): siRNA sense strand
cuacgugcaagaaguuaaa

SEQ ID NO: 829618 - RNA, 19 nt, Homo sapiens
  misc_RNA (1)...(19): siRNA sense strand
gccuguggauuaaacuuca

SEQ ID NO: 829619 - RNA, 19 nt, Homo sapiens
  misc_RNA (1)...(19): siRNA sense strand
cggaggagacggagcaaau

SEQ ID NO: 829620 - RNA, 19 nt, Homo sapiens
  misc_RNA (1)...(19): siRNA sense strand
ccacugauggccaaugaca

SEQ ID NO: 829621 - RNA, 19 nt, Homo sapiens
  misc_RNA (1)...(19): siRNA sense strand
gugcgacaagggaauauug

SEQ ID NO: 829622 - RNA, 19 nt, Homo sapiens
  misc_RNA (1)...(19): siRNA sense strand
ccugggaaccuacauuuua

SEQ ID NO: 829623 - RNA, 19 nt, Homo sapiens
  misc_RNA (1)...(19): siRNA sense strand
aaaggucucagucuucuca

SEQ ID NO: 829624 - RNA, 19 nt, Homo sapiens
  misc_RNA (1)...(19): siRNA sense strand
ugaguguucugggauuguu

SEQ ID NO: 829625 - RNA, 19 nt, Homo sapiens
  misc_RNA (1)...(19): siRNA sense strand
caagcaugaagcaaucaaa

SEQ ID NO: 829626 - RNA, 19 nt, Homo sapiens
  misc_RNA (1)...(19): siRNA sense strand
caaggaaggcguggagaag

SEQ ID NO: 829627 - RNA, 19 nt, Homo sapiens
  misc_RNA (1)...(19): siRNA sense strand
ucucggaggcugcugcauu

SEQ ID NO: 829628 - RNA, 19 nt, Homo sapiens
  misc_RNA (1)...(19): siRNA sense strand
caugguggcagguggagaa

SEQ ID NO: 829629 - RNA, 19 nt, Homo sapiens
  misc_RNA (1)...(19): siRNA sense strand
agacuacgugcaagaaguu

SEQ ID NO: 829630 - RNA, 19 nt, Homo sapiens
  misc_RNA (1)...(19): siRNA sense strand
cauggcauuugucaauuac

SEQ ID NO: 829631 - RNA, 19 nt, Homo sapiens
  misc_RNA (1)...(19): siRNA sense strand
uguaugaggagaacaaagu

SEQ ID NO: 829632 - RNA, 19 nt, Homo sapiens
  misc_RNA (1)...(19): siRNA sense strand
uggcucauccaacauggua

SEQ ID NO: 829633 - RNA, 19 nt, Homo sapiens
  misc_RNA (1)...(19): siRNA sense strand
aaaagaaucucugcugaag

SEQ ID NO: 829634 - RNA, 19 nt, Homo sapiens
  misc_RNA (1)...(19): siRNA sense strand
agcaaaugaucgagaagga

SEQ ID NO: 829635 - RNA, 19 nt, Homo sapiens
  misc_RNA (1)...(19): siRNA sense strand
gaccgugucauggcauuug

SEQ ID NO: 829636 - RNA, 19 nt, Homo sapiens
  misc_RNA (1)...(19): siRNA sense strand
aggagcggaugcccuuuau

SEQ ID NO: 829637 - RNA, 19 nt, Homo sapiens
  misc_RNA (1)...(19): siRNA sense strand
cuccacugauggccaauga

SEQ ID NO: 829638 - RNA, 19 nt, Homo sapiens
  misc_RNA (1)...(19): siRNA sense strand
ggaacauuggcaaguuaau

SEQ ID NO: 829639 - RNA, 19 nt, Homo sapiens
  misc_RNA (1)...(19): siRNA sense strand
guaacuggagagaccaaga

SEQ ID NO: 829640 - RNA, 19 nt, Homo sapiens
  misc_RNA (1)...(19): siRNA sense strand
acaagggaauauugacaac

SEQ ID NO: 829641 - RNA, 19 nt, Homo sapiens
  misc_RNA (1)...(19): siRNA sense strand
agacggagcaaaugaucga

SEQ ID NO: 829642 - RNA, 19 nt, Homo sapiens
  misc_RNA (1)...(19): siRNA sense strand
cucggaggcugcugcauuc

SEQ ID NO: 829643 - RNA, 19 nt, Homo sapiens
  misc_RNA (1)...(19): siRNA sense strand
aacauuggcaaguuaauuc

SEQ ID NO: 829644 - RNA, 19 nt, Homo sapiens
  misc_RNA (1)...(19): siRNA sense strand
uaaaagaaucucugcugaa

SEQ ID NO: 829645 - RNA, 19 nt, Homo sapiens
  misc_RNA (1)...(19): siRNA sense strand
gugccaggauuugaguguu

SEQ ID NO: 829646 - RNA, 19 nt, Homo sapiens
  misc_RNA (1)...(19): siRNA sense strand
ugccaggauuugaguguuc

SEQ ID NO: 829647 - RNA, 19 nt, Homo sapiens
  misc_RNA (1)...(19): siRNA sense strand
gcagacuacgugcaagaag

SEQ ID NO: 829648 - RNA, 19 nt, Homo sapiens
  misc_RNA (1)...(19): siRNA sense strand
ggaaagggcucaucaaagc

SEQ ID NO: 829649 - RNA, 19 nt, Homo sapiens
  misc_RNA (1)...(19): siRNA sense strand
ugaaggaucaugccucuaa

SEQ ID NO: 829650 - RNA, 19 nt, Homo sapiens
  misc_RNA (1)...(19): siRNA sense strand
gaagacaacuggaaaagca

SEQ ID NO: 829651 - RNA, 19 nt, Homo sapiens
  misc_RNA (1)...(19): siRNA sense strand
caucaaagcagcaaugaca

SEQ ID NO: 829652 - RNA, 19 nt, Homo sapiens
  misc_RNA (1)...(19): siRNA sense strand
ggugaaacuucgaagacaa

SEQ ID NO: 829653 - RNA, 19 nt, Homo sapiens
  misc_RNA (1)...(19): siRNA sense strand
cagcaugcauucccacuuc

SEQ ID NO: 829654 - RNA, 19 nt, Homo sapiens
  misc_RNA (1)...(19): siRNA sense strand
gagauguuguccggccaua

SEQ ID NO: 829655 - RNA, 19 nt, Homo sapiens
  misc_RNA (1)...(19): siRNA sense strand
ccaagcuucucaucucugu

SEQ ID NO: 829656 - RNA, 19 nt, Homo sapiens
  misc_RNA (1)...(19): siRNA sense strand
ggaccucauuggaagagau

SEQ ID NO: 829657 - RNA, 19 nt, Homo sapiens
  misc_RNA (1)...(19): siRNA sense strand
gaggaaagauaugcaccau

SEQ ID NO: 829658 - RNA, 19 nt, Homo sapiens
  misc_RNA (1)...(19): siRNA sense strand
gaaggaucaugccucuaag

SEQ ID NO: 829659 - RNA, 19 nt, Homo sapiens
  misc_RNA (1)...(19): siRNA sense strand
caagcaagucuuugggaaa

SEQ ID NO: 829660 - RNA, 19 nt, Homo sapiens
  misc_RNA (1)...(19): siRNA sense strand
caagcucacuguucucaac

SEQ ID NO: 829661 - RNA, 19 nt, Homo sapiens
  misc_RNA (1)...(19): siRNA sense strand
gggaaagggcucaucaaag

SEQ ID NO: 829662 - RNA, 19 nt, Homo sapiens
  misc_RNA (1)...(19): siRNA sense strand
aaccugaucuccucuuaca

SEQ ID NO: 829663 - RNA, 19 nt, Homo sapiens
  misc_RNA (1)...(19): siRNA sense strand
gguguuauucgucauguug

SEQ ID NO: 829664 - RNA, 19 nt, Homo sapiens
  misc_RNA (1)...(19): siRNA sense strand
caacuggagcguggauauu

SEQ ID NO: 829665 - RNA, 19 nt, Homo sapiens
  misc_RNA (1)...(19): siRNA sense strand
gcagaggugaaacuucgaa

SEQ ID NO: 829666 - RNA, 19 nt, Homo sapiens
  misc_RNA (1)...(19): siRNA sense strand
gaaagggcucaucaaagca

SEQ ID NO: 829667 - RNA, 19 nt, Homo sapiens
  misc_RNA (1)...(19): siRNA sense strand
gcucaucaaagcagcaaug

SEQ ID NO: 829668 - RNA, 19 nt, Homo sapiens
  misc_RNA (1)...(19): siRNA sense strand
gaccaaggaauggcaguug

SEQ ID NO: 829669 - RNA, 19 nt, Homo sapiens
  misc_RNA (1)...(19): siRNA sense strand
auauuucacuccagaagau

SEQ ID NO: 829670 - RNA, 19 nt, Homo sapiens
  misc_RNA (1)...(19): siRNA sense strand
ugggaaagggcucaucaaa

SEQ ID NO: 829671 - RNA, 19 nt, Homo sapiens
  misc_RNA (1)...(19): siRNA sense strand
ucuuacaccugaugaccaa

SEQ ID NO: 829672 - RNA, 19 nt, Homo sapiens
  misc_RNA (1)...(19): siRNA sense strand
aaaaccugaucuccucuua

SEQ ID NO: 829673 - RNA, 19 nt, Homo sapiens
  misc_RNA (1)...(19): siRNA sense strand
guucucaacagcaugcauu

SEQ ID NO: 829674 - RNA, 19 nt, Homo sapiens
  misc_RNA (1)...(19): siRNA sense strand
gaggugaaacuucgaagac

SEQ ID NO: 829675 - RNA, 19 nt, Homo sapiens
  misc_RNA (1)...(19): siRNA sense strand
uccagaagauaaacacaag

SEQ ID NO: 829676 - RNA, 19 nt, Homo sapiens
  misc_RNA (1)...(19): siRNA sense strand
gacaacgggaccacuggaa

SEQ ID NO: 829677 - RNA, 19 nt, Homo sapiens
  misc_RNA (1)...(19): siRNA sense strand
gcauauuucacuccagaag

SEQ ID NO: 829678 - RNA, 19 nt, Homo sapiens
  misc_RNA (1)...(19): siRNA sense strand
ggccauaccagaccauguc

SEQ ID NO: 829679 - RNA, 19 nt, Homo sapiens
  misc_RNA (1)...(19): siRNA sense strand
caacuggaaaagcauauuu

SEQ ID NO: 829680 - RNA, 19 nt, Homo sapiens
  misc_RNA (1)...(19): siRNA sense strand
uaccagaccauguccaauc

SEQ ID NO: 829681 - RNA, 19 nt, Homo sapiens
  misc_RNA (1)...(19): siRNA sense strand
ggagcagaggugaaacuuc

SEQ ID NO: 829682 - RNA, 19 nt, Homo sapiens
  misc_RNA (1)...(19): siRNA sense strand
uaagucucgaggaaagaua

SEQ ID NO: 829683 - RNA, 19 nt, Homo sapiens
  misc_RNA (1)...(19): siRNA sense strand
cauauuucacuccagaaga

SEQ ID NO: 829684 - RNA, 19 nt, Homo sapiens
  misc_RNA (1)...(19): siRNA sense strand
acaacgggaccacuggaaa

SEQ ID NO: 829685 - RNA, 19 nt, Homo sapiens
  misc_RNA (1)...(19): siRNA sense strand
cuucgaagacaacuggaaa

SEQ ID NO: 829686 - RNA, 19 nt, Homo sapiens
  misc_RNA (1)...(19): siRNA sense strand
ggaauggcaguuggagcuu

SEQ ID NO: 829687 - RNA, 19 nt, Homo sapiens
  misc_RNA (1)...(19): siRNA sense strand
caacgggaccacuggaaaa

SEQ ID NO: 829688 - RNA, 19 nt, Homo sapiens
  misc_RNA (1)...(19): siRNA sense strand
cauaccagaccauguccaa

SEQ ID NO: 829689 - RNA, 19 nt, Homo sapiens
  misc_RNA (1)...(19): siRNA sense strand
ggaucaugccucuaagucu

SEQ ID NO: 829690 - RNA, 19 nt, Homo sapiens
  misc_RNA (1)...(19): siRNA sense strand
ggaaagggcucaucaaagc

SEQ ID NO: 829691 - RNA, 19 nt, Homo sapiens
  misc_RNA (1)...(19): siRNA sense strand
ugaaggaucaugccucuaa

SEQ ID NO: 829692 - RNA, 19 nt, Homo sapiens
  misc_RNA (1)...(19): siRNA sense strand
gaagacaacuggaaaagca

SEQ ID NO: 829693 - RNA, 19 nt, Homo sapiens
  misc_RNA (1)...(19): siRNA sense strand
caucaaagcagcaaugaca

SEQ ID NO: 829694 - RNA, 19 nt, Homo sapiens
  misc_RNA (1)...(19): siRNA sense strand
ggugaaacuucgaagacaa

SEQ ID NO: 829695 - RNA, 19 nt, Homo sapiens
  misc_RNA (1)...(19): siRNA sense strand
cagcaugcauucccacuuc

SEQ ID NO: 829696 - RNA, 19 nt, Homo sapiens
  misc_RNA (1)...(19): siRNA sense strand
gagauguuguccggccaua

SEQ ID NO: 829697 - RNA, 19 nt, Homo sapiens
  misc_RNA (1)...(19): siRNA sense strand
ccaagcuucucaucucugu

SEQ ID NO: 829698 - RNA, 19 nt, Homo sapiens
  misc_RNA (1)...(19): siRNA sense strand
ggaccucauuggaagagau

SEQ ID NO: 829699 - RNA, 19 nt, Homo sapiens
  misc_RNA (1)...(19): siRNA sense strand
gaggaaagauaugcaccau

SEQ ID NO: 829700 - RNA, 19 nt, Homo sapiens
  misc_RNA (1)...(19): siRNA sense strand
gaaggaucaugccucuaag

SEQ ID NO: 829701 - RNA, 19 nt, Homo sapiens
  misc_RNA (1)...(19): siRNA sense strand
caagcaagucuuugggaaa

SEQ ID NO: 829702 - RNA, 19 nt, Homo sapiens
  misc_RNA (1)...(19): siRNA sense strand
caagcucacuguucucaac

SEQ ID NO: 829703 - RNA, 19 nt, Homo sapiens
  misc_RNA (1)...(19): siRNA sense strand
aaccugaucuccucuuaca

SEQ ID NO: 829704 - RNA, 19 nt, Homo sapiens
  misc_RNA (1)...(19): siRNA sense strand
gggaaagggcucaucaaag

SEQ ID NO: 829705 - RNA, 19 nt, Homo sapiens
  misc_RNA (1)...(19): siRNA sense strand
gguguuauucgucauguug

SEQ ID NO: 829706 - RNA, 19 nt, Homo sapiens
  misc_RNA (1)...(19): siRNA sense strand
caacuggagcguggauauu

SEQ ID NO: 829707 - RNA, 19 nt, Homo sapiens
  misc_RNA (1)...(19): siRNA sense strand
gcagaggugaaacuucgaa

SEQ ID NO: 829708 - RNA, 19 nt, Homo sapiens
  misc_RNA (1)...(19): siRNA sense strand
gaaagggcucaucaaagca

SEQ ID NO: 829709 - RNA, 19 nt, Homo sapiens
  misc_RNA (1)...(19): siRNA sense strand
gcucaucaaagcagcaaug

SEQ ID NO: 829710 - RNA, 19 nt, Homo sapiens
  misc_RNA (1)...(19): siRNA sense strand
gaccaaggaauggcaguug

SEQ ID NO: 829711 - RNA, 19 nt, Homo sapiens
  misc_RNA (1)...(19): siRNA sense strand
auauuucacuccagaagau

SEQ ID NO: 829712 - RNA, 19 nt, Homo sapiens
  misc_RNA (1)...(19): siRNA sense strand
ugggaaagggcucaucaaa

SEQ ID NO: 829713 - RNA, 19 nt, Homo sapiens
  misc_RNA (1)...(19): siRNA sense strand
ucuuacaccugaugaccaa

SEQ ID NO: 829714 - RNA, 19 nt, Homo sapiens
  misc_RNA (1)...(19): siRNA sense strand
aaaaccugaucuccucuua

SEQ ID NO: 829715 - RNA, 19 nt, Homo sapiens
  misc_RNA (1)...(19): siRNA sense strand
guucucaacagcaugcauu

SEQ ID NO: 829716 - RNA, 19 nt, Homo sapiens
  misc_RNA (1)...(19): siRNA sense strand
gaggugaaacuucgaagac

SEQ ID NO: 829717 - RNA, 19 nt, Homo sapiens
  misc_RNA (1)...(19): siRNA sense strand
uccagaagauaaacacaag

SEQ ID NO: 829718 - RNA, 19 nt, Homo sapiens
  misc_RNA (1)...(19): siRNA sense strand
gacaacgggaccacuggaa

SEQ ID NO: 829719 - RNA, 19 nt, Homo sapiens
  misc_RNA (1)...(19): siRNA sense strand
gcauauuucacuccagaag

SEQ ID NO: 829720 - RNA, 19 nt, Homo sapiens
  misc_RNA (1)...(19): siRNA sense strand
ggccauaccagaccauguc

SEQ ID NO: 829721 - RNA, 19 nt, Homo sapiens
  misc_RNA (1)...(19): siRNA sense strand
caacuggaaaagcauauuu

SEQ ID NO: 829722 - RNA, 19 nt, Homo sapiens
  misc_RNA (1)...(19): siRNA sense strand
uaccagaccauguccaauc

SEQ ID NO: 829723 - RNA, 19 nt, Homo sapiens
  misc_RNA (1)...(19): siRNA sense strand
ggagcagaggugaaacuuc

SEQ ID NO: 829724 - RNA, 19 nt, Homo sapiens
  misc_RNA (1)...(19): siRNA sense strand
uaagucucgaggaaagaua

SEQ ID NO: 829725 - RNA, 19 nt, Homo sapiens
  misc_RNA (1)...(19): siRNA sense strand
cauauuucacuccagaaga

SEQ ID NO: 829726 - RNA, 19 nt, Homo sapiens
  misc_RNA (1)...(19): siRNA sense strand
uguaugugcgaguaucuuu

SEQ ID NO: 829727 - RNA, 19 nt, Homo sapiens
  misc_RNA (1)...(19): siRNA sense strand
cuucgaagacaacuggaaa

SEQ ID NO: 829728 - RNA, 19 nt, Homo sapiens
  misc_RNA (1)...(19): siRNA sense strand
acaacgggaccacuggaaa

SEQ ID NO: 829729 - RNA, 19 nt, Homo sapiens
  misc_RNA (1)...(19): siRNA sense strand
ggaauggcaguuggagcuu

SEQ ID NO: 829730 - RNA, 19 nt, Homo sapiens
  misc_RNA (1)...(19): siRNA sense strand
caacgggaccacuggaaaa

SEQ ID NO: 829731 - RNA, 19 nt, Homo sapiens
  misc_RNA (1)...(19): siRNA sense strand
cauaccagaccauguccaa

SEQ ID NO: 829732 - RNA, 19 nt, Homo sapiens
  misc_RNA (1)...(19): siRNA sense strand
ggaucaugccucuaagucu

SEQ ID NO: 829733 - RNA, 19 nt, Homo sapiens
  misc_RNA (1)...(19): siRNA sense strand
gagcuuaaaugaagauguc

SEQ ID NO: 829734 - RNA, 19 nt, Homo sapiens
  misc_RNA (1)...(19): siRNA sense strand
gaaucucccuccguaauau

SEQ ID NO: 829735 - RNA, 19 nt, Homo sapiens
  misc_RNA (1)...(19): siRNA sense strand
gaagaaucucccuccguaa

SEQ ID NO: 829736 - RNA, 19 nt, Homo sapiens
  misc_RNA (1)...(19): siRNA sense strand
agaaucucccuccguaaua

SEQ ID NO: 829737 - RNA, 19 nt, Homo sapiens
  misc_RNA (1)...(19): siRNA sense strand
gggaaagccagaaggacaa

SEQ ID NO: 829738 - RNA, 19 nt, Homo sapiens
  misc_RNA (1)...(19): siRNA sense strand
gaaggcaacaaaccucaac

SEQ ID NO: 829739 - RNA, 19 nt, Homo sapiens
  misc_RNA (1)...(19): siRNA sense strand
gaugucagccaggaagaau

SEQ ID NO: 829740 - RNA, 19 nt, Homo sapiens
  misc_RNA (1)...(19): siRNA sense strand
aagaaucucccuccguaau

SEQ ID NO: 829741 - RNA, 19 nt, Homo sapiens
  misc_RNA (1)...(19): siRNA sense strand
ucacaaggaggcaacaaac

SEQ ID NO: 829742 - RNA, 19 nt, Homo sapiens
  misc_RNA (1)...(19): siRNA sense strand
ccacaagaaggcaacaaac

SEQ ID NO: 829743 - RNA, 19 nt, Homo sapiens
  misc_RNA (1)...(19): siRNA sense strand
gcaacaagguggacuccua

SEQ ID NO: 829744 - RNA, 19 nt, Homo sapiens
  misc_RNA (1)...(19): siRNA sense strand
gugcaaggcuggcuucuuu

SEQ ID NO: 829745 - RNA, 19 nt, Homo sapiens
  misc_RNA (1)...(19): siRNA sense strand
gcagggacaugucugauga

SEQ ID NO: 829746 - RNA, 19 nt, Homo sapiens
  misc_RNA (1)...(19): siRNA sense strand
ggaacgagcugcugcacuu

SEQ ID NO: 829747 - RNA, 19 nt, Homo sapiens
  misc_RNA (1)...(19): siRNA sense strand
caacaaggcucuggacaug

SEQ ID NO: 829748 - RNA, 19 nt, Homo sapiens
  misc_RNA (1)...(19): siRNA sense strand
gcgcugcgauggugacuuu

SEQ ID NO: 829749 - RNA, 19 nt, Homo sapiens
  misc_RNA (1)...(19): siRNA sense strand
cugaugagcucaauuguga

SEQ ID NO: 829750 - RNA, 19 nt, Homo sapiens
  misc_RNA (1)...(19): siRNA sense strand
gcacagacaucgcgacacu

SEQ ID NO: 829751 - RNA, 19 nt, Homo sapiens
  misc_RNA (1)...(19): siRNA sense strand
guaacaacaucauccuaga

SEQ ID NO: 829752 - RNA, 19 nt, Homo sapiens
  misc_RNA (1)...(19): siRNA sense strand
gagccuauuuccacgauga

SEQ ID NO: 829753 - RNA, 19 nt, Homo sapiens
  misc_RNA (1)...(19): siRNA sense strand
gcaacaacaucaugcuagu

SEQ ID NO: 829754 - RNA, 19 nt, Homo sapiens
  misc_RNA (1)...(19): siRNA sense strand
gcacaagcguggaggaaac

SEQ ID NO: 829755 - RNA, 19 nt, Homo sapiens
  misc_RNA (1)...(19): siRNA sense strand
gagaccagguugucagugu

SEQ ID NO: 829756 - RNA, 19 nt, Homo sapiens
  misc_RNA (1)...(19): siRNA sense strand
caacacacaccacgagcua

SEQ ID NO: 829757 - RNA, 19 nt, Homo sapiens
  misc_RNA (1)...(19): siRNA sense strand
ccaagugguuguccuuuca

SEQ ID NO: 829758 - RNA, 19 nt, Homo sapiens
  misc_RNA (1)...(19): siRNA sense strand
gcacagccacucuacaugu

SEQ ID NO: 829759 - RNA, 19 nt, Homo sapiens
  misc_RNA (1)...(19): siRNA sense strand
ccacgcagcugcagaucga

SEQ ID NO: 829760 - RNA, 19 nt, Homo sapiens
  misc_RNA (1)...(19): siRNA sense strand
ggacauaugggcucaugga

SEQ ID NO: 829761 - RNA, 19 nt, Homo sapiens
  misc_RNA (1)...(19): siRNA sense strand
ccgcagagguuccauccaa

SEQ ID NO: 829762 - RNA, 19 nt, Homo sapiens
  misc_RNA (1)...(19): siRNA sense strand
gaaggugacacacucauca

SEQ ID NO: 829763 - RNA, 19 nt, Homo sapiens
  misc_RNA (1)...(19): siRNA sense strand
gagcugugaugcccacuuc

SEQ ID NO: 829764 - RNA, 19 nt, Homo sapiens
  misc_RNA (1)...(19): siRNA sense strand
gggagacccuggaucugaa

SEQ ID NO: 829765 - RNA, 19 nt, Homo sapiens
  misc_RNA (1)...(19): siRNA sense strand
ccacggaucaggcccagua

SEQ ID NO: 829766 - RNA, 19 nt, Homo sapiens
  misc_RNA (1)...(19): siRNA sense strand
gagcugacgucaccuucau

SEQ ID NO: 829767 - RNA, 19 nt, Homo sapiens
  misc_RNA (1)...(19): siRNA sense strand
guacccagcuccguugguu

SEQ ID NO: 829768 - RNA, 19 nt, Homo sapiens
  misc_RNA (1)...(19): siRNA sense strand
ggacauagagaccgucaca

SEQ ID NO: 829769 - RNA, 19 nt, Homo sapiens
  misc_RNA (1)...(19): siRNA sense strand
auucguaccuuucugauga

SEQ ID NO: 829770 - RNA, 19 nt, Homo sapiens
  misc_RNA (1)...(19): siRNA sense strand
gggcucagauucaggagau

SEQ ID NO: 829771 - RNA, 19 nt, Homo sapiens
  misc_RNA (1)...(19): siRNA sense strand
uccgagcccuggugaauuu

SEQ ID NO: 829772 - RNA, 19 nt, Homo sapiens
  misc_RNA (1)...(19): siRNA sense strand
ggaguuccgcuaugaguug

SEQ ID NO: 829773 - RNA, 19 nt, Homo sapiens
  misc_RNA (1)...(19): siRNA sense strand
gcagauuucaucagcuaaa

SEQ ID NO: 829774 - RNA, 19 nt, Homo sapiens
  misc_RNA (1)...(19): siRNA sense strand
ugaaugcaauggccacuca

SEQ ID NO: 829775 - RNA, 19 nt, Homo sapiens
  misc_RNA (1)...(19): siRNA sense strand
gaugcaggcuccagagagu

SEQ ID NO: 829776 - RNA, 19 nt, Homo sapiens
  misc_RNA (1)...(19): siRNA sense strand
gagagcagcagcuaugugu

SEQ ID NO: 829777 - RNA, 19 nt, Homo sapiens
  misc_RNA (1)...(19): siRNA sense strand
caucgaagccucugucauc

SEQ ID NO: 829778 - RNA, 19 nt, Homo sapiens
  misc_RNA (1)...(19): siRNA sense strand
ggacggcagcgaugagcua

SEQ ID NO: 829779 - RNA, 19 nt, Homo sapiens
  misc_RNA (1)...(19): siRNA sense strand
ugaggagccuggucacuuc

SEQ ID NO: 829780 - RNA, 19 nt, Homo sapiens
  misc_RNA (1)...(19): siRNA sense strand
ggcaaacacucgaccucaa

SEQ ID NO: 829781 - RNA, 19 nt, Homo sapiens
  misc_RNA (1)...(19): siRNA sense strand
cagagcugcuggucacuga

SEQ ID NO: 829782 - RNA, 19 nt, Homo sapiens
  misc_RNA (1)...(19): siRNA sense strand
ccgaugggaugcugcugua

SEQ ID NO: 829783 - RNA, 19 nt, Homo sapiens
  misc_RNA (1)...(19): siRNA sense strand
cagagcgucucaacaagga

SEQ ID NO: 829784 - RNA, 19 nt, Homo sapiens
  misc_RNA (1)...(19): siRNA sense strand
ggaugcugcuguacaaugg

SEQ ID NO: 829785 - RNA, 19 nt, Homo sapiens
  misc_RNA (1)...(19): siRNA sense strand
gaacugaugaagccaacug

SEQ ID NO: 829786 - RNA, 19 nt, Homo sapiens
  misc_RNA (1)...(19): siRNA sense strand
ggacauggcauagcagagu

SEQ ID NO: 829787 - RNA, 19 nt, Homo sapiens
  misc_RNA (1)...(19): siRNA sense strand
gcgaggagaucgucuucca

SEQ ID NO: 829788 - RNA, 19 nt, Homo sapiens
  misc_RNA (1)...(19): siRNA sense strand
gcacuaggcacagcacaga

SEQ ID NO: 829789 - RNA, 19 nt, Homo sapiens
  misc_RNA (1)...(19): siRNA sense strand
ggacacauucguaccuuuc

SEQ ID NO: 829790 - RNA, 19 nt, Homo sapiens
  misc_RNA (1)...(19): siRNA sense strand
caagcaagcccaucacagu

SEQ ID NO: 829791 - RNA, 19 nt, Homo sapiens
  misc_RNA (1)...(19): siRNA sense strand
ggugggaaguugcgauaca

SEQ ID NO: 829792 - RNA, 19 nt, Homo sapiens
  misc_RNA (1)...(19): siRNA sense strand
gugucgagauggaaucaaa

SEQ ID NO: 829793 - RNA, 19 nt, Homo sapiens
  misc_RNA (1)...(19): siRNA sense strand
ggaccucaccuacaguuuc

SEQ ID NO: 829794 - RNA, 19 nt, Homo sapiens
  misc_RNA (1)...(19): siRNA sense strand
cugcagauuucaucagcua

SEQ ID NO: 829795 - RNA, 19 nt, Homo sapiens
  misc_RNA (1)...(19): siRNA sense strand
ggacccaucccaccuguca

SEQ ID NO: 829796 - RNA, 19 nt, Homo sapiens
  misc_RNA (1)...(19): siRNA sense strand
gcgaguaugugugccaugu

SEQ ID NO: 829797 - RNA, 19 nt, Homo sapiens
  misc_RNA (1)...(19): siRNA sense strand
ggagucggaguacuugaaa

SEQ ID NO: 829798 - RNA, 19 nt, Homo sapiens
  misc_RNA (1)...(19): siRNA sense strand
gcaggucacgccucagcua

SEQ ID NO: 829799 - RNA, 19 nt, Homo sapiens
  misc_RNA (1)...(19): siRNA sense strand
guacgugugccgaguguug

SEQ ID NO: 829800 - RNA, 19 nt, Homo sapiens
  misc_RNA (1)...(19): siRNA sense strand
caacccagagaacauguuu

SEQ ID NO: 829801 - RNA, 19 nt, Homo sapiens
  misc_RNA (1)...(19): siRNA sense strand
gcccauaggcugcaacugu

SEQ ID NO: 829802 - RNA, 19 nt, Homo sapiens
  misc_RNA (1)...(19): siRNA sense strand
caacaagguggacuccuau

SEQ ID NO: 829803 - RNA, 19 nt, Homo sapiens
  misc_RNA (1)...(19): siRNA sense strand
cgagcuaugugaaugcaau

SEQ ID NO: 829804 - RNA, 19 nt, Homo sapiens
  misc_RNA (1)...(19): siRNA sense strand
acaggaaguucgagaucaa

SEQ ID NO: 829805 - RNA, 19 nt, Homo sapiens
  misc_RNA (1)...(19): siRNA sense strand
ucaaggaugccuacaggaa

SEQ ID NO: 829806 - RNA, 19 nt, Homo sapiens
  misc_RNA (1)...(19): siRNA sense strand
caucuguccuggucacaau

SEQ ID NO: 829807 - RNA, 19 nt, Homo sapiens
  misc_RNA (1)...(19): siRNA sense strand
ggucagagcgcacagacau

SEQ ID NO: 829808 - RNA, 19 nt, Homo sapiens
  misc_RNA (1)...(19): siRNA sense strand
ucacugaggcuccaagcaa

SEQ ID NO: 829809 - RNA, 19 nt, Homo sapiens
  misc_RNA (1)...(19): siRNA sense strand
gcaguacggagccuauuuc

SEQ ID NO: 829810 - RNA, 19 nt, Homo sapiens
  misc_RNA (1)...(19): siRNA sense strand
gccaagggacguauauaug

SEQ ID NO: 829811 - RNA, 19 nt, Homo sapiens
  misc_RNA (1)...(19): siRNA sense strand
caccugcgguugcaccaaa

SEQ ID NO: 829812 - RNA, 19 nt, Homo sapiens
  misc_RNA (1)...(19): siRNA sense strand
cagcucagguacccaggaa

SEQ ID NO: 829813 - RNA, 19 nt, Homo sapiens
  misc_RNA (1)...(19): siRNA sense strand
ggcagacccuggaccugaa

SEQ ID NO: 829814 - RNA, 19 nt, Homo sapiens
  misc_RNA (1)...(19): siRNA sense strand
gaggaaggugugacaguga

SEQ ID NO: 829815 - RNA, 19 nt, Homo sapiens
  misc_RNA (1)...(19): siRNA sense strand
gaacgagcugcugcacuuu

SEQ ID NO: 829816 - RNA, 19 nt, Homo sapiens
  misc_RNA (1)...(19): siRNA sense strand
ugaccaacccgaugacuuc

SEQ ID NO: 829817 - RNA, 19 nt, Homo sapiens
  misc_RNA (1)...(19): siRNA sense strand
gcagcuccgugccucuaga

SEQ ID NO: 829818 - RNA, 19 nt, Homo sapiens
  misc_RNA (1)...(19): siRNA sense strand
gaucaggcccaguacuugu

SEQ ID NO: 829819 - RNA, 19 nt, Homo sapiens
  misc_RNA (1)...(19): siRNA sense strand
uauggccacugccugaauu

SEQ ID NO: 829820 - RNA, 19 nt, Homo sapiens
  misc_RNA (1)...(19): siRNA sense strand
gaggagagcugcgcuucac

SEQ ID NO: 829821 - RNA, 19 nt, Homo sapiens
  misc_RNA (1)...(19): siRNA sense strand
ucaaaggagaccuguguga

SEQ ID NO: 829822 - RNA, 19 nt, Homo sapiens
  misc_RNA (1)...(19): siRNA sense strand
ggcauacgauggcuugucu

SEQ ID NO: 829823 - RNA, 19 nt, Homo sapiens
  misc_RNA (1)...(19): siRNA sense strand
gcugcaagguaacaacauc

SEQ ID NO: 829824 - RNA, 19 nt, Homo sapiens
  misc_RNA (1)...(19): siRNA sense strand
cccaugggcugagggcaua

SEQ ID NO: 829825 - RNA, 19 nt, Homo sapiens
  misc_RNA (1)...(19): siRNA sense strand
ggaccucaacugccugguu

SEQ ID NO: 829826 - RNA, 19 nt, Homo sapiens
  misc_RNA (1)...(19): siRNA sense strand
ggaccugaacugccucguu

SEQ ID NO: 829827 - RNA, 19 nt, Homo sapiens
  misc_RNA (1)...(19): siRNA sense strand
gggcaacaacaucaugcua

SEQ ID NO: 829828 - RNA, 19 nt, Homo sapiens
  misc_RNA (1)...(19): siRNA sense strand
ggccuacggugggaaguug

SEQ ID NO: 829829 - RNA, 19 nt, Homo sapiens
  misc_RNA (1)...(19): siRNA sense strand
cagcugccauggccacuca

SEQ ID NO: 829830 - RNA, 19 nt, Homo sapiens
  misc_RNA (1)...(19): siRNA sense strand
ccugugagcccaacgaguu

SEQ ID NO: 829831 - RNA, 19 nt, Homo sapiens
  misc_RNA (1)...(19): siRNA sense strand
cugcagagcgucucaacaa

SEQ ID NO: 829832 - RNA, 19 nt, Homo sapiens
  misc_RNA (1)...(19): siRNA sense strand
ggguggcuauccugacuau

SEQ ID NO: 829833 - RNA, 19 nt, Homo sapiens
  misc_RNA (1)...(19): siRNA sense strand
gcagcuggcaccacacaau

SEQ ID NO: 829834 - RNA, 19 nt, Homo sapiens
  misc_RNA (1)...(19): siRNA sense strand
caggugacauggagcaaag

SEQ ID NO: 829835 - RNA, 19 nt, Homo sapiens
  misc_RNA (1)...(19): siRNA sense strand
cuagagaccaagagcauug

SEQ ID NO: 829836 - RNA, 19 nt, Homo sapiens
  misc_RNA (1)...(19): siRNA sense strand
gggcacagccacucuacau

SEQ ID NO: 829837 - RNA, 19 nt, Homo sapiens
  misc_RNA (1)...(19): siRNA sense strand
guaccuuucugaugaugag

SEQ ID NO: 829838 - RNA, 19 nt, Homo sapiens
  misc_RNA (1)...(19): siRNA sense strand
aaucuccaccgauccaaua

SEQ ID NO: 829839 - RNA, 19 nt, Homo sapiens
  misc_RNA (1)...(19): siRNA sense strand
gauacacccucuccuacac

SEQ ID NO: 829840 - RNA, 19 nt, Homo sapiens
  misc_RNA (1)...(19): siRNA sense strand
ccaucagccucgaguggaa

SEQ ID NO: 829841 - RNA, 19 nt, Homo sapiens
  misc_RNA (1)...(19): siRNA sense strand
gcgccagccuugccaacau

SEQ ID NO: 829842 - RNA, 19 nt, Homo sapiens
  misc_RNA (1)...(19): siRNA sense strand
acuuccagaugguuuauuu

SEQ ID NO: 829843 - RNA, 19 nt, Homo sapiens
  misc_RNA (1)...(19): siRNA sense strand
gaacagugcuuuauccauu

SEQ ID NO: 829844 - RNA, 19 nt, Homo sapiens
  misc_RNA (1)...(19): siRNA sense strand
gaacagagagaaauuaaga

SEQ ID NO: 829845 - RNA, 19 nt, Homo sapiens
  misc_RNA (1)...(19): siRNA sense strand
gaagaacagagagaaauua

SEQ ID NO: 829846 - RNA, 19 nt, Homo sapiens
  misc_RNA (1)...(19): siRNA sense strand
ggagggaauuuaccaaaga

SEQ ID NO: 829847 - RNA, 19 nt, Homo sapiens
  misc_RNA (1)...(19): siRNA sense strand
ggaaagaaacagagagaaa

SEQ ID NO: 829848 - RNA, 19 nt, Homo sapiens
  misc_RNA (1)...(19): siRNA sense strand
ucacaaaucuauccuguag

SEQ ID NO: 829849 - RNA, 19 nt, Homo sapiens
  misc_RNA (1)...(19): siRNA sense strand
gaugaacagucuacacaga

SEQ ID NO: 829850 - RNA, 19 nt, Homo sapiens
  misc_RNA (1)...(19): siRNA sense strand
gaaagaagcacuguugcaa

SEQ ID NO: 829851 - RNA, 19 nt, Homo sapiens
  misc_RNA (1)...(19): siRNA sense strand
agagagaaauuaagaagga

SEQ ID NO: 829852 - RNA, 19 nt, Homo sapiens
  misc_RNA (1)...(19): siRNA sense strand
caaagcugcugccuugcua

SEQ ID NO: 829853 - RNA, 19 nt, Homo sapiens
  misc_RNA (1)...(19): siRNA sense strand
gaaaugcagagcuuuguga

SEQ ID NO: 829854 - RNA, 19 nt, Homo sapiens
  misc_RNA (1)...(19): siRNA sense strand
ggaagaacagagagaaauu

SEQ ID NO: 829855 - RNA, 19 nt, Homo sapiens
  misc_RNA (1)...(19): siRNA sense strand
gaagaaaggagagaagaga

SEQ ID NO: 829856 - RNA, 19 nt, Homo sapiens
  misc_RNA (1)...(19): siRNA sense strand
gaagcacuguugcaagaau

SEQ ID NO: 829857 - RNA, 19 nt, Homo sapiens
  misc_RNA (1)...(19): siRNA sense strand
ggaagaugauaaaguuaca

SEQ ID NO: 829858 - RNA, 19 nt, Homo sapiens
  misc_RNA (1)...(19): siRNA sense strand
ccugaugguucuuccuuua

SEQ ID NO: 829859 - RNA, 19 nt, Homo sapiens
  misc_RNA (1)...(19): siRNA sense strand
acaaaucuauccuguagug

SEQ ID NO: 829860 - RNA, 19 nt, Homo sapiens
  misc_RNA (1)...(19): siRNA sense strand
gagggaauuuaccaaagaa

SEQ ID NO: 829861 - RNA, 19 nt, Homo sapiens
  misc_RNA (1)...(19): siRNA sense strand
cgacagaugcauuugcuaa

SEQ ID NO: 829862 - RNA, 19 nt, Homo sapiens
  misc_RNA (1)...(19): siRNA sense strand
gaaauuccacucaacagau

SEQ ID NO: 829863 - RNA, 19 nt, Homo sapiens
  misc_RNA (1)...(19): siRNA sense strand
aaacaacacuuggaaugga

SEQ ID NO: 829864 - RNA, 19 nt, Homo sapiens
  misc_RNA (1)...(19): siRNA sense strand
aagaagcacuguugcaaga

SEQ ID NO: 829865 - RNA, 19 nt, Homo sapiens
  misc_RNA (1)...(19): siRNA sense strand
gauuaaggacucaagauga

SEQ ID NO: 829866 - RNA, 19 nt, Homo sapiens
  misc_RNA (1)...(19): siRNA sense strand
gaaagaaacagagagaaag

SEQ ID NO: 829867 - RNA, 19 nt, Homo sapiens
  misc_RNA (1)...(19): siRNA sense strand
guaauagcaggaaguguuu

SEQ ID NO: 829868 - RNA, 19 nt, Homo sapiens
  misc_RNA (1)...(19): siRNA sense strand
ggagacauuuggaccuugu

SEQ ID NO: 829869 - RNA, 19 nt, Homo sapiens
  misc_RNA (1)...(19): siRNA sense strand
gaaguuacuggauuuggaa

SEQ ID NO: 829870 - RNA, 19 nt, Homo sapiens
  misc_RNA (1)...(19): siRNA sense strand
aaagaaugcuggaggaaag

SEQ ID NO: 829871 - RNA, 19 nt, Homo sapiens
  misc_RNA (1)...(19): siRNA sense strand
aaacaucaguagcaaaugg

SEQ ID NO: 829872 - RNA, 19 nt, Homo sapiens
  misc_RNA (1)...(19): siRNA sense strand
aaagacaaaggaagaagua

SEQ ID NO: 829873 - RNA, 19 nt, Homo sapiens
  misc_RNA (1)...(19): siRNA sense strand
gcgcuucggugguacuguu

SEQ ID NO: 829874 - RNA, 19 nt, Homo sapiens
  misc_RNA (1)...(19): siRNA sense strand
ggaaguguuucugcagaug

SEQ ID NO: 829875 - RNA, 19 nt, Homo sapiens
  misc_RNA (1)...(19): siRNA sense strand
ucaagaugauggugaagau

SEQ ID NO: 829876 - RNA, 19 nt, Homo sapiens
  misc_RNA (1)...(19): siRNA sense strand
gaagaggcaaggcaguuug

SEQ ID NO: 829877 - RNA, 19 nt, Homo sapiens
  misc_RNA (1)...(19): siRNA sense strand
aaacagagagaaagcagaa

SEQ ID NO: 829878 - RNA, 19 nt, Homo sapiens
  misc_RNA (1)...(19): siRNA sense strand
gagagaaauuaagaaggaa

SEQ ID NO: 829879 - RNA, 19 nt, Homo sapiens
  misc_RNA (1)...(19): siRNA sense strand
ucagaaaguucagugucua

SEQ ID NO: 829880 - RNA, 19 nt, Homo sapiens
  misc_RNA (1)...(19): siRNA sense strand
ccauccaguuucuuuauug

SEQ ID NO: 829881 - RNA, 19 nt, Homo sapiens
  misc_RNA (1)...(19): siRNA sense strand
guucuuccuuuacaaauca

SEQ ID NO: 829882 - RNA, 19 nt, Homo sapiens
  misc_RNA (1)...(19): siRNA sense strand
caaguugggaagaugauaa

SEQ ID NO: 829883 - RNA, 19 nt, Homo sapiens
  misc_RNA (1)...(19): siRNA sense strand
gauacaaagucagauacug

SEQ ID NO: 829884 - RNA, 19 nt, Homo sapiens
  misc_RNA (1)...(19): siRNA sense strand
gaaaacaacacuuggaaug

SEQ ID NO: 829885 - RNA, 19 nt, Homo sapiens
  misc_RNA (1)...(19): siRNA sense strand
ggaauuuaccaaagaagau

SEQ ID NO: 829886 - RNA, 19 nt, Homo sapiens
  misc_RNA (1)...(19): siRNA sense strand
uugggaagaugauaaaguu

SEQ ID NO: 829887 - RNA, 19 nt, Homo sapiens
  misc_RNA (1)...(19): siRNA sense strand
gaggaaagaaacagagaga

SEQ ID NO: 829888 - RNA, 19 nt, Homo sapiens
  misc_RNA (1)...(19): siRNA sense strand
uuacaagaauucacaaggu

SEQ ID NO: 829889 - RNA, 19 nt, Homo sapiens
  misc_RNA (1)...(19): siRNA sense strand
aaaaggaggggaaaauuua

SEQ ID NO: 829890 - RNA, 19 nt, Homo sapiens
  misc_RNA (1)...(19): siRNA sense strand
aaagggaaccagugagaaa

SEQ ID NO: 829891 - RNA, 19 nt, Homo sapiens
  misc_RNA (1)...(19): siRNA sense strand
gcagcucgagaacguauaa

SEQ ID NO: 829892 - RNA, 19 nt, Homo sapiens
  misc_RNA (1)...(19): siRNA sense strand
ugaaacaucaguagcaaau

SEQ ID NO: 829893 - RNA, 19 nt, Homo sapiens
  misc_RNA (1)...(19): siRNA sense strand
agagaaagaagcacuguug

SEQ ID NO: 829894 - RNA, 19 nt, Homo sapiens
  misc_RNA (1)...(19): siRNA sense strand
gagaguaacaucgucagaa

SEQ ID NO: 829895 - RNA, 19 nt, Homo sapiens
  misc_RNA (1)...(19): siRNA sense strand
cccaagcgcuucgguggua

SEQ ID NO: 829896 - RNA, 19 nt, Homo sapiens
  misc_RNA (1)...(19): siRNA sense strand
gaaguaauagcaggaagug

SEQ ID NO: 829897 - RNA, 19 nt, Homo sapiens
  misc_RNA (1)...(19): siRNA sense strand
gaugauaaaguuacagaag

SEQ ID NO: 829898 - RNA, 19 nt, Homo sapiens
  misc_RNA (1)...(19): siRNA sense strand
ugaacagucuacacagaug

SEQ ID NO: 829899 - RNA, 19 nt, Homo sapiens
  misc_RNA (1)...(19): siRNA sense strand
guccagaaaugcagagcuu

SEQ ID NO: 829900 - RNA, 19 nt, Homo sapiens
  misc_RNA (1)...(19): siRNA sense strand
gaaguguuucugcagauga

SEQ ID NO: 829901 - RNA, 19 nt, Homo sapiens
  misc_RNA (1)...(19): siRNA sense strand
agaaguuacuggauuugga

SEQ ID NO: 829902 - RNA, 19 nt, Homo sapiens
  misc_RNA (1)...(19): siRNA sense strand
gagagaaagcagaagauag

SEQ ID NO: 829903 - RNA, 19 nt, Homo sapiens
  misc_RNA (1)...(19): siRNA sense strand
gaggaagaacagagagaaa

SEQ ID NO: 829904 - RNA, 19 nt, Homo sapiens
  misc_RNA (1)...(19): siRNA sense strand
gaaaagaaaagaggaagaa

SEQ ID NO: 829905 - RNA, 19 nt, Homo sapiens
  misc_RNA (1)...(19): siRNA sense strand
aaagucagauacugcaaca

SEQ ID NO: 829906 - RNA, 19 nt, Homo sapiens
  misc_RNA (1)...(19): siRNA sense strand
aaauuccacucaacagaug

SEQ ID NO: 829907 - RNA, 19 nt, Homo sapiens
  misc_RNA (1)...(19): siRNA sense strand
acaaaucaguucccuucug

SEQ ID NO: 829908 - RNA, 19 nt, Homo sapiens
  misc_RNA (1)...(19): siRNA sense strand
ugauaaaguuacagaagca

SEQ ID NO: 829909 - RNA, 19 nt, Homo sapiens
  misc_RNA (1)...(19): siRNA sense strand
gcggagacauuuggaccuu

SEQ ID NO: 829910 - RNA, 19 nt, Homo sapiens
  misc_RNA (1)...(19): siRNA sense strand
gacucaagaugauggugaa

SEQ ID NO: 829911 - RNA, 19 nt, Homo sapiens
  misc_RNA (1)...(19): siRNA sense strand
caaauggcagucagucaga

SEQ ID NO: 829912 - RNA, 19 nt, Homo sapiens
  misc_RNA (1)...(19): siRNA sense strand
cacacagacuucagugaga

SEQ ID NO: 829913 - RNA, 19 nt, Homo sapiens
  misc_RNA (1)...(19): siRNA sense strand
gaugguucuuccuuuacaa

SEQ ID NO: 829914 - RNA, 19 nt, Homo sapiens
  misc_RNA (1)...(19): siRNA sense strand
gcagagcuuugugagauac

SEQ ID NO: 829915 - RNA, 19 nt, Homo sapiens
  misc_RNA (1)...(19): siRNA sense strand
ggaaguaauagcaggaagu

SEQ ID NO: 829916 - RNA, 19 nt, Homo sapiens
  misc_RNA (1)...(19): siRNA sense strand
guaauccgccucccacaca

SEQ ID NO: 829917 - RNA, 19 nt, Homo sapiens
  misc_RNA (1)...(19): siRNA sense strand
aagaccaacugcauccauu

SEQ ID NO: 829918 - RNA, 19 nt, Homo sapiens
  misc_RNA (1)...(19): siRNA sense strand
gggaauuuaccaaagaaga

SEQ ID NO: 829919 - RNA, 19 nt, Homo sapiens
  misc_RNA (1)...(19): siRNA sense strand
caacauccgaguggaaaga

SEQ ID NO: 829920 - RNA, 19 nt, Homo sapiens
  misc_RNA (1)...(19): siRNA sense strand
ccuaguggaugcucagauc

SEQ ID NO: 829921 - RNA, 19 nt, Homo sapiens
  misc_RNA (1)...(19): siRNA sense strand
ccagaaaugcagagcuuug

SEQ ID NO: 829922 - RNA, 19 nt, Homo sapiens
  misc_RNA (1)...(19): siRNA sense strand
gacagaugcauuugcuaaa

SEQ ID NO: 829923 - RNA, 19 nt, Homo sapiens
  misc_RNA (1)...(19): siRNA sense strand
gcaaguugggaagaugaua

SEQ ID NO: 829924 - RNA, 19 nt, Homo sapiens
  misc_RNA (1)...(19): siRNA sense strand
cguggcaggugaugaugaa

SEQ ID NO: 829925 - RNA, 19 nt, Homo sapiens
  misc_RNA (1)...(19): siRNA sense strand
ccaacugcauccauuguac

SEQ ID NO: 829926 - RNA, 19 nt, Homo sapiens
  misc_RNA (1)...(19): siRNA sense strand
agaaguagaggcugccaaa

SEQ ID NO: 829927 - RNA, 19 nt, Homo sapiens
  misc_RNA (1)...(19): siRNA sense strand
uaaaacagcagauugcauu

SEQ ID NO: 829928 - RNA, 19 nt, Homo sapiens
  misc_RNA (1)...(19): siRNA sense strand
ggagagaagagaaaagaaa

SEQ ID NO: 829929 - RNA, 19 nt, Homo sapiens
  misc_RNA (1)...(19): siRNA sense strand
agaaaggagagaagagaaa

SEQ ID NO: 829930 - RNA, 19 nt, Homo sapiens
  misc_RNA (1)...(19): siRNA sense strand
aaucuauccuguagugugu

SEQ ID NO: 829931 - RNA, 19 nt, Homo sapiens
  misc_RNA (1)...(19): siRNA sense strand
ucaauuccgucuuccugau

SEQ ID NO: 829932 - RNA, 19 nt, Homo sapiens
  misc_RNA (1)...(19): siRNA sense strand
agagagaaagcagaagaua

SEQ ID NO: 829933 - RNA, 19 nt, Homo sapiens
  misc_RNA (1)...(19): siRNA sense strand
ggcagucagucagaaaguu

SEQ ID NO: 829934 - RNA, 19 nt, Homo sapiens
  misc_RNA (1)...(19): siRNA sense strand
ucacaagguccgacagaug

SEQ ID NO: 829935 - RNA, 19 nt, Homo sapiens
  misc_RNA (1)...(19): siRNA sense strand
aguaauagcaggaaguguu

SEQ ID NO: 829936 - RNA, 19 nt, Homo sapiens
  misc_RNA (1)...(19): siRNA sense strand
caucaucuagcaaaucaga

SEQ ID NO: 829937 - RNA, 19 nt, Homo sapiens
  misc_RNA (1)...(19): siRNA sense strand
gcagaaauggaagucaaga

SEQ ID NO: 829938 - RNA, 19 nt, Homo sapiens
  misc_RNA (1)...(19): siRNA sense strand
gcagucagucagaaaguuc

SEQ ID NO: 829939 - RNA, 19 nt, Homo sapiens
  misc_RNA (1)...(19): siRNA sense strand
gacaaaggaagaaguagag

SEQ ID NO: 829940 - RNA, 19 nt, Homo sapiens
  misc_RNA (1)...(19): siRNA sense strand
ugcaucaucuagcaaauca

SEQ ID NO: 829941 - RNA, 19 nt, Homo sapiens
  misc_RNA (1)...(19): siRNA sense strand
gaagaccaacugcauccau

SEQ ID NO: 829942 - RNA, 19 nt, Homo sapiens
  misc_RNA (1)...(19): siRNA sense strand
aggcagaaauggaagucaa

SEQ ID NO: 829943 - RNA, 19 nt, Homo sapiens
  misc_RNA (1)...(19): siRNA sense strand
aaauagaacuggcaagaua

SEQ ID NO: 829944 - RNA, 19 nt, Homo sapiens
  misc_RNA (1)...(19): siRNA sense strand
gcaaauucaucaacauguu

SEQ ID NO: 829945 - RNA, 19 nt, Homo sapiens
  misc_RNA (1)...(19): siRNA sense strand
gcacucagcuuuacauggu

SEQ ID NO: 829946 - RNA, 19 nt, Homo sapiens
  misc_RNA (1)...(19): siRNA sense strand
gauuugaccuccauaguug

SEQ ID NO: 829947 - RNA, 19 nt, Homo sapiens
  misc_RNA (1)...(19): siRNA sense strand
gagcagagccugucuuuag

SEQ ID NO: 829948 - RNA, 19 nt, Homo sapiens
  misc_RNA (1)...(19): siRNA sense strand
ggagagacuugaugccaaa

SEQ ID NO: 829949 - RNA, 19 nt, Homo sapiens
  misc_RNA (1)...(19): siRNA sense strand
ggagagaauucgcaaguuc

SEQ ID NO: 829950 - RNA, 19 nt, Homo sapiens
  misc_RNA (1)...(19): siRNA sense strand
gaagagcuccuggcagaua

SEQ ID NO: 829951 - RNA, 19 nt, Homo sapiens
  misc_RNA (1)...(19): siRNA sense strand
gaaaauaaaucucgaugga

SEQ ID NO: 829952 - RNA, 19 nt, Homo sapiens
  misc_RNA (1)...(19): siRNA sense strand
ccagaaacaugauggcaaa

SEQ ID NO: 829953 - RNA, 19 nt, Homo sapiens
  misc_RNA (1)...(19): siRNA sense strand
ugaaggacaucguggagua

SEQ ID NO: 829954 - RNA, 19 nt, Homo sapiens
  misc_RNA (1)...(19): siRNA sense strand
ccaagaauaugcugucaug

SEQ ID NO: 829955 - RNA, 19 nt, Homo sapiens
  misc_RNA (1)...(19): siRNA sense strand
cgacagcgcugaagaguac

SEQ ID NO: 829956 - RNA, 19 nt, Homo sapiens
  misc_RNA (1)...(19): siRNA sense strand
gaaacaugauggcaaagau

SEQ ID NO: 829957 - RNA, 19 nt, Homo sapiens
  misc_RNA (1)...(19): siRNA sense strand
ccagauauuugccuauuau

SEQ ID NO: 829958 - RNA, 19 nt, Homo sapiens
  misc_RNA (1)...(19): siRNA sense strand
caagagcggcuucgacaua

SEQ ID NO: 829959 - RNA, 19 nt, Homo sapiens
  misc_RNA (1)...(19): siRNA sense strand
ucugggagcucaacuauga

SEQ ID NO: 829960 - RNA, 19 nt, Homo sapiens
  misc_RNA (1)...(19): siRNA sense strand
ggacgaguguguggaguuu

SEQ ID NO: 829961 - RNA, 19 nt, Homo sapiens
  misc_RNA (1)...(19): siRNA sense strand
gaguacggcucuccuggua

SEQ ID NO: 829962 - RNA, 19 nt, Homo sapiens
  misc_RNA (1)...(19): siRNA sense strand
ggcaugagcccuucaauga

SEQ ID NO: 829963 - RNA, 19 nt, Homo sapiens
  misc_RNA (1)...(19): siRNA sense strand
caagcuagcagaccagaua

SEQ ID NO: 829964 - RNA, 19 nt, Homo sapiens
  misc_RNA (1)...(19): siRNA sense strand
gagaacaggauguauuuga

SEQ ID NO: 829965 - RNA, 19 nt, Homo sapiens
  misc_RNA (1)...(19): siRNA sense strand
gaacuggcaagauauauca

SEQ ID NO: 829966 - RNA, 19 nt, Homo sapiens
  misc_RNA (1)...(19): siRNA sense strand
cuucuacacucacuugaua

SEQ ID NO: 829967 - RNA, 19 nt, Homo sapiens
  misc_RNA (1)...(19): siRNA sense strand
gcaaauagaacuggcaaga

SEQ ID NO: 829968 - RNA, 19 nt, Homo sapiens
  misc_RNA (1)...(19): siRNA sense strand
gaccagauauuugccuauu

SEQ ID NO: 829969 - RNA, 19 nt, Homo sapiens
  misc_RNA (1)...(19): siRNA sense strand
ggaggagggccaagaauau

SEQ ID NO: 829970 - RNA, 19 nt, Homo sapiens
  misc_RNA (1)...(19): siRNA sense strand
ggagaaguuugcccuagug

SEQ ID NO: 829971 - RNA, 19 nt, Homo sapiens
  misc_RNA (1)...(19): siRNA sense strand
aagaaaaccuugagaagua

SEQ ID NO: 829972 - RNA, 19 nt, Homo sapiens
  misc_RNA (1)...(19): siRNA sense strand
uggcaaagaugagauuauu

SEQ ID NO: 829973 - RNA, 19 nt, Homo sapiens
  misc_RNA (1)...(19): siRNA sense strand
uuacuggcaucgcaagaua

SEQ ID NO: 829974 - RNA, 19 nt, Homo sapiens
  misc_RNA (1)...(19): siRNA sense strand
gcacaauccugcaguacgu

SEQ ID NO: 829975 - RNA, 19 nt, Homo sapiens
  misc_RNA (1)...(19): siRNA sense strand
gaguggaaaucuacgagaa

SEQ ID NO: 829976 - RNA, 19 nt, Homo sapiens
  misc_RNA (1)...(19): siRNA sense strand
gauaaacgguuacgaucag

SEQ ID NO: 829977 - RNA, 19 nt, Homo sapiens
  misc_RNA (1)...(19): siRNA sense strand
ggagugccaugcaguuugu

SEQ ID NO: 829978 - RNA, 19 nt, Homo sapiens
  misc_RNA (1)...(19): siRNA sense strand
ucccacaggugaaauguaa

SEQ ID NO: 829979 - RNA, 19 nt, Homo sapiens
  misc_RNA (1)...(19): siRNA sense strand
gaucagaaugcaagaauca

SEQ ID NO: 829980 - RNA, 19 nt, Homo sapiens
  misc_RNA (1)...(19): siRNA sense strand
gaccacaugcgcuucauuu

SEQ ID NO: 829981 - RNA, 19 nt, Homo sapiens
  misc_RNA (1)...(19): siRNA sense strand
gauccaaggcuuugaacuu

SEQ ID NO: 829982 - RNA, 19 nt, Homo sapiens
  misc_RNA (1)...(19): siRNA sense strand
gagauaagcagccuaaugc

SEQ ID NO: 829983 - RNA, 19 nt, Homo sapiens
  misc_RNA (1)...(19): siRNA sense strand
gcgauuggacgauuugaaa

SEQ ID NO: 829984 - RNA, 19 nt, Homo sapiens
  misc_RNA (1)...(19): siRNA sense strand
caaaagugguuccaagaaa

SEQ ID NO: 829985 - RNA, 19 nt, Homo sapiens
  misc_RNA (1)...(19): siRNA sense strand
gcuagcagaccagauauuu

SEQ ID NO: 829986 - RNA, 19 nt, Homo sapiens
  misc_RNA (1)...(19): siRNA sense strand
guacggcucuccugguauc

SEQ ID NO: 829987 - RNA, 19 nt, Homo sapiens
  misc_RNA (1)...(19): siRNA sense strand
gcagaucaauagaccucaa

SEQ ID NO: 829988 - RNA, 19 nt, Homo sapiens
  misc_RNA (1)...(19): siRNA sense strand
acacugggcuggcuguaug

SEQ ID NO: 829989 - RNA, 19 nt, Homo sapiens
  misc_RNA (1)...(19): siRNA sense strand
gcgagcagaugauccagau

SEQ ID NO: 829990 - RNA, 19 nt, Homo sapiens
  misc_RNA (1)...(19): siRNA sense strand
gcacgccaguggagcaugu

SEQ ID NO: 829991 - RNA, 19 nt, Homo sapiens
  misc_RNA (1)...(19): siRNA sense strand
ucaacaagcaguuccugua

SEQ ID NO: 829992 - RNA, 19 nt, Homo sapiens
  misc_RNA (1)...(19): siRNA sense strand
ggcaggccaucaagaagaa

SEQ ID NO: 829993 - RNA, 19 nt, Homo sapiens
  misc_RNA (1)...(19): siRNA sense strand
gaagaugguggagagaauu

SEQ ID NO: 829994 - RNA, 19 nt, Homo sapiens
  misc_RNA (1)...(19): siRNA sense strand
cagccaaauuucaacacua

SEQ ID NO: 829995 - RNA, 19 nt, Homo sapiens
  misc_RNA (1)...(19): siRNA sense strand
aaagagauaagcagccuaa

SEQ ID NO: 829996 - RNA, 19 nt, Homo sapiens
  misc_RNA (1)...(19): siRNA sense strand
cagcagccauguauaaguc

SEQ ID NO: 829997 - RNA, 19 nt, Homo sapiens
  misc_RNA (1)...(19): siRNA sense strand
agccaaauuucaacacuaa

SEQ ID NO: 829998 - RNA, 19 nt, Homo sapiens
  misc_RNA (1)...(19): siRNA sense strand
gaaacacaugcuucucaaa

SEQ ID NO: 829999 - RNA, 19 nt, Homo sapiens
  misc_RNA (1)...(19): siRNA sense strand
ucaggaagaccguguguga

SEQ ID NO: 830000 - RNA, 19 nt, Homo sapiens
  misc_RNA (1)...(19): siRNA sense strand
ucauguacuuccagagaaa

SEQ ID NO: 830001 - RNA, 19 nt, Homo sapiens
  misc_RNA (1)...(19): siRNA sense strand
caucuugucccacugauug

SEQ ID NO: 830002 - RNA, 19 nt, Homo sapiens
  misc_RNA (1)...(19): siRNA sense strand
uggaggagcugcugaaggu

SEQ ID NO: 830003 - RNA, 19 nt, Homo sapiens
  misc_RNA (1)...(19): siRNA sense strand
cuaacagaguggaaaucua

SEQ ID NO: 830004 - RNA, 19 nt, Homo sapiens
  misc_RNA (1)...(19): siRNA sense strand
ggcaaagaugagauuauua

SEQ ID NO: 830005 - RNA, 19 nt, Homo sapiens
  misc_RNA (1)...(19): siRNA sense strand
gcaauggggucaugcaugu

SEQ ID NO: 830006 - RNA, 19 nt, Homo sapiens
  misc_RNA (1)...(19): siRNA sense strand
aacaugaagugcaguguga

SEQ ID NO: 830007 - RNA, 19 nt, Homo sapiens
  misc_RNA (1)...(19): siRNA sense strand
uaacagaguggaaaucuac

SEQ ID NO: 830008 - RNA, 19 nt, Homo sapiens
  misc_RNA (1)...(19): siRNA sense strand
aauaugcugucaugcugua

SEQ ID NO: 830009 - RNA, 19 nt, Homo sapiens
  misc_RNA (1)...(19): siRNA sense strand
ucucagcagccauguauaa

SEQ ID NO: 830010 - RNA, 19 nt, Homo sapiens
  misc_RNA (1)...(19): siRNA sense strand
aagagcggcuucgacauaa

SEQ ID NO: 830011 - RNA, 19 nt, Homo sapiens
  misc_RNA (1)...(19): siRNA sense strand
gagugucaguaacaucuau

SEQ ID NO: 830012 - RNA, 19 nt, Homo sapiens
  misc_RNA (1)...(19): siRNA sense strand
gcagagccugucuuuagaa

SEQ ID NO: 830013 - RNA, 19 nt, Homo sapiens
  misc_RNA (1)...(19): siRNA sense strand
cccuggaccuguacaauga

SEQ ID NO: 830014 - RNA, 19 nt, Homo sapiens
  misc_RNA (1)...(19): siRNA sense strand
cgacaaguacuucaagcaa

SEQ ID NO: 830015 - RNA, 19 nt, Homo sapiens
  misc_RNA (1)...(19): siRNA sense strand
ugagcuggauggccuguug

SEQ ID NO: 830016 - RNA, 19 nt, Homo sapiens
  misc_RNA (1)...(19): siRNA sense strand
ggaacgccauccucuucug

SEQ ID NO: 830017 - RNA, 19 nt, Homo sapiens
  misc_RNA (1)...(19): siRNA sense strand
ucaggaauuucaaagagau

SEQ ID NO: 830018 - RNA, 19 nt, Homo sapiens
  misc_RNA (1)...(19): siRNA sense strand
uggacgagcugaagaacau

SEQ ID NO: 830019 - RNA, 19 nt, Homo sapiens
  misc_RNA (1)...(19): siRNA sense strand
ggauuucugcuaccaucua

SEQ ID NO: 830020 - RNA, 19 nt, Homo sapiens
  misc_RNA (1)...(19): siRNA sense strand
gaagaacgucauccagagu

SEQ ID NO: 830021 - RNA, 19 nt, Homo sapiens
  misc_RNA (1)...(19): siRNA sense strand
gauuuggucuguaccugau

SEQ ID NO: 830022 - RNA, 19 nt, Homo sapiens
  misc_RNA (1)...(19): siRNA sense strand
gaagugcagugugaagaac

SEQ ID NO: 830023 - RNA, 19 nt, Homo sapiens
  misc_RNA (1)...(19): siRNA sense strand
gaucacacugggcaaauuc

SEQ ID NO: 830024 - RNA, 19 nt, Homo sapiens
  misc_RNA (1)...(19): siRNA sense strand
agaagaugguggagagaau

SEQ ID NO: 830025 - RNA, 19 nt, Homo sapiens
  misc_RNA (1)...(19): siRNA sense strand
cugcuaccaucuacuuaaa

SEQ ID NO: 830026 - RNA, 19 nt, Homo sapiens
  misc_RNA (1)...(19): siRNA sense strand
cuaaugcacagccucagua

SEQ ID NO: 830027 - RNA, 19 nt, Homo sapiens
  misc_RNA (1)...(19): siRNA sense strand
gaagauuugaccuccauag

SEQ ID NO: 830028 - RNA, 19 nt, Homo sapiens
  misc_RNA (1)...(19): siRNA sense strand
gcagcagcccucaguacaa

SEQ ID NO: 830029 - RNA, 19 nt, Homo sapiens
  misc_RNA (1)...(19): siRNA sense strand
ccauguuccuggccaauca

SEQ ID NO: 830030 - RNA, 19 nt, Homo sapiens
  misc_RNA (1)...(19): siRNA sense strand
acacaugcuucucaaaguc

SEQ ID NO: 830031 - RNA, 19 nt, Homo sapiens
  misc_RNA (1)...(19): siRNA sense strand
ggacacacgaguucacagu

SEQ ID NO: 830032 - RNA, 19 nt, Homo sapiens
  misc_RNA (1)...(19): siRNA sense strand
uggauggccuguuggaaau

SEQ ID NO: 830033 - RNA, 19 nt, Homo sapiens
  misc_RNA (1)...(19): siRNA sense strand
guauaagucccuagaacug

SEQ ID NO: 830034 - RNA, 19 nt, Homo sapiens
  misc_RNA (1)...(19): siRNA sense strand
gcagugcugugaccuuucg

SEQ ID NO: 830035 - RNA, 19 nt, Homo sapiens
  misc_RNA (1)...(19): siRNA sense strand
gaagaagaagaacgucauc

SEQ ID NO: 830036 - RNA, 19 nt, Homo sapiens
  misc_RNA (1)...(19): siRNA sense strand
gcacgugauggaaguguau

SEQ ID NO: 830037 - RNA, 19 nt, Homo sapiens
  misc_RNA (1)...(19): siRNA sense strand
ggacaugcaaauagaacug

SEQ ID NO: 830038 - RNA, 19 nt, Homo sapiens
  misc_RNA (1)...(19): siRNA sense strand
gugaagauuugaccuccau

SEQ ID NO: 830039 - RNA, 19 nt, Homo sapiens
  misc_RNA (1)...(19): siRNA sense strand
gcuccucggcagaucaaua

SEQ ID NO: 830040 - RNA, 19 nt, Homo sapiens
  misc_RNA (1)...(19): siRNA sense strand
acaagcaguuccuguacga

SEQ ID NO: 830041 - RNA, 19 nt, Homo sapiens
  misc_RNA (1)...(19): siRNA sense strand
aaaagugguuccaagaaaa

SEQ ID NO: 830042 - RNA, 19 nt, Homo sapiens
  misc_RNA (1)...(19): siRNA sense strand
uggaggagggccaagaaua

SEQ ID NO: 830043 - RNA, 19 nt, Homo sapiens
  misc_RNA (1)...(19): siRNA sense strand
gaagagaccuggaagauga

SEQ ID NO: 830044 - RNA, 19 nt, Homo sapiens
  misc_RNA (1)...(19): siRNA sense strand
ggacaaggauagugaaaua

SEQ ID NO: 830045 - RNA, 19 nt, Homo sapiens
  misc_RNA (1)...(19): siRNA sense strand
ggacagaucuuaguauauu

SEQ ID NO: 830046 - RNA, 19 nt, Homo sapiens
  misc_RNA (1)...(19): siRNA sense strand
gaaacuggguuacucauaa

SEQ ID NO: 830047 - RNA, 19 nt, Homo sapiens
  misc_RNA (1)...(19): siRNA sense strand
ggucauggcuguuaaauug

SEQ ID NO: 830048 - RNA, 19 nt, Homo sapiens
  misc_RNA (1)...(19): siRNA sense strand
gaaauacccuuguuagaau

SEQ ID NO: 830049 - RNA, 19 nt, Homo sapiens
  misc_RNA (1)...(19): siRNA sense strand
gaaauuugauggacuuuga

SEQ ID NO: 830050 - RNA, 19 nt, Homo sapiens
  misc_RNA (1)...(19): siRNA sense strand
gcaauugugucucaacuuu

SEQ ID NO: 830051 - RNA, 19 nt, Homo sapiens
  misc_RNA (1)...(19): siRNA sense strand
gaaggugucuccugaagaa

SEQ ID NO: 830052 - RNA, 19 nt, Homo sapiens
  misc_RNA (1)...(19): siRNA sense strand
ggaaacaucuugauuugau

SEQ ID NO: 830053 - RNA, 19 nt, Homo sapiens
  misc_RNA (1)...(19): siRNA sense strand
gcaaagagacucacaaaug

SEQ ID NO: 830054 - RNA, 19 nt, Homo sapiens
  misc_RNA (1)...(19): siRNA sense strand
uaagggaucugcugaauug

SEQ ID NO: 830055 - RNA, 19 nt, Homo sapiens
  misc_RNA (1)...(19): siRNA sense strand
gaaauucaaugcagucgaa

SEQ ID NO: 830056 - RNA, 19 nt, Homo sapiens
  misc_RNA (1)...(19): siRNA sense strand
gaaauauggugcccucaaa

SEQ ID NO: 830057 - RNA, 19 nt, Homo sapiens
  misc_RNA (1)...(19): siRNA sense strand
gaaaguguguggucaguau

SEQ ID NO: 830058 - RNA, 19 nt, Homo sapiens
  misc_RNA (1)...(19): siRNA sense strand
gaaagucauuccauacauu

SEQ ID NO: 830059 - RNA, 19 nt, Homo sapiens
  misc_RNA (1)...(19): siRNA sense strand
ggagauauaucccgagcua

SEQ ID NO: 830060 - RNA, 19 nt, Homo sapiens
  misc_RNA (1)...(19): siRNA sense strand
gaaaguggcaccuggauuu

SEQ ID NO: 830061 - RNA, 19 nt, Homo sapiens
  misc_RNA (1)...(19): siRNA sense strand
ugaggaagcugacaaacua

SEQ ID NO: 830062 - RNA, 19 nt, Homo sapiens
  misc_RNA (1)...(19): siRNA sense strand
cagggaagcuugucuuuaa

SEQ ID NO: 830063 - RNA, 19 nt, Homo sapiens
  misc_RNA (1)...(19): siRNA sense strand
gaaugaagagcacaaguua

SEQ ID NO: 830064 - RNA, 19 nt, Homo sapiens
  misc_RNA (1)...(19): siRNA sense strand
gaagugauuuccucuguga

SEQ ID NO: 830065 - RNA, 19 nt, Homo sapiens
  misc_RNA (1)...(19): siRNA sense strand
guacauagauggaauaggu

SEQ ID NO: 830066 - RNA, 19 nt, Homo sapiens
  misc_RNA (1)...(19): siRNA sense strand
gcaaaggcuucaggaaaua

SEQ ID NO: 830067 - RNA, 19 nt, Homo sapiens
  misc_RNA (1)...(19): siRNA sense strand
uaaagaaguugcagaaguu

SEQ ID NO: 830068 - RNA, 19 nt, Homo sapiens
  misc_RNA (1)...(19): siRNA sense strand
guacacaagucugcuguua

SEQ ID NO: 830069 - RNA, 19 nt, Homo sapiens
  misc_RNA (1)...(19): siRNA sense strand
gagcagaucuaccuguuga

SEQ ID NO: 830070 - RNA, 19 nt, Homo sapiens
  misc_RNA (1)...(19): siRNA sense strand
ugacauaccugaagugaug

SEQ ID NO: 830071 - RNA, 19 nt, Homo sapiens
  misc_RNA (1)...(19): siRNA sense strand
ucacagaacuuuauguaga

SEQ ID NO: 830072 - RNA, 19 nt, Homo sapiens
  misc_RNA (1)...(19): siRNA sense strand
ugaauaggcuguuggauga

SEQ ID NO: 830073 - RNA, 19 nt, Homo sapiens
  misc_RNA (1)...(19): siRNA sense strand
ggaaauacccuuguuagaa

SEQ ID NO: 830074 - RNA, 19 nt, Homo sapiens
  misc_RNA (1)...(19): siRNA sense strand
gaacagcuccugguuguaa

SEQ ID NO: 830075 - RNA, 19 nt, Homo sapiens
  misc_RNA (1)...(19): siRNA sense strand
uaacuuggcugcuccagaa

SEQ ID NO: 830076 - RNA, 19 nt, Homo sapiens
  misc_RNA (1)...(19): siRNA sense strand
uaaaggaccuggagagaug

SEQ ID NO: 830077 - RNA, 19 nt, Homo sapiens
  misc_RNA (1)...(19): siRNA sense strand
ggaggaggcugcuagagaa

SEQ ID NO: 830078 - RNA, 19 nt, Homo sapiens
  misc_RNA (1)...(19): siRNA sense strand
ggagagacaucaguuggua

SEQ ID NO: 830079 - RNA, 19 nt, Homo sapiens
  misc_RNA (1)...(19): siRNA sense strand
gaacaagaauacagugcaa

SEQ ID NO: 830080 - RNA, 19 nt, Homo sapiens
  misc_RNA (1)...(19): siRNA sense strand
uuacagagcuugcccagaa

SEQ ID NO: 830081 - RNA, 19 nt, Homo sapiens
  misc_RNA (1)...(19): siRNA sense strand
ggaagaaauugacacauca

SEQ ID NO: 830082 - RNA, 19 nt, Homo sapiens
  misc_RNA (1)...(19): siRNA sense strand
gaaagagucugggaccaaa

SEQ ID NO: 830083 - RNA, 19 nt, Homo sapiens
  misc_RNA (1)...(19): siRNA sense strand
ggaggaaauugaugugauu

SEQ ID NO: 830084 - RNA, 19 nt, Homo sapiens
  misc_RNA (1)...(19): siRNA sense strand
gaacagacaaagcccauaa

SEQ ID NO: 830085 - RNA, 19 nt, Homo sapiens
  misc_RNA (1)...(19): siRNA sense strand
ggacagaauucguaguuuc

SEQ ID NO: 830086 - RNA, 19 nt, Homo sapiens
  misc_RNA (1)...(19): siRNA sense strand
gaagauuuaugacagaaug

SEQ ID NO: 830087 - RNA, 19 nt, Homo sapiens
  misc_RNA (1)...(19): siRNA sense strand
gcacaagccgugaagauuu

SEQ ID NO: 830088 - RNA, 19 nt, Homo sapiens
  misc_RNA (1)...(19): siRNA sense strand
caaacuagaagcaguguua

SEQ ID NO: 830089 - RNA, 19 nt, Homo sapiens
  misc_RNA (1)...(19): siRNA sense strand
ggaagauucugaacuuguu

SEQ ID NO: 830090 - RNA, 19 nt, Homo sapiens
  misc_RNA (1)...(19): siRNA sense strand
ccaaagaauuuauggaaga

SEQ ID NO: 830091 - RNA, 19 nt, Homo sapiens
  misc_RNA (1)...(19): siRNA sense strand
caaagagacucacaaaugg

SEQ ID NO: 830092 - RNA, 19 nt, Homo sapiens
  misc_RNA (1)...(19): siRNA sense strand
ccagauaaaugaggagaua

SEQ ID NO: 830093 - RNA, 19 nt, Homo sapiens
  misc_RNA (1)...(19): siRNA sense strand
ggacaugauuagaaauuug

SEQ ID NO: 830094 - RNA, 19 nt, Homo sapiens
  misc_RNA (1)...(19): siRNA sense strand
gagcacaaguuaucauuuc

SEQ ID NO: 830095 - RNA, 19 nt, Homo sapiens
  misc_RNA (1)...(19): siRNA sense strand
caaggaagccgaugaagaa

SEQ ID NO: 830096 - RNA, 19 nt, Homo sapiens
  misc_RNA (1)...(19): siRNA sense strand
caaagaggauccugauuca

SEQ ID NO: 830097 - RNA, 19 nt, Homo sapiens
  misc_RNA (1)...(19): siRNA sense strand
ggagauaagucaccucauc

SEQ ID NO: 830098 - RNA, 19 nt, Homo sapiens
  misc_RNA (1)...(19): siRNA sense strand
gaaugaaggccaaagaauu

SEQ ID NO: 830099 - RNA, 19 nt, Homo sapiens
  misc_RNA (1)...(19): siRNA sense strand
gauucuaucuuggacauua

SEQ ID NO: 830100 - RNA, 19 nt, Homo sapiens
  misc_RNA (1)...(19): siRNA sense strand
gaaagaagccgagagucua

SEQ ID NO: 830101 - RNA, 19 nt, Homo sapiens
  misc_RNA (1)...(19): siRNA sense strand
uaacauggcuaucucuuca

SEQ ID NO: 830102 - RNA, 19 nt, Homo sapiens
  misc_RNA (1)...(19): siRNA sense strand
gaaccagacuauuucguau

SEQ ID NO: 830103 - RNA, 19 nt, Homo sapiens
  misc_RNA (1)...(19): siRNA sense strand
agaaggagcugcaguacuu

SEQ ID NO: 830104 - RNA, 19 nt, Homo sapiens
  misc_RNA (1)...(19): siRNA sense strand
gcggaaacaucuugauuug

SEQ ID NO: 830105 - RNA, 19 nt, Homo sapiens
  misc_RNA (1)...(19): siRNA sense strand
uaagucaccucaucucauu

SEQ ID NO: 830106 - RNA, 19 nt, Homo sapiens
  misc_RNA (1)...(19): siRNA sense strand
gaugagacguacauucuga

SEQ ID NO: 830107 - RNA, 19 nt, Homo sapiens
  misc_RNA (1)...(19): siRNA sense strand
ggacagcccugagugaaga

SEQ ID NO: 830108 - RNA, 19 nt, Homo sapiens
  misc_RNA (1)...(19): siRNA sense strand
ucauacagcucaucaauuc

SEQ ID NO: 830109 - RNA, 19 nt, Homo sapiens
  misc_RNA (1)...(19): siRNA sense strand
ggagaacacugaccaagca

SEQ ID NO: 830110 - RNA, 19 nt, Homo sapiens
  misc_RNA (1)...(19): siRNA sense strand
caaagaagacuuacagguu

SEQ ID NO: 830111 - RNA, 19 nt, Homo sapiens
  misc_RNA (1)...(19): siRNA sense strand
gaucaucagucauaaucuu

SEQ ID NO: 830112 - RNA, 19 nt, Homo sapiens
  misc_RNA (1)...(19): siRNA sense strand
cacaagccgugaagauuua

SEQ ID NO: 830113 - RNA, 19 nt, Homo sapiens
  misc_RNA (1)...(19): siRNA sense strand
ggaaucgguuuguggaauu

SEQ ID NO: 830114 - RNA, 19 nt, Homo sapiens
  misc_RNA (1)...(19): siRNA sense strand
gcucaucugucaacacauu

SEQ ID NO: 830115 - RNA, 19 nt, Homo sapiens
  misc_RNA (1)...(19): siRNA sense strand
guaauaggauugcccauag

SEQ ID NO: 830116 - RNA, 19 nt, Homo sapiens
  misc_RNA (1)...(19): siRNA sense strand
gcggagaccuggauaaaca

SEQ ID NO: 830117 - RNA, 19 nt, Homo sapiens
  misc_RNA (1)...(19): siRNA sense strand
gaacuuagaagaaagaaag

SEQ ID NO: 830118 - RNA, 19 nt, Homo sapiens
  misc_RNA (1)...(19): siRNA sense strand
gauauccuguccuggguua

SEQ ID NO: 830119 - RNA, 19 nt, Homo sapiens
  misc_RNA (1)...(19): siRNA sense strand
gggaguacaagcucaauua

SEQ ID NO: 830120 - RNA, 19 nt, Homo sapiens
  misc_RNA (1)...(19): siRNA sense strand
gaaacaggaucaccuuugg

SEQ ID NO: 830121 - RNA, 19 nt, Homo sapiens
  misc_RNA (1)...(19): siRNA sense strand
gcccauagcuuugacaguu

SEQ ID NO: 830122 - RNA, 19 nt, Homo sapiens
  misc_RNA (1)...(19): siRNA sense strand
caagauugcucaguuucua

SEQ ID NO: 830123 - RNA, 19 nt, Homo sapiens
  misc_RNA (1)...(19): siRNA sense strand
gacaggagcuggagagaca

SEQ ID NO: 830124 - RNA, 19 nt, Homo sapiens
  misc_RNA (1)...(19): siRNA sense strand
ugaagaagguggagagaau

SEQ ID NO: 830125 - RNA, 19 nt, Homo sapiens
  misc_RNA (1)...(19): siRNA sense strand
ggaagaacagccugacuuu

SEQ ID NO: 830126 - RNA, 19 nt, Homo sapiens
  misc_RNA (1)...(19): siRNA sense strand
acaggacacucuuuaaauu

SEQ ID NO: 830127 - RNA, 19 nt, Homo sapiens
  misc_RNA (1)...(19): siRNA sense strand
ccaaauugaucaugaagug

SEQ ID NO: 830128 - RNA, 19 nt, Homo sapiens
  misc_RNA (1)...(19): siRNA sense strand
acacggauauucaggagua

SEQ ID NO: 830129 - RNA, 19 nt, Homo sapiens
  misc_RNA (1)...(19): siRNA sense strand
gaacaggagcuggcccuua

SEQ ID NO: 830130 - RNA, 19 nt, Homo sapiens
  misc_RNA (1)...(19): siRNA sense strand
aaaccaagauugcucaguu

SEQ ID NO: 830131 - RNA, 19 nt, Homo sapiens
  misc_RNA (1)...(19): siRNA sense strand
gagaauccuuuggagauaa

SEQ ID NO: 830132 - RNA, 19 nt, Homo sapiens
  misc_RNA (1)...(19): siRNA sense strand
ggaggaagaagacaauaaa

SEQ ID NO: 830133 - RNA, 19 nt, Homo sapiens
  misc_RNA (1)...(19): siRNA sense strand
ggaggaagaugaggaggaa

SEQ ID NO: 830134 - RNA, 19 nt, Homo sapiens
  misc_RNA (1)...(19): siRNA sense strand
gaagaugacaaacagauga

SEQ ID NO: 830135 - RNA, 19 nt, Homo sapiens
  misc_RNA (1)...(19): siRNA sense strand
gaaagcggccuguauagau

SEQ ID NO: 830136 - RNA, 19 nt, Homo sapiens
  misc_RNA (1)...(19): siRNA sense strand
ucaauuacgucaaggaaga

SEQ ID NO: 830137 - RNA, 19 nt, Homo sapiens
  misc_RNA (1)...(19): siRNA sense strand
ggaaccagacuauuucgua

SEQ ID NO: 830138 - RNA, 19 nt, Homo sapiens
  misc_RNA (1)...(19): siRNA sense strand
ugaggaagauucugaacuu

SEQ ID NO: 830139 - RNA, 19 nt, Homo sapiens
  misc_RNA (1)...(19): siRNA sense strand
agaagaggaugaugagaaa

SEQ ID NO: 830140 - RNA, 19 nt, Homo sapiens
  misc_RNA (1)...(19): siRNA sense strand
gaaagucuggaauauguaa

SEQ ID NO: 830141 - RNA, 19 nt, Homo sapiens
  misc_RNA (1)...(19): siRNA sense strand
gaagaaacaggccuuuaga

SEQ ID NO: 830142 - RNA, 19 nt, Homo sapiens
  misc_RNA (1)...(19): siRNA sense strand
guaaagcuaucacgaugga

SEQ ID NO: 830143 - RNA, 19 nt, Homo sapiens
  misc_RNA (1)...(19): siRNA sense strand
gaaagugccuugaauaaug

SEQ ID NO: 830144 - RNA, 19 nt, Homo sapiens
  misc_RNA (1)...(19): siRNA sense strand
ccaaagaacuuaagucaaa

SEQ ID NO: 830145 - RNA, 19 nt, Homo sapiens
  misc_RNA (1)...(19): siRNA sense strand
gaacagacuuccaccagaa

SEQ ID NO: 830146 - RNA, 19 nt, Homo sapiens
  misc_RNA (1)...(19): siRNA sense strand
ggaggcagcugucuuaaau

SEQ ID NO: 830147 - RNA, 19 nt, Homo sapiens
  misc_RNA (1)...(19): siRNA sense strand
gccaauaucugaugcauga

SEQ ID NO: 830148 - RNA, 19 nt, Homo sapiens
  misc_RNA (1)...(19): siRNA sense strand
gaacagaugacaaaguuau

SEQ ID NO: 830149 - RNA, 19 nt, Homo sapiens
  misc_RNA (1)...(19): siRNA sense strand
gcuaucagcucucuucaug

SEQ ID NO: 830150 - RNA, 19 nt, Homo sapiens
  misc_RNA (1)...(19): siRNA sense strand
uagaacagaugacaaaguu

SEQ ID NO: 830151 - RNA, 19 nt, Homo sapiens
  misc_RNA (1)...(19): siRNA sense strand
cagaagaaguggccaaaga

SEQ ID NO: 830152 - RNA, 19 nt, Homo sapiens
  misc_RNA (1)...(19): siRNA sense strand
gacgaagggugaaaucaaa

SEQ ID NO: 830153 - RNA, 19 nt, Homo sapiens
  misc_RNA (1)...(19): siRNA sense strand
agagagcaauuggauauua

SEQ ID NO: 830154 - RNA, 19 nt, Homo sapiens
  misc_RNA (1)...(19): siRNA sense strand
ggacaccucugacuuggau

SEQ ID NO: 830155 - RNA, 19 nt, Homo sapiens
  misc_RNA (1)...(19): siRNA sense strand
gaacagcuacagcaacauu

SEQ ID NO: 830156 - RNA, 19 nt, Homo sapiens
  misc_RNA (1)...(19): siRNA sense strand
gacaagaaccgcaggauga

SEQ ID NO: 830157 - RNA, 19 nt, Homo sapiens
  misc_RNA (1)...(19): siRNA sense strand
gcagcugucuuaaauaaag

SEQ ID NO: 830158 - RNA, 19 nt, Homo sapiens
  misc_RNA (1)...(19): siRNA sense strand
gaaaagaccccacucauug

SEQ ID NO: 830159 - RNA, 19 nt, Homo sapiens
  misc_RNA (1)...(19): siRNA sense strand
gaaucgaaguccucugcua

SEQ ID NO: 830160 - RNA, 19 nt, Homo sapiens
  misc_RNA (1)...(19): siRNA sense strand
gagagcaauuggauauuau

SEQ ID NO: 830161 - RNA, 19 nt, Homo sapiens
  misc_RNA (1)...(19): siRNA sense strand
ucaaagccguugcugacua

SEQ ID NO: 830162 - RNA, 19 nt, Homo sapiens
  misc_RNA (1)...(19): siRNA sense strand
uaagagagcaauuggauau

SEQ ID NO: 830163 - RNA, 19 nt, Homo sapiens
  misc_RNA (1)...(19): siRNA sense strand
cuaguaagccuaugucauu

SEQ ID NO: 830164 - RNA, 19 nt, Homo sapiens
  misc_RNA (1)...(19): siRNA sense strand
gaaguccucugcuaugucu

SEQ ID NO: 830165 - RNA, 19 nt, Homo sapiens
  misc_RNA (1)...(19): siRNA sense strand
gaguagacauggccuuguu

SEQ ID NO: 830166 - RNA, 19 nt, Homo sapiens
  misc_RNA (1)...(19): siRNA sense strand
aggcagcugucuuaaauaa

SEQ ID NO: 830167 - RNA, 19 nt, Homo sapiens
  misc_RNA (1)...(19): siRNA sense strand
ccaagcaacuggaccugaa

SEQ ID NO: 830168 - RNA, 19 nt, Homo sapiens
  misc_RNA (1)...(19): siRNA sense strand
caaagccguugcugacuau

SEQ ID NO: 830169 - RNA, 19 nt, Homo sapiens
  misc_RNA (1)...(19): siRNA sense strand
aaagugccuugaauaauga

SEQ ID NO: 830170 - RNA, 19 nt, Homo sapiens
  misc_RNA (1)...(19): siRNA sense strand
cagaacagcuacagcaaca

SEQ ID NO: 830171 - RNA, 19 nt, Homo sapiens
  misc_RNA (1)...(19): siRNA sense strand
gacauggccuuguuugcaa

SEQ ID NO: 830172 - RNA, 19 nt, Homo sapiens
  misc_RNA (1)...(19): siRNA sense strand
gcagaaagcagaaagaaaa

SEQ ID NO: 830173 - RNA, 19 nt, Homo sapiens
  misc_RNA (1)...(19): siRNA sense strand
gcaauuggauauuauucag

SEQ ID NO: 830174 - RNA, 19 nt, Homo sapiens
  misc_RNA (1)...(19): siRNA sense strand
gcacugugguuggccauug

SEQ ID NO: 830175 - RNA, 19 nt, Homo sapiens
  misc_RNA (1)...(19): siRNA sense strand
ccacuagccucacuaaagg

SEQ ID NO: 830176 - RNA, 19 nt, Homo sapiens
  misc_RNA (1)...(19): siRNA sense strand
uaaaugcacuaaguacaga

SEQ ID NO: 830177 - RNA, 19 nt, Homo sapiens
  misc_RNA (1)...(19): siRNA sense strand
gaacuuaagucaaaaucug

SEQ ID NO: 830178 - RNA, 19 nt, Homo sapiens
  misc_RNA (1)...(19): siRNA sense strand
gauuagaacauuuggaaga

SEQ ID NO: 830179 - RNA, 19 nt, Homo sapiens
  misc_RNA (1)...(19): siRNA sense strand
caccagugaucauuaaaga

SEQ ID NO: 830180 - RNA, 19 nt, Homo sapiens
  misc_RNA (1)...(19): siRNA sense strand
guaagccuaugucauuuca

SEQ ID NO: 830181 - RNA, 19 nt, Homo sapiens
  misc_RNA (1)...(19): siRNA sense strand
ugccauagcuaaagauguu

SEQ ID NO: 830182 - RNA, 19 nt, Homo sapiens
  misc_RNA (1)...(19): siRNA sense strand
ugacggagcagaacagcua

SEQ ID NO: 830183 - RNA, 19 nt, Homo sapiens
  misc_RNA (1)...(19): siRNA sense strand
gggaggcaaacuagaaaua

SEQ ID NO: 830184 - RNA, 19 nt, Homo sapiens
  misc_RNA (1)...(19): siRNA sense strand
ggaaaagucucaccacaag

SEQ ID NO: 830185 - RNA, 19 nt, Homo sapiens
  misc_RNA (1)...(19): siRNA sense strand
gggcagaccuccuuaugcu

SEQ ID NO: 830186 - RNA, 19 nt, Homo sapiens
  misc_RNA (1)...(19): siRNA sense strand
guaaggcgguagaggacaa

SEQ ID NO: 830187 - RNA, 19 nt, Homo sapiens
  misc_RNA (1)...(19): siRNA sense strand
gcauguuccuccucagaug

SEQ ID NO: 830188 - RNA, 19 nt, Homo sapiens
  misc_RNA (1)...(19): siRNA sense strand
ugaucaggcugccaaggua

SEQ ID NO: 830189 - RNA, 19 nt, Homo sapiens
  misc_RNA (1)...(19): siRNA sense strand
gaguuuacuugguccagaa

SEQ ID NO: 830190 - RNA, 19 nt, Homo sapiens
  misc_RNA (1)...(19): siRNA sense strand
gggcggaguccaaccuaua

SEQ ID NO: 830191 - RNA, 19 nt, Homo sapiens
  misc_RNA (1)...(19): siRNA sense strand
gccagcaccucucacuuug

SEQ ID NO: 830192 - RNA, 19 nt, Homo sapiens
  misc_RNA (1)...(19): siRNA sense strand
ggaagcacacgccgcugua

SEQ ID NO: 830193 - RNA, 19 nt, Homo sapiens
  misc_RNA (1)...(19): siRNA sense strand
ggaaaagaccccacucauu

SEQ ID NO: 830194 - RNA, 19 nt, Homo sapiens
  misc_RNA (1)...(19): siRNA sense strand
ggaacugguugaagcucuu

SEQ ID NO: 830195 - RNA, 19 nt, Homo sapiens
  misc_RNA (1)...(19): siRNA sense strand
gaagccagaugggcacugu

SEQ ID NO: 830196 - RNA, 19 nt, Homo sapiens
  misc_RNA (1)...(19): siRNA sense strand
cagcaccucucacuuugga

SEQ ID NO: 830197 - RNA, 19 nt, Homo sapiens
  misc_RNA (1)...(19): siRNA sense strand
ccagugaucauuaaagaau

SEQ ID NO: 830198 - RNA, 19 nt, Homo sapiens
  misc_RNA (1)...(19): siRNA sense strand
aaacugagagacuugcuuu

SEQ ID NO: 830199 - RNA, 19 nt, Homo sapiens
  misc_RNA (1)...(19): siRNA sense strand
cagcaacauuccucacgaa

SEQ ID NO: 830200 - RNA, 19 nt, Homo sapiens
  misc_RNA (1)...(19): siRNA sense strand
agaccucucugcaagcaaa

SEQ ID NO: 830201 - RNA, 19 nt, Homo sapiens
  misc_RNA (1)...(19): siRNA sense strand
agaaugggcagcuuacaaa

SEQ ID NO: 830202 - RNA, 19 nt, Homo sapiens
  misc_RNA (1)...(19): siRNA sense strand
guaugacucugauuaugca

SEQ ID NO: 830203 - RNA, 19 nt, Homo sapiens
  misc_RNA (1)...(19): siRNA sense strand
ggccaaagaacuuaaguca

SEQ ID NO: 830204 - RNA, 19 nt, Homo sapiens
  misc_RNA (1)...(19): siRNA sense strand
uaucagcucucuucaugag

SEQ ID NO: 830205 - RNA, 19 nt, Homo sapiens
  misc_RNA (1)...(19): siRNA sense strand
uuaaagaaugggcagcuua

SEQ ID NO: 830206 - RNA, 19 nt, Homo sapiens
  misc_RNA (1)...(19): siRNA sense strand
cagcuggucuugccaccuu

SEQ ID NO: 830207 - RNA, 19 nt, Homo sapiens
  misc_RNA (1)...(19): siRNA sense strand
gcauugaggaucaccauca

SEQ ID NO: 830208 - RNA, 19 nt, Homo sapiens
  misc_RNA (1)...(19): siRNA sense strand
gugauuagaacauuuggaa

SEQ ID NO: 830209 - RNA, 19 nt, Homo sapiens
  misc_RNA (1)...(19): siRNA sense strand
ggaguccuguuuaguuugg

SEQ ID NO: 830210 - RNA, 19 nt, Homo sapiens
  misc_RNA (1)...(19): siRNA sense strand
gcguaugacucugauuaug

SEQ ID NO: 830211 - RNA, 19 nt, Homo sapiens
  misc_RNA (1)...(19): siRNA sense strand
cugaaagugccuugaauaa

SEQ ID NO: 830212 - RNA, 19 nt, Homo sapiens
  misc_RNA (1)...(19): siRNA sense strand
caccugcccugcccuucua

SEQ ID NO: 830213 - RNA, 19 nt, Homo sapiens
  misc_RNA (1)...(19): siRNA sense strand
gcaggcgucuguggcuuug

SEQ ID NO: 830214 - RNA, 19 nt, Homo sapiens
  misc_RNA (1)...(19): siRNA sense strand
cauuucauccaccacauua

SEQ ID NO: 830215 - RNA, 19 nt, Homo sapiens
  misc_RNA (1)...(19): siRNA sense strand
acggaguccuguuuaguuu

SEQ ID NO: 830216 - RNA, 19 nt, Homo sapiens
  misc_RNA (1)...(19): siRNA sense strand
aagauuggcugggagaaga

SEQ ID NO: 830217 - RNA, 19 nt, Homo sapiens
  misc_RNA (1)...(19): siRNA sense strand
cauaucagcgggaacaaga

SEQ ID NO: 830218 - RNA, 19 nt, Homo sapiens
  misc_RNA (1)...(19): siRNA sense strand
ugacuuggaugccauagcu

SEQ ID NO: 830219 - RNA, 19 nt, Homo sapiens
  misc_RNA (1)...(19): siRNA sense strand
uaguaagccuaugucauuu

SEQ ID NO: 830220 - RNA, 19 nt, Homo sapiens
  misc_RNA (1)...(19): siRNA sense strand
gaagagguggaagguacua

SEQ ID NO: 830221 - RNA, 19 nt, Homo sapiens
  misc_RNA (1)...(19): siRNA sense strand
ucagggaggcaaacuagaa

SEQ ID NO: 830222 - RNA, 19 nt, Homo sapiens
  misc_RNA (1)...(19): siRNA sense strand
ggaccugaauccaaaucgu

SEQ ID NO: 830223 - RNA, 19 nt, Homo sapiens
  misc_RNA (1)...(19): siRNA sense strand
ucugaaagugccuugaaua

SEQ ID NO: 830224 - RNA, 19 nt, Homo sapiens
  misc_RNA (1)...(19): siRNA sense strand
ugacgaagggugaaaucaa

SEQ ID NO: 830225 - RNA, 19 nt, Homo sapiens
  misc_RNA (1)...(19): siRNA sense strand
ccucagaugcucaacauuc

SEQ ID NO: 830226 - RNA, 19 nt, Homo sapiens
  misc_RNA (1)...(19): siRNA sense strand
caacauccccuacuauuuc

SEQ ID NO: 830227 - RNA, 19 nt, Homo sapiens
  misc_RNA (1)...(19): siRNA sense strand
ucuggaggcagcugucuua

SEQ ID NO: 830228 - RNA, 19 nt, Homo sapiens
  misc_RNA (1)...(19): siRNA sense strand
ugaaagugccuugaauaau

SEQ ID NO: 830229 - RNA, 19 nt, Homo sapiens
  misc_RNA (1)...(19): siRNA sense strand
agaagaaguggccaaagaa

SEQ ID NO: 830230 - RNA, 19 nt, Homo sapiens
  misc_RNA (1)...(19): siRNA sense strand
ggaggcaaacuagaaauag

SEQ ID NO: 830231 - RNA, 19 nt, Homo sapiens
  misc_RNA (1)...(19): siRNA sense strand
gauauuauucagcgacuag

SEQ ID NO: 830232 - RNA, 19 nt, Homo sapiens
  misc_RNA (1)...(19): siRNA sense strand
ggauauuauucagcgacua

SEQ ID NO: 830233 - RNA, 19 nt, Homo sapiens
  misc_RNA (1)...(19): siRNA sense strand
gaccugaauccaaaucguu

SEQ ID NO: 830234 - RNA, 19 nt, Homo sapiens
  misc_RNA (1)...(19): siRNA sense strand
uugcugcucucuuaggaaa

SEQ ID NO: 830235 - RNA, 19 nt, Homo sapiens
  misc_RNA (1)...(19): siRNA sense strand
gaagaaguggccaaagaac

SEQ ID NO: 830236 - RNA, 19 nt, Homo sapiens
  misc_RNA (1)...(19): siRNA sense strand
cacagagcauugaggauca

SEQ ID NO: 830237 - RNA, 19 nt, Homo sapiens
  misc_RNA (1)...(19): siRNA sense strand
ccaguucgucaguauguuu

SEQ ID NO: 830238 - RNA, 19 nt, Homo sapiens
  misc_RNA (1)...(19): siRNA sense strand
gagcaauuggauauuauuc

SEQ ID NO: 830239 - RNA, 19 nt, Homo sapiens
  misc_RNA (1)...(19): siRNA sense strand
ucacuggaguuuacuuggu

SEQ ID NO: 830240 - RNA, 19 nt, Homo sapiens
  misc_RNA (1)...(19): siRNA sense strand
cuacuucccuggcucuucu

SEQ ID NO: 830241 - RNA, 19 nt, Homo sapiens
  misc_RNA (1)...(19): siRNA sense strand
ggugcucugcugcgucuua

SEQ ID NO: 830242 - RNA, 19 nt, Homo sapiens
  misc_RNA (1)...(19): siRNA sense strand
ggcagaaagcagaaagaaa

SEQ ID NO: 830243 - RNA, 19 nt, Homo sapiens
  misc_RNA (1)...(19): siRNA sense strand
ggaacaaaccucagacuaa

SEQ ID NO: 830244 - RNA, 19 nt, Homo sapiens
  misc_RNA (1)...(19): siRNA sense strand
gaacaaaccucagacuaag

SEQ ID NO: 830245 - RNA, 19 nt, Homo sapiens
  misc_RNA (1)...(19): siRNA sense strand
gaacauuuauccauacauc

SEQ ID NO: 830246 - RNA, 19 nt, Homo sapiens
  misc_RNA (1)...(19): siRNA sense strand
gggaaagccuugccagauu

SEQ ID NO: 830247 - RNA, 19 nt, Homo sapiens
  misc_RNA (1)...(19): siRNA sense strand
gcagguacgugggcaagua

SEQ ID NO: 830248 - RNA, 19 nt, Homo sapiens
  misc_RNA (1)...(19): siRNA sense strand
ggaaguacauuaucuacag

SEQ ID NO: 830249 - RNA, 19 nt, Homo sapiens
  misc_RNA (1)...(19): siRNA sense strand
ggaaagccuugccagauuc

SEQ ID NO: 830250 - RNA, 19 nt, Homo sapiens
  misc_RNA (1)...(19): siRNA sense strand
gcaaguauauucugcucau

SEQ ID NO: 830251 - RNA, 19 nt, Homo sapiens
  misc_RNA (1)...(19): siRNA sense strand
ggacaauucuuggauacug

SEQ ID NO: 830252 - RNA, 19 nt, Homo sapiens
  misc_RNA (1)...(19): siRNA sense strand
gcagggaaguacauuaucu

SEQ ID NO: 830253 - RNA, 19 nt, Homo sapiens
  misc_RNA (1)...(19): siRNA sense strand
gcacaaagaacauuuaucc

SEQ ID NO: 830254 - RNA, 19 nt, Homo sapiens
  misc_RNA (1)...(19): siRNA sense strand
caauaugguucccaagugu

SEQ ID NO: 830255 - RNA, 19 nt, Homo sapiens
  misc_RNA (1)...(19): siRNA sense strand
gauacugucuuggcagcua

SEQ ID NO: 830256 - RNA, 19 nt, Homo sapiens
  misc_RNA (1)...(19): siRNA sense strand
gaaguacauuaucuacagu

SEQ ID NO: 830257 - RNA, 19 nt, Homo sapiens
  misc_RNA (1)...(19): siRNA sense strand
gcaaagcacaaagaacauu

SEQ ID NO: 830258 - RNA, 19 nt, Homo sapiens
  misc_RNA (1)...(19): siRNA sense strand
ucaauaugguucccaagug

SEQ ID NO: 830259 - RNA, 19 nt, Homo sapiens
  misc_RNA (1)...(19): siRNA sense strand
uaacacacacacacacaaa

SEQ ID NO: 830260 - RNA, 19 nt, Homo sapiens
  misc_RNA (1)...(19): siRNA sense strand
caaagcacaaagaacauuu

SEQ ID NO: 830261 - RNA, 19 nt, Homo sapiens
  misc_RNA (1)...(19): siRNA sense strand
gucauuggcuauguacuuu

SEQ ID NO: 830262 - RNA, 19 nt, Homo sapiens
  misc_RNA (1)...(19): siRNA sense strand
cguggacaauucuuggaua

SEQ ID NO: 830263 - RNA, 19 nt, Homo sapiens
  misc_RNA (1)...(19): siRNA sense strand
gggaccacguggacaauuc

SEQ ID NO: 830264 - RNA, 19 nt, Homo sapiens
  misc_RNA (1)...(19): siRNA sense strand
uacaccaucuauuccauaa

SEQ ID NO: 830265 - RNA, 19 nt, Homo sapiens
  misc_RNA (1)...(19): siRNA sense strand
gacaauucuuggauacugu

SEQ ID NO: 830266 - RNA, 19 nt, Homo sapiens
  misc_RNA (1)...(19): siRNA sense strand
uacauuaucuacagucaca

SEQ ID NO: 830267 - RNA, 19 nt, Homo sapiens
  misc_RNA (1)...(19): siRNA sense strand
ggucauuggcuauguacuu

SEQ ID NO: 830268 - RNA, 19 nt, Homo sapiens
  misc_RNA (1)...(19): siRNA sense strand
ccaaggaacaaaccucaga

SEQ ID NO: 830269 - RNA, 19 nt, Homo sapiens
  misc_RNA (1)...(19): siRNA sense strand
acacacacacacacaaauu

SEQ ID NO: 830270 - RNA, 19 nt, Homo sapiens
  misc_RNA (1)...(19): siRNA sense strand
uaacuacucaaccaaggaa

SEQ ID NO: 830271 - RNA, 19 nt, Homo sapiens
  misc_RNA (1)...(19): siRNA sense strand
caaauucagguagcaggua

SEQ ID NO: 830272 - RNA, 19 nt, Homo sapiens
  misc_RNA (1)...(19): siRNA sense strand
gugcagggaaguacauuau

SEQ ID NO: 830273 - RNA, 19 nt, Homo sapiens
  misc_RNA (1)...(19): siRNA sense strand
cagauucagacacauauau

SEQ ID NO: 830274 - RNA, 19 nt, Homo sapiens
  misc_RNA (1)...(19): siRNA sense strand
guccauguccacagaguaa

SEQ ID NO: 830275 - RNA, 19 nt, Homo sapiens
  misc_RNA (1)...(19): siRNA sense strand
guacgugggcaaguauauu

SEQ ID NO: 830276 - RNA, 19 nt, Homo sapiens
  misc_RNA (1)...(19): siRNA sense strand
acaauuuccuaaccagcaa

SEQ ID NO: 830277 - RNA, 19 nt, Homo sapiens
  misc_RNA (1)...(19): siRNA sense strand
gaaagccuugccagauuca

SEQ ID NO: 830278 - RNA, 19 nt, Homo sapiens
  misc_RNA (1)...(19): siRNA sense strand
guaacacacacacacacaa

SEQ ID NO: 830279 - RNA, 19 nt, Homo sapiens
  misc_RNA (1)...(19): siRNA sense strand
cauuggcuauguacuuugu

SEQ ID NO: 830280 - RNA, 19 nt, Homo sapiens
  misc_RNA (1)...(19): siRNA sense strand
acacacacaaauucaggua

SEQ ID NO: 830281 - RNA, 19 nt, Homo sapiens
  misc_RNA (1)...(19): siRNA sense strand
cagggaaguacauuaucua

SEQ ID NO: 830282 - RNA, 19 nt, Homo sapiens
  misc_RNA (1)...(19): siRNA sense strand
ccagauucagacacauaua

SEQ ID NO: 830283 - RNA, 19 nt, Homo sapiens
  misc_RNA (1)...(19): siRNA sense strand
cuauguccauguccacaga

SEQ ID NO: 830284 - RNA, 19 nt, Homo sapiens
  misc_RNA (1)...(19): siRNA sense strand
ccaccugucucuggcauac

SEQ ID NO: 830285 - RNA, 19 nt, Homo sapiens
  misc_RNA (1)...(19): siRNA sense strand
acaaaccucagacuaagug

SEQ ID NO: 830286 - RNA, 19 nt, Homo sapiens
  misc_RNA (1)...(19): siRNA sense strand
auauucugcucaucaaaug

SEQ ID NO: 830287 - RNA, 19 nt, Homo sapiens
  misc_RNA (1)...(19): siRNA sense strand
ccagggaccacguggacaa

SEQ ID NO: 830288 - RNA, 19 nt, Homo sapiens
  misc_RNA (1)...(19): siRNA sense strand
auucuuggauacugucuug

SEQ ID NO: 830289 - RNA, 19 nt, Homo sapiens
  misc_RNA (1)...(19): siRNA sense strand
guggacaauucuuggauac

SEQ ID NO: 830290 - RNA, 19 nt, Homo sapiens
  misc_RNA (1)...(19): siRNA sense strand
guaacuacucaaccaagga

SEQ ID NO: 830291 - RNA, 19 nt, Homo sapiens
  misc_RNA (1)...(19): siRNA sense strand
aguauauucugcucaucaa

SEQ ID NO: 830292 - RNA, 19 nt, Homo sapiens
  misc_RNA (1)...(19): siRNA sense strand
acacacacacacaaauuca

SEQ ID NO: 830293 - RNA, 19 nt, Homo sapiens
  misc_RNA (1)...(19): siRNA sense strand
cauacaccaucuauuccau

SEQ ID NO: 830294 - RNA, 19 nt, Homo sapiens
  misc_RNA (1)...(19): siRNA sense strand
gggaaguacauuaucuaca

SEQ ID NO: 830295 - RNA, 19 nt, Homo sapiens
  misc_RNA (1)...(19): siRNA sense strand
cauuaucuacagucacaaa

SEQ ID NO: 830296 - RNA, 19 nt, Homo sapiens
  misc_RNA (1)...(19): siRNA sense strand
augcaaagcacaaagaaca

SEQ ID NO: 830297 - RNA, 19 nt, Homo sapiens
  misc_RNA (1)...(19): siRNA sense strand
auacaccaucuauuccaua

SEQ ID NO: 830298 - RNA, 19 nt, Homo sapiens
  misc_RNA (1)...(19): siRNA sense strand
gguacgugggcaaguauau

SEQ ID NO: 830299 - RNA, 19 nt, Homo sapiens
  misc_RNA (1)...(19): siRNA sense strand
aggaacaaaccucagacua

SEQ ID NO: 830300 - RNA, 19 nt, Homo sapiens
  misc_RNA (1)...(19): siRNA sense strand
gauucagacacauauauac

SEQ ID NO: 830301 - RNA, 19 nt, Homo sapiens
  misc_RNA (1)...(19): siRNA sense strand
ugccagauucagacacaua

SEQ ID NO: 830302 - RNA, 19 nt, Homo sapiens
  misc_RNA (1)...(19): siRNA sense strand
caaguauauucugcucauc

SEQ ID NO: 830303 - RNA, 19 nt, Homo sapiens
  misc_RNA (1)...(19): siRNA sense strand
gccagauucagacacauau

SEQ ID NO: 830304 - RNA, 19 nt, Homo sapiens
  misc_RNA (1)...(19): siRNA sense strand
ugucuuggcagcuaugugu

SEQ ID NO: 830305 - RNA, 19 nt, Homo sapiens
  misc_RNA (1)...(19): siRNA sense strand
gaacacaccugccaaguua

SEQ ID NO: 830306 - RNA, 19 nt, Homo sapiens
  misc_RNA (1)...(19): siRNA sense strand
uagcagagcugaugguuua

SEQ ID NO: 830307 - RNA, 19 nt, Homo sapiens
  misc_RNA (1)...(19): siRNA sense strand
uaagagagcugcuuccuuu

SEQ ID NO: 830308 - RNA, 19 nt, Homo sapiens
  misc_RNA (1)...(19): siRNA sense strand
gcaaagauguccugccaaa

SEQ ID NO: 830309 - RNA, 19 nt, Homo sapiens
  misc_RNA (1)...(19): siRNA sense strand
ggaaggaauuggccaguuu

SEQ ID NO: 830310 - RNA, 19 nt, Homo sapiens
  misc_RNA (1)...(19): siRNA sense strand
gagaggagcugaugaugga

SEQ ID NO: 830311 - RNA, 19 nt, Homo sapiens
  misc_RNA (1)...(19): siRNA sense strand
gaagcaagcugccaugauc

SEQ ID NO: 830312 - RNA, 19 nt, Homo sapiens
  misc_RNA (1)...(19): siRNA sense strand
gcaauaaaguucugagaca

SEQ ID NO: 830313 - RNA, 19 nt, Homo sapiens
  misc_RNA (1)...(19): siRNA sense strand
gcugaugccugcuugauuu

SEQ ID NO: 830314 - RNA, 19 nt, Homo sapiens
  misc_RNA (1)...(19): siRNA sense strand
gcaaauaugcauucaguug

SEQ ID NO: 830315 - RNA, 19 nt, Homo sapiens
  misc_RNA (1)...(19): siRNA sense strand
ucaaacagcccgugaaauu

SEQ ID NO: 830316 - RNA, 19 nt, Homo sapiens
  misc_RNA (1)...(19): siRNA sense strand
ugaaugggaucucuuuaaa

SEQ ID NO: 830317 - RNA, 19 nt, Homo sapiens
  misc_RNA (1)...(19): siRNA sense strand
uaaacaaggucacagcauu

SEQ ID NO: 830318 - RNA, 19 nt, Homo sapiens
  misc_RNA (1)...(19): siRNA sense strand
gaacugagagagauuguga

SEQ ID NO: 830319 - RNA, 19 nt, Homo sapiens
  misc_RNA (1)...(19): siRNA sense strand
caaguugacuauccuuauu

SEQ ID NO: 830320 - RNA, 19 nt, Homo sapiens
  misc_RNA (1)...(19): siRNA sense strand
caacaugugugaaagaaca

SEQ ID NO: 830321 - RNA, 19 nt, Homo sapiens
  misc_RNA (1)...(19): siRNA sense strand
gaagagggaagucauuuga

SEQ ID NO: 830322 - RNA, 19 nt, Homo sapiens
  misc_RNA (1)...(19): siRNA sense strand
cuaaugaacucccaagaug

SEQ ID NO: 830323 - RNA, 19 nt, Homo sapiens
  misc_RNA (1)...(19): siRNA sense strand
ggcaaauucucuacucuuu

SEQ ID NO: 830324 - RNA, 19 nt, Homo sapiens
  misc_RNA (1)...(19): siRNA sense strand
gaacucugaugaucugaau

SEQ ID NO: 830325 - RNA, 19 nt, Homo sapiens
  misc_RNA (1)...(19): siRNA sense strand
ugaacuaccucaaagagaa

SEQ ID NO: 830326 - RNA, 19 nt, Homo sapiens
  misc_RNA (1)...(19): siRNA sense strand
ggacuuagcacauuaaugc

SEQ ID NO: 830327 - RNA, 19 nt, Homo sapiens
  misc_RNA (1)...(19): siRNA sense strand
gcacugaccaggcuuauca

SEQ ID NO: 830328 - RNA, 19 nt, Homo sapiens
  misc_RNA (1)...(19): siRNA sense strand
acagugagcuucauuaugg

SEQ ID NO: 830329 - RNA, 19 nt, Homo sapiens
  misc_RNA (1)...(19): siRNA sense strand
caaacagcccgugaaauua

SEQ ID NO: 830330 - RNA, 19 nt, Homo sapiens
  misc_RNA (1)...(19): siRNA sense strand
ccaaagcacucauccaagu

SEQ ID NO: 830331 - RNA, 19 nt, Homo sapiens
  misc_RNA (1)...(19): siRNA sense strand
ggaggccuuuggugucuua

SEQ ID NO: 830332 - RNA, 19 nt, Homo sapiens
  misc_RNA (1)...(19): siRNA sense strand
ugagagagauugugacauc

SEQ ID NO: 830333 - RNA, 19 nt, Homo sapiens
  misc_RNA (1)...(19): siRNA sense strand
ccagggacuuagcacauua

SEQ ID NO: 830334 - RNA, 19 nt, Homo sapiens
  misc_RNA (1)...(19): siRNA sense strand
caggagaaaucaaagcaaa

SEQ ID NO: 830335 - RNA, 19 nt, Homo sapiens
  misc_RNA (1)...(19): siRNA sense strand
ucucaaagguccaagcaaa

SEQ ID NO: 830336 - RNA, 19 nt, Homo sapiens
  misc_RNA (1)...(19): siRNA sense strand
aguaacaucuggcaaauau

SEQ ID NO: 830337 - RNA, 19 nt, Homo sapiens
  misc_RNA (1)...(19): siRNA sense strand
ggagaaaucaaagcaaauu

SEQ ID NO: 830338 - RNA, 19 nt, Homo sapiens
  misc_RNA (1)...(19): siRNA sense strand
aggauuugcuguaucuuua

SEQ ID NO: 830339 - RNA, 19 nt, Homo sapiens
  misc_RNA (1)...(19): siRNA sense strand
gaauuggccaguuugcaua

SEQ ID NO: 830340 - RNA, 19 nt, Homo sapiens
  misc_RNA (1)...(19): siRNA sense strand
gagcaaaguuuaggagaag

SEQ ID NO: 830341 - RNA, 19 nt, Homo sapiens
  misc_RNA (1)...(19): siRNA sense strand
ugcuguaucuuuacuguua

SEQ ID NO: 830342 - RNA, 19 nt, Homo sapiens
  misc_RNA (1)...(19): siRNA sense strand
gaauacacaagucaagaaa

SEQ ID NO: 830343 - RNA, 19 nt, Homo sapiens
  misc_RNA (1)...(19): siRNA sense strand
ugacaucuauacuugaaga

SEQ ID NO: 830344 - RNA, 19 nt, Homo sapiens
  misc_RNA (1)...(19): siRNA sense strand
gggauuuguuugccucuuu

SEQ ID NO: 830345 - RNA, 19 nt, Homo sapiens
  misc_RNA (1)...(19): siRNA sense strand
cagaagaacugagagagau

SEQ ID NO: 830346 - RNA, 19 nt, Homo sapiens
  misc_RNA (1)...(19): siRNA sense strand
caccacagcugaagacauc

SEQ ID NO: 830347 - RNA, 19 nt, Homo sapiens
  misc_RNA (1)...(19): siRNA sense strand
aaugggaucucuuuaaauc

SEQ ID NO: 830348 - RNA, 19 nt, Homo sapiens
  misc_RNA (1)...(19): siRNA sense strand
cauccaaguucuagagcua

SEQ ID NO: 830349 - RNA, 19 nt, Homo sapiens
  misc_RNA (1)...(19): siRNA sense strand
gagaagagggaagucauuu

SEQ ID NO: 830350 - RNA, 19 nt, Homo sapiens
  misc_RNA (1)...(19): siRNA sense strand
uuaccugucuugaaacuga

SEQ ID NO: 830351 - RNA, 19 nt, Homo sapiens
  misc_RNA (1)...(19): siRNA sense strand
ggagauauuuccgcuucuu

SEQ ID NO: 830352 - RNA, 19 nt, Homo sapiens
  misc_RNA (1)...(19): siRNA sense strand
ggaagcagauuggguaaaa

SEQ ID NO: 830353 - RNA, 19 nt, Homo sapiens
  misc_RNA (1)...(19): siRNA sense strand
ucacauuuguccuuucuuc

SEQ ID NO: 830354 - RNA, 19 nt, Homo sapiens
  misc_RNA (1)...(19): siRNA sense strand
ugucguaucuucccuaaag

SEQ ID NO: 830355 - RNA, 19 nt, Homo sapiens
  misc_RNA (1)...(19): siRNA sense strand
gaguugaaauuggcuguga

SEQ ID NO: 830356 - RNA, 19 nt, Homo sapiens
  misc_RNA (1)...(19): siRNA sense strand
ccaaaguggaugagaauga

SEQ ID NO: 830357 - RNA, 19 nt, Homo sapiens
  misc_RNA (1)...(19): siRNA sense strand
ggagaagagggaagucauu

SEQ ID NO: 830358 - RNA, 19 nt, Homo sapiens
  misc_RNA (1)...(19): siRNA sense strand
uggcagaugugguucaaga

SEQ ID NO: 830359 - RNA, 19 nt, Homo sapiens
  misc_RNA (1)...(19): siRNA sense strand
gugaaugggaucucuuuaa

SEQ ID NO: 830360 - RNA, 19 nt, Homo sapiens
  misc_RNA (1)...(19): siRNA sense strand
agacguggcugacaucaag

SEQ ID NO: 830361 - RNA, 19 nt, Homo sapiens
  misc_RNA (1)...(19): siRNA sense strand
cagaacaggagaaaucaaa

SEQ ID NO: 830362 - RNA, 19 nt, Homo sapiens
  misc_RNA (1)...(19): siRNA sense strand
cugaagacaucgaacaguu

SEQ ID NO: 830363 - RNA, 19 nt, Homo sapiens
  misc_RNA (1)...(19): siRNA sense strand
gggacaucauucugacuuu

SEQ ID NO: 830364 - RNA, 19 nt, Homo sapiens
  misc_RNA (1)...(19): siRNA sense strand
ucacaaagacccagacagu

SEQ ID NO: 830365 - RNA, 19 nt, Homo sapiens
  misc_RNA (1)...(19): siRNA sense strand
gaagaacugagagagauug

SEQ ID NO: 830366 - RNA, 19 nt, Homo sapiens
  misc_RNA (1)...(19): siRNA sense strand
caagcugccaugauccuua

SEQ ID NO: 830367 - RNA, 19 nt, Homo sapiens
  misc_RNA (1)...(19): siRNA sense strand
ucucuacucuuuccuuguu

SEQ ID NO: 830368 - RNA, 19 nt, Homo sapiens
  misc_RNA (1)...(19): siRNA sense strand
uuugucagcuacuugguua

SEQ ID NO: 830369 - RNA, 19 nt, Homo sapiens
  misc_RNA (1)...(19): siRNA sense strand
ggaaaagacuucuguuugc

SEQ ID NO: 830370 - RNA, 19 nt, Homo sapiens
  misc_RNA (1)...(19): siRNA sense strand
uugguuaccugucuugaaa

SEQ ID NO: 830371 - RNA, 19 nt, Homo sapiens
  misc_RNA (1)...(19): siRNA sense strand
gaagaauacacaagucaag

SEQ ID NO: 830372 - RNA, 19 nt, Homo sapiens
  misc_RNA (1)...(19): siRNA sense strand
gcuuguggaucacuuuaug

SEQ ID NO: 830373 - RNA, 19 nt, Homo sapiens
  misc_RNA (1)...(19): siRNA sense strand
ucacagcauugucguaucu

SEQ ID NO: 830374 - RNA, 19 nt, Homo sapiens
  misc_RNA (1)...(19): siRNA sense strand
uucaggaacuucagcagua

SEQ ID NO: 830375 - RNA, 19 nt, Homo sapiens
  misc_RNA (1)...(19): siRNA sense strand
ccucuucccucugcgauuu

SEQ ID NO: 830376 - RNA, 19 nt, Homo sapiens
  misc_RNA (1)...(19): siRNA sense strand
augcuaaccugcuuccuuu

SEQ ID NO: 830377 - RNA, 19 nt, Homo sapiens
  misc_RNA (1)...(19): siRNA sense strand
ggaauuggccaguuugcau

SEQ ID NO: 830378 - RNA, 19 nt, Homo sapiens
  misc_RNA (1)...(19): siRNA sense strand
gaaggaauuggccaguuug

SEQ ID NO: 830379 - RNA, 19 nt, Homo sapiens
  misc_RNA (1)...(19): siRNA sense strand
uggcaaauaugcauucagu

SEQ ID NO: 830380 - RNA, 19 nt, Homo sapiens
  misc_RNA (1)...(19): siRNA sense strand
gguugaggaucuucacgaa

SEQ ID NO: 830381 - RNA, 19 nt, Homo sapiens
  misc_RNA (1)...(19): siRNA sense strand
gauccuuaaugaacugguu

SEQ ID NO: 830382 - RNA, 19 nt, Homo sapiens
  misc_RNA (1)...(19): siRNA sense strand
guuacuugguuaucugaaa

SEQ ID NO: 830383 - RNA, 19 nt, Homo sapiens
  misc_RNA (1)...(19): siRNA sense strand
caaauucucuacucuuucc

SEQ ID NO: 830384 - RNA, 19 nt, Homo sapiens
  misc_RNA (1)...(19): siRNA sense strand
ugagaguccugaaauccaa

SEQ ID NO: 830385 - RNA, 19 nt, Homo sapiens
  misc_RNA (1)...(19): siRNA sense strand
gcugugauccagggacuua

SEQ ID NO: 830386 - RNA, 19 nt, Homo sapiens
  misc_RNA (1)...(19): siRNA sense strand
gcagaugugguucaagaug

SEQ ID NO: 830387 - RNA, 19 nt, Homo sapiens
  misc_RNA (1)...(19): siRNA sense strand
gaaugggaucucuuuaaau

SEQ ID NO: 830388 - RNA, 19 nt, Homo sapiens
  misc_RNA (1)...(19): siRNA sense strand
aaauaugcauucaguugga

SEQ ID NO: 830389 - RNA, 19 nt, Homo sapiens
  misc_RNA (1)...(19): siRNA sense strand
ugacagugcccuucaggaa

SEQ ID NO: 830390 - RNA, 19 nt, Homo sapiens
  misc_RNA (1)...(19): siRNA sense strand
gaggcagguuugucagcua

SEQ ID NO: 830391 - RNA, 19 nt, Homo sapiens
  misc_RNA (1)...(19): siRNA sense strand
uaucacaggagacuuuaaa

SEQ ID NO: 830392 - RNA, 19 nt, Homo sapiens
  misc_RNA (1)...(19): siRNA sense strand
ugaagaagaggaacaguca

SEQ ID NO: 830393 - RNA, 19 nt, Homo sapiens
  misc_RNA (1)...(19): siRNA sense strand
cagaugugguucaagaugu

SEQ ID NO: 830394 - RNA, 19 nt, Homo sapiens
  misc_RNA (1)...(19): siRNA sense strand
aagcugccaugauccuuaa

SEQ ID NO: 830395 - RNA, 19 nt, Homo sapiens
  misc_RNA (1)...(19): siRNA sense strand
ucagcuacuugguuauuau

SEQ ID NO: 830396 - RNA, 19 nt, Homo sapiens
  misc_RNA (1)...(19): siRNA sense strand
gucagcuacuugguuauua

SEQ ID NO: 830397 - RNA, 19 nt, Homo sapiens
  misc_RNA (1)...(19): siRNA sense strand
gacaaguugacuauccuua

SEQ ID NO: 830398 - RNA, 19 nt, Homo sapiens
  misc_RNA (1)...(19): siRNA sense strand
cauuauggcugaugaacag

SEQ ID NO: 830399 - RNA, 19 nt, Homo sapiens
  misc_RNA (1)...(19): siRNA sense strand
agagcaaaguuuaggagaa

SEQ ID NO: 830400 - RNA, 19 nt, Homo sapiens
  misc_RNA (1)...(19): siRNA sense strand
gagagcugcuuccuuuguc

SEQ ID NO: 830401 - RNA, 19 nt, Homo sapiens
  misc_RNA (1)...(19): siRNA sense strand
caaguuacaucuuuucuag

SEQ ID NO: 830402 - RNA, 19 nt, Homo sapiens
  misc_RNA (1)...(19): siRNA sense strand
cuucuucacugaugagaga

SEQ ID NO: 830403 - RNA, 19 nt, Homo sapiens
  misc_RNA (1)...(19): siRNA sense strand
acaaagcccucgcugacau

SEQ ID NO: 830404 - RNA, 19 nt, Homo sapiens
  misc_RNA (1)...(19): siRNA sense strand
caauaaaguucugagacau

SEQ ID NO: 830405 - RNA, 19 nt, Homo sapiens
  misc_RNA (1)...(19): siRNA sense strand
caacgaagcucuggaagaa

SEQ ID NO: 830406 - RNA, 19 nt, Homo sapiens
  misc_RNA (1)...(19): siRNA sense strand
guccuaagcuucaucuuua

SEQ ID NO: 830407 - RNA, 19 nt, Homo sapiens
  misc_RNA (1)...(19): siRNA sense strand
caaggaagcuggugcaguu

SEQ ID NO: 830408 - RNA, 19 nt, Homo sapiens
  misc_RNA (1)...(19): siRNA sense strand
gcacacaccuacauucugu

SEQ ID NO: 830409 - RNA, 19 nt, Homo sapiens
  misc_RNA (1)...(19): siRNA sense strand
guaaaccaguggaguauga

SEQ ID NO: 830410 - RNA, 19 nt, Homo sapiens
  misc_RNA (1)...(19): siRNA sense strand
gaagggagauggaagaaac

SEQ ID NO: 830411 - RNA, 19 nt, Homo sapiens
  misc_RNA (1)...(19): siRNA sense strand
ggaagaaacugaggagauc

SEQ ID NO: 830412 - RNA, 19 nt, Homo sapiens
  misc_RNA (1)...(19): siRNA sense strand
gaaaugcgggaauauauug

SEQ ID NO: 830413 - RNA, 19 nt, Homo sapiens
  misc_RNA (1)...(19): siRNA sense strand
ggaaaccucuaagaugaaa

SEQ ID NO: 830414 - RNA, 19 nt, Homo sapiens
  misc_RNA (1)...(19): siRNA sense strand
gcagaaggcccuauagaau

SEQ ID NO: 830415 - RNA, 19 nt, Homo sapiens
  misc_RNA (1)...(19): siRNA sense strand
caaccaguuuccugagaua

SEQ ID NO: 830416 - RNA, 19 nt, Homo sapiens
  misc_RNA (1)...(19): siRNA sense strand
ggagaaagcaugugauuac

SEQ ID NO: 830417 - RNA, 19 nt, Homo sapiens
  misc_RNA (1)...(19): siRNA sense strand
ggacagaacuagugguacu

SEQ ID NO: 830418 - RNA, 19 nt, Homo sapiens
  misc_RNA (1)...(19): siRNA sense strand
gaugaaagccuugcgauau

SEQ ID NO: 830419 - RNA, 19 nt, Homo sapiens
  misc_RNA (1)...(19): siRNA sense strand
gaagcuccgugcugccuaa

SEQ ID NO: 830420 - RNA, 19 nt, Homo sapiens
  misc_RNA (1)...(19): siRNA sense strand
ggaagcuggugcaguuauu

SEQ ID NO: 830421 - RNA, 19 nt, Homo sapiens
  misc_RNA (1)...(19): siRNA sense strand
gaaaggaauucuguacuac

SEQ ID NO: 830422 - RNA, 19 nt, Homo sapiens
  misc_RNA (1)...(19): siRNA sense strand
caacuaagcugccuauacc

SEQ ID NO: 830423 - RNA, 19 nt, Homo sapiens
  misc_RNA (1)...(19): siRNA sense strand
gcgggaauauauuguuaaa

SEQ ID NO: 830424 - RNA, 19 nt, Homo sapiens
  misc_RNA (1)...(19): siRNA sense strand
ccaaggaggcugagauuug

SEQ ID NO: 830425 - RNA, 19 nt, Homo sapiens
  misc_RNA (1)...(19): siRNA sense strand
acaccuacauucuguuaaa

SEQ ID NO: 830426 - RNA, 19 nt, Homo sapiens
  misc_RNA (1)...(19): siRNA sense strand
gggaggcaauggaagauga

SEQ ID NO: 830427 - RNA, 19 nt, Homo sapiens
  misc_RNA (1)...(19): siRNA sense strand
cagaaggcccuauagaauu

SEQ ID NO: 830428 - RNA, 19 nt, Homo sapiens
  misc_RNA (1)...(19): siRNA sense strand
uuggaaaccucuaagauga

SEQ ID NO: 830429 - RNA, 19 nt, Homo sapiens
  misc_RNA (1)...(19): siRNA sense strand
gcacauuguuuagcucuag

SEQ ID NO: 830430 - RNA, 19 nt, Homo sapiens
  misc_RNA (1)...(19): siRNA sense strand
agaaggcccuauagaauuc

SEQ ID NO: 830431 - RNA, 19 nt, Homo sapiens
  misc_RNA (1)...(19): siRNA sense strand
gcaaccaguuuccugagau

SEQ ID NO: 830432 - RNA, 19 nt, Homo sapiens
  misc_RNA (1)...(19): siRNA sense strand
aaacaggccuggcaacaac

SEQ ID NO: 830433 - RNA, 19 nt, Homo sapiens
  misc_RNA (1)...(19): siRNA sense strand
gguccuaagcuucaucuuu

SEQ ID NO: 830434 - RNA, 19 nt, Homo sapiens
  misc_RNA (1)...(19): siRNA sense strand
ggcccgagcacauuguuua

SEQ ID NO: 830435 - RNA, 19 nt, Homo sapiens
  misc_RNA (1)...(19): siRNA sense strand
gugauccagugcaauauga

SEQ ID NO: 830436 - RNA, 19 nt, Homo sapiens
  misc_RNA (1)...(19): siRNA sense strand
cuagaaaccaccaagauga

SEQ ID NO: 830437 - RNA, 19 nt, Homo sapiens
  misc_RNA (1)...(19): siRNA sense strand
caaggaggcugagauuugg

SEQ ID NO: 830438 - RNA, 19 nt, Homo sapiens
  misc_RNA (1)...(19): siRNA sense strand
gcacuuccguacugccaau

SEQ ID NO: 830439 - RNA, 19 nt, Homo sapiens
  misc_RNA (1)...(19): siRNA sense strand
guacagggaggcaauggaa

SEQ ID NO: 830440 - RNA, 19 nt, Homo sapiens
  misc_RNA (1)...(19): siRNA sense strand
ugacagugauccagugcaa

SEQ ID NO: 830441 - RNA, 19 nt, Homo sapiens
  misc_RNA (1)...(19): siRNA sense strand
gaacuagugguacuugauc

SEQ ID NO: 830442 - RNA, 19 nt, Homo sapiens
  misc_RNA (1)...(19): siRNA sense strand
auucagagguuuccagcua

SEQ ID NO: 830443 - RNA, 19 nt, Homo sapiens
  misc_RNA (1)...(19): siRNA sense strand
uggauuggccagagaaaua

SEQ ID NO: 830444 - RNA, 19 nt, Homo sapiens
  misc_RNA (1)...(19): siRNA sense strand
ugaaggaucagagcaagua

SEQ ID NO: 830445 - RNA, 19 nt, Homo sapiens
  misc_RNA (1)...(19): siRNA sense strand
gaauaucgcaaccaguuuc

SEQ ID NO: 830446 - RNA, 19 nt, Homo sapiens
  misc_RNA (1)...(19): siRNA sense strand
acagugauccagugcaaua

SEQ ID NO: 830447 - RNA, 19 nt, Homo sapiens
  misc_RNA (1)...(19): siRNA sense strand
gggagaaagcaugugauua

SEQ ID NO: 830448 - RNA, 19 nt, Homo sapiens
  misc_RNA (1)...(19): siRNA sense strand
gugauuaccugcagauacu

SEQ ID NO: 830449 - RNA, 19 nt, Homo sapiens
  misc_RNA (1)...(19): siRNA sense strand
gauucuaggccaaauauuc

SEQ ID NO: 830450 - RNA, 19 nt, Homo sapiens
  misc_RNA (1)...(19): siRNA sense strand
acgaagcucuggaagaaga

SEQ ID NO: 830451 - RNA, 19 nt, Homo sapiens
  misc_RNA (1)...(19): siRNA sense strand
ugaaaugcgggaauauauu

SEQ ID NO: 830452 - RNA, 19 nt, Homo sapiens
  misc_RNA (1)...(19): siRNA sense strand
gcaauaugaguuuguaugg

SEQ ID NO: 830453 - RNA, 19 nt, Homo sapiens
  misc_RNA (1)...(19): siRNA sense strand
ccaacuccauuaguauuau

SEQ ID NO: 830454 - RNA, 19 nt, Homo sapiens
  misc_RNA (1)...(19): siRNA sense strand
caacuccauuaguauuaug

SEQ ID NO: 830455 - RNA, 19 nt, Homo sapiens
  misc_RNA (1)...(19): siRNA sense strand
gacaaagcaucuccuuggu

SEQ ID NO: 830456 - RNA, 19 nt, Homo sapiens
  misc_RNA (1)...(19): siRNA sense strand
gaagaugaggccaauagag

SEQ ID NO: 830457 - RNA, 19 nt, Homo sapiens
  misc_RNA (1)...(19): siRNA sense strand
gaagcuggugcaguuauuu

SEQ ID NO: 830458 - RNA, 19 nt, Homo sapiens
  misc_RNA (1)...(19): siRNA sense strand
ucagagguuuccagcuauu

SEQ ID NO: 830459 - RNA, 19 nt, Homo sapiens
  misc_RNA (1)...(19): siRNA sense strand
cccaagaucccaccuagaa

SEQ ID NO: 830460 - RNA, 19 nt, Homo sapiens
  misc_RNA (1)...(19): siRNA sense strand
gggaaaugcucuggaggau

SEQ ID NO: 830461 - RNA, 19 nt, Homo sapiens
  misc_RNA (1)...(19): siRNA sense strand
acacaccuacauucuguua

SEQ ID NO: 830462 - RNA, 19 nt, Homo sapiens
  misc_RNA (1)...(19): siRNA sense strand
agucugaaaugcgggaaua

SEQ ID NO: 830463 - RNA, 19 nt, Homo sapiens
  misc_RNA (1)...(19): siRNA sense strand
ggaagaugaggccaauaga

SEQ ID NO: 830464 - RNA, 19 nt, Homo sapiens
  misc_RNA (1)...(19): siRNA sense strand
gaugauucuaggccaaaua

SEQ ID NO: 830465 - RNA, 19 nt, Homo sapiens
  misc_RNA (1)...(19): siRNA sense strand
aagaauaucgcaaccaguu

SEQ ID NO: 830466 - RNA, 19 nt, Homo sapiens
  misc_RNA (1)...(19): siRNA sense strand
ugaaagccuugcgauaugu

SEQ ID NO: 830467 - RNA, 19 nt, Homo sapiens
  misc_RNA (1)...(19): siRNA sense strand
aagaugggccuccugauga

SEQ ID NO: 830468 - RNA, 19 nt, Homo sapiens
  misc_RNA (1)...(19): siRNA sense strand
aaacugaggagaucguaga

SEQ ID NO: 830469 - RNA, 19 nt, Homo sapiens
  misc_RNA (1)...(19): siRNA sense strand
ccacauucauggccugagu

SEQ ID NO: 830470 - RNA, 19 nt, Homo sapiens
  misc_RNA (1)...(19): siRNA sense strand
aaagaugggccuccugaug

SEQ ID NO: 830471 - RNA, 19 nt, Homo sapiens
  misc_RNA (1)...(19): siRNA sense strand
agucagcgcuauauagaca

SEQ ID NO: 830472 - RNA, 19 nt, Homo sapiens
  misc_RNA (1)...(19): siRNA sense strand
caaacaggccuggcaacaa

SEQ ID NO: 830473 - RNA, 19 nt, Homo sapiens
  misc_RNA (1)...(19): siRNA sense strand
ggcaggcucucccucacuu

SEQ ID NO: 830474 - RNA, 19 nt, Homo sapiens
  misc_RNA (1)...(19): siRNA sense strand
augcgggaauauauuguua

SEQ ID NO: 830475 - RNA, 19 nt, Homo sapiens
  misc_RNA (1)...(19): siRNA sense strand
ugagucagcgcuauauaga

SEQ ID NO: 830476 - RNA, 19 nt, Homo sapiens
  misc_RNA (1)...(19): siRNA sense strand
uagaagagagcccaaaugg

SEQ ID NO: 830477 - RNA, 19 nt, Homo sapiens
  misc_RNA (1)...(19): siRNA sense strand
gccaauagagcugauguug

SEQ ID NO: 830478 - RNA, 19 nt, Homo sapiens
  misc_RNA (1)...(19): siRNA sense strand
cagaacuagugguacuuga

SEQ ID NO: 830479 - RNA, 19 nt, Homo sapiens
  misc_RNA (1)...(19): siRNA sense strand
caaaggcuacugcgcacaa

SEQ ID NO: 830480 - RNA, 19 nt, Homo sapiens
  misc_RNA (1)...(19): siRNA sense strand
caaaauaugccccacauuc

SEQ ID NO: 830481 - RNA, 19 nt, Homo sapiens
  misc_RNA (1)...(19): siRNA sense strand
ugagggcgcaagcaccuua

SEQ ID NO: 830482 - RNA, 19 nt, Homo sapiens
  misc_RNA (1)...(19): siRNA sense strand
augaaagccuugcgauaug

SEQ ID NO: 830483 - RNA, 19 nt, Homo sapiens
  misc_RNA (1)...(19): siRNA sense strand
uuaugggccucaauacuuc

SEQ ID NO: 830484 - RNA, 19 nt, Homo sapiens
  misc_RNA (1)...(19): siRNA sense strand
gaucguagacaguccaaac

SEQ ID NO: 830485 - RNA, 19 nt, Homo sapiens
  misc_RNA (1)...(19): siRNA sense strand
ggaaucacuccuauacucu

SEQ ID NO: 830486 - RNA, 19 nt, Homo sapiens
  misc_RNA (1)...(19): siRNA sense strand
caggcucucccucacuuua

SEQ ID NO: 830487 - RNA, 19 nt, Homo sapiens
  misc_RNA (1)...(19): siRNA sense strand
uagaaaccaccaagaugaa

SEQ ID NO: 830488 - RNA, 19 nt, Homo sapiens
  misc_RNA (1)...(19): siRNA sense strand
cccaacuccauuaguauua

SEQ ID NO: 830489 - RNA, 19 nt, Homo sapiens
  misc_RNA (1)...(19): siRNA sense strand
ugaugcagguccuaagcuu

SEQ ID NO: 830490 - RNA, 19 nt, Homo sapiens
  misc_RNA (1)...(19): siRNA sense strand
uaagcugccuauaccaaag

SEQ ID NO: 830491 - RNA, 19 nt, Homo sapiens
  misc_RNA (1)...(19): siRNA sense strand
ccaagaucccaccuagaaa

SEQ ID NO: 830492 - RNA, 19 nt, Homo sapiens
  misc_RNA (1)...(19): siRNA sense strand
gggcugugcaccucuguga

SEQ ID NO: 830493 - RNA, 19 nt, Homo sapiens
  misc_RNA (1)...(19): siRNA sense strand
cugaaaugcgggaauauau

SEQ ID NO: 830494 - RNA, 19 nt, Homo sapiens
  misc_RNA (1)...(19): siRNA sense strand
gauguugggcacaggcaaa

SEQ ID NO: 830495 - RNA, 19 nt, Homo sapiens
  misc_RNA (1)...(19): siRNA sense strand
gcugggagaaagcauguga

SEQ ID NO: 830496 - RNA, 19 nt, Homo sapiens
  misc_RNA (1)...(19): siRNA sense strand
uguauggcagcguuacuua

SEQ ID NO: 830497 - RNA, 19 nt, Homo sapiens
  misc_RNA (1)...(19): siRNA sense strand
uuguuuagcucuagugcuu

SEQ ID NO: 830498 - RNA, 19 nt, Homo sapiens
  misc_RNA (1)...(19): siRNA sense strand
ggugagggaccaagcacuu

SEQ ID NO: 830499 - RNA, 19 nt, Homo sapiens
  misc_RNA (1)...(19): siRNA sense strand
agaugaaagccuugcgaua

SEQ ID NO: 830500 - RNA, 19 nt, Homo sapiens
  misc_RNA (1)...(19): siRNA sense strand
gguacuugaucccaggaau

SEQ ID NO: 830501 - RNA, 19 nt, Homo sapiens
  misc_RNA (1)...(19): siRNA sense strand
cgagagugcagcaaagugu

SEQ ID NO: 830502 - RNA, 19 nt, Homo sapiens
  misc_RNA (1)...(19): siRNA sense strand
ccuagaaaccaccaagaug

SEQ ID NO: 830503 - RNA, 19 nt, Homo sapiens
  misc_RNA (1)...(19): siRNA sense strand
gugcagaaggcccuauaga

SEQ ID NO: 830504 - RNA, 19 nt, Homo sapiens
  misc_RNA (1)...(19): siRNA sense strand
caagaucccaccuagaaac

SEQ ID NO: 830505 - RNA, 19 nt, Homo sapiens
  misc_RNA (1)...(19): siRNA sense strand
gggaaggccuuuagacaua

SEQ ID NO: 830506 - RNA, 19 nt, Homo sapiens
  misc_RNA (1)...(19): siRNA sense strand
gggaaggccuuuagacaua

SEQ ID NO: 830507 - RNA, 19 nt, Homo sapiens
  misc_RNA (1)...(19): siRNA sense strand
agacauaguucauccuuua

SEQ ID NO: 830508 - RNA, 19 nt, Homo sapiens
  misc_RNA (1)...(19): siRNA sense strand
gaacaucagagaauucaua

SEQ ID NO: 830509 - RNA, 19 nt, Homo sapiens
  misc_RNA (1)...(19): siRNA sense strand
gaacaucagagaauucaua

SEQ ID NO: 830510 - RNA, 19 nt, Homo sapiens
  misc_RNA (1)...(19): siRNA sense strand
ugagaaaccuuaugaaugu

SEQ ID NO: 830511 - RNA, 19 nt, Homo sapiens
  misc_RNA (1)...(19): siRNA sense strand
ggucuucaguugugacuua

SEQ ID NO: 830512 - RNA, 19 nt, Homo sapiens
  misc_RNA (1)...(19): siRNA sense strand
gauaaacccuaugaaugua

SEQ ID NO: 830513 - RNA, 19 nt, Homo sapiens
  misc_RNA (1)...(19): siRNA sense strand
gaacuuacucgacaugaaa

SEQ ID NO: 830514 - RNA, 19 nt, Homo sapiens
  misc_RNA (1)...(19): siRNA sense strand
gugagaagcccuaugaaua

SEQ ID NO: 830515 - RNA, 19 nt, Homo sapiens
  misc_RNA (1)...(19): siRNA sense strand
ugagaaaccuuaugcaugu

SEQ ID NO: 830516 - RNA, 19 nt, Homo sapiens
  misc_RNA (1)...(19): siRNA sense strand
gaaaguagcaaguuaugug

SEQ ID NO: 830517 - RNA, 19 nt, Homo sapiens
  misc_RNA (1)...(19): siRNA sense strand
gggaauuccuuuaguguug

SEQ ID NO: 830518 - RNA, 19 nt, Homo sapiens
  misc_RNA (1)...(19): siRNA sense strand
gaccugaagugggauauuu

SEQ ID NO: 830519 - RNA, 19 nt, Homo sapiens
  misc_RNA (1)...(19): siRNA sense strand
guaagaaacccuaugaaug

SEQ ID NO: 830520 - RNA, 19 nt, Homo sapiens
  misc_RNA (1)...(19): siRNA sense strand
agacauaguucagcccuua

SEQ ID NO: 830521 - RNA, 19 nt, Homo sapiens
  misc_RNA (1)...(19): siRNA sense strand
ugagaaagcauuuggagua

SEQ ID NO: 830522 - RNA, 19 nt, Homo sapiens
  misc_RNA (1)...(19): siRNA sense strand
gaaacccuaugaaugcaaa

SEQ ID NO: 830523 - RNA, 19 nt, Homo sapiens
  misc_RNA (1)...(19): siRNA sense strand
auagauaacuccaguaugu

SEQ ID NO: 830524 - RNA, 19 nt, Homo sapiens
  misc_RNA (1)...(19): siRNA sense strand
acaaauguaugcacuguga

SEQ ID NO: 830525 - RNA, 19 nt, Homo sapiens
  misc_RNA (1)...(19): siRNA sense strand
gaaagcauuuggaguaggu

SEQ ID NO: 830526 - RNA, 19 nt, Homo sapiens
  misc_RNA (1)...(19): siRNA sense strand
aaacaucagcgcauucaua

SEQ ID NO: 830527 - RNA, 19 nt, Homo sapiens
  misc_RNA (1)...(19): siRNA sense strand
ggagaacucaugacaguga

SEQ ID NO: 830528 - RNA, 19 nt, Homo sapiens
  misc_RNA (1)...(19): siRNA sense strand
ggcaaggacuucagauuuc

SEQ ID NO: 830529 - RNA, 19 nt, Homo sapiens
  misc_RNA (1)...(19): siRNA sense strand
ugagaaacccuacaaaugu

SEQ ID NO: 830530 - RNA, 19 nt, Homo sapiens
  misc_RNA (1)...(19): siRNA sense strand
gaauaugggaauacaugua

SEQ ID NO: 830531 - RNA, 19 nt, Homo sapiens
  misc_RNA (1)...(19): siRNA sense strand
gcaaggacuucagauuuca

SEQ ID NO: 830532 - RNA, 19 nt, Homo sapiens
  misc_RNA (1)...(19): siRNA sense strand
gaacaucagagaauucaca

SEQ ID NO: 830533 - RNA, 19 nt, Homo sapiens
  misc_RNA (1)...(19): siRNA sense strand
agaaaugacuggcaaagca

SEQ ID NO: 830534 - RNA, 19 nt, Homo sapiens
  misc_RNA (1)...(19): siRNA sense strand
gaugauaaacccuaugaau

SEQ ID NO: 830535 - RNA, 19 nt, Homo sapiens
  misc_RNA (1)...(19): siRNA sense strand
agacuuacgucagcccuua

SEQ ID NO: 830536 - RNA, 19 nt, Homo sapiens
  misc_RNA (1)...(19): siRNA sense strand
ucaaagaguucaugauggu

SEQ ID NO: 830537 - RNA, 19 nt, Homo sapiens
  misc_RNA (1)...(19): siRNA sense strand
uaagaaacccuaugaaugc

SEQ ID NO: 830538 - RNA, 19 nt, Homo sapiens
  misc_RNA (1)...(19): siRNA sense strand
gagaaaccuuaugaaugua

SEQ ID NO: 830539 - RNA, 19 nt, Homo sapiens
  misc_RNA (1)...(19): siRNA sense strand
gagaaagcauuuggaguag

SEQ ID NO: 830540 - RNA, 19 nt, Homo sapiens
  misc_RNA (1)...(19): siRNA sense strand
gguaagaaacccuaugaau

SEQ ID NO: 830541 - RNA, 19 nt, Homo sapiens
  misc_RNA (1)...(19): siRNA sense strand
gagaauucauacuggagaa

SEQ ID NO: 830542 - RNA, 19 nt, Homo sapiens
  misc_RNA (1)...(19): siRNA sense strand
caucaaagaauucauagug

SEQ ID NO: 830543 - RNA, 19 nt, Homo sapiens
  misc_RNA (1)...(19): siRNA sense strand
uaaagaaugugagaaagca

SEQ ID NO: 830544 - RNA, 19 nt, Homo sapiens
  misc_RNA (1)...(19): siRNA sense strand
gugagaaacccuacaaaug

SEQ ID NO: 830545 - RNA, 19 nt, Homo sapiens
  misc_RNA (1)...(19): siRNA sense strand
ugauaaacccuaugaaugu

SEQ ID NO: 830546 - RNA, 19 nt, Homo sapiens
  misc_RNA (1)...(19): siRNA sense strand
guucaucccugacuagaca

SEQ ID NO: 830547 - RNA, 19 nt, Homo sapiens
  misc_RNA (1)...(19): siRNA sense strand
ggauagauaacuccaguau

SEQ ID NO: 830548 - RNA, 19 nt, Homo sapiens
  misc_RNA (1)...(19): siRNA sense strand
uaaggaguguggaaaguuc

SEQ ID NO: 830549 - RNA, 19 nt, Homo sapiens
  misc_RNA (1)...(19): siRNA sense strand
gaacuugcucgucaucaga

SEQ ID NO: 830550 - RNA, 19 nt, Homo sapiens
  misc_RNA (1)...(19): siRNA sense strand
gagaaaccuuaugcaugua

SEQ ID NO: 830551 - RNA, 19 nt, Homo sapiens
  misc_RNA (1)...(19): siRNA sense strand
aaagcaagauugacuuaca

SEQ ID NO: 830552 - RNA, 19 nt, Homo sapiens
  misc_RNA (1)...(19): siRNA sense strand
ugaaagaguuggaaaaguu

SEQ ID NO: 830553 - RNA, 19 nt, Homo sapiens
  misc_RNA (1)...(19): siRNA sense strand
gagaagcccuaugaauaca

SEQ ID NO: 830554 - RNA, 19 nt, Homo sapiens
  misc_RNA (1)...(19): siRNA sense strand
gugagaaaccuuaugaaug

SEQ ID NO: 830555 - RNA, 19 nt, Homo sapiens
  misc_RNA (1)...(19): siRNA sense strand
gaaaugacuggcaaagcaa

SEQ ID NO: 830556 - RNA, 19 nt, Homo sapiens
  misc_RNA (1)...(19): siRNA sense strand
caacuuacucgacaucaga

SEQ ID NO: 830557 - RNA, 19 nt, Homo sapiens
  misc_RNA (1)...(19): siRNA sense strand
ugacuuagaguuugaugaa

SEQ ID NO: 830558 - RNA, 19 nt, Homo sapiens
  misc_RNA (1)...(19): siRNA sense strand
cgucagcccuuauucaaca

SEQ ID NO: 830559 - RNA, 19 nt, Homo sapiens
  misc_RNA (1)...(19): siRNA sense strand
caagauugacuuacaagga

SEQ ID NO: 830560 - RNA, 19 nt, Homo sapiens
  misc_RNA (1)...(19): siRNA sense strand
ggaguagguagugaacuua

SEQ ID NO: 830561 - RNA, 19 nt, Homo sapiens
  misc_RNA (1)...(19): siRNA sense strand
ggacuucagauuucauuca

SEQ ID NO: 830562 - RNA, 19 nt, Homo sapiens
  misc_RNA (1)...(19): siRNA sense strand
gaaagaguuggaaaaguua

SEQ ID NO: 830563 - RNA, 19 nt, Homo sapiens
  misc_RNA (1)...(19): siRNA sense strand
ggugagaaaccuuaugaau

SEQ ID NO: 830564 - RNA, 19 nt, Homo sapiens
  misc_RNA (1)...(19): siRNA sense strand
agacaucagaggauucaua

SEQ ID NO: 830565 - RNA, 19 nt, Homo sapiens
  misc_RNA (1)...(19): siRNA sense strand
gagaaacacuuugaaugcu

SEQ ID NO: 830566 - RNA, 19 nt, Homo sapiens
  misc_RNA (1)...(19): siRNA sense strand
uggcaaggacuucagauuu

SEQ ID NO: 830567 - RNA, 19 nt, Homo sapiens
  misc_RNA (1)...(19): siRNA sense strand
guucauccuuuaccaaaca

SEQ ID NO: 830568 - RNA, 19 nt, Homo sapiens
  misc_RNA (1)...(19): siRNA sense strand
ggaaggccuuuagacauag

SEQ ID NO: 830569 - RNA, 19 nt, Homo sapiens
  misc_RNA (1)...(19): siRNA sense strand
ggaaggccuuuagacauag

SEQ ID NO: 830570 - RNA, 19 nt, Homo sapiens
  misc_RNA (1)...(19): siRNA sense strand
gaagcccuaugaauacaag

SEQ ID NO: 830571 - RNA, 19 nt, Homo sapiens
  misc_RNA (1)...(19): siRNA sense strand
ggaauuccuuuaguguugu

SEQ ID NO: 830572 - RNA, 19 nt, Homo sapiens
  misc_RNA (1)...(19): siRNA sense strand
caucagagaauucauacug

SEQ ID NO: 830573 - RNA, 19 nt, Homo sapiens
  misc_RNA (1)...(19): siRNA sense strand
uuacagaacaucagagaau

SEQ ID NO: 830574 - RNA, 19 nt, Homo sapiens
  misc_RNA (1)...(19): siRNA sense strand
ugaacuuacucgacaugaa

SEQ ID NO: 830575 - RNA, 19 nt, Homo sapiens
  misc_RNA (1)...(19): siRNA sense strand
gaauucauacugguaagaa

SEQ ID NO: 830576 - RNA, 19 nt, Homo sapiens
  misc_RNA (1)...(19): siRNA sense strand
caucagagaauucauacug

SEQ ID NO: 830577 - RNA, 19 nt, Homo sapiens
  misc_RNA (1)...(19): siRNA sense strand
caucagagaauucauacug

SEQ ID NO: 830578 - RNA, 19 nt, Homo sapiens
  misc_RNA (1)...(19): siRNA sense strand
gugugaaaccuuguaaaua

SEQ ID NO: 830579 - RNA, 19 nt, Homo sapiens
  misc_RNA (1)...(19): siRNA sense strand
ggugugaaaccuuguaaau

SEQ ID NO: 830580 - RNA, 19 nt, Homo sapiens
  misc_RNA (1)...(19): siRNA sense strand
agauuucauucacagcuua

SEQ ID NO: 830581 - RNA, 19 nt, Homo sapiens
  misc_RNA (1)...(19): siRNA sense strand
ggugagaaacccuacaaau

SEQ ID NO: 830582 - RNA, 19 nt, Homo sapiens
  misc_RNA (1)...(19): siRNA sense strand
gaauacaaggaauaugaga

SEQ ID NO: 830583 - RNA, 19 nt, Homo sapiens
  misc_RNA (1)...(19): siRNA sense strand
aauuuacacuggugagaaa

SEQ ID NO: 830584 - RNA, 19 nt, Homo sapiens
  misc_RNA (1)...(19): siRNA sense strand
cugaaaaugugcccaguua

SEQ ID NO: 830585 - RNA, 19 nt, Homo sapiens
  misc_RNA (1)...(19): siRNA sense strand
uggaguagguagugaacuu

SEQ ID NO: 830586 - RNA, 19 nt, Homo sapiens
  misc_RNA (1)...(19): siRNA sense strand
ucggagaacucaugacagu

SEQ ID NO: 830587 - RNA, 19 nt, Homo sapiens
  misc_RNA (1)...(19): siRNA sense strand
aagcaagauugacuuacaa

SEQ ID NO: 830588 - RNA, 19 nt, Homo sapiens
  misc_RNA (1)...(19): siRNA sense strand
acucaugaaucucuuacuu

SEQ ID NO: 830589 - RNA, 19 nt, Homo sapiens
  misc_RNA (1)...(19): siRNA sense strand
caucagaggauucauacug

SEQ ID NO: 830590 - RNA, 19 nt, Homo sapiens
  misc_RNA (1)...(19): siRNA sense strand
cgucaucagagaauucaua

SEQ ID NO: 830591 - RNA, 19 nt, Homo sapiens
  misc_RNA (1)...(19): siRNA sense strand
gugagaaacacuuugaaug

SEQ ID NO: 830592 - RNA, 19 nt, Homo sapiens
  misc_RNA (1)...(19): siRNA sense strand
gacuagacaucagaggauu

SEQ ID NO: 830593 - RNA, 19 nt, Homo sapiens
  misc_RNA (1)...(19): siRNA sense strand
gaauuccuuuaguguuguu

SEQ ID NO: 830594 - RNA, 19 nt, Homo sapiens
  misc_RNA (1)...(19): siRNA sense strand
acagugagaagcccuauga

SEQ ID NO: 830595 - RNA, 19 nt, Homo sapiens
  misc_RNA (1)...(19): siRNA sense strand
uacagaacaucagagaauu

SEQ ID NO: 830596 - RNA, 19 nt, Homo sapiens
  misc_RNA (1)...(19): siRNA sense strand
ugagaagcccuaugaauac

SEQ ID NO: 830597 - RNA, 19 nt, Homo sapiens
  misc_RNA (1)...(19): siRNA sense strand
gaaauccuuuagagugcau

SEQ ID NO: 830598 - RNA, 19 nt, Homo sapiens
  misc_RNA (1)...(19): siRNA sense strand
caucagcgcauucauacug

SEQ ID NO: 830599 - RNA, 19 nt, Homo sapiens
  misc_RNA (1)...(19): siRNA sense strand
cauugaacaucagagaauu

SEQ ID NO: 830600 - RNA, 19 nt, Homo sapiens
  misc_RNA (1)...(19): siRNA sense strand
guugugacuuagaguuuga

SEQ ID NO: 830601 - RNA, 19 nt, Homo sapiens
  misc_RNA (1)...(19): siRNA sense strand
guaaggaguguggaaaguu

SEQ ID NO: 830602 - RNA, 19 nt, Homo sapiens
  misc_RNA (1)...(19): siRNA sense strand
gaauguaaggaguguggaa

SEQ ID NO: 830603 - RNA, 19 nt, Homo sapiens
  misc_RNA (1)...(19): siRNA sense strand
caaaagcaagauugacuua

SEQ ID NO: 830604 - RNA, 19 nt, Homo sapiens
  misc_RNA (1)...(19): siRNA sense strand
aauccauacugaugagaaa

SEQ ID NO: 830605 - RNA, 19 nt, Homo sapiens
  misc_RNA (1)...(19): siRNA sense strand
gaacugcucccuuaucuuc

SEQ ID NO: 830606 - RNA, 19 nt, Homo sapiens
  misc_RNA (1)...(19): siRNA sense strand
gcagugaacuccucuucca

SEQ ID NO: 830607 - RNA, 19 nt, Homo sapiens
  misc_RNA (1)...(19): siRNA sense strand
gcaaguaccugaccuuccu

SEQ ID NO: 830608 - RNA, 19 nt, Homo sapiens
  misc_RNA (1)...(19): siRNA sense strand
ccaagaaggugccugaaac

SEQ ID NO: 830609 - RNA, 19 nt, Homo sapiens
  misc_RNA (1)...(19): siRNA sense strand
uggcacagcuggcaucuuc

SEQ ID NO: 830610 - RNA, 19 nt, Homo sapiens
  misc_RNA (1)...(19): siRNA sense strand
caacguggacggugucuuc

SEQ ID NO: 830611 - RNA, 19 nt, Homo sapiens
  misc_RNA (1)...(19): siRNA sense strand
cagaacugcucccuuaucu

SEQ ID NO: 830612 - RNA, 19 nt, Homo sapiens
  misc_RNA (1)...(19): siRNA sense strand
caccaccaaugucuggaua

SEQ ID NO: 830613 - RNA, 19 nt, Homo sapiens
  misc_RNA (1)...(19): siRNA sense strand
gcaccgaccagccaagaug

SEQ ID NO: 830614 - RNA, 19 nt, Homo sapiens
  misc_RNA (1)...(19): siRNA sense strand
ccugaggccuucacagaga

SEQ ID NO: 830615 - RNA, 19 nt, Homo sapiens
  misc_RNA (1)...(19): siRNA sense strand
agacuuacagcaccaauga

SEQ ID NO: 830616 - RNA, 19 nt, Homo sapiens
  misc_RNA (1)...(19): siRNA sense strand
ccaccaaugucuggauaga

SEQ ID NO: 830617 - RNA, 19 nt, Homo sapiens
  misc_RNA (1)...(19): siRNA sense strand
ggaagcaggccaccagaag

SEQ ID NO: 830618 - RNA, 19 nt, Homo sapiens
  misc_RNA (1)...(19): siRNA sense strand
uggagaagcuagagaaagg

SEQ ID NO: 830619 - RNA, 19 nt, Homo sapiens
  misc_RNA (1)...(19): siRNA sense strand
uuacagcaccaaugagauu

SEQ ID NO: 830620 - RNA, 19 nt, Homo sapiens
  misc_RNA (1)...(19): siRNA sense strand
gccaugcucucgcucuuca

SEQ ID NO: 830621 - RNA, 19 nt, Homo sapiens
  misc_RNA (1)...(19): siRNA sense strand
acucggauguggucaaugu

SEQ ID NO: 830622 - RNA, 19 nt, Homo sapiens
  misc_RNA (1)...(19): siRNA sense strand
gccaagaaggugccugaaa

SEQ ID NO: 830623 - RNA, 19 nt, Homo sapiens
  misc_RNA (1)...(19): siRNA sense strand
accaaugucuggauagaga

SEQ ID NO: 830624 - RNA, 19 nt, Homo sapiens
  misc_RNA (1)...(19): siRNA sense strand
ucgcagaccugaugcaaaa

SEQ ID NO: 830625 - RNA, 19 nt, Homo sapiens
  misc_RNA (1)...(19): siRNA sense strand
aaaggaaucuccggaacca

SEQ ID NO: 830626 - RNA, 19 nt, Homo sapiens
  misc_RNA (1)...(19): siRNA sense strand
ggaagccugcaaccucauu

SEQ ID NO: 830627 - RNA, 19 nt, Homo sapiens
  misc_RNA (1)...(19): siRNA sense strand
gcaccagcagagucacuuu

SEQ ID NO: 830628 - RNA, 19 nt, Homo sapiens
  misc_RNA (1)...(19): siRNA sense strand
aggaagcccucaccaccaa

SEQ ID NO: 830629 - RNA, 19 nt, Homo sapiens
  misc_RNA (1)...(19): siRNA sense strand
ugucgugaaugcugugguu

SEQ ID NO: 830630 - RNA, 19 nt, Homo sapiens
  misc_RNA (1)...(19): siRNA sense strand
gaagcccucaccaccaaug

SEQ ID NO: 830631 - RNA, 19 nt, Homo sapiens
  misc_RNA (1)...(19): siRNA sense strand
gcugggauccgcgagacua

SEQ ID NO: 830632 - RNA, 19 nt, Homo sapiens
  misc_RNA (1)...(19): siRNA sense strand
gccagaccaucgaguggau

SEQ ID NO: 830633 - RNA, 19 nt, Homo sapiens
  misc_RNA (1)...(19): siRNA sense strand
cauccucauugucgugaau

SEQ ID NO: 830634 - RNA, 19 nt, Homo sapiens
  misc_RNA (1)...(19): siRNA sense strand
gcuggagaagcuagagaaa

SEQ ID NO: 830635 - RNA, 19 nt, Homo sapiens
  misc_RNA (1)...(19): siRNA sense strand
gaagccugcaaccucauug

SEQ ID NO: 830636 - RNA, 19 nt, Homo sapiens
  misc_RNA (1)...(19): siRNA sense strand
cggauaucgugcuggagaa

SEQ ID NO: 830637 - RNA, 19 nt, Homo sapiens
  misc_RNA (1)...(19): siRNA sense strand
ccucauggcccacuacaac

SEQ ID NO: 830638 - RNA, 19 nt, Homo sapiens
  misc_RNA (1)...(19): siRNA sense strand
agacucggauguggucaau

SEQ ID NO: 830639 - RNA, 19 nt, Homo sapiens
  misc_RNA (1)...(19): siRNA sense strand
cagaccaucgaguggauuu

SEQ ID NO: 830640 - RNA, 19 nt, Homo sapiens
  misc_RNA (1)...(19): siRNA sense strand
ucgaguggauuuucauuga

SEQ ID NO: 830641 - RNA, 19 nt, Homo sapiens
  misc_RNA (1)...(19): siRNA sense strand
cgugaaugcugugguugug

SEQ ID NO: 830642 - RNA, 19 nt, Homo sapiens
  misc_RNA (1)...(19): siRNA sense strand
ccacauaacauuugcacuu

SEQ ID NO: 830643 - RNA, 19 nt, Homo sapiens
  misc_RNA (1)...(19): siRNA sense strand
cacauaacauuugcacuuu

SEQ ID NO: 830644 - RNA, 19 nt, Homo sapiens
  misc_RNA (1)...(19): siRNA sense strand
gaauagacuccuucgugau

SEQ ID NO: 830645 - RNA, 19 nt, Homo sapiens
  misc_RNA (1)...(19): siRNA sense strand
ggaugugccacccgccuuu

SEQ ID NO: 830646 - RNA, 19 nt, Homo sapiens
  misc_RNA (1)...(19): siRNA sense strand
cauaacauuugcacuuucg

SEQ ID NO: 830647 - RNA, 19 nt, Homo sapiens
  misc_RNA (1)...(19): siRNA sense strand
uggcaucauccaaggaaua

SEQ ID NO: 830648 - RNA, 19 nt, Homo sapiens
  misc_RNA (1)...(19): siRNA sense strand
gcacugccugcgggacaua

SEQ ID NO: 830649 - RNA, 19 nt, Homo sapiens
  misc_RNA (1)...(19): siRNA sense strand
cuacgacgcggagaacaaa

SEQ ID NO: 830650 - RNA, 19 nt, Homo sapiens
  misc_RNA (1)...(19): siRNA sense strand
acauaacauuugcacuuuc

SEQ ID NO: 830651 - RNA, 19 nt, Homo sapiens
  misc_RNA (1)...(19): siRNA sense strand
ucacgcggguagcccucua

SEQ ID NO: 830652 - RNA, 19 nt, Homo sapiens
  misc_RNA (1)...(19): siRNA sense strand
cucgguggcucagguguuu

SEQ ID NO: 830653 - RNA, 19 nt, Homo sapiens
  misc_RNA (1)...(19): siRNA sense strand
aauagacuccuucgugauc

SEQ ID NO: 830654 - RNA, 19 nt, Homo sapiens
  misc_RNA (1)...(19): siRNA sense strand
gcacugacgcuucccauua

SEQ ID NO: 830655 - RNA, 19 nt, Homo sapiens
  misc_RNA (1)...(19): siRNA sense strand
gaacagaagccaugagauc

SEQ ID NO: 830656 - RNA, 19 nt, Homo sapiens
  misc_RNA (1)...(19): siRNA sense strand
cagaagcugugauguagaa

SEQ ID NO: 830657 - RNA, 19 nt, Homo sapiens
  misc_RNA (1)...(19): siRNA sense strand
gaacccaucuuggcucagu

SEQ ID NO: 830658 - RNA, 19 nt, Homo sapiens
  misc_RNA (1)...(19): siRNA sense strand
caaacgccaucccaucaug

SEQ ID NO: 830659 - RNA, 19 nt, Homo sapiens
  misc_RNA (1)...(19): siRNA sense strand
cacugacgcuucccauuaa

SEQ ID NO: 830660 - RNA, 19 nt, Homo sapiens
  misc_RNA (1)...(19): siRNA sense strand
ggacaaacaggccgagauc

SEQ ID NO: 830661 - RNA, 19 nt, Homo sapiens
  misc_RNA (1)...(19): siRNA sense strand
ccucagaagcugugaugua

SEQ ID NO: 830662 - RNA, 19 nt, Homo sapiens
  misc_RNA (1)...(19): siRNA sense strand
ggacucaggcagaauucaa

SEQ ID NO: 830663 - RNA, 19 nt, Homo sapiens
  misc_RNA (1)...(19): siRNA sense strand
ggacccagagggagugauu

SEQ ID NO: 830664 - RNA, 19 nt, Homo sapiens
  misc_RNA (1)...(19): siRNA sense strand
caccagagaacccaucuug

SEQ ID NO: 830665 - RNA, 19 nt, Homo sapiens
  misc_RNA (1)...(19): siRNA sense strand
ccuuugaccucaccaagau

SEQ ID NO: 830666 - RNA, 19 nt, Homo sapiens
  misc_RNA (1)...(19): siRNA sense strand
agccaagggucgaagauga

SEQ ID NO: 830667 - RNA, 19 nt, Homo sapiens
  misc_RNA (1)...(19): siRNA sense strand
caaacaggccgagaucuca

SEQ ID NO: 830668 - RNA, 19 nt, Homo sapiens
  misc_RNA (1)...(19): siRNA sense strand
aaggaugacugguuuaugc

SEQ ID NO: 830669 - RNA, 19 nt, Homo sapiens
  misc_RNA (1)...(19): siRNA sense strand
gagccuaucgcugucauga

SEQ ID NO: 830670 - RNA, 19 nt, Homo sapiens
  misc_RNA (1)...(19): siRNA sense strand
auaccaacccuaaggauga

SEQ ID NO: 830671 - RNA, 19 nt, Homo sapiens
  misc_RNA (1)...(19): siRNA sense strand
gcaauggcccaggacaaga

SEQ ID NO: 830672 - RNA, 19 nt, Homo sapiens
  misc_RNA (1)...(19): siRNA sense strand
agauccaacugcacaauca

SEQ ID NO: 830673 - RNA, 19 nt, Homo sapiens
  misc_RNA (1)...(19): siRNA sense strand
cccuaaggaugacugguuu

SEQ ID NO: 830674 - RNA, 19 nt, Homo sapiens
  misc_RNA (1)...(19): siRNA sense strand
gcaaacgccaucccaucau

SEQ ID NO: 830675 - RNA, 19 nt, Homo sapiens
  misc_RNA (1)...(19): siRNA sense strand
cucagaagcugugauguag

SEQ ID NO: 830676 - RNA, 19 nt, Homo sapiens
  misc_RNA (1)...(19): siRNA sense strand
gaagcugugauguagaauc

SEQ ID NO: 830677 - RNA, 19 nt, Homo sapiens
  misc_RNA (1)...(19): siRNA sense strand
gaauggccuuugggcacaa

SEQ ID NO: 830678 - RNA, 19 nt, Homo sapiens
  misc_RNA (1)...(19): siRNA sense strand
gccaagggucgaagaugaa

SEQ ID NO: 830679 - RNA, 19 nt, Homo sapiens
  misc_RNA (1)...(19): siRNA sense strand
cggcaggccugagauccaa

SEQ ID NO: 830680 - RNA, 19 nt, Homo sapiens
  misc_RNA (1)...(19): siRNA sense strand
ggaccacggcuggaugaug

SEQ ID NO: 830681 - RNA, 19 nt, Homo sapiens
  misc_RNA (1)...(19): siRNA sense strand
ucgcugucaugaccuuuga

SEQ ID NO: 830682 - RNA, 19 nt, Homo sapiens
  misc_RNA (1)...(19): siRNA sense strand
ccagguggaagucaagaug

SEQ ID NO: 830683 - RNA, 19 nt, Homo sapiens
  misc_RNA (1)...(19): siRNA sense strand
gagauccaacugcacaauc

SEQ ID NO: 830684 - RNA, 19 nt, Homo sapiens
  misc_RNA (1)...(19): siRNA sense strand
gcugguuccugcccuggau

SEQ ID NO: 830685 - RNA, 19 nt, Homo sapiens
  misc_RNA (1)...(19): siRNA sense strand
cagggacucaggcagaauu

SEQ ID NO: 830686 - RNA, 19 nt, Homo sapiens
  misc_RNA (1)...(19): siRNA sense strand
gggauaccaacccuaagga

SEQ ID NO: 830687 - RNA, 19 nt, Homo sapiens
  misc_RNA (1)...(19): siRNA sense strand
gagccaagggucgaagaug

SEQ ID NO: 830688 - RNA, 19 nt, Homo sapiens
  misc_RNA (1)...(19): siRNA sense strand
ggauaccaacccuaaggau

SEQ ID NO: 830689 - RNA, 19 nt, Homo sapiens
  misc_RNA (1)...(19): siRNA sense strand
auuccuggcuggacaaaca

SEQ ID NO: 830690 - RNA, 19 nt, Homo sapiens
  misc_RNA (1)...(19): siRNA sense strand
cuaaggaugacugguuuau

SEQ ID NO: 830691 - RNA, 19 nt, Homo sapiens
  misc_RNA (1)...(19): siRNA sense strand
aaacgccaucccaucauga

SEQ ID NO: 830692 - RNA, 19 nt, Homo sapiens
  misc_RNA (1)...(19): siRNA sense strand
aaaccuccuccuccuuuga

SEQ ID NO: 830693 - RNA, 19 nt, Homo sapiens
  misc_RNA (1)...(19): siRNA sense strand
ccuaaggaugacugguuua

SEQ ID NO: 830694 - RNA, 19 nt, Homo sapiens
  misc_RNA (1)...(19): siRNA sense strand
cagcaauggcccaggacaa

SEQ ID NO: 830695 - RNA, 19 nt, Homo sapiens
  misc_RNA (1)...(19): siRNA sense strand
gaaggaggcccugcugaaa

SEQ ID NO: 830696 - RNA, 19 nt, Homo sapiens
  misc_RNA (1)...(19): siRNA sense strand
gcgucaaggugagaacuua

SEQ ID NO: 830697 - RNA, 19 nt, Homo sapiens
  misc_RNA (1)...(19): siRNA sense strand
gugaacggcugggacauga

SEQ ID NO: 830698 - RNA, 19 nt, Homo sapiens
  misc_RNA (1)...(19): siRNA sense strand
gaacuuaauccuggguuuc

SEQ ID NO: 830699 - RNA, 19 nt, Homo sapiens
  misc_RNA (1)...(19): siRNA sense strand
gugcaaagaguugaaauuc

SEQ ID NO: 830700 - RNA, 19 nt, Homo sapiens
  misc_RNA (1)...(19): siRNA sense strand
agacggacaaggguauuua

SEQ ID NO: 830701 - RNA, 19 nt, Homo sapiens
  misc_RNA (1)...(19): siRNA sense strand
ugaaggaggcccugcugaa

SEQ ID NO: 830702 - RNA, 19 nt, Homo sapiens
  misc_RNA (1)...(19): siRNA sense strand
ggugcaaagaguugaaauu

SEQ ID NO: 830703 - RNA, 19 nt, Homo sapiens
  misc_RNA (1)...(19): siRNA sense strand
aauccuggguuucagcauu

SEQ ID NO: 830704 - RNA, 19 nt, Homo sapiens
  misc_RNA (1)...(19): siRNA sense strand
agaacuuaauccuggguuu

SEQ ID NO: 830705 - RNA, 19 nt, Homo sapiens
  misc_RNA (1)...(19): siRNA sense strand
caaggguauuuaugucaca

SEQ ID NO: 830706 - RNA, 19 nt, Homo sapiens
  misc_RNA (1)...(19): siRNA sense strand
gcagauuggagacaagauc

SEQ ID NO: 830707 - RNA, 19 nt, Homo sapiens
  misc_RNA (1)...(19): siRNA sense strand
ucgcugggcugcagauugg

SEQ ID NO: 830708 - RNA, 19 nt, Homo sapiens
  misc_RNA (1)...(19): siRNA sense strand
aggaggcccugcugaaauc

SEQ ID NO: 830709 - RNA, 19 nt, Homo sapiens
  misc_RNA (1)...(19): siRNA sense strand
acaagaucaugcaggugaa

SEQ ID NO: 830710 - RNA, 19 nt, Homo sapiens
  misc_RNA (1)...(19): siRNA sense strand
cggacaaggguauuuaugu

SEQ ID NO: 830711 - RNA, 19 nt, Homo sapiens
  misc_RNA (1)...(19): siRNA sense strand
gauuggagacaagaucaug

SEQ ID NO: 830712 - RNA, 19 nt, Homo sapiens
  misc_RNA (1)...(19): siRNA sense strand
acaagacggacaaggguau

SEQ ID NO: 830713 - RNA, 19 nt, Homo sapiens
  misc_RNA (1)...(19): siRNA sense strand
gacggacaaggguauuuau

SEQ ID NO: 830714 - RNA, 19 nt, Homo sapiens
  misc_RNA (1)...(19): siRNA sense strand
cagauuggagacaagauca

SEQ ID NO: 830715 - RNA, 19 nt, Homo sapiens
  misc_RNA (1)...(19): siRNA sense strand
ggugaacggcugggacaug

SEQ ID NO: 830716 - RNA, 19 nt, Homo sapiens
  misc_RNA (1)...(19): siRNA sense strand
gcaaguggcucaacaacug

SEQ ID NO: 830717 - RNA, 19 nt, Homo sapiens
  misc_RNA (1)...(19): siRNA sense strand
ggaagaggcgcguguauaa

SEQ ID NO: 830718 - RNA, 19 nt, Homo sapiens
  misc_RNA (1)...(19): siRNA sense strand
gcacgcacaugucauugaa

SEQ ID NO: 830719 - RNA, 19 nt, Homo sapiens
  misc_RNA (1)...(19): siRNA sense strand
gcaacaagcccuccaacaa

SEQ ID NO: 830720 - RNA, 19 nt, Homo sapiens
  misc_RNA (1)...(19): siRNA sense strand
ggcacaagcucaccaccua

SEQ ID NO: 830721 - RNA, 19 nt, Homo sapiens
  misc_RNA (1)...(19): siRNA sense strand
acagggagcucgagucaug

SEQ ID NO: 830722 - RNA, 19 nt, Homo sapiens
  misc_RNA (1)...(19): siRNA sense strand
gaacuaccggcucuuucua

SEQ ID NO: 830723 - RNA, 19 nt, Homo sapiens
  misc_RNA (1)...(19): siRNA sense strand
ggagauggaguucuacaug

SEQ ID NO: 830724 - RNA, 19 nt, Homo sapiens
  misc_RNA (1)...(19): siRNA sense strand
augcggaccuucagacaua

SEQ ID NO: 830725 - RNA, 19 nt, Homo sapiens
  misc_RNA (1)...(19): siRNA sense strand
gaagaggcgcguguauaaa

SEQ ID NO: 830726 - RNA, 19 nt, Homo sapiens
  misc_RNA (1)...(19): siRNA sense strand
ggagugggauagaaagaag

SEQ ID NO: 830727 - RNA, 19 nt, Homo sapiens
  misc_RNA (1)...(19): siRNA sense strand
caacaagcccuccaacaag

SEQ ID NO: 830728 - RNA, 19 nt, Homo sapiens
  misc_RNA (1)...(19): siRNA sense strand
gcaccaaccgacacuuuga

SEQ ID NO: 830729 - RNA, 19 nt, Homo sapiens
  misc_RNA (1)...(19): siRNA sense strand
caucuuugcuggccaccuu

SEQ ID NO: 830730 - RNA, 19 nt, Homo sapiens
  misc_RNA (1)...(19): siRNA sense strand
gaagccagcacgcacaugu

SEQ ID NO: 830731 - RNA, 19 nt, Homo sapiens
  misc_RNA (1)...(19): siRNA sense strand
aacaagcccuccaacaaga

SEQ ID NO: 830732 - RNA, 19 nt, Homo sapiens
  misc_RNA (1)...(19): siRNA sense strand
ugaagaaucacacggaugu

SEQ ID NO: 830733 - RNA, 19 nt, Homo sapiens
  misc_RNA (1)...(19): siRNA sense strand
ggaacuaccggcucuuucu

SEQ ID NO: 830734 - RNA, 19 nt, Homo sapiens
  misc_RNA (1)...(19): siRNA sense strand
gcgcaccaaccgacacuuu

SEQ ID NO: 830735 - RNA, 19 nt, Homo sapiens
  misc_RNA (1)...(19): siRNA sense strand
uugaaguccugaagaauca

SEQ ID NO: 830736 - RNA, 19 nt, Homo sapiens
  misc_RNA (1)...(19): siRNA sense strand
cugcucugcuuccacauuu

SEQ ID NO: 830737 - RNA, 19 nt, Homo sapiens
  misc_RNA (1)...(19): siRNA sense strand
acgcacaugucauugaaga

SEQ ID NO: 830738 - RNA, 19 nt, Homo sapiens
  misc_RNA (1)...(19): siRNA sense strand
gcacaagcucaccaccuau

SEQ ID NO: 830739 - RNA, 19 nt, Homo sapiens
  misc_RNA (1)...(19): siRNA sense strand
uucaggagauggaguucua

SEQ ID NO: 830740 - RNA, 19 nt, Homo sapiens
  misc_RNA (1)...(19): siRNA sense strand
ccagcacgcacaugucauu

SEQ ID NO: 830741 - RNA, 19 nt, Homo sapiens
  misc_RNA (1)...(19): siRNA sense strand
acaagugcgugugcgguuu

SEQ ID NO: 830742 - RNA, 19 nt, Homo sapiens
  misc_RNA (1)...(19): siRNA sense strand
uaccggcucuuucuacaca

SEQ ID NO: 830743 - RNA, 19 nt, Homo sapiens
  misc_RNA (1)...(19): siRNA sense strand
ucacagggagcucgaguca

SEQ ID NO: 830744 - RNA, 19 nt, Homo sapiens
  misc_RNA (1)...(19): siRNA sense strand
gaggaagaggcgcguguau

SEQ ID NO: 830745 - RNA, 19 nt, Homo sapiens
  misc_RNA (1)...(19): siRNA sense strand
gcucugcuuccacauuuau

SEQ ID NO: 830746 - RNA, 19 nt, Homo sapiens
  misc_RNA (1)...(19): siRNA sense strand
gcugcuguaccucuucuuu

SEQ ID NO: 830747 - RNA, 19 nt, Homo sapiens
  misc_RNA (1)...(19): siRNA sense strand
cauaugucuucguggaguu

SEQ ID NO: 830748 - RNA, 19 nt, Homo sapiens
  misc_RNA (1)...(19): siRNA sense strand
cagguggagugggauagaa

SEQ ID NO: 830749 - RNA, 19 nt, Homo sapiens
  misc_RNA (1)...(19): siRNA sense strand
gucauguccucccaagaug

SEQ ID NO: 830750 - RNA, 19 nt, Homo sapiens
  misc_RNA (1)...(19): siRNA sense strand
gcggaacuaccggcucuuu

SEQ ID NO: 830751 - RNA, 19 nt, Homo sapiens
  misc_RNA (1)...(19): siRNA sense strand
gcucgccucugcuucuuuu

SEQ ID NO: 830752 - RNA, 19 nt, Homo sapiens
  misc_RNA (1)...(19): siRNA sense strand
aggaagaggcgcguguaua

SEQ ID NO: 830753 - RNA, 19 nt, Homo sapiens
  misc_RNA (1)...(19): siRNA sense strand
caacuugugcaacguggau

SEQ ID NO: 830754 - RNA, 19 nt, Homo sapiens
  misc_RNA (1)...(19): siRNA sense strand
aaagugcgaacgucugaga

SEQ ID NO: 830755 - RNA, 19 nt, Homo sapiens
  misc_RNA (1)...(19): siRNA sense strand
caguguugcauccgcuuua

SEQ ID NO: 830756 - RNA, 19 nt, Homo sapiens
  misc_RNA (1)...(19): siRNA sense strand
ggaugugugguucguguuc

SEQ ID NO: 830757 - RNA, 19 nt, Homo sapiens
  misc_RNA (1)...(19): siRNA sense strand
gcgcucgccucugcuucuu

SEQ ID NO: 830758 - RNA, 19 nt, Homo sapiens
  misc_RNA (1)...(19): siRNA sense strand
ccucuucuuugcugugauc

SEQ ID NO: 830759 - RNA, 19 nt, Homo sapiens
  misc_RNA (1)...(19): siRNA sense strand
auaaagugcgaacgucuga

SEQ ID NO: 830760 - RNA, 19 nt, Homo sapiens
  misc_RNA (1)...(19): siRNA sense strand
aagaggcgcguguauaaag

SEQ ID NO: 830761 - RNA, 19 nt, Homo sapiens
  misc_RNA (1)...(19): siRNA sense strand
cuccaucgauccagcagau

SEQ ID NO: 830762 - RNA, 19 nt, Homo sapiens
  misc_RNA (1)...(19): siRNA sense strand
agaggcgcguguauaaagu

SEQ ID NO: 830763 - RNA, 19 nt, Homo sapiens
  misc_RNA (1)...(19): siRNA sense strand
cagcagugaaugccaaaca

SEQ ID NO: 830764 - RNA, 19 nt, Homo sapiens
  misc_RNA (1)...(19): siRNA sense strand
agucauguccucccaagau

SEQ ID NO: 830765 - RNA, 19 nt, Homo sapiens
  misc_RNA (1)...(19): siRNA sense strand
gggcuccgcuguacaagaa

SEQ ID NO: 830766 - RNA, 19 nt, Homo sapiens
  misc_RNA (1)...(19): siRNA sense strand
gaaacuaucgcuacuucuu

SEQ ID NO: 830767 - RNA, 19 nt, Homo sapiens
  misc_RNA (1)...(19): siRNA sense strand
ggcacacgcugguuaagaa

SEQ ID NO: 830768 - RNA, 19 nt, Homo sapiens
  misc_RNA (1)...(19): siRNA sense strand
ggacaaggaggacgacuuc

SEQ ID NO: 830769 - RNA, 19 nt, Homo sapiens
  misc_RNA (1)...(19): siRNA sense strand
ggcaucaucuuccucuuug

SEQ ID NO: 830770 - RNA, 19 nt, Homo sapiens
  misc_RNA (1)...(19): siRNA sense strand
gcaggugacugggaaguuc

SEQ ID NO: 830771 - RNA, 19 nt, Homo sapiens
  misc_RNA (1)...(19): siRNA sense strand
caucgggcgucgaaacuau

SEQ ID NO: 830772 - RNA, 19 nt, Homo sapiens
  misc_RNA (1)...(19): siRNA sense strand
ccaaagcugucgccuucau

SEQ ID NO: 830773 - RNA, 19 nt, Homo sapiens
  misc_RNA (1)...(19): siRNA sense strand
ucgaaacuaucgcuacuuc

SEQ ID NO: 830774 - RNA, 19 nt, Homo sapiens
  misc_RNA (1)...(19): siRNA sense strand
caccugccauguacaaguu

SEQ ID NO: 830775 - RNA, 19 nt, Homo sapiens
  misc_RNA (1)...(19): siRNA sense strand
gccuggaccucccugacua

SEQ ID NO: 830776 - RNA, 19 nt, Homo sapiens
  misc_RNA (1)...(19): siRNA sense strand
cagcgucugugacaacugu

SEQ ID NO: 830777 - RNA, 19 nt, Homo sapiens
  misc_RNA (1)...(19): siRNA sense strand
gaagccgccuuuccuuagg

SEQ ID NO: 830778 - RNA, 19 nt, Homo sapiens
  misc_RNA (1)...(19): siRNA sense strand
ggaccacccucagcugaag

SEQ ID NO: 830779 - RNA, 19 nt, Homo sapiens
  misc_RNA (1)...(19): siRNA sense strand
acacggcacacgcugguua

SEQ ID NO: 830780 - RNA, 19 nt, Homo sapiens
  misc_RNA (1)...(19): siRNA sense strand
ggaugaggaugaggacaag

SEQ ID NO: 830781 - RNA, 19 nt, Homo sapiens
  misc_RNA (1)...(19): siRNA sense strand
uaugacagccugcucaauc

SEQ ID NO: 830782 - RNA, 19 nt, Homo sapiens
  misc_RNA (1)...(19): siRNA sense strand
cgacaccugccauguacaa

SEQ ID NO: 830783 - RNA, 19 nt, Homo sapiens
  misc_RNA (1)...(19): siRNA sense strand
ccucaaacccgccaaguac

SEQ ID NO: 830784 - RNA, 19 nt, Homo sapiens
  misc_RNA (1)...(19): siRNA sense strand
cgucuacaauggcaucauc

SEQ ID NO: 830785 - RNA, 19 nt, Homo sapiens
  misc_RNA (1)...(19): siRNA sense strand
ccugccauguacaaguuua

SEQ ID NO: 830786 - RNA, 19 nt, Homo sapiens
  misc_RNA (1)...(19): siRNA sense strand
caguuggcguggccggaua

SEQ ID NO: 830787 - RNA, 19 nt, Homo sapiens
  misc_RNA (1)...(19): siRNA sense strand
gcaacggcagccuguccua

SEQ ID NO: 830788 - RNA, 19 nt, Homo sapiens
  misc_RNA (1)...(19): siRNA sense strand
guacaagaacguggaugug

SEQ ID NO: 830789 - RNA, 19 nt, Homo sapiens
  misc_RNA (1)...(19): siRNA sense strand
gccucaaacccgccaagua

SEQ ID NO: 830790 - RNA, 19 nt, Homo sapiens
  misc_RNA (1)...(19): siRNA sense strand
uggcaucaucuuccucuuu

SEQ ID NO: 830791 - RNA, 19 nt, Homo sapiens
  misc_RNA (1)...(19): siRNA sense strand
ugaagccgccuuuccuuag

SEQ ID NO: 830792 - RNA, 19 nt, Homo sapiens
  misc_RNA (1)...(19): siRNA sense strand
uugaagccgccuuuccuua

SEQ ID NO: 830793 - RNA, 19 nt, Homo sapiens
  misc_RNA (1)...(19): siRNA sense strand
caacuguguagaggacuuu

SEQ ID NO: 830794 - RNA, 19 nt, Homo sapiens
  misc_RNA (1)...(19): siRNA sense strand
gcuguucccgucuacaaug

SEQ ID NO: 830795 - RNA, 19 nt, Homo sapiens
  misc_RNA (1)...(19): siRNA sense strand
acggcagccuguccuauga

SEQ ID NO: 830796 - RNA, 19 nt, Homo sapiens
  misc_RNA (1)...(19): siRNA sense strand
uggaccggcuggaugagaa

SEQ ID NO: 830797 - RNA, 19 nt, Homo sapiens
  misc_RNA (1)...(19): siRNA sense strand
ccgcucaaggucaagcuua

SEQ ID NO: 830798 - RNA, 19 nt, Homo sapiens
  misc_RNA (1)...(19): siRNA sense strand
cugcaccgcucaaggucaa

SEQ ID NO: 830799 - RNA, 19 nt, Homo sapiens
  misc_RNA (1)...(19): siRNA sense strand
aaacuaucgcuacuucuuc

SEQ ID NO: 830800 - RNA, 19 nt, Homo sapiens
  misc_RNA (1)...(19): siRNA sense strand
gcaucgggcgucgaaacua

SEQ ID NO: 830801 - RNA, 19 nt, Homo sapiens
  misc_RNA (1)...(19): siRNA sense strand
ccacucacccuaccugcau

SEQ ID NO: 830802 - RNA, 19 nt, Homo sapiens
  misc_RNA (1)...(19): siRNA sense strand
guauccagguccgcaugaa

SEQ ID NO: 830803 - RNA, 19 nt, Homo sapiens
  misc_RNA (1)...(19): siRNA sense strand
gcgacucaggcgucuauga

SEQ ID NO: 830804 - RNA, 19 nt, Homo sapiens
  misc_RNA (1)...(19): siRNA sense strand
cuacaauggcaucaucuuc

SEQ ID NO: 830805 - RNA, 19 nt, Homo sapiens
  misc_RNA (1)...(19): siRNA sense strand
cgucgaaacuaucgcuacu

SEQ ID NO: 830806 - RNA, 19 nt, Homo sapiens
  misc_RNA (1)...(19): siRNA sense strand
cagcuguucccgucuacaa

SEQ ID NO: 830807 - RNA, 19 nt, Homo sapiens
  misc_RNA (1)...(19): siRNA sense strand
cgaggcugcugugggaaug

SEQ ID NO: 830808 - RNA, 19 nt, Homo sapiens
  misc_RNA (1)...(19): siRNA sense strand
ugagaagccacuggacuug

SEQ ID NO: 830809 - RNA, 19 nt, Homo sapiens
  misc_RNA (1)...(19): siRNA sense strand
caacggcagccuguccuau

SEQ ID NO: 830810 - RNA, 19 nt, Homo sapiens
  misc_RNA (1)...(19): siRNA sense strand
gcaucaucuuccucuuugu

SEQ ID NO: 830811 - RNA, 19 nt, Homo sapiens
  misc_RNA (1)...(19): siRNA sense strand
cggaugaggaugaggacaa

SEQ ID NO: 830812 - RNA, 19 nt, Homo sapiens
  misc_RNA (1)...(19): siRNA sense strand
acacgcugguuaagaaggu

SEQ ID NO: 830813 - RNA, 19 nt, Homo sapiens
  misc_RNA (1)...(19): siRNA sense strand
gcacacgcugguuaagaag

SEQ ID NO: 830814 - RNA, 19 nt, Homo sapiens
  misc_RNA (1)...(19): siRNA sense strand
gggaccacccucagcugaa

SEQ ID NO: 830815 - RNA, 19 nt, Homo sapiens
  misc_RNA (1)...(19): siRNA sense strand
cccgacaccugccauguac

SEQ ID NO: 830816 - RNA, 19 nt, Homo sapiens
  misc_RNA (1)...(19): siRNA sense strand
ucaaggucaagcuuaguga

SEQ ID NO: 830817 - RNA, 19 nt, Homo sapiens
  misc_RNA (1)...(19): siRNA sense strand
gcacccucuucuucguguu

SEQ ID NO: 830818 - RNA, 19 nt, Homo sapiens
  misc_RNA (1)...(19): siRNA sense strand
gagaagagcccgcuguaug

SEQ ID NO: 830819 - RNA, 19 nt, Homo sapiens
  misc_RNA (1)...(19): siRNA sense strand
gaagaagcgaggcaaguuu

SEQ ID NO: 830820 - RNA, 19 nt, Homo sapiens
  misc_RNA (1)...(19): siRNA sense strand
ccaaugugcugcucaugaa

SEQ ID NO: 830821 - RNA, 19 nt, Homo sapiens
  misc_RNA (1)...(19): siRNA sense strand
gaaggaggcugagcacaag

SEQ ID NO: 830822 - RNA, 19 nt, Homo sapiens
  misc_RNA (1)...(19): siRNA sense strand
guacuucgccuuccucuuc

SEQ ID NO: 830823 - RNA, 19 nt, Homo sapiens
  misc_RNA (1)...(19): siRNA sense strand
ggaacguggucauguacuu

SEQ ID NO: 830824 - RNA, 19 nt, Homo sapiens
  misc_RNA (1)...(19): siRNA sense strand
gggagcaccuggagagaga

SEQ ID NO: 830825 - RNA, 19 nt, Homo sapiens
  misc_RNA (1)...(19): siRNA sense strand
agagugagaucuucaaugg

SEQ ID NO: 830826 - RNA, 19 nt, Homo sapiens
  misc_RNA (1)...(19): siRNA sense strand
ggaagaagcgaggcaaguu

SEQ ID NO: 830827 - RNA, 19 nt, Homo sapiens
  misc_RNA (1)...(19): siRNA sense strand
ucaagugucuggagucaca

SEQ ID NO: 830828 - RNA, 19 nt, Homo sapiens
  misc_RNA (1)...(19): siRNA sense strand
agaagcaguuuaaggagaa

SEQ ID NO: 830829 - RNA, 19 nt, Homo sapiens
  misc_RNA (1)...(19): siRNA sense strand
gaagaaguucacacuguau

SEQ ID NO: 830830 - RNA, 19 nt, Homo sapiens
  misc_RNA (1)...(19): siRNA sense strand
gccaggagccucaggacua

SEQ ID NO: 830831 - RNA, 19 nt, Homo sapiens
  misc_RNA (1)...(19): siRNA sense strand
gagcagccuuucgccauga

SEQ ID NO: 830832 - RNA, 19 nt, Homo sapiens
  misc_RNA (1)...(19): siRNA sense strand
gggagacaguccagaagga

SEQ ID NO: 830833 - RNA, 19 nt, Homo sapiens
  misc_RNA (1)...(19): siRNA sense strand
gaagcgaggcaaguuugua

SEQ ID NO: 830834 - RNA, 19 nt, Homo sapiens
  misc_RNA (1)...(19): siRNA sense strand
gggcaacgcagacauguuc

SEQ ID NO: 830835 - RNA, 19 nt, Homo sapiens
  misc_RNA (1)...(19): siRNA sense strand
ugaaggcgcuggugaaagc

SEQ ID NO: 830836 - RNA, 19 nt, Homo sapiens
  misc_RNA (1)...(19): siRNA sense strand
gcaaaauccucaaagagau

SEQ ID NO: 830837 - RNA, 19 nt, Homo sapiens
  misc_RNA (1)...(19): siRNA sense strand
gcagaaccgccacgagaug

SEQ ID NO: 830838 - RNA, 19 nt, Homo sapiens
  misc_RNA (1)...(19): siRNA sense strand
ccaggagccucaggacuau

SEQ ID NO: 830839 - RNA, 19 nt, Homo sapiens
  misc_RNA (1)...(19): siRNA sense strand
ccgagaagcaguuuaagga

SEQ ID NO: 830840 - RNA, 19 nt, Homo sapiens
  misc_RNA (1)...(19): siRNA sense strand
cgagauggccaccuacuuc

SEQ ID NO: 830841 - RNA, 19 nt, Homo sapiens
  misc_RNA (1)...(19): siRNA sense strand
ggcccuaccugcagaucuu

SEQ ID NO: 830842 - RNA, 19 nt, Homo sapiens
  misc_RNA (1)...(19): siRNA sense strand
gagaacuuccugagcaaga

SEQ ID NO: 830843 - RNA, 19 nt, Homo sapiens
  misc_RNA (1)...(19): siRNA sense strand
auaccaaccucaucaccuu

SEQ ID NO: 830844 - RNA, 19 nt, Homo sapiens
  misc_RNA (1)...(19): siRNA sense strand
caucaagugucuggaguca

SEQ ID NO: 830845 - RNA, 19 nt, Homo sapiens
  misc_RNA (1)...(19): siRNA sense strand
gggcugagagagcaagaaa

SEQ ID NO: 830846 - RNA, 19 nt, Homo sapiens
  misc_RNA (1)...(19): siRNA sense strand
ggacaacuggaacaagugu

SEQ ID NO: 830847 - RNA, 19 nt, Homo sapiens
  misc_RNA (1)...(19): siRNA sense strand
ccaagaucaucgugguaga

SEQ ID NO: 830848 - RNA, 19 nt, Homo sapiens
  misc_RNA (1)...(19): siRNA sense strand
agucacagaucaacuacug

SEQ ID NO: 830849 - RNA, 19 nt, Homo sapiens
  misc_RNA (1)...(19): siRNA sense strand
gcuggucaccuuccuguug

SEQ ID NO: 830850 - RNA, 19 nt, Homo sapiens
  misc_RNA (1)...(19): siRNA sense strand
cagcaacaagcccgaguuu

SEQ ID NO: 830851 - RNA, 19 nt, Homo sapiens
  misc_RNA (1)...(19): siRNA sense strand
acagcaaccucucccacuu

SEQ ID NO: 830852 - RNA, 19 nt, Homo sapiens
  misc_RNA (1)...(19): siRNA sense strand
gaacguggucauguacuuc

SEQ ID NO: 830853 - RNA, 19 nt, Homo sapiens
  misc_RNA (1)...(19): siRNA sense strand
caaccucucccacuucauc

SEQ ID NO: 830854 - RNA, 19 nt, Homo sapiens
  misc_RNA (1)...(19): siRNA sense strand
ggagaagagcccgcuguau

SEQ ID NO: 830855 - RNA, 19 nt, Homo sapiens
  misc_RNA (1)...(19): siRNA sense strand
gcagggcaacgcagacaug

SEQ ID NO: 830856 - RNA, 19 nt, Homo sapiens
  misc_RNA (1)...(19): siRNA sense strand
agaaggaggcugagcacaa

SEQ ID NO: 830857 - RNA, 19 nt, Homo sapiens
  misc_RNA (1)...(19): siRNA sense strand
gaacuuccugagcaagaug

SEQ ID NO: 830858 - RNA, 19 nt, Homo sapiens
  misc_RNA (1)...(19): siRNA sense strand
ccacgcgcgaggcgaaaua

SEQ ID NO: 830859 - RNA, 19 nt, Homo sapiens
  misc_RNA (1)...(19): siRNA sense strand
cggcugauccauaucuuug

SEQ ID NO: 830860 - RNA, 19 nt, Homo sapiens
  misc_RNA (1)...(19): siRNA sense strand
uagagcgcaugaugaagga

SEQ ID NO: 830861 - RNA, 19 nt, Homo sapiens
  misc_RNA (1)...(19): siRNA sense strand
ggcagggcuucuucacaga

SEQ ID NO: 830862 - RNA, 19 nt, Homo sapiens
  misc_RNA (1)...(19): siRNA sense strand
ggcugaggcuggagaagca

SEQ ID NO: 830863 - RNA, 19 nt, Homo sapiens
  misc_RNA (1)...(19): siRNA sense strand
gauccauaucuuugccaua

SEQ ID NO: 830864 - RNA, 19 nt, Homo sapiens
  misc_RNA (1)...(19): siRNA sense strand
ucacagacgaggacacaca

SEQ ID NO: 830865 - RNA, 19 nt, Homo sapiens
  misc_RNA (1)...(19): siRNA sense strand
gcacuggcagcaucgagau

SEQ ID NO: 830866 - RNA, 19 nt, Homo sapiens
  misc_RNA (1)...(19): siRNA sense strand
uggccgacuuccugacgua

SEQ ID NO: 830867 - RNA, 19 nt, Homo sapiens
  misc_RNA (1)...(19): siRNA sense strand
uuagauggcugggaacaac

SEQ ID NO: 830868 - RNA, 19 nt, Homo sapiens
  misc_RNA (1)...(19): siRNA sense strand
uggagucacagaucaacua

SEQ ID NO: 830869 - RNA, 19 nt, Homo sapiens
  misc_RNA (1)...(19): siRNA sense strand
ccaacuggcuggucauccu

SEQ ID NO: 830870 - RNA, 19 nt, Homo sapiens
  misc_RNA (1)...(19): siRNA sense strand
ccacuggacgagauugaug

SEQ ID NO: 830871 - RNA, 19 nt, Homo sapiens
  misc_RNA (1)...(19): siRNA sense strand
ggaacaagugugacauggu

SEQ ID NO: 830872 - RNA, 19 nt, Homo sapiens
  misc_RNA (1)...(19): siRNA sense strand
gcgcucccgugacuguguu

SEQ ID NO: 830873 - RNA, 19 nt, Homo sapiens
  misc_RNA (1)...(19): siRNA sense strand
gcguggacaucgccaagag

SEQ ID NO: 830874 - RNA, 19 nt, Homo sapiens
  misc_RNA (1)...(19): siRNA sense strand
agaagagcccgcuguaugg

SEQ ID NO: 830875 - RNA, 19 nt, Homo sapiens
  misc_RNA (1)...(19): siRNA sense strand
uggccgagaagcaguuuaa

SEQ ID NO: 830876 - RNA, 19 nt, Homo sapiens
  misc_RNA (1)...(19): siRNA sense strand
ucaucgccauguucagcua

SEQ ID NO: 830877 - RNA, 19 nt, Homo sapiens
  misc_RNA (1)...(19): siRNA sense strand
ucaccaaugugcugcucau

SEQ ID NO: 830878 - RNA, 19 nt, Homo sapiens
  misc_RNA (1)...(19): siRNA sense strand
acaacuggaacaaguguga

SEQ ID NO: 830879 - RNA, 19 nt, Homo sapiens
  misc_RNA (1)...(19): siRNA sense strand
cggagaagagcccgcugua

SEQ ID NO: 830880 - RNA, 19 nt, Homo sapiens
  misc_RNA (1)...(19): siRNA sense strand
ggacacggucauccugaag

SEQ ID NO: 830881 - RNA, 19 nt, Homo sapiens
  misc_RNA (1)...(19): siRNA sense strand
gaaguuccagcgcuacaac

SEQ ID NO: 830882 - RNA, 19 nt, Homo sapiens
  misc_RNA (1)...(19): siRNA sense strand
ugguagagcgcaugaugaa

SEQ ID NO: 830883 - RNA, 19 nt, Homo sapiens
  misc_RNA (1)...(19): siRNA sense strand
guggccaucuuccuguuca

SEQ ID NO: 830884 - RNA, 19 nt, Homo sapiens
  misc_RNA (1)...(19): siRNA sense strand
gcucuaccgcuccguguca

SEQ ID NO: 830885 - RNA, 19 nt, Homo sapiens
  misc_RNA (1)...(19): siRNA sense strand
ugcagaacaucaccucaca

SEQ ID NO: 830886 - RNA, 19 nt, Homo sapiens
  misc_RNA (1)...(19): siRNA sense strand
ccggagcucucagcacugu

SEQ ID NO: 830887 - RNA, 19 nt, Homo sapiens
  misc_RNA (1)...(19): siRNA sense strand
agacaguccagaaggagaa

SEQ ID NO: 830888 - RNA, 19 nt, Homo sapiens
  misc_RNA (1)...(19): siRNA sense strand
aagaagcgaggcaaguuug

SEQ ID NO: 830889 - RNA, 19 nt, Homo sapiens
  misc_RNA (1)...(19): siRNA sense strand
ccacuacccugaggaugac

SEQ ID NO: 830890 - RNA, 19 nt, Homo sapiens
  misc_RNA (1)...(19): siRNA sense strand
ugcccaagguggccgagaa

SEQ ID NO: 830891 - RNA, 19 nt, Homo sapiens
  misc_RNA (1)...(19): siRNA sense strand
ugaugaagcccgugugaac

SEQ ID NO: 830892 - RNA, 19 nt, Homo sapiens
  misc_RNA (1)...(19): siRNA sense strand
gggaagaagcgaggcaagu

SEQ ID NO: 830893 - RNA, 19 nt, Homo sapiens
  misc_RNA (1)...(19): siRNA sense strand
ugacgccaaggccuucuuu

SEQ ID NO: 830894 - RNA, 19 nt, Homo sapiens
  misc_RNA (1)...(19): siRNA sense strand
gagauggccaccuacuucu

SEQ ID NO: 830895 - RNA, 19 nt, Homo sapiens
  misc_RNA (1)...(19): siRNA sense strand
gaagcaguuuaaggagaag

SEQ ID NO: 830896 - RNA, 19 nt, Homo sapiens
  misc_RNA (1)...(19): siRNA sense strand
caaccugauuguggaguac

SEQ ID NO: 830897 - RNA, 19 nt, Homo sapiens
  misc_RNA (1)...(19): siRNA sense strand
ggggacaacuggaacaagu

SEQ ID NO: 830898 - RNA, 19 nt, Homo sapiens
  misc_RNA (1)...(19): siRNA sense strand
gaguuugugcgccucuuug

SEQ ID NO: 830899 - RNA, 19 nt, Homo sapiens
  misc_RNA (1)...(19): siRNA sense strand
uggacacggucauccugaa

SEQ ID NO: 830900 - RNA, 19 nt, Homo sapiens
  misc_RNA (1)...(19): siRNA sense strand
gcucaccguguaugacuuc

SEQ ID NO: 830901 - RNA, 19 nt, Homo sapiens
  misc_RNA (1)...(19): siRNA sense strand
gcaccugcucaccguguau

SEQ ID NO: 830902 - RNA, 19 nt, Homo sapiens
  misc_RNA (1)...(19): siRNA sense strand
cagcaaccucucccacuuc

SEQ ID NO: 830903 - RNA, 19 nt, Homo sapiens
  misc_RNA (1)...(19): siRNA sense strand
gugguagagcgcaugauga

SEQ ID NO: 830904 - RNA, 19 nt, Homo sapiens
  misc_RNA (1)...(19): siRNA sense strand
gcggcugauccauaucuuu

SEQ ID NO: 830905 - RNA, 19 nt, Homo sapiens
  misc_RNA (1)...(19): siRNA sense strand
acgcugcggcugauccaua

SEQ ID NO: 830906 - RNA, 19 nt, Homo sapiens
  misc_RNA (1)...(19): siRNA sense strand
gcucacacgcuggcggaaa

SEQ ID NO: 830907 - RNA, 19 nt, Homo sapiens
  misc_RNA (1)...(19): siRNA sense strand
gaggaggcccaggaggauu

SEQ ID NO: 830908 - RNA, 19 nt, Homo sapiens
  misc_RNA (1)...(19): siRNA sense strand
ggaauuggcugcauugaau

SEQ ID NO: 830909 - RNA, 19 nt, Homo sapiens
  misc_RNA (1)...(19): siRNA sense strand
gaaggaagguggugagaag

SEQ ID NO: 830910 - RNA, 19 nt, Homo sapiens
  misc_RNA (1)...(19): siRNA sense strand
guacaucaguccaaagcua

SEQ ID NO: 830911 - RNA, 19 nt, Homo sapiens
  misc_RNA (1)...(19): siRNA sense strand
cuaaagcccucugcaguua

SEQ ID NO: 830912 - RNA, 19 nt, Homo sapiens
  misc_RNA (1)...(19): siRNA sense strand
ggaagguggugagaagaua

SEQ ID NO: 830913 - RNA, 19 nt, Homo sapiens
  misc_RNA (1)...(19): siRNA sense strand
caaagaagcggaaguugaa

SEQ ID NO: 830914 - RNA, 19 nt, Homo sapiens
  misc_RNA (1)...(19): siRNA sense strand
cagagcagauggccaagua

SEQ ID NO: 830915 - RNA, 19 nt, Homo sapiens
  misc_RNA (1)...(19): siRNA sense strand
gaaagggccugcuguacca

SEQ ID NO: 830916 - RNA, 19 nt, Homo sapiens
  misc_RNA (1)...(19): siRNA sense strand
auacaggacuugaucgaua

SEQ ID NO: 830917 - RNA, 19 nt, Homo sapiens
  misc_RNA (1)...(19): siRNA sense strand
gugagaagauaaagaagaa

SEQ ID NO: 830918 - RNA, 19 nt, Homo sapiens
  misc_RNA (1)...(19): siRNA sense strand
guaaggagaagaagaagaa

SEQ ID NO: 830919 - RNA, 19 nt, Homo sapiens
  misc_RNA (1)...(19): siRNA sense strand
ggaaaggcauaaaguagag

SEQ ID NO: 830920 - RNA, 19 nt, Homo sapiens
  misc_RNA (1)...(19): siRNA sense strand
ugucagauccuuucaauga

SEQ ID NO: 830921 - RNA, 19 nt, Homo sapiens
  misc_RNA (1)...(19): siRNA sense strand
gagcagagggaccggauuu

SEQ ID NO: 830922 - RNA, 19 nt, Homo sapiens
  misc_RNA (1)...(19): siRNA sense strand
gaaauauucuggggcuuua

SEQ ID NO: 830923 - RNA, 19 nt, Homo sapiens
  misc_RNA (1)...(19): siRNA sense strand
ggaaacuucaccucuauga

SEQ ID NO: 830924 - RNA, 19 nt, Homo sapiens
  misc_RNA (1)...(19): siRNA sense strand
ccaaagaagcggaaguuga

SEQ ID NO: 830925 - RNA, 19 nt, Homo sapiens
  misc_RNA (1)...(19): siRNA sense strand
gcucaagcgugcucggaaa

SEQ ID NO: 830926 - RNA, 19 nt, Homo sapiens
  misc_RNA (1)...(19): siRNA sense strand
gaacuccuugggaauuaua

SEQ ID NO: 830927 - RNA, 19 nt, Homo sapiens
  misc_RNA (1)...(19): siRNA sense strand
caucuccauuugccaauaa

SEQ ID NO: 830928 - RNA, 19 nt, Homo sapiens
  misc_RNA (1)...(19): siRNA sense strand
aaaggaaaggcauaaagua

SEQ ID NO: 830929 - RNA, 19 nt, Homo sapiens
  misc_RNA (1)...(19): siRNA sense strand
agagaguucuggcuacaaa

SEQ ID NO: 830930 - RNA, 19 nt, Homo sapiens
  misc_RNA (1)...(19): siRNA sense strand
ccaauggaaugaugagauc

SEQ ID NO: 830931 - RNA, 19 nt, Homo sapiens
  misc_RNA (1)...(19): siRNA sense strand
gaagguggugagaagauaa

SEQ ID NO: 830932 - RNA, 19 nt, Homo sapiens
  misc_RNA (1)...(19): siRNA sense strand
uggacucgcugacggauuu

SEQ ID NO: 830933 - RNA, 19 nt, Homo sapiens
  misc_RNA (1)...(19): siRNA sense strand
gagaagauaaagaagaaga

SEQ ID NO: 830934 - RNA, 19 nt, Homo sapiens
  misc_RNA (1)...(19): siRNA sense strand
ggauuacacucacccucuu

SEQ ID NO: 830935 - RNA, 19 nt, Homo sapiens
  misc_RNA (1)...(19): siRNA sense strand
gcugggaacucugaauuca

SEQ ID NO: 830936 - RNA, 19 nt, Homo sapiens
  misc_RNA (1)...(19): siRNA sense strand
ccaguaaggagaagaagaa

SEQ ID NO: 830937 - RNA, 19 nt, Homo sapiens
  misc_RNA (1)...(19): siRNA sense strand
gcaaagccacauucaguca

SEQ ID NO: 830938 - RNA, 19 nt, Homo sapiens
  misc_RNA (1)...(19): siRNA sense strand
uacgaaguauggaggauuu

SEQ ID NO: 830939 - RNA, 19 nt, Homo sapiens
  misc_RNA (1)...(19): siRNA sense strand
gaauuggcugcauugaaua

SEQ ID NO: 830940 - RNA, 19 nt, Homo sapiens
  misc_RNA (1)...(19): siRNA sense strand
aaagggaggaggagcauaa

SEQ ID NO: 830941 - RNA, 19 nt, Homo sapiens
  misc_RNA (1)...(19): siRNA sense strand
cacaaacgcugcccagagu

SEQ ID NO: 830942 - RNA, 19 nt, Homo sapiens
  misc_RNA (1)...(19): siRNA sense strand
gcccucagaucaccaaaca

SEQ ID NO: 830943 - RNA, 19 nt, Homo sapiens
  misc_RNA (1)...(19): siRNA sense strand
ucgaacuccuugggaauua

SEQ ID NO: 830944 - RNA, 19 nt, Homo sapiens
  misc_RNA (1)...(19): siRNA sense strand
gcucugcaggcucaucuua

SEQ ID NO: 830945 - RNA, 19 nt, Homo sapiens
  misc_RNA (1)...(19): siRNA sense strand
aaaauacgguggaaagaaa

SEQ ID NO: 830946 - RNA, 19 nt, Homo sapiens
  misc_RNA (1)...(19): siRNA sense strand
agaaguacaucaguccaaa

SEQ ID NO: 830947 - RNA, 19 nt, Homo sapiens
  misc_RNA (1)...(19): siRNA sense strand
ccaaguaccaggacgaaug

SEQ ID NO: 830948 - RNA, 19 nt, Homo sapiens
  misc_RNA (1)...(19): siRNA sense strand
gagaagaagaagaagaaau

SEQ ID NO: 830949 - RNA, 19 nt, Homo sapiens
  misc_RNA (1)...(19): siRNA sense strand
uagaggcccuugcccgaaa

SEQ ID NO: 830950 - RNA, 19 nt, Homo sapiens
  misc_RNA (1)...(19): siRNA sense strand
cagcaaagccacauucagu

SEQ ID NO: 830951 - RNA, 19 nt, Homo sapiens
  misc_RNA (1)...(19): siRNA sense strand
ugaggaagaagaugaagaa

SEQ ID NO: 830952 - RNA, 19 nt, Homo sapiens
  misc_RNA (1)...(19): siRNA sense strand
cagagcuggugaagaauau

SEQ ID NO: 830953 - RNA, 19 nt, Homo sapiens
  misc_RNA (1)...(19): siRNA sense strand
agagaaagaggcucagaaa

SEQ ID NO: 830954 - RNA, 19 nt, Homo sapiens
  misc_RNA (1)...(19): siRNA sense strand
gaaagaaacguagaaaaga

SEQ ID NO: 830955 - RNA, 19 nt, Homo sapiens
  misc_RNA (1)...(19): siRNA sense strand
ugacggauuuggacuugga

SEQ ID NO: 830956 - RNA, 19 nt, Homo sapiens
  misc_RNA (1)...(19): siRNA sense strand
caaaagcaccugcagaaaa

SEQ ID NO: 830957 - RNA, 19 nt, Homo sapiens
  misc_RNA (1)...(19): siRNA sense strand
gagcagcugggaacucuga

SEQ ID NO: 830958 - RNA, 19 nt, Homo sapiens
  misc_RNA (1)...(19): siRNA sense strand
aaagguuucugucccauca

SEQ ID NO: 830959 - RNA, 19 nt, Homo sapiens
  misc_RNA (1)...(19): siRNA sense strand
gcaaggaugcccugcucaa

SEQ ID NO: 830960 - RNA, 19 nt, Homo sapiens
  misc_RNA (1)...(19): siRNA sense strand
ggagauaagaagaaagauc

SEQ ID NO: 830961 - RNA, 19 nt, Homo sapiens
  misc_RNA (1)...(19): siRNA sense strand
gcugacggauuuggacuug

SEQ ID NO: 830962 - RNA, 19 nt, Homo sapiens
  misc_RNA (1)...(19): siRNA sense strand
ggugagaagauaaagaaga

SEQ ID NO: 830963 - RNA, 19 nt, Homo sapiens
  misc_RNA (1)...(19): siRNA sense strand
ggaaagaaacguagaaaag

SEQ ID NO: 830964 - RNA, 19 nt, Homo sapiens
  misc_RNA (1)...(19): siRNA sense strand
acaaggagaagaaaucgaa

SEQ ID NO: 830965 - RNA, 19 nt, Homo sapiens
  misc_RNA (1)...(19): siRNA sense strand
cuucaauccuggccaagaa

SEQ ID NO: 830966 - RNA, 19 nt, Homo sapiens
  misc_RNA (1)...(19): siRNA sense strand
gaauacaggacuugaucga

SEQ ID NO: 830967 - RNA, 19 nt, Homo sapiens
  misc_RNA (1)...(19): siRNA sense strand
caaccuggaggacucauug

SEQ ID NO: 830968 - RNA, 19 nt, Homo sapiens
  misc_RNA (1)...(19): siRNA sense strand
cgauaacucugaggcguau

SEQ ID NO: 830969 - RNA, 19 nt, Homo sapiens
  misc_RNA (1)...(19): siRNA sense strand
gaagaaaaggaaaggcaua

SEQ ID NO: 830970 - RNA, 19 nt, Homo sapiens
  misc_RNA (1)...(19): siRNA sense strand
ugacuccucugccaaagca

SEQ ID NO: 830971 - RNA, 19 nt, Homo sapiens
  misc_RNA (1)...(19): siRNA sense strand
cgggaacccugcaguuuag

SEQ ID NO: 830972 - RNA, 19 nt, Homo sapiens
  misc_RNA (1)...(19): siRNA sense strand
ucgggaacccugcaguuua

SEQ ID NO: 830973 - RNA, 19 nt, Homo sapiens
  misc_RNA (1)...(19): siRNA sense strand
uacaggacuugaucgauau

SEQ ID NO: 830974 - RNA, 19 nt, Homo sapiens
  misc_RNA (1)...(19): siRNA sense strand
guggugagaagauaaagaa

SEQ ID NO: 830975 - RNA, 19 nt, Homo sapiens
  misc_RNA (1)...(19): siRNA sense strand
gccaggugcuucucagcuu

SEQ ID NO: 830976 - RNA, 19 nt, Homo sapiens
  misc_RNA (1)...(19): siRNA sense strand
gaagccguguccaaggaau

SEQ ID NO: 830977 - RNA, 19 nt, Homo sapiens
  misc_RNA (1)...(19): siRNA sense strand
gaauauccgagggaaggua

SEQ ID NO: 830978 - RNA, 19 nt, Homo sapiens
  misc_RNA (1)...(19): siRNA sense strand
ucggaaacuucaccucuau

SEQ ID NO: 830979 - RNA, 19 nt, Homo sapiens
  misc_RNA (1)...(19): siRNA sense strand
agauauggaugauggaagu

SEQ ID NO: 830980 - RNA, 19 nt, Homo sapiens
  misc_RNA (1)...(19): siRNA sense strand
guuaaagagaugcuaaaga

SEQ ID NO: 830981 - RNA, 19 nt, Homo sapiens
  misc_RNA (1)...(19): siRNA sense strand
uaagaagaaagaucuguca

SEQ ID NO: 830982 - RNA, 19 nt, Homo sapiens
  misc_RNA (1)...(19): siRNA sense strand
gcagucaccccucaauuuu

SEQ ID NO: 830983 - RNA, 19 nt, Homo sapiens
  misc_RNA (1)...(19): siRNA sense strand
ugggaacucugaauucaca

SEQ ID NO: 830984 - RNA, 19 nt, Homo sapiens
  misc_RNA (1)...(19): siRNA sense strand
caaggaauuggcugcauug

SEQ ID NO: 830985 - RNA, 19 nt, Homo sapiens
  misc_RNA (1)...(19): siRNA sense strand
ggaugaggaagaagaugaa

SEQ ID NO: 830986 - RNA, 19 nt, Homo sapiens
  misc_RNA (1)...(19): siRNA sense strand
gcagagggaccggauuugu

SEQ ID NO: 830987 - RNA, 19 nt, Homo sapiens
  misc_RNA (1)...(19): siRNA sense strand
cagugagucuccagaagga

SEQ ID NO: 830988 - RNA, 19 nt, Homo sapiens
  misc_RNA (1)...(19): siRNA sense strand
caagcgugcucggaaacuu

SEQ ID NO: 830989 - RNA, 19 nt, Homo sapiens
  misc_RNA (1)...(19): siRNA sense strand
ccagcucaaucuccaaaca

SEQ ID NO: 830990 - RNA, 19 nt, Homo sapiens
  misc_RNA (1)...(19): siRNA sense strand
aaagaugacacuuaugaca

SEQ ID NO: 830991 - RNA, 19 nt, Homo sapiens
  misc_RNA (1)...(19): siRNA sense strand
ccuaaagcccucugcaguu

SEQ ID NO: 830992 - RNA, 19 nt, Homo sapiens
  misc_RNA (1)...(19): siRNA sense strand
gcuuguuccugcuucuuug

SEQ ID NO: 830993 - RNA, 19 nt, Homo sapiens
  misc_RNA (1)...(19): siRNA sense strand
ugaccucgccgucccuaaa

SEQ ID NO: 830994 - RNA, 19 nt, Homo sapiens
  misc_RNA (1)...(19): siRNA sense strand
gagccuggucccuggcaua

SEQ ID NO: 830995 - RNA, 19 nt, Homo sapiens
  misc_RNA (1)...(19): siRNA sense strand
ccaucuccauuugccaaua

SEQ ID NO: 830996 - RNA, 19 nt, Homo sapiens
  misc_RNA (1)...(19): siRNA sense strand
cagagggaccggauuuguu

SEQ ID NO: 830997 - RNA, 19 nt, Homo sapiens
  misc_RNA (1)...(19): siRNA sense strand
gaagcucaaggaagccauu

SEQ ID NO: 830998 - RNA, 19 nt, Homo sapiens
  misc_RNA (1)...(19): siRNA sense strand
augccuaucuugcgucauu

SEQ ID NO: 830999 - RNA, 19 nt, Homo sapiens
  misc_RNA (1)...(19): siRNA sense strand
cccaggauauuaauggaau

SEQ ID NO: 831000 - RNA, 19 nt, Homo sapiens
  misc_RNA (1)...(19): siRNA sense strand
ccgacuccuucaucgauaa

SEQ ID NO: 831001 - RNA, 19 nt, Homo sapiens
  misc_RNA (1)...(19): siRNA sense strand
gauaagaagaaagaucugu

SEQ ID NO: 831002 - RNA, 19 nt, Homo sapiens
  misc_RNA (1)...(19): siRNA sense strand
agcagcagcucucacaaga

SEQ ID NO: 831003 - RNA, 19 nt, Homo sapiens
  misc_RNA (1)...(19): siRNA sense strand
cagcugggaacucugaauu

SEQ ID NO: 831004 - RNA, 19 nt, Homo sapiens
  misc_RNA (1)...(19): siRNA sense strand
cgucuacgaagccugauaa

SEQ ID NO: 831005 - RNA, 19 nt, Homo sapiens
  misc_RNA (1)...(19): siRNA sense strand
ggaagaggagaaagacaag

SEQ ID NO: 831006 - RNA, 19 nt, Homo sapiens
  misc_RNA (1)...(19): siRNA sense strand
ggagaagaagaagaagaaa

SEQ ID NO: 831007 - RNA, 19 nt, Homo sapiens
  misc_RNA (1)...(19): siRNA sense strand
acucugaggcguaugauga

SEQ ID NO: 831008 - RNA, 19 nt, Homo sapiens
  misc_RNA (1)...(19): siRNA sense strand
cggcagaucuucucauauu

SEQ ID NO: 831009 - RNA, 19 nt, Homo sapiens
  misc_RNA (1)...(19): siRNA sense strand
gaacaucuacaauagcuuu

SEQ ID NO: 831010 - RNA, 19 nt, Homo sapiens
  misc_RNA (1)...(19): siRNA sense strand
ggaaggagcuaagugcaau

SEQ ID NO: 831011 - RNA, 19 nt, Homo sapiens
  misc_RNA (1)...(19): siRNA sense strand
ugaagcauguggaguauga

SEQ ID NO: 831012 - RNA, 19 nt, Homo sapiens
  misc_RNA (1)...(19): siRNA sense strand
ggaacuacuucucccugua

SEQ ID NO: 831013 - RNA, 19 nt, Homo sapiens
  misc_RNA (1)...(19): siRNA sense strand
cgacaaggcugcacaacag

SEQ ID NO: 831014 - RNA, 19 nt, Homo sapiens
  misc_RNA (1)...(19): siRNA sense strand
gcucggaugugcagaacaa

SEQ ID NO: 831015 - RNA, 19 nt, Homo sapiens
  misc_RNA (1)...(19): siRNA sense strand
cgauggagcugcggaacua

SEQ ID NO: 831016 - RNA, 19 nt, Homo sapiens
  misc_RNA (1)...(19): siRNA sense strand
acgaauuccugaacuguaa

SEQ ID NO: 831017 - RNA, 19 nt, Homo sapiens
  misc_RNA (1)...(19): siRNA sense strand
gagcugauccggaacaucu

SEQ ID NO: 831018 - RNA, 19 nt, Homo sapiens
  misc_RNA (1)...(19): siRNA sense strand
uggagaagcugaaccucuu

SEQ ID NO: 831019 - RNA, 19 nt, Homo sapiens
  misc_RNA (1)...(19): siRNA sense strand
gcacaaguacagccugaug

SEQ ID NO: 831020 - RNA, 19 nt, Homo sapiens
  misc_RNA (1)...(19): siRNA sense strand
gaaggagcuaagugcaaua

SEQ ID NO: 831021 - RNA, 19 nt, Homo sapiens
  misc_RNA (1)...(19): siRNA sense strand
guauacagacgguacaaug

SEQ ID NO: 831022 - RNA, 19 nt, Homo sapiens
  misc_RNA (1)...(19): siRNA sense strand
ugacauccaggcucaguuu

SEQ ID NO: 831023 - RNA, 19 nt, Homo sapiens
  misc_RNA (1)...(19): siRNA sense strand
ggaugugcagaacaaguua

SEQ ID NO: 831024 - RNA, 19 nt, Homo sapiens
  misc_RNA (1)...(19): siRNA sense strand
gaaaggccugucuguggaa

SEQ ID NO: 831025 - RNA, 19 nt, Homo sapiens
  misc_RNA (1)...(19): siRNA sense strand
gaacuacuucucccuguac

SEQ ID NO: 831026 - RNA, 19 nt, Homo sapiens
  misc_RNA (1)...(19): siRNA sense strand
agaacgacgugguggagaa

SEQ ID NO: 831027 - RNA, 19 nt, Homo sapiens
  misc_RNA (1)...(19): siRNA sense strand
gagaugcuccugcacaagu

SEQ ID NO: 831028 - RNA, 19 nt, Homo sapiens
  misc_RNA (1)...(19): siRNA sense strand
ugcggcagaucuucucaua

SEQ ID NO: 831029 - RNA, 19 nt, Homo sapiens
  misc_RNA (1)...(19): siRNA sense strand
gacgaauuccugaacugua

SEQ ID NO: 831030 - RNA, 19 nt, Homo sapiens
  misc_RNA (1)...(19): siRNA sense strand
acaaggagaugagcaaggu

SEQ ID NO: 831031 - RNA, 19 nt, Homo sapiens
  misc_RNA (1)...(19): siRNA sense strand
caggagaacgcgauucaga

SEQ ID NO: 831032 - RNA, 19 nt, Homo sapiens
  misc_RNA (1)...(19): siRNA sense strand
cgucaacucucagauccaa

SEQ ID NO: 831033 - RNA, 19 nt, Homo sapiens
  misc_RNA (1)...(19): siRNA sense strand
ggacgaauuccugaacugu

SEQ ID NO: 831034 - RNA, 19 nt, Homo sapiens
  misc_RNA (1)...(19): siRNA sense strand
uaagugcaauagggucuga

SEQ ID NO: 831035 - RNA, 19 nt, Homo sapiens
  misc_RNA (1)...(19): siRNA sense strand
gcauguggaguaugagguu

SEQ ID NO: 831036 - RNA, 19 nt, Homo sapiens
  misc_RNA (1)...(19): siRNA sense strand
gggacgaauuccugaacug

SEQ ID NO: 831037 - RNA, 19 nt, Homo sapiens
  misc_RNA (1)...(19): siRNA sense strand
agaagggcguguugcacaa

SEQ ID NO: 831038 - RNA, 19 nt, Homo sapiens
  misc_RNA (1)...(19): siRNA sense strand
cgacaaugcggcagaucuu

SEQ ID NO: 831039 - RNA, 19 nt, Homo sapiens
  misc_RNA (1)...(19): siRNA sense strand
uauacagacgguacaauga

SEQ ID NO: 831040 - RNA, 19 nt, Homo sapiens
  misc_RNA (1)...(19): siRNA sense strand
gggaaggagcuaagugcaa

SEQ ID NO: 831041 - RNA, 19 nt, Homo sapiens
  misc_RNA (1)...(19): siRNA sense strand
acaaugacuucguggucuu

SEQ ID NO: 831042 - RNA, 19 nt, Homo sapiens
  misc_RNA (1)...(19): siRNA sense strand
agaacgcgauucagacgau

SEQ ID NO: 831043 - RNA, 19 nt, Homo sapiens
  misc_RNA (1)...(19): siRNA sense strand
gaacaaguuaaaggaguca

SEQ ID NO: 831044 - RNA, 19 nt, Homo sapiens
  misc_RNA (1)...(19): siRNA sense strand
ggcagaucuucucauauuc

SEQ ID NO: 831045 - RNA, 19 nt, Homo sapiens
  misc_RNA (1)...(19): siRNA sense strand
caaguccucgguauacaga

SEQ ID NO: 831046 - RNA, 19 nt, Homo sapiens
  misc_RNA (1)...(19): siRNA sense strand
cggaacaucuacaauagcu

SEQ ID NO: 831047 - RNA, 19 nt, Homo sapiens
  misc_RNA (1)...(19): siRNA sense strand
uccggaacaucuacaauag

SEQ ID NO: 831048 - RNA, 19 nt, Homo sapiens
  misc_RNA (1)...(19): siRNA sense strand
acaaguacagccugaugaa

SEQ ID NO: 831049 - RNA, 19 nt, Homo sapiens
  misc_RNA (1)...(19): siRNA sense strand
gaugugcagaacaaguuaa

SEQ ID NO: 831050 - RNA, 19 nt, Homo sapiens
  misc_RNA (1)...(19): siRNA sense strand
aaguacagccugaugaaga

SEQ ID NO: 831051 - RNA, 19 nt, Homo sapiens
  misc_RNA (1)...(19): siRNA sense strand
gcagaucuucucauauucg

SEQ ID NO: 831052 - RNA, 19 nt, Homo sapiens
  misc_RNA (1)...(19): siRNA sense strand
ugagcaagguguggaacga

SEQ ID NO: 831053 - RNA, 19 nt, Homo sapiens
  misc_RNA (1)...(19): siRNA sense strand
gcaugagaagggcguguug

SEQ ID NO: 831054 - RNA, 19 nt, Homo sapiens
  misc_RNA (1)...(19): siRNA sense strand
ccugaagcauguggaguau

SEQ ID NO: 831055 - RNA, 19 nt, Homo sapiens
  misc_RNA (1)...(19): siRNA sense strand
gugcagaacaaguuaaagg

SEQ ID NO: 831056 - RNA, 19 nt, Homo sapiens
  misc_RNA (1)...(19): siRNA sense strand
ugaagcaggcucugaaagg

SEQ ID NO: 831057 - RNA, 19 nt, Homo sapiens
  misc_RNA (1)...(19): siRNA sense strand
gcuucaaguccucgguaua

SEQ ID NO: 831058 - RNA, 19 nt, Homo sapiens
  misc_RNA (1)...(19): siRNA sense strand
uuaaaggagucagcacagu

SEQ ID NO: 831059 - RNA, 19 nt, Homo sapiens
  misc_RNA (1)...(19): siRNA sense strand
guaagcaggaagagaacga

SEQ ID NO: 831060 - RNA, 19 nt, Homo sapiens
  misc_RNA (1)...(19): siRNA sense strand
cggaugugcagaacaaguu

SEQ ID NO: 831061 - RNA, 19 nt, Homo sapiens
  misc_RNA (1)...(19): siRNA sense strand
gcgccuucgucaacucuca

SEQ ID NO: 831062 - RNA, 19 nt, Homo sapiens
  misc_RNA (1)...(19): siRNA sense strand
cauguggaguaugagguuu

SEQ ID NO: 831063 - RNA, 19 nt, Homo sapiens
  misc_RNA (1)...(19): siRNA sense strand
ugaagaggcagaugaugag

SEQ ID NO: 831064 - RNA, 19 nt, Homo sapiens
  misc_RNA (1)...(19): siRNA sense strand
gagcugacagggaguucau

SEQ ID NO: 831065 - RNA, 19 nt, Homo sapiens
  misc_RNA (1)...(19): siRNA sense strand
augaagaggcagaugauga

SEQ ID NO: 831066 - RNA, 19 nt, Homo sapiens
  misc_RNA (1)...(19): siRNA sense strand
cacaaguacagccugauga

SEQ ID NO: 831067 - RNA, 19 nt, Homo sapiens
  misc_RNA (1)...(19): siRNA sense strand
gaacgacgugguggagaag

SEQ ID NO: 831068 - RNA, 19 nt, Homo sapiens
  misc_RNA (1)...(19): siRNA sense strand
gauccggaacaucuacaau

SEQ ID NO: 831069 - RNA, 19 nt, Homo sapiens
  misc_RNA (1)...(19): siRNA sense strand
auccggaacaucuacaaua

SEQ ID NO: 831070 - RNA, 19 nt, Homo sapiens
  misc_RNA (1)...(19): siRNA sense strand
caagggcacaaggagauga

SEQ ID NO: 831071 - RNA, 19 nt, Homo sapiens
  misc_RNA (1)...(19): siRNA sense strand
gaugaagaggcagaugaug

SEQ ID NO: 831072 - RNA, 19 nt, Homo sapiens
  misc_RNA (1)...(19): siRNA sense strand
aggguaagcaggaagagaa

SEQ ID NO: 831073 - RNA, 19 nt, Homo sapiens
  misc_RNA (1)...(19): siRNA sense strand
agaugcuccugcacaaguu

SEQ ID NO: 831074 - RNA, 19 nt, Homo sapiens
  misc_RNA (1)...(19): siRNA sense strand
ggaauucucucucggacua

SEQ ID NO: 831075 - RNA, 19 nt, Homo sapiens
  misc_RNA (1)...(19): siRNA sense strand
gcacagaaaugcauugacu

SEQ ID NO: 831076 - RNA, 19 nt, Homo sapiens
  misc_RNA (1)...(19): siRNA sense strand
gaggacaugucuuaucuga

SEQ ID NO: 831077 - RNA, 19 nt, Homo sapiens
  misc_RNA (1)...(19): siRNA sense strand
gauccuggguccugacuuu

SEQ ID NO: 831078 - RNA, 19 nt, Homo sapiens
  misc_RNA (1)...(19): siRNA sense strand
gcacagccaguaaggaauu

SEQ ID NO: 831079 - RNA, 19 nt, Homo sapiens
  misc_RNA (1)...(19): siRNA sense strand
agaaaugcauugacuggaa

SEQ ID NO: 831080 - RNA, 19 nt, Homo sapiens
  misc_RNA (1)...(19): siRNA sense strand
gaagaaagaagaggguuau

SEQ ID NO: 831081 - RNA, 19 nt, Homo sapiens
  misc_RNA (1)...(19): siRNA sense strand
ggacgaguuucugaccuuu

SEQ ID NO: 831082 - RNA, 19 nt, Homo sapiens
  misc_RNA (1)...(19): siRNA sense strand
guaaggaauuaaaggacuu

SEQ ID NO: 831083 - RNA, 19 nt, Homo sapiens
  misc_RNA (1)...(19): siRNA sense strand
acagacaccuccagagaga

SEQ ID NO: 831084 - RNA, 19 nt, Homo sapiens
  misc_RNA (1)...(19): siRNA sense strand
ggaauuaaaggacuucaag

SEQ ID NO: 831085 - RNA, 19 nt, Homo sapiens
  misc_RNA (1)...(19): siRNA sense strand
cccagugucuguccuauga

SEQ ID NO: 831086 - RNA, 19 nt, Homo sapiens
  misc_RNA (1)...(19): siRNA sense strand
gugagggucuccuacuuug

SEQ ID NO: 831087 - RNA, 19 nt, Homo sapiens
  misc_RNA (1)...(19): siRNA sense strand
gagagacaaucuucaugca

SEQ ID NO: 831088 - RNA, 19 nt, Homo sapiens
  misc_RNA (1)...(19): siRNA sense strand
ucacuggcgucgauauuuc

SEQ ID NO: 831089 - RNA, 19 nt, Homo sapiens
  misc_RNA (1)...(19): siRNA sense strand
gggcacagccaguaaggaa

SEQ ID NO: 831090 - RNA, 19 nt, Homo sapiens
  misc_RNA (1)...(19): siRNA sense strand
gugcagcugucccugaaga

SEQ ID NO: 831091 - RNA, 19 nt, Homo sapiens
  misc_RNA (1)...(19): siRNA sense strand
ggugagggucuccuacuuu

SEQ ID NO: 831092 - RNA, 19 nt, Homo sapiens
  misc_RNA (1)...(19): siRNA sense strand
ggacacucauggcuccaau

SEQ ID NO: 831093 - RNA, 19 nt, Homo sapiens
  misc_RNA (1)...(19): siRNA sense strand
gaccaucugcccucaaguu

SEQ ID NO: 831094 - RNA, 19 nt, Homo sapiens
  misc_RNA (1)...(19): siRNA sense strand
agcaggagaucaaguucua

SEQ ID NO: 831095 - RNA, 19 nt, Homo sapiens
  misc_RNA (1)...(19): siRNA sense strand
agacagacaccuccagaga

SEQ ID NO: 831096 - RNA, 19 nt, Homo sapiens
  misc_RNA (1)...(19): siRNA sense strand
ggagaucaaguucuaugug

SEQ ID NO: 831097 - RNA, 19 nt, Homo sapiens
  misc_RNA (1)...(19): siRNA sense strand
gguccugacuuuggauaug

SEQ ID NO: 831098 - RNA, 19 nt, Homo sapiens
  misc_RNA (1)...(19): siRNA sense strand
agaagaaagaagaggguua

SEQ ID NO: 831099 - RNA, 19 nt, Homo sapiens
  misc_RNA (1)...(19): siRNA sense strand
agacacugaugcagacaug

SEQ ID NO: 831100 - RNA, 19 nt, Homo sapiens
  misc_RNA (1)...(19): siRNA sense strand
gcugcugccuggaggagaa

SEQ ID NO: 831101 - RNA, 19 nt, Homo sapiens
  misc_RNA (1)...(19): siRNA sense strand
uggaggacaugucuuaucu

SEQ ID NO: 831102 - RNA, 19 nt, Homo sapiens
  misc_RNA (1)...(19): siRNA sense strand
gggagcaggagaucaaguu

SEQ ID NO: 831103 - RNA, 19 nt, Homo sapiens
  misc_RNA (1)...(19): siRNA sense strand
caaucuucaugcacagaaa

SEQ ID NO: 831104 - RNA, 19 nt, Homo sapiens
  misc_RNA (1)...(19): siRNA sense strand
ccaguaaggaauuaaagga

SEQ ID NO: 831105 - RNA, 19 nt, Homo sapiens
  misc_RNA (1)...(19): siRNA sense strand
gaacugugaccgggacaau

SEQ ID NO: 831106 - RNA, 19 nt, Homo sapiens
  misc_RNA (1)...(19): siRNA sense strand
gcgucgauauuucccuuga

SEQ ID NO: 831107 - RNA, 19 nt, Homo sapiens
  misc_RNA (1)...(19): siRNA sense strand
guuggccgcuagacacuga

SEQ ID NO: 831108 - RNA, 19 nt, Homo sapiens
  misc_RNA (1)...(19): siRNA sense strand
cacagccaguaaggaauua

SEQ ID NO: 831109 - RNA, 19 nt, Homo sapiens
  misc_RNA (1)...(19): siRNA sense strand
gcacugcaucuucauugau

SEQ ID NO: 831110 - RNA, 19 nt, Homo sapiens
  misc_RNA (1)...(19): siRNA sense strand
gcauugacuggaaccguaa

SEQ ID NO: 831111 - RNA, 19 nt, Homo sapiens
  misc_RNA (1)...(19): siRNA sense strand
gcacaggcaaggugaagag

SEQ ID NO: 831112 - RNA, 19 nt, Homo sapiens
  misc_RNA (1)...(19): siRNA sense strand
gaaaugaccgcuggaucca

SEQ ID NO: 831113 - RNA, 19 nt, Homo sapiens
  misc_RNA (1)...(19): siRNA sense strand
ggaggcagcccaguuugau

SEQ ID NO: 831114 - RNA, 19 nt, Homo sapiens
  misc_RNA (1)...(19): siRNA sense strand
gaaccguaaugugcugaag

SEQ ID NO: 831115 - RNA, 19 nt, Homo sapiens
  misc_RNA (1)...(19): siRNA sense strand
auauuucccuugagguuga

SEQ ID NO: 831116 - RNA, 19 nt, Homo sapiens
  misc_RNA (1)...(19): siRNA sense strand
gggaggcagcccaguuuga

SEQ ID NO: 831117 - RNA, 19 nt, Homo sapiens
  misc_RNA (1)...(19): siRNA sense strand
gagauggaguuuggcuaca

SEQ ID NO: 831118 - RNA, 19 nt, Homo sapiens
  misc_RNA (1)...(19): siRNA sense strand
ggguggaggucuucauggu

SEQ ID NO: 831119 - RNA, 19 nt, Homo sapiens
  misc_RNA (1)...(19): siRNA sense strand
ucccagacaugguuaacau

SEQ ID NO: 831120 - RNA, 19 nt, Homo sapiens
  misc_RNA (1)...(19): siRNA sense strand
ccagagagacaaucuucau

SEQ ID NO: 831121 - RNA, 19 nt, Homo sapiens
  misc_RNA (1)...(19): siRNA sense strand
aagaagcauuaaugagaug

SEQ ID NO: 831122 - RNA, 19 nt, Homo sapiens
  misc_RNA (1)...(19): siRNA sense strand
gaucaugacgcccaacacu

SEQ ID NO: 831123 - RNA, 19 nt, Homo sapiens
  misc_RNA (1)...(19): siRNA sense strand
cgauauuucccuugagguu

SEQ ID NO: 831124 - RNA, 19 nt, Homo sapiens
  misc_RNA (1)...(19): siRNA sense strand
uggcugaccugcaggacau

SEQ ID NO: 831125 - RNA, 19 nt, Homo sapiens
  misc_RNA (1)...(19): siRNA sense strand
ucaugacgcccaacacuca

SEQ ID NO: 831126 - RNA, 19 nt, Homo sapiens
  misc_RNA (1)...(19): siRNA sense strand
agagugacaucguggacau

SEQ ID NO: 831127 - RNA, 19 nt, Homo sapiens
  misc_RNA (1)...(19): siRNA sense strand
uccaagagaagaaagaaga

SEQ ID NO: 831128 - RNA, 19 nt, Homo sapiens
  misc_RNA (1)...(19): siRNA sense strand
uuaccucacuggcgucgau

SEQ ID NO: 831129 - RNA, 19 nt, Homo sapiens
  misc_RNA (1)...(19): siRNA sense strand
ccuccagccuugacuccuu

SEQ ID NO: 831130 - RNA, 19 nt, Homo sapiens
  misc_RNA (1)...(19): siRNA sense strand
caggagaucaaguucuaug

SEQ ID NO: 831131 - RNA, 19 nt, Homo sapiens
  misc_RNA (1)...(19): siRNA sense strand
gcagcugucccugaagaug

SEQ ID NO: 831132 - RNA, 19 nt, Homo sapiens
  misc_RNA (1)...(19): siRNA sense strand
guccugacuuuggauaugu

SEQ ID NO: 831133 - RNA, 19 nt, Homo sapiens
  misc_RNA (1)...(19): siRNA sense strand
cuguaugugugcagaguga

SEQ ID NO: 831134 - RNA, 19 nt, Homo sapiens
  misc_RNA (1)...(19): siRNA sense strand
gaacgugcccuuuucugau

SEQ ID NO: 831135 - RNA, 19 nt, Homo sapiens
  misc_RNA (1)...(19): siRNA sense strand
uggacgaguuucugaccuu

SEQ ID NO: 831136 - RNA, 19 nt, Homo sapiens
  misc_RNA (1)...(19): siRNA sense strand
ccagggcagugcggaacuu

SEQ ID NO: 831137 - RNA, 19 nt, Homo sapiens
  misc_RNA (1)...(19): siRNA sense strand
ccaagggugccaacagcuu

SEQ ID NO: 831138 - RNA, 19 nt, Homo sapiens
  misc_RNA (1)...(19): siRNA sense strand
gggcuaucuugcuggugaa

SEQ ID NO: 831139 - RNA, 19 nt, Homo sapiens
  misc_RNA (1)...(19): siRNA sense strand
ugacuggaaccguaaugug

SEQ ID NO: 831140 - RNA, 19 nt, Homo sapiens
  misc_RNA (1)...(19): siRNA sense strand
acgaguuucugaccuuugu

SEQ ID NO: 831141 - RNA, 19 nt, Homo sapiens
  misc_RNA (1)...(19): siRNA sense strand
ggagcaggagaucaaguuc

SEQ ID NO: 831142 - RNA, 19 nt, Homo sapiens
  misc_RNA (1)...(19): siRNA sense strand
cagagagacaaucuucaug

SEQ ID NO: 831143 - RNA, 19 nt, Homo sapiens
  misc_RNA (1)...(19): siRNA sense strand
gagcaggagaucaaguucu

SEQ ID NO: 831144 - RNA, 19 nt, Homo sapiens
  misc_RNA (1)...(19): siRNA sense strand
caaugcugcugagcugcaa

SEQ ID NO: 831145 - RNA, 19 nt, Homo sapiens
  misc_RNA (1)...(19): siRNA sense strand
aggacgagauggaguuugg

SEQ ID NO: 831146 - RNA, 19 nt, Homo sapiens
  misc_RNA (1)...(19): siRNA sense strand
cagccaguaaggaauuaaa

SEQ ID NO: 831147 - RNA, 19 nt, Homo sapiens
  misc_RNA (1)...(19): siRNA sense strand
gguuaacaugguggucuua

SEQ ID NO: 831148 - RNA, 19 nt, Homo sapiens
  misc_RNA (1)...(19): siRNA sense strand
ccaguuugauggguuaaaa

SEQ ID NO: 831149 - RNA, 19 nt, Homo sapiens
  misc_RNA (1)...(19): siRNA sense strand
ucaaggugagggucuccua

SEQ ID NO: 831150 - RNA, 19 nt, Homo sapiens
  misc_RNA (1)...(19): siRNA sense strand
cauguggacgaguuucuga

SEQ ID NO: 831151 - RNA, 19 nt, Homo sapiens
  misc_RNA (1)...(19): siRNA sense strand
acugcaagcugaccaucug

SEQ ID NO: 831152 - RNA, 19 nt, Homo sapiens
  misc_RNA (1)...(19): siRNA sense strand
gcaaagagcuucaacaauu

SEQ ID NO: 831153 - RNA, 19 nt, Homo sapiens
  misc_RNA (1)...(19): siRNA sense strand
gaaagggacuugaauguga

SEQ ID NO: 831154 - RNA, 19 nt, Homo sapiens
  misc_RNA (1)...(19): siRNA sense strand
gaaagaaacugaagugcaa

SEQ ID NO: 831155 - RNA, 19 nt, Homo sapiens
  misc_RNA (1)...(19): siRNA sense strand
gcaaagaagucaaugcaaa

SEQ ID NO: 831156 - RNA, 19 nt, Homo sapiens
  misc_RNA (1)...(19): siRNA sense strand
gaaagaagauggaaagaag

SEQ ID NO: 831157 - RNA, 19 nt, Homo sapiens
  misc_RNA (1)...(19): siRNA sense strand
gaaaguggccuguccagua

SEQ ID NO: 831158 - RNA, 19 nt, Homo sapiens
  misc_RNA (1)...(19): siRNA sense strand
gcaaagagaauguuagaaa

SEQ ID NO: 831159 - RNA, 19 nt, Homo sapiens
  misc_RNA (1)...(19): siRNA sense strand
ccaaagaccucauucauag

SEQ ID NO: 831160 - RNA, 19 nt, Homo sapiens
  misc_RNA (1)...(19): siRNA sense strand
caaagagcuucaacaauuu

SEQ ID NO: 831161 - RNA, 19 nt, Homo sapiens
  misc_RNA (1)...(19): siRNA sense strand
agagagacauggcuuaaua

SEQ ID NO: 831162 - RNA, 19 nt, Homo sapiens
  misc_RNA (1)...(19): siRNA sense strand
gaaugucuuuccugacuua

SEQ ID NO: 831163 - RNA, 19 nt, Homo sapiens
  misc_RNA (1)...(19): siRNA sense strand
gaaaugacaauccauauuc

SEQ ID NO: 831164 - RNA, 19 nt, Homo sapiens
  misc_RNA (1)...(19): siRNA sense strand
gaacaggauccgaaaguuu

SEQ ID NO: 831165 - RNA, 19 nt, Homo sapiens
  misc_RNA (1)...(19): siRNA sense strand
gaauacaaccagagucaua

SEQ ID NO: 831166 - RNA, 19 nt, Homo sapiens
  misc_RNA (1)...(19): siRNA sense strand
ggccauauauucagaaaug

SEQ ID NO: 831167 - RNA, 19 nt, Homo sapiens
  misc_RNA (1)...(19): siRNA sense strand
gggcgagucuuggcauuua

SEQ ID NO: 831168 - RNA, 19 nt, Homo sapiens
  misc_RNA (1)...(19): siRNA sense strand
gaauugaugugacacuuuc

SEQ ID NO: 831169 - RNA, 19 nt, Homo sapiens
  misc_RNA (1)...(19): siRNA sense strand
ugaaagccaucuugugauu

SEQ ID NO: 831170 - RNA, 19 nt, Homo sapiens
  misc_RNA (1)...(19): siRNA sense strand
aaaguggccuguccaguaa

SEQ ID NO: 831171 - RNA, 19 nt, Homo sapiens
  misc_RNA (1)...(19): siRNA sense strand
uaaguucacugucaauuca

SEQ ID NO: 831172 - RNA, 19 nt, Homo sapiens
  misc_RNA (1)...(19): siRNA sense strand
gaacaauuccuccagaugu

SEQ ID NO: 831173 - RNA, 19 nt, Homo sapiens
  misc_RNA (1)...(19): siRNA sense strand
ggaagcaaucuauuaauga

SEQ ID NO: 831174 - RNA, 19 nt, Homo sapiens
  misc_RNA (1)...(19): siRNA sense strand
aaagggagcugcgaaagaa

SEQ ID NO: 831175 - RNA, 19 nt, Homo sapiens
  misc_RNA (1)...(19): siRNA sense strand
caugggacgugucaguuua

SEQ ID NO: 831176 - RNA, 19 nt, Homo sapiens
  misc_RNA (1)...(19): siRNA sense strand
gaugugugguggugaaauu

SEQ ID NO: 831177 - RNA, 19 nt, Homo sapiens
  misc_RNA (1)...(19): siRNA sense strand
gggaagccauggccuuaaa

SEQ ID NO: 831178 - RNA, 19 nt, Homo sapiens
  misc_RNA (1)...(19): siRNA sense strand
gagcaaagagcuucaacaa

SEQ ID NO: 831179 - RNA, 19 nt, Homo sapiens
  misc_RNA (1)...(19): siRNA sense strand
gagaaugucuuuccugacu

SEQ ID NO: 831180 - RNA, 19 nt, Homo sapiens
  misc_RNA (1)...(19): siRNA sense strand
gaaggaggcagaaagaaga

SEQ ID NO: 831181 - RNA, 19 nt, Homo sapiens
  misc_RNA (1)...(19): siRNA sense strand
gaagcaaucuauuaaugag

SEQ ID NO: 831182 - RNA, 19 nt, Homo sapiens
  misc_RNA (1)...(19): siRNA sense strand
ugucauggcugguggauug

SEQ ID NO: 831183 - RNA, 19 nt, Homo sapiens
  misc_RNA (1)...(19): siRNA sense strand
uaaaauggcugcauaaauc

SEQ ID NO: 831184 - RNA, 19 nt, Homo sapiens
  misc_RNA (1)...(19): siRNA sense strand
gagcagcuaguucacaaua

SEQ ID NO: 831185 - RNA, 19 nt, Homo sapiens
  misc_RNA (1)...(19): siRNA sense strand
auaaggagcuguucuaugg

SEQ ID NO: 831186 - RNA, 19 nt, Homo sapiens
  misc_RNA (1)...(19): siRNA sense strand
gcauuuaucuuuguagcuu

SEQ ID NO: 831187 - RNA, 19 nt, Homo sapiens
  misc_RNA (1)...(19): siRNA sense strand
acaauaaggugcccuguca

SEQ ID NO: 831188 - RNA, 19 nt, Homo sapiens
  misc_RNA (1)...(19): siRNA sense strand
ggagggagcggauaggauu

SEQ ID NO: 831189 - RNA, 19 nt, Homo sapiens
  misc_RNA (1)...(19): siRNA sense strand
gcaaaaguuucaaauggua

SEQ ID NO: 831190 - RNA, 19 nt, Homo sapiens
  misc_RNA (1)...(19): siRNA sense strand
gaauagaagugagaugucu

SEQ ID NO: 831191 - RNA, 19 nt, Homo sapiens
  misc_RNA (1)...(19): siRNA sense strand
gcuaguggugugcuuauua

SEQ ID NO: 831192 - RNA, 19 nt, Homo sapiens
  misc_RNA (1)...(19): siRNA sense strand
ggauaugaguuacaugaca

SEQ ID NO: 831193 - RNA, 19 nt, Homo sapiens
  misc_RNA (1)...(19): siRNA sense strand
auaaauacaugucccaguu

SEQ ID NO: 831194 - RNA, 19 nt, Homo sapiens
  misc_RNA (1)...(19): siRNA sense strand
gaaagccaucuugugauua

SEQ ID NO: 831195 - RNA, 19 nt, Homo sapiens
  misc_RNA (1)...(19): siRNA sense strand
gaacuuugguuggagaaca

SEQ ID NO: 831196 - RNA, 19 nt, Homo sapiens
  misc_RNA (1)...(19): siRNA sense strand
caaagagagacauggcuua

SEQ ID NO: 831197 - RNA, 19 nt, Homo sapiens
  misc_RNA (1)...(19): siRNA sense strand
gaagauggaaagaaggaaa

SEQ ID NO: 831198 - RNA, 19 nt, Homo sapiens
  misc_RNA (1)...(19): siRNA sense strand
ggagaaggaggcagaaaga

SEQ ID NO: 831199 - RNA, 19 nt, Homo sapiens
  misc_RNA (1)...(19): siRNA sense strand
gaacucagguagucaaaau

SEQ ID NO: 831200 - RNA, 19 nt, Homo sapiens
  misc_RNA (1)...(19): siRNA sense strand
cuaguggugugcuuauuaa

SEQ ID NO: 831201 - RNA, 19 nt, Homo sapiens
  misc_RNA (1)...(19): siRNA sense strand
guuggaaccucuucuggaa

SEQ ID NO: 831202 - RNA, 19 nt, Homo sapiens
  misc_RNA (1)...(19): siRNA sense strand
gaucaacacucgggucauc

SEQ ID NO: 831203 - RNA, 19 nt, Homo sapiens
  misc_RNA (1)...(19): siRNA sense strand
aaagccaucuugugauuau

SEQ ID NO: 831204 - RNA, 19 nt, Homo sapiens
  misc_RNA (1)...(19): siRNA sense strand
gcagaaagaagauggaaag

SEQ ID NO: 831205 - RNA, 19 nt, Homo sapiens
  misc_RNA (1)...(19): siRNA sense strand
ugagaugucuuccucuuca

SEQ ID NO: 831206 - RNA, 19 nt, Homo sapiens
  misc_RNA (1)...(19): siRNA sense strand
caaacuaaccaugcuuuaa

SEQ ID NO: 831207 - RNA, 19 nt, Homo sapiens
  misc_RNA (1)...(19): siRNA sense strand
gcaauuauuaugcuuggaa

SEQ ID NO: 831208 - RNA, 19 nt, Homo sapiens
  misc_RNA (1)...(19): siRNA sense strand
gauuauaaccaaagaggaa

SEQ ID NO: 831209 - RNA, 19 nt, Homo sapiens
  misc_RNA (1)...(19): siRNA sense strand
gagaacaauuccuccagau

SEQ ID NO: 831210 - RNA, 19 nt, Homo sapiens
  misc_RNA (1)...(19): siRNA sense strand
aaacuucaaugucuaccuu

SEQ ID NO: 831211 - RNA, 19 nt, Homo sapiens
  misc_RNA (1)...(19): siRNA sense strand
guuaagaauugaugugaca

SEQ ID NO: 831212 - RNA, 19 nt, Homo sapiens
  misc_RNA (1)...(19): siRNA sense strand
aaacuaagacucagagcaa

SEQ ID NO: 831213 - RNA, 19 nt, Homo sapiens
  misc_RNA (1)...(19): siRNA sense strand
uaauguggcuuuggguaaa

SEQ ID NO: 831214 - RNA, 19 nt, Homo sapiens
  misc_RNA (1)...(19): siRNA sense strand
guggugugcuuauuaaugu

SEQ ID NO: 831215 - RNA, 19 nt, Homo sapiens
  misc_RNA (1)...(19): siRNA sense strand
guacuuggagaaugucuuu

SEQ ID NO: 831216 - RNA, 19 nt, Homo sapiens
  misc_RNA (1)...(19): siRNA sense strand
ucagaaaugacaauccaua

SEQ ID NO: 831217 - RNA, 19 nt, Homo sapiens
  misc_RNA (1)...(19): siRNA sense strand
gagagacauggcuuaauaa

SEQ ID NO: 831218 - RNA, 19 nt, Homo sapiens
  misc_RNA (1)...(19): siRNA sense strand
gaucacaggcaguagcaaa

SEQ ID NO: 831219 - RNA, 19 nt, Homo sapiens
  misc_RNA (1)...(19): siRNA sense strand
cagagcagcuaguucacaa

SEQ ID NO: 831220 - RNA, 19 nt, Homo sapiens
  misc_RNA (1)...(19): siRNA sense strand
caaagaagucaaugcaaau

SEQ ID NO: 831221 - RNA, 19 nt, Homo sapiens
  misc_RNA (1)...(19): siRNA sense strand
gaccaaacccagagggaaa

SEQ ID NO: 831222 - RNA, 19 nt, Homo sapiens
  misc_RNA (1)...(19): siRNA sense strand
ccagugaagccauaucaaa

SEQ ID NO: 831223 - RNA, 19 nt, Homo sapiens
  misc_RNA (1)...(19): siRNA sense strand
caaagggagcugcgaaaga

SEQ ID NO: 831224 - RNA, 19 nt, Homo sapiens
  misc_RNA (1)...(19): siRNA sense strand
gacaguggauaacuuucaa

SEQ ID NO: 831225 - RNA, 19 nt, Homo sapiens
  misc_RNA (1)...(19): siRNA sense strand
gcaccaaagacuaucuaaa

SEQ ID NO: 831226 - RNA, 19 nt, Homo sapiens
  misc_RNA (1)...(19): siRNA sense strand
aaugugaccaucagucuua

SEQ ID NO: 831227 - RNA, 19 nt, Homo sapiens
  misc_RNA (1)...(19): siRNA sense strand
gcagcuaguucacaauaac

SEQ ID NO: 831228 - RNA, 19 nt, Homo sapiens
  misc_RNA (1)...(19): siRNA sense strand
aggaagcaaucuauuaaug

SEQ ID NO: 831229 - RNA, 19 nt, Homo sapiens
  misc_RNA (1)...(19): siRNA sense strand
ccaauacgagucuuccuuu

SEQ ID NO: 831230 - RNA, 19 nt, Homo sapiens
  misc_RNA (1)...(19): siRNA sense strand
gagcaaagaagucaaugca

SEQ ID NO: 831231 - RNA, 19 nt, Homo sapiens
  misc_RNA (1)...(19): siRNA sense strand
ucaucuggcuccucuuuga

SEQ ID NO: 831232 - RNA, 19 nt, Homo sapiens
  misc_RNA (1)...(19): siRNA sense strand
cggauaggauucagaguuc

SEQ ID NO: 831233 - RNA, 19 nt, Homo sapiens
  misc_RNA (1)...(19): siRNA sense strand
caaaagauccugaaaguag

SEQ ID NO: 831234 - RNA, 19 nt, Homo sapiens
  misc_RNA (1)...(19): siRNA sense strand
gggcaaagagaauguuaga

SEQ ID NO: 831235 - RNA, 19 nt, Homo sapiens
  misc_RNA (1)...(19): siRNA sense strand
caaccagagucauauaaaa

SEQ ID NO: 831236 - RNA, 19 nt, Homo sapiens
  misc_RNA (1)...(19): siRNA sense strand
ccaaacuaaccaugcuuua

SEQ ID NO: 831237 - RNA, 19 nt, Homo sapiens
  misc_RNA (1)...(19): siRNA sense strand
gcaagguugugccguugug

SEQ ID NO: 831238 - RNA, 19 nt, Homo sapiens
  misc_RNA (1)...(19): siRNA sense strand
ggauagagccauugaagac

SEQ ID NO: 831239 - RNA, 19 nt, Homo sapiens
  misc_RNA (1)...(19): siRNA sense strand
uauuaaauguggagaaugg

SEQ ID NO: 831240 - RNA, 19 nt, Homo sapiens
  misc_RNA (1)...(19): siRNA sense strand
cuacagucauucuggaaga

SEQ ID NO: 831241 - RNA, 19 nt, Homo sapiens
  misc_RNA (1)...(19): siRNA sense strand
cuuaagggcucccauugug

SEQ ID NO: 831242 - RNA, 19 nt, Homo sapiens
  misc_RNA (1)...(19): siRNA sense strand
uccaaagaccucauucaua

SEQ ID NO: 831243 - RNA, 19 nt, Homo sapiens
  misc_RNA (1)...(19): siRNA sense strand
gggcuaaaauggcugcaua

SEQ ID NO: 831244 - RNA, 19 nt, Homo sapiens
  misc_RNA (1)...(19): siRNA sense strand
gcggauaggauucagaguu

SEQ ID NO: 831245 - RNA, 19 nt, Homo sapiens
  misc_RNA (1)...(19): siRNA sense strand
uaacguugguugguuggaa

SEQ ID NO: 831246 - RNA, 19 nt, Homo sapiens
  misc_RNA (1)...(19): siRNA sense strand
caaggagauucugcuggua

SEQ ID NO: 831247 - RNA, 19 nt, Homo sapiens
  misc_RNA (1)...(19): siRNA sense strand
caaaauaucaguacacaug

SEQ ID NO: 831248 - RNA, 19 nt, Homo sapiens
  misc_RNA (1)...(19): siRNA sense strand
uaaauacaugucccaguuu

SEQ ID NO: 831249 - RNA, 19 nt, Homo sapiens
  misc_RNA (1)...(19): siRNA sense strand
ggucaucaaggaagacauu

SEQ ID NO: 831250 - RNA, 19 nt, Homo sapiens
  misc_RNA (1)...(19): siRNA sense strand
ugaaaacacuacagucauu

SEQ ID NO: 831251 - RNA, 19 nt, Homo sapiens
  misc_RNA (1)...(19): siRNA sense strand
auauggagcucucauucaa

SEQ ID NO: 831252 - RNA, 19 nt, Homo sapiens
  misc_RNA (1)...(19): siRNA sense strand
gaaaucagauauuccuugu

SEQ ID NO: 831253 - RNA, 19 nt, Homo sapiens
  misc_RNA (1)...(19): siRNA sense strand
guucggaccuuaucagaaa

SEQ ID NO: 831254 - RNA, 19 nt, Homo sapiens
  misc_RNA (1)...(19): siRNA sense strand
ggccaaagcuggacucugu

SEQ ID NO: 831255 - RNA, 19 nt, Homo sapiens
  misc_RNA (1)...(19): siRNA sense strand
ggacucacaauuccaaaua

SEQ ID NO: 831256 - RNA, 19 nt, Homo sapiens
  misc_RNA (1)...(19): siRNA sense strand
gaaagagucuaauuacaac

SEQ ID NO: 831257 - RNA, 19 nt, Homo sapiens
  misc_RNA (1)...(19): siRNA sense strand
ggaagauccucuaccagaa

SEQ ID NO: 831258 - RNA, 19 nt, Homo sapiens
  misc_RNA (1)...(19): siRNA sense strand
acacucaccucgcccaaua

SEQ ID NO: 831259 - RNA, 19 nt, Homo sapiens
  misc_RNA (1)...(19): siRNA sense strand
aaucagauauuccuuguug

SEQ ID NO: 831260 - RNA, 19 nt, Homo sapiens
  misc_RNA (1)...(19): siRNA sense strand
cagaaagccuugagggaaa

SEQ ID NO: 831261 - RNA, 19 nt, Homo sapiens
  misc_RNA (1)...(19): siRNA sense strand
ggacaaaggcggaaaggau

SEQ ID NO: 831262 - RNA, 19 nt, Homo sapiens
  misc_RNA (1)...(19): siRNA sense strand
gauauuccuuguugccuuu

SEQ ID NO: 831263 - RNA, 19 nt, Homo sapiens
  misc_RNA (1)...(19): siRNA sense strand
gacaaaggcggaaaggaua

SEQ ID NO: 831264 - RNA, 19 nt, Homo sapiens
  misc_RNA (1)...(19): siRNA sense strand
gaagauccucuaccagaaa

SEQ ID NO: 831265 - RNA, 19 nt, Homo sapiens
  misc_RNA (1)...(19): siRNA sense strand
ggagaagugugccuugcuu

SEQ ID NO: 831266 - RNA, 19 nt, Homo sapiens
  misc_RNA (1)...(19): siRNA sense strand
gaagugaaccggcaaaugc

SEQ ID NO: 831267 - RNA, 19 nt, Homo sapiens
  misc_RNA (1)...(19): siRNA sense strand
gaaagggagccaugucaga

SEQ ID NO: 831268 - RNA, 19 nt, Homo sapiens
  misc_RNA (1)...(19): siRNA sense strand
ccagggaccucaucaccaa

SEQ ID NO: 831269 - RNA, 19 nt, Homo sapiens
  misc_RNA (1)...(19): siRNA sense strand
gaagugugccuugcuugua

SEQ ID NO: 831270 - RNA, 19 nt, Homo sapiens
  misc_RNA (1)...(19): siRNA sense strand
gagcucagauuuagaaagc

SEQ ID NO: 831271 - RNA, 19 nt, Homo sapiens
  misc_RNA (1)...(19): siRNA sense strand
gggaugaugugucuaacug

SEQ ID NO: 831272 - RNA, 19 nt, Homo sapiens
  misc_RNA (1)...(19): siRNA sense strand
gcgauucguuugcguccua

SEQ ID NO: 831273 - RNA, 19 nt, Homo sapiens
  misc_RNA (1)...(19): siRNA sense strand
cagaaagagucuaauuaca

SEQ ID NO: 831274 - RNA, 19 nt, Homo sapiens
  misc_RNA (1)...(19): siRNA sense strand
gagcugacuuuggccauug

SEQ ID NO: 831275 - RNA, 19 nt, Homo sapiens
  misc_RNA (1)...(19): siRNA sense strand
gaucuggauggucacauua

SEQ ID NO: 831276 - RNA, 19 nt, Homo sapiens
  misc_RNA (1)...(19): siRNA sense strand
gaagguucuuugaugacaa

SEQ ID NO: 831277 - RNA, 19 nt, Homo sapiens
  misc_RNA (1)...(19): siRNA sense strand
ugagggaaaucagauauuc

SEQ ID NO: 831278 - RNA, 19 nt, Homo sapiens
  misc_RNA (1)...(19): siRNA sense strand
gggccaagauggacaaguc

SEQ ID NO: 831279 - RNA, 19 nt, Homo sapiens
  misc_RNA (1)...(19): siRNA sense strand
gcagcaagucggagcagua

SEQ ID NO: 831280 - RNA, 19 nt, Homo sapiens
  misc_RNA (1)...(19): siRNA sense strand
aaacagccauccaagucuu

SEQ ID NO: 831281 - RNA, 19 nt, Homo sapiens
  misc_RNA (1)...(19): siRNA sense strand
ccauggacaccucgaauuu

SEQ ID NO: 831282 - RNA, 19 nt, Homo sapiens
  misc_RNA (1)...(19): siRNA sense strand
gaucggugccuuuggagaa

SEQ ID NO: 831283 - RNA, 19 nt, Homo sapiens
  misc_RNA (1)...(19): siRNA sense strand
gcaccuacucccacagaaa

SEQ ID NO: 831284 - RNA, 19 nt, Homo sapiens
  misc_RNA (1)...(19): siRNA sense strand
ccauugacuucuccaguga

SEQ ID NO: 831285 - RNA, 19 nt, Homo sapiens
  misc_RNA (1)...(19): siRNA sense strand
gagaacacgcuccacauuc

SEQ ID NO: 831286 - RNA, 19 nt, Homo sapiens
  misc_RNA (1)...(19): siRNA sense strand
ccacagaaacccagcugaa

SEQ ID NO: 831287 - RNA, 19 nt, Homo sapiens
  misc_RNA (1)...(19): siRNA sense strand
gauggacaagucuauguuu

SEQ ID NO: 831288 - RNA, 19 nt, Homo sapiens
  misc_RNA (1)...(19): siRNA sense strand
gccauacgccuuuaaguuc

SEQ ID NO: 831289 - RNA, 19 nt, Homo sapiens
  misc_RNA (1)...(19): siRNA sense strand
aaacccagcugaaggugau

SEQ ID NO: 831290 - RNA, 19 nt, Homo sapiens
  misc_RNA (1)...(19): siRNA sense strand
ccagaaagagucuaauuac

SEQ ID NO: 831291 - RNA, 19 nt, Homo sapiens
  misc_RNA (1)...(19): siRNA sense strand
aagugugccuugcuuguaa

SEQ ID NO: 831292 - RNA, 19 nt, Homo sapiens
  misc_RNA (1)...(19): siRNA sense strand
caugaagacccuaaggaaa

SEQ ID NO: 831293 - RNA, 19 nt, Homo sapiens
  misc_RNA (1)...(19): siRNA sense strand
gaacgaugccagcgaaggu

SEQ ID NO: 831294 - RNA, 19 nt, Homo sapiens
  misc_RNA (1)...(19): siRNA sense strand
cacauuaaacucacagauu

SEQ ID NO: 831295 - RNA, 19 nt, Homo sapiens
  misc_RNA (1)...(19): siRNA sense strand
cagcagagacgaagagaag

SEQ ID NO: 831296 - RNA, 19 nt, Homo sapiens
  misc_RNA (1)...(19): siRNA sense strand
gcacgcauuuuacgaauuc

SEQ ID NO: 831297 - RNA, 19 nt, Homo sapiens
  misc_RNA (1)...(19): siRNA sense strand
gacucacaauuccaaauau

SEQ ID NO: 831298 - RNA, 19 nt, Homo sapiens
  misc_RNA (1)...(19): siRNA sense strand
gauggucacauuaaacuca

SEQ ID NO: 831299 - RNA, 19 nt, Homo sapiens
  misc_RNA (1)...(19): siRNA sense strand
uaaagagggccaagaugga

SEQ ID NO: 831300 - RNA, 19 nt, Homo sapiens
  misc_RNA (1)...(19): siRNA sense strand
caacguggaccuguaugaa

SEQ ID NO: 831301 - RNA, 19 nt, Homo sapiens
  misc_RNA (1)...(19): siRNA sense strand
ucaccucgcccaauaacaa

SEQ ID NO: 831302 - RNA, 19 nt, Homo sapiens
  misc_RNA (1)...(19): siRNA sense strand
cguggagaaugucaucaaa

SEQ ID NO: 831303 - RNA, 19 nt, Homo sapiens
  misc_RNA (1)...(19): siRNA sense strand
gcaagucggagcaguacga

SEQ ID NO: 831304 - RNA, 19 nt, Homo sapiens
  misc_RNA (1)...(19): siRNA sense strand
ccaugaagacccuaaggaa

SEQ ID NO: 831305 - RNA, 19 nt, Homo sapiens
  misc_RNA (1)...(19): siRNA sense strand
gcagcuggagcaagaaaug

SEQ ID NO: 831306 - RNA, 19 nt, Homo sapiens
  misc_RNA (1)...(19): siRNA sense strand
agaaagcccuuggaacgau

SEQ ID NO: 831307 - RNA, 19 nt, Homo sapiens
  misc_RNA (1)...(19): siRNA sense strand
ggcaaaugcugcaggaacu

SEQ ID NO: 831308 - RNA, 19 nt, Homo sapiens
  misc_RNA (1)...(19): siRNA sense strand
ucagguggacucacaauuc

SEQ ID NO: 831309 - RNA, 19 nt, Homo sapiens
  misc_RNA (1)...(19): siRNA sense strand
cuuguaagguggacacuca

SEQ ID NO: 831310 - RNA, 19 nt, Homo sapiens
  misc_RNA (1)...(19): siRNA sense strand
ggcugcagcuggagcaaga

SEQ ID NO: 831311 - RNA, 19 nt, Homo sapiens
  misc_RNA (1)...(19): siRNA sense strand
acguggaccuguaugaauu

SEQ ID NO: 831312 - RNA, 19 nt, Homo sapiens
  misc_RNA (1)...(19): siRNA sense strand
cagauugugcgggucauua

SEQ ID NO: 831313 - RNA, 19 nt, Homo sapiens
  misc_RNA (1)...(19): siRNA sense strand
accagaaagagucuaauua

SEQ ID NO: 831314 - RNA, 19 nt, Homo sapiens
  misc_RNA (1)...(19): siRNA sense strand
cgaagguucuuugaugaca

SEQ ID NO: 831315 - RNA, 19 nt, Homo sapiens
  misc_RNA (1)...(19): siRNA sense strand
guggaguguuggagugauu

SEQ ID NO: 831316 - RNA, 19 nt, Homo sapiens
  misc_RNA (1)...(19): siRNA sense strand
gagacgaagagaagagaga

SEQ ID NO: 831317 - RNA, 19 nt, Homo sapiens
  misc_RNA (1)...(19): siRNA sense strand
cgccauacgccuuuaaguu

SEQ ID NO: 831318 - RNA, 19 nt, Homo sapiens
  misc_RNA (1)...(19): siRNA sense strand
ccaaauauuaccagaaagg

SEQ ID NO: 831319 - RNA, 19 nt, Homo sapiens
  misc_RNA (1)...(19): siRNA sense strand
agaucuggauggucacauu

SEQ ID NO: 831320 - RNA, 19 nt, Homo sapiens
  misc_RNA (1)...(19): siRNA sense strand
gcacguggagaaugucauc

SEQ ID NO: 831321 - RNA, 19 nt, Homo sapiens
  misc_RNA (1)...(19): siRNA sense strand
gagcagcacguggagaaug

SEQ ID NO: 831322 - RNA, 19 nt, Homo sapiens
  misc_RNA (1)...(19): siRNA sense strand
aagagagagucacgcauca

SEQ ID NO: 831323 - RNA, 19 nt, Homo sapiens
  misc_RNA (1)...(19): siRNA sense strand
uccgaagguucuuugauga

SEQ ID NO: 831324 - RNA, 19 nt, Homo sapiens
  misc_RNA (1)...(19): siRNA sense strand
uuccgaagguucuuugaug

SEQ ID NO: 831325 - RNA, 19 nt, Homo sapiens
  misc_RNA (1)...(19): siRNA sense strand
gcaaaggguacacucaacu

SEQ ID NO: 831326 - RNA, 19 nt, Homo sapiens
  misc_RNA (1)...(19): siRNA sense strand
ccucugggaugaugugucu

SEQ ID NO: 831327 - RNA, 19 nt, Homo sapiens
  misc_RNA (1)...(19): siRNA sense strand
ucuggauggucacauuaaa

SEQ ID NO: 831328 - RNA, 19 nt, Homo sapiens
  misc_RNA (1)...(19): siRNA sense strand
ccaaagcuggacucuguga

SEQ ID NO: 831329 - RNA, 19 nt, Homo sapiens
  misc_RNA (1)...(19): siRNA sense strand
gagagucacgcaucaagag

SEQ ID NO: 831330 - RNA, 19 nt, Homo sapiens
  misc_RNA (1)...(19): siRNA sense strand
gcagaagugaaccggcaaa

SEQ ID NO: 831331 - RNA, 19 nt, Homo sapiens
  misc_RNA (1)...(19): siRNA sense strand
gccagccuguguacgugua

SEQ ID NO: 831332 - RNA, 19 nt, Homo sapiens
  misc_RNA (1)...(19): siRNA sense strand
gugaucaacugggagaaca

SEQ ID NO: 831333 - RNA, 19 nt, Homo sapiens
  misc_RNA (1)...(19): siRNA sense strand
cagaaagggagccauguca

SEQ ID NO: 831334 - RNA, 19 nt, Homo sapiens
  misc_RNA (1)...(19): siRNA sense strand
ccaagauggacaagucuau

SEQ ID NO: 831335 - RNA, 19 nt, Homo sapiens
  misc_RNA (1)...(19): siRNA sense strand
gguuaaagagggccaagau

SEQ ID NO: 831336 - RNA, 19 nt, Homo sapiens
  misc_RNA (1)...(19): siRNA sense strand
uaccagaaagagucuaauu

SEQ ID NO: 831337 - RNA, 19 nt, Homo sapiens
  misc_RNA (1)...(19): siRNA sense strand
ccauacgccuuuaaguucu

SEQ ID NO: 831338 - RNA, 19 nt, Homo sapiens
  misc_RNA (1)...(19): siRNA sense strand
gagagagucacgcaucaag

SEQ ID NO: 831339 - RNA, 19 nt, Homo sapiens
  misc_RNA (1)...(19): siRNA sense strand
acaaaggcggaaaggauaa

SEQ ID NO: 831340 - RNA, 19 nt, Homo sapiens
  misc_RNA (1)...(19): siRNA sense strand
caaaggcggaaaggauaaa

SEQ ID NO: 831341 - RNA, 19 nt, Homo sapiens
  misc_RNA (1)...(19): siRNA sense strand
ccagugacauccggaagca

SEQ ID NO: 831342 - RNA, 19 nt, Homo sapiens
  misc_RNA (1)...(19): siRNA sense strand
ccgcaggaccaaacaguga

SEQ ID NO: 831343 - RNA, 19 nt, Homo sapiens
  misc_RNA (1)...(19): siRNA sense strand
ggguucagguggacucaca

SEQ ID NO: 831344 - RNA, 19 nt, Homo sapiens
  misc_RNA (1)...(19): siRNA sense strand
ccuuuaaguucuucaugga

SEQ ID NO: 831345 - RNA, 19 nt, Homo sapiens
  misc_RNA (1)...(19): siRNA sense strand
gcagagacgaagagaagag

SEQ ID NO: 831346 - RNA, 19 nt, Homo sapiens
  misc_RNA (1)...(19): siRNA sense strand
gacaauggcuaccccuuuc

SEQ ID NO: 831347 - RNA, 19 nt, Homo sapiens
  misc_RNA (1)...(19): siRNA sense strand
ccaaaguucggaccuuauc

SEQ ID NO: 831348 - RNA, 19 nt, Homo sapiens
  misc_RNA (1)...(19): siRNA sense strand
ggaaccggcgauucguuug

SEQ ID NO: 831349 - RNA, 19 nt, Homo sapiens
  misc_RNA (1)...(19): siRNA sense strand
ccuaccagcagaagguuaa

SEQ ID NO: 831350 - RNA, 19 nt, Homo sapiens
  misc_RNA (1)...(19): siRNA sense strand
agaaagccuugagggaaau

SEQ ID NO: 831351 - RNA, 19 nt, Homo sapiens
  misc_RNA (1)...(19): siRNA sense strand
gaugaagaaagcccuugga

SEQ ID NO: 831352 - RNA, 19 nt, Homo sapiens
  misc_RNA (1)...(19): siRNA sense strand
cuacaaguaugaagagaaa

SEQ ID NO: 831353 - RNA, 19 nt, Homo sapiens
  misc_RNA (1)...(19): siRNA sense strand
gaccugagacuuugcauga

SEQ ID NO: 831354 - RNA, 19 nt, Homo sapiens
  misc_RNA (1)...(19): siRNA sense strand
ggacaaagaccugagacuu

SEQ ID NO: 831355 - RNA, 19 nt, Homo sapiens
  misc_RNA (1)...(19): siRNA sense strand
gacuuugcaugaacgguua

SEQ ID NO: 831356 - RNA, 19 nt, Homo sapiens
  misc_RNA (1)...(19): siRNA sense strand
gguuaacccuugugucugu

SEQ ID NO: 831357 - RNA, 19 nt, Homo sapiens
  misc_RNA (1)...(19): siRNA sense strand
ccgauacucuccacauuuc

SEQ ID NO: 831358 - RNA, 19 nt, Homo sapiens
  misc_RNA (1)...(19): siRNA sense strand
caaagccagugguuucaag

SEQ ID NO: 831359 - RNA, 19 nt, Homo sapiens
  misc_RNA (1)...(19): siRNA sense strand
gaacgguuaacccuugugu

SEQ ID NO: 831360 - RNA, 19 nt, Homo sapiens
  misc_RNA (1)...(19): siRNA sense strand
ccuacuuacucaucccauu

SEQ ID NO: 831361 - RNA, 19 nt, Homo sapiens
  misc_RNA (1)...(19): siRNA sense strand
cauuucuguuugaggauuu

SEQ ID NO: 831362 - RNA, 19 nt, Homo sapiens
  misc_RNA (1)...(19): siRNA sense strand
caaccuuaauuccgauacu

SEQ ID NO: 831363 - RNA, 19 nt, Homo sapiens
  misc_RNA (1)...(19): siRNA sense strand
uuacucaucccauucauac

SEQ ID NO: 831364 - RNA, 19 nt, Homo sapiens
  misc_RNA (1)...(19): siRNA sense strand
cucaucccauucauacuuu

SEQ ID NO: 831365 - RNA, 19 nt, Homo sapiens
  misc_RNA (1)...(19): siRNA sense strand
ucuccacauuucuguuuga

SEQ ID NO: 831366 - RNA, 19 nt, Homo sapiens
  misc_RNA (1)...(19): siRNA sense strand
uaacccuugugucugucua

SEQ ID NO: 831367 - RNA, 19 nt, Homo sapiens
  misc_RNA (1)...(19): siRNA sense strand
gauacucuccacauuucug

SEQ ID NO: 831368 - RNA, 19 nt, Homo sapiens
  misc_RNA (1)...(19): siRNA sense strand
ccugagacuuugcaugaac

SEQ ID NO: 831369 - RNA, 19 nt, Homo sapiens
  misc_RNA (1)...(19): siRNA sense strand
acucaucccauucauacuu

SEQ ID NO: 831370 - RNA, 19 nt, Homo sapiens
  misc_RNA (1)...(19): siRNA sense strand
acauuucuguuugaggauu

SEQ ID NO: 831371 - RNA, 19 nt, Homo sapiens
  misc_RNA (1)...(19): siRNA sense strand
cuacuuacucaucccauuc

SEQ ID NO: 831372 - RNA, 19 nt, Homo sapiens
  misc_RNA (1)...(19): siRNA sense strand
gaaagcuuguggguaggaa

SEQ ID NO: 831373 - RNA, 19 nt, Homo sapiens
  misc_RNA (1)...(19): siRNA sense strand
gguggucgauaaggacuuu

SEQ ID NO: 831374 - RNA, 19 nt, Homo sapiens
  misc_RNA (1)...(19): siRNA sense strand
gaucggugcauccagaaga

SEQ ID NO: 831375 - RNA, 19 nt, Homo sapiens
  misc_RNA (1)...(19): siRNA sense strand
ccuggaagaauuuaagaaa

SEQ ID NO: 831376 - RNA, 19 nt, Homo sapiens
  misc_RNA (1)...(19): siRNA sense strand
ggaggaggaggauaucaca

SEQ ID NO: 831377 - RNA, 19 nt, Homo sapiens
  misc_RNA (1)...(19): siRNA sense strand
ccaugguggucgauaagga

SEQ ID NO: 831378 - RNA, 19 nt, Homo sapiens
  misc_RNA (1)...(19): siRNA sense strand
ggaggcccuggaagaauuu

SEQ ID NO: 831379 - RNA, 19 nt, Homo sapiens
  misc_RNA (1)...(19): siRNA sense strand
ggaaagcuuguggguagga

SEQ ID NO: 831380 - RNA, 19 nt, Homo sapiens
  misc_RNA (1)...(19): siRNA sense strand
aggccaugguggucgauaa

SEQ ID NO: 831381 - RNA, 19 nt, Homo sapiens
  misc_RNA (1)...(19): siRNA sense strand
gcaggaagcucauauaccu

SEQ ID NO: 831382 - RNA, 19 nt, Homo sapiens
  misc_RNA (1)...(19): siRNA sense strand
gaaagcuuguggguaggaa

SEQ ID NO: 831383 - RNA, 19 nt, Homo sapiens
  misc_RNA (1)...(19): siRNA sense strand
gguggucgauaaggacuuu

SEQ ID NO: 831384 - RNA, 19 nt, Homo sapiens
  misc_RNA (1)...(19): siRNA sense strand
gaucggugcauccagaaga

SEQ ID NO: 831385 - RNA, 19 nt, Homo sapiens
  misc_RNA (1)...(19): siRNA sense strand
ccuggaagaauuuaagaaa

SEQ ID NO: 831386 - RNA, 19 nt, Homo sapiens
  misc_RNA (1)...(19): siRNA sense strand
ggaggaggaggauaucaca

SEQ ID NO: 831387 - RNA, 19 nt, Homo sapiens
  misc_RNA (1)...(19): siRNA sense strand
ccaugguggucgauaagga

SEQ ID NO: 831388 - RNA, 19 nt, Homo sapiens
  misc_RNA (1)...(19): siRNA sense strand
ggaggcccuggaagaauuu

SEQ ID NO: 831389 - RNA, 19 nt, Homo sapiens
  misc_RNA (1)...(19): siRNA sense strand
gggcaggaagcucauauac

SEQ ID NO: 831390 - RNA, 19 nt, Homo sapiens
  misc_RNA (1)...(19): siRNA sense strand
ggaaagcuuguggguagga

SEQ ID NO: 831391 - RNA, 19 nt, Homo sapiens
  misc_RNA (1)...(19): siRNA sense strand
aggccaugguggucgauaa

SEQ ID NO: 831392 - RNA, 19 nt, Homo sapiens
  misc_RNA (1)...(19): siRNA sense strand
gagagaaacuguauaaaug

SEQ ID NO: 831393 - RNA, 19 nt, Homo sapiens
  misc_RNA (1)...(19): siRNA sense strand
ugaagaagcuguggaauuu

SEQ ID NO: 831394 - RNA, 19 nt, Homo sapiens
  misc_RNA (1)...(19): siRNA sense strand
gagaaacccuauaaaugua

SEQ ID NO: 831395 - RNA, 19 nt, Homo sapiens
  misc_RNA (1)...(19): siRNA sense strand
gagaacaacuguauacaug

SEQ ID NO: 831396 - RNA, 19 nt, Homo sapiens
  misc_RNA (1)...(19): siRNA sense strand
gaacaucagagaauucaua

SEQ ID NO: 831397 - RNA, 19 nt, Homo sapiens
  misc_RNA (1)...(19): siRNA sense strand
gaucaucccuucuuucuca

SEQ ID NO: 831398 - RNA, 19 nt, Homo sapiens
  misc_RNA (1)...(19): siRNA sense strand
gggagaaccuucacacgua

SEQ ID NO: 831399 - RNA, 19 nt, Homo sapiens
  misc_RNA (1)...(19): siRNA sense strand
gaacaucagagguuucaua

SEQ ID NO: 831400 - RNA, 19 nt, Homo sapiens
  misc_RNA (1)...(19): siRNA sense strand
gaaaggauacccaauaugu

SEQ ID NO: 831401 - RNA, 19 nt, Homo sapiens
  misc_RNA (1)...(19): siRNA sense strand
gauggucacugggacauua

SEQ ID NO: 831402 - RNA, 19 nt, Homo sapiens
  misc_RNA (1)...(19): siRNA sense strand
ggagagaaacuguauaaau

SEQ ID NO: 831403 - RNA, 19 nt, Homo sapiens
  misc_RNA (1)...(19): siRNA sense strand
gagaaaccguaucgaugua

SEQ ID NO: 831404 - RNA, 19 nt, Homo sapiens
  misc_RNA (1)...(19): siRNA sense strand
uaaaggagauaaagccuau

SEQ ID NO: 831405 - RNA, 19 nt, Homo sapiens
  misc_RNA (1)...(19): siRNA sense strand
gggaaaagcuuauuuacaa

SEQ ID NO: 831406 - RNA, 19 nt, Homo sapiens
  misc_RNA (1)...(19): siRNA sense strand
caucagagguuucauacug

SEQ ID NO: 831407 - RNA, 19 nt, Homo sapiens
  misc_RNA (1)...(19): siRNA sense strand
gauaaagccuaugagguuu

SEQ ID NO: 831408 - RNA, 19 nt, Homo sapiens
  misc_RNA (1)...(19): siRNA sense strand
agacuuggcuugaaacaga

SEQ ID NO: 831409 - RNA, 19 nt, Homo sapiens
  misc_RNA (1)...(19): siRNA sense strand
caaccaguauucauccuuu

SEQ ID NO: 831410 - RNA, 19 nt, Homo sapiens
  misc_RNA (1)...(19): siRNA sense strand
agagaaaccuuacaagugu

SEQ ID NO: 831411 - RNA, 19 nt, Homo sapiens
  misc_RNA (1)...(19): siRNA sense strand
gagagaaaccuuacaagug

SEQ ID NO: 831412 - RNA, 19 nt, Homo sapiens
  misc_RNA (1)...(19): siRNA sense strand
gagaaaccguaucagugua

SEQ ID NO: 831413 - RNA, 19 nt, Homo sapiens
  misc_RNA (1)...(19): siRNA sense strand
guacaucagagaauucaua

SEQ ID NO: 831414 - RNA, 19 nt, Homo sapiens
  misc_RNA (1)...(19): siRNA sense strand
guucaacccuuaucaaaca

SEQ ID NO: 831415 - RNA, 19 nt, Homo sapiens
  misc_RNA (1)...(19): siRNA sense strand
gaagggauacagccaguuu

SEQ ID NO: 831416 - RNA, 19 nt, Homo sapiens
  misc_RNA (1)...(19): siRNA sense strand
ggacauuaacuuugaagaa

SEQ ID NO: 831417 - RNA, 19 nt, Homo sapiens
  misc_RNA (1)...(19): siRNA sense strand
gaaaggccuucagccagua

SEQ ID NO: 831418 - RNA, 19 nt, Homo sapiens
  misc_RNA (1)...(19): siRNA sense strand
gagaaggcauuuagcaaca

SEQ ID NO: 831419 - RNA, 19 nt, Homo sapiens
  misc_RNA (1)...(19): siRNA sense strand
uagaaaggauacccaauau

SEQ ID NO: 831420 - RNA, 19 nt, Homo sapiens
  misc_RNA (1)...(19): siRNA sense strand
acagaagcauugccucaua

SEQ ID NO: 831421 - RNA, 19 nt, Homo sapiens
  misc_RNA (1)...(19): siRNA sense strand
gcaaaucuaaccuuuauag

SEQ ID NO: 831422 - RNA, 19 nt, Homo sapiens
  misc_RNA (1)...(19): siRNA sense strand
gaacaucagcgaauucaca

SEQ ID NO: 831423 - RNA, 19 nt, Homo sapiens
  misc_RNA (1)...(19): siRNA sense strand
ugagaaacccuauaaaugu

SEQ ID NO: 831424 - RNA, 19 nt, Homo sapiens
  misc_RNA (1)...(19): siRNA sense strand
gcuccucacuuacccagua

SEQ ID NO: 831425 - RNA, 19 nt, Homo sapiens
  misc_RNA (1)...(19): siRNA sense strand
gaaucugcaucuuauugaa

SEQ ID NO: 831426 - RNA, 19 nt, Homo sapiens
  misc_RNA (1)...(19): siRNA sense strand
ugagaaacccuacaaaugu

SEQ ID NO: 831427 - RNA, 19 nt, Homo sapiens
  misc_RNA (1)...(19): siRNA sense strand
aaauacagcucuugucaca

SEQ ID NO: 831428 - RNA, 19 nt, Homo sapiens
  misc_RNA (1)...(19): siRNA sense strand
ggagaaccuucacacguau

SEQ ID NO: 831429 - RNA, 19 nt, Homo sapiens
  misc_RNA (1)...(19): siRNA sense strand
ccucacaucuguaaugaau

SEQ ID NO: 831430 - RNA, 19 nt, Homo sapiens
  misc_RNA (1)...(19): siRNA sense strand
gacauuaacuuugaagaag

SEQ ID NO: 831431 - RNA, 19 nt, Homo sapiens
  misc_RNA (1)...(19): siRNA sense strand
gaacaacuguauacaugcu

SEQ ID NO: 831432 - RNA, 19 nt, Homo sapiens
  misc_RNA (1)...(19): siRNA sense strand
gugagaaacccuauaaaug

SEQ ID NO: 831433 - RNA, 19 nt, Homo sapiens
  misc_RNA (1)...(19): siRNA sense strand
agaaagccuucaaccagua

SEQ ID NO: 831434 - RNA, 19 nt, Homo sapiens
  misc_RNA (1)...(19): siRNA sense strand
ggagagaaaccuuacaagu

SEQ ID NO: 831435 - RNA, 19 nt, Homo sapiens
  misc_RNA (1)...(19): siRNA sense strand
aagaagcuguggaauuuga

SEQ ID NO: 831436 - RNA, 19 nt, Homo sapiens
  misc_RNA (1)...(19): siRNA sense strand
gaacaucggaaaauucaua

SEQ ID NO: 831437 - RNA, 19 nt, Homo sapiens
  misc_RNA (1)...(19): siRNA sense strand
gugagaaacccuacaaaug

SEQ ID NO: 831438 - RNA, 19 nt, Homo sapiens
  misc_RNA (1)...(19): siRNA sense strand
gggaaagccuacaguuaca

SEQ ID NO: 831439 - RNA, 19 nt, Homo sapiens
  misc_RNA (1)...(19): siRNA sense strand
ucacaggcaucaaagaauc

SEQ ID NO: 831440 - RNA, 19 nt, Homo sapiens
  misc_RNA (1)...(19): siRNA sense strand
ggagagaaaccguaucgau

SEQ ID NO: 831441 - RNA, 19 nt, Homo sapiens
  misc_RNA (1)...(19): siRNA sense strand
ggagagaaaccguaucagu

SEQ ID NO: 831442 - RNA, 19 nt, Homo sapiens
  misc_RNA (1)...(19): siRNA sense strand
ggugagaaacccuauaaau

SEQ ID NO: 831443 - RNA, 19 nt, Homo sapiens
  misc_RNA (1)...(19): siRNA sense strand
ucagauacccgucuagguu

SEQ ID NO: 831444 - RNA, 19 nt, Homo sapiens
  misc_RNA (1)...(19): siRNA sense strand
ggaauuugagagcgagaua

SEQ ID NO: 831445 - RNA, 19 nt, Homo sapiens
  misc_RNA (1)...(19): siRNA sense strand
agaaacaucucagggaaug

SEQ ID NO: 831446 - RNA, 19 nt, Homo sapiens
  misc_RNA (1)...(19): siRNA sense strand
gaaaaccucacaucuguaa

SEQ ID NO: 831447 - RNA, 19 nt, Homo sapiens
  misc_RNA (1)...(19): siRNA sense strand
agauaaagccuaugagguu

SEQ ID NO: 831448 - RNA, 19 nt, Homo sapiens
  misc_RNA (1)...(19): siRNA sense strand
auagaaaggauacccaaua

SEQ ID NO: 831449 - RNA, 19 nt, Homo sapiens
  misc_RNA (1)...(19): siRNA sense strand
gugggaaagccuacaguua

SEQ ID NO: 831450 - RNA, 19 nt, Homo sapiens
  misc_RNA (1)...(19): siRNA sense strand
ccacagaucaucccuucuu

SEQ ID NO: 831451 - RNA, 19 nt, Homo sapiens
  misc_RNA (1)...(19): siRNA sense strand
caugaaaugcuuccagauu

SEQ ID NO: 831452 - RNA, 19 nt, Homo sapiens
  misc_RNA (1)...(19): siRNA sense strand
ucacugggacauuaacuuu

SEQ ID NO: 831453 - RNA, 19 nt, Homo sapiens
  misc_RNA (1)...(19): siRNA sense strand
aaacuucacaggcaucaaa

SEQ ID NO: 831454 - RNA, 19 nt, Homo sapiens
  misc_RNA (1)...(19): siRNA sense strand
uaucgaacaucagcgaauu

SEQ ID NO: 831455 - RNA, 19 nt, Homo sapiens
  misc_RNA (1)...(19): siRNA sense strand
ggagaacaacuguauacau

SEQ ID NO: 831456 - RNA, 19 nt, Homo sapiens
  misc_RNA (1)...(19): siRNA sense strand
aagaagagcaagagaagaa

SEQ ID NO: 831457 - RNA, 19 nt, Homo sapiens
  misc_RNA (1)...(19): siRNA sense strand
guucaacccucacuguaca

SEQ ID NO: 831458 - RNA, 19 nt, Homo sapiens
  misc_RNA (1)...(19): siRNA sense strand
auacagcucuugucacaca

SEQ ID NO: 831459 - RNA, 19 nt, Homo sapiens
  misc_RNA (1)...(19): siRNA sense strand
gauagauucgcaugagaaa

SEQ ID NO: 831460 - RNA, 19 nt, Homo sapiens
  misc_RNA (1)...(19): siRNA sense strand
gaaggcauuuagcaacagu

SEQ ID NO: 831461 - RNA, 19 nt, Homo sapiens
  misc_RNA (1)...(19): siRNA sense strand
ucacuuacccaguaucaga

SEQ ID NO: 831462 - RNA, 19 nt, Homo sapiens
  misc_RNA (1)...(19): siRNA sense strand
gggaggugaugcuggagaa

SEQ ID NO: 831463 - RNA, 19 nt, Homo sapiens
  misc_RNA (1)...(19): siRNA sense strand
uuacaucucuagcugaaca

SEQ ID NO: 831464 - RNA, 19 nt, Homo sapiens
  misc_RNA (1)...(19): siRNA sense strand
cgagauagaagaagagcaa

SEQ ID NO: 831465 - RNA, 19 nt, Homo sapiens
  misc_RNA (1)...(19): siRNA sense strand
gaaggaauaugggaaaccu

SEQ ID NO: 831466 - RNA, 19 nt, Homo sapiens
  misc_RNA (1)...(19): siRNA sense strand
gaaagccuacaguuacaga

SEQ ID NO: 831467 - RNA, 19 nt, Homo sapiens
  misc_RNA (1)...(19): siRNA sense strand
caucagagaauucauacug

SEQ ID NO: 831468 - RNA, 19 nt, Homo sapiens
  misc_RNA (1)...(19): siRNA sense strand
ggauacagccaguuuacau

SEQ ID NO: 831469 - RNA, 19 nt, Homo sapiens
  misc_RNA (1)...(19): siRNA sense strand
caucagagaauucauacug

SEQ ID NO: 831470 - RNA, 19 nt, Homo sapiens
  misc_RNA (1)...(19): siRNA sense strand
agcaacaguucaacccuua

SEQ ID NO: 831471 - RNA, 19 nt, Homo sapiens
  misc_RNA (1)...(19): siRNA sense strand
gcauuuagcaacaguucaa

SEQ ID NO: 831472 - RNA, 19 nt, Homo sapiens
  misc_RNA (1)...(19): siRNA sense strand
caucagagaauucauacug

SEQ ID NO: 831473 - RNA, 19 nt, Homo sapiens
  misc_RNA (1)...(19): siRNA sense strand
acagaguguuccuauagaa

SEQ ID NO: 831474 - RNA, 19 nt, Homo sapiens
  misc_RNA (1)...(19): siRNA sense strand
agaaagaauccauuaagga

SEQ ID NO: 831475 - RNA, 19 nt, Homo sapiens
  misc_RNA (1)...(19): siRNA sense strand
guuuacaucucuagcugaa

SEQ ID NO: 831476 - RNA, 19 nt, Homo sapiens
  misc_RNA (1)...(19): siRNA sense strand
ggugagaaacccuacaaau

SEQ ID NO: 831477 - RNA, 19 nt, Homo sapiens
  misc_RNA (1)...(19): siRNA sense strand
agaaaccucuuagacaaau

SEQ ID NO: 831478 - RNA, 19 nt, Homo sapiens
  misc_RNA (1)...(19): siRNA sense strand
gguaaagaaagaauccauu

SEQ ID NO: 831479 - RNA, 19 nt, Homo sapiens
  misc_RNA (1)...(19): siRNA sense strand
cagaagcauugccucauag

SEQ ID NO: 831480 - RNA, 19 nt, Homo sapiens
  misc_RNA (1)...(19): siRNA sense strand
caggugagaaacccuauaa

SEQ ID NO: 831481 - RNA, 19 nt, Homo sapiens
  misc_RNA (1)...(19): siRNA sense strand
aaaggauacccaauaugua

SEQ ID NO: 831482 - RNA, 19 nt, Homo sapiens
  misc_RNA (1)...(19): siRNA sense strand
caaauguaaugagugugaa

SEQ ID NO: 831483 - RNA, 19 nt, Homo sapiens
  misc_RNA (1)...(19): siRNA sense strand
gugcaacgaaugugagaaa

SEQ ID NO: 831484 - RNA, 19 nt, Homo sapiens
  misc_RNA (1)...(19): siRNA sense strand
acacguauuguaacccuua

SEQ ID NO: 831485 - RNA, 19 nt, Homo sapiens
  misc_RNA (1)...(19): siRNA sense strand
cuauaaauguagugagugu

SEQ ID NO: 831486 - RNA, 19 nt, Homo sapiens
  misc_RNA (1)...(19): siRNA sense strand
gaaacccuauaaauguagu

SEQ ID NO: 831487 - RNA, 19 nt, Homo sapiens
  misc_RNA (1)...(19): siRNA sense strand
cacagaucaucccuucuuu

SEQ ID NO: 831488 - RNA, 19 nt, Homo sapiens
  misc_RNA (1)...(19): siRNA sense strand
ucuauaaguggaaggaaua

SEQ ID NO: 831489 - RNA, 19 nt, Homo sapiens
  misc_RNA (1)...(19): siRNA sense strand
aguuacagaucaaaccuuu

SEQ ID NO: 831490 - RNA, 19 nt, Homo sapiens
  misc_RNA (1)...(19): siRNA sense strand
gaaaccguaucaguguaau

SEQ ID NO: 831491 - RNA, 19 nt, Homo sapiens
  misc_RNA (1)...(19): siRNA sense strand
aagaaagaauccauuaagg

SEQ ID NO: 831492 - RNA, 19 nt, Homo sapiens
  misc_RNA (1)...(19): siRNA sense strand
guacaaggcgcucuucaaa

SEQ ID NO: 831493 - RNA, 19 nt, Homo sapiens
  misc_RNA (1)...(19): siRNA sense strand
gaccaaggcugacaucaac

SEQ ID NO: 831494 - RNA, 19 nt, Homo sapiens
  misc_RNA (1)...(19): siRNA sense strand
gaacgagcagcacgccaaa

SEQ ID NO: 831495 - RNA, 19 nt, Homo sapiens
  misc_RNA (1)...(19): siRNA sense strand
cagauguacuccaccaaug

SEQ ID NO: 831496 - RNA, 19 nt, Homo sapiens
  misc_RNA (1)...(19): siRNA sense strand
gcagcacgccaaagucuau

SEQ ID NO: 831497 - RNA, 19 nt, Homo sapiens
  misc_RNA (1)...(19): siRNA sense strand
gcagauguacuccaccaau

SEQ ID NO: 831498 - RNA, 19 nt, Homo sapiens
  misc_RNA (1)...(19): siRNA sense strand
ggcuggugcuggagaguaa

SEQ ID NO: 831499 - RNA, 19 nt, Homo sapiens
  misc_RNA (1)...(19): siRNA sense strand
ugaagcaggccaagaccua

SEQ ID NO: 831500 - RNA, 19 nt, Homo sapiens
  misc_RNA (1)...(19): siRNA sense strand
ugacaucaacgccaccaaa

SEQ ID NO: 831501 - RNA, 19 nt, Homo sapiens
  misc_RNA (1)...(19): siRNA sense strand
caggagaucgaguaccuaa

SEQ ID NO: 831502 - RNA, 19 nt, Homo sapiens
  misc_RNA (1)...(19): siRNA sense strand
ggucaaggcaggagagaag

SEQ ID NO: 831503 - RNA, 19 nt, Homo sapiens
  misc_RNA (1)...(19): siRNA sense strand
gagcagcacgccaaagucu

SEQ ID NO: 831504 - RNA, 19 nt, Homo sapiens
  misc_RNA (1)...(19): siRNA sense strand
caucaacgccaccaaaguc

SEQ ID NO: 831505 - RNA, 19 nt, Homo sapiens
  misc_RNA (1)...(19): siRNA sense strand
ucgaguaccuaaccaagca

SEQ ID NO: 831506 - RNA, 19 nt, Homo sapiens
  misc_RNA (1)...(19): siRNA sense strand
acgcgcugcuggagaagua

SEQ ID NO: 831507 - RNA, 19 nt, Homo sapiens
  misc_RNA (1)...(19): siRNA sense strand
guacuccaccaaugaggaa

SEQ ID NO: 831508 - RNA, 19 nt, Homo sapiens
  misc_RNA (1)...(19): siRNA sense strand
gaagaccaaggcugacauc

SEQ ID NO: 831509 - RNA, 19 nt, Homo sapiens
  misc_RNA (1)...(19): siRNA sense strand
ggccaagaccuaccuacug

SEQ ID NO: 831510 - RNA, 19 nt, Homo sapiens
  misc_RNA (1)...(19): siRNA sense strand
gacaagcggcuggaacaga

SEQ ID NO: 831511 - RNA, 19 nt, Homo sapiens
  misc_RNA (1)...(19): siRNA sense strand
aggaacaggugcaggagau

SEQ ID NO: 831512 - RNA, 19 nt, Homo sapiens
  misc_RNA (1)...(19): siRNA sense strand
gcaacugagaggccuggaa

SEQ ID NO: 831513 - RNA, 19 nt, Homo sapiens
  misc_RNA (1)...(19): siRNA sense strand
ggagcaggacuugcaccua

SEQ ID NO: 831514 - RNA, 19 nt, Homo sapiens
  misc_RNA (1)...(19): siRNA sense strand
gagaucgaguaccuaacca

SEQ ID NO: 831515 - RNA, 19 nt, Homo sapiens
  misc_RNA (1)...(19): siRNA sense strand
agaccaaggcugacaucaa

SEQ ID NO: 831516 - RNA, 19 nt, Homo sapiens
  misc_RNA (1)...(19): siRNA sense strand
ccagguggagcaacugaga

SEQ ID NO: 831517 - RNA, 19 nt, Homo sapiens
  misc_RNA (1)...(19): siRNA sense strand
gggcugacggagaccauug

SEQ ID NO: 831518 - RNA, 19 nt, Homo sapiens
  misc_RNA (1)...(19): siRNA sense strand
agauguacuccaccaauga

SEQ ID NO: 831519 - RNA, 19 nt, Homo sapiens
  misc_RNA (1)...(19): siRNA sense strand
gggagguggacgagcagua

SEQ ID NO: 831520 - RNA, 19 nt, Homo sapiens
  misc_RNA (1)...(19): siRNA sense strand
ggagaucgaguaccuaacc

SEQ ID NO: 831521 - RNA, 19 nt, Homo sapiens
  misc_RNA (1)...(19): siRNA sense strand
gcuuuccgccuacacaguu

SEQ ID NO: 831522 - RNA, 19 nt, Homo sapiens
  misc_RNA (1)...(19): siRNA sense strand
caacgccaccaaagucaag

SEQ ID NO: 831523 - RNA, 19 nt, Homo sapiens
  misc_RNA (1)...(19): siRNA sense strand
gcaggagaucgaguaccua

SEQ ID NO: 831524 - RNA, 19 nt, Homo sapiens
  misc_RNA (1)...(19): siRNA sense strand
gacaucaacgccaccaaag

SEQ ID NO: 831525 - RNA, 19 nt, Homo sapiens
  misc_RNA (1)...(19): siRNA sense strand
ggcguaccauccacaccuu

SEQ ID NO: 831526 - RNA, 19 nt, Homo sapiens
  misc_RNA (1)...(19): siRNA sense strand
ggagguggacgagcaguac

SEQ ID NO: 831527 - RNA, 19 nt, Homo sapiens
  misc_RNA (1)...(19): siRNA sense strand
agagccagcccgaguacaa

SEQ ID NO: 831528 - RNA, 19 nt, Homo sapiens
  misc_RNA (1)...(19): siRNA sense strand
ggaaauaccugcuauauga

SEQ ID NO: 831529 - RNA, 19 nt, Homo sapiens
  misc_RNA (1)...(19): siRNA sense strand
gauaacagcuucuugucua

SEQ ID NO: 831530 - RNA, 19 nt, Homo sapiens
  misc_RNA (1)...(19): siRNA sense strand
caaaagagcuaccgaguua

SEQ ID NO: 831531 - RNA, 19 nt, Homo sapiens
  misc_RNA (1)...(19): siRNA sense strand
ccaaggauauuucagcuaa

SEQ ID NO: 831532 - RNA, 19 nt, Homo sapiens
  misc_RNA (1)...(19): siRNA sense strand
guucagcacuccaucauuu

SEQ ID NO: 831533 - RNA, 19 nt, Homo sapiens
  misc_RNA (1)...(19): siRNA sense strand
aaacaaagccgccuaaugu

SEQ ID NO: 831534 - RNA, 19 nt, Homo sapiens
  misc_RNA (1)...(19): siRNA sense strand
acaaggagaucuuugauga

SEQ ID NO: 831535 - RNA, 19 nt, Homo sapiens
  misc_RNA (1)...(19): siRNA sense strand
gcauacacuugcccuguua

SEQ ID NO: 831536 - RNA, 19 nt, Homo sapiens
  misc_RNA (1)...(19): siRNA sense strand
gaagaaaauucaccagaua

SEQ ID NO: 831537 - RNA, 19 nt, Homo sapiens
  misc_RNA (1)...(19): siRNA sense strand
gauaucaacuggcucagaa

SEQ ID NO: 831538 - RNA, 19 nt, Homo sapiens
  misc_RNA (1)...(19): siRNA sense strand
uuaaugaccucucuauuga

SEQ ID NO: 831539 - RNA, 19 nt, Homo sapiens
  misc_RNA (1)...(19): siRNA sense strand
ugacaagucugaauuggaa

SEQ ID NO: 831540 - RNA, 19 nt, Homo sapiens
  misc_RNA (1)...(19): siRNA sense strand
gaaacgauauagcuucaau

SEQ ID NO: 831541 - RNA, 19 nt, Homo sapiens
  misc_RNA (1)...(19): siRNA sense strand
gaauaaagucagccuagua

SEQ ID NO: 831542 - RNA, 19 nt, Homo sapiens
  misc_RNA (1)...(19): siRNA sense strand
ccgaagaacuggaguauuc

SEQ ID NO: 831543 - RNA, 19 nt, Homo sapiens
  misc_RNA (1)...(19): siRNA sense strand
caaaugacuugcuuaaaca

SEQ ID NO: 831544 - RNA, 19 nt, Homo sapiens
  misc_RNA (1)...(19): siRNA sense strand
gaaaucugccucauucgua

SEQ ID NO: 831545 - RNA, 19 nt, Homo sapiens
  misc_RNA (1)...(19): siRNA sense strand
gagacuuugugaaauguua

SEQ ID NO: 831546 - RNA, 19 nt, Homo sapiens
  misc_RNA (1)...(19): siRNA sense strand
gcacauauggcaauuucua

SEQ ID NO: 831547 - RNA, 19 nt, Homo sapiens
  misc_RNA (1)...(19): siRNA sense strand
gaggaucgauuaagacugu

SEQ ID NO: 831548 - RNA, 19 nt, Homo sapiens
  misc_RNA (1)...(19): siRNA sense strand
gcucagaauugaaugaaga

SEQ ID NO: 831549 - RNA, 19 nt, Homo sapiens
  misc_RNA (1)...(19): siRNA sense strand
gaaugaagauuacccuaag

SEQ ID NO: 831550 - RNA, 19 nt, Homo sapiens
  misc_RNA (1)...(19): siRNA sense strand
ucaaagaaauucaccuuca

SEQ ID NO: 831551 - RNA, 19 nt, Homo sapiens
  misc_RNA (1)...(19): siRNA sense strand
caaagaaauucaccuucaa

SEQ ID NO: 831552 - RNA, 19 nt, Homo sapiens
  misc_RNA (1)...(19): siRNA sense strand
caggaaaucugccucauuc

SEQ ID NO: 831553 - RNA, 19 nt, Homo sapiens
  misc_RNA (1)...(19): siRNA sense strand
gaaacaaagccgccuaaug

SEQ ID NO: 831554 - RNA, 19 nt, Homo sapiens
  misc_RNA (1)...(19): siRNA sense strand
ugagauaacuaaagacugu

SEQ ID NO: 831555 - RNA, 19 nt, Homo sapiens
  misc_RNA (1)...(19): siRNA sense strand
ccagagacuuugugaaaug

SEQ ID NO: 831556 - RNA, 19 nt, Homo sapiens
  misc_RNA (1)...(19): siRNA sense strand
ugacagaucccuccagaaa

SEQ ID NO: 831557 - RNA, 19 nt, Homo sapiens
  misc_RNA (1)...(19): siRNA sense strand
gaagauuacccuaaggaaa

SEQ ID NO: 831558 - RNA, 19 nt, Homo sapiens
  misc_RNA (1)...(19): siRNA sense strand
gcaggcagcuuucuuacuc

SEQ ID NO: 831559 - RNA, 19 nt, Homo sapiens
  misc_RNA (1)...(19): siRNA sense strand
caaagccgccuaauguuaa

SEQ ID NO: 831560 - RNA, 19 nt, Homo sapiens
  misc_RNA (1)...(19): siRNA sense strand
gaaaagaaaugcugagaca

SEQ ID NO: 831561 - RNA, 19 nt, Homo sapiens
  misc_RNA (1)...(19): siRNA sense strand
gaacuggaguauucuugug

SEQ ID NO: 831562 - RNA, 19 nt, Homo sapiens
  misc_RNA (1)...(19): siRNA sense strand
gaaaccagcaggcagcuuu

SEQ ID NO: 831563 - RNA, 19 nt, Homo sapiens
  misc_RNA (1)...(19): siRNA sense strand
cuacaauacuggaggaauu

SEQ ID NO: 831564 - RNA, 19 nt, Homo sapiens
  misc_RNA (1)...(19): siRNA sense strand
gaugaggacucuggaaaug

SEQ ID NO: 831565 - RNA, 19 nt, Homo sapiens
  misc_RNA (1)...(19): siRNA sense strand
gcagcugucuuggagauaa

SEQ ID NO: 831566 - RNA, 19 nt, Homo sapiens
  misc_RNA (1)...(19): siRNA sense strand
gcacuuaucagacgcuuug

SEQ ID NO: 831567 - RNA, 19 nt, Homo sapiens
  misc_RNA (1)...(19): siRNA sense strand
ccaacuagcagcccagaua

SEQ ID NO: 831568 - RNA, 19 nt, Homo sapiens
  misc_RNA (1)...(19): siRNA sense strand
uaaagacugugaugagaau

SEQ ID NO: 831569 - RNA, 19 nt, Homo sapiens
  misc_RNA (1)...(19): siRNA sense strand
gaaaagaggaaaagaauga

SEQ ID NO: 831570 - RNA, 19 nt, Homo sapiens
  misc_RNA (1)...(19): siRNA sense strand
cagcuaagucauaacauua

SEQ ID NO: 831571 - RNA, 19 nt, Homo sapiens
  misc_RNA (1)...(19): siRNA sense strand
acaaagccgccuaauguua

SEQ ID NO: 831572 - RNA, 19 nt, Homo sapiens
  misc_RNA (1)...(19): siRNA sense strand
caagguaucccauggaaga

SEQ ID NO: 831573 - RNA, 19 nt, Homo sapiens
  misc_RNA (1)...(19): siRNA sense strand
gaaauucaccuucaaaucc

SEQ ID NO: 831574 - RNA, 19 nt, Homo sapiens
  misc_RNA (1)...(19): siRNA sense strand
caauagagccugacaaguc

SEQ ID NO: 831575 - RNA, 19 nt, Homo sapiens
  misc_RNA (1)...(19): siRNA sense strand
gagaaaagcagcugaguuu

SEQ ID NO: 831576 - RNA, 19 nt, Homo sapiens
  misc_RNA (1)...(19): siRNA sense strand
aaacaaaacuccagaagga

SEQ ID NO: 831577 - RNA, 19 nt, Homo sapiens
  misc_RNA (1)...(19): siRNA sense strand
ucagcuaagucauaacauu

SEQ ID NO: 831578 - RNA, 19 nt, Homo sapiens
  misc_RNA (1)...(19): siRNA sense strand
agacaggacuaauguuuca

SEQ ID NO: 831579 - RNA, 19 nt, Homo sapiens
  misc_RNA (1)...(19): siRNA sense strand
uguuaacucugcaagauaa

SEQ ID NO: 831580 - RNA, 19 nt, Homo sapiens
  misc_RNA (1)...(19): siRNA sense strand
gaaaugcugagacaggaaa

SEQ ID NO: 831581 - RNA, 19 nt, Homo sapiens
  misc_RNA (1)...(19): siRNA sense strand
gaagaaaauuccacucaau

SEQ ID NO: 831582 - RNA, 19 nt, Homo sapiens
  misc_RNA (1)...(19): siRNA sense strand
agacugggauuacaaagug

SEQ ID NO: 831583 - RNA, 19 nt, Homo sapiens
  misc_RNA (1)...(19): siRNA sense strand
gaaacagucagaagagaau

SEQ ID NO: 831584 - RNA, 19 nt, Homo sapiens
  misc_RNA (1)...(19): siRNA sense strand
ggauuacacuggcuggaau

SEQ ID NO: 831585 - RNA, 19 nt, Homo sapiens
  misc_RNA (1)...(19): siRNA sense strand
caucagggcuuuuaccuuu

SEQ ID NO: 831586 - RNA, 19 nt, Homo sapiens
  misc_RNA (1)...(19): siRNA sense strand
gaugauauuccauuucgaa

SEQ ID NO: 831587 - RNA, 19 nt, Homo sapiens
  misc_RNA (1)...(19): siRNA sense strand
agaagaugaugaccucaaa

SEQ ID NO: 831588 - RNA, 19 nt, Homo sapiens
  misc_RNA (1)...(19): siRNA sense strand
ggagauaaguaagagagau

SEQ ID NO: 831589 - RNA, 19 nt, Homo sapiens
  misc_RNA (1)...(19): siRNA sense strand
gaacaacaaggccaugaca

SEQ ID NO: 831590 - RNA, 19 nt, Homo sapiens
  misc_RNA (1)...(19): siRNA sense strand
gaacagaaagaagaugaug

SEQ ID NO: 831591 - RNA, 19 nt, Homo sapiens
  misc_RNA (1)...(19): siRNA sense strand
gugcacauauggcaauuuc

SEQ ID NO: 831592 - RNA, 19 nt, Homo sapiens
  misc_RNA (1)...(19): siRNA sense strand
gaaauaccugcuauaugaa

SEQ ID NO: 831593 - RNA, 19 nt, Homo sapiens
  misc_RNA (1)...(19): siRNA sense strand
ggaggaauuccaaggauau

SEQ ID NO: 831594 - RNA, 19 nt, Homo sapiens
  misc_RNA (1)...(19): siRNA sense strand
gcucaucaguguugucagu

SEQ ID NO: 831595 - RNA, 19 nt, Homo sapiens
  misc_RNA (1)...(19): siRNA sense strand
uugauuggcuccagcagua

SEQ ID NO: 831596 - RNA, 19 nt, Homo sapiens
  misc_RNA (1)...(19): siRNA sense strand
gcugaaagaagauauggaa

SEQ ID NO: 831597 - RNA, 19 nt, Homo sapiens
  misc_RNA (1)...(19): siRNA sense strand
ccagcaggcagcuuucuua

SEQ ID NO: 831598 - RNA, 19 nt, Homo sapiens
  misc_RNA (1)...(19): siRNA sense strand
uaaagucagccuaguaguu

SEQ ID NO: 831599 - RNA, 19 nt, Homo sapiens
  misc_RNA (1)...(19): siRNA sense strand
uaucagaauucgaaguaug

SEQ ID NO: 831600 - RNA, 19 nt, Homo sapiens
  misc_RNA (1)...(19): siRNA sense strand
acagaucccuccagaaagu

SEQ ID NO: 831601 - RNA, 19 nt, Homo sapiens
  misc_RNA (1)...(19): siRNA sense strand
gaucaggguugcuagaaaa

SEQ ID NO: 831602 - RNA, 19 nt, Homo sapiens
  misc_RNA (1)...(19): siRNA sense strand
caccaucucugagucauga

SEQ ID NO: 831603 - RNA, 19 nt, Homo sapiens
  misc_RNA (1)...(19): siRNA sense strand
cugguuauaugcagaauga

SEQ ID NO: 831604 - RNA, 19 nt, Homo sapiens
  misc_RNA (1)...(19): siRNA sense strand
ugaaugaagauuacccuaa

SEQ ID NO: 831605 - RNA, 19 nt, Homo sapiens
  misc_RNA (1)...(19): siRNA sense strand
gaaguguggugggaagugu

SEQ ID NO: 831606 - RNA, 19 nt, Homo sapiens
  misc_RNA (1)...(19): siRNA sense strand
ggaauuccaaggauauuuc

SEQ ID NO: 831607 - RNA, 19 nt, Homo sapiens
  misc_RNA (1)...(19): siRNA sense strand
gaaaagcagcugaguuuga

SEQ ID NO: 831608 - RNA, 19 nt, Homo sapiens
  misc_RNA (1)...(19): siRNA sense strand
ccaguuccucuuucuguua

SEQ ID NO: 831609 - RNA, 19 nt, Homo sapiens
  misc_RNA (1)...(19): siRNA sense strand
aaagaacucucagucacuu

SEQ ID NO: 831610 - RNA, 19 nt, Homo sapiens
  misc_RNA (1)...(19): siRNA sense strand
cagacacuauggaaacuga

SEQ ID NO: 831611 - RNA, 19 nt, Homo sapiens
  misc_RNA (1)...(19): siRNA sense strand
ccucucaaauggugaauuc

SEQ ID NO: 831612 - RNA, 19 nt, Homo sapiens
  misc_RNA (1)...(19): siRNA sense strand
cagaagaugauauucaaga

SEQ ID NO: 831613 - RNA, 19 nt, Homo sapiens
  misc_RNA (1)...(19): siRNA sense strand
gacgauuccuucuuugaca

SEQ ID NO: 831614 - RNA, 19 nt, Homo sapiens
  misc_RNA (1)...(19): siRNA sense strand
gcacuucuucuucagauca

SEQ ID NO: 831615 - RNA, 19 nt, Homo sapiens
  misc_RNA (1)...(19): siRNA sense strand
cagcccagauaccggauuu

SEQ ID NO: 831616 - RNA, 19 nt, Homo sapiens
  misc_RNA (1)...(19): siRNA sense strand
cagaggaaaugagguuguu

SEQ ID NO: 831617 - RNA, 19 nt, Homo sapiens
  misc_RNA (1)...(19): siRNA sense strand
gauauggaguacacagaag

SEQ ID NO: 831618 - RNA, 19 nt, Homo sapiens
  misc_RNA (1)...(19): siRNA sense strand
caaaguaccaaguaaggau

SEQ ID NO: 831619 - RNA, 19 nt, Homo sapiens
  misc_RNA (1)...(19): siRNA sense strand
gcacaaggagaucuuugau

SEQ ID NO: 831620 - RNA, 19 nt, Homo sapiens
  misc_RNA (1)...(19): siRNA sense strand
aagcaagcgugguuuacuu

SEQ ID NO: 831621 - RNA, 19 nt, Homo sapiens
  misc_RNA (1)...(19): siRNA sense strand
gggaacagaaagaagauga

SEQ ID NO: 831622 - RNA, 19 nt, Homo sapiens
  misc_RNA (1)...(19): siRNA sense strand
gauuuacucaagaagguua

SEQ ID NO: 831623 - RNA, 19 nt, Homo sapiens
  misc_RNA (1)...(19): siRNA sense strand
uuugcacacuugcuuguua

SEQ ID NO: 831624 - RNA, 19 nt, Homo sapiens
  misc_RNA (1)...(19): siRNA sense strand
gggaaauaccugcuauaug

SEQ ID NO: 831625 - RNA, 19 nt, Homo sapiens
  misc_RNA (1)...(19): siRNA sense strand
ggugggaagugugcucuug

SEQ ID NO: 831626 - RNA, 19 nt, Homo sapiens
  misc_RNA (1)...(19): siRNA sense strand
uaacuaaagacugugauga

SEQ ID NO: 831627 - RNA, 19 nt, Homo sapiens
  misc_RNA (1)...(19): siRNA sense strand
ugcagaagaugauauucaa

SEQ ID NO: 831628 - RNA, 19 nt, Homo sapiens
  misc_RNA (1)...(19): siRNA sense strand
gaaagaagauggcacugua

SEQ ID NO: 831629 - RNA, 19 nt, Homo sapiens
  misc_RNA (1)...(19): siRNA sense strand
gaacaggcuuuauaugaau

SEQ ID NO: 831630 - RNA, 19 nt, Homo sapiens
  misc_RNA (1)...(19): siRNA sense strand
gaagaagcauugagaagau

SEQ ID NO: 831631 - RNA, 19 nt, Homo sapiens
  misc_RNA (1)...(19): siRNA sense strand
guugaaggguuacacauua

SEQ ID NO: 831632 - RNA, 19 nt, Homo sapiens
  misc_RNA (1)...(19): siRNA sense strand
gaggaagaguguagaaauu

SEQ ID NO: 831633 - RNA, 19 nt, Homo sapiens
  misc_RNA (1)...(19): siRNA sense strand
cagauaaccuuaccacuga

SEQ ID NO: 831634 - RNA, 19 nt, Homo sapiens
  misc_RNA (1)...(19): siRNA sense strand
ccacgucgauguaaauauu

SEQ ID NO: 831635 - RNA, 19 nt, Homo sapiens
  misc_RNA (1)...(19): siRNA sense strand
ggaagaagaggaagaagaa

SEQ ID NO: 831636 - RNA, 19 nt, Homo sapiens
  misc_RNA (1)...(19): siRNA sense strand
gaaacucagucuuccaaug

SEQ ID NO: 831637 - RNA, 19 nt, Homo sapiens
  misc_RNA (1)...(19): siRNA sense strand
guacuuaccagaagauaaa

SEQ ID NO: 831638 - RNA, 19 nt, Homo sapiens
  misc_RNA (1)...(19): siRNA sense strand
ugaacaggcuuuauaugaa

SEQ ID NO: 831639 - RNA, 19 nt, Homo sapiens
  misc_RNA (1)...(19): siRNA sense strand
uggaccaggugaaauauua

SEQ ID NO: 831640 - RNA, 19 nt, Homo sapiens
  misc_RNA (1)...(19): siRNA sense strand
agagaggaauuaucuguuu

SEQ ID NO: 831641 - RNA, 19 nt, Homo sapiens
  misc_RNA (1)...(19): siRNA sense strand
gaacuucucagccuuuaug

SEQ ID NO: 831642 - RNA, 19 nt, Homo sapiens
  misc_RNA (1)...(19): siRNA sense strand
uuacauggaucgucuucua

SEQ ID NO: 831643 - RNA, 19 nt, Homo sapiens
  misc_RNA (1)...(19): siRNA sense strand
ccugaaggaucucacauaa

SEQ ID NO: 831644 - RNA, 19 nt, Homo sapiens
  misc_RNA (1)...(19): siRNA sense strand
ugaaggaucucacauaaaa

SEQ ID NO: 831645 - RNA, 19 nt, Homo sapiens
  misc_RNA (1)...(19): siRNA sense strand
ggaagaagaaggugaagau

SEQ ID NO: 831646 - RNA, 19 nt, Homo sapiens
  misc_RNA (1)...(19): siRNA sense strand
gaaauaagaaaccacuuca

SEQ ID NO: 831647 - RNA, 19 nt, Homo sapiens
  misc_RNA (1)...(19): siRNA sense strand
uaauggaccaggugaaaua

SEQ ID NO: 831648 - RNA, 19 nt, Homo sapiens
  misc_RNA (1)...(19): siRNA sense strand
acaaugaacaggcuuuaua

SEQ ID NO: 831649 - RNA, 19 nt, Homo sapiens
  misc_RNA (1)...(19): siRNA sense strand
gaagaagaaucugaagaag

SEQ ID NO: 831650 - RNA, 19 nt, Homo sapiens
  misc_RNA (1)...(19): siRNA sense strand
ccauaugacugcaagaaau

SEQ ID NO: 831651 - RNA, 19 nt, Homo sapiens
  misc_RNA (1)...(19): siRNA sense strand
gagaggaauuaucuguuug

SEQ ID NO: 831652 - RNA, 19 nt, Homo sapiens
  misc_RNA (1)...(19): siRNA sense strand
agaagaaggugaagaugau

SEQ ID NO: 831653 - RNA, 19 nt, Homo sapiens
  misc_RNA (1)...(19): siRNA sense strand
ggaaauaagaaaccacuuc

SEQ ID NO: 831654 - RNA, 19 nt, Homo sapiens
  misc_RNA (1)...(19): siRNA sense strand
gaagaacaggugaugagaa

SEQ ID NO: 831655 - RNA, 19 nt, Homo sapiens
  misc_RNA (1)...(19): siRNA sense strand
gcagauauggauacuaaug

SEQ ID NO: 831656 - RNA, 19 nt, Homo sapiens
  misc_RNA (1)...(19): siRNA sense strand
ugaagaugcugauaaugau

SEQ ID NO: 831657 - RNA, 19 nt, Homo sapiens
  misc_RNA (1)...(19): siRNA sense strand
augcagauauggauacuaa

SEQ ID NO: 831658 - RNA, 19 nt, Homo sapiens
  misc_RNA (1)...(19): siRNA sense strand
caagaugcccaggaaauaa

SEQ ID NO: 831659 - RNA, 19 nt, Homo sapiens
  misc_RNA (1)...(19): siRNA sense strand
ugaugaagaugcugauaau

SEQ ID NO: 831660 - RNA, 19 nt, Homo sapiens
  misc_RNA (1)...(19): siRNA sense strand
ggacagaggaagaguguag

SEQ ID NO: 831661 - RNA, 19 nt, Homo sapiens
  misc_RNA (1)...(19): siRNA sense strand
ggaagaggaagaagaggaa

SEQ ID NO: 831662 - RNA, 19 nt, Homo sapiens
  misc_RNA (1)...(19): siRNA sense strand
gaaaccacuucaugcagau

SEQ ID NO: 831663 - RNA, 19 nt, Homo sapiens
  misc_RNA (1)...(19): siRNA sense strand
ggaccaacagguggaaaua

SEQ ID NO: 831664 - RNA, 19 nt, Homo sapiens
  misc_RNA (1)...(19): siRNA sense strand
cagaugaccaugaauuuga

SEQ ID NO: 831665 - RNA, 19 nt, Homo sapiens
  misc_RNA (1)...(19): siRNA sense strand
ggaagaguguagaaauuuu

SEQ ID NO: 831666 - RNA, 19 nt, Homo sapiens
  misc_RNA (1)...(19): siRNA sense strand
gugggacccugaguacuua

SEQ ID NO: 831667 - RNA, 19 nt, Homo sapiens
  misc_RNA (1)...(19): siRNA sense strand
aaacucagucuuccaauga

SEQ ID NO: 831668 - RNA, 19 nt, Homo sapiens
  misc_RNA (1)...(19): siRNA sense strand
gaaaugauggaaggagaaa

SEQ ID NO: 831669 - RNA, 19 nt, Homo sapiens
  misc_RNA (1)...(19): siRNA sense strand
ugaaagugcugcaucuagu

SEQ ID NO: 831670 - RNA, 19 nt, Homo sapiens
  misc_RNA (1)...(19): siRNA sense strand
gaaggccuauggaaaggau

SEQ ID NO: 831671 - RNA, 19 nt, Homo sapiens
  misc_RNA (1)...(19): siRNA sense strand
ucaagaugcccaggaaaua

SEQ ID NO: 831672 - RNA, 19 nt, Homo sapiens
  misc_RNA (1)...(19): siRNA sense strand
gcuaauaaaguccgaacaa

SEQ ID NO: 831673 - RNA, 19 nt, Homo sapiens
  misc_RNA (1)...(19): siRNA sense strand
ugagaaggguguagaagca

SEQ ID NO: 831674 - RNA, 19 nt, Homo sapiens
  misc_RNA (1)...(19): siRNA sense strand
cugaagaagaugaagauua

SEQ ID NO: 831675 - RNA, 19 nt, Homo sapiens
  misc_RNA (1)...(19): siRNA sense strand
agaagaagaaucugaagaa

SEQ ID NO: 831676 - RNA, 19 nt, Homo sapiens
  misc_RNA (1)...(19): siRNA sense strand
gcauugagaagauuaagau

SEQ ID NO: 831677 - RNA, 19 nt, Homo sapiens
  misc_RNA (1)...(19): siRNA sense strand
gaagauggcacuguaagca

SEQ ID NO: 831678 - RNA, 19 nt, Homo sapiens
  misc_RNA (1)...(19): siRNA sense strand
uaacagccagucugagaaa

SEQ ID NO: 831679 - RNA, 19 nt, Homo sapiens
  misc_RNA (1)...(19): siRNA sense strand
ggauacuaaugguuaugaa

SEQ ID NO: 831680 - RNA, 19 nt, Homo sapiens
  misc_RNA (1)...(19): siRNA sense strand
caacagguggaaauaagaa

SEQ ID NO: 831681 - RNA, 19 nt, Homo sapiens
  misc_RNA (1)...(19): siRNA sense strand
gcucugaaauagaagaucu

SEQ ID NO: 831682 - RNA, 19 nt, Homo sapiens
  misc_RNA (1)...(19): siRNA sense strand
caaugaacaggcuuuauau

SEQ ID NO: 831683 - RNA, 19 nt, Homo sapiens
  misc_RNA (1)...(19): siRNA sense strand
ugaagaagaugaggaagag

SEQ ID NO: 831684 - RNA, 19 nt, Homo sapiens
  misc_RNA (1)...(19): siRNA sense strand
gaaggcgacaugccaauuc

SEQ ID NO: 831685 - RNA, 19 nt, Homo sapiens
  misc_RNA (1)...(19): siRNA sense strand
cacaaucuguugcuucuca

SEQ ID NO: 831686 - RNA, 19 nt, Homo sapiens
  misc_RNA (1)...(19): siRNA sense strand
gacugucuguggacucuuu

SEQ ID NO: 831687 - RNA, 19 nt, Homo sapiens
  misc_RNA (1)...(19): siRNA sense strand
gaaauagaagaucuugcaa

SEQ ID NO: 831688 - RNA, 19 nt, Homo sapiens
  misc_RNA (1)...(19): siRNA sense strand
uccagguucuucugaauuu

SEQ ID NO: 831689 - RNA, 19 nt, Homo sapiens
  misc_RNA (1)...(19): siRNA sense strand
aaacagcaauggaaaagaa

SEQ ID NO: 831690 - RNA, 19 nt, Homo sapiens
  misc_RNA (1)...(19): siRNA sense strand
gaugaugaacgaacauuag

SEQ ID NO: 831691 - RNA, 19 nt, Homo sapiens
  misc_RNA (1)...(19): siRNA sense strand
aaaauggagugucaucuaa

SEQ ID NO: 831692 - RNA, 19 nt, Homo sapiens
  misc_RNA (1)...(19): siRNA sense strand
ggcuuuauaugaauugguu

SEQ ID NO: 831693 - RNA, 19 nt, Homo sapiens
  misc_RNA (1)...(19): siRNA sense strand
gaacauuagaagaggaaga

SEQ ID NO: 831694 - RNA, 19 nt, Homo sapiens
  misc_RNA (1)...(19): siRNA sense strand
gaggagaauauaaaggauu

SEQ ID NO: 831695 - RNA, 19 nt, Homo sapiens
  misc_RNA (1)...(19): siRNA sense strand
ccagccaucuguugaaucu

SEQ ID NO: 831696 - RNA, 19 nt, Homo sapiens
  misc_RNA (1)...(19): siRNA sense strand
ggaccaggugaaauauuaa

SEQ ID NO: 831697 - RNA, 19 nt, Homo sapiens
  misc_RNA (1)...(19): siRNA sense strand
guaguaacagccagucuga

SEQ ID NO: 831698 - RNA, 19 nt, Homo sapiens
  misc_RNA (1)...(19): siRNA sense strand
gaagcauugagaagauuaa

SEQ ID NO: 831699 - RNA, 19 nt, Homo sapiens
  misc_RNA (1)...(19): siRNA sense strand
aagaacaggugaugagaag

SEQ ID NO: 831700 - RNA, 19 nt, Homo sapiens
  misc_RNA (1)...(19): siRNA sense strand
ugaaguagaagaagaaucu

SEQ ID NO: 831701 - RNA, 19 nt, Homo sapiens
  misc_RNA (1)...(19): siRNA sense strand
ugaaauagaagaucuugca

SEQ ID NO: 831702 - RNA, 19 nt, Homo sapiens
  misc_RNA (1)...(19): siRNA sense strand
gaaggguuacacauuaaug

SEQ ID NO: 831703 - RNA, 19 nt, Homo sapiens
  misc_RNA (1)...(19): siRNA sense strand
aaacacgauuuggaaagaa

SEQ ID NO: 831704 - RNA, 19 nt, Homo sapiens
  misc_RNA (1)...(19): siRNA sense strand
caaggucaguuggugaaug

SEQ ID NO: 831705 - RNA, 19 nt, Homo sapiens
  misc_RNA (1)...(19): siRNA sense strand
gauucaggcuaauaaaguc

SEQ ID NO: 831706 - RNA, 19 nt, Homo sapiens
  misc_RNA (1)...(19): siRNA sense strand
caaauuacccagccaucug

SEQ ID NO: 831707 - RNA, 19 nt, Homo sapiens
  misc_RNA (1)...(19): siRNA sense strand
ucgacuaccugaagaagau

SEQ ID NO: 831708 - RNA, 19 nt, Homo sapiens
  misc_RNA (1)...(19): siRNA sense strand
ccaagaagcagucucacau

SEQ ID NO: 831709 - RNA, 19 nt, Homo sapiens
  misc_RNA (1)...(19): siRNA sense strand
uaagaaaccacuucaugca

SEQ ID NO: 831710 - RNA, 19 nt, Homo sapiens
  misc_RNA (1)...(19): siRNA sense strand
aauaagaaaccacuucaug

SEQ ID NO: 831711 - RNA, 19 nt, Homo sapiens
  misc_RNA (1)...(19): siRNA sense strand
gaccaacagguggaaauaa

SEQ ID NO: 831712 - RNA, 19 nt, Homo sapiens
  misc_RNA (1)...(19): siRNA sense strand
gcugaaggccuauggaaag

SEQ ID NO: 831713 - RNA, 19 nt, Homo sapiens
  misc_RNA (1)...(19): siRNA sense strand
gaagaagaaggugaagaug

SEQ ID NO: 831714 - RNA, 19 nt, Homo sapiens
  misc_RNA (1)...(19): siRNA sense strand
ggaaggcgacaugccaauu

SEQ ID NO: 831715 - RNA, 19 nt, Homo sapiens
  misc_RNA (1)...(19): siRNA sense strand
ugggaaauuugaagaacuu

SEQ ID NO: 831716 - RNA, 19 nt, Homo sapiens
  misc_RNA (1)...(19): siRNA sense strand
uugaaggguuacacauuaa

SEQ ID NO: 831717 - RNA, 19 nt, Homo sapiens
  misc_RNA (1)...(19): siRNA sense strand
aguaaaaguugaaggguua

SEQ ID NO: 831718 - RNA, 19 nt, Homo sapiens
  misc_RNA (1)...(19): siRNA sense strand
cagccagucugagaaagaa

SEQ ID NO: 831719 - RNA, 19 nt, Homo sapiens
  misc_RNA (1)...(19): siRNA sense strand
gcaucaaacaguaguaaca

SEQ ID NO: 831720 - RNA, 19 nt, Homo sapiens
  misc_RNA (1)...(19): siRNA sense strand
gaaggguguagaagcaauu

SEQ ID NO: 831721 - RNA, 19 nt, Homo sapiens
  misc_RNA (1)...(19): siRNA sense strand
gaagaugcugauaaugaug

SEQ ID NO: 831722 - RNA, 19 nt, Homo sapiens
  misc_RNA (1)...(19): siRNA sense strand
ggaaauuugaagaacuuga

SEQ ID NO: 831723 - RNA, 19 nt, Homo sapiens
  misc_RNA (1)...(19): siRNA sense strand
accagaagauaaagugauu

SEQ ID NO: 831724 - RNA, 19 nt, Homo sapiens
  misc_RNA (1)...(19): siRNA sense strand
ccaguuggcauuuguagau

SEQ ID NO: 831725 - RNA, 19 nt, Homo sapiens
  misc_RNA (1)...(19): siRNA sense strand
agaagaagcauugagaaga

SEQ ID NO: 831726 - RNA, 19 nt, Homo sapiens
  misc_RNA (1)...(19): siRNA sense strand
gaugaacgaacauuagaag

SEQ ID NO: 831727 - RNA, 19 nt, Homo sapiens
  misc_RNA (1)...(19): siRNA sense strand
gaaaguccagguucuucug

SEQ ID NO: 831728 - RNA, 19 nt, Homo sapiens
  misc_RNA (1)...(19): siRNA sense strand
guacagaaguuaccaauuu

SEQ ID NO: 831729 - RNA, 19 nt, Homo sapiens
  misc_RNA (1)...(19): siRNA sense strand
ggaagaaccuuucaucuga

SEQ ID NO: 831730 - RNA, 19 nt, Homo sapiens
  misc_RNA (1)...(19): siRNA sense strand
gcagaagaauagagcauuu

SEQ ID NO: 831731 - RNA, 19 nt, Homo sapiens
  misc_RNA (1)...(19): siRNA sense strand
gcaaaguguuuaagcaaga

SEQ ID NO: 831732 - RNA, 19 nt, Homo sapiens
  misc_RNA (1)...(19): siRNA sense strand
gggaggaagugucucagua

SEQ ID NO: 831733 - RNA, 19 nt, Homo sapiens
  misc_RNA (1)...(19): siRNA sense strand
caacuaagagcaucaagaa

SEQ ID NO: 831734 - RNA, 19 nt, Homo sapiens
  misc_RNA (1)...(19): siRNA sense strand
caagaagcacuauagauuu

SEQ ID NO: 831735 - RNA, 19 nt, Homo sapiens
  misc_RNA (1)...(19): siRNA sense strand
caagccagcugccagguuu

SEQ ID NO: 831736 - RNA, 19 nt, Homo sapiens
  misc_RNA (1)...(19): siRNA sense strand
ucaagaagcacuauagauu

SEQ ID NO: 831737 - RNA, 19 nt, Homo sapiens
  misc_RNA (1)...(19): siRNA sense strand
ggaaggaccuaugcuagug

SEQ ID NO: 831738 - RNA, 19 nt, Homo sapiens
  misc_RNA (1)...(19): siRNA sense strand
cauaaagcaugcuggugua

SEQ ID NO: 831739 - RNA, 19 nt, Homo sapiens
  misc_RNA (1)...(19): siRNA sense strand
caaagugcaugaugaaguc

SEQ ID NO: 831740 - RNA, 19 nt, Homo sapiens
  misc_RNA (1)...(19): siRNA sense strand
gaagaaccuuucaucugau

SEQ ID NO: 831741 - RNA, 19 nt, Homo sapiens
  misc_RNA (1)...(19): siRNA sense strand
ggcagaauauucaguuguu

SEQ ID NO: 831742 - RNA, 19 nt, Homo sapiens
  misc_RNA (1)...(19): siRNA sense strand
ggaggaggaugaguaugaa

SEQ ID NO: 831743 - RNA, 19 nt, Homo sapiens
  misc_RNA (1)...(19): siRNA sense strand
ggagcaaaguguuuaagca

SEQ ID NO: 831744 - RNA, 19 nt, Homo sapiens
  misc_RNA (1)...(19): siRNA sense strand
gcacucaugucuccguugu

SEQ ID NO: 831745 - RNA, 19 nt, Homo sapiens
  misc_RNA (1)...(19): siRNA sense strand
cugugaagaugaucaauuu

SEQ ID NO: 831746 - RNA, 19 nt, Homo sapiens
  misc_RNA (1)...(19): siRNA sense strand
gaugaaggcagaaaggauu

SEQ ID NO: 831747 - RNA, 19 nt, Homo sapiens
  misc_RNA (1)...(19): siRNA sense strand
gccauaacuuucucuguga

SEQ ID NO: 831748 - RNA, 19 nt, Homo sapiens
  misc_RNA (1)...(19): siRNA sense strand
gcagaaaggauucagauac

SEQ ID NO: 831749 - RNA, 19 nt, Homo sapiens
  misc_RNA (1)...(19): siRNA sense strand
ucaacacgcucccugaaau

SEQ ID NO: 831750 - RNA, 19 nt, Homo sapiens
  misc_RNA (1)...(19): siRNA sense strand
gagcaaaguguuuaagcaa

SEQ ID NO: 831751 - RNA, 19 nt, Homo sapiens
  misc_RNA (1)...(19): siRNA sense strand
agauggagcuucuggguau

SEQ ID NO: 831752 - RNA, 19 nt, Homo sapiens
  misc_RNA (1)...(19): siRNA sense strand
aaacaaagugcaugaugaa

SEQ ID NO: 831753 - RNA, 19 nt, Homo sapiens
  misc_RNA (1)...(19): siRNA sense strand
gguaugaugcuuauuggaa

SEQ ID NO: 831754 - RNA, 19 nt, Homo sapiens
  misc_RNA (1)...(19): siRNA sense strand
guacuggccuugcaauggu

SEQ ID NO: 831755 - RNA, 19 nt, Homo sapiens
  misc_RNA (1)...(19): siRNA sense strand
gaccauggaggcagaauau

SEQ ID NO: 831756 - RNA, 19 nt, Homo sapiens
  misc_RNA (1)...(19): siRNA sense strand
cagaaaggauucagauacu

SEQ ID NO: 831757 - RNA, 19 nt, Homo sapiens
  misc_RNA (1)...(19): siRNA sense strand
gcacuauagauuuagcuaa

SEQ ID NO: 831758 - RNA, 19 nt, Homo sapiens
  misc_RNA (1)...(19): siRNA sense strand
aagaaccuuucaucugaua

SEQ ID NO: 831759 - RNA, 19 nt, Homo sapiens
  misc_RNA (1)...(19): siRNA sense strand
ggaggcagaauauucaguu

SEQ ID NO: 831760 - RNA, 19 nt, Homo sapiens
  misc_RNA (1)...(19): siRNA sense strand
caaaguguuuaagcaagaa

SEQ ID NO: 831761 - RNA, 19 nt, Homo sapiens
  misc_RNA (1)...(19): siRNA sense strand
acucaugucuccguuguaa

SEQ ID NO: 831762 - RNA, 19 nt, Homo sapiens
  misc_RNA (1)...(19): siRNA sense strand
uguaaugccucaauggaau

SEQ ID NO: 831763 - RNA, 19 nt, Homo sapiens
  misc_RNA (1)...(19): siRNA sense strand
gaccuaugcuaguggcuau

SEQ ID NO: 831764 - RNA, 19 nt, Homo sapiens
  misc_RNA (1)...(19): siRNA sense strand
ugagucaucagauuuguuu

SEQ ID NO: 831765 - RNA, 19 nt, Homo sapiens
  misc_RNA (1)...(19): siRNA sense strand
caacacgcucccugaaauu

SEQ ID NO: 831766 - RNA, 19 nt, Homo sapiens
  misc_RNA (1)...(19): siRNA sense strand
gaggaagugucucaguaca

SEQ ID NO: 831767 - RNA, 19 nt, Homo sapiens
  misc_RNA (1)...(19): siRNA sense strand
uacagaaguuaccaauuug

SEQ ID NO: 831768 - RNA, 19 nt, Homo sapiens
  misc_RNA (1)...(19): siRNA sense strand
acaaggagcaaaguguuua

SEQ ID NO: 831769 - RNA, 19 nt, Homo sapiens
  misc_RNA (1)...(19): siRNA sense strand
gaucauacaaggagcaaag

SEQ ID NO: 831770 - RNA, 19 nt, Homo sapiens
  misc_RNA (1)...(19): siRNA sense strand
ggaccauggaggcagaaua

SEQ ID NO: 831771 - RNA, 19 nt, Homo sapiens
  misc_RNA (1)...(19): siRNA sense strand
gaggcagaauauucaguug

SEQ ID NO: 831772 - RNA, 19 nt, Homo sapiens
  misc_RNA (1)...(19): siRNA sense strand
ucugauaaguauggugaua

SEQ ID NO: 831773 - RNA, 19 nt, Homo sapiens
  misc_RNA (1)...(19): siRNA sense strand
ccuuucaucugauaaguau

SEQ ID NO: 831774 - RNA, 19 nt, Homo sapiens
  misc_RNA (1)...(19): siRNA sense strand
ugcaauaugugacuucugu

SEQ ID NO: 831775 - RNA, 19 nt, Homo sapiens
  misc_RNA (1)...(19): siRNA sense strand
gaagaugaaggcagaaagg

SEQ ID NO: 831776 - RNA, 19 nt, Homo sapiens
  misc_RNA (1)...(19): siRNA sense strand
gcagaauauucaguuguuc

SEQ ID NO: 831777 - RNA, 19 nt, Homo sapiens
  misc_RNA (1)...(19): siRNA sense strand
gcaugaaacucaggagacu

SEQ ID NO: 831778 - RNA, 19 nt, Homo sapiens
  misc_RNA (1)...(19): siRNA sense strand
gcauuuugcuacuuuugua

SEQ ID NO: 831779 - RNA, 19 nt, Homo sapiens
  misc_RNA (1)...(19): siRNA sense strand
cuaagagcaucaagaagca

SEQ ID NO: 831780 - RNA, 19 nt, Homo sapiens
  misc_RNA (1)...(19): siRNA sense strand
gcaucaagaagcacuauag

SEQ ID NO: 831781 - RNA, 19 nt, Homo sapiens
  misc_RNA (1)...(19): siRNA sense strand
caauaugugacuucuguga

SEQ ID NO: 831782 - RNA, 19 nt, Homo sapiens
  misc_RNA (1)...(19): siRNA sense strand
aauggugggugcaauaugu

SEQ ID NO: 831783 - RNA, 19 nt, Homo sapiens
  misc_RNA (1)...(19): siRNA sense strand
aaagcaugcugguguauac

SEQ ID NO: 831784 - RNA, 19 nt, Homo sapiens
  misc_RNA (1)...(19): siRNA sense strand
cagaggcggcagaagaaua

SEQ ID NO: 831785 - RNA, 19 nt, Homo sapiens
  misc_RNA (1)...(19): siRNA sense strand
uaaagcaugcugguguaua

SEQ ID NO: 831786 - RNA, 19 nt, Homo sapiens
  misc_RNA (1)...(19): siRNA sense strand
gcaauggugggugcaauau

SEQ ID NO: 831787 - RNA, 19 nt, Homo sapiens
  misc_RNA (1)...(19): siRNA sense strand
aaaacaaagugcaugauga

SEQ ID NO: 831788 - RNA, 19 nt, Homo sapiens
  misc_RNA (1)...(19): siRNA sense strand
cugaguguguugaauguga

SEQ ID NO: 831789 - RNA, 19 nt, Homo sapiens
  misc_RNA (1)...(19): siRNA sense strand
aauggaaugugacaagugu

SEQ ID NO: 831790 - RNA, 19 nt, Homo sapiens
  misc_RNA (1)...(19): siRNA sense strand
ccauaacuuucucugugaa

SEQ ID NO: 831791 - RNA, 19 nt, Homo sapiens
  misc_RNA (1)...(19): siRNA sense strand
cgaggaagaaggcugagaa

SEQ ID NO: 831792 - RNA, 19 nt, Homo sapiens
  misc_RNA (1)...(19): siRNA sense strand
caaggagcaaaguguuuaa

SEQ ID NO: 831793 - RNA, 19 nt, Homo sapiens
  misc_RNA (1)...(19): siRNA sense strand
gaaaacaaagugcaugaug

SEQ ID NO: 831794 - RNA, 19 nt, Homo sapiens
  misc_RNA (1)...(19): siRNA sense strand
ggcagaaaggauucagaua

SEQ ID NO: 831795 - RNA, 19 nt, Homo sapiens
  misc_RNA (1)...(19): siRNA sense strand
ugaagaggaagaagaugaa

SEQ ID NO: 831796 - RNA, 19 nt, Homo sapiens
  misc_RNA (1)...(19): siRNA sense strand
agaggaugaugaagaggaa

SEQ ID NO: 831797 - RNA, 19 nt, Homo sapiens
  misc_RNA (1)...(19): siRNA sense strand
aagcagaggaugaugaaga

SEQ ID NO: 831798 - RNA, 19 nt, Homo sapiens
  misc_RNA (1)...(19): siRNA sense strand
aaacucaggagacuaagga

SEQ ID NO: 831799 - RNA, 19 nt, Homo sapiens
  misc_RNA (1)...(19): siRNA sense strand
guaaggcuuguuucuguga

SEQ ID NO: 831800 - RNA, 19 nt, Homo sapiens
  misc_RNA (1)...(19): siRNA sense strand
gaaccuuucaucugauaag

SEQ ID NO: 831801 - RNA, 19 nt, Homo sapiens
  misc_RNA (1)...(19): siRNA sense strand
aaacagccuccuuguccua

SEQ ID NO: 831802 - RNA, 19 nt, Homo sapiens
  misc_RNA (1)...(19): siRNA sense strand
ccauggaggcagaauauuc

SEQ ID NO: 831803 - RNA, 19 nt, Homo sapiens
  misc_RNA (1)...(19): siRNA sense strand
ugaagcagaggaugaugaa

SEQ ID NO: 831804 - RNA, 19 nt, Homo sapiens
  misc_RNA (1)...(19): siRNA sense strand
ugucagaggcggcagaaga

SEQ ID NO: 831805 - RNA, 19 nt, Homo sapiens
  misc_RNA (1)...(19): siRNA sense strand
uuuagaggcagaaacauuu

SEQ ID NO: 831806 - RNA, 19 nt, Homo sapiens
  misc_RNA (1)...(19): siRNA sense strand
ggaggaagugucucaguac

SEQ ID NO: 831807 - RNA, 19 nt, Homo sapiens
  misc_RNA (1)...(19): siRNA sense strand
gaagcacuauagauuuagc

SEQ ID NO: 831808 - RNA, 19 nt, Homo sapiens
  misc_RNA (1)...(19): siRNA sense strand
caucaagaagcacuauaga

SEQ ID NO: 831809 - RNA, 19 nt, Homo sapiens
  misc_RNA (1)...(19): siRNA sense strand
uuguaaggcuuguuucugu

SEQ ID NO: 831810 - RNA, 19 nt, Homo sapiens
  misc_RNA (1)...(19): siRNA sense strand
uuagaggcagaaacauuua

SEQ ID NO: 831811 - RNA, 19 nt, Homo sapiens
  misc_RNA (1)...(19): siRNA sense strand
agagggagauggagcuucu

SEQ ID NO: 831812 - RNA, 19 nt, Homo sapiens
  misc_RNA (1)...(19): siRNA sense strand
cagacugugucauaaagca

SEQ ID NO: 831813 - RNA, 19 nt, Homo sapiens
  misc_RNA (1)...(19): siRNA sense strand
ucaauggaaugugacaagu

SEQ ID NO: 831814 - RNA, 19 nt, Homo sapiens
  misc_RNA (1)...(19): siRNA sense strand
cauggaggcagaauauuca

SEQ ID NO: 831815 - RNA, 19 nt, Homo sapiens
  misc_RNA (1)...(19): siRNA sense strand
gcaugcugguguauacagu

SEQ ID NO: 831816 - RNA, 19 nt, Homo sapiens
  misc_RNA (1)...(19): siRNA sense strand
aggaggaggaugaguauga

SEQ ID NO: 831817 - RNA, 19 nt, Homo sapiens
  misc_RNA (1)...(19): siRNA sense strand
uggaagaaccuuucaucug

SEQ ID NO: 831818 - RNA, 19 nt, Homo sapiens
  misc_RNA (1)...(19): siRNA sense strand
uaugaugcuuauuggaaga

SEQ ID NO: 831819 - RNA, 19 nt, Homo sapiens
  misc_RNA (1)...(19): siRNA sense strand
gaaccgccgagaacgugaa

SEQ ID NO: 831820 - RNA, 19 nt, Homo sapiens
  misc_RNA (1)...(19): siRNA sense strand
guggcuaugcucacuauga

SEQ ID NO: 831821 - RNA, 19 nt, Homo sapiens
  misc_RNA (1)...(19): siRNA sense strand
gcugagaaccgccgagaac

SEQ ID NO: 831822 - RNA, 19 nt, Homo sapiens
  misc_RNA (1)...(19): siRNA sense strand
gaccuuagcaugucaacac

SEQ ID NO: 831823 - RNA, 19 nt, Homo sapiens
  misc_RNA (1)...(19): siRNA sense strand
cagccuccuuguccuaaau

SEQ ID NO: 831824 - RNA, 19 nt, Homo sapiens
  misc_RNA (1)...(19): siRNA sense strand
ugaguguguugaaugugaa

SEQ ID NO: 831825 - RNA, 19 nt, Homo sapiens
  misc_RNA (1)...(19): siRNA sense strand
gcugguguauacaguacug

SEQ ID NO: 831826 - RNA, 19 nt, Homo sapiens
  misc_RNA (1)...(19): siRNA sense strand
gaugcugaguguguugaau

SEQ ID NO: 831827 - RNA, 19 nt, Homo sapiens
  misc_RNA (1)...(19): siRNA sense strand
agaaaggauucagauacug

SEQ ID NO: 831828 - RNA, 19 nt, Homo sapiens
  misc_RNA (1)...(19): siRNA sense strand
ggagaaacuucaaggaaua

SEQ ID NO: 831829 - RNA, 19 nt, Homo sapiens
  misc_RNA (1)...(19): siRNA sense strand
gaugaaagguggaaacaaa

SEQ ID NO: 831830 - RNA, 19 nt, Homo sapiens
  misc_RNA (1)...(19): siRNA sense strand
caaauuggcuuguucuaaa

SEQ ID NO: 831831 - RNA, 19 nt, Homo sapiens
  misc_RNA (1)...(19): siRNA sense strand
gaaagcaaaucugaaagua

SEQ ID NO: 831832 - RNA, 19 nt, Homo sapiens
  misc_RNA (1)...(19): siRNA sense strand
gaaaguagcaacaauagaa

SEQ ID NO: 831833 - RNA, 19 nt, Homo sapiens
  misc_RNA (1)...(19): siRNA sense strand
ggagaucagucguuucuuu

SEQ ID NO: 831834 - RNA, 19 nt, Homo sapiens
  misc_RNA (1)...(19): siRNA sense strand
gcaauaagauggaccuuuc

SEQ ID NO: 831835 - RNA, 19 nt, Homo sapiens
  misc_RNA (1)...(19): siRNA sense strand
aaacagaacugacuuagau

SEQ ID NO: 831836 - RNA, 19 nt, Homo sapiens
  misc_RNA (1)...(19): siRNA sense strand
gcacaaagccagucucuga

SEQ ID NO: 831837 - RNA, 19 nt, Homo sapiens
  misc_RNA (1)...(19): siRNA sense strand
ucaagugccuccuccauua

SEQ ID NO: 831838 - RNA, 19 nt, Homo sapiens
  misc_RNA (1)...(19): siRNA sense strand
ggaagagucuccauuuguu

SEQ ID NO: 831839 - RNA, 19 nt, Homo sapiens
  misc_RNA (1)...(19): siRNA sense strand
gcaacaaucucgucaacuu

SEQ ID NO: 831840 - RNA, 19 nt, Homo sapiens
  misc_RNA (1)...(19): siRNA sense strand
gaacacaucuuuggaucaa

SEQ ID NO: 831841 - RNA, 19 nt, Homo sapiens
  misc_RNA (1)...(19): siRNA sense strand
gaaaugacuggaccaaaua

SEQ ID NO: 831842 - RNA, 19 nt, Homo sapiens
  misc_RNA (1)...(19): siRNA sense strand
gaaagguuauccaaacauu

SEQ ID NO: 831843 - RNA, 19 nt, Homo sapiens
  misc_RNA (1)...(19): siRNA sense strand
gaagaagcguggauaaauc

SEQ ID NO: 831844 - RNA, 19 nt, Homo sapiens
  misc_RNA (1)...(19): siRNA sense strand
ggagaaggcugcauggaau

SEQ ID NO: 831845 - RNA, 19 nt, Homo sapiens
  misc_RNA (1)...(19): siRNA sense strand
gaauggagauagauaaaca

SEQ ID NO: 831846 - RNA, 19 nt, Homo sapiens
  misc_RNA (1)...(19): siRNA sense strand
ggaacaaacugccuagcaa

SEQ ID NO: 831847 - RNA, 19 nt, Homo sapiens
  misc_RNA (1)...(19): siRNA sense strand
gaaccucccucacggaaau

SEQ ID NO: 831848 - RNA, 19 nt, Homo sapiens
  misc_RNA (1)...(19): siRNA sense strand
aaagauggccuucggaaua

SEQ ID NO: 831849 - RNA, 19 nt, Homo sapiens
  misc_RNA (1)...(19): siRNA sense strand
ggaagaggauguggagauu

SEQ ID NO: 831850 - RNA, 19 nt, Homo sapiens
  misc_RNA (1)...(19): siRNA sense strand
acaaauggauggaaaucua

SEQ ID NO: 831851 - RNA, 19 nt, Homo sapiens
  misc_RNA (1)...(19): siRNA sense strand
gaacaagcaacaagacauu

SEQ ID NO: 831852 - RNA, 19 nt, Homo sapiens
  misc_RNA (1)...(19): siRNA sense strand
ugaaaugacuggaccaaau

SEQ ID NO: 831853 - RNA, 19 nt, Homo sapiens
  misc_RNA (1)...(19): siRNA sense strand
ggaggaauguuacaagaca

SEQ ID NO: 831854 - RNA, 19 nt, Homo sapiens
  misc_RNA (1)...(19): siRNA sense strand
gggagaaacuucaaggaau

SEQ ID NO: 831855 - RNA, 19 nt, Homo sapiens
  misc_RNA (1)...(19): siRNA sense strand
uaauuacucuggagacaaa

SEQ ID NO: 831856 - RNA, 19 nt, Homo sapiens
  misc_RNA (1)...(19): siRNA sense strand
aaagggccaucaccaauaa

SEQ ID NO: 831857 - RNA, 19 nt, Homo sapiens
  misc_RNA (1)...(19): siRNA sense strand
ccacaagcauuaagcaaau

SEQ ID NO: 831858 - RNA, 19 nt, Homo sapiens
  misc_RNA (1)...(19): siRNA sense strand
gagagaaacaucacuauca

SEQ ID NO: 831859 - RNA, 19 nt, Homo sapiens
  misc_RNA (1)...(19): siRNA sense strand
gagauuggaauguggaaua

SEQ ID NO: 831860 - RNA, 19 nt, Homo sapiens
  misc_RNA (1)...(19): siRNA sense strand
ggaaacaacauaaauccaa

SEQ ID NO: 831861 - RNA, 19 nt, Homo sapiens
  misc_RNA (1)...(19): siRNA sense strand
gaccaaauaacacuacuaa

SEQ ID NO: 831862 - RNA, 19 nt, Homo sapiens
  misc_RNA (1)...(19): siRNA sense strand
aaacaacgguggccugaau

SEQ ID NO: 831863 - RNA, 19 nt, Homo sapiens
  misc_RNA (1)...(19): siRNA sense strand
ugauaaggauggcauugua

SEQ ID NO: 831864 - RNA, 19 nt, Homo sapiens
  misc_RNA (1)...(19): siRNA sense strand
ccaaauaauucaucaggau

SEQ ID NO: 831865 - RNA, 19 nt, Homo sapiens
  misc_RNA (1)...(19): siRNA sense strand
ccacaucucagacaaauga

SEQ ID NO: 831866 - RNA, 19 nt, Homo sapiens
  misc_RNA (1)...(19): siRNA sense strand
ggaaaucuacugaggaaga

SEQ ID NO: 831867 - RNA, 19 nt, Homo sapiens
  misc_RNA (1)...(19): siRNA sense strand
gaagaugauucugcugcua

SEQ ID NO: 831868 - RNA, 19 nt, Homo sapiens
  misc_RNA (1)...(19): siRNA sense strand
uaaaccagcuuucucagau

SEQ ID NO: 831869 - RNA, 19 nt, Homo sapiens
  misc_RNA (1)...(19): siRNA sense strand
gaauagcacuggacuuggu

SEQ ID NO: 831870 - RNA, 19 nt, Homo sapiens
  misc_RNA (1)...(19): siRNA sense strand
ucaggaaacuugugaaucu

SEQ ID NO: 831871 - RNA, 19 nt, Homo sapiens
  misc_RNA (1)...(19): siRNA sense strand
gccuaaauauuggugauua

SEQ ID NO: 831872 - RNA, 19 nt, Homo sapiens
  misc_RNA (1)...(19): siRNA sense strand
ggagauagauaaacauagc

SEQ ID NO: 831873 - RNA, 19 nt, Homo sapiens
  misc_RNA (1)...(19): siRNA sense strand
gauaugccauugccuggaa

SEQ ID NO: 831874 - RNA, 19 nt, Homo sapiens
  misc_RNA (1)...(19): siRNA sense strand
ccaaagcauuguaaacaga

SEQ ID NO: 831875 - RNA, 19 nt, Homo sapiens
  misc_RNA (1)...(19): siRNA sense strand
ggagagcgaugguaguaca

SEQ ID NO: 831876 - RNA, 19 nt, Homo sapiens
  misc_RNA (1)...(19): siRNA sense strand
auaaugagcugccuaguag

SEQ ID NO: 831877 - RNA, 19 nt, Homo sapiens
  misc_RNA (1)...(19): siRNA sense strand
guacacagaagguuucauu

SEQ ID NO: 831878 - RNA, 19 nt, Homo sapiens
  misc_RNA (1)...(19): siRNA sense strand
gaauggcacuucccuuucu

SEQ ID NO: 831879 - RNA, 19 nt, Homo sapiens
  misc_RNA (1)...(19): siRNA sense strand
ggccucagauuuccaaaga

SEQ ID NO: 831880 - RNA, 19 nt, Homo sapiens
  misc_RNA (1)...(19): siRNA sense strand
caagugccaucucaaacaa

SEQ ID NO: 831881 - RNA, 19 nt, Homo sapiens
  misc_RNA (1)...(19): siRNA sense strand
gaaguaagugguacacaga

SEQ ID NO: 831882 - RNA, 19 nt, Homo sapiens
  misc_RNA (1)...(19): siRNA sense strand
ccaguuacagcgauuguua

SEQ ID NO: 831883 - RNA, 19 nt, Homo sapiens
  misc_RNA (1)...(19): siRNA sense strand
cagcacacauuacuccaaa

SEQ ID NO: 831884 - RNA, 19 nt, Homo sapiens
  misc_RNA (1)...(19): siRNA sense strand
gaauucagcuagcaaccau

SEQ ID NO: 831885 - RNA, 19 nt, Homo sapiens
  misc_RNA (1)...(19): siRNA sense strand
ggaccuuucuggaggaaug

SEQ ID NO: 831886 - RNA, 19 nt, Homo sapiens
  misc_RNA (1)...(19): siRNA sense strand
gcaaauggcaaugguaaga

SEQ ID NO: 831887 - RNA, 19 nt, Homo sapiens
  misc_RNA (1)...(19): siRNA sense strand
ggaaacuugugaaucugaa

SEQ ID NO: 831888 - RNA, 19 nt, Homo sapiens
  misc_RNA (1)...(19): siRNA sense strand
acaauggacuugcccuaaa

SEQ ID NO: 831889 - RNA, 19 nt, Homo sapiens
  misc_RNA (1)...(19): siRNA sense strand
gcacaugucaggucucugu

SEQ ID NO: 831890 - RNA, 19 nt, Homo sapiens
  misc_RNA (1)...(19): siRNA sense strand
ccauggagcgcaauccuua

SEQ ID NO: 831891 - RNA, 19 nt, Homo sapiens
  misc_RNA (1)...(19): siRNA sense strand
caaacauggugcuauuuca

SEQ ID NO: 831892 - RNA, 19 nt, Homo sapiens
  misc_RNA (1)...(19): siRNA sense strand
guaaguucuucaucaaaug

SEQ ID NO: 831893 - RNA, 19 nt, Homo sapiens
  misc_RNA (1)...(19): siRNA sense strand
gcaaacauggugcuauuuc

SEQ ID NO: 831894 - RNA, 19 nt, Homo sapiens
  misc_RNA (1)...(19): siRNA sense strand
gaauggcaaucccaguaug

SEQ ID NO: 831895 - RNA, 19 nt, Homo sapiens
  misc_RNA (1)...(19): siRNA sense strand
caagaagaagcguggauaa

SEQ ID NO: 831896 - RNA, 19 nt, Homo sapiens
  misc_RNA (1)...(19): siRNA sense strand
caaagaaaaugucaucgaa

SEQ ID NO: 831897 - RNA, 19 nt, Homo sapiens
  misc_RNA (1)...(19): siRNA sense strand
ggaugaaucuucuaaaccu

SEQ ID NO: 831898 - RNA, 19 nt, Homo sapiens
  misc_RNA (1)...(19): siRNA sense strand
gaacaaacugccuagcaau

SEQ ID NO: 831899 - RNA, 19 nt, Homo sapiens
  misc_RNA (1)...(19): siRNA sense strand
ccaaauaacacuacuaacu

SEQ ID NO: 831900 - RNA, 19 nt, Homo sapiens
  misc_RNA (1)...(19): siRNA sense strand
ucagggagaauaacaaauu

SEQ ID NO: 831901 - RNA, 19 nt, Homo sapiens
  misc_RNA (1)...(19): siRNA sense strand
cagcagggucgaccucuua

SEQ ID NO: 831902 - RNA, 19 nt, Homo sapiens
  misc_RNA (1)...(19): siRNA sense strand
guugguagcagcagcaaua

SEQ ID NO: 831903 - RNA, 19 nt, Homo sapiens
  misc_RNA (1)...(19): siRNA sense strand
gaugaaucuucuaaaccua

SEQ ID NO: 831904 - RNA, 19 nt, Homo sapiens
  misc_RNA (1)...(19): siRNA sense strand
aauauucagugcaguacua

SEQ ID NO: 831905 - RNA, 19 nt, Homo sapiens
  misc_RNA (1)...(19): siRNA sense strand
cagaaauagugauuccaaa

SEQ ID NO: 831906 - RNA, 19 nt, Homo sapiens
  misc_RNA (1)...(19): siRNA sense strand
uaauucaucucaagagcuu

SEQ ID NO: 831907 - RNA, 19 nt, Homo sapiens
  misc_RNA (1)...(19): siRNA sense strand
gcaagugccaucucaaaca

SEQ ID NO: 831908 - RNA, 19 nt, Homo sapiens
  misc_RNA (1)...(19): siRNA sense strand
ggagauugaugauggaacu

SEQ ID NO: 831909 - RNA, 19 nt, Homo sapiens
  misc_RNA (1)...(19): siRNA sense strand
gugccuaugguucuaauua

SEQ ID NO: 831910 - RNA, 19 nt, Homo sapiens
  misc_RNA (1)...(19): siRNA sense strand
gaagaggagaucagucguu

SEQ ID NO: 831911 - RNA, 19 nt, Homo sapiens
  misc_RNA (1)...(19): siRNA sense strand
gacauggucuccugguuca

SEQ ID NO: 831912 - RNA, 19 nt, Homo sapiens
  misc_RNA (1)...(19): siRNA sense strand
uaacggcucuagcaguguu

SEQ ID NO: 831913 - RNA, 19 nt, Homo sapiens
  misc_RNA (1)...(19): siRNA sense strand
caguuuauguccagucaaa

SEQ ID NO: 831914 - RNA, 19 nt, Homo sapiens
  misc_RNA (1)...(19): siRNA sense strand
gguagcagcagcaauaaug

SEQ ID NO: 831915 - RNA, 19 nt, Homo sapiens
  misc_RNA (1)...(19): siRNA sense strand
cucaagagcuuaacucauc

SEQ ID NO: 831916 - RNA, 19 nt, Homo sapiens
  misc_RNA (1)...(19): siRNA sense strand
ggaauguggaauaguaauu

SEQ ID NO: 831917 - RNA, 19 nt, Homo sapiens
  misc_RNA (1)...(19): siRNA sense strand
gauaagacuagcccuaaug

SEQ ID NO: 831918 - RNA, 19 nt, Homo sapiens
  misc_RNA (1)...(19): siRNA sense strand
ccgguucagugcagaauaa

SEQ ID NO: 831919 - RNA, 19 nt, Homo sapiens
  misc_RNA (1)...(19): siRNA sense strand
cuacuauucuugcugaguu

SEQ ID NO: 831920 - RNA, 19 nt, Homo sapiens
  misc_RNA (1)...(19): siRNA sense strand
ggugagccauggaaagguu

SEQ ID NO: 831921 - RNA, 19 nt, Homo sapiens
  misc_RNA (1)...(19): siRNA sense strand
caucaccaauaaaugcuuu

SEQ ID NO: 831922 - RNA, 19 nt, Homo sapiens
  misc_RNA (1)...(19): siRNA sense strand
aaacgaauggagauagaua

SEQ ID NO: 831923 - RNA, 19 nt, Homo sapiens
  misc_RNA (1)...(19): siRNA sense strand
uaaauuggccaccauauac

SEQ ID NO: 831924 - RNA, 19 nt, Homo sapiens
  misc_RNA (1)...(19): siRNA sense strand
gaacgaaagacugacaaug

SEQ ID NO: 831925 - RNA, 19 nt, Homo sapiens
  misc_RNA (1)...(19): siRNA sense strand
guucagugcagaauaauga

SEQ ID NO: 831926 - RNA, 19 nt, Homo sapiens
  misc_RNA (1)...(19): siRNA sense strand
acaccucucuggcucauga

SEQ ID NO: 831927 - RNA, 19 nt, Homo sapiens
  misc_RNA (1)...(19): siRNA sense strand
ggaauuagcagcccaucuc

SEQ ID NO: 831928 - RNA, 19 nt, Homo sapiens
  misc_RNA (1)...(19): siRNA sense strand
ggagaaacuucaaggaaua

SEQ ID NO: 831929 - RNA, 19 nt, Homo sapiens
  misc_RNA (1)...(19): siRNA sense strand
gaugaaagguggaaacaaa

SEQ ID NO: 831930 - RNA, 19 nt, Homo sapiens
  misc_RNA (1)...(19): siRNA sense strand
caaauuggcuuguucuaaa

SEQ ID NO: 831931 - RNA, 19 nt, Homo sapiens
  misc_RNA (1)...(19): siRNA sense strand
gaaagcaaaucugaaagua

SEQ ID NO: 831932 - RNA, 19 nt, Homo sapiens
  misc_RNA (1)...(19): siRNA sense strand
gaaaguagcaacaauagaa

SEQ ID NO: 831933 - RNA, 19 nt, Homo sapiens
  misc_RNA (1)...(19): siRNA sense strand
ggagaucagucguuucuuu

SEQ ID NO: 831934 - RNA, 19 nt, Homo sapiens
  misc_RNA (1)...(19): siRNA sense strand
ggaguuggcuucagaaugu

SEQ ID NO: 831935 - RNA, 19 nt, Homo sapiens
  misc_RNA (1)...(19): siRNA sense strand
gcaauaagauggaccuuuc

SEQ ID NO: 831936 - RNA, 19 nt, Homo sapiens
  misc_RNA (1)...(19): siRNA sense strand
aaacagaacugacuuagau

SEQ ID NO: 831937 - RNA, 19 nt, Homo sapiens
  misc_RNA (1)...(19): siRNA sense strand
gcacaaagccagucucuga

SEQ ID NO: 831938 - RNA, 19 nt, Homo sapiens
  misc_RNA (1)...(19): siRNA sense strand
ucaagugccuccuccauua

SEQ ID NO: 831939 - RNA, 19 nt, Homo sapiens
  misc_RNA (1)...(19): siRNA sense strand
ggaagagucuccauuuguu

SEQ ID NO: 831940 - RNA, 19 nt, Homo sapiens
  misc_RNA (1)...(19): siRNA sense strand
gcaacaaucucgucaacuu

SEQ ID NO: 831941 - RNA, 19 nt, Homo sapiens
  misc_RNA (1)...(19): siRNA sense strand
gaacacaucuuuggaucaa

SEQ ID NO: 831942 - RNA, 19 nt, Homo sapiens
  misc_RNA (1)...(19): siRNA sense strand
gaaaugacuggaccaaaua

SEQ ID NO: 831943 - RNA, 19 nt, Homo sapiens
  misc_RNA (1)...(19): siRNA sense strand
gaaagguuauccaaacauu

SEQ ID NO: 831944 - RNA, 19 nt, Homo sapiens
  misc_RNA (1)...(19): siRNA sense strand
gaagaagcguggauaaauc

SEQ ID NO: 831945 - RNA, 19 nt, Homo sapiens
  misc_RNA (1)...(19): siRNA sense strand
ggagaaggcugcauggaau

SEQ ID NO: 831946 - RNA, 19 nt, Homo sapiens
  misc_RNA (1)...(19): siRNA sense strand
gaauggagauagauaaaca

SEQ ID NO: 831947 - RNA, 19 nt, Homo sapiens
  misc_RNA (1)...(19): siRNA sense strand
ggaacaaacugccuagcaa

SEQ ID NO: 831948 - RNA, 19 nt, Homo sapiens
  misc_RNA (1)...(19): siRNA sense strand
gaaccucccucacggaaau

SEQ ID NO: 831949 - RNA, 19 nt, Homo sapiens
  misc_RNA (1)...(19): siRNA sense strand
aaagauggccuucggaaua

SEQ ID NO: 831950 - RNA, 19 nt, Homo sapiens
  misc_RNA (1)...(19): siRNA sense strand
ggaagaggauguggagauu

SEQ ID NO: 831951 - RNA, 19 nt, Homo sapiens
  misc_RNA (1)...(19): siRNA sense strand
acaaauggauggaaaucua

SEQ ID NO: 831952 - RNA, 19 nt, Homo sapiens
  misc_RNA (1)...(19): siRNA sense strand
gaacaagcaacaagacauu

SEQ ID NO: 831953 - RNA, 19 nt, Homo sapiens
  misc_RNA (1)...(19): siRNA sense strand
uaagaaugcuguuguaagu

SEQ ID NO: 831954 - RNA, 19 nt, Homo sapiens
  misc_RNA (1)...(19): siRNA sense strand
ugaaaugacuggaccaaau

SEQ ID NO: 831955 - RNA, 19 nt, Homo sapiens
  misc_RNA (1)...(19): siRNA sense strand
ggaggaauguuacaagaca

SEQ ID NO: 831956 - RNA, 19 nt, Homo sapiens
  misc_RNA (1)...(19): siRNA sense strand
gggagaaacuucaaggaau

SEQ ID NO: 831957 - RNA, 19 nt, Homo sapiens
  misc_RNA (1)...(19): siRNA sense strand
uaauuacucuggagacaaa

SEQ ID NO: 831958 - RNA, 19 nt, Homo sapiens
  misc_RNA (1)...(19): siRNA sense strand
aaagggccaucaccaauaa

SEQ ID NO: 831959 - RNA, 19 nt, Homo sapiens
  misc_RNA (1)...(19): siRNA sense strand
ccacaagcauuaagcaaau

SEQ ID NO: 831960 - RNA, 19 nt, Homo sapiens
  misc_RNA (1)...(19): siRNA sense strand
gagagaaacaucacuauca

SEQ ID NO: 831961 - RNA, 19 nt, Homo sapiens
  misc_RNA (1)...(19): siRNA sense strand
gagauuggaauguggaaua

SEQ ID NO: 831962 - RNA, 19 nt, Homo sapiens
  misc_RNA (1)...(19): siRNA sense strand
ggaaacaacauaaauccaa

SEQ ID NO: 831963 - RNA, 19 nt, Homo sapiens
  misc_RNA (1)...(19): siRNA sense strand
gaccaaauaacacuacuaa

SEQ ID NO: 831964 - RNA, 19 nt, Homo sapiens
  misc_RNA (1)...(19): siRNA sense strand
aaacaacgguggccugaau

SEQ ID NO: 831965 - RNA, 19 nt, Homo sapiens
  misc_RNA (1)...(19): siRNA sense strand
ugauaaggauggcauugua

SEQ ID NO: 831966 - RNA, 19 nt, Homo sapiens
  misc_RNA (1)...(19): siRNA sense strand
ccaaauaauucaucaggau

SEQ ID NO: 831967 - RNA, 19 nt, Homo sapiens
  misc_RNA (1)...(19): siRNA sense strand
ccacaucucagacaaauga

SEQ ID NO: 831968 - RNA, 19 nt, Homo sapiens
  misc_RNA (1)...(19): siRNA sense strand
ggaaaucuacugaggaaga

SEQ ID NO: 831969 - RNA, 19 nt, Homo sapiens
  misc_RNA (1)...(19): siRNA sense strand
gaauagcacuggacuuggu

SEQ ID NO: 831970 - RNA, 19 nt, Homo sapiens
  misc_RNA (1)...(19): siRNA sense strand
uaaaccagcuuucucagau

SEQ ID NO: 831971 - RNA, 19 nt, Homo sapiens
  misc_RNA (1)...(19): siRNA sense strand
gaagaugauucugcugcua

SEQ ID NO: 831972 - RNA, 19 nt, Homo sapiens
  misc_RNA (1)...(19): siRNA sense strand
ucaggaaacuugugaaucu

SEQ ID NO: 831973 - RNA, 19 nt, Homo sapiens
  misc_RNA (1)...(19): siRNA sense strand
gccuaaauauuggugauua

SEQ ID NO: 831974 - RNA, 19 nt, Homo sapiens
  misc_RNA (1)...(19): siRNA sense strand
ggagauagauaaacauagc

SEQ ID NO: 831975 - RNA, 19 nt, Homo sapiens
  misc_RNA (1)...(19): siRNA sense strand
gauaugccauugccuggaa

SEQ ID NO: 831976 - RNA, 19 nt, Homo sapiens
  misc_RNA (1)...(19): siRNA sense strand
ccaaagcauuguaaacaga

SEQ ID NO: 831977 - RNA, 19 nt, Homo sapiens
  misc_RNA (1)...(19): siRNA sense strand
ggagagcgaugguaguaca

SEQ ID NO: 831978 - RNA, 19 nt, Homo sapiens
  misc_RNA (1)...(19): siRNA sense strand
auaaugagcugccuaguag

SEQ ID NO: 831979 - RNA, 19 nt, Homo sapiens
  misc_RNA (1)...(19): siRNA sense strand
guacacagaagguuucauu

SEQ ID NO: 831980 - RNA, 19 nt, Homo sapiens
  misc_RNA (1)...(19): siRNA sense strand
ggaccugugucuucuacaa

SEQ ID NO: 831981 - RNA, 19 nt, Homo sapiens
  misc_RNA (1)...(19): siRNA sense strand
gaauggcacuucccuuucu

SEQ ID NO: 831982 - RNA, 19 nt, Homo sapiens
  misc_RNA (1)...(19): siRNA sense strand
ggccucagauuuccaaaga

SEQ ID NO: 831983 - RNA, 19 nt, Homo sapiens
  misc_RNA (1)...(19): siRNA sense strand
caagugccaucucaaacaa

SEQ ID NO: 831984 - RNA, 19 nt, Homo sapiens
  misc_RNA (1)...(19): siRNA sense strand
gaaguaagugguacacaga

SEQ ID NO: 831985 - RNA, 19 nt, Homo sapiens
  misc_RNA (1)...(19): siRNA sense strand
ccaguuacagcgauuguua

SEQ ID NO: 831986 - RNA, 19 nt, Homo sapiens
  misc_RNA (1)...(19): siRNA sense strand
cagcacacauuacuccaaa

SEQ ID NO: 831987 - RNA, 19 nt, Homo sapiens
  misc_RNA (1)...(19): siRNA sense strand
agaaugcuguuguaaguga

SEQ ID NO: 831988 - RNA, 19 nt, Homo sapiens
  misc_RNA (1)...(19): siRNA sense strand
ggaccuuucuggaggaaug

SEQ ID NO: 831989 - RNA, 19 nt, Homo sapiens
  misc_RNA (1)...(19): siRNA sense strand
gaucugcuguuaagguguu

SEQ ID NO: 831990 - RNA, 19 nt, Homo sapiens
  misc_RNA (1)...(19): siRNA sense strand
gcaaauggcaaugguaaga

SEQ ID NO: 831991 - RNA, 19 nt, Homo sapiens
  misc_RNA (1)...(19): siRNA sense strand
ggaaacuugugaaucugaa

SEQ ID NO: 831992 - RNA, 19 nt, Homo sapiens
  misc_RNA (1)...(19): siRNA sense strand
acaauggacuugcccuaaa

SEQ ID NO: 831993 - RNA, 19 nt, Homo sapiens
  misc_RNA (1)...(19): siRNA sense strand
gaauucagcuagcaaccau

SEQ ID NO: 831994 - RNA, 19 nt, Homo sapiens
  misc_RNA (1)...(19): siRNA sense strand
gcacaugucaggucucugu

SEQ ID NO: 831995 - RNA, 19 nt, Homo sapiens
  misc_RNA (1)...(19): siRNA sense strand
ccauggagcgcaauccuua

SEQ ID NO: 831996 - RNA, 19 nt, Homo sapiens
  misc_RNA (1)...(19): siRNA sense strand
gcagugcuuuaacaaauca

SEQ ID NO: 831997 - RNA, 19 nt, Homo sapiens
  misc_RNA (1)...(19): siRNA sense strand
caaacauggugcuauuuca

SEQ ID NO: 831998 - RNA, 19 nt, Homo sapiens
  misc_RNA (1)...(19): siRNA sense strand
guaaguucuucaucaaaug

SEQ ID NO: 831999 - RNA, 19 nt, Homo sapiens
  misc_RNA (1)...(19): siRNA sense strand
gcaaacauggugcuauuuc

SEQ ID NO: 832000 - RNA, 19 nt, Homo sapiens
  misc_RNA (1)...(19): siRNA sense strand
gaauggcaaucccaguaug

SEQ ID NO: 832001 - RNA, 19 nt, Homo sapiens
  misc_RNA (1)...(19): siRNA sense strand
caagaagaagcguggauaa

SEQ ID NO: 832002 - RNA, 19 nt, Homo sapiens
  misc_RNA (1)...(19): siRNA sense strand
caaagaaaaugucaucgaa

SEQ ID NO: 832003 - RNA, 19 nt, Homo sapiens
  misc_RNA (1)...(19): siRNA sense strand
ggaugaaucuucuaaaccu

SEQ ID NO: 832004 - RNA, 19 nt, Homo sapiens
  misc_RNA (1)...(19): siRNA sense strand
gaacaaacugccuagcaau

SEQ ID NO: 832005 - RNA, 19 nt, Homo sapiens
  misc_RNA (1)...(19): siRNA sense strand
guugguagcagcagcaaua

SEQ ID NO: 832006 - RNA, 19 nt, Homo sapiens
  misc_RNA (1)...(19): siRNA sense strand
ucagggagaauaacaaauu

SEQ ID NO: 832007 - RNA, 19 nt, Homo sapiens
  misc_RNA (1)...(19): siRNA sense strand
cagcagggucgaccucuua

SEQ ID NO: 832008 - RNA, 19 nt, Homo sapiens
  misc_RNA (1)...(19): siRNA sense strand
gaugaaucuucuaaaccua

SEQ ID NO: 832009 - RNA, 19 nt, Homo sapiens
  misc_RNA (1)...(19): siRNA sense strand
ccaaauaacacuacuaacu

SEQ ID NO: 832010 - RNA, 19 nt, Homo sapiens
  misc_RNA (1)...(19): siRNA sense strand
aauauucagugcaguacua

SEQ ID NO: 832011 - RNA, 19 nt, Homo sapiens
  misc_RNA (1)...(19): siRNA sense strand
cagaaauagugauuccaaa

SEQ ID NO: 832012 - RNA, 19 nt, Homo sapiens
  misc_RNA (1)...(19): siRNA sense strand
uaauucaucucaagagcuu

SEQ ID NO: 832013 - RNA, 19 nt, Homo sapiens
  misc_RNA (1)...(19): siRNA sense strand
gcaagugccaucucaaaca

SEQ ID NO: 832014 - RNA, 19 nt, Homo sapiens
  misc_RNA (1)...(19): siRNA sense strand
ggagauugaugauggaacu

SEQ ID NO: 832015 - RNA, 19 nt, Homo sapiens
  misc_RNA (1)...(19): siRNA sense strand
gguagcagcagcaauaaug

SEQ ID NO: 832016 - RNA, 19 nt, Homo sapiens
  misc_RNA (1)...(19): siRNA sense strand
gaagaggagaucagucguu

SEQ ID NO: 832017 - RNA, 19 nt, Homo sapiens
  misc_RNA (1)...(19): siRNA sense strand
gacauggucuccugguuca

SEQ ID NO: 832018 - RNA, 19 nt, Homo sapiens
  misc_RNA (1)...(19): siRNA sense strand
uaacggcucuagcaguguu

SEQ ID NO: 832019 - RNA, 19 nt, Homo sapiens
  misc_RNA (1)...(19): siRNA sense strand
caguuuauguccagucaaa

SEQ ID NO: 832020 - RNA, 19 nt, Homo sapiens
  misc_RNA (1)...(19): siRNA sense strand
cucaagagcuuaacucauc

SEQ ID NO: 832021 - RNA, 19 nt, Homo sapiens
  misc_RNA (1)...(19): siRNA sense strand
ggaauguggaauaguaauu

SEQ ID NO: 832022 - RNA, 19 nt, Homo sapiens
  misc_RNA (1)...(19): siRNA sense strand
gauaagacuagcccuaaug

SEQ ID NO: 832023 - RNA, 19 nt, Homo sapiens
  misc_RNA (1)...(19): siRNA sense strand
gugccuaugguucuaauua

SEQ ID NO: 832024 - RNA, 19 nt, Homo sapiens
  misc_RNA (1)...(19): siRNA sense strand
aaacgaauggagauagaua

SEQ ID NO: 832025 - RNA, 19 nt, Homo sapiens
  misc_RNA (1)...(19): siRNA sense strand
cuacuauucuugcugaguu

SEQ ID NO: 832026 - RNA, 19 nt, Homo sapiens
  misc_RNA (1)...(19): siRNA sense strand
ggugagccauggaaagguu

SEQ ID NO: 832027 - RNA, 19 nt, Homo sapiens
  misc_RNA (1)...(19): siRNA sense strand
caucaccaauaaaugcuuu

SEQ ID NO: 832028 - RNA, 19 nt, Homo sapiens
  misc_RNA (1)...(19): siRNA sense strand
gcaaagccaucuucaucuu

SEQ ID NO: 832029 - RNA, 19 nt, Homo sapiens
  misc_RNA (1)...(19): siRNA sense strand
caaaaggucugaagaguaa

SEQ ID NO: 832030 - RNA, 19 nt, Homo sapiens
  misc_RNA (1)...(19): siRNA sense strand
gucggagucuucaauaaua

SEQ ID NO: 832031 - RNA, 19 nt, Homo sapiens
  misc_RNA (1)...(19): siRNA sense strand
ugccauagaugaagacauu

SEQ ID NO: 832032 - RNA, 19 nt, Homo sapiens
  misc_RNA (1)...(19): siRNA sense strand
gaagaaagagggaagacau

SEQ ID NO: 832033 - RNA, 19 nt, Homo sapiens
  misc_RNA (1)...(19): siRNA sense strand
gaaagagggaagacauuca

SEQ ID NO: 832034 - RNA, 19 nt, Homo sapiens
  misc_RNA (1)...(19): siRNA sense strand
uugacgagauggauaaauu

SEQ ID NO: 832035 - RNA, 19 nt, Homo sapiens
  misc_RNA (1)...(19): siRNA sense strand
gcggggaccuuauaacuaa

SEQ ID NO: 832036 - RNA, 19 nt, Homo sapiens
  misc_RNA (1)...(19): siRNA sense strand
gcaaucaagccguuucuag

SEQ ID NO: 832037 - RNA, 19 nt, Homo sapiens
  misc_RNA (1)...(19): siRNA sense strand
gagaaaaucuacucagaca

SEQ ID NO: 832038 - RNA, 19 nt, Homo sapiens
  misc_RNA (1)...(19): siRNA sense strand
gcaagaauuuugucaguca

SEQ ID NO: 832039 - RNA, 19 nt, Homo sapiens
  misc_RNA (1)...(19): siRNA sense strand
cggagugucuuaccgcaaa

SEQ ID NO: 832040 - RNA, 19 nt, Homo sapiens
  misc_RNA (1)...(19): siRNA sense strand
ucaagccguuucuagacua

SEQ ID NO: 832041 - RNA, 19 nt, Homo sapiens
  misc_RNA (1)...(19): siRNA sense strand
guacagacaugugaaaaug

SEQ ID NO: 832042 - RNA, 19 nt, Homo sapiens
  misc_RNA (1)...(19): siRNA sense strand
uaacuuuguccaccuguuu

SEQ ID NO: 832043 - RNA, 19 nt, Homo sapiens
  misc_RNA (1)...(19): siRNA sense strand
ggaguacagacaugugaaa

SEQ ID NO: 832044 - RNA, 19 nt, Homo sapiens
  misc_RNA (1)...(19): siRNA sense strand
caaucaagccguuucuaga

SEQ ID NO: 832045 - RNA, 19 nt, Homo sapiens
  misc_RNA (1)...(19): siRNA sense strand
ccucauugauuacuuuauc

SEQ ID NO: 832046 - RNA, 19 nt, Homo sapiens
  misc_RNA (1)...(19): siRNA sense strand
agaaguggauccgcgguaa

SEQ ID NO: 832047 - RNA, 19 nt, Homo sapiens
  misc_RNA (1)...(19): siRNA sense strand
ucggagucuucaauaauaa

SEQ ID NO: 832048 - RNA, 19 nt, Homo sapiens
  misc_RNA (1)...(19): siRNA sense strand
ccacugacccuuuccuuac

SEQ ID NO: 832049 - RNA, 19 nt, Homo sapiens
  misc_RNA (1)...(19): siRNA sense strand
uuucauauuugacgagaug

SEQ ID NO: 832050 - RNA, 19 nt, Homo sapiens
  misc_RNA (1)...(19): siRNA sense strand
ggucugaagaguaacuuug

SEQ ID NO: 832051 - RNA, 19 nt, Homo sapiens
  misc_RNA (1)...(19): siRNA sense strand
gauccgcgguaaugugagu

SEQ ID NO: 832052 - RNA, 19 nt, Homo sapiens
  misc_RNA (1)...(19): siRNA sense strand
ccgcaaagccaucuucauc

SEQ ID NO: 832053 - RNA, 19 nt, Homo sapiens
  misc_RNA (1)...(19): siRNA sense strand
gaaggaccuggaaccugua

SEQ ID NO: 832054 - RNA, 19 nt, Homo sapiens
  misc_RNA (1)...(19): siRNA sense strand
guucugccauagaugaaga

SEQ ID NO: 832055 - RNA, 19 nt, Homo sapiens
  misc_RNA (1)...(19): siRNA sense strand
ccuggaaccuguacugucu

SEQ ID NO: 832056 - RNA, 19 nt, Homo sapiens
  misc_RNA (1)...(19): siRNA sense strand
ccggcuaccuguccuacaa

SEQ ID NO: 832057 - RNA, 19 nt, Homo sapiens
  misc_RNA (1)...(19): siRNA sense strand
guaacuuuguccaccuguu

SEQ ID NO: 832058 - RNA, 19 nt, Homo sapiens
  misc_RNA (1)...(19): siRNA sense strand
gaaaaucuacucagacaag

SEQ ID NO: 832059 - RNA, 19 nt, Homo sapiens
  misc_RNA (1)...(19): siRNA sense strand
ccucaugagcagaagauaa

SEQ ID NO: 832060 - RNA, 19 nt, Homo sapiens
  misc_RNA (1)...(19): siRNA sense strand
acucugcacuucccucaug

SEQ ID NO: 832061 - RNA, 19 nt, Homo sapiens
  misc_RNA (1)...(19): siRNA sense strand
ccacggaagugauuuucaa

SEQ ID NO: 832062 - RNA, 19 nt, Homo sapiens
  misc_RNA (1)...(19): siRNA sense strand
ggcccgugguucugccaua

SEQ ID NO: 832063 - RNA, 19 nt, Homo sapiens
  misc_RNA (1)...(19): siRNA sense strand
ugacgagauggauaaauug

SEQ ID NO: 832064 - RNA, 19 nt, Homo sapiens
  misc_RNA (1)...(19): siRNA sense strand
aagaaaccacugacccuuu

SEQ ID NO: 832065 - RNA, 19 nt, Homo sapiens
  misc_RNA (1)...(19): siRNA sense strand
cucaugagcagaagauaaa

SEQ ID NO: 832066 - RNA, 19 nt, Homo sapiens
  misc_RNA (1)...(19): siRNA sense strand
ggaagaaagagggaagaca

SEQ ID NO: 832067 - RNA, 19 nt, Homo sapiens
  misc_RNA (1)...(19): siRNA sense strand
cgaacucuguuuucauauu

SEQ ID NO: 832068 - RNA, 19 nt, Homo sapiens
  misc_RNA (1)...(19): siRNA sense strand
agacggcucuugacuuuug

SEQ ID NO: 832069 - RNA, 19 nt, Homo sapiens
  misc_RNA (1)...(19): siRNA sense strand
ccaaaaggucugaagagua

SEQ ID NO: 832070 - RNA, 19 nt, Homo sapiens
  misc_RNA (1)...(19): siRNA sense strand
ggaccuggaaccuguacug

SEQ ID NO: 832071 - RNA, 19 nt, Homo sapiens
  misc_RNA (1)...(19): siRNA sense strand
gaaguggauccgcgguaau

SEQ ID NO: 832072 - RNA, 19 nt, Homo sapiens
  misc_RNA (1)...(19): siRNA sense strand
gcaugugcgaacucuguuu

SEQ ID NO: 832073 - RNA, 19 nt, Homo sapiens
  misc_RNA (1)...(19): siRNA sense strand
caagaguggcagaggaaau

SEQ ID NO: 832074 - RNA, 19 nt, Homo sapiens
  misc_RNA (1)...(19): siRNA sense strand
caggaccaguuacagaagu

SEQ ID NO: 832075 - RNA, 19 nt, Homo sapiens
  misc_RNA (1)...(19): siRNA sense strand
aagaaagagggaagacauu

SEQ ID NO: 832076 - RNA, 19 nt, Homo sapiens
  misc_RNA (1)...(19): siRNA sense strand
uauuugacgagauggauaa

SEQ ID NO: 832077 - RNA, 19 nt, Homo sapiens
  misc_RNA (1)...(19): siRNA sense strand
ugacuggcuucaggaacaa

SEQ ID NO: 832078 - RNA, 19 nt, Homo sapiens
  misc_RNA (1)...(19): siRNA sense strand
gugcaugugcgaacucugu

SEQ ID NO: 832079 - RNA, 19 nt, Homo sapiens
  misc_RNA (1)...(19): siRNA sense strand
cacaagaguggcagaggaa

SEQ ID NO: 832080 - RNA, 19 nt, Homo sapiens
  misc_RNA (1)...(19): siRNA sense strand
guccuacaaugacaucuac

SEQ ID NO: 832081 - RNA, 19 nt, Homo sapiens
  misc_RNA (1)...(19): siRNA sense strand
ugcgaacucuguuuucaua

SEQ ID NO: 832082 - RNA, 19 nt, Homo sapiens
  misc_RNA (1)...(19): siRNA sense strand
gagcagaagauaaaacugu

SEQ ID NO: 832083 - RNA, 19 nt, Homo sapiens
  misc_RNA (1)...(19): siRNA sense strand
gcaucuagccacggaagug

SEQ ID NO: 832084 - RNA, 19 nt, Homo sapiens
  misc_RNA (1)...(19): siRNA sense strand
gcagguugacggagugucu

SEQ ID NO: 832085 - RNA, 19 nt, Homo sapiens
  misc_RNA (1)...(19): siRNA sense strand
gugguucugccauagauga

SEQ ID NO: 832086 - RNA, 19 nt, Homo sapiens
  misc_RNA (1)...(19): siRNA sense strand
ugucggagucuucaauaau

SEQ ID NO: 832087 - RNA, 19 nt, Homo sapiens
  misc_RNA (1)...(19): siRNA sense strand
cuucaucuuucucagcaau

SEQ ID NO: 832088 - RNA, 19 nt, Homo sapiens
  misc_RNA (1)...(19): siRNA sense strand
gcagaggaaaugacguuuu

SEQ ID NO: 832089 - RNA, 19 nt, Homo sapiens
  misc_RNA (1)...(19): siRNA sense strand
cugucggagucuucaauaa

SEQ ID NO: 832090 - RNA, 19 nt, Homo sapiens
  misc_RNA (1)...(19): siRNA sense strand
agaaagagggaagacauuc

SEQ ID NO: 832091 - RNA, 19 nt, Homo sapiens
  misc_RNA (1)...(19): siRNA sense strand
gaaaaucuucacccaaaag

SEQ ID NO: 832092 - RNA, 19 nt, Homo sapiens
  misc_RNA (1)...(19): siRNA sense strand
ugcagucgcggcuggauuu

SEQ ID NO: 832093 - RNA, 19 nt, Homo sapiens
  misc_RNA (1)...(19): siRNA sense strand
gcuggcacaggcaagaauu

SEQ ID NO: 832094 - RNA, 19 nt, Homo sapiens
  misc_RNA (1)...(19): siRNA sense strand
uaccaggaccaguuacaga

SEQ ID NO: 832095 - RNA, 19 nt, Homo sapiens
  misc_RNA (1)...(19): siRNA sense strand
ucagacaagggcugcaaga

SEQ ID NO: 832096 - RNA, 19 nt, Homo sapiens
  misc_RNA (1)...(19): siRNA sense strand
caucuagccacggaaguga

SEQ ID NO: 832097 - RNA, 19 nt, Homo sapiens
  misc_RNA (1)...(19): siRNA sense strand
uggcagaggaaaugacguu

SEQ ID NO: 832098 - RNA, 19 nt, Homo sapiens
  misc_RNA (1)...(19): siRNA sense strand
ccauagaugaagacauugu

SEQ ID NO: 832099 - RNA, 19 nt, Homo sapiens
  misc_RNA (1)...(19): siRNA sense strand
gcacaggcaagaauuuugu

SEQ ID NO: 832100 - RNA, 19 nt, Homo sapiens
  misc_RNA (1)...(19): siRNA sense strand
ggcuaccuguccuacaaug

SEQ ID NO: 832101 - RNA, 19 nt, Homo sapiens
  misc_RNA (1)...(19): siRNA sense strand
cacugacccuuuccuuaca

SEQ ID NO: 832102 - RNA, 19 nt, Homo sapiens
  misc_RNA (1)...(19): siRNA sense strand
gcuggccgcugucgagaaa

SEQ ID NO: 832103 - RNA, 19 nt, Homo sapiens
  misc_RNA (1)...(19): siRNA sense strand
gcuacgaccugcuggaacu

SEQ ID NO: 832104 - RNA, 19 nt, Homo sapiens
  misc_RNA (1)...(19): siRNA sense strand
guuugcagcccuaguguuu

SEQ ID NO: 832105 - RNA, 19 nt, Homo sapiens
  misc_RNA (1)...(19): siRNA sense strand
uccagaagaauuccucuaa

SEQ ID NO: 832106 - RNA, 19 nt, Homo sapiens
  misc_RNA (1)...(19): siRNA sense strand
cugcagcccucggugauug

SEQ ID NO: 832107 - RNA, 19 nt, Homo sapiens
  misc_RNA (1)...(19): siRNA sense strand
ccucggugauugagaacug

SEQ ID NO: 832108 - RNA, 19 nt, Homo sapiens
  misc_RNA (1)...(19): siRNA sense strand
ugccggagccauggaauuu

SEQ ID NO: 832109 - RNA, 19 nt, Homo sapiens
  misc_RNA (1)...(19): siRNA sense strand
gggcuacgaccugcuggaa

SEQ ID NO: 832110 - RNA, 19 nt, Homo sapiens
  misc_RNA (1)...(19): siRNA sense strand
gaagaauuccucuaaguuu

SEQ ID NO: 832111 - RNA, 19 nt, Homo sapiens
  misc_RNA (1)...(19): siRNA sense strand
uaaaggcagucgacauuaa

SEQ ID NO: 832112 - RNA, 19 nt, Homo sapiens
  misc_RNA (1)...(19): siRNA sense strand
cagaagaauuccucuaagu

SEQ ID NO: 832113 - RNA, 19 nt, Homo sapiens
  misc_RNA (1)...(19): siRNA sense strand
gcuggccgcugucgagaaa

SEQ ID NO: 832114 - RNA, 19 nt, Homo sapiens
  misc_RNA (1)...(19): siRNA sense strand
gacgaugcaugccauauac

SEQ ID NO: 832115 - RNA, 19 nt, Homo sapiens
  misc_RNA (1)...(19): siRNA sense strand
uuaagaagccucugguuuc

SEQ ID NO: 832116 - RNA, 19 nt, Homo sapiens
  misc_RNA (1)...(19): siRNA sense strand
ccagaagaauuccucuaag

SEQ ID NO: 832117 - RNA, 19 nt, Homo sapiens
  misc_RNA (1)...(19): siRNA sense strand
agacgaugcaugccauaua

SEQ ID NO: 832118 - RNA, 19 nt, Homo sapiens
  misc_RNA (1)...(19): siRNA sense strand
aagaauuccucuaaguuuc

SEQ ID NO: 832119 - RNA, 19 nt, Homo sapiens
  misc_RNA (1)...(19): siRNA sense strand
agaagaauuccucuaaguu

SEQ ID NO: 832120 - RNA, 19 nt, Homo sapiens
  misc_RNA (1)...(19): siRNA sense strand
accaggauguugccgguua

SEQ ID NO: 832121 - RNA, 19 nt, Homo sapiens
  misc_RNA (1)...(19): siRNA sense strand
gcuacgaccugcuggaacu

SEQ ID NO: 832122 - RNA, 19 nt, Homo sapiens
  misc_RNA (1)...(19): siRNA sense strand
guuugcagcccuaguguuu

SEQ ID NO: 832123 - RNA, 19 nt, Homo sapiens
  misc_RNA (1)...(19): siRNA sense strand
uuaaaggcagucgacauua

SEQ ID NO: 832124 - RNA, 19 nt, Homo sapiens
  misc_RNA (1)...(19): siRNA sense strand
gcagacgaugcaugccaua

SEQ ID NO: 832125 - RNA, 19 nt, Homo sapiens
  misc_RNA (1)...(19): siRNA sense strand
uccagaagaauuccucuaa

SEQ ID NO: 832126 - RNA, 19 nt, Homo sapiens
  misc_RNA (1)...(19): siRNA sense strand
uuuaaaggcagucgacauu

SEQ ID NO: 832127 - RNA, 19 nt, Homo sapiens
  misc_RNA (1)...(19): siRNA sense strand
cugcagcccucggugauug

SEQ ID NO: 832128 - RNA, 19 nt, Homo sapiens
  misc_RNA (1)...(19): siRNA sense strand
ccucuaaguuucauuucag

SEQ ID NO: 832129 - RNA, 19 nt, Homo sapiens
  misc_RNA (1)...(19): siRNA sense strand
gaauuccucuaaguuucau

SEQ ID NO: 832130 - RNA, 19 nt, Homo sapiens
  misc_RNA (1)...(19): siRNA sense strand
guaacaugcaggccuggaa

SEQ ID NO: 832131 - RNA, 19 nt, Homo sapiens
  misc_RNA (1)...(19): siRNA sense strand
ugccauauacgaaaggaaa

SEQ ID NO: 832132 - RNA, 19 nt, Homo sapiens
  misc_RNA (1)...(19): siRNA sense strand
gcugggagccauccugaag

SEQ ID NO: 832133 - RNA, 19 nt, Homo sapiens
  misc_RNA (1)...(19): siRNA sense strand
auuaagaagccucugguuu

SEQ ID NO: 832134 - RNA, 19 nt, Homo sapiens
  misc_RNA (1)...(19): siRNA sense strand
ugcagacccucgaacaugu

SEQ ID NO: 832135 - RNA, 19 nt, Homo sapiens
  misc_RNA (1)...(19): siRNA sense strand
gaugcaugccauauacgaa

SEQ ID NO: 832136 - RNA, 19 nt, Homo sapiens
  misc_RNA (1)...(19): siRNA sense strand
ccucggugauugagaacug

SEQ ID NO: 832137 - RNA, 19 nt, Homo sapiens
  misc_RNA (1)...(19): siRNA sense strand
ugccggagccauggaauuu

SEQ ID NO: 832138 - RNA, 19 nt, Homo sapiens
  misc_RNA (1)...(19): siRNA sense strand
cuacagcgccguggaugug

SEQ ID NO: 832139 - RNA, 19 nt, Homo sapiens
  misc_RNA (1)...(19): siRNA sense strand
agaauuccucuaaguuuca

SEQ ID NO: 832140 - RNA, 19 nt, Homo sapiens
  misc_RNA (1)...(19): siRNA sense strand
gggcuacgaccugcuggaa

SEQ ID NO: 832141 - RNA, 19 nt, Homo sapiens
  misc_RNA (1)...(19): siRNA sense strand
ccaggauguugccgguuag

SEQ ID NO: 832142 - RNA, 19 nt, Homo sapiens
  misc_RNA (1)...(19): siRNA sense strand
gcagacccucgaacaugug

SEQ ID NO: 832143 - RNA, 19 nt, Homo sapiens
  misc_RNA (1)...(19): siRNA sense strand
ggaaacccuucaaauaguu

SEQ ID NO: 832144 - RNA, 19 nt, Homo sapiens
  misc_RNA (1)...(19): siRNA sense strand
acaggaaacccuucaaaua

SEQ ID NO: 832145 - RNA, 19 nt, Homo sapiens
  misc_RNA (1)...(19): siRNA sense strand
gcagggaacagaacaguga

SEQ ID NO: 832146 - RNA, 19 nt, Homo sapiens
  misc_RNA (1)...(19): siRNA sense strand
ggaggugucauacgcauaa

SEQ ID NO: 832147 - RNA, 19 nt, Homo sapiens
  misc_RNA (1)...(19): siRNA sense strand
gagagaaugugaccuuguc

SEQ ID NO: 832148 - RNA, 19 nt, Homo sapiens
  misc_RNA (1)...(19): siRNA sense strand
gaacauuccaggccaacuu

SEQ ID NO: 832149 - RNA, 19 nt, Homo sapiens
  misc_RNA (1)...(19): siRNA sense strand
caggaaacccuucaaauag

SEQ ID NO: 832150 - RNA, 19 nt, Homo sapiens
  misc_RNA (1)...(19): siRNA sense strand
gcagggaccuacagaugcu

SEQ ID NO: 832151 - RNA, 19 nt, Homo sapiens
  misc_RNA (1)...(19): siRNA sense strand
ggagggaccuacagaugcu

SEQ ID NO: 832152 - RNA, 19 nt, Homo sapiens
  misc_RNA (1)...(19): siRNA sense strand
ggugaaaucagaagagaca

SEQ ID NO: 832153 - RNA, 19 nt, Homo sapiens
  misc_RNA (1)...(19): siRNA sense strand
uaugacauguaccaucuau

SEQ ID NO: 832154 - RNA, 19 nt, Homo sapiens
  misc_RNA (1)...(19): siRNA sense strand
gagcuccuaugacauguac

SEQ ID NO: 832155 - RNA, 19 nt, Homo sapiens
  misc_RNA (1)...(19): siRNA sense strand
agacagucauccugcaaug

SEQ ID NO: 832156 - RNA, 19 nt, Homo sapiens
  misc_RNA (1)...(19): siRNA sense strand
ucaaauaguuggccuucac

SEQ ID NO: 832157 - RNA, 19 nt, Homo sapiens
  misc_RNA (1)...(19): siRNA sense strand
aggaaacccuucaaauagu

SEQ ID NO: 832158 - RNA, 19 nt, Homo sapiens
  misc_RNA (1)...(19): siRNA sense strand
ucacaggaaacccuucaaa

SEQ ID NO: 832159 - RNA, 19 nt, Homo sapiens
  misc_RNA (1)...(19): siRNA sense strand
ccuaugacauguaccaucu

SEQ ID NO: 832160 - RNA, 19 nt, Homo sapiens
  misc_RNA (1)...(19): siRNA sense strand
gcacagagaggggauguuu

SEQ ID NO: 832161 - RNA, 19 nt, Homo sapiens
  misc_RNA (1)...(19): siRNA sense strand
caaggucaacggaacauuc

SEQ ID NO: 832162 - RNA, 19 nt, Homo sapiens
  misc_RNA (1)...(19): siRNA sense strand
ucccggagcuccuaugaca

SEQ ID NO: 832163 - RNA, 19 nt, Homo sapiens
  misc_RNA (1)...(19): siRNA sense strand
ggagagaaugugaccuugu

SEQ ID NO: 832164 - RNA, 19 nt, Homo sapiens
  misc_RNA (1)...(19): siRNA sense strand
gagaggggauguuuaacga

SEQ ID NO: 832165 - RNA, 19 nt, Homo sapiens
  misc_RNA (1)...(19): siRNA sense strand
gaaacccuucaaauaguug

SEQ ID NO: 832166 - RNA, 19 nt, Homo sapiens
  misc_RNA (1)...(19): siRNA sense strand
acagaugcuucggcucuuu

SEQ ID NO: 832167 - RNA, 19 nt, Homo sapiens
  misc_RNA (1)...(19): siRNA sense strand
ggauguuuaacgacacuuu

SEQ ID NO: 832168 - RNA, 19 nt, Homo sapiens
  misc_RNA (1)...(19): siRNA sense strand
caggagagaaugugaccuu

SEQ ID NO: 832169 - RNA, 19 nt, Homo sapiens
  misc_RNA (1)...(19): siRNA sense strand
acagucauccugcaauguu

SEQ ID NO: 832170 - RNA, 19 nt, Homo sapiens
  misc_RNA (1)...(19): siRNA sense strand
gauguuuaacgacacuuug

SEQ ID NO: 832171 - RNA, 19 nt, Homo sapiens
  misc_RNA (1)...(19): siRNA sense strand
ggagcuccuaugacaugua

SEQ ID NO: 832172 - RNA, 19 nt, Homo sapiens
  misc_RNA (1)...(19): siRNA sense strand
ggauucugaugaacaagac

SEQ ID NO: 832173 - RNA, 19 nt, Homo sapiens
  misc_RNA (1)...(19): siRNA sense strand
cacaggaaacccuucaaau

SEQ ID NO: 832174 - RNA, 19 nt, Homo sapiens
  misc_RNA (1)...(19): siRNA sense strand
aaggccaacuucuccauca

SEQ ID NO: 832175 - RNA, 19 nt, Homo sapiens
  misc_RNA (1)...(19): siRNA sense strand
cuacagaugcuacgguucu

SEQ ID NO: 832176 - RNA, 19 nt, Homo sapiens
  misc_RNA (1)...(19): siRNA sense strand
cagucauccugcaauguug

SEQ ID NO: 832177 - RNA, 19 nt, Homo sapiens
  misc_RNA (1)...(19): siRNA sense strand
ccggagcuccuaugacaug

SEQ ID NO: 832178 - RNA, 19 nt, Homo sapiens
  misc_RNA (1)...(19): siRNA sense strand
gagacagucauccugcaau

SEQ ID NO: 832179 - RNA, 19 nt, Homo sapiens
  misc_RNA (1)...(19): siRNA sense strand
uggcagggaccuacagaug

SEQ ID NO: 832180 - RNA, 19 nt, Homo sapiens
  misc_RNA (1)...(19): siRNA sense strand
gugacccacugcuuguuuc

SEQ ID NO: 832181 - RNA, 19 nt, Homo sapiens
  misc_RNA (1)...(19): siRNA sense strand
ugacauguaccaucuaucc

SEQ ID NO: 832182 - RNA, 19 nt, Homo sapiens
  misc_RNA (1)...(19): siRNA sense strand
acagagaggggauguuuaa

SEQ ID NO: 832183 - RNA, 19 nt, Homo sapiens
  misc_RNA (1)...(19): siRNA sense strand
gggaacagaacagugaaca

SEQ ID NO: 832184 - RNA, 19 nt, Homo sapiens
  misc_RNA (1)...(19): siRNA sense strand
ggacagaccucuuauuagc

SEQ ID NO: 832185 - RNA, 19 nt, Homo sapiens
  misc_RNA (1)...(19): siRNA sense strand
ggaagucuuugcugccuuu

SEQ ID NO: 832186 - RNA, 19 nt, Homo sapiens
  misc_RNA (1)...(19): siRNA sense strand
gaacugagucccaagaugu

SEQ ID NO: 832187 - RNA, 19 nt, Homo sapiens
  misc_RNA (1)...(19): siRNA sense strand
ggauggagauuuugaagua

SEQ ID NO: 832188 - RNA, 19 nt, Homo sapiens
  misc_RNA (1)...(19): siRNA sense strand
gggaggaguugcacaauag

SEQ ID NO: 832189 - RNA, 19 nt, Homo sapiens
  misc_RNA (1)...(19): siRNA sense strand
caggaggacucucugauga

SEQ ID NO: 832190 - RNA, 19 nt, Homo sapiens
  misc_RNA (1)...(19): siRNA sense strand
gcacuaugaccuucagaaa

SEQ ID NO: 832191 - RNA, 19 nt, Homo sapiens
  misc_RNA (1)...(19): siRNA sense strand
ggaacugagucccaagaug

SEQ ID NO: 832192 - RNA, 19 nt, Homo sapiens
  misc_RNA (1)...(19): siRNA sense strand
gcauuuggguuggaacuga

SEQ ID NO: 832193 - RNA, 19 nt, Homo sapiens
  misc_RNA (1)...(19): siRNA sense strand
ggucaacguuugcacuaug

SEQ ID NO: 832194 - RNA, 19 nt, Homo sapiens
  misc_RNA (1)...(19): siRNA sense strand
gcgcuucaauggcuauaga

SEQ ID NO: 832195 - RNA, 19 nt, Homo sapiens
  misc_RNA (1)...(19): siRNA sense strand
ccacauccaucggcgcuuu

SEQ ID NO: 832196 - RNA, 19 nt, Homo sapiens
  misc_RNA (1)...(19): siRNA sense strand
gaaaggcauuuggguugga

SEQ ID NO: 832197 - RNA, 19 nt, Homo sapiens
  misc_RNA (1)...(19): siRNA sense strand
cuggacagaccucuuauua

SEQ ID NO: 832198 - RNA, 19 nt, Homo sapiens
  misc_RNA (1)...(19): siRNA sense strand
ugggaggaguugcacaaua

SEQ ID NO: 832199 - RNA, 19 nt, Homo sapiens
  misc_RNA (1)...(19): siRNA sense strand
ggaggacucucugaugaag

SEQ ID NO: 832200 - RNA, 19 nt, Homo sapiens
  misc_RNA (1)...(19): siRNA sense strand
ugaaguaccuggucuuagc

SEQ ID NO: 832201 - RNA, 19 nt, Homo sapiens
  misc_RNA (1)...(19): siRNA sense strand
gcgcaggccucaguucugu

SEQ ID NO: 832202 - RNA, 19 nt, Homo sapiens
  misc_RNA (1)...(19): siRNA sense strand
cuuauuagcucuucguagu

SEQ ID NO: 832203 - RNA, 19 nt, Homo sapiens
  misc_RNA (1)...(19): siRNA sense strand
gaacccggcauccacaaau

SEQ ID NO: 832204 - RNA, 19 nt, Homo sapiens
  misc_RNA (1)...(19): siRNA sense strand
ggaguugcacaauagguuu

SEQ ID NO: 832205 - RNA, 19 nt, Homo sapiens
  misc_RNA (1)...(19): siRNA sense strand
ugggagcgcuugccucaga

SEQ ID NO: 832206 - RNA, 19 nt, Homo sapiens
  misc_RNA (1)...(19): siRNA sense strand
cuccaccucugaaagauaa

SEQ ID NO: 832207 - RNA, 19 nt, Homo sapiens
  misc_RNA (1)...(19): siRNA sense strand
ggacgccgaugaggagaca

SEQ ID NO: 832208 - RNA, 19 nt, Homo sapiens
  misc_RNA (1)...(19): siRNA sense strand
gucaacguuugcacuauga

SEQ ID NO: 832209 - RNA, 19 nt, Homo sapiens
  misc_RNA (1)...(19): siRNA sense strand
gcacaugcugcgcuucaau

SEQ ID NO: 832210 - RNA, 19 nt, Homo sapiens
  misc_RNA (1)...(19): siRNA sense strand
gcaggccucaguucuguau

SEQ ID NO: 832211 - RNA, 19 nt, Homo sapiens
  misc_RNA (1)...(19): siRNA sense strand
uucaauggcuauagagaga

SEQ ID NO: 832212 - RNA, 19 nt, Homo sapiens
  misc_RNA (1)...(19): siRNA sense strand
ccaggaggacucucugaug

SEQ ID NO: 832213 - RNA, 19 nt, Homo sapiens
  misc_RNA (1)...(19): siRNA sense strand
ggaacccggcauccacaaa

SEQ ID NO: 832214 - RNA, 19 nt, Homo sapiens
  misc_RNA (1)...(19): siRNA sense strand
ggguccaguuccgggauua

SEQ ID NO: 832215 - RNA, 19 nt, Homo sapiens
  misc_RNA (1)...(19): siRNA sense strand
gcuauagagagaacccaaa

SEQ ID NO: 832216 - RNA, 19 nt, Homo sapiens
  misc_RNA (1)...(19): siRNA sense strand
ggucugcggugcacaugcu

SEQ ID NO: 832217 - RNA, 19 nt, Homo sapiens
  misc_RNA (1)...(19): siRNA sense strand
guaguggugcauuuaggaa

SEQ ID NO: 832218 - RNA, 19 nt, Homo sapiens
  misc_RNA (1)...(19): siRNA sense strand
gaaguaccuggucuuagca

SEQ ID NO: 832219 - RNA, 19 nt, Homo sapiens
  misc_RNA (1)...(19): siRNA sense strand
gcgcuugccucagaacaac

SEQ ID NO: 832220 - RNA, 19 nt, Homo sapiens
  misc_RNA (1)...(19): siRNA sense strand
gggagcgcuugccucagaa

SEQ ID NO: 832221 - RNA, 19 nt, Homo sapiens
  misc_RNA (1)...(19): siRNA sense strand
gcacaauagguuucaaagc

SEQ ID NO: 832222 - RNA, 19 nt, Homo sapiens
  misc_RNA (1)...(19): siRNA sense strand
ggaauucggaagucuuugc

SEQ ID NO: 832223 - RNA, 19 nt, Homo sapiens
  misc_RNA (1)...(19): siRNA sense strand
gggucaacguuugcacuau

SEQ ID NO: 832224 - RNA, 19 nt, Homo sapiens
  misc_RNA (1)...(19): siRNA sense strand
aaaggcauuuggguuggaa

SEQ ID NO: 832225 - RNA, 19 nt, Homo sapiens
  misc_RNA (1)...(19): siRNA sense strand
auagagagaacccaaaucu

SEQ ID NO: 832226 - RNA, 19 nt, Homo sapiens
  misc_RNA (1)...(19): siRNA sense strand
caauggcuauagagagaac

SEQ ID NO: 832227 - RNA, 19 nt, Homo sapiens
  misc_RNA (1)...(19): siRNA sense strand
cuucguaguggugcauuua

SEQ ID NO: 832228 - RNA, 19 nt, Homo sapiens
  misc_RNA (1)...(19): siRNA sense strand
gaacagaaacccucaagua

SEQ ID NO: 832229 - RNA, 19 nt, Homo sapiens
  misc_RNA (1)...(19): siRNA sense strand
uagaagaccuuaucauuga

SEQ ID NO: 832230 - RNA, 19 nt, Homo sapiens
  misc_RNA (1)...(19): siRNA sense strand
ggaaguggauuucugcauu

SEQ ID NO: 832231 - RNA, 19 nt, Homo sapiens
  misc_RNA (1)...(19): siRNA sense strand
gagcuaaugcugcuuauuu

SEQ ID NO: 832232 - RNA, 19 nt, Homo sapiens
  misc_RNA (1)...(19): siRNA sense strand
ccaagaagauguccaaagu

SEQ ID NO: 832233 - RNA, 19 nt, Homo sapiens
  misc_RNA (1)...(19): siRNA sense strand
gaagauguccaaagugaaa

SEQ ID NO: 832234 - RNA, 19 nt, Homo sapiens
  misc_RNA (1)...(19): siRNA sense strand
gaaguggauuucugcauug

SEQ ID NO: 832235 - RNA, 19 nt, Homo sapiens
  misc_RNA (1)...(19): siRNA sense strand
cagaaacccucaaguaauc

SEQ ID NO: 832236 - RNA, 19 nt, Homo sapiens
  misc_RNA (1)...(19): siRNA sense strand
caucaagaaugaaguguau

SEQ ID NO: 832237 - RNA, 19 nt, Homo sapiens
  misc_RNA (1)...(19): siRNA sense strand
aagaagauguccaaaguga

SEQ ID NO: 832238 - RNA, 19 nt, Homo sapiens
  misc_RNA (1)...(19): siRNA sense strand
ggacauacccagauuacau

SEQ ID NO: 832239 - RNA, 19 nt, Homo sapiens
  misc_RNA (1)...(19): siRNA sense strand
cgaaagaaggauaucaaua

SEQ ID NO: 832240 - RNA, 19 nt, Homo sapiens
  misc_RNA (1)...(19): siRNA sense strand
gaacucagcagcagguaga

SEQ ID NO: 832241 - RNA, 19 nt, Homo sapiens
  misc_RNA (1)...(19): siRNA sense strand
ucaagacccugcaugaaug

SEQ ID NO: 832242 - RNA, 19 nt, Homo sapiens
  misc_RNA (1)...(19): siRNA sense strand
gcacagcucagcagaacaa

SEQ ID NO: 832243 - RNA, 19 nt, Homo sapiens
  misc_RNA (1)...(19): siRNA sense strand
gacauacccagauuacaua

SEQ ID NO: 832244 - RNA, 19 nt, Homo sapiens
  misc_RNA (1)...(19): siRNA sense strand
agaacaagcugaagcaucu

SEQ ID NO: 832245 - RNA, 19 nt, Homo sapiens
  misc_RNA (1)...(19): siRNA sense strand
gaacuagaagaccuuauca

SEQ ID NO: 832246 - RNA, 19 nt, Homo sapiens
  misc_RNA (1)...(19): siRNA sense strand
cagauuacauagccaacaa

SEQ ID NO: 832247 - RNA, 19 nt, Homo sapiens
  misc_RNA (1)...(19): siRNA sense strand
aagcagagguuaccaacau

SEQ ID NO: 832248 - RNA, 19 nt, Homo sapiens
  misc_RNA (1)...(19): siRNA sense strand
gagccaaccaguacaaaga

SEQ ID NO: 832249 - RNA, 19 nt, Homo sapiens
  misc_RNA (1)...(19): siRNA sense strand
gcagguagaagcagagguu

SEQ ID NO: 832250 - RNA, 19 nt, Homo sapiens
  misc_RNA (1)...(19): siRNA sense strand
cuagaagaccuuaucauug

SEQ ID NO: 832251 - RNA, 19 nt, Homo sapiens
  misc_RNA (1)...(19): siRNA sense strand
ggaacuagaagaccuuauc

SEQ ID NO: 832252 - RNA, 19 nt, Homo sapiens
  misc_RNA (1)...(19): siRNA sense strand
aacagaaacccucaaguaa

SEQ ID NO: 832253 - RNA, 19 nt, Homo sapiens
  misc_RNA (1)...(19): siRNA sense strand
gcaucaagaaugaagugua

SEQ ID NO: 832254 - RNA, 19 nt, Homo sapiens
  misc_RNA (1)...(19): siRNA sense strand
acuagaagaccuuaucauu

SEQ ID NO: 832255 - RNA, 19 nt, Homo sapiens
  misc_RNA (1)...(19): siRNA sense strand
acagaaacccucaaguaau

SEQ ID NO: 832256 - RNA, 19 nt, Homo sapiens
  misc_RNA (1)...(19): siRNA sense strand
gagguuaccaacaucaaga

SEQ ID NO: 832257 - RNA, 19 nt, Homo sapiens
  misc_RNA (1)...(19): siRNA sense strand
ugaagcaucuuaccaucgu

SEQ ID NO: 832258 - RNA, 19 nt, Homo sapiens
  misc_RNA (1)...(19): siRNA sense strand
guaugucuuuggagaacuu

SEQ ID NO: 832259 - RNA, 19 nt, Homo sapiens
  misc_RNA (1)...(19): siRNA sense strand
gucaagacccugcaugaau

SEQ ID NO: 832260 - RNA, 19 nt, Homo sapiens
  misc_RNA (1)...(19): siRNA sense strand
agaggcagcccaccaagaa

SEQ ID NO: 832261 - RNA, 19 nt, Homo sapiens
  misc_RNA (1)...(19): siRNA sense strand
gcugaaagaccuggagaug

SEQ ID NO: 832262 - RNA, 19 nt, Homo sapiens
  misc_RNA (1)...(19): siRNA sense strand
guacaaagagaaccacaac

SEQ ID NO: 832263 - RNA, 19 nt, Homo sapiens
  misc_RNA (1)...(19): siRNA sense strand
gccgugacauccgaaagaa

SEQ ID NO: 832264 - RNA, 19 nt, Homo sapiens
  misc_RNA (1)...(19): siRNA sense strand
cugcaugaauggugugaug

SEQ ID NO: 832265 - RNA, 19 nt, Homo sapiens
  misc_RNA (1)...(19): siRNA sense strand
gcaguuguugaaccuguuu

SEQ ID NO: 832266 - RNA, 19 nt, Homo sapiens
  misc_RNA (1)...(19): siRNA sense strand
gcagagguuaccaacauca

SEQ ID NO: 832267 - RNA, 19 nt, Homo sapiens
  misc_RNA (1)...(19): siRNA sense strand
cggaguguaugucuuugga

SEQ ID NO: 832268 - RNA, 19 nt, Homo sapiens
  misc_RNA (1)...(19): siRNA sense strand
gcaggagcuugcggaagga

SEQ ID NO: 832269 - RNA, 19 nt, Homo sapiens
  misc_RNA (1)...(19): siRNA sense strand
gccaaccaguacaaagaga

SEQ ID NO: 832270 - RNA, 19 nt, Homo sapiens
  misc_RNA (1)...(19): siRNA sense strand
gaaucuccgggaacuagaa

SEQ ID NO: 832271 - RNA, 19 nt, Homo sapiens
  misc_RNA (1)...(19): siRNA sense strand
caagaagauguccaaagug

SEQ ID NO: 832272 - RNA, 19 nt, Homo sapiens
  misc_RNA (1)...(19): siRNA sense strand
ccaccaagaagauguccaa

SEQ ID NO: 832273 - RNA, 19 nt, Homo sapiens
  misc_RNA (1)...(19): siRNA sense strand
ugauggcugugaagcaguu

SEQ ID NO: 832274 - RNA, 19 nt, Homo sapiens
  misc_RNA (1)...(19): siRNA sense strand
agcccucacugcucucaua

SEQ ID NO: 832275 - RNA, 19 nt, Homo sapiens
  misc_RNA (1)...(19): siRNA sense strand
caucaagaagacacucaaa

SEQ ID NO: 832276 - RNA, 19 nt, Homo sapiens
  misc_RNA (1)...(19): siRNA sense strand
cauugaggcugucuacacu

SEQ ID NO: 832277 - RNA, 19 nt, Homo sapiens
  misc_RNA (1)...(19): siRNA sense strand
gggcaucgagcagcaaguu

SEQ ID NO: 832278 - RNA, 19 nt, Homo sapiens
  misc_RNA (1)...(19): siRNA sense strand
uugaggcugucuacacuga

SEQ ID NO: 832279 - RNA, 19 nt, Homo sapiens
  misc_RNA (1)...(19): siRNA sense strand
ggccgugacauccgaaaga

SEQ ID NO: 832280 - RNA, 19 nt, Homo sapiens
  misc_RNA (1)...(19): siRNA sense strand
uuaccaacaucaagaagac

SEQ ID NO: 832281 - RNA, 19 nt, Homo sapiens
  misc_RNA (1)...(19): siRNA sense strand
gaagcagagguuaccaaca

SEQ ID NO: 832282 - RNA, 19 nt, Homo sapiens
  misc_RNA (1)...(19): siRNA sense strand
aaggagcuaaugcugcuua

SEQ ID NO: 832283 - RNA, 19 nt, Homo sapiens
  misc_RNA (1)...(19): siRNA sense strand
gagagccaaccaguacaaa

SEQ ID NO: 832284 - RNA, 19 nt, Homo sapiens
  misc_RNA (1)...(19): siRNA sense strand
ucaagaagacacucaaagc

SEQ ID NO: 832285 - RNA, 19 nt, Homo sapiens
  misc_RNA (1)...(19): siRNA sense strand
agcuaaugcugcuuauuug

SEQ ID NO: 832286 - RNA, 19 nt, Homo sapiens
  misc_RNA (1)...(19): siRNA sense strand
ggaaucuccgggaacuaga

SEQ ID NO: 832287 - RNA, 19 nt, Homo sapiens
  misc_RNA (1)...(19): siRNA sense strand
ccucacugcucucauaagc

SEQ ID NO: 832288 - RNA, 19 nt, Homo sapiens
  misc_RNA (1)...(19): siRNA sense strand
aacaagcugaagcaucuua

SEQ ID NO: 832289 - RNA, 19 nt, Homo sapiens
  misc_RNA (1)...(19): siRNA sense strand
gcaucgagcagcaaguucu

SEQ ID NO: 832290 - RNA, 19 nt, Homo sapiens
  misc_RNA (1)...(19): siRNA sense strand
ggagcaguuuauuuuacua

SEQ ID NO: 832291 - RNA, 19 nt, Homo sapiens
  misc_RNA (1)...(19): siRNA sense strand
ggaacagaaacccucaagu

SEQ ID NO: 832292 - RNA, 19 nt, Homo sapiens
  misc_RNA (1)...(19): siRNA sense strand
gaacaagcugaagcaucuu

SEQ ID NO: 832293 - RNA, 19 nt, Homo sapiens
  misc_RNA (1)...(19): siRNA sense strand
guuaccaacaucaagaaga

SEQ ID NO: 832294 - RNA, 19 nt, Homo sapiens
  misc_RNA (1)...(19): siRNA sense strand
ccaaccaguacaaagagaa

SEQ ID NO: 832295 - RNA, 19 nt, Homo sapiens
  misc_RNA (1)...(19): siRNA sense strand
aaggagagccugccagaac

SEQ ID NO: 832296 - RNA, 19 nt, Homo sapiens
  misc_RNA (1)...(19): siRNA sense strand
ugagagccaaccaguacaa

SEQ ID NO: 832297 - RNA, 19 nt, Homo sapiens
  misc_RNA (1)...(19): siRNA sense strand
ccgaaagaaggauaucaau

SEQ ID NO: 832298 - RNA, 19 nt, Homo sapiens
  misc_RNA (1)...(19): siRNA sense strand
ggagcuaaugcugcuuauu

SEQ ID NO: 832299 - RNA, 19 nt, Homo sapiens
  misc_RNA (1)...(19): siRNA sense strand
gagagccugccagaacuga

SEQ ID NO: 832300 - RNA, 19 nt, Homo sapiens
  misc_RNA (1)...(19): siRNA sense strand
auaggaagguuguugauua

SEQ ID NO: 832301 - RNA, 19 nt, Homo sapiens
  misc_RNA (1)...(19): siRNA sense strand
gaaggaugauucucacuca

SEQ ID NO: 832302 - RNA, 19 nt, Homo sapiens
  misc_RNA (1)...(19): siRNA sense strand
gagagaugcucauggaaga

SEQ ID NO: 832303 - RNA, 19 nt, Homo sapiens
  misc_RNA (1)...(19): siRNA sense strand
cgaugaagauuuccuaaug

SEQ ID NO: 832304 - RNA, 19 nt, Homo sapiens
  misc_RNA (1)...(19): siRNA sense strand
gaaauaggaagguuguuga

SEQ ID NO: 832305 - RNA, 19 nt, Homo sapiens
  misc_RNA (1)...(19): siRNA sense strand
gaagguuguugauuacuca

SEQ ID NO: 832306 - RNA, 19 nt, Homo sapiens
  misc_RNA (1)...(19): siRNA sense strand
acaaagaugugaagaccaa

SEQ ID NO: 832307 - RNA, 19 nt, Homo sapiens
  misc_RNA (1)...(19): siRNA sense strand
gaggcgaucuggaaagaau

SEQ ID NO: 832308 - RNA, 19 nt, Homo sapiens
  misc_RNA (1)...(19): siRNA sense strand
ggaagaugaugacgauagu

SEQ ID NO: 832309 - RNA, 19 nt, Homo sapiens
  misc_RNA (1)...(19): siRNA sense strand
gaaagaauucacaggaaga

SEQ ID NO: 832310 - RNA, 19 nt, Homo sapiens
  misc_RNA (1)...(19): siRNA sense strand
agagagagaugcucaugga

SEQ ID NO: 832311 - RNA, 19 nt, Homo sapiens
  misc_RNA (1)...(19): siRNA sense strand
gaugaagauuuccuaaugg

SEQ ID NO: 832312 - RNA, 19 nt, Homo sapiens
  misc_RNA (1)...(19): siRNA sense strand
agaugaagauuauggaaga

SEQ ID NO: 832313 - RNA, 19 nt, Homo sapiens
  misc_RNA (1)...(19): siRNA sense strand
ugaugcagaugaagauuau

SEQ ID NO: 832314 - RNA, 19 nt, Homo sapiens
  misc_RNA (1)...(19): siRNA sense strand
cggcagcgaugaagauuuc

SEQ ID NO: 832315 - RNA, 19 nt, Homo sapiens
  misc_RNA (1)...(19): siRNA sense strand
ggacucagaagacaaagau

SEQ ID NO: 832316 - RNA, 19 nt, Homo sapiens
  misc_RNA (1)...(19): siRNA sense strand
gaaguccaaaccugaauga

SEQ ID NO: 832317 - RNA, 19 nt, Homo sapiens
  misc_RNA (1)...(19): siRNA sense strand
ggaagguuguugauuacuc

SEQ ID NO: 832318 - RNA, 19 nt, Homo sapiens
  misc_RNA (1)...(19): siRNA sense strand
gaagauuauggaagagauu

SEQ ID NO: 832319 - RNA, 19 nt, Homo sapiens
  misc_RNA (1)...(19): siRNA sense strand
uggaaagaauucacaggaa

SEQ ID NO: 832320 - RNA, 19 nt, Homo sapiens
  misc_RNA (1)...(19): siRNA sense strand
aauaagaggcgaucuggaa

SEQ ID NO: 832321 - RNA, 19 nt, Homo sapiens
  misc_RNA (1)...(19): siRNA sense strand
gcagugaggaagaacaaga

SEQ ID NO: 832322 - RNA, 19 nt, Homo sapiens
  misc_RNA (1)...(19): siRNA sense strand
gcagaugaagauuauggaa

SEQ ID NO: 832323 - RNA, 19 nt, Homo sapiens
  misc_RNA (1)...(19): siRNA sense strand
cagaggauagugaagauga

SEQ ID NO: 832324 - RNA, 19 nt, Homo sapiens
  misc_RNA (1)...(19): siRNA sense strand
aauggaagaugaugacgau

SEQ ID NO: 832325 - RNA, 19 nt, Homo sapiens
  misc_RNA (1)...(19): siRNA sense strand
guugauuacucacaguuuc

SEQ ID NO: 832326 - RNA, 19 nt, Homo sapiens
  misc_RNA (1)...(19): siRNA sense strand
uggaagaugugggcaguga

SEQ ID NO: 832327 - RNA, 19 nt, Homo sapiens
  misc_RNA (1)...(19): siRNA sense strand
uaagaaguccaaaccugaa

SEQ ID NO: 832328 - RNA, 19 nt, Homo sapiens
  misc_RNA (1)...(19): siRNA sense strand
ugaagauuauggaagagau

SEQ ID NO: 832329 - RNA, 19 nt, Homo sapiens
  misc_RNA (1)...(19): siRNA sense strand
aagaggcgaucuggaaaga

SEQ ID NO: 832330 - RNA, 19 nt, Homo sapiens
  misc_RNA (1)...(19): siRNA sense strand
gaagacaaagaugugaaga

SEQ ID NO: 832331 - RNA, 19 nt, Homo sapiens
  misc_RNA (1)...(19): siRNA sense strand
uaggaagguuguugauuac

SEQ ID NO: 832332 - RNA, 19 nt, Homo sapiens
  misc_RNA (1)...(19): siRNA sense strand
gaggauagugaagaugaaa

SEQ ID NO: 832333 - RNA, 19 nt, Homo sapiens
  misc_RNA (1)...(19): siRNA sense strand
ugaagaccaagaaggauga

SEQ ID NO: 832334 - RNA, 19 nt, Homo sapiens
  misc_RNA (1)...(19): siRNA sense strand
cagcagaggauagugaaga

SEQ ID NO: 832335 - RNA, 19 nt, Homo sapiens
  misc_RNA (1)...(19): siRNA sense strand
ugucagaaauaggaagguu

SEQ ID NO: 832336 - RNA, 19 nt, Homo sapiens
  misc_RNA (1)...(19): siRNA sense strand
agaaauaggaagguuguug

SEQ ID NO: 832337 - RNA, 19 nt, Homo sapiens
  misc_RNA (1)...(19): siRNA sense strand
gcaggcggcaucuaaagca

SEQ ID NO: 832338 - RNA, 19 nt, Homo sapiens
  misc_RNA (1)...(19): siRNA sense strand
gaucuggaaagaauucaca

SEQ ID NO: 832339 - RNA, 19 nt, Homo sapiens
  misc_RNA (1)...(19): siRNA sense strand
gagaugcucauggaagaug

SEQ ID NO: 832340 - RNA, 19 nt, Homo sapiens
  misc_RNA (1)...(19): siRNA sense strand
gcgaugaagauuuccuaau

SEQ ID NO: 832341 - RNA, 19 nt, Homo sapiens
  misc_RNA (1)...(19): siRNA sense strand
agaauucacaggaagauag

SEQ ID NO: 832342 - RNA, 19 nt, Homo sapiens
  misc_RNA (1)...(19): siRNA sense strand
aagaugaugacgauaguga

SEQ ID NO: 832343 - RNA, 19 nt, Homo sapiens
  misc_RNA (1)...(19): siRNA sense strand
acucacaguuucaggaauc

SEQ ID NO: 832344 - RNA, 19 nt, Homo sapiens
  misc_RNA (1)...(19): siRNA sense strand
agaggauagugaagaugaa

SEQ ID NO: 832345 - RNA, 19 nt, Homo sapiens
  misc_RNA (1)...(19): siRNA sense strand
gaauucacaggaagauagu

SEQ ID NO: 832346 - RNA, 19 nt, Homo sapiens
  misc_RNA (1)...(19): siRNA sense strand
ucagaaauaggaagguugu

SEQ ID NO: 832347 - RNA, 19 nt, Homo sapiens
  misc_RNA (1)...(19): siRNA sense strand
gggcagugaggaagaacaa

SEQ ID NO: 832348 - RNA, 19 nt, Homo sapiens
  misc_RNA (1)...(19): siRNA sense strand
agaccaagaaggaugauuc

SEQ ID NO: 832349 - RNA, 19 nt, Homo sapiens
  misc_RNA (1)...(19): siRNA sense strand
ggaggaugaggcaccauuc

SEQ ID NO: 832350 - RNA, 19 nt, Homo sapiens
  misc_RNA (1)...(19): siRNA sense strand
cagaagacaaagaugugaa

SEQ ID NO: 832351 - RNA, 19 nt, Homo sapiens
  misc_RNA (1)...(19): siRNA sense strand
augaagauuuccuaaugga

SEQ ID NO: 832352 - RNA, 19 nt, Homo sapiens
  misc_RNA (1)...(19): siRNA sense strand
gagagagaugcucauggaa

SEQ ID NO: 832353 - RNA, 19 nt, Homo sapiens
  misc_RNA (1)...(19): siRNA sense strand
gaugaagauuauggaagag

SEQ ID NO: 832354 - RNA, 19 nt, Homo sapiens
  misc_RNA (1)...(19): siRNA sense strand
gaugaugcagaugaagauu

SEQ ID NO: 832355 - RNA, 19 nt, Homo sapiens
  misc_RNA (1)...(19): siRNA sense strand
gaagaugaugacgauagug

SEQ ID NO: 832356 - RNA, 19 nt, Homo sapiens
  misc_RNA (1)...(19): siRNA sense strand
cagcgaugaagauuuccua

SEQ ID NO: 832357 - RNA, 19 nt, Homo sapiens
  misc_RNA (1)...(19): siRNA sense strand
caccauuccaggagaaaga

SEQ ID NO: 832358 - RNA, 19 nt, Homo sapiens
  misc_RNA (1)...(19): siRNA sense strand
ucagaagacaaagauguga

SEQ ID NO: 832359 - RNA, 19 nt, Homo sapiens
  misc_RNA (1)...(19): siRNA sense strand
uggaagaugaugacgauag

SEQ ID NO: 832360 - RNA, 19 nt, Homo sapiens
  misc_RNA (1)...(19): siRNA sense strand
ugacuauggcaguucgaaa

SEQ ID NO: 832361 - RNA, 19 nt, Homo sapiens
  misc_RNA (1)...(19): siRNA sense strand
aaagaugugaagaccaaga

SEQ ID NO: 832362 - RNA, 19 nt, Homo sapiens
  misc_RNA (1)...(19): siRNA sense strand
aaaagaugguuaagaaguc

SEQ ID NO: 832363 - RNA, 19 nt, Homo sapiens
  misc_RNA (1)...(19): siRNA sense strand
gcagaggauagugaagaug

SEQ ID NO: 832364 - RNA, 19 nt, Homo sapiens
  misc_RNA (1)...(19): siRNA sense strand
gagcaaaucagaagaaaua

SEQ ID NO: 832365 - RNA, 19 nt, Homo sapiens
  misc_RNA (1)...(19): siRNA sense strand
agaaacagcucucuaaaga

SEQ ID NO: 832366 - RNA, 19 nt, Homo sapiens
  misc_RNA (1)...(19): siRNA sense strand
gcaagaaacagcucucuaa

SEQ ID NO: 832367 - RNA, 19 nt, Homo sapiens
  misc_RNA (1)...(19): siRNA sense strand
ggaggaggauaacaaguuu

SEQ ID NO: 832368 - RNA, 19 nt, Homo sapiens
  misc_RNA (1)...(19): siRNA sense strand
gcaauacccuagagaagga

SEQ ID NO: 832369 - RNA, 19 nt, Homo sapiens
  misc_RNA (1)...(19): siRNA sense strand
gaacuucuauggagccaau

SEQ ID NO: 832370 - RNA, 19 nt, Homo sapiens
  misc_RNA (1)...(19): siRNA sense strand
ccaauggcaugaugaacua

SEQ ID NO: 832371 - RNA, 19 nt, Homo sapiens
  misc_RNA (1)...(19): siRNA sense strand
caugaugccuccaccagua

SEQ ID NO: 832372 - RNA, 19 nt, Homo sapiens
  misc_RNA (1)...(19): siRNA sense strand
cagcugcaauggaaccuua

SEQ ID NO: 832373 - RNA, 19 nt, Homo sapiens
  misc_RNA (1)...(19): siRNA sense strand
gaugaacuauggacaguca

SEQ ID NO: 832374 - RNA, 19 nt, Homo sapiens
  misc_RNA (1)...(19): siRNA sense strand
gaaauggacaggcagcaaa

SEQ ID NO: 832375 - RNA, 19 nt, Homo sapiens
  misc_RNA (1)...(19): siRNA sense strand
ggacaucaaugccuuuagg

SEQ ID NO: 832376 - RNA, 19 nt, Homo sapiens
  misc_RNA (1)...(19): siRNA sense strand
gugcacauauccaggguaa

SEQ ID NO: 832377 - RNA, 19 nt, Homo sapiens
  misc_RNA (1)...(19): siRNA sense strand
aaacagcucucuaaagacu

SEQ ID NO: 832378 - RNA, 19 nt, Homo sapiens
  misc_RNA (1)...(19): siRNA sense strand
gcagauggcugggaugaac

SEQ ID NO: 832379 - RNA, 19 nt, Homo sapiens
  misc_RNA (1)...(19): siRNA sense strand
gcacauauccaggguaaag

SEQ ID NO: 832380 - RNA, 19 nt, Homo sapiens
  misc_RNA (1)...(19): siRNA sense strand
guccucagauguggaaaua

SEQ ID NO: 832381 - RNA, 19 nt, Homo sapiens
  misc_RNA (1)...(19): siRNA sense strand
ucaaaugccuacucaagca

SEQ ID NO: 832382 - RNA, 19 nt, Homo sapiens
  misc_RNA (1)...(19): siRNA sense strand
caagaaacagcucucuaaa

SEQ ID NO: 832383 - RNA, 19 nt, Homo sapiens
  misc_RNA (1)...(19): siRNA sense strand
cagaagaaauaggcaagaa

SEQ ID NO: 832384 - RNA, 19 nt, Homo sapiens
  misc_RNA (1)...(19): siRNA sense strand
gcaaaccgacuuuaugaag

SEQ ID NO: 832385 - RNA, 19 nt, Homo sapiens
  misc_RNA (1)...(19): siRNA sense strand
caauggaaccuuacucaga

SEQ ID NO: 832386 - RNA, 19 nt, Homo sapiens
  misc_RNA (1)...(19): siRNA sense strand
caagagaugggaaauggaa

SEQ ID NO: 832387 - RNA, 19 nt, Homo sapiens
  misc_RNA (1)...(19): siRNA sense strand
gaagaaauaggcaagaaac

SEQ ID NO: 832388 - RNA, 19 nt, Homo sapiens
  misc_RNA (1)...(19): siRNA sense strand
agacccagcuguugaagga

SEQ ID NO: 832389 - RNA, 19 nt, Homo sapiens
  misc_RNA (1)...(19): siRNA sense strand
caucaaugccuuuaggaaa

SEQ ID NO: 832390 - RNA, 19 nt, Homo sapiens
  misc_RNA (1)...(19): siRNA sense strand
ggacaggcagcaaaucaga

SEQ ID NO: 832391 - RNA, 19 nt, Homo sapiens
  misc_RNA (1)...(19): siRNA sense strand
gagaaggauuuagaucugu

SEQ ID NO: 832392 - RNA, 19 nt, Homo sapiens
  misc_RNA (1)...(19): siRNA sense strand
gggagcaaaucagaagaaa

SEQ ID NO: 832393 - RNA, 19 nt, Homo sapiens
  misc_RNA (1)...(19): siRNA sense strand
agacaaauaugagaagaag

SEQ ID NO: 832394 - RNA, 19 nt, Homo sapiens
  misc_RNA (1)...(19): siRNA sense strand
gcagauugccagucuaaag

SEQ ID NO: 832395 - RNA, 19 nt, Homo sapiens
  misc_RNA (1)...(19): siRNA sense strand
cagcgccugucauggauuu

SEQ ID NO: 832396 - RNA, 19 nt, Homo sapiens
  misc_RNA (1)...(19): siRNA sense strand
gauagacccagcuguugaa

SEQ ID NO: 832397 - RNA, 19 nt, Homo sapiens
  misc_RNA (1)...(19): siRNA sense strand
agagaaggauuuagaucug

SEQ ID NO: 832398 - RNA, 19 nt, Homo sapiens
  misc_RNA (1)...(19): siRNA sense strand
ggaccgaagucuggacauc

SEQ ID NO: 832399 - RNA, 19 nt, Homo sapiens
  misc_RNA (1)...(19): siRNA sense strand
uggcugggaugaacuucua

SEQ ID NO: 832400 - RNA, 19 nt, Homo sapiens
  misc_RNA (1)...(19): siRNA sense strand
ucagauagacccagcuguu

SEQ ID NO: 832401 - RNA, 19 nt, Homo sapiens
  misc_RNA (1)...(19): siRNA sense strand
aauggaaccuuacucagau

SEQ ID NO: 832402 - RNA, 19 nt, Homo sapiens
  misc_RNA (1)...(19): siRNA sense strand
aauaguaagaccagcaaua

SEQ ID NO: 832403 - RNA, 19 nt, Homo sapiens
  misc_RNA (1)...(19): siRNA sense strand
gagacaaauaugagaagaa

SEQ ID NO: 832404 - RNA, 19 nt, Homo sapiens
  misc_RNA (1)...(19): siRNA sense strand
ccaguggacucaagaacag

SEQ ID NO: 832405 - RNA, 19 nt, Homo sapiens
  misc_RNA (1)...(19): siRNA sense strand
ccuguggccugcuccauug

SEQ ID NO: 832406 - RNA, 19 nt, Homo sapiens
  misc_RNA (1)...(19): siRNA sense strand
cggaaaagcuccccgaaau

SEQ ID NO: 832407 - RNA, 19 nt, Homo sapiens
  misc_RNA (1)...(19): siRNA sense strand
cgagacaaauaugagaaga

SEQ ID NO: 832408 - RNA, 19 nt, Homo sapiens
  misc_RNA (1)...(19): siRNA sense strand
aagaacagauucagugcau

SEQ ID NO: 832409 - RNA, 19 nt, Homo sapiens
  misc_RNA (1)...(19): siRNA sense strand
gugcagauugccagucuaa

SEQ ID NO: 832410 - RNA, 19 nt, Homo sapiens
  misc_RNA (1)...(19): siRNA sense strand
gaacuauggacagucaaug

SEQ ID NO: 832411 - RNA, 19 nt, Homo sapiens
  misc_RNA (1)...(19): siRNA sense strand
gaaauacauggaccgaagu

SEQ ID NO: 832412 - RNA, 19 nt, Homo sapiens
  misc_RNA (1)...(19): siRNA sense strand
ggaaauggacaggcagcaa

SEQ ID NO: 832413 - RNA, 19 nt, Homo sapiens
  misc_RNA (1)...(19): siRNA sense strand
gucaaugaguggcggaaau

SEQ ID NO: 832414 - RNA, 19 nt, Homo sapiens
  misc_RNA (1)...(19): siRNA sense strand
agaaggauuuagaucuguu

SEQ ID NO: 832415 - RNA, 19 nt, Homo sapiens
  misc_RNA (1)...(19): siRNA sense strand
gaccagcaauacccuagag

SEQ ID NO: 832416 - RNA, 19 nt, Homo sapiens
  misc_RNA (1)...(19): siRNA sense strand
caaauaguaagaccagcaa

SEQ ID NO: 832417 - RNA, 19 nt, Homo sapiens
  misc_RNA (1)...(19): siRNA sense strand
gaaggauuuagaucuguug

SEQ ID NO: 832418 - RNA, 19 nt, Homo sapiens
  misc_RNA (1)...(19): siRNA sense strand
cgaugggccucuuggaaca

SEQ ID NO: 832419 - RNA, 19 nt, Homo sapiens
  misc_RNA (1)...(19): siRNA sense strand
ggacucaagaacagauuca

SEQ ID NO: 832420 - RNA, 19 nt, Homo sapiens
  misc_RNA (1)...(19): siRNA sense strand
gaucccagacgccucaaau

SEQ ID NO: 832421 - RNA, 19 nt, Homo sapiens
  misc_RNA (1)...(19): siRNA sense strand
aggcaaaccgacuuuauga

SEQ ID NO: 832422 - RNA, 19 nt, Homo sapiens
  misc_RNA (1)...(19): siRNA sense strand
agaagaaauaggcaagaaa

SEQ ID NO: 832423 - RNA, 19 nt, Homo sapiens
  misc_RNA (1)...(19): siRNA sense strand
ugcaagagaugggaaaugg

SEQ ID NO: 832424 - RNA, 19 nt, Homo sapiens
  misc_RNA (1)...(19): siRNA sense strand
uggaggaggauaacaaguu

SEQ ID NO: 832425 - RNA, 19 nt, Homo sapiens
  misc_RNA (1)...(19): siRNA sense strand
gcuguugaaggauuuauuc

SEQ ID NO: 832426 - RNA, 19 nt, Homo sapiens
  misc_RNA (1)...(19): siRNA sense strand
uggcaggcauggcagcuau

SEQ ID NO: 832427 - RNA, 19 nt, Homo sapiens
  misc_RNA (1)...(19): siRNA sense strand
gcaaaucagaagaaauagg

SEQ ID NO: 832428 - RNA, 19 nt, Homo sapiens
  misc_RNA (1)...(19): siRNA sense strand
ccagcaauacccuagagaa

SEQ ID NO: 832429 - RNA, 19 nt, Homo sapiens
  misc_RNA (1)...(19): siRNA sense strand
gcaagagaugggaaaugga

SEQ ID NO: 832430 - RNA, 19 nt, Homo sapiens
  misc_RNA (1)...(19): siRNA sense strand
ggcaagaaacagcucucua

SEQ ID NO: 832431 - RNA, 19 nt, Homo sapiens
  misc_RNA (1)...(19): siRNA sense strand
gaaagguuguagguuccau

SEQ ID NO: 832432 - RNA, 19 nt, Homo sapiens
  misc_RNA (1)...(19): siRNA sense strand
cagauagacccagcuguug

SEQ ID NO: 832433 - RNA, 19 nt, Homo sapiens
  misc_RNA (1)...(19): siRNA sense strand
guguucaucugcauucgau

SEQ ID NO: 832434 - RNA, 19 nt, Homo sapiens
  misc_RNA (1)...(19): siRNA sense strand
aaaagaagacccacagcua

SEQ ID NO: 832435 - RNA, 19 nt, Homo sapiens
  misc_RNA (1)...(19): siRNA sense strand
agaagaagaaauacaugga

SEQ ID NO: 832436 - RNA, 19 nt, Homo sapiens
  misc_RNA (1)...(19): siRNA sense strand
ccucaaaugccuacucaag

SEQ ID NO: 832437 - RNA, 19 nt, Homo sapiens
  misc_RNA (1)...(19): siRNA sense strand
gaaacagcucucuaaagac

SEQ ID NO: 832438 - RNA, 19 nt, Homo sapiens
  misc_RNA (1)...(19): siRNA sense strand
ggagcaaaucagaagaaau

SEQ ID NO: 832439 - RNA, 19 nt, Homo sapiens
  misc_RNA (1)...(19): siRNA sense strand
ccagggagcaaaucagaag

SEQ ID NO: 832440 - RNA, 19 nt, Homo sapiens
  misc_RNA (1)...(19): siRNA sense strand
uagagaaggauuuagaucu

SEQ ID NO: 832441 - RNA, 19 nt, Homo sapiens
  misc_RNA (1)...(19): siRNA sense strand
ggcaaaccgacuuuaugaa

SEQ ID NO: 832442 - RNA, 19 nt, Homo sapiens
  misc_RNA (1)...(19): siRNA sense strand
gcaugcaagagaugggaaa

SEQ ID NO: 832443 - RNA, 19 nt, Homo sapiens
  misc_RNA (1)...(19): siRNA sense strand
agauagacccagcuguuga

SEQ ID NO: 832444 - RNA, 19 nt, Homo sapiens
  misc_RNA (1)...(19): siRNA sense strand
cugaaaaucugaaccuguu

SEQ ID NO: 832445 - RNA, 19 nt, Homo sapiens
  misc_RNA (1)...(19): siRNA sense strand
gaccgaagucuggacauca

SEQ ID NO: 832446 - RNA, 19 nt, Homo sapiens
  misc_RNA (1)...(19): siRNA sense strand
gcagcaaaucagacucuca

SEQ ID NO: 832447 - RNA, 19 nt, Homo sapiens
  misc_RNA (1)...(19): siRNA sense strand
ucaaugaguggcggaaaug

SEQ ID NO: 832448 - RNA, 19 nt, Homo sapiens
  misc_RNA (1)...(19): siRNA sense strand
ucagaugacccagcagaug

SEQ ID NO: 832449 - RNA, 19 nt, Homo sapiens
  misc_RNA (1)...(19): siRNA sense strand
caaaugccuacucaagcaa

SEQ ID NO: 832450 - RNA, 19 nt, Homo sapiens
  misc_RNA (1)...(19): siRNA sense strand
cgccucaaaugccuacuca

SEQ ID NO: 832451 - RNA, 19 nt, Homo sapiens
  misc_RNA (1)...(19): siRNA sense strand
acuccauucuuucacugua

SEQ ID NO: 832452 - RNA, 19 nt, Homo sapiens
  misc_RNA (1)...(19): siRNA sense strand
aagaaacagcucucuaaag

SEQ ID NO: 832453 - RNA, 19 nt, Homo sapiens
  misc_RNA (1)...(19): siRNA sense strand
ggagccagggagcaaauca

SEQ ID NO: 832454 - RNA, 19 nt, Homo sapiens
  misc_RNA (1)...(19): siRNA sense strand
cagcaauacccuagagaag

SEQ ID NO: 832455 - RNA, 19 nt, Homo sapiens
  misc_RNA (1)...(19): siRNA sense strand
gugaaaaugccacagaaaa

SEQ ID NO: 832456 - RNA, 19 nt, Homo sapiens
  misc_RNA (1)...(19): siRNA sense strand
gaugacaaguggaaaagag

SEQ ID NO: 832457 - RNA, 19 nt, Homo sapiens
  misc_RNA (1)...(19): siRNA sense strand
acccagcuguugaaggauu

SEQ ID NO: 832458 - RNA, 19 nt, Homo sapiens
  misc_RNA (1)...(19): siRNA sense strand
ccugcuccauugcaaauag

SEQ ID NO: 832459 - RNA, 19 nt, Homo sapiens
  misc_RNA (1)...(19): siRNA sense strand
aaauuggaaccuguuguuu

SEQ ID NO: 832460 - RNA, 19 nt, Homo sapiens
  misc_RNA (1)...(19): siRNA sense strand
ugaugggugugccgaaugg

SEQ ID NO: 832461 - RNA, 19 nt, Homo sapiens
  misc_RNA (1)...(19): siRNA sense strand
ccgcucagauggcauaucc

SEQ ID NO: 832462 - RNA, 19 nt, Homo sapiens
  misc_RNA (1)...(19): siRNA sense strand
gcuccauugcaaauaguaa

SEQ ID NO: 832463 - RNA, 19 nt, Homo sapiens
  misc_RNA (1)...(19): siRNA sense strand
uauccaggguaaagucagu

SEQ ID NO: 832464 - RNA, 19 nt, Homo sapiens
  misc_RNA (1)...(19): siRNA sense strand
gcaacaagguucccgagaa

SEQ ID NO: 832465 - RNA, 19 nt, Homo sapiens
  misc_RNA (1)...(19): siRNA sense strand
gcaccagccuguucaaaga

SEQ ID NO: 832466 - RNA, 19 nt, Homo sapiens
  misc_RNA (1)...(19): siRNA sense strand
aagaggagcugcagauuga

SEQ ID NO: 832467 - RNA, 19 nt, Homo sapiens
  misc_RNA (1)...(19): siRNA sense strand
ggacggacucaacauguua

SEQ ID NO: 832468 - RNA, 19 nt, Homo sapiens
  misc_RNA (1)...(19): siRNA sense strand
ggaauagugugaacaacau

SEQ ID NO: 832469 - RNA, 19 nt, Homo sapiens
  misc_RNA (1)...(19): siRNA sense strand
gaagaggagcugcagauug

SEQ ID NO: 832470 - RNA, 19 nt, Homo sapiens
  misc_RNA (1)...(19): siRNA sense strand
gaagccaacuuuccuuucu

SEQ ID NO: 832471 - RNA, 19 nt, Homo sapiens
  misc_RNA (1)...(19): siRNA sense strand
ggacucaacauguuaagug

SEQ ID NO: 832472 - RNA, 19 nt, Homo sapiens
  misc_RNA (1)...(19): siRNA sense strand
gcucaucuuugaccaacuu

SEQ ID NO: 832473 - RNA, 19 nt, Homo sapiens
  misc_RNA (1)...(19): siRNA sense strand
gcaggacucuuuucauuug

SEQ ID NO: 832474 - RNA, 19 nt, Homo sapiens
  misc_RNA (1)...(19): siRNA sense strand
gagaacugcaggacucuuu

SEQ ID NO: 832475 - RNA, 19 nt, Homo sapiens
  misc_RNA (1)...(19): siRNA sense strand
agacugugcuuuccucuuc

SEQ ID NO: 832476 - RNA, 19 nt, Homo sapiens
  misc_RNA (1)...(19): siRNA sense strand
gugcuuuccucuuccuuaa

SEQ ID NO: 832477 - RNA, 19 nt, Homo sapiens
  misc_RNA (1)...(19): siRNA sense strand
ucaauaagacugugcuuuc

SEQ ID NO: 832478 - RNA, 19 nt, Homo sapiens
  misc_RNA (1)...(19): siRNA sense strand
gacucaacauguuaaguga

SEQ ID NO: 832479 - RNA, 19 nt, Homo sapiens
  misc_RNA (1)...(19): siRNA sense strand
caacaucccagcugcuaug

SEQ ID NO: 832480 - RNA, 19 nt, Homo sapiens
  misc_RNA (1)...(19): siRNA sense strand
ugaagcacaucaagguuuc

SEQ ID NO: 832481 - RNA, 19 nt, Homo sapiens
  misc_RNA (1)...(19): siRNA sense strand
uuaaauaaccacccacaga

SEQ ID NO: 832482 - RNA, 19 nt, Homo sapiens
  misc_RNA (1)...(19): siRNA sense strand
gcuuuccucuuccuuaaau

SEQ ID NO: 832483 - RNA, 19 nt, Homo sapiens
  misc_RNA (1)...(19): siRNA sense strand
guucaaagaccucaacagu

SEQ ID NO: 832484 - RNA, 19 nt, Homo sapiens
  misc_RNA (1)...(19): siRNA sense strand
gaccaagcccguauuccaa

SEQ ID NO: 832485 - RNA, 19 nt, Homo sapiens
  misc_RNA (1)...(19): siRNA sense strand
ggaagaggagcugcagauu

SEQ ID NO: 832486 - RNA, 19 nt, Homo sapiens
  misc_RNA (1)...(19): siRNA sense strand
caacgcaucugcucuucac

SEQ ID NO: 832487 - RNA, 19 nt, Homo sapiens
  misc_RNA (1)...(19): siRNA sense strand
gggaauagugugaacaaca

SEQ ID NO: 832488 - RNA, 19 nt, Homo sapiens
  misc_RNA (1)...(19): siRNA sense strand
cuuagcaacccaucucuuu

SEQ ID NO: 832489 - RNA, 19 nt, Homo sapiens
  misc_RNA (1)...(19): siRNA sense strand
caagccacgcucaauaaga

SEQ ID NO: 832490 - RNA, 19 nt, Homo sapiens
  misc_RNA (1)...(19): siRNA sense strand
ucagaccgaagccaacuuu

SEQ ID NO: 832491 - RNA, 19 nt, Homo sapiens
  misc_RNA (1)...(19): siRNA sense strand
uggacggacucaacauguu

SEQ ID NO: 832492 - RNA, 19 nt, Homo sapiens
  misc_RNA (1)...(19): siRNA sense strand
uccaagccacgcucaauaa

SEQ ID NO: 832493 - RNA, 19 nt, Homo sapiens
  misc_RNA (1)...(19): siRNA sense strand
caacuucuucccagaugug

SEQ ID NO: 832494 - RNA, 19 nt, Homo sapiens
  misc_RNA (1)...(19): siRNA sense strand
caauaagacugugcuuucc

SEQ ID NO: 832495 - RNA, 19 nt, Homo sapiens
  misc_RNA (1)...(19): siRNA sense strand
cugaagcacaucaagguuu

SEQ ID NO: 832496 - RNA, 19 nt, Homo sapiens
  misc_RNA (1)...(19): siRNA sense strand
aagccacgcucaauaagac

SEQ ID NO: 832497 - RNA, 19 nt, Homo sapiens
  misc_RNA (1)...(19): siRNA sense strand
gacggacucaacauguuaa

SEQ ID NO: 832498 - RNA, 19 nt, Homo sapiens
  misc_RNA (1)...(19): siRNA sense strand
ccgaagccaacuuuccuuu

SEQ ID NO: 832499 - RNA, 19 nt, Homo sapiens
  misc_RNA (1)...(19): siRNA sense strand
cugcaggacucuuuucauu

SEQ ID NO: 832500 - RNA, 19 nt, Homo sapiens
  misc_RNA (1)...(19): siRNA sense strand
gcgggagucucucgaacac

SEQ ID NO: 832501 - RNA, 19 nt, Homo sapiens
  misc_RNA (1)...(19): siRNA sense strand
caucuuugaccaacuucuu

SEQ ID NO: 832502 - RNA, 19 nt, Homo sapiens
  misc_RNA (1)...(19): siRNA sense strand
ccaacuucuucccagaugu

SEQ ID NO: 832503 - RNA, 19 nt, Homo sapiens
  misc_RNA (1)...(19): siRNA sense strand
gaccaacuucuucccagau

SEQ ID NO: 832504 - RNA, 19 nt, Homo sapiens
  misc_RNA (1)...(19): siRNA sense strand
cccagaugguguccucaga

SEQ ID NO: 832505 - RNA, 19 nt, Homo sapiens
  misc_RNA (1)...(19): siRNA sense strand
acaggugccucuggugcaa

SEQ ID NO: 832506 - RNA, 19 nt, Homo sapiens
  misc_RNA (1)...(19): siRNA sense strand
gcccugccuuuccucaaca

SEQ ID NO: 832507 - RNA, 19 nt, Homo sapiens
  misc_RNA (1)...(19): siRNA sense strand
cgaagccaacuuuccuuuc

SEQ ID NO: 832508 - RNA, 19 nt, Homo sapiens
  misc_RNA (1)...(19): siRNA sense strand
gagcaggccugaucaagau

SEQ ID NO: 832509 - RNA, 19 nt, Homo sapiens
  misc_RNA (1)...(19): siRNA sense strand
gaggagagcacuacaggua

SEQ ID NO: 832510 - RNA, 19 nt, Homo sapiens
  misc_RNA (1)...(19): siRNA sense strand
ggucagacaugaacuccaa

SEQ ID NO: 832511 - RNA, 19 nt, Homo sapiens
  misc_RNA (1)...(19): siRNA sense strand
ccaauccuguggcauacua

SEQ ID NO: 832512 - RNA, 19 nt, Homo sapiens
  misc_RNA (1)...(19): siRNA sense strand
ggagagcacuacagguaca

SEQ ID NO: 832513 - RNA, 19 nt, Homo sapiens
  misc_RNA (1)...(19): siRNA sense strand
gggcaucucgucuuucgua

SEQ ID NO: 832514 - RNA, 19 nt, Homo sapiens
  misc_RNA (1)...(19): siRNA sense strand
ggaccgaguucugcagaug

SEQ ID NO: 832515 - RNA, 19 nt, Homo sapiens
  misc_RNA (1)...(19): siRNA sense strand
ggagcaggccugaucaaga

SEQ ID NO: 832516 - RNA, 19 nt, Homo sapiens
  misc_RNA (1)...(19): siRNA sense strand
gagcugaggcccuacuuca

SEQ ID NO: 832517 - RNA, 19 nt, Homo sapiens
  misc_RNA (1)...(19): siRNA sense strand
gaacacccacuucaacucu

SEQ ID NO: 832518 - RNA, 19 nt, Homo sapiens
  misc_RNA (1)...(19): siRNA sense strand
ggccaugucugguacucuu

SEQ ID NO: 832519 - RNA, 19 nt, Homo sapiens
  misc_RNA (1)...(19): siRNA sense strand
gcacaacgacuggaucauc

SEQ ID NO: 832520 - RNA, 19 nt, Homo sapiens
  misc_RNA (1)...(19): siRNA sense strand
gcacuacagguacaaguuc

SEQ ID NO: 832521 - RNA, 19 nt, Homo sapiens
  misc_RNA (1)...(19): siRNA sense strand
ggacugggcaucucgucuu

SEQ ID NO: 832522 - RNA, 19 nt, Homo sapiens
  misc_RNA (1)...(19): siRNA sense strand
gacugggcaucucgucuuu

SEQ ID NO: 832523 - RNA, 19 nt, Homo sapiens
  misc_RNA (1)...(19): siRNA sense strand
uggcauuccugguggcuuu

SEQ ID NO: 832524 - RNA, 19 nt, Homo sapiens
  misc_RNA (1)...(19): siRNA sense strand
cuucaacucucuucacauc

SEQ ID NO: 832525 - RNA, 19 nt, Homo sapiens
  misc_RNA (1)...(19): siRNA sense strand
ugaacuggcugacuauggu

SEQ ID NO: 832526 - RNA, 19 nt, Homo sapiens
  misc_RNA (1)...(19): siRNA sense strand
caucucgucuuucguacug

SEQ ID NO: 832527 - RNA, 19 nt, Homo sapiens
  misc_RNA (1)...(19): siRNA sense strand
gagcacaacgacuggauca

SEQ ID NO: 832528 - RNA, 19 nt, Homo sapiens
  misc_RNA (1)...(19): siRNA sense strand
ggcgagaccucaccugcau

SEQ ID NO: 832529 - RNA, 19 nt, Homo sapiens
  misc_RNA (1)...(19): siRNA sense strand
uggacuggcugaugugguu

SEQ ID NO: 832530 - RNA, 19 nt, Homo sapiens
  misc_RNA (1)...(19): siRNA sense strand
gaggaucggagccuacuuc

SEQ ID NO: 832531 - RNA, 19 nt, Homo sapiens
  misc_RNA (1)...(19): siRNA sense strand
uuccugaacuggcugacua

SEQ ID NO: 832532 - RNA, 19 nt, Homo sapiens
  misc_RNA (1)...(19): siRNA sense strand
ggacuggucagacaugaac

SEQ ID NO: 832533 - RNA, 19 nt, Homo sapiens
  misc_RNA (1)...(19): siRNA sense strand
agacggcccugccucaucu

SEQ ID NO: 832534 - RNA, 19 nt, Homo sapiens
  misc_RNA (1)...(19): siRNA sense strand
gcucagcaaccacuucauc

SEQ ID NO: 832535 - RNA, 19 nt, Homo sapiens
  misc_RNA (1)...(19): siRNA sense strand
ccugacagcccaacaaugg

SEQ ID NO: 832536 - RNA, 19 nt, Homo sapiens
  misc_RNA (1)...(19): siRNA sense strand
cuacaugucccugguuaau

SEQ ID NO: 832537 - RNA, 19 nt, Homo sapiens
  misc_RNA (1)...(19): siRNA sense strand
ucggaagcaucaccaagga

SEQ ID NO: 832538 - RNA, 19 nt, Homo sapiens
  misc_RNA (1)...(19): siRNA sense strand
ucaacucucuucacaucgu

SEQ ID NO: 832539 - RNA, 19 nt, Homo sapiens
  misc_RNA (1)...(19): siRNA sense strand
ggucaugaacacccacuuc

SEQ ID NO: 832540 - RNA, 19 nt, Homo sapiens
  misc_RNA (1)...(19): siRNA sense strand
gcuccaggcaggucaugaa

SEQ ID NO: 832541 - RNA, 19 nt, Homo sapiens
  misc_RNA (1)...(19): siRNA sense strand
ggacuuccagcaguacuuc

SEQ ID NO: 832542 - RNA, 19 nt, Homo sapiens
  misc_RNA (1)...(19): siRNA sense strand
cgccuggacuggcugaugu

SEQ ID NO: 832543 - RNA, 19 nt, Homo sapiens
  misc_RNA (1)...(19): siRNA sense strand
ccaggcaggucaugaacac

SEQ ID NO: 832544 - RNA, 19 nt, Homo sapiens
  misc_RNA (1)...(19): siRNA sense strand
gcgccaacaugcuucucau

SEQ ID NO: 832545 - RNA, 19 nt, Homo sapiens
  misc_RNA (1)...(19): siRNA sense strand
cucuacaugucccugguua

SEQ ID NO: 832546 - RNA, 19 nt, Homo sapiens
  misc_RNA (1)...(19): siRNA sense strand
ggcccuagccuucguguac

SEQ ID NO: 832547 - RNA, 19 nt, Homo sapiens
  misc_RNA (1)...(19): siRNA sense strand
cacuucaacucucuucaca

SEQ ID NO: 832548 - RNA, 19 nt, Homo sapiens
  misc_RNA (1)...(19): siRNA sense strand
gauggacuggucagacaug

SEQ ID NO: 832549 - RNA, 19 nt, Homo sapiens
  misc_RNA (1)...(19): siRNA sense strand
gcccgugguccucaacuug

SEQ ID NO: 832550 - RNA, 19 nt, Homo sapiens
  misc_RNA (1)...(19): siRNA sense strand
acuacgaguucaagugcaa

SEQ ID NO: 832551 - RNA, 19 nt, Homo sapiens
  misc_RNA (1)...(19): siRNA sense strand
ucagcuacaugcccaccau

SEQ ID NO: 832552 - RNA, 19 nt, Homo sapiens
  misc_RNA (1)...(19): siRNA sense strand
gcuuggagcaggccugauc

SEQ ID NO: 832553 - RNA, 19 nt, Homo sapiens
  misc_RNA (1)...(19): siRNA sense strand
gcccaauccuguggcauac

SEQ ID NO: 832554 - RNA, 19 nt, Homo sapiens
  misc_RNA (1)...(19): siRNA sense strand
cacuacagguacaaguuca

SEQ ID NO: 832555 - RNA, 19 nt, Homo sapiens
  misc_RNA (1)...(19): siRNA sense strand
gagcacuacagguacaagu

SEQ ID NO: 832556 - RNA, 19 nt, Homo sapiens
  misc_RNA (1)...(19): siRNA sense strand
ccugguggcuuuccaucag

SEQ ID NO: 832557 - RNA, 19 nt, Homo sapiens
  misc_RNA (1)...(19): siRNA sense strand
agccuggccugcuuugaug

SEQ ID NO: 832558 - RNA, 19 nt, Homo sapiens
  misc_RNA (1)...(19): siRNA sense strand
cagccuggccugcuuugau

SEQ ID NO: 832559 - RNA, 19 nt, Homo sapiens
  misc_RNA (1)...(19): siRNA sense strand
gagccaaggugcagcauua

SEQ ID NO: 832560 - RNA, 19 nt, Homo sapiens
  misc_RNA (1)...(19): siRNA sense strand
gaagaugcuugggcaauua

SEQ ID NO: 832561 - RNA, 19 nt, Homo sapiens
  misc_RNA (1)...(19): siRNA sense strand
gcaauuaaguuucugaaca

SEQ ID NO: 832562 - RNA, 19 nt, Homo sapiens
  misc_RNA (1)...(19): siRNA sense strand
ugacaaacccauaagcuua

SEQ ID NO: 832563 - RNA, 19 nt, Homo sapiens
  misc_RNA (1)...(19): siRNA sense strand
gaacuggugugaacugcaa

SEQ ID NO: 832564 - RNA, 19 nt, Homo sapiens
  misc_RNA (1)...(19): siRNA sense strand
ucacugaccuggcuacuca

SEQ ID NO: 832565 - RNA, 19 nt, Homo sapiens
  misc_RNA (1)...(19): siRNA sense strand
acaccuagcuagagaacua

SEQ ID NO: 832566 - RNA, 19 nt, Homo sapiens
  misc_RNA (1)...(19): siRNA sense strand
gcauacaccuagcuagaga

SEQ ID NO: 832567 - RNA, 19 nt, Homo sapiens
  misc_RNA (1)...(19): siRNA sense strand
ggagagauuccaccuuaaa

SEQ ID NO: 832568 - RNA, 19 nt, Homo sapiens
  misc_RNA (1)...(19): siRNA sense strand
uaacaugccuggcccaucu

SEQ ID NO: 832569 - RNA, 19 nt, Homo sapiens
  misc_RNA (1)...(19): siRNA sense strand
gagauuccaccuuaaauau

SEQ ID NO: 832570 - RNA, 19 nt, Homo sapiens
  misc_RNA (1)...(19): siRNA sense strand
cagggaggcuucucuguga

SEQ ID NO: 832571 - RNA, 19 nt, Homo sapiens
  misc_RNA (1)...(19): siRNA sense strand
gaaaagaggauuggauaua

SEQ ID NO: 832572 - RNA, 19 nt, Homo sapiens
  misc_RNA (1)...(19): siRNA sense strand
caagucagccuauacaaau

SEQ ID NO: 832573 - RNA, 19 nt, Homo sapiens
  misc_RNA (1)...(19): siRNA sense strand
gaacauacuuuugcugauu

SEQ ID NO: 832574 - RNA, 19 nt, Homo sapiens
  misc_RNA (1)...(19): siRNA sense strand
gaacuagaacuucaugauc

SEQ ID NO: 832575 - RNA, 19 nt, Homo sapiens
  misc_RNA (1)...(19): siRNA sense strand
ggagcuuccugguuucuug

SEQ ID NO: 832576 - RNA, 19 nt, Homo sapiens
  misc_RNA (1)...(19): siRNA sense strand
ugucagaccucccaguuau

SEQ ID NO: 832577 - RNA, 19 nt, Homo sapiens
  misc_RNA (1)...(19): siRNA sense strand
ucagagaguuuccaguguu

SEQ ID NO: 832578 - RNA, 19 nt, Homo sapiens
  misc_RNA (1)...(19): siRNA sense strand
gaaggaugacaaacccaua

SEQ ID NO: 832579 - RNA, 19 nt, Homo sapiens
  misc_RNA (1)...(19): siRNA sense strand
uaucuuugaugccauggua

SEQ ID NO: 832580 - RNA, 19 nt, Homo sapiens
  misc_RNA (1)...(19): siRNA sense strand
cagagaguuuccaguguuu

SEQ ID NO: 832581 - RNA, 19 nt, Homo sapiens
  misc_RNA (1)...(19): siRNA sense strand
ccacugugcuggguacuga

SEQ ID NO: 832582 - RNA, 19 nt, Homo sapiens
  misc_RNA (1)...(19): siRNA sense strand
ucauggaacuugucuucuu

SEQ ID NO: 832583 - RNA, 19 nt, Homo sapiens
  misc_RNA (1)...(19): siRNA sense strand
uugaugagcugcacuauac

SEQ ID NO: 832584 - RNA, 19 nt, Homo sapiens
  misc_RNA (1)...(19): siRNA sense strand
cauggaacuugucuucuug

SEQ ID NO: 832585 - RNA, 19 nt, Homo sapiens
  misc_RNA (1)...(19): siRNA sense strand
ccaaggugcagcauuauau

SEQ ID NO: 832586 - RNA, 19 nt, Homo sapiens
  misc_RNA (1)...(19): siRNA sense strand
gaacuucaugaucuuguga

SEQ ID NO: 832587 - RNA, 19 nt, Homo sapiens
  misc_RNA (1)...(19): siRNA sense strand
gauuguagccuucaaagag

SEQ ID NO: 832588 - RNA, 19 nt, Homo sapiens
  misc_RNA (1)...(19): siRNA sense strand
gaguauauccaccaagaga

SEQ ID NO: 832589 - RNA, 19 nt, Homo sapiens
  misc_RNA (1)...(19): siRNA sense strand
uaucacccauggagagauu

SEQ ID NO: 832590 - RNA, 19 nt, Homo sapiens
  misc_RNA (1)...(19): siRNA sense strand
agaagaagaaagacuguuu

SEQ ID NO: 832591 - RNA, 19 nt, Homo sapiens
  misc_RNA (1)...(19): siRNA sense strand
agaagaugcuugggcaauu

SEQ ID NO: 832592 - RNA, 19 nt, Homo sapiens
  misc_RNA (1)...(19): siRNA sense strand
agagauuccaccuuaaaua

SEQ ID NO: 832593 - RNA, 19 nt, Homo sapiens
  misc_RNA (1)...(19): siRNA sense strand
ugagaaggcagcuguguug

SEQ ID NO: 832594 - RNA, 19 nt, Homo sapiens
  misc_RNA (1)...(19): siRNA sense strand
cagaagggcacaucagaga

SEQ ID NO: 832595 - RNA, 19 nt, Homo sapiens
  misc_RNA (1)...(19): siRNA sense strand
ccuagaagaugcccaagag

SEQ ID NO: 832596 - RNA, 19 nt, Homo sapiens
  misc_RNA (1)...(19): siRNA sense strand
ucaagucagccuauacaaa

SEQ ID NO: 832597 - RNA, 19 nt, Homo sapiens
  misc_RNA (1)...(19): siRNA sense strand
gaagggcacaucagagagu

SEQ ID NO: 832598 - RNA, 19 nt, Homo sapiens
  misc_RNA (1)...(19): siRNA sense strand
gaggguguacuucuuguug

SEQ ID NO: 832599 - RNA, 19 nt, Homo sapiens
  misc_RNA (1)...(19): siRNA sense strand
gcuggguacugagauugua

SEQ ID NO: 832600 - RNA, 19 nt, Homo sapiens
  misc_RNA (1)...(19): siRNA sense strand
guaccuaugcagacauuug

SEQ ID NO: 832601 - RNA, 19 nt, Homo sapiens
  misc_RNA (1)...(19): siRNA sense strand
gagagauuccaccuuaaau

SEQ ID NO: 832602 - RNA, 19 nt, Homo sapiens
  misc_RNA (1)...(19): siRNA sense strand
cagcauacaccuagcuaga

SEQ ID NO: 832603 - RNA, 19 nt, Homo sapiens
  misc_RNA (1)...(19): siRNA sense strand
gaacugcaaacagcauaug

SEQ ID NO: 832604 - RNA, 19 nt, Homo sapiens
  misc_RNA (1)...(19): siRNA sense strand
aagucagccuauacaaaua

SEQ ID NO: 832605 - RNA, 19 nt, Homo sapiens
  misc_RNA (1)...(19): siRNA sense strand
gccaaggugcagcauuaua

SEQ ID NO: 832606 - RNA, 19 nt, Homo sapiens
  misc_RNA (1)...(19): siRNA sense strand
acucagaacuggugugaac

SEQ ID NO: 832607 - RNA, 19 nt, Homo sapiens
  misc_RNA (1)...(19): siRNA sense strand
uugaguauauccaccaaga

SEQ ID NO: 832608 - RNA, 19 nt, Homo sapiens
  misc_RNA (1)...(19): siRNA sense strand
uuacaaaacuggaaaagag

SEQ ID NO: 832609 - RNA, 19 nt, Homo sapiens
  misc_RNA (1)...(19): siRNA sense strand
ggaagugccggacguguac

SEQ ID NO: 832610 - RNA, 19 nt, Homo sapiens
  misc_RNA (1)...(19): siRNA sense strand
gaagaagaaagacuguuuu

SEQ ID NO: 832611 - RNA, 19 nt, Homo sapiens
  misc_RNA (1)...(19): siRNA sense strand
caagagaagaggagacagu

SEQ ID NO: 832612 - RNA, 19 nt, Homo sapiens
  misc_RNA (1)...(19): siRNA sense strand
ccucaggguucucagacuu

SEQ ID NO: 832613 - RNA, 19 nt, Homo sapiens
  misc_RNA (1)...(19): siRNA sense strand
uucaugaucuugugacugu

SEQ ID NO: 832614 - RNA, 19 nt, Homo sapiens
  misc_RNA (1)...(19): siRNA sense strand
gaccucccaguuauugaua

SEQ ID NO: 832615 - RNA, 19 nt, Homo sapiens
  misc_RNA (1)...(19): siRNA sense strand
gaagaugcccaagagucaa

SEQ ID NO: 832616 - RNA, 19 nt, Homo sapiens
  misc_RNA (1)...(19): siRNA sense strand
gauugaguauauccaccaa

SEQ ID NO: 832617 - RNA, 19 nt, Homo sapiens
  misc_RNA (1)...(19): siRNA sense strand
cagaguuccuggaguuucu

SEQ ID NO: 832618 - RNA, 19 nt, Homo sapiens
  misc_RNA (1)...(19): siRNA sense strand
uggaagcucagaagaagaa

SEQ ID NO: 832619 - RNA, 19 nt, Homo sapiens
  misc_RNA (1)...(19): siRNA sense strand
aacuagaacuucaugaucu

SEQ ID NO: 832620 - RNA, 19 nt, Homo sapiens
  misc_RNA (1)...(19): siRNA sense strand
guguaccuaugcagacauu

SEQ ID NO: 832621 - RNA, 19 nt, Homo sapiens
  misc_RNA (1)...(19): siRNA sense strand
caaggugcagcauuauaug

SEQ ID NO: 832622 - RNA, 19 nt, Homo sapiens
  misc_RNA (1)...(19): siRNA sense strand
agaagaugcccaagaguca

SEQ ID NO: 832623 - RNA, 19 nt, Homo sapiens
  misc_RNA (1)...(19): siRNA sense strand
gggaggguguacuucuugu

SEQ ID NO: 832624 - RNA, 19 nt, Homo sapiens
  misc_RNA (1)...(19): siRNA sense strand
ucagaccucccaguuauug

SEQ ID NO: 832625 - RNA, 19 nt, Homo sapiens
  misc_RNA (1)...(19): siRNA sense strand
ggguguacuucuuguugga

SEQ ID NO: 832626 - RNA, 19 nt, Homo sapiens
  misc_RNA (1)...(19): siRNA sense strand
ugaccuggcuacucagaac

SEQ ID NO: 832627 - RNA, 19 nt, Homo sapiens
  misc_RNA (1)...(19): siRNA sense strand
aaacccauaagcuuacaaa

SEQ ID NO: 832628 - RNA, 19 nt, Homo sapiens
  misc_RNA (1)...(19): siRNA sense strand
gacaaacccauaagcuuac

SEQ ID NO: 832629 - RNA, 19 nt, Homo sapiens
  misc_RNA (1)...(19): siRNA sense strand
cuugucuucuugucucuaa

SEQ ID NO: 832630 - RNA, 19 nt, Homo sapiens
  misc_RNA (1)...(19): siRNA sense strand
gacaagagaagaggagaca

SEQ ID NO: 832631 - RNA, 19 nt, Homo sapiens
  misc_RNA (1)...(19): siRNA sense strand
ucaggguucucagacuuga

SEQ ID NO: 832632 - RNA, 19 nt, Homo sapiens
  misc_RNA (1)...(19): siRNA sense strand
gagauuguagccuucaaag

SEQ ID NO: 832633 - RNA, 19 nt, Homo sapiens
  misc_RNA (1)...(19): siRNA sense strand
ccucauggaacuugucuuc

SEQ ID NO: 832634 - RNA, 19 nt, Homo sapiens
  misc_RNA (1)...(19): siRNA sense strand
aagcucagaagaagaaaga

SEQ ID NO: 832635 - RNA, 19 nt, Homo sapiens
  misc_RNA (1)...(19): siRNA sense strand
ggagcuggcggaacucaag

SEQ ID NO: 832636 - RNA, 19 nt, Homo sapiens
  misc_RNA (1)...(19): siRNA sense strand
acuagaacuucaugaucuu

SEQ ID NO: 832637 - RNA, 19 nt, Homo sapiens
  misc_RNA (1)...(19): siRNA sense strand
agucaccacuaaagaagau

SEQ ID NO: 832638 - RNA, 19 nt, Homo sapiens
  misc_RNA (1)...(19): siRNA sense strand
uggaagugccggacgugua

SEQ ID NO: 832639 - RNA, 19 nt, Homo sapiens
  misc_RNA (1)...(19): siRNA sense strand
gaugacaaacccauaagcu

SEQ ID NO: 832640 - RNA, 19 nt, Homo sapiens
  misc_RNA (1)...(19): siRNA sense strand
aaggaugacaaacccauaa

SEQ ID NO: 832641 - RNA, 19 nt, Homo sapiens
  misc_RNA (1)...(19): siRNA sense strand
gugaacugcaaacagcaua

SEQ ID NO: 832642 - RNA, 19 nt, Homo sapiens
  misc_RNA (1)...(19): siRNA sense strand
caaagagaaggaggugaga

SEQ ID NO: 832643 - RNA, 19 nt, Homo sapiens
  misc_RNA (1)...(19): siRNA sense strand
auuguagccuucaaagaga

SEQ ID NO: 832644 - RNA, 19 nt, Homo sapiens
  misc_RNA (1)...(19): siRNA sense strand
uaauccaccacacaaaguu

SEQ ID NO: 832645 - RNA, 19 nt, Homo sapiens
  misc_RNA (1)...(19): siRNA sense strand
uggaguuucuggaccuaga

SEQ ID NO: 832646 - RNA, 19 nt, Homo sapiens
  misc_RNA (1)...(19): siRNA sense strand
gagaacuagaacuucauga

SEQ ID NO: 832647 - RNA, 19 nt, Homo sapiens
  misc_RNA (1)...(19): siRNA sense strand
agaacuagaacuucaugau

SEQ ID NO: 832648 - RNA, 19 nt, Homo sapiens
  misc_RNA (1)...(19): siRNA sense strand
ugagauuguagccuucaaa

SEQ ID NO: 832649 - RNA, 19 nt, Homo sapiens
  misc_RNA (1)...(19): siRNA sense strand
ccaguuauugauaucuuga

SEQ ID NO: 832650 - RNA, 19 nt, Homo sapiens
  misc_RNA (1)...(19): siRNA sense strand
ugggugaccucauggaacu

SEQ ID NO: 832651 - RNA, 19 nt, Homo sapiens
  misc_RNA (1)...(19): siRNA sense strand
ggaaaagugaccccugcua

SEQ ID NO: 832652 - RNA, 19 nt, Homo sapiens
  misc_RNA (1)...(19): siRNA sense strand
ggaggguguacuucuuguu

SEQ ID NO: 832653 - RNA, 19 nt, Homo sapiens
  misc_RNA (1)...(19): siRNA sense strand
gucagaagggcacaucaga

SEQ ID NO: 832654 - RNA, 19 nt, Homo sapiens
  misc_RNA (1)...(19): siRNA sense strand
gagaguuuccaguguuugg

SEQ ID NO: 832655 - RNA, 19 nt, Homo sapiens
  misc_RNA (1)...(19): siRNA sense strand
ccuaugcagacauuuguga

SEQ ID NO: 832656 - RNA, 19 nt, Homo sapiens
  misc_RNA (1)...(19): siRNA sense strand
agcauuauauggccuacug

SEQ ID NO: 832657 - RNA, 19 nt, Homo sapiens
  misc_RNA (1)...(19): siRNA sense strand
ggaacuugucuucuugucu

SEQ ID NO: 832658 - RNA, 19 nt, Homo sapiens
  misc_RNA (1)...(19): siRNA sense strand
guacuucuuguuggaguga

SEQ ID NO: 832659 - RNA, 19 nt, Homo sapiens
  misc_RNA (1)...(19): siRNA sense strand
gaggagaugucaauuauga

SEQ ID NO: 832660 - RNA, 19 nt, Homo sapiens
  misc_RNA (1)...(19): siRNA sense strand
ggauggaauucauaaagua

SEQ ID NO: 832661 - RNA, 19 nt, Homo sapiens
  misc_RNA (1)...(19): siRNA sense strand
gggaggagaugucaauuau

SEQ ID NO: 832662 - RNA, 19 nt, Homo sapiens
  misc_RNA (1)...(19): siRNA sense strand
ggaaggaaauggagaugug

SEQ ID NO: 832663 - RNA, 19 nt, Homo sapiens
  misc_RNA (1)...(19): siRNA sense strand
acucaaaccuggaagauga

SEQ ID NO: 832664 - RNA, 19 nt, Homo sapiens
  misc_RNA (1)...(19): siRNA sense strand
gaugugguauuccugcuuu

SEQ ID NO: 832665 - RNA, 19 nt, Homo sapiens
  misc_RNA (1)...(19): siRNA sense strand
gagugaggauccuagaauu

SEQ ID NO: 832666 - RNA, 19 nt, Homo sapiens
  misc_RNA (1)...(19): siRNA sense strand
cuucugacaucacugaaua

SEQ ID NO: 832667 - RNA, 19 nt, Homo sapiens
  misc_RNA (1)...(19): siRNA sense strand
gaaauggagaugugguauu

SEQ ID NO: 832668 - RNA, 19 nt, Homo sapiens
  misc_RNA (1)...(19): siRNA sense strand
gcuaauugcacaccacaaa

SEQ ID NO: 832669 - RNA, 19 nt, Homo sapiens
  misc_RNA (1)...(19): siRNA sense strand
ggagugaggauccuagaau

SEQ ID NO: 832670 - RNA, 19 nt, Homo sapiens
  misc_RNA (1)...(19): siRNA sense strand
gaggagauccggauggaau

SEQ ID NO: 832671 - RNA, 19 nt, Homo sapiens
  misc_RNA (1)...(19): siRNA sense strand
aaauggagaugugguauuc

SEQ ID NO: 832672 - RNA, 19 nt, Homo sapiens
  misc_RNA (1)...(19): siRNA sense strand
uuugagaacccgcauguua

SEQ ID NO: 832673 - RNA, 19 nt, Homo sapiens
  misc_RNA (1)...(19): siRNA sense strand
ugaggauccuagaauuuga

SEQ ID NO: 832674 - RNA, 19 nt, Homo sapiens
  misc_RNA (1)...(19): siRNA sense strand
ugaagcuggugcacucaaa

SEQ ID NO: 832675 - RNA, 19 nt, Homo sapiens
  misc_RNA (1)...(19): siRNA sense strand
cggauggaauucauaaagu

SEQ ID NO: 832676 - RNA, 19 nt, Homo sapiens
  misc_RNA (1)...(19): siRNA sense strand
gugaggauccuagaauuug

SEQ ID NO: 832677 - RNA, 19 nt, Homo sapiens
  misc_RNA (1)...(19): siRNA sense strand
gauaaaggaagccugucuu

SEQ ID NO: 832678 - RNA, 19 nt, Homo sapiens
  misc_RNA (1)...(19): siRNA sense strand
gcugugaauucgagcuaug

SEQ ID NO: 832679 - RNA, 19 nt, Homo sapiens
  misc_RNA (1)...(19): siRNA sense strand
gcagagacagggaggagau

SEQ ID NO: 832680 - RNA, 19 nt, Homo sapiens
  misc_RNA (1)...(19): siRNA sense strand
ggaaauggagaugugguau

SEQ ID NO: 832681 - RNA, 19 nt, Homo sapiens
  misc_RNA (1)...(19): siRNA sense strand
caaaggcacgggcugugaa

SEQ ID NO: 832682 - RNA, 19 nt, Homo sapiens
  misc_RNA (1)...(19): siRNA sense strand
ugguggcgaugcuaaguuu

SEQ ID NO: 832683 - RNA, 19 nt, Homo sapiens
  misc_RNA (1)...(19): siRNA sense strand
gauccggauggaauucaua

SEQ ID NO: 832684 - RNA, 19 nt, Homo sapiens
  misc_RNA (1)...(19): siRNA sense strand
gcacucaaaccuggaagau

SEQ ID NO: 832685 - RNA, 19 nt, Homo sapiens
  misc_RNA (1)...(19): siRNA sense strand
ggacugugguggcgaugcu

SEQ ID NO: 832686 - RNA, 19 nt, Homo sapiens
  misc_RNA (1)...(19): siRNA sense strand
ccaagccaccggaaggaaa

SEQ ID NO: 832687 - RNA, 19 nt, Homo sapiens
  misc_RNA (1)...(19): siRNA sense strand
gaguggugaucgucuucaa

SEQ ID NO: 832688 - RNA, 19 nt, Homo sapiens
  misc_RNA (1)...(19): siRNA sense strand
gauccuagaauuugagaac

SEQ ID NO: 832689 - RNA, 19 nt, Homo sapiens
  misc_RNA (1)...(19): siRNA sense strand
cgucuucaaugcugacauc

SEQ ID NO: 832690 - RNA, 19 nt, Homo sapiens
  misc_RNA (1)...(19): siRNA sense strand
aaggaagccugucuuuguc

SEQ ID NO: 832691 - RNA, 19 nt, Homo sapiens
  misc_RNA (1)...(19): siRNA sense strand
agggaggagaugucaauua

SEQ ID NO: 832692 - RNA, 19 nt, Homo sapiens
  misc_RNA (1)...(19): siRNA sense strand
cauaaucaacuccaugucu

SEQ ID NO: 832693 - RNA, 19 nt, Homo sapiens
  misc_RNA (1)...(19): siRNA sense strand
ggaggagaugucaauuaug

SEQ ID NO: 832694 - RNA, 19 nt, Homo sapiens
  misc_RNA (1)...(19): siRNA sense strand
guggugaucgucuucaaug

SEQ ID NO: 832695 - RNA, 19 nt, Homo sapiens
  misc_RNA (1)...(19): siRNA sense strand
aagaugacccugaggagau

SEQ ID NO: 832696 - RNA, 19 nt, Homo sapiens
  misc_RNA (1)...(19): siRNA sense strand
uaaucaacuccaugucuga

SEQ ID NO: 832697 - RNA, 19 nt, Homo sapiens
  misc_RNA (1)...(19): siRNA sense strand
gggcugugaauucgagcua

SEQ ID NO: 832698 - RNA, 19 nt, Homo sapiens
  misc_RNA (1)...(19): siRNA sense strand
ggagauccggauggaauuc

SEQ ID NO: 832699 - RNA, 19 nt, Homo sapiens
  misc_RNA (1)...(19): siRNA sense strand
caagccaccggaaggaaau

SEQ ID NO: 832700 - RNA, 19 nt, Homo sapiens
  misc_RNA (1)...(19): siRNA sense strand
guggcgaugcuaaguuuga

SEQ ID NO: 832701 - RNA, 19 nt, Homo sapiens
  misc_RNA (1)...(19): siRNA sense strand
acagggaggagaugucaau

SEQ ID NO: 832702 - RNA, 19 nt, Homo sapiens
  misc_RNA (1)...(19): siRNA sense strand
cucuggagaugauaaagga

SEQ ID NO: 832703 - RNA, 19 nt, Homo sapiens
  misc_RNA (1)...(19): siRNA sense strand
cacaguguaugcuaauugc

SEQ ID NO: 832704 - RNA, 19 nt, Homo sapiens
  misc_RNA (1)...(19): siRNA sense strand
agugaggauccuagaauuu

SEQ ID NO: 832705 - RNA, 19 nt, Homo sapiens
  misc_RNA (1)...(19): siRNA sense strand
acaaaggcacgggcuguga

SEQ ID NO: 832706 - RNA, 19 nt, Homo sapiens
  misc_RNA (1)...(19): siRNA sense strand
cugaggagauccggaugga

SEQ ID NO: 832707 - RNA, 19 nt, Homo sapiens
  misc_RNA (1)...(19): siRNA sense strand
ggacauagccugcaagaua

SEQ ID NO: 832708 - RNA, 19 nt, Homo sapiens
  misc_RNA (1)...(19): siRNA sense strand
gcacagagcugcaggagaa

SEQ ID NO: 832709 - RNA, 19 nt, Homo sapiens
  misc_RNA (1)...(19): siRNA sense strand
ggaaguggcucaagaagaa

SEQ ID NO: 832710 - RNA, 19 nt, Homo sapiens
  misc_RNA (1)...(19): siRNA sense strand
cuagagaucucauguauuu

SEQ ID NO: 832711 - RNA, 19 nt, Homo sapiens
  misc_RNA (1)...(19): siRNA sense strand
ugacugagcuggagaguuu

SEQ ID NO: 832712 - RNA, 19 nt, Homo sapiens
  misc_RNA (1)...(19): siRNA sense strand
ggucaaaggucgugauaaa

SEQ ID NO: 832713 - RNA, 19 nt, Homo sapiens
  misc_RNA (1)...(19): siRNA sense strand
gacauagccugcaagauaa

SEQ ID NO: 832714 - RNA, 19 nt, Homo sapiens
  misc_RNA (1)...(19): siRNA sense strand
gaaacucucugcuucugaa

SEQ ID NO: 832715 - RNA, 19 nt, Homo sapiens
  misc_RNA (1)...(19): siRNA sense strand
gaacaguaaugaacaccuu

SEQ ID NO: 832716 - RNA, 19 nt, Homo sapiens
  misc_RNA (1)...(19): siRNA sense strand
gcagagagaagcagaauuc

SEQ ID NO: 832717 - RNA, 19 nt, Homo sapiens
  misc_RNA (1)...(19): siRNA sense strand
ccaagaaccagcacaagua

SEQ ID NO: 832718 - RNA, 19 nt, Homo sapiens
  misc_RNA (1)...(19): siRNA sense strand
gaaggagauucaacuggaa

SEQ ID NO: 832719 - RNA, 19 nt, Homo sapiens
  misc_RNA (1)...(19): siRNA sense strand
ugugaugccuucuacuuua

SEQ ID NO: 832720 - RNA, 19 nt, Homo sapiens
  misc_RNA (1)...(19): siRNA sense strand
gagaaaagauugaccuuga

SEQ ID NO: 832721 - RNA, 19 nt, Homo sapiens
  misc_RNA (1)...(19): siRNA sense strand
gaauugagcaguccugguu

SEQ ID NO: 832722 - RNA, 19 nt, Homo sapiens
  misc_RNA (1)...(19): siRNA sense strand
guaaggaguuguacagagu

SEQ ID NO: 832723 - RNA, 19 nt, Homo sapiens
  misc_RNA (1)...(19): siRNA sense strand
gcuuaaggauucugaguug

SEQ ID NO: 832724 - RNA, 19 nt, Homo sapiens
  misc_RNA (1)...(19): siRNA sense strand
gcaaugauggagacacuuu

SEQ ID NO: 832725 - RNA, 19 nt, Homo sapiens
  misc_RNA (1)...(19): siRNA sense strand
gcagagagaaggagauuca

SEQ ID NO: 832726 - RNA, 19 nt, Homo sapiens
  misc_RNA (1)...(19): siRNA sense strand
gccagcagcuuaaggauuc

SEQ ID NO: 832727 - RNA, 19 nt, Homo sapiens
  misc_RNA (1)...(19): siRNA sense strand
gcgaggaaguuugauauuc

SEQ ID NO: 832728 - RNA, 19 nt, Homo sapiens
  misc_RNA (1)...(19): siRNA sense strand
ggagacacuuuauucagau

SEQ ID NO: 832729 - RNA, 19 nt, Homo sapiens
  misc_RNA (1)...(19): siRNA sense strand
gaaggagcuuucagugcaa

SEQ ID NO: 832730 - RNA, 19 nt, Homo sapiens
  misc_RNA (1)...(19): siRNA sense strand
gaagaaacaggaagaaagg

SEQ ID NO: 832731 - RNA, 19 nt, Homo sapiens
  misc_RNA (1)...(19): siRNA sense strand
caagaaccagcacaaguaa

SEQ ID NO: 832732 - RNA, 19 nt, Homo sapiens
  misc_RNA (1)...(19): siRNA sense strand
aaaugcagcuucagaaugg

SEQ ID NO: 832733 - RNA, 19 nt, Homo sapiens
  misc_RNA (1)...(19): siRNA sense strand
guaaugaacaccuucugaa

SEQ ID NO: 832734 - RNA, 19 nt, Homo sapiens
  misc_RNA (1)...(19): siRNA sense strand
ggacacagccauugguaca

SEQ ID NO: 832735 - RNA, 19 nt, Homo sapiens
  misc_RNA (1)...(19): siRNA sense strand
gguacaucaugcucagaua

SEQ ID NO: 832736 - RNA, 19 nt, Homo sapiens
  misc_RNA (1)...(19): siRNA sense strand
gcaaaugcagcuucagaau

SEQ ID NO: 832737 - RNA, 19 nt, Homo sapiens
  misc_RNA (1)...(19): siRNA sense strand
gagcaaaugcagcuucaga

SEQ ID NO: 832738 - RNA, 19 nt, Homo sapiens
  misc_RNA (1)...(19): siRNA sense strand
gagcagaaagugcgagaga

SEQ ID NO: 832739 - RNA, 19 nt, Homo sapiens
  misc_RNA (1)...(19): siRNA sense strand
caaccagggucuccaccuu

SEQ ID NO: 832740 - RNA, 19 nt, Homo sapiens
  misc_RNA (1)...(19): siRNA sense strand
ggacuugauugagaagaau

SEQ ID NO: 832741 - RNA, 19 nt, Homo sapiens
  misc_RNA (1)...(19): siRNA sense strand
gcaggaaguggcucaagaa

SEQ ID NO: 832742 - RNA, 19 nt, Homo sapiens
  misc_RNA (1)...(19): siRNA sense strand
gagaagcagcagcguauug

SEQ ID NO: 832743 - RNA, 19 nt, Homo sapiens
  misc_RNA (1)...(19): siRNA sense strand
gaaagugugggaaugacaa

SEQ ID NO: 832744 - RNA, 19 nt, Homo sapiens
  misc_RNA (1)...(19): siRNA sense strand
uuucuuacgugcacaguuu

SEQ ID NO: 832745 - RNA, 19 nt, Homo sapiens
  misc_RNA (1)...(19): siRNA sense strand
ucucucagcuggagcagaa

SEQ ID NO: 832746 - RNA, 19 nt, Homo sapiens
  misc_RNA (1)...(19): siRNA sense strand
uggagacacuuuauucaga

SEQ ID NO: 832747 - RNA, 19 nt, Homo sapiens
  misc_RNA (1)...(19): siRNA sense strand
agaccucggugcaaugaaa

SEQ ID NO: 832748 - RNA, 19 nt, Homo sapiens
  misc_RNA (1)...(19): siRNA sense strand
gaagaggcgaggaaguuug

SEQ ID NO: 832749 - RNA, 19 nt, Homo sapiens
  misc_RNA (1)...(19): siRNA sense strand
caaaugcagcuucagaaug

SEQ ID NO: 832750 - RNA, 19 nt, Homo sapiens
  misc_RNA (1)...(19): siRNA sense strand
cauggaaucuacccucaau

SEQ ID NO: 832751 - RNA, 19 nt, Homo sapiens
  misc_RNA (1)...(19): siRNA sense strand
ggaccacauucuaauagca

SEQ ID NO: 832752 - RNA, 19 nt, Homo sapiens
  misc_RNA (1)...(19): siRNA sense strand
cagaugugaucaagaggaa

SEQ ID NO: 832753 - RNA, 19 nt, Homo sapiens
  misc_RNA (1)...(19): siRNA sense strand
ccaguugccuucaagaucu

SEQ ID NO: 832754 - RNA, 19 nt, Homo sapiens
  misc_RNA (1)...(19): siRNA sense strand
caggcaaucugcagagaga

SEQ ID NO: 832755 - RNA, 19 nt, Homo sapiens
  misc_RNA (1)...(19): siRNA sense strand
caaaggucgugauaaacau

SEQ ID NO: 832756 - RNA, 19 nt, Homo sapiens
  misc_RNA (1)...(19): siRNA sense strand
gaaaagaaacucucugcuu

SEQ ID NO: 832757 - RNA, 19 nt, Homo sapiens
  misc_RNA (1)...(19): siRNA sense strand
gaaucuacccucaaucagu

SEQ ID NO: 832758 - RNA, 19 nt, Homo sapiens
  misc_RNA (1)...(19): siRNA sense strand
gaagccagaugugaucaag

SEQ ID NO: 832759 - RNA, 19 nt, Homo sapiens
  misc_RNA (1)...(19): siRNA sense strand
aaccaggacuugauugaga

SEQ ID NO: 832760 - RNA, 19 nt, Homo sapiens
  misc_RNA (1)...(19): siRNA sense strand
gggagaagcagcagcguau

SEQ ID NO: 832761 - RNA, 19 nt, Homo sapiens
  misc_RNA (1)...(19): siRNA sense strand
gaagcauucugaggaagug

SEQ ID NO: 832762 - RNA, 19 nt, Homo sapiens
  misc_RNA (1)...(19): siRNA sense strand
guuccgaugugauucagaa

SEQ ID NO: 832763 - RNA, 19 nt, Homo sapiens
  misc_RNA (1)...(19): siRNA sense strand
ccucuaaacucccuuuguc

SEQ ID NO: 832764 - RNA, 19 nt, Homo sapiens
  misc_RNA (1)...(19): siRNA sense strand
gaaacuagaagagguucaa

SEQ ID NO: 832765 - RNA, 19 nt, Homo sapiens
  misc_RNA (1)...(19): siRNA sense strand
gaucaagaggaaacuagaa

SEQ ID NO: 832766 - RNA, 19 nt, Homo sapiens
  misc_RNA (1)...(19): siRNA sense strand
cagagacucagcuagauuu

SEQ ID NO: 832767 - RNA, 19 nt, Homo sapiens
  misc_RNA (1)...(19): siRNA sense strand
ggagaccaguggagaaggu

SEQ ID NO: 832768 - RNA, 19 nt, Homo sapiens
  misc_RNA (1)...(19): siRNA sense strand
ucaaaggucgugauaaaca

SEQ ID NO: 832769 - RNA, 19 nt, Homo sapiens
  misc_RNA (1)...(19): siRNA sense strand
ggaagaaagggucaaaggu

SEQ ID NO: 832770 - RNA, 19 nt, Homo sapiens
  misc_RNA (1)...(19): siRNA sense strand
gcagaagccagaugugauc

SEQ ID NO: 832771 - RNA, 19 nt, Homo sapiens
  misc_RNA (1)...(19): siRNA sense strand
guuuacagauggagcaaau

SEQ ID NO: 832772 - RNA, 19 nt, Homo sapiens
  misc_RNA (1)...(19): siRNA sense strand
caggcugucuguagcauug

SEQ ID NO: 832773 - RNA, 19 nt, Homo sapiens
  misc_RNA (1)...(19): siRNA sense strand
caggagaaauauccaacug

SEQ ID NO: 832774 - RNA, 19 nt, Homo sapiens
  misc_RNA (1)...(19): siRNA sense strand
gcagaagauggaucaguug

SEQ ID NO: 832775 - RNA, 19 nt, Homo sapiens
  misc_RNA (1)...(19): siRNA sense strand
gaggcgaggaaguuugaua

SEQ ID NO: 832776 - RNA, 19 nt, Homo sapiens
  misc_RNA (1)...(19): siRNA sense strand
guacaucaugcucagauau

SEQ ID NO: 832777 - RNA, 19 nt, Homo sapiens
  misc_RNA (1)...(19): siRNA sense strand
agacucagcuagauuugca

SEQ ID NO: 832778 - RNA, 19 nt, Homo sapiens
  misc_RNA (1)...(19): siRNA sense strand
ggaguuguacagaguguug

SEQ ID NO: 832779 - RNA, 19 nt, Homo sapiens
  misc_RNA (1)...(19): siRNA sense strand
ccacguaaccauuccaaca

SEQ ID NO: 832780 - RNA, 19 nt, Homo sapiens
  misc_RNA (1)...(19): siRNA sense strand
ggaggagaccaguggagaa

SEQ ID NO: 832781 - RNA, 19 nt, Homo sapiens
  misc_RNA (1)...(19): siRNA sense strand
gcagugggguccucccuuu

SEQ ID NO: 832782 - RNA, 19 nt, Homo sapiens
  misc_RNA (1)...(19): siRNA sense strand
gauggagacacuuuauuca

SEQ ID NO: 832783 - RNA, 19 nt, Homo sapiens
  misc_RNA (1)...(19): siRNA sense strand
guuggacccucuuccucua

SEQ ID NO: 832784 - RNA, 19 nt, Homo sapiens
  misc_RNA (1)...(19): siRNA sense strand
caacagcugcgucgugaca

SEQ ID NO: 832785 - RNA, 19 nt, Homo sapiens
  misc_RNA (1)...(19): siRNA sense strand
ucaguugcgcucacaagua

SEQ ID NO: 832786 - RNA, 19 nt, Homo sapiens
  misc_RNA (1)...(19): siRNA sense strand
caucagagagucgcucaaa

SEQ ID NO: 832787 - RNA, 19 nt, Homo sapiens
  misc_RNA (1)...(19): siRNA sense strand
cgagagcaaucuugugaac

SEQ ID NO: 832788 - RNA, 19 nt, Homo sapiens
  misc_RNA (1)...(19): siRNA sense strand
gacaagaagaggcgaggaa

SEQ ID NO: 832789 - RNA, 19 nt, Homo sapiens
  misc_RNA (1)...(19): siRNA sense strand
ggagaccucggugcaauga

SEQ ID NO: 832790 - RNA, 19 nt, Homo sapiens
  misc_RNA (1)...(19): siRNA sense strand
caaugauggagacacuuua

SEQ ID NO: 832791 - RNA, 19 nt, Homo sapiens
  misc_RNA (1)...(19): siRNA sense strand
gagaagcagcagcagaaga

SEQ ID NO: 832792 - RNA, 19 nt, Homo sapiens
  misc_RNA (1)...(19): siRNA sense strand
ugaagaaacaggaagaaag

SEQ ID NO: 832793 - RNA, 19 nt, Homo sapiens
  misc_RNA (1)...(19): siRNA sense strand
ggaagugaagaaacaggaa

SEQ ID NO: 832794 - RNA, 19 nt, Homo sapiens
  misc_RNA (1)...(19): siRNA sense strand
cugaggaagugaagaaaca

SEQ ID NO: 832795 - RNA, 19 nt, Homo sapiens
  misc_RNA (1)...(19): siRNA sense strand
cagcacaaguaaggaguug

SEQ ID NO: 832796 - RNA, 19 nt, Homo sapiens
  misc_RNA (1)...(19): siRNA sense strand
gaggaaacuagaagagguu

SEQ ID NO: 832797 - RNA, 19 nt, Homo sapiens
  misc_RNA (1)...(19): siRNA sense strand
agcagaagauggaucaguu

SEQ ID NO: 832798 - RNA, 19 nt, Homo sapiens
  misc_RNA (1)...(19): siRNA sense strand
gaaaagauugaccuugaaa

SEQ ID NO: 832799 - RNA, 19 nt, Homo sapiens
  misc_RNA (1)...(19): siRNA sense strand
gccaaauucuacaccuguu

SEQ ID NO: 832800 - RNA, 19 nt, Homo sapiens
  misc_RNA (1)...(19): siRNA sense strand
gagagaaggagauucaacu

SEQ ID NO: 832801 - RNA, 19 nt, Homo sapiens
  misc_RNA (1)...(19): siRNA sense strand
gaaaugccagaaggaauca

SEQ ID NO: 832802 - RNA, 19 nt, Homo sapiens
  misc_RNA (1)...(19): siRNA sense strand
ucaaaguggcguugcagaa

SEQ ID NO: 832803 - RNA, 19 nt, Homo sapiens
  misc_RNA (1)...(19): siRNA sense strand
ucagagagucgcucaaagu

SEQ ID NO: 832804 - RNA, 19 nt, Homo sapiens
  misc_RNA (1)...(19): siRNA sense strand
gagcaaucuugugaacuca

SEQ ID NO: 832805 - RNA, 19 nt, Homo sapiens
  misc_RNA (1)...(19): siRNA sense strand
gcugaaagugugggaauga

SEQ ID NO: 832806 - RNA, 19 nt, Homo sapiens
  misc_RNA (1)...(19): siRNA sense strand
gaaucugacacuccaggaa

SEQ ID NO: 832807 - RNA, 19 nt, Homo sapiens
  misc_RNA (1)...(19): siRNA sense strand
ggacagaggcuauaugaaa

SEQ ID NO: 832808 - RNA, 19 nt, Homo sapiens
  misc_RNA (1)...(19): siRNA sense strand
caauuaaacucaugcagaa

SEQ ID NO: 832809 - RNA, 19 nt, Homo sapiens
  misc_RNA (1)...(19): siRNA sense strand
gaagugaaggccuuuauga

SEQ ID NO: 832810 - RNA, 19 nt, Homo sapiens
  misc_RNA (1)...(19): siRNA sense strand
ggacagcaaucuucucuac

SEQ ID NO: 832811 - RNA, 19 nt, Homo sapiens
  misc_RNA (1)...(19): siRNA sense strand
gaaugaaggucugucaguu

SEQ ID NO: 832812 - RNA, 19 nt, Homo sapiens
  misc_RNA (1)...(19): siRNA sense strand
gcgcauggcugaggucuug

SEQ ID NO: 832813 - RNA, 19 nt, Homo sapiens
  misc_RNA (1)...(19): siRNA sense strand
gcaaucuucucuaccaguu

SEQ ID NO: 832814 - RNA, 19 nt, Homo sapiens
  misc_RNA (1)...(19): siRNA sense strand
ggaagacauucacgauugu

SEQ ID NO: 832815 - RNA, 19 nt, Homo sapiens
  misc_RNA (1)...(19): siRNA sense strand
acagagagacggcaauuaa

SEQ ID NO: 832816 - RNA, 19 nt, Homo sapiens
  misc_RNA (1)...(19): siRNA sense strand
ccaggaaacucaugacagu

SEQ ID NO: 832817 - RNA, 19 nt, Homo sapiens
  misc_RNA (1)...(19): siRNA sense strand
ggaauucaaggaugucaaa

SEQ ID NO: 832818 - RNA, 19 nt, Homo sapiens
  misc_RNA (1)...(19): siRNA sense strand
gaggacagaggcuauauga

SEQ ID NO: 832819 - RNA, 19 nt, Homo sapiens
  misc_RNA (1)...(19): siRNA sense strand
gugaugagcauaaggaauu

SEQ ID NO: 832820 - RNA, 19 nt, Homo sapiens
  misc_RNA (1)...(19): siRNA sense strand
gcaccuucauggcaucuga

SEQ ID NO: 832821 - RNA, 19 nt, Homo sapiens
  misc_RNA (1)...(19): siRNA sense strand
ggaaaucuaccagcuuuau

SEQ ID NO: 832822 - RNA, 19 nt, Homo sapiens
  misc_RNA (1)...(19): siRNA sense strand
aaacucuucuaccgcuuua

SEQ ID NO: 832823 - RNA, 19 nt, Homo sapiens
  misc_RNA (1)...(19): siRNA sense strand
aggaagacauucacgauug

SEQ ID NO: 832824 - RNA, 19 nt, Homo sapiens
  misc_RNA (1)...(19): siRNA sense strand
ucggaaaucuaccagcuuu

SEQ ID NO: 832825 - RNA, 19 nt, Homo sapiens
  misc_RNA (1)...(19): siRNA sense strand
ucaaggaugucaaacucuu

SEQ ID NO: 832826 - RNA, 19 nt, Homo sapiens
  misc_RNA (1)...(19): siRNA sense strand
aaagauagacgucaucauc

SEQ ID NO: 832827 - RNA, 19 nt, Homo sapiens
  misc_RNA (1)...(19): siRNA sense strand
gucaucaucucaagaccua

SEQ ID NO: 832828 - RNA, 19 nt, Homo sapiens
  misc_RNA (1)...(19): siRNA sense strand
ggacgauugucauggaagu

SEQ ID NO: 832829 - RNA, 19 nt, Homo sapiens
  misc_RNA (1)...(19): siRNA sense strand
gaaagaggcagagcagcuu

SEQ ID NO: 832830 - RNA, 19 nt, Homo sapiens
  misc_RNA (1)...(19): siRNA sense strand
cugauugacuggcugauug

SEQ ID NO: 832831 - RNA, 19 nt, Homo sapiens
  misc_RNA (1)...(19): siRNA sense strand
ggaagucauggaggaguua

SEQ ID NO: 832832 - RNA, 19 nt, Homo sapiens
  misc_RNA (1)...(19): siRNA sense strand
ucaauguccugcauguaga

SEQ ID NO: 832833 - RNA, 19 nt, Homo sapiens
  misc_RNA (1)...(19): siRNA sense strand
gcaccuucccauuggauaa

SEQ ID NO: 832834 - RNA, 19 nt, Homo sapiens
  misc_RNA (1)...(19): siRNA sense strand
gacagaggcuauaugaaaa

SEQ ID NO: 832835 - RNA, 19 nt, Homo sapiens
  misc_RNA (1)...(19): siRNA sense strand
ggaaugaaggucugucagu

SEQ ID NO: 832836 - RNA, 19 nt, Homo sapiens
  misc_RNA (1)...(19): siRNA sense strand
gaaaucuaccagcuuuaug

SEQ ID NO: 832837 - RNA, 19 nt, Homo sapiens
  misc_RNA (1)...(19): siRNA sense strand
ggaagcagagccaugacaa

SEQ ID NO: 832838 - RNA, 19 nt, Homo sapiens
  misc_RNA (1)...(19): siRNA sense strand
gaaggucugucaguuuguc

SEQ ID NO: 832839 - RNA, 19 nt, Homo sapiens
  misc_RNA (1)...(19): siRNA sense strand
ugacggcaccuucccauug

SEQ ID NO: 832840 - RNA, 19 nt, Homo sapiens
  misc_RNA (1)...(19): siRNA sense strand
gaaguaagccaugccacau

SEQ ID NO: 832841 - RNA, 19 nt, Homo sapiens
  misc_RNA (1)...(19): siRNA sense strand
ccaaguccgugcugaagag

SEQ ID NO: 832842 - RNA, 19 nt, Homo sapiens
  misc_RNA (1)...(19): siRNA sense strand
gacagagagacggcaauua

SEQ ID NO: 832843 - RNA, 19 nt, Homo sapiens
  misc_RNA (1)...(19): siRNA sense strand
caaggaagacauucacgau

SEQ ID NO: 832844 - RNA, 19 nt, Homo sapiens
  misc_RNA (1)...(19): siRNA sense strand
auaaggaauucaaggaugu

SEQ ID NO: 832845 - RNA, 19 nt, Homo sapiens
  misc_RNA (1)...(19): siRNA sense strand
cagagagacggcaauuaaa

SEQ ID NO: 832846 - RNA, 19 nt, Homo sapiens
  misc_RNA (1)...(19): siRNA sense strand
gcauaaggaauucaaggau

SEQ ID NO: 832847 - RNA, 19 nt, Homo sapiens
  misc_RNA (1)...(19): siRNA sense strand
gugaggagaagcagcauga

SEQ ID NO: 832848 - RNA, 19 nt, Homo sapiens
  misc_RNA (1)...(19): siRNA sense strand
gaagcagagccaugacaau

SEQ ID NO: 832849 - RNA, 19 nt, Homo sapiens
  misc_RNA (1)...(19): siRNA sense strand
cagcuuugccaccggcuua

SEQ ID NO: 832850 - RNA, 19 nt, Homo sapiens
  misc_RNA (1)...(19): siRNA sense strand
caaacucuucuaccgcuuu

SEQ ID NO: 832851 - RNA, 19 nt, Homo sapiens
  misc_RNA (1)...(19): siRNA sense strand
augaaggucugucaguuug

SEQ ID NO: 832852 - RNA, 19 nt, Homo sapiens
  misc_RNA (1)...(19): siRNA sense strand
gacggcaccuucccauugg

SEQ ID NO: 832853 - RNA, 19 nt, Homo sapiens
  misc_RNA (1)...(19): siRNA sense strand
gauagacgucaucaucuca

SEQ ID NO: 832854 - RNA, 19 nt, Homo sapiens
  misc_RNA (1)...(19): siRNA sense strand
acagcaaucuucucuacca

SEQ ID NO: 832855 - RNA, 19 nt, Homo sapiens
  misc_RNA (1)...(19): siRNA sense strand
gaugagcccugaaaacaca

SEQ ID NO: 832856 - RNA, 19 nt, Homo sapiens
  misc_RNA (1)...(19): siRNA sense strand
gggcauuauucaccaugug

SEQ ID NO: 832857 - RNA, 19 nt, Homo sapiens
  misc_RNA (1)...(19): siRNA sense strand
aaugaaggucugucaguuu

SEQ ID NO: 832858 - RNA, 19 nt, Homo sapiens
  misc_RNA (1)...(19): siRNA sense strand
ccagcaagcacccauuugu

SEQ ID NO: 832859 - RNA, 19 nt, Homo sapiens
  misc_RNA (1)...(19): siRNA sense strand
aaucuucucuaccaguuca

SEQ ID NO: 832860 - RNA, 19 nt, Homo sapiens
  misc_RNA (1)...(19): siRNA sense strand
gaagacauucacgauuguu

SEQ ID NO: 832861 - RNA, 19 nt, Homo sapiens
  misc_RNA (1)...(19): siRNA sense strand
caagaccuacccaaacugu

SEQ ID NO: 832862 - RNA, 19 nt, Homo sapiens
  misc_RNA (1)...(19): siRNA sense strand
ugacagagagacggcaauu

SEQ ID NO: 832863 - RNA, 19 nt, Homo sapiens
  misc_RNA (1)...(19): siRNA sense strand
gagagacggcaauuaaacu

SEQ ID NO: 832864 - RNA, 19 nt, Homo sapiens
  misc_RNA (1)...(19): siRNA sense strand
agugaaggccuuuaugaga

SEQ ID NO: 832865 - RNA, 19 nt, Homo sapiens
  misc_RNA (1)...(19): siRNA sense strand
ggacuggcugguucaggaa

SEQ ID NO: 832866 - RNA, 19 nt, Homo sapiens
  misc_RNA (1)...(19): siRNA sense strand
gagaggacagaggcuauau

SEQ ID NO: 832867 - RNA, 19 nt, Homo sapiens
  misc_RNA (1)...(19): siRNA sense strand
ugagaggacagaggcuaua

SEQ ID NO: 832868 - RNA, 19 nt, Homo sapiens
  misc_RNA (1)...(19): siRNA sense strand
cacggacgauugucaugga

SEQ ID NO: 832869 - RNA, 19 nt, Homo sapiens
  misc_RNA (1)...(19): siRNA sense strand
aaaucuaccagcuuuaugu

SEQ ID NO: 832870 - RNA, 19 nt, Homo sapiens
  misc_RNA (1)...(19): siRNA sense strand
gacggcaauuaaacucaug

SEQ ID NO: 832871 - RNA, 19 nt, Homo sapiens
  misc_RNA (1)...(19): siRNA sense strand
uggaagucauggaggaguu

SEQ ID NO: 832872 - RNA, 19 nt, Homo sapiens
  misc_RNA (1)...(19): siRNA sense strand
caugacaaucggaaaucua

SEQ ID NO: 832873 - RNA, 19 nt, Homo sapiens
  misc_RNA (1)...(19): siRNA sense strand
ggcucaggcugcacgaaga

SEQ ID NO: 832874 - RNA, 19 nt, Homo sapiens
  misc_RNA (1)...(19): siRNA sense strand
aaacucaugcagaaauuag

SEQ ID NO: 832875 - RNA, 19 nt, Homo sapiens
  misc_RNA (1)...(19): siRNA sense strand
gcucaggcugcacgaagaa

SEQ ID NO: 832876 - RNA, 19 nt, Homo sapiens
  misc_RNA (1)...(19): siRNA sense strand
gcucaauguccugcaugua

SEQ ID NO: 832877 - RNA, 19 nt, Homo sapiens
  misc_RNA (1)...(19): siRNA sense strand
aggaaggggucaaguauga

SEQ ID NO: 832878 - RNA, 19 nt, Homo sapiens
  misc_RNA (1)...(19): siRNA sense strand
agacggcaauuaaacucau

SEQ ID NO: 832879 - RNA, 19 nt, Homo sapiens
  misc_RNA (1)...(19): siRNA sense strand
uugacuggcugauugaaca

SEQ ID NO: 832880 - RNA, 19 nt, Homo sapiens
  misc_RNA (1)...(19): siRNA sense strand
ccagcaaggagaucaagau

SEQ ID NO: 832881 - RNA, 19 nt, Homo sapiens
  misc_RNA (1)...(19): siRNA sense strand
cagcaagcacccauuugug

SEQ ID NO: 832882 - RNA, 19 nt, Homo sapiens
  misc_RNA (1)...(19): siRNA sense strand
gagacggcaauuaaacuca

SEQ ID NO: 832883 - RNA, 19 nt, Homo sapiens
  misc_RNA (1)...(19): siRNA sense strand
ggaggaaggggucaaguau

SEQ ID NO: 832884 - RNA, 19 nt, Homo sapiens
  misc_RNA (1)...(19): siRNA sense strand
ugaagugaaggccuuuaug

SEQ ID NO: 832885 - RNA, 19 nt, Homo sapiens
  misc_RNA (1)...(19): siRNA sense strand
uauggagcauggcaucauc

SEQ ID NO: 832886 - RNA, 19 nt, Homo sapiens
  misc_RNA (1)...(19): siRNA sense strand
auucaaggaugucaaacuc

SEQ ID NO: 832887 - RNA, 19 nt, Homo sapiens
  misc_RNA (1)...(19): siRNA sense strand
cucaagaccuacccaaacu

SEQ ID NO: 832888 - RNA, 19 nt, Homo sapiens
  misc_RNA (1)...(19): siRNA sense strand
guccagcaagcacccauuu

SEQ ID NO: 832889 - RNA, 19 nt, Homo sapiens
  misc_RNA (1)...(19): siRNA sense strand
gaacacaaagaggcuucug

SEQ ID NO: 832890 - RNA, 19 nt, Homo sapiens
  misc_RNA (1)...(19): siRNA sense strand
aaggaagacauucacgauu

SEQ ID NO: 832891 - RNA, 19 nt, Homo sapiens
  misc_RNA (1)...(19): siRNA sense strand
aagcugaugagcccugaaa

SEQ ID NO: 832892 - RNA, 19 nt, Homo sapiens
  misc_RNA (1)...(19): siRNA sense strand
ccaugugugugaugagcau

SEQ ID NO: 832893 - RNA, 19 nt, Homo sapiens
  misc_RNA (1)...(19): siRNA sense strand
ccaugacaaucggaaaucu

SEQ ID NO: 832894 - RNA, 19 nt, Homo sapiens
  misc_RNA (1)...(19): siRNA sense strand
aagcagagccaugacaauc

SEQ ID NO: 832895 - RNA, 19 nt, Homo sapiens
  misc_RNA (1)...(19): siRNA sense strand
gagccaugacaaucggaaa

SEQ ID NO: 832896 - RNA, 19 nt, Homo sapiens
  misc_RNA (1)...(19): siRNA sense strand
cguaugcaaggaagacauu

SEQ ID NO: 832897 - RNA, 19 nt, Homo sapiens
  misc_RNA (1)...(19): siRNA sense strand
gugcugaagagaccuguca

SEQ ID NO: 832898 - RNA, 19 nt, Homo sapiens
  misc_RNA (1)...(19): siRNA sense strand
cgaauaaacuuaccagaua

SEQ ID NO: 832899 - RNA, 19 nt, Homo sapiens
  misc_RNA (1)...(19): siRNA sense strand
guaaacaucuucccuauga

SEQ ID NO: 832900 - RNA, 19 nt, Homo sapiens
  misc_RNA (1)...(19): siRNA sense strand
gagaacauauugccgauuu

SEQ ID NO: 832901 - RNA, 19 nt, Homo sapiens
  misc_RNA (1)...(19): siRNA sense strand
caucauccaucaagaaaua

SEQ ID NO: 832902 - RNA, 19 nt, Homo sapiens
  misc_RNA (1)...(19): siRNA sense strand
gaacuaugcuauaccagaa

SEQ ID NO: 832903 - RNA, 19 nt, Homo sapiens
  misc_RNA (1)...(19): siRNA sense strand
cgauagaucuggugacuuu

SEQ ID NO: 832904 - RNA, 19 nt, Homo sapiens
  misc_RNA (1)...(19): siRNA sense strand
ugacucaacucaccuuaua

SEQ ID NO: 832905 - RNA, 19 nt, Homo sapiens
  misc_RNA (1)...(19): siRNA sense strand
ugagagaugugguugguua

SEQ ID NO: 832906 - RNA, 19 nt, Homo sapiens
  misc_RNA (1)...(19): siRNA sense strand
gcuaugaucuugagaacaa

SEQ ID NO: 832907 - RNA, 19 nt, Homo sapiens
  misc_RNA (1)...(19): siRNA sense strand
auacagcgcuggcucuuua

SEQ ID NO: 832908 - RNA, 19 nt, Homo sapiens
  misc_RNA (1)...(19): siRNA sense strand
agagacaccuggagaauuu

SEQ ID NO: 832909 - RNA, 19 nt, Homo sapiens
  misc_RNA (1)...(19): siRNA sense strand
gauaugaccuucucucagu

SEQ ID NO: 832910 - RNA, 19 nt, Homo sapiens
  misc_RNA (1)...(19): siRNA sense strand
ggaaaagccugcagaauga

SEQ ID NO: 832911 - RNA, 19 nt, Homo sapiens
  misc_RNA (1)...(19): siRNA sense strand
ggaggacuauuauccauau

SEQ ID NO: 832912 - RNA, 19 nt, Homo sapiens
  misc_RNA (1)...(19): siRNA sense strand
caagaaauaucagcaccua

SEQ ID NO: 832913 - RNA, 19 nt, Homo sapiens
  misc_RNA (1)...(19): siRNA sense strand
gaggcugugugacaucuua

SEQ ID NO: 832914 - RNA, 19 nt, Homo sapiens
  misc_RNA (1)...(19): siRNA sense strand
gauauuccuuccuaccuaa

SEQ ID NO: 832915 - RNA, 19 nt, Homo sapiens
  misc_RNA (1)...(19): siRNA sense strand
uaucacaccugaagcugua

SEQ ID NO: 832916 - RNA, 19 nt, Homo sapiens
  misc_RNA (1)...(19): siRNA sense strand
acaaaugggugcuaaagga

SEQ ID NO: 832917 - RNA, 19 nt, Homo sapiens
  misc_RNA (1)...(19): siRNA sense strand
caaggaacauuuuagcuua

SEQ ID NO: 832918 - RNA, 19 nt, Homo sapiens
  misc_RNA (1)...(19): siRNA sense strand
gagcugacgaauaaacuua

SEQ ID NO: 832919 - RNA, 19 nt, Homo sapiens
  misc_RNA (1)...(19): siRNA sense strand
aguuugagcugacgaauaa

SEQ ID NO: 832920 - RNA, 19 nt, Homo sapiens
  misc_RNA (1)...(19): siRNA sense strand
caggacagguucaaaauua

SEQ ID NO: 832921 - RNA, 19 nt, Homo sapiens
  misc_RNA (1)...(19): siRNA sense strand
uagcagauauggccuugaa

SEQ ID NO: 832922 - RNA, 19 nt, Homo sapiens
  misc_RNA (1)...(19): siRNA sense strand
uugcuuggcuguuauauug

SEQ ID NO: 832923 - RNA, 19 nt, Homo sapiens
  misc_RNA (1)...(19): siRNA sense strand
uaaaggagaguagcagaua

SEQ ID NO: 832924 - RNA, 19 nt, Homo sapiens
  misc_RNA (1)...(19): siRNA sense strand
cuaaaggaaucacgucaga

SEQ ID NO: 832925 - RNA, 19 nt, Homo sapiens
  misc_RNA (1)...(19): siRNA sense strand
gaaagaaaugggcacaaga

SEQ ID NO: 832926 - RNA, 19 nt, Homo sapiens
  misc_RNA (1)...(19): siRNA sense strand
aaacaucuucccuaugaua

SEQ ID NO: 832927 - RNA, 19 nt, Homo sapiens
  misc_RNA (1)...(19): siRNA sense strand
ccauaagacucgacuaaag

SEQ ID NO: 832928 - RNA, 19 nt, Homo sapiens
  misc_RNA (1)...(19): siRNA sense strand
gcagauauggccuugaaga

SEQ ID NO: 832929 - RNA, 19 nt, Homo sapiens
  misc_RNA (1)...(19): siRNA sense strand
caaaggccaugaaagucaa

SEQ ID NO: 832930 - RNA, 19 nt, Homo sapiens
  misc_RNA (1)...(19): siRNA sense strand
gauaacugaucaccugcaa

SEQ ID NO: 832931 - RNA, 19 nt, Homo sapiens
  misc_RNA (1)...(19): siRNA sense strand
uaacugaucaccugcaaau

SEQ ID NO: 832932 - RNA, 19 nt, Homo sapiens
  misc_RNA (1)...(19): siRNA sense strand
cgacuaaagaagauacuaa

SEQ ID NO: 832933 - RNA, 19 nt, Homo sapiens
  misc_RNA (1)...(19): siRNA sense strand
gaacauauugccgauuuca

SEQ ID NO: 832934 - RNA, 19 nt, Homo sapiens
  misc_RNA (1)...(19): siRNA sense strand
gcacagccagucaaugaga

SEQ ID NO: 832935 - RNA, 19 nt, Homo sapiens
  misc_RNA (1)...(19): siRNA sense strand
guacaagggccaagaugga

SEQ ID NO: 832936 - RNA, 19 nt, Homo sapiens
  misc_RNA (1)...(19): siRNA sense strand
gccuuaaccucgcauauag

SEQ ID NO: 832937 - RNA, 19 nt, Homo sapiens
  misc_RNA (1)...(19): siRNA sense strand
acgaguuagugcuguauua

SEQ ID NO: 832938 - RNA, 19 nt, Homo sapiens
  misc_RNA (1)...(19): siRNA sense strand
cauaagacucgacuaaaga

SEQ ID NO: 832939 - RNA, 19 nt, Homo sapiens
  misc_RNA (1)...(19): siRNA sense strand
ugauauuccuuccuaccua

SEQ ID NO: 832940 - RNA, 19 nt, Homo sapiens
  misc_RNA (1)...(19): siRNA sense strand
ccaaacauuucucagucaa

SEQ ID NO: 832941 - RNA, 19 nt, Homo sapiens
  misc_RNA (1)...(19): siRNA sense strand
cuugaagacuggagaaaga

SEQ ID NO: 832942 - RNA, 19 nt, Homo sapiens
  misc_RNA (1)...(19): siRNA sense strand
uacaucugcucccaucaua

SEQ ID NO: 832943 - RNA, 19 nt, Homo sapiens
  misc_RNA (1)...(19): siRNA sense strand
caucuggauugcaguuuga

SEQ ID NO: 832944 - RNA, 19 nt, Homo sapiens
  misc_RNA (1)...(19): siRNA sense strand
ggccuuaaccucgcauaua

SEQ ID NO: 832945 - RNA, 19 nt, Homo sapiens
  misc_RNA (1)...(19): siRNA sense strand
cgucaaaucugggaaccuu

SEQ ID NO: 832946 - RNA, 19 nt, Homo sapiens
  misc_RNA (1)...(19): siRNA sense strand
ggcauuggcuaugaucuug

SEQ ID NO: 832947 - RNA, 19 nt, Homo sapiens
  misc_RNA (1)...(19): siRNA sense strand
gagaugugguugguuacuu

SEQ ID NO: 832948 - RNA, 19 nt, Homo sapiens
  misc_RNA (1)...(19): siRNA sense strand
uggaacacgucgagaaguu

SEQ ID NO: 832949 - RNA, 19 nt, Homo sapiens
  misc_RNA (1)...(19): siRNA sense strand
caaaugcugauaaaucuuc

SEQ ID NO: 832950 - RNA, 19 nt, Homo sapiens
  misc_RNA (1)...(19): siRNA sense strand
acugugggauuaugacuuu

SEQ ID NO: 832951 - RNA, 19 nt, Homo sapiens
  misc_RNA (1)...(19): siRNA sense strand
gaacacgucgagaaguuuc

SEQ ID NO: 832952 - RNA, 19 nt, Homo sapiens
  misc_RNA (1)...(19): siRNA sense strand
agcaaucucucacugguuu

SEQ ID NO: 832953 - RNA, 19 nt, Homo sapiens
  misc_RNA (1)...(19): siRNA sense strand
agaugugguugguuacuuu

SEQ ID NO: 832954 - RNA, 19 nt, Homo sapiens
  misc_RNA (1)...(19): siRNA sense strand
uaccuaaagugcuacaaau

SEQ ID NO: 832955 - RNA, 19 nt, Homo sapiens
  misc_RNA (1)...(19): siRNA sense strand
gaguuugagcugacgaaua

SEQ ID NO: 832956 - RNA, 19 nt, Homo sapiens
  misc_RNA (1)...(19): siRNA sense strand
gaagauacuaaaggaauca

SEQ ID NO: 832957 - RNA, 19 nt, Homo sapiens
  misc_RNA (1)...(19): siRNA sense strand
aaaggagaguagcagauau

SEQ ID NO: 832958 - RNA, 19 nt, Homo sapiens
  misc_RNA (1)...(19): siRNA sense strand
caaugugaaugucaucuac

SEQ ID NO: 832959 - RNA, 19 nt, Homo sapiens
  misc_RNA (1)...(19): siRNA sense strand
ggaacacgucgagaaguuu

SEQ ID NO: 832960 - RNA, 19 nt, Homo sapiens
  misc_RNA (1)...(19): siRNA sense strand
caaacggccaucuggauug

SEQ ID NO: 832961 - RNA, 19 nt, Homo sapiens
  misc_RNA (1)...(19): siRNA sense strand
gauagagcccaacgggaaa

SEQ ID NO: 832962 - RNA, 19 nt, Homo sapiens
  misc_RNA (1)...(19): siRNA sense strand
ugagagcccugaaaucacu

SEQ ID NO: 832963 - RNA, 19 nt, Homo sapiens
  misc_RNA (1)...(19): siRNA sense strand
uccaaaugcugauaaaucu

SEQ ID NO: 832964 - RNA, 19 nt, Homo sapiens
  misc_RNA (1)...(19): siRNA sense strand
gugaugaccacccagcuaa

SEQ ID NO: 832965 - RNA, 19 nt, Homo sapiens
  misc_RNA (1)...(19): siRNA sense strand
agaaagaaaugggcacaag

SEQ ID NO: 832966 - RNA, 19 nt, Homo sapiens
  misc_RNA (1)...(19): siRNA sense strand
gaagacuggagaaagaaau

SEQ ID NO: 832967 - RNA, 19 nt, Homo sapiens
  misc_RNA (1)...(19): siRNA sense strand
ugauagagcagcugaguca

SEQ ID NO: 832968 - RNA, 19 nt, Homo sapiens
  misc_RNA (1)...(19): siRNA sense strand
aaaggaaucacgucagaga

SEQ ID NO: 832969 - RNA, 19 nt, Homo sapiens
  misc_RNA (1)...(19): siRNA sense strand
gggccaagauggaaauucg

SEQ ID NO: 832970 - RNA, 19 nt, Homo sapiens
  misc_RNA (1)...(19): siRNA sense strand
gaccuucucucaguguuag

SEQ ID NO: 832971 - RNA, 19 nt, Homo sapiens
  misc_RNA (1)...(19): siRNA sense strand
caguggacaugcugauaga

SEQ ID NO: 832972 - RNA, 19 nt, Homo sapiens
  misc_RNA (1)...(19): siRNA sense strand
caucugcucccaucauaug

SEQ ID NO: 832973 - RNA, 19 nt, Homo sapiens
  misc_RNA (1)...(19): siRNA sense strand
ccaucuggauugcaguuug

SEQ ID NO: 832974 - RNA, 19 nt, Homo sapiens
  misc_RNA (1)...(19): siRNA sense strand
guccaaaugcugauaaauc

SEQ ID NO: 832975 - RNA, 19 nt, Homo sapiens
  misc_RNA (1)...(19): siRNA sense strand
ucucaggaacuaugcuaua

SEQ ID NO: 832976 - RNA, 19 nt, Homo sapiens
  misc_RNA (1)...(19): siRNA sense strand
gacaaacggccaucuggau

SEQ ID NO: 832977 - RNA, 19 nt, Homo sapiens
  misc_RNA (1)...(19): siRNA sense strand
acaaaggccaugaaaguca

SEQ ID NO: 832978 - RNA, 19 nt, Homo sapiens
  misc_RNA (1)...(19): siRNA sense strand
cuucuuagcauucaaggaa

SEQ ID NO: 832979 - RNA, 19 nt, Homo sapiens
  misc_RNA (1)...(19): siRNA sense strand
agacucgacuaaagaagau

SEQ ID NO: 832980 - RNA, 19 nt, Homo sapiens
  misc_RNA (1)...(19): siRNA sense strand
uuugugauauuccuuccua

SEQ ID NO: 832981 - RNA, 19 nt, Homo sapiens
  misc_RNA (1)...(19): siRNA sense strand
acgcacagccagucaauga

SEQ ID NO: 832982 - RNA, 19 nt, Homo sapiens
  misc_RNA (1)...(19): siRNA sense strand
cuuccuaccuaaagugcua

SEQ ID NO: 832983 - RNA, 19 nt, Homo sapiens
  misc_RNA (1)...(19): siRNA sense strand
cuaaagaagauacuaaagg

SEQ ID NO: 832984 - RNA, 19 nt, Homo sapiens
  misc_RNA (1)...(19): siRNA sense strand
gcacgcacagccagucaau

SEQ ID NO: 832985 - RNA, 19 nt, Homo sapiens
  misc_RNA (1)...(19): siRNA sense strand
gggcacaagagccagcuuu

SEQ ID NO: 832986 - RNA, 19 nt, Homo sapiens
  misc_RNA (1)...(19): siRNA sense strand
caggaacuaugcuauacca

SEQ ID NO: 832987 - RNA, 19 nt, Homo sapiens
  misc_RNA (1)...(19): siRNA sense strand
ccaaugugaaugucaucua

SEQ ID NO: 832988 - RNA, 19 nt, Homo sapiens
  misc_RNA (1)...(19): siRNA sense strand
agaagauacuaaaggaauc

SEQ ID NO: 832989 - RNA, 19 nt, Homo sapiens
  misc_RNA (1)...(19): siRNA sense strand
caggaggacuauuauccau

SEQ ID NO: 832990 - RNA, 19 nt, Homo sapiens
  misc_RNA (1)...(19): siRNA sense strand
gaacaaucggcgaggaucu

SEQ ID NO: 832991 - RNA, 19 nt, Homo sapiens
  misc_RNA (1)...(19): siRNA sense strand
gaugaccacccagcuaaga

SEQ ID NO: 832992 - RNA, 19 nt, Homo sapiens
  misc_RNA (1)...(19): siRNA sense strand
gggacugcauuuugugaua

SEQ ID NO: 832993 - RNA, 19 nt, Homo sapiens
  misc_RNA (1)...(19): siRNA sense strand
gccauaagacucgacuaaa

SEQ ID NO: 832994 - RNA, 19 nt, Homo sapiens
  misc_RNA (1)...(19): siRNA sense strand
gaccuuugcucgccaucuc

SEQ ID NO: 832995 - RNA, 19 nt, Homo sapiens
  misc_RNA (1)...(19): siRNA sense strand
acaaacggccaucuggauu

SEQ ID NO: 832996 - RNA, 19 nt, Homo sapiens
  misc_RNA (1)...(19): siRNA sense strand
cugaucaccugcaaauaca

SEQ ID NO: 832997 - RNA, 19 nt, Homo sapiens
  misc_RNA (1)...(19): siRNA sense strand
ccagacuucuuagcauuca

SEQ ID NO: 832998 - RNA, 19 nt, Homo sapiens
  misc_RNA (1)...(19): siRNA sense strand
gaagagaacuguaggauga

SEQ ID NO: 832999 - RNA, 19 nt, Homo sapiens
  misc_RNA (1)...(19): siRNA sense strand
gaagaaagcauuacugaua

SEQ ID NO: 833000 - RNA, 19 nt, Homo sapiens
  misc_RNA (1)...(19): siRNA sense strand
gaauguggauguucucuua

SEQ ID NO: 833001 - RNA, 19 nt, Homo sapiens
  misc_RNA (1)...(19): siRNA sense strand
gaagaauccuuuacaagaa

SEQ ID NO: 833002 - RNA, 19 nt, Homo sapiens
  misc_RNA (1)...(19): siRNA sense strand
gaagauaucuggagaaacu

SEQ ID NO: 833003 - RNA, 19 nt, Homo sapiens
  misc_RNA (1)...(19): siRNA sense strand
gaagagagcaugccaauca

SEQ ID NO: 833004 - RNA, 19 nt, Homo sapiens
  misc_RNA (1)...(19): siRNA sense strand
gcaaggagccuaauggaaa

SEQ ID NO: 833005 - RNA, 19 nt, Homo sapiens
  misc_RNA (1)...(19): siRNA sense strand
gaaauagcaucaacucuag

SEQ ID NO: 833006 - RNA, 19 nt, Homo sapiens
  misc_RNA (1)...(19): siRNA sense strand
gcagaacugugaucccaua

SEQ ID NO: 833007 - RNA, 19 nt, Homo sapiens
  misc_RNA (1)...(19): siRNA sense strand
gcacauuacuuaccaggaa

SEQ ID NO: 833008 - RNA, 19 nt, Homo sapiens
  misc_RNA (1)...(19): siRNA sense strand
gggaugagcuaucuugauu

SEQ ID NO: 833009 - RNA, 19 nt, Homo sapiens
  misc_RNA (1)...(19): siRNA sense strand
gcucaucaguaucuuguua

SEQ ID NO: 833010 - RNA, 19 nt, Homo sapiens
  misc_RNA (1)...(19): siRNA sense strand
ggaagaauccuuuacaaga

SEQ ID NO: 833011 - RNA, 19 nt, Homo sapiens
  misc_RNA (1)...(19): siRNA sense strand
gacaaguucuuaaggauuu

SEQ ID NO: 833012 - RNA, 19 nt, Homo sapiens
  misc_RNA (1)...(19): siRNA sense strand
uaacaagacuggacugguu

SEQ ID NO: 833013 - RNA, 19 nt, Homo sapiens
  misc_RNA (1)...(19): siRNA sense strand
gaaaagggcacauuacuua

SEQ ID NO: 833014 - RNA, 19 nt, Homo sapiens
  misc_RNA (1)...(19): siRNA sense strand
gaagaaugccugaagcuuu

SEQ ID NO: 833015 - RNA, 19 nt, Homo sapiens
  misc_RNA (1)...(19): siRNA sense strand
uaaagaggauacaggauuu

SEQ ID NO: 833016 - RNA, 19 nt, Homo sapiens
  misc_RNA (1)...(19): siRNA sense strand
ggacauugguucaggaaga

SEQ ID NO: 833017 - RNA, 19 nt, Homo sapiens
  misc_RNA (1)...(19): siRNA sense strand
ccaagaagaugaccacaga

SEQ ID NO: 833018 - RNA, 19 nt, Homo sapiens
  misc_RNA (1)...(19): siRNA sense strand
ggagucagccggcaugaua

SEQ ID NO: 833019 - RNA, 19 nt, Homo sapiens
  misc_RNA (1)...(19): siRNA sense strand
cuucuuggcuugagacuua

SEQ ID NO: 833020 - RNA, 19 nt, Homo sapiens
  misc_RNA (1)...(19): siRNA sense strand
ggauuucuguuacaaacua

SEQ ID NO: 833021 - RNA, 19 nt, Homo sapiens
  misc_RNA (1)...(19): siRNA sense strand
ugaagaaucucagcauaaa

SEQ ID NO: 833022 - RNA, 19 nt, Homo sapiens
  misc_RNA (1)...(19): siRNA sense strand
gaagaugaccacagaagaa

SEQ ID NO: 833023 - RNA, 19 nt, Homo sapiens
  misc_RNA (1)...(19): siRNA sense strand
gaagcaauuucuaacauca

SEQ ID NO: 833024 - RNA, 19 nt, Homo sapiens
  misc_RNA (1)...(19): siRNA sense strand
gagaagagaccauggagaa

SEQ ID NO: 833025 - RNA, 19 nt, Homo sapiens
  misc_RNA (1)...(19): siRNA sense strand
ggaagaaauuguucaugau

SEQ ID NO: 833026 - RNA, 19 nt, Homo sapiens
  misc_RNA (1)...(19): siRNA sense strand
aauaacgacuugaaccuua

SEQ ID NO: 833027 - RNA, 19 nt, Homo sapiens
  misc_RNA (1)...(19): siRNA sense strand
gaaauucaaccuggacaua

SEQ ID NO: 833028 - RNA, 19 nt, Homo sapiens
  misc_RNA (1)...(19): siRNA sense strand
gaaaugaaucucacaagga

SEQ ID NO: 833029 - RNA, 19 nt, Homo sapiens
  misc_RNA (1)...(19): siRNA sense strand
gcaguaagauucaggacau

SEQ ID NO: 833030 - RNA, 19 nt, Homo sapiens
  misc_RNA (1)...(19): siRNA sense strand
agaaagacaucucccugua

SEQ ID NO: 833031 - RNA, 19 nt, Homo sapiens
  misc_RNA (1)...(19): siRNA sense strand
cagcauaaauaacgacuug

SEQ ID NO: 833032 - RNA, 19 nt, Homo sapiens
  misc_RNA (1)...(19): siRNA sense strand
gaauugcugccgcacauua

SEQ ID NO: 833033 - RNA, 19 nt, Homo sapiens
  misc_RNA (1)...(19): siRNA sense strand
gaacugugaucccauagag

SEQ ID NO: 833034 - RNA, 19 nt, Homo sapiens
  misc_RNA (1)...(19): siRNA sense strand
uggaagaaauuguucauga

SEQ ID NO: 833035 - RNA, 19 nt, Homo sapiens
  misc_RNA (1)...(19): siRNA sense strand
uaaauugcauggcuguaaa

SEQ ID NO: 833036 - RNA, 19 nt, Homo sapiens
  misc_RNA (1)...(19): siRNA sense strand
uaagagaacuugaaaucca

SEQ ID NO: 833037 - RNA, 19 nt, Homo sapiens
  misc_RNA (1)...(19): siRNA sense strand
ugacagggauggcauaauc

SEQ ID NO: 833038 - RNA, 19 nt, Homo sapiens
  misc_RNA (1)...(19): siRNA sense strand
caucaacucuagaaaugaa

SEQ ID NO: 833039 - RNA, 19 nt, Homo sapiens
  misc_RNA (1)...(19): siRNA sense strand
gucagcagcucauuauaaa

SEQ ID NO: 833040 - RNA, 19 nt, Homo sapiens
  misc_RNA (1)...(19): siRNA sense strand
ggaacgagaugccagucaa

SEQ ID NO: 833041 - RNA, 19 nt, Homo sapiens
  misc_RNA (1)...(19): siRNA sense strand
aaaugaaucucacaaggaa

SEQ ID NO: 833042 - RNA, 19 nt, Homo sapiens
  misc_RNA (1)...(19): siRNA sense strand
gaaaucaagaggucucauu

SEQ ID NO: 833043 - RNA, 19 nt, Homo sapiens
  misc_RNA (1)...(19): siRNA sense strand
cuggagaccuucuguauga

SEQ ID NO: 833044 - RNA, 19 nt, Homo sapiens
  misc_RNA (1)...(19): siRNA sense strand
ccaaauaccaagaagaauu

SEQ ID NO: 833045 - RNA, 19 nt, Homo sapiens
  misc_RNA (1)...(19): siRNA sense strand
gaaacuacuccuuggauga

SEQ ID NO: 833046 - RNA, 19 nt, Homo sapiens
  misc_RNA (1)...(19): siRNA sense strand
gauauuguaugggaaauca

SEQ ID NO: 833047 - RNA, 19 nt, Homo sapiens
  misc_RNA (1)...(19): siRNA sense strand
gaagauccaggaaguaguu

SEQ ID NO: 833048 - RNA, 19 nt, Homo sapiens
  misc_RNA (1)...(19): siRNA sense strand
ggaagcaauuucuaacauc

SEQ ID NO: 833049 - RNA, 19 nt, Homo sapiens
  misc_RNA (1)...(19): siRNA sense strand
gaagggaugagcuaucuug

SEQ ID NO: 833050 - RNA, 19 nt, Homo sapiens
  misc_RNA (1)...(19): siRNA sense strand
cccaggaguuugagaauuu

SEQ ID NO: 833051 - RNA, 19 nt, Homo sapiens
  misc_RNA (1)...(19): siRNA sense strand
cagcaaagcauucaccaaa

SEQ ID NO: 833052 - RNA, 19 nt, Homo sapiens
  misc_RNA (1)...(19): siRNA sense strand
agaaauagcaucaacucua

SEQ ID NO: 833053 - RNA, 19 nt, Homo sapiens
  misc_RNA (1)...(19): siRNA sense strand
gcaaaggaaagcucacuga

SEQ ID NO: 833054 - RNA, 19 nt, Homo sapiens
  misc_RNA (1)...(19): siRNA sense strand
aaaccacccugaccaagaa

SEQ ID NO: 833055 - RNA, 19 nt, Homo sapiens
  misc_RNA (1)...(19): siRNA sense strand
ggacuuaaagccaccacua

SEQ ID NO: 833056 - RNA, 19 nt, Homo sapiens
  misc_RNA (1)...(19): siRNA sense strand
caccagaucugcccucuca

SEQ ID NO: 833057 - RNA, 19 nt, Homo sapiens
  misc_RNA (1)...(19): siRNA sense strand
gagcugacccaucugcuaa

SEQ ID NO: 833058 - RNA, 19 nt, Homo sapiens
  misc_RNA (1)...(19): siRNA sense strand
gaaguuaagagacgaggaa

SEQ ID NO: 833059 - RNA, 19 nt, Homo sapiens
  misc_RNA (1)...(19): siRNA sense strand
gcgcggagacgccaucuuu

SEQ ID NO: 833060 - RNA, 19 nt, Homo sapiens
  misc_RNA (1)...(19): siRNA sense strand
ggacaaguucuuaaggauu

SEQ ID NO: 833061 - RNA, 19 nt, Homo sapiens
  misc_RNA (1)...(19): siRNA sense strand
uaaacccgauggaccgaua

SEQ ID NO: 833062 - RNA, 19 nt, Homo sapiens
  misc_RNA (1)...(19): siRNA sense strand
caagagaagaauuucgaua

SEQ ID NO: 833063 - RNA, 19 nt, Homo sapiens
  misc_RNA (1)...(19): siRNA sense strand
aggaucagcuguuaaguga

SEQ ID NO: 833064 - RNA, 19 nt, Homo sapiens
  misc_RNA (1)...(19): siRNA sense strand
gcacgucuucuguccauuu

SEQ ID NO: 833065 - RNA, 19 nt, Homo sapiens
  misc_RNA (1)...(19): siRNA sense strand
gaucagcuguuaagugaac

SEQ ID NO: 833066 - RNA, 19 nt, Homo sapiens
  misc_RNA (1)...(19): siRNA sense strand
ggacgaacaguuugacaga

SEQ ID NO: 833067 - RNA, 19 nt, Homo sapiens
  misc_RNA (1)...(19): siRNA sense strand
ucucaaagacgacgaguuu

SEQ ID NO: 833068 - RNA, 19 nt, Homo sapiens
  misc_RNA (1)...(19): siRNA sense strand
gcucauugauguuaacaag

SEQ ID NO: 833069 - RNA, 19 nt, Homo sapiens
  misc_RNA (1)...(19): siRNA sense strand
uuaagaagguacuggaaga

SEQ ID NO: 833070 - RNA, 19 nt, Homo sapiens
  misc_RNA (1)...(19): siRNA sense strand
cauggacgaugaucaguau

SEQ ID NO: 833071 - RNA, 19 nt, Homo sapiens
  misc_RNA (1)...(19): siRNA sense strand
gaagguugcggauucagaa

SEQ ID NO: 833072 - RNA, 19 nt, Homo sapiens
  misc_RNA (1)...(19): siRNA sense strand
gcauaaauaacgacuugaa

SEQ ID NO: 833073 - RNA, 19 nt, Homo sapiens
  misc_RNA (1)...(19): siRNA sense strand
ggaaauuugcauacuguga

SEQ ID NO: 833074 - RNA, 19 nt, Homo sapiens
  misc_RNA (1)...(19): siRNA sense strand
aaacagauggucagacuug

SEQ ID NO: 833075 - RNA, 19 nt, Homo sapiens
  misc_RNA (1)...(19): siRNA sense strand
ugaagauccuccaaugaga

SEQ ID NO: 833076 - RNA, 19 nt, Homo sapiens
  misc_RNA (1)...(19): siRNA sense strand
gaugagcuaucuugauuuu

SEQ ID NO: 833077 - RNA, 19 nt, Homo sapiens
  misc_RNA (1)...(19): siRNA sense strand
uaacgugcaugacuuuaag

SEQ ID NO: 833078 - RNA, 19 nt, Homo sapiens
  misc_RNA (1)...(19): siRNA sense strand
gggauucaguggaagaaau

SEQ ID NO: 833079 - RNA, 19 nt, Homo sapiens
  misc_RNA (1)...(19): siRNA sense strand
uagcaccucugguacugua

SEQ ID NO: 833080 - RNA, 19 nt, Homo sapiens
  misc_RNA (1)...(19): siRNA sense strand
uccaaaggaucagcuguua

SEQ ID NO: 833081 - RNA, 19 nt, Homo sapiens
  misc_RNA (1)...(19): siRNA sense strand
caucaacgccuccgauuuc

SEQ ID NO: 833082 - RNA, 19 nt, Homo sapiens
  misc_RNA (1)...(19): siRNA sense strand
ggacaaucaguaucauuau

SEQ ID NO: 833083 - RNA, 19 nt, Homo sapiens
  misc_RNA (1)...(19): siRNA sense strand
cggacaaucaguaucauua

SEQ ID NO: 833084 - RNA, 19 nt, Homo sapiens
  misc_RNA (1)...(19): siRNA sense strand
gagagcaugccaaucaauu

SEQ ID NO: 833085 - RNA, 19 nt, Homo sapiens
  misc_RNA (1)...(19): siRNA sense strand
agaacgcacuguacgguuu

SEQ ID NO: 833086 - RNA, 19 nt, Homo sapiens
  misc_RNA (1)...(19): siRNA sense strand
aaagacaucucccuguaca

SEQ ID NO: 833087 - RNA, 19 nt, Homo sapiens
  misc_RNA (1)...(19): siRNA sense strand
uaacggacaaucaguauca

SEQ ID NO: 833088 - RNA, 19 nt, Homo sapiens
  misc_RNA (1)...(19): siRNA sense strand
ugaggaagauccaggaagu

SEQ ID NO: 833089 - RNA, 19 nt, Homo sapiens
  misc_RNA (1)...(19): siRNA sense strand
ggaccgccaucaagauauc

SEQ ID NO: 833090 - RNA, 19 nt, Homo sapiens
  misc_RNA (1)...(19): siRNA sense strand
gaagagaccauggagaaca

SEQ ID NO: 833091 - RNA, 19 nt, Homo sapiens
  misc_RNA (1)...(19): siRNA sense strand
cagaagaagugauugaaaa

SEQ ID NO: 833092 - RNA, 19 nt, Homo sapiens
  misc_RNA (1)...(19): siRNA sense strand
ccuuugagcucauugaugu

SEQ ID NO: 833093 - RNA, 19 nt, Homo sapiens
  misc_RNA (1)...(19): siRNA sense strand
gacuugaaccuuagauauu

SEQ ID NO: 833094 - RNA, 19 nt, Homo sapiens
  misc_RNA (1)...(19): siRNA sense strand
gugaacagccacuuuauca

SEQ ID NO: 833095 - RNA, 19 nt, Homo sapiens
  misc_RNA (1)...(19): siRNA sense strand
gaccacagaagaagugauu

SEQ ID NO: 833096 - RNA, 19 nt, Homo sapiens
  misc_RNA (1)...(19): siRNA sense strand
caaaggaucagcuguuaag

SEQ ID NO: 833097 - RNA, 19 nt, Homo sapiens
  misc_RNA (1)...(19): siRNA sense strand
gcacuccacccuugcagaa

SEQ ID NO: 833098 - RNA, 19 nt, Homo sapiens
  misc_RNA (1)...(19): siRNA sense strand
gaagagaacuguaggauga

SEQ ID NO: 833099 - RNA, 19 nt, Homo sapiens
  misc_RNA (1)...(19): siRNA sense strand
gaagaaagcauuacugaua

SEQ ID NO: 833100 - RNA, 19 nt, Homo sapiens
  misc_RNA (1)...(19): siRNA sense strand
gaauguggauguucucuua

SEQ ID NO: 833101 - RNA, 19 nt, Homo sapiens
  misc_RNA (1)...(19): siRNA sense strand
gaagaauccuuuacaagaa

SEQ ID NO: 833102 - RNA, 19 nt, Homo sapiens
  misc_RNA (1)...(19): siRNA sense strand
gaagauaucuggagaaacu

SEQ ID NO: 833103 - RNA, 19 nt, Homo sapiens
  misc_RNA (1)...(19): siRNA sense strand
gaagagagcaugccaauca

SEQ ID NO: 833104 - RNA, 19 nt, Homo sapiens
  misc_RNA (1)...(19): siRNA sense strand
gcaaggagccuaauggaaa

SEQ ID NO: 833105 - RNA, 19 nt, Homo sapiens
  misc_RNA (1)...(19): siRNA sense strand
gaaauagcaucaacucuag

SEQ ID NO: 833106 - RNA, 19 nt, Homo sapiens
  misc_RNA (1)...(19): siRNA sense strand
gcagaacugugaucccaua

SEQ ID NO: 833107 - RNA, 19 nt, Homo sapiens
  misc_RNA (1)...(19): siRNA sense strand
gcacauuacuuaccaggaa

SEQ ID NO: 833108 - RNA, 19 nt, Homo sapiens
  misc_RNA (1)...(19): siRNA sense strand
gggaugagcuaucuugauu

SEQ ID NO: 833109 - RNA, 19 nt, Homo sapiens
  misc_RNA (1)...(19): siRNA sense strand
gcucaucaguaucuuguua

SEQ ID NO: 833110 - RNA, 19 nt, Homo sapiens
  misc_RNA (1)...(19): siRNA sense strand
ggaagaauccuuuacaaga

SEQ ID NO: 833111 - RNA, 19 nt, Homo sapiens
  misc_RNA (1)...(19): siRNA sense strand
gacaaguucuuaaggauuu

SEQ ID NO: 833112 - RNA, 19 nt, Homo sapiens
  misc_RNA (1)...(19): siRNA sense strand
uaacaagacuggacugguu

SEQ ID NO: 833113 - RNA, 19 nt, Homo sapiens
  misc_RNA (1)...(19): siRNA sense strand
gaaaagggcacauuacuua

SEQ ID NO: 833114 - RNA, 19 nt, Homo sapiens
  misc_RNA (1)...(19): siRNA sense strand
gaagaaugccugaagcuuu

SEQ ID NO: 833115 - RNA, 19 nt, Homo sapiens
  misc_RNA (1)...(19): siRNA sense strand
uaaagaggauacaggauuu

SEQ ID NO: 833116 - RNA, 19 nt, Homo sapiens
  misc_RNA (1)...(19): siRNA sense strand
ggacauugguucaggaaga

SEQ ID NO: 833117 - RNA, 19 nt, Homo sapiens
  misc_RNA (1)...(19): siRNA sense strand
ccaagaagaugaccacaga

SEQ ID NO: 833118 - RNA, 19 nt, Homo sapiens
  misc_RNA (1)...(19): siRNA sense strand
ggagucagccggcaugaua

SEQ ID NO: 833119 - RNA, 19 nt, Homo sapiens
  misc_RNA (1)...(19): siRNA sense strand
cuucuuggcuugagacuua

SEQ ID NO: 833120 - RNA, 19 nt, Homo sapiens
  misc_RNA (1)...(19): siRNA sense strand
ggauuucuguuacaaacua

SEQ ID NO: 833121 - RNA, 19 nt, Homo sapiens
  misc_RNA (1)...(19): siRNA sense strand
ugaagaaucucagcauaaa

SEQ ID NO: 833122 - RNA, 19 nt, Homo sapiens
  misc_RNA (1)...(19): siRNA sense strand
gaagaugaccacagaagaa

SEQ ID NO: 833123 - RNA, 19 nt, Homo sapiens
  misc_RNA (1)...(19): siRNA sense strand
gaagcaauuucuaacauca

SEQ ID NO: 833124 - RNA, 19 nt, Homo sapiens
  misc_RNA (1)...(19): siRNA sense strand
gagaagagaccauggagaa

SEQ ID NO: 833125 - RNA, 19 nt, Homo sapiens
  misc_RNA (1)...(19): siRNA sense strand
ggaagaaauuguucaugau

SEQ ID NO: 833126 - RNA, 19 nt, Homo sapiens
  misc_RNA (1)...(19): siRNA sense strand
aauaacgacuugaaccuua

SEQ ID NO: 833127 - RNA, 19 nt, Homo sapiens
  misc_RNA (1)...(19): siRNA sense strand
gaaauucaaccuggacaua

SEQ ID NO: 833128 - RNA, 19 nt, Homo sapiens
  misc_RNA (1)...(19): siRNA sense strand
gaaaugaaucucacaagga

SEQ ID NO: 833129 - RNA, 19 nt, Homo sapiens
  misc_RNA (1)...(19): siRNA sense strand
gcaguaagauucaggacau

SEQ ID NO: 833130 - RNA, 19 nt, Homo sapiens
  misc_RNA (1)...(19): siRNA sense strand
agaaagacaucucccugua

SEQ ID NO: 833131 - RNA, 19 nt, Homo sapiens
  misc_RNA (1)...(19): siRNA sense strand
cagcauaaauaacgacuug

SEQ ID NO: 833132 - RNA, 19 nt, Homo sapiens
  misc_RNA (1)...(19): siRNA sense strand
uaaauugcauggcuguaaa

SEQ ID NO: 833133 - RNA, 19 nt, Homo sapiens
  misc_RNA (1)...(19): siRNA sense strand
gaacugugaucccauagag

SEQ ID NO: 833134 - RNA, 19 nt, Homo sapiens
  misc_RNA (1)...(19): siRNA sense strand
uggaagaaauuguucauga

SEQ ID NO: 833135 - RNA, 19 nt, Homo sapiens
  misc_RNA (1)...(19): siRNA sense strand
gaauugcugccgcacauua

SEQ ID NO: 833136 - RNA, 19 nt, Homo sapiens
  misc_RNA (1)...(19): siRNA sense strand
ugacagggauggcauaauc

SEQ ID NO: 833137 - RNA, 19 nt, Homo sapiens
  misc_RNA (1)...(19): siRNA sense strand
uaagagaacuugaaaucca

SEQ ID NO: 833138 - RNA, 19 nt, Homo sapiens
  misc_RNA (1)...(19): siRNA sense strand
caucaacucuagaaaugaa

SEQ ID NO: 833139 - RNA, 19 nt, Homo sapiens
  misc_RNA (1)...(19): siRNA sense strand
gucagcagcucauuauaaa

SEQ ID NO: 833140 - RNA, 19 nt, Homo sapiens
  misc_RNA (1)...(19): siRNA sense strand
ggaacgagaugccagucaa

SEQ ID NO: 833141 - RNA, 19 nt, Homo sapiens
  misc_RNA (1)...(19): siRNA sense strand
aaaugaaucucacaaggaa

SEQ ID NO: 833142 - RNA, 19 nt, Homo sapiens
  misc_RNA (1)...(19): siRNA sense strand
gaaaucaagaggucucauu

SEQ ID NO: 833143 - RNA, 19 nt, Homo sapiens
  misc_RNA (1)...(19): siRNA sense strand
cuggagaccuucuguauga

SEQ ID NO: 833144 - RNA, 19 nt, Homo sapiens
  misc_RNA (1)...(19): siRNA sense strand
ccaaauaccaagaagaauu

SEQ ID NO: 833145 - RNA, 19 nt, Homo sapiens
  misc_RNA (1)...(19): siRNA sense strand
gaaacuacuccuuggauga

SEQ ID NO: 833146 - RNA, 19 nt, Homo sapiens
  misc_RNA (1)...(19): siRNA sense strand
gauauuguaugggaaauca

SEQ ID NO: 833147 - RNA, 19 nt, Homo sapiens
  misc_RNA (1)...(19): siRNA sense strand
gaagauccaggaaguaguu

SEQ ID NO: 833148 - RNA, 19 nt, Homo sapiens
  misc_RNA (1)...(19): siRNA sense strand
ggaagcaauuucuaacauc

SEQ ID NO: 833149 - RNA, 19 nt, Homo sapiens
  misc_RNA (1)...(19): siRNA sense strand
gaagggaugagcuaucuug

SEQ ID NO: 833150 - RNA, 19 nt, Homo sapiens
  misc_RNA (1)...(19): siRNA sense strand
cccaggaguuugagaauuu

SEQ ID NO: 833151 - RNA, 19 nt, Homo sapiens
  misc_RNA (1)...(19): siRNA sense strand
cagcaaagcauucaccaaa

SEQ ID NO: 833152 - RNA, 19 nt, Homo sapiens
  misc_RNA (1)...(19): siRNA sense strand
agaaauagcaucaacucua

SEQ ID NO: 833153 - RNA, 19 nt, Homo sapiens
  misc_RNA (1)...(19): siRNA sense strand
gcaaaggaaagcucacuga

SEQ ID NO: 833154 - RNA, 19 nt, Homo sapiens
  misc_RNA (1)...(19): siRNA sense strand
aaaccacccugaccaagaa

SEQ ID NO: 833155 - RNA, 19 nt, Homo sapiens
  misc_RNA (1)...(19): siRNA sense strand
ggacuuaaagccaccacua

SEQ ID NO: 833156 - RNA, 19 nt, Homo sapiens
  misc_RNA (1)...(19): siRNA sense strand
caccagaucugcccucuca

SEQ ID NO: 833157 - RNA, 19 nt, Homo sapiens
  misc_RNA (1)...(19): siRNA sense strand
gagcugacccaucugcuaa

SEQ ID NO: 833158 - RNA, 19 nt, Homo sapiens
  misc_RNA (1)...(19): siRNA sense strand
uaaacccgauggaccgaua

SEQ ID NO: 833159 - RNA, 19 nt, Homo sapiens
  misc_RNA (1)...(19): siRNA sense strand
gcgcggagacgccaucuuu

SEQ ID NO: 833160 - RNA, 19 nt, Homo sapiens
  misc_RNA (1)...(19): siRNA sense strand
gaaguuaagagacgaggaa

SEQ ID NO: 833161 - RNA, 19 nt, Homo sapiens
  misc_RNA (1)...(19): siRNA sense strand
ggacaaguucuuaaggauu

SEQ ID NO: 833162 - RNA, 19 nt, Homo sapiens
  misc_RNA (1)...(19): siRNA sense strand
caagagaagaauuucgaua

SEQ ID NO: 833163 - RNA, 19 nt, Homo sapiens
  misc_RNA (1)...(19): siRNA sense strand
aggaucagcuguuaaguga

SEQ ID NO: 833164 - RNA, 19 nt, Homo sapiens
  misc_RNA (1)...(19): siRNA sense strand
gcacgucuucuguccauuu

SEQ ID NO: 833165 - RNA, 19 nt, Homo sapiens
  misc_RNA (1)...(19): siRNA sense strand
gaucagcuguuaagugaac

SEQ ID NO: 833166 - RNA, 19 nt, Homo sapiens
  misc_RNA (1)...(19): siRNA sense strand
ggacgaacaguuugacaga

SEQ ID NO: 833167 - RNA, 19 nt, Homo sapiens
  misc_RNA (1)...(19): siRNA sense strand
ucucaaagacgacgaguuu

SEQ ID NO: 833168 - RNA, 19 nt, Homo sapiens
  misc_RNA (1)...(19): siRNA sense strand
gcucauugauguuaacaag

SEQ ID NO: 833169 - RNA, 19 nt, Homo sapiens
  misc_RNA (1)...(19): siRNA sense strand
uuaagaagguacuggaaga

SEQ ID NO: 833170 - RNA, 19 nt, Homo sapiens
  misc_RNA (1)...(19): siRNA sense strand
cauggacgaugaucaguau

SEQ ID NO: 833171 - RNA, 19 nt, Homo sapiens
  misc_RNA (1)...(19): siRNA sense strand
gaagguugcggauucagaa

SEQ ID NO: 833172 - RNA, 19 nt, Homo sapiens
  misc_RNA (1)...(19): siRNA sense strand
gcauaaauaacgacuugaa

SEQ ID NO: 833173 - RNA, 19 nt, Homo sapiens
  misc_RNA (1)...(19): siRNA sense strand
ggaaauuugcauacuguga

SEQ ID NO: 833174 - RNA, 19 nt, Homo sapiens
  misc_RNA (1)...(19): siRNA sense strand
aaacagauggucagacuug

SEQ ID NO: 833175 - RNA, 19 nt, Homo sapiens
  misc_RNA (1)...(19): siRNA sense strand
ugaagauccuccaaugaga

SEQ ID NO: 833176 - RNA, 19 nt, Homo sapiens
  misc_RNA (1)...(19): siRNA sense strand
gaugagcuaucuugauuuu

SEQ ID NO: 833177 - RNA, 19 nt, Homo sapiens
  misc_RNA (1)...(19): siRNA sense strand
uaacgugcaugacuuuaag

SEQ ID NO: 833178 - RNA, 19 nt, Homo sapiens
  misc_RNA (1)...(19): siRNA sense strand
gggauucaguggaagaaau

SEQ ID NO: 833179 - RNA, 19 nt, Homo sapiens
  misc_RNA (1)...(19): siRNA sense strand
uccaaaggaucagcuguua

SEQ ID NO: 833180 - RNA, 19 nt, Homo sapiens
  misc_RNA (1)...(19): siRNA sense strand
caucaacgccuccgauuuc

SEQ ID NO: 833181 - RNA, 19 nt, Homo sapiens
  misc_RNA (1)...(19): siRNA sense strand
ggacaaucaguaucauuau

SEQ ID NO: 833182 - RNA, 19 nt, Homo sapiens
  misc_RNA (1)...(19): siRNA sense strand
cggacaaucaguaucauua

SEQ ID NO: 833183 - RNA, 19 nt, Homo sapiens
  misc_RNA (1)...(19): siRNA sense strand
gagagcaugccaaucaauu

SEQ ID NO: 833184 - RNA, 19 nt, Homo sapiens
  misc_RNA (1)...(19): siRNA sense strand
agaacgcacuguacgguuu

SEQ ID NO: 833185 - RNA, 19 nt, Homo sapiens
  misc_RNA (1)...(19): siRNA sense strand
aaagacaucucccuguaca

SEQ ID NO: 833186 - RNA, 19 nt, Homo sapiens
  misc_RNA (1)...(19): siRNA sense strand
ccuuugagcucauugaugu

SEQ ID NO: 833187 - RNA, 19 nt, Homo sapiens
  misc_RNA (1)...(19): siRNA sense strand
uaacggacaaucaguauca

SEQ ID NO: 833188 - RNA, 19 nt, Homo sapiens
  misc_RNA (1)...(19): siRNA sense strand
ugaggaagauccaggaagu

SEQ ID NO: 833189 - RNA, 19 nt, Homo sapiens
  misc_RNA (1)...(19): siRNA sense strand
ggaccgccaucaagauauc

SEQ ID NO: 833190 - RNA, 19 nt, Homo sapiens
  misc_RNA (1)...(19): siRNA sense strand
gaagagaccauggagaaca

SEQ ID NO: 833191 - RNA, 19 nt, Homo sapiens
  misc_RNA (1)...(19): siRNA sense strand
cagaagaagugauugaaaa

SEQ ID NO: 833192 - RNA, 19 nt, Homo sapiens
  misc_RNA (1)...(19): siRNA sense strand
gacuugaaccuuagauauu

SEQ ID NO: 833193 - RNA, 19 nt, Homo sapiens
  misc_RNA (1)...(19): siRNA sense strand
gugaacagccacuuuauca

SEQ ID NO: 833194 - RNA, 19 nt, Homo sapiens
  misc_RNA (1)...(19): siRNA sense strand
gaccacagaagaagugauu

SEQ ID NO: 833195 - RNA, 19 nt, Homo sapiens
  misc_RNA (1)...(19): siRNA sense strand
caaaggaucagcuguuaag

SEQ ID NO: 833196 - RNA, 19 nt, Homo sapiens
  misc_RNA (1)...(19): siRNA sense strand
gaguuuagggccauuugua

SEQ ID NO: 833197 - RNA, 19 nt, Homo sapiens
  misc_RNA (1)...(19): siRNA sense strand
gcacuccacccuugcagaa

SEQ ID NO: 833198 - RNA, 19 nt, Homo sapiens
  misc_RNA (1)...(19): siRNA sense strand
ccagaaaccuguagacaaa

SEQ ID NO: 833199 - RNA, 19 nt, Homo sapiens
  misc_RNA (1)...(19): siRNA sense strand
gaucagauaugcuaaggaa

SEQ ID NO: 833200 - RNA, 19 nt, Homo sapiens
  misc_RNA (1)...(19): siRNA sense strand
ggaaugggauuucuauaga

SEQ ID NO: 833201 - RNA, 19 nt, Homo sapiens
  misc_RNA (1)...(19): siRNA sense strand
gaacaugacuacacaucug

SEQ ID NO: 833202 - RNA, 19 nt, Homo sapiens
  misc_RNA (1)...(19): siRNA sense strand
gcucaggccuacagacaua

SEQ ID NO: 833203 - RNA, 19 nt, Homo sapiens
  misc_RNA (1)...(19): siRNA sense strand
ggaaugggauguuggaagu

SEQ ID NO: 833204 - RNA, 19 nt, Homo sapiens
  misc_RNA (1)...(19): siRNA sense strand
agaaaccuguagacaaaua

SEQ ID NO: 833205 - RNA, 19 nt, Homo sapiens
  misc_RNA (1)...(19): siRNA sense strand
ggaaaacucuugcugauuc

SEQ ID NO: 833206 - RNA, 19 nt, Homo sapiens
  misc_RNA (1)...(19): siRNA sense strand
gaacaaacugccuauuuua

SEQ ID NO: 833207 - RNA, 19 nt, Homo sapiens
  misc_RNA (1)...(19): siRNA sense strand
gguggcagcuucaagauuc

SEQ ID NO: 833208 - RNA, 19 nt, Homo sapiens
  misc_RNA (1)...(19): siRNA sense strand
uagaacaaacugccuauuu

SEQ ID NO: 833209 - RNA, 19 nt, Homo sapiens
  misc_RNA (1)...(19): siRNA sense strand
gugauuaugccaucuuuaa

SEQ ID NO: 833210 - RNA, 19 nt, Homo sapiens
  misc_RNA (1)...(19): siRNA sense strand
uauagaauguuugcgauug

SEQ ID NO: 833211 - RNA, 19 nt, Homo sapiens
  misc_RNA (1)...(19): siRNA sense strand
gauugcugcuuuagaacaa

SEQ ID NO: 833212 - RNA, 19 nt, Homo sapiens
  misc_RNA (1)...(19): siRNA sense strand
caaacugccuauuuuauug

SEQ ID NO: 833213 - RNA, 19 nt, Homo sapiens
  misc_RNA (1)...(19): siRNA sense strand
ucagauaugcuaaggaaug

SEQ ID NO: 833214 - RNA, 19 nt, Homo sapiens
  misc_RNA (1)...(19): siRNA sense strand
agaacaaacugccuauuuu

SEQ ID NO: 833215 - RNA, 19 nt, Homo sapiens
  misc_RNA (1)...(19): siRNA sense strand
uaaggaaugggauuucuau

SEQ ID NO: 833216 - RNA, 19 nt, Homo sapiens
  misc_RNA (1)...(19): siRNA sense strand
ccucaaacucauuaaagua

SEQ ID NO: 833217 - RNA, 19 nt, Homo sapiens
  misc_RNA (1)...(19): siRNA sense strand
gauuccagcugucauuugg

SEQ ID NO: 833218 - RNA, 19 nt, Homo sapiens
  misc_RNA (1)...(19): siRNA sense strand
gcaaccaggaggccaaaga

SEQ ID NO: 833219 - RNA, 19 nt, Homo sapiens
  misc_RNA (1)...(19): siRNA sense strand
gaagugauuaugccaucuu

SEQ ID NO: 833220 - RNA, 19 nt, Homo sapiens
  misc_RNA (1)...(19): siRNA sense strand
cgaguaugauccuguuauc

SEQ ID NO: 833221 - RNA, 19 nt, Homo sapiens
  misc_RNA (1)...(19): siRNA sense strand
gagugacccuaaacaucaa

SEQ ID NO: 833222 - RNA, 19 nt, Homo sapiens
  misc_RNA (1)...(19): siRNA sense strand
ccaggaggccaaagaguug

SEQ ID NO: 833223 - RNA, 19 nt, Homo sapiens
  misc_RNA (1)...(19): siRNA sense strand
gccagaaaccuguagacaa

SEQ ID NO: 833224 - RNA, 19 nt, Homo sapiens
  misc_RNA (1)...(19): siRNA sense strand
uggaaagcaucauggucua

SEQ ID NO: 833225 - RNA, 19 nt, Homo sapiens
  misc_RNA (1)...(19): siRNA sense strand
cccuaaacaucaaccguaa

SEQ ID NO: 833226 - RNA, 19 nt, Homo sapiens
  misc_RNA (1)...(19): siRNA sense strand
agagugacccuaaacauca

SEQ ID NO: 833227 - RNA, 19 nt, Homo sapiens
  misc_RNA (1)...(19): siRNA sense strand
ugcgauugcugcuuuagaa

SEQ ID NO: 833228 - RNA, 19 nt, Homo sapiens
  misc_RNA (1)...(19): siRNA sense strand
gcaaagcucaggccuacag

SEQ ID NO: 833229 - RNA, 19 nt, Homo sapiens
  misc_RNA (1)...(19): siRNA sense strand
uaucgaguaugauccuguu

SEQ ID NO: 833230 - RNA, 19 nt, Homo sapiens
  misc_RNA (1)...(19): siRNA sense strand
caucauggucuacuucuuc

SEQ ID NO: 833231 - RNA, 19 nt, Homo sapiens
  misc_RNA (1)...(19): siRNA sense strand
gccucaaacucauuaaagu

SEQ ID NO: 833232 - RNA, 19 nt, Homo sapiens
  misc_RNA (1)...(19): siRNA sense strand
gaaaccuguagacaaauau

SEQ ID NO: 833233 - RNA, 19 nt, Homo sapiens
  misc_RNA (1)...(19): siRNA sense strand
gcuaaggaaugggauuucu

SEQ ID NO: 833234 - RNA, 19 nt, Homo sapiens
  misc_RNA (1)...(19): siRNA sense strand
gacuugaucagauaugcua

SEQ ID NO: 833235 - RNA, 19 nt, Homo sapiens
  misc_RNA (1)...(19): siRNA sense strand
caguacaggugcaucgaau

SEQ ID NO: 833236 - RNA, 19 nt, Homo sapiens
  misc_RNA (1)...(19): siRNA sense strand
gcaucauggucuacuucuu

SEQ ID NO: 833237 - RNA, 19 nt, Homo sapiens
  misc_RNA (1)...(19): siRNA sense strand
gccuacagacauauucuuu

SEQ ID NO: 833238 - RNA, 19 nt, Homo sapiens
  misc_RNA (1)...(19): siRNA sense strand
aaugggauguuggaaguga

SEQ ID NO: 833239 - RNA, 19 nt, Homo sapiens
  misc_RNA (1)...(19): siRNA sense strand
uguuugcgauugcugcuuu

SEQ ID NO: 833240 - RNA, 19 nt, Homo sapiens
  misc_RNA (1)...(19): siRNA sense strand
ggugguggcagcuucaaga

SEQ ID NO: 833241 - RNA, 19 nt, Homo sapiens
  misc_RNA (1)...(19): siRNA sense strand
cuacagacauauucuuuuc

SEQ ID NO: 833242 - RNA, 19 nt, Homo sapiens
  misc_RNA (1)...(19): siRNA sense strand
cagauaugcuaaggaaugg

SEQ ID NO: 833243 - RNA, 19 nt, Homo sapiens
  misc_RNA (1)...(19): siRNA sense strand
cuuuaaaucucaggacuuc

SEQ ID NO: 833244 - RNA, 19 nt, Homo sapiens
  misc_RNA (1)...(19): siRNA sense strand
ggaacaugacuacacaucu

SEQ ID NO: 833245 - RNA, 19 nt, Homo sapiens
  misc_RNA (1)...(19): siRNA sense strand
uaaccacggugugcugaag

SEQ ID NO: 833246 - RNA, 19 nt, Homo sapiens
  misc_RNA (1)...(19): siRNA sense strand
ggaagugauuaugccaucu

SEQ ID NO: 833247 - RNA, 19 nt, Homo sapiens
  misc_RNA (1)...(19): siRNA sense strand
cuguaaauccugccagaaa

SEQ ID NO: 833248 - RNA, 19 nt, Homo sapiens
  misc_RNA (1)...(19): siRNA sense strand
accguaagcucuccuucuu

SEQ ID NO: 833249 - RNA, 19 nt, Homo sapiens
  misc_RNA (1)...(19): siRNA sense strand
cuaaggaaugggauuucua

SEQ ID NO: 833250 - RNA, 19 nt, Homo sapiens
  misc_RNA (1)...(19): siRNA sense strand
uagagugacccuaaacauc

SEQ ID NO: 833251 - RNA, 19 nt, Homo sapiens
  misc_RNA (1)...(19): siRNA sense strand
gggaacaugacuacacauc

SEQ ID NO: 833252 - RNA, 19 nt, Homo sapiens
  misc_RNA (1)...(19): siRNA sense strand
aaagcaucauggucuacuu

SEQ ID NO: 833253 - RNA, 19 nt, Homo sapiens
  misc_RNA (1)...(19): siRNA sense strand
guuugcgauugcugcuuua

SEQ ID NO: 833254 - RNA, 19 nt, Homo sapiens
  misc_RNA (1)...(19): siRNA sense strand
aagugauuaugccaucuuu

SEQ ID NO: 833255 - RNA, 19 nt, Homo sapiens
  misc_RNA (1)...(19): siRNA sense strand
gauguuggaagugauuaug

SEQ ID NO: 833256 - RNA, 19 nt, Homo sapiens
  misc_RNA (1)...(19): siRNA sense strand
gaaagcaucauggucuacu

SEQ ID NO: 833257 - RNA, 19 nt, Homo sapiens
  misc_RNA (1)...(19): siRNA sense strand
aaugcuauauugugcaaag

SEQ ID NO: 833258 - RNA, 19 nt, Homo sapiens
  misc_RNA (1)...(19): siRNA sense strand
caucaaauuuucaggcaau

SEQ ID NO: 833259 - RNA, 19 nt, Homo sapiens
  misc_RNA (1)...(19): siRNA sense strand
uguaaauccugccagaaac

SEQ ID NO: 833260 - RNA, 19 nt, Homo sapiens
  misc_RNA (1)...(19): siRNA sense strand
aggaaugggauuucuauag

SEQ ID NO: 833261 - RNA, 19 nt, Homo sapiens
  misc_RNA (1)...(19): siRNA sense strand
cacggugugcugaagauaa

SEQ ID NO: 833262 - RNA, 19 nt, Homo sapiens
  misc_RNA (1)...(19): siRNA sense strand
gcugucauuugggaacaug

SEQ ID NO: 833263 - RNA, 19 nt, Homo sapiens
  misc_RNA (1)...(19): siRNA sense strand
agaguuguaccgagacuau

SEQ ID NO: 833264 - RNA, 19 nt, Homo sapiens
  misc_RNA (1)...(19): siRNA sense strand
gaguuguaccgagacuaua

SEQ ID NO: 833265 - RNA, 19 nt, Homo sapiens
  misc_RNA (1)...(19): siRNA sense strand
gauccuguuaucaucuuga

SEQ ID NO: 833266 - RNA, 19 nt, Homo sapiens
  misc_RNA (1)...(19): siRNA sense strand
uuaaaucucaggacuucug

SEQ ID NO: 833267 - RNA, 19 nt, Homo sapiens
  misc_RNA (1)...(19): siRNA sense strand
aguauggaaugggauguug

SEQ ID NO: 833268 - RNA, 19 nt, Homo sapiens
  misc_RNA (1)...(19): siRNA sense strand
caaccaggaggccaaagag

SEQ ID NO: 833269 - RNA, 19 nt, Homo sapiens
  misc_RNA (1)...(19): siRNA sense strand
uaugccaucuuuaaaucuc

SEQ ID NO: 833270 - RNA, 19 nt, Homo sapiens
  misc_RNA (1)...(19): siRNA sense strand
ggauguuggaagugauuau

SEQ ID NO: 833271 - RNA, 19 nt, Homo sapiens
  misc_RNA (1)...(19): siRNA sense strand
gaguauggaaugggauguu

SEQ ID NO: 833272 - RNA, 19 nt, Homo sapiens
  misc_RNA (1)...(19): siRNA sense strand
cguguugaguggcuuacug

SEQ ID NO: 833273 - RNA, 19 nt, Homo sapiens
  misc_RNA (1)...(19): siRNA sense strand
gaacaacacugagauaguc

SEQ ID NO: 833274 - RNA, 19 nt, Homo sapiens
  misc_RNA (1)...(19): siRNA sense strand
gcagugaccucaacaagac

SEQ ID NO: 833275 - RNA, 19 nt, Homo sapiens
  misc_RNA (1)...(19): siRNA sense strand
gggcuacgguugcuacugu

SEQ ID NO: 833276 - RNA, 19 nt, Homo sapiens
  misc_RNA (1)...(19): siRNA sense strand
cgagaacaacacugagaua

SEQ ID NO: 833277 - RNA, 19 nt, Homo sapiens
  misc_RNA (1)...(19): siRNA sense strand
uaccguggcuuccucaaug

SEQ ID NO: 833278 - RNA, 19 nt, Homo sapiens
  misc_RNA (1)...(19): siRNA sense strand
ucaacaagacagaguguga

SEQ ID NO: 833279 - RNA, 19 nt, Homo sapiens
  misc_RNA (1)...(19): siRNA sense strand
gagaacaacacugagauag

SEQ ID NO: 833280 - RNA, 19 nt, Homo sapiens
  misc_RNA (1)...(19): siRNA sense strand
caacugcagcaucuaugaa

SEQ ID NO: 833281 - RNA, 19 nt, Homo sapiens
  misc_RNA (1)...(19): siRNA sense strand
ggagcgccauccuguccuu

SEQ ID NO: 833282 - RNA, 19 nt, Homo sapiens
  misc_RNA (1)...(19): siRNA sense strand
caagacagagugugacaag

SEQ ID NO: 833283 - RNA, 19 nt, Homo sapiens
  misc_RNA (1)...(19): siRNA sense strand
agacguaccgagaggagua

SEQ ID NO: 833284 - RNA, 19 nt, Homo sapiens
  misc_RNA (1)...(19): siRNA sense strand
ccaacugcagcaucuauga

SEQ ID NO: 833285 - RNA, 19 nt, Homo sapiens
  misc_RNA (1)...(19): siRNA sense strand
cgacugcugcuaccaggaa

SEQ ID NO: 833286 - RNA, 19 nt, Homo sapiens
  misc_RNA (1)...(19): siRNA sense strand
gaucacaccaucgagaaca

SEQ ID NO: 833287 - RNA, 19 nt, Homo sapiens
  misc_RNA (1)...(19): siRNA sense strand
ccaucgagaacaacacuga

SEQ ID NO: 833288 - RNA, 19 nt, Homo sapiens
  misc_RNA (1)...(19): siRNA sense strand
agacagagugugacaagca

SEQ ID NO: 833289 - RNA, 19 nt, Homo sapiens
  misc_RNA (1)...(19): siRNA sense strand
ccaggaacucuuugaccaa

SEQ ID NO: 833290 - RNA, 19 nt, Homo sapiens
  misc_RNA (1)...(19): siRNA sense strand
guggccagcccaaggauga

SEQ ID NO: 833291 - RNA, 19 nt, Homo sapiens
  misc_RNA (1)...(19): siRNA sense strand
gcccaacugcagcaucuau

SEQ ID NO: 833292 - RNA, 19 nt, Homo sapiens
  misc_RNA (1)...(19): siRNA sense strand
gcuaccaggaacucuuuga

SEQ ID NO: 833293 - RNA, 19 nt, Homo sapiens
  misc_RNA (1)...(19): siRNA sense strand
guaccguggcuuccucaau

SEQ ID NO: 833294 - RNA, 19 nt, Homo sapiens
  misc_RNA (1)...(19): siRNA sense strand
guggcuuccucaaugucua

SEQ ID NO: 833295 - RNA, 19 nt, Homo sapiens
  misc_RNA (1)...(19): siRNA sense strand
gauaaacucuuccgugcau

SEQ ID NO: 833296 - RNA, 19 nt, Homo sapiens
  misc_RNA (1)...(19): siRNA sense strand
gcacaacccuaccuuuggu

SEQ ID NO: 833297 - RNA, 19 nt, Homo sapiens
  misc_RNA (1)...(19): siRNA sense strand
ccauucagcugauccaguu

SEQ ID NO: 833298 - RNA, 19 nt, Homo sapiens
  misc_RNA (1)...(19): siRNA sense strand
guacuucguucucucacuu

SEQ ID NO: 833299 - RNA, 19 nt, Homo sapiens
  misc_RNA (1)...(19): siRNA sense strand
caacagcccugaggcacuu

SEQ ID NO: 833300 - RNA, 19 nt, Homo sapiens
  misc_RNA (1)...(19): siRNA sense strand
ggacacagugaucuuuauu

SEQ ID NO: 833301 - RNA, 19 nt, Homo sapiens
  misc_RNA (1)...(19): siRNA sense strand
cuacaugucuuccaucacu

SEQ ID NO: 833302 - RNA, 19 nt, Homo sapiens
  misc_RNA (1)...(19): siRNA sense strand
gcacucucccucuacauug

SEQ ID NO: 833303 - RNA, 19 nt, Homo sapiens
  misc_RNA (1)...(19): siRNA sense strand
gcugugacccuguggacua

SEQ ID NO: 833304 - RNA, 19 nt, Homo sapiens
  misc_RNA (1)...(19): siRNA sense strand
acacagugaucuuuauucu

SEQ ID NO: 833305 - RNA, 19 nt, Homo sapiens
  misc_RNA (1)...(19): siRNA sense strand
gcacaucucccaguacuac

SEQ ID NO: 833306 - RNA, 19 nt, Homo sapiens
  misc_RNA (1)...(19): siRNA sense strand
cuccguggcuucaugauug

SEQ ID NO: 833307 - RNA, 19 nt, Homo sapiens
  misc_RNA (1)...(19): siRNA sense strand
gagcugauggacacaguga

SEQ ID NO: 833308 - RNA, 19 nt, Homo sapiens
  misc_RNA (1)...(19): siRNA sense strand
ccaguacccagucauuauu

SEQ ID NO: 833309 - RNA, 19 nt, Homo sapiens
  misc_RNA (1)...(19): siRNA sense strand
gauggacacagugaucuuu

SEQ ID NO: 833310 - RNA, 19 nt, Homo sapiens
  misc_RNA (1)...(19): siRNA sense strand
caaguucauugagcugaug

SEQ ID NO: 833311 - RNA, 19 nt, Homo sapiens
  misc_RNA (1)...(19): siRNA sense strand
ggccucgcaucauggcuaa

SEQ ID NO: 833312 - RNA, 19 nt, Homo sapiens
  misc_RNA (1)...(19): siRNA sense strand
gcacaugacagccauucag

SEQ ID NO: 833313 - RNA, 19 nt, Homo sapiens
  misc_RNA (1)...(19): siRNA sense strand
accaagaggugaugaagca

SEQ ID NO: 833314 - RNA, 19 nt, Homo sapiens
  misc_RNA (1)...(19): siRNA sense strand
caaggucaaggccaacuga

SEQ ID NO: 833315 - RNA, 19 nt, Homo sapiens
  misc_RNA (1)...(19): siRNA sense strand
ccgugcaugucauaaugua

SEQ ID NO: 833316 - RNA, 19 nt, Homo sapiens
  misc_RNA (1)...(19): siRNA sense strand
ucacuugggccucgcauca

SEQ ID NO: 833317 - RNA, 19 nt, Homo sapiens
  misc_RNA (1)...(19): siRNA sense strand
cgggaggaaugggcucuuu

SEQ ID NO: 833318 - RNA, 19 nt, Homo sapiens
  misc_RNA (1)...(19): siRNA sense strand
uacuuuauguccagcugua

SEQ ID NO: 833319 - RNA, 19 nt, Homo sapiens
  misc_RNA (1)...(19): siRNA sense strand
ggaggcuguugugaacuug

SEQ ID NO: 833320 - RNA, 19 nt, Homo sapiens
  misc_RNA (1)...(19): siRNA sense strand
ucuaugaguuccugauguc

SEQ ID NO: 833321 - RNA, 19 nt, Homo sapiens
  misc_RNA (1)...(19): siRNA sense strand
uaccaguacccagucauua

SEQ ID NO: 833322 - RNA, 19 nt, Homo sapiens
  misc_RNA (1)...(19): siRNA sense strand
ccaaguucauugagcugau

SEQ ID NO: 833323 - RNA, 19 nt, Homo sapiens
  misc_RNA (1)...(19): siRNA sense strand
ccagcuccguggcuucaug

SEQ ID NO: 833324 - RNA, 19 nt, Homo sapiens
  misc_RNA (1)...(19): siRNA sense strand
cuucugguaucacucuuau

SEQ ID NO: 833325 - RNA, 19 nt, Homo sapiens
  misc_RNA (1)...(19): siRNA sense strand
uggacacagugaucuuuau

SEQ ID NO: 833326 - RNA, 19 nt, Homo sapiens
  misc_RNA (1)...(19): siRNA sense strand
ggcacucucccucuacauu

SEQ ID NO: 833327 - RNA, 19 nt, Homo sapiens
  misc_RNA (1)...(19): siRNA sense strand
caacuucugguaucacucu

SEQ ID NO: 833328 - RNA, 19 nt, Homo sapiens
  misc_RNA (1)...(19): siRNA sense strand
uggcacaacccuaccuuug

SEQ ID NO: 833329 - RNA, 19 nt, Homo sapiens
  misc_RNA (1)...(19): siRNA sense strand
cuacggauuaucugccuuu

SEQ ID NO: 833330 - RNA, 19 nt, Homo sapiens
  misc_RNA (1)...(19): siRNA sense strand
ccuccauucuccugaccua

SEQ ID NO: 833331 - RNA, 19 nt, Homo sapiens
  misc_RNA (1)...(19): siRNA sense strand
cuacauugucuaugaguuc

SEQ ID NO: 833332 - RNA, 19 nt, Homo sapiens
  misc_RNA (1)...(19): siRNA sense strand
cccucuacauugucuauga

SEQ ID NO: 833333 - RNA, 19 nt, Homo sapiens
  misc_RNA (1)...(19): siRNA sense strand
uuauucaccucaucuggau

SEQ ID NO: 833334 - RNA, 19 nt, Homo sapiens
  misc_RNA (1)...(19): siRNA sense strand
aggcuguugugaacuugua

SEQ ID NO: 833335 - RNA, 19 nt, Homo sapiens
  misc_RNA (1)...(19): siRNA sense strand
gugacccuguggacuauuc

SEQ ID NO: 833336 - RNA, 19 nt, Homo sapiens
  misc_RNA (1)...(19): siRNA sense strand
ugaccuacguguacuucgu

SEQ ID NO: 833337 - RNA, 19 nt, Homo sapiens
  misc_RNA (1)...(19): siRNA sense strand
gacacagugaucuuuauuc

SEQ ID NO: 833338 - RNA, 19 nt, Homo sapiens
  misc_RNA (1)...(19): siRNA sense strand
gaccuacguguacuucguu

SEQ ID NO: 833339 - RNA, 19 nt, Homo sapiens
  misc_RNA (1)...(19): siRNA sense strand
gcuccguggcuucaugauu

SEQ ID NO: 833340 - RNA, 19 nt, Homo sapiens
  misc_RNA (1)...(19): siRNA sense strand
gcugauggacacagugauc

SEQ ID NO: 833341 - RNA, 19 nt, Homo sapiens
  misc_RNA (1)...(19): siRNA sense strand
gucuaugaguuccugaugu

SEQ ID NO: 833342 - RNA, 19 nt, Homo sapiens
  misc_RNA (1)...(19): siRNA sense strand
cuaccaguacccagucauu

SEQ ID NO: 833343 - RNA, 19 nt, Homo sapiens
  misc_RNA (1)...(19): siRNA sense strand
uggccuggcucuuccucuu

SEQ ID NO: 833344 - RNA, 19 nt, Homo sapiens
  misc_RNA (1)...(19): siRNA sense strand
ccagcuguaacuaccagua

SEQ ID NO: 833345 - RNA, 19 nt, Homo sapiens
  misc_RNA (1)...(19): siRNA sense strand
aacccuaccuuugguggaa

SEQ ID NO: 833346 - RNA, 19 nt, Homo sapiens
  misc_RNA (1)...(19): siRNA sense strand
gcagugagaugcugguaaa

SEQ ID NO: 833347 - RNA, 19 nt, Homo sapiens
  misc_RNA (1)...(19): siRNA sense strand
cugaggagguggaauauua

SEQ ID NO: 833348 - RNA, 19 nt, Homo sapiens
  misc_RNA (1)...(19): siRNA sense strand
gugagaugcugguaaagaa

SEQ ID NO: 833349 - RNA, 19 nt, Homo sapiens
  misc_RNA (1)...(19): siRNA sense strand
ccaaagacacacuggauga

SEQ ID NO: 833350 - RNA, 19 nt, Homo sapiens
  misc_RNA (1)...(19): siRNA sense strand
ggagguggaauauuacuau

SEQ ID NO: 833351 - RNA, 19 nt, Homo sapiens
  misc_RNA (1)...(19): siRNA sense strand
ugguagaacugcugaaaga

SEQ ID NO: 833352 - RNA, 19 nt, Homo sapiens
  misc_RNA (1)...(19): siRNA sense strand
gggaggaaagcaaggauaa

SEQ ID NO: 833353 - RNA, 19 nt, Homo sapiens
  misc_RNA (1)...(19): siRNA sense strand
gaguuuggcucugucaaug

SEQ ID NO: 833354 - RNA, 19 nt, Homo sapiens
  misc_RNA (1)...(19): siRNA sense strand
gcacuggagaucuaugcua

SEQ ID NO: 833355 - RNA, 19 nt, Homo sapiens
  misc_RNA (1)...(19): siRNA sense strand
gcaagcaggcacucgaaga

SEQ ID NO: 833356 - RNA, 19 nt, Homo sapiens
  misc_RNA (1)...(19): siRNA sense strand
caaccuggcaguccuguau

SEQ ID NO: 833357 - RNA, 19 nt, Homo sapiens
  misc_RNA (1)...(19): siRNA sense strand
gaagguccugggcaaguuu

SEQ ID NO: 833358 - RNA, 19 nt, Homo sapiens
  misc_RNA (1)...(19): siRNA sense strand
ggaugugucuggucagcau

SEQ ID NO: 833359 - RNA, 19 nt, Homo sapiens
  misc_RNA (1)...(19): siRNA sense strand
guagaacugcugaaagaug

SEQ ID NO: 833360 - RNA, 19 nt, Homo sapiens
  misc_RNA (1)...(19): siRNA sense strand
caggugaucuuggcauugu

SEQ ID NO: 833361 - RNA, 19 nt, Homo sapiens
  misc_RNA (1)...(19): siRNA sense strand
aagcugaggagguggaaua

SEQ ID NO: 833362 - RNA, 19 nt, Homo sapiens
  misc_RNA (1)...(19): siRNA sense strand
acaaccuggugauccaaua

SEQ ID NO: 833363 - RNA, 19 nt, Homo sapiens
  misc_RNA (1)...(19): siRNA sense strand
ucgaagaccuggagaagac

SEQ ID NO: 833364 - RNA, 19 nt, Homo sapiens
  misc_RNA (1)...(19): siRNA sense strand
gggcaaguuucacccagau

SEQ ID NO: 833365 - RNA, 19 nt, Homo sapiens
  misc_RNA (1)...(19): siRNA sense strand
gcaaguuucacccagaugu

SEQ ID NO: 833366 - RNA, 19 nt, Homo sapiens
  misc_RNA (1)...(19): siRNA sense strand
gggaucagaacaaguacaa

SEQ ID NO: 833367 - RNA, 19 nt, Homo sapiens
  misc_RNA (1)...(19): siRNA sense strand
cugcccaccugcucaauga

SEQ ID NO: 833368 - RNA, 19 nt, Homo sapiens
  misc_RNA (1)...(19): siRNA sense strand
gagguggaauauuacuauc

SEQ ID NO: 833369 - RNA, 19 nt, Homo sapiens
  misc_RNA (1)...(19): siRNA sense strand
gggaauacggcagcuggua

SEQ ID NO: 833370 - RNA, 19 nt, Homo sapiens
  misc_RNA (1)...(19): siRNA sense strand
acaacaagcccaucuggau

SEQ ID NO: 833371 - RNA, 19 nt, Homo sapiens
  misc_RNA (1)...(19): siRNA sense strand
gcaccaaggcugucaucca

SEQ ID NO: 833372 - RNA, 19 nt, Homo sapiens
  misc_RNA (1)...(19): siRNA sense strand
gaauacggcagcugguaca

SEQ ID NO: 833373 - RNA, 19 nt, Homo sapiens
  misc_RNA (1)...(19): siRNA sense strand
cacacuggaugaccuguuc

SEQ ID NO: 833374 - RNA, 19 nt, Homo sapiens
  misc_RNA (1)...(19): siRNA sense strand
ucaacaagagcguggaaga

SEQ ID NO: 833375 - RNA, 19 nt, Homo sapiens
  misc_RNA (1)...(19): siRNA sense strand
ccugcuggcuccucugguu

SEQ ID NO: 833376 - RNA, 19 nt, Homo sapiens
  misc_RNA (1)...(19): siRNA sense strand
ucaacuuccucaacaagag

SEQ ID NO: 833377 - RNA, 19 nt, Homo sapiens
  misc_RNA (1)...(19): siRNA sense strand
agaagguccugggcaaguu

SEQ ID NO: 833378 - RNA, 19 nt, Homo sapiens
  misc_RNA (1)...(19): siRNA sense strand
gagaagguccugggcaagu

SEQ ID NO: 833379 - RNA, 19 nt, Homo sapiens
  misc_RNA (1)...(19): siRNA sense strand
ccaagcagcucagcaaccu

SEQ ID NO: 833380 - RNA, 19 nt, Homo sapiens
  misc_RNA (1)...(19): siRNA sense strand
gaccuacagcugaguggaa

SEQ ID NO: 833381 - RNA, 19 nt, Homo sapiens
  misc_RNA (1)...(19): siRNA sense strand
cagaggagcgggaggaaag

SEQ ID NO: 833382 - RNA, 19 nt, Homo sapiens
  misc_RNA (1)...(19): siRNA sense strand
gcagaggagcgggaggaaa

SEQ ID NO: 833383 - RNA, 19 nt, Homo sapiens
  misc_RNA (1)...(19): siRNA sense strand
ugagccagauccgcaaguu

SEQ ID NO: 833384 - RNA, 19 nt, Homo sapiens
  misc_RNA (1)...(19): siRNA sense strand
ggugguagaacugcugaaa

SEQ ID NO: 833385 - RNA, 19 nt, Homo sapiens
  misc_RNA (1)...(19): siRNA sense strand
ccacgaccacccugacguu

SEQ ID NO: 833386 - RNA, 19 nt, Homo sapiens
  misc_RNA (1)...(19): siRNA sense strand
gcaguccuguauggcaaga

SEQ ID NO: 833387 - RNA, 19 nt, Homo sapiens
  misc_RNA (1)...(19): siRNA sense strand
uagaaucagagaagcagaa

SEQ ID NO: 833388 - RNA, 19 nt, Homo sapiens
  misc_RNA (1)...(19): siRNA sense strand
caacaagagcguggaagag

SEQ ID NO: 833389 - RNA, 19 nt, Homo sapiens
  misc_RNA (1)...(19): siRNA sense strand
ccaauguggccaagaccaa

SEQ ID NO: 833390 - RNA, 19 nt, Homo sapiens
  misc_RNA (1)...(19): siRNA sense strand
ucugacagccgcacucuca

SEQ ID NO: 833391 - RNA, 19 nt, Homo sapiens
  misc_RNA (1)...(19): siRNA sense strand
gcgcucaugagaaagaguu

SEQ ID NO: 833392 - RNA, 19 nt, Homo sapiens
  misc_RNA (1)...(19): siRNA sense strand
gagccagauccgcaaguug

SEQ ID NO: 833393 - RNA, 19 nt, Homo sapiens
  misc_RNA (1)...(19): siRNA sense strand
ucccucaacuuccucaaca

SEQ ID NO: 833394 - RNA, 19 nt, Homo sapiens
  misc_RNA (1)...(19): siRNA sense strand
guagacagccccacaguca

SEQ ID NO: 833395 - RNA, 19 nt, Homo sapiens
  misc_RNA (1)...(19): siRNA sense strand
ggaggagaagcagcacuug

SEQ ID NO: 833396 - RNA, 19 nt, Homo sapiens
  misc_RNA (1)...(19): siRNA sense strand
cccaggugaucuuggcauu

SEQ ID NO: 833397 - RNA, 19 nt, Homo sapiens
  misc_RNA (1)...(19): siRNA sense strand
gaggcgcagcgguuccuuu

SEQ ID NO: 833398 - RNA, 19 nt, Homo sapiens
  misc_RNA (1)...(19): siRNA sense strand
gaagacgccuccccuaacg

SEQ ID NO: 833399 - RNA, 19 nt, Homo sapiens
  misc_RNA (1)...(19): siRNA sense strand
gcacacacuagaggacugu

SEQ ID NO: 833400 - RNA, 19 nt, Homo sapiens
  misc_RNA (1)...(19): siRNA sense strand
gaggaaagcaaggauaagc

SEQ ID NO: 833401 - RNA, 19 nt, Homo sapiens
  misc_RNA (1)...(19): siRNA sense strand
gcaagcgggcacuggagau

SEQ ID NO: 833402 - RNA, 19 nt, Homo sapiens
  misc_RNA (1)...(19): siRNA sense strand
uggccaagaccaagaacaa

SEQ ID NO: 833403 - RNA, 19 nt, Homo sapiens
  misc_RNA (1)...(19): siRNA sense strand
gauggcaguggcuccuuga

SEQ ID NO: 833404 - RNA, 19 nt, Homo sapiens
  misc_RNA (1)...(19): siRNA sense strand
gcacaaccuggugauccaa

SEQ ID NO: 833405 - RNA, 19 nt, Homo sapiens
  misc_RNA (1)...(19): siRNA sense strand
gcagggcaaguaccaggau

SEQ ID NO: 833406 - RNA, 19 nt, Homo sapiens
  misc_RNA (1)...(19): siRNA sense strand
gcaagaggggcaaguacaa

SEQ ID NO: 833407 - RNA, 19 nt, Homo sapiens
  misc_RNA (1)...(19): siRNA sense strand
caugugggcugcuguaauu

SEQ ID NO: 833408 - RNA, 19 nt, Homo sapiens
  misc_RNA (1)...(19): siRNA sense strand
gacaaugacuccaacaaca

SEQ ID NO: 833409 - RNA, 19 nt, Homo sapiens
  misc_RNA (1)...(19): siRNA sense strand
gucauuggcuacuccauuu

SEQ ID NO: 833410 - RNA, 19 nt, Homo sapiens
  misc_RNA (1)...(19): siRNA sense strand
gggaaguggucaucauugu

SEQ ID NO: 833411 - RNA, 19 nt, Homo sapiens
  misc_RNA (1)...(19): siRNA sense strand
gacggucacucaccucaga

SEQ ID NO: 833412 - RNA, 19 nt, Homo sapiens
  misc_RNA (1)...(19): siRNA sense strand
ccaagcggaugccacaguu

SEQ ID NO: 833413 - RNA, 19 nt, Homo sapiens
  misc_RNA (1)...(19): siRNA sense strand
gaaggcaacaucgucauug

SEQ ID NO: 833414 - RNA, 19 nt, Homo sapiens
  misc_RNA (1)...(19): siRNA sense strand
gggccuggcugaagacagu

SEQ ID NO: 833415 - RNA, 19 nt, Homo sapiens
  misc_RNA (1)...(19): siRNA sense strand
ugaagacagugacuacaca

SEQ ID NO: 833416 - RNA, 19 nt, Homo sapiens
  misc_RNA (1)...(19): siRNA sense strand
caacaccaucgacguuuga

SEQ ID NO: 833417 - RNA, 19 nt, Homo sapiens
  misc_RNA (1)...(19): siRNA sense strand
ggacaaugacuccaacaac

SEQ ID NO: 833418 - RNA, 19 nt, Homo sapiens
  misc_RNA (1)...(19): siRNA sense strand
acaacaaucccaaggagaa

SEQ ID NO: 833419 - RNA, 19 nt, Homo sapiens
  misc_RNA (1)...(19): siRNA sense strand
ucaacaccaucgacguuug

SEQ ID NO: 833420 - RNA, 19 nt, Homo sapiens
  misc_RNA (1)...(19): siRNA sense strand
ggaaguggucaucauugug

SEQ ID NO: 833421 - RNA, 19 nt, Homo sapiens
  misc_RNA (1)...(19): siRNA sense strand
gggcuguucugccgucagu

SEQ ID NO: 833422 - RNA, 19 nt, Homo sapiens
  misc_RNA (1)...(19): siRNA sense strand
gcucaugugggcugcugua

SEQ ID NO: 833423 - RNA, 19 nt, Homo sapiens
  misc_RNA (1)...(19): siRNA sense strand
uaucaacaccaucgacguu

SEQ ID NO: 833424 - RNA, 19 nt, Homo sapiens
  misc_RNA (1)...(19): siRNA sense strand
acaaugacuccaacaacaa

SEQ ID NO: 833425 - RNA, 19 nt, Homo sapiens
  misc_RNA (1)...(19): siRNA sense strand
caaugacuccaacaacaau

SEQ ID NO: 833426 - RNA, 19 nt, Homo sapiens
  misc_RNA (1)...(19): siRNA sense strand
caccaucuaucaacaccau

SEQ ID NO: 833427 - RNA, 19 nt, Homo sapiens
  misc_RNA (1)...(19): siRNA sense strand
cggcuaccuucaaacaguu

SEQ ID NO: 833428 - RNA, 19 nt, Homo sapiens
  misc_RNA (1)...(19): siRNA sense strand
ccaacaacaaucccaagga

SEQ ID NO: 833429 - RNA, 19 nt, Homo sapiens
  misc_RNA (1)...(19): siRNA sense strand
ccggcuaccuucaaacagu

SEQ ID NO: 833430 - RNA, 19 nt, Homo sapiens
  misc_RNA (1)...(19): siRNA sense strand
ucaaggacaaugacuccaa

SEQ ID NO: 833431 - RNA, 19 nt, Homo sapiens
  misc_RNA (1)...(19): siRNA sense strand
guggugguguugcucaugu

SEQ ID NO: 833432 - RNA, 19 nt, Homo sapiens
  misc_RNA (1)...(19): siRNA sense strand
gaccggcuaccuucaaaca

SEQ ID NO: 833433 - RNA, 19 nt, Homo sapiens
  misc_RNA (1)...(19): siRNA sense strand
gcuguucugccgucaguau

SEQ ID NO: 833434 - RNA, 19 nt, Homo sapiens
  misc_RNA (1)...(19): siRNA sense strand
cgucauuggcuacuccauu

SEQ ID NO: 833435 - RNA, 19 nt, Homo sapiens
  misc_RNA (1)...(19): siRNA sense strand
agaaggcaacaucgucauu

SEQ ID NO: 833436 - RNA, 19 nt, Homo sapiens
  misc_RNA (1)...(19): siRNA sense strand
cugaccggcuaccuucaaa

SEQ ID NO: 833437 - RNA, 19 nt, Homo sapiens
  misc_RNA (1)...(19): siRNA sense strand
gagccaacucggccacugu

SEQ ID NO: 833438 - RNA, 19 nt, Homo sapiens
  misc_RNA (1)...(19): siRNA sense strand
cuacuccauuucccagcaa

SEQ ID NO: 833439 - RNA, 19 nt, Homo sapiens
  misc_RNA (1)...(19): siRNA sense strand
gcacuuccgaacucucaag

SEQ ID NO: 833440 - RNA, 19 nt, Homo sapiens
  misc_RNA (1)...(19): siRNA sense strand
ggagaaggaucaccuggaa

SEQ ID NO: 833441 - RNA, 19 nt, Homo sapiens
  misc_RNA (1)...(19): siRNA sense strand
gaucuucuaccgucucaua

SEQ ID NO: 833442 - RNA, 19 nt, Homo sapiens
  misc_RNA (1)...(19): siRNA sense strand
ggaaccugcccaugucuua

SEQ ID NO: 833443 - RNA, 19 nt, Homo sapiens
  misc_RNA (1)...(19): siRNA sense strand
ggauauccuuccacagcua

SEQ ID NO: 833444 - RNA, 19 nt, Homo sapiens
  misc_RNA (1)...(19): siRNA sense strand
ucacuuacguggagcaugu

SEQ ID NO: 833445 - RNA, 19 nt, Homo sapiens
  misc_RNA (1)...(19): siRNA sense strand
ggugcgagccuuaaacuug

SEQ ID NO: 833446 - RNA, 19 nt, Homo sapiens
  misc_RNA (1)...(19): siRNA sense strand
gccuuaaacuugcucuuug

SEQ ID NO: 833447 - RNA, 19 nt, Homo sapiens
  misc_RNA (1)...(19): siRNA sense strand
ggucaaugguggaaguugu

SEQ ID NO: 833448 - RNA, 19 nt, Homo sapiens
  misc_RNA (1)...(19): siRNA sense strand
cuacauggcuucaguuucc

SEQ ID NO: 833449 - RNA, 19 nt, Homo sapiens
  misc_RNA (1)...(19): siRNA sense strand
gcuggaaccugcccauguc

SEQ ID NO: 833450 - RNA, 19 nt, Homo sapiens
  misc_RNA (1)...(19): siRNA sense strand
uaccugggcucccuguuug

SEQ ID NO: 833451 - RNA, 19 nt, Homo sapiens
  misc_RNA (1)...(19): siRNA sense strand
ggagcugccucggucaaug

SEQ ID NO: 833452 - RNA, 19 nt, Homo sapiens
  misc_RNA (1)...(19): siRNA sense strand
ggcauacacuguccacaag

SEQ ID NO: 833453 - RNA, 19 nt, Homo sapiens
  misc_RNA (1)...(19): siRNA sense strand
cggcugugcuggucaccua

SEQ ID NO: 833454 - RNA, 19 nt, Homo sapiens
  misc_RNA (1)...(19): siRNA sense strand
gugccugugucuugucaaa

SEQ ID NO: 833455 - RNA, 19 nt, Homo sapiens
  misc_RNA (1)...(19): siRNA sense strand
uuccacagcuaccuacaaa

SEQ ID NO: 833456 - RNA, 19 nt, Homo sapiens
  misc_RNA (1)...(19): siRNA sense strand
gcagggccuugaccagauc

SEQ ID NO: 833457 - RNA, 19 nt, Homo sapiens
  misc_RNA (1)...(19): siRNA sense strand
agaaggaucaccuggaaug

SEQ ID NO: 833458 - RNA, 19 nt, Homo sapiens
  misc_RNA (1)...(19): siRNA sense strand
ccucagugccugugucuug

SEQ ID NO: 833459 - RNA, 19 nt, Homo sapiens
  misc_RNA (1)...(19): siRNA sense strand
gccuugugcuguccacuug

SEQ ID NO: 833460 - RNA, 19 nt, Homo sapiens
  misc_RNA (1)...(19): siRNA sense strand
caucgaggcgucuuccuau

SEQ ID NO: 833461 - RNA, 19 nt, Homo sapiens
  misc_RNA (1)...(19): siRNA sense strand
gaaccugcccaugucuuau

SEQ ID NO: 833462 - RNA, 19 nt, Homo sapiens
  misc_RNA (1)...(19): siRNA sense strand
ccacagcuaccuacaaacu

SEQ ID NO: 833463 - RNA, 19 nt, Homo sapiens
  misc_RNA (1)...(19): siRNA sense strand
cuaccugggcucccuguuu

SEQ ID NO: 833464 - RNA, 19 nt, Homo sapiens
  misc_RNA (1)...(19): siRNA sense strand
ccucaucuaccuacucaug

SEQ ID NO: 833465 - RNA, 19 nt, Homo sapiens
  misc_RNA (1)...(19): siRNA sense strand
gcugcgagccuacgagagu

SEQ ID NO: 833466 - RNA, 19 nt, Homo sapiens
  misc_RNA (1)...(19): siRNA sense strand
guucaugggcuaccucuac

SEQ ID NO: 833467 - RNA, 19 nt, Homo sapiens
  misc_RNA (1)...(19): siRNA sense strand
ccaucgaggcgucuuccua

SEQ ID NO: 833468 - RNA, 19 nt, Homo sapiens
  misc_RNA (1)...(19): siRNA sense strand
uguccaagccacugaaugu

SEQ ID NO: 833469 - RNA, 19 nt, Homo sapiens
  misc_RNA (1)...(19): siRNA sense strand
ccuccuacauggcuucagu

SEQ ID NO: 833470 - RNA, 19 nt, Homo sapiens
  misc_RNA (1)...(19): siRNA sense strand
ugugcuaccucgugcuguu

SEQ ID NO: 833471 - RNA, 19 nt, Homo sapiens
  misc_RNA (1)...(19): siRNA sense strand
uggcauacacuguccacaa

SEQ ID NO: 833472 - RNA, 19 nt, Homo sapiens
  misc_RNA (1)...(19): siRNA sense strand
gcugucuccuuccacuuca

SEQ ID NO: 833473 - RNA, 19 nt, Homo sapiens
  misc_RNA (1)...(19): siRNA sense strand
ugggugagaugcacauggu

SEQ ID NO: 833474 - RNA, 19 nt, Homo sapiens
  misc_RNA (1)...(19): siRNA sense strand
ccuuaaacuugcucuuugg

SEQ ID NO: 833475 - RNA, 19 nt, Homo sapiens
  misc_RNA (1)...(19): siRNA sense strand
gagaugcacaugguagaca

SEQ ID NO: 833476 - RNA, 19 nt, Homo sapiens
  misc_RNA (1)...(19): siRNA sense strand
gagaaggaucaccuggaau

SEQ ID NO: 833477 - RNA, 19 nt, Homo sapiens
  misc_RNA (1)...(19): siRNA sense strand
gagcugccucggucaaugg

SEQ ID NO: 833478 - RNA, 19 nt, Homo sapiens
  misc_RNA (1)...(19): siRNA sense strand
gaaggaucaccuggaaugg

SEQ ID NO: 833479 - RNA, 19 nt, Homo sapiens
  misc_RNA (1)...(19): siRNA sense strand
ccuguuugaugucgaugug

SEQ ID NO: 833480 - RNA, 19 nt, Homo sapiens
  misc_RNA (1)...(19): siRNA sense strand
uuggagcucuggccaucuu

SEQ ID NO: 833481 - RNA, 19 nt, Homo sapiens
  misc_RNA (1)...(19): siRNA sense strand
gaacaaagcuuuucugaua

SEQ ID NO: 833482 - RNA, 19 nt, Homo sapiens
  misc_RNA (1)...(19): siRNA sense strand
gaaggugacuuauguagaa

SEQ ID NO: 833483 - RNA, 19 nt, Homo sapiens
  misc_RNA (1)...(19): siRNA sense strand
gaauucagcugaugguaaa

SEQ ID NO: 833484 - RNA, 19 nt, Homo sapiens
  misc_RNA (1)...(19): siRNA sense strand
gaacagacuuaaugagaga

SEQ ID NO: 833485 - RNA, 19 nt, Homo sapiens
  misc_RNA (1)...(19): siRNA sense strand
gaacaucagaccauacuaa

SEQ ID NO: 833486 - RNA, 19 nt, Homo sapiens
  misc_RNA (1)...(19): siRNA sense strand
uaacucugguucuucauua

SEQ ID NO: 833487 - RNA, 19 nt, Homo sapiens
  misc_RNA (1)...(19): siRNA sense strand
guacuuggaucauuuggaa

SEQ ID NO: 833488 - RNA, 19 nt, Homo sapiens
  misc_RNA (1)...(19): siRNA sense strand
ccaagaaucugaagguaga

SEQ ID NO: 833489 - RNA, 19 nt, Homo sapiens
  misc_RNA (1)...(19): siRNA sense strand
caagaucauugaauucuga

SEQ ID NO: 833490 - RNA, 19 nt, Homo sapiens
  misc_RNA (1)...(19): siRNA sense strand
ggaaaugguuuaaacacau

SEQ ID NO: 833491 - RNA, 19 nt, Homo sapiens
  misc_RNA (1)...(19): siRNA sense strand
acacguguccgauuuauua

SEQ ID NO: 833492 - RNA, 19 nt, Homo sapiens
  misc_RNA (1)...(19): siRNA sense strand
aaagagaaguuggagcuua

SEQ ID NO: 833493 - RNA, 19 nt, Homo sapiens
  misc_RNA (1)...(19): siRNA sense strand
agaagaaggugacuuaugu

SEQ ID NO: 833494 - RNA, 19 nt, Homo sapiens
  misc_RNA (1)...(19): siRNA sense strand
gaacagauuccucuauuag

SEQ ID NO: 833495 - RNA, 19 nt, Homo sapiens
  misc_RNA (1)...(19): siRNA sense strand
agacagaguuccuucauau

SEQ ID NO: 833496 - RNA, 19 nt, Homo sapiens
  misc_RNA (1)...(19): siRNA sense strand
caaagaccauuucaagaau

SEQ ID NO: 833497 - RNA, 19 nt, Homo sapiens
  misc_RNA (1)...(19): siRNA sense strand
agaaauagaugcacaccuu

SEQ ID NO: 833498 - RNA, 19 nt, Homo sapiens
  misc_RNA (1)...(19): siRNA sense strand
gcaacgggaucaugauuca

SEQ ID NO: 833499 - RNA, 19 nt, Homo sapiens
  misc_RNA (1)...(19): siRNA sense strand
caagagauccagaaagauu

SEQ ID NO: 833500 - RNA, 19 nt, Homo sapiens
  misc_RNA (1)...(19): siRNA sense strand
acagauuccucuauuagua

SEQ ID NO: 833501 - RNA, 19 nt, Homo sapiens
  misc_RNA (1)...(19): siRNA sense strand
ggagaaauguuggaaaugg

SEQ ID NO: 833502 - RNA, 19 nt, Homo sapiens
  misc_RNA (1)...(19): siRNA sense strand
gaggagagauuuggagaga

SEQ ID NO: 833503 - RNA, 19 nt, Homo sapiens
  misc_RNA (1)...(19): siRNA sense strand
ucaaagaccauuucaagaa

SEQ ID NO: 833504 - RNA, 19 nt, Homo sapiens
  misc_RNA (1)...(19): siRNA sense strand
gaccuaaacuuuccuguac

SEQ ID NO: 833505 - RNA, 19 nt, Homo sapiens
  misc_RNA (1)...(19): siRNA sense strand
acauagagcucaugcaaau

SEQ ID NO: 833506 - RNA, 19 nt, Homo sapiens
  misc_RNA (1)...(19): siRNA sense strand
uggaagaaauacaggaaua

SEQ ID NO: 833507 - RNA, 19 nt, Homo sapiens
  misc_RNA (1)...(19): siRNA sense strand
agaagaagaaggugacuua

SEQ ID NO: 833508 - RNA, 19 nt, Homo sapiens
  misc_RNA (1)...(19): siRNA sense strand
caaaugaacaagcugagua

SEQ ID NO: 833509 - RNA, 19 nt, Homo sapiens
  misc_RNA (1)...(19): siRNA sense strand
agaacagauuccucuauua

SEQ ID NO: 833510 - RNA, 19 nt, Homo sapiens
  misc_RNA (1)...(19): siRNA sense strand
gcacaggaaguuugcagua

SEQ ID NO: 833511 - RNA, 19 nt, Homo sapiens
  misc_RNA (1)...(19): siRNA sense strand
ggaauucagcugaugguaa

SEQ ID NO: 833512 - RNA, 19 nt, Homo sapiens
  misc_RNA (1)...(19): siRNA sense strand
ggagagauuuggagagaag

SEQ ID NO: 833513 - RNA, 19 nt, Homo sapiens
  misc_RNA (1)...(19): siRNA sense strand
gaugggaaauacaaaugaa

SEQ ID NO: 833514 - RNA, 19 nt, Homo sapiens
  misc_RNA (1)...(19): siRNA sense strand
ggacucagaagaagaagaa

SEQ ID NO: 833515 - RNA, 19 nt, Homo sapiens
  misc_RNA (1)...(19): siRNA sense strand
gcacuugggaguaauuuga

SEQ ID NO: 833516 - RNA, 19 nt, Homo sapiens
  misc_RNA (1)...(19): siRNA sense strand
ggaguaauuugaccgacaa

SEQ ID NO: 833517 - RNA, 19 nt, Homo sapiens
  misc_RNA (1)...(19): siRNA sense strand
cauaacaggacauuugaua

SEQ ID NO: 833518 - RNA, 19 nt, Homo sapiens
  misc_RNA (1)...(19): siRNA sense strand
gaccauaacaggacauuug

SEQ ID NO: 833519 - RNA, 19 nt, Homo sapiens
  misc_RNA (1)...(19): siRNA sense strand
gaagaacagauuccucuau

SEQ ID NO: 833520 - RNA, 19 nt, Homo sapiens
  misc_RNA (1)...(19): siRNA sense strand
gaagaagacggagaccaua

SEQ ID NO: 833521 - RNA, 19 nt, Homo sapiens
  misc_RNA (1)...(19): siRNA sense strand
gcucaagguggaagaaaua

SEQ ID NO: 833522 - RNA, 19 nt, Homo sapiens
  misc_RNA (1)...(19): siRNA sense strand
gcaauacgcagccuggauu

SEQ ID NO: 833523 - RNA, 19 nt, Homo sapiens
  misc_RNA (1)...(19): siRNA sense strand
ggaagcagaggaaguaguu

SEQ ID NO: 833524 - RNA, 19 nt, Homo sapiens
  misc_RNA (1)...(19): siRNA sense strand
ggugacuuauguagaauuu

SEQ ID NO: 833525 - RNA, 19 nt, Homo sapiens
  misc_RNA (1)...(19): siRNA sense strand
gaagguaggcggacaacga

SEQ ID NO: 833526 - RNA, 19 nt, Homo sapiens
  misc_RNA (1)...(19): siRNA sense strand
caucagaccauacuaaguu

SEQ ID NO: 833527 - RNA, 19 nt, Homo sapiens
  misc_RNA (1)...(19): siRNA sense strand
ccaauugccuucugaacau

SEQ ID NO: 833528 - RNA, 19 nt, Homo sapiens
  misc_RNA (1)...(19): siRNA sense strand
aagaacagauuccucuauu

SEQ ID NO: 833529 - RNA, 19 nt, Homo sapiens
  misc_RNA (1)...(19): siRNA sense strand
gaagaaggugacuuaugua

SEQ ID NO: 833530 - RNA, 19 nt, Homo sapiens
  misc_RNA (1)...(19): siRNA sense strand
ccagaaagauugcagaaaa

SEQ ID NO: 833531 - RNA, 19 nt, Homo sapiens
  misc_RNA (1)...(19): siRNA sense strand
aaugagcacuuuacaguug

SEQ ID NO: 833532 - RNA, 19 nt, Homo sapiens
  misc_RNA (1)...(19): siRNA sense strand
gcacacguguccgauuuau

SEQ ID NO: 833533 - RNA, 19 nt, Homo sapiens
  misc_RNA (1)...(19): siRNA sense strand
gaggaaguaguuuaaauga

SEQ ID NO: 833534 - RNA, 19 nt, Homo sapiens
  misc_RNA (1)...(19): siRNA sense strand
cagaggaaguaguuuaaau

SEQ ID NO: 833535 - RNA, 19 nt, Homo sapiens
  misc_RNA (1)...(19): siRNA sense strand
gcacaccuuuguucucuag

SEQ ID NO: 833536 - RNA, 19 nt, Homo sapiens
  misc_RNA (1)...(19): siRNA sense strand
gaaucugaagguagaaaua

SEQ ID NO: 833537 - RNA, 19 nt, Homo sapiens
  misc_RNA (1)...(19): siRNA sense strand
aagagaaguuggagcuuaa

SEQ ID NO: 833538 - RNA, 19 nt, Homo sapiens
  misc_RNA (1)...(19): siRNA sense strand
ccaccaagacuguaugaaa

SEQ ID NO: 833539 - RNA, 19 nt, Homo sapiens
  misc_RNA (1)...(19): siRNA sense strand
gcagcugcaucaucaucua

SEQ ID NO: 833540 - RNA, 19 nt, Homo sapiens
  misc_RNA (1)...(19): siRNA sense strand
gaaauagaugcacaccuuu

SEQ ID NO: 833541 - RNA, 19 nt, Homo sapiens
  misc_RNA (1)...(19): siRNA sense strand
gaagaucuagucaggauuc

SEQ ID NO: 833542 - RNA, 19 nt, Homo sapiens
  misc_RNA (1)...(19): siRNA sense strand
gacauuugauauugccuaa

SEQ ID NO: 833543 - RNA, 19 nt, Homo sapiens
  misc_RNA (1)...(19): siRNA sense strand
ucucuuagccacaaucaua

SEQ ID NO: 833544 - RNA, 19 nt, Homo sapiens
  misc_RNA (1)...(19): siRNA sense strand
aagcacacguguccgauuu

SEQ ID NO: 833545 - RNA, 19 nt, Homo sapiens
  misc_RNA (1)...(19): siRNA sense strand
caacagaccacaagcaucu

SEQ ID NO: 833546 - RNA, 19 nt, Homo sapiens
  misc_RNA (1)...(19): siRNA sense strand
gauaugaugggaaauacaa

SEQ ID NO: 833547 - RNA, 19 nt, Homo sapiens
  misc_RNA (1)...(19): siRNA sense strand
guaaccaccugugaacuau

SEQ ID NO: 833548 - RNA, 19 nt, Homo sapiens
  misc_RNA (1)...(19): siRNA sense strand
gauucuuccugguuccuua

SEQ ID NO: 833549 - RNA, 19 nt, Homo sapiens
  misc_RNA (1)...(19): siRNA sense strand
acaagcaucugcagcauca

SEQ ID NO: 833550 - RNA, 19 nt, Homo sapiens
  misc_RNA (1)...(19): siRNA sense strand
agaaucaaaugaagugguu

SEQ ID NO: 833551 - RNA, 19 nt, Homo sapiens
  misc_RNA (1)...(19): siRNA sense strand
gauauuauuccuucagguu

SEQ ID NO: 833552 - RNA, 19 nt, Homo sapiens
  misc_RNA (1)...(19): siRNA sense strand
auacuaaguucuagggauu

SEQ ID NO: 833553 - RNA, 19 nt, Homo sapiens
  misc_RNA (1)...(19): siRNA sense strand
gaauaucagucuacaucag

SEQ ID NO: 833554 - RNA, 19 nt, Homo sapiens
  misc_RNA (1)...(19): siRNA sense strand
gauaauagggcgucugaag

SEQ ID NO: 833555 - RNA, 19 nt, Homo sapiens
  misc_RNA (1)...(19): siRNA sense strand
guuccuagaucuucaucaa

SEQ ID NO: 833556 - RNA, 19 nt, Homo sapiens
  misc_RNA (1)...(19): siRNA sense strand
uucaagagauccagaaaga

SEQ ID NO: 833557 - RNA, 19 nt, Homo sapiens
  misc_RNA (1)...(19): siRNA sense strand
gcacagaaugauccucuug

SEQ ID NO: 833558 - RNA, 19 nt, Homo sapiens
  misc_RNA (1)...(19): siRNA sense strand
gaagagaaucaaaugaagu

SEQ ID NO: 833559 - RNA, 19 nt, Homo sapiens
  misc_RNA (1)...(19): siRNA sense strand
ucucagggauuucgauuuc

SEQ ID NO: 833560 - RNA, 19 nt, Homo sapiens
  misc_RNA (1)...(19): siRNA sense strand
cauaagcaauucagaaagg

SEQ ID NO: 833561 - RNA, 19 nt, Homo sapiens
  misc_RNA (1)...(19): siRNA sense strand
cagaguuccuucauauuca

SEQ ID NO: 833562 - RNA, 19 nt, Homo sapiens
  misc_RNA (1)...(19): siRNA sense strand
gagcuuaaccuggaggauu

SEQ ID NO: 833563 - RNA, 19 nt, Homo sapiens
  misc_RNA (1)...(19): siRNA sense strand
ggaagaaauacaggaauau

SEQ ID NO: 833564 - RNA, 19 nt, Homo sapiens
  misc_RNA (1)...(19): siRNA sense strand
uaucagcucuggucucuac

SEQ ID NO: 833565 - RNA, 19 nt, Homo sapiens
  misc_RNA (1)...(19): siRNA sense strand
ucaaauggcagcugcauca

SEQ ID NO: 833566 - RNA, 19 nt, Homo sapiens
  misc_RNA (1)...(19): siRNA sense strand
ucaaugagcacuuuacagu

SEQ ID NO: 833567 - RNA, 19 nt, Homo sapiens
  misc_RNA (1)...(19): siRNA sense strand
guaauuugaccgacaaugu

SEQ ID NO: 833568 - RNA, 19 nt, Homo sapiens
  misc_RNA (1)...(19): siRNA sense strand
gaagaaauacaggaauauc

SEQ ID NO: 833569 - RNA, 19 nt, Homo sapiens
  misc_RNA (1)...(19): siRNA sense strand
gagaaauguuggaaauggu

SEQ ID NO: 833570 - RNA, 19 nt, Homo sapiens
  misc_RNA (1)...(19): siRNA sense strand
gaacucuucaggcacauau

SEQ ID NO: 833571 - RNA, 19 nt, Homo sapiens
  misc_RNA (1)...(19): siRNA sense strand
aaauacaggaccaugguua

SEQ ID NO: 833572 - RNA, 19 nt, Homo sapiens
  misc_RNA (1)...(19): siRNA sense strand
aagacagaguuccuucaua

SEQ ID NO: 833573 - RNA, 19 nt, Homo sapiens
  misc_RNA (1)...(19): siRNA sense strand
gaaauguuggaaaugguuu

SEQ ID NO: 833574 - RNA, 19 nt, Homo sapiens
  misc_RNA (1)...(19): siRNA sense strand
aaacuuuccuguacaaacu

SEQ ID NO: 833575 - RNA, 19 nt, Homo sapiens
  misc_RNA (1)...(19): siRNA sense strand
aagcagaggaaguaguuua

SEQ ID NO: 833576 - RNA, 19 nt, Homo sapiens
  misc_RNA (1)...(19): siRNA sense strand
ucucgaaacuucagaggau

SEQ ID NO: 833577 - RNA, 19 nt, Homo sapiens
  misc_RNA (1)...(19): siRNA sense strand
caagcugaguaugaguuua

SEQ ID NO: 833578 - RNA, 19 nt, Homo sapiens
  misc_RNA (1)...(19): siRNA sense strand
aaagugcgccuucaagaga

SEQ ID NO: 833579 - RNA, 19 nt, Homo sapiens
  misc_RNA (1)...(19): siRNA sense strand
gaaauacaggaccaugguu

SEQ ID NO: 833580 - RNA, 19 nt, Homo sapiens
  misc_RNA (1)...(19): siRNA sense strand
gcucuggucucuaccuagu

SEQ ID NO: 833581 - RNA, 19 nt, Homo sapiens
  misc_RNA (1)...(19): siRNA sense strand
gaagaaagauggaucagaa

SEQ ID NO: 833582 - RNA, 19 nt, Homo sapiens
  misc_RNA (1)...(19): siRNA sense strand
guacaaagauagaggaauu

SEQ ID NO: 833583 - RNA, 19 nt, Homo sapiens
  misc_RNA (1)...(19): siRNA sense strand
gaauugggcugucguuaaa

SEQ ID NO: 833584 - RNA, 19 nt, Homo sapiens
  misc_RNA (1)...(19): siRNA sense strand
cagauuggcuuauuuauga

SEQ ID NO: 833585 - RNA, 19 nt, Homo sapiens
  misc_RNA (1)...(19): siRNA sense strand
gcaaauagauaccuaacug

SEQ ID NO: 833586 - RNA, 19 nt, Homo sapiens
  misc_RNA (1)...(19): siRNA sense strand
gaccagagcccauagaaua

SEQ ID NO: 833587 - RNA, 19 nt, Homo sapiens
  misc_RNA (1)...(19): siRNA sense strand
caaagacacuucugacauu

SEQ ID NO: 833588 - RNA, 19 nt, Homo sapiens
  misc_RNA (1)...(19): siRNA sense strand
gaaguggcauagcuuauuu

SEQ ID NO: 833589 - RNA, 19 nt, Homo sapiens
  misc_RNA (1)...(19): siRNA sense strand
gaagcuaaaucgagccuuu

SEQ ID NO: 833590 - RNA, 19 nt, Homo sapiens
  misc_RNA (1)...(19): siRNA sense strand
cagcauaguuuacuuggua

SEQ ID NO: 833591 - RNA, 19 nt, Homo sapiens
  misc_RNA (1)...(19): siRNA sense strand
guagaacaguuaaucagua

SEQ ID NO: 833592 - RNA, 19 nt, Homo sapiens
  misc_RNA (1)...(19): siRNA sense strand
ggauugggcuaaacacuuu

SEQ ID NO: 833593 - RNA, 19 nt, Homo sapiens
  misc_RNA (1)...(19): siRNA sense strand
gagccaauguccauaguaa

SEQ ID NO: 833594 - RNA, 19 nt, Homo sapiens
  misc_RNA (1)...(19): siRNA sense strand
gaacuuugcuuacauacca

SEQ ID NO: 833595 - RNA, 19 nt, Homo sapiens
  misc_RNA (1)...(19): siRNA sense strand
ggaagaccauuugaaguaa

SEQ ID NO: 833596 - RNA, 19 nt, Homo sapiens
  misc_RNA (1)...(19): siRNA sense strand
ggaaauguguuugcaguug

SEQ ID NO: 833597 - RNA, 19 nt, Homo sapiens
  misc_RNA (1)...(19): siRNA sense strand
gaaguuguccagugauaua

SEQ ID NO: 833598 - RNA, 19 nt, Homo sapiens
  misc_RNA (1)...(19): siRNA sense strand
agaaacagcucaugcaaug

SEQ ID NO: 833599 - RNA, 19 nt, Homo sapiens
  misc_RNA (1)...(19): siRNA sense strand
gcagaaagaguacugauga

SEQ ID NO: 833600 - RNA, 19 nt, Homo sapiens
  misc_RNA (1)...(19): siRNA sense strand
gacaauagaugcaauggau

SEQ ID NO: 833601 - RNA, 19 nt, Homo sapiens
  misc_RNA (1)...(19): siRNA sense strand
gggaagaccauuugaagua

SEQ ID NO: 833602 - RNA, 19 nt, Homo sapiens
  misc_RNA (1)...(19): siRNA sense strand
gaaaugagcaagacaagug

SEQ ID NO: 833603 - RNA, 19 nt, Homo sapiens
  misc_RNA (1)...(19): siRNA sense strand
gaaauguguuugcaguuga

SEQ ID NO: 833604 - RNA, 19 nt, Homo sapiens
  misc_RNA (1)...(19): siRNA sense strand
gagccuaauucaaagauuu

SEQ ID NO: 833605 - RNA, 19 nt, Homo sapiens
  misc_RNA (1)...(19): siRNA sense strand
gaaagggagcaaauagaua

SEQ ID NO: 833606 - RNA, 19 nt, Homo sapiens
  misc_RNA (1)...(19): siRNA sense strand
uacaauaucugccauaguu

SEQ ID NO: 833607 - RNA, 19 nt, Homo sapiens
  misc_RNA (1)...(19): siRNA sense strand
ccacacagauuccucaguu

SEQ ID NO: 833608 - RNA, 19 nt, Homo sapiens
  misc_RNA (1)...(19): siRNA sense strand
ggaaagaccacacagauuc

SEQ ID NO: 833609 - RNA, 19 nt, Homo sapiens
  misc_RNA (1)...(19): siRNA sense strand
ucaaggaucuggacauuuc

SEQ ID NO: 833610 - RNA, 19 nt, Homo sapiens
  misc_RNA (1)...(19): siRNA sense strand
gauguugucuuuguuauug

SEQ ID NO: 833611 - RNA, 19 nt, Homo sapiens
  misc_RNA (1)...(19): siRNA sense strand
gcaaugaugaccuguaauu

SEQ ID NO: 833612 - RNA, 19 nt, Homo sapiens
  misc_RNA (1)...(19): siRNA sense strand
gaacuuggguaucauuugg

SEQ ID NO: 833613 - RNA, 19 nt, Homo sapiens
  misc_RNA (1)...(19): siRNA sense strand
gaucaugcaucuucuauac

SEQ ID NO: 833614 - RNA, 19 nt, Homo sapiens
  misc_RNA (1)...(19): siRNA sense strand
gcucaggucuuucaucuca

SEQ ID NO: 833615 - RNA, 19 nt, Homo sapiens
  misc_RNA (1)...(19): siRNA sense strand
gcacccaacuuugaaacua

SEQ ID NO: 833616 - RNA, 19 nt, Homo sapiens
  misc_RNA (1)...(19): siRNA sense strand
ggaaaggauuggucaaaca

SEQ ID NO: 833617 - RNA, 19 nt, Homo sapiens
  misc_RNA (1)...(19): siRNA sense strand
gaaacugggucuggaaaga

SEQ ID NO: 833618 - RNA, 19 nt, Homo sapiens
  misc_RNA (1)...(19): siRNA sense strand
gaagaccauuugaaguaaa

SEQ ID NO: 833619 - RNA, 19 nt, Homo sapiens
  misc_RNA (1)...(19): siRNA sense strand
ccucagaaguacaaagaua

SEQ ID NO: 833620 - RNA, 19 nt, Homo sapiens
  misc_RNA (1)...(19): siRNA sense strand
aaugagagcuccaucuaaa

SEQ ID NO: 833621 - RNA, 19 nt, Homo sapiens
  misc_RNA (1)...(19): siRNA sense strand
gaaaugaccagagcccaua

SEQ ID NO: 833622 - RNA, 19 nt, Homo sapiens
  misc_RNA (1)...(19): siRNA sense strand
gaauuuccuucuucuuuga

SEQ ID NO: 833623 - RNA, 19 nt, Homo sapiens
  misc_RNA (1)...(19): siRNA sense strand
ucagucagccucaauauaa

SEQ ID NO: 833624 - RNA, 19 nt, Homo sapiens
  misc_RNA (1)...(19): siRNA sense strand
gcaggcauguauccuaauu

SEQ ID NO: 833625 - RNA, 19 nt, Homo sapiens
  misc_RNA (1)...(19): siRNA sense strand
ccacagauuggcuuauuua

SEQ ID NO: 833626 - RNA, 19 nt, Homo sapiens
  misc_RNA (1)...(19): siRNA sense strand
gaagaucgcagucaauauc

SEQ ID NO: 833627 - RNA, 19 nt, Homo sapiens
  misc_RNA (1)...(19): siRNA sense strand
gaacaacuggauauacaaa

SEQ ID NO: 833628 - RNA, 19 nt, Homo sapiens
  misc_RNA (1)...(19): siRNA sense strand
uaucagauccgauuagaaa

SEQ ID NO: 833629 - RNA, 19 nt, Homo sapiens
  misc_RNA (1)...(19): siRNA sense strand
ggacuaggaggaguauuua

SEQ ID NO: 833630 - RNA, 19 nt, Homo sapiens
  misc_RNA (1)...(19): siRNA sense strand
gaaagaguacugaugaaau

SEQ ID NO: 833631 - RNA, 19 nt, Homo sapiens
  misc_RNA (1)...(19): siRNA sense strand
caacaaccaucugggauug

SEQ ID NO: 833632 - RNA, 19 nt, Homo sapiens
  misc_RNA (1)...(19): siRNA sense strand
gaagaacagucugcagguu

SEQ ID NO: 833633 - RNA, 19 nt, Homo sapiens
  misc_RNA (1)...(19): siRNA sense strand
aggcauguauccuaauuua

SEQ ID NO: 833634 - RNA, 19 nt, Homo sapiens
  misc_RNA (1)...(19): siRNA sense strand
aaacaacaaaccacacuua

SEQ ID NO: 833635 - RNA, 19 nt, Homo sapiens
  misc_RNA (1)...(19): siRNA sense strand
ucuuggaggucaaauaaua

SEQ ID NO: 833636 - RNA, 19 nt, Homo sapiens
  misc_RNA (1)...(19): siRNA sense strand
agaacagucugcagguuua

SEQ ID NO: 833637 - RNA, 19 nt, Homo sapiens
  misc_RNA (1)...(19): siRNA sense strand
ugaugaagcuaccauaaga

SEQ ID NO: 833638 - RNA, 19 nt, Homo sapiens
  misc_RNA (1)...(19): siRNA sense strand
ugacugaacuuggguauca

SEQ ID NO: 833639 - RNA, 19 nt, Homo sapiens
  misc_RNA (1)...(19): siRNA sense strand
aagaaaugcuguacaaaug

SEQ ID NO: 833640 - RNA, 19 nt, Homo sapiens
  misc_RNA (1)...(19): siRNA sense strand
ucaaugauguugucuuugu

SEQ ID NO: 833641 - RNA, 19 nt, Homo sapiens
  misc_RNA (1)...(19): siRNA sense strand
ggacguggcuuugcaaguc

SEQ ID NO: 833642 - RNA, 19 nt, Homo sapiens
  misc_RNA (1)...(19): siRNA sense strand
gggaagaucugacugaacu

SEQ ID NO: 833643 - RNA, 19 nt, Homo sapiens
  misc_RNA (1)...(19): siRNA sense strand
guacaaaugcuuaagacaa

SEQ ID NO: 833644 - RNA, 19 nt, Homo sapiens
  misc_RNA (1)...(19): siRNA sense strand
uaggaugucuucugagauu

SEQ ID NO: 833645 - RNA, 19 nt, Homo sapiens
  misc_RNA (1)...(19): siRNA sense strand
ugaaagggaucgauuuagu

SEQ ID NO: 833646 - RNA, 19 nt, Homo sapiens
  misc_RNA (1)...(19): siRNA sense strand
ucaauuugcacaccauuua

SEQ ID NO: 833647 - RNA, 19 nt, Homo sapiens
  misc_RNA (1)...(19): siRNA sense strand
agaggcagcuaguuuauug

SEQ ID NO: 833648 - RNA, 19 nt, Homo sapiens
  misc_RNA (1)...(19): siRNA sense strand
ggacagagagaaucuagug

SEQ ID NO: 833649 - RNA, 19 nt, Homo sapiens
  misc_RNA (1)...(19): siRNA sense strand
ggaaagggagcaaauagau

SEQ ID NO: 833650 - RNA, 19 nt, Homo sapiens
  misc_RNA (1)...(19): siRNA sense strand
guaaugaacggaagcuaaa

SEQ ID NO: 833651 - RNA, 19 nt, Homo sapiens
  misc_RNA (1)...(19): siRNA sense strand
ccagcuagauuggcaagua

SEQ ID NO: 833652 - RNA, 19 nt, Homo sapiens
  misc_RNA (1)...(19): siRNA sense strand
caggaacuuugcuuacaua

SEQ ID NO: 833653 - RNA, 19 nt, Homo sapiens
  misc_RNA (1)...(19): siRNA sense strand
gaaaccagcaucacaguca

SEQ ID NO: 833654 - RNA, 19 nt, Homo sapiens
  misc_RNA (1)...(19): siRNA sense strand
gauuuccugucaccaauaa

SEQ ID NO: 833655 - RNA, 19 nt, Homo sapiens
  misc_RNA (1)...(19): siRNA sense strand
gaaugagagcuccaucuaa

SEQ ID NO: 833656 - RNA, 19 nt, Homo sapiens
  misc_RNA (1)...(19): siRNA sense strand
caacuuagagcaucagguu

SEQ ID NO: 833657 - RNA, 19 nt, Homo sapiens
  misc_RNA (1)...(19): siRNA sense strand
ccaguuaauugucccauug

SEQ ID NO: 833658 - RNA, 19 nt, Homo sapiens
  misc_RNA (1)...(19): siRNA sense strand
gcaagaagagaaacaacaa

SEQ ID NO: 833659 - RNA, 19 nt, Homo sapiens
  misc_RNA (1)...(19): siRNA sense strand
gaaaggauuggucaaacaa

SEQ ID NO: 833660 - RNA, 19 nt, Homo sapiens
  misc_RNA (1)...(19): siRNA sense strand
guuaagagauuuguugcaa

SEQ ID NO: 833661 - RNA, 19 nt, Homo sapiens
  misc_RNA (1)...(19): siRNA sense strand
aaagaguacugaugaaauc

SEQ ID NO: 833662 - RNA, 19 nt, Homo sapiens
  misc_RNA (1)...(19): siRNA sense strand
cagaauauguuggaauuuc

SEQ ID NO: 833663 - RNA, 19 nt, Homo sapiens
  misc_RNA (1)...(19): siRNA sense strand
gagaucgcauccuguuuga

SEQ ID NO: 833664 - RNA, 19 nt, Homo sapiens
  misc_RNA (1)...(19): siRNA sense strand
guacucagcucaagaaaau

SEQ ID NO: 833665 - RNA, 19 nt, Homo sapiens
  misc_RNA (1)...(19): siRNA sense strand
aaaccacacuuacagaaug

SEQ ID NO: 833666 - RNA, 19 nt, Homo sapiens
  misc_RNA (1)...(19): siRNA sense strand
caugaaagggaucgauuua

SEQ ID NO: 833667 - RNA, 19 nt, Homo sapiens
  misc_RNA (1)...(19): siRNA sense strand
gcccauagaauagcuaaua

SEQ ID NO: 833668 - RNA, 19 nt, Homo sapiens
  misc_RNA (1)...(19): siRNA sense strand
ccaccagcuuuaauuguaa

SEQ ID NO: 833669 - RNA, 19 nt, Homo sapiens
  misc_RNA (1)...(19): siRNA sense strand
gaagaagaaagauggauca

SEQ ID NO: 833670 - RNA, 19 nt, Homo sapiens
  misc_RNA (1)...(19): siRNA sense strand
gcacaccauuuacucaauc

SEQ ID NO: 833671 - RNA, 19 nt, Homo sapiens
  misc_RNA (1)...(19): siRNA sense strand
cagagagaaucuaguguug

SEQ ID NO: 833672 - RNA, 19 nt, Homo sapiens
  misc_RNA (1)...(19): siRNA sense strand
cgaaauuguuggacugaga

SEQ ID NO: 833673 - RNA, 19 nt, Homo sapiens
  misc_RNA (1)...(19): siRNA sense strand
ccugaaagcuuaucaucau

SEQ ID NO: 833674 - RNA, 19 nt, Homo sapiens
  misc_RNA (1)...(19): siRNA sense strand
aaaugugacugaugaguau

SEQ ID NO: 833675 - RNA, 19 nt, Homo sapiens
  misc_RNA (1)...(19): siRNA sense strand
gaaagcuuaucaucauagu

SEQ ID NO: 833676 - RNA, 19 nt, Homo sapiens
  misc_RNA (1)...(19): siRNA sense strand
gaacaguugcuccaguuau

SEQ ID NO: 833677 - RNA, 19 nt, Homo sapiens
  misc_RNA (1)...(19): siRNA sense strand
ggaaugacaacaagaaagu

SEQ ID NO: 833678 - RNA, 19 nt, Homo sapiens
  misc_RNA (1)...(19): siRNA sense strand
ggacaaaacuacagcuaau

SEQ ID NO: 833679 - RNA, 19 nt, Homo sapiens
  misc_RNA (1)...(19): siRNA sense strand
uacaauugcuugcacacua

SEQ ID NO: 833680 - RNA, 19 nt, Homo sapiens
  misc_RNA (1)...(19): siRNA sense strand
ugaaggacauucgcauuga

SEQ ID NO: 833681 - RNA, 19 nt, Homo sapiens
  misc_RNA (1)...(19): siRNA sense strand
caaaguagauggacagaaa

SEQ ID NO: 833682 - RNA, 19 nt, Homo sapiens
  misc_RNA (1)...(19): siRNA sense strand
uagaagagaugguuauaga

SEQ ID NO: 833683 - RNA, 19 nt, Homo sapiens
  misc_RNA (1)...(19): siRNA sense strand
ggugaugucucccucagua

SEQ ID NO: 833684 - RNA, 19 nt, Homo sapiens
  misc_RNA (1)...(19): siRNA sense strand
caucauuucuuacagguuu

SEQ ID NO: 833685 - RNA, 19 nt, Homo sapiens
  misc_RNA (1)...(19): siRNA sense strand
gaacaggcaaccaagagaa

SEQ ID NO: 833686 - RNA, 19 nt, Homo sapiens
  misc_RNA (1)...(19): siRNA sense strand
gcaaaagacucaaaguaga

SEQ ID NO: 833687 - RNA, 19 nt, Homo sapiens
  misc_RNA (1)...(19): siRNA sense strand
gaagagaggccagaaacug

SEQ ID NO: 833688 - RNA, 19 nt, Homo sapiens
  misc_RNA (1)...(19): siRNA sense strand
gcugugaucuugaccucuu

SEQ ID NO: 833689 - RNA, 19 nt, Homo sapiens
  misc_RNA (1)...(19): siRNA sense strand
gagaggcugucuugucaca

SEQ ID NO: 833690 - RNA, 19 nt, Homo sapiens
  misc_RNA (1)...(19): siRNA sense strand
cugaagcccuggacuuuga

SEQ ID NO: 833691 - RNA, 19 nt, Homo sapiens
  misc_RNA (1)...(19): siRNA sense strand
ggaucugggugacuuggaa

SEQ ID NO: 833692 - RNA, 19 nt, Homo sapiens
  misc_RNA (1)...(19): siRNA sense strand
guccauggcugugaucuug

SEQ ID NO: 833693 - RNA, 19 nt, Homo sapiens
  misc_RNA (1)...(19): siRNA sense strand
gaagacaggguagaagaga

SEQ ID NO: 833694 - RNA, 19 nt, Homo sapiens
  misc_RNA (1)...(19): siRNA sense strand
ucgagaggcugucuuguca

SEQ ID NO: 833695 - RNA, 19 nt, Homo sapiens
  misc_RNA (1)...(19): siRNA sense strand
cccaaaggcuccagaaucu

SEQ ID NO: 833696 - RNA, 19 nt, Homo sapiens
  misc_RNA (1)...(19): siRNA sense strand
gggaaggccucggaacuag

SEQ ID NO: 833697 - RNA, 19 nt, Homo sapiens
  misc_RNA (1)...(19): siRNA sense strand
gaacuacgagcugcgagaa

SEQ ID NO: 833698 - RNA, 19 nt, Homo sapiens
  misc_RNA (1)...(19): siRNA sense strand
gggcacaaaugauaaagcu

SEQ ID NO: 833699 - RNA, 19 nt, Homo sapiens
  misc_RNA (1)...(19): siRNA sense strand
caggaggucuucacagagu

SEQ ID NO: 833700 - RNA, 19 nt, Homo sapiens
  misc_RNA (1)...(19): siRNA sense strand
gcaauucgacaucucaagu

SEQ ID NO: 833701 - RNA, 19 nt, Homo sapiens
  misc_RNA (1)...(19): siRNA sense strand
gagaaaggcccagggacuu

SEQ ID NO: 833702 - RNA, 19 nt, Homo sapiens
  misc_RNA (1)...(19): siRNA sense strand
gguagaagagaugguuaua

SEQ ID NO: 833703 - RNA, 19 nt, Homo sapiens
  misc_RNA (1)...(19): siRNA sense strand
caaggacaagggaguguuu

SEQ ID NO: 833704 - RNA, 19 nt, Homo sapiens
  misc_RNA (1)...(19): siRNA sense strand
uauagagguuggagagaug

SEQ ID NO: 833705 - RNA, 19 nt, Homo sapiens
  misc_RNA (1)...(19): siRNA sense strand
gggaagacaggguagaaga

SEQ ID NO: 833706 - RNA, 19 nt, Homo sapiens
  misc_RNA (1)...(19): siRNA sense strand
caagagaacgcggucagaa

SEQ ID NO: 833707 - RNA, 19 nt, Homo sapiens
  misc_RNA (1)...(19): siRNA sense strand
gcucuuccauaaauagcuu

SEQ ID NO: 833708 - RNA, 19 nt, Homo sapiens
  misc_RNA (1)...(19): siRNA sense strand
gagcagcagccaauuacug

SEQ ID NO: 833709 - RNA, 19 nt, Homo sapiens
  misc_RNA (1)...(19): siRNA sense strand
caagggaguguuugccauu

SEQ ID NO: 833710 - RNA, 19 nt, Homo sapiens
  misc_RNA (1)...(19): siRNA sense strand
agagaugguuauagagguu

SEQ ID NO: 833711 - RNA, 19 nt, Homo sapiens
  misc_RNA (1)...(19): siRNA sense strand
ugcaggaggucuucacaga

SEQ ID NO: 833712 - RNA, 19 nt, Homo sapiens
  misc_RNA (1)...(19): siRNA sense strand
gccgagcagcagccaauua

SEQ ID NO: 833713 - RNA, 19 nt, Homo sapiens
  misc_RNA (1)...(19): siRNA sense strand
ugucccagcucacccagaa

SEQ ID NO: 833714 - RNA, 19 nt, Homo sapiens
  misc_RNA (1)...(19): siRNA sense strand
gacaugaggcagcccaaga

SEQ ID NO: 833715 - RNA, 19 nt, Homo sapiens
  misc_RNA (1)...(19): siRNA sense strand
gggaguguuugccauugug

SEQ ID NO: 833716 - RNA, 19 nt, Homo sapiens
  misc_RNA (1)...(19): siRNA sense strand
cagccuugaugcccacuug

SEQ ID NO: 833717 - RNA, 19 nt, Homo sapiens
  misc_RNA (1)...(19): siRNA sense strand
ugaggcagcccaagaaugg

SEQ ID NO: 833718 - RNA, 19 nt, Homo sapiens
  misc_RNA (1)...(19): siRNA sense strand
caaggccuguucccugauc

SEQ ID NO: 833719 - RNA, 19 nt, Homo sapiens
  misc_RNA (1)...(19): siRNA sense strand
ugaguacuuccuagcauuu

SEQ ID NO: 833720 - RNA, 19 nt, Homo sapiens
  misc_RNA (1)...(19): siRNA sense strand
aagagaggccagaaacuga

SEQ ID NO: 833721 - RNA, 19 nt, Homo sapiens
  misc_RNA (1)...(19): siRNA sense strand
ccauaaauagcuucgaugu

SEQ ID NO: 833722 - RNA, 19 nt, Homo sapiens
  misc_RNA (1)...(19): siRNA sense strand
cugaguacuuccuagcauu

SEQ ID NO: 833723 - RNA, 19 nt, Homo sapiens
  misc_RNA (1)...(19): siRNA sense strand
ggaagacaggguagaagag

SEQ ID NO: 833724 - RNA, 19 nt, Homo sapiens
  misc_RNA (1)...(19): siRNA sense strand
guucuucuccuguguaucu

SEQ ID NO: 833725 - RNA, 19 nt, Homo sapiens
  misc_RNA (1)...(19): siRNA sense strand
guaacuacgcccugaccuu

SEQ ID NO: 833726 - RNA, 19 nt, Homo sapiens
  misc_RNA (1)...(19): siRNA sense strand
gaaggccucggaacuagca

SEQ ID NO: 833727 - RNA, 19 nt, Homo sapiens
  misc_RNA (1)...(19): siRNA sense strand
gccgaagccuccaguacca

SEQ ID NO: 833728 - RNA, 19 nt, Homo sapiens
  misc_RNA (1)...(19): siRNA sense strand
caagcaauucgacaucuca

SEQ ID NO: 833729 - RNA, 19 nt, Homo sapiens
  misc_RNA (1)...(19): siRNA sense strand
uuuccucccucaagcaauu

SEQ ID NO: 833730 - RNA, 19 nt, Homo sapiens
  misc_RNA (1)...(19): siRNA sense strand
gcgaagagaggccagaaac

SEQ ID NO: 833731 - RNA, 19 nt, Homo sapiens
  misc_RNA (1)...(19): siRNA sense strand
caaccgacccagccuugau

SEQ ID NO: 833732 - RNA, 19 nt, Homo sapiens
  misc_RNA (1)...(19): siRNA sense strand
aauucgacaucucaaguga

SEQ ID NO: 833733 - RNA, 19 nt, Homo sapiens
  misc_RNA (1)...(19): siRNA sense strand
uuauagagguuggagagau

SEQ ID NO: 833734 - RNA, 19 nt, Homo sapiens
  misc_RNA (1)...(19): siRNA sense strand
cugcuacgccgaucccuuu

SEQ ID NO: 833735 - RNA, 19 nt, Homo sapiens
  misc_RNA (1)...(19): siRNA sense strand
gagcuggugggauccauuc

SEQ ID NO: 833736 - RNA, 19 nt, Homo sapiens
  misc_RNA (1)...(19): siRNA sense strand
caaugucgcagccaaugug

SEQ ID NO: 833737 - RNA, 19 nt, Homo sapiens
  misc_RNA (1)...(19): siRNA sense strand
ccuuuuggcucuuccauaa

SEQ ID NO: 833738 - RNA, 19 nt, Homo sapiens
  misc_RNA (1)...(19): siRNA sense strand
guagaagagaugguuauag

SEQ ID NO: 833739 - RNA, 19 nt, Homo sapiens
  misc_RNA (1)...(19): siRNA sense strand
gagaacgcggucagaagga

SEQ ID NO: 833740 - RNA, 19 nt, Homo sapiens
  misc_RNA (1)...(19): siRNA sense strand
gggccugccuucuaaucuc

SEQ ID NO: 833741 - RNA, 19 nt, Homo sapiens
  misc_RNA (1)...(19): siRNA sense strand
cugcauaacucccguuucc

SEQ ID NO: 833742 - RNA, 19 nt, Homo sapiens
  misc_RNA (1)...(19): siRNA sense strand
guggucaaguucugucauc

SEQ ID NO: 833743 - RNA, 19 nt, Homo sapiens
  misc_RNA (1)...(19): siRNA sense strand
gcaccggcaccugguagaa

SEQ ID NO: 833744 - RNA, 19 nt, Homo sapiens
  misc_RNA (1)...(19): siRNA sense strand
gcauggagccccuggagaa

SEQ ID NO: 833745 - RNA, 19 nt, Homo sapiens
  misc_RNA (1)...(19): siRNA sense strand
cacgggagcagaaggaguu

SEQ ID NO: 833746 - RNA, 19 nt, Homo sapiens
  misc_RNA (1)...(19): siRNA sense strand
ggguagaagagaugguuau

SEQ ID NO: 833747 - RNA, 19 nt, Homo sapiens
  misc_RNA (1)...(19): siRNA sense strand
ccaguucuucuccugugua

SEQ ID NO: 833748 - RNA, 19 nt, Homo sapiens
  misc_RNA (1)...(19): siRNA sense strand
caguucuucuccuguguau

SEQ ID NO: 833749 - RNA, 19 nt, Homo sapiens
  misc_RNA (1)...(19): siRNA sense strand
agacaggguagaagagaug

SEQ ID NO: 833750 - RNA, 19 nt, Homo sapiens
  misc_RNA (1)...(19): siRNA sense strand
gaacuggggaguccucuca

SEQ ID NO: 833751 - RNA, 19 nt, Homo sapiens
  misc_RNA (1)...(19): siRNA sense strand
ggaggucuucacagaguuc

SEQ ID NO: 833752 - RNA, 19 nt, Homo sapiens
  misc_RNA (1)...(19): siRNA sense strand
caauucgacaucucaagug

SEQ ID NO: 833753 - RNA, 19 nt, Homo sapiens
  misc_RNA (1)...(19): siRNA sense strand
ucaagcaauucgacaucuc

SEQ ID NO: 833754 - RNA, 19 nt, Homo sapiens
  misc_RNA (1)...(19): siRNA sense strand
ggauucugcucagcucucu

SEQ ID NO: 833755 - RNA, 19 nt, Homo sapiens
  misc_RNA (1)...(19): siRNA sense strand
ggucuucacagaguucuuc

SEQ ID NO: 833756 - RNA, 19 nt, Homo sapiens
  misc_RNA (1)...(19): siRNA sense strand
gaagcccuggacuuugaaa

SEQ ID NO: 833757 - RNA, 19 nt, Homo sapiens
  misc_RNA (1)...(19): siRNA sense strand
ccuguucccugaucuccau

SEQ ID NO: 833758 - RNA, 19 nt, Homo sapiens
  misc_RNA (1)...(19): siRNA sense strand
acaugaggcagcccaagaa

SEQ ID NO: 833759 - RNA, 19 nt, Homo sapiens
  misc_RNA (1)...(19): siRNA sense strand
ucagggagggacaagcaaa

SEQ ID NO: 833760 - RNA, 19 nt, Homo sapiens
  misc_RNA (1)...(19): siRNA sense strand
ucuccuguguaucuuguug

SEQ ID NO: 833761 - RNA, 19 nt, Homo sapiens
  misc_RNA (1)...(19): siRNA sense strand
ggaacagguggaagucgau

SEQ ID NO: 833762 - RNA, 19 nt, Homo sapiens
  misc_RNA (1)...(19): siRNA sense strand
uguaucgaguccaaacugu

SEQ ID NO: 833763 - RNA, 19 nt, Homo sapiens
  misc_RNA (1)...(19): siRNA sense strand
ccacuugggaggcagaaag

SEQ ID NO: 833764 - RNA, 19 nt, Homo sapiens
  misc_RNA (1)...(19): siRNA sense strand
ggagcuggugggauccauu

SEQ ID NO: 833765 - RNA, 19 nt, Homo sapiens
  misc_RNA (1)...(19): siRNA sense strand
gcccuguggucaaguucug

SEQ ID NO: 833766 - RNA, 19 nt, Homo sapiens
  misc_RNA (1)...(19): siRNA sense strand
gaaccaauccuaaagaaua

SEQ ID NO: 833767 - RNA, 19 nt, Homo sapiens
  misc_RNA (1)...(19): siRNA sense strand
ggagauggaugaaauuaaa

SEQ ID NO: 833768 - RNA, 19 nt, Homo sapiens
  misc_RNA (1)...(19): siRNA sense strand
gaaacccacugacuuuaaa

SEQ ID NO: 833769 - RNA, 19 nt, Homo sapiens
  misc_RNA (1)...(19): siRNA sense strand
gaagagaauuugggauuug

SEQ ID NO: 833770 - RNA, 19 nt, Homo sapiens
  misc_RNA (1)...(19): siRNA sense strand
gcagcuaucuucuuugaau

SEQ ID NO: 833771 - RNA, 19 nt, Homo sapiens
  misc_RNA (1)...(19): siRNA sense strand
caagaaacccacugacuuu

SEQ ID NO: 833772 - RNA, 19 nt, Homo sapiens
  misc_RNA (1)...(19): siRNA sense strand
gugcaucgaucccuauauu

SEQ ID NO: 833773 - RNA, 19 nt, Homo sapiens
  misc_RNA (1)...(19): siRNA sense strand
gauauuagcaagacaucua

SEQ ID NO: 833774 - RNA, 19 nt, Homo sapiens
  misc_RNA (1)...(19): siRNA sense strand
ugaagaagcuagaaccaau

SEQ ID NO: 833775 - RNA, 19 nt, Homo sapiens
  misc_RNA (1)...(19): siRNA sense strand
ugaagaagaugaagaagag

SEQ ID NO: 833776 - RNA, 19 nt, Homo sapiens
  misc_RNA (1)...(19): siRNA sense strand
agacuuaacuccugugcaa

SEQ ID NO: 833777 - RNA, 19 nt, Homo sapiens
  misc_RNA (1)...(19): siRNA sense strand
gugcagcuaucuucuuuga

SEQ ID NO: 833778 - RNA, 19 nt, Homo sapiens
  misc_RNA (1)...(19): siRNA sense strand
gaagcuagaaccaauccua

SEQ ID NO: 833779 - RNA, 19 nt, Homo sapiens
  misc_RNA (1)...(19): siRNA sense strand
gaauuugggauuugaagaa

SEQ ID NO: 833780 - RNA, 19 nt, Homo sapiens
  misc_RNA (1)...(19): siRNA sense strand
ggcccaagcucaacacaau

SEQ ID NO: 833781 - RNA, 19 nt, Homo sapiens
  misc_RNA (1)...(19): siRNA sense strand
uagaaccaauccuaaagaa

SEQ ID NO: 833782 - RNA, 19 nt, Homo sapiens
  misc_RNA (1)...(19): siRNA sense strand
agaaaccacuuuaucuuca

SEQ ID NO: 833783 - RNA, 19 nt, Homo sapiens
  misc_RNA (1)...(19): siRNA sense strand
agaagagaauuugggauuu

SEQ ID NO: 833784 - RNA, 19 nt, Homo sapiens
  misc_RNA (1)...(19): siRNA sense strand
gaaaccacuuuaucuucau

SEQ ID NO: 833785 - RNA, 19 nt, Homo sapiens
  misc_RNA (1)...(19): siRNA sense strand
aaaccugggccaauuguaa

SEQ ID NO: 833786 - RNA, 19 nt, Homo sapiens
  misc_RNA (1)...(19): siRNA sense strand
ccaagaaaccacuuuaucu

SEQ ID NO: 833787 - RNA, 19 nt, Homo sapiens
  misc_RNA (1)...(19): siRNA sense strand
cacacagucucaagaagaa

SEQ ID NO: 833788 - RNA, 19 nt, Homo sapiens
  misc_RNA (1)...(19): siRNA sense strand
acauugagcuccagaagca

SEQ ID NO: 833789 - RNA, 19 nt, Homo sapiens
  misc_RNA (1)...(19): siRNA sense strand
ccacacagucucaagaaga

SEQ ID NO: 833790 - RNA, 19 nt, Homo sapiens
  misc_RNA (1)...(19): siRNA sense strand
caaaggugcagcuaucuuc

SEQ ID NO: 833791 - RNA, 19 nt, Homo sapiens
  misc_RNA (1)...(19): siRNA sense strand
gaauucccauuugauguuc

SEQ ID NO: 833792 - RNA, 19 nt, Homo sapiens
  misc_RNA (1)...(19): siRNA sense strand
ugaccaagaaaccacuuua

SEQ ID NO: 833793 - RNA, 19 nt, Homo sapiens
  misc_RNA (1)...(19): siRNA sense strand
gcgccgacuucgacucuug

SEQ ID NO: 833794 - RNA, 19 nt, Homo sapiens
  misc_RNA (1)...(19): siRNA sense strand
caagacaucuacaaaagga

SEQ ID NO: 833795 - RNA, 19 nt, Homo sapiens
  misc_RNA (1)...(19): siRNA sense strand
ugaauucacagaagaacaa

SEQ ID NO: 833796 - RNA, 19 nt, Homo sapiens
  misc_RNA (1)...(19): siRNA sense strand
agaaacccacugacuuuaa

SEQ ID NO: 833797 - RNA, 19 nt, Homo sapiens
  misc_RNA (1)...(19): siRNA sense strand
acaagaaacccacugacuu

SEQ ID NO: 833798 - RNA, 19 nt, Homo sapiens
  misc_RNA (1)...(19): siRNA sense strand
aagaagagaauuugggauu

SEQ ID NO: 833799 - RNA, 19 nt, Homo sapiens
  misc_RNA (1)...(19): siRNA sense strand
aaagaauucccauuugaug

SEQ ID NO: 833800 - RNA, 19 nt, Homo sapiens
  misc_RNA (1)...(19): siRNA sense strand
cagcuaucuucuuugaauu

SEQ ID NO: 833801 - RNA, 19 nt, Homo sapiens
  misc_RNA (1)...(19): siRNA sense strand
uaacuccugugcaagauac

SEQ ID NO: 833802 - RNA, 19 nt, Homo sapiens
  misc_RNA (1)...(19): siRNA sense strand
uagaguucccgguacuuua

SEQ ID NO: 833803 - RNA, 19 nt, Homo sapiens
  misc_RNA (1)...(19): siRNA sense strand
gaccaagaaaccacuuuau

SEQ ID NO: 833804 - RNA, 19 nt, Homo sapiens
  misc_RNA (1)...(19): siRNA sense strand
gaagaagcuagaaccaauc

SEQ ID NO: 833805 - RNA, 19 nt, Homo sapiens
  misc_RNA (1)...(19): siRNA sense strand
uggaggcgauagacgagua

SEQ ID NO: 833806 - RNA, 19 nt, Homo sapiens
  misc_RNA (1)...(19): siRNA sense strand
caagcucaacacaauaauu

SEQ ID NO: 833807 - RNA, 19 nt, Homo sapiens
  misc_RNA (1)...(19): siRNA sense strand
ugacauuacucacuaucag

SEQ ID NO: 833808 - RNA, 19 nt, Homo sapiens
  misc_RNA (1)...(19): siRNA sense strand
guacuuuauuaccaagguu

SEQ ID NO: 833809 - RNA, 19 nt, Homo sapiens
  misc_RNA (1)...(19): siRNA sense strand
uguucagccugucccauua

SEQ ID NO: 833810 - RNA, 19 nt, Homo sapiens
  misc_RNA (1)...(19): siRNA sense strand
gcaucgaucccuauauuac

SEQ ID NO: 833811 - RNA, 19 nt, Homo sapiens
  misc_RNA (1)...(19): siRNA sense strand
aaacuuugcacaaggaaug

SEQ ID NO: 833812 - RNA, 19 nt, Homo sapiens
  misc_RNA (1)...(19): siRNA sense strand
aagagaauuugggauuuga

SEQ ID NO: 833813 - RNA, 19 nt, Homo sapiens
  misc_RNA (1)...(19): siRNA sense strand
aaccaaaggugcagcuauc

SEQ ID NO: 833814 - RNA, 19 nt, Homo sapiens
  misc_RNA (1)...(19): siRNA sense strand
ggacauugagcuccagaag

SEQ ID NO: 833815 - RNA, 19 nt, Homo sapiens
  misc_RNA (1)...(19): siRNA sense strand
gcuagaaccaauccuaaag

SEQ ID NO: 833816 - RNA, 19 nt, Homo sapiens
  misc_RNA (1)...(19): siRNA sense strand
gcuaucuucuuugaauuca

SEQ ID NO: 833817 - RNA, 19 nt, Homo sapiens
  misc_RNA (1)...(19): siRNA sense strand
gaacaaaagaaaaccauag

SEQ ID NO: 833818 - RNA, 19 nt, Homo sapiens
  misc_RNA (1)...(19): siRNA sense strand
cagccugucccauuaagaa

SEQ ID NO: 833819 - RNA, 19 nt, Homo sapiens
  misc_RNA (1)...(19): siRNA sense strand
agaauucccauuugauguu

SEQ ID NO: 833820 - RNA, 19 nt, Homo sapiens
  misc_RNA (1)...(19): siRNA sense strand
aggugcagcuaucuucuuu

SEQ ID NO: 833821 - RNA, 19 nt, Homo sapiens
  misc_RNA (1)...(19): siRNA sense strand
cacuuuaucuucaucuaca

SEQ ID NO: 833822 - RNA, 19 nt, Homo sapiens
  misc_RNA (1)...(19): siRNA sense strand
aagaaacccacugacuuua

SEQ ID NO: 833823 - RNA, 19 nt, Homo sapiens
  misc_RNA (1)...(19): siRNA sense strand
cccaagcucaacacaauaa

SEQ ID NO: 833824 - RNA, 19 nt, Homo sapiens
  misc_RNA (1)...(19): siRNA sense strand
aagcucaacacaauaauuc

SEQ ID NO: 833825 - RNA, 19 nt, Homo sapiens
  misc_RNA (1)...(19): siRNA sense strand
gaaaaccauaggcaaaauu

SEQ ID NO: 833826 - RNA, 19 nt, Homo sapiens
  misc_RNA (1)...(19): siRNA sense strand
uggaggaccugaagaagcu

SEQ ID NO: 833827 - RNA, 19 nt, Homo sapiens
  misc_RNA (1)...(19): siRNA sense strand
uaaccaaaggugcagcuau

SEQ ID NO: 833828 - RNA, 19 nt, Homo sapiens
  misc_RNA (1)...(19): siRNA sense strand
gacauuacucacuaucaga

SEQ ID NO: 833829 - RNA, 19 nt, Homo sapiens
  misc_RNA (1)...(19): siRNA sense strand
gcccaagcucaacacaaua

SEQ ID NO: 833830 - RNA, 19 nt, Homo sapiens
  misc_RNA (1)...(19): siRNA sense strand
ccugucccauuaagaagaa

SEQ ID NO: 833831 - RNA, 19 nt, Homo sapiens
  misc_RNA (1)...(19): siRNA sense strand
cuagaaccaauccuaaaga

SEQ ID NO: 833832 - RNA, 19 nt, Homo sapiens
  misc_RNA (1)...(19): siRNA sense strand
gcagugcaucgaucccuau

SEQ ID NO: 833833 - RNA, 19 nt, Homo sapiens
  misc_RNA (1)...(19): siRNA sense strand
ucugaauggcauagacuua

SEQ ID NO: 833834 - RNA, 19 nt, Homo sapiens
  misc_RNA (1)...(19): siRNA sense strand
aagcuagaaccaauccuaa

SEQ ID NO: 833835 - RNA, 19 nt, Homo sapiens
  misc_RNA (1)...(19): siRNA sense strand
aaaggaggcccaagcucaa

SEQ ID NO: 833836 - RNA, 19 nt, Homo sapiens
  misc_RNA (1)...(19): siRNA sense strand
gggauuugaagaagaugaa

SEQ ID NO: 833837 - RNA, 19 nt, Homo sapiens
  misc_RNA (1)...(19): siRNA sense strand
guucagccugucccauuaa

SEQ ID NO: 833838 - RNA, 19 nt, Homo sapiens
  misc_RNA (1)...(19): siRNA sense strand
ccaaaggugcagcuaucuu

SEQ ID NO: 833839 - RNA, 19 nt, Homo sapiens
  misc_RNA (1)...(19): siRNA sense strand
ugaauggcauagacuuaac

SEQ ID NO: 833840 - RNA, 19 nt, Homo sapiens
  misc_RNA (1)...(19): siRNA sense strand
uuagcaagacaucuacaaa

SEQ ID NO: 833841 - RNA, 19 nt, Homo sapiens
  misc_RNA (1)...(19): siRNA sense strand
gcucaacacaauaauucug

SEQ ID NO: 833842 - RNA, 19 nt, Homo sapiens
  misc_RNA (1)...(19): siRNA sense strand
cugaauggcauagacuuaa

SEQ ID NO: 833843 - RNA, 19 nt, Homo sapiens
  misc_RNA (1)...(19): siRNA sense strand
ggaucugaauggcauagac

SEQ ID NO: 833844 - RNA, 19 nt, Homo sapiens
  misc_RNA (1)...(19): siRNA sense strand
auugcgaagugcagcuuua

SEQ ID NO: 833845 - RNA, 19 nt, Homo sapiens
  misc_RNA (1)...(19): siRNA sense strand
gaauucacagaagaacaaa

SEQ ID NO: 833846 - RNA, 19 nt, Homo sapiens
  misc_RNA (1)...(19): siRNA sense strand
gagaauuugggauuugaag

SEQ ID NO: 833847 - RNA, 19 nt, Homo sapiens
  misc_RNA (1)...(19): siRNA sense strand
gauuugaagaagaugaaga

SEQ ID NO: 833848 - RNA, 19 nt, Homo sapiens
  misc_RNA (1)...(19): siRNA sense strand
uuaccagcaccaaguguuu

SEQ ID NO: 833849 - RNA, 19 nt, Homo sapiens
  misc_RNA (1)...(19): siRNA sense strand
gaucccuauauuacaguua

SEQ ID NO: 833850 - RNA, 19 nt, Homo sapiens
  misc_RNA (1)...(19): siRNA sense strand
gcuuuacaguccacacagu

SEQ ID NO: 833851 - RNA, 19 nt, Homo sapiens
  misc_RNA (1)...(19): siRNA sense strand
cuagaguucccgguacuuu

SEQ ID NO: 833852 - RNA, 19 nt, Homo sapiens
  misc_RNA (1)...(19): siRNA sense strand
aaaccacuuuaucuucauc

SEQ ID NO: 833853 - RNA, 19 nt, Homo sapiens
  misc_RNA (1)...(19): siRNA sense strand
uauacaagaaacccacuga

SEQ ID NO: 833854 - RNA, 19 nt, Homo sapiens
  misc_RNA (1)...(19): siRNA sense strand
gcaccaaguguuuugcuuu

SEQ ID NO: 833855 - RNA, 19 nt, Homo sapiens
  misc_RNA (1)...(19): siRNA sense strand
agaguucccgguacuuuau

SEQ ID NO: 833856 - RNA, 19 nt, Homo sapiens
  misc_RNA (1)...(19): siRNA sense strand
ccaauccuaaagaauauuc

SEQ ID NO: 833857 - RNA, 19 nt, Homo sapiens
  misc_RNA (1)...(19): siRNA sense strand
aaagaaaaccauaggcaaa

SEQ ID NO: 833858 - RNA, 19 nt, Homo sapiens
  misc_RNA (1)...(19): siRNA sense strand
guguaaaggaucugaaugg

SEQ ID NO: 833859 - RNA, 19 nt, Homo sapiens
  misc_RNA (1)...(19): siRNA sense strand
caucgaucccuauauuaca

SEQ ID NO: 833860 - RNA, 19 nt, Homo sapiens
  misc_RNA (1)...(19): siRNA sense strand
uuacucacuaucagaauug

SEQ ID NO: 833861 - RNA, 19 nt, Homo sapiens
  misc_RNA (1)...(19): siRNA sense strand
aguucccgguacuuuauua

SEQ ID NO: 833862 - RNA, 19 nt, Homo sapiens
  misc_RNA (1)...(19): siRNA sense strand
uggagauggaugaaauuaa

SEQ ID NO: 833863 - RNA, 19 nt, Homo sapiens
  misc_RNA (1)...(19): siRNA sense strand
gcgaagugcagcuuuacag

SEQ ID NO: 833864 - RNA, 19 nt, Homo sapiens
  misc_RNA (1)...(19): siRNA sense strand
cacagucucaagaagaauu

SEQ ID NO: 833865 - RNA, 19 nt, Homo sapiens
  misc_RNA (1)...(19): siRNA sense strand
gaauugcgaagugcagcuu

SEQ ID NO: 833866 - RNA, 19 nt, Homo sapiens
  misc_RNA (1)...(19): siRNA sense strand
gaacugacauggaccaaau

SEQ ID NO: 833867 - RNA, 19 nt, Homo sapiens
  misc_RNA (1)...(19): siRNA sense strand
ggaagauccugacggaguu

SEQ ID NO: 833868 - RNA, 19 nt, Homo sapiens
  misc_RNA (1)...(19): siRNA sense strand
caacagugcaggcuacaaa

SEQ ID NO: 833869 - RNA, 19 nt, Homo sapiens
  misc_RNA (1)...(19): siRNA sense strand
ccaagcagguggucucugu

SEQ ID NO: 833870 - RNA, 19 nt, Homo sapiens
  misc_RNA (1)...(19): siRNA sense strand
ucacggacaugaaccugaa

SEQ ID NO: 833871 - RNA, 19 nt, Homo sapiens
  misc_RNA (1)...(19): siRNA sense strand
ggugcgagaugucuucuuc

SEQ ID NO: 833872 - RNA, 19 nt, Homo sapiens
  misc_RNA (1)...(19): siRNA sense strand
ucacugaggugcgagaugu

SEQ ID NO: 833873 - RNA, 19 nt, Homo sapiens
  misc_RNA (1)...(19): siRNA sense strand
ucaaggaggucacggacau

SEQ ID NO: 833874 - RNA, 19 nt, Homo sapiens
  misc_RNA (1)...(19): siRNA sense strand
gcucauuggcaacuccuua

SEQ ID NO: 833875 - RNA, 19 nt, Homo sapiens
  misc_RNA (1)...(19): siRNA sense strand
gagcugcuaugagaagaug

SEQ ID NO: 833876 - RNA, 19 nt, Homo sapiens
  misc_RNA (1)...(19): siRNA sense strand
cagcagcgauuugaugugu

SEQ ID NO: 833877 - RNA, 19 nt, Homo sapiens
  misc_RNA (1)...(19): siRNA sense strand
acaaugccguguauacguu

SEQ ID NO: 833878 - RNA, 19 nt, Homo sapiens
  misc_RNA (1)...(19): siRNA sense strand
aaacaaagcggccuaugag

SEQ ID NO: 833879 - RNA, 19 nt, Homo sapiens
  misc_RNA (1)...(19): siRNA sense strand
ugacauggaccaaauuauc

SEQ ID NO: 833880 - RNA, 19 nt, Homo sapiens
  misc_RNA (1)...(19): siRNA sense strand
gacauggaccaaauuauca

SEQ ID NO: 833881 - RNA, 19 nt, Homo sapiens
  misc_RNA (1)...(19): siRNA sense strand
gagaugucuucuucaagga

SEQ ID NO: 833882 - RNA, 19 nt, Homo sapiens
  misc_RNA (1)...(19): siRNA sense strand
ugagcaaccuggugaugga

SEQ ID NO: 833883 - RNA, 19 nt, Homo sapiens
  misc_RNA (1)...(19): siRNA sense strand
ggaacgaggugcagauccu

SEQ ID NO: 833884 - RNA, 19 nt, Homo sapiens
  misc_RNA (1)...(19): siRNA sense strand
cagcaucuccugccuggaa

SEQ ID NO: 833885 - RNA, 19 nt, Homo sapiens
  misc_RNA (1)...(19): siRNA sense strand
gcgaguacauggagaagcu

SEQ ID NO: 833886 - RNA, 19 nt, Homo sapiens
  misc_RNA (1)...(19): siRNA sense strand
gggagcaaauggacaaugc

SEQ ID NO: 833887 - RNA, 19 nt, Homo sapiens
  misc_RNA (1)...(19): siRNA sense strand
ucgaggaggugcuguccaa

SEQ ID NO: 833888 - RNA, 19 nt, Homo sapiens
  misc_RNA (1)...(19): siRNA sense strand
gcacugcaacaauggaauc

SEQ ID NO: 833889 - RNA, 19 nt, Homo sapiens
  misc_RNA (1)...(19): siRNA sense strand
uccaggagcugaucuucga

SEQ ID NO: 833890 - RNA, 19 nt, Homo sapiens
  misc_RNA (1)...(19): siRNA sense strand
ccaaggaggagcugugcaa

SEQ ID NO: 833891 - RNA, 19 nt, Homo sapiens
  misc_RNA (1)...(19): siRNA sense strand
ccacacaguucccgcucau

SEQ ID NO: 833892 - RNA, 19 nt, Homo sapiens
  misc_RNA (1)...(19): siRNA sense strand
uugacaagcugggcgagua

SEQ ID NO: 833893 - RNA, 19 nt, Homo sapiens
  misc_RNA (1)...(19): siRNA sense strand
gaaccugaacgucaucaac

SEQ ID NO: 833894 - RNA, 19 nt, Homo sapiens
  misc_RNA (1)...(19): siRNA sense strand
ucucugugguccaggauga

SEQ ID NO: 833895 - RNA, 19 nt, Homo sapiens
  misc_RNA (1)...(19): siRNA sense strand
gcgcgucacuacuacuucu

SEQ ID NO: 833896 - RNA, 19 nt, Homo sapiens
  misc_RNA (1)...(19): siRNA sense strand
aauggacaaugccguguau

SEQ ID NO: 833897 - RNA, 19 nt, Homo sapiens
  misc_RNA (1)...(19): siRNA sense strand
cuuaugcgcgucacuacua

SEQ ID NO: 833898 - RNA, 19 nt, Homo sapiens
  misc_RNA (1)...(19): siRNA sense strand
guagagggcccugcguuca

SEQ ID NO: 833899 - RNA, 19 nt, Homo sapiens
  misc_RNA (1)...(19): siRNA sense strand
gggcuggugcucuacgaaa

SEQ ID NO: 833900 - RNA, 19 nt, Homo sapiens
  misc_RNA (1)...(19): siRNA sense strand
caaggucugcggccugaga

SEQ ID NO: 833901 - RNA, 19 nt, Homo sapiens
  misc_RNA (1)...(19): siRNA sense strand
ucgaggacuuugccagguu

SEQ ID NO: 833902 - RNA, 19 nt, Homo sapiens
  misc_RNA (1)...(19): siRNA sense strand
guacggcaccugggagaug

SEQ ID NO: 833903 - RNA, 19 nt, Homo sapiens
  misc_RNA (1)...(19): siRNA sense strand
gcauguaccgacaguccaa

SEQ ID NO: 833904 - RNA, 19 nt, Homo sapiens
  misc_RNA (1)...(19): siRNA sense strand
aggaggagcugugcaaguc

SEQ ID NO: 833905 - RNA, 19 nt, Homo sapiens
  misc_RNA (1)...(19): siRNA sense strand
uggcguggcucucuucaac

SEQ ID NO: 833906 - RNA, 19 nt, Homo sapiens
  misc_RNA (1)...(19): siRNA sense strand
ugcgagaugucuucuucaa

SEQ ID NO: 833907 - RNA, 19 nt, Homo sapiens
  misc_RNA (1)...(19): siRNA sense strand
ccacgagccgucaucaaca

SEQ ID NO: 833908 - RNA, 19 nt, Homo sapiens
  misc_RNA (1)...(19): siRNA sense strand
ggugcagacugaguucuag

SEQ ID NO: 833909 - RNA, 19 nt, Homo sapiens
  misc_RNA (1)...(19): siRNA sense strand
ggacuuugccagguucauc

SEQ ID NO: 833910 - RNA, 19 nt, Homo sapiens
  misc_RNA (1)...(19): siRNA sense strand
acuacgggcuggugcucua

SEQ ID NO: 833911 - RNA, 19 nt, Homo sapiens
  misc_RNA (1)...(19): siRNA sense strand
gacaaugccguguauacgu

SEQ ID NO: 833912 - RNA, 19 nt, Homo sapiens
  misc_RNA (1)...(19): siRNA sense strand
caagauccgagccuucauc

SEQ ID NO: 833913 - RNA, 19 nt, Homo sapiens
  misc_RNA (1)...(19): siRNA sense strand
cacuacuacuucugcauga

SEQ ID NO: 833914 - RNA, 19 nt, Homo sapiens
  misc_RNA (1)...(19): siRNA sense strand
ggacgccguguaccacaug

SEQ ID NO: 833915 - RNA, 19 nt, Homo sapiens
  misc_RNA (1)...(19): siRNA sense strand
gggugcagacugaguucua

SEQ ID NO: 833916 - RNA, 19 nt, Homo sapiens
  misc_RNA (1)...(19): siRNA sense strand
ggacaaugccguguauacg

SEQ ID NO: 833917 - RNA, 19 nt, Homo sapiens
  misc_RNA (1)...(19): siRNA sense strand
ggcccugcguucacagaug

SEQ ID NO: 833918 - RNA, 19 nt, Homo sapiens
  misc_RNA (1)...(19): siRNA sense strand
gcugaucuucgaggacuuu

SEQ ID NO: 833919 - RNA, 19 nt, Homo sapiens
  misc_RNA (1)...(19): siRNA sense strand
ucccguuccugcucaagaa

SEQ ID NO: 833920 - RNA, 19 nt, Homo sapiens
  misc_RNA (1)...(19): siRNA sense strand
ggaggucacggacaugaac

SEQ ID NO: 833921 - RNA, 19 nt, Homo sapiens
  misc_RNA (1)...(19): siRNA sense strand
acugacauggaccaaauua

SEQ ID NO: 833922 - RNA, 19 nt, Homo sapiens
  misc_RNA (1)...(19): siRNA sense strand
ccacaugcgggagcaaaug

SEQ ID NO: 833923 - RNA, 19 nt, Homo sapiens
  misc_RNA (1)...(19): siRNA sense strand
gcguggcucucuucaacag

SEQ ID NO: 833924 - RNA, 19 nt, Homo sapiens
  misc_RNA (1)...(19): siRNA sense strand
uaccagggaccacggcaaa

SEQ ID NO: 833925 - RNA, 19 nt, Homo sapiens
  misc_RNA (1)...(19): siRNA sense strand
aaauggacaaugccgugua

SEQ ID NO: 833926 - RNA, 19 nt, Homo sapiens
  misc_RNA (1)...(19): siRNA sense strand
gaucucggacgccguguac

SEQ ID NO: 833927 - RNA, 19 nt, Homo sapiens
  misc_RNA (1)...(19): siRNA sense strand
uacuacuucugcaugauga

SEQ ID NO: 833928 - RNA, 19 nt, Homo sapiens
  misc_RNA (1)...(19): siRNA sense strand
cagagcugcuaugagaaga

SEQ ID NO: 833929 - RNA, 19 nt, Homo sapiens
  misc_RNA (1)...(19): siRNA sense strand
accaauaccuggagcucau

SEQ ID NO: 833930 - RNA, 19 nt, Homo sapiens
  misc_RNA (1)...(19): siRNA sense strand
guucuaugaagaccaguau

SEQ ID NO: 833931 - RNA, 19 nt, Homo sapiens
  misc_RNA (1)...(19): siRNA sense strand
cuacuacuucugcaugaug

SEQ ID NO: 833932 - RNA, 19 nt, Homo sapiens
  misc_RNA (1)...(19): siRNA sense strand
gaagugagaucgugcaaag

SEQ ID NO: 833933 - RNA, 19 nt, Homo sapiens
  misc_RNA (1)...(19): siRNA sense strand
gagauuccauacacuacua

SEQ ID NO: 833934 - RNA, 19 nt, Homo sapiens
  misc_RNA (1)...(19): siRNA sense strand
gaugagaucggaggucuua

SEQ ID NO: 833935 - RNA, 19 nt, Homo sapiens
  misc_RNA (1)...(19): siRNA sense strand
gaucggaggucuuauacag

SEQ ID NO: 833936 - RNA, 19 nt, Homo sapiens
  misc_RNA (1)...(19): siRNA sense strand
caaagacggccaugaagug

SEQ ID NO: 833937 - RNA, 19 nt, Homo sapiens
  misc_RNA (1)...(19): siRNA sense strand
ugagaucggaggucuuaua

SEQ ID NO: 833938 - RNA, 19 nt, Homo sapiens
  misc_RNA (1)...(19): siRNA sense strand
gauauuaagcccggacuga

SEQ ID NO: 833939 - RNA, 19 nt, Homo sapiens
  misc_RNA (1)...(19): siRNA sense strand
gucaacgacccacuuauuu

SEQ ID NO: 833940 - RNA, 19 nt, Homo sapiens
  misc_RNA (1)...(19): siRNA sense strand
gugcaaaguagcagauaaa

SEQ ID NO: 833941 - RNA, 19 nt, Homo sapiens
  misc_RNA (1)...(19): siRNA sense strand
agacggccaugaagugaga

SEQ ID NO: 833942 - RNA, 19 nt, Homo sapiens
  misc_RNA (1)...(19): siRNA sense strand
agugagaucgugcaaagua

SEQ ID NO: 833943 - RNA, 19 nt, Homo sapiens
  misc_RNA (1)...(19): siRNA sense strand
cgugcaaaguagcagauaa

SEQ ID NO: 833944 - RNA, 19 nt, Homo sapiens
  misc_RNA (1)...(19): siRNA sense strand
gauaggacgcgugaccaaa

SEQ ID NO: 833945 - RNA, 19 nt, Homo sapiens
  misc_RNA (1)...(19): siRNA sense strand
ccaaagacggccaugaagu

SEQ ID NO: 833946 - RNA, 19 nt, Homo sapiens
  misc_RNA (1)...(19): siRNA sense strand
gcaaugcgagauuccauac

SEQ ID NO: 833947 - RNA, 19 nt, Homo sapiens
  misc_RNA (1)...(19): siRNA sense strand
aaccaaagacggccaugaa

SEQ ID NO: 833948 - RNA, 19 nt, Homo sapiens
  misc_RNA (1)...(19): siRNA sense strand
uauuaagcccggacugaaa

SEQ ID NO: 833949 - RNA, 19 nt, Homo sapiens
  misc_RNA (1)...(19): siRNA sense strand
gagaucggaggucuuauac

SEQ ID NO: 833950 - RNA, 19 nt, Homo sapiens
  misc_RNA (1)...(19): siRNA sense strand
acgggcagcaucacuauuu

SEQ ID NO: 833951 - RNA, 19 nt, Homo sapiens
  misc_RNA (1)...(19): siRNA sense strand
gugagaucgugcaaaguag

SEQ ID NO: 833952 - RNA, 19 nt, Homo sapiens
  misc_RNA (1)...(19): siRNA sense strand
aaacgggcagcaucacuau

SEQ ID NO: 833953 - RNA, 19 nt, Homo sapiens
  misc_RNA (1)...(19): siRNA sense strand
aaagacggccaugaaguga

SEQ ID NO: 833954 - RNA, 19 nt, Homo sapiens
  misc_RNA (1)...(19): siRNA sense strand
gaggguaugcauccaugug

SEQ ID NO: 833955 - RNA, 19 nt, Homo sapiens
  misc_RNA (1)...(19): siRNA sense strand
caaaguagcagauaaaacg

SEQ ID NO: 833956 - RNA, 19 nt, Homo sapiens
  misc_RNA (1)...(19): siRNA sense strand
gauaaaacgggcagcauca

SEQ ID NO: 833957 - RNA, 19 nt, Homo sapiens
  misc_RNA (1)...(19): siRNA sense strand
cuauuuccgugugggauga

SEQ ID NO: 833958 - RNA, 19 nt, Homo sapiens
  misc_RNA (1)...(19): siRNA sense strand
gcaaugaccaggacacaua

SEQ ID NO: 833959 - RNA, 19 nt, Homo sapiens
  misc_RNA (1)...(19): siRNA sense strand
ccaguuauauuccagauuu

SEQ ID NO: 833960 - RNA, 19 nt, Homo sapiens
  misc_RNA (1)...(19): siRNA sense strand
gagauaaagucauacgauu

SEQ ID NO: 833961 - RNA, 19 nt, Homo sapiens
  misc_RNA (1)...(19): siRNA sense strand
gaccuuagcugagaucaaa

SEQ ID NO: 833962 - RNA, 19 nt, Homo sapiens
  misc_RNA (1)...(19): siRNA sense strand
guugagaccuugauugaaa

SEQ ID NO: 833963 - RNA, 19 nt, Homo sapiens
  misc_RNA (1)...(19): siRNA sense strand
ugaccaagaucccaccuua

SEQ ID NO: 833964 - RNA, 19 nt, Homo sapiens
  misc_RNA (1)...(19): siRNA sense strand
ccaaaguacugucaucauu

SEQ ID NO: 833965 - RNA, 19 nt, Homo sapiens
  misc_RNA (1)...(19): siRNA sense strand
gaagauacaacuaagacua

SEQ ID NO: 833966 - RNA, 19 nt, Homo sapiens
  misc_RNA (1)...(19): siRNA sense strand
guaaaggcauaaucucuug

SEQ ID NO: 833967 - RNA, 19 nt, Homo sapiens
  misc_RNA (1)...(19): siRNA sense strand
cuagggcacuugaguauaa

SEQ ID NO: 833968 - RNA, 19 nt, Homo sapiens
  misc_RNA (1)...(19): siRNA sense strand
gcacagugaucccgaagug

SEQ ID NO: 833969 - RNA, 19 nt, Homo sapiens
  misc_RNA (1)...(19): siRNA sense strand
ggccaaagcuggugaugga

SEQ ID NO: 833970 - RNA, 19 nt, Homo sapiens
  misc_RNA (1)...(19): siRNA sense strand
ucacguggcuuuaguuuag

SEQ ID NO: 833971 - RNA, 19 nt, Homo sapiens
  misc_RNA (1)...(19): siRNA sense strand
agaccucucuucaaguuua

SEQ ID NO: 833972 - RNA, 19 nt, Homo sapiens
  misc_RNA (1)...(19): siRNA sense strand
ucaaaggccaauauucuua

SEQ ID NO: 833973 - RNA, 19 nt, Homo sapiens
  misc_RNA (1)...(19): siRNA sense strand
agaacacccuggagcuuua

SEQ ID NO: 833974 - RNA, 19 nt, Homo sapiens
  misc_RNA (1)...(19): siRNA sense strand
ucagaaacuccaagacuua

SEQ ID NO: 833975 - RNA, 19 nt, Homo sapiens
  misc_RNA (1)...(19): siRNA sense strand
agugagagauaaagucaua

SEQ ID NO: 833976 - RNA, 19 nt, Homo sapiens
  misc_RNA (1)...(19): siRNA sense strand
acacacaaacccacacuua

SEQ ID NO: 833977 - RNA, 19 nt, Homo sapiens
  misc_RNA (1)...(19): siRNA sense strand
gauguagguauuacuguua

SEQ ID NO: 833978 - RNA, 19 nt, Homo sapiens
  misc_RNA (1)...(19): siRNA sense strand
gaagugagagauaaaguca

SEQ ID NO: 833979 - RNA, 19 nt, Homo sapiens
  misc_RNA (1)...(19): siRNA sense strand
gaaacuggacccugguuga

SEQ ID NO: 833980 - RNA, 19 nt, Homo sapiens
  misc_RNA (1)...(19): siRNA sense strand
aaacaaaggcaaagcuauu

SEQ ID NO: 833981 - RNA, 19 nt, Homo sapiens
  misc_RNA (1)...(19): siRNA sense strand
caagggaagugaucaaggu

SEQ ID NO: 833982 - RNA, 19 nt, Homo sapiens
  misc_RNA (1)...(19): siRNA sense strand
caaaucacguggcuuuagu

SEQ ID NO: 833983 - RNA, 19 nt, Homo sapiens
  misc_RNA (1)...(19): siRNA sense strand
gucaauaaucccaauguua

SEQ ID NO: 833984 - RNA, 19 nt, Homo sapiens
  misc_RNA (1)...(19): siRNA sense strand
acuaugugauuaccaguua

SEQ ID NO: 833985 - RNA, 19 nt, Homo sapiens
  misc_RNA (1)...(19): siRNA sense strand
ggagucauauauacaucaa

SEQ ID NO: 833986 - RNA, 19 nt, Homo sapiens
  misc_RNA (1)...(19): siRNA sense strand
ggacacauacagugaccua

SEQ ID NO: 833987 - RNA, 19 nt, Homo sapiens
  misc_RNA (1)...(19): siRNA sense strand
ggucaauaaucccaauguu

SEQ ID NO: 833988 - RNA, 19 nt, Homo sapiens
  misc_RNA (1)...(19): siRNA sense strand
caagguuguugcugucauu

SEQ ID NO: 833989 - RNA, 19 nt, Homo sapiens
  misc_RNA (1)...(19): siRNA sense strand
aggcaaagcuauuuaccaa

SEQ ID NO: 833990 - RNA, 19 nt, Homo sapiens
  misc_RNA (1)...(19): siRNA sense strand
gaugacagcucugagucuu

SEQ ID NO: 833991 - RNA, 19 nt, Homo sapiens
  misc_RNA (1)...(19): siRNA sense strand
caugaaauagcuacaauga

SEQ ID NO: 833992 - RNA, 19 nt, Homo sapiens
  misc_RNA (1)...(19): siRNA sense strand
caaaggccaauauucuuaa

SEQ ID NO: 833993 - RNA, 19 nt, Homo sapiens
  misc_RNA (1)...(19): siRNA sense strand
aaacccacacuuacuauaa

SEQ ID NO: 833994 - RNA, 19 nt, Homo sapiens
  misc_RNA (1)...(19): siRNA sense strand
caaaguacugucaucauug

SEQ ID NO: 833995 - RNA, 19 nt, Homo sapiens
  misc_RNA (1)...(19): siRNA sense strand
gaagcaagggcuagaggaa

SEQ ID NO: 833996 - RNA, 19 nt, Homo sapiens
  misc_RNA (1)...(19): siRNA sense strand
gugauuaccaguuauauuc

SEQ ID NO: 833997 - RNA, 19 nt, Homo sapiens
  misc_RNA (1)...(19): siRNA sense strand
uaacaagaaugagucaaag

SEQ ID NO: 833998 - RNA, 19 nt, Homo sapiens
  misc_RNA (1)...(19): siRNA sense strand
gucagaaacuccaagacuu

SEQ ID NO: 833999 - RNA, 19 nt, Homo sapiens
  misc_RNA (1)...(19): siRNA sense strand
gaaauuacuagggcacuug

SEQ ID NO: 834000 - RNA, 19 nt, Homo sapiens
  misc_RNA (1)...(19): siRNA sense strand
gagccuaaagaguuugaua

SEQ ID NO: 834001 - RNA, 19 nt, Homo sapiens
  misc_RNA (1)...(19): siRNA sense strand
cacuaaaucugagcuuauu

SEQ ID NO: 834002 - RNA, 19 nt, Homo sapiens
  misc_RNA (1)...(19): siRNA sense strand
cagauuuccucaccuuguu

SEQ ID NO: 834003 - RNA, 19 nt, Homo sapiens
  misc_RNA (1)...(19): siRNA sense strand
ucaaguuuguaaaggcaua

SEQ ID NO: 834004 - RNA, 19 nt, Homo sapiens
  misc_RNA (1)...(19): siRNA sense strand
ggagaagagccuaguguag

SEQ ID NO: 834005 - RNA, 19 nt, Homo sapiens
  misc_RNA (1)...(19): siRNA sense strand
ucaagggccagguauauug

SEQ ID NO: 834006 - RNA, 19 nt, Homo sapiens
  misc_RNA (1)...(19): siRNA sense strand
acaaaggcaaagcuauuua

SEQ ID NO: 834007 - RNA, 19 nt, Homo sapiens
  misc_RNA (1)...(19): siRNA sense strand
gcaaaucacguggcuuuag

SEQ ID NO: 834008 - RNA, 19 nt, Homo sapiens
  misc_RNA (1)...(19): siRNA sense strand
uaccagaccuuagcugaga

SEQ ID NO: 834009 - RNA, 19 nt, Homo sapiens
  misc_RNA (1)...(19): siRNA sense strand
ggccagguauauuguccua

SEQ ID NO: 834010 - RNA, 19 nt, Homo sapiens
  misc_RNA (1)...(19): siRNA sense strand
gucauugaggcaaauauua

SEQ ID NO: 834011 - RNA, 19 nt, Homo sapiens
  misc_RNA (1)...(19): siRNA sense strand
ccagguauauuguccuagu

SEQ ID NO: 834012 - RNA, 19 nt, Homo sapiens
  misc_RNA (1)...(19): siRNA sense strand
uaugccaagucacaugaua

SEQ ID NO: 834013 - RNA, 19 nt, Homo sapiens
  misc_RNA (1)...(19): siRNA sense strand
gaccagcauugggaugaaa

SEQ ID NO: 834014 - RNA, 19 nt, Homo sapiens
  misc_RNA (1)...(19): siRNA sense strand
aaacaagggaagugucaaa

SEQ ID NO: 834015 - RNA, 19 nt, Homo sapiens
  misc_RNA (1)...(19): siRNA sense strand
gguauuacuguuaugauug

SEQ ID NO: 834016 - RNA, 19 nt, Homo sapiens
  misc_RNA (1)...(19): siRNA sense strand
gggcgucaguccugcuuau

SEQ ID NO: 834017 - RNA, 19 nt, Homo sapiens
  misc_RNA (1)...(19): siRNA sense strand
ggucaagggccagguauau

SEQ ID NO: 834018 - RNA, 19 nt, Homo sapiens
  misc_RNA (1)...(19): siRNA sense strand
caaacccacacuuacuaua

SEQ ID NO: 834019 - RNA, 19 nt, Homo sapiens
  misc_RNA (1)...(19): siRNA sense strand
ugauguagguauuacuguu

SEQ ID NO: 834020 - RNA, 19 nt, Homo sapiens
  misc_RNA (1)...(19): siRNA sense strand
ggcaguggcugaggcagaa

SEQ ID NO: 834021 - RNA, 19 nt, Homo sapiens
  misc_RNA (1)...(19): siRNA sense strand
gguggaagauacaacuaag

SEQ ID NO: 834022 - RNA, 19 nt, Homo sapiens
  misc_RNA (1)...(19): siRNA sense strand
caaagcuauuuaccaagga

SEQ ID NO: 834023 - RNA, 19 nt, Homo sapiens
  misc_RNA (1)...(19): siRNA sense strand
gaacacccuggagcuuuaa

SEQ ID NO: 834024 - RNA, 19 nt, Homo sapiens
  misc_RNA (1)...(19): siRNA sense strand
gccuaaagaguuugauaaa

SEQ ID NO: 834025 - RNA, 19 nt, Homo sapiens
  misc_RNA (1)...(19): siRNA sense strand
cagauuaggcaaagggaaa

SEQ ID NO: 834026 - RNA, 19 nt, Homo sapiens
  misc_RNA (1)...(19): siRNA sense strand
cacaaacccacacuuacua

SEQ ID NO: 834027 - RNA, 19 nt, Homo sapiens
  misc_RNA (1)...(19): siRNA sense strand
guacuguaaccaagucuga

SEQ ID NO: 834028 - RNA, 19 nt, Homo sapiens
  misc_RNA (1)...(19): siRNA sense strand
gaugaaauccagugaugag

SEQ ID NO: 834029 - RNA, 19 nt, Homo sapiens
  misc_RNA (1)...(19): siRNA sense strand
guugcacccuuuaacaaga

SEQ ID NO: 834030 - RNA, 19 nt, Homo sapiens
  misc_RNA (1)...(19): siRNA sense strand
aaaguacugucaucauugg

SEQ ID NO: 834031 - RNA, 19 nt, Homo sapiens
  misc_RNA (1)...(19): siRNA sense strand
gcuuauccauuuacucaag

SEQ ID NO: 834032 - RNA, 19 nt, Homo sapiens
  misc_RNA (1)...(19): siRNA sense strand
aacccacacuuacuauaaa

SEQ ID NO: 834033 - RNA, 19 nt, Homo sapiens
  misc_RNA (1)...(19): siRNA sense strand
guaaccaagucugaaguca

SEQ ID NO: 834034 - RNA, 19 nt, Homo sapiens
  misc_RNA (1)...(19): siRNA sense strand
cugcuagagugaaugguaa

SEQ ID NO: 834035 - RNA, 19 nt, Homo sapiens
  misc_RNA (1)...(19): siRNA sense strand
ccacaaaccaagucaaagg

SEQ ID NO: 834036 - RNA, 19 nt, Homo sapiens
  misc_RNA (1)...(19): siRNA sense strand
auugaucagugccaaagua

SEQ ID NO: 834037 - RNA, 19 nt, Homo sapiens
  misc_RNA (1)...(19): siRNA sense strand
gaaggccugccacugcaaa

SEQ ID NO: 834038 - RNA, 19 nt, Homo sapiens
  misc_RNA (1)...(19): siRNA sense strand
cuuaucaugggccuuauua

SEQ ID NO: 834039 - RNA, 19 nt, Homo sapiens
  misc_RNA (1)...(19): siRNA sense strand
gaaacuccaagacuuagca

SEQ ID NO: 834040 - RNA, 19 nt, Homo sapiens
  misc_RNA (1)...(19): siRNA sense strand
ucacuaaaucugagcuuau

SEQ ID NO: 834041 - RNA, 19 nt, Homo sapiens
  misc_RNA (1)...(19): siRNA sense strand
gaucaagguggaagauaca

SEQ ID NO: 834042 - RNA, 19 nt, Homo sapiens
  misc_RNA (1)...(19): siRNA sense strand
aaacuuguugcccuccuua

SEQ ID NO: 834043 - RNA, 19 nt, Homo sapiens
  misc_RNA (1)...(19): siRNA sense strand
aaccaagucugaagucaag

SEQ ID NO: 834044 - RNA, 19 nt, Homo sapiens
  misc_RNA (1)...(19): siRNA sense strand
caaaaucaggggagucaua

SEQ ID NO: 834045 - RNA, 19 nt, Homo sapiens
  misc_RNA (1)...(19): siRNA sense strand
cugcaaaucacguggcuuu

SEQ ID NO: 834046 - RNA, 19 nt, Homo sapiens
  misc_RNA (1)...(19): siRNA sense strand
ggacccugguugagaccuu

SEQ ID NO: 834047 - RNA, 19 nt, Homo sapiens
  misc_RNA (1)...(19): siRNA sense strand
gcaguauagugccacaaac

SEQ ID NO: 834048 - RNA, 19 nt, Homo sapiens
  misc_RNA (1)...(19): siRNA sense strand
aaagcuauuuaccaaggaa

SEQ ID NO: 834049 - RNA, 19 nt, Homo sapiens
  misc_RNA (1)...(19): siRNA sense strand
guagguauuacuguuauga

SEQ ID NO: 834050 - RNA, 19 nt, Homo sapiens
  misc_RNA (1)...(19): siRNA sense strand
uguccuaguuccaguugaa

SEQ ID NO: 834051 - RNA, 19 nt, Homo sapiens
  misc_RNA (1)...(19): siRNA sense strand
gcccaagcccacacacaaa

SEQ ID NO: 834052 - RNA, 19 nt, Homo sapiens
  misc_RNA (1)...(19): siRNA sense strand
gagaccagcauugggauga

SEQ ID NO: 834053 - RNA, 19 nt, Homo sapiens
  misc_RNA (1)...(19): siRNA sense strand
cccuggagcuuuaaguaug

SEQ ID NO: 834054 - RNA, 19 nt, Homo sapiens
  misc_RNA (1)...(19): siRNA sense strand
ugaucaagguggaagauac

SEQ ID NO: 834055 - RNA, 19 nt, Homo sapiens
  misc_RNA (1)...(19): siRNA sense strand
ggucagaaacuccaagacu

SEQ ID NO: 834056 - RNA, 19 nt, Homo sapiens
  misc_RNA (1)...(19): siRNA sense strand
gaauugaucagugccaaag

SEQ ID NO: 834057 - RNA, 19 nt, Homo sapiens
  misc_RNA (1)...(19): siRNA sense strand
ucacgccaauacaagagaa

SEQ ID NO: 834058 - RNA, 19 nt, Homo sapiens
  misc_RNA (1)...(19): siRNA sense strand
gcaaugaaguucucaaauu

SEQ ID NO: 834059 - RNA, 19 nt, Homo sapiens
  misc_RNA (1)...(19): siRNA sense strand
gcaaauaccuaucccuaaa

SEQ ID NO: 834060 - RNA, 19 nt, Homo sapiens
  misc_RNA (1)...(19): siRNA sense strand
gaaaacaacucuagcuuua

SEQ ID NO: 834061 - RNA, 19 nt, Homo sapiens
  misc_RNA (1)...(19): siRNA sense strand
gaaguaauagguacaguua

SEQ ID NO: 834062 - RNA, 19 nt, Homo sapiens
  misc_RNA (1)...(19): siRNA sense strand
ggauggaucuuuacaguug

SEQ ID NO: 834063 - RNA, 19 nt, Homo sapiens
  misc_RNA (1)...(19): siRNA sense strand
guuguuugcucgaaauuua

SEQ ID NO: 834064 - RNA, 19 nt, Homo sapiens
  misc_RNA (1)...(19): siRNA sense strand
gaccugaacuguuugaugu

SEQ ID NO: 834065 - RNA, 19 nt, Homo sapiens
  misc_RNA (1)...(19): siRNA sense strand
gaagaggauacaucuguua

SEQ ID NO: 834066 - RNA, 19 nt, Homo sapiens
  misc_RNA (1)...(19): siRNA sense strand
ccacuaagccagagaauga

SEQ ID NO: 834067 - RNA, 19 nt, Homo sapiens
  misc_RNA (1)...(19): siRNA sense strand
gcuccaaacugucuucuug

SEQ ID NO: 834068 - RNA, 19 nt, Homo sapiens
  misc_RNA (1)...(19): siRNA sense strand
ugaaugaaauggaacauca

SEQ ID NO: 834069 - RNA, 19 nt, Homo sapiens
  misc_RNA (1)...(19): siRNA sense strand
gggaauauuuggaguuguu

SEQ ID NO: 834070 - RNA, 19 nt, Homo sapiens
  misc_RNA (1)...(19): siRNA sense strand
ggaagaggauacaucuguu

SEQ ID NO: 834071 - RNA, 19 nt, Homo sapiens
  misc_RNA (1)...(19): siRNA sense strand
ugaauuggaugcuauggaa

SEQ ID NO: 834072 - RNA, 19 nt, Homo sapiens
  misc_RNA (1)...(19): siRNA sense strand
gaacaucagacauuacaau

SEQ ID NO: 834073 - RNA, 19 nt, Homo sapiens
  misc_RNA (1)...(19): siRNA sense strand
gcauuugccuucucugaau

SEQ ID NO: 834074 - RNA, 19 nt, Homo sapiens
  misc_RNA (1)...(19): siRNA sense strand
gaauuuguguucccauuag

SEQ ID NO: 834075 - RNA, 19 nt, Homo sapiens
  misc_RNA (1)...(19): siRNA sense strand
gagaauuuguguucccauu

SEQ ID NO: 834076 - RNA, 19 nt, Homo sapiens
  misc_RNA (1)...(19): siRNA sense strand
caccaaaccuuauauaacu

SEQ ID NO: 834077 - RNA, 19 nt, Homo sapiens
  misc_RNA (1)...(19): siRNA sense strand
gcaaccacuucuaaacuau

SEQ ID NO: 834078 - RNA, 19 nt, Homo sapiens
  misc_RNA (1)...(19): siRNA sense strand
cauaaagaaugccagcaaa

SEQ ID NO: 834079 - RNA, 19 nt, Homo sapiens
  misc_RNA (1)...(19): siRNA sense strand
ggaguucacuacuucuguu

SEQ ID NO: 834080 - RNA, 19 nt, Homo sapiens
  misc_RNA (1)...(19): siRNA sense strand
cuacgaaggucuuauacug

SEQ ID NO: 834081 - RNA, 19 nt, Homo sapiens
  misc_RNA (1)...(19): siRNA sense strand
gacagaagcaccuacguuu

SEQ ID NO: 834082 - RNA, 19 nt, Homo sapiens
  misc_RNA (1)...(19): siRNA sense strand
aaacaacucuagcuuuaca

SEQ ID NO: 834083 - RNA, 19 nt, Homo sapiens
  misc_RNA (1)...(19): siRNA sense strand
caucagacauuacaauugg

SEQ ID NO: 834084 - RNA, 19 nt, Homo sapiens
  misc_RNA (1)...(19): siRNA sense strand
ggaauaccauacaaagauc

SEQ ID NO: 834085 - RNA, 19 nt, Homo sapiens
  misc_RNA (1)...(19): siRNA sense strand
gaaugaugauggaggaaau

SEQ ID NO: 834086 - RNA, 19 nt, Homo sapiens
  misc_RNA (1)...(19): siRNA sense strand
ugacauuucuuguaugcaa

SEQ ID NO: 834087 - RNA, 19 nt, Homo sapiens
  misc_RNA (1)...(19): siRNA sense strand
cuacuucuguucacuuuga

SEQ ID NO: 834088 - RNA, 19 nt, Homo sapiens
  misc_RNA (1)...(19): siRNA sense strand
gcagaacaaaucaguuaaa

SEQ ID NO: 834089 - RNA, 19 nt, Homo sapiens
  misc_RNA (1)...(19): siRNA sense strand
uggaggaaauuaugaaaug

SEQ ID NO: 834090 - RNA, 19 nt, Homo sapiens
  misc_RNA (1)...(19): siRNA sense strand
guugucagcugggugguua

SEQ ID NO: 834091 - RNA, 19 nt, Homo sapiens
  misc_RNA (1)...(19): siRNA sense strand
aggaagaucugaugaaugg

SEQ ID NO: 834092 - RNA, 19 nt, Homo sapiens
  misc_RNA (1)...(19): siRNA sense strand
caaacugucuucuuguuac

SEQ ID NO: 834093 - RNA, 19 nt, Homo sapiens
  misc_RNA (1)...(19): siRNA sense strand
aaagaaugccagcaaagua

SEQ ID NO: 834094 - RNA, 19 nt, Homo sapiens
  misc_RNA (1)...(19): siRNA sense strand
ggaguuguuugcucgaaau

SEQ ID NO: 834095 - RNA, 19 nt, Homo sapiens
  misc_RNA (1)...(19): siRNA sense strand
ccaaacugucuucuuguua

SEQ ID NO: 834096 - RNA, 19 nt, Homo sapiens
  misc_RNA (1)...(19): siRNA sense strand
aaaggaagaucugaugaau

SEQ ID NO: 834097 - RNA, 19 nt, Homo sapiens
  misc_RNA (1)...(19): siRNA sense strand
ggaggaaauuaugaaaugu

SEQ ID NO: 834098 - RNA, 19 nt, Homo sapiens
  misc_RNA (1)...(19): siRNA sense strand
uggcagaacaaaucaguua

SEQ ID NO: 834099 - RNA, 19 nt, Homo sapiens
  misc_RNA (1)...(19): siRNA sense strand
uuauauaacuccagcuguu

SEQ ID NO: 834100 - RNA, 19 nt, Homo sapiens
  misc_RNA (1)...(19): siRNA sense strand
gaucugaugaaugguguua

SEQ ID NO: 834101 - RNA, 19 nt, Homo sapiens
  misc_RNA (1)...(19): siRNA sense strand
gcaguuuucuuuuaucuga

SEQ ID NO: 834102 - RNA, 19 nt, Homo sapiens
  misc_RNA (1)...(19): siRNA sense strand
caaggugaauuggaugcua

SEQ ID NO: 834103 - RNA, 19 nt, Homo sapiens
  misc_RNA (1)...(19): siRNA sense strand
gaugauggaggaaauuaug

SEQ ID NO: 834104 - RNA, 19 nt, Homo sapiens
  misc_RNA (1)...(19): siRNA sense strand
caaauacagcaaauaccua

SEQ ID NO: 834105 - RNA, 19 nt, Homo sapiens
  misc_RNA (1)...(19): siRNA sense strand
gauuuuggauggaucuuua

SEQ ID NO: 834106 - RNA, 19 nt, Homo sapiens
  misc_RNA (1)...(19): siRNA sense strand
uaacuccagcuguucauaa

SEQ ID NO: 834107 - RNA, 19 nt, Homo sapiens
  misc_RNA (1)...(19): siRNA sense strand
gaugucaccaaaccuuaua

SEQ ID NO: 834108 - RNA, 19 nt, Homo sapiens
  misc_RNA (1)...(19): siRNA sense strand
gcaaaguaaugaaaaggaa

SEQ ID NO: 834109 - RNA, 19 nt, Homo sapiens
  misc_RNA (1)...(19): siRNA sense strand
ggaagaagcguaaaagaug

SEQ ID NO: 834110 - RNA, 19 nt, Homo sapiens
  misc_RNA (1)...(19): siRNA sense strand
ucugaugaaugguguuaaa

SEQ ID NO: 834111 - RNA, 19 nt, Homo sapiens
  misc_RNA (1)...(19): siRNA sense strand
caacuucaccagcaucaug

SEQ ID NO: 834112 - RNA, 19 nt, Homo sapiens
  misc_RNA (1)...(19): siRNA sense strand
ugcaaccacuucuaaacua

SEQ ID NO: 834113 - RNA, 19 nt, Homo sapiens
  misc_RNA (1)...(19): siRNA sense strand
gcccauuacuuuaccacuu

SEQ ID NO: 834114 - RNA, 19 nt, Homo sapiens
  misc_RNA (1)...(19): siRNA sense strand
caaccacuucuaaacuaua

SEQ ID NO: 834115 - RNA, 19 nt, Homo sapiens
  misc_RNA (1)...(19): siRNA sense strand
uggagucugugcugcauuu

SEQ ID NO: 834116 - RNA, 19 nt, Homo sapiens
  misc_RNA (1)...(19): siRNA sense strand
cauuccagaccacaaauua

SEQ ID NO: 834117 - RNA, 19 nt, Homo sapiens
  misc_RNA (1)...(19): siRNA sense strand
aagaaugccagcaaaguaa

SEQ ID NO: 834118 - RNA, 19 nt, Homo sapiens
  misc_RNA (1)...(19): siRNA sense strand
agucugugcugcauuuauu

SEQ ID NO: 834119 - RNA, 19 nt, Homo sapiens
  misc_RNA (1)...(19): siRNA sense strand
gaaccuuguugccguaaaa

SEQ ID NO: 834120 - RNA, 19 nt, Homo sapiens
  misc_RNA (1)...(19): siRNA sense strand
gcaccuacguuuuauaaag

SEQ ID NO: 834121 - RNA, 19 nt, Homo sapiens
  misc_RNA (1)...(19): siRNA sense strand
cguaaaagauguguuguuu

SEQ ID NO: 834122 - RNA, 19 nt, Homo sapiens
  misc_RNA (1)...(19): siRNA sense strand
gaagaagcguaaaagaugu

SEQ ID NO: 834123 - RNA, 19 nt, Homo sapiens
  misc_RNA (1)...(19): siRNA sense strand
cagaagcaccuacguuuua

SEQ ID NO: 834124 - RNA, 19 nt, Homo sapiens
  misc_RNA (1)...(19): siRNA sense strand
gcaaauacagcaaauaccu

SEQ ID NO: 834125 - RNA, 19 nt, Homo sapiens
  misc_RNA (1)...(19): siRNA sense strand
aauaaccaauucaggagaa

SEQ ID NO: 834126 - RNA, 19 nt, Homo sapiens
  misc_RNA (1)...(19): siRNA sense strand
guacucuucacucacauaa

SEQ ID NO: 834127 - RNA, 19 nt, Homo sapiens
  misc_RNA (1)...(19): siRNA sense strand
gcuucugacucuuccacua

SEQ ID NO: 834128 - RNA, 19 nt, Homo sapiens
  misc_RNA (1)...(19): siRNA sense strand
aauuucagcauguggauua

SEQ ID NO: 834129 - RNA, 19 nt, Homo sapiens
  misc_RNA (1)...(19): siRNA sense strand
gggcaaugaaguucucaaa

SEQ ID NO: 834130 - RNA, 19 nt, Homo sapiens
  misc_RNA (1)...(19): siRNA sense strand
gcccuacgaaggucuuaua

SEQ ID NO: 834131 - RNA, 19 nt, Homo sapiens
  misc_RNA (1)...(19): siRNA sense strand
gauccaccauggcagaaca

SEQ ID NO: 834132 - RNA, 19 nt, Homo sapiens
  misc_RNA (1)...(19): siRNA sense strand
gauggaggaaauuaugaaa

SEQ ID NO: 834133 - RNA, 19 nt, Homo sapiens
  misc_RNA (1)...(19): siRNA sense strand
gauggaucuuuacaguuga

SEQ ID NO: 834134 - RNA, 19 nt, Homo sapiens
  misc_RNA (1)...(19): siRNA sense strand
cagccagguuggacuaguu

SEQ ID NO: 834135 - RNA, 19 nt, Homo sapiens
  misc_RNA (1)...(19): siRNA sense strand
uagguacaguuauuuguca

SEQ ID NO: 834136 - RNA, 19 nt, Homo sapiens
  misc_RNA (1)...(19): siRNA sense strand
gaaauggaacaucagacau

SEQ ID NO: 834137 - RNA, 19 nt, Homo sapiens
  misc_RNA (1)...(19): siRNA sense strand
uaugugaaauggcaaagca

SEQ ID NO: 834138 - RNA, 19 nt, Homo sapiens
  misc_RNA (1)...(19): siRNA sense strand
cccauuacuuuaccacuug

SEQ ID NO: 834139 - RNA, 19 nt, Homo sapiens
  misc_RNA (1)...(19): siRNA sense strand
gauccaggaaggucucaaa

SEQ ID NO: 834140 - RNA, 19 nt, Homo sapiens
  misc_RNA (1)...(19): siRNA sense strand
aaacaggacaaggguagua

SEQ ID NO: 834141 - RNA, 19 nt, Homo sapiens
  misc_RNA (1)...(19): siRNA sense strand
uucagcauguggauuauuu

SEQ ID NO: 834142 - RNA, 19 nt, Homo sapiens
  misc_RNA (1)...(19): siRNA sense strand
gcccuguacucuucacuca

SEQ ID NO: 834143 - RNA, 19 nt, Homo sapiens
  misc_RNA (1)...(19): siRNA sense strand
ccagaccacaaauuaauug

SEQ ID NO: 834144 - RNA, 19 nt, Homo sapiens
  misc_RNA (1)...(19): siRNA sense strand
aaacugcucuaccauugag

SEQ ID NO: 834145 - RNA, 19 nt, Homo sapiens
  misc_RNA (1)...(19): siRNA sense strand
caaauaccuaucccuaaau

SEQ ID NO: 834146 - RNA, 19 nt, Homo sapiens
  misc_RNA (1)...(19): siRNA sense strand
gccagagaaugaugaugga

SEQ ID NO: 834147 - RNA, 19 nt, Homo sapiens
  misc_RNA (1)...(19): siRNA sense strand
cugcauuuauugcuucuga

SEQ ID NO: 834148 - RNA, 19 nt, Homo sapiens
  misc_RNA (1)...(19): siRNA sense strand
agaauuuguguucccauua

SEQ ID NO: 834149 - RNA, 19 nt, Homo sapiens
  misc_RNA (1)...(19): siRNA sense strand
aaaaggaguucacuacuuc

SEQ ID NO: 834150 - RNA, 19 nt, Homo sapiens
  misc_RNA (1)...(19): siRNA sense strand
uggaauaccauacaaagau

SEQ ID NO: 834151 - RNA, 19 nt, Homo sapiens
  misc_RNA (1)...(19): siRNA sense strand
uaaagaaugccagcaaagu

SEQ ID NO: 834152 - RNA, 19 nt, Homo sapiens
  misc_RNA (1)...(19): siRNA sense strand
ugaaauggaacaucagaca

SEQ ID NO: 834153 - RNA, 19 nt, Homo sapiens
  misc_RNA (1)...(19): siRNA sense strand
cuccagcuguucauaaaga

SEQ ID NO: 834154 - RNA, 19 nt, Homo sapiens
  misc_RNA (1)...(19): siRNA sense strand
caccauggcagaacaaauc

SEQ ID NO: 834155 - RNA, 19 nt, Homo sapiens
  misc_RNA (1)...(19): siRNA sense strand
cauuacaauugguggaaga

SEQ ID NO: 834156 - RNA, 19 nt, Homo sapiens
  misc_RNA (1)...(19): siRNA sense strand
uccaaacugucuucuuguu

SEQ ID NO: 834157 - RNA, 19 nt, Homo sapiens
  misc_RNA (1)...(19): siRNA sense strand
cacuacuucuguucacuuu

SEQ ID NO: 834158 - RNA, 19 nt, Homo sapiens
  misc_RNA (1)...(19): siRNA sense strand
ggaaauccuucaauccuuu

SEQ ID NO: 834159 - RNA, 19 nt, Homo sapiens
  misc_RNA (1)...(19): siRNA sense strand
ccaauaagcuccaguaugg

SEQ ID NO: 834160 - RNA, 19 nt, Homo sapiens
  misc_RNA (1)...(19): siRNA sense strand
ccaaauggauggcaacaaa

SEQ ID NO: 834161 - RNA, 19 nt, Homo sapiens
  misc_RNA (1)...(19): siRNA sense strand
gaaaucuguuugggaauua

SEQ ID NO: 834162 - RNA, 19 nt, Homo sapiens
  misc_RNA (1)...(19): siRNA sense strand
ggacagugauucaaaguca

SEQ ID NO: 834163 - RNA, 19 nt, Homo sapiens
  misc_RNA (1)...(19): siRNA sense strand
gaacaauucucauucuuac

SEQ ID NO: 834164 - RNA, 19 nt, Homo sapiens
  misc_RNA (1)...(19): siRNA sense strand
gcacuucuguuuaugaguu

SEQ ID NO: 834165 - RNA, 19 nt, Homo sapiens
  misc_RNA (1)...(19): siRNA sense strand
ucacaaauguucacacaga

SEQ ID NO: 834166 - RNA, 19 nt, Homo sapiens
  misc_RNA (1)...(19): siRNA sense strand
ugaacaaccugcccucuaa

SEQ ID NO: 834167 - RNA, 19 nt, Homo sapiens
  misc_RNA (1)...(19): siRNA sense strand
ugacuaaucuuccuaaugg

SEQ ID NO: 834168 - RNA, 19 nt, Homo sapiens
  misc_RNA (1)...(19): siRNA sense strand
ggagacagcuugcaaacca

SEQ ID NO: 834169 - RNA, 19 nt, Homo sapiens
  misc_RNA (1)...(19): siRNA sense strand
gaacuuacacaagauagua

SEQ ID NO: 834170 - RNA, 19 nt, Homo sapiens
  misc_RNA (1)...(19): siRNA sense strand
gggaacaucugcuguggaa

SEQ ID NO: 834171 - RNA, 19 nt, Homo sapiens
  misc_RNA (1)...(19): siRNA sense strand
gcacaagaggcaaaucuaa

SEQ ID NO: 834172 - RNA, 19 nt, Homo sapiens
  misc_RNA (1)...(19): siRNA sense strand
gaaggugucauugaaauaa

SEQ ID NO: 834173 - RNA, 19 nt, Homo sapiens
  misc_RNA (1)...(19): siRNA sense strand
gcaauggagugacuaaucu

SEQ ID NO: 834174 - RNA, 19 nt, Homo sapiens
  misc_RNA (1)...(19): siRNA sense strand
caaagaagccaaucaguuc

SEQ ID NO: 834175 - RNA, 19 nt, Homo sapiens
  misc_RNA (1)...(19): siRNA sense strand
ucucagaacuuaacuuuca

SEQ ID NO: 834176 - RNA, 19 nt, Homo sapiens
  misc_RNA (1)...(19): siRNA sense strand
aaaccaagcuugaauggau

SEQ ID NO: 834177 - RNA, 19 nt, Homo sapiens
  misc_RNA (1)...(19): siRNA sense strand
cacuaaagauucugaguuu

SEQ ID NO: 834178 - RNA, 19 nt, Homo sapiens
  misc_RNA (1)...(19): siRNA sense strand
caagauaucaguguuauga

SEQ ID NO: 834179 - RNA, 19 nt, Homo sapiens
  misc_RNA (1)...(19): siRNA sense strand
cgacauacacccauuggua

SEQ ID NO: 834180 - RNA, 19 nt, Homo sapiens
  misc_RNA (1)...(19): siRNA sense strand
uggaagagcuggugcuuau

SEQ ID NO: 834181 - RNA, 19 nt, Homo sapiens
  misc_RNA (1)...(19): siRNA sense strand
gcaggaauccguuugcauu

SEQ ID NO: 834182 - RNA, 19 nt, Homo sapiens
  misc_RNA (1)...(19): siRNA sense strand
ggaagucuaugaugaguac

SEQ ID NO: 834183 - RNA, 19 nt, Homo sapiens
  misc_RNA (1)...(19): siRNA sense strand
ggaauacccuagaggaaca

SEQ ID NO: 834184 - RNA, 19 nt, Homo sapiens
  misc_RNA (1)...(19): siRNA sense strand
ggcaacaaaucacuaaaga

SEQ ID NO: 834185 - RNA, 19 nt, Homo sapiens
  misc_RNA (1)...(19): siRNA sense strand
gcaucaaggugccacugua

SEQ ID NO: 834186 - RNA, 19 nt, Homo sapiens
  misc_RNA (1)...(19): siRNA sense strand
gcaccggucagaucaauuu

SEQ ID NO: 834187 - RNA, 19 nt, Homo sapiens
  misc_RNA (1)...(19): siRNA sense strand
acacaugaguucucuaaau

SEQ ID NO: 834188 - RNA, 19 nt, Homo sapiens
  misc_RNA (1)...(19): siRNA sense strand
gagcaacaauuagauuuca

SEQ ID NO: 834189 - RNA, 19 nt, Homo sapiens
  misc_RNA (1)...(19): siRNA sense strand
ggauagugcuuuaggaagu

SEQ ID NO: 834190 - RNA, 19 nt, Homo sapiens
  misc_RNA (1)...(19): siRNA sense strand
cagcaaaugucaaugaaca

SEQ ID NO: 834191 - RNA, 19 nt, Homo sapiens
  misc_RNA (1)...(19): siRNA sense strand
aauggugacucaaucaaua

SEQ ID NO: 834192 - RNA, 19 nt, Homo sapiens
  misc_RNA (1)...(19): siRNA sense strand
caucaaaacugcuguugua

SEQ ID NO: 834193 - RNA, 19 nt, Homo sapiens
  misc_RNA (1)...(19): siRNA sense strand
gauagugcuuuaggaagua

SEQ ID NO: 834194 - RNA, 19 nt, Homo sapiens
  misc_RNA (1)...(19): siRNA sense strand
gaauuccucugcccuuguu

SEQ ID NO: 834195 - RNA, 19 nt, Homo sapiens
  misc_RNA (1)...(19): siRNA sense strand
gacccuaaauuaugcacua

SEQ ID NO: 834196 - RNA, 19 nt, Homo sapiens
  misc_RNA (1)...(19): siRNA sense strand
ucaaagcacuaucacucua

SEQ ID NO: 834197 - RNA, 19 nt, Homo sapiens
  misc_RNA (1)...(19): siRNA sense strand
gaccagaggaccaaaugua

SEQ ID NO: 834198 - RNA, 19 nt, Homo sapiens
  misc_RNA (1)...(19): siRNA sense strand
aagcuugaauggaugaaua

SEQ ID NO: 834199 - RNA, 19 nt, Homo sapiens
  misc_RNA (1)...(19): siRNA sense strand
gaagcaagcaaacaguaaa

SEQ ID NO: 834200 - RNA, 19 nt, Homo sapiens
  misc_RNA (1)...(19): siRNA sense strand
caagaggcaaaucuaaaua

SEQ ID NO: 834201 - RNA, 19 nt, Homo sapiens
  misc_RNA (1)...(19): siRNA sense strand
gagcagcaaaugucaauga

SEQ ID NO: 834202 - RNA, 19 nt, Homo sapiens
  misc_RNA (1)...(19): siRNA sense strand
gauacaggaaucuucuuua

SEQ ID NO: 834203 - RNA, 19 nt, Homo sapiens
  misc_RNA (1)...(19): siRNA sense strand
gaacaucugcuguggaagu

SEQ ID NO: 834204 - RNA, 19 nt, Homo sapiens
  misc_RNA (1)...(19): siRNA sense strand
cacaugaguucucuaaaug

SEQ ID NO: 834205 - RNA, 19 nt, Homo sapiens
  misc_RNA (1)...(19): siRNA sense strand
gcaggaaugaaaggaauua

SEQ ID NO: 834206 - RNA, 19 nt, Homo sapiens
  misc_RNA (1)...(19): siRNA sense strand
guugguaauucaucaguuu

SEQ ID NO: 834207 - RNA, 19 nt, Homo sapiens
  misc_RNA (1)...(19): siRNA sense strand
uaaagacccuaaauuaugc

SEQ ID NO: 834208 - RNA, 19 nt, Homo sapiens
  misc_RNA (1)...(19): siRNA sense strand
aaaagucgcuguaaugaaa

SEQ ID NO: 834209 - RNA, 19 nt, Homo sapiens
  misc_RNA (1)...(19): siRNA sense strand
caacuacuguccucuuuac

SEQ ID NO: 834210 - RNA, 19 nt, Homo sapiens
  misc_RNA (1)...(19): siRNA sense strand
gagagcaacaauuagauuu

SEQ ID NO: 834211 - RNA, 19 nt, Homo sapiens
  misc_RNA (1)...(19): siRNA sense strand
aaccugcccucuaauuaua

SEQ ID NO: 834212 - RNA, 19 nt, Homo sapiens
  misc_RNA (1)...(19): siRNA sense strand
gaacucugaugaggcuaaa

SEQ ID NO: 834213 - RNA, 19 nt, Homo sapiens
  misc_RNA (1)...(19): siRNA sense strand
ggaaguagccgacauacac

SEQ ID NO: 834214 - RNA, 19 nt, Homo sapiens
  misc_RNA (1)...(19): siRNA sense strand
gaacaacagcaagauauca

SEQ ID NO: 834215 - RNA, 19 nt, Homo sapiens
  misc_RNA (1)...(19): siRNA sense strand
ucaaagaagccaaucaguu

SEQ ID NO: 834216 - RNA, 19 nt, Homo sapiens
  misc_RNA (1)...(19): siRNA sense strand
caauagcacuguuaaagac

SEQ ID NO: 834217 - RNA, 19 nt, Homo sapiens
  misc_RNA (1)...(19): siRNA sense strand
ggagagcaacaauuagauu

SEQ ID NO: 834218 - RNA, 19 nt, Homo sapiens
  misc_RNA (1)...(19): siRNA sense strand
ucaggaaaccucaugcuuu

SEQ ID NO: 834219 - RNA, 19 nt, Homo sapiens
  misc_RNA (1)...(19): siRNA sense strand
ucuaauaucccacaaucua

SEQ ID NO: 834220 - RNA, 19 nt, Homo sapiens
  misc_RNA (1)...(19): siRNA sense strand
caacguaaucuuaguggaa

SEQ ID NO: 834221 - RNA, 19 nt, Homo sapiens
  misc_RNA (1)...(19): siRNA sense strand
guaaauaacaccaacaaac

SEQ ID NO: 834222 - RNA, 19 nt, Homo sapiens
  misc_RNA (1)...(19): siRNA sense strand
aauggcagcucuaacugua

SEQ ID NO: 834223 - RNA, 19 nt, Homo sapiens
  misc_RNA (1)...(19): siRNA sense strand
ccaaacaggaagucuauga

SEQ ID NO: 834224 - RNA, 19 nt, Homo sapiens
  misc_RNA (1)...(19): siRNA sense strand
ccacuucuaucauccaauc

SEQ ID NO: 834225 - RNA, 19 nt, Homo sapiens
  misc_RNA (1)...(19): siRNA sense strand
agacuucacugcccaaaca

SEQ ID NO: 834226 - RNA, 19 nt, Homo sapiens
  misc_RNA (1)...(19): siRNA sense strand
agaaaucuguuugggaauu

SEQ ID NO: 834227 - RNA, 19 nt, Homo sapiens
  misc_RNA (1)...(19): siRNA sense strand
ucagauuccuagcaaggua

SEQ ID NO: 834228 - RNA, 19 nt, Homo sapiens
  misc_RNA (1)...(19): siRNA sense strand
gcaauaaucaaagcacuau

SEQ ID NO: 834229 - RNA, 19 nt, Homo sapiens
  misc_RNA (1)...(19): siRNA sense strand
uaauggaaauccuucaauc

SEQ ID NO: 834230 - RNA, 19 nt, Homo sapiens
  misc_RNA (1)...(19): siRNA sense strand
caaccugcccucuaauuau

SEQ ID NO: 834231 - RNA, 19 nt, Homo sapiens
  misc_RNA (1)...(19): siRNA sense strand
uaucuaauaucccacaauc

SEQ ID NO: 834232 - RNA, 19 nt, Homo sapiens
  misc_RNA (1)...(19): siRNA sense strand
caaggugccacuguaaaua

SEQ ID NO: 834233 - RNA, 19 nt, Homo sapiens
  misc_RNA (1)...(19): siRNA sense strand
gaaugccacaggacacaua

SEQ ID NO: 834234 - RNA, 19 nt, Homo sapiens
  misc_RNA (1)...(19): siRNA sense strand
gaaaacgacugucuucuac

SEQ ID NO: 834235 - RNA, 19 nt, Homo sapiens
  misc_RNA (1)...(19): siRNA sense strand
gcaagaacagaaacuacaa

SEQ ID NO: 834236 - RNA, 19 nt, Homo sapiens
  misc_RNA (1)...(19): siRNA sense strand
gagcuccaaugucaucuca

SEQ ID NO: 834237 - RNA, 19 nt, Homo sapiens
  misc_RNA (1)...(19): siRNA sense strand
gaugaacuuacacaagaua

SEQ ID NO: 834238 - RNA, 19 nt, Homo sapiens
  misc_RNA (1)...(19): siRNA sense strand
ccacagaucaagaaugguu

SEQ ID NO: 834239 - RNA, 19 nt, Homo sapiens
  misc_RNA (1)...(19): siRNA sense strand
ccucagaucuuacccaaac

SEQ ID NO: 834240 - RNA, 19 nt, Homo sapiens
  misc_RNA (1)...(19): siRNA sense strand
caacacugcccaaccuuga

SEQ ID NO: 834241 - RNA, 19 nt, Homo sapiens
  misc_RNA (1)...(19): siRNA sense strand
uaaacuugauuccgacaau

SEQ ID NO: 834242 - RNA, 19 nt, Homo sapiens
  misc_RNA (1)...(19): siRNA sense strand
gcagacagccuucccaaac

SEQ ID NO: 834243 - RNA, 19 nt, Homo sapiens
  misc_RNA (1)...(19): siRNA sense strand
guuuauaucugccaguugu

SEQ ID NO: 834244 - RNA, 19 nt, Homo sapiens
  misc_RNA (1)...(19): siRNA sense strand
guaaaugucaguucacaca

SEQ ID NO: 834245 - RNA, 19 nt, Homo sapiens
  misc_RNA (1)...(19): siRNA sense strand
ucacacaugaguucucuaa

SEQ ID NO: 834246 - RNA, 19 nt, Homo sapiens
  misc_RNA (1)...(19): siRNA sense strand
gcacgucaacaggcaauaa

SEQ ID NO: 834247 - RNA, 19 nt, Homo sapiens
  misc_RNA (1)...(19): siRNA sense strand
caacaacauagcucaaaga

SEQ ID NO: 834248 - RNA, 19 nt, Homo sapiens
  misc_RNA (1)...(19): siRNA sense strand
cccgacaucugaaaugauu

SEQ ID NO: 834249 - RNA, 19 nt, Homo sapiens
  misc_RNA (1)...(19): siRNA sense strand
aaacgucuuuccaaacaug

SEQ ID NO: 834250 - RNA, 19 nt, Homo sapiens
  misc_RNA (1)...(19): siRNA sense strand
ucaaugacuuagagaaauc

SEQ ID NO: 834251 - RNA, 19 nt, Homo sapiens
  misc_RNA (1)...(19): siRNA sense strand
gugacucaaucaauaaaga

SEQ ID NO: 834252 - RNA, 19 nt, Homo sapiens
  misc_RNA (1)...(19): siRNA sense strand
gaagugucuuucucuugga

SEQ ID NO: 834253 - RNA, 19 nt, Homo sapiens
  misc_RNA (1)...(19): siRNA sense strand
caaugaugaugcagugaga

SEQ ID NO: 834254 - RNA, 19 nt, Homo sapiens
  misc_RNA (1)...(19): siRNA sense strand
gaggcaaaucuaaauauug

SEQ ID NO: 834255 - RNA, 19 nt, Homo sapiens
  misc_RNA (1)...(19): siRNA sense strand
uccaggagcuccaauguca

SEQ ID NO: 834256 - RNA, 19 nt, Homo sapiens
  misc_RNA (1)...(19): siRNA sense strand
aacaggaagucuaugauga

SEQ ID NO: 834257 - RNA, 19 nt, Homo sapiens
  misc_RNA (1)...(19): siRNA sense strand
cagcaagauaucaguguua

SEQ ID NO: 834258 - RNA, 19 nt, Homo sapiens
  misc_RNA (1)...(19): siRNA sense strand
ccaaugagcuggaagauga

SEQ ID NO: 834259 - RNA, 19 nt, Homo sapiens
  misc_RNA (1)...(19): siRNA sense strand
agugcgaagucaccaauga

SEQ ID NO: 834260 - RNA, 19 nt, Homo sapiens
  misc_RNA (1)...(19): siRNA sense strand
ggccuucaccgacgucuuc

SEQ ID NO: 834261 - RNA, 19 nt, Homo sapiens
  misc_RNA (1)...(19): siRNA sense strand
cauccuggcaucugcagaa

SEQ ID NO: 834262 - RNA, 19 nt, Homo sapiens
  misc_RNA (1)...(19): siRNA sense strand
gcaacgucacgcugcaaga

SEQ ID NO: 834263 - RNA, 19 nt, Homo sapiens
  misc_RNA (1)...(19): siRNA sense strand
cuacggguaucgccauaac

SEQ ID NO: 834264 - RNA, 19 nt, Homo sapiens
  misc_RNA (1)...(19): siRNA sense strand
ccuggaaggcguggucuuu

SEQ ID NO: 834265 - RNA, 19 nt, Homo sapiens
  misc_RNA (1)...(19): siRNA sense strand
cggcucaaguggacaaagg

SEQ ID NO: 834266 - RNA, 19 nt, Homo sapiens
  misc_RNA (1)...(19): siRNA sense strand
ucaccaaugagcuggaaga

SEQ ID NO: 834267 - RNA, 19 nt, Homo sapiens
  misc_RNA (1)...(19): siRNA sense strand
gcuacgacgccuucugcuu

SEQ ID NO: 834268 - RNA, 19 nt, Homo sapiens
  misc_RNA (1)...(19): siRNA sense strand
ggaccccucugcacgucua

SEQ ID NO: 834269 - RNA, 19 nt, Homo sapiens
  misc_RNA (1)...(19): siRNA sense strand
gagaagaccauuugauuua

SEQ ID NO: 834270 - RNA, 19 nt, Homo sapiens
  misc_RNA (1)...(19): siRNA sense strand
ggagcaagauggaaucauu

SEQ ID NO: 834271 - RNA, 19 nt, Homo sapiens
  misc_RNA (1)...(19): siRNA sense strand
uaaaggauccugcugcuua

SEQ ID NO: 834272 - RNA, 19 nt, Homo sapiens
  misc_RNA (1)...(19): siRNA sense strand
ccucaaagguuauucaaga

SEQ ID NO: 834273 - RNA, 19 nt, Homo sapiens
  misc_RNA (1)...(19): siRNA sense strand
cgaaagaccugcugagaag

SEQ ID NO: 834274 - RNA, 19 nt, Homo sapiens
  misc_RNA (1)...(19): siRNA sense strand
uggguuggaucuauuauua

SEQ ID NO: 834275 - RNA, 19 nt, Homo sapiens
  misc_RNA (1)...(19): siRNA sense strand
ggauggcucugcucauuau

SEQ ID NO: 834276 - RNA, 19 nt, Homo sapiens
  misc_RNA (1)...(19): siRNA sense strand
gcauauauguucuauucug

SEQ ID NO: 834277 - RNA, 19 nt, Homo sapiens
  misc_RNA (1)...(19): siRNA sense strand
gagagagggugaaccguau

SEQ ID NO: 834278 - RNA, 19 nt, Homo sapiens
  misc_RNA (1)...(19): siRNA sense strand
aaaccagaguucuucauaa

SEQ ID NO: 834279 - RNA, 19 nt, Homo sapiens
  misc_RNA (1)...(19): siRNA sense strand
uggcauauauguucuauuc

SEQ ID NO: 834280 - RNA, 19 nt, Homo sapiens
  misc_RNA (1)...(19): siRNA sense strand
ucaagaagcccaagcgaaa

SEQ ID NO: 834281 - RNA, 19 nt, Homo sapiens
  misc_RNA (1)...(19): siRNA sense strand
caugauuccuggacuauug

SEQ ID NO: 834282 - RNA, 19 nt, Homo sapiens
  misc_RNA (1)...(19): siRNA sense strand
caucugagcucugccgauu

SEQ ID NO: 834283 - RNA, 19 nt, Homo sapiens
  misc_RNA (1)...(19): siRNA sense strand
caaaccagaguucuucaua

SEQ ID NO: 834284 - RNA, 19 nt, Homo sapiens
  misc_RNA (1)...(19): siRNA sense strand
gagcucugccgauuauaua

SEQ ID NO: 834285 - RNA, 19 nt, Homo sapiens
  misc_RNA (1)...(19): siRNA sense strand
ggaaacuuauagaaccauu

SEQ ID NO: 834286 - RNA, 19 nt, Homo sapiens
  misc_RNA (1)...(19): siRNA sense strand
aaccagaguucuucauaaa

SEQ ID NO: 834287 - RNA, 19 nt, Homo sapiens
  misc_RNA (1)...(19): siRNA sense strand
gaaacauuguagggaagua

SEQ ID NO: 834288 - RNA, 19 nt, Homo sapiens
  misc_RNA (1)...(19): siRNA sense strand
uagcaugggaggaaacuua

SEQ ID NO: 834289 - RNA, 19 nt, Homo sapiens
  misc_RNA (1)...(19): siRNA sense strand
caagagcccuaucuaaagg

SEQ ID NO: 834290 - RNA, 19 nt, Homo sapiens
  misc_RNA (1)...(19): siRNA sense strand
gguuggaucuauuauuaug

SEQ ID NO: 834291 - RNA, 19 nt, Homo sapiens
  misc_RNA (1)...(19): siRNA sense strand
ugagaagaccauuugauuu

SEQ ID NO: 834292 - RNA, 19 nt, Homo sapiens
  misc_RNA (1)...(19): siRNA sense strand
ucagagguuugauugcuuu

SEQ ID NO: 834293 - RNA, 19 nt, Homo sapiens
  misc_RNA (1)...(19): siRNA sense strand
ccgauuauauacgcaauuu

SEQ ID NO: 834294 - RNA, 19 nt, Homo sapiens
  misc_RNA (1)...(19): siRNA sense strand
ucauaggacuggagcaaga

SEQ ID NO: 834295 - RNA, 19 nt, Homo sapiens
  misc_RNA (1)...(19): siRNA sense strand
cuacagagucccugaagaa

SEQ ID NO: 834296 - RNA, 19 nt, Homo sapiens
  misc_RNA (1)...(19): siRNA sense strand
gcgaaagaccugcugagaa

SEQ ID NO: 834297 - RNA, 19 nt, Homo sapiens
  misc_RNA (1)...(19): siRNA sense strand
cagcaugauuccuggacua

SEQ ID NO: 834298 - RNA, 19 nt, Homo sapiens
  misc_RNA (1)...(19): siRNA sense strand
gagguuugauugcuuugga

SEQ ID NO: 834299 - RNA, 19 nt, Homo sapiens
  misc_RNA (1)...(19): siRNA sense strand
gggauggcucugcucauua

SEQ ID NO: 834300 - RNA, 19 nt, Homo sapiens
  misc_RNA (1)...(19): siRNA sense strand
cagagucccugaagaagca

SEQ ID NO: 834301 - RNA, 19 nt, Homo sapiens
  misc_RNA (1)...(19): siRNA sense strand
uauauuggguuggaucuau

SEQ ID NO: 834302 - RNA, 19 nt, Homo sapiens
  misc_RNA (1)...(19): siRNA sense strand
gaaccauuggccuauauug

SEQ ID NO: 834303 - RNA, 19 nt, Homo sapiens
  misc_RNA (1)...(19): siRNA sense strand
gauuuaauguugguugugu

SEQ ID NO: 834304 - RNA, 19 nt, Homo sapiens
  misc_RNA (1)...(19): siRNA sense strand
uauaaucagccaucagaaa

SEQ ID NO: 834305 - RNA, 19 nt, Homo sapiens
  misc_RNA (1)...(19): siRNA sense strand
ucugagcucugccgauuau

SEQ ID NO: 834306 - RNA, 19 nt, Homo sapiens
  misc_RNA (1)...(19): siRNA sense strand
gggacccacuguucuaugu

SEQ ID NO: 834307 - RNA, 19 nt, Homo sapiens
  misc_RNA (1)...(19): siRNA sense strand
gagcaagauggaaucauug

SEQ ID NO: 834308 - RNA, 19 nt, Homo sapiens
  misc_RNA (1)...(19): siRNA sense strand
ucacauuggugcaucucuu

SEQ ID NO: 834309 - RNA, 19 nt, Homo sapiens
  misc_RNA (1)...(19): siRNA sense strand
uagaaccauuggccuauau

SEQ ID NO: 834310 - RNA, 19 nt, Homo sapiens
  misc_RNA (1)...(19): siRNA sense strand
gaggaaacuuauagaacca

SEQ ID NO: 834311 - RNA, 19 nt, Homo sapiens
  misc_RNA (1)...(19): siRNA sense strand
guucaugacacacuacuug

SEQ ID NO: 834312 - RNA, 19 nt, Homo sapiens
  misc_RNA (1)...(19): siRNA sense strand
gaaguauggaacacgaauu

SEQ ID NO: 834313 - RNA, 19 nt, Homo sapiens
  misc_RNA (1)...(19): siRNA sense strand
aaaggauccugcugcuuau

SEQ ID NO: 834314 - RNA, 19 nt, Homo sapiens
  misc_RNA (1)...(19): siRNA sense strand
gcucuuggccuaucguugu

SEQ ID NO: 834315 - RNA, 19 nt, Homo sapiens
  misc_RNA (1)...(19): siRNA sense strand
ugggauggcucugcucauu

SEQ ID NO: 834316 - RNA, 19 nt, Homo sapiens
  misc_RNA (1)...(19): siRNA sense strand
ucaagagcccuaucuaaag

SEQ ID NO: 834317 - RNA, 19 nt, Homo sapiens
  misc_RNA (1)...(19): siRNA sense strand
gagggugaaccguaucuga

SEQ ID NO: 834318 - RNA, 19 nt, Homo sapiens
  misc_RNA (1)...(19): siRNA sense strand
ucuauucuguuccuuacuu

SEQ ID NO: 834319 - RNA, 19 nt, Homo sapiens
  misc_RNA (1)...(19): siRNA sense strand
cugagaagaccauuugauu

SEQ ID NO: 834320 - RNA, 19 nt, Homo sapiens
  misc_RNA (1)...(19): siRNA sense strand
gacccacuguucuaugugu

SEQ ID NO: 834321 - RNA, 19 nt, Homo sapiens
  misc_RNA (1)...(19): siRNA sense strand
ggaaguauggaacacgaau

SEQ ID NO: 834322 - RNA, 19 nt, Homo sapiens
  misc_RNA (1)...(19): siRNA sense strand
ucaccuaugucuucaacca

SEQ ID NO: 834323 - RNA, 19 nt, Homo sapiens
  misc_RNA (1)...(19): siRNA sense strand
acacgaauuugcccugcuu

SEQ ID NO: 834324 - RNA, 19 nt, Homo sapiens
  misc_RNA (1)...(19): siRNA sense strand
gaaacuuauagaaccauug

SEQ ID NO: 834325 - RNA, 19 nt, Homo sapiens
  misc_RNA (1)...(19): siRNA sense strand
ggugaaccguaucugaaca

SEQ ID NO: 834326 - RNA, 19 nt, Homo sapiens
  misc_RNA (1)...(19): siRNA sense strand
aaacaaaggcagaagaaaa

SEQ ID NO: 834327 - RNA, 19 nt, Homo sapiens
  misc_RNA (1)...(19): siRNA sense strand
cuacaaaccagaguucuuc

SEQ ID NO: 834328 - RNA, 19 nt, Homo sapiens
  misc_RNA (1)...(19): siRNA sense strand
uucaagagcccuaucuaaa

SEQ ID NO: 834329 - RNA, 19 nt, Homo sapiens
  misc_RNA (1)...(19): siRNA sense strand
gcaugggaggaaacuuaua

SEQ ID NO: 834330 - RNA, 19 nt, Homo sapiens
  misc_RNA (1)...(19): siRNA sense strand
ugauguaccuggugauggu

SEQ ID NO: 834331 - RNA, 19 nt, Homo sapiens
  misc_RNA (1)...(19): siRNA sense strand
ggucaccuaugucuucaac

SEQ ID NO: 834332 - RNA, 19 nt, Homo sapiens
  misc_RNA (1)...(19): siRNA sense strand
aagcauaccauauacuugu

SEQ ID NO: 834333 - RNA, 19 nt, Homo sapiens
  misc_RNA (1)...(19): siRNA sense strand
guggugaaccucaucauag

SEQ ID NO: 834334 - RNA, 19 nt, Homo sapiens
  misc_RNA (1)...(19): siRNA sense strand
gggcugguuucagaaucua

SEQ ID NO: 834335 - RNA, 19 nt, Homo sapiens
  misc_RNA (1)...(19): siRNA sense strand
aaguauggaacacgaauuu

SEQ ID NO: 834336 - RNA, 19 nt, Homo sapiens
  misc_RNA (1)...(19): siRNA sense strand
guucagagguuugauugcu

SEQ ID NO: 834337 - RNA, 19 nt, Homo sapiens
  misc_RNA (1)...(19): siRNA sense strand
gcugguuucagaaucuaua

SEQ ID NO: 834338 - RNA, 19 nt, Homo sapiens
  misc_RNA (1)...(19): siRNA sense strand
caugacacacuacuugaga

SEQ ID NO: 834339 - RNA, 19 nt, Homo sapiens
  misc_RNA (1)...(19): siRNA sense strand
cucaaagguuauucaagaa

SEQ ID NO: 834340 - RNA, 19 nt, Homo sapiens
  misc_RNA (1)...(19): siRNA sense strand
ucuauaaucagccaucaga

SEQ ID NO: 834341 - RNA, 19 nt, Homo sapiens
  misc_RNA (1)...(19): siRNA sense strand
gggaggaaacuuauagaac

SEQ ID NO: 834342 - RNA, 19 nt, Homo sapiens
  misc_RNA (1)...(19): siRNA sense strand
cugcuuaugucuacagagu

SEQ ID NO: 834343 - RNA, 19 nt, Homo sapiens
  misc_RNA (1)...(19): siRNA sense strand
guucuauucuguuccuuac

SEQ ID NO: 834344 - RNA, 19 nt, Homo sapiens
  misc_RNA (1)...(19): siRNA sense strand
gcuggcauauauguucuau

SEQ ID NO: 834345 - RNA, 19 nt, Homo sapiens
  misc_RNA (1)...(19): siRNA sense strand
uaauguugguugugugucu

SEQ ID NO: 834346 - RNA, 19 nt, Homo sapiens
  misc_RNA (1)...(19): siRNA sense strand
gaaagaccugcugagaaga

SEQ ID NO: 834347 - RNA, 19 nt, Homo sapiens
  misc_RNA (1)...(19): siRNA sense strand
gcauaugggcacaugaucu

SEQ ID NO: 834348 - RNA, 19 nt, Homo sapiens
  misc_RNA (1)...(19): siRNA sense strand
uuucaagagcccuaucuaa

SEQ ID NO: 834349 - RNA, 19 nt, Homo sapiens
  misc_RNA (1)...(19): siRNA sense strand
cguggugaaccucaucaua

SEQ ID NO: 834350 - RNA, 19 nt, Homo sapiens
  misc_RNA (1)...(19): siRNA sense strand
gaacugcuuaugucuacag

SEQ ID NO: 834351 - RNA, 19 nt, Homo sapiens
  misc_RNA (1)...(19): siRNA sense strand
ccacuguucuauguguaug

SEQ ID NO: 834352 - RNA, 19 nt, Homo sapiens
  misc_RNA (1)...(19): siRNA sense strand
cuauucuguuccuuacuuu

SEQ ID NO: 834353 - RNA, 19 nt, Homo sapiens
  misc_RNA (1)...(19): siRNA sense strand
gcugagaagaccauuugau

SEQ ID NO: 834354 - RNA, 19 nt, Homo sapiens
  misc_RNA (1)...(19): siRNA sense strand
ggacuggagcaagauggaa

SEQ ID NO: 834355 - RNA, 19 nt, Homo sapiens
  misc_RNA (1)...(19): siRNA sense strand
cuuugugacugcacuguau

SEQ ID NO: 834356 - RNA, 19 nt, Homo sapiens
  misc_RNA (1)...(19): siRNA sense strand
caugggaggaaacuuauag

SEQ ID NO: 834357 - RNA, 19 nt, Homo sapiens
  misc_RNA (1)...(19): siRNA sense strand
caucauaggacuggagcaa

SEQ ID NO: 834358 - RNA, 19 nt, Homo sapiens
  misc_RNA (1)...(19): siRNA sense strand
uaagcauaccauauacuug

SEQ ID NO: 834359 - RNA, 19 nt, Homo sapiens
  misc_RNA (1)...(19): siRNA sense strand
uauuggguuggaucuauua

SEQ ID NO: 834360 - RNA, 19 nt, Homo sapiens
  misc_RNA (1)...(19): siRNA sense strand
cuuagugguuccuggaugu

SEQ ID NO: 834361 - RNA, 19 nt, Homo sapiens
  misc_RNA (1)...(19): siRNA sense strand
ugagcucugccgauuauau

SEQ ID NO: 834362 - RNA, 19 nt, Homo sapiens
  misc_RNA (1)...(19): siRNA sense strand
cauaugggcacaugaucug

SEQ ID NO: 834363 - RNA, 19 nt, Homo sapiens
  misc_RNA (1)...(19): siRNA sense strand
cugcugagaagaccauuug

SEQ ID NO: 834364 - RNA, 19 nt, Homo sapiens
  misc_RNA (1)...(19): siRNA sense strand
ugacacacuacuugagaga

SEQ ID NO: 834365 - RNA, 19 nt, Homo sapiens
  misc_RNA (1)...(19): siRNA sense strand
gguuucagaaucuauaauc

SEQ ID NO: 834366 - RNA, 19 nt, Homo sapiens
  misc_RNA (1)...(19): siRNA sense strand
aaacuuauagaaccauugg

SEQ ID NO: 834367 - RNA, 19 nt, Homo sapiens
  misc_RNA (1)...(19): siRNA sense strand
ccucagcucuuggccuauc

SEQ ID NO: 834368 - RNA, 19 nt, Homo sapiens
  misc_RNA (1)...(19): siRNA sense strand
ucuacagagucccugaaga

SEQ ID NO: 834369 - RNA, 19 nt, Homo sapiens
  misc_RNA (1)...(19): siRNA sense strand
gcaaauagccaguugucaa

SEQ ID NO: 834370 - RNA, 19 nt, Homo sapiens
  misc_RNA (1)...(19): siRNA sense strand
gaaaguaguaacagcagua

SEQ ID NO: 834371 - RNA, 19 nt, Homo sapiens
  misc_RNA (1)...(19): siRNA sense strand
gaugaugguuuccgccuuu

SEQ ID NO: 834372 - RNA, 19 nt, Homo sapiens
  misc_RNA (1)...(19): siRNA sense strand
ccaagaagguggccagugu

SEQ ID NO: 834373 - RNA, 19 nt, Homo sapiens
  misc_RNA (1)...(19): siRNA sense strand
gcaaagagugcuacagcua

SEQ ID NO: 834374 - RNA, 19 nt, Homo sapiens
  misc_RNA (1)...(19): siRNA sense strand
aaagagugcuacagcuaua

SEQ ID NO: 834375 - RNA, 19 nt, Homo sapiens
  misc_RNA (1)...(19): siRNA sense strand
gaaugagcaugaacaagau

SEQ ID NO: 834376 - RNA, 19 nt, Homo sapiens
  misc_RNA (1)...(19): siRNA sense strand
ugaaugagcaugaacaaga

SEQ ID NO: 834377 - RNA, 19 nt, Homo sapiens
  misc_RNA (1)...(19): siRNA sense strand
gaaggaggcaaagaagaaa

SEQ ID NO: 834378 - RNA, 19 nt, Homo sapiens
  misc_RNA (1)...(19): siRNA sense strand
cuacagcuauaccugcaaa

SEQ ID NO: 834379 - RNA, 19 nt, Homo sapiens
  misc_RNA (1)...(19): siRNA sense strand
caaagagugcuacagcuau

SEQ ID NO: 834380 - RNA, 19 nt, Homo sapiens
  misc_RNA (1)...(19): siRNA sense strand
aagcuaagguacagaaagu

SEQ ID NO: 834381 - RNA, 19 nt, Homo sapiens
  misc_RNA (1)...(19): siRNA sense strand
cagcaaaggagccagcaaa

SEQ ID NO: 834382 - RNA, 19 nt, Homo sapiens
  misc_RNA (1)...(19): siRNA sense strand
agaaggaggcaaagaagaa

SEQ ID NO: 834383 - RNA, 19 nt, Homo sapiens
  misc_RNA (1)...(19): siRNA sense strand
gagaaggaggcaaagaaga

SEQ ID NO: 834384 - RNA, 19 nt, Homo sapiens
  misc_RNA (1)...(19): siRNA sense strand
gagcccacguagccaagaa

SEQ ID NO: 834385 - RNA, 19 nt, Homo sapiens
  misc_RNA (1)...(19): siRNA sense strand
uaaggugaaugagcaugaa

SEQ ID NO: 834386 - RNA, 19 nt, Homo sapiens
  misc_RNA (1)...(19): siRNA sense strand
ggagaaggaggcaaagaag

SEQ ID NO: 834387 - RNA, 19 nt, Homo sapiens
  misc_RNA (1)...(19): siRNA sense strand
agcuauaccugcaaacuga

SEQ ID NO: 834388 - RNA, 19 nt, Homo sapiens
  misc_RNA (1)...(19): siRNA sense strand
ccacaguccagaagcagaa

SEQ ID NO: 834389 - RNA, 19 nt, Homo sapiens
  misc_RNA (1)...(19): siRNA sense strand
cuggacagcuucauuacca

SEQ ID NO: 834390 - RNA, 19 nt, Homo sapiens
  misc_RNA (1)...(19): siRNA sense strand
caagagccggugcugcaaa

SEQ ID NO: 834391 - RNA, 19 nt, Homo sapiens
  misc_RNA (1)...(19): siRNA sense strand
ucaggcauaaggugaauga

SEQ ID NO: 834392 - RNA, 19 nt, Homo sapiens
  misc_RNA (1)...(19): siRNA sense strand
ugaauuccgagcccacgua

SEQ ID NO: 834393 - RNA, 19 nt, Homo sapiens
  misc_RNA (1)...(19): siRNA sense strand
gagccggugcugcaaauag

SEQ ID NO: 834394 - RNA, 19 nt, Homo sapiens
  misc_RNA (1)...(19): siRNA sense strand
uggagaaggaggcaaagaa

SEQ ID NO: 834395 - RNA, 19 nt, Homo sapiens
  misc_RNA (1)...(19): siRNA sense strand
cagcuucauuaccaucuca

SEQ ID NO: 834396 - RNA, 19 nt, Homo sapiens
  misc_RNA (1)...(19): siRNA sense strand
ccaccagcauggccacagu

SEQ ID NO: 834397 - RNA, 19 nt, Homo sapiens
  misc_RNA (1)...(19): siRNA sense strand
gcgauucggaaaguaguaa

SEQ ID NO: 834398 - RNA, 19 nt, Homo sapiens
  misc_RNA (1)...(19): siRNA sense strand
ggugaaugagcaugaacaa

SEQ ID NO: 834399 - RNA, 19 nt, Homo sapiens
  misc_RNA (1)...(19): siRNA sense strand
gugagcgauucggaaagua

SEQ ID NO: 834400 - RNA, 19 nt, Homo sapiens
  misc_RNA (1)...(19): siRNA sense strand
gauggcaacgagcuucaga

SEQ ID NO: 834401 - RNA, 19 nt, Homo sapiens
  misc_RNA (1)...(19): siRNA sense strand
aagagccggugcugcaaau

SEQ ID NO: 834402 - RNA, 19 nt, Homo sapiens
  misc_RNA (1)...(19): siRNA sense strand
gaagaaaaggaaguugaaa

SEQ ID NO: 834403 - RNA, 19 nt, Homo sapiens
  misc_RNA (1)...(19): siRNA sense strand
ugugagcgauucggaaagu

SEQ ID NO: 834404 - RNA, 19 nt, Homo sapiens
  misc_RNA (1)...(19): siRNA sense strand
ucucagaagcagcaaagga

SEQ ID NO: 834405 - RNA, 19 nt, Homo sapiens
  misc_RNA (1)...(19): siRNA sense strand
caaaagcuaagguacagaa

SEQ ID NO: 834406 - RNA, 19 nt, Homo sapiens
  misc_RNA (1)...(19): siRNA sense strand
gaacaagguuacuaucuua

SEQ ID NO: 834407 - RNA, 19 nt, Homo sapiens
  misc_RNA (1)...(19): siRNA sense strand
gaaacaaacucugaagaaa

SEQ ID NO: 834408 - RNA, 19 nt, Homo sapiens
  misc_RNA (1)...(19): siRNA sense strand
aaagagaaguccaauguaa

SEQ ID NO: 834409 - RNA, 19 nt, Homo sapiens
  misc_RNA (1)...(19): siRNA sense strand
ucacagagcucuauuugau

SEQ ID NO: 834410 - RNA, 19 nt, Homo sapiens
  misc_RNA (1)...(19): siRNA sense strand
cagcagauaucaagaaaga

SEQ ID NO: 834411 - RNA, 19 nt, Homo sapiens
  misc_RNA (1)...(19): siRNA sense strand
caagaguucuacagacaua

SEQ ID NO: 834412 - RNA, 19 nt, Homo sapiens
  misc_RNA (1)...(19): siRNA sense strand
gaacaugaaccucuuggaa

SEQ ID NO: 834413 - RNA, 19 nt, Homo sapiens
  misc_RNA (1)...(19): siRNA sense strand
ggaagagcaugaagcagaa

SEQ ID NO: 834414 - RNA, 19 nt, Homo sapiens
  misc_RNA (1)...(19): siRNA sense strand
gcagaaaccuaugaagaug

SEQ ID NO: 834415 - RNA, 19 nt, Homo sapiens
  misc_RNA (1)...(19): siRNA sense strand
gguagaugaugauggauuu

SEQ ID NO: 834416 - RNA, 19 nt, Homo sapiens
  misc_RNA (1)...(19): siRNA sense strand
gaugauggauuuauugaag

SEQ ID NO: 834417 - RNA, 19 nt, Homo sapiens
  misc_RNA (1)...(19): siRNA sense strand
ggauguaccaccacuauuu

SEQ ID NO: 834418 - RNA, 19 nt, Homo sapiens
  misc_RNA (1)...(19): siRNA sense strand
gcuaucaaaugcccaauau

SEQ ID NO: 834419 - RNA, 19 nt, Homo sapiens
  misc_RNA (1)...(19): siRNA sense strand
gaaacuccaucuauguaau

SEQ ID NO: 834420 - RNA, 19 nt, Homo sapiens
  misc_RNA (1)...(19): siRNA sense strand
ggaaauccaagcucucuuu

SEQ ID NO: 834421 - RNA, 19 nt, Homo sapiens
  misc_RNA (1)...(19): siRNA sense strand
ucgaacaacuuaacaagaa

SEQ ID NO: 834422 - RNA, 19 nt, Homo sapiens
  misc_RNA (1)...(19): siRNA sense strand
cugcagagcuacaauauca

SEQ ID NO: 834423 - RNA, 19 nt, Homo sapiens
  misc_RNA (1)...(19): siRNA sense strand
gaucucaguuauaaccaaa

SEQ ID NO: 834424 - RNA, 19 nt, Homo sapiens
  misc_RNA (1)...(19): siRNA sense strand
acugaaugcugauguauuu

SEQ ID NO: 834425 - RNA, 19 nt, Homo sapiens
  misc_RNA (1)...(19): siRNA sense strand
gcagauaucaagaaagaug

SEQ ID NO: 834426 - RNA, 19 nt, Homo sapiens
  misc_RNA (1)...(19): siRNA sense strand
uuuaauagcucuucgaaca

SEQ ID NO: 834427 - RNA, 19 nt, Homo sapiens
  misc_RNA (1)...(19): siRNA sense strand
acagagcucuauuugauug

SEQ ID NO: 834428 - RNA, 19 nt, Homo sapiens
  misc_RNA (1)...(19): siRNA sense strand
gguaaccucuccagucuag

SEQ ID NO: 834429 - RNA, 19 nt, Homo sapiens
  misc_RNA (1)...(19): siRNA sense strand
gaagaugguuuuacuggaa

SEQ ID NO: 834430 - RNA, 19 nt, Homo sapiens
  misc_RNA (1)...(19): siRNA sense strand
ucaaaugcccaauauggua

SEQ ID NO: 834431 - RNA, 19 nt, Homo sapiens
  misc_RNA (1)...(19): siRNA sense strand
gauuagcuauuuggaugua

SEQ ID NO: 834432 - RNA, 19 nt, Homo sapiens
  misc_RNA (1)...(19): siRNA sense strand
ccaacagccugcagagcua

SEQ ID NO: 834433 - RNA, 19 nt, Homo sapiens
  misc_RNA (1)...(19): siRNA sense strand
gcaugaagcagaaaccuau

SEQ ID NO: 834434 - RNA, 19 nt, Homo sapiens
  misc_RNA (1)...(19): siRNA sense strand
cgacuucacuucucauuuu

SEQ ID NO: 834435 - RNA, 19 nt, Homo sapiens
  misc_RNA (1)...(19): siRNA sense strand
gcagagcuacaauaucaaa

SEQ ID NO: 834436 - RNA, 19 nt, Homo sapiens
  misc_RNA (1)...(19): siRNA sense strand
gaaagucacaggcaucaca

SEQ ID NO: 834437 - RNA, 19 nt, Homo sapiens
  misc_RNA (1)...(19): siRNA sense strand
agaacaagguuacuaucuu

SEQ ID NO: 834438 - RNA, 19 nt, Homo sapiens
  misc_RNA (1)...(19): siRNA sense strand
caagaaauucagaacauga

SEQ ID NO: 834439 - RNA, 19 nt, Homo sapiens
  misc_RNA (1)...(19): siRNA sense strand
cgaacaacuuaacaagaaa

SEQ ID NO: 834440 - RNA, 19 nt, Homo sapiens
  misc_RNA (1)...(19): siRNA sense strand
caagcucucuuucacagau

SEQ ID NO: 834441 - RNA, 19 nt, Homo sapiens
  misc_RNA (1)...(19): siRNA sense strand
cacaagaguucuacagaca

SEQ ID NO: 834442 - RNA, 19 nt, Homo sapiens
  misc_RNA (1)...(19): siRNA sense strand
gguacaauauucugcuuag

SEQ ID NO: 834443 - RNA, 19 nt, Homo sapiens
  misc_RNA (1)...(19): siRNA sense strand
acaacugaaugcugaugua

SEQ ID NO: 834444 - RNA, 19 nt, Homo sapiens
  misc_RNA (1)...(19): siRNA sense strand
ucacuguacugacgacuuc

SEQ ID NO: 834445 - RNA, 19 nt, Homo sapiens
  misc_RNA (1)...(19): siRNA sense strand
agaaacaaacucugaagaa

SEQ ID NO: 834446 - RNA, 19 nt, Homo sapiens
  misc_RNA (1)...(19): siRNA sense strand
gaaugcugauguauuugug

SEQ ID NO: 834447 - RNA, 19 nt, Homo sapiens
  misc_RNA (1)...(19): siRNA sense strand
gaugaugauggauuuauug

SEQ ID NO: 834448 - RNA, 19 nt, Homo sapiens
  misc_RNA (1)...(19): siRNA sense strand
cugcaaggcaauuugauua

SEQ ID NO: 834449 - RNA, 19 nt, Homo sapiens
  misc_RNA (1)...(19): siRNA sense strand
agagaaguccaauguaauu

SEQ ID NO: 834450 - RNA, 19 nt, Homo sapiens
  misc_RNA (1)...(19): siRNA sense strand
gcucuugcagucuauuuaa

SEQ ID NO: 834451 - RNA, 19 nt, Homo sapiens
  misc_RNA (1)...(19): siRNA sense strand
uugcagaacugguugaaca

SEQ ID NO: 834452 - RNA, 19 nt, Homo sapiens
  misc_RNA (1)...(19): siRNA sense strand
ugcccaauaugguacaaua

SEQ ID NO: 834453 - RNA, 19 nt, Homo sapiens
  misc_RNA (1)...(19): siRNA sense strand
gagaaguccaauguaauuu

SEQ ID NO: 834454 - RNA, 19 nt, Homo sapiens
  misc_RNA (1)...(19): siRNA sense strand
caagguuacuaucuuacau

SEQ ID NO: 834455 - RNA, 19 nt, Homo sapiens
  misc_RNA (1)...(19): siRNA sense strand
ccucuccagucuagaaauu

SEQ ID NO: 834456 - RNA, 19 nt, Homo sapiens
  misc_RNA (1)...(19): siRNA sense strand
gagaacaagguuacuaucu

SEQ ID NO: 834457 - RNA, 19 nt, Homo sapiens
  misc_RNA (1)...(19): siRNA sense strand
guacugacgacuucacuuc

SEQ ID NO: 834458 - RNA, 19 nt, Homo sapiens
  misc_RNA (1)...(19): siRNA sense strand
gcccaucagcaauucaaua

SEQ ID NO: 834459 - RNA, 19 nt, Homo sapiens
  misc_RNA (1)...(19): siRNA sense strand
uaucaaaugcccaauaugg

SEQ ID NO: 834460 - RNA, 19 nt, Homo sapiens
  misc_RNA (1)...(19): siRNA sense strand
ucaaaacaguaccucauaa

SEQ ID NO: 834461 - RNA, 19 nt, Homo sapiens
  misc_RNA (1)...(19): siRNA sense strand
ucacagauaccagaaacaa

SEQ ID NO: 834462 - RNA, 19 nt, Homo sapiens
  misc_RNA (1)...(19): siRNA sense strand
uaaccucuccagucuagaa

SEQ ID NO: 834463 - RNA, 19 nt, Homo sapiens
  misc_RNA (1)...(19): siRNA sense strand
ugugguagaugaugaugga

SEQ ID NO: 834464 - RNA, 19 nt, Homo sapiens
  misc_RNA (1)...(19): siRNA sense strand
aagcagaaaccuaugaaga

SEQ ID NO: 834465 - RNA, 19 nt, Homo sapiens
  misc_RNA (1)...(19): siRNA sense strand
acaagaaauucagaacaug

SEQ ID NO: 834466 - RNA, 19 nt, Homo sapiens
  misc_RNA (1)...(19): siRNA sense strand
cauaauaacgguuuuggua

SEQ ID NO: 834467 - RNA, 19 nt, Homo sapiens
  misc_RNA (1)...(19): siRNA sense strand
aacaaacucugaagaaacu

SEQ ID NO: 834468 - RNA, 19 nt, Homo sapiens
  misc_RNA (1)...(19): siRNA sense strand
uaaaagagaaguccaaugu

SEQ ID NO: 834469 - RNA, 19 nt, Homo sapiens
  misc_RNA (1)...(19): siRNA sense strand
gaacaacugaaugcugaug

SEQ ID NO: 834470 - RNA, 19 nt, Homo sapiens
  misc_RNA (1)...(19): siRNA sense strand
gacacaagaguucuacaga

SEQ ID NO: 834471 - RNA, 19 nt, Homo sapiens
  misc_RNA (1)...(19): siRNA sense strand
gaaugccacucaaaauuuc

SEQ ID NO: 834472 - RNA, 19 nt, Homo sapiens
  misc_RNA (1)...(19): siRNA sense strand
gagcucuauuugauugaga

SEQ ID NO: 834473 - RNA, 19 nt, Homo sapiens
  misc_RNA (1)...(19): siRNA sense strand
guauuugugccucuaagaa

SEQ ID NO: 834474 - RNA, 19 nt, Homo sapiens
  misc_RNA (1)...(19): siRNA sense strand
gauguaccaccacuauuuc

SEQ ID NO: 834475 - RNA, 19 nt, Homo sapiens
  misc_RNA (1)...(19): siRNA sense strand
gcaaggcaauuugauuagc

SEQ ID NO: 834476 - RNA, 19 nt, Homo sapiens
  misc_RNA (1)...(19): siRNA sense strand
agaaacuccaucuauguaa

SEQ ID NO: 834477 - RNA, 19 nt, Homo sapiens
  misc_RNA (1)...(19): siRNA sense strand
gaacugguugaacacauca

SEQ ID NO: 834478 - RNA, 19 nt, Homo sapiens
  misc_RNA (1)...(19): siRNA sense strand
caaggcaauuugauuagcu

SEQ ID NO: 834479 - RNA, 19 nt, Homo sapiens
  misc_RNA (1)...(19): siRNA sense strand
caacugaaugcugauguau

SEQ ID NO: 834480 - RNA, 19 nt, Homo sapiens
  misc_RNA (1)...(19): siRNA sense strand
uccagcagauaucaagaaa

SEQ ID NO: 834481 - RNA, 19 nt, Homo sapiens
  misc_RNA (1)...(19): siRNA sense strand
aaacaaacucugaagaaac

SEQ ID NO: 834482 - RNA, 19 nt, Homo sapiens
  misc_RNA (1)...(19): siRNA sense strand
uaauagcucuucgaacaac

SEQ ID NO: 834483 - RNA, 19 nt, Homo sapiens
  misc_RNA (1)...(19): siRNA sense strand
cuauggaacugcucuugca

SEQ ID NO: 834484 - RNA, 19 nt, Homo sapiens
  misc_RNA (1)...(19): siRNA sense strand
gaaucugcaaggcaauuug

SEQ ID NO: 834485 - RNA, 19 nt, Homo sapiens
  misc_RNA (1)...(19): siRNA sense strand
guagaugaugauggauuua

SEQ ID NO: 834486 - RNA, 19 nt, Homo sapiens
  misc_RNA (1)...(19): siRNA sense strand
aacaugaaccucuuggaaa

SEQ ID NO: 834487 - RNA, 19 nt, Homo sapiens
  misc_RNA (1)...(19): siRNA sense strand
guacaauauucugcuuagu

SEQ ID NO: 834488 - RNA, 19 nt, Homo sapiens
  misc_RNA (1)...(19): siRNA sense strand
gacaaaauccagucuucua

SEQ ID NO: 834489 - RNA, 19 nt, Homo sapiens
  misc_RNA (1)...(19): siRNA sense strand
agaaaccuaugaagauggu

SEQ ID NO: 834490 - RNA, 19 nt, Homo sapiens
  misc_RNA (1)...(19): siRNA sense strand
ccaucuauguaauucaaca

SEQ ID NO: 834491 - RNA, 19 nt, Homo sapiens
  misc_RNA (1)...(19): siRNA sense strand
cauuugugguagaugauga

SEQ ID NO: 834492 - RNA, 19 nt, Homo sapiens
  misc_RNA (1)...(19): siRNA sense strand
gaagagcaugaagcagaaa

SEQ ID NO: 834493 - RNA, 19 nt, Homo sapiens
  misc_RNA (1)...(19): siRNA sense strand
cugcuuaguuauaaucauc

SEQ ID NO: 834494 - RNA, 19 nt, Homo sapiens
  misc_RNA (1)...(19): siRNA sense strand
acaugaaccucuuggaaaa

SEQ ID NO: 834495 - RNA, 19 nt, Homo sapiens
  misc_RNA (1)...(19): siRNA sense strand
agaacugguugaacacauc

SEQ ID NO: 834496 - RNA, 19 nt, Homo sapiens
  misc_RNA (1)...(19): siRNA sense strand
aaggcaauuugauuagcua

SEQ ID NO: 834497 - RNA, 19 nt, Homo sapiens
  misc_RNA (1)...(19): siRNA sense strand
gagcuacaauaucaaaaca

SEQ ID NO: 834498 - RNA, 19 nt, Homo sapiens
  misc_RNA (1)...(19): siRNA sense strand
gauguuacuauacuugauc

SEQ ID NO: 834499 - RNA, 19 nt, Homo sapiens
  misc_RNA (1)...(19): siRNA sense strand
ugaaugccacucaaaauuu

SEQ ID NO: 834500 - RNA, 19 nt, Homo sapiens
  misc_RNA (1)...(19): siRNA sense strand
cuccaucuauguaauucaa

SEQ ID NO: 834501 - RNA, 19 nt, Homo sapiens
  misc_RNA (1)...(19): siRNA sense strand
ccaugaauuaugugaagaa

SEQ ID NO: 834502 - RNA, 19 nt, Homo sapiens
  misc_RNA (1)...(19): siRNA sense strand
cagaacugguugaacacau

SEQ ID NO: 834503 - RNA, 19 nt, Homo sapiens
  misc_RNA (1)...(19): siRNA sense strand
uuaauuugcagaacugguu

SEQ ID NO: 834504 - RNA, 19 nt, Homo sapiens
  misc_RNA (1)...(19): siRNA sense strand
guaccaccacuauuucauc

SEQ ID NO: 834505 - RNA, 19 nt, Homo sapiens
  misc_RNA (1)...(19): siRNA sense strand
ucugaagaaacuacaguaa

SEQ ID NO: 834506 - RNA, 19 nt, Homo sapiens
  misc_RNA (1)...(19): siRNA sense strand
gguaagaguugcccuccaa

SEQ ID NO: 834507 - RNA, 19 nt, Homo sapiens
  misc_RNA (1)...(19): siRNA sense strand
ucaaucagcgucaguauga

SEQ ID NO: 834508 - RNA, 19 nt, Homo sapiens
  misc_RNA (1)...(19): siRNA sense strand
agaccaggaugcaggauuu

SEQ ID NO: 834509 - RNA, 19 nt, Homo sapiens
  misc_RNA (1)...(19): siRNA sense strand
caugaugacuucccuaugg

SEQ ID NO: 834510 - RNA, 19 nt, Homo sapiens
  misc_RNA (1)...(19): siRNA sense strand
cugaugaccucccugguaa

SEQ ID NO: 834511 - RNA, 19 nt, Homo sapiens
  misc_RNA (1)...(19): siRNA sense strand
cacccuggcugcuaugaaa

SEQ ID NO: 834512 - RNA, 19 nt, Homo sapiens
  misc_RNA (1)...(19): siRNA sense strand
guaugaggcugaaagaaac

SEQ ID NO: 834513 - RNA, 19 nt, Homo sapiens
  misc_RNA (1)...(19): siRNA sense strand
acacaaagagcugcauuaa

SEQ ID NO: 834514 - RNA, 19 nt, Homo sapiens
  misc_RNA (1)...(19): siRNA sense strand
ucugacagcuccaggucua

SEQ ID NO: 834515 - RNA, 19 nt, Homo sapiens
  misc_RNA (1)...(19): siRNA sense strand
ggauuucuggagcuuguua

SEQ ID NO: 834516 - RNA, 19 nt, Homo sapiens
  misc_RNA (1)...(19): siRNA sense strand
gggcagcuucugugaguuu

SEQ ID NO: 834517 - RNA, 19 nt, Homo sapiens
  misc_RNA (1)...(19): siRNA sense strand
ggucuauccuggaagaagu

SEQ ID NO: 834518 - RNA, 19 nt, Homo sapiens
  misc_RNA (1)...(19): siRNA sense strand
cagggcagcuucugugagu

SEQ ID NO: 834519 - RNA, 19 nt, Homo sapiens
  misc_RNA (1)...(19): siRNA sense strand
uggagagccuguuggagaa

SEQ ID NO: 834520 - RNA, 19 nt, Homo sapiens
  misc_RNA (1)...(19): siRNA sense strand
aguaugaggcugaaagaaa

SEQ ID NO: 834521 - RNA, 19 nt, Homo sapiens
  misc_RNA (1)...(19): siRNA sense strand
ugaccucccugguaagagu

SEQ ID NO: 834522 - RNA, 19 nt, Homo sapiens
  misc_RNA (1)...(19): siRNA sense strand
caggauuucuggagcuugu

SEQ ID NO: 834523 - RNA, 19 nt, Homo sapiens
  misc_RNA (1)...(19): siRNA sense strand
ucuggagcuuguuaacuuu

SEQ ID NO: 834524 - RNA, 19 nt, Homo sapiens
  misc_RNA (1)...(19): siRNA sense strand
gaugaccucccugguaaga

SEQ ID NO: 834525 - RNA, 19 nt, Homo sapiens
  misc_RNA (1)...(19): siRNA sense strand
ucacaagucugcgccuucu

SEQ ID NO: 834526 - RNA, 19 nt, Homo sapiens
  misc_RNA (1)...(19): siRNA sense strand
guacauccuccuccaugau

SEQ ID NO: 834527 - RNA, 19 nt, Homo sapiens
  misc_RNA (1)...(19): siRNA sense strand
aaacacaaagagcugcauu

SEQ ID NO: 834528 - RNA, 19 nt, Homo sapiens
  misc_RNA (1)...(19): siRNA sense strand
uucuggagcuuguuaacuu

SEQ ID NO: 834529 - RNA, 19 nt, Homo sapiens
  misc_RNA (1)...(19): siRNA sense strand
cagcuucugugaguuugug

SEQ ID NO: 834530 - RNA, 19 nt, Homo sapiens
  misc_RNA (1)...(19): siRNA sense strand
aacacaaagagcugcauua

SEQ ID NO: 834531 - RNA, 19 nt, Homo sapiens
  misc_RNA (1)...(19): siRNA sense strand
ggagagccuguuggagaaa

SEQ ID NO: 834532 - RNA, 19 nt, Homo sapiens
  misc_RNA (1)...(19): siRNA sense strand
acugaugaccucccuggua

SEQ ID NO: 834533 - RNA, 19 nt, Homo sapiens
  misc_RNA (1)...(19): siRNA sense strand
ccuccuccaugaugacuuc

SEQ ID NO: 834534 - RNA, 19 nt, Homo sapiens
  misc_RNA (1)...(19): siRNA sense strand
ccugcucacuggcuucuca

SEQ ID NO: 834535 - RNA, 19 nt, Homo sapiens
  misc_RNA (1)...(19): siRNA sense strand
gcacccuggcugcuaugaa

SEQ ID NO: 834536 - RNA, 19 nt, Homo sapiens
  misc_RNA (1)...(19): siRNA sense strand
aguacauccuccuccauga

SEQ ID NO: 834537 - RNA, 19 nt, Homo sapiens
  misc_RNA (1)...(19): siRNA sense strand
ggaauggaauguacuguuu

SEQ ID NO: 834538 - RNA, 19 nt, Homo sapiens
  misc_RNA (1)...(19): siRNA sense strand
ccaagaaacuucaauaugu

SEQ ID NO: 834539 - RNA, 19 nt, Homo sapiens
  misc_RNA (1)...(19): siRNA sense strand
guagugccauuaagauaua

SEQ ID NO: 834540 - RNA, 19 nt, Homo sapiens
  misc_RNA (1)...(19): siRNA sense strand
gaagauuuccaguagguua

SEQ ID NO: 834541 - RNA, 19 nt, Homo sapiens
  misc_RNA (1)...(19): siRNA sense strand
caaccaagaaacuucaaua

SEQ ID NO: 834542 - RNA, 19 nt, Homo sapiens
  misc_RNA (1)...(19): siRNA sense strand
ccauuaagauauacuccua

SEQ ID NO: 834543 - RNA, 19 nt, Homo sapiens
  misc_RNA (1)...(19): siRNA sense strand
gguuauggguaaucaguga

SEQ ID NO: 834544 - RNA, 19 nt, Homo sapiens
  misc_RNA (1)...(19): siRNA sense strand
uccaguagguuauggguaa

SEQ ID NO: 834545 - RNA, 19 nt, Homo sapiens
  misc_RNA (1)...(19): siRNA sense strand
aaacuggaauggaauguac

SEQ ID NO: 834546 - RNA, 19 nt, Homo sapiens
  misc_RNA (1)...(19): siRNA sense strand
guccacaaguucagcagaa

SEQ ID NO: 834547 - RNA, 19 nt, Homo sapiens
  misc_RNA (1)...(19): siRNA sense strand
ggcugaagauuuccaguag

SEQ ID NO: 834548 - RNA, 19 nt, Homo sapiens
  misc_RNA (1)...(19): siRNA sense strand
ccaguuuucuucaaucuuu

SEQ ID NO: 834549 - RNA, 19 nt, Homo sapiens
  misc_RNA (1)...(19): siRNA sense strand
caguacaucuugaauacca

SEQ ID NO: 834550 - RNA, 19 nt, Homo sapiens
  misc_RNA (1)...(19): siRNA sense strand
ccuauacaauuuccuccaa

SEQ ID NO: 834551 - RNA, 19 nt, Homo sapiens
  misc_RNA (1)...(19): siRNA sense strand
caaacuggaauggaaugua

SEQ ID NO: 834552 - RNA, 19 nt, Homo sapiens
  misc_RNA (1)...(19): siRNA sense strand
gaauggaauguacuguuuc

SEQ ID NO: 834553 - RNA, 19 nt, Homo sapiens
  misc_RNA (1)...(19): siRNA sense strand
gaauguacuguuucucaca

SEQ ID NO: 834554 - RNA, 19 nt, Homo sapiens
  misc_RNA (1)...(19): siRNA sense strand
ugcaguacaucuugaauac

SEQ ID NO: 834555 - RNA, 19 nt, Homo sapiens
  misc_RNA (1)...(19): siRNA sense strand
gaauaccaguuuucuucaa

SEQ ID NO: 834556 - RNA, 19 nt, Homo sapiens
  misc_RNA (1)...(19): siRNA sense strand
agggcaaacuggaauggaa

SEQ ID NO: 834557 - RNA, 19 nt, Homo sapiens
  misc_RNA (1)...(19): siRNA sense strand
ucauuguucuuccaaccuu

SEQ ID NO: 834558 - RNA, 19 nt, Homo sapiens
  misc_RNA (1)...(19): siRNA sense strand
cugaagauuuccaguaggu

SEQ ID NO: 834559 - RNA, 19 nt, Homo sapiens
  misc_RNA (1)...(19): siRNA sense strand
uaacagaaaacauggaaug

SEQ ID NO: 834560 - RNA, 19 nt, Homo sapiens
  misc_RNA (1)...(19): siRNA sense strand
uguagugccauuaagauau

SEQ ID NO: 834561 - RNA, 19 nt, Homo sapiens
  misc_RNA (1)...(19): siRNA sense strand
gcaaccaagaaacuucaau

SEQ ID NO: 834562 - RNA, 19 nt, Homo sapiens
  misc_RNA (1)...(19): siRNA sense strand
gcuguagugccauuaagau

SEQ ID NO: 834563 - RNA, 19 nt, Homo sapiens
  misc_RNA (1)...(19): siRNA sense strand
uggaauguacuguuucuca

SEQ ID NO: 834564 - RNA, 19 nt, Homo sapiens
  misc_RNA (1)...(19): siRNA sense strand
gggcaaacuggaauggaau

SEQ ID NO: 834565 - RNA, 19 nt, Homo sapiens
  misc_RNA (1)...(19): siRNA sense strand
uuuaagcuucaguguguua

SEQ ID NO: 834566 - RNA, 19 nt, Homo sapiens
  misc_RNA (1)...(19): siRNA sense strand
ccuccaacucgguucauuu

SEQ ID NO: 834567 - RNA, 19 nt, Homo sapiens
  misc_RNA (1)...(19): siRNA sense strand
acccaaauuuaacacaguu

SEQ ID NO: 834568 - RNA, 19 nt, Homo sapiens
  misc_RNA (1)...(19): siRNA sense strand
accaagaaacuucaauaug

SEQ ID NO: 834569 - RNA, 19 nt, Homo sapiens
  misc_RNA (1)...(19): siRNA sense strand
aauggaauguacuguuucu

SEQ ID NO: 834570 - RNA, 19 nt, Homo sapiens
  misc_RNA (1)...(19): siRNA sense strand
caucuugaauaccaguuuu

SEQ ID NO: 834571 - RNA, 19 nt, Homo sapiens
  misc_RNA (1)...(19): siRNA sense strand
aggcugaagauuuccagua

SEQ ID NO: 834572 - RNA, 19 nt, Homo sapiens
  misc_RNA (1)...(19): siRNA sense strand
gcaaacuggaauggaaugu

SEQ ID NO: 834573 - RNA, 19 nt, Homo sapiens
  misc_RNA (1)...(19): siRNA sense strand
uauacaauuuccuccaacu

SEQ ID NO: 834574 - RNA, 19 nt, Homo sapiens
  misc_RNA (1)...(19): siRNA sense strand
cagaagggauucggaagua

SEQ ID NO: 834575 - RNA, 19 nt, Homo sapiens
  misc_RNA (1)...(19): siRNA sense strand
ccagaugaguggcuucuau

SEQ ID NO: 834576 - RNA, 19 nt, Homo sapiens
  misc_RNA (1)...(19): siRNA sense strand
gggaccaccucuauaguga

SEQ ID NO: 834577 - RNA, 19 nt, Homo sapiens
  misc_RNA (1)...(19): siRNA sense strand
aagcacaucucuacaagga

SEQ ID NO: 834578 - RNA, 19 nt, Homo sapiens
  misc_RNA (1)...(19): siRNA sense strand
gcucuucgauguggucauu

SEQ ID NO: 834579 - RNA, 19 nt, Homo sapiens
  misc_RNA (1)...(19): siRNA sense strand
ccaaggcccuguucaaugc

SEQ ID NO: 834580 - RNA, 19 nt, Homo sapiens
  misc_RNA (1)...(19): siRNA sense strand
ucagcugccugcucaacua

SEQ ID NO: 834581 - RNA, 19 nt, Homo sapiens
  misc_RNA (1)...(19): siRNA sense strand
gcgcuucucugaccucuac

SEQ ID NO: 834582 - RNA, 19 nt, Homo sapiens
  misc_RNA (1)...(19): siRNA sense strand
uggaaagccugucgacguu

SEQ ID NO: 834583 - RNA, 19 nt, Homo sapiens
  misc_RNA (1)...(19): siRNA sense strand
ucagaaaacucgaugagaa

SEQ ID NO: 834584 - RNA, 19 nt, Homo sapiens
  misc_RNA (1)...(19): siRNA sense strand
gaagggauucggaaguaug

SEQ ID NO: 834585 - RNA, 19 nt, Homo sapiens
  misc_RNA (1)...(19): siRNA sense strand
ccaagcacaucucuacaag

SEQ ID NO: 834586 - RNA, 19 nt, Homo sapiens
  misc_RNA (1)...(19): siRNA sense strand
gaacccagcagccaucuac

SEQ ID NO: 834587 - RNA, 19 nt, Homo sapiens
  misc_RNA (1)...(19): siRNA sense strand
gccacagccuggaguuuga

SEQ ID NO: 834588 - RNA, 19 nt, Homo sapiens
  misc_RNA (1)...(19): siRNA sense strand
gcacuacaaguacccagaa

SEQ ID NO: 834589 - RNA, 19 nt, Homo sapiens
  misc_RNA (1)...(19): siRNA sense strand
ugaucgagcacuacaagua

SEQ ID NO: 834590 - RNA, 19 nt, Homo sapiens
  misc_RNA (1)...(19): siRNA sense strand
gaccaccucuauagugauc

SEQ ID NO: 834591 - RNA, 19 nt, Homo sapiens
  misc_RNA (1)...(19): siRNA sense strand
ggaaagaggaauuuuguug

SEQ ID NO: 834592 - RNA, 19 nt, Homo sapiens
  misc_RNA (1)...(19): siRNA sense strand
ggagaaguacauccugaga

SEQ ID NO: 834593 - RNA, 19 nt, Homo sapiens
  misc_RNA (1)...(19): siRNA sense strand
ggaggugauugagcuguau

SEQ ID NO: 834594 - RNA, 19 nt, Homo sapiens
  misc_RNA (1)...(19): siRNA sense strand
ugaagggccucauguacca

SEQ ID NO: 834595 - RNA, 19 nt, Homo sapiens
  misc_RNA (1)...(19): siRNA sense strand
agcaggacauggagaagua

SEQ ID NO: 834596 - RNA, 19 nt, Homo sapiens
  misc_RNA (1)...(19): siRNA sense strand
caaguacccagaagggauu

SEQ ID NO: 834597 - RNA, 19 nt, Homo sapiens
  misc_RNA (1)...(19): siRNA sense strand
gagcgguucugcgcaggaa

SEQ ID NO: 834598 - RNA, 19 nt, Homo sapiens
  misc_RNA (1)...(19): siRNA sense strand
gcgcaggaaagaggaauuu

SEQ ID NO: 834599 - RNA, 19 nt, Homo sapiens
  misc_RNA (1)...(19): siRNA sense strand
gcaguucggcagcaucuuc

SEQ ID NO: 834600 - RNA, 19 nt, Homo sapiens
  misc_RNA (1)...(19): siRNA sense strand
cgugagauccgcaucauca

SEQ ID NO: 834601 - RNA, 19 nt, Homo sapiens
  misc_RNA (1)...(19): siRNA sense strand
gcguggacuucaccuucua

SEQ ID NO: 834602 - RNA, 19 nt, Homo sapiens
  misc_RNA (1)...(19): siRNA sense strand
cccagcacaucccacuaua

SEQ ID NO: 834603 - RNA, 19 nt, Homo sapiens
  misc_RNA (1)...(19): siRNA sense strand
gagauccgcaucaucaaca

SEQ ID NO: 834604 - RNA, 19 nt, Homo sapiens
  misc_RNA (1)...(19): siRNA sense strand
ggaucgagcaggacaugga

SEQ ID NO: 834605 - RNA, 19 nt, Homo sapiens
  misc_RNA (1)...(19): siRNA sense strand
ggcaggagcugaggugcau

SEQ ID NO: 834606 - RNA, 19 nt, Homo sapiens
  misc_RNA (1)...(19): siRNA sense strand
ggcgccagcucuucgaugu

SEQ ID NO: 834607 - RNA, 19 nt, Homo sapiens
  misc_RNA (1)...(19): siRNA sense strand
gaucgagcacuacaaguac

SEQ ID NO: 834608 - RNA, 19 nt, Homo sapiens
  misc_RNA (1)...(19): siRNA sense strand
ggauucggaaguaugacua

SEQ ID NO: 834609 - RNA, 19 nt, Homo sapiens
  misc_RNA (1)...(19): siRNA sense strand
ccaacaguccuuucagcuu

SEQ ID NO: 834610 - RNA, 19 nt, Homo sapiens
  misc_RNA (1)...(19): siRNA sense strand
ugaccaagcacaucucuac

SEQ ID NO: 834611 - RNA, 19 nt, Homo sapiens
  misc_RNA (1)...(19): siRNA sense strand
cagacgaggaggugauuga

SEQ ID NO: 834612 - RNA, 19 nt, Homo sapiens
  misc_RNA (1)...(19): siRNA sense strand
gauugacgccuuccacuac

SEQ ID NO: 834613 - RNA, 19 nt, Homo sapiens
  misc_RNA (1)...(19): siRNA sense strand
acuaugacauucagaagag

SEQ ID NO: 834614 - RNA, 19 nt, Homo sapiens
  misc_RNA (1)...(19): siRNA sense strand
ggucuacggcuuugacuac

SEQ ID NO: 834615 - RNA, 19 nt, Homo sapiens
  misc_RNA (1)...(19): siRNA sense strand
gagaggggaugagacguuu

SEQ ID NO: 834616 - RNA, 19 nt, Homo sapiens
  misc_RNA (1)...(19): siRNA sense strand
ggacauggagaaguacauc

SEQ ID NO: 834617 - RNA, 19 nt, Homo sapiens
  misc_RNA (1)...(19): siRNA sense strand
ggucugcagucuccugaac

SEQ ID NO: 834618 - RNA, 19 nt, Homo sapiens
  misc_RNA (1)...(19): siRNA sense strand
ggccacagccuggaguuug

SEQ ID NO: 834619 - RNA, 19 nt, Homo sapiens
  misc_RNA (1)...(19): siRNA sense strand
ucaccaaggcccuguucaa

SEQ ID NO: 834620 - RNA, 19 nt, Homo sapiens
  misc_RNA (1)...(19): siRNA sense strand
cauggugggucccgauugg

SEQ ID NO: 834621 - RNA, 19 nt, Homo sapiens
  misc_RNA (1)...(19): siRNA sense strand
gaaaagggcaagaucuauc

SEQ ID NO: 834622 - RNA, 19 nt, Homo sapiens
  misc_RNA (1)...(19): siRNA sense strand
uuaagcaguucauggacau

SEQ ID NO: 834623 - RNA, 19 nt, Homo sapiens
  misc_RNA (1)...(19): siRNA sense strand
acacggagcaguacaugca

SEQ ID NO: 834624 - RNA, 19 nt, Homo sapiens
  misc_RNA (1)...(19): siRNA sense strand
caacacggagcaguacaug

SEQ ID NO: 834625 - RNA, 19 nt, Homo sapiens
  misc_RNA (1)...(19): siRNA sense strand
gaucagccugcgugacguu

SEQ ID NO: 834626 - RNA, 19 nt, Homo sapiens
  misc_RNA (1)...(19): siRNA sense strand
gcaguucauggacaucuuc

SEQ ID NO: 834627 - RNA, 19 nt, Homo sapiens
  misc_RNA (1)...(19): siRNA sense strand
agaagggauucggaaguau

SEQ ID NO: 834628 - RNA, 19 nt, Homo sapiens
  misc_RNA (1)...(19): siRNA sense strand
gagcgugagauccgcauca

SEQ ID NO: 834629 - RNA, 19 nt, Homo sapiens
  misc_RNA (1)...(19): siRNA sense strand
gcagccaucuacgccaaca

SEQ ID NO: 834630 - RNA, 19 nt, Homo sapiens
  misc_RNA (1)...(19): siRNA sense strand
aggaggugauugagcugua

SEQ ID NO: 834631 - RNA, 19 nt, Homo sapiens
  misc_RNA (1)...(19): siRNA sense strand
guugaggucuacggcuuug

SEQ ID NO: 834632 - RNA, 19 nt, Homo sapiens
  misc_RNA (1)...(19): siRNA sense strand
gagcaggacauggagaagu

SEQ ID NO: 834633 - RNA, 19 nt, Homo sapiens
  misc_RNA (1)...(19): siRNA sense strand
caacuaccgcguggacuuc

SEQ ID NO: 834634 - RNA, 19 nt, Homo sapiens
  misc_RNA (1)...(19): siRNA sense strand
cggaucacccgcuuggaaa

SEQ ID NO: 834635 - RNA, 19 nt, Homo sapiens
  misc_RNA (1)...(19): siRNA sense strand
ccagaagggauucggaagu

SEQ ID NO: 834636 - RNA, 19 nt, Homo sapiens
  misc_RNA (1)...(19): siRNA sense strand
caccaaggcccuguucaau

SEQ ID NO: 834637 - RNA, 19 nt, Homo sapiens
  misc_RNA (1)...(19): siRNA sense strand
aaagaggaauuuuguugga

SEQ ID NO: 834638 - RNA, 19 nt, Homo sapiens
  misc_RNA (1)...(19): siRNA sense strand
ggaguuugaccaagcacau

SEQ ID NO: 834639 - RNA, 19 nt, Homo sapiens
  misc_RNA (1)...(19): siRNA sense strand
gcaggaaagaggaauuuug

SEQ ID NO: 834640 - RNA, 19 nt, Homo sapiens
  misc_RNA (1)...(19): siRNA sense strand
ccugugugguggacuacuu

SEQ ID NO: 834641 - RNA, 19 nt, Homo sapiens
  misc_RNA (1)...(19): siRNA sense strand
ucaacuaccgcguggacuu

SEQ ID NO: 834642 - RNA, 19 nt, Homo sapiens
  misc_RNA (1)...(19): siRNA sense strand
ucaucaacacggagcagua

SEQ ID NO: 834643 - RNA, 19 nt, Homo sapiens
  misc_RNA (1)...(19): siRNA sense strand
ccugguggcccaugggaaa

SEQ ID NO: 834644 - RNA, 19 nt, Homo sapiens
  misc_RNA (1)...(19): siRNA sense strand
cagaugaguggcuucuaug

SEQ ID NO: 834645 - RNA, 19 nt, Homo sapiens
  misc_RNA (1)...(19): siRNA sense strand
ccaccucuauagugaucug

SEQ ID NO: 834646 - RNA, 19 nt, Homo sapiens
  misc_RNA (1)...(19): siRNA sense strand
ccggaucacccgcuuggaa

SEQ ID NO: 834647 - RNA, 19 nt, Homo sapiens
  misc_RNA (1)...(19): siRNA sense strand
uccgagacgugcaugugaa

SEQ ID NO: 834648 - RNA, 19 nt, Homo sapiens
  misc_RNA (1)...(19): siRNA sense strand
gucccuccauuaagcaguu

SEQ ID NO: 834649 - RNA, 19 nt, Homo sapiens
  misc_RNA (1)...(19): siRNA sense strand
ggaaaagggcaagaucuau

SEQ ID NO: 834650 - RNA, 19 nt, Homo sapiens
  misc_RNA (1)...(19): siRNA sense strand
agauugacgccuuccacua

SEQ ID NO: 834651 - RNA, 19 nt, Homo sapiens
  misc_RNA (1)...(19): siRNA sense strand
uggcucugcuguccugugu

SEQ ID NO: 834652 - RNA, 19 nt, Homo sapiens
  misc_RNA (1)...(19): siRNA sense strand
gcagagaccuggacauuaa

SEQ ID NO: 834653 - RNA, 19 nt, Homo sapiens
  misc_RNA (1)...(19): siRNA sense strand
ccauggagguguccuguug

SEQ ID NO: 834654 - RNA, 19 nt, Homo sapiens
  misc_RNA (1)...(19): siRNA sense strand
cggccuaacuagcacuuua

SEQ ID NO: 834655 - RNA, 19 nt, Homo sapiens
  misc_RNA (1)...(19): siRNA sense strand
ggagaucaccaagcacuuu

SEQ ID NO: 834656 - RNA, 19 nt, Homo sapiens
  misc_RNA (1)...(19): siRNA sense strand
aggaggagcuggugaacaa

SEQ ID NO: 834657 - RNA, 19 nt, Homo sapiens
  misc_RNA (1)...(19): siRNA sense strand
ggaaggaacaugacaucga

SEQ ID NO: 834658 - RNA, 19 nt, Homo sapiens
  misc_RNA (1)...(19): siRNA sense strand
gacauuaaccggccuggaa

SEQ ID NO: 834659 - RNA, 19 nt, Homo sapiens
  misc_RNA (1)...(19): siRNA sense strand
ccuaugugcuggccaaguu

SEQ ID NO: 834660 - RNA, 19 nt, Homo sapiens
  misc_RNA (1)...(19): siRNA sense strand
ggcaaaggcuggauagacu

SEQ ID NO: 834661 - RNA, 19 nt, Homo sapiens
  misc_RNA (1)...(19): siRNA sense strand
gcccagccauccucaccua

SEQ ID NO: 834662 - RNA, 19 nt, Homo sapiens
  misc_RNA (1)...(19): siRNA sense strand
ccucuuggcugcagacaca

SEQ ID NO: 834663 - RNA, 19 nt, Homo sapiens
  misc_RNA (1)...(19): siRNA sense strand
aaacuggacccgaccacua

SEQ ID NO: 834664 - RNA, 19 nt, Homo sapiens
  misc_RNA (1)...(19): siRNA sense strand
cagaguuggugcagagcua

SEQ ID NO: 834665 - RNA, 19 nt, Homo sapiens
  misc_RNA (1)...(19): siRNA sense strand
cacaaacuaugcuucaaca

SEQ ID NO: 834666 - RNA, 19 nt, Homo sapiens
  misc_RNA (1)...(19): siRNA sense strand
ccagcguggugcagcauuu

SEQ ID NO: 834667 - RNA, 19 nt, Homo sapiens
  misc_RNA (1)...(19): siRNA sense strand
gcauuucggguucaaguau

SEQ ID NO: 834668 - RNA, 19 nt, Homo sapiens
  misc_RNA (1)...(19): siRNA sense strand
caaguuugcacucaucuuc

SEQ ID NO: 834669 - RNA, 19 nt, Homo sapiens
  misc_RNA (1)...(19): siRNA sense strand
caacaccuucuucaacuuc

SEQ ID NO: 834670 - RNA, 19 nt, Homo sapiens
  misc_RNA (1)...(19): siRNA sense strand
ucaacaccuucuucaacuu

SEQ ID NO: 834671 - RNA, 19 nt, Homo sapiens
  misc_RNA (1)...(19): siRNA sense strand
cugcagcucuucuggaaca

SEQ ID NO: 834672 - RNA, 19 nt, Homo sapiens
  misc_RNA (1)...(19): siRNA sense strand
gagaucaccaagcacuuug

SEQ ID NO: 834673 - RNA, 19 nt, Homo sapiens
  misc_RNA (1)...(19): siRNA sense strand
gcgauucccugaggagaag

SEQ ID NO: 834674 - RNA, 19 nt, Homo sapiens
  misc_RNA (1)...(19): siRNA sense strand
ggccaaguuugcacucauc

SEQ ID NO: 834675 - RNA, 19 nt, Homo sapiens
  misc_RNA (1)...(19): siRNA sense strand
ccgcagagaccuggacauu

SEQ ID NO: 834676 - RNA, 19 nt, Homo sapiens
  misc_RNA (1)...(19): siRNA sense strand
cagcucuucuggaacaugu

SEQ ID NO: 834677 - RNA, 19 nt, Homo sapiens
  misc_RNA (1)...(19): siRNA sense strand
gggccucaaccacaaacua

SEQ ID NO: 834678 - RNA, 19 nt, Homo sapiens
  misc_RNA (1)...(19): siRNA sense strand
ccuacggccuucugcaugu

SEQ ID NO: 834679 - RNA, 19 nt, Homo sapiens
  misc_RNA (1)...(19): siRNA sense strand
cuacggccuucugcaugua

SEQ ID NO: 834680 - RNA, 19 nt, Homo sapiens
  misc_RNA (1)...(19): siRNA sense strand
caauggcaaaggcuggaua

SEQ ID NO: 834681 - RNA, 19 nt, Homo sapiens
  misc_RNA (1)...(19): siRNA sense strand
ugcaggagaucaccaagca

SEQ ID NO: 834682 - RNA, 19 nt, Homo sapiens
  misc_RNA (1)...(19): siRNA sense strand
ggccucaaccacaaacuau

SEQ ID NO: 834683 - RNA, 19 nt, Homo sapiens
  misc_RNA (1)...(19): siRNA sense strand
agacacagacuggaaggaa

SEQ ID NO: 834684 - RNA, 19 nt, Homo sapiens
  misc_RNA (1)...(19): siRNA sense strand
ucgaggacaugcaggagau

SEQ ID NO: 834685 - RNA, 19 nt, Homo sapiens
  misc_RNA (1)...(19): siRNA sense strand
cgcagagaccuggacauua

SEQ ID NO: 834686 - RNA, 19 nt, Homo sapiens
  misc_RNA (1)...(19): siRNA sense strand
cuucaaauacuuccugcaa

SEQ ID NO: 834687 - RNA, 19 nt, Homo sapiens
  misc_RNA (1)...(19): siRNA sense strand
gaucaccaagcacuuugug

SEQ ID NO: 834688 - RNA, 19 nt, Homo sapiens
  misc_RNA (1)...(19): siRNA sense strand
cagacuggaaggaacauga

SEQ ID NO: 834689 - RNA, 19 nt, Homo sapiens
  misc_RNA (1)...(19): siRNA sense strand
ccacaaacuaugcuucaac

SEQ ID NO: 834690 - RNA, 19 nt, Homo sapiens
  misc_RNA (1)...(19): siRNA sense strand
ccagggaagcugacugaag

SEQ ID NO: 834691 - RNA, 19 nt, Homo sapiens
  misc_RNA (1)...(19): siRNA sense strand
gaggagcuggugaacaaca

SEQ ID NO: 834692 - RNA, 19 nt, Homo sapiens
  misc_RNA (1)...(19): siRNA sense strand
cauuucggguucaaguaug

SEQ ID NO: 834693 - RNA, 19 nt, Homo sapiens
  misc_RNA (1)...(19): siRNA sense strand
accaagcucuccggccuaa

SEQ ID NO: 834694 - RNA, 19 nt, Homo sapiens
  misc_RNA (1)...(19): siRNA sense strand
ggaacaugacaucgagaca

SEQ ID NO: 834695 - RNA, 19 nt, Homo sapiens
  misc_RNA (1)...(19): siRNA sense strand
ggguucaaguaugugauug

SEQ ID NO: 834696 - RNA, 19 nt, Homo sapiens
  misc_RNA (1)...(19): siRNA sense strand
caagcacuuuguggugugu

SEQ ID NO: 834697 - RNA, 19 nt, Homo sapiens
  misc_RNA (1)...(19): siRNA sense strand
gagcuaccggcagcagauu

SEQ ID NO: 834698 - RNA, 19 nt, Homo sapiens
  misc_RNA (1)...(19): siRNA sense strand
gcagagaccuggacauuaa

SEQ ID NO: 834699 - RNA, 19 nt, Homo sapiens
  misc_RNA (1)...(19): siRNA sense strand
ccauggagguguccuguug

SEQ ID NO: 834700 - RNA, 19 nt, Homo sapiens
  misc_RNA (1)...(19): siRNA sense strand
cggccuaacuagcacuuua

SEQ ID NO: 834701 - RNA, 19 nt, Homo sapiens
  misc_RNA (1)...(19): siRNA sense strand
ggagaucaccaagcacuuu

SEQ ID NO: 834702 - RNA, 19 nt, Homo sapiens
  misc_RNA (1)...(19): siRNA sense strand
aggaggagcuggugaacaa

SEQ ID NO: 834703 - RNA, 19 nt, Homo sapiens
  misc_RNA (1)...(19): siRNA sense strand
ggaaggaacaugacaucga

SEQ ID NO: 834704 - RNA, 19 nt, Homo sapiens
  misc_RNA (1)...(19): siRNA sense strand
gacauuaaccggccuggaa

SEQ ID NO: 834705 - RNA, 19 nt, Homo sapiens
  misc_RNA (1)...(19): siRNA sense strand
ccuaugugcuggccaaguu

SEQ ID NO: 834706 - RNA, 19 nt, Homo sapiens
  misc_RNA (1)...(19): siRNA sense strand
ggcaaaggcuggauagacu

SEQ ID NO: 834707 - RNA, 19 nt, Homo sapiens
  misc_RNA (1)...(19): siRNA sense strand
gcccagccauccucaccua

SEQ ID NO: 834708 - RNA, 19 nt, Homo sapiens
  misc_RNA (1)...(19): siRNA sense strand
ccucuuggcugcagacaca

SEQ ID NO: 834709 - RNA, 19 nt, Homo sapiens
  misc_RNA (1)...(19): siRNA sense strand
aaacuggacccgaccacua

SEQ ID NO: 834710 - RNA, 19 nt, Homo sapiens
  misc_RNA (1)...(19): siRNA sense strand
cagaguuggugcagagcua

SEQ ID NO: 834711 - RNA, 19 nt, Homo sapiens
  misc_RNA (1)...(19): siRNA sense strand
cacaaacuaugcuucaaca

SEQ ID NO: 834712 - RNA, 19 nt, Homo sapiens
  misc_RNA (1)...(19): siRNA sense strand
ccagcguggugcagcauuu

SEQ ID NO: 834713 - RNA, 19 nt, Homo sapiens
  misc_RNA (1)...(19): siRNA sense strand
gcauuucggguucaaguau

SEQ ID NO: 834714 - RNA, 19 nt, Homo sapiens
  misc_RNA (1)...(19): siRNA sense strand
caaguuugcacucaucuuc

SEQ ID NO: 834715 - RNA, 19 nt, Homo sapiens
  misc_RNA (1)...(19): siRNA sense strand
caacaccuucuucaacuuc

SEQ ID NO: 834716 - RNA, 19 nt, Homo sapiens
  misc_RNA (1)...(19): siRNA sense strand
ucaacaccuucuucaacuu

SEQ ID NO: 834717 - RNA, 19 nt, Homo sapiens
  misc_RNA (1)...(19): siRNA sense strand
cugcagcucuucuggaaca

SEQ ID NO: 834718 - RNA, 19 nt, Homo sapiens
  misc_RNA (1)...(19): siRNA sense strand
gagaucaccaagcacuuug

SEQ ID NO: 834719 - RNA, 19 nt, Homo sapiens
  misc_RNA (1)...(19): siRNA sense strand
gcgauucccugaggagaag

SEQ ID NO: 834720 - RNA, 19 nt, Homo sapiens
  misc_RNA (1)...(19): siRNA sense strand
ggccaaguuugcacucauc

SEQ ID NO: 834721 - RNA, 19 nt, Homo sapiens
  misc_RNA (1)...(19): siRNA sense strand
ccgcagagaccuggacauu

SEQ ID NO: 834722 - RNA, 19 nt, Homo sapiens
  misc_RNA (1)...(19): siRNA sense strand
cagcucuucuggaacaugu

SEQ ID NO: 834723 - RNA, 19 nt, Homo sapiens
  misc_RNA (1)...(19): siRNA sense strand
gggccucaaccacaaacua

SEQ ID NO: 834724 - RNA, 19 nt, Homo sapiens
  misc_RNA (1)...(19): siRNA sense strand
ccuacggccuucugcaugu

SEQ ID NO: 834725 - RNA, 19 nt, Homo sapiens
  misc_RNA (1)...(19): siRNA sense strand
cuacggccuucugcaugua

SEQ ID NO: 834726 - RNA, 19 nt, Homo sapiens
  misc_RNA (1)...(19): siRNA sense strand
caauggcaaaggcuggaua

SEQ ID NO: 834727 - RNA, 19 nt, Homo sapiens
  misc_RNA (1)...(19): siRNA sense strand
ugcaggagaucaccaagca

SEQ ID NO: 834728 - RNA, 19 nt, Homo sapiens
  misc_RNA (1)...(19): siRNA sense strand
ggccucaaccacaaacuau

SEQ ID NO: 834729 - RNA, 19 nt, Homo sapiens
  misc_RNA (1)...(19): siRNA sense strand
agacacagacuggaaggaa

SEQ ID NO: 834730 - RNA, 19 nt, Homo sapiens
  misc_RNA (1)...(19): siRNA sense strand
ucgaggacaugcaggagau

SEQ ID NO: 834731 - RNA, 19 nt, Homo sapiens
  misc_RNA (1)...(19): siRNA sense strand
cgcagagaccuggacauua

SEQ ID NO: 834732 - RNA, 19 nt, Homo sapiens
  misc_RNA (1)...(19): siRNA sense strand
cuucaaauacuuccugcaa

SEQ ID NO: 834733 - RNA, 19 nt, Homo sapiens
  misc_RNA (1)...(19): siRNA sense strand
gaucaccaagcacuuugug

SEQ ID NO: 834734 - RNA, 19 nt, Homo sapiens
  misc_RNA (1)...(19): siRNA sense strand
cagacuggaaggaacauga

SEQ ID NO: 834735 - RNA, 19 nt, Homo sapiens
  misc_RNA (1)...(19): siRNA sense strand
ccacaaacuaugcuucaac

SEQ ID NO: 834736 - RNA, 19 nt, Homo sapiens
  misc_RNA (1)...(19): siRNA sense strand
ccagggaagcugacugaag

SEQ ID NO: 834737 - RNA, 19 nt, Homo sapiens
  misc_RNA (1)...(19): siRNA sense strand
gaggagcuggugaacaaca

SEQ ID NO: 834738 - RNA, 19 nt, Homo sapiens
  misc_RNA (1)...(19): siRNA sense strand
cauuucggguucaaguaug

SEQ ID NO: 834739 - RNA, 19 nt, Homo sapiens
  misc_RNA (1)...(19): siRNA sense strand
accaagcucuccggccuaa

SEQ ID NO: 834740 - RNA, 19 nt, Homo sapiens
  misc_RNA (1)...(19): siRNA sense strand
ggaacaugacaucgagaca

SEQ ID NO: 834741 - RNA, 19 nt, Homo sapiens
  misc_RNA (1)...(19): siRNA sense strand
ggguucaaguaugugauug

SEQ ID NO: 834742 - RNA, 19 nt, Homo sapiens
  misc_RNA (1)...(19): siRNA sense strand
caagcacuuuguggugugu

SEQ ID NO: 834743 - RNA, 19 nt, Homo sapiens
  misc_RNA (1)...(19): siRNA sense strand
gagcuaccggcagcagauu

SEQ ID NO: 834744 - RNA, 19 nt, Homo sapiens
  misc_RNA (1)...(19): siRNA sense strand
caaaggacauuaaggaaua

SEQ ID NO: 834745 - RNA, 19 nt, Homo sapiens
  misc_RNA (1)...(19): siRNA sense strand
gcagagacauucacagaca

SEQ ID NO: 834746 - RNA, 19 nt, Homo sapiens
  misc_RNA (1)...(19): siRNA sense strand
ucacagacaucuuccuuug

SEQ ID NO: 834747 - RNA, 19 nt, Homo sapiens
  misc_RNA (1)...(19): siRNA sense strand
cuacaaggcugugaaauca

SEQ ID NO: 834748 - RNA, 19 nt, Homo sapiens
  misc_RNA (1)...(19): siRNA sense strand
uaaggaauaugucaaaugg

SEQ ID NO: 834749 - RNA, 19 nt, Homo sapiens
  misc_RNA (1)...(19): siRNA sense strand
ucaaauggaugauguacug

SEQ ID NO: 834750 - RNA, 19 nt, Homo sapiens
  misc_RNA (1)...(19): siRNA sense strand
uggaugauguacuggauua

SEQ ID NO: 834751 - RNA, 19 nt, Homo sapiens
  misc_RNA (1)...(19): siRNA sense strand
gaauaugucaaauggauga

SEQ ID NO: 834752 - RNA, 19 nt, Homo sapiens
  misc_RNA (1)...(19): siRNA sense strand
acagacaucuuccuuuguu

SEQ ID NO: 834753 - RNA, 19 nt, Homo sapiens
  misc_RNA (1)...(19): siRNA sense strand
acaaggcugugaaaucaaa

SEQ ID NO: 834754 - RNA, 19 nt, Homo sapiens
  misc_RNA (1)...(19): siRNA sense strand
gcaaacacggccagccuaa

SEQ ID NO: 834755 - RNA, 19 nt, Homo sapiens
  misc_RNA (1)...(19): siRNA sense strand
gaugauguacuggauuaua

SEQ ID NO: 834756 - RNA, 19 nt, Homo sapiens
  misc_RNA (1)...(19): siRNA sense strand
gaaaucaaaggacauuaag

SEQ ID NO: 834757 - RNA, 19 nt, Homo sapiens
  misc_RNA (1)...(19): siRNA sense strand
caucuuccuuuguugguuu

SEQ ID NO: 834758 - RNA, 19 nt, Homo sapiens
  misc_RNA (1)...(19): siRNA sense strand
guacaucccacacuaucuu

SEQ ID NO: 834759 - RNA, 19 nt, Homo sapiens
  misc_RNA (1)...(19): siRNA sense strand
cagcagagacauucacaga

SEQ ID NO: 834760 - RNA, 19 nt, Homo sapiens
  misc_RNA (1)...(19): siRNA sense strand
aaacacggccagccuaaga

SEQ ID NO: 834761 - RNA, 19 nt, Homo sapiens
  misc_RNA (1)...(19): siRNA sense strand
guugguuuccauucuauua

SEQ ID NO: 834762 - RNA, 19 nt, Homo sapiens
  misc_RNA (1)...(19): siRNA sense strand
gaaguuacgaugcccuugu

SEQ ID NO: 834763 - RNA, 19 nt, Homo sapiens
  misc_RNA (1)...(19): siRNA sense strand
aaucaaaggacauuaagga

SEQ ID NO: 834764 - RNA, 19 nt, Homo sapiens
  misc_RNA (1)...(19): siRNA sense strand
cccuuuacccugcguauua

SEQ ID NO: 834765 - RNA, 19 nt, Homo sapiens
  misc_RNA (1)...(19): siRNA sense strand
aggaauaugucaaauggau

SEQ ID NO: 834766 - RNA, 19 nt, Homo sapiens
  misc_RNA (1)...(19): siRNA sense strand
guuuguacaucccacacua

SEQ ID NO: 834767 - RNA, 19 nt, Homo sapiens
  misc_RNA (1)...(19): siRNA sense strand
gcugguggugcuuauauuu

SEQ ID NO: 834768 - RNA, 19 nt, Homo sapiens
  misc_RNA (1)...(19): siRNA sense strand
ucaaaggacauuaaggaau

SEQ ID NO: 834769 - RNA, 19 nt, Homo sapiens
  misc_RNA (1)...(19): siRNA sense strand
gguuuccauucuauuauga

SEQ ID NO: 834770 - RNA, 19 nt, Homo sapiens
  misc_RNA (1)...(19): siRNA sense strand
uaugucaaauggaugaugu

SEQ ID NO: 834771 - RNA, 19 nt, Homo sapiens
  misc_RNA (1)...(19): siRNA sense strand
gacauucacagacaucuuc

SEQ ID NO: 834772 - RNA, 19 nt, Homo sapiens
  misc_RNA (1)...(19): siRNA sense strand
guacuggauuauauuugca

SEQ ID NO: 834773 - RNA, 19 nt, Homo sapiens
  misc_RNA (1)...(19): siRNA sense strand
gcugcugucucccuacaca

SEQ ID NO: 834774 - RNA, 19 nt, Homo sapiens
  misc_RNA (1)...(19): siRNA sense strand
gggacagggugccuuaucg

SEQ ID NO: 834775 - RNA, 19 nt, Homo sapiens
  misc_RNA (1)...(19): siRNA sense strand
gcuccagccuccuguacag

SEQ ID NO: 834776 - RNA, 19 nt, Homo sapiens
  misc_RNA (1)...(19): siRNA sense strand
gagagacugcggagcuuca

SEQ ID NO: 834777 - RNA, 19 nt, Homo sapiens
  misc_RNA (1)...(19): siRNA sense strand
ccuacaaggcugugaaauc

SEQ ID NO: 834778 - RNA, 19 nt, Homo sapiens
  misc_RNA (1)...(19): siRNA sense strand
ggcugguggugcuuauauu

SEQ ID NO: 834779 - RNA, 19 nt, Homo sapiens
  misc_RNA (1)...(19): siRNA sense strand
acgaugcccuugugcacuu

SEQ ID NO: 834780 - RNA, 19 nt, Homo sapiens
  misc_RNA (1)...(19): siRNA sense strand
cagacaucuuccuuuguug

SEQ ID NO: 834781 - RNA, 19 nt, Homo sapiens
  misc_RNA (1)...(19): siRNA sense strand
uuuguugguuuccauucua

SEQ ID NO: 834782 - RNA, 19 nt, Homo sapiens
  misc_RNA (1)...(19): siRNA sense strand
cagagacauucacagacau

SEQ ID NO: 834783 - RNA, 19 nt, Homo sapiens
  misc_RNA (1)...(19): siRNA sense strand
uguacuggauuauauuugc

SEQ ID NO: 834784 - RNA, 19 nt, Homo sapiens
  misc_RNA (1)...(19): siRNA sense strand
ccuuuacccugcguauuau

SEQ ID NO: 834785 - RNA, 19 nt, Homo sapiens
  misc_RNA (1)...(19): siRNA sense strand
ugguuuccauucuauuaug

SEQ ID NO: 834786 - RNA, 19 nt, Homo sapiens
  misc_RNA (1)...(19): siRNA sense strand
caaaagaaaaggaaaucga

SEQ ID NO: 834787 - RNA, 19 nt, Homo sapiens
  misc_RNA (1)...(19): siRNA sense strand
caacauaccugacaaugaa

SEQ ID NO: 834788 - RNA, 19 nt, Homo sapiens
  misc_RNA (1)...(19): siRNA sense strand
gaacuucuuucccucauga

SEQ ID NO: 834789 - RNA, 19 nt, Homo sapiens
  misc_RNA (1)...(19): siRNA sense strand
caaggaugcuggucauuaa

SEQ ID NO: 834790 - RNA, 19 nt, Homo sapiens
  misc_RNA (1)...(19): siRNA sense strand
ugaaacaugugcucccuua

SEQ ID NO: 834791 - RNA, 19 nt, Homo sapiens
  misc_RNA (1)...(19): siRNA sense strand
cgacacaacucuucagaug

SEQ ID NO: 834792 - RNA, 19 nt, Homo sapiens
  misc_RNA (1)...(19): siRNA sense strand
ggacagagaaucguuauga

SEQ ID NO: 834793 - RNA, 19 nt, Homo sapiens
  misc_RNA (1)...(19): siRNA sense strand
ggagguaacuuuggaagga

SEQ ID NO: 834794 - RNA, 19 nt, Homo sapiens
  misc_RNA (1)...(19): siRNA sense strand
caacaaagucgucauugaa

SEQ ID NO: 834795 - RNA, 19 nt, Homo sapiens
  misc_RNA (1)...(19): siRNA sense strand
gaacugguccaaguguuua

SEQ ID NO: 834796 - RNA, 19 nt, Homo sapiens
  misc_RNA (1)...(19): siRNA sense strand
caauaguacucaccaagaa

SEQ ID NO: 834797 - RNA, 19 nt, Homo sapiens
  misc_RNA (1)...(19): siRNA sense strand
ggaaagaagacaagagaga

SEQ ID NO: 834798 - RNA, 19 nt, Homo sapiens
  misc_RNA (1)...(19): siRNA sense strand
uaaccaaacugacacgaau

SEQ ID NO: 834799 - RNA, 19 nt, Homo sapiens
  misc_RNA (1)...(19): siRNA sense strand
caaagucgucauugaauuu

SEQ ID NO: 834800 - RNA, 19 nt, Homo sapiens
  misc_RNA (1)...(19): siRNA sense strand
gaagaacagcacuuucaaa

SEQ ID NO: 834801 - RNA, 19 nt, Homo sapiens
  misc_RNA (1)...(19): siRNA sense strand
gaaagaagacaagagagaa

SEQ ID NO: 834802 - RNA, 19 nt, Homo sapiens
  misc_RNA (1)...(19): siRNA sense strand
gagaaccaaaucacaauaa

SEQ ID NO: 834803 - RNA, 19 nt, Homo sapiens
  misc_RNA (1)...(19): siRNA sense strand
aaacugauguucuuucaag

SEQ ID NO: 834804 - RNA, 19 nt, Homo sapiens
  misc_RNA (1)...(19): siRNA sense strand
gaaaagagacagaguagaa

SEQ ID NO: 834805 - RNA, 19 nt, Homo sapiens
  misc_RNA (1)...(19): siRNA sense strand
gagaaucguuaugauguga

SEQ ID NO: 834806 - RNA, 19 nt, Homo sapiens
  misc_RNA (1)...(19): siRNA sense strand
ggaagaaaugguacagaaa

SEQ ID NO: 834807 - RNA, 19 nt, Homo sapiens
  misc_RNA (1)...(19): siRNA sense strand
ggauauaaaccgaaacuuc

SEQ ID NO: 834808 - RNA, 19 nt, Homo sapiens
  misc_RNA (1)...(19): siRNA sense strand
gaacuuuaguccaucuaca

SEQ ID NO: 834809 - RNA, 19 nt, Homo sapiens
  misc_RNA (1)...(19): siRNA sense strand
gccaagaacuuuaguccau

SEQ ID NO: 834810 - RNA, 19 nt, Homo sapiens
  misc_RNA (1)...(19): siRNA sense strand
ccaaggaugcuggucauua

SEQ ID NO: 834811 - RNA, 19 nt, Homo sapiens
  misc_RNA (1)...(19): siRNA sense strand
gagagaauuccaaguuauu

SEQ ID NO: 834812 - RNA, 19 nt, Homo sapiens
  misc_RNA (1)...(19): siRNA sense strand
uaaaucaacugccaagaac

SEQ ID NO: 834813 - RNA, 19 nt, Homo sapiens
  misc_RNA (1)...(19): siRNA sense strand
uggaagaaaugguacagaa

SEQ ID NO: 834814 - RNA, 19 nt, Homo sapiens
  misc_RNA (1)...(19): siRNA sense strand
gcaauaguacucaccaaga

SEQ ID NO: 834815 - RNA, 19 nt, Homo sapiens
  misc_RNA (1)...(19): siRNA sense strand
gaggaaagaagacaagaga

SEQ ID NO: 834816 - RNA, 19 nt, Homo sapiens
  misc_RNA (1)...(19): siRNA sense strand
ggaacugguccaaguguuu

SEQ ID NO: 834817 - RNA, 19 nt, Homo sapiens
  misc_RNA (1)...(19): siRNA sense strand
ugagagaauuccaaguuau

SEQ ID NO: 834818 - RNA, 19 nt, Homo sapiens
  misc_RNA (1)...(19): siRNA sense strand
acaaagucgucauugaauu

SEQ ID NO: 834819 - RNA, 19 nt, Homo sapiens
  misc_RNA (1)...(19): siRNA sense strand
aaagggauauaaaccgaaa

SEQ ID NO: 834820 - RNA, 19 nt, Homo sapiens
  misc_RNA (1)...(19): siRNA sense strand
gagacaaguagcagugaua

SEQ ID NO: 834821 - RNA, 19 nt, Homo sapiens
  misc_RNA (1)...(19): siRNA sense strand
gugaacaguuacagaagaa

SEQ ID NO: 834822 - RNA, 19 nt, Homo sapiens
  misc_RNA (1)...(19): siRNA sense strand
ccucaugaguccacauuug

SEQ ID NO: 834823 - RNA, 19 nt, Homo sapiens
  misc_RNA (1)...(19): siRNA sense strand
gaacaguuacagaagaaug

SEQ ID NO: 834824 - RNA, 19 nt, Homo sapiens
  misc_RNA (1)...(19): siRNA sense strand
gaagcauucugaaaacuuu

SEQ ID NO: 834825 - RNA, 19 nt, Homo sapiens
  misc_RNA (1)...(19): siRNA sense strand
acacgaaugcgcacugaua

SEQ ID NO: 834826 - RNA, 19 nt, Homo sapiens
  misc_RNA (1)...(19): siRNA sense strand
agagaaggaugacgacuca

SEQ ID NO: 834827 - RNA, 19 nt, Homo sapiens
  misc_RNA (1)...(19): siRNA sense strand
agaggaacaugaagaugaa

SEQ ID NO: 834828 - RNA, 19 nt, Homo sapiens
  misc_RNA (1)...(19): siRNA sense strand
ggaugcuggucauuaagaa

SEQ ID NO: 834829 - RNA, 19 nt, Homo sapiens
  misc_RNA (1)...(19): siRNA sense strand
ggaagaacagcacuuucaa

SEQ ID NO: 834830 - RNA, 19 nt, Homo sapiens
  misc_RNA (1)...(19): siRNA sense strand
ggaaaugggcuggcaggaa

SEQ ID NO: 834831 - RNA, 19 nt, Homo sapiens
  misc_RNA (1)...(19): siRNA sense strand
gcuauuggacguccuaaug

SEQ ID NO: 834832 - RNA, 19 nt, Homo sapiens
  misc_RNA (1)...(19): siRNA sense strand
acacauggaagaaauggua

SEQ ID NO: 834833 - RNA, 19 nt, Homo sapiens
  misc_RNA (1)...(19): siRNA sense strand
uaauggagguaacuuugga

SEQ ID NO: 834834 - RNA, 19 nt, Homo sapiens
  misc_RNA (1)...(19): siRNA sense strand
gaauauccuccgaauccua

SEQ ID NO: 834835 - RNA, 19 nt, Homo sapiens
  misc_RNA (1)...(19): siRNA sense strand
gaagaaaugguacagaaaa

SEQ ID NO: 834836 - RNA, 19 nt, Homo sapiens
  misc_RNA (1)...(19): siRNA sense strand
augagagaauuccaaguua

SEQ ID NO: 834837 - RNA, 19 nt, Homo sapiens
  misc_RNA (1)...(19): siRNA sense strand
ccacaacugagaaugauga

SEQ ID NO: 834838 - RNA, 19 nt, Homo sapiens
  misc_RNA (1)...(19): siRNA sense strand
gacagagaaucguuaugau

SEQ ID NO: 834839 - RNA, 19 nt, Homo sapiens
  misc_RNA (1)...(19): siRNA sense strand
ccaaguguuuauaaagguu

SEQ ID NO: 834840 - RNA, 19 nt, Homo sapiens
  misc_RNA (1)...(19): siRNA sense strand
gaaccaaaucacaauaagu

SEQ ID NO: 834841 - RNA, 19 nt, Homo sapiens
  misc_RNA (1)...(19): siRNA sense strand
gagagaaccaaaucacaau

SEQ ID NO: 834842 - RNA, 19 nt, Homo sapiens
  misc_RNA (1)...(19): siRNA sense strand
acaaacugauguucuuuca

SEQ ID NO: 834843 - RNA, 19 nt, Homo sapiens
  misc_RNA (1)...(19): siRNA sense strand
gaagaauggucugagaaaa

SEQ ID NO: 834844 - RNA, 19 nt, Homo sapiens
  misc_RNA (1)...(19): siRNA sense strand
gagguaacuuuggaaggaa

SEQ ID NO: 834845 - RNA, 19 nt, Homo sapiens
  misc_RNA (1)...(19): siRNA sense strand
gaugacacagagacaagua

SEQ ID NO: 834846 - RNA, 19 nt, Homo sapiens
  misc_RNA (1)...(19): siRNA sense strand
gaguagaagaggaacauga

SEQ ID NO: 834847 - RNA, 19 nt, Homo sapiens
  misc_RNA (1)...(19): siRNA sense strand
cgucacagccaguuaagaa

SEQ ID NO: 834848 - RNA, 19 nt, Homo sapiens
  misc_RNA (1)...(19): siRNA sense strand
uuaaaucaacugccaagaa

SEQ ID NO: 834849 - RNA, 19 nt, Homo sapiens
  misc_RNA (1)...(19): siRNA sense strand
cagagaaucguuaugaugu

SEQ ID NO: 834850 - RNA, 19 nt, Homo sapiens
  misc_RNA (1)...(19): siRNA sense strand
gaguguaaucgcucaaauu

SEQ ID NO: 834851 - RNA, 19 nt, Homo sapiens
  misc_RNA (1)...(19): siRNA sense strand
gcguacacauggaagaaau

SEQ ID NO: 834852 - RNA, 19 nt, Homo sapiens
  misc_RNA (1)...(19): siRNA sense strand
gaaugcgcacugauaagaa

SEQ ID NO: 834853 - RNA, 19 nt, Homo sapiens
  misc_RNA (1)...(19): siRNA sense strand
cuuuaaauccugaguauga

SEQ ID NO: 834854 - RNA, 19 nt, Homo sapiens
  misc_RNA (1)...(19): siRNA sense strand
gggaauauccuccgaaucc

SEQ ID NO: 834855 - RNA, 19 nt, Homo sapiens
  misc_RNA (1)...(19): siRNA sense strand
cgaaugcgcacugauaaga

SEQ ID NO: 834856 - RNA, 19 nt, Homo sapiens
  misc_RNA (1)...(19): siRNA sense strand
agagagaacgcaaacaguu

SEQ ID NO: 834857 - RNA, 19 nt, Homo sapiens
  misc_RNA (1)...(19): siRNA sense strand
gaaacaugugcucccuuaa

SEQ ID NO: 834858 - RNA, 19 nt, Homo sapiens
  misc_RNA (1)...(19): siRNA sense strand
gcagaucauucggucuuca

SEQ ID NO: 834859 - RNA, 19 nt, Homo sapiens
  misc_RNA (1)...(19): siRNA sense strand
aagaggaacaugaagauga

SEQ ID NO: 834860 - RNA, 19 nt, Homo sapiens
  misc_RNA (1)...(19): siRNA sense strand
caagaacuuuaguccaucu

SEQ ID NO: 834861 - RNA, 19 nt, Homo sapiens
  misc_RNA (1)...(19): siRNA sense strand
agaagaauggucugagaaa

SEQ ID NO: 834862 - RNA, 19 nt, Homo sapiens
  misc_RNA (1)...(19): siRNA sense strand
aaugagagaauuccaaguu

SEQ ID NO: 834863 - RNA, 19 nt, Homo sapiens
  misc_RNA (1)...(19): siRNA sense strand
gaagaggaacaugaagaug

SEQ ID NO: 834864 - RNA, 19 nt, Homo sapiens
  misc_RNA (1)...(19): siRNA sense strand
gaaaacaacauaccugaca

SEQ ID NO: 834865 - RNA, 19 nt, Homo sapiens
  misc_RNA (1)...(19): siRNA sense strand
caugugcucccuuaacuga

SEQ ID NO: 834866 - RNA, 19 nt, Homo sapiens
  misc_RNA (1)...(19): siRNA sense strand
caucaacaaagucgucauu

SEQ ID NO: 834867 - RNA, 19 nt, Homo sapiens
  misc_RNA (1)...(19): siRNA sense strand
ugacacgaaugcgcacuga

SEQ ID NO: 834868 - RNA, 19 nt, Homo sapiens
  misc_RNA (1)...(19): siRNA sense strand
acaaaagacuuacagcuau

SEQ ID NO: 834869 - RNA, 19 nt, Homo sapiens
  misc_RNA (1)...(19): siRNA sense strand
gcaggugugugggaauauc

SEQ ID NO: 834870 - RNA, 19 nt, Homo sapiens
  misc_RNA (1)...(19): siRNA sense strand
caagagagaacgcaaacag

SEQ ID NO: 834871 - RNA, 19 nt, Homo sapiens
  misc_RNA (1)...(19): siRNA sense strand
gagagagaaccaaaucaca

SEQ ID NO: 834872 - RNA, 19 nt, Homo sapiens
  misc_RNA (1)...(19): siRNA sense strand
uaacugaggaugaaaugag

SEQ ID NO: 834873 - RNA, 19 nt, Homo sapiens
  misc_RNA (1)...(19): siRNA sense strand
agacagaguagaagaggaa

SEQ ID NO: 834874 - RNA, 19 nt, Homo sapiens
  misc_RNA (1)...(19): siRNA sense strand
gucuuuaaauccugaguau

SEQ ID NO: 834875 - RNA, 19 nt, Homo sapiens
  misc_RNA (1)...(19): siRNA sense strand
aggaugaaaugagagaauu

SEQ ID NO: 834876 - RNA, 19 nt, Homo sapiens
  misc_RNA (1)...(19): siRNA sense strand
ggaagacagugaaaaugau

SEQ ID NO: 834877 - RNA, 19 nt, Homo sapiens
  misc_RNA (1)...(19): siRNA sense strand
aaucagcagccucgucuaa

SEQ ID NO: 834878 - RNA, 19 nt, Homo sapiens
  misc_RNA (1)...(19): siRNA sense strand
guccaaguguuuauaaagg

SEQ ID NO: 834879 - RNA, 19 nt, Homo sapiens
  misc_RNA (1)...(19): siRNA sense strand
ggaaaagccaaacaaaaga

SEQ ID NO: 834880 - RNA, 19 nt, Homo sapiens
  misc_RNA (1)...(19): siRNA sense strand
gagaauuccaaguuauuag

SEQ ID NO: 834881 - RNA, 19 nt, Homo sapiens
  misc_RNA (1)...(19): siRNA sense strand
gaggaugaaaugagagaau

SEQ ID NO: 834882 - RNA, 19 nt, Homo sapiens
  misc_RNA (1)...(19): siRNA sense strand
acacagauuguuaaaggaa

SEQ ID NO: 834883 - RNA, 19 nt, Homo sapiens
  misc_RNA (1)...(19): siRNA sense strand
uagaagaggaacaugaaga

SEQ ID NO: 834884 - RNA, 19 nt, Homo sapiens
  misc_RNA (1)...(19): siRNA sense strand
caacugccaagaacuuuag

SEQ ID NO: 834885 - RNA, 19 nt, Homo sapiens
  misc_RNA (1)...(19): siRNA sense strand
ucaacugccaagaacuuua

SEQ ID NO: 834886 - RNA, 19 nt, Homo sapiens
  misc_RNA (1)...(19): siRNA sense strand
gaaaagccaaacaaaagaa

SEQ ID NO: 834887 - RNA, 19 nt, Homo sapiens
  misc_RNA (1)...(19): siRNA sense strand
agacuuagauguucagaaa

SEQ ID NO: 834888 - RNA, 19 nt, Homo sapiens
  misc_RNA (1)...(19): siRNA sense strand
gagaagcuguguacacugu

SEQ ID NO: 834889 - RNA, 19 nt, Homo sapiens
  misc_RNA (1)...(19): siRNA sense strand
caaccaagacuuagauguu

SEQ ID NO: 834890 - RNA, 19 nt, Homo sapiens
  misc_RNA (1)...(19): siRNA sense strand
ccacgcugcuugugucuga

SEQ ID NO: 834891 - RNA, 19 nt, Homo sapiens
  misc_RNA (1)...(19): siRNA sense strand
gaaagugguaccagcauca

SEQ ID NO: 834892 - RNA, 19 nt, Homo sapiens
  misc_RNA (1)...(19): siRNA sense strand
gggagaagcuguguacacu

SEQ ID NO: 834893 - RNA, 19 nt, Homo sapiens
  misc_RNA (1)...(19): siRNA sense strand
guucugccuuccaguauga

SEQ ID NO: 834894 - RNA, 19 nt, Homo sapiens
  misc_RNA (1)...(19): siRNA sense strand
ccacaugucauccgaggaa

SEQ ID NO: 834895 - RNA, 19 nt, Homo sapiens
  misc_RNA (1)...(19): siRNA sense strand
gaggagcaccuuucagagu

SEQ ID NO: 834896 - RNA, 19 nt, Homo sapiens
  misc_RNA (1)...(19): siRNA sense strand
gaguccaccucguccaaug

SEQ ID NO: 834897 - RNA, 19 nt, Homo sapiens
  misc_RNA (1)...(19): siRNA sense strand
gggaggaccaggagcauca

SEQ ID NO: 834898 - RNA, 19 nt, Homo sapiens
  misc_RNA (1)...(19): siRNA sense strand
ggaguucaaggaguuugua

SEQ ID NO: 834899 - RNA, 19 nt, Homo sapiens
  misc_RNA (1)...(19): siRNA sense strand
aaccaagacuuagauguuc

SEQ ID NO: 834900 - RNA, 19 nt, Homo sapiens
  misc_RNA (1)...(19): siRNA sense strand
gcaaccaagacuuagaugu

SEQ ID NO: 834901 - RNA, 19 nt, Homo sapiens
  misc_RNA (1)...(19): siRNA sense strand
ugagccaacuccgauguga

SEQ ID NO: 834902 - RNA, 19 nt, Homo sapiens
  misc_RNA (1)...(19): siRNA sense strand
cugcaggaccuaucucuga

SEQ ID NO: 834903 - RNA, 19 nt, Homo sapiens
  misc_RNA (1)...(19): siRNA sense strand
gccuggaguucaaggaguu

SEQ ID NO: 834904 - RNA, 19 nt, Homo sapiens
  misc_RNA (1)...(19): siRNA sense strand
ugagaaugaccagcuaauu

SEQ ID NO: 834905 - RNA, 19 nt, Homo sapiens
  misc_RNA (1)...(19): siRNA sense strand
aaaccuagccuggaguuca

SEQ ID NO: 834906 - RNA, 19 nt, Homo sapiens
  misc_RNA (1)...(19): siRNA sense strand
aaccuagccuggaguucaa

SEQ ID NO: 834907 - RNA, 19 nt, Homo sapiens
  misc_RNA (1)...(19): siRNA sense strand
gguucugccuuccaguaug

SEQ ID NO: 834908 - RNA, 19 nt, Homo sapiens
  misc_RNA (1)...(19): siRNA sense strand
uugaggagcaccuuucaga

SEQ ID NO: 834909 - RNA, 19 nt, Homo sapiens
  misc_RNA (1)...(19): siRNA sense strand
guccaaugcaggccuauca

SEQ ID NO: 834910 - RNA, 19 nt, Homo sapiens
  misc_RNA (1)...(19): siRNA sense strand
ccuccuuccucacccaguu

SEQ ID NO: 834911 - RNA, 19 nt, Homo sapiens
  misc_RNA (1)...(19): siRNA sense strand
gagacuacaucaccuacug

SEQ ID NO: 834912 - RNA, 19 nt, Homo sapiens
  misc_RNA (1)...(19): siRNA sense strand
caaccugcccugcguguuu

SEQ ID NO: 834913 - RNA, 19 nt, Homo sapiens
  misc_RNA (1)...(19): siRNA sense strand
gagagaggcuguugaugcu

SEQ ID NO: 834914 - RNA, 19 nt, Homo sapiens
  misc_RNA (1)...(19): siRNA sense strand
cuacaucaccuacuggaaa

SEQ ID NO: 834915 - RNA, 19 nt, Homo sapiens
  misc_RNA (1)...(19): siRNA sense strand
caacauguggcgcuucuug

SEQ ID NO: 834916 - RNA, 19 nt, Homo sapiens
  misc_RNA (1)...(19): siRNA sense strand
ccgacuggcugaaugaguu

SEQ ID NO: 834917 - RNA, 19 nt, Homo sapiens
  misc_RNA (1)...(19): siRNA sense strand
cgacuucgaccaccugcua

SEQ ID NO: 834918 - RNA, 19 nt, Homo sapiens
  misc_RNA (1)...(19): siRNA sense strand
guggaugacuaccgcuuug

SEQ ID NO: 834919 - RNA, 19 nt, Homo sapiens
  misc_RNA (1)...(19): siRNA sense strand
cagcuggucugucaauguc

SEQ ID NO: 834920 - RNA, 19 nt, Homo sapiens
  misc_RNA (1)...(19): siRNA sense strand
guuccaugcugacaucuuc

SEQ ID NO: 834921 - RNA, 19 nt, Homo sapiens
  misc_RNA (1)...(19): siRNA sense strand
cuacggagacgugguugua

SEQ ID NO: 834922 - RNA, 19 nt, Homo sapiens
  misc_RNA (1)...(19): siRNA sense strand
ucaaggucaucgcugagaa

SEQ ID NO: 834923 - RNA, 19 nt, Homo sapiens
  misc_RNA (1)...(19): siRNA sense strand
guucugggaugcacuggau

SEQ ID NO: 834924 - RNA, 19 nt, Homo sapiens
  misc_RNA (1)...(19): siRNA sense strand
ccucaaagacuggcacuug

SEQ ID NO: 834925 - RNA, 19 nt, Homo sapiens
  misc_RNA (1)...(19): siRNA sense strand
cacuggauguggaugacua

SEQ ID NO: 834926 - RNA, 19 nt, Homo sapiens
  misc_RNA (1)...(19): siRNA sense strand
gcuucaaccuggccaacau

SEQ ID NO: 834927 - RNA, 19 nt, Homo sapiens
  misc_RNA (1)...(19): siRNA sense strand
gcugagagaggcuguugau

SEQ ID NO: 834928 - RNA, 19 nt, Homo sapiens
  misc_RNA (1)...(19): siRNA sense strand
ucagagacuacaucaccua

SEQ ID NO: 834929 - RNA, 19 nt, Homo sapiens
  misc_RNA (1)...(19): siRNA sense strand
cgggcgagaugguguuugu

SEQ ID NO: 834930 - RNA, 19 nt, Homo sapiens
  misc_RNA (1)...(19): siRNA sense strand
aaccacaacugggucaaug

SEQ ID NO: 834931 - RNA, 19 nt, Homo sapiens
  misc_RNA (1)...(19): siRNA sense strand
ggugcuggccuccuugguu

SEQ ID NO: 834932 - RNA, 19 nt, Homo sapiens
  misc_RNA (1)...(19): siRNA sense strand
gaccuacggagacgugguu

SEQ ID NO: 834933 - RNA, 19 nt, Homo sapiens
  misc_RNA (1)...(19): siRNA sense strand
ggacaccagcgcguucuca

SEQ ID NO: 834934 - RNA, 19 nt, Homo sapiens
  misc_RNA (1)...(19): siRNA sense strand
cucaaagacuggcacuugu

SEQ ID NO: 834935 - RNA, 19 nt, Homo sapiens
  misc_RNA (1)...(19): siRNA sense strand
ucaaagacuggcacuugug

SEQ ID NO: 834936 - RNA, 19 nt, Homo sapiens
  misc_RNA (1)...(19): siRNA sense strand
uacaucaccuacuggaaag

SEQ ID NO: 834937 - RNA, 19 nt, Homo sapiens
  misc_RNA (1)...(19): siRNA sense strand
ccacugccaggucaucaug

SEQ ID NO: 834938 - RNA, 19 nt, Homo sapiens
  misc_RNA (1)...(19): siRNA sense strand
ccaucuccaucaaccacaa

SEQ ID NO: 834939 - RNA, 19 nt, Homo sapiens
  misc_RNA (1)...(19): siRNA sense strand
ugacuaccgcuuugucuac

SEQ ID NO: 834940 - RNA, 19 nt, Homo sapiens
  misc_RNA (1)...(19): siRNA sense strand
ggcccacccuuggagauca

SEQ ID NO: 834941 - RNA, 19 nt, Homo sapiens
  misc_RNA (1)...(19): siRNA sense strand
guaguaagcuggucaauua

SEQ ID NO: 834942 - RNA, 19 nt, Homo sapiens
  misc_RNA (1)...(19): siRNA sense strand
gagcugauguguacacuga

SEQ ID NO: 834943 - RNA, 19 nt, Homo sapiens
  misc_RNA (1)...(19): siRNA sense strand
gggcugagcugauguguac

SEQ ID NO: 834944 - RNA, 19 nt, Homo sapiens
  misc_RNA (1)...(19): siRNA sense strand
ccaaaggagagguuuagua

SEQ ID NO: 834945 - RNA, 19 nt, Homo sapiens
  misc_RNA (1)...(19): siRNA sense strand
gcucaccaccuucuacuuu

SEQ ID NO: 834946 - RNA, 19 nt, Homo sapiens
  misc_RNA (1)...(19): siRNA sense strand
ggagagcaccagcccuuaa

SEQ ID NO: 834947 - RNA, 19 nt, Homo sapiens
  misc_RNA (1)...(19): siRNA sense strand
ccagugggcugagcaaguu

SEQ ID NO: 834948 - RNA, 19 nt, Homo sapiens
  misc_RNA (1)...(19): siRNA sense strand
gaccaggccuuguccaucu

SEQ ID NO: 834949 - RNA, 19 nt, Homo sapiens
  misc_RNA (1)...(19): siRNA sense strand
caaaggagagguuuaguac

SEQ ID NO: 834950 - RNA, 19 nt, Homo sapiens
  misc_RNA (1)...(19): siRNA sense strand
gaguuugaauuccuugguu

SEQ ID NO: 834951 - RNA, 19 nt, Homo sapiens
  misc_RNA (1)...(19): siRNA sense strand
uuggagaacuuggaauuaa

SEQ ID NO: 834952 - RNA, 19 nt, Homo sapiens
  misc_RNA (1)...(19): siRNA sense strand
caucauuacacgucagaua

SEQ ID NO: 834953 - RNA, 19 nt, Homo sapiens
  misc_RNA (1)...(19): siRNA sense strand
ggagacacuuccagacucu

SEQ ID NO: 834954 - RNA, 19 nt, Homo sapiens
  misc_RNA (1)...(19): siRNA sense strand
gcucccagcucaccaccuu

SEQ ID NO: 834955 - RNA, 19 nt, Homo sapiens
  misc_RNA (1)...(19): siRNA sense strand
guaagcuggucaauuaucu

SEQ ID NO: 834956 - RNA, 19 nt, Homo sapiens
  misc_RNA (1)...(19): siRNA sense strand
uuaaagguguucauagaca

SEQ ID NO: 834957 - RNA, 19 nt, Homo sapiens
  misc_RNA (1)...(19): siRNA sense strand
gagagcaccagcccuuaaa

SEQ ID NO: 834958 - RNA, 19 nt, Homo sapiens
  misc_RNA (1)...(19): siRNA sense strand
gaagucaggcagcccaaga

SEQ ID NO: 834959 - RNA, 19 nt, Homo sapiens
  misc_RNA (1)...(19): siRNA sense strand
cccaggagguggaaacuuc

SEQ ID NO: 834960 - RNA, 19 nt, Homo sapiens
  misc_RNA (1)...(19): siRNA sense strand
ucucagaaagucauugaaa

SEQ ID NO: 834961 - RNA, 19 nt, Homo sapiens
  misc_RNA (1)...(19): siRNA sense strand
uaaagguguucauagacau

SEQ ID NO: 834962 - RNA, 19 nt, Homo sapiens
  misc_RNA (1)...(19): siRNA sense strand
aguuaagccuggagacgua

SEQ ID NO: 834963 - RNA, 19 nt, Homo sapiens
  misc_RNA (1)...(19): siRNA sense strand
gcugucagauccacuacuc

SEQ ID NO: 834964 - RNA, 19 nt, Homo sapiens
  misc_RNA (1)...(19): siRNA sense strand
ggaaauaccccaggaugaa

SEQ ID NO: 834965 - RNA, 19 nt, Homo sapiens
  misc_RNA (1)...(19): siRNA sense strand
ccaguggguuuaccaaagg

SEQ ID NO: 834966 - RNA, 19 nt, Homo sapiens
  misc_RNA (1)...(19): siRNA sense strand
ccacuacucccaacucagu

SEQ ID NO: 834967 - RNA, 19 nt, Homo sapiens
  misc_RNA (1)...(19): siRNA sense strand
gugcugcuguuccgcauca

SEQ ID NO: 834968 - RNA, 19 nt, Homo sapiens
  misc_RNA (1)...(19): siRNA sense strand
ccaagccucgguuaccuaa

SEQ ID NO: 834969 - RNA, 19 nt, Homo sapiens
  misc_RNA (1)...(19): siRNA sense strand
gggcuucauaugcugcuua

SEQ ID NO: 834970 - RNA, 19 nt, Homo sapiens
  misc_RNA (1)...(19): siRNA sense strand
agacaucugccucaaggaa

SEQ ID NO: 834971 - RNA, 19 nt, Homo sapiens
  misc_RNA (1)...(19): siRNA sense strand
cauaugcugcuuacacaga

SEQ ID NO: 834972 - RNA, 19 nt, Homo sapiens
  misc_RNA (1)...(19): siRNA sense strand
gagcucugcuggagaaaau

SEQ ID NO: 834973 - RNA, 19 nt, Homo sapiens
  misc_RNA (1)...(19): siRNA sense strand
aaggagagguuuaguacac

SEQ ID NO: 834974 - RNA, 19 nt, Homo sapiens
  misc_RNA (1)...(19): siRNA sense strand
gacaucugccucaaggaaa

SEQ ID NO: 834975 - RNA, 19 nt, Homo sapiens
  misc_RNA (1)...(19): siRNA sense strand
cuaaagcaucugaaucuca

SEQ ID NO: 834976 - RNA, 19 nt, Homo sapiens
  misc_RNA (1)...(19): siRNA sense strand
gggagagcaccagcccuua

SEQ ID NO: 834977 - RNA, 19 nt, Homo sapiens
  misc_RNA (1)...(19): siRNA sense strand
gcuggucaauuaucuaacg

SEQ ID NO: 834978 - RNA, 19 nt, Homo sapiens
  misc_RNA (1)...(19): siRNA sense strand
aagcuggucaauuaucuaa

SEQ ID NO: 834979 - RNA, 19 nt, Homo sapiens
  misc_RNA (1)...(19): siRNA sense strand
uuacacgucagauaaugaa

SEQ ID NO: 834980 - RNA, 19 nt, Homo sapiens
  misc_RNA (1)...(19): siRNA sense strand
cugaggagaguuugaauuc

SEQ ID NO: 834981 - RNA, 19 nt, Homo sapiens
  misc_RNA (1)...(19): siRNA sense strand
aagccucgguuaccuaaag

SEQ ID NO: 834982 - RNA, 19 nt, Homo sapiens
  misc_RNA (1)...(19): siRNA sense strand
ggagaacuuggaauuaacu

SEQ ID NO: 834983 - RNA, 19 nt, Homo sapiens
  misc_RNA (1)...(19): siRNA sense strand
aaauugaucaccuucuuca

SEQ ID NO: 834984 - RNA, 19 nt, Homo sapiens
  misc_RNA (1)...(19): siRNA sense strand
gaucaggugccuccagaac

SEQ ID NO: 834985 - RNA, 19 nt, Homo sapiens
  misc_RNA (1)...(19): siRNA sense strand
uaucucagaaagucauuga

SEQ ID NO: 834986 - RNA, 19 nt, Homo sapiens
  misc_RNA (1)...(19): siRNA sense strand
ucaggcagcccaagaggau

SEQ ID NO: 834987 - RNA, 19 nt, Homo sapiens
  misc_RNA (1)...(19): siRNA sense strand
ucauagacaucugccucaa

SEQ ID NO: 834988 - RNA, 19 nt, Homo sapiens
  misc_RNA (1)...(19): siRNA sense strand
ucgguuaccuaaagcaucu

SEQ ID NO: 834989 - RNA, 19 nt, Homo sapiens
  misc_RNA (1)...(19): siRNA sense strand
acaucugccucaaggaaau

SEQ ID NO: 834990 - RNA, 19 nt, Homo sapiens
  misc_RNA (1)...(19): siRNA sense strand
uuaccaaaggagagguuua

SEQ ID NO: 834991 - RNA, 19 nt, Homo sapiens
  misc_RNA (1)...(19): siRNA sense strand
caccugugcuguaguaagc

SEQ ID NO: 834992 - RNA, 19 nt, Homo sapiens
  misc_RNA (1)...(19): siRNA sense strand
uaagcuggucaauuaucua

SEQ ID NO: 834993 - RNA, 19 nt, Homo sapiens
  misc_RNA (1)...(19): siRNA sense strand
ugagagaccaggccuuguc

SEQ ID NO: 834994 - RNA, 19 nt, Homo sapiens
  misc_RNA (1)...(19): siRNA sense strand
cuuggagaacuuggaauua

SEQ ID NO: 834995 - RNA, 19 nt, Homo sapiens
  misc_RNA (1)...(19): siRNA sense strand
caucugccucaaggaaaua

SEQ ID NO: 834996 - RNA, 19 nt, Homo sapiens
  misc_RNA (1)...(19): siRNA sense strand
ucaccaccuucuacuuugg

SEQ ID NO: 834997 - RNA, 19 nt, Homo sapiens
  misc_RNA (1)...(19): siRNA sense strand
uggagaacuuggaauuaac

SEQ ID NO: 834998 - RNA, 19 nt, Homo sapiens
  misc_RNA (1)...(19): siRNA sense strand
ccuuggagaacuuggaauu

SEQ ID NO: 834999 - RNA, 19 nt, Homo sapiens
  misc_RNA (1)...(19): siRNA sense strand
gucagauaaugaacuccaa

SEQ ID NO: 835000 - RNA, 19 nt, Homo sapiens
  misc_RNA (1)...(19): siRNA sense strand
uguaguaagcuggucaauu

SEQ ID NO: 835001 - RNA, 19 nt, Homo sapiens
  misc_RNA (1)...(19): siRNA sense strand
uccaguggguuuaccaaag

SEQ ID NO: 835002 - RNA, 19 nt, Homo sapiens
  misc_RNA (1)...(19): siRNA sense strand
ggaugaaugccugagauac

SEQ ID NO: 835003 - RNA, 19 nt, Homo sapiens
  misc_RNA (1)...(19): siRNA sense strand
guaguaagcuggucaauua

SEQ ID NO: 835004 - RNA, 19 nt, Homo sapiens
  misc_RNA (1)...(19): siRNA sense strand
gagcugauguguacacuga

SEQ ID NO: 835005 - RNA, 19 nt, Homo sapiens
  misc_RNA (1)...(19): siRNA sense strand
gggcugagcugauguguac

SEQ ID NO: 835006 - RNA, 19 nt, Homo sapiens
  misc_RNA (1)...(19): siRNA sense strand
ccaaaggagagguuuagua

SEQ ID NO: 835007 - RNA, 19 nt, Homo sapiens
  misc_RNA (1)...(19): siRNA sense strand
gcucaccaccuucuacuuu

SEQ ID NO: 835008 - RNA, 19 nt, Homo sapiens
  misc_RNA (1)...(19): siRNA sense strand
ggagagcaccagcccuuaa

SEQ ID NO: 835009 - RNA, 19 nt, Homo sapiens
  misc_RNA (1)...(19): siRNA sense strand
ccagugggcugagcaaguu

SEQ ID NO: 835010 - RNA, 19 nt, Homo sapiens
  misc_RNA (1)...(19): siRNA sense strand
gaccaggccuuguccaucu

SEQ ID NO: 835011 - RNA, 19 nt, Homo sapiens
  misc_RNA (1)...(19): siRNA sense strand
caaaggagagguuuaguac

SEQ ID NO: 835012 - RNA, 19 nt, Homo sapiens
  misc_RNA (1)...(19): siRNA sense strand
gaguuugaauuccuugguu

SEQ ID NO: 835013 - RNA, 19 nt, Homo sapiens
  misc_RNA (1)...(19): siRNA sense strand
uuggagaacuuggaauuaa

SEQ ID NO: 835014 - RNA, 19 nt, Homo sapiens
  misc_RNA (1)...(19): siRNA sense strand
caucauuacacgucagaua

SEQ ID NO: 835015 - RNA, 19 nt, Homo sapiens
  misc_RNA (1)...(19): siRNA sense strand
ggagacacuuccagacucu

SEQ ID NO: 835016 - RNA, 19 nt, Homo sapiens
  misc_RNA (1)...(19): siRNA sense strand
gcucccagcucaccaccuu

SEQ ID NO: 835017 - RNA, 19 nt, Homo sapiens
  misc_RNA (1)...(19): siRNA sense strand
guaagcuggucaauuaucu

SEQ ID NO: 835018 - RNA, 19 nt, Homo sapiens
  misc_RNA (1)...(19): siRNA sense strand
uuaaagguguucauagaca

SEQ ID NO: 835019 - RNA, 19 nt, Homo sapiens
  misc_RNA (1)...(19): siRNA sense strand
gagagcaccagcccuuaaa

SEQ ID NO: 835020 - RNA, 19 nt, Homo sapiens
  misc_RNA (1)...(19): siRNA sense strand
cccaggagguggaaacuuc

SEQ ID NO: 835021 - RNA, 19 nt, Homo sapiens
  misc_RNA (1)...(19): siRNA sense strand
gaauucaggcagcccaaga

SEQ ID NO: 835022 - RNA, 19 nt, Homo sapiens
  misc_RNA (1)...(19): siRNA sense strand
ucucagaaagucauugaaa

SEQ ID NO: 835023 - RNA, 19 nt, Homo sapiens
  misc_RNA (1)...(19): siRNA sense strand
uaaagguguucauagacau

SEQ ID NO: 835024 - RNA, 19 nt, Homo sapiens
  misc_RNA (1)...(19): siRNA sense strand
aguuaagccuggagacgua

SEQ ID NO: 835025 - RNA, 19 nt, Homo sapiens
  misc_RNA (1)...(19): siRNA sense strand
gcugucagauccacuacuc

SEQ ID NO: 835026 - RNA, 19 nt, Homo sapiens
  misc_RNA (1)...(19): siRNA sense strand
ggaaauaccccaggaugaa

SEQ ID NO: 835027 - RNA, 19 nt, Homo sapiens
  misc_RNA (1)...(19): siRNA sense strand
ccaguggguuuaccaaagg

SEQ ID NO: 835028 - RNA, 19 nt, Homo sapiens
  misc_RNA (1)...(19): siRNA sense strand
ccacuacucccaacucagu

SEQ ID NO: 835029 - RNA, 19 nt, Homo sapiens
  misc_RNA (1)...(19): siRNA sense strand
gugcugcuguuccgcauca

SEQ ID NO: 835030 - RNA, 19 nt, Homo sapiens
  misc_RNA (1)...(19): siRNA sense strand
ccaagccucgguuaccuaa

SEQ ID NO: 835031 - RNA, 19 nt, Homo sapiens
  misc_RNA (1)...(19): siRNA sense strand
gggcuucauaugcugcuua

SEQ ID NO: 835032 - RNA, 19 nt, Homo sapiens
  misc_RNA (1)...(19): siRNA sense strand
agacaucugccucaaggaa

SEQ ID NO: 835033 - RNA, 19 nt, Homo sapiens
  misc_RNA (1)...(19): siRNA sense strand
cauaugcugcuuacacaga

SEQ ID NO: 835034 - RNA, 19 nt, Homo sapiens
  misc_RNA (1)...(19): siRNA sense strand
aaggagagguuuaguacac

SEQ ID NO: 835035 - RNA, 19 nt, Homo sapiens
  misc_RNA (1)...(19): siRNA sense strand
gacaucugccucaaggaaa

SEQ ID NO: 835036 - RNA, 19 nt, Homo sapiens
  misc_RNA (1)...(19): siRNA sense strand
cuaaagcaucugaaucuca

SEQ ID NO: 835037 - RNA, 19 nt, Homo sapiens
  misc_RNA (1)...(19): siRNA sense strand
gggagagcaccagcccuua

SEQ ID NO: 835038 - RNA, 19 nt, Homo sapiens
  misc_RNA (1)...(19): siRNA sense strand
uguguacacugagggaauu

SEQ ID NO: 835039 - RNA, 19 nt, Homo sapiens
  misc_RNA (1)...(19): siRNA sense strand
gcuggucaauuaucuaacg

SEQ ID NO: 835040 - RNA, 19 nt, Homo sapiens
  misc_RNA (1)...(19): siRNA sense strand
aagcuggucaauuaucuaa

SEQ ID NO: 835041 - RNA, 19 nt, Homo sapiens
  misc_RNA (1)...(19): siRNA sense strand
uuacacgucagauaaugaa

SEQ ID NO: 835042 - RNA, 19 nt, Homo sapiens
  misc_RNA (1)...(19): siRNA sense strand
cugaggagaguuugaauuc

SEQ ID NO: 835043 - RNA, 19 nt, Homo sapiens
  misc_RNA (1)...(19): siRNA sense strand
aagccucgguuaccuaaag

SEQ ID NO: 835044 - RNA, 19 nt, Homo sapiens
  misc_RNA (1)...(19): siRNA sense strand
ggagaacuuggaauuaacu

SEQ ID NO: 835045 - RNA, 19 nt, Homo sapiens
  misc_RNA (1)...(19): siRNA sense strand
aaauugaucaccuucuuca

SEQ ID NO: 835046 - RNA, 19 nt, Homo sapiens
  misc_RNA (1)...(19): siRNA sense strand
gaucaggugccuccagaac

SEQ ID NO: 835047 - RNA, 19 nt, Homo sapiens
  misc_RNA (1)...(19): siRNA sense strand
uaucucagaaagucauuga

SEQ ID NO: 835048 - RNA, 19 nt, Homo sapiens
  misc_RNA (1)...(19): siRNA sense strand
ucaggcagcccaagaggau

SEQ ID NO: 835049 - RNA, 19 nt, Homo sapiens
  misc_RNA (1)...(19): siRNA sense strand
ucauagacaucugccucaa

SEQ ID NO: 835050 - RNA, 19 nt, Homo sapiens
  misc_RNA (1)...(19): siRNA sense strand
ucgguuaccuaaagcaucu

SEQ ID NO: 835051 - RNA, 19 nt, Homo sapiens
  misc_RNA (1)...(19): siRNA sense strand
acaucugccucaaggaaau

SEQ ID NO: 835052 - RNA, 19 nt, Homo sapiens
  misc_RNA (1)...(19): siRNA sense strand
uuaccaaaggagagguuua

SEQ ID NO: 835053 - RNA, 19 nt, Homo sapiens
  misc_RNA (1)...(19): siRNA sense strand
caccugugcuguaguaagc

SEQ ID NO: 835054 - RNA, 19 nt, Homo sapiens
  misc_RNA (1)...(19): siRNA sense strand
uaagcuggucaauuaucua

SEQ ID NO: 835055 - RNA, 19 nt, Homo sapiens
  misc_RNA (1)...(19): siRNA sense strand
ugagagaccaggccuuguc

SEQ ID NO: 835056 - RNA, 19 nt, Homo sapiens
  misc_RNA (1)...(19): siRNA sense strand
cuuggagaacuuggaauua

SEQ ID NO: 835057 - RNA, 19 nt, Homo sapiens
  misc_RNA (1)...(19): siRNA sense strand
caucugccucaaggaaaua

SEQ ID NO: 835058 - RNA, 19 nt, Homo sapiens
  misc_RNA (1)...(19): siRNA sense strand
ucaccaccuucuacuuugg

SEQ ID NO: 835059 - RNA, 19 nt, Homo sapiens
  misc_RNA (1)...(19): siRNA sense strand
uggagaacuuggaauuaac

SEQ ID NO: 835060 - RNA, 19 nt, Homo sapiens
  misc_RNA (1)...(19): siRNA sense strand
ccuuggagaacuuggaauu

SEQ ID NO: 835061 - RNA, 19 nt, Homo sapiens
  misc_RNA (1)...(19): siRNA sense strand
uguaguaagcuggucaauu

SEQ ID NO: 835062 - RNA, 19 nt, Homo sapiens
  misc_RNA (1)...(19): siRNA sense strand
uccaguggguuuaccaaag

SEQ ID NO: 835063 - RNA, 19 nt, Homo sapiens
  misc_RNA (1)...(19): siRNA sense strand
ggaugaaugccugagauac

SEQ ID NO: 835064 - RNA, 19 nt, Homo sapiens
  misc_RNA (1)...(19): siRNA sense strand
ccaaguacgugcaccucaa

SEQ ID NO: 835065 - RNA, 19 nt, Homo sapiens
  misc_RNA (1)...(19): siRNA sense strand
ggucaagcgggacuucauu

SEQ ID NO: 835066 - RNA, 19 nt, Homo sapiens
  misc_RNA (1)...(19): siRNA sense strand
gucaagcgggacuucauua

SEQ ID NO: 835067 - RNA, 19 nt, Homo sapiens
  misc_RNA (1)...(19): siRNA sense strand
guacgugcaccucaagaag

SEQ ID NO: 835068 - RNA, 19 nt, Homo sapiens
  misc_RNA (1)...(19): siRNA sense strand
ugaacgccguggccacugu

SEQ ID NO: 835069 - RNA, 19 nt, Homo sapiens
  misc_RNA (1)...(19): siRNA sense strand
guagugaacucguacaaug

SEQ ID NO: 835070 - RNA, 19 nt, Homo sapiens
  misc_RNA (1)...(19): siRNA sense strand
aagaagggcuggcaaaaua

SEQ ID NO: 835071 - RNA, 19 nt, Homo sapiens
  misc_RNA (1)...(19): siRNA sense strand
ucgcgaaguucccguucua

SEQ ID NO: 835072 - RNA, 19 nt, Homo sapiens
  misc_RNA (1)...(19): siRNA sense strand
caacgagugcuucaucaag

SEQ ID NO: 835073 - RNA, 19 nt, Homo sapiens
  misc_RNA (1)...(19): siRNA sense strand
caugaugcauugcucuuac

SEQ ID NO: 835074 - RNA, 19 nt, Homo sapiens
  misc_RNA (1)...(19): siRNA sense strand
gagcucgccaugaugcauu

SEQ ID NO: 835075 - RNA, 19 nt, Homo sapiens
  misc_RNA (1)...(19): siRNA sense strand
ccaugaugcauugcucuua

SEQ ID NO: 835076 - RNA, 19 nt, Homo sapiens
  misc_RNA (1)...(19): siRNA sense strand
uguccggcaucuaccagua

SEQ ID NO: 835077 - RNA, 19 nt, Homo sapiens
  misc_RNA (1)...(19): siRNA sense strand
ucuacgagaagaauaagaa

SEQ ID NO: 835078 - RNA, 19 nt, Homo sapiens
  misc_RNA (1)...(19): siRNA sense strand
aauaagaagggcuggcaaa

SEQ ID NO: 835079 - RNA, 19 nt, Homo sapiens
  misc_RNA (1)...(19): siRNA sense strand
cgaaguucccguucuacga

SEQ ID NO: 835080 - RNA, 19 nt, Homo sapiens
  misc_RNA (1)...(19): siRNA sense strand
cagucuggcuuccucaaca

SEQ ID NO: 835081 - RNA, 19 nt, Homo sapiens
  misc_RNA (1)...(19): siRNA sense strand
guacaucaucgcgaaguuc

SEQ ID NO: 835082 - RNA, 19 nt, Homo sapiens
  misc_RNA (1)...(19): siRNA sense strand
gcaucuaccaguacaucau

SEQ ID NO: 835083 - RNA, 19 nt, Homo sapiens
  misc_RNA (1)...(19): siRNA sense strand
gccacaaccucagccucaa

SEQ ID NO: 835084 - RNA, 19 nt, Homo sapiens
  misc_RNA (1)...(19): siRNA sense strand
ggaagaaucuccaaaugua

SEQ ID NO: 835085 - RNA, 19 nt, Homo sapiens
  misc_RNA (1)...(19): siRNA sense strand
ggagaaagaccauauaaau

SEQ ID NO: 835086 - RNA, 19 nt, Homo sapiens
  misc_RNA (1)...(19): siRNA sense strand
gaauuaaugugaagucaga

SEQ ID NO: 835087 - RNA, 19 nt, Homo sapiens
  misc_RNA (1)...(19): siRNA sense strand
agaaauaccuucagcaaug

SEQ ID NO: 835088 - RNA, 19 nt, Homo sapiens
  misc_RNA (1)...(19): siRNA sense strand
guacauaccuaacucaaca

SEQ ID NO: 835089 - RNA, 19 nt, Homo sapiens
  misc_RNA (1)...(19): siRNA sense strand
gcagauacaacauagauuu

SEQ ID NO: 835090 - RNA, 19 nt, Homo sapiens
  misc_RNA (1)...(19): siRNA sense strand
gagaaacccuaugaaugua

SEQ ID NO: 835091 - RNA, 19 nt, Homo sapiens
  misc_RNA (1)...(19): siRNA sense strand
gaacucauguuagagagaa

SEQ ID NO: 835092 - RNA, 19 nt, Homo sapiens
  misc_RNA (1)...(19): siRNA sense strand
ggacugauccagcauuuga

SEQ ID NO: 835093 - RNA, 19 nt, Homo sapiens
  misc_RNA (1)...(19): siRNA sense strand
gugaaacccuauauuugua

SEQ ID NO: 835094 - RNA, 19 nt, Homo sapiens
  misc_RNA (1)...(19): siRNA sense strand
ugacacaccuggaaagaga

SEQ ID NO: 835095 - RNA, 19 nt, Homo sapiens
  misc_RNA (1)...(19): siRNA sense strand
gaacuacauuguggccuaa

SEQ ID NO: 835096 - RNA, 19 nt, Homo sapiens
  misc_RNA (1)...(19): siRNA sense strand
gaauacaucuuucuaucca

SEQ ID NO: 835097 - RNA, 19 nt, Homo sapiens
  misc_RNA (1)...(19): siRNA sense strand
caaaguucaucucuuauuc

SEQ ID NO: 835098 - RNA, 19 nt, Homo sapiens
  misc_RNA (1)...(19): siRNA sense strand
gagaaagaccauauaaaug

SEQ ID NO: 835099 - RNA, 19 nt, Homo sapiens
  misc_RNA (1)...(19): siRNA sense strand
gaaauaccuucagcaaugu

SEQ ID NO: 835100 - RNA, 19 nt, Homo sapiens
  misc_RNA (1)...(19): siRNA sense strand
ggaaagagaagcagauaca

SEQ ID NO: 835101 - RNA, 19 nt, Homo sapiens
  misc_RNA (1)...(19): siRNA sense strand
ggaaaagccuucagcugua

SEQ ID NO: 835102 - RNA, 19 nt, Homo sapiens
  misc_RNA (1)...(19): siRNA sense strand
gagaagcagauacaacaua

SEQ ID NO: 835103 - RNA, 19 nt, Homo sapiens
  misc_RNA (1)...(19): siRNA sense strand
agccaaaguucaucucuua

SEQ ID NO: 835104 - RNA, 19 nt, Homo sapiens
  misc_RNA (1)...(19): siRNA sense strand
agacauccuucaucgcuua

SEQ ID NO: 835105 - RNA, 19 nt, Homo sapiens
  misc_RNA (1)...(19): siRNA sense strand
gaagaaucuccaaauguaa

SEQ ID NO: 835106 - RNA, 19 nt, Homo sapiens
  misc_RNA (1)...(19): siRNA sense strand
ggugugaaacccuauauuu

SEQ ID NO: 835107 - RNA, 19 nt, Homo sapiens
  misc_RNA (1)...(19): siRNA sense strand
ugagaaacccuaugaaugu

SEQ ID NO: 835108 - RNA, 19 nt, Homo sapiens
  misc_RNA (1)...(19): siRNA sense strand
gaaaagcccuaugaaugua

SEQ ID NO: 835109 - RNA, 19 nt, Homo sapiens
  misc_RNA (1)...(19): siRNA sense strand
guucaucccuuauuagaca

SEQ ID NO: 835110 - RNA, 19 nt, Homo sapiens
  misc_RNA (1)...(19): siRNA sense strand
uguaguucaucccuuauua

SEQ ID NO: 835111 - RNA, 19 nt, Homo sapiens
  misc_RNA (1)...(19): siRNA sense strand
ucagugggaugucagcuuu

SEQ ID NO: 835112 - RNA, 19 nt, Homo sapiens
  misc_RNA (1)...(19): siRNA sense strand
gaauguaggguaugugaga

SEQ ID NO: 835113 - RNA, 19 nt, Homo sapiens
  misc_RNA (1)...(19): siRNA sense strand
caagagaaccaaagaaugg

SEQ ID NO: 835114 - RNA, 19 nt, Homo sapiens
  misc_RNA (1)...(19): siRNA sense strand
aaugugaagucagaaguua

SEQ ID NO: 835115 - RNA, 19 nt, Homo sapiens
  misc_RNA (1)...(19): siRNA sense strand
gagaauucauacuggagaa

SEQ ID NO: 835116 - RNA, 19 nt, Homo sapiens
  misc_RNA (1)...(19): siRNA sense strand
caacaccagagaacucaua

SEQ ID NO: 835117 - RNA, 19 nt, Homo sapiens
  misc_RNA (1)...(19): siRNA sense strand
ggagagaggccaagagucu

SEQ ID NO: 835118 - RNA, 19 nt, Homo sapiens
  misc_RNA (1)...(19): siRNA sense strand
uaagaaauaccuucagcaa

SEQ ID NO: 835119 - RNA, 19 nt, Homo sapiens
  misc_RNA (1)...(19): siRNA sense strand
ggaaagauuuacaaaagga

SEQ ID NO: 835120 - RNA, 19 nt, Homo sapiens
  misc_RNA (1)...(19): siRNA sense strand
cuucaucgcuuacucaaca

SEQ ID NO: 835121 - RNA, 19 nt, Homo sapiens
  misc_RNA (1)...(19): siRNA sense strand
guuaaucauucaaggaguu

SEQ ID NO: 835122 - RNA, 19 nt, Homo sapiens
  misc_RNA (1)...(19): siRNA sense strand
cuagaaagccaacaagaga

SEQ ID NO: 835123 - RNA, 19 nt, Homo sapiens
  misc_RNA (1)...(19): siRNA sense strand
aaaggaagcagcauguauu

SEQ ID NO: 835124 - RNA, 19 nt, Homo sapiens
  misc_RNA (1)...(19): siRNA sense strand
gggaagaaucuccaaaugu

SEQ ID NO: 835125 - RNA, 19 nt, Homo sapiens
  misc_RNA (1)...(19): siRNA sense strand
ccaaaguucaucucuuauu

SEQ ID NO: 835126 - RNA, 19 nt, Homo sapiens
  misc_RNA (1)...(19): siRNA sense strand
aaacagcuuauucaccuua

SEQ ID NO: 835127 - RNA, 19 nt, Homo sapiens
  misc_RNA (1)...(19): siRNA sense strand
gaaacccuaugaauguaag

SEQ ID NO: 835128 - RNA, 19 nt, Homo sapiens
  misc_RNA (1)...(19): siRNA sense strand
caacaagagaaccaaagaa

SEQ ID NO: 835129 - RNA, 19 nt, Homo sapiens
  misc_RNA (1)...(19): siRNA sense strand
ggagaaaggagaagaacca

SEQ ID NO: 835130 - RNA, 19 nt, Homo sapiens
  misc_RNA (1)...(19): siRNA sense strand
gaugucagcuuuccaaacc

SEQ ID NO: 835131 - RNA, 19 nt, Homo sapiens
  misc_RNA (1)...(19): siRNA sense strand
ggaaaagcccuaugaaugu

SEQ ID NO: 835132 - RNA, 19 nt, Homo sapiens
  misc_RNA (1)...(19): siRNA sense strand
gugagaaacccuaugaaug

SEQ ID NO: 835133 - RNA, 19 nt, Homo sapiens
  misc_RNA (1)...(19): siRNA sense strand
gagagauauuucaggaguu

SEQ ID NO: 835134 - RNA, 19 nt, Homo sapiens
  misc_RNA (1)...(19): siRNA sense strand
cuucagcaauguuguguga

SEQ ID NO: 835135 - RNA, 19 nt, Homo sapiens
  misc_RNA (1)...(19): siRNA sense strand
uuccaaaccuggcgugauu

SEQ ID NO: 835136 - RNA, 19 nt, Homo sapiens
  misc_RNA (1)...(19): siRNA sense strand
gggaaaaccuucagacauc

SEQ ID NO: 835137 - RNA, 19 nt, Homo sapiens
  misc_RNA (1)...(19): siRNA sense strand
agaagcagauacaacauag

SEQ ID NO: 835138 - RNA, 19 nt, Homo sapiens
  misc_RNA (1)...(19): siRNA sense strand
aaccaaagagucagccuua

SEQ ID NO: 835139 - RNA, 19 nt, Homo sapiens
  misc_RNA (1)...(19): siRNA sense strand
caucagagaauucauacug

SEQ ID NO: 835140 - RNA, 19 nt, Homo sapiens
  misc_RNA (1)...(19): siRNA sense strand
caucagagaauucauacug

SEQ ID NO: 835141 - RNA, 19 nt, Homo sapiens
  misc_RNA (1)...(19): siRNA sense strand
gaaagagaagcagauacaa

SEQ ID NO: 835142 - RNA, 19 nt, Homo sapiens
  misc_RNA (1)...(19): siRNA sense strand
gagucagccuuacagaaug

SEQ ID NO: 835143 - RNA, 19 nt, Homo sapiens
  misc_RNA (1)...(19): siRNA sense strand
ggugagaaacccuaugaau

SEQ ID NO: 835144 - RNA, 19 nt, Homo sapiens
  misc_RNA (1)...(19): siRNA sense strand
gccuaaugauggaaagauu

SEQ ID NO: 835145 - RNA, 19 nt, Homo sapiens
  misc_RNA (1)...(19): siRNA sense strand
gggaaaagcccuaugaaug

SEQ ID NO: 835146 - RNA, 19 nt, Homo sapiens
  misc_RNA (1)...(19): siRNA sense strand
gaaguuaugccaggaccaa

SEQ ID NO: 835147 - RNA, 19 nt, Homo sapiens
  misc_RNA (1)...(19): siRNA sense strand
ugaaaaccuuugaguguaa

SEQ ID NO: 835148 - RNA, 19 nt, Homo sapiens
  misc_RNA (1)...(19): siRNA sense strand
gagaacucauacuggagaa

SEQ ID NO: 835149 - RNA, 19 nt, Homo sapiens
  misc_RNA (1)...(19): siRNA sense strand
aguaaaaccuucagccaua

SEQ ID NO: 835150 - RNA, 19 nt, Homo sapiens
  misc_RNA (1)...(19): siRNA sense strand
ucaccuuacugaacacaug

SEQ ID NO: 835151 - RNA, 19 nt, Homo sapiens
  misc_RNA (1)...(19): siRNA sense strand
ugggaagaaucuccaaaug

SEQ ID NO: 835152 - RNA, 19 nt, Homo sapiens
  misc_RNA (1)...(19): siRNA sense strand
ccaaauguaauaagcuaga

SEQ ID NO: 835153 - RNA, 19 nt, Homo sapiens
  misc_RNA (1)...(19): siRNA sense strand
caucagagaguccauacug

SEQ ID NO: 835154 - RNA, 19 nt, Homo sapiens
  misc_RNA (1)...(19): siRNA sense strand
gaacucauacuggagaaag

SEQ ID NO: 835155 - RNA, 19 nt, Homo sapiens
  misc_RNA (1)...(19): siRNA sense strand
gagagaaaccuuuuacaug

SEQ ID NO: 835156 - RNA, 19 nt, Homo sapiens
  misc_RNA (1)...(19): siRNA sense strand
cuccaaauguaauaagcua

SEQ ID NO: 835157 - RNA, 19 nt, Homo sapiens
  misc_RNA (1)...(19): siRNA sense strand
cauaguacauaccuaacuc

SEQ ID NO: 835158 - RNA, 19 nt, Homo sapiens
  misc_RNA (1)...(19): siRNA sense strand
ugugaaacccuauauuugu

SEQ ID NO: 835159 - RNA, 19 nt, Homo sapiens
  misc_RNA (1)...(19): siRNA sense strand
gugugaaacccuauauuug

SEQ ID NO: 835160 - RNA, 19 nt, Homo sapiens
  misc_RNA (1)...(19): siRNA sense strand
ccgcaucagagaauucaua

SEQ ID NO: 835161 - RNA, 19 nt, Homo sapiens
  misc_RNA (1)...(19): siRNA sense strand
ccaacaagagaaccaaaga

SEQ ID NO: 835162 - RNA, 19 nt, Homo sapiens
  misc_RNA (1)...(19): siRNA sense strand
ccagagcauuggacugauc

SEQ ID NO: 835163 - RNA, 19 nt, Homo sapiens
  misc_RNA (1)...(19): siRNA sense strand
ccaaagagucagccuuaca

SEQ ID NO: 835164 - RNA, 19 nt, Homo sapiens
  misc_RNA (1)...(19): siRNA sense strand
agagauauuucaggaguuc

SEQ ID NO: 835165 - RNA, 19 nt, Homo sapiens
  misc_RNA (1)...(19): siRNA sense strand
uuacugaacacaugagaau

SEQ ID NO: 835166 - RNA, 19 nt, Homo sapiens
  misc_RNA (1)...(19): siRNA sense strand
agagucagccuuacagaau

SEQ ID NO: 835167 - RNA, 19 nt, Homo sapiens
  misc_RNA (1)...(19): siRNA sense strand
gcuaaacaucagagaauuc

SEQ ID NO: 835168 - RNA, 19 nt, Homo sapiens
  misc_RNA (1)...(19): siRNA sense strand
gaauucauacuggugagaa

SEQ ID NO: 835169 - RNA, 19 nt, Homo sapiens
  misc_RNA (1)...(19): siRNA sense strand
gcuagaaagccaacaagag

SEQ ID NO: 835170 - RNA, 19 nt, Homo sapiens
  misc_RNA (1)...(19): siRNA sense strand
caaacagcuuauucaccuu

SEQ ID NO: 835171 - RNA, 19 nt, Homo sapiens
  misc_RNA (1)...(19): siRNA sense strand
gcugauggagagagauauu

SEQ ID NO: 835172 - RNA, 19 nt, Homo sapiens
  misc_RNA (1)...(19): siRNA sense strand
agccagagaauacaucuuu

SEQ ID NO: 835173 - RNA, 19 nt, Homo sapiens
  misc_RNA (1)...(19): siRNA sense strand
ucgcuuacucaacauguua

SEQ ID NO: 835174 - RNA, 19 nt, Homo sapiens
  misc_RNA (1)...(19): siRNA sense strand
aagagaagcagauacaaca

SEQ ID NO: 835175 - RNA, 19 nt, Homo sapiens
  misc_RNA (1)...(19): siRNA sense strand
ccuaaugauggaaagauuu

SEQ ID NO: 835176 - RNA, 19 nt, Homo sapiens
  misc_RNA (1)...(19): siRNA sense strand
ugauucauccuuugcuaaa

SEQ ID NO: 835177 - RNA, 19 nt, Homo sapiens
  misc_RNA (1)...(19): siRNA sense strand
gaguaaaaccuuaugaaug

SEQ ID NO: 835178 - RNA, 19 nt, Homo sapiens
  misc_RNA (1)...(19): siRNA sense strand
gagagaggccaagagucua

SEQ ID NO: 835179 - RNA, 19 nt, Homo sapiens
  misc_RNA (1)...(19): siRNA sense strand
uagccaaaguucaucucuu

SEQ ID NO: 835180 - RNA, 19 nt, Homo sapiens
  misc_RNA (1)...(19): siRNA sense strand
uuucaggaguuccaaguuc

SEQ ID NO: 835181 - RNA, 19 nt, Homo sapiens
  misc_RNA (1)...(19): siRNA sense strand
gaaaagccuucagcuguag

SEQ ID NO: 835182 - RNA, 19 nt, Homo sapiens
  misc_RNA (1)...(19): siRNA sense strand
agucagccuuacagaauga

SEQ ID NO: 835183 - RNA, 19 nt, Homo sapiens
  misc_RNA (1)...(19): siRNA sense strand
uaggcaacaugagauuauu

SEQ ID NO: 835184 - RNA, 19 nt, Homo sapiens
  misc_RNA (1)...(19): siRNA sense strand
gaagagcauugauucauuu

SEQ ID NO: 835185 - RNA, 19 nt, Homo sapiens
  misc_RNA (1)...(19): siRNA sense strand
gaaacaagccuuugcugaa

SEQ ID NO: 835186 - RNA, 19 nt, Homo sapiens
  misc_RNA (1)...(19): siRNA sense strand
guaaaucaguuuccauuca

SEQ ID NO: 835187 - RNA, 19 nt, Homo sapiens
  misc_RNA (1)...(19): siRNA sense strand
agaaacagcucgugguauu

SEQ ID NO: 835188 - RNA, 19 nt, Homo sapiens
  misc_RNA (1)...(19): siRNA sense strand
gaacaugaaagagaagaua

SEQ ID NO: 835189 - RNA, 19 nt, Homo sapiens
  misc_RNA (1)...(19): siRNA sense strand
gagcaacaaugaaauuauc

SEQ ID NO: 835190 - RNA, 19 nt, Homo sapiens
  misc_RNA (1)...(19): siRNA sense strand
gugcaauaguuccuaauaa

SEQ ID NO: 835191 - RNA, 19 nt, Homo sapiens
  misc_RNA (1)...(19): siRNA sense strand
gagcugauaucaagcacuu

SEQ ID NO: 835192 - RNA, 19 nt, Homo sapiens
  misc_RNA (1)...(19): siRNA sense strand
guagagacccuaaagaaga

SEQ ID NO: 835193 - RNA, 19 nt, Homo sapiens
  misc_RNA (1)...(19): siRNA sense strand
gagcauugauucauuugga

SEQ ID NO: 835194 - RNA, 19 nt, Homo sapiens
  misc_RNA (1)...(19): siRNA sense strand
aagcuaaguuccaauauug

SEQ ID NO: 835195 - RNA, 19 nt, Homo sapiens
  misc_RNA (1)...(19): siRNA sense strand
gauaucaagcacuuuguua

SEQ ID NO: 835196 - RNA, 19 nt, Homo sapiens
  misc_RNA (1)...(19): siRNA sense strand
agagaaaggugguaugaau

SEQ ID NO: 835197 - RNA, 19 nt, Homo sapiens
  misc_RNA (1)...(19): siRNA sense strand
ggagagcuguuuaauggau

SEQ ID NO: 835198 - RNA, 19 nt, Homo sapiens
  misc_RNA (1)...(19): siRNA sense strand
ggagacacuuucaauagau

SEQ ID NO: 835199 - RNA, 19 nt, Homo sapiens
  misc_RNA (1)...(19): siRNA sense strand
agaauggugucucugauuu

SEQ ID NO: 835200 - RNA, 19 nt, Homo sapiens
  misc_RNA (1)...(19): siRNA sense strand
gaagauaaaugcgguacgu

SEQ ID NO: 835201 - RNA, 19 nt, Homo sapiens
  misc_RNA (1)...(19): siRNA sense strand
ggaaacagaaccagaagga

SEQ ID NO: 835202 - RNA, 19 nt, Homo sapiens
  misc_RNA (1)...(19): siRNA sense strand
cuaauaagagcaacaauga

SEQ ID NO: 835203 - RNA, 19 nt, Homo sapiens
  misc_RNA (1)...(19): siRNA sense strand
ucauguggcuguucaaaug

SEQ ID NO: 835204 - RNA, 19 nt, Homo sapiens
  misc_RNA (1)...(19): siRNA sense strand
gcaauaguuccuaauaaga

SEQ ID NO: 835205 - RNA, 19 nt, Homo sapiens
  misc_RNA (1)...(19): siRNA sense strand
gaacuagagucagcaugga

SEQ ID NO: 835206 - RNA, 19 nt, Homo sapiens
  misc_RNA (1)...(19): siRNA sense strand
ccagugaaguacucaaaga

SEQ ID NO: 835207 - RNA, 19 nt, Homo sapiens
  misc_RNA (1)...(19): siRNA sense strand
agaagagcauugauucauu

SEQ ID NO: 835208 - RNA, 19 nt, Homo sapiens
  misc_RNA (1)...(19): siRNA sense strand
uaaagaagagcauugauuc

SEQ ID NO: 835209 - RNA, 19 nt, Homo sapiens
  misc_RNA (1)...(19): siRNA sense strand
gcaauugguugagcucaga

SEQ ID NO: 835210 - RNA, 19 nt, Homo sapiens
  misc_RNA (1)...(19): siRNA sense strand
agugaaagcugaagcaaug

SEQ ID NO: 835211 - RNA, 19 nt, Homo sapiens
  misc_RNA (1)...(19): siRNA sense strand
aaacaagccuuugcugaau

SEQ ID NO: 835212 - RNA, 19 nt, Homo sapiens
  misc_RNA (1)...(19): siRNA sense strand
aaacagaaccagaaggauu

SEQ ID NO: 835213 - RNA, 19 nt, Homo sapiens
  misc_RNA (1)...(19): siRNA sense strand
guaucgaguuguaguuaaa

SEQ ID NO: 835214 - RNA, 19 nt, Homo sapiens
  misc_RNA (1)...(19): siRNA sense strand
gguaucgaguuguaguuaa

SEQ ID NO: 835215 - RNA, 19 nt, Homo sapiens
  misc_RNA (1)...(19): siRNA sense strand
gugaaguacucaaagaaug

SEQ ID NO: 835216 - RNA, 19 nt, Homo sapiens
  misc_RNA (1)...(19): siRNA sense strand
gacaguaacaggcaagaaa

SEQ ID NO: 835217 - RNA, 19 nt, Homo sapiens
  misc_RNA (1)...(19): siRNA sense strand
ugccaaaucucucucaaga

SEQ ID NO: 835218 - RNA, 19 nt, Homo sapiens
  misc_RNA (1)...(19): siRNA sense strand
ugaaauggacaaagugaaa

SEQ ID NO: 835219 - RNA, 19 nt, Homo sapiens
  misc_RNA (1)...(19): siRNA sense strand
gaauuggagagcuguuuaa

SEQ ID NO: 835220 - RNA, 19 nt, Homo sapiens
  misc_RNA (1)...(19): siRNA sense strand
uacaagugcuaacaagaaa

SEQ ID NO: 835221 - RNA, 19 nt, Homo sapiens
  misc_RNA (1)...(19): siRNA sense strand
ccaggaaacaccauugaaa

SEQ ID NO: 835222 - RNA, 19 nt, Homo sapiens
  misc_RNA (1)...(19): siRNA sense strand
ggaagguagugccagugaa

SEQ ID NO: 835223 - RNA, 19 nt, Homo sapiens
  misc_RNA (1)...(19): siRNA sense strand
cuaaagaagagcauugauu

SEQ ID NO: 835224 - RNA, 19 nt, Homo sapiens
  misc_RNA (1)...(19): siRNA sense strand
uuggagagcuguuuaaugg

SEQ ID NO: 835225 - RNA, 19 nt, Homo sapiens
  misc_RNA (1)...(19): siRNA sense strand
ggacaaagugaaagcugaa

SEQ ID NO: 835226 - RNA, 19 nt, Homo sapiens
  misc_RNA (1)...(19): siRNA sense strand
caucccagauuccaguaaa

SEQ ID NO: 835227 - RNA, 19 nt, Homo sapiens
  misc_RNA (1)...(19): siRNA sense strand
gaaagaggccagacucacu

SEQ ID NO: 835228 - RNA, 19 nt, Homo sapiens
  misc_RNA (1)...(19): siRNA sense strand
caggaaugcugccaaaucu

SEQ ID NO: 835229 - RNA, 19 nt, Homo sapiens
  misc_RNA (1)...(19): siRNA sense strand
gagacacuuucaauagaug

SEQ ID NO: 835230 - RNA, 19 nt, Homo sapiens
  misc_RNA (1)...(19): siRNA sense strand
uggagacacuuucaauaga

SEQ ID NO: 835231 - RNA, 19 nt, Homo sapiens
  misc_RNA (1)...(19): siRNA sense strand
ggauucaucaggauucauu

SEQ ID NO: 835232 - RNA, 19 nt, Homo sapiens
  misc_RNA (1)...(19): siRNA sense strand
guaacggcaucccagauuc

SEQ ID NO: 835233 - RNA, 19 nt, Homo sapiens
  misc_RNA (1)...(19): siRNA sense strand
ccaaagaacagcuauucga

SEQ ID NO: 835234 - RNA, 19 nt, Homo sapiens
  misc_RNA (1)...(19): siRNA sense strand
acaagugucucauccaaag

SEQ ID NO: 835235 - RNA, 19 nt, Homo sapiens
  misc_RNA (1)...(19): siRNA sense strand
guaaauaugaugaggaucu

SEQ ID NO: 835236 - RNA, 19 nt, Homo sapiens
  misc_RNA (1)...(19): siRNA sense strand
ugaaagagaagauaaaugc

SEQ ID NO: 835237 - RNA, 19 nt, Homo sapiens
  misc_RNA (1)...(19): siRNA sense strand
caaugaaauuauccugguu

SEQ ID NO: 835238 - RNA, 19 nt, Homo sapiens
  misc_RNA (1)...(19): siRNA sense strand
caguaugggucguuacaga

SEQ ID NO: 835239 - RNA, 19 nt, Homo sapiens
  misc_RNA (1)...(19): siRNA sense strand
cucaaagaauggacaguaa

SEQ ID NO: 835240 - RNA, 19 nt, Homo sapiens
  misc_RNA (1)...(19): siRNA sense strand
gaaaaugaaacaagccuuu

SEQ ID NO: 835241 - RNA, 19 nt, Homo sapiens
  misc_RNA (1)...(19): siRNA sense strand
gaaggauucaucaggauuc

SEQ ID NO: 835242 - RNA, 19 nt, Homo sapiens
  misc_RNA (1)...(19): siRNA sense strand
gagaaaggugguaugaaug

SEQ ID NO: 835243 - RNA, 19 nt, Homo sapiens
  misc_RNA (1)...(19): siRNA sense strand
gcagcacuuugauaacugu

SEQ ID NO: 835244 - RNA, 19 nt, Homo sapiens
  misc_RNA (1)...(19): siRNA sense strand
gaaccagaaggauucauca

SEQ ID NO: 835245 - RNA, 19 nt, Homo sapiens
  misc_RNA (1)...(19): siRNA sense strand
ugaauuggagagcuguuua

SEQ ID NO: 835246 - RNA, 19 nt, Homo sapiens
  misc_RNA (1)...(19): siRNA sense strand
aaaucucucucaagaccua

SEQ ID NO: 835247 - RNA, 19 nt, Homo sapiens
  misc_RNA (1)...(19): siRNA sense strand
caggauccaugcugcagaa

SEQ ID NO: 835248 - RNA, 19 nt, Homo sapiens
  misc_RNA (1)...(19): siRNA sense strand
uucaauagaugccagagaa

SEQ ID NO: 835249 - RNA, 19 nt, Homo sapiens
  misc_RNA (1)...(19): siRNA sense strand
caauagaugccagagaauu

SEQ ID NO: 835250 - RNA, 19 nt, Homo sapiens
  misc_RNA (1)...(19): siRNA sense strand
uuacaagugcuaacaagaa

SEQ ID NO: 835251 - RNA, 19 nt, Homo sapiens
  misc_RNA (1)...(19): siRNA sense strand
uuuaauggaucgagaagug

SEQ ID NO: 835252 - RNA, 19 nt, Homo sapiens
  misc_RNA (1)...(19): siRNA sense strand
uagauacgcuggacagaac

SEQ ID NO: 835253 - RNA, 19 nt, Homo sapiens
  misc_RNA (1)...(19): siRNA sense strand
guagcucaguuacaucugu

SEQ ID NO: 835254 - RNA, 19 nt, Homo sapiens
  misc_RNA (1)...(19): siRNA sense strand
ccaggaaacagaaccagaa

SEQ ID NO: 835255 - RNA, 19 nt, Homo sapiens
  misc_RNA (1)...(19): siRNA sense strand
gaaagcugaagcaauggaa

SEQ ID NO: 835256 - RNA, 19 nt, Homo sapiens
  misc_RNA (1)...(19): siRNA sense strand
gaagguagugccagugaag

SEQ ID NO: 835257 - RNA, 19 nt, Homo sapiens
  misc_RNA (1)...(19): siRNA sense strand
ggaaacaccauugaaagag

SEQ ID NO: 835258 - RNA, 19 nt, Homo sapiens
  misc_RNA (1)...(19): siRNA sense strand
ugacucauguggcuguuca

SEQ ID NO: 835259 - RNA, 19 nt, Homo sapiens
  misc_RNA (1)...(19): siRNA sense strand
gaguuguaguuaaagaaga

SEQ ID NO: 835260 - RNA, 19 nt, Homo sapiens
  misc_RNA (1)...(19): siRNA sense strand
caaagaauggacaguaaca

SEQ ID NO: 835261 - RNA, 19 nt, Homo sapiens
  misc_RNA (1)...(19): siRNA sense strand
ucaaugacacugagucugu

SEQ ID NO: 835262 - RNA, 19 nt, Homo sapiens
  misc_RNA (1)...(19): siRNA sense strand
agagacuccugcagccaua

SEQ ID NO: 835263 - RNA, 19 nt, Homo sapiens
  misc_RNA (1)...(19): siRNA sense strand
uugagaacaugaaagagaa

SEQ ID NO: 835264 - RNA, 19 nt, Homo sapiens
  misc_RNA (1)...(19): siRNA sense strand
acaagccuuugcugaauug

SEQ ID NO: 835265 - RNA, 19 nt, Homo sapiens
  misc_RNA (1)...(19): siRNA sense strand
gcuaaguuccaauauugaa

SEQ ID NO: 835266 - RNA, 19 nt, Homo sapiens
  misc_RNA (1)...(19): siRNA sense strand
ggaaugcugccaaaucucu

SEQ ID NO: 835267 - RNA, 19 nt, Homo sapiens
  misc_RNA (1)...(19): siRNA sense strand
gcugauaucaagcacuuug

SEQ ID NO: 835268 - RNA, 19 nt, Homo sapiens
  misc_RNA (1)...(19): siRNA sense strand
cugaagccgugaacucuug

SEQ ID NO: 835269 - RNA, 19 nt, Homo sapiens
  misc_RNA (1)...(19): siRNA sense strand
gcagggaccaauggaacua

SEQ ID NO: 835270 - RNA, 19 nt, Homo sapiens
  misc_RNA (1)...(19): siRNA sense strand
ugauaacuguguggacaaa

SEQ ID NO: 835271 - RNA, 19 nt, Homo sapiens
  misc_RNA (1)...(19): siRNA sense strand
cagaaggauucaucaggau

SEQ ID NO: 835272 - RNA, 19 nt, Homo sapiens
  misc_RNA (1)...(19): siRNA sense strand
gaagguuuggagacacuuu

SEQ ID NO: 835273 - RNA, 19 nt, Homo sapiens
  misc_RNA (1)...(19): siRNA sense strand
caguaaaucaguuuccauu

SEQ ID NO: 835274 - RNA, 19 nt, Homo sapiens
  misc_RNA (1)...(19): siRNA sense strand
ggacaaaacaguacaagca

SEQ ID NO: 835275 - RNA, 19 nt, Homo sapiens
  misc_RNA (1)...(19): siRNA sense strand
ucccacgccuucauucaaa

SEQ ID NO: 835276 - RNA, 19 nt, Homo sapiens
  misc_RNA (1)...(19): siRNA sense strand
acagaaacagcucguggua

SEQ ID NO: 835277 - RNA, 19 nt, Homo sapiens
  misc_RNA (1)...(19): siRNA sense strand
ucgaccagaucccgaugua

SEQ ID NO: 835278 - RNA, 19 nt, Homo sapiens
  misc_RNA (1)...(19): siRNA sense strand
ugcaauaguuccuaauaag

SEQ ID NO: 835279 - RNA, 19 nt, Homo sapiens
  misc_RNA (1)...(19): siRNA sense strand
gcugaaauggacaaaguga

SEQ ID NO: 835280 - RNA, 19 nt, Homo sapiens
  misc_RNA (1)...(19): siRNA sense strand
cucaagaccuaccacagaa

SEQ ID NO: 835281 - RNA, 19 nt, Homo sapiens
  misc_RNA (1)...(19): siRNA sense strand
gcugaagcaauggaaauuu

SEQ ID NO: 835282 - RNA, 19 nt, Homo sapiens
  misc_RNA (1)...(19): siRNA sense strand
gcaccaggaaacaccauug

SEQ ID NO: 835283 - RNA, 19 nt, Homo sapiens
  misc_RNA (1)...(19): siRNA sense strand
guaugggucguuacagaaa

SEQ ID NO: 835284 - RNA, 19 nt, Homo sapiens
  misc_RNA (1)...(19): siRNA sense strand
gcacagauuucuacauaua

SEQ ID NO: 835285 - RNA, 19 nt, Homo sapiens
  misc_RNA (1)...(19): siRNA sense strand
gaacuuggaucaauauguu

SEQ ID NO: 835286 - RNA, 19 nt, Homo sapiens
  misc_RNA (1)...(19): siRNA sense strand
ggaaugggcuuauagaaug

SEQ ID NO: 835287 - RNA, 19 nt, Homo sapiens
  misc_RNA (1)...(19): siRNA sense strand
gaaauaaggcugagacaaa

SEQ ID NO: 835288 - RNA, 19 nt, Homo sapiens
  misc_RNA (1)...(19): siRNA sense strand
ggaaagaaauggucagaau

SEQ ID NO: 835289 - RNA, 19 nt, Homo sapiens
  misc_RNA (1)...(19): siRNA sense strand
gaacauugcugaaaacaua

SEQ ID NO: 835290 - RNA, 19 nt, Homo sapiens
  misc_RNA (1)...(19): siRNA sense strand
caacagaaacuaacacaua

SEQ ID NO: 835291 - RNA, 19 nt, Homo sapiens
  misc_RNA (1)...(19): siRNA sense strand
gaauagcagugaugaauug

SEQ ID NO: 835292 - RNA, 19 nt, Homo sapiens
  misc_RNA (1)...(19): siRNA sense strand
ugaaugaacuguuaucuga

SEQ ID NO: 835293 - RNA, 19 nt, Homo sapiens
  misc_RNA (1)...(19): siRNA sense strand
uaaaggagguaucgcauuu

SEQ ID NO: 835294 - RNA, 19 nt, Homo sapiens
  misc_RNA (1)...(19): siRNA sense strand
gaacuuggcuuaacagaac

SEQ ID NO: 835295 - RNA, 19 nt, Homo sapiens
  misc_RNA (1)...(19): siRNA sense strand
gaaagagaccuaccuuauu

SEQ ID NO: 835296 - RNA, 19 nt, Homo sapiens
  misc_RNA (1)...(19): siRNA sense strand
ggaauuaccugugagagaa

SEQ ID NO: 835297 - RNA, 19 nt, Homo sapiens
  misc_RNA (1)...(19): siRNA sense strand
gugcacagauuucuacaua

SEQ ID NO: 835298 - RNA, 19 nt, Homo sapiens
  misc_RNA (1)...(19): siRNA sense strand
cgaaugaagucaauaagaa

SEQ ID NO: 835299 - RNA, 19 nt, Homo sapiens
  misc_RNA (1)...(19): siRNA sense strand
gcauguccgugauaaguua

SEQ ID NO: 835300 - RNA, 19 nt, Homo sapiens
  misc_RNA (1)...(19): siRNA sense strand
gcaaagcgaucaucuagca

SEQ ID NO: 835301 - RNA, 19 nt, Homo sapiens
  misc_RNA (1)...(19): siRNA sense strand
caacaggacucuucagugu

SEQ ID NO: 835302 - RNA, 19 nt, Homo sapiens
  misc_RNA (1)...(19): siRNA sense strand
gaaaugaugucuguuguca

SEQ ID NO: 835303 - RNA, 19 nt, Homo sapiens
  misc_RNA (1)...(19): siRNA sense strand
gaaagaaauggucagaaua

SEQ ID NO: 835304 - RNA, 19 nt, Homo sapiens
  misc_RNA (1)...(19): siRNA sense strand
acaaagaacugacaaggaa

SEQ ID NO: 835305 - RNA, 19 nt, Homo sapiens
  misc_RNA (1)...(19): siRNA sense strand
caacuuaucccacuugaaa

SEQ ID NO: 835306 - RNA, 19 nt, Homo sapiens
  misc_RNA (1)...(19): siRNA sense strand
gcaagaacaugauccuuuc

SEQ ID NO: 835307 - RNA, 19 nt, Homo sapiens
  misc_RNA (1)...(19): siRNA sense strand
ggagaaauauaggcucuuu

SEQ ID NO: 835308 - RNA, 19 nt, Homo sapiens
  misc_RNA (1)...(19): siRNA sense strand
ccacuuaaaccuccuaaua

SEQ ID NO: 835309 - RNA, 19 nt, Homo sapiens
  misc_RNA (1)...(19): siRNA sense strand
gcuauucagugcaaugaua

SEQ ID NO: 835310 - RNA, 19 nt, Homo sapiens
  misc_RNA (1)...(19): siRNA sense strand
gcagaagauucgaaugaaa

SEQ ID NO: 835311 - RNA, 19 nt, Homo sapiens
  misc_RNA (1)...(19): siRNA sense strand
gauacgaguucagaaauuu

SEQ ID NO: 835312 - RNA, 19 nt, Homo sapiens
  misc_RNA (1)...(19): siRNA sense strand
aaagagaccuaccuuauuc

SEQ ID NO: 835313 - RNA, 19 nt, Homo sapiens
  misc_RNA (1)...(19): siRNA sense strand
gacgauaccuucagaaauc

SEQ ID NO: 835314 - RNA, 19 nt, Homo sapiens
  misc_RNA (1)...(19): siRNA sense strand
gaaagaagaucaugaaaag

SEQ ID NO: 835315 - RNA, 19 nt, Homo sapiens
  misc_RNA (1)...(19): siRNA sense strand
gcugcaagaugaaauguuu

SEQ ID NO: 835316 - RNA, 19 nt, Homo sapiens
  misc_RNA (1)...(19): siRNA sense strand
gaagaagaguucacagaag

SEQ ID NO: 835317 - RNA, 19 nt, Homo sapiens
  misc_RNA (1)...(19): siRNA sense strand
cagaagagguucaguguca

SEQ ID NO: 835318 - RNA, 19 nt, Homo sapiens
  misc_RNA (1)...(19): siRNA sense strand
gacauuccauuucuaacua

SEQ ID NO: 835319 - RNA, 19 nt, Homo sapiens
  misc_RNA (1)...(19): siRNA sense strand
uaaaugagcuggcagaaaa

SEQ ID NO: 835320 - RNA, 19 nt, Homo sapiens
  misc_RNA (1)...(19): siRNA sense strand
aaagaaagcuauaggaagu

SEQ ID NO: 835321 - RNA, 19 nt, Homo sapiens
  misc_RNA (1)...(19): siRNA sense strand
gaagaagagcugagaaaga

SEQ ID NO: 835322 - RNA, 19 nt, Homo sapiens
  misc_RNA (1)...(19): siRNA sense strand
gaaauggucagaauaaauc

SEQ ID NO: 835323 - RNA, 19 nt, Homo sapiens
  misc_RNA (1)...(19): siRNA sense strand
caacagaucaacuucauga

SEQ ID NO: 835324 - RNA, 19 nt, Homo sapiens
  misc_RNA (1)...(19): siRNA sense strand
ggacuggaaugccaucgaa

SEQ ID NO: 835325 - RNA, 19 nt, Homo sapiens
  misc_RNA (1)...(19): siRNA sense strand
ccaauuccaucaucucaaa

SEQ ID NO: 835326 - RNA, 19 nt, Homo sapiens
  misc_RNA (1)...(19): siRNA sense strand
gaacaacccuauuuugcua

SEQ ID NO: 835327 - RNA, 19 nt, Homo sapiens
  misc_RNA (1)...(19): siRNA sense strand
caagaugcaaguacaaaua

SEQ ID NO: 835328 - RNA, 19 nt, Homo sapiens
  misc_RNA (1)...(19): siRNA sense strand
gaauauaugggaaccaauu

SEQ ID NO: 835329 - RNA, 19 nt, Homo sapiens
  misc_RNA (1)...(19): siRNA sense strand
aagaaagaauggcaaagua

SEQ ID NO: 835330 - RNA, 19 nt, Homo sapiens
  misc_RNA (1)...(19): siRNA sense strand
gcauaccacuccucaauca

SEQ ID NO: 835331 - RNA, 19 nt, Homo sapiens
  misc_RNA (1)...(19): siRNA sense strand
gaagacugcuggaauggau

SEQ ID NO: 835332 - RNA, 19 nt, Homo sapiens
  misc_RNA (1)...(19): siRNA sense strand
gaaguacacucacagaacu

SEQ ID NO: 835333 - RNA, 19 nt, Homo sapiens
  misc_RNA (1)...(19): siRNA sense strand
gcagguguguguagaguau

SEQ ID NO: 835334 - RNA, 19 nt, Homo sapiens
  misc_RNA (1)...(19): siRNA sense strand
gauaucaaauggagucaau

SEQ ID NO: 835335 - RNA, 19 nt, Homo sapiens
  misc_RNA (1)...(19): siRNA sense strand
ggaaugaguggauuauuug

SEQ ID NO: 835336 - RNA, 19 nt, Homo sapiens
  misc_RNA (1)...(19): siRNA sense strand
gcaguggaaugggcuuaua

SEQ ID NO: 835337 - RNA, 19 nt, Homo sapiens
  misc_RNA (1)...(19): siRNA sense strand
gaaccacuggagacaauua

SEQ ID NO: 835338 - RNA, 19 nt, Homo sapiens
  misc_RNA (1)...(19): siRNA sense strand
augauaagguggucuaaua

SEQ ID NO: 835339 - RNA, 19 nt, Homo sapiens
  misc_RNA (1)...(19): siRNA sense strand
ccacaagcuugaugaaguu

SEQ ID NO: 835340 - RNA, 19 nt, Homo sapiens
  misc_RNA (1)...(19): siRNA sense strand
gcuacgcagucuccaguua

SEQ ID NO: 835341 - RNA, 19 nt, Homo sapiens
  misc_RNA (1)...(19): siRNA sense strand
ucugaugaaugaacuguua

SEQ ID NO: 835342 - RNA, 19 nt, Homo sapiens
  misc_RNA (1)...(19): siRNA sense strand
agaaagagcugcaagaaaa

SEQ ID NO: 835343 - RNA, 19 nt, Homo sapiens
  misc_RNA (1)...(19): siRNA sense strand
gaaggcaccuagacuuauc

SEQ ID NO: 835344 - RNA, 19 nt, Homo sapiens
  misc_RNA (1)...(19): siRNA sense strand
caucaguacugguuaauca

SEQ ID NO: 835345 - RNA, 19 nt, Homo sapiens
  misc_RNA (1)...(19): siRNA sense strand
ugaagaagauggugaugau

SEQ ID NO: 835346 - RNA, 19 nt, Homo sapiens
  misc_RNA (1)...(19): siRNA sense strand
cucaauaccucauacagua

SEQ ID NO: 835347 - RNA, 19 nt, Homo sapiens
  misc_RNA (1)...(19): siRNA sense strand
caauaagaaugaaggaaug

SEQ ID NO: 835348 - RNA, 19 nt, Homo sapiens
  misc_RNA (1)...(19): siRNA sense strand
gaauauggcaugcauuuag

SEQ ID NO: 835349 - RNA, 19 nt, Homo sapiens
  misc_RNA (1)...(19): siRNA sense strand
gaagaacuuauucaggaua

SEQ ID NO: 835350 - RNA, 19 nt, Homo sapiens
  misc_RNA (1)...(19): siRNA sense strand
gacaaaagaugaagcauga

SEQ ID NO: 835351 - RNA, 19 nt, Homo sapiens
  misc_RNA (1)...(19): siRNA sense strand
ccagugaaaugucagagaa

SEQ ID NO: 835352 - RNA, 19 nt, Homo sapiens
  misc_RNA (1)...(19): siRNA sense strand
gaaaugcuacaagaugaua

SEQ ID NO: 835353 - RNA, 19 nt, Homo sapiens
  misc_RNA (1)...(19): siRNA sense strand
caacaccuauccaaccuau

SEQ ID NO: 835354 - RNA, 19 nt, Homo sapiens
  misc_RNA (1)...(19): siRNA sense strand
acaggacucuucaguguuu

SEQ ID NO: 835355 - RNA, 19 nt, Homo sapiens
  misc_RNA (1)...(19): siRNA sense strand
uacaauauccuucgaauga

SEQ ID NO: 835356 - RNA, 19 nt, Homo sapiens
  misc_RNA (1)...(19): siRNA sense strand
gaacugccaccaaucagaa

SEQ ID NO: 835357 - RNA, 19 nt, Homo sapiens
  misc_RNA (1)...(19): siRNA sense strand
acaauucccuucuacaaga

SEQ ID NO: 835358 - RNA, 19 nt, Homo sapiens
  misc_RNA (1)...(19): siRNA sense strand
aaaccgaguuauauccaua

SEQ ID NO: 835359 - RNA, 19 nt, Homo sapiens
  misc_RNA (1)...(19): siRNA sense strand
gcaaguagauacgaguuca

SEQ ID NO: 835360 - RNA, 19 nt, Homo sapiens
  misc_RNA (1)...(19): siRNA sense strand
aggaaugaguggauuauuu

SEQ ID NO: 835361 - RNA, 19 nt, Homo sapiens
  misc_RNA (1)...(19): siRNA sense strand
gagcagaaguacacucaca

SEQ ID NO: 835362 - RNA, 19 nt, Homo sapiens
  misc_RNA (1)...(19): siRNA sense strand
ucagaaagguagcagaaau

SEQ ID NO: 835363 - RNA, 19 nt, Homo sapiens
  misc_RNA (1)...(19): siRNA sense strand
ggucacaguuuucuaauaa

SEQ ID NO: 835364 - RNA, 19 nt, Homo sapiens
  misc_RNA (1)...(19): siRNA sense strand
gguuggacauacuuauaua

SEQ ID NO: 835365 - RNA, 19 nt, Homo sapiens
  misc_RNA (1)...(19): siRNA sense strand
gagaaagagcugcaagaaa

SEQ ID NO: 835366 - RNA, 19 nt, Homo sapiens
  misc_RNA (1)...(19): siRNA sense strand
aaauaguacuggaaacgua

SEQ ID NO: 835367 - RNA, 19 nt, Homo sapiens
  misc_RNA (1)...(19): siRNA sense strand
gaucauccuuugcuaaucu

SEQ ID NO: 835368 - RNA, 19 nt, Homo sapiens
  misc_RNA (1)...(19): siRNA sense strand
ugaauucacggcucaguua

SEQ ID NO: 835369 - RNA, 19 nt, Homo sapiens
  misc_RNA (1)...(19): siRNA sense strand
ggaguuugauucuuguaug

SEQ ID NO: 835370 - RNA, 19 nt, Homo sapiens
  misc_RNA (1)...(19): siRNA sense strand
uggcagacauucacaaaga

SEQ ID NO: 835371 - RNA, 19 nt, Homo sapiens
  misc_RNA (1)...(19): siRNA sense strand
gugagaaacugaggagaaa

SEQ ID NO: 835372 - RNA, 19 nt, Homo sapiens
  misc_RNA (1)...(19): siRNA sense strand
cagaaggcaccuagacuua

SEQ ID NO: 835373 - RNA, 19 nt, Homo sapiens
  misc_RNA (1)...(19): siRNA sense strand
ugaguacaguccaguaauu

SEQ ID NO: 835374 - RNA, 19 nt, Homo sapiens
  misc_RNA (1)...(19): siRNA sense strand
gauauuaacccucaagaag

SEQ ID NO: 835375 - RNA, 19 nt, Homo sapiens
  misc_RNA (1)...(19): siRNA sense strand
ugaaagagaccuaccuuau

SEQ ID NO: 835376 - RNA, 19 nt, Homo sapiens
  misc_RNA (1)...(19): siRNA sense strand
ggaagaacuuauucaggau

SEQ ID NO: 835377 - RNA, 19 nt, Homo sapiens
  misc_RNA (1)...(19): siRNA sense strand
ugauugacauugaagcuaa

SEQ ID NO: 835378 - RNA, 19 nt, Homo sapiens
  misc_RNA (1)...(19): siRNA sense strand
ccuaauauguuuccaucaa

SEQ ID NO: 835379 - RNA, 19 nt, Homo sapiens
  misc_RNA (1)...(19): siRNA sense strand
aagaagaguucacagaaga

SEQ ID NO: 835380 - RNA, 19 nt, Homo sapiens
  misc_RNA (1)...(19): siRNA sense strand
gaaagaaaauccuacaaag

SEQ ID NO: 835381 - RNA, 19 nt, Homo sapiens
  misc_RNA (1)...(19): siRNA sense strand
aaacgugugcggagaaaua

SEQ ID NO: 835382 - RNA, 19 nt, Homo sapiens
  misc_RNA (1)...(19): siRNA sense strand
ggacgugaggguuccuuua

SEQ ID NO: 835383 - RNA, 19 nt, Homo sapiens
  misc_RNA (1)...(19): siRNA sense strand
gaaagaagagagauucaag

SEQ ID NO: 835384 - RNA, 19 nt, Homo sapiens
  misc_RNA (1)...(19): siRNA sense strand
ggacugcaaugguuugaac

SEQ ID NO: 835385 - RNA, 19 nt, Homo sapiens
  misc_RNA (1)...(19): siRNA sense strand
gggagcaucugggacuuug

SEQ ID NO: 835386 - RNA, 19 nt, Homo sapiens
  misc_RNA (1)...(19): siRNA sense strand
gagcaucugggacuuuguu

SEQ ID NO: 835387 - RNA, 19 nt, Homo sapiens
  misc_RNA (1)...(19): siRNA sense strand
aggcuggacugcaaugguu

SEQ ID NO: 835388 - RNA, 19 nt, Homo sapiens
  misc_RNA (1)...(19): siRNA sense strand
gaagggauccggaagaauu

SEQ ID NO: 835389 - RNA, 19 nt, Homo sapiens
  misc_RNA (1)...(19): siRNA sense strand
gccaagguguugaaguuua

SEQ ID NO: 835390 - RNA, 19 nt, Homo sapiens
  misc_RNA (1)...(19): siRNA sense strand
ccaagguguugaaguuuaa

SEQ ID NO: 835391 - RNA, 19 nt, Homo sapiens
  misc_RNA (1)...(19): siRNA sense strand
gcuaucggcugguggacua

SEQ ID NO: 835392 - RNA, 19 nt, Homo sapiens
  misc_RNA (1)...(19): siRNA sense strand
gcacaugauggacagguua

SEQ ID NO: 835393 - RNA, 19 nt, Homo sapiens
  misc_RNA (1)...(19): siRNA sense strand
guccaacccuuaacauuug

SEQ ID NO: 835394 - RNA, 19 nt, Homo sapiens
  misc_RNA (1)...(19): siRNA sense strand
gaaaggccagggacuacua

SEQ ID NO: 835395 - RNA, 19 nt, Homo sapiens
  misc_RNA (1)...(19): siRNA sense strand
gggaugguguugauaagga

SEQ ID NO: 835396 - RNA, 19 nt, Homo sapiens
  misc_RNA (1)...(19): siRNA sense strand
caaccucagugccauguuc

SEQ ID NO: 835397 - RNA, 19 nt, Homo sapiens
  misc_RNA (1)...(19): siRNA sense strand
ugagaagccuggaaagaag

SEQ ID NO: 835398 - RNA, 19 nt, Homo sapiens
  misc_RNA (1)...(19): siRNA sense strand
ggaccuggcauguaaauac

SEQ ID NO: 835399 - RNA, 19 nt, Homo sapiens
  misc_RNA (1)...(19): siRNA sense strand
gagaaccagcacagugaua

SEQ ID NO: 835400 - RNA, 19 nt, Homo sapiens
  misc_RNA (1)...(19): siRNA sense strand
gugagaagccuggaaagaa

SEQ ID NO: 835401 - RNA, 19 nt, Homo sapiens
  misc_RNA (1)...(19): siRNA sense strand
cugccaagguguugaaguu

SEQ ID NO: 835402 - RNA, 19 nt, Homo sapiens
  misc_RNA (1)...(19): siRNA sense strand
uguccaacccuuaacauuu

SEQ ID NO: 835403 - RNA, 19 nt, Homo sapiens
  misc_RNA (1)...(19): siRNA sense strand
gaugguggcuauacuucca

SEQ ID NO: 835404 - RNA, 19 nt, Homo sapiens
  misc_RNA (1)...(19): siRNA sense strand
guaaauacuccaugaaagc

SEQ ID NO: 835405 - RNA, 19 nt, Homo sapiens
  misc_RNA (1)...(19): siRNA sense strand
uggaagggauccggaagaa

SEQ ID NO: 835406 - RNA, 19 nt, Homo sapiens
  misc_RNA (1)...(19): siRNA sense strand
uguaaauacuccaugaaag

SEQ ID NO: 835407 - RNA, 19 nt, Homo sapiens
  misc_RNA (1)...(19): siRNA sense strand
gcugguggacuauuuggaa

SEQ ID NO: 835408 - RNA, 19 nt, Homo sapiens
  misc_RNA (1)...(19): siRNA sense strand
acauggagguggagugcaa

SEQ ID NO: 835409 - RNA, 19 nt, Homo sapiens
  misc_RNA (1)...(19): siRNA sense strand
gccagggacuacuacacaa

SEQ ID NO: 835410 - RNA, 19 nt, Homo sapiens
  misc_RNA (1)...(19): siRNA sense strand
aagagaaccagcacaguga

SEQ ID NO: 835411 - RNA, 19 nt, Homo sapiens
  misc_RNA (1)...(19): siRNA sense strand
ggaugguguugauaaggau

SEQ ID NO: 835412 - RNA, 19 nt, Homo sapiens
  misc_RNA (1)...(19): siRNA sense strand
gaccuggcauguaaauacu

SEQ ID NO: 835413 - RNA, 19 nt, Homo sapiens
  misc_RNA (1)...(19): siRNA sense strand
gaagucaauagcagcaugu

SEQ ID NO: 835414 - RNA, 19 nt, Homo sapiens
  misc_RNA (1)...(19): siRNA sense strand
ggccugugaugguggcuau

SEQ ID NO: 835415 - RNA, 19 nt, Homo sapiens
  misc_RNA (1)...(19): siRNA sense strand
ggacccggacgguugcuau

SEQ ID NO: 835416 - RNA, 19 nt, Homo sapiens
  misc_RNA (1)...(19): siRNA sense strand
ggagguggagugcaacuac

SEQ ID NO: 835417 - RNA, 19 nt, Homo sapiens
  misc_RNA (1)...(19): siRNA sense strand
cccacuaugugacuggaaa

SEQ ID NO: 835418 - RNA, 19 nt, Homo sapiens
  misc_RNA (1)...(19): siRNA sense strand
ggcacaugauggacagguu

SEQ ID NO: 835419 - RNA, 19 nt, Homo sapiens
  misc_RNA (1)...(19): siRNA sense strand
uaucugggccugugccaau

SEQ ID NO: 835420 - RNA, 19 nt, Homo sapiens
  misc_RNA (1)...(19): siRNA sense strand
ggccagggacuacuacaca

SEQ ID NO: 835421 - RNA, 19 nt, Homo sapiens
  misc_RNA (1)...(19): siRNA sense strand
gaggauggccagccugacu

SEQ ID NO: 835422 - RNA, 19 nt, Homo sapiens
  misc_RNA (1)...(19): siRNA sense strand
ggauggccagccugacuug

SEQ ID NO: 835423 - RNA, 19 nt, Homo sapiens
  misc_RNA (1)...(19): siRNA sense strand
gagaagccuggaaagaagu

SEQ ID NO: 835424 - RNA, 19 nt, Homo sapiens
  misc_RNA (1)...(19): siRNA sense strand
gcaacuaccacugcuacca

SEQ ID NO: 835425 - RNA, 19 nt, Homo sapiens
  misc_RNA (1)...(19): siRNA sense strand
ccaaggccgaggugcuaaa

SEQ ID NO: 835426 - RNA, 19 nt, Homo sapiens
  misc_RNA (1)...(19): siRNA sense strand
ggaagggauccggaagaau

SEQ ID NO: 835427 - RNA, 19 nt, Homo sapiens
  misc_RNA (1)...(19): siRNA sense strand
guggcuauacuuccaguug

SEQ ID NO: 835428 - RNA, 19 nt, Homo sapiens
  misc_RNA (1)...(19): siRNA sense strand
guuuaacugugaagagaac

SEQ ID NO: 835429 - RNA, 19 nt, Homo sapiens
  misc_RNA (1)...(19): siRNA sense strand
ccacugcuaccacgagaag

SEQ ID NO: 835430 - RNA, 19 nt, Homo sapiens
  misc_RNA (1)...(19): siRNA sense strand
aaaucgagcccagcagcua

SEQ ID NO: 835431 - RNA, 19 nt, Homo sapiens
  misc_RNA (1)...(19): siRNA sense strand
caugauggacagguuaaug

SEQ ID NO: 835432 - RNA, 19 nt, Homo sapiens
  misc_RNA (1)...(19): siRNA sense strand
gaaccuaugucacuuucaa

SEQ ID NO: 835433 - RNA, 19 nt, Homo sapiens
  misc_RNA (1)...(19): siRNA sense strand
ccaaggagcucagcagaaa

SEQ ID NO: 835434 - RNA, 19 nt, Homo sapiens
  misc_RNA (1)...(19): siRNA sense strand
ugaaggagccgucaagaug

SEQ ID NO: 835435 - RNA, 19 nt, Homo sapiens
  misc_RNA (1)...(19): siRNA sense strand
ggucaccacugaacacauc

SEQ ID NO: 835436 - RNA, 19 nt, Homo sapiens
  misc_RNA (1)...(19): siRNA sense strand
aguggaagcucagcacaua

SEQ ID NO: 835437 - RNA, 19 nt, Homo sapiens
  misc_RNA (1)...(19): siRNA sense strand
caacagacaggaaccuaug

SEQ ID NO: 835438 - RNA, 19 nt, Homo sapiens
  misc_RNA (1)...(19): siRNA sense strand
ccacugaacacaucuuggu

SEQ ID NO: 835439 - RNA, 19 nt, Homo sapiens
  misc_RNA (1)...(19): siRNA sense strand
ggaccacgcacuccaacca

SEQ ID NO: 835440 - RNA, 19 nt, Homo sapiens
  misc_RNA (1)...(19): siRNA sense strand
acaggaaccuaugucacuu

SEQ ID NO: 835441 - RNA, 19 nt, Homo sapiens
  misc_RNA (1)...(19): siRNA sense strand
gccaaggagcucagcagaa

SEQ ID NO: 835442 - RNA, 19 nt, Homo sapiens
  misc_RNA (1)...(19): siRNA sense strand
ccaacagacaggaaccuau

SEQ ID NO: 835443 - RNA, 19 nt, Homo sapiens
  misc_RNA (1)...(19): siRNA sense strand
ggaaggggccauagugaug

SEQ ID NO: 835444 - RNA, 19 nt, Homo sapiens
  misc_RNA (1)...(19): siRNA sense strand
caucagagcaggaaaagug

SEQ ID NO: 835445 - RNA, 19 nt, Homo sapiens
  misc_RNA (1)...(19): siRNA sense strand
caggaaccuaugucacuuu

SEQ ID NO: 835446 - RNA, 19 nt, Homo sapiens
  misc_RNA (1)...(19): siRNA sense strand
ugcccaaccugcccugugu

SEQ ID NO: 835447 - RNA, 19 nt, Homo sapiens
  misc_RNA (1)...(19): siRNA sense strand
uggcguggccuucgugugu

SEQ ID NO: 835448 - RNA, 19 nt, Homo sapiens
  misc_RNA (1)...(19): siRNA sense strand
ggacaugccugaugaagag

SEQ ID NO: 835449 - RNA, 19 nt, Homo sapiens
  misc_RNA (1)...(19): siRNA sense strand
ucucagagcugcugcuuau

SEQ ID NO: 835450 - RNA, 19 nt, Homo sapiens
  misc_RNA (1)...(19): siRNA sense strand
cgagaaggccucagagaaa

SEQ ID NO: 835451 - RNA, 19 nt, Homo sapiens
  misc_RNA (1)...(19): siRNA sense strand
gaguuuagguucaauuucu

SEQ ID NO: 835452 - RNA, 19 nt, Homo sapiens
  misc_RNA (1)...(19): siRNA sense strand
cugcaggccucgcucuaua

SEQ ID NO: 835453 - RNA, 19 nt, Homo sapiens
  misc_RNA (1)...(19): siRNA sense strand
gcgagaaggccucagagaa

SEQ ID NO: 835454 - RNA, 19 nt, Homo sapiens
  misc_RNA (1)...(19): siRNA sense strand
caaagccacucuggacaug

SEQ ID NO: 835455 - RNA, 19 nt, Homo sapiens
  misc_RNA (1)...(19): siRNA sense strand
gcugaugcacuccuuguuu

SEQ ID NO: 835456 - RNA, 19 nt, Homo sapiens
  misc_RNA (1)...(19): siRNA sense strand
ggugcaaccuguagaugga

SEQ ID NO: 835457 - RNA, 19 nt, Homo sapiens
  misc_RNA (1)...(19): siRNA sense strand
gagaaggccucagagaaac

SEQ ID NO: 835458 - RNA, 19 nt, Homo sapiens
  misc_RNA (1)...(19): siRNA sense strand
gaaagagcaggcuauugga

SEQ ID NO: 835459 - RNA, 19 nt, Homo sapiens
  misc_RNA (1)...(19): siRNA sense strand
gaagaguuuagguucaauu

SEQ ID NO: 835460 - RNA, 19 nt, Homo sapiens
  misc_RNA (1)...(19): siRNA sense strand
gaaacucgccccagaagaa

SEQ ID NO: 835461 - RNA, 19 nt, Homo sapiens
  misc_RNA (1)...(19): siRNA sense strand
agaaagagcaggcuauugg

SEQ ID NO: 835462 - RNA, 19 nt, Homo sapiens
  misc_RNA (1)...(19): siRNA sense strand
ggaagaggcagcugaugca

SEQ ID NO: 835463 - RNA, 19 nt, Homo sapiens
  misc_RNA (1)...(19): siRNA sense strand
cagagcugcugcuuauuca

SEQ ID NO: 835464 - RNA, 19 nt, Homo sapiens
  misc_RNA (1)...(19): siRNA sense strand
cuauagggcucagauggaa

SEQ ID NO: 835465 - RNA, 19 nt, Homo sapiens
  misc_RNA (1)...(19): siRNA sense strand
caaccuacgugcaguaacg

SEQ ID NO: 835466 - RNA, 19 nt, Homo sapiens
  misc_RNA (1)...(19): siRNA sense strand
guagauggagccaccagaa

SEQ ID NO: 835467 - RNA, 19 nt, Homo sapiens
  misc_RNA (1)...(19): siRNA sense strand
gagcaaccuacgugcagua

SEQ ID NO: 835468 - RNA, 19 nt, Homo sapiens
  misc_RNA (1)...(19): siRNA sense strand
gauggagccaccagaaaga

SEQ ID NO: 835469 - RNA, 19 nt, Homo sapiens
  misc_RNA (1)...(19): siRNA sense strand
cugaugcacuccuuguuug

SEQ ID NO: 835470 - RNA, 19 nt, Homo sapiens
  misc_RNA (1)...(19): siRNA sense strand
ucagagcugcugcuuauuc

SEQ ID NO: 835471 - RNA, 19 nt, Homo sapiens
  misc_RNA (1)...(19): siRNA sense strand
ggagccaccagaaagaaga

SEQ ID NO: 835472 - RNA, 19 nt, Homo sapiens
  misc_RNA (1)...(19): siRNA sense strand
acaguuggcccaggaauug

SEQ ID NO: 835473 - RNA, 19 nt, Homo sapiens
  misc_RNA (1)...(19): siRNA sense strand
gggccucuguggcaaaugg

SEQ ID NO: 835474 - RNA, 19 nt, Homo sapiens
  misc_RNA (1)...(19): siRNA sense strand
caugccugaugaagaguuu

SEQ ID NO: 835475 - RNA, 19 nt, Homo sapiens
  misc_RNA (1)...(19): siRNA sense strand
gcaggccucgcucuauaug

SEQ ID NO: 835476 - RNA, 19 nt, Homo sapiens
  misc_RNA (1)...(19): siRNA sense strand
gcagaaacccaccccgaaa

SEQ ID NO: 835477 - RNA, 19 nt, Homo sapiens
  misc_RNA (1)...(19): siRNA sense strand
uagauggagccaccagaaa

SEQ ID NO: 835478 - RNA, 19 nt, Homo sapiens
  misc_RNA (1)...(19): siRNA sense strand
aggccucgcucuauaugga

SEQ ID NO: 835479 - RNA, 19 nt, Homo sapiens
  misc_RNA (1)...(19): siRNA sense strand
ccaaagccacucuggacau

SEQ ID NO: 835480 - RNA, 19 nt, Homo sapiens
  misc_RNA (1)...(19): siRNA sense strand
cagaaagagcaggcuauug

SEQ ID NO: 835481 - RNA, 19 nt, Homo sapiens
  misc_RNA (1)...(19): siRNA sense strand
ucagauggaagccgaaugg

SEQ ID NO: 835482 - RNA, 19 nt, Homo sapiens
  misc_RNA (1)...(19): siRNA sense strand
gagacuauagggcucagau

SEQ ID NO: 835483 - RNA, 19 nt, Homo sapiens
  misc_RNA (1)...(19): siRNA sense strand
acagaaagagcaggcuauu

SEQ ID NO: 835484 - RNA, 19 nt, Homo sapiens
  misc_RNA (1)...(19): siRNA sense strand
ccagaaagaagagccaaag

SEQ ID NO: 835485 - RNA, 19 nt, Homo sapiens
  misc_RNA (1)...(19): siRNA sense strand
gaagagacagcgaaagaaa

SEQ ID NO: 835486 - RNA, 19 nt, Homo sapiens
  misc_RNA (1)...(19): siRNA sense strand
ugacugaggugaugaugaa

SEQ ID NO: 835487 - RNA, 19 nt, Homo sapiens
  misc_RNA (1)...(19): siRNA sense strand
caagaugacugaggugaug

SEQ ID NO: 835488 - RNA, 19 nt, Homo sapiens
  misc_RNA (1)...(19): siRNA sense strand
gcgaagagacagcgaaaga

SEQ ID NO: 835489 - RNA, 19 nt, Homo sapiens
  misc_RNA (1)...(19): siRNA sense strand
ucccagacccgucagauuu

SEQ ID NO: 835490 - RNA, 19 nt, Homo sapiens
  misc_RNA (1)...(19): siRNA sense strand
gaucggccaagaugacuga

SEQ ID NO: 835491 - RNA, 19 nt, Homo sapiens
  misc_RNA (1)...(19): siRNA sense strand
cgaagagacagcgaaagaa

SEQ ID NO: 835492 - RNA, 19 nt, Homo sapiens
  misc_RNA (1)...(19): siRNA sense strand
ucugagaucggccaagaug

SEQ ID NO: 835493 - RNA, 19 nt, Homo sapiens
  misc_RNA (1)...(19): siRNA sense strand
agacagcgaaagaaaauaa

SEQ ID NO: 835494 - RNA, 19 nt, Homo sapiens
  misc_RNA (1)...(19): siRNA sense strand
gaccgucugcccuccauag

SEQ ID NO: 835495 - RNA, 19 nt, Homo sapiens
  misc_RNA (1)...(19): siRNA sense strand
uaacagaugcucaagauua

SEQ ID NO: 835496 - RNA, 19 nt, Homo sapiens
  misc_RNA (1)...(19): siRNA sense strand
ugacaaggcugccauaaga

SEQ ID NO: 835497 - RNA, 19 nt, Homo sapiens
  misc_RNA (1)...(19): siRNA sense strand
gccaagcgaugccauguua

SEQ ID NO: 835498 - RNA, 19 nt, Homo sapiens
  misc_RNA (1)...(19): siRNA sense strand
ggaagagccaguaagauua

SEQ ID NO: 835499 - RNA, 19 nt, Homo sapiens
  misc_RNA (1)...(19): siRNA sense strand
ugaagaagaugaagaugaa

SEQ ID NO: 835500 - RNA, 19 nt, Homo sapiens
  misc_RNA (1)...(19): siRNA sense strand
ggaagauucugagguuuaa

SEQ ID NO: 835501 - RNA, 19 nt, Homo sapiens
  misc_RNA (1)...(19): siRNA sense strand
cgacuaggcucaacuggaa

SEQ ID NO: 835502 - RNA, 19 nt, Homo sapiens
  misc_RNA (1)...(19): siRNA sense strand
gaacuagaacaacgcaaua

SEQ ID NO: 835503 - RNA, 19 nt, Homo sapiens
  misc_RNA (1)...(19): siRNA sense strand
gaagagagcaaacauuuua

SEQ ID NO: 835504 - RNA, 19 nt, Homo sapiens
  misc_RNA (1)...(19): siRNA sense strand
gaagccagccuaauucuga

SEQ ID NO: 835505 - RNA, 19 nt, Homo sapiens
  misc_RNA (1)...(19): siRNA sense strand
uaaaccagcucacagaaau

SEQ ID NO: 835506 - RNA, 19 nt, Homo sapiens
  misc_RNA (1)...(19): siRNA sense strand
gguaacagaugcucaagau

SEQ ID NO: 835507 - RNA, 19 nt, Homo sapiens
  misc_RNA (1)...(19): siRNA sense strand
gagaagagcugguuaaaag

SEQ ID NO: 835508 - RNA, 19 nt, Homo sapiens
  misc_RNA (1)...(19): siRNA sense strand
guaccgagaugaagaagau

SEQ ID NO: 835509 - RNA, 19 nt, Homo sapiens
  misc_RNA (1)...(19): siRNA sense strand
ccaggaagauucugagguu

SEQ ID NO: 835510 - RNA, 19 nt, Homo sapiens
  misc_RNA (1)...(19): siRNA sense strand
gaaauacggcaccagauug

SEQ ID NO: 835511 - RNA, 19 nt, Homo sapiens
  misc_RNA (1)...(19): siRNA sense strand
gagcaaaccuguccaucca

SEQ ID NO: 835512 - RNA, 19 nt, Homo sapiens
  misc_RNA (1)...(19): siRNA sense strand
gcgaugccauguuaaagaa

SEQ ID NO: 835513 - RNA, 19 nt, Homo sapiens
  misc_RNA (1)...(19): siRNA sense strand
ccaacaaagugaagaggaa

SEQ ID NO: 835514 - RNA, 19 nt, Homo sapiens
  misc_RNA (1)...(19): siRNA sense strand
gcaaggaggaguggaauga

SEQ ID NO: 835515 - RNA, 19 nt, Homo sapiens
  misc_RNA (1)...(19): siRNA sense strand
gaacugucccaagcaauaa

SEQ ID NO: 835516 - RNA, 19 nt, Homo sapiens
  misc_RNA (1)...(19): siRNA sense strand
gaagaugaaagcuaucaga

SEQ ID NO: 835517 - RNA, 19 nt, Homo sapiens
  misc_RNA (1)...(19): siRNA sense strand
gaagaggaccuaaagaaac

SEQ ID NO: 835518 - RNA, 19 nt, Homo sapiens
  misc_RNA (1)...(19): siRNA sense strand
cagaaggucccauucagua

SEQ ID NO: 835519 - RNA, 19 nt, Homo sapiens
  misc_RNA (1)...(19): siRNA sense strand
aauaaacagugguacauug

SEQ ID NO: 835520 - RNA, 19 nt, Homo sapiens
  misc_RNA (1)...(19): siRNA sense strand
caagagaagagcugguuaa

SEQ ID NO: 835521 - RNA, 19 nt, Homo sapiens
  misc_RNA (1)...(19): siRNA sense strand
cacaacaccuccuaccaaa

SEQ ID NO: 835522 - RNA, 19 nt, Homo sapiens
  misc_RNA (1)...(19): siRNA sense strand
gaagagcacguguucuaug

SEQ ID NO: 835523 - RNA, 19 nt, Homo sapiens
  misc_RNA (1)...(19): siRNA sense strand
cagaagaggaccuaaagaa

SEQ ID NO: 835524 - RNA, 19 nt, Homo sapiens
  misc_RNA (1)...(19): siRNA sense strand
gcucggaacuacuaccaau

SEQ ID NO: 835525 - RNA, 19 nt, Homo sapiens
  misc_RNA (1)...(19): siRNA sense strand
cuagaaagcucagucaaag

SEQ ID NO: 835526 - RNA, 19 nt, Homo sapiens
  misc_RNA (1)...(19): siRNA sense strand
gaacuacuaccaaugaucu

SEQ ID NO: 835527 - RNA, 19 nt, Homo sapiens
  misc_RNA (1)...(19): siRNA sense strand
gaaaauaucuaugcgaaag

SEQ ID NO: 835528 - RNA, 19 nt, Homo sapiens
  misc_RNA (1)...(19): siRNA sense strand
ggaagacccugagcaaggu

SEQ ID NO: 835529 - RNA, 19 nt, Homo sapiens
  misc_RNA (1)...(19): siRNA sense strand
ggaggaguggaaugaaaua

SEQ ID NO: 835530 - RNA, 19 nt, Homo sapiens
  misc_RNA (1)...(19): siRNA sense strand
ccucagucauuccuaaauu

SEQ ID NO: 835531 - RNA, 19 nt, Homo sapiens
  misc_RNA (1)...(19): siRNA sense strand
gaagagccaguaagauuag

SEQ ID NO: 835532 - RNA, 19 nt, Homo sapiens
  misc_RNA (1)...(19): siRNA sense strand
ugaacugucccaagcaaua

SEQ ID NO: 835533 - RNA, 19 nt, Homo sapiens
  misc_RNA (1)...(19): siRNA sense strand
gagagaagagcacguguuc

SEQ ID NO: 835534 - RNA, 19 nt, Homo sapiens
  misc_RNA (1)...(19): siRNA sense strand
ggaaagacacacuggcaau

SEQ ID NO: 835535 - RNA, 19 nt, Homo sapiens
  misc_RNA (1)...(19): siRNA sense strand
agaugaagaugaaagcuau

SEQ ID NO: 835536 - RNA, 19 nt, Homo sapiens
  misc_RNA (1)...(19): siRNA sense strand
gaugccauguuaaagaaug

SEQ ID NO: 835537 - RNA, 19 nt, Homo sapiens
  misc_RNA (1)...(19): siRNA sense strand
ugaaauacggcaccagauu

SEQ ID NO: 835538 - RNA, 19 nt, Homo sapiens
  misc_RNA (1)...(19): siRNA sense strand
uaagagaggcauuccauca

SEQ ID NO: 835539 - RNA, 19 nt, Homo sapiens
  misc_RNA (1)...(19): siRNA sense strand
ccaguaagauuagcaaguc

SEQ ID NO: 835540 - RNA, 19 nt, Homo sapiens
  misc_RNA (1)...(19): siRNA sense strand
gaaagacacacuggcaaug

SEQ ID NO: 835541 - RNA, 19 nt, Homo sapiens
  misc_RNA (1)...(19): siRNA sense strand
agauggagguucaugaaga

SEQ ID NO: 835542 - RNA, 19 nt, Homo sapiens
  misc_RNA (1)...(19): siRNA sense strand
aaacgucggcucacuagaa

SEQ ID NO: 835543 - RNA, 19 nt, Homo sapiens
  misc_RNA (1)...(19): siRNA sense strand
gagcaaguucucaggcuuu

SEQ ID NO: 835544 - RNA, 19 nt, Homo sapiens
  misc_RNA (1)...(19): siRNA sense strand
gcaaagacuguuaaucucu

SEQ ID NO: 835545 - RNA, 19 nt, Homo sapiens
  misc_RNA (1)...(19): siRNA sense strand
acacugauccggcgacuga

SEQ ID NO: 835546 - RNA, 19 nt, Homo sapiens
  misc_RNA (1)...(19): siRNA sense strand
cucagucauuccuaaauua

SEQ ID NO: 835547 - RNA, 19 nt, Homo sapiens
  misc_RNA (1)...(19): siRNA sense strand
caagcgaugccauguuaaa

SEQ ID NO: 835548 - RNA, 19 nt, Homo sapiens
  misc_RNA (1)...(19): siRNA sense strand
cuaccucagucauuccuaa

SEQ ID NO: 835549 - RNA, 19 nt, Homo sapiens
  misc_RNA (1)...(19): siRNA sense strand
agaagaggaccuaaagaaa

SEQ ID NO: 835550 - RNA, 19 nt, Homo sapiens
  misc_RNA (1)...(19): siRNA sense strand
cauagggaaugccagauca

SEQ ID NO: 835551 - RNA, 19 nt, Homo sapiens
  misc_RNA (1)...(19): siRNA sense strand
gcaauaaacagugguacau

SEQ ID NO: 835552 - RNA, 19 nt, Homo sapiens
  misc_RNA (1)...(19): siRNA sense strand
agaaauagcaacccuguca

SEQ ID NO: 835553 - RNA, 19 nt, Homo sapiens
  misc_RNA (1)...(19): siRNA sense strand
gcugaacugucccaagcaa

SEQ ID NO: 835554 - RNA, 19 nt, Homo sapiens
  misc_RNA (1)...(19): siRNA sense strand
cuagaacaacgcaauauau

SEQ ID NO: 835555 - RNA, 19 nt, Homo sapiens
  misc_RNA (1)...(19): siRNA sense strand
ucaaagaccaacaccagaa

SEQ ID NO: 835556 - RNA, 19 nt, Homo sapiens
  misc_RNA (1)...(19): siRNA sense strand
gcaccagauuggaaacaca

SEQ ID NO: 835557 - RNA, 19 nt, Homo sapiens
  misc_RNA (1)...(19): siRNA sense strand
aggaagagccaguaagauu

SEQ ID NO: 835558 - RNA, 19 nt, Homo sapiens
  misc_RNA (1)...(19): siRNA sense strand
gauggagguucaugaagag

SEQ ID NO: 835559 - RNA, 19 nt, Homo sapiens
  misc_RNA (1)...(19): siRNA sense strand
aaggaggaguggaaugaaa

SEQ ID NO: 835560 - RNA, 19 nt, Homo sapiens
  misc_RNA (1)...(19): siRNA sense strand
gaguugaaccugaauucuu

SEQ ID NO: 835561 - RNA, 19 nt, Homo sapiens
  misc_RNA (1)...(19): siRNA sense strand
ucccaucacuauugaaaug

SEQ ID NO: 835562 - RNA, 19 nt, Homo sapiens
  misc_RNA (1)...(19): siRNA sense strand
aacagaugcucaagauuau

SEQ ID NO: 835563 - RNA, 19 nt, Homo sapiens
  misc_RNA (1)...(19): siRNA sense strand
uaaauuaccacagugucua

SEQ ID NO: 835564 - RNA, 19 nt, Homo sapiens
  misc_RNA (1)...(19): siRNA sense strand
gcaagucuuaggaaagcua

SEQ ID NO: 835565 - RNA, 19 nt, Homo sapiens
  misc_RNA (1)...(19): siRNA sense strand
aguugaaccugaauucuug

SEQ ID NO: 835566 - RNA, 19 nt, Homo sapiens
  misc_RNA (1)...(19): siRNA sense strand
ggaagcaggagacacaaca

SEQ ID NO: 835567 - RNA, 19 nt, Homo sapiens
  misc_RNA (1)...(19): siRNA sense strand
gugguacauuguuaucaaa

SEQ ID NO: 835568 - RNA, 19 nt, Homo sapiens
  misc_RNA (1)...(19): siRNA sense strand
ggaccuaaagaaacgacua

SEQ ID NO: 835569 - RNA, 19 nt, Homo sapiens
  misc_RNA (1)...(19): siRNA sense strand
gaaagcuauuccagaagag

SEQ ID NO: 835570 - RNA, 19 nt, Homo sapiens
  misc_RNA (1)...(19): siRNA sense strand
caagugaagggcaagcaaa

SEQ ID NO: 835571 - RNA, 19 nt, Homo sapiens
  misc_RNA (1)...(19): siRNA sense strand
ccagugaaccagaguugaa

SEQ ID NO: 835572 - RNA, 19 nt, Homo sapiens
  misc_RNA (1)...(19): siRNA sense strand
gagaugaagaagaugaaga

SEQ ID NO: 835573 - RNA, 19 nt, Homo sapiens
  misc_RNA (1)...(19): siRNA sense strand
acaccuaccucagucauuc

SEQ ID NO: 835574 - RNA, 19 nt, Homo sapiens
  misc_RNA (1)...(19): siRNA sense strand
uccagacgaugaagaagaa

SEQ ID NO: 835575 - RNA, 19 nt, Homo sapiens
  misc_RNA (1)...(19): siRNA sense strand
ugaaaacagugacagcuuu

SEQ ID NO: 835576 - RNA, 19 nt, Homo sapiens
  misc_RNA (1)...(19): siRNA sense strand
ccacuucccaugacuccua

SEQ ID NO: 835577 - RNA, 19 nt, Homo sapiens
  misc_RNA (1)...(19): siRNA sense strand
caaguugugccagaaauug

SEQ ID NO: 835578 - RNA, 19 nt, Homo sapiens
  misc_RNA (1)...(19): siRNA sense strand
cagaugcucaagauuauga

SEQ ID NO: 835579 - RNA, 19 nt, Homo sapiens
  misc_RNA (1)...(19): siRNA sense strand
caauaaacagugguacauu

SEQ ID NO: 835580 - RNA, 19 nt, Homo sapiens
  misc_RNA (1)...(19): siRNA sense strand
cgagauggagguucaugaa

SEQ ID NO: 835581 - RNA, 19 nt, Homo sapiens
  misc_RNA (1)...(19): siRNA sense strand
aggaagauucugagguuua

SEQ ID NO: 835582 - RNA, 19 nt, Homo sapiens
  misc_RNA (1)...(19): siRNA sense strand
aaccagaguugaaccugaa

SEQ ID NO: 835583 - RNA, 19 nt, Homo sapiens
  misc_RNA (1)...(19): siRNA sense strand
caacaaagugaagaggaaa

SEQ ID NO: 835584 - RNA, 19 nt, Homo sapiens
  misc_RNA (1)...(19): siRNA sense strand
gaagaaaugacaccuaccu

SEQ ID NO: 835585 - RNA, 19 nt, Homo sapiens
  misc_RNA (1)...(19): siRNA sense strand
guagaggaagagccaguaa

SEQ ID NO: 835586 - RNA, 19 nt, Homo sapiens
  misc_RNA (1)...(19): siRNA sense strand
acacaacaccuccuaccaa

SEQ ID NO: 835587 - RNA, 19 nt, Homo sapiens
  misc_RNA (1)...(19): siRNA sense strand
ccaagagaagagcugguua

SEQ ID NO: 835588 - RNA, 19 nt, Homo sapiens
  misc_RNA (1)...(19): siRNA sense strand
aagacacacuggcaaugaa

SEQ ID NO: 835589 - RNA, 19 nt, Homo sapiens
  misc_RNA (1)...(19): siRNA sense strand
ugagcaagguggugaggau

SEQ ID NO: 835590 - RNA, 19 nt, Homo sapiens
  misc_RNA (1)...(19): siRNA sense strand
uaaaagagggguucuguug

SEQ ID NO: 835591 - RNA, 19 nt, Homo sapiens
  misc_RNA (1)...(19): siRNA sense strand
caucacuauugaaaugcua

SEQ ID NO: 835592 - RNA, 19 nt, Homo sapiens
  misc_RNA (1)...(19): siRNA sense strand
augaagagagcaaacauuu

SEQ ID NO: 835593 - RNA, 19 nt, Homo sapiens
  misc_RNA (1)...(19): siRNA sense strand
aaagacacacuggcaauga

SEQ ID NO: 835594 - RNA, 19 nt, Homo sapiens
  misc_RNA (1)...(19): siRNA sense strand
ccacagacccagugaacca

SEQ ID NO: 835595 - RNA, 19 nt, Homo sapiens
  misc_RNA (1)...(19): siRNA sense strand
gggaaugccugcagcuuga

SEQ ID NO: 835596 - RNA, 19 nt, Homo sapiens
  misc_RNA (1)...(19): siRNA sense strand
guuaucagcugcauguuug

SEQ ID NO: 835597 - RNA, 19 nt, Homo sapiens
  misc_RNA (1)...(19): siRNA sense strand
gagcacaccuauucagcaa

SEQ ID NO: 835598 - RNA, 19 nt, Homo sapiens
  misc_RNA (1)...(19): siRNA sense strand
gaaguuaucagcugcaugu

SEQ ID NO: 835599 - RNA, 19 nt, Homo sapiens
  misc_RNA (1)...(19): siRNA sense strand
gcuccuggauauucaauga

SEQ ID NO: 835600 - RNA, 19 nt, Homo sapiens
  misc_RNA (1)...(19): siRNA sense strand
aguagaaacugccaagaaa

SEQ ID NO: 835601 - RNA, 19 nt, Homo sapiens
  misc_RNA (1)...(19): siRNA sense strand
caagucaguuacggaauuu

SEQ ID NO: 835602 - RNA, 19 nt, Homo sapiens
  misc_RNA (1)...(19): siRNA sense strand
agauacagcuguugaggaa

SEQ ID NO: 835603 - RNA, 19 nt, Homo sapiens
  misc_RNA (1)...(19): siRNA sense strand
acaagucaguuacggaauu

SEQ ID NO: 835604 - RNA, 19 nt, Homo sapiens
  misc_RNA (1)...(19): siRNA sense strand
gcuuuaagaugaugagcaa

SEQ ID NO: 835605 - RNA, 19 nt, Homo sapiens
  misc_RNA (1)...(19): siRNA sense strand
caaugaagauacagcuguu

SEQ ID NO: 835606 - RNA, 19 nt, Homo sapiens
  misc_RNA (1)...(19): siRNA sense strand
ugaggaaccugucccugaa

SEQ ID NO: 835607 - RNA, 19 nt, Homo sapiens
  misc_RNA (1)...(19): siRNA sense strand
gagaaaagauccccaugga

SEQ ID NO: 835608 - RNA, 19 nt, Homo sapiens
  misc_RNA (1)...(19): siRNA sense strand
gaaccugucccugaaguug

SEQ ID NO: 835609 - RNA, 19 nt, Homo sapiens
  misc_RNA (1)...(19): siRNA sense strand
gaagggauaccaaagucuu

SEQ ID NO: 835610 - RNA, 19 nt, Homo sapiens
  misc_RNA (1)...(19): siRNA sense strand
gcacaccuauucagcaacu

SEQ ID NO: 835611 - RNA, 19 nt, Homo sapiens
  misc_RNA (1)...(19): siRNA sense strand
gugauaaugcaaugacaua

SEQ ID NO: 835612 - RNA, 19 nt, Homo sapiens
  misc_RNA (1)...(19): siRNA sense strand
ggccagauaccguguacua

SEQ ID NO: 835613 - RNA, 19 nt, Homo sapiens
  misc_RNA (1)...(19): siRNA sense strand
ccaaagucuuguauucaau

SEQ ID NO: 835614 - RNA, 19 nt, Homo sapiens
  misc_RNA (1)...(19): siRNA sense strand
gaugugugauaaugcaaug

SEQ ID NO: 835615 - RNA, 19 nt, Homo sapiens
  misc_RNA (1)...(19): siRNA sense strand
cacgcaggcuuuaagauga

SEQ ID NO: 835616 - RNA, 19 nt, Homo sapiens
  misc_RNA (1)...(19): siRNA sense strand
aaugagagcacaccuauuc

SEQ ID NO: 835617 - RNA, 19 nt, Homo sapiens
  misc_RNA (1)...(19): siRNA sense strand
ugcaauugcuccuggauau

SEQ ID NO: 835618 - RNA, 19 nt, Homo sapiens
  misc_RNA (1)...(19): siRNA sense strand
ucaagcugaugugugauaa

SEQ ID NO: 835619 - RNA, 19 nt, Homo sapiens
  misc_RNA (1)...(19): siRNA sense strand
aagcugaugugugauaaug

SEQ ID NO: 835620 - RNA, 19 nt, Homo sapiens
  misc_RNA (1)...(19): siRNA sense strand
gauaaugcaaugacauaca

SEQ ID NO: 835621 - RNA, 19 nt, Homo sapiens
  misc_RNA (1)...(19): siRNA sense strand
gcugaugugugauaaugca

SEQ ID NO: 835622 - RNA, 19 nt, Homo sapiens
  misc_RNA (1)...(19): siRNA sense strand
uccuggauauucaaugaua

SEQ ID NO: 835623 - RNA, 19 nt, Homo sapiens
  misc_RNA (1)...(19): siRNA sense strand
ucacgcaggcuuuaagaug

SEQ ID NO: 835624 - RNA, 19 nt, Homo sapiens
  misc_RNA (1)...(19): siRNA sense strand
gcaauugcuccuggauauu

SEQ ID NO: 835625 - RNA, 19 nt, Homo sapiens
  misc_RNA (1)...(19): siRNA sense strand
ggagcacgcagcugacgaa

SEQ ID NO: 835626 - RNA, 19 nt, Homo sapiens
  misc_RNA (1)...(19): siRNA sense strand
gaauuuaaggcagauuuca

SEQ ID NO: 835627 - RNA, 19 nt, Homo sapiens
  misc_RNA (1)...(19): siRNA sense strand
ggaauuuaaggcagauuuc

SEQ ID NO: 835628 - RNA, 19 nt, Homo sapiens
  misc_RNA (1)...(19): siRNA sense strand
accaaagucuuguauucaa

SEQ ID NO: 835629 - RNA, 19 nt, Homo sapiens
  misc_RNA (1)...(19): siRNA sense strand
guagaaacugccaagaaau

SEQ ID NO: 835630 - RNA, 19 nt, Homo sapiens
  misc_RNA (1)...(19): siRNA sense strand
gaaaaugagagcacaccua

SEQ ID NO: 835631 - RNA, 19 nt, Homo sapiens
  misc_RNA (1)...(19): siRNA sense strand
acuacaaguuggcgaagaa

SEQ ID NO: 835632 - RNA, 19 nt, Homo sapiens
  misc_RNA (1)...(19): siRNA sense strand
gcaaacaggcagcucuuuu

SEQ ID NO: 835633 - RNA, 19 nt, Homo sapiens
  misc_RNA (1)...(19): siRNA sense strand
caauugcuccuggauauuc

SEQ ID NO: 835634 - RNA, 19 nt, Homo sapiens
  misc_RNA (1)...(19): siRNA sense strand
uagaaacugccaagaaauc

SEQ ID NO: 835635 - RNA, 19 nt, Homo sapiens
  misc_RNA (1)...(19): siRNA sense strand
ccuggauauucaaugauaa

SEQ ID NO: 835636 - RNA, 19 nt, Homo sapiens
  misc_RNA (1)...(19): siRNA sense strand
gcagauuucaagcugaugu

SEQ ID NO: 835637 - RNA, 19 nt, Homo sapiens
  misc_RNA (1)...(19): siRNA sense strand
cccugaaguuguaccagua

SEQ ID NO: 835638 - RNA, 19 nt, Homo sapiens
  misc_RNA (1)...(19): siRNA sense strand
auuucaagcugauguguga

SEQ ID NO: 835639 - RNA, 19 nt, Homo sapiens
  misc_RNA (1)...(19): siRNA sense strand
gagaaguuaucagcugcau

SEQ ID NO: 835640 - RNA, 19 nt, Homo sapiens
  misc_RNA (1)...(19): siRNA sense strand
gggauaccaaagucuugua

SEQ ID NO: 835641 - RNA, 19 nt, Homo sapiens
  misc_RNA (1)...(19): siRNA sense strand
uuaagaugaugagcaaaca

SEQ ID NO: 835642 - RNA, 19 nt, Homo sapiens
  misc_RNA (1)...(19): siRNA sense strand
uccgccagcuucagagaaa

SEQ ID NO: 835643 - RNA, 19 nt, Homo sapiens
  misc_RNA (1)...(19): siRNA sense strand
aaguagaaacugccaagaa

SEQ ID NO: 835644 - RNA, 19 nt, Homo sapiens
  misc_RNA (1)...(19): siRNA sense strand
gaagcucgggacaggauca

SEQ ID NO: 835645 - RNA, 19 nt, Homo sapiens
  misc_RNA (1)...(19): siRNA sense strand
cggaauuuaaggcagauuu

SEQ ID NO: 835646 - RNA, 19 nt, Homo sapiens
  misc_RNA (1)...(19): siRNA sense strand
guuugagccugaagggaau

SEQ ID NO: 835647 - RNA, 19 nt, Homo sapiens
  misc_RNA (1)...(19): siRNA sense strand
agucaguuacggaauuuaa

SEQ ID NO: 835648 - RNA, 19 nt, Homo sapiens
  misc_RNA (1)...(19): siRNA sense strand
gauccuucacgcaggcuuu

SEQ ID NO: 835649 - RNA, 19 nt, Homo sapiens
  misc_RNA (1)...(19): siRNA sense strand
ggaaccugucccugaaguu

SEQ ID NO: 835650 - RNA, 19 nt, Homo sapiens
  misc_RNA (1)...(19): siRNA sense strand
aaacugccaagaaauccaa

SEQ ID NO: 835651 - RNA, 19 nt, Homo sapiens
  misc_RNA (1)...(19): siRNA sense strand
gaaacugccaagaaaucca

SEQ ID NO: 835652 - RNA, 19 nt, Homo sapiens
  misc_RNA (1)...(19): siRNA sense strand
gcaacuccuggaucacuuc

SEQ ID NO: 835653 - RNA, 19 nt, Homo sapiens
  misc_RNA (1)...(19): siRNA sense strand
aaagccgaguagagaaguu

SEQ ID NO: 835654 - RNA, 19 nt, Homo sapiens
  misc_RNA (1)...(19): siRNA sense strand
uaaauugucagccgaaaau

SEQ ID NO: 835655 - RNA, 19 nt, Homo sapiens
  misc_RNA (1)...(19): siRNA sense strand
uaccaaagucuuguauuca

SEQ ID NO: 835656 - RNA, 19 nt, Homo sapiens
  misc_RNA (1)...(19): siRNA sense strand
aggcagauuucaagcugau

SEQ ID NO: 835657 - RNA, 19 nt, Homo sapiens
  misc_RNA (1)...(19): siRNA sense strand
acaaguuggcgaagaagau

SEQ ID NO: 835658 - RNA, 19 nt, Homo sapiens
  misc_RNA (1)...(19): siRNA sense strand
gacauacaauaggccagau

SEQ ID NO: 835659 - RNA, 19 nt, Homo sapiens
  misc_RNA (1)...(19): siRNA sense strand
uucagcaacuccuggauca

SEQ ID NO: 835660 - RNA, 19 nt, Homo sapiens
  misc_RNA (1)...(19): siRNA sense strand
guacauauuugucuccuua

SEQ ID NO: 835661 - RNA, 19 nt, Homo sapiens
  misc_RNA (1)...(19): siRNA sense strand
gaaauacuauaccaaggaa

SEQ ID NO: 835662 - RNA, 19 nt, Homo sapiens
  misc_RNA (1)...(19): siRNA sense strand
ggcaagacauggaaggaua

SEQ ID NO: 835663 - RNA, 19 nt, Homo sapiens
  misc_RNA (1)...(19): siRNA sense strand
gaacagaguaccugaagga

SEQ ID NO: 835664 - RNA, 19 nt, Homo sapiens
  misc_RNA (1)...(19): siRNA sense strand
cagcuaacauagugaaauu

SEQ ID NO: 835665 - RNA, 19 nt, Homo sapiens
  misc_RNA (1)...(19): siRNA sense strand
uuacagaaguugcuugaga

SEQ ID NO: 835666 - RNA, 19 nt, Homo sapiens
  misc_RNA (1)...(19): siRNA sense strand
agaaacuguuggaaucuua

SEQ ID NO: 835667 - RNA, 19 nt, Homo sapiens
  misc_RNA (1)...(19): siRNA sense strand
guuggaaucuuacauaaag

SEQ ID NO: 835668 - RNA, 19 nt, Homo sapiens
  misc_RNA (1)...(19): siRNA sense strand
acacaaagccugcgaaagu

SEQ ID NO: 835669 - RNA, 19 nt, Homo sapiens
  misc_RNA (1)...(19): siRNA sense strand
ggaaggauauaguaguucu

SEQ ID NO: 835670 - RNA, 19 nt, Homo sapiens
  misc_RNA (1)...(19): siRNA sense strand
gauggugccucuuuagcaa

SEQ ID NO: 835671 - RNA, 19 nt, Homo sapiens
  misc_RNA (1)...(19): siRNA sense strand
gaucauagcaacagucaca

SEQ ID NO: 835672 - RNA, 19 nt, Homo sapiens
  misc_RNA (1)...(19): siRNA sense strand
gcuuacagcuaacauagug

SEQ ID NO: 835673 - RNA, 19 nt, Homo sapiens
  misc_RNA (1)...(19): siRNA sense strand
ggacacccauaauacugaa

SEQ ID NO: 835674 - RNA, 19 nt, Homo sapiens
  misc_RNA (1)...(19): siRNA sense strand
gacagaaucccaaacaguu

SEQ ID NO: 835675 - RNA, 19 nt, Homo sapiens
  misc_RNA (1)...(19): siRNA sense strand
gaagaaggcaagacaugga

SEQ ID NO: 835676 - RNA, 19 nt, Homo sapiens
  misc_RNA (1)...(19): siRNA sense strand
acagacagguacauauuug

SEQ ID NO: 835677 - RNA, 19 nt, Homo sapiens
  misc_RNA (1)...(19): siRNA sense strand
gugauaagaacgacuguaa

SEQ ID NO: 835678 - RNA, 19 nt, Homo sapiens
  misc_RNA (1)...(19): siRNA sense strand
gccaaacgcccugaucaua

SEQ ID NO: 835679 - RNA, 19 nt, Homo sapiens
  misc_RNA (1)...(19): siRNA sense strand
ucacagacagguacauauu

SEQ ID NO: 835680 - RNA, 19 nt, Homo sapiens
  misc_RNA (1)...(19): siRNA sense strand
agaaguugcuugagaaugg

SEQ ID NO: 835681 - RNA, 19 nt, Homo sapiens
  misc_RNA (1)...(19): siRNA sense strand
acacaaagaucucuauucc

SEQ ID NO: 835682 - RNA, 19 nt, Homo sapiens
  misc_RNA (1)...(19): siRNA sense strand
ggucacaaguacaauucaa

SEQ ID NO: 835683 - RNA, 19 nt, Homo sapiens
  misc_RNA (1)...(19): siRNA sense strand
gaagagggagagcaaacuu

SEQ ID NO: 835684 - RNA, 19 nt, Homo sapiens
  misc_RNA (1)...(19): siRNA sense strand
ggauauaguaguucugguu

SEQ ID NO: 835685 - RNA, 19 nt, Homo sapiens
  misc_RNA (1)...(19): siRNA sense strand
gucagaaacuguuggaauc

SEQ ID NO: 835686 - RNA, 19 nt, Homo sapiens
  misc_RNA (1)...(19): siRNA sense strand
ccaagagucucccuguaca

SEQ ID NO: 835687 - RNA, 19 nt, Homo sapiens
  misc_RNA (1)...(19): siRNA sense strand
ucagaaaacuggauuuguu

SEQ ID NO: 835688 - RNA, 19 nt, Homo sapiens
  misc_RNA (1)...(19): siRNA sense strand
aaagucaagucucagaaau

SEQ ID NO: 835689 - RNA, 19 nt, Homo sapiens
  misc_RNA (1)...(19): siRNA sense strand
gagcagaccgcccuucauc

SEQ ID NO: 835690 - RNA, 19 nt, Homo sapiens
  misc_RNA (1)...(19): siRNA sense strand
uacauaaagucaagucuca

SEQ ID NO: 835691 - RNA, 19 nt, Homo sapiens
  misc_RNA (1)...(19): siRNA sense strand
cagaguaccugaaggaaaa

SEQ ID NO: 835692 - RNA, 19 nt, Homo sapiens
  misc_RNA (1)...(19): siRNA sense strand
gacauggaaggauauagua

SEQ ID NO: 835693 - RNA, 19 nt, Homo sapiens
  misc_RNA (1)...(19): siRNA sense strand
caacgaagaaggcaagaca

SEQ ID NO: 835694 - RNA, 19 nt, Homo sapiens
  misc_RNA (1)...(19): siRNA sense strand
uaaagucaagucucagaaa

SEQ ID NO: 835695 - RNA, 19 nt, Homo sapiens
  misc_RNA (1)...(19): siRNA sense strand
uacagaaguugcuugagaa

SEQ ID NO: 835696 - RNA, 19 nt, Homo sapiens
  misc_RNA (1)...(19): siRNA sense strand
ggccugaggucacaaguac

SEQ ID NO: 835697 - RNA, 19 nt, Homo sapiens
  misc_RNA (1)...(19): siRNA sense strand
gauaagaacgacuguaaaa

SEQ ID NO: 835698 - RNA, 19 nt, Homo sapiens
  misc_RNA (1)...(19): siRNA sense strand
gaaaauacaaguguuggua

SEQ ID NO: 835699 - RNA, 19 nt, Homo sapiens
  misc_RNA (1)...(19): siRNA sense strand
agaaugguguggaggagaa

SEQ ID NO: 835700 - RNA, 19 nt, Homo sapiens
  misc_RNA (1)...(19): siRNA sense strand
caauccaucuucugcugaa

SEQ ID NO: 835701 - RNA, 19 nt, Homo sapiens
  misc_RNA (1)...(19): siRNA sense strand
gaggaaccacugaagcaaa

SEQ ID NO: 835702 - RNA, 19 nt, Homo sapiens
  misc_RNA (1)...(19): siRNA sense strand
gcuugagaauggugacuga

SEQ ID NO: 835703 - RNA, 19 nt, Homo sapiens
  misc_RNA (1)...(19): siRNA sense strand
guccgaugcuucaccauau

SEQ ID NO: 835704 - RNA, 19 nt, Homo sapiens
  misc_RNA (1)...(19): siRNA sense strand
caaaacugcucuucuagug

SEQ ID NO: 835705 - RNA, 19 nt, Homo sapiens
  misc_RNA (1)...(19): siRNA sense strand
cgguaacccuaauaaagaa

SEQ ID NO: 835706 - RNA, 19 nt, Homo sapiens
  misc_RNA (1)...(19): siRNA sense strand
cccaaacaguucugaaugu

SEQ ID NO: 835707 - RNA, 19 nt, Homo sapiens
  misc_RNA (1)...(19): siRNA sense strand
cgaaagugcucgggaagag

SEQ ID NO: 835708 - RNA, 19 nt, Homo sapiens
  misc_RNA (1)...(19): siRNA sense strand
caacagucacagacaggua

SEQ ID NO: 835709 - RNA, 19 nt, Homo sapiens
  misc_RNA (1)...(19): siRNA sense strand
gcaagacauggaaggauau

SEQ ID NO: 835710 - RNA, 19 nt, Homo sapiens
  misc_RNA (1)...(19): siRNA sense strand
ucagaaauguccgaugcuu

SEQ ID NO: 835711 - RNA, 19 nt, Homo sapiens
  misc_RNA (1)...(19): siRNA sense strand
gaaaaucauuagccuaugg

SEQ ID NO: 835712 - RNA, 19 nt, Homo sapiens
  misc_RNA (1)...(19): siRNA sense strand
ccaaacgcccugaucauag

SEQ ID NO: 835713 - RNA, 19 nt, Homo sapiens
  misc_RNA (1)...(19): siRNA sense strand
gaacaggcagcaccaucug

SEQ ID NO: 835714 - RNA, 19 nt, Homo sapiens
  misc_RNA (1)...(19): siRNA sense strand
cuacaugagauacagaauu

SEQ ID NO: 835715 - RNA, 19 nt, Homo sapiens
  misc_RNA (1)...(19): siRNA sense strand
cuaaucaucucgaccuucu

SEQ ID NO: 835716 - RNA, 19 nt, Homo sapiens
  misc_RNA (1)...(19): siRNA sense strand
gcuucaccauauucuuaua

SEQ ID NO: 835717 - RNA, 19 nt, Homo sapiens
  misc_RNA (1)...(19): siRNA sense strand
ccaaacaguucugaauguc

SEQ ID NO: 835718 - RNA, 19 nt, Homo sapiens
  misc_RNA (1)...(19): siRNA sense strand
agucaagucucagaaaugu

SEQ ID NO: 835719 - RNA, 19 nt, Homo sapiens
  misc_RNA (1)...(19): siRNA sense strand
caaggccaauaugcacuuu

SEQ ID NO: 835720 - RNA, 19 nt, Homo sapiens
  misc_RNA (1)...(19): siRNA sense strand
cacaaagccugcgaaagug

SEQ ID NO: 835721 - RNA, 19 nt, Homo sapiens
  misc_RNA (1)...(19): siRNA sense strand
agaaauguccgaugcuuca

SEQ ID NO: 835722 - RNA, 19 nt, Homo sapiens
  misc_RNA (1)...(19): siRNA sense strand
cagaaacuguuggaaucuu

SEQ ID NO: 835723 - RNA, 19 nt, Homo sapiens
  misc_RNA (1)...(19): siRNA sense strand
caucucugccucuggauuu

SEQ ID NO: 835724 - RNA, 19 nt, Homo sapiens
  misc_RNA (1)...(19): siRNA sense strand
gagauucaacuuacaaacu

SEQ ID NO: 835725 - RNA, 19 nt, Homo sapiens
  misc_RNA (1)...(19): siRNA sense strand
caaacgcccugaucauagc

SEQ ID NO: 835726 - RNA, 19 nt, Homo sapiens
  misc_RNA (1)...(19): siRNA sense strand
ucgguaacccuaauaaaga

SEQ ID NO: 835727 - RNA, 19 nt, Homo sapiens
  misc_RNA (1)...(19): siRNA sense strand
aaaaugacccuaagacuga

SEQ ID NO: 835728 - RNA, 19 nt, Homo sapiens
  misc_RNA (1)...(19): siRNA sense strand
ucacaaguacaauucaaug

SEQ ID NO: 835729 - RNA, 19 nt, Homo sapiens
  misc_RNA (1)...(19): siRNA sense strand
ccaauaugcacuuucacaa

SEQ ID NO: 835730 - RNA, 19 nt, Homo sapiens
  misc_RNA (1)...(19): siRNA sense strand
cgacagaaucccaaacagu

SEQ ID NO: 835731 - RNA, 19 nt, Homo sapiens
  misc_RNA (1)...(19): siRNA sense strand
caacggaggaaccacugaa

SEQ ID NO: 835732 - RNA, 19 nt, Homo sapiens
  misc_RNA (1)...(19): siRNA sense strand
gacacaaagaucucuauuc

SEQ ID NO: 835733 - RNA, 19 nt, Homo sapiens
  misc_RNA (1)...(19): siRNA sense strand
acaauucaauguggagguu

SEQ ID NO: 835734 - RNA, 19 nt, Homo sapiens
  misc_RNA (1)...(19): siRNA sense strand
caagacauggaaggauaua

SEQ ID NO: 835735 - RNA, 19 nt, Homo sapiens
  misc_RNA (1)...(19): siRNA sense strand
aaugaugaauucucagauc

SEQ ID NO: 835736 - RNA, 19 nt, Homo sapiens
  misc_RNA (1)...(19): siRNA sense strand
gccaguacaaggccaauau

SEQ ID NO: 835737 - RNA, 19 nt, Homo sapiens
  misc_RNA (1)...(19): siRNA sense strand
gaccagaagaaaaucauua

SEQ ID NO: 835738 - RNA, 19 nt, Homo sapiens
  misc_RNA (1)...(19): siRNA sense strand
gaaguugcuugagaauggu

SEQ ID NO: 835739 - RNA, 19 nt, Homo sapiens
  misc_RNA (1)...(19): siRNA sense strand
gaggucacaaguacaauuc

SEQ ID NO: 835740 - RNA, 19 nt, Homo sapiens
  misc_RNA (1)...(19): siRNA sense strand
cauaaagucaagucucaga

SEQ ID NO: 835741 - RNA, 19 nt, Homo sapiens
  misc_RNA (1)...(19): siRNA sense strand
ccagagauucaacuuacaa

SEQ ID NO: 835742 - RNA, 19 nt, Homo sapiens
  misc_RNA (1)...(19): siRNA sense strand
cacagacagguacauauuu

SEQ ID NO: 835743 - RNA, 19 nt, Homo sapiens
  misc_RNA (1)...(19): siRNA sense strand
agaaauacuauaccaagga

SEQ ID NO: 835744 - RNA, 19 nt, Homo sapiens
  misc_RNA (1)...(19): siRNA sense strand
ggaggaaccacugaagcaa

SEQ ID NO: 835745 - RNA, 19 nt, Homo sapiens
  misc_RNA (1)...(19): siRNA sense strand
gagauuuccaugcgacaga

SEQ ID NO: 835746 - RNA, 19 nt, Homo sapiens
  misc_RNA (1)...(19): siRNA sense strand
gcagaccgcccuucaucuc

SEQ ID NO: 835747 - RNA, 19 nt, Homo sapiens
  misc_RNA (1)...(19): siRNA sense strand
cuguuggaaucuuacauaa

SEQ ID NO: 835748 - RNA, 19 nt, Homo sapiens
  misc_RNA (1)...(19): siRNA sense strand
ggagugguucaacgaagaa

SEQ ID NO: 835749 - RNA, 19 nt, Homo sapiens
  misc_RNA (1)...(19): siRNA sense strand
uggagugguucaacgaaga

SEQ ID NO: 835750 - RNA, 19 nt, Homo sapiens
  misc_RNA (1)...(19): siRNA sense strand
ccucuggauuucaaugaug

SEQ ID NO: 835751 - RNA, 19 nt, Homo sapiens
  misc_RNA (1)...(19): siRNA sense strand
caauaugcacuuucacaag

SEQ ID NO: 835752 - RNA, 19 nt, Homo sapiens
  misc_RNA (1)...(19): siRNA sense strand
ucaaugaugaauucucaga

SEQ ID NO: 835753 - RNA, 19 nt, Homo sapiens
  misc_RNA (1)...(19): siRNA sense strand
aaccaaaacugcucuucua

SEQ ID NO: 835754 - RNA, 19 nt, Homo sapiens
  misc_RNA (1)...(19): siRNA sense strand
ucauuagccuauggucaaa

SEQ ID NO: 835755 - RNA, 19 nt, Homo sapiens
  misc_RNA (1)...(19): siRNA sense strand
cuccagagauucaacuuac

SEQ ID NO: 835756 - RNA, 19 nt, Homo sapiens
  misc_RNA (1)...(19): siRNA sense strand
augcuucaccauauucuua

SEQ ID NO: 835757 - RNA, 19 nt, Homo sapiens
  misc_RNA (1)...(19): siRNA sense strand
ugauaagaacgacuguaaa

SEQ ID NO: 835758 - RNA, 19 nt, Homo sapiens
  misc_RNA (1)...(19): siRNA sense strand
caucuggccugaggucaca

SEQ ID NO: 835759 - RNA, 19 nt, Homo sapiens
  misc_RNA (1)...(19): siRNA sense strand
caucucgaccuucuacaug

SEQ ID NO: 835760 - RNA, 19 nt, Homo sapiens
  misc_RNA (1)...(19): siRNA sense strand
gcucaaagcuggcagagau

SEQ ID NO: 835761 - RNA, 19 nt, Homo sapiens
  misc_RNA (1)...(19): siRNA sense strand
gcacaucccugaaguguac

SEQ ID NO: 835762 - RNA, 19 nt, Homo sapiens
  misc_RNA (1)...(19): siRNA sense strand
ggaaggcgguccuagacaa

SEQ ID NO: 835763 - RNA, 19 nt, Homo sapiens
  misc_RNA (1)...(19): siRNA sense strand
ggagcaggaugcauauuau

SEQ ID NO: 835764 - RNA, 19 nt, Homo sapiens
  misc_RNA (1)...(19): siRNA sense strand
ggacaugccacagaucuuu

SEQ ID NO: 835765 - RNA, 19 nt, Homo sapiens
  misc_RNA (1)...(19): siRNA sense strand
ucaagucuguugucaaguu

SEQ ID NO: 835766 - RNA, 19 nt, Homo sapiens
  misc_RNA (1)...(19): siRNA sense strand
auucagagguccuguguuu

SEQ ID NO: 835767 - RNA, 19 nt, Homo sapiens
  misc_RNA (1)...(19): siRNA sense strand
gccuggagauggacauuaa

SEQ ID NO: 835768 - RNA, 19 nt, Homo sapiens
  misc_RNA (1)...(19): siRNA sense strand
guucaagucuguugucaag

SEQ ID NO: 835769 - RNA, 19 nt, Homo sapiens
  misc_RNA (1)...(19): siRNA sense strand
auaagaagauguucaaguc

SEQ ID NO: 835770 - RNA, 19 nt, Homo sapiens
  misc_RNA (1)...(19): siRNA sense strand
caagucuguugucaaguuu

SEQ ID NO: 835771 - RNA, 19 nt, Homo sapiens
  misc_RNA (1)...(19): siRNA sense strand
gauaagaagauguucaagu

SEQ ID NO: 835772 - RNA, 19 nt, Homo sapiens
  misc_RNA (1)...(19): siRNA sense strand
gguacaagguauucuccaa

SEQ ID NO: 835773 - RNA, 19 nt, Homo sapiens
  misc_RNA (1)...(19): siRNA sense strand
gcaggaugcauauuauuca

SEQ ID NO: 835774 - RNA, 19 nt, Homo sapiens
  misc_RNA (1)...(19): siRNA sense strand
gaggcucaguucuacgaaa

SEQ ID NO: 835775 - RNA, 19 nt, Homo sapiens
  misc_RNA (1)...(19): siRNA sense strand
gagcaggaugcauauuauu

SEQ ID NO: 835776 - RNA, 19 nt, Homo sapiens
  misc_RNA (1)...(19): siRNA sense strand
gcgagaaccuggagcucau

SEQ ID NO: 835777 - RNA, 19 nt, Homo sapiens
  misc_RNA (1)...(19): siRNA sense strand
ucuacgaaaucaagccuuu

SEQ ID NO: 835778 - RNA, 19 nt, Homo sapiens
  misc_RNA (1)...(19): siRNA sense strand
gcucaguucuacgaaauca

SEQ ID NO: 835779 - RNA, 19 nt, Homo sapiens
  misc_RNA (1)...(19): siRNA sense strand
caagguauucuccaaguuc

SEQ ID NO: 835780 - RNA, 19 nt, Homo sapiens
  misc_RNA (1)...(19): siRNA sense strand
ucagacccauccuggacua

SEQ ID NO: 835781 - RNA, 19 nt, Homo sapiens
  misc_RNA (1)...(19): siRNA sense strand
aggagcaggaugcauauua

SEQ ID NO: 835782 - RNA, 19 nt, Homo sapiens
  misc_RNA (1)...(19): siRNA sense strand
cugaggagcaggaugcaua

SEQ ID NO: 835783 - RNA, 19 nt, Homo sapiens
  misc_RNA (1)...(19): siRNA sense strand
agaagauguucaagucugu

SEQ ID NO: 835784 - RNA, 19 nt, Homo sapiens
  misc_RNA (1)...(19): siRNA sense strand
acaagguauucuccaaguu

SEQ ID NO: 835785 - RNA, 19 nt, Homo sapiens
  misc_RNA (1)...(19): siRNA sense strand
uacaagguauucuccaagu

SEQ ID NO: 835786 - RNA, 19 nt, Homo sapiens
  misc_RNA (1)...(19): siRNA sense strand
aaucaagccuuuggucaag

SEQ ID NO: 835787 - RNA, 19 nt, Homo sapiens
  misc_RNA (1)...(19): siRNA sense strand
gcacgugcagaagccauaa

SEQ ID NO: 835788 - RNA, 19 nt, Homo sapiens
  misc_RNA (1)...(19): siRNA sense strand
gaaguuuccgggcucaaag

SEQ ID NO: 835789 - RNA, 19 nt, Homo sapiens
  misc_RNA (1)...(19): siRNA sense strand
agacaacagcgaccucaug

SEQ ID NO: 835790 - RNA, 19 nt, Homo sapiens
  misc_RNA (1)...(19): siRNA sense strand
uggaggacaugccacagau

SEQ ID NO: 835791 - RNA, 19 nt, Homo sapiens
  misc_RNA (1)...(19): siRNA sense strand
ggaaguccagcgugcuugu

SEQ ID NO: 835792 - RNA, 19 nt, Homo sapiens
  misc_RNA (1)...(19): siRNA sense strand
aaaucaagccuuuggucaa

SEQ ID NO: 835793 - RNA, 19 nt, Homo sapiens
  misc_RNA (1)...(19): siRNA sense strand
cuacuguuguggagcugaa

SEQ ID NO: 835794 - RNA, 19 nt, Homo sapiens
  misc_RNA (1)...(19): siRNA sense strand
gaggacaugccacagaucu

SEQ ID NO: 835795 - RNA, 19 nt, Homo sapiens
  misc_RNA (1)...(19): siRNA sense strand
ucaagcugcuggaggacau

SEQ ID NO: 835796 - RNA, 19 nt, Homo sapiens
  misc_RNA (1)...(19): siRNA sense strand
cagcacaucccugaagugu

SEQ ID NO: 835797 - RNA, 19 nt, Homo sapiens
  misc_RNA (1)...(19): siRNA sense strand
gaagauguucaagucuguu

SEQ ID NO: 835798 - RNA, 19 nt, Homo sapiens
  misc_RNA (1)...(19): siRNA sense strand
caaaagaaacgaauuccau

SEQ ID NO: 835799 - RNA, 19 nt, Homo sapiens
  misc_RNA (1)...(19): siRNA sense strand
aggcucaguucuacgaaau

SEQ ID NO: 835800 - RNA, 19 nt, Homo sapiens
  misc_RNA (1)...(19): siRNA sense strand
uggguacccugaggaaguu

SEQ ID NO: 835801 - RNA, 19 nt, Homo sapiens
  misc_RNA (1)...(19): siRNA sense strand
cacagcacaucccugaagu

SEQ ID NO: 835802 - RNA, 19 nt, Homo sapiens
  misc_RNA (1)...(19): siRNA sense strand
gacaugccacagaucuuug

SEQ ID NO: 835803 - RNA, 19 nt, Homo sapiens
  misc_RNA (1)...(19): siRNA sense strand
caaagcuggcagagauguu

SEQ ID NO: 835804 - RNA, 19 nt, Homo sapiens
  misc_RNA (1)...(19): siRNA sense strand
acacagcacaucccugaag

SEQ ID NO: 835805 - RNA, 19 nt, Homo sapiens
  misc_RNA (1)...(19): siRNA sense strand
caaggaagaggaaagacaa

SEQ ID NO: 835806 - RNA, 19 nt, Homo sapiens
  misc_RNA (1)...(19): siRNA sense strand
gaaacaaggaagaggaaag

SEQ ID NO: 835807 - RNA, 19 nt, Homo sapiens
  misc_RNA (1)...(19): siRNA sense strand
gaagcggacccagcagauu

SEQ ID NO: 835808 - RNA, 19 nt, Homo sapiens
  misc_RNA (1)...(19): siRNA sense strand
aaacaaggaagaggaaaga

SEQ ID NO: 835809 - RNA, 19 nt, Homo sapiens
  misc_RNA (1)...(19): siRNA sense strand
ggagcugcguguggaguug

SEQ ID NO: 835810 - RNA, 19 nt, Homo sapiens
  misc_RNA (1)...(19): siRNA sense strand
cgacguggccguguacuuc

SEQ ID NO: 835811 - RNA, 19 nt, Homo sapiens
  misc_RNA (1)...(19): siRNA sense strand
ggaagaggaaagacaaagg

SEQ ID NO: 835812 - RNA, 19 nt, Homo sapiens
  misc_RNA (1)...(19): siRNA sense strand
cagaaacaaggaagaggaa

SEQ ID NO: 835813 - RNA, 19 nt, Homo sapiens
  misc_RNA (1)...(19): siRNA sense strand
ccagcagauuccagaaaca

SEQ ID NO: 835814 - RNA, 19 nt, Homo sapiens
  misc_RNA (1)...(19): siRNA sense strand
cagcagauuccagaaacaa

SEQ ID NO: 835815 - RNA, 19 nt, Homo sapiens
  misc_RNA (1)...(19): siRNA sense strand
gaggagaaggccgaacugu

SEQ ID NO: 835816 - RNA, 19 nt, Homo sapiens
  misc_RNA (1)...(19): siRNA sense strand
ggaggagaaggccgaacug

SEQ ID NO: 835817 - RNA, 19 nt, Homo sapiens
  misc_RNA (1)...(19): siRNA sense strand
acaaggaagaggaaagaca

SEQ ID NO: 835818 - RNA, 19 nt, Homo sapiens
  misc_RNA (1)...(19): siRNA sense strand
gaccaggagugucagguua

SEQ ID NO: 835819 - RNA, 19 nt, Homo sapiens
  misc_RNA (1)...(19): siRNA sense strand
caccucagcuguaguggua

SEQ ID NO: 835820 - RNA, 19 nt, Homo sapiens
  misc_RNA (1)...(19): siRNA sense strand
gcaagaggcugggcuaggu

SEQ ID NO: 835821 - RNA, 19 nt, Homo sapiens
  misc_RNA (1)...(19): siRNA sense strand
ggacgcuucugcaccauca

SEQ ID NO: 835822 - RNA, 19 nt, Homo sapiens
  misc_RNA (1)...(19): siRNA sense strand
gaccugugagcuugucuua

SEQ ID NO: 835823 - RNA, 19 nt, Homo sapiens
  misc_RNA (1)...(19): siRNA sense strand
gguucuggcuacuguguug

SEQ ID NO: 835824 - RNA, 19 nt, Homo sapiens
  misc_RNA (1)...(19): siRNA sense strand
ggaccaggagugucagguu

SEQ ID NO: 835825 - RNA, 19 nt, Homo sapiens
  misc_RNA (1)...(19): siRNA sense strand
ccucacugcugcccugguu

SEQ ID NO: 835826 - RNA, 19 nt, Homo sapiens
  misc_RNA (1)...(19): siRNA sense strand
gccaggaccaggaguguca

SEQ ID NO: 835827 - RNA, 19 nt, Homo sapiens
  misc_RNA (1)...(19): siRNA sense strand
ccugugagcuugucuuacc

SEQ ID NO: 835828 - RNA, 19 nt, Homo sapiens
  misc_RNA (1)...(19): siRNA sense strand
uggcaagaccugugagcuu

SEQ ID NO: 835829 - RNA, 19 nt, Homo sapiens
  misc_RNA (1)...(19): siRNA sense strand
gcaaggaucucuggaaggu

SEQ ID NO: 835830 - RNA, 19 nt, Homo sapiens
  misc_RNA (1)...(19): siRNA sense strand
aguaugggcuuaugauguu

SEQ ID NO: 835831 - RNA, 19 nt, Homo sapiens
  misc_RNA (1)...(19): siRNA sense strand
gcagguggagcacguguug

SEQ ID NO: 835832 - RNA, 19 nt, Homo sapiens
  misc_RNA (1)...(19): siRNA sense strand
gaguaugggcuuaugaugu

SEQ ID NO: 835833 - RNA, 19 nt, Homo sapiens
  misc_RNA (1)...(19): siRNA sense strand
gaccgaguaugggcuuaug

SEQ ID NO: 835834 - RNA, 19 nt, Homo sapiens
  misc_RNA (1)...(19): siRNA sense strand
aggacaagcugcggacaga

SEQ ID NO: 835835 - RNA, 19 nt, Homo sapiens
  misc_RNA (1)...(19): siRNA sense strand
gccgcaacgugucuguguu

SEQ ID NO: 835836 - RNA, 19 nt, Homo sapiens
  misc_RNA (1)...(19): siRNA sense strand
ggaccgaguaugggcuuau

SEQ ID NO: 835837 - RNA, 19 nt, Homo sapiens
  misc_RNA (1)...(19): siRNA sense strand
ggacugccgcaacgugucu

SEQ ID NO: 835838 - RNA, 19 nt, Homo sapiens
  misc_RNA (1)...(19): siRNA sense strand
ggaggaaggugucgagaag

SEQ ID NO: 835839 - RNA, 19 nt, Homo sapiens
  misc_RNA (1)...(19): siRNA sense strand
gcacucaggacaccauaaa

SEQ ID NO: 835840 - RNA, 19 nt, Homo sapiens
  misc_RNA (1)...(19): siRNA sense strand
gaggaguaccugaaacuga

SEQ ID NO: 835841 - RNA, 19 nt, Homo sapiens
  misc_RNA (1)...(19): siRNA sense strand
aagagccacugcacaauga

SEQ ID NO: 835842 - RNA, 19 nt, Homo sapiens
  misc_RNA (1)...(19): siRNA sense strand
uaggagagaccaugacuga

SEQ ID NO: 835843 - RNA, 19 nt, Homo sapiens
  misc_RNA (1)...(19): siRNA sense strand
gacuauaacaggugugauu

SEQ ID NO: 835844 - RNA, 19 nt, Homo sapiens
  misc_RNA (1)...(19): siRNA sense strand
aggaguaccugaaacugaa

SEQ ID NO: 835845 - RNA, 19 nt, Homo sapiens
  misc_RNA (1)...(19): siRNA sense strand
caagagccacugcacaaug

SEQ ID NO: 835846 - RNA, 19 nt, Homo sapiens
  misc_RNA (1)...(19): siRNA sense strand
gcaugaggaguaccugaaa

SEQ ID NO: 835847 - RNA, 19 nt, Homo sapiens
  misc_RNA (1)...(19): siRNA sense strand
gaaaauuggagcuaagaaa

SEQ ID NO: 835848 - RNA, 19 nt, Homo sapiens
  misc_RNA (1)...(19): siRNA sense strand
gccaagagccacugcacaa

SEQ ID NO: 835849 - RNA, 19 nt, Homo sapiens
  misc_RNA (1)...(19): siRNA sense strand
gggcagaagcagaugagaa

SEQ ID NO: 835850 - RNA, 19 nt, Homo sapiens
  misc_RNA (1)...(19): siRNA sense strand
ugcggaagcuggaggagaa

SEQ ID NO: 835851 - RNA, 19 nt, Homo sapiens
  misc_RNA (1)...(19): siRNA sense strand
ggaggaggaaggcguagga

SEQ ID NO: 835852 - RNA, 19 nt, Homo sapiens
  misc_RNA (1)...(19): siRNA sense strand
gaccaugacugaggaacag

SEQ ID NO: 835853 - RNA, 19 nt, Homo sapiens
  misc_RNA (1)...(19): siRNA sense strand
gaggaaggcguaggagaga

SEQ ID NO: 835854 - RNA, 19 nt, Homo sapiens
  misc_RNA (1)...(19): siRNA sense strand
cuaagaaacugcggaagcu

SEQ ID NO: 835855 - RNA, 19 nt, Homo sapiens
  misc_RNA (1)...(19): siRNA sense strand
gaagcuggaggagaaacaa

SEQ ID NO: 835856 - RNA, 19 nt, Homo sapiens
  misc_RNA (1)...(19): siRNA sense strand
gagaaacaagcgcgaaagg

SEQ ID NO: 835857 - RNA, 19 nt, Homo sapiens
  misc_RNA (1)...(19): siRNA sense strand
guucaucaacuacaucaag

SEQ ID NO: 835858 - RNA, 19 nt, Homo sapiens
  misc_RNA (1)...(19): siRNA sense strand
caucaagcaguccaagguu

SEQ ID NO: 835859 - RNA, 19 nt, Homo sapiens
  misc_RNA (1)...(19): siRNA sense strand
ggagaaacaagcgcgaaag

SEQ ID NO: 835860 - RNA, 19 nt, Homo sapiens
  misc_RNA (1)...(19): siRNA sense strand
gcucugcuagucggcuuua

SEQ ID NO: 835861 - RNA, 19 nt, Homo sapiens
  misc_RNA (1)...(19): siRNA sense strand
ggcagaagcagaugagaac

SEQ ID NO: 835862 - RNA, 19 nt, Homo sapiens
  misc_RNA (1)...(19): siRNA sense strand
ggaagcuggaggagaaaca

SEQ ID NO: 835863 - RNA, 19 nt, Homo sapiens
  misc_RNA (1)...(19): siRNA sense strand
agagcuuccugacagaguu

SEQ ID NO: 835864 - RNA, 19 nt, Homo sapiens
  misc_RNA (1)...(19): siRNA sense strand
uauaacaggugugauugac

SEQ ID NO: 835865 - RNA, 19 nt, Homo sapiens
  misc_RNA (1)...(19): siRNA sense strand
gcgaagcugaguggaagaa

SEQ ID NO: 835866 - RNA, 19 nt, Homo sapiens
  misc_RNA (1)...(19): siRNA sense strand
cuauaacaggugugauuga

SEQ ID NO: 835867 - RNA, 19 nt, Homo sapiens
  misc_RNA (1)...(19): siRNA sense strand
aauuggagcuaagaaacug

SEQ ID NO: 835868 - RNA, 19 nt, Homo sapiens
  misc_RNA (1)...(19): siRNA sense strand
aguccaagguugugcucuu

SEQ ID NO: 835869 - RNA, 19 nt, Homo sapiens
  misc_RNA (1)...(19): siRNA sense strand
ucaagcaguccaagguugu

SEQ ID NO: 835870 - RNA, 19 nt, Homo sapiens
  misc_RNA (1)...(19): siRNA sense strand
cagaagcagaugagaacga

SEQ ID NO: 835871 - RNA, 19 nt, Homo sapiens
  misc_RNA (1)...(19): siRNA sense strand
uaaagaagcucuagagaag

SEQ ID NO: 835872 - RNA, 19 nt, Homo sapiens
  misc_RNA (1)...(19): siRNA sense strand
gcagcuaccuuucaacuga

SEQ ID NO: 835873 - RNA, 19 nt, Homo sapiens
  misc_RNA (1)...(19): siRNA sense strand
ggacugagcagcuaccuuu

SEQ ID NO: 835874 - RNA, 19 nt, Homo sapiens
  misc_RNA (1)...(19): siRNA sense strand
guaaagaagcucuagagaa

SEQ ID NO: 835875 - RNA, 19 nt, Homo sapiens
  misc_RNA (1)...(19): siRNA sense strand
gaagcaguuuccacaguga

SEQ ID NO: 835876 - RNA, 19 nt, Homo sapiens
  misc_RNA (1)...(19): siRNA sense strand
uagcaaaucuaugccaauu

SEQ ID NO: 835877 - RNA, 19 nt, Homo sapiens
  misc_RNA (1)...(19): siRNA sense strand
ugaagaagcugggacuguu

SEQ ID NO: 835878 - RNA, 19 nt, Homo sapiens
  misc_RNA (1)...(19): siRNA sense strand
gcaaaucuaugccaauucc

SEQ ID NO: 835879 - RNA, 19 nt, Homo sapiens
  misc_RNA (1)...(19): siRNA sense strand
gaccaucacucagcaagga

SEQ ID NO: 835880 - RNA, 19 nt, Homo sapiens
  misc_RNA (1)...(19): siRNA sense strand
cccagugucuuacguaauu

SEQ ID NO: 835881 - RNA, 19 nt, Homo sapiens
  misc_RNA (1)...(19): siRNA sense strand
gaucucgcccagugucuua

SEQ ID NO: 835882 - RNA, 19 nt, Homo sapiens
  misc_RNA (1)...(19): siRNA sense strand
gagaaaagcacguaaagaa

SEQ ID NO: 835883 - RNA, 19 nt, Homo sapiens
  misc_RNA (1)...(19): siRNA sense strand
ggaaagauuuugcagguau

SEQ ID NO: 835884 - RNA, 19 nt, Homo sapiens
  misc_RNA (1)...(19): siRNA sense strand
gaagcugccaccuaauauu

SEQ ID NO: 835885 - RNA, 19 nt, Homo sapiens
  misc_RNA (1)...(19): siRNA sense strand
gcucaucccuccgccagaa

SEQ ID NO: 835886 - RNA, 19 nt, Homo sapiens
  misc_RNA (1)...(19): siRNA sense strand
gagagcagacuccuucaga

SEQ ID NO: 835887 - RNA, 19 nt, Homo sapiens
  misc_RNA (1)...(19): siRNA sense strand
caccuaauauuguucugaa

SEQ ID NO: 835888 - RNA, 19 nt, Homo sapiens
  misc_RNA (1)...(19): siRNA sense strand
ggaagcugccaccuaauau

SEQ ID NO: 835889 - RNA, 19 nt, Homo sapiens
  misc_RNA (1)...(19): siRNA sense strand
cccggaagcugccaccuaa

SEQ ID NO: 835890 - RNA, 19 nt, Homo sapiens
  misc_RNA (1)...(19): siRNA sense strand
cgccagagccugagaaaga

SEQ ID NO: 835891 - RNA, 19 nt, Homo sapiens
  misc_RNA (1)...(19): siRNA sense strand
cggaagcugccaccuaaua

SEQ ID NO: 835892 - RNA, 19 nt, Homo sapiens
  misc_RNA (1)...(19): siRNA sense strand
gaagaagcugggacuguug

SEQ ID NO: 835893 - RNA, 19 nt, Homo sapiens
  misc_RNA (1)...(19): siRNA sense strand
ccacaacucccagagguuu

SEQ ID NO: 835894 - RNA, 19 nt, Homo sapiens
  misc_RNA (1)...(19): siRNA sense strand
gaucuccuguucacugcaa

SEQ ID NO: 835895 - RNA, 19 nt, Homo sapiens
  misc_RNA (1)...(19): siRNA sense strand
caaaggguguccccaauga

SEQ ID NO: 835896 - RNA, 19 nt, Homo sapiens
  misc_RNA (1)...(19): siRNA sense strand
ucagggaccuuugccaaug

SEQ ID NO: 835897 - RNA, 19 nt, Homo sapiens
  misc_RNA (1)...(19): siRNA sense strand
gccagagccugagaaagaa

SEQ ID NO: 835898 - RNA, 19 nt, Homo sapiens
  misc_RNA (1)...(19): siRNA sense strand
ccauccagcucccaggaaa

SEQ ID NO: 835899 - RNA, 19 nt, Homo sapiens
  misc_RNA (1)...(19): siRNA sense strand
gaaagagagcagacuccuu

SEQ ID NO: 835900 - RNA, 19 nt, Homo sapiens
  misc_RNA (1)...(19): siRNA sense strand
cagaggagaccaucacuca

SEQ ID NO: 835901 - RNA, 19 nt, Homo sapiens
  misc_RNA (1)...(19): siRNA sense strand
gcuccaagcgccuguccua

SEQ ID NO: 835902 - RNA, 19 nt, Homo sapiens
  misc_RNA (1)...(19): siRNA sense strand
ggaggcugcccuugacuug

SEQ ID NO: 835903 - RNA, 19 nt, Homo sapiens
  misc_RNA (1)...(19): siRNA sense strand
cagggaccuuugccaauga

SEQ ID NO: 835904 - RNA, 19 nt, Homo sapiens
  misc_RNA (1)...(19): siRNA sense strand
gcugccaccuaauauuguu

SEQ ID NO: 835905 - RNA, 19 nt, Homo sapiens
  misc_RNA (1)...(19): siRNA sense strand
agagcagacuccuucagaa

SEQ ID NO: 835906 - RNA, 19 nt, Homo sapiens
  misc_RNA (1)...(19): siRNA sense strand
gggaggcccugaagaagcu

SEQ ID NO: 835907 - RNA, 19 nt, Homo sapiens
  misc_RNA (1)...(19): siRNA sense strand
gcagcuagcaaaucuaugc

SEQ ID NO: 835908 - RNA, 19 nt, Homo sapiens
  misc_RNA (1)...(19): siRNA sense strand
caacaccccuggccugaga

SEQ ID NO: 835909 - RNA, 19 nt, Homo sapiens
  misc_RNA (1)...(19): siRNA sense strand
cuaggaauauccacauugc

SEQ ID NO: 835910 - RNA, 19 nt, Homo sapiens
  misc_RNA (1)...(19): siRNA sense strand
acagagccgugacaagcuu

SEQ ID NO: 835911 - RNA, 19 nt, Homo sapiens
  misc_RNA (1)...(19): siRNA sense strand
ccaagcgccuguccuacca

SEQ ID NO: 835912 - RNA, 19 nt, Homo sapiens
  misc_RNA (1)...(19): siRNA sense strand
ccgaagcaguuuccacagu

SEQ ID NO: 835913 - RNA, 19 nt, Homo sapiens
  misc_RNA (1)...(19): siRNA sense strand
ugcaagagcugaagaugcu

SEQ ID NO: 835914 - RNA, 19 nt, Homo sapiens
  misc_RNA (1)...(19): siRNA sense strand
ucagaagccaugucccaaa

SEQ ID NO: 835915 - RNA, 19 nt, Homo sapiens
  misc_RNA (1)...(19): siRNA sense strand
gaaugcaagagcugaagau

SEQ ID NO: 835916 - RNA, 19 nt, Homo sapiens
  misc_RNA (1)...(19): siRNA sense strand
caaggacgaacgccaagga

SEQ ID NO: 835917 - RNA, 19 nt, Homo sapiens
  misc_RNA (1)...(19): siRNA sense strand
cuaauauuguucugaagag

SEQ ID NO: 835918 - RNA, 19 nt, Homo sapiens
  misc_RNA (1)...(19): siRNA sense strand
cagaagccaugucccaaaa

SEQ ID NO: 835919 - RNA, 19 nt, Homo sapiens
  misc_RNA (1)...(19): siRNA sense strand
gagcagcuaccuuucaacu

SEQ ID NO: 835920 - RNA, 19 nt, Homo sapiens
  misc_RNA (1)...(19): siRNA sense strand
aagagcagccgaagcaguu

SEQ ID NO: 835921 - RNA, 19 nt, Homo sapiens
  misc_RNA (1)...(19): siRNA sense strand
cugcaggguugccucagaa

SEQ ID NO: 835922 - RNA, 19 nt, Homo sapiens
  misc_RNA (1)...(19): siRNA sense strand
cugagcagcuaccuuucaa

SEQ ID NO: 835923 - RNA, 19 nt, Homo sapiens
  misc_RNA (1)...(19): siRNA sense strand
ccuaauauuguucugaaga

SEQ ID NO: 835924 - RNA, 19 nt, Homo sapiens
  misc_RNA (1)...(19): siRNA sense strand
aagcugccaccuaauauug

SEQ ID NO: 835925 - RNA, 19 nt, Homo sapiens
  misc_RNA (1)...(19): siRNA sense strand
ggacccaaacagccgacua

SEQ ID NO: 835926 - RNA, 19 nt, Homo sapiens
  misc_RNA (1)...(19): siRNA sense strand
cgaacgccaaggacaguaa

SEQ ID NO: 835927 - RNA, 19 nt, Homo sapiens
  misc_RNA (1)...(19): siRNA sense strand
uacagccucccuaggaaua

SEQ ID NO: 835928 - RNA, 19 nt, Homo sapiens
  misc_RNA (1)...(19): siRNA sense strand
ggccugaucuccuguucac

SEQ ID NO: 835929 - RNA, 19 nt, Homo sapiens
  misc_RNA (1)...(19): siRNA sense strand
gcgugggacugagcagcua

SEQ ID NO: 835930 - RNA, 19 nt, Homo sapiens
  misc_RNA (1)...(19): siRNA sense strand
aaaucuaugccaauuccua

SEQ ID NO: 835931 - RNA, 19 nt, Homo sapiens
  misc_RNA (1)...(19): siRNA sense strand
gcacguaaagaagcucuag

SEQ ID NO: 835932 - RNA, 19 nt, Homo sapiens
  misc_RNA (1)...(19): siRNA sense strand
gcaggguugccucagaaug

SEQ ID NO: 835933 - RNA, 19 nt, Homo sapiens
  misc_RNA (1)...(19): siRNA sense strand
cgcucuggaucuagugaua

SEQ ID NO: 835934 - RNA, 19 nt, Homo sapiens
  misc_RNA (1)...(19): siRNA sense strand
gaaagaugccagccccaaa

SEQ ID NO: 835935 - RNA, 19 nt, Homo sapiens
  misc_RNA (1)...(19): siRNA sense strand
gcagagaaaagcacguaaa

SEQ ID NO: 835936 - RNA, 19 nt, Homo sapiens
  misc_RNA (1)...(19): siRNA sense strand
gacccaaacagccgacuag

SEQ ID NO: 835937 - RNA, 19 nt, Homo sapiens
  misc_RNA (1)...(19): siRNA sense strand
agccagaacuucaggaaaa

SEQ ID NO: 835938 - RNA, 19 nt, Homo sapiens
  misc_RNA (1)...(19): siRNA sense strand
aggcugcccuugacuugga

SEQ ID NO: 835939 - RNA, 19 nt, Homo sapiens
  misc_RNA (1)...(19): siRNA sense strand
aaacagucucaaccaggua

SEQ ID NO: 835940 - RNA, 19 nt, Homo sapiens
  misc_RNA (1)...(19): siRNA sense strand
cgcccagugucuuacguaa

SEQ ID NO: 835941 - RNA, 19 nt, Homo sapiens
  misc_RNA (1)...(19): siRNA sense strand
gccaauuccuaucccuaag

SEQ ID NO: 835942 - RNA, 19 nt, Homo sapiens
  misc_RNA (1)...(19): siRNA sense strand
gaccuuugccaaugaaguc

SEQ ID NO: 835943 - RNA, 19 nt, Homo sapiens
  misc_RNA (1)...(19): siRNA sense strand
cguaaagaagcucuagaga

SEQ ID NO: 835944 - RNA, 19 nt, Homo sapiens
  misc_RNA (1)...(19): siRNA sense strand
cugaagagcagccgaagca

SEQ ID NO: 835945 - RNA, 19 nt, Homo sapiens
  misc_RNA (1)...(19): siRNA sense strand
ugaagaugcuccccucuca

SEQ ID NO: 835946 - RNA, 19 nt, Homo sapiens
  misc_RNA (1)...(19): siRNA sense strand
gggaaagauuuugcaggua

SEQ ID NO: 835947 - RNA, 19 nt, Homo sapiens
  misc_RNA (1)...(19): siRNA sense strand
ucaaccagguacacacaac

SEQ ID NO: 835948 - RNA, 19 nt, Homo sapiens
  misc_RNA (1)...(19): siRNA sense strand
ccuaggaauauccacauug

SEQ ID NO: 835949 - RNA, 19 nt, Homo sapiens
  misc_RNA (1)...(19): siRNA sense strand
caucagacccaaggagaca

SEQ ID NO: 835950 - RNA, 19 nt, Homo sapiens
  misc_RNA (1)...(19): siRNA sense strand
ccugcaggguugccucaga

SEQ ID NO: 835951 - RNA, 19 nt, Homo sapiens
  misc_RNA (1)...(19): siRNA sense strand
ccaaggaaacagucucaac

SEQ ID NO: 835952 - RNA, 19 nt, Homo sapiens
  misc_RNA (1)...(19): siRNA sense strand
ugggacuguugaaggagua

SEQ ID NO: 835953 - RNA, 19 nt, Homo sapiens
  misc_RNA (1)...(19): siRNA sense strand
gaaagauuuugcagguauc

SEQ ID NO: 835954 - RNA, 19 nt, Homo sapiens
  misc_RNA (1)...(19): siRNA sense strand
ugccaauuccuaucccuaa

SEQ ID NO: 835955 - RNA, 19 nt, Homo sapiens
  misc_RNA (1)...(19): siRNA sense strand
ggaccuuugccaaugaagu

SEQ ID NO: 835956 - RNA, 19 nt, Homo sapiens
  misc_RNA (1)...(19): siRNA sense strand
uggagauucuggccugauc

SEQ ID NO: 835957 - RNA, 19 nt, Homo sapiens
  misc_RNA (1)...(19): siRNA sense strand
gaccagagccagcgcaaca

SEQ ID NO: 835958 - RNA, 19 nt, Homo sapiens
  misc_RNA (1)...(19): siRNA sense strand
ccagagccagcgcaacaug

SEQ ID NO: 835959 - RNA, 19 nt, Homo sapiens
  misc_RNA (1)...(19): siRNA sense strand
cgaagaaccucccucauuc

SEQ ID NO: 835960 - RNA, 19 nt, Homo sapiens
  misc_RNA (1)...(19): siRNA sense strand
guaaagaggucagucacaa

SEQ ID NO: 835961 - RNA, 19 nt, Homo sapiens
  misc_RNA (1)...(19): siRNA sense strand
gcgaagaaccucccucauu

SEQ ID NO: 835962 - RNA, 19 nt, Homo sapiens
  misc_RNA (1)...(19): siRNA sense strand
ugaaagaaaugcagguaau

SEQ ID NO: 835963 - RNA, 19 nt, Homo sapiens
  misc_RNA (1)...(19): siRNA sense strand
cagguaaucucuauacuag

SEQ ID NO: 835964 - RNA, 19 nt, Homo sapiens
  misc_RNA (1)...(19): siRNA sense strand
ucaagacacuccagguauu

SEQ ID NO: 835965 - RNA, 19 nt, Homo sapiens
  misc_RNA (1)...(19): siRNA sense strand
gcagguaaucucuauacua

SEQ ID NO: 835966 - RNA, 19 nt, Homo sapiens
  misc_RNA (1)...(19): siRNA sense strand
gcagugaacagcugaauag

SEQ ID NO: 835967 - RNA, 19 nt, Homo sapiens
  misc_RNA (1)...(19): siRNA sense strand
ugaagugucugucagugaa

SEQ ID NO: 835968 - RNA, 19 nt, Homo sapiens
  misc_RNA (1)...(19): siRNA sense strand
gaaaugcagguaaucucua

SEQ ID NO: 835969 - RNA, 19 nt, Homo sapiens
  misc_RNA (1)...(19): siRNA sense strand
guauucagguccaugagaa

SEQ ID NO: 835970 - RNA, 19 nt, Homo sapiens
  misc_RNA (1)...(19): siRNA sense strand
cuagacaaguucagauaga

SEQ ID NO: 835971 - RNA, 19 nt, Homo sapiens
  misc_RNA (1)...(19): siRNA sense strand
aaacagcagccuagcagua

SEQ ID NO: 835972 - RNA, 19 nt, Homo sapiens
  misc_RNA (1)...(19): siRNA sense strand
gaagaggagguuuaagcaa

SEQ ID NO: 835973 - RNA, 19 nt, Homo sapiens
  misc_RNA (1)...(19): siRNA sense strand
uacaagagcuaugaacuca

SEQ ID NO: 835974 - RNA, 19 nt, Homo sapiens
  misc_RNA (1)...(19): siRNA sense strand
gaaagaaaugcagguaauc

SEQ ID NO: 835975 - RNA, 19 nt, Homo sapiens
  misc_RNA (1)...(19): siRNA sense strand
guucaagacacuccaggua

SEQ ID NO: 835976 - RNA, 19 nt, Homo sapiens
  misc_RNA (1)...(19): siRNA sense strand
aaaugcagguaaucucuau

SEQ ID NO: 835977 - RNA, 19 nt, Homo sapiens
  misc_RNA (1)...(19): siRNA sense strand
uagacaaguucagauagaa

SEQ ID NO: 835978 - RNA, 19 nt, Homo sapiens
  misc_RNA (1)...(19): siRNA sense strand
uaaagaggucagucacaaa

SEQ ID NO: 835979 - RNA, 19 nt, Homo sapiens
  misc_RNA (1)...(19): siRNA sense strand
gcugaccuguugcacauca

SEQ ID NO: 835980 - RNA, 19 nt, Homo sapiens
  misc_RNA (1)...(19): siRNA sense strand
aagcugaccuguugcacau

SEQ ID NO: 835981 - RNA, 19 nt, Homo sapiens
  misc_RNA (1)...(19): siRNA sense strand
gcuaggcugcucauucuau

SEQ ID NO: 835982 - RNA, 19 nt, Homo sapiens
  misc_RNA (1)...(19): siRNA sense strand
ggugaaacccuggcucuuc

SEQ ID NO: 835983 - RNA, 19 nt, Homo sapiens
  misc_RNA (1)...(19): siRNA sense strand
caucggugacuaugaaaga

SEQ ID NO: 835984 - RNA, 19 nt, Homo sapiens
  misc_RNA (1)...(19): siRNA sense strand
gaagugucugucagugaaa

SEQ ID NO: 835985 - RNA, 19 nt, Homo sapiens
  misc_RNA (1)...(19): siRNA sense strand
ccaagucacccaacaugca

SEQ ID NO: 835986 - RNA, 19 nt, Homo sapiens
  misc_RNA (1)...(19): siRNA sense strand
gggcagaugcuguggugau

SEQ ID NO: 835987 - RNA, 19 nt, Homo sapiens
  misc_RNA (1)...(19): siRNA sense strand
ucacugacuacaagagcua

SEQ ID NO: 835988 - RNA, 19 nt, Homo sapiens
  misc_RNA (1)...(19): siRNA sense strand
caagacacuccagguauuc

SEQ ID NO: 835989 - RNA, 19 nt, Homo sapiens
  misc_RNA (1)...(19): siRNA sense strand
gcaagcccucucugccaaa

SEQ ID NO: 835990 - RNA, 19 nt, Homo sapiens
  misc_RNA (1)...(19): siRNA sense strand
gcccaagucacccaacaug

SEQ ID NO: 835991 - RNA, 19 nt, Homo sapiens
  misc_RNA (1)...(19): siRNA sense strand
cuaggcugcucauucuaug

SEQ ID NO: 835992 - RNA, 19 nt, Homo sapiens
  misc_RNA (1)...(19): siRNA sense strand
uacuagacaaguucagaua

SEQ ID NO: 835993 - RNA, 19 nt, Homo sapiens
  misc_RNA (1)...(19): siRNA sense strand
gacugucaccuccgucuga

SEQ ID NO: 835994 - RNA, 19 nt, Homo sapiens
  misc_RNA (1)...(19): siRNA sense strand
gguauucagguccaugaga

SEQ ID NO: 835995 - RNA, 19 nt, Homo sapiens
  misc_RNA (1)...(19): siRNA sense strand
cuccaucacugacuacaag

SEQ ID NO: 835996 - RNA, 19 nt, Homo sapiens
  misc_RNA (1)...(19): siRNA sense strand
ugaagaggagguuuaagca

SEQ ID NO: 835997 - RNA, 19 nt, Homo sapiens
  misc_RNA (1)...(19): siRNA sense strand
uaugaaagaaaugcaggua

SEQ ID NO: 835998 - RNA, 19 nt, Homo sapiens
  misc_RNA (1)...(19): siRNA sense strand
caugcuaggcugcucauuc

SEQ ID NO: 835999 - RNA, 19 nt, Homo sapiens
  misc_RNA (1)...(19): siRNA sense strand
ggcagaugcuguggugauc

SEQ ID NO: 836000 - RNA, 19 nt, Homo sapiens
  misc_RNA (1)...(19): siRNA sense strand
gaugcuguggugaucguuu

SEQ ID NO: 836001 - RNA, 19 nt, Homo sapiens
  misc_RNA (1)...(19): siRNA sense strand
cuacaagagcuaugaacuc

SEQ ID NO: 836002 - RNA, 19 nt, Homo sapiens
  misc_RNA (1)...(19): siRNA sense strand
agccugagcugcagugaac

SEQ ID NO: 836003 - RNA, 19 nt, Homo sapiens
  misc_RNA (1)...(19): siRNA sense strand
gaagaaccucccucauucc

SEQ ID NO: 836004 - RNA, 19 nt, Homo sapiens
  misc_RNA (1)...(19): siRNA sense strand
cggugacuaugaaagaaau

SEQ ID NO: 836005 - RNA, 19 nt, Homo sapiens
  misc_RNA (1)...(19): siRNA sense strand
ugcauucgcugggcagaug

SEQ ID NO: 836006 - RNA, 19 nt, Homo sapiens
  misc_RNA (1)...(19): siRNA sense strand
ccuuccacguccucuguaa

SEQ ID NO: 836007 - RNA, 19 nt, Homo sapiens
  misc_RNA (1)...(19): siRNA sense strand
augcuaggcugcucauucu

SEQ ID NO: 836008 - RNA, 19 nt, Homo sapiens
  misc_RNA (1)...(19): siRNA sense strand
aaagaaaugcagguaaucu

SEQ ID NO: 836009 - RNA, 19 nt, Homo sapiens
  misc_RNA (1)...(19): siRNA sense strand
gguugacccucagcuugga

SEQ ID NO: 836010 - RNA, 19 nt, Homo sapiens
  misc_RNA (1)...(19): siRNA sense strand
aaagaggucagucacaaac

SEQ ID NO: 836011 - RNA, 19 nt, Homo sapiens
  misc_RNA (1)...(19): siRNA sense strand
gacugcagcuagccagcau

SEQ ID NO: 836012 - RNA, 19 nt, Homo sapiens
  misc_RNA (1)...(19): siRNA sense strand
gcugcugccuggccugaaa

SEQ ID NO: 836013 - RNA, 19 nt, Homo sapiens
  misc_RNA (1)...(19): siRNA sense strand
gaacuugcagagucucaau

SEQ ID NO: 836014 - RNA, 19 nt, Homo sapiens
  misc_RNA (1)...(19): siRNA sense strand
cucaaugucuccaacaauc

SEQ ID NO: 836015 - RNA, 19 nt, Homo sapiens
  misc_RNA (1)...(19): siRNA sense strand
uggaguggcuggaccuauc

SEQ ID NO: 836016 - RNA, 19 nt, Homo sapiens
  misc_RNA (1)...(19): siRNA sense strand
gugagaacuugcagagucu

SEQ ID NO: 836017 - RNA, 19 nt, Homo sapiens
  misc_RNA (1)...(19): siRNA sense strand
ccacuggccaccugugaga

SEQ ID NO: 836018 - RNA, 19 nt, Homo sapiens
  misc_RNA (1)...(19): siRNA sense strand
gaguccauccugcuacuga

SEQ ID NO: 836019 - RNA, 19 nt, Homo sapiens
  misc_RNA (1)...(19): siRNA sense strand
gcucaaugucuccaacaau

SEQ ID NO: 836020 - RNA, 19 nt, Homo sapiens
  misc_RNA (1)...(19): siRNA sense strand
ggccaccugugagaacuug

SEQ ID NO: 836021 - RNA, 19 nt, Homo sapiens
  misc_RNA (1)...(19): siRNA sense strand
ggaguggcuggaccuauca

SEQ ID NO: 836022 - RNA, 19 nt, Homo sapiens
  misc_RNA (1)...(19): siRNA sense strand
cgacggugagcgugugauu

SEQ ID NO: 836023 - RNA, 19 nt, Homo sapiens
  misc_RNA (1)...(19): siRNA sense strand
gguagaagguggagcuaua

SEQ ID NO: 836024 - RNA, 19 nt, Homo sapiens
  misc_RNA (1)...(19): siRNA sense strand
gaucaggcgucauuuaaau

SEQ ID NO: 836025 - RNA, 19 nt, Homo sapiens
  misc_RNA (1)...(19): siRNA sense strand
gcacuaagaggaaaccuaa

SEQ ID NO: 836026 - RNA, 19 nt, Homo sapiens
  misc_RNA (1)...(19): siRNA sense strand
ggaaggagcagcagucuug

SEQ ID NO: 836027 - RNA, 19 nt, Homo sapiens
  misc_RNA (1)...(19): siRNA sense strand
gagaagagcuuuucagaga

SEQ ID NO: 836028 - RNA, 19 nt, Homo sapiens
  misc_RNA (1)...(19): siRNA sense strand
gaacaaauuggcccauauu

SEQ ID NO: 836029 - RNA, 19 nt, Homo sapiens
  misc_RNA (1)...(19): siRNA sense strand
gcaugucacuugcugguuu

SEQ ID NO: 836030 - RNA, 19 nt, Homo sapiens
  misc_RNA (1)...(19): siRNA sense strand
agacagccauccauuugua

SEQ ID NO: 836031 - RNA, 19 nt, Homo sapiens
  misc_RNA (1)...(19): siRNA sense strand
gcagcagucuugcaaggaa

SEQ ID NO: 836032 - RNA, 19 nt, Homo sapiens
  misc_RNA (1)...(19): siRNA sense strand
caagacagccauccauuug

SEQ ID NO: 836033 - RNA, 19 nt, Homo sapiens
  misc_RNA (1)...(19): siRNA sense strand
acaagaagcuagaaagagu

SEQ ID NO: 836034 - RNA, 19 nt, Homo sapiens
  misc_RNA (1)...(19): siRNA sense strand
caagaaugguacuccaaga

SEQ ID NO: 836035 - RNA, 19 nt, Homo sapiens
  misc_RNA (1)...(19): siRNA sense strand
cuauauaccuuucuggaau

SEQ ID NO: 836036 - RNA, 19 nt, Homo sapiens
  misc_RNA (1)...(19): siRNA sense strand
aagcaaagcgugccauuga

SEQ ID NO: 836037 - RNA, 19 nt, Homo sapiens
  misc_RNA (1)...(19): siRNA sense strand
ccaagacagccauccauuu

SEQ ID NO: 836038 - RNA, 19 nt, Homo sapiens
  misc_RNA (1)...(19): siRNA sense strand
gcagcucaguucacaagau

SEQ ID NO: 836039 - RNA, 19 nt, Homo sapiens
  misc_RNA (1)...(19): siRNA sense strand
aaaccuaaauguccugaag

SEQ ID NO: 836040 - RNA, 19 nt, Homo sapiens
  misc_RNA (1)...(19): siRNA sense strand
guacagacaagaagcuaga

SEQ ID NO: 836041 - RNA, 19 nt, Homo sapiens
  misc_RNA (1)...(19): siRNA sense strand
gaagcuagaaagaguggaa

SEQ ID NO: 836042 - RNA, 19 nt, Homo sapiens
  misc_RNA (1)...(19): siRNA sense strand
cagcucaguucacaagaug

SEQ ID NO: 836043 - RNA, 19 nt, Homo sapiens
  misc_RNA (1)...(19): siRNA sense strand
agagaaagguacagacaag

SEQ ID NO: 836044 - RNA, 19 nt, Homo sapiens
  misc_RNA (1)...(19): siRNA sense strand
gcagaggugcugaggauca

SEQ ID NO: 836045 - RNA, 19 nt, Homo sapiens
  misc_RNA (1)...(19): siRNA sense strand
agacaucaagcccuacaua

SEQ ID NO: 836046 - RNA, 19 nt, Homo sapiens
  misc_RNA (1)...(19): siRNA sense strand
cuucugagccuguucauau

SEQ ID NO: 836047 - RNA, 19 nt, Homo sapiens
  misc_RNA (1)...(19): siRNA sense strand
aagaacaaauuggcccaua

SEQ ID NO: 836048 - RNA, 19 nt, Homo sapiens
  misc_RNA (1)...(19): siRNA sense strand
ggagauagcaguggauuuu

SEQ ID NO: 836049 - RNA, 19 nt, Homo sapiens
  misc_RNA (1)...(19): siRNA sense strand
cagggaaucuuuuaacuga

SEQ ID NO: 836050 - RNA, 19 nt, Homo sapiens
  misc_RNA (1)...(19): siRNA sense strand
gaaagguacagacaagaag

SEQ ID NO: 836051 - RNA, 19 nt, Homo sapiens
  misc_RNA (1)...(19): siRNA sense strand
agaacaaauuggcccauau

SEQ ID NO: 836052 - RNA, 19 nt, Homo sapiens
  misc_RNA (1)...(19): siRNA sense strand
ggagcuauauaccuuucug

SEQ ID NO: 836053 - RNA, 19 nt, Homo sapiens
  misc_RNA (1)...(19): siRNA sense strand
gaagcaaagcgugccauug

SEQ ID NO: 836054 - RNA, 19 nt, Homo sapiens
  misc_RNA (1)...(19): siRNA sense strand
uaagaggaaaccuaaaugu

SEQ ID NO: 836055 - RNA, 19 nt, Homo sapiens
  misc_RNA (1)...(19): siRNA sense strand
ggaagcaaagcgugccauu

SEQ ID NO: 836056 - RNA, 19 nt, Homo sapiens
  misc_RNA (1)...(19): siRNA sense strand
guugaucaggcgucauuua

SEQ ID NO: 836057 - RNA, 19 nt, Homo sapiens
  misc_RNA (1)...(19): siRNA sense strand
gcuauucucgagccuguuu

SEQ ID NO: 836058 - RNA, 19 nt, Homo sapiens
  misc_RNA (1)...(19): siRNA sense strand
gcuauauaccuuucuggaa

SEQ ID NO: 836059 - RNA, 19 nt, Homo sapiens
  misc_RNA (1)...(19): siRNA sense strand
cgagccuguuugaggauua

SEQ ID NO: 836060 - RNA, 19 nt, Homo sapiens
  misc_RNA (1)...(19): siRNA sense strand
gcacacccguacuagacau

SEQ ID NO: 836061 - RNA, 19 nt, Homo sapiens
  misc_RNA (1)...(19): siRNA sense strand
ggagacagggaaucuuuua

SEQ ID NO: 836062 - RNA, 19 nt, Homo sapiens
  misc_RNA (1)...(19): siRNA sense strand
caaggaagcagggcagaga

SEQ ID NO: 836063 - RNA, 19 nt, Homo sapiens
  misc_RNA (1)...(19): siRNA sense strand
ccauagcacuaagaggaaa

SEQ ID NO: 836064 - RNA, 19 nt, Homo sapiens
  misc_RNA (1)...(19): siRNA sense strand
agacaagaagcuagaaaga

SEQ ID NO: 836065 - RNA, 19 nt, Homo sapiens
  misc_RNA (1)...(19): siRNA sense strand
uaaccaacauacaccaaac

SEQ ID NO: 836066 - RNA, 19 nt, Homo sapiens
  misc_RNA (1)...(19): siRNA sense strand
cagcguggcagaagaacaa

SEQ ID NO: 836067 - RNA, 19 nt, Homo sapiens
  misc_RNA (1)...(19): siRNA sense strand
ggaccgccuuuucuacuuu

SEQ ID NO: 836068 - RNA, 19 nt, Homo sapiens
  misc_RNA (1)...(19): siRNA sense strand
ccagucggcuacuuggaau

SEQ ID NO: 836069 - RNA, 19 nt, Homo sapiens
  misc_RNA (1)...(19): siRNA sense strand
agaaagguacagacaagaa

SEQ ID NO: 836070 - RNA, 19 nt, Homo sapiens
  misc_RNA (1)...(19): siRNA sense strand
gcaagacugacagcuguga

SEQ ID NO: 836071 - RNA, 19 nt, Homo sapiens
  misc_RNA (1)...(19): siRNA sense strand
uugcagaggugcugaggau

SEQ ID NO: 836072 - RNA, 19 nt, Homo sapiens
  misc_RNA (1)...(19): siRNA sense strand
gcucaguucacaagauguu

SEQ ID NO: 836073 - RNA, 19 nt, Homo sapiens
  misc_RNA (1)...(19): siRNA sense strand
cagaauucagcaagcauuu

SEQ ID NO: 836074 - RNA, 19 nt, Homo sapiens
  misc_RNA (1)...(19): siRNA sense strand
ugaugggccuagaacaguu

SEQ ID NO: 836075 - RNA, 19 nt, Homo sapiens
  misc_RNA (1)...(19): siRNA sense strand
ucaggcgucauuuaaauau

SEQ ID NO: 836076 - RNA, 19 nt, Homo sapiens
  misc_RNA (1)...(19): siRNA sense strand
uagaagguggagcuauaua

SEQ ID NO: 836077 - RNA, 19 nt, Homo sapiens
  misc_RNA (1)...(19): siRNA sense strand
guagaagguggagcuauau

SEQ ID NO: 836078 - RNA, 19 nt, Homo sapiens
  misc_RNA (1)...(19): siRNA sense strand
gagaaagguacagacaaga

SEQ ID NO: 836079 - RNA, 19 nt, Homo sapiens
  misc_RNA (1)...(19): siRNA sense strand
aaaaugugauggagccuuu

SEQ ID NO: 836080 - RNA, 19 nt, Homo sapiens
  misc_RNA (1)...(19): siRNA sense strand
ccagaauucagcaagcauu

SEQ ID NO: 836081 - RNA, 19 nt, Homo sapiens
  misc_RNA (1)...(19): siRNA sense strand
cagaggugcugaggaucaa

SEQ ID NO: 836082 - RNA, 19 nt, Homo sapiens
  misc_RNA (1)...(19): siRNA sense strand
cauugaggcugugcuguca

SEQ ID NO: 836083 - RNA, 19 nt, Homo sapiens
  misc_RNA (1)...(19): siRNA sense strand
caggcgucauuuaaauauu

SEQ ID NO: 836084 - RNA, 19 nt, Homo sapiens
  misc_RNA (1)...(19): siRNA sense strand
gaugggccuagaacaguuu

SEQ ID NO: 836085 - RNA, 19 nt, Homo sapiens
  misc_RNA (1)...(19): siRNA sense strand
caugucacuugcugguuug

SEQ ID NO: 836086 - RNA, 19 nt, Homo sapiens
  misc_RNA (1)...(19): siRNA sense strand
uugaucaggcgucauuuaa

SEQ ID NO: 836087 - RNA, 19 nt, Homo sapiens
  misc_RNA (1)...(19): siRNA sense strand
uaauaauccugaacauucc

SEQ ID NO: 836088 - RNA, 19 nt, Homo sapiens
  misc_RNA (1)...(19): siRNA sense strand
gacaagaagcuagaaagag

SEQ ID NO: 836089 - RNA, 19 nt, Homo sapiens
  misc_RNA (1)...(19): siRNA sense strand
ucagcaagcauuuccuaug

SEQ ID NO: 836090 - RNA, 19 nt, Homo sapiens
  misc_RNA (1)...(19): siRNA sense strand
gacaucaagcccuacauag

SEQ ID NO: 836091 - RNA, 19 nt, Homo sapiens
  misc_RNA (1)...(19): siRNA sense strand
guggagcuauauaccuuuc

SEQ ID NO: 836092 - RNA, 19 nt, Homo sapiens
  misc_RNA (1)...(19): siRNA sense strand
gggcagcucaguucacaag

SEQ ID NO: 836093 - RNA, 19 nt, Homo sapiens
  misc_RNA (1)...(19): siRNA sense strand
gccagucggcuacuuggaa

SEQ ID NO: 836094 - RNA, 19 nt, Homo sapiens
  misc_RNA (1)...(19): siRNA sense strand
cuaagaggaaaccuaaaug

SEQ ID NO: 836095 - RNA, 19 nt, Homo sapiens
  misc_RNA (1)...(19): siRNA sense strand
cagaauaaccaacauacac

SEQ ID NO: 836096 - RNA, 19 nt, Homo sapiens
  misc_RNA (1)...(19): siRNA sense strand
gccuuuagcagacuuuaau

SEQ ID NO: 836097 - RNA, 19 nt, Homo sapiens
  misc_RNA (1)...(19): siRNA sense strand
caucaagcccuacauagcu

SEQ ID NO: 836098 - RNA, 19 nt, Homo sapiens
  misc_RNA (1)...(19): siRNA sense strand
guucacaagauguugauca

SEQ ID NO: 836099 - RNA, 19 nt, Homo sapiens
  misc_RNA (1)...(19): siRNA sense strand
gaagcagggcagagacaca

SEQ ID NO: 836100 - RNA, 19 nt, Homo sapiens
  misc_RNA (1)...(19): siRNA sense strand
ucagagaaagguacagaca

SEQ ID NO: 836101 - RNA, 19 nt, Homo sapiens
  misc_RNA (1)...(19): siRNA sense strand
guuccagcguggcagaaga

SEQ ID NO: 836102 - RNA, 19 nt, Homo sapiens
  misc_RNA (1)...(19): siRNA sense strand
caagacgugaucagaguuc

SEQ ID NO: 836103 - RNA, 19 nt, Homo sapiens
  misc_RNA (1)...(19): siRNA sense strand
ugaucaggcgucauuuaaa

SEQ ID NO: 836104 - RNA, 19 nt, Homo sapiens
  misc_RNA (1)...(19): siRNA sense strand
cagagaaagguacagacaa

SEQ ID NO: 836105 - RNA, 19 nt, Homo sapiens
  misc_RNA (1)...(19): siRNA sense strand
cguggcagaagaacaaauu

SEQ ID NO: 836106 - RNA, 19 nt, Homo sapiens
  misc_RNA (1)...(19): siRNA sense strand
gcagccuccuagacugaau

SEQ ID NO: 836107 - RNA, 19 nt, Homo sapiens
  misc_RNA (1)...(19): siRNA sense strand
gaccuugggcagcucaguu

SEQ ID NO: 836108 - RNA, 19 nt, Homo sapiens
  misc_RNA (1)...(19): siRNA sense strand
cuacuuggaaucuuguuuc

SEQ ID NO: 836109 - RNA, 19 nt, Homo sapiens
  misc_RNA (1)...(19): siRNA sense strand
gggagauagcaguggauuu

SEQ ID NO: 836110 - RNA, 19 nt, Homo sapiens
  misc_RNA (1)...(19): siRNA sense strand
acuaagaggaaaccuaaau

SEQ ID NO: 836111 - RNA, 19 nt, Homo sapiens
  misc_RNA (1)...(19): siRNA sense strand
gugcagccuccuagacuga

SEQ ID NO: 836112 - RNA, 19 nt, Homo sapiens
  misc_RNA (1)...(19): siRNA sense strand
uggugucucuagggucuua

SEQ ID NO: 836113 - RNA, 19 nt, Homo sapiens
  misc_RNA (1)...(19): siRNA sense strand
gagccuguuugaggauuag

SEQ ID NO: 836114 - RNA, 19 nt, Homo sapiens
  misc_RNA (1)...(19): siRNA sense strand
gccauccauuuguagcuau

SEQ ID NO: 836115 - RNA, 19 nt, Homo sapiens
  misc_RNA (1)...(19): siRNA sense strand
ugacacagccagaauucag

SEQ ID NO: 836116 - RNA, 19 nt, Homo sapiens
  misc_RNA (1)...(19): siRNA sense strand
ccauccauuuguagcuauu

SEQ ID NO: 836117 - RNA, 19 nt, Homo sapiens
  misc_RNA (1)...(19): siRNA sense strand
gcccauauugcccagagaa

SEQ ID NO: 836118 - RNA, 19 nt, Homo sapiens
  misc_RNA (1)...(19): siRNA sense strand
cugguuuggugauggcuuu

SEQ ID NO: 836119 - RNA, 19 nt, Homo sapiens
  misc_RNA (1)...(19): siRNA sense strand
cuggagacagggaaucuuu

SEQ ID NO: 836120 - RNA, 19 nt, Homo sapiens
  misc_RNA (1)...(19): siRNA sense strand
aggcuccuguggccacuuu

SEQ ID NO: 836121 - RNA, 19 nt, Homo sapiens
  misc_RNA (1)...(19): siRNA sense strand
gaccgccuuuucuacuuua

SEQ ID NO: 836122 - RNA, 19 nt, Homo sapiens
  misc_RNA (1)...(19): siRNA sense strand
cagcggauccucggucugu

SEQ ID NO: 836123 - RNA, 19 nt, Homo sapiens
  misc_RNA (1)...(19): siRNA sense strand
cuacagcuauuguuagguu

SEQ ID NO: 836124 - RNA, 19 nt, Homo sapiens
  misc_RNA (1)...(19): siRNA sense strand
cauauucgguugcaucuuc

SEQ ID NO: 836125 - RNA, 19 nt, Homo sapiens
  misc_RNA (1)...(19): siRNA sense strand
gcucuaugauuucugcauu

SEQ ID NO: 836126 - RNA, 19 nt, Homo sapiens
  misc_RNA (1)...(19): siRNA sense strand
gcuuagugcucucgcucua

SEQ ID NO: 836127 - RNA, 19 nt, Homo sapiens
  misc_RNA (1)...(19): siRNA sense strand
caaucaauccaacagcaua

SEQ ID NO: 836128 - RNA, 19 nt, Homo sapiens
  misc_RNA (1)...(19): siRNA sense strand
ggacagcauccucaaucaa

SEQ ID NO: 836129 - RNA, 19 nt, Homo sapiens
  misc_RNA (1)...(19): siRNA sense strand
gacagcauccucaaucaau

SEQ ID NO: 836130 - RNA, 19 nt, Homo sapiens
  misc_RNA (1)...(19): siRNA sense strand
cacacuacagcuauuguua

SEQ ID NO: 836131 - RNA, 19 nt, Homo sapiens
  misc_RNA (1)...(19): siRNA sense strand
gcaccgccaucagcuguuc

SEQ ID NO: 836132 - RNA, 19 nt, Homo sapiens
  misc_RNA (1)...(19): siRNA sense strand
ucuucgugcucuaugauuu

SEQ ID NO: 836133 - RNA, 19 nt, Homo sapiens
  misc_RNA (1)...(19): siRNA sense strand
ucuacgcgcugcacgugaa

SEQ ID NO: 836134 - RNA, 19 nt, Homo sapiens
  misc_RNA (1)...(19): siRNA sense strand
ucuacacacuacagcuauu

SEQ ID NO: 836135 - RNA, 19 nt, Homo sapiens
  misc_RNA (1)...(19): siRNA sense strand
ugagcucccuggugucucu

SEQ ID NO: 836136 - RNA, 19 nt, Homo sapiens
  misc_RNA (1)...(19): siRNA sense strand
ucuaugauuucugcauugu

SEQ ID NO: 836137 - RNA, 19 nt, Homo sapiens
  misc_RNA (1)...(19): siRNA sense strand
ucaauccaacagcauauuc

SEQ ID NO: 836138 - RNA, 19 nt, Homo sapiens
  misc_RNA (1)...(19): siRNA sense strand
cacuacagcuauuguuagg

SEQ ID NO: 836139 - RNA, 19 nt, Homo sapiens
  misc_RNA (1)...(19): siRNA sense strand
uguaucaccaccuaugcua

SEQ ID NO: 836140 - RNA, 19 nt, Homo sapiens
  misc_RNA (1)...(19): siRNA sense strand
acagcauccucaaucaauc

SEQ ID NO: 836141 - RNA, 19 nt, Homo sapiens
  misc_RNA (1)...(19): siRNA sense strand
ccaccuaugcuaucaacgu

SEQ ID NO: 836142 - RNA, 19 nt, Homo sapiens
  misc_RNA (1)...(19): siRNA sense strand
acacuacagcuauuguuag

SEQ ID NO: 836143 - RNA, 19 nt, Homo sapiens
  misc_RNA (1)...(19): siRNA sense strand
gcagggagcaggagcaguu

SEQ ID NO: 836144 - RNA, 19 nt, Homo sapiens
  misc_RNA (1)...(19): siRNA sense strand
gcggacggcuugugagaag

SEQ ID NO: 836145 - RNA, 19 nt, Homo sapiens
  misc_RNA (1)...(19): siRNA sense strand
uggcugggccugaggauuu

SEQ ID NO: 836146 - RNA, 19 nt, Homo sapiens
  misc_RNA (1)...(19): siRNA sense strand
gccugaacguggcauggaa

SEQ ID NO: 836147 - RNA, 19 nt, Homo sapiens
  misc_RNA (1)...(19): siRNA sense strand
aggcagagguggugaagcu

SEQ ID NO: 836148 - RNA, 19 nt, Homo sapiens
  misc_RNA (1)...(19): siRNA sense strand
gcucauccaggugcuuauu

SEQ ID NO: 836149 - RNA, 19 nt, Homo sapiens
  misc_RNA (1)...(19): siRNA sense strand
gcagcgagaaccugaugca

SEQ ID NO: 836150 - RNA, 19 nt, Homo sapiens
  misc_RNA (1)...(19): siRNA sense strand
ucauccaggugcuuauugg

SEQ ID NO: 836151 - RNA, 19 nt, Homo sapiens
  misc_RNA (1)...(19): siRNA sense strand
ggacagacaugacuuugga

SEQ ID NO: 836152 - RNA, 19 nt, Homo sapiens
  misc_RNA (1)...(19): siRNA sense strand
ucaacaaacuugcaagaaa

SEQ ID NO: 836153 - RNA, 19 nt, Homo sapiens
  misc_RNA (1)...(19): siRNA sense strand
gagcagaaaucaugagauc

SEQ ID NO: 836154 - RNA, 19 nt, Homo sapiens
  misc_RNA (1)...(19): siRNA sense strand
caacaaacuugcaagaaag

SEQ ID NO: 836155 - RNA, 19 nt, Homo sapiens
  misc_RNA (1)...(19): siRNA sense strand
gcacaaaugagcagaaucu

SEQ ID NO: 836156 - RNA, 19 nt, Homo sapiens
  misc_RNA (1)...(19): siRNA sense strand
gauuaaggaggaaggaaua

SEQ ID NO: 836157 - RNA, 19 nt, Homo sapiens
  misc_RNA (1)...(19): siRNA sense strand
gcagcugaaugacuuggaa

SEQ ID NO: 836158 - RNA, 19 nt, Homo sapiens
  misc_RNA (1)...(19): siRNA sense strand
agacaugacuuuggauuuc

SEQ ID NO: 836159 - RNA, 19 nt, Homo sapiens
  misc_RNA (1)...(19): siRNA sense strand
gaagaaauacagcccuugu

SEQ ID NO: 836160 - RNA, 19 nt, Homo sapiens
  misc_RNA (1)...(19): siRNA sense strand
gauaacaggaggaccuuga

SEQ ID NO: 836161 - RNA, 19 nt, Homo sapiens
  misc_RNA (1)...(19): siRNA sense strand
gcccuuugcuuuacugaug

SEQ ID NO: 836162 - RNA, 19 nt, Homo sapiens
  misc_RNA (1)...(19): siRNA sense strand
gcagaucuucaaccucuuu

SEQ ID NO: 836163 - RNA, 19 nt, Homo sapiens
  misc_RNA (1)...(19): siRNA sense strand
gaagaaucacucucuaucu

SEQ ID NO: 836164 - RNA, 19 nt, Homo sapiens
  misc_RNA (1)...(19): siRNA sense strand
gugcucagcugcaagucaa

SEQ ID NO: 836165 - RNA, 19 nt, Homo sapiens
  misc_RNA (1)...(19): siRNA sense strand
aagaaucacucucuaucug

SEQ ID NO: 836166 - RNA, 19 nt, Homo sapiens
  misc_RNA (1)...(19): siRNA sense strand
ugucagagcagaaaucaug

SEQ ID NO: 836167 - RNA, 19 nt, Homo sapiens
  misc_RNA (1)...(19): siRNA sense strand
gauggacagacaugacuuu

SEQ ID NO: 836168 - RNA, 19 nt, Homo sapiens
  misc_RNA (1)...(19): siRNA sense strand
gaggagagggugggagaaa

SEQ ID NO: 836169 - RNA, 19 nt, Homo sapiens
  misc_RNA (1)...(19): siRNA sense strand
caaacuugcaagaaagauu

SEQ ID NO: 836170 - RNA, 19 nt, Homo sapiens
  misc_RNA (1)...(19): siRNA sense strand
cgaagaaucacucucuauc

SEQ ID NO: 836171 - RNA, 19 nt, Homo sapiens
  misc_RNA (1)...(19): siRNA sense strand
ugacagagaagaaauacag

SEQ ID NO: 836172 - RNA, 19 nt, Homo sapiens
  misc_RNA (1)...(19): siRNA sense strand
ggccucgcccuuugcuuua

SEQ ID NO: 836173 - RNA, 19 nt, Homo sapiens
  misc_RNA (1)...(19): siRNA sense strand
cagacaugacuuuggauuu

SEQ ID NO: 836174 - RNA, 19 nt, Homo sapiens
  misc_RNA (1)...(19): siRNA sense strand
ccaucucuguccuccauga

SEQ ID NO: 836175 - RNA, 19 nt, Homo sapiens
  misc_RNA (1)...(19): siRNA sense strand
gagaaacuccccugaugaa

SEQ ID NO: 836176 - RNA, 19 nt, Homo sapiens
  misc_RNA (1)...(19): siRNA sense strand
gcugcucucugggcuguga

SEQ ID NO: 836177 - RNA, 19 nt, Homo sapiens
  misc_RNA (1)...(19): siRNA sense strand
gaaacuccccugaugaaug

SEQ ID NO: 836178 - RNA, 19 nt, Homo sapiens
  misc_RNA (1)...(19): siRNA sense strand
ggaccuccuagacaaauuc

SEQ ID NO: 836179 - RNA, 19 nt, Homo sapiens
  misc_RNA (1)...(19): siRNA sense strand
agaaucacucucuaucuga

SEQ ID NO: 836180 - RNA, 19 nt, Homo sapiens
  misc_RNA (1)...(19): siRNA sense strand
uaucaacaaacuugcaaga

SEQ ID NO: 836181 - RNA, 19 nt, Homo sapiens
  misc_RNA (1)...(19): siRNA sense strand
gagguugucagagcagaaa

SEQ ID NO: 836182 - RNA, 19 nt, Homo sapiens
  misc_RNA (1)...(19): siRNA sense strand
gagacccacagccuggaua

SEQ ID NO: 836183 - RNA, 19 nt, Homo sapiens
  misc_RNA (1)...(19): siRNA sense strand
uaacaggaggaccuugaug

SEQ ID NO: 836184 - RNA, 19 nt, Homo sapiens
  misc_RNA (1)...(19): siRNA sense strand
cuuggaagccugugugaug

SEQ ID NO: 836185 - RNA, 19 nt, Homo sapiens
  misc_RNA (1)...(19): siRNA sense strand
ucuccuuccuccugucuga

SEQ ID NO: 836186 - RNA, 19 nt, Homo sapiens
  misc_RNA (1)...(19): siRNA sense strand
gacuccaucuuggcuguga

SEQ ID NO: 836187 - RNA, 19 nt, Homo sapiens
  misc_RNA (1)...(19): siRNA sense strand
ggagagggugggagaaacu

SEQ ID NO: 836188 - RNA, 19 nt, Homo sapiens
  misc_RNA (1)...(19): siRNA sense strand
uggcacaaaugagcagaau

SEQ ID NO: 836189 - RNA, 19 nt, Homo sapiens
  misc_RNA (1)...(19): siRNA sense strand
ccgaagaaucacucucuau

SEQ ID NO: 836190 - RNA, 19 nt, Homo sapiens
  misc_RNA (1)...(19): siRNA sense strand
acagacaugacuuuggauu

SEQ ID NO: 836191 - RNA, 19 nt, Homo sapiens
  misc_RNA (1)...(19): siRNA sense strand
cagagcagaaaucaugaga

SEQ ID NO: 836192 - RNA, 19 nt, Homo sapiens
  misc_RNA (1)...(19): siRNA sense strand
uccgaagaaucacucucua

SEQ ID NO: 836193 - RNA, 19 nt, Homo sapiens
  misc_RNA (1)...(19): siRNA sense strand
caaauucugcaccgaacuc

SEQ ID NO: 836194 - RNA, 19 nt, Homo sapiens
  misc_RNA (1)...(19): siRNA sense strand
ucaaccucuuuaccacaaa

SEQ ID NO: 836195 - RNA, 19 nt, Homo sapiens
  misc_RNA (1)...(19): siRNA sense strand
cagaucuucaaccucuuua

SEQ ID NO: 836196 - RNA, 19 nt, Homo sapiens
  misc_RNA (1)...(19): siRNA sense strand
ggagguugucagagcagaa

SEQ ID NO: 836197 - RNA, 19 nt, Homo sapiens
  misc_RNA (1)...(19): siRNA sense strand
ggucagacauggacuauug

SEQ ID NO: 836198 - RNA, 19 nt, Homo sapiens
  misc_RNA (1)...(19): siRNA sense strand
ggaggaagaggacguguua

SEQ ID NO: 836199 - RNA, 19 nt, Homo sapiens
  misc_RNA (1)...(19): siRNA sense strand
aagaagacccguagacuga

SEQ ID NO: 836200 - RNA, 19 nt, Homo sapiens
  misc_RNA (1)...(19): siRNA sense strand
gaagacccguagacugaag

SEQ ID NO: 836201 - RNA, 19 nt, Homo sapiens
  misc_RNA (1)...(19): siRNA sense strand
ggaagaggacguguuagug

SEQ ID NO: 836202 - RNA, 19 nt, Homo sapiens
  misc_RNA (1)...(19): siRNA sense strand
gugcagcgcaucaagaaga

SEQ ID NO: 836203 - RNA, 19 nt, Homo sapiens
  misc_RNA (1)...(19): siRNA sense strand
cccuacagcugcacuuuau

SEQ ID NO: 836204 - RNA, 19 nt, Homo sapiens
  misc_RNA (1)...(19): siRNA sense strand
acgccaagcucaccaagau

SEQ ID NO: 836205 - RNA, 19 nt, Homo sapiens
  misc_RNA (1)...(19): siRNA sense strand
ccaacaaccgcgagcgaaa

SEQ ID NO: 836206 - RNA, 19 nt, Homo sapiens
  misc_RNA (1)...(19): siRNA sense strand
gcgcuucgcccacaacuac

SEQ ID NO: 836207 - RNA, 19 nt, Homo sapiens
  misc_RNA (1)...(19): siRNA sense strand
gaaaccgcaugcacaaccu

SEQ ID NO: 836208 - RNA, 19 nt, Homo sapiens
  misc_RNA (1)...(19): siRNA sense strand
agccagggauuguaucuag

SEQ ID NO: 836209 - RNA, 19 nt, Homo sapiens
  misc_RNA (1)...(19): siRNA sense strand
uccgagaccuuggaguuga

SEQ ID NO: 836210 - RNA, 19 nt, Homo sapiens
  misc_RNA (1)...(19): siRNA sense strand
ccgagaccuuggaguugaa

SEQ ID NO: 836211 - RNA, 19 nt, Homo sapiens
  misc_RNA (1)...(19): siRNA sense strand
cgacaagcaccgcuaugca

SEQ ID NO: 836212 - RNA, 19 nt, Homo sapiens
  misc_RNA (1)...(19): siRNA sense strand
aauccgagaccuuggaguu

SEQ ID NO: 836213 - RNA, 19 nt, Homo sapiens
  misc_RNA (1)...(19): siRNA sense strand
ucaaauccgagaccuugga

SEQ ID NO: 836214 - RNA, 19 nt, Homo sapiens
  misc_RNA (1)...(19): siRNA sense strand
ccauagccagggauuguau

SEQ ID NO: 836215 - RNA, 19 nt, Homo sapiens
  misc_RNA (1)...(19): siRNA sense strand
gaaaugacuuugccuguga

SEQ ID NO: 836216 - RNA, 19 nt, Homo sapiens
  misc_RNA (1)...(19): siRNA sense strand
gcaaguaccaccugcguua

SEQ ID NO: 836217 - RNA, 19 nt, Homo sapiens
  misc_RNA (1)...(19): siRNA sense strand
ggccacagccgcaccauaa

SEQ ID NO: 836218 - RNA, 19 nt, Homo sapiens
  misc_RNA (1)...(19): siRNA sense strand
ucacgguguuuaugucuuu

SEQ ID NO: 836219 - RNA, 19 nt, Homo sapiens
  misc_RNA (1)...(19): siRNA sense strand
ccaccugcguuacuacaaa

SEQ ID NO: 836220 - RNA, 19 nt, Homo sapiens
  misc_RNA (1)...(19): siRNA sense strand
ggacacagaacgcaaguac

SEQ ID NO: 836221 - RNA, 19 nt, Homo sapiens
  misc_RNA (1)...(19): siRNA sense strand
ggcgacggcugccaguauu

SEQ ID NO: 836222 - RNA, 19 nt, Homo sapiens
  misc_RNA (1)...(19): siRNA sense strand
gcacggagcagcaguucca

SEQ ID NO: 836223 - RNA, 19 nt, Homo sapiens
  misc_RNA (1)...(19): siRNA sense strand
gccaggccaugauugagaa

SEQ ID NO: 836224 - RNA, 19 nt, Homo sapiens
  misc_RNA (1)...(19): siRNA sense strand
cguguucccuaucuacaaa

SEQ ID NO: 836225 - RNA, 19 nt, Homo sapiens
  misc_RNA (1)...(19): siRNA sense strand
gaaccaccuggccguguuu

SEQ ID NO: 836226 - RNA, 19 nt, Homo sapiens
  misc_RNA (1)...(19): siRNA sense strand
guuuaugucuuugaacaga

SEQ ID NO: 836227 - RNA, 19 nt, Homo sapiens
  misc_RNA (1)...(19): siRNA sense strand
gacggcaccuucaacuaca

SEQ ID NO: 836228 - RNA, 19 nt, Homo sapiens
  misc_RNA (1)...(19): siRNA sense strand
caucaggacccgcgucaau

SEQ ID NO: 836229 - RNA, 19 nt, Homo sapiens
  misc_RNA (1)...(19): siRNA sense strand
cugagaagccgacccacua

SEQ ID NO: 836230 - RNA, 19 nt, Homo sapiens
  misc_RNA (1)...(19): siRNA sense strand
gaaaugccaagcggagaga

SEQ ID NO: 836231 - RNA, 19 nt, Homo sapiens
  misc_RNA (1)...(19): siRNA sense strand
caaggaggccgaggagaga

SEQ ID NO: 836232 - RNA, 19 nt, Homo sapiens
  misc_RNA (1)...(19): siRNA sense strand
ccacagccgcaccauaaau

SEQ ID NO: 836233 - RNA, 19 nt, Homo sapiens
  misc_RNA (1)...(19): siRNA sense strand
gcaacgacaugcgccaaac

SEQ ID NO: 836234 - RNA, 19 nt, Homo sapiens
  misc_RNA (1)...(19): siRNA sense strand
cuacaaaucuacaaaaugc

SEQ ID NO: 836235 - RNA, 19 nt, Homo sapiens
  misc_RNA (1)...(19): siRNA sense strand
gcagcgagcaagacagcaa

SEQ ID NO: 836236 - RNA, 19 nt, Homo sapiens
  misc_RNA (1)...(19): siRNA sense strand
cauaaauccugagggagau

SEQ ID NO: 836237 - RNA, 19 nt, Homo sapiens
  misc_RNA (1)...(19): siRNA sense strand
cgacggcaccuucaacuac

SEQ ID NO: 836238 - RNA, 19 nt, Homo sapiens
  misc_RNA (1)...(19): siRNA sense strand
agaaccaccuggccguguu

SEQ ID NO: 836239 - RNA, 19 nt, Homo sapiens
  misc_RNA (1)...(19): siRNA sense strand
acacagaacgcaaguacca

SEQ ID NO: 836240 - RNA, 19 nt, Homo sapiens
  misc_RNA (1)...(19): siRNA sense strand
gaagaaugggcugcacugu

SEQ ID NO: 836241 - RNA, 19 nt, Homo sapiens
  misc_RNA (1)...(19): siRNA sense strand
gacguguacugcuccaagu

SEQ ID NO: 836242 - RNA, 19 nt, Homo sapiens
  misc_RNA (1)...(19): siRNA sense strand
ugcccacacuaccacaaua

SEQ ID NO: 836243 - RNA, 19 nt, Homo sapiens
  misc_RNA (1)...(19): siRNA sense strand
ccagccaggccaugauuga

SEQ ID NO: 836244 - RNA, 19 nt, Homo sapiens
  misc_RNA (1)...(19): siRNA sense strand
gcgacggcaccuucaacua

SEQ ID NO: 836245 - RNA, 19 nt, Homo sapiens
  misc_RNA (1)...(19): siRNA sense strand
ggcaccguguggcccauuu

SEQ ID NO: 836246 - RNA, 19 nt, Homo sapiens
  misc_RNA (1)...(19): siRNA sense strand
gcgcucacgguguuuaugu

SEQ ID NO: 836247 - RNA, 19 nt, Homo sapiens
  misc_RNA (1)...(19): siRNA sense strand
uaaauccugagggagauaa

SEQ ID NO: 836248 - RNA, 19 nt, Homo sapiens
  misc_RNA (1)...(19): siRNA sense strand
ggccagacccgcaaugacu

SEQ ID NO: 836249 - RNA, 19 nt, Homo sapiens
  misc_RNA (1)...(19): siRNA sense strand
gccacugcgugaagaaugg

SEQ ID NO: 836250 - RNA, 19 nt, Homo sapiens
  misc_RNA (1)...(19): siRNA sense strand
ggaauggccccacaugugu

SEQ ID NO: 836251 - RNA, 19 nt, Homo sapiens
  misc_RNA (1)...(19): siRNA sense strand
gcuaugcgugcccacacua

SEQ ID NO: 836252 - RNA, 19 nt, Homo sapiens
  misc_RNA (1)...(19): siRNA sense strand
uucccuaucuacaaaucua

SEQ ID NO: 836253 - RNA, 19 nt, Homo sapiens
  misc_RNA (1)...(19): siRNA sense strand
ccaggaagccuugcagaac

SEQ ID NO: 836254 - RNA, 19 nt, Homo sapiens
  misc_RNA (1)...(19): siRNA sense strand
ucaggacccgcgucaaugu

SEQ ID NO: 836255 - RNA, 19 nt, Homo sapiens
  misc_RNA (1)...(19): siRNA sense strand
ggccaugauugagaagauc

SEQ ID NO: 836256 - RNA, 19 nt, Homo sapiens
  misc_RNA (1)...(19): siRNA sense strand
gagaagccgacccacuaca

SEQ ID NO: 836257 - RNA, 19 nt, Homo sapiens
  misc_RNA (1)...(19): siRNA sense strand
ggaagauccuggugcauug

SEQ ID NO: 836258 - RNA, 19 nt, Homo sapiens
  misc_RNA (1)...(19): siRNA sense strand
caacauccuuuccucaaug

SEQ ID NO: 836259 - RNA, 19 nt, Homo sapiens
  misc_RNA (1)...(19): siRNA sense strand
gggaagauccuggugcauu

SEQ ID NO: 836260 - RNA, 19 nt, Homo sapiens
  misc_RNA (1)...(19): siRNA sense strand
uggccuaccucaugcugua

SEQ ID NO: 836261 - RNA, 19 nt, Homo sapiens
  misc_RNA (1)...(19): siRNA sense strand
ucaacauccuuuccucaau

SEQ ID NO: 836262 - RNA, 19 nt, Homo sapiens
  misc_RNA (1)...(19): siRNA sense strand
ccacgacucgccagccuuu

SEQ ID NO: 836263 - RNA, 19 nt, Homo sapiens
  misc_RNA (1)...(19): siRNA sense strand
gagaccaggacauggcuaa

SEQ ID NO: 836264 - RNA, 19 nt, Homo sapiens
  misc_RNA (1)...(19): siRNA sense strand
gcuuugggcuucuaugacu

SEQ ID NO: 836265 - RNA, 19 nt, Homo sapiens
  misc_RNA (1)...(19): siRNA sense strand
ggagaugccaaccguucaa

SEQ ID NO: 836266 - RNA, 19 nt, Homo sapiens
  misc_RNA (1)...(19): siRNA sense strand
ucacgcacguccucaaugc

SEQ ID NO: 836267 - RNA, 19 nt, Homo sapiens
  misc_RNA (1)...(19): siRNA sense strand
gggcuucuaugacuuuuau

SEQ ID NO: 836268 - RNA, 19 nt, Homo sapiens
  misc_RNA (1)...(19): siRNA sense strand
ugacaugagcauccacuuc

SEQ ID NO: 836269 - RNA, 19 nt, Homo sapiens
  misc_RNA (1)...(19): siRNA sense strand
uggaggccaucaagaaagu

SEQ ID NO: 836270 - RNA, 19 nt, Homo sapiens
  misc_RNA (1)...(19): siRNA sense strand
caaccguucaacauccuuu

SEQ ID NO: 836271 - RNA, 19 nt, Homo sapiens
  misc_RNA (1)...(19): siRNA sense strand
cguggaggccaucaagaaa

SEQ ID NO: 836272 - RNA, 19 nt, Homo sapiens
  misc_RNA (1)...(19): siRNA sense strand
gaagauccuggugcauugu

SEQ ID NO: 836273 - RNA, 19 nt, Homo sapiens
  misc_RNA (1)...(19): siRNA sense strand
accaggacauggcuaacaa

SEQ ID NO: 836274 - RNA, 19 nt, Homo sapiens
  misc_RNA (1)...(19): siRNA sense strand
ucaaugucuucgaguugga

SEQ ID NO: 836275 - RNA, 19 nt, Homo sapiens
  misc_RNA (1)...(19): siRNA sense strand
gaugccaaccguucaacau

SEQ ID NO: 836276 - RNA, 19 nt, Homo sapiens
  misc_RNA (1)...(19): siRNA sense strand
ggccaucaagaaagucaaa

SEQ ID NO: 836277 - RNA, 19 nt, Homo sapiens
  misc_RNA (1)...(19): siRNA sense strand
gaccaggacauggcuaaca

SEQ ID NO: 836278 - RNA, 19 nt, Homo sapiens
  misc_RNA (1)...(19): siRNA sense strand
ucgccagccuuugacauga

SEQ ID NO: 836279 - RNA, 19 nt, Homo sapiens
  misc_RNA (1)...(19): siRNA sense strand
ccucaaugucuucgaguug

SEQ ID NO: 836280 - RNA, 19 nt, Homo sapiens
  misc_RNA (1)...(19): siRNA sense strand
ccaucaagaaagucaaaga

SEQ ID NO: 836281 - RNA, 19 nt, Homo sapiens
  misc_RNA (1)...(19): siRNA sense strand
cucaaggucuccuguucga

SEQ ID NO: 836282 - RNA, 19 nt, Homo sapiens
  misc_RNA (1)...(19): siRNA sense strand
gagcucaaguucaucaaga

SEQ ID NO: 836283 - RNA, 19 nt, Homo sapiens
  misc_RNA (1)...(19): siRNA sense strand
ucaacgaccuggagaagga

SEQ ID NO: 836284 - RNA, 19 nt, Homo sapiens
  misc_RNA (1)...(19): siRNA sense strand
gaaccaggccucccaugug

SEQ ID NO: 836285 - RNA, 19 nt, Homo sapiens
  misc_RNA (1)...(19): siRNA sense strand
ccucgucccuggccucaaa

SEQ ID NO: 836286 - RNA, 19 nt, Homo sapiens
  misc_RNA (1)...(19): siRNA sense strand
ccagcgagcucaaguucau

SEQ ID NO: 836287 - RNA, 19 nt, Homo sapiens
  misc_RNA (1)...(19): siRNA sense strand
aaccaggccucccauguga

SEQ ID NO: 836288 - RNA, 19 nt, Homo sapiens
  misc_RNA (1)...(19): siRNA sense strand
guacuucaugugugaguuu

SEQ ID NO: 836289 - RNA, 19 nt, Homo sapiens
  misc_RNA (1)...(19): siRNA sense strand
ugacaaggagaacauguga

SEQ ID NO: 836290 - RNA, 19 nt, Homo sapiens
  misc_RNA (1)...(19): siRNA sense strand
agacggagagcaagaucua

SEQ ID NO: 836291 - RNA, 19 nt, Homo sapiens
  misc_RNA (1)...(19): siRNA sense strand
gcggugagcccaacaaugc

SEQ ID NO: 836292 - RNA, 19 nt, Homo sapiens
  misc_RNA (1)...(19): siRNA sense strand
ugugugaguuugacaagga

SEQ ID NO: 836293 - RNA, 19 nt, Homo sapiens
  misc_RNA (1)...(19): siRNA sense strand
gaccagcgagcucaaguuc

SEQ ID NO: 836294 - RNA, 19 nt, Homo sapiens
  misc_RNA (1)...(19): siRNA sense strand
ucaaguucaucaagaaugc

SEQ ID NO: 836295 - RNA, 19 nt, Homo sapiens
  misc_RNA (1)...(19): siRNA sense strand
gcgccuucguguacucuga

SEQ ID NO: 836296 - RNA, 19 nt, Homo sapiens
  misc_RNA (1)...(19): siRNA sense strand
gggagagaagggagacaaa

SEQ ID NO: 836297 - RNA, 19 nt, Homo sapiens
  misc_RNA (1)...(19): siRNA sense strand
agaucuaccugcuggugaa

SEQ ID NO: 836298 - RNA, 19 nt, Homo sapiens
  misc_RNA (1)...(19): siRNA sense strand
gagagaagggagacaaagg

SEQ ID NO: 836299 - RNA, 19 nt, Homo sapiens
  misc_RNA (1)...(19): siRNA sense strand
ggagagaagggagacaaag

SEQ ID NO: 836300 - RNA, 19 nt, Homo sapiens
  misc_RNA (1)...(19): siRNA sense strand
cagccuggccuuccuguca

SEQ ID NO: 836301 - RNA, 19 nt, Homo sapiens
  misc_RNA (1)...(19): siRNA sense strand
gcucuaaaggugagaaagg

SEQ ID NO: 836302 - RNA, 19 nt, Homo sapiens
  misc_RNA (1)...(19): siRNA sense strand
cagugugggucgucaugga

SEQ ID NO: 836303 - RNA, 19 nt, Homo sapiens
  misc_RNA (1)...(19): siRNA sense strand
augcggaccuucaacaagu

SEQ ID NO: 836304 - RNA, 19 nt, Homo sapiens
  misc_RNA (1)...(19): siRNA sense strand
gcucaaguucaucaagaau

SEQ ID NO: 836305 - RNA, 19 nt, Homo sapiens
  misc_RNA (1)...(19): siRNA sense strand
agauuccggugacauagga

SEQ ID NO: 836306 - RNA, 19 nt, Homo sapiens
  misc_RNA (1)...(19): siRNA sense strand
ggagauuccggugacauag

SEQ ID NO: 836307 - RNA, 19 nt, Homo sapiens
  misc_RNA (1)...(19): siRNA sense strand
gcaucaacgaccuggagaa

SEQ ID NO: 836308 - RNA, 19 nt, Homo sapiens
  misc_RNA (1)...(19): siRNA sense strand
aggagauuccggugacaua

SEQ ID NO: 836309 - RNA, 19 nt, Homo sapiens
  misc_RNA (1)...(19): siRNA sense strand
caaggacgaggcugccaau

SEQ ID NO: 836310 - RNA, 19 nt, Homo sapiens
  misc_RNA (1)...(19): siRNA sense strand
ggaggacugcguggagaug

SEQ ID NO: 836311 - RNA, 19 nt, Homo sapiens
  misc_RNA (1)...(19): siRNA sense strand
gaaugaggcugagauaguu

SEQ ID NO: 836312 - RNA, 19 nt, Homo sapiens
  misc_RNA (1)...(19): siRNA sense strand
ggaagaggaugugcugaaa

SEQ ID NO: 836313 - RNA, 19 nt, Homo sapiens
  misc_RNA (1)...(19): siRNA sense strand
aagaggaugugcugaaaua

SEQ ID NO: 836314 - RNA, 19 nt, Homo sapiens
  misc_RNA (1)...(19): siRNA sense strand
ggaagaggacagugggaaa

SEQ ID NO: 836315 - RNA, 19 nt, Homo sapiens
  misc_RNA (1)...(19): siRNA sense strand
cgacaaggacuguguacug

SEQ ID NO: 836316 - RNA, 19 nt, Homo sapiens
  misc_RNA (1)...(19): siRNA sense strand
ugaaauacguccgggagau

SEQ ID NO: 836317 - RNA, 19 nt, Homo sapiens
  misc_RNA (1)...(19): siRNA sense strand
gaagaggaugugcugaaau

SEQ ID NO: 836318 - RNA, 19 nt, Homo sapiens
  misc_RNA (1)...(19): siRNA sense strand
ugaaugaggcugagauagu

SEQ ID NO: 836319 - RNA, 19 nt, Homo sapiens
  misc_RNA (1)...(19): siRNA sense strand
caaggacuguguacugcau

SEQ ID NO: 836320 - RNA, 19 nt, Homo sapiens
  misc_RNA (1)...(19): siRNA sense strand
gagcagcagugaggaagag

SEQ ID NO: 836321 - RNA, 19 nt, Homo sapiens
  misc_RNA (1)...(19): siRNA sense strand
ugagauaguugauguugcu

SEQ ID NO: 836322 - RNA, 19 nt, Homo sapiens
  misc_RNA (1)...(19): siRNA sense strand
gcaagacucccugcgacaa

SEQ ID NO: 836323 - RNA, 19 nt, Homo sapiens
  misc_RNA (1)...(19): siRNA sense strand
caugaaugaggcugagaua

SEQ ID NO: 836324 - RNA, 19 nt, Homo sapiens
  misc_RNA (1)...(19): siRNA sense strand
gaaauacguccgggagauc

SEQ ID NO: 836325 - RNA, 19 nt, Homo sapiens
  misc_RNA (1)...(19): siRNA sense strand
aggcugagauaguugaugu

SEQ ID NO: 836326 - RNA, 19 nt, Homo sapiens
  misc_RNA (1)...(19): siRNA sense strand
gcugagauaguugauguug

SEQ ID NO: 836327 - RNA, 19 nt, Homo sapiens
  misc_RNA (1)...(19): siRNA sense strand
gagagccgcaaacaggaaa

SEQ ID NO: 836328 - RNA, 19 nt, Homo sapiens
  misc_RNA (1)...(19): siRNA sense strand
gguuccagcucugccugua

SEQ ID NO: 836329 - RNA, 19 nt, Homo sapiens
  misc_RNA (1)...(19): siRNA sense strand
ggaggaggaggaagaggau

SEQ ID NO: 836330 - RNA, 19 nt, Homo sapiens
  misc_RNA (1)...(19): siRNA sense strand
gaagaggacagugggaaac

SEQ ID NO: 836331 - RNA, 19 nt, Homo sapiens
  misc_RNA (1)...(19): siRNA sense strand
gcaugaaugaggcugagau

SEQ ID NO: 836332 - RNA, 19 nt, Homo sapiens
  misc_RNA (1)...(19): siRNA sense strand
ggagcagcagugaggaaga

SEQ ID NO: 836333 - RNA, 19 nt, Homo sapiens
  misc_RNA (1)...(19): siRNA sense strand
cccaagaggaugagaaugg

SEQ ID NO: 836334 - RNA, 19 nt, Homo sapiens
  misc_RNA (1)...(19): siRNA sense strand
guacagaacccacauccuu

SEQ ID NO: 836335 - RNA, 19 nt, Homo sapiens
  misc_RNA (1)...(19): siRNA sense strand
uccagaaccuccguacaga

SEQ ID NO: 836336 - RNA, 19 nt, Homo sapiens
  misc_RNA (1)...(19): siRNA sense strand
ccagaaccuccguacagaa

SEQ ID NO: 836337 - RNA, 19 nt, Homo sapiens
  misc_RNA (1)...(19): siRNA sense strand
ccagaaccuccguccagaa

SEQ ID NO: 836338 - RNA, 19 nt, Homo sapiens
  misc_RNA (1)...(19): siRNA sense strand
ggaaaguucuuguuugcua

SEQ ID NO: 836339 - RNA, 19 nt, Homo sapiens
  misc_RNA (1)...(19): siRNA sense strand
gcagacacauuuaaucaaa

SEQ ID NO: 836340 - RNA, 19 nt, Homo sapiens
  misc_RNA (1)...(19): siRNA sense strand
caacaaagaguccaagaaa

SEQ ID NO: 836341 - RNA, 19 nt, Homo sapiens
  misc_RNA (1)...(19): siRNA sense strand
ggaaagugcagacacauuu

SEQ ID NO: 836342 - RNA, 19 nt, Homo sapiens
  misc_RNA (1)...(19): siRNA sense strand
uaacuggaauugggacuua

SEQ ID NO: 836343 - RNA, 19 nt, Homo sapiens
  misc_RNA (1)...(19): siRNA sense strand
aagaagaacuaucagagua

SEQ ID NO: 836344 - RNA, 19 nt, Homo sapiens
  misc_RNA (1)...(19): siRNA sense strand
gaaagugcagacacauuua

SEQ ID NO: 836345 - RNA, 19 nt, Homo sapiens
  misc_RNA (1)...(19): siRNA sense strand
aaagucagaucaacaaaga

SEQ ID NO: 836346 - RNA, 19 nt, Homo sapiens
  misc_RNA (1)...(19): siRNA sense strand
ggagaaagaaaggcuaaua

SEQ ID NO: 836347 - RNA, 19 nt, Homo sapiens
  misc_RNA (1)...(19): siRNA sense strand
cgacccagcuagaccauuu

SEQ ID NO: 836348 - RNA, 19 nt, Homo sapiens
  misc_RNA (1)...(19): siRNA sense strand
ggagaaacacaccaaacua

SEQ ID NO: 836349 - RNA, 19 nt, Homo sapiens
  misc_RNA (1)...(19): siRNA sense strand
gaagaacuaucagaguaug

SEQ ID NO: 836350 - RNA, 19 nt, Homo sapiens
  misc_RNA (1)...(19): siRNA sense strand
aaaggugucugccaaagaa

SEQ ID NO: 836351 - RNA, 19 nt, Homo sapiens
  misc_RNA (1)...(19): siRNA sense strand
caaagaagagcuccaucua

SEQ ID NO: 836352 - RNA, 19 nt, Homo sapiens
  misc_RNA (1)...(19): siRNA sense strand
caacugagcuaucuuugcu

SEQ ID NO: 836353 - RNA, 19 nt, Homo sapiens
  misc_RNA (1)...(19): siRNA sense strand
uaucagacaccaauucuaa

SEQ ID NO: 836354 - RNA, 19 nt, Homo sapiens
  misc_RNA (1)...(19): siRNA sense strand
guaaucaaguuaucagaca

SEQ ID NO: 836355 - RNA, 19 nt, Homo sapiens
  misc_RNA (1)...(19): siRNA sense strand
gagaaagaaaggcuaauau

SEQ ID NO: 836356 - RNA, 19 nt, Homo sapiens
  misc_RNA (1)...(19): siRNA sense strand
aagaagagcuccaucuaca

SEQ ID NO: 836357 - RNA, 19 nt, Homo sapiens
  misc_RNA (1)...(19): siRNA sense strand
gaaaggugucugccaaaga

SEQ ID NO: 836358 - RNA, 19 nt, Homo sapiens
  misc_RNA (1)...(19): siRNA sense strand
gaggaugggccaacucaaa

SEQ ID NO: 836359 - RNA, 19 nt, Homo sapiens
  misc_RNA (1)...(19): siRNA sense strand
ggagucaacuuuucacuga

SEQ ID NO: 836360 - RNA, 19 nt, Homo sapiens
  misc_RNA (1)...(19): siRNA sense strand
aaacauagaaucggugaaa

SEQ ID NO: 836361 - RNA, 19 nt, Homo sapiens
  misc_RNA (1)...(19): siRNA sense strand
uagaaucggugaaacaaag

SEQ ID NO: 836362 - RNA, 19 nt, Homo sapiens
  misc_RNA (1)...(19): siRNA sense strand
gcagugaccagaagagugu

SEQ ID NO: 836363 - RNA, 19 nt, Homo sapiens
  misc_RNA (1)...(19): siRNA sense strand
gaagccugauuugcucuuu

SEQ ID NO: 836364 - RNA, 19 nt, Homo sapiens
  misc_RNA (1)...(19): siRNA sense strand
ggaauggcuucaugagucu

SEQ ID NO: 836365 - RNA, 19 nt, Homo sapiens
  misc_RNA (1)...(19): siRNA sense strand
aagaguguuucaucucaua

SEQ ID NO: 836366 - RNA, 19 nt, Homo sapiens
  misc_RNA (1)...(19): siRNA sense strand
gaagaguguuucaucucau

SEQ ID NO: 836367 - RNA, 19 nt, Homo sapiens
  misc_RNA (1)...(19): siRNA sense strand
gaaagacaaauggcaguga

SEQ ID NO: 836368 - RNA, 19 nt, Homo sapiens
  misc_RNA (1)...(19): siRNA sense strand
ccaggacucugaagguaau

SEQ ID NO: 836369 - RNA, 19 nt, Homo sapiens
  misc_RNA (1)...(19): siRNA sense strand
agaagaguguuucaucuca

SEQ ID NO: 836370 - RNA, 19 nt, Homo sapiens
  misc_RNA (1)...(19): siRNA sense strand
ccagaagaguguuucaucu

SEQ ID NO: 836371 - RNA, 19 nt, Homo sapiens
  misc_RNA (1)...(19): siRNA sense strand
gaaagucagaucaacaaag

SEQ ID NO: 836372 - RNA, 19 nt, Homo sapiens
  misc_RNA (1)...(19): siRNA sense strand
gagaaacacaccaaacuac

SEQ ID NO: 836373 - RNA, 19 nt, Homo sapiens
  misc_RNA (1)...(19): siRNA sense strand
caaguuaucagacaccaau

SEQ ID NO: 836374 - RNA, 19 nt, Homo sapiens
  misc_RNA (1)...(19): siRNA sense strand
cagaaagucagaucaacaa

SEQ ID NO: 836375 - RNA, 19 nt, Homo sapiens
  misc_RNA (1)...(19): siRNA sense strand
gaagguaaucaaguuauca

SEQ ID NO: 836376 - RNA, 19 nt, Homo sapiens
  misc_RNA (1)...(19): siRNA sense strand
gugcagacacauuuaauca

SEQ ID NO: 836377 - RNA, 19 nt, Homo sapiens
  misc_RNA (1)...(19): siRNA sense strand
aggcaagacuaaauuggaa

SEQ ID NO: 836378 - RNA, 19 nt, Homo sapiens
  misc_RNA (1)...(19): siRNA sense strand
acaaagccguaguccaguu

SEQ ID NO: 836379 - RNA, 19 nt, Homo sapiens
  misc_RNA (1)...(19): siRNA sense strand
gcuggacucucuccucagu

SEQ ID NO: 836380 - RNA, 19 nt, Homo sapiens
  misc_RNA (1)...(19): siRNA sense strand
agacugugcuggagauagu

SEQ ID NO: 836381 - RNA, 19 nt, Homo sapiens
  misc_RNA (1)...(19): siRNA sense strand
caaagccguaguccaguuu

SEQ ID NO: 836382 - RNA, 19 nt, Homo sapiens
  misc_RNA (1)...(19): siRNA sense strand
caaauggcagugaccagaa

SEQ ID NO: 836383 - RNA, 19 nt, Homo sapiens
  misc_RNA (1)...(19): siRNA sense strand
ugaagguaaucaaguuauc

SEQ ID NO: 836384 - RNA, 19 nt, Homo sapiens
  misc_RNA (1)...(19): siRNA sense strand
aaucaaaccaggcaccaaa

SEQ ID NO: 836385 - RNA, 19 nt, Homo sapiens
  misc_RNA (1)...(19): siRNA sense strand
guaguccaguuucuguguu

SEQ ID NO: 836386 - RNA, 19 nt, Homo sapiens
  misc_RNA (1)...(19): siRNA sense strand
caaacuaccuggggacaaa

SEQ ID NO: 836387 - RNA, 19 nt, Homo sapiens
  misc_RNA (1)...(19): siRNA sense strand
uaagaagaacuaucagagu

SEQ ID NO: 836388 - RNA, 19 nt, Homo sapiens
  misc_RNA (1)...(19): siRNA sense strand
aagccugauuugcucuuua

SEQ ID NO: 836389 - RNA, 19 nt, Homo sapiens
  misc_RNA (1)...(19): siRNA sense strand
aaagugcagacacauuuaa

SEQ ID NO: 836390 - RNA, 19 nt, Homo sapiens
  misc_RNA (1)...(19): siRNA sense strand
aaaugggaauggcuucaug

SEQ ID NO: 836391 - RNA, 19 nt, Homo sapiens
  misc_RNA (1)...(19): siRNA sense strand
cuuggaaaguucuuguuug

SEQ ID NO: 836392 - RNA, 19 nt, Homo sapiens
  misc_RNA (1)...(19): siRNA sense strand
uguuucaucucauacagaa

SEQ ID NO: 836393 - RNA, 19 nt, Homo sapiens
  misc_RNA (1)...(19): siRNA sense strand
ugucagcccuuaggcaaga

SEQ ID NO: 836394 - RNA, 19 nt, Homo sapiens
  misc_RNA (1)...(19): siRNA sense strand
ucaacaaagaguccaagaa

SEQ ID NO: 836395 - RNA, 19 nt, Homo sapiens
  misc_RNA (1)...(19): siRNA sense strand
cauagaaucggugaaacaa

SEQ ID NO: 836396 - RNA, 19 nt, Homo sapiens
  misc_RNA (1)...(19): siRNA sense strand
caagauguaaccaauaacu

SEQ ID NO: 836397 - RNA, 19 nt, Homo sapiens
  misc_RNA (1)...(19): siRNA sense strand
ccagcuagaccauuugauc

SEQ ID NO: 836398 - RNA, 19 nt, Homo sapiens
  misc_RNA (1)...(19): siRNA sense strand
cuucaaacauacagggaau

SEQ ID NO: 836399 - RNA, 19 nt, Homo sapiens
  misc_RNA (1)...(19): siRNA sense strand
ggcggaaagugcagacaca

SEQ ID NO: 836400 - RNA, 19 nt, Homo sapiens
  misc_RNA (1)...(19): siRNA sense strand
gaaaugggaauggcuucau

SEQ ID NO: 836401 - RNA, 19 nt, Homo sapiens
  misc_RNA (1)...(19): siRNA sense strand
ucaaagaagagcuccaucu

SEQ ID NO: 836402 - RNA, 19 nt, Homo sapiens
  misc_RNA (1)...(19): siRNA sense strand
uaguccaguuucuguguuu

SEQ ID NO: 836403 - RNA, 19 nt, Homo sapiens
  misc_RNA (1)...(19): siRNA sense strand
agucuaagaagaacuauca

SEQ ID NO: 836404 - RNA, 19 nt, Homo sapiens
  misc_RNA (1)...(19): siRNA sense strand
gcaagacuaaauuggaaag

SEQ ID NO: 836405 - RNA, 19 nt, Homo sapiens
  misc_RNA (1)...(19): siRNA sense strand
ccauuugaucccaggcuua

SEQ ID NO: 836406 - RNA, 19 nt, Homo sapiens
  misc_RNA (1)...(19): siRNA sense strand
acccaggacucugaaggua

SEQ ID NO: 836407 - RNA, 19 nt, Homo sapiens
  misc_RNA (1)...(19): siRNA sense strand
ggucauugcccacaacacu

SEQ ID NO: 836408 - RNA, 19 nt, Homo sapiens
  misc_RNA (1)...(19): siRNA sense strand
gaauggagaaaacauagaa

SEQ ID NO: 836409 - RNA, 19 nt, Homo sapiens
  misc_RNA (1)...(19): siRNA sense strand
gaaacacaccaaacuaccu

SEQ ID NO: 836410 - RNA, 19 nt, Homo sapiens
  misc_RNA (1)...(19): siRNA sense strand
agaagaacuaucagaguau

SEQ ID NO: 836411 - RNA, 19 nt, Homo sapiens
  misc_RNA (1)...(19): siRNA sense strand
ggaaaugggaauggcuuca

SEQ ID NO: 836412 - RNA, 19 nt, Homo sapiens
  misc_RNA (1)...(19): siRNA sense strand
agaaaggugucugccaaag

SEQ ID NO: 836413 - RNA, 19 nt, Homo sapiens
  misc_RNA (1)...(19): siRNA sense strand
ggacucugaagguaaucaa

SEQ ID NO: 836414 - RNA, 19 nt, Homo sapiens
  misc_RNA (1)...(19): siRNA sense strand
ucugaagguaaucaaguua

SEQ ID NO: 836415 - RNA, 19 nt, Homo sapiens
  misc_RNA (1)...(19): siRNA sense strand
auacagaaagucagaucaa

SEQ ID NO: 836416 - RNA, 19 nt, Homo sapiens
  misc_RNA (1)...(19): siRNA sense strand
aaagaagagcuccaucuac

SEQ ID NO: 836417 - RNA, 19 nt, Homo sapiens
  misc_RNA (1)...(19): siRNA sense strand
ggaauccuggaauggagaa

SEQ ID NO: 836418 - RNA, 19 nt, Homo sapiens
  misc_RNA (1)...(19): siRNA sense strand
gcaccaaaaugcuaacacu

SEQ ID NO: 836419 - RNA, 19 nt, Homo sapiens
  misc_RNA (1)...(19): siRNA sense strand
cggaaagugcagacacauu

SEQ ID NO: 836420 - RNA, 19 nt, Homo sapiens
  misc_RNA (1)...(19): siRNA sense strand
aaauggcagugaccagaag

SEQ ID NO: 836421 - RNA, 19 nt, Homo sapiens
  misc_RNA (1)...(19): siRNA sense strand
gggauucugccaggaaaug

SEQ ID NO: 836422 - RNA, 19 nt, Homo sapiens
  misc_RNA (1)...(19): siRNA sense strand
caucucauacagaaaguca

SEQ ID NO: 836423 - RNA, 19 nt, Homo sapiens
  misc_RNA (1)...(19): siRNA sense strand
cacuagagcuccuuuucaa

SEQ ID NO: 836424 - RNA, 19 nt, Homo sapiens
  misc_RNA (1)...(19): siRNA sense strand
uuucaacugagcuaucuuu

SEQ ID NO: 836425 - RNA, 19 nt, Homo sapiens
  misc_RNA (1)...(19): siRNA sense strand
acagaaagucagaucaaca

SEQ ID NO: 836426 - RNA, 19 nt, Homo sapiens
  misc_RNA (1)...(19): siRNA sense strand
cuuguuugcuagaccgaaa

SEQ ID NO: 836427 - RNA, 19 nt, Homo sapiens
  misc_RNA (1)...(19): siRNA sense strand
ggcaagacuaaauuggaaa

SEQ ID NO: 836428 - RNA, 19 nt, Homo sapiens
  misc_RNA (1)...(19): siRNA sense strand
uaggcaagacuaaauugga

SEQ ID NO: 836429 - RNA, 19 nt, Homo sapiens
  misc_RNA (1)...(19): siRNA sense strand
uacaggcauucaccagaga

SEQ ID NO: 836430 - RNA, 19 nt, Homo sapiens
  misc_RNA (1)...(19): siRNA sense strand
ucuaagaagaacuaucaga

SEQ ID NO: 836431 - RNA, 19 nt, Homo sapiens
  misc_RNA (1)...(19): siRNA sense strand
guauggagaaacacaccaa

SEQ ID NO: 836432 - RNA, 19 nt, Homo sapiens
  misc_RNA (1)...(19): siRNA sense strand
cucugaagguaaucaaguu

SEQ ID NO: 836433 - RNA, 19 nt, Homo sapiens
  misc_RNA (1)...(19): siRNA sense strand
gaugagguauuaacaagua

SEQ ID NO: 836434 - RNA, 19 nt, Homo sapiens
  misc_RNA (1)...(19): siRNA sense strand
gguccgggcuccacacuua

SEQ ID NO: 836435 - RNA, 19 nt, Homo sapiens
  misc_RNA (1)...(19): siRNA sense strand
guacauggcagaagugaaa

SEQ ID NO: 836436 - RNA, 19 nt, Homo sapiens
  misc_RNA (1)...(19): siRNA sense strand
gacggaggaugagguauua

SEQ ID NO: 836437 - RNA, 19 nt, Homo sapiens
  misc_RNA (1)...(19): siRNA sense strand
ggaacaaacuagcccucaa

SEQ ID NO: 836438 - RNA, 19 nt, Homo sapiens
  misc_RNA (1)...(19): siRNA sense strand
gaagacggaggaugaggua

SEQ ID NO: 836439 - RNA, 19 nt, Homo sapiens
  misc_RNA (1)...(19): siRNA sense strand
ccaaguacauggcagaagu

SEQ ID NO: 836440 - RNA, 19 nt, Homo sapiens
  misc_RNA (1)...(19): siRNA sense strand
gaacaaacuagcccucaag

SEQ ID NO: 836441 - RNA, 19 nt, Homo sapiens
  misc_RNA (1)...(19): siRNA sense strand
ccucaagacgggaauagua

SEQ ID NO: 836442 - RNA, 19 nt, Homo sapiens
  misc_RNA (1)...(19): siRNA sense strand
gaggaugagguauuaacaa

SEQ ID NO: 836443 - RNA, 19 nt, Homo sapiens
  misc_RNA (1)...(19): siRNA sense strand
ccagugcggugacgaugau

SEQ ID NO: 836444 - RNA, 19 nt, Homo sapiens
  misc_RNA (1)...(19): siRNA sense strand
gguauuaacaaguaaaggu

SEQ ID NO: 836445 - RNA, 19 nt, Homo sapiens
  misc_RNA (1)...(19): siRNA sense strand
ggaggaugagguauuaaca

SEQ ID NO: 836446 - RNA, 19 nt, Homo sapiens
  misc_RNA (1)...(19): siRNA sense strand
gggaauaguagccaagaag

SEQ ID NO: 836447 - RNA, 19 nt, Homo sapiens
  misc_RNA (1)...(19): siRNA sense strand
agacggaggaugagguauu

SEQ ID NO: 836448 - RNA, 19 nt, Homo sapiens
  misc_RNA (1)...(19): siRNA sense strand
gaauaguagccaagaagca

SEQ ID NO: 836449 - RNA, 19 nt, Homo sapiens
  misc_RNA (1)...(19): siRNA sense strand
aggaugagguauuaacaag

SEQ ID NO: 836450 - RNA, 19 nt, Homo sapiens
  misc_RNA (1)...(19): siRNA sense strand
gugcggugacgaugauaaa

SEQ ID NO: 836451 - RNA, 19 nt, Homo sapiens
  misc_RNA (1)...(19): siRNA sense strand
gcagaggcgggaacaaacu

SEQ ID NO: 836452 - RNA, 19 nt, Homo sapiens
  misc_RNA (1)...(19): siRNA sense strand
cagaggcgggaacaaacua

SEQ ID NO: 836453 - RNA, 19 nt, Homo sapiens
  misc_RNA (1)...(19): siRNA sense strand
cgggaauaguagccaagaa

SEQ ID NO: 836454 - RNA, 19 nt, Homo sapiens
  misc_RNA (1)...(19): siRNA sense strand
ggaugagguauuaacaagu

SEQ ID NO: 836455 - RNA, 19 nt, Homo sapiens
  misc_RNA (1)...(19): siRNA sense strand
acgcagaggcgggaacaaa

SEQ ID NO: 836456 - RNA, 19 nt, Homo sapiens
  misc_RNA (1)...(19): siRNA sense strand
caaguacauggcagaagug

SEQ ID NO: 836457 - RNA, 19 nt, Homo sapiens
  misc_RNA (1)...(19): siRNA sense strand
gagcuguucaagcggaaga

SEQ ID NO: 836458 - RNA, 19 nt, Homo sapiens
  misc_RNA (1)...(19): siRNA sense strand
agcagaagacggaggauga

SEQ ID NO: 836459 - RNA, 19 nt, Homo sapiens
  misc_RNA (1)...(19): siRNA sense strand
guacaagacugaauuaugu

SEQ ID NO: 836460 - RNA, 19 nt, Homo sapiens
  misc_RNA (1)...(19): siRNA sense strand
gaaguacaagacugaauua

SEQ ID NO: 836461 - RNA, 19 nt, Homo sapiens
  misc_RNA (1)...(19): siRNA sense strand
aaacagacguugacuuucu

SEQ ID NO: 836462 - RNA, 19 nt, Homo sapiens
  misc_RNA (1)...(19): siRNA sense strand
gcaaaugcacagagaaguu

SEQ ID NO: 836463 - RNA, 19 nt, Homo sapiens
  misc_RNA (1)...(19): siRNA sense strand
ggaucuacauugcauuuca

SEQ ID NO: 836464 - RNA, 19 nt, Homo sapiens
  misc_RNA (1)...(19): siRNA sense strand
gaacagguuauucugaaga

SEQ ID NO: 836465 - RNA, 19 nt, Homo sapiens
  misc_RNA (1)...(19): siRNA sense strand
gaucuacauugcauuucaa

SEQ ID NO: 836466 - RNA, 19 nt, Homo sapiens
  misc_RNA (1)...(19): siRNA sense strand
caaaugcacagagaaguuu

SEQ ID NO: 836467 - RNA, 19 nt, Homo sapiens
  misc_RNA (1)...(19): siRNA sense strand
gaaaggacauuuugauaac

SEQ ID NO: 836468 - RNA, 19 nt, Homo sapiens
  misc_RNA (1)...(19): siRNA sense strand
gacguugacuuucuuugau

SEQ ID NO: 836469 - RNA, 19 nt, Homo sapiens
  misc_RNA (1)...(19): siRNA sense strand
gcaggccguugaacagguu

SEQ ID NO: 836470 - RNA, 19 nt, Homo sapiens
  misc_RNA (1)...(19): siRNA sense strand
cagcaucuccagaaagaaa

SEQ ID NO: 836471 - RNA, 19 nt, Homo sapiens
  misc_RNA (1)...(19): siRNA sense strand
uuucaagacuaccuauuug

SEQ ID NO: 836472 - RNA, 19 nt, Homo sapiens
  misc_RNA (1)...(19): siRNA sense strand
cuacagaacauuagagaca

SEQ ID NO: 836473 - RNA, 19 nt, Homo sapiens
  misc_RNA (1)...(19): siRNA sense strand
uaguaucccugguucagaa

SEQ ID NO: 836474 - RNA, 19 nt, Homo sapiens
  misc_RNA (1)...(19): siRNA sense strand
gcagagaucaugggacuag

SEQ ID NO: 836475 - RNA, 19 nt, Homo sapiens
  misc_RNA (1)...(19): siRNA sense strand
caaaauggagcaacuguuu

SEQ ID NO: 836476 - RNA, 19 nt, Homo sapiens
  misc_RNA (1)...(19): siRNA sense strand
ggaaucgaaacgacugaaa

SEQ ID NO: 836477 - RNA, 19 nt, Homo sapiens
  misc_RNA (1)...(19): siRNA sense strand
cuacgaggcccaguucuuu

SEQ ID NO: 836478 - RNA, 19 nt, Homo sapiens
  misc_RNA (1)...(19): siRNA sense strand
gagaucaugggacuaguga

SEQ ID NO: 836479 - RNA, 19 nt, Homo sapiens
  misc_RNA (1)...(19): siRNA sense strand
cuaccuauuugaagugaug

SEQ ID NO: 836480 - RNA, 19 nt, Homo sapiens
  misc_RNA (1)...(19): siRNA sense strand
uugaacagguuauucugaa

SEQ ID NO: 836481 - RNA, 19 nt, Homo sapiens
  misc_RNA (1)...(19): siRNA sense strand
guacuaagcaggcccuucu

SEQ ID NO: 836482 - RNA, 19 nt, Homo sapiens
  misc_RNA (1)...(19): siRNA sense strand
agaaguacaagacugaauu

SEQ ID NO: 836483 - RNA, 19 nt, Homo sapiens
  misc_RNA (1)...(19): siRNA sense strand
cguauucccucaaacaucu

SEQ ID NO: 836484 - RNA, 19 nt, Homo sapiens
  misc_RNA (1)...(19): siRNA sense strand
gagacaauguggaaaagga

SEQ ID NO: 836485 - RNA, 19 nt, Homo sapiens
  misc_RNA (1)...(19): siRNA sense strand
agacguugacuuucuuuga

SEQ ID NO: 836486 - RNA, 19 nt, Homo sapiens
  misc_RNA (1)...(19): siRNA sense strand
aagacuaccuauuugaagu

SEQ ID NO: 836487 - RNA, 19 nt, Homo sapiens
  misc_RNA (1)...(19): siRNA sense strand
cgaaacgacugaaaauauc

SEQ ID NO: 836488 - RNA, 19 nt, Homo sapiens
  misc_RNA (1)...(19): siRNA sense strand
caucccagacugugacauu

SEQ ID NO: 836489 - RNA, 19 nt, Homo sapiens
  misc_RNA (1)...(19): siRNA sense strand
ccagaaaacuacagaacau

SEQ ID NO: 836490 - RNA, 19 nt, Homo sapiens
  misc_RNA (1)...(19): siRNA sense strand
gagaaguacaagacugaau

SEQ ID NO: 836491 - RNA, 19 nt, Homo sapiens
  misc_RNA (1)...(19): siRNA sense strand
gacuaccuauuugaaguga

SEQ ID NO: 836492 - RNA, 19 nt, Homo sapiens
  misc_RNA (1)...(19): siRNA sense strand
uucagcaucuccagaaaga

SEQ ID NO: 836493 - RNA, 19 nt, Homo sapiens
  misc_RNA (1)...(19): siRNA sense strand
caagacuaccuauuugaag

SEQ ID NO: 836494 - RNA, 19 nt, Homo sapiens
  misc_RNA (1)...(19): siRNA sense strand
acauugcauuucaagacua

SEQ ID NO: 836495 - RNA, 19 nt, Homo sapiens
  misc_RNA (1)...(19): siRNA sense strand
acagaacauuagagacaau

SEQ ID NO: 836496 - RNA, 19 nt, Homo sapiens
  misc_RNA (1)...(19): siRNA sense strand
cagcugauuuuacguauuc

SEQ ID NO: 836497 - RNA, 19 nt, Homo sapiens
  misc_RNA (1)...(19): siRNA sense strand
cagugcagauucgcaaaug

SEQ ID NO: 836498 - RNA, 19 nt, Homo sapiens
  misc_RNA (1)...(19): siRNA sense strand
guugaacagguuauucuga

SEQ ID NO: 836499 - RNA, 19 nt, Homo sapiens
  misc_RNA (1)...(19): siRNA sense strand
aggagacaccuuauaguga

SEQ ID NO: 836500 - RNA, 19 nt, Homo sapiens
  misc_RNA (1)...(19): siRNA sense strand
uacagaacauuagagacaa

SEQ ID NO: 836501 - RNA, 19 nt, Homo sapiens
  misc_RNA (1)...(19): siRNA sense strand
gaguuuaguaucccugguu

SEQ ID NO: 836502 - RNA, 19 nt, Homo sapiens
  misc_RNA (1)...(19): siRNA sense strand
ccagaaagaaauugaacag

SEQ ID NO: 836503 - RNA, 19 nt, Homo sapiens
  misc_RNA (1)...(19): siRNA sense strand
ugaacagguuauucugaag

SEQ ID NO: 836504 - RNA, 19 nt, Homo sapiens
  misc_RNA (1)...(19): siRNA sense strand
gaaucgaaacgacugaaaa

SEQ ID NO: 836505 - RNA, 19 nt, Homo sapiens
  misc_RNA (1)...(19): siRNA sense strand
cguugacuuucuuugauga

SEQ ID NO: 836506 - RNA, 19 nt, Homo sapiens
  misc_RNA (1)...(19): siRNA sense strand
gcccaguucuuuggcuuca

SEQ ID NO: 836507 - RNA, 19 nt, Homo sapiens
  misc_RNA (1)...(19): siRNA sense strand
ggagaaguacaagacugaa

SEQ ID NO: 836508 - RNA, 19 nt, Homo sapiens
  misc_RNA (1)...(19): siRNA sense strand
gaacaguuacaggagaagu

SEQ ID NO: 836509 - RNA, 19 nt, Homo sapiens
  misc_RNA (1)...(19): siRNA sense strand
uugaacaguuacaggagaa

SEQ ID NO: 836510 - RNA, 19 nt, Homo sapiens
  misc_RNA (1)...(19): siRNA sense strand
gaccuacgaggcccaguuc

SEQ ID NO: 836511 - RNA, 19 nt, Homo sapiens
  misc_RNA (1)...(19): siRNA sense strand
gcaucuccagaaagaaauu

SEQ ID NO: 836512 - RNA, 19 nt, Homo sapiens
  misc_RNA (1)...(19): siRNA sense strand
cuucggaucuacauugcau

SEQ ID NO: 836513 - RNA, 19 nt, Homo sapiens
  misc_RNA (1)...(19): siRNA sense strand
uuacguauucccucaaaca

SEQ ID NO: 836514 - RNA, 19 nt, Homo sapiens
  misc_RNA (1)...(19): siRNA sense strand
aaguuucuuugcuucauga

SEQ ID NO: 836515 - RNA, 19 nt, Homo sapiens
  misc_RNA (1)...(19): siRNA sense strand
gaaaacuacagaacauuag

SEQ ID NO: 836516 - RNA, 19 nt, Homo sapiens
  misc_RNA (1)...(19): siRNA sense strand
ucauaauguuggcagagau

SEQ ID NO: 836517 - RNA, 19 nt, Homo sapiens
  misc_RNA (1)...(19): siRNA sense strand
gacuuucuuugaugagcuu

SEQ ID NO: 836518 - RNA, 19 nt, Homo sapiens
  misc_RNA (1)...(19): siRNA sense strand
aguacaagacugaauuaug

SEQ ID NO: 836519 - RNA, 19 nt, Homo sapiens
  misc_RNA (1)...(19): siRNA sense strand
caccuuauagugaggaaga

SEQ ID NO: 836520 - RNA, 19 nt, Homo sapiens
  misc_RNA (1)...(19): siRNA sense strand
aaacaucuugcuuccugaa

SEQ ID NO: 836521 - RNA, 19 nt, Homo sapiens
  misc_RNA (1)...(19): siRNA sense strand
cuacauugcauuucaagac

SEQ ID NO: 836522 - RNA, 19 nt, Homo sapiens
  misc_RNA (1)...(19): siRNA sense strand
uaagcaggcccuucuugca

SEQ ID NO: 836523 - RNA, 19 nt, Homo sapiens
  misc_RNA (1)...(19): siRNA sense strand
cuuauagugaggaagauuu

SEQ ID NO: 836524 - RNA, 19 nt, Homo sapiens
  misc_RNA (1)...(19): siRNA sense strand
ucggaucuacauugcauuu

SEQ ID NO: 836525 - RNA, 19 nt, Homo sapiens
  misc_RNA (1)...(19): siRNA sense strand
aacagacguugacuuucuu

SEQ ID NO: 836526 - RNA, 19 nt, Homo sapiens
  misc_RNA (1)...(19): siRNA sense strand
gaugcaggccguugaacag

SEQ ID NO: 836527 - RNA, 19 nt, Homo sapiens
  misc_RNA (1)...(19): siRNA sense strand
agauaaauguaaggagaca

SEQ ID NO: 836528 - RNA, 19 nt, Homo sapiens
  misc_RNA (1)...(19): siRNA sense strand
ucaugggacuagugauuuu

SEQ ID NO: 836529 - RNA, 19 nt, Homo sapiens
  misc_RNA (1)...(19): siRNA sense strand
caaacagacguugacuuuc

SEQ ID NO: 836530 - RNA, 19 nt, Homo sapiens
  misc_RNA (1)...(19): siRNA sense strand
ggaagaagcugugcagaug

SEQ ID NO: 836531 - RNA, 19 nt, Homo sapiens
  misc_RNA (1)...(19): siRNA sense strand
gaacaaagagaaccugcaa

SEQ ID NO: 836532 - RNA, 19 nt, Homo sapiens
  misc_RNA (1)...(19): siRNA sense strand
gaggagaacuucgauaugg

SEQ ID NO: 836533 - RNA, 19 nt, Homo sapiens
  misc_RNA (1)...(19): siRNA sense strand
gaggucaucuucuccuaug

SEQ ID NO: 836534 - RNA, 19 nt, Homo sapiens
  misc_RNA (1)...(19): siRNA sense strand
gaugguggauagcgcauag

SEQ ID NO: 836535 - RNA, 19 nt, Homo sapiens
  misc_RNA (1)...(19): siRNA sense strand
gaaaugcucaaagaagaga

SEQ ID NO: 836536 - RNA, 19 nt, Homo sapiens
  misc_RNA (1)...(19): siRNA sense strand
cagaggagaacuucgauau

SEQ ID NO: 836537 - RNA, 19 nt, Homo sapiens
  misc_RNA (1)...(19): siRNA sense strand
gcugguagagggaaaggaa

SEQ ID NO: 836538 - RNA, 19 nt, Homo sapiens
  misc_RNA (1)...(19): siRNA sense strand
caucuucuccuaugugcuu

SEQ ID NO: 836539 - RNA, 19 nt, Homo sapiens
  misc_RNA (1)...(19): siRNA sense strand
gaugauggaggccuaugug

SEQ ID NO: 836540 - RNA, 19 nt, Homo sapiens
  misc_RNA (1)...(19): siRNA sense strand
caucagaggagaacuucga

SEQ ID NO: 836541 - RNA, 19 nt, Homo sapiens
  misc_RNA (1)...(19): siRNA sense strand
gagcucugguguccaaggu

SEQ ID NO: 836542 - RNA, 19 nt, Homo sapiens
  misc_RNA (1)...(19): siRNA sense strand
cugcagacacccaagauga

SEQ ID NO: 836543 - RNA, 19 nt, Homo sapiens
  misc_RNA (1)...(19): siRNA sense strand
gagcgaugccaggaacaaa

SEQ ID NO: 836544 - RNA, 19 nt, Homo sapiens
  misc_RNA (1)...(19): siRNA sense strand
cgaccucaguggcuuggau

SEQ ID NO: 836545 - RNA, 19 nt, Homo sapiens
  misc_RNA (1)...(19): siRNA sense strand
gcgaugccaggaacaaaga

SEQ ID NO: 836546 - RNA, 19 nt, Homo sapiens
  misc_RNA (1)...(19): siRNA sense strand
ggucaucuucuccuaugug

SEQ ID NO: 836547 - RNA, 19 nt, Homo sapiens
  misc_RNA (1)...(19): siRNA sense strand
ucagaggagaacuucgaua

SEQ ID NO: 836548 - RNA, 19 nt, Homo sapiens
  misc_RNA (1)...(19): siRNA sense strand
auauggaggcuuucacuga

SEQ ID NO: 836549 - RNA, 19 nt, Homo sapiens
  misc_RNA (1)...(19): siRNA sense strand
aggagaacuucgauaugga

SEQ ID NO: 836550 - RNA, 19 nt, Homo sapiens
  misc_RNA (1)...(19): siRNA sense strand
ggcuuucacugagaugaug

SEQ ID NO: 836551 - RNA, 19 nt, Homo sapiens
  misc_RNA (1)...(19): siRNA sense strand
uggaagaagcugugcagau

SEQ ID NO: 836552 - RNA, 19 nt, Homo sapiens
  misc_RNA (1)...(19): siRNA sense strand
gacgagcccuggaccauua

SEQ ID NO: 836553 - RNA, 19 nt, Homo sapiens
  misc_RNA (1)...(19): siRNA sense strand
gcacagagcuccccacuau

SEQ ID NO: 836554 - RNA, 19 nt, Homo sapiens
  misc_RNA (1)...(19): siRNA sense strand
gcaagaagcagccgggaaa

SEQ ID NO: 836555 - RNA, 19 nt, Homo sapiens
  misc_RNA (1)...(19): siRNA sense strand
aaagaaagcagaauccaaa

SEQ ID NO: 836556 - RNA, 19 nt, Homo sapiens
  misc_RNA (1)...(19): siRNA sense strand
gaaagaaagcagaauccaa

SEQ ID NO: 836557 - RNA, 19 nt, Homo sapiens
  misc_RNA (1)...(19): siRNA sense strand
gaaaggaaagaaagcagaa

SEQ ID NO: 836558 - RNA, 19 nt, Homo sapiens
  misc_RNA (1)...(19): siRNA sense strand
agaaacaucuguccagcuu

SEQ ID NO: 836559 - RNA, 19 nt, Homo sapiens
  misc_RNA (1)...(19): siRNA sense strand
gagaagggaagaaaccaaa

SEQ ID NO: 836560 - RNA, 19 nt, Homo sapiens
  misc_RNA (1)...(19): siRNA sense strand
ggacgaggucgauggguaa

SEQ ID NO: 836561 - RNA, 19 nt, Homo sapiens
  misc_RNA (1)...(19): siRNA sense strand
gaauugagaagggaagaaa

SEQ ID NO: 836562 - RNA, 19 nt, Homo sapiens
  misc_RNA (1)...(19): siRNA sense strand
gauggacgcuuugcuugug

SEQ ID NO: 836563 - RNA, 19 nt, Homo sapiens
  misc_RNA (1)...(19): siRNA sense strand
caaagugggaagaucagua

SEQ ID NO: 836564 - RNA, 19 nt, Homo sapiens
  misc_RNA (1)...(19): siRNA sense strand
ggagucagcaacugucuca

SEQ ID NO: 836565 - RNA, 19 nt, Homo sapiens
  misc_RNA (1)...(19): siRNA sense strand
gggaccuccuagccaguua

SEQ ID NO: 836566 - RNA, 19 nt, Homo sapiens
  misc_RNA (1)...(19): siRNA sense strand
gaagcagccgggaaaggaa

SEQ ID NO: 836567 - RNA, 19 nt, Homo sapiens
  misc_RNA (1)...(19): siRNA sense strand
ucaacucaaugugcucaaa

SEQ ID NO: 836568 - RNA, 19 nt, Homo sapiens
  misc_RNA (1)...(19): siRNA sense strand
ccuccuagccaguuacauu

SEQ ID NO: 836569 - RNA, 19 nt, Homo sapiens
  misc_RNA (1)...(19): siRNA sense strand
gcuucgggauggacgcuuu

SEQ ID NO: 836570 - RNA, 19 nt, Homo sapiens
  misc_RNA (1)...(19): siRNA sense strand
gaaagcagaauccaaaaca

SEQ ID NO: 836571 - RNA, 19 nt, Homo sapiens
  misc_RNA (1)...(19): siRNA sense strand
cuucgaagcucuggaugga

SEQ ID NO: 836572 - RNA, 19 nt, Homo sapiens
  misc_RNA (1)...(19): siRNA sense strand
gaggucaaacuccaaagug

SEQ ID NO: 836573 - RNA, 19 nt, Homo sapiens
  misc_RNA (1)...(19): siRNA sense strand
cuaacucagacacgacuua

SEQ ID NO: 836574 - RNA, 19 nt, Homo sapiens
  misc_RNA (1)...(19): siRNA sense strand
acucagacacgacuuauca

SEQ ID NO: 836575 - RNA, 19 nt, Homo sapiens
  misc_RNA (1)...(19): siRNA sense strand
ggagacgauuggagucaac

SEQ ID NO: 836576 - RNA, 19 nt, Homo sapiens
  misc_RNA (1)...(19): siRNA sense strand
caagagggaaggagacgau

SEQ ID NO: 836577 - RNA, 19 nt, Homo sapiens
  misc_RNA (1)...(19): siRNA sense strand
ggauggacgcuuugcuugu

SEQ ID NO: 836578 - RNA, 19 nt, Homo sapiens
  misc_RNA (1)...(19): siRNA sense strand
ggaaagaaagcagaaucca

SEQ ID NO: 836579 - RNA, 19 nt, Homo sapiens
  misc_RNA (1)...(19): siRNA sense strand
ggaggaaccaccugaucuc

SEQ ID NO: 836580 - RNA, 19 nt, Homo sapiens
  misc_RNA (1)...(19): siRNA sense strand
gaggaggaaccaccugauc

SEQ ID NO: 836581 - RNA, 19 nt, Homo sapiens
  misc_RNA (1)...(19): siRNA sense strand
gaagaucaguagggaaccu

SEQ ID NO: 836582 - RNA, 19 nt, Homo sapiens
  misc_RNA (1)...(19): siRNA sense strand
gagggaaggagacgauugg

SEQ ID NO: 836583 - RNA, 19 nt, Homo sapiens
  misc_RNA (1)...(19): siRNA sense strand
caucagaaugaauugagaa

SEQ ID NO: 836584 - RNA, 19 nt, Homo sapiens
  misc_RNA (1)...(19): siRNA sense strand
ccaccgugcaggcaagaaa

SEQ ID NO: 836585 - RNA, 19 nt, Homo sapiens
  misc_RNA (1)...(19): siRNA sense strand
gaagggaagaaaccaaagc

SEQ ID NO: 836586 - RNA, 19 nt, Homo sapiens
  misc_RNA (1)...(19): siRNA sense strand
ucagaggucaaacuccaaa

SEQ ID NO: 836587 - RNA, 19 nt, Homo sapiens
  misc_RNA (1)...(19): siRNA sense strand
agaagcagccgggaaagga

SEQ ID NO: 836588 - RNA, 19 nt, Homo sapiens
  misc_RNA (1)...(19): siRNA sense strand
acagagcuccccacuauaa

SEQ ID NO: 836589 - RNA, 19 nt, Homo sapiens
  misc_RNA (1)...(19): siRNA sense strand
uaacucagacacgacuuau

SEQ ID NO: 836590 - RNA, 19 nt, Homo sapiens
  misc_RNA (1)...(19): siRNA sense strand
acaucagaaugaauugaga

SEQ ID NO: 836591 - RNA, 19 nt, Homo sapiens
  misc_RNA (1)...(19): siRNA sense strand
aaagugggaagaucaguag

SEQ ID NO: 836592 - RNA, 19 nt, Homo sapiens
  misc_RNA (1)...(19): siRNA sense strand
cauuaucucacccuucgaa

SEQ ID NO: 836593 - RNA, 19 nt, Homo sapiens
  misc_RNA (1)...(19): siRNA sense strand
ugacucugaugaggaggaa

SEQ ID NO: 836594 - RNA, 19 nt, Homo sapiens
  misc_RNA (1)...(19): siRNA sense strand
gcaggcaagaaacaucugu

SEQ ID NO: 836595 - RNA, 19 nt, Homo sapiens
  misc_RNA (1)...(19): siRNA sense strand
aggcuccucugcuaacuca

SEQ ID NO: 836596 - RNA, 19 nt, Homo sapiens
  misc_RNA (1)...(19): siRNA sense strand
gcuugcagcuuuucuaugg

SEQ ID NO: 836597 - RNA, 19 nt, Homo sapiens
  misc_RNA (1)...(19): siRNA sense strand
gcccuggaccauuaucuca

SEQ ID NO: 836598 - RNA, 19 nt, Homo sapiens
  misc_RNA (1)...(19): siRNA sense strand
gggcugaccuccauucgua

SEQ ID NO: 836599 - RNA, 19 nt, Homo sapiens
  misc_RNA (1)...(19): siRNA sense strand
gcaggagucugucaucacu

SEQ ID NO: 836600 - RNA, 19 nt, Homo sapiens
  misc_RNA (1)...(19): siRNA sense strand
caccagcgacuucguaauu

SEQ ID NO: 836601 - RNA, 19 nt, Homo sapiens
  misc_RNA (1)...(19): siRNA sense strand
ccaggcaccuuccucuuca

SEQ ID NO: 836602 - RNA, 19 nt, Homo sapiens
  misc_RNA (1)...(19): siRNA sense strand
ccagcgacuucguaauuca

SEQ ID NO: 836603 - RNA, 19 nt, Homo sapiens
  misc_RNA (1)...(19): siRNA sense strand
aggagucugucaucacugu

SEQ ID NO: 836604 - RNA, 19 nt, Homo sapiens
  misc_RNA (1)...(19): siRNA sense strand
ucacugagcucaccgacau

SEQ ID NO: 836605 - RNA, 19 nt, Homo sapiens
  misc_RNA (1)...(19): siRNA sense strand
ggagcuggccgaggucuuu

SEQ ID NO: 836606 - RNA, 19 nt, Homo sapiens
  misc_RNA (1)...(19): siRNA sense strand
gccuauuccuccugagauc

SEQ ID NO: 836607 - RNA, 19 nt, Homo sapiens
  misc_RNA (1)...(19): siRNA sense strand
ggacgacgagaaccucaac

SEQ ID NO: 836608 - RNA, 19 nt, Homo sapiens
  misc_RNA (1)...(19): siRNA sense strand
ggaagaagaugauuaugag

SEQ ID NO: 836609 - RNA, 19 nt, Homo sapiens
  misc_RNA (1)...(19): siRNA sense strand
ggaggugacugacagauau

SEQ ID NO: 836610 - RNA, 19 nt, Homo sapiens
  misc_RNA (1)...(19): siRNA sense strand
ggaagaggcugcugguugu

SEQ ID NO: 836611 - RNA, 19 nt, Homo sapiens
  misc_RNA (1)...(19): siRNA sense strand
gauccuggcuggugacuau

SEQ ID NO: 836612 - RNA, 19 nt, Homo sapiens
  misc_RNA (1)...(19): siRNA sense strand
gcaauccaccuuucuauga

SEQ ID NO: 836613 - RNA, 19 nt, Homo sapiens
  misc_RNA (1)...(19): siRNA sense strand
gcaaugcugcuucugauaa

SEQ ID NO: 836614 - RNA, 19 nt, Homo sapiens
  misc_RNA (1)...(19): siRNA sense strand
caucaagacugaggaguuu

SEQ ID NO: 836615 - RNA, 19 nt, Homo sapiens
  misc_RNA (1)...(19): siRNA sense strand
cugaagaacucgaagauug

SEQ ID NO: 836616 - RNA, 19 nt, Homo sapiens
  misc_RNA (1)...(19): siRNA sense strand
gcgacaagaagaacuauaa

SEQ ID NO: 836617 - RNA, 19 nt, Homo sapiens
  misc_RNA (1)...(19): siRNA sense strand
gcggaaagcugccaagaac

SEQ ID NO: 836618 - RNA, 19 nt, Homo sapiens
  misc_RNA (1)...(19): siRNA sense strand
cgaagauugucaucaguga

SEQ ID NO: 836619 - RNA, 19 nt, Homo sapiens
  misc_RNA (1)...(19): siRNA sense strand
gagauaggcauccucaaga

SEQ ID NO: 836620 - RNA, 19 nt, Homo sapiens
  misc_RNA (1)...(19): siRNA sense strand
ugagaaccaugauaagaau

SEQ ID NO: 836621 - RNA, 19 nt, Homo sapiens
  misc_RNA (1)...(19): siRNA sense strand
ggaaagcugccaagaacga

SEQ ID NO: 836622 - RNA, 19 nt, Homo sapiens
  misc_RNA (1)...(19): siRNA sense strand
ccauuggagucaucaugua

SEQ ID NO: 836623 - RNA, 19 nt, Homo sapiens
  misc_RNA (1)...(19): siRNA sense strand
gcaaggaguacuuuaucuu

SEQ ID NO: 836624 - RNA, 19 nt, Homo sapiens
  misc_RNA (1)...(19): siRNA sense strand
ugauggagguggagcaaga

SEQ ID NO: 836625 - RNA, 19 nt, Homo sapiens
  misc_RNA (1)...(19): siRNA sense strand
gcggaucacugcagaagag

SEQ ID NO: 836626 - RNA, 19 nt, Homo sapiens
  misc_RNA (1)...(19): siRNA sense strand
gacaggucaucaagacuga

SEQ ID NO: 836627 - RNA, 19 nt, Homo sapiens
  misc_RNA (1)...(19): siRNA sense strand
gcuccacccucuaguaaag

SEQ ID NO: 836628 - RNA, 19 nt, Homo sapiens
  misc_RNA (1)...(19): siRNA sense strand
ugacugacagauaugauuu

SEQ ID NO: 836629 - RNA, 19 nt, Homo sapiens
  misc_RNA (1)...(19): siRNA sense strand
gagcaagaccagcggauca

SEQ ID NO: 836630 - RNA, 19 nt, Homo sapiens
  misc_RNA (1)...(19): siRNA sense strand
uggaagaagaugauuauga

SEQ ID NO: 836631 - RNA, 19 nt, Homo sapiens
  misc_RNA (1)...(19): siRNA sense strand
gguggaagaagaugauuau

SEQ ID NO: 836632 - RNA, 19 nt, Homo sapiens
  misc_RNA (1)...(19): siRNA sense strand
ggugaagcaucccaacauc

SEQ ID NO: 836633 - RNA, 19 nt, Homo sapiens
  misc_RNA (1)...(19): siRNA sense strand
cgagugaccacccucauga

SEQ ID NO: 836634 - RNA, 19 nt, Homo sapiens
  misc_RNA (1)...(19): siRNA sense strand
gaagaagaugauuaugaga

SEQ ID NO: 836635 - RNA, 19 nt, Homo sapiens
  misc_RNA (1)...(19): siRNA sense strand
caaggaguacuuuaucuuc

SEQ ID NO: 836636 - RNA, 19 nt, Homo sapiens
  misc_RNA (1)...(19): siRNA sense strand
uauuugcacucacucaaga

SEQ ID NO: 836637 - RNA, 19 nt, Homo sapiens
  misc_RNA (1)...(19): siRNA sense strand
gauuaugagaaccaugaua

SEQ ID NO: 836638 - RNA, 19 nt, Homo sapiens
  misc_RNA (1)...(19): siRNA sense strand
ucaagaucgugcacaggaa

SEQ ID NO: 836639 - RNA, 19 nt, Homo sapiens
  misc_RNA (1)...(19): siRNA sense strand
gaggccaucucccaugagu

SEQ ID NO: 836640 - RNA, 19 nt, Homo sapiens
  misc_RNA (1)...(19): siRNA sense strand
aagaggccaucucccauga

SEQ ID NO: 836641 - RNA, 19 nt, Homo sapiens
  misc_RNA (1)...(19): siRNA sense strand
ucauguacauccugcuuuc

SEQ ID NO: 836642 - RNA, 19 nt, Homo sapiens
  misc_RNA (1)...(19): siRNA sense strand
aaaauggccucaucaagga

SEQ ID NO: 836643 - RNA, 19 nt, Homo sapiens
  misc_RNA (1)...(19): siRNA sense strand
cugcaaagagugauaaugu

SEQ ID NO: 836644 - RNA, 19 nt, Homo sapiens
  misc_RNA (1)...(19): siRNA sense strand
caaugcugcuucugauaag

SEQ ID NO: 836645 - RNA, 19 nt, Homo sapiens
  misc_RNA (1)...(19): siRNA sense strand
gaagcaucccaacauccua

SEQ ID NO: 836646 - RNA, 19 nt, Homo sapiens
  misc_RNA (1)...(19): siRNA sense strand
augaggagguggaagaaga

SEQ ID NO: 836647 - RNA, 19 nt, Homo sapiens
  misc_RNA (1)...(19): siRNA sense strand
gcgcuacuccagccacuga

SEQ ID NO: 836648 - RNA, 19 nt, Homo sapiens
  misc_RNA (1)...(19): siRNA sense strand
cgagauaggcauccucaag

SEQ ID NO: 836649 - RNA, 19 nt, Homo sapiens
  misc_RNA (1)...(19): siRNA sense strand
uaugagaaccaugauaaga

SEQ ID NO: 836650 - RNA, 19 nt, Homo sapiens
  misc_RNA (1)...(19): siRNA sense strand
ggagguggaagaagaugau

SEQ ID NO: 836651 - RNA, 19 nt, Homo sapiens
  misc_RNA (1)...(19): siRNA sense strand
caauccaccuuucuaugag

SEQ ID NO: 836652 - RNA, 19 nt, Homo sapiens
  misc_RNA (1)...(19): siRNA sense strand
ugaagaacucgaagauugu

SEQ ID NO: 836653 - RNA, 19 nt, Homo sapiens
  misc_RNA (1)...(19): siRNA sense strand
agacacaagcaacguggua

SEQ ID NO: 836654 - RNA, 19 nt, Homo sapiens
  misc_RNA (1)...(19): siRNA sense strand
agauaggcauccucaagau

SEQ ID NO: 836655 - RNA, 19 nt, Homo sapiens
  misc_RNA (1)...(19): siRNA sense strand
ggcaaugcugcuucugaua

SEQ ID NO: 836656 - RNA, 19 nt, Homo sapiens
  misc_RNA (1)...(19): siRNA sense strand
gcuggugacuaugaguuug

SEQ ID NO: 836657 - RNA, 19 nt, Homo sapiens
  misc_RNA (1)...(19): siRNA sense strand
agaagaugauuaugagaac

SEQ ID NO: 836658 - RNA, 19 nt, Homo sapiens
  misc_RNA (1)...(19): siRNA sense strand
ccaucuggcuaagcuagaa

SEQ ID NO: 836659 - RNA, 19 nt, Homo sapiens
  misc_RNA (1)...(19): siRNA sense strand
gcugguggauguguuugug

SEQ ID NO: 836660 - RNA, 19 nt, Homo sapiens
  misc_RNA (1)...(19): siRNA sense strand
ccacaccagccacagaaga

SEQ ID NO: 836661 - RNA, 19 nt, Homo sapiens
  misc_RNA (1)...(19): siRNA sense strand
uggcaaugcugcuucugau

SEQ ID NO: 836662 - RNA, 19 nt, Homo sapiens
  misc_RNA (1)...(19): siRNA sense strand
gaguggauuucuggcaaug

SEQ ID NO: 836663 - RNA, 19 nt, Homo sapiens
  misc_RNA (1)...(19): siRNA sense strand
cggaggugacugacagaua

SEQ ID NO: 836664 - RNA, 19 nt, Homo sapiens
  misc_RNA (1)...(19): siRNA sense strand
gcugaagaacucgaagauu

SEQ ID NO: 836665 - RNA, 19 nt, Homo sapiens
  misc_RNA (1)...(19): siRNA sense strand
ggacugcugggccauugga

SEQ ID NO: 836666 - RNA, 19 nt, Homo sapiens
  misc_RNA (1)...(19): siRNA sense strand
gggagguguuugacuggau

SEQ ID NO: 836667 - RNA, 19 nt, Homo sapiens
  misc_RNA (1)...(19): siRNA sense strand
ugcaaagagugauaaugug

SEQ ID NO: 836668 - RNA, 19 nt, Homo sapiens
  misc_RNA (1)...(19): siRNA sense strand
ugaccacccucaugaaacg

SEQ ID NO: 836669 - RNA, 19 nt, Homo sapiens
  misc_RNA (1)...(19): siRNA sense strand
acaagaagaacuauaacca

SEQ ID NO: 836670 - RNA, 19 nt, Homo sapiens
  misc_RNA (1)...(19): siRNA sense strand
guuugacucuccauauugg

SEQ ID NO: 836671 - RNA, 19 nt, Homo sapiens
  misc_RNA (1)...(19): siRNA sense strand
gaacucgaagauugucauc

SEQ ID NO: 836672 - RNA, 19 nt, Homo sapiens
  misc_RNA (1)...(19): siRNA sense strand
gaagaacucgaagauuguc

SEQ ID NO: 836673 - RNA, 19 nt, Homo sapiens
  misc_RNA (1)...(19): siRNA sense strand
caagaucgugcacaggaau

SEQ ID NO: 836674 - RNA, 19 nt, Homo sapiens
  misc_RNA (1)...(19): siRNA sense strand
gcaucacuccagccacuga

SEQ ID NO: 836675 - RNA, 19 nt, Homo sapiens
  misc_RNA (1)...(19): siRNA sense strand
ggaguuuugugaaaucuuc

SEQ ID NO: 836676 - RNA, 19 nt, Homo sapiens
  misc_RNA (1)...(19): siRNA sense strand
gaaccaugauaagaaucuc

SEQ ID NO: 836677 - RNA, 19 nt, Homo sapiens
  misc_RNA (1)...(19): siRNA sense strand
gugacugacagauaugauu

SEQ ID NO: 836678 - RNA, 19 nt, Homo sapiens
  misc_RNA (1)...(19): siRNA sense strand
acaaccggcugaagaacuc

SEQ ID NO: 836679 - RNA, 19 nt, Homo sapiens
  misc_RNA (1)...(19): siRNA sense strand
gcuagaaaauggccucauc

SEQ ID NO: 836680 - RNA, 19 nt, Homo sapiens
  misc_RNA (1)...(19): siRNA sense strand
uccuacagcugguggaugu

SEQ ID NO: 836681 - RNA, 19 nt, Homo sapiens
  misc_RNA (1)...(19): siRNA sense strand
gagccacaccagccacaga

SEQ ID NO: 836682 - RNA, 19 nt, Homo sapiens
  misc_RNA (1)...(19): siRNA sense strand
ugaguggauuucuggcaau

SEQ ID NO: 836683 - RNA, 19 nt, Homo sapiens
  misc_RNA (1)...(19): siRNA sense strand
ggcaauccaccuuucuaug

SEQ ID NO: 836684 - RNA, 19 nt, Homo sapiens
  misc_RNA (1)...(19): siRNA sense strand
guggacugcugggccauug

SEQ ID NO: 836685 - RNA, 19 nt, Homo sapiens
  misc_RNA (1)...(19): siRNA sense strand
ucaucaagacugaggaguu

SEQ ID NO: 836686 - RNA, 19 nt, Homo sapiens
  misc_RNA (1)...(19): siRNA sense strand
gcacaccugcaagaaguuc

SEQ ID NO: 836687 - RNA, 19 nt, Homo sapiens
  misc_RNA (1)...(19): siRNA sense strand
augagaaccaugauaagaa

SEQ ID NO: 836688 - RNA, 19 nt, Homo sapiens
  misc_RNA (1)...(19): siRNA sense strand
ucuaugaggagguggaaga

SEQ ID NO: 836689 - RNA, 19 nt, Homo sapiens
  misc_RNA (1)...(19): siRNA sense strand
caggcaauccaccuuucua

SEQ ID NO: 836690 - RNA, 19 nt, Homo sapiens
  misc_RNA (1)...(19): siRNA sense strand
acucgaagauugucaucag

SEQ ID NO: 836691 - RNA, 19 nt, Homo sapiens
  misc_RNA (1)...(19): siRNA sense strand
cgcaaggaguacuuuaucu

SEQ ID NO: 836692 - RNA, 19 nt, Homo sapiens
  misc_RNA (1)...(19): siRNA sense strand
gccauuggagucaucaugu

SEQ ID NO: 836693 - RNA, 19 nt, Homo sapiens
  misc_RNA (1)...(19): siRNA sense strand
caucucccaugaguggauu

SEQ ID NO: 836694 - RNA, 19 nt, Homo sapiens
  misc_RNA (1)...(19): siRNA sense strand
uggcuaagcuagaaaaugg

SEQ ID NO: 836695 - RNA, 19 nt, Homo sapiens
  misc_RNA (1)...(19): siRNA sense strand
gagugaccacccucaugaa

SEQ ID NO: 836696 - RNA, 19 nt, Homo sapiens
  misc_RNA (1)...(19): siRNA sense strand
gugcccagauugaaaagaa

SEQ ID NO: 836697 - RNA, 19 nt, Homo sapiens
  misc_RNA (1)...(19): siRNA sense strand
caucauguacauccugcuu

SEQ ID NO: 836698 - RNA, 19 nt, Homo sapiens
  misc_RNA (1)...(19): siRNA sense strand
ccgcaaggaguacuuuauc

SEQ ID NO: 836699 - RNA, 19 nt, Homo sapiens
  misc_RNA (1)...(19): siRNA sense strand
caggcuccacccucuagua

SEQ ID NO: 836700 - RNA, 19 nt, Homo sapiens
  misc_RNA (1)...(19): siRNA sense strand
ugggacaggucaucaagac

SEQ ID NO: 836701 - RNA, 19 nt, Homo sapiens
  misc_RNA (1)...(19): siRNA sense strand
gagaagaaucaaccaaauu

SEQ ID NO: 836702 - RNA, 19 nt, Homo sapiens
  misc_RNA (1)...(19): siRNA sense strand
ccagaaccaugagccaaua

SEQ ID NO: 836703 - RNA, 19 nt, Homo sapiens
  misc_RNA (1)...(19): siRNA sense strand
ggaagaaaauagcagauga

SEQ ID NO: 836704 - RNA, 19 nt, Homo sapiens
  misc_RNA (1)...(19): siRNA sense strand
gaaaauagcagaugagaag

SEQ ID NO: 836705 - RNA, 19 nt, Homo sapiens
  misc_RNA (1)...(19): siRNA sense strand
ugagaagaaucaaccaaau

SEQ ID NO: 836706 - RNA, 19 nt, Homo sapiens
  misc_RNA (1)...(19): siRNA sense strand
ccagagaggacugcagaua

SEQ ID NO: 836707 - RNA, 19 nt, Homo sapiens
  misc_RNA (1)...(19): siRNA sense strand
gaaaacguaugaggaagaa

SEQ ID NO: 836708 - RNA, 19 nt, Homo sapiens
  misc_RNA (1)...(19): siRNA sense strand
gcaccuugauauuggacuu

SEQ ID NO: 836709 - RNA, 19 nt, Homo sapiens
  misc_RNA (1)...(19): siRNA sense strand
agagaggacugcagauagu

SEQ ID NO: 836710 - RNA, 19 nt, Homo sapiens
  misc_RNA (1)...(19): siRNA sense strand
gccagcaccuugauauugg

SEQ ID NO: 836711 - RNA, 19 nt, Homo sapiens
  misc_RNA (1)...(19): siRNA sense strand
uagcagaugagaagaauca

SEQ ID NO: 836712 - RNA, 19 nt, Homo sapiens
  misc_RNA (1)...(19): siRNA sense strand
gaugccagcaccuugauau

SEQ ID NO: 836713 - RNA, 19 nt, Homo sapiens
  misc_RNA (1)...(19): siRNA sense strand
accaugagccaauacauuu

SEQ ID NO: 836714 - RNA, 19 nt, Homo sapiens
  misc_RNA (1)...(19): siRNA sense strand
aauagcagaugagaagaau

SEQ ID NO: 836715 - RNA, 19 nt, Homo sapiens
  misc_RNA (1)...(19): siRNA sense strand
gaugagaagaaucaaccaa

SEQ ID NO: 836716 - RNA, 19 nt, Homo sapiens
  misc_RNA (1)...(19): siRNA sense strand
gaaccaugagccaauacau

SEQ ID NO: 836717 - RNA, 19 nt, Homo sapiens
  misc_RNA (1)...(19): siRNA sense strand
ccaauacauuucuguucca

SEQ ID NO: 836718 - RNA, 19 nt, Homo sapiens
  misc_RNA (1)...(19): siRNA sense strand
gagccaauacauuucuguu

SEQ ID NO: 836719 - RNA, 19 nt, Homo sapiens
  misc_RNA (1)...(19): siRNA sense strand
cagagaggacugcagauag

SEQ ID NO: 836720 - RNA, 19 nt, Homo sapiens
  misc_RNA (1)...(19): siRNA sense strand
ggaaggcagaugcaagaag

SEQ ID NO: 836721 - RNA, 19 nt, Homo sapiens
  misc_RNA (1)...(19): siRNA sense strand
aaauagcagaugagaagaa

SEQ ID NO: 836722 - RNA, 19 nt, Homo sapiens
  misc_RNA (1)...(19): siRNA sense strand
aaccaugagccaauacauu

SEQ ID NO: 836723 - RNA, 19 nt, Homo sapiens
  misc_RNA (1)...(19): siRNA sense strand
ccagcaccuugauauugga

SEQ ID NO: 836724 - RNA, 19 nt, Homo sapiens
  misc_RNA (1)...(19): siRNA sense strand
caauacauuucuguuccau

SEQ ID NO: 836725 - RNA, 19 nt, Homo sapiens
  misc_RNA (1)...(19): siRNA sense strand
caaccaaauuccggaagcu

SEQ ID NO: 836726 - RNA, 19 nt, Homo sapiens
  misc_RNA (1)...(19): siRNA sense strand
ugccagcaccuugauauug

SEQ ID NO: 836727 - RNA, 19 nt, Homo sapiens
  misc_RNA (1)...(19): siRNA sense strand
ugaaaggacugccugucua

SEQ ID NO: 836728 - RNA, 19 nt, Homo sapiens
  misc_RNA (1)...(19): siRNA sense strand
aaagaacgcugccaagaag

SEQ ID NO: 836729 - RNA, 19 nt, Homo sapiens
  misc_RNA (1)...(19): siRNA sense strand
gaagagagaccaggagcaa

SEQ ID NO: 836730 - RNA, 19 nt, Homo sapiens
  misc_RNA (1)...(19): siRNA sense strand
gcgaguacccgucugaaca

SEQ ID NO: 836731 - RNA, 19 nt, Homo sapiens
  misc_RNA (1)...(19): siRNA sense strand
cagaucaucgugacagaaa

SEQ ID NO: 836732 - RNA, 19 nt, Homo sapiens
  misc_RNA (1)...(19): siRNA sense strand
gaaaggacugccugucuac

SEQ ID NO: 836733 - RNA, 19 nt, Homo sapiens
  misc_RNA (1)...(19): siRNA sense strand
gaacgcugccaagaagaga

SEQ ID NO: 836734 - RNA, 19 nt, Homo sapiens
  misc_RNA (1)...(19): siRNA sense strand
ggacugccugucuacaaca

SEQ ID NO: 836735 - RNA, 19 nt, Homo sapiens
  misc_RNA (1)...(19): siRNA sense strand
gacugccugucuacaacaa

SEQ ID NO: 836736 - RNA, 19 nt, Homo sapiens
  misc_RNA (1)...(19): siRNA sense strand
gaccgacagcccagacaug

SEQ ID NO: 836737 - RNA, 19 nt, Homo sapiens
  misc_RNA (1)...(19): siRNA sense strand
agagagaccaggagcaagu

SEQ ID NO: 836738 - RNA, 19 nt, Homo sapiens
  misc_RNA (1)...(19): siRNA sense strand
aaaagaacgcugccaagaa

SEQ ID NO: 836739 - RNA, 19 nt, Homo sapiens
  misc_RNA (1)...(19): siRNA sense strand
acaugcacgaggacacuua

SEQ ID NO: 836740 - RNA, 19 nt, Homo sapiens
  misc_RNA (1)...(19): siRNA sense strand
caucagcaaugggacaaaa

SEQ ID NO: 836741 - RNA, 19 nt, Homo sapiens
  misc_RNA (1)...(19): siRNA sense strand
gaaauaaccugucgaaguu

SEQ ID NO: 836742 - RNA, 19 nt, Homo sapiens
  misc_RNA (1)...(19): siRNA sense strand
gaaguuaucugaugacaaa

SEQ ID NO: 836743 - RNA, 19 nt, Homo sapiens
  misc_RNA (1)...(19): siRNA sense strand
ggaaaggucucagaagaaa

SEQ ID NO: 836744 - RNA, 19 nt, Homo sapiens
  misc_RNA (1)...(19): siRNA sense strand
ccaaaugacuauacaggaa

SEQ ID NO: 836745 - RNA, 19 nt, Homo sapiens
  misc_RNA (1)...(19): siRNA sense strand
gaugacaaauuacgaaagu

SEQ ID NO: 836746 - RNA, 19 nt, Homo sapiens
  misc_RNA (1)...(19): siRNA sense strand
caggaaaggucucagaaga

SEQ ID NO: 836747 - RNA, 19 nt, Homo sapiens
  misc_RNA (1)...(19): siRNA sense strand
caauagaaccaaaugacua

SEQ ID NO: 836748 - RNA, 19 nt, Homo sapiens
  misc_RNA (1)...(19): siRNA sense strand
gggaaacacaaacucuuua

SEQ ID NO: 836749 - RNA, 19 nt, Homo sapiens
  misc_RNA (1)...(19): siRNA sense strand
ggagggauagccaccauuu

SEQ ID NO: 836750 - RNA, 19 nt, Homo sapiens
  misc_RNA (1)...(19): siRNA sense strand
cagaagaaauugaagacau

SEQ ID NO: 836751 - RNA, 19 nt, Homo sapiens
  misc_RNA (1)...(19): siRNA sense strand
ggaguaguauggaaaauga

SEQ ID NO: 836752 - RNA, 19 nt, Homo sapiens
  misc_RNA (1)...(19): siRNA sense strand
gaaauugaagacaucauca

SEQ ID NO: 836753 - RNA, 19 nt, Homo sapiens
  misc_RNA (1)...(19): siRNA sense strand
agaaauaaccugucgaagu

SEQ ID NO: 836754 - RNA, 19 nt, Homo sapiens
  misc_RNA (1)...(19): siRNA sense strand
caagagaaguuaaaagcaa

SEQ ID NO: 836755 - RNA, 19 nt, Homo sapiens
  misc_RNA (1)...(19): siRNA sense strand
aaaggucucagaagaaauu

SEQ ID NO: 836756 - RNA, 19 nt, Homo sapiens
  misc_RNA (1)...(19): siRNA sense strand
caaaugacuauacaggaaa

SEQ ID NO: 836757 - RNA, 19 nt, Homo sapiens
  misc_RNA (1)...(19): siRNA sense strand
agaagaaauugaagacauc

SEQ ID NO: 836758 - RNA, 19 nt, Homo sapiens
  misc_RNA (1)...(19): siRNA sense strand
ucagaguccuggcgaugaa

SEQ ID NO: 836759 - RNA, 19 nt, Homo sapiens
  misc_RNA (1)...(19): siRNA sense strand
ugucgaaguuaucugauga

SEQ ID NO: 836760 - RNA, 19 nt, Homo sapiens
  misc_RNA (1)...(19): siRNA sense strand
aaagaaauaaccugucgaa

SEQ ID NO: 836761 - RNA, 19 nt, Homo sapiens
  misc_RNA (1)...(19): siRNA sense strand
ggaaacacaaacucuuuag

SEQ ID NO: 836762 - RNA, 19 nt, Homo sapiens
  misc_RNA (1)...(19): siRNA sense strand
aagcuugacuuuggcaauu

SEQ ID NO: 836763 - RNA, 19 nt, Homo sapiens
  misc_RNA (1)...(19): siRNA sense strand
aaaguggaauguauguugu

SEQ ID NO: 836764 - RNA, 19 nt, Homo sapiens
  misc_RNA (1)...(19): siRNA sense strand
ggucucagaagaaauugaa

SEQ ID NO: 836765 - RNA, 19 nt, Homo sapiens
  misc_RNA (1)...(19): siRNA sense strand
ggaguaucaagagaaguua

SEQ ID NO: 836766 - RNA, 19 nt, Homo sapiens
  misc_RNA (1)...(19): siRNA sense strand
gcaauagaaccaaaugacu

SEQ ID NO: 836767 - RNA, 19 nt, Homo sapiens
  misc_RNA (1)...(19): siRNA sense strand
gaagaaauugaagacauca

SEQ ID NO: 836768 - RNA, 19 nt, Homo sapiens
  misc_RNA (1)...(19): siRNA sense strand
guuugccgcuggaguauca

SEQ ID NO: 836769 - RNA, 19 nt, Homo sapiens
  misc_RNA (1)...(19): siRNA sense strand
gguuaaaaguggaauguau

SEQ ID NO: 836770 - RNA, 19 nt, Homo sapiens
  misc_RNA (1)...(19): siRNA sense strand
guccagaugaggagaguuu

SEQ ID NO: 836771 - RNA, 19 nt, Homo sapiens
  misc_RNA (1)...(19): siRNA sense strand
gcuggaguaucaagagaag

SEQ ID NO: 836772 - RNA, 19 nt, Homo sapiens
  misc_RNA (1)...(19): siRNA sense strand
agaaccaaaugacuauaca

SEQ ID NO: 836773 - RNA, 19 nt, Homo sapiens
  misc_RNA (1)...(19): siRNA sense strand
gcaagaagggguuaaaagu

SEQ ID NO: 836774 - RNA, 19 nt, Homo sapiens
  misc_RNA (1)...(19): siRNA sense strand
gaaaggucucagaagaaau

SEQ ID NO: 836775 - RNA, 19 nt, Homo sapiens
  misc_RNA (1)...(19): siRNA sense strand
gaguaucaagagaaguuaa

SEQ ID NO: 836776 - RNA, 19 nt, Homo sapiens
  misc_RNA (1)...(19): siRNA sense strand
aguggaauguauguuguaa

SEQ ID NO: 836777 - RNA, 19 nt, Homo sapiens
  misc_RNA (1)...(19): siRNA sense strand
uggaguaucaagagaaguu

SEQ ID NO: 836778 - RNA, 19 nt, Homo sapiens
  misc_RNA (1)...(19): siRNA sense strand
ccgcuggaguaucaagaga

SEQ ID NO: 836779 - RNA, 19 nt, Homo sapiens
  misc_RNA (1)...(19): siRNA sense strand
ggagaguuuucuguacuuu

SEQ ID NO: 836780 - RNA, 19 nt, Homo sapiens
  misc_RNA (1)...(19): siRNA sense strand
aggaaaggucucagaagaa

SEQ ID NO: 836781 - RNA, 19 nt, Homo sapiens
  misc_RNA (1)...(19): siRNA sense strand
gaaccaaaugacuauacag

SEQ ID NO: 836782 - RNA, 19 nt, Homo sapiens
  misc_RNA (1)...(19): siRNA sense strand
agaaauugaagacaucauc

SEQ ID NO: 836783 - RNA, 19 nt, Homo sapiens
  misc_RNA (1)...(19): siRNA sense strand
aaaugacuauacaggaaag

SEQ ID NO: 836784 - RNA, 19 nt, Homo sapiens
  misc_RNA (1)...(19): siRNA sense strand
ggaaaaugaacaaaagcaa

SEQ ID NO: 836785 - RNA, 19 nt, Homo sapiens
  misc_RNA (1)...(19): siRNA sense strand
ucucagaagaaauugaaga

SEQ ID NO: 836786 - RNA, 19 nt, Homo sapiens
  misc_RNA (1)...(19): siRNA sense strand
aaagcaauagaaccaaaug

SEQ ID NO: 836787 - RNA, 19 nt, Homo sapiens
  misc_RNA (1)...(19): siRNA sense strand
ggaauguauguuguaauag

SEQ ID NO: 836788 - RNA, 19 nt, Homo sapiens
  misc_RNA (1)...(19): siRNA sense strand
uggcaauucccaaggcaaa

SEQ ID NO: 836789 - RNA, 19 nt, Homo sapiens
  misc_RNA (1)...(19): siRNA sense strand
ggggaaacacaaacucuuu

SEQ ID NO: 836790 - RNA, 19 nt, Homo sapiens
  misc_RNA (1)...(19): siRNA sense strand
gaauugaccugaucguguu

SEQ ID NO: 836791 - RNA, 19 nt, Homo sapiens
  misc_RNA (1)...(19): siRNA sense strand
gaacacggccaccaucuug

SEQ ID NO: 836792 - RNA, 19 nt, Homo sapiens
  misc_RNA (1)...(19): siRNA sense strand
gcaaauacagucuccagaa

SEQ ID NO: 836793 - RNA, 19 nt, Homo sapiens
  misc_RNA (1)...(19): siRNA sense strand
gagagccacugcagcauuc

SEQ ID NO: 836794 - RNA, 19 nt, Homo sapiens
  misc_RNA (1)...(19): siRNA sense strand
gaagcuggcccacaccuau

SEQ ID NO: 836795 - RNA, 19 nt, Homo sapiens
  misc_RNA (1)...(19): siRNA sense strand
caaauacagucuccagaac

SEQ ID NO: 836796 - RNA, 19 nt, Homo sapiens
  misc_RNA (1)...(19): siRNA sense strand
ggagagccacugcagcauu

SEQ ID NO: 836797 - RNA, 19 nt, Homo sapiens
  misc_RNA (1)...(19): siRNA sense strand
cggacucgaugcucaaaga

SEQ ID NO: 836798 - RNA, 19 nt, Homo sapiens
  misc_RNA (1)...(19): siRNA sense strand
gaucguguuugugguuaau

SEQ ID NO: 836799 - RNA, 19 nt, Homo sapiens
  misc_RNA (1)...(19): siRNA sense strand
gcacggaggaugcucuucu

SEQ ID NO: 836800 - RNA, 19 nt, Homo sapiens
  misc_RNA (1)...(19): siRNA sense strand
ugguuaaucuucacagcaa

SEQ ID NO: 836801 - RNA, 19 nt, Homo sapiens
  misc_RNA (1)...(19): siRNA sense strand
ccuuugcccuccaguguga

SEQ ID NO: 836802 - RNA, 19 nt, Homo sapiens
  misc_RNA (1)...(19): siRNA sense strand
gguuaaucuucacagcaaa

SEQ ID NO: 836803 - RNA, 19 nt, Homo sapiens
  misc_RNA (1)...(19): siRNA sense strand
ggaugccagcuucuucuug

SEQ ID NO: 836804 - RNA, 19 nt, Homo sapiens
  misc_RNA (1)...(19): siRNA sense strand
gaagguccacuuggcaaag

SEQ ID NO: 836805 - RNA, 19 nt, Homo sapiens
  misc_RNA (1)...(19): siRNA sense strand
cugaucguguuugugguua

SEQ ID NO: 836806 - RNA, 19 nt, Homo sapiens
  misc_RNA (1)...(19): siRNA sense strand
ugaucguguuugugguuaa

SEQ ID NO: 836807 - RNA, 19 nt, Homo sapiens
  misc_RNA (1)...(19): siRNA sense strand
ugaagguccacuuggcaaa

SEQ ID NO: 836808 - RNA, 19 nt, Homo sapiens
  misc_RNA (1)...(19): siRNA sense strand
ggagguggaaggcuuuagg

SEQ ID NO: 836809 - RNA, 19 nt, Homo sapiens
  misc_RNA (1)...(19): siRNA sense strand
aaauacagucuccagaaca

SEQ ID NO: 836810 - RNA, 19 nt, Homo sapiens
  misc_RNA (1)...(19): siRNA sense strand
caaccaggguguuaaauuu

SEQ ID NO: 836811 - RNA, 19 nt, Homo sapiens
  misc_RNA (1)...(19): siRNA sense strand
gaaaugggcauaucuguga

SEQ ID NO: 836812 - RNA, 19 nt, Homo sapiens
  misc_RNA (1)...(19): siRNA sense strand
ggaagaaguuguuaguguu

SEQ ID NO: 836813 - RNA, 19 nt, Homo sapiens
  misc_RNA (1)...(19): siRNA sense strand
cagagaagcugaaagaaau

SEQ ID NO: 836814 - RNA, 19 nt, Homo sapiens
  misc_RNA (1)...(19): siRNA sense strand
gcagagaagcugaaagaaa

SEQ ID NO: 836815 - RNA, 19 nt, Homo sapiens
  misc_RNA (1)...(19): siRNA sense strand
uauggaggcugccacuuua

SEQ ID NO: 836816 - RNA, 19 nt, Homo sapiens
  misc_RNA (1)...(19): siRNA sense strand
ccaaggaacugaucaagag

SEQ ID NO: 836817 - RNA, 19 nt, Homo sapiens
  misc_RNA (1)...(19): siRNA sense strand
gaccagaguugaccgagaa

SEQ ID NO: 836818 - RNA, 19 nt, Homo sapiens
  misc_RNA (1)...(19): siRNA sense strand
acagauaccuuaggagaaa

SEQ ID NO: 836819 - RNA, 19 nt, Homo sapiens
  misc_RNA (1)...(19): siRNA sense strand
gagcgugccuugagacuag

SEQ ID NO: 836820 - RNA, 19 nt, Homo sapiens
  misc_RNA (1)...(19): siRNA sense strand
caagagagcagaaucacuu

SEQ ID NO: 836821 - RNA, 19 nt, Homo sapiens
  misc_RNA (1)...(19): siRNA sense strand
uuacagagcacuaaccuaa

SEQ ID NO: 836822 - RNA, 19 nt, Homo sapiens
  misc_RNA (1)...(19): siRNA sense strand
gguguuaaauuuagugugu

SEQ ID NO: 836823 - RNA, 19 nt, Homo sapiens
  misc_RNA (1)...(19): siRNA sense strand
gggccaauauggugacaaa

SEQ ID NO: 836824 - RNA, 19 nt, Homo sapiens
  misc_RNA (1)...(19): siRNA sense strand
gggccacuguguuaauuaa

SEQ ID NO: 836825 - RNA, 19 nt, Homo sapiens
  misc_RNA (1)...(19): siRNA sense strand
gaugagggcccugaacuuu

SEQ ID NO: 836826 - RNA, 19 nt, Homo sapiens
  misc_RNA (1)...(19): siRNA sense strand
cuucaugucuuugguuaua

SEQ ID NO: 836827 - RNA, 19 nt, Homo sapiens
  misc_RNA (1)...(19): siRNA sense strand
cauagaagguggugcaaag

SEQ ID NO: 836828 - RNA, 19 nt, Homo sapiens
  misc_RNA (1)...(19): siRNA sense strand
agagagggccacuguguua

SEQ ID NO: 836829 - RNA, 19 nt, Homo sapiens
  misc_RNA (1)...(19): siRNA sense strand
gcaaaugguggucauacuu

SEQ ID NO: 836830 - RNA, 19 nt, Homo sapiens
  misc_RNA (1)...(19): siRNA sense strand
agaaagugcucacagaaca

SEQ ID NO: 836831 - RNA, 19 nt, Homo sapiens
  misc_RNA (1)...(19): siRNA sense strand
gaaaguagaagcuggaaaa

SEQ ID NO: 836832 - RNA, 19 nt, Homo sapiens
  misc_RNA (1)...(19): siRNA sense strand
gaaagaaaugggcauaucu

SEQ ID NO: 836833 - RNA, 19 nt, Homo sapiens
  misc_RNA (1)...(19): siRNA sense strand
uggaagaaguuguuagugu

SEQ ID NO: 836834 - RNA, 19 nt, Homo sapiens
  misc_RNA (1)...(19): siRNA sense strand
ugucagagcugcaaacaac

SEQ ID NO: 836835 - RNA, 19 nt, Homo sapiens
  misc_RNA (1)...(19): siRNA sense strand
gagggccacuguguuaauu

SEQ ID NO: 836836 - RNA, 19 nt, Homo sapiens
  misc_RNA (1)...(19): siRNA sense strand
caagugagagugaaucaga

SEQ ID NO: 836837 - RNA, 19 nt, Homo sapiens
  misc_RNA (1)...(19): siRNA sense strand
ucaacgcucuguuagauca

SEQ ID NO: 836838 - RNA, 19 nt, Homo sapiens
  misc_RNA (1)...(19): siRNA sense strand
uagcaacccucacaucauc

SEQ ID NO: 836839 - RNA, 19 nt, Homo sapiens
  misc_RNA (1)...(19): siRNA sense strand
ggaguuguuugcuugugaa

SEQ ID NO: 836840 - RNA, 19 nt, Homo sapiens
  misc_RNA (1)...(19): siRNA sense strand
gaacaagcagagcaagaga

SEQ ID NO: 836841 - RNA, 19 nt, Homo sapiens
  misc_RNA (1)...(19): siRNA sense strand
ggaggcugccacuuuauuu

SEQ ID NO: 836842 - RNA, 19 nt, Homo sapiens
  misc_RNA (1)...(19): siRNA sense strand
gaaauuaaggucgaugugu

SEQ ID NO: 836843 - RNA, 19 nt, Homo sapiens
  misc_RNA (1)...(19): siRNA sense strand
ugaaagaaaugggcauauc

SEQ ID NO: 836844 - RNA, 19 nt, Homo sapiens
  misc_RNA (1)...(19): siRNA sense strand
ucacaucaucuuugcauuu

SEQ ID NO: 836845 - RNA, 19 nt, Homo sapiens
  misc_RNA (1)...(19): siRNA sense strand
uaagcgaauuaauguggua

SEQ ID NO: 836846 - RNA, 19 nt, Homo sapiens
  misc_RNA (1)...(19): siRNA sense strand
cacaaugacugcuaauagu

SEQ ID NO: 836847 - RNA, 19 nt, Homo sapiens
  misc_RNA (1)...(19): siRNA sense strand
gaucaagagagcagaauca

SEQ ID NO: 836848 - RNA, 19 nt, Homo sapiens
  misc_RNA (1)...(19): siRNA sense strand
aauagccgcucauuaacaa

SEQ ID NO: 836849 - RNA, 19 nt, Homo sapiens
  misc_RNA (1)...(19): siRNA sense strand
aaagcaaacccuuguggua

SEQ ID NO: 836850 - RNA, 19 nt, Homo sapiens
  misc_RNA (1)...(19): siRNA sense strand
gaagaaguuguuaguguuc

SEQ ID NO: 836851 - RNA, 19 nt, Homo sapiens
  misc_RNA (1)...(19): siRNA sense strand
aguagaagcuggaaaagua

SEQ ID NO: 836852 - RNA, 19 nt, Homo sapiens
  misc_RNA (1)...(19): siRNA sense strand
uaaggucgaugugugcaaa

SEQ ID NO: 836853 - RNA, 19 nt, Homo sapiens
  misc_RNA (1)...(19): siRNA sense strand
caaaugguggucauacuug

SEQ ID NO: 836854 - RNA, 19 nt, Homo sapiens
  misc_RNA (1)...(19): siRNA sense strand
aagagaaagugcucacaga

SEQ ID NO: 836855 - RNA, 19 nt, Homo sapiens
  misc_RNA (1)...(19): siRNA sense strand
acagagcacuaaccuaaca

SEQ ID NO: 836856 - RNA, 19 nt, Homo sapiens
  misc_RNA (1)...(19): siRNA sense strand
uaaccuaacacaccugaga

SEQ ID NO: 836857 - RNA, 19 nt, Homo sapiens
  misc_RNA (1)...(19): siRNA sense strand
caucagcccagagcacuua

SEQ ID NO: 836858 - RNA, 19 nt, Homo sapiens
  misc_RNA (1)...(19): siRNA sense strand
ucacaaugacugcuaauag

SEQ ID NO: 836859 - RNA, 19 nt, Homo sapiens
  misc_RNA (1)...(19): siRNA sense strand
gaaagugcucacagaacaa

SEQ ID NO: 836860 - RNA, 19 nt, Homo sapiens
  misc_RNA (1)...(19): siRNA sense strand
aagaguaaaucuggacauu

SEQ ID NO: 836861 - RNA, 19 nt, Homo sapiens
  misc_RNA (1)...(19): siRNA sense strand
gaaucacuuucuagaucaa

SEQ ID NO: 836862 - RNA, 19 nt, Homo sapiens
  misc_RNA (1)...(19): siRNA sense strand
aagaaaagguggcauagaa

SEQ ID NO: 836863 - RNA, 19 nt, Homo sapiens
  misc_RNA (1)...(19): siRNA sense strand
gaaaauauacuagcaagug

SEQ ID NO: 836864 - RNA, 19 nt, Homo sapiens
  misc_RNA (1)...(19): siRNA sense strand
gagcuucaaccaagugaga

SEQ ID NO: 836865 - RNA, 19 nt, Homo sapiens
  misc_RNA (1)...(19): siRNA sense strand
gagaggagacauaguagca

SEQ ID NO: 836866 - RNA, 19 nt, Homo sapiens
  misc_RNA (1)...(19): siRNA sense strand
ugagagccauuguggaauc

SEQ ID NO: 836867 - RNA, 19 nt, Homo sapiens
  misc_RNA (1)...(19): siRNA sense strand
guuguuugcuugugaaucu

SEQ ID NO: 836868 - RNA, 19 nt, Homo sapiens
  misc_RNA (1)...(19): siRNA sense strand
gaggaaagagcagguucua

SEQ ID NO: 836869 - RNA, 19 nt, Homo sapiens
  misc_RNA (1)...(19): siRNA sense strand
ugugagaggagacauagua

SEQ ID NO: 836870 - RNA, 19 nt, Homo sapiens
  misc_RNA (1)...(19): siRNA sense strand
gcaaacccuugugguagau

SEQ ID NO: 836871 - RNA, 19 nt, Homo sapiens
  misc_RNA (1)...(19): siRNA sense strand
gcuauuaaagagucucauu

SEQ ID NO: 836872 - RNA, 19 nt, Homo sapiens
  misc_RNA (1)...(19): siRNA sense strand
ucuguuagaucacccugaa

SEQ ID NO: 836873 - RNA, 19 nt, Homo sapiens
  misc_RNA (1)...(19): siRNA sense strand
ccaucacaaugacugcuaa

SEQ ID NO: 836874 - RNA, 19 nt, Homo sapiens
  misc_RNA (1)...(19): siRNA sense strand
gaaucgccauagccaagga

SEQ ID NO: 836875 - RNA, 19 nt, Homo sapiens
  misc_RNA (1)...(19): siRNA sense strand
cagaaaaccuggaagaagu

SEQ ID NO: 836876 - RNA, 19 nt, Homo sapiens
  misc_RNA (1)...(19): siRNA sense strand
gagagagggccacuguguu

SEQ ID NO: 836877 - RNA, 19 nt, Homo sapiens
  misc_RNA (1)...(19): siRNA sense strand
agucaacgcucuguuagau

SEQ ID NO: 836878 - RNA, 19 nt, Homo sapiens
  misc_RNA (1)...(19): siRNA sense strand
ccggaaggcugaagcucuu

SEQ ID NO: 836879 - RNA, 19 nt, Homo sapiens
  misc_RNA (1)...(19): siRNA sense strand
ggucauacuugggugaaag

SEQ ID NO: 836880 - RNA, 19 nt, Homo sapiens
  misc_RNA (1)...(19): siRNA sense strand
ccugagagccauuguggaa

SEQ ID NO: 836881 - RNA, 19 nt, Homo sapiens
  misc_RNA (1)...(19): siRNA sense strand
ggacgggagacacccuaaa

SEQ ID NO: 836882 - RNA, 19 nt, Homo sapiens
  misc_RNA (1)...(19): siRNA sense strand
cuauggaggcugccacuuu

SEQ ID NO: 836883 - RNA, 19 nt, Homo sapiens
  misc_RNA (1)...(19): siRNA sense strand
uggcagagaagcugaaaga

SEQ ID NO: 836884 - RNA, 19 nt, Homo sapiens
  misc_RNA (1)...(19): siRNA sense strand
uuauacagauaccuuagga

SEQ ID NO: 836885 - RNA, 19 nt, Homo sapiens
  misc_RNA (1)...(19): siRNA sense strand
agaguaaaucuggacauua

SEQ ID NO: 836886 - RNA, 19 nt, Homo sapiens
  misc_RNA (1)...(19): siRNA sense strand
aaccaggguguuaaauuua

SEQ ID NO: 836887 - RNA, 19 nt, Homo sapiens
  misc_RNA (1)...(19): siRNA sense strand
ucauugagcaggcugaaga

SEQ ID NO: 836888 - RNA, 19 nt, Homo sapiens
  misc_RNA (1)...(19): siRNA sense strand
gagagggccacuguguuaa

SEQ ID NO: 836889 - RNA, 19 nt, Homo sapiens
  misc_RNA (1)...(19): siRNA sense strand
aagcagagcaagagaggaa

SEQ ID NO: 836890 - RNA, 19 nt, Homo sapiens
  misc_RNA (1)...(19): siRNA sense strand
gcagucaacgcucuguuag

SEQ ID NO: 836891 - RNA, 19 nt, Homo sapiens
  misc_RNA (1)...(19): siRNA sense strand
gcugaaagaaaugggcaua

SEQ ID NO: 836892 - RNA, 19 nt, Homo sapiens
  misc_RNA (1)...(19): siRNA sense strand
cagcagccagugcaguaua

SEQ ID NO: 836893 - RNA, 19 nt, Homo sapiens
  misc_RNA (1)...(19): siRNA sense strand
uauagcaacccucacauca

SEQ ID NO: 836894 - RNA, 19 nt, Homo sapiens
  misc_RNA (1)...(19): siRNA sense strand
acaaccaggguguuaaauu

SEQ ID NO: 836895 - RNA, 19 nt, Homo sapiens
  misc_RNA (1)...(19): siRNA sense strand
gcuggaggccuuuaugaag

SEQ ID NO: 836896 - RNA, 19 nt, Homo sapiens
  misc_RNA (1)...(19): siRNA sense strand
gagagccauuguggaauca

SEQ ID NO: 836897 - RNA, 19 nt, Homo sapiens
  misc_RNA (1)...(19): siRNA sense strand
gagaaagugcucacagaac

SEQ ID NO: 836898 - RNA, 19 nt, Homo sapiens
  misc_RNA (1)...(19): siRNA sense strand
gccaaggaacugaucaaga

SEQ ID NO: 836899 - RNA, 19 nt, Homo sapiens
  misc_RNA (1)...(19): siRNA sense strand
gugaaucugcugucaagga

SEQ ID NO: 836900 - RNA, 19 nt, Homo sapiens
  misc_RNA (1)...(19): siRNA sense strand
guagauguaguugcaaaug

SEQ ID NO: 836901 - RNA, 19 nt, Homo sapiens
  misc_RNA (1)...(19): siRNA sense strand
ccaaaagacuacacaacug

SEQ ID NO: 836902 - RNA, 19 nt, Homo sapiens
  misc_RNA (1)...(19): siRNA sense strand
gcauagaagguggugcaaa

SEQ ID NO: 836903 - RNA, 19 nt, Homo sapiens
  misc_RNA (1)...(19): siRNA sense strand
gucuuugguuauacagaua

SEQ ID NO: 836904 - RNA, 19 nt, Homo sapiens
  misc_RNA (1)...(19): siRNA sense strand
cagcuggaggccuuuauga

SEQ ID NO: 836905 - RNA, 19 nt, Homo sapiens
  misc_RNA (1)...(19): siRNA sense strand
agagaaagugcucacagaa

SEQ ID NO: 836906 - RNA, 19 nt, Homo sapiens
  misc_RNA (1)...(19): siRNA sense strand
uaucugcccucagcuaugg

SEQ ID NO: 836907 - RNA, 19 nt, Homo sapiens
  misc_RNA (1)...(19): siRNA sense strand
ucuggacauuacuacuuua

SEQ ID NO: 836908 - RNA, 19 nt, Homo sapiens
  misc_RNA (1)...(19): siRNA sense strand
uagauguaguugcaaaugg

SEQ ID NO: 836909 - RNA, 19 nt, Homo sapiens
  misc_RNA (1)...(19): siRNA sense strand
ugugguagauguaguugca

SEQ ID NO: 836910 - RNA, 19 nt, Homo sapiens
  misc_RNA (1)...(19): siRNA sense strand
guacauaugugacuacuaa

SEQ ID NO: 836911 - RNA, 19 nt, Homo sapiens
  misc_RNA (1)...(19): siRNA sense strand
caacagagcaaguaaauga

SEQ ID NO: 836912 - RNA, 19 nt, Homo sapiens
  misc_RNA (1)...(19): siRNA sense strand
uaaaugaguugguggcuuu

SEQ ID NO: 836913 - RNA, 19 nt, Homo sapiens
  misc_RNA (1)...(19): siRNA sense strand
gugagcaacuggugaauuu

SEQ ID NO: 836914 - RNA, 19 nt, Homo sapiens
  misc_RNA (1)...(19): siRNA sense strand
gaauucaccgggagagaua

SEQ ID NO: 836915 - RNA, 19 nt, Homo sapiens
  misc_RNA (1)...(19): siRNA sense strand
acacaguggucaguacaua

SEQ ID NO: 836916 - RNA, 19 nt, Homo sapiens
  misc_RNA (1)...(19): siRNA sense strand
cuacuaacgucucccuuau

SEQ ID NO: 836917 - RNA, 19 nt, Homo sapiens
  misc_RNA (1)...(19): siRNA sense strand
gcaucaaaguggugaaagu

SEQ ID NO: 836918 - RNA, 19 nt, Homo sapiens
  misc_RNA (1)...(19): siRNA sense strand
caacauagugaucuucaug

SEQ ID NO: 836919 - RNA, 19 nt, Homo sapiens
  misc_RNA (1)...(19): siRNA sense strand
gagauagcaucaccugucu

SEQ ID NO: 836920 - RNA, 19 nt, Homo sapiens
  misc_RNA (1)...(19): siRNA sense strand
caucauggccacccugaaa

SEQ ID NO: 836921 - RNA, 19 nt, Homo sapiens
  misc_RNA (1)...(19): siRNA sense strand
ggagugagcaacuggugaa

SEQ ID NO: 836922 - RNA, 19 nt, Homo sapiens
  misc_RNA (1)...(19): siRNA sense strand
gaacacaguggucaguaca

SEQ ID NO: 836923 - RNA, 19 nt, Homo sapiens
  misc_RNA (1)...(19): siRNA sense strand
aagaagccauugcucaguu

SEQ ID NO: 836924 - RNA, 19 nt, Homo sapiens
  misc_RNA (1)...(19): siRNA sense strand
acacagugaucagagauug

SEQ ID NO: 836925 - RNA, 19 nt, Homo sapiens
  misc_RNA (1)...(19): siRNA sense strand
gggacaggcuacauuccaa

SEQ ID NO: 836926 - RNA, 19 nt, Homo sapiens
  misc_RNA (1)...(19): siRNA sense strand
gauagcaucaccugucuca

SEQ ID NO: 836927 - RNA, 19 nt, Homo sapiens
  misc_RNA (1)...(19): siRNA sense strand
ggcgaaagcaagaagauga

SEQ ID NO: 836928 - RNA, 19 nt, Homo sapiens
  misc_RNA (1)...(19): siRNA sense strand
acuaacgucucccuuauuc

SEQ ID NO: 836929 - RNA, 19 nt, Homo sapiens
  misc_RNA (1)...(19): siRNA sense strand
ucagcgaacuaagcaauau

SEQ ID NO: 836930 - RNA, 19 nt, Homo sapiens
  misc_RNA (1)...(19): siRNA sense strand
cagagcaaguaaaugaguu

SEQ ID NO: 836931 - RNA, 19 nt, Homo sapiens
  misc_RNA (1)...(19): siRNA sense strand
gagcaacuggugaauuuua

SEQ ID NO: 836932 - RNA, 19 nt, Homo sapiens
  misc_RNA (1)...(19): siRNA sense strand
gauccuggugcacaacaua

SEQ ID NO: 836933 - RNA, 19 nt, Homo sapiens
  misc_RNA (1)...(19): siRNA sense strand
caggcuacauuccaacaga

SEQ ID NO: 836934 - RNA, 19 nt, Homo sapiens
  misc_RNA (1)...(19): siRNA sense strand
gaagaagccauugcucagu

SEQ ID NO: 836935 - RNA, 19 nt, Homo sapiens
  misc_RNA (1)...(19): siRNA sense strand
cgagaugggaggaccguuu

SEQ ID NO: 836936 - RNA, 19 nt, Homo sapiens
  misc_RNA (1)...(19): siRNA sense strand
ggaauucaccgggagagau

SEQ ID NO: 836937 - RNA, 19 nt, Homo sapiens
  misc_RNA (1)...(19): siRNA sense strand
ccagccagauucaguacau

SEQ ID NO: 836938 - RNA, 19 nt, Homo sapiens
  misc_RNA (1)...(19): siRNA sense strand
gcaucugguuuggugguuu

SEQ ID NO: 836939 - RNA, 19 nt, Homo sapiens
  misc_RNA (1)...(19): siRNA sense strand
ccauugcucaguucccaua

SEQ ID NO: 836940 - RNA, 19 nt, Homo sapiens
  misc_RNA (1)...(19): siRNA sense strand
auucaguccuuguggauga

SEQ ID NO: 836941 - RNA, 19 nt, Homo sapiens
  misc_RNA (1)...(19): siRNA sense strand
gcacaacauagugaucuuc

SEQ ID NO: 836942 - RNA, 19 nt, Homo sapiens
  misc_RNA (1)...(19): siRNA sense strand
acuacuaacgucucccuua

SEQ ID NO: 836943 - RNA, 19 nt, Homo sapiens
  misc_RNA (1)...(19): siRNA sense strand
uaacgucucccuuauucca

SEQ ID NO: 836944 - RNA, 19 nt, Homo sapiens
  misc_RNA (1)...(19): siRNA sense strand
ucaggaacuccaacuucua

SEQ ID NO: 836945 - RNA, 19 nt, Homo sapiens
  misc_RNA (1)...(19): siRNA sense strand
ugaacacaguggucaguac

SEQ ID NO: 836946 - RNA, 19 nt, Homo sapiens
  misc_RNA (1)...(19): siRNA sense strand
aagacucccuuguaauucu

SEQ ID NO: 836947 - RNA, 19 nt, Homo sapiens
  misc_RNA (1)...(19): siRNA sense strand
uugcucaguucccauaugu

SEQ ID NO: 836948 - RNA, 19 nt, Homo sapiens
  misc_RNA (1)...(19): siRNA sense strand
gcaggaagaagccauugcu

SEQ ID NO: 836949 - RNA, 19 nt, Homo sapiens
  misc_RNA (1)...(19): siRNA sense strand
aaucaggaacuccaacuuc

SEQ ID NO: 836950 - RNA, 19 nt, Homo sapiens
  misc_RNA (1)...(19): siRNA sense strand
ugaacgagagcaggaagaa

SEQ ID NO: 836951 - RNA, 19 nt, Homo sapiens
  misc_RNA (1)...(19): siRNA sense strand
agaagccauugcucaguuc

SEQ ID NO: 836952 - RNA, 19 nt, Homo sapiens
  misc_RNA (1)...(19): siRNA sense strand
gcauucaguccuuguggau

SEQ ID NO: 836953 - RNA, 19 nt, Homo sapiens
  misc_RNA (1)...(19): siRNA sense strand
aagaugacagggacgguuu

SEQ ID NO: 836954 - RNA, 19 nt, Homo sapiens
  misc_RNA (1)...(19): siRNA sense strand
gcaggcgaaagcaagaaga

SEQ ID NO: 836955 - RNA, 19 nt, Homo sapiens
  misc_RNA (1)...(19): siRNA sense strand
gaacgagagcaggaagaag

SEQ ID NO: 836956 - RNA, 19 nt, Homo sapiens
  misc_RNA (1)...(19): siRNA sense strand
gagcaggaagaagccauug

SEQ ID NO: 836957 - RNA, 19 nt, Homo sapiens
  misc_RNA (1)...(19): siRNA sense strand
uuuccuauguguacuucuu

SEQ ID NO: 836958 - RNA, 19 nt, Homo sapiens
  misc_RNA (1)...(19): siRNA sense strand
acaguggucaguacauaug

SEQ ID NO: 836959 - RNA, 19 nt, Homo sapiens
  misc_RNA (1)...(19): siRNA sense strand
gaucuucaugcgaacuuca

SEQ ID NO: 836960 - RNA, 19 nt, Homo sapiens
  misc_RNA (1)...(19): siRNA sense strand
gaucacaccugcaggauuu

SEQ ID NO: 836961 - RNA, 19 nt, Homo sapiens
  misc_RNA (1)...(19): siRNA sense strand
caagaugccucaagaaaug

SEQ ID NO: 836962 - RNA, 19 nt, Homo sapiens
  misc_RNA (1)...(19): siRNA sense strand
caaagaaggccaagaaauu

SEQ ID NO: 836963 - RNA, 19 nt, Homo sapiens
  misc_RNA (1)...(19): siRNA sense strand
gaagcaagaugccucaaga

SEQ ID NO: 836964 - RNA, 19 nt, Homo sapiens
  misc_RNA (1)...(19): siRNA sense strand
uaagagaccuguucacaug

SEQ ID NO: 836965 - RNA, 19 nt, Homo sapiens
  misc_RNA (1)...(19): siRNA sense strand
gaacaagugccauuaaugu

SEQ ID NO: 836966 - RNA, 19 nt, Homo sapiens
  misc_RNA (1)...(19): siRNA sense strand
cuucagaucuucaggauaa

SEQ ID NO: 836967 - RNA, 19 nt, Homo sapiens
  misc_RNA (1)...(19): siRNA sense strand
caggaaaccuaauugcaua

SEQ ID NO: 836968 - RNA, 19 nt, Homo sapiens
  misc_RNA (1)...(19): siRNA sense strand
gaucgagccugcuuauuca

SEQ ID NO: 836969 - RNA, 19 nt, Homo sapiens
  misc_RNA (1)...(19): siRNA sense strand
gcaagccaguuucaaauuc

SEQ ID NO: 836970 - RNA, 19 nt, Homo sapiens
  misc_RNA (1)...(19): siRNA sense strand
agacuagacuugauucauu

SEQ ID NO: 836971 - RNA, 19 nt, Homo sapiens
  misc_RNA (1)...(19): siRNA sense strand
ggaagaagaagcagacguu

SEQ ID NO: 836972 - RNA, 19 nt, Homo sapiens
  misc_RNA (1)...(19): siRNA sense strand
ggccauaccgauuucauua

SEQ ID NO: 836973 - RNA, 19 nt, Homo sapiens
  misc_RNA (1)...(19): siRNA sense strand
gccaagaaauugcaagugu

SEQ ID NO: 836974 - RNA, 19 nt, Homo sapiens
  misc_RNA (1)...(19): siRNA sense strand
gguagaauuuaaucccuuu

SEQ ID NO: 836975 - RNA, 19 nt, Homo sapiens
  misc_RNA (1)...(19): siRNA sense strand
gcaagaugccucaagaaau

SEQ ID NO: 836976 - RNA, 19 nt, Homo sapiens
  misc_RNA (1)...(19): siRNA sense strand
cauaugguggcaauaauua

SEQ ID NO: 836977 - RNA, 19 nt, Homo sapiens
  misc_RNA (1)...(19): siRNA sense strand
gaaaugcugccuacacugu

SEQ ID NO: 836978 - RNA, 19 nt, Homo sapiens
  misc_RNA (1)...(19): siRNA sense strand
ggaucgagccugcuuauuc

SEQ ID NO: 836979 - RNA, 19 nt, Homo sapiens
  misc_RNA (1)...(19): siRNA sense strand
gacuagacuugauucauug

SEQ ID NO: 836980 - RNA, 19 nt, Homo sapiens
  misc_RNA (1)...(19): siRNA sense strand
ugcaggaaaugauugguua

SEQ ID NO: 836981 - RNA, 19 nt, Homo sapiens
  misc_RNA (1)...(19): siRNA sense strand
cagaacaagugccauuaau

SEQ ID NO: 836982 - RNA, 19 nt, Homo sapiens
  misc_RNA (1)...(19): siRNA sense strand
gaacuuggaaggagugcaa

SEQ ID NO: 836983 - RNA, 19 nt, Homo sapiens
  misc_RNA (1)...(19): siRNA sense strand
gaauggaacaauccgguuu

SEQ ID NO: 836984 - RNA, 19 nt, Homo sapiens
  misc_RNA (1)...(19): siRNA sense strand
gaauuuaaucccuuugaga

SEQ ID NO: 836985 - RNA, 19 nt, Homo sapiens
  misc_RNA (1)...(19): siRNA sense strand
gcauaugguggcaauaauu

SEQ ID NO: 836986 - RNA, 19 nt, Homo sapiens
  misc_RNA (1)...(19): siRNA sense strand
caagaaauugcaaguguga

SEQ ID NO: 836987 - RNA, 19 nt, Homo sapiens
  misc_RNA (1)...(19): siRNA sense strand
gcuaaugguugcagagaag

SEQ ID NO: 836988 - RNA, 19 nt, Homo sapiens
  misc_RNA (1)...(19): siRNA sense strand
gaaaccuaauugcauaugg

SEQ ID NO: 836989 - RNA, 19 nt, Homo sapiens
  misc_RNA (1)...(19): siRNA sense strand
caagccaguuucaaauuca

SEQ ID NO: 836990 - RNA, 19 nt, Homo sapiens
  misc_RNA (1)...(19): siRNA sense strand
ccauaccgauuucauuaau

SEQ ID NO: 836991 - RNA, 19 nt, Homo sapiens
  misc_RNA (1)...(19): siRNA sense strand
uugggugacugaaguauaa

SEQ ID NO: 836992 - RNA, 19 nt, Homo sapiens
  misc_RNA (1)...(19): siRNA sense strand
gaacaauccgguuuuauga

SEQ ID NO: 836993 - RNA, 19 nt, Homo sapiens
  misc_RNA (1)...(19): siRNA sense strand
agaagaagcagacguugaa

SEQ ID NO: 836994 - RNA, 19 nt, Homo sapiens
  misc_RNA (1)...(19): siRNA sense strand
aaagaaggccaagaaauug

SEQ ID NO: 836995 - RNA, 19 nt, Homo sapiens
  misc_RNA (1)...(19): siRNA sense strand
ccaaagaaggccaagaaau

SEQ ID NO: 836996 - RNA, 19 nt, Homo sapiens
  misc_RNA (1)...(19): siRNA sense strand
gauauuacucgguccaguu

SEQ ID NO: 836997 - RNA, 19 nt, Homo sapiens
  misc_RNA (1)...(19): siRNA sense strand
gaggagacuuuuaagcuaa

SEQ ID NO: 836998 - RNA, 19 nt, Homo sapiens
  misc_RNA (1)...(19): siRNA sense strand
uuaaugguuugguguuuga

SEQ ID NO: 836999 - RNA, 19 nt, Homo sapiens
  misc_RNA (1)...(19): siRNA sense strand
agucaggguugauggcaua

SEQ ID NO: 837000 - RNA, 19 nt, Homo sapiens
  misc_RNA (1)...(19): siRNA sense strand
gaggagaccacaagcuguu

SEQ ID NO: 837001 - RNA, 19 nt, Homo sapiens
  misc_RNA (1)...(19): siRNA sense strand
gaacucucccucugugugu

SEQ ID NO: 837002 - RNA, 19 nt, Homo sapiens
  misc_RNA (1)...(19): siRNA sense strand
ggauucaggaaaccuaauu

SEQ ID NO: 837003 - RNA, 19 nt, Homo sapiens
  misc_RNA (1)...(19): siRNA sense strand
agagaagaauggaacaauc

SEQ ID NO: 837004 - RNA, 19 nt, Homo sapiens
  misc_RNA (1)...(19): siRNA sense strand
ccgauuucauuaaugguuu

SEQ ID NO: 837005 - RNA, 19 nt, Homo sapiens
  misc_RNA (1)...(19): siRNA sense strand
auaauuauguggucauugg

SEQ ID NO: 837006 - RNA, 19 nt, Homo sapiens
  misc_RNA (1)...(19): siRNA sense strand
ucagaacaagugccauuaa

SEQ ID NO: 837007 - RNA, 19 nt, Homo sapiens
  misc_RNA (1)...(19): siRNA sense strand
cauuaaugguuugguguuu

SEQ ID NO: 837008 - RNA, 19 nt, Homo sapiens
  misc_RNA (1)...(19): siRNA sense strand
gcaggaaaugauugguuaa

SEQ ID NO: 837009 - RNA, 19 nt, Homo sapiens
  misc_RNA (1)...(19): siRNA sense strand
ggcaagccaguuucaaauu

SEQ ID NO: 837010 - RNA, 19 nt, Homo sapiens
  misc_RNA (1)...(19): siRNA sense strand
ccagagacuagacuugauu

SEQ ID NO: 837011 - RNA, 19 nt, Homo sapiens
  misc_RNA (1)...(19): siRNA sense strand
gugcaugugguagaauuua

SEQ ID NO: 837012 - RNA, 19 nt, Homo sapiens
  misc_RNA (1)...(19): siRNA sense strand
ccuacacuguggauuguga

SEQ ID NO: 837013 - RNA, 19 nt, Homo sapiens
  misc_RNA (1)...(19): siRNA sense strand
guacguuucaggaagaaga

SEQ ID NO: 837014 - RNA, 19 nt, Homo sapiens
  misc_RNA (1)...(19): siRNA sense strand
ggaacaauccgguuuuaug

SEQ ID NO: 837015 - RNA, 19 nt, Homo sapiens
  misc_RNA (1)...(19): siRNA sense strand
uagagggccauaccgauuu

SEQ ID NO: 837016 - RNA, 19 nt, Homo sapiens
  misc_RNA (1)...(19): siRNA sense strand
gcccagagacuagacuuga

SEQ ID NO: 837017 - RNA, 19 nt, Homo sapiens
  misc_RNA (1)...(19): siRNA sense strand
aaaccuaauugcauauggu

SEQ ID NO: 837018 - RNA, 19 nt, Homo sapiens
  misc_RNA (1)...(19): siRNA sense strand
gaaaaucuguuugcaacca

SEQ ID NO: 837019 - RNA, 19 nt, Homo sapiens
  misc_RNA (1)...(19): siRNA sense strand
uuuaaucccuuugagaaug

SEQ ID NO: 837020 - RNA, 19 nt, Homo sapiens
  misc_RNA (1)...(19): siRNA sense strand
gccauaccgauuucauuaa

SEQ ID NO: 837021 - RNA, 19 nt, Homo sapiens
  misc_RNA (1)...(19): siRNA sense strand
aagaaaugcugccuacacu

SEQ ID NO: 837022 - RNA, 19 nt, Homo sapiens
  misc_RNA (1)...(19): siRNA sense strand
cauaccgauuucauuaaug

SEQ ID NO: 837023 - RNA, 19 nt, Homo sapiens
  misc_RNA (1)...(19): siRNA sense strand
ucaggaaaccuaauugcau

SEQ ID NO: 837024 - RNA, 19 nt, Homo sapiens
  misc_RNA (1)...(19): siRNA sense strand
ggaaaccuaauugcauaug

SEQ ID NO: 837025 - RNA, 19 nt, Homo sapiens
  misc_RNA (1)...(19): siRNA sense strand
gcagagaagaauggaacaa

SEQ ID NO: 837026 - RNA, 19 nt, Homo sapiens
  misc_RNA (1)...(19): siRNA sense strand
ugaggagacuuuuaagcua

SEQ ID NO: 837027 - RNA, 19 nt, Homo sapiens
  misc_RNA (1)...(19): siRNA sense strand
cguguacguuucaggaaga

SEQ ID NO: 837028 - RNA, 19 nt, Homo sapiens
  misc_RNA (1)...(19): siRNA sense strand
caagaaaugcugccuacac

SEQ ID NO: 837029 - RNA, 19 nt, Homo sapiens
  misc_RNA (1)...(19): siRNA sense strand
acaagugccauuaauguca

SEQ ID NO: 837030 - RNA, 19 nt, Homo sapiens
  misc_RNA (1)...(19): siRNA sense strand
gcuuggagcccagagacua

SEQ ID NO: 837031 - RNA, 19 nt, Homo sapiens
  misc_RNA (1)...(19): siRNA sense strand
caaaauaagagaccuguuc

SEQ ID NO: 837032 - RNA, 19 nt, Homo sapiens
  misc_RNA (1)...(19): siRNA sense strand
aaucagaacaagugccauu

SEQ ID NO: 837033 - RNA, 19 nt, Homo sapiens
  misc_RNA (1)...(19): siRNA sense strand
gagugcaaacagcucauuu

SEQ ID NO: 837034 - RNA, 19 nt, Homo sapiens
  misc_RNA (1)...(19): siRNA sense strand
ugcaugugguagaauuuaa

SEQ ID NO: 837035 - RNA, 19 nt, Homo sapiens
  misc_RNA (1)...(19): siRNA sense strand
uuagagggccauaccgauu

SEQ ID NO: 837036 - RNA, 19 nt, Homo sapiens
  misc_RNA (1)...(19): siRNA sense strand
gcaauaauuauguggucau

SEQ ID NO: 837037 - RNA, 19 nt, Homo sapiens
  misc_RNA (1)...(19): siRNA sense strand
gcaugugguagaauuuaau

SEQ ID NO: 837038 - RNA, 19 nt, Homo sapiens
  misc_RNA (1)...(19): siRNA sense strand
auaccgauuucauuaaugg

SEQ ID NO: 837039 - RNA, 19 nt, Homo sapiens
  misc_RNA (1)...(19): siRNA sense strand
gggccauaccgauuucauu

SEQ ID NO: 837040 - RNA, 19 nt, Homo sapiens
  misc_RNA (1)...(19): siRNA sense strand
cgauuucauuaaugguuug

SEQ ID NO: 837041 - RNA, 19 nt, Homo sapiens
  misc_RNA (1)...(19): siRNA sense strand
auauuacucgguccaguua

SEQ ID NO: 837042 - RNA, 19 nt, Homo sapiens
  misc_RNA (1)...(19): siRNA sense strand
agaacaagugccauuaaug

SEQ ID NO: 837043 - RNA, 19 nt, Homo sapiens
  misc_RNA (1)...(19): siRNA sense strand
ucgaacauuucaccaugga

SEQ ID NO: 837044 - RNA, 19 nt, Homo sapiens
  misc_RNA (1)...(19): siRNA sense strand
agagaccuguucacaugga

SEQ ID NO: 837045 - RNA, 19 nt, Homo sapiens
  misc_RNA (1)...(19): siRNA sense strand
gagaagaauggaacaaucc

SEQ ID NO: 837046 - RNA, 19 nt, Homo sapiens
  misc_RNA (1)...(19): siRNA sense strand
ggagugcaaacagcucauu

SEQ ID NO: 837047 - RNA, 19 nt, Homo sapiens
  misc_RNA (1)...(19): siRNA sense strand
ucccaaagaaggccaagaa

SEQ ID NO: 837048 - RNA, 19 nt, Homo sapiens
  misc_RNA (1)...(19): siRNA sense strand
ccaacaggcuauuuuaucu

SEQ ID NO: 837049 - RNA, 19 nt, Homo sapiens
  misc_RNA (1)...(19): siRNA sense strand
gugaagauuaugugcaugu

SEQ ID NO: 837050 - RNA, 19 nt, Homo sapiens
  misc_RNA (1)...(19): siRNA sense strand
aagaagaagcagacguuga

SEQ ID NO: 837051 - RNA, 19 nt, Homo sapiens
  misc_RNA (1)...(19): siRNA sense strand
cacuguggauugugaagau

SEQ ID NO: 837052 - RNA, 19 nt, Homo sapiens
  misc_RNA (1)...(19): siRNA sense strand
gagacuagacuugauucau

SEQ ID NO: 837053 - RNA, 19 nt, Homo sapiens
  misc_RNA (1)...(19): siRNA sense strand
aauaagagaccuguucaca

SEQ ID NO: 837054 - RNA, 19 nt, Homo sapiens
  misc_RNA (1)...(19): siRNA sense strand
cagagaagaauggaacaau

SEQ ID NO: 837055 - RNA, 19 nt, Homo sapiens
  misc_RNA (1)...(19): siRNA sense strand
caagugugagugacgauca

SEQ ID NO: 837056 - RNA, 19 nt, Homo sapiens
  misc_RNA (1)...(19): siRNA sense strand
gaaggcauucaguauaaaa

SEQ ID NO: 837057 - RNA, 19 nt, Homo sapiens
  misc_RNA (1)...(19): siRNA sense strand
agcaagaugccucaagaaa

SEQ ID NO: 837058 - RNA, 19 nt, Homo sapiens
  misc_RNA (1)...(19): siRNA sense strand
agaauuuaaucccuuugag

SEQ ID NO: 837059 - RNA, 19 nt, Homo sapiens
  misc_RNA (1)...(19): siRNA sense strand
gauugguuaauuugggaua

SEQ ID NO: 837060 - RNA, 19 nt, Homo sapiens
  misc_RNA (1)...(19): siRNA sense strand
ggacgaguuucaucuguga

SEQ ID NO: 837061 - RNA, 19 nt, Homo sapiens
  misc_RNA (1)...(19): siRNA sense strand
aaaggcagcccugauguua

SEQ ID NO: 837062 - RNA, 19 nt, Homo sapiens
  misc_RNA (1)...(19): siRNA sense strand
guuagugccuccucugaug

SEQ ID NO: 837063 - RNA, 19 nt, Homo sapiens
  misc_RNA (1)...(19): siRNA sense strand
cagaagaggaccaaaguca

SEQ ID NO: 837064 - RNA, 19 nt, Homo sapiens
  misc_RNA (1)...(19): siRNA sense strand
cagcagagcagaaggcaau

SEQ ID NO: 837065 - RNA, 19 nt, Homo sapiens
  misc_RNA (1)...(19): siRNA sense strand
gcaaugccacgcagaagag

SEQ ID NO: 837066 - RNA, 19 nt, Homo sapiens
  misc_RNA (1)...(19): siRNA sense strand
gaugagccauacgccagaa

SEQ ID NO: 837067 - RNA, 19 nt, Homo sapiens
  misc_RNA (1)...(19): siRNA sense strand
caucugugacaccuacaua

SEQ ID NO: 837068 - RNA, 19 nt, Homo sapiens
  misc_RNA (1)...(19): siRNA sense strand
aggcagcccugauguuagu

SEQ ID NO: 837069 - RNA, 19 nt, Homo sapiens
  misc_RNA (1)...(19): siRNA sense strand
gcagaagaggaccaaaguc

SEQ ID NO: 837070 - RNA, 19 nt, Homo sapiens
  misc_RNA (1)...(19): siRNA sense strand
caaagucaggugccagaag

SEQ ID NO: 837071 - RNA, 19 nt, Homo sapiens
  misc_RNA (1)...(19): siRNA sense strand
ccucacagggugcuggaaa

SEQ ID NO: 837072 - RNA, 19 nt, Homo sapiens
  misc_RNA (1)...(19): siRNA sense strand
acauaguccucgcuuggau

SEQ ID NO: 837073 - RNA, 19 nt, Homo sapiens
  misc_RNA (1)...(19): siRNA sense strand
caagaugccugucguguuu

SEQ ID NO: 837074 - RNA, 19 nt, Homo sapiens
  misc_RNA (1)...(19): siRNA sense strand
gcaaugcccugcgugaguu

SEQ ID NO: 837075 - RNA, 19 nt, Homo sapiens
  misc_RNA (1)...(19): siRNA sense strand
caaccgauccuauaaguuc

SEQ ID NO: 837076 - RNA, 19 nt, Homo sapiens
  misc_RNA (1)...(19): siRNA sense strand
ccacaucggagcaguauga

SEQ ID NO: 837077 - RNA, 19 nt, Homo sapiens
  misc_RNA (1)...(19): siRNA sense strand
gcacagcucagaccaagau

SEQ ID NO: 837078 - RNA, 19 nt, Homo sapiens
  misc_RNA (1)...(19): siRNA sense strand
caucggagcaguaugaguu

SEQ ID NO: 837079 - RNA, 19 nt, Homo sapiens
  misc_RNA (1)...(19): siRNA sense strand
ccuauaaguucaccaucaa

SEQ ID NO: 837080 - RNA, 19 nt, Homo sapiens
  misc_RNA (1)...(19): siRNA sense strand
ccaccaagaucccgcacau

SEQ ID NO: 837081 - RNA, 19 nt, Homo sapiens
  misc_RNA (1)...(19): siRNA sense strand
cguaagugcuccuacuaca

SEQ ID NO: 837082 - RNA, 19 nt, Homo sapiens
  misc_RNA (1)...(19): siRNA sense strand
gaaccagaggcguggaaga

SEQ ID NO: 837083 - RNA, 19 nt, Homo sapiens
  misc_RNA (1)...(19): siRNA sense strand
uaagugcuccuacuacauc

SEQ ID NO: 837084 - RNA, 19 nt, Homo sapiens
  misc_RNA (1)...(19): siRNA sense strand
ccaagaugccugucguguu

SEQ ID NO: 837085 - RNA, 19 nt, Homo sapiens
  misc_RNA (1)...(19): siRNA sense strand
ccuccacgcugguguacga

SEQ ID NO: 837086 - RNA, 19 nt, Homo sapiens
  misc_RNA (1)...(19): siRNA sense strand
gaaguuccagcgcaugaag

SEQ ID NO: 837087 - RNA, 19 nt, Homo sapiens
  misc_RNA (1)...(19): siRNA sense strand
cccaaccgauccuauaagu

SEQ ID NO: 837088 - RNA, 19 nt, Homo sapiens
  misc_RNA (1)...(19): siRNA sense strand
caguaugaguugcgcuuca

SEQ ID NO: 837089 - RNA, 19 nt, Homo sapiens
  misc_RNA (1)...(19): siRNA sense strand
uauaaguucaccaucaaga

SEQ ID NO: 837090 - RNA, 19 nt, Homo sapiens
  misc_RNA (1)...(19): siRNA sense strand
gacagcuuccugaccauga

SEQ ID NO: 837091 - RNA, 19 nt, Homo sapiens
  misc_RNA (1)...(19): siRNA sense strand
uccuauaaguucaccauca

SEQ ID NO: 837092 - RNA, 19 nt, Homo sapiens
  misc_RNA (1)...(19): siRNA sense strand
guaagugcuccuacuacau

SEQ ID NO: 837093 - RNA, 19 nt, Homo sapiens
  misc_RNA (1)...(19): siRNA sense strand
gaugucagugccaccaaga

SEQ ID NO: 837094 - RNA, 19 nt, Homo sapiens
  misc_RNA (1)...(19): siRNA sense strand
gccugggccuggacaagau

SEQ ID NO: 837095 - RNA, 19 nt, Homo sapiens
  misc_RNA (1)...(19): siRNA sense strand
agaugccugucguguuuga

SEQ ID NO: 837096 - RNA, 19 nt, Homo sapiens
  misc_RNA (1)...(19): siRNA sense strand
gauccuauaaguucaccau

SEQ ID NO: 837097 - RNA, 19 nt, Homo sapiens
  misc_RNA (1)...(19): siRNA sense strand
gcaaagaccagaacaaaca

SEQ ID NO: 837098 - RNA, 19 nt, Homo sapiens
  misc_RNA (1)...(19): siRNA sense strand
caucagcacuggaaugcaa

SEQ ID NO: 837099 - RNA, 19 nt, Homo sapiens
  misc_RNA (1)...(19): siRNA sense strand
gcucugaagugguucugaa

SEQ ID NO: 837100 - RNA, 19 nt, Homo sapiens
  misc_RNA (1)...(19): siRNA sense strand
gaacacaccacagccauca

SEQ ID NO: 837101 - RNA, 19 nt, Homo sapiens
  misc_RNA (1)...(19): siRNA sense strand
cugcagcucugaagugguu

SEQ ID NO: 837102 - RNA, 19 nt, Homo sapiens
  misc_RNA (1)...(19): siRNA sense strand
gcacugggguggucaagga

SEQ ID NO: 837103 - RNA, 19 nt, Homo sapiens
  misc_RNA (1)...(19): siRNA sense strand
gugccaccaucuacuuuga

SEQ ID NO: 837104 - RNA, 19 nt, Homo sapiens
  misc_RNA (1)...(19): siRNA sense strand
ugcaggaggugacgcagaa

SEQ ID NO: 837105 - RNA, 19 nt, Homo sapiens
  misc_RNA (1)...(19): siRNA sense strand
gaccuggacccgugaaguc

SEQ ID NO: 837106 - RNA, 19 nt, Homo sapiens
  misc_RNA (1)...(19): siRNA sense strand
gccaccaucuacuuugaca

SEQ ID NO: 837107 - RNA, 19 nt, Homo sapiens
  misc_RNA (1)...(19): siRNA sense strand
ggaaugcaaagaccagaac

SEQ ID NO: 837108 - RNA, 19 nt, Homo sapiens
  misc_RNA (1)...(19): siRNA sense strand
ggagaaggaggaggagaca

SEQ ID NO: 837109 - RNA, 19 nt, Homo sapiens
  misc_RNA (1)...(19): siRNA sense strand
augcaaagaccagaacaaa

SEQ ID NO: 837110 - RNA, 19 nt, Homo sapiens
  misc_RNA (1)...(19): siRNA sense strand
cacaagugguacaguauuu

SEQ ID NO: 837111 - RNA, 19 nt, Homo sapiens
  misc_RNA (1)...(19): siRNA sense strand
cgaaugcucuuuguaugug

SEQ ID NO: 837112 - RNA, 19 nt, Homo sapiens
  misc_RNA (1)...(19): siRNA sense strand
gcuuuggaucuuuguaaua

SEQ ID NO: 837113 - RNA, 19 nt, Homo sapiens
  misc_RNA (1)...(19): siRNA sense strand
gucgaaugcucuuuguaug

SEQ ID NO: 837114 - RNA, 19 nt, Homo sapiens
  misc_RNA (1)...(19): siRNA sense strand
gaaugcucuuuguaugugu

SEQ ID NO: 837115 - RNA, 19 nt, Homo sapiens
  misc_RNA (1)...(19): siRNA sense strand
aaauuggcuuuggaucuuu

SEQ ID NO: 837116 - RNA, 19 nt, Homo sapiens
  misc_RNA (1)...(19): siRNA sense strand
ugucgaaugcucuuuguau

SEQ ID NO: 837117 - RNA, 19 nt, Homo sapiens
  misc_RNA (1)...(19): siRNA sense strand
ggcuuuggaucuuuguaau

SEQ ID NO: 837118 - RNA, 19 nt, Homo sapiens
  misc_RNA (1)...(19): siRNA sense strand
aaaauuggcuuuggaucuu

SEQ ID NO: 837119 - RNA, 19 nt, Homo sapiens
  misc_RNA (1)...(19): siRNA sense strand
cuuuggaucuuuguaauac

SEQ ID NO: 837120 - RNA, 19 nt, Homo sapiens
  misc_RNA (1)...(19): siRNA sense strand
uggcuuuggaucuuuguaa

SEQ ID NO: 837121 - RNA, 19 nt, Homo sapiens
  misc_RNA (1)...(19): siRNA sense strand
ucgaaugcucuuuguaugu

SEQ ID NO: 837122 - RNA, 19 nt, Homo sapiens
  misc_RNA (1)...(19): siRNA sense strand
ggacuuggcuuuauaugaa

SEQ ID NO: 837123 - RNA, 19 nt, Homo sapiens
  misc_RNA (1)...(19): siRNA sense strand
aaauagaccugauguguua

SEQ ID NO: 837124 - RNA, 19 nt, Homo sapiens
  misc_RNA (1)...(19): siRNA sense strand
gaguggagcugaucuguuu

SEQ ID NO: 837125 - RNA, 19 nt, Homo sapiens
  misc_RNA (1)...(19): siRNA sense strand
gaaaggaaauucugcaagu

SEQ ID NO: 837126 - RNA, 19 nt, Homo sapiens
  misc_RNA (1)...(19): siRNA sense strand
guuacgaccuggaagauua

SEQ ID NO: 837127 - RNA, 19 nt, Homo sapiens
  misc_RNA (1)...(19): siRNA sense strand
guuagauacugcuuuguua

SEQ ID NO: 837128 - RNA, 19 nt, Homo sapiens
  misc_RNA (1)...(19): siRNA sense strand
caacuacagugaaacaaga

SEQ ID NO: 837129 - RNA, 19 nt, Homo sapiens
  misc_RNA (1)...(19): siRNA sense strand
cacaggagcugcugagaaa

SEQ ID NO: 837130 - RNA, 19 nt, Homo sapiens
  misc_RNA (1)...(19): siRNA sense strand
ggaaguaaaucaagucaac

SEQ ID NO: 837131 - RNA, 19 nt, Homo sapiens
  misc_RNA (1)...(19): siRNA sense strand
gaaauucugcaagugauua

SEQ ID NO: 837132 - RNA, 19 nt, Homo sapiens
  misc_RNA (1)...(19): siRNA sense strand
uaaccgaagugucaugauu

SEQ ID NO: 837133 - RNA, 19 nt, Homo sapiens
  misc_RNA (1)...(19): siRNA sense strand
ugaauuagaugguguugga

SEQ ID NO: 837134 - RNA, 19 nt, Homo sapiens
  misc_RNA (1)...(19): siRNA sense strand
ugaaauagacuuccuugaa

SEQ ID NO: 837135 - RNA, 19 nt, Homo sapiens
  misc_RNA (1)...(19): siRNA sense strand
ggagauugguggccuugaa

SEQ ID NO: 837136 - RNA, 19 nt, Homo sapiens
  misc_RNA (1)...(19): siRNA sense strand
caacaggaguuucaagaag

SEQ ID NO: 837137 - RNA, 19 nt, Homo sapiens
  misc_RNA (1)...(19): siRNA sense strand
ucacugcucuuucguuuca

SEQ ID NO: 837138 - RNA, 19 nt, Homo sapiens
  misc_RNA (1)...(19): siRNA sense strand
gagaagaggaaguaaauca

SEQ ID NO: 837139 - RNA, 19 nt, Homo sapiens
  misc_RNA (1)...(19): siRNA sense strand
gagagaagaggaaguaaau

SEQ ID NO: 837140 - RNA, 19 nt, Homo sapiens
  misc_RNA (1)...(19): siRNA sense strand
ggacuuaagacaauagaga

SEQ ID NO: 837141 - RNA, 19 nt, Homo sapiens
  misc_RNA (1)...(19): siRNA sense strand
uaacguggaagguauuuaa

SEQ ID NO: 837142 - RNA, 19 nt, Homo sapiens
  misc_RNA (1)...(19): siRNA sense strand
ccugaugucuccuuagaaa

SEQ ID NO: 837143 - RNA, 19 nt, Homo sapiens
  misc_RNA (1)...(19): siRNA sense strand
cgaagugucaugauuauug

SEQ ID NO: 837144 - RNA, 19 nt, Homo sapiens
  misc_RNA (1)...(19): siRNA sense strand
gacaggaugugauguucaa

SEQ ID NO: 837145 - RNA, 19 nt, Homo sapiens
  misc_RNA (1)...(19): siRNA sense strand
caagagcacuuucuaaaau

SEQ ID NO: 837146 - RNA, 19 nt, Homo sapiens
  misc_RNA (1)...(19): siRNA sense strand
gcacaggagcugcugagaa

SEQ ID NO: 837147 - RNA, 19 nt, Homo sapiens
  misc_RNA (1)...(19): siRNA sense strand
caaauagaccugauguguu

SEQ ID NO: 837148 - RNA, 19 nt, Homo sapiens
  misc_RNA (1)...(19): siRNA sense strand
gaccugauguguuagauac

SEQ ID NO: 837149 - RNA, 19 nt, Homo sapiens
  misc_RNA (1)...(19): siRNA sense strand
agacgcaacuacagugaaa

SEQ ID NO: 837150 - RNA, 19 nt, Homo sapiens
  misc_RNA (1)...(19): siRNA sense strand
aaacaagagcacuuucuaa

SEQ ID NO: 837151 - RNA, 19 nt, Homo sapiens
  misc_RNA (1)...(19): siRNA sense strand
ggccugaugucuccuuaga

SEQ ID NO: 837152 - RNA, 19 nt, Homo sapiens
  misc_RNA (1)...(19): siRNA sense strand
guaaaaccgucguuaaguu

SEQ ID NO: 837153 - RNA, 19 nt, Homo sapiens
  misc_RNA (1)...(19): siRNA sense strand
ucagauauuucgacaagca

SEQ ID NO: 837154 - RNA, 19 nt, Homo sapiens
  misc_RNA (1)...(19): siRNA sense strand
gggcaggcuuucuauuuua

SEQ ID NO: 837155 - RNA, 19 nt, Homo sapiens
  misc_RNA (1)...(19): siRNA sense strand
ccuggaagauuagauaaga

SEQ ID NO: 837156 - RNA, 19 nt, Homo sapiens
  misc_RNA (1)...(19): siRNA sense strand
uaaagcugcuacccuuaga

SEQ ID NO: 837157 - RNA, 19 nt, Homo sapiens
  misc_RNA (1)...(19): siRNA sense strand
caacaaauagaccugaugu

SEQ ID NO: 837158 - RNA, 19 nt, Homo sapiens
  misc_RNA (1)...(19): siRNA sense strand
gaagugucaugauuauugc

SEQ ID NO: 837159 - RNA, 19 nt, Homo sapiens
  misc_RNA (1)...(19): siRNA sense strand
gaagaggaaguaaaucaag

SEQ ID NO: 837160 - RNA, 19 nt, Homo sapiens
  misc_RNA (1)...(19): siRNA sense strand
gcaagcacuccagcaauuu

SEQ ID NO: 837161 - RNA, 19 nt, Homo sapiens
  misc_RNA (1)...(19): siRNA sense strand
ugucacugcucuuucguuu

SEQ ID NO: 837162 - RNA, 19 nt, Homo sapiens
  misc_RNA (1)...(19): siRNA sense strand
cgaccuggaagauuagaua

SEQ ID NO: 837163 - RNA, 19 nt, Homo sapiens
  misc_RNA (1)...(19): siRNA sense strand
caagacaggaugugauguu

SEQ ID NO: 837164 - RNA, 19 nt, Homo sapiens
  misc_RNA (1)...(19): siRNA sense strand
gaucacaagggcaggcuuu

SEQ ID NO: 837165 - RNA, 19 nt, Homo sapiens
  misc_RNA (1)...(19): siRNA sense strand
ucucagauauuucgacaag

SEQ ID NO: 837166 - RNA, 19 nt, Homo sapiens
  misc_RNA (1)...(19): siRNA sense strand
gagcugaucuuagaaaccu

SEQ ID NO: 837167 - RNA, 19 nt, Homo sapiens
  misc_RNA (1)...(19): siRNA sense strand
gaaaugacaguuggcuaug

SEQ ID NO: 837168 - RNA, 19 nt, Homo sapiens
  misc_RNA (1)...(19): siRNA sense strand
ugaguggccucugaaauuc

SEQ ID NO: 837169 - RNA, 19 nt, Homo sapiens
  misc_RNA (1)...(19): siRNA sense strand
ggaaauucugcaagugauu

SEQ ID NO: 837170 - RNA, 19 nt, Homo sapiens
  misc_RNA (1)...(19): siRNA sense strand
aaaguguugucucagauau

SEQ ID NO: 837171 - RNA, 19 nt, Homo sapiens
  misc_RNA (1)...(19): siRNA sense strand
aguguugucucagauauuu

SEQ ID NO: 837172 - RNA, 19 nt, Homo sapiens
  misc_RNA (1)...(19): siRNA sense strand
aacaagagcacuuucuaaa

SEQ ID NO: 837173 - RNA, 19 nt, Homo sapiens
  misc_RNA (1)...(19): siRNA sense strand
gagaagaaccaggacaauc

SEQ ID NO: 837174 - RNA, 19 nt, Homo sapiens
  misc_RNA (1)...(19): siRNA sense strand
gacuuggcuuuauaugaaa

SEQ ID NO: 837175 - RNA, 19 nt, Homo sapiens
  misc_RNA (1)...(19): siRNA sense strand
acaaauagaccugaugugu

SEQ ID NO: 837176 - RNA, 19 nt, Homo sapiens
  misc_RNA (1)...(19): siRNA sense strand
caagucaacaggaguuuca

SEQ ID NO: 837177 - RNA, 19 nt, Homo sapiens
  misc_RNA (1)...(19): siRNA sense strand
agcaagcacuccagcaauu

SEQ ID NO: 837178 - RNA, 19 nt, Homo sapiens
  misc_RNA (1)...(19): siRNA sense strand
uuucuguucuccugaauga

SEQ ID NO: 837179 - RNA, 19 nt, Homo sapiens
  misc_RNA (1)...(19): siRNA sense strand
aaugacaguuggcuauguu

SEQ ID NO: 837180 - RNA, 19 nt, Homo sapiens
  misc_RNA (1)...(19): siRNA sense strand
uguguuagauacugcuuug

SEQ ID NO: 837181 - RNA, 19 nt, Homo sapiens
  misc_RNA (1)...(19): siRNA sense strand
acaggaguuucaagaaguu

SEQ ID NO: 837182 - RNA, 19 nt, Homo sapiens
  misc_RNA (1)...(19): siRNA sense strand
uagaugguguuggacuuaa

SEQ ID NO: 837183 - RNA, 19 nt, Homo sapiens
  misc_RNA (1)...(19): siRNA sense strand
gcguagacccgggagauuu

SEQ ID NO: 837184 - RNA, 19 nt, Homo sapiens
  misc_RNA (1)...(19): siRNA sense strand
agaaaugacaguuggcuau

SEQ ID NO: 837185 - RNA, 19 nt, Homo sapiens
  misc_RNA (1)...(19): siRNA sense strand
gcaacuacagugaaacaag

SEQ ID NO: 837186 - RNA, 19 nt, Homo sapiens
  misc_RNA (1)...(19): siRNA sense strand
gcaagaaaauggacuagac

SEQ ID NO: 837187 - RNA, 19 nt, Homo sapiens
  misc_RNA (1)...(19): siRNA sense strand
aagggcaggcuuucuauuu

SEQ ID NO: 837188 - RNA, 19 nt, Homo sapiens
  misc_RNA (1)...(19): siRNA sense strand
gcaacaaauagaccugaug

SEQ ID NO: 837189 - RNA, 19 nt, Homo sapiens
  misc_RNA (1)...(19): siRNA sense strand
cgagauggacgccuugugu

SEQ ID NO: 837190 - RNA, 19 nt, Homo sapiens
  misc_RNA (1)...(19): siRNA sense strand
guguuggacuuaagacaau

SEQ ID NO: 837191 - RNA, 19 nt, Homo sapiens
  misc_RNA (1)...(19): siRNA sense strand
gagcaagcacuccagcaau

SEQ ID NO: 837192 - RNA, 19 nt, Homo sapiens
  misc_RNA (1)...(19): siRNA sense strand
ucgaagcgucauuggauua

SEQ ID NO: 837193 - RNA, 19 nt, Homo sapiens
  misc_RNA (1)...(19): siRNA sense strand
gaagcgucauuggauuaau

SEQ ID NO: 837194 - RNA, 19 nt, Homo sapiens
  misc_RNA (1)...(19): siRNA sense strand
cacaagggcaggcuuucua

SEQ ID NO: 837195 - RNA, 19 nt, Homo sapiens
  misc_RNA (1)...(19): siRNA sense strand
aaccgaagugucaugauua

SEQ ID NO: 837196 - RNA, 19 nt, Homo sapiens
  misc_RNA (1)...(19): siRNA sense strand
gaaugaauuagaugguguu

SEQ ID NO: 837197 - RNA, 19 nt, Homo sapiens
  misc_RNA (1)...(19): siRNA sense strand
aaaggaaauucugcaagug

SEQ ID NO: 837198 - RNA, 19 nt, Homo sapiens
  misc_RNA (1)...(19): siRNA sense strand
uugaguggccucugaaauu

SEQ ID NO: 837199 - RNA, 19 nt, Homo sapiens
  misc_RNA (1)...(19): siRNA sense strand
aggaugugauguucaagaa

SEQ ID NO: 837200 - RNA, 19 nt, Homo sapiens
  misc_RNA (1)...(19): siRNA sense strand
ggacuagacgcaacuacag

SEQ ID NO: 837201 - RNA, 19 nt, Homo sapiens
  misc_RNA (1)...(19): siRNA sense strand
ucaacaggaguuucaagaa

SEQ ID NO: 837202 - RNA, 19 nt, Homo sapiens
  misc_RNA (1)...(19): siRNA sense strand
gaccuggaagauuagauaa

SEQ ID NO: 837203 - RNA, 19 nt, Homo sapiens
  misc_RNA (1)...(19): siRNA sense strand
caagugauuaccucgaaga

SEQ ID NO: 837204 - RNA, 19 nt, Homo sapiens
  misc_RNA (1)...(19): siRNA sense strand
uuucuaacguggaagguau

SEQ ID NO: 837205 - RNA, 19 nt, Homo sapiens
  misc_RNA (1)...(19): siRNA sense strand
gguguuggacuuaagacaa

SEQ ID NO: 837206 - RNA, 19 nt, Homo sapiens
  misc_RNA (1)...(19): siRNA sense strand
aagaggaaguaaaucaagu

SEQ ID NO: 837207 - RNA, 19 nt, Homo sapiens
  misc_RNA (1)...(19): siRNA sense strand
auagagagaagaggaagua

SEQ ID NO: 837208 - RNA, 19 nt, Homo sapiens
  misc_RNA (1)...(19): siRNA sense strand
augcaugcccuccuucaua

SEQ ID NO: 837209 - RNA, 19 nt, Homo sapiens
  misc_RNA (1)...(19): siRNA sense strand
agagagaagaggaaguaaa

SEQ ID NO: 837210 - RNA, 19 nt, Homo sapiens
  misc_RNA (1)...(19): siRNA sense strand
cgaagcgucauuggauuaa

SEQ ID NO: 837211 - RNA, 19 nt, Homo sapiens
  misc_RNA (1)...(19): siRNA sense strand
ugcaagugauuaccucgaa

SEQ ID NO: 837212 - RNA, 19 nt, Homo sapiens
  misc_RNA (1)...(19): siRNA sense strand
ggacucccacacuuaaaca

SEQ ID NO: 837213 - RNA, 19 nt, Homo sapiens
  misc_RNA (1)...(19): siRNA sense strand
ggaagauuagauaagauca

SEQ ID NO: 837214 - RNA, 19 nt, Homo sapiens
  misc_RNA (1)...(19): siRNA sense strand
ugaaucgccuccuccuagu

SEQ ID NO: 837215 - RNA, 19 nt, Homo sapiens
  misc_RNA (1)...(19): siRNA sense strand
gaaguaaaucaagucaaca

SEQ ID NO: 837216 - RNA, 19 nt, Homo sapiens
  misc_RNA (1)...(19): siRNA sense strand
gcccaucuccagucauguu

SEQ ID NO: 837217 - RNA, 19 nt, Homo sapiens
  misc_RNA (1)...(19): siRNA sense strand
aacaggaguuucaagaagu

SEQ ID NO: 837218 - RNA, 19 nt, Homo sapiens
  misc_RNA (1)...(19): siRNA sense strand
aaggaaauucugcaaguga

SEQ ID NO: 837219 - RNA, 19 nt, Homo sapiens
  misc_RNA (1)...(19): siRNA sense strand
caagggcaggcuuucuauu

SEQ ID NO: 837220 - RNA, 19 nt, Homo sapiens
  misc_RNA (1)...(19): siRNA sense strand
caucuccagucauguugau

SEQ ID NO: 837221 - RNA, 19 nt, Homo sapiens
  misc_RNA (1)...(19): siRNA sense strand
uagggaggcugccaugcau

SEQ ID NO: 837222 - RNA, 19 nt, Homo sapiens
  misc_RNA (1)...(19): siRNA sense strand
gaaguuuccugaugucaaa

SEQ ID NO: 837223 - RNA, 19 nt, Homo sapiens
  misc_RNA (1)...(19): siRNA sense strand
gcaacuaaacugaagaaua

SEQ ID NO: 837224 - RNA, 19 nt, Homo sapiens
  misc_RNA (1)...(19): siRNA sense strand
caaccugcauacccaauua

SEQ ID NO: 837225 - RNA, 19 nt, Homo sapiens
  misc_RNA (1)...(19): siRNA sense strand
gaaagcaacuaaacugaag

SEQ ID NO: 837226 - RNA, 19 nt, Homo sapiens
  misc_RNA (1)...(19): siRNA sense strand
gaaggauuauguucaagaa

SEQ ID NO: 837227 - RNA, 19 nt, Homo sapiens
  misc_RNA (1)...(19): siRNA sense strand
gagaugaguuggaauggaa

SEQ ID NO: 837228 - RNA, 19 nt, Homo sapiens
  misc_RNA (1)...(19): siRNA sense strand
gcaugaaccugacaagaga

SEQ ID NO: 837229 - RNA, 19 nt, Homo sapiens
  misc_RNA (1)...(19): siRNA sense strand
gacaagagaugaguuggaa

SEQ ID NO: 837230 - RNA, 19 nt, Homo sapiens
  misc_RNA (1)...(19): siRNA sense strand
uaucaaggcucaguuuauu

SEQ ID NO: 837231 - RNA, 19 nt, Homo sapiens
  misc_RNA (1)...(19): siRNA sense strand
uggaagagcuggaggauca

SEQ ID NO: 837232 - RNA, 19 nt, Homo sapiens
  misc_RNA (1)...(19): siRNA sense strand
caaggaaagucugaaagaa

SEQ ID NO: 837233 - RNA, 19 nt, Homo sapiens
  misc_RNA (1)...(19): siRNA sense strand
ggaaagcaacuaaacugaa

SEQ ID NO: 837234 - RNA, 19 nt, Homo sapiens
  misc_RNA (1)...(19): siRNA sense strand
cuaagaagccgauugaaga

SEQ ID NO: 837235 - RNA, 19 nt, Homo sapiens
  misc_RNA (1)...(19): siRNA sense strand
aggaaagucugaaagaauu

SEQ ID NO: 837236 - RNA, 19 nt, Homo sapiens
  misc_RNA (1)...(19): siRNA sense strand
gauauuuguuuaccuggaa

SEQ ID NO: 837237 - RNA, 19 nt, Homo sapiens
  misc_RNA (1)...(19): siRNA sense strand
gauaucaaggcucaguuua

SEQ ID NO: 837238 - RNA, 19 nt, Homo sapiens
  misc_RNA (1)...(19): siRNA sense strand
ggauuauguucaagaaguu

SEQ ID NO: 837239 - RNA, 19 nt, Homo sapiens
  misc_RNA (1)...(19): siRNA sense strand
gagacuggcugaguggaaa

SEQ ID NO: 837240 - RNA, 19 nt, Homo sapiens
  misc_RNA (1)...(19): siRNA sense strand
ugacagaccuggaggaaaa

SEQ ID NO: 837241 - RNA, 19 nt, Homo sapiens
  misc_RNA (1)...(19): siRNA sense strand
ggaaucugcccacgauauu

SEQ ID NO: 837242 - RNA, 19 nt, Homo sapiens
  misc_RNA (1)...(19): siRNA sense strand
gaauggaaacugucugaau

SEQ ID NO: 837243 - RNA, 19 nt, Homo sapiens
  misc_RNA (1)...(19): siRNA sense strand
gaaucuggagcaauuauga

SEQ ID NO: 837244 - RNA, 19 nt, Homo sapiens
  misc_RNA (1)...(19): siRNA sense strand
ggaaggauuauguucaaga

SEQ ID NO: 837245 - RNA, 19 nt, Homo sapiens
  misc_RNA (1)...(19): siRNA sense strand
ucaguggacuugccaggaa

SEQ ID NO: 837246 - RNA, 19 nt, Homo sapiens
  misc_RNA (1)...(19): siRNA sense strand
uaucaaagccauuucaaca

SEQ ID NO: 837247 - RNA, 19 nt, Homo sapiens
  misc_RNA (1)...(19): siRNA sense strand
caagagaugaguuggaaug

SEQ ID NO: 837248 - RNA, 19 nt, Homo sapiens
  misc_RNA (1)...(19): siRNA sense strand
ccaaggaaagucugaaaga

SEQ ID NO: 837249 - RNA, 19 nt, Homo sapiens
  misc_RNA (1)...(19): siRNA sense strand
ucaaagccauuucaacaac

SEQ ID NO: 837250 - RNA, 19 nt, Homo sapiens
  misc_RNA (1)...(19): siRNA sense strand
aauggaaacugucugaauc

SEQ ID NO: 837251 - RNA, 19 nt, Homo sapiens
  misc_RNA (1)...(19): siRNA sense strand
gucugaaucuggagcaauu

SEQ ID NO: 837252 - RNA, 19 nt, Homo sapiens
  misc_RNA (1)...(19): siRNA sense strand
gaucaugaagacgaguuua

SEQ ID NO: 837253 - RNA, 19 nt, Homo sapiens
  misc_RNA (1)...(19): siRNA sense strand
gaaucugcccacgauauuu

SEQ ID NO: 837254 - RNA, 19 nt, Homo sapiens
  misc_RNA (1)...(19): siRNA sense strand
ugggucaucuugcaccuuu

SEQ ID NO: 837255 - RNA, 19 nt, Homo sapiens
  misc_RNA (1)...(19): siRNA sense strand
gaaugacaucuuacgcaaa

SEQ ID NO: 837256 - RNA, 19 nt, Homo sapiens
  misc_RNA (1)...(19): siRNA sense strand
ggaaagucugaaagaauug

SEQ ID NO: 837257 - RNA, 19 nt, Homo sapiens
  misc_RNA (1)...(19): siRNA sense strand
caucuugcaccuuuacaaa

SEQ ID NO: 837258 - RNA, 19 nt, Homo sapiens
  misc_RNA (1)...(19): siRNA sense strand
ggaagaggaggcagaagag

SEQ ID NO: 837259 - RNA, 19 nt, Homo sapiens
  misc_RNA (1)...(19): siRNA sense strand
ucaagaaguuaccaaagcu

SEQ ID NO: 837260 - RNA, 19 nt, Homo sapiens
  misc_RNA (1)...(19): siRNA sense strand
auaggaaucugcccacgau

SEQ ID NO: 837261 - RNA, 19 nt, Homo sapiens
  misc_RNA (1)...(19): siRNA sense strand
gcuggaggaucaugaagac

SEQ ID NO: 837262 - RNA, 19 nt, Homo sapiens
  misc_RNA (1)...(19): siRNA sense strand
aggauuauguucaagaagu

SEQ ID NO: 837263 - RNA, 19 nt, Homo sapiens
  misc_RNA (1)...(19): siRNA sense strand
agggaaggauuauguucaa

SEQ ID NO: 837264 - RNA, 19 nt, Homo sapiens
  misc_RNA (1)...(19): siRNA sense strand
ugcccacgauauuuguuua

SEQ ID NO: 837265 - RNA, 19 nt, Homo sapiens
  misc_RNA (1)...(19): siRNA sense strand
caugaagacgaguuuaaug

SEQ ID NO: 837266 - RNA, 19 nt, Homo sapiens
  misc_RNA (1)...(19): siRNA sense strand
ggcaugaaccugacaagag

SEQ ID NO: 837267 - RNA, 19 nt, Homo sapiens
  misc_RNA (1)...(19): siRNA sense strand
cuggagcaauuaugacaga

SEQ ID NO: 837268 - RNA, 19 nt, Homo sapiens
  misc_RNA (1)...(19): siRNA sense strand
guggaaagcaacuaaacug

SEQ ID NO: 837269 - RNA, 19 nt, Homo sapiens
  misc_RNA (1)...(19): siRNA sense strand
aaugacaucuuacgcaaaa

SEQ ID NO: 837270 - RNA, 19 nt, Homo sapiens
  misc_RNA (1)...(19): siRNA sense strand
ggagauaucaaggcucagu

SEQ ID NO: 837271 - RNA, 19 nt, Homo sapiens
  misc_RNA (1)...(19): siRNA sense strand
guuuccugaugucaaauuu

SEQ ID NO: 837272 - RNA, 19 nt, Homo sapiens
  misc_RNA (1)...(19): siRNA sense strand
aaggaaagucugaaagaau

SEQ ID NO: 837273 - RNA, 19 nt, Homo sapiens
  misc_RNA (1)...(19): siRNA sense strand
uggaagaggaggcagaaga

SEQ ID NO: 837274 - RNA, 19 nt, Homo sapiens
  misc_RNA (1)...(19): siRNA sense strand
ggaucaugaagacgaguuu

SEQ ID NO: 837275 - RNA, 19 nt, Homo sapiens
  misc_RNA (1)...(19): siRNA sense strand
ucuugcaccuuuacaaaca

SEQ ID NO: 837276 - RNA, 19 nt, Homo sapiens
  misc_RNA (1)...(19): siRNA sense strand
ggagaucucagggaaggau

SEQ ID NO: 837277 - RNA, 19 nt, Homo sapiens
  misc_RNA (1)...(19): siRNA sense strand
gaagagggacagcgauucc

SEQ ID NO: 837278 - RNA, 19 nt, Homo sapiens
  misc_RNA (1)...(19): siRNA sense strand
ccuaagaagccgauugaag

SEQ ID NO: 837279 - RNA, 19 nt, Homo sapiens
  misc_RNA (1)...(19): siRNA sense strand
augaagacgaguuuaauga

SEQ ID NO: 837280 - RNA, 19 nt, Homo sapiens
  misc_RNA (1)...(19): siRNA sense strand
gggcuugugggucaucuug

SEQ ID NO: 837281 - RNA, 19 nt, Homo sapiens
  misc_RNA (1)...(19): siRNA sense strand
ucucagggaaggauuaugu

SEQ ID NO: 837282 - RNA, 19 nt, Homo sapiens
  misc_RNA (1)...(19): siRNA sense strand
ggaauggaaacugucugaa

SEQ ID NO: 837283 - RNA, 19 nt, Homo sapiens
  misc_RNA (1)...(19): siRNA sense strand
agagaugaguuggaaugga

SEQ ID NO: 837284 - RNA, 19 nt, Homo sapiens
  misc_RNA (1)...(19): siRNA sense strand
ugacaagagaugaguugga

SEQ ID NO: 837285 - RNA, 19 nt, Homo sapiens
  misc_RNA (1)...(19): siRNA sense strand
gcuugugggucaucuugca

SEQ ID NO: 837286 - RNA, 19 nt, Homo sapiens
  misc_RNA (1)...(19): siRNA sense strand
uggaaagcaacuaaacuga

SEQ ID NO: 837287 - RNA, 19 nt, Homo sapiens
  misc_RNA (1)...(19): siRNA sense strand
gaagagcuggaggaucaug

SEQ ID NO: 837288 - RNA, 19 nt, Homo sapiens
  misc_RNA (1)...(19): siRNA sense strand
gaaccugacaagagaugag

SEQ ID NO: 837289 - RNA, 19 nt, Homo sapiens
  misc_RNA (1)...(19): siRNA sense strand
ucaaggcucaguuuauugg

SEQ ID NO: 837290 - RNA, 19 nt, Homo sapiens
  misc_RNA (1)...(19): siRNA sense strand
agauaucaaggcucaguuu

SEQ ID NO: 837291 - RNA, 19 nt, Homo sapiens
  misc_RNA (1)...(19): siRNA sense strand
aaucugcccacgauauuug

SEQ ID NO: 837292 - RNA, 19 nt, Homo sapiens
  misc_RNA (1)...(19): siRNA sense strand
gaucucagggaaggauuau

SEQ ID NO: 837293 - RNA, 19 nt, Homo sapiens
  misc_RNA (1)...(19): siRNA sense strand
gagauaucaaggcucaguu

SEQ ID NO: 837294 - RNA, 19 nt, Homo sapiens
  misc_RNA (1)...(19): siRNA sense strand
cagggaaggauuauguuca

SEQ ID NO: 837295 - RNA, 19 nt, Homo sapiens
  misc_RNA (1)...(19): siRNA sense strand
gaaagucugaaagaauugg

SEQ ID NO: 837296 - RNA, 19 nt, Homo sapiens
  misc_RNA (1)...(19): siRNA sense strand
agucaguggugaaaacaua

SEQ ID NO: 837297 - RNA, 19 nt, Homo sapiens
  misc_RNA (1)...(19): siRNA sense strand
uauugguccucugguguuu

SEQ ID NO: 837298 - RNA, 19 nt, Homo sapiens
  misc_RNA (1)...(19): siRNA sense strand
gggaaggauuauguucaag

SEQ ID NO: 837299 - RNA, 19 nt, Homo sapiens
  misc_RNA (1)...(19): siRNA sense strand
ggugaaaacauaugaagau

SEQ ID NO: 837300 - RNA, 19 nt, Homo sapiens
  misc_RNA (1)...(19): siRNA sense strand
uggaauggaaacugucuga

SEQ ID NO: 837301 - RNA, 19 nt, Homo sapiens
  misc_RNA (1)...(19): siRNA sense strand
ucaugaagacgaguuuaau

SEQ ID NO: 837302 - RNA, 19 nt, Homo sapiens
  misc_RNA (1)...(19): siRNA sense strand
gggucaucuugcaccuuua

SEQ ID NO: 837303 - RNA, 19 nt, Homo sapiens
  misc_RNA (1)...(19): siRNA sense strand
ugaagacgaguuuaaugag

SEQ ID NO: 837304 - RNA, 19 nt, Homo sapiens
  misc_RNA (1)...(19): siRNA sense strand
ggagaauucuguaugguuu

SEQ ID NO: 837305 - RNA, 19 nt, Homo sapiens
  misc_RNA (1)...(19): siRNA sense strand
ucaagaaucugaaccuuau

SEQ ID NO: 837306 - RNA, 19 nt, Homo sapiens
  misc_RNA (1)...(19): siRNA sense strand
gcagaagauuggagaauuc

SEQ ID NO: 837307 - RNA, 19 nt, Homo sapiens
  misc_RNA (1)...(19): siRNA sense strand
ccagcaacccuguuaguaa

SEQ ID NO: 837308 - RNA, 19 nt, Homo sapiens
  misc_RNA (1)...(19): siRNA sense strand
gaagauuggagaauucugu

SEQ ID NO: 837309 - RNA, 19 nt, Homo sapiens
  misc_RNA (1)...(19): siRNA sense strand
gaaugggaauggacugagu

SEQ ID NO: 837310 - RNA, 19 nt, Homo sapiens
  misc_RNA (1)...(19): siRNA sense strand
ggaggagcagcaagagaua

SEQ ID NO: 837311 - RNA, 19 nt, Homo sapiens
  misc_RNA (1)...(19): siRNA sense strand
gaaccagaaugggaaugga

SEQ ID NO: 837312 - RNA, 19 nt, Homo sapiens
  misc_RNA (1)...(19): siRNA sense strand
aaacaggcagcaucaauau

SEQ ID NO: 837313 - RNA, 19 nt, Homo sapiens
  misc_RNA (1)...(19): siRNA sense strand
gagaauucuguaugguuua

SEQ ID NO: 837314 - RNA, 19 nt, Homo sapiens
  misc_RNA (1)...(19): siRNA sense strand
cgacggagaccuuugugaa

SEQ ID NO: 837315 - RNA, 19 nt, Homo sapiens
  misc_RNA (1)...(19): siRNA sense strand
caaaggguacgcuucaguu

SEQ ID NO: 837316 - RNA, 19 nt, Homo sapiens
  misc_RNA (1)...(19): siRNA sense strand
gcucaagaaucugaaccuu

SEQ ID NO: 837317 - RNA, 19 nt, Homo sapiens
  misc_RNA (1)...(19): siRNA sense strand
ggacgauguuggcaaucug

SEQ ID NO: 837318 - RNA, 19 nt, Homo sapiens
  misc_RNA (1)...(19): siRNA sense strand
ccaacaaggcggugcagaa

SEQ ID NO: 837319 - RNA, 19 nt, Homo sapiens
  misc_RNA (1)...(19): siRNA sense strand
acaaggcggugcagaacga

SEQ ID NO: 837320 - RNA, 19 nt, Homo sapiens
  misc_RNA (1)...(19): siRNA sense strand
gaacgacagcaacccuuca

SEQ ID NO: 837321 - RNA, 19 nt, Homo sapiens
  misc_RNA (1)...(19): siRNA sense strand
ugcagaagauuggagaauu

SEQ ID NO: 837322 - RNA, 19 nt, Homo sapiens
  misc_RNA (1)...(19): siRNA sense strand
gaaucugaaccuuaucuuc

SEQ ID NO: 837323 - RNA, 19 nt, Homo sapiens
  misc_RNA (1)...(19): siRNA sense strand
auucugagguuccuaacuu

SEQ ID NO: 837324 - RNA, 19 nt, Homo sapiens
  misc_RNA (1)...(19): siRNA sense strand
ucuguaugguuuauucuga

SEQ ID NO: 837325 - RNA, 19 nt, Homo sapiens
  misc_RNA (1)...(19): siRNA sense strand
ccacccagcacccgaauca

SEQ ID NO: 837326 - RNA, 19 nt, Homo sapiens
  misc_RNA (1)...(19): siRNA sense strand
agacaaaggacgggcauga

SEQ ID NO: 837327 - RNA, 19 nt, Homo sapiens
  misc_RNA (1)...(19): siRNA sense strand
gacagcaacccuucagcuu

SEQ ID NO: 837328 - RNA, 19 nt, Homo sapiens
  misc_RNA (1)...(19): siRNA sense strand
gauuggagaauucuguaug

SEQ ID NO: 837329 - RNA, 19 nt, Homo sapiens
  misc_RNA (1)...(19): siRNA sense strand
cucaagaaucugaaccuua

SEQ ID NO: 837330 - RNA, 19 nt, Homo sapiens
  misc_RNA (1)...(19): siRNA sense strand
aaaggguacgcuucaguuu

SEQ ID NO: 837331 - RNA, 19 nt, Homo sapiens
  misc_RNA (1)...(19): siRNA sense strand
gggacgauguuggcaaucu

SEQ ID NO: 837332 - RNA, 19 nt, Homo sapiens
  misc_RNA (1)...(19): siRNA sense strand
uaacuucagugagccaaac

SEQ ID NO: 837333 - RNA, 19 nt, Homo sapiens
  misc_RNA (1)...(19): siRNA sense strand
uaugguuuauucugagguu

SEQ ID NO: 837334 - RNA, 19 nt, Homo sapiens
  misc_RNA (1)...(19): siRNA sense strand
gaaccuuaucuucauugug

SEQ ID NO: 837335 - RNA, 19 nt, Homo sapiens
  misc_RNA (1)...(19): siRNA sense strand
caacaaggcggugcagaac

SEQ ID NO: 837336 - RNA, 19 nt, Homo sapiens
  misc_RNA (1)...(19): siRNA sense strand
aaaacaggcagcaucaaua

SEQ ID NO: 837337 - RNA, 19 nt, Homo sapiens
  misc_RNA (1)...(19): siRNA sense strand
caaaguggcggacaaaaca

SEQ ID NO: 837338 - RNA, 19 nt, Homo sapiens
  misc_RNA (1)...(19): siRNA sense strand
gccgagugaccaagacaaa

SEQ ID NO: 837339 - RNA, 19 nt, Homo sapiens
  misc_RNA (1)...(19): siRNA sense strand
caccaaaggguacgcuuca

SEQ ID NO: 837340 - RNA, 19 nt, Homo sapiens
  misc_RNA (1)...(19): siRNA sense strand
acaggcagcaucaauaucu

SEQ ID NO: 837341 - RNA, 19 nt, Homo sapiens
  misc_RNA (1)...(19): siRNA sense strand
cggaggagcagcaagagau

SEQ ID NO: 837342 - RNA, 19 nt, Homo sapiens
  misc_RNA (1)...(19): siRNA sense strand
gacgauguuggcaaucuga

SEQ ID NO: 837343 - RNA, 19 nt, Homo sapiens
  misc_RNA (1)...(19): siRNA sense strand
ugagguuccuaacuucagu

SEQ ID NO: 837344 - RNA, 19 nt, Homo sapiens
  misc_RNA (1)...(19): siRNA sense strand
ccaaaggguacgcuucagu

SEQ ID NO: 837345 - RNA, 19 nt, Homo sapiens
  misc_RNA (1)...(19): siRNA sense strand
aaaggacgggcaugagguu

SEQ ID NO: 837346 - RNA, 19 nt, Homo sapiens
  misc_RNA (1)...(19): siRNA sense strand
gacggagaccuuugugaag

SEQ ID NO: 837347 - RNA, 19 nt, Homo sapiens
  misc_RNA (1)...(19): siRNA sense strand
caaaacaggcagcaucaau

SEQ ID NO: 837348 - RNA, 19 nt, Homo sapiens
  misc_RNA (1)...(19): siRNA sense strand
gagccaaacccagaguaca

SEQ ID NO: 837349 - RNA, 19 nt, Homo sapiens
  misc_RNA (1)...(19): siRNA sense strand
gaacacagaugaugucaac

SEQ ID NO: 837350 - RNA, 19 nt, Homo sapiens
  misc_RNA (1)...(19): siRNA sense strand
ccagaggccuucagccaua

SEQ ID NO: 837351 - RNA, 19 nt, Homo sapiens
  misc_RNA (1)...(19): siRNA sense strand
gaacaugcuggaccgcuuu

SEQ ID NO: 837352 - RNA, 19 nt, Homo sapiens
  misc_RNA (1)...(19): siRNA sense strand
ggagaugacgggcgaauag

SEQ ID NO: 837353 - RNA, 19 nt, Homo sapiens
  misc_RNA (1)...(19): siRNA sense strand
gcuuugagaagaccaauga

SEQ ID NO: 837354 - RNA, 19 nt, Homo sapiens
  misc_RNA (1)...(19): siRNA sense strand
cgaggacccuaguagagau

SEQ ID NO: 837355 - RNA, 19 nt, Homo sapiens
  misc_RNA (1)...(19): siRNA sense strand
ggaccuggacagcaucuuc

SEQ ID NO: 837356 - RNA, 19 nt, Homo sapiens
  misc_RNA (1)...(19): siRNA sense strand
ggaggaagaggaugaagac

SEQ ID NO: 837357 - RNA, 19 nt, Homo sapiens
  misc_RNA (1)...(19): siRNA sense strand
ugagaagaccaaugagaug

SEQ ID NO: 837358 - RNA, 19 nt, Homo sapiens
  misc_RNA (1)...(19): siRNA sense strand
gagaugcugcucaacuuca

SEQ ID NO: 837359 - RNA, 19 nt, Homo sapiens
  misc_RNA (1)...(19): siRNA sense strand
gcauggugaacacagauga

SEQ ID NO: 837360 - RNA, 19 nt, Homo sapiens
  misc_RNA (1)...(19): siRNA sense strand
ggacccuaguagagaugaa

SEQ ID NO: 837361 - RNA, 19 nt, Homo sapiens
  misc_RNA (1)...(19): siRNA sense strand
ugagcauggugaacacaga

SEQ ID NO: 837362 - RNA, 19 nt, Homo sapiens
  misc_RNA (1)...(19): siRNA sense strand
ccacacgaggacccuagua

SEQ ID NO: 837363 - RNA, 19 nt, Homo sapiens
  misc_RNA (1)...(19): siRNA sense strand
gcaccacgaccaccauugc

SEQ ID NO: 837364 - RNA, 19 nt, Homo sapiens
  misc_RNA (1)...(19): siRNA sense strand
acacgaggacccuaguaga

SEQ ID NO: 837365 - RNA, 19 nt, Homo sapiens
  misc_RNA (1)...(19): siRNA sense strand
cagaggccuucagccauau

SEQ ID NO: 837366 - RNA, 19 nt, Homo sapiens
  misc_RNA (1)...(19): siRNA sense strand
agacagaugacgaggagau

SEQ ID NO: 837367 - RNA, 19 nt, Homo sapiens
  misc_RNA (1)...(19): siRNA sense strand
gagcauggugaacacagau

SEQ ID NO: 837368 - RNA, 19 nt, Homo sapiens
  misc_RNA (1)...(19): siRNA sense strand
ggugaacacagaugauguc

SEQ ID NO: 837369 - RNA, 19 nt, Homo sapiens
  misc_RNA (1)...(19): siRNA sense strand
cuggaccgcuuugagaaga

SEQ ID NO: 837370 - RNA, 19 nt, Homo sapiens
  misc_RNA (1)...(19): siRNA sense strand
caccauugccaccucagaa

SEQ ID NO: 837371 - RNA, 19 nt, Homo sapiens
  misc_RNA (1)...(19): siRNA sense strand
gggagccacugaucgauua

SEQ ID NO: 837372 - RNA, 19 nt, Homo sapiens
  misc_RNA (1)...(19): siRNA sense strand
ggaagaagaaggccaagaa

SEQ ID NO: 837373 - RNA, 19 nt, Homo sapiens
  misc_RNA (1)...(19): siRNA sense strand
ccaacgagauccugcacau

SEQ ID NO: 837374 - RNA, 19 nt, Homo sapiens
  misc_RNA (1)...(19): siRNA sense strand
ucagcugucugguacuuga

SEQ ID NO: 837375 - RNA, 19 nt, Homo sapiens
  misc_RNA (1)...(19): siRNA sense strand
gaagaagaaggccaagaag

SEQ ID NO: 837376 - RNA, 19 nt, Homo sapiens
  misc_RNA (1)...(19): siRNA sense strand
gcaacugggugggucaaag

SEQ ID NO: 837377 - RNA, 19 nt, Homo sapiens
  misc_RNA (1)...(19): siRNA sense strand
gcccucauguccaacuuug

SEQ ID NO: 837378 - RNA, 19 nt, Homo sapiens
  misc_RNA (1)...(19): siRNA sense strand
cgaccucaguuacuucauc

SEQ ID NO: 837379 - RNA, 19 nt, Homo sapiens
  misc_RNA (1)...(19): siRNA sense strand
gcugucugguacuugauuu

SEQ ID NO: 837380 - RNA, 19 nt, Homo sapiens
  misc_RNA (1)...(19): siRNA sense strand
ccacugaucgauuacuuca

SEQ ID NO: 837381 - RNA, 19 nt, Homo sapiens
  misc_RNA (1)...(19): siRNA sense strand
gaacuggcgcucagcuucu

SEQ ID NO: 837382 - RNA, 19 nt, Homo sapiens
  misc_RNA (1)...(19): siRNA sense strand
caaagccagccucaucuuc

SEQ ID NO: 837383 - RNA, 19 nt, Homo sapiens
  misc_RNA (1)...(19): siRNA sense strand
uccucuaccucaaguauga

SEQ ID NO: 837384 - RNA, 19 nt, Homo sapiens
  misc_RNA (1)...(19): siRNA sense strand
gccaggagcucagcauucg

SEQ ID NO: 837385 - RNA, 19 nt, Homo sapiens
  misc_RNA (1)...(19): siRNA sense strand
ggaccucuucuacaagugu

SEQ ID NO: 837386 - RNA, 19 nt, Homo sapiens
  misc_RNA (1)...(19): siRNA sense strand
ccucagcugucugguacuu

SEQ ID NO: 837387 - RNA, 19 nt, Homo sapiens
  misc_RNA (1)...(19): siRNA sense strand
guccaaagccagccucauc

SEQ ID NO: 837388 - RNA, 19 nt, Homo sapiens
  misc_RNA (1)...(19): siRNA sense strand
cccuggaccucuucuacaa

SEQ ID NO: 837389 - RNA, 19 nt, Homo sapiens
  misc_RNA (1)...(19): siRNA sense strand
gcuacauccuggcugaucu

SEQ ID NO: 837390 - RNA, 19 nt, Homo sapiens
  misc_RNA (1)...(19): siRNA sense strand
aggccaagaaggcggauua

SEQ ID NO: 837391 - RNA, 19 nt, Homo sapiens
  misc_RNA (1)...(19): siRNA sense strand
agcgagggcuccaggaaga

SEQ ID NO: 837392 - RNA, 19 nt, Homo sapiens
  misc_RNA (1)...(19): siRNA sense strand
caucuucaccuuguucaug

SEQ ID NO: 837393 - RNA, 19 nt, Homo sapiens
  misc_RNA (1)...(19): siRNA sense strand
ccaaagccagccucaucuu

SEQ ID NO: 837394 - RNA, 19 nt, Homo sapiens
  misc_RNA (1)...(19): siRNA sense strand
aaagccagccucaucuuca

SEQ ID NO: 837395 - RNA, 19 nt, Homo sapiens
  misc_RNA (1)...(19): siRNA sense strand
ccaaguccaaggaggaguu

SEQ ID NO: 837396 - RNA, 19 nt, Homo sapiens
  misc_RNA (1)...(19): siRNA sense strand
ucgauuacuucagcaacaa

SEQ ID NO: 837397 - RNA, 19 nt, Homo sapiens
  misc_RNA (1)...(19): siRNA sense strand
ugacagccacccacucaca

SEQ ID NO: 837398 - RNA, 19 nt, Homo sapiens
  misc_RNA (1)...(19): siRNA sense strand
gguguccuguaagguguuu

SEQ ID NO: 837399 - RNA, 19 nt, Homo sapiens
  misc_RNA (1)...(19): siRNA sense strand
ucacgcccaucaccacuac

SEQ ID NO: 837400 - RNA, 19 nt, Homo sapiens
  misc_RNA (1)...(19): siRNA sense strand
ggccaggagcucagcauuc

SEQ ID NO: 837401 - RNA, 19 nt, Homo sapiens
  misc_RNA (1)...(19): siRNA sense strand
cauccucuaccucaaguau

SEQ ID NO: 837402 - RNA, 19 nt, Homo sapiens
  misc_RNA (1)...(19): siRNA sense strand
aacgagauccugcacaugu

SEQ ID NO: 837403 - RNA, 19 nt, Homo sapiens
  misc_RNA (1)...(19): siRNA sense strand
caacugggugggucaaagg

SEQ ID NO: 837404 - RNA, 19 nt, Homo sapiens
  misc_RNA (1)...(19): siRNA sense strand
agccucaucuucaucuuca

SEQ ID NO: 837405 - RNA, 19 nt, Homo sapiens
  misc_RNA (1)...(19): siRNA sense strand
ggaagccagagaccaacga

SEQ ID NO: 837406 - RNA, 19 nt, Homo sapiens
  misc_RNA (1)...(19): siRNA sense strand
gagcugcgcuacaguaucu

SEQ ID NO: 837407 - RNA, 19 nt, Homo sapiens
  misc_RNA (1)...(19): siRNA sense strand
gcacuuauuggcuguguuu

SEQ ID NO: 837408 - RNA, 19 nt, Homo sapiens
  misc_RNA (1)...(19): siRNA sense strand
gcccagaucugcucuccuu

SEQ ID NO: 837409 - RNA, 19 nt, Homo sapiens
  misc_RNA (1)...(19): siRNA sense strand
ggaaccagcgucagaaaga

SEQ ID NO: 837410 - RNA, 19 nt, Homo sapiens
  misc_RNA (1)...(19): siRNA sense strand
caagagccuuucuggaugu

SEQ ID NO: 837411 - RNA, 19 nt, Homo sapiens
  misc_RNA (1)...(19): siRNA sense strand
gaacauccuccuaccuuuc

SEQ ID NO: 837412 - RNA, 19 nt, Homo sapiens
  misc_RNA (1)...(19): siRNA sense strand
gaggugacuuccuggucua

SEQ ID NO: 837413 - RNA, 19 nt, Homo sapiens
  misc_RNA (1)...(19): siRNA sense strand
cuaagaagcagaaacuaga

SEQ ID NO: 837414 - RNA, 19 nt, Homo sapiens
  misc_RNA (1)...(19): siRNA sense strand
gcuacaguaucuacagaga

SEQ ID NO: 837415 - RNA, 19 nt, Homo sapiens
  misc_RNA (1)...(19): siRNA sense strand
acugugagcuucccgagaa

SEQ ID NO: 837416 - RNA, 19 nt, Homo sapiens
  misc_RNA (1)...(19): siRNA sense strand
gggccaggcugcuaagaag

SEQ ID NO: 837417 - RNA, 19 nt, Homo sapiens
  misc_RNA (1)...(19): siRNA sense strand
gcucuucucugggagucua

SEQ ID NO: 837418 - RNA, 19 nt, Homo sapiens
  misc_RNA (1)...(19): siRNA sense strand
gcgcuacaguaucuacaga

SEQ ID NO: 837419 - RNA, 19 nt, Homo sapiens
  misc_RNA (1)...(19): siRNA sense strand
gcuaagaagcagaaacuag

SEQ ID NO: 837420 - RNA, 19 nt, Homo sapiens
  misc_RNA (1)...(19): siRNA sense strand
agaacauccuccuaccuuu

SEQ ID NO: 837421 - RNA, 19 nt, Homo sapiens
  misc_RNA (1)...(19): siRNA sense strand
gaaacuagaacaggcuuca

SEQ ID NO: 837422 - RNA, 19 nt, Homo sapiens
  misc_RNA (1)...(19): siRNA sense strand
caagcaggacccucaaaug

SEQ ID NO: 837423 - RNA, 19 nt, Homo sapiens
  misc_RNA (1)...(19): siRNA sense strand
uaagaagcagaaacuagaa

SEQ ID NO: 837424 - RNA, 19 nt, Homo sapiens
  misc_RNA (1)...(19): siRNA sense strand
gaaccagcgucagaaagac

SEQ ID NO: 837425 - RNA, 19 nt, Homo sapiens
  misc_RNA (1)...(19): siRNA sense strand
cuaccuuucuccgcgguua

SEQ ID NO: 837426 - RNA, 19 nt, Homo sapiens
  misc_RNA (1)...(19): siRNA sense strand
uagaacauccuccuaccuu

SEQ ID NO: 837427 - RNA, 19 nt, Homo sapiens
  misc_RNA (1)...(19): siRNA sense strand
guaguuaccuauuuucaca

SEQ ID NO: 837428 - RNA, 19 nt, Homo sapiens
  misc_RNA (1)...(19): siRNA sense strand
ggucuacaccucccugcaa

SEQ ID NO: 837429 - RNA, 19 nt, Homo sapiens
  misc_RNA (1)...(19): siRNA sense strand
uuucgaacacuacaucuuu

SEQ ID NO: 837430 - RNA, 19 nt, Homo sapiens
  misc_RNA (1)...(19): siRNA sense strand
gagguccuggagaagauua

SEQ ID NO: 837431 - RNA, 19 nt, Homo sapiens
  misc_RNA (1)...(19): siRNA sense strand
ccaagcaggacccucaaau

SEQ ID NO: 837432 - RNA, 19 nt, Homo sapiens
  misc_RNA (1)...(19): siRNA sense strand
gaggaugagaccagugaug

SEQ ID NO: 837433 - RNA, 19 nt, Homo sapiens
  misc_RNA (1)...(19): siRNA sense strand
cagugcggcuggcaaguuc

SEQ ID NO: 837434 - RNA, 19 nt, Homo sapiens
  misc_RNA (1)...(19): siRNA sense strand
guucuuccuuguuucaaag

SEQ ID NO: 837435 - RNA, 19 nt, Homo sapiens
  misc_RNA (1)...(19): siRNA sense strand
aagcaggacccucaaaugg

SEQ ID NO: 837436 - RNA, 19 nt, Homo sapiens
  misc_RNA (1)...(19): siRNA sense strand
cagaucugcucuccuuguc

SEQ ID NO: 837437 - RNA, 19 nt, Homo sapiens
  misc_RNA (1)...(19): siRNA sense strand
agacccugcuccucuguuc

SEQ ID NO: 837438 - RNA, 19 nt, Homo sapiens
  misc_RNA (1)...(19): siRNA sense strand
ccagaucugcucuccuugu

SEQ ID NO: 837439 - RNA, 19 nt, Homo sapiens
  misc_RNA (1)...(19): siRNA sense strand
agcaagagccuuucuggau

SEQ ID NO: 837440 - RNA, 19 nt, Homo sapiens
  misc_RNA (1)...(19): siRNA sense strand
aagaggaugagaccaguga

SEQ ID NO: 837441 - RNA, 19 nt, Homo sapiens
  misc_RNA (1)...(19): siRNA sense strand
cacgagcugcgcuacagua

SEQ ID NO: 837442 - RNA, 19 nt, Homo sapiens
  misc_RNA (1)...(19): siRNA sense strand
gagaauggggccuggguuu

SEQ ID NO: 837443 - RNA, 19 nt, Homo sapiens
  misc_RNA (1)...(19): siRNA sense strand
cuccgcagccugaugguaa

SEQ ID NO: 837444 - RNA, 19 nt, Homo sapiens
  misc_RNA (1)...(19): siRNA sense strand
gccuggcccugacauccuu

SEQ ID NO: 837445 - RNA, 19 nt, Homo sapiens
  misc_RNA (1)...(19): siRNA sense strand
gucuacaccucccugcaau

SEQ ID NO: 837446 - RNA, 19 nt, Homo sapiens
  misc_RNA (1)...(19): siRNA sense strand
gguacaggauguucuauaa

SEQ ID NO: 837447 - RNA, 19 nt, Homo sapiens
  misc_RNA (1)...(19): siRNA sense strand
uggccacgcucaccaagua

SEQ ID NO: 837448 - RNA, 19 nt, Homo sapiens
  misc_RNA (1)...(19): siRNA sense strand
gguccucgcuucacacaca

SEQ ID NO: 837449 - RNA, 19 nt, Homo sapiens
  misc_RNA (1)...(19): siRNA sense strand
gauaagccgccucuucaau

SEQ ID NO: 837450 - RNA, 19 nt, Homo sapiens
  misc_RNA (1)...(19): siRNA sense strand
cagcccagcucaccaaguc

SEQ ID NO: 837451 - RNA, 19 nt, Homo sapiens
  misc_RNA (1)...(19): siRNA sense strand
acaguuugaagcaacauua

SEQ ID NO: 837452 - RNA, 19 nt, Homo sapiens
  misc_RNA (1)...(19): siRNA sense strand
ccggagacgucaugugcaa

SEQ ID NO: 837453 - RNA, 19 nt, Homo sapiens
  misc_RNA (1)...(19): siRNA sense strand
ggauaagccgccucuucaa

SEQ ID NO: 837454 - RNA, 19 nt, Homo sapiens
  misc_RNA (1)...(19): siRNA sense strand
ucaacucgguacaggaugu

SEQ ID NO: 837455 - RNA, 19 nt, Homo sapiens
  misc_RNA (1)...(19): siRNA sense strand
cggaugacuuuaaggacuu

SEQ ID NO: 837456 - RNA, 19 nt, Homo sapiens
  misc_RNA (1)...(19): siRNA sense strand
uaagccgccucuucaaugg

SEQ ID NO: 837457 - RNA, 19 nt, Homo sapiens
  misc_RNA (1)...(19): siRNA sense strand
gcaacauuauuucauugac

SEQ ID NO: 837458 - RNA, 19 nt, Homo sapiens
  misc_RNA (1)...(19): siRNA sense strand
gcucaacucgguacaggau

SEQ ID NO: 837459 - RNA, 19 nt, Homo sapiens
  misc_RNA (1)...(19): siRNA sense strand
caggauaagccgccucuuc

SEQ ID NO: 837460 - RNA, 19 nt, Homo sapiens
  misc_RNA (1)...(19): siRNA sense strand
gcgagaaggcccucaucga

SEQ ID NO: 837461 - RNA, 19 nt, Homo sapiens
  misc_RNA (1)...(19): siRNA sense strand
gcggagggaggaaacaugu

SEQ ID NO: 837462 - RNA, 19 nt, Homo sapiens
  misc_RNA (1)...(19): siRNA sense strand
aggauaagccgccucuuca

SEQ ID NO: 837463 - RNA, 19 nt, Homo sapiens
  misc_RNA (1)...(19): siRNA sense strand
auaagccgccucuucaaug

SEQ ID NO: 837464 - RNA, 19 nt, Homo sapiens
  misc_RNA (1)...(19): siRNA sense strand
ggaugacuuuaaggacuuc

SEQ ID NO: 837465 - RNA, 19 nt, Homo sapiens
  misc_RNA (1)...(19): siRNA sense strand
ggagacgucaugugcaacu

SEQ ID NO: 837466 - RNA, 19 nt, Homo sapiens
  misc_RNA (1)...(19): siRNA sense strand
cgguacaggauguucuaua

SEQ ID NO: 837467 - RNA, 19 nt, Homo sapiens
  misc_RNA (1)...(19): siRNA sense strand
aaacaugucccggcugucu

SEQ ID NO: 837468 - RNA, 19 nt, Homo sapiens
  misc_RNA (1)...(19): siRNA sense strand
gggaguaccuggacuacga

SEQ ID NO: 837469 - RNA, 19 nt, Homo sapiens
  misc_RNA (1)...(19): siRNA sense strand
cccgagagcucuucaaguu

SEQ ID NO: 837470 - RNA, 19 nt, Homo sapiens
  misc_RNA (1)...(19): siRNA sense strand
ggaguacccugacuucuac

SEQ ID NO: 837471 - RNA, 19 nt, Homo sapiens
  misc_RNA (1)...(19): siRNA sense strand
ggaaggcaacuaccuguuc

SEQ ID NO: 837472 - RNA, 19 nt, Homo sapiens
  misc_RNA (1)...(19): siRNA sense strand
gguccugccuuucaucugu

SEQ ID NO: 837473 - RNA, 19 nt, Homo sapiens
  misc_RNA (1)...(19): siRNA sense strand
gagcgggaccugaagaaga

SEQ ID NO: 837474 - RNA, 19 nt, Homo sapiens
  misc_RNA (1)...(19): siRNA sense strand
agaaggugcugcugauugu

SEQ ID NO: 837475 - RNA, 19 nt, Homo sapiens
  misc_RNA (1)...(19): siRNA sense strand
acaagaaggugcugcugau

SEQ ID NO: 837476 - RNA, 19 nt, Homo sapiens
  misc_RNA (1)...(19): siRNA sense strand
ggaaguacaagguguggau

SEQ ID NO: 837477 - RNA, 19 nt, Homo sapiens
  misc_RNA (1)...(19): siRNA sense strand
gaagcucuacggccucuug

SEQ ID NO: 837478 - RNA, 19 nt, Homo sapiens
  misc_RNA (1)...(19): siRNA sense strand
gcgcacuccugaaguuugu

SEQ ID NO: 837479 - RNA, 19 nt, Homo sapiens
  misc_RNA (1)...(19): siRNA sense strand
acaaacacaaccuggagua

SEQ ID NO: 837480 - RNA, 19 nt, Homo sapiens
  misc_RNA (1)...(19): siRNA sense strand
uggaguacccugacuucua

SEQ ID NO: 837481 - RNA, 19 nt, Homo sapiens
  misc_RNA (1)...(19): siRNA sense strand
gcucacggccuacgagauc

SEQ ID NO: 837482 - RNA, 19 nt, Homo sapiens
  misc_RNA (1)...(19): siRNA sense strand
gagccacacggaaguacaa

SEQ ID NO: 837483 - RNA, 19 nt, Homo sapiens
  misc_RNA (1)...(19): siRNA sense strand
agcgggaccugaagaagaa

SEQ ID NO: 837484 - RNA, 19 nt, Homo sapiens
  misc_RNA (1)...(19): siRNA sense strand
gucuccagcuucuauguga

SEQ ID NO: 837485 - RNA, 19 nt, Homo sapiens
  misc_RNA (1)...(19): siRNA sense strand
caagaaggugcugcugauu

SEQ ID NO: 837486 - RNA, 19 nt, Homo sapiens
  misc_RNA (1)...(19): siRNA sense strand
caaagccgccagcgucauc

SEQ ID NO: 837487 - RNA, 19 nt, Homo sapiens
  misc_RNA (1)...(19): siRNA sense strand
aagaaggugcugcugauug

SEQ ID NO: 837488 - RNA, 19 nt, Homo sapiens
  misc_RNA (1)...(19): siRNA sense strand
guacaagguguggaugaga

SEQ ID NO: 837489 - RNA, 19 nt, Homo sapiens
  misc_RNA (1)...(19): siRNA sense strand
uggccgugcugcagucuga

SEQ ID NO: 837490 - RNA, 19 nt, Homo sapiens
  misc_RNA (1)...(19): siRNA sense strand
guccugccuuucaucugua

SEQ ID NO: 837491 - RNA, 19 nt, Homo sapiens
  misc_RNA (1)...(19): siRNA sense strand
ucaucuugauucacaaaca

SEQ ID NO: 837492 - RNA, 19 nt, Homo sapiens
  misc_RNA (1)...(19): siRNA sense strand
ggaugagacaccgcuauca

SEQ ID NO: 837493 - RNA, 19 nt, Homo sapiens
  misc_RNA (1)...(19): siRNA sense strand
gggcuguucaucuugauuc

SEQ ID NO: 837494 - RNA, 19 nt, Homo sapiens
  misc_RNA (1)...(19): siRNA sense strand
ccacgcucaugaucgacuu

SEQ ID NO: 837495 - RNA, 19 nt, Homo sapiens
  misc_RNA (1)...(19): siRNA sense strand
caagugggaaggcaacuac

SEQ ID NO: 837496 - RNA, 19 nt, Homo sapiens
  misc_RNA (1)...(19): siRNA sense strand
gggaaggcaacuaccuguu

SEQ ID NO: 837497 - RNA, 19 nt, Homo sapiens
  misc_RNA (1)...(19): siRNA sense strand
ccaacgccguguucgacau

SEQ ID NO: 837498 - RNA, 19 nt, Homo sapiens
  misc_RNA (1)...(19): siRNA sense strand
ccacacggaaguacaaggu

SEQ ID NO: 837499 - RNA, 19 nt, Homo sapiens
  misc_RNA (1)...(19): siRNA sense strand
ccaagugggaaggcaacua

SEQ ID NO: 837500 - RNA, 19 nt, Homo sapiens
  misc_RNA (1)...(19): siRNA sense strand
cggugccacuggaguuuau

SEQ ID NO: 837501 - RNA, 19 nt, Homo sapiens
  misc_RNA (1)...(19): siRNA sense strand
guucaucuugauucacaaa

SEQ ID NO: 837502 - RNA, 19 nt, Homo sapiens
  misc_RNA (1)...(19): siRNA sense strand
aaggagcacaggaggguuu

SEQ ID NO: 837503 - RNA, 19 nt, Homo sapiens
  misc_RNA (1)...(19): siRNA sense strand
gaaaauggcucccuuauca

SEQ ID NO: 837504 - RNA, 19 nt, Homo sapiens
  misc_RNA (1)...(19): siRNA sense strand
ugacagaacuggacaucua

SEQ ID NO: 837505 - RNA, 19 nt, Homo sapiens
  misc_RNA (1)...(19): siRNA sense strand
guacaugaauugcuucuug

SEQ ID NO: 837506 - RNA, 19 nt, Homo sapiens
  misc_RNA (1)...(19): siRNA sense strand
aagaauggcuucacaugua

SEQ ID NO: 837507 - RNA, 19 nt, Homo sapiens
  misc_RNA (1)...(19): siRNA sense strand
gaauaugcauccacagaga

SEQ ID NO: 837508 - RNA, 19 nt, Homo sapiens
  misc_RNA (1)...(19): siRNA sense strand
ggaccuggcucucuguuuc

SEQ ID NO: 837509 - RNA, 19 nt, Homo sapiens
  misc_RNA (1)...(19): siRNA sense strand
ggucauugcuggugucuuc

SEQ ID NO: 837510 - RNA, 19 nt, Homo sapiens
  misc_RNA (1)...(19): siRNA sense strand
ccaaguacaugaauugcuu

SEQ ID NO: 837511 - RNA, 19 nt, Homo sapiens
  misc_RNA (1)...(19): siRNA sense strand
ggacuaugacauccuauuu

SEQ ID NO: 837512 - RNA, 19 nt, Homo sapiens
  misc_RNA (1)...(19): siRNA sense strand
uuauugcccucaccauuua

SEQ ID NO: 837513 - RNA, 19 nt, Homo sapiens
  misc_RNA (1)...(19): siRNA sense strand
ugacacugcuggccaagaa

SEQ ID NO: 837514 - RNA, 19 nt, Homo sapiens
  misc_RNA (1)...(19): siRNA sense strand
guacaaggcaguguucauu

SEQ ID NO: 837515 - RNA, 19 nt, Homo sapiens
  misc_RNA (1)...(19): siRNA sense strand
cuagaggccuccuauagug

SEQ ID NO: 837516 - RNA, 19 nt, Homo sapiens
  misc_RNA (1)...(19): siRNA sense strand
ugucugcccuuccguauug

SEQ ID NO: 837517 - RNA, 19 nt, Homo sapiens
  misc_RNA (1)...(19): siRNA sense strand
agacagaggccucagugua

SEQ ID NO: 837518 - RNA, 19 nt, Homo sapiens
  misc_RNA (1)...(19): siRNA sense strand
ggauuggcaucgcuaacuu

SEQ ID NO: 837519 - RNA, 19 nt, Homo sapiens
  misc_RNA (1)...(19): siRNA sense strand
gaaccugagcggcauguau

SEQ ID NO: 837520 - RNA, 19 nt, Homo sapiens
  misc_RNA (1)...(19): siRNA sense strand
ccacaaacgugagcugaca

SEQ ID NO: 837521 - RNA, 19 nt, Homo sapiens
  misc_RNA (1)...(19): siRNA sense strand
ggagaucuuugagcucaug

SEQ ID NO: 837522 - RNA, 19 nt, Homo sapiens
  misc_RNA (1)...(19): siRNA sense strand
gagccugcaugcccucuau

SEQ ID NO: 837523 - RNA, 19 nt, Homo sapiens
  misc_RNA (1)...(19): siRNA sense strand
gcacgcugcuggucacucu

SEQ ID NO: 837524 - RNA, 19 nt, Homo sapiens
  misc_RNA (1)...(19): siRNA sense strand
gcucucuguuucucaauga

SEQ ID NO: 837525 - RNA, 19 nt, Homo sapiens
  misc_RNA (1)...(19): siRNA sense strand
gcucaugcaguuccucuuu

SEQ ID NO: 837526 - RNA, 19 nt, Homo sapiens
  misc_RNA (1)...(19): siRNA sense strand
gccuggugcugucagaaua

SEQ ID NO: 837527 - RNA, 19 nt, Homo sapiens
  misc_RNA (1)...(19): siRNA sense strand
cauccuggcugugcuuauu

SEQ ID NO: 837528 - RNA, 19 nt, Homo sapiens
  misc_RNA (1)...(19): siRNA sense strand
cuucuucucucgaguuuau

SEQ ID NO: 837529 - RNA, 19 nt, Homo sapiens
  misc_RNA (1)...(19): siRNA sense strand
ucuuugagcucaugcaguu

SEQ ID NO: 837530 - RNA, 19 nt, Homo sapiens
  misc_RNA (1)...(19): siRNA sense strand
gcgcuacgguggcaucaca

SEQ ID NO: 837531 - RNA, 19 nt, Homo sapiens
  misc_RNA (1)...(19): siRNA sense strand
agaauggcuucacauguau

SEQ ID NO: 837532 - RNA, 19 nt, Homo sapiens
  misc_RNA (1)...(19): siRNA sense strand
ucagcugcguggacuauga

SEQ ID NO: 837533 - RNA, 19 nt, Homo sapiens
  misc_RNA (1)...(19): siRNA sense strand
gcucugcgcaucccuaugu

SEQ ID NO: 837534 - RNA, 19 nt, Homo sapiens
  misc_RNA (1)...(19): siRNA sense strand
guacaacuuugagcugauc

SEQ ID NO: 837535 - RNA, 19 nt, Homo sapiens
  misc_RNA (1)...(19): siRNA sense strand
gcccagcucuuccaguaca

SEQ ID NO: 837536 - RNA, 19 nt, Homo sapiens
  misc_RNA (1)...(19): siRNA sense strand
ucuauaacauuugcugcua

SEQ ID NO: 837537 - RNA, 19 nt, Homo sapiens
  misc_RNA (1)...(19): siRNA sense strand
gcagaaggagcaccagauc

SEQ ID NO: 837538 - RNA, 19 nt, Homo sapiens
  misc_RNA (1)...(19): siRNA sense strand
uuauagacuucuuccgaaa

SEQ ID NO: 837539 - RNA, 19 nt, Homo sapiens
  misc_RNA (1)...(19): siRNA sense strand
cagaauaugcauccacaga

SEQ ID NO: 837540 - RNA, 19 nt, Homo sapiens
  misc_RNA (1)...(19): siRNA sense strand
gcagacccgggacgaguuu

SEQ ID NO: 837541 - RNA, 19 nt, Homo sapiens
  misc_RNA (1)...(19): siRNA sense strand
uugcccagcucuuccagua

SEQ ID NO: 837542 - RNA, 19 nt, Homo sapiens
  misc_RNA (1)...(19): siRNA sense strand
ccucaaggccgaguacaaa

SEQ ID NO: 837543 - RNA, 19 nt, Homo sapiens
  misc_RNA (1)...(19): siRNA sense strand
gacuaugacauccuauuug

SEQ ID NO: 837544 - RNA, 19 nt, Homo sapiens
  misc_RNA (1)...(19): siRNA sense strand
gacagaggccucaguguac

SEQ ID NO: 837545 - RNA, 19 nt, Homo sapiens
  misc_RNA (1)...(19): siRNA sense strand
gcaguuccucuuugugguu

SEQ ID NO: 837546 - RNA, 19 nt, Homo sapiens
  misc_RNA (1)...(19): siRNA sense strand
gaaaaugcccucuuuacgu

SEQ ID NO: 837547 - RNA, 19 nt, Homo sapiens
  misc_RNA (1)...(19): siRNA sense strand
cuuauugcccucaccauuu

SEQ ID NO: 837548 - RNA, 19 nt, Homo sapiens
  misc_RNA (1)...(19): siRNA sense strand
cguggacuaugacauccua

SEQ ID NO: 837549 - RNA, 19 nt, Homo sapiens
  misc_RNA (1)...(19): siRNA sense strand
uuacgucuauccaguccuu

SEQ ID NO: 837550 - RNA, 19 nt, Homo sapiens
  misc_RNA (1)...(19): siRNA sense strand
caccauuuaugacgaagau

SEQ ID NO: 837551 - RNA, 19 nt, Homo sapiens
  misc_RNA (1)...(19): siRNA sense strand
ccagaucugcauccacaaa

SEQ ID NO: 837552 - RNA, 19 nt, Homo sapiens
  misc_RNA (1)...(19): siRNA sense strand
cuacugaacccgucaaggu

SEQ ID NO: 837553 - RNA, 19 nt, Homo sapiens
  misc_RNA (1)...(19): siRNA sense strand
ggauggaaagacagaguug

SEQ ID NO: 837554 - RNA, 19 nt, Homo sapiens
  misc_RNA (1)...(19): siRNA sense strand
ugagagcacagccuuccua

SEQ ID NO: 837555 - RNA, 19 nt, Homo sapiens
  misc_RNA (1)...(19): siRNA sense strand
guucaucuauaacauuugc

SEQ ID NO: 837556 - RNA, 19 nt, Homo sapiens
  misc_RNA (1)...(19): siRNA sense strand
ucacagauccuggcacagu

SEQ ID NO: 837557 - RNA, 19 nt, Homo sapiens
  misc_RNA (1)...(19): siRNA sense strand
gcuuauugcccucaccauu

SEQ ID NO: 837558 - RNA, 19 nt, Homo sapiens
  misc_RNA (1)...(19): siRNA sense strand
ccucaccauuuaugacgaa

SEQ ID NO: 837559 - RNA, 19 nt, Homo sapiens
  misc_RNA (1)...(19): siRNA sense strand
acaaggcaguguucauuuu

SEQ ID NO: 837560 - RNA, 19 nt, Homo sapiens
  misc_RNA (1)...(19): siRNA sense strand
ucaugcaguuccucuuugu

SEQ ID NO: 837561 - RNA, 19 nt, Homo sapiens
  misc_RNA (1)...(19): siRNA sense strand
ccucaaccguggcuacaag

SEQ ID NO: 837562 - RNA, 19 nt, Homo sapiens
  misc_RNA (1)...(19): siRNA sense strand
cauccuauuugccaacaag

SEQ ID NO: 837563 - RNA, 19 nt, Homo sapiens
  misc_RNA (1)...(19): siRNA sense strand
ucuaugccuucuucagcua

SEQ ID NO: 837564 - RNA, 19 nt, Homo sapiens
  misc_RNA (1)...(19): siRNA sense strand
uacaaggcaguguucauuu

SEQ ID NO: 837565 - RNA, 19 nt, Homo sapiens
  misc_RNA (1)...(19): siRNA sense strand
uacaugaauugcuucuugu

SEQ ID NO: 837566 - RNA, 19 nt, Homo sapiens
  misc_RNA (1)...(19): siRNA sense strand
gcuuaucaaguucaucuau

SEQ ID NO: 837567 - RNA, 19 nt, Homo sapiens
  misc_RNA (1)...(19): siRNA sense strand
ggagauuauagacuucuuc

SEQ ID NO: 837568 - RNA, 19 nt, Homo sapiens
  misc_RNA (1)...(19): siRNA sense strand
gaggccuccuauagugauu

SEQ ID NO: 837569 - RNA, 19 nt, Homo sapiens
  misc_RNA (1)...(19): siRNA sense strand
cccguggucucaaguacaa

SEQ ID NO: 837570 - RNA, 19 nt, Homo sapiens
  misc_RNA (1)...(19): siRNA sense strand
uggcacugguuaacaaauc

SEQ ID NO: 837571 - RNA, 19 nt, Homo sapiens
  misc_RNA (1)...(19): siRNA sense strand
agaaggagcaccagaucug

SEQ ID NO: 837572 - RNA, 19 nt, Homo sapiens
  misc_RNA (1)...(19): siRNA sense strand
uccaccggcuuaucaaguu

SEQ ID NO: 837573 - RNA, 19 nt, Homo sapiens
  misc_RNA (1)...(19): siRNA sense strand
aacgugagcugacagaacu

SEQ ID NO: 837574 - RNA, 19 nt, Homo sapiens
  misc_RNA (1)...(19): siRNA sense strand
ccuccaaguacaugaauug

SEQ ID NO: 837575 - RNA, 19 nt, Homo sapiens
  misc_RNA (1)...(19): siRNA sense strand
gcugcuaccuccgccacuu

SEQ ID NO: 837576 - RNA, 19 nt, Homo sapiens
  misc_RNA (1)...(19): siRNA sense strand
aauccucuaugccuucuuc

SEQ ID NO: 837577 - RNA, 19 nt, Homo sapiens
  misc_RNA (1)...(19): siRNA sense strand
acuuugagcugauccucuu

SEQ ID NO: 837578 - RNA, 19 nt, Homo sapiens
  misc_RNA (1)...(19): siRNA sense strand
ggucagcugcguggacuau

SEQ ID NO: 837579 - RNA, 19 nt, Homo sapiens
  misc_RNA (1)...(19): siRNA sense strand
cccuggagauuauagacuu

SEQ ID NO: 837580 - RNA, 19 nt, Homo sapiens
  misc_RNA (1)...(19): siRNA sense strand
ccuagaggccuccuauagu

SEQ ID NO: 837581 - RNA, 19 nt, Homo sapiens
  misc_RNA (1)...(19): siRNA sense strand
caaauccucuaugccuucu

SEQ ID NO: 837582 - RNA, 19 nt, Homo sapiens
  misc_RNA (1)...(19): siRNA sense strand
acuaugacauccuauuugc

SEQ ID NO: 837583 - RNA, 19 nt, Homo sapiens
  misc_RNA (1)...(19): siRNA sense strand
ccuuaucgcaaauguggua

SEQ ID NO: 837584 - RNA, 19 nt, Homo sapiens
  misc_RNA (1)...(19): siRNA sense strand
ucucucgaguuuauaaucu

SEQ ID NO: 837585 - RNA, 19 nt, Homo sapiens
  misc_RNA (1)...(19): siRNA sense strand
uauggcaaauccucuaugc

SEQ ID NO: 837586 - RNA, 19 nt, Homo sapiens
  misc_RNA (1)...(19): siRNA sense strand
ucauauggcaaauccucua

SEQ ID NO: 837587 - RNA, 19 nt, Homo sapiens
  misc_RNA (1)...(19): siRNA sense strand
ugguggcacugguuaacaa

SEQ ID NO: 837588 - RNA, 19 nt, Homo sapiens
  misc_RNA (1)...(19): siRNA sense strand
ccaccggcuuaucaaguuc

SEQ ID NO: 837589 - RNA, 19 nt, Homo sapiens
  misc_RNA (1)...(19): siRNA sense strand
cuacaugguggcacugguu

SEQ ID NO: 837590 - RNA, 19 nt, Homo sapiens
  misc_RNA (1)...(19): siRNA sense strand
ucuauccaguccuuacaau

SEQ ID NO: 837591 - RNA, 19 nt, Homo sapiens
  misc_RNA (1)...(19): siRNA sense strand
ccauuuaugacgaagaugu

SEQ ID NO: 837592 - RNA, 19 nt, Homo sapiens
  misc_RNA (1)...(19): siRNA sense strand
gacauccuauuugccaaca

SEQ ID NO: 837593 - RNA, 19 nt, Homo sapiens
  misc_RNA (1)...(19): siRNA sense strand
gaggauggaaagacagagu

SEQ ID NO: 837594 - RNA, 19 nt, Homo sapiens
  misc_RNA (1)...(19): siRNA sense strand
aaaccuugaccucuucuuc

SEQ ID NO: 837595 - RNA, 19 nt, Homo sapiens
  misc_RNA (1)...(19): siRNA sense strand
uauaacauuugcugcuacu

SEQ ID NO: 837596 - RNA, 19 nt, Homo sapiens
  misc_RNA (1)...(19): siRNA sense strand
ugaaaaccuugaccucuuc

SEQ ID NO: 837597 - RNA, 19 nt, Homo sapiens
  misc_RNA (1)...(19): siRNA sense strand
uauccaguccuuacaaucu

SEQ ID NO: 837598 - RNA, 19 nt, Homo sapiens
  misc_RNA (1)...(19): siRNA sense strand
gauggauguucgccagcau

SEQ ID NO: 837599 - RNA, 19 nt, Homo sapiens
  misc_RNA (1)...(19): siRNA sense strand
ggccuccuauagugauuca

SEQ ID NO: 837600 - RNA, 19 nt, Homo sapiens
  misc_RNA (1)...(19): siRNA sense strand
ucgcucacauccacuacau

SEQ ID NO: 837601 - RNA, 19 nt, Homo sapiens
  misc_RNA (1)...(19): siRNA sense strand
gagcagcgugugggaagga

SEQ ID NO: 837602 - RNA, 19 nt, Homo sapiens
  misc_RNA (1)...(19): siRNA sense strand
ggucguuggugugggagau

SEQ ID NO: 837603 - RNA, 19 nt, Homo sapiens
  misc_RNA (1)...(19): siRNA sense strand
ggucaucucucuuguguga

SEQ ID NO: 837604 - RNA, 19 nt, Homo sapiens
  misc_RNA (1)...(19): siRNA sense strand
ucaacucucuuauagcuua

SEQ ID NO: 837605 - RNA, 19 nt, Homo sapiens
  misc_RNA (1)...(19): siRNA sense strand
caagaaugcugaaggcaaa

SEQ ID NO: 837606 - RNA, 19 nt, Homo sapiens
  misc_RNA (1)...(19): siRNA sense strand
gcaucaggcuucuuucaaa

SEQ ID NO: 837607 - RNA, 19 nt, Homo sapiens
  misc_RNA (1)...(19): siRNA sense strand
gcauggagcucaggugaau

SEQ ID NO: 837608 - RNA, 19 nt, Homo sapiens
  misc_RNA (1)...(19): siRNA sense strand
gaggucaucucucuugugu

SEQ ID NO: 837609 - RNA, 19 nt, Homo sapiens
  misc_RNA (1)...(19): siRNA sense strand
gcgaugcugugucugauug

SEQ ID NO: 837610 - RNA, 19 nt, Homo sapiens
  misc_RNA (1)...(19): siRNA sense strand
gcacggagccagcguucaa

SEQ ID NO: 837611 - RNA, 19 nt, Homo sapiens
  misc_RNA (1)...(19): siRNA sense strand
cagcugggauugugugaau

SEQ ID NO: 837612 - RNA, 19 nt, Homo sapiens
  misc_RNA (1)...(19): siRNA sense strand
ggacgugaaccaagggaaa

SEQ ID NO: 837613 - RNA, 19 nt, Homo sapiens
  misc_RNA (1)...(19): siRNA sense strand
caacauugaccauaagauc

SEQ ID NO: 837614 - RNA, 19 nt, Homo sapiens
  misc_RNA (1)...(19): siRNA sense strand
gaugggcgaugcugugucu

SEQ ID NO: 837615 - RNA, 19 nt, Homo sapiens
  misc_RNA (1)...(19): siRNA sense strand
ugugucaacucucuuauag

SEQ ID NO: 837616 - RNA, 19 nt, Homo sapiens
  misc_RNA (1)...(19): siRNA sense strand
gcugggauugugugaauuu

SEQ ID NO: 837617 - RNA, 19 nt, Homo sapiens
  misc_RNA (1)...(19): siRNA sense strand
cagagagccugugucaaga

SEQ ID NO: 837618 - RNA, 19 nt, Homo sapiens
  misc_RNA (1)...(19): siRNA sense strand
gggcaacauugaccauaag

SEQ ID NO: 837619 - RNA, 19 nt, Homo sapiens
  misc_RNA (1)...(19): siRNA sense strand
ccaugaagccugucuugga

SEQ ID NO: 837620 - RNA, 19 nt, Homo sapiens
  misc_RNA (1)...(19): siRNA sense strand
caagggaaaggucaggauu

SEQ ID NO: 837621 - RNA, 19 nt, Homo sapiens
  misc_RNA (1)...(19): siRNA sense strand
ccugggcacuccacucuau

SEQ ID NO: 837622 - RNA, 19 nt, Homo sapiens
  misc_RNA (1)...(19): siRNA sense strand
gagagccugugucaagaag

SEQ ID NO: 837623 - RNA, 19 nt, Homo sapiens
  misc_RNA (1)...(19): siRNA sense strand
acacuccacuguuuaaugc

SEQ ID NO: 837624 - RNA, 19 nt, Homo sapiens
  misc_RNA (1)...(19): siRNA sense strand
ugucaacucucuuauagcu

SEQ ID NO: 837625 - RNA, 19 nt, Homo sapiens
  misc_RNA (1)...(19): siRNA sense strand
caucacggcagaucauguu

SEQ ID NO: 837626 - RNA, 19 nt, Homo sapiens
  misc_RNA (1)...(19): siRNA sense strand
ucaggugaauggugugaca

SEQ ID NO: 837627 - RNA, 19 nt, Homo sapiens
  misc_RNA (1)...(19): siRNA sense strand
gcguucaaccugagaguga

SEQ ID NO: 837628 - RNA, 19 nt, Homo sapiens
  misc_RNA (1)...(19): siRNA sense strand
ggacacccaggccaagaau

SEQ ID NO: 837629 - RNA, 19 nt, Homo sapiens
  misc_RNA (1)...(19): siRNA sense strand
caucaggcuucuuucaaac

SEQ ID NO: 837630 - RNA, 19 nt, Homo sapiens
  misc_RNA (1)...(19): siRNA sense strand
gaggccacguggagugugu

SEQ ID NO: 837631 - RNA, 19 nt, Homo sapiens
  misc_RNA (1)...(19): siRNA sense strand
cuggcacacuccacuguuu

SEQ ID NO: 837632 - RNA, 19 nt, Homo sapiens
  misc_RNA (1)...(19): siRNA sense strand
gggauugugugaauuugcu

SEQ ID NO: 837633 - RNA, 19 nt, Homo sapiens
  misc_RNA (1)...(19): siRNA sense strand
ggggcaacauugaccauaa

SEQ ID NO: 837634 - RNA, 19 nt, Homo sapiens
  misc_RNA (1)...(19): siRNA sense strand
uggcccagcucuucuugga

SEQ ID NO: 837635 - RNA, 19 nt, Homo sapiens
  misc_RNA (1)...(19): siRNA sense strand
gagccugugucaagaagcu

SEQ ID NO: 837636 - RNA, 19 nt, Homo sapiens
  misc_RNA (1)...(19): siRNA sense strand
uggcacacuccacuguuua

SEQ ID NO: 837637 - RNA, 19 nt, Homo sapiens
  misc_RNA (1)...(19): siRNA sense strand
ccugccugcucauggauuu

SEQ ID NO: 837638 - RNA, 19 nt, Homo sapiens
  misc_RNA (1)...(19): siRNA sense strand
caacucucuuauagcuuau

SEQ ID NO: 837639 - RNA, 19 nt, Homo sapiens
  misc_RNA (1)...(19): siRNA sense strand
ugauuggucuccuaugcau

SEQ ID NO: 837640 - RNA, 19 nt, Homo sapiens
  misc_RNA (1)...(19): siRNA sense strand
ggcacacuccacuguuuaa

SEQ ID NO: 837641 - RNA, 19 nt, Homo sapiens
  misc_RNA (1)...(19): siRNA sense strand
gugugucaacucucuuaua

SEQ ID NO: 837642 - RNA, 19 nt, Homo sapiens
  misc_RNA (1)...(19): siRNA sense strand
ggcaucaggcuucuuucaa

SEQ ID NO: 837643 - RNA, 19 nt, Homo sapiens
  misc_RNA (1)...(19): siRNA sense strand
gccaaaaccuaagcccuaa

SEQ ID NO: 837644 - RNA, 19 nt, Homo sapiens
  misc_RNA (1)...(19): siRNA sense strand
ggaggucaucucucuugug

SEQ ID NO: 837645 - RNA, 19 nt, Homo sapiens
  misc_RNA (1)...(19): siRNA sense strand
gggcacuccacucuauuug

SEQ ID NO: 837646 - RNA, 19 nt, Homo sapiens
  misc_RNA (1)...(19): siRNA sense strand
ucaucucucuugugugaag

SEQ ID NO: 837647 - RNA, 19 nt, Homo sapiens
  misc_RNA (1)...(19): siRNA sense strand
gaacaucaucacggcagau

SEQ ID NO: 837648 - RNA, 19 nt, Homo sapiens
  misc_RNA (1)...(19): siRNA sense strand
gcacacuccacuguuuaau

SEQ ID NO: 837649 - RNA, 19 nt, Homo sapiens
  misc_RNA (1)...(19): siRNA sense strand
ggugggcugugaacaucau

SEQ ID NO: 837650 - RNA, 19 nt, Homo sapiens
  misc_RNA (1)...(19): siRNA sense strand
gggcgaugcugugucugau

SEQ ID NO: 837651 - RNA, 19 nt, Homo sapiens
  misc_RNA (1)...(19): siRNA sense strand
gcaacauugaccauaagau

SEQ ID NO: 837652 - RNA, 19 nt, Homo sapiens
  misc_RNA (1)...(19): siRNA sense strand
caggacagccagugaagag

SEQ ID NO: 837653 - RNA, 19 nt, Homo sapiens
  misc_RNA (1)...(19): siRNA sense strand
ucuuggaggucaucucucu

SEQ ID NO: 837654 - RNA, 19 nt, Homo sapiens
  misc_RNA (1)...(19): siRNA sense strand
caucaucacggcagaucau

SEQ ID NO: 837655 - RNA, 19 nt, Homo sapiens
  misc_RNA (1)...(19): siRNA sense strand
cacucuauuuggcuuguga

SEQ ID NO: 837656 - RNA, 19 nt, Homo sapiens
  misc_RNA (1)...(19): siRNA sense strand
gaacugcccugaaaccauu

SEQ ID NO: 837657 - RNA, 19 nt, Homo sapiens
  misc_RNA (1)...(19): siRNA sense strand
gagaugaacugcccugaaa

SEQ ID NO: 837658 - RNA, 19 nt, Homo sapiens
  misc_RNA (1)...(19): siRNA sense strand
gcacuuugcuacuuuauug

SEQ ID NO: 837659 - RNA, 19 nt, Homo sapiens
  misc_RNA (1)...(19): siRNA sense strand
ccaggaauaugccaauuua

SEQ ID NO: 837660 - RNA, 19 nt, Homo sapiens
  misc_RNA (1)...(19): siRNA sense strand
gcgaugacauauucuguua

SEQ ID NO: 837661 - RNA, 19 nt, Homo sapiens
  misc_RNA (1)...(19): siRNA sense strand
agagagaucuggcacauuu

SEQ ID NO: 837662 - RNA, 19 nt, Homo sapiens
  misc_RNA (1)...(19): siRNA sense strand
ggacaagaauuugcaagaa

SEQ ID NO: 837663 - RNA, 19 nt, Homo sapiens
  misc_RNA (1)...(19): siRNA sense strand
gacaagaauuugcaagaaa

SEQ ID NO: 837664 - RNA, 19 nt, Homo sapiens
  misc_RNA (1)...(19): siRNA sense strand
gaaauccaauucaaacauc

SEQ ID NO: 837665 - RNA, 19 nt, Homo sapiens
  misc_RNA (1)...(19): siRNA sense strand
gcaauucacuagaguugga

SEQ ID NO: 837666 - RNA, 19 nt, Homo sapiens
  misc_RNA (1)...(19): siRNA sense strand
gauggguccuucauaguaa

SEQ ID NO: 837667 - RNA, 19 nt, Homo sapiens
  misc_RNA (1)...(19): siRNA sense strand
gaagguggaaguuaaauuc

SEQ ID NO: 837668 - RNA, 19 nt, Homo sapiens
  misc_RNA (1)...(19): siRNA sense strand
aaacauccauccgaucuuu

SEQ ID NO: 837669 - RNA, 19 nt, Homo sapiens
  misc_RNA (1)...(19): siRNA sense strand
ggcgaaagaucacgaugaa

SEQ ID NO: 837670 - RNA, 19 nt, Homo sapiens
  misc_RNA (1)...(19): siRNA sense strand
gauguggagcucuuuguua

SEQ ID NO: 837671 - RNA, 19 nt, Homo sapiens
  misc_RNA (1)...(19): siRNA sense strand
cgaaagaucacgaugaaga

SEQ ID NO: 837672 - RNA, 19 nt, Homo sapiens
  misc_RNA (1)...(19): siRNA sense strand
aaagauggguccuucauag

SEQ ID NO: 837673 - RNA, 19 nt, Homo sapiens
  misc_RNA (1)...(19): siRNA sense strand
gaagcaggauuccaucuac

SEQ ID NO: 837674 - RNA, 19 nt, Homo sapiens
  misc_RNA (1)...(19): siRNA sense strand
aaauaucgauggcacugua

SEQ ID NO: 837675 - RNA, 19 nt, Homo sapiens
  misc_RNA (1)...(19): siRNA sense strand
ggaauaugccaauuuacaa

SEQ ID NO: 837676 - RNA, 19 nt, Homo sapiens
  misc_RNA (1)...(19): siRNA sense strand
gacgaccucuucccuugua

SEQ ID NO: 837677 - RNA, 19 nt, Homo sapiens
  misc_RNA (1)...(19): siRNA sense strand
guggauacaucagggaaua

SEQ ID NO: 837678 - RNA, 19 nt, Homo sapiens
  misc_RNA (1)...(19): siRNA sense strand
uaucaagacucauggugaa

SEQ ID NO: 837679 - RNA, 19 nt, Homo sapiens
  misc_RNA (1)...(19): siRNA sense strand
guggagcucuuuguuaauu

SEQ ID NO: 837680 - RNA, 19 nt, Homo sapiens
  misc_RNA (1)...(19): siRNA sense strand
ggagcucuuuguuaauuug

SEQ ID NO: 837681 - RNA, 19 nt, Homo sapiens
  misc_RNA (1)...(19): siRNA sense strand
gcuacuuuauugcuucuuu

SEQ ID NO: 837682 - RNA, 19 nt, Homo sapiens
  misc_RNA (1)...(19): siRNA sense strand
caugggcgaugacauauuc

SEQ ID NO: 837683 - RNA, 19 nt, Homo sapiens
  misc_RNA (1)...(19): siRNA sense strand
aaacacuacauuccaguua

SEQ ID NO: 837684 - RNA, 19 nt, Homo sapiens
  misc_RNA (1)...(19): siRNA sense strand
ccacagauuccaaggauau

SEQ ID NO: 837685 - RNA, 19 nt, Homo sapiens
  misc_RNA (1)...(19): siRNA sense strand
cgagacagccgcaaagaga

SEQ ID NO: 837686 - RNA, 19 nt, Homo sapiens
  misc_RNA (1)...(19): siRNA sense strand
gaggagcaauucacuagag

SEQ ID NO: 837687 - RNA, 19 nt, Homo sapiens
  misc_RNA (1)...(19): siRNA sense strand
gagcaauucacuagaguug

SEQ ID NO: 837688 - RNA, 19 nt, Homo sapiens
  misc_RNA (1)...(19): siRNA sense strand
cuuaucgccugccauauuu

SEQ ID NO: 837689 - RNA, 19 nt, Homo sapiens
  misc_RNA (1)...(19): siRNA sense strand
gagagacucgagcugguua

SEQ ID NO: 837690 - RNA, 19 nt, Homo sapiens
  misc_RNA (1)...(19): siRNA sense strand
ugaaaccauugcucagauu

SEQ ID NO: 837691 - RNA, 19 nt, Homo sapiens
  misc_RNA (1)...(19): siRNA sense strand
gcuuaucgccugccauauu

SEQ ID NO: 837692 - RNA, 19 nt, Homo sapiens
  misc_RNA (1)...(19): siRNA sense strand
ggagaagagcgaaauaugg

SEQ ID NO: 837693 - RNA, 19 nt, Homo sapiens
  misc_RNA (1)...(19): siRNA sense strand
cgauuugacugauucuguu

SEQ ID NO: 837694 - RNA, 19 nt, Homo sapiens
  misc_RNA (1)...(19): siRNA sense strand
cagcuuaucgccugccaua

SEQ ID NO: 837695 - RNA, 19 nt, Homo sapiens
  misc_RNA (1)...(19): siRNA sense strand
ggcaacauguggccaaauc

SEQ ID NO: 837696 - RNA, 19 nt, Homo sapiens
  misc_RNA (1)...(19): siRNA sense strand
gaacauguagguuuuagaa

SEQ ID NO: 837697 - RNA, 19 nt, Homo sapiens
  misc_RNA (1)...(19): siRNA sense strand
gaaacacuacauuccaguu

SEQ ID NO: 837698 - RNA, 19 nt, Homo sapiens
  misc_RNA (1)...(19): siRNA sense strand
ggguaagucuggauaugau

SEQ ID NO: 837699 - RNA, 19 nt, Homo sapiens
  misc_RNA (1)...(19): siRNA sense strand
aggauuccaucuacuauga

SEQ ID NO: 837700 - RNA, 19 nt, Homo sapiens
  misc_RNA (1)...(19): siRNA sense strand
gguccuucauaguaagaua

SEQ ID NO: 837701 - RNA, 19 nt, Homo sapiens
  misc_RNA (1)...(19): siRNA sense strand
ggagaugaacugcccugaa

SEQ ID NO: 837702 - RNA, 19 nt, Homo sapiens
  misc_RNA (1)...(19): siRNA sense strand
aaacuuaaaugggcgaaag

SEQ ID NO: 837703 - RNA, 19 nt, Homo sapiens
  misc_RNA (1)...(19): siRNA sense strand
gcuaguuggugacaguguu

SEQ ID NO: 837704 - RNA, 19 nt, Homo sapiens
  misc_RNA (1)...(19): siRNA sense strand
cuuaaaggauaacaagguu

SEQ ID NO: 837705 - RNA, 19 nt, Homo sapiens
  misc_RNA (1)...(19): siRNA sense strand
cagaaaagauugcaguaga

SEQ ID NO: 837706 - RNA, 19 nt, Homo sapiens
  misc_RNA (1)...(19): siRNA sense strand
ggauacaucagggaauaaa

SEQ ID NO: 837707 - RNA, 19 nt, Homo sapiens
  misc_RNA (1)...(19): siRNA sense strand
cuaugucacuacaccuuaa

SEQ ID NO: 837708 - RNA, 19 nt, Homo sapiens
  misc_RNA (1)...(19): siRNA sense strand
gaauaugccaauuuacaag

SEQ ID NO: 837709 - RNA, 19 nt, Homo sapiens
  misc_RNA (1)...(19): siRNA sense strand
gaaagaucacgaugaagag

SEQ ID NO: 837710 - RNA, 19 nt, Homo sapiens
  misc_RNA (1)...(19): siRNA sense strand
uuaaaugggcgaaagauca

SEQ ID NO: 837711 - RNA, 19 nt, Homo sapiens
  misc_RNA (1)...(19): siRNA sense strand
gacucgagcugguuaaacu

SEQ ID NO: 837712 - RNA, 19 nt, Homo sapiens
  misc_RNA (1)...(19): siRNA sense strand
ggguagaaccacagacuga

SEQ ID NO: 837713 - RNA, 19 nt, Homo sapiens
  misc_RNA (1)...(19): siRNA sense strand
gggcgaaagaucacgauga

SEQ ID NO: 837714 - RNA, 19 nt, Homo sapiens
  misc_RNA (1)...(19): siRNA sense strand
auguggagcucuuuguuaa

SEQ ID NO: 837715 - RNA, 19 nt, Homo sapiens
  misc_RNA (1)...(19): siRNA sense strand
aacacuacauuccaguuaa

SEQ ID NO: 837716 - RNA, 19 nt, Homo sapiens
  misc_RNA (1)...(19): siRNA sense strand
gcaggauuccaucuacuau

SEQ ID NO: 837717 - RNA, 19 nt, Homo sapiens
  misc_RNA (1)...(19): siRNA sense strand
ugauguccgugcaagcuaa

SEQ ID NO: 837718 - RNA, 19 nt, Homo sapiens
  misc_RNA (1)...(19): siRNA sense strand
cuacguacgauuugacuga

SEQ ID NO: 837719 - RNA, 19 nt, Homo sapiens
  misc_RNA (1)...(19): siRNA sense strand
ugcaagaaauaaucucaug

SEQ ID NO: 837720 - RNA, 19 nt, Homo sapiens
  misc_RNA (1)...(19): siRNA sense strand
agauggguccuucauagua

SEQ ID NO: 837721 - RNA, 19 nt, Homo sapiens
  misc_RNA (1)...(19): siRNA sense strand
ccugagcgaucugcuagaa

SEQ ID NO: 837722 - RNA, 19 nt, Homo sapiens
  misc_RNA (1)...(19): siRNA sense strand
ggagacuggccuuuggaaa

SEQ ID NO: 837723 - RNA, 19 nt, Homo sapiens
  misc_RNA (1)...(19): siRNA sense strand
gccauacuacuuucuuuga

SEQ ID NO: 837724 - RNA, 19 nt, Homo sapiens
  misc_RNA (1)...(19): siRNA sense strand
cauaguaagauacagaaug

SEQ ID NO: 837725 - RNA, 19 nt, Homo sapiens
  misc_RNA (1)...(19): siRNA sense strand
gaaaccauugcucagauuc

SEQ ID NO: 837726 - RNA, 19 nt, Homo sapiens
  misc_RNA (1)...(19): siRNA sense strand
caaccugagcgaucugcua

SEQ ID NO: 837727 - RNA, 19 nt, Homo sapiens
  misc_RNA (1)...(19): siRNA sense strand
ugaagcaggauuccaucua

SEQ ID NO: 837728 - RNA, 19 nt, Homo sapiens
  misc_RNA (1)...(19): siRNA sense strand
ugguuaaacucaguagaaa

SEQ ID NO: 837729 - RNA, 19 nt, Homo sapiens
  misc_RNA (1)...(19): siRNA sense strand
gacugauucuguucuggaa

SEQ ID NO: 837730 - RNA, 19 nt, Homo sapiens
  misc_RNA (1)...(19): siRNA sense strand
cagcugagcccggagaaga

SEQ ID NO: 837731 - RNA, 19 nt, Homo sapiens
  misc_RNA (1)...(19): siRNA sense strand
cagaggagcaauucacuag

SEQ ID NO: 837732 - RNA, 19 nt, Homo sapiens
  misc_RNA (1)...(19): siRNA sense strand
caagacucauggugaacau

SEQ ID NO: 837733 - RNA, 19 nt, Homo sapiens
  misc_RNA (1)...(19): siRNA sense strand
uugcucagauucagagaga

SEQ ID NO: 837734 - RNA, 19 nt, Homo sapiens
  misc_RNA (1)...(19): siRNA sense strand
gaaaagauugcaguagaaa

SEQ ID NO: 837735 - RNA, 19 nt, Homo sapiens
  misc_RNA (1)...(19): siRNA sense strand
aaucugaagguggaaguua

SEQ ID NO: 837736 - RNA, 19 nt, Homo sapiens
  misc_RNA (1)...(19): siRNA sense strand
ugagcgaucugcuagaaaa

SEQ ID NO: 837737 - RNA, 19 nt, Homo sapiens
  misc_RNA (1)...(19): siRNA sense strand
cguacgauuugacugauuc

SEQ ID NO: 837738 - RNA, 19 nt, Homo sapiens
  misc_RNA (1)...(19): siRNA sense strand
ggccaaauccccauauauu

SEQ ID NO: 837739 - RNA, 19 nt, Homo sapiens
  misc_RNA (1)...(19): siRNA sense strand
ccaauuuacaagugaguga

SEQ ID NO: 837740 - RNA, 19 nt, Homo sapiens
  misc_RNA (1)...(19): siRNA sense strand
ccagaggagcaauucacua

SEQ ID NO: 837741 - RNA, 19 nt, Homo sapiens
  misc_RNA (1)...(19): siRNA sense strand
ggcagagccuaugucacua

SEQ ID NO: 837742 - RNA, 19 nt, Homo sapiens
  misc_RNA (1)...(19): siRNA sense strand
ugacuguccucugcaagau

SEQ ID NO: 837743 - RNA, 19 nt, Homo sapiens
  misc_RNA (1)...(19): siRNA sense strand
aaaagcaggacaagaauuu

SEQ ID NO: 837744 - RNA, 19 nt, Homo sapiens
  misc_RNA (1)...(19): siRNA sense strand
ucaaacauccauccgaucu

SEQ ID NO: 837745 - RNA, 19 nt, Homo sapiens
  misc_RNA (1)...(19): siRNA sense strand
ugaagguggaaguuaaauu

SEQ ID NO: 837746 - RNA, 19 nt, Homo sapiens
  misc_RNA (1)...(19): siRNA sense strand
uaugccaauuuacaaguga

SEQ ID NO: 837747 - RNA, 19 nt, Homo sapiens
  misc_RNA (1)...(19): siRNA sense strand
acacuacauuccaguuaag

SEQ ID NO: 837748 - RNA, 19 nt, Homo sapiens
  misc_RNA (1)...(19): siRNA sense strand
gagacuggccuuuggaaaa

SEQ ID NO: 837749 - RNA, 19 nt, Homo sapiens
  misc_RNA (1)...(19): siRNA sense strand
cggagaagagcgaaauaug

SEQ ID NO: 837750 - RNA, 19 nt, Homo sapiens
  misc_RNA (1)...(19): siRNA sense strand
agaaaagauugcaguagaa

SEQ ID NO: 837751 - RNA, 19 nt, Homo sapiens
  misc_RNA (1)...(19): siRNA sense strand
ggagcaauucacuagaguu

SEQ ID NO: 837752 - RNA, 19 nt, Homo sapiens
  misc_RNA (1)...(19): siRNA sense strand
gagcugguuaaacucagua

SEQ ID NO: 837753 - RNA, 19 nt, Homo sapiens
  misc_RNA (1)...(19): siRNA sense strand
uggagcucuuuguuaauuu

SEQ ID NO: 837754 - RNA, 19 nt, Homo sapiens
  misc_RNA (1)...(19): siRNA sense strand
ccuaugucacuacaccuua

SEQ ID NO: 837755 - RNA, 19 nt, Homo sapiens
  misc_RNA (1)...(19): siRNA sense strand
ggacgaccucuucccuugu

SEQ ID NO: 837756 - RNA, 19 nt, Homo sapiens
  misc_RNA (1)...(19): siRNA sense strand
gaacuaggagauacaauau

SEQ ID NO: 837757 - RNA, 19 nt, Homo sapiens
  misc_RNA (1)...(19): siRNA sense strand
caauggaccugucagcaaa

SEQ ID NO: 837758 - RNA, 19 nt, Homo sapiens
  misc_RNA (1)...(19): siRNA sense strand
ggagguugguucaugacua

SEQ ID NO: 837759 - RNA, 19 nt, Homo sapiens
  misc_RNA (1)...(19): siRNA sense strand
ggucggcaccuaaugaaua

SEQ ID NO: 837760 - RNA, 19 nt, Homo sapiens
  misc_RNA (1)...(19): siRNA sense strand
cgaacuaggagauacaaua

SEQ ID NO: 837761 - RNA, 19 nt, Homo sapiens
  misc_RNA (1)...(19): siRNA sense strand
gagguugguucaugacuau

SEQ ID NO: 837762 - RNA, 19 nt, Homo sapiens
  misc_RNA (1)...(19): siRNA sense strand
gaacugaggaagccauuag

SEQ ID NO: 837763 - RNA, 19 nt, Homo sapiens
  misc_RNA (1)...(19): siRNA sense strand
aaacaacgaaagcugaaua

SEQ ID NO: 837764 - RNA, 19 nt, Homo sapiens
  misc_RNA (1)...(19): siRNA sense strand
caaagcacccgaacuagga

SEQ ID NO: 837765 - RNA, 19 nt, Homo sapiens
  misc_RNA (1)...(19): siRNA sense strand
ucuguaugcugccuuuaua

SEQ ID NO: 837766 - RNA, 19 nt, Homo sapiens
  misc_RNA (1)...(19): siRNA sense strand
aagcaaagcacccgaacua

SEQ ID NO: 837767 - RNA, 19 nt, Homo sapiens
  misc_RNA (1)...(19): siRNA sense strand
auucugggcuuaugcauuu

SEQ ID NO: 837768 - RNA, 19 nt, Homo sapiens
  misc_RNA (1)...(19): siRNA sense strand
uuagugcucuggucucuga

SEQ ID NO: 837769 - RNA, 19 nt, Homo sapiens
  misc_RNA (1)...(19): siRNA sense strand
acuaggagauacaauauuc

SEQ ID NO: 837770 - RNA, 19 nt, Homo sapiens
  misc_RNA (1)...(19): siRNA sense strand
gucggcaccuaaugaauaa

SEQ ID NO: 837771 - RNA, 19 nt, Homo sapiens
  misc_RNA (1)...(19): siRNA sense strand
cugaugggcugugugguua

SEQ ID NO: 837772 - RNA, 19 nt, Homo sapiens
  misc_RNA (1)...(19): siRNA sense strand
gcuuauaugguguacauuu

SEQ ID NO: 837773 - RNA, 19 nt, Homo sapiens
  misc_RNA (1)...(19): siRNA sense strand
ugaauaaacgagcaaaguu

SEQ ID NO: 837774 - RNA, 19 nt, Homo sapiens
  misc_RNA (1)...(19): siRNA sense strand
gugcuuauaugguguacau

SEQ ID NO: 837775 - RNA, 19 nt, Homo sapiens
  misc_RNA (1)...(19): siRNA sense strand
gaacuggugcuuauauggu

SEQ ID NO: 837776 - RNA, 19 nt, Homo sapiens
  misc_RNA (1)...(19): siRNA sense strand
cuucugccauuucuucuuu

SEQ ID NO: 837777 - RNA, 19 nt, Homo sapiens
  misc_RNA (1)...(19): siRNA sense strand
ggaagcagaagcugaucuu

SEQ ID NO: 837778 - RNA, 19 nt, Homo sapiens
  misc_RNA (1)...(19): siRNA sense strand
aguguugacuuuacaagaa

SEQ ID NO: 837779 - RNA, 19 nt, Homo sapiens
  misc_RNA (1)...(19): siRNA sense strand
gcuuaugcauuugugcuaa

SEQ ID NO: 837780 - RNA, 19 nt, Homo sapiens
  misc_RNA (1)...(19): siRNA sense strand
ucacugugcuccuguacuc

SEQ ID NO: 837781 - RNA, 19 nt, Homo sapiens
  misc_RNA (1)...(19): siRNA sense strand
gugauguacucuuacuaug

SEQ ID NO: 837782 - RNA, 19 nt, Homo sapiens
  misc_RNA (1)...(19): siRNA sense strand
ucagcaaauucugggcuua

SEQ ID NO: 837783 - RNA, 19 nt, Homo sapiens
  misc_RNA (1)...(19): siRNA sense strand
caggaaaacuggaagaaau

SEQ ID NO: 837784 - RNA, 19 nt, Homo sapiens
  misc_RNA (1)...(19): siRNA sense strand
uauauucggugcucuucga

SEQ ID NO: 837785 - RNA, 19 nt, Homo sapiens
  misc_RNA (1)...(19): siRNA sense strand
ucagcuaccuugugcucuu

SEQ ID NO: 837786 - RNA, 19 nt, Homo sapiens
  misc_RNA (1)...(19): siRNA sense strand
uuaacuaccuggucuucug

SEQ ID NO: 837787 - RNA, 19 nt, Homo sapiens
  misc_RNA (1)...(19): siRNA sense strand
agaaugaagccauccaaug

SEQ ID NO: 837788 - RNA, 19 nt, Homo sapiens
  misc_RNA (1)...(19): siRNA sense strand
gcugaugggcugugugguu

SEQ ID NO: 837789 - RNA, 19 nt, Homo sapiens
  misc_RNA (1)...(19): siRNA sense strand
acgccgugauguacucuua

SEQ ID NO: 837790 - RNA, 19 nt, Homo sapiens
  misc_RNA (1)...(19): siRNA sense strand
gagaaugaagccauccaau

SEQ ID NO: 837791 - RNA, 19 nt, Homo sapiens
  misc_RNA (1)...(19): siRNA sense strand
cuugcagucuucaguauau

SEQ ID NO: 837792 - RNA, 19 nt, Homo sapiens
  misc_RNA (1)...(19): siRNA sense strand
gcucuucugccauuucuuc

SEQ ID NO: 837793 - RNA, 19 nt, Homo sapiens
  misc_RNA (1)...(19): siRNA sense strand
guaugcugccuuuauauuc

SEQ ID NO: 837794 - RNA, 19 nt, Homo sapiens
  misc_RNA (1)...(19): siRNA sense strand
gguaucaccacaucacugu

SEQ ID NO: 837795 - RNA, 19 nt, Homo sapiens
  misc_RNA (1)...(19): siRNA sense strand
gcacccgaacuaggagaua

SEQ ID NO: 837796 - RNA, 19 nt, Homo sapiens
  misc_RNA (1)...(19): siRNA sense strand
gaaguuugccauguucauc

SEQ ID NO: 837797 - RNA, 19 nt, Homo sapiens
  misc_RNA (1)...(19): siRNA sense strand
ugaagcagucaguuuguga

SEQ ID NO: 837798 - RNA, 19 nt, Homo sapiens
  misc_RNA (1)...(19): siRNA sense strand
gaaaacaacgaaagcugaa

SEQ ID NO: 837799 - RNA, 19 nt, Homo sapiens
  misc_RNA (1)...(19): siRNA sense strand
ugaucuuccugcacuggua

SEQ ID NO: 837800 - RNA, 19 nt, Homo sapiens
  misc_RNA (1)...(19): siRNA sense strand
ggaccugucagcaaauucu

SEQ ID NO: 837801 - RNA, 19 nt, Homo sapiens
  misc_RNA (1)...(19): siRNA sense strand
guguugacuuuacaagaau

SEQ ID NO: 837802 - RNA, 19 nt, Homo sapiens
  misc_RNA (1)...(19): siRNA sense strand
cuugugcucuucugccauu

SEQ ID NO: 837803 - RNA, 19 nt, Homo sapiens
  misc_RNA (1)...(19): siRNA sense strand
acaauggaccugucagcaa

SEQ ID NO: 837804 - RNA, 19 nt, Homo sapiens
  misc_RNA (1)...(19): siRNA sense strand
ucgaacuggugcuuauaug

SEQ ID NO: 837805 - RNA, 19 nt, Homo sapiens
  misc_RNA (1)...(19): siRNA sense strand
cgugauguacucuuacuau

SEQ ID NO: 837806 - RNA, 19 nt, Homo sapiens
  misc_RNA (1)...(19): siRNA sense strand
aaaagcaguucaacgagaa

SEQ ID NO: 837807 - RNA, 19 nt, Homo sapiens
  misc_RNA (1)...(19): siRNA sense strand
uguaugcugccuuuauauu

SEQ ID NO: 837808 - RNA, 19 nt, Homo sapiens
  misc_RNA (1)...(19): siRNA sense strand
ccggaaguuugccauguuc

SEQ ID NO: 837809 - RNA, 19 nt, Homo sapiens
  misc_RNA (1)...(19): siRNA sense strand
cccggaaguuugccauguu

SEQ ID NO: 837810 - RNA, 19 nt, Homo sapiens
  misc_RNA (1)...(19): siRNA sense strand
ugaggaagcagaagcugau

SEQ ID NO: 837811 - RNA, 19 nt, Homo sapiens
  misc_RNA (1)...(19): siRNA sense strand
gcaccuaaugaauaaacga

SEQ ID NO: 837812 - RNA, 19 nt, Homo sapiens
  misc_RNA (1)...(19): siRNA sense strand
gguccucacucauguaccu

SEQ ID NO: 837813 - RNA, 19 nt, Homo sapiens
  misc_RNA (1)...(19): siRNA sense strand
ggaaguuugccauguucau

SEQ ID NO: 837814 - RNA, 19 nt, Homo sapiens
  misc_RNA (1)...(19): siRNA sense strand
caaauucugggcuuaugca

SEQ ID NO: 837815 - RNA, 19 nt, Homo sapiens
  misc_RNA (1)...(19): siRNA sense strand
guacuccuacaaagacaug

SEQ ID NO: 837816 - RNA, 19 nt, Homo sapiens
  misc_RNA (1)...(19): siRNA sense strand
ucuucgaacuggugcuuau

SEQ ID NO: 837817 - RNA, 19 nt, Homo sapiens
  misc_RNA (1)...(19): siRNA sense strand
ugggcugugugguuaacua

SEQ ID NO: 837818 - RNA, 19 nt, Homo sapiens
  misc_RNA (1)...(19): siRNA sense strand
ccgagucucccggaaguuu

SEQ ID NO: 837819 - RNA, 19 nt, Homo sapiens
  misc_RNA (1)...(19): siRNA sense strand
gaucuuccugcacugguau

SEQ ID NO: 837820 - RNA, 19 nt, Homo sapiens
  misc_RNA (1)...(19): siRNA sense strand
cagcaaauucugggcuuau

SEQ ID NO: 837821 - RNA, 19 nt, Homo sapiens
  misc_RNA (1)...(19): siRNA sense strand
guaccucagcuaccuugug

SEQ ID NO: 837822 - RNA, 19 nt, Homo sapiens
  misc_RNA (1)...(19): siRNA sense strand
gcaaauucugggcuuaugc

SEQ ID NO: 837823 - RNA, 19 nt, Homo sapiens
  misc_RNA (1)...(19): siRNA sense strand
gcaggaaaacuggaagaaa

SEQ ID NO: 837824 - RNA, 19 nt, Homo sapiens
  misc_RNA (1)...(19): siRNA sense strand
cagcuaccuugugcucuuc

SEQ ID NO: 837825 - RNA, 19 nt, Homo sapiens
  misc_RNA (1)...(19): siRNA sense strand
ugucccagaucacucagau

SEQ ID NO: 837826 - RNA, 19 nt, Homo sapiens
  misc_RNA (1)...(19): siRNA sense strand
ggaagaaccuuuaucguuu

SEQ ID NO: 837827 - RNA, 19 nt, Homo sapiens
  misc_RNA (1)...(19): siRNA sense strand
caagugaagucauuucuua

SEQ ID NO: 837828 - RNA, 19 nt, Homo sapiens
  misc_RNA (1)...(19): siRNA sense strand
gaagaaccuuuaucguuua

SEQ ID NO: 837829 - RNA, 19 nt, Homo sapiens
  misc_RNA (1)...(19): siRNA sense strand
cagaagaagugcuaaguuu

SEQ ID NO: 837830 - RNA, 19 nt, Homo sapiens
  misc_RNA (1)...(19): siRNA sense strand
caacuugacuucaucagaa

SEQ ID NO: 837831 - RNA, 19 nt, Homo sapiens
  misc_RNA (1)...(19): siRNA sense strand
ggaaagaagcuauuaaaca

SEQ ID NO: 837832 - RNA, 19 nt, Homo sapiens
  misc_RNA (1)...(19): siRNA sense strand
gugaauugguggaauauuu

SEQ ID NO: 837833 - RNA, 19 nt, Homo sapiens
  misc_RNA (1)...(19): siRNA sense strand
ggaaugcccuuucuauaag

SEQ ID NO: 837834 - RNA, 19 nt, Homo sapiens
  misc_RNA (1)...(19): siRNA sense strand
acaaagacaccuacaguua

SEQ ID NO: 837835 - RNA, 19 nt, Homo sapiens
  misc_RNA (1)...(19): siRNA sense strand
gguggaauauuuacaaaga

SEQ ID NO: 837836 - RNA, 19 nt, Homo sapiens
  misc_RNA (1)...(19): siRNA sense strand
caaccugaguccuaaauug

SEQ ID NO: 837837 - RNA, 19 nt, Homo sapiens
  misc_RNA (1)...(19): siRNA sense strand
gaaguucgcaaucuuugua

SEQ ID NO: 837838 - RNA, 19 nt, Homo sapiens
  misc_RNA (1)...(19): siRNA sense strand
gcuauucacucauuucaau

SEQ ID NO: 837839 - RNA, 19 nt, Homo sapiens
  misc_RNA (1)...(19): siRNA sense strand
ggauagcacuguguauuga

SEQ ID NO: 837840 - RNA, 19 nt, Homo sapiens
  misc_RNA (1)...(19): siRNA sense strand
gagaauagcaucuuucaag

SEQ ID NO: 837841 - RNA, 19 nt, Homo sapiens
  misc_RNA (1)...(19): siRNA sense strand
ccaaaugccucugcuuuau

SEQ ID NO: 837842 - RNA, 19 nt, Homo sapiens
  misc_RNA (1)...(19): siRNA sense strand
uagcaucuuucaagcuuua

SEQ ID NO: 837843 - RNA, 19 nt, Homo sapiens
  misc_RNA (1)...(19): siRNA sense strand
gacgugaauugguggaaua

SEQ ID NO: 837844 - RNA, 19 nt, Homo sapiens
  misc_RNA (1)...(19): siRNA sense strand
gcacaacugacccaacuuu

SEQ ID NO: 837845 - RNA, 19 nt, Homo sapiens
  misc_RNA (1)...(19): siRNA sense strand
ucacagcugucaaacacua

SEQ ID NO: 837846 - RNA, 19 nt, Homo sapiens
  misc_RNA (1)...(19): siRNA sense strand
ggaugaacaccaaacauuu

SEQ ID NO: 837847 - RNA, 19 nt, Homo sapiens
  misc_RNA (1)...(19): siRNA sense strand
gaagaaggauuuguauugc

SEQ ID NO: 837848 - RNA, 19 nt, Homo sapiens
  misc_RNA (1)...(19): siRNA sense strand
caaaacuccuuccuaaaua

SEQ ID NO: 837849 - RNA, 19 nt, Homo sapiens
  misc_RNA (1)...(19): siRNA sense strand
gaagaagugcuaaguuuua

SEQ ID NO: 837850 - RNA, 19 nt, Homo sapiens
  misc_RNA (1)...(19): siRNA sense strand
ugaagaaggauuuguauug

SEQ ID NO: 837851 - RNA, 19 nt, Homo sapiens
  misc_RNA (1)...(19): siRNA sense strand
gaaccuuuaucguuuaucu

SEQ ID NO: 837852 - RNA, 19 nt, Homo sapiens
  misc_RNA (1)...(19): siRNA sense strand
ccacccaaaucauuauuga

SEQ ID NO: 837853 - RNA, 19 nt, Homo sapiens
  misc_RNA (1)...(19): siRNA sense strand
gcauguggauccucaaagu

SEQ ID NO: 837854 - RNA, 19 nt, Homo sapiens
  misc_RNA (1)...(19): siRNA sense strand
gacacuagaacucauuaua

SEQ ID NO: 837855 - RNA, 19 nt, Homo sapiens
  misc_RNA (1)...(19): siRNA sense strand
ggagcaagauuauauuuug

SEQ ID NO: 837856 - RNA, 19 nt, Homo sapiens
  misc_RNA (1)...(19): siRNA sense strand
uggaaugcccuuucuauaa

SEQ ID NO: 837857 - RNA, 19 nt, Homo sapiens
  misc_RNA (1)...(19): siRNA sense strand
gguaaagaaucucauuugg

SEQ ID NO: 837858 - RNA, 19 nt, Homo sapiens
  misc_RNA (1)...(19): siRNA sense strand
gggaaagucugauuacacu

SEQ ID NO: 837859 - RNA, 19 nt, Homo sapiens
  misc_RNA (1)...(19): siRNA sense strand
uuaaucaccuugaggaaga

SEQ ID NO: 837860 - RNA, 19 nt, Homo sapiens
  misc_RNA (1)...(19): siRNA sense strand
cuucauucauguucacuua

SEQ ID NO: 837861 - RNA, 19 nt, Homo sapiens
  misc_RNA (1)...(19): siRNA sense strand
uggaggcguucauauauuu

SEQ ID NO: 837862 - RNA, 19 nt, Homo sapiens
  misc_RNA (1)...(19): siRNA sense strand
uaaaucauguucacaaggu

SEQ ID NO: 837863 - RNA, 19 nt, Homo sapiens
  misc_RNA (1)...(19): siRNA sense strand
gauauuguggcccuuuaua

SEQ ID NO: 837864 - RNA, 19 nt, Homo sapiens
  misc_RNA (1)...(19): siRNA sense strand
gcaggagcuuuacaacgaa

SEQ ID NO: 837865 - RNA, 19 nt, Homo sapiens
  misc_RNA (1)...(19): siRNA sense strand
gcauuuccucugauuauaa

SEQ ID NO: 837866 - RNA, 19 nt, Homo sapiens
  misc_RNA (1)...(19): siRNA sense strand
gaaacuucuucauucaugu

SEQ ID NO: 837867 - RNA, 19 nt, Homo sapiens
  misc_RNA (1)...(19): siRNA sense strand
ccaguguucucucaaguau

SEQ ID NO: 837868 - RNA, 19 nt, Homo sapiens
  misc_RNA (1)...(19): siRNA sense strand
guuacucgguuaucaaguu

SEQ ID NO: 837869 - RNA, 19 nt, Homo sapiens
  misc_RNA (1)...(19): siRNA sense strand
guaaagaaucucauuugga

SEQ ID NO: 837870 - RNA, 19 nt, Homo sapiens
  misc_RNA (1)...(19): siRNA sense strand
ugaucaaagucaagcauuu

SEQ ID NO: 837871 - RNA, 19 nt, Homo sapiens
  misc_RNA (1)...(19): siRNA sense strand
caaaagaaauacuggagaa

SEQ ID NO: 837872 - RNA, 19 nt, Homo sapiens
  misc_RNA (1)...(19): siRNA sense strand
ucaagcauuuccucugauu

SEQ ID NO: 837873 - RNA, 19 nt, Homo sapiens
  misc_RNA (1)...(19): siRNA sense strand
aagaaauacuggagaauag

SEQ ID NO: 837874 - RNA, 19 nt, Homo sapiens
  misc_RNA (1)...(19): siRNA sense strand
aaaguagccuguugcugaa

SEQ ID NO: 837875 - RNA, 19 nt, Homo sapiens
  misc_RNA (1)...(19): siRNA sense strand
gaagauauccauaaaagga

SEQ ID NO: 837876 - RNA, 19 nt, Homo sapiens
  misc_RNA (1)...(19): siRNA sense strand
auagagcucuggcugcuuu

SEQ ID NO: 837877 - RNA, 19 nt, Homo sapiens
  misc_RNA (1)...(19): siRNA sense strand
gcuuuaugcuuucaguuug

SEQ ID NO: 837878 - RNA, 19 nt, Homo sapiens
  misc_RNA (1)...(19): siRNA sense strand
guucauugguugcaagaau

SEQ ID NO: 837879 - RNA, 19 nt, Homo sapiens
  misc_RNA (1)...(19): siRNA sense strand
ggaccaguguucucucaag

SEQ ID NO: 837880 - RNA, 19 nt, Homo sapiens
  misc_RNA (1)...(19): siRNA sense strand
caaaugccucugcuuuauu

SEQ ID NO: 837881 - RNA, 19 nt, Homo sapiens
  misc_RNA (1)...(19): siRNA sense strand
gggcacaacugacccaacu

SEQ ID NO: 837882 - RNA, 19 nt, Homo sapiens
  misc_RNA (1)...(19): siRNA sense strand
aauagcaucuuucaagcuu

SEQ ID NO: 837883 - RNA, 19 nt, Homo sapiens
  misc_RNA (1)...(19): siRNA sense strand
guauugccauccacagcua

SEQ ID NO: 837884 - RNA, 19 nt, Homo sapiens
  misc_RNA (1)...(19): siRNA sense strand
gaugaagaaggauuuguau

SEQ ID NO: 837885 - RNA, 19 nt, Homo sapiens
  misc_RNA (1)...(19): siRNA sense strand
ccacagcuaaugaagauau

SEQ ID NO: 837886 - RNA, 19 nt, Homo sapiens
  misc_RNA (1)...(19): siRNA sense strand
aaacaaagacaccuacagu

SEQ ID NO: 837887 - RNA, 19 nt, Homo sapiens
  misc_RNA (1)...(19): siRNA sense strand
cagaaaagguggcauggaa

SEQ ID NO: 837888 - RNA, 19 nt, Homo sapiens
  misc_RNA (1)...(19): siRNA sense strand
gcuaaugaagauauccaua

SEQ ID NO: 837889 - RNA, 19 nt, Homo sapiens
  misc_RNA (1)...(19): siRNA sense strand
caagguaaagaaucucauu

SEQ ID NO: 837890 - RNA, 19 nt, Homo sapiens
  misc_RNA (1)...(19): siRNA sense strand
agucaagcauuuccucuga

SEQ ID NO: 837891 - RNA, 19 nt, Homo sapiens
  misc_RNA (1)...(19): siRNA sense strand
ugaggagagucagauguuu

SEQ ID NO: 837892 - RNA, 19 nt, Homo sapiens
  misc_RNA (1)...(19): siRNA sense strand
cacguuggauccugaaguu

SEQ ID NO: 837893 - RNA, 19 nt, Homo sapiens
  misc_RNA (1)...(19): siRNA sense strand
cauggaaguucgcaaucuu

SEQ ID NO: 837894 - RNA, 19 nt, Homo sapiens
  misc_RNA (1)...(19): siRNA sense strand
gcauggaaguucgcaaucu

SEQ ID NO: 837895 - RNA, 19 nt, Homo sapiens
  misc_RNA (1)...(19): siRNA sense strand
gcaacuugacuucaucaga

SEQ ID NO: 837896 - RNA, 19 nt, Homo sapiens
  misc_RNA (1)...(19): siRNA sense strand
caccaaaugccucugcuuu

SEQ ID NO: 837897 - RNA, 19 nt, Homo sapiens
  misc_RNA (1)...(19): siRNA sense strand
caaagacaccuacaguuac

SEQ ID NO: 837898 - RNA, 19 nt, Homo sapiens
  misc_RNA (1)...(19): siRNA sense strand
guccaaaacuccuuccuaa

SEQ ID NO: 837899 - RNA, 19 nt, Homo sapiens
  misc_RNA (1)...(19): siRNA sense strand
aggaagaaccuuuaucguu

SEQ ID NO: 837900 - RNA, 19 nt, Homo sapiens
  misc_RNA (1)...(19): siRNA sense strand
guuaucaaguuguucagau

SEQ ID NO: 837901 - RNA, 19 nt, Homo sapiens
  misc_RNA (1)...(19): siRNA sense strand
auagauaugugaagauugg

SEQ ID NO: 837902 - RNA, 19 nt, Homo sapiens
  misc_RNA (1)...(19): siRNA sense strand
gcugcaagguaaagaaucu

SEQ ID NO: 837903 - RNA, 19 nt, Homo sapiens
  misc_RNA (1)...(19): siRNA sense strand
gaucaaagucaagcauuuc

SEQ ID NO: 837904 - RNA, 19 nt, Homo sapiens
  misc_RNA (1)...(19): siRNA sense strand
gcgacaggcuugaacaaaa

SEQ ID NO: 837905 - RNA, 19 nt, Homo sapiens
  misc_RNA (1)...(19): siRNA sense strand
caacuuuucccuaucaaua

SEQ ID NO: 837906 - RNA, 19 nt, Homo sapiens
  misc_RNA (1)...(19): siRNA sense strand
cgcaaucuuuguauucuug

SEQ ID NO: 837907 - RNA, 19 nt, Homo sapiens
  misc_RNA (1)...(19): siRNA sense strand
gaaauacuggagaauagca

SEQ ID NO: 837908 - RNA, 19 nt, Homo sapiens
  misc_RNA (1)...(19): siRNA sense strand
uauggcagcaggagcuuua

SEQ ID NO: 837909 - RNA, 19 nt, Homo sapiens
  misc_RNA (1)...(19): siRNA sense strand
agcaggagcuuuacaacga

SEQ ID NO: 837910 - RNA, 19 nt, Homo sapiens
  misc_RNA (1)...(19): siRNA sense strand
aaucucauuuggacacauu

SEQ ID NO: 837911 - RNA, 19 nt, Homo sapiens
  misc_RNA (1)...(19): siRNA sense strand
ccugaguccuaaauugauu

SEQ ID NO: 837912 - RNA, 19 nt, Homo sapiens
  misc_RNA (1)...(19): siRNA sense strand
ccucacagcugucaaacac

SEQ ID NO: 837913 - RNA, 19 nt, Homo sapiens
  misc_RNA (1)...(19): siRNA sense strand
cuaguuuagugacugcuuu

SEQ ID NO: 837914 - RNA, 19 nt, Homo sapiens
  misc_RNA (1)...(19): siRNA sense strand
aaagacaccuacaguuacu

SEQ ID NO: 837915 - RNA, 19 nt, Homo sapiens
  misc_RNA (1)...(19): siRNA sense strand
cuaaauaucaagugaaguc

SEQ ID NO: 837916 - RNA, 19 nt, Homo sapiens
  misc_RNA (1)...(19): siRNA sense strand
cauuugggaaacucaauua

SEQ ID NO: 837917 - RNA, 19 nt, Homo sapiens
  misc_RNA (1)...(19): siRNA sense strand
gcagggucauggaguacug

SEQ ID NO: 837918 - RNA, 19 nt, Homo sapiens
  misc_RNA (1)...(19): siRNA sense strand
uugcaggcauguacugaaa

SEQ ID NO: 837919 - RNA, 19 nt, Homo sapiens
  misc_RNA (1)...(19): siRNA sense strand
gaccaguguucucucaagu

SEQ ID NO: 837920 - RNA, 19 nt, Homo sapiens
  misc_RNA (1)...(19): siRNA sense strand
ggagcuuuacaacgaauuu

SEQ ID NO: 837921 - RNA, 19 nt, Homo sapiens
  misc_RNA (1)...(19): siRNA sense strand
uggaugaacaccaaacauu

SEQ ID NO: 837922 - RNA, 19 nt, Homo sapiens
  misc_RNA (1)...(19): siRNA sense strand
uugacacccuauuguuaua

SEQ ID NO: 837923 - RNA, 19 nt, Homo sapiens
  misc_RNA (1)...(19): siRNA sense strand
guugacacccuauuguuau

SEQ ID NO: 837924 - RNA, 19 nt, Homo sapiens
  misc_RNA (1)...(19): siRNA sense strand
uucaacggcugcaagguaa

SEQ ID NO: 837925 - RNA, 19 nt, Homo sapiens
  misc_RNA (1)...(19): siRNA sense strand
caagcauuuccucugauua

SEQ ID NO: 837926 - RNA, 19 nt, Homo sapiens
  misc_RNA (1)...(19): siRNA sense strand
gaaagcauguguucaaagc

SEQ ID NO: 837927 - RNA, 19 nt, Homo sapiens
  misc_RNA (1)...(19): siRNA sense strand
gggacuagcuggugauuac

SEQ ID NO: 837928 - RNA, 19 nt, Homo sapiens
  misc_RNA (1)...(19): siRNA sense strand
gggaaagcauguguucaaa

SEQ ID NO: 837929 - RNA, 19 nt, Homo sapiens
  misc_RNA (1)...(19): siRNA sense strand
guucaaagccauucugaug

SEQ ID NO: 837930 - RNA, 19 nt, Homo sapiens
  misc_RNA (1)...(19): siRNA sense strand
gacacuggaugccuggauu

SEQ ID NO: 837931 - RNA, 19 nt, Homo sapiens
  misc_RNA (1)...(19): siRNA sense strand
gccugaagcuugucaucuu

SEQ ID NO: 837932 - RNA, 19 nt, Homo sapiens
  misc_RNA (1)...(19): siRNA sense strand
gaagagagaagccccaguu

SEQ ID NO: 837933 - RNA, 19 nt, Homo sapiens
  misc_RNA (1)...(19): siRNA sense strand
ggaaagcauguguucaaag

SEQ ID NO: 837934 - RNA, 19 nt, Homo sapiens
  misc_RNA (1)...(19): siRNA sense strand
ccaccaggccaacagaaga

SEQ ID NO: 837935 - RNA, 19 nt, Homo sapiens
  misc_RNA (1)...(19): siRNA sense strand
ggccaucucaucagccauu

SEQ ID NO: 837936 - RNA, 19 nt, Homo sapiens
  misc_RNA (1)...(19): siRNA sense strand
ccauuucuguggccuucuu

SEQ ID NO: 837937 - RNA, 19 nt, Homo sapiens
  misc_RNA (1)...(19): siRNA sense strand
gcugaaugccuugggacua

SEQ ID NO: 837938 - RNA, 19 nt, Homo sapiens
  misc_RNA (1)...(19): siRNA sense strand
gagagaagccccaguugau

SEQ ID NO: 837939 - RNA, 19 nt, Homo sapiens
  misc_RNA (1)...(19): siRNA sense strand
gcaccaccaggccaacaga

SEQ ID NO: 837940 - RNA, 19 nt, Homo sapiens
  misc_RNA (1)...(19): siRNA sense strand
ucuacuggcugcugucucu

SEQ ID NO: 837941 - RNA, 19 nt, Homo sapiens
  misc_RNA (1)...(19): siRNA sense strand
cugaaugccuugggacuag

SEQ ID NO: 837942 - RNA, 19 nt, Homo sapiens
  misc_RNA (1)...(19): siRNA sense strand
uggccuugcugauccucua

SEQ ID NO: 837943 - RNA, 19 nt, Homo sapiens
  misc_RNA (1)...(19): siRNA sense strand
ggacacuggaugccuggau

SEQ ID NO: 837944 - RNA, 19 nt, Homo sapiens
  misc_RNA (1)...(19): siRNA sense strand
ggauugggccagagaccau

SEQ ID NO: 837945 - RNA, 19 nt, Homo sapiens
  misc_RNA (1)...(19): siRNA sense strand
guugugggccaucucauca

SEQ ID NO: 837946 - RNA, 19 nt, Homo sapiens
  misc_RNA (1)...(19): siRNA sense strand
gccaucucaucagccauuu

SEQ ID NO: 837947 - RNA, 19 nt, Homo sapiens
  misc_RNA (1)...(19): siRNA sense strand
ucucaucagccauuucugu

SEQ ID NO: 837948 - RNA, 19 nt, Homo sapiens
  misc_RNA (1)...(19): siRNA sense strand
gauggaaguucaacaagua

SEQ ID NO: 837949 - RNA, 19 nt, Homo sapiens
  misc_RNA (1)...(19): siRNA sense strand
gagaacaacaugagauuaa

SEQ ID NO: 837950 - RNA, 19 nt, Homo sapiens
  misc_RNA (1)...(19): siRNA sense strand
gaaaagaccccucaucgua

SEQ ID NO: 837951 - RNA, 19 nt, Homo sapiens
  misc_RNA (1)...(19): siRNA sense strand
caggcaagcuuuaccagua

SEQ ID NO: 837952 - RNA, 19 nt, Homo sapiens
  misc_RNA (1)...(19): siRNA sense strand
ugaaacugauguaagagua

SEQ ID NO: 837953 - RNA, 19 nt, Homo sapiens
  misc_RNA (1)...(19): siRNA sense strand
gaauggagauaaugaucga

SEQ ID NO: 837954 - RNA, 19 nt, Homo sapiens
  misc_RNA (1)...(19): siRNA sense strand
ggaaaaugauggaaaagaa

SEQ ID NO: 837955 - RNA, 19 nt, Homo sapiens
  misc_RNA (1)...(19): siRNA sense strand
uaaacagaaccaugacuua

SEQ ID NO: 837956 - RNA, 19 nt, Homo sapiens
  misc_RNA (1)...(19): siRNA sense strand
aaccaugacuuaacgcaua

SEQ ID NO: 837957 - RNA, 19 nt, Homo sapiens
  misc_RNA (1)...(19): siRNA sense strand
aaaggaagauacaacaugu

SEQ ID NO: 837958 - RNA, 19 nt, Homo sapiens
  misc_RNA (1)...(19): siRNA sense strand
gaaacugauguaagaguaa

SEQ ID NO: 837959 - RNA, 19 nt, Homo sapiens
  misc_RNA (1)...(19): siRNA sense strand
aaacagaaccaugacuuaa

SEQ ID NO: 837960 - RNA, 19 nt, Homo sapiens
  misc_RNA (1)...(19): siRNA sense strand
aggcagaggccaugaauaa

SEQ ID NO: 837961 - RNA, 19 nt, Homo sapiens
  misc_RNA (1)...(19): siRNA sense strand
guagauggguuaaggaaaa

SEQ ID NO: 837962 - RNA, 19 nt, Homo sapiens
  misc_RNA (1)...(19): siRNA sense strand
ccaguaaugccuuuagaaa

SEQ ID NO: 837963 - RNA, 19 nt, Homo sapiens
  misc_RNA (1)...(19): siRNA sense strand
gacagagaauggagauaau

SEQ ID NO: 837964 - RNA, 19 nt, Homo sapiens
  misc_RNA (1)...(19): siRNA sense strand
uguugaaacugauguaaga

SEQ ID NO: 837965 - RNA, 19 nt, Homo sapiens
  misc_RNA (1)...(19): siRNA sense strand
gaagauacaacauguuacu

SEQ ID NO: 837966 - RNA, 19 nt, Homo sapiens
  misc_RNA (1)...(19): siRNA sense strand
ugacuuaacgcauaggaaa

SEQ ID NO: 837967 - RNA, 19 nt, Homo sapiens
  misc_RNA (1)...(19): siRNA sense strand
agacagagaauggagauaa

SEQ ID NO: 837968 - RNA, 19 nt, Homo sapiens
  misc_RNA (1)...(19): siRNA sense strand
ccaauuugccugugaacaa

SEQ ID NO: 837969 - RNA, 19 nt, Homo sapiens
  misc_RNA (1)...(19): siRNA sense strand
acauagcuguugaaacuga

SEQ ID NO: 837970 - RNA, 19 nt, Homo sapiens
  misc_RNA (1)...(19): siRNA sense strand
aggaagauacaacauguua

SEQ ID NO: 837971 - RNA, 19 nt, Homo sapiens
  misc_RNA (1)...(19): siRNA sense strand
cuacuccagugaaguuaaa

SEQ ID NO: 837972 - RNA, 19 nt, Homo sapiens
  misc_RNA (1)...(19): siRNA sense strand
ggagauaaugaucgacuga

SEQ ID NO: 837973 - RNA, 19 nt, Homo sapiens
  misc_RNA (1)...(19): siRNA sense strand
gggauuugccgaagaauag

SEQ ID NO: 837974 - RNA, 19 nt, Homo sapiens
  misc_RNA (1)...(19): siRNA sense strand
caauuugccugugaacaau

SEQ ID NO: 837975 - RNA, 19 nt, Homo sapiens
  misc_RNA (1)...(19): siRNA sense strand
ucaacaaguacaagcauaa

SEQ ID NO: 837976 - RNA, 19 nt, Homo sapiens
  misc_RNA (1)...(19): siRNA sense strand
gauguaagaguaaacaaag

SEQ ID NO: 837977 - RNA, 19 nt, Homo sapiens
  misc_RNA (1)...(19): siRNA sense strand
caacaaguacaagcauaaa

SEQ ID NO: 837978 - RNA, 19 nt, Homo sapiens
  misc_RNA (1)...(19): siRNA sense strand
agagggauuugccgaagaa

SEQ ID NO: 837979 - RNA, 19 nt, Homo sapiens
  misc_RNA (1)...(19): siRNA sense strand
cggaacacaauaauaauga

SEQ ID NO: 837980 - RNA, 19 nt, Homo sapiens
  misc_RNA (1)...(19): siRNA sense strand
gagaauggagauaaugauc

SEQ ID NO: 837981 - RNA, 19 nt, Homo sapiens
  misc_RNA (1)...(19): siRNA sense strand
cagagaauggagauaauga

SEQ ID NO: 837982 - RNA, 19 nt, Homo sapiens
  misc_RNA (1)...(19): siRNA sense strand
uaaugacgcuaaacagaac

SEQ ID NO: 837983 - RNA, 19 nt, Homo sapiens
  misc_RNA (1)...(19): siRNA sense strand
gaaaagagaacaacaugag

SEQ ID NO: 837984 - RNA, 19 nt, Homo sapiens
  misc_RNA (1)...(19): siRNA sense strand
ggaaguucaacaaguacaa

SEQ ID NO: 837985 - RNA, 19 nt, Homo sapiens
  misc_RNA (1)...(19): siRNA sense strand
ugauggaaguucaacaagu

SEQ ID NO: 837986 - RNA, 19 nt, Homo sapiens
  misc_RNA (1)...(19): siRNA sense strand
caaauuccucuucgagugu

SEQ ID NO: 837987 - RNA, 19 nt, Homo sapiens
  misc_RNA (1)...(19): siRNA sense strand
ggaacacaauaauaaugac

SEQ ID NO: 837988 - RNA, 19 nt, Homo sapiens
  misc_RNA (1)...(19): siRNA sense strand
uaaaaggaguagcacugua

SEQ ID NO: 837989 - RNA, 19 nt, Homo sapiens
  misc_RNA (1)...(19): siRNA sense strand
aauaaugacgcuaaacaga

SEQ ID NO: 837990 - RNA, 19 nt, Homo sapiens
  misc_RNA (1)...(19): siRNA sense strand
cagagggauuugccgaaga

SEQ ID NO: 837991 - RNA, 19 nt, Homo sapiens
  misc_RNA (1)...(19): siRNA sense strand
aaagagaacaacaugagau

SEQ ID NO: 837992 - RNA, 19 nt, Homo sapiens
  misc_RNA (1)...(19): siRNA sense strand
cuaaacagaaccaugacuu

SEQ ID NO: 837993 - RNA, 19 nt, Homo sapiens
  misc_RNA (1)...(19): siRNA sense strand
auaaugacgcuaaacagaa

SEQ ID NO: 837994 - RNA, 19 nt, Homo sapiens
  misc_RNA (1)...(19): siRNA sense strand
cguauuugauggaaguuca

SEQ ID NO: 837995 - RNA, 19 nt, Homo sapiens
  misc_RNA (1)...(19): siRNA sense strand
agagaacaacaugagauua

SEQ ID NO: 837996 - RNA, 19 nt, Homo sapiens
  misc_RNA (1)...(19): siRNA sense strand
agauacaacauguuacuug

SEQ ID NO: 837997 - RNA, 19 nt, Homo sapiens
  misc_RNA (1)...(19): siRNA sense strand
guacaagcauaaaagugaa

SEQ ID NO: 837998 - RNA, 19 nt, Homo sapiens
  misc_RNA (1)...(19): siRNA sense strand
ggccaugaauaaccugaag

SEQ ID NO: 837999 - RNA, 19 nt, Homo sapiens
  misc_RNA (1)...(19): siRNA sense strand
uaccaguaaugccuuuaga

SEQ ID NO: 838000 - RNA, 19 nt, Homo sapiens
  misc_RNA (1)...(19): siRNA sense strand
aagagaacaacaugagauu

SEQ ID NO: 838001 - RNA, 19 nt, Homo sapiens
  misc_RNA (1)...(19): siRNA sense strand
gaggcagaggccaugaaua

SEQ ID NO: 838002 - RNA, 19 nt, Homo sapiens
  misc_RNA (1)...(19): siRNA sense strand
gaagaggcagaggccauga

SEQ ID NO: 838003 - RNA, 19 nt, Homo sapiens
  misc_RNA (1)...(19): siRNA sense strand
gagauaaugaucgacugaa

SEQ ID NO: 838004 - RNA, 19 nt, Homo sapiens
  misc_RNA (1)...(19): siRNA sense strand
acgcuaaacagaaccauga

SEQ ID NO: 838005 - RNA, 19 nt, Homo sapiens
  misc_RNA (1)...(19): siRNA sense strand
uucaacaaguacaagcaua

SEQ ID NO: 838006 - RNA, 19 nt, Homo sapiens
  misc_RNA (1)...(19): siRNA sense strand
acagaaccaugacuuaacg

SEQ ID NO: 838007 - RNA, 19 nt, Homo sapiens
  misc_RNA (1)...(19): siRNA sense strand
agauaaugaucgacugaag

SEQ ID NO: 838008 - RNA, 19 nt, Homo sapiens
  misc_RNA (1)...(19): siRNA sense strand
gcagaggccaugaauaacc

SEQ ID NO: 838009 - RNA, 19 nt, Homo sapiens
  misc_RNA (1)...(19): siRNA sense strand
aaagaccccucaucguauu

SEQ ID NO: 838010 - RNA, 19 nt, Homo sapiens
  misc_RNA (1)...(19): siRNA sense strand
gaaguucaacaaguacaag

SEQ ID NO: 838011 - RNA, 19 nt, Homo sapiens
  misc_RNA (1)...(19): siRNA sense strand
gcuguugaaacugauguaa

SEQ ID NO: 838012 - RNA, 19 nt, Homo sapiens
  misc_RNA (1)...(19): siRNA sense strand
ugaagucgccaccauuguc

SEQ ID NO: 838013 - RNA, 19 nt, Homo sapiens
  misc_RNA (1)...(19): siRNA sense strand
caauaaaacggaacacaau

SEQ ID NO: 838014 - RNA, 19 nt, Homo sapiens
  misc_RNA (1)...(19): siRNA sense strand
guaagaguaaacaaagaca

SEQ ID NO: 838015 - RNA, 19 nt, Homo sapiens
  misc_RNA (1)...(19): siRNA sense strand
ggaagauacaacauguuac

SEQ ID NO: 838016 - RNA, 19 nt, Homo sapiens
  misc_RNA (1)...(19): siRNA sense strand
ggaaaagaaaagagaacaa

SEQ ID NO: 838017 - RNA, 19 nt, Homo sapiens
  misc_RNA (1)...(19): siRNA sense strand
cagaggccaugaauaaccu

SEQ ID NO: 838018 - RNA, 19 nt, Homo sapiens
  misc_RNA (1)...(19): siRNA sense strand
gaaggaagauucacacugu

SEQ ID NO: 838019 - RNA, 19 nt, Homo sapiens
  misc_RNA (1)...(19): siRNA sense strand
gaaaguagaugauuuaccu

SEQ ID NO: 838020 - RNA, 19 nt, Homo sapiens
  misc_RNA (1)...(19): siRNA sense strand
gugcauuacucacuaaaua

SEQ ID NO: 838021 - RNA, 19 nt, Homo sapiens
  misc_RNA (1)...(19): siRNA sense strand
uaacucagcuuguggauuc

SEQ ID NO: 838022 - RNA, 19 nt, Homo sapiens
  misc_RNA (1)...(19): siRNA sense strand
gauucacacuguaacauua

SEQ ID NO: 838023 - RNA, 19 nt, Homo sapiens
  misc_RNA (1)...(19): siRNA sense strand
cuaaaugccuguaagauug

SEQ ID NO: 838024 - RNA, 19 nt, Homo sapiens
  misc_RNA (1)...(19): siRNA sense strand
acacugagaucuuugguuu

SEQ ID NO: 838025 - RNA, 19 nt, Homo sapiens
  misc_RNA (1)...(19): siRNA sense strand
aagaagauauugcuccaua

SEQ ID NO: 838026 - RNA, 19 nt, Homo sapiens
  misc_RNA (1)...(19): siRNA sense strand
gaacacaugccuucaggaa

SEQ ID NO: 838027 - RNA, 19 nt, Homo sapiens
  misc_RNA (1)...(19): siRNA sense strand
gcagacacuuccaauaugu

SEQ ID NO: 838028 - RNA, 19 nt, Homo sapiens
  misc_RNA (1)...(19): siRNA sense strand
gauagaacacugucuuaaa

SEQ ID NO: 838029 - RNA, 19 nt, Homo sapiens
  misc_RNA (1)...(19): siRNA sense strand
gcugaaaguagaugauuua

SEQ ID NO: 838030 - RNA, 19 nt, Homo sapiens
  misc_RNA (1)...(19): siRNA sense strand
gcacgaaugcuacuucaga

SEQ ID NO: 838031 - RNA, 19 nt, Homo sapiens
  misc_RNA (1)...(19): siRNA sense strand
ugaguuggaugcugauaaa

SEQ ID NO: 838032 - RNA, 19 nt, Homo sapiens
  misc_RNA (1)...(19): siRNA sense strand
ggaagaaauauguagauga

SEQ ID NO: 838033 - RNA, 19 nt, Homo sapiens
  misc_RNA (1)...(19): siRNA sense strand
gcaaaaugguguuaaaguu

SEQ ID NO: 838034 - RNA, 19 nt, Homo sapiens
  misc_RNA (1)...(19): siRNA sense strand
gaagaaauaaugacccaau

SEQ ID NO: 838035 - RNA, 19 nt, Homo sapiens
  misc_RNA (1)...(19): siRNA sense strand
agaugaaacuucugaauca

SEQ ID NO: 838036 - RNA, 19 nt, Homo sapiens
  misc_RNA (1)...(19): siRNA sense strand
gcaaaccauaggugcauua

SEQ ID NO: 838037 - RNA, 19 nt, Homo sapiens
  misc_RNA (1)...(19): siRNA sense strand
ccuguaagauuggagguua

SEQ ID NO: 838038 - RNA, 19 nt, Homo sapiens
  misc_RNA (1)...(19): siRNA sense strand
guaacauuauucacacuga

SEQ ID NO: 838039 - RNA, 19 nt, Homo sapiens
  misc_RNA (1)...(19): siRNA sense strand
cagaggaaaugauagaaca

SEQ ID NO: 838040 - RNA, 19 nt, Homo sapiens
  misc_RNA (1)...(19): siRNA sense strand
uagcagacacuuccaauau

SEQ ID NO: 838041 - RNA, 19 nt, Homo sapiens
  misc_RNA (1)...(19): siRNA sense strand
gaaguggacagaagaagau

SEQ ID NO: 838042 - RNA, 19 nt, Homo sapiens
  misc_RNA (1)...(19): siRNA sense strand
uugaucagcuuaaggguuu

SEQ ID NO: 838043 - RNA, 19 nt, Homo sapiens
  misc_RNA (1)...(19): siRNA sense strand
ggaaugguaacuagucuug

SEQ ID NO: 838044 - RNA, 19 nt, Homo sapiens
  misc_RNA (1)...(19): siRNA sense strand
gggaagaaauauguagaug

SEQ ID NO: 838045 - RNA, 19 nt, Homo sapiens
  misc_RNA (1)...(19): siRNA sense strand
caacugaagauuugcuuga

SEQ ID NO: 838046 - RNA, 19 nt, Homo sapiens
  misc_RNA (1)...(19): siRNA sense strand
agacguagacccaaguuaa

SEQ ID NO: 838047 - RNA, 19 nt, Homo sapiens
  misc_RNA (1)...(19): siRNA sense strand
ugaaacuucugaaucaugu

SEQ ID NO: 838048 - RNA, 19 nt, Homo sapiens
  misc_RNA (1)...(19): siRNA sense strand
ggagccagaggaaaugaua

SEQ ID NO: 838049 - RNA, 19 nt, Homo sapiens
  misc_RNA (1)...(19): siRNA sense strand
gagaugaaacuucugaauc

SEQ ID NO: 838050 - RNA, 19 nt, Homo sapiens
  misc_RNA (1)...(19): siRNA sense strand
gaaggaaugguaacuaguc

SEQ ID NO: 838051 - RNA, 19 nt, Homo sapiens
  misc_RNA (1)...(19): siRNA sense strand
ggagagaagcaaaccauag

SEQ ID NO: 838052 - RNA, 19 nt, Homo sapiens
  misc_RNA (1)...(19): siRNA sense strand
gagaaggauucaaauagcu

SEQ ID NO: 838053 - RNA, 19 nt, Homo sapiens
  misc_RNA (1)...(19): siRNA sense strand
ggcaagugaggaagaaaua

SEQ ID NO: 838054 - RNA, 19 nt, Homo sapiens
  misc_RNA (1)...(19): siRNA sense strand
aaacauacgacuugaagau

SEQ ID NO: 838055 - RNA, 19 nt, Homo sapiens
  misc_RNA (1)...(19): siRNA sense strand
guuuagcgcugguggauag

SEQ ID NO: 838056 - RNA, 19 nt, Homo sapiens
  misc_RNA (1)...(19): siRNA sense strand
gcaagugaggaagaaauaa

SEQ ID NO: 838057 - RNA, 19 nt, Homo sapiens
  misc_RNA (1)...(19): siRNA sense strand
gcugugcaguaaagacaaa

SEQ ID NO: 838058 - RNA, 19 nt, Homo sapiens
  misc_RNA (1)...(19): siRNA sense strand
uagaugaaggcgaaguuua

SEQ ID NO: 838059 - RNA, 19 nt, Homo sapiens
  misc_RNA (1)...(19): siRNA sense strand
agaacacugucuuaaaugu

SEQ ID NO: 838060 - RNA, 19 nt, Homo sapiens
  misc_RNA (1)...(19): siRNA sense strand
gaggauggacacagucuug

SEQ ID NO: 838061 - RNA, 19 nt, Homo sapiens
  misc_RNA (1)...(19): siRNA sense strand
ggaaaugauagaacacugu

SEQ ID NO: 838062 - RNA, 19 nt, Homo sapiens
  misc_RNA (1)...(19): siRNA sense strand
gacguagacccaaguuaaa

SEQ ID NO: 838063 - RNA, 19 nt, Homo sapiens
  misc_RNA (1)...(19): siRNA sense strand
gcagcagaguguuccugaa

SEQ ID NO: 838064 - RNA, 19 nt, Homo sapiens
  misc_RNA (1)...(19): siRNA sense strand
guuggaugcugauaaaaua

SEQ ID NO: 838065 - RNA, 19 nt, Homo sapiens
  misc_RNA (1)...(19): siRNA sense strand
ggaauuaagaagacguaga

SEQ ID NO: 838066 - RNA, 19 nt, Homo sapiens
  misc_RNA (1)...(19): siRNA sense strand
gaaugcuacuucagaaugc

SEQ ID NO: 838067 - RNA, 19 nt, Homo sapiens
  misc_RNA (1)...(19): siRNA sense strand
acacaugccuucaggaacu

SEQ ID NO: 838068 - RNA, 19 nt, Homo sapiens
  misc_RNA (1)...(19): siRNA sense strand
ucuaaaugccuguaagauu

SEQ ID NO: 838069 - RNA, 19 nt, Homo sapiens
  misc_RNA (1)...(19): siRNA sense strand
gaagauucacacuguaaca

SEQ ID NO: 838070 - RNA, 19 nt, Homo sapiens
  misc_RNA (1)...(19): siRNA sense strand
caagauuuguguggagaga

SEQ ID NO: 838071 - RNA, 19 nt, Homo sapiens
  misc_RNA (1)...(19): siRNA sense strand
ugauuuaccugaggauaau

SEQ ID NO: 838072 - RNA, 19 nt, Homo sapiens
  misc_RNA (1)...(19): siRNA sense strand
ggagguuauuggaggauuc

SEQ ID NO: 838073 - RNA, 19 nt, Homo sapiens
  misc_RNA (1)...(19): siRNA sense strand
gaauuaagaagacguagac

SEQ ID NO: 838074 - RNA, 19 nt, Homo sapiens
  misc_RNA (1)...(19): siRNA sense strand
ggagaaguggacagaagaa

SEQ ID NO: 838075 - RNA, 19 nt, Homo sapiens
  misc_RNA (1)...(19): siRNA sense strand
aagcugugcugugcaguaa

SEQ ID NO: 838076 - RNA, 19 nt, Homo sapiens
  misc_RNA (1)...(19): siRNA sense strand
gaugaaggcgaaguuuauu

SEQ ID NO: 838077 - RNA, 19 nt, Homo sapiens
  misc_RNA (1)...(19): siRNA sense strand
gcagaucgccaagcugaau

SEQ ID NO: 838078 - RNA, 19 nt, Homo sapiens
  misc_RNA (1)...(19): siRNA sense strand
caagugaggaagaaauaau

SEQ ID NO: 838079 - RNA, 19 nt, Homo sapiens
  misc_RNA (1)...(19): siRNA sense strand
cugaagauuugcuugauca

SEQ ID NO: 838080 - RNA, 19 nt, Homo sapiens
  misc_RNA (1)...(19): siRNA sense strand
gcaguaaagacaaaacaua

SEQ ID NO: 838081 - RNA, 19 nt, Homo sapiens
  misc_RNA (1)...(19): siRNA sense strand
cgaaugcuacuucagaaug

SEQ ID NO: 838082 - RNA, 19 nt, Homo sapiens
  misc_RNA (1)...(19): siRNA sense strand
aaccauaggugcauuacuc

SEQ ID NO: 838083 - RNA, 19 nt, Homo sapiens
  misc_RNA (1)...(19): siRNA sense strand
gaagacguagacccaaguu

SEQ ID NO: 838084 - RNA, 19 nt, Homo sapiens
  misc_RNA (1)...(19): siRNA sense strand
gaugcaaaaugguguuaaa

SEQ ID NO: 838085 - RNA, 19 nt, Homo sapiens
  misc_RNA (1)...(19): siRNA sense strand
caaucucgcugaguuucaa

SEQ ID NO: 838086 - RNA, 19 nt, Homo sapiens
  misc_RNA (1)...(19): siRNA sense strand
cacgaaugcuacuucagaa

SEQ ID NO: 838087 - RNA, 19 nt, Homo sapiens
  misc_RNA (1)...(19): siRNA sense strand
gcugugcugugcaguaaag

SEQ ID NO: 838088 - RNA, 19 nt, Homo sapiens
  misc_RNA (1)...(19): siRNA sense strand
gcuggaggauggacacagu

SEQ ID NO: 838089 - RNA, 19 nt, Homo sapiens
  misc_RNA (1)...(19): siRNA sense strand
acauacgacuugaagauag

SEQ ID NO: 838090 - RNA, 19 nt, Homo sapiens
  misc_RNA (1)...(19): siRNA sense strand
ggacagaagaagauauugc

SEQ ID NO: 838091 - RNA, 19 nt, Homo sapiens
  misc_RNA (1)...(19): siRNA sense strand
uuucauuccugguuguaaa

SEQ ID NO: 838092 - RNA, 19 nt, Homo sapiens
  misc_RNA (1)...(19): siRNA sense strand
gagagaagcaaaccauagg

SEQ ID NO: 838093 - RNA, 19 nt, Homo sapiens
  misc_RNA (1)...(19): siRNA sense strand
aagagaaggauucaaauag

SEQ ID NO: 838094 - RNA, 19 nt, Homo sapiens
  misc_RNA (1)...(19): siRNA sense strand
guagacccaaguuaaagaa

SEQ ID NO: 838095 - RNA, 19 nt, Homo sapiens
  misc_RNA (1)...(19): siRNA sense strand
caagcugugcugugcagua

SEQ ID NO: 838096 - RNA, 19 nt, Homo sapiens
  misc_RNA (1)...(19): siRNA sense strand
cugaaggaaugguaacuag

SEQ ID NO: 838097 - RNA, 19 nt, Homo sapiens
  misc_RNA (1)...(19): siRNA sense strand
guagaugaaggcgaaguuu

SEQ ID NO: 838098 - RNA, 19 nt, Homo sapiens
  misc_RNA (1)...(19): siRNA sense strand
guuaugggaagaaauaugu

SEQ ID NO: 838099 - RNA, 19 nt, Homo sapiens
  misc_RNA (1)...(19): siRNA sense strand
gaaucauggucuuuuggua

SEQ ID NO: 838100 - RNA, 19 nt, Homo sapiens
  misc_RNA (1)...(19): siRNA sense strand
agagaaggauucaaauagc

SEQ ID NO: 838101 - RNA, 19 nt, Homo sapiens
  misc_RNA (1)...(19): siRNA sense strand
auaggugcauuacucacua

SEQ ID NO: 838102 - RNA, 19 nt, Homo sapiens
  misc_RNA (1)...(19): siRNA sense strand
guggacagaagaagauauu

SEQ ID NO: 838103 - RNA, 19 nt, Homo sapiens
  misc_RNA (1)...(19): siRNA sense strand
gauagcagacacuuccaau

SEQ ID NO: 838104 - RNA, 19 nt, Homo sapiens
  misc_RNA (1)...(19): siRNA sense strand
gggagaaguggacagaaga

SEQ ID NO: 838105 - RNA, 19 nt, Homo sapiens
  misc_RNA (1)...(19): siRNA sense strand
gauaaucaggaacguuuua

SEQ ID NO: 838106 - RNA, 19 nt, Homo sapiens
  misc_RNA (1)...(19): siRNA sense strand
aaugguaacuagucuugau

SEQ ID NO: 838107 - RNA, 19 nt, Homo sapiens
  misc_RNA (1)...(19): siRNA sense strand
ucgcugaguuucaagaagu

SEQ ID NO: 838108 - RNA, 19 nt, Homo sapiens
  misc_RNA (1)...(19): siRNA sense strand
ugauagaacacugucuuaa

SEQ ID NO: 838109 - RNA, 19 nt, Homo sapiens
  misc_RNA (1)...(19): siRNA sense strand
ucauguaacucagcuugug

SEQ ID NO: 838110 - RNA, 19 nt, Homo sapiens
  misc_RNA (1)...(19): siRNA sense strand
ucaggcaagugaggaagaa

SEQ ID NO: 838111 - RNA, 19 nt, Homo sapiens
  misc_RNA (1)...(19): siRNA sense strand
aaggaagauucacacugua

SEQ ID NO: 838112 - RNA, 19 nt, Homo sapiens
  misc_RNA (1)...(19): siRNA sense strand
agaugaaggcgaaguuuau

SEQ ID NO: 838113 - RNA, 19 nt, Homo sapiens
  misc_RNA (1)...(19): siRNA sense strand
gaugauuuaccugaggaua

SEQ ID NO: 838114 - RNA, 19 nt, Homo sapiens
  misc_RNA (1)...(19): siRNA sense strand
gauuaugagaugaaacuuc

SEQ ID NO: 838115 - RNA, 19 nt, Homo sapiens
  misc_RNA (1)...(19): siRNA sense strand
uaggugcauuacucacuaa

SEQ ID NO: 838116 - RNA, 19 nt, Homo sapiens
  misc_RNA (1)...(19): siRNA sense strand
aauucaaucucgcugaguu

SEQ ID NO: 838117 - RNA, 19 nt, Homo sapiens
  misc_RNA (1)...(19): siRNA sense strand
aggauaaucaggaacguuu

SEQ ID NO: 838118 - RNA, 19 nt, Homo sapiens
  misc_RNA (1)...(19): siRNA sense strand
gaacagcccuccacuaugc

SEQ ID NO: 838119 - RNA, 19 nt, Homo sapiens
  misc_RNA (1)...(19): siRNA sense strand
gaugugaacugcacucaug

SEQ ID NO: 838120 - RNA, 19 nt, Homo sapiens
  misc_RNA (1)...(19): siRNA sense strand
gaagggaaaucuugagagu

SEQ ID NO: 838121 - RNA, 19 nt, Homo sapiens
  misc_RNA (1)...(19): siRNA sense strand
uccaguaugugguauauua

SEQ ID NO: 838122 - RNA, 19 nt, Homo sapiens
  misc_RNA (1)...(19): siRNA sense strand
ucaaugcccuggauuacaa

SEQ ID NO: 838123 - RNA, 19 nt, Homo sapiens
  misc_RNA (1)...(19): siRNA sense strand
uaagaacaaugcugagugu

SEQ ID NO: 838124 - RNA, 19 nt, Homo sapiens
  misc_RNA (1)...(19): siRNA sense strand
gaaggaauaccuguuacuu

SEQ ID NO: 838125 - RNA, 19 nt, Homo sapiens
  misc_RNA (1)...(19): siRNA sense strand
gggcagccuuuaagaacaa

SEQ ID NO: 838126 - RNA, 19 nt, Homo sapiens
  misc_RNA (1)...(19): siRNA sense strand
gcagagcauucagagcaaa

SEQ ID NO: 838127 - RNA, 19 nt, Homo sapiens
  misc_RNA (1)...(19): siRNA sense strand
gggcugccaugaagggaaa

SEQ ID NO: 838128 - RNA, 19 nt, Homo sapiens
  misc_RNA (1)...(19): siRNA sense strand
cacgagagguggccagaga

SEQ ID NO: 838129 - RNA, 19 nt, Homo sapiens
  misc_RNA (1)...(19): siRNA sense strand
agggaaaucuugagagugu

SEQ ID NO: 838130 - RNA, 19 nt, Homo sapiens
  misc_RNA (1)...(19): siRNA sense strand
ggucagagucaucaaccua

SEQ ID NO: 838131 - RNA, 19 nt, Homo sapiens
  misc_RNA (1)...(19): siRNA sense strand
gcgcuuaauccgaacaauu

SEQ ID NO: 838132 - RNA, 19 nt, Homo sapiens
  misc_RNA (1)...(19): siRNA sense strand
guuggacacuuugaauuga

SEQ ID NO: 838133 - RNA, 19 nt, Homo sapiens
  misc_RNA (1)...(19): siRNA sense strand
caacagagauaccccacuu

SEQ ID NO: 838134 - RNA, 19 nt, Homo sapiens
  misc_RNA (1)...(19): siRNA sense strand
ccgaacagcccuccacuau

SEQ ID NO: 838135 - RNA, 19 nt, Homo sapiens
  misc_RNA (1)...(19): siRNA sense strand
ccacuaugcagcagagaaa

SEQ ID NO: 838136 - RNA, 19 nt, Homo sapiens
  misc_RNA (1)...(19): siRNA sense strand
ccagagacccgcagcuaug

SEQ ID NO: 838137 - RNA, 19 nt, Homo sapiens
  misc_RNA (1)...(19): siRNA sense strand
agagaaagaugaggcuugu

SEQ ID NO: 838138 - RNA, 19 nt, Homo sapiens
  misc_RNA (1)...(19): siRNA sense strand
aggaauaccuguuacuuuu

SEQ ID NO: 838139 - RNA, 19 nt, Homo sapiens
  misc_RNA (1)...(19): siRNA sense strand
cagagucaucaaccuaaua

SEQ ID NO: 838140 - RNA, 19 nt, Homo sapiens
  misc_RNA (1)...(19): siRNA sense strand
ggaauaccuguuacuuuua

SEQ ID NO: 838141 - RNA, 19 nt, Homo sapiens
  misc_RNA (1)...(19): siRNA sense strand
gugcucagcuccaggaacu

SEQ ID NO: 838142 - RNA, 19 nt, Homo sapiens
  misc_RNA (1)...(19): siRNA sense strand
cagagcuguuggacacuuu

SEQ ID NO: 838143 - RNA, 19 nt, Homo sapiens
  misc_RNA (1)...(19): siRNA sense strand
gcgcagaggucagagucau

SEQ ID NO: 838144 - RNA, 19 nt, Homo sapiens
  misc_RNA (1)...(19): siRNA sense strand
gcagaggucagagucauca

SEQ ID NO: 838145 - RNA, 19 nt, Homo sapiens
  misc_RNA (1)...(19): siRNA sense strand
gcacucauggcacacugaa

SEQ ID NO: 838146 - RNA, 19 nt, Homo sapiens
  misc_RNA (1)...(19): siRNA sense strand
aaggaauaccuguuacuuu

SEQ ID NO: 838147 - RNA, 19 nt, Homo sapiens
  misc_RNA (1)...(19): siRNA sense strand
gagacccgcagcuauguga

SEQ ID NO: 838148 - RNA, 19 nt, Homo sapiens
  misc_RNA (1)...(19): siRNA sense strand
ggaaaucuugagaguguca

SEQ ID NO: 838149 - RNA, 19 nt, Homo sapiens
  misc_RNA (1)...(19): siRNA sense strand
ggauggguauaaccgaaca

SEQ ID NO: 838150 - RNA, 19 nt, Homo sapiens
  misc_RNA (1)...(19): siRNA sense strand
guguggagguccuauugga

SEQ ID NO: 838151 - RNA, 19 nt, Homo sapiens
  misc_RNA (1)...(19): siRNA sense strand
gaauaccuguuacuuuuag

SEQ ID NO: 838152 - RNA, 19 nt, Homo sapiens
  misc_RNA (1)...(19): siRNA sense strand
uuugaaggaauaccuguua

SEQ ID NO: 838153 - RNA, 19 nt, Homo sapiens
  misc_RNA (1)...(19): siRNA sense strand
guuccaguaugugguauau

SEQ ID NO: 838154 - RNA, 19 nt, Homo sapiens
  misc_RNA (1)...(19): siRNA sense strand
ccacugccagcuucuuuga

SEQ ID NO: 838155 - RNA, 19 nt, Homo sapiens
  misc_RNA (1)...(19): siRNA sense strand
gccaugaagggaaaucuug

SEQ ID NO: 838156 - RNA, 19 nt, Homo sapiens
  misc_RNA (1)...(19): siRNA sense strand
agaaagaugaggcuugugu

SEQ ID NO: 838157 - RNA, 19 nt, Homo sapiens
  misc_RNA (1)...(19): siRNA sense strand
cgaggugaaugcccuggau

SEQ ID NO: 838158 - RNA, 19 nt, Homo sapiens
  misc_RNA (1)...(19): siRNA sense strand
ucagagucaucaaccuaau

SEQ ID NO: 838159 - RNA, 19 nt, Homo sapiens
  misc_RNA (1)...(19): siRNA sense strand
uggagguccuauuggagua

SEQ ID NO: 838160 - RNA, 19 nt, Homo sapiens
  misc_RNA (1)...(19): siRNA sense strand
gugccuguauggugucaga

SEQ ID NO: 838161 - RNA, 19 nt, Homo sapiens
  misc_RNA (1)...(19): siRNA sense strand
gugcaaaccccaaugcuuu

SEQ ID NO: 838162 - RNA, 19 nt, Homo sapiens
  misc_RNA (1)...(19): siRNA sense strand
cgcuuaauccgaacaauug

SEQ ID NO: 838163 - RNA, 19 nt, Homo sapiens
  misc_RNA (1)...(19): siRNA sense strand
ggacuuggaacagagaaag

SEQ ID NO: 838164 - RNA, 19 nt, Homo sapiens
  misc_RNA (1)...(19): siRNA sense strand
ucacugggcagccuuuaag

SEQ ID NO: 838165 - RNA, 19 nt, Homo sapiens
  misc_RNA (1)...(19): siRNA sense strand
gucagagucaucaaccuaa

SEQ ID NO: 838166 - RNA, 19 nt, Homo sapiens
  misc_RNA (1)...(19): siRNA sense strand
gacccgcagcuaugugaaa

SEQ ID NO: 838167 - RNA, 19 nt, Homo sapiens
  misc_RNA (1)...(19): siRNA sense strand
cgaacagcccuccacuaug

SEQ ID NO: 838168 - RNA, 19 nt, Homo sapiens
  misc_RNA (1)...(19): siRNA sense strand
gcauucagagcaaauacuc

SEQ ID NO: 838169 - RNA, 19 nt, Homo sapiens
  misc_RNA (1)...(19): siRNA sense strand
gcuguuggacacuuugaau

SEQ ID NO: 838170 - RNA, 19 nt, Homo sapiens
  misc_RNA (1)...(19): siRNA sense strand
ccaugaagggaaaucuuga

SEQ ID NO: 838171 - RNA, 19 nt, Homo sapiens
  misc_RNA (1)...(19): siRNA sense strand
ggauuacaacaaugauaca

SEQ ID NO: 838172 - RNA, 19 nt, Homo sapiens
  misc_RNA (1)...(19): siRNA sense strand
gcccuggauuacaacaaug

SEQ ID NO: 838173 - RNA, 19 nt, Homo sapiens
  misc_RNA (1)...(19): siRNA sense strand
agaacaaugcugagugugu

SEQ ID NO: 838174 - RNA, 19 nt, Homo sapiens
  misc_RNA (1)...(19): siRNA sense strand
uguuggacacuuugaauug

SEQ ID NO: 838175 - RNA, 19 nt, Homo sapiens
  misc_RNA (1)...(19): siRNA sense strand
gccagagacccgcagcuau

SEQ ID NO: 838176 - RNA, 19 nt, Homo sapiens
  misc_RNA (1)...(19): siRNA sense strand
gagguccuauuggaguaug

SEQ ID NO: 838177 - RNA, 19 nt, Homo sapiens
  misc_RNA (1)...(19): siRNA sense strand
uuggauggcaacagagaua

SEQ ID NO: 838178 - RNA, 19 nt, Homo sapiens
  misc_RNA (1)...(19): siRNA sense strand
ccaguaugugguauauuau

SEQ ID NO: 838179 - RNA, 19 nt, Homo sapiens
  misc_RNA (1)...(19): siRNA sense strand
ccugguggcucugcuaguc

SEQ ID NO: 838180 - RNA, 19 nt, Homo sapiens
  misc_RNA (1)...(19): siRNA sense strand
ggagcuggcagaacucuuu

SEQ ID NO: 838181 - RNA, 19 nt, Homo sapiens
  misc_RNA (1)...(19): siRNA sense strand
ccgcaaguauacagaauug

SEQ ID NO: 838182 - RNA, 19 nt, Homo sapiens
  misc_RNA (1)...(19): siRNA sense strand
uuagugacguccucaucua

SEQ ID NO: 838183 - RNA, 19 nt, Homo sapiens
  misc_RNA (1)...(19): siRNA sense strand
ucaucuaccugguggcauu

SEQ ID NO: 838184 - RNA, 19 nt, Homo sapiens
  misc_RNA (1)...(19): siRNA sense strand
cugcggacauucccuguga

SEQ ID NO: 838185 - RNA, 19 nt, Homo sapiens
  misc_RNA (1)...(19): siRNA sense strand
gcagugcucuccaaaaugg

SEQ ID NO: 838186 - RNA, 19 nt, Homo sapiens
  misc_RNA (1)...(19): siRNA sense strand
ccgccuccaugcugaguuu

SEQ ID NO: 838187 - RNA, 19 nt, Homo sapiens
  misc_RNA (1)...(19): siRNA sense strand
gcucuucccgcaaguauac

SEQ ID NO: 838188 - RNA, 19 nt, Homo sapiens
  misc_RNA (1)...(19): siRNA sense strand
cagaacucuuucaguggaa

SEQ ID NO: 838189 - RNA, 19 nt, Homo sapiens
  misc_RNA (1)...(19): siRNA sense strand
ugaguuugcugcggaacga

SEQ ID NO: 838190 - RNA, 19 nt, Homo sapiens
  misc_RNA (1)...(19): siRNA sense strand
ggaacgagacugggaacag

SEQ ID NO: 838191 - RNA, 19 nt, Homo sapiens
  misc_RNA (1)...(19): siRNA sense strand
gcagcucuucccgcaagua

SEQ ID NO: 838192 - RNA, 19 nt, Homo sapiens
  misc_RNA (1)...(19): siRNA sense strand
ccacaggccagaccucaac

SEQ ID NO: 838193 - RNA, 19 nt, Homo sapiens
  misc_RNA (1)...(19): siRNA sense strand
uucaagaggagcuuaguga

SEQ ID NO: 838194 - RNA, 19 nt, Homo sapiens
  misc_RNA (1)...(19): siRNA sense strand
caucuaccugguggcauua

SEQ ID NO: 838195 - RNA, 19 nt, Homo sapiens
  misc_RNA (1)...(19): siRNA sense strand
gcagaaggcugaugaauuc

SEQ ID NO: 838196 - RNA, 19 nt, Homo sapiens
  misc_RNA (1)...(19): siRNA sense strand
ccauguagcuuguaauaua

SEQ ID NO: 838197 - RNA, 19 nt, Homo sapiens
  misc_RNA (1)...(19): siRNA sense strand
ggaagaugcucacagagau

SEQ ID NO: 838198 - RNA, 19 nt, Homo sapiens
  misc_RNA (1)...(19): siRNA sense strand
gagcaaaugccaccaacaa

SEQ ID NO: 838199 - RNA, 19 nt, Homo sapiens
  misc_RNA (1)...(19): siRNA sense strand
caucauuucuccaaaggaa

SEQ ID NO: 838200 - RNA, 19 nt, Homo sapiens
  misc_RNA (1)...(19): siRNA sense strand
ggagaguggucagcaguau

SEQ ID NO: 838201 - RNA, 19 nt, Homo sapiens
  misc_RNA (1)...(19): siRNA sense strand
agucauagcugagcaaauc

SEQ ID NO: 838202 - RNA, 19 nt, Homo sapiens
  misc_RNA (1)...(19): siRNA sense strand
gaauucauccgagcaaaug

SEQ ID NO: 838203 - RNA, 19 nt, Homo sapiens
  misc_RNA (1)...(19): siRNA sense strand
gcacugaacccaacuucca

SEQ ID NO: 838204 - RNA, 19 nt, Homo sapiens
  misc_RNA (1)...(19): siRNA sense strand
caaacuacagcaugacuug

SEQ ID NO: 838205 - RNA, 19 nt, Homo sapiens
  misc_RNA (1)...(19): siRNA sense strand
caccauguagcuuguaaua

SEQ ID NO: 838206 - RNA, 19 nt, Homo sapiens
  misc_RNA (1)...(19): siRNA sense strand
gaagaugcucacagagaug

SEQ ID NO: 838207 - RNA, 19 nt, Homo sapiens
  misc_RNA (1)...(19): siRNA sense strand
cauguagcuuguaauauag

SEQ ID NO: 838208 - RNA, 19 nt, Homo sapiens
  misc_RNA (1)...(19): siRNA sense strand
agaguggucagcaguauuu

SEQ ID NO: 838209 - RNA, 19 nt, Homo sapiens
  misc_RNA (1)...(19): siRNA sense strand
acuggaagaugcucacaga

SEQ ID NO: 838210 - RNA, 19 nt, Homo sapiens
  misc_RNA (1)...(19): siRNA sense strand
ucgcagagcaggugcagaa

SEQ ID NO: 838211 - RNA, 19 nt, Homo sapiens
  misc_RNA (1)...(19): siRNA sense strand
aauccaacauuugcaagaa

SEQ ID NO: 838212 - RNA, 19 nt, Homo sapiens
  misc_RNA (1)...(19): siRNA sense strand
gcugagcaaauccaacauu

SEQ ID NO: 838213 - RNA, 19 nt, Homo sapiens
  misc_RNA (1)...(19): siRNA sense strand
cguaugaggacauugagaa

SEQ ID NO: 838214 - RNA, 19 nt, Homo sapiens
  misc_RNA (1)...(19): siRNA sense strand
agaacaagccaggaaggua

SEQ ID NO: 838215 - RNA, 19 nt, Homo sapiens
  misc_RNA (1)...(19): siRNA sense strand
gagaguggucagcaguauu

SEQ ID NO: 838216 - RNA, 19 nt, Homo sapiens
  misc_RNA (1)...(19): siRNA sense strand
gggagaguggucagcagua

SEQ ID NO: 838217 - RNA, 19 nt, Homo sapiens
  misc_RNA (1)...(19): siRNA sense strand
uggaagaugcucacagaga

SEQ ID NO: 838218 - RNA, 19 nt, Homo sapiens
  misc_RNA (1)...(19): siRNA sense strand
ugcagaaggcugaugaauu

SEQ ID NO: 838219 - RNA, 19 nt, Homo sapiens
  misc_RNA (1)...(19): siRNA sense strand
ugauggacauguugcuaag

SEQ ID NO: 838220 - RNA, 19 nt, Homo sapiens
  misc_RNA (1)...(19): siRNA sense strand
uagcugagcaaauccaaca

SEQ ID NO: 838221 - RNA, 19 nt, Homo sapiens
  misc_RNA (1)...(19): siRNA sense strand
ggcaacauuuacuaucucu

SEQ ID NO: 838222 - RNA, 19 nt, Homo sapiens
  misc_RNA (1)...(19): siRNA sense strand
caaaugccaccaacaagcu

SEQ ID NO: 838223 - RNA, 19 nt, Homo sapiens
  misc_RNA (1)...(19): siRNA sense strand
ggacauugagaagcaagau

SEQ ID NO: 838224 - RNA, 19 nt, Homo sapiens
  misc_RNA (1)...(19): siRNA sense strand
ugaauucauccgagcaaau

SEQ ID NO: 838225 - RNA, 19 nt, Homo sapiens
  misc_RNA (1)...(19): siRNA sense strand
ccaagaaguugaauaaaga

SEQ ID NO: 838226 - RNA, 19 nt, Homo sapiens
  misc_RNA (1)...(19): siRNA sense strand
ggaaggaccgcuccaagaa

SEQ ID NO: 838227 - RNA, 19 nt, Homo sapiens
  misc_RNA (1)...(19): siRNA sense strand
cagcugcgcuccauugaga

SEQ ID NO: 838228 - RNA, 19 nt, Homo sapiens
  misc_RNA (1)...(19): siRNA sense strand
agaggaagcuggccaagga

SEQ ID NO: 838229 - RNA, 19 nt, Homo sapiens
  misc_RNA (1)...(19): siRNA sense strand
gcagaggucguccaaguga

SEQ ID NO: 838230 - RNA, 19 nt, Homo sapiens
  misc_RNA (1)...(19): siRNA sense strand
gaagacaagcccaggauca

SEQ ID NO: 838231 - RNA, 19 nt, Homo sapiens
  misc_RNA (1)...(19): siRNA sense strand
gaaggaccgcuccaagaaa

SEQ ID NO: 838232 - RNA, 19 nt, Homo sapiens
  misc_RNA (1)...(19): siRNA sense strand
gaagcuggccaaggacuuu

SEQ ID NO: 838233 - RNA, 19 nt, Homo sapiens
  misc_RNA (1)...(19): siRNA sense strand
caagugaggaggcaccaaa

SEQ ID NO: 838234 - RNA, 19 nt, Homo sapiens
  misc_RNA (1)...(19): siRNA sense strand
cguccaagaaguugaauaa

SEQ ID NO: 838235 - RNA, 19 nt, Homo sapiens
  misc_RNA (1)...(19): siRNA sense strand
uccaagaaguugaauaaag

SEQ ID NO: 838236 - RNA, 19 nt, Homo sapiens
  misc_RNA (1)...(19): siRNA sense strand
gagagccucaccucaguuu

SEQ ID NO: 838237 - RNA, 19 nt, Homo sapiens
  misc_RNA (1)...(19): siRNA sense strand
caggaucaccagagccuua

SEQ ID NO: 838238 - RNA, 19 nt, Homo sapiens
  misc_RNA (1)...(19): siRNA sense strand
gcaaagaagcgaaaagguu

SEQ ID NO: 838239 - RNA, 19 nt, Homo sapiens
  misc_RNA (1)...(19): siRNA sense strand
gaaaagauucucccagaug

SEQ ID NO: 838240 - RNA, 19 nt, Homo sapiens
  misc_RNA (1)...(19): siRNA sense strand
gaaggcagaggucguccaa

SEQ ID NO: 838241 - RNA, 19 nt, Homo sapiens
  misc_RNA (1)...(19): siRNA sense strand
ccucggaguuggcccagaa

SEQ ID NO: 838242 - RNA, 19 nt, Homo sapiens
  misc_RNA (1)...(19): siRNA sense strand
caccuggagucgccucaaa

SEQ ID NO: 838243 - RNA, 19 nt, Homo sapiens
  misc_RNA (1)...(19): siRNA sense strand
ggaguuggcccagaauaag

SEQ ID NO: 838244 - RNA, 19 nt, Homo sapiens
  misc_RNA (1)...(19): siRNA sense strand
aggcagaggucguccaagu

SEQ ID NO: 838245 - RNA, 19 nt, Homo sapiens
  misc_RNA (1)...(19): siRNA sense strand
ggagcccucucagccacua

SEQ ID NO: 838246 - RNA, 19 nt, Homo sapiens
  misc_RNA (1)...(19): siRNA sense strand
cggaguuggcccagaauaa

SEQ ID NO: 838247 - RNA, 19 nt, Homo sapiens
  misc_RNA (1)...(19): siRNA sense strand
gaggaggcaccaaaguguu

SEQ ID NO: 838248 - RNA, 19 nt, Homo sapiens
  misc_RNA (1)...(19): siRNA sense strand
ucaaagacagccagaguac

SEQ ID NO: 838249 - RNA, 19 nt, Homo sapiens
  misc_RNA (1)...(19): siRNA sense strand
ccgagagccucaccucagu

SEQ ID NO: 838250 - RNA, 19 nt, Homo sapiens
  misc_RNA (1)...(19): siRNA sense strand
gagucgaacccagaagaaa

SEQ ID NO: 838251 - RNA, 19 nt, Homo sapiens
  misc_RNA (1)...(19): siRNA sense strand
ugaggaggcaccaaagugu

SEQ ID NO: 838252 - RNA, 19 nt, Homo sapiens
  misc_RNA (1)...(19): siRNA sense strand
cccagaugcuucaggacaa

SEQ ID NO: 838253 - RNA, 19 nt, Homo sapiens
  misc_RNA (1)...(19): siRNA sense strand
gugaggaggcaccaaagug

SEQ ID NO: 838254 - RNA, 19 nt, Homo sapiens
  misc_RNA (1)...(19): siRNA sense strand
agaagcagcugcgcuccau

SEQ ID NO: 838255 - RNA, 19 nt, Homo sapiens
  misc_RNA (1)...(19): siRNA sense strand
ucaagcgggcaaagaagaa

SEQ ID NO: 838256 - RNA, 19 nt, Homo sapiens
  misc_RNA (1)...(19): siRNA sense strand
ggaagcuggccaaggacuu

SEQ ID NO: 838257 - RNA, 19 nt, Homo sapiens
  misc_RNA (1)...(19): siRNA sense strand
aaagacagccagaguacag

SEQ ID NO: 838258 - RNA, 19 nt, Homo sapiens
  misc_RNA (1)...(19): siRNA sense strand
cgagucgaacccagaagaa

SEQ ID NO: 838259 - RNA, 19 nt, Homo sapiens
  misc_RNA (1)...(19): siRNA sense strand
aagcagcugcgcuccauug

SEQ ID NO: 838260 - RNA, 19 nt, Homo sapiens
  misc_RNA (1)...(19): siRNA sense strand
ccagaguacaguccugaau

SEQ ID NO: 838261 - RNA, 19 nt, Homo sapiens
  misc_RNA (1)...(19): siRNA sense strand
ccucaaagacagccagagu

SEQ ID NO: 838262 - RNA, 19 nt, Homo sapiens
  misc_RNA (1)...(19): siRNA sense strand
cagaguacaguccugaauc

SEQ ID NO: 838263 - RNA, 19 nt, Homo sapiens
  misc_RNA (1)...(19): siRNA sense strand
uggagucgccucaaagaca

SEQ ID NO: 838264 - RNA, 19 nt, Homo sapiens
  misc_RNA (1)...(19): siRNA sense strand
aaggaccgcuccaagaaaa

SEQ ID NO: 838265 - RNA, 19 nt, Homo sapiens
  misc_RNA (1)...(19): siRNA sense strand
ccagaugcuucaggacaag

SEQ ID NO: 838266 - RNA, 19 nt, Homo sapiens
  misc_RNA (1)...(19): siRNA sense strand
gaaguggcuuuguggaaua

SEQ ID NO: 838267 - RNA, 19 nt, Homo sapiens
  misc_RNA (1)...(19): siRNA sense strand
ugagggagcugaagaagaa

SEQ ID NO: 838268 - RNA, 19 nt, Homo sapiens
  misc_RNA (1)...(19): siRNA sense strand
gaagaugcuuguuggauuc

SEQ ID NO: 838269 - RNA, 19 nt, Homo sapiens
  misc_RNA (1)...(19): siRNA sense strand
agaagaugcuuguuggauu

SEQ ID NO: 838270 - RNA, 19 nt, Homo sapiens
  misc_RNA (1)...(19): siRNA sense strand
agaagaagcuguucaaacg

SEQ ID NO: 838271 - RNA, 19 nt, Homo sapiens
  misc_RNA (1)...(19): siRNA sense strand
gaagacagccauggaagug

SEQ ID NO: 838272 - RNA, 19 nt, Homo sapiens
  misc_RNA (1)...(19): siRNA sense strand
gaagaagaagcuguucaaa

SEQ ID NO: 838273 - RNA, 19 nt, Homo sapiens
  misc_RNA (1)...(19): siRNA sense strand
gauccggcuugcccagaaa

SEQ ID NO: 838274 - RNA, 19 nt, Homo sapiens
  misc_RNA (1)...(19): siRNA sense strand
agaaguggcuuuguggaau

SEQ ID NO: 838275 - RNA, 19 nt, Homo sapiens
  misc_RNA (1)...(19): siRNA sense strand
gaugcuuguuggauucuug

SEQ ID NO: 838276 - RNA, 19 nt, Homo sapiens
  misc_RNA (1)...(19): siRNA sense strand
gaagaagaugcuuguugga

SEQ ID NO: 838277 - RNA, 19 nt, Homo sapiens
  misc_RNA (1)...(19): siRNA sense strand
caucuccugccuccuaaua

SEQ ID NO: 838278 - RNA, 19 nt, Homo sapiens
  misc_RNA (1)...(19): siRNA sense strand
gaaaacuccuccagcagau

SEQ ID NO: 838279 - RNA, 19 nt, Homo sapiens
  misc_RNA (1)...(19): siRNA sense strand
ccuugaagaugagagcuaa

SEQ ID NO: 838280 - RNA, 19 nt, Homo sapiens
  misc_RNA (1)...(19): siRNA sense strand
ggaagccaccaaccacugu

SEQ ID NO: 838281 - RNA, 19 nt, Homo sapiens
  misc_RNA (1)...(19): siRNA sense strand
cagugcacgugccaacauu

SEQ ID NO: 838282 - RNA, 19 nt, Homo sapiens
  misc_RNA (1)...(19): siRNA sense strand
cccaggauguagaaaugaa

SEQ ID NO: 838283 - RNA, 19 nt, Homo sapiens
  misc_RNA (1)...(19): siRNA sense strand
ucaaagccagccaggacua

SEQ ID NO: 838284 - RNA, 19 nt, Homo sapiens
  misc_RNA (1)...(19): siRNA sense strand
uagaaguggcuuuguggaa

SEQ ID NO: 838285 - RNA, 19 nt, Homo sapiens
  misc_RNA (1)...(19): siRNA sense strand
agagaagacagccauggaa

SEQ ID NO: 838286 - RNA, 19 nt, Homo sapiens
  misc_RNA (1)...(19): siRNA sense strand
guggcuuuguggaauauuc

SEQ ID NO: 838287 - RNA, 19 nt, Homo sapiens
  misc_RNA (1)...(19): siRNA sense strand
aagaagaagcuguucaaac

SEQ ID NO: 838288 - RNA, 19 nt, Homo sapiens
  misc_RNA (1)...(19): siRNA sense strand
agauccggcuugcccagaa

SEQ ID NO: 838289 - RNA, 19 nt, Homo sapiens
  misc_RNA (1)...(19): siRNA sense strand
gcacaaggcuggaguacag

SEQ ID NO: 838290 - RNA, 19 nt, Homo sapiens
  misc_RNA (1)...(19): siRNA sense strand
ucgaggagcuggacaguaa

SEQ ID NO: 838291 - RNA, 19 nt, Homo sapiens
  misc_RNA (1)...(19): siRNA sense strand
uggaggacgugcuguauuu

SEQ ID NO: 838292 - RNA, 19 nt, Homo sapiens
  misc_RNA (1)...(19): siRNA sense strand
ggaguacaguggcucgauu

SEQ ID NO: 838293 - RNA, 19 nt, Homo sapiens
  misc_RNA (1)...(19): siRNA sense strand
cgagucagcuaucaaguuc

SEQ ID NO: 838294 - RNA, 19 nt, Homo sapiens
  misc_RNA (1)...(19): siRNA sense strand
gcaaugguauuaauguacu

SEQ ID NO: 838295 - RNA, 19 nt, Homo sapiens
  misc_RNA (1)...(19): siRNA sense strand
ggaccgagacggcacaaug

SEQ ID NO: 838296 - RNA, 19 nt, Homo sapiens
  misc_RNA (1)...(19): siRNA sense strand
gcggccagauagccaguua

SEQ ID NO: 838297 - RNA, 19 nt, Homo sapiens
  misc_RNA (1)...(19): siRNA sense strand
gcaucgaccuggccgucua

SEQ ID NO: 838298 - RNA, 19 nt, Homo sapiens
  misc_RNA (1)...(19): siRNA sense strand
cggcaaugguauuaaugua

SEQ ID NO: 838299 - RNA, 19 nt, Homo sapiens
  misc_RNA (1)...(19): siRNA sense strand
gcagguccaugccucaaag

SEQ ID NO: 838300 - RNA, 19 nt, Homo sapiens
  misc_RNA (1)...(19): siRNA sense strand
gaccgagacggcacaauga

SEQ ID NO: 838301 - RNA, 19 nt, Homo sapiens
  misc_RNA (1)...(19): siRNA sense strand
cagcccaaaccaucauuua

SEQ ID NO: 838302 - RNA, 19 nt, Homo sapiens
  misc_RNA (1)...(19): siRNA sense strand
uggguucucugccuggaua

SEQ ID NO: 838303 - RNA, 19 nt, Homo sapiens
  misc_RNA (1)...(19): siRNA sense strand
ggagcaggcugagaaaauu

SEQ ID NO: 838304 - RNA, 19 nt, Homo sapiens
  misc_RNA (1)...(19): siRNA sense strand
ugacagugccggacgaguu

SEQ ID NO: 838305 - RNA, 19 nt, Homo sapiens
  misc_RNA (1)...(19): siRNA sense strand
ccugaaaucccagcacuuu

SEQ ID NO: 838306 - RNA, 19 nt, Homo sapiens
  misc_RNA (1)...(19): siRNA sense strand
ggacgaguucucaaagcaa

SEQ ID NO: 838307 - RNA, 19 nt, Homo sapiens
  misc_RNA (1)...(19): siRNA sense strand
gaguacaguggcucgauuu

SEQ ID NO: 838308 - RNA, 19 nt, Homo sapiens
  misc_RNA (1)...(19): siRNA sense strand
gguauuaauguacucaaga

SEQ ID NO: 838309 - RNA, 19 nt, Homo sapiens
  misc_RNA (1)...(19): siRNA sense strand
ggcucgaccuggaggaauu

SEQ ID NO: 838310 - RNA, 19 nt, Homo sapiens
  misc_RNA (1)...(19): siRNA sense strand
aaaccaucauuuacccuau

SEQ ID NO: 838311 - RNA, 19 nt, Homo sapiens
  misc_RNA (1)...(19): siRNA sense strand
ccaggauggucacauugau

SEQ ID NO: 838312 - RNA, 19 nt, Homo sapiens
  misc_RNA (1)...(19): siRNA sense strand
cagcaccugcggccagaua

SEQ ID NO: 838313 - RNA, 19 nt, Homo sapiens
  misc_RNA (1)...(19): siRNA sense strand
gcgcgaccacuuccuguug

SEQ ID NO: 838314 - RNA, 19 nt, Homo sapiens
  misc_RNA (1)...(19): siRNA sense strand
guggcucgauuucagauca

SEQ ID NO: 838315 - RNA, 19 nt, Homo sapiens
  misc_RNA (1)...(19): siRNA sense strand
aacaggguaucuccucuga

SEQ ID NO: 838316 - RNA, 19 nt, Homo sapiens
  misc_RNA (1)...(19): siRNA sense strand
ucuacgagacucugaagaa

SEQ ID NO: 838317 - RNA, 19 nt, Homo sapiens
  misc_RNA (1)...(19): siRNA sense strand
gcucugggcauuuccaucu

SEQ ID NO: 838318 - RNA, 19 nt, Homo sapiens
  misc_RNA (1)...(19): siRNA sense strand
guacaguggcucgauuuca

SEQ ID NO: 838319 - RNA, 19 nt, Homo sapiens
  misc_RNA (1)...(19): siRNA sense strand
ugacgggcaugugguggaa

SEQ ID NO: 838320 - RNA, 19 nt, Homo sapiens
  misc_RNA (1)...(19): siRNA sense strand
ugaaaucccagcacuuugg

SEQ ID NO: 838321 - RNA, 19 nt, Homo sapiens
  misc_RNA (1)...(19): siRNA sense strand
gaccauugacuggcaagaa

SEQ ID NO: 838322 - RNA, 19 nt, Homo sapiens
  misc_RNA (1)...(19): siRNA sense strand
gaccacuuccuguugcauu

SEQ ID NO: 838323 - RNA, 19 nt, Homo sapiens
  misc_RNA (1)...(19): siRNA sense strand
acgagacucugaagaacug

SEQ ID NO: 838324 - RNA, 19 nt, Homo sapiens
  misc_RNA (1)...(19): siRNA sense strand
ugaagacgcggcugaccuu

SEQ ID NO: 838325 - RNA, 19 nt, Homo sapiens
  misc_RNA (1)...(19): siRNA sense strand
uuaauguacucaagauugc

SEQ ID NO: 838326 - RNA, 19 nt, Homo sapiens
  misc_RNA (1)...(19): siRNA sense strand
gccggacgggccaguauaa

SEQ ID NO: 838327 - RNA, 19 nt, Homo sapiens
  misc_RNA (1)...(19): siRNA sense strand
cggacgaguucucaaagca

SEQ ID NO: 838328 - RNA, 19 nt, Homo sapiens
  misc_RNA (1)...(19): siRNA sense strand
ugccucagccuccagagua

SEQ ID NO: 838329 - RNA, 19 nt, Homo sapiens
  misc_RNA (1)...(19): siRNA sense strand
gacagugccggacgaguuc

SEQ ID NO: 838330 - RNA, 19 nt, Homo sapiens
  misc_RNA (1)...(19): siRNA sense strand
cuauggaggugcugaagac

SEQ ID NO: 838331 - RNA, 19 nt, Homo sapiens
  misc_RNA (1)...(19): siRNA sense strand
gcuggacaguaacaaggau

SEQ ID NO: 838332 - RNA, 19 nt, Homo sapiens
  misc_RNA (1)...(19): siRNA sense strand
uacaguggcucgauuucag

SEQ ID NO: 838333 - RNA, 19 nt, Homo sapiens
  misc_RNA (1)...(19): siRNA sense strand
cuacgagacucugaagaac

SEQ ID NO: 838334 - RNA, 19 nt, Homo sapiens
  misc_RNA (1)...(19): siRNA sense strand
ccgagucagcuaucaaguu

SEQ ID NO: 838335 - RNA, 19 nt, Homo sapiens
  misc_RNA (1)...(19): siRNA sense strand
accauugacuggcaagaau

SEQ ID NO: 838336 - RNA, 19 nt, Homo sapiens
  misc_RNA (1)...(19): siRNA sense strand
aagaauggcgcgaccacuu

SEQ ID NO: 838337 - RNA, 19 nt, Homo sapiens
  misc_RNA (1)...(19): siRNA sense strand
ccuaugaacagaucaagag

SEQ ID NO: 838338 - RNA, 19 nt, Homo sapiens
  misc_RNA (1)...(19): siRNA sense strand
gcggcaaugguauuaaugu

SEQ ID NO: 838339 - RNA, 19 nt, Homo sapiens
  misc_RNA (1)...(19): siRNA sense strand
uuuccgagcucugggcauu

SEQ ID NO: 838340 - RNA, 19 nt, Homo sapiens
  misc_RNA (1)...(19): siRNA sense strand
guggaggacgugcuguauu

SEQ ID NO: 838341 - RNA, 19 nt, Homo sapiens
  misc_RNA (1)...(19): siRNA sense strand
cuguauuucuggaagcauu

SEQ ID NO: 838342 - RNA, 19 nt, Homo sapiens
  misc_RNA (1)...(19): siRNA sense strand
agucagcuaucaaguucau

SEQ ID NO: 838343 - RNA, 19 nt, Homo sapiens
  misc_RNA (1)...(19): siRNA sense strand
aaccaucauuuacccuaug

SEQ ID NO: 838344 - RNA, 19 nt, Homo sapiens
  misc_RNA (1)...(19): siRNA sense strand
cauggccuaugaacagauc

SEQ ID NO: 838345 - RNA, 19 nt, Homo sapiens
  misc_RNA (1)...(19): siRNA sense strand
ggagcuggacaguaacaag

SEQ ID NO: 838346 - RNA, 19 nt, Homo sapiens
  misc_RNA (1)...(19): siRNA sense strand
ccgacaaccuucccagaaa

SEQ ID NO: 838347 - RNA, 19 nt, Homo sapiens
  misc_RNA (1)...(19): siRNA sense strand
ccugaugacuucaagaaug

SEQ ID NO: 838348 - RNA, 19 nt, Homo sapiens
  misc_RNA (1)...(19): siRNA sense strand
gccgaggugugcaugguuu

SEQ ID NO: 838349 - RNA, 19 nt, Homo sapiens
  misc_RNA (1)...(19): siRNA sense strand
ccacgucccuguuuucaaa

SEQ ID NO: 838350 - RNA, 19 nt, Homo sapiens
  misc_RNA (1)...(19): siRNA sense strand
cgacaaccuucccagaaag

SEQ ID NO: 838351 - RNA, 19 nt, Homo sapiens
  misc_RNA (1)...(19): siRNA sense strand
cugaugacuucaagaaugu

SEQ ID NO: 838352 - RNA, 19 nt, Homo sapiens
  misc_RNA (1)...(19): siRNA sense strand
gaugacuucaagaauguuu

SEQ ID NO: 838353 - RNA, 19 nt, Homo sapiens
  misc_RNA (1)...(19): siRNA sense strand
gagucuccauuccuccauu

SEQ ID NO: 838354 - RNA, 19 nt, Homo sapiens
  misc_RNA (1)...(19): siRNA sense strand
cuccauuccugaugacuuc

SEQ ID NO: 838355 - RNA, 19 nt, Homo sapiens
  misc_RNA (1)...(19): siRNA sense strand
ccagaaaaccgacaaccuu

SEQ ID NO: 838356 - RNA, 19 nt, Homo sapiens
  misc_RNA (1)...(19): siRNA sense strand
ggaaaggccuucagucauu

SEQ ID NO: 838357 - RNA, 19 nt, Homo sapiens
  misc_RNA (1)...(19): siRNA sense strand
gcaguuuccucaaaucuua

SEQ ID NO: 838358 - RNA, 19 nt, Homo sapiens
  misc_RNA (1)...(19): siRNA sense strand
gggaaagccuucaauuauu

SEQ ID NO: 838359 - RNA, 19 nt, Homo sapiens
  misc_RNA (1)...(19): siRNA sense strand
ggaaagccuucaauuauuc

SEQ ID NO: 838360 - RNA, 19 nt, Homo sapiens
  misc_RNA (1)...(19): siRNA sense strand
ggaaagccuucacucagua

SEQ ID NO: 838361 - RNA, 19 nt, Homo sapiens
  misc_RNA (1)...(19): siRNA sense strand
gaagagaaacccuauaaau

SEQ ID NO: 838362 - RNA, 19 nt, Homo sapiens
  misc_RNA (1)...(19): siRNA sense strand
uaagauaugugggaaagua

SEQ ID NO: 838363 - RNA, 19 nt, Homo sapiens
  misc_RNA (1)...(19): siRNA sense strand
ggguaucccucaugucuua

SEQ ID NO: 838364 - RNA, 19 nt, Homo sapiens
  misc_RNA (1)...(19): siRNA sense strand
gaacacucaugccuuaaga

SEQ ID NO: 838365 - RNA, 19 nt, Homo sapiens
  misc_RNA (1)...(19): siRNA sense strand
ggagaaaccauaugaaugu

SEQ ID NO: 838366 - RNA, 19 nt, Homo sapiens
  misc_RNA (1)...(19): siRNA sense strand
gagaaacccuauguaugua

SEQ ID NO: 838367 - RNA, 19 nt, Homo sapiens
  misc_RNA (1)...(19): siRNA sense strand
ccucaugucuuaauaauca

SEQ ID NO: 838368 - RNA, 19 nt, Homo sapiens
  misc_RNA (1)...(19): siRNA sense strand
ucgaagacaugaacaaauu

SEQ ID NO: 838369 - RNA, 19 nt, Homo sapiens
  misc_RNA (1)...(19): siRNA sense strand
ggagagaaacccuauguau

SEQ ID NO: 838370 - RNA, 19 nt, Homo sapiens
  misc_RNA (1)...(19): siRNA sense strand
gagaaggccugugagugua

SEQ ID NO: 838371 - RNA, 19 nt, Homo sapiens
  misc_RNA (1)...(19): siRNA sense strand
ggaaagccuucacguguuc

SEQ ID NO: 838372 - RNA, 19 nt, Homo sapiens
  misc_RNA (1)...(19): siRNA sense strand
gagagaaacccuaugaaug

SEQ ID NO: 838373 - RNA, 19 nt, Homo sapiens
  misc_RNA (1)...(19): siRNA sense strand
uagaaacccucaaugcaaa

SEQ ID NO: 838374 - RNA, 19 nt, Homo sapiens
  misc_RNA (1)...(19): siRNA sense strand
gagaaaccauaugaaugua

SEQ ID NO: 838375 - RNA, 19 nt, Homo sapiens
  misc_RNA (1)...(19): siRNA sense strand
gaacucacacugaagagaa

SEQ ID NO: 838376 - RNA, 19 nt, Homo sapiens
  misc_RNA (1)...(19): siRNA sense strand
ggaaaauccuucauuaaug

SEQ ID NO: 838377 - RNA, 19 nt, Homo sapiens
  misc_RNA (1)...(19): siRNA sense strand
gagacaagcccuaugaaug

SEQ ID NO: 838378 - RNA, 19 nt, Homo sapiens
  misc_RNA (1)...(19): siRNA sense strand
gagaaacccuauaaauguc

SEQ ID NO: 838379 - RNA, 19 nt, Homo sapiens
  misc_RNA (1)...(19): siRNA sense strand
gggaaagccuucacguguu

SEQ ID NO: 838380 - RNA, 19 nt, Homo sapiens
  misc_RNA (1)...(19): siRNA sense strand
ggaacacucaugacuguaa

SEQ ID NO: 838381 - RNA, 19 nt, Homo sapiens
  misc_RNA (1)...(19): siRNA sense strand
cagaagagaaacccuauaa

SEQ ID NO: 838382 - RNA, 19 nt, Homo sapiens
  misc_RNA (1)...(19): siRNA sense strand
ggagagaaacccuaugaau

SEQ ID NO: 838383 - RNA, 19 nt, Homo sapiens
  misc_RNA (1)...(19): siRNA sense strand
gaaaccauaugaauguaag

SEQ ID NO: 838384 - RNA, 19 nt, Homo sapiens
  misc_RNA (1)...(19): siRNA sense strand
ggaauuaugggccagguuu

SEQ ID NO: 838385 - RNA, 19 nt, Homo sapiens
  misc_RNA (1)...(19): siRNA sense strand
ccagagaacuagcacacaa

SEQ ID NO: 838386 - RNA, 19 nt, Homo sapiens
  misc_RNA (1)...(19): siRNA sense strand
gaacacucaugacuguaau

SEQ ID NO: 838387 - RNA, 19 nt, Homo sapiens
  misc_RNA (1)...(19): siRNA sense strand
ggauacaauuggaaggaaa

SEQ ID NO: 838388 - RNA, 19 nt, Homo sapiens
  misc_RNA (1)...(19): siRNA sense strand
gacaagcccuaugaaugua

SEQ ID NO: 838389 - RNA, 19 nt, Homo sapiens
  misc_RNA (1)...(19): siRNA sense strand
gggaaagccuucacucagu

SEQ ID NO: 838390 - RNA, 19 nt, Homo sapiens
  misc_RNA (1)...(19): siRNA sense strand
gagagaaacccuauguaug

SEQ ID NO: 838391 - RNA, 19 nt, Homo sapiens
  misc_RNA (1)...(19): siRNA sense strand
gugggaaagccuucaauua

SEQ ID NO: 838392 - RNA, 19 nt, Homo sapiens
  misc_RNA (1)...(19): siRNA sense strand
guacagggaacacucauga

SEQ ID NO: 838393 - RNA, 19 nt, Homo sapiens
  misc_RNA (1)...(19): siRNA sense strand
agagaaacccuauaaaugu

SEQ ID NO: 838394 - RNA, 19 nt, Homo sapiens
  misc_RNA (1)...(19): siRNA sense strand
gaaaggccuucagucauuc

SEQ ID NO: 838395 - RNA, 19 nt, Homo sapiens
  misc_RNA (1)...(19): siRNA sense strand
gaaccuggccacaguagga

SEQ ID NO: 838396 - RNA, 19 nt, Homo sapiens
  misc_RNA (1)...(19): siRNA sense strand
caacauauaagaacucaca

SEQ ID NO: 838397 - RNA, 19 nt, Homo sapiens
  misc_RNA (1)...(19): siRNA sense strand
gaaacccaguggucuauac

SEQ ID NO: 838398 - RNA, 19 nt, Homo sapiens
  misc_RNA (1)...(19): siRNA sense strand
gaacaagaagagucaagga

SEQ ID NO: 838399 - RNA, 19 nt, Homo sapiens
  misc_RNA (1)...(19): siRNA sense strand
agagaaacccuauguaugu

SEQ ID NO: 838400 - RNA, 19 nt, Homo sapiens
  misc_RNA (1)...(19): siRNA sense strand
ggacuuuacuggacucaac

SEQ ID NO: 838401 - RNA, 19 nt, Homo sapiens
  misc_RNA (1)...(19): siRNA sense strand
uuacuggacucaacucaga

SEQ ID NO: 838402 - RNA, 19 nt, Homo sapiens
  misc_RNA (1)...(19): siRNA sense strand
acaagaaccuggccacagu

SEQ ID NO: 838403 - RNA, 19 nt, Homo sapiens
  misc_RNA (1)...(19): siRNA sense strand
gaugggaaaugcgacuuga

SEQ ID NO: 838404 - RNA, 19 nt, Homo sapiens
  misc_RNA (1)...(19): siRNA sense strand
aagagaaacccuauaaaug

SEQ ID NO: 838405 - RNA, 19 nt, Homo sapiens
  misc_RNA (1)...(19): siRNA sense strand
gacaccagcaggaagaaua

SEQ ID NO: 838406 - RNA, 19 nt, Homo sapiens
  misc_RNA (1)...(19): siRNA sense strand
ugggaaagccuucaauuau

SEQ ID NO: 838407 - RNA, 19 nt, Homo sapiens
  misc_RNA (1)...(19): siRNA sense strand
agacaagcccuaugaaugu

SEQ ID NO: 838408 - RNA, 19 nt, Homo sapiens
  misc_RNA (1)...(19): siRNA sense strand
gauaugugggaaaguauuu

SEQ ID NO: 838409 - RNA, 19 nt, Homo sapiens
  misc_RNA (1)...(19): siRNA sense strand
gaagagaaggccugugagu

SEQ ID NO: 838410 - RNA, 19 nt, Homo sapiens
  misc_RNA (1)...(19): siRNA sense strand
caucaaacccagucuaauc

SEQ ID NO: 838411 - RNA, 19 nt, Homo sapiens
  misc_RNA (1)...(19): siRNA sense strand
ggagacaagcccuaugaau

SEQ ID NO: 838412 - RNA, 19 nt, Homo sapiens
  misc_RNA (1)...(19): siRNA sense strand
gaaacccuauguauguaag

SEQ ID NO: 838413 - RNA, 19 nt, Homo sapiens
  misc_RNA (1)...(19): siRNA sense strand
gggagaaaccauaugaaug

SEQ ID NO: 838414 - RNA, 19 nt, Homo sapiens
  misc_RNA (1)...(19): siRNA sense strand
agaacuagcacacaagaaa

SEQ ID NO: 838415 - RNA, 19 nt, Homo sapiens
  misc_RNA (1)...(19): siRNA sense strand
caccaaauauuguauacca

SEQ ID NO: 838416 - RNA, 19 nt, Homo sapiens
  misc_RNA (1)...(19): siRNA sense strand
gaacucacacuggagagaa

SEQ ID NO: 838417 - RNA, 19 nt, Homo sapiens
  misc_RNA (1)...(19): siRNA sense strand
gaacucacacuggagagaa

SEQ ID NO: 838418 - RNA, 19 nt, Homo sapiens
  misc_RNA (1)...(19): siRNA sense strand
gaauguagucacuguggaa

SEQ ID NO: 838419 - RNA, 19 nt, Homo sapiens
  misc_RNA (1)...(19): siRNA sense strand
ucagauacauggaagaacu

SEQ ID NO: 838420 - RNA, 19 nt, Homo sapiens
  misc_RNA (1)...(19): siRNA sense strand
ccauaugaauguaaggaau

SEQ ID NO: 838421 - RNA, 19 nt, Homo sapiens
  misc_RNA (1)...(19): siRNA sense strand
ggaaggcuuuuaacuauuc

SEQ ID NO: 838422 - RNA, 19 nt, Homo sapiens
  misc_RNA (1)...(19): siRNA sense strand
cgggaaagcuuacagucau

SEQ ID NO: 838423 - RNA, 19 nt, Homo sapiens
  misc_RNA (1)...(19): siRNA sense strand
gagaaacccuaugaaugca

SEQ ID NO: 838424 - RNA, 19 nt, Homo sapiens
  misc_RNA (1)...(19): siRNA sense strand
ucuaaucucuugguuggaa

SEQ ID NO: 838425 - RNA, 19 nt, Homo sapiens
  misc_RNA (1)...(19): siRNA sense strand
gggauacaauuggaaggaa

SEQ ID NO: 838426 - RNA, 19 nt, Homo sapiens
  misc_RNA (1)...(19): siRNA sense strand
gaucaucaaacccagucua

SEQ ID NO: 838427 - RNA, 19 nt, Homo sapiens
  misc_RNA (1)...(19): siRNA sense strand
gacucacacuggagagaaa

SEQ ID NO: 838428 - RNA, 19 nt, Homo sapiens
  misc_RNA (1)...(19): siRNA sense strand
ccauggacauuaucuuucu

SEQ ID NO: 838429 - RNA, 19 nt, Homo sapiens
  misc_RNA (1)...(19): siRNA sense strand
cagccuaccucaguauuca

SEQ ID NO: 838430 - RNA, 19 nt, Homo sapiens
  misc_RNA (1)...(19): siRNA sense strand
ggacccaguuugccuucau

SEQ ID NO: 838431 - RNA, 19 nt, Homo sapiens
  misc_RNA (1)...(19): siRNA sense strand
gaagagucaaggacaguuc

SEQ ID NO: 838432 - RNA, 19 nt, Homo sapiens
  misc_RNA (1)...(19): siRNA sense strand
uaucccucaugucuuaaua

SEQ ID NO: 838433 - RNA, 19 nt, Homo sapiens
  misc_RNA (1)...(19): siRNA sense strand
ccucacgccuuauucaaca

SEQ ID NO: 838434 - RNA, 19 nt, Homo sapiens
  misc_RNA (1)...(19): siRNA sense strand
caacucauuucagauacau

SEQ ID NO: 838435 - RNA, 19 nt, Homo sapiens
  misc_RNA (1)...(19): siRNA sense strand
cgauguggcuguggacuuc

SEQ ID NO: 838436 - RNA, 19 nt, Homo sapiens
  misc_RNA (1)...(19): siRNA sense strand
agagaaacccuaugaaugc

SEQ ID NO: 838437 - RNA, 19 nt, Homo sapiens
  misc_RNA (1)...(19): siRNA sense strand
gcugacugccuaacagauu

SEQ ID NO: 838438 - RNA, 19 nt, Homo sapiens
  misc_RNA (1)...(19): siRNA sense strand
guggaaaggccuucaguca

SEQ ID NO: 838439 - RNA, 19 nt, Homo sapiens
  misc_RNA (1)...(19): siRNA sense strand
agagaaggccugugagugu

SEQ ID NO: 838440 - RNA, 19 nt, Homo sapiens
  misc_RNA (1)...(19): siRNA sense strand
gagagaagccuuuuguaug

SEQ ID NO: 838441 - RNA, 19 nt, Homo sapiens
  misc_RNA (1)...(19): siRNA sense strand
ggagagaagccuuuuguau

SEQ ID NO: 838442 - RNA, 19 nt, Homo sapiens
  misc_RNA (1)...(19): siRNA sense strand
gaggucagaucaucaaacc

SEQ ID NO: 838443 - RNA, 19 nt, Homo sapiens
  misc_RNA (1)...(19): siRNA sense strand
ggacucacacuggagagaa

SEQ ID NO: 838444 - RNA, 19 nt, Homo sapiens
  misc_RNA (1)...(19): siRNA sense strand
gggaaaguauuuggguauc

SEQ ID NO: 838445 - RNA, 19 nt, Homo sapiens
  misc_RNA (1)...(19): siRNA sense strand
uguggaaaauccuucauua

SEQ ID NO: 838446 - RNA, 19 nt, Homo sapiens
  misc_RNA (1)...(19): siRNA sense strand
gacaccaaauauuguauac

SEQ ID NO: 838447 - RNA, 19 nt, Homo sapiens
  misc_RNA (1)...(19): siRNA sense strand
caagaaccuggccacagua

SEQ ID NO: 838448 - RNA, 19 nt, Homo sapiens
  misc_RNA (1)...(19): siRNA sense strand
caaacccagucuaaucucu

SEQ ID NO: 838449 - RNA, 19 nt, Homo sapiens
  misc_RNA (1)...(19): siRNA sense strand
gggaaagcuuacagucauc

SEQ ID NO: 838450 - RNA, 19 nt, Homo sapiens
  misc_RNA (1)...(19): siRNA sense strand
aaagacaccagcaggaaga

SEQ ID NO: 838451 - RNA, 19 nt, Homo sapiens
  misc_RNA (1)...(19): siRNA sense strand
guggagacaagcccuauga

SEQ ID NO: 838452 - RNA, 19 nt, Homo sapiens
  misc_RNA (1)...(19): siRNA sense strand
gaaaagacaccagcaggaa

SEQ ID NO: 838453 - RNA, 19 nt, Homo sapiens
  misc_RNA (1)...(19): siRNA sense strand
ccucuacagugacgugaug

SEQ ID NO: 838454 - RNA, 19 nt, Homo sapiens
  misc_RNA (1)...(19): siRNA sense strand
aggauucagugaccuuuga

SEQ ID NO: 838455 - RNA, 19 nt, Homo sapiens
  misc_RNA (1)...(19): siRNA sense strand
cauuccaguucauuucaaa

SEQ ID NO: 838456 - RNA, 19 nt, Homo sapiens
  misc_RNA (1)...(19): siRNA sense strand
uagcuuggcucucuaccua

SEQ ID NO: 838457 - RNA, 19 nt, Homo sapiens
  misc_RNA (1)...(19): siRNA sense strand
ggacaagaaagccagauga

SEQ ID NO: 838458 - RNA, 19 nt, Homo sapiens
  misc_RNA (1)...(19): siRNA sense strand
auacuucccuggacaagaa

SEQ ID NO: 838459 - RNA, 19 nt, Homo sapiens
  misc_RNA (1)...(19): siRNA sense strand
gguccuagcuuggcucucu

SEQ ID NO: 838460 - RNA, 19 nt, Homo sapiens
  misc_RNA (1)...(19): siRNA sense strand
gauucuagccuugguccua

SEQ ID NO: 838461 - RNA, 19 nt, Homo sapiens
  misc_RNA (1)...(19): siRNA sense strand
ccugggcgcuauuguguca

SEQ ID NO: 838462 - RNA, 19 nt, Homo sapiens
  misc_RNA (1)...(19): siRNA sense strand
caaauacuucccuggacaa

SEQ ID NO: 838463 - RNA, 19 nt, Homo sapiens
  misc_RNA (1)...(19): siRNA sense strand
ucauugaggguguggguaa

SEQ ID NO: 838464 - RNA, 19 nt, Homo sapiens
  misc_RNA (1)...(19): siRNA sense strand
ucugaugucacccucauug

SEQ ID NO: 838465 - RNA, 19 nt, Homo sapiens
  misc_RNA (1)...(19): siRNA sense strand
uugaggguguggguaauga

SEQ ID NO: 838466 - RNA, 19 nt, Homo sapiens
  misc_RNA (1)...(19): siRNA sense strand
gaacauuaccgacaacugu

SEQ ID NO: 838467 - RNA, 19 nt, Homo sapiens
  misc_RNA (1)...(19): siRNA sense strand
uagcuuggcucucuaccua

SEQ ID NO: 838468 - RNA, 19 nt, Homo sapiens
  misc_RNA (1)...(19): siRNA sense strand
ggacaagaaagccagauga

SEQ ID NO: 838469 - RNA, 19 nt, Homo sapiens
  misc_RNA (1)...(19): siRNA sense strand
auacuucccuggacaagaa

SEQ ID NO: 838470 - RNA, 19 nt, Homo sapiens
  misc_RNA (1)...(19): siRNA sense strand
gaaagccagaugaaacuga

SEQ ID NO: 838471 - RNA, 19 nt, Homo sapiens
  misc_RNA (1)...(19): siRNA sense strand
caagaaagccagaugaaac

SEQ ID NO: 838472 - RNA, 19 nt, Homo sapiens
  misc_RNA (1)...(19): siRNA sense strand
ugggauguauggacgauaa

SEQ ID NO: 838473 - RNA, 19 nt, Homo sapiens
  misc_RNA (1)...(19): siRNA sense strand
gacaagaaagccagaugaa

SEQ ID NO: 838474 - RNA, 19 nt, Homo sapiens
  misc_RNA (1)...(19): siRNA sense strand
gguccuagcuuggcucucu

SEQ ID NO: 838475 - RNA, 19 nt, Homo sapiens
  misc_RNA (1)...(19): siRNA sense strand
gguacuuccgaaucaauua

SEQ ID NO: 838476 - RNA, 19 nt, Homo sapiens
  misc_RNA (1)...(19): siRNA sense strand
gcacacugcguucucugaa

SEQ ID NO: 838477 - RNA, 19 nt, Homo sapiens
  misc_RNA (1)...(19): siRNA sense strand
cauggugccugucuuugug

SEQ ID NO: 838478 - RNA, 19 nt, Homo sapiens
  misc_RNA (1)...(19): siRNA sense strand
gggagucaccgucuucuuc

SEQ ID NO: 838479 - RNA, 19 nt, Homo sapiens
  misc_RNA (1)...(19): siRNA sense strand
ggagucaccgucuucuuca

SEQ ID NO: 838480 - RNA, 19 nt, Homo sapiens
  misc_RNA (1)...(19): siRNA sense strand
gauucuagccuugguccua

SEQ ID NO: 838481 - RNA, 19 nt, Homo sapiens
  misc_RNA (1)...(19): siRNA sense strand
ccuaguauuugggauguau

SEQ ID NO: 838482 - RNA, 19 nt, Homo sapiens
  misc_RNA (1)...(19): siRNA sense strand
ccugggcgcuauuguguca

SEQ ID NO: 838483 - RNA, 19 nt, Homo sapiens
  misc_RNA (1)...(19): siRNA sense strand
acaagaaagccagaugaaa

SEQ ID NO: 838484 - RNA, 19 nt, Homo sapiens
  misc_RNA (1)...(19): siRNA sense strand
caaauacuucccuggacaa

SEQ ID NO: 838485 - RNA, 19 nt, Homo sapiens
  misc_RNA (1)...(19): siRNA sense strand
cuucagcuuccuaguauuu

SEQ ID NO: 838486 - RNA, 19 nt, Homo sapiens
  misc_RNA (1)...(19): siRNA sense strand
ucauugaggguguggguaa

SEQ ID NO: 838487 - RNA, 19 nt, Homo sapiens
  misc_RNA (1)...(19): siRNA sense strand
aaagccagaugaaacugau

SEQ ID NO: 838488 - RNA, 19 nt, Homo sapiens
  misc_RNA (1)...(19): siRNA sense strand
cgaaucaauuaccgccaau

SEQ ID NO: 838489 - RNA, 19 nt, Homo sapiens
  misc_RNA (1)...(19): siRNA sense strand
ccucauggugccugucuuu

SEQ ID NO: 838490 - RNA, 19 nt, Homo sapiens
  misc_RNA (1)...(19): siRNA sense strand
cuucuucagcuuccuagua

SEQ ID NO: 838491 - RNA, 19 nt, Homo sapiens
  misc_RNA (1)...(19): siRNA sense strand
ggucugguacuuccgaauc

SEQ ID NO: 838492 - RNA, 19 nt, Homo sapiens
  misc_RNA (1)...(19): siRNA sense strand
ucugaugucacccucauug

SEQ ID NO: 838493 - RNA, 19 nt, Homo sapiens
  misc_RNA (1)...(19): siRNA sense strand
uucuucagcuuccuaguau

SEQ ID NO: 838494 - RNA, 19 nt, Homo sapiens
  misc_RNA (1)...(19): siRNA sense strand
uguuggguguggucuggua

SEQ ID NO: 838495 - RNA, 19 nt, Homo sapiens
  misc_RNA (1)...(19): siRNA sense strand
uugaggguguggguaauga

SEQ ID NO: 838496 - RNA, 19 nt, Homo sapiens
  misc_RNA (1)...(19): siRNA sense strand
caaugugggcagccucaug

SEQ ID NO: 838497 - RNA, 19 nt, Homo sapiens
  misc_RNA (1)...(19): siRNA sense strand
ggaggaagcacccaaguuc

SEQ ID NO: 838498 - RNA, 19 nt, Homo sapiens
  misc_RNA (1)...(19): siRNA sense strand
cggauacuguguuguuuga

SEQ ID NO: 838499 - RNA, 19 nt, Homo sapiens
  misc_RNA (1)...(19): siRNA sense strand
gauacuguguuguuugagu

SEQ ID NO: 838500 - RNA, 19 nt, Homo sapiens
  misc_RNA (1)...(19): siRNA sense strand
ggagcuggauguccucaag

SEQ ID NO: 838501 - RNA, 19 nt, Homo sapiens
  misc_RNA (1)...(19): siRNA sense strand
ccucuggccugcaguaucu

SEQ ID NO: 838502 - RNA, 19 nt, Homo sapiens
  misc_RNA (1)...(19): siRNA sense strand
ggguggcgguguuccagaa

SEQ ID NO: 838503 - RNA, 19 nt, Homo sapiens
  misc_RNA (1)...(19): siRNA sense strand
ucuauacccugggcauuga

SEQ ID NO: 838504 - RNA, 19 nt, Homo sapiens
  misc_RNA (1)...(19): siRNA sense strand
ggcggauacuguguuguuu

SEQ ID NO: 838505 - RNA, 19 nt, Homo sapiens
  misc_RNA (1)...(19): siRNA sense strand
auacuguguuguuugaguu

SEQ ID NO: 838506 - RNA, 19 nt, Homo sapiens
  misc_RNA (1)...(19): siRNA sense strand
gcggauacuguguuguuug

SEQ ID NO: 838507 - RNA, 19 nt, Homo sapiens
  misc_RNA (1)...(19): siRNA sense strand
uggauguccucaaguucuu

SEQ ID NO: 838508 - RNA, 19 nt, Homo sapiens
  misc_RNA (1)...(19): siRNA sense strand
ggacagccugcgcaccaau

SEQ ID NO: 838509 - RNA, 19 nt, Homo sapiens
  misc_RNA (1)...(19): siRNA sense strand
ucagggaggagcuggaugu

SEQ ID NO: 838510 - RNA, 19 nt, Homo sapiens
  misc_RNA (1)...(19): siRNA sense strand
ccaccaagggacagaagau

SEQ ID NO: 838511 - RNA, 19 nt, Homo sapiens
  misc_RNA (1)...(19): siRNA sense strand
ugucgguccuggaggguau

SEQ ID NO: 838512 - RNA, 19 nt, Homo sapiens
  misc_RNA (1)...(19): siRNA sense strand
cagcccugcccgucuguaa

SEQ ID NO: 838513 - RNA, 19 nt, Homo sapiens
  misc_RNA (1)...(19): siRNA sense strand
caagguacaucccaugauu

SEQ ID NO: 838514 - RNA, 19 nt, Homo sapiens
  misc_RNA (1)...(19): siRNA sense strand
ucacagagauguucacaca

SEQ ID NO: 838515 - RNA, 19 nt, Homo sapiens
  misc_RNA (1)...(19): siRNA sense strand
acagagauguucacacaaa

SEQ ID NO: 838516 - RNA, 19 nt, Homo sapiens
  misc_RNA (1)...(19): siRNA sense strand
caaggcagcccgcacgaua

SEQ ID NO: 838517 - RNA, 19 nt, Homo sapiens
  misc_RNA (1)...(19): siRNA sense strand
gaaguggccaugguaauga

SEQ ID NO: 838518 - RNA, 19 nt, Homo sapiens
  misc_RNA (1)...(19): siRNA sense strand
ugacaccacuggccaggaa

SEQ ID NO: 838519 - RNA, 19 nt, Homo sapiens
  misc_RNA (1)...(19): siRNA sense strand
ggaaguggccaugguaaug

SEQ ID NO: 838520 - RNA, 19 nt, Homo sapiens
  misc_RNA (1)...(19): siRNA sense strand
guacaucccaugauucuag

SEQ ID NO: 838521 - RNA, 19 nt, Homo sapiens
  misc_RNA (1)...(19): siRNA sense strand
acacugugcugucagaugu

SEQ ID NO: 838522 - RNA, 19 nt, Homo sapiens
  misc_RNA (1)...(19): siRNA sense strand
ugucagauguccaccucua

SEQ ID NO: 838523 - RNA, 19 nt, Homo sapiens
  misc_RNA (1)...(19): siRNA sense strand
ucagauguccaccucuaua

SEQ ID NO: 838524 - RNA, 19 nt, Homo sapiens
  misc_RNA (1)...(19): siRNA sense strand
gcacgauaucaucagaaua

SEQ ID NO: 838525 - RNA, 19 nt, Homo sapiens
  misc_RNA (1)...(19): siRNA sense strand
gacaagguacaucccauga

SEQ ID NO: 838526 - RNA, 19 nt, Homo sapiens
  misc_RNA (1)...(19): siRNA sense strand
cacgauaucaucagaauag

SEQ ID NO: 838527 - RNA, 19 nt, Homo sapiens
  misc_RNA (1)...(19): siRNA sense strand
ccacgagccgccucugauu

SEQ ID NO: 838528 - RNA, 19 nt, Homo sapiens
  misc_RNA (1)...(19): siRNA sense strand
gagauguucacacaaagga

SEQ ID NO: 838529 - RNA, 19 nt, Homo sapiens
  misc_RNA (1)...(19): siRNA sense strand
ccaggaaguggccauggua

SEQ ID NO: 838530 - RNA, 19 nt, Homo sapiens
  misc_RNA (1)...(19): siRNA sense strand
gaaccauagacaucucaug

SEQ ID NO: 838531 - RNA, 19 nt, Homo sapiens
  misc_RNA (1)...(19): siRNA sense strand
ccaauucaagcuucuaugg

SEQ ID NO: 838532 - RNA, 19 nt, Homo sapiens
  misc_RNA (1)...(19): siRNA sense strand
caauucaagcuucuaugga

SEQ ID NO: 838533 - RNA, 19 nt, Homo sapiens
  misc_RNA (1)...(19): siRNA sense strand
cgcacgauaucaucagaau

SEQ ID NO: 838534 - RNA, 19 nt, Homo sapiens
  misc_RNA (1)...(19): siRNA sense strand
ggauuuggacguggugaga

SEQ ID NO: 838535 - RNA, 19 nt, Homo sapiens
  misc_RNA (1)...(19): siRNA sense strand
cagagauguucacacaaag

SEQ ID NO: 838536 - RNA, 19 nt, Homo sapiens
  misc_RNA (1)...(19): siRNA sense strand
caggaaguggccaugguaa

SEQ ID NO: 838537 - RNA, 19 nt, Homo sapiens
  misc_RNA (1)...(19): siRNA sense strand
gagccuccuucugcugaga

SEQ ID NO: 838538 - RNA, 19 nt, Homo sapiens
  misc_RNA (1)...(19): siRNA sense strand
gccaugguaaugaggguuu

SEQ ID NO: 838539 - RNA, 19 nt, Homo sapiens
  misc_RNA (1)...(19): siRNA sense strand
gcuccuggcagacuacauc

SEQ ID NO: 838540 - RNA, 19 nt, Homo sapiens
  misc_RNA (1)...(19): siRNA sense strand
ggaugaggauggggauuug

SEQ ID NO: 838541 - RNA, 19 nt, Homo sapiens
  misc_RNA (1)...(19): siRNA sense strand
ccacaaccuugaauacuug

SEQ ID NO: 838542 - RNA, 19 nt, Homo sapiens
  misc_RNA (1)...(19): siRNA sense strand
uaagcaaggcccugaagua

SEQ ID NO: 838543 - RNA, 19 nt, Homo sapiens
  misc_RNA (1)...(19): siRNA sense strand
gccacaaccuugaauacuu

SEQ ID NO: 838544 - RNA, 19 nt, Homo sapiens
  misc_RNA (1)...(19): siRNA sense strand
ccaagaugcuccugaccaa

SEQ ID NO: 838545 - RNA, 19 nt, Homo sapiens
  misc_RNA (1)...(19): siRNA sense strand
gcaaggcccugaaguaccu

SEQ ID NO: 838546 - RNA, 19 nt, Homo sapiens
  misc_RNA (1)...(19): siRNA sense strand
gcccugaaguaccugaaug

SEQ ID NO: 838547 - RNA, 19 nt, Homo sapiens
  misc_RNA (1)...(19): siRNA sense strand
ccucaagcgcuguggauuu

SEQ ID NO: 838548 - RNA, 19 nt, Homo sapiens
  misc_RNA (1)...(19): siRNA sense strand
ugacgcuccuugaagauca

SEQ ID NO: 838549 - RNA, 19 nt, Homo sapiens
  misc_RNA (1)...(19): siRNA sense strand
gggcguggcauaccaagug

SEQ ID NO: 838550 - RNA, 19 nt, Homo sapiens
  misc_RNA (1)...(19): siRNA sense strand
gcaccauguugcccugcuu

SEQ ID NO: 838551 - RNA, 19 nt, Homo sapiens
  misc_RNA (1)...(19): siRNA sense strand
gaucaugagggcugcacuu

SEQ ID NO: 838552 - RNA, 19 nt, Homo sapiens
  misc_RNA (1)...(19): siRNA sense strand
uggugacgcuccuugaaga

SEQ ID NO: 838553 - RNA, 19 nt, Homo sapiens
  misc_RNA (1)...(19): siRNA sense strand
gcagggagacaccuuccau

SEQ ID NO: 838554 - RNA, 19 nt, Homo sapiens
  misc_RNA (1)...(19): siRNA sense strand
gcuccugaccaaccacuga

SEQ ID NO: 838555 - RNA, 19 nt, Homo sapiens
  misc_RNA (1)...(19): siRNA sense strand
gcacuuggggcguggcaua

SEQ ID NO: 838556 - RNA, 19 nt, Homo sapiens
  misc_RNA (1)...(19): siRNA sense strand
accaaccacugaaggcauu

SEQ ID NO: 838557 - RNA, 19 nt, Homo sapiens
  misc_RNA (1)...(19): siRNA sense strand
gugcuugguggcuacgaua

SEQ ID NO: 838558 - RNA, 19 nt, Homo sapiens
  misc_RNA (1)...(19): siRNA sense strand
aaacgacggcgacccucaa

SEQ ID NO: 838559 - RNA, 19 nt, Homo sapiens
  misc_RNA (1)...(19): siRNA sense strand
guaagcaaggcccugaagu

SEQ ID NO: 838560 - RNA, 19 nt, Homo sapiens
  misc_RNA (1)...(19): siRNA sense strand
agaauacgcugccaucaac

SEQ ID NO: 838561 - RNA, 19 nt, Homo sapiens
  misc_RNA (1)...(19): siRNA sense strand
cagaauacgcugccaucaa

SEQ ID NO: 838562 - RNA, 19 nt, Homo sapiens
  misc_RNA (1)...(19): siRNA sense strand
gcagacacgccuggaguuc

SEQ ID NO: 838563 - RNA, 19 nt, Homo sapiens
  misc_RNA (1)...(19): siRNA sense strand
uggaccaccuggaggagaa

SEQ ID NO: 838564 - RNA, 19 nt, Homo sapiens
  misc_RNA (1)...(19): siRNA sense strand
gaaagaauaucacuguuug

SEQ ID NO: 838565 - RNA, 19 nt, Homo sapiens
  misc_RNA (1)...(19): siRNA sense strand
gcgauuugcugaccaugaa

SEQ ID NO: 838566 - RNA, 19 nt, Homo sapiens
  misc_RNA (1)...(19): siRNA sense strand
caauuacuguguccugauu

SEQ ID NO: 838567 - RNA, 19 nt, Homo sapiens
  misc_RNA (1)...(19): siRNA sense strand
agacugaccuucuauggau

SEQ ID NO: 838568 - RNA, 19 nt, Homo sapiens
  misc_RNA (1)...(19): siRNA sense strand
gaaaacagggaagauauua

SEQ ID NO: 838569 - RNA, 19 nt, Homo sapiens
  misc_RNA (1)...(19): siRNA sense strand
ccucauggcucucucaaag

SEQ ID NO: 838570 - RNA, 19 nt, Homo sapiens
  misc_RNA (1)...(19): siRNA sense strand
ucagaaagcagccaggauu

SEQ ID NO: 838571 - RNA, 19 nt, Homo sapiens
  misc_RNA (1)...(19): siRNA sense strand
cagaauuccuggacagugu

SEQ ID NO: 838572 - RNA, 19 nt, Homo sapiens
  misc_RNA (1)...(19): siRNA sense strand
gggaacacacauucucuuu

SEQ ID NO: 838573 - RNA, 19 nt, Homo sapiens
  misc_RNA (1)...(19): siRNA sense strand
gccauggacugcuugaugu

SEQ ID NO: 838574 - RNA, 19 nt, Homo sapiens
  misc_RNA (1)...(19): siRNA sense strand
ccucagcaauguucagaga

SEQ ID NO: 838575 - RNA, 19 nt, Homo sapiens
  misc_RNA (1)...(19): siRNA sense strand
ggaauugccagguucuuca

SEQ ID NO: 838576 - RNA, 19 nt, Homo sapiens
  misc_RNA (1)...(19): siRNA sense strand
gaaagcagccaggauugug

SEQ ID NO: 838577 - RNA, 19 nt, Homo sapiens
  misc_RNA (1)...(19): siRNA sense strand
ccacaauaggguaucauuu

SEQ ID NO: 838578 - RNA, 19 nt, Homo sapiens
  misc_RNA (1)...(19): siRNA sense strand
caugaaagaauaucacugu

SEQ ID NO: 838579 - RNA, 19 nt, Homo sapiens
  misc_RNA (1)...(19): siRNA sense strand
ggagaugcuuccgaacugu

SEQ ID NO: 838580 - RNA, 19 nt, Homo sapiens
  misc_RNA (1)...(19): siRNA sense strand
ucaaagcaccguggaauca

SEQ ID NO: 838581 - RNA, 19 nt, Homo sapiens
  misc_RNA (1)...(19): siRNA sense strand
aauauggaauugccagguu

SEQ ID NO: 838582 - RNA, 19 nt, Homo sapiens
  misc_RNA (1)...(19): siRNA sense strand
ggagcucacucagaaagca

SEQ ID NO: 838583 - RNA, 19 nt, Homo sapiens
  misc_RNA (1)...(19): siRNA sense strand
cgacauguccucaccuaca

SEQ ID NO: 838584 - RNA, 19 nt, Homo sapiens
  misc_RNA (1)...(19): siRNA sense strand
gcacgacccagcaauggau

SEQ ID NO: 838585 - RNA, 19 nt, Homo sapiens
  misc_RNA (1)...(19): siRNA sense strand
gagacugaccuucuaugga

SEQ ID NO: 838586 - RNA, 19 nt, Homo sapiens
  misc_RNA (1)...(19): siRNA sense strand
uuacgggccuucuggagau

SEQ ID NO: 838587 - RNA, 19 nt, Homo sapiens
  misc_RNA (1)...(19): siRNA sense strand
cgcuggagcucacucagaa

SEQ ID NO: 838588 - RNA, 19 nt, Homo sapiens
  misc_RNA (1)...(19): siRNA sense strand
ucauggcucucucaaagca

SEQ ID NO: 838589 - RNA, 19 nt, Homo sapiens
  misc_RNA (1)...(19): siRNA sense strand
gcaauuacuguguccugau

SEQ ID NO: 838590 - RNA, 19 nt, Homo sapiens
  misc_RNA (1)...(19): siRNA sense strand
cagaaagcagccaggauug

SEQ ID NO: 838591 - RNA, 19 nt, Homo sapiens
  misc_RNA (1)...(19): siRNA sense strand
gcaagaaccccaacacagu

SEQ ID NO: 838592 - RNA, 19 nt, Homo sapiens
  misc_RNA (1)...(19): siRNA sense strand
uggagaugcuuccgaacug

SEQ ID NO: 838593 - RNA, 19 nt, Homo sapiens
  misc_RNA (1)...(19): siRNA sense strand
gccuagcccuaccggacua

SEQ ID NO: 838594 - RNA, 19 nt, Homo sapiens
  misc_RNA (1)...(19): siRNA sense strand
uggacugcuugaugucuuu

SEQ ID NO: 838595 - RNA, 19 nt, Homo sapiens
  misc_RNA (1)...(19): siRNA sense strand
cacaauaggguaucauuuu

SEQ ID NO: 838596 - RNA, 19 nt, Homo sapiens
  misc_RNA (1)...(19): siRNA sense strand
gaugcacgacccagcaaug

SEQ ID NO: 838597 - RNA, 19 nt, Homo sapiens
  misc_RNA (1)...(19): siRNA sense strand
caaagcaccguggaaucaa

SEQ ID NO: 838598 - RNA, 19 nt, Homo sapiens
  misc_RNA (1)...(19): siRNA sense strand
gacugaccuucuauggauu

SEQ ID NO: 838599 - RNA, 19 nt, Homo sapiens
  misc_RNA (1)...(19): siRNA sense strand
ccaggauugugcucaugga

SEQ ID NO: 838600 - RNA, 19 nt, Homo sapiens
  misc_RNA (1)...(19): siRNA sense strand
ugcugaccaugaaagaaua

SEQ ID NO: 838601 - RNA, 19 nt, Homo sapiens
  misc_RNA (1)...(19): siRNA sense strand
ucagcaauguucagagacu

SEQ ID NO: 838602 - RNA, 19 nt, Homo sapiens
  misc_RNA (1)...(19): siRNA sense strand
aggcgucgcuguucuacca

SEQ ID NO: 838603 - RNA, 19 nt, Homo sapiens
  misc_RNA (1)...(19): siRNA sense strand
acccagcaauggaugaaga

SEQ ID NO: 838604 - RNA, 19 nt, Homo sapiens
  misc_RNA (1)...(19): siRNA sense strand
aaaaguggauggagagagu

SEQ ID NO: 838605 - RNA, 19 nt, Homo sapiens
  misc_RNA (1)...(19): siRNA sense strand
cuuccgaacugugggcaaa

SEQ ID NO: 838606 - RNA, 19 nt, Homo sapiens
  misc_RNA (1)...(19): siRNA sense strand
aaacagggaagauauuagc

SEQ ID NO: 838607 - RNA, 19 nt, Homo sapiens
  misc_RNA (1)...(19): siRNA sense strand
agaauucagcuucguccaa

SEQ ID NO: 838608 - RNA, 19 nt, Homo sapiens
  misc_RNA (1)...(19): siRNA sense strand
uggcuccacugaagagaca

SEQ ID NO: 838609 - RNA, 19 nt, Homo sapiens
  misc_RNA (1)...(19): siRNA sense strand
ccccagcacuugucaaaga

SEQ ID NO: 838610 - RNA, 19 nt, Homo sapiens
  misc_RNA (1)...(19): siRNA sense strand
gggagaagcuguuaaagaa

SEQ ID NO: 838611 - RNA, 19 nt, Homo sapiens
  misc_RNA (1)...(19): siRNA sense strand
gggacaggcucaaccaauu

SEQ ID NO: 838612 - RNA, 19 nt, Homo sapiens
  misc_RNA (1)...(19): siRNA sense strand
agagaaaccucaaaacuaa

SEQ ID NO: 838613 - RNA, 19 nt, Homo sapiens
  misc_RNA (1)...(19): siRNA sense strand
ugagugggcugcugaggaa

SEQ ID NO: 838614 - RNA, 19 nt, Homo sapiens
  misc_RNA (1)...(19): siRNA sense strand
gagaagcuguuaaagaaaa

SEQ ID NO: 838615 - RNA, 19 nt, Homo sapiens
  misc_RNA (1)...(19): siRNA sense strand
gaagauguucugugaagug

SEQ ID NO: 838616 - RNA, 19 nt, Homo sapiens
  misc_RNA (1)...(19): siRNA sense strand
ucagugcuuugaaugcaua

SEQ ID NO: 838617 - RNA, 19 nt, Homo sapiens
  misc_RNA (1)...(19): siRNA sense strand
ggcaagacaucccaauucu

SEQ ID NO: 838618 - RNA, 19 nt, Homo sapiens
  misc_RNA (1)...(19): siRNA sense strand
ggagaagcuguuaaagaaa

SEQ ID NO: 838619 - RNA, 19 nt, Homo sapiens
  misc_RNA (1)...(19): siRNA sense strand
ggacaggcucaaccaauuc

SEQ ID NO: 838620 - RNA, 19 nt, Homo sapiens
  misc_RNA (1)...(19): siRNA sense strand
aacauucgauugaagaaga

SEQ ID NO: 838621 - RNA, 19 nt, Homo sapiens
  misc_RNA (1)...(19): siRNA sense strand
gaacucaccugccccaucu

SEQ ID NO: 838622 - RNA, 19 nt, Homo sapiens
  misc_RNA (1)...(19): siRNA sense strand
agacaauacagcagagaaa

SEQ ID NO: 838623 - RNA, 19 nt, Homo sapiens
  misc_RNA (1)...(19): siRNA sense strand
cagagaaaccucaaaacua

SEQ ID NO: 838624 - RNA, 19 nt, Homo sapiens
  misc_RNA (1)...(19): siRNA sense strand
gcauucacagggagacaaa

SEQ ID NO: 838625 - RNA, 19 nt, Homo sapiens
  misc_RNA (1)...(19): siRNA sense strand
gaaaaugcagucuuuaugg

SEQ ID NO: 838626 - RNA, 19 nt, Homo sapiens
  misc_RNA (1)...(19): siRNA sense strand
uaccucaacuggcaagaca

SEQ ID NO: 838627 - RNA, 19 nt, Homo sapiens
  misc_RNA (1)...(19): siRNA sense strand
ucuggaaucucgcaagucu

SEQ ID NO: 838628 - RNA, 19 nt, Homo sapiens
  misc_RNA (1)...(19): siRNA sense strand
ugggagaagcuguuaaaga

SEQ ID NO: 838629 - RNA, 19 nt, Homo sapiens
  misc_RNA (1)...(19): siRNA sense strand
ccaucugcaugaacuacuu

SEQ ID NO: 838630 - RNA, 19 nt, Homo sapiens
  misc_RNA (1)...(19): siRNA sense strand
gaaggcuuuuggagacaua

SEQ ID NO: 838631 - RNA, 19 nt, Homo sapiens
  misc_RNA (1)...(19): siRNA sense strand
uggcaagacaucccaauuc

SEQ ID NO: 838632 - RNA, 19 nt, Homo sapiens
  misc_RNA (1)...(19): siRNA sense strand
gaaugcauaaagacaauac

SEQ ID NO: 838633 - RNA, 19 nt, Homo sapiens
  misc_RNA (1)...(19): siRNA sense strand
gggagacaaagaagauguu

SEQ ID NO: 838634 - RNA, 19 nt, Homo sapiens
  misc_RNA (1)...(19): siRNA sense strand
gagaaaccugaauguggaa

SEQ ID NO: 838635 - RNA, 19 nt, Homo sapiens
  misc_RNA (1)...(19): siRNA sense strand
acacugggagaagcuguua

SEQ ID NO: 838636 - RNA, 19 nt, Homo sapiens
  misc_RNA (1)...(19): siRNA sense strand
acagggagacaaagaagau

SEQ ID NO: 838637 - RNA, 19 nt, Homo sapiens
  misc_RNA (1)...(19): siRNA sense strand
caggagcaccgguaucaca

SEQ ID NO: 838638 - RNA, 19 nt, Homo sapiens
  misc_RNA (1)...(19): siRNA sense strand
ggcuauuccugagcucuga

SEQ ID NO: 838639 - RNA, 19 nt, Homo sapiens
  misc_RNA (1)...(19): siRNA sense strand
uggaaucucgcaagucuuc

SEQ ID NO: 838640 - RNA, 19 nt, Homo sapiens
  misc_RNA (1)...(19): siRNA sense strand
ggagacaaagaagauguuc

SEQ ID NO: 838641 - RNA, 19 nt, Homo sapiens
  misc_RNA (1)...(19): siRNA sense strand
gcagagaaaccucaaaacu

SEQ ID NO: 838642 - RNA, 19 nt, Homo sapiens
  misc_RNA (1)...(19): siRNA sense strand
ggagcaccgguaucacaga

SEQ ID NO: 838643 - RNA, 19 nt, Homo sapiens
  misc_RNA (1)...(19): siRNA sense strand
ccucaaaacuaacauucga

SEQ ID NO: 838644 - RNA, 19 nt, Homo sapiens
  misc_RNA (1)...(19): siRNA sense strand
caucaaagcccagaauuuc

SEQ ID NO: 838645 - RNA, 19 nt, Homo sapiens
  misc_RNA (1)...(19): siRNA sense strand
gcagaugaagggaauguug

SEQ ID NO: 838646 - RNA, 19 nt, Homo sapiens
  misc_RNA (1)...(19): siRNA sense strand
ggacgcagcaccaucaaag

SEQ ID NO: 838647 - RNA, 19 nt, Homo sapiens
  misc_RNA (1)...(19): siRNA sense strand
uuaaggcugcugagaauuu

SEQ ID NO: 838648 - RNA, 19 nt, Homo sapiens
  misc_RNA (1)...(19): siRNA sense strand
ccaucaaagcccagaauuu

SEQ ID NO: 838649 - RNA, 19 nt, Homo sapiens
  misc_RNA (1)...(19): siRNA sense strand
aagggaauguugcuggaaa

SEQ ID NO: 838650 - RNA, 19 nt, Homo sapiens
  misc_RNA (1)...(19): siRNA sense strand
uaaggcugcugagaauuuc

SEQ ID NO: 838651 - RNA, 19 nt, Homo sapiens
  misc_RNA (1)...(19): siRNA sense strand
gaagggaauguugcuggaa

SEQ ID NO: 838652 - RNA, 19 nt, Homo sapiens
  misc_RNA (1)...(19): siRNA sense strand
gaauguuggugaagauuua

SEQ ID NO: 838653 - RNA, 19 nt, Homo sapiens
  misc_RNA (1)...(19): siRNA sense strand
gaagauaacgaaugugaua

SEQ ID NO: 838654 - RNA, 19 nt, Homo sapiens
  misc_RNA (1)...(19): siRNA sense strand
gcaaaugaauguuggugaa

SEQ ID NO: 838655 - RNA, 19 nt, Homo sapiens
  misc_RNA (1)...(19): siRNA sense strand
agugauaacucuucugaua

SEQ ID NO: 838656 - RNA, 19 nt, Homo sapiens
  misc_RNA (1)...(19): siRNA sense strand
cauaguaaguucugaauuc

SEQ ID NO: 838657 - RNA, 19 nt, Homo sapiens
  misc_RNA (1)...(19): siRNA sense strand
gaacaccaccugaaagaau

SEQ ID NO: 838658 - RNA, 19 nt, Homo sapiens
  misc_RNA (1)...(19): siRNA sense strand
gagaaauccuauauacuca

SEQ ID NO: 838659 - RNA, 19 nt, Homo sapiens
  misc_RNA (1)...(19): siRNA sense strand
ucugauagcagcuuauuua

SEQ ID NO: 838660 - RNA, 19 nt, Homo sapiens
  misc_RNA (1)...(19): siRNA sense strand
cgaaugugauaucaaauug

SEQ ID NO: 838661 - RNA, 19 nt, Homo sapiens
  misc_RNA (1)...(19): siRNA sense strand
ggagaaauccuauauacuc

SEQ ID NO: 838662 - RNA, 19 nt, Homo sapiens
  misc_RNA (1)...(19): siRNA sense strand
gaaagaaucauugaagcaa

SEQ ID NO: 838663 - RNA, 19 nt, Homo sapiens
  misc_RNA (1)...(19): siRNA sense strand
ggauaaaucaggaauagau

SEQ ID NO: 838664 - RNA, 19 nt, Homo sapiens
  misc_RNA (1)...(19): siRNA sense strand
aagacugaguguauacuua

SEQ ID NO: 838665 - RNA, 19 nt, Homo sapiens
  misc_RNA (1)...(19): siRNA sense strand
uagauucucuugaccaugu

SEQ ID NO: 838666 - RNA, 19 nt, Homo sapiens
  misc_RNA (1)...(19): siRNA sense strand
aagaggauauuacugaaga

SEQ ID NO: 838667 - RNA, 19 nt, Homo sapiens
  misc_RNA (1)...(19): siRNA sense strand
ggggauaguuucauaguaa

SEQ ID NO: 838668 - RNA, 19 nt, Homo sapiens
  misc_RNA (1)...(19): siRNA sense strand
uugaaaagcugaaguauga

SEQ ID NO: 838669 - RNA, 19 nt, Homo sapiens
  misc_RNA (1)...(19): siRNA sense strand
ggauccauuucuccuauug

SEQ ID NO: 838670 - RNA, 19 nt, Homo sapiens
  misc_RNA (1)...(19): siRNA sense strand
gaguguauacuuagaagaa

SEQ ID NO: 838671 - RNA, 19 nt, Homo sapiens
  misc_RNA (1)...(19): siRNA sense strand
gaaauccuauauacucacu

SEQ ID NO: 838672 - RNA, 19 nt, Homo sapiens
  misc_RNA (1)...(19): siRNA sense strand
aagaagaggauauuacuga

SEQ ID NO: 838673 - RNA, 19 nt, Homo sapiens
  misc_RNA (1)...(19): siRNA sense strand
aaacucaguguaucccuua

SEQ ID NO: 838674 - RNA, 19 nt, Homo sapiens
  misc_RNA (1)...(19): siRNA sense strand
ugacagucguagauacaaa

SEQ ID NO: 838675 - RNA, 19 nt, Homo sapiens
  misc_RNA (1)...(19): siRNA sense strand
ggauauuacugaagaagcu

SEQ ID NO: 838676 - RNA, 19 nt, Homo sapiens
  misc_RNA (1)...(19): siRNA sense strand
caucaagugacucaucuuu

SEQ ID NO: 838677 - RNA, 19 nt, Homo sapiens
  misc_RNA (1)...(19): siRNA sense strand
ggacagagaggccugaaaa

SEQ ID NO: 838678 - RNA, 19 nt, Homo sapiens
  misc_RNA (1)...(19): siRNA sense strand
agaagaggauauuacugaa

SEQ ID NO: 838679 - RNA, 19 nt, Homo sapiens
  misc_RNA (1)...(19): siRNA sense strand
ggaugaggaugcaacacau

SEQ ID NO: 838680 - RNA, 19 nt, Homo sapiens
  misc_RNA (1)...(19): siRNA sense strand
ggaucuggcuucccauuuu

SEQ ID NO: 838681 - RNA, 19 nt, Homo sapiens
  misc_RNA (1)...(19): siRNA sense strand
guaugaacaccaccugaaa

SEQ ID NO: 838682 - RNA, 19 nt, Homo sapiens
  misc_RNA (1)...(19): siRNA sense strand
ucaagugacucaucuuuug

SEQ ID NO: 838683 - RNA, 19 nt, Homo sapiens
  misc_RNA (1)...(19): siRNA sense strand
gaagaagaggauauuacug

SEQ ID NO: 838684 - RNA, 19 nt, Homo sapiens
  misc_RNA (1)...(19): siRNA sense strand
aaaugaauguuggugaaga

SEQ ID NO: 838685 - RNA, 19 nt, Homo sapiens
  misc_RNA (1)...(19): siRNA sense strand
gcaaaucgaagugauaacu

SEQ ID NO: 838686 - RNA, 19 nt, Homo sapiens
  misc_RNA (1)...(19): siRNA sense strand
gaaaagaaaccccauucga

SEQ ID NO: 838687 - RNA, 19 nt, Homo sapiens
  misc_RNA (1)...(19): siRNA sense strand
gaagaggauauuacugaag

SEQ ID NO: 838688 - RNA, 19 nt, Homo sapiens
  misc_RNA (1)...(19): siRNA sense strand
ccagaaggaaggagaaauc

SEQ ID NO: 838689 - RNA, 19 nt, Homo sapiens
  misc_RNA (1)...(19): siRNA sense strand
ccuguaagacugaguguau

SEQ ID NO: 838690 - RNA, 19 nt, Homo sapiens
  misc_RNA (1)...(19): siRNA sense strand
gaaaccccauucgaaaauu

SEQ ID NO: 838691 - RNA, 19 nt, Homo sapiens
  misc_RNA (1)...(19): siRNA sense strand
guguauacuuagaagaaga

SEQ ID NO: 838692 - RNA, 19 nt, Homo sapiens
  misc_RNA (1)...(19): siRNA sense strand
gggauaguuucauaguaag

SEQ ID NO: 838693 - RNA, 19 nt, Homo sapiens
  misc_RNA (1)...(19): siRNA sense strand
ggagucaacagcagaggau

SEQ ID NO: 838694 - RNA, 19 nt, Homo sapiens
  misc_RNA (1)...(19): siRNA sense strand
caauuuagaagcagaggau

SEQ ID NO: 838695 - RNA, 19 nt, Homo sapiens
  misc_RNA (1)...(19): siRNA sense strand
ugaauguuggugaagauuu

SEQ ID NO: 838696 - RNA, 19 nt, Homo sapiens
  misc_RNA (1)...(19): siRNA sense strand
ugauaacucuucugauagc

SEQ ID NO: 838697 - RNA, 19 nt, Homo sapiens
  misc_RNA (1)...(19): siRNA sense strand
gaggaucuggcuucccauu

SEQ ID NO: 838698 - RNA, 19 nt, Homo sapiens
  misc_RNA (1)...(19): siRNA sense strand
aaaagaaaccccauucgaa

SEQ ID NO: 838699 - RNA, 19 nt, Homo sapiens
  misc_RNA (1)...(19): siRNA sense strand
cuguaagacugaguguaua

SEQ ID NO: 838700 - RNA, 19 nt, Homo sapiens
  misc_RNA (1)...(19): siRNA sense strand
aaaucgaagugauaacucu

SEQ ID NO: 838701 - RNA, 19 nt, Homo sapiens
  misc_RNA (1)...(19): siRNA sense strand
ugaaagaaucauugaagca

SEQ ID NO: 838702 - RNA, 19 nt, Homo sapiens
  misc_RNA (1)...(19): siRNA sense strand
aaagaaaccccauucgaaa

SEQ ID NO: 838703 - RNA, 19 nt, Homo sapiens
  misc_RNA (1)...(19): siRNA sense strand
ggcaggggauaguuucaua

SEQ ID NO: 838704 - RNA, 19 nt, Homo sapiens
  misc_RNA (1)...(19): siRNA sense strand
gacugaguguauacuuaga

SEQ ID NO: 838705 - RNA, 19 nt, Homo sapiens
  misc_RNA (1)...(19): siRNA sense strand
guucugaauucccuguaag

SEQ ID NO: 838706 - RNA, 19 nt, Homo sapiens
  misc_RNA (1)...(19): siRNA sense strand
aaacgcaccuuggagaaaa

SEQ ID NO: 838707 - RNA, 19 nt, Homo sapiens
  misc_RNA (1)...(19): siRNA sense strand
ccaccugaaagaaucauug

SEQ ID NO: 838708 - RNA, 19 nt, Homo sapiens
  misc_RNA (1)...(19): siRNA sense strand
gaaaguguucacgcaagug

SEQ ID NO: 838709 - RNA, 19 nt, Homo sapiens
  misc_RNA (1)...(19): siRNA sense strand
gugauaacucuucugauag

SEQ ID NO: 838710 - RNA, 19 nt, Homo sapiens
  misc_RNA (1)...(19): siRNA sense strand
uagaagaagaggauauuac

SEQ ID NO: 838711 - RNA, 19 nt, Homo sapiens
  misc_RNA (1)...(19): siRNA sense strand
uugaagauaacgaauguga

SEQ ID NO: 838712 - RNA, 19 nt, Homo sapiens
  misc_RNA (1)...(19): siRNA sense strand
aaugaauguuggugaagau

SEQ ID NO: 838713 - RNA, 19 nt, Homo sapiens
  misc_RNA (1)...(19): siRNA sense strand
gaauucccuguaagacuga

SEQ ID NO: 838714 - RNA, 19 nt, Homo sapiens
  misc_RNA (1)...(19): siRNA sense strand
gaccagaaggaaggagaaa

SEQ ID NO: 838715 - RNA, 19 nt, Homo sapiens
  misc_RNA (1)...(19): siRNA sense strand
uaagacugaguguauacuu

SEQ ID NO: 838716 - RNA, 19 nt, Homo sapiens
  misc_RNA (1)...(19): siRNA sense strand
gacagucguagauacaaau

SEQ ID NO: 838717 - RNA, 19 nt, Homo sapiens
  misc_RNA (1)...(19): siRNA sense strand
ccugaaagaaucauugaag

SEQ ID NO: 838718 - RNA, 19 nt, Homo sapiens
  misc_RNA (1)...(19): siRNA sense strand
gauccauuucuccuauuga

SEQ ID NO: 838719 - RNA, 19 nt, Homo sapiens
  misc_RNA (1)...(19): siRNA sense strand
agaagaagaggauauuacu

SEQ ID NO: 838720 - RNA, 19 nt, Homo sapiens
  misc_RNA (1)...(19): siRNA sense strand
aauagauucucuugaccau

SEQ ID NO: 838721 - RNA, 19 nt, Homo sapiens
  misc_RNA (1)...(19): siRNA sense strand
gaaugugauaucaaauugg

SEQ ID NO: 838722 - RNA, 19 nt, Homo sapiens
  misc_RNA (1)...(19): siRNA sense strand
gagaaaagaaaccccauuc

SEQ ID NO: 838723 - RNA, 19 nt, Homo sapiens
  misc_RNA (1)...(19): siRNA sense strand
gauaacucuucugauagca

SEQ ID NO: 838724 - RNA, 19 nt, Homo sapiens
  misc_RNA (1)...(19): siRNA sense strand
cugauagcagcuuauuuaa

SEQ ID NO: 838725 - RNA, 19 nt, Homo sapiens
  misc_RNA (1)...(19): siRNA sense strand
auacuuagaagaagaggau

SEQ ID NO: 838726 - RNA, 19 nt, Homo sapiens
  misc_RNA (1)...(19): siRNA sense strand
agacugaguguauacuuag

SEQ ID NO: 838727 - RNA, 19 nt, Homo sapiens
  misc_RNA (1)...(19): siRNA sense strand
caccugaaagaaucauuga

SEQ ID NO: 838728 - RNA, 19 nt, Homo sapiens
  misc_RNA (1)...(19): siRNA sense strand
ugacucaucuuuugaacca

SEQ ID NO: 838729 - RNA, 19 nt, Homo sapiens
  misc_RNA (1)...(19): siRNA sense strand
uugcaaaucgaagugauaa

SEQ ID NO: 838730 - RNA, 19 nt, Homo sapiens
  misc_RNA (1)...(19): siRNA sense strand
guaccagccaacaggaaga

SEQ ID NO: 838731 - RNA, 19 nt, Homo sapiens
  misc_RNA (1)...(19): siRNA sense strand
aaagauucaagaacaggaa

SEQ ID NO: 838732 - RNA, 19 nt, Homo sapiens
  misc_RNA (1)...(19): siRNA sense strand
aaaccccauucgaaaauuu

SEQ ID NO: 838733 - RNA, 19 nt, Homo sapiens
  misc_RNA (1)...(19): siRNA sense strand
cagagaggccugaaaaugu

SEQ ID NO: 838734 - RNA, 19 nt, Homo sapiens
  misc_RNA (1)...(19): siRNA sense strand
agaggauauuacugaagaa

SEQ ID NO: 838735 - RNA, 19 nt, Homo sapiens
  misc_RNA (1)...(19): siRNA sense strand
caaaugaauguuggugaag

SEQ ID NO: 838736 - RNA, 19 nt, Homo sapiens
  misc_RNA (1)...(19): siRNA sense strand
aacaccaccugaaagaauc

SEQ ID NO: 838737 - RNA, 19 nt, Homo sapiens
  misc_RNA (1)...(19): siRNA sense strand
aaacacagcucaaagauua

SEQ ID NO: 838738 - RNA, 19 nt, Homo sapiens
  misc_RNA (1)...(19): siRNA sense strand
gcucauggauucucccuua

SEQ ID NO: 838739 - RNA, 19 nt, Homo sapiens
  misc_RNA (1)...(19): siRNA sense strand
gaaauugugcucaagguua

SEQ ID NO: 838740 - RNA, 19 nt, Homo sapiens
  misc_RNA (1)...(19): siRNA sense strand
gcaaucagcccaggaguua

SEQ ID NO: 838741 - RNA, 19 nt, Homo sapiens
  misc_RNA (1)...(19): siRNA sense strand
acacaaagguuaccaugaa

SEQ ID NO: 838742 - RNA, 19 nt, Homo sapiens
  misc_RNA (1)...(19): siRNA sense strand
ccaagaagaucgaugucua

SEQ ID NO: 838743 - RNA, 19 nt, Homo sapiens
  misc_RNA (1)...(19): siRNA sense strand
aaagagaagccuccaauuu

SEQ ID NO: 838744 - RNA, 19 nt, Homo sapiens
  misc_RNA (1)...(19): siRNA sense strand
auaaacaccucuacuuuga

SEQ ID NO: 838745 - RNA, 19 nt, Homo sapiens
  misc_RNA (1)...(19): siRNA sense strand
gggaagcagucgauauuau

SEQ ID NO: 838746 - RNA, 19 nt, Homo sapiens
  misc_RNA (1)...(19): siRNA sense strand
ggacuuugguauuagaaga

SEQ ID NO: 838747 - RNA, 19 nt, Homo sapiens
  misc_RNA (1)...(19): siRNA sense strand
gauagacccuguuacgaau

SEQ ID NO: 838748 - RNA, 19 nt, Homo sapiens
  misc_RNA (1)...(19): siRNA sense strand
gaggaggauucgcaaauug

SEQ ID NO: 838749 - RNA, 19 nt, Homo sapiens
  misc_RNA (1)...(19): siRNA sense strand
ggaguuaaagucacuguuu

SEQ ID NO: 838750 - RNA, 19 nt, Homo sapiens
  misc_RNA (1)...(19): siRNA sense strand
ugaaggaaaucuuacugaa

SEQ ID NO: 838751 - RNA, 19 nt, Homo sapiens
  misc_RNA (1)...(19): siRNA sense strand
uaagcaaucacgacuauaa

SEQ ID NO: 838752 - RNA, 19 nt, Homo sapiens
  misc_RNA (1)...(19): siRNA sense strand
guagagauagacccuguua

SEQ ID NO: 838753 - RNA, 19 nt, Homo sapiens
  misc_RNA (1)...(19): siRNA sense strand
gaguuaaagucacuguuug

SEQ ID NO: 838754 - RNA, 19 nt, Homo sapiens
  misc_RNA (1)...(19): siRNA sense strand
gcacuaaguuuuggauuaa

SEQ ID NO: 838755 - RNA, 19 nt, Homo sapiens
  misc_RNA (1)...(19): siRNA sense strand
aaacccaucucaaucgauu

SEQ ID NO: 838756 - RNA, 19 nt, Homo sapiens
  misc_RNA (1)...(19): siRNA sense strand
gagacaaaguagagauaga

SEQ ID NO: 838757 - RNA, 19 nt, Homo sapiens
  misc_RNA (1)...(19): siRNA sense strand
aaauugugcucaagguuaa

SEQ ID NO: 838758 - RNA, 19 nt, Homo sapiens
  misc_RNA (1)...(19): siRNA sense strand
ucacguaucuaagcaauca

SEQ ID NO: 838759 - RNA, 19 nt, Homo sapiens
  misc_RNA (1)...(19): siRNA sense strand
ugaccuugcugaagagaaa

SEQ ID NO: 838760 - RNA, 19 nt, Homo sapiens
  misc_RNA (1)...(19): siRNA sense strand
gaaagccagcacuaaguuu

SEQ ID NO: 838761 - RNA, 19 nt, Homo sapiens
  misc_RNA (1)...(19): siRNA sense strand
gcagaaacccaucucaauc

SEQ ID NO: 838762 - RNA, 19 nt, Homo sapiens
  misc_RNA (1)...(19): siRNA sense strand
gaaauucagggaagcaaug

SEQ ID NO: 838763 - RNA, 19 nt, Homo sapiens
  misc_RNA (1)...(19): siRNA sense strand
aaacaccucuacuuugaau

SEQ ID NO: 838764 - RNA, 19 nt, Homo sapiens
  misc_RNA (1)...(19): siRNA sense strand
ggucugacauccaaagagu

SEQ ID NO: 838765 - RNA, 19 nt, Homo sapiens
  misc_RNA (1)...(19): siRNA sense strand
gacagugggucagaaauuc

SEQ ID NO: 838766 - RNA, 19 nt, Homo sapiens
  misc_RNA (1)...(19): siRNA sense strand
caacagcaaccaagaagau

SEQ ID NO: 838767 - RNA, 19 nt, Homo sapiens
  misc_RNA (1)...(19): siRNA sense strand
ggacaauccaacuaucauu

SEQ ID NO: 838768 - RNA, 19 nt, Homo sapiens
  misc_RNA (1)...(19): siRNA sense strand
ugaggaggauucgcaaauu

SEQ ID NO: 838769 - RNA, 19 nt, Homo sapiens
  misc_RNA (1)...(19): siRNA sense strand
caauccaacuaucauucua

SEQ ID NO: 838770 - RNA, 19 nt, Homo sapiens
  misc_RNA (1)...(19): siRNA sense strand
ccugugaccuugcugaaga

SEQ ID NO: 838771 - RNA, 19 nt, Homo sapiens
  misc_RNA (1)...(19): siRNA sense strand
gaaggaaaucuuacugaag

SEQ ID NO: 838772 - RNA, 19 nt, Homo sapiens
  misc_RNA (1)...(19): siRNA sense strand
aauaaaugcugcucaugga

SEQ ID NO: 838773 - RNA, 19 nt, Homo sapiens
  misc_RNA (1)...(19): siRNA sense strand
guacaacagcaaccaagaa

SEQ ID NO: 838774 - RNA, 19 nt, Homo sapiens
  misc_RNA (1)...(19): siRNA sense strand
ggagacagugggucagaaa

SEQ ID NO: 838775 - RNA, 19 nt, Homo sapiens
  misc_RNA (1)...(19): siRNA sense strand
uauaaacaccucuacuuug

SEQ ID NO: 838776 - RNA, 19 nt, Homo sapiens
  misc_RNA (1)...(19): siRNA sense strand
cuauaaacaccucuacuuu

SEQ ID NO: 838777 - RNA, 19 nt, Homo sapiens
  misc_RNA (1)...(19): siRNA sense strand
ucuaagcaaucacgacuau

SEQ ID NO: 838778 - RNA, 19 nt, Homo sapiens
  misc_RNA (1)...(19): siRNA sense strand
caaacacagcucaaagauu

SEQ ID NO: 838779 - RNA, 19 nt, Homo sapiens
  misc_RNA (1)...(19): siRNA sense strand
gcucaagguuaacuacauc

SEQ ID NO: 838780 - RNA, 19 nt, Homo sapiens
  misc_RNA (1)...(19): siRNA sense strand
gcaaucacgacuauaaaca

SEQ ID NO: 838781 - RNA, 19 nt, Homo sapiens
  misc_RNA (1)...(19): siRNA sense strand
gcauauugcugaggaugau

SEQ ID NO: 838782 - RNA, 19 nt, Homo sapiens
  misc_RNA (1)...(19): siRNA sense strand
gggaaugugugagaugguu

SEQ ID NO: 838783 - RNA, 19 nt, Homo sapiens
  misc_RNA (1)...(19): siRNA sense strand
caaagagaagccuccaauu

SEQ ID NO: 838784 - RNA, 19 nt, Homo sapiens
  misc_RNA (1)...(19): siRNA sense strand
guggacaacacaaagguua

SEQ ID NO: 838785 - RNA, 19 nt, Homo sapiens
  misc_RNA (1)...(19): siRNA sense strand
cauggauucucccuuauuc

SEQ ID NO: 838786 - RNA, 19 nt, Homo sapiens
  misc_RNA (1)...(19): siRNA sense strand
aagagaagccuccaauuuc

SEQ ID NO: 838787 - RNA, 19 nt, Homo sapiens
  misc_RNA (1)...(19): siRNA sense strand
caaccaagaagaucgaugu

SEQ ID NO: 838788 - RNA, 19 nt, Homo sapiens
  misc_RNA (1)...(19): siRNA sense strand
uaaaugcugcucauggauu

SEQ ID NO: 838789 - RNA, 19 nt, Homo sapiens
  misc_RNA (1)...(19): siRNA sense strand
gacagacugcugccaauga

SEQ ID NO: 838790 - RNA, 19 nt, Homo sapiens
  misc_RNA (1)...(19): siRNA sense strand
uaccaugaaggaaaucuua

SEQ ID NO: 838791 - RNA, 19 nt, Homo sapiens
  misc_RNA (1)...(19): siRNA sense strand
gaacgacuccgaaaagaga

SEQ ID NO: 838792 - RNA, 19 nt, Homo sapiens
  misc_RNA (1)...(19): siRNA sense strand
caaugaccguggugacaau

SEQ ID NO: 838793 - RNA, 19 nt, Homo sapiens
  misc_RNA (1)...(19): siRNA sense strand
cauucuagcucauauucga

SEQ ID NO: 838794 - RNA, 19 nt, Homo sapiens
  misc_RNA (1)...(19): siRNA sense strand
aaacugaacagacguacga

SEQ ID NO: 838795 - RNA, 19 nt, Homo sapiens
  misc_RNA (1)...(19): siRNA sense strand
ugacauagccacaguacag

SEQ ID NO: 838796 - RNA, 19 nt, Homo sapiens
  misc_RNA (1)...(19): siRNA sense strand
ucaaagagaagccuccaau

SEQ ID NO: 838797 - RNA, 19 nt, Homo sapiens
  misc_RNA (1)...(19): siRNA sense strand
aguugggacuuugguauua

SEQ ID NO: 838798 - RNA, 19 nt, Homo sapiens
  misc_RNA (1)...(19): siRNA sense strand
gggaagcaauggugagacu

SEQ ID NO: 838799 - RNA, 19 nt, Homo sapiens
  misc_RNA (1)...(19): siRNA sense strand
gaaauccgggcagcaguga

SEQ ID NO: 838800 - RNA, 19 nt, Homo sapiens
  misc_RNA (1)...(19): siRNA sense strand
aaacucacguaucuaagca

SEQ ID NO: 838801 - RNA, 19 nt, Homo sapiens
  misc_RNA (1)...(19): siRNA sense strand
agauagacccuguuacgaa

SEQ ID NO: 838802 - RNA, 19 nt, Homo sapiens
  misc_RNA (1)...(19): siRNA sense strand
agccgaagcucaaugacaa

SEQ ID NO: 838803 - RNA, 19 nt, Homo sapiens
  misc_RNA (1)...(19): siRNA sense strand
gauuagaacgacuccgaaa

SEQ ID NO: 838804 - RNA, 19 nt, Homo sapiens
  misc_RNA (1)...(19): siRNA sense strand
cuauguauaugcccaguca

SEQ ID NO: 838805 - RNA, 19 nt, Homo sapiens
  misc_RNA (1)...(19): siRNA sense strand
agacucagggcuauguaua

SEQ ID NO: 838806 - RNA, 19 nt, Homo sapiens
  misc_RNA (1)...(19): siRNA sense strand
ccagucacgcaauauuuaa

SEQ ID NO: 838807 - RNA, 19 nt, Homo sapiens
  misc_RNA (1)...(19): siRNA sense strand
cccagucacgcaauauuua

SEQ ID NO: 838808 - RNA, 19 nt, Homo sapiens
  misc_RNA (1)...(19): siRNA sense strand
gagaagauucauccuccuu

SEQ ID NO: 838809 - RNA, 19 nt, Homo sapiens
  misc_RNA (1)...(19): siRNA sense strand
uuaacuacauccuggaauc

SEQ ID NO: 838810 - RNA, 19 nt, Homo sapiens
  misc_RNA (1)...(19): siRNA sense strand
caaagguuaccaugaagga

SEQ ID NO: 838811 - RNA, 19 nt, Homo sapiens
  misc_RNA (1)...(19): siRNA sense strand
gacaauccaacuaucauuc

SEQ ID NO: 838812 - RNA, 19 nt, Homo sapiens
  misc_RNA (1)...(19): siRNA sense strand
agacagugggucagaaauu

SEQ ID NO: 838813 - RNA, 19 nt, Homo sapiens
  misc_RNA (1)...(19): siRNA sense strand
gcugcuaccgucaaugaaa

SEQ ID NO: 838814 - RNA, 19 nt, Homo sapiens
  misc_RNA (1)...(19): siRNA sense strand
cacgcaauauuuaaacuca

SEQ ID NO: 838815 - RNA, 19 nt, Homo sapiens
  misc_RNA (1)...(19): siRNA sense strand
gucacucuuuguucgaaua

SEQ ID NO: 838816 - RNA, 19 nt, Homo sapiens
  misc_RNA (1)...(19): siRNA sense strand
guacuuuggcccugguuga

SEQ ID NO: 838817 - RNA, 19 nt, Homo sapiens
  misc_RNA (1)...(19): siRNA sense strand
uggcaagggucauguaggu

SEQ ID NO: 838818 - RNA, 19 nt, Homo sapiens
  misc_RNA (1)...(19): siRNA sense strand
cauuacaagucauucaaag

SEQ ID NO: 838819 - RNA, 19 nt, Homo sapiens
  misc_RNA (1)...(19): siRNA sense strand
gauguugaccuagagaaga

SEQ ID NO: 838820 - RNA, 19 nt, Homo sapiens
  misc_RNA (1)...(19): siRNA sense strand
gauucauccuccuucaaug

SEQ ID NO: 838821 - RNA, 19 nt, Homo sapiens
  misc_RNA (1)...(19): siRNA sense strand
gguauuagaagacgcucaa

SEQ ID NO: 838822 - RNA, 19 nt, Homo sapiens
  misc_RNA (1)...(19): siRNA sense strand
gcgauucacaaccgacgua

SEQ ID NO: 838823 - RNA, 19 nt, Homo sapiens
  misc_RNA (1)...(19): siRNA sense strand
aaaugcugcucauggauuc

SEQ ID NO: 838824 - RNA, 19 nt, Homo sapiens
  misc_RNA (1)...(19): siRNA sense strand
gacaaaaccagaucaaaug

SEQ ID NO: 838825 - RNA, 19 nt, Homo sapiens
  misc_RNA (1)...(19): siRNA sense strand
uagaagacgcucaaacaca

SEQ ID NO: 838826 - RNA, 19 nt, Homo sapiens
  misc_RNA (1)...(19): siRNA sense strand
agaaagccagcacuaaguu

SEQ ID NO: 838827 - RNA, 19 nt, Homo sapiens
  misc_RNA (1)...(19): siRNA sense strand
cagaaagccagcacuaagu

SEQ ID NO: 838828 - RNA, 19 nt, Homo sapiens
  misc_RNA (1)...(19): siRNA sense strand
ucagaaagccagcacuaag

SEQ ID NO: 838829 - RNA, 19 nt, Homo sapiens
  misc_RNA (1)...(19): siRNA sense strand
gagauagacccuguuacga

SEQ ID NO: 838830 - RNA, 19 nt, Homo sapiens
  misc_RNA (1)...(19): siRNA sense strand
uacaagucauucaaaguca

SEQ ID NO: 838831 - RNA, 19 nt, Homo sapiens
  misc_RNA (1)...(19): siRNA sense strand
ggacagacugcugccaaug

SEQ ID NO: 838832 - RNA, 19 nt, Homo sapiens
  misc_RNA (1)...(19): siRNA sense strand
aaucagcccaggaguuaaa

SEQ ID NO: 838833 - RNA, 19 nt, Homo sapiens
  misc_RNA (1)...(19): siRNA sense strand
gcucaaacacagcucaaag

SEQ ID NO: 838834 - RNA, 19 nt, Homo sapiens
  misc_RNA (1)...(19): siRNA sense strand
aaaggaucccagaaaguuu

SEQ ID NO: 838835 - RNA, 19 nt, Homo sapiens
  misc_RNA (1)...(19): siRNA sense strand
ucaaacacagcucaaagau

SEQ ID NO: 838836 - RNA, 19 nt, Homo sapiens
  misc_RNA (1)...(19): siRNA sense strand
agaaacccaucucaaucga

SEQ ID NO: 838837 - RNA, 19 nt, Homo sapiens
  misc_RNA (1)...(19): siRNA sense strand
gcaaugugguggugcguua

SEQ ID NO: 838838 - RNA, 19 nt, Homo sapiens
  misc_RNA (1)...(19): siRNA sense strand
gcaagaauaucaucaucug

SEQ ID NO: 838839 - RNA, 19 nt, Homo sapiens
  misc_RNA (1)...(19): siRNA sense strand
gagccaaggugguuguauu

SEQ ID NO: 838840 - RNA, 19 nt, Homo sapiens
  misc_RNA (1)...(19): siRNA sense strand
gccaguaccuagaacuuaa

SEQ ID NO: 838841 - RNA, 19 nt, Homo sapiens
  misc_RNA (1)...(19): siRNA sense strand
agaaugagcuggcccacuu

SEQ ID NO: 838842 - RNA, 19 nt, Homo sapiens
  misc_RNA (1)...(19): siRNA sense strand
gaguugagccggaaauuug

SEQ ID NO: 838843 - RNA, 19 nt, Homo sapiens
  misc_RNA (1)...(19): siRNA sense strand
gagcuucgguccuaccaau

SEQ ID NO: 838844 - RNA, 19 nt, Homo sapiens
  misc_RNA (1)...(19): siRNA sense strand
guuaugggcucuugaccaa

SEQ ID NO: 838845 - RNA, 19 nt, Homo sapiens
  misc_RNA (1)...(19): siRNA sense strand
ucaacaaagucuucaagga

SEQ ID NO: 838846 - RNA, 19 nt, Homo sapiens
  misc_RNA (1)...(19): siRNA sense strand
gcagcucugugccaacuug

SEQ ID NO: 838847 - RNA, 19 nt, Homo sapiens
  misc_RNA (1)...(19): siRNA sense strand
caacagccuugcaaacagu

SEQ ID NO: 838848 - RNA, 19 nt, Homo sapiens
  misc_RNA (1)...(19): siRNA sense strand
ggacaucccacauugcaau

SEQ ID NO: 838849 - RNA, 19 nt, Homo sapiens
  misc_RNA (1)...(19): siRNA sense strand
ccaaugaaaucuccauggu

SEQ ID NO: 838850 - RNA, 19 nt, Homo sapiens
  misc_RNA (1)...(19): siRNA sense strand
aagaagugauccagaaguu

SEQ ID NO: 838851 - RNA, 19 nt, Homo sapiens
  misc_RNA (1)...(19): siRNA sense strand
acagggagcacgucacuaa

SEQ ID NO: 838852 - RNA, 19 nt, Homo sapiens
  misc_RNA (1)...(19): siRNA sense strand
gggcaagaauaucaucauc

SEQ ID NO: 838853 - RNA, 19 nt, Homo sapiens
  misc_RNA (1)...(19): siRNA sense strand
caacuucucgaacuacuau

SEQ ID NO: 838854 - RNA, 19 nt, Homo sapiens
  misc_RNA (1)...(19): siRNA sense strand
caaaggcaguucaguagcu

SEQ ID NO: 838855 - RNA, 19 nt, Homo sapiens
  misc_RNA (1)...(19): siRNA sense strand
gcacccaccaugucaaugu

SEQ ID NO: 838856 - RNA, 19 nt, Homo sapiens
  misc_RNA (1)...(19): siRNA sense strand
gcacaaggacaccgucuac

SEQ ID NO: 838857 - RNA, 19 nt, Homo sapiens
  misc_RNA (1)...(19): siRNA sense strand
ugagugaggcugcggcuuu

SEQ ID NO: 838858 - RNA, 19 nt, Homo sapiens
  misc_RNA (1)...(19): siRNA sense strand
uaugggcucuugaccaaug

SEQ ID NO: 838859 - RNA, 19 nt, Homo sapiens
  misc_RNA (1)...(19): siRNA sense strand
gggaccacgugcuggcuuu

SEQ ID NO: 838860 - RNA, 19 nt, Homo sapiens
  misc_RNA (1)...(19): siRNA sense strand
gagugaggcugcggcuuug

SEQ ID NO: 838861 - RNA, 19 nt, Homo sapiens
  misc_RNA (1)...(19): siRNA sense strand
ucgaugaccgcaagaauga

SEQ ID NO: 838862 - RNA, 19 nt, Homo sapiens
  misc_RNA (1)...(19): siRNA sense strand
cagcuacucugcaucaacu

SEQ ID NO: 838863 - RNA, 19 nt, Homo sapiens
  misc_RNA (1)...(19): siRNA sense strand
ggaccucucccuggacuga

SEQ ID NO: 838864 - RNA, 19 nt, Homo sapiens
  misc_RNA (1)...(19): siRNA sense strand
ccaacagccuugcaaacag

SEQ ID NO: 838865 - RNA, 19 nt, Homo sapiens
  misc_RNA (1)...(19): siRNA sense strand
gcucuugaccaaugaaauc

SEQ ID NO: 838866 - RNA, 19 nt, Homo sapiens
  misc_RNA (1)...(19): siRNA sense strand
agcaagaagugauccagaa

SEQ ID NO: 838867 - RNA, 19 nt, Homo sapiens
  misc_RNA (1)...(19): siRNA sense strand
ggacacguggugcaucaug

SEQ ID NO: 838868 - RNA, 19 nt, Homo sapiens
  misc_RNA (1)...(19): siRNA sense strand
ggcuggacaucccacauug

SEQ ID NO: 838869 - RNA, 19 nt, Homo sapiens
  misc_RNA (1)...(19): siRNA sense strand
gggcuggacaucccacauu

SEQ ID NO: 838870 - RNA, 19 nt, Homo sapiens
  misc_RNA (1)...(19): siRNA sense strand
caacucauggcccagagaa

SEQ ID NO: 838871 - RNA, 19 nt, Homo sapiens
  misc_RNA (1)...(19): siRNA sense strand
ggucaucaacaaagucuuc

SEQ ID NO: 838872 - RNA, 19 nt, Homo sapiens
  misc_RNA (1)...(19): siRNA sense strand
acaaggacaccgucuacaa

SEQ ID NO: 838873 - RNA, 19 nt, Homo sapiens
  misc_RNA (1)...(19): siRNA sense strand
gaagcugccagugcucaaa

SEQ ID NO: 838874 - RNA, 19 nt, Homo sapiens
  misc_RNA (1)...(19): siRNA sense strand
ggauggagccaaggugguu

SEQ ID NO: 838875 - RNA, 19 nt, Homo sapiens
  misc_RNA (1)...(19): siRNA sense strand
aaauggaccaggccgagua

SEQ ID NO: 838876 - RNA, 19 nt, Homo sapiens
  misc_RNA (1)...(19): siRNA sense strand
gcaagaagugauccagaag

SEQ ID NO: 838877 - RNA, 19 nt, Homo sapiens
  misc_RNA (1)...(19): siRNA sense strand
gggcccagcuacugauugg

SEQ ID NO: 838878 - RNA, 19 nt, Homo sapiens
  misc_RNA (1)...(19): siRNA sense strand
guaccuagaacuuaaacuc

SEQ ID NO: 838879 - RNA, 19 nt, Homo sapiens
  misc_RNA (1)...(19): siRNA sense strand
gggauccuguggucaucaa

SEQ ID NO: 838880 - RNA, 19 nt, Homo sapiens
  misc_RNA (1)...(19): siRNA sense strand
gaguguauacgcguuugua

SEQ ID NO: 838881 - RNA, 19 nt, Homo sapiens
  misc_RNA (1)...(19): siRNA sense strand
ccagagggaccagcaagaa

SEQ ID NO: 838882 - RNA, 19 nt, Homo sapiens
  misc_RNA (1)...(19): siRNA sense strand
gccaacagccuugcaaaca

SEQ ID NO: 838883 - RNA, 19 nt, Homo sapiens
  misc_RNA (1)...(19): siRNA sense strand
gacacguggugcaucaugu

SEQ ID NO: 838884 - RNA, 19 nt, Homo sapiens
  misc_RNA (1)...(19): siRNA sense strand
gcauugugccgagaacuug

SEQ ID NO: 838885 - RNA, 19 nt, Homo sapiens
  misc_RNA (1)...(19): siRNA sense strand
ccagcauggugaagaguuc

SEQ ID NO: 838886 - RNA, 19 nt, Homo sapiens
  misc_RNA (1)...(19): siRNA sense strand
gcgcagccaggauccguuu

SEQ ID NO: 838887 - RNA, 19 nt, Homo sapiens
  misc_RNA (1)...(19): siRNA sense strand
gagccaguaccuagaacuu

SEQ ID NO: 838888 - RNA, 19 nt, Homo sapiens
  misc_RNA (1)...(19): siRNA sense strand
ugaguugagccggaaauuu

SEQ ID NO: 838889 - RNA, 19 nt, Homo sapiens
  misc_RNA (1)...(19): siRNA sense strand
gucaucagcugcaggaacu

SEQ ID NO: 838890 - RNA, 19 nt, Homo sapiens
  misc_RNA (1)...(19): siRNA sense strand
caccugaggcgcuacaaug

SEQ ID NO: 838891 - RNA, 19 nt, Homo sapiens
  misc_RNA (1)...(19): siRNA sense strand
gcaccuagagacuguggau

SEQ ID NO: 838892 - RNA, 19 nt, Homo sapiens
  misc_RNA (1)...(19): siRNA sense strand
gggacuugcugaagaagcu

SEQ ID NO: 838893 - RNA, 19 nt, Homo sapiens
  misc_RNA (1)...(19): siRNA sense strand
gggccgaucagaguguaua

SEQ ID NO: 838894 - RNA, 19 nt, Homo sapiens
  misc_RNA (1)...(19): siRNA sense strand
caagaagugauccagaagu

SEQ ID NO: 838895 - RNA, 19 nt, Homo sapiens
  misc_RNA (1)...(19): siRNA sense strand
gcaguucaguagcucuaac

SEQ ID NO: 838896 - RNA, 19 nt, Homo sapiens
  misc_RNA (1)...(19): siRNA sense strand
caaggacaccgucuacaac

SEQ ID NO: 838897 - RNA, 19 nt, Homo sapiens
  misc_RNA (1)...(19): siRNA sense strand
aaacuggagaugcuggaaa

SEQ ID NO: 838898 - RNA, 19 nt, Homo sapiens
  misc_RNA (1)...(19): siRNA sense strand
gaucuacaagucagugaag

SEQ ID NO: 838899 - RNA, 19 nt, Homo sapiens
  misc_RNA (1)...(19): siRNA sense strand
agccagagcacccacauga

SEQ ID NO: 838900 - RNA, 19 nt, Homo sapiens
  misc_RNA (1)...(19): siRNA sense strand
caugagccaguaccuagaa

SEQ ID NO: 838901 - RNA, 19 nt, Homo sapiens
  misc_RNA (1)...(19): siRNA sense strand
gaaugagcuggcccacuug

SEQ ID NO: 838902 - RNA, 19 nt, Homo sapiens
  misc_RNA (1)...(19): siRNA sense strand
ccuagagacuguggaugga

SEQ ID NO: 838903 - RNA, 19 nt, Homo sapiens
  misc_RNA (1)...(19): siRNA sense strand
caucaugagccaguaccua

SEQ ID NO: 838904 - RNA, 19 nt, Homo sapiens
  misc_RNA (1)...(19): siRNA sense strand
gagggcacccaccauguca

SEQ ID NO: 838905 - RNA, 19 nt, Homo sapiens
  misc_RNA (1)...(19): siRNA sense strand
gacccagcauggugaagag

SEQ ID NO: 838906 - RNA, 19 nt, Homo sapiens
  misc_RNA (1)...(19): siRNA sense strand
agcgggagcugaucaacga

SEQ ID NO: 838907 - RNA, 19 nt, Homo sapiens
  misc_RNA (1)...(19): siRNA sense strand
auccagaaguuccaagaug

SEQ ID NO: 838908 - RNA, 19 nt, Homo sapiens
  misc_RNA (1)...(19): siRNA sense strand
gaagcucauggaccaaauc

SEQ ID NO: 838909 - RNA, 19 nt, Homo sapiens
  misc_RNA (1)...(19): siRNA sense strand
ccaguaccuagaacuuaaa

SEQ ID NO: 838910 - RNA, 19 nt, Homo sapiens
  misc_RNA (1)...(19): siRNA sense strand
guauacgcguuuguagcaa

SEQ ID NO: 838911 - RNA, 19 nt, Homo sapiens
  misc_RNA (1)...(19): siRNA sense strand
gccaagcggcaccuagaga

SEQ ID NO: 838912 - RNA, 19 nt, Homo sapiens
  misc_RNA (1)...(19): siRNA sense strand
gauccagaaguuccaagau

SEQ ID NO: 838913 - RNA, 19 nt, Homo sapiens
  misc_RNA (1)...(19): siRNA sense strand
ggaccagcaagaagugauc

SEQ ID NO: 838914 - RNA, 19 nt, Homo sapiens
  misc_RNA (1)...(19): siRNA sense strand
cagaguguauacgcguuug

SEQ ID NO: 838915 - RNA, 19 nt, Homo sapiens
  misc_RNA (1)...(19): siRNA sense strand
caucaacaaagucuucaag

SEQ ID NO: 838916 - RNA, 19 nt, Homo sapiens
  misc_RNA (1)...(19): siRNA sense strand
gggcacccaccaugucaau

SEQ ID NO: 838917 - RNA, 19 nt, Homo sapiens
  misc_RNA (1)...(19): siRNA sense strand
gaagaagcucauggaccaa

SEQ ID NO: 838918 - RNA, 19 nt, Homo sapiens
  misc_RNA (1)...(19): siRNA sense strand
ccgaguaccaggccaagau

SEQ ID NO: 838919 - RNA, 19 nt, Homo sapiens
  misc_RNA (1)...(19): siRNA sense strand
ccaaugggaggugaucaug

SEQ ID NO: 838920 - RNA, 19 nt, Homo sapiens
  misc_RNA (1)...(19): siRNA sense strand
uggaaaagauccugcaaag

SEQ ID NO: 838921 - RNA, 19 nt, Homo sapiens
  misc_RNA (1)...(19): siRNA sense strand
cugcaggauuucuaucaca

SEQ ID NO: 838922 - RNA, 19 nt, Homo sapiens
  misc_RNA (1)...(19): siRNA sense strand
agaagcucauggaccaaau

SEQ ID NO: 838923 - RNA, 19 nt, Homo sapiens
  misc_RNA (1)...(19): siRNA sense strand
agaaccagcggcagcaguu

SEQ ID NO: 838924 - RNA, 19 nt, Homo sapiens
  misc_RNA (1)...(19): siRNA sense strand
acguggagcucacugucuu

SEQ ID NO: 838925 - RNA, 19 nt, Homo sapiens
  misc_RNA (1)...(19): siRNA sense strand
gagggaccagcaagaagug

SEQ ID NO: 838926 - RNA, 19 nt, Homo sapiens
  misc_RNA (1)...(19): siRNA sense strand
gcaacucauggcccagaga

SEQ ID NO: 838927 - RNA, 19 nt, Homo sapiens
  misc_RNA (1)...(19): siRNA sense strand
cuacauaccagaucuauua

SEQ ID NO: 838928 - RNA, 19 nt, Homo sapiens
  misc_RNA (1)...(19): siRNA sense strand
ccagaucuauuacaugaua

SEQ ID NO: 838929 - RNA, 19 nt, Homo sapiens
  misc_RNA (1)...(19): siRNA sense strand
uaacuauccuggaauguuu

SEQ ID NO: 838930 - RNA, 19 nt, Homo sapiens
  misc_RNA (1)...(19): siRNA sense strand
caaguuaacuauccuggaa

SEQ ID NO: 838931 - RNA, 19 nt, Homo sapiens
  misc_RNA (1)...(19): siRNA sense strand
ggaaagggaaggaggauuu

SEQ ID NO: 838932 - RNA, 19 nt, Homo sapiens
  misc_RNA (1)...(19): siRNA sense strand
ggaaauaucaugagucaca

SEQ ID NO: 838933 - RNA, 19 nt, Homo sapiens
  misc_RNA (1)...(19): siRNA sense strand
acagagaaauguacagaaa

SEQ ID NO: 838934 - RNA, 19 nt, Homo sapiens
  misc_RNA (1)...(19): siRNA sense strand
gauggaagauuuacaaggu

SEQ ID NO: 838935 - RNA, 19 nt, Homo sapiens
  misc_RNA (1)...(19): siRNA sense strand
guacagaaaugaagauggu

SEQ ID NO: 838936 - RNA, 19 nt, Homo sapiens
  misc_RNA (1)...(19): siRNA sense strand
uaccagaucuauuacauga

SEQ ID NO: 838937 - RNA, 19 nt, Homo sapiens
  misc_RNA (1)...(19): siRNA sense strand
gagaguaacugugcuugga

SEQ ID NO: 838938 - RNA, 19 nt, Homo sapiens
  misc_RNA (1)...(19): siRNA sense strand
gcagggcucuggcgcuuau

SEQ ID NO: 838939 - RNA, 19 nt, Homo sapiens
  misc_RNA (1)...(19): siRNA sense strand
gaucgcagaccguguauau

SEQ ID NO: 838940 - RNA, 19 nt, Homo sapiens
  misc_RNA (1)...(19): siRNA sense strand
guuuaucggugcaauguuu

SEQ ID NO: 838941 - RNA, 19 nt, Homo sapiens
  misc_RNA (1)...(19): siRNA sense strand
uaaggaaacuauuggaaag

SEQ ID NO: 838942 - RNA, 19 nt, Homo sapiens
  misc_RNA (1)...(19): siRNA sense strand
agagaaauguacagaaaug

SEQ ID NO: 838943 - RNA, 19 nt, Homo sapiens
  misc_RNA (1)...(19): siRNA sense strand
uaacugugcuuggaauaga

SEQ ID NO: 838944 - RNA, 19 nt, Homo sapiens
  misc_RNA (1)...(19): siRNA sense strand
ugaaagagguuccgcaacu

SEQ ID NO: 838945 - RNA, 19 nt, Homo sapiens
  misc_RNA (1)...(19): siRNA sense strand
gguagcaccucgcccagaa

SEQ ID NO: 838946 - RNA, 19 nt, Homo sapiens
  misc_RNA (1)...(19): siRNA sense strand
ugggagagcuggcuuuaau

SEQ ID NO: 838947 - RNA, 19 nt, Homo sapiens
  misc_RNA (1)...(19): siRNA sense strand
ccacacauuucuccuuuca

SEQ ID NO: 838948 - RNA, 19 nt, Homo sapiens
  misc_RNA (1)...(19): siRNA sense strand
ccagaacccugaauauuuu

SEQ ID NO: 838949 - RNA, 19 nt, Homo sapiens
  misc_RNA (1)...(19): siRNA sense strand
gaaagagguuccgcaacug

SEQ ID NO: 838950 - RNA, 19 nt, Homo sapiens
  misc_RNA (1)...(19): siRNA sense strand
ugacauacccagaaauuuc

SEQ ID NO: 838951 - RNA, 19 nt, Homo sapiens
  misc_RNA (1)...(19): siRNA sense strand
cccagaacccugaauauuu

SEQ ID NO: 838952 - RNA, 19 nt, Homo sapiens
  misc_RNA (1)...(19): siRNA sense strand
uguggacacugaugaaauu

SEQ ID NO: 838953 - RNA, 19 nt, Homo sapiens
  misc_RNA (1)...(19): siRNA sense strand
gcacuugagcagauucauu

SEQ ID NO: 838954 - RNA, 19 nt, Homo sapiens
  misc_RNA (1)...(19): siRNA sense strand
cacuugagcagauucauua

SEQ ID NO: 838955 - RNA, 19 nt, Homo sapiens
  misc_RNA (1)...(19): siRNA sense strand
guucaguaccugcuacaua

SEQ ID NO: 838956 - RNA, 19 nt, Homo sapiens
  misc_RNA (1)...(19): siRNA sense strand
gguuagcaguuuaaguuug

SEQ ID NO: 838957 - RNA, 19 nt, Homo sapiens
  misc_RNA (1)...(19): siRNA sense strand
ggauggaaauaucaugagu

SEQ ID NO: 838958 - RNA, 19 nt, Homo sapiens
  misc_RNA (1)...(19): siRNA sense strand
gaaauguacagaaaugaag

SEQ ID NO: 838959 - RNA, 19 nt, Homo sapiens
  misc_RNA (1)...(19): siRNA sense strand
gugguuagcaguuuaaguu

SEQ ID NO: 838960 - RNA, 19 nt, Homo sapiens
  misc_RNA (1)...(19): siRNA sense strand
ggcaagaccagcugaaaga

SEQ ID NO: 838961 - RNA, 19 nt, Homo sapiens
  misc_RNA (1)...(19): siRNA sense strand
ucgcagaccguguauauga

SEQ ID NO: 838962 - RNA, 19 nt, Homo sapiens
  misc_RNA (1)...(19): siRNA sense strand
agaauuccuucccuucaaa

SEQ ID NO: 838963 - RNA, 19 nt, Homo sapiens
  misc_RNA (1)...(19): siRNA sense strand
uggaagagguuacauugca

SEQ ID NO: 838964 - RNA, 19 nt, Homo sapiens
  misc_RNA (1)...(19): siRNA sense strand
cuagagcacuugagcagau

SEQ ID NO: 838965 - RNA, 19 nt, Homo sapiens
  misc_RNA (1)...(19): siRNA sense strand
ucaaugaccugggacaucu

SEQ ID NO: 838966 - RNA, 19 nt, Homo sapiens
  misc_RNA (1)...(19): siRNA sense strand
gaguaacugugcuuggaau

SEQ ID NO: 838967 - RNA, 19 nt, Homo sapiens
  misc_RNA (1)...(19): siRNA sense strand
gcccagaacccugaauauu

SEQ ID NO: 838968 - RNA, 19 nt, Homo sapiens
  misc_RNA (1)...(19): siRNA sense strand
gagcuggcuuuaauacucu

SEQ ID NO: 838969 - RNA, 19 nt, Homo sapiens
  misc_RNA (1)...(19): siRNA sense strand
cauaccagaucuauuacau

SEQ ID NO: 838970 - RNA, 19 nt, Homo sapiens
  misc_RNA (1)...(19): siRNA sense strand
caugauaggauggaaauau

SEQ ID NO: 838971 - RNA, 19 nt, Homo sapiens
  misc_RNA (1)...(19): siRNA sense strand
gaaggaggagguuggaagu

SEQ ID NO: 838972 - RNA, 19 nt, Homo sapiens
  misc_RNA (1)...(19): siRNA sense strand
ggagagcuggcuuuaauac

SEQ ID NO: 838973 - RNA, 19 nt, Homo sapiens
  misc_RNA (1)...(19): siRNA sense strand
gggagagcuggcuuuaaua

SEQ ID NO: 838974 - RNA, 19 nt, Homo sapiens
  misc_RNA (1)...(19): siRNA sense strand
gaaacagaaauaccuacug

SEQ ID NO: 838975 - RNA, 19 nt, Homo sapiens
  misc_RNA (1)...(19): siRNA sense strand
aagaauuccuucccuucaa

SEQ ID NO: 838976 - RNA, 19 nt, Homo sapiens
  misc_RNA (1)...(19): siRNA sense strand
uggaauguuugaauugaug

SEQ ID NO: 838977 - RNA, 19 nt, Homo sapiens
  misc_RNA (1)...(19): siRNA sense strand
ccuggaauguuugaauuga

SEQ ID NO: 838978 - RNA, 19 nt, Homo sapiens
  misc_RNA (1)...(19): siRNA sense strand
cauuugaccuggugguuag

SEQ ID NO: 838979 - RNA, 19 nt, Homo sapiens
  misc_RNA (1)...(19): siRNA sense strand
caaauuugacuaccugaag

SEQ ID NO: 838980 - RNA, 19 nt, Homo sapiens
  misc_RNA (1)...(19): siRNA sense strand
gagaaauguacagaaauga

SEQ ID NO: 838981 - RNA, 19 nt, Homo sapiens
  misc_RNA (1)...(19): siRNA sense strand
cgacacacucuaugaacuu

SEQ ID NO: 838982 - RNA, 19 nt, Homo sapiens
  misc_RNA (1)...(19): siRNA sense strand
ccuggugguuagcaguuua

SEQ ID NO: 838983 - RNA, 19 nt, Homo sapiens
  misc_RNA (1)...(19): siRNA sense strand
acacauuucuccuuucacu

SEQ ID NO: 838984 - RNA, 19 nt, Homo sapiens
  misc_RNA (1)...(19): siRNA sense strand
gcaguuuaaguuugcauug

SEQ ID NO: 838985 - RNA, 19 nt, Homo sapiens
  misc_RNA (1)...(19): siRNA sense strand
uggaagauuuacaagguau

SEQ ID NO: 838986 - RNA, 19 nt, Homo sapiens
  misc_RNA (1)...(19): siRNA sense strand
caagguaugggugagagua

SEQ ID NO: 838987 - RNA, 19 nt, Homo sapiens
  misc_RNA (1)...(19): siRNA sense strand
ucagaaacagaaauaccua

SEQ ID NO: 838988 - RNA, 19 nt, Homo sapiens
  misc_RNA (1)...(19): siRNA sense strand
aaaggaaacagaagaacug

SEQ ID NO: 838989 - RNA, 19 nt, Homo sapiens
  misc_RNA (1)...(19): siRNA sense strand
cuccacacauuucuccuuu

SEQ ID NO: 838990 - RNA, 19 nt, Homo sapiens
  misc_RNA (1)...(19): siRNA sense strand
gcgacacacucuaugaacu

SEQ ID NO: 838991 - RNA, 19 nt, Homo sapiens
  misc_RNA (1)...(19): siRNA sense strand
gaggcgacacacucuauga

SEQ ID NO: 838992 - RNA, 19 nt, Homo sapiens
  misc_RNA (1)...(19): siRNA sense strand
uuccuucccuucaaagaaa

SEQ ID NO: 838993 - RNA, 19 nt, Homo sapiens
  misc_RNA (1)...(19): siRNA sense strand
agagcuggcuuuaauacuc

SEQ ID NO: 838994 - RNA, 19 nt, Homo sapiens
  misc_RNA (1)...(19): siRNA sense strand
cguuuuagcugaugaagaa

SEQ ID NO: 838995 - RNA, 19 nt, Homo sapiens
  misc_RNA (1)...(19): siRNA sense strand
ccgcaacugugucauuugg

SEQ ID NO: 838996 - RNA, 19 nt, Homo sapiens
  misc_RNA (1)...(19): siRNA sense strand
gugaaugaccuuccuagag

SEQ ID NO: 838997 - RNA, 19 nt, Homo sapiens
  misc_RNA (1)...(19): siRNA sense strand
auggaaauaucaugaguca

SEQ ID NO: 838998 - RNA, 19 nt, Homo sapiens
  misc_RNA (1)...(19): siRNA sense strand
gcagaaaaugcuuugaaaa

SEQ ID NO: 838999 - RNA, 19 nt, Homo sapiens
  misc_RNA (1)...(19): siRNA sense strand
gacacacucuaugaacuuc

SEQ ID NO: 839000 - RNA, 19 nt, Homo sapiens
  misc_RNA (1)...(19): siRNA sense strand
guuagcaguuuaaguuugc

SEQ ID NO: 839001 - RNA, 19 nt, Homo sapiens
  misc_RNA (1)...(19): siRNA sense strand
ucgguguuccuuacaguua

SEQ ID NO: 839002 - RNA, 19 nt, Homo sapiens
  misc_RNA (1)...(19): siRNA sense strand
gcccgagccgaccaaauuu

SEQ ID NO: 839003 - RNA, 19 nt, Homo sapiens
  misc_RNA (1)...(19): siRNA sense strand
gcuuuaauacucugacugu

SEQ ID NO: 839004 - RNA, 19 nt, Homo sapiens
  misc_RNA (1)...(19): siRNA sense strand
gcggcaguguacagagaaa

SEQ ID NO: 839005 - RNA, 19 nt, Homo sapiens
  misc_RNA (1)...(19): siRNA sense strand
uuuccaagcugacauugca

SEQ ID NO: 839006 - RNA, 19 nt, Homo sapiens
  misc_RNA (1)...(19): siRNA sense strand
gaagauuuacaagguaugg

SEQ ID NO: 839007 - RNA, 19 nt, Homo sapiens
  misc_RNA (1)...(19): siRNA sense strand
uaggauggaaauaucauga

SEQ ID NO: 839008 - RNA, 19 nt, Homo sapiens
  misc_RNA (1)...(19): siRNA sense strand
aagcugacauugcagaaaa

SEQ ID NO: 839009 - RNA, 19 nt, Homo sapiens
  misc_RNA (1)...(19): siRNA sense strand
gcagaccguguauaugaca

SEQ ID NO: 839010 - RNA, 19 nt, Homo sapiens
  misc_RNA (1)...(19): siRNA sense strand
gcaguguacagagaaaugu

SEQ ID NO: 839011 - RNA, 19 nt, Homo sapiens
  misc_RNA (1)...(19): siRNA sense strand
ugacuguggacacugauga

SEQ ID NO: 839012 - RNA, 19 nt, Homo sapiens
  misc_RNA (1)...(19): siRNA sense strand
ccagauggaguguuuaucg

SEQ ID NO: 839013 - RNA, 19 nt, Homo sapiens
  misc_RNA (1)...(19): siRNA sense strand
caagcugacauugcagaaa

SEQ ID NO: 839014 - RNA, 19 nt, Homo sapiens
  misc_RNA (1)...(19): siRNA sense strand
cagagaaauguacagaaau

SEQ ID NO: 839015 - RNA, 19 nt, Homo sapiens
  misc_RNA (1)...(19): siRNA sense strand
uguggaagagguuacauug

SEQ ID NO: 839016 - RNA, 19 nt, Homo sapiens
  misc_RNA (1)...(19): siRNA sense strand
auggaagauuuacaaggua

SEQ ID NO: 839017 - RNA, 19 nt, Homo sapiens
  misc_RNA (1)...(19): siRNA sense strand
uagagcacuugagcagauu

SEQ ID NO: 839018 - RNA, 19 nt, Homo sapiens
  misc_RNA (1)...(19): siRNA sense strand
ggugaaugaccuuccuaga

SEQ ID NO: 839019 - RNA, 19 nt, Homo sapiens
  misc_RNA (1)...(19): siRNA sense strand
acauuugaccuggugguua

SEQ ID NO: 839020 - RNA, 19 nt, Homo sapiens
  misc_RNA (1)...(19): siRNA sense strand
uucaguaccugcuacauac

SEQ ID NO: 839021 - RNA, 19 nt, Homo sapiens
  misc_RNA (1)...(19): siRNA sense strand
uguuugaauugauggaaga

SEQ ID NO: 839022 - RNA, 19 nt, Homo sapiens
  misc_RNA (1)...(19): siRNA sense strand
uuaacuauccuggaauguu

SEQ ID NO: 839023 - RNA, 19 nt, Homo sapiens
  misc_RNA (1)...(19): siRNA sense strand
ccaaauuugacuaccugaa

SEQ ID NO: 839024 - RNA, 19 nt, Homo sapiens
  misc_RNA (1)...(19): siRNA sense strand
ggaaacggaaagggaagga

SEQ ID NO: 839025 - RNA, 19 nt, Homo sapiens
  misc_RNA (1)...(19): siRNA sense strand
cuugagcagauucauuaua

SEQ ID NO: 839026 - RNA, 19 nt, Homo sapiens
  misc_RNA (1)...(19): siRNA sense strand
cgaccaaauuugacuaccu

SEQ ID NO: 839027 - RNA, 19 nt, Homo sapiens
  misc_RNA (1)...(19): siRNA sense strand
gaaacguacucccaaacua

SEQ ID NO: 839028 - RNA, 19 nt, Homo sapiens
  misc_RNA (1)...(19): siRNA sense strand
gaggauauauagucauaga

SEQ ID NO: 839029 - RNA, 19 nt, Homo sapiens
  misc_RNA (1)...(19): siRNA sense strand
caggaaaugugaagaauuc

SEQ ID NO: 839030 - RNA, 19 nt, Homo sapiens
  misc_RNA (1)...(19): siRNA sense strand
uaaagaagcuaguguaucc

SEQ ID NO: 839031 - RNA, 19 nt, Homo sapiens
  misc_RNA (1)...(19): siRNA sense strand
ggagccagcuugaagaaag

SEQ ID NO: 839032 - RNA, 19 nt, Homo sapiens
  misc_RNA (1)...(19): siRNA sense strand
gaauucaccuggaacuaag

SEQ ID NO: 839033 - RNA, 19 nt, Homo sapiens
  misc_RNA (1)...(19): siRNA sense strand
gaagguugaugagcuuuca

SEQ ID NO: 839034 - RNA, 19 nt, Homo sapiens
  misc_RNA (1)...(19): siRNA sense strand
uugaugagcuuucacucua

SEQ ID NO: 839035 - RNA, 19 nt, Homo sapiens
  misc_RNA (1)...(19): siRNA sense strand
aaacguacucccaaacuaa

SEQ ID NO: 839036 - RNA, 19 nt, Homo sapiens
  misc_RNA (1)...(19): siRNA sense strand
acgaggauauauagucaua

SEQ ID NO: 839037 - RNA, 19 nt, Homo sapiens
  misc_RNA (1)...(19): siRNA sense strand
aaacuaagcccaagaugca

SEQ ID NO: 839038 - RNA, 19 nt, Homo sapiens
  misc_RNA (1)...(19): siRNA sense strand
ucacagcuccgacacuauu

SEQ ID NO: 839039 - RNA, 19 nt, Homo sapiens
  misc_RNA (1)...(19): siRNA sense strand
caggaaacguacucccaaa

SEQ ID NO: 839040 - RNA, 19 nt, Homo sapiens
  misc_RNA (1)...(19): siRNA sense strand
gagggucaaucgaaguaug

SEQ ID NO: 839041 - RNA, 19 nt, Homo sapiens
  misc_RNA (1)...(19): siRNA sense strand
gacuugguguuauugguuu

SEQ ID NO: 839042 - RNA, 19 nt, Homo sapiens
  misc_RNA (1)...(19): siRNA sense strand
ucucacagcuccgacacua

SEQ ID NO: 839043 - RNA, 19 nt, Homo sapiens
  misc_RNA (1)...(19): siRNA sense strand
uuacgaggauauauaguca

SEQ ID NO: 839044 - RNA, 19 nt, Homo sapiens
  misc_RNA (1)...(19): siRNA sense strand
ggaaggagaacuuucaaaa

SEQ ID NO: 839045 - RNA, 19 nt, Homo sapiens
  misc_RNA (1)...(19): siRNA sense strand
ggauauauagucauagaag

SEQ ID NO: 839046 - RNA, 19 nt, Homo sapiens
  misc_RNA (1)...(19): siRNA sense strand
uagcugccucccucuauua

SEQ ID NO: 839047 - RNA, 19 nt, Homo sapiens
  misc_RNA (1)...(19): siRNA sense strand
agaauucaccuggaacuaa

SEQ ID NO: 839048 - RNA, 19 nt, Homo sapiens
  misc_RNA (1)...(19): siRNA sense strand
uagaagauuuguggaagga

SEQ ID NO: 839049 - RNA, 19 nt, Homo sapiens
  misc_RNA (1)...(19): siRNA sense strand
agcccaagaugcaaaguuu

SEQ ID NO: 839050 - RNA, 19 nt, Homo sapiens
  misc_RNA (1)...(19): siRNA sense strand
ggguuuacgaggauauaua

SEQ ID NO: 839051 - RNA, 19 nt, Homo sapiens
  misc_RNA (1)...(19): siRNA sense strand
gccaggaaaugugaagaau

SEQ ID NO: 839052 - RNA, 19 nt, Homo sapiens
  misc_RNA (1)...(19): siRNA sense strand
ggaaacguacucccaaacu

SEQ ID NO: 839053 - RNA, 19 nt, Homo sapiens
  misc_RNA (1)...(19): siRNA sense strand
gagacuugguguuauuggu

SEQ ID NO: 839054 - RNA, 19 nt, Homo sapiens
  misc_RNA (1)...(19): siRNA sense strand
gaagaauucaccuggaacu

SEQ ID NO: 839055 - RNA, 19 nt, Homo sapiens
  misc_RNA (1)...(19): siRNA sense strand
ccaggaaaugugaagaauu

SEQ ID NO: 839056 - RNA, 19 nt, Homo sapiens
  misc_RNA (1)...(19): siRNA sense strand
gguuagacagcuaugacua

SEQ ID NO: 839057 - RNA, 19 nt, Homo sapiens
  misc_RNA (1)...(19): siRNA sense strand
agacagcuaugacuaucuc

SEQ ID NO: 839058 - RNA, 19 nt, Homo sapiens
  misc_RNA (1)...(19): siRNA sense strand
guuagacagcuaugacuau

SEQ ID NO: 839059 - RNA, 19 nt, Homo sapiens
  misc_RNA (1)...(19): siRNA sense strand
ccucuauuauccacaacaa

SEQ ID NO: 839060 - RNA, 19 nt, Homo sapiens
  misc_RNA (1)...(19): siRNA sense strand
ucauagaagauuuguggaa

SEQ ID NO: 839061 - RNA, 19 nt, Homo sapiens
  misc_RNA (1)...(19): siRNA sense strand
cgugaagguugaugagcuu

SEQ ID NO: 839062 - RNA, 19 nt, Homo sapiens
  misc_RNA (1)...(19): siRNA sense strand
uccgagacuugguguuauu

SEQ ID NO: 839063 - RNA, 19 nt, Homo sapiens
  misc_RNA (1)...(19): siRNA sense strand
uuagcugccucccucuauu

SEQ ID NO: 839064 - RNA, 19 nt, Homo sapiens
  misc_RNA (1)...(19): siRNA sense strand
guauccgccugguuucaug

SEQ ID NO: 839065 - RNA, 19 nt, Homo sapiens
  misc_RNA (1)...(19): siRNA sense strand
uaguguauccgccugguuu

SEQ ID NO: 839066 - RNA, 19 nt, Homo sapiens
  misc_RNA (1)...(19): siRNA sense strand
gaugagcuuucacucuacu

SEQ ID NO: 839067 - RNA, 19 nt, Homo sapiens
  misc_RNA (1)...(19): siRNA sense strand
aaaauuccgugaagguuga

SEQ ID NO: 839068 - RNA, 19 nt, Homo sapiens
  misc_RNA (1)...(19): siRNA sense strand
aaaggacucaccucccaaa

SEQ ID NO: 839069 - RNA, 19 nt, Homo sapiens
  misc_RNA (1)...(19): siRNA sense strand
gacacuauugcgagccaua

SEQ ID NO: 839070 - RNA, 19 nt, Homo sapiens
  misc_RNA (1)...(19): siRNA sense strand
caaaagccaggaaauguga

SEQ ID NO: 839071 - RNA, 19 nt, Homo sapiens
  misc_RNA (1)...(19): siRNA sense strand
gguuuacgaggauauauag

SEQ ID NO: 839072 - RNA, 19 nt, Homo sapiens
  misc_RNA (1)...(19): siRNA sense strand
ggggagagauuauaugacu

SEQ ID NO: 839073 - RNA, 19 nt, Homo sapiens
  misc_RNA (1)...(19): siRNA sense strand
gauuagcugccucccucua

SEQ ID NO: 839074 - RNA, 19 nt, Homo sapiens
  misc_RNA (1)...(19): siRNA sense strand
uuagacagcuaugacuauc

SEQ ID NO: 839075 - RNA, 19 nt, Homo sapiens
  misc_RNA (1)...(19): siRNA sense strand
ggccuuauuggacuccuuu

SEQ ID NO: 839076 - RNA, 19 nt, Homo sapiens
  misc_RNA (1)...(19): siRNA sense strand
uuuccgagacuugguguua

SEQ ID NO: 839077 - RNA, 19 nt, Homo sapiens
  misc_RNA (1)...(19): siRNA sense strand
uugcucaccuucaaagucu

SEQ ID NO: 839078 - RNA, 19 nt, Homo sapiens
  misc_RNA (1)...(19): siRNA sense strand
agacuugguguuauugguu

SEQ ID NO: 839079 - RNA, 19 nt, Homo sapiens
  misc_RNA (1)...(19): siRNA sense strand
cagcuaugacuaucuccaa

SEQ ID NO: 839080 - RNA, 19 nt, Homo sapiens
  misc_RNA (1)...(19): siRNA sense strand
ccuacuggcugcacuccua

SEQ ID NO: 839081 - RNA, 19 nt, Homo sapiens
  misc_RNA (1)...(19): siRNA sense strand
gcacugggucucaccaugu

SEQ ID NO: 839082 - RNA, 19 nt, Homo sapiens
  misc_RNA (1)...(19): siRNA sense strand
gcuuguggcaucaguauug

SEQ ID NO: 839083 - RNA, 19 nt, Homo sapiens
  misc_RNA (1)...(19): siRNA sense strand
ggaaggcuccgcugcuaca

SEQ ID NO: 839084 - RNA, 19 nt, Homo sapiens
  misc_RNA (1)...(19): siRNA sense strand
gaagcuuguggcaucagua

SEQ ID NO: 839085 - RNA, 19 nt, Homo sapiens
  misc_RNA (1)...(19): siRNA sense strand
gcaucaguauuggcacuuc

SEQ ID NO: 839086 - RNA, 19 nt, Homo sapiens
  misc_RNA (1)...(19): siRNA sense strand
caucaguauuggcacuuca

SEQ ID NO: 839087 - RNA, 19 nt, Homo sapiens
  misc_RNA (1)...(19): siRNA sense strand
guauuggcacuucaggaaa

SEQ ID NO: 839088 - RNA, 19 nt, Homo sapiens
  misc_RNA (1)...(19): siRNA sense strand
caucuguggcuucaccaaa

SEQ ID NO: 839089 - RNA, 19 nt, Homo sapiens
  misc_RNA (1)...(19): siRNA sense strand
gggcaccuccagcaucuuc

SEQ ID NO: 839090 - RNA, 19 nt, Homo sapiens
  misc_RNA (1)...(19): siRNA sense strand
aguauuggcacuucaggaa

SEQ ID NO: 839091 - RNA, 19 nt, Homo sapiens
  misc_RNA (1)...(19): siRNA sense strand
ggaugaaccuggagcuuua

SEQ ID NO: 839092 - RNA, 19 nt, Homo sapiens
  misc_RNA (1)...(19): siRNA sense strand
ggaagaagguccgcguuaa

SEQ ID NO: 839093 - RNA, 19 nt, Homo sapiens
  misc_RNA (1)...(19): siRNA sense strand
gaagaagguccgcguuaaa

SEQ ID NO: 839094 - RNA, 19 nt, Homo sapiens
  misc_RNA (1)...(19): siRNA sense strand
gaaccuggagcuuuauuau

SEQ ID NO: 839095 - RNA, 19 nt, Homo sapiens
  misc_RNA (1)...(19): siRNA sense strand
gggaagaagguccgcguua

SEQ ID NO: 839096 - RNA, 19 nt, Homo sapiens
  misc_RNA (1)...(19): siRNA sense strand
gaagaagugguacacgauu

SEQ ID NO: 839097 - RNA, 19 nt, Homo sapiens
  misc_RNA (1)...(19): siRNA sense strand
aagaagugguacacgauuu

SEQ ID NO: 839098 - RNA, 19 nt, Homo sapiens
  misc_RNA (1)...(19): siRNA sense strand
gggaugaaccuggagcuuu

SEQ ID NO: 839099 - RNA, 19 nt, Homo sapiens
  misc_RNA (1)...(19): siRNA sense strand
gaagguccgcguuaaaugc

SEQ ID NO: 839100 - RNA, 19 nt, Homo sapiens
  misc_RNA (1)...(19): siRNA sense strand
accuggagcuuuauuauca

SEQ ID NO: 839101 - RNA, 19 nt, Homo sapiens
  misc_RNA (1)...(19): siRNA sense strand
ugaaccuggagcuuuauua

SEQ ID NO: 839102 - RNA, 19 nt, Homo sapiens
  misc_RNA (1)...(19): siRNA sense strand
gaccuuaagaagcugauug

SEQ ID NO: 839103 - RNA, 19 nt, Homo sapiens
  misc_RNA (1)...(19): siRNA sense strand
uuaaaugcaacacggauga

SEQ ID NO: 839104 - RNA, 19 nt, Homo sapiens
  misc_RNA (1)...(19): siRNA sense strand
gguacccguuggaacaaga

SEQ ID NO: 839105 - RNA, 19 nt, Homo sapiens
  misc_RNA (1)...(19): siRNA sense strand
agauuguccugaagaagug

SEQ ID NO: 839106 - RNA, 19 nt, Homo sapiens
  misc_RNA (1)...(19): siRNA sense strand
aaaugcaacacggaugaua

SEQ ID NO: 839107 - RNA, 19 nt, Homo sapiens
  misc_RNA (1)...(19): siRNA sense strand
ugaagaagugguacacgau

SEQ ID NO: 839108 - RNA, 19 nt, Homo sapiens
  misc_RNA (1)...(19): siRNA sense strand
gcaacacggaugauaccau

SEQ ID NO: 839109 - RNA, 19 nt, Homo sapiens
  misc_RNA (1)...(19): siRNA sense strand
aagaagguccgcguuaaau

SEQ ID NO: 839110 - RNA, 19 nt, Homo sapiens
  misc_RNA (1)...(19): siRNA sense strand
aagauuguccugaagaagu

SEQ ID NO: 839111 - RNA, 19 nt, Homo sapiens
  misc_RNA (1)...(19): siRNA sense strand
agaagguccgcguuaaaug

SEQ ID NO: 839112 - RNA, 19 nt, Homo sapiens
  misc_RNA (1)...(19): siRNA sense strand
ccuggagcuuuauuaucaa

SEQ ID NO: 839113 - RNA, 19 nt, Homo sapiens
  misc_RNA (1)...(19): siRNA sense strand
gcaaacaacuuaucaguag

SEQ ID NO: 839114 - RNA, 19 nt, Homo sapiens
  misc_RNA (1)...(19): siRNA sense strand
gcaauuggcgccuauuaug

SEQ ID NO: 839115 - RNA, 19 nt, Homo sapiens
  misc_RNA (1)...(19): siRNA sense strand
ggagguggguggacuuuua

SEQ ID NO: 839116 - RNA, 19 nt, Homo sapiens
  misc_RNA (1)...(19): siRNA sense strand
cuacaggacucuacuaugg

SEQ ID NO: 839117 - RNA, 19 nt, Homo sapiens
  misc_RNA (1)...(19): siRNA sense strand
gaaccuacaagcagcaauu

SEQ ID NO: 839118 - RNA, 19 nt, Homo sapiens
  misc_RNA (1)...(19): siRNA sense strand
cagcagagcaggaauguau

SEQ ID NO: 839119 - RNA, 19 nt, Homo sapiens
  misc_RNA (1)...(19): siRNA sense strand
ggguuugucuuaaauaugu

SEQ ID NO: 839120 - RNA, 19 nt, Homo sapiens
  misc_RNA (1)...(19): siRNA sense strand
acacacagccgcaucguaa

SEQ ID NO: 839121 - RNA, 19 nt, Homo sapiens
  misc_RNA (1)...(19): siRNA sense strand
aaacggaguucaacacaca

SEQ ID NO: 839122 - RNA, 19 nt, Homo sapiens
  misc_RNA (1)...(19): siRNA sense strand
gaaccgacaaucagaugaa

SEQ ID NO: 839123 - RNA, 19 nt, Homo sapiens
  misc_RNA (1)...(19): siRNA sense strand
aaacauggcggauccagaa

SEQ ID NO: 839124 - RNA, 19 nt, Homo sapiens
  misc_RNA (1)...(19): siRNA sense strand
cccaagagauugcagaugu

SEQ ID NO: 839125 - RNA, 19 nt, Homo sapiens
  misc_RNA (1)...(19): siRNA sense strand
uguugaagaugucaccaua

SEQ ID NO: 839126 - RNA, 19 nt, Homo sapiens
  misc_RNA (1)...(19): siRNA sense strand
aaacugagcaagaccagaa

SEQ ID NO: 839127 - RNA, 19 nt, Homo sapiens
  misc_RNA (1)...(19): siRNA sense strand
cagcaauuggcgccuauua

SEQ ID NO: 839128 - RNA, 19 nt, Homo sapiens
  misc_RNA (1)...(19): siRNA sense strand
caauuggcgccuauuauga

SEQ ID NO: 839129 - RNA, 19 nt, Homo sapiens
  misc_RNA (1)...(19): siRNA sense strand
caacuuaucaguagugacu

SEQ ID NO: 839130 - RNA, 19 nt, Homo sapiens
  misc_RNA (1)...(19): siRNA sense strand
cauggcggauccagaauuc

SEQ ID NO: 839131 - RNA, 19 nt, Homo sapiens
  misc_RNA (1)...(19): siRNA sense strand
acccggagcugaugcagaa

SEQ ID NO: 839132 - RNA, 19 nt, Homo sapiens
  misc_RNA (1)...(19): siRNA sense strand
gaugucagcguccagaugu

SEQ ID NO: 839133 - RNA, 19 nt, Homo sapiens
  misc_RNA (1)...(19): siRNA sense strand
gcagagcaggaauguauca

SEQ ID NO: 839134 - RNA, 19 nt, Homo sapiens
  misc_RNA (1)...(19): siRNA sense strand
uggcggaugugcacugcua

SEQ ID NO: 839135 - RNA, 19 nt, Homo sapiens
  misc_RNA (1)...(19): siRNA sense strand
acuuaucaguagugacuua

SEQ ID NO: 839136 - RNA, 19 nt, Homo sapiens
  misc_RNA (1)...(19): siRNA sense strand
caacuggaaccuacaagca

SEQ ID NO: 839137 - RNA, 19 nt, Homo sapiens
  misc_RNA (1)...(19): siRNA sense strand
caaacaacuuaucaguagu

SEQ ID NO: 839138 - RNA, 19 nt, Homo sapiens
  misc_RNA (1)...(19): siRNA sense strand
gaacauggugauggugaga

SEQ ID NO: 839139 - RNA, 19 nt, Homo sapiens
  misc_RNA (1)...(19): siRNA sense strand
uggcgccuauuaugacuuu

SEQ ID NO: 839140 - RNA, 19 nt, Homo sapiens
  misc_RNA (1)...(19): siRNA sense strand
ggacucuacuauggagaug

SEQ ID NO: 839141 - RNA, 19 nt, Homo sapiens
  misc_RNA (1)...(19): siRNA sense strand
gagucaauaccuccggaua

SEQ ID NO: 839142 - RNA, 19 nt, Homo sapiens
  misc_RNA (1)...(19): siRNA sense strand
caauaccuccggauacuca

SEQ ID NO: 839143 - RNA, 19 nt, Homo sapiens
  misc_RNA (1)...(19): siRNA sense strand
gagcugaugcagaaguuca

SEQ ID NO: 839144 - RNA, 19 nt, Homo sapiens
  misc_RNA (1)...(19): siRNA sense strand
cgcaaacaacuuaucagua

SEQ ID NO: 839145 - RNA, 19 nt, Homo sapiens
  misc_RNA (1)...(19): siRNA sense strand
gagcaagaccagaauagac

SEQ ID NO: 839146 - RNA, 19 nt, Homo sapiens
  misc_RNA (1)...(19): siRNA sense strand
ccaagagauugcagauguc

SEQ ID NO: 839147 - RNA, 19 nt, Homo sapiens
  misc_RNA (1)...(19): siRNA sense strand
gcagucacgcaaacaacuu

SEQ ID NO: 839148 - RNA, 19 nt, Homo sapiens
  misc_RNA (1)...(19): siRNA sense strand
ucacgcaaacaacuuauca

SEQ ID NO: 839149 - RNA, 19 nt, Homo sapiens
  misc_RNA (1)...(19): siRNA sense strand
aaacaacuuaucaguagug

SEQ ID NO: 839150 - RNA, 19 nt, Homo sapiens
  misc_RNA (1)...(19): siRNA sense strand
ucaguagugacuuacagua

SEQ ID NO: 839151 - RNA, 19 nt, Homo sapiens
  misc_RNA (1)...(19): siRNA sense strand
ugaccaaacugagcaagac

SEQ ID NO: 839152 - RNA, 19 nt, Homo sapiens
  misc_RNA (1)...(19): siRNA sense strand
acaaggacgugcucaucuc

SEQ ID NO: 839153 - RNA, 19 nt, Homo sapiens
  misc_RNA (1)...(19): siRNA sense strand
gacaaggacgugcucaucu

SEQ ID NO: 839154 - RNA, 19 nt, Homo sapiens
  misc_RNA (1)...(19): siRNA sense strand
cggagcugaugcagaaguu

SEQ ID NO: 839155 - RNA, 19 nt, Homo sapiens
  misc_RNA (1)...(19): siRNA sense strand
gucaauaccuccggauacu

SEQ ID NO: 839156 - RNA, 19 nt, Homo sapiens
  misc_RNA (1)...(19): siRNA sense strand
cagucacgcaaacaacuua

SEQ ID NO: 839157 - RNA, 19 nt, Homo sapiens
  misc_RNA (1)...(19): siRNA sense strand
cgacaaggacgugcucauc

SEQ ID NO: 839158 - RNA, 19 nt, Homo sapiens
  misc_RNA (1)...(19): siRNA sense strand
cggauacucaguuuguaaa

SEQ ID NO: 839159 - RNA, 19 nt, Homo sapiens
  misc_RNA (1)...(19): siRNA sense strand
ccggauacucaguuuguaa

SEQ ID NO: 839160 - RNA, 19 nt, Homo sapiens
  misc_RNA (1)...(19): siRNA sense strand
gcgccuauuaugacuuuga

SEQ ID NO: 839161 - RNA, 19 nt, Homo sapiens
  misc_RNA (1)...(19): siRNA sense strand
gcuacaggacucuacuaug

SEQ ID NO: 839162 - RNA, 19 nt, Homo sapiens
  misc_RNA (1)...(19): siRNA sense strand
cagggacaguggcggaugu

SEQ ID NO: 839163 - RNA, 19 nt, Homo sapiens
  misc_RNA (1)...(19): siRNA sense strand
caagagauugcagauguca

SEQ ID NO: 839164 - RNA, 19 nt, Homo sapiens
  misc_RNA (1)...(19): siRNA sense strand
cuauguccuuuguugaaga

SEQ ID NO: 839165 - RNA, 19 nt, Homo sapiens
  misc_RNA (1)...(19): siRNA sense strand
agaccagaauagacuguca

SEQ ID NO: 839166 - RNA, 19 nt, Homo sapiens
  misc_RNA (1)...(19): siRNA sense strand
uugaagaugucaccauagg

SEQ ID NO: 839167 - RNA, 19 nt, Homo sapiens
  misc_RNA (1)...(19): siRNA sense strand
uaucaguagugacuuacag

SEQ ID NO: 839168 - RNA, 19 nt, Homo sapiens
  misc_RNA (1)...(19): siRNA sense strand
acagccgcaucguaaggua

SEQ ID NO: 839169 - RNA, 19 nt, Homo sapiens
  misc_RNA (1)...(19): siRNA sense strand
caaaagaaccgacaaucag

SEQ ID NO: 839170 - RNA, 19 nt, Homo sapiens
  misc_RNA (1)...(19): siRNA sense strand
ccaaaagaaccgacaauca

SEQ ID NO: 839171 - RNA, 19 nt, Homo sapiens
  misc_RNA (1)...(19): siRNA sense strand
gcacugcuacaggacucua

SEQ ID NO: 839172 - RNA, 19 nt, Homo sapiens
  misc_RNA (1)...(19): siRNA sense strand
gaccaacuggaaccuacaa

SEQ ID NO: 839173 - RNA, 19 nt, Homo sapiens
  misc_RNA (1)...(19): siRNA sense strand
aaccgacaaucagaugaaa

SEQ ID NO: 839174 - RNA, 19 nt, Homo sapiens
  misc_RNA (1)...(19): siRNA sense strand
ugagcaagaccagaauaga

SEQ ID NO: 839175 - RNA, 19 nt, Homo sapiens
  misc_RNA (1)...(19): siRNA sense strand
ggaacuggauuucuuuauu

SEQ ID NO: 839176 - RNA, 19 nt, Homo sapiens
  misc_RNA (1)...(19): siRNA sense strand
gaacagagacaugauugua

SEQ ID NO: 839177 - RNA, 19 nt, Homo sapiens
  misc_RNA (1)...(19): siRNA sense strand
gauaugcaguugcugauga

SEQ ID NO: 839178 - RNA, 19 nt, Homo sapiens
  misc_RNA (1)...(19): siRNA sense strand
ggccagggcuuucgacuug

SEQ ID NO: 839179 - RNA, 19 nt, Homo sapiens
  misc_RNA (1)...(19): siRNA sense strand
gccaaucacugccaccuuu

SEQ ID NO: 839180 - RNA, 19 nt, Homo sapiens
  misc_RNA (1)...(19): siRNA sense strand
gaucaugucaguacuuuau

SEQ ID NO: 839181 - RNA, 19 nt, Homo sapiens
  misc_RNA (1)...(19): siRNA sense strand
gguaaucaaugagcuuauu

SEQ ID NO: 839182 - RNA, 19 nt, Homo sapiens
  misc_RNA (1)...(19): siRNA sense strand
cuuuaucgcuuucagauuu

SEQ ID NO: 839183 - RNA, 19 nt, Homo sapiens
  misc_RNA (1)...(19): siRNA sense strand
gaggccagcagacuauuua

SEQ ID NO: 839184 - RNA, 19 nt, Homo sapiens
  misc_RNA (1)...(19): siRNA sense strand
gaggcucgguaaucaauga

SEQ ID NO: 839185 - RNA, 19 nt, Homo sapiens
  misc_RNA (1)...(19): siRNA sense strand
gggcccagcugaacagaga

SEQ ID NO: 839186 - RNA, 19 nt, Homo sapiens
  misc_RNA (1)...(19): siRNA sense strand
ggaggaguaucaggauuug

SEQ ID NO: 839187 - RNA, 19 nt, Homo sapiens
  misc_RNA (1)...(19): siRNA sense strand
gauuuaaggccugcuauuu

SEQ ID NO: 839188 - RNA, 19 nt, Homo sapiens
  misc_RNA (1)...(19): siRNA sense strand
gaggaggaguaucaggauu

SEQ ID NO: 839189 - RNA, 19 nt, Homo sapiens
  misc_RNA (1)...(19): siRNA sense strand
caucgugauuacuggcuua

SEQ ID NO: 839190 - RNA, 19 nt, Homo sapiens
  misc_RNA (1)...(19): siRNA sense strand
ggacuugggaggaagaaau

SEQ ID NO: 839191 - RNA, 19 nt, Homo sapiens
  misc_RNA (1)...(19): siRNA sense strand
ggauuugcaucgugauuac

SEQ ID NO: 839192 - RNA, 19 nt, Homo sapiens
  misc_RNA (1)...(19): siRNA sense strand
acagagacaugauuguauc

SEQ ID NO: 839193 - RNA, 19 nt, Homo sapiens
  misc_RNA (1)...(19): siRNA sense strand
gcgagcugcugaucagaau

SEQ ID NO: 839194 - RNA, 19 nt, Homo sapiens
  misc_RNA (1)...(19): siRNA sense strand
ccagcagacuauuuauuca

SEQ ID NO: 839195 - RNA, 19 nt, Homo sapiens
  misc_RNA (1)...(19): siRNA sense strand
gaaaucugguuggacaucu

SEQ ID NO: 839196 - RNA, 19 nt, Homo sapiens
  misc_RNA (1)...(19): siRNA sense strand
gccagcagacuauuuauuc

SEQ ID NO: 839197 - RNA, 19 nt, Homo sapiens
  misc_RNA (1)...(19): siRNA sense strand
uauucaugcuccucuuuaa

SEQ ID NO: 839198 - RNA, 19 nt, Homo sapiens
  misc_RNA (1)...(19): siRNA sense strand
ggaggccagcagacuauuu

SEQ ID NO: 839199 - RNA, 19 nt, Homo sapiens
  misc_RNA (1)...(19): siRNA sense strand
gaggcgagcugcugaucag

SEQ ID NO: 839200 - RNA, 19 nt, Homo sapiens
  misc_RNA (1)...(19): siRNA sense strand
gcugaugauuccucugauc

SEQ ID NO: 839201 - RNA, 19 nt, Homo sapiens
  misc_RNA (1)...(19): siRNA sense strand
ucagauacccaauggacuu

SEQ ID NO: 839202 - RNA, 19 nt, Homo sapiens
  misc_RNA (1)...(19): siRNA sense strand
auuuaaggccugcuauuua

SEQ ID NO: 839203 - RNA, 19 nt, Homo sapiens
  misc_RNA (1)...(19): siRNA sense strand
gguuggacaucuuuauuuu

SEQ ID NO: 839204 - RNA, 19 nt, Homo sapiens
  misc_RNA (1)...(19): siRNA sense strand
uaggagaggaggaguauca

SEQ ID NO: 839205 - RNA, 19 nt, Homo sapiens
  misc_RNA (1)...(19): siRNA sense strand
gcugaacagagacaugauu

SEQ ID NO: 839206 - RNA, 19 nt, Homo sapiens
  misc_RNA (1)...(19): siRNA sense strand
uuuaaggccugcuauuuac

SEQ ID NO: 839207 - RNA, 19 nt, Homo sapiens
  misc_RNA (1)...(19): siRNA sense strand
caauggauaugcaguugcu

SEQ ID NO: 839208 - RNA, 19 nt, Homo sapiens
  misc_RNA (1)...(19): siRNA sense strand
cagcugaacagagacauga

SEQ ID NO: 839209 - RNA, 19 nt, Homo sapiens
  misc_RNA (1)...(19): siRNA sense strand
ucaugucaguacuuuaugu

SEQ ID NO: 839210 - RNA, 19 nt, Homo sapiens
  misc_RNA (1)...(19): siRNA sense strand
caggaacuggauuucuuua

SEQ ID NO: 839211 - RNA, 19 nt, Homo sapiens
  misc_RNA (1)...(19): siRNA sense strand
ggccagcagacuauuuauu

SEQ ID NO: 839212 - RNA, 19 nt, Homo sapiens
  misc_RNA (1)...(19): siRNA sense strand
ggaaaucugguuggacauc

SEQ ID NO: 839213 - RNA, 19 nt, Homo sapiens
  misc_RNA (1)...(19): siRNA sense strand
gcuuagcaauggauaugca

SEQ ID NO: 839214 - RNA, 19 nt, Homo sapiens
  misc_RNA (1)...(19): siRNA sense strand
gacuugggaggaagaaauu

SEQ ID NO: 839215 - RNA, 19 nt, Homo sapiens
  misc_RNA (1)...(19): siRNA sense strand
cgugauuacuggcuuagca

SEQ ID NO: 839216 - RNA, 19 nt, Homo sapiens
  misc_RNA (1)...(19): siRNA sense strand
ggcaaacucggccucauca

SEQ ID NO: 839217 - RNA, 19 nt, Homo sapiens
  misc_RNA (1)...(19): siRNA sense strand
uuauucaugcuccucuuua

SEQ ID NO: 839218 - RNA, 19 nt, Homo sapiens
  misc_RNA (1)...(19): siRNA sense strand
ccagggcuuucgacuugga

SEQ ID NO: 839219 - RNA, 19 nt, Homo sapiens
  misc_RNA (1)...(19): siRNA sense strand
gagcugcugaucagaaugg

SEQ ID NO: 839220 - RNA, 19 nt, Homo sapiens
  misc_RNA (1)...(19): siRNA sense strand
uggauuugcaucgugauua

SEQ ID NO: 839221 - RNA, 19 nt, Homo sapiens
  misc_RNA (1)...(19): siRNA sense strand
gcuccucuuuaacuggauu

SEQ ID NO: 839222 - RNA, 19 nt, Homo sapiens
  misc_RNA (1)...(19): siRNA sense strand
ucacugccaccuuuuauuu

SEQ ID NO: 839223 - RNA, 19 nt, Homo sapiens
  misc_RNA (1)...(19): siRNA sense strand
caucggaggcucgguaauc

SEQ ID NO: 839224 - RNA, 19 nt, Homo sapiens
  misc_RNA (1)...(19): siRNA sense strand
gaaacaggagcuuuugaug

SEQ ID NO: 839225 - RNA, 19 nt, Homo sapiens
  misc_RNA (1)...(19): siRNA sense strand
ugguuggacaucuuuauuu

SEQ ID NO: 839226 - RNA, 19 nt, Homo sapiens
  misc_RNA (1)...(19): siRNA sense strand
agcagacuauuuauucaug

SEQ ID NO: 839227 - RNA, 19 nt, Homo sapiens
  misc_RNA (1)...(19): siRNA sense strand
ugguuuggaacacgauuua

SEQ ID NO: 839228 - RNA, 19 nt, Homo sapiens
  misc_RNA (1)...(19): siRNA sense strand
aggaggaguaucaggauuu

SEQ ID NO: 839229 - RNA, 19 nt, Homo sapiens
  misc_RNA (1)...(19): siRNA sense strand
cgauuuaaggccugcuauu

SEQ ID NO: 839230 - RNA, 19 nt, Homo sapiens
  misc_RNA (1)...(19): siRNA sense strand
gauuacuggcuuagcaaug

SEQ ID NO: 839231 - RNA, 19 nt, Homo sapiens
  misc_RNA (1)...(19): siRNA sense strand
uagcaauggauaugcaguu

SEQ ID NO: 839232 - RNA, 19 nt, Homo sapiens
  misc_RNA (1)...(19): siRNA sense strand
aaaucugguuggacaucuu

SEQ ID NO: 839233 - RNA, 19 nt, Homo sapiens
  misc_RNA (1)...(19): siRNA sense strand
ggauaugcaguugcugaug

SEQ ID NO: 839234 - RNA, 19 nt, Homo sapiens
  misc_RNA (1)...(19): siRNA sense strand
ucuauccacaccucaguuu

SEQ ID NO: 839235 - RNA, 19 nt, Homo sapiens
  misc_RNA (1)...(19): siRNA sense strand
ggaggacgaugaagaggaa

SEQ ID NO: 839236 - RNA, 19 nt, Homo sapiens
  misc_RNA (1)...(19): siRNA sense strand
cgaggugacugaugucuau

SEQ ID NO: 839237 - RNA, 19 nt, Homo sapiens
  misc_RNA (1)...(19): siRNA sense strand
gaagaccucaguaauucua

SEQ ID NO: 839238 - RNA, 19 nt, Homo sapiens
  misc_RNA (1)...(19): siRNA sense strand
ccaaggaacccgucuaugu

SEQ ID NO: 839239 - RNA, 19 nt, Homo sapiens
  misc_RNA (1)...(19): siRNA sense strand
ugaaccugcucaaugauuu

SEQ ID NO: 839240 - RNA, 19 nt, Homo sapiens
  misc_RNA (1)...(19): siRNA sense strand
ugacugaugucuaugagau

SEQ ID NO: 839241 - RNA, 19 nt, Homo sapiens
  misc_RNA (1)...(19): siRNA sense strand
uggaagaccucaguaauuc

SEQ ID NO: 839242 - RNA, 19 nt, Homo sapiens
  misc_RNA (1)...(19): siRNA sense strand
ugaccgaggugacugaugu

SEQ ID NO: 839243 - RNA, 19 nt, Homo sapiens
  misc_RNA (1)...(19): siRNA sense strand
gacaauggcugaccguaac

SEQ ID NO: 839244 - RNA, 19 nt, Homo sapiens
  misc_RNA (1)...(19): siRNA sense strand
gcucaaugauuuccacucu

SEQ ID NO: 839245 - RNA, 19 nt, Homo sapiens
  misc_RNA (1)...(19): siRNA sense strand
aaacccagguacaggaauu

SEQ ID NO: 839246 - RNA, 19 nt, Homo sapiens
  misc_RNA (1)...(19): siRNA sense strand
caaggaacccgucuaugug

SEQ ID NO: 839247 - RNA, 19 nt, Homo sapiens
  misc_RNA (1)...(19): siRNA sense strand
ccucaguaauucuauguau

SEQ ID NO: 839248 - RNA, 19 nt, Homo sapiens
  misc_RNA (1)...(19): siRNA sense strand
gggaggaggaggacgauga

SEQ ID NO: 839249 - RNA, 19 nt, Homo sapiens
  misc_RNA (1)...(19): siRNA sense strand
uugcaguccugucagauuu

SEQ ID NO: 839250 - RNA, 19 nt, Homo sapiens
  misc_RNA (1)...(19): siRNA sense strand
gagaguaggcaaagagaag

SEQ ID NO: 839251 - RNA, 19 nt, Homo sapiens
  misc_RNA (1)...(19): siRNA sense strand
gggccaaguucaagagagu

SEQ ID NO: 839252 - RNA, 19 nt, Homo sapiens
  misc_RNA (1)...(19): siRNA sense strand
ccaggaguauucacacaca

SEQ ID NO: 839253 - RNA, 19 nt, Homo sapiens
  misc_RNA (1)...(19): siRNA sense strand
ggaggaggaggacgaugaa

SEQ ID NO: 839254 - RNA, 19 nt, Homo sapiens
  misc_RNA (1)...(19): siRNA sense strand
uccugaaccugcucaauga

SEQ ID NO: 839255 - RNA, 19 nt, Homo sapiens
  misc_RNA (1)...(19): siRNA sense strand
gagcagaagaagacaaugg

SEQ ID NO: 839256 - RNA, 19 nt, Homo sapiens
  misc_RNA (1)...(19): siRNA sense strand
ggaggaggacgaugaagag

SEQ ID NO: 839257 - RNA, 19 nt, Homo sapiens
  misc_RNA (1)...(19): siRNA sense strand
agacaauggcugaccguaa

SEQ ID NO: 839258 - RNA, 19 nt, Homo sapiens
  misc_RNA (1)...(19): siRNA sense strand
caagagaguaggcaaagag

SEQ ID NO: 839259 - RNA, 19 nt, Homo sapiens
  misc_RNA (1)...(19): siRNA sense strand
ucaagagaguaggcaaaga

SEQ ID NO: 839260 - RNA, 19 nt, Homo sapiens
  misc_RNA (1)...(19): siRNA sense strand
gcaguccugucagauuuag

SEQ ID NO: 839261 - RNA, 19 nt, Homo sapiens
  misc_RNA (1)...(19): siRNA sense strand
cuggaagaccucaguaauu

SEQ ID NO: 839262 - RNA, 19 nt, Homo sapiens
  misc_RNA (1)...(19): siRNA sense strand
ccagguacaggaauuuaga

SEQ ID NO: 839263 - RNA, 19 nt, Homo sapiens
  misc_RNA (1)...(19): siRNA sense strand
ugucagauuuagccacaga

SEQ ID NO: 839264 - RNA, 19 nt, Homo sapiens
  misc_RNA (1)...(19): siRNA sense strand
gaaccugcucaaugauuuc

SEQ ID NO: 839265 - RNA, 19 nt, Homo sapiens
  misc_RNA (1)...(19): siRNA sense strand
ggagaugcaggagaagcua

SEQ ID NO: 839266 - RNA, 19 nt, Homo sapiens
  misc_RNA (1)...(19): siRNA sense strand
ggagcacguucgggagaug

SEQ ID NO: 839267 - RNA, 19 nt, Homo sapiens
  misc_RNA (1)...(19): siRNA sense strand
cagaggagcagaagaagac

SEQ ID NO: 839268 - RNA, 19 nt, Homo sapiens
  misc_RNA (1)...(19): siRNA sense strand
guucaagagaguaggcaaa

SEQ ID NO: 839269 - RNA, 19 nt, Homo sapiens
  misc_RNA (1)...(19): siRNA sense strand
ggaacccgucuaugugugu

SEQ ID NO: 839270 - RNA, 19 nt, Homo sapiens
  misc_RNA (1)...(19): siRNA sense strand
gcacuucagccuggaugug

SEQ ID NO: 839271 - RNA, 19 nt, Homo sapiens
  misc_RNA (1)...(19): siRNA sense strand
ccaaacccagguacaggaa

SEQ ID NO: 839272 - RNA, 19 nt, Homo sapiens
  misc_RNA (1)...(19): siRNA sense strand
ccagaggagcagaagaaga

SEQ ID NO: 839273 - RNA, 19 nt, Homo sapiens
  misc_RNA (1)...(19): siRNA sense strand
ugccagaggagcagaagaa

SEQ ID NO: 839274 - RNA, 19 nt, Homo sapiens
  misc_RNA (1)...(19): siRNA sense strand
ggugacugaugucuaugag

SEQ ID NO: 839275 - RNA, 19 nt, Homo sapiens
  misc_RNA (1)...(19): siRNA sense strand
ggaagaccucaguaauucu

SEQ ID NO: 839276 - RNA, 19 nt, Homo sapiens
  misc_RNA (1)...(19): siRNA sense strand
agaccucaguaauucuaug

SEQ ID NO: 839277 - RNA, 19 nt, Homo sapiens
  misc_RNA (1)...(19): siRNA sense strand
caggaguauucacacacaa

SEQ ID NO: 839278 - RNA, 19 nt, Homo sapiens
  misc_RNA (1)...(19): siRNA sense strand
gaccucaguaauucuaugu

SEQ ID NO: 839279 - RNA, 19 nt, Homo sapiens
  misc_RNA (1)...(19): siRNA sense strand
cgaugaagaggaagaggau

SEQ ID NO: 839280 - RNA, 19 nt, Homo sapiens
  misc_RNA (1)...(19): siRNA sense strand
ggagaacaauugaggauuu

SEQ ID NO: 839281 - RNA, 19 nt, Homo sapiens
  misc_RNA (1)...(19): siRNA sense strand
gaaaagagaucucgaauca

SEQ ID NO: 839282 - RNA, 19 nt, Homo sapiens
  misc_RNA (1)...(19): siRNA sense strand
gcaagaagcggaaguuaaa

SEQ ID NO: 839283 - RNA, 19 nt, Homo sapiens
  misc_RNA (1)...(19): siRNA sense strand
gcaaagucauccaagagaa

SEQ ID NO: 839284 - RNA, 19 nt, Homo sapiens
  misc_RNA (1)...(19): siRNA sense strand
aaagagaucucgaaucaag

SEQ ID NO: 839285 - RNA, 19 nt, Homo sapiens
  misc_RNA (1)...(19): siRNA sense strand
gaaagaaggaccgaaagaa

SEQ ID NO: 839286 - RNA, 19 nt, Homo sapiens
  misc_RNA (1)...(19): siRNA sense strand
ggaagaagaagaagagaug

SEQ ID NO: 839287 - RNA, 19 nt, Homo sapiens
  misc_RNA (1)...(19): siRNA sense strand
gcucaaggacucucucuuu

SEQ ID NO: 839288 - RNA, 19 nt, Homo sapiens
  misc_RNA (1)...(19): siRNA sense strand
ccacaucccugacacauac

SEQ ID NO: 839289 - RNA, 19 nt, Homo sapiens
  misc_RNA (1)...(19): siRNA sense strand
ggaagaggaagaagaagaa

SEQ ID NO: 839290 - RNA, 19 nt, Homo sapiens
  misc_RNA (1)...(19): siRNA sense strand
ggaggaagaggaagaagaa

SEQ ID NO: 839291 - RNA, 19 nt, Homo sapiens
  misc_RNA (1)...(19): siRNA sense strand
ggcauaugcugguuacauu

SEQ ID NO: 839292 - RNA, 19 nt, Homo sapiens
  misc_RNA (1)...(19): siRNA sense strand
caaggacucucucuuugau

SEQ ID NO: 839293 - RNA, 19 nt, Homo sapiens
  misc_RNA (1)...(19): siRNA sense strand
gagaaacggcggagaacaa

SEQ ID NO: 839294 - RNA, 19 nt, Homo sapiens
  misc_RNA (1)...(19): siRNA sense strand
aagaagagauggcaacagu

SEQ ID NO: 839295 - RNA, 19 nt, Homo sapiens
  misc_RNA (1)...(19): siRNA sense strand
cgacagugcuaccuugcuu

SEQ ID NO: 839296 - RNA, 19 nt, Homo sapiens
  misc_RNA (1)...(19): siRNA sense strand
gagcaagaagcggaaguua

SEQ ID NO: 839297 - RNA, 19 nt, Homo sapiens
  misc_RNA (1)...(19): siRNA sense strand
gagaacaauugaggauuuc

SEQ ID NO: 839298 - RNA, 19 nt, Homo sapiens
  misc_RNA (1)...(19): siRNA sense strand
ggaagaggaggaagaggaa

SEQ ID NO: 839299 - RNA, 19 nt, Homo sapiens
  misc_RNA (1)...(19): siRNA sense strand
aaagcaaagucauccaaga

SEQ ID NO: 839300 - RNA, 19 nt, Homo sapiens
  misc_RNA (1)...(19): siRNA sense strand
ucaacaaauucugcaguuu

SEQ ID NO: 839301 - RNA, 19 nt, Homo sapiens
  misc_RNA (1)...(19): siRNA sense strand
gagaagggcagcucaagca

SEQ ID NO: 839302 - RNA, 19 nt, Homo sapiens
  misc_RNA (1)...(19): siRNA sense strand
aaacggcggagaacaauug

SEQ ID NO: 839303 - RNA, 19 nt, Homo sapiens
  misc_RNA (1)...(19): siRNA sense strand
cgaaagaaggaccgaaaga

SEQ ID NO: 839304 - RNA, 19 nt, Homo sapiens
  misc_RNA (1)...(19): siRNA sense strand
gaucucgaaucaagaagag

SEQ ID NO: 839305 - RNA, 19 nt, Homo sapiens
  misc_RNA (1)...(19): siRNA sense strand
cuaccuugcuugagaagau

SEQ ID NO: 839306 - RNA, 19 nt, Homo sapiens
  misc_RNA (1)...(19): siRNA sense strand
ccagagaaacggcggagaa

SEQ ID NO: 839307 - RNA, 19 nt, Homo sapiens
  misc_RNA (1)...(19): siRNA sense strand
gaaucaagaagagcaagaa

SEQ ID NO: 839308 - RNA, 19 nt, Homo sapiens
  misc_RNA (1)...(19): siRNA sense strand
caacaaauucugcaguuuu

SEQ ID NO: 839309 - RNA, 19 nt, Homo sapiens
  misc_RNA (1)...(19): siRNA sense strand
gaaacggcggagaacaauu

SEQ ID NO: 839310 - RNA, 19 nt, Homo sapiens
  misc_RNA (1)...(19): siRNA sense strand
gcaguuuuguuuuggcaua

SEQ ID NO: 839311 - RNA, 19 nt, Homo sapiens
  misc_RNA (1)...(19): siRNA sense strand
ccucagaucuucgaaccau

SEQ ID NO: 839312 - RNA, 19 nt, Homo sapiens
  misc_RNA (1)...(19): siRNA sense strand
agagauggcaacaguggua

SEQ ID NO: 839313 - RNA, 19 nt, Homo sapiens
  misc_RNA (1)...(19): siRNA sense strand
cucaaggacucucucuuug

SEQ ID NO: 839314 - RNA, 19 nt, Homo sapiens
  misc_RNA (1)...(19): siRNA sense strand
gauccaccuccgacccuua

SEQ ID NO: 839315 - RNA, 19 nt, Homo sapiens
  misc_RNA (1)...(19): siRNA sense strand
gugcuaccuugcuugagaa

SEQ ID NO: 839316 - RNA, 19 nt, Homo sapiens
  misc_RNA (1)...(19): siRNA sense strand
ccgaaagaaccgaaaguug

SEQ ID NO: 839317 - RNA, 19 nt, Homo sapiens
  misc_RNA (1)...(19): siRNA sense strand
agacucagccaccagagaa

SEQ ID NO: 839318 - RNA, 19 nt, Homo sapiens
  misc_RNA (1)...(19): siRNA sense strand
caagagaagggcagcucaa

SEQ ID NO: 839319 - RNA, 19 nt, Homo sapiens
  misc_RNA (1)...(19): siRNA sense strand
ggagcccagucccgaagau

SEQ ID NO: 839320 - RNA, 19 nt, Homo sapiens
  misc_RNA (1)...(19): siRNA sense strand
agagaucucgaaucaagaa

SEQ ID NO: 839321 - RNA, 19 nt, Homo sapiens
  misc_RNA (1)...(19): siRNA sense strand
caaagucauccaagagaag

SEQ ID NO: 839322 - RNA, 19 nt, Homo sapiens
  misc_RNA (1)...(19): siRNA sense strand
agugcuaccuugcuugaga

SEQ ID NO: 839323 - RNA, 19 nt, Homo sapiens
  misc_RNA (1)...(19): siRNA sense strand
gcauaugcugguuacauuc

SEQ ID NO: 839324 - RNA, 19 nt, Homo sapiens
  misc_RNA (1)...(19): siRNA sense strand
uucaacaaauucugcaguu

SEQ ID NO: 839325 - RNA, 19 nt, Homo sapiens
  misc_RNA (1)...(19): siRNA sense strand
aaagaaggaccgaaagaac

SEQ ID NO: 839326 - RNA, 19 nt, Homo sapiens
  misc_RNA (1)...(19): siRNA sense strand
gagacucagccaccagaga

SEQ ID NO: 839327 - RNA, 19 nt, Homo sapiens
  misc_RNA (1)...(19): siRNA sense strand
uucgaaccauccagacuuu

SEQ ID NO: 839328 - RNA, 19 nt, Homo sapiens
  misc_RNA (1)...(19): siRNA sense strand
gcggagaacaauugaggau

SEQ ID NO: 839329 - RNA, 19 nt, Homo sapiens
  misc_RNA (1)...(19): siRNA sense strand
ggaggaggaagaggaggaa

SEQ ID NO: 839330 - RNA, 19 nt, Homo sapiens
  misc_RNA (1)...(19): siRNA sense strand
ggaggaagaggaggaagag

SEQ ID NO: 839331 - RNA, 19 nt, Homo sapiens
  misc_RNA (1)...(19): siRNA sense strand
agcaagaagcggaaguuaa

SEQ ID NO: 839332 - RNA, 19 nt, Homo sapiens
  misc_RNA (1)...(19): siRNA sense strand
cugaagaggaggaggaaga

SEQ ID NO: 839333 - RNA, 19 nt, Homo sapiens
  misc_RNA (1)...(19): siRNA sense strand
agaaagcaaagucauccaa

SEQ ID NO: 839334 - RNA, 19 nt, Homo sapiens
  misc_RNA (1)...(19): siRNA sense strand
cgaaucaagaagagcaaga

SEQ ID NO: 839335 - RNA, 19 nt, Homo sapiens
  misc_RNA (1)...(19): siRNA sense strand
uuaagaaagcaaagucauc

SEQ ID NO: 839336 - RNA, 19 nt, Homo sapiens
  misc_RNA (1)...(19): siRNA sense strand
gaagaggaagaagaagaag

SEQ ID NO: 839337 - RNA, 19 nt, Homo sapiens
  misc_RNA (1)...(19): siRNA sense strand
ggaccgaaagaaccgaaag

SEQ ID NO: 839338 - RNA, 19 nt, Homo sapiens
  misc_RNA (1)...(19): siRNA sense strand
cuagcaaagaggaaaguga

SEQ ID NO: 839339 - RNA, 19 nt, Homo sapiens
  misc_RNA (1)...(19): siRNA sense strand
gaagaagagauggcaacag

SEQ ID NO: 839340 - RNA, 19 nt, Homo sapiens
  misc_RNA (1)...(19): siRNA sense strand
guucauggccacgguguug

SEQ ID NO: 839341 - RNA, 19 nt, Homo sapiens
  misc_RNA (1)...(19): siRNA sense strand
gcugagagauccugacaua

SEQ ID NO: 839342 - RNA, 19 nt, Homo sapiens
  misc_RNA (1)...(19): siRNA sense strand
ugacauaaauccuuguuug

SEQ ID NO: 839343 - RNA, 19 nt, Homo sapiens
  misc_RNA (1)...(19): siRNA sense strand
ccacuuacuucuugaggua

SEQ ID NO: 839344 - RNA, 19 nt, Homo sapiens
  misc_RNA (1)...(19): siRNA sense strand
gagagauccugacauaaau

SEQ ID NO: 839345 - RNA, 19 nt, Homo sapiens
  misc_RNA (1)...(19): siRNA sense strand
ugagagauccugacauaaa

SEQ ID NO: 839346 - RNA, 19 nt, Homo sapiens
  misc_RNA (1)...(19): siRNA sense strand
ggaauucuaucgugaugca

SEQ ID NO: 839347 - RNA, 19 nt, Homo sapiens
  misc_RNA (1)...(19): siRNA sense strand
gaagaaagaacggagugaa

SEQ ID NO: 839348 - RNA, 19 nt, Homo sapiens
  misc_RNA (1)...(19): siRNA sense strand
gaacggagugaagccauuu

SEQ ID NO: 839349 - RNA, 19 nt, Homo sapiens
  misc_RNA (1)...(19): siRNA sense strand
gaaagguguuccacuuacu

SEQ ID NO: 839350 - RNA, 19 nt, Homo sapiens
  misc_RNA (1)...(19): siRNA sense strand
uaacacagaggcugagaga

SEQ ID NO: 839351 - RNA, 19 nt, Homo sapiens
  misc_RNA (1)...(19): siRNA sense strand
ugagagcagugggaaauau

SEQ ID NO: 839352 - RNA, 19 nt, Homo sapiens
  misc_RNA (1)...(19): siRNA sense strand
ggagugaagccauuuaugc

SEQ ID NO: 839353 - RNA, 19 nt, Homo sapiens
  misc_RNA (1)...(19): siRNA sense strand
acacagaggcugagagauc

SEQ ID NO: 839354 - RNA, 19 nt, Homo sapiens
  misc_RNA (1)...(19): siRNA sense strand
gacauaaauccuuguuugu

SEQ ID NO: 839355 - RNA, 19 nt, Homo sapiens
  misc_RNA (1)...(19): siRNA sense strand
guguuccacuuacuucuug

SEQ ID NO: 839356 - RNA, 19 nt, Homo sapiens
  misc_RNA (1)...(19): siRNA sense strand
gauccugacauaaauccuu

SEQ ID NO: 839357 - RNA, 19 nt, Homo sapiens
  misc_RNA (1)...(19): siRNA sense strand
gagagcagugggaaauaug

SEQ ID NO: 839358 - RNA, 19 nt, Homo sapiens
  misc_RNA (1)...(19): siRNA sense strand
agaacggagugaagccauu

SEQ ID NO: 839359 - RNA, 19 nt, Homo sapiens
  misc_RNA (1)...(19): siRNA sense strand
cagcagaaagagaugaaau

SEQ ID NO: 839360 - RNA, 19 nt, Homo sapiens
  misc_RNA (1)...(19): siRNA sense strand
gugaugcagagaagaaaga

SEQ ID NO: 839361 - RNA, 19 nt, Homo sapiens
  misc_RNA (1)...(19): siRNA sense strand
gguguuccacuuacuucuu

SEQ ID NO: 839362 - RNA, 19 nt, Homo sapiens
  misc_RNA (1)...(19): siRNA sense strand
gcagcagaaagagaugaaa

SEQ ID NO: 839363 - RNA, 19 nt, Homo sapiens
  misc_RNA (1)...(19): siRNA sense strand
aaagguguuccacuuacuu

SEQ ID NO: 839364 - RNA, 19 nt, Homo sapiens
  misc_RNA (1)...(19): siRNA sense strand
gagaagagguuuacgugua

SEQ ID NO: 839365 - RNA, 19 nt, Homo sapiens
  misc_RNA (1)...(19): siRNA sense strand
ccagaugccuccuccauuu

SEQ ID NO: 839366 - RNA, 19 nt, Homo sapiens
  misc_RNA (1)...(19): siRNA sense strand
gagaaacccuacaaauguu

SEQ ID NO: 839367 - RNA, 19 nt, Homo sapiens
  misc_RNA (1)...(19): siRNA sense strand
gaagagaacccaggacuga

SEQ ID NO: 839368 - RNA, 19 nt, Homo sapiens
  misc_RNA (1)...(19): siRNA sense strand
gagagaaacccuacaaaug

SEQ ID NO: 839369 - RNA, 19 nt, Homo sapiens
  misc_RNA (1)...(19): siRNA sense strand
ggacucagauaucgagaug

SEQ ID NO: 839370 - RNA, 19 nt, Homo sapiens
  misc_RNA (1)...(19): siRNA sense strand
ggagaaggaucugaaggaa

SEQ ID NO: 839371 - RNA, 19 nt, Homo sapiens
  misc_RNA (1)...(19): siRNA sense strand
cuacaaauguuccaagugu

SEQ ID NO: 839372 - RNA, 19 nt, Homo sapiens
  misc_RNA (1)...(19): siRNA sense strand
aaacucaacuuggaaauca

SEQ ID NO: 839373 - RNA, 19 nt, Homo sapiens
  misc_RNA (1)...(19): siRNA sense strand
ggagagaaacccuacaaau

SEQ ID NO: 839374 - RNA, 19 nt, Homo sapiens
  misc_RNA (1)...(19): siRNA sense strand
uaacagaagacccaagaaa

SEQ ID NO: 839375 - RNA, 19 nt, Homo sapiens
  misc_RNA (1)...(19): siRNA sense strand
acacaagaguauugacgua

SEQ ID NO: 839376 - RNA, 19 nt, Homo sapiens
  misc_RNA (1)...(19): siRNA sense strand
gaggaccugcuacgaaaua

SEQ ID NO: 839377 - RNA, 19 nt, Homo sapiens
  misc_RNA (1)...(19): siRNA sense strand
agaagagccucaaggagaa

SEQ ID NO: 839378 - RNA, 19 nt, Homo sapiens
  misc_RNA (1)...(19): siRNA sense strand
agagaaacccuacaaaugu

SEQ ID NO: 839379 - RNA, 19 nt, Homo sapiens
  misc_RNA (1)...(19): siRNA sense strand
gggacaagcugggaugaau

SEQ ID NO: 839380 - RNA, 19 nt, Homo sapiens
  misc_RNA (1)...(19): siRNA sense strand
ucacugagcugugccaucu

SEQ ID NO: 839381 - RNA, 19 nt, Homo sapiens
  misc_RNA (1)...(19): siRNA sense strand
ccacggaaaggaauauauu

SEQ ID NO: 839382 - RNA, 19 nt, Homo sapiens
  misc_RNA (1)...(19): siRNA sense strand
gcuacgaaauaacagaaga

SEQ ID NO: 839383 - RNA, 19 nt, Homo sapiens
  misc_RNA (1)...(19): siRNA sense strand
uggaggaccugcuacgaaa

SEQ ID NO: 839384 - RNA, 19 nt, Homo sapiens
  misc_RNA (1)...(19): siRNA sense strand
ggacaagcugggaugaauu

SEQ ID NO: 839385 - RNA, 19 nt, Homo sapiens
  misc_RNA (1)...(19): siRNA sense strand
guuaagacgccaccagaaa

SEQ ID NO: 839386 - RNA, 19 nt, Homo sapiens
  misc_RNA (1)...(19): siRNA sense strand
gagaggacuuucugcuaca

SEQ ID NO: 839387 - RNA, 19 nt, Homo sapiens
  misc_RNA (1)...(19): siRNA sense strand
agaaggaucugaaggaaaa

SEQ ID NO: 839388 - RNA, 19 nt, Homo sapiens
  misc_RNA (1)...(19): siRNA sense strand
caagaguauugacguaaca

SEQ ID NO: 839389 - RNA, 19 nt, Homo sapiens
  misc_RNA (1)...(19): siRNA sense strand
cgacguggacccugagauu

SEQ ID NO: 839390 - RNA, 19 nt, Homo sapiens
  misc_RNA (1)...(19): siRNA sense strand
uguaaagacugcaagaaag

SEQ ID NO: 839391 - RNA, 19 nt, Homo sapiens
  misc_RNA (1)...(19): siRNA sense strand
ccaagaagagccucaagga

SEQ ID NO: 839392 - RNA, 19 nt, Homo sapiens
  misc_RNA (1)...(19): siRNA sense strand
gagaaggaucugaaggaaa

SEQ ID NO: 839393 - RNA, 19 nt, Homo sapiens
  misc_RNA (1)...(19): siRNA sense strand
ccaaagagucccacagauc

SEQ ID NO: 839394 - RNA, 19 nt, Homo sapiens
  misc_RNA (1)...(19): siRNA sense strand
acagaagacccaagaaaug

SEQ ID NO: 839395 - RNA, 19 nt, Homo sapiens
  misc_RNA (1)...(19): siRNA sense strand
guaaagacugcaagaaagu

SEQ ID NO: 839396 - RNA, 19 nt, Homo sapiens
  misc_RNA (1)...(19): siRNA sense strand
agaagcaguucacccagaa

SEQ ID NO: 839397 - RNA, 19 nt, Homo sapiens
  misc_RNA (1)...(19): siRNA sense strand
aagcugggaugaauucaau

SEQ ID NO: 839398 - RNA, 19 nt, Homo sapiens
  misc_RNA (1)...(19): siRNA sense strand
caaagagucccacagaucu

SEQ ID NO: 839399 - RNA, 19 nt, Homo sapiens
  misc_RNA (1)...(19): siRNA sense strand
gggagaggacuuucugcua

SEQ ID NO: 839400 - RNA, 19 nt, Homo sapiens
  misc_RNA (1)...(19): siRNA sense strand
gaggagacgcucugaaucu

SEQ ID NO: 839401 - RNA, 19 nt, Homo sapiens
  misc_RNA (1)...(19): siRNA sense strand
cuuauuagccuccaauuuc

SEQ ID NO: 839402 - RNA, 19 nt, Homo sapiens
  misc_RNA (1)...(19): siRNA sense strand
cguaacaggugacccaaag

SEQ ID NO: 839403 - RNA, 19 nt, Homo sapiens
  misc_RNA (1)...(19): siRNA sense strand
ucuauggcauccucagaaa

SEQ ID NO: 839404 - RNA, 19 nt, Homo sapiens
  misc_RNA (1)...(19): siRNA sense strand
gaaaacacauccagaagcu

SEQ ID NO: 839405 - RNA, 19 nt, Homo sapiens
  misc_RNA (1)...(19): siRNA sense strand
gaaacucaacuuggaaauc

SEQ ID NO: 839406 - RNA, 19 nt, Homo sapiens
  misc_RNA (1)...(19): siRNA sense strand
gaauguaaagacugcaaga

SEQ ID NO: 839407 - RNA, 19 nt, Homo sapiens
  misc_RNA (1)...(19): siRNA sense strand
cauccaggcucugaggaaa

SEQ ID NO: 839408 - RNA, 19 nt, Homo sapiens
  misc_RNA (1)...(19): siRNA sense strand
gagacucuuucaauguaau

SEQ ID NO: 839409 - RNA, 19 nt, Homo sapiens
  misc_RNA (1)...(19): siRNA sense strand
ucacccggauggccaagaa

SEQ ID NO: 839410 - RNA, 19 nt, Homo sapiens
  misc_RNA (1)...(19): siRNA sense strand
ggagacgcucugaaucuga

SEQ ID NO: 839411 - RNA, 19 nt, Homo sapiens
  misc_RNA (1)...(19): siRNA sense strand
uuauuagccuccaauuuca

SEQ ID NO: 839412 - RNA, 19 nt, Homo sapiens
  misc_RNA (1)...(19): siRNA sense strand
caaauugcacauccucaug

SEQ ID NO: 839413 - RNA, 19 nt, Homo sapiens
  misc_RNA (1)...(19): siRNA sense strand
gacaagcugggaugaauuc

SEQ ID NO: 839414 - RNA, 19 nt, Homo sapiens
  misc_RNA (1)...(19): siRNA sense strand
gcuuauuagccuccaauuu

SEQ ID NO: 839415 - RNA, 19 nt, Homo sapiens
  misc_RNA (1)...(19): siRNA sense strand
gagccucagcuuccaaaga

SEQ ID NO: 839416 - RNA, 19 nt, Homo sapiens
  misc_RNA (1)...(19): siRNA sense strand
cccaggagcuccaggucuu

SEQ ID NO: 839417 - RNA, 19 nt, Homo sapiens
  misc_RNA (1)...(19): siRNA sense strand
cucagaaacucaacuugga

SEQ ID NO: 839418 - RNA, 19 nt, Homo sapiens
  misc_RNA (1)...(19): siRNA sense strand
gcagggagaggacuuucug

SEQ ID NO: 839419 - RNA, 19 nt, Homo sapiens
  misc_RNA (1)...(19): siRNA sense strand
cagaaacucaacuuggaaa

SEQ ID NO: 839420 - RNA, 19 nt, Homo sapiens
  misc_RNA (1)...(19): siRNA sense strand
cggcugaaauuguuaagac

SEQ ID NO: 839421 - RNA, 19 nt, Homo sapiens
  misc_RNA (1)...(19): siRNA sense strand
gaccugcuacgaaauaaca

SEQ ID NO: 839422 - RNA, 19 nt, Homo sapiens
  misc_RNA (1)...(19): siRNA sense strand
aaagacugcaagaaaguuu

SEQ ID NO: 839423 - RNA, 19 nt, Homo sapiens
  misc_RNA (1)...(19): siRNA sense strand
agagagaagcuucgacuca

SEQ ID NO: 839424 - RNA, 19 nt, Homo sapiens
  misc_RNA (1)...(19): siRNA sense strand
gugcaggacucagauaucg

SEQ ID NO: 839425 - RNA, 19 nt, Homo sapiens
  misc_RNA (1)...(19): siRNA sense strand
cauccacuccggagagaaa

SEQ ID NO: 839426 - RNA, 19 nt, Homo sapiens
  misc_RNA (1)...(19): siRNA sense strand
caugugacgugugcgagaa

SEQ ID NO: 839427 - RNA, 19 nt, Homo sapiens
  misc_RNA (1)...(19): siRNA sense strand
gacguggacccugagauuu

SEQ ID NO: 839428 - RNA, 19 nt, Homo sapiens
  misc_RNA (1)...(19): siRNA sense strand
cuccaggucuuagucauga

SEQ ID NO: 839429 - RNA, 19 nt, Homo sapiens
  misc_RNA (1)...(19): siRNA sense strand
gagcugccacggucuaugg

SEQ ID NO: 839430 - RNA, 19 nt, Homo sapiens
  misc_RNA (1)...(19): siRNA sense strand
uaacaggugacccaaaguc

SEQ ID NO: 839431 - RNA, 19 nt, Homo sapiens
  misc_RNA (1)...(19): siRNA sense strand
aauaacagaagacccaaga

SEQ ID NO: 839432 - RNA, 19 nt, Homo sapiens
  misc_RNA (1)...(19): siRNA sense strand
uaaagacugcaagaaaguu

SEQ ID NO: 839433 - RNA, 19 nt, Homo sapiens
  misc_RNA (1)...(19): siRNA sense strand
cagaagacccaagaaaugg

SEQ ID NO: 839434 - RNA, 19 nt, Homo sapiens
  misc_RNA (1)...(19): siRNA sense strand
ucagaaacucaacuuggaa

SEQ ID NO: 839435 - RNA, 19 nt, Homo sapiens
  misc_RNA (1)...(19): siRNA sense strand
ccacaagagaucacacaca

SEQ ID NO: 839436 - RNA, 19 nt, Homo sapiens
  misc_RNA (1)...(19): siRNA sense strand
ccaagcuagucauccacaa

SEQ ID NO: 839437 - RNA, 19 nt, Homo sapiens
  misc_RNA (1)...(19): siRNA sense strand
cggaaaggaauauauugug

SEQ ID NO: 839438 - RNA, 19 nt, Homo sapiens
  misc_RNA (1)...(19): siRNA sense strand
gcuagucauccacaagaga

SEQ ID NO: 839439 - RNA, 19 nt, Homo sapiens
  misc_RNA (1)...(19): siRNA sense strand
ccuccuccauuucccaaga

SEQ ID NO: 839440 - RNA, 19 nt, Homo sapiens
  misc_RNA (1)...(19): siRNA sense strand
agagaagcuucgacucaca

SEQ ID NO: 839441 - RNA, 19 nt, Homo sapiens
  misc_RNA (1)...(19): siRNA sense strand
cacaagaguauugacguaa

SEQ ID NO: 839442 - RNA, 19 nt, Homo sapiens
  misc_RNA (1)...(19): siRNA sense strand
aacagaagacccaagaaau

SEQ ID NO: 839443 - RNA, 19 nt, Homo sapiens
  misc_RNA (1)...(19): siRNA sense strand
ugaagugucacaagagaag

SEQ ID NO: 839444 - RNA, 19 nt, Homo sapiens
  misc_RNA (1)...(19): siRNA sense strand
aagagcagauccuggacau

SEQ ID NO: 839445 - RNA, 19 nt, Homo sapiens
  misc_RNA (1)...(19): siRNA sense strand
aaaauagccucuguggaaa

SEQ ID NO: 839446 - RNA, 19 nt, Homo sapiens
  misc_RNA (1)...(19): siRNA sense strand
acaagaguauugacguaac

SEQ ID NO: 839447 - RNA, 19 nt, Homo sapiens
  misc_RNA (1)...(19): siRNA sense strand
ugauggagcaguucaugau

SEQ ID NO: 839448 - RNA, 19 nt, Homo sapiens
  misc_RNA (1)...(19): siRNA sense strand
ccaggagcuccaggucuua

SEQ ID NO: 839449 - RNA, 19 nt, Homo sapiens
  misc_RNA (1)...(19): siRNA sense strand
uggagaaggaucugaagga

SEQ ID NO: 839450 - RNA, 19 nt, Homo sapiens
  misc_RNA (1)...(19): siRNA sense strand
ccagaaaacacauccagaa

SEQ ID NO: 839451 - RNA, 19 nt, Homo sapiens
  misc_RNA (1)...(19): siRNA sense strand
caagcugggaugaauucaa

SEQ ID NO: 839452 - RNA, 19 nt, Homo sapiens
  misc_RNA (1)...(19): siRNA sense strand
gaaucugagcagucccaaa

SEQ ID NO: 839453 - RNA, 19 nt, Homo sapiens
  misc_RNA (1)...(19): siRNA sense strand
ggucuguggucaccuucca

SEQ ID NO: 839454 - RNA, 19 nt, Homo sapiens
  misc_RNA (1)...(19): siRNA sense strand
ucccacagaucuggugaga

SEQ ID NO: 839455 - RNA, 19 nt, Homo sapiens
  misc_RNA (1)...(19): siRNA sense strand
agccucagcuuccaaagag

SEQ ID NO: 839456 - RNA, 19 nt, Homo sapiens
  misc_RNA (1)...(19): siRNA sense strand
ccuccucggugaaccagau

SEQ ID NO: 839457 - RNA, 19 nt, Homo sapiens
  misc_RNA (1)...(19): siRNA sense strand
gugauggagcaguucauga

SEQ ID NO: 839458 - RNA, 19 nt, Homo sapiens
  misc_RNA (1)...(19): siRNA sense strand
gcuccaggucuuagucaug

SEQ ID NO: 839459 - RNA, 19 nt, Homo sapiens
  misc_RNA (1)...(19): siRNA sense strand
ggaggaccugcuacgaaau

SEQ ID NO: 839460 - RNA, 19 nt, Homo sapiens
  misc_RNA (1)...(19): siRNA sense strand
auguaaagacugcaagaaa

SEQ ID NO: 839461 - RNA, 19 nt, Homo sapiens
  misc_RNA (1)...(19): siRNA sense strand
gagcuccaggucuuaguca

SEQ ID NO: 839462 - RNA, 19 nt, Homo sapiens
  misc_RNA (1)...(19): siRNA sense strand
aagcuagucauccacaaga

SEQ ID NO: 839463 - RNA, 19 nt, Homo sapiens
  misc_RNA (1)...(19): siRNA sense strand
cagaucuggugagagcaaa

SEQ ID NO: 839464 - RNA, 19 nt, Homo sapiens
  misc_RNA (1)...(19): siRNA sense strand
gagaagagcucggucauga

SEQ ID NO: 839465 - RNA, 19 nt, Homo sapiens
  misc_RNA (1)...(19): siRNA sense strand
aggagaagcuggagguuua

SEQ ID NO: 839466 - RNA, 19 nt, Homo sapiens
  misc_RNA (1)...(19): siRNA sense strand
cgaaauggcugaucaugag

SEQ ID NO: 839467 - RNA, 19 nt, Homo sapiens
  misc_RNA (1)...(19): siRNA sense strand
guaaugaaaucaccaucug

SEQ ID NO: 839468 - RNA, 19 nt, Homo sapiens
  misc_RNA (1)...(19): siRNA sense strand
gcucuugccugaaccaguu

SEQ ID NO: 839469 - RNA, 19 nt, Homo sapiens
  misc_RNA (1)...(19): siRNA sense strand
caggaccuauuucccauuu

SEQ ID NO: 839470 - RNA, 19 nt, Homo sapiens
  misc_RNA (1)...(19): siRNA sense strand
gaagagcucggucaugaag

SEQ ID NO: 839471 - RNA, 19 nt, Homo sapiens
  misc_RNA (1)...(19): siRNA sense strand
gcuaugaccguaaugaaau

SEQ ID NO: 839472 - RNA, 19 nt, Homo sapiens
  misc_RNA (1)...(19): siRNA sense strand
gcucggucaugaagaaaug

SEQ ID NO: 839473 - RNA, 19 nt, Homo sapiens
  misc_RNA (1)...(19): siRNA sense strand
ggacacccaugagcguaga

SEQ ID NO: 839474 - RNA, 19 nt, Homo sapiens
  misc_RNA (1)...(19): siRNA sense strand
ucaaagggaagaacgaaga

SEQ ID NO: 839475 - RNA, 19 nt, Homo sapiens
  misc_RNA (1)...(19): siRNA sense strand
uuaaugaagagucggauuu

SEQ ID NO: 839476 - RNA, 19 nt, Homo sapiens
  misc_RNA (1)...(19): siRNA sense strand
gaucaaagggaagaacgaa

SEQ ID NO: 839477 - RNA, 19 nt, Homo sapiens
  misc_RNA (1)...(19): siRNA sense strand
agagcucggucaugaagaa

SEQ ID NO: 839478 - RNA, 19 nt, Homo sapiens
  misc_RNA (1)...(19): siRNA sense strand
gagacgcuaugaccguaau

SEQ ID NO: 839479 - RNA, 19 nt, Homo sapiens
  misc_RNA (1)...(19): siRNA sense strand
gggugcugcuuuccuacua

SEQ ID NO: 839480 - RNA, 19 nt, Homo sapiens
  misc_RNA (1)...(19): siRNA sense strand
gaagaacgaagagcucauc

SEQ ID NO: 839481 - RNA, 19 nt, Homo sapiens
  misc_RNA (1)...(19): siRNA sense strand
uuccagagguuuccaagga

SEQ ID NO: 839482 - RNA, 19 nt, Homo sapiens
  misc_RNA (1)...(19): siRNA sense strand
gauagcaggcuuggugaga

SEQ ID NO: 839483 - RNA, 19 nt, Homo sapiens
  misc_RNA (1)...(19): siRNA sense strand
cacaauaagccgaggauuc

SEQ ID NO: 839484 - RNA, 19 nt, Homo sapiens
  misc_RNA (1)...(19): siRNA sense strand
ggaccuauuucccauuuuc

SEQ ID NO: 839485 - RNA, 19 nt, Homo sapiens
  misc_RNA (1)...(19): siRNA sense strand
uggcugugguuucgaaaug

SEQ ID NO: 839486 - RNA, 19 nt, Homo sapiens
  misc_RNA (1)...(19): siRNA sense strand
gcuggagguuuacuucucu

SEQ ID NO: 839487 - RNA, 19 nt, Homo sapiens
  misc_RNA (1)...(19): siRNA sense strand
ggcacuaccuggacaacca

SEQ ID NO: 839488 - RNA, 19 nt, Homo sapiens
  misc_RNA (1)...(19): siRNA sense strand
guagagaucaaagggaaga

SEQ ID NO: 839489 - RNA, 19 nt, Homo sapiens
  misc_RNA (1)...(19): siRNA sense strand
ggagaagagcucggucaug

SEQ ID NO: 839490 - RNA, 19 nt, Homo sapiens
  misc_RNA (1)...(19): siRNA sense strand
ucugggugcugcuuuccua

SEQ ID NO: 839491 - RNA, 19 nt, Homo sapiens
  misc_RNA (1)...(19): siRNA sense strand
gauucugggugcugcuuuc

SEQ ID NO: 839492 - RNA, 19 nt, Homo sapiens
  misc_RNA (1)...(19): siRNA sense strand
gugguggugucacaugaug

SEQ ID NO: 839493 - RNA, 19 nt, Homo sapiens
  misc_RNA (1)...(19): siRNA sense strand
acaauaagccgaggauucu

SEQ ID NO: 839494 - RNA, 19 nt, Homo sapiens
  misc_RNA (1)...(19): siRNA sense strand
uuuggugccuuaaugaaga

SEQ ID NO: 839495 - RNA, 19 nt, Homo sapiens
  misc_RNA (1)...(19): siRNA sense strand
cccaaucccugagaaguuc

SEQ ID NO: 839496 - RNA, 19 nt, Homo sapiens
  misc_RNA (1)...(19): siRNA sense strand
ucaucaacaggaccuauuu

SEQ ID NO: 839497 - RNA, 19 nt, Homo sapiens
  misc_RNA (1)...(19): siRNA sense strand
guuauuggcugugguuucg

SEQ ID NO: 839498 - RNA, 19 nt, Homo sapiens
  misc_RNA (1)...(19): siRNA sense strand
ggugucacaugaugagaac

SEQ ID NO: 839499 - RNA, 19 nt, Homo sapiens
  misc_RNA (1)...(19): siRNA sense strand
ucgaaauggcugaucauga

SEQ ID NO: 839500 - RNA, 19 nt, Homo sapiens
  misc_RNA (1)...(19): siRNA sense strand
uccuggagcucgacuguca

SEQ ID NO: 839501 - RNA, 19 nt, Homo sapiens
  misc_RNA (1)...(19): siRNA sense strand
guuucgaaauggcugauca

SEQ ID NO: 839502 - RNA, 19 nt, Homo sapiens
  misc_RNA (1)...(19): siRNA sense strand
gaguggugguggugucaca

SEQ ID NO: 839503 - RNA, 19 nt, Homo sapiens
  misc_RNA (1)...(19): siRNA sense strand
uauuggcugugguuucgaa

SEQ ID NO: 839504 - RNA, 19 nt, Homo sapiens
  misc_RNA (1)...(19): siRNA sense strand
uggcugaucaugaggaaga

SEQ ID NO: 839505 - RNA, 19 nt, Homo sapiens
  misc_RNA (1)...(19): siRNA sense strand
cuaugaccguaaugaaauc

SEQ ID NO: 839506 - RNA, 19 nt, Homo sapiens
  misc_RNA (1)...(19): siRNA sense strand
ccaguuauuggcugugguu

SEQ ID NO: 839507 - RNA, 19 nt, Homo sapiens
  misc_RNA (1)...(19): siRNA sense strand
ccaugagcguagagaucaa

SEQ ID NO: 839508 - RNA, 19 nt, Homo sapiens
  misc_RNA (1)...(19): siRNA sense strand
cgcuaugaccguaaugaaa

SEQ ID NO: 839509 - RNA, 19 nt, Homo sapiens
  misc_RNA (1)...(19): siRNA sense strand
gcacagcgguguagacauc

SEQ ID NO: 839510 - RNA, 19 nt, Homo sapiens
  misc_RNA (1)...(19): siRNA sense strand
guagacaucugcaucaaca

SEQ ID NO: 839511 - RNA, 19 nt, Homo sapiens
  misc_RNA (1)...(19): siRNA sense strand
gcacaucauuaacaucaau

SEQ ID NO: 839512 - RNA, 19 nt, Homo sapiens
  misc_RNA (1)...(19): siRNA sense strand
gcaaaugaagugucucaaa

SEQ ID NO: 839513 - RNA, 19 nt, Homo sapiens
  misc_RNA (1)...(19): siRNA sense strand
caaaugaagugucucaaac

SEQ ID NO: 839514 - RNA, 19 nt, Homo sapiens
  misc_RNA (1)...(19): siRNA sense strand
ggccgaggcuguuaucuac

SEQ ID NO: 839515 - RNA, 19 nt, Homo sapiens
  misc_RNA (1)...(19): siRNA sense strand
gggcacaucauuaacauca

SEQ ID NO: 839516 - RNA, 19 nt, Homo sapiens
  misc_RNA (1)...(19): siRNA sense strand
gagcaaaugaagugucuca

SEQ ID NO: 839517 - RNA, 19 nt, Homo sapiens
  misc_RNA (1)...(19): siRNA sense strand
cagagggacugaggcaaga

SEQ ID NO: 839518 - RNA, 19 nt, Homo sapiens
  misc_RNA (1)...(19): siRNA sense strand
cgacaaggacccugagaag

SEQ ID NO: 839519 - RNA, 19 nt, Homo sapiens
  misc_RNA (1)...(19): siRNA sense strand
agacacaauucgccuucaa

SEQ ID NO: 839520 - RNA, 19 nt, Homo sapiens
  misc_RNA (1)...(19): siRNA sense strand
guucucagcuauccguucu

SEQ ID NO: 839521 - RNA, 19 nt, Homo sapiens
  misc_RNA (1)...(19): siRNA sense strand
ccuaugagcaaaugaagug

SEQ ID NO: 839522 - RNA, 19 nt, Homo sapiens
  misc_RNA (1)...(19): siRNA sense strand
acaauucgccuucaaacuc

SEQ ID NO: 839523 - RNA, 19 nt, Homo sapiens
  misc_RNA (1)...(19): siRNA sense strand
gacacaauucgccuucaaa

SEQ ID NO: 839524 - RNA, 19 nt, Homo sapiens
  misc_RNA (1)...(19): siRNA sense strand
ucuauagugccaccaagua

SEQ ID NO: 839525 - RNA, 19 nt, Homo sapiens
  misc_RNA (1)...(19): siRNA sense strand
ccaccuaugagcaaaugaa

SEQ ID NO: 839526 - RNA, 19 nt, Homo sapiens
  misc_RNA (1)...(19): siRNA sense strand
gauguggccgaggcuguua

SEQ ID NO: 839527 - RNA, 19 nt, Homo sapiens
  misc_RNA (1)...(19): siRNA sense strand
ccgcacacauccagauugg

SEQ ID NO: 839528 - RNA, 19 nt, Homo sapiens
  misc_RNA (1)...(19): siRNA sense strand
gagacacaauucgccuuca

SEQ ID NO: 839529 - RNA, 19 nt, Homo sapiens
  misc_RNA (1)...(19): siRNA sense strand
ucugugacccacuucuaua

SEQ ID NO: 839530 - RNA, 19 nt, Homo sapiens
  misc_RNA (1)...(19): siRNA sense strand
gguguagacaucugcauca

SEQ ID NO: 839531 - RNA, 19 nt, Homo sapiens
  misc_RNA (1)...(19): siRNA sense strand
gaagccuaccaguccauga

SEQ ID NO: 839532 - RNA, 19 nt, Homo sapiens
  misc_RNA (1)...(19): siRNA sense strand
uggaaggacauguucaaug

SEQ ID NO: 839533 - RNA, 19 nt, Homo sapiens
  misc_RNA (1)...(19): siRNA sense strand
ccuucaaacuccacgacaa

SEQ ID NO: 839534 - RNA, 19 nt, Homo sapiens
  misc_RNA (1)...(19): siRNA sense strand
gacaucugcaucaacaaug

SEQ ID NO: 839535 - RNA, 19 nt, Homo sapiens
  misc_RNA (1)...(19): siRNA sense strand
agacaucugcaucaacaau

SEQ ID NO: 839536 - RNA, 19 nt, Homo sapiens
  misc_RNA (1)...(19): siRNA sense strand
ggauguggccgaggcuguu

SEQ ID NO: 839537 - RNA, 19 nt, Homo sapiens
  misc_RNA (1)...(19): siRNA sense strand
ucucagcuauccguucuca

SEQ ID NO: 839538 - RNA, 19 nt, Homo sapiens
  misc_RNA (1)...(19): siRNA sense strand
guguagacaucugcaucaa

SEQ ID NO: 839539 - RNA, 19 nt, Homo sapiens
  misc_RNA (1)...(19): siRNA sense strand
ggagcggaauguggacgau

SEQ ID NO: 839540 - RNA, 19 nt, Homo sapiens
  misc_RNA (1)...(19): siRNA sense strand
caccaaguaugccgucacu

SEQ ID NO: 839541 - RNA, 19 nt, Homo sapiens
  misc_RNA (1)...(19): siRNA sense strand
guuggaaggacauguucaa

SEQ ID NO: 839542 - RNA, 19 nt, Homo sapiens
  misc_RNA (1)...(19): siRNA sense strand
uggccgaggcuguuaucua

SEQ ID NO: 839543 - RNA, 19 nt, Homo sapiens
  misc_RNA (1)...(19): siRNA sense strand
ggcacaucauuaacaucaa

SEQ ID NO: 839544 - RNA, 19 nt, Homo sapiens
  misc_RNA (1)...(19): siRNA sense strand
gcugccaccuaugagcaaa

SEQ ID NO: 839545 - RNA, 19 nt, Homo sapiens
  misc_RNA (1)...(19): siRNA sense strand
cuauagugccaccaaguau

SEQ ID NO: 839546 - RNA, 19 nt, Homo sapiens
  misc_RNA (1)...(19): siRNA sense strand
ggaagaaaaucgacuguua

SEQ ID NO: 839547 - RNA, 19 nt, Homo sapiens
  misc_RNA (1)...(19): siRNA sense strand
gagcaaaacugccaaguau

SEQ ID NO: 839548 - RNA, 19 nt, Homo sapiens
  misc_RNA (1)...(19): siRNA sense strand
gcaaaacugccaaguauuu

SEQ ID NO: 839549 - RNA, 19 nt, Homo sapiens
  misc_RNA (1)...(19): siRNA sense strand
aacagcagauucucgcuua

SEQ ID NO: 839550 - RNA, 19 nt, Homo sapiens
  misc_RNA (1)...(19): siRNA sense strand
gaagaaaaucgacuguuaa

SEQ ID NO: 839551 - RNA, 19 nt, Homo sapiens
  misc_RNA (1)...(19): siRNA sense strand
acagacaguuggaagagaa

SEQ ID NO: 839552 - RNA, 19 nt, Homo sapiens
  misc_RNA (1)...(19): siRNA sense strand
gauucucgcuuacaaggau

SEQ ID NO: 839553 - RNA, 19 nt, Homo sapiens
  misc_RNA (1)...(19): siRNA sense strand
gaaaaucgacuguuaaaac

SEQ ID NO: 839554 - RNA, 19 nt, Homo sapiens
  misc_RNA (1)...(19): siRNA sense strand
caaaguaggauucaagaac

SEQ ID NO: 839555 - RNA, 19 nt, Homo sapiens
  misc_RNA (1)...(19): siRNA sense strand
ugacugagcgacuagaaga

SEQ ID NO: 839556 - RNA, 19 nt, Homo sapiens
  misc_RNA (1)...(19): siRNA sense strand
gaacgacagcaugcacaaa

SEQ ID NO: 839557 - RNA, 19 nt, Homo sapiens
  misc_RNA (1)...(19): siRNA sense strand
aaaguaggauucaagaacu

SEQ ID NO: 839558 - RNA, 19 nt, Homo sapiens
  misc_RNA (1)...(19): siRNA sense strand
gaacgggcucaaaguagga

SEQ ID NO: 839559 - RNA, 19 nt, Homo sapiens
  misc_RNA (1)...(19): siRNA sense strand
gaggcugacugagcgacua

SEQ ID NO: 839560 - RNA, 19 nt, Homo sapiens
  misc_RNA (1)...(19): siRNA sense strand
agaguguuauugagaaguu

SEQ ID NO: 839561 - RNA, 19 nt, Homo sapiens
  misc_RNA (1)...(19): siRNA sense strand
gucagcaucuggccaagug

SEQ ID NO: 839562 - RNA, 19 nt, Homo sapiens
  misc_RNA (1)...(19): siRNA sense strand
gauucacgcugggagcaaa

SEQ ID NO: 839563 - RNA, 19 nt, Homo sapiens
  misc_RNA (1)...(19): siRNA sense strand
aaauugagaggcugacuga

SEQ ID NO: 839564 - RNA, 19 nt, Homo sapiens
  misc_RNA (1)...(19): siRNA sense strand
gcucaaaguaggauucaag

SEQ ID NO: 839565 - RNA, 19 nt, Homo sapiens
  misc_RNA (1)...(19): siRNA sense strand
ggccaagugucuggaugaa

SEQ ID NO: 839566 - RNA, 19 nt, Homo sapiens
  misc_RNA (1)...(19): siRNA sense strand
gccgacgcauuagagcuua

SEQ ID NO: 839567 - RNA, 19 nt, Homo sapiens
  misc_RNA (1)...(19): siRNA sense strand
gcccagaugcgccaggaaa

SEQ ID NO: 839568 - RNA, 19 nt, Homo sapiens
  misc_RNA (1)...(19): siRNA sense strand
uugagaaguugcaggaaga

SEQ ID NO: 839569 - RNA, 19 nt, Homo sapiens
  misc_RNA (1)...(19): siRNA sense strand
ccacaugugucagcaucug

SEQ ID NO: 839570 - RNA, 19 nt, Homo sapiens
  misc_RNA (1)...(19): siRNA sense strand
aaaugacugugccgaagug

SEQ ID NO: 839571 - RNA, 19 nt, Homo sapiens
  misc_RNA (1)...(19): siRNA sense strand
cagaugcgccaggaaauug

SEQ ID NO: 839572 - RNA, 19 nt, Homo sapiens
  misc_RNA (1)...(19): siRNA sense strand
ccagaugcgccaggaaauu

SEQ ID NO: 839573 - RNA, 19 nt, Homo sapiens
  misc_RNA (1)...(19): siRNA sense strand
gggaacgggcucaaaguag

SEQ ID NO: 839574 - RNA, 19 nt, Homo sapiens
  misc_RNA (1)...(19): siRNA sense strand
cgggaacgggcucaaagua

SEQ ID NO: 839575 - RNA, 19 nt, Homo sapiens
  misc_RNA (1)...(19): siRNA sense strand
ggagcaaaacugccaagua

SEQ ID NO: 839576 - RNA, 19 nt, Homo sapiens
  misc_RNA (1)...(19): siRNA sense strand
agcccgagcugaugaggaa

SEQ ID NO: 839577 - RNA, 19 nt, Homo sapiens
  misc_RNA (1)...(19): siRNA sense strand
gggugcagaugcuggaaca

SEQ ID NO: 839578 - RNA, 19 nt, Homo sapiens
  misc_RNA (1)...(19): siRNA sense strand
gaucgggaacgggcucaaa

SEQ ID NO: 839579 - RNA, 19 nt, Homo sapiens
  misc_RNA (1)...(19): siRNA sense strand
uccagaguguuauugagaa

SEQ ID NO: 839580 - RNA, 19 nt, Homo sapiens
  misc_RNA (1)...(19): siRNA sense strand
ccaaguggcagcgcuacaa

SEQ ID NO: 839581 - RNA, 19 nt, Homo sapiens
  misc_RNA (1)...(19): siRNA sense strand
guccagaguguuauugaga

SEQ ID NO: 839582 - RNA, 19 nt, Homo sapiens
  misc_RNA (1)...(19): siRNA sense strand
ccagaguguuauugagaag

SEQ ID NO: 839583 - RNA, 19 nt, Homo sapiens
  misc_RNA (1)...(19): siRNA sense strand
cgacagcaugcacaaagga

SEQ ID NO: 839584 - RNA, 19 nt, Homo sapiens
  misc_RNA (1)...(19): siRNA sense strand
cagcaugcacaaaggaaug

SEQ ID NO: 839585 - RNA, 19 nt, Homo sapiens
  misc_RNA (1)...(19): siRNA sense strand
ugacugugccgaagugaag

SEQ ID NO: 839586 - RNA, 19 nt, Homo sapiens
  misc_RNA (1)...(19): siRNA sense strand
gagaaguugcaggaagaaa

SEQ ID NO: 839587 - RNA, 19 nt, Homo sapiens
  misc_RNA (1)...(19): siRNA sense strand
ucaaaguaggauucaagaa

SEQ ID NO: 839588 - RNA, 19 nt, Homo sapiens
  misc_RNA (1)...(19): siRNA sense strand
uaaaugacugugccgaagu

SEQ ID NO: 839589 - RNA, 19 nt, Homo sapiens
  misc_RNA (1)...(19): siRNA sense strand
gacagcaugcacaaaggaa

SEQ ID NO: 839590 - RNA, 19 nt, Homo sapiens
  misc_RNA (1)...(19): siRNA sense strand
gaaguugcaggaagaaaau

SEQ ID NO: 839591 - RNA, 19 nt, Homo sapiens
  misc_RNA (1)...(19): siRNA sense strand
uucaagaacuggaggaaaa

SEQ ID NO: 839592 - RNA, 19 nt, Homo sapiens
  misc_RNA (1)...(19): siRNA sense strand
gaguguuauugagaaguug

SEQ ID NO: 839593 - RNA, 19 nt, Homo sapiens
  misc_RNA (1)...(19): siRNA sense strand
gcagauucucgcuuacaag

SEQ ID NO: 839594 - RNA, 19 nt, Homo sapiens
  misc_RNA (1)...(19): siRNA sense strand
uaaaacagaaggugacuca

SEQ ID NO: 839595 - RNA, 19 nt, Homo sapiens
  misc_RNA (1)...(19): siRNA sense strand
ggagacagcugcuuuaaua

SEQ ID NO: 839596 - RNA, 19 nt, Homo sapiens
  misc_RNA (1)...(19): siRNA sense strand
ggaguugccuuuauguuua

SEQ ID NO: 839597 - RNA, 19 nt, Homo sapiens
  misc_RNA (1)...(19): siRNA sense strand
ggaauuaacuuucuucucu

SEQ ID NO: 839598 - RNA, 19 nt, Homo sapiens
  misc_RNA (1)...(19): siRNA sense strand
gaaacugccugacaaucaa

SEQ ID NO: 839599 - RNA, 19 nt, Homo sapiens
  misc_RNA (1)...(19): siRNA sense strand
gcaacuaccuucuccuuca

SEQ ID NO: 839600 - RNA, 19 nt, Homo sapiens
  misc_RNA (1)...(19): siRNA sense strand
cagcauggcuauuaucuau

SEQ ID NO: 839601 - RNA, 19 nt, Homo sapiens
  misc_RNA (1)...(19): siRNA sense strand
gagaugcuccuucuuagua

SEQ ID NO: 839602 - RNA, 19 nt, Homo sapiens
  misc_RNA (1)...(19): siRNA sense strand
caaggaaacugccugacaa

SEQ ID NO: 839603 - RNA, 19 nt, Homo sapiens
  misc_RNA (1)...(19): siRNA sense strand
gaaauccaguugugcuguu

SEQ ID NO: 839604 - RNA, 19 nt, Homo sapiens
  misc_RNA (1)...(19): siRNA sense strand
gaccucaacucucuauguu

SEQ ID NO: 839605 - RNA, 19 nt, Homo sapiens
  misc_RNA (1)...(19): siRNA sense strand
ggaaacugccugacaauca

SEQ ID NO: 839606 - RNA, 19 nt, Homo sapiens
  misc_RNA (1)...(19): siRNA sense strand
ggaacaauuucuuucuuca

SEQ ID NO: 839607 - RNA, 19 nt, Homo sapiens
  misc_RNA (1)...(19): siRNA sense strand
uuauacaggucuggaauua

SEQ ID NO: 839608 - RNA, 19 nt, Homo sapiens
  misc_RNA (1)...(19): siRNA sense strand
ggacaguucuauucuuucu

SEQ ID NO: 839609 - RNA, 19 nt, Homo sapiens
  misc_RNA (1)...(19): siRNA sense strand
ccucaacucucuauguuug

SEQ ID NO: 839610 - RNA, 19 nt, Homo sapiens
  misc_RNA (1)...(19): siRNA sense strand
caucaaauccagcaaagaa

SEQ ID NO: 839611 - RNA, 19 nt, Homo sapiens
  misc_RNA (1)...(19): siRNA sense strand
gaaauguggcgcaaacugu

SEQ ID NO: 839612 - RNA, 19 nt, Homo sapiens
  misc_RNA (1)...(19): siRNA sense strand
ggaagcugccgccuuugua

SEQ ID NO: 839613 - RNA, 19 nt, Homo sapiens
  misc_RNA (1)...(19): siRNA sense strand
gcauggcuauuaucuaugg

SEQ ID NO: 839614 - RNA, 19 nt, Homo sapiens
  misc_RNA (1)...(19): siRNA sense strand
gcuauuaucuauggagugu

SEQ ID NO: 839615 - RNA, 19 nt, Homo sapiens
  misc_RNA (1)...(19): siRNA sense strand
guucucugcuucaaauuug

SEQ ID NO: 839616 - RNA, 19 nt, Homo sapiens
  misc_RNA (1)...(19): siRNA sense strand
caucggcauuggagaaauu

SEQ ID NO: 839617 - RNA, 19 nt, Homo sapiens
  misc_RNA (1)...(19): siRNA sense strand
cagucuagcuuguucuuug

SEQ ID NO: 839618 - RNA, 19 nt, Homo sapiens
  misc_RNA (1)...(19): siRNA sense strand
ucacugccuuucaaacuug

SEQ ID NO: 839619 - RNA, 19 nt, Homo sapiens
  misc_RNA (1)...(19): siRNA sense strand
gaagagaaaagccuuauug

SEQ ID NO: 839620 - RNA, 19 nt, Homo sapiens
  misc_RNA (1)...(19): siRNA sense strand
guauauggaaccuguauug

SEQ ID NO: 839621 - RNA, 19 nt, Homo sapiens
  misc_RNA (1)...(19): siRNA sense strand
guucuauucuuucucauuc

SEQ ID NO: 839622 - RNA, 19 nt, Homo sapiens
  misc_RNA (1)...(19): siRNA sense strand
uuucuucucugguguauau

SEQ ID NO: 839623 - RNA, 19 nt, Homo sapiens
  misc_RNA (1)...(19): siRNA sense strand
ucaaguuuguucagucuau

SEQ ID NO: 839624 - RNA, 19 nt, Homo sapiens
  misc_RNA (1)...(19): siRNA sense strand
ggucuggaauuaacuuucu

SEQ ID NO: 839625 - RNA, 19 nt, Homo sapiens
  misc_RNA (1)...(19): siRNA sense strand
ggaccucaacucucuaugu

SEQ ID NO: 839626 - RNA, 19 nt, Homo sapiens
  misc_RNA (1)...(19): siRNA sense strand
gaguugccuuuauguuuau

SEQ ID NO: 839627 - RNA, 19 nt, Homo sapiens
  misc_RNA (1)...(19): siRNA sense strand
gaacaaucguuuugguaga

SEQ ID NO: 839628 - RNA, 19 nt, Homo sapiens
  misc_RNA (1)...(19): siRNA sense strand
cuuuggaaaucucuacaua

SEQ ID NO: 839629 - RNA, 19 nt, Homo sapiens
  misc_RNA (1)...(19): siRNA sense strand
gggagaaacagugggauuu

SEQ ID NO: 839630 - RNA, 19 nt, Homo sapiens
  misc_RNA (1)...(19): siRNA sense strand
gagcacagcauugggagaa

SEQ ID NO: 839631 - RNA, 19 nt, Homo sapiens
  misc_RNA (1)...(19): siRNA sense strand
ggcaguagaugcuuuuaaa

SEQ ID NO: 839632 - RNA, 19 nt, Homo sapiens
  misc_RNA (1)...(19): siRNA sense strand
uuuaauacccagcugcuua

SEQ ID NO: 839633 - RNA, 19 nt, Homo sapiens
  misc_RNA (1)...(19): siRNA sense strand
gagcuuaaauaggacagau

SEQ ID NO: 839634 - RNA, 19 nt, Homo sapiens
  misc_RNA (1)...(19): siRNA sense strand
caauuucuuucuucacugu

SEQ ID NO: 839635 - RNA, 19 nt, Homo sapiens
  misc_RNA (1)...(19): siRNA sense strand
acaguucuauucuuucuca

SEQ ID NO: 839636 - RNA, 19 nt, Homo sapiens
  misc_RNA (1)...(19): siRNA sense strand
uauaccagcauggcuauua

SEQ ID NO: 839637 - RNA, 19 nt, Homo sapiens
  misc_RNA (1)...(19): siRNA sense strand
gucagugguugccauugua

SEQ ID NO: 839638 - RNA, 19 nt, Homo sapiens
  misc_RNA (1)...(19): siRNA sense strand
cccgauugcuccuguuaaa

SEQ ID NO: 839639 - RNA, 19 nt, Homo sapiens
  misc_RNA (1)...(19): siRNA sense strand
ggaaauguggcgcaaacug

SEQ ID NO: 839640 - RNA, 19 nt, Homo sapiens
  misc_RNA (1)...(19): siRNA sense strand
gucaucaggagcuuaaaua

SEQ ID NO: 839641 - RNA, 19 nt, Homo sapiens
  misc_RNA (1)...(19): siRNA sense strand
gcauguacauugccguuuu

SEQ ID NO: 839642 - RNA, 19 nt, Homo sapiens
  misc_RNA (1)...(19): siRNA sense strand
ggaguguucucugcuucaa

SEQ ID NO: 839643 - RNA, 19 nt, Homo sapiens
  misc_RNA (1)...(19): siRNA sense strand
uauguucacugccuuucaa

SEQ ID NO: 839644 - RNA, 19 nt, Homo sapiens
  misc_RNA (1)...(19): siRNA sense strand
gggcacuucugcagucuag

SEQ ID NO: 839645 - RNA, 19 nt, Homo sapiens
  misc_RNA (1)...(19): siRNA sense strand
aucaggagcuuaaauagga

SEQ ID NO: 839646 - RNA, 19 nt, Homo sapiens
  misc_RNA (1)...(19): siRNA sense strand
uguaggaccucaacucucu

SEQ ID NO: 839647 - RNA, 19 nt, Homo sapiens
  misc_RNA (1)...(19): siRNA sense strand
cauuugccaucuucaaguu

SEQ ID NO: 839648 - RNA, 19 nt, Homo sapiens
  misc_RNA (1)...(19): siRNA sense strand
guuugccagugguuuauuu

SEQ ID NO: 839649 - RNA, 19 nt, Homo sapiens
  misc_RNA (1)...(19): siRNA sense strand
uggaacaauuucuuucuuc

SEQ ID NO: 839650 - RNA, 19 nt, Homo sapiens
  misc_RNA (1)...(19): siRNA sense strand
auacaggucuggaauuaac

SEQ ID NO: 839651 - RNA, 19 nt, Homo sapiens
  misc_RNA (1)...(19): siRNA sense strand
gaugcuccuucuuaguauu

SEQ ID NO: 839652 - RNA, 19 nt, Homo sapiens
  misc_RNA (1)...(19): siRNA sense strand
ggggacaguucuauucuuu

SEQ ID NO: 839653 - RNA, 19 nt, Homo sapiens
  misc_RNA (1)...(19): siRNA sense strand
ggaaaacucagauaucaga

SEQ ID NO: 839654 - RNA, 19 nt, Homo sapiens
  misc_RNA (1)...(19): siRNA sense strand
uauuaucuauggaguguuc

SEQ ID NO: 839655 - RNA, 19 nt, Homo sapiens
  misc_RNA (1)...(19): siRNA sense strand
caaguuuguucagucuauu

SEQ ID NO: 839656 - RNA, 19 nt, Homo sapiens
  misc_RNA (1)...(19): siRNA sense strand
uaucuugggcuuucuguau

SEQ ID NO: 839657 - RNA, 19 nt, Homo sapiens
  misc_RNA (1)...(19): siRNA sense strand
gaaaagccuuauuggacuu

SEQ ID NO: 839658 - RNA, 19 nt, Homo sapiens
  misc_RNA (1)...(19): siRNA sense strand
augggaagcugccgccuuu

SEQ ID NO: 839659 - RNA, 19 nt, Homo sapiens
  misc_RNA (1)...(19): siRNA sense strand
caaauccagcaaagaaguu

SEQ ID NO: 839660 - RNA, 19 nt, Homo sapiens
  misc_RNA (1)...(19): siRNA sense strand
cgucagugguugccauugu

SEQ ID NO: 839661 - RNA, 19 nt, Homo sapiens
  misc_RNA (1)...(19): siRNA sense strand
gaagcugccgccuuuguag

SEQ ID NO: 839662 - RNA, 19 nt, Homo sapiens
  misc_RNA (1)...(19): siRNA sense strand
gccuuuauguuuauguuca

SEQ ID NO: 839663 - RNA, 19 nt, Homo sapiens
  misc_RNA (1)...(19): siRNA sense strand
gcacagcauugggagaaac

SEQ ID NO: 839664 - RNA, 19 nt, Homo sapiens
  misc_RNA (1)...(19): siRNA sense strand
gauuacaccgucagugguu

SEQ ID NO: 839665 - RNA, 19 nt, Homo sapiens
  misc_RNA (1)...(19): siRNA sense strand
ugagcaagaacaaucguuu

SEQ ID NO: 839666 - RNA, 19 nt, Homo sapiens
  misc_RNA (1)...(19): siRNA sense strand
ggagaaauuuuagguggaa

SEQ ID NO: 839667 - RNA, 19 nt, Homo sapiens
  misc_RNA (1)...(19): siRNA sense strand
uuuaggaguugccuuuaug

SEQ ID NO: 839668 - RNA, 19 nt, Homo sapiens
  misc_RNA (1)...(19): siRNA sense strand
gauauaccagcauggcuau

SEQ ID NO: 839669 - RNA, 19 nt, Homo sapiens
  misc_RNA (1)...(19): siRNA sense strand
ucaaacuuguggaaaugug

SEQ ID NO: 839670 - RNA, 19 nt, Homo sapiens
  misc_RNA (1)...(19): siRNA sense strand
uauguuugccagugguuua

SEQ ID NO: 839671 - RNA, 19 nt, Homo sapiens
  misc_RNA (1)...(19): siRNA sense strand
aggaguugccuuuauguuu

SEQ ID NO: 839672 - RNA, 19 nt, Homo sapiens
  misc_RNA (1)...(19): siRNA sense strand
uaacggugauuagccuugu

SEQ ID NO: 839673 - RNA, 19 nt, Homo sapiens
  misc_RNA (1)...(19): siRNA sense strand
gagagugaccgaagaacag

SEQ ID NO: 839674 - RNA, 19 nt, Homo sapiens
  misc_RNA (1)...(19): siRNA sense strand
guggaaauguggcgcaaac

SEQ ID NO: 839675 - RNA, 19 nt, Homo sapiens
  misc_RNA (1)...(19): siRNA sense strand
ugacaaucaauucggauga

SEQ ID NO: 839676 - RNA, 19 nt, Homo sapiens
  misc_RNA (1)...(19): siRNA sense strand
gacaaucaauucggaugag

SEQ ID NO: 839677 - RNA, 19 nt, Homo sapiens
  misc_RNA (1)...(19): siRNA sense strand
auaccagcauggcuauuau

SEQ ID NO: 839678 - RNA, 19 nt, Homo sapiens
  misc_RNA (1)...(19): siRNA sense strand
ggcucugacuaccgaagua

SEQ ID NO: 839679 - RNA, 19 nt, Homo sapiens
  misc_RNA (1)...(19): siRNA sense strand
cuuaguaucuugggcuuuc

SEQ ID NO: 839680 - RNA, 19 nt, Homo sapiens
  misc_RNA (1)...(19): siRNA sense strand
aguguucucugcuucaaau

SEQ ID NO: 839681 - RNA, 19 nt, Homo sapiens
  misc_RNA (1)...(19): siRNA sense strand
ucagagagugaccgaagaa

SEQ ID NO: 839682 - RNA, 19 nt, Homo sapiens
  misc_RNA (1)...(19): siRNA sense strand
gggaagcugccgccuuugu

SEQ ID NO: 839683 - RNA, 19 nt, Homo sapiens
  misc_RNA (1)...(19): siRNA sense strand
gcauuugccaucuucaagu

SEQ ID NO: 839684 - RNA, 19 nt, Homo sapiens
  misc_RNA (1)...(19): siRNA sense strand
ggacagcacaaggaaacug

SEQ ID NO: 839685 - RNA, 19 nt, Homo sapiens
  misc_RNA (1)...(19): siRNA sense strand
cagcaacuaccuucuccuu

SEQ ID NO: 839686 - RNA, 19 nt, Homo sapiens
  misc_RNA (1)...(19): siRNA sense strand
uuacaucaaauccagcaaa

SEQ ID NO: 839687 - RNA, 19 nt, Homo sapiens
  misc_RNA (1)...(19): siRNA sense strand
gcagugcuuacaucaaauc

SEQ ID NO: 839688 - RNA, 19 nt, Homo sapiens
  misc_RNA (1)...(19): siRNA sense strand
uauuggacuuucuggcauu

SEQ ID NO: 839689 - RNA, 19 nt, Homo sapiens
  misc_RNA (1)...(19): siRNA sense strand
gaaaauguccuaggagaag

SEQ ID NO: 839690 - RNA, 19 nt, Homo sapiens
  misc_RNA (1)...(19): siRNA sense strand
ugguagaaauccaguugug

SEQ ID NO: 839691 - RNA, 19 nt, Homo sapiens
  misc_RNA (1)...(19): siRNA sense strand
uauggaguguucucugcuu

SEQ ID NO: 839692 - RNA, 19 nt, Homo sapiens
  misc_RNA (1)...(19): siRNA sense strand
cauccuggugcacuucaua

SEQ ID NO: 839693 - RNA, 19 nt, Homo sapiens
  misc_RNA (1)...(19): siRNA sense strand
ccagcugcuuaguaucuug

SEQ ID NO: 839694 - RNA, 19 nt, Homo sapiens
  misc_RNA (1)...(19): siRNA sense strand
ucaaauccagcaaagaagu

SEQ ID NO: 839695 - RNA, 19 nt, Homo sapiens
  misc_RNA (1)...(19): siRNA sense strand
gaaagaaggcagccauuga

SEQ ID NO: 839696 - RNA, 19 nt, Homo sapiens
  misc_RNA (1)...(19): siRNA sense strand
cggagucggugcaguauga

SEQ ID NO: 839697 - RNA, 19 nt, Homo sapiens
  misc_RNA (1)...(19): siRNA sense strand
ccaaagccuugcccaggaa

SEQ ID NO: 839698 - RNA, 19 nt, Homo sapiens
  misc_RNA (1)...(19): siRNA sense strand
ugaaagaggagcagaggaa

SEQ ID NO: 839699 - RNA, 19 nt, Homo sapiens
  misc_RNA (1)...(19): siRNA sense strand
gaagaugcuggcagagaga

SEQ ID NO: 839700 - RNA, 19 nt, Homo sapiens
  misc_RNA (1)...(19): siRNA sense strand
gaaggucgagcgaaagaag

SEQ ID NO: 839701 - RNA, 19 nt, Homo sapiens
  misc_RNA (1)...(19): siRNA sense strand
agacggagucggugcagua

SEQ ID NO: 839702 - RNA, 19 nt, Homo sapiens
  misc_RNA (1)...(19): siRNA sense strand
caccaggaauacuugaaga

SEQ ID NO: 839703 - RNA, 19 nt, Homo sapiens
  misc_RNA (1)...(19): siRNA sense strand
cgaaagaaggcagccauug

SEQ ID NO: 839704 - RNA, 19 nt, Homo sapiens
  misc_RNA (1)...(19): siRNA sense strand
gaagaagaagcgagauggu

SEQ ID NO: 839705 - RNA, 19 nt, Homo sapiens
  misc_RNA (1)...(19): siRNA sense strand
gaggagcgccaccaggaau

SEQ ID NO: 839706 - RNA, 19 nt, Homo sapiens
  misc_RNA (1)...(19): siRNA sense strand
gcgaaagaaggcagccauu

SEQ ID NO: 839707 - RNA, 19 nt, Homo sapiens
  misc_RNA (1)...(19): siRNA sense strand
ccaggaauacuugaagaug

SEQ ID NO: 839708 - RNA, 19 nt, Homo sapiens
  misc_RNA (1)...(19): siRNA sense strand
gcggaucuccucccucaca

SEQ ID NO: 839709 - RNA, 19 nt, Homo sapiens
  misc_RNA (1)...(19): siRNA sense strand
ccacggagaaaccaaccaa

SEQ ID NO: 839710 - RNA, 19 nt, Homo sapiens
  misc_RNA (1)...(19): siRNA sense strand
ccucacagcaucacuacau

SEQ ID NO: 839711 - RNA, 19 nt, Homo sapiens
  misc_RNA (1)...(19): siRNA sense strand
aaagaaggcagccauugag

SEQ ID NO: 839712 - RNA, 19 nt, Homo sapiens
  misc_RNA (1)...(19): siRNA sense strand
ccauugaggagauuaagca

SEQ ID NO: 839713 - RNA, 19 nt, Homo sapiens
  misc_RNA (1)...(19): siRNA sense strand
cggaaggucgagcgaaaga

SEQ ID NO: 839714 - RNA, 19 nt, Homo sapiens
  misc_RNA (1)...(19): siRNA sense strand
ggaaggucgagcgaaagaa

SEQ ID NO: 839715 - RNA, 19 nt, Homo sapiens
  misc_RNA (1)...(19): siRNA sense strand
agcggaaggucgagcgaaa

SEQ ID NO: 839716 - RNA, 19 nt, Homo sapiens
  misc_RNA (1)...(19): siRNA sense strand
aggcagccauugaggagau

SEQ ID NO: 839717 - RNA, 19 nt, Homo sapiens
  misc_RNA (1)...(19): siRNA sense strand
gggaacaccuggccaaguc

SEQ ID NO: 839718 - RNA, 19 nt, Homo sapiens
  misc_RNA (1)...(19): siRNA sense strand
ccaagucuggguucaauuu

SEQ ID NO: 839719 - RNA, 19 nt, Homo sapiens
  misc_RNA (1)...(19): siRNA sense strand
uggcggaucugcuccaugu

SEQ ID NO: 839720 - RNA, 19 nt, Homo sapiens
  misc_RNA (1)...(19): siRNA sense strand
ggccaagucuggguucaau

SEQ ID NO: 839721 - RNA, 19 nt, Homo sapiens
  misc_RNA (1)...(19): siRNA sense strand
gcaagaggcccguacagaa

SEQ ID NO: 839722 - RNA, 19 nt, Homo sapiens
  misc_RNA (1)...(19): siRNA sense strand
gaaagagaggcaagagaaa

SEQ ID NO: 839723 - RNA, 19 nt, Homo sapiens
  misc_RNA (1)...(19): siRNA sense strand
ggagugaucagaggcaaua

SEQ ID NO: 839724 - RNA, 19 nt, Homo sapiens
  misc_RNA (1)...(19): siRNA sense strand
cagcaggacccucaccuua

SEQ ID NO: 839725 - RNA, 19 nt, Homo sapiens
  misc_RNA (1)...(19): siRNA sense strand
gaagaaagccagacaucag

SEQ ID NO: 839726 - RNA, 19 nt, Homo sapiens
  misc_RNA (1)...(19): siRNA sense strand
caauaaagaguacgaggaa

SEQ ID NO: 839727 - RNA, 19 nt, Homo sapiens
  misc_RNA (1)...(19): siRNA sense strand
gaucagaggcaauaaagag

SEQ ID NO: 839728 - RNA, 19 nt, Homo sapiens
  misc_RNA (1)...(19): siRNA sense strand
caagaggcccguacagaau

SEQ ID NO: 839729 - RNA, 19 nt, Homo sapiens
  misc_RNA (1)...(19): siRNA sense strand
gcaggacccucaccuuacu

SEQ ID NO: 839730 - RNA, 19 nt, Homo sapiens
  misc_RNA (1)...(19): siRNA sense strand
ggaagaaagccagacauca

SEQ ID NO: 839731 - RNA, 19 nt, Homo sapiens
  misc_RNA (1)...(19): siRNA sense strand
gaaggcagucgcagcagaa

SEQ ID NO: 839732 - RNA, 19 nt, Homo sapiens
  misc_RNA (1)...(19): siRNA sense strand
agaaagagaggcaagagaa

SEQ ID NO: 839733 - RNA, 19 nt, Homo sapiens
  misc_RNA (1)...(19): siRNA sense strand
guacaacucccaauucaac

SEQ ID NO: 839734 - RNA, 19 nt, Homo sapiens
  misc_RNA (1)...(19): siRNA sense strand
gagaaagagaggcaagaga

SEQ ID NO: 839735 - RNA, 19 nt, Homo sapiens
  misc_RNA (1)...(19): siRNA sense strand
gaagggaaaggagugauca

SEQ ID NO: 839736 - RNA, 19 nt, Homo sapiens
  misc_RNA (1)...(19): siRNA sense strand
ucagaggcaauaaagagua

SEQ ID NO: 839737 - RNA, 19 nt, Homo sapiens
  misc_RNA (1)...(19): siRNA sense strand
uaaagaguacgaggaagaa

SEQ ID NO: 839738 - RNA, 19 nt, Homo sapiens
  misc_RNA (1)...(19): siRNA sense strand
cgguacaacucccaauuca

SEQ ID NO: 839739 - RNA, 19 nt, Homo sapiens
  misc_RNA (1)...(19): siRNA sense strand
ggaagggaaaggagugauc

SEQ ID NO: 839740 - RNA, 19 nt, Homo sapiens
  misc_RNA (1)...(19): siRNA sense strand
aagaagacgagacggauga

SEQ ID NO: 839741 - RNA, 19 nt, Homo sapiens
  misc_RNA (1)...(19): siRNA sense strand
cagaugagaagaucaagag

SEQ ID NO: 839742 - RNA, 19 nt, Homo sapiens
  misc_RNA (1)...(19): siRNA sense strand
cagaggcaauaaagaguac

SEQ ID NO: 839743 - RNA, 19 nt, Homo sapiens
  misc_RNA (1)...(19): siRNA sense strand
gcgguacaacucccaauuc

SEQ ID NO: 839744 - RNA, 19 nt, Homo sapiens
  misc_RNA (1)...(19): siRNA sense strand
auaaagaguacgaggaaga

SEQ ID NO: 839745 - RNA, 19 nt, Homo sapiens
  misc_RNA (1)...(19): siRNA sense strand
aagaaagccagacaucaga

SEQ ID NO: 839746 - RNA, 19 nt, Homo sapiens
  misc_RNA (1)...(19): siRNA sense strand
gaaaaggaggggucugaga

SEQ ID NO: 839747 - RNA, 19 nt, Homo sapiens
  misc_RNA (1)...(19): siRNA sense strand
ggagaaagagaggcaagag

SEQ ID NO: 839748 - RNA, 19 nt, Homo sapiens
  misc_RNA (1)...(19): siRNA sense strand
cagcggaggcacagacuca

SEQ ID NO: 839749 - RNA, 19 nt, Homo sapiens
  misc_RNA (1)...(19): siRNA sense strand
gaaagccagacaucagaac

SEQ ID NO: 839750 - RNA, 19 nt, Homo sapiens
  misc_RNA (1)...(19): siRNA sense strand
gaggaagggaaaggaguga

SEQ ID NO: 839751 - RNA, 19 nt, Homo sapiens
  misc_RNA (1)...(19): siRNA sense strand
aagaggcccguacagaauu

SEQ ID NO: 839752 - RNA, 19 nt, Homo sapiens
  misc_RNA (1)...(19): siRNA sense strand
gugaucagaggcaauaaag

SEQ ID NO: 839753 - RNA, 19 nt, Homo sapiens
  misc_RNA (1)...(19): siRNA sense strand
gcuggcacguccggaacaa

SEQ ID NO: 839754 - RNA, 19 nt, Homo sapiens
  misc_RNA (1)...(19): siRNA sense strand
ccagaugagaagaucaaga

SEQ ID NO: 839755 - RNA, 19 nt, Homo sapiens
  misc_RNA (1)...(19): siRNA sense strand
gcucugggcauccugacau

SEQ ID NO: 839756 - RNA, 19 nt, Homo sapiens
  misc_RNA (1)...(19): siRNA sense strand
agaagcagcgacccaagga

SEQ ID NO: 839757 - RNA, 19 nt, Homo sapiens
  misc_RNA (1)...(19): siRNA sense strand
gguacaacucccaauucaa

SEQ ID NO: 839758 - RNA, 19 nt, Homo sapiens
  misc_RNA (1)...(19): siRNA sense strand
aaagagaggcaagagaaag

SEQ ID NO: 839759 - RNA, 19 nt, Homo sapiens
  misc_RNA (1)...(19): siRNA sense strand
ggcgguacaacucccaauu

SEQ ID NO: 839760 - RNA, 19 nt, Homo sapiens
  misc_RNA (1)...(19): siRNA sense strand
ccagacaucagaacucacu

SEQ ID NO: 839761 - RNA, 19 nt, Homo sapiens
  misc_RNA (1)...(19): siRNA sense strand
gaauaugacccuccaaugu

SEQ ID NO: 839762 - RNA, 19 nt, Homo sapiens
  misc_RNA (1)...(19): siRNA sense strand
gauuuguucuguauaagga

SEQ ID NO: 839763 - RNA, 19 nt, Homo sapiens
  misc_RNA (1)...(19): siRNA sense strand
ggagauaccgcugccacua

SEQ ID NO: 839764 - RNA, 19 nt, Homo sapiens
  misc_RNA (1)...(19): siRNA sense strand
ggaauaugacccuccaaug

SEQ ID NO: 839765 - RNA, 19 nt, Homo sapiens
  misc_RNA (1)...(19): siRNA sense strand
ccucacacgccaaggauua

SEQ ID NO: 839766 - RNA, 19 nt, Homo sapiens
  misc_RNA (1)...(19): siRNA sense strand
ucaccaauuuguucugaug

SEQ ID NO: 839767 - RNA, 19 nt, Homo sapiens
  misc_RNA (1)...(19): siRNA sense strand
gguggagguucacaugcua

SEQ ID NO: 839768 - RNA, 19 nt, Homo sapiens
  misc_RNA (1)...(19): siRNA sense strand
ccaagaacaaggccagauu

SEQ ID NO: 839769 - RNA, 19 nt, Homo sapiens
  misc_RNA (1)...(19): siRNA sense strand
guucacaugcuauuacuau

SEQ ID NO: 839770 - RNA, 19 nt, Homo sapiens
  misc_RNA (1)...(19): siRNA sense strand
gagauaccgcugccacuau

SEQ ID NO: 839771 - RNA, 19 nt, Homo sapiens
  misc_RNA (1)...(19): siRNA sense strand
agauaccgcugccacuauu

SEQ ID NO: 839772 - RNA, 19 nt, Homo sapiens
  misc_RNA (1)...(19): siRNA sense strand
ggagguucacaugcuauua

SEQ ID NO: 839773 - RNA, 19 nt, Homo sapiens
  misc_RNA (1)...(19): siRNA sense strand
uaucaccaauuuguucuga

SEQ ID NO: 839774 - RNA, 19 nt, Homo sapiens
  misc_RNA (1)...(19): siRNA sense strand
acacuuuccuucugaccaa

SEQ ID NO: 839775 - RNA, 19 nt, Homo sapiens
  misc_RNA (1)...(19): siRNA sense strand
gcucagcacagccagagaa

SEQ ID NO: 839776 - RNA, 19 nt, Homo sapiens
  misc_RNA (1)...(19): siRNA sense strand
caagaacaaggccagauuc

SEQ ID NO: 839777 - RNA, 19 nt, Homo sapiens
  misc_RNA (1)...(19): siRNA sense strand
ccucgggauucuguuauuu

SEQ ID NO: 839778 - RNA, 19 nt, Homo sapiens
  misc_RNA (1)...(19): siRNA sense strand
auaaguaccaggcugaauu

SEQ ID NO: 839779 - RNA, 19 nt, Homo sapiens
  misc_RNA (1)...(19): siRNA sense strand
gcucugaugucggcuacga

SEQ ID NO: 839780 - RNA, 19 nt, Homo sapiens
  misc_RNA (1)...(19): siRNA sense strand
caauguacggagcucauaa

SEQ ID NO: 839781 - RNA, 19 nt, Homo sapiens
  misc_RNA (1)...(19): siRNA sense strand
gauaccgcugccacuauua

SEQ ID NO: 839782 - RNA, 19 nt, Homo sapiens
  misc_RNA (1)...(19): siRNA sense strand
ucgggauucuguuauuuga

SEQ ID NO: 839783 - RNA, 19 nt, Homo sapiens
  misc_RNA (1)...(19): siRNA sense strand
caggaguaccgacuggaua

SEQ ID NO: 839784 - RNA, 19 nt, Homo sapiens
  misc_RNA (1)...(19): siRNA sense strand
gggaauaugacccuccaau

SEQ ID NO: 839785 - RNA, 19 nt, Homo sapiens
  misc_RNA (1)...(19): siRNA sense strand
ucacgguccugaucugucu

SEQ ID NO: 839786 - RNA, 19 nt, Homo sapiens
  misc_RNA (1)...(19): siRNA sense strand
aauaugacccuccaaugug

SEQ ID NO: 839787 - RNA, 19 nt, Homo sapiens
  misc_RNA (1)...(19): siRNA sense strand
uaaguaccaggcugaauuc

SEQ ID NO: 839788 - RNA, 19 nt, Homo sapiens
  misc_RNA (1)...(19): siRNA sense strand
gagccugacccuccagugu

SEQ ID NO: 839789 - RNA, 19 nt, Homo sapiens
  misc_RNA (1)...(19): siRNA sense strand
gagguucacaugcuauuac

SEQ ID NO: 839790 - RNA, 19 nt, Homo sapiens
  misc_RNA (1)...(19): siRNA sense strand
guuccucgggauucuguua

SEQ ID NO: 839791 - RNA, 19 nt, Homo sapiens
  misc_RNA (1)...(19): siRNA sense strand
ggaguaccgacuggauaaa

SEQ ID NO: 839792 - RNA, 19 nt, Homo sapiens
  misc_RNA (1)...(19): siRNA sense strand
cagaaauaacccacuggaa

SEQ ID NO: 839793 - RNA, 19 nt, Homo sapiens
  misc_RNA (1)...(19): siRNA sense strand
ucaauguacggagcucaua

SEQ ID NO: 839794 - RNA, 19 nt, Homo sapiens
  misc_RNA (1)...(19): siRNA sense strand
acaguggccucaggagaga

SEQ ID NO: 839795 - RNA, 19 nt, Homo sapiens
  misc_RNA (1)...(19): siRNA sense strand
ccacuggaacccaagaaca

SEQ ID NO: 839796 - RNA, 19 nt, Homo sapiens
  misc_RNA (1)...(19): siRNA sense strand
ccaauuuguucugaugaag

SEQ ID NO: 839797 - RNA, 19 nt, Homo sapiens
  misc_RNA (1)...(19): siRNA sense strand
aguaccgacuggauaaaga

SEQ ID NO: 839798 - RNA, 19 nt, Homo sapiens
  misc_RNA (1)...(19): siRNA sense strand
uuugacacuuuccuucuga

SEQ ID NO: 839799 - RNA, 19 nt, Homo sapiens
  misc_RNA (1)...(19): siRNA sense strand
gauaucaccaauuuguucu

SEQ ID NO: 839800 - RNA, 19 nt, Homo sapiens
  misc_RNA (1)...(19): siRNA sense strand
guuugacacuuuccuucug

SEQ ID NO: 839801 - RNA, 19 nt, Homo sapiens
  misc_RNA (1)...(19): siRNA sense strand
aauuuguucugaugaagga

SEQ ID NO: 839802 - RNA, 19 nt, Homo sapiens
  misc_RNA (1)...(19): siRNA sense strand
aggaguaccgacuggauaa

SEQ ID NO: 839803 - RNA, 19 nt, Homo sapiens
  misc_RNA (1)...(19): siRNA sense strand
uguacggagcucauaagua

SEQ ID NO: 839804 - RNA, 19 nt, Homo sapiens
  misc_RNA (1)...(19): siRNA sense strand
gagcccugggacagaaaua

SEQ ID NO: 839805 - RNA, 19 nt, Homo sapiens
  misc_RNA (1)...(19): siRNA sense strand
ggauuacacaguggagaau

SEQ ID NO: 839806 - RNA, 19 nt, Homo sapiens
  misc_RNA (1)...(19): siRNA sense strand
accaauuuguucugaugaa

SEQ ID NO: 839807 - RNA, 19 nt, Homo sapiens
  misc_RNA (1)...(19): siRNA sense strand
cacuggaacccaagaacaa

SEQ ID NO: 839808 - RNA, 19 nt, Homo sapiens
  misc_RNA (1)...(19): siRNA sense strand
ccucaggggugucuaggaa

SEQ ID NO: 839809 - RNA, 19 nt, Homo sapiens
  misc_RNA (1)...(19): siRNA sense strand
gcaagaaggagaagaagaa

SEQ ID NO: 839810 - RNA, 19 nt, Homo sapiens
  misc_RNA (1)...(19): siRNA sense strand
gggaggacgugaagacuga

SEQ ID NO: 839811 - RNA, 19 nt, Homo sapiens
  misc_RNA (1)...(19): siRNA sense strand
acaagaacgugaagaagca

SEQ ID NO: 839812 - RNA, 19 nt, Homo sapiens
  misc_RNA (1)...(19): siRNA sense strand
gaagaagaaagacaaagag

SEQ ID NO: 839813 - RNA, 19 nt, Homo sapiens
  misc_RNA (1)...(19): siRNA sense strand
gcuacaagaacgugaagaa

SEQ ID NO: 839814 - RNA, 19 nt, Homo sapiens
  misc_RNA (1)...(19): siRNA sense strand
acaagcagcgggagaacua

SEQ ID NO: 839815 - RNA, 19 nt, Homo sapiens
  misc_RNA (1)...(19): siRNA sense strand
gaucagacggaaagcaguu

SEQ ID NO: 839816 - RNA, 19 nt, Homo sapiens
  misc_RNA (1)...(19): siRNA sense strand
agaggaaacacaagaaaga

SEQ ID NO: 839817 - RNA, 19 nt, Homo sapiens
  misc_RNA (1)...(19): siRNA sense strand
agaagaagaaagacaaaga

SEQ ID NO: 839818 - RNA, 19 nt, Homo sapiens
  misc_RNA (1)...(19): siRNA sense strand
aaagaggaaacacaagaaa

SEQ ID NO: 839819 - RNA, 19 nt, Homo sapiens
  misc_RNA (1)...(19): siRNA sense strand
aaagcaagaaggagaagaa

SEQ ID NO: 839820 - RNA, 19 nt, Homo sapiens
  misc_RNA (1)...(19): siRNA sense strand
caagaaggagaagaagaaa

SEQ ID NO: 839821 - RNA, 19 nt, Homo sapiens
  misc_RNA (1)...(19): siRNA sense strand
caacugggaggacgugaag

SEQ ID NO: 839822 - RNA, 19 nt, Homo sapiens
  misc_RNA (1)...(19): siRNA sense strand
ccaggcaccaccaccauga

SEQ ID NO: 839823 - RNA, 19 nt, Homo sapiens
  misc_RNA (1)...(19): siRNA sense strand
acggaaagcaguugugaga

SEQ ID NO: 839824 - RNA, 19 nt, Homo sapiens
  misc_RNA (1)...(19): siRNA sense strand
ucucgcagguggcaugaca

SEQ ID NO: 839825 - RNA, 19 nt, Homo sapiens
  misc_RNA (1)...(19): siRNA sense strand
ggaaaagcaagaaggagaa

SEQ ID NO: 839826 - RNA, 19 nt, Homo sapiens
  misc_RNA (1)...(19): siRNA sense strand
agaacuaccugggcaacuc

SEQ ID NO: 839827 - RNA, 19 nt, Homo sapiens
  misc_RNA (1)...(19): siRNA sense strand
ggacgugaagacugacaag

SEQ ID NO: 839828 - RNA, 19 nt, Homo sapiens
  misc_RNA (1)...(19): siRNA sense strand
agacggaaagcaguuguga

SEQ ID NO: 839829 - RNA, 19 nt, Homo sapiens
  misc_RNA (1)...(19): siRNA sense strand
agagugcggucaggacuuu

SEQ ID NO: 839830 - RNA, 19 nt, Homo sapiens
  misc_RNA (1)...(19): siRNA sense strand
gaacaugaagcagcaggau

SEQ ID NO: 839831 - RNA, 19 nt, Homo sapiens
  misc_RNA (1)...(19): siRNA sense strand
cuucgcagauuccaaguuc

SEQ ID NO: 839832 - RNA, 19 nt, Homo sapiens
  misc_RNA (1)...(19): siRNA sense strand
ucaggacuuugcucaggaa

SEQ ID NO: 839833 - RNA, 19 nt, Homo sapiens
  misc_RNA (1)...(19): siRNA sense strand
ccaggagcgucacaugaag

SEQ ID NO: 839834 - RNA, 19 nt, Homo sapiens
  misc_RNA (1)...(19): siRNA sense strand
acaugaagcagcaggauuc

SEQ ID NO: 839835 - RNA, 19 nt, Homo sapiens
  misc_RNA (1)...(19): siRNA sense strand
gggcaggcuguuucucuga

SEQ ID NO: 839836 - RNA, 19 nt, Homo sapiens
  misc_RNA (1)...(19): siRNA sense strand
ccucaucaccuucgcagau

SEQ ID NO: 839837 - RNA, 19 nt, Homo sapiens
  misc_RNA (1)...(19): siRNA sense strand
gacccgaacccugaagaga

SEQ ID NO: 839838 - RNA, 19 nt, Homo sapiens
  misc_RNA (1)...(19): siRNA sense strand
cagcccaccuucccuuguc

SEQ ID NO: 839839 - RNA, 19 nt, Homo sapiens
  misc_RNA (1)...(19): siRNA sense strand
ggaggacccgaacccugaa

SEQ ID NO: 839840 - RNA, 19 nt, Homo sapiens
  misc_RNA (1)...(19): siRNA sense strand
cugaagagaacaugaagca

SEQ ID NO: 839841 - RNA, 19 nt, Homo sapiens
  misc_RNA (1)...(19): siRNA sense strand
uccaggagcgucacaugaa

SEQ ID NO: 839842 - RNA, 19 nt, Homo sapiens
  misc_RNA (1)...(19): siRNA sense strand
cucaucaccuucgcagauu

SEQ ID NO: 839843 - RNA, 19 nt, Homo sapiens
  misc_RNA (1)...(19): siRNA sense strand
gaaggacggucaucaaagu

SEQ ID NO: 839844 - RNA, 19 nt, Homo sapiens
  misc_RNA (1)...(19): siRNA sense strand
ccaaagugcuguaugagau

SEQ ID NO: 839845 - RNA, 19 nt, Homo sapiens
  misc_RNA (1)...(19): siRNA sense strand
ugagaucccugacaccuau

SEQ ID NO: 839846 - RNA, 19 nt, Homo sapiens
  misc_RNA (1)...(19): siRNA sense strand
aaagaaauccacucccaaa

SEQ ID NO: 839847 - RNA, 19 nt, Homo sapiens
  misc_RNA (1)...(19): siRNA sense strand
acccuaaccucuuugauga

SEQ ID NO: 839848 - RNA, 19 nt, Homo sapiens
  misc_RNA (1)...(19): siRNA sense strand
ugacaccuaugcccaaaca

SEQ ID NO: 839849 - RNA, 19 nt, Homo sapiens
  misc_RNA (1)...(19): siRNA sense strand
ucaaggagaagaagaaagu

SEQ ID NO: 839850 - RNA, 19 nt, Homo sapiens
  misc_RNA (1)...(19): siRNA sense strand
gaggaaggacggucaucaa

SEQ ID NO: 839851 - RNA, 19 nt, Homo sapiens
  misc_RNA (1)...(19): siRNA sense strand
ggaaggacggucaucaaag

SEQ ID NO: 839852 - RNA, 19 nt, Homo sapiens
  misc_RNA (1)...(19): siRNA sense strand
ggagaagaagaaagugaga

SEQ ID NO: 839853 - RNA, 19 nt, Homo sapiens
  misc_RNA (1)...(19): siRNA sense strand
caacucaggacgcuucaag

SEQ ID NO: 839854 - RNA, 19 nt, Homo sapiens
  misc_RNA (1)...(19): siRNA sense strand
cucccaaagugcuguauga

SEQ ID NO: 839855 - RNA, 19 nt, Homo sapiens
  misc_RNA (1)...(19): siRNA sense strand
agaaauccacucccaaagu

SEQ ID NO: 839856 - RNA, 19 nt, Homo sapiens
  misc_RNA (1)...(19): siRNA sense strand
ccuaaccucuuugaugauc

SEQ ID NO: 839857 - RNA, 19 nt, Homo sapiens
  misc_RNA (1)...(19): siRNA sense strand
guugguggaagcugacuuu

SEQ ID NO: 839858 - RNA, 19 nt, Homo sapiens
  misc_RNA (1)...(19): siRNA sense strand
ccaaacagagggagaugca

SEQ ID NO: 839859 - RNA, 19 nt, Homo sapiens
  misc_RNA (1)...(19): siRNA sense strand
acaccuaugcccaaacaga

SEQ ID NO: 839860 - RNA, 19 nt, Homo sapiens
  misc_RNA (1)...(19): siRNA sense strand
caggacgcuucaaggagaa

SEQ ID NO: 839861 - RNA, 19 nt, Homo sapiens
  misc_RNA (1)...(19): siRNA sense strand
caaagugcuguaugagauc

SEQ ID NO: 839862 - RNA, 19 nt, Homo sapiens
  misc_RNA (1)...(19): siRNA sense strand
aggaaggacggucaucaaa

SEQ ID NO: 839863 - RNA, 19 nt, Homo sapiens
  misc_RNA (1)...(19): siRNA sense strand
acacccgccuggagaagau

SEQ ID NO: 839864 - RNA, 19 nt, Homo sapiens
  misc_RNA (1)...(19): siRNA sense strand
ccugacaccuaugcccaaa

SEQ ID NO: 839865 - RNA, 19 nt, Homo sapiens
  misc_RNA (1)...(19): siRNA sense strand
cgucaaggucuccaacuca

SEQ ID NO: 839866 - RNA, 19 nt, Homo sapiens
  misc_RNA (1)...(19): siRNA sense strand
caaagggcaagcacgucaa

SEQ ID NO: 839867 - RNA, 19 nt, Homo sapiens
  misc_RNA (1)...(19): siRNA sense strand
gaacccuaaccucuuugau

SEQ ID NO: 839868 - RNA, 19 nt, Homo sapiens
  misc_RNA (1)...(19): siRNA sense strand
gcgaguaccugaaugcuua

SEQ ID NO: 839869 - RNA, 19 nt, Homo sapiens
  misc_RNA (1)...(19): siRNA sense strand
gaaccaagauucauaaacu

SEQ ID NO: 839870 - RNA, 19 nt, Homo sapiens
  misc_RNA (1)...(19): siRNA sense strand
caacgagcaucucaugaaa

SEQ ID NO: 839871 - RNA, 19 nt, Homo sapiens
  misc_RNA (1)...(19): siRNA sense strand
cagcaacucuucccacuga

SEQ ID NO: 839872 - RNA, 19 nt, Homo sapiens
  misc_RNA (1)...(19): siRNA sense strand
ucaaggaguggaaguauua

SEQ ID NO: 839873 - RNA, 19 nt, Homo sapiens
  misc_RNA (1)...(19): siRNA sense strand
ggagaucaaugagcaagaa

SEQ ID NO: 839874 - RNA, 19 nt, Homo sapiens
  misc_RNA (1)...(19): siRNA sense strand
guacgaagcccuugcauca

SEQ ID NO: 839875 - RNA, 19 nt, Homo sapiens
  misc_RNA (1)...(19): siRNA sense strand
gaaacucuguucuguacga

SEQ ID NO: 839876 - RNA, 19 nt, Homo sapiens
  misc_RNA (1)...(19): siRNA sense strand
gcaacgagcaucucaugaa

SEQ ID NO: 839877 - RNA, 19 nt, Homo sapiens
  misc_RNA (1)...(19): siRNA sense strand
agagauagcugcaaaauau

SEQ ID NO: 839878 - RNA, 19 nt, Homo sapiens
  misc_RNA (1)...(19): siRNA sense strand
gaagagaaauuggaaaaug

SEQ ID NO: 839879 - RNA, 19 nt, Homo sapiens
  misc_RNA (1)...(19): siRNA sense strand
cuagauugcuguauaagga

SEQ ID NO: 839880 - RNA, 19 nt, Homo sapiens
  misc_RNA (1)...(19): siRNA sense strand
gugcuagauugcuguauaa

SEQ ID NO: 839881 - RNA, 19 nt, Homo sapiens
  misc_RNA (1)...(19): siRNA sense strand
ucaaguguuugccucauuu

SEQ ID NO: 839882 - RNA, 19 nt, Homo sapiens
  misc_RNA (1)...(19): siRNA sense strand
gaaacccacuguguaacuu

SEQ ID NO: 839883 - RNA, 19 nt, Homo sapiens
  misc_RNA (1)...(19): siRNA sense strand
ggagaaaaguuggauauga

SEQ ID NO: 839884 - RNA, 19 nt, Homo sapiens
  misc_RNA (1)...(19): siRNA sense strand
gcagagaaacccacugugu

SEQ ID NO: 839885 - RNA, 19 nt, Homo sapiens
  misc_RNA (1)...(19): siRNA sense strand
ccaggaaggugcucuugga

SEQ ID NO: 839886 - RNA, 19 nt, Homo sapiens
  misc_RNA (1)...(19): siRNA sense strand
caagaagcauuggaagaga

SEQ ID NO: 839887 - RNA, 19 nt, Homo sapiens
  misc_RNA (1)...(19): siRNA sense strand
uggaagagauagcugcaaa

SEQ ID NO: 839888 - RNA, 19 nt, Homo sapiens
  misc_RNA (1)...(19): siRNA sense strand
agagaaacccacuguguaa

SEQ ID NO: 839889 - RNA, 19 nt, Homo sapiens
  misc_RNA (1)...(19): siRNA sense strand
cagagaaacccacugugua

SEQ ID NO: 839890 - RNA, 19 nt, Homo sapiens
  misc_RNA (1)...(19): siRNA sense strand
gagcagaucccguaaacag

SEQ ID NO: 839891 - RNA, 19 nt, Homo sapiens
  misc_RNA (1)...(19): siRNA sense strand
gcaagaagcauuggaagag

SEQ ID NO: 839892 - RNA, 19 nt, Homo sapiens
  misc_RNA (1)...(19): siRNA sense strand
guuugugucugcaucagua

SEQ ID NO: 839893 - RNA, 19 nt, Homo sapiens
  misc_RNA (1)...(19): siRNA sense strand
aaacaguggagaucaauga

SEQ ID NO: 839894 - RNA, 19 nt, Homo sapiens
  misc_RNA (1)...(19): siRNA sense strand
gagcaacgagcaucucaug

SEQ ID NO: 839895 - RNA, 19 nt, Homo sapiens
  misc_RNA (1)...(19): siRNA sense strand
ugugcuagauugcuguaua

SEQ ID NO: 839896 - RNA, 19 nt, Homo sapiens
  misc_RNA (1)...(19): siRNA sense strand
cagaccggcuucagaguga

SEQ ID NO: 839897 - RNA, 19 nt, Homo sapiens
  misc_RNA (1)...(19): siRNA sense strand
acagaaaccacuccggaua

SEQ ID NO: 839898 - RNA, 19 nt, Homo sapiens
  misc_RNA (1)...(19): siRNA sense strand
ggagcaggcgaacccuuua

SEQ ID NO: 839899 - RNA, 19 nt, Homo sapiens
  misc_RNA (1)...(19): siRNA sense strand
gaaccuauuggauuccuau

SEQ ID NO: 839900 - RNA, 19 nt, Homo sapiens
  misc_RNA (1)...(19): siRNA sense strand
ccggauacaucaccauuca

SEQ ID NO: 839901 - RNA, 19 nt, Homo sapiens
  misc_RNA (1)...(19): siRNA sense strand
gagcaucucaugaaacucu

SEQ ID NO: 839902 - RNA, 19 nt, Homo sapiens
  misc_RNA (1)...(19): siRNA sense strand
gcugucauuuacuuacaaa

SEQ ID NO: 839903 - RNA, 19 nt, Homo sapiens
  misc_RNA (1)...(19): siRNA sense strand
gucaaggaguggaaguauu

SEQ ID NO: 839904 - RNA, 19 nt, Homo sapiens
  misc_RNA (1)...(19): siRNA sense strand
caagauucauaaacuaagg

SEQ ID NO: 839905 - RNA, 19 nt, Homo sapiens
  misc_RNA (1)...(19): siRNA sense strand
guguuugccucauuuacaa

SEQ ID NO: 839906 - RNA, 19 nt, Homo sapiens
  misc_RNA (1)...(19): siRNA sense strand
ucaugaaacucuguucugu

SEQ ID NO: 839907 - RNA, 19 nt, Homo sapiens
  misc_RNA (1)...(19): siRNA sense strand
guaccugaaugcuuacucu

SEQ ID NO: 839908 - RNA, 19 nt, Homo sapiens
  misc_RNA (1)...(19): siRNA sense strand
uaaggcgucugcgagauga

SEQ ID NO: 839909 - RNA, 19 nt, Homo sapiens
  misc_RNA (1)...(19): siRNA sense strand
aagaagcauuggaagagaa

SEQ ID NO: 839910 - RNA, 19 nt, Homo sapiens
  misc_RNA (1)...(19): siRNA sense strand
ccuauuggauuccuauuuu

SEQ ID NO: 839911 - RNA, 19 nt, Homo sapiens
  misc_RNA (1)...(19): siRNA sense strand
gagaaaaguuggauaugag

SEQ ID NO: 839912 - RNA, 19 nt, Homo sapiens
  misc_RNA (1)...(19): siRNA sense strand
caugaaacucuguucugua

SEQ ID NO: 839913 - RNA, 19 nt, Homo sapiens
  misc_RNA (1)...(19): siRNA sense strand
caaaggagguguuuuagcu

SEQ ID NO: 839914 - RNA, 19 nt, Homo sapiens
  misc_RNA (1)...(19): siRNA sense strand
gugagcagaucccguaaac

SEQ ID NO: 839915 - RNA, 19 nt, Homo sapiens
  misc_RNA (1)...(19): siRNA sense strand
caaguguuugccucauuua

SEQ ID NO: 839916 - RNA, 19 nt, Homo sapiens
  misc_RNA (1)...(19): siRNA sense strand
ggauacaucaccauucagu

SEQ ID NO: 839917 - RNA, 19 nt, Homo sapiens
  misc_RNA (1)...(19): siRNA sense strand
agaccaacauccagcacuu

SEQ ID NO: 839918 - RNA, 19 nt, Homo sapiens
  misc_RNA (1)...(19): siRNA sense strand
uauaaggaccucacagcaa

SEQ ID NO: 839919 - RNA, 19 nt, Homo sapiens
  misc_RNA (1)...(19): siRNA sense strand
uguguaacuugcugucauu

SEQ ID NO: 839920 - RNA, 19 nt, Homo sapiens
  misc_RNA (1)...(19): siRNA sense strand
caauguagaacccaaccaa

SEQ ID NO: 839921 - RNA, 19 nt, Homo sapiens
  misc_RNA (1)...(19): siRNA sense strand
gaucaaugagcaagaagca

SEQ ID NO: 839922 - RNA, 19 nt, Homo sapiens
  misc_RNA (1)...(19): siRNA sense strand
aagccauucugcaggcaua

SEQ ID NO: 839923 - RNA, 19 nt, Homo sapiens
  misc_RNA (1)...(19): siRNA sense strand
gucauuuacuuacaaacug

SEQ ID NO: 839924 - RNA, 19 nt, Homo sapiens
  misc_RNA (1)...(19): siRNA sense strand
auaugagucuggucuccua

SEQ ID NO: 839925 - RNA, 19 nt, Homo sapiens
  misc_RNA (1)...(19): siRNA sense strand
gcaggcauaucauuuuaca

SEQ ID NO: 839926 - RNA, 19 nt, Homo sapiens
  misc_RNA (1)...(19): siRNA sense strand
uguaacuugcugucauuua

SEQ ID NO: 839927 - RNA, 19 nt, Homo sapiens
  misc_RNA (1)...(19): siRNA sense strand
ggaccuugucauacagaaa

SEQ ID NO: 839928 - RNA, 19 nt, Homo sapiens
  misc_RNA (1)...(19): siRNA sense strand
agaaaccacuccggauaca

SEQ ID NO: 839929 - RNA, 19 nt, Homo sapiens
  misc_RNA (1)...(19): siRNA sense strand
augaaacucuguucuguac

SEQ ID NO: 839930 - RNA, 19 nt, Homo sapiens
  misc_RNA (1)...(19): siRNA sense strand
ggaaccaagauucauaaac

SEQ ID NO: 839931 - RNA, 19 nt, Homo sapiens
  misc_RNA (1)...(19): siRNA sense strand
guccaaaggagguguuuua

SEQ ID NO: 839932 - RNA, 19 nt, Homo sapiens
  misc_RNA (1)...(19): siRNA sense strand
ggaccucacagcaacucuu

SEQ ID NO: 839933 - RNA, 19 nt, Homo sapiens
  misc_RNA (1)...(19): siRNA sense strand
caaccaaacaguggagauc

SEQ ID NO: 839934 - RNA, 19 nt, Homo sapiens
  misc_RNA (1)...(19): siRNA sense strand
acgagcaucucaugaaacu

SEQ ID NO: 839935 - RNA, 19 nt, Homo sapiens
  misc_RNA (1)...(19): siRNA sense strand
gaagagauagcugcaaaau

SEQ ID NO: 839936 - RNA, 19 nt, Homo sapiens
  misc_RNA (1)...(19): siRNA sense strand
aaaccacuccggauacauc

SEQ ID NO: 839937 - RNA, 19 nt, Homo sapiens
  misc_RNA (1)...(19): siRNA sense strand
ugagcaagaagcauuggaa

SEQ ID NO: 839938 - RNA, 19 nt, Homo sapiens
  misc_RNA (1)...(19): siRNA sense strand
gaggggaaccuauuggauu

SEQ ID NO: 839939 - RNA, 19 nt, Homo sapiens
  misc_RNA (1)...(19): siRNA sense strand
uguagaacccaaccaaaca

SEQ ID NO: 839940 - RNA, 19 nt, Homo sapiens
  misc_RNA (1)...(19): siRNA sense strand
cugcaggcauaucauuuua

SEQ ID NO: 839941 - RNA, 19 nt, Homo sapiens
  misc_RNA (1)...(19): siRNA sense strand
ggaguuugugucugcauca

SEQ ID NO: 839942 - RNA, 19 nt, Homo sapiens
  misc_RNA (1)...(19): siRNA sense strand
ccagauggcgaguccaaag

SEQ ID NO: 839943 - RNA, 19 nt, Homo sapiens
  misc_RNA (1)...(19): siRNA sense strand
acugggcccuugcagagaa

SEQ ID NO: 839944 - RNA, 19 nt, Homo sapiens
  misc_RNA (1)...(19): siRNA sense strand
ccaaacaguggagaucaau

SEQ ID NO: 839945 - RNA, 19 nt, Homo sapiens
  misc_RNA (1)...(19): siRNA sense strand
caagaaaaggagaaaaguu

SEQ ID NO: 839946 - RNA, 19 nt, Homo sapiens
  misc_RNA (1)...(19): siRNA sense strand
aaacucuguucuguacgaa

SEQ ID NO: 839947 - RNA, 19 nt, Homo sapiens
  misc_RNA (1)...(19): siRNA sense strand
cagaaaccacuccggauac

SEQ ID NO: 839948 - RNA, 19 nt, Homo sapiens
  misc_RNA (1)...(19): siRNA sense strand
uuuacaggccucaguggua

SEQ ID NO: 839949 - RNA, 19 nt, Homo sapiens
  misc_RNA (1)...(19): siRNA sense strand
aagcauuggaagagaaauu

SEQ ID NO: 839950 - RNA, 19 nt, Homo sapiens
  misc_RNA (1)...(19): siRNA sense strand
gaccucacagcaacucuuc

SEQ ID NO: 839951 - RNA, 19 nt, Homo sapiens
  misc_RNA (1)...(19): siRNA sense strand
gaccagccgaggaguuugu

SEQ ID NO: 839952 - RNA, 19 nt, Homo sapiens
  misc_RNA (1)...(19): siRNA sense strand
agaagcauuggaagagaaa

SEQ ID NO: 839953 - RNA, 19 nt, Homo sapiens
  misc_RNA (1)...(19): siRNA sense strand
cagcgugaaagcauguauu

SEQ ID NO: 839954 - RNA, 19 nt, Homo sapiens
  misc_RNA (1)...(19): siRNA sense strand
cuaaggcgucugcgagaug

SEQ ID NO: 839955 - RNA, 19 nt, Homo sapiens
  misc_RNA (1)...(19): siRNA sense strand
uguuuuagcucacuuggaa

SEQ ID NO: 839956 - RNA, 19 nt, Homo sapiens
  misc_RNA (1)...(19): siRNA sense strand
gaccuugucauacagaaac

SEQ ID NO: 839957 - RNA, 19 nt, Homo sapiens
  misc_RNA (1)...(19): siRNA sense strand
caaacaguggagaucaaug

SEQ ID NO: 839958 - RNA, 19 nt, Homo sapiens
  misc_RNA (1)...(19): siRNA sense strand
gcgcacaccuuucucauuc

SEQ ID NO: 839959 - RNA, 19 nt, Homo sapiens
  misc_RNA (1)...(19): siRNA sense strand
ggaaguugcuaaaggaugu

SEQ ID NO: 839960 - RNA, 19 nt, Homo sapiens
  misc_RNA (1)...(19): siRNA sense strand
ggagacauauggacugaca

SEQ ID NO: 839961 - RNA, 19 nt, Homo sapiens
  misc_RNA (1)...(19): siRNA sense strand
ccacagagaccuucaaaca

SEQ ID NO: 839962 - RNA, 19 nt, Homo sapiens
  misc_RNA (1)...(19): siRNA sense strand
gaacgucuauggagucacu

SEQ ID NO: 839963 - RNA, 19 nt, Homo sapiens
  misc_RNA (1)...(19): siRNA sense strand
gcaggaaaccuucgaaucu

SEQ ID NO: 839964 - RNA, 19 nt, Homo sapiens
  misc_RNA (1)...(19): siRNA sense strand
ccacgugucugagaacuug

SEQ ID NO: 839965 - RNA, 19 nt, Homo sapiens
  misc_RNA (1)...(19): siRNA sense strand
ggucaguucugggaagauu

SEQ ID NO: 839966 - RNA, 19 nt, Homo sapiens
  misc_RNA (1)...(19): siRNA sense strand
gggugacgguguuccagua

SEQ ID NO: 839967 - RNA, 19 nt, Homo sapiens
  misc_RNA (1)...(19): siRNA sense strand
gcgauuugcuggcugaagu

SEQ ID NO: 839968 - RNA, 19 nt, Homo sapiens
  misc_RNA (1)...(19): siRNA sense strand
acacgugccuguacaucuu

SEQ ID NO: 839969 - RNA, 19 nt, Homo sapiens
  misc_RNA (1)...(19): siRNA sense strand
cugagaacuugccaccuua

SEQ ID NO: 839970 - RNA, 19 nt, Homo sapiens
  misc_RNA (1)...(19): siRNA sense strand
gccgauaccuugucaacca

SEQ ID NO: 839971 - RNA, 19 nt, Homo sapiens
  misc_RNA (1)...(19): siRNA sense strand
guucucggcuggucaguuc

SEQ ID NO: 839972 - RNA, 19 nt, Homo sapiens
  misc_RNA (1)...(19): siRNA sense strand
gaacccacccugcuggaau

SEQ ID NO: 839973 - RNA, 19 nt, Homo sapiens
  misc_RNA (1)...(19): siRNA sense strand
ucugagaacuugccaccuu

SEQ ID NO: 839974 - RNA, 19 nt, Homo sapiens
  misc_RNA (1)...(19): siRNA sense strand
gcaaugccagggcuucuau

SEQ ID NO: 839975 - RNA, 19 nt, Homo sapiens
  misc_RNA (1)...(19): siRNA sense strand
gaaccagacggugccgaua

SEQ ID NO: 839976 - RNA, 19 nt, Homo sapiens
  misc_RNA (1)...(19): siRNA sense strand
ugcaggugcuggagacaua

SEQ ID NO: 839977 - RNA, 19 nt, Homo sapiens
  misc_RNA (1)...(19): siRNA sense strand
gggaggaucagggauguuu

SEQ ID NO: 839978 - RNA, 19 nt, Homo sapiens
  misc_RNA (1)...(19): siRNA sense strand
gggcgugcuuccuggcuuu

SEQ ID NO: 839979 - RNA, 19 nt, Homo sapiens
  misc_RNA (1)...(19): siRNA sense strand
caggaaaccuucgaaucug

SEQ ID NO: 839980 - RNA, 19 nt, Homo sapiens
  misc_RNA (1)...(19): siRNA sense strand
ugaaguguccgcugaagug

SEQ ID NO: 839981 - RNA, 19 nt, Homo sapiens
  misc_RNA (1)...(19): siRNA sense strand
ggaauggcagcccuaguuc

SEQ ID NO: 839982 - RNA, 19 nt, Homo sapiens
  misc_RNA (1)...(19): siRNA sense strand
gugcugaaauccaaguucu

SEQ ID NO: 839983 - RNA, 19 nt, Homo sapiens
  misc_RNA (1)...(19): siRNA sense strand
ggcagaacguggccauaag

SEQ ID NO: 839984 - RNA, 19 nt, Homo sapiens
  misc_RNA (1)...(19): siRNA sense strand
ggaggugaacgucuaugga

SEQ ID NO: 839985 - RNA, 19 nt, Homo sapiens
  misc_RNA (1)...(19): siRNA sense strand
aggaaaccuucgaaucuga

SEQ ID NO: 839986 - RNA, 19 nt, Homo sapiens
  misc_RNA (1)...(19): siRNA sense strand
uggaauggcagcccuaguu

SEQ ID NO: 839987 - RNA, 19 nt, Homo sapiens
  misc_RNA (1)...(19): siRNA sense strand
aggcggagcgcgagaguaa

SEQ ID NO: 839988 - RNA, 19 nt, Homo sapiens
  misc_RNA (1)...(19): siRNA sense strand
gggcuucuaucagcugugu

SEQ ID NO: 839989 - RNA, 19 nt, Homo sapiens
  misc_RNA (1)...(19): siRNA sense strand
caacguggccaccaucaac

SEQ ID NO: 839990 - RNA, 19 nt, Homo sapiens
  misc_RNA (1)...(19): siRNA sense strand
aaguucggauggcaaauga

SEQ ID NO: 839991 - RNA, 19 nt, Homo sapiens
  misc_RNA (1)...(19): siRNA sense strand
caguggugcugaaauccaa

SEQ ID NO: 839992 - RNA, 19 nt, Homo sapiens
  misc_RNA (1)...(19): siRNA sense strand
gcacaccuuucucauucac

SEQ ID NO: 839993 - RNA, 19 nt, Homo sapiens
  misc_RNA (1)...(19): siRNA sense strand
cugcuggaauuagcgauuu

SEQ ID NO: 839994 - RNA, 19 nt, Homo sapiens
  misc_RNA (1)...(19): siRNA sense strand
gcagaacguggccauaagg

SEQ ID NO: 839995 - RNA, 19 nt, Homo sapiens
  misc_RNA (1)...(19): siRNA sense strand
agacauauggacugacaga

SEQ ID NO: 839996 - RNA, 19 nt, Homo sapiens
  misc_RNA (1)...(19): siRNA sense strand
aacccacccugcuggaauu

SEQ ID NO: 839997 - RNA, 19 nt, Homo sapiens
  misc_RNA (1)...(19): siRNA sense strand
agaaaguucggauggcaaa

SEQ ID NO: 839998 - RNA, 19 nt, Homo sapiens
  misc_RNA (1)...(19): siRNA sense strand
gagaacuugccaccuuaug

SEQ ID NO: 839999 - RNA, 19 nt, Homo sapiens
  misc_RNA (1)...(19): siRNA sense strand
gaaggcagggcuggaaugg

SEQ ID NO: 840000 - RNA, 19 nt, Homo sapiens
  misc_RNA (1)...(19): siRNA sense strand
ugacgguguuccaguacau

SEQ ID NO: 840001 - RNA, 19 nt, Homo sapiens
  misc_RNA (1)...(19): siRNA sense strand
gugaacgucuauggaguca

SEQ ID NO: 840002 - RNA, 19 nt, Homo sapiens
  misc_RNA (1)...(19): siRNA sense strand
gcaacguggccaccaucaa

SEQ ID NO: 840003 - RNA, 19 nt, Homo sapiens
  misc_RNA (1)...(19): siRNA sense strand
gcggagcgcgagaguaaca

SEQ ID NO: 840004 - RNA, 19 nt, Homo sapiens
  misc_RNA (1)...(19): siRNA sense strand
ggucuucgaggcccuagau

SEQ ID NO: 840005 - RNA, 19 nt, Homo sapiens
  misc_RNA (1)...(19): siRNA sense strand
caaggcugcucggaucagu

SEQ ID NO: 840006 - RNA, 19 nt, Homo sapiens
  misc_RNA (1)...(19): siRNA sense strand
ggcaggaaaccuucgaauc

SEQ ID NO: 840007 - RNA, 19 nt, Homo sapiens
  misc_RNA (1)...(19): siRNA sense strand
aggcagaacguggccauaa

SEQ ID NO: 840008 - RNA, 19 nt, Homo sapiens
  misc_RNA (1)...(19): siRNA sense strand
gcugaaguguccgcugaag

SEQ ID NO: 840009 - RNA, 19 nt, Homo sapiens
  misc_RNA (1)...(19): siRNA sense strand
caccacagagaccuucaaa

SEQ ID NO: 840010 - RNA, 19 nt, Homo sapiens
  misc_RNA (1)...(19): siRNA sense strand
uuucuccgcuuccaugauc

SEQ ID NO: 840011 - RNA, 19 nt, Homo sapiens
  misc_RNA (1)...(19): siRNA sense strand
ggaggaucagggauguuug

SEQ ID NO: 840012 - RNA, 19 nt, Homo sapiens
  misc_RNA (1)...(19): siRNA sense strand
uugauucgcuaugauguca

SEQ ID NO: 840013 - RNA, 19 nt, Homo sapiens
  misc_RNA (1)...(19): siRNA sense strand
ucuccuugauucgcuauga

SEQ ID NO: 840014 - RNA, 19 nt, Homo sapiens
  misc_RNA (1)...(19): siRNA sense strand
cuggagacauauggacuga

SEQ ID NO: 840015 - RNA, 19 nt, Homo sapiens
  misc_RNA (1)...(19): siRNA sense strand
ggaacccacccugcuggaa

SEQ ID NO: 840016 - RNA, 19 nt, Homo sapiens
  misc_RNA (1)...(19): siRNA sense strand
ggagcugugccgauaccuu

SEQ ID NO: 840017 - RNA, 19 nt, Homo sapiens
  misc_RNA (1)...(19): siRNA sense strand
ggcacuguauggccacauc

SEQ ID NO: 840018 - RNA, 19 nt, Homo sapiens
  misc_RNA (1)...(19): siRNA sense strand
gaauggcagcccuaguucu

SEQ ID NO: 840019 - RNA, 19 nt, Homo sapiens
  misc_RNA (1)...(19): siRNA sense strand
gaaugaaccucgaauauuu

SEQ ID NO: 840020 - RNA, 19 nt, Homo sapiens
  misc_RNA (1)...(19): siRNA sense strand
ccaagcaacuauccaauua

SEQ ID NO: 840021 - RNA, 19 nt, Homo sapiens
  misc_RNA (1)...(19): siRNA sense strand
uaccacagcuguagaagaa

SEQ ID NO: 840022 - RNA, 19 nt, Homo sapiens
  misc_RNA (1)...(19): siRNA sense strand
gcaacuauccaauuacuga

SEQ ID NO: 840023 - RNA, 19 nt, Homo sapiens
  misc_RNA (1)...(19): siRNA sense strand
ccaggugaauggaauugua

SEQ ID NO: 840024 - RNA, 19 nt, Homo sapiens
  misc_RNA (1)...(19): siRNA sense strand
ugaacucucuccacacaaa

SEQ ID NO: 840025 - RNA, 19 nt, Homo sapiens
  misc_RNA (1)...(19): siRNA sense strand
ccagacagauggauaccaa

SEQ ID NO: 840026 - RNA, 19 nt, Homo sapiens
  misc_RNA (1)...(19): siRNA sense strand
gaaaauagcaaacagauuc

SEQ ID NO: 840027 - RNA, 19 nt, Homo sapiens
  misc_RNA (1)...(19): siRNA sense strand
gaagaaacccaggugaaug

SEQ ID NO: 840028 - RNA, 19 nt, Homo sapiens
  misc_RNA (1)...(19): siRNA sense strand
gaaccucgaauauuuaaag

SEQ ID NO: 840029 - RNA, 19 nt, Homo sapiens
  misc_RNA (1)...(19): siRNA sense strand
gaccucagaugcacagugu

SEQ ID NO: 840030 - RNA, 19 nt, Homo sapiens
  misc_RNA (1)...(19): siRNA sense strand
ccauauacuugaccuuaga

SEQ ID NO: 840031 - RNA, 19 nt, Homo sapiens
  misc_RNA (1)...(19): siRNA sense strand
cuacaaaggagugaguuua

SEQ ID NO: 840032 - RNA, 19 nt, Homo sapiens
  misc_RNA (1)...(19): siRNA sense strand
ugaaugaaccucgaauauu

SEQ ID NO: 840033 - RNA, 19 nt, Homo sapiens
  misc_RNA (1)...(19): siRNA sense strand
caaaggagugaguuuauca

SEQ ID NO: 840034 - RNA, 19 nt, Homo sapiens
  misc_RNA (1)...(19): siRNA sense strand
gugaaugaaccucgaauau

SEQ ID NO: 840035 - RNA, 19 nt, Homo sapiens
  misc_RNA (1)...(19): siRNA sense strand
ccacacaaaccuuccaaga

SEQ ID NO: 840036 - RNA, 19 nt, Homo sapiens
  misc_RNA (1)...(19): siRNA sense strand
gagcacaucccucgacgau

SEQ ID NO: 840037 - RNA, 19 nt, Homo sapiens
  misc_RNA (1)...(19): siRNA sense strand
ggagugaguuuaucaaaag

SEQ ID NO: 840038 - RNA, 19 nt, Homo sapiens
  misc_RNA (1)...(19): siRNA sense strand
cauccgagccauauacuug

SEQ ID NO: 840039 - RNA, 19 nt, Homo sapiens
  misc_RNA (1)...(19): siRNA sense strand
ccuccgagcccgcaaguuu

SEQ ID NO: 840040 - RNA, 19 nt, Homo sapiens
  misc_RNA (1)...(19): siRNA sense strand
aaacccaggugaauggaau

SEQ ID NO: 840041 - RNA, 19 nt, Homo sapiens
  misc_RNA (1)...(19): siRNA sense strand
gaagcuggcccgaagucuu

SEQ ID NO: 840042 - RNA, 19 nt, Homo sapiens
  misc_RNA (1)...(19): siRNA sense strand
ggucugacuugaacucucu

SEQ ID NO: 840043 - RNA, 19 nt, Homo sapiens
  misc_RNA (1)...(19): siRNA sense strand
ggugaaugaaccucgaaua

SEQ ID NO: 840044 - RNA, 19 nt, Homo sapiens
  misc_RNA (1)...(19): siRNA sense strand
gaaaacauccgagccauau

SEQ ID NO: 840045 - RNA, 19 nt, Homo sapiens
  misc_RNA (1)...(19): siRNA sense strand
acagauggauaccaagcaa

SEQ ID NO: 840046 - RNA, 19 nt, Homo sapiens
  misc_RNA (1)...(19): siRNA sense strand
cacacaaaccuuccaagaa

SEQ ID NO: 840047 - RNA, 19 nt, Homo sapiens
  misc_RNA (1)...(19): siRNA sense strand
agaagacgauuuugugaaa

SEQ ID NO: 840048 - RNA, 19 nt, Homo sapiens
  misc_RNA (1)...(19): siRNA sense strand
gauaaaagcaguccaugug

SEQ ID NO: 840049 - RNA, 19 nt, Homo sapiens
  misc_RNA (1)...(19): siRNA sense strand
gagcccgcaaguuugauua

SEQ ID NO: 840050 - RNA, 19 nt, Homo sapiens
  misc_RNA (1)...(19): siRNA sense strand
ugaagaaacccaggugaau

SEQ ID NO: 840051 - RNA, 19 nt, Homo sapiens
  misc_RNA (1)...(19): siRNA sense strand
gccauauacuugaccuuag

SEQ ID NO: 840052 - RNA, 19 nt, Homo sapiens
  misc_RNA (1)...(19): siRNA sense strand
acaaaggagugaguuuauc

SEQ ID NO: 840053 - RNA, 19 nt, Homo sapiens
  misc_RNA (1)...(19): siRNA sense strand
gaaacccaggugaauggaa

SEQ ID NO: 840054 - RNA, 19 nt, Homo sapiens
  misc_RNA (1)...(19): siRNA sense strand
caggugaauggaauuguaa

SEQ ID NO: 840055 - RNA, 19 nt, Homo sapiens
  misc_RNA (1)...(19): siRNA sense strand
caguccauguggugaauga

SEQ ID NO: 840056 - RNA, 19 nt, Homo sapiens
  misc_RNA (1)...(19): siRNA sense strand
gcuguacuccugcuacuag

SEQ ID NO: 840057 - RNA, 19 nt, Homo sapiens
  misc_RNA (1)...(19): siRNA sense strand
aagcaacuauccaauuacu

SEQ ID NO: 840058 - RNA, 19 nt, Homo sapiens
  misc_RNA (1)...(19): siRNA sense strand
cuugaacucucuccacaca

SEQ ID NO: 840059 - RNA, 19 nt, Homo sapiens
  misc_RNA (1)...(19): siRNA sense strand
aaacagauucuuccuccau

SEQ ID NO: 840060 - RNA, 19 nt, Homo sapiens
  misc_RNA (1)...(19): siRNA sense strand
gaagccaucagccuuaaaa

SEQ ID NO: 840061 - RNA, 19 nt, Homo sapiens
  misc_RNA (1)...(19): siRNA sense strand
caucucacuuuggcccuuu

SEQ ID NO: 840062 - RNA, 19 nt, Homo sapiens
  misc_RNA (1)...(19): siRNA sense strand
uacaaaggagugaguuuau

SEQ ID NO: 840063 - RNA, 19 nt, Homo sapiens
  misc_RNA (1)...(19): siRNA sense strand
aaacauccgagccauauac

SEQ ID NO: 840064 - RNA, 19 nt, Homo sapiens
  misc_RNA (1)...(19): siRNA sense strand
ccaugggucugacuugaac

SEQ ID NO: 840065 - RNA, 19 nt, Homo sapiens
  misc_RNA (1)...(19): siRNA sense strand
caacuauccaauuacugaa

SEQ ID NO: 840066 - RNA, 19 nt, Homo sapiens
  misc_RNA (1)...(19): siRNA sense strand
cuugaagccaucagccuua

SEQ ID NO: 840067 - RNA, 19 nt, Homo sapiens
  misc_RNA (1)...(19): siRNA sense strand
gaagaagcuggcccgaagu

SEQ ID NO: 840068 - RNA, 19 nt, Homo sapiens
  misc_RNA (1)...(19): siRNA sense strand
gaaagaguucugccaaccu

SEQ ID NO: 840069 - RNA, 19 nt, Homo sapiens
  misc_RNA (1)...(19): siRNA sense strand
agccauauacuugaccuua

SEQ ID NO: 840070 - RNA, 19 nt, Homo sapiens
  misc_RNA (1)...(19): siRNA sense strand
uugaagccaucagccuuaa

SEQ ID NO: 840071 - RNA, 19 nt, Homo sapiens
  misc_RNA (1)...(19): siRNA sense strand
gauggauaccaagcaacua

SEQ ID NO: 840072 - RNA, 19 nt, Homo sapiens
  misc_RNA (1)...(19): siRNA sense strand
uuguaauucuugcagacua

SEQ ID NO: 840073 - RNA, 19 nt, Homo sapiens
  misc_RNA (1)...(19): siRNA sense strand
aagaaacccaggugaaugg

SEQ ID NO: 840074 - RNA, 19 nt, Homo sapiens
  misc_RNA (1)...(19): siRNA sense strand
cuugcgagcugugaaguca

SEQ ID NO: 840075 - RNA, 19 nt, Homo sapiens
  misc_RNA (1)...(19): siRNA sense strand
cgguacugcuggcuucaga

SEQ ID NO: 840076 - RNA, 19 nt, Homo sapiens
  misc_RNA (1)...(19): siRNA sense strand
gagaaaauagcaaacagau

SEQ ID NO: 840077 - RNA, 19 nt, Homo sapiens
  misc_RNA (1)...(19): siRNA sense strand
ggagaaaauagcaaacaga

SEQ ID NO: 840078 - RNA, 19 nt, Homo sapiens
  misc_RNA (1)...(19): siRNA sense strand
cugaagaaacccaggugaa

SEQ ID NO: 840079 - RNA, 19 nt, Homo sapiens
  misc_RNA (1)...(19): siRNA sense strand
cauaauggcucaguguuua

SEQ ID NO: 840080 - RNA, 19 nt, Homo sapiens
  misc_RNA (1)...(19): siRNA sense strand
gaaagugugccuugaauca

SEQ ID NO: 840081 - RNA, 19 nt, Homo sapiens
  misc_RNA (1)...(19): siRNA sense strand
gaagauaagaacacaaaga

SEQ ID NO: 840082 - RNA, 19 nt, Homo sapiens
  misc_RNA (1)...(19): siRNA sense strand
aggaagagcuuaugcaaga

SEQ ID NO: 840083 - RNA, 19 nt, Homo sapiens
  misc_RNA (1)...(19): siRNA sense strand
gaaggaagaggaaagguau

SEQ ID NO: 840084 - RNA, 19 nt, Homo sapiens
  misc_RNA (1)...(19): siRNA sense strand
gagguuggcugaacugaca

SEQ ID NO: 840085 - RNA, 19 nt, Homo sapiens
  misc_RNA (1)...(19): siRNA sense strand
ccaagaaucugugcaguca

SEQ ID NO: 840086 - RNA, 19 nt, Homo sapiens
  misc_RNA (1)...(19): siRNA sense strand
ggaaagguaugagagaauc

SEQ ID NO: 840087 - RNA, 19 nt, Homo sapiens
  misc_RNA (1)...(19): siRNA sense strand
guugugggcugguaucauu

SEQ ID NO: 840088 - RNA, 19 nt, Homo sapiens
  misc_RNA (1)...(19): siRNA sense strand
gaggaaagguaugagagaa

SEQ ID NO: 840089 - RNA, 19 nt, Homo sapiens
  misc_RNA (1)...(19): siRNA sense strand
cgucagaauuguucacauu

SEQ ID NO: 840090 - RNA, 19 nt, Homo sapiens
  misc_RNA (1)...(19): siRNA sense strand
gcucaguguuuaccaagaa

SEQ ID NO: 840091 - RNA, 19 nt, Homo sapiens
  misc_RNA (1)...(19): siRNA sense strand
caguagagcugcccaagau

SEQ ID NO: 840092 - RNA, 19 nt, Homo sapiens
  misc_RNA (1)...(19): siRNA sense strand
caacagaggcagagagguu

SEQ ID NO: 840093 - RNA, 19 nt, Homo sapiens
  misc_RNA (1)...(19): siRNA sense strand
gaaggaccgaguagaaauu

SEQ ID NO: 840094 - RNA, 19 nt, Homo sapiens
  misc_RNA (1)...(19): siRNA sense strand
gcacagagaaggaggaagu
